United States Patent Application Publication US 2024/0327476 A1 - sequence listing, part 45

SEQ ID NO: 83105 - DNA, 495 bp, synthetic construct; identical to SEQ ID NO: 83104
  misc_feature 1..495: note = Description of Artificial Sequence: Synthetic coding sequence
  source 1..495: mol_type = other DNA

SEQ ID NO: 83106 - DNA, 1989 bp, synthetic construct
  misc_feature 1..1989: note = Description of Artificial Sequence: Synthetic coding sequence
  source 1..1989: mol_type = other DNA
atgctgcagggcggcgaggagagcagactgttcggcagcctgctgtggaccctgccctggagaggcctgttcatgagaaacaccgtgcaggagcacagcgccttcagattcgccgtgcagctgtacaacaccaaccagaacaccaccgagaagcccttccacctgaactaccacgtggaccacctggacagcagcaacagcttcagcgtgaccaacgccttctgcagccagttcagcagaggcgtgtacgccatcttcggcttctacgaccagatgagcatgaacaccctgaccagcttctgcggcgccctgcacaccagcttcgtgacccccagcttccccaccgacgccgacgtgcagttcgtgatccagatgagacccgccctgaagggcgccatcctgagcctgctgggccactacaagtgggagaagttcgtgtacctgtacgacaccgagagaggcttcagcatcctgcaggccatcatggaggccgccgtgcagaacaactggcaggtgaccgccagaagcgtgggcaacatcaaggacgtgcaggagttcagaagaatcatcgaggagatggacagaagacaggagaagagatacctgatcgactgcgaggtggagagaatcaacaccatcctggagcaggtggtgatcctgggcaagcacagcagaggctaccactacatgctggccaacctgggcttcaccgacatcctgctggagagagtgatgcacggcggcgccaacatcaccggcttccagatcgtgaacaacgagaaccccatggtgcagcagttcatccagagatgggtgagactggacgagagagagttccccgaggccaagaacgcccccctgaagtacaccagcgccctgacccacgacgccatcctggtgatcgccgaggccttcagatacctgagaagacagagagtggacgtgagcagaagaggcagcgccggcgactgcctggccaaccccgccgtgccctggagccagggcatcgacatcgagagagccctgaagatggtgcaggtgcagggcatgaccggcaacatccagttcgacacctacggcagaagaaccaactacaccatcgacgtgtacgagatgaaggtgagcggcagcagaaaggccggctactggaacgagtacgagagattcgtgcccttcagcgaccagcagatcagcaacgacagcgccagcagcgagaacagaaccatcgtggtgaccaccatcctggagagcccctacgtgatgtacaagaagaaccacgagcagctggagggcaacgagagatacgagggctactgcgtggacctggcctacgagatcgccaagcacgtgagaatcaagtacaagctgagcatcgtgggcgacggcaagtacggcgccagagaccccgagaccaagatctggaacggcatggtgggcgagctggtgtacggcagagccgacatcgccgtggcccccctgaccatcaccctggtgagagaggaggtgatcgacttcagcaagcccttcatgagcctgggcatcagcatcatgatcaagaagccccagaagagcaagcccggcgtgttcagcttcctggaccccctggcctacgagatctggatgtgcatcgtgttcgcctacatcggcgtgagcgtggtgctgttcctggtgagcagattcagcccctacgagtggcacctggaggacaacaacgaggagcccagagacccccagagcccccccgacccccccaacgagttcggcatcttcaacagcctgtggttcagcctgggcgccttcatgcagcagggctgcgacatcagccccagattcgtgttcgtggcctacagcatgccccactgcatcctgtggagctacagcatccacgtgcacatggtgttcatccacctgaacagcagattcttcagcttcaacatccccagcaacgacagactgagcagcagccactgcgtgtgcctgtgcccctag

SEQ ID NO: 83107 - DNA, 2475 bp, synthetic construct
  misc_feature 1..2475: note = Description of Artificial Sequence: Synthetic coding sequence
  source 1..2475: mol_type = other DNA
atggccagacagaagaagatgggccagagcgtgctgagagccgtgttcttcctggtgctgggcctgctgggccacagccacggcggcttccccaacaccatcagcatcggcggcctgttcatgagaaacaccgtgcaggagcacagcgccttcagattcgccgtgcagctgtacaacaccaaccagaacaccaccgagaagcccttccacctgaactaccacgtggaccacctggacagcagcaacagcttcagcgtgaccaacgccttctgcagccagttcagcagaggcgtgtacgccatcttcggcttctacgaccagatgagcatgaacaccctgaccagcttctgcggcgccctgcacaccagcttcgtgacccccagcttccccaccgacgccgacgtgcagttcgtgatccagatgagacccgccctgaagggcgccatcctgagcctgctgggccactacaagtgggagaagttcgtgtacctgtacgacaccgagagaggcttcagcatcctgcaggccatcatggaggccgccgtgcagaacaactggcaggtgaccgccagaagcgtgggcaacatcaaggacgtgcaggagttcagaagaatcatcgaggagatggacagaagacaggagaagagatacctgatcgactgcgaggtggagagaatcaacaccatcctggagcaggtggtgatcctgggcaagcacagcagaggctaccactacatgctggccaacctgggcttcaccgacatcctgctggagagagtgatgcacggcggcgccaacatcaccggcttccagatcgtgaacaacgagaaccccatggtgcagcagttcatccagagatgggtgagactggacgagagagagttccccgaggccaagaacgcccccctgaagtacaccagcgccctgacccacgacgccatcctggtgatcgccgaggccttcagatacctgagaagacagagagtggacgtgagcagaagaggcagcgccggcgactgcctggccaaccccgccgtgccctggagccagggcatcgacatcgagagagccctgaagatggtgcaggtgcagggcatgaccggcaacatccagttcgacacctacggcagaagaaccaactacaccatcgacgtgtacgagatgaaggtgagcggcagcagaaaggccggctactggaacgagtacgagagattcgtgcccttcagcgaccagcagatcagcaacgacagcgccagcagcgagaacagaaccatcgtggtgaccaccatcctggagagcccctacgtgatgtacaagaagaaccacgagcagctggagggcaacgagagatacgagggctactgcgtggacctggcctacgagatcgccaagcacgtgagaatcaagtacaagctgagcatcgtgggcgacggcaagtacggcgccagagaccccgagaccaagatctggaacggcatggtgggcgagctggtgtacggcagagccgacatcgccgtggcccccctgaccatcaccctggtgagagaggaggtgatcgacttcagcaagcccttcatgagcctgggcatcagcatcatgatcaagaagccccagaagagcaagcccggcgtgttcagcttcctggaccccctggcctacgagatctggatgtgcatcgtgttcgcctacatcggcgtgagcgtggtgctgttcctggtgagcagattcagcccctacgagtggcacctggaggacaacaacgaggagcccagagacccccagagcccccccgacccccccaacgagttcggcatcttcaacagcctgtggttcagcctgggcgccttcatgcagcagggctgcgacatcagccccagaagcctgagcggcagaatcgtgggcggcgtgtggtggttcttcaccctgatcatcatcagcagctacaccgccaacctggccgccttcctgaccgtggagagaatggtgagccccatcgagagcgccgaggacctggccaagcagaccgagatcgcctacggcaccctggacagcggcagcaccaaggagttcttcagaagaagcaagatcgccgtgtacgagaagatgtggagctacatgaagagcgccgagcccagcgtgttcaccaagaccaccgccgacggcgtggccagagtgagaaagagcaagggcaagttcgccttcctgctggagagcaccatgaacgagtacatcgagcagagaaagccctgcgacaccatgaaggtgggcggcaacctggacagcaagggctacggcgtggccacccccaagggcagcgccctgagaaacgccgtgaacctggccgtgctgaagctgaacgagcagggcctgctggacaagctgaagaacaagtggtggtacgacaagggcgagtgcggcagcggcggcggcgacagcaagaacgcctgcaagccctgcagcatcgagacccagtag

SEQ ID NO: 83108 - DNA, 2709 bp, synthetic construct
  misc_feature 1..2709: note = Description of Artificial Sequence: Synthetic coding sequence
  source 1..2709: mol_type = other DNA
atgagaatcatcagcagacagatcgtgctgctgttcagcggcttctggggcctggccatgggcgccttccccagcagcgtgcagatcggcggcctgttcatcagaaacaccgaccaggagtacaccgccttcagactggccatcttcctgcacaacaccagccccaacgccagcgaggcccccttcaacctggtgccccacgtggacaacatcgagaccgccaacagcttcgccgtgaccaacgccttctgcagccagtacagcagaggcgtgttcgccatcttcggcctgtacgacaagagaagcgtgcacaccctgaccagcttctgcagcgccctgcacatcagcctgatcacccccagcttccccaccgagggcgagagccagttcgtgctgcagctgagacccagcctgagaggcgccctgctgagcctgctggaccactacgagtggaactgcttcgtgttcctgtacgacaccgacagaggctacagcatcctgcaggccatcatggagaaggccggccagaacggctggcacgtgagcgccatctgcgtggagaacttcaacgacgtgagctacagacagctgctggaggagctggacagaagacaggagaagaagttcgtgatcgactgcgagatcgagagactgcagaacatcctggagcagatcgtgagcgtgggcaagcacgtgaagggctaccactacatcatcgccaacctgggcttcaaggacatcagcctggagagattcatccacggcggcgccaacgtgaccggcttccagctggtggacttcaacacccccatggtgatcaagctgatggacagatggaagaagctggaccagagagagtaccccggcagcgagaccccccccaagtacaccagcgccctgacctacgacggcgtgctggtgatggccgagaccttcagaagcctgagaagacagaagatcgacatcagcagaagaggcaacgccggcgactgcctggccaaccccgccgccccctggggccagggcatcgacatggagagaaccctgaagcaggtgagaatccagggcctgaccggcaacgtgcagttcgaccactacggcagaagagtgaactacaccatggacgtgttcgagctgaagagcaccggccccagaaaggtgggctactggaacgacatggacaagctggtgctgatccaggacgtgcccaccctgggcaacgacaccgccgccatcgagaacagaaccgtggtggtgaccaccatcatggagagcccctacgtgatgtacaagaagaaccacgagatgttcgagggcaacgacaagtacgagggctactgcgtggacctggccagcgagatcgccaagcacatcggcatcaagtacaagatcgccatcgtgcccgacggcaagtacggcgccagagacgccgacaccaagatctggaacggcatggtgggcgagctggtgtacggcaaggccgagatcgccatcgcccccctgaccatcaccctggtgagagaggaggtgatcgacttcagcaagcccttcatgagcctgggcatcagcatcatgatcaagaagccccagaagagcaagcccggcgtgttcagcttcctggaccccctggcctacgagatctggatgtgcatcgtgttcgcctacatcggcgtgagcgtggtgctgttcctggtgagcagattcagcccctacgagtggcacaccgaggagcccgaggacggcaaggagggccccagcgaccagccccccaacgagttcggcatcttcaacagcctgtggttcagcctgggcgccttcatgcagcagggctgcgacatcagccccagaagcctgagcggcagaatcgtgggcggcgtgtggtggttcttcaccctgatcatcatcagcagctacaccgccaacctggccgccttcctgaccgtggagagaatggtgagccccatcgagagcgccgaggacctggccaagcagaccgagatcgcctacggcaccctggacagcggcagcaccaaggagttcttcagaagaagcaagatcgccgtgtacgagaagatgtggacctacatgagaagcgccgagcccagcgtgttcaccagaaccaccgccgagggcgtggccagagtgagaaagagcaagggcaagttcgccttcctgctggagagcaccatgaacgagtacatcgagcagagaaagccctgcgacaccatgaaggtgggcggcaacctggacagcaagggctacggcgtggccacccccaagggcagcagcctgagaacccccgtgaacctggccgtgctgaagctgagcgaggccggcgtgctggacaagctgaagaacaagtggtggtacgacaagggcgagtgcggccccaaggacagcggcagcaaggacaagaccagcgccctgagcctgagcaacgtggccggcgtgttctacatcctggtgggcggcctgggcctggccatgctggtggccctgatcgagttctgctacaagagcagagccgaggccaagagaatgaagctgaccttcagcgaggccatcagaaacaaggccagactgagcatcaccggcagcgtgggcgagaacggcagagtgctgacccccgactgccccaaggccgtgcacaccggcaccgccatcagacagagcagcggcctggccgtgatcgccagcgacctgccctag

SEQ ID NO: 83109 - DNA, 1302 bp, synthetic construct
  misc_feature 1..1302: note = Description of Artificial Sequence: Synthetic coding sequence
  source 1..1302: mol_type = other DNA
atgagaatcatcagcagacagatcgtgctgctgttcagcggcttctggggcctggccatgggcgccttccccagcagcgtgcagatcggcggcctgttcatcagaaacaccgaccaggagtacaccgccttcagactggccatcttcctgcacaacaccagccccaacgccagcgaggcccccttcaacctggtgccccacgtggacaacatcgagaccgccaacagcttcgccgtgaccaacgccttctgcagccagtacagcagaggcgtgttcgccatcttcggcctgtacgacaagagaagcgtgcacaccctgaccagcttctgcagcgccctgcacatcagcctgatcacccccagcttccccaccgagggcgagagccagttcgtgctgcagctgagacccagcctgagaggcgccctgctgagcctgctggaccactacgagtggaactgcttcgtgttcctgtacgacaccgacagaggctacagcatcctgcaggccatcatggagaaggccggccagaacggctggcacgtgagcgccatctgcgtggagaacttcaacgacgtgagctacagacagctgctggaggagctggacagaagacaggagaagaagttcgtgatcgactgcgagatcgagagactgcagaacatcctggagcagatcgtgagcgtgggcaagcacgtgaagggctaccactacatcatcgccaacctgggcttcaaggacatcagcctggagagattcatccacggcggcgccaacgtgaccggcttccagctggtggacttcaacacccccatggtgatcaagctgatggacagatggaagaagctggaccagagagagtaccccggcagcgagaccccccccaagtacaccagcgccctgacctacgacggcgtgctggtgatggccgagaccttcagaagcctgagaagacagaagatcgacatcagcagaagaggcaacgccggcgactgcctggccaaccccgccgccccctggggccagggcatcgacatggagagaaccctgaagcaggtgagaatccagggcctgaccggcaacgtgcagttcgaccactacggcagaagagtgaactacaccatggacgtgttcgagctgaagagcaccggccccagaaaggtgggctactggaacgacatggacaagctggtgctgatccaggacgtgcccaccctgggcaacgacaccgccgccatcgagaacagaaccgtggtggtgaccaccatcatgcccctgatgaagaaccccatcctgagaaactag

SEQ ID NO: 83110 - DNA, 2655 bp, synthetic construct
  misc_feature 1..2655: note = Description of Artificial Sequence: Synthetic coding sequence
  source 1..2655: mol_type = other DNA
atgagaatcatcagcagacagatcgtgctgctgttcagcggcttctggggcctggccatgggcgccttccccagcagcgtgcagatcggcggcctgttcatcagaaacaccgaccaggagtacaccgccttcagactggccatcttcctgcacaacaccagccccaacgccagcgaggcccccttcaacctggtgccccacgtggacaacatcgagaccgccaacagcttcgccgtgaccaacgccttctgcagccagtacagcagaggcgtgttcgccatcttcggcctgtacgacaagagaagcgtgcacaccctgaccagcttctgcagcgccctgcacatcagcctgatcacccccagcttccccaccgagggcgagagccagttcgtgctgcagctgagacccagcctgagaggcgccctgctgagcctgctggaccactacgagtggaactgcttcgtgttcctgtacgacaccgacagaggctacagcatcctgcaggccatcatggagaaggccggccagaacggctggcacgtgagcgccatctgcgtggagaacttcaacgacgtgagctacagacagctgctggaggagctggacagaagacaggagaagaagttcgtgatcgactgcgagatcgagagactgcagaacatcctggagcagatcgtgagcgtgggcaagcacgtgaagggctaccactacatcatcgccaacctgggcttcaaggacatcagcctggagagattcatccacggcggcgccaacgtgaccggcttccagctggtggacttcaacacccccatggtgatcaagctgatggacagatggaagaagctggaccagagagagtaccccggcagcgagaccccccccaagtacaccagcgccctgacctacgacggcgtgctggtgatggccgagaccttcagaagcctgagaagacagaagatcgacatcagcagaagaggcaacgccggcgactgcctggccaaccccgccgccccctggggccagggcatcgacatggagagaaccctgaagcaggtgagaatccagggcctgaccggcaacgtgcagttcgaccactacggcagaagagtgaactacaccatggacgtgttcgagctgaagagcaccggccccagaaaggtgggctactggaacgacatggacaagctggtgctgatccaggacgtgcccaccctgggcaacgacaccgccgccatcgagaacagaaccgtggtggtgaccaccatcatggagagcccctacgtgatgtacaagaagaaccacgagatgttcgagggcaacgacaagtacgagggctactgcgtggacctggccagcgagatcgccaagcacatcggcatcaagtacaagatcgccatcgtgcccgacggcaagtacggcgccagagacgccgacaccaagatctggaacggcatggtgggcgagctggtgtacggcaaggccgagatcgccatcgcccccctgaccatcaccctggtgagagaggaggtgatcgacttcagcaagcccttcatgagcctgggcatcagcatcatgatcaagaagccccagaagagcaagcccggcgtgttcagcttcctggaccccctggcctacgagatctggatgtgcatcgtgttcgcctacatcggcgtgagcgtggtgctgttcctggtgagcagattcagcccctacgagtggcacaccgaggagcccgaggacggcaaggagggccccagcgaccagccccccaacgagttcggcatcttcaacagcctgtggttcagcctgggcgccttcatgcagcagggctgcgacatcagccccagaagcctgagcggcagaatcgtgggcggcgtgtggtggttcttcaccctgatcatcatcagcagctacaccgccaacctggccgccttcctgaccgtggagagaatggtgagccccatcgagagcgccgaggacctggccaagcagaccgagatcgcctacggcaccctggacagcggcagcaccaaggagttcttcagaagaagcaagatcgccgtgtacgagaagatgtggacctacatgagaagcgccgagcccagcgtgttcaccagaaccaccgccgagggcgtggccagagtgagaaagagcaagggcaagttcgccttcctgctggagagcaccatgaacgagtacatcgagcagagaaagccctgcgacaccatgaaggtgggcggcaacctggacagcaagggctacggcgtggccacccccaagggcagcagcctgagaaacgccgtgaacctggccgtgctgaagctgaacgagcagggcctgctggacaagctgaagaacaagtggtggtacgacaagggcgagtgcggcagcggcggcggcgacagcaaggacaagaccagcgccctgagcctgagcaacgtggccggcgtgttctacatcctggtgggcggcctgggcctggccatgctggtggccctgatcgagttctgctacaagagcagagccgaggccaagagaatgaaggtggccaagagcgcccagaccttcaaccccaccagcagccagaacacccagaacctggccacctacagagagggctacaacgtgtacggcaccgagagcatcaagatctag

SEQ ID NO: 83111 - DNA, 1302 bp, synthetic construct; identical to SEQ ID NO: 83109
  misc_feature 1..1302: note = Description of Artificial Sequence: Synthetic coding sequence
  source 1..1302: mol_type = other DNA

SEQ ID NO: 83112 - DNA, 2655 bp, synthetic construct; identical to SEQ ID NO: 83110
  misc_feature 1..2655: note = Description of Artificial Sequence: Synthetic coding sequence
  source 1..2655: mol_type = other DNA

SEQ ID NO: 83113 - DNA, 249 bp, synthetic construct
  misc_feature 1..249: note = Description of Artificial Sequence: Synthetic coding sequence
  source 1..249: mol_type = other DNA
atgagaatcatcagcagacagatcgtgctgctgttcagcggcttctggggcctggccatgggcgccttccccagcagcgtgcagatcggcggcctgttcatcagaaacaccgaccaggagtacaccgccttcagactggccatcttcctgcacaacaccagccccaacgccagcgaggcccccttcaacctggtgccccacgtggacaacatcgagaccgccaacagcttcgccgtgaccaacgcctag

SEQ ID NO: 83114 - DNA, 249 bp, synthetic construct; identical to SEQ ID NO: 83113
  misc_feature 1..249: note = Description of Artificial Sequence: Synthetic coding sequence
  source 1..249: mol_type = other DNA

SEQ ID NO: 83115 - DNA, 2709 bp, synthetic construct; identical to SEQ ID NO: 83108
  misc_feature 1..2709: note = Description of Artificial Sequence: Synthetic coding sequence
  source 1..2709: mol_type = other DNA

SEQ ID NO: 83116 - DNA, 360 bp, synthetic construct
  misc_feature 1..360: note = Description of Artificial Sequence: Synthetic coding sequence
  source 1..360: mol_type = other DNA
atgagaagcgccgagcccagcgtgttcaccagaaccaccgccgagggcgtggccagagtgagaaagagcaagggcaagttcgccttcctgctggagagcaccatgaacgagtacatcgagcagagaaagccctgcgacaccatgaaggtgggcggcaacctggacagcaagggctacggcgtggccacccccaagggcagcagcctgagaaacgccgtgaacctggccgtgctgaagctgaacgagcagggcctgctggacaagctgaagaacaagtggtggtacgacaagggcgagtgcggcagcggcggcggcgacagcaagaacagctgcaagccctgcagattcgagacccagtag

SEQ ID NO: 83117 - DNA, 2721 bp, synthetic construct
  misc_feature 1..2721: note = Description of Artificial Sequence: Synthetic coding sequence
  source 1..2721: mol_type = other DNA
atgcagcacatcttcgccttcttctgcaccggcttcctgggcgccgtggtgggcgccaacttccccaacaacatccagatcggcggcctgttccccaaccagcagagccaggagcacgccgccttcagattcgccctgagccagctgaccgagccccccaagctgctgccccagatcgacatcgtgaacatcagcgacagcttcgagatgacctacagattctgcagccagttcagcaagggcgtgtacgccatcttcggcttctacgagagaagaaccgtgaacatgctgaccagcttctgcggcgccctgcacgtgtgcttcatcacccccagcttccccgtggacaccagcaaccagttcgtgctgcagctgagacccgagctgcaggacgccctgatcagcatcatcgaccactacaagtggcagaagttcgtgtacatctacgacgccgacagaggcctgagcgtgctgcagaaggtgctggacaccgccgccgagaagaactggcaggtgaccgccgtgaacatcctgaccaccaccgaggagggctacagaatgctgttccaggacctggagaagaagaaggagagactggtggtggtggactgcgagagcgagagactgaacgccatcctgggccagatcatcaagctggagaagaacggcatcggctaccactacatcctggccaacctgggcttcatggacatcgacctgaacaagttcaaggagagcggcgccaacgtgaccggcttccagctggtgaactacaccgacaccatccccgccaagatcatgcagcagtggaagaacagcgacgccagagaccacaccagagtggactggaagagacccaagtacaccagcgccctgacctacgacggcgtgaaggtgatggccgaggccttccagagcctgagaagacagagaatcgacatcagcagaagaggcaacgccggcgactgcctggccaaccccgccgtgccctggggccagggcatcgacatccagagagccctgcagcaggtgagattcgagggcctgaccggcaacgtgcagttcaacgagaagggcagaagaaccaactacaccctgcacgtgatcgagatgaagcacgacggcatcagaaagatcggctactggaacgaggacgacaagttcgtgcccgccgccaccgacgcccaggccggcggcgacaacagcagcgtgcagaacagaacctacatcgtgaccaccatcctggaggacccctacgtgatgctgaagaagaacgccaaccagttcgagggcaacgacagatacgagggctactgcgtggagctggccgccgagatcgccaagcacgtgggctacagctacagactggagatcgtgagcgacggcaagtacggcgccagagaccccgacaccaaggcctggaacggcatggtgggcgagctggtgtacggcagagccgacgtggccgtggcccccctgaccatcaccctggtgagagaggaggtgatcgacttcagcaagcccttcatgagcctgggcatcagcatcatgatcaagaagccccagaagagcaagcccggcgtgttcagcttcctggaccccctggcctacgagatctggatgtgcatcgtgttcgcctacatcggcgtgagcgtggtgctgttcctggtgagcagattcagcccctacgagtggcacagcgaggagttcgaggagggcagagaccagaccaccagcgaccagagcaacgagttcggcatcttcaacagcctgtggttcagcctgggcgccttcatgcagcagggctgcgacatcagccccagaagcctgagcggcagaatcgtgggcggcgtgtggtggttcttcaccctgatcatcatcagcagctacaccgccaacctggccgccttcctgaccgtggagagaatggtgagccccatcgagagcgccgaggacctggccaagcagaccgagatcgcctacggcaccctggaggccggcagcaccaaggagttcttcagaagaagcaagatcgccgtgttcgagaagatgtggacctacatgaagagcgccgagcccagcgtgttcgtgagaaccaccgaggagggcatgatcagagtgagaaagagcaagggcaagtacgcctacctgctggagagcaccatgaacgagtacatcgagcagagaaagccctgcgacaccatgaaggtgggcggcaacctggacagcaagggctacggcatcgccacccccaagggcagcgccctgagaaaccccgtgaacctggccgtgctgaagctgaacgagcagggcctgctggacaagctgaagaacaagtggtggtacgacaagggcgagtgcggcagcggcggcggcgacagcaaggacaagaccagcgccctgagcctgagcaacgtggccggcgtgttctacatcctgatcggcggcctgggcctggccatgctggtggccctgatcgagttctgctacaagagcagaagcgagagcaagagaatgaagggcttctgcctgatcccccagcagagcatcaacgaggccatcagaaccagcaccctgcccagaaacagcggcgccggcgccagcagcggcggcagcggcgagaacggcagagtggtgagccacgacttccccaagagcatgcagagcatcccctgcatgagccacagcagcggcatgcccctgggcgccaccggcctgtag

SEQ ID NO: 83118 - DNA, 2721 bp, synthetic construct
  misc_feature 1..2721: note = Description of Artificial Sequence: Synthetic coding sequence
  source 1..2721: mol_type = other DNA
atgcagcacatcttcgccttcttctgcaccggcttcctgggcgccgtggtgggcgccaacttccccaacaacatccagatcggcggcctgttccccaaccagcagagccaggagcacgccgccttcagattcgccctgagccagctgaccgagccccccaagctgctgccccagatcgacatcgtgaacatcagcgacagcttcgagatgacctacagattctgcagccagttcagcaagggcgtgtacgccatcttcggcttctacgagagaagaaccgtgaacatgctgaccagcttctgcggcgccctgcacgtgtgcttcatcacccccagcttccccgtggacaccagcaaccagttcgtgctgcagctgagacccgagctgcaggacgccctgatcagcatcatcgaccactacaagtggcagaagttcgtgtacatctacgacgccgacagaggcctgagcgtgctgcagaaggtgctggacaccgccgccgagaagaactggcaggtgaccgccgtgaacatcctgaccaccaccgaggagggctacagaatgctgttccaggacctggagaagaagaaggagagactggtggtggtggactgcgagagcgagagactgaacgccatcctgggccagatcatcaagctggagaagaacggcatcggctaccactacatcctggccaacctgggcttcatggacatcgacctgaacaagttcaaggagagcggcgccaacgtgaccggcttccagctggtgaactacaccgacaccatccccgccaagatcatgcagcagtggaagaacagcgacgccagagaccacaccagagtggactggaagagacccaagtacaccagcgccctgacctacgacggcgtgaaggtgatggccgaggccttccagagcctgagaagacagagaatcgacatcagcagaagaggcaacgccggcgactgcctggccaaccccgccgtgccctggggccagggcatcgacatccagagagccctgcagcaggtgagattcgagggcctgaccggcaacgtgcagttcaacgagaagggcagaagaaccaactacaccctgcacgtgatcgagatgaagcacgacggcatcagaaagatcggctactggaacgaggacgacaagttcgtgcccgccgccaccgacgcccaggccggcggcgacaacagcagcgtgcagaacagaacctacatcgtgaccaccatcctggaggacccctacgtgatgctgaagaagaacgccaaccagttcgagggcaacgacagatacgagggctactgcgtggagctggccgccgagatcgccaagcacgtgggctacagctacagactggagatcgtgagcgacggcaagtacggcgccagagaccccgacaccaaggcctggaacggcatggtgggcgagctggtgtacggcagagccgacgtggccgtggcccccctgaccatcaccctggtgagagaggaggtgatcgacttcagcaagcccttcatgagcctgggcatcagcatcatgatcaagaagccccagaagagcaagcccggcgtgttcagcttcctggaccccctggcctacgagatctggatgtgcatcgtgttcgcctacatcggcgtgagcgtggtgctgttcctggtgagcagattcagcccctacgagtggcacagcgaggagttcgaggagggcagagaccagaccaccagcgaccagagcaacgagttcggcatcttcaacagcctgtggttcagcctgggcgccttcatgcagcagggctgcgacatcagccccagaagcctgagcggcagaatcgtgggcggcgtgtggtggttcttcaccctgatcatcatcagcagctacaccgccaacctggccgccttcctgaccgtggagagaatggtgagccccatcgagagcgccgaggacctggccaagcagaccgagatcgcctacggcaccctggaggccggcagcaccaaggagttcttcagaagaagcaagatcgccgtgttcgagaagatgtggacctacatgaagagcgccgagcccagcgtgttcgtgagaaccaccgaggagggcatgatcagagtgagaaagagcaagggcaagtacgcctacctgctggagagcaccatgaacgagtacatcgagcagagaaagccctgcgacaccatgaaggtgggcggcaacctggacagcaagggctacggcatcgccacccccaagggcagcgccctgagaggccccgtgaacctggccgtgctgaagctgagcgagcagggcgtgctggacaagctgaagagcaagtggtggtacgacaagggcgagtgcggcagcaaggacagcggcagcaaggacaagaccagcgccctgagcctgagcaacgtggccggcgtgttctacatcctgatcggcggcctgggcctggccatgctggtggccctgatcgagttctgctacaagagcagaagcgagagcaagagaatgaagggcttctgcctgatcccccagcagagcatcaacgaggccatcagaaccagcaccctgcccagaaacagcggcgccggcgccagcagcggcggcagcggcgagaacggcagagtggtgagccacgacttccccaagagcatgcagagcatcccctgcatgagccacagcagcggcatgcccctgggcgccaccggcctgtag

SEQ ID NO: 83119 - DNA, 2751 bp, synthetic construct
  misc_feature 1..2751: note = Description of Artificial Sequence: Synthetic coding sequence
  source 1..2751: mol_type = other DNA
atgtgctgcagcacccacctgttccagcccctgcagctggccggcggcctggagtggccctggagcaacctgctgtgcttcctgacccccgtgaagctgcaccccgaggtgtggggcctgttccccaaccagcagagccaggagcacgccgccttcagattcgccctgagccagctgaccgagccccccaagctgctgccccagatcgacatcgtgaacatcagcgacagcttcgagatgacctacagattctgcagccagttcagcaagggcgtgtacgccatcttcggcttctacgagagaagaaccgtgaacatgctgaccagcttctgcggcgccctgcacgtgtgcttcatcacccccagcttccccgtggacaccagcaaccagttcgtgctgcagctgagacccgagctgcaggacgccctgatcagcatcatcgaccactacaagtggcagaagttcgtgtacatctacgacgccgacagaggcctgagcgtgctgcagaaggtgctggacaccgccgccgagaagaactggcaggtgaccgccgtgaacatcctgaccaccaccgaggagggctacagaatgctgttccaggacctggagaagaagaaggagagactggtggtggtggactgcgagagcgagagactgaacgccatcctgggccagatcatcaagctggagaagaacggcatcggctaccactacatcctggccaacctgggcttcatggacatcgacctgaacaagttcaaggagagcggcgccaacgtgaccggcttccagctggtgaactacaccgacaccatccccgccaagatcatgcagcagtggaagaacagcgacgccagagaccacaccagagtggactggaagagacccaagtacaccagcgccctgacctacgacggcgtgaaggtgatggccgaggccttccagagcctgagaagacagagaatcgacatcagcagaagaggcaacgccggcgactgcctggccaaccccgccgtgccctggggccagggcatcgacatccagagagccctgcagcaggtgagattcgagggcctgaccggcaacgtgcagttcaacgagaagggcagaagaaccaactacaccctgcacgtgatcgagatgaagcacgacggcatcagaaagatcggctactggaacgaggacgacaagttcgtgcccgccgccaccgacgcccaggccggcggcgacaacagcagcgtgcagaacagaacctacatcgtgaccaccatcctggaggacccctacgtgatgctgaagaagaacgccaaccagttcgagggcaacgacagatacgagggctactgcgtggagctggccgccgagatcgccaagcacgtgggctacagctacagactggagatcgtgagcgacggcaagtacggcgccagagaccccgacaccaaggcctggaacggcatggtgggcgagctggtgtacggcagagccgacgtggccgtggcccccctgaccatcaccctggtgagagaggaggtgatcgacttcagcaagcccttcatgagcctgggcatcagcatcatgatcaagaagccccagaagagcaagcccggcgtgttcagcttcctggaccccctggcctacgagatctggatgtgcatcgtgttcgcctacatcggcgtgagcgtggtgctgttcctggtgagcagattcagcccctacgagtggcacagcgaggagttcgaggagggcagagaccagaccaccagcgaccagagcaacgagttcggcatcttcaacagcctgtggttcagcctgggcgccttcatgcagcagggctgcgacatcagccccagaagcctgagcggcagaatcgtgggcggcgtgtggtggttcttcaccctgatcatcatcagcagctacaccgccaacctggccgccttcctgaccgtggagagaatggtgagccccatcgagagcgccgaggacctggccaagcagaccgagatcgcctacggcaccctggaggccggcagcaccaaggagttcttcagaagaagcaagatcgccgtgttcgagaagatgtggacctacatgaagagcgccgagcccagcgtgttcgtgagaaccaccgaggagggcatgatcagagtgagaaagagcaagggcaagtacgcctacctgctggagagcaccatgaacgagtacatcgagcagagaaagccctgcgacaccatgaaggtgggcggcaacctggacagcaagggctacggcatcgccacccccaagggcagcgccctgagaggccccgtgaacctggccgtgctgaagctgagcgagcagggcgtgctggacaagctgaagagcaagtggtggtacgacaagggcgagtgcggcagcaaggacagcggcagcaaggacaagaccagcgccctgagcctgagcaacgtggccggcgtgttctacatcctgatcggcggcctgggcctggccatgctggtggccctgatcgagttctgctacaagagcagaagcgagagcaagagaatgaagggcttctgcctgatcccccagcagagcatcaacgaggccatcagaaccagcaccctgcccagaaacagcggcgccggcgccagcagcggcggcagcggcgagaacggcagagtggtgagccacgacttccccaagagcatgcagagcatcccctgcatgagccacagcagcggcatgcccctgggcgccaccggcctgtag

SEQ ID NO: 83120 - DNA, 2481 bp, synthetic construct
  misc_feature 1..2481: note = Description of Artificial Sequence: Synthetic coding sequence
  source 1..2481: mol_type = other DNA
atgcagcacatcttcgccttcttctgcaccggcttcctgggcgccgtggtgggcgccaacttccccaacaacatccagatcggcggcctgttccccaaccagcagagccaggagcacgccgccttcagattcgccctgagccagctgaccgagccccccaagctgctgccccagatcgacatcgtgaacatcagcgacagcttcgagatgacctacagatgcctgagcgtgctgcagaaggtgctggacaccgccgccgagaagaactggcaggtgaccgccgtgaacatcctgaccaccaccgaggagggctacagaatgctgttccaggacctggagaagaagaaggagagactggtggtggtggactgcgagagcgagagactgaacgccatcctgggccagatcatcaagctggagaagaacggcatcggctaccactacatcctggccaacctgggcttcatggacatcgacctgaacaagttcaaggagagcggcgccaacgtgaccggcttccagctggtgaactacaccgacaccatccccgccaagatcatgcagcagtggaagaacagcgacgccagagaccacaccagagtggactggaagagacccaagtacaccagcgccctgacctacgacggcgtgaaggtgatggccgaggccttccagagcctgagaagacagagaatcgacatcagcagaagaggcaacgccggcgactgcctggccaaccccgccgtgccctggggccagggcatcgacatccagagagccctgcagcaggtgagattcgagggcctgaccggcaacgtgcagttcaacgagaagggcagaagaaccaactacaccctgcacgtgatcgagatgaagcacgacggcatcagaaagatcggctactggaacgaggacgacaagttcgtgcccgccgccaccgacgcccaggccggcggcgacaacagcagcgtgcagaacagaacctacatcgtgaccaccatcctggaggacccctacgtgatgctgaagaagaacgccaaccagttcgagggcaacgacagatacgagggctactgcgtggagctggccgccgagatcgccaagcacgtgggctacagctacagactggagatcgtgagcgacggcaagtacggcgccagagaccccgacaccaaggcctggaacggcatggtgggcgagctggtgtacggcagagccgacgtggccgtggcccccctgaccatcaccctggtgagagaggaggtgatcgacttcagcaagcccttcatgagcctgggcatcagcatcatgatcaagaagccccagaagagcaagcccggcgtgttcagcttcctggaccccctggcctacgagatctggatgtgcatcgtgttcgcctacatcggcgtgagcgtggtgctgttcctggtgagcagattcagcccctacgagtggcacagcgaggagttcgaggagggcagagaccagaccaccagcgaccagagcaacgagttcggcatcttcaacagcctgtggttcagcctgggcgccttcatgcagcagggctgcgacatcagccccagaagcctgagcggcagaatcgtgggcggcgtgtggtggttcttcaccctgatcatcatcagcagctacaccgccaacctggccgccttcctgaccgtggagagaatggtgagccccatcgagagcgccgaggacctggccaagcagaccgagatcgcctacggcaccctggaggccggcagcaccaaggagttcttcagaagaagcaagatcgccgtgttcgagaagatgtggacctacatgaagagcgccgagcccagcgtgttcgtgagaaccaccgaggagggcatgatcagagtgagaaagagcaagggcaagtacgcctacctgctggagagcaccatgaacgagtacatcgagcagagaaagccctgcgacaccatgaaggtgggcggcaacctggacagcaagggctacggcatcgccacccccaagggcagcgccctgagaaaccccgtgaacctggccgtgctgaagctgaacgagcagggcctgctggacaagctgaagaacaagtggtggtacgacaagggcgagtgcggcagcggcggcggcgacagcaaggacaagaccagcgccctgagcctgagcaacgtggccggcgtgttctacatcctgatcggcggcctgggcctggccatgctggtggccctgatcgagttctgctacaagagcagaagcgagagcaagagaatgaagggcttctgcctgatcccccagcagagcatcaacgaggccatcagaaccagcaccctgcccagaaacagcggcgccggcgccagcagcggcggcagcggcgagaacggcagagtggtgagccacgacttccccaagagcatgcagagcatcccctgcatgagccacagcagcggcatgcccctgggcgccaccggcctgtag

SEQ ID NO: 83121 - DNA, 2751 bp, synthetic construct
  misc_feature 1..2751: note = Description of Artificial Sequence: Synthetic coding sequence
  source 1..2751: mol_type = other DNA
atgtgctgcagcacccacctgttccagcccctgcagctggccggcggcctggagtggccctggagcaacctgctgtgcttcctgacccccgtgaagctgcaccccgaggtgtggggcctgttccccaaccagcagagccaggagcacgccgccttcagattcgccctgagccagctgaccgagccccccaagctgctgccccagatcgacatcgtgaacatcagcgacagcttcgagatgacctacagattctgcagccagttcagcaagggcgtgtacgccatcttcggcttctacgagagaagaaccgtgaacatgctgaccagcttctgcggcgccctgcacgtgtgcttcatcacccccagcttccccgtggacaccagcaaccagttcgtgctgcagctgagacccgagctgcaggacgccctgatcagcatcatcgaccactacaagtggcagaagttcgtgtacatctacgacgccgacagaggcctgagcgtgctgcagaaggtgctggacaccgccgccgagaagaactggcaggtgaccgccgtgaacatcctgaccaccaccgaggagggctacagaatgctgttccaggacctggagaagaagaaggagagactggtggtggtggactgcgagagcgagagactgaacgccatcctgggccagatcatcaagctggagaagaacggcatcggctaccactacatcctggccaacctgggcttcatggacatcgacctgaacaagttcaaggagagcggcgccaacgtgaccggcttccagctggtgaactacaccgacaccatccccgccaagatcatgcagcagtggaagaacagcgacgccagagaccacaccagagtggactggaagagacccaagtacaccagcgccctgacctacgacggcgtgaaggtgatggccgaggccttccagagcctgagaagacagagaatcgacatcagcagaagaggcaacgccggcgactgcctggccaaccccgccgtgccctggggccagggcatcgacatccagagagccctgcagcaggtgagattcgagggcctgaccggcaacgtgcagttcaacgagaagggcagaagaaccaactacaccctgcacgtgatcgagatgaagcacgacggcatcagaaagatcggctactggaacgaggacgacaagttcgtgcccgccgccaccgacgcccaggccggcggcgacaacagcagcgtgcagaacagaacctacatcgtgaccaccatcctggaggacccctacgtgatgctgaagaagaacgccaaccagttcgagggcaacgacagatacgagggctactgcgtggagctggccgccgagatcgccaagcacgtgggctacagctacagactggagatcgtgagcgacggcaagtacggcgccagagaccccgacaccaaggcctggaacggcatggtgggcgagctggtgtacggcagagccgacgtggccgtggcccccctgaccatcaccctggtgagagaggaggtgatcgacttcagcaagcccttcatgagcctgggcatcagcatcatgatcaagaagccccagaagagcaagcccggcgtgttcagcttcctggaccccctggcctacgagatctggatgtgcatcgtgttcgcctacatcggcgtgagcgtggtgctgttcctggtgagcagattcagcccctacgagtggcacagcgaggagttcgaggagggcagagaccagaccaccagcgaccagagcaacgagttcggcatcttcaacagcctgtggttcagcctgggcgccttcatgcagcagggctgcgacatcagccccagaagcctgagcggcagaatcgtgggcggcgtgtggtggttcttcaccctgatcatcatcagcagctacaccgccaacctggccgccttcctgaccgtggagagaatggtgagccccatcgagagcgccgaggacctggccaagcagaccgagatcgcctacggcaccctggaggccggcagcaccaaggagttcttcagaagaagcaagatcgccgtgttcgagaagatgtggacctacatgaagagcgccgagcccagcgtgttcgtgagaaccaccgaggagggcatgatcagagtgagaaagagcaagggcaagtacgcctacctgctggagagcaccatgaacgagtacatcgagcagagaaagccctgcgacaccatgaaggtgggcggcaacctggacagcaagggctacggcatcgccacccccaagggcagcgccctgagaaaccccgtgaacctggccgtgctgaagctgaacgagcagggcctgctggacaagctgaagaacaagtggtggtacgacaagggcgagtgcggcagcggcggcggcgacagcaaggacaagaccagcgccctgagcctgagcaacgtggccggcgtgttctacatcctgatcggcggcctgggcctggccatgctggtggccctgatcgagttctgctacaagagcagaagcgagagcaagagaatgaagggcttctgcctgatcccccagcagagcatcaacgaggccatcagaaccagcaccctgcccagaaacagcggcgccggcgccagcagcggcggcagcggcgagaacggcagagtggtgagccacgacttccccaagagcatgcagagcatcccctgcatgagccacagcagcggcatgcccctgggcgccaccggcctgtag

SEQ ID NO: 83122 - DNA, 2151 bp, synthetic construct
  misc_feature 1..2151: note = Description of Artificial Sequence: Synthetic coding sequence
  source 1..2151: mol_type = other DNA
atgcagcacatcttcgccttcttctgcaccggcttcctgggcgccgtggtgggcgccaacttccccaacaacatccagatcgtgtgcagccagttcagcaagggcgtgtacgccatcttcggcttctacgagagaagaaccgtgaacatgctgaccagcttctgcggcgccctgcacgtgtgcttcatcacccccagcttccccgtggacaccagcaaccagttcgtgctgcagctgagacccgagctgcaggacgccctgatcagcatcatcgaccactacaagtggcagaagttcgtgtacatctacgacgccgacagaggcctgagcgtgctgcagaaggtgctggacaccgccgccgagaagaactggcaggtgaccgccgtgaacatcctgaccaccaccgaggagggctacagaatgctgttccaggacctggagaagaagaaggagagactggtggtggtggactgcgagagcgagagactgaacgccatcctgggccagatcatcaagctggagaagaacggcatcggctaccactacatcctggccaacctgggcttcatggacatcgacctgaacaagttcaaggagagcggcgccaacgtgaccggcttccagctggtgaactacaccgacaccatccccgccaagatcatgcagcagtggaagaacagcgacgccagagaccacaccagagtggactggaagagacccaagtacaccagcgccctgacctacgacggcgtgaaggtgatggccgaggccttccagagcctgagaagacagagaatcgacatcagcagaagaggcaacgccggcgactgcctggccaaccccgccgtgccctggggccagggcatcgacatccagagagccctgcagcaggtgagattcgagggcctgaccggcaacgtgcagttcaacgagaagggcagaagaaccaactacaccctgcacgtgatcgagatgaagcacgacggcatcagaaagatcggctactggaacgaggacgacaagttcgtgcccgccgccaccgacgcccaggccggcggcgacaacagcagcgtgcagaacagaacctacatcgtgaccaccatcctggaggacccctacgtgatgctgaagaagaacgccaaccagttcgagggcaacgacagatacgagggctactgcgtggagctggccgccgagatcgccaagcacgtgggctacagctacagactggagatcgtgagcgacggcaagtacggcgccagagaccccgacaccaaggcctggaacggcatggtgggcgagctggtgtacggcagagccgacgtggccgtggcccccctgaccatcaccctggtgagagaggaggtgatcgacttcagcaagcccttcatgagcctgggcatcagcatcatgatcaagaagccccagaagagcaagcccggcgtgttcagcttcctggaccccctggcctacgagatctggatgtgcatcgtgttcgcctacatcggcgtgagcgtggtgctgttcctggtgagcagattcagcccctacgagtggcacagcgaggagttcgaggagggcagagaccagaccaccagcgaccagagcaacgagttcggcatcttcaacagcctgtggttcagcctgggcgccttcatgcagcagggctgcgacatcagccccagaagcctgagcggcagaatcgtgggcggcgtgtggtggttcttcaccctgatcatcatcagcagctacaccgccaacctggccgccttcctgaccgtggagagaatggtgagccccatcgagagcgccgaggacctggccaagcagaccgagatcgcctacggcaccctggaggccggcagcaccaaggagttcttcagaagaagcaagatcgccgtgttcgagaagatgtggacctacatgaagagcgccgagcccagcgtgttcgtgagaaccaccgaggagggcatgatcagagtgagaaagagcaagggcaagtacgcctacctgctggagagcaccatgaacgagtacatcgagcagagaaagccctgcgacaccatgaaggtgggcggcaacctggacagcaagggctacggcatcgccacccccaagggcagcgccctgagaaccagacaggccctgtag

SEQ ID NO: 83123 - DNA, 2721 bp, synthetic construct; identical to SEQ ID NO: 83118
  misc_feature 1..2721: note = Description of Artificial Sequence: Synthetic coding sequence
  source 1..2721: mol_type = other DNA

SEQ ID NO: 83124 - DNA, 2514 bp, synthetic construct
  misc_feature 1..2514: note = Description of Artificial Sequence: Synthetic coding sequence
  source 1..2514: mol_type = other DNA
atgacctacagattctgcagccagttcagcaagggcgtgtacgccatcttcggcttctacgagagaagaaccgtgaacatgctgaccagcttctgcggcgccctgcacgtgtgcttcatcacccccagcttccccgtggacaccagcaaccagttcgtgctgcagctgagacccgagctgcaggacgccctgatcagcatcatcgaccactacaagtggcagaagttcgtgtacatctacgacgccgacagaggcctgagcgtgctgcagaaggtgctggacaccgccgccgagaagaactggcaggtgaccgccgtgaacatcctgaccaccaccgaggagggctacagaatgctgttccaggacctggagaagaagaaggagagactggtggtggtggactgcgagagcgagagactgaacgccatcctgggccagatcatcaagctggagaagaacggcatcggctaccactacatcctggccaacctgggcttcatggacatcgacctgaacaagttcaaggagagcggcgccaacgtgaccggcttccagctggtgaactacaccgacaccatccccgccaagatcatgcagcagtggaagaacagcgacgccagagaccacaccagagtggactggaagagacccaagtacaccagcgccctgacctacgacggcgtgaaggtgatggccgaggccttccagagcctgagaagacagagaatcgacatcagcagaagaggcaacgccggcgactgcctggccaaccccgccgtgccctggggccagggcatcgacatccagagagccctgcagcaggtgagattcgagggcctgaccggcaacgtgcagttcaacgagaagggcagaagaaccaactacaccctgcacgtgatcgagatgaagcacgacggcatcagaaagatcggctactggaacgaggacgacaagttcgtgcccgccgccaccgacgcccaggccggcggcgacaacagcagcgtgcagaacagaacctacatcgtgaccaccatcctggaggacccctacgtgatgctgaagaagaacgccaaccagttcgagggcaacgacagatacgagggctactgcgtggagctggccgccgagatcgccaagcacgtgggctacagctacagactggagatcgtgagcgacggcaagtacggcgccagagaccccgacaccaaggcctggaacggcatggtgggcgagctggtgtacggcagagccgacgtggccgtggcccccctgaccatcaccctggtgagagaggaggtgatcgacttcagcaagcccttcatgagcctgggcatcagcatcatgatcaagaagccccagaagagcaagcccggcgtgttcagcttcctggaccccctggcctacgagatctggatgtgcatcgtgttcgcctacatcggcgtgagcgtggtgctgttcctggtgagcagattcagcccctacgagtggcacagcgaggagttcgaggagggcagagaccagaccaccagcgaccagagcaacgagttcggcatcttcaacagcctgtggttcagcctgggcgccttcatgcagcagggctgcgacatcagccccagaagcctgagcggcagaatcgtgggcggcgtgtggtggttcttcaccctgatcatcatcagcagctacaccgccaacctggccgccttcctgaccgtggagagaatggtgagccccatcgagagcgccgaggacctggccaagcagaccgagatcgcctacggcaccctggaggccggcagcaccaaggagttcttcagaagaagcaagatcgccgtgttcgagaagatgtggacctacatgaagagcgccgagcccagcgtgttcgtgagaaccaccgaggagggcatgatcagagtgagaaagagcaagggcaagtacgcctacctgctggagagcaccatgaacgagtacatcgagcagagaaagccctgcgacaccatgaaggtgggcggcaacctggacagcaagggctacggcatcgccacccccaagggcagcgccctgagaaaccccgtgaacctggccgtgctgaagctgaacgagcagggcctgctggacaagctgaagaacaagtggtggtacgacaagggcgagtgcggcagcggcggcggcgacagcaaggacaagaccagcgccctgagcctgagcaacgtggccggcgtgttctacatcctgatcggcggcctgggcctggccatgctggtggccctgatcgagttctgctacaagagcagaagcgagagcaagagaatgaagggcttctgcctgatcccccagcagagcatcaacgaggccatcagaaccagcaccctgcccagaaacagcggcgccggcgccagcagcggcggcagcggcgagaacggcagagtggtgagccacgacttccccaagagcatgcagagcatcccctgcatgagccacagcagcggcatgcccctgggcgccaccggcctgtag

SEQ ID NO: 83125 - DNA, 2652 bp, synthetic construct
  misc_feature 1..2652: note = Description of Artificial Sequence: Synthetic coding sequence
  source 1..2652: mol_type = other DNA
atgcagaagatcatgcacatcagcgtgctgctgagccccgtgctgtggggcctgatcttcggcgtgagcagcaacagcatccagatcggcggcctgttccccagaggcgccgaccaggagtacagcgccttcagagtgggcatggtgcagttcagcaccagcgagttcagactgaccccccacatcgacaacctggaggtggccaacagcttcgccgtgaccaacgccttctgcagccagttcagcagaggcgtgtacgccatcttcggcttctacgacaagaagagcgtgaacaccatcaccagcttctgcggcaccctgcacgtgagcttcatcacccccagcttccccaccgacggcacccaccccttcgtgatccagatgagacccgacctgaagggcgccctgctgagcctgatcgagtactaccagtgggacaagttcgcctacctgtacgacagcgacagaggcctgagcaccctgcaggccgtgctggacagcgccgccgagaagaagtggcaggtgaccgccatcaacgtgggcaacatcaacaacgacaagaaggacgagatgtacagaagcctgttccaggacctggagctgaagaaggagagaagagtgatcctggactgcgagagagacaaggtgaacgacatcgtggaccaggtgatcaccatcggcaagcacgtgaagggctaccactacatcatcgccaacctgggcttcaccgacggcgacctgctgaagatccagttcggcggcgccaacgtgagcggcttccagatcgtggactacgacgacagcctggtgagcaagttcatcgagagatggagcaccctggaggagaaggagtaccccggcgcccacaccaccaccatcaagtacaccagcgccctgacctacgacgccgtgcaggtgatgaccgaggccttcagaaacctgagaaagcagagaatcgagatcagcagaagaggcaacgccggcgactgcctggccaaccccgccgtgccctggggccagggcgtggagatcgagagagccctgaagcaggtgcaggtggagggcctgagcggcaacatcaagttcgaccagaacggcaagagaatcaactacaccatcaacatcatggagctgaagaccaacggccccagaaagatcggctactggagcgaggtggacaagatggtggtgaccctgaccgagctgcccagcggcaacgacaccagcggcctggagaacaagaccgtggtggtgaccaccatcctggagagcccctacgtgatgatgaagaagaaccacgagatgctggagggcaacgagagatacgagggctactgcgtggacctggccgccgagatcgccaagcactgcggcttcaagtacaagctgaccatcgtgggcgacggcaagtacggcgccagagacgccgacaccaagatctggaacggcatggtgggcgagctggtgtacggcaaggccgacatcgccatcgcccccctgaccatcaccctggtgagagaggaggtgatcgacttcagcaagcccttcatgagcctgggcatcagcatcatgatcaagaagccccagaagagcaagcccggcgtgttcagcttcctggaccccctggcctacgagatctggatgtgcatcgtgttcgcctacatcggcgtgagcgtggtgctgttcctggtgagcagattcagcccctacgagtggcacaccgaggagttcgaggacggcagagagacccagagcagcgagagcaccaacgagttcggcatcttcaacagcctgtggttcagcctgggcgccttcatgcagcagggctgcgacatcagccccagaagcctgagcggcagaatcgtgggcggcgtgtggtggttcttcaccctgatcatcatcagcagctacaccgccaacctggccgccttcctgaccgtggagagaatggtgagccccatcgagagcgccgaggacctgagcaagcagaccgagatcgcctacggcaccctggacagcggcagcaccaaggagttcttcagaagaagcaagatcgccgtgttcgacaagatgtggacctacatgagaagcgccgagcccagcgtgttcgtgagaaccaccgccgagggcgtggccagagtgagaaagagcaagggcaagtacgcctacctgctggagagcaccatgaacgagtacatcgagcagagaaagccctgcgacaccatgaaggtgggcggcaacctggacagcaagggctacggcatcgccacccccaagggcagcagcctgagaaacgccgtgaacctggccgtgctgaagctgaacgagcagggcctgctggacaagctgaagaacaagtggtggtacgacaagggcgagtgcggcagcggcggcggcgacagcaaggagaagaccagcgccctgagcctgagcaacgtggccggcgtgttctacatcctggtgggcggcctgggcctggccatgctggtggccctgatcgagttctgctacaagagcagagccgaggccaagagaatgaaggtggccaagaacgcccagaacatcaaccccagcagcagccagaacagccagaacttcgccacctacaaggagggctacaacgtgtacggcatcgagagcgtgaagatctag

SEQ ID NO: 83126 - DNA, 2652 bp, synthetic construct
  misc_feature 1..2652: note = Description of Artificial Sequence: Synthetic coding sequence
  source 1..2652: mol_type = other DNA
atgcagaagatcatgcacatcagcgtgctgctgagccccgtgctgtggggcctgatcttcggcgtgagcagcaacagcatccagatcggcggcctgttccccagaggcgccgaccaggagtacagcgccttcagagtgggcatggtgcagttcagcaccagcgagttcagactgaccccccacatcgacaacctggaggtggccaacagcttcgccgtgaccaacgccttctgcagccagttcagcagaggcgtgtacgccatcttcggcttctacgacaagaagagcgtgaacaccatcaccagcttctgcggcaccctgcacgtgagcttcatcacccccagcttccccaccgacggcacccaccccttcgtgatccagatgagacccgacctgaagggcgccctgctgagcctgatcgagtactaccagtgggacaagttcgcctacctgtacgacagcgacagaggcctgagcaccctgcaggccgtgctggacagcgccgccgagaagaagtggcaggtgaccgccatcaacgtgggcaacatcaacaacgacaagaaggacgagatgtacagaagcctgttccaggacctggagctgaagaaggagagaagagtgatcctggactgcgagagagacaaggtgaacgacatcgtggaccaggtgatcaccatcggcaagcacgtgaagggctaccactacatcatcgccaacctgggcttcaccgacggcgacctgctgaagatccagttcggcggcgccaacgtgagcggcttccagatcgtggactacgacgacagcctggtgagcaagttcatcgagagatggagcaccctggaggagaaggagtaccccggcgcccacaccaccaccatcaagtacaccagcgccctgacctacgacgccgtgcaggtgatgaccgaggccttcagaaacctgagaaagcagagaatcgagatcagcagaagaggcaacgccggcgactgcctggccaaccccgccgtgccctggggccagggcgtggagatcgagagagccctgaagcaggtgcaggtggagggcctgagcggcaacatcaagttcgaccagaacggcaagagaatcaactacaccatcaacatcatggagctgaagaccaacggccccagaaagatcggctactggagcgaggtggacaagatggtggtgaccctgaccgagctgcccagcggcaacgacaccagcggcctggagaacaagaccgtggtggtgaccaccatcctggagagcccctacgtgatgatgaagaagaaccacgagatgctggagggcaacgagagatacgagggctactgcgtggacctggccgccgagatcgccaagcactgcggcttcaagtacaagctgaccatcgtgggcgacggcaagtacggcgccagagacgccgacaccaagatctggaacggcatggtgggcgagctggtgtacggcaaggccgacatcgccatcgcccccctgaccatcaccctggtgagagaggaggtgatcgacttcagcaagcccttcatgagcctgggcatcagcatcatgatcaagaagccccagaagagcaagcccggcgtgttcagcttcctggaccccctggcctacgagatctggatgtgcatcgtgttcgcctacatcggcgtgagcgtggtgctgttcctggtgagcagattcagcccctacgagtggcacaccgaggagttcgaggacggcagagagacccagagcagcgagagcaccaacgagttcggcatcttcaacagcctgtggttcagcctgggcgccttcatgcagcagggctgcgacatcagccccagaagcctgagcggcagaatcgtgggcggcgtgtggtggttcttcaccctgatcatcatcagcagctacaccgccaacctggccgccttcctgaccgtggagagaatggtgagccccatcgagagcgccgaggacctgagcaagcagaccgagatcgcctacggcaccctggacagcggcagcaccaaggagttcttcagaagaagcaagatcgccgtgttcgacaagatgtggacctacatgagaagcgccgagcccagcgtgttcgtgagaaccaccgccgagggcgtggccagagtgagaaagagcaagggcaagtacgcctacctgctggagagcaccatgaacgagtacatcgagcagagaaagccctgcgacaccatgaaggtgggcggcaacctggacagcaagggctacggcatcgccacccccaagggcagcagcctgagaacccccgtgaacctggccgtgctgaagctgagcgagcagggcgtgctggacaagctgaagaacaagtggtggtacgacaagggcgagtgcggcgccaaggacagcggcagcaaggagaagaccagcgccctgagcctgagcaacgtggccggcgtgttctacatcctggtgggcggcctgggcctggccatgctggtggccctgatcgagttctgctacaagagcagagccgaggccaagagaatgaaggtggccaagaacgcccagaacatcaaccccagcagcagccagaacagccagaacttcgccacctacaaggagggctacaacgtgtacggcatcgagagcgtgaagatctag

SEQ ID NO: 83127 - DNA, 2193 bp, synthetic construct
  misc_feature 1..2193: note = Description of Artificial Sequence: Synthetic coding sequence
  source 1..2193: mol_type = other DNA
atggtgcagttcagcaccagcgagttcagactgaccccccacatcgacaacctggaggtggccaacagcttcgccgtgaccaacgccttctgcagccagttcagcagaggcgtgtacgccatcttcggcttctacgacaagaagagcgtgaacaccatcaccagcttctgcggcaccctgcacgtgagcttcatcacccccagcttccccaccgacggcacccaccccttcgtgatccagatgagacccgacctgaagggcgccctgctgagcctgatcgagtactaccagtgggacaagttcgcctacctgtacgacagcgacagaggcctgagcaccctgcaggccgtgctggacagcgccgccgagaagaagtggcaggtgaccgccatcaacgtgggcaacatcaacaacgacaagaaggacgagatgtacagaagcctgttccaggacctggagctgaagaaggagagaagagtgatcctggactgcgagagagacaaggtgaacgacatcgtggaccaggtgatcaccatcggcaagcacgtgaagggctaccactacatcatcgccaacctgggcttcaccgacggcgacctgctgaagatccagttcggcggcgccaacgtgagcggcttccagatcgtggactacgacgacagcctggtgagcaagttcatcgagagatggagcaccctggaggagaaggagtaccccggcgcccacaccaccaccatcaagtacaccagcgccctgacctacgacgccgtgcaggtgatgaccgaggccttcagaaacctgagaaagcagagaatcgagatcagcagaagaggcaacgccggcgactgcctggccaaccccgccgtgccctggggccagggcgtggagatcgagagagccctgaagcaggtgcaggtggagggcctgagcggcaacatcaagttcgaccagaacggcaagagaatcaactacaccatcaacatcatggagctgaagaccaacggccccagaaagatcggctactggagcgaggtggacaagatggtggtgaccctgaccgagctgcccagcggcaacgacaccagcggcctggagaacaagaccgtggtggtgaccaccatcctggagagcccctacgtgatgatgaagaagaaccacgagatgctggagggcaacgagagatacgagggctactgcgtggacctggccgccgagatcgccaagcactgcggcttcaagtacaagctgaccatcgtgggcgacggcaagtacggcgccagagacgccgacaccaagatctggaacggcatggtgggcgagctggtgtacggcaaggccgacatcgccatcgcccccctgaccatcaccctggtgagagaggaggtgatcgacttcagcaagcccttcatgagcctgggcatcagcatcatgatcaagaagccccagaagagcaagcccggcgtgttcagcttcctggaccccctggcctacgagatctggatgtgcatcgtgttcgcctacatcggcgtgagcgtggtgctgttcctggtgagcagattcagcccctacgagtggcacaccgaggagttcgaggacggcagagagacccagagcagcgagagcaccaacgagttcggcatcttcaacagcctgtggttcagcctgggcgccttcatgcagcagggctgcgacatcagccccagaagcctgagcggcagaatcgtgggcggcgtgtggtggttcttcaccctgatcatcatcagcagctacaccgccaacctggccgccttcctgaccgtggagagaatggtgagccccatcgagagcgccgaggacctgagcaagcagaccgagatcgcctacggcaccctggacagcggcagcaccaaggagttcttcagaagaagcaagatcgccgtgttcgacaagatgtggacctacatgagaagcgccgagcccagcgtgttcgtgagaaccaccgccgagggcgtggccagagtgagaaagagcaagggcaagtacgcctacctgctggagagcaccatgaacgagtacatcgagcagagaaagccctgcgacaccatgaaggtgggcggcaacctggacagcaagggctacggcatcgccacccccaagggcagcagcctgagcggcgtgaccttcaagaccctgctgttcgtgtgctgcggctag

SEQ ID NO: 83128 - DNA, 297 bp, synthetic construct
  misc_feature 1..297: note = Description of Artificial Sequence: Synthetic coding sequence
  source 1..297: mol_type = other DNA
atgaacgagtacatcgagcagagaaagccctgcgacaccatgaaggtgggcggcaacctggacagcaagggctacggcatcgccacccccaagggcagcagcctgagcggcgtgaccttcaagaccctgatctgcctgctgtggatcaacgccgtgaacctggccgtgctgaagctgaacgagcagggcctgctggacaagctgaagaacaagtggtggtacgacaagggcgagtgcggcagcggcggcggcgacagcaagaaccccagcaagagctgcagcatcgagacccagtag

SEQ ID NO: 83129 - DNA, 2511 bp, synthetic construct; identical to SEQ ID NO: 83096
  misc_feature 1..2511: note = Description of Artificial Sequence: Synthetic coding sequence
  source 1..2511: mol_type = other DNA

SEQ ID NO: 83130 - DNA, 438 bp, synthetic construct
  misc_feature 1..438: note = Description of Artificial Sequence: Synthetic coding sequence
  source 1..438: mol_type = other DNA
atggtgcagttcagcaccagcgagttcagactgaccccccacatcgacaacctggaggtggccaacagcttcgccgtgaccaacgccttctgcagccagttcagcagaggcgtgtacgccatcttcggcttctacgacaagaagagcgtgaacaccatcaccagcttctgcggcaccctgcacgtgagcttcatcacccccagcttccccaccgacggcacccaccccttcgtgatccagatgagacccgacctgaagggcgccctgctgagcctgatcgagtactaccagtgggacaagttcgcctacctgtacgacagcgacagaggcctgagcaccctgcaggccgtgctggacagcgccgccgagaagaagtggcaggtgaccgccatcaacgtgggcaacatcaacaacgacaagaaggacgagatgtactag

SEQ ID NO: 83131 - DNA, 174 bp, synthetic construct
  misc_feature 1..174: note = Description of Artificial Sequence: Synthetic coding sequence
  source 1..174: mol_type = other DNA
atggtgcagttcagcaccagcgagttcagactgaccccccacatcgacaacctggaggtggccaacagcttcgccgtgaccaacgccttctgcagccagttcagcagaggcgtgtacgccatcttcggcttctacgacaagaagagcgtgaacaccatcaccagcttctgctag

SEQ ID NO: 83132 - DNA, 2511 bp, synthetic construct; identical to SEQ ID NO: 83096
  misc_feature 1..2511: note = Description of Artificial Sequence: Synthetic coding sequence
  source 1..2511: mol_type = other DNA

SEQ ID NO: 83133 - DNA, 378 bp, synthetic construct
  misc_feature 1..378: note = Description of Artificial Sequence: Synthetic coding sequence
  source 1..378: mol_type = other DNA
atgcagaagatcatgcacatcagcgtgctgctgagccccgtgctgtggggcctgatcttcggcgtgagcagcaacagcatccagatcggcggcctgttccccagaggcgccgaccaggagtacagcgccttcagagtgggcatggtgcagttcagcaccagcgagttcagactgaccccccacatcgacaacctggaggtggccaacagcttcgccgtgaccaacgccttctgcagccagttcagcagaggcgtgtacgccatcttcggcttctacgacaagaagagcgtgaacaccatcaccagcttctgcggcaccctgcacgtgagcttcatcacccccagcttccccaccgacggcacccaccccttcgtgtag

SEQ ID NO: 83134 - DNA, 147 bp, synthetic construct
  misc_feature 1..147: note = Description of Artificial Sequence: Synthetic coding sequence
  source 1..147: mol_type = other DNA
atgcagaagatcatgcacatcagcgtgctgctgagccccgtgctgtggggcctgatcttcggcgtgagcagcaacagcatccagatcggcggcctgttccccagaggcgccgaccaggagtacagcgccttcagagtgggcatgtag

SEQ ID NO: 83135 - DNA, 3030 bp, synthetic construct
  misc_feature 1..3030: note = Description of Artificial Sequence: Synthetic coding sequence
  source 1..3030: mol_type = other DNA
atggaggccctgaccctgtggctgctgccctggatctgccagtgcgtgagcgtgagagccgacagcatcatccacatcggcgccatcttcgaggagaacgccgccaaggacgacagagtgttccagctggccgtgagcgacctgagcctgaacgacgacatcctgcagagcgagaagatcacctacagcatcaaggtgatcgaggccaacaaccccttccaggccgtgcaggaggcctgcgacctgatgacccagggcatcctggccctggtgaccagcaccggctgcgccagcgccaacgccctgcagagcctgaccgacgccatgcacatcccccacctgttcgtgcagagaaaccccggcggcagccccagaaccgcctgccacctgaaccccagccccgacggcgaggcctacaccctggccagcagaccccccgtgagactgaacgacgtgatgctgagactggtgaccgagctgagatggcagaagttcgtgatgttctacgacagcgagtacgacatcagaggcctgcagagcttcctggaccaggccagcagactgggcctggacgtgagcctgcagaaggtggacaagaacatcagccacgtgttcaccagcctgttcaccaccatgaagaccgaggagctgaacagatacagagacaccctgagaagagccatcctgctgctgagcccccagggcgcccacagcttcatcaacgaggccgtggagaccaacctggccagcaaggacagccactgggtgttcgtgaacgaggagatcagcgaccccgagatcctggacctggtgcacagcgccctgggcagaatgaccgtggtgagacagatcttccccagcgccaaggacaaccagaagtgcaccagaaacaaccacagaatcagcagcctgctgtgcgacccccaggagggctacctgcagatgctgcagatcagcaacctgtacctgtacgacagcgtgctgatgctggccaacgccttccacagaaagctggaggacagaaagtggcacagcatggccagcctgaactgcatcagaaagagcaccaagccctggaacggcggcagaagcatgctggacaccatcaagaagggccacatcaccggcctgaccggcgtgatggagttcagagaggacagcagcaacccctacgtgcagttcgagatcctgggcaccacctacagcgagaccttcggcaaggacatgagaaagctggccacctgggacagcgagaagggcctgaacggcagcctgcaggagagacccatgggcagcagactgcagggcctgaccctgaaggtggtgaccgtgctggaggagcccttcgtgatggtggccgagaacatcctgggccagcccaagagatacaagggcttcagcatcgacgtgctggacgccctggccaaggccctgggcttcaagtacgagatctaccaggcccccgacggcagatacggccaccagctgcacaacaccagctggaacggcatgatcggcgagctgatcagcaagagagccgacctggccatcagcgccatcaccatcacccccgagagagagagcgtggtggacttcagcaagagatacatggactacagcgtgggcatcctgatcaagaagcccgaggagaagatcagcatcttcagcctgttcgcccccttcgacttcgccgtgtgggcctgcatcgccgccgccatccccgtggtgggcgtgctgatcttcgtgctgaacagaatccaggccgtgagagcccagagcgccgcccagcccagacccagcgccagcgccaccctgcacagcgccatctggatcgtgtacggcgccttcgtgcagcagggcggcgagagcagcgtgaacagcatggccatgagaatcgtgatgggcagctggtggctgttcaccctgatcgtgtgcagcagctacaccgccaacctggccgccttcctgaccgtgagcagaatggacaaccccatcagaaccttccaggacctgagcaagcaggtggagatgagctacggcaccgtgagagacagcgccgtgtacgagtacttcagagccaagggcaccaaccccctggagcaggacagcaccttcgccgagctgtggagaaccatcagcaagaacggcggcgccgacaactgcgtgagcagccccagcgagggcatcagaaaggccaagaagggcaactacgccttcctgtgggacgtggccgtggtggagtacgccgccctgaccgacgacgactgcagcgtgaccgtgatcggcaacagcatcagcagcaagggctacggcatcgccctgcagcacggcagcccctacagagacctgttcagccagagaatcctggagctgcaggacaccggcgacctggacgtgctgaagcagaagtggtggccccacatgggcagatgcgacctgaccagccacgccagcgcccaggccgacggcaagagcctgaagctgcacagcttcgccggcgtgttctgcatcctggccatcggcctgctgctggcctgcctggtggccgccctggagctgtggtggaacagcaacagatgccaccaggagacccccaaggaggacaaggaggtgaacctggagcaggtgcacagaagaatgaacagcctgatggacgaggacatcgcccacaagcagatcagccccgccagcatcgagctgagcgccctggagatgggcggcctggcccccacccagaccctggagcccaccagagagtaccagaacacccagctgagcgtgagcaccttcctgcccgagcagagcagccacggcaccagcagaaccctgagcagcggccccagcagcaacctgcccctgcccctgagcagcagcgccaccatgcccagcatgcagtgcaagcacagaagccccaacggcggcctgttcagacagagccccgtgaagacccccatccccatgagcttccagcccgtgcccggcggcgtgctgcccgaggccctggacaccagccacggcaccagcatctag

SEQ ID NO: 83136 - DNA, 1743 bp, synthetic construct
  misc_feature 1..1743: note = Description of Artificial Sequence: Synthetic coding sequence
  source 1..1743: mol_type = other DNA
atgggcagcagactgcagggcctgaccctgaaggtggtgaccgtgctggaggagcccttcgtgatggtggccgagaacatcctgggccagcccaagagatacaagggcttcagcatcgacgtgctggacgccctggccaaggccctgggcttcaagtacgagatctaccaggcccccgacggcagatacggccaccagctgcacaacaccagctggaacggcatgatcggcgagctgatcagcaagagagccgacctggccatcagcgccatcaccatcacccccgagagagagagcgtggtggacttcagcaagagatacatggactacagcgtgggcatcctgatcaagaagcccgaggagaagatcagcatcttcagcctgttcgcccccttcgacttcgccgtgtgggcctgcatcgccgccgccatccccgtggtgggcgtgctgatcttcgtgctgaacagaatccaggccgtgagagcccagagcgccgcccagcccagacccagcgccagcgccaccctgcacagcgccatctggatcgtgtacggcgccttcgtgcagcagggcggcgagagcagcgtgaacagcatggccatgagaatcgtgatgggcagctggtggctgttcaccctgatcgtgtgcagcagctacaccgccaacctggccgccttcctgaccgtgagcagaatggacaaccccatcagaaccttccaggacctgagcaagcaggtggagatgagctacggcaccgtgagagacagcgccgtgtacgagtacttcagagccaagggcaccaaccccctggagcaggacagcaccttcgccgagctgtggagaaccatcagcaagaacggcggcgccgacaactgcgtgagcagccccagcgagggcatcagaaaggccaagaagggcaactacgccttcctgtgggacgtggccgtggtggagtacgccgccctgaccgacgacgactgcagcgtgaccgtgatcggcaacagcatcagcagcaagggctacggcatcgccctgcagcacggcagcccctacagagacctgttcagccagagaatcctggagctgcaggacaccggcgacctggacgtgctgaagcagaagtggtggccccacatgggcagatgcgacctgaccagccacgccagcgcccaggccgacggcaagagcctgaagctgcacagcttcgccggcgtgttctgcatcctggccatcggcctgctgctggcctgcctggtggccgccctggagctgtggtggaacagcaacagatgccaccaggagacccccaaggaggacaaggaggtgaacctggagcaggtgcacagaagaatgaacagcctgatggacgaggacatcgcccacaagcagatcagccccgccagcatcgagctgagcgccctggagatgggcggcctggcccccacccagaccctggagcccaccagagagtaccagaacacccagctgagcgtgagcaccttcctgcccgagcagagcagccacggcaccagcagaaccctgagcagcggccccagcagcaacctgcccctgcccctgagcagcagcgccaccatgcccagcatgcagtgcaagcacagaagccccaacggcggcctgttcagacagagccccgtgaagacccccatccccatgagcttccagcccgtgcccggcggcgtgctgcccgaggccctggacaccagccacggcaccagcatctag

SEQ ID NO: 83137 - DNA, 3024 bp, synthetic construct
  misc_feature 1..3024: note = Description of Artificial Sequence: Synthetic coding sequence
  source 1..3024: mol_type = other DNA
atggaggtgttccccttcctgctggtgctgagcgtgtggtggagcagaacctgggacagcgccaacgccgacagcatcatccacatcggcgccatcttcgacgagagcgccaagaaggacgacgaggtgttcagaaccgccgtgggcgacctgaaccagaacgaggagatcctgcagaccgagaagatcaccttcagcgtgaccttcgtggacggcaacaaccccttccaggccgtgcaggaggcctgcgagctgatgaaccagggcatcctggccctggtgagcagcatcggctgcaccagcgccggcagcctgcagagcctggccgacgccatgcacatcccccacctgttcatccagagaagcaccgccggcacccccagaagcggctgcggcctgaccagaagcaacagaaacgacgactacaccctgagcgtgagaccccccgtgtacctgcacgacgtgatcctgagagtggtgaccgagtacgcctggcagaagttcatcatcttctacgacagcgagtacgacatcagaggcatccaggagttcctggacaaggtgagccagcagggcatggacgtggccctgcagaaggtggagaacaacatcaacaagatgatcaccaccctgttcgacaccatgagaatcgaggagctgaacagatacagagacaccctgagaagagccatcctggtgatgaaccccgccaccgccaagagcttcatcaccgaggtggtggagaccaacctggtggccttcgactgccactggatcatcatcaacgaggagatcaacgacgtggacgtgcaggagctggtgagaagaagcatcggcagactgaccatcatcagacagaccttccccgtgccccagaacatcagccagagatgcttcagaggcaaccacagaatcagcagcaccctgtgcgaccccaaggaccccttcgcccagaacatggagatcagcaacctgtacatctacgacaccgtgctgctgctggccaacgccttccacaagaagctggaggacagaaagtggcacagcatggccagcctgagctgcatcagaaagaacagcaagccctggcagggcggcagaagcatgctggagaccatcaagaagggcggcgtgagcggcctgaccggcgagctggagttcggcgagaacggcggcaaccccaacgtgcacttcgagatcctgggcaccaactacggcgaggagctgggcagaggcgtgagaaagctgggctgctggaaccccgtgaccggcctgaacggcagcctgaccgacaagaagctggagaacaacatgagaggcgtggtgctgagagtggtgaccgtgctggaggagcccttcgtgatggtgagcgagaacgtgctgggcaagcccaagaagtaccagggcttcagcatcgacgtgctggacgccctgagcaactacctgggcttcaactacgagatctacgtggcccccgaccacaagtacggcagcccccaggaggacggcacctggaacggcctggtgggcgagctggtgttcaagagagccgacatcggcatcagcgccctgaccatcacccccgacagagagaacgtggtggacttcaccaccagatacatggactacagcgtgggcgtgctgctgagaagagccgagaagaccgtggacatgttcgcctgcctggcccccttcgacctgagcctgtgggcctgcatcgccggcaccgtgctgctggtgggcctgctggtgtacctgctgaactggctgaacccccccagactgcagatgggcagcatgaccagcaccaccctgtacaacagcatgtggttcgtgtacggcagcttcgtgcagcagggcggcgaggtgccctacaccaccctggccaccagaatgatgatgggcgcctggtggctgttcgccctgatcgtgatcagcagctacaccgccaacctggccgccttcctgaccatcaccagaatcgagagcagcatccagagcctgcaggacctgagcaagcagaccgagatcccctacggcaccgtgctggacagcgccgtgtacgagcacgtgagaatgaagggcctgaaccccttcgagagagacagcatgtacagccagatgtggagaatgatcaacagaagcaacggcagcgagaacaacgtgctggagagccaggccggcatccagaaggtgaagtacggcaactacgccttcgtgtgggacgccgccgtgctggagtacgtggccatcaacgaccccgactgcagcttctacaccatcggcaacaccgtggccgacagaggctacggcatcgccctgcagcacggcagcccctacagagacgtgttcagccagagaatcctggagctgcagcagaacggcgacatggacatcctgaagcacaagtggtggcccaagaacggccagtgcgacctgtacagcagcgtggacaccaagcagaagggcggcgccctggacatcaagagcttcgccggcgtgttctgcatcctggccgccggcatcgtgctgagctgcttcatcgccatgctggagacctggtggaacaagagaaagggcagcagagtgcccagcaaggaggacgacaaggagatcgacctggagcacctgcacagaagagtgaacagcctgtgcaccgacgacgacagcccccacaagcagttcagcaccagcagcatcgacctgacccccctggacatcgacaccctgcccaccagacaggccctggagcagatcagcgacttcagaaacacccacatcaccaccaccaccttcatccccgagcagatccagaccctgagcagaaccctgagcgccaaggccgccagcggcttcaccttcggcaacgtgcccgagcacagaaccggccccttcagacacagagcccccaacggcggcttcttcagaagccccatcaagaccatgagcagcatcccctaccagcccacccccaccctgggcctgaacctgggcaacgaccccgacagaggcaccagcatctag

SEQ ID NO: 83138 - DNA, 2739 bp, synthetic construct
  misc_feature 1..2739: note = Description of Artificial Sequence: Synthetic coding sequence
  source 1..2739: mol_type = other DNA
atggaggtgttccccttcctgctggtgctgagcgtgtggtggagcagaacctgggacagcgccaacgccgacagcatcatccacatcggcgccatcttcgacgagagcgccaagaaggacgacgaggtgttcagaaccgccgtgggcgacctgaaccagaacgaggagatcctgcagaccgagaagatcaccttcagcgtgaccttcgtggacggcaacaaccccttccaggccgtgcaggaggacatcagaggcatccaggagttcctggacaaggtgagccagcagggcatggacgtggccctgcagaaggtggagaacaacatcaacaagatgatcaccaccctgttcgacaccatgagaatcgaggagctgaacagatacagagacaccctgagaagagccatcctggtgatgaaccccgccaccgccaagagcttcatcaccgaggtggtggagaccaacctggtggccttcgactgccactggatcatcatcaacgaggagatcaacgacgtggacgtgcaggagctggtgagaagaagcatcggcagactgaccatcatcagacagaccttccccgtgccccagaacatcagccagagatgcttcagaggcaaccacagaatcagcagcaccctgtgcgaccccaaggaccccttcgcccagaacatggagatcagcaacctgtacatctacgacaccgtgctgctgctggccaacgccttccacaagaagctggaggacagaaagtggcacagcatggccagcctgagctgcatcagaaagaacagcaagccctggcagggcggcagaagcatgctggagaccatcaagaagggcggcgtgagcggcctgaccggcgagctggagttcggcgagaacggcggcaaccccaacgtgcacttcgagatcctgggcaccaactacggcgaggagctgggcagaggcgtgagaaagctgggctgctggaaccccgtgaccggcctgaacggcagcctgaccgacaagaagctggagaacaacatgagaggcgtggtgctgagagtggtgaccgtgctggaggagcccttcgtgatggtgagcgagaacgtgctgggcaagcccaagaagtaccagggcttcagcatcgacgtgctggacgccctgagcaactacctgggcttcaactacgagatctacgtggcccccgaccacaagtacggcagcccccaggaggacggcacctggaacggcctggtgggcgagctggtgttcaagagagccgacatcggcatcagcgccctgaccatcacccccgacagagagaacgtggtggacttcaccaccagatacatggactacagcgtgggcgtgctgctgagaagagccgagaagaccgtggacatgttcgcctgcctggcccccttcgacctgagcctgtgggcctgcatcgccggcaccgtgctgctggtgggcctgctggtgtacctgctgaactggctgaacccccccagactgcagatgggcagcatgaccagcaccaccctgtacaacagcatgtggttcgtgtacggcagcttcgtgcagcagggcggcgaggtgccctacaccaccctggccaccagaatgatgatgggcgcctggtggctgttcgccctgatcgtgatcagcagctacaccgccaacctggccgccttcctgaccatcaccagaatcgagagcagcatccagagcctgcaggacctgagcaagcagaccgagatcccctacggcaccgtgctggacagcgccgtgtacgagcacgtgagaatgaagggcctgaaccccttcgagagagacagcatgtacagccagatgtggagaatgatcaacagaagcaacggcagcgagaacaacgtgctggagagccaggccggcatccagaaggtgaagtacggcaactacgccttcgtgtgggacgccgccgtgctggagtacgtggccatcaacgaccccgactgcagcttctacaccatcggcaacaccgtggccgacagaggctacggcatcgccctgcagcacggcagcccctacagagacgtgttcagccagagaatcctggagctgcagcagaacggcgacatggacatcctgaagcacaagtggtggcccaagaacggccagtgcgacctgtacagcagcgtggacaccaagcagaagggcggcgccctggacatcaagagcttcgccggcgtgttctgcatcctggccgccggcatcgtgctgagctgcttcatcgccatgctggagacctggtggaacaagagaaagggcagcagagtgcccagcaaggaggacgacaaggagatcgacctggagcacctgcacagaagagtgaacagcctgtgcaccgacgacgacagcccccacaagcagttcagcaccagcagcatcgacctgacccccctggacatcgacaccctgcccaccagacaggccctggagcagatcagcgacttcagaaacacccacatcaccaccaccaccttcatccccgagcagatccagaccctgagcagaaccctgagcgccaaggccgccagcggcttcaccttcggcaacgtgcccgagcacagaaccggccccttcagacacagagcccccaacggcggcttcttcagaagccccatcaagaccatgagcagcatcccctaccagcccacccccaccctgggcctgaacctgggcaacgaccccgacagaggcaccagcatctag

SEQ ID NO: 83139 - DNA, 2763 bp, synthetic construct
  misc_feature 1..2763: note = Description of Artificial Sequence: Synthetic coding sequence
  source 1..2763: mol_type = other DNA
atggagcacggcaccctgctggcccagcccggcctgtggaccagagacaccagctgggccctgctgtacttcctgtgctacatcctgccccagaccgccccccaggtgctgagaatcggcggcatcttcgagaccgtggagaacgagcccgtgaacgtggaggagctggccttcaagttcgccgtgaccagcatcaacagaaacagaaccctgatgcccaacaccaccctgacctacgacatccagagaatcaacctgttcgacagcttcgaggccagcagaagagcctgcgaccagctggccctgggcgtggccgccctgttcggccccagccacagcagcagcgtgagcgccgtgcagagcatctgcaacgccctggaggtgccccacatccagaccagatggaagcaccccagcgtggacaacaaggacctgttctacatcaacctgtaccccgactacgccgccatcagcagagccatcctggacctggtgctgtactacaactggaagaccgtgaccgtggtgtacgaggacagcaccggcctgatcagactgcaggagctgatcaaggcccccagcagatacaacatcaagatcaagatcagacagctgcccagcggcaacaaggacgccaagcccctgctgaaggagatgaagaagggcaaggagttctacgtgatcttcgactgcagccacgagaccgccgccgagatcctgaagcagatcctgttcatgggcatgatgaccgagtactaccactacttcttcaccaccctggacctgttcgccctggacctggagctgtacagatacagcggcgtgaacatgaccggcttcagactgctgaacatcgacaacccccacgtgagcagcatcatcgagaagtggagcatggagagactgcaggccccccccagacccgagaccggcctgctggacggcatgatgaccaccgaggccgccctgatgtacgacgccgtgtacatggtggccatcgccagccacagagccagccagctgaccgtgagcagcctgcagtgccacagacacaagccctggagactgggccccagattcatgaacctgatcaaggaggccaccgccagatgggacggcctgaccggccacatcaccttcaacaagaccaacggcctgagaaaggacttcgacctggacatcatcagcctgaaggaggagggcaccgagaaggccgccggcgaggtgagcaagcacctgtacaaggtgtggaagaagatcggcatctggaacagcaacagcggcctgaacatgaccgacagcaacaaggacaagagcagcaacatcaccgacagcctggccaacagaaccctgatcgtgaccaccatcctggaggagccctacgtgatgtacagaaagagcgacaagcccctgtacggcaacgacagattcgagggctactgcctggacctgctgaaggagctgagcaacatcctgggcttcatctacgacgtgaagctggtgcccgacggcaagtacggcgcccagaacgacaagggcgagtggaacggcatggtgaaggagctgatcgaccacagagccgacctggccgtggcccccctgaccatcacctacgtgagagagaaggtgatcgacttcagcaagcccttcatgaccctgggcatcagcatcctgtacagaaagcccaacggcaccaaccccggcgtgttcagcttcctgaaccccctgagccccgacatctggatgtacgtgctgctggcctgcctgggcgtgagctgcgtgctgttcgtgatcgccagattcaccccctacgagtggtacaacccccacccctgcaaccccgacagcgacgtggtggagaacaacttcaccctgctgaacagcttctggttcggcgtgggcgccctgatgcagcagggcagcgagctgatgcccaaggccctgagcaccagaatcgtgggcggcatctggtggttcttcaccctgatcatcatcagcagctacaccgccaacctggccgccttcctgaccgtggagagaatggagagccccatcgacagcgccgacgacctggccaagcagaccaagatcgagtacggcgccgtgagagacggcagcaccatgaccttcttcaagaagagcaagatcagcacctacgagaagatgtgggccttcatgagcagcagacagcagaccgccctggtgagaaacagcgacgagggcatccagagagtgctgaccaccgactacgccctgctgatggagagcaccagcatcgagtacgtgacccagagaaactgcaacctgacccagatcggcggcctgatcgacagcaagggctacggcgtgggcacccccatcggcagcccctacagagacaagatcaccatcgccatcctgcagctgcaggaggagggcaagctgcacatgatgaaggagaagtggtggagaggcaacggctgccccgaggaggacaacaaggaggccagcgccctgggcgtggagaacatcggcggcatcttcatcgtgctggccgccggcctggtgctgagcgtgttcgtggccatcggcgagttcatctacaagagcagaaagaacaacgacatcgagcaggccttctgcttcttctacggcctgcagtgcaagcagacccaccccaccaacagcaccagcggcaccaccctgagcaccgacctggagtgcggcaagctgatcagagaggagagaggcatcagaaagcagagcagcgtgcacaccgtgtag

SEQ ID NO: 83140 - DNA, 2850 bp, synthetic construct
  misc_feature 1..2850: note = Description of Artificial Sequence: Synthetic coding sequence
  source 1..2850: mol_type = other DNA
atggagcacggcaccctgctggcccagcccggcctgtggaccagagacaccagctgggccctgctgtacttcctgtgctacatcctgccccagaccgccccccaggtgctgagaatcggcggcatcttcgagaccgtggagaacgagcccgtgaacgtggaggagctggccttcaagttcgccgtgaccagcatcaacagaaacagaaccctgatgcccaacaccaccctgacctacgacatccagagaatcaacctgttcgacagcttcgaggccagcagaagagcctgcgaccagctggccctgggcgtggccgccctgttcggccccagccacagcagcagcgtgagcgccgtgcagagcatctgcaacgccctggaggtgccccacatccagaccagatggaagcaccccagcgtggacaacaaggacctgttctacatcaacctgtaccccgactacgccgccatcagcagagccatcctggacctggtgctgtactacaactggaagaccgtgaccgtggtgtacgaggacagcaccggcctgatcagactgcaggagctgatcaaggcccccagcagatacaacatcaagatcaagatcagacagctgcccagcggcaacaaggacgccaagcccctgctgaaggagatgaagaagggcaaggagttctacgtgatcttcgactgcagccacgagaccgccgccgagatcctgaagcagatcctgttcatgggcatgatgaccgagtactaccactacttcttcaccaccctggacctgttcgccctggacctggagctgtacagatacagcggcgtgaacatgaccggcttcagactgctgaacatcgacaacccccacgtgagcagcatcatcgagaagtggagcatggagagactgcaggccccccccagacccgagaccggcctgctggacggcatgatgaccaccgaggccgccctgatgtacgacgccgtgtacatggtggccatcgccagccacagagccagccagctgaccgtgagcagcctgcagtgccacagacacaagccctggagactgggccccagattcatgaacctgatcaaggaggccagatgggacggcctgaccggccacatcaccttcaacaagaccaacggcctgagaaaggacttcgacctggacatcatcagcctgaaggaggagggcaccgagaaggccgccggcgaggtgagcaagcacctgtacaaggtgtggaagaagatcggcatctggaacagcaacagcggcctgaacatgaccgacagcaacaaggacaagagcagcaacatcaccgacagcctggccaacagaaccctgatcgtgaccaccatcctggaggagccctacgtgatgtacagaaagagcgacaagcccctgtacggcaacgacagattcgagggctactgcctggacctgctgaaggagctgagcaacatcctgggcttcatctacgacgtgaagctggtgcccgacggcaagtacggcgcccagaacgacaagggcgagtggaacggcatggtgaaggagctgatcgaccacagagccgacctggccgtggcccccctgaccatcacctacgtgagagagaaggtgatcgacttcagcaagcccttcatgaccctgggcatcagcatcctgtacagaaagcccaacggcaccaaccccggcgtgttcagcttcctgaaccccctgagccccgacatctggatgtacgtgctgctggcctgcctgggcgtgagctgcgtgctgttcgtgatcgccagattcaccccctacgagtggtacaacccccacccctgcaaccccgacagcgacgtggtggagaacaacttcaccctgctgaacagcttctggttcggcgtgggcgccctgatgcagcagggcagcgagctgatgcccaaggccctgagcaccagaatcgtgggcggcatctggtggttcttcaccctgatcatcatcagcagctacaccgccaacctggccgccttcctgaccgtggagagaatggagagccccatcgacagcgccgacgacctggccaagcagaccaagatcgagtacggcgccgtgagagacggcagcaccatgaccttcttcaagaagagcaagatcagcacctacgagaagatgtgggccttcatgagcagcagacagcagaccgccctggtgagaaacagcgacgagggcatccagagagtgctgaccaccgactacgccctgctgatggagagcaccagcatcgagtacgtgacccagagaaactgcaacctgacccagatcggcggcctgatcgacagcaagggctacggcgtgggcacccccatcggcagcccctacagagacaagatcaccatcgccatcctgcagctgcaggaggagggcaagctgcacatgatgaaggagaagtggtggagaggcaacggctgccccgaggaggacaacaaggaggccagcgccctgggcgtggagaacatcggcggcatcttcatcgtgctggccgccggcctggtgctgagcgtgttcgtggccatcggcgagttcatctacaagagcagaaagaacaacgacatcgagcagaagggcaagagcagcagaatcagattctacttcagaaacaaggtgagattccacggcagaaagaagcagagcctgggcgtggagaagtgcctgagcttcaacgccatcatggaggagctgggcatcagcctgaagaaccagaagaagatcaagaagaagagcagaaccaagggcaagagcagcttcaccagcatcctgacctgccaccagagaagaacccagagaaaggagaccgtggcctag

SEQ ID NO: 83141 - DNA, 2616 bp, synthetic construct
  misc_feature 1..2616: note = Description of Artificial Sequence: Synthetic coding sequence
  source 1..2616: mol_type = other DNA
atggagcacggcaccctgctggcccagcccggcctgtggaccagagacaccagctgggccctgctgtacttcctgtgctacatcctgccccagaccgccccccaggtgctgagaatcggcggcatcttcgagaccgtggagaacgagcccgtgaacgtggaggagctggccttcaagttcgccgtgaccagcatcaacagaaacagaaccctgatgcccaacaccaccctgacctacgacatccagagaatcaacctgttcgacagcttcgaggccagcagaagagcctgcgaccagctggccctgggcgtggccgccctgttcggccccagccacagcagcagcgtgagcgccgtgcagagcatctgcaacgccctggaggtgccccacatccagaccagatggaagcaccccagcgtggacaacaaggacctgttctacatcaacctgtaccccgactacgccgccatcagcagagccatcctggacctggtgctgtactacaactggaagaccgtgaccgtggtgtacgaggacagcaccggcctgatcagactgcaggagctgatcaaggcccccagcagatacaacatcaagatcaagatcagacagctgcccagcggcaacaaggacgccaagcccctgctgaaggagatgaagaagggcaaggagttctacgtgatcttcgactgcagccacgagaccgccgccgagatcctgaagcagatcctgttcatgggcatgatgaccgagtactaccactacttcttcaccaccctggacctgttcgccctggacctggagctgtacagatacagcggcgtgaacatgaccggcttcagactgctgaacatcgacaacccccacgtgagcagcatcatcgagaagtggagcatggagagactgcaggccccccccagacccgagaccggcctgctggacggcatgatgaccaccgaggccgccctgatgtacgacgccgtgtacatggtggccatcgccagccacagagccagccagctgaccgtgagcagcctgcagtgccacagacacaagccctggagactgggccccagattcatgaacctgatcaaggaggccagatgggacggcctgaccggccacatcaccttcaacaagaccaacggcctgagaaaggacttcgacctggacatcatcagcctgaaggaggagggcaccgagaaggccgccggcgaggtgagcaagcacctgtacaaggtgtggaagaagatcggcatctggaacagcaacagcggcctgaacatgaccgacagcaacaaggacaagagcagcaacatcaccgacagcctggccaacagaaccctgatcgtgaccaccatcctggaggagccctacgtgatgtacagaaagagcgacaagcccctgtacggcaacgacagattcgagggctactgcctggacctgctgaaggagctgagcaacatcctgggcttcatctacgacgtgaagctggtgcccgacggcaagtacggcgcccagaacgacaagggcgagtggaacggcatggtgaaggagctgatcgaccacagagccgacctggccgtggcccccctgaccatcacctacgtgagagagaaggtgatcgacttcagcaagcccttcatgaccctgggcatcagcatcctgtacagaaagcccaacggcaccaaccccggcgtgttcagcttcctgaaccccctgagccccgacatctggatgtacgtgctgctggcctgcctgggcgtgagctgcgtgctgttcgtgatcgccagattcaccccctacgagtggtacaacccccacccctgcaaccccgacagcgacgtggtggagaacaacttcaccctgctgaacagcttctggttcggcgtgggcgccctgatgcagcagggcagcgagctgatgcccaaggccctgagcaccagaatcgtgggcggcatctggtggttcttcaccctgatcatcatcagcagctacaccgccaacctggccgccttcctgaccgtggagagaatggagagccccatcgacagcgccgacgacctggccaagcagaccaagatcgagtacggcgccgtgagagacggcagcaccatgaccttcttcaagaagagcaagatcagcacctacgagaagatgtgggccttcatgagcagcagacagcagaccgccctggtgagaaacagcgacgagggcatccagagagtgctgaccaccgactacgccctgctgatggagagcaccagcatcgagtacgtgacccagagaaactgcaacctgacccagatcggcggcctgatcgacagcaagggctacggcgtgggcacccccatcggcagcccctacagagacaagatcaccatcgccatcctgcagctgcaggaggagggcaagctgcacatgatgaaggagaagtggtggagaggcaacggctgccccgaggaggacaacaaggaggccagcgccctgggcgtggagaacatcggcggcatcttcatcgtgctggccgccggcctggtgctgagcgtgttcgtggccatcggcgagttcatctacaagagcagaaagaacaacgacatcgagcagcactactag

SEQ ID NO: 83142 - DNA, 2718 bp, synthetic construct
  misc_feature 1..2718: note = Description of Artificial Sequence: Synthetic coding sequence
  source 1..2718: mol_type = other DNA
atggagcacggcaccctgctggcccagcccggcctgtggaccagagacaccagctgggccctgctgtacttcctgtgctacatcctgccccagaccgccccccaggtgctgagaatcggcggcatcttcgagaccgtggagaacgagcccgtgaacgtggaggagctggccttcaagttcgccgtgaccagcatcaacagaaacagaaccctgatgcccaacaccaccctgacctacgacatccagagaatcaacctgttcgacagcttcgaggccagcagaagagcctgcgaccagctggccctgggcgtggccgccctgttcggccccagccacagcagcagcgtgagcgccgtgcagagcatctgcaacgccctggaggtgccccacatccagaccagatggaagcaccccagcgtggacaacaaggacctgttctacatcaacctgtaccccgactacgccgccatcagcagagccatcctggacctggtgctgtactacaactggaagaccgtgaccgtggtgtacgaggacagcaccggcctgatcagactgcaggagctgatcaaggcccccagcagatacaacatcaagatcaagatcagacagctgcccagcggcaacaaggacgccaagcccctgctgaaggagatgaagaagggcaaggagttctacgtgatcttcgactgcagccacgagaccgccgccgagatcctgaagcagatcctgttcatgggcatgatgaccgagtactaccactacttcttcaccaccctggacctgttcgccctggacctggagctgtacagatacagcggcgtgaacatgaccggcttcagactgctgaacatcgacaacccccacgtgagcagcatcatcgagaagtggagcatggagagactgcaggccccccccagacccgagaccggcctgctggacggcatgatgaccaccgaggccgccctgatgtacgacgccgtgtacatggtggccatcgccagccacagagccagccagctgaccgtgagcagcctgcagtgccacagacacaagccctggagactgggccccagattcatgaacctgatcaaggaggccagatgggacggcctgaccggccacatcaccttcaacaagaccaacggcctgagaaaggacttcgacctggacatcatcagcctgaaggaggagggcaccgagaagatcggcatctggaacagcaacagcggcctgaacatgaccgacagcaacaaggacaagagcagcaacatcaccgacagcctggccaacagaaccctgatcgtgaccaccatcctggaggagccctacgtgatgtacagaaagagcgacaagcccctgtacggcaacgacagattcgagggctactgcctggacctgctgaaggagctgagcaacatcctgggcttcatctacgacgtgaagctggtgcccgacggcaagtacggcgcccagaacgacaagggcgagtggaacggcatggtgaaggagctgatcgaccacagagccgacctggccgtggcccccctgaccatcacctacgtgagagagaaggtgatcgacttcagcaagcccttcatgaccctgggcatcagcatcctgtacagaaagcccaacggcaccaaccccggcgtgttcagcttcctgaaccccctgagccccgacatctggatgtacgtgctgctggcctgcctgggcgtgagctgcgtgctgttcgtgatcgccagattcaccccctacgagtggtacaacccccacccctgcaaccccgacagcgacgtggtggagaacaacttcaccctgctgaacagcttctggttcggcgtgggcgccctgatgcagcagggcagcgagctgatgcccaaggccctgagcaccagaatcgtgggcggcatctggtggttcttcaccctgatcatcatcagcagctacaccgccaacctggccgccttcctgaccgtggagagaatggagagccccatcgacagcgccgacgacctggccaagcagaccaagatcgagtacggcgccgtgagagacggcagcaccatgaccttcttcaagaagagcaagatcagcacctacgagaagatgtgggccttcatgagcagcagacagcagaccgccctggtgagaaacagcgacgagggcatccagagagtgctgaccaccgactacgccctgctgatggagagcaccagcatcgagtacgtgacccagagaaactgcaacctgacccagatcggcggcctgatcgacagcaagggctacggcgtgggcacccccatcggcagcccctacagagacaagatcaccatcgccatcctgcagctgcaggaggagggcaagctgcacatgatgaaggagaagtggtggagaggcaacggctgccccgaggaggacaacaaggaggccagcgccctgggcgtggagaacatcggcggcatcttcatcgtgctggccgccggcctggtgctgagcgtgttcgtggccatcggcgagttcatctacaagagcagaaagaacaacgacatcgagcagtgcctgagcttcaacgccatcatggaggagctgggcatcagcctgaagaaccagaagaagatcaagaagaagagcagaaccaagggcaagagcagcttcaccagcatcctgacctgccaccagagaagaacccagagaaaggagaccgtggcctag

SEQ ID NO: 83143 - DNA, 2757 bp, synthetic construct
  misc_feature 1..2757: note = Description of Artificial Sequence: Synthetic coding sequence
  source 1..2757: mol_type = other DNA
atggagcacggcaccctgctggcccagcccggcctgtggaccagagacaccagctgggccctgctgtacttcctgtgctacatcctgccccagaccgccccccaggtgctgagaatcggcggcatcttcgagaccgtggagaacgagcccgtgaacgtggaggagctggccttcaagttcgccgtgaccagcatcaacagaaacagaaccctgatgcccaacaccaccctgacctacgacatccagagaatcaacctgttcgacagcttcgaggccagcagaagagcctgcgaccagctggccctgggcgtggccgccctgttcggccccagccacagcagcagcgtgagcgccgtgcagagcatctgcaacgccctggaggtgccccacatccagaccagatggaagcaccccagcgtggacaacaaggacctgttctacatcaacctgtaccccgactacgccgccatcagcagagccatcctggacctggtgctgtactacaactggaagaccgtgaccgtggtgtacgaggacagcaccggcctgatcagactgcaggagctgatcaaggcccccagcagatacaacatcaagatcaagatcagacagctgcccagcggcaacaaggacgccaagcccctgctgaaggagatgaagaagggcaaggagttctacgtgatcttcgactgcagccacgagaccgccgccgagatcctgaagcagatcctgttcatgggcatgatgaccgagtactaccactacttcttcaccaccctggacctgttcgccctggacctggagctgtacagatacagcggcgtgaacatgaccggcttcagactgctgaacatcgacaacccccacgtgagcagcatcatcgagaagtggagcatggagagactgcaggccccccccagacccgagaccggcctgctggacggcatgatgaccaccgaggccgccctgatgtacgacgccgtgtacatggtggccatcgccagccacagagccagccagctgaccgtgagcagcctgcagtgccacagacacaagccctggagactgggccccagattcatgaacctgatcaaggaggccagatgggacggcctgaccggccacatcaccttcaacaagaccaacggcctgagaaaggacttcgacctggacatcatcagcctgaaggaggagggcaccgagaaggccgccggcgaggtgagcaagcacctgtacaaggtgtggaagaagatcggcatctggaacagcaacagcggcctgaacatgaccgacagcaacaaggacaagagcagcaacatcaccgacagcctggccaacagaaccctgatcgtgaccaccatcctggaggagccctacgtgatgtacagaaagagcgacaagcccctgtacggcaacgacagattcgagggctactgcctggacctgctgaaggagctgagcaacatcctgggcttcatctacgacgtgaagctggtgcccgacggcaagtacggcgcccagaacgacaagggcgagtggaacggcatggtgaaggagctgatcgaccacagagccgacctggccgtggcccccctgaccatcacctacgtgagagagaaggtgatcgacttcagcaagcccttcatgaccctgggcatcagcatcctgtacagaaagcccaacggcaccaaccccggcgtgttcagcttcctgaaccccctgagccccgacatctggatgtacgtgctgctggcctgcctgggcgtgagctgcgtgctgttcgtgatcgccagattcaccccctacgagtggtacaacccccacccctgcaaccccgacagcgacgtggtggagaacaacttcaccctgctgaacagcttctggttcggcgtgggcgccctgatgcagcagggcagcgagctgatgcccaaggccctgagcaccagaatcgtgggcggcatctggtggttcttcaccctgatcatcatcagcagctacaccgccaacctggccgccttcctgaccgtggagagaatggagagccccatcgacagcgccgacgacctggccaagcagaccaagatcgagtacggcgccgtgagagacggcagcaccatgaccttcttcaagaagagcaagatcagcacctacgagaagatgtgggccttcatgagcagcagacagcagaccgccctggtgagaaacagcgacgagggcatccagagagtgctgaccaccgactacgccctgctgatggagagcaccagcatcgagtacgtgacccagagaaactgcaacctgacccagatcggcggcctgatcgacagcaagggctacggcgtgggcacccccatcggcagcccctacagagacaagatcaccatcgccatcctgcagctgcaggaggagggcaagctgcacatgatgaaggagaagtggtggagaggcaacggctgccccgaggaggacaacaaggaggccagcgccctgggcgtggagaacatcggcggcatcttcatcgtgctggccgccggcctggtgctgagcgtgttcgtggccatcggcgagttcatctacaagagcagaaagaacaacgacatcgagcaggccttctgcttcttctacggcctgcagtgcaagcagacccaccccaccaacagcaccagcggcaccaccctgagcaccgacctggagtgcggcaagctgatcagagaggagagaggcatcagaaagcagagcagcgtgcacaccgtgtag

SEQ ID NO: 83144 - DNA, 2712 bp, synthetic construct
  misc_feature 1..2712: note = Description of Artificial Sequence: Synthetic coding sequence
  source 1..2712: mol_type = other DNA
atggagcacggcaccctgctggcccagcccggcctgtggaccagagacaccagctgggccctgctgtacttcctgtgctacatcctgccccagaccgccccccaggtgctgagaatcggcggcatcttcgagaccgtggagaacgagcccgtgaacgtggaggagctggccttcaagttcgccgtgaccagcatcaacagaaacagaaccctgatgcccaacaccaccctgacctacgacatccagagaatcaacctgttcgacagcttcgaggccagcagaagagcctgcgaccagctggccctgggcgtggccgccctgttcggccccagccacagcagcagcgtgagcgccgtgcagagcatctgcaacgccctggaggtgccccacatccagaccagatggaagcaccccagcgtggacaacaaggacctgttctacatcaacctgtaccccgactacgccgccatcagcagagccatcctggacctggtgctgtactacaactggaagaccgtgaccgtggtgtacgaggacagcaccggcctgatcagactgcaggagctgatcaaggcccccagcagatacaacatcaagatcaagatcagacagctgcccagcggcaacaaggacgccaagcccctgctgaaggagatgaagaagggcaaggagttctacgtgatcttcgactgcagccacgagaccgccgccgagatcctgaagcagatcctgttcatgggcatgatgaccgagtactaccactacttcttcaccaccctggacctgttcgccctggacctggagctgtacagatacagcggcgtgaacatgaccggcttcagactgctgaacatcgacaacccccacgtgagcagcatcatcgagaagtggagcatggagagactgcaggccccccccagacccgagaccggcctgctggacggcatgatgaccaccgaggccgccctgatgtacgacgccgtgtacatggtggccatcgccagccacagagccagccagctgaccgtgagcagcctgcagtgccacagacacaagccctggagactgggccccagattcatgaacctgatcaaggaggccagatgggacggcctgaccggccacatcaccttcaacaagaccaacggcctgagaaaggacttcgacctggacatcatcagcctgaaggaggagggcaccgagaagatcggcatctggaacagcaacagcggcctgaacatgaccgacagcaacaaggacaagagcagcaacatcaccgacagcctggccaacagaaccctgatcgtgaccaccatcctggaggagccctacgtgatgtacagaaagagcgacaagcccctgtacggcaacgacagattcgagggctactgcctggacctgctgaaggagctgagcaacatcctgggcttcatctacgacgtgaagctggtgcccgacggcaagtacggcgcccagaacgacaagggcgagtggaacggcatggtgaaggagctgatcgaccacagagccgacctggccgtggcccccctgaccatcacctacgtgagagagaaggtgatcgacttcagcaagcccttcatgaccctgggcatcagcatcctgtacagaaagcccaacggcaccaaccccggcgtgttcagcttcctgaaccccctgagccccgacatctggatgtacgtgctgctggcctgcctgggcgtgagctgcgtgctgttcgtgatcgccagattcaccccctacgagtggtacaacccccacccctgcaaccccgacagcgacgtggtggagaacaacttcaccctgctgaacagcttctggttcggcgtgggcgccctgatgcagcagggcagcgagctgatgcccaaggccctgagcaccagaatcgtgggcggcatctggtggttcttcaccctgatcatcatcagcagctacaccgccaacctggccgccttcctgaccgtggagagaatggagagccccatcgacagcgccgacgacctggccaagcagaccaagatcgagtacggcgccgtgagagacggcagcaccatgaccttcttcaagaagagcaagatcagcacctacgagaagatgtgggccttcatgagcagcagacagcagaccgccctggtgagaaacagcgacgagggcatccagagagtgctgaccaccgactacgccctgctgatggagagcaccagcatcgagtacgtgacccagagaaactgcaacctgacccagatcggcggcctgatcgacagcaagggctacggcgtgggcacccccatcggcagcccctacagagacaagatcaccatcgccatcctgcagctgcaggaggagggcaagctgcacatgatgaaggagaagtggtggagaggcaacggctgccccgaggaggacaacaaggaggccagcgccctgggcgtggagaacatcggcggcatcttcatcgtgctggccgccggcctggtgctgagcgtgttcgtggccatcggcgagttcatctacaagagcagaaagaacaacgacatcgagcaggccttctgcttcttctacggcctgcagtgcaagcagacccaccccaccaacagcaccagcggcaccaccctgagcaccgacctggagtgcggcaagctgatcagagaggagagaggcatcagaaagcagagcagcgtgcacaccgtgtag

SEQ ID NO: 83145 - DNA, 2763 bp, synthetic construct
  misc_feature 1..2763: note = Description of Artificial Sequence: Synthetic coding sequence
  source 1..2763: mol_type = other DNA
atggagcacggcaccctgctggcccagcccggcctgtggaccagagacaccagctgggccctgctgtacttcctgtgctacatcctgccccagaccgccccccaggtgctgagaatcggcggcatcttcgagaccgtggagaacgagcccgtgaacgtggaggagctggccttcaagttcgccgtgaccagcatcaacagaaacagaaccctgatgcccaacaccaccctgacctacgacatccagagaatcaacctgttcgacagcttcgaggccagcagaagagcctgcgaccagctggccctgggcgtggccgccctgttcggccccagccacagcagcagcgtgagcgccgtgcagagcatctgcaacgccctggaggtgccccacatccagaccagatggaagcaccccagcgtggacaacaaggacctgttctacatcaacctgtaccccgactacgccgccatcagcagagccatcctggacctggtgctgtactacaactggaagaccgtgaccgtggtgtacgaggacagcaccggcctgatcagactgcaggagctgatcaaggcccccagcagatacaacatcaagatcaagatcagacagctgcccagcggcaacaaggacgccaagcccctgctgaaggagatgaagaagggcaaggagttctacgtgatcttcgactgcagccacgagaccgccgccgagatcctgaagcagatcctgttcatgggcatgatgaccgagtactaccactacttcttcaccaccctggacctgttcgccctggacctggagctgtacagatacagcggcgtgaacatgaccggcttcagactgctgaacatcgacaacccccacgtgagcagcatcatcgagaagtggagcatggagagactgcaggccccccccagacccgagaccggcctgctggacggcatgatgaccaccgaggccgccctgatgtacgacgccgtgtacatggtggccatcgccagccacagagccagccagctgaccgtgagcagcctgcagtgccacagacacaagccctggagactgggccccagattcatgaacctgatcaaggaggccagatgggacggcctgaccggccacatcaccttcaacaagaccaacggcctgagaaaggacttcgacctggacatcatcagcctgaaggaggagggcaccgagaaggccgccggcgaggtgagcaagcacctgtacaaggtgtggaagaagatcggcatctggaacagcaacagcggcctgaacatgaccgacagcaacaaggacaagagcagcaacatcaccgacagcctggccaacagaaccctgatcgtgaccaccatcctggaggagccctacgtgatgtacagaaagagcgacaagcccctgtacggcaacgacagattcgagggctactgcctggacctgctgaaggagctgagcaacatcctgggcttcatctacgacgtgaagctggtgcccgacggcaagtacggcgcccagaacgacaagggcgagtggaacggcatggtgaaggagctgatcgaccacagagccgacctggccgtggcccccctgaccatcacctacgtgagagagaaggtgatcgacttcagcaagcccttcatgaccctgggcatcagcatcctgtacagaaagcccaacggcaccaaccccggcgtgttcagcttcctgaaccccctgagccccgacatctggatgtacgtgctgctggcctgcctgggcgtgagctgcgtgctgttcgtgatcgccagattcaccccctacgagtggtacaacccccacccctgcaaccccgacagcgacgtggtggagaacaacttcaccctgctgaacagcttctggttcggcgtgggcgccctgatgcagcagggcagcgagctgatgcccaaggccctgagcaccagaatcgtgggcggcatctggtggttcttcaccctgatcatcatcagcagctacaccgccaacctggccgccttcctgaccgtggagagaatggagagccccatcgacagcgccgacgacctggccaagcagaccaagatcgagtacggcgccgtgagagacggcagcaccatgaccttcttcaagaagagcaagatcagcacctacgagaagatgtgggccttcatgagcagcagacagcagaccgccctggtgagaaacagcgacgagggcatccagagagtgctgaccaccgactacgccctgctgatggagagcaccagcatcgagtacgtgacccagagaaactgcaacctgacccagatcggcggcctgatcgacagcaagggctacggcgtgggcacccccatcggcagcccctacagagacaagatcaccatcgccatcctgcagctgcaggaggagggcaagctgcacatgatgaaggagaagtggtggagaggcaacggctgccccgaggaggacaacaaggaggccagcgccctgggcgtggagaacatcggcggcatcttcatcgtgctggccgccggcctggtgctgagcgtgttcgtggccatcggcgagttcatctacaagagcagaaagaacaacgacatcgagcagtgcctgagcttcaacgccatcatggaggagctgggcatcagcctgaagaaccagaagaagatcaagaagaagagcagaaccaagggcaagagcagcttcaccagcatcctgacctgccaccagagaagaacccagagaaaggagaccgtggcctag

SEQ ID NO: 83146 - DNA, 2805 bp, synthetic construct
  misc_feature 1..2805: note = Description of Artificial Sequence: Synthetic coding sequence
  source 1..2805: mol_type = other DNA
atggagcacggcaccctgctggcccagcccggcctgtggaccagagacaccagctgggccctgctgtacttcctgtgctacatcctgccccagaccgccccccaggtgctgagaatcggcggcatcttcgagaccgtggagaacgagcccgtgaacgtggaggagctggccttcaagttcgccgtgaccagcatcaacagaaacagaaccctgatgcccaacaccaccctgacctacgacatccagagaatcaacctgttcgacagcttcgaggccagcagaagagcctgcgaccagctggccctgggcgtggccgccctgttcggccccagccacagcagcagcgtgagcgccgtgcagagcatctgcaacgccctggaggtgccccacatccagaccagatggaagcaccccagcgtggacaacaaggacctgttctacatcaacctgtaccccgactacgccgccatcagcagagccatcctggacctggtgctgtactacaactggaagaccgtgaccgtggtgtacgaggacagcaccggcctgatcagactgcaggagctgatcaaggcccccagcagatacaacatcaagatcaagatcagacagctgcccagcggcaacaaggacgccaagcccctgctgaaggagatgaagaagggcaaggagttctacgtgatcttcgactgcagccacgagaccgccgccgagatcctgaagcagatcctgttcatgggcatgatgaccgagtactaccactacttcttcaccaccctggacctgttcgccctggacctggagctgtacagatacagcggcgtgaacatgaccggcttcagactgctgaacatcgacaacccccacgtgagcagcatcatcgagaagtggagcatggagagactgcaggccccccccagacccgagaccggcctgctggacggcatgatgaccaccgaggccgccctgatgtacgacgccgtgtacatggtggccatcgccagccacagagccagccagctgaccgtgagcagcctgcagtgccacagacacaagccctggagactgggccccagattcatgaacctgatcaaggaggccagatgggacggcctgaccggccacatcaccttcaacaagaccaacggcctgagaaaggacttcgacctggacatcatcagcctgaaggaggagggcaccgagaagatcggcatctggaacagcaacagcggcctgaacatgaccgacagcaacaaggacaagagcagcaacatcaccgacagcctggccaacagaaccctgatcgtgaccaccatcctggaggagccctacgtgatgtacagaaagagcgacaagcccctgtacggcaacgacagattcgagggctactgcctggacctgctgaaggagctgagcaacatcctgggcttcatctacgacgtgaagctggtgcccgacggcaagtacggcgcccagaacgacaagggcgagtggaacggcatggtgaaggagctgatcgaccacagagccgacctggccgtggcccccctgaccatcacctacgtgagagagaaggtgatcgacttcagcaagcccttcatgaccctgggcatcagcatcctgtacagaaagcccaacggcaccaaccccggcgtgttcagcttcctgaaccccctgagccccgacatctggatgtacgtgctgctggcctgcctgggcgtgagctgcgtgctgttcgtgatcgccagattcaccccctacgagtggtacaacccccacccctgcaaccccgacagcgacgtggtggagaacaacttcaccctgctgaacagcttctggttcggcgtgggcgccctgatgcagcagggcagcgagctgatgcccaaggccctgagcaccagaatcgtgggcggcatctggtggttcttcaccctgatcatcatcagcagctacaccgccaacctggccgccttcctgaccgtggagagaatggagagccccatcgacagcgccgacgacctggccaagcagaccaagatcgagtacggcgccgtgagagacggcagcaccatgaccttcttcaagaagagcaagatcagcacctacgagaagatgtgggccttcatgagcagcagacagcagaccgccctggtgagaaacagcgacgagggcatccagagagtgctgaccaccgactacgccctgctgatggagagcaccagcatcgagtacgtgacccagagaaactgcaacctgacccagatcggcggcctgatcgacagcaagggctacggcgtgggcacccccatcggcagcccctacagagacaagatcaccatcgccatcctgcagctgcaggaggagggcaagctgcacatgatgaaggagaagtggtggagaggcaacggctgccccgaggaggacaacaaggaggccagcgccctgggcgtggagaacatcggcggcatcttcatcgtgctggccgccggcctggtgctgagcgtgttcgtggccatcggcgagttcatctacaagagcagaaagaacaacgacatcgagcagaagggcaagagcagcagaatcagattctacttcagaaacaaggtgagattccacggcagaaagaagcagagcctgggcgtggagaagtgcctgagcttcaacgccatcatggaggagctgggcatcagcctgaagaaccagaagaagatcaagaagaagagcagaaccaagggcaagagcagcttcaccagcatcctgacctgccaccagagaagaacccagagaaaggagaccgtggcctag

SEQ ID NO: 83147 - DNA, 2769 bp, synthetic construct
  misc_feature 1..2769: note = Description of Artificial Sequence: Synthetic coding sequence
  source 1..2769: mol_type = other DNA
atggagcacggcaccctgctggcccagcccggcctgtggaccagagacaccagctgggccctgctgtacttcctgtgctacatcctgccccagaccgccccccaggtgctgagaatcggcggcatcttcgagaccgtggagaacgagcccgtgaacgtggaggagctggccttcaagttcgccgtgaccagcatcaacagaaacagaaccctgatgcccaacaccaccctgacctacgacatccagagaatcaacctgttcgacagcttcgaggccagcagaagagcctgcgaccagctggccctgggcgtggccgccctgttcggccccagccacagcagcagcgtgagcgccgtgcagagcatctgcaacgccctggaggtgccccacatccagaccagatggaagcaccccagcgtggacaacaaggacctgttctacatcaacctgtaccccgactacgccgccatcagcagagccatcctggacctggtgctgtactacaactggaagaccgtgaccgtggtgtacgaggacagcaccggcctgatcagactgcaggagctgatcaaggcccccagcagatacaacatcaagatcaagatcagacagctgcccagcggcaacaaggacgccaagcccctgctgaaggagatgaagaagggcaaggagttctacgtgatcttcgactgcagccacgagaccgccgccgagatcctgaagcagatcctgttcatgggcatgatgaccgagtactaccactacttcttcaccaccctggacctgttcgccctggacctggagctgtacagatacagcggcgtgaacatgaccggcttcagactgctgaacatcgacaacccccacgtgagcagcatcatcgagaagtggagcatggagagactgcaggccccccccagacccgagaccggcctgctggacggcatgatgaccaccgaggccgccctgatgtacgacgccgtgtacatggtggccatcgccagccacagagccagccagctgaccgtgagcagcctgcagtgccacagacacaagccctggagactgggccccagattcatgaacctgatcaaggaggccaccgccagatgggacggcctgaccggccacatcaccttcaacaagaccaacggcctgagaaaggacttcgacctggacatcatcagcctgaaggaggagggcaccgagaaggccgccggcgaggtgagcaagcacctgtacaaggtgtggaagaagatcggcatctggaacagcaacagcggcctgaacatgaccgacagcaacaaggacaagagcagcaacatcaccgacagcctggccaacagaaccctgatcgtgaccaccatcctggaggagccctacgtgatgtacagaaagagcgacaagcccctgtacggcaacgacagattcgagggctactgcctggacctgctgaaggagctgagcaacatcctgggcttcatctacgacgtgaagctggtgcccgacggcaagtacggcgcccagaacgacaagggcgagtggaacggcatggtgaaggagctgatcgaccacagagccgacctggccgtggcccccctgaccatcacctacgtgagagagaaggtgatcgacttcagcaagcccttcatgaccctgggcatcagcatcctgtacagaaagcccaacggcaccaaccccggcgtgttcagcttcctgaaccccctgagccccgacatctggatgtacgtgctgctggcctgcctgggcgtgagctgcgtgctgttcgtgatcgccagattcaccccctacgagtggtacaacccccacccctgcaaccccgacagcgacgtggtggagaacaacttcaccctgctgaacagcttctggttcggcgtgggcgccctgatgcagcagggcagcgagctgatgcccaaggccctgagcaccagaatcgtgggcggcatctggtggttcttcaccctgatcatcatcagcagctacaccgccaacctggccgccttcctgaccgtggagagaatggagagccccatcgacagcgccgacgacctggccaagcagaccaagatcgagtacggcgccgtgagagacggcagcaccatgaccttcttcaagaagagcaagatcagcacctacgagaagatgtgggccttcatgagcagcagacagcagaccgccctggtgagaaacagcgacgagggcatccagagagtgctgaccaccgactacgccctgctgatggagagcaccagcatcgagtacgtgacccagagaaactgcaacctgacccagatcggcggcctgatcgacagcaagggctacggcgtgggcacccccatcggcagcccctacagagacaagatcaccatcgccatcctgcagctgcaggaggagggcaagctgcacatgatgaaggagaagtggtggagaggcaacggctgccccgaggaggacaacaaggaggccagcgccctgggcgtggagaacatcggcggcatcttcatcgtgctggccgccggcctggtgctgagcgtgttcgtggccatcggcgagttcatctacaagagcagaaagaacaacgacatcgagcagtgcctgagcttcaacgccatcatggaggagctgggcatcagcctgaagaaccagaagaagatcaagaagaagagcagaaccaagggcaagagcagcttcaccagcatcctgacctgccaccagagaagaacccagagaaaggagaccgtggcctag

SEQ ID NO: 83148 - DNA, 2247 bp, synthetic construct
  misc_feature 1..2247: note = Description of Artificial Sequence: Synthetic coding sequence
  source 1..2247: mol_type = other DNA
atggagcacggcaccctgctggcccagcccggcctgtggaccagagacaccagctgggccctgctgtacttcctgtgctacatcctgccccagaccgccccccaggtgctgagaatcgcctgcgaccagctggccctgggcgtggccgccctgttcggccccagccacagcagcagcgtgagcgccgtgcagagcatctgcaacgccctggaggtgccccacatccagaccagatggaagcaccccagcgtggacaacaaggacctgttctacatcaacctgtaccccgactacgccgccatcagcagagccatcctggacctggtgctgtactacaactggaagaccgtgaccgtggtgtacgaggacagcaccggcctgatcagactgcaggagctgatcaaggcccccagcagatacaacatcaagatcaagatcagacagctgcccagcggcaacaaggacgccaagcccctgctgaaggagatgaagaagggcaaggagttctacgtgatcttcgactgcagccacgagaccgccgccgagatcctgaagcagatcctgttcatgggcatgatgaccgagtactaccactacttcttcaccaccctggacctgttcgccctggacctggagctgtacagatacagcggcgtgaacatgaccggcttcagactgctgaacatcgacaacccccacgtgagcagcatcatcgagaagtggagcatggagagactgcaggccccccccagacccgagaccggcctgctggacggcatgatgaccaccgaggccgccctgatgtacgacgccgtgtacatggtggccatcgccagccacagagccagccagctgaccgtgagcagcctgcagtgccacagacacaagccctggagactgggccccagattcatgaacctgatcaaggaggccagatgggacggcctgaccggccacatcaccttcaacaagaccaacggcctgagaaaggacttcgacctggacatcatcagcctgaaggaggagggcaccgagaagatcggcatctggaacagcaacagcggcctgaacatgaccgacagcaacaaggacaagagcagcaacatcaccgacagcctggccaacagaaccctgatcgtgaccaccatcctgagagccgacctggccgtggcccccctgaccatcacctacgtgagagagaaggtgatcgacttcagcaagcccttcatgaccctgggcatcagcatcctgtacagaaagcccaacggcaccaaccccggcgtgttcagcttcctgaaccccctgagccccgacatctggatgtacgtgctgctggcctgcctgggcgtgagctgcgtgctgttcgtgatcgccagattcaccccctacgagtggtacaacccccacccctgcaaccccgacagcgacgtggtggagaacaacttcaccctgctgaacagcttctggttcggcgtgggcgccctgatgcagcagggcagcgagctgatgcccaaggccctgagcaccagaatcgtgggcggcatctggtggttcttcaccctgatcatcatcagcagctacaccgccaacctggccgccttcctgaccgtggagagaatggagagccccatcgacagcgccgacgacctggccaagcagaccaagatcgagtacggcgccgtgagagacggcagcaccatgaccttcttcaagaagagcaagatcagcacctacgagaagatgtgggccttcatgagcagcagacagcagaccgccctggtgagaaacagcgacgagggcatccagagagtgctgaccaccgactacgccctgctgatggagagcaccagcatcgagtacgtgacccagagaaactgcaacctgacccagatcggcggcctgatcgacagcaagggctacggcgtgggcacccccatcggcagcccctacagagacaagatcaccatcgccatcctgcagctgcaggaggagggcaagctgcacatgatgaaggagaagtggtggagaggcaacggctgccccgaggaggacaacaaggaggccagcgccctgggcgtggagaacatcggcggcatcttcatcgtgctggccgccggcctggtgctgagcgtgttcgtggccatcggcgagttcatctacaagagcagaaagaacaacgacatcgagcagtgcctgagcttcaacgccatcatggaggagctgggcatcagcctgaagaaccagtag

SEQ ID NO: 83149 - DNA, 2610 bp, synthetic construct
  misc_feature 1..2610: note = Description of Artificial Sequence: Synthetic coding sequence
  source 1..2610: mol_type = other DNA
atgaagatcatcttccccatcctgagcaaccccgtgttcagaagaaccgtgaagctgctgctgtgcctgctgtggatcggctacagccagggcaccacccacgtgctgagattcggcggcatcttcgagtacgtggagagcggccccatgggcgccgaggagctggccttcagattcgccgtgaacaccatcaacagaaacagaaccctgctgcccaacaccaccctgacctacgacacccagaagatcaacctgtacgacagcttcgaggccagcaagaaggcctgcgaccagctgagcctgggcgtggccgccatcttcggccccagccacagcagcagcgccaacgccgtgcagagcatctgcaacgccctgggcgtgccccacatccagaccagatggaagcaccaggtgagcgacaacaaggacagcttctacgtgagcctgtaccccgacttcagcagcctgagcagagccatcctggacctggtgcagttcttcaagtggaagaccgtgaccgtggtgtacgacgacagcaccggcctgatcagactgcaggagctgatcaaggcccccagcagatacaacctgagactgaagatcagacagctgcccgccgacaccaaggacgccaagcccctgctgaaggagatgaagagaggcaaggagttccacgtgatcttcgactgcagccacgagatggccgccggcatcctgaagcaggccctggccatgggcatgatgaccgagtactaccactacatcttcaccaccctggacctgttcgccctggacgtggagccctacagatacagcggcgtgaacatgaccggcttcagaatcctgaacaccgagaacacccaggtgagcagcatcatcgagaagtggagcatggagagactgcaggccccccccaagcccgacagcggcctgctggacggcttcatgaccaccgacgccgccctgatgtacgacgccgtgcacgtggtgagcgtggccgtgcagcagttcccccagatgaccgtgagcagcctgcagtgcaacagacacaagccctggagattcggcaccagattcatgagcctgatcaaggaggcccactgggagggcctgaccggcagaatcaccttcaacaagaccaacggcctgagaaccgacttcgacctggacgtgatcagcctgaaggaggagggcctggagaagatcggcacctgggaccccgccagcggcctgaacatgaccgagagccagaagggcaagcccgccaacatcaccgacagcctgagcaacagaagcctgatcgtgaccaccatcctggaggagccctacgtgctgttcaagaagagcgacaagcccctgtacggcaacgacagattcgagggctactgcatcgacctgctgagagagctgagcaccatcctgggcttcacctacgagatcagactggtggaggacggcaagtacggcgcccaggacgacgccaacggccagtggaacggcatggtgagagagctgatcgaccacaaggccgacctggccgtggcccccctggccatcacctacgtgagagagaaggtgatcgacttcagcaagcccttcatgaccctgggcatcagcatcctgtacagaaagcccaacggcaccaaccccggcgtgttcagcttcctgaaccccctgagccccgacatctggatgtacatcctgctggcctacctgggcgtgagctgcgtgctgttcgtgatcgccagattcagcccctacgagtggtacaacccccacccctgcaaccccgacagcgacgtggtggagaacaacttcaccctgctgaacagcttctggttcggcgtgggcgccctgatgcagcagggcagcgagctgatgcccaaggccctgagcaccagaatcgtgggcggcatctggtggttcttcaccctgatcatcatcagcagctacaccgccaacctggccgccttcctgaccgtggagagaatggagagccccatcgacagcgccgacgacctggccaagcagaccaagatcgagtacggcgccgtggaggacggcgccaccatgaccttcttcaagaagagcaagatcagcacctacgacaagatgtgggccttcatgagcagcagaagacagagcgtgctggtgaagagcaacgaggagggcatccagagagtgctgaccagcgactacgccttcctgatggagagcaccaccatcgagttcgtgacccagagaaactgcaacctgacccagatcggcggcctgatcgacagcaagggctacggcgtgggcacccccatgggcagcccctacagagacaagatcaccatcgccatcctgcagctgcaggaggagggcaagctgcacatgatgaaggagaagtggtggagaggcaacggctgccccgaggaggagagcaaggaggccagcgccctgggcgtgcagaacatcggcggcatcttcatcgtgctggccgccggcctggtgctgagcgtgttcgtggccgtgggcgagttcctgtacaagagcaagaagaacgcccagctggagaaggagagcagcatctggctggtgcccccctaccaccccgacaccgtgtag

SEQ ID NO: 83150 - DNA, 2580 bp, synthetic construct
  misc_feature 1..2580: note = Description of Artificial Sequence: Synthetic coding sequence
  source 1..2580: mol_type = other DNA
atgggcgccgaggagctggccttcagattcgccgtgaacaccatcaacagaaacagaaccctgctgcccaacaccaccctgacctacgacacccagaagatcaacctgtacgacagcttcgaggccagcaagaaggcctgcgaccagctgagcctgggcgtggccgccatcttcggccccagccacagcagcagcgccaacgccgtgcagagcatctgcaacgccctgggcgtgccccacatccagaccagatggaagcaccaggtgagcgacaacaaggacagcttctacgtgagcctgtaccccgacttcagcagcctgagcagagccatcctggacctggtgcagttcttcaagtggaagaccgtgaccgtggtgtacgacgacagcaccggcctgatcagactgcaggagctgatcaaggcccccagcagatacaacctgagactgaagatcagacagctgcccgccgacaccaaggacgccaagcccctgctgaaggagatgaagagaggcaaggagttccacgtgatcttcgactgcagccacgagatggccgccggcatcctgaagcaggccctggccatgggcatgatgaccgagtactaccactacatcttcaccaccctggacctgttcgccctggacgtggagccctacagatacagcggcgtgaacatgaccggcttcagaatcctgaacaccgagaacacccaggtgagcagcatcatcgagaagtggagcatggagagactgcaggccccccccaagcccgacagcggcctgctggacggcttcatgaccaccgacgccgccctgatgtacgacgccgtgcacgtggtgagcgtggccgtgcagcagttcccccagatgaccgtgagcagcctgcagtgcaacagacacaagccctggagattcggcaccagattcatgagcctgatcaaggaggcccactgggagggcctgaccggcagaatcaccttcaacaagaccaacggcctgagaaccgacttcgacctggacgtgatcagcctgaaggaggagggcctggagaagatcggcacctgggaccccgccagcggcctgaacatgaccgagagccagaagggcaagcccgccaacatcaccgacagcctgagcaacagaagcctgatcgtgaccaccatcctggaggagccctacgtgctgttcaagaagagcgacaagcccctgtacggcaacgacagattcgagggctactgcatcgacctgctgagagagctgagcaccatcctgggcttcacctacgagatcagactggtggaggacggcaagtacggcgcccaggacgacgccaacggccagtggaacggcatggtgagagagctgatcgaccacaaggccgacctggccgtggcccccctggccatcacctacgtgagagagaaggtgatcgacttcagcaagcccttcatgaccctgggcatcagcatcctgtacagaaagcccaacggcaccaaccccggcgtgttcagcttcctgaaccccctgagccccgacatctggatgtacatcctgctggcctacctgggcgtgagctgcgtgctgttcgtgatcgccagattcagcccctacgagtggtacaacccccacccctgcaaccccgacagcgacgtggtggagaacaacttcaccctgctgaacagcttctggttcggcgtgggcgccctgatgcagcagggcagcgagctgatgcccaaggccctgagcaccagaatcgtgggcggcatctggtggttcttcaccctgatcatcatcagcagctacaccgccaacctggccgccttcctgaccgtggagagaatggagagccccatcgacagcgccgacgacctggccaagcagaccaagatcgagtacggcgccgtggaggacggcgccaccatgaccttcttcaagaagagcaagatcagcacctacgacaagatgtgggccttcatgagcagcagaagacagagcgtgctggtgaagagcaacgaggagggcatccagagagtgctgaccagcgactacgccttcctgatggagagcaccaccatcgagttcgtgacccagagaaactgcaacctgacccagatcggcggcctgatcgacagcaagggctacggcgtgggcacccccatgggcagcccctacagagacaagatcaccatcgccatcctgcagctgcaggaggagggcaagctgcacatgatgaaggagaagtggtggagaggcaacggctgccccgaggaggagagcaaggaggccagcgccctgggcgtgcagaacatcggcggcatcttcatcgtgctggccgccggcctggtgctgagcgtgttcgtggccgtgggcgagttcctgtacaagagcaagaagaacgcccagctggagaagagaagcttctgcagcgccatggtggaggagctgagaatgagcctgaagtgccagagaagactgaagcacaagccccaggcccccgtgatcgtgaagaccgaggaggtgatcaacatgcacaccttcaacgacagaagactgcccggcaaggagaccatggcctag

SEQ ID NO: 83151 - DNA, 2499 bp, synthetic construct
  misc_feature 1..2499: note = Description of Artificial Sequence: Synthetic coding sequence
  source 1..2499: mol_type = other DNA
atgaagatcatcttccccatcctgagcaaccccgtgttcagaagaaccgtgaagctgctgctgtgcctgctgtggatcggctacagccagggcaccacccacgtgctgagattcggcggcatcttcgagtacgtggagagcggccccatgggcgccgaggagctggccttcagattcgccgtgaacaccatcaacagaaacagaaccctgctgcccaacaccaccctgacctacgacacccagaagatcaacctgtacgacagcttcgaggccagcaagaaggcctgcgaccagctgagcctgggcgtggccgccatcttcggccccagccacagcagcagcgccaacgccgtgcagagcatctgcaacgccctgggcgtgccccacatccagaccagatggaagcaccaggtgagcgacaacaaggacagcttctacgtgagcctgtaccccgacttcagcagcctgagcagagccatcctggacctggtgcagttcttcaagtggaagaccgtgaccgtggtgtacgacgacagcaccggcctgatcagactgcaggagctgatcaaggcccccagcagatacaacctgagactgaagatcagacagctgcccgccgacaccaaggacgccaagcccctgctgaaggagatgaagagaggcaaggagttccacgtgatcttcgactgcagccacgagatggccgccggcatcctgaagcaggccctggccatgggcatgatgaccgagtactaccactacatcttcaccaccctggacctgttcgccctggacgtggagccctacagatacagcggcgtgaacatgaccggcttcagaatcctgaacaccgagaacacccaggtgagcagcatcatcgagaagtggagcatggagagactgcaggccccccccaagcccgacagcggcctgctggacggcttcatgaccaccgacgccgccctgatgtacgacgccgtgcacgtggtgagcgtggccgtgcagcagttcccccagatgaccgtgagcagcctgcagtgcaacagacacaagccctggagattcggcaccagattcatgagcctgatcaaggaggcccactgggagggcctgaccggcagaatcaccttcaacaagaccaacggcctgagaaccgacttcgacctggacgtgatcagcctgaaggaggagggcctggagaagatcggcacctgggaccccgccagcggcctgaacatgaccgagagccagaagggcaagcccgccaacatcaccgacagcctgagcaacagaagcctgatcgtgaccaccatcctggaggagccctacgtgctgttcaagaagagcgacaagcccctgtacggcaacgacagattcgagggctactgcatcgacctgctgagagagctgagcaccatcctgggcttcacctacgagatcagactggtggaggacggcaagtacggcgcccaggacgacgccaacggccagtggaacggcatggtgagagagctgatcgaccacaaggccgacctggccgtggcccccctggccatcacctacgtgagagagaaggtgatcgacttcagcaagcccttcatgaccctgggcatcagcatcctgtacagaaagcccaacggcagcgagctgatgcccaaggccctgagcaccagaatcgtgggcggcatctggtggttcttcaccctgatcatcatcagcagctacaccgccaacctggccgccttcctgaccgtggagagaatggagagccccatcgacagcgccgacgacctggccaagcagaccaagatcgagtacggcgccgtggaggacggcgccaccatgaccttcttcaagaagagcaagatcagcacctacgacaagatgtgggccttcatgagcagcagaagacagagcgtgctggtgaagagcaacgaggagggcatccagagagtgctgaccagcgactacgccttcctgatggagagcaccaccatcgagttcgtgacccagagaaactgcaacctgacccagatcggcggcctgatcgacagcaagggctacggcgtgggcacccccatgggcagcccctacagagacaagatcaccatcgccatcctgcagctgcaggaggagggcaagctgcacatgatgaaggagaagtggtggagaggcaacggctgccccgaggaggagagcaaggaggccagcgccctgggcgtgcagaacatcggcggcatcttcatcgtgctggccgccggcctggtgctgagcgtgttcgtggccgtgggcgagttcctgtacaagagcaagaagaacgcccagctggagaagagaagcttctgcagcgccatggtggaggagctgagaatgagcctgaagtgccagagaagactgaagcacaagccccaggcccccgtgatcgtgaagaccgaggaggtgatcaacatgcacaccttcaacgacagaagactgcccggcaaggagaccatggcctag

SEQ ID NO: 83152 - DNA, 2679 bp, synthetic construct
  misc_feature 1..2679: note = Description of Artificial Sequence: Synthetic coding sequence
  source 1..2679: mol_type = other DNA
atgaagatcatcttccccatcctgagcaaccccgtgttcagaagaaccgtgaagctgctgctgtgcctgctgtggatcggctacagccagggcaccacccacgtgctgagattcggcggcatcttcgagtacgtggagagcggccccatgggcgccgaggagctggccttcagattcgccgtgaacaccatcaacagaaacagaaccctgctgcccaacaccaccctgacctacgacacccagaagatcaacctgtacgacagcttcgaggccagcaagaaggcctgcgaccagctgagcctgggcgtggccgccatcttcggccccagccacagcagcagcgccaacgccgtgcagagcatctgcaacgccctgggcgtgccccacatccagaccagatggaagcaccaggtgagcgacaacaaggacagcttctacgtgagcctgtaccccgacttcagcagcctgagcagagccatcctggacctggtgcagttcttcaagtggaagaccgtgaccgtggtgtacgacgacagcaccggcctgatcagactgcaggagctgatcaaggcccccagcagatacaacctgagactgaagatcagacagctgcccgccgacaccaaggacgccaagcccctgctgaaggagatgaagagaggcaaggagttccacgtgatcttcgactgcagccacgagatggccgccggcatcctgaagcaggccctggccatgggcatgatgaccgagtactaccactacatcttcaccaccctggacctgttcgccctggacgtggagccctacagatacagcggcgtgaacatgaccggcttcagaatcctgaacaccgagaacacccaggtgagcagcatcatcgagaagtggagcatggagagactgcaggccccccccaagcccgacagcggcctgctggacggcttcatgaccaccgacgccgccctgatgtacgacgccgtgcacgtggtgagcgtggccgtgcagcagttcccccagatgaccgtgagcagcctgcagtgcaacagacacaagccctggagattcggcaccagattcatgagcctgatcaaggaggcccactgggagggcctgaccggcagaatcaccttcaacaagaccaacggcctgagaaccgacttcgacctggacgtgatcagcctgaaggaggagggcctggagaagatcggcacctgggaccccgccagcggcctgaacatgaccgagagccagaagggcaagcccgccaacatcaccgacagcctgagcaacagaagcctgatcgtgaccaccatcctggaggagccctacgtgctgttcaagaagagcgacaagcccctgtacggcaacgacagattcgagggctactgcatcgacctgctgagagagctgagcaccatcctgggcttcacctacgagatcagactggtggaggacggcaagtacggcgcccaggacgacgccaacggccagtggaacggcatggtgagagagctgatcgaccacaaggccgacctggccgtggcccccctggccatcacctacgtgagagagaaggtgatcgacttcagcaagcccttcatgaccctgggcatcagcatcctgtacagaaagcccaacggcaccaaccccggcgtgttcagcttcctgaaccccctgagccccgacatctggatgtacatcctgctggcctacctgggcgtgagctgcgtgctgttcgtgatcgccagattcagcccctacgagtggtacaacccccacccctgcaaccccgacagcgacgtggtggagaacaacttcaccctgctgaacagcttctggttcggcgtgggcgccctgatgcagcagggcagcgagctgatgcccaaggccctgagcaccagaatcgtgggcggcatctggtggttcttcaccctgatcatcatcagcagctacaccgccaacctggccgccttcctgaccgtggagagaatggagagccccatcgacagcgccgacgacctggccaagcagaccaagatcgagtacggcgccgtggaggacggcgccaccatgaccttcttcaagaagagcaagatcagcacctacgacaagatgtgggccttcatgagcagcagaagacagagcgtgctggtgaagagcaacgaggagggcatccagagagtgctgaccagcgactacgccttcctgatggagagcaccaccatcgagttcgtgacccagagaaactgcaacctgacccagatcggcggcctgatcgacagcaagggctacggcgtgggcacccccatgggcagcccctacagagacaagatcaccatcgccatcctgcagctgcaggaggagggcaagctgcacatgatgaaggagaagtggtggagaggcaacggctgccccgaggaggagagcaaggaggccagcgccctgggcgtgcagaacatcggcggcatcttcatcgtgctggccgccggcctggtgctgagcgtgttcgtggccgtgggcgagttcctgtacaagagcaagaagaacgcccagctggagaagagagccaagaccaagctgccccaggactacgtgttcctgcccatcctggagagcgtgagcatcagcaccgtgctgagcagcagccccagcagcagcagcctgagcagctgcagctag

SEQ ID NO: 83153 - DNA, 1755 bp, synthetic construct
  misc_feature 1..1755: note = Description of Artificial Sequence: Synthetic coding sequence
  source 1..1755: mol_type = other DNA
atgaagatcatcttccccatcctgagcaaccccgtgttcagaagaaccgtgaagctgctgctgtgcctgctgtggatcggctacagccagggcaccacccacgtgctgagattcggcggcatcttcgagtacgtggagagcggccccatgggcgccgaggagctggccttcagattcgccgtgaacaccatcaacagaaacagaaccctgctgcccaacaccaccctgacctacgacacccagaagatcaacctgtacgacagcttcgaggccagcaagaaggcctgcgaccagctgagcctgggcgtggccgccatcttcggccccagccacagcagcagcgccaacgccgtgcagagcatctgcaacgccctgggcgtgccccacatccagaccagatggaagcaccaggtgagcgacaacaaggacagcttctacgtgagcctgtaccccgacttcagcagcctgagcagagccatcctggacctggtgcagttcttcaagtggaagaccgtgaccgtggtgtacgacgacagcaccggcctgatcagactgcaggagctgatcaaggcccccagcagatacaacctgagactgaagatcagacagctgcccgccgacaccaaggacgccaagcccctgctgaaggagatgaagagaggcaaggagttccacgtgatcttcgactgcagccacgagatggccgccggcatcctgaagcaggccctggccatgggcatgatgaccgagtactaccactacatcttcaccaccctggacctgttcgccctggacgtggagccctacagatacagcggcgtgaacatgaccggcttcagaatcctgaacaccgagaacacccaggtgagcagcatcatcgagaagtggagcatggagagactgcaggccccccccaagcccgacagcggcctgctggacggcttcatgaccaccgacgccgccctgatgtacgacgccgtgcacgtggtgagcgtggccgtgcagcagttcccccagatgaccgtgagcagcctgcagtgcaacagacacaagccctggagattcggcaccagattcatgagcctgatcaaggaggcccactgggagggcctgaccggcagaatcaccttcaacaagaccaacggcctgagaaccgacttcgacctggacgtgatcagcctgaaggaggagggcctggagaagatcggcacctgggaccccgccagcggcctgaacatgaccgagagccagaagggcaagcccgccaacatcaccgacagcctgagcaacagaagcctgatcgtgaccaccatcctggaggagccctacgtgctgttcaagaagagcgacaagcccctgtacggcaacgacagattcgagggctactgcatcgacctgctgagagagctgagcaccatcctgggcttcacctacgagatcagactggtggaggacggcaagtacggcgcccaggacgacgccaacggccagtggaacggcatggtgagagagctgatcgaccacaaggccgacctggccgtggcccccctggccatcacctacgtgagagagaaggtgatcgacttcagcaagcccttcatgaccctgggcatcagcatcctgtacagaaagcccaacggcaccaaccccggcgtgttcagcttcctgaaccccctgagccccgacatctggatgtacatcctgctggcctacctgggcgtgagctgcgtgctgttcgtgatcgccagattctag

SEQ ID NO: 83154 - DNA, 2610 bp, synthetic construct; identical to SEQ ID NO: 83149
  misc_feature 1..2610: note = Description of Artificial Sequence: Synthetic coding sequence
  source 1..2610: mol_type = other DNA

SEQ ID NO: 83155 - DNA, 2727 bp, synthetic construct
  misc_feature 1..2727: note = Description of Artificial Sequence: Synthetic coding sequence
  source 1..2727: mol_type = other DNA
atgaagatcatcttccccatcctgagcaaccccgtgttcagaagaaccgtgaagctgctgctgtgcctgctgtggatcggctacagccagggcaccacccacgtgctgagattcggcggcatcttcgagtacgtggagagcggccccatgggcgccgaggagctggccttcagattcgccgtgaacaccatcaacagaaacagaaccctgctgcccaacaccaccctgacctacgacacccagaagatcaacctgtacgacagcttcgaggccagcaagaaggcctgcgaccagctgagcctgggcgtggccgccatcttcggccccagccacagcagcagcgccaacgccgtgcagagcatctgcaacgccctgggcgtgccccacatccagaccagatggaagcaccaggtgagcgacaacaaggacagcttctacgtgagcctgtaccccgacttcagcagcctgagcagagccatcctggacctggtgcagttcttcaagtggaagaccgtgaccgtggtgtacgacgacagcaccggcctgatcagactgcaggagctgatcaaggcccccagcagatacaacctgagactgaagatcagacagctgcccgccgacaccaaggacgccaagcccctgctgaaggagatgaagagaggcaaggagttccacgtgatcttcgactgcagccacgagatggccgccggcatcctgaagcaggccctggccatgggcatgatgaccgagtactaccactacatcttcaccaccctggacctgttcgccctggacgtggagccctacagatacagcggcgtgaacatgaccggcttcagaatcctgaacaccgagaacacccaggtgagcagcatcatcgagaagtggagcatggagagactgcaggccccccccaagcccgacagcggcctgctggacggcttcatgaccaccgacgccgccctgatgtacgacgccgtgcacgtggtgagcgtggccgtgcagcagttcccccagatgaccgtgagcagcctgcagtgcaacagacacaagccctggagattcggcaccagattcatgagcctgatcaaggaggcccactgggagggcctgaccggcagaatcaccttcaacaagaccaacggcctgagaaccgacttcgacctggacgtgatcagcctgaaggaggagggcctggagaagatcggcacctgggaccccgccagcggcctgaacatgaccgagagccagaagggcaagcccgccaacatcaccgacagcctgagcaacagaagcctgatcgtgaccaccatcctggaggagccctacgtgctgttcaagaagagcgacaagcccctgtacggcaacgacagattcgagggctactgcatcgacctgctgagagagctgagcaccatcctgggcttcacctacgagatcagactggtggaggacggcaagtacggcgcccaggacgacgccaacggccagtggaacggcatggtgagagagctgatcgaccacaaggccgacctggccgtggcccccctggccatcacctacgtgagagagaaggtgatcgacttcagcaagcccttcatgaccctgggcatcagcatcctgtacagaaagcccaacggcaccaaccccggcgtgttcagcttcctgaaccccctgagccccgacatctggatgtacatcctgctggcctacctgggcgtgagctgcgtgctgttcgtgatcgccagattcagcccctacgagtggtacaacccccacccctgcaaccccgacagcgacgtggtggagaacaacttcaccctgctgaacagcttctggttcggcgtgggcgccctgatgcagcagggcagcgagctgatgcccaaggccctgagcaccagaatcgtgggcggcatctggtggttcttcaccctgatcatcatcagcagctacaccgccaacctggccgccttcctgaccgtggagagaatggagagccccatcgacagcgccgacgacctggccaagcagaccaagatcgagtacggcgccgtggaggacggcgccaccatgaccttcttcaagaagagcaagatcagcacctacgacaagatgtgggccttcatgagcagcagaagacagagcgtgctggtgaagagcaacgaggagggcatccagagagtgctgaccagcgactacgccttcctgatggagagcaccaccatcgagttcgtgacccagagaaactgcaacctgacccagatcggcggcctgatcgacagcaagggctacggcgtgggcacccccatgggcagcccctacagagacaagatcaccatcgccatcctgcagctgcaggaggagggcaagctgcacatgatgaaggagaagtggtggagaggcaacggctgccccgaggaggagagcaaggaggccagcgccctgggcgtgcagaacatcggcggcatcttcatcgtgctggccgccggcctggtgctgagcgtgttcgtggccgtgggcgagttcctgtacaagagcaagaagaacgcccagctggagaagagaagcttctgcagcgccatggtggaggagctgagaatgagcctgaagtgccagagaagactgaagcacaagccccaggcccccgtgatcgtgaagaccgaggaggtgatcaacatgcacaccttcaacgacagaagactgcccggcaaggagaccatggcctag

SEQ ID NO: 83156 - DNA, 1935 bp, synthetic construct
  misc_feature 1..1935: note = Description of Artificial Sequence: Synthetic coding sequence
  source 1..1935: mol_type = other DNA
ggcggcatcttcgagtacgtggagagcggccccatgggcgccgaggagctggccttcagattcgccgtgaacaccatcaacagaaacagaaccctgctgcccaacaccaccctgacctacgacacccagaagatcaacctgtacgacagcttcgaggccagcaagaaggcctgcgaccagctgagcctgggcgtggccgccatcttcggccccagccacagcagcagcgccaacgccgtgcagagcatctgcaacgccctgggcgtgccccacatccagaccagatggaagcaccaggtgagcgacaacaaggacagcttctacgtgagcctgtaccccgacttcagcagcctgagcagagccatcctggacctggtgcagttcttcaagtggaagaccgtgaccgtggtgtacgacgacagcaccggcctgatcagactgcaggagctgatcaaggcccccagcagatacaacctgagactgaagatcagacagctgcccgccgacaccaaggacgccaagcccctgctgaaggagatgaagagaggcaaggagttccacgtgatcttcgactgcagccacgagatggccgccggcatcctgaagcaggccctggccatgggcatgatgaccgagtactaccactacatcttcaccaccctggacctgttcgccctggacgtggagccctacagatacagcggcgtgaacatgaccggcttcagaatcctgaacaccgagaacacccaggtgagcagcatcatcgagaagtggagcatggagagactgcaggccccccccaagcccgacagcggcctgctggacggcttcatgaccaccgacgccgccctgatgtacgacgccgtgcacgtggtgagcgtggccgtgcagcagttcccccagatgaccgtgagcagcctgcagtgcaacagacacaagccctggagattcggcaccagattcatgagcctgatcaaggaggcccactgggagggcctgaccggcagaatcaccttcaacaagaccaacggcctgagaaccgacttcgacctggacgtgatcagcctgaaggaggagggcctggagaagatcggcacctgggaccccgccagcggcctgaacatgaccgagagccagaagggcaagcccgccaacatcaccgacagcctgagcaacagaagcctgatcgtgaccaccatcctggaggagccctacgtgctgttcaagaagagcgacaagcccctgtacggcaacgacagattcgagggctactgcatcgacctgctgagagagctgagcaccatcctgggcttcacctacgagatcagactggtggaggacggcaagtacggcgcccaggacgacgccaacggccagtggaacggcatggtgagagagctgatcgaccacaagagcaagatcagcacctacgacaagatgtgggccttcatgagcagcagaagacagagcgtgctggtgaagagcaacgaggagggcatccagagagtgctgaccagcgactacgccttcctgatggagagcaccaccatcgagttcgtgacccagagaaactgcaacctgacccagatcggcggcctgatcgacagcaagggctacggcgtgggcacccccatgggcagcccctacagagacaagatcaccatcgccatcctgcagctgcaggaggagggcaagctgcacatgatgaaggagaagtggtggagaggcaacggctgccccgaggaggagagcaaggaggccagcgccctgggcgtgcagaacatcggcggcatcttcatcgtgctggccgccggcctggtgctgagcgtgttcgtggccgtgggcgagttcctgtacaagagcaagaagaacgcccagctggagaaggagagcagcatctggctggtgcccccctaccaccccgacaccgtgtag

SEQ ID NO: 83157 - DNA, 2760 bp, synthetic construct
  misc_feature 1..2760: note = Description of Artificial Sequence: Synthetic coding sequence
  source 1..2760: mol_type = other DNA
atgaccgccccctggagaagactgagaagcctggtgtgggagtactgggccggcctgctggtgtgcgccttctggatccccgacagcagaggcatgccccacgtgatcagaatcggcggcatcttcgagtacgccgacggccccaacgcccaggtgatgaacgccgaggagcacgccttcagattcagcgccaacatcatcaacagaaacagaaccctgctgcccaacaccaccctgacctacgacatccagagaatccacttccacgacagcttcgaggccaccaagaaggcctgcgaccagctggccctgggcgtggtggccatcttcggccccagccagggcagctgcaccaacgccgtgcagagcatctgcaacgccctggaggtgccccacatccagctgagatggaagcaccaccccctggacaacaaggacaccttctacgtgaacctgtaccccgactacgccagcctgagccacgccatcctggacctggtgcagtacctgaagtggagaagcgccaccgtggtgtacgacgacagcaccggcctgatcagactgcaggagctgatcatggcccccagcagatacaacatcagactgaagatcagacagctgcccatcgacagcgacgacagcagacccctgctgaaggagatgaagagaggcagagagttcagaatcatcttcgactgcagccacaccatggccgcccagatcctgaagcaggccatggccatgggcatgatgaccgagtactaccacttcatcttcaccaccctggacctgtacgccctggacctggagccctacagatacagcggcgtgaacctgaccggcttcagaatcctgaacgtggacaacccccacgtgagcgccatcgtggagaagtggagcatggagagactgcaggccgcccccagaagcgagagcggcctgctggacggcgtgatgatgaccgacgccgccctgctgtacgacgccgtgcacatcgtgagcgtgtgctaccagagagccccccagatgaccgtgaacagcctgcagtgccacagacacaaggcctggagattcggcggcagattcatgaacttcatcaaggaggcccagtgggagggcctgaccggcagaatcgtgttcaacaagaccagcggcctgagaaccgacttcgacctggacatcatcagcctgaaggaggacggcctggagaaggtgggcgtgtggagccccgccgacggcctgaacatcaccgaggtggccaagggcagaggccccaacgtgaccgacagcctgaccaacagaagcctgatcgtgaccaccgtgctggaggagcccttcgtgatgttcagaaagagcgacagaaccctgtacggcaacgacagattcgagggctactgcatcgacctgctgaaggagctggcccacatcctgggcttcagctacgagatcagactggtggaggacggcaagtacggcgcccaggacgacaagggccagtggaacggcatggtgaaggagctgatcgaccacaaggccgacctggccgtggcccccctgaccatcacccacgtgagagagaaggccatcgacttcagcaagcccttcatgaccctgggcgtgagcatcctgtacagaaagcccaacggcaccaaccccagcgtgttcagcttcctgaaccccctgagccccgacatctggatgtacgtgctgctggcctacctgggcgtgagctgcgtgctgttcgtgatcgccagattcagcccctacgagtggtacgacgcccacccctgcaaccccggcagcgaggtggtggagaacaacttcaccctgctgaacagcttctggttcggcatgggcagcctgatgcagcagggcagcgagctgatgcccaaggccctgagcaccagaatcatcggcggcatctggtggttcttcaccctgatcatcatcagcagctacaccgccaacctggccgccttcctgaccgtggagagaatggagagccccatcgacagcgccgacgacctggccaagcagaccaagatcgagtacggcgccgtgaaggacggcgccaccatgaccttcttcaagaagagcaagatcagcaccttcgagaagatgtgggccttcatgagcagcaagcccagcgccctggtgaagaacaacgaggagggcatccagagagccctgaccgccgactacgccctgctgatggagagcaccaccatcgagtacgtgacccagagaaactgcaacctgacccagatcggcggcctgatcgacagcaagggctacggcatcggcacccccatgggcagcccctacagagacaagatcaccatcgccatcctgcagctgcaggaggaggacaagctgcacatcatgaaggagaagtggtggagaggcagcggctgccccgaggaggagaacaaggaggccagcgccctgggcatccagaagatcggcggcatcttcatcgtgctggccgccggcctggtgctgagcgtgctggtggccgtgggcgagttcgtgtacaagctgagaaagaccgccgagagagagcagagaagcttctgcagcaccgtggccgacgagatcagattcagcctgacctgccagagaagagtgaagcacaagccccagccccccatgatggtgaagaccgacgccgtgatcaacatgcacaccttcaacgacagaagactgcccggcaaggacagcatggcctgcagcaccagcctggcccccgtgttcccctag

SEQ ID NO: 83158 - DNA, 2619 bp, synthetic construct
  misc_feature 1..2619: note = Description of Artificial Sequence: Synthetic coding sequence
  source 1..2619: mol_type = other DNA
atgaccgccccctggagaagactgagaagcctggtgtgggagtactgggccggcctgctggtgtgcgccttctggatccccgacagcagaggcatgccccacgtgatcagaatcggcggcatcttcgagtacgccgacggccccaacgcccaggtgatgaacgccgaggagcacgccttcagattcagcgccaacatcatcaacagaaacagaaccctgctgcccaacaccaccctgacctacgacatccagagaatccacttccacgacagcttcgaggccaccaagaaggcctgcgaccagctggccctgggcgtggtggccatcttcggccccagccagggcagctgcaccaacgccgtgcagagcatctgcaacgccctggaggtgccccacatccagctgagatggaagcaccaccccctggacaacaaggacaccttctacgtgaacctgtaccccgactacgccagcctgagccacgccatcctggacctggtgcagtacctgaagtggagaagcgccaccgtggtgtacgacgacagcaccggcctgatcagactgcaggagctgatcatggcccccagcagatacaacatcagactgaagatcagacagctgcccatcgacagcgacgacagcagacccctgctgaaggagatgaagagaggcagagagttcagaatcatcttcgactgcagccacaccatggccgcccagatcctgaagcaggccatggccatgggcatgatgaccgagtactaccacttcatcttcaccaccctggacctgtacgccctggacctggagccctacagatacagcggcgtgaacctgaccggcttcagaatcctgaacgtggacaacccccacgtgagcgccatcgtggagaagtggagcatggagagactgcaggccgcccccagaagcgagagcggcctgctggacggcgtgatgatgaccgacgccgccctgctgtacgacgccgtgcacatcgtgagcgtgtgctaccagagagccccccagatgaccgtgaacagcctgcagtgccacagacacaaggcctggagattcggcggcagattcatgaacttcatcaaggaggcccagtgggagggcctgaccggcagaatcgtgttcaacaagaccagcggcctgagaaccgacttcgacctggacatcatcagcctgaaggaggacggcctggagaaggtgggcgtgtggagccccgccgacggcctgaacatcaccgaggtggccaagggcagaggccccaacgtgaccgacagcctgaccaacagaagcctgatcgtgaccaccgtgctggaggagcccttcgtgatgttcagaaagagcgacagaaccctgtacggcaacgacagattcgagggctactgcatcgacctgctgaaggagctggcccacatcctgggcttcagctacgagatcagactggtggaggacggcaagtacggcgcccaggacgacaagggccagtggaacggcatggtgaaggagctgatcgaccacaaggccgacctggccgtggcccccctgaccatcacccacgtgagagagaaggccatcgacttcagcaagcccttcatgaccctgggcgtgagcatcctgtacagaaagcccaacggcaccaaccccagcgtgttcagcttcctgaaccccctgagccccgacatctggatgtacgtgctgctggcctacctgggcgtgagctgcgtgctgttcgtgatcgccagattcagcccctacgagtggtacgacgcccacccctgcaaccccggcagcgaggtggtggagaacaacttcaccctgctgaacagcttctggttcggcatgggcagcctgatgcagcagggcagcgagctgatgcccaaggccctgagcaccagaatcatcggcggcatctggtggttcttcaccctgatcatcatcagcagctacaccgccaacctggccgccttcctgaccgtggagagaatggagagccccatcgacagcgccgacgacctggccaagcagaccaagatcgagtacggcgccgtgaaggacggcgccaccatgaccttcttcaagaagagcaagatcagcaccttcgagaagatgtgggccttcatgagcagcaagcccagcgccctggtgaagaacaacgaggagggcatccagagagccctgaccgccgactacgccctgctgatggagagcaccaccatcgagtacgtgacccagagaaactgcaacctgacccagatcggcggcctgatcgacagcaagggctacggcatcggcacccccatgggcagcccctacagagacaagatcaccatcgccatcctgcagctgcaggaggaggacaagctgcacatcatgaaggagaagtggtggagaggcagcggctgccccgaggaggagaacaaggaggccagcgccctgggcatccagaagatcggcggcatcttcatcgtgctggccgccggcctggtgctgagcgtgctggtggccgtgggcgagttcgtgtacaagctgagaaagaccgccgagagagagcaggtgagcctgagagcctggagcctgcacagaatgggcaacggcgacagcagatag

SEQ ID NO: 83159 - DNA, 2871 bp, synthetic construct
  misc_feature 1..2871: note = Description of Artificial Sequence: Synthetic coding sequence
  source 1..2871: mol_type = other DNA
atgcccagagtgagcgcccccctggtgctgctgcccgcctggctggtgatggtggcctgcagcccccacagcctgagaatcgccgccatcctggacgaccccatggagtgcagcagaggcgagagactgagcatcaccctggccaagaacagaatcaacagagcccccgagagactgggcaaggccaaggtggaggtggacatcttcgagctgctgagagacagcgagtacgagaccgccgagaccatgtgccagatcctgcccaagggcgtggtggccgtgctgggccccagcagcagccccgccagcagcagcatcatcagcaacatctgcggcgagaaggaggtgccccacttcaaggtggcccccgaggagttcgtgaagttccagttccagagattcaccaccctgaacctgcaccccagcaacaccgacatcagcgtggccgtggccggcatcctgaacttcttcaactgcaccaccgcctgcctgatctgcgccaaggccgagtgcctgctgaacctggagaagctgctgagacagttcctgatcagcaaggacaccctgagcgtgagaatgctggacgacaccagagaccccacccccctgctgaaggagatcagagacgacaagaccgccaccatcatcatccacgccaacgccagcatgagccacaccatcctgctgaaggccgccgagctgggcatggtgagcgcctactacacctacatcttcaccaacctggagttcagcctgcagagaatggacagcctggtggacgacagagtgaacatcctgggcttcagcatcttcaaccagagccacgccttcttccaggagttcgcccagagcctgaaccagagctggcaggagaactgcgaccacgtgcccttcaccggccccgccctgagcagcgccctgctgttcgacgccgtgtacgccgtggtgaccgccgtgcaggagctgaacagaagccaggagatcggcgtgaagcccctgagctgcggcagcgcccagatctggcagcacggcaccagcctgatgaactacctgagaatggtggagctggagggcctgaccggccacatcgagttcaacagcaagggccagagaagcaactacgccctgaagatcctgcagttcaccagaaacggcttcagacagatcggccagtggcacgtggccgagggcctgagcatggacagccacctgtacgccagcaacatcagcgacaccctgttcaacaccaccctggtggtgaccaccatcctggagaacccctacctgatgctgaagggcaaccaccaggagatggagggcaacgacagatacgagggcttctgcgtggacatgctgaaggagctggccgagatcctgagattcaactacaagatcagactggtgggcgacggcgtgtacggcgtgcccgaggccaacggcacctggaccggcatggtgggcgagctgatcgccagaaaggccgacctggccgtggccggcctgaccatcaccgccgagagagagaaggtgatcgacttcagcaagcccttcatgaccctgggcatcagcatcctgtacagagtgcacatgggcagaaagcccggctacttcagcttcctggaccccttcagccccggcgtgtggctgttcatgctgctggcctacctggccgtgagctgcgtgctgttcctggtggccagactgaccccctacgagtggtacagcccccacccctgcgcccagggcagatgcaacctgctggtgaaccagtacagcctgggcaacagcctgtggttccccgtgggcggcttcatgcagcagggcagcaccatcgcccccagagccctgagcaccagatgcgtgagcggcgtgtggtgggccttcaccctgatcatcatcagcagctacaccgccaacctggccgccttcctgaccgtgcagagaatggacgtgcccatcgagagcgtggacgacctggccgaccagaccgccatcgagtacggcaccatccacggcggcagcagcatgaccttcttccagaacagcagataccagacctaccagagaatgtggaactacatgtacagcaagcagcccagcgtgttcgtgaagagcaccgaggagggcatcgccagagtgctgaacagcaactacgccttcctgctggagagcaccatgaacgagtactacagacagagaaactgcaacctgacccagatcggcggcctgctggacaccaagggctacggcatcggcatgcccgtgggcagcgtgttcagagacgagttcgacctggccatcctgcagctgcaggagaacaacagactggagatcctgaagagaaagtggtgggagggcggcaagtgccccaaggaggaggaccacagagccaagggcctgggcatggagaacatcggcggcatcttcgtggtgctgatctgcggcctgatcgtggccatcttcatggccatgctggagttcctgtggaccctgagacacagcgaggccaccgaggtgagcgtgtgccaggagatggtgaccgagctgagaagcatcatcctgtgccaggacagcatccaccccagaagaagaagagccgccgtgcccccccccagaccccccatccccgaggagagaagacccagaggcaccgccaccctgagcaacggcaagctgtgcggcgccggcgagcccgaccagctggcccagagactggcccaggaggccgccctggtggccagaggctgcacccacatcagagtgtgccccgagtgcagaagattccagggcctgagagccagacccagccccgccagaagcgaggagagcctggagtgggagaagaccaccaacagcagcgagcccgagtag

SEQ ID NO: 83160 - DNA, 2871 bp, synthetic construct; identical to SEQ ID NO: 83159
  misc_feature 1..2871: note = Description of Artificial Sequence: Synthetic coding sequence
  source 1..2871: mol_type = other DNA

SEQ ID NO: 83161 - DNA, 2943 bp, synthetic construct
  misc_feature 1..2943: note = Description of Artificial Sequence: Synthetic coding sequence
  source 1..2943: mol_type = other DNA
atgcccgccgagctgctgctgctgctgatcgtggccttcgccagccccagctgccaggtgctgagcagcctgagaatggccgccatcctggacgaccagaccgtgtgcggcagaggcgagagactggccctggccctggccagagagcagatcaacggcatcatcgaggtgcccgccaaggccagagtggaggtggacatcttcgagctgcagagagacagccagtacgagaccaccgacaccatgtgccagatcctgcccaagggcgtggtgagcgtgctgggccccagcagcagccccgccagcgccagcaccgtgagccacatctgcggcgagaaggagatcccccacatcaaggtgggccccgaggagacccccagactgcagtacctgagattcgccagcgtgagcctgtaccccagcaacgaggacgtgagcctggccgtgagcagaatcctgaagagcttcaactaccccagcgccagcctgatctgcgccaaggccgagtgcctgctgagactggaggagctggtgagaggcttcctgatcagcaaggagaccctgagcgtgagaatgctggacgacagcagagaccccacccccctgctgaaggagatcagagacgacaaggtgagcaccatcatcatcgacgccaacgccagcatcagccacctgatcctgagaaaggccagcgagctgggcatgaccagcgccttctacaagtacatcctgaccaccatggacttccccatcctgcacctggacggcatcgtggaggacagcagcaacatcctgggcttcagcatgttcaacaccagccaccccttctaccccgagttcgtgagaagcctgaacatgagctggagagagaactgcgaggccagcacctacctgggccccgccctgagcgccgccctgatgttcgacgccgtgcacgtggtggtgagcgccgtgagagagctgaacagaagccaggagatcggcgtgaagcccctggcctgcaccagcgccaacatctggccccacggcaccagcctgatgaactacctgagaatggtggagtacgacggcctgaccggcagagtggagttcaacagcaagggccagagaaccaactacaccctgagaatcctggagaagagcagacagggccacagagagatcggcgtgtggtacagcaacagaaccctggccatgaacgccaccaccctggacatcaacctgagccagaccctggccaacaagaccctggtggtgaccaccatcctggagaacccctacgtgatgagaagacccaacttccaggccctgagcggcaacgagagattcgagggcttctgcgtggacatgctgagagagctggccgagctgctgagattcagatacagactgagactggtggaggacggcctgtacggcgcccccgagcccaacggcagctggaccggcatggtgggcgagctgatcaacagaaaggccgacctggccgtggccgccttcaccatcaccgccgagagagagaaggtgatcgacttcagcaagcccttcatgaccctgggcatcagcatcctgtacagagtgcacatgggcagaaagcccggctacttcagcttcctggaccccttcagccccgccgtgtggctgttcatgctgctggcctacctggccgtgagctgcgtgctgttcctggccgccagactgagcccctacgagtggtacaacccccacccctgcctgagagccagaccccacatcctggagaaccagtacaccctgggcaacagcctgtggttccccgtgggcggcttcatgcagcagggcagcgagatcatgcccagagccctgagcaccagatgcgtgagcggcgtgtggtgggccttcaccctgatcatcatcagcagctacaccgccaacctggccgccttcctgaccgtgcagagaatggaggtgcccgtggagagcgccgacgacctggccgaccagaccaacatcgagtacggcaccatccacgccggcagcaccatgaccttcttccagaacagcagataccagacctaccagagaatgtggaactacatgcagagcaagcagcccagcgtgttcgtgaagagcaccgaggagggcatcgccagagtgctgaacagcagatacgccttcctgctggagagcaccatgaacgagtaccacagaagactgaactgcaacctgacccagatcggcggcctgctggacaccaagggctacggcatcggcatgcccctgggcagccccttcagagacgagatcaccctggccatcctgcagctgcaggagaacaacagactggagatcctgaagagaaagtggtgggagggcggcagatgccccaaggaggaggaccacagagccaagggcctgggcatggagaacatcggcggcatcttcatcgtgctgatctgcggcctgatcatcgccgtgttcgtggccgtgatggagttcatctggagcaccagaagaagcgccgagagcgaggaggtgagcgtgtgccaggagatgctgcaggagctgagacacgccgtgagctgcagaaagaccagcagaagcagaagaagaagaagacccggcggccccagcagagccctgctgagcctgagagccgtgagagagatgagactgagcaacggcaagctgtacagcgccggcgccggcggcgacgccggcagcgcccacggcggcccccagagactgctggacgaccccggcccccccagcggcgccagacccgccgcccccaccccctgcacccacgtgagagtgtgccaggagtgcagaagaatccaggccctgagagccagcggcgccggcgccccccccagaggcctgggcgtgcccgccgaggccaccagcccccccagacccagacccggccccgccggccccagagagctggccgagcacgagtag

SEQ ID NO: 83162 - DNA, 2946 bp, synthetic construct
  misc_feature 1..2946: note = Description of Artificial Sequence: Synthetic coding sequence
  source 1..2946: mol_type = other DNA
atgcccgccgagctgctgctgctgctgatcgtggccttcgccagccccagctgccaggtgctgagcagcctgagaatggccgccatcctggacgaccagaccgtgtgcggcagaggcgagagactggccctggccctggccagagagcagatcaacggcatcatcgaggtgcccgccaaggccagagtggaggtggacatcttcgagctgcagagagacagccagtacgagaccaccgacaccatgtgccagatcctgcccaagggcgtggtgagcgtgctgggccccagcagcagccccgccagcgccagcaccgtgagccacatctgcggcgagaaggagatcccccacatcaaggtgggccccgaggagacccccagactgcagtacctgagattcgccagcgtgagcctgtaccccagcaacgaggacgtgagcctggccgtgagcagaatcctgaagagcttcaactaccccagcgccagcctgatctgcgccaaggccgagtgcctgctgagactggaggagctggtgagaggcttcctgatcagcaaggagaccctgagcgtgagaatgctggacgacagcagagaccccacccccctgctgaaggagatcagagacgacaaggtgagcaccatcatcatcgacgccaacgccagcatcagccacctgatcctgagaaaggccagcgagctgggcatgaccagcgccttctacaagtacatcctgaccaccatggacttccccatcctgcacctggacggcatcgtggaggacagcagcaacatcctgggcttcagcatgttcaacaccagccaccccttctaccccgagttcgtgagaagcctgaacatgagctggagagagaactgcgaggccagcacctacctgggccccgccctgagcgccgccctgatgttcgacgccgtgcacgtggtggtgagcgccgtgagagagctgaacagaagccaggagatcggcgtgaagcccctggcctgcaccagcgccaacatctggccccacggcaccagcctgatgaactacctgagaatggtggagtacgacggcctgaccggcagagtggagttcaacagcaagggccagagaaccaactacaccctgagaatcctggagaagagcagacagggccacagagagatcggcgtgtggtacagcaacagaaccctggccatgaacgccaccaccctggacatcaacctgagccagaccctggccaacaagaccctggtggtgaccaccatcctggagaacccctacgtgatgagaagacccaacttccaggccctgagcggcaacgagagattcgagggcttctgcgtggacatgctgagagagctggccgagctgctgagattcagatacagactgagactggtggaggacggcctgtacggcgcccccgagcccaacggcagctggaccggcatggtgggcgagctgatcaacagaaaggccgacctggccgtggccgccttcaccatcaccgccgagagagagaaggtgatcgacttcagcaagcccttcatgaccctgggcatcagcatcctgtacagagtgcacatgggcagaaagcccggctacttcagcttcctggaccccttcagccccgccgtgtggctgttcatgctgctggcctacctggccgtgagctgcgtgctgttcctggccgccagactgagcccctacgagtggtacaacccccacccctgcctgagagccagaccccacatcctggagaaccagtacaccctgggcaacagcctgtggttccccgtgggcggcttcatgcagcagggcagcgagatcatgcccagagccctgagcaccagatgcgtgagcggcgtgtggtgggccttcaccctgatcatcatcagcagctacaccgccaacctggccgccttcctgaccgtgcagagaatggaggtgcccgtggagagcgccgacgacctggccgaccagaccaacatcgagtacggcaccatccacgccggcagcaccatgaccttcttccagaacagcagataccagacctaccagagaatgtggaactacatgcagagcaagcagcccagcgtgttcgtgaagagcaccgaggagggcatcgccagagtgctgaacagcagatacgccttcctgctggagagcaccatgaacgagtaccacagaagactgaactgcaacctgacccagatcggcggcctgctggacaccaagggctacggcatcggcatgcccctgggcagccccttcagagacgagatcaccctggccatcctgcagctgcaggagaacaacagactggagatcctgaagagaaagtggtgggagggcggcagatgccccaaggaggaggaccacagagccaagggcctgggcatggagaacatcggcggcatcttcatcgtgctgatctgcggcctgatcatcgccgtgttcgtggccgtgatggagttcatctggagcaccagaagaagcgccgagagcgaggagacccccgccctgcaccccgccgcctgccagtgcagcgccctgggccccagaacccccctgaaggagcccagcatgctgctggtgaaggtgcccagcaccagagtgcaggtggccttcagcagaaccagcctgagacaggtgtgccccttcctgctgcagcaccagctgagcagcctgtactggatccaggccaccaacgtgcagatctgctgccacttcagcagcctgaagcccagccccgacctgaccttcccccccagccacagacccctgagcagcctgctgttcaccgccctggccgccgtgggcggcctgcccgacgccagcagcttcttcttcccccccatcagcagctgcccccccctgcagagcggcatcggcccctgccacagcaccgaggccaccctggtgaccagcaacttccacgtgtag

SEQ ID NO: 83163 - DNA, 1077 bp, synthetic construct
  misc_feature 1..1077: note = Description of Artificial Sequence: Synthetic coding sequence
  source 1..1077: mol_type = other DNA
tgatgggccttcaccctgatcatcatcagcagctacaccgccaacctggccgccttcctgaccgtgcagagaatggaggtgcccgtggagagcgccgacgacctggccgaccagaccaacatcgagtacggcaccatccacgccggcagcaccatgaccttcttccagaacagcagataccagacctaccagagaatgtggaactacatgcagagcaagcagcccagcgtgttcgtgaagagcaccgaggagggcatcgccagagtgctgaacagcagatacgccttcctgctggagagcaccatgaacgagtaccacagaagactgaactgcaacctgacccagatcggcggcctgctggacaccaagggctacggcatcggcatgcccctgggcagccccttcagagacgagatcaccctggccatcctgcagctgcaggagaacaacagactggagatcctgaagagaaagtggtgggagggcggcagatgccccaaggaggaggaccacagagccaagggcctgggcatggagaacatcggcggcatcttcatcgtgctgatctgcggcctgatcatcgccgtgttcgtggccgtgatggagttcatctggagcaccagaagaagcgccgagagcgaggagacccccgccctgcaccccgccgcctgccagtgcagcgccctgggccccagaacccccctgaaggagcccagcatgctgctggtgaaggtgcccagcaccagagtgcaggtggccttcagcagaaccagcctgagacaggtgtgccccttcctgctgcagcaccagctgagcagcctgtactggatccaggccaccaacgtgcagatctgctgccacttcagcagcctgaagcccagccccgacctgaccttcccccccagccacagacccctgagcagcctgctgttcaccgccctggccgccgtgggcggcctgcccgacgccagcagcttcttcttcccccccatcagcagctgcccccccctgcagagcggcatcggcccctgccacagcaccgaggccaccctggtgaccagcaacttccacgtgtag

SEQ ID NO: 83164 - DNA, 2769 bp, synthetic construct
  misc_feature 1..2769: note = Description of Artificial Sequence: Synthetic coding sequence
  source 1..2769: mol_type = other DNA
atgagcaccatgagactgctgaccctggccctgctgttcagctgcagcgtggccagagccgcctgcgaccccaagatcgtgaacatcggcgccgtgctgagcaccagaaagcacgagcagatgttcagagaggccgtgaaccaggccaacaagagacacggcagctggaagatccagctgaacgccaccagcgtgacccacaagcccaacgccatccagatggccctgagcgtgtgcgaggacctgatcagcagccaggtgtacgccatcctggtgagccacccccccacccccaacgaccacttcacccccacccccgtgagctacaccgccggcttctacagaatccccgtgctgggcctgaccaccagaatgagcatctacagcgacaagagcatccacctgagcttcctgagaaccgtgcccccctacagccaccagagcagcgtgtggttcgagatgatgagagtgtacagctggaaccacatcatcctgctggtgagcgacgaccacgagggcagagccgcccagaagagactggagaccctgctggaggagagagagagcaaggccgagaaggtgctgcagttcgaccccggcaccaagaacgtgaccgccctgctgatggaggccaaggagctggaggccagagtgatcatcctgagcgccagcgaggacgacgccgccaccgtgtacagagccgccgccatgctgaacatgaccggcagcggctacgtgtggctggtgggcgagagagagatcagcggcaacgccctgagatacgcccccgacggcatcctgggcctgcagctgatcaacggcaagaacgagagcgcccacatcagcgacgccgtgggcgtggtggcccaggccgtgcacgagctgctggagaaggagaacatcaccgacccccccagaggctgcgtgggcaacaccaacatctggaagaccggccccctgttcaagagagtgctgatgagcagcaagtacgccgacggcgtgaccggcagagtggagttcaacgaggacggcgacagaaagttcgccaactacagcatcatgaacctgcagaacagaaagctggtgcaggtgggcatctacaacggcacccacgtgatccccaacgacagaaagatcatctggcccggcggcgagaccgagaagcccagaggctaccagatgagcaccagactgaagatcgtgaccatccaccaggagcccttcgtgtacgtgaagcccaccctgagcgacggcacctgcaaggaggagttcaccgtgaacggcgaccccgtgaagaaggtgatctgcaccggccccaacgacaccagccccggcagccccagacacaccgtgccccagtgctgctacggcttctgcatcgacctgctgatcaagctggccagaaccatgaacttcacctacgaggtgcacctggtggccgacggcaagttcggcacccaggagagagtgaacaacagcaacaagaaggagtggaacggcatgatgggcgagctgctgagcggccaggccgacatgatcgtggcccccctgaccatcaacaacgagagagcccagtacatcgagttcagcaagcccttcaagtaccagggcctgaccatcctggtgaagaaggagatccccagaagcaccctggacagcttcatgcagcccttccagagcaccctgtggctgctggtgggcctgagcgtgcacgtggtggccgtgatgctgtacctgctggacagattcagccccttcggcagattcaaggtgaacagcgaggaggaggaggaggacgccctgaccctgagcagcgccatgtggttcagctggggcgtgctgctgaacagcggcatcggcgagggcgcccccagaagcttcagcgccagaatcctgggcatggtgtgggccggcttcgccatgatcatcgtggccagctacaccgccaacctggccgccttcctggtgctggacagacccgaggagagaatcaccggcatcaacgaccccagactgagaaaccccagcgacaagttcatctacgccaccgtgaagcagagcagcgtggacatctacttcagaagacaggtggagctgagcaccatgtacagacacatggagaagcacaactacgagagcgccgccgaggccatccaggccgtgagagacaacaagctgcacgccttcatctgggacagcgccgtgctggagttcgaggccagccagaagtgcgacctggtgaccaccggcgagctgttcttcagaagcggcttcggcatcggcatgagaaaggacagcccctggaagcagaacgtgagcctgagcatcctgaagagccacgagaacggcttcatggaggacctggacaagacctgggtgagataccaggagtgcgacagcagaagcaacgcccccgccaccctgaccttcgagaacatggccggcgtgttcatgctggtggccggcggcatcgtggccggcatcttcctgatcttcatcgagatcgcctacaagagacacaaggacgccagaagaaagcagatgcagctggccttcgccgccgtgaacgtgtggagaaagaacctgcaggacagaaagagcggcagagccgagcccgaccccaagaagaaggccaccttcagagccatcaccagcaccctggccagcagcttcaagagaagaagaagcagcaaggacacccagtaccaccccaccgacatcaccggccccctgaacctgagcgaccccagcgtgagcaccgtggtgtag

SEQ ID NO: 83165 - DNA, 2730 bp, synthetic construct
  misc_feature 1..2730: note = Description of Artificial Sequence: Synthetic coding sequence
  source 1..2730: mol_type = other DNA
atgagcaccatgagactgctgaccctggccctgctgttcagctgcagcgtggccagagccgcctgcgaccccaagatcgtgaacatcggcgccgtgctgagcaccagaaagcacgagcagatgttcagagaggccgtgaaccaggccaacaagagacacggcagctggaagatccagctgaacgccaccagcgtgacccacaagcccaacgccatccagatggccctgagcgtgtgcgaggacctgatcagcagccaggtgtacgccatcctggtgagccacccccccacccccaacgaccacttcacccccacccccgtgagctacaccgccggcttctacagaatccccgtgctgggcctgaccaccagaatgagcatctacagcgacaagagcatccacctgagcttcctgagaaccgtgcccccctacagccaccagagcagcgtgtggttcgagatgatgagagtgtacagctggaaccacatcatcctgctggtgagcgacgaccacgagggcagagccgcccagaagagactggagaccctgctggaggagagagagagcaaggccgagaaggtgctgcagttcgaccccggcaccaagaacgtgaccgccctgctgatggaggccaaggagctggaggccagagtgatcatcctgagcgccagcgaggacgacgccgccaccgtgtacagagccgccgccatgctgaacatgaccggcagcggctacgtgtggctggtgggcgagagagagatcagcggcaacgccctgagatacgcccccgacggcatcctgggcctgcagctgatcaacggcaagaacgagagcgcccacatcagcgacgccgtgggcgtggtggcccaggccgtgcacgagctgctggagaaggagaacatcaccgacccccccagaggctgcgtgggcaacaccaacatctggaagaccggccccctgttcaagagagtgctgatgagcagcaagtacgccgacggcgtgaccggcagagtggagttcaacgaggacggcgacagaaagttcgccaactacagcatcatgaacctgcagaacagaaagctggtgcaggtgggcatctacaacggcacccacgtgatccccaacgacagaaagatcatctggcccggcggcgagaccgagaagcccagaggctaccagatgagcaccagactgaagatcgtgaccatccaccaggagcccttcgtgtacgtgaagcccaccctgagcgacggcacctgcaaggaggagttcaccgtgaacggcgaccccgtgaagaaggtgatctgcaccggccccaacgacaccagccccggcagccccagacacaccgtgccccagtgctgctacggcttctgcatcgacctgctgatcaagctggccagaaccatgaacttcacctacgaggtgcacctggtggccgacggcaagttcggcacccaggagagagtgaacaacagcaacaagaaggagtggaacggcatgatgggcgagctgctgagcggccaggccgacatgatcgtggcccccctgaccatcaacaacgagagagcccagtacatcgagttcagcaagcccttcaagtaccagggcctgaccatcctggtgaagaaggagatccccagaagcaccctggacagcttcatgcagcccttccagagcaccctgtggctgctggtgggcctgagcgtgcacgtggtggccgtgatgctgtacctgctggacagattcagccccttcggcagattcaaggtgaacagcgaggaggaggaggaggacgccctgaccctgagcagcgccatgtggttcagctggggcgtgctgctgaacagcggcatcggcgagggcgcccccagaagcttcagcgccagaatcctgggcatggtgtgggccggcttcgccatgatcatcgtggccagctacaccgccaacctggccgccttcctggtgctggacagacccgaggagagaatcaccggcatcaacgaccccagactgagaaaccccagcgacaagttcatctacgccaccgtgaagcagagcagcgtggacatctacttcagaagacaggtggagctgagcaccatgtacagacacatggagaagcacaactacgagagcgccgccgaggccatccaggccgtgagagacaacaagctgcacgccttcatctgggacagcgccgtgctggagttcgaggccagccagaagtgcgacctggtgaccaccggcgagctgttcttcagaagcggcttcggcatcggcatgagaaaggacagcccctggaagcagaacgtgagcctgagcatcctgaagagccacgagaacggcttcatggaggacctggacaagacctgggtgagataccaggagtgcgacagcagaagcaacgcccccgccaccctgaccttcgagaacatggccggcgtgttcatgctggtggccggcggcatcgtggccggcatcttcctgatcttcatcgagatcgcctacaagagacacaaggacgccagaagaaagcagatgcagctggccttcgccgccgtgaacgtgtggagaaagaacctgcaggtgggccaggccaccctgagaggcctggtgcccagagccagacccggccacggccccccccccagccccaaggccgtggccctggccctggccctggtgggcagaaccggcgccagaagccacggccagggccagtggtag

SEQ ID NO: 83166 - DNA, 2832 bp, synthetic construct
  misc_feature 1..2832: note = Description of Artificial Sequence: Synthetic coding sequence
  source 1..2832: mol_type = other DNA
atgagcaccatgagactgctgaccctggccctgctgttcagctgcagcgtggccagagccgcctgcgaccccaagatcgtgaacatcggcgccgtgctgagcaccagaaagcacgagcagatgttcagagaggccgtgaaccaggccaacaagagacacggcagctggaagatccagctgaacgccaccagcgtgacccacaagcccaacgccatccagatggccctgagcgtgtgcgaggacctgatcagcagccaggtgtacgccatcctggtgagccacccccccacccccaacgaccacttcacccccacccccgtgagctacaccgccggcttctacagaatccccgtgctgggcctgaccaccagaatgagcatctacagcgacaagagcatccacctgagcttcctgagaaccgtgcccccctacagccaccagagcagcgtgtggttcgagatgatgagagtgtacagctggaaccacatcatcctgctggtgagcgacgaccacgagggcagagccgcccagaagagactggagaccctgctggaggagagagagagcaagagcaagaagagaaactacgagaacctggaccagctgagctacgacaacaagagaggccccaaggccgagaaggtgctgcagttcgaccccggcaccaagaacgtgaccgccctgctgatggaggccaaggagctggaggccagagtgatcatcctgagcgccagcgaggacgacgccgccaccgtgtacagagccgccgccatgctgaacatgaccggcagcggctacgtgtggctggtgggcgagagagagatcagcggcaacgccctgagatacgcccccgacggcatcctgggcctgcagctgatcaacggcaagaacgagagcgcccacatcagcgacgccgtgggcgtggtggcccaggccgtgcacgagctgctggagaaggagaacatcaccgacccccccagaggctgcgtgggcaacaccaacatctggaagaccggccccctgttcaagagagtgctgatgagcagcaagtacgccgacggcgtgaccggcagagtggagttcaacgaggacggcgacagaaagttcgccaactacagcatcatgaacctgcagaacagaaagctggtgcaggtgggcatctacaacggcacccacgtgatccccaacgacagaaagatcatctggcccggcggcgagaccgagaagcccagaggctaccagatgagcaccagactgaagatcgtgaccatccaccaggagcccttcgtgtacgtgaagcccaccctgagcgacggcacctgcaaggaggagttcaccgtgaacggcgaccccgtgaagaaggtgatctgcaccggccccaacgacaccagccccggcagccccagacacaccgtgccccagtgctgctacggcttctgcatcgacctgctgatcaagctggccagaaccatgaacttcacctacgaggtgcacctggtggccgacggcaagttcggcacccaggagagagtgaacaacagcaacaagaaggagtggaacggcatgatgggcgagctgctgagcggccaggccgacatgatcgtggcccccctgaccatcaacaacgagagagcccagtacatcgagttcagcaagcccttcaagtaccagggcctgaccatcctggtgaagaaggagatccccagaagcaccctggacagcttcatgcagcccttccagagcaccctgtggctgctggtgggcctgagcgtgcacgtggtggccgtgatgctgtacctgctggacagattcagccccttcggcagattcaaggtgaacagcgaggaggaggaggaggacgccctgaccctgagcagcgccatgtggttcagctggggcgtgctgctgaacagcggcatcggcgagggcgcccccagaagcttcagcgccagaatcctgggcatggtgtgggccggcttcgccatgatcatcgtggccagctacaccgccaacctggccgccttcctggtgctggacagacccgaggagagaatcaccggcatcaacgaccccagactgagaaaccccagcgacaagttcatctacgccaccgtgaagcagagcagcgtggacatctacttcagaagacaggtggagctgagcaccatgtacagacacatggagaagcacaactacgagagcgccgccgaggccatccaggccgtgagagacaacaagctgcacgccttcatctgggacagcgccgtgctggagttcgaggccagccagaagtgcgacctggtgaccaccggcgagctgttcttcagaagcggcttcggcatcggcatgagaaaggacagcccctggaagcagaacgtgagcctgagcatcctgaagagccacgagaacggcttcatggaggacctggacaagacctgggtgagataccaggagtgcgacagcagaagcaacgcccccgccaccctgaccttcgagaacatggccggcgtgttcatgctggtggccggcggcatcgtggccggcatcttcctgatcttcatcgagatcgcctacaagagacacaaggacgccagaagaaagcagatgcagctggccttcgccgccgtgaacgtgtggagaaagaacctgcaggacagaaagagcggcagagccgagcccgaccccaagaagaaggccaccttcagagccatcaccagcaccctggccagcagcttcaagagaagaagaagcagcaaggacacccagtaccaccccaccgacatcaccggccccctgaacctgagcgaccccagcgtgagcaccgtggtgtag

SEQ ID NO: 83167 - DNA, 2769 bp, synthetic construct
  misc_feature 1..2769: note = Description of Artificial Sequence: Synthetic coding sequence
  source 1..2769: mol_type = other DNA
atgagcaccatgagactgctgaccctggccctgctgttcagctgcagcgtggccagagccgcctgcgaccccaagatcgtgaacatcggcgccgtgctgagcaccagaaagcacgagcagatgttcagagaggccgtgaaccaggccaacaagagacacggcagctggaagatccagctgaacgccaccagcgtgacccacaagcccaacgccatccagatggccctgagcgtgtgcgaggacctgatcagcagccaggtgtacgccatcctggtgagccacccccccacccccaacgaccacttcacccccacccccgtgagctacaccgccggcttctacagaatccccgtgctgggcctgaccaccagaatgagcatctacagcgacaagagcatccacctgagcttcctgagaaccgtgcccccctacagccaccagagcagcgtgtggttcgagatgatgagagtgtacagctggaaccacatcatcctgctggtgagcgacgaccacgagggcagagccgcccagaagagactggagaccctgctggaggagagagagagcaagagcaagaagagaaactacgagaacctggaccagctgagctacgacaacaagagaggccccaaggccgagaaggtgctgcagttcgaccccggcaccaagaacgtgaccgccctgctgatggaggccaaggagctggaggccagagtgatcatcctgagcgccagcgaggacgacgccgccaccgtgtacagagccgccgccatgctgaacatgaccggcagcggctacgtgtggctggtgggcgagagagagatcagcggcaacgccctgagatacgcccccgacggcatcctgggcctgcagctgatcaacggcaagaacgagagcgcccacatcagcgacgccgtgggcgtggtggcccaggccgtgcacgagctgctggagaaggagaacatcaccgacccccccagaggctgcgtgggcaacaccaacatctggaagaccggccccctgttcaagagagtgctgatgagcagcaagtacgccgacggcgtgaccggcagagtggagttcaacgaggacggcgacagaaagttcgccaactacagcatcatgaacctgcagaacagaaagctggtgcaggtgggcatctacaacggcacccacgtgatccccaacgacagaaagatcatctggcccggcggcgagaccgagaagcccagaggctaccagatgagcaccagactgaagatcgtgaccatccaccaggagcccttcgtgtacgtgaagcccaccctgagcgacggcacctgcaaggaggagttcaccgtgaacggcgaccccgtgaagaaggtgatctgcaccggccccaacgacaccagccccggcagccccagacacaccgtgccccagtgctgctacggcttctgcatcgacctgctgatcaagctggccagaaccatgaacttcacctacgaggtgcacctggtggccgacggcaagttcggcacccaggagagagtgaacaacagcaacaagaaggagtggaacggcatgatgggcgagctgctgagcggccaggccgacatgatcgtggcccccctgaccatcaacaacgagagagcccagtacatcgagttcagcaagcccttcaagtaccagggcctgaccatcctggtgaagaaggagatccccagaagcaccctggacagcttcatgcagcccttccagagcaccctgtggctgctggtgggcctgagcgtgcacgtggtggccgtgatgctgtacctgctggacagattcagccccttcggcagattcaaggtgaacagcgaggaggaggaggaggacgccctgaccctgagcagcgccatgtggttcagctggggcgtgctgctgaacagcggcatcggcgagggcgcccccagaagcttcagcgccagaatcctgggcatggtgtgggccggcttcgccatgatcatcgtggccagctacaccgccaacctggccgccttcctggtgctggacagacccgaggagagaatcaccggcatcaacgaccccagactgagaaaccccagcgacaagttcatctacgccaccgtgaagcagagcagcgtggacatctacttcagaagacaggtggagctgagcaccatgtacagacacatggagaagcacaactacgagagcgccgccgaggccatccaggccgtgagagacaacaagctgcacgccttcatctgggacagcgccgtgctggagttcgaggccagccagaagtgcgacctggtgaccaccggcgagctgttcttcagaagcggcttcggcatcggcatgagaaaggacagcccctggaagcagaacgtgagcctgagcatcctgaagagccacgagaacggcttcatggaggacctggacaagacctgggtgagataccaggagtgcgacagcagaagcaacgcccccgccaccctgaccttcgagaacatggccggcgtgttcatgctggtggccggcggcatcgtggccggcatcttcctgatcttcatcgagatcgcctacaagagacacaaggacgccagaagaaagcagatgcagctggccttcgccgccgtgaacgtgtggagaaagaacctgcagagcaccggcggcggcagaggcgccctgcagaaccagaaggacaccgtgctgcccagaagagccatcgagagagaggagggccagctgcagctgtgcagcagacacagagagagctag

SEQ ID NO: 83168 - DNA, 2721 bp, synthetic construct
  misc_feature 1..2721: note = Description of Artificial Sequence: Synthetic coding sequence
  source 1..2721: mol_type = other DNA
atgagcaccatgagactgctgaccctggccctgctgttcagctgcagcgtggccagagccgcctgcgaccccaagatcgtgaacatcggcgccgtgctgagcaccagaaagcacgagcagatgttcagagaggccgtgaaccaggccaacaagagacacggcagctggaagatccagctgaacgccaccagcgtgacccacaagcccaacgccatccagatggccctgagcgtgtgcgaggacctgatcagcagccaggtgtacgccatcctggtgagccacccccccacccccaacgaccacttcacccccacccccgtgagctacaccgccggcttctacagaatccccgtgctgggcctgaccaccagaatgagcatctacagcgacaagagcatccacctgagcttcctgagaaccgtgcccccctacagccaccagagcagcgtgtggttcgagatgatgagagtgtacagctggaaccacatcatcctgctggtgagcgacgaccacgagggcagagccgcccagaagagactggagaccctgctggaggagagagagagcaagagcaagaagagaaactacgagaacctggaccagctgagctacgacaacaagagaggccccaaggccgagaaggtgctgcagttcgaccccggcaccaagaacgtgaccgccctgctgatggaggccaaggagctggaggccagagtgatcatcctgagcgccagcgaggacgacgccgccaccgtgtacagagccgccgccatgctgaacatgaccggcagcggctacgtgtggctggtgggcgagagagagatcagcggcaacgccctgagatacgcccccgacggcatcctgggcctgcagctgatcaacggcaagaacgagagcgcccacatcagcgacgccgtgggcgtggtggcccaggccgtgcacgagctgctggagaaggagaacatcaccgacccccccagaggctgcgtgggcaacaccaacatctggaagaccggccccctgttcaagagagtgctgatgagcagcaagtacgccgacggcgtgaccggcagagtggagttcaacgaggacggcgacagaaagttcgccaactacagcatcatgaacctgcagaacagaaagctggtgcaggtgggcatctacaacggcacccacgtgatccccaacgacagaaagatcatctggcccggcggcgagaccgagaagcccagaggctaccagatgagcaccagactgaagatcgtgaccatccaccaggagcccttcgtgtacgtgaagcccaccctgagcgacggcacctgcaaggaggagttcaccgtgaacggcgaccccgtgaagaaggtgatctgcaccggccccaacgacaccagccccggcagccccagacacaccgtgccccagtgctgctacggcttctgcatcgacctgctgatcaagctggccagaaccatgaacttcacctacgaggtgcacctggtggccgacggcaagttcggcacccaggagagagtgaacaacagcaacaagaaggagtggaacggcatgatgggcgagctgctgagcggccaggccgacatgatcgtggcccccctgaccatcaacaacgagagagcccagtacatcgagttcagcaagcccttcaagtaccagggcctgaccatcctggtgaagaaggagatccccagaagcaccctggacagcttcatgcagcccttccagagcaccctgtggctgctggtgggcctgagcgtgcacgtggtggccgtgatgctgtacctgctggacagattcagccccttcggcagattcaaggtgaacagcgaggaggaggaggaggacgccctgaccctgagcagcgccatgtggttcagctggggcgtgctgctgaacagcggcatcggcgagggcgcccccagaagcttcagcgccagaatcctgggcatggtgtgggccggcttcgccatgatcatcgtggccagctacaccgccaacctggccgccttcctggtgctggacagacccgaggagagaatcaccggcatcaacgaccccagactgagaaaccccagcgacaagttcatctacgccaccgtgaagcagagcagcgtggacatctacttcagaagacaggtggagctgagcaccatgtacagacacatggagaagcacaactacgagagcgccgccgaggccatccaggccgtgagagacaacaagctgcacgccttcatctgggacagcgccgtgctggagttcgaggccagccagaagtgcgacctggtgaccaccggcgagctgttcttcagaagcggcttcggcatcggcatgagaaaggacagcccctggaagcagaacgtgagcctgagcatcctgaagagccacgagaacggcttcatggaggacctggacaagacctgggtgagataccaggagtgcgacagcagaagcaacgcccccgccaccctgaccttcgagaacatggccggcgtgttcatgctggtggccggcggcatcgtggccggcatcttcctgatcttcatcgagatcgcctacaagagacacaaggacgccagaagaaagcagatgcagctggccttcgccgccgtgaacgtgtggagaaagaacctgcagcagtaccaccccaccgacatcaccggccccctgaacctgagcgaccccagcgtgagcaccgtggtgtag

SEQ ID NO: 83169 - DNA, 2817 bp, synthetic construct
  misc_feature 1..2817: note = Description of Artificial Sequence: Synthetic coding sequence
  source 1..2817: mol_type = other DNA
atgagcaccatgagactgctgaccctggccctgctgttcagctgcagcgtggccagagccgcctgcgaccccaagatcgtgaacatcggcgccgtgctgagcaccagaaagcacgagcagatgttcagagaggccgtgaaccaggccaacaagagacacggcagctggaagatccagctgaacgccaccagcgtgacccacaagcccaacgccatccagatggccctgagcgtgtgcgaggacctgatcagcagccaggtgtacgccatcctggtgagccacccccccacccccaacgaccacttcacccccacccccgtgagctacaccgccggcttctacagaatccccgtgctgggcctgaccaccagaatgagcatctacagcgacaagagcatccacctgagcttcctgagaaccgtgcccccctacagccaccagagcagcgtgtggttcgagatgatgagagtgtacagctggaaccacatcatcctgctggtgagcgacgaccacgagggcagagccgcccagaagagactggagaccctgctggaggagagagagagcaaggccgagaaggtgctgcagttcgaccccggcaccaagaacgtgaccgccctgctgatggaggccaaggagctggaggccagagtgatcatcctgagcgccagcgaggacgacgccgccaccgtgtacagagccgccgccatgctgaacatgaccggcagcggctacgtgtggctggtgggcgagagagagatcagcggcaacgccctgagatacgcccccgacggcatcctgggcctgcagctgatcaacggcaagaacgagagcgcccacatcagcgacgccgtgggcgtggtggcccaggccgtgcacgagctgctggagaaggagaacatcaccgacccccccagaggctgcgtgggcaacaccaacatctggaagaccggccccctgttcaagagagtgctgatgagcagcaagtacgccgacggcgtgaccggcagagtggagttcaacgaggacggcgacagaaagttcgccaactacagcatcatgaacctgcagaacagaaagctggtgcaggtgggcatctacaacggcacccacgtgatccccaacgacagaaagatcatctggcccggcggcgagaccgagaagcccagaggctaccagatgagcaccagactgaagatcgtgaccatccaccaggagcccttcgtgtacgtgaagcccaccctgagcgacggcacctgcaaggaggagttcaccgtgaacggcgaccccgtgaagaaggtgatctgcaccggccccaacgacaccagccccggcagccccagacacaccgtgccccagtgctgctacggcttctgcatcgacctgctgatcaagctggccagaaccatgaacttcacctacgaggtgcacctggtggccgacggcaagttcggcacccaggagagagtgaacaacagcaacaagaaggagtggaacggcatgatgggcgagctgctgagcggccaggccgacatgatcgtggcccccctgaccatcaacaacgagagagcccagtacatcgagttcagcaagcccttcaagtaccagggcctgaccatcctggtgaagaaggagatccccagaagcaccctggacagcttcatgcagcccttccagagcaccctgtggctgctggtgggcctgagcgtgcacgtggtggccgtgatgctgtacctgctggacagattcagccccttcggcagattcaaggtgaacagcgaggaggaggaggaggacgccctgaccctgagcagcgccatgtggttcagctggggcgtgctgctgaacagcggcatcggcgagggcgcccccagaagcttcagcgccagaatcctgggcatggtgtgggccggcttcgccatgatcatcgtggccagctacaccgccaacctggccgccttcctggtgctggacagacccgaggagagaatcaccggcatcaacgaccccagactgagaaaccccagcgacaagttcatctacgccaccgtgaagcagagcagcgtggacatctacttcagaagacaggtggagctgagcaccatgtacagacacatggagaagcacaactacgagagcgccgccgaggccatccaggccgtgagagacaacaagctgcacgccttcatctgggacagcgccgtgctggagttcgaggccagccagaagtgcgacctggtgaccaccggcgagctgttcttcagaagcggcttcggcatcggcatgagaaaggacagcccctggaagcagaacgtgagcctgagcatcctgaagagccacgagaacggcttcatggaggacctggacaagacctgggtgagataccaggagtgcgacagcagaagcaacgcccccgccaccctgaccttcgagaacatggccggcgtgttcatgctggtggccggcggcatcgtggccggcatcttcctgatcttcatcgagatcgcctacaagagacacaaggacgccagaagaaagcagatgcagctggccttcgccgccgtgaacgtgtggagaaagaacctgcaggacagaaagagcggcagagccgagcccgaccccaagaagaaggccaccttcagagccatcaccagcaccctggccagcagcttcaagagaagaagaagcagcaaggacaccagcaccggcggcggcagaggcgccctgcagaaccagaaggacaccgtgctgcccagaagagccatcgagagagaggagggccagctgcagctgtgcagcagacacagagagagctag

SEQ ID NO: 83170 - DNA, 4395 bp, synthetic construct
  misc_feature 1..4395: note = Description of Artificial Sequence: Synthetic coding sequence
  source 1..4395: mol_type = other DNA
atgggcagagtgggctactggaccctgctggtgctgcccgccctgctggtgtggagaggccccgcccccagcgccgccgccgagaagggcccccccgccctgaacatcgccgtgatgctgggccacagccacgacgtgaccgagagagagctgagaaccctgtggggccccgagcaggccgccggcctgcccctggacgtgaacgtggtggccctgctgatgaacagaaccgaccccaagagcctgatcacccacgtgtgcgacctgatgagcggcgccagaatccacggcctggtgttcggcgacgacaccgaccaggaggccgtggcccagatgctggacttcatcagcagccacaccttcgtgcccatcctgggcatccacggcggcgccagcatgatcatggccgacaaggaccccaccagcaccttcttccagttcggcgccagcatccagcagcaggccaccgtgatgctgaagatcatgcaggactacgactggcacgtgttcagcctggtgaccaccatcttccccggctacagagagttcatcagcttcgtgaagaccaccgtggacaacagcttcgtgggctgggacatgcagaacgtgatcaccctggacaccagcttcgaggacgccaagacccaggtgcagctgaagaagatccacagcagcgtgatcctgctgtactgcagcaaggacgaggccgtgctgatcctgagcgaggccagaagcctgggcctgaccggctacgacttcttctggatcgtgcccagcctggtgagcggcaacaccgagctgatccccaaggagttccccagcggcctgatcagcgtgagctacgacgactgggactacagcctggaggccagagtgagagacggcatcggcatcctgaccaccgccgccagcagcatgctggagaagttcagctacatccccgaggccaaggccagctgctacggccagatggagagacccgaggtgcccatgcacaccctgcaccccttcatggtgaacgtgacctgggacggcaaggacctgagcttcaccgaggagggctaccaggtgcaccccagactggtggtgatcgtgctgaacaaggacagagagtgggagaaggtgggcaagtgggagaaccacaccctgagcctgagacacgccgtgtggcccagatacaagagcttcagcgactgcgagcccgacgacaaccacctgagcatcgtgaccctggaggaggcccccttcgtgatcgtggaggacatcgaccccctgaccgagacctgcgtgagaaacaccgtgccctgcagaaagttcgtgaagatcaacaacagcaccaacgagggcatgaacgtgaagaagtgctgcaagggcttctgcatcgacatcctgaagaagctgagcagaaccgtgaagttcacctacgacctgtacctggtgaccaacggcaagcacggcaagaaggtgaacaacgtgtggaacggcatgatcggcgaggtggtgtaccagagagccgtgatggccgtgggcagcctgaccatcaacgaggagagaagcgaggtggtggacttcagcgtgcccttcgtggagaccggcatcagcgtgatggtgagcagaagcaacggcaccgtgagccccagcgccttcctggagcccttcagcgccagcgtgtgggtgatgatgttcgtgatgctgctgatcgtgagcgccatcgccgtgttcgtgttcgagtacttcagccccgtgggctacaacagaaacctggccaagggcaaggccccccacggccccagcttcaccatcggcaaggccatctggctgctgtggggcctggtgttcaacaacagcgtgcccgtgcagaaccccaagggcaccaccagcaagatcatggtgagcgtgtgggccttcttcgccgtgatcttcctggccagctacaccgccaacctggccgccttcatgatccaggaggagttcgtggaccaggtgaccggcctgagcgacaagaagttccagagaccccacgactacagcccccccttcagattcggcaccgtgcccaacggcagcaccgagagaaacatcagaaacaactacccctacatgcaccagtacatgaccaagttcaaccagaagggcgtggaggacgccctggtgagcctgaagaccggcaagctggacgccttcatctacgacgccgccgtgctgaactacaaggccggcagagacgagggctgcaagctggtgaccatcggcagcggctacatcttcgccaccaccggctacggcatcgccctgcagaagggcagcccctggaagagacagatcgacctggccctgctgcagttcgtgggcgacggcgagatggaggagctggagaccctgtggctgaccggcatctgccacaacgagaagaacgaggtgatgagcagccagctggacatcgacaacatggccggcgtgttctacatgctggccgccgccatggccctgagcctgatcaccttcatctgggagcacctgttctactggaagctgagattctgcttcaccggcgtgtgcagcgacagacccggcctgctgttcagcatcagcagaggcatctacagctgcatccacggcgtgcacatcgaggagaagaagaagagccccgacttcaacctgaccggcagccagagcaacatgctgaagctgctgagaagcgccaagaacatcagcagcatgagcaacatgaacagcagcagaatggacagccccaagagagccgccgacttcatccagagaggcagcctgatcatggacatggtgagcgacaagggcaacctgatgtacagcgacaacagaagcttccagggcaaggagagcatcttcggcgacaacatgaacgagctgcagaccttcgtggccaacagacagaaggacaacctgaacaactacgtgttccagggccagcaccccctgaccctgaacgagagcaaccccaacaccgtggaggtggccgtgagcaccgagagcaaggccaacagcagacccagacagctgtggaagaagagcgtggacagcatcagacaggacagcctgagccagaaccccgtgagccagagagacgaggccaccgccgagaacagaacccacagcctgaagagccccagatacctgcccgaggagatggcccacagcgacatcagcgagaccagcaacagagccacctgccacagagagcccgacaacagcaagaaccacaagaccaaggacaacttcaagagaagcgtggccagcaagtaccccaaggactgcagcgaggtggagagaacctacctgaagaccaagagcagcagccccagagacaagatctacaccatcgacggcgagaaggagcccggcttccacctggaccccccccagttcgtggagaacgtgaccctgcccgagaacgtggacttccccgacccctaccaggaccccagcgagaacttcagaaagggcgacagcaccctgcccatgaacagaaaccccctgcacaacgaggagggcctgagcaacaacgaccagtacaagctgtacagcaagcacttcaccctgaaggacaagggcagcccccacagcgagaccagcgagagatacagacagaacagcacccactgcagaagctgcctgagcaacatgcccacctacagcggccacttcaccatgagaagccccttcaagtgcgacgcctgcctgagaatgggcaacctgtacgacatcgacgaggaccagatgctgcaggagaccggcaaccccgccaccggcgagcaggtgtaccagcaggactgggcccagaacaacgccctgcagctgcagaagaacaagctgagaatcagcagacagcacagctacgacaacatcgtggacaagcccagagagctggacctgagcagacccagcagaagcatcagcctgaaggacagagagagactgctggagggcaacttctacggcagcctgttcagcgtgcccagcagcaagctgagcggcaagaagagcagcctgttcccccagggcctggaggacagcaagagaagcaagagcctgctgcccgaccacaccagcgacaaccccttcctgcacagccacagagacgaccagagactggtgatcggcagatgccccagcgacccctacaagcacagcctgcccagccaggccgtgaacgacagctacctgagaagcagcctgagaagcaccgccagctactgcagcagagacagcagaggccacaacgacgtgtacatcagcgagcacgtgatgccctacgccgccaacaagaacaacatgtacagcacccccagagtgctgaacagctgcagcaacagaagagtgtacaagaagatgcccagcatcgagagcgacgtgtag

SEQ ID NO: 83171 - DNA, 4395 bp, synthetic construct; identical to SEQ ID NO: 83170
  misc_feature 1..4395: note = Description of Artificial Sequence: Synthetic coding sequence
  source 1..4395: mol_type = other DNA

SEQ ID NO: 83172 - DNA, 4395 bp, synthetic construct; identical to SEQ ID NO: 83170
  misc_feature 1..4395: note = Description of Artificial Sequence: Synthetic coding sequence
  source 1..4395: mol_type = other DNA

SEQ ID NO: 83173 - DNA, 3846 bp, synthetic construct
  misc_feature 1..3846: note = Description of Artificial Sequence: Synthetic coding sequence
  source 1..3846: mol_type = other DNA
atgggcagagtgggctactggaccctgctggtgctgcccgccctgctggtgtggagaggccccgcccccagcgccgccgccgagaagggcccccccgccctgaacatcgccgtgatgctgggccacagccacgacgtgaccgagagagagctgagaaccctgtggggccccgagcaggccgccggcctgcccctggacgtgaacgtggtggccctgctgatgaacagaaccgaccccaagagcctgatcacccacgtgtgcgacctgatgagcggcgccagaatccacggcctggtgttcggcgacgacaccgaccaggaggccgtggcccagatgctggacttcatcagcagccacaccttcgtgcccatcctgggcatccacggcggcgccagcatgatcatggccgacaaggaccccaccagcaccttcttccagttcggcgccagcatccagcagcaggccaccgtgatgctgaagatcatgcaggactacgactggcacgtgttcagcctggtgaccaccatcttccccggctacagagagttcatcagcttcgtgaagaccaccgtggacaacagcttcgtgggctgggacatgcagaacgtgatcaccctggacaccagcttcgaggacgccaagacccaggtgcagctgaagaagatccacagcagcgtgatcctgctgtactgcagcaaggacgaggccgtgctgatcctgagcgaggccagaagcctgggcctgaccggctacgacttcttctggatcgtgcccagcctggtgagcggcaacaccgagctgatccccaaggagttccccagcggcctgatcagcgtgagctacgacgactgggactacagcctggaggccagagtgagagacggcatcggcatcctgaccaccgccgccagcagcatgctggagaagttcagctacatccccgaggccaaggccagctgctacggccagatggagagacccgaggtgcccatgcacaccctgcaccccttcatggtgaacgtgacctgggacggcaaggacctgagcttcaccgaggagggctaccaggtgcaccccagactggtggtgatcgtgctgaacaaggacagagagtgggagaaggtgggcaagtgggagaaccacaccctgagcctgagacacgccgtgtggcccagatacaagagcttcagcgactgcgagcccgacgacaaccacctgagcatcgtgaccctggaggaggcccccttcgtgatcgtggaggacatcgaccccctgaccgagacctgcgtgagaaacaccgtgccctgcagaaagttcgtgaagatcaacaacagcaccaacgagggcatgaacgtgaagaagtgctgcaagggcttctgcatcgacatcctgaagaagctgagcagaaccgtgaagttcacctacgacctgtacctggtgaccaacggcaagcacggcaagaaggtgaacaacgtgtggaacggcatgatcggcgaggtggtgtaccagagagccgtgatggccgtgggcagcctgaccatcaacgaggagagaagcgaggtggtggacttcagcgtgcccttcgtggagaccggcatcagcgtgatggtgagcagaagcaacggcaccgtgagccccagcgccttcctggagcccttcagcgccagcgtgtgggtgatgatgttcgtgatgctgctgatcgtgagcgccatcgccgtgttcgtgttcgagtacttcagccccgtgggctacaacagaaacctggccaagggcaaggccccccacggccccagcttcaccatcggcaaggccatctggctgctgtggggcctggtgttcaacaacagcgtgcccgtgcagaaccccaagggcaccaccagcaagatcatggtgagcgtgtgggccttcttcgccgtgatcttcctggccagctacaccgccaacctggccgccttcatgatccaggaggagttcgtggaccaggtgaccggcctgagcgacaagaagttccagagaccccacgactacagcccccccttcagattcggcaccgtgcccaacggcagcaccgagagaaacatcagaaacaactacccctacatgcaccagtacatgaccaagttcaaccagaagggcgtggaggacgccctggtgagcctgaagaccggcaagctggacgccttcatctacgacgccgccgtgctgaactacaaggccggcagagacgagggctgcaagctggtgaccatcggcagcggctacatcttcgccaccaccggctacggcatcgccctgcagaagggcagcccctggaagagacagatcgacctggccctgctgcagttcgtgggcgacggcgagatggaggagctggagaccctgtggctgaccggcatctgccacaacgagaagaacgaggtgatgagcagccagctggacatcgacaacatggccggcgtgttctacatgctggccgccgccatggccctgagcctgatcaccttcatctgggagcacctgttctactggaagctgagattctgcttcaccggcgtgtgcagcgacagacccggcctgctgttcagcatcagcagaggcatctacagctgcatccacggcgtgcacatcgaggagaagaagaagagccccgacttcaacctgaccggcagccagagcaacatgctgaagctgctgagaagcgccaagaacatcagcagcatgagcaacatgaacagcagcagaatggacagccccaagagagccgccgacttcatccagagaggcagcctgatcatggacatggtgagcgacaagggcaacctgatgtacagcgacaacagaagcttccagggcaaggagagcatcttcggcgacaacatgaacgagctgcagaccttcgtggccaacagacagaaggacaacctgaacaactacgtgttccagggccagcaccccctgaccctgaacgagagcaaccccaacaccgtggaggtggccgtgagcaccgagagcaaggccaacagcagacccagacagctgtggaagaagagcgtggacagcatcagacaggacagcctgagccagaaccccgtgagccagagagacgaggccaccgccgagaacagaacccacagcctgaagagccccagatacctgcccgaggagatggcccacagcgacatcagcgagaccagcaacagagccacctgccacagagagcccgacaacagcaagaaccacaagaccaaggacaacttcaagagaagcgtggccagcaagtaccccaaggactgcagcgaggtggagagaacctacctgaagaccaagagcagcagccccagagacaagatctacaccatcgacggcgagaaggagcccggcttccacctggaccccccccagttcgtggagaacgtgaccctgcccgagaacgtggacttccccgacccctaccaggaccccagcgagaacttcagaaagggcgacagcaccctgcccatgaacagaaaccccctgcacaacgaggagggcctgagcaacaacgaccagtacaagctgtacagcaagcacttcaccctgaaggacaagggcagcccccacagcgagaccagcgagagatacagacagaacagcacccactgcagaagctgcctgagcaacatgcccacctacagcggccacttcaccatgagaagccccttcaagtgcgacgcctgcctgagaatgggcaacctgtacgacatcgacgaggaccagatgctgcaggagaccggcatgaccaacgcctggctgctgggcgacgcccccagaaccctgaccaacaccagatgccaccccagaagatag

SEQ ID NO: 83174 - DNA, 3375 bp, synthetic construct
  misc_feature 1..3375: note = Description of Artificial Sequence: Synthetic coding sequence
  source 1..3375: mol_type = other DNA
atgctgaagatcatgcaggactacgactggcacgtgttcagcctggtgaccaccatcttccccggctacagagagttcatcagcttcgtgaagaccaccgtggacaacagcttcgtgggctgggacatgcagaacgtgatcaccctggacaccagcttcgaggacgccaagacccaggtgcagctgaagaagatccacagcagcgtgatcctgctgtactgcagcaaggacgaggccgtgctgatcctgagcgaggccagaagcctgggcctgaccggctacgacttcttctggatcgtgcccagcctggtgagcggcaacaccgagctgatccccaaggagttccccagcggcctgatcagcgtgagctacgacgactgggactacagcctggaggccagagtgagagacggcatcggcatcctgaccaccgccgccagcagcatgctggagaagttcagctacatccccgaggccaaggccagctgctacggccagatggagagacccgaggtgcccatgcacaccctgcaccccttcatggtgaacgtgacctgggacggcaaggacctgagcttcaccgaggagggctaccaggtgcaccccagactggtggtgatcgtgctgaacaaggacagagagtgggagaaggtgggcaagtgggagaaccacaccctgagcctgagacacgccgtgtggcccagatacaagagcttcagcgactgcgagcccgacgacaaccacctgagcatcgtgaccctggaggaggcccccttcgtgatcgtggaggacatcgaccccctgaccgagacctgcgtgagaaacaccgtgccctgcagaaagttcgtgaagatcaacaacagcaccaacgagggcatgaacgtgaagaagtgctgcaagggcttctgcatcgacatcctgaagaagctgagcagaaccgtgaagttcacctacgacctgtacctggtgaccaacggcaagcacggcaagaaggtgaacaacgtgtggaacggcatgatcggcgaggtggtgtaccagagagccgtgatggccgtgggcagcctgaccatcaacgaggagagaagcgaggtggtggacttcagcgtgcccttcgtggagaccggcatcagcgtgatggtgagcagaagcaacggcaccgtgagccccagcgccttcctggagcccttcagcgccagcgtgtgggtgatgatgttcgtgatgctgctgatcgtgagcgccatcgccgtgttcgtgttcgagtacttcagccccgtgggctacaacagaaacctggccaagggcaaggccccccacggccccagcttcaccatcggcaaggccatctggctgctgtggggcctggtgttcaacaacagcgtgcccgtgcagaaccccaagggcaccaccagcaagatcatggtgagcgtgtgggccttcttcgccgtgatcttcctggccagctacaccgccaacctggccgccttcatgatccaggaggagttcgtggaccaggtgaccggcctgagcgacaagaagttccagagaccccacgactacagcccccccttcagattcggcaccgtgcccaacggcagcaccgagagaaacatcagaaacaactacccctacatgcaccagtacatgaccaagttcaaccagaagggcgtggaggacgccctggtgagcctgaagaccggcaagctggacgccttcatctacgacgccgccgtgctgaactacaaggccggcagagacgagggctgcaagctggtgaccatcggcagcggctacatcttcgccaccaccggctacggcatcgccctgcagaagggcagcccctggaagagacagatcgacctggccctgctgcagttcgtgggcgacggcgagatggaggagctggagaccctgtggctgaccggcatctgccacaacgagaagaacgaggtgatgagcagccagctggacatcgacaacatggccggcgtgttctacatgctggccgccgccatggccctgagcctgatcaccttcatctgggagcacctgttctactggaagctgagattctgcttcaccggcgtgtgcagcgacagacccggcctgctgttcagcatcagcagaggcatctacagctgcatccacggcgtgcacatcgaggagaagaagaagagccccgacttcaacctgaccggcagccagagcaacatgctgaagctgctgagaagcgccaagaacatcagcagcatgagcaacatgaacagcagcagaatggacagccccaagagagccgccgacttcatccagagaggcagcctgatcatggacatggtgagcgacaagggcaacctgatgtacagcgacaacagaagcttccagggcaaggagagcatcttcggcgacaacatgaacgagctgcagaccttcgtggccaacagacagaaggacaacctgaacaactacgtgttccagggccagcaccccctgaccctgaacgagagcaaccccaacaccgtggaggtggccgtgagcaccgagagcaaggccaacagcagacccagacagctgtggaagaagagcgtggacagcatcagacaggacagcctgagccagaaccccgtgagccagagagacgaggccaccgccgagaacagaacccacagcctgaagagccccagatacctgcccgaggagatggcccacagcgacatcagcgagaccagcaacagagccacctgccacagagagcccgacaacagcaagaaccacaagaccaaggacaacttcaagagaagcgtggccagcaagtaccccaaggactgcagcgaggtggagagaacctacctgaagaccaagagcagcagccccagagacaagatctacaccatcgacggcgagaaggagcccggcttccacctggaccccccccagttcgtggagaacgtgaccctgcccgagaacgtggacttccccgacccctaccaggaccccagcgagaacttcagaaagggcgacagcaccctgcccatgaacagaaaccccctgcacaacgaggagggcctgagcaacaacgaccagtacaagctgtacagcaagcacttcaccctgaaggacaagggcagcccccacagcgagaccagcgagagatacagacagaacagcacccactgcagaagctgcctgagcaacatgcccacctacagcggccacttcaccatgagaagccccttcaagtgcgacgcctgcctgagaatgggcaacctgtacgacatcgacgaggaccagatgctgcaggagaccggcatgaccaacgcctggctgctgggcgacgcccccagaaccctgaccaacaccagatgccaccccagaagatag

SEQ ID NO: 83175 - DNA, 4455 bp, synthetic construct
  misc_feature 1..4455: note = Description of Artificial Sequence: Synthetic coding sequence
  source 1..4455: mol_type = other DNA
atgaagcccagagccgagtgctgcagccccaagttctggctggtgctggccgtgctggccgtgagcggcagcagagccagaagccagaagagcccccccagcatcggcatcgccgtgatcctggtgggcaccagcgacgaggtggccatcaaggacgcccacgagaaggacgacttccaccacctgagcgtggtgcccagagtggagctggtggccatgaacgagaccgaccccaagagcatcatcaccagaatctgcgacctgatgagcgacagaaagatccagggcgtggtgttcgccgacgacaccgaccaggaggccatcgcccagatcctggacttcatcagcgcccagaccctgacccccatcctgggcatccacggcggcagcagcatgatcatggccgacaaggacgagagcagcatgttcttccagttcggccccagcatcgagcagcaggccagcgtgatgctgaacatcatggaggagtacgactggtacatcttcagcatcgtgaccacctacttccccggctaccaggacttcgtgaacaagatcagaagcaccatcgagaacagcttcgtgggctgggagctggaggaggtgctgctgctggacatgagcctggacgacggcgacagcaagatccagaaccagctgaagaagctgcagagccccatcatcctgctgtactgcaccaaggaggaggccacctacatcttcgaggtggccaacagcgtgggcctgaccggctacggctacacctggatcgtgcccagcctggtggccggcgacaccgacaccgtgcccgccgagttccccaccggcctgatcagcgtgagctacgacgagtgggactacggcctgcccgccagagtgagagacggcatcgccatcatcaccaccgccgccagcgacatgctgagcgagcacagcttcatccccgagcccaagagcagctgctacaacacccacgagaagagaatctaccagagcaacatgctgaacagatacctgatcaacgtgaccttcgagggcagaaacctgagcttcagcgaggacggctaccagatgcaccccaagctggtgatcatcctgctgaacaaggagagaaagtgggagagagtgggcaagtggaaggacaagagcctgcagatgaagtactacgtgtggcccagaatgtgccccgagaccgaggagcaggaggacgaccacctgagcatcgtgaccctggaggaggcccccttcgtgatcgtggagagcgtggaccccctgagcggcacctgcatgagaaacaccgtgccctgccagaagagaatcgtgaccgagaacaagaccgacgaggagcccggctacatcaagaagtgctgcaagggcttctgcatcgacatcctgaagaagatcagcaagagcgtgaagttcacctacgacctgtacctggtgaccaacggcaagcacggcaagaagatcaacggcacctggaacggcatgatcggcgaggtggtgatgaagagagcctacatggccgtgggcagcctgaccatcaacgaggagagaagcgaggtggtggacttcagcgtgcccttcatcgagaccggcatcagcgtgatggtgagcagaagcaacggcaccgtgagccccagcgccttcctggagcccttcagcgccgacgtgtgggtgatgatgttcgtgatgctgctgatcgtgagcgccgtggccgtgttcgtgttcgagtacttcagccccgtgggctacaacagatgcctggccgacggcagagagcccggcggccccagcttcaccatcggcaaggccatctggctgctgtggggcctggtgttcaacaacagcgtgcccgtgcagaaccccaagggcaccaccagcaagatcatggtgagcgtgtgggccttcttcgccgtgatcttcctggccagctacaccgccaacctggccgccttcatgatccaggaggagtacgtggaccaggtgagcggcctgagcgacaagaagttccagagacccaacgacttcagcccccccttcagattcggcaccgtgcccaacggcagcaccgagagaaacatcagaaacaactacgccgagatgcacgcctacatgggcaagttcaaccagagaggcgtggacgacgccctgctgagcctgaagaccggcaagctggacgccttcatctacgacgccgccgtgctgaactacatggccggcagagacgagggctgcaagctggtgaccatcggcagcggcaaggtgttcgccagcaccggctacggcatcgccatccagaaggacagcggctggaagagacaggtggacctggccatcctgcagctgttcggcgacggcgagatggaggagctggaggccctgtggctgaccggcatctgccacaacgagaagaacgaggtgatgagcagccagctggacatcgacaacatggccggcgtgttctacatgctgggcgccgccatggccctgagcctgatcaccttcatctgcgagcacctgttctactggcagttcagacactgcttcatgggcgtgtgcagcggcaagcccggcatggtgttcagcatcagcagaggcatctacagctgcatccacggcgtggccatcgaggagagacagagcgtgatgaacagccccaccgccaccatgaacaacacccacagcaacatcctgagactgctgagaaccgccaagaacatggccaacctgagcggcgtgaacggcagcccccagagcgccctggacttcatcagaagagagagcagcgtgtacgacatcagcgagcacagaagaagcttcacccacagcgactgcaagagctacaacaaccccccctgcgaggagaacctgttcagcgactacatcagcgaggtggagagaaccttcggcaacctgcagctgaaggacagcaacgtgtaccaggaccactaccaccaccaccacagaccccacagcatcggcagcgccagcagcatcgacggcctgtacgactgcgacaacccccccttcaccacccagagcagaagcatcagcaagaagcccctggacatcggcctgcccagcagcaagcacagccagctgagcgacctgtacggcaagttcagcttcaagagcgacagatacagcggccacgacgacctgatcagaagcgacgtgagcgacatcagcacccacaccgtgacctacggcaacatcgagggcaacgccgccaagagaagaaagcagcagtacaaggacagcctgaagaagagacccgccagcgccaagagcagaagagagttcgacgagatcgagctggcctacagaagaagaccccccagaagccccgaccacaagagatacttcagagacaaggagggcctgagagacttctacctggaccagttcagaaccaaggagaacagcccccactgggagcacgtggacctgaccgacatctacaaggagagaagcgacgacttcaagagagacagcgtgagcggcggcggcccctgcaccaacagaagccacatcaagcacggcaccggcgacaagcacggcgtggtgagcggcgtgcccgccccctgggagaagaacctgaccaacgtggagtgggaggacagaagcggcggcaacttctgcagaagctgccccagcaagctgcacaactacagcaccaccgtgaccggccagaacagcggcagacaggcctgcatcagatgcgaggcctgcaagaaggccggcaacctgtacgacatcagcgaggacaacagcctgcaggagctggaccagcccgccgcccccgtggccgtgaccagcaacgccagcaccaccaagtacccccagagccccaccaacagcaaggcccagaagaagaacagaaacaagctgagaagacagcacagctacgacaccttcgtggacctgcagaaggaggaggccgccctggcccccagaagcgtgagcctgaaggacaagggcagattcatggacggcagcccctacgcccacatgttcgagatgagcgccggcgagagcaccttcgccaacaacaagagcagcgtgcccaccgccggccaccaccaccacaacaaccccggcggcggctacatgctgagcaagagcctgtaccccgacagagtgacccagaaccccttcatccccaccttcggcgacgaccagtgcctgctgcacggcagcaagagctacttcttcagacagcccaccgtggccggcgccagcaaggccagacccgacttcagagccctggtgaccaacaagcccgtggtgagcgccctgcacggcgccgtgcccgccagattccagaaggacatctgcatcggcaaccagagcaacccctgcgtgcccaacaacaagaaccccagagccttcaacggcagcagcaacggccacgtgtacgagaagctgagcagcatcgagagcgacgtgtag

SEQ ID NO: 83176 - DNA, 3702 bp, synthetic construct
  misc_feature 1..3702: note = Description of Artificial Sequence: Synthetic coding sequence
  source 1..3702: mol_type = other DNA
atgggcggcgccctgggccccgccctgctgctgaccagcctgttcggcgcctgggccggcctgggccccggccagggcgagcagggcatgaccgtggccgtggtgttcagcagcagcggccccccccaggcccagttcagagccagactgaccccccagagcttcctggacctgcccctggagatccagcccctgaccgtgggcgtgaacaccaccaaccccagcagcctgctgacccagatctgcggcctgctgggcgccgcccacgtgcacggcatcgtgttcgaggacaacgtggacaccgaggccgtggcccagatcctggacttcatcagcagccagacccacgtgcccatcctgagcatcagcggcggcagcgccgtggtgctgacccccaaggagcccggcagcgccttcctgcagctgggcgtgagcctggagcagcagctgcaggtgctgttcaaggtgctggaggagtacgactggagcgccttcgccgtgatcaccagcctgcaccccggccacgccctgttcctggagggcgtgagagccgtggccgacgccagccacgtgagctggagactgctggacgtggtgaccctggagctgggccccggcggccccagagccagaacccagagactgctgagacagctggacgcccccgtgttcgtggcctactgcagcagagaggaggccgaggtgctgttcgccgaggccgcccaggccggcctggtgggccccggccacgtgtggctggtgcccaacctggccctgggcagcaccgacgccccccccgccaccttccccgtgggcctgatcagcgtggtgaccgagagctggagactgagcctgagacagaaggtgagagacggcgtggccatcctggccctgggcgcccacagctactggagacagcacggcaccctgcccgcccccgccggcgactgcagagtgcaccccggccccgtgagccccgccagagaggccttctacagacacctgctgaacgtgacctgggagggcagagacttcagcttcagccccggcggctacctggtgcagcccaccatggtggtgatcgccctgaacagacacagactgtgggagatggtgggcagatgggagcacggcgtgctgtacatgaagtaccccgtgtggcccagatacagcgccagcctgcagcccgtggtggacagcagacacctgaccgtggccaccctggaggagagacccttcgtgatcgtggagagccccgaccccggcaccggcggctgcgtgcccaacaccgtgccctgcagaagacagagcaaccacaccttcagcagcggcgacgtggccccctacaccaagctgtgctgcaagggcttctgcatcgacatcctgaagaagctggccagagtggtgaagttcagctacgacctgtacctggtgaccaacggcaagcacggcaagagagtgagaggcgtgtggaacggcatgatcggcgaggtgtactacaagagagccgacatggccatcggcagcctgaccatcaacgaggagagaagcgagatcgtggacttcagcgtgcccttcgtggagaccggcatcagcgtgatggtggccagaagcaacggcaccgtgagccccagcgccttcctggagccctacagccccgccgtgtgggtgatgatgttcgtgatgtgcctgaccgtggtggccatcaccgtgttcatgttcgagtacttcagccccgtgagctacaaccagaacctgaccagaggcaagaagagcggcggccccgccttcaccatcggcaagagcgtgtggctgctgtgggccctggtgttcaacaacagcgtgcccatcgagaaccccagaggcaccaccagcaagatcatggtgctggtgtgggccttcttcgccgtgatcttcctggccagctacaccgccaacctggccgccttcatgatccaggagcagtacatcgacaccgtgagcggcctgagcgacaagaagttccagagaccccaggaccagtacccccccttcagattcggcaccgtgcccaacggcagcaccgagagaaacatcagaagcaactacagagacatgcacacccacatggtgaagttcaaccagagaagcgtggaggacgccctgaccagcctgaagatgggcaagctggacgccttcatctacgacgccgccgtgctgaactacatggccggcaaggacgagggctgcaagctggtgaccatcggcagcggcaaggtgttcgccaccaccggctacggcatcgccatgcagaaggacagccactggaagagagccatcgacctggccctgctgcagttcctgggcgacggcgagacccagaagctggagaccgtgtggctgagcggcatctgccagaacgagaagaacgaggtgatgagcagcaagctggacatcgacaacatggccggcgtgttctacatgctgctggtggccatgggcctggccctgctggtgttcgcctgggagcacctggtgtactggaagctgagacacagcgtgcccaacagcagccagctggacttcctgctggccttcagcagaggcatctacagctgcttcagcggcgtgcagagcctggccagcccccccagacaggccagccccgacctgaccgccagcagcgcccaggccagcgtgctgaagatgctgcaggccgccagagacatggtgaccaccgccggcgtgagcagcagcctggacagagccaccagaaccatcgagaactggggcggcggcagaagagcccccccccccagcccctgccccacccccagaagcggccccagcccctgcctgcccacccccgaccccccccccgagcccagccccaccggctggggcccccccgacggcggcagagccgccctggtgagaagagccccccagccccccggcagaccccccacccccggcccccccctgagcgacgtgagcagagtgagcagaagacccgcctgggaggccagatggcccgtgagaaccggccactgcggcagacacctgagcgccagcgagagacccctgagccccgccagatgccactacagcagcttccccagagccgacagaagcggcagacccttcctgcccctgttccccgagctggaggacctgcccctgctgggccccgagcagctggccagaagagaggccctgctgcacgccgcctgggccagaggcagcagacccagacacgccagcctgcccagcagcgtggccgaggccttcgccagacccagcagcctgcccgccggctgcaccggccccgcctgcgccagacccgacggccacagcgcctgcagaagactggcccaggcccagagcatgtgcctgcccatctacagagaggcctgccaggagggcgagcaggccggcgcccccgcctggcagcacagacagcacgtgtgcctgcacgcccacgcccacctgcccttctgctggggcgccgtgtgcccccacctgcccccctgcgccagccacggcagctggctgagcggcgcctggggccccctgggccacagaggcagaaccctgggcctgggcaccggctacagagacagcggcggcctggacgagatcagcagagtggccagaggcacccagggcttccccggcccctgcacctggagaagaatcagcagcctggagagcgaggtgtag

SEQ ID NO: 83177 - DNA, 2724 bp, synthetic construct
  misc_feature 1..2724: note = Description of Artificial Sequence: Synthetic coding sequence
  source 1..2724: mol_type = other DNA
agaggccagggcggcgacaccagaagcaagggcaccagacagcccgagccccccggcgccagcagagaccccgccagaagctgctgggacccccccgtggacatgggcggcgccctgggccccgccctgctgctgaccagcctgttcggcgcctgggccggcctgggccccggccagggcgagcagggcatgaccgtggccgtggtgttcagcagcagcggccccccccaggcccagttcagagccagactgaccccccagagcttcctggacctgcccctggagatccagcccctgaccgtgggcgtgaacaccaccaaccccagcagcctgctgacccagatctgcggcctgctgggcgccgcccacgtgcacggcatcgtgttcgaggacaacgtggacaccgaggccgtggcccagatcctggacttcatcagcagccagacccacgtgcccatcctgagcatcagcggcggcagcgccgtggtgctgacccccaaggagcccggcagcgccttcctgcagctgggcgtgagcctggagcagcagctgcaggtgctgttcaaggtgctggaggagtacgactggagcgccttcgccgtgatcaccagcctgcaccccggccacgccctgttcctggagggcgtgagagccgtggccgacgccagccacgtgagctggagactgctggacgtggtgaccctggagctgggccccggcggccccagagccagaacccagagactgctgagacagctggacgcccccgtgttcgtggcctactgcagcagagaggaggccgaggtgctgttcgccgaggccgcccaggccggcctggtgggccccggccacgtgtggctggtgcccaacctggccctgggcagcaccgacgccccccccgccaccttccccgtgggcctgatcagcgtggtgaccgagagctggagactgagcctgagacagaaggtgagagacggcgtggccatcctggccctgggcgcccacagctactggagacagcacggcaccctgcccgcccccgccggcgactgcagagtgcaccccggccccgtgagccccgccagagaggccttctacagacacctgctgaacgtgacctgggagggcagagacttcagcttcagccccggcggctacctggtgcagcccaccatggtggtgatcgccctgaacagacacagactgtgggagatggtgggcagatgggagcacggcgtgctgtacatgaagtaccccgtgtggcccagatacagcgccagcctgcagcccgtggtggacagcagacacctgaccgtggccaccctggaggagagacccttcgtgatcgtggagagccccgaccccggcaccggcggctgcgtgcccaacaccgtgccctgcagaagacagagcaaccacaccttcagcagcggcgacgtggccccctacaccaagctgtgctgcaagggcttctgcatcgacatcctgaagaagctggccagagtggtgaagttcagctacgacctgtacctggtgaccaacggcaagcacggcaagagagtgagaggcgtgtggaacggcatgatcggcgaggtgtactacaagagagccgacatggccatcggcagcctgaccatcaacgaggagagaagcgagatcgtggacttcagcgtgcccttcgtggagaccggcatcagcgtgatggtggccagaagcaacggcaccgtgagccccagcgccttcctggagccctacagccccgccgtgtgggtgatgatgttcgtgatgtgcctgaccgtggtggccatcaccgtgttcatgttcgagtacttcagccccgtgagctacaaccagaacctgaccagaggcaagaagagcggcggccccgccttcaccatcggcaagagcgtgtggctgctgtgggccctggtgttcaacaacagcgtgcccatcgagaaccccagaggcaccaccagcaagatcatggtgctggtgtgggccttcttcgccgtgatcttcctggccagctacaccgccaacctggccgccttcatgatccaggagcagtacatcgacaccgtgagcggcctgagcgacaagaagttccagagaccccaggaccagtacccccccttcagattcggcaccgtgcccaacggcagcaccgagagaaacatcagaagcaactacagagacatgcacacccacatggtgaagttcaaccagagaagcgtggaggacgccctgaccagcctgaagatgggcaagctggacgccttcatctacgacgccgccgtgctgaactacatggccggcaaggacgagggctgcaagctggtgaccatcggcagcggcaaggtgttcgccaccaccggctacggcatcgccatgcagaaggacagccactggaagagagccatcgacctggccctgctgcagttcctgggcgacggcgagacccagaagctggagaccgtgtggctgagcggcatctgccagaacgagaagaacgaggtgatgagcagcaagctggacatcgacaacatggccggcgtgttctacatgctgctggtggccatgggcctggccctgctggtgttcgcctgggagcacctggtgtactggaagctgagacacagcgtgcccaacagcagccagctggacttcctgctggccttcagcagagtgggcgcccaccccagcccccacagacccaagttctag

SEQ ID NO: 83178 - DNA, 4011 bp, synthetic construct
  misc_feature 1..4011: note = Description of Artificial Sequence: Synthetic coding sequence
  source 1..4011: mol_type = other DNA
atgagaggcgccggcggccccagaggccccagaggccccgccaagatgctgctgctgctggccctggcctgcgccagccccttccccgaggaggcccccggccccggcggcgccggcggccccggcggcggcctgggcggcgccagacccctgaacgtggccctggtgttcagcggccccgcctacgccgccgaggccgccagactgggccccgccgtggccgccgccgtgagaagccccggcctggacgtgagacccgtggccctggtgctgaacggcagcgaccccagaagcctggtgctgcagctgtgcgacctgctgagcggcctgagagtgcacggcgtggtgttcgaggacgacagcagagcccccgccgtggcccccatcctggacttcctgagcgcccagaccagcctgcccatcgtggccgtgcacggcggcgccgccctggtgctgacccccaaggagaagggcagcaccttcctgcagctgggcagcagcaccgagcagcagctgcaggtgatcttcgaggtgctggaggagtacgactggaccagcttcgtggccgtgaccaccagagcccccggccacagagccttcctgagctacatcgaggtgctgaccgacggcagcctggtgggctgggagcacagaggcgccctgaccctggaccccggcgccggcgaggccgtgctgagcgcccagctgagaagcgtgagcgcccagatcagactgctgttctgcgccagagaggaggccgagcccgtgttcagagccgccgaggaggccggcctgaccggcagcggctacgtgtggttcatggtgggcccccagctggccggcggcggcggcagcggcgcccccggcgagccccccctgctgcccggcggcgcccccctgcccgccggcctgttcgccgtgagaagcgccggctggagagacgacctggccagaagagtggccgccggcgtggccgtggtggccagaggcgcccaggccctgctgagagactacggcttcctgcccgagctgggccacgactgcagagcccagaacagaacccacagaggcgagagcctgcacagatacttcatgaacatcacctgggacaacagagactacagcttcaacgaggacggcttcctggtgaaccccagcctggtggtgatcagcctgaccagagacagaacctgggaggtggtgggcagctgggagcagcagaccctgagactgaagtaccccctgtggagcagatacggcagattcctgcagcccgtggacgacacccagcacctgaccgtggccaccctggaggagagacccttcgtgatcgtggagcccgccgaccccatcagcggcacctgcatcagagacagcgtgccctgcagaagccagctgaacagaacccacagccccccccccgacgcccccagacccgagaagagatgctgcaagggcttctgcatcgacatcctgaagagactggcccacaccatcggcttcagctacgacctgtacctggtgaccaacggcaagcacggcaagaagatcgacggcgtgtggaacggcatgatcggcgaggtgttctaccagagagccgacatggccatcggcagcctgaccatcaacgaggagagaagcgagatcgtggacttcagcgtgcccttcgtggagaccggcatcagcgtgatggtggccagaagcaacggcaccgtgagccccagcgccttcctggagccctacagccccgccgtgtgggtgatgatgttcgtgatgtgcctgaccgtggtggccgtgaccgtgttcatcttcgagtacctgagccccgtgggctacaacagaagcctggccaccggcaagagacccggcggcagcaccttcaccatcggcaagagcatctggctgctgtgggccctggtgttcaacaacagcgtgcccgtggagaaccccagaggcaccaccagcaagatcatggtgctggtgtgggccttcttcgccgtgatcttcctggccagctacaccgccaacctggccgccttcatgatccaggaggagtacgtggacaccgtgagcggcctgagcgacagaaagttccagagaccccaggagcagtacccccccctgaagttcggcaccgtgcccaacggcagcaccgagaagaacatcagaagcaactaccccgacatgcacagctacatggtgagatacaaccagcccagagtggaggaggccctgacccagctgaaggccggcaagctggacgccttcatctacgacgccgccgtgctgaactacatggccagaaaggacgagggctgcaagctggtgaccatcggcagcggcaaggtgttcgccaccaccggctacggcatcgccctgcacaagggcagcagatggaagagacccatcgacctggccctgctgcagttcctgggcgacgacgagatcgagatgctggagagactgtggctgagcggcatctgccacaacgacaagatcgaggtgatgagcagcaagctggacatcgacaacatggccggcgtgttctacatgctgctggtggccatgggcctgagcctgctggtgttcgcctgggagcacctggtgtactggagactgagacactgcctgggccccacccacagaatggacttcctgctggccttcagcagaggcatgtacagctgctgcagcgccgaggccgcccccccccccgccaagccccccccccccccccagcccctgcccagccccgcctaccccgcccccagacccgcccccggccccgcccccttcgtgcccagagagagagccagcgtggacagatggagaagaaccaagggcgccggcccccccggcggcgccggcctggccgacggcttccacagatactacggccccatcgagccccagggcctgggcctgggcctgggcgaggccagagccgcccccagaggcgccgccggcagacccctgagcccccccgccgcccagcccccccagaagcccccccccagctacttcgccatcgtgagagacaaggagcccgccgagccccccgccggcgccttccccggcttccccagcccccccgccccccccgccgccgccgccaccgccgtgggcccccccctgtgcagactggccttcgaggacgagagcccccccgcccccgccagatggcccagaagcgaccccgagagccagcccctgctgggccccggcgccggcggcgccggcggcaccggcggcgccggcggcggcgcccccgccgccccccccccctgcagagccgccccccccccctgcccctacctggacctggagcccagccccagcgacagcgaggacagcgagagcctgggcggcgccagcctgggcggcctggagccctggtggttcgccgacttcccctacccctacgccgagagactgggccccccccccggcagatactggagcgtggacaagctgggcggctggagagccggcagctgggactacctgccccccagaagcggccccgccgcctggcactgcagacactgcgccagcctggagctgctgcccccccccagacacctgagctgcagccacgacggcctggacggcggctggtgggccccccccccccccccctgggccgccggccccctgcccagaagaagagccagatgcggctgccccagaagccacccccacagacccagagccagccacagaacccccgccgccgccgccccccaccaccacagacacagaagagccgccggcggctgggacctgcccccccccgcccccaccagcagaagcctggaggacctgagcagctgccccagagccgcccccgccagaagactgaccggccccagcagacacgccagaagatgcccccacgccgcccactggggcccccccctgcccaccgccagccacagaagacacagaggcggcgacctgggcaccagaagaggcagcgcccacttcagcagcctggagagcgaggtgtag

SEQ ID NO: 83179 - DNA, 1116 bp, synthetic construct
  misc_feature 1..1116: note = Description of Artificial Sequence: Synthetic coding sequence
  source 1..1116: mol_type = other DNA
atgagccacgagaagagcttcctggtgagcggcgacaactaccccccccccaaccccggctaccccggcggcccccagccccccatgcccccctacgcccagcccccctaccccggcgccccctacccccagccccccttccagcccagcccctacggccagcccggctacccccacggccccagcccctacccccagggcggctacccccagggcccctacccccagggcggctacccccagggcccctacccccaggagggctacccccagggcccctacccccagggcggctacccccagggcccctacccccagagccccttcccccccaacccctacggccagccccaggtgttccccggccaggaccccgacagcccccagcacggcaactaccaggaggagggcccccccagctactacgacaaccaggacttccccgccaccaactgggacgacaagagcatcagacaggccttcatcagaaaggtgttcctggtgctgaccctgcagctgagcgtgaccctgagcaccgtgagcgtgttcaccttcgtggccgaggtgaagggcttcgtgagagagaacgtgtggacctactacgtgagctacgccgtgttcttcatcagcctgatcgtgctgagctgctgcggcgacttcagaagaaagcacccctggaacctggtggccctgagcgtgctgaccgccagcctgagctacatggtgggcatgatcgccagcttctacaacaccgaggccgtgatcatggccgtgggcatcaccaccgccgtgtgcttcaccgtggtgatcttcagcatgcagaccagatacgacttcaccagctgcatgggcgtgctgctggtgagcatggtggtgctgttcatcttcgccatcctgtgcatcttcatcagaaacagaatcctggagatcgtgtacgccagcctgggcgccctgctgttcacctgcttcctggccgtggacacccagctgctgctgggcaacaagcagctgagcctgagccccgaggagtacgtgttcgccgccctgaacctgtacaccgacatcatcaacatcttcctgtacatcctgaccatcatcggcagagccaaggagtag

SEQ ID NO: 83180 - DNA, 1116 bp, synthetic construct; identical to SEQ ID NO: 83179
  misc_feature 1..1116: note = Description of Artificial Sequence: Synthetic coding sequence
  source 1..1116: mol_type = other DNA

SEQ ID NO: 83181 - DNA, 825 bp, synthetic construct
  misc_feature 1..825: note = Description of Artificial Sequence: Synthetic coding sequence
  source 1..825: mol_type = other DNA
atgagccacgagaagagcttcctggtgagcggcgacaactaccccccccccaaccccggctaccccggcggcccccagccccccatgcccccctacgcccagcccccctaccccggcgccccctacccccagccccccttccagcccagcccctacggccagcccggctacccccacggccccagcccctacccccagggcggctacccccagggcccctacccccagggcggctacccccagggcccctacccccaggagggctacccccagggcccctacccccagggcggctacccccagggcccctacccccagagccccttcccccccaacccctacggccagccccaggtgttccccggccaggaccccgacagcccccagcacggcaactaccaggaggagggcccccccagctactacgacaaccaggacttccccgccaccaactgggacgacaagagcatcagacaggccttcatcagaaaggtgttcctggtgctgaccctgcagctgagcgtgaccctgagcaccgtgagcgtgttcaccttcgtggccgaggtgaagggcttcgtgagagagaacgtgtggacctactacgtgagctacgccgtgttcttcatcagcctgatcgtgctgagctgctgcggcgacttcagaagaaagcacccctggaacctggtggccctgagcgtgctgaccgccagcctgagctacatggtgggcatgatcgccagcttctacaacaccgaggccgtgatcatggccgtgggcatcaccaccgccgtgtgcttcaccgtggtgatcttcagcatgcagtag

SEQ ID NO: 83182 - DNA, 306 bp, synthetic construct
  misc_feature 1..306: note = Description of Artificial Sequence: Synthetic coding sequence
  source 1..306: mol_type = other DNA
atgagccacgagaagagcttcctggtgagcggcgacaactaccccccccccaaccccggctaccccggcggcccccagccccccatgcccccctacgcccagcccccctaccccggcgccccctacccccagccccccttccagcccagcccctacggccagcccggctacccccacggccccagcccctacccccagggcggctacccccagggcccctacccccagggcggctacccccagggcccctacccccaggagggctacccccagggcccctacccccagggcggctacccccagtag

SEQ ID NO: 83183 - DNA, 1059 bp, synthetic construct
  misc_feature 1..1059: note = Description of Artificial Sequence: Synthetic coding sequence
  source 1..1059: mol_type = other DNA
atgagccacgagaagagcttcctggtgagcggcgacaactacccccccccctaccccggcgccccctacccccagccccccttccagcccagcccctacggccagcccggctacccccacggccccagcccctacccccagggcggctacccccagggcccctacccccagggcggctacccccagggcccctacccccaggagggctacccccagggcccctacccccagggcggctacccccagggcccctacccccagagccccttcccccccaacccctacggccagccccaggtgttccccggccaggaccccgacagcccccagcacggcaactaccaggaggagggcccccccagctactacgacaaccaggacttccccgccaccaactgggacgacaagagcatcagacaggccttcatcagaaaggtgttcctggtgctgaccctgcagctgagcgtgaccctgagcaccgtgagcgtgttcaccttcgtggccgaggtgaagggcttcgtgagagagaacgtgtggacctactacgtgagctacgccgtgttcttcatcagcctgatcgtgctgagctgctgcggcgacttcagaagaaagcacccctggaacctggtggccctgagcgtgctgaccgccagcctgagctacatggtgggcatgatcgccagcttctacaacaccgaggccgtgatcatggccgtgggcatcaccaccgccgtgtgcttcaccgtggtgatcttcagcatgcagaccagatacgacttcaccagctgcatgggcgtgctgctggtgagcatggtggtgctgttcatcttcgccatcctgtgcatcttcatcagaaacagaatcctggagatcgtgtacgccagcctgggcgccctgctgttcacctgcttcctggccgtggacacccagctgctgctgggcaacaagcagctgagcctgagccccgaggagtacgtgttcgccgccctgaacctgtacaccgacatcatcaacatcttcctgtacatcctgaccatcatcggcagagccaaggagtag

SEQ ID NO: 83184 - DNA, 3348 bp, synthetic construct
  misc_feature 1..3348: note = Description of Artificial Sequence: Synthetic coding sequence
  source 1..3348: mol_type = other DNA
atgagaagactgagcctgtggtggctgctgagcagagtgtgcctgctgctgccccccccctgcgccctggtgctggccggcgtgcccagcagcagcagccacccccagccctgccagatcctgaagagaatcggccacgccgtgagagtgggcgccgtgcacctgcagccctggaccaccgcccccagagccgccagcagagcccccgacgacagcagagccggcgcccagagagacgagcccgagcccggcaccagaagaagccccgcccccagccccggcgccagatggctgggcagcaccctgcacggcagaggcccccccggcagcagaaagcccggcgagggcgccagagccgaggccctgtggcccagagacgccctgctgttcgccgtggacaacctgaacagagtggagggcctgctgccctacaacctgagcctggaggtggtgatggccatcgaggccggcctgggcgacctgcccctgctgcccttcagcagccccagcagcccctggagcagcgaccccttcagcttcctgcagagcgtgtgccacaccgtggtggtgcagggcgtgagcgccctgctggccttcccccagagccagggcgagatgatggagctggacctggtgagcctggtgctgcacatccccgtgatcagcatcgtgagacacgagttccccagagagagccagaaccccctgcacctgcagctgagcctggagaacagcctgagcagcgacgccgacgtgaccgtgagcatcctgaccatgaacaactggtacaacttcagcctgctgctgtgccaggaggactggaacatcaccgacttcctgctgctgacccagaacaacagcaagttccacctgggcagcatcatcaacatcaccgccaacctgcccagcacccaggacctgctgagcttcctgcagatccagctggagagcatcaagaacagcacccccaccgtggtgatgttcggctgcgacatggagagcatcagaagaatcttcgagatcaccacccagttcggcgtgatgccccccgagctgagatgggtgctgggcgacagccagaacgtggaggagctgagaaccgagggcctgcccctgggcctgatcgcccacggcaagaccacccagagcgtgttcgagcactacgtgcaggacgccatggagctggtggccagagccgtggccaccgccaccatgatccagcccgagctggccctgatccccagcaccatgaactgcatggaggtggagaccaccaacctgaccagcggccagtacctgagcagattcctggccaacaccaccttcagaggcctgagcggcagcatcagagtgaagggcagcaccatcgtgagcagcgagaacaacttcttcatctggaacctgcagcacgaccccatgggcaagcccatgtggaccagactgggcagctggcagggcggcaagatcgtgatggactacggcatctggcccgagcaggcccagagacacaagacccacttccagcaccccagcaagctgcacctgagagtggtgaccctgatcgagcaccccttcgtgttcaccagagaggtggacgacgagggcctgtgccccgccggccagctgtgcctggaccccatgaccaacgacagcagcaccctggacagcctgttcagcagcctgcacagcagcaacgacaccgtgcccatcaagttcaagaagtgctgctacggctactgcatcgacctgctggagaagatcgccgaggacatgaacttcgacttcgacctgtacatcgtgggcgacggcaagtacggcgcctggaagaacggccactggaccggcctggtgggcgacctgctgagaggcaccgcccacatggccgtgaccagcttcagcatcaacaccgccagaagccaggtgatcgacttcaccagccccttcttcagcaccagcctgggcatcctggtgagaaccagagacaccgccgcccccatcggcgccttcatgtggcccctgcactggaccatgtggctgggcatcttcgtggccctgcacatcaccgccgtgttcctgaccctgtacgagtggaagagccccttcggcctgacccccaagggcagaaacagaagcaaggtgttcagcttcagcagcgccctgaacatctgctacgccctgctgttcggcagaaccgtggccatcaagccccccaagtgctggaccggcagattcctgatgaacctgtgggccatcttctgcatgttctgcctgagcacctacaccgccaacctggccgccgtgatggtgggcgagaagatctacgaggagctgagcggcatccacgaccccaagctgcaccaccccagccagggcttcagattcggcaccgtgagagagagcagcgccgaggactacgtgagacagagcttccccgagatgcacgagtacatgagaagatacaacgtgcccgccacccccgacggcgtggagtacctgaagaacgaccccgagaagctggacgccttcatcatggacaaggccctgctggactacgaggtgagcatcgacgccgactgcaagctgctgaccgtgggcaagcccttcgccatcgagggctacggcatcggcctgccccccaacagccccctgaccgccaacatcagcgagctgatcagccagtacaagagccacggcttcatggacatgctgcacgacaagtggtacagagtggtgccctgcggcaagagaagcttcgccgtgaccgagaccctgcagatgggcatcaagcacttcagcggcctgttcgtgctgctgtgcatcggcttcggcctgagcatcctgaccaccatcggcgagcacatcgtgtacagactgctgctgcccagaatcaagaacaagagcaagctgcagtactggctgcacaccagccagagactgcacagagccatcaacaccagcttcatcgaggagaagcagcagcacttcaagaccaagagagtggagaagagaagcaacgtgggccccagacagctgaccgtgtggaacaccagcaacctgagccacgacaacagaagaaagtacatcttcagcgacgaggagggccagaaccagctgggcatcagaatccaccaggacatccccctgccccccagaagaagagagctgcccgccctgagaaccaccaacggcaaggccgacagcctgaacgtgagcagaaacagcgtgatgcaggagctgagcgagctggagaagcagatccaggtgatcagacaggagctgcagctggccgtgagcagaaagaccgagctggaggagtaccagagaaccagcagaacctgcgagagctag

SEQ ID NO: 83185 - DNA, 3585 bp, synthetic construct
  misc_feature 1..3585: note = Description of Artificial Sequence: Synthetic coding sequence
  source 1..3585: mol_type = other DNA
atggtgggcctgctgctgttcttcttccccgccatcttcctggaggtgagcctgctgcccagaagccccggcagaaaggtgctgctggccggcgccagcagccagagaagcgtggccagaatggacggcgacgtgatcatcggcgccctgttcagcgtgcaccaccagccccccgccgagaaggtgcccgagagaaagtgcggcgagatcagagagcagtacggcatccagagagtggaggccatgttccacaccctggacaagatcaacgccgaccccgtgctgctgcccaacatcaccctgggcagcgagatcagagacagctgctggcacagcagcgtggccctggagcagagcatcgagttcatcagagacagcctgatcagcatcagagacgagaaggacggcatcaacagatgcctgcccgacggccagagcctgccccccggcagaaccaagaagcccatcgccggcgtgatcggccccggcagcagcagcgtggccatccaggtgcagaacctgctgcagctgttcgacatcccccagatcgcctacagcgccaccagcatcgacctgagcgacaagaccctgtacaagtacttcctgagagtggtgcccagcgacaccctgcaggccagagccatgctggacatcgtgaagagatacaactggacctacgtgagcgccgtgcacaccgagggcaactacggcgagagcggcatggacgccttcaaggagctggccgcccaggagggcctgtgcatcgcccacagcgacaagatctacagcaacgccggcgagaagagcttcgacagactgctgagaaagctgagagagagactgcccaaggccagagtggtggtgtgcttctgcgagggcatgaccgtgagaggcctgctgagcgccatgagaagactgggcgtggtgggcgagttcagcctgatcggcagcgacggctgggccgacagagacgaggtgatcgagggctacgaggtggaggccaacggcggcatcaccatcaagctgcagagccccgaggtgagaagcttcgacgactacttcctgaagctgagactggacaccaacaccagaaacccctggttccccgagttctggcagcacagattccagtgcagactgcccggccacctgctggagaaccccaacttcaagagaatctgcaccggcaacgagagcctggaggagaactacgtgcaggacagcaagatgggcttcgtgatcaacgccatctacgccatggcccacggcctgcagaacatgcaccacgccctgtgccccggccacgtgggcctgtgcgacgccatgaagcccatcgacggcagcaagctgctggacttcctgatcaagagcagcttcatcggcgtgagcggcgaggaggtgtggttcgacgagaagggcgacgcccccggcagatacgacatcatgaacctgcagtacaccgaggccaacagatacgactacgtgcacgtgggcacctggcacgagggcgtgctgaacatcgacgactacaagatccagatgaacaagagcggcgtggtgagaagcgtgtgcagcgagccctgcctgaagggccagatcaaggtgatcagaaagggcgaggtgagctgctgctggatctgcaccgcctgcaaggagaacgagtacgtgcaggacgagttcacctgcaaggcctgcgacctgggctggtggcccaacgccgacctgaccggctgcgagcccatccccgtgagatacctggagtggagcaacatcgagagcatcatcgccatcgccttcagctgcctgggcatcctggtgaccctgttcgtgaccctgatcttcgtgctgtacagagacacccccgtggtgaagagcagcagcagagagctgtgctacatcatcctggccggcatcttcctgggctacgtgtgccccttcaccctgatcgccaagcccaccaccaccagctgctacctgcagagactgctggtgggcctgagcagcgccatgtgctacagcgccctggtgaccaagaccaacagaatcgccagaatcctggccggcagcaagaagaagatctgcaccagaaagcccagattcatgagcgcctgggcccaggtgatcatcgccagcatcctgatcagcgtgcagctgaccctggtggtgaccctgatcatcatggagccccccatgcccatcctgagctaccccagcatcaaggaggtgtacctgatctgcaacaccagcaacctgggcgtggtggcccccctgggctacaacggcctgctgatcatgagctgcacctactacgccttcaagaccagaaacgtgcccgccaacttcaacgaggccaagtacatcgccttcaccatgtacaccacctgcatcatctggctggccttcgtgcccatctacttcggcagcaactacaagatcatcaccacctgcttcgccgtgagcctgagcgtgaccgtggccctgggctgcatgttcacccccaagatgtacatcatcatcgccaagcccgagagaaacgtgagaagcgccttcaccaccagcgacgtggtgagaatgcacgtgggcgacggcaagctgccctgcagaagcaacaccttcctgaacatcttcagaagaaagaaggccggcgccggcaacgccaacagcaacggcaagagcgtgagctggagcgagcccggcggcggccaggtgcccaagggccagcacatgtggcacagactgagcgtgcacgtgaagaccaacgagaccgcctgcaaccagaccgccgtgatcaagcccctgaccaagagctaccagggcagcggcaagagcctgaccttcagcgacaccagcaccaagaccctgtacaacgtggaggaggaggaggacgcccagcccatcagattcagcccccccggcagccccagcatggtggtgcacagaagagtgcccagcgccgccaccaccccccccctgcccagccacctgaccgccgaggagacccccctgttcctggccgagcccgccctgcccaagggcctgcccccccccctgcagcagcagcagcagccccccccccagcagaagagcctgatggaccagctgcagggcgtggtgagcaacttcagcaccgccatccccgacttccacgccgtgctggccggccccggcggccccggcaacggcctgagaagcctgtaccccccccccccccccccccagcacctgcagatgctgcccctgcagctgagcaccttcggcgaggagctggtgagcccccccgccgacgacgacgacgacagcgagagattcaagctgctgcaggagtacgtgtacgagcacgagagagagggcaacaccgaggaggacgagctggaggaggaggaggaggacctgcaggccgccagcaagctgacccccgacgacagccccgccctgaccccccccagccccttcagagacagcgtggccagcggcagcagcgtgcccagcagccccgtgagcgagagcgtgctgtgcaccccccccaacgtgagctacgccagcgtgatcctgagagactacaagcagagcagcagcaccctgtag

SEQ ID NO: 83186 - DNA, 3585 bp, synthetic construct; identical to SEQ ID NO: 83185
  misc_feature 1..3585: note = Description of Artificial Sequence: Synthetic coding sequence
  source 1..3585: mol_type = other DNA

SEQ ID NO: 83187 - DNA, 2721 bp, synthetic construct
  misc_feature 1..2721: note = Description of Artificial Sequence: Synthetic coding sequence
  source 1..2721: mol_type = other DNA
atggtgggcctgctgctgttcttcttccccgccatcttcctggaggtgagcctgctgcccagaagccccggcagaaaggtgctgctggccggcgccagcagccagagaagcgtggccagaatggacggcgacgtgatcatcggcgccctgttcagcgtgcaccaccagccccccgccgagaaggtgcccgagagaaagtgcggcgagatcagagagcagtacggcatccagagagtggaggccatgttccacaccctggacaagatcaacgccgaccccgtgctgctgcccaacatcaccctgggcagcgagatcagagacagctgctggcacagcagcgtggccctggagcagagcatcgagttcatcagagacagcctgatcagcatcagagacgagaaggacggcatcaacagatgcctgcccgacggccagagcctgccccccggcagaaccaagaagcccatcgccggcgtgatcggccccggcagcagcagcgtggccatccaggtgcagaacctgctgcagctgttcgacatcccccagatcgcctacagcgccaccagcatcgacctgagcgacaagaccctgtacaagtacttcctgagagtggtgcccagcgacaccctgcaggccagagccatgctggacatcgtgaagagatacaactggacctacgtgagcgccgtgcacaccgagggcaactacggcgagagcggcatggacgccttcaaggagctggccgcccaggagggcctgtgcatcgcccacagcgacaagatctacagcaacgccggcgagaagagcttcgacagactgctgagaaagctgagagagagactgcccaaggccagagtggtggtgtgcttctgcgagggcatgaccgtgagaggcctgctgagcgccatgagaagactgggcgtggtgggcgagttcagcctgatcggcagcgacggctgggccgacagagacgaggtgatcgagggctacgaggtggaggccaacggcggcatcaccatcaagctgcagagccccgaggtgagaagcttcgacgactacttcctgaagctgagactggacaccaacaccagaaacccctggttccccgagttctggcagcacagattccagtgcagactgcccggccacctgctggagaaccccaacttcaagagaatctgcaccggcaacgagagcctggaggagaactacgtgcaggacagcaagatgggcttcgtgatcaacgccatctacgccatggcccacggcctgcagaacatgcaccacgccctgtgccccggccacgtgggcctgtgcgacgccatgaagcccatcgacggcagcaagctgctggacttcctgatcaagagcagcttcatcggcgtgagcggcgaggaggtgtggttcgacgagaagggcgacgcccccggcagatacgacatcatgaacctgcagtacaccgaggccaacagatacgactacgtgcacgtgggcacctggcacgagggcgtgctgaacatcgacgactacaagatccagatgaacaagagcggcgtggtgagaagcgtgtgcagcgagccctgcctgaagggccagatcaaggtgatcagaaagggcgaggtgagctgctgctggatctgcaccgcctgcaaggagaacgagtacgtgcaggacgagttcacctgcaaggcctgcgacctgggctggtggcccaacgccgacctgaccggctgcgagcccatccccgtgagatacctggagtggagcaacatcgagagcatcatcgccatcgccttcagctgcctgggcatcctggtgaccctgttcgtgaccctgatcttcgtgctgtacagagacacccccgtggtgaagagcagcagcagagagctgtgctacatcatcctggccggcatcttcctgggctacgtgtgccccttcaccctgatcgccaagcccaccaccaccagctgctacctgcagagactgctggtgggcctgagcagcgccatgtgctacagcgccctggtgaccaagaccaacagaatcgccagaatcctggccggcagcaagaagaagatctgcaccagaaagcccagattcatgagcgcctgggcccaggtgatcatcgccagcatcctgatcagcgtgcagctgaccctggtggtgaccctgatcatcatggagccccccatgcccatcctgagctaccccagcatcaaggaggtgtacctgatctgcaacaccagcaacctgggcgtggtggcccccctgggctacaacggcctgctgatcatgagctgcacctactacgccttcaagaccagaaacgtgcccgccaacttcaacgaggccaagtacatcgccttcaccatgtacaccacctgcatcatctggctggccttcgtgcccatctacttcggcagcaactacaagatcatcaccacctgcttcgccgtgagcctgagcgtgaccgtggccctgggctgcatgttcacccccaagatgtacatcatcatcgccaagcccgagagaaacgtgagaagcgccttcaccaccagcgacgtggtgagaatgcacgtgggcgacggcaagctgccctgcagaagcaacaccttcctgaacatcttcagaagaaagaaggccggcgccggcaacgccaagaagagacagcccgagttcagccccaccagccagtgccccagcgcccacgtgcagctgtag

SEQ ID NO: 83188 - DNA, 2721 bp, synthetic construct; identical to SEQ ID NO: 83187
  misc_feature 1..2721: note = Description of Artificial Sequence: Synthetic coding sequence
  source 1..2721: mol_type = other DNA

SEQ ID NO: 83189 - DNA, 2721 bp, synthetic construct; identical to SEQ ID NO: 83187
  misc_feature 1..2721: note = Description of Artificial Sequence: Synthetic coding sequence
  source 1..2721: mol_type = other DNA

SEQ ID NO: 83190 - DNA, 2619 bp, synthetic construct
  misc_feature 1..2619: note = Description of Artificial Sequence: Synthetic coding sequence
  source 1..2619: mol_type = other DNA
atgggcagcctgctggccctgctggccctgctgctgctgtggggcgccgtggccgagggccccgccaagaaggtgctgaccctggagggcgacctggtgctgggcggcctgttccccgtgcaccagaagggcggccccgccgaggactgcggccccgtgaacgagcacagaggcatccagagactggaggccatgctgttcgccctggacagaatcaacagagacccccacctgctgcccggcgtgagactgggcgcccacatcctggacagctgcagcaaggacacccacgccctggagcaggccctggacttcgtgagagccagcctgagcagaggcgccgacggcagcagacacatctgccccgacggcagctacgccacccacggcgacgcccccaccgccatcaccggcgtgatcggcggcagctacagcgacgtgagcatccaggtggccaacctgctgagactgttccagatcccccagatcagctacgccagcaccagcgccaagctgagcgacaagagcagatacgactacttcgccagaaccgtgccccccgacttcttccaggccaaggccatggccgagatcctgagattcttcaactggacctacgtgagcaccgtggccagcgagggcgactacggcgagaccggcatcgaggccttcgagctggaggccagagccagaaacatctgcgtggccaccagcgagaaggtgggcagagccatgagcagagccgccttcgagggcgtggtgagagccctgctgcagaagcccagcgccagagtggccgtgctgttcaccagaagcgaggacgccagagagctgctggccgccagccagagactgaacgccagcttcacctgggtggccagcgacggctggggcgccctggagagcgtggtggccggcagcgagggcgccgccgagggcgccatcaccatcgagctggccagctaccccatcagcgacttcgccagctacttccagagcctggacccctggaacaacagcagaaacccctggttcagagagttctgggagcagagattcagatgcagcttcagacagagagactgcgccgcccacagcctgagagccgtgcccttcgagcaggagagcaagatcatgttcgtggtgaacgccgtgtacgccatggcccacgccctgcacaacatgcacagagccctgtgccccaacaccaccagactgtgcgacgccatgagacccgtgaacggcagaagactgtacaaggacttcgtgctgaacgtgaagttcgacgcccccttcagacccgccgacacccacaacgaggtgagattcgacagattcggcgacggcatcggcagatacaacatcttcacctacctgagagccggcagcggcagatacagataccagaaggtgggctactgggccgagggcctgaccctggacaccagcctgatcccctgggccagccccagcgccggccccctgcccgccagcagatgcagcgagccctgcctgcagaacgaggtgaagagcgtgcagcccggcgaggtgtgctgctggctgtgcatcccctgccagccctacgagtacagactggacgagttcacctgcgccgactgcggcctgggctactggcccaacgccagcctgaccggctgcttcgagctgccccaggagtacatcagatggggcgacgcctgggccgtgggccccgtgaccatcgcctgcctgggcgccctggccaccctgttcgtgctgggcgtgttcgtgagacacaacgccacccccgtggtgaaggccagcggcagagagctgtgctacatcctgctgggcggcgtgttcctgtgctactgcatgaccttcatcttcatcgccaagcccagcaccgccgtgtgcaccctgagaagactgggcctgggcaccgccttcagcgtgtgctacagcgccctgctgaccaagaccaacagaatcgccagaatcttcggcggcgccagagagggcgcccagagacccagattcatcagccccgccagccaggtggccatctgcctggccctgatcagcggccagctgctgatcgtggtggcctggctggtggtggaggcccccggcaccggcaaggagaccgcccccgagagaagagaggtggtgaccctgagatgcaaccacagagacgccagcatgctgggcagcctggcctacaacgtgctgctgatcgccctgtgcaccctgtacgccttcaagaccagaaagtgccccgagaacttcaacgaggccaagttcatcggcttcaccatgtacaccacctgcatcatctggctggccttcctgcccatcttctacgtgaccagcagcgactacagagtgcagaccaccaccatgtgcgtgagcgtgagcctgagcggcagcgtggtgctgggctgcctgttcgcccccaagctgcacatcatcctgttccagccccagaagaacgtggtgagccacagagcccccaccagcagattcggcagcgccgccgccagagccagcagcagcctgggccagggcagcggcagccagttcgtgcccaccgtgtgcaacggcagagaggtggtggacagcaccaccagcagcctgtag

SEQ ID NO: 83191 - DNA, 213 bp, synthetic construct
  misc_feature 1..213: note = Description of Artificial Sequence: Synthetic coding sequence
  source 1..213: mol_type = other DNA
atgggcagcctgctggccctgctggccctgctgctgctgtggggcgccgtggccgagggccccgccaagaaggtgctgaccctggagggcgacctggtgctgggcggcctgttccccgtgcaccagaagggcggccccgccgaggactgcggccccgtgaacgagcacagaggcatccagagactggaggccatgctgttcgccctggactag

SEQ ID NO: 83192 - DNA, 2640 bp, synthetic construct
  misc_feature 1..2640: note = Description of Artificial Sequence: Synthetic coding sequence
  source 1..2640: mol_type = other DNA
atgaagatgctgaccagactgcaggtgctgaccctggccctgttcagcaagggcttcctgctgagcctgggcgaccacaacttcctgagaagagagatcaagatcgagggcgacctggtgctgggcggcctgttccccatcaacgagaagggcaccggcaccgaggagtgcggcagaatcaacgaggacagaggcatccagagactggaggccatgctgttcgccatcgacgagatcaacaaggacgactacctgctgcccggcgtgaagctgggcgtgcacatcctggacacctgcagcagagacacctacgccctggagcagagcctggagttcgtgagagccagcctgaccaaggtggacgaggccgagtacatgtgccccgacggcagctacgccatccaggagaacatccccctgctgatcgccggcgtgatcggcggcagctacagcagcgtgagcatccaggtggccaacctgctgagactgttccagatcccccagatcagctacgccagcaccagcgccaagctgagcgacaagagcagatacgactacttcgccagaaccgtgccccccgacttctaccaggccaaggccatggccgagatcctgagattcttcaactggacctacgtgagcaccgtggccagcgagggcgactacggcgagaccggcatcgaggccttcgagcaggaggccagactgagaaacatctgcatcgccaccgccgagaaggtgggcagaagcaacatcagaaagagctacgacagcgtgatcagagagctgctgcagaagcccaacgccagagtggtggtgctgttcatgagaagcgacgacagcagagagctgatcgccgccgccagcagagccaacgccagcttcacctgggtggccagcgacggctggggcgcccaggagagcatcatcaagggcagcgagcacgtggcctacggcgccatcaccctggagctggccagccagcccgtgagacagttcgacagatacttccagagcctgaacccctacaacaaccacagaaacccctggttcagagacttctgggagcagaagttccagtgcagcctgcagaacaagagaaaccacagaagagtgtgcgacaagcacctggccatcgacagcagcaactacgagcaggagagcaagatcatgttcgtggtgaacgccgtgtacgccatggcccacgccctgcacaagatgcagagaaccctgtgccccaacaccaccaagctgtgcgacgccatgaagatcctggacggcaagaagctgtacaaggactacctgctgaagatcaacttcaccgcccccttcaaccccaacaaggacgccgacagcatcgtgaagttcgacaccttcggcgacggcatgggcagatacaacgtgttcaacttccagaacgtgggcggcaagtacagctacctgaaggtgggccactgggccgagaccctgagcctggacgtgaacagcatccactggagcagaaacagcgtgcccaccagccagtgcagcgacccctgcgcccccaacgagatgaagaacatgcagcccggcgacgtgtgctgctggatctgcatcccctgcgagccctacgagtacctggccgacgagttcacctgcatggactgcggcagcggccagtggcccaccgccgacctgaccggctgctacgacctgcccgaggactacatcagatgggaggacgcctgggccatcggccccgtgaccatcgcctgcctgggcttcatgtgcacctgcatggtggtgaccgtgttcatcaagcacaacaacacccccctggtgaaggccagcggcagagagctgtgctacatcctgctgttcggcgtgggcctgagctactgcatgaccttcttcttcatcgccaagcccagccccgtgatctgcgccctgagaagactgggcctgggcagcagcttcgccatctgctacagcgccctgctgaccaagaccaactgcatcgccagaatcttcgacggcgtgaagaacggcgcccagagacccaagttcatcagccccagcagccaggtgttcatctgcctgggcctgatcctggtgcagatcgtgatggtgagcgtgtggctgatcctggaggcccccggcaccagaagatacaccctggccgagaagagagagaccgtgatcctgaagtgcaacgtgaaggacagcagcatgctgatcagcctgacctacgacgtgatcctggtgatcctgtgcaccgtgtacgccttcaagaccagaaagtgccccgagaacttcaacgaggccaagttcatcggcttcaccatgtacaccacctgcatcatctggctggccttcctgcccatcttctacgtgaccagcagcgactacagagtgcagaccaccaccatgtgcatcagcgtgagcctgagcggcttcgtggtgctgggctgcctgttcgcccccaaggtgcacatcatcctgttccagccccagaagaacgtggtgacccacagactgcacctgaacagattcagcgtgagcggcaccggcaccacctacagccagagcagcgccagcacctacgtgcccaccgtgtgcaacggcagagaggtgctggacagcaccaccagcagcctgtag

SEQ ID NO: 83193 - DNA, 1608 bp, synthetic construct
  misc_feature 1..1608: note = Description of Artificial Sequence: Synthetic coding sequence
  source 1..1608: mol_type = other DNA
atgctgaccagactgcaggtgctgaccctggccctgttcagcaagggcttcctgctgagcctgggcgaccacaacttcctgagaagagagatcaagatcgagggcgacctggtgctgggcggcctgttccccatcaacgagaagggcaccggcaccgaggagtgcggcagaatcaacgaggacagaggcatccagagactggaggccatgctgttcgccatcgacgagatcaacaaggacgactacctgctgcccggcgtgaagctgggcgtgcacatcctggacacctgcagcagagacacctacgccctggagcagagcctggagttcgtgagagccagcctgaccaaggtggacgaggccgagtacatgtgccccgacggcagctacgccatccaggagaacatccccctgctgatcgccggcgtgatcggcggcagctacagcagcgtgagcatccaggtggccaacctgctgagactgttccagatcccccagatcagctacgccagcaccagcgccaagctgagcgacaagagcagatacgactacttcgccagaaccgtgccccccgacttctaccaggccaaggccatggccgagatcctgagattcttcaactggacctacgtgagcaccgtggccagcgagggcgactacggcgagaccggcatcgaggccttcgagcaggaggccagactgagaaacatctgcatcgccaccgccgagaaggtgggcagaagcaacatcagaaagagctacgacagcgtgatcagagagctgctgcagaagcccaacgccagagtggtggtgctgttcatgagaagcgacgacagcagagagctgatcgccgccgccagcagagccaacgccagcttcacctgggtggccagcgacggctggggcgcccaggagagcatcatcaagggcagcgagcacgtggcctacggcgccatcaccctggagctggccagccagcccgtgagacagttcgacagatacttccagagcctgaacccctacaacaaccacagaaacccctggttcagagacttctgggagcagaagttccagtgcagcctgcagaacaagagaaaccacagaagagtgtgcgacaagcacctggccatcgacagcagcaactacgagcaggagagcaagatcatgttcgtggtgaacgccgtgtacgccatggcccacgccctgcacaagatgcagagaaccctgtgccccaacaccaccaagctgtgcgacgccatgaagatcctggacggcaagaagctgtacaaggactacctgctgaagatcaacttcaccggcgccgacgacaaccacgtgcacctgtgccagcccgagtggctgtgcggcctgggcctgttcgtgtgcacccagggcagccaccaccccgtgagcacccccgaggagtgctgccacacccagaccgccccccagcaggtgcagtgccagtggaactgggaccacatcctgagcgtgctgtgcaagcacgtgtgcgccaacggcgtgcagtgggccggcagccccagactgcaccacctgatcagcgtgatcgtgaactgcagcagcgtgctggtgttcctggactgctag

SEQ ID NO: 83194 - DNA, 264 bp, synthetic construct
  misc_feature 1..264: note = Description of Artificial Sequence: Synthetic coding sequence
  source 1..264: mol_type = other DNA
atgaagatgctgaccagactgcaggtgctgaccctggccctgttcagcaagggcttcctgctgagcctgggcgaccacaacttcctgagaagagagatcaagatcgagggcgacctggtgctgggcggcctgttccccatcaacgagaagggcaccggcaccgaggagtgcggcagaatcaacgaggacagaggcatccagagactggaggccatgctgttcgccatcgacgagatcaacaaggacgactacctgctgccctag

SEQ ID NO: 83195 - DNA, 1614 bp, synthetic construct
  misc_feature 1..1614: note = Description of Artificial Sequence: Synthetic coding sequence
  source 1..1614: mol_type = other DNA
atgaagatgctgaccagactgcaggtgctgaccctggccctgttcagcaagggcttcctgctgagcctgggcgaccacaacttcctgagaagagagatcaagatcgagggcgacctggtgctgggcggcctgttccccatcaacgagaagggcaccggcaccgaggagtgcggcagaatcaacgaggacagaggcatccagagactggaggccatgctgttcgccatcgacgagatcaacaaggacgactacctgctgcccggcgtgaagctgggcgtgcacatcctggacacctgcagcagagacacctacgccctggagcagagcctggagttcgtgagagccagcctgaccaaggtggacgaggccgagtacatgtgccccgacggcagctacgccatccaggagaacatccccctgctgatcgccggcgtgatcggcggcagctacagcagcgtgagcatccaggtggccaacctgctgagactgttccagatcccccagatcagctacgccagcaccagcgccaagctgagcgacaagagcagatacgactacttcgccagaaccgtgccccccgacttctaccaggccaaggccatggccgagatcctgagattcttcaactggacctacgtgagcaccgtggccagcgagggcgactacggcgagaccggcatcgaggccttcgagcaggaggccagactgagaaacatctgcatcgccaccgccgagaaggtgggcagaagcaacatcagaaagagctacgacagcgtgatcagagagctgctgcagaagcccaacgccagagtggtggtgctgttcatgagaagcgacgacagcagagagctgatcgccgccgccagcagagccaacgccagcttcacctgggtggccagcgacggctggggcgcccaggagagcatcatcaagggcagcgagcacgtggcctacggcgccatcaccctggagctggccagccagcccgtgagacagttcgacagatacttccagagcctgaacccctacaacaaccacagaaacccctggttcagagacttctgggagcagaagttccagtgcagcctgcagaacaagagaaaccacagaagagtgtgcgacaagcacctggccatcgacagcagcaactacgagcaggagagcaagatcatgttcgtggtgaacgccgtgtacgccatggcccacgccctgcacaagatgcagagaaccctgtgccccaacaccaccaagctgtgcgacgccatgaagatcctggacggcaagaagctgtacaaggactacctgctgaagatcaacttcaccggcgccgacgacaaccacgtgcacctgtgccagcccgagtggctgtgcggcctgggcctgttcgtgtgcacccagggcagccaccaccccgtgagcacccccgaggagtgctgccacacccagaccgccccccagcaggtgcagtgccagtggaactgggaccacatcctgagcgtgctgtgcaagcacgtgtgcgccaacggcgtgcagtgggccggcagccccagactgcaccacctgatcagcgtgatcgtgaactgcagcagcgtgctggtgttcctggactgctag

SEQ ID NO: 83196 - DNA, 246 bp, synthetic construct
  misc_feature 1..246: note = Description of Artificial Sequence: Synthetic coding sequence
  source 1..246: mol_type = other DNA
atgaagatgctgaccagactgcaggtgctgaccctggccctgttcagcaagggcttcctgctgagcctgggcgaccacaacttcctgagaagagagatcaagatcgagggcgacctggtgctgggcggcctgttccccatcaacgagaagggcaccggcaccgaggagtgcggcagaatcaacgaggacagaggcatccagagactggaggccatgctgttcgccatcgacgagatcaacaagtag

SEQ ID NO: 83197 - DNA, 2256 bp, synthetic construct
  misc_feature 1..2256: note = Description of Artificial Sequence: Synthetic coding sequence
  source 1..2256: mol_type = other DNA
atgagccagagccccggcgccggcagccccccccccctgccccccagaagcgcccccgtgcccgccagaagctgcagatgcgaggtggccaacctgctgagactgttccagatcccccagatcagctacgccagcaccagcgccaagctgagcgacaagagcagatacgactacttcgccagaaccgtgccccccgacttctaccaggccaaggccatggccgagatcctgagattcttcaactggacctacgtgagcaccgtggccagcgagggcgactacggcgagaccggcatcgaggccttcgagcaggaggccagactgagaaacatctgcatcgccaccgccgagaaggtgggcagaagcaacatcagaaagagctacgacagcgtgatcagagagctgctgcagaagcccaacgccagagtggtggtgctgttcatgagaagcgacgacagcagagagctgatcgccgccgccagcagagccaacgccagcttcacctgggtggccagcgacggctggggcgcccaggagagcatcatcaagggcagcgagcacgtggcctacggcgccatcaccctggagctggccagccagcccgtgagacagttcgacagatacttccagagcctgaacccctacaacaaccacagaaacccctggttcagagacttctgggagcagaagttccagtgcagcctgcagaacaagagaaaccacagaagagtgtgcgacaagcacctggccatcgacagcagcaactacgagcaggagagcaagatcatgttcgtggtgaacgccgtgtacgccatggcccacgccctgcacaagatgcagagaaccctgtgccccaacaccaccaagctgtgcgacgccatgaagatcctggacggcaagaagctgtacaaggactacctgctgaagatcaacttcaccgcccccttcaaccccaacaaggacgccgacagcatcgtgaagttcgacaccttcggcgacggcatgggcagatacaacgtgttcaacttccagaacgtgggcggcaagtacagctacctgaaggtgggccactgggccgagaccctgagcctggacgtgaacagcatccactggagcagaaacagcgtgcccaccagccagtgcagcgacccctgcgcccccaacgagatgaagaacatgcagcccggcgacgtgtgctgctggatctgcatcccctgcgagccctacgagtacctggccgacgagttcacctgcatggactgcggcagcggccagtggcccaccgccgacctgaccggctgctacgacctgcccgaggactacatcagatgggaggacgcctgggccatcggccccgtgaccatcgcctgcctgggcttcatgtgcacctgcatggtggtgaccgtgttcatcaagcacaacaacacccccctggtgaaggccagcggcagagagctgtgctacatcctgctgttcggcgtgggcctgagctactgcatgaccttcttcttcatcgccaagcccagccccgtgatctgcgccctgagaagactgggcctgggcagcagcttcgccatctgctacagcgccctgctgaccaagaccaactgcatcgccagaatcttcgacggcgtgaagaacggcgcccagagacccaagttcatcagccccagcagccaggtgttcatctgcctgggcctgatcctggtgcagatcgtgatggtgagcgtgtggctgatcctggaggcccccggcaccagaagatacaccctggccgagaagagagagaccgtgatcctgaagtgcaacgtgaaggacagcagcatgctgatcagcctgacctacgacgtgatcctggtgatcctgtgcaccgtgtacgccttcaagaccagaaagtgccccgagaacttcaacgaggccaagttcatcggcttcaccatgtacaccacctgcatcatctggctggccttcctgcccatcttctacgtgaccagcagcgactacagagtgcagaccaccaccatgtgcatcagcgtgagcctgagcggcttcgtggtgctgggctgcctgttcgcccccaaggtgcacatcatcctgttccagccccagaagaacgtggtgacccacagactgcacctgaacagattcagcgtgagcggcaccggcaccacctacagccagagcagcgccagcacctacgtgcccaccgtgtgcaacggcagagaggtgctggacagcaccaccagcagcctgtag

SEQ ID NO: 83198 - DNA, 1416 bp, synthetic construct
  misc_feature 1..1416: note = Description of Artificial Sequence: Synthetic coding sequence
  source 1..1416: mol_type = other DNA
atgagaagaaccaaccacgagcccgagcccggctgcagactgaccgccgccgccgccaccgccgtgagcagcagcagctgccaggagctgagcgtgagagcccccttcaaccccaacaaggacgccgacagcatcgtgaagttcgacaccttcggcgacggcatgggcagatacaacgtgttcaacttccagaacgtgggcggcaagtacagctacctgaaggtgggccactgggccgagaccctgagcctggacgtgaacagcatccactggagcagaaacagcgtgcccaccagccagtgcagcgacccctgcgcccccaacgagatgaagaacatgcagcccggcgacgtgtgctgctggatctgcatcccctgcgagccctacgagtacctggccgacgagttcacctgcatggactgcggcagcggccagtggcccaccgccgacctgaccggctgctacgacctgcccgaggactacatcagatgggaggacgcctgggccatcggccccgtgaccatcgcctgcctgggcttcatgtgcacctgcatggtggtgaccgtgttcatcaagcacaacaacacccccctggtgaaggccagcggcagagagctgtgctacatcctgctgttcggcgtgggcctgagctactgcatgaccttcttcttcatcgccaagcccagccccgtgatctgcgccctgagaagactgggcctgggcagcagcttcgccatctgctacagcgccctgctgaccaagaccaactgcatcgccagaatcttcgacggcgtgaagaacggcgcccagagacccaagttcatcagccccagcagccaggtgttcatctgcctgggcctgatcctggtgcagatcgtgatggtgagcgtgtggctgatcctggaggcccccggcaccagaagatacaccctggccgagaagagagagaccgtgatcctgaagtgcaacgtgaaggacagcagcatgctgatcagcctgacctacgacgtgatcctggtgatcctgtgcaccgtgtacgccttcaagaccagaaagtgccccgagaacttcaacgaggccaagttcatcggcttcaccatgtacaccacctgcatcatctggctggccttcctgcccatcttctacgtgaccagcagcgactacagagtgcagaccaccaccatgtgcatcagcgtgagcctgagcggcttcgtggtgctgggctgcctgttcgcccccaaggtgcacatcatcctgttccagccccagaagaacgtggtgacccacagactgcacctgaacagattcagcgtgagcggcaccggcaccacctacagccagagcagcgccagcacctacgtgcccaccgtgtgcaacggcagagaggtgctggacagcaccaccagcagcctgtag

SEQ ID NO: 83199 - DNA, 2391 bp, synthetic construct
  misc_feature 1..2391: note = Description of Artificial Sequence: Synthetic coding sequence
  source 1..2391: mol_type = other DNA
atgcccgcctgggagcccggcgtggccgccagctgcggctggagagcccccccctgcagccccctgagactgtgcatcgccccccacccctgcaccccccccagcagccaccagggcaacctgacctgcagactgccccccagaagcttcggcttctgcagatgcgtgtgggtgagaaccagaggccccagcctgcccggcgagcaggtgagcctggccgcccacgagagcgagggcgccgccgcccagctgggcagcagccccgagatcgaccccagaagacccagatgcctgctgcccgagagcgcccagatcccccagatcagctacgccagcaccgcccccgacctgagcgacaacagcagatacgacttcttcagcagagtggtgcccagcgacacctaccaggcccaggccatggtggacatcgtgagagccctgaagtggaactacgtgagcaccgtggccagcgagggcagctacggcgagagcggcgtggaggccttcatccagaagagcagagaggacggcggcgtgtgcatcgcccagagcgtgaagatccccagagagcccaaggccggcgagttcgacaagatcatcagaagactgctggagaccagcaacgccagagccgtgatcatcttcgccaacgaggacgacatcagaagagtgctggaggccgccagaagagccaaccagaccggccacttcttctggatgggcagcgacagctggggcagcaagatcgcccccgtgctgcacctggaggaggtggccgagggcgccgtgaccatcctgcccaagagaatgagcgtgagagacagagagagaatcggccaggacagcgcctacgagcaggagggcaaggtgcagttcgtgatcgacgccgtgtacgccatgggccacgccctgcacgccatgcacagagacctgtgccccggcagagtgggcctgtgccccagaatggaccccgtggacggcacccagctgctgaagtacatcagaaacgtgaacttcagcggcatcgccggcaaccccgtgaccttcaacgagaacggcgacgcccccggcagatacgacatctaccagtaccagctgagaaacgacagcgccgagtacaaggtgatcggcagctggaccgaccacctgcacctgagaatcgagagaatgcactggcccggcagcggccagcagctgcccagaagcatctgcagcctgccctgccagcccggcgagagaaagaagaccgtgaagggcatgccctgctgctggcactgcgagccctgcaccggctaccagtaccaggtggacagatacacctgcaagacctgcccctacgacatgagacccaccgagaacagaaccggctgcagacccatccccatcatcaagctggagtggggcagcccctgggccgtgctgcccctgttcctggccgtggtgggcatcgccgccaccctgttcgtggtgatcaccttcgtgagatacaacgacacccccatcgtgaaggccagcggcagagagctgagctacgtgctgctggccggcatcttcctgtgctacgccaccaccttcctgatgatcgccgagcccgacctgggcacctgcagcctgagaagaatcttcctgggcctgggcatgagcatcagctacgccgccctgctgaccaagaccaacagaatctacagaatcttcgagcagggcaagagaagcgtgagcgcccccagattcatcagccccgccagccagctggccatcaccttcagcctgatcagcctgcagctgctgggcatctgcgtgtggttcgtggtggaccccagccacagcgtggtggacttccaggaccagagaaccctggaccccagattcgccagaggcgtgctgaagtgcgacatcagcgacctgagcctgatctgcctgctgggctacagcatgctgctgatggtgacctgcaccgtgtacgccatcaagaccagaggcgtgcccgagaccttcaacgaggccaagcccatcggcttcaccatgtacaccacctgcatcgtgtggctggccttcatccccatcttcttcggcaccagccagagcgccgacaagctgtacatccagaccaccaccctgaccgtgagcgtgagcctgagcgccagcgtgagcctgggcatgctgtacatgcccaaggtgtacatcatcctgttccaccccgagcagaacgtgcccaagagaaagagaagcctgaaggccgtggtgaccgccgccaccatgagcaacaagttcacccagaagggcaacttcagacccaacggcgaggccaagagcgagctgtgcgagaacctggaggcccccgccctggccaccaagcagacctacgtgacctacaccaaccacgccatctag

SEQ ID NO: 83200 - DNA, 2739 bp, synthetic construct
  misc_feature 1..2739: note = Description of Artificial Sequence: Synthetic coding sequence
  source 1..2739: mol_type = other DNA
atgcccggcaagagaggcctgggctggtggtgggccagactgcccctgtgcctgctgctgagcctgtacggcccctggatgcccagcagcctgggcaagcccaagggccacccccacatgaacagcatcagaatcgacggcgacatcaccctgggcggcctgttccccgtgcacggcagaggcagcgagggcaagccctgcggcgagctgaagaaggagaagggcatccacagactggaggccatgctgttcgccctggacagaatcaacaacgaccccgacctgctgcccaacatcaccctgggcgccagaatcctggacacctgcagcagagacacccacgccctggagcagagcctgaccttcgtgcaggccctgatcgagaaggacggcaccgaggtgagatgcggcagcggcggcccccccatcatcaccaagcccgagagagtggtgggcgtgatcggcgccagcggcagcagcgtgagcatcatggtggccaacatcctgagactgttcaagatcccccagatcagctacgccagcaccgcccccgacctgagcgacaacagcagatacgacttcttcagcagagtggtgcccagcgacacctaccaggcccaggccatggtggacatcgtgagagccctgaagtggaactacgtgagcaccgtggccagcgagggcagctacggcgagagcggcgtggaggccttcatccagaagagcagagaggacggcggcgtgtgcatcgcccagagcgtgaagatccccagagagcccaaggccggcgagttcgacaagatcatcagaagactgctggagaccagcaacgccagagccgtgatcatcttcgccaacgaggacgacatcagaagagtgctggaggccgccagaagagccaaccagaccggccacttcttctggatgggcagcgacagctggggcagcaagatcgcccccgtgctgcacctggaggaggtggccgagggcgccgtgaccatcctgcccaagagaatgagcgtgagaggcttcgacagatacttcagcagcagaaccctggacaacaacagaagaaacatctggttcgccgagttctgggaggacaacttccactgcaagctgagcagacacgccctgaagaagggcagccacgtgaagaagtgcaccaacagagagagaatcggccaggacagcgcctacgagcaggagggcaaggtgcagttcgtgatcgacgccgtgtacgccatgggccacgccctgcacgccatgcacagagacctgtgccccggcagagtgggcctgtgccccagaatggaccccgtggacggcacccagctgctgaagtacatcagaaacgtgaacttcagcggcatcgccggcaaccccgtgaccttcaacgagaacggcgacgcccccggcagatacgacatctaccagtaccagctgagaaacgacagcgccgagtacaaggtgatcggcagctggaccgaccacctgcacctgagaatcgagagaatgcactggcccggcagcggccagcagctgcccagaagcatctgcagcctgccctgccagcccggcgagagaaagaagaccgtgaagggcatgccctgctgctggcactgcgagccctgcaccggctaccagtaccaggtggacagatacacctgcaagacctgcccctacgacatgagacccaccgagaacagaaccggctgcagacccatccccatcatcaagctggagtggggcagcccctgggccgtgctgcccctgttcctggccgtggtgggcatcgccgccaccctgttcgtggtgatcaccttcgtgagatacaacgacacccccatcgtgaaggccagcggcagagagctgagctacgtgctgctggccggcatcttcctgtgctacgccaccaccttcctgatgatcgccgagcccgacctgggcacctgcagcctgagaagaatcttcctgggcctgggcatgagcatcagctacgccgccctgctgaccaagaccaacagaatctacagaatcttcgagcagggcaagagaagcgtgagcgcccccagattcatcagccccgccagccagctggccatcaccttcagcctgatcagcctgcagctgctgggcatctgcgtgtggttcgtggtggaccccagccacagcgtggtggacttccaggaccagagaaccctggaccccagattcgccagaggcgtgctgaagtgcgacatcagcgacctgagcctgatctgcctgctgggctacagcatgctgctgatggtgacctgcaccgtgtacgccatcaagaccagaggcgtgcccgagaccttcaacgaggccaagcccatcggcttcaccatgtacaccacctgcatcgtgtggctggccttcatccccatcttcttcggcaccagccagagcgccgacaagctgtacatccagaccaccaccctgaccgtgagcgtgagcctgagcgccagcgtgagcctgggcatgctgtacatgcccaaggtgtacatcatcctgttccaccccgagcagaacgtgcccaagagaaagagaagcctgaaggccgtggtgaccgccgccaccatgagcaacaagttcacccagaagggcaacttcagacccaacggcgaggccaagagcgagctgtgcgagaacctggaggcccccgccctggccaccaagcagacctacgtgacctacaccaaccacgccatctag

SEQ ID NO: 83201 - DNA, 2319 bp, synthetic construct
  misc_feature 1..2319: note = Description of Artificial Sequence: Synthetic coding sequence
  source 1..2319: mol_type = other DNA
atggtgcagaccctgcccaagctgttcccccacgacggcgccaagagaaagaagagaaccctgagaaccagcggcccctgcttcggcggcggcggccagatcccccagatcagctacgccagcaccgcccccgacctgagcgacaacagcagatacgacttcttcagcagagtggtgcccagcgacacctaccaggcccaggccatggtggacatcgtgagagccctgaagtggaactacgtgagcaccgtggccagcgagggcagctacggcgagagcggcgtggaggccttcatccagaagagcagagaggacggcggcgtgtgcatcgcccagagcgtgaagatccccagagagcccaaggccggcgagttcgacaagatcatcagaagactgctggagaccagcaacgccagagccgtgatcatcttcgccaacgaggacgacatcagaagagtgctggaggccgccagaagagccaaccagaccggccacttcttctggatgggcagcgacagctggggcagcaagatcgcccccgtgctgcacctggaggaggtggccgagggcgccgtgaccatcctgcccaagagaatgagcgtgagaggcttcgacagatacttcagcagcagaaccctggacaacaacagaagaaacatctggttcgccgagttctgggaggacaacttccactgcaagctgagcagacacgccctgaagaagggcagccacgtgaagaagtgcaccaacagagagagaatcggccaggacagcgcctacgagcaggagggcaaggtgcagttcgtgatcgacgccgtgtacgccatgggccacgccctgcacgccatgcacagagacctgtgccccggcagagtgggcctgtgccccagaatggaccccgtggacggcacccagctgctgaagtacatcagaaacgtgaacttcagcggcatcgccggcaaccccgtgaccttcaacgagaacggcgacgcccccggcagatacgacatctaccagtaccagctgagaaacgacagcgccgagtacaaggtgatcggcagctggaccgaccacctgcacctgagaatcgagagaatgcactggcccggcagcggccagcagctgcccagaagcatctgcagcctgccctgccagcccggcgagagaaagaagaccgtgaagggcatgccctgctgctggcactgcgagccctgcaccggctaccagtaccaggtggacagatacacctgcaagacctgcccctacgacatgagacccaccgagaacagaaccggctgcagacccatccccatcatcaagctggagtggggcagcccctgggccgtgctgcccctgttcctggccgtggtgggcatcgccgccaccctgttcgtggtgatcaccttcgtgagatacaacgacacccccatcgtgaaggccagcggcagagagctgagctacgtgctgctggccggcatcttcctgtgctacgccaccaccttcctgatgatcgccgagcccgacctgggcacctgcagcctgagaagaatcttcctgggcctgggcatgagcatcagctacgccgccctgctgaccaagaccaacagaatctacagaatcttcgagcagggcaagagaagcgtgagcgcccccagattcatcagccccgccagccagctggccatcaccttcagcctgatcagcctgcagctgctgggcatctgcgtgtggttcgtggtggaccccagccacagcgtggtggacttccaggaccagagaaccctggaccccagattcgccagaggcgtgctgaagtgcgacatcagcgacctgagcctgatctgcctgctgggctacagcatgctgctgatggtgacctgcaccgtgtacgccatcaagaccagaggcgtgcccgagaccttcaacgaggccaagcccatcggcttcaccatgtacaccacctgcatcgtgtggctggccttcatccccatcttcttcggcaccagccagagcgccgacaagctgtacatccagaccaccaccctgaccgtgagcgtgagcctgagcgccagcgtgagcctgggcatgctgtacatgcccaaggtgtacatcatcctgttccaccccgagcagaacgtgcccaagagaaagagaagcctgaaggccgtggtgaccgccgccaccatgagcaacaagttcacccagaagggcaacttcagacccaacggcgaggccaagagcgagctgtgcgagaacctggaggcccccgccctggccaccaagcagacctacgtgacctacaccaaccacgccatctag

SEQ ID NO: 83202 - DNA, 2340 bp, synthetic construct
  misc_feature 1..2340: note = Description of Artificial Sequence: Synthetic coding sequence
  source 1..2340: mol_type = other DNA
atggccgtgcccctgggcgccccctgctgggccagcgccctgcccgcctgggccccccccggcctgccccacagaagcctgctgaccagactgctgagccagcacgtgaagcccgccaagatcccccagatcagctacgccagcaccgcccccgacctgagcgacaacagcagatacgacttcttcagcagagtggtgcccagcgacacctaccaggcccaggccatggtggacatcgtgagagccctgaagtggaactacgtgagcaccgtggccagcgagggcagctacggcgagagcggcgtggaggccttcatccagaagagcagagaggacggcggcgtgtgcatcgcccagagcgtgaagatccccagagagcccaaggccggcgagttcgacaagatcatcagaagactgctggagaccagcaacgccagagccgtgatcatcttcgccaacgaggacgacatcagaagagtgctggaggccgccagaagagccaaccagaccggccacttcttctggatgggcagcgacagctggggcagcaagatcgcccccgtgctgcacctggaggaggtggccgagggcgccgtgaccatcctgcccaagagaatgagcgtgagaggcttcgacagatacttcagcagcagaaccctggacaacaacagaagaaacatctggttcgccgagttctgggaggacaacttccactgcaagctgagcagacacgccctgaagaagggcagccacgtgaagaagtgcaccaacagagagagaatcggccaggacagcgcctacgagcaggagggcaaggtgcagttcgtgatcgacgccgtgtacgccatgggccacgccctgcacgccatgcacagagacctgtgccccggcagagtgggcctgtgccccagaatggaccccgtggacggcacccagctgctgaagtacatcagaaacgtgaacttcagcggcatcgccggcaaccccgtgaccttcaacgagaacggcgacgcccccggcagatacgacatctaccagtaccagctgagaaacgacagcgccgagtacaaggtgatcggcagctggaccgaccacctgcacctgagaatcgagagaatgcactggcccggcagcggccagcagctgcccagaagcatctgcagcctgccctgccagcccggcgagagaaagaagaccgtgaagggcatgccctgctgctggcactgcgagccctgcaccggctaccagtaccaggtggacagatacacctgcaagacctgcccctacgacatgagacccaccgagaacagaaccggctgcagacccatccccatcatcaagctggagtggggcagcccctgggccgtgctgcccctgttcctggccgtggtgggcatcgccgccaccctgttcgtggtgatcaccttcgtgagatacaacgacacccccatcgtgaaggccagcggcagagagctgagctacgtgctgctggccggcatcttcctgtgctacgccaccaccttcctgatgatcgccgagcccgacctgggcacctgcagcctgagaagaatcttcctgggcctgggcatgagcatcagctacgccgccctgctgaccaagaccaacagaatctacagaatcttcgagcagggcaagagaagcgtgagcgcccccagattcatcagccccgccagccagctggccatcaccttcagcctgatcagcctgcagctgctgggcatctgcgtgtggttcgtggtggaccccagccacagcgtggtggacttccaggaccagagaaccctggaccccagattcgccagaggcgtgctgaagtgcgacatcagcgacctgagcctgatctgcctgctgggctacagcatgctgctgatggtgacctgcaccgtgtacgccatcaagaccagaggcgtgcccgagaccttcaacgaggccaagcccatcggcttcaccatgtacaccacctgcatcgtgtggctggccttcatccccatcttcttcggcaccagccagagcgccgacaagctgtacatccagaccaccaccctgaccgtgagcgtgagcctgagcgccagcgtgagcctgggcatgctgtacatgcccaaggtgtacatcatcctgttccaccccgagcagaacgtgcccaagagaaagagaagcctgaaggccgtggtgaccgccgccaccatgagcaacaagttcacccagaagggcaacttcagacccaacggcgaggccaagagcgagctgtgcgagaacctggaggcccccgccctggccaccaagcagacctacgtgacctacaccaaccacgccatctag

SEQ ID NO: 83203 - DNA, 2739 bp, synthetic construct; identical to SEQ ID NO: 83200
  misc_feature 1..2739: note = Description of Artificial Sequence: Synthetic coding sequence
  source 1..2739: mol_type = other DNA

SEQ ID NO: 83204 - DNA, 2232 bp, synthetic construct
  misc_feature 1..2232: note = Description of Artificial Sequence: Synthetic coding sequence
  source 1..2232: mol_type = other DNA
atgagctgcaagatcccccagatcagctacgccagcaccgcccccgacctgagcgacaacagcagatacgacttcttcagcagagtggtgcccagcgacacctaccaggcccaggccatggtggacatcgtgagagccctgaagtggaactacgtgagcaccgtggccagcgagggcagctacggcgagagcggcgtggaggccttcatccagaagagcagagaggacggcggcgtgtgcatcgcccagagcgtgaagatccccagagagcccaaggccggcgagttcgacaagatcatcagaagactgctggagaccagcaacgccagagccgtgatcatcttcgccaacgaggacgacatcagaagagtgctggaggccgccagaagagccaaccagaccggccacttcttctggatgggcagcgacagctggggcagcaagatcgcccccgtgctgcacctggaggaggtggccgagggcgccgtgaccatcctgcccaagagaatgagcgtgagaggcttcgacagatacttcagcagcagaaccctggacaacaacagaagaaacatctggttcgccgagttctgggaggacaacttccactgcaagctgagcagacacgccctgaagaagggcagccacgtgaagaagtgcaccaacagagagagaatcggccaggacagcgcctacgagcaggagggcaaggtgcagttcgtgatcgacgccgtgtacgccatgggccacgccctgcacgccatgcacagagacctgtgccccggcagagtgggcctgtgccccagaatggaccccgtggacggcacccagctgctgaagtacatcagaaacgtgaacttcagcggcatcgccggcaaccccgtgaccttcaacgagaacggcgacgcccccggcagatacgacatctaccagtaccagctgagaaacgacagcgccgagtacaaggtgatcggcagctggaccgaccacctgcacctgagaatcgagagaatgcactggcccggcagcggccagcagctgcccagaagcatctgcagcctgccctgccagcccggcgagagaaagaagaccgtgaagggcatgccctgctgctggcactgcgagccctgcaccggctaccagtaccaggtggacagatacacctgcaagacctgcccctacgacatgagacccaccgagaacagaaccggctgcagacccatccccatcatcaagctggagtggggcagcccctgggccgtgctgcccctgttcctggccgtggtgggcatcgccgccaccctgttcgtggtgatcaccttcgtgagatacaacgacacccccatcgtgaaggccagcggcagagagctgagctacgtgctgctggccggcatcttcctgtgctacgccaccaccttcctgatgatcgccgagcccgacctgggcacctgcagcctgagaagaatcttcctgggcctgggcatgagcatcagctacgccgccctgctgaccaagaccaacagaatctacagaatcttcgagcagggcaagagaagcgtgagcgcccccagattcatcagccccgccagccagctggccatcaccttcagcctgatcagcctgcagctgctgggcatctgcgtgtggttcgtggtggaccccagccacagcgtggtggacttccaggaccagagaaccctggaccccagattcgccagaggcgtgctgaagtgcgacatcagcgacctgagcctgatctgcctgctgggctacagcatgctgctgatggtgacctgcaccgtgtacgccatcaagaccagaggcgtgcccgagaccttcaacgaggccaagcccatcggcttcaccatgtacaccacctgcatcgtgtggctggccttcatccccatcttcttcggcaccagccagagcgccgacaagctgtacatccagaccaccaccctgaccgtgagcgtgagcctgagcgccagcgtgagcctgggcatgctgtacatgcccaaggtgtacatcatcctgttccaccccgagcagaacgtgcccaagagaaagagaagcctgaaggccgtggtgaccgccgccaccatgagcaacaagttcacccagaagggcaacttcagacccaacggcgaggccaagagcgagctgtgcgagaacctggaggcccccgccctggccaccaagcagacctacgtgacctacaccaaccacgccatctag

SEQ ID NO: 83205 - DNA, 1776 bp, synthetic construct
  misc_feature 1..1776: note = Description of Artificial Sequence: Synthetic coding sequence
  source 1..1776: mol_type = other DNA
atgggcagcgacagctggggcagcaagatcgcccccgtgctgcacctggaggaggtggccgagggcgccgtgaccatcctgcccaagagaatgagcgtgagaggcttcgacagatacttcagcagcagaaccctggacaacaacagaagaaacatctggttcgccgagttctgggaggacaacttccactgcaagctgagcagacacgccctgaagaagggcagccacgtgaagaagtgcaccaacagagagagaatcggccaggacagcgcctacgagcaggagggcaaggtgcagttcgtgatcgacgccgtgtacgccatgggccacgccctgcacgccatgcacagagacctgtgccccggcagagtgggcctgtgccccagaatggaccccgtggacggcacccagctgctgaagtacatcagaaacgtgaacttcagcggcatcgccggcaaccccgtgaccttcaacgagaacggcgacgcccccggcagatacgacatctaccagtaccagctgagaaacgacagcgccgagtacaaggtgatcggcagctggaccgaccacctgcacctgagaatcgagagaatgcactggcccggcagcggccagcagctgcccagaagcatctgcagcctgccctgccagcccggcgagagaaagaagaccgtgaagggcatgccctgctgctggcactgcgagccctgcaccggctaccagtaccaggtggacagatacacctgcaagacctgcccctacgacatgagacccaccgagaacagaaccggctgcagacccatccccatcatcaagctggagtggggcagcccctgggccgtgctgcccctgttcctggccgtggtgggcatcgccgccaccctgttcgtggtgatcaccttcgtgagatacaacgacacccccatcgtgaaggccagcggcagagagctgagctacgtgctgctggccggcatcttcctgtgctacgccaccaccttcctgatgatcgccgagcccgacctgggcacctgcagcctgagaagaatcttcctgggcctgggcatgagcatcagctacgccgccctgctgaccaagaccaacagaatctacagaatcttcgagcagggcaagagaagcgtgagcgcccccagattcatcagccccgccagccagctggccatcaccttcagcctgatcagcctgcagctgctgggcatctgcgtgtggttcgtggtggaccccagccacagcgtggtggacttccaggaccagagaaccctggaccccagattcgccagaggcgtgctgaagtgcgacatcagcgacctgagcctgatctgcctgctgggctacagcatgctgctgatggtgacctgcaccgtgtacgccatcaagaccagaggcgtgcccgagaccttcaacgaggccaagcccatcggcttcaccatgtacaccacctgcatcgtgtggctggccttcatccccatcttcttcggcaccagccagagcgccgacaagctgtacatccagaccaccaccctgaccgtgagcgtgagcctgagcgccagcgtgagcctgggcatgctgtacatgcccaaggtgtacatcatcctgttccaccccgagcagaacgtgcccaagagaaagagaagcctgaaggccgtggtgaccgccgccaccatgagcaacaagttcacccagaagggcaacttcagacccaacggcgaggccaagagcgagctgtgcgagaacctggaggcccccggcagcagctag

SEQ ID NO: 83206 - DNA, 2364 bp, synthetic construct
  misc_feature 1..2364: note = Description of Artificial Sequence: Synthetic coding sequence
  source 1..2364: mol_type = other DNA
atggagcccgccggcgagagattccccgagcagagacaggtgctgatcctgctgctgctgctggaggtgaccctggccggctgggagcccagaagatacagcgtgatggaggagaccgagagaggcagcttcgtggccaacctggccaacgacctgggcctgggcgtgggcgagctggccgagagaggcgccagagtggtgagcgaggacaacgagcagggcctgcagctggacctgcagaccggccagctgatcctgaacgagaagctggacagagagaagctgtgcggccccaccgagccctgcatcatgcacttccaggtgctgctgaagaagcccctggaggtgttcagagccgagctgctggtgaccgacatcaacgaccacagccccgagttccccgagagagagatgaccctgaagatccccgagaccagcagcctgggcaccgtgttccccctgaagaaggccagagacctggacgtgggcagcaacaacgtgcagaactacaacatcagccccaacagccacttccacgtgagcaccagaaccagaggcgacggcagaaagtaccccgagctggtgctggacaccgagctggacagagaggagcaggccgagctgagactgaccctgaccgccgtggacggcggcagcccccccagaagcggcaccgtgcagatcctgatcctggtgctggacgccaacgacaacgcccccgagttcgtgcaggccctgtacgaggtgcaggtgcccgagaacagccccgtgggcagcctggtggtgaaggtgagcgccagagacctggacaccggcaccaacggcgagatcagctacagcctgtactacagcagccaggagatcgacaagcccttcgagctgagcagcctgagcggcgagatcagactgatcaagaagctggacttcgagaccatgagcagctacgacctggacatcgaggccagcgacggcggcggcctgagcggcaagtgcagcgtgagcgtgaaggtgctggacgtgaacgacaacttccccgagctgagcatcagcagcctgaccagccccatccccgagaacagccccgagaccgaggtggccctgttcagaatcagagacagagacagcggcgagaacggcaagatgatctgcagcatccaggacgacgtgcccttcaagctgaagcccagcgtggagaacttctacagactggtgaccgagggcgccctggacagagagaccagagccgagtacaacatcaccatcaccatcaccgacctgggcacccccagactgaagaccgagcagagcatcaccgtgctggtgagcgacgtgaacgacaacgcccccgccttcacccagaccagctacaccctgttcgtgagagagaacaacagccccgccctgcacatcggcagcgtgagcgccaccgacagagacagcggcaccaacgcccaggtgacctacagcctgctgccccccagagacccccacctgcccctgaccagcctggtgagcatcaacaccgacaacggccacctgttcgccctgcagagcctggactacgaggccctgcaggccttcgagttcagagtgggcgccaccgacagaggcttccccgccctgagcagcgaggccctggtgagagtgctggtgctggacgccaacgacaacagccccttcgtgctgtaccccctgcagaacggcagcgccccctgcaccgagctggtgcccagagccgccgagcccggctacctggtgaccaaggtggtggccgtggacggcgacagcggccagaacgcctggctgagctaccagctgctgaaggccaccgagcccggcctgttcggcgtgtgggcccacaacggcgaggtgagaaccgccagactgctgagcgagagagacgtggccaagcacagactggtggtgctggtgaaggacaacggcgagccccccagaagcgccaccgccaccctgcaggtgctgctggtggacggcttcagccagccctacctgcccctgcccgaggccgcccccgcccaggcccaggccgacagcctgaccgtgtacctggtggtggccctggccagcgtgagcagcctgttcctgttcagcgtgttcctgttcgtggccgtgagactgtgcagaagaagcagagccgccagcgtgggcagatgcagcgtgcccgagggccccttccccggccacctggtggacgtgagcggcaccggcaccctgagccagagctaccagtacgaggtgtgcctgaccggcggcagcgagagcaacgacttcaagttcctgaagcccatcttccccaacatcgtgagccaggacagcagaagaaagagcgagttcctggagtag

SEQ ID NO: 83207 - DNA, 3276 bp, synthetic construct
  misc_feature 1..3276: note = Description of Artificial Sequence: Synthetic coding sequence
  source 1..3276: mol_type = other DNA
atgcagctggacggcctgcaggccctgtgctggggcagcctgttcagaacccagctggtgcccgtgtacgtggccgtgctgcccagcccccagccctgcatcccccccacctgcaccgccttcaccgagttcagcggccccctggccaagcaccacagcttccagcccttccaggtggccgcccccgccggccccagaagccccccccagcccttccacctgcccagcgtgagccaggtgcacgccacccacctgctgtgccccgtgagagtgctgggccccccctacccccccagcctggagctgctgaccagcatccacagccccgccgtgctgcccgccccccagatcccccagatcagctacgccagcaccgcccccgagctgagcgacagcaccagatacgacttcttcagcagagtggtgccccccgacagctaccaggcccaggccatggtggacatcgtgagagccctgggctggaactacgtgagcaccctggccagcgagggcaactacggcgagagcggcgtggaggccttcgtgcagatcagcagagaggccggcgagctgggcgcccccagacaccagggcgtgtacatcgtgtgggccagaggcccccagctgggccagaagcagaaggacggcggccccagaagcatgctgggcagaggctgcctggccggcgccccctgcggcagagacctgttcgtgctggacgacagcgccctgccccaggcctggagaagagtgcaggccagactgcacccctgcagacccttcagccagcccacccagagcagcgccgccgtggccagatggagcatcaagatccccagagagcccaagcccggcgagttcagcaaggtgatcagaagactgatggagacccccaacgccagaggcatcatcatcttcgccaacgaggacgacatcagccccgcccccaccagaagagtgctggaggccgccagacaggccaacctgaccggccacttcctgtgggtgggcagcgacagctggggcgccaagaccagccccatcctgagcctggaggacgtggccgtgggcgccatcaccatcctgcccaagagagccagcatcgacggcttcgaccagtacttcatgaccagaagcctggagaacaacagaagaaacatctggttcgccgagttctgggaggagaacttcaactgcaagctgaccagcagcggcacccagagcgacgacagcaccagaaagtgcaccggcgagagctgccccggctggaccggcgaggagagaatcggcagagacagcacctacgagcaggagggcaaggtgcagttcgtgatcgacgccgtgtacgccatcgcccacgccctgcacagcatgcaccaggccctgtgccccggccacaccggcctgtgccccgccatggagcccaccgacggcagaatgctgctgcagtacatcagatgccccctgcagtggctgaacagaatccccctgtgcgagtggcccagaagagtgagacccttcttctgccagtggaccctgggcctgctgagcagctgcggctacgtgaacaacgccgccgtgaacgtggccgtgcaggccttcctggccaccctgctgagcagcctgagcagcatctaccccggcgtggagctgctgggccacgtgttcaacctgctgagaagactgcacaccgtgttctgcagcggctgcagcctgttcccccccaccgtgcacaagggcagcgccggcacccccgtgatgttcaacgagaacggcgacgcccccggcagatacgacatcttccagtaccaggccaccaacggcagcgccagcagcggcggctaccaggccgtgggccagtgggccgagaccctgagactggacgtgagcgtgcagaccgagccccaggtgggcatgggccccggcagcagaagacagaccccccagcccgtgttctgcgccagccaggtggaggccctgcagtggagcggcgacccccacgaggtgcccagcagcctgtgcagcctgccctgcggccccggcgagagaaagaagatggtgaagggcgtgccctgctgctggcactgcgaggcctgcgacggctacagattccaggtggacgagttcacctgcgaggcctgccccggcgacatgagacccacccccaaccacaccggctgcagacccacccccgtggtgagactgagctggagcagcccctgggccgccccccccctgctgctggccgtgctgggcatcgtggccaccaccaccgtggtggccaccttcgtgagatacaacaacacccccatcgtgagagccagcggcagagagctgagctacgtgctgctgaccggcatcttcctgatctacgccatcaccttcctgatggtggccgagcccggcgccgccgtgtgcgccgccagaagactgttcctgggcctgggcaccaccctgagctacagcgccctgctgaccaagaccaacagaatctacagaatcttcgagcagggcaagagaagcgtgacccccccccccttcatcagccccaccagccagctggtgatcaccttcagcctgaccagcctgcagatcaacgccgtgttcagagtgaccctgttctacttcggcagcctgcagtggcactacctgagcagcctgcaggccctgcccagcggcgacctgagcgtgcagcacctgagcgccagcgtgagcctgggcatgctgtacagcaagagcaagacccccgtggacctggaggtgggcagcgagccctggggctacctgggcgacggcgtgctgcaggccgagcactggggcgagggcagaggcgactggccccacgtgaaggtgatggtggtggtgtaccagagcagcctggtgtactacatgaagcaggcccaggccggcagagtgaagaccgagctgctgaaggtggcccaccaccaggtggccaagagcgtgcccgaggagagccagatcgtggtgctgcacctggtgaccgccggctacgtggacatggccatcagaaccaccagagccagcctgcacctgatgcccctgaccctggtgcccggcgccgccgccgaggtgaacgagacccaggtggccgccagactgggccccggcagcaccgtgggcacctaccaggtggtggtggtgctgatgagaagcctgcagatcgacaagaccaccaaccagctgagcctggagacctgcttcagcggcatccagggcttcctggccagcgtgaacagcctggtgatggacaagtag

SEQ ID NO: 83208 - DNA, 2634 bp, synthetic construct
  misc_feature 1..2634: note = Description of Artificial Sequence: Synthetic coding sequence
  source 1..2634: mol_type = other DNA
atggccagacccagaagagccagagagcccctgctggtggccctgctgcccctggcctggctggcccaggccggcctggccagagccgccggcagcgtgagactggccggcggcctgaccctgggcggcctgttccccgtgcacgccagaggcgccgccggcagagcctgcggccagctgaagaaggagcagggcgtgcacagactggaggccatgctgtacgccctggacagagtgaacgccgaccccgagctgctgcccggcgtgagactgggcgccagactgctggacacctgcagcagagacacctacgccctggagcaggccctgagcttcgtgcaggccctgatcagaggcagaggcgacggcgacgaggtgggcgtgagatgccccggcggcgtgccccccctgagacccgccccccccgagagagtggtggccgtggtgggcgccagcgccagcagcgtgagcatcatggtggccaacgtgctgagactgttcgccatcccccagatcagctacgccagcaccgcccccgagctgagcgacagcaccagatacgacttcttcagcagagtggtgccccccgacagctaccaggcccaggccatggtggacatcgtgagagccctgggctggaactacgtgagcaccctggccagcgagggcaactacggcgagagcggcgtggaggccttcgtgcagatcagcagagaggccggcggcgtgtgcatcgcccagagcatcaagatccccagagagcccaagcccggcgagttcagcaaggtgatcagaagactgatggagacccccaacgccagaggcatcatcatcttcgccaacgaggacgacatcagaagagtgctggaggccgccagacaggccaacctgaccggccacttcctgtgggtgggcagcgacagctggggcgccaagaccagccccatcctgagcctggaggacgtggccgtgggcgccatcaccatcctgcccaagagagccagcatcgacggcttcgaccagtacttcatgaccagaagcctggagaacaacagaagaaacatctggttcgccgagttctgggaggagaacttcaactgcaagctgaccagcagcggcacccagagcgacgacagcaccagaaagtgcaccggcgaggagagaatcggcagagacagcacctacgagcaggagggcaaggtgcagttcgtgatcgacgccgtgtacgccatcgcccacgccctgcacagcatgcaccaggccctgtgccccggccacaccggcctgtgccccgccatggagcccaccgacggcagaatgctgctgcagtacatcagagccgtgagattcaacggcagcgccggcacccccgtgatgttcaacgagaacggcgacgcccccggcagatacgacatcttccagtaccaggccaccaacggcagcgccagcagcggcggctaccaggccgtgggccagtgggccgagaccctgagactggacgtggaggccctgcagtggagcggcgacccccacgaggtgcccagcagcctgtgcagcctgccctgcggccccggcgagagaaagaagatggtgaagggcgtgccctgctgctggcactgcgaggcctgcgacggctacagattccaggtggacgagttcacctgcgaggcctgccccggcgacatgagacccacccccaaccacaccggctgcagacccacccccgtggtgagactgagctggagcagcccctgggccgccccccccctgctgctggccgtgctgggcatcgtggccaccaccaccgtggtggccaccttcgtgagatacaacaacacccccatcgtgagagccagcggcagagagctgagctacgtgctgctgaccggcatcttcctgatctacgccatcaccttcctgatggtggccgagcccggcgccgccgtgtgcgccgccagaagactgttcctgggcctgggcaccaccctgagctacagcgccctgctgaccaagaccaacagaatctacagaatcttcgagcagggcaagagaagcgtgacccccccccccttcatcagccccaccagccagctggtgatcaccttcagcctgaccagcctgcaggtggtgggcatgatcgcctggctgggcgccagacccccccacagcgtgatcgactacgaggagcagagaaccgtggaccccgagcaggccagaggcgtgctgaagtgcgacatgagcgacctgagcctgatcggctgcctgggctacagcctgctgctgatggtgacctgcaccgtgtacgccatcaaggccagaggcgtgcccgagaccttcaacgaggccaagcccatcggcttcaccatgtacaccacctgcatcatctggctggccttcgtgcccatcttcttcggcaccgcccagagcgccgagaagatctacatccagaccaccaccctgaccgtgagcctgagcctgagcgccagcgtgagcctgggcatgctgtacgtgcccaagacctacgtgatcctgttccaccccgagcagaacgtgcagaagagaaagagaagcctgaaggccaccagcaccgtggccgccccccccaagggcgaggacgccgaggcccacaagtag

SEQ ID NO: 83209 - DNA, 2748 bp, synthetic construct
  misc_feature 1..2748: note = Description of Artificial Sequence: Synthetic coding sequence
  source 1..2748: mol_type = other DNA
atggtgcagctgagaaagctgctgagagtgctgaccctgatgaagttcccctgctgcgtgctggaggtgctgctgtgcgccctggccgccgccgccagaggccaggagatgtacgccccccacagcatcagaatcgagggcgacgtgaccctgggcggcctgttccccgtgcacgccaagggccccagcggcgtgccctgcggcgacatcaagagagagaacggcatccacagactggaggccatgctgtacgccctggaccagatcaacagcgaccccaacctgctgcccaacgtgaccctgggcgccagaatcctggacacctgcagcagagacacctacgccctggagcagagcctgaccttcgtgcaggccctgatccagaaggacaccagcgacgtgagatgcaccaacggcgagccccccgtgttcgtgaagcccgagaaggtggtgggcgtgatcggcgccagcggcagcagcgtgagcatcatggtggccaacatcctgagactgttccagatcccccagatcagctacgccagcaccgcccccgagctgagcgacgacagaagatacgacttcttcagcagagtggtgccccccgacagcttccaggcccaggccatggtggacatcgtgaaggccctgggctggaactacgtgagcaccctggccagcgagggcagctacggcgagaagggcgtggagagcttcacccagatcagcaaggaggccggcggcctgtgcatcgcccagagcgtgagaatcccccaggagagaaaggacagaaccatcgacttcgacagaatcatcaagcagctgctggacacccccaacagcagagccgtggtgatcttcgccaacgacgaggacatcaagcagatcctggccgccgccaagagagccgaccaggtgggccacttcctgtgggtgggcagcgacagctggggcagcaagatcaaccccctgcaccagcacgaggacatcgccgagggcgccatcaccatccagcccaagagagccaccgtggagggcttcgacgcctacttcaccagcagaaccctggagaacaacagaagaaacgtgtggttcgccgagtactgggaggagaacttcaactgcaagctgaccatcagcggcagcaagaaggaggacaccgacagaaagtgcaccggccaggagagaatcggcaaggacagcaactacgagcaggagggcaaggtgcagttcgtgatcgacgccgtgtacgccatggcccacgccctgcaccacatgaacaaggacctgtgcgccgactacagaggcgtgtgccccgagatggagcaggccggcggcaagaagctgctgaagtacatcagaaacgtgaacttcaacggcagcgccggcacccccgtgatgttcaacaagaacggcgacgcccccggcagatacgacatcttccagtaccagaccaccaacaccagcaaccccggctacagactgatcggccagtggaccgacgagctgcagctgaacatcgaggacatgcagtggggcaagggcgtgagagagatccccgccagcgtgtgcaccctgccctgcaagcccggccagagaaagaagacccagaagggcaccccctgctgctggacctgcgagccctgcgacggctaccagtaccagttcgacgagatgacctgccagcactgcccctacgaccagagacccaacgagaacagaaccggctgccaggacatccccatcatcaagctggagtggcacagcccctgggccgtgatccccgtgttcctggccatgctgggcatcatcgccaccatcttcgtgatggccaccttcatcagatacaacgacacccccatcgtgagagccagcggcagagagctgagctacgtgctgctgaccggcatcttcctgtgctacatcatcaccttcctgatgatcgccaagcccgacgtggccgtgtgcagcttcagaagagtgttcctgggcctgggcatgtgcatcagctacgccgccctgctgaccaagaccaacagaatctacagaatcttcgagcagggcaagaagagcgtgaccgcccccagactgatcagccccaccagccagctggccatcaccagcagcctgatcagcgtgcagctgctgggcgtgttcatctggttcggcgtggacccccccaacatcatcatcgactacgacgagcacaagaccatgaaccccgagcaggccagaggcgtgctgaagtgcgacatcaccgacctgcagatcatctgcagcctgggctacagcatcctgctgatggtgacctgcaccgtgtacgccatcaagaccagaggcgtgcccgagaacttcaacgaggccaagcccatcggcttcaccatgtacaccacctgcatcgtgtggctggccttcatccccatcttcttcggcaccgcccagagcgccgagaagctgtacatccagaccaccaccctgaccatcagcatgaacctgagcgccagcgtggccctgggcatgctgtacatgcccaaggtgtacatcatcatcttccaccccgagctgaacgtgcagaagagaaagagaagcttcaaggccgtggtgaccgccgccaccatgagcagcagactgagccacaagcccagcgacagacccaacggcgaggccaagaccgagctgtgcgagaacgtggaccccaacagccccgccgccaagaagaagtacgtgagctacaacaacctggtgatctag

SEQ ID NO: 83210 - DNA, 2721 bp, synthetic construct
  misc_feature 1..2721: note = Description of Artificial Sequence: Synthetic coding sequence
  source 1..2721: mol_type = other DNA
atggtgcagctgagaaagctgctgagagtgctgaccctgatgaagttcccctgctgcgtgctggaggtgctgctgtgcgccctggccgccgccgccagaggccaggagatgtacgccccccacagcatcagaatcgagggcgacgtgaccctgggcggcctgttccccgtgcacgccaagggccccagcggcgtgccctgcggcgacatcaagagagagaacggcatccacagactggaggccatgctgtacgccctggaccagatcaacagcgaccccaacctgctgcccaacgtgaccctgggcgccagaatcctggacacctgcagcagagacacctacgccctggagcagagcctgaccttcgtgcaggccctgatccagaaggacaccagcgacgtgagatgcaccaacggcgagccccccgtgttcgtgaagcccgagaaggtggtgggcgtgatcggcgccagcggcagcagcgtgagcatcatggtggccaacatcctgagactgttccagatcccccagatcagctacgccagcaccgcccccgagctgagcgacgacagaagatacgacttcttcagcagagtggtgccccccgacagcttccaggcccaggccatggtggacatcgtgaaggccctgggctggaactacgtgagcaccctggccagcgagggcagctacggcgagaagggcgtggagagcttcacccagatcagcaaggaggccggcggcctgtgcatcgcccagagcgtgagaatcccccaggagagaaaggacagaaccatcgacttcgacagaatcatcaagcagctgctggacacccccaacagcagagccgtggtgatcttcgccaacgacgaggacatcaagcagatcctggccgccgccaagagagccgaccaggtgggccacttcctgtgggtgggcagcgacagctggggcagcaagatcaaccccctgcaccagcacgaggacatcgccgagggcgccatcaccatccagcccaagagagccaccgtggagggcttcgacgcctacttcaccagcagaaccctggagaacaacagaagaaacgtgtggttcgccgagtactgggaggagaacttcaactgcaagctgaccatcagcggcagcaagaaggaggacaccgacagaaagtgcaccggccaggagagaatcggcaaggacagcaactacgagcaggagggcaaggtgcagttcgtgatcgacgccgtgtacgccatggcccacgccctgcaccacatgaacaaggacctgtgcgccgactacagaggcgtgtgccccgagatggagcaggccggcggcaagaagctgctgaagtacatcagaaacgtgaacttcaacggcagcgccggcacccccgtgatgttcaacaagaacggcgacgcccccggcagatacgacatcttccagtaccagaccaccaacaccagcaaccccggctacagactgatcggccagtggaccgacgagctgcagctgaacatcgaggacatgcagtggggcaagggcgtgagagagatccccgccagcgtgtgcaccctgccctgcaagcccggccagagaaagaagacccagaagggcaccccctgctgctggacctgcgagccctgcgacggctaccagtaccagttcgacgagatgacctgccagcactgcccctacgaccagagacccaacgagaacagaaccggctgccaggacatccccatcatcaagctggagtggcacagcccctgggccgtgatccccgtgttcctggccatgctgggcatcatcgccaccatcttcgtgatggccaccttcatcagatacaacgacacccccatcgtgagagccagcggcagagagctgagctacgtgctgctgaccggcatcttcctgtgctacatcatcaccttcctgatgatcgccaagcccgacgtggccgtgtgcagcttcagaagagtgttcctgggcctgggcatgtgcatcagctacgccgccctgctgaccaagaccaacagaatctacagaatcttcgagcagggcaagaagagcgtgaccgcccccagactgatcagccccaccagccagctggccatcaccagcagcctgatcagcgtgcagctgctgggcgtgttcatctggttcggcgtggacccccccaacatcatcatcgactacgacgagcacaagaccatgaaccccgagcaggccagaggcgtgctgaagtgcgacatcaccgacctgcagatcatctgcagcctgggctacagcatcctgctgatggtgacctgcaccgtgtacgccatcaagaccagaggcgtgcccgagaacttcaacgaggccaagcccatcggcttcaccatgtacaccacctgcatcgtgtggctggccttcatccccatcttcttcggcaccgcccagagcgccgagaagctgtacatccagaccaccaccctgaccatcagcatgaacctgagcgccagcgtggccctgggcatgctgtacatgcccaaggtgtacatcatcatcttccaccccgagctgaacgtgcagaagagaaagagaagcttcaaggccgtggtgaccgccgccaccatgagcagcagactgagccacaagcccagcgacagacccaacggcgaggccaagaccgagctgtgcgagaacgtggaccccaacagcgagaagtgcaactgctactag

SEQ ID NO: 83211 - DNA, 2769 bp, synthetic construct; identical to SEQ ID NO: 83099
  misc_feature 1..2769: note = Description of Artificial Sequence: Synthetic coding sequence
  source 1..2769: mol_type = other DNA

SEQ ID NO: 83212 - DNA, 2736 bp, synthetic construct
  misc_feature 1..2736: note = Description of Artificial Sequence: Synthetic coding sequence
  source 1..2736: mol_type = other DNA
atggtgcagctgagaaagctgctgagagtgctgaccctgatgaagttcccctgctgcgtgctggaggtgctgctgtgcgccctggccgccgccgccagaggccaggagatgtacgccccccacagcatcagaatcgagggcgacgtgaccctgggcggcctgttccccgtgcacgccaagggccccagcggcgtgccctgcggcgacatcaagagagagaacggcatccacagactggaggccatgctgtacgccctggaccagatcaacagcgaccccaacctgctgcccaacgtgaccctgggcgccagaatcctggacacctgcagcagagacacctacgccctggagcagagcctgaccttcgtgcaggccctgatccagaaggacaccagcgacgtgagatgcaccaacggcgagccccccgtgttcgtgaagcccgagaaggtggtgggcgtgatcggcgccagcggcagcagcgtgagcatcatggtggccaacatcctgagactgttccagatcccccagatcagctacgccagcaccgcccccgagctgagcgacgacagaagatacgacttcttcagcagagtggtgccccccgacagcttccaggcccaggccatggtggacatcgtgaaggccctgggctggaactacgtgagcaccctggccagcgagggcagctacggcgagaagggcgtggagagcttcacccagatcagcaaggaggccggcggcctgtgcatcgcccagagcgtgagaatcccccaggagagaaaggacagaaccatcgacttcgacagaatcatcaagcagctgctggacacccccaacagcagagccgtggtgatcttcgccaacgacgaggacatcaagcagatcctggccgccgccaagagagccgaccaggtgggccacttcctgtgggtgggcagcgacagctggggcagcaagatcaaccccctgcaccagcacgaggacatcgccgagggcgccatcaccatccagcccaagagagccaccgtggagggcttcgacgcctacttcaccagcagaaccctggagaacaacagaagaaacgtgtggttcgccgagtactgggaggagaacttcaactgcaagctgaccatcagcggcagcaagaaggaggacaccgacagaaagtgcaccggccaggagagaatcggcaaggacagcaactacgagcaggagggcaaggtgcagttcgtgatcgacgccgtgtacgccatggcccacgccctgcaccacatgaacaaggacctgtgcgccgactacagaggcgtgtgccccgagatggagcaggccggcggcaagaagctgctgaagtacatcagaaacgtgaacttcaacggcagcgccggcacccccgtgatgttcaacaagaacggcgacgcccccggcagatacgacatcttccagtaccagaccaccaacaccagcaaccccggctacagactgatcggccagtggaccgacgagctgcagctgaacatcgaggacatgcagtggggcaagggcgtgagagagatccccgccagcgtgtgcaccctgccctgcaagcccggccagagaaagaagacccagaagggcaccccctgctgctggacctgcgagccctgcgacggctaccagtaccagttcgacgagatgacctgccagcactgcccctacgaccagagacccaacgagaacagaaccggctgccaggacatccccatcatcaagctggagtggcacagcccctgggccgtgatccccgtgttcctggccatgctgggcatcatcgccaccatcttcgtgatggccaccttcatcagatacaacgacacccccatcgtgagagccagcggcagagagctgagctacgtgctgctgaccggcatcttcctgtgctacatcatcaccttcctgatgatcgccaagcccgacgtggccgtgtgcagcttcagaagagtgttcctgggcctgggcatgtgcatcagctacgccgccctgctgaccaagaccaacagaatctacagaatcttcgagcagggcaagaagagcgtgaccgcccccagactgatcagccccaccagccagctggccatcaccagcagcctgatcagcgtgcagctgctgggcgtgttcatctggttcggcgtggacccccccaacatcatcatcgactacgacgagcacaagaccatgaaccccgagcaggccagaggcgtgctgaagtgcgacatcaccgacctgcagatcatctgcagcctgggctacagcatcctgctgatggtgacctgcaccgtgtacgccatcaagaccagaggcgtgcccgagaacttcaacgaggccaagcccatcggcttcaccatgtacaccacctgcatcgtgtggctggccttcatccccatcttcttcggcaccgcccagagcgccgagaagctgtacatccagaccaccaccctgaccatcagcatgaacctgagcgccagcgtggccctgggcatgctgtacatgcccaaggtgtacatcatcatcttccaccccgagctgaacgtgcagaagagaaagagaagcttcaaggccgtggtgaccgccgccaccatgagcagcagactgagccacaagcccagcgacagacccaacggcgaggccaagaccgagctgtgcgagaacgtggaccccaacatcaccagcgaggacctgagcctgcacaaggaggactag

SEQ ID NO: 83213 - DNA, 2475 bp, synthetic construct
  misc_feature 1..2475: note = Description of Artificial Sequence: Synthetic coding sequence
  source 1..2475: mol_type = other DNA
atggtgcagctgagaaagctgctgagagtgctgaccctgatgaagttcccctgctgcgtgctggaggtgctgctgtgcgccctggccgccgccgccagaggccaggagatgtacgccccccacagcatcagaatcgagggcgacgtgaccctgggcggcctgttccccgtgcacgccaagggccccagcggcgtgccctgcggcgacatcaagagagagaacggcatccacagactggaggccatgctgtacgccctggaccagatcaacagcgaccccaacctgctgcccaacgtgaccctgggcgccagaatcctggacacctgcagcagagacacctacgccctggagcagagcctgaccttcgtgcaggccctgatccagaaggacaccagcgacgtgagatgcaccaacggcgagccccccgtgttcgtgaagcccgagaaggtggtgggcgtgatcggcgccagcggcagcagcgtgagcatcatggtggccaacatcctgagactgttccagatcccccagatcagctacgccagcaccgcccccgagctgagcgacgacagaagatacgacttcttcagcagagtggtgccccccgacagcttccaggcccaggccatggtggacatcgtgaaggccctgggctggaactacgtgagcaccctggccagcgagggcagctacggcgagaagggcgtggagagcttcacccagatcagcaaggaggccggcggcctgtgcatcgcccagagcgtgagaatcccccaggagagaaaggacagaaccatcgacttcgacagaatcatcaagcagctgctggacacccccaacagcagagccgtggtgatcttcgccaacgacgaggacatcaagcagatcctggccgccgccaagagagccgaccaggtgggccacttcctgtgggtgggcagcgacagctggggcagcaagatcaaccccctgcaccagcacgaggacatcgccgagggcgccatcaccatccagcccaagagagccaccgtggagggcttcgacgcctacttcaccagcagaaccctggagaacaacagaagaaacgtgtggttcgccgagtactgggaggagaacttcaactgcaagctgaccatcagcggcagcaagaaggaggacaccgacagaaagtgcaccggccaggagagaatcggcaaggacagcaactacgagcaggagggcaaggtgcagttcgtgatcgacgccgtgtacgccatggcccacgccctgcaccacatgaacaaggacctgtgcgccgactacagaggcgtgtgccccgagatggagcaggccggcggcaagaagctgctgaagtacatcagaaacgtgaacttcaacggcgacgccggcacccccgtgatgttcaacaagaacggcgacgcccccggcagatacgacatcttccagtaccagaccaccaacaccagcaaccccggctacagactgatcggccagtggaccgacgagctgcagctgaacatcgaggacatgcagtggggcaagggcgtgagagagatccccgccagcgtgtgcaccctgccctgcaagcccggccagagaaagaagacccagaagggcaccccctgctgctggacctgcgagccctgcgacggctaccagtaccagttcgacgagatgacctgccagcactgcccctacgaccagagacccaacgagaacagaaccggctgccaggacatccccatcatcaagctggagtggcacagcccctgggccgtgatccccgtgttcctggccatgctgggcatcatcgccaccatcttcgtgatggccaccttcatcagatacaacgacacccccatcgtgagagccagcggcagagagctgagctacgtgctgctgaccggcatcttcctgtgctacatcatcaccttcctgatgatcgccaagcccgacgtggccgtgtgcagcttcagaagagtgttcctgggcctgggcatgtgcatcagctacgccgccctgctgaccaagaccaacagaatctacagaatcttcgagcagggcaagaagagcgtgaccgcccccagactgatcagccccaccagccagctggccatcaccagcagcctgatcagcgtgcagctgctgggcgtgttcatctggttcggcgtggacccccccaacatcatcatcgactacgacgagcacaagaccatgaaccccgagcaggccagaggcgtgctgaagtgcgacatcaccgacctgcagatcatctgcagcctgggctacagcatcctgctgatggtgacctgcaccgtgtacgccatcaagaccagaggcgtgcccgagaacttcaacgaggccaagcccatcggcttcaccatgtacaccacctgcatcgtgtggctggccttcatccccatcttcttcggcaccgcccagagcgccgagaaggtgatcctgtgctgcatcagctag

SEQ ID NO: 83214 - DNA, 2775 bp, synthetic construct
  misc_feature 1..2775: note = Description of Artificial Sequence: Synthetic coding sequence
  source 1..2775: mol_type = other DNA
atggtgcagctgagaaagctgctgagagtgctgaccctgatgaagttcccctgctgcgtgctggaggtgctgctgtgcgccctggccgccgccgccagaggccaggagatgtacgccccccacagcatcagaatcgagggcgacgtgaccctgggcggcctgttccccgtgcacgccaagggccccagcggcgtgccctgcggcgacatcaagagagagaacggcatccacagactggaggccatgctgtacgccctggaccagatcaacagcgaccccaacctgctgcccaacgtgaccctgggcgccagaatcctggacacctgcagcagagacacctacgccctggagcagagcctgaccttcgtgcaggccctgatccagaaggacaccagcgacgtgagatgcaccaacggcgagccccccgtgttcgtgaagcccgagaaggtggtgggcgtgatcggcgccagcggcagcagcgtgagcatcatggtggccaacatcctgagactgttccagatcccccagatcagctacgccagcaccgcccccgagctgagcgacgacagaagatacgacttcttcagcagagtggtgccccccgacagcttccaggcccaggccatggtggacatcgtgaaggccctgggctggaactacgtgagcaccctggccagcgagggcagctacggcgagaagggcgtggagagcttcacccagatcagcaaggaggccggcggcctgtgcatcgcccagagcgtgagaatcccccaggagagaaaggacagaaccatcgacttcgacagaatcatcaagcagctgctggacacccccaacagcagagccgtggtgatcttcgccaacgacgaggacatcaagcagatcctggccgccgccaagagagccgaccaggtgggccacttcctgtgggtgggcagcgacagctggggcagcaagatcaaccccctgcaccagcacgaggacatcgccgagggcgccatcaccatccagcccaagagagccaccgtggagggcttcgacgcctacttcaccagcagaaccctggagaacaacagaagaaacgtgtggttcgccgagtactgggaggagaacttcaactgcaagctgaccatcagcggcagcaagaaggaggacaccgacagaaagtgcaccggccaggagagaatcggcaaggacagcaactacgagcaggagggcaaggtgcagttcgtgatcgacgccgtgtacgccatggcccacgccctgcaccacatgaacaaggacctgtgcgccgactacagaggcgtgtgccccgagatggagcaggccggcggcaagaagctgctgaagtacatcagaaacgtgaacttcaacggcagcgccggcacccccgtgatgttcaacaagaacggcgacgcccccggcagatacgacatcttccagtaccagaccaccaacaccagcaaccccggctacagactgatcggccagtggaccgacgagctgcagctgaacatcgaggacatgcagtggggcaagggcgtgagagagatccccgccagcgtgtgcaccctgccctgcaagcccggccagagaaagaagacccagaagggcaccccctgctgctggacctgcgagccctgcgacggctaccagtaccagttcgacgagatgacctgccagcactgcccctacgaccagagacccaacgagaacagaaccggctgccaggacatccccatcatcaagctggagtggcacagcccctgggccgtgatccccgtgttcctggccatgctgggcatcatcgccaccatcttcgtgatggccaccttcatcagatacaacgacacccccatcgtgagagccagcggcagagagctgagctacgtgctgctgaccggcatcttcctgtgctacatcatcaccttcctgatgatcgccaagcccgacgtggccgtgtgcagcttcagaagagtgttcctgggcctgggcatgtgcatcagctacgccgccctgctgaccaagaccaacagaatctacagaatcttcgagcagggcaagaagagcgtgaccgcccccagactgatcagccccaccagccagctggccatcaccagcagcctgatcagcgtgcagctgctgggcgtgttcatctggttcggcgtggacccccccaacatcatcatcgactacgacgagcacaagaccatgaaccccgagcaggccagaggcgtgctgaagtgcgacatcaccgacctgcagatcatctgcagcctgggctacagcatcctgctgatggtgacctgcaccgtgtacgccatcaagaccagaggcgtgcccgagaacttcaacgaggccaagcccatcggcttcaccatgtacaccacctgcatcgtgtggctggccttcatccccatcttcttcggcaccgcccagagcgccgagaagctgtacatccagaccaccaccctgaccatcagcatgaacctgagcgccagcgtggccctgggcatgctgtacatgcccaaggtgtacatcatcatcttccaccccgagctgaacgtgcagaagagaaagagaagcttcaaggccgtggtgaccgccgccaccatgagcagcagactgagccacaagcccagcgacagacccaacggcgaggccaagaccgagctgtgcgagaacgtggaccccaacatcttcttcttcggctgcaccgtggagctgggcctgcacttcaagctgaccttcagcagaaaccagagcaacctgtag

SEQ ID NO: 83215 - DNA, 2727 bp, synthetic construct
  misc_feature 1..2727: note = Description of Artificial Sequence: Synthetic coding sequence
  source 1..2727: mol_type = other DNA
atggtgtgcgagggcaagagaagcgccagctgcccctgcttcttcctgctgaccgccaagttctactggatcctgaccatgatgcagagaacccacagccaggagtacgcccacagcatcagagtggacggcgacatcatcctgggcggcctgttccccgtgcacgccaagggcgagagaggcgtgccctgcggcgagctgaagaaggagaagggcatccacagactggaggccatgctgtacgccatcgaccagatcaacaaggaccccgacctgctgagcaacatcaccctgggcgtgagaatcctggacacctgcagcagagacacctacgccctggagcagagcctgaccttcgtgcaggccctgatcgagaaggacgccagcgacgtgaagtgcgccaacggcgacccccccatcttcaccaagcccgacaagatcagcggcgtgatcggcgccgccgccagcagcgtgagcatcatggtggccaacatcctgagactgttcaagatcccccagatcagctacgccagcaccgcccccgagctgagcgacaacaccagatacgacttcttcagcagagtggtgccccccgacagctaccaggcccaggccatggtggacatcgtgaccgccctgggctggaactacgtgagcaccctggccagcgagggcaactacggcgagagcggcgtggaggccttcacccagatcagcagagagatcggcggcgtgtgcatcgcccagagccagaagatccccagagagcccagacccggcgagttcgagaagatcatcaagagactgctggagacccccaacgccagagccgtgatcatgttcgccaacgaggacgacatcagaagaatcctggaggccgccaagaagctgaaccagagcggccacttcctgtggatcggcagcgacagctggggcagcaagatcgcccccgtgtaccagcaggaggagatcgccgagggcgccgtgaccatcctgcccaagagagccagcatcgacggcttcgacagatacttcagaagcagaaccctggccaacaacagaagaaacgtgtggttcgccgagttctgggaggagaacttcggctgcaagctgggcagccacggcaagagaaacagccacatcaagaagtgcaccggcctggagagaatcgccagagacagcagctacgagcaggagggcaaggtgcagttcgtgatcgacgccgtgtacagcatggcctacgccctgcacaacatgcacaaggacctgtgccccggctacatcggcctgtgccccagaatgagcaccatcgacggcaaggagctgctgggctacatcagagccgtgaacttcaacggcagcgccggcacccccgtgaccttcaacgagaacggcgacgcccccggcagatacgacatcttccagtaccagatcaccaacaagagcaccgagtacaaggtgatcggccactggaccaaccagctgcacctgaaggtggaggacatgcagtgggcccacagagagcacacccaccccgccagcgtgtgcagcctgccctgcaagcccggcgagagaaagaagaccgtgaagggcgtgccctgctgctggcactgcgagagatgcgagggctacaactaccaggtggacgagctgagctgcgagctgtgccccctggaccagagacccaacatgaacagaaccggctgccagctgatccccatcatcaagctggagtggcacagcccctgggccgtggtgcccgtgttcgtggccatcctgggcatcatcgccaccaccttcgtgatcgtgaccttcgtgagatacaacgacacccccatcgtgagagccagcggcagagagctgagctacgtgctgctgaccggcatcttcctgtgctacagcatcaccttcctgatgatcgccgcccccgacaccatcatctgcagcttcagaagagtgttcctgggcctgggcatgtgcttcagctacgccgccctgctgaccaagaccaacagaatccacagaatcttcgagcagggcaagaagagcgtgaccgcccccaagttcatcagccccgccagccagctggtgatcaccttcagcctgatcagcgtgcagctgctgggcgtgttcgtgtggttcgtggtggaccccccccacatcatcatcgactacggcgagcagagaaccctggaccccgagaaggccagaggcgtgctgaagtgcgacatcagcgacctgagcctgatctgcagcctgggctacagcatcctgctgatggtgacctgcaccgtgtacgccatcaagaccagaggcgtgcccgagaccttcaacgaggccaagcccatcggcttcaccatgtacaccacctgcatcatctggctggccttcatccccatcttcttcggcaccgcccagagcgccgagaagatgtacatccagaccaccaccctgaccgtgagcatgagcctgagcgccagcgtgagcctgggcatgctgtacatgcccaaggtgtacatcatcatcttccaccccgagcagaacgtgcagaagagaaagagaagcttcaaggccgtggtgaccgccgccaccatgcagagcaagctgatccagaagggcaacgacagacccaacggcgaggtgaagagcgagctgtgcgagagcctggagaccaacaccagcagcaccaagaccacctacatcagctacagcaaccacagcatctag

SEQ ID NO: 83216 - DNA, 2727 bp, synthetic construct
  misc_feature 1..2727: note = Description of Artificial Sequence: Synthetic coding sequence
  source 1..2727: mol_type = other DNA
atggtgtgcgagggcaagagaagcgccagctgcccctgcttcttcctgctgaccgccaagttctactggatcctgaccatgatgcagagaacccacagccaggagtacgcccacagcatcagagtggacggcgacatcatcctgggcggcctgttccccgtgcacgccaagggcgagagaggcgtgccctgcggcgagctgaagaaggagaagggcatccacagactggaggccatgctgtacgccatcgaccagatcaacaaggaccccgacctgctgagcaacatcaccctgggcgtgagaatcctggacacctgcagcagagacacctacgccctggagcagagcctgaccttcgtgcaggccctgatcgagaaggacgccagcgacgtgaagtgcgccaacggcgacccccccatcttcaccaagcccgacaagatcagcggcgtgatcggcgccgccgccagcagcgtgagcatcatggtggccaacatcctgagactgttcaagatcccccagatcagctacgccagcaccgcccccgagctgagcgacaacaccagatacgacttcttcagcagagtggtgccccccgacagctaccaggcccaggccatggtggacatcgtgaccgccctgggctggaactacgtgagcaccctggccagcgagggcaactacggcgagagcggcgtggaggccttcacccagatcagcagagagatcggcggcgtgtgcatcgcccagagccagaagatccccagagagcccagacccggcgagttcgagaagatcatcaagagactgctggagacccccaacgccagagccgtgatcatgttcgccaacgaggacgacatcagaagaatcctggaggccgccaagaagctgaaccagagcggccacttcctgtggatcggcagcgacagctggggcagcaagatcgcccccgtgtaccagcaggaggagatcgccgagggcgccgtgaccatcctgcccaagagagccagcatcgacggcttcgacagatacttcagaagcagaaccctggccaacaacagaagaaacgtgtggttcgccgagttctgggaggagaacttcggctgcaagctgggcagccacggcaagagaaacagccacatcaagaagtgcaccggcctggagagaatcgccagagacagcagctacgagcaggagggcaaggtgcagttcgtgatcgacgccgtgtacagcatggcctacgccctgcacaacatgcacaaggacctgtgccccggctacatcggcctgtgccccagaatgagcaccatcgacggcaaggagctgctgggctacatcagagccgtgaacttcaacggcagcgccggcacccccgtgaccttcaacgagaacggcgacgcccccggcagatacgacatcttccagtaccagatcaccaacaagagcaccgagtacaaggtgatcggccactggaccaaccagctgcacctgaaggtggaggacatgcagtgggcccacagagagcacacccaccccgccagcgtgtgcagcctgccctgcaagcccggcgagagaaagaagaccgtgaagggcgtgccctgctgctggcactgcgagagatgcgagggctacaactaccaggtggacgagctgagctgcgagctgtgccccctggaccagagacccaacatgaacagaaccggctgccagctgatccccatcatcaagctggagtggcacagcccctgggccgtggtgcccgtgttcgtggccatcctgggcatcatcgccaccaccttcgtgatcgtgaccttcgtgagatacaacgacacccccatcgtgagagccagcggcagagagctgagctacgtgctgctgaccggcatcttcctgtgctacagcatcaccttcctgatgatcgccgcccccgacaccatcatctgcagcttcagaagagtgttcctgggcctgggcatgtgcttcagctacgccgccctgctgaccaagaccaacagaatccacagaatcttcgagcagggcaagaagagcgtgaccgcccccaagttcatcagccccgccagccagctggtgatcaccttcagcctgatcagcgtgcagctgctgggcgtgttcgtgtggttcgtggtggaccccccccacatcatcatcgactacggcgagcagagaaccctggaccccgagaaggccagaggcgtgctgaagtgcgacatcagcgacctgagcctgatctgcagcctgggctacagcatcctgctgatggtgacctgcaccgtgtacgccatcaagaccagaggcgtgcccgagaccttcaacgaggccaagcccatcggcttcaccatgtacaccacctgcatcatctggctggccttcatccccatcttcttcggcaccgcccagagcgccgagaagatgtacatccagaccaccaccctgaccgtgagcatgagcctgagcgccagcgtgagcctgggcatgctgtacatgcccaaggtgtacatcatcatcttccaccccgagcagaacgtgcagaagagaaagagaagcttcaaggccgtggtgaccgccgccaccatgcagagcaagctgatccagaagggcaacgacagacccaacggcgaggtgaagagcgagctgtgcgagagcctggagaccaacagcaagagcagcgtggagttccccatggtgaagagcggcagcaccagctag

SEQ ID NO: 83217 - DNA, 1506 bp, synthetic construct
  misc_feature 1..1506: note = Description of Artificial Sequence: Synthetic coding sequence
  source 1..1506: mol_type = other DNA
atggtgtgcgagggcaagagaagcgccagctgcccctgcttcttcctgctgaccgccaagttctactggatcctgaccatgatgcagagaacccacagccaggagtacgcccacagcatcagagtggacggcgacatcatcctgggcggcctgttccccgtgcacgccaagggcgagagaggcgtgccctgcggcgagctgaagaaggagaagggcatccacagactggaggccatgctgtacgccatcgaccagatcaacaaggaccccgacctgctgagcaacatcaccctgggcgtgagaatcctggacacctgcagcagagacacctacgccctggagcagagcctgaccttcgtgcaggccctgatcgagaaggacgccagcgacgtgaagtgcgccaacggcgacccccccatcttcaccaagcccgacaagatcagcggcgtgatcggcgccgccgccagcagcgtgagcatcatggtggccaacatcctgagactgttcaagatcccccagatcagctacgccagcaccgcccccgagctgagcgacaacaccagatacgacttcttcagcagagtggtgccccccgacagctaccaggcccaggccatggtggacatcgtgaccgccctgggctggaactacgtgagcaccctggccagcgagggcaactacggcgagagcggcgtggaggccttcacccagatcagcagagagatcggcggcgtgtgcatcgcccagagccagaagatccccagagagcccagacccggcgagttcgagaagatcatcaagagactgctggagacccccaacgccagagccgtgatcatgttcgccaacgaggacgacatcagaagaatcctggaggccgccaagaagctgaaccagagcggccacttcctgtggatcggcagcgacagctggggcagcaagatcgcccccgtgtaccagcaggaggagatcgccgagggcgccgtgaccatcctgcccaagagagccagcatcgacggcttcgacagatacttcagaagcagaaccctggccaacaacagaagaaacgtgtggttcgccgagttctgggaggagaacttcggctgcaagctgggcagccacggcaagagaaacagccacatcaagaagtgcaccggcctggagagaatcgccagagacagcagctacgagcaggagggcaaggtgcagttcgtgatcgacgccgtgtacagcatggcctacgccctgcacaacatgcacaaggacctgtgccccggctacatcggcctgtgccccagaatgagcaccatcgacggcaaggagctgctgggctacatcagagccgtgaacttcaacggctgcagaagaggcatccagatgagcctgccctggcccaccctgttcacccccagcttcagcagcagctgggccgtgctggccctgctgagcctgctgatgaagaccgagatgctgctggacgtgatgatcagcagcagcatcaagtag

SEQ ID NO: 83218 - DNA, 63 bp, synthetic construct
  misc_feature 1..63: note = Description of Artificial Sequence: Synthetic coding sequence
  source 1..63: mol_type = other DNA
atggtgtgcgagggcaagagaagcgccagctgcccctgcttcttcctgctgaccgccaagtag

SEQ ID NO: 83219 - DNA, 2727 bp, synthetic construct; identical to SEQ ID NO: 83215
  misc_feature 1..2727: note = Description of Artificial Sequence: Synthetic coding sequence
  source 1..2727: mol_type = other DNA

SEQ ID NO: 83220 - DNA, 885 bp, synthetic construct
  misc_feature 1..885: note = Description of Artificial Sequence: Synthetic coding sequence
  source 1..885: mol_type = other DNA
atggtgtgcgagggcaagagaagcgccagctgcccctgcttcttcctgctgaccgccaagttctactggatcctgaccatgatgcagagaacccacagccaggagtacgcccacagcatcagagtggacggcgacatcatcctgggcggcctgttccccgtgcacgccaagggcgagagaggcgtgccctgcggcgagctgaagaaggagaagggcatccacagactggaggccatgctgtacgccatcgaccagatcaacaaggaccccgacctgctgagcaacatcaccctgggcgtgagaatcctggacacctgcagcagagacacctacgccctggagcagagcctgaccttcgtgcaggccctgatcgagaaggacgccagcgacgtgaagtgcgccaacggcgacccccccatcttcaccaagcccgacaagatcagcggcgtgatcggcgccgccgccagcagcgtgagcatcatggtggccaacatcctgagactgttcaagatcccccagatcagctacgccagcaccgcccccgagctgagcgacaacaccagatacgacttcttcagcagagtggtgccccccgacagctaccaggcccaggccatggtggacatcgtgaccgccctgggctggaactacgtgagcaccctggccagcgagggcaactacggcgagagcggcgtggaggccttcacccagatcagcagagagatcggcggcgtgtgcatcgcccagagccagaagatccccagagagcccagacccggcgagttcgagaagatcatcaagagactgctggagacccccaacgccagagccgtgatcatgttcgccaacgaggacgacatcagaagaatcctggaggccgcctag

SEQ ID NO: 83221 - DNA, 1122 bp, synthetic construct
  misc_feature 1..1122: note = Description of Artificial Sequence: Synthetic coding sequence
  source 1..1122: mol_type = other DNA
atgaccaccagcgccagcagccacctgaacaagggcatcaagcaggtgtacatgagcctgccccagggcgagaaggtgcaggccatgtacatctggatcgacggcaccggcgagggcctgagatgcaagaccagaaccctggacagcgagcccaagtgcgtggaggagctgcccgagtggaacttcgacggcagcagcaccctgcagagcgagggcagcaacagcgacatgtacctggtgcccgccgccatgttcagagaccccttcagaaaggaccccaacaagctggtgctgtgcgaggtgttcaagtacaacagaagacccgccgagaccaacctgagacacacctgcaagagaatcatggacatggtgagcaaccagcacccctggttcggcatggagcaggagtacaccctgatgggcaccgacggccaccccttcggctggcccagcaacggcttccccggcccccagggcccctactactgcggcgtgggcgccgacagagcctacggcagagacatcgtggaggcccactacagagcctgcctgtacgccggcgtgaagatcgccggcaccaacgccgaggtgatgcccgcccagtgggagttccagatcggcccctgcgagggcatcagcatgggcgaccacctgtgggtggccagattcatcctgcacagagtgtgcgaggacttcggcgtgatcgccaccttcgaccccaagcccatccccggcaactggaacggcgccggctgccacaccaacttcagcaccaaggccatgagagaggagaacggcctgaagtacatcgaggaggccatcgagaagctgagcaagagacaccagtaccacatcagagcctacgaccccaagggcggcctggacaacgccagaagactgaccggcttccacgagaccagcaacatcaacgacttcagcgccggcgtggccaacagaagcgccagcatcagaatccccagaaccgtgggccaggagaagaagggctacttcgaggacagaagacccagcgccaactgcgaccccttcagcgtgaccgaggccctgatcagaacctgcctgctgaacgagaccggcgacgagcccttccagtacaagaactag

SEQ ID NO: 83222 - DNA, 1122 bp, synthetic construct; identical to SEQ ID NO: 83221
  misc_feature 1..1122: note = Description of Artificial Sequence: Synthetic coding sequence
  source 1..1122: mol_type = other DNA

SEQ ID NO: 83223 - DNA, 1122 bp, synthetic construct; identical to SEQ ID NO: 83221
  misc_feature 1..1122: note = Description of Artificial Sequence: Synthetic coding sequence
  source 1..1122: mol_type = other DNA

SEQ ID NO: 83224 - DNA, 1122 bp, synthetic construct; identical to SEQ ID NO: 83221
  misc_feature 1..1122: note = Description of Artificial Sequence: Synthetic coding sequence
  source 1..1122: mol_type = other DNA

SEQ ID NO: 83225 - DNA, 702 bp, synthetic construct
  misc_feature 1..702: note = Description of Artificial Sequence: Synthetic coding sequence
  source 1..702: mol_type = other DNA
atgaccaccagcgccagcagccacctgaacaagggcatcaagcaggtgtacatgagcctgccccagggcgagaaggtgcaggccatgtacatctggatcgacggcaccggcgagggcctgagatgcaagaccagaaccctggacagcgagcccaagtgcgtggaggagctgcccgagtggaacttcgacggcagcagcaccctgcagagcgagggcagcaacagcgacatgtacctggtgcccgccgccatgttcagagaccccttcagaaaggaccccaacaagctggtgctgtgcgaggtgttcaagtacaacagaagacccgccgagaccaacctgagacacacctgcaagagaatcatggacatggtgagcaaccagcacccctggttcggcatggagcaggagtacaccctgatgggcaccgacggccaccccttcggctggcccagcaacggcttccagggccccagagtgcacatcaccgtggtgtgggagcagaccgagcccatggccggcaccagctggagacccatcaccggccccgcctgcatgctggagagcagactgagaggcctgatgcccagaagctgcctgcccagcggcaacttcagactggacctggtgaaggagagcgcctgggagatcatcagcggctggcccgtgagcagctgcatcgtgtgcgtgaagaccctggagtag

SEQ ID NO: 83226 - DNA, 678 bp, synthetic construct
  misc_feature 1..678: note = Description of Artificial Sequence: Synthetic coding sequence
  source 1..678: mol_type = other DNA
atggaccagcaggccatctacgccgagctgaacctgcccaccgacagcggccccgagagcagcagccccagcagcctgcccagagacgtgtgccagggcagcccctggcaccagttcgccctgaagctgagctgcgccggcatcatcctgctggtgctggtggtgaccggcctgagcgtgagcgtgaccagcctgatccagaagagcagcatcgagaagtgcagcgtggacatccagcagagcagaaacaagaccaccgagagacccggcctgctgaactgccccatctactggcagcagctgagagagaagtgcctgctgttcagccacaccgtgaacccctggaacaacagcctggccgactgcagcaccaaggagagcagcctgctgctgatcagagacaaggacgagctgatccacacccagaacctgatcagagacaaggccatcctgttctggatcggcctgaacttcagcctgagcgagaagaactggaagtggatcaacggcagcttcctgaacagcaacgacctggagatcagaggcgacgccaaggagaacagctgcatcagcatcagccagaccagcgtgtacagcgagtactgcagcaccgagatcagatggatctgccagaaggagctgacccccgtgagaaacaaggtgtaccccgacagctag

SEQ ID NO: 83227 - DNA, 825 bp, synthetic construct
  misc_feature 1..825: note = Description of Artificial Sequence: Synthetic coding sequence
  source 1..825: mol_type = other DNA
atgggcaccgacagcagagccgccaaggccctgctggccagagccagaaccctgcacctgcagaccggcaacctgctgaactggggcagactgagaaagaagtgccccagcacccacagcgaggagctgcacgactgcatccagaagaccctgaacgagtggagcagccagatcaaccccgacctggtgagagagttccccgacgtgctggagtgcaccgtgagccacgccgtggagaagatcaaccccgacgagagagaggagatgaaggtgagcgccaagctgttcatcgtggagagcaacagcagcagcagcaccagaagcgccgtggacatggcctgcagcgtgctgggcgtggcccagctggacagcgtgatcatcgccagcccccccatcgaggacggcgtgaacctgagcctggagcacctgcagccctactgggaggagctggagaacctggtgcagagcaagaagatcgtggccatcggcaccagcgacctggacaagacccagctggagcagctgtaccagtgggcccaggtgaagcccaacagcaaccaggtgaacctggccagctgctgcgtgatgccccccgacctgaccgccttcgccaagcagttcgacatccagctgctgacccacaacgaccccaaggagctgctgagcgaggccagcttccaggaggccctgcaggagagcatccccgacatccaggcccacgagtgggtgcccctgtggctgctgagatacagcgtgatcgtgaagagcagaggcatcatcaagagcaagggctacatcctgcaggccaagagaagaggcagctag

SEQ ID NO: 83228 - DNA, 1341 bp, synthetic construct
  misc_feature 1..1341: note = Description of Artificial Sequence: Synthetic coding sequence
  source 1..1341: mol_type = other DNA
atggccgccagaaagggcagaagaagaacctgcgagaccggcgagcccatggaggccgagagcggcgacaccagcagcgagggccccgcccaggtgtacctgcccggcagaggcccccccctgagagagggcgaggagctggtgatggacgaggaggcctacgtgctgtaccacagagcccagaccggcgccccctgcctgagcttcgacatcgtgagagaccacctgggcgacaacagaaccgagctgcccctgaccctgtacctgtgcgccggcacccaggccgagagcgcccagagcaacagactgatgatgctgagaatgcacaacctgcacggcaccaagcccccccccagcgagggcagcgacgaggaggaggaggaggaggacgaggaggacgaggaggagagaaagccccagctggagctggccatggtgccccactacggcggcatcaacagagtgagagtgagctggctgggcgaggagcccgtggccggcgtgtggagcgagaagggccaggtggaggtgttcgccctgagaagactgctgcaggtggtggaggagccccaggccctggccgccttcctgagagacgagcaggcccagatgaagcccatcttcagcttcgccggccacatgggcgagggcttcgccctggactggagccccagagtgaccggcagactgctgaccggcgactgccagaagaacatccacctgtggacccccaccgacggcggcagctggcacgtggaccagagacccttcgtgggccacaccagaagcgtggaggacctgcagtggagccccaccgagaacaccgtgttcgccagctgcagcgccgacgccagcatcagaatctgggacatcagagccgcccccagcaaggcctgcatgctgaccaccgccaccgcccacgacggcgacgtgaacgtgatcagctggagcagaagagagcccttcctgctgagcggcggcgacgacggcgccctgaagatctgggacctgagacagttcaagagcggcagccccgtggccaccttcaagcagcacgtggcccccgtgaccagcgtggagtggcacccccaggacagcggcgtgttcgccgccagcggcgccgaccaccagatcacccagtgggacctggccgtggagagagaccccgaggccggcgacgtggaggccgaccccggcctggccgacctgccccagcagctgctgttcgtgcaccagggcgagaccgagctgaaggagctgcactggcacccccagtgccccggcctgctggtgagcaccgccctgagcggcttcaccatcttcagaaccatcagcgtgtag

SEQ ID NO: 83229 - DNA, 1572 bp, synthetic construct
  misc_feature 1..1572: note = Description of Artificial Sequence: Synthetic coding sequence
  source 1..1572: mol_type = other DNA
atgcagagagccgccgccctggtgagaagaggctgcggccccagaacccccagcagctggggcagaagccagagcagcgccgccgccgaggccagcgccgtgctgaaggtgagacccgagagaagcagaagagagagaatcctgaccctggagagcatgaacccccaggtgaaggccgtggagtacgccgtgagaggccccatcgtgctgaaggccggcgagatcgagctggagctgcagagaggcatcaagaagcccttcaccgaggtgatcagagccaacatcggcgacgcccaggccatgggccagcagcccatcaccttcctgagacaggtgatggccctgtgcacctaccccaacctgctggacagccccagcttccccgaggacgccaagaagagagccagaagaatcctgcaggcctgcggcggcaacagcctgggcagctacagcgccagccagggcgtgaactgcatcagagaggacgtggccgcctacatcaccagaagagacggcggcgtgcccgccgaccccgacaacatctacctgaccaccggcgccagcgacggcatcagcaccatcctgaagatcctggtgagcggcggcggcaagagcagaaccggcgtgatgatccccatcccccagtaccccctgtacagcgccgtgatcagcgagctggacgccatccaggtgaactactacctggacgaggagaactgctgggccctgaacgtgaacgagctgagaagagccgtgcaggaggccaaggaccactgcgaccccaaggtgctgtgcatcatcaaccccggcaaccccaccggccaggtgcagagcagaaagtgcatcgaggacgtgatccacttcgcctgggaggagaagctgttcctgctggccgacgaggtgtaccaggacaacgtgtacagccccgactgcagattccacagcttcaagaaggtgctgtacgagatgggccccgagtacagcagcaacgtggagctggccagcttccacagcaccagcaagggctacatgggcgagtgcggctacagaggcggctacatggaggtgatcaacctgcaccccgagatcaagggccagctggtgaagctgctgagcgtgagactgtgcccccccgtgagcggccaggccgccatggacatcgtggtgaacccccccgtggccggcgaggagagcttcgagcagttcagcagagagaaggagagcgtgctgggcaacctggccaagaaggccaagctgaccgaggacctgttcaaccaggtgcccggcatccactgcaaccccctgcagggcgccatgtacgccttccccagaatcttcatccccgccaaggccgtggaggccgcccaggcccaccagatggcccccgacatgttctactgcatgaagctgctggaggagaccggcatctgcgtggtgcccggcagcggcttcggccagagagagggcacctaccacttcagaatgaccatcctgccccccgtggagaagctgaagaccgtgctgcagaaggtgaaggacttccacatcaacttcctggagaagtacgcctag

SEQ ID NO: 83230 - DNA, 1272 bp, synthetic construct
  misc_feature 1..1272: note = Description of Artificial Sequence: Synthetic coding sequence
  source 1..1272: mol_type = other DNA
atgggccagcagcccatcaccttcctgagacaggtgatggccctgtgcacctaccccaacctgctggacagccccagcttccccgaggacgccaagaagagagccagaagaatcctgcaggcctgcggcggcaacagcctgggcagctacagcgccagccagggcgtgaactgcatcagagaggacgtggccgcctacatcaccagaagagacggcggcgtgcccgccgaccccgacaacatctacctgaccaccggcgccagcgacggcatcagcaccatcctgaagatcctggtgagcggcggcggcaagagcagaaccggcgtgatgatccccatcccccagtaccccctgtacagcgccgtgatcagcgagctggacgccatccaggtgaactactacctggacgaggagaactgctgggccctgaacgtgaacgagctgagaagagccgtgcaggaggccaaggaccactgcgaccccaaggtgctgtgcatcatcaaccccggcaaccccaccggccaggtgcagagcagaaagtgcatcgaggacgtgatccacttcgcctgggaggagaagctgttcctgctggccgacgaggtgtaccaggacaacgtgtacagccccgactgcagattccacagcttcaagaaggtgctgtacgagatgggccccgagtacagcagcaacgtggagctggccagcttccacagcaccagcaagggctacatgggcgagtgcggctacagaggcggctacatggaggtgatcaacctgcaccccgagatcaagggccagctggtgaagctgctgagcgtgagactgtgcccccccgtgagcggccaggccgccatggacatcgtggtgaacccccccgtggccggcgaggagagcttcgagcagttcagcagagagaaggagagcgtgctgggcaacctggccaagaaggccaagctgaccgaggacctgttcaaccaggtgcccggcatccactgcaaccccctgcagggcgccatgtacgccttccccagaatcttcatccccgccaaggccgtggaggccgcccaggcccaccagatggcccccgacatgttctactgcatgaagctgctggaggagaccggcatctgcgtggtgcccggcagcggcttcggccagagagagggcacctaccacttcagaatgaccatcctgccccccgtggagaagctgaagaccgtgctgcagaaggtgaaggacttccacatcaacttcctggagaagtacgcctag

SEQ ID NO: 83231 - DNA, 1242 bp, synthetic construct
  misc_feature 1..1242: note = Description of Artificial Sequence: Synthetic coding sequence
  source 1..1242: mol_type = other DNA
atggccccccccagcgtgttcgccgaggtgccccaggcccagcccgtgctggtgttcaagctgaccgccgacttcagagaggaccccgaccccagaaaggtgaacctgggcgtgggcgcctacagaaccgacgactgccacccctgggtgctgcccgtggtgaagaaggtggagcagaagatcgccaacgacaacagcctgaaccacgagtacctgcccatcctgggcctggccgagttcagaagctgcgccagcagactggccctgggcgacgacagccccgccctgaaggagaagagagtgggcggcgtgcagagcctgggcggcaccggcgccctgagaatcggcgccgacttcctggccagatggtacaacggcaccaacaacaagaacacccccgtgtacgtgagcagccccacctgggagaaccacaacgccgtgttcagcgccgccggcttcaaggacatcagaagctacagatactgggacgccgagaagagaggcctggacctgcagggcttcctgaacgacctggagaacgcccccgagttcagcatcgtggtgctgcacgcctgcgcccacaaccccaccggcatcgaccccacccccgagcagtggaagcagatcgccagcgtgatgaagcacagattcctgttccccttcttcgacagcgcctaccagggcttcgccagcggcaacctggagagagacgcctgggccatcagatacttcgtgagcgagggcttcgagttcttctgcgcccagagcttcagcaagaacttcggcctgtacaacgagagagtgggcaacctgaccgtggtgggcaaggagcccgagagcatcctgcaggtgctgagccagatggagaagatcgtgagaatcacctggagcaacccccccgcccagggcgccagaatcgtggccagcaccctgagcaaccccgagctgttcgaggagtggaccggcaacgtgaagaccatggccgacagaatcctgaccatgagaagcgagctgagagccagactggaggccctgaagacccccggcacctggaaccacatcaccgaccagatcggcatgttcagcttcaccggcctgaaccccaagcaggtggagtacctggtgaacgagaagcacatctacctgctgcccagcggcagaatcaacgtgagcggcctgaccaccaagaacctggactacgtggccaccagcatccacgaggccgtgaccaagatccagtag

SEQ ID NO: 83232 - DNA, 1101 bp, synthetic construct
  misc_feature 1..1101: note = Description of Artificial Sequence: Synthetic coding sequence
  source 1..1101: mol_type = other DNA
atggccccccccagcgtgttcgccgaggtgccccaggcccagcccgtgctggtgttcaagctgaccgccgacttcagagaggaccccgaccccagaaaggtgaacctgggcgtgggcgcctacagaaccgacgacagccccgccctgaaggagaagagagtgggcggcgtgcagagcctgggcggcaccggcgccctgagaatcggcgccgacttcctggccagatggtacaacggcaccaacaacaagaacacccccgtgtacgtgagcagccccacctgggagaaccacaacgccgtgttcagcgccgccggcttcaaggacatcagaagctacagatactgggacgccgagaagagaggcctggacctgcagggcttcctgaacgacctggagaacgcccccgagttcagcatcgtggtgctgcacgcctgcgcccacaaccccaccggcatcgaccccacccccgagcagtggaagcagatcgccagcgtgatgaagcacagattcctgttccccttcttcgacagcgcctaccagggcttcgccagcggcaacctggagagagacgcctgggccatcagatacttcgtgagcgagggcttcgagttcttctgcgcccagagcttcagcaagaacttcggcctgtacaacgagagagtgggcaacctgaccgtggtgggcaaggagcccgagagcatcctgcaggtgctgagccagatggagaagatcgtgagaatcacctggagcaacccccccgcccagggcgccagaatcgtggccagcaccctgagcaaccccgagctgttcgaggagtggaccggcaacgtgaagaccatggccgacagaatcctgaccatgagaagcgagctgagagccagactggaggccctgaagacccccggcacctggaaccacatcaccgaccagatcggcatgttcagcttcaccggcctgaaccccaagcaggtggagtacctggtgaacgagaagcacatctacctgctgcccagcggcagaatcaacgtgagcggcctgaccaccaagaacctggactacgtggccaccagcatccacgaggccgtgaccaagatccagtag

SEQ ID NO: 83233 - DNA, 1179 bp, synthetic construct
  misc_feature 1..1179: note = Description of Artificial Sequence: Synthetic coding sequence
  source 1..1179: mol_type = other DNA
atgcaggtgtggagcccctggaagggcgccatgtgccccagaccccacaagcccgcctacagaaccgacgactgccacccctgggtgctgcccgtggtgaagaaggtggagcagaagatcgccaacgacaacagcctgaaccacgagtacctgcccatcctgggcctggccgagttcagaagctgcgccagcagactggccctgggcgacgacagccccgccctgaaggagaagagagtgggcggcgtgcagagcctgggcggcaccggcgccctgagaatcggcgccgacttcctggccagatggtacaacggcaccaacaacaagaacacccccgtgtacgtgagcagccccacctgggagaaccacaacgccgtgttcagcgccgccggcttcaaggacatcagaagctacagatactgggacgccgagaagagaggcctggacctgcagggcttcctgaacgacctggagaacgcccccgagttcagcatcgtggtgctgcacgcctgcgcccacaaccccaccggcatcgaccccacccccgagcagtggaagcagatcgccagcgtgatgaagcacagattcctgttccccttcttcgacagcgcctaccagggcttcgccagcggcaacctggagagagacgcctgggccatcagatacttcgtgagcgagggcttcgagttcttctgcgcccagagcttcagcaagaacttcggcctgtacaacgagagagtgggcaacctgaccgtggtgggcaaggagcccgagagcatcctgcaggtgctgagccagatggagaagatcgtgagaatcacctggagcaacccccccgcccagggcgccagaatcgtggccagcaccctgagcaaccccgagctgttcgaggagtggaccggcaacgtgaagaccatggccgacagaatcctgaccatgagaagcgagctgagagccagactggaggccctgaagacccccggcacctggaaccacatcaccgaccagatcggcatgttcagcttcaccggcctgaaccccaagcaggtggagtacctggtgaacgagaagcacatctacctgctgcccagcggcagaatcaacgtgagcggcctgaccaccaagaacctggactacgtggccaccagcatccacgaggccgtgaccaagatccagtag

SEQ ID NO: 83234 - DNA, 1293 bp, synthetic construct
  misc_feature 1..1293: note = Description of Artificial Sequence: Synthetic coding sequence
  source 1..1293: mol_type = other DNA
atggccctgctgcacagcggcagagtgctgcccggcatcgccgccgccttccaccccggcctggccgccgccgccagcgccagagccagcagctggtggacccacgtggagatgggcccccccgaccccatcctgggcgtgaccgaggccttcaagagagacaccaacagcaagaagatgaacctgggcgtgggcgcctacagagacgacaacggcaagccctacgtgctgcccagcgtgagaaaggccgaggcccagatcgccgccaagaacctggacaaggagtacctgcccatcggcggcctggccgagttctgcaaggccagcgccgagctggccctgggcgagaacagcgaggtgctgaagagcggcagattcgtgaccgtgcagaccatcagcggcaccggcgccctgagaatcggcgccagcttcctgcagagattcttcaagttcagcagagacgtgttcctgcccaagcccacctggggcaaccacacccccatcttcagagacgccggcatgcagctgcagggctacagatactacgaccccaagacctgcggcttcgacttcaccggcgccgtggaggacatcagcaagatccccgagcagagcgtgctgctgctgcacgcctgcgcccacaaccccaccggcgtggaccccagacccgagcagtggaaggagatcgccaccgtggtgaagaagagaaacctgttcgccttcttcgacatggcctaccagggcttcgccagcggcgacggcgacaaggacgcctgggccgtgagacacttcatcgagcagggcatcaacgtgtgcctgtgccagagctacgccaagaacatgggcctgtacggcgagagagtgggcgccttcaccatggtgtgcaaggacgccgacgaggccaagagagtggagagccagctgaagatcctgatcagacccatgtacagcaacccccccctgaacggcgccagaatcgccgccgccatcctgaacacccccgacctgagaaagcagtggctgcaggaggtgaaggtgatggccgacagaatcatcggcatgagaacccagctggtgagcaacctgaagaaggagggcagcacccacaactggcagcacatcaccgaccagatcggcatgttctgcttcaccggcctgaagcccgagcaggtggagagactgatcaaggagttcagcatctacatgaccaaggacggcagaatcagcgtggccggcgtgaccagcagcaacgtgggctacctggcccacgccatccaccaggtgaccaagtag

SEQ ID NO: 83235 - DNA, 570 bp, synthetic construct
  misc_feature 1..570: note = Description of Artificial Sequence: Synthetic coding sequence
  source 1..570: mol_type = other DNA
atggccctgctgcacagcggcagagtgctgcccggcatcgccgccgccttccaccccggcctggccgccgccgccagcgccagagccagcagctggtggacccacgtggagatgggcccccccgaccccatcctgggcgtgaccgaggccttcaagagagacaccaacagcaagaagatgaacctgggcgtgggcgcctacagagacgacaacggcaagccctacgtgctgcccagcgtgagaaaggccgaggcccagatcgccgccaagaacctggacaaggagtacctgcccatcggcggcctggccgagttctgcaaggacttcctgagcagcgccgagatgagcttctgccccaaccagcccggcgagaccacccaccccagcagcggcatgctggcctgcagctacaaggtgatcggcatcatgacccccagactggccgtgctgaccagccaggccctgtggagaatcttccagaagtaccagagcagagtgttcttcttctgcatgcccgcccccaccatccccagagagtggaccagagtgagaaacagcggcagaaagtag

SEQ ID NO: 83236 - DNA, 1164 bp, synthetic construct
  misc_feature 1..1164: note = Description of Artificial Sequence: Synthetic coding sequence
  source 1..1164: mol_type = other DNA
atggccctgctgcacagcggcagagtgctgcccggcatcgccgccgccttccaccccggcctggccgccgccgccagcgccagagccagcagctggtggacccacgtggagatgggcccccccgaccccatcctgggcgtgaccgaggccttcaagagagacaccaacagcaagaagatgaacctgggcgtgggcgcctacagagacgacaacggcaagccctacgtgctgcccagcgtgagaaagttcgtgaccgtgcagaccatcagcggcaccggcgccctgagaatcggcgccagcttcctgcagagattcttcaagttcagcagagacgtgttcctgcccaagcccacctggggcaaccacacccccatcttcagagacgccggcatgcagctgcagggctacagatactacgaccccaagacctgcggcttcgacttcaccggcgccgtggaggacatcagcaagatccccgagcagagcgtgctgctgctgcacgcctgcgcccacaaccccaccggcgtggaccccagacccgagcagtggaaggagatcgccaccgtggtgaagaagagaaacctgttcgccttcttcgacatggcctaccagggcttcgccagcggcgacggcgacaaggacgcctgggccgtgagacacttcatcgagcagggcatcaacgtgtgcctgtgccagagctacgccaagaacatgggcctgtacggcgagagagtgggcgccttcaccatggtgtgcaaggacgccgacgaggccaagagagtggagagccagctgaagatcctgatcagacccatgtacagcaacccccccctgaacggcgccagaatcgccgccgccatcctgaacacccccgacctgagaaagcagtggctgcaggaggtgaaggtgatggccgacagaatcatcggcatgagaacccagctggtgagcaacctgaagaaggagggcagcacccacaactggcagcacatcaccgaccagatcggcatgttctgcttcaccggcctgaagcccgagcaggtggagagactgatcaaggagttcagcatctacatgaccaaggacggcagaatcagcgtggccggcgtgaccagcagcaacgtgggctacctggcccacgccatccaccaggtgaccaagtag

SEQ ID NO: 83237 - DNA, 1491 bp, synthetic construct
  misc_feature 1..1491: note = Description of Artificial Sequence: Synthetic coding sequence
  source 1..1491: mol_type = other DNA
atggccagcagcaccggcgacagaagccaggccgtgagacacggcctgagagccaaggtgctgaccctggacggcatgaaccccagagtgagaagagtggagtacgccgtgagaggccccatcgtgcagagagccctggagctggagcaggagctgagacagggcgtgaagaagcccttcaccgaggtgatcagagccaacatcggcgacgcccaggccatgggccagagacccatcaccttcctgagacaggtgctggccctgtgcgtgaaccccgacctgctgagcagccccaacttccccgacgacgccaagaagagagccgagagaatcctgcaggcctgcggcggccacagcctgggcgcctacagcgtgagcagcggcatccagctgatcagagaggacgtggccagatacatcgagagaagagacggcggcatccccgccgaccccaacaacgtgttcctgagcaccggcgccagcgacgccatcgtgaccgtgctgaagctgctggtggccggcgagggccacaccagaaccggcgtgctgatccccatcccccagtaccccctgtacagcgccaccctggccgagctgggcgccgtgcaggtggactactacctggacgaggagagagcctgggccctggacgtggccgagctgcacagagccctgggccaggccagagaccactgcagacccagagccctgtgcgtgatcaaccccggcaaccccaccggccaggtgcagaccagagagtgcatcgaggccgtgatcagattcgccttcgaggagagactgttcctgctggccgacgaggtgtaccaggacaacgtgtacgccgccggcagccagttccacagcttcaagaaggtgctgatggagatgggccccccctacgccggccagcaggagctggccagcttccacagcaccagcaagggctacatgggcgagtgcggcttcagaggcggctacgtggaggtggtgaacatggacgccgccgtgcagcagcagatgctgaagctgatgagcgtgagactgtgcccccccgtgcccggccaggccctgctggacctggtggtgagcccccccgcccccaccgaccccagcttcgcccagttccaggccgagaagcaggccgtgctggccgagctggccgccaaggccaagctgaccgagcaggtgttcaacgaggcccccggcatcagctgcaaccccgtgcagggcgccatgtacagcttccccagagtgcagctgccccccagagccgtggagagagcccaggagctgggcctggcccccgacatgttcttctgcctgagactgctggaggagaccggcatctgcgtggtgcccggcagcggcttcggccagagagagggcacctaccacttcagaatgaccatcctgccccccctggagaagctgagactgctgctggagaagctgagcagattccacgccaagttcaccctggagtacagctag

SEQ ID NO: 83238 - DNA, 1491 bp, synthetic construct; identical to SEQ ID NO: 83237
  misc_feature 1..1491: note = Description of Artificial Sequence: Synthetic coding sequence
  source 1..1491: mol_type = other DNA

SEQ ID NO: 83239 - DNA, 2010 bp, synthetic construct
  misc_feature 1..2010: note = Description of Artificial Sequence: Synthetic coding sequence
  source 1..2010: mol_type = other DNA
atgatgagactgagaggcagcggcatgctgagagacctgctgctgagaagccccgccggcgtgagcgccaccctgagaagagcccagcccctggtgaccctgtgcagaagacccagaggcggcggcagacccgccgccggccccgccgccgccgccagactgcacccctggtggggcggcggcggctggcccgccgagcccctggccagaggcctgagcagcagccccagcgagatcctgcaggagctgggcaagggcagcacccacccccagcccggcgtgagcccccccgccgcccccgccgcccccggccccaaggacggccccggcgagaccgacgccttcggcaacagcgagggcaaggagctggtggccagcggcgagaacaagatcaagcagggcctgctgcccagcctggaggacctgctgttctacaccatcgccgagggccaggagaagatccccgtgcacaagttcatcaccgccctgaagagcaccggcctgagaaccagcgaccccagactgaaggagtgcatggacatgctgagactgaccctgcagaccaccagcgacggcgtgatgctggacaaggacctgttcaagaagtgcgtgcagagcaacatcgtgctgctgacccaggccttcagaagaaagttcgtgatccccgacttcatgagcttcaccagccacatcgacgagctgtacgagagcgccaagaagcagagcggcggcaaggtggccgactacatcccccagctggccaagttcagccccgacctgtggggcgtgagcgtgtgcaccgtggacggccagagacacagcaccggcgacaccaaggtgcccttctgcctgcagagctgcgtgaagcccctgaagtacgccatcgccgtgaacgacctgggcaccgagtacgtgcacagatacgtgggcaaggagcccagcggcctgagattcaacaagctgttcctgaacgaggacgacaagccccacaaccccatggtgaacgccggcgccatcgtggtgaccagcctgatcaagcagggcgtgaacaacgccgagaagttcgactacgtgatgcagttcctgaacaagatggccggcaacgagtacgtgggcttcagcaacgccaccttccagagcgagagagagagcggcgacagaaacttcgccatcggctactacctgaaggagaagaagtgcttccccgagggcaccgacatggtgggcatcctggacttctacttccagctgtgcagcatcgaggtgacctgcgagagcgccagcgtgatggccgccaccctggccaacggcggcttctgccccatcaccggcgagagagtgctgagccccgaggccgtgagaaacaccctgagcctgatgcacagctgcggcatgtacgacttcagcggccagttcgccttccacgtgggcctgcccgccaagagcggcgtggccggcggcatcctgctggtggtgcccaacgtgatgggcatgatgtgctggagcccccccctggacaagatgggcaacagcgtgaagggcatccacttctgccacgacctggtgagcctgtgcaacttccacaactacgacaacctgagacacttcgccaagaagctggaccccagaagagagggcggcgaccagagagtgaagagcgtgatcaacctgctgttcgccgcctacaccggcgacgtgagcgccctgagaagattcgccctgagcgccatggacatggagcagagagactacgacagcagaaccgccctgcacgtggccgccgccgagggccacgtggaggtggtgaagttcctgctggaggcctgcaaggtgaaccccttccccaaggacagatggaacaacacccccatggacgaggccctgcacttcggccaccacgacgtgttcaagatcctgcaggagtaccaggtgcagtacaccccccagggcgacagcgacaacggcaaggagaaccagaccgtgcacaagaacctggacggcctgctgtag

SEQ ID NO: 83240 - DNA, 1797 bp, synthetic construct
  misc_feature 1..1797: note = Description of Artificial Sequence: Synthetic coding sequence
  source 1..1797: mol_type = other DNA
atgatgagactgagaggcagcggcatgctgagagacctgctgctgagaagccccgccggcgtgagcgccaccctgagaagagcccagcccctggtgaccctgtgcagaagacccagaggcggcggcagacccgccgccggccccgccgccgccgccagactgcacccctggtggggcggcggcggctggcccgccgagcccctggccagaggcctgagcagcagccccagcgagatcctgcaggagctgggcaagggcagcacccacccccagcccggcgtgagcccccccgccgcccccgccgcccccggccccaaggacggccccggcgagaccgacgccttcggcaacagcgagggcaaggagctggtggccagcggcgagaacaagatcaagcagggcctgctgcccagcctggaggacctgctgttctacaccatcgccgagggccaggagaagatccccgtgcacaagttcatcaccgccctgaagagcaccggcctgagaaccagcgaccccagactgaaggagtgcatggacatgctgagactgaccctgcagaccaccagcgacggcgtgatgctggacaaggacctgttcaagaagtgcgtgcagagcaacatcgtgctgctgacccaggccttcagaagaaagttcgtgatccccgacttcatgagcttcaccagccacatcgacgagctgtacgagagcgccaagaagcagagcggcggcaaggtggccgactacatcccccagctggccaagttcagccccgacctgtggggcgtgagcgtgtgcaccgtggacggccagagacacagcaccggcgacaccaaggtgcccttctgcctgcagagctgcgtgaagcccctgaagtacgccatcgccgtgaacgacctgggcaccgagtacgtgcacagatacgtgggcaaggagcccagcggcctgagattcaacaagctgttcctgaacgaggacgacaagccccacaaccccatggtgaacgccggcgccatcgtggtgaccagcctgatcaagcagggcgtgaacaacgccgagaagttcgactacgtgatgcagttcctgaacaagatggccggcaacgagtacgtgggcttcagcaacgccaccttccagagcgagagagagagcggcgacagaaacttcgccatcggctactacctgaaggagaagaagtgcttccccgagggcaccgacatggtgggcatcctggacttctacttccagctgtgcagcatcgaggtgacctgcgagagcgccagcgtgatggccgccaccctggccaacggcggcttctgccccatcaccggcgagagagtgctgagccccgaggccgtgagaaacaccctgagcctgatgcacagctgcggcatgtacgacttcagcggccagttcgccttccacgtgggcctgcccgccaagagcggcgtggccggcggcatcctgctggtggtgcccaacgtgatgggcatgatgtgctggagcccccccctggacaagatgggcaacagcgtgaagggcatccacttctgccacgacctggtgagcctgtgcaacttccacaactacgacaacctgagacacttcgccaagaagctggaccccagaagagagggcggcgaccagagacacagcttcggccccctggactacgagagcctgcagcaggagctggccctgaaggagaccgtgtggaagaaggtgagccccgagagcaacgaggacatcagcaccaccgtggtgtacagaatggagagcctgggcgagaagagctag

SEQ ID NO: 83241 - DNA, 525 bp, synthetic construct
  misc_feature 1..525: note = Description of Artificial Sequence: Synthetic coding sequence
  source 1..525: mol_type = other DNA
atgggcatgatgtgctggagcccccccctggacaagatgggcaacagcgtgaagggcatccacttctgccacgacctggtgagcctgtgcaacttccacaactacgacaacctgagacacttcgccaagaagctggaccccagaagagagggcggcgaccagagagtgaagagcgtgatcaacctgctgttcgccgcctacaccggcgacgtgagcgccctgagaagattcgccctgagcgccatggacatggagcagagagactacgacagcagaaccgccctgcacgtggccgccgccgagggccacgtggaggtggtgaagttcctgctggaggcctgcaaggtgaaccccttccccaaggacagatggaacaacacccccatggacgaggccctgcacttcggccaccacgacgtgttcaagatcctgcaggagtaccaggtgcagtacaccccccagggcgacagcgacaacggcaaggagaaccagaccgtgcacaagaacctggacggcctgctgtag

SEQ ID NO: 83242 - DNA, 1809 bp, synthetic construct
  misc_feature 1..1809: note = Description of Artificial Sequence: Synthetic coding sequence
  source 1..1809: mol_type = other DNA
atgagaagcatgaaggccctgcagaaggccctgagcagagccggcagccactgcggcagaggcggctggggccaccccagcagaagccccctgctgggcggcggcgtgagacaccacctgagcgaggccgccgcccagggcagagagaccccccacagccaccagccccagcaccaggaccacgacagcagcgagagcggcatgctgagcagactgggcgacctgctgttctacaccatcgccgagggccaggagagaatccccatccacaagttcaccaccgccctgaaggccaccggcctgcagaccagcgaccccagactgagagactgcatgagcgagatgcacagagtggtgcaggagagcagcagcggcggcctgctggacagagacctgttcagaaagtgcgtgagcagcaacatcgtgctgctgacccaggccttcagaaagaagttcgtgatccccgacttcgaggagttcaccggccacgtggacagaatcttcgaggacgtgaaggagctgaccggcggcaaggtggccgcctacatcccccagctggccaagagcaaccccgacctgtggggcgtgagcctgtgcaccgtggacggccagagacacagcgtgggccacaccaagatccccttctgcctgcagagctgcgtgaagcccctgacctacgccatcagcatcagcaccctgggcaccgactacgtgcacaagttcgtgggcaaggagcccagcggcctgagatacaacaagctgagcctgaacgaggagggcatcccccacaaccccatggtgaacgccggcgccatcgtggtgagcagcctgatcaagatggactgcaacaaggccgagaagttcgacttcgtgctgcagtacctgaacaagatggccggcaacgagtacatgggcttcagcaacgccaccttccagagcgagaaggagaccggcgacagaaactacgccatcggctactacctgaaggagaagaagtgcttccccaagggcgtggacatgatggccgccctggacctgtacttccagctgtgcagcgtggaggtgacctgcgagagcggcagcgtgatggccgccaccctggccaacggcggcatctgccccatcaccggcgagagcgtgctgagcgccgaggccgtgagaaacaccctgagcctgatgcacagctgcggcatgtacgacttcagcggccagttcgccttccacgtgggcctgcccgccaagagcgccgtgagcggcgccatcctgctggtggtgcccaacgtgatgggcatgatgtgcctgagcccccccctggacaagctgggcaacagccacagaggcaccagcttctgccagaagctggtgagcctgttcaacttccacaactacgacaacctgagacactgcgccagaaagctggaccccagaagagagggcgccgagatcagaaacaagaccgtggtgaacctgctgttcgccgcctacagcggcgacgtgagcgccctgagaagattcgccctgagcgccatggacatggagcagaaggactacgacagcagaaccgccctgcacgtggccgccgccgagggccacatcgaggtggtgaagttcctgatcgaggcctgcaaggtgaaccccttcgccaaggacagatggggcaacatccccctggacgacgccgtgcagttcaaccacctggaggtggtgaagctgctgcaggactaccaggacagctacaccctgagcgagacccaggccgaggccgccgccgaggccctgagcaaggagaacctggagagcatggtgtag

SEQ ID NO: 83243 - DNA, 534 bp, synthetic construct
  misc_feature 1..534: note = Description of Artificial Sequence: Synthetic coding sequence
  source 1..534: mol_type = other DNA
atgagaagcatgaaggccctgcagaaggccctgagcagagccggcagccactgcggcagaggcggctggggccaccccagcagaagccccctgctgggcggcggcgtgagacaccacctgagcgaggccgccgcccagggcagagagaccccccacagccaccagccccagcaccaggaccacgacagcagcgagagcggcatgctgagcagactgggcgacctgctgttctacaccatcgccgagggccaggagagaatccccatccacaagttcaccaccgccctgaaggccaccggcctgcagaccagcgaccccagactgagagactgcatgagcgagatgcacagagtggtgcaggagagcagcagcggcggcctgctggacagagacctgttcagaaagtggcagcccaccagcctgagctggcccagccagacccagacctgcggcgtgagcccctgcgccctgtggatggtgaacggcaccctgtgggccacccagagaagccccagcgcctgcagccccgtgtag

SEQ ID NO: 83244 - DNA, 2049 bp, synthetic construct
  misc_feature 1..2049: note = Description of Artificial Sequence: Synthetic coding sequence
  source 1..2049: mol_type = other DNA
atgtgcggcatcttcgcctacatgaactacagagtgcccagaaccagaaaggagatcttcgagaccctgatcaagggcctgcagagactggagtacagaggctacgacagcgccggcgtggccatcgacggcaacaaccacgaggtgaaggagagacacatccagctggtgaagaagagaggcaaggtgaaggccctggacgaggagctgtacaagcaggacagcatggacctgaaggtggagttcgagacccacttcggcatcgcccacaccagatgggccacccacggcgtgcccagcgccgtgaacagccacccccagagaagcgacaagggcaacgagttcgtggtgatccacaacggcatcatcaccaactacaaggacctgagaaagttcctggagagcaagggctacgagttcgagagcgagaccgacaccgagaccatcgccaagctgatcaagtacgtgttcgacaacagagagaccgaggacatcaccttcagcaccctggtggagagagtgatccagcagctggagggcgccttcgccctggtgttcaagagcgtgcactaccccggcgaggccgtggccaccagaagaggcagccccctgctgatcggcgtgagaagcaagtacaagctgagcaccgagcagatccccatcctgtacagaacctgcaccctggagaacgtgaagaacatctgcaagaccagaatgaagagactggacagcagcgcctgcctgcacgccgtgggcgacaaggccgtggagttcttcttcgccagcgacgccagcgccatcatcgagcacaccaacagagtgatcttcctggaggacgacgacatcgccgccgtggccgacggcaagctgagcatccacagagtgaagagaagcgccagcgacgaccccagcagagccatccagaccctgcagatggagctgcagcagatcatgaagggcaacttcagcgccttcatgcagaaggagatcttcgagcagcccgagagcgtgttcaacaccatgagaggcagagtgaacttcgagaccaacaccgtgctgctgggcggcctgaaggaccacctgaaggagatcagaagatgcagaagactgatcgtgatcggctgcggcaccagctaccacgccgccgtggccaccagacaggtgctggaggagctgaccgagctgcccgtgatggtggagctggccagcgacttcctggacagaaacacccccgtgttcagagacgacgtgtgcttcttcatcagccagagcggcgagaccgccgacaccctgctggccctgagatactgcaaggacagaggcgccctgaccgtgggcgtgaccaacaccgtgggcagcagcatcagcagagagaccgactgcggcgtgcacatcaacgccggccccgagatcggcgtggccagcaccaaggcctacaccagccagttcatcagcctggtgatgttcggcctgatgatgagcgaggacagaatcagcctgcagaacagaagacaggagatcatcagaggcctgagaagcctgcccgagctgatcaaggaggtgctgagcctggaggagaagatccacgacctggccctggagctgtacacccagagaagcctgctggtgatgggcagaggctacaactacgccacctgcctggagggcgccctgaagatcaaggagatcacctacatgcacagcgagggcatcctggccggcgagctgaagcacggccccctggccctgatcgacaagcagatgcccgtgatcatggtgatcatgaaggacccctgcttcgccaagtgccagaacgccctgcagcaggtgaccgccagacagggcagacccatcatcctgtgcagcaaggacgacaccgagagcagcaagttcgcctacaagaccatcgagctgccccacaccgtggactgcctgcagggcatcctgagcgtgatccccctgcagctgctgagcttccacctggccgtgctgagaggctacgacgtggacttccccagaaacctggccaagagcgtgaccgtggagtag

SEQ ID NO: 83245 - DNA, 1086 bp, synthetic construct
  misc_feature 1..1086: note = Description of Artificial Sequence: Synthetic coding sequence
  source 1..1086: mol_type = other DNA
atggccggcggcagacacagaagagtggtgggcaccctgcacctgctgctgctggtggccgccctgccctgggccagcagaggcgtgagccccagcgccagcgcctggcccgaggagaagaactaccaccagcccgccatcctgaacagcagcgccctgagacagatcgccgagggcaccagcatcagcgagatgtggcagaacgacctgcagcccctgctgatcgagagataccccggcagccccggcagctacgccgccagacagcacatcatgcagagaatccagagactgcaggccgactgggtgctggagatcgacaccttcctgagccagaccccctacggctacagaagcttcagcaacatcatcagcaccctgaaccccaccgccaagagacacctggtgctggcctgccactacgacagcaagtacttcagccactggaacaacagagtgttcgtgggcgccaccgacagcgccgtgccctgcgccatgatgctggagctggccagagccctggacaagaagctgctgagcctgaagaccgtgagcgacagcaagcccgacctgagcctgcagctgatcttcttcgacggcgaggaggccttcctgcactggagcccccaggacagcctgtacggcagcagacacctggccgccaagatggccagcaccccccacccccccggcgccagaggcaccagccagctgcacggcatggacctgctggtgctgctggacctgatcggcgcccccaaccccaccttccccaacttcttccccaacagcgccagatggttcgagagactgcaggccatcgagcacgagctgcacgagctgggcctgctgaaggaccacagcctggagggcagatacttccagaactacagctacggcggcgtgatccaggacgaccacatccccttcctgagaagaggcgtgcccgtgctgcacctgatccccagccccttccccgaggtgtggcacaccatggacgacaacgaggagaacctggacgagagcaccatcgacaacctgaacaagatcctgcaggtgttcgtgctggagtacctgcacctgtag

SEQ ID NO: 83246 - DNA, 939 bp, synthetic construct
  misc_feature 1..939: note = Description of Artificial Sequence: Synthetic coding sequence
  source 1..939: mol_type = other DNA
atggccggcggcagacacagaagagtggtgggcaccctgcacctgctgctgctggtggccgccctgccctgggccagcagaggcgtgagccccagcgccagcgcctggcccgaggagaagcacatcatgcagagaatccagagactgcaggccgactgggtgctggagatcgacaccttcctgagccagaccccctacggctacagaagcttcagcaacatcatcagcaccctgaaccccaccgccaagagacacctggtgctggcctgccactacgacagcaagtacttcagccactggaacaacagagtgttcgtgggcgccaccgacagcgccgtgccctgcgccatgatgctggagctggccagagccctggacaagaagctgctgagcctgaagaccgtgagcgacagcaagcccgacctgagcctgcagctgatcttcttcgacggcgaggaggccttcctgcactggagcccccaggacagcctgtacggcagcagacacctggccgccaagatggccagcaccccccacccccccggcgccagaggcaccagccagctgcacggcatggacctgctggtgctgctggacctgatcggcgcccccaaccccaccttccccaacttcttccccaacagcgccagatggttcgagagactgcaggccatcgagcacgagctgcacgagctgggcctgctgaaggaccacagcctggagggcagatacttccagaactacagctacggcggcgtgatccaggacgaccacatccccttcctgagaagaggcgtgcccgtgctgcacctgatccccagccccttccccgaggtgtggcacaccatggacgacaacgaggagaacctggacgagagcaccatcgacaacctgaacaagatcctgcaggtgttcgtgctggagtacctgcacctgtag

SEQ ID NO: 83247 - DNA, 2328 bp, synthetic construct
  misc_feature 1..2328: note = Description of Artificial Sequence: Synthetic coding sequence
  source 1..2328: mol_type = other DNA
atggccgccctggacagcctgagcctgttcaccagcctgggcctgagcgagcagaaggccagagagaccctgaagaacagcgccctgagcgcccagctgagagaggccgccacccaggcccagcagaccctgggcagcaccatcgacaaggccaccggcatcctgctgtacggcctggccagcagactgagagacaccagaagactgagcttcctggtgagctacatcgccagcaagaagatccacaccgagccccagctgagcgccgccctggagtacgtgagaagccaccccctggaccccatcgacaccgtggacttcgagagagagtgcggcgtgggcgtgatcgtgacccccgagcagatcgaggaggccgtggaggccgccatcaacagacacagaccccagctgctggtggagagataccacttcaacatgggcctgctgatgggcgaggccagagccgtgctgaagtgggccgacggcaagatgatcaagaacgaggtggacatgcaggtgctgcacctgctgggccccaagctggaggccgacctggagaagaagttcaaggtggccaaggccagactggaggagaccgacagaagaaccgccaaggacgtggtggagaacggcgagaccgccgaccagaccctgagcctgatggagcagctgagaggcgaggccctgaagttccacaagcccggcgagaactacaagacccccggctacgtggtgaccccccacaccatgaacctgctgaagcagcacctggagatcaccggcggccaggtgagaaccagattcccccccgagcccaacggcatcctgcacatcggccacgccaaggccatcaacttcaacttcggctacgccaaggccaacaacggcatctgcttcctgagattcgacgacaccaaccccgagaaggaggaggccaagttcttcaccgccatctgcgacatggtggcctggctgggctacaccccctacaaggtgacctacgccagcgactacttcgaccagctgtacgcctgggccgtggagctgatcagaagaggcctggcctacgtgtgccaccagagaggcgaggagctgaagggccacaacaccctgcccagcccctggagagacagacccatggaggagagcctgctgctgttcgaggccatgagaaagggcaagttcagcgagggcgaggccaccctgagaatgaagctggtgatggaggacggcaagatggaccccgtggcctacagagtgaagtacaccccccaccacagaaccggcgacaagtggtgcatctaccccacctacgactacacccactgcctgtgcgacagcatcgagcacatcacccacagcctgtgcaccaaggagttccaggccagaagaagcagctacttctggctgtgcaacgccctggacgtgtactgccccgtgcagtgggagtacggcagactgaacctgcactacgccgtggtgagcaagagaaagatcctgcagctggtggccaccggcgccgtgagagactgggacgaccccagactgttcaccctgaccgccctgagaagaagaggcttcccccccgaggccatcaacaacttctgcgccagagtgggcgtgaccgtggcccagaccaccatggagccccacctgctggaggcctgcgtgagagacgtgctgaacgacaccgcccccagagccatggccgtgctggagagcctgagagtgatcatcaccaacttccccgccgccaagagcctggacatccaggtgcccaacttccccgccgacgagaccaagggcttccaccaggtgcccttcgcccccatcgtgttcatcgagagaaccgacttcaaggaggagcccgagcccggcttcaagagactggcctggggccagcccgtgggcctgagacacaccggctacgtgatcgagctgcagcacgtggtgaagggccccagcggctgcgtggagagcctggaggtgacctgcagaagagccgacgccggcgagaagcccaaggccttcatccactgggtgagccagcccctgatgtgcgaggtgagactgtacgagagactgttccagcacaagaaccccgaggaccccaccgaggtgcccggcggcttcctgagcgacctgaacctggccagcctgcacgtggtggacgccgccctggtggactgcagcgtggccctggccaagcccttcgacaagttccagttcgagagactgggctacttcagcgtggaccccgacagccaccagggcaagctggtgttcaacagaaccgtgaccctgaaggaggaccccggcaaggtgtag

SEQ ID NO: 83248 - DNA, 2295 bp, synthetic construct
  misc_feature 1..2295: note = Description of Artificial Sequence: Synthetic coding sequence
  source 1..2295: mol_type = other DNA
atggccgccctggacagcctgagcctgttcaccagcctgggcctgagcgagcagaaggccagagagaccctgaagaacagcgccctgagcgcccagctgagagaggccgccacccaggcccagcagaccctgggcagcaccatcgacaaggccaccggcatcctgctgtacggcctggccagcagactgagagacaccagaagactgagcttcctggtgagctacatcgccaccgccctggagtacgtgagaagccaccccctggaccccatcgacaccgtggacttcgagagagagtgcggcgtgggcgtgatcgtgacccccgagcagatcgaggaggccgtggaggccgccatcaacagacacagaccccagctgctggtggagagataccacttcaacatgggcctgctgatgggcgaggccagagccgtgctgaagtgggccgacggcaagatgatcaagaacgaggtggacatgcaggtgctgcacctgctgggccccaagctggaggccgacctggagaagaagttcaaggtggccaaggccagactggaggagaccgacagaagaaccgccaaggacgtggtggagaacggcgagaccgccgaccagaccctgagcctgatggagcagctgagaggcgaggccctgaagttccacaagcccggcgagaactacaagacccccggctacgtggtgaccccccacaccatgaacctgctgaagcagcacctggagatcaccggcggccaggtgagaaccagattcccccccgagcccaacggcatcctgcacatcggccacgccaaggccatcaacttcaacttcggctacgccaaggccaacaacggcatctgcttcctgagattcgacgacaccaaccccgagaaggaggaggccaagttcttcaccgccatctgcgacatggtggcctggctgggctacaccccctacaaggtgacctacgccagcgactacttcgaccagctgtacgcctgggccgtggagctgatcagaagaggcctggcctacgtgtgccaccagagaggcgaggagctgaagggccacaacaccctgcccagcccctggagagacagacccatggaggagagcctgctgctgttcgaggccatgagaaagggcaagttcagcgagggcgaggccaccctgagaatgaagctggtgatggaggacggcaagatggaccccgtggcctacagagtgaagtacaccccccaccacagaaccggcgacaagtggtgcatctaccccacctacgactacacccactgcctgtgcgacagcatcgagcacatcacccacagcctgtgcaccaaggagttccaggccagaagaagcagctacttctggctgtgcaacgccctggacgtgtactgccccgtgcagtgggagtacggcagactgaacctgcactacgccgtggtgagcaagagaaagatcctgcagctggtggccaccggcgccgtgagagactgggacgaccccagactgttcaccctgaccgccctgagaagaagaggcttcccccccgaggccatcaacaacttctgcgccagagtgggcgtgaccgtggcccagaccaccatggagccccacctgctggaggcctgcgtgagagacgtgctgaacgacaccgcccccagagccatggccgtgctggagagcctgagagtgatcatcaccaacttccccgccgccaagagcctggacatccaggtgcccaacttccccgccgacgagaccaagggcttccaccaggtgcccttcgcccccatcgtgttcatcgagagaaccgacttcaaggaggagcccgagcccggcttcaagagactggcctggggccagcccgtgggcctgagacacaccggctacgtgatcgagctgcagcacgtggtgaagggccccagcggctgcgtggagagcctggaggtgacctgcagaagagccgacgccggcgagaagcccaaggccttcatccactgggtgagccagcccctgatgtgcgaggtgagactgtacgagagactgttccagcacaagaaccccgaggaccccaccgaggtgcccggcggcttcctgagcgacctgaacctggccagcctgcacgtggtggacgccgccctggtggactgcagcgtggccctggccaagcccttcgacaagttccagttcgagagactgggctacttcagcgtggaccccgacagccaccagggcaagctggtgttcaacagaaccgtgaccctgaaggaggaccccggcaaggtgtag

SEQ ID NO: 83249 - DNA, 849 bp, synthetic construct
  misc_feature 1..849: note = Description of Artificial Sequence: Synthetic coding sequence
  source 1..849: mol_type = other DNA
atgcccacctgcagactgggccccaagttcctgctggtgagcggcgtgagcgccatggccgccctggacagcctgagcctgttcaccagcctgggcctgagcgagcagaaggccagagagaccctgaagaacagcgccctgagcgcccagctgagagaggccgccacccaggcccagcagaccctgggcagcaccatcgacaaggccaccggcatcctgctgtacggcctggccagcagactgagagacaccagaagactgagcttcctggtgagctacatcgccagcaagaagatccacaccgagccccagctgagcgccgccctggagtacgtgagaagccaccccctggaccccatcgacaccgtggacttcgagagagagtgcggcgtgggcgtgatcgtgacccccgagcagatcgaggaggccgtggaggccgccatcaacagacacagaccccagctgctggtggagagataccacttcaacatgggcctgctgatgggcgaggccagagccgtgctgaagtgggccgacggcaagatgatcaagaacgaggtggacatgcaggtgctgcacctgctgggccccaagctggaggccgacctggagaagaagttcaaggtggccaaggccagactggaggagaccgacagaagaaccgccaaggacgtggtggagaacggcgagaccgccgaccagaccctgagcctgatggagcagctgagaggcgaggccctgaagttccacaagcccggcacctaccccgtgcccgccagaacccagtggaaccccgcctactggacctgccagagccaccagttccagctgtggctgtgccaggtgtag

SEQ ID NO: 83250 - DNA, 2874 bp, synthetic construct
  misc_feature 1..2874: note = Description of Artificial Sequence: Synthetic coding sequence
  source 1..2874: mol_type = other DNA
atgaacttcgccgagagagagggcagcaagagatactgcatccagaccaagcacgtggccatcctgtgcgccgtggtggtgggcgtgggcctgatcgtgggcctggccgtgggcctgaccagaagctgcgacagcagcggcgacggcggccccggcaccgcccccgcccccagccacctgcccagcagcaccgccagccccagcggcccccccgcccaggaccaggacatctgccccgccagcgaggacgagagcggccagtggaagaacttcagactgcccgacttcgtgaaccccgtgcactacgacctgcacgtgaagcccctgctggaggaggacacctacaccggcaccgtgagcatcagcatcaacctgagcgcccccaccagatacctgtggctgcacctgagagagaccagaatcaccagactgcccgagctgaagagacccagcggcgaccaggtgcaggtgagaagatgcttcgagtacaagaagcaggagtacgtggtggtggaggccgaggaggagctgacccccagcagcggcgacggcctgtacctgctgaccatggagttcgccggctggctgaacggcagcctggtgggcttctacagaaccacctacaccgagaacggccaggtgaagagcatcgtggccaccgaccacgagcccaccgacgccagaaagagcttcccctgcttcgacgagcccaacaagaaggccacctacaccatcagcatcacccaccccaaggagtacggcgccctgagcaacatgcccgtggccaaggaggagagcgtggacgacaagtggaccagaaccaccttcgagaagagcgtgcccatgagcacctacctggtgtgcttcgccgtgcaccagttcgacagcgtgaagagaatcagcaacagcggcaagcccctgaccatctacgtgcagcccgagcagaagcacaccgccgagtacgccgccaacatcaccaagagcgtgttcgactacttcgaggagtacttcgccatgaactacagcctgcccaagctggacaagatcgccatccccgacttcggcaccggcgccatggagaactggggcctgatcacctacagagagaccaacctgctgtacgaccccaaggagagcgccagcagcaaccagcagagagtggccaccgtggtggcccacgagctggtgcaccagtggttcggcaacatcgtgaccatggactggtgggaggacctgtggctgaacgagggcttcgccagcttcttcgagttcctgggcgtgaaccacgccgagaccgactggcagatgagagaccagatgctgctggaggacgtgctgcccgtgcaggaggacgacagcctgatgagcagccaccccatcatcgtgaccgtgaccacccccgacgagatcaccagcgtgttcgacggcatcagctacagcaagggcagcagcatcctgagaatgctggaggactggatcaagcccgagaacttccagaagggctgccagatgtacctggagaagtaccagttcaagaacgccaagaccagcgacttctgggccgccctggaggaggccagcagactgcccgtgaaggaggtgatggacacctggaccagacagatgggctaccccgtgctgaacgtgaacggcgtgaagaacatcacccagaagagattcctgctggaccccagagccaaccccagccagccccccagcgacctgggctacacctggaacatccccgtgaagtggaccgaggacaacatcaccagcagcgtgctgttcaacagaagcgagaaggagggcatcaccctgaacagcagcaaccccagcggcaacgccttcctgaagatcaaccccgaccacatcggcttctacagagtgaactacgaggtggccacctgggacagcatcgccaccgccctgagcctgaaccacaagaccttcagcagcgccgacagagccagcctgatcgacgacgccttcgccctggccagagcccagctgctggactacaaggtggccctgaacctgaccaagtacctgaagagagaggagaacttcctgccctggcagagagtgatcagcgccgtgacctacatcatcagcatgttcgaggacgacaaggagctgtaccccatgatcgaggagtacttccagggccaggtgaagcccatcgccgacagcctgggctggaacgacgccggcgaccacgtgaccaagctgctgagaagcagcgtgctgggcttcgcctgcaagatgggcgacagagaggccctgaacaacgccagcagcctgttcgagcagtggctgaacggcaccgtgagcctgcccgtgaacctgagactgctggtgtacagatacggcatgcagaacagcggcaacgagatcagctggaactacaccctggagcagtaccagaagaccagcctggcccaggagaaggagaagctgctgtacggcctggccagcgtgaagaacgtgaccctgctgagcagatacctggacctgctgaaggacaccaacctgatcaagacccaggacgtgttcaccgtgatcagatacatcagctacaacagctacggcaagaacatggcctggaactggatccagctgaactgggactacctggtgaacagatacaccctgaacaacagaaacctgggcagaatcgtgaccatcgccgagcccttcaacaccgagctgcagctgtggcagatggagagcttcttcgccaagtacccccaggccggcgccggcgagaagcccagagagcaggtgctggagaccgtgaagaacaacatcgagtggctgaagcagcacagaaacaccatcagagagtggttcttcaacctgctggagagcggctag

SEQ ID NO: 83251 - DNA, 4539 bp, synthetic construct
  misc_feature 1..4539: note = Description of Artificial Sequence: Synthetic coding sequence
  source 1..4539: mol_type = other DNA
atggccaccctgagcctgaccgtgaacagcggcgacccccccctgggcgccctgctggccgtggagcacgtgaaggacgacgtgagcatcagcgtggaggagggcaaggagaacatcctgcacgtgagcgagaacgtgatcttcaccgacgtgaacagcatcctgagatacctggccagagtggccaccaccgccggcctgtacggcagcaacctgatggagcacaccgagatcgaccactggctggagttcagcgccaccaagctgagcagctgcgacagcttcaccagcaccatcaacgagctgaaccactgcctgagcctgagaacctacctggtgggcaacagcctgagcctggccgacctgtgcgtgtgggccaccctgaagggcaacgccgcctggcaggagcagctgaagcagaagaaggcccccgtgcacgtgaagagatggttcggcttcctggaggcccagcaggccttccagagcgtgggcaccaagtgggacgtgagcaccaccaaggccagagtggcccccgagaagaagcaggacgtgggcaagttcgtggagctgcccggcgccgagatgggcaaggtgaccgtgagattcccccccgaggccagcggctacctgcacatcggccacgccaaggccgccctgctgaaccagcactaccaggtgaacttcaagggcaagctgatcatgagattcgacgacaccaaccccgagaaggagaaggaggacttcgagaaggtgatcctggaggacgtggccatgctgcacatcaagcccgaccagttcacctacaccagcgaccacttcgagaccatcatgaagtacgccgagaagctgatccaggagggcaaggcctacgtggacgacacccccgccgagcagatgaaggccgagagagagcagagaatcgacagcaagcacagaaagaaccccatcgagaagaacctgcagatgtgggaggagatgaagaagggcagccagttcggccagagctgctgcctgagagccaagatcgacatgagcagcaacaacggctgcatgagagaccccaccctgtacagatgcaagatccagccccaccccagaaccggcaacaagtacaacgtgtaccccacctacgacttcgcctgccccatcgtggacagcatcgagggcgtgacccacgccctgagaaccaccgagtaccacgacagagacgagcagttctactggatcatcgaggccctgggcatcagaaagccctacatctgggagtacagcagactgaacctgaacaacaccgtgctgagcaagagaaagctgacctggttcgtgaacgagggcctggtggacggctgggacgaccccagattccccaccgtgagaggcgtgctgagaagaggcatgaccgtggagggcctgaagcagttcatcgccgcccagggcagcagcagaagcgtggtgaacatggagtgggacaagatctgggccttcaacaagaaggtgatcgaccccgtggcccccagatacgtggccctgctgaagaaggaggtgatccccgtgaacgtgcccgaggcccaggaggagatgaaggaggtggccaagcaccccaagaaccccgaggtgggcctgaagcccgtgtggtacagccccaaggtgttcatcgagggcgccgacgccgagaccttcagcgagggcgagatggtgaccttcatcaactggggcaacctgaacatcaccaagatccacaagaacgccgacggcaagatcatcagcctggacgccaagctgaacctggagaacaaggactacaagaagaccaccaaggtgacctggctggccgagaccacccacgccctgcccatccccgtgatctgcgtgacctacgagcacctgatcaccaagcccgtgctgggcaaggacgaggacttcaagcagtacgtgaacaagaacagcaagcacgaggagctgatgctgggcgacccctgcctgaaggacctgaagaagggcgacatcatccagctgcagagaagaggcttcttcatctgcgaccagccctacgagcccgtgagcccctacagctgcaaggaggccccctgcgtgctgatctacatccccgacggccacaccaaggagatgcccaccagcggcagcaaggagaagaccaaggtggaggccaccaagaacgagaccagcgcccccttcaaggagagacccacccccagcctgaacaacaactgcaccaccagcgaggacagcctggtgctgtacaacagagtggccgtgcagggcgacgtggtgagagagctgaaggccaagaaggcccccaaggaggacgtggacgccgccgtgaagcagctgctgagcctgaaggccgagtacaaggagaagaccggccaggagtacaagcccggcaacccccccgccgagatcggccagaacatcagcagcaacagcagcgccagcatcctggagagcaagagcctgtacgacgaggtggccgcccagggcgaggtggtgagaaagctgaaggccgagaagagccccaaggccaagatcaacgaggccgtggagtgcctgctgagcctgaaggcccagtacaaggagaagaccggcaaggagtacatccccggccagccccccctgagccagagcagcgacagcagccccaccagaaacagcgagcccgccggcctggagacccccgaggccaaggtgctgttcgacaaggtggccagccagggcgaggtggtgagaaagctgaagaccgagaaggcccccaaggaccaggtggacatcgccgtgcaggagctgctgcagctgaaggcccagtacaagagcctgatcggcgtggagtacaagcccgtgagcgccaccggcgccgaggacaaggacaagaagaagaaggagaaggagaacaagagcgagaagcagaacaagccccagaagcagaacgacggccagagaaaggaccccagcaagaaccagggcggcggcctgagcagcagcggcgccggcgagggccagggccccaagaagcagaccagactgggcctggaggccaagaaggaggagaacctggccgactggtacagccaggtgatcaccaagagcgagatgatcgagtaccacgacatcagcggctgctacatcctgagaccctgggcctacgccatctgggaggccatcaaggacttcttcgacgccgagatcaagaagctgggcgtggagaactgctacttccccatgttcgtgagccagagcgccctggagaaggagaagacccacgtggccgacttcgcccccgaggtggcctgggtgaccagaagcggcaagaccgagctggccgagcccatcgccatcagacccaccagcgagaccgtgatgtaccccgcctacgccaagtgggtgcagagccacagagacctgcccatcaagctgaaccagtggtgcaacgtggtgagatgggagttcaagcacccccagcccttcctgagaaccagagagttcctgtggcaggagggccacagcgccttcgccaccatggaggaggccgccgaggaggtgctgcagatcctggacctgtacgcccaggtgtacgaggagctgctggccatccccgtggtgaagggcagaaagaccgagaaggagaagttcgccggcggcgactacaccaccaccatcgaggccttcatcagcgccagcggcagagccatccagggcggcaccagccaccacctgggccagaacttcagcaagatgttcgagatcgtgttcgaggaccccaagatccccggcgagaagcagttcgcctaccagaacagctggggcctgaccaccagaaccatcggcgtgatgaccatggtgcacggcgacaacatgggcctggtgctgccccccagagtggcctgcgtgcaggtggtgatcatcccctgcggcatcaccaacgccctgagcgaggaggacaaggaggccctgatcgccaagtgcaacgactacagaagaagactgctgagcgtgaacatcagagtgagagccgacctgagagacaactacagccccggctggaagttcaaccactgggagctgaagggcgtgcccatcagactggaggtgggccccagagacatgaagagctgccagttcgtggccgtgagaagagacaccggcgagaagctgaccgtggccgagaacgaggccgagaccaagctgcaggccatcctggaggacatccaggtgaccctgttcaccagagccagcgaggacctgaagacccacatggtggtggccaacaccatggaggacttccagaagatcctggacagcggcaagatcgtgcagatccccttctgcggcgagatcgactgcgaggactggatcaagaagaccaccgccagagaccaggacctggagcccggcgcccccagcatgggcgccaagagcctgtgcatccccttcaagcccctgtgcgagctgcagcccggcgccaagtgcgtgtgcggcaagaaccccgccaagtactacaccctgttcggcagaagctactag

SEQ ID NO: 83252 - DNA, 2964 bp, synthetic construct
  misc_feature 1..2964: note = Description of Artificial Sequence: Synthetic coding sequence
  source 1..2964: mol_type = other DNA
atggccaccctgagcctgaccgtgaacagcggcgacccccccctgggcgccctgctggccgtggagcacgtgaaggacgacgtgagcatcagcgtggaggagggcaaggagaacatcctgcacgtgagcgagaacgtgatcttcaccgacgtgaacagcatcctgagatacctggccagagtggccaccaccgccggcctgtacggcagcaacctgatggagcacaccgagatcgaccactggctggagttcagcgccaccaagctgagcagctgcgacagcttcaccagcaccatcaacgagctgaaccactgcctgagcctgagaacctacctggtgggcaacagcctgagcctggccgacctgtgcgtgtgggccaccctgaagggcaacgccgcctggcaggagcagctgaagcagaagaaggcccccgtgcacgtgaagagatggttcggcttcctggaggcccagcaggccttccagagcgtgggcaccaagtgggacgtgagcaccaccaaggccagagtggcccccgagaagaagcaggacgtgggcaagttcgtggagctgcccggcgccgagatgggcaaggtgaccgtgagattcccccccgaggccagcggctacctgcacatcggccacgccaaggccgccctgctgaaccagcactaccaggtgaacttcaagggcaagctgatcatgagattcgacgacaccaaccccgagaaggagaaggaggacttcgagaaggtgatcaagagcgtggtgatgaccctgtgccagaagagcatcaaggtgaccggcctgcccaacaccttcatggtgatcctggaggacgtggccatgctgcacatcaagcccgaccagttcacctacaccagcgaccacttcgagaccatcatgaagtacgccgagaagctgatccaggagggcaaggcctacgtggacgacacccccgccgagcagatgaaggccgagagagagcagagaatcgacagcaagcacagaaagaaccccatcgagaagaacctgcagatgtgggaggagatgaagaagggcagccagttcggccagagctgctgcctgagagccaagatcgacatgagcagcaacaacggctgcatgagagaccccaccctgtacagatgcaagatccagccccaccccagaaccggcaacaagtacaacgtgtaccccacctacgacttcgcctgccccatcgtggacagcatcgagggcgtgacccacgccctgagaaccaccgagtaccacgacagagacgagcagttctactggatcatcgaggccctgggcatcagaaagccctacatctgggagtacagcagactgaacctgaacaacaccgtgctgagcaagagaaagctgacctggttcgtgaacgagggcctggtggacggctgggacgaccccagattccccaccgtgagaggcgtgctgagaagaggcatgaccgtggagggcctgaagcagttcatcgccgcccagggcagcagcagaagcgtggtgaacatggagtgggacaagatctgggccttcaacaagaaggtgatcgaccccgtggcccccagatacgtggccctgctgaagaaggaggtgatccccgtgaacgtgcccgaggcccaggaggagatgaaggaggtggccaagcaccccaagaaccccgaggtgggcctgaagcccgtgtggtacagccccaaggtgttcatcgagggcgccgacgccgagaccttcagcgagggcgagatggtgaccttcatcaactggggcaacctgaacatcaccaagatccacaagaacgccgacggcaagatcatcagcctggacgccaagctgaacctggagaacaaggactacaagaagaccaccaaggtgacctggctggccgagaccacccacgccctgcccatccccgtgatctgcgtgacctacgagcacctgatcaccaagcccgtgctgggcaaggacgaggacttcaagcagtacgtgaacaagaacagcaagcacgaggagctgatgctgggcgacccctgcctgaaggacctgaagaagggcgacatcatccagctgcagagaagaggcttcttcatctgcgaccagccctacgagcccgtgagcccctacagctgcaaggaggccccctgcgtgctgatctacatccccgacggccacaccaaggagatgcccaccagcggcagcaaggagaagaccaaggtggaggccaccaagaacgagaccagcgcccccttcaaggagagacccacccccagcctgaacaacaactgcaccaccagcgaggacagcctggtgctgtacaacagagtggccgtgcagggcgacgtggtgagagagctgaaggccaagaaggcccccaaggaggacgtggacgccgccgtgaagcagctgctgagcctgaaggccgagtacaaggagaagaccggccaggagtacaagcccggcaacccccccgccgagatcggccagaacatcagcagcaacagcagcgccagcatcctggagagcaagagcctgtacgacgaggtggccgcccagggcgaggtggtgagaaagctgaaggccgagaagagccccaaggccaagatcaacgaggccgtggagtgcctgctgagcctgaaggcccagtacaaggagaagaccggcaaggagtacatccccggccagccccccctgagccagagcagcgacagcagccccaccagaaacagcgagcccgccggcctggagacccccgaggccaaggtgctgttcgacaaggtggccagccagggcgaggtggtgagaaagctgaagaccgagaaggcccccaaggaccaggtggacatcgccgtgcaggagctgctgcagctgaaggcccagtacaagagcctgatcggcgtggagtacaagcccgtgagcgccaccggcgccgaggacaaggacaagtag

SEQ ID NO: 83253 - DNA, 2928 bp, synthetic construct
  misc_feature 1..2928: note = Description of Artificial Sequence: Synthetic coding sequence
  source 1..2928: mol_type = other DNA
atggccaccctgagcctgaccgtgaacagcggcgacccccccctgggcgccctgctggccgtggagcacgtgaaggacgacgtgagcatcagcgtggaggagggcaaggagaacatcctgcacgtgagcgagaacgtgatcttcaccgacgtgaacagcatcctgagatacctggccagagtggccaccaccgccggcctgtacggcagcaacctgatggagcacaccgagatcgaccactggctggagttcagcgccaccaagctgagcagctgcgacagcttcaccagcaccatcaacgagctgaaccactgcctgagcctgagaacctacctggtgggcaacagcctgagcctggccgacctgtgcgtgtgggccaccctgaagggcaacgccgcctggcaggagcagctgaagcagaagaaggcccccgtgcacgtgaagagatggttcggcttcctggaggcccagcaggccttccagagcgtgggcaccaagtgggacgtgagcaccaccaaggccagagtggcccccgagaagaagcaggacgtgggcaagttcgtggagctgcccggcgccgagatgggcaaggtgaccgtgagattcccccccgaggccagcggctacctgcacatcggccacgccaaggccgccctgctgaaccagcactaccaggtgaacttcaagggcaagctgatcatgagattcgacgacaccaaccccgagaaggagaaggaggacttcgagaaggtgatcctggaggacgtggccatgctgcacatcaagcccgaccagttcacctacaccagcgaccacttcgagaccatcatgaagtacgccgagaagctgatccaggagggcaaggcctacgtggacgacacccccgccgagcagatgaaggccgagagagagcagagaatcgacagcaagcacagaaagaaccccatcgagaagaacctgcagatgtgggaggagatgaagaagggcagccagttcggccagagctgctgcctgagagccaagatcgacatgagcagcaacaacggctgcatgagagaccccaccctgtacagatgcaagatccagccccaccccagaaccggcaacaagtacaacgtgtaccccacctacgacttcgcctgccccatcgtggacagcatcgagggcgtgacccacgccctgagaaccaccgagtaccacgacagagacgagcagttctactggatcatcgaggccctgggcatcagaaagccctacatctgggagtacagcagactgaacctgaacaacaccgtgctgagcaagagaaagctgacctggttcgtgaacgagggcctggtggacggctgggacgaccccagattccccaccgtgagaggcgtgctgagaagaggcatgaccgtggagggcctgaagcagttcatcgccgcccagggcagcagcagaagcgtggtgaacatggagtgggacaagatctgggccttcaacaagaagctgagagccctgtgcaagaaggtgatcgaccccgtggcccccagatacgtggccctgctgaagaaggaggtgatccccgtgaacgtgcccgaggcccaggaggagatgaaggaggtggccaagcaccccaagaaccccgaggtgggcctgaagcccgtgtggtacagccccaaggtgttcatcgagggcgccgacgccgagaccttcagcgagggcgagatggtgaccttcatcaactggggcaacctgaacatcaccaagatccacaagaacgccgacggcaagatcatcagcctggacgccaagctgaacctggagaacaaggactacaagaagaccaccaaggtgacctggctggccgagaccacccacgccctgcccatccccgtgatctgcgtgacctacgagcacctgatcaccaagcccgtgctgggcaaggacgaggacttcaagcagtacgtgaacaagaacagcaagcacgaggagctgatgctgggcgacccctgcctgaaggacctgaagaagggcgacatcatccagctgcagagaagaggcttcttcatctgcgaccagccctacgagcccgtgagcccctacagctgcaaggaggccccctgcgtgctgatctacatccccgacggccacaccaaggagatgcccaccagcggcagcaaggagaagaccaaggtggaggccaccaagaacgagaccagcgcccccttcaaggagagacccacccccagcctgaacaacaactgcaccaccagcgaggacagcctggtgctgtacaacagagtggccgtgcagggcgacgtggtgagagagctgaaggccaagaaggcccccaaggaggacgtggacgccgccgtgaagcagctgctgagcctgaaggccgagtacaaggagaagaccggccaggagtacaagcccggcaacccccccgccgagatcggccagaacatcagcagcaacagcagcgccagcatcctggagagcaagagcctgtacgacgaggtggccgcccagggcgaggtggtgagaaagctgaaggccgagaagagccccaaggccaagatcaacgaggccgtggagtgcctgctgagcctgaaggcccagtacaaggagaagaccggcaaggagtacatccccggccagccccccctgagccagagcagcgacagcagccccaccagaaacagcgagcccgccggcctggagacccccgaggccaaggtgctgttcgacaaggtggccagccagggcgaggtggtgagaaagctgaagaccgagaaggcccccaaggaccaggtggacatcgccgtgcaggagctgctgcagctgaaggcccagtacaagagcctgatcggcgtggagtacaagcccgtgagcgccaccggcgccgaggacaaggacaagaagaagaaggagaagtag

SEQ ID NO: 83254 - DNA, 1572 bp, synthetic construct
  misc_feature 1..1572: note = Description of Artificial Sequence: Synthetic coding sequence
  source 1..1572: mol_type = other DNA
atggccgccctgctgagaagactgctgcagagagagagacccagcgccgccagcggcagacccgtgggcagaagagaggccaacctgggcaccgacgccggcgtggccgtgagagtgagattcgcccccagccccaccggcttcctgcacctgggcggcctgagaaccgccctgtacaactacatcttcgccaagaagtaccagggcagcttcatcctgagactggaggacaccgaccagaccagagtggtgcccggcgccgccgagaacatcgaggacatgctggagtgggccggcatcccccccgacgagagccccagaagaggcggccccgccggcccctaccagcagagccagagactggagctgtacgcccaggccaccgaggccctgctgaagaccggcgccgcctacccctgcttctgcagcccccagagactggagctgctgaagaaggaggccctgagaaaccaccagacccccagatacgacaacagatgcagaaacatgagccaggagcaggtggcccagaagctggccaaggaccccaagcccgccatcagattcagactggagcaggtggtgcccgccttccaggacctggtgtacggctggaacagacacgaggtggccagcgtggagggcgaccccgtgatcatgaagagcgacggcttccccacctaccacctggcctgcgtggtggacgaccaccacatgggcatcagccacgtgctgagaggcagcgagtggctggtgagcaccgccaagcacctgctgctgtaccaggccctgggctggcagcccccccacttcgcccacctgcccctgctgctgaacagagacggcagcaagctgagcaagagacagggcgacgtgttcctggagcacttcgccgccgacggcttcctgcccgacagcctgctggacatcatcaccaactgcggcagcggcttcgccgagaaccagatgggcagaaccctgcccgagctgatcacccagttcaacctgacccaggtgacctgccacagcgccctgctggacctggagaagctgcccgagttcaacagactgcacctgcagagactggtgagcaacgagagccagagaagacagctggtgggcaagctgcaggtgctggtggaggaggccttcggctgccagctgcagaacagagacgtgctgaaccccgtgtacgtggagagaatcctgctgctgagacagggccacatctgcagactgcaggacctggtgagccccgtgtacagctacctgtggaccagacccgccgtgggcagagcccagctggacgccatcagcgagaaggtggacgtgatcgccaagagagtgctgggcctgctggagagaagcagcatgagcctgacccaggacatgctgaacggcgagctgaagaagctgagcgagggcctggagggcaccaagtacagcaacgtgatgaagctgctgagaatggccctgagcggccagcagcagggcccccccgtggccgagatgatgctggccctgggccccaaggaggtgagagagagaatccagaaggtggtgagcagctag

SEQ ID NO: 83255 - DNA, 1572 bp, synthetic construct; identical to SEQ ID NO: 83254
  misc_feature 1..1572: note = Description of Artificial Sequence: Synthetic coding sequence
  source 1..1572: mol_type = other DNA

SEQ ID NO: 83256 - DNA, 321 bp, synthetic construct
  misc_feature 1..321: note = Description of Artificial Sequence: Synthetic coding sequence
  source 1..321: mol_type = other DNA
atggcccaggagttcgtgaactgcaagatccagcccggcaaggtggtggtgttcatcaagcccacctgcccctactgcagaagagcccaggagatcctgagccagctgcccatcaagcagggcctgctggagttcgtggacatcaccgccaccaaccacaccaacgagatccaggactacctgcagcagctgaccggcgccagaaccgtgcccagagtgttcatcggcaaggactgcatcggcggctgcagcgacctggtgagcctgcagcagagcggcgagctgctgaccagactgaagcagatcggcgccctgcagtag

SEQ ID NO: 83257 - DNA, 321 bp, synthetic construct; identical to SEQ ID NO: 83256
  misc_feature 1..321: note = Description of Artificial Sequence: Synthetic coding sequence
  source 1..321: mol_type = other DNA

SEQ ID NO: 83258 - DNA, 321 bp, synthetic construct; identical to SEQ ID NO: 83256
  misc_feature 1..321: note = Description of Artificial Sequence: Synthetic coding sequence
  source 1..321: mol_type = other DNA

SEQ ID NO: 83259 - DNA, 321 bp, synthetic construct; identical to SEQ ID NO: 83256
  misc_feature 1..321: note = Description of Artificial Sequence: Synthetic coding sequence
  source 1..321: mol_type = other DNA

SEQ ID NO: 83260 - DNA, 321 bp, synthetic construct; identical to SEQ ID NO: 83256
  misc_feature 1..321: note = Description of Artificial Sequence: Synthetic coding sequence
  source 1..321: mol_type = other DNA

SEQ ID NO: 83261 - DNA, 495 bp, synthetic construct
  misc_feature 1..495: note = Description of Artificial Sequence: Synthetic coding sequence
  source 1..495: mol_type = other DNA
atgatctggagaagagccgccctggccggcaccagactggtgtggagcagaagcggcagcgccggctggctggacagagccgccggcgccgccggcgccgccgccgccgccgccagcggcatggagagcaacaccagcagcagcctggagaacctggccaccgcccccgtgaaccagatccaggagaccatcagcgacaactgcgtggtgatcttcagcaagaccagctgcagctactgcaccatggccaagaagctgttccacgacatgaacgtgaactacaaggtggtggagctggacctgctggagtacggcaaccagttccaggacgccctgtacaagatgaccggcgagagaaccgtgcccagaatcttcgtgaacggcaccttcatcggcggcgccaccgacacccacagactgcacaaggagggcaagctgctgcccctggtgcaccagtgctacctgaagaagagcaagagaaaggagttccagtag

SEQ ID NO: 83262 - DNA, 498 bp, synthetic construct
  misc_feature 1..498: note = Description of Artificial Sequence: Synthetic coding sequence
  source 1..498: mol_type = other DNA
atgaaccccagagacaagcaggtgagcagattcagccccctgaaggacgtgtacacctgggtggccctggccggcatccagagaagcggcagccccggcagaaccagaagcgccgccagaagaatggagagcaacaccagcagcagcctggagaacctggccaccgcccccgtgaaccagatccaggagaccatcagcgacaactgcgtggtgatcttcagcaagaccagctgcagctactgcaccatggccaagaagctgttccacgacatgaacgtgaactacaaggtggtggagctggacctgctggagtacggcaaccagttccaggacgccctgtacaagatgaccggcgagagaaccgtgcccagaatcttcgtgaacggcaccttcatcggcggcgccaccgacacccacagactgcacaaggagggcaagctgctgcccctggtgcaccagtgctacctgaagaagagcaagagaaaggagttccagtag

SEQ ID NO: 83263 - DNA, 1008 bp, synthetic construct
  misc_feature 1..1008: note = Description of Artificial Sequence: Synthetic coding sequence
  source 1..1008: mol_type = other DNA
atggccgccggcgccgccgaggccgccgtggccgccgtggaggaggtgggcagcgccggccagttcgaggagctgctgagactgaaggccaagagcctgctggtggtgcacttctgggccccctgggccccccagtgcgcccagatgaacgaggtgatggccgagctggccaaggagctgccccaggtgagcttcgtgaagctggaggccgagggcgtgcccgaggtgagcgagaagtacgagatcagcagcgtgcccaccttcctgttcttcaagaacagccagaagatcgacagactggacggcgcccacgcccccgagctgaccaagaaggtgcagagacacgccagcagcggcagcttcctgcccagcgccaacgagcacctgaaggaggacctgaacctgagactgaagaagctgacccacgccgccccctgcatgctgttcatgaagggcaccccccaggagcccagatgcggcttcagcaagcagatggtggagatcctgcacaagcacaacatccagttcagcagcttcgacatcttcagcgacgaggaggtgagacagggcctgaaggcctacagcagctggcccacctacccccagctgtacgtgagcggcgagctgatcggcggcctggacatcatcaaggagctggaggccagcgaggagctggacaccatctgccccaaggcccccaagctggaggagagactgaaggtgctgaccaacaaggccagcgtgatgctgttcatgaagggcaacaagcaggaggccaagtgcggcttcagcaagcagatcctggagatcctgaacagcaccggcgtggagtacgagaccttcgacatcctggaggacgaggaggtgagacagggcctgaaggcctacagcaactggcccacctacccccagctgtacgtgaagggcgagctggtgggcggcctggacatcgtgaaggagctgaaggagaacggcgagctgctgcccatcctgagaggcgagaactag

SEQ ID NO: 83264 - DNA, 1008 bp, synthetic construct; identical to SEQ ID NO: 83263
  misc_feature 1..1008: note = Description of Artificial Sequence: Synthetic coding sequence
  source 1..1008: mol_type = other DNA

SEQ ID NO: 83265 - DNA, 1008 bp, synthetic construct; identical to SEQ ID NO: 83263
  misc_feature 1..1008: note = Description of Artificial Sequence: Synthetic coding sequence
  source 1..1008: mol_type = other DNA

SEQ ID NO: 83266 - DNA, 474 bp, synthetic construct
  misc_feature 1..474: note = Description of Artificial Sequence: Synthetic coding sequence
  source 1..474: mol_type = other DNA
atgagcggcagcctgggcagagccgccgccgccctgctgagatggggcagaggcgccggcggcggcggcctgtggggccccggcgtgagagccgccggcagcggcgccggcggcggcggcagcgccgagcagctggacgccctggtgaagaaggacaaggtggtggtgttcctgaagggcacccccgagcagccccagtgcggcttcagcaacgccgtggtgcagatcctgagactgcacggcgtgagagactacgccgcctacaacgtgctggacgaccccgagctgagacagggcatcaaggactacagcaactggcccaccatcccccaggtgtacctgaacggcgagttcgtgggcggctgcgacatcctgctgcagatgcaccagaacggcgacctggtggaggagctgaagaagctgggcatccacagcgccctgctggacgagaagaaggaccaggacagcaagtag

SEQ ID NO: 83267 - DNA, 873 bp, synthetic construct
  misc_feature 1..873: note = Description of Artificial Sequence: Synthetic coding sequence
  source 1..873: mol_type = other DNA
atgctgaagagagagatgaagcccgagagcgacagacccagaaaggtgagattcagaatcgccagcagccacagcggcagagtgctgaaggaggtgtacgaggacggccagcccagcggcagcctggacagcgagtgcgccagcatctgcggcatcgacggcctgggcgacagcgacggccagcagaacggccacatcgagagcgagggcgacgagaacgagaacgaccaggacagcctgctggtgctggccagagccgccagcgagaagggcttcggcaccagaagagtgaacatcctgagcaagaacggcaccgtgagaggcgtgaagtacaaggtgagcgccggccaggccctgttcaacaacctgaccaaggtgctgcagcagcccagcaccgacctggagttcgacagagtggtgatctacaccacctgcctgagagtggtgagaaccaccttcgagagatgcgagctggtgagaaagatcttccagaaccacagagtgaagttcgaggagaagaacatcgccctgaacggcgagtacggcaaggagctggacgagagatgcagaagagtgagcgaggcccccagcctgcccgtggtgttcatcgacggccactacctgggcggcgccgagaagatcctgagcatgaacgagagcggcgagctgcaggacatcctgaccaagatcgagagagtgcagcacccccacgagtgccccagctgcggcggcttcggcttcctgccctgcagcgtgtgccacggcagcaagatgagcatgttcagaaactgcttcaccgacagcttcaaggccctgaagtgcaccgcctgcaacgagaacggcctgcagagatgcaagaactgcgccggctag

SEQ ID NO: 83268 - DNA, 828 bp, synthetic construct; identical to SEQ ID NO: 75015
  misc_feature 1..828: note = Description of Artificial Sequence: Synthetic coding sequence
  source 1..828: mol_type = other DNA

SEQ ID NO: 83269 - DNA, 987 bp, synthetic construct
  misc_feature 1..987: note = Description of Artificial Sequence: Synthetic coding sequence
  source 1..987: mol_type = other DNA
atggccctgagaggcgtgagcgtgagactgctgagcagaggccccggcctgcacgtgctgagaacctgggtgagcagcgccgcccagaccgccagcagacccgagttcgactggcaggaccccctggtgctggaggagcagctgaccaccgacgagatcctgatcagagacaccttcagaacctactgccaggagagactgatgcccagaatcctgctggccaacagaaacgagggctacggctgcgccggcgtgagcagcgtggcctacggcctgctggccagagagctggagagagtggacagcggctacagaagcgccatgagcgtgcagagcagcctggtgatgcaccccatctacgcctacggcagcgaggagcagagacagaagtacctgccccagctggccaagggcgagctgctgggctgcttcggcctgaccgagcccaacagcggcagcgaccccagcagcatggagaccagagcccactacaacagcagcaacaagagctacaccctgaacggcaccaagacctggatcaccaacagccccatggccgacctgttcgtggtgtgggccagatgcgaggacggctgcatcagaggcttcctgctggagaagggcatgagaggcctgagcgcccccagaatccagggcaagttcagcctgagagccagcgccaccggcatgatcatcatggacggcgtggaggtgcccgaggagaacgtgctgcccggcgccagcagcctgggcggccccttcggctgcctgaacaacgccagatacggcatcgcctggggcgtgctgggcgccagcgagttctgcctgcacaccgccagacagtacgccctggacagaatgcagttcggcgtgcccctggccagaaaccagctgatccagaagaagctggccgacatgctgaccgagatcaccctgggcctgcacgcctgcctgcagctgggcagactgaaggaccaggacaagtag

SEQ ID NO: 83270 - DNA, 1185 bp, synthetic construct
  misc_feature 1..1185: note = Description of Artificial Sequence: Synthetic coding sequence
  source 1..1185: mol_type = other DNA
atgagaagcagcagcggcacccccagcgcccccaccgccagaagagacagctgcctggccagctgctggcccatcgccaccaagagcctggccctgctgcccagactggagtgcagcggcaccatcctggcccactgcaagttctgcctgcccggcagcagcgacagccccgccagcacccccctggtggccggcatcaccggctacggctgcgccggcgtgagcagcgtggcctacggcctgctggccagagagctggagagagtggacagcggctacagaagcgccatgagcgtgcagagcagcctggtgatgcaccccatctacgcctacggcagcgaggagcagagacagaagtacctgccccagctggccaagggcgagctgctgggctgcttcggcctgaccgagcccaacagcggcagcgaccccagcagcatggagaccagagcccactacaacagcagcaacaagagctacaccctgaacggcaccaagacctggatcaccaacagccccatggccgacctgttcgtggtgtgggccagatgcgaggacggctgcatcagaggcttcctgctggagaagggcatgagaggcctgagcgcccccagaatccagggcaagttcagcctgagagccagcgccaccggcatgatcatcatggacggcgtggaggtgcccgaggagaacgtgctgcccggcgccagcagcctgggcggccccttcggctgcctgaacaacgccagatacggcatcgcctggggcgtgctgggcgccagcgagttctgcctgcacaccgccagacagtacgccctggacagaatgcagttcggcgtgcccctggccagaaaccagctgatccagaagaagctggccgacatgctgaccgagatcaccctgggcctgcacgcctgcctgcagctgggcagactgaaggaccaggacaaggccgcccccgagatggtgagcctgctgaagagaaacaactgcggcaaggccctggacatcgccagacaggccagagacatgctgggcggcaacggcatcagcgacgagtaccacgtgatcagacacgccatgaacctggaggccgtgaacacctacgagggcacccacgacatccacgccctgatcctgggcagagccatcaccggcatccaggccttcaccgccagcaagtag

SEQ ID NO: 83271 - DNA, 1287 bp, synthetic construct
  misc_feature 1..1287: note = Description of Artificial Sequence: Synthetic coding sequence
  source 1..1287: mol_type = other DNA
atggccctgagaggcgtgagcgtgagactgctgagcagaggccccggcctgcacgtgctgagaacctgggtgagcagcgccgcccagaccgagaagggcggcagaacccagagccagctggccaagagcagcagacccgagttcgactggcaggaccccctggtgctggaggagcagctgaccaccgacgagatcctgatcagagacaccttcagaacctactgccaggagagactgatgcccagaatcctgctggccaacagaaacgaggtgttccacagagagatcatcagcgagatgggcgagctgggcgtgctgggccccaccatcaagggctacggctgcgccggcgtgagcagcgtggcctacggcctgctggccagagagctggagagagtggacagcggctacagaagcgccatgagcgtgcagagcagcctggtgatgcaccccatctacgcctacggcagcgaggagcagagacagaagtacctgccccagctggccaagggcgagctgctgggctgcttcggcctgaccgagcccaacagcggcagcgaccccagcagcatggagaccagagcccactacaacagcagcaacaagagctacaccctgaacggcaccaagacctggatcaccaacagccccatggccgacctgttcgtggtgtgggccagatgcgaggacggctgcatcagaggcttcctgctggagaagggcatgagaggcctgagcgcccccagaatccagggcaagttcagcctgagagccagcgccaccggcatgatcatcatggacggcgtggaggtgcccgaggagaacgtgctgcccggcgccagcagcctgggcggccccttcggctgcctgaacaacgccagatacggcatcgcctggggcgtgctgggcgccagcgagttctgcctgcacaccgccagacagtacgccctggacagaatgcagttcggcgtgcccctggccagaaaccagctgatccagaagaagctggccgacatgctgaccgagatcaccctgggcctgcacgcctgcctgcagctgggcagactgaaggaccaggacaaggccgcccccgagatggtgagcctgctgaagagaaacaactgcggcaaggccctggacatcgccagacaggccagagacatgctgggcggcaacggcatcagcgacgagtaccacgtgatcagacacgccatgaacctggaggccgtgaacacctacgaggtggtgcagatgtgcagcctgaagagaagatggaacagcctgtag

SEQ ID NO: 83272 - DNA, 297 bp, synthetic construct
  misc_feature 1..297: note = Description of Artificial Sequence: Synthetic coding sequence
  source 1..297: mol_type = other DNA
  misc_feature 1..144: note = DNA
  misc_feature 145: note = RNA
  misc_feature 146..297: note = DNA
atgtgcgccgccagactggccgccgccgccgccgccgcccagagcgtgtacgccttcagcgccagacccctggccggcggcgagcccgtgagcctgggcagcctgagaggcaaggtgctgctgatcgagaacgtggccagcctgtgaggcaccaccgtgagagactacacccagatgaacgagctgcagagaagactgggccccagaggcctggtggtgctgggcttcccctgcaaccagttcggccaccaggtgagaagagccgagagaggcggcgccggcgccgacgtgcagtag

SEQ ID NO: 83273 - DNA, 612 bp, synthetic construct
  misc_feature 1..612: note = Description of Artificial Sequence: Synthetic coding sequence
  source 1..612: mol_type = other DNA
  misc_feature 1..144: note = DNA
  misc_feature 145: note = RNA
  misc_feature 146..612: note = DNA
atgtgcgccgccagactggccgccgccgccgccgccgcccagagcgtgtacgccttcagcgccagacccctggccggcggcgagcccgtgagcctgggcagcctgagaggcaaggtgctgctgatcgagaacgtggccagcctgtgaggcaccaccgtgagagactacacccagatgaacgagctgcagagaagactgggccccagaggcctggtggtgctgggcttcccctgcaaccagttcggccaccaggagaacgccaagaacgaggagatcctgaacagcctgaagtacgtgagacccggcggcggcttcgagcccaacttcatgctgttcgagaagtgcgaggtgaacggcgccggcgcccaccccctgttcgccttcctgagagaggccctgcccgcccccagcgacgacgccaccgccctgatgaccgaccccaagctgatcacctggagccccgtgtgcagaaacgacgtggcctggaacttcgagaagttcctggtgggccccgacggcgtgcccctgagaagatacagcagaagattccagaccatcgacatcgagcccgacatcgaggccctgctgagccagggccccagctgcgcctag

SEQ ID NO: 83274 - DNA, 573 bp, synthetic construct
  misc_feature 1..573: note = Description of Artificial Sequence: Synthetic coding sequence
  source 1..573: mol_type = other DNA
  misc_feature 1..117: note = DNA
  misc_feature 118: note = RNA
  misc_feature 119..573: note = DNA
atggccttcatcgccaagagcttctacgacctgagcgccatcagcctggacggcgagaaggtggacttcaacaccttcagaggcagagccgtgctgatcgagaacgtggccagcctgtgaggcaccaccaccagagacttcacccagctgaacgagctgcagtgcagattccccagaagactggtggtgctgggcttcccctgcaaccagttcggccaccaggagaactgccagaacgaggagatcctgaacagcctgaagtacgtgagacccggcggcggctaccagcccaccttcaccctggtgcagaagtgcgaggtgaacggccagaacgagcaccccgtgttcgcctacctgaaggacaagctgccctacccctacgacgaccccttcagcctgatgaccgaccccaagctgatcatctggagccccgtgagaagaagcgacgtggcctggaacttcgagaagttcctgatcggccccgagggcgagcccttcagaagatacagcagaaccttccccaccatcaacatcgagcccgacatcaagagactgctgaaggtggccatctag

SEQ ID NO: 83275 - DNA, 594 bp, synthetic construct
  misc_feature 1..594: note = Description of Artificial Sequence: Synthetic coding sequence
  source 1..594: mol_type = other DNA
  misc_feature 1..216: note = DNA
  misc_feature 217: note = RNA
  misc_feature 218..594: note = DNA
atgagcctgggcagactgtgcagactgctgaagcccgccctgctgtgcggcgccctggccgcccccggcctggccggcaccatgtgcgccagcagagacgactggagatgcgccagaagcatgcacgagttcagcgccaaggacatcgacggccacatggtgaacctggacaagtacagaggcttcgtgtgcatcgtgaccaacgtggccagccagtgaggcaagaccgaggtgaactacacccagctggtggacctgcacgccagatacgccgagtgcggcctgagaatcctggccttcccctgcaaccagttcggcaagcaggagcccggcagcaacgaggagatcaaggagttcgccgccggctacaacgtgaagttcgacatgttcagcaagatctgcgtgaacggcgacgacgcccaccccctgtggaagtggatgaagatccagcccaagggcaagggcatcctgggcaacgccatcaagtggaacttcaccaagttcctgatcgacaagaacggctgcgtggtgaagagatacggccccatggaggagcccctggtgatcgagaaggacctgccccactacttctag

SEQ ID NO: 83276 - DNA, 666 bp, synthetic construct
  misc_feature 1..666: note = Description of Artificial Sequence: Synthetic coding sequence
  source 1..666: mol_type = other DNA
atgaccacccagctgagagtggtgcacctgctgcccctgctgctggcctgcttcgtgcagaccagccccaagcaggagaagatgaagatggactgccacaaggacgagaagggcaccatctacgactacgaggccatcgccctgaacaagaacgagtacgtgagcttcaagcagtacgtgggcaagcacatcctgttcgtgaacgtggccacctactgcggcctgaccgcccagtaccccgagctgaacgccctgcaggaggagctgaagccctacggcctggtggtgctgggcttcccctgcaaccagttcggcaagcaggagcccggcgacaacaaggagatcctgcccggcctgaagtacgtgagacccggcggcggcttcgtgcccagcttccagctgttcgagaagggcgacgtgaacggcgagaaggagcagaaggtgttcagcttcctgaagcacagctgcccccaccccagcgagatcctgggcaccttcaagagcatcagctgggaccccgtgaaggtgcacgacatcagatggaacttcgagaagttcctggtgggccccgacggcatccccgtgatgagatggagccacagagccaccgtgagcagcgtgaagaccgacatcctggcctacctgaagcagttcaagaccaagtag

SEQ ID NO: 83277 - DNA, 303 bp, synthetic construct
  misc_feature 1..303: note = Description of Artificial Sequence: Synthetic coding sequence
  source 1..303: mol_type = other DNA
atgaccacccagctgagagtggtgcacctgctgcccctgctgctggcctgcttcgtgcagaccagccccaagcaggagaagatgaagatggactgccacaaggacgagaagggcaccatctacgactacgaggccatcgccctgaacaagaacgagtacgtgagcttcaagcagtacgtgggcaagcacatcctgttcgtgaacgtggccacctactgcggcctgaccgcccagtaccccggcatgagcgtgcagggcgaggacctgtacctggtgagcagcttcctgagaaagggcatgtag

SEQ ID NO: 83278 - DNA, 573 bp, synthetic construct
  misc_feature 1..573: note = Description of Artificial Sequence: Synthetic coding sequence
  source 1..573: mol_type = other DNA
atggccgagaagacccagaagagcgtgaagatcgcccccggcgccgtggtgtgcgtggagagcgagatcagaggcgacgtgaccatcggccccagaaccgtgatccaccccaaggccagaatcatcgccgaggccggccccatcgtgatcggcgagggcaacctgatcgaggagcaggccctgatcatcaacgcctaccccgacaacatcacccccgacaccgaggaccccgagcccaagcccatgatcatcggcaccaacaacgtgttcgaggtgggctgctacagccaggccatgaagatgggcgacaacaacgtgatcgagagcaaggcctacgtgggcagaaacgtgatcctgaccagcggctgcatcatcggcgcctgctgcaacctgaacaccttcgaggtgatccccgagaacaccgtgatctacggcgccgactgcctgagaagagtgcagaccgagagaccccagccccagaccctgcagctggacttcctgatgaagatcctgcccaactaccaccacctgaagaagaccatgaagggcagcagcacccccgtgaagaactag

SEQ ID NO: 83279 - DNA, 1440 bp, synthetic construct
  misc_feature 1..1440: note = Description of Artificial Sequence: Synthetic coding sequence
  source 1..1440: mol_type = other DNA
atggcctgcagacaggagccccagccccagggccccccccccgccgccggcgccgtggccagctacgactacctggtgatcggcggcggcagcggcggcctggccagcgccagaagagccgccgagctgggcgccagagccgccgtggtggagagccacaagctgggcggcacctgcgtgaacgtgggctgcgtgcccaagaaggtgatgtggaacaccgccgtgcacagcgagttcatgcacgaccacgccgactacggcttccccagctgcgagggcaagttcaactggagagtgatcaaggagaagagagacgcctacgtgagcagactgaacgccatctaccagaacaacctgaccaagagccacatcgagatcatcagaggccacgccgccttcaccagcgaccccaagcccaccatcgaggtgagcggcaagaagtacaccgccccccacatcctgatcgccaccggcggcatgcccagcaccccccacgagagccagatccccggcgccagcctgggcatcaccagcgacggcttcttccagctggaggagctgcccggcagaagcgtgatcgtgggcgccggctacatcgccgtggagatggccggcatcctgagcgccctgggcagcaagaccagcctgatgatcagacacgacaaggtgctgagaagcttcgacagcatgatcagcaccaactgcaccgaggagctggagaacgccggcgtggaggtgctgaagttcagccaggtgaaggaggtgaagaagaccctgagcggcctggaggtgagcatggtgaccgccgtgcccggcagactgcccgtgatgaccatgatccccgacgtggactgcctgctgtgggccatcggcagagtgcccaacaccaaggacctgagcctgaacaagctgggcatccagaccgacgacaagggccacatcatcgtggacgagttccagaacaccaacgtgaagggcatctacgccgtgggcgacgtgtgcggcaaggccctgctgacccccgtggccatcgccgccggcagaaagctggcccacagactgttcgagtacaaggaggacagcaagctggactacaacaacatccccaccgtggtgttcagccacccccccatcggcaccgtgggcctgaccgaggacgaggccatccacaagtacggcatcgagaacgtgaagacctacagcaccagcttcacccccatgtaccacgccgtgaccaagagaaagaccaagtgcgtgatgaagatggtgtgcgccaacaaggaggagaaggtggtgggcatccacatgcagggcctgggctgcgacgagatgctgcagggcttcgccgtggccgtgaagatgggcgccaccaaggccgacttcgacaacaccgtggccatccaccccaccagcagcgaggagctggtgaccctgagatag

SEQ ID NO: 83280 - DNA, 1323 bp, synthetic construct
  misc_feature 1..1323: note = Description of Artificial Sequence: Synthetic coding sequence
  source 1..1323: mol_type = other DNA
atggccctgctgcccagagccctgagcgccggcgccggccccagctggagaagagccgccagagccttcagaggcttcctgctgctgctgcccgagcccgccgccctgaccagagccctgagcagagccatggcctgcagacaggagccccagccccagggccccccccccgccgccggcgccgtggccagctacgactacctggtgatcggcggcggcagcggcggcctggccagcgccagaagagccgccgagctgggcgccagagccgccgtggtggagagccacaagctgggcggcacctgcgtgaacgtgggctgcgtgcccaagaaggtgatgtggaacaccgccgtgcacagcgagttcatgcacgaccacgccgactacggcttccccagctgcgagggcaagttcaactggagagtgatcaaggagaagagagacgcctacgtgagcagactgaacgccatctaccagaacaacctgaccaagagccacatcgagatcatcagaggccacgccgccttcaccagcgaccccaagcccaccatcgaggtgagcggcaagaagtacaccgccccccacatcctgatcgccaccggcggcatgcccagcaccccccacgagagccagatccccggcgccagcctgggcatcaccagcgacggcttcttccagctggaggagctgcccggcagaagcgtgatcgtgggcgccggctacatcgccgtggagatggccggcatcctgagcgccctgggcagcaagaccagcctgatgatcagacacgacaagggcatccagaccgacgacaagggccacatcatcgtggacgagttccagaacaccaacgtgaagggcatctacgccgtgggcgacgtgtgcggcaaggccctgctgacccccgtggccatcgccgccggcagaaagctggcccacagactgttcgagtacaaggaggacagcaagctggactacaacaacatccccaccgtggtgttcagccacccccccatcggcaccgtgggcctgaccgaggacgaggccatccacaagtacggcatcgagaacgtgaagacctacagcaccagcttcacccccatgtaccacgccgtgaccaagagaaagaccaagtgcgtgatgaagatggtgtgcgccaacaaggaggagaaggtggtgggcatccacatgcagggcctgggctgcgacgagatgctgcagggcttcgccgtggccgtgaagatgggcgccaccaaggccgacttcgacaacaccgtggccatccaccccaccagcagcgaggagctggtgaccctgagatag

SEQ ID NO: 83281 - DNA, 1410 bp, synthetic construct
  misc_feature 1..1410: note = Description of Artificial Sequence: Synthetic coding sequence
  source 1..1410: mol_type = other DNA
atggccctgctgcccagagccctgagcgccggcgccggccccagctggagaagagccgccagagccttcagaggcttcctgctgctgctgcccgagcccgccgccctgaccagagccctgagcagagccatggcctgcagacaggagccccagccccagggccccccccccgccgccggcgccgtggccagctacgactacctggtgatcggcggcggcagcggcggcctggccagcgccagaagagccgccgagctgggcgccagagccgccgtggtggagagccacaagctgggcggcacctgcgtgaacgtgggctgcgtgcccaagaaggtgatgtggaacaccgccgtgcacagcgagttcatgcacgaccacgccgactacggcttccccagctgcgagggcaagttcaactggagagtgatcaaggagaagagagacgcctacgtgagcagactgaacgccatctaccagaacaacctgaccaagagccacatcgagatcatcagaggccacgccgccttcaccagcgaccccaagcccaccatcgaggtgagcggcaagaagtacaccgccccccacatcctgatcgccaccggcggcatgcccagcaccccccacgagagccagatccccggcgccagcctgggcatcaccagcgacggcttcttccagctggaggagctgcccggcagaagcgtgatcgtgggcgccggctacatcgccgtggagatggccggcatcctgagcgccctgggcagcaagaccagcctgatgatcagacacgacaaggtgctgagaagcttcgacagcatgatcagcaccaactgcaccgaggagctggagaacgccggcgtggaggtgctgaagttcagccagggcatccagaccgacgacaagggccacatcatcgtggacgagttccagaacaccaacgtgaagggcatctacgccgtgggcgacgtgtgcggcaaggccctgctgacccccgtggccatcgccgccggcagaaagctggcccacagactgttcgagtacaaggaggacagcaagctggactacaacaacatccccaccgtggtgttcagccacccccccatcggcaccgtgggcctgaccgaggacgaggccatccacaagtacggcatcgagaacgtgaagacctacagcaccagcttcacccccatgtaccacgccgtgaccaagagaaagaccaagtgcgtgatgaagatggtgtgcgccaacaaggaggagaaggtggtgggcatccacatgcagggcctgggctgcgacgagatgctgcagggcttcgccgtggccgtgaagatgggcgccaccaaggccgacttcgacaacaccgtggccatccaccccaccagcagcgaggagctggtgaccctgagatag

SEQ ID NO: 83282 - DNA, 1482 bp, synthetic construct
  misc_feature 1..1482: note = Description of Artificial Sequence: Synthetic coding sequence
  source 1..1482: mol_type = other DNA
atggccctgctgcccagagccctgagcgccggcgccggccccagctggagaagagccgccagagccttcagaggcttcctgctgctgctgcccgagcccgccgccctgaccagagccctgagcagagccatggcctgcagacaggagccccagccccagggccccccccccgccgccggcgccgtggccagctacgactacctggtgatcggcggcggcagcggcggcctggccagcgccagaagagccgccgagctgggcgccagagccgccgtggtggagagccacaagctgggcggcacctgcgtgaacgtgggctgcgtgcccaagaaggtgatgtggaacaccgccgtgcacagcgagttcatgcacgaccacgccgactacggcttccccagctgcgagggcaagttcaactggagagtgatcaaggagaagagagacgcctacgtgagcagactgaacgccatctaccagaacaacctgaccaagagccacatcgagatcatcagaggccacgccgccttcaccagcgaccccaagcccaccatcgaggtgagcggcaagaagtacaccgccccccacatcctgatcgccaccggcggcatgcccagcaccccccacgagagccagatccccggcgccagcctgggcatcaccagcgacggcttcttccagctggaggagctgcccggcagaagcgtgatcgtgggcgccggctacatcgccgtggagatggccggcatcctgagcgccctgggcagcaagaccagcctgatgatcagacacgacaaggtgaaggaggtgaagaagaccctgagcggcctggaggtgagcatggtgaccgccgtgcccggcagactgcccgtgatgaccatgatccccgacgtggactgcctgctgtgggccatcggcagagtgcccaacaccaaggacctgagcctgaacaagctgggcatccagaccgacgacaagggccacatcatcgtggacgagttccagaacaccaacgtgaagggcatctacgccgtgggcgacgtgtgcggcaaggccctgctgacccccgtggccatcgccgccggcagaaagctggcccacagactgttcgagtacaaggaggacagcaagctggactacaacaacatccccaccgtggtgttcagccacccccccatcggcaccgtgggcctgaccgaggacgaggccatccacaagtacggcatcgagaacgtgaagacctacagcaccagcttcacccccatgtaccacgccgtgaccaagagaaagaccaagtgcgtgatgaagatggtgtgcgccaacaaggaggagaaggtggtgggcatccacatgcagggcctgggctgcgacgagatgctgcagggcttcgccgtggccgtgaagatgggcgccaccaaggccgacttcgacaacaccgtggccatccaccccaccagcagcgaggagctggtgaccctgagatag

SEQ ID NO: 83283 - DNA, 669 bp, synthetic construct
  misc_feature 1..669: note = Description of Artificial Sequence: Synthetic coding sequence
  source 1..669: mol_type = other DNA
atggccgagaagcccaagctgcactacttcaacgccagaggcagaatggagagcaccagatggctgctggccgccgccggcgtggagttcgaggagaagttcatcaagagcgccgaggacctggacaagctgagaaacgacggctacctgatgttccagcaggtgcccatggtggagatcgacggcatgaagctggtgcagaccagagccatcctgaactacatcgccagcaagtacaacctgtacggcaaggacatcaaggagagagccctgatcgacatgtacatcgagggcatcgccgacctgggcgagatgatcctgctgctgcccgtgtgcccccccgaggagaaggacgccaagctggccctgatcaaggagaagatcaagaacagatacttccccgccttcgagaaggtgctgaagagccacggccaggactacctggtgggcaacaagctgagcagagccgacatccacctggtggagctgctgtactacgtggaggagctggacagcagcctgatcagcagcttccccctgctgaaggccctgaagaccagaatcagcaacctgcccaccgtgaagaagttcctgcagcccggcagccccagaaagccccccatggacgagaagagcctggaggaggccagaaagatcttcagattctag

SEQ ID NO: 83284 - DNA, 669 bp, synthetic construct
  misc_feature 1..669: note = Description of Artificial Sequence: Synthetic coding sequence
  source 1..669: mol_type = other DNA
atggccgagaagcccaagctgcactacagcaacatcagaggcagaatggagagcatcagatggctgctggccgccgccggcgtggagttcgaggagaagttcatcaagagcgccgaggacctggacaagctgagaaacgacggctacctgatgttccagcaggtgcccatggtggagatcgacggcatgaagctggtgcagaccagagccatcctgaactacatcgccagcaagtacaacctgtacggcaaggacatcaaggagaaggccctgatcgacatgtacatcgagggcatcgccgacctgggcgagatgatcctgctgctgcccttcagccagcccgaggagcaggacgccaagctggccctgatccaggagaagaccaagaacagatacttccccgccttcgagaaggtgctgaagagccacggccaggactacctggtgggcaacaagctgagcagagccgacatccacctggtggagctgctgtactacgtggaggagctggacagcagcctgatcagcagcttccccctgctgaaggccctgaagaccagaatcagcaacctgcccaccgtgaagaagttcctgcagcccggcagccccagaaagccccccatggacgagaagagcctggaggagagcagaaagatcttcagattctag

SEQ ID NO: 83285 - DNA, 729 bp, synthetic construct
  misc_feature 1..729: note = Description of Artificial Sequence: Synthetic coding sequence
  source 1..729: mol_type = other DNA
atgctgctgctggccccccagatgctgagcctgctgctgctggccctgcccgtgctggccagccccgcctacgtggcccccgcccccggccaggccctgcagcagaccggcatcgtgggcggccaggaggcccccagaagcaagtggccctggcaggtgagcctgagagtgagaggcccctactggatgcacttctgcggcggcagcctgatccacccccagtgggtgctgaccgccgcccactgcgtggagcccgacatcaaggacctggccgccctgagagtgcagctgagagagcagcacctgtactaccaggaccagctgctgcccgtgagcagaatcatcgtgcacccccagttctacatcatccagaccggcgccgacatcgccctgctggagctggaggagcccgtgaacatcagcagccacatccacaccgtgaccctgccccccgccagcgagaccttcccccccggcatgccctgctgggtgaccggctggggcgacgtggacaacaacgtgcacctgccccccccctaccccctgaaggaggtggaggtgcccgtggtggagaaccacctgtgcaacgccgagtaccacaccggcctgcacaccggccacagcttccagatcgtgagagacgacatgctgtgcgccggcagcgagaaccacgacagctgccagggcgacagcggcggccccctggtgtgcaaggtgaacggcacctag

SEQ ID NO: 83286 - DNA, 519 bp, synthetic construct
  misc_feature 1..519: note = Description of Artificial Sequence: Synthetic coding sequence
  source 1..519: mol_type = other DNA
atgttccagcaggtgcccatggtggagatcgacggcatgaagctggtgcagaccagagccatcctgaactacatcgccagcaagtacaacctgtacggcaaggacatcaaggagagagccctgatcgacatgtacaccgagggcatggccgacctgaacgagatgatcctgctgctgcccctgtgcagacccgaggagaaggacgccaagatcgccctgatcaaggagaagaccaagagcagatacttccccgccttcgagaaggtgctgcagagccacggccaggactacctggtgggcaacaagctgagcagagccgacatcagcctggtggagctgctgtactacgtggaggagctggacagcagcctgatcagcaacttccccctgctgaaggccctgaagaccagaatcagcaacctgcccaccgtgaagaagttcctgcagcccggcagccccagaaagccccccgccgacgccaaggccctggaggaggccagaaagatcttcagattctag

SEQ ID NO: 83287 - DNA, 327 bp, synthetic construct
  misc_feature 1..327: note = Description of Artificial Sequence: Synthetic coding sequence
  source 1..327: mol_type = other DNA
atgttccagcaggtgcccatggtggagatcgacggcatgaagctggtgcagaccagagccatcctgaactacatcgccagcaagtacaacctgtacggcaaggacatcaaggagagagccctgatcgacatgtacaccgagggcatggccgacctgaacgagatgatcctgctgctgcccctgtgcagacccgaggagaaggacgccaagatcgccctgatcaaggagaagaccaagagcagatacttccccgccttcgaggccgacatcagcctggtggagctgctgtactacgtggaggagctggacagcagcctgatcagctag

SEQ ID NO: 83288 - DNA, 669 bp, synthetic construct
  misc_feature 1..669: note = Description of Artificial Sequence: Synthetic coding sequence
  source 1..669: mol_type = other DNA
atggccgccagacccaagctgcactaccccaacggcagaggcagaatggagagcgtgagatgggtgctggccgccgccggcgtggagttcgacgaggagttcctggagaccaaggagcagctgtacaagctgcaggacggcaaccacctgctgttccagcaggtgcccatggtggagatcgacggcatgaagctggtgcagaccagaagcatcctgcactacatcgccgacaagcacaacctgttcggcaagaacctgaaggagagaaccctgatcgacatgtacgtggagggcaccctggacctgctggagctgctgatcatgcaccccttcctgaagcccgacgaccagcagaaggaggtggtgaacatggcccagaaggccatcatcagatacttccccgtgttcgagaagatcctgagaggccacggccagagcttcctggtgggcaaccagctgagcctggccgacgtgatcctgctgcagaccatcctggccctggaggagaagatccccaacatcctgagcgccttccccttcctgcaggagtacaccgtgaagctgagcaacatccccaccatcaagagattcctggagcccggcagcaagaagaagcccccccccgacgagatctacgtgagaaccgtgtacaacatcttcagaccctag

SEQ ID NO: 83289 - DNA, 390 bp, synthetic construct
  misc_feature 1..390: note = Description of Artificial Sequence: Synthetic coding sequence
  source 1..390: mol_type = other DNA
atgtacgtggagggcaccctggacctgctggagctgctgatcatgcaccccttcctgaagcccgacgaccagcagaaggaggtggtgaacatggcccagaaggccatcatcagatacttccccgtgttcgagaagatcctgagaggccacggccagagcttcctggtgggcaaccagctgagcctggccgacgtgatcctgctgcagaccatcctggccctggaggagaagatccccaacatcctgagcgccttccccttcctgcaggagtacaccgtgaagctgagcaacatccccaccatcaagagattcctggagcccggcagcaagaagaagcccccccccgacgagatctacgtgagaaccgtgtacaacatcttcagaccctag

SEQ ID NO: 83290 - DNA, 669 bp, synthetic construct; identical to SEQ ID NO: 83288
  misc_feature 1..669: note = Description of Artificial Sequence: Synthetic coding sequence
  source 1..669: mol_type = other DNA

SEQ ID NO: 83291 - DNA, 270 bp, synthetic construct
  misc_feature 1..270: note = Description of Artificial Sequence: Synthetic coding sequence
  source 1..270: mol_type = other DNA
atgtacgtggagggcaccctggacctgctggagctgctgatcatgcaccccttcctgaagcccgacgaccagcagaaggaggtggtgaacatggcccagaaggccatcatcagatacttccccgtgttcgagaagatcctgagaggccacggccagagcttcctggtgggcaaccagctgagcctggccgacgtgatcctgctgcagaccatcctggccctggaggagaagatccccaacatcctgagcgccttccccttcctgcagtag

SEQ ID NO: 83292 - DNA, 390 bp, synthetic construct; identical to SEQ ID NO: 83289
  misc_feature 1..390: note = Description of Artificial Sequence: Synthetic coding sequence
  source 1..390: mol_type = other DNA

SEQ ID NO: 83293 - DNA, 669 bp, synthetic construct
  misc_feature 1..669: note = Description of Artificial Sequence: Synthetic coding sequence
  source 1..669: mol_type = other DNA
atggccgagaagcccaagctgcactacagcaacgccagaggcagcatggagagcatcagatggctgctggccgccgccggcgtggagctggaggagaagttcctggagagcgccgaggacctggacaagctgagaaacgacggcagcctgctgttccagcaggtgcccatggtggagatcgacggcatgaagctggtgcagaccagagccatcctgaactacatcgccagcaagtacaacctgtacggcaaggacatgaaggagagagccctgatcgacatgtacaccgagggcatcgtggacctgaccgagatgatcctgctgctgctgatctgccagcccgaggagagagacgccaagaccgccctggtgaaggagaagatcaagaacagatacttccccgccttcgagaaggtgctgaagagccacagacaggactacctggtgggcaacaagctgagctgggccgacatccacctggtggagctgttctactacgtggaggagctggacagcagcctgatcagcagcttccccctgctgaaggccctgaagaccagaatcagcaacctgcccaccgtgaagaagttcctgcagcccggcagccagagaaagccccccatggacgagaagagcctggaggaggccagaaagatcttcagattctag

SEQ ID NO: 83294 - DNA, 669 bp, synthetic construct; identical to SEQ ID NO: 83293
  misc_feature 1..669: note = Description of Artificial Sequence: Synthetic coding sequence
  source 1..669: mol_type = other DNA

SEQ ID NO: 83295 - DNA, 657 bp, synthetic construct
  misc_feature 1..657: note = Description of Artificial Sequence: Synthetic coding sequence
  source 1..657: mol_type = other DNA
atgcccatgatcctgggctactgggacatcagaggcctggcccacgccatcagactgctgctggagtacaccgacagcagctacgaggagaagaagtacaccatgggcgacgcccccgactacgacagaagccagtggctgaacgagaagttcaagctgggcctggacttccccaacctgccctacctgatcgacggcgcccacaagatcacccagagcaacgccatcctgtgctacatcgccagaaagcacaacctgtgcggcgagaccgaggaggagaagatcagagtggacatcctggagaaccagaccatggacaaccacatgcagctgggcatgatctgctacaaccccgagttcgagaagctgaagcccaagtacctggaggagctgcccgagaagctgaagctgtacagcgagttcctgggcaagagaccctggttcgccggcaacaagatcaccttcgtggacttcctggtgtacgacgtgctggacctgcacagaatcttcgagcccaagtgcctggacgccttccccaacctgaaggacttcatcagcagattcgagggcctggagaagatcagcgcctacatgaagagcagcagattcctgcccagacccgtgttcagcaagatggccgtgtggggcaacaagtag

SEQ ID NO: 83296 - DNA, 546 bp, synthetic construct
  misc_feature 1..546: note = Description of Artificial Sequence: Synthetic coding sequence
  source 1..546: mol_type = other DNA
atgcccatgatcctgggctactgggacatcagaggcctggcccacgccatcagactgctgctggagtacaccgacagcagctacgaggagaagaagtacaccatgggcgacgcccccgactacgacagaagccagtggctgaacgagaagttcaagctgggcctggacttccccaacctgccctacctgatcgacggcgcccacaagatcacccagagcaacgccatcctgtgctacatcgccagaaagcacaacctgtgcggcgagaccgaggaggagaagatcagagtggacatcctggagaaccagaccatggacaaccacatgcagctgggcatgatctgctacaaccccgagttcgagaagctgaagcccaagtacctggaggagctgcccgagaagctgaagctgtacagcgagttcctgggcaagagaccctggttcgccggcaacaagggcctggagaagatcagcgcctacatgaagagcagcagattcctgcccagacccgtgttcagcaagatggccgtgtggggcaacaagtag

SEQ ID NO: 83297 - DNA, 450 bp, synthetic construct
  misc_feature 1..450: note = Description of Artificial Sequence: Synthetic coding sequence
  source 1..450: mol_type = other DNA
atgcccatgatcctgggctactgggacatcagaggcctggcccacgccatcagactgctgctggagtacaccgacagcagctacgaggagaagaagtacaccatgggcgacgcccccgactacgacagaagccagtggctgaacgagaagttcaagctgggcctggacttccccaacctgccctacctgatcgacggcgcccacaagatcacccagagcaacgccatcctgtgctacatcgccagaaagcacaacctgtgcggcgagaccgaggaggagaagatcagagtggacatcctggagaaccagaccatggacaaccacatgcagctgggcatgatctgctacaaccccgagttcggcctggagaagatcagcgcctacatgaagagcagcagattcctgcccagacccgtgttcagcaagatggccgtgtggggcaacaagtag

SEQ ID NO: 83298 - DNA, 714 bp, synthetic construct
  misc_feature 1..714: note = Description of Artificial Sequence: Synthetic coding sequence
  source 1..714: mol_type = other DNA
atgcccatgatcctgggctactgggacatcagaggcctggcccacgccatcagactgctgctggagtacaccgacagcagctacgaggagaagaagtacaccatgggcgacgcccccgactacgacagaagccagtggctgaacgagaagttcaagctgggcctggacttccccaacggcatgctgggcagcctggtggcccagctgagcttcgccggcttccccagcatccagctgccctacctgatcgacggcgcccacaagatcacccagagcaacgccatcctgtgctacatcgccagaaagcacaacctgtgcggcgagaccgaggaggagaagatcagagtggacatcctggagaaccagaccatggacaaccacatgcagctgggcatgatctgctacaaccccgagttcgagaagctgaagcccaagtacctggaggagctgcccgagaagctgaagctgtacagcgagttcctgggcaagagaccctggttcgccggcaacaagatcaccttcgtggacttcctggtgtacgacgtgctggacctgcacagaatcttcgagcccaagtgcctggacgccttccccaacctgaaggacttcatcagcagattcgagggcctggagaagatcagcgcctacatgaagagcagcagattcctgcccagacccgtgttcagcaagatggccgtgtggggcaacaagtag

SEQ ID NO: 83299 - DNA, 657 bp, synthetic construct
  misc_feature 1..657: note = Description of Artificial Sequence: Synthetic coding sequence
  source 1..657: mol_type = other DNA
atgcccatgaccctgggctactggaacatcagaggcctggcccacagcatcagactgctgctggagtacaccgacagcagctacgaggagaagaagtacaccatgggcgacgcccccgactacgacagaagccagtggctgaacgagaagttcaagctgggcctggacttccccaacctgccctacctgatcgacggcacccacaagatcacccagagcaacgccatcctgagatacatcgccagaaagcacaacctgtgcggcgagagcgagaaggagcagatcagagaggacatcctggagaaccagttcatggacagcagaatgcagctggccaagctgtgctacgaccccgacttcgagaagctgaagcccgagtacctgcaggccctgcccgagatgctgaagctgtacagccagttcctgggcaagcagccctggttcctgggcgacaagatcaccttcgtggacttcatcgcctacgacgtgctggagagaaaccaggtgttcgagcccagctgcctggacgccttccccaacctgaaggacttcatcagcagattcgagggcctggagaagatcagcgcctacatgaagagcagcagattcctgcccagacccgtgttcaccaagatggccgtgtggggcaacaagtag

SEQ ID NO: 83300 - DNA, 540 bp, synthetic construct
  misc_feature 1..540: note = Description of Artificial Sequence: Synthetic coding sequence
  source 1..540: mol_type = other DNA
atgaccctgggctactggaacatcagaggcctggcccacagcatcagactgctgctggagtacaccgacagcagctacgaggagaagaagtacaccatgggcgacgcccccgactacgacagaagccagtggctgaacgagaagttcaagctgggcctggacttccccaacctgccctacctgatcgacggcacccacaagatcacccagagcaacgccatcctgagatacatcgccagaaagcacaacctgtgcggcgagagcgagaaggagcagatcagagaggacatcctggagaaccagttcatggacagcagaatgcagctggccaagctgtgctacgaccccgacttcgagaagctgaagcccgagtacctgcaggccctgcccgagatgctgaagctgtacagccagttcctgggcaagcagccctggttcctgggcgacaagggcctggagaagatcagcgcctacatgaagagcagcagattcctgcccagacccgtgttcaccaagatggccgtgtggggcaacaagtag

SEQ ID NO: 83301 - DNA, 264 bp, synthetic construct
  misc_feature 1..264: note = Description of Artificial Sequence: Synthetic coding sequence
  source 1..264: mol_type = other DNA
atggacagcagaatgcagctggccaagctgtgctacgaccccgacttcgagaagctgaagcccgagtacctgcaggccctgcccgagatgctgaagctgtacagccagttcctgggcaagcagccctggttcctgggcgacaagatcaccttcgtggacttcatcgcctacgacgtgctggagagaaaccaggtgttcgagcccagctgcctggacgccttccccaacctgaaggacttcatcagcagattcgagcacagctag

SEQ ID NO: 83302 - DNA, 576 bp, synthetic construct
  misc_feature 1..576: note = Description of Artificial Sequence: Synthetic coding sequence
  source 1..576: mol_type = other DNA
atgcccatgaccctgggctactggaacatcagaggcctggcccacagcatcagactgctgctggagtacaccgacagcagctacgaggagaagaagtacaccatgggcgacgcccccgactacgacagaagccagtggctgaacgagaagttcaagctgggcctggacttccccaacctgccctacctgatcgacggcacccacaagatcacccagagcaacgccatcctgagatacatcgccagaaagcacaacctgtgcggcgagagcgagaaggagcagatcagagaggacatcctggagaaccagttcatggacagcagaatgcagctggccaagctgtgctacgaccccgacttcgagaagctgaagcccgagtacctgcaggccctgcccgagatgctgaagctgtacagccagttcctgggcaagcagccctggttcctgggcgacaagatcaccttcgtggacttcatcgcctacgacgtgctggagagaaaccaggtgttcgagcccagctgcctggacgccttccccaacctgaaggacttcatcagcagattcgagcacagctag

SEQ ID NO: 83303 - DNA, 576 bp, synthetic construct; identical to SEQ ID NO: 83302
  misc_feature 1..576: note = Description of Artificial Sequence: Synthetic coding sequence
  source 1..576: mol_type = other DNA

SEQ ID NO: 83304 - DNA, 678 bp, synthetic construct
  misc_feature 1..678: note = Description of Artificial Sequence: Synthetic coding sequence
  source 1..678: mol_type = other DNA
atgagctgcgagagcagcatggtgctgggctactgggacatcagaggcctggcccacgccatcagactgctgctggagttcaccgacaccagctacgaggagaagagatacacctgcggcgaggcccccgactacgacagaagccagtggctggacgtgaagttcaagctggacctggacttccccaacctgccctacctgctggacggcaagaacaagatcacccagagcaacgccatcctgagatacatcgccagaaagcacaacatgtgcggcgagaccgaggaggagaagatcagagtggacatcatcgagaaccaggtgatggacttcagaacccagctgatcagactgtgctacagcagcgaccacgagaagctgaagccccagtacctggaggagctgcccggccagctgaagcagttcagcatgttcctgggcaagttcagctggttcgccggcgagaagctgaccttcgtggacttcctgacctacgacatcctggaccagaacagaatcttcgaccccaagtgcctggacgagttccccaacctgaaggccttcatgtgcagattcgaggccctggagaagatcgccgcctacctgcagagcgaccagttctgcaagatgcccatcaacaacaagatggcccagtggggcaacaagcccgtgtgctag

SEQ ID NO: 83305 - DNA, 678 bp, synthetic construct; identical to SEQ ID NO: 83304
  misc_feature 1..678: note = Description of Artificial Sequence: Synthetic coding sequence
  source 1..678: mol_type = other DNA

SEQ ID NO: 83306 - DNA, 678 bp, synthetic construct; identical to SEQ ID NO: 83304
  misc_feature 1..678: note = Description of Artificial Sequence: Synthetic coding sequence
  source 1..678: mol_type = other DNA

SEQ ID NO: 83307 - DNA, 588 bp, synthetic construct
  misc_feature 1..588: note = Description of Artificial Sequence: Synthetic coding sequence
  source 1..588: mol_type = other DNA
atgagcatgaccctgggctactgggacatcagaggcctggcccacgccatcagactgctgctggagtacaccgacagcagctacgaggagaagaagtacaccatgggcgacgcccccgactacgacagaagccagtggctgaacgagaagttcaagctgggcctggacttccccaacctgccctacctgatcgacggcgcccacaagatcacccagagcaacgccatcctgtgctacatcgccagaaagcacaacctgtgcggcgagaccgaggaggagaagatcagagtggacatcctggagaaccaggccatggacgtgagcaaccagctggccagagtgtgctacagccccgacttcgagaagctgaagcccgagtacctggaggagctgcccaccatgatgcagcacttcagccagttcctgggcaagagaccctggttcgtgggcgacaagatcaccttcgtggacttcctggcctacgacgtgctggacctgcacagaatcttcgagcccaactgcctggacgccttccccaacctgaaggacttcatcagcagattcgaggtgagctgcggcatcatgtag

SEQ ID NO: 83308 - DNA, 474 bp, synthetic construct
  misc_feature 1..474: note = Description of Artificial Sequence: Synthetic coding sequence
  source 1..474: mol_type = other DNA
atgagcatgaccctgggctactgggacatcagaggcctggcccacgccatcagactgctgctggagtacaccgacagcagctacgaggagaagaagtacaccatgggcgacgcccccgactacgacagaagccagtggctgaacgagaagttcaagctgggcctggacttccccaacgagaagctgaagcccgagtacctggaggagctgcccaccatgatgcagcacttcagccagttcctgggcaagagaccctggttcgtgggcgacaagatcaccttcgtggacttcctggcctacgacgtgctggacctgcacagaatcttcgagcccaactgcctggacgccttccccaacctgaaggacttcatcagcagattcgagggcctggagaagatcagcgcctacatgaagagcagcagattcctgcccaagcccctgtacaccagagtggccgtgtggggcaacaagtag

SEQ ID NO: 83309 - DNA, 609 bp, synthetic construct
  misc_feature 1..609: note = Description of Artificial Sequence: Synthetic coding sequence
  source 1..609: mol_type = other DNA
atgctgggcagcctgctggcccagctgagcttccccggcttccccagcatccagctgccctacctgatcgacggcgcccacaagatcacccagagcaacgccatcctgtgctacatcgccagaaagcacaacctgtgcggcgagaccgaggaggagaagatcagagtggacatcctggagaaccaggccatggacgtgagcaaccagctggccagagtgtgctacagccccgacttcgagaagctgaagcccgagtacctggaggagctgcccaccatgatgcagcacttcagccagttcctgggcaagagaccctggttcgtgggcgacaagatcaccttcgtggacttcctggcctacgacgtgctggacctgcacagaatcttcgagcccaactgcctggacgccttccccaacctgaaggacttcatcagcagattcgaggtgatgccccccagcagcttcctgttcgacgccccctgcagcgtgaccagcttccagatgctgagccagagctggagctacatcaagaacaacctgcacctgctgagcgccggcttcatgcccggcaccctgcccagcaccctgtacctgagctgcggcatctag

SEQ ID NO: 83310 - DNA, 657 bp, synthetic construct
  misc_feature 1..657: note = Description of Artificial Sequence: Synthetic coding sequence
  source 1..657: mol_type = other DNA
atgagcatgaccctgggctactgggacatcagaggcctggcccacgccatcagactgctgctggagtacaccgacagcagctacgaggagaagaagtacaccatgggcgacgcccccgactacgacagaagccagtggctgaacgagaagttcaagctgggcctggacttccccaacctgccctacctgatcgacggcgcccacaagatcacccagagcaacgccatcctgtgctacatcgccagaaagcacaacctgtgcggcgagaccgaggaggagaagatcagagtggacatcctggagaaccaggccatggacgtgagcaaccagctggccagagtgtgctacagccccgacttcgagaagctgaagcccgagtacctggaggagctgcccaccatgatgcagcacttcagccagttcctgggcaagagaccctggttcgtgggcgacaagatcaccttcgtggacttcctggcctacgacgtgctggacctgcacagaatcttcgagcccaactgcctggacgccttccccaacctgaaggacttcatcagcagattcgagggcctggagaagatcagcgcctacatgaagagcagcagattcctgcccaagcccctgtacaccagagtggccgtgtggggcaacaagtag

SEQ ID NO: 83311 - DNA, 657 bp, synthetic construct
  misc_feature 1..657: note = Description of Artificial Sequence: Synthetic coding sequence
  source 1..657: mol_type = other DNA
atgcccatgaccctgggctactgggacatcagaggcctggcccacgccatcagactgctgctggagtacaccgacagcagctacgtggagaagaagtacaccctgggcgacgcccccgactacgacagaagccagtggctgaacgagaagttcaagctgggcctggacttccccaacctgccctacctgatcgacggcgcccacaagatcacccagagcaacgccatcctgagatacatcgccagaaagcacaacctgtgcggcgagaccgaggaggagaagatcagagtggacatcctggagaaccaggtgatggacaaccacatggagctggtgagactgtgctacgaccccgacttcgagaagctgaagcccaagtacctggaggagctgcccgagaagctgaagctgtacagcgagttcctgggcaagagaccctggttcgccggcgacaagatcaccttcgtggacttcctggcctacgacgtgctggacatgaagagaatcttcgagcccaagtgcctggacgccttcctgaacctgaaggacttcatcagcagattcgagggcctgaagaagatcagcgcctacatgaagagcagccagttcctgagaggcctgctgttcggcaagagcgccacctggaacagcaagtag

SEQ ID NO: 83312 - DNA, 714 bp, synthetic construct
  misc_feature 1..714: note = Description of Artificial Sequence: Synthetic coding sequence
  source 1..714: mol_type = other DNA
atgcccatgaccctgggctactgggacatcagaggcctggcccacgccatcagactgctgctggagtacaccgacagcagctacgtggagaagaagtacaccctgggcgacgcccccgactacgacagaagccagtggctgaacgagaagttcaagctgggcctggacttccccaacggcatgctgggcagcctggtggcccagctgagcttccccggcttccccagcatccagctgccctacctgatcgacggcgcccacaagatcacccagagcaacgccatcctgagatacatcgccagaaagcacaacctgtgcggcgagaccgaggaggagaagatcagagtggacatcctggagaaccaggtgatggacaaccacatggagctggtgagactgtgctacgaccccgacttcgagaagctgaagcccaagtacctggaggagctgcccgagaagctgaagctgtacagcgagttcctgggcaagagaccctggttcgccggcgacaagatcaccttcgtggacttcctggcctacgacgtgctggacatgaagagaatcttcgagcccaagtgcctggacgccttcctgaacctgaaggacttcatcagcagattcgagggcctgaagaagatcagcgcctacatgaagagcagccagttcctgagaggcctgctgttcggcaagagcgccacctggaacagcaagtag

SEQ ID NO: 83313 - DNA, 609 bp, synthetic construct
  misc_feature 1..609: note = Description of Artificial Sequence: Synthetic coding sequence
  source 1..609: mol_type = other DNA
atgctgggcagcctggtggcccagctgagcttccccggcttccccagcatccagctgccctacctgatcgacggcgcccacaagatcacccagagcaacgccatcctgagatacatcgccagaaagcacaacctgtgcggcgagaccgaggaggagaagatcagagtggacatcctggagaaccaggtgatggacaaccacatggagctggtgagactgtgctacgaccccgacttcgagaagctgaagcccaagtacctggaggagctgcccgagaagctgaagctgtacagcgagttcctgggcaagagaccctggttcgccggcgacaagatcaccttcgtggacttcctggcctacgacgtgctggacatgaagagaatcttcgagcccaagtgcctggacgccttcctgaacctgaaggacttcatcagcagattcgaggtgatgccccccagcagcttcctgttcgacgccccctgcagcttcctgagcttccagatgctgagccagagctggagctacaccaagaacaacagctacgtgctgagcaccggcttcatgcccggcatcatgcccagcaccctgtacctgagctgcagaatctag

SEQ ID NO: 83314 - DNA, 627 bp, synthetic construct
  misc_feature 1..627: note = Description of Artificial Sequence: Synthetic coding sequence
  source 1..627: mol_type = other DNA
atgagcggcgagagcgccagaagcctgggcaagggcagcgccccccccggccccgtgcccgagggcagcatcagaatctacagcatgagattctgccccttcgccgagagaaccagactggtgctgaaggccaagggcatcagacacgaggtgatcaacatcaacctgaagaacaagcccgagtggttcttcaagaagaaccccttcggcctggtgcccgtgctggagaacagccagggccagctgatctacgagagcgccatcacctgcgagtacctggacgaggcctaccccggcaagaagctgctgcccgacgacccctacgagaaggcctgccagaagatgatcctggagctgttcagcaaggtgctgaccaacaagaagaccaccttcttcggcggcaacagcatcagcatgatcgactacctgatctggccctggttcgagagactggaggccatgaagctgaacgagtgcgtggaccacacccccaagctgaagctgtggatggccgccatgaaggaggaccccaccgtgagcgccctgctgaccagcgagaaggactggcagggcttcctggagctgtacctgcagaacagccccgaggcctgcgactacggcctgtag

SEQ ID NO: 83315 - DNA, 726 bp, synthetic construct
  misc_feature 1..726: note = Description of Artificial Sequence: Synthetic coding sequence
  source 1..726: mol_type = other DNA
atgagcggcgagagcgccagaagcctgggcaagggcagcgccccccccggccccgtgcccgagggcagcatcagaatctacagcatgagattctgccccttcgccgagagaaccagactggtgctgaaggccaagggcatcagacacgaggtgatcaacatcaacctgaagaacaagcccgagtggttcttcaagaagaaccccttcggcctggtgcccgtgctggagaacagccagggccagctgatctacgagagcgccatcacctgcgagtacctggacgaggcctaccccggcaagaagctgctgcccgacgacccctacgagaaggcctgccagaagatgatcctggagctgttcagcaaggtgcccagcctggtgggcagcttcatcagaagccagaacaaggaggactacgccggcctgaaggaggagttcagaaaggagttcaccaagctggaggaggtgctgaccaacaagaagaccaccttcttcggcggcaacagcatcagcatgatcgactacctgatctggccctggttcgagagactggaggccatgaagctgaacgagtgcgtggaccacacccccaagctgaagctgtggatggccgccatgaaggaggaccccaccgtgagcgccctgctgaccagcgagaaggactggcagggcttcctggagctgtacctgcagaacagccccgaggcctgcgactacggcctgtag

SEQ ID NO: 83316 - DNA, 543 bp, synthetic construct
  misc_feature 1..543: note = Description of Artificial Sequence: Synthetic coding sequence
  source 1..543: mol_type = other DNA
atgagattctgccccttcgccgagagaaccagactggtgctgaaggccaagggcatcagacacgaggtgatcaacatcaacctgaagaacaagcccgagtggttcttcaagaagaaccccttcggcctggtgcccgtgctggagaacagccagggccagctgatctacgagagcgccatcacctgcgagtacctggacgaggcctaccccggcaagaagctgctgcccgacgacccctacgagaaggcctgccagaagatgatcctggagctgttcagcaaggtgctgaccaacaagaagaccaccttcttcggcggcaacagcatcagcatgatcgactacctgatctggccctggttcgagagactggaggccatgaagctgaacgagtgcgtggaccacacccccaagctgaagctgtggatggccgccatgaaggaggaccccaccgtgagcgccctgctgaccagcgagaaggactggcagggcttcctggagctgtacctgcagaacagccccgaggcctgcgactacggcctgtag

SEQ ID NO: 83317 - DNA, 603 bp, synthetic construct
  misc_feature 1..603: note = Description of Artificial Sequence: Synthetic coding sequence
  source 1..603: mol_type = other DNA
atgagattctgccccttcgccgagagaaccagactggtgctgaaggccaagggcatcagacacgaggtgatcaacatcaacctgaagaacaagcccgagtggttcttcaagaagaaccccttcggcctggtgcccgtgctggagaacagccagggccagctgatctacgagagcgccatcacctgcgagtacctggacgaggcctaccccggcaagaagctgctgcccgacgacccctacgagaaggcctgccagaagatgatcctggagctgttcagcaaggtgcccagcctggtgggcagcttcatcagaagccagaacaaggaggactacgccggcctgaaggaggagttcagaaaggagttcaccaagctggaggaggtgctgaccaacaagaagaccaccttcttcggcggcaacagcatcagcatgatcgactacctgatctggccctggttcgagagactggaggccatgaagctgaacgagtgcgtggaccacacccccaagctgaagctgtggatggccgccatgaaggaggaccccaccgtgagcgccctgctgaccagcgagaaggactggcagggcttcctggagctgtag

SEQ ID NO: 83318 - DNA, 642 bp, synthetic construct
  misc_feature 1..642: note = Description of Artificial Sequence: Synthetic coding sequence
  source 1..642: mol_type = other DNA
atgagattctgccccttcgccgagagaaccagactggtgctgaaggccaagggcatcagacacgaggtgatcaacatcaacctgaagaacaagcccgagtggttcttcaagaagaaccccttcggcctggtgcccgtgctggagaacagccagggccagctgatctacgagagcgccatcacctgcgagtacctggacgaggcctaccccggcaagaagctgctgcccgacgacccctacgagaaggcctgccagaagatgatcctggagctgttcagcaaggtgcccagcctggtgggcagcttcatcagaagccagaacaaggaggactacgccggcctgaaggaggagttcagaaaggagttcaccaagctggaggaggtgctgaccaacaagaagaccaccttcttcggcggcaacagcatcagcatgatcgactacctgatctggccctggttcgagagactggaggccatgaagctgaacgagtgcgtggaccacacccccaagctgaagctgtggatggccgccatgaaggaggaccccaccgtgagcgccctgctgaccagcgagaaggactggcagggcttcctggagctgtacctgcagaacagccccgaggcctgcgactacggcctgtag

SEQ ID NO: 83319 - DNA, 732 bp, synthetic construct
  misc_feature 1..732: note = Description of Artificial Sequence: Synthetic coding sequence
  source 1..732: mol_type = other DNA
atgagcggcgacgccaccagaaccctgggcaagggcagccagccccccggccccgtgcccgagggcctgatcagaatctacagcatgagattctgcccctacagccacagaaccagactggtgctgaaggccaaggacatcagacacgaggtggtgaacatcaacctgagaaacaagcccgagtggtactacaccaagcaccccttcggccacatccccgtgctggagaccagccagtgccagctgatctacgagagcgtgatcgcctgcgagtacctggacgacgcctaccccggcagaaagctgttcccctacgacccctacgagagagccagacagaagatgctgctggagctgttctgcaaggtgccccacctgaccaaggagtgcctggtggccctgagatgcggcagagagtgcaccaacctgaaggccgccctgagacaggagttcagcaacctggaggagatcctggagtaccagaacaccaccttcttcggcggcacctgcatcagcatgatcgactacctgctgtggccctggttcgagagactggacgtgtacggcatcctggactgcgtgagccacacccccgccctgagactgtggatcagcgccatgaagtgggaccccaccgtgtgcgccctgctgatggacaagagcatcttccagggcttcctgaacctgtacttccagaacaaccccaacgccttcgacttcggcctgtgctag

SEQ ID NO: 83320 - DNA, 648 bp, synthetic construct
  misc_feature 1..648: note = Description of Artificial Sequence: Synthetic coding sequence
  source 1..648: mol_type = other DNA
atgagattctgcccctacagccacagaaccagactggtgctgaaggccaaggacatcagacacgaggtggtgaacatcaacctgagaaacaagcccgagtggtactacaccaagcaccccttcggccacatccccgtgctggagaccagccagtgccagctgatctacgagagcgtgatcgcctgcgagtacctggacgacgcctaccccggcagaaagctgttcccctacgacccctacgagagagccagacagaagatgctgctggagctgttctgcaaggtgccccacctgaccaaggagtgcctggtggccctgagatgcggcagagagtgcaccaacctgaaggccgccctgagacaggagttcagcaacctggaggagatcctggagtaccagaacaccaccttcttcggcggcacctgcatcagcatgatcgactacctgctgtggccctggttcgagagactggacgtgtacggcatcctggactgcgtgagccacacccccgccctgagactgtggatcagcgccatgaagtgggaccccaccgtgtgcgccctgctgatggacaagagcatcttccagggcttcctgaacctgtacttccagaacaaccccaacgccttcgacttcggcctgtgctag

SEQ ID NO: 83321 - DNA, 732 bp, synthetic construct; identical to SEQ ID NO: 83319
  misc_feature 1..732: note = Description of Artificial Sequence: Synthetic coding sequence
  source 1..732: mol_type = other DNA

SEQ ID NO: 83322 - DNA, 501 bp, synthetic construct
  misc_feature 1..501: note = Description of Artificial Sequence: Synthetic coding sequence
  source 1..501: mol_type = other DNA
atgagcggcgacgccaccagaaccctgggcaagggcagccagccccccggccccgtgcccgagggcctgatcagaatctacagcatgagattctgcccctacagccacagaaccagactggtgctgaaggccaaggacatcagacacgaggtggtgaacatcaacctgagaaacaagcccgagtggtactacaccaagcaccccttcggccacatccccgtgctggagaccagccagtgccagctgatctacgagagcgtgatcgcctgcgagtacctggacgacgcctaccccggcagaaagctgttcccctacgacccctacgagagagccagacagaagatgctgctggagctgttctgcaaggtgccccacctgaccaaggagtgcctggtggccctgagatgcggcagagagtgcaccaacctgaaggccgccctgagacaggagttcagcaacctggaggaggacagaaagaagagaaagttcatccccggctag

SEQ ID NO: 83323 - DNA, 366 bp, synthetic construct
  misc_feature 1..366: note = Description of Artificial Sequence: Synthetic coding sequence
  source 1..366: mol_type = other DNA
atgagattctgcccctacagccacagaaccagactggtgctgaaggccaaggacatcagacacgaggtggtgaacatcaacctgagaaacaagcccgagtggtactacaccaagcaccccttcggccacatccccgtgctggagaccagccagtgccagctgatctacgagagcgtgatcgcctgcgagtacctggacgacgcctaccccggcagaaagctgttcccctacgacccctacgagagagccagacagaagatgctgctggagctgttctgcaagctgtgcgagccccacgccagccccgccgccctggacatcagccacgaggtgggcccccacagcctgtgcagcagccacggctag

SEQ ID NO: 83324 - DNA, 630 bp, synthetic construct
  misc_feature 1..630: note = Description of Artificial Sequence: Synthetic coding sequence
  source 1..630: mol_type = other DNA
atgagcggcgacgccaccagaaccctgggcaagggcagccagccccccggccccgtgcccgagggcctgatcagaatctacagcatgagattctgcccctacagccacagaaccagactggtgctgaaggccaaggacatcagacacgaggtggtgaacatcaacctgagaaacaagcccgagtggtactacaccaagcaccccttcggccacatccccgtgctggagaccagccagtgccagctgatctacgagagcgtgatcgcctgcgagtacctggacgacgcctaccccggcagaaagctgttcccctacgacccctacgagagagccagacagaagatgctgctggagctgttctgcaagatcctggagtaccagaacaccaccttcttcggcggcacctgcatcagcatgatcgactacctgctgtggccctggttcgagagactggacgtgtacggcatcctggactgcgtgagccacacccccgccctgagactgtggatcagcgccatgaagtgggaccccaccgtgtgcgccctgctgatggacaagagcatcttccagggcttcctgaacctgtacttccagaacaaccccaacgccttcgacttcggcctgtgctag

SEQ ID NO: 83325 - DNA, 723 bp, synthetic construct
  misc_feature 1..723: note = Description of Artificial Sequence: Synthetic coding sequence
  source 1..723: mol_type = other DNA
atgggcctggagctgtacctggacctgctgagccagccctgcagagccgtgtacatcttcgccaagaagaacgacatccccttcgagctgagaatcgtggacctgatcaagggccagcacctgagcgacgccttcgcccaggtgaaccccctgaagaaggtgcccgccctgaaggacggcgacttcaccctgaccgagagcgtggccatcctgctgtacctgaccagaaagtacaaggtgcccgactactggtacccccaggacctgcaggccagagccagagtggacgagtacctggcctggcagcacaccaccctgagaagaagctgcctgagagccctgtggcacaaggtgatgttccccgtgttcctgggcgagcccgtgagcccccagaccctggccgccaccctggccgagctggacgtgaccctgcagctgctggaggacaagttcctgcagaacaaggccttcctgaccggcccccacatcagcctggccgacctggtggccatcaccgagctgatgcaccccgtgggcgccggctgccaggtgttcgagggcagacccaagctggccacctggagacagagagtggaggccgccgtgggcgaggacctgttccaggaggcccacgaggtgatcctgaaggccaaggacttcccccccgccgaccccaccatcaagcagaagctgatgccctgggtgctggccatgatcagatag

SEQ ID NO: 83326 - DNA, 486 bp, synthetic construct
  misc_feature 1..486: note = Description of Artificial Sequence: Synthetic coding sequence
  source 1..486: mol_type = other DNA
atgggcctggagctgtacctggacctgctgagccagccctgcagagccgtgtacatcttcgccaagaagaacgacatccccttcgagctgagaatcgtggacctgatcaagggcgtgatgttccccgtgttcctgggcgagcccgtgagcccccagaccctggccgccaccctggccgagctggacgtgaccctgcagctgctggaggacaagttcctgcagaacaaggccttcctgaccggcccccacatcagcctggccgacctggtggccatcaccgagctgatgcaccccgtgggcgccggctgccaggtgttcgagggcagacccaagctggccacctggagacagagagtggaggccgccgtgggcgaggacctgttccaggaggcccacgaggtgatcctgaaggccaaggacttcccccccgccgaccccaccatcaagcagaagctgatgccctgggtgctggccatgatcagatag

SEQ ID NO: 83327 - DNA, 369 bp, synthetic construct
  misc_feature 1..369: note = Description of Artificial Sequence: Synthetic coding sequence
  source 1..369: mol_type = other DNA
atgttccccgtgttcctgggcgagcccgtgagcccccagaccctggccgccaccctggccgagctggacgtgaccctgcagctgctggaggacaagttcctgcagaacaaggccttcctgaccggcccccacatcagcctggccgacctggtggccatcaccgagctgatgcaccccgtgggcgccggctgccaggtgttcgagggcagacccaagctggccacctggagacagagagtggaggccgccgtgggcgaggacctgttccaggaggcccacgaggtgatcctgaaggccaaggacttcccccccgccgaccccaccatcaagcagaagctgatgccctgggtgctggccatgatcagatag

SEQ ID NO: 83328 - DNA, 198 bp, synthetic construct
  misc_feature 1..198: note = Description of Artificial Sequence: Synthetic coding sequence
  source 1..198: mol_type = other DNA
atgggcctggagctgtacctggacctgctgagccagccctgcagagccgtgtacatcttcgccaagaagaacgacatccccttcgagctgagaatcgtggacctgatcaagggccagcacctgagcgacgccttcgcccaggtgaaccccctgaagaaggtgcccgccctgaaggacggcgacttcaccctgacctag

SEQ ID NO: 83329 - DNA, 219 bp, synthetic construct
  misc_feature 1..219: note = Description of Artificial Sequence: Synthetic coding sequence
  source 1..219: mol_type = other DNA
atgggcctggagctgtacctggacctgctgagccagccctgcagagccgtgtacatcttcgccaagaagaacgacatccccttcgagctgagaatcgtggacctgatcaaggccagaggctgctggctgcccagcctgagaagacccacccaggccggccacatggccgccgccagaggcggcagcagcggcggcggccccctgcccggcggcccctag

SEQ ID NO: 83330 - DNA, 405 bp, synthetic construct
  misc_feature 1..405: note = Description of Artificial Sequence: Synthetic coding sequence
  source 1..405: mol_type = other DNA
atgcccttcctggagctggacaccaacctgcccgccaacagagtgcccgccggcctggagaagagactgtgcgccgccgccgccagcatcctgggcaagcccgccgacagagtgaacgtgaccgtgagacccggcctggccatggccctgagcggcagcaccgagccctgcgcccagctgagcatcagcagcatcggcgtggtgggcaccgccgaggacaacagaagccacagcgcccacttcttcgagttcctgaccaaggagctggccctgggccaggacagattccccaccgtgctgagcaccagccccgccgcccacggcggccccagatgccccggcgagatcatcgagggcaagaagagctgcctgaacgaggaggccctgttcatctacttcatctag

SEQ ID NO: 83331 - DNA, 831 bp, synthetic construct
  misc_feature 1..831: note = Description of Artificial Sequence: Synthetic coding sequence
  source 1..831: mol_type = other DNA
atgcccgtgcccgccagctggccccacccccccggccccttcctgctgctgaccctgctgctgggcctgaccgaggtggccggcgaggaggagctgcagatgatccagcccgagaagctgctgctggtgaccgtgggcaagaccgccaccctgcactgcaccgtgaccagcctgctgcccgtgggccccgtgctgtggttcagaggcgtgggccccggcagagagctgatctacaaccagaaggagggccacttccccagagtgaccaccgtgagcgacctgaccaagagaaacaacatggacttcagcatcagaatcagcagcatcacccccgccgacgtgggcacctactactgcgtgaagttcagaaagggcagccccgagaacgtggagttcaagagcggccccggcaccgagatggccctgggcgccaagcccagcgcccccgtggtgctgggccccgccgccagaaccacccccgagcacaccgtgagcttcacctgcgagagccacggcttcagccccagagacatcaccctgaagtggttcaagaacggcaacgagctgagcgacttccagaccaacgtggaccccaccggccagagcgtggcctacagcatcagaagcaccgccagagtggtgctggacccctgggacgtgagaagccaggtgatctgcgaggtggcccacgtgaccctgcagggcgaccccctgagaggcaccgccaacctgagcgaggccatcagaggccccgccagcagcctgaccgccctgctgctgatcgccgtgctgctgggccccatctacgtgccctggaagcagaagacctag

SEQ ID NO: 83332 - DNA, 1092 bp, synthetic construct
  misc_feature 1..1092: note = Description of Artificial Sequence: Synthetic coding sequence
  source 1..1092: mol_type = other DNA
atggccaccaactggggcagcctgctgcaggacaagcagcagctggaggagctggccagacaggccgtggacagagccctggccgagggcgtgctgctgagaaccagccaggagcccaccagcagcgaggtggtgagctacgcccccttcaccctgttccccagcctggtgcccagcgccctgctggagcaggcctacgccgtgcagatggacttcaacctgctggtggacgccgtgagccagaacgccgccttcctggagcagaccctgagcagcgccctggtgctgctgatcgcccaggagaaggagagaaacatcttcgaccagagagccatcgagaacgagctgctggccagaaacatccacgtgatcagaagaaccttcgaggacatcagcgagaagggcagcctggaccaggacagaagactgttcgtggacggccaggagatcgccgtggtgtacttcagagacggctacatgcccagacagtacagcctgcagaactgggaggccagactgctgctggagagaagccacgccgccaagtgccccgacatcgccacccagctggccggcaccaagaaggtgcagcaggagctgagcagacccggcatgctggagatgctgctgcccggccagcccgaggccgtggccagactgagagccaccttcgccggcctgtacagcctggacgtgggcgaggagggcgaccaggccatcgccgaggccctggccgcccccagcagattcgtgctgaagccccagagagagggcggcggcaacaacctgtacggcgaggagatggtgcaggccctgaagcagctgaaggacagcgaggagagagccagctacatcctgatggagaagatcgagcccgagcccttcgagaactgcctgctgagacccggcagccccgccagagtggtgcagtgcatcagcgagctgggcatcttcggcgtgtacgtgagacaggagaagaccctggtgatgaacaagcacgtgggccacctgctgagaaccaaggccatcgagcacgccgacggcggcgtggccgccggcgtggccgtgctggacaacccctaccccgtgtag

SEQ ID NO: 83333 - DNA, 1041 bp, synthetic construct
  misc_feature 1..1041: note = Description of Artificial Sequence: Synthetic coding sequence
  source 1..1041: mol_type = other DNA
atgttccagagaagcgccgacggcagccccgccctgaagcagatcgagatcaacaccatcagcgccagcttcggcggcctggccagcagaacccccgccgtgcacagacacgtgctgagcgtgctgagcaagaccaaggaggccggcaagatcctgagcaacaaccccagcaagggcctggccctgggcatcgccaaggcctgggagctgtacggcagccccaacgccctggtgctgctgatcgcccaggagaaggagagaaacatcttcgaccagagagccatcgagaacgagctgctggccagaaacatccacgtgatcagaagaaccttcgaggacatcagcgagaagggcagcctggaccaggacagaagactgttcgtggacggccaggagatcgccgtggtgtacttcagagacggctacatgcccagacagtacagcctgcagaactgggaggccagactgctgctggagagaagccacgccgccaagtgccccgacatcgccacccagctggccggcaccaagaaggtgcagcaggagctgagcagacccggcatgctggagatgctgctgcccggccagcccgaggccgtggccagactgagagccaccttcgccggcctgtacagcctggacgtgggcgaggagggcgaccaggccatcgccgaggccctggccgcccccagcagattcgtgctgaagccccagagagagggcggcggcaacaacctgtacggcgaggagatggtgcaggccctgaagcagctgaaggacagcgaggagagagccagctacatcctgatggagaagatcgagcccgagcccttcgagaactgcctgctgagacccggcagccccgccagagtggtgcagtgcatcagcgagctgggcatcttcggcgtgtacgtgagacaggagaagaccctggtgatgaacaagcacgtgggccacctgctgagaaccaaggccatcgagcacgccgacggcggcgtggccgccggcgtggccgtgctggacaacccctaccccgtgtag

SEQ ID NO: 83334 - DNA, 768 bp, synthetic construct
  misc_feature 1..768: note = Description of Artificial Sequence: Synthetic coding sequence
  source 1..768: mol_type = other DNA
atgagcagcatcggcaccggctacgacctgagcgccagcaccttcagccccgacggcagagtgttccaggtggagtacgccatgaaggccgtggagaacagcagcaccgccatcggcatcagatgcaaggacggcgtggtgttcggcgtggagaagctggtgctgagcaagctgtacgaggagggcagcaacaagagactgttcaacgtggacagacacgtgggcatggccgtggccggcctgctggccgacgccagaagcctggccgacatcgccagagaggaggccagcaacttcagaagcaacttcggctacaacatccccctgaagcacctggccgacagagtggccatgtacgtgcacgcctacaccctgtacagcgccgtgagacccttcggctgcagcttcatgctgggcagctacagcgtgaacgacggcgcccagctgtacatgatcgaccccagcggcgtgagctacggctactggggctgcgccatcggcaaggccagacaggccgccaagaccgagatcgagaagctgcagatgaaggagatgacctgcagagacatcgtgaaggaggtggccaagatcatctacatcgtgcacgacgaggtgaaggacaaggccttcgagctggagctgagctgggtgggcgagctgaccaacggcagacacgagatcgtgcccaaggacatcagagaggaggccgagaagtacgccaaggagagcctgaaggaggaggacgagagcgacgacgacaacatgtag

SEQ ID NO: 83335 - DNA, 525 bp, synthetic construct
  misc_feature 1..525: note = Description of Artificial Sequence: Synthetic coding sequence
  source 1..525: mol_type = other DNA
atgcaggccggcaagcccatcctgtacagctacttcagaagcagctgcagctggagagtgagaatcgccctggccctgaagggcatcgactacgagaccgtgcccatcaacctgatcaaggacggcggccagcagttcagcaaggacttccaggccctgaaccccatgaagcaggtgcccaccctgaagatcgacggcatcaccatccaccagagcaacctgagcgtgctgaagcaggtgggcgaggagatgcagctgacctgggcccagaacgccatcacctgcggcttcaacgccctggagcagatcctgcagagcaccgccggcatctactgcgtgggcgacgaggtgaccatggccgacctgtgcctggtgccccaggtggccaacgccgagagattcaaggtggacctgaccccctaccccaccatcagcagcatcaacaagagactgctggtgctggaggccttccaggtgagccacccctgcagacagcccgacacccccaccgagctgagagcctag

SEQ ID NO: 83336 - DNA, 486 bp, synthetic construct
  misc_feature 1..486: note = Description of Artificial Sequence: Synthetic coding sequence
  source 1..486: mol_type = other DNA
atgaagcaggtgcccaccctgaagatcgacggcatcaccatccaccagagcctggccatcatcgagtacctggaggagatgagacccacccccagactgctgccccaggaccccaagaagagagccagcgtgagaatgatcagcgacctgatcgccggcggcatccagcccctgcagaacctgagcgtgctgaagcaggtgggcgaggagatgcagctgacctgggcccagaacgccatcacctgcggcttcaacgccctggagcagatcctgcagagcaccgccggcatctactgcgtgggcgacgaggtgaccatggccgacctgtgcctggtgccccaggtggccaacgccgagagattcaaggtggacctgaccccctaccccaccatcagcagcatcaacaagagactgctggtgctggaggccttccaggtgagccacccctgcagacagcccgacacccccaccgagctgagagcctag

SEQ ID NO: 83337 - DNA, 486 bp, synthetic construct; identical to SEQ ID NO: 83336
  misc_feature 1..486: note = Description of Artificial Sequence: Synthetic coding sequence
  source 1..486: mol_type = other DNA

SEQ ID NO: 83338 - DNA, 180 bp, synthetic construct
  misc_feature 1..180: note = Description of Artificial Sequence: Synthetic coding sequence
  source 1..180: mol_type = other DNA
atgaagcaggtgcccaccctgaagatcgacggcatcaccatccaccagagcctggccatcatcgagtacctggaggagatgagacccacccccagactgctgccccaggaccccaagaagagagccagcgtgagaatgatcagcgacctgatcgccggcggcatccagcccctgcagtag

SEQ ID NO: 83339 - DNA, 117 bp, synthetic construct
  misc_feature 1..117: note = Description of Artificial Sequence: Synthetic coding sequence
  source 1..117: mol_type = other DNA
atgaagcaggtgcccaccctgaagatcgacggcatcaccatccaccagagcctggccatcatcgagtacctggaggagatgagacccacccccagactgctgccccaggacccctag

SEQ ID NO: 83340 - DNA, 486 bp, synthetic construct; identical to SEQ ID NO: 83336
  misc_feature 1..486: note = Description of Artificial Sequence: Synthetic coding sequence
  source 1..486: mol_type = other DNA

SEQ ID NO: 83341 - DNA, 387 bp, synthetic construct
  misc_feature 1..387: note = Description of Artificial Sequence: Synthetic coding sequence
  source 1..387: mol_type = other DNA
atggccggcaacctgctgagcggcgccggcagaagactgtgggactgggtgcccctggcctgcagaagcttcagcctgggcgtgcccagactgatcggcatcagactgaccctgcccccccccaaggtggtggacagatggaacgagaagagagccatgttcggcgtgtacgacaacatcggcatcctgggcaacttcgagaagcaccccaaggagctgatcagaggccccatctggctgagaggctggaagggcaacgagctgcagagatgcatcagaaagagaaagatggtgggcagcagaatgttcgccgacgacctgcacaacctgaacaagagaatcagatacctgtacaagcacttcaacagacacggcaagttcagatag

SEQ ID NO: 83342 - DNA, 783 bp, synthetic construct
  misc_feature 1..783: note = Description of Artificial Sequence: Synthetic coding sequence
  source 1..783: mol_type = other DNA
atggaggagatgagagaccccagcaagatcaagtggggcgacgccggcgccgagtacgtggtggagagcaccggcgtgttcaccaccatggagaaggccggcgcccacctgcagggcggcgccaagagagtgatcatcagcgcccccagcgccgacgcccccatgttcgtgatgggcgtgaaccacgagaagtacgacaacagcctgaagatcatcagcaacgccagctgcaccaccaactgcctggcccccctggccaaggtgatccacgacaacttcggcatcgtggagggcctgatgaccaccgtgcacgccatcaccgccacccagaagaccgtggacggccccagcggcaagctgtggagagacggcagaggcgccctgcagaacatcatccccgccagcaccggcgccgccaaggccgtgggcaaggtgatccccgagctgaacggcaagctgaccggcatggccttcagagtgcccaccgccaacgtgagcgtggtggacctgacctgcagactggagaagcccgccaagtacgacgacatcaagaaggtggtgaagcaggccagcgagggccccctgaagggcatcctgggctacaccgagcaccaggtggtgagcagcgacttcaacagcgacacccacagcagcaccttcgacgccggcgccggcatcgccctgaacgaccacttcgtgaagctgatcagctggtacgacaacgagttcggctacagcaacagagtggtggacctgatggcccacatggccagcaaggagtag

SEQ ID NO: 83343 - DNA, 882 bp, synthetic construct
  misc_feature 1..882: note = Description of Artificial Sequence: Synthetic coding sequence
  source 1..882: mol_type = other DNA
atggtgtacatgttccagtacgacagcacccacggcaagttccacggcaccgtgaaggccgagaacggcaagctggtgatcaacggcaaccccatcaccatcttccaggagagagaccccagcaagatcaagtggggcgacgccggcgccgagtacgtggtggagagcaccggcgtgttcaccaccatggagaaggccggcgcccacctgcagggcggcgccaagagagtgatcatcagcgcccccagcgccgacgcccccatgttcgtgatgggcgtgaaccacgagaagtacgacaacagcctgaagatcatcagcaacgccagctgcaccaccaactgcctggcccccctggccaaggtgatccacgacaacttcggcatcgtggagggcctgatgaccaccgtgcacgccatcaccgccacccagaagaccgtggacggccccagcggcaagctgtggagagacggcagaggcgccctgcagaacatcatccccgccagcaccggcgccgccaaggccgtgggcaaggtgatccccgagctgaacggcaagctgaccggcatggccttcagagtgcccaccgccaacgtgagcgtggtggacctgacctgcagactggagaagcccgccaagtacgacgacatcaagaaggtggtgaagcaggccagcgagggccccctgaagggcatcctgggctacaccgagcaccaggtggtgagcagcgacttcaacagcgacacccacagcagcaccttcgacgccggcgccggcatcgccctgaacgaccacttcgtgaagctgatcagctggtacgacaacgagttcggctacagcaacagagtggtggacctgatggcccacatggccagcaaggagtag

SEQ ID NO: 83344 - DNA, 1008 bp, synthetic construct
  misc_feature 1..1008: note = Description of Artificial Sequence: Synthetic coding sequence
  source 1..1008: mol_type = other DNA
atgggcaaggtgaaggtgggcgtgaacggcttcggcagaatcggcagactggtgaccagagccgccttcaacagcggcaaggtggacatcgtggccatcaacgaccccttcatcgacctgaactacatggtgtacatgttccagtacgacagcacccacggcaagttccacggcaccgtgaaggccgagaacggcaagctggtgatcaacggcaaccccatcaccatcttccaggagagagaccccagcaagatcaagtggggcgacgccggcgccgagtacgtggtggagagcaccggcgtgttcaccaccatggagaaggccggcgcccacctgcagggcggcgccaagagagtgatcatcagcgcccccagcgccgacgcccccatgttcgtgatgggcgtgaaccacgagaagtacgacaacagcctgaagatcatcagcaacgccagctgcaccaccaactgcctggcccccctggccaaggtgatccacgacaacttcggcatcgtggagggcctgatgaccaccgtgcacgccatcaccgccacccagaagaccgtggacggccccagcggcaagctgtggagagacggcagaggcgccctgcagaacatcatccccgccagcaccggcgccgccaaggccgtgggcaaggtgatccccgagctgaacggcaagctgaccggcatggccttcagagtgcccaccgccaacgtgagcgtggtggacctgacctgcagactggagaagcccgccaagtacgacgacatcaagaaggtggtgaagcaggccagcgagggccccctgaagggcatcctgggctacaccgagcaccaggtggtgagcagcgacttcaacagcgacacccacagcagcaccttcgacgccggcgccggcatcgccctgaacgaccacttcgtgaagctgatcagctggtacgacaacgagttcggctacagcaacagagtggtggacctgatggcccacatggccagcaaggagtag

SEQ ID NO: 83345 - DNA, 1008 bp, synthetic construct; identical to SEQ ID NO: 83344
  misc_feature 1..1008: note = Description of Artificial Sequence: Synthetic coding sequence
  source 1..1008: mol_type = other DNA

SEQ ID NO: 83346 - DNA, 648 bp, synthetic construct
  misc_feature 1..648: note = Description of Artificial Sequence: Synthetic coding sequence
  source 1..648: mol_type = other DNA
atgggcaaggtgaaggtgggcgtgaacggcttcggcagaatcggcagactggtgaccagagccgccttcaacagcggcaaggtggacatcgtggccatcaacgaccccttcatcgacctgaactacatggtgtacatgttccagtacgacagcacccacggcaagttccacggcaccgtgaaggccgagaacggcaagctggtgatcaacggcaaccccatcaccatcttccaggagagagaccccagcaagatcaagtggggcgacgccggcgccgagtacgtggtggagagcaccggcgtgttcaccaccatggagaaggccggcgcccacctgcagggcggcgccaagagagtgatcatcagcgcccccagcgccgacgcccccatgttcgtgatgggcgtgaaccacgagaagtacgacaacagcctgaagatcatcagcaacgccagctgcaccaccaactgcctggcccccctggccaaggtgatccacgacaacttcggcatcgtggagggcctgatgaccaccgtgcacgccatcaccgccacccagagagaggcccactggcacggcctgccctgcccccactgccagagagtgagcggcggccccgacctgcccagcagaaagacctgccagatctag

SEQ ID NO: 83347 - DNA, 675 bp, synthetic construct
  misc_feature 1..675: note = Description of Artificial Sequence: Synthetic coding sequence
  source 1..675: mol_type = other DNA
atgaccctgttccacttcggcaactgcttcgccctggcctacttcccctacttcatcacctacaagtgcagcggcctgagcgagtacaacgccttctggaagtgcgtgcaggccggcgtgacctacctgttcgtgcagctgtgcaagatgctgttcctggccaccttcttccccacctgggagggcggcatctacgacttcatcggcgagttcatgaaggccagcgtggacgtggccgacctgatcggcctgaacctggtgatgagcagaaacgccggcaagggcgagtacaagatcatggtggccgccctgggctgggccaccgccgagctgatcatgagcagatgcatccccctgtgggtgggcgccagaggcatcgagttcgactggaagtacatccagatgagcatcgacagcaacatcagcctggtgcactacatcgtggccagcgcccaggtgtggatgatcaccagatacgacctgtaccacaccttcagacccgccgtgctgctgctgatgttcctgagcgtgtacaaggccttcgtgatggagaccttcgtgcacctgtgcagcctgggcagctgggccgccctgctggccagagccgtggtgaccggcctgctggccctgagcaccctggccctgtacgtggccgtggtgaacgtgcacagctag

SEQ ID NO: 83348 - DNA, 1104 bp, synthetic construct
  misc_feature 1..1104: note = Description of Artificial Sequence: Synthetic coding sequence
  source 1..1104: mol_type = other DNA
atggccgccgccctgcaggtgctgcccagactggccagagcccccctgcaccccctgctgtggagaggcagcgtggccagactggccagcagcatggccctggccgagcaggccagacagctgttcgagagcgccgtgggcgccgtgctgcccggccccatgctgcacagagccctgagcctggaccccggcggcagacagctgaaggtgagagacagaaacttccagctgagacagaacctgtacctggtgggcttcggcaaggccgtgctgggcatggccgccgccgccgaggagctgctgggccagcacctggtgcagggcgtgatcagcgtgcccaagggcatcagagccgccatggagagagccggcaagcaggagatgctgctgaagccccacagcagagtgcaggtgttcgagggcgccgaggacaacctgcccgacagagacgccctgagagccgccctggccatccagcagctggccgagggcctgaccgccgacgacctgctgctggtgctgatcagcggcggcggcagcgccctgctgcccgcccccatcccccccgtgaccctggaggagaagcagaccctgaccagactgctggccgccagaggcgccaccatccaggagctgaacaccatcagaaaggccctgagccagctgaagggcggcggcctggcccaggccgcctaccccgcccaggtggtgagcctgatcctgagcgacgtggtgggcgaccccgtggaggtgatcgccagcggccccaccgtggccagcagccacaacgtgcaggactgcctgcacatcctgaacagatacggcctgagagccgccctgcccagaagcgtgaagaccgtgctgagcagagccgacagcgacccccacggcccccacacctgcggccacgtgctgaacgtgatcatcggcagcaacgtgctggccctggccgaggcccagagacaggccgaggccctgggctaccaggccgtggtgctgagcgccgccatgcagggctggggcacccccgccgcccacagagacgacagataccagtgccacggccacccccccctggtgcccgccgccagcgtgatggcctag

SEQ ID NO: 83349 - DNA, 705 bp, synthetic construct
  misc_feature 1..705: note = Description of Artificial Sequence: Synthetic coding sequence
  source 1..705: mol_type = other DNA
atggccgccgccctgcaggtgctgcccagactggccagagcccccctgcaccccctgctgtggagaggcagcgtggccagactggccagcagcatggccctggccgagcaggccagacagctgttcgagagcgccgtgggcgccgtgctgcccggccccatgctgcacagagccctgagcctggaccccggcggcagacagctgaaggtgagagacagaaacttccagctgagacagaacctgtacctggtgggcttcggcaaggccgtgctgggcatggccgccgccgccgaggagctgctgggccagcacctggtgcagggcgtgatcagcgtgcccaagggcatcagagccgccatggagagagccggcaagcaggagatgctgctgaagccccacagcagagtgcaggtgttcgagggcgccgaggacaacctgcccgacagagacgccctgagagccgccctggccatccagcagctggccgagggcctgaccgccgacgacctgctgctggtgctgatcagcggcggcgagccccaccccgtgagatgcggcggcggcccctgcggcggcgactgccagtggccccacagaggccagttcccccagtgcgccagactgcccgcctacccccagagcctgagacccccctgcagccccgccaccttctgcgaggactgcgccgtgagcggcagactgtag

SEQ ID NO: 83350 - DNA, 1374 bp, synthetic construct
  misc_feature 1..1374: note = Description of Artificial Sequence: Synthetic coding sequence
  source 1..1374: mol_type = other DNA
atggccgccgccctgcaggtgctgcccagactggccagagcccccctgcaccccctgctgtggagaggcagcgtggccagactggccagcagcatggccctggccgagcaggccagacagctgttcgagagcgccgtgggcgccgtgctgcccggccccatgctgcacagagccctgagcctggaccccggcggcagacagctgaaggtgagagacagaaacttccagctgagacagaacctgtacctggtgggcttcggcaaggccgtgctgggcatggccgccgccgccgaggagctgctgggccagcacctggtgcagggcgtgatcagcgtgcccaagggcatcagagccgcccccatcccccccgtgaccctggaggagaagcagaccctgaccagactgctggccgccagaggcgccaccatccaggagctgaacaccatcagaaaggccctgagccagctgaagggcggcggcctggcccaggccgcctaccccgcccaggtggtgagcctgatcctgagcgacgtggtgggcgaccccgtggaggtgatcgccagcggccccaccgtggccagcagccacaacgtgcaggactgcctgcacatcctgaacagatacggcctgagagccgccctgcccagaagcgtgaagaccgtgctgagcagagccgacagcgacccccacggcccccacacctgcggccacgtgctgaacgtgatcatcggcagcaacgtgctggccctggccgaggcccagagacaggccgaggccctgggctaccaggccgtggtgctgagcgccgccatgcagggcgacgtgaagagcatggcccagttctacggcctgctggcccacgtggccagaaccagactgacccccagcatggccggcgccagcgtggaggaggacgcccagctgcacgagctggccgccgagctgcagatccccgacctgcagctggaggaggccctggagaccatggcctggggcagaggccccgtgtgcctgctggccggcggcgagcccaccgtgcagctgcagggcagcggcagaggcggcagaaaccaggagctggccctgagagtgggcgccgagctgagaagatggcccctgggccccatcgacgtgctgttcctgagcggcggcaccgacggccaggacggccccaccgaggccgccggcgcctgggtgacccccgagctggccagccaggccgccgccgagggcctggacatcgccaccttcctggcccacaacgacagccacaccttcttctgctgcctgcagggcggcgcccacctgctgcacaccggcatgaccggcaccaacgtgatggacacccacctgctgttcctgagacccagatag

SEQ ID NO: 83351 - DNA, 1572 bp, synthetic construct
  misc_feature 1..1572: note = Description of Artificial Sequence: Synthetic coding sequence
  source 1..1572: mol_type = other DNA
atggccgccgccctgcaggtgctgcccagactggccagagcccccctgcaccccctgctgtggagaggcagcgtggccagactggccagcagcatggccctggccgagcaggccagacagctgttcgagagcgccgtgggcgccgtgctgcccggccccatgctgcacagagccctgagcctggaccccggcggcagacagctgaaggtgagagacagaaacttccagctgagacagaacctgtacctggtgggcttcggcaaggccgtgctgggcatggccgccgccgccgaggagctgctgggccagcacctggtgcagggcgtgatcagcgtgcccaagggcatcagagccgccatggagagagccggcaagcaggagatgctgctgaagccccacagcagagtgcaggtgttcgagggcgccgaggacaacctgcccgacagagacgccctgagagccgccctggccatccagcagctggccgagggcctgaccgccgacgacctgctgctggtgctgatcagcggcggcggcagcgccctgctgcccgcccccatcccccccgtgaccctggaggagaagcagaccctgaccagactgctggccgccagaggcgccaccatccaggagctgaacaccatcagaaaggccctgagccagctgaagggcggcggcctggcccaggccgcctaccccgcccaggtggtgagcctgatcctgagcgacgtggtgggcgaccccgtggaggtgatcgccagcggccccaccgtggccagcagccacaacgtgcaggactgcctgcacatcctgaacagatacggcctgagagccgccctgcccagaagcgtgaagaccgtgctgagcagagccgacagcgacccccacggcccccacacctgcggccacgtgctgaacgtgatcatcggcagcaacgtgctggccctggccgaggcccagagacaggccgaggccctgggctaccaggccgtggtgctgagcgccgccatgcagggcgacgtgaagagcatggcccagttctacggcctgctggcccacgtggccagaaccagactgacccccagcatggccggcgccagcgtggaggaggacgcccagctgcacgagctggccgccgagctgcagatccccgacctgcagctggaggaggccctggagaccatggcctggggcagaggccccgtgtgcctgctggccggcggcgagcccaccgtgcagctgcagggcagcggcagaggcggcagaaaccaggagctggccctgagagtgggcgccgagctgagaagatggcccctgggccccatcgacgtgctgttcctgagcggcggcaccgacggccaggacggccccaccgaggccgccggcgcctgggtgacccccgagctggccagccaggccgccgccgagggcctggacatcgccaccttcctggcccacaacgacagccacaccttcttctgctgcctgcagggcggcgcccacctgctgcacaccggcatgaccggcaccaacgtgatggacacccacctgctgttcctgagacccagatag

SEQ ID NO: 83352 - DNA, 852 bp, synthetic construct
  misc_feature 1..852: note = Description of Artificial Sequence: Synthetic coding sequence
  source 1..852: mol_type = other DNA
atggagctgctgctgagccagagctgcatctggtggcccatggtgggcgagggcagaaccatcatcagctgcggcatcaaggccatggagagaagcggcaactacctgatctggctgcagaagggcgagatgctgctgaagccccacagcagagtgcaggtgttcgagggcgccgaggacaacctgcccgacagagacgccctgagagccgccctggccatccagcagctggccgagggcctgaccgccgacgacctgctgctggtgctgatcagcggcggcggcagcgccctgctgcccgcccccatcccccccgtgaccctggaggagaagcagaccctgaccagactgctggccgccagaggcgccaccatccaggagctgaacaccatcagaaaggccctgagccagctgaagggcggcggcctggcccaggccgcctaccccgcccaggtggtgagcctgatcctgagcgacgtggtgggcgaccccgtggaggtgatcgccagcggccccaccgtggccagcagccacaacgtgcaggactgcctgcacatcctgaacagatacggcctgagagccgccctgcccagaagcgtgaagaccgtgctgagcagagccgacagcgacccccacggcccccacacctgcggccacgtgctgaacgtgatcatcggcagcaacgtgctggccctggccgaggcccagagacaggccgaggccctgggctaccaggccgtggtgctgagcgccgccatgcagggctggggcacccccgccgcccacagagacgacagataccagtgccacggccacccccccctggtgcccgccgccagcgtgatggcctag

SEQ ID NO: 83353 - DNA, 723 bp, synthetic construct
  misc_feature 1..723: note = Description of Artificial Sequence: Synthetic coding sequence
  source 1..723: mol_type = other DNA
atgctgctgaagccccacagcagagtgcaggtgttcgagggcgccgaggacaacctgcccgacagagacgccctgagagccgccctggccatccagcagctggccgagggcctgaccgccgacgacctgctgctggtgctgatcagcggcggcggcagcgccctgctgcccgcccccatcccccccgtgaccctggaggagaagcagaccctgaccagactgctggccgccagaggcgccaccatccaggagctgaacaccatcagaaaggccctgagccagctgaagggcggcggcctggcccaggccgcctaccccgcccaggtggtgagcctgatcctgagcgacgtggtgggcgaccccgtggaggtgatcgccagcggccccaccgtggccagcagccacaacgtgcaggactgcctgcacatcctgaacagatacggcctgagagccgccctgcccagaagcgtgaagaccgtgctgagcagagccgacagcgacccccacggcccccacacctgcggccacgtgctgaacgtgatcatcggcagcaacgtgctggccctggccgaggcccagagacaggccgaggccctgggctaccaggccgtggtgctgagcgccgccatgcagggctggggcacccccgccgcccacagagacgacagataccagtgccacggccacccccccctggtgcccgccgccagcgtgatggcctag

SEQ ID NO: 83354 - DNA, 618 bp, synthetic construct
  misc_feature 1..618: note = Description of Artificial Sequence: Synthetic coding sequence
  source 1..618: mol_type = other DNA
atggccgccgccctgcaggtgctgcccagactggccagagcccccctgcaccccctgctgtggagaggcagcgtggccagactggccagcagcatggccctggccgagcaggccagacagctgttcgagagcgccgtgggcgccgtgctgcccggccccatgctgcacagagccctgagcctggaccccggcggcagacagctgaaggtgagagacagaaacttccagctgagacagaacctgtacctggtgggcttcggcaaggccgtgctgggcatggccgccgccgccgaggagctgctgggccagcacctggtgcagggcgtgatcagcgtgcccaagggcatcagagccgccatggagagagccggcaagcaggagatgctgctgaagccccacagcagagtgcaggtgttcgagggcgccgaggacaacctgcccgacagagacgccctgagagccgccctggccatccagcagctggccgagggcctgaccgccgacgacctgctgctggtgctgatcagcggctggggcacccccgccgcccacagagacgacagataccagtgccacggccacccccccctggtgcccgccgccagcgtgatggcctag

SEQ ID NO: 83355 - DNA, 705 bp, synthetic construct; identical to SEQ ID NO: 83349
  misc_feature 1..705: note = Description of Artificial Sequence: Synthetic coding sequence
  source 1..705: mol_type = other DNA

SEQ ID NO: 83356 - DNA, 285 bp, synthetic construct
  misc_feature 1..285: note = Description of Artificial Sequence: Synthetic coding sequence
  source 1..285: mol_type = other DNA
aagatcctggacgccatgaacagagactgcggcatccccctgagccacctgcaggtggacggcggcatgaccagcaacaagatcctgatgcagctgcaggccgacatcctgtacatccccgtggtgaagcccagcatgcccgagaccaccgccctgggcgccgccatggccgccggcgccgccgagggcgtgggcgtgtggagcctggagcccgaggacctgagcgccgtgaccatggagagattcgagccccagatcaacgccgagggcaccttcaaggagtag

SEQ ID NO: 83357 - DNA, 1662 bp, synthetic construct
  misc_feature 1..1662: note = Description of Artificial Sequence: Synthetic coding sequence
  source 1..1662: mol_type = other DNA
atggccgccagcaagaaggccgtgctgggccccctggtgggcgccgtggaccagggcaccagcagcaccagattcctggtgttcaacagcaagaccgccgagctgctgagccaccaccaggtggagatcaagcaggagttccccagagagggctgggtggagcaggaccccaaggagatcctgcacagcgtgtacgagtgcatcgagaagacctgcgagaagctgggccagctgaacatcgacatcagcaacatcaaggccatcggcgtgagcaaccagagagagaccaccgtggtgtgggacaagatcaccggcgagcccctgtacaacgccgtggtgtggctggacctgagaacccagagcaccgtggagagcctgagcaagagaatccccggcaacaacaacttcgtgaagagcaagaccggcctgcccctgagcacctacttcagcgccgtgaagctgagatggctgctggacaacgtgagaaaggtgcagaaggccgtggaggagaagagagccctgttcggcaccatcgacagctggctgatctggagcctgaccggcggcgtgaacggcggcgtgcactgcaccgacgtgaccaacgccagcagaaccatgctgttcaacatccacagcctggagtgggacaagcagctgtgcgagttcttcggcatccccatggagatcctgcccaacgtgagaagcagcagcgagatctacggcctgatgaaggccggcgccctggagggcgtgcccatcagcggctgcctgggcgaccagagcgccgccctggtgggccagatgtgcttccagatcggccaggccaagaacacctacggcaccggctgcttcctgctgtgcaacaccggccacaagtgcgtgttcagcgaccacggcctgctgaccaccgtggcctacaagctgggcagagacaagcccgtgtactacgccctggagggcagcgtggccatcgccggcgccgtgatcagatggctgagagacaacctgggcatcatcaagaccagcgaggagatcgagaagctggccaaggaggtgggcaccagctacggctgctacttcgtgcccgccttcagcggcctgtacgccccctactgggagcccagcgccagaggcatcatctgcggcctgacccagttcaccaacaagtgccacatcgccttcgccgccctggaggccgtgtgcttccagaccagagagatcctggacgccatgaacagagactgcggcatccccctgagccacctgcaggtggacggcggcatgaccagcaacaagatcctgatgcagctgcaggccgacatcctgtacatccccgtggtgaagcccagcatgcccgagaccaccgccctgggcgccgccatggccgccggcgccgccgagggcgtgggcgtgtggagcctggagcccgaggacctgagcgccgtgaccatggagagattcgagccccagatcaacgccgaggagagcgagatcagatacagcacctggaagaaggccgtgatgaagagcatgggctgggtgaccacccagagccccgagagcggcgaccccagcatcttctgcagcctgcccctgggcttcttcatcgtgagcagcatggtgatgctgatcggcgccagatacatcagcggcatcccctag

SEQ ID NO: 83358 - DNA, 1575 bp, synthetic construct
  misc_feature 1..1575: note = Description of Artificial Sequence: Synthetic coding sequence
  source 1..1575: mol_type = other DNA
atggccgccagcaagaaggccgtgctgggccccctggtgggcgccgtggaccagggcaccagcagcaccagattcctggtgttcaacagcaagaccgccgagctgctgagccaccaccaggtggagatcaagcaggagttccccagagagggctgggtggagcaggaccccaaggagatcctgcacagcgtgtacgagtgcatcgagaagacctgcgagaagctgggccagctgaacatcgacatcagcaacatcaaggccatcggcgtgagcaaccagagagagaccaccgtggtgtgggacaagatcaccggcgagcccctgtacaacgccgtggtgtggctggacctgagaacccagagcaccgtggagagcctgagcaagagaatccccggcaacaacaacttcgtgaagagcaagaccggcctgcccctgagcacctacttcagcgccgtgaagctgagatggctgctggacaacgtgagaaaggtgcagaaggccgtggaggagaagagagccctgttcggcaccatcgacagctggctgatctggagcctgaccggcggcgtgaacggcggcgtgcactgcaccgacgtgaccaacgccagcagaaccatgctgttcaacatccacagcctggagtgggacaagcagctgtgcgagttcttcggcatccccatggagatcctgcccaacgtgagaagcagcagcgagatctacggcctgatgaaggccggcgccctggagggcgtgcccatcagcggctgcctgggcgaccagagcgccgccctggtgggccagatgtgcttccagatcggccaggccaagaacacctacggcaccggctgcttcctgctgtgcaacaccggccacaagtgcgtgttcagcgaccacggcctgctgaccaccgtggcctacaagctgggcagagacaagcccgtgtactacgccctggagggcagcgtggccatcgccggcgccgtgatcagatggctgagagacaacctgggcatcatcaagaccagcgaggagatcgagaagctggccaaggaggtgggcaccagctacggctgctacttcgtgcccgccttcagcggcctgtacgccccctactgggagcccagcgccagaggcatcatctgcggcctgacccagttcaccaacaagtgccacatcgccttcgccgccctggaggccgtgtgcttccagaccagagagatcctggacgccatgaacagagactgcggcatccccctgagccacctgcaggtggacggcggcatgaccagcaacaagatcctgatgcagctgcaggccgacatcctgtacatccccgtggtgaagcccagcatgcccgagaccaccgccctgggcgccgccatggccgccggcgccgccgagggcgtgggcgtgtggagcctggagcccgaggacctgagcgccgtgaccatggagagattcgagccccagatcaacgccgaggagagcgagatcagatacagcacctggaagaaggccgtgatgaagagcatgggctgggtgaccacccagagccccgagagcggcatcccctag

SEQ ID NO: 83359 - DNA, 1593 bp, synthetic construct
  misc_feature 1..1593: note = Description of Artificial Sequence: Synthetic coding sequence
  source 1..1593: mol_type = other DNA
atggccgccagcaagaaggccgtgctgggccccctggtgggcgccgtggaccagggcaccagcagcaccagattcctggtgttcaacagcaagaccgccgagctgctgagccaccaccaggtggagatcaagcaggagttccccagagagggctgggtggagcaggaccccaaggagatcctgcacagcgtgtacgagtgcatcgagaagacctgcgagaagctgggccagctgaacatcgacatcagcaacatcaaggccatcggcgtgagcaaccagagagagaccaccgtggtgtgggacaagatcaccggcgagcccctgtacaacgccgtggtgtggctggacctgagaacccagagcaccgtggagagcctgagcaagagaatccccggcaacaacaacttcgtgaagagcaagaccggcctgcccctgagcacctacttcagcgccgtgaagctgagatggctgctggacaacgtgagaaaggtgcagaaggccgtggaggagaagagagccctgttcggcaccatcgacagctggctgatctggagcctgaccggcggcgtgaacggcggcgtgcactgcaccgacgtgaccaacgccagcagaaccatgctgttcaacatccacagcctggagtgggacaagcagctgtgcgagttcttcggcatccccatggagatcctgcccaacgtgagaagcagcagcgagatctacggcctgatgaagatcagccacagcgtgaaggccggcgccctggagggcgtgcccatcagcggctgcctgggcgaccagagcgccgccctggtgggccagatgtgcttccagatcggccaggccaagaacacctacggcaccggctgcttcctgctgtgcaacaccggccacaagtgcgtgttcagcgaccacggcctgctgaccaccgtggcctacaagctgggcagagacaagcccgtgtactacgccctggagggcagcgtggccatcgccggcgccgtgatcagatggctgagagacaacctgggcatcatcaagaccagcgaggagatcgagaagctggccaaggaggtgggcaccagctacggctgctacttcgtgcccgccttcagcggcctgtacgccccctactgggagcccagcgccagaggcatcatctgcggcctgacccagttcaccaacaagtgccacatcgccttcgccgccctggaggccgtgtgcttccagaccagagagatcctggacgccatgaacagagactgcggcatccccctgagccacctgcaggtggacggcggcatgaccagcaacaagatcctgatgcagctgcaggccgacatcctgtacatccccgtggtgaagcccagcatgcccgagaccaccgccctgggcgccgccatggccgccggcgccgccgagggcgtgggcgtgtggagcctggagcccgaggacctgagcgccgtgaccatggagagattcgagccccagatcaacgccgaggagagcgagatcagatacagcacctggaagaaggccgtgatgaagagcatgggctgggtgaccacccagagccccgagagcggcatcccctag

SEQ ID NO: 83360 - DNA, 1065 bp, synthetic construct
  misc_feature 1..1065: note = Description of Artificial Sequence: Synthetic coding sequence
  source 1..1065: mol_type = other DNA
atgctgttcaacatccacagcctggagtgggacaagcagctgtgcgagttcttcggcatccccatggagatcctgcccaacgtgagaagcagcagcgagatctacggcctgatgaagatcagccacagcgtgaaggccggcgccctggagggcgtgcccatcagcggctgcctgggcgaccagagcgccgccctggtgggccagatgtgcttccagatcggccaggccaagaacacctacggcaccggctgcttcctgctgtgcaacaccggccacaagtgcgtgttcagcgaccacggcctgctgaccaccgtggcctacaagctgggcagagacaagcccgtgtactacgccctggagggcagcgtggccatcgccggcgccgtgatcagatggctgagagacaacctgggcatcatcaagaccagcgaggagatcgagaagctggccaaggaggtgggcaccagctacggctgctacttcgtgcccgccttcagcggcctgtacgccccctactgggagcccagcgccagaggcatcatctgcggcctgacccagttcaccaacaagtgccacatcgccttcgccgccctggaggccgtgtgcttccagaccagagagatcctggacgccatgaacagagactgcggcatccccctgagccacctgcaggtggacggcggcatgaccagcaacaagatcctgatgcagctgcaggccgacatcctgtacatccccgtggtgaagcccagcatgcccgagaccaccgccctgggcgccgccatggccgccggcgccgccgagggcgtgggcgtgtggagcctggagcccgaggacctgagcgccgtgaccatggagagattcgagccccagatcaacgccgaggagagcgagatcagatacagcacctggaagaaggccgtgatgaagagcatgggctgggtgaccacccagagccccgagagcggcgaccccagcatcttctgcagcctgcccctgggcttcttcatcgtgagcagcatggtgatgctgatcggcgccagatacatcagcggcatcccctag

SEQ ID NO: 83361 - DNA, 1104 bp, synthetic construct
  misc_feature 1..1104: note = Description of Artificial Sequence: Synthetic coding sequence
  source 1..1104: mol_type = other DNA
atggcctacctggacaacttcaagaccaacgccagacacttcatcctgttcgtgaacatcagcagcctgaccggcggcgtgaacggcggcgtgcactgcaccgacgtgaccaacgccagcagaaccatgctgttcaacatccacagcctggagtgggacaagcagctgtgcgagttcttcggcatccccatggagatcctgcccaacgtgagaagcagcagcgagatctacggcctgatgaagatcagccacagcgtgaaggccggcgccctggagggcgtgcccatcagcggctgcctgggcgaccagagcgccgccctggtgggccagatgtgcttccagatcggccaggccaagaacacctacggcaccggctgcttcctgctgtgcaacaccggccacaagtgcgtgttcagcgaccacggcctgctgaccaccgtggcctacaagctgggcagagacaagcccgtgtactacgccctggagggcagcgtggccatcgccggcgccgtgatcagatggctgagagacaacctgggcatcatcaagaccagcgaggagatcgagaagctggccaaggaggtgggcaccagctacggctgctacttcgtgcccgccttcagcggcctgtacgccccctactgggagcccagcgccagaggcatcatctgcggcctgacccagttcaccaacaagtgccacatcgccttcgccgccctggaggccgtgtgcttccagaccagagagatcctggacgccatgaacagagactgcggcatccccctgagccacctgcaggtggacggcggcatgaccagcaacaagatcctgatgcagctgcaggccgacatcctgtacatccccgtggtgaagcccagcatgcccgagaccaccgccctgggcgccgccatggccgccggcgccgccgagggcgtgggcgtgtggagcctggagcccgaggacctgagcgccgtgaccatggagagattcgagccccagatcaacgccgaggagagcgagatcagatacagcacctggaagaaggccgtgatgaagagcatgggctgggtgaccacccagagccccgagagcggcatcccctag

SEQ ID NO: 83362 - DNA, 1680 bp, synthetic construct
  misc_feature 1..1680: note = Description of Artificial Sequence: Synthetic coding sequence
  source 1..1680: mol_type = other DNA
atggccgccagcaagaaggccgtgctgggccccctggtgggcgccgtggaccagggcaccagcagcaccagattcctggtgttcaacagcaagaccgccgagctgctgagccaccaccaggtggagatcaagcaggagttccccagagagggctgggtggagcaggaccccaaggagatcctgcacagcgtgtacgagtgcatcgagaagacctgcgagaagctgggccagctgaacatcgacatcagcaacatcaaggccatcggcgtgagcaaccagagagagaccaccgtggtgtgggacaagatcaccggcgagcccctgtacaacgccgtggtgtggctggacctgagaacccagagcaccgtggagagcctgagcaagagaatccccggcaacaacaacttcgtgaagagcaagaccggcctgcccctgagcacctacttcagcgccgtgaagctgagatggctgctggacaacgtgagaaaggtgcagaaggccgtggaggagaagagagccctgttcggcaccatcgacagctggctgatctggagcctgaccggcggcgtgaacggcggcgtgcactgcaccgacgtgaccaacgccagcagaaccatgctgttcaacatccacagcctggagtgggacaagcagctgtgcgagttcttcggcatccccatggagatcctgcccaacgtgagaagcagcagcgagatctacggcctgatgaccatccacaacagcaagaaggccggcgccctggagggcgtgcccatcagcggctgcctgggcgaccagagcgccgccctggtgggccagatgtgcttccagatcggccaggccaagaacacctacggcaccggctgcttcctgctgtgcaacaccggccacaagtgcgtgttcagcgaccacggcctgctgaccaccgtggcctacaagctgggcagagacaagcccgtgtactacgccctggagggcagcgtggccatcgccggcgccgtgatcagatggctgagagacaacctgggcatcatcaagaccagcgaggagatcgagaagctggccaaggaggtgggcaccagctacggctgctacttcgtgcccgccttcagcggcctgtacgccccctactgggagcccagcgccagaggcatcatctgcggcctgacccagttcaccaacaagtgccacatcgccttcgccgccctggaggccgtgtgcttccagaccagagagatcctggacgccatgaacagagactgcggcatccccctgagccacctgcaggtggacggcggcatgaccagcaacaagatcctgatgcagctgcaggccgacatcctgtacatccccgtggtgaagcccagcatgcccgagaccaccgccctgggcgccgccatggccgccggcgccgccgagggcgtgggcgtgtggagcctggagcccgaggacctgagcgccgtgaccatggagagattcgagccccagatcaacgccgaggagagcgagatcagatacagcacctggaagaaggccgtgatgaagagcatgggctgggtgaccacccagagccccgagagcggcgaccccagcatcttctgcagcctgcccctgggcttcttcatcgtgagcagcatggtgatgctgatcggcgccagatacatcagcggcatcccctag

SEQ ID NO: 83363 - DNA, 1662 bp, synthetic construct
  misc_feature 1..1662: note = Description of Artificial Sequence: Synthetic coding sequence
  source 1..1662: mol_type = other DNA
atggccgcccccaagaccgccgccgtgggccccctggtgggcgccgtggtgcagggcaccaacagcaccagattcctggtgttcaacagcaagaccgccgagctgctgagccaccacaaggtggagctgacccaggagttccccaaggagggctgggtggagcaggaccccaaggagatcctgcagagcgtgtacgagtgcatcgccagaacctgcgagaagctggacgagctgaacatcgacatcagcaacatcaaggccgtgggcgtgagcaaccagagagagaccaccgtgatctgggacaagctgaccggcgagcccctgtacaacgccgtggtgtggctggacctgagaacccagaccaccgtggaggacctgagcaagaagatccccggcaacagcaacttcgtgaagagcaagaccggcctgcccctgagcacctacttcagcgccgtgaagctgagatggatgctggacaacgtgagaaacgtgcagaaggccgtggaggagggcagagccctgttcggcaccatcgacagctggctgatctggagcctgaccggcggcgtgaacggcggcgtgcactgcaccgacgtgaccaacgccagcagaaccatgctgttcaacatccacagcctggagtgggacaaggagctgtgcgacttcttcgagatccccatggacctgctgcccaacgtgttcagcagcagcgagatctacggcctgatcaagaccggcgccctggagggcgtgcccatcagcggctgcctgggcgaccagtgcgccgccctggtgggccagatgtgcttccaggagggccaggccaagaacacctacggcaccggctgcttcctgctgtgcaacaccggcagaaagtgcgtgttcagcgagcacggcctgctgaccaccgtggcctacaagctgggcagagagaagcccgcctactacgccctggagggcagcgtggccatcgccggcgccgtgatcagatggctgagagacaacctgggcatcatcgagaccagcggcgacatcgagagactggccaaggaggtgggcaccagctacggctgctacttcgtgcccgccttcagcggcctgtacgccccctactgggagcccagcgccagaggcatcctgtgcggcctgacccagttcaccaacaagtgccacatcgccttcgccgccctggaggccgtgtgcttccagaccagagagatcctggaggccatgaacagagactgcggcatccccctgagacacctgcaggtggacggcggcatgaccaacaacaaggtgctgatgcagctgcaggccgacatcctgcacatccccgtgatcaagcccttcatgcccgagaccaccgccctgggcgccgccatggccgccggcgccgccgagggcgtgagcgtgtggagcctggagccccaggccctgagcgtgctgagaatggagagattcgagccccagatccaggccaccgagagcgagatcagatacgccacctggaagaaggccgtgatgaagagcatgggctgggtgaccagccagagccccgagggcggcgaccccagcatcttcagcagcctgcccctgggcttcttcatcgtgagcagcatggtgatgctgatcggcgccagatacatcagcggcgtgccctag

SEQ ID NO: 83364 - DNA, 1050 bp, synthetic construct
  misc_feature 1..1050: note = Description of Artificial Sequence: Synthetic coding sequence
  source 1..1050: mol_type = other DNA
atggccagcaagaaggtgtgcatcgtgggcagcggcaactggggcagcgccatcgccaagatcgtgggcggcaacgccgcccagctggcccagttcgaccccagagtgaccatgtgggtgttcgaggaggacatcggcggcaagaagctgaccgagatcatcaacacccagcacgagaacgtgaagtacctgcccggccacaagctgccccccaacgtggtggccgtgcccgacgtggtgcaggccgccgaggacgccgacatcctgatcttcgtggtgccccaccagttcatcggcaagatctgcgaccagctgaagggccacctgaaggccaacgccaccggcatcagcctgatcaagggcgtggacgagggccccaacggcctgaagctgatcagcgaggtgatcggcgagagactgggcatccccatgagcgtgctgatgggcgccaacatcgccagcgaggtggccgacgagaagttctgcgagaccaccatcggctgcaaggaccccgcccagggccagctgctgaaggagctgatgcagacccccaacttcagaatcaccgtggtgcaggaggtggacaccgtggagatctgcggcgccctgaagaacgtggtggccgtgggcgccggcttctgcgacggcctgggcttcggcgacaacaccaaggccgccgtgatcagactgggcctgatggagatgatcgccttcgccaagctgttctgcagcggccccgtgagcagcgccaccttcctggagagctgcggcgtggccgacctgatcaccacctgctacggcggcagaaacagaaaggtggccgaggccttcgccagaaccggcaagagcatcgagcagctggagaaggagctgctgaacggccagaagctgcagggccccgagaccgccagagagctgtacagcatcctgcagcacaagggcctggtggacaagttccccctgttcatggccgtgtacaaggtgtgctacgagggccagcccgtgggcgagttcatccactgcctgcagaaccaccccgagcacatgtag

SEQ ID NO: 83365 - DNA, 981 bp, synthetic construct
  misc_feature 1..981: note = Description of Artificial Sequence: Synthetic coding sequence
  source 1..981: mol_type = other DNA
atgcagacccccaacttcagaatcaccgtggtgcaggaggtggacaccgtggagatctgcggcgccctgaaggtgagaggcgcccagagacagctgtggggcgaggagaaggcccccaaggaggtgtggctgagcagcgccagactgcaggtgctgcaggccctgaccatcgagcagtggttccccttccccaccatgagccacgcctacagaagaagctgcagaagcaaggccagagccatccaggccgactacagcagcagcgacagaggccccccctgcagctgccccatcctggccccctgcggcaccccccaccccctggcccccggcggccagggcgacaaggagatgcccagactgatgggcgacaagaccagcctgacccccagacagaccaacggccagaactacggcagctggaccgccgtggacggcctgtacaacggcatggtgagatgggaggaccagctggagagaagagtggtgttcagaaagtgccccagaggcggcagcatgggccagggcctgagaaagggcgtgcagcagggcggcaagcccagaggcggcagcagactgctgaagggccacaccctgtacctgagcagcgccgtgggcgtgaccgccgacgagatgagcatgagaggcctgcacatgggccccatcggcggcggcctgttcacctacgacctgcacagcttcaagaacgtggtggccgtgggcgccggcttctgcgacggcctgggcttcggcgacaacaccaaggccgccgtgatcagactgggcctgatggagatgatcgccttcgccaagctgttctgcagcggccccgtgagcagcgccaccttcctggagagctgcggcgtggccgacctgatcaccacctgctacggcggcagaaacagaaaggtggccgaggccttcgccagaaccggcaaggtgggccccggcagaagagagaacagaggcgccgccctgtag

SEQ ID NO: 83366 - DNA, 1056 bp, synthetic construct
  misc_feature 1..1056: note = Description of Artificial Sequence: Synthetic coding sequence
  source 1..1056: mol_type = other DNA
atggccgccgcccccctgaaggtgtgcatcgtgggcagcggcaactggggcagcgccgtggccaagatcatcggcaacaacgtgaagaagctgcagaagttcgccagcaccgtgaagatgtgggtgttcgaggagaccgtgaacggcagaaagctgaccgacatcatcaacaacgaccacgagaacgtgaagtacctgcccggccacaagctgcccgagaacgtggtggccatgagcaacctgagcgaggccgtgcaggacgccgacctgctggtgttcgtgatcccccaccagttcatccacagaatctgcgacgagatcaccggcagagtgcccaagaaggccctgggcatcaccctgatcaagggcatcgacgagggccccgagggcctgaagctgatcagcgacatcatcagagagaagatgggcatcgacatcagcgtgctgatgggcgccaacatcgccaacgaggtggccgccgagaagttctgcgagaccaccatcggcagcaaggtgatggagaacggcctgctgttcaaggagctgctgcagacccccaacttcagaatcaccgtggtggacgacgccgacaccgtggagctgtgcggcgccctgaagaacatcgtggccgtgggcgccggcttctgcgacggcctgagatgcggcgacaacaccaaggccgccgtgatcagactgggcctgatggagatgatcgccttcgccagaatcttctgcaagggccaggtgagcaccgccaccttcctggagagctgcggcgtggccgacctgatcaccacctgctacggcggcagaaacagaagagtggccgaggccttcgccagaaccggcaagaccatcgaggagctggagaaggagatgctgaacggccagaagctgcagggcccccagaccagcgccgaggtgtacagaatcctgaagcagaagggcctgctggacaagttccccctgttcaccgccgtgtaccagatctgctacgagagcagacccgtgcaggagatgctgagctgcctgcagagccaccccgagcacacctag

SEQ ID NO: 83367 - DNA, 1860 bp, synthetic construct
  misc_feature 1..1860: note = Description of Artificial Sequence: Synthetic coding sequence
  source 1..1860: mol_type = other DNA
atggagagcagcagcagcagcaacagctacttcagcgtgggccccaccagccccagcgccgtggtgctgctgtacagcctgagcaaggagagcctgcagagcgtggacgtgctgagagaggaggtgagcgagatcctggacgagatgagccacaagctgagactgggcgccatcagattctgcgccttcaccctgagcaaggtgttcaagcagatcttcagcaaggtgtgcgtgaacgaggagggcatccagaagctgcagagagccatccaggagcaccccgtggtgctgctgcccagccacagaagctacatcgacttcctgatgctgagcttcctgctgtacaactacgacctgcccgtgcccgtgatcgccgccggcatggacttcctgggcatgaagatggtgggcgagctgctgagaatgagcggcgccttcttcatgagaagaaccttcggcggcaacaagctgtactgggccgtgttcagcgagtacgtgaagaccatgctgagaaacggctacgcccccgtggagttcttcctggagggcaccagaagcagaagcgccaagaccctgacccccaagttcggcctgctgaacatcgtgatggagcccttcttcaagagagaggtgttcgacacctacctggtgcccatcagcatcagctacgacaagatcctggaggagaccctgtacgtgtacgagctgctgggcgtgcccaagcccaaggagagcaccaccggcctgctgaaggccagaaagatcctgagcgagaacttcggcagcatccacgtgtacttcggcgaccccgtgagcctgagaagcctggccgccggcagaatgagcagaagcagctacaacctggtgcccagatacatcccccagaagcagagcgaggacatgcacgccttcgtgaccgaggtggcctacaagatggagctgctgcagatcgagaacatggtgctgagcccctggaccctgatcgtggccgtgctgctgcagaacagacccagcatggacttcgacgccctggtggagaagaccctgtggctgaagggcctgacccaggccttcggcggcttcctgatctggcccgacaacaagcccgccgaggaggtggtgcccgccagcatcctgctgcacagcaacatcgccagcctggtgaaggaccaggtgatcctgaaggtggacagcggcgacagcgaggtggtggacggcctgatgctgcagcacatcaccctgctgatgtgcagcgcctacagaaaccagctgctgaacatcttcgtgagacccagcctggtggccgtggccctgcagatgacccccggcttcagaaaggaggacgtgtacagctgcttcagattcctgagagacgtgttcgccgacgagttcatcttcctgcccggcaacaccctgaaggacttcgaggagggctgctacctgctgtgcaagagcgaggccatccaggtgaccaccaaggacatcctggtgaccgagaagggcaacaccgtgctggagttcctggtgggcctgttcaagcccttcgtggagagctaccagatcatctgcaagtacctgctgagcgaggaggaggaccacttcagcgaggagcagtacctggccgccgtgagaaagttcaccagccagctgctggaccagggcaccagccagtgctacgacgtgctgagcagcgacgtgcagaagaacgccctggccgcctgcgtgagactgggcgtggtggagaagaagaagatcaacaacaactgcatcttcaacgtgaacgagcccgccaccaccaagctggaggagatgctgggctgcaagacccccatcggcaagcccgccaccgccaagctgtag

SEQ ID NO: 83368 - DNA, 2043 bp, synthetic construct
  misc_feature 1..2043: note = Description of Artificial Sequence: Synthetic coding sequence
  source 1..2043: mol_type = other DNA
atggagagcagcagcagcagcaacagctacttcagcgtgggccccaccagccccagcgccgtggtgctgctgtacagcaaggagctgaagaagtgggacgagttcgaggacatcctggaggagagaagacacgtgagcgacctgaagttcgccatgaagtgctacacccccctggtgtacaagggcatcaccccctgcaagcccatcgacatcaagtgcagcgtgctgaacagcgaggagatccactacgtgatcaagcagctgagcaaggagagcctgcagagcgtggacgtgctgagagaggaggtgagcgagatcctggacgagatgagccacaagctgagactgggcgccatcagattctgcgccttcaccctgagcaaggtgttcaagcagatcttcagcaaggtgtgcgtgaacgaggagggcatccagaagctgcagagagccatccaggagcaccccgtggtgctgctgcccagccacagaagctacatcgacttcctgatgctgagcttcctgctgtacaactacgacctgcccgtgcccgtgatcgccgccggcatggacttcctgggcatgaagatggtgggcgagctgctgagaatgagcggcgccttcttcatgagaagaaccttcggcggcaacaagctgtactgggccgtgttcagcgagtacgtgaagaccatgctgagaaacggctacgcccccgtggagttcttcctggagggcaccagaagcagaagcgccaagaccctgacccccaagttcggcctgctgaacatcgtgatggagcccttcttcaagagagaggtgttcgacacctacctggtgcccatcagcatcagctacgacaagatcctggaggagaccctgtacgtgtacgagctgctgggcgtgcccaagcccaaggagagcaccaccggcctgctgaaggccagaaagatcctgagcgagaacttcggcagcatccacgtgtacttcggcgaccccgtgagcctgagaagcctggccgccggcagaatgagcagaagcagctacaacctggtgcccagatacatcccccagaagcagagcgaggacatgcacgccttcgtgaccgaggtggcctacaagatggagctgctgcagatcgagaacatggtgctgagcccctggaccctgatcgtggccgtgctgctgcagaacagacccagcatggacttcgacgccctggtggagaagaccctgtggctgaagggcctgacccaggccttcggcggcttcctgatctggcccgacaacaagcccgccgaggaggtggtgcccgccagcatcctgctgcacagcaacatcgccagcctggtgaaggaccaggtgatcctgaaggtggacagcggcgacagcgaggtggtggacggcctgatgctgcagcacatcaccctgctgatgtgcagcgcctacagaaaccagctgctgaacatcttcgtgagacccagcctggtggccgtggccctgcagatgacccccggcttcagaaaggaggacgtgtacagctgcttcagattcctgagagacgtgttcgccgacgagttcatcttcctgcccggcaacaccctgaaggacttcgaggagggctgctacctgctgtgcaagagcgaggccatccaggtgaccaccaaggacatcctggtgaccgagaagggcaacaccgtgctggagttcctggtgggcctgttcaagcccttcgtggagagctaccagatcatctgcaagtacctgctgagcgaggaggaggaccacttcagcgaggagcagtacctggccgccgtgagaaagttcaccagccagctgctggaccagggcaccagccagtgctacgacgtgctgagcagcgacgtgcagaagaacgccctggccgcctgcgtgagactgggcgtggtggagaagaagaagatcaacaacaactgcatcttcaacgtgaacgagcccgccaccaccaagctggaggagatgctgggctgcaagacccccatcggcaagcccgccaccgccaagctgtag

SEQ ID NO: 83369 - DNA, 1764 bp, synthetic construct
  misc_feature 1..1764: note = Description of Artificial Sequence: Synthetic coding sequence
  source 1..1764: mol_type = other DNA
atggagagcagcagcagcagcaacagctacttcagcgtgggccccaccagccccagcgccgtggtgctgctgtacagcaaggagctgaagaagtgggacgagttcgaggacatcctggaggagagaagacacgtgagcgacctgaagttcgccatgaagtgctacacccccctggtgtacaagggcatcaccccctgcaagcccatcgacatcaagtgcagcgtgctgaacagcgaggagatccactacgtgatcaagcagctgagcaaggagagcctgcagagcgtggacgtgctgagagaggaggtgagcgagatcctggacgagatgagccacaagctgagactgggcgccatcagattctgcgccttcaccctgagcaaggtgttcaagcagatcttcagcaagctgcagagagccatccaggagcaccccgtggtgctgctgcccagccacagaagctacatcgacttcctgatgctgagcttcctgctgtacaactacgacctgcccgtgcccgtgatcgccgccggcatggacttcctgggcatgaagatggtgggcgagctgctgagaatgagcggcgccttcttcatgagaagaaccttcggcggcaacaagctgtactgggccgtgttcagcgagtacgtgaagaccatgctgagaaacggctacgcccccgtggagttcttcctggagggcaccagaagcagaagcgccaagaccctgacccccaagttcggcctgctgaacatcgtgatggagcccttcttcaagagagaggtgttcgacacctacctggtgcccatcagcatcagctacgacaagatcctggaggagaccctgtacgtgtacgagctgctgggcgtgcccaagcccaaggagagcaccaccggcctgctgaaggccagaaagatcctgagcgagaacttcggcagcatccacgtgtacttcggcgaccccgtgagcctgagaagcctggccgccggcagaatgagcagaagcagctacaacctggtgcccagatacatcccccagaagcagagcgaggacatgcacgccttcgtgaccgaggtggcctacaagatggagctgctgcagatcgagaacatggtgctgagcccctggaccctgatcgtggccgtgctgctgcagaacagacccagcatggacttcgacgccctggtggagaagaccctgtggctgaagggcctgacccaggccttcggcggcttcctgatctggcccgacaacaagcccgccgaggaggtggtgcccgccagcatcctgctgcacagcaacatcgccagcctggtgaaggaccaggtgatcctgaaggtggacagcggcgacagcgaggtggtggacggcctgatgctgcagcacatcaccctgctgatgtgcagcgcctacagaaaccagctgctgaacatcttcgtgagacccagcctggtggccgtggccctgcagatgacccccggcttcagaaaggaggacgtgtacagctgcttcagattcctgagagacgtgttcgccgacgagttcatcttcctgcccggcaacaccctgaaggacttcgaggagggctgctacctgctgtgcaagagcgaggccatccaggtgaccaccaaggacatcctggtgaccgagaagggcaacaccgtgctggagttcctggtgggcctgttcaagcccttcgtggagagctaccagatcatctgcaagtacctgctgagcgaggaggaggaccacttcagcgagtag

SEQ ID NO: 83370 - DNA, 669 bp, synthetic construct
  misc_feature 1..669: note = Description of Artificial Sequence: Synthetic coding sequence
  source 1..669: mol_type = other DNA
atggagagcagcagcagcagcaacagctacttcagcgtgggccccaccagccccagcgccgtggtgctgctgtacagcctgagcaaggagagcctgcagagcgtggacgtgctgagagaggaggtgagcgagatcctggacgagatgagccacaagctgagactgggcgccatcagattctgcgccttcaccctgagcaaggtgttcaagcagatcttcagcaaggtgtgcgtgaacgaggagggcatccagaagctgcagagagccatccaggagcaccccgtggtgctgctgcccagccacagaagctacatcgacttcctgatgctgagcttcctgctgtacaactacgacctgcccgtgcccgtgatcgccgccggcatggacttcctgggcatgaagatggtgggcgagctgctgagaatgagcggcgccttcttcatgagaagaaccttcggcggcaacaagctgtactgggccgtgttcagcgagtacgtgaagaccatgctgagaaacggctacgcccccgtggagttcttcctggagggcaccagaagcagaagcgccaagaccctgacccccaagttcggcctgctgaacatcgtgatggagcccttcttcaagagagaggtgttcgacacctacctggtgcccatcagcatcagctag

SEQ ID NO: 83371 - DNA, 870 bp, synthetic construct
  misc_feature 1..870: note = Description of Artificial Sequence: Synthetic coding sequence
  source 1..870: mol_type = other DNA
atgagcagaaacagcagaaagaccatcggcaaggtgagagtggactacatcatcatcaagcccctgcccggctacagctgcgacatgaagagcagcttcagcaagtactggaagcccagaatccccctggacgtgggccacagaggcgccggcaacagcaccaccaccgcccagctggccaaggtgcaggagaacaccatcgccagcctgagaaacgccgccagccacggcgccgccttcgtggagttcgacgtgcacctgagcaaggacttcgtgcccgtggtgtaccacgacctgacctgctgcctgaccatgaagaagaacctgtggttcagaagaaagatccccttccagaagatcagccacttcctgctgctgagatgggtgagacagaagcagaacaagtaccccatcctgttcctgacccagggcaagagcgagatctaccccgagctgatggacctgagaagcagaaccacccccatcgccatgagcttcgcccagttcgagaacctgctgggcatcaacgtgcacaccgaggacctgctgagaaaccccagctacatccaggaggccaaggccaagggcctggtgatcttctgctggggcgacgacaccaacgaccccgagaacagaagaaagctgaaggagctgggcgtgaacggcctgatctacgacagaatctacgactggatgcccgagcagcccaacatcttccaggtggagcagctggagagactgaagcaggagctgcccgagctgaagagctgcctgtgccccaccgtgagcagattcgtgcccagcagcctgtgcggcgagagcgacatccacgtggacgccaacggcatcgacaacgtggagaacgcctag

SEQ ID NO: 83372 - DNA, 2019 bp, synthetic construct
  misc_feature 1..2019: note = Description of Artificial Sequence: Synthetic coding sequence
  source 1..2019: mol_type = other DNA
atgacccccagccaggtggccttcgagatcagaggcaccctgctgcccggcgaggtgttcgccatctgcggcagctgcgacgccctgggcaactggaacccccagaacgccgtggccctgctgcccgagaacgacaccggcgagagcatgctgtggaaggccaccatcgtgctgagcagaggcgtgagcgtgcagtacagatacttcaagggctacttcctggagcccaagaccatcggcggcccctgccaggtgatcgtgcacaagtgggagacccacctgcagcccagaagcatcacccccctggagagcgagatcatcatcgacgacggccagttcggcatccacaacggcgtggagaccctggacagcggctggctgacctgccagaccgagatcagactgagactgcactacagcgagaagccccccgtgagcatcaccaagaagaagctgaagaagagcagattcagagtgaagctgaccctggagggcctggaggaggacgacgacgacagagtgagccccaccgtgctgcacaagatgagcaacagcctggagatcagcctgatcagcgacaacgagttcaagtgcagacacagccagcccgagtgcggctacggcctgcagcccgacagatggaccgagtacagcatccagaccatggagcccgacaacctggagctgatcttcgacttcttcgaggaggacctgagcgagcacgtggtgcagggcgacgccctgcccggccacgtgggcaccgcctgcctgctgagcagcaccatcgccgagagcggcaagagcgccggcatcctgaccctgcccatcatgagcagaaacagcagaaagaccatcggcaaggtgagagtggactacatcatcatcaagcccctgcccggctacagctgcgacatgaagagcagcttcagcaagtactggaagcccagaatccccctggacgtgggccacagaggcgccggcaacagcaccaccaccgcccagctggccaaggtgcaggagaacaccatcgccagcctgagaaacgccgccagccacggcgccgccttcgtggagttcgacgtgcacctgagcaaggacttcgtgcccgtggtgtaccacgacctgacctgctgcctgaccatgaagaagaagttcgacgccgaccccgtggagctgttcgagatccccgtgaaggagctgaccttcgaccagctgcagctgctgaagctgacccacgtgaccgccctgaagagcaaggacagaaaggagagcgtggtgcaggaggagaacagcttcagcgagaaccagcccttccccagcctgaagatggtgctggagagcctgcccgaggacgtgggcttcaacatcgagatcaagtggatctgccagcagagagacggcatgtgggacggcaacctgagcacctacttcgacatgaacctgttcctggacatcatcctgaagaccgtgctggagaacagcggcaagagaagaatcgtgttcagcagcttcgacgccgacatctgcaccatggtgagacagaagcagaacaagtaccccatcctgttcctgacccagggcaagagcgagatctaccccgagctgatggacctgagaagcagaaccacccccatcgccatgagcttcgcccagttcgagaacctgctgggcatcaacgtgcacaccgaggacctgctgagaaaccccagctacatccaggaggccaaggccaagggcctggtgatcttctgctggggcgacgacaccaacgaccccgagaacagaagaaagctgaaggagctgggcgtgaacggcctgatctacgacagaatctacgactggatgcccgagcagcccaacatcttccaggtggagcagctggagagactgaagcaggagctgcccgagctgaagagctgcctgtgccccaccgtgagcagattcgtgcccagcagcctgtgcggcgagagcgacatccacgtggacgccaacggcatcgacaacgtggagaacgcctag

SEQ ID NO: 83373 - DNA, 795 bp, synthetic construct
  misc_feature 1..795: note = Description of Artificial Sequence: Synthetic coding sequence
  source 1..795: mol_type = other DNA
tgatgcgacatgaagagcagcttcagcaagtactggaagcccagaatccccctggacgtgggccacagaggcgccggcaacagcaccaccaccgcccagctggccaaggtgcaggagaacaccatcgccagcctgagaaacgccgccagccacggcgccgccttcgtggagttcgacgtgcacctgagcaaggacttcgtgcccgtggtgtaccacgacctgacctgctgcctgaccatgaagaagaacctgtggttcagaagaaagatccccttccagaagatcagccacttcctgctgctgagatgggtgagacagaagcagaacaagtaccccatcctgttcctgacccagggcaagagcgagatctaccccgagctgatggacctgagaagcagaaccacccccatcgccatgagcttcgcccagttcgagaacctgctgggcatcaacgtgcacaccgaggacctgctgagaaaccccagctacatccaggaggccaaggccaagggcctggtgatcttctgctggggcgacgacaccaacgaccccgagaacagaagaaagctgaaggagctgggcgtgaacggcctgatctacgacagaatctacgactggatgcccgagcagcccaacatcttccaggtggagcagctggagagactgaagcaggagctgcccgagctgaagagctgcctgtgccccaccgtgagcagattcgtgcccagcagcctgtgcggcgagagcgacatccacgtggacgccaacggcatcgacaacgtggagaacgcctag

SEQ ID NO: 83374 - DNA, 996 bp, synthetic construct
  misc_feature 1..996: note = Description of Artificial Sequence: Synthetic coding sequence
  source 1..996: mol_type = other DNA
atgtggctgtgggaggaccagggcggcctgctgggccccttcagcttcctgctgctggtgctgctgctggtgaccagaagccccgtgaacgcctgcctgctgaccggcagcctgttcgtgctgctgagagtgttcagcttcgagcccgtgcccagctgcagagccctgcaggtgctgaagcccagagacagaatcagcgccatcgcccacagaggcggcagccacgacgcccccgagaacaccctggccgccatcagacaggccgccaagaacggcgccaccggcgtggagctggacatcgagttcaccagcgacggcatccccgtgctgatgcacgacaacaccgtggacagaaccaccgacggcaccggcagactgtgcgacctgaccttcgagcagatcagaaagctgaaccccgccgccaaccacagactgagaaacgacttccccgacgagaagatccccaccctgagagaggccgtggccgagtgcctgaaccacaacctgaccatcttcttcgacgtgaagggccacgcccacaaggccaccgaggccctgaagaagatgtacatggagttcccccagctgtacaacaacagcgtggtgtgcagcttcctgcccgaggtgatctacaagatgagacagaccgacagagacgtgatcaccgccctgacccacagaccctggagcctgagccacaccggcgacggcaagcccagatacgacaccttctggaagcacttcatcttcgtgatgatggacatcctgctggactggagcatgcacaacatcctgtggtacctgtgcggcatcagcgccttcctgatgcagaaggacttcgtgagccccgcctacctgaagaagtggagcgccaagggcatccaggtggtgggctggaccgtgaacaccttcgacgagaagagctactacgagagccacctgggcagcagctacatcaccgacagcatggtggaggactgcgagccccacttctag

SEQ ID NO: 83375 - DNA, 1818 bp, synthetic construct
  misc_feature 1..1818: note = Description of Artificial Sequence: Synthetic coding sequence
  source 1..1818: mol_type = other DNA
atggtgagacaccagcccctgcagtactacgagccccagctgtgcctgagctgcctgaccggcatctacggctgcagatggaagagataccagagaagccacgacgacaccaccccctgggagagactgtggttcctgctgctgaccttcaccttcggcctgaccctgacctggctgtacttctggtgggaggtgcacaacgactacgacgagttcaactggtacctgtacaacagaatgggctactggagcgactggcccgtgcccatcctggtgaccaccgccgccgccttcgcctacatcgccggcctgctggtgctggccctgtgccacatcgccgtgggccagcagatgaacctgcactggctgcacaagatcggcctggtggtgatcctggccagcaccgtggtggccatgagcgccgtggcccagctgtgggaggacgagtgggaggtgctgctgatcagcctgcagggcaccgcccccttcctgcacgtgggcgccgtggccgccgtgaccatgctgagctggatcgtggccggccagttcgccagagccgagagaaccagcagccaggtgaccatcctgtgcaccttcttcaccgtggtgttcgccctgtacctggcccccctgaccatcagcagcccctgcatcatggagaagaaggacctgggccccaagcccgccctgatcggccacagaggcgcccccatgctggcccccgagcacaccctgatgagcttcagaaaggccctggagcagaagctgtacggcctgcaggccgacatcaccatcagcctggacggcgtgcccttcctgatgcacgacaccaccctgagaagaaccaccaacgtggaggaggagttccccgagctggccagaagacccgccagcatgctgaactggaccaccctgcagagactgaacgccggccagtggttcctgaagaccgaccccttctggaccgccagcagcctgagccccagcgaccacagagaggcccagaaccagagcatctgcagcctggccgagctgctggagctggccaagggcaacgccaccctgctgctgaacctgagagacccccccagagagcacccctacagaagcagcttcatcaacgtgaccctggaggccgtgctgcacagcggcttcccccagcaccaggtgatgtggctgcccagcagacagagacccctggtgagaaaggtggcccccggcttccagcagaccagcggcagcaaggaggccgtggccagcctgagaagaggccacatccagagactgaacctgagatacacccaggtgagcagacaggagctgagagactacgccagctggaacctgagcgtgaacctgtacaccgtgaacgccccctggctgttcagcctgctgtggtgcgccggcgtgcccagcgtgaccagcgacaacagccacgccctgagccaggtgcccagccccctgtggatcatgccccccgacgagtactgcctgatgtgggtgaccgccgacctggtgagcttcaccctgatcgtgggcatcttcgtgctgcagaagtggagactgggcggcatcagaagctacaaccccgagcagatcatgctgagcgccgccgtgagaagaaccagcagagacgtgagcatcatgaaggagaagctgatcttcagcgagatcagcgacggcgtggaggtgagcgacgtgctgagcgtgtgcagcgacaacagctacgacacctacgccaacagcaccgccacccccgtgggccccagaggcggcggcagccacaccaagaccctgatcgagagaagcggcagatag

SEQ ID NO: 83376 - DNA, 1461 bp, synthetic construct
  misc_feature 1..1461: note = Description of Artificial Sequence: Synthetic coding sequence
  source 1..1461: mol_type = other DNA
atggtgagacaccagcccctgcagtactacgagccccagctgtgcctgagctgcctgaccggcatctacggctgcagatggaagagataccagagaagccacgacgacaccacccccggcaccgcccccttcctgcacgtgggcgccgtggccgccgtgaccatgctgagctggatcgtggccggccagttcgccagagccgagagaaccagcagccaggtgaccatcctgtgcaccttcttcaccgtggtgttcgccctgtacctggcccccctgaccatcagcagcccctgcatcatggagaagaaggacctgggccccaagcccgccctgatcggccacagaggcgcccccatgctggcccccgagcacaccctgatgagcttcagaaaggccctggagcagaagctgtacggcctgcaggccgacatcaccatcagcctggacggcgtgcccttcctgatgcacgacaccaccctgagaagaaccaccaacgtggaggaggagttccccgagctggccagaagacccgccagcatgctgaactggaccaccctgcagagactgaacgccggccagtggttcctgaagaccgaccccttctggaccgccagcagcctgagccccagcgaccacagagaggcccagaaccagagcatctgcagcctggccgagctgctggagctggccaagggcaacgccaccctgctgctgaacctgagagacccccccagagagcacccctacagaagcagcttcatcaacgtgaccctggaggccgtgctgcacagcggcttcccccagcaccaggtgatgtggctgcccagcagacagagacccctggtgagaaaggtggcccccggcttccagcagaccagcggcagcaaggaggccgtggccagcctgagaagaggccacatccagagactgaacctgagatacacccaggtgagcagacaggagctgagagactacgccagctggaacctgagcgtgaacctgtacaccgtgaacgccccctggctgttcagcctgctgtggtgcgccggcgtgcccagcgtgaccagcgacaacagccacgccctgagccaggtgcccagccccctgtggatcatgccccccgacgagtactgcctgatgtgggtgaccgccgacctggtgagcttcaccctgatcgtgggcatcttcgtgctgcagaagtggagactgggcggcatcagaagctacaaccccgagcagatcatgctgagcgccgccgtgagaagaaccagcagagacgtgagcatcatgaaggagaagctgatcttcagcgagatcagcgacggcgtggaggtgagcgacgtgctgagcgtgtgcagcgacaacagctacgacacctacgccaacagcaccgccacccccgtgggccccagaggcggcggcagccacaccaagaccctgatcgagagaagcggcagatag

SEQ ID NO: 83377 - DNA, 408 bp, synthetic construct
  misc_feature 1..408: note = Description of Artificial Sequence: Synthetic coding sequence
  source 1..408: mol_type = other DNA
atggtgagacaccagcccctgcagtactacgagccccagctgtgcctgagctgcctgaccggcatctacggctgcagatggaagagataccagagaagccacgacgacaccaccccctgggagagactgtggttcctgctgctgaccttcaccttcggcctgaccctgacctggctgtacttctggtgggaggtgcacaacgactacgacgagttcaactggtacctgtacaacagaatgggctactggagcgactggcccgtgcccatcctggtgaccaccgccgccgccttcgcctacatcgccggcctgctggtgctggccctgtgccacatcgccgtgggccagcagatgaacctgcactggctgcacaaggccagcagcggcctgcccctgagccccctgtag

SEQ ID NO: 83378 - DNA, 1404 bp, synthetic construct
  misc_feature 1..1404: note = Description of Artificial Sequence: Synthetic coding sequence
  source 1..1404: mol_type = other DNA
atgagcgccgtggcccagctgtgggaggacgagtgggaggtgctgctgatcagcctgcagggcaccgcccccttcctgcacgtgggcgccgtggccgccgtgaccatgctgagctggatcgtggccggccagttcgccagagccgagagaaccagcagccaggtgaccatcctgtgcaccttcttcaccgtggtgttcgccctgtacctggcccccctgaccatcagcagcccctgcatcatggagaagaaggacctgggccccaagcccgccctgatcggccacagaggcgcccccatgctggcccccgagcacaccctgatgagcttcagaaaggccctggagcagaagctgtacggcctgcaggccgacatcaccatcagcctggacggcgtgcccttcctgatgcacgacaccaccctgagaagaaccaccaacgtggaggaggagttccccgagctggccagaagacccgccagcatgctgaactggaccaccctgcagagactgaacgccggccagtggttcctgaagaccgaccccttctggaccgccagcagcctgagccccagcgaccacagagaggcccagaaccagagcatctgcagcctggccgagctgctggagctggccaagggcaacgccaccctgctgctgaacctgagagacccccccagagagcacccctacagaagcagcttcatcaacgtgaccctggaggccgtgctgcacagcggcttcccccagcaccaggtgatgtggctgcccagcagacagagacccctggtgagaaaggtggcccccggcttccagcagaccagcggcagcaaggaggccgtggccagcctgagaagaggccacatccagagactgaacctgagatacacccaggtgagcagacaggagctgagagactacgccagctggaacctgagcgtgaacctgtacaccgtgaacgccccctggctgttcagcctgctgtggtgcgccggcgtgcccagcgtgaccagcgacaacagccacgccctgagccaggtgcccagccccctgtggatcatgccccccgacgagtactgcctgatgtgggtgaccgccgacctggtgagcttcaccctgatcgtgggcatcttcgtgctgcagaagtggagactgggcggcatcagaagctacaaccccgagcagatcatgctgagcgccgccgtgagaagaaccagcagagacgtgagcatcatgaaggagaagctgatcttcagcgagatcagcgacggcgtggaggtgagcgacgtgctgagcgtgtgcagcgacaacagctacgacacctacgccaacagcaccgccacccccgtgggccccagaggcggcggcagccacaccaagaccctgatcgagagaagcggcagatag

SEQ ID NO: 83379 - DNA, 1818 bp, synthetic construct; identical to SEQ ID NO: 83375
  misc_feature 1..1818: note = Description of Artificial Sequence: Synthetic coding sequence
  source 1..1818: mol_type = other DNA

SEQ ID NO: 83380 - DNA, 222 bp, synthetic construct
  misc_feature 1..222: note = Description of Artificial Sequence: Synthetic coding sequence
  source 1..222: mol_type = other DNA
atggtgagacaccagcccctgcagtactacgagccccagctgtgcctgagctgcctgaccggcatctacggctgcagatggaagagataccagagaagccacgacgacaccaccccctgggagagactgtggttcctgctgctgaccttcaccttcggcctgaccctgacctggctgtacttctggtgggaggtgcacaacgactacgacgagttcaactag

SEQ ID NO: 83381 - DNA, 1461 bp, synthetic construct; identical to SEQ ID NO: 83376
  misc_feature 1..1461: note = Description of Artificial Sequence: Synthetic coding sequence
  source 1..1461: mol_type = other DNA

SEQ ID NO: 83382 - DNA, 1083 bp, synthetic construct
  misc_feature 1..1083: note = Description of Artificial Sequence: Synthetic coding sequence
  source 1..1083: mol_type = other DNA
atgagcttcagaaaggccctggagcagaagctgtacggcctgcaggccgacatcaccatcagcctggacggcgtgcccttcctgatgcacgacaccaccctgagaagaaccaccaacgtggaggaggagttccccgagctggccagaagacccgccagcatgctgaactggaccaccctgcagagactgaacgccggccagtggttcctgaagaccgaccccttctggaccgccagcagcctgagccccagcgaccacagagaggcccagaaccagagcatctgcagcctggccgagctgctggagctggccaagggcaacgccaccctgctgctgaacctgagagacccccccagagagcacccctacagaagcagcttcatcaacgtgaccctggaggccgtgctgcacagcggcttcccccagcaccaggtgatgtggctgcccagcagacagagacccctggtgagaaaggtggcccccggcttccagcagaccagcggcagcaaggaggccgtggccagcctgagaagaggccacatccagagactgaacctgagatacacccaggtgagcagacaggagctgagagactacgccagctggaacctgagcgtgaacctgtacaccgtgaacgccccctggctgttcagcctgctgtggtgcgccggcgtgcccagcgtgaccagcgacaacagccacgccctgagccaggtgcccagccccctgtggatcatgccccccgacgagtactgcctgatgtgggtgaccgccgacctggtgagcttcaccctgatcgtgggcatcttcgtgctgcagaagtggagactgggcggcatcagaagctacaaccccgagcagatcatgctgagcgccgccgtgagaagaaccagcagagacgtgagcatcatgaaggagaagctgatcttcagcgagatcagcgacggcgtggaggtgagcgacgtgctgagcgtgtgcagcgacaacagctacgacacctacgccaacagcaccgccacccccgtgggccccagaggcggcggcagccacaccaagaccctgatcgagagaagcggcagatag

SEQ ID NO: 83383 - DNA, 1272 bp, synthetic construct
  misc_feature 1..1272: note = Description of Artificial Sequence: Synthetic coding sequence
  source 1..1272: mol_type = other DNA
atgctgagagtgagatgcctgagaggcggcagcagaggcgccgaggccgtgcactacatcggcagcagactgggcagaaccctgaccggctgggtgcagagaaccttccagagcacccaggccgccaccgccagcagcagaaacagctgcgccgccgacgacaaggccaccgagcccctgcccaaggactgccccgtgagcagctacaacgagtgggaccccctggaggaggtgatcgtgggcagagccgagaacgcctgcgtgccccccttcaccatcgaggtgaaggccaacacctacgagaagtactggcccttctaccagaagcagggcggccactacttccccaaggaccacctgaagaaggccgtggccgagatcgaggagatgtgcaacatcctgaagaccgagggcgtgaccgtgagaagacccgaccccatcgactggagcctgaagtacaagacccccgacttcgagagcaccggcctgtacagcgccatgcccagagacatcctgatcgtggtgggcaacgagatcatcgaggcccccatggcctggagaagcagattcttcgagtacagagcctacagaagcatcatcaaggactacttccacagaggcgccaagtggaccaccgcccccaagcccaccatggccgacgagctgtacaaccaggactaccccatccacagcgtggaggacagacacaagctggccgcccagggcaagttcgtgaccaccgagttcgagccctgcttcgacgccgccgacttcatcagagccggcagagacatcttcgcccagagaagccaggtgaccaactacctgggcatcgagtggatgagaagacacctggcccccgactacagagtgcacatcatcagcttcaaggaccccaaccccatgcacatcgacgccaccttcaacatcatcggccccggcatcgtgctgagcaaccccgacagaccctgccaccagatcgacctgttcaagaaggccggctggaccatcatcaccccccccacccccatcatccccgacgaccaccccctgtggatgagcagcaagtggctgagcatgaacgtgctgatgctggacgagaagagagtgatggtggacgccaacgaggtgcccatccagaagatgttcgagaagctgggcatcaccaccatcaaggtgaacatcagaaacgccaacagcctgggcggcggcttccactgctggacctgcgacgtgagaagaagaggcaccctgcagagctacctggactag

SEQ ID NO: 83384 - DNA, 1176 bp, synthetic construct
  misc_feature 1..1176: note = Description of Artificial Sequence: Synthetic coding sequence
  source 1..1176: mol_type = other DNA
atgctgagagtgagatgcctgagaggcggcagcagaggcgccgaggccgtgcactacatcggcagcagactgggcagaaccctgaccggctgggtgcagagaaccttccagagcacccaggccgccaccgccagcagcagaaacagctgcgccgccgacgacaaggccaccgagcccctgcccaaggactgccccgtgagcagctacaacgagtgggaccccctggaggaggtgatcgtgggcagagccgagaacgcctgcgtgccccccttcaccatcgaggtgaaggccaacacctacgagaagtactggcccttctaccagaagcagggcggccactacttccccaaggaccacctgaagaaggccgtggccgagatcgaggagatgtgcaacatcctgaagaccgagggcgtgaccgtgagaagacccgaccccatcgactggagcctgaagtacaagacccccgacttcgagagcaccggcctgtacagcgccatgcccagagacatcctgatcgtggtgggcaacgagatcatcgaggcccccatggcctggagaagcagattcttcgagtacagagcctacagaagcatcatcaaggactacttccacagaggcgccaagtggaccaccgcccccaagcccaccatggccgacgagctgtacaaccaggactaccccatccacagcgtggaggacagacacaagctggccgcccagggcaagttcgtgaccaccgagttcgagccctgcttcgacgccgccgacttcatcagagccggcagagacatcttcgcccagagaagccaggtgaccaactacctgggcatcgagtggatgagaagacacctggcccccgactacagagtgcacatcatcagcttcaaggaccccaaccccatgcacatcgacgccaccttcaacatcatcggccccggcatcgtgctgagcaaccccgacagaccctgccaccagatcgacctgttcaagaaggccggctggaccatcatcaccccccccacccccatcatccccgacgaccaccccctgtggatgagcagcaagtggctgagcatgaacgtgctgatgctggacgagaagagagtgatggtggacgccaacgaggtgcccatccagaagatgttcgagaagctgggcatgtacaacaagtag

SEQ ID NO: 83385 - DNA, 1260 bp, synthetic construct
  misc_feature 1..1260: note = Description of Artificial Sequence: Synthetic coding sequence
  source 1..1260: mol_type = other DNA
atgtggcccggcaacgcctggagagccgccctgttctgggtgcccagaggcagaagagcccagagcgccctggcccagctgagaggcatcctggagggcgagctggagggcatcagaggcgccggcacctggaagagcgagagagtgatcaccagcagacagggcccccacatcagagtggacggcgtgagcggcggcatcctgaacttctgcgccaacaactacctgggcctgagcagccaccccgaggtgatccaggccggcctgcaggccctggaggagttcggcgccggcctgagcagcgtgagattcatctgcggcacccagagcatccacaagaacctggaggccaagatcgccagattccaccagagagaggacgccatcctgtaccccagctgctacgacgccaacgccggcctgttcgaggccctgctgacccccgaggacgccgtgctgagcgacgagctgaaccacgccagcatcatcgacggcatcagactgtgcaaggcccacaagtacagatacagacacctggacatggccgacctggaggccaagctgcaggaggcccagaagcacagactgagactggtggccaccgacggcgccttcagcatggacggcgacatcgcccccctgcaggagatctgctgcctggccagcagatacggcgccctggtgttcatggacgagtgccacgccaccggcttcctgggccccaccggcagaggcaccgacgagctgctgggcgtgatggaccaggtgaccatcatcaacagcaccctgggcaaggccctgggcggcgccagcggcggctacaccaccggccccggccccctggtgagcctgctgagacagagagccagaccctacctgttcagcaacagcctgccccccgccgtggtgggctgcgccagcaaggccctggacctgctgatgggcagcaacaccatcgtgcagagcatggccgccaagacccagagattcagaagcaagatggaggccgccggcttcaccatcagcggcgccagccaccccatctgccccgtgatgctgggcgacgccagactggccagcagaatggccgacgacatgctgaagagaggcatcttcgtgatcggcttcagctaccccgtggtgcccaagggcaaggccagaatcagagtgcagatcagcgccgtgcacagcgaggaggacatcgacagatgcgtggaggccttcgtggaggtgggcagactgcacggcgccctgccctag

SEQ ID NO: 83386 - DNA, 1338 bp, synthetic construct
  misc_feature 1..1338: note = Description of Artificial Sequence: Synthetic coding sequence
  source 1..1338: mol_type = other DNA
atgtggcccggcaacgcctggagagccgccctgttctgggtgcccagaggcagaagagcccagagcgccctggcccagctgagaggcatcctggagggcgagctggagggcatcagaggcgccggcacctggaagagcgagagagtgatcaccagcagacagggcccccacatcagagtggacggcgtgagcggcggccccggcaccgtgatcttccccggcctgcccctgccccacctgagctgctgcatccacctgctgagcttcaccagcggcatcctgaacttctgcgccaacaactacctgggcctgagcagccaccccgaggtgatccaggccggcctgcaggccctggaggagttcggcgccggcctgagcagcgtgagattcatctgcggcacccagagcatccacaagaacctggaggccaagatcgccagattccaccagagagaggacgccatcctgtaccccagctgctacgacgccaacgccggcctgttcgaggccctgctgacccccgaggacgccgtgctgagcgacgagctgaaccacgccagcatcatcgacggcatcagactgtgcaaggcccacaagtacagatacagacacctggacatggccgacctggaggccaagctgcaggaggcccagaagcacagactgagactggtggccaccgacggcgccttcagcatggacggcgacatcgcccccctgcaggagatctgctgcctggccagcagatacggcgccctggtgttcatggacgagtgccacgccaccggcttcctgggccccaccggcagaggcaccgacgagctgctgggcgtgatggaccaggtgaccatcatcaacagcaccctgggcaaggccctgggcggcgccagcggcggctacaccaccggccccggccccctggtgagcctgctgagacagagagccagaccctacctgttcagcaacagcctgccccccgccgtggtgggctgcgccagcaaggccctggacctgctgatgggcagcaacaccatcgtgcagagcatggccgccaagacccagagattcagaagcaagatggaggccgccggcttcaccatcagcggcgccagccaccccatctgccccgtgatgctgggcgacgccagactggccagcagaatggccgacgacatgctgaagagaggcatcttcgtgatcggcttcagctaccccgtggtgcccaagggcaaggccagaatcagagtgcagatcagcgccgtgcacagcgaggaggacatcgacagatgcgtggaggccttcgtggaggtgggcagactgcacggcgccctgccctag

SEQ ID NO: 83387 - DNA, 744 bp, synthetic construct
  misc_feature 1..744: note = Description of Artificial Sequence: Synthetic coding sequence
  source 1..744: mol_type = other DNA
atgtggcccggcaacgcctggagagccgccctgttctgggtgcccagaggcagaagagcccagagcgccctggcccagctgagaggcatcctggagggcgagctggagggcatcagaggcgccggcacctggaagagcgagagagtgatcaccagcagacagggcccccacatcagagtggacggcgtgagcggcggccccggcaccgtgatcttccccggcctgcccctgccccacctgagctgctgcatccacctgctgagcttcaccagcggcatcctgaacttctgcgccaacaactacctgggcctgagcagccaccccgaggtgatccaggccggcctgcaggccctggaggagttcggcgccggcctgagcagcgtgagattcatctgcggcacccagagcatccacaagaacctggaggccaagatcgccagattccaccagagagaggacgccatcctgtaccccagctgctacgacgccaacgccggcctgttcgaggccctgctgacccccgaggacgccgtgctgagcgacgagctgaaccacgccagcatcatcgacggcatcagactgtgcaaggcccacaagtacagatacagacacctggacatggccgacctggaggccaagctgcaggaggcccagaagcacagactgagactggtggccaccgacggcgccttccacggctggagacacagaacccccgccggcgacctgctgcccagactgtag

SEQ ID NO: 83388 - DNA, 522 bp, synthetic construct
  misc_feature 1..522: note = Description of Artificial Sequence: Synthetic coding sequence
  source 1..522: mol_type = other DNA
atggccctgagagtggtgagaagcgtgagagccctgctgtgcaccctgagagccgtgcccagccccgccgccccctgcccccccagaccctggcagctgggcgtgggcgccgtgagaaccctgagaaccggccccgccctgctgagcgtgagaaagttcaccgagaagcacgagtgggtgaccaccgagaacggcatcggcaccgtgggcatcagcaacttcgcccaggaggccctgggcgacgtggtgtactgcagcctgcccgaggtgggcaccaagctgaacaagcaggacgagttcggcgccctggagagcgtgaaggccgccagcgagctgtacagccccctgagcggcgaggtgaccgagatcaacgaggccctggccgagaaccccggcctggtgaacaagagctgctacgaggacggctggctgatcaagatgaccctgagcaaccccagcgagctggacgagctgatgagcgaggaggcctacgagaagtacatcaagagcatcgaggagtag

SEQ ID NO: 83389 - DNA, 3063 bp, synthetic construct
  misc_feature 1..3063: note = Description of Artificial Sequence: Synthetic coding sequence
  source 1..3063: mol_type = other DNA
atgcagagctgcgccagagcctggggcctgagactgggcagaggcgtgggcggcggcagaagactggccggcggcagcggcccctgctgggcccccagaagcagagacagcagcagcggcggcggcgacagcgccgccgccggcgccagcagactgctggagagactgctgcccagacacgacgacttcgccagaagacacatcggccccggcgacaaggaccagagagagatgctgcagaccctgggcctggccagcatcgacgagctgatcgagaagaccgtgcccgccaacatcagactgaagagacccctgaagatggaggaccccgtgtgcgagaacgagatcctggccaccctgcacgccatcagcagcaagaaccagatctggagaagctacatcggcatgggctactacaactgcagcgtgccccagaccatcctgagaaacctgctggagaacagcggctggatcacccagtacaccccctaccagcccgaggtgagccagggcagactggagagcctgctgaactaccagaccatggtgtgcgacatcaccggcctggacatggccaacgccagcctgctggacgagggcaccgccgccgccgaggccctgcagctgtgctacagacacaacaagagaagaaagttcctggtggaccccagatgccacccccagaccatcgccgtggtgcagaccagagccaagtacaccggcgtgctgaccgagctgaagctgccctgcgagatggacttcagcggcaaggacgtgagcggcgtgctgttccagtaccccgacaccgagggcaaggtggaggacttcaccgagctggtggagagagcccaccagagcggcagcctggcctgctgcgccaccgacctgctggccctgtgcatcctgagaccccccggcgagttcggcgtggacatcgccctgggcagcagccagagattcggcgtgcccctgggctacggcggcccccacgccgccttcttcgccgtgagagagagcctggtgagaatgatgcccggcagaatggtgggcgtgaccagagacgccaccggcaaggaggtgtacagactggccctgcagaccagagagcagcacatcagaagagacaaggccaccagcaacatctgcaccgcccaggccctgctggccaacatggccgccatgttcgccatctaccacggcagccacggcctggagcacatcgccagaagagtgcacaacgccaccctgatcctgagcgagggcctgaagagagccggccaccagctgcagcacgacctgttcttcgacaccctgaagatccagtgcggctgcagcgtgaaggaggtgctgggcagagccgcccagagacagatcaacttcagactgttcgaggacggcaccctgggcatcagcctggacgagaccgtgaacgagaaggacctggacgacctgctgtggatcttcggctgcgagagcagcgccgagctggtggccgagagcatgggcgaggagtgcagaggcatccccggcagcgtgttcaagagaaccagccccttcctgacccaccaggtgttcaacagctaccacagcgagaccaacatcgtgagatacatgaagaagctggagaacaaggacatcagcctggtgcacagcatgatccccctgggcagctgcaccatgaagctgaacagcagcagcgagctggcccccatcacctggaaggagttcgccaacatccaccccttcgtgcccctggaccaggcccagggctaccagcagctgttcagagagctggagaaggacctgtgcgagctgaccggctacgaccaggtgtgcttccagcccaacagcggcgcccagggcgagtacgccggcctggccaccatcagagcctacctgaaccagaagggcgagggccacagaaccgtgtgcctgatccccaagagcgcccacggcaccaaccccgccagcgcccacatggccggcatgaagatccagcccgtggaggtggacaagtacggcaacatcgacgccgtgcacctgaaggccatggtggacaagcacaaggagaacctggccgccatcatgatcacctaccccagcaccaacggcgtgttcgaggagaacatcagcgacgtgtgcgacctgatccaccagcacggcggccaggtgtacctggacggcgccaacatgaacgcccaggtgggcatctgcagacccggcgacttcggcagcgacgtgagccacctgaacctgcacaagaccttctgcatcccccacggcggcggcggccccggcatgggccccatcggcgtgaagaagcacctggcccccttcctgcccaaccaccccgtgatcagcctgaagagaaacgaggacgcctgccccgtgggcaccgtgagcgccgccccctggggcagcagcagcatcctgcccatcagctgggcctacatcaagatgatgggcggcaagggcctgaagcaggccaccgagaccgccatcctgaacgccaactacatggccaagagactggagacccactacagaatcctgttcagaggcgccagaggctacgtgggccacgagttcatcctggacaccagacccttcaagaagagcgccaacatcgaggccgtggacgtggccaagagactgcaggactacggcttccacgcccccaccatgagctggcccgtggccggcaccctgatggtggagcccaccgagagcgaggacaaggccgagctggacagattctgcgacgccatgatcagcatcagacaggagatcgccgacatcgaggagggcagaatcgaccccagagtgaaccccctgaagatgagcccccacagcctgacctgcgtgaccagcagccactgggacagaccctacagcagagaggtggccgccttccccctgcccttcgtgaagcccgagaacaagttctggcccaccatcgccagaatcgacgacatctacggcgaccagcacctggtgtgcacctgcccccccatggaggtgtacgagagccccttcagcgagcagaagagagccagcagctag

SEQ ID NO: 83390 - DNA, 888 bp, synthetic construct
  misc_feature 1..888: note = Description of Artificial Sequence: Synthetic coding sequence
  source 1..888: mol_type = other DNA
atggtggacagcgtgtacagaaccagaagcctgggcgtggccgccgagggcctgcccgaccagtacgccgacggcgaggccgccagagtgtggcagctgtacatcggcgacaccagaagcagaaccgccgagtacaaggcctggctgctgggcctgctgagacagcacggctgccagagagtgctggacgtggcctgcggcaccggcgtggacagcatcatgctggtggaggagggcttcagcgtgaccagcgtggacgccagcgacaagatgctgaagtacgccctgaaggagagatggaacagaagacacgagcccgccttcgacaagtgggtgatcgaggaggccaactggatgaccctggacaaggacgtgccccagagcgccgagggcggcttcgacgccgtgatctgcctgggcaacagcttcgcccacctgcccgactgcaagggcgaccagagcgagcacagactggccctgaagaacatcgccagcatggtgagagccggcggcctgctggtgatcgaccacagaaactacgaccacatcctgagcaccggctgcgccccccccggcaagaacatctactacaagagcgacctgaccaaggacgtgaccaccagcgtgctgatcgtgaacaacaaggcccacatggtgaccctggactacaccgtgcaggtgcccggcgccggccaggacggcagccccggcctgagcaagttcagactgagctactacccccactgcctggccagcttcaccgagctgctgcaggccgccttcggcggcaagtgccagcacagcgtgctgggcgacttcaagccctacaagcccggccagacctacatcccctgctacttcatccacgtgctgaagagaaccgactag

SEQ ID NO: 83391 - DNA, 1350 bp, synthetic construct
  misc_feature 1..1350: note = Description of Artificial Sequence: Synthetic coding sequence
  source 1..1350: mol_type = other DNA
atgtacagcttcaacaccctgagactgtacctgtgggagaccatcgtgttcttcagcctggccgccagcaaggaggccgaggccgccagaagcgcccccaagcccatgagccccagcgacttcctggacaagctgatgggcagaaccagcggctacgacgccagaatcagacccaacttcaagggcccccccgtgaacgtgagctgcaacatcttcatcaacagcttcggcagcatcgccgagaccaccatggactacagagtgaacatcttcctgagacagcagtggaacgaccccagactggcctacaacgagtaccccgacgacagcctggacctggaccccagcatgctggacagcatctggaagcccgacctgttcttcgccaacgagaagggcgcccacttccacgagatcaccaccgacaacaagctgctgagaatcagcagaaacggcaacgtgctgtacagcatcagaatcaccctgaccctggcctgccccatggacctgaagaacttccccatggacgtgcagacctgcatcatgcagctggagagcttcggctacaccatgaacgacctgatcttcgagtggcaggagcagggcgccgtgcaggtggccgacggcctgaccctgccccagttcatcctgaaggaggagaaggacctgagatactgcaccaagcactacaacaccggcaagttcacctgcatcgaggccagattccacctggagagacagatgggctactacctgatccagatgtacatccccagcctgctgatcgtgatcctgagctggatcagcttctggatcaacatggacgccgcccccgccagagtgggcctgggcatcaccaccgtgctgaccatgaccacccagagcagcggcagcagagccagcctgcccaaggtgagctacgtgaaggccatcgacatctggatggccgtgtgcctgctgttcgtgttcagcgccctgctggagtacgccgccgtgaacttcgtgagcagacagcacaaggagctgctgagattcagaagaaagagaagacaccacaaggaggacgaggccggcgagggcagattcaacttcagcgcctacggcatgggccccgcctgcctgcaggccaaggacggcatcagcgtgaagggcgccaacaacagcaacaccaccaaccccccccccgcccccagcaagagccccgaggagatgagaaagctgttcatccagagagccaagaagatcgacaagatcagcagaatcggcttccccatggccttcctgatcttcaacatgttctactggatcatctacaagatcgtgagaagagaggacgtgcacaaccagtag

SEQ ID NO: 83392 - DNA, 1374 bp, synthetic construct
  misc_feature 1..1374: note = Description of Artificial Sequence: Synthetic coding sequence
  source 1..1374: mol_type = other DNA
atgtacagcttcaacaccctgagactgtacctgtgggagaccatcgtgttcttcagcctggccgccagcaaggaggccgaggccgccagaagcgcccccaagcccatgagccccagcgacttcctggacaagctgatgggcagaaccagcggctacgacgccagaatcagacccaacttcaagggcccccccgtgaacgtgagctgcaacatcttcatcaacagcttcggcagcatcgccgagaccaccatggactacagagtgaacatcttcctgagacagcagtggaacgaccccagactggcctacaacgagtaccccgacgacagcctggacctggaccccagcatgctggacagcatctggaagcccgacctgttcttcgccaacgagaagggcgcccacttccacgagatcaccaccgacaacaagctgctgagaatcagcagaaacggcaacgtgctgtacagcatcagaatcaccctgaccctggcctgccccatggacctgaagaacttccccatggacgtgcagacctgcatcatgcagctggagagcttcggctacaccatgaacgacctgatcttcgagtggcaggagcagggcgccgtgcaggtggccgacggcctgaccctgccccagttcatcctgaaggaggagaaggacctgagatactgcaccaagcactacaacaccggcaagttcacctgcatcgaggccagattccacctggagagacagatgggctactacctgatccagatgtacatccccagcctgctgatcgtgatcctgagctggatcagcttctggatcaacatggacgccgcccccgccagagtgggcctgggcatcaccaccgtgctgaccatgaccacccagagcagcggcagcagagccagcctgcccaaggtgagctacgtgaaggccatcgacatctggatggccgtgtgcctgctgttcgtgttcagcgccctgctggagtacgccgccgtgaacttcgtgagcagacagcacaaggagctgctgagattcagaagaaagagaagacaccacaagagccccatgctgaacctgttccaggaggacgaggccggcgagggcagattcaacttcagcgcctacggcatgggccccgcctgcctgcaggccaaggacggcatcagcgtgaagggcgccaacaacagcaacaccaccaaccccccccccgcccccagcaagagccccgaggagatgagaaagctgttcatccagagagccaagaagatcgacaagatcagcagaatcggcttccccatggccttcctgatcttcaacatgttctactggatcatctacaagatcgtgagaagagaggacgtgcacaaccagtag

SEQ ID NO: 83393 - DNA, 1101 bp, synthetic construct
  misc_feature 1..1101: note = Description of Artificial Sequence: Synthetic coding sequence
  source 1..1101: mol_type = other DNA
atggactacagagtgaacatcttcctgagacagcagtggaacgaccccagactggcctacaacgagtaccccgacgacagcctggacctggaccccagcatgctggacagcatctggaagcccgacctgttcttcgccaacgagaagggcgcccacttccacgagatcaccaccgacaacaagctgctgagaatcagcagaaacggcaacgtgctgtacagcatcagaatcaccctgaccctggcctgccccatggacctgaagaacttccccatggacgtgcagacctgcatcatgcagctggagagcttcggctacaccatgaacgacctgatcttcgagtggcaggagcagggcgccgtgcaggtggccgacggcctgaccctgccccagttcatcctgaaggaggagaaggacctgagatactgcaccaagcactacaacaccggcaagttcacctgcatcgaggccagattccacctggagagacagatgggctactacctgatccagatgtacatccccagcctgctgatcgtgatcctgagctggatcagcttctggatcaacatggacgccgcccccgccagagtgggcctgggcatcaccaccgtgctgaccatgaccacccagagcagcggcagcagagccagcctgcccaaggtgagctacgtgaaggccatcgacatctggatggccgtgtgcctgctgttcgtgttcagcgccctgctggagtacgccgccgtgaacttcgtgagcagacagcacaaggagctgctgagattcagaagaaagagaagacaccacaaggaggacgaggccggcgagggcagattcaacttcagcgcctacggcatgggccccgcctgcctgcaggccaaggacggcatcagcgtgaagggcgccaacaacagcaacaccaccaaccccccccccgcccccagcaagagccccgaggagatgagaaagctgttcatccagagagccaagaagatcgacaagatcagcagaatcggcttccccatggccttcctgatcttcaacatgttctactggatcatctacaagatcgtgagaagagaggacgtgcacaaccagtag

SEQ ID NO: 83394 - DNA, 309 bp, synthetic construct
  misc_feature 1..309: note = Description of Artificial Sequence: Synthetic coding sequence
  source 1..309: mol_type = other DNA
atgagcgccagagtgagaagcagaagcagaggcagaggcgacggccaggaggcccccgacgtggtggccttcgtggcccccggcgagagccagcaggaggagccccccaccgacaaccaggacatcgagcccggccaggagagagagggcaccccccccatcgaggagagaaaggtggagggcgactgccaggagatggacctggagaagaccagaagcgagagaggcgacggcagcgacgtgaaggagaagaccccccccaaccccaagcacgccaagaccaaggaggccggcgacggccagccctag

SEQ ID NO: 83395 - DNA, 1359 bp, synthetic construct
  misc_feature 1..1359: note = Description of Artificial Sequence: Synthetic coding sequence
  source 1..1359: mol_type = other DNA
atgaacagacagctggtgaacatcctgaccgccctgttcgccttcttcctggagaccaaccacttcagaaccgccttctgcaaggaccacgacagcagaagcggcaagcagcccagccagaccctgagccccagcgacttcctggacaagctgatgggcagaaccagcggctacgacgccagaatcagacccaacttcaagggcccccccgtgaacgtgacctgcaacatcttcatcaacagcttcggcagcatcgccgagaccaccatggactacagagtgaacatcttcctgagacagcagtggaacgacagcagactggcctacagcgagtaccccgacgacagcctggacctggaccccagcatgctggacagcatctggaagcccgacctgttcttcgccaacgagaagggcgccaacttccacgacgtgaccaccgacaacaagctgctgagaatcagcaagaacggcaaggtgctgtacagcatcagactgaccctgaccctgagctgccccatggacctgaagaacttccccatggacgtgcagacctgcaccatgcagctggagagcttcggctacaccatgaacgacctgatcttcgagtggctgagcgacggccccgtgcaggtggccgagggcctgaccctgccccagttcatcctgaaggaggagaaggagctgggctactgcaccaagcactacaacaccggcaagttcacctgcatcgaggtgaagttccacctggagagacagatgggctactacctgatccagatgtacatccccagcctgctgatcgtgatcctgagctgggtgagcttctggatcaacatggacgccgcccccgccagagtggccctgggcatcaccaccgtgctgaccatgaccacccagagcagcggcagcagagccagcctgcccaaggtgagctacgtgaaggccatcgacatctggatggccgtgtgcctgctgttcgtgttcgccgccctgctggagtacgccgccgtgaacttcgtgagcagacagcacaaggagttcctgagactgagaagaagacagaagagacagaacaaggaggaggacgtgaccagagagagcagattcaacttcagcggctacggcatgggccactgcctgcaggtgaaggacggcaccgccgtgaaggccacccccgccaaccccctgccccagccccccaaggacggcgacgccatcaagaagaagttcgtggacagagccaagagaatcgacaccatcagcagagccgccttccccctggccttcctgatcttcaacatcttctactggatcacctacaagatcatcagacacgaggacgtgcacaagaagtag

SEQ ID NO: 83396 - DNA, 648 bp, synthetic construct
  misc_feature 1..648: note = Description of Artificial Sequence: Synthetic coding sequence
  source 1..648: mol_type = other DNA
atgaacctgcacatgagaatgaccgccttctgcaaggaccacgacagcagaagcggcaagcagcccagccagaccctgagccccagcgacttcctggacaagctgatgggcagaaccagcggctacgacgccagaatcagacccaacttcaagggcccccccgtgaacgtgacctgcaacatcttcatcaacagcttcggcagcgtgaccgagaccaccatggactacagagtgaacatcttcctgagacagcagtggaacgacagcagactggcctacagcgagtaccccgacgacagcctggacctggaccccagcatgctggacagcatctggaagcccgacctgttcttcgccaacgagaagggcgccaacttccacgacgtgaccaccgacaacaagctgctgagaatcagcaagaacggcaaggtgctgtacagcatcagactgaccctgaccctgagctgccccatggacctgaagaacttccccatggacgtgcagacctgcaccatgcagctggagagcttcggctacaccatgaacgacctgatcttcgagtggctgagcgacggccccgtgcaggtggccgagggcctgaccctgccccagttcatcctgaaggaggagaaggagctgggctactag

SEQ ID NO: 83397 - DNA, 1092 bp, synthetic construct
  misc_feature 1..1092: note = Description of Artificial Sequence: Synthetic coding sequence
  source 1..1092: mol_type = other DNA
atggactacagagtgaacatcttcctgagacagcagtggaacgacagcagactggcctacagcgagtaccccgacgacagcctggacctggaccccagcatgctggacagcatctggaagcccgacctgttcttcgccaacgagaagggcgccaacttccacgacgtgaccaccgacaacaagctgctgagaatcagcaagaacggcaaggtgctgtacagcatcagactgaccctgaccctgagctgccccatggacctgaagaacttccccatggacgtgcagacctgcaccatgcagctggagagcttcggctacaccatgaacgacctgatcttcgagtggctgagcgacggccccgtgcaggtggccgagggcctgaccctgccccagttcatcctgaaggaggagaaggagctgggctactgcaccaagcactacaacaccggcaagttcacctgcatcgaggtgaagttccacctggagagacagatgggctactacctgatccagatgtacatccccagcctgctgatcgtgatcctgagctgggtgagcttctggatcaacatggacgccgcccccgccagagtggccctgggcatcaccaccgtgctgaccatgaccacccagagcagcggcagcagagccagcctgcccaaggtgagctacgtgaaggccatcgacatctggatggccgtgtgcctgctgttcgtgttcgccgccctgctggagtacgccgccgtgaacttcgtgagcagacagcacaaggagttcctgagactgagaagaagacagaagagacagaacaaggaggaggacgtgaccagagagagcagattcaacttcagcggctacggcatgggccactgcctgcaggtgaaggacggcaccgccgtgaaggccacccccgccaaccccctgccccagccccccaaggacggcgacgccatcaagaagaagttcgtggacagagccaagagaatcgacaccatcagcagagccgccttccccctggccttcctgatcttcaacatcttctactggatcacctacaagatcatcagacacgaggacgtgcacaagaagtag

SEQ ID NO: 83398 - DNA, 1395 bp, synthetic construct
  misc_feature 1..1395: note = Description of Artificial Sequence: Synthetic coding sequence
  source 1..1395: mol_type = other DNA
atggcccacgtgagacacttcagaaccctggtgagcggcttctacttctgggaggccgccctgctgctgagcctggtggccaccaaggagaccgacagcgccagaagcagaagcgcccccatgagccccagcgacttcctggacaagctgatgggcagaaccagcggctacgacgccagaatcagacccaacttcaagggcccccccgtgaacgtgacctgcaacatcttcatcaacagcttcggcagcatcgccgagaccaccatggactacagagtgaacatcttcctgagacagaagtggaacgaccccagactggcctacagcgagtaccccgacgacagcctggacctggaccccagcatgctggacagcatctggaagcccgacctgttcttcgccaacgagaagggcgccaacttccacgaggtgaccaccgacaacaagctgctgagaatcttcaagaacggcaacgtgctgtacagcatcagactgaccctgaccctgagctgccccatggacctgaagaacttccccatggacgtgcagacctgcatcatgcagctggagagcttcggctacaccatgaacgacctgatcttcgagtggcaggacgaggcccccgtgcaggtggccgagggcctgaccctgccccagttcctgctgaaggaggagaaggacctgagatactgcaccaagcactacaacaccggcaagttcacctgcatcgaggtgagattccacctggagagacagatgggctactacctgatccagatgtacatccccagcctgctgatcgtgatcctgagctgggtgagcttctggatcaacatggacgccgcccccgccagagtggccctgggcatcaccaccgtgctgaccatgaccacccagagcagcggcagcagagccagcctgcccaaggtgagctacgtgaaggccatcgacatctggatggccgtgtgcctgctgttcgtgttcagcgccctgctggagtacgccgccgtgaacttcgtgagcagacagcacaaggagctgctgagattcagaagaaagagaaagaacaagaccgaggccttcgccctggagaagttctacagattcagcgacatggacgacgaggtgagagagagcagattcagcttcaccgcctacggcatgggcccctgcctgcaggccaaggacggcatgacccccaagggccccaaccaccccgtgcaggtgatgcccaagagccccgacgagatgagaaaggtgttcatcgacagagccaagaagatcgacaccatcagcagagcctgcttccccctggccttcctgatcttcaacatcttctactgggtgatctacaagatcctgagacacgaggacatccaccagcagcaggactag

SEQ ID NO: 83399 - DNA, 1350 bp, synthetic construct
  misc_feature 1..1350: note = Description of Artificial Sequence: Synthetic coding sequence
  source 1..1350: mol_type = other DNA
atggcccacgtgagacacttcagaaccctggtgagcggcttctacttctgggaggccgccctgctgctgagcctggtggccaccaaggagaccgacagcgccagaagcagaagcgcccccatgagccccagcgacttcctggacaagctgatgggcagaaccagcggctacgacgccagaatcagacccaacttcaagggcccccccgtgaacgtgacctgcaacatcttcatcaacagcttcggcagcatcgccgagaccaccatggactacagagtgaacatcttcctgagacagaagtggaacgaccccagactggcctacagcgagtaccccgacgacagcctggacctggaccccagcatgctggacagcatctggaagcccgacctgttcttcgccaacgagaagggcgccaacttccacgaggtgaccaccgacaacaagctgctgagaatcttcaagaacggcaacgtgctgtacagcatcagactgaccctgaccctgagctgccccatggacctgaagaacttccccatggacgtgcagacctgcatcatgcagctggagagcttcggctacaccatgaacgacctgatcttcgagtggcaggacgaggcccccgtgcaggtggccgagggcctgaccctgccccagttcctgctgaaggaggagaaggacctgagatactgcaccaagcactacaacaccggcaagttcacctgcatcgaggtgagattccacctggagagacagatgggctactacctgatccagatgtacatccccagcctgctgatcgtgatcctgagctgggtgagcttctggatcaacatggacgccgcccccgccagagtggccctgggcatcaccaccgtgctgaccatgaccacccagagcagcggcagcagagccagcctgcccaaggtgagctacgtgaaggccatcgacatctggatggccgtgtgcctgctgttcgtgttcagcgccctgctggagtacgccgccgtgaacttcgtgagcagacagcacaaggagctgctgagattcagaagaaagagaaagaacaaggacgacgaggtgagagagagcagattcagcttcaccgcctacggcatgggcccctgcctgcaggccaaggacggcatgacccccaagggccccaaccaccccgtgcaggtgatgcccaagagccccgacgagatgagaaaggtgttcatcgacagagccaagaagatcgacaccatcagcagagcctgcttccccctggccttcctgatcttcaacatcttctactgggtgatctacaagatcctgagacacgaggacatccaccagcagcaggactag

SEQ ID NO: 83400 - DNA, 1494 bp, synthetic construct
  misc_feature 1..1494: note = Description of Artificial Sequence: Synthetic coding sequence
  source 1..1494: mol_type = other DNA
atgaagttcctgctgaccaccgccttcctgatcctgatcagcctgtgggtggaggaggcctacagcaaggagaagagcagcaagaagggcaagggcaagaagaagcagtacctgtgccccagccagcagagcgccgaggacctggccagagtgcccgccaacagcaccagcaacatcctgaacagactgctggtgagctacgaccccagaatcagacccaacttcaagggcatccccgtggacgtggtggtgaacatcttcatcaacagcttcggcagcatccaggagaccaccatggactacagagtgaacatcttcctgagacagaagtggaacgaccccagactgaagctgcccagcgacttcagaggcagcgacgccctgaccgtggaccccaccatgtacaagtgcctgtggaagcccgacctgttcttcgccaacgagaagagcgccaacttccacgacgtgacccaggagaacatcctgctgttcatcttcagagacggcgacgtgctggtgagcatgagactgagcatcaccctgagctgccccctggacctgaccctgttccccatggacacccagagatgcaagatgcagctggagagcttcggctacaccaccgacgacctgagattcatctggcagagcggcgaccccgtgcagctggagaagatcgccctgccccagttcgacatcaagaaggaggacatcgagtacggcaactgcaccaagtactacaagggcaccggctactacacctgcgtggaggtgatcttcaccctgagaagacaggtgggcttctacatgatgggcgtgtacgcccccaccctgctgatcgtggtgctgagctggctgagcttctggatcaaccccgacgccagcgccgccagagtgcccctgggcatcttcagcgtgctgagcctggccagcgagtgcaccaccctggccgccgagctgcccaaggtgagctacgtgaaggccctggacgtgtggctgatcgcctgcctgctgttcggcttcgccagcctggtggagtacgccgtggtgcaggtgatgctgaacaaccccaagagagtggaggccgagaaggccagaatcgccaaggccgagcaggccgacggcaagggcggcaacgtggccaagaagaacaccgtgaacggcaccggcacccccgtgcacatcagcaccctgcaggtgggcgagaccagatgcaagaaggtgtgcaccagcaagagcgacctgagaagcaacgacttcagcatcgtgggcagcctgcccagagacttcgagctgagcaactacgactgctacggcaagcccatcgaggtgaacaacggcctgggcaagagccaggccaagaacaacaagaagcccccccccgccaagcccgtgatccccaccgccgccaagagaatcgacctgtacgccagagccctgttccccttctgcttcctgttcttcaacgtgatctactggagcatctacctgtag

SEQ ID NO: 83401 - DNA, 1494 bp, synthetic construct; identical to SEQ ID NO: 83400
  misc_feature 1..1494: note = Description of Artificial Sequence: Synthetic coding sequence
  source 1..1494: mol_type = other DNA

SEQ ID NO: 83402 - DNA, 912 bp, synthetic construct
  misc_feature 1..912: note = Description of Artificial Sequence: Synthetic coding sequence
  source 1..912: mol_type = other DNA
atgaagttcctgctgaccaccgccttcctgatcctgatcagcctgtgggtggaggaggcctacagcaaggagaagagcagcaagaagggcaagggcaagaagaagcagtacctgtgccccagccagcagagcgccgaggacctggccagagtgcccgccaacagcaccagcaacatcctgaacagactgctggtgagctacgaccccagaatcagacccaacttcaagggcatccccgtggacgtggtggtgaacatcttcatcaacagcttcggcagcatccaggagaccaccatggactacagagtgaacatcttcctgagacagaagtggaacgaccccagactgaagctgcccagcgacttcagaggcagcgacgccctgaccgtggaccccaccatgtacaagtgcctgtggaagcccgacctgttcttcgccaacgagaagagcgccaacttccacgacgtgacccaggagaacatcctgctgttcatcttcagagacggcgacgtgctggtgagcatgagactgagcatcaccctgagctgccccctggacctgaccctgttccccatggacacccagagatgcaagatgcagctggagagcttcggctacaccaccgacgacctgagattcatctggcagagcggcgaccccgtgcagctggagaagatcgccctgccccagttcgacatcaagaaggaggacatcgagtacggcaactgcaccaagtactacaagggcaccggctactacacctgcgtggaggtgatcttcaccctgagaagacaggtgggcttctacatgatgggcgtgtacgcccccaccctgctgatcgtggtgctgagctggctgagcttctggatcaaccccgacgccagcgccgccagagtgcccctgggctggtag

SEQ ID NO: 83403 - DNA, 492 bp, synthetic construct
  misc_feature 1..492: note = Description of Artificial Sequence: Synthetic coding sequence
  source 1..492: mol_type = other DNA
atgatgctgcccctgcagggcgcccagatgctgcagatgctggagaagagcctgagaaagagcctgcccgccagcctgaaggtgtacggcaccgtgttccacatcaaccacggcaaccccttcaacctgaaggccgtggtggacaagtggcccgacttcaacaccgtggtggtgtgcccccaggagcaggacatgaccgacgacctggaccactacaccaacacctaccagatctacagcaaggacccccagaactgccaggagttcctgggcagccccgagctgatcaactggaagcagcacctgcagatccagagcagccagcccagcctgaacgaggccatccagaacctggccgccatcaagagcttcaaggtgaagcagacccagagaatcctgtacatggccgccgagaccgccaaggagctgacccccttcctgctgaagagcaagatcctgagccccaacggcggcaagcccaaggccatgtag

SEQ ID NO: 83404 - DNA, 891 bp, synthetic construct
  misc_feature 1..891: note = Description of Artificial Sequence: Synthetic coding sequence
  source 1..891: mol_type = other DNA
atgatgctgcccctgcagggcgcccagatgctgcagatgctggagaagagcctgagaaagagcctgcccgccagcctgaaggtgtacggcaccgtgttccacatcaaccacggcaaccccttcaacctgaaggccgtggtggacaagtggcccgacttcaacaccgtggtggtgtgcccccaggagcaggacatgaccgacgacctggaccactacaccaacacctaccagatctacagcaaggacccccagaactgccaggagttcctgggcagccccgagctgatcaactggaagcagcacctgcagatccagagcagccagcccagcctgaacgaggccatccagaacctggccgccatcaagagcttcaaggtgaagcagacccagagaatcctgtacatggccgccgagaccgccaaggagctgacccccttcctgctgaagagcaagatcctgagccccaacggcggcaagcccaaggccatcaaccaggagatgttcaagctgagcagcatggacgtgacccacgcccacctggtgaacaagttctggcacttcggcggcaacgagagaagccagagattcatcgagagatgcatccagaccttccccacctgctgcctgctgggccccgagggcacccccgtgtgctgggacctgatggaccagaccggcgagatgagaatggccggcaccctgcccgagtacagactgcacggcctggtgacctacgtgatctacagccacgcccagaagctgggcaagctgggcttccccgtgtacagccacgtggactacagcaacgaggccatgcagaagatgagctacaccctgcagcacgtgcccatccccagaagctggaaccagtggaactgcgtgcccctgtag

SEQ ID NO: 83405 - DNA, 891 bp, synthetic construct; identical to SEQ ID NO: 83404
  misc_feature 1..891: note = Description of Artificial Sequence: Synthetic coding sequence
  source 1..891: mol_type = other DNA

SEQ ID NO: 83406 - DNA, 2022 bp, synthetic construct
  misc_feature 1..2022: note = Description of Artificial Sequence: Synthetic coding sequence
  source 1..2022: mol_type = other DNA
atgcccctgaacagaaccctgagcatgagcagcctgcccggcctggaggactgggaggacgagttcgacctggagaacgccgtgctgttcgaggtggcctgggaggtggccaacaaggtgggcggcatctacaccgtgctgcagaccaaggccaaggtgaccggcgacgagtggggcgacaactacttcctggtgggcccctacaccgagcagggcgtgagaacccaggtggagctgctggaggcccccacccccgccctgaagagaaccctggacagcatgaacagcaagggctgcaagttcctggcccagagcgaggagaagccccacgtggtggcccacttccacgagtggctggccggcgtgggcctgtgcctgtgcagagccagaagactgcccgtggccaccatcttcaccacccacgccaccctgctgggcagatacctgtgcgccggcgccgtggacttctacaacaacctggagaacttcaacgtggacaaggaggccggcgagagacagatctaccacagatactgcatggagagagccgccgcccactgcgcccacgtgttcaccaccgtgagccagatcaccgccatcgaggcccagcacctgctgaagagaaagcccgacatcgtgacccccaacggcctgaacgtgaagaagttcagcgccatgcacgagttccagaacctgcacgcccagagcaaggccagaatccaggagttcgtgagaggccacttctacggccacctggacttcaacctggacaagaccctgtacttcttcatcgccggcagatacgagttcagcaacaagggcgccgacgtgttcctggaggccctggccagactgaactacctgctgagagtgaacggcagcgagcagaccgtggtggccttcttcatcatgcccgccagaaccaacaacttcaacgtggagaccctgaagggccaggccgtgagaaagcagctgtgggacaccgccaacaccgtgaaggagaagttcggcagaaagctgtacgagagcctgctggtgggcagcctgcccgacatgaacaagatgctggacaaggaggacttcaccatgatgaagagagccatcttcgccacccagagacagagcttcccccccgtgtgcacccacaacatgctggacgacagcagcgaccccatcctgaccaccatcagaagaatcggcctgttcaacagcagcgccgacagagtgaaggtgatcttccaccccgagttcctgagcagcaccagccccctgctgcccgtggactacgaggagttcgtgagaggctgccacctgggcgtgttccccagctactacgagccctggggctacacccccgccgagtgcaccgtgatgggcatccccagcatcagcaccaacctgagcggcttcggctgcttcatggaggagcacatcgccgaccccagcgcctacggcatctacatcctggacagaagattcagaagcctggacgacagctgcagccagctgaccagcttcctgtacagcttctgccagcagagcagaagacagagaatcatccagagaaacagaaccgagagactgagcgacctgctggactggaagtacctgggcagatactacatgagcgccagacacatggccctgagcaaggccttccccgagcacttcacctacgagcccaacgaggccgacgccgcccagggctacagataccccagacccgccagcgtgccccccagccccagcctgagcagacacagcagcccccaccagagcgaggacgaggaggaccccagaaacggccccctggaggaggacggcgagagatacgacgaggacgaggaggccgccaaggacagaagaaacatcagagcccccgagtggcccagaagagccagctgcaccagcagcaccagcggcagcaagagaaacagcgtggacaccgccaccagcagcagcctgagcacccccagcgagcccctgagccccaccagcagcctgggcgaggagagaaactag

SEQ ID NO: 83407 - DNA, 2214 bp, synthetic construct
  misc_feature 1..2214: note = Description of Artificial Sequence: Synthetic coding sequence
  source 1..2214: mol_type = other DNA
atgcccctgaacagaaccctgagcatgagcagcctgcccggcctggaggactgggaggacgagttcgacctggagaacgccgtgctgttcgaggtggcctgggaggtggccaacaaggtgggcggcatctacaccgtgctgcagaccaaggccaaggtgaccggcgacgagtggggcgacaactacttcctggtgggcccctacaccgagcagggcgtgagaacccaggtggagctgctggaggcccccacccccgccctgaagagaaccctggacagcatgaacagcaagggctgcaaggtgtacttcggcagatggctgatcgagggcggccccctggtggtgctgctggacgtgggcgccagcgcctgggccctggagagatggaagggcgagctgtgggacacctgcaacatcggcgtgccctggtacgacagagaggccaacgacgccgtgctgttcggcttcctgaccacctggttcctgggcgagttcctggcccagagcgaggagaagccccacgtggtggcccacttccacgagtggctggccggcgtgggcctgtgcctgtgcagagccagaagactgcccgtggccaccatcttcaccacccacgccaccctgctgggcagatacctgtgcgccggcgccgtggacttctacaacaacctggagaacttcaacgtggacaaggaggccggcgagagacagatctaccacagatactgcatggagagagccgccgcccactgcgcccacgtgttcaccaccgtgagccagatcaccgccatcgaggcccagcacctgctgaagagaaagcccgacatcgtgacccccaacggcctgaacgtgaagaagttcagcgccatgcacgagttccagaacctgcacgcccagagcaaggccagaatccaggagttcgtgagaggccacttctacggccacctggacttcaacctggacaagaccctgtacttcttcatcgccggcagatacgagttcagcaacaagggcgccgacgtgttcctggaggccctggccagactgaactacctgctgagagtgaacggcagcgagcagaccgtggtggccttcttcatcatgcccgccagaaccaacaacttcaacgtggagaccctgaagggccaggccgtgagaaagcagctgtgggacaccgccaacaccgtgaaggagaagttcggcagaaagctgtacgagagcctgctggtgggcagcctgcccgacatgaacaagatgctggacaaggaggacttcaccatgatgaagagagccatcttcgccacccagagacagagcttcccccccgtgtgcacccacaacatgctggacgacagcagcgaccccatcctgaccaccatcagaagaatcggcctgttcaacagcagcgccgacagagtgaaggtgatcttccaccccgagttcctgagcagcaccagccccctgctgcccgtggactacgaggagttcgtgagaggctgccacctgggcgtgttccccagctactacgagccctggggctacacccccgccgagtgcaccgtgatgggcatccccagcatcagcaccaacctgagcggcttcggctgcttcatggaggagcacatcgccgaccccagcgcctacggcatctacatcctggacagaagattcagaagcctggacgacagctgcagccagctgaccagcttcctgtacagcttctgccagcagagcagaagacagagaatcatccagagaaacagaaccgagagactgagcgacctgctggactggaagtacctgggcagatactacatgagcgccagacacatggccctgagcaaggccttccccgagcacttcacctacgagcccaacgaggccgacgccgcccagggctacagataccccagacccgccagcgtgccccccagccccagcctgagcagacacagcagcccccaccagagcgaggacgaggaggaccccagaaacggccccctggaggaggacggcgagagatacgacgaggacgaggaggccgccaaggacagaagaaacatcagagcccccgagtggcccagaagagccagctgcaccagcagcaccagcggcagcaagagaaacagcgtggacaccgccaccagcagcagcctgagcacccccagcgagcccctgagccccaccagcagcctgggcgaggagagaaactag

SEQ ID NO: 83408 - DNA, 708 bp, synthetic construct
  misc_feature 1..708: note = Description of Artificial Sequence: Synthetic coding sequence
  source 1..708: mol_type = other DNA
atgaacagcacctggagaacccagtgcagcagcaagtggcccggcagatggctgaccagagtgtacttcggcagatggctgatcgagggcggccccctggtggtgctgctggacgtgggcgccagcgcctgggccctggagagatggaagggcgagctgtgggacacctgcaacatcggcgtgccctggtacgacagagaggccaacgacgccgtgctgttcggcttcctgaccacctggttcctgggcgagttcctggcccagagcgaggagaagccccacgtggtggcccacttccacgagtggctggccggcgtgggcctgtgcctgtgcagagccagaagactgcccgtggccaccatcttcaccacccacgccaccctgctgggcagatacctgtgcgccggcgccgtggacttctacaacaacctggagaacttcaacgtggacaaggaggccggcgagagacagatctaccacagatactgcatggagagagccgccgcccactgcgcccacgtgttcaccaccgtgagccagatcaccgccatcgaggcccagcacctgctgaagagaaagcccggcatctggaccagcacctggaccagaccctacaccagcctgagccccgccgccatgagcagccccaccagagtgctgaccagcagctggagacactggctgggcagcaccatctgcagcgagtag

SEQ ID NO: 83409 - DNA, 1974 bp, synthetic construct
  misc_feature 1..1974: note = Description of Artificial Sequence: Synthetic coding sequence
  source 1..1974: mol_type = other DNA
atgaacagcacctggagaacccagtgcagcagcaagtggcccggcagatggctgaccagagtgtacttcggcagatggctgatcgagggcggccccctggtggtgctgctggacgtgggcgccagcgcctgggccctggagagatggaagggcgagctgtgggacacctgcaacatcggcgtgccctggtacgacagagaggccaacgacgccgtgctgttcggcttcctgaccacctggttcctgggcgagttcctggcccagagcgaggagaagccccacgtggtggcccacttccacgagtggctggccggcgtgggcctgtgcctgtgcagagccagaagactgcccgtggccaccatcttcaccacccacgccaccctgctgggcagatacctgtgcgccggcgccgtggacttctacaacaacctggagaacttcaacgtggacaaggaggccggcgagagacagatctaccacagatactgcatggagagagccgccgcccactgcgcccacgtgttcaccaccgtgagccagatcaccgccatcgaggcccagcacctgctgaagagaaagcccgacatcgtgacccccaacggcctgaacgtgaagaagttcagcgccatgcacgagttccagaacctgcacgcccagagcaaggccagaatccaggagttcgtgagaggccacttctacggccacctggacttcaacctggacaagaccctgtacttcttcatcgccggcagatacgagttcagcaacaagggcgccgacgtgttcctggaggccctggccagactgaactacctgctgagagtgaacggcagcgagcagaccgtggtggccttcttcatcatgcccgccagaaccaacaacttcaacgtggagaccctgaagggccaggccgtgagaaagcagctgtgggacaccgccaacaccgtgaaggagaagttcggcagaaagctgtacgagagcctgctggtgggcagcctgcccgacatgaacaagatgctggacaaggaggacttcaccatgatgaagagagccatcttcgccacccagagacagagcttcccccccgtgtgcacccacaacatgctggacgacagcagcgaccccatcctgaccaccatcagaagaatcggcctgttcaacagcagcgccgacagagtgaaggtgatcttccaccccgagttcctgagcagcaccagccccctgctgcccgtggactacgaggagttcgtgagaggctgccacctgggcgtgttccccagctactacgagccctggggctacacccccgccgagtgcaccgtgatgggcatccccagcatcagcaccaacctgagcggcttcggctgcttcatggaggagcacatcgccgaccccagcgcctacggcatctacatcctggacagaagattcagaagcctggacgacagctgcagccagctgaccagcttcctgtacagcttctgccagcagagcagaagacagagaatcatccagagaaacagaaccgagagactgagcgacctgctggactggaagtacctgggcagatactacatgagcgccagacacatggccctgagcaaggccttccccgagcacttcacctacgagcccaacgaggccgacgccgcccagggctacagataccccagacccgccagcgtgccccccagccccagcctgagcagacacagcagcccccaccagagcgaggacgaggaggaccccagaaacggccccctggaggaggacggcgagagatacgacgaggacgaggaggccgccaaggacagaagaaacatcagagcccccgagtggcccagaagagccagctgcaccagcagcaccagcggcagcaagagaaacagcgtggacaccgccaccagcagcagcctgagcacccccagcgagcccctgagccccaccagcagcctgggcgaggagagaaactag

SEQ ID NO: 83410 - DNA, 1113 bp, synthetic construct
  misc_feature 1..1113: note = Description of Artificial Sequence: Synthetic coding sequence
  source 1..1113: mol_type = other DNA
atgcccgccagaaccaacaacttcaacgtggagaccctgaagggccaggccgtgagaaagcagctgtgggacaccgccaacaccgtgaaggagaagttcggcagaaagctgtacgagagcctgctggtgggcagcctgcccgacatgaacaagatgctggacaaggaggacttcaccatgatgaagagagccatcttcgccacccagagacagagcttcccccccgtgtgcacccacaacatgctggacgacagcagcgaccccatcctgaccaccatcagaagaatcggcctgttcaacagcagcgccgacagagtgaaggtgatcttccaccccgagttcctgagcagcaccagccccctgctgcccgtggactacgaggagttcgtgagaggctgccacctgggcgtgttccccagctactacgagccctggggctacacccccgccgagtgcaccgtgatgggcatccccagcatcagcaccaacctgagcggcttcggctgcttcatggaggagcacatcgccgaccccagcgcctacggcatctacatcctggacagaagattcagaagcctggacgacagctgcagccagctgaccagcttcctgtacagcttctgccagcagagcagaagacagagaatcatccagagaaacagaaccgagagactgagcgacctgctggactggaagtacctgggcagatactacatgagcgccagacacatggccctgagcaaggccttccccgagcacttcacctacgagcccaacgaggccgacgccgcccagggctacagataccccagacccgccagcgtgccccccagccccagcctgagcagacacagcagcccccaccagagcgaggacgaggaggaccccagaaacggccccctggaggaggacggcgagagatacgacgaggacgaggaggccgccaaggacagaagaaacatcagagcccccgagtggcccagaagagccagctgcaccagcagcaccagcggcagcaagagaaacagcgtggacaccgccaccagcagcagcctgagcacccccagcgagcccctgagccccaccagcagcctgggcgaggagagaaactag

SEQ ID NO: 83411 - DNA, 1002 bp, synthetic construct
  misc_feature 1..1002: note = Description of Artificial Sequence: Synthetic coding sequence
  source 1..1002: mol_type = other DNA
atgaccgaccaggccttcgtgaccctgaccaccaacgacgcctacgccaagggcgccctggtgctgggcagcagcctgaagcagcacagaaccaccagaagactggtggtgctggccaccccccaggtgagcgacagcatgagaaaggtgctggagaccgtgttcgacgaggtgatcatggtggacgtgctggacagcggcgacagcgcccacctgaccctgatgaagagacccgagctgggcgtgaccctgaccaagctgcactgctggagcctgacccagtacagcaagtgcgtgttcatggacgccgacaccctggtgctggccaacatcgacgacctgttcgacagagaggagctgagcgccgcccccgaccccggctggcccgactgcttcaacagcggcgtgttcgtgtaccagcccagcgtggagacctacaaccagctgctgcacctggccagcgagcagggcagcttcgacggcggcgaccagggcatcctgaacaccttcttcagcagctgggccaccaccgacatcagaaagcacctgcccttcatctacaacctgagcagcatcagcatctacagctacctgcccgccttcaaggtgttcggcgccagcgccaaggtggtgcacttcctgggcagagtgaagccctggaactacacctacgaccccaagaccaagagcgtgaagagcgaggcccacgaccccaacatgacccaccccgagttcctgatcctgtggtggaacatcttcaccaccaacgtgctgcccctgctgcagcagttcggcctggtgaaggacacctgcagctacgtgaacgtggaggacgtgagcggcgccatcagccacctgagcctgggcgagatccccgccatggcccagcccttcgtgagcagcgaggagagaaaggagagatgggagcagggccaggccgactacatgggcgccgacagcttcgacaacatcaagagaaagctggacacctacctgcagtag

SEQ ID NO: 83412 - DNA, 1053 bp, synthetic construct
  misc_feature 1..1053: note = Description of Artificial Sequence: Synthetic coding sequence
  source 1..1053: mol_type = other DNA
atgaccgaccaggccttcgtgaccctgaccaccaacgacgcctacgccaagggcgccctggtgctgggcagcagcctgaagcagcacagaaccaccagaagactggtggtgctggccaccccccaggtgagcgacagcatgagaaaggtgctggagaccgtgttcgacgaggtgatcatggtggacgtgctggacagcggcgacagcgcccacctgaccctgatgaagagacccgagctgggcgtgaccctgaccaagctgcactgctggagcctgacccagtacagcaagtgcgtgttcatggacgccgacaccctggtgctggccaacatcgacgacctgttcgacagagaggagctgagcgccgcccccgaccccggctggcccgactgcttcaacagcggcgtgttcgtgtaccagcccagcgtggagacctacaaccagctgctgcacctggccagcgagcagggcagcttcgacggcggcgaccagggcatcctgaacaccttcttcagcagctgggccaccaccgacatcagaaagcacctgcccttcatctacaacctgagcagcatcagcatctacagctacctgcccgccttcaaggtgttcggcgccagcgccaaggtggtgcacttcctgggcagagtgaagccctggaactacacctacgaccccaagaccaagagcgtgaagagcgaggcccacgaccccaacatgacccaccccgagttcctgatcctgtggtggaacatcttcaccaccaacgtgctgcccctgctgcagcagttcggcctggtgaaggacacctgcagctacgtgaacgtgctgagcgacctggtgtacaccctggccttcagctgcggcttctgcagaaaggaggacgtgagcggcgccatcagccacctgagcctgggcgagatccccgccatggcccagcccttcgtgagcagcgaggagagaaaggagagatgggagcagggccaggccgactacatgggcgccgacagcttcgacaacatcaagagaaagctggacacctacctgcagtag

SEQ ID NO: 83413 - DNA, 840 bp, synthetic construct
  misc_feature 1..840: note = Description of Artificial Sequence: Synthetic coding sequence
  source 1..840: mol_type = other DNA
atgaccgaccaggccttcgtgaccctgaccaccaacgacgcctacgccaagggcgccctggtgctgggcagcagcctgaagcagcacagaaccaccagaagactggtggtgctggccaccccccaggtgagcgacagcatgagaaaggtgctggagaccgtgttcgacgaggtgatcatggtggacgtgctggacagcggcgacagcgcccacctgaccctgatgaagagacccgagctgggcgtgaccctgaccaagctgcactgctggagcctgacccagtacagcaagtgcgtgttcatggacgccgacaccctggtgctggccaacatcgacgacctgttcgacagagaggagctgagcgccgcccccgaccccggctggcccgactgcttcaacagcggcgtgttcgtgtaccagcccagcgtggagacctacaaccagctgctgcacctggccagcgagcagggcagcttcgacggcggcgaccagggcatcctgaacaccttcttcagcagctgggccaccaccgacatcagaaagcacctgcccttcatctacaacctgagcagcatcagcatctacagctacctgcccgccttcaaggtgaagatgagccaggagccctaccacatctgccccctgggcagaagccagctgtggcacagcagactgtaccccagaaagaacggcagaaacgacggcaacagagccagactgatcatctgggagcagatccccctgaccaccagcagaggcaacctgaccctgaccagcagcagaaacaccgccttcttctgcgagcacatccacttcaccagcctggtgagcgacacctag

SEQ ID NO: 83414 - DNA, 1398 bp, synthetic construct
  misc_feature 1..1398: note = Description of Artificial Sequence: Synthetic coding sequence
  source 1..1398: mol_type = other DNA
atgagcgagaccgagttccaccacggcgcccaggccggcctggagctgctgagaagcagcaacagccccaccagcgccagccagagcgccggcatgaccgtgaccgaccaggccttcgtgaccctggccaccaacgacatctactgccagggcgccctggtgctgggccagagcctgagaagacacagactgaccagaaagctggtggtgctgatcaccccccaggtgagcagcctgctgagagtgatcctgagcaaggtgttcgacgaggtgatcgaggtgaacctgatcgacagcgccgactacatccacctggccttcctgaagagacccgagctgggcctgaccctgaccaagctgcactgctggaccctgacccactacagcaagtgcgtgttcctggacgccgacaccctggtgctgagcaacgtggacgagctgttcgacagaggcgagttcagcgccgcccccgaccccggctggcccgactgcttcaacagcggcgtgttcgtgttccagcccagcctgcacacccacaagctgctgctgcagcacgccatggagcacggcagcttcgacggcgccgaccagggcctgctgaacagcttcttcagaaactggagcaccaccgacatccacaagcacctgcccttcatctacaacctgagcagcaacaccatgtacacctacagccccgccttcaagcagttcggcagcagcgccaaggtggtgcacttcctgggcagcatgaagccctggaactacaagtacaacccccagagcggcagcgtgctggagcagggcagcgccagcagcagccagcaccaggccgccttcctgcacctgtggtggaccgtgtaccagaacaacgtgctgcccctgtacaagagcgtgcaggccggcgaggccagagccagccccggccacaccctgtgccacagcgacgtgggcggcccctgcgccgacagcgccagcggcgtgggcgagccctgcgagaacagcacccccagcgccggcgtgccctgcgccaacagccccctgggcagcaaccagcccgcccagggcctgcccgagcccacccagatcgtggacgagaccctgagcctgcccgagggcagaagaagcgaggacatgatcgcctgccccgagaccgagacccccgccgtgatcacctgcgaccccctgagccagcccagcccccagcccgccgacttcaccgagaccgagaccatcctggtggacctggccgtgagcgtgagccagatcagcatcgaggagaaggtgaaggagctgagccccgaggaggagagaagaaagtgggaggagggcagaatcgactacatgggcaaggacgccttcgccagaatccaggagaagctggacagattcctgcagtag

SEQ ID NO: 83415 - DNA, 1506 bp, synthetic construct
  misc_feature 1..1506: note = Description of Artificial Sequence: Synthetic coding sequence
  source 1..1506: mol_type = other DNA
atgagcgagaccgagttccaccacggcgcccaggccggcctggagctgctgagaagcagcaacagccccaccagcgccagccagagcgccggcatgaccgtgaccgaccaggccttcgtgaccctggccaccaacgacatctactgccagggcgccctggtgctgggccagagcctgagaagacacagactgaccagaaagctggtggtgctgatcaccccccaggtgagcagcctgctgagagtgatcctgagcaaggtgttcgacgaggtgatcgaggtgaacctgatcgacagcgccgactacatccacctggccttcctgaagagacccgagctgggcctgaccctgaccaagctgcactgctggaccctgacccactacagcaagtgcgtgttcctggacgccgacaccctggtgctgagcaacgtggacgagctgttcgacagaggcgagttcagcgccgcccccgaccccggctggcccgactgcttcaacagcggcgtgttcgtgttccagcccagcctgcacacccacaagctgctgctgcagcacgccatggagcacggcagcttcgacggcgccgaccagggcctgctgaacagcttcttcagaaactggagcaccaccgacatccacaagcacctgcccttcatctacaacctgagcagcaacaccatgtacacctacagccccgccttcaagcagttcggcagcagcgccaaggtggtgcacttcctgggcagcatgaagccctggaactacaagtacaacccccagagcggcagcgtgctggagcagggcagcgccagcagcagccagcaccaggccgccttcctgcacctgtggtggaccgtgtaccagaacaacgtgctgcccctgtacaagagcgtgcaggccggcgaggccagagccagccccggccacaccctgtgccacagcgacgtgggcggcccctgcgccgacagcgccagcggcgtgggcgagccctgcgagaacagcacccccagcgccggcgtgccctgcgccaacagccccctgggcagcaaccagcccgcccagggcctgcccgagcccacccagatcgtggacgagaccctgagcctgcccgagggcagaagaagcgaggacatgatcgcctgccccgagaccgagacccccgccgtgatcacctgcgaccccctgagccagcccagcccccagcccgccgacttcaccgagaccgagaccatcctgcagcccgccaacaaggtggagagcgtgagcagcgaggagaccttcgagcccagccaggagctgcccgccgaggccctgagagaccccagcctgcaggacgccctggaggtggacctggccgtgagcgtgagccagatcagcatcgaggagaaggtgaaggagctgagccccgaggaggagagaagaaagtgggaggagggcagaatcgactacatgggcaaggacgccttcgccagaatccaggagaagctggacagattcctgcagtag

SEQ ID NO: 83416 - DNA, 1413 bp, synthetic construct
  misc_feature 1..1413: note = Description of Artificial Sequence: Synthetic coding sequence
  source 1..1413: mol_type = other DNA
atgagcgtgaccgaccaggccttcgtgaccctggccaccaacgacatctactgccagggcgccctggtgctgggccagagcctgagaagacacagactgaccagaaagctggtggtgctgatcaccccccaggtgagcagcctgctgagagtgatcctgagcaaggtgttcgacgaggtgatcgaggtgaacctgatcgacagcgccgactacatccacctggccttcctgaagagacccgagctgggcctgaccctgaccaagctgcactgctggaccctgacccactacagcaagtgcgtgttcctggacgccgacaccctggtgctgagcaacgtggacgagctgttcgacagaggcgagttcagcgccgcccccgaccccggctggcccgactgcttcaacagcggcgtgttcgtgttccagcccagcctgcacacccacaagctgctgctgcagcacgccatggagcacggcagcttcgacggcgccgaccagggcctgctgaacagcttcttcagaaactggagcaccaccgacatccacaagcacctgcccttcatctacaacctgagcagcaacaccatgtacacctacagccccgccttcaagcagttcggcagcagcgccaaggtggtgcacttcctgggcagcatgaagccctggaactacaagtacaacccccagagcggcagcgtgctggagcagggcagcgccagcagcagccagcaccaggccgccttcctgcacctgtggtggaccgtgtaccagaacaacgtgctgcccctgtacaagagcgtgcaggccggcgaggccagagccagccccggccacaccctgtgccacagcgacgtgggcggcccctgcgccgacagcgccagcggcgtgggcgagccctgcgagaacagcacccccagcgccggcgtgccctgcgccaacagccccctgggcagcaaccagcccgcccagggcctgcccgagcccacccagatcgtggacgagaccctgagcctgcccgagggcagaagaagcgaggacatgatcgcctgccccgagaccgagacccccgccgtgatcacctgcgaccccctgagccagcccagcccccagcccgccgacttcaccgagaccgagaccatcctgcagcccgccaacaaggtggagagcgtgagcagcgaggagaccttcgagcccagccaggagctgcccgccgaggccctgagagaccccagcctgcaggacgccctggaggtggacctggccgtgagcgtgagccagatcagcatcgaggagaaggtgaaggagctgagccccgaggaggagagaagaaagtgggaggagggcagaatcgactacatgggcaaggacgccttcgccagaatccaggagaagctggacagattcctgcagtag

SEQ ID NO: 83417 - DNA, 417 bp, synthetic construct
  misc_feature 1..417: note = Description of Artificial Sequence: Synthetic coding sequence
  source 1..417: mol_type = other DNA
atgagcgtgaccgaccaggccttcgtgaccctggccaccaacgacatctactgccagggcgccctggtgctgggccagagcctgagaagacacagactgaccagaaagctggtggtgctgatcaccccccaggtgagcagcctgctgagagtgatcctgagcaaggtgttcgacgaggtgatcgaggtgaacctgatcgacagcgccgactacatccacctggccttcctgaagagacccgagctgggcctgaccctgaccaagctgcactgctggaccctgacccactacagcaagtgcgtgttcctggacgccgacaccctggtgctgagcaacgtggacgagctgttcgacagaggcgagttcagcgccgcccccgaccccggctggcccgactgcttcaacagcggcgtgtag

SEQ ID NO: 83418 - DNA, 1293 bp, synthetic construct
  misc_feature 1..1293: note = Description of Artificial Sequence: Synthetic coding sequence
  source 1..1293: mol_type = other DNA
atgagcgagaccgagttccaccacggcgcccaggccggcctggagctgctgagaagcagcaacagccccaccagcgccagccagagcgccggcatgaccgtgaccgaccaggccttcgtgaccctggccaccaacgacatctactgccagggcgccctggtgctgggccagagcctgagaagacacagactgaccagaaagctggtggtgctgatcaccccccaggtgagcagcctgctgagagtgatcctgagcaaggtgttcgacgaggtgatcgaggtgaacctgatcgacagcgccgactacatccacctggccttcctgaagagacccgagctgggcctgaccctgaccaagctgcactgctggaccctgacccactacagcaagtgcgtgttcctggacgccgacaccctggtgctgagcaacgtggacgagctgttcgacagaggcgagttcagcgccgcccccgaccccggctggcccgactgcttcaacagcggcgtgttcgtgttccagcccagcctgcacacccacaagctgctgctgcagcacgccatggagcacggcagcttcgacggcgccgaccagggcctgctgaacagcttcttcagaaactggagcaccaccgacatccacaagcacctgcccttcatctacaacctgagcagcaacaccatgtacacctacagccccgccttcaagcagttcggcagcagcgccaaggtggtgcacttcctgggcagcatgaagccctggaactacaagtacaacccccagagcggcagcgtgctggagcagggcagcgccagcagcagccagcaccaggccgccttcctgcacctgtggtggaccgtgtaccagaacaacgtgctgcccctgtacaagagcgtgcaggccggcgaggccagagccagccccggccacaccctgtgccacagcgacgtgggcggcccctgcgccgacagcgccagcggcgtgggcgagccctgcgagaacagcacccccagcgccggcgtgccctgcgccaacagccccctgggcagcaaccagcccgcccagggcctgcccgagcccacccagatcgtggacgagaccctgagcctgcccgagggcagaagaagcgaggacgtggacctggccgtgagcgtgagccagatcagcatcgaggagaaggtgaaggagctgagccccgaggaggagagaagaaagtgggaggagggcagaatcgactacatgggcaaggacgccttcgccagaatccaggagaagctggacagattcctgcagtag

SEQ ID NO: 83419 - DNA, 354 bp, synthetic construct
  misc_feature 1..354: note = Description of Artificial Sequence: Synthetic coding sequence
  source 1..354: mol_type = other DNA
atgtacggcaagatcatcttcgtgctgctgctgagcgacacccacaagagagacacctacgccgccacccccagagcccacgaggtgagcgagatcagcgtgagaaccgtgtacccccccgaggaggagaccggcgagagagtgcagctggcccaccacttcagcgagcccgagatcaccctgatcatcttcggcgtgatggccggcgtgatcggcaccatcctgctgatcagctacggcatcagaagactgatcaagaagagccccagcgacgtgaagcccctgcccagccccgacaccgacgtgcccctgagcagcgtggagatcgagaaccccgagaccagcgaccagtag

SEQ ID NO: 83420 - DNA, 453 bp, synthetic construct
  misc_feature 1..453: note = Description of Artificial Sequence: Synthetic coding sequence
  source 1..453: mol_type = other DNA
atgtacggcaagatcatcttcgtgctgctgctgagcgagatcgtgagcatcagcgccctgagcaccaccgaggtggccatgcacaccagcaccagcagcagcgtgaccaagagctacatcagcagccagaccaacgacacccacaagagagacacctacgccgccacccccagagcccacgaggtgagcgagatcagcgtgagaaccgtgtacccccccgaggaggagaccggcgagagagtgcagctggcccaccacttcagcgagcccgagatcaccctgatcatcttcggcgtgatggccggcgtgatcggcaccatcctgctgatcagctacggcatcagaagactgatcaagaagagccccagcgacgtgaagcccctgcccagccccgacaccgacgtgcccctgagcagcgtggagatcgagaaccccgagaccagcgaccagtag

SEQ ID NO: 83421 - DNA, 189 bp, synthetic construct
  misc_feature 1..189: note = Description of Artificial Sequence: Synthetic coding sequence
  source 1..189: mol_type = other DNA
atgtacggcaagatcatcttcgtgctgctgctgagcgagatcgtgagcatcagcgccctgagcaccaccgaggtggccatgcacaccagcaccagcagcagcgtgaccaagagctacatcagcagccagaccaacggcgagagagtgcagctggcccaccacttcagcgagcccgacttccacaactag

SEQ ID NO: 83422 - DNA, 357 bp, synthetic construct
  misc_feature 1..357: note = Description of Artificial Sequence: Synthetic coding sequence
  source 1..357: mol_type = other DNA
atgtacggcaagatcatcttcgtgctgctgctgagcgagatcgtgagcatcagcgccctgagcaccaccgaggtggccatgcacaccagcaccagcagcagcgtgaccaagagctacatcagcagccagaccaacggcgagagagtgcagctggcccaccacttcagcgagcccgagatcaccctgatcatcttcggcgtgatggccggcgtgatcggcaccatcctgctgatcagctacggcatcagaagactgatcaagaagagccccagcgacgtgaagcccctgcccagccccgacaccgacgtgcccctgagcagcgtggagatcgagaaccccgagaccagcgaccagtag

SEQ ID NO: 83423 - DNA, 414 bp, synthetic construct
  misc_feature 1..414: note = Description of Artificial Sequence: Synthetic coding sequence
  source 1..414: mol_type = other DNA
atgtacggcaagatcatcttcgtgctgctgctgagcgagatcgtgagcatcagcgccctgagcaccaccgaggtggccatgcacaccagcaccagcagcagcgtgaccaagagctacatcagcagccagaccaacgacacccacaagagagacacctacgccgccacccccagagcccacgaggtgagcgagatcagcgtgagaaccgtgtacccccccgaggaggagaccgagatcaccctgatcatcttcggcgtgatggccggcgtgatcggcaccatcctgctgatcagctacggcatcagaagactgatcaagaagagccccagcgacgtgaagcccctgcccagccccgacaccgacgtgcccctgagcagcgtggagatcgagaaccccgagaccagcgaccagtag

SEQ ID NO: 83424 - DNA, 258 bp, synthetic construct
  misc_feature 1..258: note = Description of Artificial Sequence: Synthetic coding sequence
  source 1..258: mol_type = other DNA
atgtacggcaagatcatcttcgtgctgctgctgagcggcgagagagtgcagctggcccaccacttcagcgagcccgagatcaccctgatcatcttcggcgtgatggccggcgtgatcggcaccatcctgctgatcagctacggcatcagaagactgatcaagaagagccccagcgacgtgaagcccctgcccagccccgacaccgacgtgcccctgagcagcgtggagatcgagaaccccgagaccagcgaccagtag

SEQ ID NO: 83425 - DNA, 375 bp, synthetic construct
  misc_feature 1..375: note = Description of Artificial Sequence: Synthetic coding sequence
  source 1..375: mol_type = other DNA
atgcacaccagcaccagcagcagcgtgaccaagagctacatcagcagccagaccaacgacacccacaagagagacacctacgccgccacccccagagcccacgaggtgagcgagatcagcgtgagaaccgtgtacccccccgaggaggagaccggcgagagagtgcagctggcccaccacttcagcgagcccgagatcaccctgatcatcttcggcgtgatggccggcgtgatcggcaccatcctgctgatcagctacggcatcagaagactgatcaagaagagccccagcgacgtgaagcccctgcccagccccgacaccgacgtgcccctgagcagcgtggagatcgagaaccccgagaccagcgaccagtag

SEQ ID NO: 83426 - DNA, 276 bp, synthetic construct
  misc_feature 1..276: note = Description of Artificial Sequence: Synthetic coding sequence
  source 1..276: mol_type = other DNA
atgtacggcaagatcatcttcgtgctgctgctgagcgagatcgtgagcatcagcgccctgagcaccaccgaggtggccatgcacaccagcaccagcagcagcgtgaccaagagctacatcagcagccagaccaacggcgagaccggccagctggtgcacagattcaccgtgcccgcccccgtggtgatcatcctgatcatcctgtgcgtgatggccggcatcatcggcaccatcctgctgatcagctacagcatcagaagactgatcaaggcctag

SEQ ID NO: 83427 - DNA, 276 bp, synthetic construct; identical to SEQ ID NO: 83426
  misc_feature 1..276: note = Description of Artificial Sequence: Synthetic coding sequence
  source 1..276: mol_type = other DNA

SEQ ID NO: 83428 - DNA, 177 bp, synthetic construct
  misc_feature 1..177: note = Description of Artificial Sequence: Synthetic coding sequence
  source 1..177: mol_type = other DNA
atgtacggcaagatcatcttcgtgctgctgctgagcggcgagaccggccagctggtgcacagattcaccgtgcccgcccccgtggtgatcatcctgatcatcctgtgcgtgatggccggcatcatcggcaccatcctgctgatcagctacagcatcagaagactgatcaaggcctag

SEQ ID NO: 83429 - DNA, 387 bp, synthetic construct
  misc_feature 1..387: note = Description of Artificial Sequence: Synthetic coding sequence
  source 1..387: mol_type = other DNA
atgtggagcaccagaagccccaacagcaccgcctggcccctgagcctggagcccgaccccggcatggccagcgccagcaccaccatgcacaccaccaccatcgccgagcccgaccccggcatgagcggctggcccgacggcagaatggagaccagcacccccaccatcatggacatcgtggtgatcgccggcgtgatcgccgccgtggccatcgtgctggtgagcctgctgttcgtgatgctgagatacatgtacagacacaagggcacctaccacaccaacgaggccaagggcaccgagttcgccgagagcgccgacgccgccctgcagggcgaccccgccctgcaggacgccggcgacagcagcagaaaggagtacttcatctag

SEQ ID NO: 83430 - DNA, 324 bp, synthetic construct
  misc_feature 1..324: note = Description of Artificial Sequence: Synthetic coding sequence
  source 1..324: mol_type = other DNA
atggccagcgccagcaccaccatgcacaccaccaccatcgccgagcccgaccccggcatgagcggctggcccgacggcagaatggagaccagcacccccaccatcatggacatcgtggtgatcgccggcgtgatcgccgccgtggccatcgtgctggtgagcctgctgttcgtgatgctgagatacatgtacagacacaagggcacctaccacaccaacgaggccaagggcaccgagttcgccgagagcgccgacgccgccctgcagggcgaccccgccctgcaggacgccggcgacagcagcagaaaggagtacttcatctag

SEQ ID NO: 83431 - DNA, 330 bp, synthetic construct
  misc_feature 1..330: note = Description of Artificial Sequence: Synthetic coding sequence
  source 1..330: mol_type = other DNA
atgtggagcaccagaagccccaacagcaccgcctggcccctgagcctggagcccgaccccggcatgagcggctggcccgacggcagaatggagaccagcacccccaccatcatggacatcgtggtgatcgccggcgtgatcgccgccgtggccatcgtgctggtgagcctgctgttcgtgatgctgagatacatgtacagacacaagggcacctaccacaccaacgaggccaagggcaccgagttcgccgagagcgccgacgccgccctgcagggcgaccccgccctgcaggacgccggcgacagcagcagaaaggagtacttcatctag

SEQ ID NO: 83432 - DNA, 237 bp, synthetic construct
  misc_feature 1..237: note = Description of Artificial Sequence: Synthetic coding sequence
  source 1..237: mol_type = other DNA
atgtacggcaagatcatcttcgtgctgctgctgagcggcatcgtgagcatcagcgccagcagcaccaccggcgtggccatgcacaccagcaccagcagcagcgtgaccaagagctacatcagcagccagaccaacggcatcaccctgatcaactggtgggccatggccagagtgatcttcgaggtgatgctggtggtggtgggcatgatcatcctgatcagctactgcatcagatag

SEQ ID NO: 83433 - DNA, 168 bp, synthetic construct
  misc_feature 1..168: note = Description of Artificial Sequence: Synthetic coding sequence
  source 1..168: mol_type = other DNA
atgtacggcaagatcatcttcgtgctgctgctgagcggcatcgtgagcatcagcgccagcagcaccaccggcgtggccatgcacaccagcaccagcagcagcgtgaccaagagctacatcagcagccagaccaacggcgagagaggccagctggtgcacagattctag

SEQ ID NO: 83434 - DNA, 237 bp, synthetic construct; identical to SEQ ID NO: 83432
  misc_feature 1..237: note = Description of Artificial Sequence: Synthetic coding sequence
  source 1..237: mol_type = other DNA

SEQ ID NO: 83435 - DNA, 180 bp, synthetic construct
  misc_feature 1..180: note = Description of Artificial Sequence: Synthetic coding sequence
  source 1..180: mol_type = other DNA
atgtacggcaagatcatcttcgtgctgctgctgagcggcatcgtgagcatcagcgccagcagcaccaccggcgtggccatgcacaccagcaccagcagcagcgtgaccaagagctacatcagcagccagaccaacggctgcgtgatcggcaacatcatctgcagcgacaagagcaagtag

SEQ ID NO: 83436 - DNA, 1605 bp, synthetic construct
  misc_feature 1..1605: note = Description of Artificial Sequence: Synthetic coding sequence
  source 1..1605: mol_type = other DNA
atgccccacctgatggagagaatggtgggcagcggcctgctgtggctggccctggtgagctgcatcctgacccaggccagcgccgtgcagagaggctacggcaaccccatcgaggccagcagctacggcctggacctggactgcggcgcccccggcacccccgaggcccacgtgtgcttcgacccctgccagaactacaccctgctggacgagcccttcagaagcaccgagaacagcgccggcagccagggctgcgacaagaacatgagcggctggtacagattcgtgggcgagggcggcgtgagaatgagcgagacctgcgtgcaggtgcacagatgccagaccgacgcccccatgtggctgaacggcacccaccccgccctgggcgacggcatcaccaaccacaccgcctgcgcccactggagcggcaactgctgcttctggaagaccgaggtgctggtgaaggcctgccccggcggctaccacgtgtacagactggagggcaccccctggtgcaacctgagatactgcaccgaccccagcaccgtggaggacaagtgcgagaaggcctgcagacccgaggaggagtgcctggccctgaacagcacctggggctgcttctgcagacaggacctgaacagcagcgacgtgcacagcctgcagccccagctggactgcggccccagagagatcaaggtgaaggtggacaagtgcctgctgggcggcctgggcctgggcgaggaggtgatcgcctacctgagagaccccaactgcagcagcatcctgcagaccgaggagagaaactgggtgagcgtgaccagccccgtgcaggccagcgcctgcagaaacatcctggagagaaaccagacccacgccatctacaagaacaccctgagcctggtgaacgacttcatcatcagagacaccatcctgaacatcaacttccagtgcgcctaccccctggacatgaaggtgagcctgcaggccgccctgcagcccatcgtgagcagcctgaacgtgagcgtggacggcaacggcgagttcatcgtgagaatggccctgttccaggaccagaactacaccaacccctacgagggcgacgccgtggagctgagcgtggagagcgtgctgtacgtgggcgccatcctggagcagggcgacaccagcagattcaacctggtgctgagaaactgctacgccacccccaccgaggacaaggccgacctggtgaagtacttcatcatcagaaacagctgcagcaaccagagagacagcaccatccacgtggaggagaacggccagagcagcgagagcagattcagcgtgcagatgttcatgttcgccggccactacgacctggtgttcctgcactgcgagatccacctgtgcgacagcctgaacgagcagtgccagcccagctgcagcagaagccaggtgagaagcgaggtgcccgccatcgacctggccagagtgctggacctgggccccatcaccagaagaggcgcccagagccccggcgtgatgaacggcacccccagcaccgccggcttcctggtggcctggcccatggtgctgctgaccgtgctgctggcctggctgttctag

SEQ ID NO: 83437 - DNA, 1164 bp, synthetic construct
  misc_feature 1..1164: note = Description of Artificial Sequence: Synthetic coding sequence
  source 1..1164: mol_type = other DNA
atgccccacctgatggagagaatggtgggcagcggcctgctgtggctggccctggtgagctgcatcctgacccaggccagcgccgtgcagagagaccccagcaccgtggaggacaagtgcgagaaggcctgcagacccgaggaggagtgcctggccctgaacagcacctggggctgcttctgcagacaggacctgaacagcagcgacgtgcacagcctgcagccccagctggactgcggccccagagagatcaaggtgaaggtggacaagtgcctgctgggcggcctgggcctgggcgaggaggtgatcgcctacctgagagaccccaactgcagcagcatcctgcagaccgaggagagaaactgggtgagcgtgaccagccccgtgcaggccagcgcctgcagaaacatcctggagagaaaccagacccacgccatctacaagaacaccctgagcctggtgaacgacttcatcatcagagacaccatcctgaacatcaacttccagtgcgcctaccccctggacatgaaggtgagcctgcaggccgccctgcagcccatcgtgagcagcctgaacgtgagcgtggacggcaacggcgagttcatcgtgagaatggccctgttccaggaccagaactacaccaacccctacgagggcgacgccgtggagctgagcgtggagagcgtgctgtacgtgggcgccatcctggagcagggcgacaccagcagattcaacctggtgctgagaaactgctacgccacccccaccgaggacaaggccgacctggtgaagtacttcatcatcagaaacagctgcagcaaccagagagacagcaccatccacgtggaggagaacggccagagcagcgagagcagattcagcgtgcagatgttcatgttcgccggccactacgacctggtgttcctgcactgcgagatccacctgtgcgacagcctgaacgagcagtgccagcccagctgcagcagaagccaggtgagaagcgaggtgcccgccatcgacctggccagagtgctggacctgggccccatcaccagaagaggcgcccagagccccggcgtgatgaacggcacccccagcaccgccggcttcctggtggcctggcccatggtgctgctgaccgtgctgctggcctggctgttctag

SEQ ID NO: 83438 - DNA, 1173 bp, synthetic construct
  misc_feature 1..1173: note = Description of Artificial Sequence: Synthetic coding sequence
  source 1..1173: mol_type = other DNA
atgccccacctgatggagagaatggtgggcagcggcctgctgtggctggccctggtgagctgcatcctgacccaggccagcgccgtgcagagagtgcccagagaccccagcaccgtggaggacaagtgcgagaaggcctgcagacccgaggaggagtgcctggccctgaacagcacctggggctgcttctgcagacaggacctgaacagcagcgacgtgcacagcctgcagccccagctggactgcggccccagagagatcaaggtgaaggtggacaagtgcctgctgggcggcctgggcctgggcgaggaggtgatcgcctacctgagagaccccaactgcagcagcatcctgcagaccgaggagagaaactgggtgagcgtgaccagccccgtgcaggccagcgcctgcagaaacatcctggagagaaaccagacccacgccatctacaagaacaccctgagcctggtgaacgacttcatcatcagagacaccatcctgaacatcaacttccagtgcgcctaccccctggacatgaaggtgagcctgcaggccgccctgcagcccatcgtgagcagcctgaacgtgagcgtggacggcaacggcgagttcatcgtgagaatggccctgttccaggaccagaactacaccaacccctacgagggcgacgccgtggagctgagcgtggagagcgtgctgtacgtgggcgccatcctggagcagggcgacaccagcagattcaacctggtgctgagaaactgctacgccacccccaccgaggacaaggccgacctggtgaagtacttcatcatcagaaacagctgcagcaaccagagagacagcaccatccacgtggaggagaacggccagagcagcgagagcagattcagcgtgcagatgttcatgttcgccggccactacgacctggtgttcctgcactgcgagatccacctgtgcgacagcctgaacgagcagtgccagcccagctgcagcagaagccaggtgagaagcgaggtgcccgccatcgacctggccagagtgctggacctgggccccatcaccagaagaggcgcccagagccccggcgtgatgaacggcacccccagcaccgccggcttcctggtggcctggcccatggtgctgctgaccgtgctgctggcctggctgttctag

SEQ ID NO: 83439 - DNA, 1614 bp, synthetic construct
  misc_feature 1..1614: note = Description of Artificial Sequence: Synthetic coding sequence
  source 1..1614: mol_type = other DNA
atgccccacctgatggagagaatggtgggcagcggcctgctgtggctggccctggtgagctgcatcctgacccaggccagcgccgtgcagagaggctacggcaaccccatcgaggccagcagctacggcctggacctggactgcggcgcccccggcacccccgaggcccacgtgtgcttcgacccctgccagaactacaccctgctggacgagcccttcagaagcaccgagaacagcgccggcagccagggctgcgacaagaacatgagcggctggtacagattcgtgggcgagggcggcgtgagaatgagcgagacctgcgtgcaggtgcacagatgccagaccgacgcccccatgtggctgaacggcacccaccccgccctgggcgacggcatcaccaaccacaccgcctgcgcccactggagcggcaactgctgcttctggaagaccgaggtgctggtgaaggcctgccccggcggctaccacgtgtacagactggagggcaccccctggtgcaacctgagatactgcaccgtgcccagagaccccagcaccgtggaggacaagtgcgagaaggcctgcagacccgaggaggagtgcctggccctgaacagcacctggggctgcttctgcagacaggacctgaacagcagcgacgtgcacagcctgcagccccagctggactgcggccccagagagatcaaggtgaaggtggacaagtgcctgctgggcggcctgggcctgggcgaggaggtgatcgcctacctgagagaccccaactgcagcagcatcctgcagaccgaggagagaaactgggtgagcgtgaccagccccgtgcaggccagcgcctgcagaaacatcctggagagaaaccagacccacgccatctacaagaacaccctgagcctggtgaacgacttcatcatcagagacaccatcctgaacatcaacttccagtgcgcctaccccctggacatgaaggtgagcctgcaggccgccctgcagcccatcgtgagcagcctgaacgtgagcgtggacggcaacggcgagttcatcgtgagaatggccctgttccaggaccagaactacaccaacccctacgagggcgacgccgtggagctgagcgtggagagcgtgctgtacgtgggcgccatcctggagcagggcgacaccagcagattcaacctggtgctgagaaactgctacgccacccccaccgaggacaaggccgacctggtgaagtacttcatcatcagaaacagctgcagcaaccagagagacagcaccatccacgtggaggagaacggccagagcagcgagagcagattcagcgtgcagatgttcatgttcgccggccactacgacctggtgttcctgcactgcgagatccacctgtgcgacagcctgaacgagcagtgccagcccagctgcagcagaagccaggtgagaagcgaggtgcccgccatcgacctggccagagtgctggacctgggccccatcaccagaagaggcgcccagagccccggcgtgatgaacggcacccccagcaccgccggcttcctggtggcctggcccatggtgctgctgaccgtgctgctggcctggctgttctag

SEQ ID NO: 83440 - DNA, 1548 bp, synthetic construct
  misc_feature 1..1548: note = Description of Artificial Sequence: Synthetic coding sequence
  source 1..1548: mol_type = other DNA
atgaagatcaagtgcgagaagagcagaacccagagcagcgcccagcacgtgcagcacagcgcccacagcaccatcgtgtgcagaaagcacagccacaacgccgagaccgccggcagagtggacatcgtgagaggcggccccttcttccaccaccccctgagaaagtggctgatcagcccccccctgaacaagcccagcgtgtggcccagaacccccatcatccccgtgcaccagctgagaagagacacctgggtgggcaactgcaacaagaagaccgcccacagcagactgcacagccacggctggcccgaggaggagagattcgtgttcagcagcgagctgcacggcaagagcgcctacagcaaggtgacctgcatgccccacctgatggagagaatggtgggcagcggcctgctgtggctggccctggtgagctgcatcctgacccaggccagcgccgtgcagagagaccacctggaccccagcaccgtggaggacaagtgcgagaaggcctgcagacccgaggaggagtgcctggccctgaacagcacctggggctgcttctgcagacaggacctgaacagcagcgacgtgcacagcctgcagccccagctggactgcggccccagagagatcaaggtgaaggtggacaagtgcctgctgggcggcctgggcctgggcgaggaggtgatcgcctacctgagagaccccaactgcagcagcatcctgcagaccgaggagagaaactgggtgagcgtgaccagccccgtgcaggccagcgcctgcagaaacatcctggagagaaaccagacccacgccatctacaagaacaccctgagcctggtgaacgacttcatcatcagagacaccatcctgaacatcaacttccagtgcgcctaccccctggacatgaaggtgagcctgcaggccgccctgcagcccatcgtgagcagcctgaacgtgagcgtggacggcaacggcgagttcatcgtgagaatggccctgttccaggaccagaactacaccaacccctacgagggcgacgccgtggagctgagcgtggagagcgtgctgtacgtgggcgccatcctggagcagggcgacaccagcagattcaacctggtgctgagaaactgctacgccacccccaccgaggacaaggccgacctggtgaagtacttcatcatcagaaacagctgcagcaaccagagagacagcaccatccacgtggaggagaacggccagagcagcgagagcagattcagcgtgcagatgttcatgttcgccggccactacgacctggtgttcctgcactgcgagatccacctgtgcgacagcctgaacgagcagtgccagcccagctgcagcagaagccaggtgagaagcgaggtgcccgccatcgacctggccagagtgctggacctgggccccatcaccagaagaggcgcccagagccccggcgtgatgaacggcacccccagcaccgccggcttcctggtggcctggcccatggtgctgctgaccgtgctgctggcctggctgttctag

SEQ ID NO: 83441 - DNA, 1959 bp, synthetic construct
  misc_feature 1..1959: note = Description of Artificial Sequence: Synthetic coding sequence
  source 1..1959: mol_type = other DNA
atgcccctgctgctgctgctgctgctgctgcccagccccctgcacccccaccccatctgcgaggtgagcaaggtggccagccacctggaggtgaactgcgacaagagaaacctgaccgccctgccccccgacctgcccaaggacaccaccatcctgcacctgagcgagaacctgctgtacaccttcagcctggccaccctgatgccctacaccagactgacccagctgaacctggacagatgcgagctgaccaagctgcaggtggacggcaccctgcccgtgctgggcaccctggacctgagccacaaccagctgcagagcctgcccctgctgggccagaccctgcccgccctgaccgtgctggacgtgagcttcaacagactgaccagcctgcccctgggcgccctgagaggcctgggcgagctgcaggagctgtacctgaagggcaacgagctgaagaccctgccccccggcctgctgacccccacccccaagctggagaagctgagcctggccaacaacaacctgaccgagctgcccgccggcctgctgaacggcctggagaacctggacaccctgctgctgcaggagaacagcctgtacaccatccccaagggcttcttcggcagccacctgctgcccttcgccttcctgcacggcaacccctggctgtgcaactgcgagatcctgtacttcagaagatggctgcaggacaacgccgagaacgtgtacgtgtggaagcagggcgtggacgtgaaggccatgaccagcaacgtggccagcgtgcagtgcgacaacagcgacaagttccccgtgtacaagtaccccggcaagggctgccccaccctgggcgacgagggcgacaccgacctgtacgactactaccccgaggaggacaccgagggcgacaaggtgagagccaccagaaccgtggtgaagttccccaccaaggcccacaccaccccctggggcctgttctacagctggagcaccgccagcctggacagccagatgcccagcagcctgcaccccacccaggagagcaccaaggagcagaccaccttcccccccagatggacccccaacttcaccctgcacatggagagcatcaccttcagcaagacccccaagagcaccaccgagcccacccccagccccaccaccagcgagcccgtgcccgagcccgcccccaacatgaccaccctggagcccacccccagccccaccacccccgagcccaccagcgagcccgcccccagccccaccacccccgagcccaccagcgagcccgcccccagccccaccacccccgagcccaccagcgagcccgcccccagccccaccacccccgagcccacccccatccccaccatcgccaccagccccaccatcctggtgagcgccaccagcctgatcacccccaagagcaccttcctgaccaccaccaagcccgtgagcctgctggagagcaccaagaagaccatccccgagctggaccagccccccaagctgagaggcgtgctgcagggccacctggagagcagcagaaacgaccccttcctgcaccccgacttctgctgcctgctgcccctgggcttctacgtgctgggcctgttctggctgctgttcgccagcgtggtgctgatcctgctgctgagctgggtgggccacgtgaagccccaggccctggacagcggccagggcgccgccctgaccaccgccacccagaccacccacctggagctgcagagaggcagacaggtgaccgtgcccagagcctggctgctgttcctgagaggcagcctgcccaccttcagaagcagcctgttcctgtgggtgagacccaacggcagagtgggccccctggtggccggcagaagacccagcgccctgagccagggcagaggccaggacctgctgagcaccgtgagcatcagatacagcggccacagcctgtag

SEQ ID NO: 83442 - DNA, 1881 bp, synthetic construct
  misc_feature 1..1881: note = Description of Artificial Sequence: Synthetic coding sequence
  source 1..1881: mol_type = other DNA
atgcccctgctgctgctgctgctgctgctgcccagccccctgcacccccaccccatctgcgaggtgagcaaggtggccagccacctggaggtgaactgcgacaagagaaacctgaccgccctgccccccgacctgcccaaggacaccaccatcctgcacctgagcgagaacctgctgtacaccttcagcctggccaccctgatgccctacaccagactgacccagctgaacctggacagatgcgagctgaccaagctgcaggtggacggcaccctgcccgtgctgggcaccctggacctgagccacaaccagctgcagagcctgcccctgctgggccagaccctgcccgccctgaccgtgctggacgtgagcttcaacagactgaccagcctgcccctgggcgccctgagaggcctgggcgagctgcaggagctgtacctgaagggcaacgagctgaagaccctgccccccggcctgctgacccccacccccaagctggagaagctgagcctggccaacaacaacctgaccgagctgcccgccggcctgctgaacggcctggagaacctggacaccctgctgctgcaggagaacagcctgtacaccatccccaagggcttcttcggcagccacctgctgcccttcgccttcctgcacggcaacccctggctgtgcaactgcgagatcctgtacttcagaagatggctgcaggacaacgccgagaacgtgtacgtgtggaagcagggcgtggacgtgaaggccatgaccagcaacgtggccagcgtgcagtgcgacaacagcgacaagttccccgtgtacaagtaccccggcaagggctgccccaccctgggcgacgagggcgacaccgacctgtacgactactaccccgaggaggacaccgagggcgacaaggtgagagccaccagaaccgtggtgaagttccccaccaaggcccacaccaccccctggggcctgttctacagctggagcaccgccagcctggacagccagatgcccagcagcctgcaccccacccaggagagcaccaaggagcagaccaccttcccccccagatggacccccaacttcaccctgcacatggagagcatcaccttcagcaagacccccaagagcaccaccgagcccacccccagccccaccaccagcgagcccgtgcccgagcccgcccccaacatgaccaccctggagcccacccccagccccaccacccccgagcccaccagcgagcccgcccccagccccaccacccccgagcccacccccatccccaccatcgccaccagccccaccatcctggtgagcgccaccagcctgatcacccccaagagcaccttcctgaccaccaccaagcccgtgagcctgctggagagcaccaagaagaccatccccgagctggaccagccccccaagctgagaggcgtgctgcagggccacctggagagcagcagaaacgaccccttcctgcaccccgacttctgctgcctgctgcccctgggcttctacgtgctgggcctgttctggctgctgttcgccagcgtggtgctgatcctgctgctgagctgggtgggccacgtgaagccccaggccctggacagcggccagggcgccgccctgaccaccgccacccagaccacccacctggagctgcagagaggcagacaggtgaccgtgcccagagcctggctgctgttcctgagaggcagcctgcccaccttcagaagcagcctgttcctgtgggtgagacccaacggcagagtgggccccctggtggccggcagaagacccagcgccctgagccagggcagaggccaggacctgctgagcaccgtgagcatcagatacagcggccacagcctgtag

SEQ ID NO: 83443 - DNA, 621 bp, synthetic construct
  misc_feature 1..621: note = Description of Artificial Sequence: Synthetic coding sequence
  source 1..621: mol_type = other DNA
atgggcagcggccccagaggcgccctgagcctgctgctgctgctgctggccccccccagcagacccgccgccggctgccccgccccctgcagctgcgccggcaccctggtggactgcggcagaagaggcctgacctgggccagcctgcccaccgccttccccgtggacaccaccgagctggtgctgaccggcaacaacctgaccgccctgccccccggcctgctggacgccctgcccgccctgagaaccgcccacctgggcgccaacccctggagatgcgactgcagactggtgcccctgagagcctggctggccggcagacccgagagagccccctacagagacctgagatgcgtggccccccccgccctgagaggcagactgctgccctacctggccgaggacgagctgagagccgcctgcgcccccggccccctgtgctggggcgccctggccgcccagctggccctgctgggcctgggcctgctgcacgccctgctgctggtgctgctgctgtgcagactgagaagactgagagccagagccagagccagagccgccgccagactgagcctgaccgaccccctggtggccgagagagccggcaccgacgagagctag

SEQ ID NO: 83444 - DNA, 1230 bp, synthetic construct
  misc_feature 1..1230: note = Description of Artificial Sequence: Synthetic coding sequence
  source 1..1230: mol_type = other DNA
atgatccccagcagacacaccatgctgagattcctgcccgtgaacgccgccagctgccccggcgacagaagaaccatgctggtgaacgtggccgccggcgtgagagtgctgagagtgcccctgagagccggcggcagcggcagcctgagcggcctgagaccccccgccatcgtgtgctacctgcccctgcagagagccagcgccagcggcctgttcctggccagaccccagcactgcggcagatgcggcagaggcagaggcggcgccgccctgagcctgggcagccccgcctacgccagcagatgcagagtgagcagagccgccgtgttcagcccctgggcccccgtgagcctggagagcggcagagcccccggctgcagcctgggcagacccggcctgagaggcgccctggtggtgtggctgcagctgggcgagacctgggtgagactgagaggcgacttccagcccgcctgcggcgtggtgagagtggagagactggccggctacagagacgccggccaccagggcctggacggcgccggccccgccgtgtgggtgctgagagacgtggcccaggtgcccgccgacagaagcgcctactgcggcgccagcctggccggccccagaggcgccctgagcctgctgctgctgctgctggccccccccagcagacccgccgccggctgccccgccccctgcagctgcgccggcaccctggtggactgcggcagaagaggcctgacctgggccagcctgcccaccgccttccccgtggacaccaccgagctggtgctgaccggcaacaacctgaccgccctgccccccggcctgctggacgccctgcccgccctgagaaccgcccacctgggcgccaacccctggagatgcgactgcagactggtgcccctgagagcctggctggccggcagacccgagagagccccctacagagacctgagatgcgtggccccccccgccctgagaggcagactgctgccctacctggccgaggacgagctgagagccgcctgcgcccccggccccctgtgctggggcgccctggccgcccagctggccctgctgggcctgggcctgctgcacgccctgctgctggtgctgctgctgtgcagactgagaagactgagagccagagccagagccagagccgccgccagactgagcctgaccgaccccctggtggccgagagagccggcaccgacgagagctag

SEQ ID NO: 83445 - DNA, 534 bp, synthetic construct
  misc_feature 1..534: note = Description of Artificial Sequence: Synthetic coding sequence
  source 1..534: mol_type = other DNA
atgcccgcctggggcgccctgttcctgctgtgggccaccgccgaggccaccaaggactgccccagcccctgcacctgcagagccctggagaccatgggcctgtgggtggactgcagaggccacggcctgaccgccctgcccgccctgcccgccagaaccagacacctgctgctggccaacaacagcctgcagagcgtgccccccggcgccttcgaccacctgccccagctgcagaccctggacgtgacccagaacccctggcactgcgactgcagcctgacctacctgagactgtggctggaggacagaacccccgaggccctgctgcaggtgagatgcgccagccccagcctggccgcccacggccccctgggcagactgaccggctaccagctgggcagctgcggctggcagctgcaggccagctgggtgagacccggcgtgctgtgggacgtggccctggtggccgtggccgccctgggcctggccctgctggccggcctgctgtgcgccaccaccgaggccctggactag

SEQ ID NO: 83446 - DNA, 987 bp, synthetic construct
  misc_feature 1..987: note = Description of Artificial Sequence: Synthetic coding sequence
  source 1..987: mol_type = other DNA
atgaagcccgccatggagaccgccgccgaggagaacaccgagcagagccaggagagaaaggtgaacagcagagccgagatggagatcggcagataccactggatgtaccccggcagcaagaaccaccagtaccaccccgtgcccaccctgggcgacagagccagccccctgagcagccccggctgcttcgagtgctgcatcaagtgcctgggcggcgtgccctacgccagcctggtggccaccatcctgtgcttcagcggcgtggccctgttctgcggctgcggccacgtggccctggccggcaccgtggccatcctggagcagcacttcagcaccaacgccagcgaccacgccctgctgagcgaggtgatccagctgatgcagtacgtgatctacggcatcgccagcttcttcttcctgtacggcatcatcctgctggccgagggcttctacaccaccagcgccgtgaaggagctgcacggcgagttcaagaccaccgcctgcggcagatgcatcagcggcatgttcgtgttcctgacctacgtgctgggcgtggcctggctgggcgtgttcggcttcagcgccgtgcccgtgttcatgttctacaacatctggagcacctgcgaggtgatcaagagcccccagaccaacggcaccaccggcgtggagcagatctgcgtggacatcagacagtacggcatcatcccctggaacgccttccccggcaagatctgcggcagcgccctggagaacatctgcaacaccaacgagttctacatgagctaccacctgttcatcgtggcctgcgccggcgccggcgccaccgtgatcgccctgatccacttcctgatgatcctgagcagcaactgggcctacctgaaggacgccagcaagatgcaggcctaccaggacatcaaggccaaggaggagcaggagctgcaggacatccagagcagaagcaaggagcagctgaacagctacacctag

SEQ ID NO: 83447 - DNA, 918 bp, synthetic construct
  misc_feature 1..918: note = Description of Artificial Sequence: Synthetic coding sequence
  source 1..918: mol_type = other DNA
atgaagcccgccatggagaccgccgccgaggagaacaccgagcagagccaggagagaaaggtgaacagcagagccgagatggagatcggcagataccactggatgtaccccggcagcaagaaccaccagtaccaccccgtgcccaccctgggcgacagagccagccccctgagcagccccggctgcttcgagtgctgcatcaagtgcctgggcggcgtgccctacgccagcctggtggccaccatcctgtgcttcagcggcgtggccctgttctgcggctgcggccacgtggccctggccggcaccgtggccatcctggagcagcacttcagcaccaacgccagcgaccacgccctgctgagcgaggtgatccagctgatgcagtacgtgatctacggcatcgccagcttcttcttcctgtacggcatcatcctgctggccgagggcttctacaccaccagcgccgtgaaggagctgcacggcgagttcaagaccaccgcctgcggcagatgcatcagcggcatgttcgtgttcctgacctacgtgctgggcgtggcctggctgggcgtgttcggcttcagcgccgtgcccgtgttcatgttctacaacatctggagcacctgcgaggtgatcaagagcccccagaccaacggcaccaccggcgtggagcagatctgcgtggacatcagacagtacggcatcatcccctggaacgccttccccggcaagatctgcggcagcgccctggagaacatctgcaacaccaacgagttctacatgagctaccacctgttcatcgtggcctgcgccggcgccggcgccaccgtgatcgccctgctgatctacatgatggccaccacctacaactacgccgtgctgaagttcaagagcagagaggactgctgcaccaagttctag

SEQ ID NO: 83448 - DNA, 798 bp, synthetic construct
  misc_feature 1..798: note = Description of Artificial Sequence: Synthetic coding sequence
  source 1..798: mol_type = other DNA
atgaagcccgccatggagaccgccgccgaggagaacaccgagcagagccaggagagaaagggctgcttcgagtgctgcatcaagtgcctgggcggcgtgccctacgccagcctggtggccaccatcctgtgcttcagcggcgtggccctgttctgcggctgcggccacgtggccctggccggcaccgtggccatcctggagcagcacttcagcaccaacgccagcgaccacgccctgctgagcgaggtgatccagctgatgcagtacgtgatctacggcatcgccagcttcttcttcctgtacggcatcatcctgctggccgagggcttctacaccaccagcgccgtgaaggagctgcacggcgagttcaagaccaccgcctgcggcagatgcatcagcggcatgttcgtgttcctgacctacgtgctgggcgtggcctggctgggcgtgttcggcttcagcgccgtgcccgtgttcatgttctacaacatctggagcacctgcgaggtgatcaagagcccccagaccaacggcaccaccggcgtggagcagatctgcgtggacatcagacagtacggcatcatcccctggaacgccttccccggcaagatctgcggcagcgccctggagaacatctgcaacaccaacgagttctacatgagctaccacctgttcatcgtggcctgcgccggcgccggcgccaccgtgatcgccctgctgatctacatgatggccaccacctacaactacgccgtgctgaagttcaagagcagagaggactgctgcaccaagttctag

SEQ ID NO: 83449 - DNA, 540 bp, synthetic construct
  misc_feature 1..540: note = Description of Artificial Sequence: Synthetic coding sequence
  source 1..540: mol_type = other DNA
atgcagtacgtgatctacggcatcgccagcttcttcttcctgtacggcatcatcctgctggccgagggcttctacaccaccagcgccgtgaaggagctgcacggcgagttcaagaccaccgcctgcggcagatgcatcagcggcatgttcgtgttcctgacctacgtgctgggcgtggcctggctgggcgtgttcggcttcagcgccgtgcccgtgttcatgttctacaacatctggagcacctgcgaggtgatcaagagcccccagaccaacggcaccaccggcgtggagcagatctgcgtggacatcagacagtacggcatcatcccctggaacgccttccccggcaagatctgcggcagcgccctggagaacatctgcaacaccaacgagttctacatgagctaccacctgttcatcgtggcctgcgccggcgccggcgccaccgtgatcgccctgctgatctacatgatggccaccacctacaactacgccgtgctgaagttcaagagcagagaggactgctgcaccaagttctag

SEQ ID NO: 83450 - DNA, 741 bp, synthetic construct
  misc_feature 1..741: note = Description of Artificial Sequence: Synthetic coding sequence
  source 1..741: mol_type = other DNA
atgggctgcttcgagtgctgcatcaagtgcctgggcggcgtgccctacgccagcctggtggccaccatcctgtgcttcagcggcgtggccctgttctgcggctgcggccacgtggccctggccggcaccgtggccatcctggagcagcacttcagcaccaacgccagcgaccacgccctgctgagcgaggtgatccagctgatgcagtacgtgatctacggcatcgccagcttcttcttcctgtacggcatcatcctgctggccgagggcttctacaccaccagcgccgtgaaggagctgcacggcgagttcaagaccaccgcctgcggcagatgcatcagcggcatgttcgtgttcctgacctacgtgctgggcgtggcctggctgggcgtgttcggcttcagcgccgtgcccgtgttcatgttctacaacatctggagcacctgcgaggtgatcaagagcccccagaccaacggcaccaccggcgtggagcagatctgcgtggacatcagacagtacggcatcatcccctggaacgccttccccggcaagatctgcggcagcgccctggagaacatctgcaacaccaacgagttctacatgagctaccacctgttcatcgtggcctgcgccggcgccggcgccaccgtgatcgccctgctgatctacatgatggccaccacctacaactacgccgtgctgaagttcaagagcagagaggactgctgcaccaagttctag

SEQ ID NO: 83451 - DNA, 324 bp, synthetic construct
  misc_feature 1..324: note = Description of Artificial Sequence: Synthetic coding sequence
  source 1..324: mol_type = other DNA
atgaagcccgccatggagaccgccgccgaggagaacaccgagcagagccaggagagaaagggctgcttcgagtgctgcatcaagtgcctgggcggcgtgccctacgccagcctggtggccaccatcctgtgcttcagcggcgtggccctgttctgcggctgcggccacgtggccctggccggcaccgtggccatcctggagcagcacttcagcaccaacgccagcgaccacgccctgctgagcgaggtgatccagctgatgcagtacgtgatctacggcatcgccagcttcttcttcctgtacggcatcatcctgctggcctag

SEQ ID NO: 83452 - DNA, 909 bp, synthetic construct
  misc_feature 1..909: note = Description of Artificial Sequence: Synthetic coding sequence
  source 1..909: mol_type = other DNA
atggagatcggcagataccactggatgtaccccggcagcaagaaccaccagtaccaccccgtgcccaccctgggcgacagagccagccccctgagcagccccggctgcttcgagtgctgcatcaagtgcctgggcggcgtgccctacgccagcctggtggccaccatcctgtgcttcagcggcgtggccctgttctgcggctgcggccacgtggccctggccggcaccgtggccatcctggagcagcacttcagcaccaacgccagcgaccacgccctgctgagcgaggtgatccagctgatgcagtacgtgatctacggcatcgccagcttcttcttcctgtacggcatcatcctgctggccgagggcttctacaccaccagcgccgtgaaggagctgcacggcgagttcaagaccaccgcctgcggcagatgcatcagcggcatgttcgtgttcctgacctacgtgctgggcgtggcctggctgggcgtgttcggcttcagcgccgtgcccgtgttcatgttctacaacatctggagcacctgcgaggtgatcaagagcccccagaccaacggcaccaccggcgtggagcagatctgcgtggacatcagacagtacggcatcatcccctggaacgccttccccggcaagatctgcggcagcgccctggagaacatctgcaacaccaacgagttctacatgagctaccacctgttcatcgtggcctgcgccggcgccggcgccaccgtgatcgccctgatccacttcctgatgatcctgagcagcaactgggcctacctgaaggacgccagcaagatgcaggcctaccaggacatcaaggccaaggaggagcaggagctgcaggacatccagagcagaagcaaggagcagctgaacagctacacctag

SEQ ID NO: 83453 - DNA, 1863 bp, synthetic construct
  misc_feature 1..1863: note = Description of Artificial Sequence: Synthetic coding sequence
  source 1..1863: mol_type = other DNA
atgagccccagccccaccgccctgttctgcctgggcctgtgcctgggcagagtgcccgcccagagcggccccctgcccaagcccagcctgcaggccctgcccagcagcctggtgcccctggagaagcccgtgaccctgagatgccagggcccccccggcgtggacctgtacagactggagaagctgagcagcagcagataccaggaccaggccgtgctgttcatccccgccatgaagagaagcctggccggcagatacagatgcagctaccagaacggcagcctgtggagcctgcccagcgaccagctggagctggtggccaccggcgtgttcgccaagcccagcctgagcgcccagcccggccccgccgtgagcagcggcggcgacgtgaccctgcagtgccagaccagatacggcttcgaccagttcgccctgtacaaggagggcgaccccgccccctacaagaaccccgagagatggtacagagccagcttccccatcatcaccgtgaccgccgcccacagcggcacctacagatgctacagcttcagcagcagagacccctacctgtggagcgcccccagcgaccccctggagctggtggtgaccggcaccagcgtgacccccagcagactgcccaccgagccccccagccccgtggccgagttcagcgaggccaccgccgagctgaccgtgagcttcaccaacgaggtgttcaccaccgagaccagcagaagcatcaccgccagccccaaggagagcgacagccccgccggcgagagctgcccccccgtgctgcaccagggccagcccggccccgacatgcccagaggctgcgaccccaacaaccccggcggcgtgagcggcagaggcctggcccagcccgaggaggcccccgccgcccagggccagggctgcgccgaggccgccagcgccccccccgccccccccgccgaccccgagatcaagagaggcagcggctggagacccaccggctgcagccagcccagagtgatgttcatgaccgccgagccccaggccagaagctaccccagagagggcagctggcacggcagaagactgaaggactggagagtgtggagcgtggaggccggcggccagagactgcagctgtggaagagaggccacgccgccagcagctggtgcagcatcagagagcccttcggccagtgcctgagcgtgtgcctgcccctgtgcctgagagcccccagcatctgggacggcagaaacctgtggagaccccacccccccccctgcaccctgtggatgacctggtaccccggctggaccacctactggcccctgagcagcaccagcctgatctgggcccccgacggcagcctgagattccccgccctgagagtggacagcgtgcccagcagcgtgcagaacccccccgtgctgcccttcggccccctgtgcagctgcctggtgttccccagaaacagccacccccacagcatcagccactgcggcctgaccaacctgctgagcagcctgagaaccggcctggccggcagcctgggcatgagcttcatcttcctgagcgtgaagctggccagatgccccctgcccttcaccctggagaacaagatcagcctgtgcaacatggtgaagccccacctgtaccagcagaacaagaagacccagaagctggccagatgcggcggcgccagcctgtacagccagcagctgagaggcctgagatgggagaacggcctgagcctgggcggcagaggctgcagcgagctgagaagccaccactgcaccctggccagagtgaccaagcccgacttcgtgagcaagaacaccggcatgaacatgagcatcaccctgatctag

SEQ ID NO: 83454 - DNA, 966 bp, synthetic construct
  misc_feature 1..966: note = Description of Artificial Sequence: Synthetic coding sequence
  source 1..966: mol_type = other DNA
atgagccccagccccaccgccctgttctgcctgggcctgtgcctgggcagagtgcccgcccagagcggccccctgcccaagcccagcctgcaggccctgcccagcagcctggtgcccctggagaagcccgtgaccctgagatgccagggcccccccggcgtggacctgtacagactggagaagctgagcagcagcagataccaggaccaggccgtgctgttcatccccgccatgaagagaagcctggccggcagatacagatgcagctaccagaacggcagcctgtggagcctgcccagcgaccagctggagctggtggccaccggcgtgttcgccaagcccagcctgagcgcccagcccggccccgccgtgagcagcggcggcgacgtgaccctgcagtgccagaccagatacggcttcgaccagttcgccctgtacaaggagggcgaccccgccccctacaagaaccccgagagatggtacagagccagcttccccatcatcaccgtgaccgccgcccacagcggcacctacagatgctacagcttcagcagcagagacccctacctgtggagcgcccccagcgaccccctggagctggtggtgaccgagttcagcgaggccaccgccgagctgaccgtgagcttcaccaacgaggtgttcaccaccgagaccagcagaagcatcaccgccagccccaaggagagcgacagccccgccggccccgccagacagtactacaccaagggcaacctggtgagaatctgcctgggcgccgtgatcctgatcatcctggccggcttcctggccgaggactggcacagcagaagaaagagactgagacacagaggcagagccgtgcagagacccctgccccccctgccccccctgcccctgaccagaaagagcaacggcggccaggacggcggcagacaggacgtgcacagcagaggcctgtgcagctag

SEQ ID NO: 83455 - DNA, 1020 bp, synthetic construct
  misc_feature 1..1020: note = Description of Artificial Sequence: Synthetic coding sequence
  source 1..1020: mol_type = other DNA
atgagccccagccccaccgccctgttctgcctgggcctgtgcctgggcagagtgcccgcccagagcggccccctgcccaagcccagcctgcaggccctgcccagcagcctggtgcccctggagaagcccgtgaccctgagatgccagggcccccccggcgtggacctgtacagactggagaagctgagcagcagcagataccaggaccaggccgtgctgttcatccccgccatgaagagaagcctggccggcagatacagatgcagctaccagaacggcagcctgtggagcctgcccagcgaccagctggagctggtggccaccggcgtgttcgccaagcccagcctgagcgcccagcccggccccgccgtgagcagcggcggcgacgtgaccctgcagtgccagaccagatacggcttcgaccagttcgccctgtacaaggagggcgaccccgccccctacaagaaccccgagagatggtacagagccagcttccccatcatcaccgtgaccgccgcccacagcggcacctacagatgctacagcttcagcagcagagacccctacctgtggagcgcccccagcgaccccctggagctggtggtgaccggcaccagcgtgacccccagcagactgcccaccgagccccccagccccgtggccgagttcagcgaggccaccgccgagctgaccgtgagcttcaccaacgaggtgttcaccaccgagaccagcagaagcatcaccgccagccccaaggagagcgacagccccgccggccccgccagacagtactacaccaagggcaacctggtgagaatctgcctgggcgccgtgatcctgatcatcctggccggcttcctggccgaggactggcacagcagaagaaagagactgagacacagaggcagagccgtgcagagacccctgccccccctgccccccctgcccctgaccagaaagagcaacggcggccaggacggcggcagacaggacgtgcacagcagaggcctgtgcagctag

SEQ ID NO: 83456 - DNA, 1866 bp, synthetic construct
  misc_feature 1..1866: note = Description of Artificial Sequence: Synthetic coding sequence
  source 1..1866: mol_type = other DNA
atgggcctgctgagcgaccccgtgagaagaagagccctggccagactggtgctgagactgaacgcccccctgtgcgtgctgagctacgtggccggcatcgcctggttcctggccctggtgttcccccccctgacccagagaacctacatgagcgagaacgccatgggcagcaccatggtggaggagcagttcgccggcggcgacagagccagagccttcgccagagacttcgccgcccacagaaagaagagcggcgccctgcccgtggcctggctggagagaaccatgagaagcgtgggcctggaggtgtacacccagagcttcagcagaaagctgcccttccccgacgagacccacgagagatacatggtgagcggcaccaacgtgtacggcatcctgagagcccccagagccgccagcaccgagagcctggtgctgaccgtgccctgcggcagcgacagcaccaacagccaggccgtgggcctgctgctggccctggccgcccacttcagaggccagatctactgggccaaggacatcgtgttcctggtgaccgagcacgacctgctgggcaccgaggcctggctggaggcctaccacgacgtgaacgtgaccggcatgcagagcagccccctgcagggcagagccggcgccatccaggccgccgtggccctggagctgagcagcgacgtggtgaccagcctggacgtggccgtggagggcctgaacggccagctgcccaacctggacctgctgaacctgttccagaccttctgccagaagggcggcctgctgtgcaccctgcagggcaagctgcagcccgaggactggaccagcctggacggccccctgcagggcctgcagaccctgctgctgatggtgctgagacaggccagcggcagaccccacggcagccacggcctgttcctgagatacagagtggaggccctgaccctgagaggcatcaacagcttcagacagtacaagtacgacctggtggccgtgggcaaggccctggagggcatgttcagaaagctgaaccacctgctggagagactgcaccagagcttcttcctgtacctgctgcccggcctgagcagattcgtgagcatcggcctgtacatgcccgccgtgggcttcctgctgctggtgctgggcctgaaggccctggagctgtggatgcagctgcacgaggccggcatgggcctggaggagcccggcggcgcccccggccccagcgtgcccctgccccccagccagggcgtgggcctggccagcctggtggcccccctgctgatcagccaggccatgggcctggccctgtacgtgctgcccgtgctgggccagcacgtggccacccagcacttccccgtggccgaggccgaggccgtggtgctgaccctgctggccatctacgccgccggcctggccctgccccacaacacccacagagtggtgagcacccaggcccccgacagaggctggatggccctgaagctggtggccctgatctacctggccctgcagctgggctgcatcgccctgaccaacttcagcctgggcttcctgctggccaccaccatggtgcccaccgccgccctggccaagccccacggccccagaaccctgtacgccgccctgctggtgctgaccagccccgccgccaccctgctgggcagcctgttcctgtggagagagctgcaggaggcccccctgagcctggccgagggctggcagctgttcctggccgccctggcccagggcgtgctggagcaccacacctacggcgccctgctgttccccctgctgagcctgggcctgtacccctgctggctgctgttctggaacgtgctgttctggaagtag

SEQ ID NO: 83457 - DNA, 1686 bp, synthetic construct
  misc_feature 1..1686: note = Description of Artificial Sequence: Synthetic coding sequence
  source 1..1686: mol_type = other DNA
atgggcctgctgagcgaccccgtgagaagaagagccctggccagactggtgctgagactgaacgcccccctgtgggccctgcccgtggcctggctggagagaaccatgagaagcgtgggcctggaggtgtacacccagagcttcagcagaaagctgcccttccccgacgagacccacgagagatacatggtgagcggcaccaacgtgtacggcatcctgagagcccccagagccgccagcaccgagagcctggtgctgaccgtgccctgcggcagcgacagcaccaacagccaggccgtgggcctgctgctggccctggccgcccacttcagaggccagatctactgggccaaggacatcgtgttcctggtgaccgagcacgacctgctgggcaccgaggcctggctggaggcctaccacgacgtgaacgtgaccggcatgcagagcagccccctgcagggcagagccggcgccatccaggccgccgtggccctggagctgagcagcgacgtggtgaccagcctggacgtggccgtggagggcctgaacggccagctgcccaacctggacctgctgaacctgttccagaccttctgccagaagggcggcctgctgtgcaccctgcagggcaagctgcagcccgaggactggaccagcctggacggccccctgcagggcctgcagaccctgctgctgatggtgctgagacaggccagcggcagaccccacggcagccacggcctgttcctgagatacagagtggaggccctgaccctgagaggcatcaacagcttcagacagtacaagtacgacctggtggccgtgggcaaggccctggagggcatgttcagaaagctgaaccacctgctggagagactgcaccagagcttcttcctgtacctgctgcccggcctgagcagattcgtgagcatcggcctgtacatgcccgccgtgggcttcctgctgctggtgctgggcctgaaggccctggagctgtggatgcagctgcacgaggccggcatgggcctggaggagcccggcggcgcccccggccccagcgtgcccctgccccccagccagggcgtgggcctggccagcctggtggcccccctgctgatcagccaggccatgggcctggccctgtacgtgctgcccgtgctgggccagcacgtggccacccagcacttccccgtggccgaggccgaggccgtggtgctgaccctgctggccatctacgccgccggcctggccctgccccacaacacccacagagtggtgagcacccaggcccccgacagaggctggatggccctgaagctggtggccctgatctacctggccctgcagctgggctgcatcgccctgaccaacttcagcctgggcttcctgctggccaccaccatggtgcccaccgccgccctggccaagccccacggccccagaaccctgtacgccgccctgctggtgctgaccagccccgccgccaccctgctgggcagcctgttcctgtggagagagctgcaggaggcccccctgagcctggccgagggctggcagctgttcctggccgccctggcccagggcgtgctggagcaccacacctacggcgccctgctgttccccctgctgagcctgggcctgtacccctgctggctgctgttctggaacgtgctgttctggaagtag

SEQ ID NO: 83458 - DNA, 555 bp, synthetic construct
  misc_feature 1..555: note = Description of Artificial Sequence: Synthetic coding sequence
  source 1..555: mol_type = other DNA
atgaaggccctgggcgccgtgctgctggccctgctgctgtgcggcagacccggcagaggccagacccagcaggaggaggaggaggaggacgaggaccacggccccgacgactacgacgaggaggacgaggacgaggtggaggaggaggagaccaacagactgcccggcggcagaagcagagtgctgctgagatgctacacctgcaagagcctgcccagagacgagagatgcaacctgacccagaactgcagccacggccagacctgcaccaccctgatcgcccacggcaacaccgagagcggcctgctgaccacccacagcacctggtgcaccgacagctgccagcccatcaccaagaccgtggagggcacccaggtgaccatgacctgctgccagagcagcctgtgcaacgtgcccccctggcagagcagcagagtgcaggaccccaccggcaagggcgccggcggccccagaggcagcagcgagaccgtgggcgccgccctgctgctgaacctgctggccggcctgggcgccatgggcgccagaagaccctag

SEQ ID NO: 83459 - DNA, 582 bp, synthetic construct
  misc_feature 1..582: note = Description of Artificial Sequence: Synthetic coding sequence
  source 1..582: mol_type = other DNA
atgggcaagcagaacagcaagctgagacccgaggtgatgcaggacctgctggagagcaccgacttcaccgagcacgagatccaggagtggtacaagggcttcctgagagactgccccagcggccacctgagcatggaggagttcaagaagatctacggcaacttcttcccctacggcgacgccagcaagttcgccgagcacgtgttcagaaccttcgacgccaacggcgacggcaccatcgacttcagagagttcatcatcgccctgagcgtgaccagcagaggcaagctggagcagaagctgaagtgggccttcagcatgtacgacctggacggcaacggctacatcagcaaggccgagatgctggagatcgtgcaggccatctacaagatggtgagcagcgtgatgaagatgcccgaggacgagagcacccccgagaagagaaccgagaagatcttcagacagatggacaccaacagagacggcaagctgagcctggaggagttcatcagaggcgccaagagcgaccccagcatcgtgagactgctgcagtgcgaccccagcagcgccggccagttctag

SEQ ID NO: 83460 - DNA, 756 bp, synthetic construct
  misc_feature 1..756: note = Description of Artificial Sequence: Synthetic coding sequence
  source 1..756: mol_type = other DNA
atgagcgcctacggcatgcccatgtacaagagcggcgacctggtgttcgccaagctgaagggctacgcccactggcccgccagaatcgagcacatgacccagcccaacagataccaggtgttcttcttcggcacccacgagaccgccttcctgagccccaagagactgttcccctacaaggagtgcaaggagaagttcggcaagcccaacaagagaagaggcttcagcgccggcctgtgggagatcgagaacaaccccaccgtgcaggccagcgactgccccctggccagcgagaagggcagcggcgacggcccctggcccgagcccgaggccgccgagggcgacgaggacaagcccacccacgccggcggcggcggcgacgagctgggcaagcccgacgacgacaagcccaccgaggaggagaagggccccctgaagagaagcgccggcgacccccccgaggacgcccccaagagacccaaggaggccgcccccgaccaggaggaggaggccgaggccgagagagccgccgaggccgagagagccgccgccgccgccgccgccaccgccgtggacgaggagagccccttcctggtggccgtggagaacggcagcgcccccagcgagcccggcctggtgtgcgagcccccccagcccgaggaggaggagctgagagaggaggaggtggccgacgaggaggccagccaggagtggcacgccgaggcccccggcggcggcgacagagacagcctgtag

SEQ ID NO: 83461 - DNA, 531 bp, synthetic construct
  misc_feature 1..531: note = Description of Artificial Sequence: Synthetic coding sequence
  source 1..531: mol_type = other DNA
atgagcgccttcagactgtggcccggcctgctgatcatgctgggcagcctgtgccacagaggcagcccctgcggcctgagcacccacgtggagatcggccacagagccctggagttcctgcagctgcacaacggcagagtgaactacagagagctgctgctggagcaccaggacgcctaccaggccggcatcgtgttccccgactgcttctaccccagcatctgcaagggcggcaagttccacgacgtgagcgagagcacccactggacccccttcctgaacgccagcgtgcactacatcagagagaactaccccctgccctgggagaaggacaccgagaagctggtggccttcctgttcggcatcaccagccacatggccgccgacgtgagctggcacagcctgggcctggagcagggcttcctgagaaccatgggcgccatcgacttccacggcagctacagcgaggcccacagcgccggcgacttcggcaccgtgtacctgcacctgctgaacttcctggtggtgtag

SEQ ID NO: 83462 - DNA, 831 bp, synthetic construct
  misc_feature 1..831: note = Description of Artificial Sequence: Synthetic coding sequence
  source 1..831: mol_type = other DNA
atgaacagcaagagaatgctgctgctggtgctgttcgccttcagcctgatgctggtggagagatacttcagaaaccaccaggtggaggagctgagactgagcgactggttccaccccagaaagagacccgacgtgatcaccaagaccgactggctggcccccgtgctgtgggagggcaccttcgacagaagagtgctggagaagcactacagaagaagaaacatcaccgtgggcctggccgtgttcgccaccggcagattcgccgaggagtacctgagacccttcctgcacagcgccaacaagcacttcatgaccggctacagagtgatcttctacatcatggtggacgccttcttcaagctgcccgacatcgagcccagccccctgagaaccttcaaggccttcaaggtgggcaccgagagatggtggctggacggccccctggtgcacgtgaagagcctgggcgagcacatcgccagccacatccaggacgaggtggacttcctgttcagcatggccgccaaccaggtgttccagaacgagttcggcgtggagaccctgggccccctggtggcccagctgcacgcctggtggtacttcagaaacaccaagaacttcccctacgagagaagacccaccagcgccgcctgcatccccttcggccagggcgacttctactacggcaacctgatggtgggcggcaccccccacaacatcctggacttcatcaaggagtacctgaacggcgtgatccacgacatcaagaacggcctgaacagcacctacgagaagcacctgaacaagtacttctacctgaacaagcccacctag

SEQ ID NO: 83463 - DNA, 2166 bp, synthetic construct
  misc_feature 1..2166: note = Description of Artificial Sequence: Synthetic coding sequence
  source 1..2166: mol_type = other DNA
atgctgcccagaggcagacccagagccctgggcgccgccgccctgctgctgctgctgctgctgctgggcttcctgctgttcggcggcgacctgggctgcgagagaagagagcccggcggcagagccggcgcccccggctgcttccccggccccctgatgcccagagtgccccccgacggcagactgagaagagccgccgccctggacggcgaccccggcgccggccccggcgaccacaacagaagcgactgcggcccccagcccccccccccccccaagtgcgagctgctgcacgtggccatcgtgtgcgccggccacaacagcagcagagacgtgatcaccctggtgaagagcatgctgttctacagaaagaaccccctgcacctgcacctggtgaccgacgccgtggccagaaacatcctggagaccctgttccacacctggatggtgcccgccgtgagagtgagcttctaccacgccgaccagctgaagccccaggtgagctggatccccaacaagcactacagcggcctgtacggcctgatgaagctggtgctgcccagcgccctgcccgccgagctggccagagtgatcgtgctggacaccgacgtgaccttcgccagcgacatcagcgagctgtgggccctgttcgcccacttcagcgacacccaggccatcggcctggtggagaaccagagcgactggtacctgggcaacctgtggaagaaccacagaccctggcccgccctgggcagaggcttcaacaccggcgtgatcctgctgagactggacagactgagacaggccggctgggagcagatgtggagactgaccgccagaagagagctgctgagcctgcccgccaccagcctggccgaccaggacatcttcaacgccgtgatcaaggagcaccccggcctggtgcagagactgccctgcgtgtggaacgtgcagctgagcgaccacaccctggccgagagatgctacagcgaggccagcgacctgaaggtgatccactggaacagccccaagaagctgagagtgaagaacaagcacgtggagttcttcagaaacttctacctgaccttcctggagtacgacggcaacctgctgagaagagagctgttcgtgtgccccagccagcccccccccggcgccgagcagctgcagcaggccctggcccagctggacgaggaggacccctgcttcgagttcagacagcagcagctgaccgtgcacagagtgcacgtgaccttcctgccccacgagccccccccccccagaccccacgacgtgaccctggtggcccagctgagcatggacagactgcagatgctggaggccctgtgcagacactggcccggccccatgagcctggccctgtacctgaccgacgccgaggcccagcagttcctgcacttcgtggaggccagccccgtgctggccgccagacaggacgtggcctaccacgtggtgtacagagagggccccctgtaccccgtgaaccagctgagaaacgtggccctggcccaggccctgaccccctacgtgttcctgagcgacatcgacttcctgcccgcctacagcctgtacgactacctgagagccagcatcgagcagctgggcctgggcagcagaagaaaggccgccctggtggtgcccgccttcgagaccctgagatacagattcagcttcccccacagcaaggtggagctgctggccctgctggacgccggcaccctgtacaccttcagataccacgagtggcccagaggccacgcccccaccgactacgccagatggagagaggcccaggccccctacagagtgcagtgggccgccaactacgagccctacgtggtggtgcccagagactgccccagatacgaccccagattcgtgggcttcggctggaacaaggtggcccacatcgtggagctggacgcccaggagtacgagctgctggtgctgcccgaggccttcaccatccacctgccccacgcccccagcctggacatcagcagattcagaagcagccccacctacagagactgcctgcaggccctgaaggacgagttccaccaggacctgagcagacaccacggcgccgccgccctgaagtacctgcccgccctgcagcagccccagagccccgccagaggctag

SEQ ID NO: 83464 - DNA, 870 bp, synthetic construct
  misc_feature 1..870: note = Description of Artificial Sequence: Synthetic coding sequence
  source 1..870: mol_type = other DNA
atgtggagactgaccgccagaagagagctgctgagcctgcccgccaccagcctggccgaccaggacatcttcaacgccgtgatcaaggagcaccccggcctggtgcagagactgccctgcgtgtggaacgtgcagctgagcgaccacaccctggccgagagatgctacagcgaggccagcgacctgaaggtgatccactggaacagccccaagaagctgagagtgaagaacaagcacgtggagttcttcagaaacttctacctgaccttcctggagtacgacggcaacctgctgagaagagagctgttcgtgtgccccagccagcccccccccggcgccgagcagctgcagcaggccctggcccagctggacgaggaggacccctgcttcgagttcagacagcagcagctgaccgtgcacagagtgcacgtgaccttcctgccccacgagccccccccccccagaccccacgacgtgaccctggtggcccagctgagcatggacagactgcagatgctggaggccctgtgcagacactggcccggccccatgagcctggccctgtacctgaccgacgccgaggcccagcagttcctgcacttcgtggaggccagccccgtgctggccgccagacaggacgtggcctaccacgtggtgtacagagagggccccctgtaccccgtgaaccagctgagaaacgtggccctggcccaggccctgaccccctacgtgttcctgagcgacatcgacttcctgcccgcctacagcctgtacgactacctgagagaggccagagccggcttcaacagcagcagcacctgcggctgcgcccaccccagccaccaggccagatggcccatggtggtgtag

SEQ ID NO: 83465 - DNA, 2166 bp, synthetic construct; identical to SEQ ID NO: 83463
  misc_feature 1..2166: note = Description of Artificial Sequence: Synthetic coding sequence
  source 1..2166: mol_type = other DNA

SEQ ID NO: 83466 - DNA, 2166 bp, synthetic construct; identical to SEQ ID NO: 83463
  misc_feature 1..2166: note = Description of Artificial Sequence: Synthetic coding sequence
  source 1..2166: mol_type = other DNA

SEQ ID NO: 83467 - DNA, 2073 bp, synthetic construct
  misc_feature 1..2073: note = Description of Artificial Sequence: Synthetic coding sequence
  source 1..2073: mol_type = other DNA
atgctgcccagaggcagacccagagccctgggcgccgccgccctgctgctgctgctgctgctgctgggcttcctgctgttcgacggcagactgagaagagccgccgccctggacggcgaccccggcgccggccccggcgaccacaacagaagcgactgcggcccccagcccccccccccccccaagtgcgagctgctgcacgtggccatcgtgtgcgccggccacaacagcagcagagacgtgatcaccctggtgaagagcatgctgttctacagaaagaaccccctgcacctgcacctggtgaccgacgccgtggccagaaacatcctggagaccctgttccacacctggatggtgcccgccgtgagagtgagcttctaccacgccgaccagctgaagccccaggtgagctggatccccaacaagcactacagcggcctgtacggcctgatgaagctggtgctgcccagcgccctgcccgccgagctggccagagtgatcgtgctggacaccgacgtgaccttcgccagcgacatcagcgagctgtgggccctgttcgcccacttcagcgacacccaggccatcggcctggtggagaaccagagcgactggtacctgggcaacctgtggaagaaccacagaccctggcccgccctgggcagaggcttcaacaccggcgtgatcctgctgagactggacagactgagacaggccggctgggagcagatgtggagactgaccgccagaagagagctgctgagcctgcccgccaccagcctggccgaccaggacatcttcaacgccgtgatcaaggagcaccccggcctggtgcagagactgccctgcgtgtggaacgtgcagctgagcgaccacaccctggccgagagatgctacagcgaggccagcgacctgaaggtgatccactggaacagccccaagaagctgagagtgaagaacaagcacgtggagttcttcagaaacttctacctgaccttcctggagtacgacggcaacctgctgagaagagagctgttcgtgtgccccagccagcccccccccggcgccgagcagctgcagcaggccctggcccagctggacgaggaggacccctgcttcgagttcagacagcagcagctgaccgtgcacagagtgcacgtgaccttcctgccccacgagccccccccccccagaccccacgacgtgaccctggtggcccagctgagcatggacagactgcagatgctggaggccctgtgcagacactggcccggccccatgagcctggccctgtacctgaccgacgccgaggcccagcagttcctgcacttcgtggaggccagccccgtgctggccgccagacaggacgtggcctaccacgtggtgtacagagagggccccctgtaccccgtgaaccagctgagaaacgtggccctggcccaggccctgaccccctacgtgttcctgagcgacatcgacttcctgcccgcctacagcctgtacgactacctgagagccagcatcgagcagctgggcctgggcagcagaagaaaggccgccctggtggtgcccgccttcgagaccctgagatacagattcagcttcccccacagcaaggtggagctgctggccctgctggacgccggcaccctgtacaccttcagataccacgagtggcccagaggccacgcccccaccgactacgccagatggagagaggcccaggccccctacagagtgcagtgggccgccaactacgagccctacgtggtggtgcccagagactgccccagatacgaccccagattcgtgggcttcggctggaacaaggtggcccacatcgtggagctggacgcccaggagtacgagctgctggtgctgcccgaggccttcaccatccacctgccccacgcccccagcctggacatcagcagattcagaagcagccccacctacagagactgcctgcaggccctgaaggacgagttccaccaggacctgagcagacaccacggcgccgccgccctgaagtacctgcccgccctgcagcagccccagagccccgccagaggctag

SEQ ID NO: 83468 - DNA, 1122 bp, synthetic construct
  misc_feature 1..1122: note = Description of Artificial Sequence: Synthetic coding sequence
  source 1..1122: mol_type = other DNA
atgagcatcctgatcatcgaggccttctacggcggcagccacaagcagctggtggacctgctgcaggaggagctgggcgactgcgtggtgtacaccctgcccgccaagaagtggcactggagagccagaaccagcgccctgtacttcagccagaccatccccatcagcgagcactacagaaccctgttcgccagcagcgtgctgaacctgaccgagctggccgccctgagacccgacctgggcaagctgaagaagatcctgtacttccacgagaaccagctgatctaccccgtgaagaagtgccaggagagagacttccagtacggctacaaccagatcctgagctgcctggtggccgacgtggtggtgttcaacagcgtgttcaacatggagagcttcctgaccagcatgggcaagttcatgaagctgatccccgaccacagacccaaggacctggagagcatcatcagacccaagtgccaggtgatctacttccccatcagattccccgacgtgagcagattcatgcccaagcacaagaccacccacctgaagaagatgctgggcctgaagggcaacggcggcgccgtgctgagcatggccctgcccttccagcccgagcagagagacagcgaggacctgctgaagaacttcaacagcgagtgcgacacccactgcggcctggacaccgccagacaggagtacctgggcaacagcctgagacaggagagcgacctgaagaagagcaccagcagcgacaacagcagcagccaccacggcgagaacaagcagaacctgaccgtggacccctgcgacatcctgggcggcgtggacaaccagcagagactgctgcacatcgtgtggccccacagatggctggaggccgtgtactgcggctgctaccccctgtgccccaaggacctggtgtaccccgagatcttccccgccgagtacctgtacagcacccccgagcagctgagcaagagactgcagaacttctgcaagagacccgacatcatcagaaagcacctgtacaagggcgagatcgcccccttcagctgggccgccctgcacggcaagttcagaagcctgctgaccaccgagcccagagaggacctgtag

SEQ ID NO: 83469 - DNA, 1377 bp, synthetic construct
  misc_feature 1..1377: note = Description of Artificial Sequence: Synthetic coding sequence
  source 1..1377: mol_type = other DNA
atgagcatcctgatcatcgaggccttctacggcggcagccacaagcagctggtggacctgctgcaggaggagctgggcgactgcgtggtgtacaccctgcccgccaagaagtggcactggagagccagaaccagcgccctgtacttcagccagaccatccccatcagcgagcactacagaaccctgttcgccagcagcgtgctgaacctgaccgagctggccgccctgagacccgacctgggcaagctgaagaagatcctgtacttccacgagaaccagctgatctaccccgtgaagaagtgccaggagagagacttccagtacggctacaaccagatcctgagctgcctggtggccgacgtggtggtgttcaacagcgtgttcaacatggagagcttcctgaccagcatgggcaagttcatgaagctgatccccgaccacagacccaaggacctggagagcatcatcagacccaagtgccaggtgatctacttccccatcagattccccgacgtgagcagattcatgcccaagcacaagaccacccacctgaagaagatgctgggcctgaagggcaacggcggcgccgtgctgagcatggccctgcccttccagcccgagcagagagacagcgaggacctgctgaagaacttcaacagcgagtgcgacacccactgcggcctggacaccgccagacaggagtacctgggcaacagcctgagacaggagagcgacctgaagaagagcaccagcagcgacaacagcagcagccaccacggcgagaacaagcagaacctgaccgtggacccctgcgacatcctgggcggcgtggacaaccagcagagactgctgcacatcgtgtggccccacagatgggagcacgacaaggaccccgagagcttcttcaaggtgctgatgcacctgaaggacctgggcctgaacttccacgtgagcgtgctgggcgagaccttcaccgacgtgcccgacatcttcagcgaggccaagaaggccctgggcagcagcgtgctgcactggggctacctgcccagcaaggacgactacttccaggtgctgtgcatggccgacgtggtgatcagcaccgccaagcacgagttcttcggcgtggccatgctggaggccgtgtactgcggctgctaccccctgtgccccaaggacctggtgtaccccgagatcttccccgccgagtacctgtacagcacccccgagcagctgagcaagagactgcagaacttctgcaagagacccgacatcatcagaaagcacctgtacaagggcgagatcgcccccttcagctgggccgccctgcacggcaagttcagaagcctgctgaccaccgagcccagagaggacctgtag

SEQ ID NO: 83470 - DNA, 1122 bp, synthetic construct; identical to SEQ ID NO: 83468
  misc_feature 1..1122: note = Description of Artificial Sequence: Synthetic coding sequence
  source 1..1122: mol_type = other DNA

SEQ ID NO: 83471 - DNA, 1377 bp, synthetic construct; identical to SEQ ID NO: 83469
  misc_feature 1..1377: note = Description of Artificial Sequence: Synthetic coding sequence
  source 1..1377: mol_type = other DNA

SEQ ID NO: 83472 - DNA, 1377 bp, synthetic construct; identical to SEQ ID NO: 83469
  misc_feature 1..1377: note = Description of Artificial Sequence: Synthetic coding sequence
  source 1..1377: mol_type = other DNA

SEQ ID NO: 83473 - DNA, 300 bp, synthetic construct
  misc_feature 1..300: note = Description of Artificial Sequence: Synthetic coding sequence
  source 1..300: mol_type = other DNA
atgagcatcctgatcatcgaggccttctacggcggcagccacaagcagctggtggacctgctgcaggaggagctgggcgactgcgtggtgtacaccctgcccgccaagaagtggcactggagagccagaaccagcgccctgtacttcagccagaccatccccatcagcgagcactacagaaccctgttcgccagcagcgtgctgaacctgaccgagctggccgccctgagacccgacctgggcaagctgaagaagatcctgtacttccacgagaaccagctgatctaccccgtgaagtag

SEQ ID NO: 83474 - DNA, 522 bp, synthetic construct
  misc_feature 1..522: note = Description of Artificial Sequence: Synthetic coding sequence
  source 1..522: mol_type = other DNA
atgagcatcctgatcatcgaggccttctacggcggcagccacaagcagctggtggacctgctgcaggaggagctgggcgactgcgtggtgtacaccctgcccgccaagaagtggcactggagagccagaaccagcgccctgtacttcagccagaccatccccatcagcgagcactacagaaccctgttcgccagcagcgtgctgaacctgaccgagctggccgccctgagacccgacctgggcaagctgaagaagatcctgtacttccacgagaaccagctgatctaccccgtgaagaagtgccaggagagagacttccagtacggctacaaccagatcctgagctgcctggtggccgacgtggtggtgttcaacagcgtgttcaacatggagagcttcctgaccagcatgggcaagttcatgaagctgatccccgaccacagacccaaggacctggagagcatcatcagacccaagtgccaggtgatctacttccccatcagattccccgacgtgagctag

SEQ ID NO: 83475 - DNA, 1377 bp, synthetic construct; identical to SEQ ID NO: 83469
  misc_feature 1..1377: note = Description of Artificial Sequence: Synthetic coding sequence
  source 1..1377: mol_type = other DNA

SEQ ID NO: 83476 - DNA, 2220 bp, synthetic construct
  misc_feature 1..2220: note = Description of Artificial Sequence: Synthetic coding sequence
  source 1..2220: mol_type = other DNA
atgcccagccccagacccgtgctgctgagaggcgccagagccgccctgctgctgctgctgccccccagactgctggccagacccagcctgctgctgagaagaagcctgagcgccgccagctgcccccccatcagcctgcccgccgccgccagcagaagcagcatggacggcgccggcgccgaggaggtgctggcccccctgagactggccgtgagacagcagggcgacctggtgagaaagctgaaggaggacaaggccccccaggtggacgtggacaaggccgtggccgagctgaaggccagaaagagagtgctggaggccaaggagctggccctgcagcccaaggacgacatcgtggacagagccaagatggaggacaccctgaagagaagattcttctacgaccaggccttcgccatctacggcggcgtgagcggcctgtacgacttcggccccgtgggctgcgccctgaagaacaacatcatccagacctggagacagcacttcatccaggaggagcagatcctggagatcgactgcaccatgctgacccccgagcccgtgctgaagaccagcggccacgtggacaagttcgccgacttcatggtgaaggacgtgaagaacggcgagtgcttcagagccgaccacctgctgaaggcccacctgcagaagctgatgagcgacaagaagtgcagcgtggagaagaagagcgagatggagagcgtgctggcccagctggacaactacggccagcaggagctggccgacctgttcgtgaactacaacgtgaagagccccatcaccggcaacgacctgagcccccccgtgagcttcaacctgatgttcaagaccttcatcggccccggcggcaacatgcccggctacctgagacccgagaccgcccagggcatcttcctgaacttcaagagactgctggagttcaaccagggcaagctgcccttcgccgccgcccagatcggcaacagcttcagaaacgagatcagccccagaagcggcctgatcagagtgagagagttcaccatggccgagatcgagcacttcgtggaccccagcgagaaggaccaccccaagttccagaacgtggccgacctgcacctgtacctgtacagcgccaaggcccaggtgagcggccagagcgccagaaagatgagactgggcgacgccgtggagcagggcgtgatcaacaacaccgtgctgggctacttcatcggcagaatctacctgtacctgaccaaggtgggcatcagccccgacaagctgagattcagacagcacatggagaacgagatggcccactacgcctgcgactgctgggacgccgagagcaagaccagctacggctggatcgagatcgtgggctgcgccgacagaagctgctacgacctgagctgccacgccagagccaccaaggtgcccctggtggccgagaagcccctgaaggagcccaagaccgtgaacgtggtgcagttcgagcccagcaagggcgccatcggcaaggcctacaagaaggacgccaagctggtgatggagtacctggccatctgcgacgagtgctacatcaccgagatggagatgctgctgaacgagaagggcgagttcaccatcgagaccgagggcaagaccttccagctgaccaaggacatgatcaacgtgaagagattccagaagaccctgtacgtggaggaggtggtgcccaacgtgatcgagcccagcttcggcctgggcagaatcatgtacaccgtgttcgagcacaccttccacgtgagagagggcgacgagcagagaaccttcttcagcttccccgccgtggtggcccccttcaagtgcagcgtgctgcccctgagccagaaccaggagttcatgcccttcgtgaaggagctgagcgaggccctgaccagacacggcgtgagccacaaggtggacgacagcagcggcagcatcggcagaagatacgccagaaccgacgagatcggcgtggccttcggcgtgaccatcgacttcgacaccgtgaacaagaccccccacaccgccaccctgagagacagagacagcatgagacagatcagagccgagatcagcgagctgcccagcatcgtgcaggacctggccaacggcaacatcacctgggccgacgtggaggccagataccccctgttcgagggccaggagaccggcaagaaggagaccatcgaggagtag

SEQ ID NO: 83477 - DNA, 555 bp, synthetic construct
  misc_feature 1..555: note = Description of Artificial Sequence: Synthetic coding sequence
  source 1..555: mol_type = other DNA
atggccgagccccagccccccagcggcggcctgaccgacgaggccgccctgagctgctgcagcgacgccgaccccagcaccaaggacttcctgctgcagcagaccatgctgagagtgaaggaccccaagaagagcctggacttctacaccagagtgctgggcatgaccctgatccagaagtgcgacttccccatcatgaagttcagcctgtacttcctggcctacgaggacaagaacgacatccccaaggagaaggacgagaagatcgcctgggccctgagcagaaaggccaccctggagctgacccacaactggggcaccgaggacgacgagacccagagctaccacaacggcaacagcgaccccagaggcttcggccacatcggcatcgccgtgcccgacgtgtacagcgcctgcaagagattcgaggagctgggcgtgaagttcgtgaagaagcccgacgacggcaagatgaagggcctggccttcatccaggaccccgacggctactggatcgagatcctgaaccccaacaagatggccaccctgatgtag

SEQ ID NO: 83478 - DNA, 987 bp, synthetic construct
  misc_feature 1..987: note = Description of Artificial Sequence: Synthetic coding sequence
  source 1..987: mol_type = other DNA
atgagacccgtgagactgatgaaggtgttcgtgaccagaagaatccccgccgagggcagagtggccctggccagagccgccgactgcgaggtggagcagtgggacagcgacgagcccatccccgccaaggagctggagagaggcgtggccggcgcccacggcctgctgtgcctgctgagcgaccacgtggacaagagaatcctggacgccgccggcgccaacctgaaggtgatcagcaccatgagcgtgggcatcgaccacctggccctggacgagatcaagaagagaggcatcagagtgggctacacccccgacgtgctgaccgacaccaccgccgagctggccgtgagcctgctgctgaccacctgcagaagactgcccgaggccatcgaggaggtgaagaacggcggctggaccagctggaagcccctgtggctgtgcggctacggcctgacccagagcaccgtgggcatcatcggcctgggcagaatcggccaggccatcgccagaagactgaagcccttcggcgtgcagagattcctgtacaccggcagacagcccagacccgaggaggccgccgagttccaggccgagttcgtgagcacccccgagctggccgcccagagcgacttcatcgtggtggcctgcagcctgacccccgccaccgagggcctgtgcaacaaggacttcttccagaagatgaaggagaccgccgtgttcatcaacatcagcagaggcgacgtggtgaaccaggacgacctgtaccaggccctggccagcggcaagatcgccgccgccggcctggacgtgaccagccccgagcccctgcccaccaaccaccccctgctgaccctgaagaactgcgtgatcctgccccacatcggcagcgccacccacagaaccagaaacaccatgagcctgctggccgccaacaacctgctggccggcctgagaggcgagcccatgcccagcgagctgaagctgtag

SEQ ID NO: 83479 - DNA, 1188 bp, synthetic construct
  misc_feature 1..1188: note = Description of Artificial Sequence: Synthetic coding sequence
  source 1..1188: mol_type = other DNA
atgagacccgtgagactgatgaaggtgttcgtgaccagaagaatccccgccgagggcagagtggccctggccagagccgccgactgcgaggtggagcagtgggacagcgacgagcccatccccgccaaggagctggagagaggcgtggccggcgcccacggcctgctgtgcctgctgagcgaccacgtggacaagagaatcctggacgccgccggcgccaacctgaaggtgatcagcaccatgagcgtgggcatcgaccacctggccctggacgagatcaagaagagaggcatcagagtgggctacacccccgacgtgctgaccgacaccaccgccgagctggccgtgagcctgctgctgaccacctgcagaagactgcccgaggccatcgaggaggtgaagaacggcggctggaccagctggaagcccctgtggctgtgcggctacggcctgacccagagcaccgtgggcatcatcggcctgggcagaatcggccaggccatcgccagaagactgaagcccttcggcgtgcagagattcctgtacaccggcagacagcccagacccgaggaggccgccgagttccaggccgagttcgtgagcacccccgagctggccgcccagagcgacttcatcgtggtggcctgcagcctgacccccgccaccgagggcctgtgcaacaaggacttcttccagaagatgaaggagaccgccgtgttcatcaacatcagcagataccccagagccaccctgcccagcaagcccggcgaggagcccagccccctgctgcccagcggcgacttcctgcccagaggcctgctggtgagaccccaggccgagctggccggcttccacaagcccaacaaccagctgagaaacagctgggagtacaccagacccccctacagagaggaggagcccagcgagtgggcctggcccgtgtgcttcagcgccgtggcccccaccagaagaggcctggcccacagcagcgtggccagcggcagcgtgcccagagagcccctgcaggcccactacccccccccccagagagccggcctggaggacctgaagggccccctggaggccgccagccacaccgccgagcccggcttcgtgtggctgtggttcagcgacaccctgaacctgatgctgctgggcggccagaccctgaagctgacctggagctag

SEQ ID NO: 83480 - DNA, 759 bp, synthetic construct
  misc_feature 1..759: note = Description of Artificial Sequence: Synthetic coding sequence
  source 1..759: mol_type = other DNA
atgctgggcggcgtgcccaccctgtgcggcaccggcaacgagacctggaccctgctggccctgggccaggccatcgccagaagactgaagcccttcggcgtgcagagattcctgtacaccggcagacagcccagacccgaggaggccgccgagttccaggccgagttcgtgagcacccccgagctggccgcccagagcgacttcatcgtggtggcctgcagcctgacccccgccaccgagggcctgtgcaacaaggacttcttccagaagatgaaggagaccgccgtgttcatcaacatcagcagataccccagagccaccctgcccagcaagcccggcgaggagcccagccccctgctgcccagcggcgacttcctgcccagaggcctgctggtgagaccccaggccgagctggccggcttccacaagcccaacaaccagctgagaaacagctgggagtacaccagacccccctacagagaggaggagcccagcgagtgggcctggcccgtgtgcttcagcgccgtggcccccaccagaagaggcctggcccacagcagcgtggccagcggcagcgtgcccagagagcccctgcaggcccactacccccccccccagagagccggcctggaggacctgaagggccccctggaggccgccagccacaccgccgagcccggcttcgtgtggctgtggttcagcgacaccctgaacctgatgctgctgggcggccagaccctgaagctgacctggagctag

SEQ ID NO: 83481 - DNA, 1677 bp, synthetic construct
  misc_feature 1..1677: note = Description of Artificial Sequence: Synthetic coding sequence
  source 1..1677: mol_type = other DNA
atggagctgagagccagaggctggtggctgctgtgcgccgccgccgccctggtggcctgcgccagaggcgaccccgccagcaagagcagaagctgcggcgaggtgagacagatctacggcgccaagggcttcagcctgagcgacgtgccccaggccgagatcagcggcgagcacctgagaatctgcccccagggctacacctgctgcaccagcgagatggaggagaacctggccaacagaagccacgccgagctggagaccgccctgagagacagcagcagagtgctgcaggccatgctggccacccagctgagaagcttcgacgaccacttccagcacctgctgaacgacagcgagagaaccctgcaggccaccttccccggcgccttcggcgagctgtacacccagaacgccagagccttcagagacctgtacagcgagctgagactgtactacagaggcgccaacctgcacctggaggagaccctggccgagttctgggccagactgctggagagactgttcaagcagctgcacccccagctgctgctgcccgacgactacctggactgcctgggcaagcaggccgaggccctgagacccttcggcgaggcccccagagagctgagactgagagccaccagagccttcgtggccgccagaagcttcgtgcagggcctgggcgtggccagcgacgtggtgagaaaggtggcccaggtgcccctgggccccgagtgcagcagagccgtgatgaagctggtgtactgcgcccactgcctgggcgtgcccggcgccagaccctgccccgactactgcagaaacgtgctgaagggctgcctggccaaccaggccgacctggacgccgagtggagaaacctgctggacagcatggtgctgatcaccgacaagttctggggcaccagcggcgtggagagcgtgatcggcagcgtgcacacctggctggccgaggccatcaacgccctgcaggacaacagagacaccctgaccgccaaggtgatccagggctgcggcaaccccaaggtgaacccccagggccccggccccgaggagaagagaagaagaggcaagctggcccccagagagagaccccccagcggcaccctggagaagctggtgagcgaggccaaggcccagctgagagacgtgcaggacttctggatcagcctgcccggcaccctgtgcagcgagaagatggccctgagcaccgccagcgacgacagatgctggaacggcatggccagaggcagatacctgcccgaggtgatgggcgacggcctggccaaccagatcaacaaccccgaggtggaggtggacatcaccaagcccgacatgaccatcagacagcagatcatgcagctgaagatcatgaccaacagactgagaagcgcctacaacggcaacgacgtggacttccaggacgccagcgacgacggcagcggcagcggcagcggcgacggctgcctggacgacctgtgcagcagaaaggtgagcagaaagagcagcagcagcagaacccccctgacccacgccctgcccggcctgagcgagcaggagggccagaagaccagcgccgccagctgcccccagccccccaccttcctgctgcccctgctgctgttcctggccctgaccgtggccagacccagatggagatag

SEQ ID NO: 83482 - DNA, 1743 bp, synthetic construct
  misc_feature 1..1743: note = Description of Artificial Sequence: Synthetic coding sequence
  source 1..1743: mol_type = other DNA
atggccggcaccgtgagaaccgcctgcctggtggtggccatgctgctgagcctggacttccccggccaggcccagccccccccccccccccccgacgccacctgccaccaggtgagaagcttcttccagagactgcagcccggcctgaagtgggtgcccgagacccccgtgcccggcagcgacctgcaggtgtgcctgcccaagggccccacctgctgcagcagaaagatggaggagaagtaccagctgaccgccagactgaacatggagcagctgctgcagagcgccagcatggagctgaagttcctgatcatccagaacgccgccgtgttccaggaggccttcgagatcgtggtgagacacgccaagaactacaccaacgccatgttcaagaacaactaccccagcctgaccccccaggccttcgagttcgtgggcgagttcttcaccgacgtgagcctgtacatcctgggcagcgacatcaacgtggacgacatggtgaacgagctgttcgacagcctgttccccgtgatctacacccagctgatgaaccccggcctgcccgacagcgccctggacatcaacgagtgcctgagaggcgccagaagagacctgaaggtgttcggcaacttccccaagctgatcatgacccaggtgagcaagagcctgcaggtgaccagaatcttcctgcaggccctgaacctgggcatcgaggtgatcaacaccaccgaccacctgaagttcagcaaggactgcggcagaatgctgaccagaatgtggtactgcagctactgccagggcctgatgatggtgaagccctgcggcggctactgcaacgtggtgatgcagggctgcatggccggcgtggtggagatcgacaagtactggagagagtacatcctgagcctggaggagctggtgaacggcatgtacagaatctacgacatggagaacgtgctgctgggcctgttcagcaccatccacgacagcatccagtacgtgcagaagaacgccggcaagctgaccaccaccatcggcaagctgtgcgcccacagccagcagagacagtacagaagcgcctactaccccgaggacctgttcatcgacaagaaggtgctgaaggtggcccacgtggagcacgaggagaccctgagcagcagaagaagagagctgatccagaagctgaagagcttcatcagcttctacagcgccctgcccggctacatctgcagccacagccccgtggccgagaacgacaccctgtgctggaacggccaggagctggtggagagatacagccagaaggccgccagaaacggcatgaagaaccagttcaacctgcacgagctgaagatgaagggccccgagcccgtggtgagccagatcatcgacaagctgaagcacatcaaccagctgctgagaaccatgagcatgcccaagggcagagtgctggacaagaacctggacgaggagggcttcgagagcggcgactgcggcgacgacgaggacgagtgcatcggcggcagcggcgacggcatgatcaaggtgaagaaccagctgagattcctggccgagctggcctacgacctggacgtggacgacgcccccggcaacagccagcaggccacccccaaggacaacgagatcagcaccttccacaacctgggcaacgtgcacagccccctgaagctgctgaccagcatggccatcagcgtggtgtgcttcttcttcctggtgcactag

SEQ ID NO: 83483 - DNA, 1812 bp, synthetic construct
  misc_feature 1..1812: note = Description of Artificial Sequence: Synthetic coding sequence
  source 1..1812: mol_type = other DNA
atggccggcaccgtgagaaccgcctgcctggtggtggccatgctgctgagcctggacttccccggccaggcccagccccccccccccccccccgacgccacctgccaccaggtgagaagcttcttccagagactgcagcccggcctgaagtgggtgcccgagacccccgtgcccggcagcgacctgcaggtgtgcctgcccaagggccccacctgctgcagcagaaagatggaggagaagtaccagctgaccgccagactgaacatggagcagctgctgcagagcgccagcatggagctgaagttcctgatcatccagaacgccgccgtgttccaggaggccttcgagatcgtggtgagacacgccaagaactacaccaacgccatgttcaagaacaactaccccagcctgaccccccaggccttcgagttcgtgggcgagttcttcaccgacgtgagcctgtacatcctgggcagcgacatcaacgtggacgacatggtgaacgagctgttcgacagcctgttccccgtgatctacacccagctgatgaaccccggcctgcccgacagcgccctggacatcaacgagtgcctgagaggcgccagaagagacctgaaggtgttcggcaacttccccaagctgatcatgacccaggtgagcaagagcctgcaggtgaccagaatcttcctgcaggccctgaacctgggcatcgaggtgatcaacaccaccgaccacctgaagttcagcaaggactgcggcagaatgctgaccagaatgtggtactgcagctactgccagggcctgatgatggtgaagccctgcggcggctactgcaacgtggtgatgcagggctgcatggccggcgtggtggagatcgacaagtactggagagagtacatcctgagcctggaggagctggtgaacggcatgtacagaatctacgacatggagaacgtgctgctgggcctgttcagcaccatccacgacagcatccagtacgtgcagaagaacgccggcaagctgaccaccaccgagaccgagaagaagatctggcacttcaagtaccccatcttcttcctgtgcatcggcctggacctgcagatcggcaagctgtgcgcccacagccagcagagacagtacagaagcgcctactaccccgaggacctgttcatcgacaagaaggtgctgaaggtggcccacgtggagcacgaggagaccctgagcagcagaagaagagagctgatccagaagctgaagagcttcatcagcttctacagcgccctgcccggctacatctgcagccacagccccgtggccgagaacgacaccctgtgctggaacggccaggagctggtggagagatacagccagaaggccgccagaaacggcatgaagaaccagttcaacctgcacgagctgaagatgaagggccccgagcccgtggtgagccagatcatcgacaagctgaagcacatcaaccagctgctgagaaccatgagcatgcccaagggcagagtgctggacaagaacctggacgaggagggcttcgagagcggcgactgcggcgacgacgaggacgagtgcatcggcggcagcggcgacggcatgatcaaggtgaagaaccagctgagattcctggccgagctggcctacgacctggacgtggacgacgcccccggcaacagccagcaggccacccccaaggacaacgagatcagcaccttccacaacctgggcaacgtgcacagccccctgaagctgctgaccagcatggccatcagcgtggtgtgcttcttcttcctggtgcactag

SEQ ID NO: 83484 - DNA, 771 bp, synthetic construct
  misc_feature 1..771: note = Description of Artificial Sequence: Synthetic coding sequence
  source 1..771: mol_type = other DNA
tgaaagccctgcggcggctactgcaacgtggtgatgcagggctgcatggccggcgtggtggagatcgacaagtactggagagagtacatcctgagcctggaggagctggtgaacggcatgtacagaatctacgacatggagaacgtgctgctgggcctgttcagcaccatccacgacagcatccagtacgtgcagaagaacgccggcaagctgaccaccaccatcggcaagctgtgcgcccacagccagcagagacagtacagaagcgcctactaccccgaggacctgttcatcgacaagaaggtgctgaaggtggcccacgtggagcacgaggagaccctgagcagcagaagaagagagctgatccagaagctgaagagcttcatcagcttctacagcgccctgcccggctacatctgcagccacagccccgtggccgagaacgacaccctgtgctggaacggccaggagctggtggagagatacagccagaaggccgccagaaacggcatgaagaaccagttcaacctgcacgagctgaagatgaagggccccgagcccgtggtgagccagatcatcgacaagctgaagcacatcaaccagctgctgagaaccatgagcatgcccaagggcagagtgctggacaagaacctggacgaggagggcttcgagagcggcgactgcggcgacgacgaggacgagtgcatcggcggcagcggcgacggcatgatcaaggtgaagaaccagctgagattcctggccggcaactag

SEQ ID NO: 83485 - DNA, 1581 bp, synthetic construct
  misc_feature 1..1581: note = Description of Artificial Sequence: Synthetic coding sequence
  source 1..1581: mol_type = other DNA
atggccggcaccgtgagaaccgcctgcctggtggtggccatgctgctgagcctggacttccccggccaggcccagccccccccccccccccccgacgccacctgccaccaggtgagaagcttcttccagagactgcagcccggcctgaagtgggtgcccgagacccccgtgcccgaggccttcgagatcgtggtgagacacgccaagaactacaccaacgccatgttcaagaacaactaccccagcctgaccccccaggccttcgagttcgtgggcgagttcttcaccgacgtgagcctgtacatcctgggcagcgacatcaacgtggacgacatggtgaacgagctgttcgacagcctgttccccgtgatctacacccagctgatgaaccccggcctgcccgacagcgccctggacatcaacgagtgcctgagaggcgccagaagagacctgaaggtgttcggcaacttccccaagctgatcatgacccaggtgagcaagagcctgcaggtgaccagaatcttcctgcaggccctgaacctgggcatcgaggtgatcaacaccaccgaccacctgaagttcagcaaggactgcggcagaatgctgaccagaatgtggtactgcagctactgccagggcctgatgatggtgaagccctgcggcggctactgcaacgtggtgatgcagggctgcatggccggcgtggtggagatcgacaagtactggagagagtacatcctgagcctggaggagctggtgaacggcatgtacagaatctacgacatggagaacgtgctgctgggcctgttcagcaccatccacgacagcatccagtacgtgcagaagaacgccggcaagctgaccaccaccatcggcaagctgtgcgcccacagccagcagagacagtacagaagcgcctactaccccgaggacctgttcatcgacaagaaggtgctgaaggtggcccacgtggagcacgaggagaccctgagcagcagaagaagagagctgatccagaagctgaagagcttcatcagcttctacagcgccctgcccggctacatctgcagccacagccccgtggccgagaacgacaccctgtgctggaacggccaggagctggtggagagatacagccagaaggccgccagaaacggcatgaagaaccagttcaacctgcacgagctgaagatgaagggccccgagcccgtggtgagccagatcatcgacaagctgaagcacatcaaccagctgctgagaaccatgagcatgcccaagggcagagtgctggacaagaacctggacgaggagggcttcgagagcggcgactgcggcgacgacgaggacgagtgcatcggcggcagcggcgacggcatgatcaaggtgaagaaccagctgagattcctggccgagctggcctacgacctggacgtggacgacgcccccggcaacagccagcaggccacccccaaggacaacgagatcagcaccttccacaacctgggcaacgtgcacagccccctgaagctgctgaccagcatggccatcagcgtggtgtgcttcttcttcctggtgcactag

SEQ ID NO: 83486 - DNA, 1671 bp, synthetic construct
  misc_feature 1..1671: note = Description of Artificial Sequence: Synthetic coding sequence
  source 1..1671: mol_type = other DNA
atggccagattcggcctgcccgccctgctgtgcaccctggccgtgctgagcgccgccctgctggccgccgagctgaagagcaagagctgcagcgaggtgagaagactgtacgtgagcaagggcttcaacaagaacgacgcccccctgcacgagatcaacggcgaccacctgaagatctgcccccagggcagcacctgctgcagccaggagatggaggagaagtacagcctgcagagcaaggacgacttcaagagcgtggtgagcgagcagtgcaaccacctgcaggccgtgttcgccagcagatacaagaagttcgacgagttcttcaaggagctgctggagaacgccgagaagagcctgaacgacatgttcgtgaagacctacggccacctgtacatgcagaacagcgagctgttcaaggacctgttcgtggagctgaagagatactacgtggtgggcaacgtgaacctggaggagatgctgaacgacttctgggccagactgctggagagaatgttcagactggtgaacagccagtaccacttcaccgacgagtacctggagtgcgtgagcaagtacaccgagcagctgaagcccttcggcgacgtgcccagaaagctgaagctgcaggtgaccagagccttcgtggccgccagaaccttcgcccagggcctggccgtggccggcgacgtggtgagcaaggtgagcgtggtgaaccccaccgcccagtgcacccacgccctgctgaagatgatctactgcagccactgcagaggcctggtgaccgtgaagccctgctacaactactgcagcaacatcatgagaggctgcctggccaaccagggcgacctggacttcgagtggaacaacttcatcgacgccatgctgatggtggccgagagactggagggccccttcaacatcgagagcgtgatggaccccatcgacgtgaagatcagcgacgccatcatgaacatgcaggacaacagcgtgcaggtgagccagaaggtgttccagggctgcggcccccccaagcccctgcccgccggcagaatcagcagaagcatcagcgagagcgccttcagcgccagattcagaccccaccaccccgaggagagacccaccaccgccgccggcaccagcctggacagactggtgaccgacgtgaaggagaagctgaagcaggccaagaagttctggagcagcctgcccagcaacgtgtgcaacgacgagagaatggccgccggcaacggcaacgaggacgactgctggaacggcaagggcaagagcagatacctgttcgccgtgaccggcaacggcctggccaaccagggcaacaaccccgaggtgcaggtggacaccagcaagcccgacatcctgatcctgagacagatcatggccctgagagtgatgaccagcaagatgaagaacgcctacaacggcaacgacgtggacttcttcgacatcagcgacgagagcagcggcgagggcagcggcagcggctgcgagtaccagcagtgccccagcgagttcgactacaacgccaccgaccacgccggcaagagcgccaacgagaaggccgacagcgccggcgtgagacccggcgcccaggcctacctgctgaccgtgttctgcatcctgttcctggtgatgcagagagagtggagatag

SEQ ID NO: 83487 - DNA, 1461 bp, synthetic construct
  misc_feature 1..1461: note = Description of Artificial Sequence: Synthetic coding sequence
  source 1..1461: mol_type = other DNA
atggaggagaagtacagcctgcagagcaaggacgacttcaagagcgtggtgagcgagcagtgcaaccacctgcaggccgtgttcgccagcagatacaagaagttcgacgagttcttcaaggagctgctggagaacgccgagaagagcctgaacgacatgttcgtgaagacctacggccacctgtacatgcagaacagcgagctgttcaaggacctgttcgtggagctgaagagatactacgtggtgggcaacgtgaacctggaggagatgctgaacgacttctgggccagactgctggagagaatgttcagactggtgaacagccagtaccacttcaccgacgagtacctggagtgcgtgagcaagtacaccgagcagctgaagcccttcggcgacgtgcccagaaagctgaagctgcaggtgaccagagccttcgtggccgccagaaccttcgcccagggcctggccgtggccggcgacgtggtgagcaaggtgagcgtggtgaaccccaccgcccagtgcacccacgccctgctgaagatgatctactgcagccactgcagaggcctggtgaccgtgaagccctgctacaactactgcagcaacatcatgagaggctgcctggccaaccagggcgacctggacttcgagtggaacaacttcatcgacgccatgctgatggtggccgagagactggagggccccttcaacatcgagagcgtgatggaccccatcgacgtgaagatcagcgacgccatcatgaacatgcaggacaacagcgtgcaggtgagccagaaggtgttccagggctgcggcccccccaagcccctgcccgccggcagaatcagcagaagcatcagcgagagcgccttcagcgccagattcagaccccaccaccccgaggagagacccaccaccgccgccggcaccagcctggacagactggtgaccgacgtgaaggagaagctgaagcaggccaagaagttctggagcagcctgcccagcaacgtgtgcaacgacgagagaatggccgccggcaacggcaacgaggacgactgctggaacggcaagggcaagagcagatacctgttcgccgtgaccggcaacggcctggccaaccagggcaacaaccccgaggtgcaggtggacaccagcaagcccgacatcctgatcctgagacagatcatggccctgagagtgatgaccagcaagatgaagaacgcctacaacggcaacgacgtggacttcttcgacatcagcgacgagagcagcggcgagggcagcggcagcggctgcgagtaccagcagtgccccagcgagttcgactacaacgccaccgaccacgccggcaagagcgccaacgagaaggccgacagcgccggcgtgagacccggcgcccaggcctacctgctgaccgtgttctgcatcctgttcctggtgatgcagagagagtggagatag

SEQ ID NO: 83488 - DNA, 1653 bp, synthetic construct
  misc_feature 1..1653: note = Description of Artificial Sequence: Synthetic coding sequence
  source 1..1653: mol_type = other DNA
atggccagattcggcctgcccgccctgctgtgcaccctggccgtgctgagcgccgccctgctggccgccgagctgaagagcaagagctgcagcgaggtgagaagactgtacgtgagcaagggcttcaacaagaacgacgcccccctgcacgagatcaacggcgaccacgaggacctgagccccggcttctacctgctgctgagcagagacggcggctacagcctgcagagcaaggacgacttcaagagcgtggtgagcgagcagtgcaaccacctgcaggccgtgttcgccagcagatacaagaagttcgacgagttcttcaaggagctgctggagaacgccgagaagagcctgaacgacatgttcgtgaagacctacggccacctgtacatgcagaacagcgagctgttcaaggacctgttcgtggagctgaagagatactacgtggtgggcaacgtgaacctggaggagatgctgaacgacttctgggccagactgctggagagaatgttcagactggtgaacagccagtaccacttcaccgacgagtacctggagtgcgtgagcaagtacaccgagcagctgaagcccttcggcgacgtgcccagaaagctgaagctgcaggtgaccagagccttcgtggccgccagaaccttcgcccagggcctggccgtggccggcgacgtggtgagcaaggtgagcgtgcccagctgcacccacgccctgctgaagatgatctactgcagccactgcagaggcctggtgaccgtgaagccctgctacaactactgcagcaacatcatgagaggctgcctggccaaccagggcgacctggacttcgagtggaacaacttcatcgacgccatgctgatggtggccgagagactggagggccccttcaacatcgagagcgtgatggaccccatcgacgtgaagatcagcgacgccatcatgaacatgcaggacaacagcgtgcaggtgagccagaaggtgttccagggctgcggcccccccaagcccctgcccgccggcagaatcagcagaagcatcagcgagagcgccttcagcgccagattcagaccccaccaccccgaggagagacccaccaccgccgccggcaccagcctggacagactggtgaccgacgtgaaggagaagctgaagcaggccaagaagttctggagcagcctgcccagcaacgtgtgcaacgacgagagaatggccgccggcaacggcaacgaggacgactgctggaacggcaagggcaagagcagatacctgttcgccgtgaccggcaacggcctggccaaccagggcaacaaccccgaggtgcaggtggacaccagcaagcccgacatcctgatcctgagacagatcatggccctgagagtgatgaccagcaagatgaagaacgcctacaacggcaacgacgtggacttcttcgacatcagcgacgagagcagcggcgagggcagcggcagcggctgcgagtaccagcagtgccccagcgagttcgactacaacgccaccgaccacgccggcaagagcgccaacgagaaggccgacagcgccggcgtgagacccggcgcccaggcctacctgctgaccgtgttctgcatcctgttcctggtgatgcagagagagtggagatag

SEQ ID NO: 83489 - DNA, 1719 bp, synthetic construct
  misc_feature 1..1719: note = Description of Artificial Sequence: Synthetic coding sequence
  source 1..1719: mol_type = other DNA
atggacgcccagacctggcccgtgggcttcagatgcctgctgctgctggccctggtgggcagcgccagaagcgagggcgtgcagacctgcgaggaggtgagaaagctgttccagtggagactgctgggcgccgtgagaggcctgcccgacagccccagagccggccccgacctgcaggtgtgcatcagcaagaagcccacctgctgcaccagaaagatggaggagagataccagatcgccgccagacaggacatgcagcagttcctgcagaccagcagcagcaccctgaagttcctgatcagcagaaacgccgccgccttccaggagaccctggagaccctgatcaagcaggccgagaactacaccagcatcctgttctgcagcacctacagaaacatggccctggaggccgccgccagcgtgcaggagttcttcaccgacgtgggcctgtacctgttcggcgccgacgtgaaccccgaggagttcgtgaacagattcttcgacagcctgttccccctggtgtacaaccacctgatcaaccccggcgtgaccgacagcagcctggagtacagcgagtgcatcagaatggccagaagagacgtgagccccttcggcaacatcccccagagagtgatgggccagatgggcagaagcctgctgcccagcagaaccttcctgcaggccctgaacctgggcatcgaggtgatcaacaccaccgactacctgcacttcagcaaggagtgcagcagagccctgctgaagatgcagtactgcccccactgccagggcctggccctgaccaagccctgcatgggctactgcctgaacgtgatgagaggctgcctggcccacatggccgagctgaacccccactggcacgcctacatcagaagcctggaggagctgagcgacgccatgcacggcacctacgacatcggccacgtgctgctgaacttccacctgctggtgaacgacgccgtgctgcaggcccacctgaacggccagaagctgctggagcaggtgaacagaatctgcggcagacccgtgagaacccccacccagagccccagatgcagcttcgaccagagcaaggagaagcacggcatgaagaccaccaccagaaacagcgaggagaccctggccaacagaagaaaggagttcatcaacagcctgagactgtacagaagcttctacggcggcctggccgaccagctgtgcgccaacgagctggccgccgccgacggcctgccctgctggaacggcgaggacatcgtgaagagctacacccagagagtggtgggcaacggcatcaaggcccagagcggcaaccccgaggtgaaggtgaagggcatcgaccccgtgatcaaccagatcatcgacaagctgaagcacgtggtgcagctgctgcagggcagaagccccaagcccgacaagtgggagctgctgcagctgggcagcggcggcggcatggtggagcaggtgagcggcgactgcgacgacgaggacggctgcggcggcagcggcagcggcgaggtgaagagaaccctgaagatcaccgactggatgcccgacgacatgaacttcagcgacgtgaagcagatccaccagaccgacaccggcagcaccctggacaccaccggcgccggctgcgccgtggccaccgagagcatgaccttcaccctgatcagcgtggtgatgctgctgcccggcatctggtag

SEQ ID NO: 83490 - DNA, 1668 bp, synthetic construct
  misc_feature 1..1668: note = Description of Artificial Sequence: Synthetic coding sequence
  source 1..1668: mol_type = other DNA
atgcccagctggatcggcgccgtgatcctgcccctgctgggcctgctgctgagcctgcccgccggcgccgacgtgaaggccagaagctgcggcgaggtgagacaggcctacggcgccaagggcttcagcctggccgacatcccctaccaggagatcgccggcgagcacctgagaatctgcccccaggagtacacctgctgcaccaccgagatggaggacaagctgagccagcagagcaagctggagttcgagaacctggtggaggagaccagccacttcgtgagaaccaccttcgtgagcagacacaagaagttcgacgagttcttcagagagctgctggagaacgccgagaagagcctgaacgacatgttcgtgagaacctacggcatgctgtacatgcagaacagcgaggtgttccaggacctgttcaccgagctgaagagatactacaccggcggcaacgtgaacctggaggagatgctgaacgacttctgggccagactgctggagagaatgttccagctgatcaacccccagtaccacttcagcgaggactacctggagtgcgtgagcaagtacaccgaccagctgaagcccttcggcgacgtgcccagaaagctgaagatccaggtgaccagagccttcatcgccgccagaaccttcgtgcagggcctgaccgtgggcagagaggtggccaacagagtgagcaaggtgagccccacccccggctgcatcagagccctgatgaagatgctgtactgcccctactgcagaggcctgcccaccgtgagaccctgcaacaactactgcctgaacgtgatgaagggctgcctggccaaccaggccgacctggacaccgagtggaacctgttcatcgacgccatgctgctggtggccgagagactggagggccccttcaacatcgagagcgtgatggaccccatcgacgtgaagatcagcgaggccatcatgaacatgcaggagaacagcatgcaggtgagcgccaaggtgttccagggctgcggccagcccaagcccgcccccgccctgagaagcgccagaagcgcccccgagaacttcaacaccagattcagaccctacaaccccgaggagagacccaccaccgccgccggcaccagcctggacagactggtgaccgacatcaaggagaagctgaagctgagcaagaaggtgtggagcgccctgccctacaccatctgcaaggacgagagcgtgaccgccggcaccagcaacgaggaggagtgctggaacggccacagcaaggccagatacctgcccgagatcatgaacgacggcctgaccaaccagatcaacaaccccgaggtggacgtggacatcaccagacccgacaccttcatcagacagcagatcatggccctgagagtgatgaccaacaagctgaagaacgcctacaacggcaacgacgtgaacttccaggacaccagcgacgagagcagcggcagcggcagcggcagcggctgcatggacgacgtgtgccccaccgagttcgagttcgtgaccaccgaggcccccgccgtggaccccgacagaagagaggtggacagcagcgccgcccagagaggccacagcctgctgagctggagcctgacctgcatcgtgctggccctgcagagactgtgcagatag

SEQ ID NO: 83491 - DNA, 582 bp, synthetic construct
  misc_feature 1..582: note = Description of Artificial Sequence: Synthetic coding sequence
  source 1..582: mol_type = other DNA
atgcagagcctgatgcaggcccccctgctgatcgccctgggcctgctgctggccgcccccgcccaggcccacctgaagaagcccagccagctgagcagcttcagctgggacaactgcgacgagggcaaggaccccgccgtgatcagaagcctgaccctggagcccgaccccatcatcgtgcccggcaacgtgaccctgagcgtgatgggcagcaccagcgtgcccctgagcagccccctgaaggtggacctggtgctggagaaggaggtggccggcctgtggatcaagatcccctgcaccgactacatcggcagctgcaccttcgagcacttctgcgacgtgctggacatgctgatccccaccggcgagccctgccccgagcccctgagaacctacggcctgccctgccactgccccttcaaggagggcacctacagcctgcccaagagcgagttcgtggtgcccgacctggagctgcccagctggctgaccaccggcaactacagaatcgagagcgtgctgagcagcagcggcaagagactgggctgcatcaagatcgccgccagcctgaagggcatctag

SEQ ID NO: 83492 - DNA, 1140 bp, synthetic construct
  misc_feature 1..1140: note = Description of Artificial Sequence: Synthetic coding sequence
  source 1..1140: mol_type = other DNA
atgggctgcctgggcaacagcaagaccgaggaccagagaaacgaggagaaggcccagagagaggccaacaagaagatcgagaagcagctgcagaaggacaagcaggtgtacagagccacccacagactgctgctgctgggcgccggcgagagcggcaagagcaccatcgtgaagcagatgagaatcctgcacgtgaacggcttcaacggcgacgagaaggccaccaaggtgcaggacatcaagaacaacctgaaggaggccatcgagaccatcgtggccgccatgagcaacctggtgccccccgtggagctggccaaccccgagaaccagttcagagtggactacatcctgagcgtgatgaacgtgcccgacttcgacttcccccccgagttctacgagcacgccaaggccctgtgggaggacgagggcgtgagagcctgctacgagagaagcaacgagtaccagctgatcgactgcgcccagtacttcctggacaagatcgacgtgatcaagcaggccgactacgtgcccagcgaccaggacctgctgagatgcagagtgctgaccagcggcatcttcgagaccaagttccaggtggacaaggtgaacttccacatgttcgacgtgggcggccagagagacgagagaagaaagtggatccagtgcttcaacgacgtgaccgccatcatcttcgtggtggccagcagcagctacaacatggtgatcagagaggacaaccagaccaacagactgcaggaggccctgaacctgttcaagagcatctggaacaacagatggctgagaaccatcagcgtgatcctgttcctgaacaagcaggacctgctggccgagaaggtgctggccggcaagagcaagatcgaggactacttccccgagttcgccagatacaccacccccgaggacgccacccccgagcccggcgaggaccccagagtgaccagagccaagtacttcatcagagacgagttcctgagaatcagcaccgccagcggcgacggcagacactactgctacccccacttcacctgcgccgtggacaccgagaacatcagaagagtgttcaacgactgcagagacatcatccagagaatgcacctgagacagtacgagctgctgtag

SEQ ID NO: 83493 - DNA, 1143 bp, synthetic construct
  misc_feature 1..1143: note = Description of Artificial Sequence: Synthetic coding sequence
  source 1..1143: mol_type = other DNA
atgggctgcctgggcaacagcaagaccgaggaccagagaaacgaggagaaggcccagagagaggccaacaagaagatcgagaagcagctgcagaaggacaagcaggtgtacagagccacccacagactgctgctgctgggcgccggcgagagcggcaagagcaccatcgtgaagcagatgagaatcctgcacgtgaacggcttcaacggcgacagcgagaaggccaccaaggtgcaggacatcaagaacaacctgaaggaggccatcgagaccatcgtggccgccatgagcaacctggtgccccccgtggagctggccaaccccgagaaccagttcagagtggactacatcctgagcgtgatgaacgtgcccgacttcgacttcccccccgagttctacgagcacgccaaggccctgtgggaggacgagggcgtgagagcctgctacgagagaagcaacgagtaccagctgatcgactgcgcccagtacttcctggacaagatcgacgtgatcaagcaggccgactacgtgcccagcgaccaggacctgctgagatgcagagtgctgaccagcggcatcttcgagaccaagttccaggtggacaaggtgaacttccacatgttcgacgtgggcggccagagagacgagagaagaaagtggatccagtgcttcaacgacgtgaccgccatcatcttcgtggtggccagcagcagctacaacatggtgatcagagaggacaaccagaccaacagactgcaggaggccctgaacctgttcaagagcatctggaacaacagatggctgagaaccatcagcgtgatcctgttcctgaacaagcaggacctgctggccgagaaggtgctggccggcaagagcaagatcgaggactacttccccgagttcgccagatacaccacccccgaggacgccacccccgagcccggcgaggaccccagagtgaccagagccaagtacttcatcagagacgagttcctgagaatcagcaccgccagcggcgacggcagacactactgctacccccacttcacctgcgccgtggacaccgagaacatcagaagagtgttcaacgactgcagagacatcatccagagaatgcacctgagacagtacgagctgctgtag

SEQ ID NO: 83494 - DNA, 738 bp, synthetic construct
  misc_feature 1..738: note = Description of Artificial Sequence: Synthetic coding sequence
  source 1..738: mol_type = other DNA
atggacagaagaagcagagcccagcagtggagaagagccagacacaactacaacgacctgtgcccccccatcggcagaagagccgccaccgccctgctgtggctgagctgcagcatcgccctgctgagagccctggccaccagcaacgccagagcccagcagagagccgccgcccagcagagaagaagcttcctgaacgcccaccacagaagcggcgcccaggtgttccccgagagccccgagagcgagagcgaccacgagcacgaggaggccgacctggagctgagcctgcccgagtgcctggagtacgaggaggagttcgactacgagaccgagagcgagaccgagagcgagatcgagagcgagaccgacttcgagaccgagcccgagaccgcccccaccaccgagcccgagaccgagcccgaggacgacagaggccccgtggtgcccaagcacagcaccttcggccagagcctgacccagagactgcacgccctgaagctgagaagccccgacgccagccccagcagagccccccccagcacccaggagccccagagccccagagagggcgaggagctgaagcccgaggacaaggaccccagagaccccgaggagagcaaggagcccaaggaggagaagcagagaagaagatgcaagcccaagaagcccaccagaagagacgccagccccgagagccccagcaagaagggccccatccccatcagaagacactag

SEQ ID NO: 83495 - DNA, 1188 bp, synthetic construct
  misc_feature 1..1188: note = Description of Artificial Sequence: Synthetic coding sequence
  source 1..1188: mol_type = other DNA
atgggctgcctgggcaacagcaagaccgaggaccagagaaacgaggagaaggcccagagagaggccaacaagaagatcgagaagcagctgcagaaggacaagcaggtgtacagagccacccacagactgctgctgctgggcgccggcgagagcggcaagagcaccatcgtgaagcagatgagaatcctgcacgtgaacggcttcaacggcgagggcggcgaggaggacccccaggccgccagaagcaacagcgacggcagcgagaaggccaccaaggtgcaggacatcaagaacaacctgaaggaggccatcgagaccatcgtggccgccatgagcaacctggtgccccccgtggagctggccaaccccgagaaccagttcagagtggactacatcctgagcgtgatgaacgtgcccgacttcgacttcccccccgagttctacgagcacgccaaggccctgtgggaggacgagggcgtgagagcctgctacgagagaagcaacgagtaccagctgatcgactgcgcccagtacttcctggacaagatcgacgtgatcaagcaggccgactacgtgcccagcgaccaggacctgctgagatgcagagtgctgaccagcggcatcttcgagaccaagttccaggtggacaaggtgaacttccacatgttcgacgtgggcggccagagagacgagagaagaaagtggatccagtgcttcaacgacgtgaccgccatcatcttcgtggtggccagcagcagctacaacatggtgatcagagaggacaaccagaccaacagactgcaggaggccctgaacctgttcaagagcatctggaacaacagatggctgagaaccatcagcgtgatcctgttcctgaacaagcaggacctgctggccgagaaggtgctggccggcaagagcaagatcgaggactacttccccgagttcgccagatacaccacccccgaggacgccacccccgagcccggcgaggaccccagagtgaccagagccaagtacttcatcagagacgagttcctgagaatcagcaccgccagcggcgacggcagacactactgctacccccacttcacctgcgccgtggacaccgagaacatcagaagagtgttcaacgactgcagagacatcatccagagaatgcacctgagacagtacgagctgctgtag

SEQ ID NO: 83496 - DNA, 738 bp, synthetic construct; identical to SEQ ID NO: 83494
  misc_feature 1..738: note = Description of Artificial Sequence: Synthetic coding sequence
  source 1..738: mol_type = other DNA

SEQ ID NO: 83497 - DNA, 483 bp, synthetic construct
  misc_feature 1..483: note = Description of Artificial Sequence: Synthetic coding sequence
  source 1..483: mol_type = other DNA
atgggctgcctgggcaacagcaagaccgaggaccagagaaacgaggagaaggcccagagagaggccaacaaggaggacaaccagaccaacagactgcaggaggccctgaacctgttcaagagcatctggaacaacagatggctgagaaccatcagcgtgatcctgttcctgaacaagcaggacctgctggccgagaaggtgctggccggcaagagcaagatcgaggactacttccccgagttcgccagatacaccacccccgaggacgccacccccgagcccggcgaggaccccagagtgaccagagccaagtacttcatcagagacgagttcctgagaatcagcaccgccagcggcgacggcagacactactgctacccccacttcacctgcgccgtggacaccgagaacatcagaagagtgttcaacgactgcagagacatcatccagagaatgcacctgagacagtacgagctgctgtag

SEQ ID NO: 83498 - DNA, 1185 bp, synthetic construct
  misc_feature 1..1185: note = Description of Artificial Sequence: Synthetic coding sequence
  source 1..1185: mol_type = other DNA
atgggctgcctgggcaacagcaagaccgaggaccagagaaacgaggagaaggcccagagagaggccaacaagaagatcgagaagcagctgcagaaggacaagcaggtgtacagagccacccacagactgctgctgctgggcgccggcgagagcggcaagagcaccatcgtgaagcagatgagaatcctgcacgtgaacggcttcaacggcgagggcggcgaggaggacccccaggccgccagaagcaacagcgacggcgagaaggccaccaaggtgcaggacatcaagaacaacctgaaggaggccatcgagaccatcgtggccgccatgagcaacctggtgccccccgtggagctggccaaccccgagaaccagttcagagtggactacatcctgagcgtgatgaacgtgcccgacttcgacttcccccccgagttctacgagcacgccaaggccctgtgggaggacgagggcgtgagagcctgctacgagagaagcaacgagtaccagctgatcgactgcgcccagtacttcctggacaagatcgacgtgatcaagcaggccgactacgtgcccagcgaccaggacctgctgagatgcagagtgctgaccagcggcatcttcgagaccaagttccaggtggacaaggtgaacttccacatgttcgacgtgggcggccagagagacgagagaagaaagtggatccagtgcttcaacgacgtgaccgccatcatcttcgtggtggccagcagcagctacaacatggtgatcagagaggacaaccagaccaacagactgcaggaggccctgaacctgttcaagagcatctggaacaacagatggctgagaaccatcagcgtgatcctgttcctgaacaagcaggacctgctggccgagaaggtgctggccggcaagagcaagatcgaggactacttccccgagttcgccagatacaccacccccgaggacgccacccccgagcccggcgaggaccccagagtgaccagagccaagtacttcatcagagacgagttcctgagaatcagcaccgccagcggcgacggcagacactactgctacccccacttcacctgcgccgtggacaccgagaacatcagaagagtgttcaacgactgcagagacatcatccagagaatgcacctgagacagtacgagctgctgtag

SEQ ID NO: 83499 - DNA, 1143 bp, synthetic construct; identical to SEQ ID NO: 83493
  misc_feature 1..1143: note = Description of Artificial Sequence: Synthetic coding sequence
  source 1..1143: mol_type = other DNA

SEQ ID NO: 83500 - DNA, 738 bp, synthetic construct; identical to SEQ ID NO: 83494
  misc_feature 1..738: note = Description of Artificial Sequence: Synthetic coding sequence
  source 1..738: mol_type = other DNA

SEQ ID NO: 83501 - DNA, 3114 bp, synthetic construct
  misc_feature 1..3114: note = Description of Artificial Sequence: Synthetic coding sequence
  source 1..3114: mol_type = other DNA
atgggcgtgagaaactgcctgtacggcaacaacatgagcggccagagagacatcccccccgagatcggcgagcagcccgagcagccccccctggaggcccccggcgccgccgcccccggcgccggccccagccccgccgaggagatggagaccgagcccccccacaacgagcccatccccgtggagaacgacggcgaggcctgcggcccccccgaggtgagcagacccaacttccaggtgctgaaccccgccttcagagaggccggcgcccacggcagctacagccccccccccgaggaggccatgcccttcgaggccgagcagcccagcctgggcggcttctggcccaccctggagcagcccggcttccccagcggcgtgcacgccggcctggaggccttcggccccgccctgatggagcccggcgccttcagcggcgccagacccggcctgggcggctacagccccccccccgaggaggccatgcccttcgagttcgaccagcccgcccagagaggctgcagccagctgctgctgcaggtgcccgacctggcccccggcggccccggcgccgccggcgtgcccggcgccccccccgaggagccccaggccctgagacccgccaaggccggcagcagaggcggctacagccccccccccgaggagaccatgcccttcgagctggacggcgagggcttcggcgacgacagccccccccccggcctgagcagagtgatcgcccaggtggacggcagcagccagttcgccgccgtggccgccagcagcgccgtgagactgacccccgccgccaacgccccccccctgtgggtgcccggcgccatcggcagccccagccaggaggccgtgagaccccccagcaacttcaccggcagcagcccctggatggagatcagcggcccccccttcgagatcggcagcgcccccgccggcgtggacgacacccccgtgaacatggacagcccccccatcgccctggacggcccccccatcaaggtgagcggcgcccccgacaagagagagagagccgagagaccccccgtggaggaggaggccgccgagatggagggcgccgccgacgccgccgagggcggcaaggtgcccagccccggctacggcagccccgccgccggcgccgccagcgccgacaccgccgccagagccgcccccgccgcccccgccgaccccgacagcggcgccacccccgaggaccccgacagcggcaccgcccccgccgaccccgacagcggcgccttcgccgccgaccccgacagcggcgccgcccccgccgcccccgccgaccccgacagcggcgccgcccccgacgcccccgccgaccccgacagcggcgccgcccccgacgcccccgccgaccccgacgccggcgccgcccccgaggcccccgccgcccccgccgccgccgagaccagagccgcccacgtggcccccgccgcccccgacgccggcgcccccaccgcccccgccgccagcgccaccagagccgcccaggtgagaagagccgccagcgccgcccccgccagcggcgccagaagaaagatccacctgagaccccccagccccgagatccaggccgccgacccccccacccccagacccaccagagccagcgcctggagaggcaagagcgagagcagcagaggcagaagagtgtactacgacgagggcgtggccagcagcgacgacgacagcagcggcgacgagagcgacgacggcaccagcggctgcctgagatggttccagcacagaagaaacagaagaagaagaaagccccagagaaacctgctgagaaacttcctggtgcaggccttcggcggctgcttcggcagaagcgagagcccccagcccaaggccagcagaagcctgaaggtgaagaaggtgcccctggccgagaagagaagacagatgagaaaggaggccctggagaagagagcccagaagagagccgagaagaagagaagcaagctgatcgacaagcagctgcaggacgagaagatgggctacatgtgcacccacagactgctgctgctgggcgccggcgagagcggcaagagcaccatcgtgaagcagatgagaatcctgcacgtgaacggcttcaacggcgagggcggcgaggaggacccccaggccgccagaagcaacagcgacggcgagaaggccaccaaggtgcaggacatcaagaacaacctgaaggaggccatcgagaccatcgtggccgccatgagcaacctggtgccccccgtggagctggccaaccccgagaaccagttcagagtggactacatcctgagcgtgatgaacgtgcccgacttcgacttcccccccgagttctacgagcacgccaaggccctgtgggaggacgagggcgtgagagcctgctacgagagaagcaacgagtaccagctgatcgactgcgcccagtacttcctggacaagatcgacgtgatcaagcaggccgactacgtgcccagcgaccaggacctgctgagatgcagagtgctgaccagcggcatcttcgagaccaagttccaggtggacaaggtgaacttccacatgttcgacgtgggcggccagagagacgagagaagaaagtggatccagtgcttcaacgacgtgaccgccatcatcttcgtggtggccagcagcagctacaacatggtgatcagagaggacaaccagaccaacagactgcaggaggccctgaacctgttcaagagcatctggaacaacagatggctgagaaccatcagcgtgatcctgttcctgaacaagcaggacctgctggccgagaaggtgctggccggcaagagcaagatcgaggactacttccccgagttcgccagatacaccacccccgaggacgccacccccgagcccggcgaggaccccagagtgaccagagccaagtacttcatcagagacgagttcctgagaatcagcaccgccagcggcgacggcagacactactgctacccccacttcacctgcgccgtggacaccgagaacatcagaagagtgttcaacgactgcagagacatcatccagagaatgcacctgagacagtacgagctgctgtag

SEQ ID NO: 83502 - DNA, 342 bp, synthetic construct
  misc_feature 1..342: note = Description of Artificial Sequence: Synthetic coding sequence
  source 1..342: mol_type = other DNA
tgaaccaccgagcccgagaccgagcccgaggacgacagaggccccgtggtgcccaagcacagcaccttcggccagagcctgacccagagactgcacgccctgaagctgagaagccccgacgccagccccagcagagccccccccagcacccaggagccccagagccccagagagggcgaggagctgaagcccgaggacaaggaccccagagaccccgaggagagcaaggagcccaaggaggagaagcagagaagaagatgcaagcccaagaagcccaccagaagagacgccagccccgagagccccagcaagaagggccccatccccatcagaagacactag

SEQ ID NO: 83503 - DNA, 501 bp, synthetic construct
  misc_feature 1..501: note = Description of Artificial Sequence: Synthetic coding sequence
  source 1..501: mol_type = other DNA
cccgagagcgagagcgaccacgagcacgaggaggccgacctggagctgagcctgcccgagtgcctggagtacgaggaggagttcgactacgagaccgagagcgagaccgagagcgagatcgagagcgagaccgacttcgagaccgagcccgagaccgcccccaccaccgagcccgagaccgagcccgaggacgacagaggccccgtggtgcccaagcacagcaccttcggccagagcctgacccagagactgcacgccctgaagctgagaagccccgacgccagccccagcagagccccccccagcacccaggagccccagagccccagagagggcgaggagctgaagcccgaggacaaggaccccagagaccccgaggagagcaaggagcccaaggaggagaagcagagaagaagatgcaagcccaagaagcccaccagaagagacgccagccccgagagccccagcaagaagggccccatccccatcagaagacactag

SEQ ID NO: 83504 - DNA, 5580 bp, synthetic construct
  misc_feature 1..5580: note = Description of Artificial Sequence: Synthetic coding sequence
  source 1..5580: mol_type = other DNA
atggtggacaagaacatctacatcatccagggcgagatcaacatcgtggtgggcgccatcaagagaaacgccagatggagcacccacacccccctggacgaggagagagaccccctgctgcacagcttcggccacctgaaggaggtgctgaacagcatcaccgagctgagcgagatcgagcccaacgtgttcctgagacccttcctggaggtgatcagaagcgaggacaccaccggccccatcaccggcctggccctgaccagcgtgaacaagttcctgagctacgccctgatcgaccccacccacgagggcaccgccgagggcatggagaacatggccgacgccgtgacccacgccagattcgtgggcaccgaccccgccagcgacgaggtggtgctgatgaagatcctgcaggtgctgagaaccctgctgctgacccccgtgggcgcccacctgaccaacgagagcgtgtgcgagatcatgcagagctgcttcagaatctgcttcgagatgagactgagcgagctgctgagaaagagcgccgagcacaccctggtggacatggtgcagctgctgttcaccagactgccccagttcaaggaggagcccaagaactacgtgggcaccaacatgaagaagctgaagatgagagccggcggcatgagcgacagcagcaagtggaagaagcagaagagaagccccagaccccccagacacatgaccaaggtgacccccggcagcgagctgcccacccccaacggcaccaccctgagcagcaacctgaccggcggcatgcccttcatcgacgtgcccacccccatcagcagcgccagcagcgaggccgccagcgccgtggtgagccccagcaccgacagcggcctggagttcagcagccagaccaccagcaaggaggacctgaccgacctggagcagcccggcagccccggctacagcaccgccaccgagcccggcagcagcgagctgggcgtgcccgagcagcccgacctgcaggagggcacccacgtggagaagagccagagcgccagcgtggagagcatccccgaggtgctggaggagtgcaccagccccgccgaccacagcgacagcgccagcgtgcacgacatggactacgtgaaccccagaggcgtgagattcacccagagcagccagaaggagggcaccgccctggtgccctacggcctgccctgcatcagagagctgttcagattcctgatcagcctgaccaacccccacgacagacacaacagcgaggtgatgatccacatgggcctgcacctgctgaccgtggccctggagagcgcccccgtggcccagtgccagaccctgctgggcctgatcaaggacgagatgtgcagacacctgttccagctgctgagcatcgagagactgaacctgtacgccgccagcctgagagtgtgcttcctgctgttcgagagcatgagagagcacctgaagttccagatggagatgtacatcaagaagctgatggagatcatcaccgtggagaaccccaagatgccctacgagatgaaggagatggccctggaggccatcgtgcagctgtggagaatccccagcttcgtgaccgagctgtacatcaactacgactgcgactactactgcagcaacctgttcgaggagctgaccaagctgctgagcaagaacgccttccccgtgagcggccagctgtacaccacccacctgctgagcctggacgccctgctgaccgtgatcgacagcaccgaggcccactgccaggccaaggtgctgaacagcctgacccagcaggagaagaaggagaccgccagacccagctgcgagatcgtggacggcaccagagaggccagcaacaccgagagaaccgccagcgacggcaaggccgtgggcatggccagcgacatccccggcctgcacctgcccggcggcggcagactgccccccgagcacggcaagagcggctgcagcgacctggaggaggccgtggacagcggcgccgacaagaagttcgccagaaagccccccagattcagctgcctgctgcccgaccccagagagctgatcgagatcaagaacaagaagaagctgctgatcaccggcaccgagcagttcaaccagaagcccaagaagggcatccagttcctgcaggagaagggcctgctgaccatccccatggacaacaccgaggtggcccagtggctgagagagaaccccagactggacaagaagatgatcggcgagttcgtgagcgacagaaagaacatcgacctgctggagagcttcgtgagcaccttcagcttccagggcctgagactggacgaggccctgagactgtacctggaggccttcagactgcccggcgaggcccccgtgatccagagactgctggaggccttcaccgagagatggatgaactgcaacggcagccccttcgccaacagcgacgcctgcttcagcctggcctacgccgtgatcatgctgaacaccgaccagcacaaccacaacgtgagaaagcagaacgcccccatgaccctggaggagttcagaaagaacctgaagggcgtgaacggcggcaaggacttcgagcaggacatcctggaggacatgtaccacgccatcaagaacgaggagatcgtgatgcccgaggagcagaccggcctggtgagagagaactacgtgtggaacgtgctgctgcacagaggcgccacccccgagggcatcttcctgagagtgcccaccgccagctacgacctggacctgttcaccatgacctggggccccaccatcgccgccctgagctacgtgttcgacaagagcctggaggagaccatcatccagaaggccatcagcggcttcagaaagtgcgccatgatcagcgcccactacggcctgagcgacgtgttcgacaacctgatcatcagcctgtgcaagttcaccgccctgagcagcgagagcatcgagaacctgcccagcgtgttcggcagcaaccccaaggcccacatcgccgccaagaccgtgttccacctggcccacagacacggcgacatcctgagagagggctggaagaacatcatggaggccatgctgcagctgttcagagcccagctgctgcccaaggccatgatcgaggtggaggacttcgtggaccccaacggcaagatcagcctgcagagagaggagacccccagcaacagaggcgagagcaccgtgctgagcttcgtgagctggctgaccctgagcggccccgagcagagcagcgtgagaggccccagcaccgagaaccaggaggccaagagagtggccctggagtgcatcaagcagtgcgaccccgagaagatgatcaccgagagcaagttcctgcagctggagagcctgcaggagctgatgaaggccctggtgagcgtgacccccgacgaggagacctacgacgaggaggacgccgccttctgcctggagatgctgctgagaatcgtgctggagaacagagacagagtgggctgcgtgtggcagaccgtgagagaccacctgtaccacctgtgcgtgcaggcccaggacttctgcttcctggtggagagagccgtggtgggcctgctgagactggccatcagactgctgagaagagaggagatcagcgcccaggtgctgctgagcctgagaatcctgctgctgatgaagcccagcgtgctgagcagagtgagccaccaggtggcctacggcctgcacgagctgctgaagaccaacgccgccaacatccacagcggcgacgactgggccaccctgttcaccctgctggagtgcatcggcagcggcgtgaagccccccgccgccctgcaggccaccgccagagccgacgcccccgacgccggcgcccagagcgacagcgagctgcccagctaccaccagaacgacgtgagcctggacagaggctacaccagcgacagcgaggtgtacaccgaccacggcagacccggcaagatccacagaagcgccaccgacgccgacgtggtgaacagcggctggctggtggtgggcaaggacgacgtggacaacagcaagcccggccccagcagacccggccccagccccctgatcaaccagtacagcctgaccgtgggcctggacctgggcccccacgacaccaagagcctgctgaagtgcgtggagagcctgagcttcatcgtgagagacgccgcccacatcacccccgacaacttcgagctgtgcgtgaagaccctgagaatcttcgtggaggccagcctgaacggcggctgcaagagccaggagaagagaggcaagagccacaagtacgacagcaagggcaacagattcaagaagaagagcaaggagggcagcatgctgagaagacccagaaccagcagccagcacgccagcagaggcggccagagcgacgacgacgaggacgagggcgtgcccgccagctaccacaccgtgagcctgcaggtgagccaggacctgctggacctgatgcacaccctgcacaccagagccgccagcatctacagcagctgggccgaggagcagagacacctggagaccggcggccagaagatcgaggccgacagcagaaccctgtgggcccactgctggtgccccctgctgcagggcatcgcctgcctgtgctgcgacgccagaagacaggtgagaatgcaggccctgacctacctgcagagagccctgctggtgcacgacctgcagaagctggacgccctggagtgggagagctgcttcaacaaggtgctgttccccctgctgaccaagctgctggagaacatcagccccgccgacgtgggcggcatggaggagaccagaatgagagccagcaccctgctgagcaaggtgttcctgcagcacctgagccccctgctgagcctgagcaccttcgccgccctgtggctgaccatcctggacttcatggacaagtacatgcacgccggcagcagcgacctgctgagcgaggccatccccgagagcctgaagaacatgctgctggtgatggacaccgccgagatcttccacagcgccgacgccagaggcggcggccccagcgccctgtgggagatcacctgggagagaatcgactgcttcctgccccacctgagagacgagctgttcaagcagaccgtgatccaggaccccatgcccatggagccccagggccagaagcccctggccagcgcccacctgaccagcgccgccggcgacaccagaacccccggccacccccccccccccgagatccccagcgagctgggcgcctgcgacttcgagaagcccgagagccccagagccgccagcagcagcagccccggcagccccgtggccagcagccccagcagactgagccccacccccgacggccccccccccctggcccagccccccctgatcctgcagcccctggccagccccctgcaggtgggcgtgccccccatgaccctgcccatcatcctgaaccccgccctgatcgaggccaccagccccgtgcccctgctggccacccccagacccaccgaccccatccccaccagcgaggtgaactag

SEQ ID NO: 83505 - DNA, 1749 bp, synthetic construct
  misc_feature 1..1749: note = Description of Artificial Sequence: Synthetic coding sequence
  source 1..1749: mol_type = other DNA
atgggcggcagcagccccgtgaccagcaaggccatcgtggacgccgacggcagaatctacatcagaaactggcagggcggcatcctgagcggcggcttcgagaagaaccccaagcccatcttcaccgagggcaagaaccagctggagatccagaacctgcaggaggactgggaccacttcgagcccctgctgagcagcctgctgagaagaatgcccgagctggagaccctggagatcatgaagctggtgaactgccccgagaccttcacccccgacatgagatgcatcatgggcgagagccccgccgtgcagggctacttcgtgctggccggcatgaacagcgccggcctgagcttcggcggcggcgccggcaagtacctggccgagtggatggtgcacggctaccccagcgagaacgtgtgggagctggacctgaagagattcggcgccctgcagagcagcagaaccttcctgagacacagagtgatggaggtgatgcccctgatgtacgacctgaaggtgcccagatgggacttccagaccggcagacagctgagaaccagccccctgtacgacagactggacgcccagggcgccagatggatggagaagcacggcttcgagagacccaagtacttcgtgccccccgacaaggacctgctggccctggagcagagcaagaccttctacaagcccgactggttcgacatcgtggagagcgaggtgaagtgctgcaaggaggccgtgtgcgtgatcgacatgagcagcttcaccaagttcgagatcaccagcaccggcgaccaggccctggaggtgctgcagtacctgttcagcaacgacctggacgtgcccgtgggccacatcgtgcacaccggcatgctgaacgagggcggcggctacgagaacgactgcagcatcgccagactgaacaagagaagcttcttcatgatcagccccaccgaccagcaggtgcactgctgggcctggctgaagaagcacatgcccaaggacagcaacctgctgctggaggacgtgacctggaagtacaccgccctgaacctgatcggccccagagccgtggacgtgctgagcgagctgagctacgcccccatgacccccgaccacttccccagcctgttctgcaaggagatgagcgtgggctacgccaacggcatcagagtgatgagcatgacccacaccggcgagcccggcttcatgctgtacatccccatcgagggcatggacttcatcggcagagacgccctgctgcagcagaagcagaacggcgtgtacaagagactgaccatgttcatcctggacgaccacgacagcgacctggacctgtggccctggtggggcgagcccatctacagaaacggccagtacgtgggcaagaccaccagcagcgcctacagctacagcctggagagacacgtgtgcctgggcttcgtgcacaacttcagcgaggacaccggcgaggagcaggtggtgaccgccgacttcatcaacagaggcgagtacgagatcgacatcgccggctacagattccaggccaaggccaagctgtaccccgtggccagcctgttcacccagaagagaagaaaggacgacatggagctgagcgccttcctggccctgcccccccccccccccaacatccacagcggcctgttcttccccagccaccccagcctgagcttcagctggtggcaggaggtgtgcctgaccggccagaagcaggccccctag

SEQ ID NO: 83506 - DNA, 3540 bp, synthetic construct
  misc_feature 1..3540: note = Description of Artificial Sequence: Synthetic coding sequence
  source 1..3540: mol_type = other DNA
atggccgcctgcggcagagtgagaagaatgttcagactgagcgccgccctgcacctgctgctgctgttcgccgccggcgccgagaagctgcccggccagggcgtgcacagccagggccagggccccggcgccaacttcgtgagcttcgtgggccaggccggcggcggcggccccgccggccagcagctgccccagctgccccagagcagccagctgcagcagcagcagcagcagcagcagcagcagcagcagccccagcccccccagccccccttccccgccggcggcccccccgccagaagaggcggcgccggcgccggcggcggctggaagctggccgaggaggagagctgcagagaggacgtgaccagagtgtgccccaagcacacctggagcaacaacctggccgtgctggagtgcctgcaggacgtgagagagcccgagaacgagatcagcagcgactgcaaccacctgctgtggaactacaagctgaacctgaccaccgaccccaagttcgagagcgtggccagagaggtgtgcaagagcaccatcaccgagatcaaggagtgcgccgacgagcccgtgggcaagggctacatggtgagctgcctggtggaccacagaggcaacatcaccgagtaccagtgccaccagtacatcaccaagatgaccgccatcatcttcagcgactacagactgatctgcggcttcatggacgactgcaagaacgacatcaacatcctgaagtgcggcagcatcagactgggcgagaaggacgcccacagccagggcgaggtggtgagctgcctggagaagggcctggtgaaggaggccgaggagagagagcccaagatccaggtgagcgagctgtgcaagaaggccatcctgagagtggccgagctgagcagcgacgacttccacctggacagacacctgtacttcgcctgcagagacgacagagagagattctgcgagaacacccaggccggcgagggcagagtgtacaagtgcctgttcaaccacaagttcgaggagagcatgagcgagaagtgcagagaggccctgaccaccagacagaagctgatcgcccaggactacaaggtgagctacagcctggccaagagctgcaagagcgacctgaagaagtacagatgcaacgtggagaacctgcccagaagcagagaggccagactgagctacctgctgatgtgcctggagagcgccgtgcacagaggcagacaggtgagcagcgagtgccagggcgagatgctggactacagaagaatgctgatggaggacttcagcctgagccccgagatcatcctgagctgcagaggcgagatcgagcaccactgcagcggcctgcacagaaagggcagaaccctgcactgcctgatgaaggtggtgagaggcgagaagggcaacctgggcatgaactgccagcaggccctgcagaccctgatccaggagaccgaccccggcgccgactacagaatcgacagagccctgaacgaggcctgcgagagcgtgatccagaccgcctgcaagcacatcagaagcggcgaccccatgatcctgagctgcctgatggagcacctgtacaccgagaagatggtggaggactgcgagcacagactgctggagctgcagtacttcatcagcagagactggaagctggaccccgtgctgtacagaaagtgccagggcgacgccagcagactgtgccacacccacggctggaacgagaccagcgagttcatgccccagggcgccgtgttcagctgcctgtacagacacgcctacagaaccgaggagcagggcagaagactgagcagagagtgcagagccgaggtgcagagaatcctgcaccagagagccatggacgtgaagctggaccccgccctgcaggacaagtgcctgatcgacctgggcaagtggtgcagcgagaagaccgagaccggccaggagctggagtgcctgcaggaccacctggacgacctggtggtggagtgcagagacatcgtgggcaacctgaccgagctggagagcgaggacatccagatcgaggccctgctgatgagagcctgcgagcccatcatccagaacttctgccacgacgtggccgacaaccagatcgacagcggcgacctgatggagtgcctgatccagaacaagcaccagaaggacatgaacgagaagtgcgccatcggcgtgacccacttccagctggtgcagatgaaggacttcagattcagctacaagttcaagatggcctgcaaggaggacgtgctgaagctgtgccccaacatcaagaagaaggtggacgtggtgatctgcctgagcaccaccgtgagaaacgacaccctgcaggaggccaaggagcacagagtgagcctgaagtgcagaagacagctgagagtggaggagctggagatgaccgaggacatcagactggagcccgacctgtacgaggcctgcaagagcgacatcaagaacttctgcagcgccgtgcagtacggcaacgcccagatcatcgagtgcctgaaggagaacaagaagcagctgagcaccagatgccaccagaaggtgttcaagctgcaggagaccgagatgatggaccccgagctggactacaccctgatgagagtgtgcaagcagatgatcaagagattctgccccgaggccgacagcaagaccatgctgcagtgcctgaagcagaacaagaacagcgagctgatggaccccaagtgcaagcagatgatcaccaagagacagatcacccagaacaccgactacagactgaaccccatgctgagaaaggcctgcaaggccgacatccccaagttctgccacggcatcctgaccaaggccaaggacgacagcgagctggagggccaggtgatcagctgcctgaagctgagatacgccgaccagagactgagcagcgactgcgaggaccagatcagaatcatcatccaggagagcgccctggactacagactggacccccagctgcagctgcactgcagcgacgagatcagcagcctgtgcgccgaggaggccgccgcccaggagcagaccggccaggtggaggagtgcctgaaggtgaacctgctgaagatcaagaccgagctgtgcaagaaggaggtgctgaacatgctgaaggagagcaaggccgacatcttcgtggaccccgtgctgcacaccgcctgcgccctggacatcaagcaccactgcgccgccatcacccccggcagaggcagacagatgagctgcctgatggaggccctggaggacaagagagtgagactgcagcccgagtgcaagaagagactgaacgacagaatcgagatgtggagctacgccgccaaggtggcccccgccgacggcttcagcgacctggccatgcaggtgatgaccagccccagcaagaactacatcctgagcgtgatcagcggcagcatctgcatcctgttcctgatcggcctgatgtgcggcagaatcaccaagagagtgaccagagagctgaaggacagatag

SEQ ID NO: 83507 - DNA, 3579 bp, synthetic construct
  misc_feature 1..3579: note = Description of Artificial Sequence: Synthetic coding sequence
  source 1..3579: mol_type = other DNA
atggccgcctgcggcagagtgagaagaatgttcagactgagcgccgccctgcacctgctgctgctgttcgccgccggcgccgagaagctgcccggccagggcgtgcacagccagggccagggccccggcgccaacttcgtgagcttcgtgggccaggccggcggcggcggccccgccggccagcagctgccccagctgccccagagcagccagctgcagcagcagcagcagcagcagcagcagcagcagcagccccagcccccccagccccccttccccgccggcggcccccccgccagaagaggcggcgccggcgccggcggcggctggaagctggccgaggaggagagctgcagagaggacgtgaccagagtgtgccccaagcacacctggagcaacaacctggccgtgctggagtgcctgcaggacgtgagagagctgctgtggaactacaagctgaacctgaccaccgaccccaagttcgagagcgtggccagagaggtgtgcaagagcaccatcaccgagatcaaggagtgcgccgacgagcccgtgggcaagggctacatggtgagctgcctggtggaccacagaggcaacatcaccgagtaccagtgccaccagtacatcaccaagatgaccgccatcatcttcagcgactacagactgatctgcggcttcatggacgactgcaagaacgacatcaacatcctgaagtgcggcagcatcagactgggcgagaaggacgcccacagccagggcgaggtggtgagctgcctggagaagggcctggtgaaggaggccgaggagagagagcccaagatccaggtgagcgagctgtgcaagaaggccatcctgagagtggccgagctgagcagcgacgacttccacctggacagacacctgtacttcgcctgcagagacgacagagagagattctgcgagaacacccaggccggcgagggcagagtgtacaagtgcctgttcaaccacaagttcgaggagagcatgagcgagaagtgcagagaggccctgaccaccagacagaagctgatcgcccaggactacaaggtgagctacagcctggccaagagctgcaagagcgacctgaagaagtacagatgcaacgtggagaacctgcccagaagcagagaggccagactgagctacctgctgatgtgcctggagagcgccgtgcacagaggcagacaggtgagcagcgagtgccagggcgagatgctggactacagaagaatgctgatggaggacttcagcctgagccccgagatcatcctgagctgcagaggcgagatcgagcaccactgcagcggcctgcacagaaagggcagaaccctgcactgcctgatgaaggtggtgagaggcgagaagggcaacctgggcatgaactgccagcaggccctgcagaccctgatccaggagaccgaccccggcgccgactacagaatcgacagagccctgaacgaggcctgcgagagcgtgatccagaccgcctgcaagcacatcagaagcggcgaccccatgatcctgagctgcctgatggagcacctgtacaccgagaagatggtggaggactgcgagcacagactgctggagctgcagtacttcatcagcagagactggaagctggaccccgtgctgtacagaaagtgccagggcgacgccagcagactgtgccacacccacggctggaacgagaccagcgagttcatgccccagggcgccgtgttcagctgcctgtacagacacgcctacagaaccgaggagcagggcagaagactgagcagagagtgcagagccgaggtgcagagaatcctgcaccagagagccatggacgtgaagctggaccccgccctgcaggacaagtgcctgatcgacctgggcaagtggtgcagcgagaagaccgagaccggccaggagctggagtgcctgcaggaccacctggacgacctggtggtggagtgcagagacatcgtgggcaacctgaccgagctggagagcgaggacatccagatcgaggccctgctgatgagagcctgcgagcccatcatccagaacttctgccacgacgtggccgacaaccagatcgacagcggcgacctgatggagtgcctgatccagaacaagcaccagaaggacatgaacgagaagtgcgccatcggcgtgacccacttccagctggtgcagatgaaggacttcagattcagctacaagttcaagatggcctgcaaggaggacgtgctgaagctgtgccccaacatcaagaagaaggtggacgtggtgatctgcctgagcaccaccgtgagaaacgacaccctgcaggaggccaaggagcacagagtgagcctgaagtgcagaagacagctgagagtggaggagctggagatgaccgaggacatcagactggagcccgacctgtacgaggcctgcaagagcgacatcaagaacttctgcagcgccgtgcagtacggcaacgcccagatcatcgagtgcctgaaggagaacaagaagcagctgagcaccagatgccaccagaaggtgttcaagctgcaggagaccgagatgatggaccccgagctggactacaccctgatgagagtgtgcaagcagatgatcaagagattctgccccgaggccgacagcaagaccatgctgcagtgcctgaagcagaacaagaacagcgagctgatggaccccaagtgcaagcagatgatcaccaagagacagatcacccagaacaccgactacagactgaaccccatgctgagaaaggcctgcaaggccgacatccccaagttctgccacggcatcctgaccaaggccaaggacgacagcgagctggagggccaggtgatcagctgcctgaagctgagatacgccgaccagagactgagcagcgactgcgaggaccagatcagaatcatcatccaggagagcgccctggactacagactggacccccagctgcagctgcactgcagcgacgagatcagcagcctgtgcgccgaggaggccgccgcccaggagcagaccggccaggtggaggagtgcctgaaggtgaacctgctgaagatcaagaccgagctgtgcaagaaggaggtgctgaacatgctgaaggagagcaaggccgacatcttcgtggaccccgtgctgcacaccgcctgcgccctggacatcaagcaccactgcgccgccatcacccccggcagaggcagacagatgagctgcctgatggaggccctggaggacaagagagtgagactgcagcccgagtgcaagaagagactgaacgacagaatcgagatgtggagctacgccgccaaggtggcccccgccgacggcttcagcgacctggccatgcaggtgatgaccagccccagcaagaactacatcctgagcgtgatcagcggcagcatctgcatcctgttcctgatcggcctgatgtgcggcagaatcaccaagagagtgaccagagagctgaaggacagactgcagtacagaagcgagaccatggcctacaagggcctggtgtggagccaggacgtgaccggcagccccgcctag

SEQ ID NO: 83508 - DNA, 2091 bp, synthetic construct
  misc_feature 1..2091: note = Description of Artificial Sequence: Synthetic coding sequence
  source 1..2091: mol_type = other DNA
atgggcaacggcatgtgcagcagaaagcagaagagaatcttccagaccctgctgctgctgaccgtggtgttcggcttcctgtacggcgccatgctgtactacgagctgcagacccagctgagaaaggccgaggccgtggccctgaagtaccagcagcaccaggagagcctgagcgcccagctgcaggtggtgtacgagcacagaagcagactggagaagagcctgcagaaggagagactggagcacaagaaggccaaggaggacttcctggtgtacaagctggaggcccaggagaccctgaacaagggcagacaggacagcaacagcagatacagcgccctgaacgtgcagcaccagatgctgaagagccagcacgaggagctgaagaagcagcacagcgacctggaggaggagcacagaaagcagggcgaggacttcagcagaaccttcaacgaccacaagcagaagtacctgcagctgcagcaggagaaggagcaggagctgagcaagctgaaggagaccgtgtacaacctgagagaggagaacagacagctgagaaaggcccaccaggacatccacacccagctgcaggacgtgaagcagcagcacaagaacctgctgagcgagcacgagcagctggtggtgaccctggaggaccacaagagcgccctggccgccgcccagacccaggtggccgagtacaagcagctgaaggacaccctgaacagaatccccagcctgagaaagcccgaccccgccgagcagcagaacgtgacccaggtggcccacagcccccagggctacaacaccgccagagagaagcccaccagagaggtgcaggaggtgagcagaaacaacgacgtgtggcagaaccacgaggccgtgcccggcagagccgaggacaccaagctgtacgcccccacccacaaggaggccgagttccaggccccccccgagcccatccagcaggaggtggagagaagagagcccgaggagcaccaggtggaggaggagcacagaaaggccctggaggaggaggagatggagcaggtgggccaggccgagcacctggaggaggagcacgaccccagccccgaggagcaggacagagagtggaaggagcagcacgagcagagagaggccgccaacctgctggagggccacgccagagccgaggtgtaccccagcgccaagcccatgatcaagttccagagcccctacgaggagcagctggagcagcagagactggccgtgcagcaggtggaggaggcccagcagctgagagagcaccaggaggccctgcaccagcagagactgcagggccacctgctgagacagcaggagcagcagcagcagcaggtggccagagagatggccctgcagagacaggccgagctggaggagggcagaccccagcaccaggagcagctgagacagcaggcccactacgacgccatggacaacgacatcgtgcagggcgccgaggaccagggcatccagggcgaggagggcgcctacgagagagacaaccagcaccaggacgaggccgagggcgaccccggcaacagacacgagcccagagagcagggccccagagaggccgaccccgagagcgaggccgacagagccgccgtggaggacatcaaccccgccgacgaccccaacaaccagggcgaggacgagttcgaggaggccgagcaggtgagagaggagaacctgcccgacgagaacgaggagcagaagcagagcaaccagaagcaggagaacaccgaggtggaggagcacctggtgatggccggcaaccccgaccagcaggaggacaacgtggacgagcagtaccaggaggaggccgaggaggaggtgcaggaggacctgaccgaggagaagaagagagagctggagcacaacgccgaggagacctacggcgagaacgacgagaacaccgacgacaagaacaacgacggcgaggagcaggaggtgagagacgacaacagacccaagggcagagaggagcactacgaggaggaggaggaggaggaggaggacggcgccgccgtggccgagaagagccacagaagagccgagatgtag

SEQ ID NO: 83509 - DNA, 897 bp, synthetic construct
  misc_feature 1..897: note = Description of Artificial Sequence: Synthetic coding sequence
  source 1..897: mol_type = other DNA
atgaccagcctgacccagagaagcagcggcctggtgcagagaagaaccgaggccagcagaaacgccgccgacaaggagagagccgccggcggcggcgccggcagcagcgaggacgacgcccagagcagaagagacgagcaggacgacgacgacaagggcgacagcaaggagaccagactgaccctgatggaggaggtgctgctgctgggcctgaaggacagagagggctacaccagcttctggaacgactgcatcagcagcggcctgagaggctgcatgctgatcgagctggccctgagaggcagactgcagctggaggcctgcggcatgagaagaaagagcctgctgaccagaaaggtgatctgcaagagcgacgcccccaccggcgacgtgctgctggacgaggccctgaagcacgtgaaggagacccagccccccgagaccgtgcagaactggatcgagctgctgagcggcgagacctggaaccccctgaagctgcactaccagctgagaaacgtgagagagagactggccaagaacctggtggagaagggcgtgctgaccaccgagaagcagaacttcctgctgttcgacatgaccacccaccccctgaccaacaacaacatcaagcagagactgatcaagaaggtgcaggaggccgtgctggacaagtgggtgaacgacccccacagaatggacagaagactgctggccctgatctacctggcccacgccagcgacgtgctggagaacgccttcgcccccctgctggacgagcagtacgacctggccaccaagagagtgagacagctgctggacctggaccccgaggtggagtgcctgaaggccaacaccaacgaggtgctgtgggccgtggtggccgccttcaccaagtag

SEQ ID NO: 83510 - DNA, 846 bp, synthetic construct
  misc_feature 1..846: note = Description of Artificial Sequence: Synthetic coding sequence
  source 1..846: mol_type = other DNA
atgaccagcctgacccagagaagcagcggcctggtgcagagaagaaccgaggccagcagaaacgccgccgacagcagaagagacgagcaggacgacgacgacaagggcgacagcaaggagaccagactgaccctgatggaggaggtgctgctgctgggcctgaaggacagagagggctacaccagcttctggaacgactgcatcagcagcggcctgagaggctgcatgctgatcgagctggccctgagaggcagactgcagctggaggcctgcggcatgagaagaaagagcctgctgaccagaaaggtgatctgcaagagcgacgcccccaccggcgacgtgctgctggacgaggccctgaagcacgtgaaggagacccagccccccgagaccgtgcagaactggatcgagctgctgagcggcgagacctggaaccccctgaagctgcactaccagctgagaaacgtgagagagagactggccaagaacctggtggagaagggcgtgctgaccaccgagaagcagaacttcctgctgttcgacatgaccacccaccccctgaccaacaacaacatcaagcagagactgatcaagaaggtgcaggaggccgtgctggacaagtgggtgaacgacccccacagaatggacagaagactgctggccctgatctacctggcccacgccagcgacgtgctggagaacgccttcgcccccctgctggacgagcagtacgacctggccaccaagagagtgagacagctgctggacctggaccccgaggtggagtgcctgaaggccaacaccaacgaggtgctgtgggccgtggtggccgccttcaccaagtag

SEQ ID NO: 83511 - DNA, 858 bp, synthetic construct
  misc_feature 1..858: note = Description of Artificial Sequence: Synthetic coding sequence
  source 1..858: mol_type = other DNA
atgaccaccctgacccacagagccagaagaaccgagatcagcaagaacagcgagaagaagatggagagcgaggaggacagcaactgggagaagagccccgacaacgaggacagcggcgacagcaaggacatcagactgaccctgatggaggaggtgctgctgctgggcctgaaggacaaggagggctacaccagcttctggaacgactgcatcagcagcggcctgagaggcggcatcctgatcgagctggccatgagaggcagaatctacctggagccccccaccatgagaaagaagagactgctggacagaaaggtgctgctgaagagcgacagccccaccggcgacgtgctgctggacgagaccctgaagcacatcaaggccaccgagcccaccgagaccgtgcagacctggatcgagctgctgaccggcgagacctggaaccccttcaagctgcagtaccagctgagaaacgtgagagagagaatcgccaagaacctggtggagaagggcatcctgaccaccgagaagcagaacttcctgctgttcgacatgaccacccaccccgtgaccaacaccaccgagaagcagagactggtgaagaagctgcaggacagcgtgctggagagatgggtgaacgacccccagagaatggacaagagaaccctggccctgctggtgctggcccacagcagcgacgtgctggagaacgtgttcagcagcctgaccgacgacaagtacgacgtggccatgaacagagccaaggacctggtggagctggaccccgaggtggagggcaccaagcccagcgccaccgagatgatctgggccgtgctggccgccttcaacaagagctag

SEQ ID NO: 83512 - DNA, 924 bp, synthetic construct
  misc_feature 1..924: note = Description of Artificial Sequence: Synthetic coding sequence
  source 1..924: mol_type = other DNA
atgaccaccctgacccacagagccagaagaaccgagatcagcaagaacagcgagaagaagatggagagcgaggaggacagcaactgggagaagagccccgacaacgaggacagcggcgacagcaaggacatcagactgaccctgatggaggaggtgctgctgctgggcctgaaggacaaggaggccaacatcaacagctggatcaccagatggctgacccccgtgatccccgccctgtggggcgccgagggctacaccagcttctggaacgactgcatcagcagcggcctgagaggcggcatcctgatcgagctggccatgagaggcagaatctacctggagccccccaccatgagaaagaagagactgctggacagaaaggtgctgctgaagagcgacagccccaccggcgacgtgctgctggacgagaccctgaagcacatcaaggccaccgagcccaccgagaccgtgcagacctggatcgagctgctgaccggcgagacctggaaccccttcaagctgcagtaccagctgagaaacgtgagagagagaatcgccaagaacctggtggagaagggcatcctgaccaccgagaagcagaacttcctgctgttcgacatgaccacccaccccgtgaccaacaccaccgagaagcagagactggtgaagaagctgcaggacagcgtgctggagagatgggtgaacgacccccagagaatggacaagagaaccctggccctgctggtgctggcccacagcagcgacgtgctggagaacgtgttcagcagcctgaccgacgacaagtacgacgtggccatgaacagagccaaggacctggtggagctggaccccgaggtggagggcaccaagcccagcgccaccgagatgatctgggccgtgctggccgccttcaacaagagctag

SEQ ID NO: 83513 - DNA, 810 bp, synthetic construct
  misc_feature 1..810: note = Description of Artificial Sequence: Synthetic coding sequence
  source 1..810: mol_type = other DNA
atgaccaccctgacccacagagccagaagaaccgagatcagcaagaacagcgagaagaagatggagagcgaggaggacagcaactgggagaagagccccgacaacgaggacagcggcgacagcaaggacatcagactgaccctgatggaggaggtgctgctgctgggcctgaaggacaaggaggccaacatcaacagctggatcaccagatggctgacccccgtgatccccgccctgtggggcgccgagggctacaccagcttctggaacgactgcatcagcagcggcctgagaggcggcatcctgatcgagctggccatgagaggcagaatctacctggagccccccaccatgagaaagaagagactgctggacagaaaggtgctgctgaagagcgacagccccaccggcgacgtgctgctggacgagaccctgaagcacatcaaggccaccgagcccaccgagaccgtgcagacctggatcgagctgctgaccggcgagacctggaaccccttcaagctgcagtaccagctgagaaacgtgagagagagaatcgccaagaacctggtggagaagggcatcctgaccaccgagaagcagaacttcctgctgttcgacatgaccacccaccccgtgaccaacaccaccgagaagcagagactggtgaagaagctgcaggacagcgtgctggagagatgggtgaacgacccccagagaatggacaagagaaccctggccctgctggtgctggcccacagcagcgacgtgctggagaacgtgttcagcagcctgaccgacgacaagtactag

SEQ ID NO: 83514 - DNA, 726 bp, synthetic construct
  misc_feature 1..726: note = Description of Artificial Sequence: Synthetic coding sequence
  source 1..726: mol_type = other DNA
atgaccaccctgacccacagagccagaagaaccgagatcagcaagaacagcgagaagaagatggagagcgaggaggacagcaactgggagaagagccccgacaacgaggacagcggcgacagcaaggacatcagactgaccctgatggaggaggtgctgctgctgggcctgaaggacaaggaggtgctgctgaagagcgacagccccaccggcgacgtgctgctggacgagaccctgaagcacatcaaggccaccgagcccaccgagaccgtgcagacctggatcgagctgctgaccggcgagacctggaaccccttcaagctgcagtaccagctgagaaacgtgagagagagaatcgccaagaacctggtggagaagggcatcctgaccaccgagaagcagaacttcctgctgttcgacatgaccacccaccccgtgaccaacaccaccgagaagcagagactggtgaagaagctgcaggacagcgtgctggagagatgggtgaacgacccccagagaatggacaagagaaccctggccctgctggtgctggcccacagcagcgacgtgctggagaacgtgttcagcagcctgaccgacgacaagtacgacgtggccatgaacagagccaaggacctggtggagctggaccccgaggtggagggcaccaagcccagcgccaccgagatgatctgggccgtgctggccgccttcaacaagagctag

SEQ ID NO: 83515 - DNA, 1323 bp, synthetic construct
  misc_feature 1..1323: note = Description of Artificial Sequence: Synthetic coding sequence
  source 1..1323: mol_type = other DNA
atgggcctgggcgtgagcgccgagcagcccgccggcggcgccgagggcttccacctgcacggcgtgcaggagaacagccccgcccagcaggccggcctggagccctacttcgacttcatcatcaccatcggccacagcagactgaacaaggagaacgacaccctgaaggccctgctgaaggccaacgtggagaagcccgtgaagctggaggtgttcaacatgaagaccatgagagtgagagaggtggaggtggtgcccagcaacatgtggggcggccagggcctgctgggcgccagcgtgagattctgcagcttcagaagagccagcgagcaggtgtggcacgtgctggacgtggagcccagcagccccgccgccctggccggcctgagaccctacaccgactacgtggtgggcagcgaccagatcctgcaggagagcgaggacttcttcaccctgatcgagagccacgagggcaagcccctgaagctgatggtgtacaacagcaagagcgacagctgcagagaggtgaccgtgacccccaacgccgcctggggcggcgagggcagcctgggctgcggcatcggctacggctacctgcacagaatccccacccagccccccagctaccacaagaagccccccggcacccccccccccagcgccctgcccctgggcgcccccccccccgacgccctgccccccggccccacccccgaggacagccccagcctggagaccggcagcagacagagcgactacatggaggccctgctgcaggcccccggcagcagcatggaggaccccctgcccggccccggcagccccagccacagcgcccccgaccccgacggcctgccccacttcatggagacccccctgcagccccccccccccgtgcagagagtgatggaccccggcttcctggacgtgagcggcatcagcctgctggacaacagcaacgccagcgtgtggcccagcctgcccagcagcaccgagctgaccaccaccgccgtgagcaccagcggccccgaggacatctgcagcagcagcagcagccacgagagaggcggcgaggccacctggagcggcagcgagttcgaggtgagcttcctggacagccccggcgcccaggcccaggccgaccacctgccccagctgaccctgcccgacagcctgaccagcgccgccagccccgaggacggcctgagcgccgagctgctggaggcccaggccgaggaggagcccgccagcaccgagggcctggacaccggcaccgaggccgagggcctggacagccaggcccagatcagcaccaccgagtag

SEQ ID NO: 83516 - DNA, 4143 bp, synthetic construct
  misc_feature 1..4143: note = Description of Artificial Sequence: Synthetic coding sequence
  source 1..4143: mol_type = other DNA
atggccagcggcagagacgagagacccccctggagactgggcagactgctgctgctgatgtgcctgctgctgctgggcagcagcgccagagccgcccacatcaagaaggccgaggccaccaccaccaccaccagcgccggcgccgaggccgccgagggccagttcgacagatactaccacgaggaggagctggagagcgccctgagagaggccgccgccgccggcctgcccggcctggccagactgttcagcatcggcagaagcgtggagggcagacccctgtgggtgctgagactgaccgccggcctgggcagcctgatccccgagggcgacgccggccccgacgccgccggccccgacgccgccggccccctgctgcccggcagaccccaggtgaagctggtgggcaacatgcacggcgacgagaccgtgagcagacaggtgctgatctacctggccagagagctggccgccggctacagaagaggcgaccccagactggtgagactgctgaacaccaccgacgtgtacctgctgcccagcctgaaccccgacggcttcgagagagccagagagggcgactgcggcttcggcgacggcggccccagcggcgccagcggcagagacaacagcagaggcagagacctgaacagaagcttccccgaccagttcagcaccggcgagccccccgccctggacgaggtgcccgaggtgagagccctgatcgagtggatcagaagaaacaagttcgtgctgagcggcaacctgcacggcggcagcgtggtggccagctaccccttcgacgacagccccgagcacaaggccaccggcatctacagcaagaccagcgacgacgaggtgttcaagtacctggccaaggcctacgccagcaaccaccccatcatgaagaccggcgagccccactgccccggcgacgaggacgagaccttcaaggacggcatcaccaacggcgcccactggtacgacgtggagggcggcatgcaggactacaactacgtgtgggccaactgcttcgagatcaccctggagctgagctgctgcaagtacccccccgccagccagctgagacaggagtgggagaacaacagagagagcctgatcaccctgatcgagaaggtgcacatcggcgtgaagggcttcgtgaaggacagcatcaccggcagcggcctggagaacgccaccatcagcgtggccggcatcaaccacaacatcaccaccggcagattcggcgacttctacagactgctggtgcccggcacctacaacctgaccgtggtgctgaccggctacatgcccctgaccgtgaccaacgtggtggtgaaggagggccccgccaccgaggtggacttcagcctgagacccaccgtgaccagcgtgatccccgacaccaccgaggccgtgagcaccgccagcaccgtggccatccccaacatcctgagcggcaccagcagcagctaccagcccatccagcccaaggacttccaccaccaccacttccccgacatggagatcttcctgagaagattcgccaacgagtaccccaacatcaccagactgtacagcctgggcaagagcgtggagagcagagagctgtacgtgatggagatcagcgacaaccccggcgtgcacgagcccggcgagcccgagttcaagtacatcggcaacatgcacggcaacgaggtggtgggcagagagctgctgctgaacctgatcgagtacctgtgcaagaacttcggcaccgaccccgaggtgaccgacctggtgcacaacaccagaatccacctgatgcccagcatgaaccccgacggctacgagaagagccaggagggcgacagcatcagcgtgatcggcagaaacaacagcaacaacttcgacctgaacagaaacttccccgaccagttcgtgcagatcaccgaccccacccagcccgagaccatcgccgtgatgagctggatgaagagctaccccttcgtgctgagcgccaacctgcacggcggcagcctggtggtgaactaccccttcgacgacgacgagcagggcctggccacctacagcaagagccccgacgacgccgtgttccagcagatcgccctgagctacagcaaggagaacagccagatgttccagggcagaccctgcaagaacatgtaccccaacgagtacttcccccacggcatcaccaacggcgccagctggtacaacgtgcccggcggcatgcaggactggaactacctgcagaccaactgcttcgaggtgaccatcgagctgggctgcgtgaagtaccccctggagaaggagctgcccaacttctgggagcagaacagaagaagcctgatccagttcatgaagcaggtgcaccagggcgtgagaggcttcgtgctggacgccaccgacggcagaggcatcctgaacgccaccatcagcgtggccgagatcaaccaccccgtgaccacctacaagaccggcgactactggagactgctggtgcccggcacctacaagatcaccgccagcgccagaggctacaaccccgtgaccaagaacgtgaccgtgaagagcgagggcgccatccaggtgaacttcaccctggtgagaagcagcaccgacagcaacaacgagagcaagaagggcaagggcgccagcagcagcaccaacgacgccagcgaccccaccaccaaggagttcgagaccctgatcaaggacctgagcgccgagaacggcctggagagcctgatgctgagaagcagcagcaacctggccctggccctgtacagataccacagctacaaggacctgagcgagttcctgagaggcctggtgatgaactacccccacatcaccaacctgaccaacctgggccagagcaccgagtacagacacatctggagcctggagatcagcaacaagcccaacgtgagcgagcccgaggagcccaagatcagattcgtggccggcatccacggcaacgcccccgtgggcaccgagctgctgctggccctggccgagttcctgtgcctgaactacaagaagaaccccgccgtgacccagctggtggacagaaccagaatcgtgatcgtgcccagcctgaaccccgacggcagagagagagcccaggagaaggactgcaccagcaagatcggccagaccaacgccagaggcaaggacctggacaccgacttcaccaacaacgccagccagcccgagaccaaggccatcatcgagaacctgatccagaagcaggacttcagcctgagcgtggccctggacggcggcagcatgctggtgacctacccctacgacaagcccgtgcagaccgtggagaacaaggagaccctgaagcacctggccagcctgtacgccaacaaccaccccagcatgcacatgggccagcccagctgccccaacaagagcgacgagaacatccccggcggcgtgatgagaggcgccgagtggcacagccacctgggcagcatgaaggactacagcgtgacctacggccactgccccgagatcaccgtgtacaccagctgctgctacttccccagcgccgccagactgcccagcctgtgggccgacaacaagagaagcctgctgagcatgctggtggaggtgcacaagggcgtgcacggcttcgtgaaggacaagaccggcaagcccatcagcaaggccgtgatcgtgctgaacgagggcatcaaggtgcagaccaaggagggcggctacttccacgtgctgctggcccccggcgtgcacaacatcatcgccatcgccgacggctaccagcagcagcacagccaggtgttcgtgcaccacgacgccgccagcagcgtggtgatcgtgttcgacaccgacaacagaatcttcggcctgcccagagagctggtggtgaccgtgagcggcgccaccatgagcgccctgatcctgaccgcctgcatcatctggtgcatctgcagcatcaagagcaacagacacaaggacggcttccacagactgagacagcaccacgacgagtacgaggacgagatcagaatgatgagcaccggcagcaagaagagcctgctgagccacgagttccaggacgagaccgacaccgaggaggagaccctgtacagcagcaagcactag

SEQ ID NO: 83517 - DNA, 558 bp, synthetic construct
  misc_feature 1..558: note = Description of Artificial Sequence: Synthetic coding sequence
  source 1..558: mol_type = other DNA
atgttcgagaccatggccatcgagatcgagcagctgctggccagactgaccggcgtgaacgacaagatggccgagtacaccaacagcgccggcgtgcccagcctgaacgccgccctgatgcacaccctgcagagacacagagacatcctgcaggactacacccacgagttccacaagaccaaggccaacttcatggccatcagagagagagagaacctgatgggcagcgtgagaaaggacatcgagagctacaagagcggcagcggcgtgaacaacagaagaaccgagctgttcctgaaggagcacgaccacctgagaaacagcgacagactgatcgaggagaccatcagcatcgccatggccaccaaggagaacatgaccagccagagaggcatgctgaagagcatccacagcaagatgaacaccctggccaacagattccccgccgtgaacagcctgatccagagaatcaacctgagaaagagaagagacagcctgatcctgggcggcgtgatcggcatctgcaccatcctgctgctgctgtacgccttccactag

SEQ ID NO: 83518 - DNA, 525 bp, synthetic construct
  misc_feature 1..525: note = Description of Artificial Sequence: Synthetic coding sequence
  source 1..525: mol_type = other DNA
atggccgccggcaccagcagctactgggaggacctgagaaagcaggccagacagctggagaacgagctggacctgaagctggtgagcttcagcaagctgtgcaccagctacagccacagcagcaccagagacggcagaagagacagcagcgacaccacccccctgctgaacggcagcagccaggacagaatgttcgagaccatggccatcgagatcgagcagctgctggccagactgaccggcgtgaacgacaagatggccgagtacaccaacagcgccggcgtgcccagcctgaacgccgccctgatgcacaccctgcagagacacagagacatcctgcaggactacacccacgagttccacaagaccaaggccaacttcatggccatcagagagagagagaacctgatgggcagcgtgagaaaggacatcgagagctacaagagcggcagcggcgtgaacaacagaagaaccgagctgttcctgaaggagcacgaccacctgagaaagggcttccagtggtag

SEQ ID NO: 83519 - DNA, 747 bp, synthetic construct
  misc_feature 1..747: note = Description of Artificial Sequence: Synthetic coding sequence
  source 1..747: mol_type = other DNA
atggccgccggcaccagcagctactgggaggacctgagaaagcaggccagacagctggagaacgagctggacctgaagctggtgagcttcagcaagctgtgcaccagctacagccacagcagcaccagagacggcagaagagacagcagcgacaccacccccctgctgaacggcagcagccaggacagaatgttcgagaccatggccatcgagatcgagcagctgctggccagactgaccggcgtgaacgacaagatggccgagtacaccaacagcgccggcgtgcccagcctgaacgccgccctgatgcacaccctgcagagacacagagacatcctgcaggactacacccacgagttccacaagaccaaggccaacttcatggccatcagagagagagagaacctgatgggcagcgtgagaaaggacatcgagagctacaagagcggcagcggcgtgaacaacagaagaaccgagctgttcctgaaggagcacgaccacctgagaaacagcgacagactgatcgaggagaccatcagcatcgccatggccaccaaggagaacatgaccagccagagaggcatgctgaagagcatccacagcaagatgaacaccctggccaacagattccccgccgtgaacagcctgatccagagaatcaacctgagaaagagaagagacagcctgatcctgggcggcgtgatcggcatctgcaccatcctgctgctgctgtacgccttccactag

SEQ ID NO: 83520 - DNA, 528 bp, synthetic construct
  misc_feature 1..528: note = Description of Artificial Sequence: Synthetic coding sequence
  source 1..528: mol_type = other DNA
atggccgccggcaccagcagctactgggaggacctgagaaagcaggccagacagctggagaacgagctggacctgaagctggtgagcttcagcaagctgtgcaccagctacagccacagcagcaccagagacggcagaagagacagatacagcagcgacaccacccccctgctgaacggcagcagccaggacagaatgttcgagaccatggccatcgagatcgagcagctgctggccagactgaccggcgtgaacgacaagatggccgagtacaccaacagcgccggcgtgcccagcctgaacgccgccctgatgcacaccctgcagagacacagagacatcctgcaggtgatctactgggccagagacgtgttcatcatcaccggcgtgtgggtgttcttcttcaacccctgcatcggctacgtgcacatctacctgaagggccagagagagaagagcgagaagatcaacgccatgctgaagggcctggtgctgctgttcttcggcgtgaccatcatcaagttctag

SEQ ID NO: 83521 - DNA, 558 bp, synthetic construct; identical to SEQ ID NO: 83517
  misc_feature 1..558: note = Description of Artificial Sequence: Synthetic coding sequence
  source 1..558: mol_type = other DNA

SEQ ID NO: 83522 - DNA, 1350 bp, synthetic construct
  misc_feature 1..1350: note = Description of Artificial Sequence: Synthetic coding sequence
  source 1..1350: mol_type = other DNA
atgaccagcttctacagcaccagcagctgccccctgggctgcaccatggcccccggcgccagaaacgtgttcgtgagccccatcgacgtgggctgccagcccgtggccgaggccaacgccgccagcatgtgcctgctggccaacgtggcccacgccaacagagtgagagtgggcagcacccccctgggcagacccagcctgtgcctgccccccaccagccacaccgcctgccccctgcccggcacctgccacatccccggcaacatcggcatctgcggcgcctacggcaagaacaccctgaacggccacgagaaggagaccatgaagttcctgaacgacagactggccaactacctggagaaggtgagacagctggagcaggagaacgccgagctggagaccaccctgctggagagaagcaagtgccacgagagcaccgtgtgccccgactaccagagctacttcagaaccatcgaggagctgcagcagaagatcctgtgcagcaaggccgagaacgccagactgatcgtgcagatcgacaacgccaagctggccgccgacgacttcagaatcaagctggagagcgagagaagcctgcaccagctggtggaggccgacaagtgcggcacccagaagctgctggacgacgccaccctggccaaggccgacctggaggcccagcaggagagcctgaaggaggagcagctgagcctgaagagcaaccacgagcaggaggtgaagatcctgagaagccagctgggcgagaagttcagaatcgagctggacatcgagcccaccatcgacctgaacagagtgctgggcgagatgagagcccagtacgaggccatggtggagaccaaccaccaggacgtggagcagtggttccaggcccagagcgagggcatcagcctgcaggccatgagctgcagcgaggagctgcagtgctgccagagcgagatcctggagctgagatgcaccgtgaacgccctggaggtggagagacaggcccagcacaccctgaaggactgcctgcagaacagcctgtgcgaggccgaggacagatacggcaccgagctggcccagatgcagagcctgatcagcaacctggaggagcagctgagcgagatcagagccgacctggagagacagaaccaggagtaccaggtgctgctggacgtgaaggccagactggagaacgagatcgccacctacagaaacctgctggagagcgaggactgcaagctgccctgcaacccctgcagcacccccgccagctgcaccagctgccccagctgcggccccgtgaccggcggcagccccagcggccacggcgccagcatgggcagatag

SEQ ID NO: 83523 - DNA, 639 bp, synthetic construct
  misc_feature 1..639: note = Description of Artificial Sequence: Synthetic coding sequence
  source 1..639: mol_type = other DNA
atggaccccctgttccagcagacccacaagcaggtgcacgagatccagagctgcatgggcagactggagaccgccgacaagcagagcgtgcacatcgtggagaacgagatccaggccagcatcgaccagatcttcagcagactggagagactggagatcctgagcagcaaggagccccccaacaagagacagaacgccagactgagagtggaccagctgaagtacgacgtgcagcacctgcagaccgccctgagaaacttccagcacagaagacacgccagagagcagcaggagagacagagagaggagctgctgagcagaaccttcaccaccaacgacagcgacaccaccatccccatggacgagagcctgcagttcaacagcagcctgcagaaggtgcacaacggcatggacgacctgatcctggacggccacaacatcctggacggcctgagaacccagagactgaccctgaagggcacccagaagaagatcctggacatcgccaacatgctgggcctgagcaacaccgtgatgagactgatcgagaagagagccttccaggacaagtacttcatgatcggcggcatgctgctgacctgcgtggtgatgttcctggtggtgcagtacctgacctag

SEQ ID NO: 83524 - DNA, 588 bp, synthetic construct
  misc_feature 1..588: note = Description of Artificial Sequence: Synthetic coding sequence
  source 1..588: mol_type = other DNA
atggaccccctgttccagcagacccacaagcaggtgcacgagatccagagctgcatgggcagactggagaccgccgacaagcagagcgtgcacatcgtggagaacgagatccaggccagcatcgaccagatcttcagcagactggagagactggagatcctgagcagcaaggagccccccaacaagagacagaacgccagactgagagtggaccagctgaagtacgacgtgcagcacctgcagaccgccctgagaaacttccagcacagaagacacgccagagagcagcaggagagacagagagaggagctgctgagcagaaccttcaccaccaacgacagcgacaccaccatccccatggacgagagcctgcagttcaacagcagcctgcagaaggtgcacaacggcatggacgacctgatcctggacggccacaacatcctggacggcctgagaacccagagactgaccctgaaggtgggcagcctgctgggcgacagagagaaggccagctgcttcagcctgatccagcagttcagcaactgcgtgtacatcctgatcacctgcccccagatcgtgatcttctag

SEQ ID NO: 83525 - DNA, 699 bp, synthetic construct
  misc_feature 1..699: note = Description of Artificial Sequence: Synthetic coding sequence
  source 1..699: mol_type = other DNA
atggaccccctgttccagcagacccacaagcaggtgcacgagatccagagctgcatgggcagactggagaccgccgacaagcagagcgtgcacatcgtggagaacgagatccaggccagcatcgaccagatcttcagcagactggagagactggagatcctgagcagcaaggagccccccaacaagagacagaacgccagactgagagtggaccagctgaagtacgacgtgcagcacctgcagaccgccctgagaaacttccagcacagaagacacgccagagagcagcaggagagacagagagaggagctgctgagcagaaccttcaccaccaacgacagcgacaccaccatccccatggacgagagcctgcagttcaacagcagcctgcagaaggtgcacaacggcatggacgacctgatcctggacggccacaacatcctggacggcctgagaacccagagactgaccctgaagggcacccagaagaagatcctggacatcgccaacatgctgggcctgagcaacaccgtgatgagactgatcgagaagagagccttccaggacaagtacttcatgatcgagaccagaagccaccacgtggcccagaacggccccgagctgctgagcagcagagacccccccgccagcgccagcagaagcgccggcatcatcgagttcagcgagaagatcacctag

SEQ ID NO: 83526 - DNA, 984 bp, synthetic construct
  misc_feature 1..984: note = Description of Artificial Sequence: Synthetic coding sequence
  source 1..984: mol_type = other DNA
atggccgccgccgccgccatggccgagcaggagagcgccagaaacggcggcagaaacagaggcggcgtgcagagagtggagggcaagctgagagccagcgtggagaagggcgactactacgaggcccaccagatgtacagaaccctgttcttcagatacatgagccagagcaagcacaccgaggccagagagctgatgtacagcggcgccctgctgttcttcagccacggccagcagaacagcgccgccgacctgagcatgctggtgctggagagcctggagaaggccgaggtggaggtggccgacgagctgctggagaacctggccaaggtgttcagcctgatggaccccaacagccccgagagagtgaccttcgtgagcagagccctgaagtggagcagcggcggcagcggcaagctgggccaccccagactgcaccagctgctggccctgaccctgtggaaggagcagaactactgcgagagcagataccacttcctgcacagcgccgacggcgagggctgcgccaacatgctggtggagtacagcaccagcagaggcttcagaagcgaggtggacatgttcgtggcccaggccgtgctgcagttcctgtgcctgaagaacaagagcagcgccagcgtggtgttcaccacctacacccagaagcaccccagcatcgaggacggcccccccttcgtggagcccctgctgaacttcatctggttcctgctgctggccgtggacggcggcaagctgaccgtgttcaccgtgctgtgcgagcagtaccagcccagcctgagaagagaccccatgtacaacgagtacctggacagaatcggccagctgttcttcggcgtgccccccaagcagaccagcagctacggcggcctgctgggcaacctgctgaccagcctgatgggcagcagcgagcaggaggacggcgaggagagccccagcgacggcagccccatcgagctggactag

SEQ ID NO: 83527 - DNA, 1779 bp, synthetic construct
  misc_feature 1..1779: note = Description of Artificial Sequence: Synthetic coding sequence
  source 1..1779: mol_type = other DNA
atggccctgcccgaggaggccaagatcaaggacgcctaccacatgctgaagagacagggcatcgtgcagagcgacccccccatccccgtggacagaaccctgatccccagccccccccccagacccaagaaccccgtgttcgacgacgaggagaagagcaagctgctggccaagctgctgaagagcaagaaccccgacgacctgcaggaggccaacaagctgatcaagagcatggtgaaggaggacgaggccagaatccagaaggtgaccaagagactgcacaccctggaggaggtgaacaacaacgtgagactgctgagcgagatgctgctgcactacagccaggaggacagcagcgacggcgacagagagctgatgaaggagctgttcgaccagtgcgagaacaagagaagaaccctgttcaagctggccagcgagaccgaggacaacgacaacagcctgggcgacatcctgcaggccagcgacaacctgagcagagtgatcaacagctacaagaccatcatcgagggccaggtgatcaacggcgaggtggccaccctgaccctgcccgacagcgagggcaacagccagtgcagcaaccagggcaccctgatcgacctggccgagctggacaccaccaacagcctgagcagcgtgctggcccccgcccccaccccccccagcagcggcatccccatcctgcccccccccccccaggccagcggcccccccagaagcagaagcagcagccaggccgaggccaccctgggccccagcagcaccagcaacgccctgagctggctggacgaggagctgctgtgcctgggcctggccgaccccgcccccaacgtgccccccaaggagagcgccggcaacagccagtggcacctgctgcagagagagcagagcgacctggacttcttcagccccagacccggcaccgccgcctgcggcgccagcgacgcccccctgctgcagcccagcgcccccagcagcagcagcagccaggcccccctgcccccccccttccccgcccccgtggtgcccgccagcgtgcccgcccccagcgccggcagcagcctgttcagcaccggcgtggcccccgccctggcccccaaggtggagcccgccgtgcccggccaccacggcctggccctgggcaacagcgccctgcaccacctggacgccctggaccagctgctggaggaggccaaggtgaccagcggcctggtgaagcccaccaccagccccctgatccccaccaccacccccgccagacccctgctgcccttcagcaccggccccggcagccccctgttccagcccctgagcttccagagccagggcagcccccccaagggccccgagctgagcctggccagcatccacgtgcccctggagagcatcaagcccagcagcgccctgcccgtgaccgcctacgacaagaacggcttcagaatcctgttccacttcgccaaggagtgcccccccggcagacccgacgtgctggtggtggtggtgagcatgctgaacaccgcccccctgcccgtgaagagcatcgtgctgcaggccgccgtgcccaagagcatgaaggtgaagctgcagccccccagcggcaccgagctgagccccttcagccccatccagccccccgccgccatcacccaggtgatgctgctggccaaccccctgaagaagcaggtgctgagcttcctgggcaaggcctgcctgcagccctggggccaggccatcctgctgaccaccagctgcctggcctag

SEQ ID NO: 83528 - DNA, 1956 bp, synthetic construct
  misc_feature 1..1956: note = Description of Artificial Sequence: Synthetic coding sequence
  source 1..1956: mol_type = other DNA
atgaagaactgcggcagaagattccacaacgaggtgggcaagttcagattcctgaacgagctgatcaaggtggtgagccccaagtacctgggcgacagagtgagcgagaaggtgaagaccaaggtgatcgagctgctgtacagctggaccatggccctgcccgaggaggccaagatcaaggacgcctaccacatgctgaagagacagggcatcgtgcagagcgacccccccatccccgtggacagaaccctgatccccagccccccccccagacccaagaaccccgtgttcgacgacgaggagaagagcaagctgctggccaagctgctgaagagcaagaaccccgacgacctgcaggaggccaacaagctgatcaagagcatggtgaaggaggacgaggccagaatccagaaggtgaccaagagactgcacaccctggaggaggtgaacaacaacgtgagactgctgagcgagatgctgctgcactacagccaggaggacagcagcgacggcgacagagagctgatgaaggagctgttcgaccagtgcgagaacaagagaagaaccctgttcaagctggccagcgagaccgaggacaacgacaacagcctgggcgacatcctgcaggccagcgacaacctgagcagagtgatcaacagctacaagaccatcatcgagggccaggtgatcaacggcgaggtggccaccctgaccctgcccgacagcgagggcaacagccagtgcagcaaccagggcaccctgatcgacctggccgagctggacaccaccaacagcctgagcagcgtgctggcccccgcccccaccccccccagcagcggcatccccatcctgcccccccccccccaggccagcggcccccccagaagcagaagcagcagccaggccgaggccaccctgggccccagcagcaccagcaacgccctgagctggctggacgaggagctgctgtgcctgggcctggccgaccccgcccccaacgtgccccccaaggagagcgccggcaacagccagtggcacctgctgcagagagagcagagcgacctggacttcttcagccccagacccggcaccgccgcctgcggcgccagcgacgcccccctgctgcagcccagcgcccccagcagcagcagcagccaggcccccctgcccccccccttccccgcccccgtggtgcccgccagcgtgcccgcccccagcgccggcagcagcctgttcagcaccggcgtggcccccgccctggcccccaaggtggagcccgccgtgcccggccaccacggcctggccctgggcaacagcgccctgcaccacctggacgccctggaccagctgctggaggaggccaaggtgaccagcggcctggtgaagcccaccaccagccccctgatccccaccaccacccccgccagacccctgctgcccttcagcaccggccccggcagccccctgttccagcccctgagcttccagagccagggcagcccccccaagggccccgagctgagcctggccagcatccacgtgcccctggagagcatcaagcccagcagcgccctgcccgtgaccgcctacgacaagaacggcttcagaatcctgttccacttcgccaaggagtgcccccccggcagacccgacgtgctggtggtggtggtgagcatgctgaacaccgcccccctgcccgtgaagagcatcgtgctgcaggccgccgtgcccaagagcatgaaggtgaagctgcagccccccagcggcaccgagctgagccccttcagccccatccagccccccgccgccatcacccaggtgatgctgctggccaaccccctgaaggagaaggtgagactgagatacaagctgaccttcgccctgggcgagcagctgagcaccgaggtgggcgaggtggaccagttcccccccgtggagcagtggggcaacctgtag

SEQ ID NO: 83529 - DNA, 1365 bp, synthetic construct
  misc_feature 1..1365: note = Description of Artificial Sequence: Synthetic coding sequence
  source 1..1365: mol_type = other DNA
atgagcgccggcggcccctgccccgccgccgccggcggcggccccggcggcgccagctgcagcgtgggcgcccccggcggcgtgagcatgttcagatggctggaggtgctggagaaggagttcgacaaggccttcgtggacgtggacctgctgctgggcgagatcgaccccgaccaggccgacatcacctacgagggcagacagaagatgaccagcctgagcagctgcttcgcccagctgtgccacaaggcccagagcgtgagccagatcaaccacaagctggaggcccagctggtggacctgaagagcgagctgaccgagacccaggccgagaaggtggtgctggagaaggaggtgcacgaccagctgctgcagctgcacagcatccagctgcagctgcacgccaagaccggccagagcgccgacagcggcaccatcaaggccaagctggagagagagctggaggccaacaagaaggagaagatgaaggaggcccagctggaggccgaggtgaagctgctgagaaaggagaacgaggccctgagaagacacatcgccgtgctgcaggccgaggtgtacggcgccagactggccgccaagtacctggacaaggagctggccggcagagtgcagcagatccagctgctgggcagagacatgaagggccccgcccacgacaagctgtggaaccagctggaggccgagatccacctgcacagacacaagaccgtgatcagagcctgcagaggcagaaacgacctgaagagacccatgcaggccccccccggccacgaccaggacagcctgaagaagagccagggcgtgggccccatcagaaaggtgctgctgctgaaggaggaccacgagggcctgggcatcagcatcaccggcggcaaggagcacggcgtgcccatcctgatcagcgagatccaccccggccagcccgccgacagatgcggcggcctgcacgtgggcgacgccatcctggccgtgaacggcgtgaacctgagagacaccaagcacaaggaggccgtgaccatcctgagccagcagagaggcgagatcgagttcgaggtggtgtacgtggcccccgaggtggacagcgacgacgagaacgtggagtacgaggacgagagcggccacagatacagactgtacctggacgagctggagggcggcggcaaccccggcgccagctgcaaggacaccagcggcgagatcaaggtgctgcagggcttcaacaagaaggccgtgaccgacacccacgagaacggcgacctgggcaccgccagcgagacccccctggacgacggcgccagcaagctggacgacctgcacaccctgtaccacaagaagagctactag

SEQ ID NO: 83530 - DNA, 1389 bp, synthetic construct
  misc_feature 1..1389: note = Description of Artificial Sequence: Synthetic coding sequence
  source 1..1389: mol_type = other DNA
atgagcgccggcggcccctgccccgccgccgccggcggcggccccggcggcgccagctgcagcgtgggcgcccccggcggcgtgagcatgttcagatggctggaggtgctggagaaggagttcgacaaggccttcgtggacgtggacctgctgctgggcgagatcgaccccgaccaggccgacatcacctacgagggcagacagaagatgaccagcctgagcagctgcttcgcccagctgtgccacaaggcccagagcgtgagccagatcaaccacaagctggaggcccagctggtggacctgaagagcgagctgaccgagacccaggccgagaaggtggtgctggagaaggaggtgcacgaccagctgctgcagctgcacagcatccagctgcagctgcacgccaagaccggccagagcgccgacagcggcaccatcaaggccaagctgagcggccccagcgtggaggagctggagagagagctggaggccaacaagaaggagaagatgaaggaggcccagctggaggccgaggtgaagctgctgagaaaggagaacgaggccctgagaagacacatcgccgtgctgcaggccgaggtgtacggcgccagactggccgccaagtacctggacaaggagctggccggcagagtgcagcagatccagctgctgggcagagacatgaagggccccgcccacgacaagctgtggaaccagctggaggccgagatccacctgcacagacacaagaccgtgatcagagcctgcagaggcagaaacgacctgaagagacccatgcaggccccccccggccacgaccaggacagcctgaagaagagccagggcgtgggccccatcagaaaggtgctgctgctgaaggaggaccacgagggcctgggcatcagcatcaccggcggcaaggagcacggcgtgcccatcctgatcagcgagatccaccccggccagcccgccgacagatgcggcggcctgcacgtgggcgacgccatcctggccgtgaacggcgtgaacctgagagacaccaagcacaaggaggccgtgaccatcctgagccagcagagaggcgagatcgagttcgaggtggtgtacgtggcccccgaggtggacagcgacgacgagaacgtggagtacgaggacgagagcggccacagatacagactgtacctggacgagctggagggcggcggcaaccccggcgccagctgcaaggacaccagcggcgagatcaaggtgctgcagggcttcaacaagaaggccgtgaccgacacccacgagaacggcgacctgggcaccgccagcgagacccccctggacgacggcgccagcaagctggacgacctgcacaccctgtaccacaagaagagctactag

SEQ ID NO: 83531 - DNA, 1389 bp, synthetic construct
  misc_feature 1..1389: note = Description of Artificial Sequence: Synthetic coding sequence
  source 1..1389: mol_type = other DNA
atgagcgccggcggcccctgccccgccgccgccggcggcggccccggcggcgccagctgcagcgtgggcgcccccggcggcgtgagcatgttcagatggctggaggtgctggagaaggagttcgacaaggccttcgtggacgtggacctgctgctgggcgagatcgaccccgaccaggccgacatcacctacgagggcagacagaagatgaccagcctgagcagctgcttcgcccagctgtgccacaaggcccagagcgtgagccagatcaaccacaagctggaggcccagctggtggacctgaagagcgagctgaccgagacccaggccgagaaggtggtgctggagaaggaggtgcacgaccagctgctgcagctgcacagcatccagctgcagctgcacgccaagaccggccagagcgccgacagcggcaccatcaaggccaagctggtgagcagaagcagcagcaagatggagagagagctggaggccaacaagaaggagaagatgaaggaggcccagctggaggccgaggtgaagctgctgagaaaggagaacgaggccctgagaagacacatcgccgtgctgcaggccgaggtgtacggcgccagactggccgccaagtacctggacaaggagctggccggcagagtgcagcagatccagctgctgggcagagacatgaagggccccgcccacgacaagctgtggaaccagctggaggccgagatccacctgcacagacacaagaccgtgatcagagcctgcagaggcagaaacgacctgaagagacccatgcaggccccccccggccacgaccaggacagcctgaagaagagccagggcgtgggccccatcagaaaggtgctgctgctgaaggaggaccacgagggcctgggcatcagcatcaccggcggcaaggagcacggcgtgcccatcctgatcagcgagatccaccccggccagcccgccgacagatgcggcggcctgcacgtgggcgacgccatcctggccgtgaacggcgtgaacctgagagacaccaagcacaaggaggccgtgaccatcctgagccagcagagaggcgagatcgagttcgaggtggtgtacgtggcccccgaggtggacagcgacgacgagaacgtggagtacgaggacgagagcggccacagatacagactgtacctggacgagctggagggcggcggcaaccccggcgccagctgcaaggacaccagcggcgagatcaaggtgctgcagggcttcaacaagaaggccgtgaccgacacccacgagaacggcgacctgggcaccgccagcgagacccccctggacgacggcgccagcaagctggacgacctgcacaccctgtaccacaagaagagctactag

SEQ ID NO: 83532 - DNA, 1659 bp, synthetic construct
  misc_feature 1..1659: note = Description of Artificial Sequence: Synthetic coding sequence
  source 1..1659: mol_type = other DNA
atggagcccgccatggagcccgagaccctggaggccagaatcaacagagccaccaaccccctgaacaaggagctggactgggccagcatcaacggcttctgcgagcagctgaacgaggacttcgagggcccccccctggccaccagactgctggcccacaagatccagagcccccaggagtgggaggccatccaggccctgaccgtgctggagacctgcatgaagagctgcggcaagagattccacgacgaggtgggcaagttcagattcctgaacgagctgatcaaggtggtgagccccaagtacctgggcagcagaaccagcgagaaggtgaagaacaagatcctggagctgctgtacagctggaccgtgggcctgcccgaggaggtgaagatcgccgaggcctaccagatgctgaagaagcagggcatcgtgaagagcgaccccaagctgcccgacgacaccaccttccccctgcccccccccagacccaagaacgtgatcttcgaggacgaggagaagagcaagatgctggccagactgctgaagagcagccaccccgaggacctgagagccgccaacaagctgatcaaggagatggtgcaggaggaccagaagagaatggagaagatcagcaagagagtgaacgccatcgaggaggtgaacaacaacgtgaagctgctgaccgagatggtgatgagccacagccagggcggcgccgccgccggcagcagcgaggacctgatgaaggagctgtaccagagatgcgagagaatgagacccaccctgttcagactggccagcgacaccgaggacaacgacgaggccctgggcctgagcgaccccaccccccccagcggccccagcctggacggcaccggctggaacagcttccagagcagcgacgccaccgagccccccgcccccgccctggcccaggcccccagcatggagagcagaccccccgcccagaccagcctgcccgccagcagcggcctggacgacctggacctgctgggcaagaccctgctgcagcagagcctgccccccgagagccagcaggtgagatgggagaagcagcagcccacccccagactgaccctgagagacctgcagaacaagagcagcagctgcagcagccccagcagcagcgccaccagcctgctgcacaccgtgagccccgagccccccagacccccccagcagcccgtgcccaccgagctgagcctggccagcatcaccgtgcccctggagagcatcaagcccagcaacatcctgcccgtgaccgtgtacgaccagcacggcttcagaatcctgttccacttcgccagagaccccctgcccggcagaagcgacgtgctggtggtggtggtgagcatgctgagcaccgccccccagcccatcagaaacatcgtgttccagagcgccgtgcccaaggtgatgaaggtgaagctgcagccccccagcggcaccgagctgcccgccttcaaccccatcgtgcaccccagcgccatcacccaggtgctgctgctggccaacccccagaaggagaaggtgagactgagatacaagctgaccttcaccatgggcgaccagacctacaacgagatgggcgacgtggaccagttccccccccccgagacctggggcagcctgtag

SEQ ID NO: 83533 - DNA, 117 bp, synthetic construct
  misc_feature 1..117: note = Description of Artificial Sequence: Synthetic coding sequence
  source 1..117: mol_type = other DNA
atgaagagctgcggcaagagattccacgacgaggtgggcaagttcagattcctgaacgagctgatcaaggtggtgagccccaagtacctgggcagcagaaccagcgagaaggtgtag

SEQ ID NO: 83534 - DNA, 1821 bp, synthetic construct
  misc_feature 1..1821: note = Description of Artificial Sequence: Synthetic coding sequence
  source 1..1821: mol_type = other DNA
atggagcccgccatggagcccgagaccctggaggccagaatcaacagagccaccaaccccctgaacaaggagctggactgggccagcatcaacggcttctgcgagcagctgaacgaggacttcgagggcccccccctggccaccagactgctggcccacaagatccagagcccccaggagtgggaggccatccaggccctgacctacctgggcagcagaaccagcgagaaggtgaagaacaagatcctggagctgctgtacagctggaccgtgggcctgcccgaggaggtgaagatcgccgaggcctaccagatgctgaagaagcagggcatcgtgaagagcgaccccaagctgcccgacgacaccaccttccccctgcccccccccagacccaagaacgtgatcttcgaggacgaggagaagagcaagatgctggccagactgctgaagagcagccaccccgaggacctgagagccgccaacaagctgatcaaggagatggtgcaggaggaccagaagagaatggagaagatcagcaagagagtgaacgccatcgaggaggtgaacaacaacgtgaagctgctgaccgagatggtgatgagccacagccagggcggcgccgccgccggcagcagcgaggacctgatgaaggagctgtaccagagatgcgagagaatgagacccaccctgttcagactggccagcgacaccgaggacaacgacgaggccctggccgagatcctgcaggccaacgacaacctgacccaggtgatcaacctgtacaagcagctggtgagaggcgaggaggtgaacggcgacgccaccgccggcagcatccccggcagcaccagcgccctgctggacctgagcggcctggacctgccccccgccggcaccacctaccccgccatgcccaccagacccggcgagcaggccagccccgagcagcccagcgccagcgtgagcctgctggacgacgagctgatgagcctgggcctgagcgaccccaccccccccagcggccccagcctggacggcaccggctggaacagcttccagagcagcgacgccaccgagccccccgcccccgccctggcccaggcccccagcatggagagcagaccccccgcccagaccagcctgcccgccagcagcggcctggacgacctggacctgctgggcaagaccctgctgcagcagagcctgccccccgagagccagcaggtgagatgggagaagcagcagcccacccccagactgaccctgagagacctgcagaacaagagcagcagctgcagcagccccagcagcagcgccaccagcctgctgcacaccgtgagccccgagccccccagacccccccagcagcccgtgcccaccgagctgagcctggccagcatcaccgtgcccctggagagcatcaagcccagcaacatcctgcccgtgaccgtgtacgaccagcacggcttcagaatcctgttccacttcgccagagaccccctgcccggcagaagcgacgtgctggtggtggtggtgagcatgctgagcaccgccccccagcccatcagaaacatcgtgttccagagcgccgtgcccaaggtgatgaaggtgaagctgcagccccccagcggcaccgagctgcccgccttcaaccccatcgtgcaccccagcgccatcacccaggtgctgctgctggccaacccccagaaggagaaggtgagactgagatacaagctgaccttcaccatgggcgaccagacctacaacgagatgggcgacgtggaccagttccccccccccgagacctggggcagcctgtag

SEQ ID NO: 83535 - DNA, 1920 bp, synthetic construct
  misc_feature 1..1920: note = Description of Artificial Sequence: Synthetic coding sequence
  source 1..1920: mol_type = other DNA
atggagcccgccatggagcccgagaccctggaggccagaatcaacagagccaccaaccccctgaacaaggagctggactgggccagcatcaacggcttctgcgagcagctgaacgaggacttcgagggcccccccctggccaccagactgctggcccacaagatccagagcccccaggagtgggaggccatccaggccctgaccgtgctggagacctgcatgaagagctgcggcaagagattccacgacgaggtgggcaagttcagattcctgaacgagctgatcaaggtggtgagccccaagtacctgggcagcagaaccagcgagaaggtgaagaacaagatcctggagctgctgtacagctggaccgtgggcctgcccgaggaggtgaagatcgccgaggcctaccagatgctgaagaagcagggcatcgtgaagagcgaccccaagctgcccgacgacaccaccttccccctgcccccccccagacccaagaacgtgatcttcgaggacgaggagaagagcaagatgctggccagactgctgaagagcagccaccccgaggacctgagagccgccaacaagctgatcaaggagatggtgcaggaggaccagaagagaatggagaagatcagcaagagagtgaacgccatcgaggaggtgaacaacaacgtgaagctgctgaccgagatggtgatgagccacagccagggcggcgccgccgccggcagcagcgaggacctgatgaaggagctgtaccagagatgcgagagaatgagacccaccctgttcagactggccagcgacaccgaggacaacgacgaggccctggccgagatcctgcaggccaacgacaacctgacccaggtgatcaacctgtacaagcagctggtgagaggcgaggaggtgaacggcgacgccaccgccggcagcatccccggcagcaccagcgccctgctggacctgagcggcctggacctgccccccgccggcaccacctaccccgccatgcccaccagacccggcgagcaggccagccccgagcagcccagcgccagcgtgagcctgctggacgacgagctgatgagcctgggcctgagcgaccccaccccccccagcggccccagcctggacggcaccggctggaacagcttccagagcagcgacgccaccgagccccccgcccccgccctggcccaggcccccagcatggagagcagaccccccgcccagaccagcctgcccgccagcagcggcctggacgacctggacctgctgggcaagaccctgctgcagcagagcctgccccccgagagccagcaggtgagatgggagaagcagcagcccacccccagactgaccctgagagacctgcagaacaagagcagcagctgcagcagccccagcagcagcgccaccagcctgctgcacaccgtgagccccgagccccccagacccccccagcagcccgtgcccaccgagctgagcctggccagcatcaccgtgcccctggagagcatcaagcccagcaacatcctgcccgtgaccgtgtacgaccagcacggcttcagaatcctgttccacttcgccagagaccccctgcccggcagaagcgacgtgctggtggtggtggtgagcatgctgagcaccgccccccagcccatcagaaacatcgtgttccagagcgccgtgcccaaggtgatgaaggtgaagctgcagccccccagcggcaccgagctgcccgccttcaaccccatcgtgcaccccagcgccatcacccaggtgctgctgctggccaacccccagaaggagaaggtgagactgagatacaagctgaccttcaccatgggcgaccagacctacaacgagatgggcgacgtggaccagttccccccccccgagacctggggcagcctgtag

SEQ ID NO: 83536 - DNA, 1971 bp, synthetic construct
  misc_feature 1..1971: note = Description of Artificial Sequence: Synthetic coding sequence
  source 1..1971: mol_type = other DNA
atggagcccgccatggagcccgagaccctggaggccagaatcaacagagccaccaaccccctgaacaaggagctggactgggccagcatcaacggcttctgcgagcagctgaacgaggacttcgagggcccccccctggccaccagactgctggcccacaagatccagagcccccaggagtgggaggccatccaggccctgaccgtgagaagaggcgaggccaccatcagaccccccccctgcgacgacaccaaggtgctggagacctgcatgaagagctgcggcaagagattccacgacgaggtgggcaagttcagattcctgaacgagctgatcaaggtggtgagccccaagtacctgggcagcagaaccagcgagaaggtgaagaacaagatcctggagctgctgtacagctggaccgtgggcctgcccgaggaggtgaagatcgccgaggcctaccagatgctgaagaagcagggcatcgtgaagagcgaccccaagctgcccgacgacaccaccttccccctgcccccccccagacccaagaacgtgatcttcgaggacgaggagaagagcaagatgctggccagactgctgaagagcagccaccccgaggacctgagagccgccaacaagctgatcaaggagatggtgcaggaggaccagaagagaatggagaagatcagcaagagagtgaacgccatcgaggaggtgaacaacaacgtgaagctgctgaccgagatggtgatgagccacagccagggcggcgccgccgccggcagcagcgaggacctgatgaaggagctgtaccagagatgcgagagaatgagacccaccctgttcagactggccagcgacaccgaggacaacgacgaggccctggccgagatcctgcaggccaacgacaacctgacccaggtgatcaacctgtacaagcagctggtgagaggcgaggaggtgaacggcgacgccaccgccggcagcatccccggcagcaccagcgccctgctggacctgagcggcctggacctgccccccgccggcaccacctaccccgccatgcccaccagacccggcgagcaggccagccccgagcagcccagcgccagcgtgagcctgctggacgacgagctgatgagcctgggcctgagcgaccccaccccccccagcggccccagcctggacggcaccggctggaacagcttccagagcagcgacgccaccgagccccccgcccccgccctggcccaggcccccagcatggagagcagaccccccgcccagaccagcctgcccgccagcagcggcctggacgacctggacctgctgggcaagaccctgctgcagcagagcctgccccccgagagccagcaggtgagatgggagaagcagcagcccacccccagactgaccctgagagacctgcagaacaagagcagcagctgcagcagccccagcagcagcgccaccagcctgctgcacaccgtgagccccgagccccccagacccccccagcagcccgtgcccaccgagctgagcctggccagcatcaccgtgcccctggagagcatcaagcccagcaacatcctgcccgtgaccgtgtacgaccagcacggcttcagaatcctgttccacttcgccagagaccccctgcccggcagaagcgacgtgctggtggtggtggtgagcatgctgagcaccgccccccagcccatcagaaacatcgtgttccagagcgccgtgcccaaggtgatgaaggtgaagctgcagccccccagcggcaccgagctgcccgccttcaaccccatcgtgcaccccagcgccatcacccaggtgctgctgctggccaacccccagaaggagaaggtgagactgagatacaagctgaccttcaccatgggcgaccagacctacaacgagatgggcgacgtggaccagttccccccccccgagacctggggcagcctgtag

SEQ ID NO: 83537 - DNA, 1701 bp, synthetic construct
  misc_feature 1..1701: note = Description of Artificial Sequence: Synthetic coding sequence
  source 1..1701: mol_type = other DNA
atgaagagctgcggcaagagattccacgacgaggtgggcaagttcagattcctgaacgagctgatcaaggtggtgagccccaagtacctgggcagcagaaccagcgagaaggtgaagaacaagatcctggagctgctgtacagctggaccgtgggcctgcccgaggaggtgaagatcgccgaggcctaccagatgctgaagaagcagggcatcgtgaagagcgaccccaagctgcccgacgacaccaccttccccctgcccccccccagacccaagaacgtgatcttcgaggacgaggagaagagcaagatgctggccagactgctgaagagcagccaccccgaggacctgagagccgccaacaagctgatcaaggagatggtgcaggaggaccagaagagaatggagaagatcagcaagagagtgaacgccatcgaggaggtgaacaacaacgtgaagctgctgaccgagatggtgatgagccacagccagggcggcgccgccgccggcagcagcgaggacctgatgaaggagctgtaccagagatgcgagagaatgagacccaccctgttcagactggccagcgacaccgaggacaacgacgaggccctggccgagatcctgcaggccaacgacaacctgacccaggtgatcaacctgtacaagcagctggtgagaggcgaggaggtgaacggcgacgccaccgccggcagcatccccggcagcaccagcgccctgctggacctgagcggcctggacctgccccccgccggcaccacctaccccgccatgcccaccagacccggcgagcaggccagccccgagcagcccagcgccagcgtgagcctgctggacgacgagctgatgagcctgggcctgagcgaccccaccccccccagcggccccagcctggacggcaccggctggaacagcttccagagcagcgacgccaccgagccccccgcccccgccctggcccaggcccccagcatggagagcagaccccccgcccagaccagcctgcccgccagcagcggcctggacgacctggacctgctgggcaagaccctgctgcagcagagcctgccccccgagagccagcaggtgagatgggagaagcagcagcccacccccagactgaccctgagagacctgcagaacaagagcagcagctgcagcagccccagcagcagcgccaccagcctgctgcacaccgtgagccccgagccccccagacccccccagcagcccgtgcccaccgagctgagcctggccagcatcaccgtgcccctggagagcatcaagcccagcaacatcctgcccgtgaccgtgtacgaccagcacggcttcagaatcctgttccacttcgccagagaccccctgcccggcagaagcgacgtgctggtggtggtggtgagcatgctgagcaccgccccccagcccatcagaaacatcgtgttccagagcgccgtgcccaaggtgatgaaggtgaagctgcagccccccagcggcaccgagctgcccgccttcaaccccatcgtgcaccccagcgccatcacccaggtgctgctgctggccaacccccagaaggagaaggtgagactgagatacaagctgaccttcaccatgggcgaccagacctacaacgagatgggcgacgtggaccagttccccccccccgagacctggggcagcctgtag

SEQ ID NO: 83538 - DNA, 123 bp, synthetic construct
  misc_feature 1..123: note = Description of Artificial Sequence: Synthetic coding sequence
  source 1..123: mol_type = other DNA
atgaagagctgcggcaagagattccacgacgaggtgggcaagttcagattcctgaacgagctgatcaaggtggtgagccccaagtacctgggcagcagaaccagcgagaaggtgaagaactag

SEQ ID NO: 83539 - DNA, 330 bp, synthetic construct
  misc_feature 1..330: note = Description of Artificial Sequence: Synthetic coding sequence
  source 1..330: mol_type = other DNA
atgaagagctgcggcaagagattccacgacgaggtgggcaagttcagattcctgaacgagctgatcaaggtggtgagccccaagtacctgggcagcagaaccagcgagaaggtgaagaacaagatcctggagctgctgtacagctggaccgtgggcctgcccgaggaggtgaagatcgccgaggcctaccagatgctgaagaagcagggcatcgtgaagagcgaccccaagctgcccgacgacaccaccttccccctgcccccccccagacccaagaacgtgatcttcgaggacgaggagaagagcaagatgctggccagactgctgtag

SEQ ID NO: 83540 - DNA, 270 bp, synthetic construct
  misc_feature 1..270: note = Description of Artificial Sequence: Synthetic coding sequence
  source 1..270: mol_type = other DNA
atggagcccgccatggagcccgagaccctggaggccagaatcaacagagccaccaaccccctgaacaaggagctggactgggccagcatcaacggcttctgcgagcagctgaacgaggacttcgagggcccccccctggccaccagactgctggcccacaagatccagagcccccaggagtgggaggccatccaggccctgaccgtgagaagaggcgaggccaccatcagaccccccccctgcgacgacaccaagggcggccaggactag

SEQ ID NO: 83541 - DNA, 330 bp, synthetic construct; identical to SEQ ID NO: 83539
  misc_feature 1..330: note = Description of Artificial Sequence: Synthetic coding sequence
  source 1..330: mol_type = other DNA

SEQ ID NO: 83542 - DNA, 327 bp, synthetic construct
  misc_feature 1..327: note = Description of Artificial Sequence: Synthetic coding sequence
  source 1..327: mol_type = other DNA
atgaagagctgcggcaagagattccacgacgaggtgggcaagttcagattcctgaacgagctgatcaaggtggtgagccccaagtacctgggcagcagaaccagcgagaaggtgaagaacaagatcctggagctgctgtacagctggaccgtgggcctgcccgaggaggtgaagatcgccgaggcctaccagatgctgaagaagcagggcatcgtgaagagcgaccccaagctgcccgacgacaccaccttccccctgcccccccccagacccaagaacgtgatcttcgaggacgaggagaagagcaagatgctggccagactgtag

SEQ ID NO: 83543 - DNA, 57 bp, synthetic construct
  misc_feature 1..57: note = Description of Artificial Sequence: Synthetic coding sequence
  source 1..57: mol_type = other DNA
atgaagagctgcggcaagagattccacgacgaggtgggcaagttcagattcctgtag

SEQ ID NO: 83544 - DNA, 183 bp, synthetic construct
  misc_feature 1..183: note = Description of Artificial Sequence: Synthetic coding sequence
  source 1..183: mol_type = other DNA
atgaagagctgcggcaagagattccacgacgaggtgggcaagttcagattcctgaacgagctgatcaaggtggtgagccccaagtacctgggcagcagaaccagcgagaaggtgaagaacaagatcctggagctgctgtacagctggaccgtgggcctgcccgaggaggtgaagatcgcctag

SEQ ID NO: 83545 - DNA, 87 bp, synthetic construct
  misc_feature 1..87: note = Description of Artificial Sequence: Synthetic coding sequence
  source 1..87: mol_type = other DNA
atgaagagctgcggcaagagattccacgacgaggtgggcaagttcagattcctgaacgagctgatcaaggtggtgagccccaagtag

SEQ ID NO: 83546 - DNA, 741 bp, synthetic construct
  misc_feature 1..741: note = Description of Artificial Sequence: Synthetic coding sequence
  source 1..741: mol_type = other DNA
atgacccccggcaccgccaacagagccaccaaccccctgaacaaggagctggactgggccagcatcaacggcttctgcgagcagctgaacgaggacttcgagggcccccccctggccaccagactgctggcccacaagatccagagcccccaggagtgggaggccatccaggccctgaccgtgctggagacctgcatgaagagctgcggcaagagattccacgacgaggtgggcaagttcagattcctgaacgagctgatcaaggtggtgagccccaagtacctgggcagcagaaccagcgagaaggtgaagaacaagatcctggagctgctgtacagctggaccgtgggcctgcccgaggaggtgaagatcgccgaggcctaccagatgctgaagaagcagggcatcgtgaagagcgaccccaagctgcccgacgacaccaccttccccctgcccccccccagacccaagaacgtgatcttcgaggacgaggagaagagcaagatgctggccagactgctgaagagcagccaccccgaggacctgagagccgccaacaagctgatcaaggagatggtgcaggaggaccagaagagaatggagaagatcagcaagagagtgaacgccatcgaggaggtgaacaacaacgtgaagctgctgaccgagatggtgatgagccacagccagggcggcgccgccgccggcagcagcgaggacctgatgaaggagctgtaccagtag

SEQ ID NO: 83547 - DNA, 213 bp, synthetic construct
  misc_feature 1..213: note = Description of Artificial Sequence: Synthetic coding sequence
  source 1..213: mol_type = other DNA
atgaagagctgcggcaagagattccacgacgaggtgggcaagttcagattcctgaacgagctgatcaaggtggtgagccccaagtacctgggcagcagaaccagcgagaaggtgaagaacaagatcctggagctgctgtacagctggaccgtgggcctgcccgaggaggtgaagatcgccgaggcctaccagatgctgaagaagcagggctag

SEQ ID NO: 83548 - DNA, 2172 bp, synthetic construct
  misc_feature 1..2172: note = Description of Artificial Sequence: Synthetic coding sequence
  source 1..2172: mol_type = other DNA
atggccgaggccgagggcgagagcctggagagctggctgaacaaggccaccaaccccagcaacagacaggaggactgggagtacatcatcggcttctgcgaccagatcaacaaggagctggagggcccccagatcgccgtgagactgctggcccacaagatccagagcccccaggagtgggaggccctgcaggccctgaccgtgctggaggcctgcatgaagaactgcggcagaagattccacaacgaggtgggcaagttcagattcctgaacgagctgatcaaggtggtgagccccaagtacctgggcgacagagtgagcgagaaggtgaagaccaaggtgatcgagctgctgtacagctggaccatggccctgcccgaggaggccaagatcaaggacgcctaccacatgctgaagagacagggcatcgtgcagagcgacccccccatccccgtggacagaaccctgatccccagccccccccccagacccaagaaccccgtgttcgacgacgaggagaagagcaagctgctggccaagctgctgaagagcaagaaccccgacgacctgcaggaggccaacaagctgatcaagagcatggtgaaggaggacgaggccagaatccagaaggtgaccaagagactgcacaccctggaggaggtgaacaacaacgtgagactgctgagcgagatgctgctgcactacagccaggaggacagcagcgacggcgacagagagctgatgaaggagctgttcgaccagtgcgagaacaagagaagaaccctgttcaagctggccagcgagaccgaggacaacgacaacagcctgggcgacatcctgcaggccagcgacaacctgagcagagtgatcaacagctacaagaccatcatcgagggccaggtgatcaacggcgaggtggccaccctgaccctgcccgacagcgagggcaacagccagtgcagcaaccagggcaccctgatcgacctggccgagctggacaccaccaacagcctgagcagcgtgctggcccccgcccccaccccccccagcagcggcatccccatcctgcccccccccccccaggccagcggcccccccagaagcagaagcagcagccaggccgaggccaccctgggccccagcagcaccagcaacgccctgagctggctggacgaggagctgctgtgcctgggcctggccgaccccgcccccaacgtgccccccaaggagagcgccggcaacagccagtggcacctgctgcagagagagcagagcgacctggacttcttcagccccagacccggcaccgccgcctgcggcgccagcgacgcccccctgctgcagcccagcgcccccagcagcagcagcagccaggcccccctgcccccccccttccccgcccccgtggtgcccgccagcgtgcccgcccccagcgccggcagcagcctgttcagcaccggcgtggcccccgccctggcccccaaggtggagcccgccgtgcccggccaccacggcctggccctgggcaacagcgccctgcaccacctggacgccctggaccagctgctggaggaggccaaggtgaccagcggcctggtgaagcccaccaccagccccctgatccccaccaccacccccgccagacccctgctgcccttcagcaccggccccggcagccccctgttccagcccctgagcttccagagccagggcagcccccccaagggccccgagctgagcctggccagcatccacgtgcccctggagagcatcaagcccagcagcgccctgcccgtgaccgcctacgacaagaacggcttcagaatcctgttccacttcgccaaggagtgcccccccggcagacccgacgtgctggtggtggtggtgagcatgctgaacaccgcccccctgcccgtgaagagcatcgtgctgcaggccgccgtgcccaagagcatgaaggtgaagctgcagccccccagcggcaccgagctgagccccttcagccccatccagccccccgccgccatcacccaggtgatgctgctggccaaccccctgaaggagaaggtgagactgagatacaagctgaccttcgccctgggcgagcagctgagcaccgaggtgggcgaggtggaccagttcccccccgtggagcagtggggcaacctgtag

SEQ ID NO: 83549 - DNA, 2073 bp, synthetic construct
  misc_feature 1..2073: note = Description of Artificial Sequence: Synthetic coding sequence
  source 1..2073: mol_type = other DNA
atggccgaggccgagggcgagagcctggagagctggctgaacaaggccaccaaccccagcaacagacaggaggactgggagtacatcatcggcttctgcgaccagatcaacaaggagctggagggcccccagatcgccgtgagactgctggcccacaagatccagagcccccaggagtgggaggccctgcaggccctgacctacctgggcgacagagtgagcgagaaggtgaagaccaaggtgatcgagctgctgtacagctggaccatggccctgcccgaggaggccaagatcaaggacgcctaccacatgctgaagagacagggcatcgtgcagagcgacccccccatccccgtggacagaaccctgatccccagccccccccccagacccaagaaccccgtgttcgacgacgaggagaagagcaagctgctggccaagctgctgaagagcaagaaccccgacgacctgcaggaggccaacaagctgatcaagagcatggtgaaggaggacgaggccagaatccagaaggtgaccaagagactgcacaccctggaggaggtgaacaacaacgtgagactgctgagcgagatgctgctgcactacagccaggaggacagcagcgacggcgacagagagctgatgaaggagctgttcgaccagtgcgagaacaagagaagaaccctgttcaagctggccagcgagaccgaggacaacgacaacagcctgggcgacatcctgcaggccagcgacaacctgagcagagtgatcaacagctacaagaccatcatcgagggccaggtgatcaacggcgaggtggccaccctgaccctgcccgacagcgagggcaacagccagtgcagcaaccagggcaccctgatcgacctggccgagctggacaccaccaacagcctgagcagcgtgctggcccccgcccccaccccccccagcagcggcatccccatcctgcccccccccccccaggccagcggcccccccagaagcagaagcagcagccaggccgaggccaccctgggccccagcagcaccagcaacgccctgagctggctggacgaggagctgctgtgcctgggcctggccgaccccgcccccaacgtgccccccaaggagagcgccggcaacagccagtggcacctgctgcagagagagcagagcgacctggacttcttcagccccagacccggcaccgccgcctgcggcgccagcgacgcccccctgctgcagcccagcgcccccagcagcagcagcagccaggcccccctgcccccccccttccccgcccccgtggtgcccgccagcgtgcccgcccccagcgccggcagcagcctgttcagcaccggcgtggcccccgccctggcccccaaggtggagcccgccgtgcccggccaccacggcctggccctgggcaacagcgccctgcaccacctggacgccctggaccagctgctggaggaggccaaggtgaccagcggcctggtgaagcccaccaccagccccctgatccccaccaccacccccgccagacccctgctgcccttcagcaccggccccggcagccccctgttccagcccctgagcttccagagccagggcagcccccccaagggccccgagctgagcctggccagcatccacgtgcccctggagagcatcaagcccagcagcgccctgcccgtgaccgcctacgacaagaacggcttcagaatcctgttccacttcgccaaggagtgcccccccggcagacccgacgtgctggtggtggtggtgagcatgctgaacaccgcccccctgcccgtgaagagcatcgtgctgcaggccgccgtgcccaagagcatgaaggtgaagctgcagccccccagcggcaccgagctgagccccttcagccccatccagccccccgccgccatcacccaggtgatgctgctggccaaccccctgaaggagaaggtgagactgagatacaagctgaccttcgccctgggcgagcagctgagcaccgaggtgggcgaggtggaccagttcccccccgtggagcagtggggcaacctgtag

SEQ ID NO: 83550 - DNA, 1956 bp, synthetic construct; identical to SEQ ID NO: 83528
  misc_feature 1..1956: note = Description of Artificial Sequence: Synthetic coding sequence
  source 1..1956: mol_type = other DNA

SEQ ID NO: 83551 - DNA, 462 bp, synthetic construct
  misc_feature 1..462: note = Description of Artificial Sequence: Synthetic coding sequence
  source 1..462: mol_type = other DNA
atggccgaggccgagggcgagagcctggagagctggctgaacaaggccaccaaccccagcaacagacaggaggactgggagtacatcatcggcttctgcgaccagatcaacaaggagctggagggcccccagatcgccgtgagactgctggcccacaagatccagagcccccaggagtgggaggccctgcaggccctgaccgtgctggaggcctgcatgaagaactgcggcagaagattccacaacgaggtgggcaagttcagattcctgaacgagctgatcaaggtggtgagccccaagtacctgggcgacagagtgagcgagaaggtgaagaccaaggtgatcgagctgctgtacagctggaccatggccctgcccgaggaggccaagatcaaggacgcctaccacatgctgaagagacaggccttcagccaggccgccgagaagcagaagcccagatag

SEQ ID NO: 83552 - DNA, 1806 bp, synthetic construct
  misc_feature 1..1806: note = Description of Artificial Sequence: Synthetic coding sequence
  source 1..1806: mol_type = other DNA
atggccctgcccgaggaggccaagatcaaggacgcctaccacatgctgaagagacagggcatcgtgcagagcgacccccccatccccgtggacagaaccctgatccccagccccccccccagacccaagaaccccgtgttcgacgacgaggagaagagcaagctgctggccaagctgctgaagagcaagaaccccgacgacctgcaggaggccaacaagctgatcaagagcatggtgaaggaggacgaggccagaatccagaaggtgaccaagagactgcacaccctggaggaggtgaacaacaacgtgagactgctgagcgagatgctgctgcactacagccaggaggacagcagcgacggcgacagagagctgatgaaggagctgttcgaccagtgcgagaacaagagaagaaccctgttcaagctggccagcgagaccgaggacaacgacaacagcctgggcgacatcctgcaggccagcgacaacctgagcagagtgatcaacagctacaagaccatcatcgagggccaggtgatcaacggcgaggtggccaccctgaccctgcccgacagcgagggcaacagccagtgcagcaaccagggcaccctgatcgacctggccgagctggacaccaccaacagcctgagcagcgtgctggcccccgcccccaccccccccagcagcggcatccccatcctgcccccccccccccaggccagcggcccccccagaagcagaagcagcagccaggccgaggccaccctgggccccagcagcaccagcaacgccctgagctggctggacgaggagctgctgtgcctgggcctggccgaccccgcccccaacgtgccccccaaggagagcgccggcaacagccagtggcacctgctgcagagagagcagagcgacctggacttcttcagccccagacccggcaccgccgcctgcggcgccagcgacgcccccctgctgcagcccagcgcccccagcagcagcagcagccaggcccccctgcccccccccttccccgcccccgtggtgcccgccagcgtgcccgcccccagcgccggcagcagcctgttcagcaccggcgtggcccccgccctggcccccaaggtggagcccgccgtgcccggccaccacggcctggccctgggcaacagcgccctgcaccacctggacgccctggaccagctgctggaggaggccaaggtgaccagcggcctggtgaagcccaccaccagccccctgatccccaccaccacccccgccagacccctgctgcccttcagcaccggccccggcagccccctgttccagcccctgagcttccagagccagggcagcccccccaagggccccgagctgagcctggccagcatccacgtgcccctggagagcatcaagcccagcagcgccctgcccgtgaccgcctacgacaagaacggcttcagaatcctgttccacttcgccaaggagtgcccccccggcagacccgacgtgctggtggtggtggtgagcatgctgaacaccgcccccctgcccgtgaagagcatcgtgctgcaggccgccgtgcccaagagcatgaaggtgaagctgcagccccccagcggcaccgagctgagccccttcagccccatccagccccccgccgccatcacccaggtgatgctgctggccaaccccctgaaggagaaggtgagactgagatacaagctgaccttcgccctgggcgagcagctgagcaccgaggtgggcgaggtggaccagttcccccccgtggagcagtggggcaacctgtag

SEQ ID NO: 83553 - DNA, 918 bp, synthetic construct
  misc_feature 1..918: note = Description of Artificial Sequence: Synthetic coding sequence
  source 1..918: mol_type = other DNA
atggccgccggcctggccagactgctgctgctgctgggcctgagcgccggcggccccgcccccgccggcgccgccaagatgaaggtggtggaggagcccaacgccttcggcgtgaacaaccccttcctgccccaggccagcagactgcaggccaagagagaccccagccccgtgagcggccccgtgcacctgttcagactgagcggcaagtgcttcagcctggtggagagcacctacaagtacgagttctgccccttccacaacgtgacccagcacgagcagaccttcagatggaacgcctacagcggcatcctgggcatctggcacgagtgggagatcgccaacaacaccttcaccggcatgtggatgagagacggcgacgcctgcagaagcagaagcagacagagcaaggtggagctggcctgcggcaagagcaacagactggcccacgtgagcgagcccagcacctgcgtgtacgccctgaccttcgagacccccctggtgtgccacccccacgccctgctggtgtaccccaccctgcccgaggccctgcagagacagtgggaccaggtggagcaggacctggccgacgagctgatcaccccccagggccacgagaagctgctgagaaccctgttcgaggacgccggctacctgaagacccccgaggagaacgagcccacccagctggagggcggccccgacagcctgggcttcgagaccctggagaactgcagaaaggcccacaaggagctgagcaaggagatcaagagactgaagggcctgctgacccagcacggcatcccctacaccagacccaccgagaccagcaacctggagcacctgggccacgagacccccagagccaagagccccgagcagctgagaggcgaccccggcctgagaggcagcctgtag

SEQ ID NO: 83554 - DNA, 4497 bp, synthetic construct; identical to SEQ ID NO: 75891
  misc_feature 1..4497: note = Description of Artificial Sequence: Synthetic coding sequence
  source 1..4497: mol_type = other DNA

SEQ ID NO: 83555 - DNA, 4173 bp, synthetic construct
  misc_feature 1..4173: note = Description of Artificial Sequence: Synthetic coding sequence
  source 1..4173: mol_type = other DNA
atggacggcgccagcgccgagcaggacggcctgcaggaggacagaagccacagcggccccagcagcctgcccgaggcccccctgaagccccccggccccctggtgccccccgaccagcaggacaaggtgcagtgcgccgaggtgaacagagccagcaccgagggcgagagccccgacggccccggccagggcggcctgtgccagaacggccccaccccccccttccccgacccccccagcagcctggaccccaccaccagccccgtgggccccgacgccagccccggcgtggccggcttccacgacaacctgagaaagagccagggcaccagcgccgagggcagcgtgagaaaggaggccctgcagagcctgagactgagcctgcccatgcaggagacccagctgtgcagcaccgacagccccctgcccctggagaaggaggagcaggtgagactgcaggccagaaagtggctggaggagcagctgaagcagtacagagtgaagagacagcaggagagaagcagccagcccgccaccaagaccagactgttcagcaccctggaccccgagctgatgctgaaccccgagaacctgcccagagccagcaccctggccatgaccaaggagtacagcttcctgagaaccagcgtgcccagaggccccaaggtgggcagcctgggcctgcccgcccaccccagagagaagaagaccagcaagagcagcaagatcagaagcctggccgactacagaaccgaggacagcaacgccggcaacagcggcggcaacgtgcccgcccccgacagcaccaagggcagcctgaagcagaacagaagcagcgccgccagcgtggtgagcgagatcagcctgagccccgacaccgacgacagactggagaacaccagcctggccggcgacagcgtgagcgaggtggacggcaacgacagcgacagcagcagctacagcagcgccagcaccagaggcacctacggcatcctgagcaagaccgtgggcacccaggacaccccctacatggtgaacggccaggagatccccgccgacaccctgggccagttccccagcatcaaggacgtgctgcaggccgccgccgccgagcaccaggaccagggccaggaggtgaacggcgaggtgagaagcagaagagacagcatctgcagcagcgtgagcctggagagcagcgccgccgagacccaggaggagatgctgcaggtgctgaaggagaagatgagactggagggccagctggaggccctgagcctggaggccagccaggccctgaaggagaaggccgagctgcaggcccagctggccgccctgagcaccaagctgcaggcccaggtggagtgcagccacagcagccagcagagacaggacagcctgagcagcgaggtggacaccctgaagcagagctgctgggacctggagagagccatgaccgacctgcagaacatgctggaggccaagaacgccagcctggccagcagcaacaacgacctgcaggtggccgaggagcagtaccagagactgatggccaaggtggaggacatgcagagaagcatgctgagcaaggacaacaccgtgcacgacctgagacagcagatgaccgccctgcagagccagctgcagcaggtgcagctggagagaaccaccctgaccagcaagctgaaggccagccaggccgagatcagcagcctgcagagcgtgagacagtggtaccagcagcagctggccctggcccaggaggccagagtgagactgcagggcgagatggcccacatccaggtgggccagatgacccaggccggcctgctggagcacctgaagctggagaacgtgagcctgagccagcagctgaccgagacccagcacagaagcatgaaggagaagggcagaatcgccgcccagctgcagggcatcgaggccgacatgctggaccaggaggccgccttcatgcagatccaggaggccaagaccatggtggaggaggacctgcagagaagactggaggagttcgagggcgagagagagagactgcagagaatggccgacagcgccgccagcctggagcagcagctggagcaggtgaagctgaccctgctgcagagagaccagcagctggaggccctgcagcaggagcacctggacctgatgaagcagctgaccctgacccaggaggccctgcagagcagagagcagagcctggacgccctgcagacccactacgacgagctgcaggccagactgggcgagctgcagggcgaggccgccagcagagaggacaccatctgcctgctgcagaacgagaagatcatcctggaggccgccctgcaggccgccaagagcggcaaggaggagctggacagaggcgccagaagactggaggagggcaccgaggagaccagcgagaccctggagaagctgagagaggagctggccatcaagagcggccaggtggagcacctgcagcaggagaccgccgccctgaagaagcagatgcagaagatcaaggagcagttcctgcagcagaaggtgatggtggaggcctacagaagagacgccaccagcaaggaccagctgatcagcgagctgaaggccaccagaaagagactggacagcgagctgaaggagctgagacaggagctgatgcaggtgcacggcgagaagagaaccgccgaggccgagctgagcagactgcacagagaggtggcccaggtgagacagcacatggccgacctggagggccacctgcagagcgcccagaaggagagagacgagatggagacccacctgcagagcctgcagttcgacaaggagcagatggtggccgtgaccgaggccaacgaggccctgaagaagcagatcgaggagctgcagcaggaggccagaaaggccatcaccgagcagaagcagaagatgagaagactgggcagcgacctgaccagcgcccagaaggagatgaagaccaagcacaaggcctacgagaacgccgtgggcatcctgagcagaagactgcaggaggccctggccgccaaggaggccgccgacgccgagctgggccagctgagagcccagggcggcagcagcgacagcagcctggccctgcacgagagaatccaggccctggaggccgagctgcaggccgtgagccacagcaagaccctgctggagaaggagctgcaggaggtgatcgccctgaccagccaggagctggaggagagcagagagaaggtgctggagctggaggacgagctgcaggagagcagaggcttcagaaagaagatcaagagactggaggagagcaacaagaagctggccctggagctggagcacgagaagggcaagctgaccggcctgggccagagcaacgccgccctgagagagcacaacagcatcctggagaccgccctggccaagagagaggccgacctggtgcagctgaacctgcaggtgcaggccgtgctgcagagaaaggaggaggaggacagacagatgaagcacctggtgcaggccctgcaggccagcctggagaaggagaaggagaaggtgaacagcctgaaggagcaggtggccgccgccaaggtggaggccggccacaacagaagacacttcaaggccgccagcctggagctgagcgaggtgaagaaggagctgcaggccaaggagcacctggtgcagaagctgcaggccgaggccgacgacctgcagatcagagagggcaagcacagccaggagatcgcccagttccaggccgagctggccgaggccagagcccagctgcagctgctgcagaagcagctggacgagcagctgagcaagcagcccgtgggcaaccaggagatggagaacctgaagtgggaggtggaccagaaggagagagagatccagagcctgaagcagcagctggacctgaccgagcagcagggcagaaaggagctggagggcctgcagcagctgctgcagaacgtgaagagcgagctggagatggcccaggaggacctgagcatgacccagaaggacaagttcatgctgcaggccaaggtgagcgagctgaagaacaacatgaagaccctgctgcagcagaaccagcagctgaagctggacctgagaagaggcgccgccaagaccgtgctgagacccgccagcctgcccggctag

SEQ ID NO: 83556 - DNA, 3405 bp, synthetic construct
  misc_feature 1..3405: note = Description of Artificial Sequence: Synthetic coding sequence
  source 1..3405: mol_type = other DNA
atggacggcgccagcgccgagcaggacggcctgcaggaggacagaagccacagcggccccagcagcctgcccgaggcccccctgaagccccccggccccctggtgccccccgaccagcaggacaaggtgcagtgcgccgaggtgaacagagccagcaccgagggcgagagccccgacggccccggccagggcggcctgtgccagaacggccccaccccccccttccccgacccccccagcagcctggaccccaccaccagccccgtgggccccgacgccagccccggcgtggccggcttccacgacaacctgagaaagagccagggcaccagcgccgagggcagcgtgagaaaggaggccctgcagagcctgagactgagcctgcccatgcaggagacccagctgtgcagcaccgacagccccctgcccctggagaaggaggagcaggtgagactgcaggccagaaagtggctggaggagcagctgaagcagtacagagtgaagagacagcaggagagaagcagccagcccgccaccaagaccagactgttcagcaccctggaccccgagctgatgctgaaccccgagaacctgcccagagccagcaccctggccatgaccaaggagtacagcttcctgagaaccagcgtgcccagaggccccaaggtgggcagcctgggcctgcccgcccaccccagagagaagaagaccagcaagagcagcaagatcagaagcctggccgactacagaaccgaggacagcaacgccggcaacagcggcggcaacgtgcccgcccccgacagcaccaagggcagcctgaagcagaacagaagcagcgccgccagcgtggtgagcgagatcagcctgagccccgacaccgacgacagactggagaacaccagcctggccggcgacagcgtgagcgaggtggacggcaacgacagcgacagcagcagctacagcagcgccagcaccagaggcacctacggcatcctgagcaagaccgtgggcacccaggacaccccctacatggtgaacggccaggagatccccgccgacaccctgggccagttccccagcatcaaggacgtgctgcaggccgccgccgccgagcaccaggaccagggccaggaggtgaacggcgaggtgagaagcagaagagacagcatctgcagcagcgtgagcctggagagcagcgccgccgagacccaggaggagatgctgcaggtgctgaaggagaagatgagactggagggccagctggaggccctgagcctggaggccagccaggccctgaaggagaaggccgagctgcaggcccagctggccgccctgagcaccaagctgcaggcccaggtggagtgcagccacagcagccagcagagacaggacagcctgagcagcgaggtggacaccctgaagcagagctgctgggacctggagagagccatgaccgacctgcagaacatgctggaggccaagaacgccagcctggccagcagcaacaacgacctgcaggtggccgaggagcagtaccagagactgatggccaaggtggaggacatgcagagaagcatgctgagcaaggacaacaccgtgcacgacctgagacagcagatgaccgccctgcagagccagctgcagcaggtgcagctggagagaaccaccctgaccagcaagctgaaggccagccaggccgagatcagcagcctgcagagcgtgagacagtggtaccagcagcagctggccctggcccaggaggccagagtgagactgcagggcgagatggcccacatccaggtgggccagatgacccaggccggcctgctggagcacctgaagctggagaacgtgagcctgagccagcagctgaccgagacccagcacagaagcatgaaggagaagggcagaatcgccgcccagctgcagggcatcgaggccgacatgctggaccaggaggccgccttcatgcagatccaggaggccaagaccatggtggaggaggacctgcagagaagactggaggagttcgagggcgagagagagagactgcagagaatggccgacagcgccgccagcctggagcagcagctggagcaggtgaagctgaccctgctgcagagagaccagcagctggaggccctgcagcaggagcacctggacctgatgaagcagctgaccctgacccaggaggccctgcagagcagagagcagagcctggacgccctgcagacccactacgacgagctgcaggccagactgggcgagctgcagggcgaggccgccagcagagaggacaccatctgcctgctgcagaacgagaagatcatcctggaggccgccctgcaggccgccaagagcggcaaggaggagctggacagaggcgccagaagactggaggagggcaccgaggagaccagcgagaccctggagaagctgagagaggagctggccatcaagagcggccaggtggagcacctgcagcaggagaccgccgccctgaagaagcagatgcagaagatcaaggagcagttcctgcagcagaaggtgatggtggaggcctacagaagagacgccaccagcaaggaccagctgatcagcgagctgaaggccaccagaaagagactggacagcgagctgaaggagctgagacaggagctgatgcaggtgcacggcgagaagagaaccgccgaggccgagctgagcagactgcacagagaggtggcccaggtgagacagcacatggccgacctggagggccacctgcagagcgcccagaaggagagagacgagatggagacccacctgcagagcctgcagttcgacaaggagcagatggtggccgtgaccgaggccaacgaggccctgaagaagcagatcgaggagctgcagcaggaggccagaaaggccatcaccgagcagaagcagaagatgagaagactgggcagcgacctgaccagcgcccagaaggagatgaagaccaagcacaaggcctacgagaacgccgtgggcatcctgagcagaagactgcaggaggccctggccgccaaggaggccgccgacgccgagctgggccagctgagagcccagggcggcagcagcgacagcagcctggccctgcacgagagaatccaggccctggaggccgagctgcaggccgtgagccacagcaagaccctgctggagaaggagctgcaggaggtgatcgccctgaccagccaggagctggaggagagcagagagaaggtgctggagctggaggacgaggtgagacccggccacctgctgtggagacagagaggcgccggccacgtgagccccggccacgccgccaccagagagaccagaagaaccaagctgcacagagtgcccagcgtggccaccttcggcgtggccaccttctag

SEQ ID NO: 83557 - DNA, 6693 bp, synthetic construct
  misc_feature 1..6693: note = Description of Artificial Sequence: Synthetic coding sequence
  source 1..6693: mol_type = other DNA
atgttcaagaagctgaagcagaagatcagcgaggagcagcagcagctgcagcaggccctggcccccgcccaggccagcagcaacagcagcacccccaccagaatgagaagcagaaccagcagcttcaccgagcagctggacgagggcacccccaacagagagagcggcgacacccagagcttcgcccagaagctgcagctgagagtgcccagcgtggagagcctgttcagaagccccatcaaggagagcctgttcagaagcagcagcaaggagagcctggtgagaaccagcagcagagagagcctgaacagactggacctggacagcagcaccgccagcttcgacccccccagcgacatggacagcgaggccgaggacctggtgggcaacagcgacagcctgaacaaggagcagctgatccagagactgagaagaatggagagaagcctgagcagctacagaggcaagtacagcgagctggtgaccgcctaccagatgctgcagagagagaagaagaagctgcagggcatcctgagccagagccaggacaagagcctgagaagaatcgccgagctgagagaggagctgcagatggaccagcaggccaagaagcacctgcaggaggagttcgacgccagcctggaggagaaggaccagtacatcagcgtgctgcagacccaggtgagcctgctgaagcagagactgagaaacggccccatgaacgtggacgtgctgaagcccctgccccagctggagccccaggccgaggtgttcaccaaggaggagaaccccgagagcgacggcgagcccgtggtggaggacggcaccagcgtgaagaccctggagaccctgcagcagagagtgaagagacaggagaacctgctgaagagatgcaaggagaccatccagagccacaaggagcagtgcaccctgctgaccagcgagaaggaggccctgcaggagcagctggacgagagactgcaggagctggagaagatcaaggacctgcacatggccgagaagaccaagctgatcacccagctgagagacgccaagaacctgatcgagcagctggagcaggacaagggcatggtgatcgccgagaccaagagacagatgcacgagaccctggagatgaaggaggaggagatcgcccagctgagaagcagaatcaagcagatgaccacccagggcgaggagctgagagagcagaaggagaagagcgagagagccgccttcgaggagctggagaaggccctgagcaccgcccagaagaccgaggaggccagaagaaagctgaaggccgagatggacgagcagatcaagaccatcgagaagaccagcgaggaggagagaatcagcctgcagcaggagctgagcagagtgaagcaggaggtggtggacgtgatgaagaagagcagcgaggagcagatcgccaagctgcagaagctgcacgagaaggagctggccagaaaggagcaggagctgaccaagaagctgcagaccagagagagagagttccaggagcagatgaaggtggccctggagaagagccagagcgagtacctgaagatcagccaggagaaggagcagcaggagagcctggccctggaggagctggagctgcagaagaaggccatcctgaccgagagcgagaacaagctgagagacctgcagcaggaggccgagacctacagaaccagaatcctggagctggagagcagcctggagaagagcctgcaggagaacaagaaccagagcaaggacctggccgtgcacctggaggccgagaagaacaagcacaacaaggagatcaccgtgatggtggagaagcacaagaccgagctggagagcctgaagcaccagcaggacgccctgtggaccgagaagctgcaggtgctgaagcagcagtaccagaccgagatggagaagctgagagagaagtgcgagcaggagaaggagaccctgctgaaggacaaggagatcatcttccaggcccacatcgaggagatgaacgagaagaccctggagaagctggacgtgaagcagaccgagctggagagcctgagcagcgagctgagcgaggtgctgaaggccagacacaagctggaggaggagctgagcgtgctgaaggaccagaccgacaagatgaagcaggagctggaggccaagatggacgagcagaagaaccaccaccagcagcaggtggacagcatcatcaaggagcacgaggtgagcatccagagaaccgagaaggccctgaaggaccagatcaaccagctggagctgctgctgaaggagagagacaagcacctgaaggagcaccaggcccacgtggagaacctggaggccgacatcaagagaagcgagggcgagctgcagcaggccagcgccaagctggacgtgttccagagctaccagagcgccacccacgagcagaccaaggcctacgaggagcagctggcccagctgcagcagaagctgctggacctggagaccgagagaatcctgctgaccaagcaggtggccgaggtggaggcccagaagaaggacgtgtgcaccgagctggacgcccacaagatccaggtgcaggacctgatgcagcagctggagaagcagaacagcgagatggagcagaaggtgaagagcctgacccaggtgtacgagagcaagctggaggacggcaacaaggagcaggagcagaccaagcagatcctggtggagaaggagaacatgatcctgcagatgagagagggccagaagaaggagatcgagatcctgacccagaagctgagcgccaaggaggacagcatccacatcctgaacgaggagtacgagaccaagttcaagaaccaggagaagaagatggagaaggtgaagcagaaggccaaggagatgcaggagaccctgaagaagaagctgctggaccaggaggccaagctgaagaaggagctggagaacaccgccctggagctgagccagaaggagaagcagttcaacgccaagatgctggagatggcccaggccaacagcgccggcatcagcgacgccgtgagcagactggagaccaaccagaaggagcagatcgagagcctgaccgaggtgcacagaagagagctgaacgacgtgatcagcatctgggagaagaagctgaaccagcaggccgaggagctgcaggagatccacgagatccagctgcaggagaaggagcaggaggtggccgagctgaagcagaagatcctgctgttcggctgcgagaaggaggagatgaacaaggagatcacctggctgaaggaggagggcgtgaagcaggacaccaccctgaacgagctgcaggagcagctgaagcagaagagcgcccacgtgaacagcctggcccaggacgagaccaagctgaaggcccacctggagaagctggaggtggacctgaacaagagcctgaaggagaacaccttcctgcaggagcagctggtggagctgaagatgctggccgaggaggacaagagaaaggtgagcgagctgaccagcaagctgaagaccaccgacgaggagttccagagcctgaagagcagccacgagaagagcaacaagagcctggaggacaagagcctggagttcaagaagctgagcgaggagctggccatccagctggacatctgctgcaagaagaccgaggccctgctggaggccaagaccaacgagctgatcaacatcagcagcagcaagaccaacgccatcctgagcagaatcagccactgccagcacagaaccaccaaggtgaaggaggccctgctgatcaagacctgcaccgtgagcgagctggaggcccagctgagacagctgaccgaggagcagaacaccctgaacatcagcttccagcaggccacccaccagctggaggagaaggagaaccagatcaagagcatgaaggccgacatcgagagcctggtgaccgagaaggaggccctgcagaaggagggcggcaaccagcagcaggccgccagcgagaaggagagctgcatcacccagctgaagaaggagctgagcgagaacatcaacgccgtgaccctgatgaaggaggagctgaaggagaagaaggtggagatcagcagcctgagcaagcagctgaccgacctgaacgtgcagctgcagaacagcatcagcctgagcgagaaggaggccgccatcagcagcctgagaaagcagtacgacgaggagaagtgcgagctgctggaccaggtgcaggacctgagcttcaaggtggacaccctgagcaaggagaagatcagcgccctggagcaggtggacgactggagcaacaagttcagcgagtggaagaagaaggcccagagcagattcacccagcaccagaacaccgtgaaggagctgcagatccagctggagctgaagagcaaggaggcctacgagaaggacgagcagatcaacctgctgaaggaggagctggaccagcagaacaagagattcgactgcctgaagggcgagatggaggacgacaagagcaagatggagaagaaggagagcaacctggagaccgagctgaagagccagaccgccagaatcatggagctggaggaccacatcacccagaagaccatcgagatcgagagcctgaacgaggtgctgaagaactacaaccagcagaaggacatcgagcacaaggagctggtgcagaagctgcagcacttccaggagctgggcgaggagaaggacaacagagtgaaggaggccgaggagaagatcctgaccctggagaaccaggtgtacagcatgaaggccgagctggagaccaagaagaaggagctggagcacgtgaacctgagcgtgaagagcaaggaggaggagctgaaggccctggaggacagactggagagcgagagcgccgccaagctggccgagctgaagagaaaggccgagcagaagatcgccgccatcaagaagcagctgctgagccagatggaggagaaggaggagcagtacaagaagggcaccgagagccacctgagcgagctgaacaccaagctgcaggagagagagagagaggtgcacatcctggaggagaagctgaagagcgtggagagcagccagagcgagaccctgatcgtgcccagaagcgccaagaacgtggccgcctacaccgagcaggaggaggccgacagccagggctgcgtgcagaagacctacgaggagaagatcagcgtgctgcagagaaacctgaccgagaaggagaagctgctgcagagagtgggccaggagaaggaggagaccgtgagcagccacttcgagatgagatgccagtaccaggagagactgatcaagctggagcacgccgaggccaagcagcacgaggaccagagcatgatcggccacctgcaggaggagctggaggagaagaacaagaagtacagcctgatcgtggcccagcacgtggagaaggagggcggcaagaacaacatccaggccaagcagaacctggagaacgtgttcgacgacgtgcagaagaccctgcaggagaaggagctgacctgccagatcctggagcagaagatcaaggagctggacagctgcctggtgagacagaaggaggtgcacagagtggagatggaggagctgaccagcaagtacgagaagctgcaggccctgcagcagatggacggcagaaacaagcccaccgagctgctggaggagaacaccgaggagaagagcaagagccacctggtgcagcccaagctgctgagcaacatggaggcccagcacaacgacctggagttcaagctggccggcgccgagagagagaagcagaagctgggcaaggagatcgtgagactgcagaaggacctgagaatgctgagaaaggagcaccagcaggagctggagatcctgaagaaggagtacgaccaggagagagaggagaagatcaagcaggagcaggaggacctggagctgaagcacaacagcaccctgaagcagctgatgagagagttcaacacccagctggcccagaaggagcaggagctggagatgaccatcaaggagaccatcaacaaggcccaggaggtggaggccgagctgctggagagccaccaggaggagaccaaccagctgctgaagaagatcgccgagaaggacgacgacctgaagagaaccgccaagagatacgaggagatcctggacgccagagaggaggagatgaccgccaaggtgagagacctgcagacccagctggaggagctgcagaagaagtaccagcagaagctggagcaggaggagaaccccggcaacgacaacgtgaccatcatggagctgcagacccagctggcccagaagaccaccctgatcagcgacagcaagctgaaggagcaggagttcagagagcagatccacaacctggaggacagactgaagaagtacgagaagaacgtgtacgccaccaccgtgggcaccccctacaagggcggcaacctgtaccacaccgacgtgagcctgttcggcgagcccaccgagttcgagtacctgagaaaggtgctgttcgagtacatgatgggcagagagaccaagaccatggccaaggtgatcaccaccgtgctgaagttccccgacgaccagacccagaagatcctggagagagaggacgccagactgatgttcaccagccccagaagcggcatcttctag

SEQ ID NO: 83558 - DNA, 6732 bp, synthetic construct
  misc_feature 1..6732: note = Description of Artificial Sequence: Synthetic coding sequence
  source 1..6732: mol_type = other DNA
atgttcaagaagctgaagcagaagatcagcgaggagcagcagcagctgcagcaggccctggcccccgcccaggccagcagcaacagcagcacccccaccagaatgagaagcagaaccagcagcttcaccgagcagctggacgagggcacccccaacagagagaacgccagcacccacgccagcaagagccccgacagcgtgaacggcagcgagcccagcatcccccagagcggcgacacccagagcttcgcccagaagctgcagctgagagtgcccagcgtggagagcctgttcagaagccccatcaaggagagcctgttcagaagcagcagcaaggagagcctggtgagaaccagcagcagagagagcctgaacagactggacctggacagcagcaccgccagcttcgacccccccagcgacatggacagcgaggccgaggacctggtgggcaacagcgacagcctgaacaaggagcagctgatccagagactgagaagaatggagagaagcctgagcagctacagaggcaagtacagcgagctggtgaccgcctaccagatgctgcagagagagaagaagaagctgcagggcatcctgagccagagccaggacaagagcctgagaagaatcgccgagctgagagaggagctgcagatggaccagcaggccaagaagcacctgcaggaggagttcgacgccagcctggaggagaaggaccagtacatcagcgtgctgcagacccaggtgagcctgctgaagcagagactgagaaacggccccatgaacgtggacgtgctgaagcccctgccccagctggagccccaggccgaggtgttcaccaaggaggagaaccccgagagcgacggcgagcccgtggtggaggacggcaccagcgtgaagaccctggagaccctgcagcagagagtgaagagacaggagaacctgctgaagagatgcaaggagaccatccagagccacaaggagcagtgcaccctgctgaccagcgagaaggaggccctgcaggagcagctggacgagagactgcaggagctggagaagatcaaggacctgcacatggccgagaagaccaagctgatcacccagctgagagacgccaagaacctgatcgagcagctggagcaggacaagggcatggtgatcgccgagaccaagagacagatgcacgagaccctggagatgaaggaggaggagatcgcccagctgagaagcagaatcaagcagatgaccacccagggcgaggagctgagagagcagaaggagaagagcgagagagccgccttcgaggagctggagaaggccctgagcaccgcccagaagaccgaggaggccagaagaaagctgaaggccgagatggacgagcagatcaagaccatcgagaagaccagcgaggaggagagaatcagcctgcagcaggagctgagcagagtgaagcaggaggtggtggacgtgatgaagaagagcagcgaggagcagatcgccaagctgcagaagctgcacgagaaggagctggccagaaaggagcaggagctgaccaagaagctgcagaccagagagagagagttccaggagcagatgaaggtggccctggagaagagccagagcgagtacctgaagatcagccaggagaaggagcagcaggagagcctggccctggaggagctggagctgcagaagaaggccatcctgaccgagagcgagaacaagctgagagacctgcagcaggaggccgagacctacagaaccagaatcctggagctggagagcagcctggagaagagcctgcaggagaacaagaaccagagcaaggacctggccgtgcacctggaggccgagaagaacaagcacaacaaggagatcaccgtgatggtggagaagcacaagaccgagctggagagcctgaagcaccagcaggacgccctgtggaccgagaagctgcaggtgctgaagcagcagtaccagaccgagatggagaagctgagagagaagtgcgagcaggagaaggagaccctgctgaaggacaaggagatcatcttccaggcccacatcgaggagatgaacgagaagaccctggagaagctggacgtgaagcagaccgagctggagagcctgagcagcgagctgagcgaggtgctgaaggccagacacaagctggaggaggagctgagcgtgctgaaggaccagaccgacaagatgaagcaggagctggaggccaagatggacgagcagaagaaccaccaccagcagcaggtggacagcatcatcaaggagcacgaggtgagcatccagagaaccgagaaggccctgaaggaccagatcaaccagctggagctgctgctgaaggagagagacaagcacctgaaggagcaccaggcccacgtggagaacctggaggccgacatcaagagaagcgagggcgagctgcagcaggccagcgccaagctggacgtgttccagagctaccagagcgccacccacgagcagaccaaggcctacgaggagcagctggcccagctgcagcagaagctgctggacctggagaccgagagaatcctgctgaccaagcaggtggccgaggtggaggcccagaagaaggacgtgtgcaccgagctggacgcccacaagatccaggtgcaggacctgatgcagcagctggagaagcagaacagcgagatggagcagaaggtgaagagcctgacccaggtgtacgagagcaagctggaggacggcaacaaggagcaggagcagaccaagcagatcctggtggagaaggagaacatgatcctgcagatgagagagggccagaagaaggagatcgagatcctgacccagaagctgagcgccaaggaggacagcatccacatcctgaacgaggagtacgagaccaagttcaagaaccaggagaagaagatggagaaggtgaagcagaaggccaaggagatgcaggagaccctgaagaagaagctgctggaccaggaggccaagctgaagaaggagctggagaacaccgccctggagctgagccagaaggagaagcagttcaacgccaagatgctggagatggcccaggccaacagcgccggcatcagcgacgccgtgagcagactggagaccaaccagaaggagcagatcgagagcctgaccgaggtgcacagaagagagctgaacgacgtgatcagcatctgggagaagaagctgaaccagcaggccgaggagctgcaggagatccacgagatccagctgcaggagaaggagcaggaggtggccgagctgaagcagaagatcctgctgttcggctgcgagaaggaggagatgaacaaggagatcacctggctgaaggaggagggcgtgaagcaggacaccaccctgaacgagctgcaggagcagctgaagcagaagagcgcccacgtgaacagcctggcccaggacgagaccaagctgaaggcccacctggagaagctggaggtggacctgaacaagagcctgaaggagaacaccttcctgcaggagcagctggtggagctgaagatgctggccgaggaggacaagagaaaggtgagcgagctgaccagcaagctgaagaccaccgacgaggagttccagagcctgaagagcagccacgagaagagcaacaagagcctggaggacaagagcctggagttcaagaagctgagcgaggagctggccatccagctggacatctgctgcaagaagaccgaggccctgctggaggccaagaccaacgagctgatcaacatcagcagcagcaagaccaacgccatcctgagcagaatcagccactgccagcacagaaccaccaaggtgaaggaggccctgctgatcaagacctgcaccgtgagcgagctggaggcccagctgagacagctgaccgaggagcagaacaccctgaacatcagcttccagcaggccacccaccagctggaggagaaggagaaccagatcaagagcatgaaggccgacatcgagagcctggtgaccgagaaggaggccctgcagaaggagggcggcaaccagcagcaggccgccagcgagaaggagagctgcatcacccagctgaagaaggagctgagcgagaacatcaacgccgtgaccctgatgaaggaggagctgaaggagaagaaggtggagatcagcagcctgagcaagcagctgaccgacctgaacgtgcagctgcagaacagcatcagcctgagcgagaaggaggccgccatcagcagcctgagaaagcagtacgacgaggagaagtgcgagctgctggaccaggtgcaggacctgagcttcaaggtggacaccctgagcaaggagaagatcagcgccctggagcaggtggacgactggagcaacaagttcagcgagtggaagaagaaggcccagagcagattcacccagcaccagaacaccgtgaaggagctgcagatccagctggagctgaagagcaaggaggcctacgagaaggacgagcagatcaacctgctgaaggaggagctggaccagcagaacaagagattcgactgcctgaagggcgagatggaggacgacaagagcaagatggagaagaaggagagcaacctggagaccgagctgaagagccagaccgccagaatcatggagctggaggaccacatcacccagaagaccatcgagatcgagagcctgaacgaggtgctgaagaactacaaccagcagaaggacatcgagcacaaggagctggtgcagaagctgcagcacttccaggagctgggcgaggagaaggacaacagagtgaaggaggccgaggagaagatcctgaccctggagaaccaggtgtacagcatgaaggccgagctggagaccaagaagaaggagctggagcacgtgaacctgagcgtgaagagcaaggaggaggagctgaaggccctggaggacagactggagagcgagagcgccgccaagctggccgagctgaagagaaaggccgagcagaagatcgccgccatcaagaagcagctgctgagccagatggaggagaaggaggagcagtacaagaagggcaccgagagccacctgagcgagctgaacaccaagctgcaggagagagagagagaggtgcacatcctggaggagaagctgaagagcgtggagagcagccagagcgagaccctgatcgtgcccagaagcgccaagaacgtggccgcctacaccgagcaggaggaggccgacagccagggctgcgtgcagaagacctacgaggagaagatcagcgtgctgcagagaaacctgaccgagaaggagaagctgctgcagagagtgggccaggagaaggaggagaccgtgagcagccacttcgagatgagatgccagtaccaggagagactgatcaagctggagcacgccgaggccaagcagcacgaggaccagagcatgatcggccacctgcaggaggagctggaggagaagaacaagaagtacagcctgatcgtggcccagcacgtggagaaggagggcggcaagaacaacatccaggccaagcagaacctggagaacgtgttcgacgacgtgcagaagaccctgcaggagaaggagctgacctgccagatcctggagcagaagatcaaggagctggacagctgcctggtgagacagaaggaggtgcacagagtggagatggaggagctgaccagcaagtacgagaagctgcaggccctgcagcagatggacggcagaaacaagcccaccgagctgctggaggagaacaccgaggagaagagcaagagccacctggtgcagcccaagctgctgagcaacatggaggcccagcacaacgacctggagttcaagctggccggcgccgagagagagaagcagaagctgggcaaggagatcgtgagactgcagaaggacctgagaatgctgagaaaggagcaccagcaggagctggagatcctgaagaaggagtacgaccaggagagagaggagaagatcaagcaggagcaggaggacctggagctgaagcacaacagcaccctgaagcagctgatgagagagttcaacacccagctggcccagaaggagcaggagctggagatgaccatcaaggagaccatcaacaaggcccaggaggtggaggccgagctgctggagagccaccaggaggagaccaaccagctgctgaagaagatcgccgagaaggacgacgacctgaagagaaccgccaagagatacgaggagatcctggacgccagagaggaggagatgaccgccaaggtgagagacctgcagacccagctggaggagctgcagaagaagtaccagcagaagctggagcaggaggagaaccccggcaacgacaacacccagctggcccagaagaccaccctgatcagcgacagcaagctgaaggagcaggagttcagagagcagatccacaacctggaggacagactgaagaagtacgagaagaacgtgtacgccaccaccgtgggcaccccctacaagggcggcaacctgtaccacaccgacgtgagcctgttcggcgagcccaccgagttcgagtacctgagaaaggtgctgttcgagtacatgatgggcagagagaccaagaccatggccaaggtgatcaccaccgtgctgaagttccccgacgaccagacccagaagatcctggagagagaggacgccagactgatgagctggctgagaagcagcagctag

SEQ ID NO: 83559 - DNA, 2196 bp, synthetic construct
  misc_feature 1..2196: note = Description of Artificial Sequence: Synthetic coding sequence
  source 1..2196: mol_type = other DNA
atgagctggttcgtggacctggccggcaaggccgaggacctgctgaacagagtggaccagggcgccgccaccgccctgagcagaaaggacaacgccagcaacatctacagcaagaacaccgactacaccgagctgcaccagcagaacaccgacctgatctaccagaccggccccaagagcacctacatcagcagcgccgccgacaacatcagaaaccagaaggccaccatcctggccggcaccgccaacgtgaaggtgggcagcagaacccccgtggaggccagccaccccgtggagaacgccagcgtgcccagacccagcagccacttcgtgagaagaaagaagagcgagcccgacgacgagctgctgttcgacttcctgaacagcagccagaaggagcccaccggcagagtggagatcagaaaggagaagggcaagacccccgtgttccagagcagccagaccagcagcgtgagcagcgtgaaccccagcgtgaccaccatcaagaccatcgaggagaacagcttcggcagccagacccacgaggccgccagcaacagcgacagcagccacgagggccaggaggagagcagcaaggagaacgtgagcagcaacgccgcctgccccgaccacacccccacccccaacgacgacggcaagagccacgagctgagcaacctgagactggagaaccagctgctgagaaacgaggtgcagagcctgaaccaggagatggccagcctgctgcagagaagcaaggagacccaggaggagctgaacaaggccagagccagagtggagaagtggaacgccgaccacagcaagagcgacagaatgaccagaggcctgagagcccaggtggacgacctgaccgaggccgtggccgccaaggacagccagctggccgtgctgaaggtgagactgcaggaggccgaccagctgctgagcaccagaaccgaggccctggaggccctgcagagcgagaagagcagaatcatgcaggaccagagcgagggcaacagcctgcagaaccaggccctgcagaccttccaggagagactgcacgaggccgacgccaccctgaagagagagcaggagagctacaagcagatgcagagcgagttcgccgccagactgaacaaggtggagatggagagacagaacctggccgaggccatcaccctggccgagagaaagtacagcgacgagaagaagagagtggacgagctgcagcagcaggtgaagctgtacaagctgaacctggagagcagcaagcaggagctgatcgactacaagcagaaggccaccagaatcctgcagagcaaggagaagctgatcaacagcctgaaggagggcagcggcttcgagggcctggacagcagcaccgccagcagcatggagctggaggagctgagacacgagaaggagatgcagagagaggagatccagaagctgatgggccagatccaccagctgagaagcgagctgcaggacatggaggcccagcaggtgaacgaggccgagagcgccagagagcagctgcaggacctgcacgaccagatcgccggccagaaggccagcaagcaggagctggagaccgagctggagagactgaagcaggagttccactacatcgaggaggacctgtacagaaccaagaacaccctgcagagcagaatcaaggacagagacgaggagatccagaagctgagaaaccagctgaccaacaagaccctgagcaacagcagccagagcgagctggagaacagactgcaccagctgaccgagaccctgatccagaagcagaccatgctggagagcctgagcaccgagaagaacagcctggtgttccagctggagagactggagcagcagatgaacagcgccagcggcagcagcagcaacggcagcagcatcaacatgagcggcatcgacaacggcgagggcaccagactgagaaacgtgcccgtgctgttcaacgacaccgagaccaacctggccggcatgtacggcaaggtgagaaaggccgccagcagcatcgaccagttcagcatcagactgggcatcttcctgagaagataccccatcgccagagtgttcgtgatcatctacatggccctgctgcacctgtgggtgatgatcgtgctgctgacctacacccccgagatgcaccacgaccagccctacggcaagtag

SEQ ID NO: 83560 - DNA, 2076 bp, synthetic construct
  misc_feature 1..2076: note = Description of Artificial Sequence: Synthetic coding sequence
  source 1..2076: mol_type = other DNA
atgagctggttcgtggacctggccggcaaggccgaggacctgctgaacagagtggaccagggcgccgccaccgccctgagcagaaaggacaacgccagcaacatctacagcaagaacaccgactacaccgagctgcaccagcagaacaccgacctgatctaccagaccggccccaagagcacctacatcagcagcgccgccgacaacatcagaaaccagaaggccaccatcctggccggcaccgccaacgtgaaggtgggcagcagaacccccgtggaggccagccaccccgtggagaacgccagcgtgcccagacccagcagccacttcgtgagaagaaagaagagcgagcccgacgacgagctgctgttcgacttcctgaacagcagccagaaggagcccaccggcagagtggagatcagaaaggagaagggcaagacccccgtgttccagagcagccagaccagcagcgtgagcagcgtgaaccccagcgtgaccaccatcaagaccatcgaggagaacagcttcggcagccagacccacgaggccgccagcaacagcgacagcagccacgagggccaggaggagagcagcaaggagaacgtgagcagcaacgccgcctgccccgaccacacccccacccccaacgacgacggcaagagccacgagctgagcaacctgagactggagaaccagctgctgagaaacgaggtgcagagcctgaaccaggagatggccagcctgctgcagagaagcaaggagacccaggaggagctgaacaaggccagagccagagtggagaagtggaacgccgaccacagcaagagcgacagaatgaccagaggcctgagagcccaggtggacgacctgaccgaggccgtggccgccaaggacagccagctggccgtgctgaaggtgagactgcaggaggccgaccagctgctgagcaccagaaccgaggccctggaggccctgcagagcgagaagagcagaatcatgcaggaccagagcgagggcaacagcctgcagaaccaggccctgcagaccttccaggagagactgcacgaggccgacgccaccctgaagagagagcaggagagctacaagcagatgcagagcgagttcgccgccagactgaacaaggtggagatggagagacagaacctggccgaggccatcaccctggccgagagaaagtacagcgacgagaagaagagagtggacgagctgcagcagcaggtgaagctgtacaagctgaacctggagagcagcaagcaggagctgatcgactacaagcagaaggccaccagaatcctgcagagcaaggagaagctgatcaacagcctgaaggagggcagcggcttcgagggcctggacagcagcaccgccagcagcatggagctggaggagctgagacacgagaaggagatgcagagagaggagatccagaagctgatgggccagatccaccagctgagaagcgagctgcaggacatggaggcccagcaggtgaacgaggccgagagcgccagagagcagctgcaggacctgcacgaccagatcgccggccagaaggccagcaagcaggagctggagaccgagctggagagactgaagcaggagttccactacatcgaggaggacctgtacagaaccaagaacaccctgcagagcagaatcaaggacagagacgaggagatccagaagctgagaaaccagctgaccaacaagaccctgagcaacagcagccagagcgagctggagaacagactgcaccagctgaccgagaccctgatccagaagcagaccatgctggagagcctgagcaccgagaagaacagcctggtgttccagctggagagactggagcagcagatgaacagcgccagcggcagcagcagcaacggcagcagcatcaacatgagcggcatcgacaacggcgagggcaccagactgagaaacgtgcccgtgctgttcaacgacaccgagaccaacctggccggcatgtacggcaaggtgagaaaggccgccagcagcatcgaccagttcagactgtgcttcaccagcggcagctag

SEQ ID NO: 83561 - DNA, 1923 bp, synthetic construct
  misc_feature 1..1923: note = Description of Artificial Sequence: Synthetic coding sequence
  source 1..1923: mol_type = other DNA
atgagctggttcgtggacctggccggcaaggccgaggacctgctgaacagagtggaccagggcgccgccaccgccctgagcagaaaggacaacgccagcaacatctacagcaagaacaccgactacaccgagctgcaccagcagaacaccgacctgatctaccagaccggccccaagagcacctacatcagcagcgccgccgacaacatcagaaaccagaaggccaccatcaagaccatcgaggagaacagcttcggcagccagacccacgaggccgccagcaacagcgacagcagccacgagggccaggaggagagcagcaaggagaacgtgagcagcaacgccgcctgccccgaccacacccccacccccaacgacgacggcaagagccacgagctgagcaacctgagactggagaaccagctgctgagaaacgaggtgcagagcctgaaccaggagatggccagcctgctgcagagaagcaaggagacccaggaggagctgaacaaggccagagccagagtggagaagtggaacgccgaccacagcaagagcgacagaatgaccagaggcctgagagcccaggtggacgacctgaccgaggccgtggccgccaaggacagccagctggccgtgctgaaggtgagactgcaggaggccgaccagctgctgagcaccagaaccgaggccctggaggccctgcagagcgagaagagcagaatcatgcaggaccagagcgagggcaacagcctgcagaaccaggccctgcagaccttccaggagagactgcacgaggccgacgccaccctgaagagagagcaggagagctacaagcagatgcagagcgagttcgccgccagactgaacaaggtggagatggagagacagaacctggccgaggccatcaccctggccgagagaaagtacagcgacgagaagaagagagtggacgagctgcagcagcaggtgaagctgtacaagctgaacctggagagcagcaagcaggagctgatcgactacaagcagaaggccaccagaatcctgcagagcaaggagaagctgatcaacagcctgaaggagggcagcggcttcgagggcctggacagcagcaccgccagcagcatggagctggaggagctgagacacgagaaggagatgcagagagaggagatccagaagctgatgggccagatccaccagctgagaagcgagctgcaggacatggaggcccagcaggtgaacgaggccgagagcgccagagagcagctgcaggacctgcacgaccagatcgccggccagaaggccagcaagcaggagctggagaccgagctggagagactgaagcaggagttccactacatcgaggaggacctgtacagaaccaagaacaccctgcagagcagaatcaaggacagagacgaggagatccagaagctgagaaaccagctgaccaacaagaccctgagcaacagcagccagagcgagctggagaacagactgcaccagctgaccgagaccctgatccagaagcagaccatgctggagagcctgagcaccgagaagaacagcctggtgttccagctggagagactggagcagcagatgaacagcgccagcggcagcagcagcaacggcagcagcatcaacatgagcggcatcgacaacggcgagggcaccagactgagaaacgtgcccgtgctgttcaacgacaccgagaccaacctggccggcatgtacggcaaggtgagaaaggccgccagcagcatcgaccagttcagcatcagactgggcatcttcctgagaagataccccatcgccagagtgttcgtgatcatctacatggccctgctgcacctgtgggtgatgatcgtgctgctgacctacacccccgagatgcaccacgaccagccctacggcaagtag

SEQ ID NO: 83562 - DNA, 504 bp, synthetic construct
  misc_feature 1..504: note = Description of Artificial Sequence: Synthetic coding sequence
  source 1..504: mol_type = other DNA
atggccaccgaggtgcacaacctgcaggagctgagaagaagcgccagcctggccaccaaggtgttcatccagagagactacagcgacggcaccatctgccagttccagaccaagttcccccccgagctggacagcagaatcgagagacagctgttcgaggagaccgtgaagaccctgaacggcttctacgccgaggccgagaagatcggcggcagcagctacctggagggctgcctggcctgcgccaccgcctacttcatcttcctgtgcatggagacccactacgagaaggtgctgaagaagatcagcagatacatccaggagcagaacgagaagatcttcgcccccagaggcctgctgctgaccgaccccgtggagagaggcatgagagtgatcgagatcagcatctacgaggacagatgcagcagcggcagcagcagcagcggcagcagcagcggcagcggcagcagcagcggcggcggcggcggcgccggcgccagatag

SEQ ID NO: 83563 - DNA, 1812 bp, synthetic construct
  misc_feature 1..1812: note = Description of Artificial Sequence: Synthetic coding sequence
  source 1..1812: mol_type = other DNA
atggccgaggagaccggccagagcaagctggccgccgccaagaagaagttcaaggagtactggcagagaaacagacccggcgtgcccgccgccgccaagagaaacaccaaggccaacggcagcagccccgagaccgccgccagcggcggctgccacagcagcgaggccagcagcagcgccagcagcagcctgcacgccagacagagcccctgccaggagcaggccgccgtgctgaacagcagaagcatcaagatcagcagactgaacgacaccatcaagagcctgaagcagcagaagaagcaggtggagcaccagctggaggaggagaagaaggccaacaacgagaagcagaaggccgagagagagctggagggccagatccagagactgaacaccgagaagaagaagctgaacaccgacctgtaccacatgaagcacagcctgagatacttcgaggaggagagcaaggacctggccggcagactgcagagaagcagccagagaatcggcgagctggagtggagcctgtgcgccgtggccgccacccagaagaagaagcccgacggcttcagcagcagaagcaaggccctgctgaagagacagctggagcagagcatcagagagcagatcctgctgaagggccacgtgacccagctgaaggagagcctgaaggaggtgcagctggagagagaccagtacgccgagcagatcaagggcgagagagcccagtggcagcagagaatgagaaagatgagccaggaggtgtgcaccctgaaggaggagaagaagcacgacacccacagagtggaggagctggagagaagcctgagcagactgaagaaccagatggccgagcccctgccccccgacgcccccgccgtgagcagcgaggtggagctgcaggacctgagaaaggagctggagagagtggccggcgagctgcaggcccaggtggagaacaaccagtgcatcagcctgctgaacagaggccagaaggagagactgagagagcaggaggagagactgcaggagcagcaggagagactgagagagagagagaagagactgcagcagctggccgagccccagagcgacctggaggagctgaagcacgagaacaagagcgccctgcagctggagcagcaggtgaaggagctgcaggagaagctgggccaggtgatggagaccctgaccagcgccgagaaggagcccgaggccgccgtgcccgccagcggcaccggcggcgagagcagcggcctgatggacctgctggaggagaaggccgacctgagagagcacgtggagaagctggagctgggcttcatccagtacagaagagagagatgccaccagaaggtgcacagactgctgaccgagcccggcgacagcgccaaggacgccagccccggcggcggccaccaccaggccggccccggccagggcggcgaggagggcgaggccgccggcgccgccggcgacggcgtggccgcctgcggcagctacagcgagggccacggcaagttcctggccgccgccagaaaccccgccgccgagcccagccccggcgcccccgccccccaggagctgggcgccgccgacaagcacggcgacctgtgcgaggccagcctgaccaacagcgtggagcccgcccagggcgaggccagagagggcagcagccaggacaaccccaccgcccagcccgtgctgcagctgctgggcgagatgcaggaccaccaggagcaccccggcctgggcagcaactgctgcgtgccctgcttctgctgggcctggctgcccagaagaagaagatag

SEQ ID NO: 83564 - DNA, 1485 bp, synthetic construct
  misc_feature 1..1485: note = Description of Artificial Sequence: Synthetic coding sequence
  source 1..1485: mol_type = other DNA
gagaagaaggccaacaacgagaagcagaaggccgagagagagctggagggccagatccagagactgaacaccgagaagaagaagctgaacaccgacctgtaccacatgaagcacagcctgagatacttcgaggaggagagcaaggacctggccggcagactgcagagaagcagccagagaatcggcgagctggagtggagcctgtgcgccgtggccgccacccagaagaagaagcccgacggcttcagcagcagaagcaaggccctgctgaagagacagctggagcagagcatcagagagcagatcctgctgaagggccacgtgacccagctgaaggagagcctgaaggaggtgcagctggagagagaccagtacgccgagcagatcaagggcgagagagcccagtggcagcagagaatgagaaagatgagccaggaggtgtgcaccctgaaggaggagaagaagcacgacacccacagagtggaggagctggagagaagcctgagcagactgaagaaccagatggccgagcccctgccccccgacgcccccgccgtgagcagcgaggtggagctgcaggacctgagaaaggagctggagagagtggccggcgagctgcaggcccaggtggagaacaaccagtgcatcagcctgctgaacagaggccagaaggagagactgagagagcaggaggagagactgcaggagcagcaggagagactgagagagagagagaagagactgcagcagctggccgagccccagagcgacctggaggagctgcacgagaacaagagcgccctgcagctggagcagcaggtgaaggagctgcaggagaagctgggccaggtgatggagaccctgaccagcgccgagaaggagcccgaggccgccgtgcccgccagcggcaccggcggcgagagcagcggcctgatggacctgctggaggagaaggccgacctgagagagcacgtggagaagctggagctgggcttcatccagtacagaagagagagatgccaccagaaggtgcacagactgctgaccgagcccggcgacagcgccaaggacgccagccccggcggcggccaccaccaggccggccccggccagggcggcgaggagggcgaggccgccggcgccgccggcgacggcgtggccgcctgcggcagctacagcgagggccacggcaagttcctggccgccgccagaaaccccgccgccgagcccagccccggcgcccccgccccccaggagctgggcgccgccgacaagcacggcgacctgtgcgaggccagcctgaccaacagcgtggagcccgcccagggcgaggccagagagggcagcagccaggacaaccccaccgcccagcccgtgctgcagctgctgggcgagatgcaggaccaccaggagcaccccggcctgggcagcaactgctgcgtgccctgcttctgctgggcctggctgcccagaagaagaagatag

SEQ ID NO: 83565 - DNA, 1812 bp, synthetic construct; identical to SEQ ID NO: 83563
  misc_feature 1..1812: note = Description of Artificial Sequence: Synthetic coding sequence
  source 1..1812: mol_type = other DNA

SEQ ID NO: 83566 - DNA, 1902 bp, synthetic construct
  misc_feature 1..1902: note = Description of Artificial Sequence: Synthetic coding sequence
  source 1..1902: mol_type = other DNA
atgctgcccgtggacggcgaggagagaaagagcgagggcagcgacaccgagggcgacagaaccagcccctgcgccggccccaccagcagcgccaccctgaaggacctggaggtgggcggcagcggctggagatgcagcgaccccgccggccagcccagcaacctgctgccccagagaggcctgggcgcccccctgcccgccgagaccgcccacacccagcccagccccaacgacagaagcctgtacctgagccccaagagcagcagcgccagcagcagcctgcacgccagacagagcccctgccaggagcaggccgccgtgctgaacagcagaagcatcaagatcagcagactgaacgacaccatcaagagcctgaagcagcagaagaagcaggtggagcaccagctggaggaggagaagaaggccaacaacgagaagcagaaggccgagagagagctggagggccagatccagagactgaacaccgagaagaagaagctgaacaccgacctgtaccacatgaagcacagcctgagatacttcgaggaggagagcaaggacctggccggcagactgcagagaagcagccagagaatcggcgagctggagtggagcctgtgcgccgtggccgccacccagaagaagaagcccgacggcttcagcagcagaagcaaggccctgctgaagagacagctggagcagagcatcagagagcagatcctgctgaagggccacgtgacccagctgaaggagagcctgaaggaggtgcagctggagagagaccagtacgccgagcagatcaagggcgagagagcccagtggcagcagagaatgagaaagatgagccaggaggtgtgcaccctgaaggaggagaagaagcacgacacccacagagtggaggagctggagagaagcctgagcagactgaagaaccagatggccgagcccctgccccccgacgcccccgccgtgagcagcgaggtggagctgcaggacctgagaaaggagctggagagagtggccggcgagctgcaggcccaggtggagaacaaccagtgcatcagcctgctgaacagaggccagaaggagagactgagagagcaggaggagagactgcaggagcagcaggagagactgagagagagagagaagagactgcagcagctggccgagccccagagcgacctggaggagctgaagcacgagaacaagagcgccctgcagctggagcagcaggtgaaggagctgcaggagaagctgggccaggtgatggagaccctgaccagcgccgagaaggagcccgaggccgccgtgcccgccagcggcaccggcggcgagagcagcggcctgatggacctgctggaggagaaggccgacctgagagagcacgtggagaagctggagctgggcttcatccagtacagaagagagagatgccaccagaaggtgcacagactgctgaccgagcccggcgacagcgccaaggacgccagccccggcggcggccaccaccaggccggccccggccagggcggcgaggagggcgaggccgccggcgccgccggcgacggcgtggccgcctgcggcagctacagcgagggccacggcaagttcctggccgccgccagaaaccccgccgccgagcccagccccggcgcccccgccccccaggagctgggcgccgccgacaagcacggcgacctgtgcgaggccagcctgaccaacagcgtggagcccgcccagggcgaggccagagagggcagcagccaggacaaccccaccgcccagcccgtgctgcagctgctgggcgagatgcaggaccaccaggagcaccccggcctgggcagcaactgctgcgtgccctgcttctgctgggcctggctgcccagaagaagaagatag

SEQ ID NO: 83567 - DNA, 9780 bp, synthetic construct
  misc_feature 1..9780: note = Description of Artificial Sequence: Synthetic coding sequence
  source 1..9780: mol_type = other DNA
atgctgagcagactgagcggcctggccaacgtggtgctgcacgagctgagcggcgacgacgacaccgaccagaacatgagagcccccctggaccccgagctgcaccaggagagcgacatggagttcaacaacaccacccaggaggacgtgcaggagagactggcctacgccgagcagctggtggtggagctgaaggacatcatcagacagaaggacgtgcagctgcagcagaaggacgaggccctgcaggaggagagaaaggccgccgacaacaagatcaagaagctgaagctgcacgccaaggccaagctgaccagcctgaacaagtacatcgaggagatgaaggcccagggcggcaccgtgctgcccaccgagccccagagcgaggagcagctgagcaagcacgacaagagcagcaccgaggaggagatggagatcgagaagatcaagcacaagctgcaggagaaggaggagctgatcagcaccctgcaggcccagctgacccaggcccaggccgagcagcccgcccagagcagcaccgagatggaggagttcgtgatgatgaagcagcagctgcaggagaaggaggagttcatcagcaccctgcaggcccagctgagccagacccaggccgagcaggccgcccagcaggtggtgagagagaaggacgccagattcgagacccaggtgagactgcacgaggacgagctgctgcagctggtgacccaggccgacgtggagaccgagatgcagcagaagctgagagtgctgcagagaaagctggaggagcacgaggagagcctggtgggcagagcccaggtggtggacctgctgcagcaggagctgaccgccgccgagcagagaaaccagatcctgagccagcagctgcagcagatggaggccgagcacaacaccctgagaaacaccgtggagaccgagagagaggagagcaagatcctgctggagaagatggagctggaggtggccgagagaaagctgagcttccacaacctgcaggaggagatgcaccacctgctggagcagttcgagcaggccggccaggcccaggccgagctggagagcagatacagcgccctggagcagaagcacaaggccgagatggaggagaagaccagccacatcctgagcctgcagaagaccggccaggagctgcagagcgcctgcgacgccctgaaggaccagaacagcaagctgctgcaggacaagaacgagcaggccgtgcagagcgcccagaccatccagcagctggaggaccagctgcagcagaagagcaaggagatcagccagttcctgaacagactgcccctgcagcagcacgagaccgccagccagaccagcttccccgacgtgtacaacgagggcacccaggccgtgaccgaggagaacatcgccagcctgcagaagagagtggtggagctggagaacgagaagggcgccctgctgctgagcagcatcgagctggaggagctgaaggccgagaacgagaagctgagcagccagatcaccctgctggaggcccagaacagaaccggcgaggccgacagagaggtgagcgagatcagcatcgtggacatcgccaacaagagaagcagcagcgccgaggagagcggccaggacgtgctggagaacaccttcagccagaagcacaaggagctgagcgtgctgctgctggagatgaaggaggcccaggaggagatcgccttcctgaagctgcagctgcagggcaagagagccgaggaggccgaccacgaggtgctggaccagaaggagatgaagcagatggagggcgagggcatcgcccccatcaagatgaaggtgttcctggaggacaccggccaggacttccccctgatgcccaacgaggagagcagcctgcccgccgtggagaaggagcaggccagcaccgagcaccagagcagaaccagcgaggagatcagcctgaacgacgccggcgtggagctgaagagcaccaagcaggacggcgacaagagcctgagcgccgtgcccgacatcggccagtgccaccaggacgagctggagagactgaagagccagatcctggagctggagctgaacttccacaaggcccaggagatctacgagaagaacctggacgagaaggccaaggagatcagcaacctgaaccagctgatcgaggagttcaagaagaacgccgacaacaacagcagcgccttcaccgccctgagcgaggagagagaccagctgctgagccaggtgaaggagctgagcatggtgaccgagctgagagcccaggtgaagcagctggagatgaacctggccgaggccgagagacagagaagactggactacgagagccagaccgcccacgacaacctgctgaccgagcagatccacagcctgagcatcgaggccaagagcaaggacgtgaagatcgaggtgctgcagaacgagctggacgacgtgcagctgcagttcagcgagcagagcaccctgatcagaagcctgcagagccagctgcagaacaaggagagcgaggtgctggagggcgccgagagagtgagacacatcagcagcaaggtggaggagctgagccaggccctgagccagaaggagctggagatcaccaagatggaccagctgctgctggagaagaagagagacgtggagaccctgcagcagaccatcgaggagaaggaccagcaggtgaccgagatcagcttcagcatgaccgagaagatggtgcagctgaacgaggagaagttcagcctgggcgtggagatcaagaccctgaaggagcagctgaacctgctgagcagagccgaggaggccaagaaggagcaggtggaggaggacaacgaggtgagcagcggcctgaagcagaactacgacgagatgagccccgccggccagatcagcaaggaggagctgcagcacgagttcgacctgctgaagaaggagaacgagcagagaaagagaaagctgcaggccgccctgatcaacagaaaggagctgctgcagagagtgagcagactggaggaggagctggccaacctgaaggacgagagcaagaaggagatccccctgagcgagaccgagagaggcgaggtggaggaggacaaggagaacaaggagtacagcgagaagtgcgtgaccagcaagtgccaggagatcgagatctacctgaagcagaccatcagcgagaaggaggtggagctgcagcacatcagaaaggacctggaggagaagctggccgccgaggagcagttccaggccctggtgaagcagatgaaccagaccctgcaggacaagaccaaccagatcgacctgctgcaggccgagatcagcgagaaccaggccatcatccagaagctgatcaccagcaacaccgacgccagcgacggcgacagcgtggccctggtgaaggagaccgtggtgatcagccccccctgcaccggcagcagcgagcactggaagcccgagctggaggagaagatcctggccctggagaaggagaaggagcagctgcagaagaagctgcaggaggccctgaccagcagaaaggccatcctgaagaaggcccaggagaaggagagacacctgagagaggagctgaagcagcagaaggacgactacaacagactgcaggagcagttcgacgagcagagcaaggagaacgagaacatcggcgaccagctgagacagctgcagatccaggtgagagagagcatcgacggcaagctgcccagcaccgaccagcaggagagctgcagcagcacccccggcctggaggagcccctgttcaaggccaccgagcagcaccacacccagcccgtgctggagagcaacctgtgccccgactggcccagccacagcgaggacgccagcgccctgcagggcggcaccagcgtggcccagatcaaggcccagctgaaggagatcgaggccgagaaggtggagctggagctgaaggtgagcagcaccaccagcgagctgaccaagaagagcgaggaggtgttccagctgcaggagcagatcaacaagcagggcctggagatcgagagcctgaagaccgtgagccacgaggccgaggtgcacgccgagagcctgcagcagaagctggagagcagccagctgcagatcgccggcctggagcacctgagagagctgcagcccaagctggacgagctgcagaagctgatcagcaagaaggaggaggacgtgagctacctgagcggccagctgagcgagaaggaggccgccctgaccaagatccagaccgagatcatcgagcaggaggacctgatcaaggccctgcacacccagctggagatgcaggccaaggagcacgacgagagaatcaagcagctgcaggtggagctgtgcgagatgaagcagaagcccgaggagatcggcgaggagagcagagccaagcagcagatccagagaaagctgcaggccgccctgatcagcagaaaggaggccctgaaggagaacaagagcctgcaggaggagctgagcctggccagaggcaccatcgagagactgaccaagagcctggccgacgtggagagccaggtgagcgcccagaacaaggagaaggacaccgtgctgggcagactggccctgctgcaggaggagagagacaagctgatcaccgagatggacagaagcctgctggagaaccagagcctgagcagcagctgcgagagcctgaagctggccctggagggcctgaccgaggacaaggagaagctggtgaaggagatcgagagcctgaagagcagcaagatcgccgagagcaccgagtggcaggagaagcacaaggagctgcagaaggagtacgagatcctgctgcagagctacgagaacgtgagcaacgaggccgagagaatccagcacgtggtggaggccgtgagacaggagaagcaggagctgtacggcaagctgagaagcaccgaggccaacaagaaggagaccgagaagcagctgcaggaggccgagcaggagatggaggagatgaaggagaagatgagaaagttcgccaagagcaagcagcagaagatcctggagctggaggaggagaacgacagactgagagccgaggtgcaccccgccggcgacaccgccaaggagtgcatggagaccctgctgagcagcaacgccagcatgaaggaggagctggagagagtgaagatggagtacgagaccctgagcaagaagttccagagcctgatgagcgagaaggacagcctgagcgaggaggtgcaggacctgaagcaccagatcgagggcaacgtgagcaagcaggccaacctggaggccaccgagaagcacgacaaccagaccaacgtgaccgaggagggcacccagagcatccccggcgagaccgaggagcaggacagcctgagcatgagcaccagacccacctgcagcgagagcgtgcccagcgccaagagcgccaaccccgccgtgagcaaggacttcagcagccacgacgagatcaacaactacctgcagcagatcgaccagctgaaggagagaatcgccggcctggaggaggagaagcagaagaacaaggagttcagccagaccctggagaacgagaagaacaccctgctgagccagatcagcaccaaggacggcgagctgaagatgctgcaggaggaggtgaccaagatgaacctgctgaaccagcagatccaggaggagctgagcagagtgaccaagctgaaggagaccgccgaggaggagaaggacgacctggaggagagactgatgaaccagctggccgagctgaacggcagcatcggcaactactgccaggacgtgaccgacgcccagatcaagaacgagctgctggagagcgagatgaagaacctgaagaagtgcgtgagcgagctggaggaggagaagcagcagctggtgaaggagaagaccaaggtggagagcgagatcagaaaggagtacctggagaagatccagggcgcccagaaggagcccggcaacaagagccacgccaaggagctgcaggagctgctgaaggagaagcagcaggaggtgaagcagctgcagaaggactgcatcagataccaggagaagatcagcgccctggagagaaccgtgaaggccctggagttcgtgcagaccgagagccagaaggacctggagatcaccaaggagaacctggcccaggccgtggagcacagaaagaaggcccaggccgagctggccagcttcaaggtgctgctggacgacacccagagcgaggccgccagagtgctggccgacaacctgaagctgaagaaggagctgcagagcaacaaggagagcgtgaagagccagatgaagcagaaggacgaggacctggagagaagactggagcaggccgaggagaagcacctgaaggagaagaagaacatgcaggagaagctggacgccctgagaagagagaaggtgcacctggaggagaccatcggcgagatccaggtgaccctgaacaagaaggacaaggaggtgcagcagctgcaggagaacctggacagcaccgtgacccagctggccgccttcaccaagagcatgagcagcctgcaggacgacagagacagagtgatcgacgaggccaagaagtgggagagaaagttcagcgacgccatccagagcaaggaggaggagatcagactgaaggaggacaactgcagcgtgctgaaggaccagctgagacagatgagcatccacatggaggagctgaagatcaacatcagcagactggagcacgacaagcagatctgggagagcaaggcccagaccgaggtgcagctgcagcagaaggtgtgcgacaccctgcagggcgagaacaaggagctgctgagccagctggaggagaccagacacctgtaccacagcagccagaacgagctggccaagctggagagcgagctgaagagcctgaaggaccagctgaccgacctgagcaacagcctggagaagtgcaaggagcagaagggcaacctggagggcatcatcagacagcaggaggccgacatccagaacagcaagttcagctacgagcagctggagaccgacctgcaggccagcagagagctgaccagcagactgcacgaggagatcaacatgaaggagcagaagatcatcagcctgctgagcggcaaggaggaggccatccaggtggccatcgccgagctgagacagcagcacgacaaggagatcaaggagctggagaacctgctgagccaggaggaggaggagaacatcgtgctggaggaggagaacaagaaggccgtggacaagaccaaccagctgatggagaccctgaagaccatcaagaaggagaacatccagcagaaggcccagctggacagcttcgtgaagagcatgagcagcctgcagaacgacagagacagaatcgtgggcgactaccagcagctggaggagagacacctgagcatcatcctggagaaggaccagctgatccaggaggccgccgccgagaacaacaagctgaaggaggagatcagaggcctgagaagccacatggacgacctgaacagcgagaacgccaagctggacgccgagctgatccagtacagagaggacctgaaccaggtgatcaccatcaaggacagccagcagaagcagctgctggaggtgcagctgcagcagaacaaggagctggagaacaagtacgccaagctggaggagaagctgaaggagagcgaggaggccaacgaggacctgagaagaagcttcaacgccctgcaggaggagaagcaggacctgagcaaggagatcgagagcctgaaggtgagcatcagccagctgaccagacaggtgaccgccctgcaggaggagggcaccctgggcctgtaccacgcccagctgaaggtgaaggaggaggaggtgcacagactgagcgccctgttcagcagcagccagaagagaatcgccgagctggaggaggagctggtgtgcgtgcagaaggaggccgccaagaaggtgggcgagatcgaggacaagctgaagaaggagctgaagcacctgcaccacgacgccggcatcatgagaaacgagaccgagaccgccgaggagagagtggccgagctggccagagacctggtggagatggagcagaagctgctgatggtgaccaaggagaacaagggcctgaccgcccagatccagagcttcggcagaagcatgagcagcctgcagaacagcagagaccacgccaacgaggagctggacgagctgaagagaaagtacgacgccagcctgaaggagctggcccagctgaaggagcagggcctgctgaacagagagagagacgccctgctgagcgagaccgccttcagcatgaacagcaccgaggagaacagcctgagccacctggagaagctgaaccagcagctgctgagcaaggacgagcagctgctgcacctgagcagccagctggaggacagctacaaccaggtgcagagcttcagcaaggccatggccagcctgcagaacgagagagaccacctgtggaacgagctggagaagttcagaaagagcgaggagggcaagcagagaagcgccgcccagcccagcaccagccccgccgaggtgcagagcctgaagaaggccatgagcagcctgcagaacgacagagacagactgctgaaggagctgaagaacctgcagcagcagtacctgcagatcaaccaggagatcaccgagctgcaccccctgaaggcccagctgcaggagtaccaggacaagaccaaggccttccagatcatgcaggaggagctgagacaggagaacctgagctggcagcacgagctgcaccagctgagaatggagaagagcagctgggagatccacgagagaagaatgaaggagcagtacctgatggccatcagcgacaaggaccagcagctgagccacctgcagaacctgatcagagagctgagaagcagcagcagccagacccagcccctgaaggtgcagtaccagagacaggccagccccgagaccagcgccagccccgacggcagccagaacctggtgtacgagaccgagctgctgagaacccagctgaacgacagcctgaaggagatccaccagaaggagctgagaatccagcagctgaacagcaacttcagccagctgctggaggagaagaacaccctgagcatccagctgtgcgacaccagccagagcctgagagagaaccagcagcactacggcgacctgctgaaccactgcgccgtgctggagaagcaggtgcaggagctgcaggccggccccctgaacatcgacgtggcccccggcgccccccaggagaagaacggcgtgcacagaaagagcgaccccgaggagctgagagagccccagcagagcttcagcgaggcccagcagcagctgtgcaacaccagacaggaggtgaacgagctgagaaagctgctggaggaggagagagaccagagagtggccgccgagaacgccctgagcgtggccgaggagcagatcagaagactggagcacagcgagtgggacagcagcagaacccccatcatcggcagctgcggcacccaggagcaggccctgctgatcgacctgaccagcaacagctgcagaagaaccagaagcggcgtgggctggaagagagtgctgagaagcctgtgccacagcagaaccagagtgcccctgctggccgccatctacttcctgatgatccacgtgctgctgatcctgtgcttcaccggccacctgtag

SEQ ID NO: 83568 - DNA, 2919 bp, synthetic construct
  misc_feature 1..2919: note = Description of Artificial Sequence: Synthetic coding sequence
  source 1..2919: mol_type = other DNA
atgaaggcccagggcggcaccgtgctgcccaccgagccccagagcgaggagcagctgagcaagcacgacaagagcagcaccgaggaggagatggagatcgagaagatcaagcacaagctgcaggagaaggaggagctgatcagcaccctgcaggcccagctgacccaggcccaggccgagcagcccgcccagaagctgagagtgctgcagagaaagctggaggagcacgaggagagcctggtgggcagagcccaggtggtggacctgctgcagcaggagctgaccgccgccgagcagagaaaccagatcctgagccagcagctgcagcagatggaggccgagcacaacaccctgagaaacaccgtggagaccgagagagaggagagcaagatcctgctggagaagatggagctggaggtggccgagagaaagctgagcttccacaacctgcaggaggagatgcaccacctgctggagcagttcgagcaggccggccaggcccaggccgagctggagagcagatacagcgccctggagcagaagcacaaggccgagatggaggagaagaccagccacatcctgagcctgcagaagaccggccaggagctgcagagcgcctgcgacgccctgaaggaccagaacagcaagctgctgcaggacaagaacgagcaggccgtgcagagcgcccagaccatccagcagctggaggaccagctgcagcagaagagcaaggagatcagccagttcctgaacagactgcccctgcagcagcacgagaccgccagccagaccagcttccccgacgtgtacaacgagggcacccaggccgtgaccgaggagaacatcgccagcctgcagaagagagtggtggagctggagaacgagaagggcgccctgctgctgagcagcatcgagctggaggagctgaaggccgagaacgagaagctgagcagccagatcaccctgctggaggcccagaacagaaccggcgaggccgacagagaggtgagcgagatcagcatcgtggacatcgccaacaagagaagcagcagcgccgaggagagcggccaggacgtgctggagaacaccttcagccagaagcacaaggagctgagcgtgctgctgctggagatgaaggaggcccaggaggagatcgccttcctgaagctgcagctgcagggcaagagagccgaggaggccgaccacgaggtgctggaccagaaggagatgaagcagatggagggcgagggcatcgcccccatcaagatgaaggtgttcctggaggacaccggccaggacttccccctgatgcccaacgaggagagcagcctgcccgccgtggagaaggagcaggccagcaccgagcaccagagcagaaccagcgaggagatcagcctgaacgacgccggcgtggagctgaagagcaccaagcaggacggcgacaagagcctgagcgccgtgcccgacatcggccagtgccaccaggacgagctggagagactgaagagccagatcctggagctggagctgaacttccacaaggcccaggagatctacgagaagaacctggacgagaaggccaaggagatcagcaacctgaaccagctgatcgaggagttcaagaagaacgccgacaacaacagcagcgccttcaccgccctgagcgaggagagagaccagctgctgagccaggtgaaggagctgagcatggtgaccgagctgagagcccaggtgaagcagctggagatgaacctggccgaggccgagagacagagaagactggactacgagagccagaccgcccacgacaacctgctgaccgagcagatccacagcctgagcatcgaggccaagagcaaggacgtgaagatcgaggtgctgcagaacgagctggacgacgtgcagctgcagttcagcgagcagagcaccctgatcagaagcctgcagagccagctgcagaacaaggagagcgaggtgctggagggcgccgagagagtgagacacatcagcagcaaggtggaggagctgagccaggccctgagccagaaggagctggagatcaccaagatggaccagctgctgctggagaagaagagagacgtggagaccctgcagcagaccatcgaggagaaggaccagcaggtgaccgagatcagcttcagcatgaccgagaagatggtgcagctgaacgaggagaagttcagcctgggcgtggagatcaagaccctgaaggagcagctgaacctgctgagcagagccgaggaggccaagaaggagcaggtggaggaggacaacgaggtgagcagcggcctgaagcagaactacgacgagatgagccccgccggccagatcagcaaggaggagctgcagcacgagttcgacctgctgaagaaggagaacgagcagagaaagagaaagctgcaggccgccctgatcaacagaaaggagctgctgcagagagtgagcagactggaggaggagctggccaacctgaaggacgagagcaagaaggagatccccctgagcgagaccgagagaggcgaggtggaggaggacaaggagaacaaggagtacagcgagaagtgcgtgaccagcaagtgccaggagatcgagatctacctgaagcagaccatcagcgagaaggaggtggagctgcagcacatcagaaaggacctggaggagaagctggccgccgaggagcagttccaggccctggtgaagcagatgaaccagaccctgcaggacaagaccaaccagatcgacctgctgcaggccgagatcagcgagaaccaggccatcatccagaagctgatcaccagcaacaccgacgccagcgacggcgacagcgtggccctggtgaaggagaccgtggtgatcagccccccctgcaccggcagcagcgagcactggaagccctag

SEQ ID NO: 83569 - DNA, 126 bp, synthetic construct
  misc_feature 1..126: note = Description of Artificial Sequence: Synthetic coding sequence
  source 1..126: mol_type = other DNA
atgctgagcagactgagcggcctggccaacgtggtgctgcacgagctgagcggcgacgacgacaccgaccagaacatgagagcccccctggaccccgagctgcaccaggagagcgacatggagtag

SEQ ID NO: 83570 - DNA, 4923 bp, synthetic construct
  misc_feature 1..4923: note = Description of Artificial Sequence: Synthetic coding sequence
  source 1..4923: mol_type = other DNA
atgctgagcagactgagcggcctggccaacgtggtgctgcacgagctgagcggcgacgacgacaccgaccagaacatgagagcccccctggaccccgagctgcaccaggagagcgacatggagttcaacaacaccacccaggaggacgtgcaggagagactggcctacgccgagcagctggtggtggagctgaaggacatcatcagacagaaggacgtgcagctgcagcagaaggacgaggccctgcaggaggagagaaaggccgccgacaacaagatcaagaagctgaagctgcacgccaaggccaagctgaccagcctgaacaagtacatcgaggagatgaaggcccagggcggcaccgtgctgcccaccgagccccagagcgaggagcagctgagcaagcacgacaagagcagcaccgaggaggagatggagatcgagaagatcaagcacaagctgcaggagaaggaggagctgatcagcaccctgcaggcccagctgacccaggcccaggccgagcagcccgcccagagcagcaccgagatggaggagttcgtgatgatgaagcagcagctgcaggagaaggaggagttcatcagcaccctgcaggcccagctgagccagacccaggccgagcaggccgcccagaagctgagagtgctgcagagaaagctggaggagcacgaggagagcctggtgggcagagcccaggtggtggacctgctgcagcaggagctgaccgccgccgagcagagaaaccagatcctgagccagcagctgcagcagatggaggccgagcacaacaccctgagaaacaccgtggagaccgagagagaggagagcaagatcctgctggagaagatggagctggaggtggccgagagaaagctgagcttccacaacctgcaggaggagatgcaccacctgctggagcagttcgagcaggccggccaggcccaggccgagctggagagcagatacagcgccctggagcagaagcacaaggccgagatggaggagaagaccagccacatcctgagcctgcagaagaccggccaggagctgcagagcgcctgcgacgccctgaaggaccagaacagcaagctgctgcaggacaagaacgagcaggccgtgcagagcgcccagaccatccagcagctggaggaccagctgcagcagaagagcaaggagatcagccagttcctgaacagactgcccctgcagcagcacgagaccgccagccagaccagcttccccgacgtgtacaacgagggcacccaggccgtgaccgaggagaacatcgccagcctgcagaagagagtggtggagctggagaacgagaagggcgccctgctgctgagcagcatcgagctggaggagctgaaggccgagaacgagaagctgagcagccagatcaccctgctggaggcccagaacagaaccggcgaggccgacagagaggtgagcgagatcagcatcgtggacatcgccaacaagagaagcagcagcgccgaggagagcggccaggacgtgctggagaacaccttcagccagaagcacaaggagctgagcgtgctgctgctggagatgaaggaggcccaggaggagatcgccttcctgaagctgcagctgcagggcaagagagccgaggaggccgaccacgaggtgctggaccagaaggagatgaagcagatggagggcgagggcatcgcccccatcaagatgaaggtgttcctggaggacaccggccaggacttccccctgatgcccaacgaggagagcagcctgcccgccgtggagaaggagcaggccagcaccgagcaccagagcagaaccagcgaggagatcagcctgaacgacgccggcgtggagctgaagagcaccaagcaggacggcgacaagagcctgagcgccgtgcccgacatcggccagtgccaccaggacgagctggagagactgaagagccagatcctggagctggagctgaacttccacaaggcccaggagatctacgagaagaacctggacgagaaggccaaggagatcagcaacctgaaccagctgatcgaggagttcaagaagaacgccgacaacaacagcagcgccttcaccgccctgagcgaggagagagaccagctgctgagccaggtgaaggagctgagcatggtgaccgagctgagagcccaggtgaagcagctggagatgaacctggccgaggccgagagacagagaagactggactacgagagccagaccgcccacgacaacctgctgaccgagcagatccacagcctgagcatcgaggccaagagcaaggacgtgaagatcgaggtgctgcagaacgagctggacgacgtgcagctgcagttcagcgagcagagcaccctgatcagaagcctgcagagccagctgcagaacaaggagagcgaggtgctggagggcgccgagagagtgagacacatcagcagcaaggtggaggagctgagccaggccctgagccagaaggagctggagatcaccaagatggaccagctgctgctggagaagaagagagacgtggagaccctgcagcagaccatcgaggagaaggaccagcaggtgaccgagatcagcttcagcatgaccgagaagatggtgcagctgaacgaggagaagttcagcctgggcgtggagatcaagaccctgaaggagcagctgaacctgctgagcagagccgaggaggccaagaaggagcaggtggaggaggacaacgaggtgagcagcggcctgaagcagaactacgacgagatgagccccgccggccagatcagcaaggaggagctgcagcacgagttcgacctgctgaagaaggagaacgagcagagaaagagaaagctgcaggccgccctgatcaacagaaaggagctgctgcagagagtgagcagactggaggaggagctggccaacctgaaggacgagagcaagaaggagatccccctgagcgagaccgagagaggcgaggtggaggaggacaaggagaacaaggagtacagcgagaagtgcgtgaccagcaagtgccaggagatcgagatctacctgaagcagaccatcagcgagaaggaggtggagctgcagcacatcagaaaggacctggaggagaagctggccgccgaggagcagttccaggccctggtgaagcagatgaaccagaccctgcaggacaagaccaaccagatcgacctgctgcaggccgagatcagcgagaaccaggccatcatccagaagctgatcaccagcaacaccgacgccagcgacggcgacagcgtggccctggtgaaggagaccgtggtgatcagccccccctgcaccggcagcagcgagcactggaagcccgagctggaggagaagatcctggccctggagaaggagaaggagcagctgcagaagaagctgcaggaggccctgaccagcagaaaggccatcctgaagaaggcccaggagaaggagagacacctgagagaggagctgaagcagcagaaggacgactacaacagactgcaggagcagttcgacgagcagagcaaggagaacgagaacatcggcgaccagctgagacagctgcagatccaggtgagagagagcatcgacggcaagctgcccagcaccgaccagcaggagagctgcagcagcacccccggcctggaggagcccctgttcaaggccaccgagcagcaccacacccagcccgtgctggagagcaacctgtgccccgactggcccagccacagcgaggacgccagcgccctgcagggcggcaccagcgtggcccagatcaaggcccagctgaaggagatcgaggccgagaaggtggagctggagctgaaggtgagcagcaccaccagcgagctgaccaagaagagcgaggaggtgttccagctgcaggagcagatcaacaagcagggcctggagatcgagagcctgaagaccgtgagccacgaggccgaggtgcacgccgagagcctgcagcagaagctggagagcagccagctgcagatcgccggcctggagcacctgagagagctgcagcccaagctggacgagctgcagaagctgatcagcaagaaggaggaggacgtgagctacctgagcggccagctgagcgagaaggaggccgccctgaccaagatccagaccgagatcatcgagcaggaggacctgatcaaggccctgcacacccagctggagatgcaggccaaggagcacgacgagagaatcaagcagctgcaggtggagctgtgcgagatgaagcagaagcccgaggagatcggcgaggagagcagagccaagcagcagatccagagaaagctgcaggccgccctgatcagcagaaaggaggccctgaaggagaacaagagcctgcaggaggagctgagcctggccagaggcaccatcgagagactgaccaagagcctggccgacgtggagagccaggtgagcgcccagaacaaggagaaggacaccgtgctgggcagactggccctgctgcaggaggagagagacaagctgatcaccgagatggacagaagcctgctggagaaccagagcctgagcagcagctgcgagagcctgaagctggccctggagggcctgaccgaggacaaggagaagctggtgaaggagatcgagagcctgaagagcagcaagatcgccgagagcaccgagtggcaggagaagcacaaggagctgcagaaggagtacgagatcctgctgcagagctacgagaacgtgagcaacgaggccgagagaatccagcacgtggtggaggccgtgagacaggagaagcaggagctgtacggcaagctgagaagcaccgaggccaacaagaaggagaccgagaagcagctgcaggaggccgagcaggagatggaggagatgaaggagtag

SEQ ID NO: 83571 - DNA, 9810 bp, synthetic construct
  misc_feature 1..9810: note = Description of Artificial Sequence: Synthetic coding sequence
  source 1..9810: mol_type = other DNA
atgctgagcagactgagcggcctggccaacgtggtgctgcacgagctgagcggcgacgacgacaccgaccagaacatgagagcccccctggaccccgagctgcaccaggagagcgacatggagttcaacaacaccacccaggaggacgtgcaggagagactggcctacgccgagcagctggtggtggagctgaaggacatcatcagacagaaggacgtgcagctgcagcagaaggacgaggccctgcaggaggagagaaaggccgccgacaacaagatcaagaagctgaagctgcacgccaaggccaagctgaccagcctgaacaagtacatcgaggagatgaaggcccagggcggcaccgtgctgcccaccgagccccagagcgaggagcagctgagcaagcacgacaagagcagcaccgaggaggagatggagatcgagaagatcaagcacaagctgcaggagaaggaggagctgatcagcaccctgcaggcccagctgacccaggcccaggccgagcagcccgcccagagcagcaccgagatggaggagttcgtgatgatgaagcagcagctgcaggagaaggaggagttcatcagcaccctgcaggcccagctgagccagacccaggccgagcaggccgcccagctgagcagcatgcagcaggtggtgagagagaaggacgccagattcgagacccaggtgagactgcacgaggacgagctgctgcagctggtgacccaggccgacgtggagaccgagatgcagcagaagctgagagtgctgcagagaaagctggaggagcacgaggagagcctggtgggcagagcccaggtggtggacctgctgcagcaggagctgaccgccgccgagcagagaaaccagatcctgagccagcagctgcagcagatggaggccgagcacaacaccctgagaaacaccgtggagaccgagagagaggagagcaagatcctgctggagaagatggagctggaggtggccgagagaaagctgagcttccacaacctgcaggaggagatgcaccacctgctggagcagttcgagcaggccggccaggcccaggccgagctggagagcagatacagcgccctggagcagaagcacaaggccgagatggaggagaagaccagccacatcctgagcctgcagaagaccggccaggagctgcagagcgcctgcgacgccctgaaggaccagaacagcaagctgctgcaggacaagaacgagcaggccgtgcagagcgcccagaccatccagcagctggaggaccagctgcagcagaagagcaaggagatcagccagttcctgaacagactgcccctgcagcagcacgagaccgccagccagaccagcttccccgacgtgtacaacgagggcacccaggccgtgaccgaggagaacatcgccagcctgcagaagagagtggtggagctggagaacgagaagggcgccctgctgctgagcagcatcgagctggaggagctgaaggccgagaacgagaagctgagcagccagatcaccctgctggaggcccagaacagaaccggcgaggccgacagagaggtgagcgagatcagcatcgtggacatcgccaacaagagaagcagcagcgccgaggagagcggccaggacgtgctggagaacaccttcagccagaagcacaaggagctgagcgtgctgctgctggagatgaaggaggcccaggaggagatcgccttcctgaagctgcagctgcagggcaagagagccgaggaggccgaccacgaggtgctggaccagaaggagatgaagcagatggagggcgagggcatcgcccccatcaagatgaaggtgttcctggaggacaccggccaggacttccccctgatgcccaacgaggagagcagcctgcccgccgtggagaaggagcaggccagcaccgagcaccagagcagaaccagcgaggagatcagcctgaacgacgccggcgtggagctgaagagcaccaagcaggacggcgacaagagcctgagcgccgtgcccgacatcggccagtgccaccaggacgagctggagagactgaagagccagatcctggagctggagctgaacttccacaaggcccaggagatctacgagaagaacctggacgagaaggccaaggagatcagcaacctgaaccagctgatcgaggagttcaagaagaacgccgacaacaacagcagcgccttcaccgccctgagcgaggagagagaccagctgctgagccaggtgaaggagctgagcatggtgaccgagctgagagcccaggtgaagcagctggagatgaacctggccgaggccgagagacagagaagactggactacgagagccagaccgcccacgacaacctgctgaccgagcagatccacagcctgagcatcgaggccaagagcaaggacgtgaagatcgaggtgctgcagaacgagctggacgacgtgcagctgcagttcagcgagcagagcaccctgatcagaagcctgcagagccagctgcagaacaaggagagcgaggtgctggagggcgccgagagagtgagacacatcagcagcaaggtggaggagctgagccaggccctgagccagaaggagctggagatcaccaagatggaccagctgctgctggagaagaagagagacgtggagaccctgcagcagaccatcgaggagaaggaccagcaggtgaccgagatcagcttcagcatgaccgagaagatggtgcagctgaacgaggagaagttcagcctgggcgtggagatcaagaccctgaaggagcagctgaacctgctgagcagagccgaggaggccaagaaggagcaggtggaggaggacaacgaggtgagcagcggcctgaagcagaactacgacgagatgagccccgccggccagatcagcaaggaggagctgcagcacgagttcgacctgctgaagaaggagaacgagcagagaaagagaaagctgcaggccgccctgatcaacagaaaggagctgctgcagagagtgagcagactggaggaggagctggccaacctgaaggacgagagcaagaaggagatccccctgagcgagaccgagagaggcgaggtggaggaggacaaggagaacaaggagtacagcgagaagtgcgtgaccagcaagtgccaggagatcgagatctacctgaagcagaccatcagcgagaaggaggtggagctgcagcacatcagaaaggacctggaggagaagctggccgccgaggagcagttccaggccctggtgaagcagatgaaccagaccctgcaggacaagaccaaccagatcgacctgctgcaggccgagatcagcgagaaccaggccatcatccagaagctgatcaccagcaacaccgacgccagcgacggcgacagcgtggccctggtgaaggagaccgtggtgatcagccccccctgcaccggcagcagcgagcactggaagcccgagctggaggagaagatcctggccctggagaaggagaaggagcagctgcagaagaagctgcaggaggccctgaccagcagaaaggccatcctgaagaaggcccaggagaaggagagacacctgagagaggagctgaagcagcagaaggacgactacaacagactgcaggagcagttcgacgagcagagcaaggagaacgagaacatcggcgaccagctgagacagctgcagatccaggtgagagagagcatcgacggcaagctgcccagcaccgaccagcaggagagctgcagcagcacccccggcctggaggagcccctgttcaaggccaccgagcagcaccacacccagcccgtgctggagagcaacctgtgccccgactggcccagccacagcgaggacgccagcgccctgcagggcggcaccagcgtggcccagatcaaggcccagctgaaggagatcgaggccgagaaggtggagctggagctgaaggtgagcagcaccaccagcgagctgaccaagaagagcgaggaggtgttccagctgcaggagcagatcaacaagcagggcctggagatcgagagcctgaagaccgtgagccacgaggccgaggtgcacgccgagagcctgcagcagaagctggagagcagccagctgcagatcgccggcctggagcacctgagagagctgcagcccaagctggacgagctgcagaagctgatcagcaagaaggaggaggacgtgagctacctgagcggccagctgagcgagaaggaggccgccctgaccaagatccagaccgagatcatcgagcaggaggacctgatcaaggccctgcacacccagctggagatgcaggccaaggagcacgacgagagaatcaagcagctgcaggtggagctgtgcgagatgaagcagaagcccgaggagatcggcgaggagagcagagccaagcagcagatccagagaaagctgcaggccgccctgatcagcagaaaggaggccctgaaggagaacaagagcctgcaggaggagctgagcctggccagaggcaccatcgagagactgaccaagagcctggccgacgtggagagccaggtgagcgcccagaacaaggagaaggacaccgtgctgggcagactggccctgctgcaggaggagagagacaagctgatcaccgagatggacagaagcctgctggagaaccagagcctgagcagcagctgcgagagcctgaagctggccctggagggcctgaccgaggacaaggagaagctggtgaaggagatcgagagcctgaagagcagcaagatcgccgagagcaccgagtggcaggagaagcacaaggagctgcagaaggagtacgagatcctgctgcagagctacgagaacgtgagcaacgaggccgagagaatccagcacgtggtggaggccgtgagacaggagaagcaggagctgtacggcaagctgagaagcaccgaggccaacaagaaggagaccgagaagcagctgcaggaggccgagcaggagatggaggagatgaaggagaagatgagaaagttcgccaagagcaagcagcagaagatcctggagctggaggaggagaacgacagactgagagccgaggtgcaccccgccggcgacaccgccaaggagtgcatggagaccctgctgagcagcaacgccagcatgaaggaggagctggagagagtgaagatggagtacgagaccctgagcaagaagttccagagcctgatgagcgagaaggacagcctgagcgaggaggtgcaggacctgaagcaccagatcgagggcaacgtgagcaagcaggccaacctggaggccaccgagaagcacgacaaccagaccaacgtgaccgaggagggcacccagagcatccccggcgagaccgaggagcaggacagcctgagcatgagcaccagacccacctgcagcgagagcgtgcccagcgccaagagcgccaaccccgccgtgagcaaggacttcagcagccacgacgagatcaacaactacctgcagcagatcgaccagctgaaggagagaatcgccggcctggaggaggagaagcagaagaacaaggagttcagccagaccctggagaacgagaagaacaccctgctgagccagatcagcaccaaggacggcgagctgaagatgctgcaggaggaggtgaccaagatgaacctgctgaaccagcagatccaggaggagctgagcagagtgaccaagctgaaggagaccgccgaggaggagaaggacgacctggaggagagactgatgaaccagctggccgagctgaacggcagcatcggcaactactgccaggacgtgaccgacgcccagatcaagaacgagctgctggagagcgagatgaagaacctgaagaagtgcgtgagcgagctggaggaggagaagcagcagctggtgaaggagaagaccaaggtggagagcgagatcagaaaggagtacctggagaagatccagggcgcccagaaggagcccggcaacaagagccacgccaaggagctgcaggagctgctgaaggagaagcagcaggaggtgaagcagctgcagaaggactgcatcagataccaggagaagatcagcgccctggagagaaccgtgaaggccctggagttcgtgcagaccgagagccagaaggacctggagatcaccaaggagaacctggcccaggccgtggagcacagaaagaaggcccaggccgagctggccagcttcaaggtgctgctggacgacacccagagcgaggccgccagagtgctggccgacaacctgaagctgaagaaggagctgcagagcaacaaggagagcgtgaagagccagatgaagcagaaggacgaggacctggagagaagactggagcaggccgaggagaagcacctgaaggagaagaagaacatgcaggagaagctggacgccctgagaagagagaaggtgcacctggaggagaccatcggcgagatccaggtgaccctgaacaagaaggacaaggaggtgcagcagctgcaggagaacctggacagcaccgtgacccagctggccgccttcaccaagagcatgagcagcctgcaggacgacagagacagagtgatcgacgaggccaagaagtgggagagaaagttcagcgacgccatccagagcaaggaggaggagatcagactgaaggaggacaactgcagcgtgctgaaggaccagctgagacagatgagcatccacatggaggagctgaagatcaacatcagcagactggagcacgacaagcagatctgggagagcaaggcccagaccgaggtgcagctgcagcagaaggtgtgcgacaccctgcagggcgagaacaaggagctgctgagccagctggaggagaccagacacctgtaccacagcagccagaacgagctggccaagctggagagcgagctgaagagcctgaaggaccagctgaccgacctgagcaacagcctggagaagtgcaaggagcagaagggcaacctggagggcatcatcagacagcaggaggccgacatccagaacagcaagttcagctacgagcagctggagaccgacctgcaggccagcagagagctgaccagcagactgcacgaggagatcaacatgaaggagcagaagatcatcagcctgctgagcggcaaggaggaggccatccaggtggccatcgccgagctgagacagcagcacgacaaggagatcaaggagctggagaacctgctgagccaggaggaggaggagaacatcgtgctggaggaggagaacaagaaggccgtggacaagaccaaccagctgatggagaccctgaagaccatcaagaaggagaacatccagcagaaggcccagctggacagcttcgtgaagagcatgagcagcctgcagaacgacagagacagaatcgtgggcgactaccagcagctggaggagagacacctgagcatcatcctggagaaggaccagctgatccaggaggccgccgccgagaacaacaagctgaaggaggagatcagaggcctgagaagccacatggacgacctgaacagcgagaacgccaagctggacgccgagctgatccagtacagagaggacctgaaccaggtgatcaccatcaaggacagccagcagaagcagctgctggaggtgcagctgcagcagaacaaggagctggagaacaagtacgccaagctggaggagaagctgaaggagagcgaggaggccaacgaggacctgagaagaagcttcaacgccctgcaggaggagaagcaggacctgagcaaggagatcgagagcctgaaggtgagcatcagccagctgaccagacaggtgaccgccctgcaggaggagggcaccctgggcctgtaccacgcccagctgaaggtgaaggaggaggaggtgcacagactgagcgccctgttcagcagcagccagaagagaatcgccgagctggaggaggagctggtgtgcgtgcagaaggaggccgccaagaaggtgggcgagatcgaggacaagctgaagaaggagctgaagcacctgcaccacgacgccggcatcatgagaaacgagaccgagaccgccgaggagagagtggccgagctggccagagacctggtggagatggagcagaagctgctgatggtgaccaaggagaacaagggcctgaccgcccagatccagagcttcggcagaagcatgagcagcctgcagaacagcagagaccacgccaacgaggagctggacgagctgaagagaaagtacgacgccagcctgaaggagctggcccagctgaaggagcagggcctgctgaacagagagagagacgccctgctgagcgagaccgccttcagcatgaacagcaccgaggagaacagcctgagccacctggagaagctgaaccagcagctgctgagcaaggacgagcagctgctgcacctgagcagccagctggaggacagctacaaccaggtgcagagcttcagcaaggccatggccagcctgcagaacgagagagaccacctgtggaacgagctggagaagttcagaaagagcgaggagggcaagcagagaagcgccgcccagcccagcaccagccccgccgaggtgcagagcctgaagaaggccatgagcagcctgcagaacgacagagacagactgctgaaggagctgaagaacctgcagcagcagtacctgcagatcaaccaggagatcaccgagctgcaccccctgaaggcccagctgcaggagtaccaggacaagaccaaggccttccagatcatgcaggaggagctgagacaggagaacctgagctggcagcacgagctgcaccagctgagaatggagaagagcagctgggagatccacgagagaagaatgaaggagcagtacctgatggccatcagcgacaaggaccagcagctgagccacctgcagaacctgatcagagagctgagaagcagcagcagccagacccagcccctgaaggtgcagtaccagagacaggccagccccgagaccagcgccagccccgacggcagccagaacctggtgtacgagaccgagctgctgagaacccagctgaacgacagcctgaaggagatccaccagaaggagctgagaatccagcagctgaacagcaacttcagccagctgctggaggagaagaacaccctgagcatccagctgtgcgacaccagccagagcctgagagagaaccagcagcactacggcgacctgctgaaccactgcgccgtgctggagaagcaggtgcaggagctgcaggccgtgagcaaggagaagggccccctgaacatcgacgtggcccccggcgccccccaggagaagaacggcgtgcacagaaagagcgaccccgaggagctgagagagccccagcagagcttcagcgaggcccagcagcagctgtgcaacaccagacaggaggtgaacgagctgagaaagctgctggaggaggagagagaccagagagtggccgccgagaacgccctgagcgtggccgaggagcagatcagaagactggagcacagcgagtgggacagcagcagaacccccatcatcggcagctgcggcacccaggagcaggccctgctgatcgacctgaccagcaacagctgcagaagaaccagaagcggcgtgggctggaagagagtgctgagaagcctgtgccacagcagaaccagagtgcccctgctggccgccatctacttcctgatgatccacgtgctgctgatcctgtgcttcaccggccacctgtag

SEQ ID NO: 83572 - DNA, 741 bp, synthetic construct
  misc_feature 1..741: note = Description of Artificial Sequence: Synthetic coding sequence
  source 1..741: mol_type = other DNA
atgagctgggccgccgtgctggccgtggccgccgccagattcggccacttctggggctgcagatggcccggccccatggcccagggctgggccggcttcagcgaggaggagctgagaagactgaagcagaccaaggaccccttcgagccccagagaagactgcccgccaagaagagcagacagcagctgcagagagagaaggccctggtggagcagagccagaagctgggcctgcaggacggcagcaccagcctgctgcccgagcagctgctgagcgcccccaagcagagagtgaacgtgcagaagccccccttcagcagccccaccctgcccagccacttcaccctgaccagccccgtgggcgacggccagccccagggcatcgagagccagcccaaggagctgggcctggagaacagccacgacggccacaacaacgtggagatcctgccccccaagcccgactgcaagctggagaagaagaaggtggagctgcaggagaagagcagatgggaggtgctgcagcaggagcagagactgatggaggagaagaacaagagaaagaaggccctgctggccaaggccatcgccgagagaagcaagagaacccaggccgagaccatgaagctgaagagaatccagaaggagctgcaggccctggacgacatggtgagcgccgacatcggcatcctgagaaacagaatcgaccaggccagcctggactacagctacgccagatag

SEQ ID NO: 83573 - DNA, 1185 bp, synthetic construct
  misc_feature 1..1185: note = Description of Artificial Sequence: Synthetic coding sequence
  source 1..1185: mol_type = other DNA
atgagctgggccgccgtgctggccgtggccgccgccagattcggccacttctggggctgcagatggcccggccccatggcccagggctgggccggcttcagcgaggaggagctgagaagactgaagcagaccaaggaccccttcgagccccagagaagactgcccgccaagaagagcagacagcagctgcagagagagaaggccctggtggagcagagccagaagctgggcctgcaggacggcagcaccagcctgctgcccgagcagctgctgagcgcccccaagcagagagtgaacgtgcagaagccccccttcagcagccccaccctgcccagccacttcaccctgaccagccccgtgggcgacggccagccccagggcatcgagagccagcccaaggagctgggcctggagaacagccacgacggccacaacaacgtggagatcctgccccccaagcccgactgcaagctggagaagaagaaggtggagctgcaggagaagagcagatgggaggtgctgcagcaggagcagagactgatggaggagaagaacaagagaaagaaggccctgctggccaaggccatcgccgagagaagcaagagaacccaggccgagaccatgaagctgaagagaatccagaaggagctgcaggccctggacgacatggtgagcgccgacatcggcatcctgagaaacagaatcgaccaggccagcctggactacagctacgccagaaagagattcgacagagccgaggccgagtacatcgccgccaagctggacatccagagaaagaccgagatcaaggagcagctgaccgagcacctgtgcaccatcatccagcagaacgagctgagaaaggccaagaagctggaggagctgatgcagcagctggacgtggaggccgacgaggagaccctggagctggaggtggaggtggagagactgctgcacgagcaggaggtggagagcagaagacccgtggtgagactggagagacccttccagcccgccgaggagagcgtgaccctggagttcgccaaggagaacagaaagtgccaggagcaggccgtgagccccaaggtggacgaccagtgcggcaacagcagcagcatccccttcctgagccccaactgccccaaccaggagggcaacgacatcagcgccgccctggccacctag

SEQ ID NO: 83574 - DNA, 861 bp, synthetic construct
  misc_feature 1..861: note = Description of Artificial Sequence: Synthetic coding sequence
  source 1..861: mol_type = other DNA
  misc_feature 1..255: note = DNA
  misc_feature 256: note = RNA
  misc_feature 257..861: note = DNA
atgcccctggacgccacctggaacatcaccgtgcagtggctggccgtggacatcgcctgcagaaccctgatgttcctgaagctgatggccacctacagcgccgccttcctgcccgtggtgatcggcctggacagacaggccgccgtgctgaaccccctgggcagcagaagcggcgtgagaaagctgctgggcgccgcctggggcctgagcttcctgctggccttcccccagctgttcctgttccacaccgtgcactgagccggccccgtgcccttcacccagtgcgtgaccaagggcagcttcaaggcccagtggcaggagaccacctacaacctgttcaccttctgctgcctgttcctgctgcccctgaccgccatggccatctgctacagcagaatcgtgctgagcgtgagcagaccccagaccagaaagggcagccacgcccccgccggcgagttcgccctgcccagaagcttcgacaactgccccagagtgagactgagagccctgagactggccctgctgatcctgctgaccttcatcctgtgctggaccccctactacctgctgggcatgtggtactggttcagccccaccatgctgaccgaggtgccccccagcctgagccacatcctgttcctgctgggcctgctgaacgcccccctggaccccctgctgtacggcgccttcaccctgggctgcagaagaggccaccaggagctgagcatcgacagcagcaaggagggcagcggcagaatgctgcaggaggagatccacgccttcagacagctggaggtgcagaagaccgtgaccagcagaagagccggcgagaccaagggcatcagcatcaccagcatctag

SEQ ID NO: 83575 - DNA, 879 bp, synthetic construct
  misc_feature 1..879: note = Description of Artificial Sequence: Synthetic coding sequence
  source 1..879: mol_type = other DNA
  misc_feature 1..273: note = DNA
  misc_feature 274: note = RNA
  misc_feature 275..879: note = DNA
atgagcgccggcaacggcaccccctgggacgccacctggaacatcaccgtgcagtggctggccgtggacatcgcctgcagaaccctgatgttcctgaagctgatggccacctacagcgccgccttcctgcccgtggtgatcggcctggacagacaggccgccgtgctgaaccccctgggcagcagaagcggcgtgagaaagctgctgggcgccgcctggggcctgagcttcctgctggccttcccccagctgttcctgttccacaccgtgcactgagccggccccgtgcccttcacccagtgcgtgaccaagggcagcttcaaggcccagtggcaggagaccacctacaacctgttcaccttctgctgcctgttcctgctgcccctgaccgccatggccatctgctacagcagaatcgtgctgagcgtgagcagaccccagaccagaaagggcagccacgcccccgccggcgagttcgccctgcccagaagcttcgacaactgccccagagtgagactgagagccctgagactggccctgctgatcctgctgaccttcatcctgtgctggaccccctactacctgctgggcatgtggtactggttcagccccaccatgctgaccgaggtgccccccagcctgagccacatcctgttcctgctgggcctgctgaacgcccccctggaccccctgctgtacggcgccttcaccctgggctgcagaagaggccaccaggagctgagcatcgacagcagcaaggagggcagcggcagaatgctgcaggaggagatccacgccttcagacagctggaggtgcagaagaccgtgaccagcagaagagccggcgagaccaagggcatcagcatcaccagcatctag

SEQ ID NO: 83576 - DNA, 363 bp, synthetic construct
  misc_feature 1..363: note = Description of Artificial Sequence: Synthetic coding sequence
  source 1..363: mol_type = other DNA
atggccagcagcagaagaggcctgctgctgctgctgctgctgaccgcccacctgggccccagcgaggcccagcactggagccacggctggtaccccggcggcaagagagccctgagcagcgcccaggacccccagaacgccctgagaccccccggcagagccctggacaccgccgccggcagccccgtgcagaccgcccacggcctgcccagcgacgccctggcccccctggacgacagcatgccctgggagggcagaaccaccgcccagtggagcctgcacagaaagagacacctggccagaaccctgctgaccgccgccagagagcccagacccgccccccccagcagcaacaaggtgtag

SEQ ID NO: 83577 - DNA, 342 bp, synthetic construct
  misc_feature 1..342: note = Description of Artificial Sequence: Synthetic coding sequence
  source 1..342: mol_type = other DNA
atggccagcagcagaagaggcctgctgctgctgctgctgctgaccgcccacctgggccccagcgaggcccagcactggagccacggctggtaccccggcggcaagagagccctgagcagcgcccaggacccccagaacgccctgagaccccccgccggcagccccgtgcagaccgcccacggcctgcccagcgacgccctggcccccctggacgacagcatgccctgggagggcagaaccaccgcccagtggagcctgcacagaaagagacacctggccagaaccctgctgaccgccgccagagagcccagacccgccccccccagcagcaacaaggtgtag

SEQ ID NO: 83578 - DNA, 339 bp, synthetic construct
  misc_feature 1..339: note = Description of Artificial Sequence: Synthetic coding sequence
  source 1..339: mol_type = other DNA
atggccagcagcagaagaggcctgctgctgctgctgctgctgaccgcccacctgggccccagcgaggcccagcactggagccacggctggtaccccggcggcaagagagccctgagcagcgcccaggacccccagaacgccctgagaccccccggcagccccgtgcagaccgcccacggcctgcccagcgacgccctggcccccctggacgacagcatgccctgggagggcagaaccaccgcccagtggagcctgcacagaaagagacacctggccagaaccctgctgaccgccgccagagagcccagacccgccccccccagcagcaacaaggtgtag

SEQ ID NO: 83579 - DNA, 339 bp, synthetic construct; identical to SEQ ID NO: 83578
  misc_feature 1..339: note = Description of Artificial Sequence: Synthetic coding sequence
  source 1..339: mol_type = other DNA

SEQ ID NO: 83580 - DNA, 342 bp, synthetic construct; identical to SEQ ID NO: 83577
  misc_feature 1..342: note = Description of Artificial Sequence: Synthetic coding sequence
  source 1..342: mol_type = other DNA

SEQ ID NO: 83581 - DNA, 945 bp, synthetic construct
  misc_feature 1..945: note = Description of Artificial Sequence: Synthetic coding sequence
  source 1..945: mol_type = other DNA
atgtacaagatggagtacagctacctgaacagcagcgcctacgagagctgcatggccggcatggacaccagcagcctggccagcgcctacgccgacttcagcagctgcagccaggccagcggcttccagtacaaccccatcagaaccaccttcggcgccaccagcggctgccccagcctgacccccggcagctgcagcctgggcaccctgagagaccaccagagcagcccctacgccgccgtgccctacaagctgttcaccgaccacggcggcctgaacgagaagagaaagcagagaagaatcagaaccaccttcaccagcgcccagctgaaggagctggagagagtgttcgccgagacccactaccccgacatctacaccagagaggagctggccctgaagatcgacctgaccgaggccagagtgcaggtgtggttccagaacagaagagccaagttcagaaagcaggagagagccgccgccgccgccgccgccgccgccaagaacggcagcagcggcaagaagagcgacagcagcagagacgacgagagcaaggaggccaagagcaccgaccccgacagcaccggcggccccggccccaaccccaaccccacccccagctgcggcgccaacggcggcggcggcggcggccccagccccgccggcgcccccggcgccgccggccccggcggccccggcggcgagcccggcaagggcggcgccgccgccgccgccgccgccgccgccgccgccgccgccgccgccgccgccgccgccgccggcggcctggccgccgccggcggccccggccagggctgggcccccggccccggccccatcaccagcatccccgacagcctgggcggccccttcgccagcgtgctgagcagcctgcagagacccaacggcgccaaggccgccctggtgaagagcagcatgttctag

SEQ ID NO: 83582 - DNA, 750 bp, synthetic construct
  misc_feature 1..750: note = Description of Artificial Sequence: Synthetic coding sequence
  source 1..750: mol_type = other DNA
atggccaacagcgccagccccgagcagaaccagaaccactgcagcgccatcaacaacagcatccccctgatgcagggcaacctgcccaccctgaccctgagcggcaagatcagagtgaccgtgaccttcttcctgttcctgctgagcgccaccttcaacgccagcttcctgctgaagctgcagaagtggacccagaagaaggagaagggcaagaagctgagcagaatgaagctgctgctgaagcacctgaccctggccaacctgctggagaccctgatcgtgatgcccctggacggcatgtggaacatcaccgtgcagtggtacgccggcgagctgctgtgcaaggtgctgagctacctgaagctgttcagcatgtacgcccccgccttcatgatggtggtgatcagcctggacagaagcctggccatcaccagacccctggccctgaagagcaacagcaaggtgggccagagcatggtgggcctggcctggatcctgagcagcgtgttcgccggcccccagctgcccctgcaccaccccagcttccaccacgccgacctgcagtgcaagaaccacctgcaccccgacaccggccccagcagcggcccccccagaaccaccaccgagagcgtgcaggagcagtacaccaagagcaccgccgaggacagcaagaacgacggctgcatctgccacttcatctactgcctgctggacagcctgctgtgccccagaaacctggtgctggtgtag

SEQ ID NO: 83583 - DNA, 2055 bp, synthetic construct
  misc_feature 1..2055: note = Description of Artificial Sequence: Synthetic coding sequence
  source 1..2055: mol_type = other DNA
atggaggagaacctgatcagcatgagagaggaccacagcttccacgtgagatacagaatggaggccagctgcctggagctggccctggagggcgagagactgtgcaagagcggcgactgcagagccggcgtgagcttcttcgaggccgccgtgcaggtgggcaccgaggacctgaagaccctgagcgccatctacagccagctgggcaacgcctacttctacctgcacgactacgccaaggccctggagtaccaccaccacgacctgaccctggccagaaccatcggcgaccagctgggcgaggccaaggccagcggcaacctgggcaacaccctgaaggtgctgggcaacttcgacgaggccatcgtgtgctgccagagacacctggacatcagcagagagctgaacgacaaggtgggcgaggccagagccctgtacaacctgggcaacgtgtaccacgccaagggcaagagcttcggctgccccggcccccaggacgtgggcgagttccccgaggaggtgagagacgccctgcaggccgccgtggacttctacgaggagaacctgagcctggtgaccgccctgggcgacagagccgcccagggcagagccttcggcaacctgggcaacacccactacctgctgggcaacttcagagacgccgtgatcgcccacgagcagagactgctgatcgccaaggagttcggcgacaaggccgccgagagaagagcctacagcaacctgggcaacgcctacatcttcctgggcgagttcgagaccgccagcgagtactacaagaagaccctgctgctggccagacagctgaaggacagagccgtggaggcccagagctgctacagcctgggcaacacctacaccctgctgcaggactacgagaaggccatcgactaccacctgaagcacctggccatcgcccaggagctgaacgacagaatcggcgagggcagagcctgctggagcctgggcaacgcctacaccgccctgggcaaccacgaccaggccatgcacttcgccgagaagcacctggagatcagcagagaggtgggcgacaagagcggcgagctgaccgccagactgaacctgagcgacctgcagatggtgctgggcctgagctacagcaccaacaacagcatcatgagcgagaacaccgagatcgacagcagcctgaacggcgtgagacccaagctgggcagaagacacagcatggagaacatggagctgatgaagctgacccccgagaaggtgcagaactggaacagcgagatcctggccaagcagaagcccctgatcgccaagcccagcgccaagctgctgttcgtgaacagactgaagggcaagaagtacaagaccaacagcagcaccaaggtgctgcaggacgccagcaacagcatcgaccacagaatccccaacagccagagaaagatcagcgccgacaccatcggcgacgagggcttcttcgacctgctgagcagattccagagcaacagaatggacgaccagagatgctgcctgcaggagaagaactgccacaccgccagcaccaccaccagcagcaccccccccaagatgatgctgaagaccagcagcgtgcccgtggtgagccccaacaccgacgagttcctggacctgctggccagcagccagagcagaagactggacgaccagagagccagcttcagcaacctgcccggcctgagactgacccagaacagccagagcgtgctgagccacctgatgaccaacgacaacaaggaggccgacgaggacttcttcgacatcctggtgaagtgccagggcagcagactggacgaccagagatgcgcccccccccccgccaccaccaagggccccaccgtgcccgacgaggacttcttcagcctgatcctgagaagccagggcaagagaatggacgagcagagagtgctgctgcagagagaccagaacagagacaccgacttcggcctgaaggacttcctgcagaacaacgccctgctggagttcaagaacagcggcaagaagagcgccgaccactag

SEQ ID NO: 83584 - DNA, 2055 bp, synthetic construct; identical to SEQ ID NO: 83583
  misc_feature 1..2055: note = Description of Artificial Sequence: Synthetic coding sequence
  source 1..2055: mol_type = other DNA

SEQ ID NO: 83585 - DNA, 228 bp, synthetic construct
  misc_feature 1..228: note = Description of Artificial Sequence: Synthetic coding sequence
  source 1..228: mol_type = other DNA
atggaggagaacctgatcagcatgagagaggaccacagcttccacgtgagatacagaatggaggccagctgcctggagctggccctggagggcgagagactgtgcaagagcggcgactgcagagccggcgtgagcttcttcgaggccgccgtgcaggtgggcaccgaggacctgaagaccctgagcgccatctacagccagctgggcaacgcctacttctacctgtag

SEQ ID NO: 83586 - DNA, 642 bp, synthetic construct
  misc_feature 1..642: note = Description of Artificial Sequence: Synthetic coding sequence
  source 1..642: mol_type = other DNA
atggaggagaacctgatcagcatgagagaggaccacagcttccacgtgagatacagaatggaggccagctgcctggagctggccctggagggcgagagactgtgcaagagcggcgactgcagagccggcgtgagcttcttcgaggccgccgtgcaggtgggcaccgaggacctgaagaccctgagcgccatctacagccagctgggcaacgcctacttctacctgcacgactacgccaaggccctggagtaccaccaccacgacctgaccctggccagaaccatcggcgaccagctgggcgaggccaaggccagcggcaacctgggcaacaccctgaaggtgctgggcaacttcgacgaggccatcgtgtgctgccagagacacctggacatcagcagagagctgaacgacaaggtgggcgaggccagagccctgtacaacctgggcaacgtgtaccacgccaagggcaagagcttcggctgccccggcccccaggacgtgggcgagttccccgaggaggtgagagacgccctgcaggccgccgtggacttctacgaggagaacctgagcctggtgaccgccctgggcgacagagccgcccagggcagagccttcggcaacctgggcaacacccactactag

SEQ ID NO: 83587 - DNA, 159 bp, synthetic construct
  misc_feature 1..159: note = Description of Artificial Sequence: Synthetic coding sequence
  source 1..159: mol_type = other DNA
atggaggagaacctgatcagcatgagagaggaccacagcttccacgtgagatacagaatggaggccagctgcctggagctggccctggagggcgagagactgtgcaagagcggcgactgcagagccggcgtgagcttcttcgaggccgccgtgcagtag

SEQ ID NO: 83588 - DNA, 1290 bp, synthetic construct
  misc_feature 1..1290: note = Description of Artificial Sequence: Synthetic coding sequence
  source 1..1290: mol_type = other DNA
atggccagcctgtgggagagcccccagcagtgcatcatcctgagccccctgagcggctggtggttcagcatcggcatcagcatcctgaccagcagcgccctggtgctgaagccccagatgctgaagggcgagctgcagaccagacccagccagagacccagcagaaaggccttcagaagaaacaacttcgagtacaccctggaggccagcaagagcctgagacagaagcccggcgacagcaccatgacctacctgaacaagggccagttctaccccatcaccctgaaggaggtgagcagcagcgagggcatccaccaccccatcagcaaggtgagaagcgtgatcatggtggtgttcgccgaggacaagagcagagaggaccagctgagacactggaagtactggcacagcagacagcacaccgccaagcagagatgcatcgacatcgccgactacaaggagagcttcaacaccatcagcaacatcgaggagatcgcctacaacgccatcagcttcacctgggacatcaacgacgaggccaaggtgttcatcagcgtgaactgcctgagcaccgacttcagcagccagaagggcgtgaagggcctgcccctgaacatccaggtggacacctacagctacaacaacagaagcaacaagcccgtgcacagagcctactgccagatcaaggtgttctgcgacaagggcgccgagagaaagatcagagacgaggagagaaagcagagcaagagaaaggtgagcgacgtgaaggtgcccctgctgcccagccacaagagaatggacatcaccgtgttcaagcccttcatcgacctggacacccagcccgtgctgttcatccccgacgtgcacttcgccaacctgcagagaggcacccacgtgctgcccatcgccagcgaggagctggagggcgagggcagcgtgctgaagagaggcccctacggcaccgaggacgacttcgccgtgccccccagcaccaagctggccagaatcgaggagcccaagagagtgctgctgtacgtgagaaaggagagcgaggaggtgttcgacgccctgatgctgaagacccccagcctgaagggcctgatggaggccatcagcgacaagtacgacgtgccccacgacaagatcggcaagatcttcaagaagtgcaagaagggcatcctggtgaacatggacgacaacatcgtgaagcactacagcaacgaggacaccttccagctgcagatcgaggaggccggcggcagctacaagctgaccctgaccgagatctag

SEQ ID NO: 83589 - DNA, 1857 bp, synthetic construct
  misc_feature 1..1857: note = Description of Artificial Sequence: Synthetic coding sequence
  source 1..1857: mol_type = other DNA
atgacccaggagtacgacaacaagagacccgtgctggtgctgcagaacgaggccctgtacccccagagaagaagctacaccagcgaggacgaggcctggaagagcttcctggagaaccccctgaccgccgccaccaaggccatgatgagcatcaacggcgacgaggacagcgccgccgccctgggcctgctgtacgactactacaaggtgcccagagagagaagaagcagcaccgccaagcccgaggtggagcaccccgagcccgaccacagcaagagaaacagcatccccatcgtgaccgagcagcccctgatcagcgccggcgagaacagagtgcaggtgctgaagaacgtgcccttcaacatcgtgctgccccacggcaaccagctgggcatcgacaagagaggccacctgaccgcccccgacaccaccgtgaccgtgagcatcgccaccatgcccacccacagcatcaagaccgagacccagccccacggcttcgccgtgggcatcccccccgccgtgtaccaccccgagcccaccgagagagtggtggtgttcgacagaaacctgaacaccgaccagttcagcagcggcgcccaggcccccaacgcccagagaagaacccccgacagcaccttcagcgagaccttcaaggagggcgtgcaggaggtgttcttccccagcgacctgagcctgagaatgcccggcatgaacagcgaggactacgtgttcgacagcgtgagcggcaacaacttcgagtacaccctggaggccagcaagagcctgagacagaagcccggcgacagcaccatgacctacctgaacaagggccagttctaccccatcaccctgaaggaggtgagcagcagcgagggcatccaccaccccatcagcaaggtgagaagcgtgatcatggtggtgttcgccgaggacaagagcagagaggaccagctgagacactggaagtactggcacagcagacagcacaccgccaagcagagatgcatcgacatcgccgactacaaggagagcttcaacaccatcagcaacatcgaggagatcgcctacaacgccatcagcttcacctgggacatcaacgacgaggccaaggtgttcatcagcgtgaactgcctgagcaccgacttcagcagccagaagggcgtgaagggcctgcccctgaacatccaggtggacacctacagctacaacaacagaagcaacaagcccgtgcacagagcctactgccagatcaaggtgttctgcgacaagggcgccgagagaaagatcagagacgaggagagaaagcagagcaagagaaaggtgagcgacgtgaaggtgcccctgctgcccagccacaagagaatggacatcaccgtgttcaagcccttcatcgacctggacacccagcccgtgctgttcatccccgacgtgcacttcgccaacctgcagagaggcacccacgtgctgcccatcgccagcgaggagctggagggcgagggcagcgtgctgaagagaggcccctacggcaccgaggacgacttcgccgtgccccccagcaccaagctggccagaatcgaggagcccaagagagtgctgctgtacgtgagaaaggagagcgaggaggtgttcgacgccctgatgctgaagacccccagcctgaagggcctgatggaggccatcagcgacaagtacgacgtgccccacgacaagatcggcaagatcttcaagaagtgcaagaagggcatcctggtgaacatggacgacaacatcgtgaagcactacagcaacgaggacaccttccagctgcagatcgaggaggccggcggcagctacaagctgaccctgaccgagatctag

SEQ ID NO: 83590 - DNA, 1857 bp, synthetic construct
  misc_feature 1..1857: note = Description of Artificial Sequence: Synthetic coding sequence
  source 1..1857: mol_type = other DNA
ctgcccaaggaggtggagaacaagagacccgtgctggtgctgcagaacgaggccctgtacccccagagaagaagctacaccagcgaggacgaggcctggaagagcttcctggagaaccccctgaccgccgccaccaaggccatgatgagcatcaacggcgacgaggacagcgccgccgccctgggcctgctgtacgactactacaaggtgcccagagagagaagaagcagcaccgccaagcccgaggtggagcaccccgagcccgaccacagcaagagaaacagcatccccatcgtgaccgagcagcccctgatcagcgccggcgagaacagagtgcaggtgctgaagaacgtgcccttcaacatcgtgctgccccacggcaaccagctgggcatcgacaagagaggccacctgaccgcccccgacaccaccgtgaccgtgagcatcgccaccatgcccacccacagcatcaagaccgagacccagccccacggcttcgccgtgggcatcccccccgccgtgtaccaccccgagcccaccgagagagtggtggtgttcgacagaaacctgaacaccgaccagttcagcagcggcgcccaggcccccaacgcccagagaagaacccccgacagcaccttcagcgagaccttcaaggagggcgtgcaggaggtgttcttccccagcgacctgagcctgagaatgcccggcatgaacagcgaggactacgtgttcgacagcgtgagcggcaacaacttcgagtacaccctggaggccagcaagagcctgagacagaagcccggcgacagcaccatgacctacctgaacaagggccagttctaccccatcaccctgaaggaggtgagcagcagcgagggcatccaccaccccatcagcaaggtgagaagcgtgatcatggtggtgttcgccgaggacaagagcagagaggaccagctgagacactggaagtactggcacagcagacagcacaccgccaagcagagatgcatcgacatcgccgactacaaggagagcttcaacaccatcagcaacatcgaggagatcgcctacaacgccatcagcttcacctgggacatcaacgacgaggccaaggtgttcatcagcgtgaactgcctgagcaccgacttcagcagccagaagggcgtgaagggcctgcccctgaacatccaggtggacacctacagctacaacaacagaagcaacaagcccgtgcacagagcctactgccagatcaaggtgttctgcgacaagggcgccgagagaaagatcagagacgaggagagaaagcagagcaagagaaaggtgagcgacgtgaaggtgcccctgctgcccagccacaagagaatggacatcaccgtgttcaagcccttcatcgacctggacacccagcccgtgctgttcatccccgacgtgcacttcgccaacctgcagagaggcacccacgtgctgcccatcgccagcgaggagctggagggcgagggcagcgtgctgaagagaggcccctacggcaccgaggacgacttcgccgtgccccccagcaccaagctggccagaatcgaggagcccaagagagtgctgctgtacgtgagaaaggagagcgaggaggtgttcgacgccctgatgctgaagacccccagcctgaagggcctgatggaggccatcagcgacaagtacgacgtgccccacgacaagatcggcaagatcttcaagaagtgcaagaagggcatcctggtgaacatggacgacaacatcgtgaagcactacagcaacgaggacaccttccagctgcagatcgaggaggccggcggcagctacaagctgaccctgaccgagatctag

SEQ ID NO: 83591 - DNA, 1878 bp, synthetic construct
  misc_feature 1..1878: note = Description of Artificial Sequence: Synthetic coding sequence
  source 1..1878: mol_type = other DNA
atgagccaggagagcgacaacaacaagagactggtggccctggtgcccatgcccagcgacccccccttcaacaccagaagagcctacaccagcgaggacgaggcctggaagagctacctggagaaccccctgaccgccgccaccaaggccatgatgagcatcaacggcgacgaggacagcgccgccgccctgggcctgctgtacgactactacaaggtgcccagagacaagagactgctgagcgtgagcaaggccagcgacagccaggaggaccaggagaagagaaactgcctgggcaccagcgaggcccagagcaacctgagcggcggcgagaacagagtgcaggtgctgaagaccgtgcccgtgaacctgagcctgaaccaggaccacctggagaacagcaagagagagcagtacagcatcagcttccccgagagcagcgccatcatccccgtgagcggcatcaccgtggtgaaggccgaggacttcacccccgtgttcatggccccccccgtgcactaccccagaggcgacggcgaggagcagagagtggtgatcttcgagcagacccagtacgacgtgcccagcctggccacccacagcgcctacctgaaggacgaccagagaagcacccccgacagcacctacagcgagagcttcaaggacgccgccaccgagaagttcagaagcgccagcgtgggcgccgaggagtacatgtacgaccagaccagcagcggcaccttccagtacaccctggaggccaccaagagcctgagacagaagcagggcgagggccccatgacctacctgaacaagggccagttctacgccatcaccctgagcgagaccggcgacaacaagtgcttcagacaccccatcagcaaggtgagaagcgtggtgatggtggtgttcagcgaggacaagaacagagacgagcagctgaagtactggaagtactggcacagcagacagcacaccgccaagcagagagtgctggacatcgccgactacaaggagagcttcaacaccatcggcaacatcgaggagatcgcctacaacgccgtgagcttcacctgggacgtgaacgaggaggccaagatcttcatcaccgtgaactgcctgagcaccgacttcagcagccagaagggcgtgaagggcctgcccctgatgatccagatcgacacctacagctacaacaacagaagcaacaagcccatccacagagcctactgccagatcaaggtgttctgcgacaagggcgccgagagaaagatcagagacgaggagagaaagcagaacagaaagaagggcaagggccaggccagccagacccagtgcaacagcagcagcgacggcaagctggccgccatccccctgcagaagaagagcgacatcacctacttcaagaccatgcccgacctgcacagccagcccgtgctgttcatccccgacgtgcacttcgccaacctgcagagaaccggccaggtgtactacaacaccgacgacgagagagagggcggcagcgtgctggtgaagagaatgttcagacccatggaggaggagttcggccccgtgcccagcaagcagatgaaggaggagggcaccaagagagtgctgctgtacgtgagaaaggagaccgacgacgtgttcgacgccctgatgctgaagagccccaccgtgaagggcctgatggaggccatcagcgagaagtacggcctgcccgtggagaagatcgccaagctgtacaagaagagcaagaagggcatcctggtgaacatggacgacaacatcatcgagcactacagcaacgaggacaccttcatcctgaacatggagagcatggtggagggcttcaaggtgaccctgatggagatctag

SEQ ID NO: 83592 - DNA, 1830 bp, synthetic construct
  misc_feature 1..1830: note = Description of Artificial Sequence: Synthetic coding sequence
  source 1..1830: mol_type = other DNA
atgcccagcgacccccccttcaacaccagaagagcctacaccagcgaggacgaggcctggaagagctacctggagaaccccctgaccgccgccaccaaggccatgatgagcatcaacggcgacgaggacagcgccgccgccctgggcctgctgtacgactactacaaggtgcccagagacaagagactgctgagcgtgagcaaggccagcgacagccaggaggaccaggagaagagaaactgcctgggcaccagcgaggcccagagcaacctgagcggcggcgagaacagagtgcaggtgctgaagaccgtgcccgtgaacctgagcctgaaccaggaccacctggagaacagcaagagagagcagtacagcatcagcttccccgagagcagcgccatcatccccgtgagcggcatcaccgtggtgaaggccgaggacttcacccccgtgttcatggccccccccgtgcactaccccagaggcgacggcgaggagcagagagtggtgatcttcgagcagacccagtacgacgtgcccagcctggccacccacagcgcctacctgaaggacgaccagagaagcacccccgacagcacctacagcgagagcttcaaggacgccgccaccgagaagttcagaagcgccagcgtgggcgccgaggagtacatgtacgaccagaccagcagcggcaccttccagtacaccctggaggccaccaagagcctgagacagaagcagggcgagggccccatgacctacctgaacaagggccagttctacgccatcaccctgagcgagaccggcgacaacaagtgcttcagacaccccatcagcaaggtgagaagcgtggtgatggtggtgttcagcgaggacaagaacagagacgagcagctgaagtactggaagtactggcacagcagacagcacaccgccaagcagagagtgctggacatcgccgactacaaggagagcttcaacaccatcggcaacatcgaggagatcgcctacaacgccgtgagcttcacctgggacgtgaacgaggaggccaagatcttcatcaccgtgaactgcctgagcaccgacttcagcagccagaagggcgtgaagggcctgcccctgatgatccagatcgacacctacagctacaacaacagaagcaacaagcccatccacagagcctactgccagatcaaggtgttctgcgacaagggcgccgagagaaagatcagagacgaggagagaaagcagaacagaaagaagggcaagggccaggccagccagacccagtgcaacagcagcagcgacggcaagctggccgccatccccctgcagaagaagagcgacatcacctacttcaagaccatgcccgacctgcacagccagcccgtgctgttcatccccgacgtgcacttcgccaacctgcagagaaccggccaggtgtactacaacaccgacgacgagagagagggcggcagcgtgctggtgaagagaatgttcagacccatggaggaggagttcggccccgtgcccagcaagcagatgaaggaggagggcaccaagagagtgctgctgtacgtgagaaaggagaccgacgacgtgttcgacgccctgatgctgaagagccccaccgtgaagggcctgatggaggccatcagcgagaagtacggcctgcccgtggagaagatcgccaagctgtacaagaagagcaagaagggcatcctggtgaacatggacgacaacatcatcgagcactacagcaacgaggacaccttcatcctgaacatggagagcatggtggagggcttcaaggtgaccctgatggagatctag

SEQ ID NO: 83593 - DNA, 1878 bp, synthetic construct
  misc_feature 1..1878: note = Description of Artificial Sequence: Synthetic coding sequence
  source 1..1878: mol_type = other DNA
atgggcaaggacggcagaagcaacaagagactggtggccctggtgcccatgcccagcgacccccccttcaacaccagaagagcctacaccagcgaggacgaggcctggaagagctacctggagaaccccctgaccgccgccaccaaggccatgatgagcatcaacggcgacgaggacagcgccgccgccctgggcctgctgtacgactactacaaggtgcccagagacaagagactgctgagcgtgagcaaggccagcgacagccaggaggaccaggagaagagaaactgcctgggcaccagcgaggcccagagcaacctgagcggcggcgagaacagagtgcaggtgctgaagaccgtgcccgtgaacctgagcctgaaccaggaccacctggagaacagcaagagagagcagtacagcatcagcttccccgagagcagcgccatcatccccgtgagcggcatcaccgtggtgaaggccgaggacttcacccccgtgttcatggccccccccgtgcactaccccagaggcgacggcgaggagcagagagtggtgatcttcgagcagacccagtacgacgtgcccagcctggccacccacagcgcctacctgaaggacgaccagagaagcacccccgacagcacctacagcgagagcttcaaggacgccgccaccgagaagttcagaagcgccagcgtgggcgccgaggagtacatgtacgaccagaccagcagcggcaccttccagtacaccctggaggccaccaagagcctgagacagaagcagggcgagggccccatgacctacctgaacaagggccagttctacgccatcaccctgagcgagaccggcgacaacaagtgcttcagacaccccatcagcaaggtgagaagcgtggtgatggtggtgttcagcgaggacaagaacagagacgagcagctgaagtactggaagtactggcacagcagacagcacaccgccaagcagagagtgctggacatcgccgactacaaggagagcttcaacaccatcggcaacatcgaggagatcgcctacaacgccgtgagcttcacctgggacgtgaacgaggaggccaagatcttcatcaccgtgaactgcctgagcaccgacttcagcagccagaagggcgtgaagggcctgcccctgatgatccagatcgacacctacagctacaacaacagaagcaacaagcccatccacagagcctactgccagatcaaggtgttctgcgacaagggcgccgagagaaagatcagagacgaggagagaaagcagaacagaaagaagggcaagggccaggccagccagacccagtgcaacagcagcagcgacggcaagctggccgccatccccctgcagaagaagagcgacatcacctacttcaagaccatgcccgacctgcacagccagcccgtgctgttcatccccgacgtgcacttcgccaacctgcagagaaccggccaggtgtactacaacaccgacgacgagagagagggcggcagcgtgctggtgaagagaatgttcagacccatggaggaggagttcggccccgtgcccagcaagcagatgaaggaggagggcaccaagagagtgctgctgtacgtgagaaaggagaccgacgacgtgttcgacgccctgatgctgaagagccccaccgtgaagggcctgatggaggccatcagcgagaagtacggcctgcccgtggagaagatcgccaagctgtacaagaagagcaagaagggcatcctggtgaacatggacgacaacatcatcgagcactacagcaacgaggacaccttcatcctgaacatggagagcatggtggagggcttcaaggtgaccctgatggagatctag

SEQ ID NO: 83594 - DNA, 21 bp, synthetic construct
  misc_feature 1..21: note = Description of Artificial Sequence: Synthetic coding sequence
  source 1..21: mol_type = other DNA
atgagccaggagagcgactag

SEQ ID NO: 83595 - DNA, 1737 bp, synthetic construct
  misc_feature 1..1737: note = Description of Artificial Sequence: Synthetic coding sequence
  source 1..1737: mol_type = other DNA
atgctgagaagactggacaagatcagattcagaggccacaagagagacgacttcctggacctggccgagagccccaacgccagcgacaccgagtgcagcgacgagatccccctgaaggtgcccagaaccagccccagagacagcgaggagctgagagaccccgccggccccggcaccctgatcatggccaccggcgtgcaggacttcaacagaaccgagttcgacagactgaacgagatcaagggccacctggagatcgccctgctggagaagcacttcctgcaggaggagctgagaaagctgagagaggagaccaacgccgagatgctgagacaggagctggacagagagagacagagaagaatggagctggagcagaaggtgcaggaggtgctgaaggccagaaccgaggagcagatggcccagcagccccccaagggccaggcccaggccagcaacggcgccgagagaagaagccagggcctgagcagcagactgcagaagtggttctacgagagattcggcgagtacgtggaggacttcagattccagcccgaggagaacaccgtggagaccgaggagcccctgagcgccagaagactgaccgagaacatgagaagactgaagagaggcgccaagcccgtgaccaacttcgtgaagaacctgagcgccctgagcgactggtacagcgtgtacaccagcgccatcgccttcaccgtgtacatgaacgccgtgtggcacggctgggccatccccctgttcctgttcctggccatcctgagactgagcctgaactacctgatcgccagaggctggagaatccagtggagcatcgtgcccgaggtgagcgagcccgtggagccccccaaggaggacctgaccgtgagcgagaagttccagctggtgctggacgtggcccagaaggcccagaacctgttcggcaagatggccgacatcctggagaagatcaagaacctgttcatgtgggtgcagcccgagatcacccagaagctgtacgtggccctgtgggccgccttcctggccagctgcttcttcccctacagactggtgggcctggccgtgggcctgtacgccggcatcaagttcttcctgatcgacttcatcttcaagagatgccccagactgagagccaagtacgacaccccctacatcatctggagaagcctgcccaccgacccccagctgaaggagagaagcagcgccgccgtgagcagaagactgcagaccaccagcagcagaagctacgtgcccagcgcccccgccggcctgggcaaggaggaggacgccggcagattccacagcaccaagaagggcaacttccacgagatcttcaacctgaccgagaacgagagacccctggccgtgtgcgagaacggctggagatgctgcctgatcaacagagacagaaagatgcccaccgactacatcagaaacggcgtgctgtacgtgaccgagaactacctgtgcttcgagagcagcaagagcggcagcagcaagagaaacaaggtgatcaagctggtggacatcaccgacatccagaagtacaaggtgctgagcgtgctgcccggcagcggcatgggcatcgccgtgagcacccccagcacccagaagcccctggtgttcggcgccatggtgcacagagacgaggccttcgagaccatcctgagccagtacatcaagatcaccagcgccgccgccagcggcggcgacagctag

SEQ ID NO: 83596 - DNA, 1737 bp, synthetic construct; identical to SEQ ID NO: 83595
  misc_feature 1..1737: note = Description of Artificial Sequence: Synthetic coding sequence
  source 1..1737: mol_type = other DNA

SEQ ID NO: 83597 - DNA, 102 bp, synthetic construct
  misc_feature 1..102: note = Description of Artificial Sequence: Synthetic coding sequence
  source 1..102: mol_type = other DNA
atgctgagaagactggacaagatcagattcagaggccacaagagagacgacttcctggacctggccgagagccccaacgccagcgacaccgagtgcagctag

SEQ ID NO: 83598 - DNA, 1782 bp, synthetic construct
  misc_feature 1..1782: note = Description of Artificial Sequence: Synthetic coding sequence
  source 1..1782: mol_type = other DNA
atgtggaccctggtgagctgggtggccctgaccgccggcctggtggccggcaccagatgccccgacggccagttctgccccgtggcctgctgcctggaccccggcggcgccagctacagctgctgcagacccctgctggacaagtggcccaccaccctgagcagacacctgggcggcccctgccaggtggacgcccactgcagcgccggccacagctgcatcttcaccgtgagcggcaccagcagctgctgccccttccccgaggccgtggcctgcggcgacggccaccactgctgccccagaggcttccactgcagcgccgacggcagaagctgcttccagagaagcggcaacaacagcgtgggcgccatccagtgccccgacagccagttcgagtgccccgacttcagcacctgctgcgtgatggtggacggcagctggggctgctgccccatgccccaggccagctgctgcgaggacagagtgcactgctgcccccacggcgccttctgcgacctggtgcacaccagatgcatcacccccaccggcacccaccccctggccaagaagctgcccgcccagagaaccaacagagccgtggccctgagcagcagcgtgatgtgccccgacgccagaagcagatgccccgacggcagcacctgctgcgagctgcccagcggcaagtacggctgctgccccatgcccaacgccacctgctgcagcgaccacctgcactgctgcccccaggacaccgtgtgcgacctgatccagagcaagtgcctgagcaaggagaacgccaccaccgacctgctgaccaagctgcccgcccacaccgtgggcgacgtgaagtgcgacatggaggtgagctgccccgacggctacacctgctgcagactgcagagcggcgcctggggctgctgccccttcacccaggccgtgtgctgcgaggaccacatccactgctgccccgccggcttcacctgcgacacccagaagggcacctgcgagcagggcccccaccaggtgccctggatggagaaggcccccgcccacctgagcctgcccgacccccaggccctgaagagagacgtgccctgcgacaacgtgagcagctgccccagcagcgacacctgctgccagctgaccagcggcgagtggggctgctgccccatccccgaggccgtgtgctgcagcgaccaccagcactgctgcccccagggctacacctgcgtggccgagggccagtgccagagaggcagcgagatcgtggccggcctggagaagatgcccgccagaagagccagcctgagccaccccagagacatcggctgcgaccagcacaccagctgccccgtgggccagacctgctgccccagcctgggcggcagctgggcctgctgccagctgccccacgccgtgtgctgcgaggacagacagcactgctgccccgccggctacacctgcaacgtgaaggccagaagctgcgagaaggaggtggtgagcgcccagcccgccaccttcctggccagaagcccccacgtgggcgtgaaggacgtggagtgcggcgagggccacttctgccacgacaaccagacctgctgcagagacaacagacagggctgggcctgctgcccctacagacagggcgtgtgctgcgccgacagaagacactgctgccccgccggcttcagatgcgccgccagaggcaccaagtgcctgagaagagaggcccccagatgggacgcccccctgagagaccccgccctgagacagctgctgtag

SEQ ID NO: 83599 - DNA, 1317 bp, synthetic construct
  misc_feature 1..1317: note = Description of Artificial Sequence: Synthetic coding sequence
  source 1..1317: mol_type = other DNA
atgtggaccctggtgagctgggtggccctgaccgccggcctggtggccggcaccagatgccccgacggccagttctgccccgtggcctgctgcctggaccccggcggcgccagctacagctgctgcagacccctgctggacaagtggcccaccaccctgagcagacacctgggcggcccctgccaggtggacgcccactgcagcgccggccacagctgcatcttcaccgtgagcggcaccagcagctgctgccccttccccgaggccgtggcctgcggcgacggccaccactgctgccccagaggcttccactgcagcgccgacggcagaagctgcttccagagaagcggcaacaacagcgtgggcgccatccagtgccccgacagccagttcgagtgccccgacttcagcacctgctgcgtgatggtggacggcagctggggctgctgccccatgccccaggccagctgctgcgaggacagagtgcactgctgcccccacggcgccttctgcgacctggtgcacaccagatgcatcacccccaccggcacccaccccctggccaagaagctgcccgcccagagaaccaacagagccgtggccctgagcagcagcgtgatgtgccccgacgccagaagcagatgccccgacggcagcacctgctgcgagctgcccagcggcaagtacggctgctgccccatgcccaacgccacctgctgcagcgaccacctgcactgctgcccccaggacaccgtgtgcgacctgatccagagcaagtgcctgagcaaggagaacgccaccaccgacctgctgaccaagctgcccgcccacaccgtgggcgacgtgaagtgcgacatggaggtgagctgccccgacggctacacctgctgcagactgcagagcggcgcctggggctgctgccccttcacccaggccgtgtgctgcgaggaccacatccactgctgccccgccggcttcacctgcgacacccagaagggcacctgcgagcagggcccccaccaggtgccctggatggagaaggcccccgcccacctgagcctgcccgacccccaggccctgaagagagacgtgccctgcgacaacgtgagcagctgccccagcagcgacacctgctgcagagacaacagacagggctgggcctgctgcccctacagacagggcgtgtgctgcgccgacagaagacactgctgccccgccggcttcagatgcgccgccagaggcaccaagtgcctgagaagagaggcccccagatgggacgcccccctgagagaccccgccctgagacagctgctgtag

SEQ ID NO: 83600 - DNA, 1242 bp, synthetic construct
  misc_feature 1..1242: note = Description of Artificial Sequence: Synthetic coding sequence
  source 1..1242: mol_type = other DNA
atggccatcaccgccgcccacggcgccagcaccgccgtgcagaccggcgaccccgccagcaaggaccaggtgaccaccccctgggtgcccagcagcgccctgatcgtgagcagcaacgccagaaccagccccagagccgtgctgtggagcatggcccccggcggcgccgccccctgccccagactgcccgccgtgaagaccggctgcaccgccgtgtgcgacctgatccagagcaagtgcctgagcaaggagaacgccaccaccgacctgctgaccaagctgcccgcccacaccgtgggcgacgtgaagtgcgacatggaggtgagctgccccgacggctacacctgctgcagactgcagagcggcgcctggggctgctgccccttcacccaggccgtgtgctgcgaggaccacatccactgctgccccgccggcttcacctgcgacacccagaagggcacctgcgagcagggcccccaccaggtgccctggatggagaaggcccccgcccacctgagcctgcccgacccccaggccctgaagagagacgtgccctgcgacaacgtgagcagctgccccagcagcgacacctgctgccagctgaccagcggcgagtggggctgctgccccatccccgaggccgtgtgctgcagcgaccaccagcactgctgcccccagggctacacctgcgtggccgagggccagtgccagagaggcagcgagatcgtggccggcctggagaagatgcccgccagaagagccagcctgagccaccccagagacatcggctgcgaccagcacaccagctgccccgtgggccagacctgctgccccagcctgggcggcagctgggcctgctgccagctgccccacgccgtgtgctgcgaggacagacagcactgctgccccgccggctacacctgcaacgtgaaggccagaagctgcgagaaggaggtggtgagcgcccagcccgccaccttcctggccagaagcccccacgtgggcgtgaaggacgtggagtgcggcgagggccacttctgccacgacaaccagacctgctgcagagacaacagacagggctgggcctgctgcccctacagacagggcgtgtgctgcgccgacagaagacactgctgccccgccggcttcagatgcgccgccagaggcaccaagtgcctgagaagagaggcccccagatgggacgcccccctgagagaccccgccctgagacagctgctgtag

SEQ ID NO: 83601 - DNA, 789 bp, synthetic construct
  misc_feature 1..789: note = Description of Artificial Sequence: Synthetic coding sequence
  source 1..789: mol_type = other DNA
atgagaaacagctacagattcctggccagcagcctgagcgtggtggtgagcctgctgctgatccccgaggacgtgtgcgagaagatcatcggcggcaacgaggtgaccccccacagcagaccctacatggtgctgctgagcctggacagaaagaccatctgcgccggcgccctgatcgccaaggactgggtgctgaccgccgcccactgcaacctgaacaagagaagccaggtgatcctgggcgcccacagcatcaccagagaggagcccaccaagcagatcatgctggtgaagaaggagttcccctacccctgctacgaccccgccaccagagagggcgacctgaagctgctgcagctgatggagaaggccaagatcaacaagtacgtgaccatcctgcacctgcccaagaagggcgacgacgtgaagcccggcaccatgtgccaggtggccggctggggcagaacccacaacagcgccagctggagcgacaccctgagagaggtgaacatcaccatcatcgacagaaaggtgtgcaacgacagaaaccactacaacttcaaccccgtgatcggcatgaacatggtgtgcgccggcagcctgagaggcggcagagacagctgcaacggcgacagcggcagccccctgctgtgcgagggcgtgttcagaggcgtgaccagcttcggcctggagaacaagtgcggcgaccccagaggccccggcgtgtacatcctgctgagcaagaagcacctgaactggatcatcatgaccatcaagggcgccgtgtag

SEQ ID NO: 83602 - DNA, 741 bp, synthetic construct
  misc_feature 1..741: note = Description of Artificial Sequence: Synthetic coding sequence
  source 1..741: mol_type = other DNA
atgcagcccttcctgctgctgctggccttcctgctgacccccggcgccggcaccgaggagatcatcggcggccacgaggccaagccccacagcagaccctacatggccttcgtgcagttcctgcaggagaagagcagaaagagatgcggcggcatcctggtgagaaaggacttcgtgctgaccgccgcccactgccagggcagcagcatcaacgtgaccctgggcgcccacaacatcaaggagcaggagagaacccagcagttcatccccgtgaagagacccatcccccaccccgcctacaaccccaagaacttcagcaacgacatcatgctgctgcagctggagagaaaggccaagtggaccaccgccgtgagacccctgagactgcccagcagcaaggcccaggtgaagcccggccagctgtgcagcgtggccggctggggctacgtgagcatgagcaccctggccaccaccctgcaggaggtgctgctgaccgtgcagaaggactgccagtgcgagagactgttccacggcaactacagcagagccaccgagatctgcgtgggcgaccccaagaagacccagaccggcttcaagggcgacagcggcggccccctggtgtgcaaggacgtggcccagggcatcctgagctacggcaacaagaagggcaccccccccggcgtgtacatcaaggtgagccacttcctgccctggatcaagagaaccatgaagagactgtag

SEQ ID NO: 83603 - DNA, 459 bp, synthetic construct
  misc_feature 1..459: note = Description of Artificial Sequence: Synthetic coding sequence
  source 1..459: mol_type = other DNA
atgcagcccatcctgctgctgctggccttcctgctgctgcccagagccgaccagctggagagaaaggccaagagaaccagagccgtgcagcccctgagactgcccagcaacaaggcccaggtgaagcccggccagacctgcagcgtggccggctggggccagaccgcccccctgggcaagcacagccacaccctgcaggaggtgaagatgaccgtgcaggaggacagaaagtgcgagagcgacctgagacactactacgacagcaccatcgagctgtgcgtgggcgaccccgagatcaagaagaccagcttcaagggcgacagcggcggccccctggtgtgcaacaaggtggcccagggcatcgtgagctacggcagaaacaacggcatgccccccagagcctgcaccaaggtgagcagcttcgtgcactggatcaagaagaccatgaagagatactag

SEQ ID NO: 83604 - DNA, 609 bp, synthetic construct
  misc_feature 1..609: note = Description of Artificial Sequence: Synthetic coding sequence
  source 1..609: mol_type = other DNA
atgcagcccatcctgctgctgctggccttcctgctgctgcccagagccgacgccggcgagatcatcggcggccacgaggccaagccccacagcagaccctacatggcctacctgatgatctgggaccagaagagcctgaagagatgcggcggcttcctgatcagagacgacttcgtgctgaccgccgcccactgctggggcagactggagagaaaggccaagagaaccagagccgtgcagcccctgagactgcccagcaacaaggcccaggtgaagcccggccagacctgcagcgtggccggctggggccagaccgcccccctgggcaagcacagccacaccctgcaggaggtgaagatgaccgtgcaggaggacagaaagtgcgagagcgacctgagacactactacgacagcaccatcgagctgtgcgtgggcgaccccgagatcaagaagaccagcttcaagggcgacagcggcggccccctggtgtgcaacaaggtggcccagggcatcgtgagctacggcagaaacaacggcatgccccccagagcctgcaccaaggtgagcagcttcgtgcactggatcaagaagaccatgaagagatactag

SEQ ID NO: 83605 - DNA, 846 bp, synthetic construct
  misc_feature 1..846: note = Description of Artificial Sequence: Synthetic coding sequence
  source 1..846: mol_type = other DNA
atgaagagcctgagcctgctgcacctgttccccctgcccagagccaagagagagcagggcggcaacaacagcagcagcaaccagggcagcctgcccgagaagatgcagcccatcctgctgctgctggccttcctgctgctgcccagagccgacgccggcgagatcatcggcggccacgaggccaagccccacagcagaccctacatggcctacctgatgatctgggaccagaagagcctgaagagatgcggcggcttcctgatcagagacgacttcgtgctgaccgccgcccactgctggggcagcagcatcaacgtgaccctgggcgcccacaacatcaaggagcaggagcccacccagcagttcatccccgtgaagagacccatcccccaccccgcctacaaccccaagaacttcagcaacgacatcatgctgctgcagctggagagaaaggccaagagaaccagagccgtgcagcccctgagactgcccagcaacaaggcccaggtgaagcccggccagacctgcagcgtggccggctggggccagaccgcccccctgggcaagcacagccacaccctgcaggaggtgaagatgaccgtgcaggaggacagaaagtgcgagagcgacctgagacactactacgacagcaccatcgagctgtgcgtgggcgaccccgagatcaagaagaccagcttcaagggcgacagcggcggccccctggtgtgcaacaaggtggcccagggcatcgtgagctacggcagaaacaacggcatgccccccagagcctgcaccaaggtgagcagcttcgtgcactggatcaagaagaccatgaagagatactag

SEQ ID NO: 83606 - DNA, 708 bp, synthetic construct
  misc_feature 1..708: note = Description of Artificial Sequence: Synthetic coding sequence
  source 1..708: mol_type = other DNA
atgcagaccttccccagcggcgagatcatcggcggccacgaggccaagccccacagcagaccctacatggcctacctgatgatctgggaccagaagagcctgaagagatgcggcggcttcctgatcagagacgacttcgtgctgaccgccgcccactgctggggcagcagcatcaacgtgaccctgggcgcccacaacatcaaggagcaggagcccacccagcagttcatccccgtgaagagacccatcccccaccccgcctacaaccccaagaacttcagcaacgacatcatgctgctgcagctggagagaaaggccaagagaaccagagccgtgcagcccctgagactgcccagcaacaaggcccaggtgaagcccggccagacctgcagcgtggccggctggggccagaccgcccccctgggcaagcacagccacaccctgcaggaggtgaagatgaccgtgcaggaggacagaaagtgcgagagcgacctgagacactactacgacagcaccatcgagctgtgcgtgggcgaccccgagatcaagaagaccagcttcaagggcgacagcggcggccccctggtgtgcaacaaggtggcccagggcatcgtgagctacggcagaaacaacggcatgccccccagagcctgcaccaaggtgagcagcttcgtgcactggatcaagaagaccatgaagagatactag

SEQ ID NO: 83607 - DNA, 483 bp, synthetic construct
  misc_feature 1..483: note = Description of Artificial Sequence: Synthetic coding sequence
  source 1..483: mol_type = other DNA
atgcagcccttcctgctgctgctggccttcctgctgacccccggcgccggcaccgaggagatcatcggcggccacgaggccaagccccacagcagaccctacatggccttcgtgcagttcctgcaggagaagagcagaaagagatgcggcggcatcctggtgagaaaggacttcgtgctgaccgccgcccactgccagggcagcagcatcaacgtgaccctgggcgcccacaacatcaaggagcaggagagaacccagcagttcatccccgtgaagagacccatcccccaccccgcctacaaccccaagaacttcagcaacgacatcatgctgctgcagggcgacagcggcggccccctggtgtgcaaggacgtggcccagggcatcctgagctacggcaacaagaagggcaccccccccggcgtgtacatcaaggtgagccacttcctgccctggatcaagagaaccatgaagagactgtag

SEQ ID NO: 83608 - DNA, 768 bp, synthetic construct
  misc_feature 1..768: note = Description of Artificial Sequence: Synthetic coding sequence
  source 1..768: mol_type = other DNA
atgcagcccctgctgctgctgctggccttcctgctgcccaccggcgccgaggccggcgagatcatcggcggcagagagagcagaccccacagcagaccctacatggcctacctgcagatccagagccccgccggccagagcagatgcggcggcttcctggtgagagaggacttcgtgctgaccgccgcccactgctggggcagcaacatcaacgtgaccctgggcgcccacaacatccagagaagagagaacacccagcagcacatcaccgccagaagagccatcagacacccccagtacaaccagagaaccatccagaacgacatcatgctgctgcagctgagcagaagagtgagaagaaacagaaacgtgaaccccgtggccctgcccagagcccaggagggcctgagacccggcaccctgtgcaccgtggccggctggggcagagtgagcatgagaagaggcaccgacaccctgagagaggtgcagctgagagtgcagagagacagacagtgcctgagaatcttcggcagctacgaccccagaagacagatctgcgtgggcgacagaagagagagaaaggccgccttcaagggcgacagcggcggccccctgctgtgcaacaacgtggcccacggcatcgtgagctacggcaagagcagcggcgtgccccccgaggtgttcaccagagtgagcagcttcctgccctggatcagaaccaccatgagaagcttcaagctgctggaccagatggagacccccctgtag

SEQ ID NO: 83609 - DNA, 348 bp, synthetic construct
  misc_feature 1..348: note = Description of Artificial Sequence: Synthetic coding sequence
  source 1..348: mol_type = other DNA
atgcagcccttcctgctgctgctggccttcctgctgacccccggcgccggcaccgaggagatcatcggcggccacgaggccaagccccacagcagaccctacatggccttcgtgcagttcctgcaggagaagagcagaaagagatgcggcggcatcctggtgagaaaggacttcgtgctgaccgccgcccactgccagggcagaggcgacagcggcggccccctggtgtgcaaggacgtggcccagggcatcctgagctacggcaacaagaagggcaccccccccggcgtgtacatcaaggtgagccacttcctgccctggatcaagagaaccatgaagagactgtag

SEQ ID NO: 83610 - DNA, 774 bp, synthetic construct
  misc_feature 1..774: note = Description of Artificial Sequence: Synthetic coding sequence
  source 1..774: mol_type = other DNA
atggaggcctgcgtgagcagcctgctggtgctggccctgggcgccctgagcgtgggcagcagcttcggcacccagatcatcggcggcagagaggtgatcccccacagcagaccctacatggccagcctgcagagaaacggcagccacctgtgcggcggcgtgctggtgcaccccaagtgggtgctgaccgccgcccactgcctggcccagagaatggcccagctgagactggtgctgggcctgcacaccctggacagccccggcctgaccttccacatcaaggccgccatccagcaccccagatacaagcccgtgcccgccctggagaacgacctggccctgctgcagctggacggcaaggtgaagcccagcagaaccatcagacccctggccctgcccagcaagagacaggtggtggccgccggcaccagatgcagcatggccggctggggcctgacccaccagggcggcagactgagcagagtgctgagagagctggacctgcaggtgctggacaccagaatgtgcaacaacagcagattctggaacggcagcctgagccccagcatggtgtgcctggccgccgacagcaaggaccaggccccctgcaagggcgacagcggcggccccctggtgtgcggcaagggcagagtgctggccagagtgctgagcttcagcagcagagtgtgcaccgacatcttcaagccccccgtggccaccgccgtggccccctacgtgagctggatcagaaaggtgaccggcagaagcgcctag

SEQ ID NO: 83611 - DNA, 3108 bp, synthetic construct
  misc_feature 1..3108: note = Description of Artificial Sequence: Synthetic coding sequence
  source 1..3108: mol_type = other DNA
atggccgccgagaccctgaacttcggccccgagtggctgagagccctgagcggcggcggcagcgtggccagccccccccccagccccgccatgcccaagtacaagctggccgactacagatacggcagagaggagatgctggccctgtacgtgaaggagaacaaggtgcccgaggagctgcaggacaaggagttcgccgccgtgctgcaggacgagcccctgcagcccctggccctggagcccctgaccgaggaggagcagagaaacttcagcctgagcgtgaacagcgtggccgtgctgagactgatgggcaagggcgccggcccccccctggccggcaccagcagaggcagaggcagcaccagaagcagaggcagaggcagaggcgacagctgcttctaccagagaagcatcgaggagggcgacggcgccttcggcagaagccccagagagatccagagaagccagagctgggacgacagaggcgagagaagattcgagaagagcgccagaagagacggcgccagatgcggcttcgaggagggcggcgccggccccagaaaggagcacgccagaagcgacagcgagaactggagaagcctgagagaggagcaggaggaggaggaggagggcagctggagactgggcgccggccccagaagagacggcgacagatggagaagcgccagccccgacggcggccccagaagcgccggctggagagagcacggcgagagaagaagaaagttcgagttcgacctgagaggcgacagaggcggctgcggcgaggaggagggcagaggcggcggcggcagcagccacctgagaagatgcagagcccccgagggcttcgaggaggacaaggacggcctgcccgagtggtgcctggacgacgaggacgaggagatgggcaccttcgacgccagcggcgccttcctgcccctgaagaagggccccaaggagcccatccccgaggagcaggagctggacttccagggcctggaggaggaggaggagcccagcgagggcctggaggaggagggccccgaggccggcggcaaggagctgacccccctgcccccccaggaggagaagagcagcagccccagccccctgcccaccctgggccccctgtggggcaccaacggcgacggcgacgagaccgccgagaaggagccccccgccgccgaggacgacatcagaggcatccagctgagccccggcgtgggcagcagcgccggcccccccggcgacctggaggacgacgagggcctgaagcacctgcagcaggaggccgagaagctggtggccagcctgcaggacagcagcctggaggaggagcagttcaccgccgccatgcagacccagggcctgagacacagcgccgccgccaccgccctgcccctgagccacggcgccgccagaaagtggttctacaaggacccccagggcgagatccagggccccttcaccacccaggagatggccgagtggttccaggccggctacttcagcatgagcctgctggtgaagagaggctgcgacgagggcttccagcccctgggcgaggtgatcaagatgtggggcagagtgcccttcgcccccggccccagccccccccccctgctgggcaacatggaccaggagagactgaagaagcagcaggagctggccgccgccgccctgtaccagcagctgcagcaccagcagttcctgcagctggtgagcagcagacagctgccccagtgcgccctgagagagaaggccgccctgggcgacctgaccccccccccccccccccccccccagcagcagcagcagcagctgaccgccttcctgcagcagctgcaggccctgaagccccccagaggcggcgaccagaacctgctgcccaccatgagcagaagcctgagcgtgcccgacagcggcagactgtgggacgtgcacaccagcgccagcagccagagcggcggcgaggccagcctgtgggacatccccatcaacagcagcacccagggccccatcctggagcagctgcagctgcagcacaagttccaggagagaagagaggtggagctgagagccaagagagaggaggaggagagaaagagaagagaggagaagagaagacagcagcagcaggaggagcagaagagaagacaggaggaggaggagctgttcagaagaaagcacgtgagacagcaggagctgctgctgaagctgctgcagcagcagcaggccgtgcccgtgccccccgcccccagcagccccccccccctgtgggccggcctggccaagcagggcctgagcatgaagaccctgctggagctgcagctggagggcgagagacagctgcacaagcagcccccccccagagagcccgccagagcccaggcccccaaccacagagtgcagctgggcggcctgggcaccgcccccctgaaccagtgggtgagcgaggccggccccctgtggggcggccccgacaagagcggcggcggcagcagcggcctgggcctgtgggaggacacccccaagagcggcggcagcctggtgagaggcctgggcctgaagaacagcagaagcagccccagcctgagcgacagctacagccacctgagcggcagacccatcagaaagaagaccgaggaggaggagaagctgctgaagctgctgcagggcatccccagaccccaggacggcttcacccagtggtgcgagcagatgctgcacaccctgagcgccaccggcagcctggacgtgcccatggccgtggccatcctgaaggaggtggagagcccctacgacgtgcacgactacatcagaagctgcctgggcgacaccctggaggccaaggagttcgccaagcagttcctggagagaagagccaagcagaaggccagccagcagagacagcagcagcaggaggcctggctgagcagcgccagcctgcagaccgccttccaggccaaccacagcaccaagctgggccccggcgagggcagcaaggccaagagaagagccctgatgctgcacagcgaccccagcatcctgggctacagcctgcacggcagcagcggcgagatcgagagcgtggacgactactag

SEQ ID NO: 83612 - DNA, 2265 bp, synthetic construct
  misc_feature 1..2265: note = Description of Artificial Sequence: Synthetic coding sequence
  source 1..2265: mol_type = other DNA
agcagcttccccagccccagactgccccaggtgttccacagactggacgacgaggacgaggagatgggcaccttcgacgccagcggcgccttcctgcccctgaagaagggccccaaggagcccatccccgaggagcaggagctggacttccagggcctggaggaggaggaggagcccagcgagggcctggaggaggagggccccgaggccggcggcaaggagctgacccccctgcccccccaggaggagaagagcagcagccccagccccctgcccaccctgggccccctgtggggcaccaacggcgacggcgacgagaccgccgagaaggagccccccgccgccgaggacgacatcagaggcatccagctgagccccggcgtgggcagcagcgccggcccccccggcgacctggaggacgacgagggcctgaagcacctgcagcaggaggccgagaagctggtggccagcctgcaggacagcagcctggaggaggagcagttcaccgccgccatgcagacccagggcctgagacacagcgccgccgccaccgccctgcccctgagccacggcgccgccagaaagtggttctacaaggacccccagggcgagatccagggccccttcaccacccaggagatggccgagtggttccaggccggctacttcagcatgagcctgctggtgaagagaggctgcgacgagggcttccagcccctgggcgaggtgatcaagatgtggggcagagtgcccttcgcccccggccccagccccccccccctgctgggcaacatggaccaggagagactgaagaagcagcaggagctggccgccgccgccctgtaccagcagctgcagcaccagcagttcctgcagctggtgagcagcagacagctgccccagtgcgccctgagagagaaggccgccctgggcgacctgaccccccccccccccccccccccccagcagcagcagcagcagctgaccgccttcctgcagcagctgcaggccctgaagccccccagaggcggcgaccagaacctgctgcccaccatgagcagaagcctgagcgtgcccgacagcggcagactgtgggacgtgcacaccagcgccagcagccagagcggcggcgaggccagcctgtgggacatccccatcaacagcagcacccagggccccatcctggagcagctgcagctgcagcacaagttccaggagagaagagaggtggagctgagagccaagagagaggaggaggagagaaagagaagagaggagaagagaagacagcagcagcaggaggagcagaagagaagacaggaggaggaggagctgttcagaagaaagcacgtgagacagcaggagctgctgctgaagctgctgcagcagcagcaggccgtgcccgtgccccccgcccccagcagccccccccccctgtgggccggcctggccaagcagggcctgagcatgaagaccctgctggagctgcagctggagggcgagagacagctgcacaagcagcccccccccagagagcccgccagagcccaggcccccaaccacagagtgcagctgggcggcctgggcaccgcccccctgaaccagtgggtgagcgaggccggccccctgtggggcggccccgacaagagcggcggcggcagcagcggcctgggcctgtgggaggacacccccaagagcggcggcagcctggtgagaggcctgggcctgaagaacagcagaagcagccccagcctgagcgacagctacagccacctgagcggcagacccatcagaaagaagaccgaggaggaggagaagctgctgaagctgctgcagggcatccccagaccccaggacggcttcacccagtggtgcgagcagatgctgcacaccctgagcgccaccggcagcctggacgtgcccatggccgtggccatcctgaaggaggtggagagcccctacgacgtgcacgactacatcagaagctgcctgggcgacaccctggaggccaaggagttcgccaagcagttcctggagagaagagccaagcagaaggccagccagcagagacagcagcagcaggaggcctggctgagcagcgccagcctgcagaccgccttccaggccaaccacagcaccaagctgggccccggcgagggcagcaaggccaagagaagagccctgatgctgcacagcgaccccagcatcctgggctacagcctgcacggcagcagcggcgagatcgagagcgtggacgactactag

SEQ ID NO: 83613 - DNA, 3900 bp, synthetic construct
  misc_feature 1..3900: note = Description of Artificial Sequence: Synthetic coding sequence
  source 1..3900: mol_type = other DNA
atggccgccgagacccagaccctgaacttcggccccgagtggctgagagccctgagcagcggcggcagcatcaccagcccccccctgagccccgccctgcccaagtacaagctggccgactacagatacggcagagaggagatgctggccctgttcctgaaggacaacaagatccccagcgacctgctggacaaggagttcctgcccatcctgcaggaggagcccctgccccccctggccctggtgcccttcaccgaggaggagcagagaaacttcagcatgagcgtgaacagcgccgccgtgctgagactgaccggcagaggcggcggcggcaccgtggtgggcgcccccagaggcagaagcagcagcagaggcagaggcagaggcagaggcgagtgcggcttctaccagagaagcttcgacgaggtggagggcgtgttcggcagaggcggcggcagagagatgcacagaagccagagctgggaggagagaggcgacagaagattcgagaagcccggcagaaaggacgtgggcagacccaacttcgaggagggcggccccaccagcgtgggcagaaagcacgagttcatcagaagcgagagcgagaactggagaatcttcagagaggagcagaacggcgaggacgaggacggcggctggagactggccggcagcagaagagacggcgagagatggagaccccacagccccgacggccccagaagcgccggctggagagagcacatggagagaagaagaagattcgagttcgacttcagagacagagacgacgagagaggctacagaagagtgagaagcggcagcggcagcatcgacgacgacagagacagcctgcccgagtggtgcctggaggacgccgaggaggagatgggcaccttcgacagcagcggcgccttcctgagcctgaagaaggtgcagaaggagcccatccccgaggagcaggagatggacttcagacccgtggacgagggcgaggagtgcagcgacagcgagggcagccacaacgaggaggccaaggagcccgacaagaccaacaagaaggagggcgagaagaccgacagagtgggcgtggaggccagcgaggagaccccccagaccagcagcagcagcgccagacccggcacccccagcgaccaccagagccaggaggccagccagttcgagagaaaggacgagcccaagaccgagcagaccgagaaggccgaggaggagaccagaatggagaacagcctgcccgccaaggtgcccagcagaggcgacgagatggtggccgacgtgcagcagcccctgagccagatccccagcgacaccgccagccccctgctgatcctgcccccccccgtgcccaaccccagccccaccctgagacccgtggagacccccgtggtgggcgcccccggcatgggcagcgtgagcaccgagcccgacgacgaggagggcctgaagcacctggagcagcaggccgagaagatggtggcctacctgcaggacagcgccctggacgacgagagactggccagcaagctgcaggagcacagagccaagggcgtgagcatccccctgatgcacgaggccatgcagaagtggtactacaaggacccccagggcgagatccagggccccttcaacaaccaggagatggccgagtggttccaggccggctacttcaccatgagcctgctggtgaagagagcctgcgacgagagcttccagcccctgggcgacatcatgaagatgtggggcagagtgcccttcagccccggccccgccccccccccccacatgggcgagctggaccaggagagactgaccagacagcaggagctgaccgccctgtaccagatgcagcacctgcagtaccagcagttcctgatccagcagcagtacgcccaggtgctggcccagcagcagaaggccgccctgagcagccagcagcagcagcagctggccctgctgctgcagcagttccagaccctgaagatgagaatcagcgaccagaacatcatccccagcgtgaccagaagcgtgagcgtgcccgacaccggcagcatctgggagctgcagcccaccgccagccagcccaccgtgtgggagggcggcagcgtgtgggacctgcccctggacaccaccacccccggccccgccctggagcagctgcagcagctggagaaggccaaggccgccaagctggagcaggagagaagagaggccgagatgagagccaagagagaggaggaggagagaaagagacaggaggagctgagaagacagcaggaggagatcctgagaagacagcaggaggaggagagaaagagaagagaggaggaggagctggccagaagaaagcaggaggaggccctgagaagacagagagagcaggagatcgccctgagaagacagagagaggaggaggagagacagcagcaggaggaggccctgagaagactggaggagagaagaagagaggaggaggagagaagaaagcaggaggagctgctgagaaagcaggaggaggaggccgccaagtgggccagagaggaggaggaggcccagagaagactggaggagaacagactgagaatggaggaggaggccgccagactgagacacgaggaggaggagagaaagagaaaggagctggaggtgcagagacagaaggagctgatgagacagagacagcagcagcaggaggccctgagaagactgcagcagcagcagcagcagcagcagctggcccagatgaagctgcccagcagcagcacctggggccagcagagcaacaccaccgcctgccagagccaggccaccctgagcctggccgagatccagaagctggaggaggagagagagagacagctgagagaggagcagagaagacagcagagagagctgatgaaggccctgcagcagcagcagcagcagcagcagcagaagctgagcggctggggcaacgtgagcaagcccagcggcaccaccaagagcctgctggagatccagcaggaggaggccagacagatgcagaagcagcagcagcagcagcagcagcaccagcagcccaacagagccagaaacaacacccacagcaacctgcacaccagcatcggcaacagcgtgtggggcagcatcaacaccggcccccccaaccagtgggccagcgacctggtgagcagcatctggagcaacgccgacaccaagaacagcaacatgggcttctgggacgacgccgtgaaggaggtgggccccagaaacagcaccaacaagaacaagaacaacgccagcctgagcaagagcgtgggcgtgagcaacagacagaacaagaaggtggaggaggaggagaagctgctgaagctgttccagggcgtgaacaaggcccaggacggcttcacccagtggtgcgagcagatgctgcacgccctgaacaccgccaacaacctggacgtgcccaccttcgtgagcttcctgaaggaggtggagagcccctacgaggtgcacgactacatcagagcctacctgggcgacaccagcgaggccaaggagttcgccaagcagttcctggagagaagagccaagcagaaggccaaccagcagagacagcagcagcagctgccccagcagcagcagcagcagcccccccagcagcccccccagcagccccagcagcaggacagcgtgtggggcatgaaccacagcaccctgcacagcgtgttccagaccaaccagagcaacaaccagcagagcaacttcgaggccgtgcagagcggcaagaagaagaagaagcagaagatggtgagagccgaccccagcctgctgggcttcagcgtgaacgccagcagcgagagactgaacatgggcgagatcgagaccctggacgactactag

SEQ ID NO: 83614 - DNA, 3966 bp, synthetic construct
  misc_feature 1..3966: note = Description of Artificial Sequence: Synthetic coding sequence
  source 1..3966: mol_type = other DNA
atggccgccgagacccagaccctgaacttcggccccgagtggctgagagccctgagcagcggcggcagcatcaccagcccccccctgagccccgccctgcccaagtacaagctggccgactacagatacggcagagaggagatgctggccctgttcctgaaggacaacaagatccccagcgacctgctggacaaggagttcctgcccatcctgcaggaggagcccctgccccccctggccctggtgcccttcaccgaggaggagcagagaaacttcagcatgagcgtgaacagcgccgccgtgctgagactgaccggcagaggcggcggcggcaccgtggtgggcgcccccagaggcagaagcagcagcagaggcagaggcagaggcagaggcgagtgcggcttctaccagagaagcttcgacgaggtggagggcgtgttcggcagaggcggcggcagagagatgcacagaagccagagctgggaggagagaggcgacagaagattcgagaagcccggcagaaaggacgtgggcaagaagaacggctactactgcatgtacagccccgtgctgctgctgggccagcccctgtgccagggcagacccaacttcgaggagggcggccccaccagcgtgggcagaaagcacgagttcatcagaagcgagagcgagaactggagaatcttcagagaggagcagaacggcgaggacgaggacggcggctggagactggccggcagcagaagagacggcgagagatggagaccccacagccccgacggccccagaagcgccggctggagagagcacatggagagaagaagaagattcgagttcgacttcagagacagagacgacgagagaggctacagaagagtgagaagcggcagcggcagcatcgacgacgacagagacagcctgcccgagtggtgcctggaggacgccgaggaggagatgggcaccttcgacagcagcggcgccttcctgagcctgaagaaggtgcagaaggagcccatccccgaggagcaggagatggacttcagacccgtggacgagggcgaggagtgcagcgacagcgagggcagccacaacgaggaggccaaggagcccgacaagaccaacaagaaggagggcgagaagaccgacagagtgggcgtggaggccagcgaggagaccccccagaccagcagcagcagcgccagacccggcacccccagcgaccaccagagccaggaggccagccagttcgagagaaaggacgagcccaagaccgagcagaccgagaaggccgaggaggagaccagaatggagaacagcctgcccgccaaggtgcccagcagaggcgacgagatggtggccgacgtgcagcagcccctgagccagatccccagcgacaccgccagccccctgctgatcctgcccccccccgtgcccaaccccagccccaccctgagacccgtggagacccccgtggtgggcgcccccggcatgggcagcgtgagcaccgagcccgacgacgaggagggcctgaagcacctggagcagcaggccgagaagatggtggcctacctgcaggacagcgccctggacgacgagagactggccagcaagctgcaggagcacagagccaagggcgtgagcatccccctgatgcacgaggccatgcagaagtggtactacaaggacccccagggcgagatccagggccccttcaacaaccaggagatggccgagtggttccaggccggctacttcaccatgagcctgctggtgaagagagcctgcgacgagagcttccagcccctgggcgacatcatgaagatgtggggcagagtgcccttcagccccggccccgccccccccccccacatgggcgagctggaccaggagagactgaccagacagcaggagctgaccgccctgtaccagatgcagcacctgcagtaccagcagttcctgatccagcagcagtacgcccaggtgctggcccagcagcagaaggccgccctgagcagccagcagcagcagcagctggccctgctgctgcagcagttccagaccctgaagatgagaatcagcgaccagaacatcatccccagcgtgaccagaagcgtgagcgtgcccgacaccggcagcatctgggagctgcagcccaccgccagccagcccaccgtgtgggagggcggcagcgtgtgggacctgcccctggacaccaccacccccggccccgccctggagcagctgcagcagctggagaaggccaaggccgccaagctggagcaggagagaagagaggccgagatgagagccaagagagaggaggaggagagaaagagacaggaggagctgagaagacagcaggaggagatcctgagaagacagcaggaggaggagagaaagagaagagaggaggaggagctggccagaagaaagcaggaggaggccctgagaagacagagagagcaggagatcgccctgagaagacagagagaggaggaggagagacagcagcaggaggaggccctgagaagactggaggagagaagaagagaggaggaggagagaagaaagcaggaggagctgctgagaaagcaggaggaggaggccgccaagtgggccagagaggaggaggaggcccagagaagactggaggagaacagactgagaatggaggaggaggccgccagactgagacacgaggaggaggagagaaagagaaaggagctggaggtgcagagacagaaggagctgatgagacagagacagcagcagcaggaggccctgagaagactgcagcagcagcagcagcagcagcagctggcccagatgaagctgcccagcagcagcacctggggccagcagagcaacaccaccgcctgccagagccaggccaccctgagcctggccgagatccagaagctggaggaggagagagagagacagctgagagaggagcagagaagacagcagagagagctgatgaaggccctgcagcagcagcagcagcagcagcagcagaagctgagcggctggggcaacgtgagcaagcccagcggcaccaccaagagcctgctggagatccagcaggaggaggccagacagatgcagaagcagcagcagcagcagcagcagcaccagcagcccaacagagccagaaacaacacccacagcaacctgcacaccagcatcggcaacagcgtgtggggcagcatcaacaccggcccccccaaccagtgggccagcgacctggtgagcagcatctggagcaacgccgacaccaagaacagcaacatgggcttctgggacgacgccgtgaaggaggtgggccccagaaacagcaccaacaagaacaagaacaacgccagcctgagcaagagcgtgggcgtgagcaacagacagaacaagaaggtggaggaggaggagaagctgctgaagctgttccagggcgtgaacaaggcccaggacggcttcacccagtggtgcgagcagatgctgcacgccctgaacaccgccaacaacctggacgtgcccaccttcgtgagcttcctgaaggaggtggagagcccctacgaggtgcacgactacatcagagcctacctgggcgacaccagcgaggccaaggagttcgccaagcagttcctggagagaagagccaagcagaaggccaaccagcagagacagcagcagcagctgccccagcagcagcagcagcagcccccccagcagcccccccagcagccccagcagcaggacagcgtgtggggcatgaaccacagcaccctgcacagcgtgttccagaccaaccagagcaacaaccagcagagcaacttcgaggccgtgcagagcggcaagaagaagaagaagcagaagatggtgagagccgaccccagcctgctgggcttcagcgtgaacgccagcagcgagagactgaacatgggcgagatcgagaccctggacgactactag

SEQ ID NO: 83615 - DNA, 3966 bp, synthetic construct; identical to SEQ ID NO: 83614
  misc_feature 1..3966: note = Description of Artificial Sequence: Synthetic coding sequence
  source 1..3966: mol_type = other DNA

SEQ ID NO: 83616 - DNA, 3900 bp, synthetic construct; identical to SEQ ID NO: 83613
  misc_feature 1..3900: note = Description of Artificial Sequence: Synthetic coding sequence
  source 1..3900: mol_type = other DNA

SEQ ID NO: 83617 - DNA, 2163 bp, synthetic construct
  misc_feature 1..2163: note = Description of Artificial Sequence: Synthetic coding sequence
  source 1..2163: mol_type = other DNA
atggccgccgagacccagaccctgaacttcggccccgagtggctgagagccctgagcagcggcggcagcatcaccagcccccccctgagccccgccctgcccaagtacaagctggccgactacagatacggcagagaggagatgctggccctgttcctgaaggacaacaagatccccagcgacctgctggacaaggagttcctgcccatcctgcaggaggagcccctgccccccctggccctggtgcccttcaccgaggaggagcagagaaacttcagcatgagcgtgaacagcgccgccgtgctgagactgaccggcagaggcggcggcggcaccgtggtgggcgcccccagaggcagaagcagcagcagaggcagaggcagacccaacttcgaggagggcggccccaccagcgtgggcagaaagcacgagttcatcagaagcgagagcgagaactggagaatcttcagagaggagcagaacggcgaggacgaggacggcggctggagactggccggcagcagaagagacggcgagagatggagaccccacagccccggctggagagagcacatggagagaagaagaagattcgagttcgacttcagagacagagacgacgagagaggctacagaagagtgagaagcggcagcggcagcatcgacgacgacagagacagcctgcccgagtggtgcctggaggacgccgaggaggagatgggcaccttcgacagcagcggcgccttcctgagcctgaagaaggtgcagaaggagcccatccccgaggagcaggagatggacttcagacccgtggacgagggcgaggagtgcagcgacagcgagggcagccacaacgaggaggccaaggagcccgacaagaccaacaagaaggagggcgagaagaccgacagagtgggcgtggaggccagcgaggagaccccccagaccagcagcagcagcgccagacccggcacccccagcgaccaccagagccaggaggccagccagttcgagagaaaggacgagcccaagaccgagcagaccgagaaggccgaggaggagaccagaatggagaacagcctgcccgccaaggtgcccagcagaggcgacgagatggtggccgacgtgcagcagcccctgagccagatccccagcgacaccgccagccccctgctgatcctgcccccccccgtgcccaaccccagccccaccctgagacccgtggagacccccgtggtgggcgcccccggcatgggcagcgtgagcaccgagcccgacgacgaggagggcctgaagcacctggagcagcaggccgagaagatggtggcctacctgcaggacagcgccctggacgacgagagactggccagcaagctgcaggagcacagagccaagggcgtgagcatccccctgatgcacgaggccatgcagaagtggtactacaaggacccccagggcgagatccagggccccttcaacaaccaggagatggccgagtggttccaggccggctacttcaccatgagcctgctggtgaagagagcctgcgacgagagcttccagcccctgggcgacatcatgaagatgtggggcagagtgcccttcagccccggccccgccccccccccccacatgggcgagctggaccaggagagactgaccagacagcaggagctgaccgccctgtaccagatgcagcacctgcagtaccagcagttcctgatccagcagcagtacgcccaggtgctggcccagcagcagaaggccgccctgagcagccagcagcagcagcagctggccctgctgctgcagcagttccagaccctgaagatgagaatcagcgaccagaacatcatccccagcgtgaccagaagcgtgagcgtgcccgacaccggcagcatctgggagctgcagcccaccgccagccagcccaccgtgtgggagggcggcagcgtgtgggacctgcccctggacaccaccacccccggccccgccctggagcagctgcagcagctggagaaggccaaggccgccaagctggagcaggagagaagagaggccgagatgagagccaagagagaggaggaggagagaaagagacaggaggagctgagaagacagcaggaggagatcctgagaagacagcaggaggaggagagatag

SEQ ID NO: 83618 - DNA, 282 bp, synthetic construct
  misc_feature 1..282: note = Description of Artificial Sequence: Synthetic coding sequence
  source 1..282: mol_type = other DNA
atggccgccgagacccagaccctgaacttcggccccgagtggctgagagccctgagcagcggcggcagcatcaccagcccccccctgagccccgccctgcccaagtacaagctggccgactacagatacggcagagaggagatgctggccctgttcctgaaggacaacaagatccccagcgacctgctggacaaggagttcctgcccatcctgcaggaggagcccctgccccccctggccctggtgcccttcaccgaggaggagcagagaaacttcagctag

SEQ ID NO: 83619 - DNA, 303 bp, synthetic construct
  misc_feature 1..303: note = Description of Artificial Sequence: Synthetic coding sequence
  source 1..303: mol_type = other DNA
atggccgccgagacccagaccctgaacttcggccccgagtggctgagagccctgagcagcggcggcagcatcaccagcccccccctgagccccgccctgcccaagtacaagctggccgactacagatacggcagagaggagatgctggccctgttcctgaaggacaacaagatccccagcgacctgctggacaaggagttcctgcccatcctgcaggaggagcccctgccccccctggccctggtgcccttcaccgaggaggagcagagaaacttcagcatgagcgtgaacagcgccgcctag

SEQ ID NO: 83620 - DNA, 42 bp, synthetic construct
  misc_feature 1..42: note = Description of Artificial Sequence: Synthetic coding sequence
  source 1..42: mol_type = other DNA
atggccgccgagacccagaccctgaacttcggccccgagtag

SEQ ID NO: 83621 - DNA, 348 bp, synthetic construct
  misc_feature 1..348: note = Description of Artificial Sequence: Synthetic coding sequence
  source 1..348: mol_type = other DNA
atggccgccgagacccagaccctgaacttcggccccgagtggctgagagccctgagcagcggcggcagcatcaccagcccccccctgagccccgccctgcccaagtacaagctggccgactacagatacggcagagaggagatgctggccctgttcctgaaggacaacaagatccccagcgacctgctggacaaggagttcctgcccatcctgcaggaggagcccctgccccccctggccctggtgcccttcaccgaggaggagcagagaaacttcagcatgagcgtgaacagcgccgccgtgctgagactgaccggcagaggcggcggcggcaccgtggtgggctag

SEQ ID NO: 83622 - DNA, 321 bp, synthetic construct
  misc_feature 1..321: note = Description of Artificial Sequence: Synthetic coding sequence
  source 1..321: mol_type = other DNA
atggccgccgagacccagaccctgaacttcggccccgagtggctgagagccctgagcagcggcggcagcatcaccagcccccccctgagccccgccctgcccaagtacaagctggccgactacagatacggcagagaggagatgctggccctgttcctgaaggacaacaagatccccagcgacctgctggacaaggagttcctgcccatcctgcaggaggagcccctgccccccctggccctggtgcccttcaccgaggaggagcagagaaacttcagcatgagcgtgaacagcgccgccgtgctgagactgaccggctag

SEQ ID NO: 83623 - DNA, 342 bp, synthetic construct
  misc_feature 1..342: note = Description of Artificial Sequence: Synthetic coding sequence
  source 1..342: mol_type = other DNA
atggccgccgagacccagaccctgaacttcggccccgagtggctgagagccctgagcagcggcggcagcatcaccagcccccccctgagccccgccctgcccaagtacaagctggccgactacagatacggcagagaggagatgctggccctgttcctgaaggacaacaagatccccagcgacctgctggacaaggagttcctgcccatcctgcaggaggagcccctgccccccctggccctggtgcccttcaccgaggaggagcagagaaacttcagcatgagcgtgaacagcgccgccgtgctgagactgaccggcagaggcggcggcggcaccgtgtag

SEQ ID NO: 83624 - DNA, 2619 bp, synthetic construct
  misc_feature 1..2619: note = Description of Artificial Sequence: Synthetic coding sequence
  source 1..2619: mol_type = other DNA
atgaccaagctgcccgacgaccccggcagacccaacttcgaggagggcggccccaccagcgtgggcagaaagcacgagttcatcagaagcgagagcgagaactggagaatcttcagagaggagcagaacggcgaggacgaggacggcggctggagactggccggcagcagaagagacggcgagagatggagaccccacagccccgacggccccagaagcgccggctggagagagcacatggagagaagaagaagattcgagttcgacttcagagacagagacgacgagagaggctacagaagagtgagaagcggcagcggcagcatcgacgacgacagagacagcctgcccgagtggtgcctggaggacgccgaggaggagatgggcaccttcgacagcagcggcgccttcctgagcctgaagaaggtgcagaaggagcccatccccgaggagcaggagatggacttcagacccgtggacgagggcgaggagtgcagcgacagcgagggcagccacaacgaggaggccaaggagcccgacaagaccaacaagaaggagggcgagaagaccgacagagtgggcgtggaggccagcgaggagaccccccagaccagcagcagcagcgccagacccggcacccccagcgaccaccagagccaggaggccagccagttcgagagaaaggacgagcccaagaccgagcagaccgagaaggccgaggaggagaccagaatggagaacagcctgcccgccaaggtgcccagcagaggcgacgagatggtggccgacgtgcagcagcccctgagccagatccccagcgacaccgccagccccctgctgatcctgcccccccccgtgcccaaccccagccccaccctgagacccgtggagacccccgtggtgggcgcccccggcatgggcagcgtgagcaccgagcccgacgacgaggagggcctgaagcacctggagcagcaggccgagaagatggtggcctacctgcaggacagcgccctggacgacgagagactggccagcaagctgcaggagcacagagccaagggcgtgagcatccccctgatgcacgaggccatgcagaagtggtactacaaggacccccagggcgagatccagggccccttcaacaaccaggagatggccgagtggttccaggccggctacttcaccatgagcctgctggtgaagagagcctgcgacgagagcttccagcccctgggcgacatcatgaagatgtggggcagagtgcccttcagccccggccccgccccccccccccacatgggcgagctggaccaggagagactgaccagacagcaggagctgaccgccctgtaccagatgcagcacctgcagtaccagcagttcctgatccagcagcagtacgcccaggtgctggcccagcagcagaaggccgccctgagcagccagcagcagcagcagctggccctgctgctgcagcagttccagaccctgaagatgagaatcagcgaccagaacatcatccccagcgtgaccagaagcgtgagcgtgcccgacaccggcagcatctgggagctgcagcccaccgccagccagcccaccgtgtgggagggcggcagcgtgtgggacctgcccctggacaccaccacccccggccccgccctggagcagctgcagcagctggagaaggccaaggccgccaagctggagcaggagagaagagaggccgagatgagagccaagagagaggaggaggagagaaagagacaggaggagctgagaagacagcaggaggagatcctgagaagacagcaggaggaggagagaaagagaagagaggaggaggagctggccagaagaaagcaggaggaggccctgagaagacagagagagcaggagatcgccctgagaagacagagagaggaggaggagagacagcagcaggaggaggccctgagaagactggaggagagaagaagagaggaggaggagagaagaaagcaggaggagctgctgagaaagcaggaggaggaggccgccaagtgggccagagaggaggaggaggcccagagaagactggaggagaacagactgagaatggaggaggaggccgccagactgagacacgaggaggaggagagaaagagaaaggagctggaggtgcagagacagaaggagctgatgagacagagacagcagcagcaggaggccctgagaagactgcagcagcagcagcagcagcagcagctggcccagatgaagctgcccagcagcagcacctggggccagcagagcaacaccaccgcctgccagagccaggccaccctgagcctggccgagatccagaagctggaggaggagagagagagacagctgagagaggaggagagcagcgccagcttctgcttctacgccaccgccaaggcccccgccgagggcgtggacgagagcagcagcgccgccgccgccaccgccaccgccgagaccctgagactgggcgagtgccagcagaccttcagataccacgagatcagcagcggcgaccccgccggcagaggccaggccaacgccaaggccgccgccgccgccgccgccacccccgccaccaagcagagcagctag

SEQ ID NO: 83625 - DNA, 2364 bp, synthetic construct
  misc_feature 1..2364: note = Description of Artificial Sequence: Synthetic coding sequence
  source 1..2364: mol_type = other DNA
atggccgccgagacccagaccctgaacttcggccccgagtggctgagagccctgagcagcggcggcagcatcaccagcccccccctgagccccgccctgcccaagtacaagctggccgactacagatacggcagagaggagatgctggccctgttcctgaaggacaacaagatccccagcgacctgctggacaaggagttcctgcccatcctgcaggaggagcccctgccccccctggccctggtgcccttcaccgaggaggagcagagaaacttcagcatgagcgtgaacagcgccgccgtgctgagactgaccggcagaggcggcggcggcaccgtggtgggcgcccccagaggcagaagcagcagcagaggcagaggcagaggcagaggcgagtgcggcttctaccagagaagcttcgacgaggtggagggcgtgttcggcagaggcggcggcagagagatgcacagaagccagagctgggaggagagaggcgacagaagattcgagaagcccggcagaaaggacgtgggcagacccaacttcgaggagggcggccccaccagcgtgggcagaaagcacgagttcatcagaagcgagagcgagaactggagaatcttcagagaggagcagaacggcgaggacgaggacggcggctggagactggccggcagcagaagagacggcgagagatggagaccccacagccccgacggccccagaagcgccggctggagagagcacatggagagaagaagaagattcgagttcgacttcagagacagagacgacgagagaggctacagaagagtgagaagcggcagcggcagcatcgacgacgacagagacagcctgcccgagtggtgcctggaggacgccgaggaggagatgggcaccttcgacagcagcggcgccttcctgagcctgaagaaggtgcagaaggagcccatccccgaggagcaggagatggacttcagacccgtggacgagggcgaggagtgcagcgacagcgagggcagccacaacgaggaggccaaggagcccgacaagaccaacaagaaggagggcgagaagaccgacagagtgggcgtggaggccagcgaggagaccccccagaccagcagcagcagcgccagacccggcacccccagcgaccaccagagccaggaggccagccagttcgagagaaaggacgagcccaagaccgagcagaccgagaaggccgaggaggagaccagaatggagaacagcctgcccgccaaggtgcccagcagaggcgacgagatggtggccgacgtgcagcagcccctgagccagatccccagcgacaccgccagccccctgctgatcctgcccccccccgtgcccaaccccagccccaccctgagacccgtggagacccccgtggtgggcgcccccggcatgggcagcgtgagcaccgagcccgacgacgaggagggcctgaagcacctggagcagcaggccgagaagatggtggcctacctgcaggacagcgccctggacgacgagagactggccagcaagctgcaggagcacagagccaagggcgtgagcatccccctgatgcacgaggccatgcagaagtggtactacaaggacccccagggcgagatccagggccccttcaacaaccaggagatggccgagtggttccaggccggctacttcaccatgagcctgctggtgaagagagcctgcgacgagagcttccagcccctgggcgacatcatgaagatgtggggcagagtgcccttcagccccggccccgccccccccccccacatgggcgagctggaccaggagagactgaccagacagcaggagctgaccgccctgtaccagatgcagcacctgcagtaccagcagttcctgatccagcagcagtacgcccaggtgctggcccagcagcagaaggccgccctgagcagccagcagcagcagcagctggccctgctgctgcagcagttccagaccctgaagatgagaatcagcgaccagaacatcatccccagcgtgaccagaagcgtgagcgtgcccgacaccggcagcatctgggagctgcagcccaccgccagccagcccaccgtgtgggagggcggcagcgtgtgggacctgcccctggacaccaccacccccggccccgccctggagcagctgcagcagctggagaaggccaaggccgccaagctggagcaggagagaagagaggccgagatgagagccaagagagaggaggaggagagaaagagacaggaggagctgagaagacagcaggaggagatcctgagaagacagcaggaggaggagagaaagagaagagaggtgggcaagagagacagctag

SEQ ID NO: 83626 - DNA, 3882 bp, synthetic construct
  misc_feature 1..3882: note = Description of Artificial Sequence: Synthetic coding sequence
  source 1..3882: mol_type = other DNA
atggccgccgagacccagaccctgaacttcggccccgagtggctgagagccctgagcagcggcggcagcatcaccagcccccccctgagccccgccctgcccaagtacaagctggccgactacagatacggcagagaggagatgctggccctgttcctgaaggacaacaagatccccagcgacctgctggacaaggagttcctgcccatcctgcaggaggagcccctgccccccctggccctggtgcccttcaccgaggaggagcagagaaacttcagcatgagcgtgaacagcgccgccgtgctgagactgaccggcagaggcggcggcggcaccgtggtgggcgcccccagaggcagaagcagcagcagaggcagaggcagaggcagaggcgagtgcggcttctaccagagaagcttcgacgaggtggagggcgtgttcggcagaggcggcggcagagagatgcacagaagccagagctgggaggagagaggcgacagaagattcgagaagcccggcagaaaggacgtgggcagacccaacttcgaggagggcggccccaccagcgtgggcagaaagcacgagttcatcagaagcgagagcgagaactggagaatcttcagagaggagcagaacggcgaggacgaggacggcggctggagactggccggcagcagaagagacggcgagagatggagaccccacagccccggctggagagagcacatggagagaagaagaagattcgagttcgacttcagagacagagacgacgagagaggctacagaagagtgagaagcggcagcggcagcatcgacgacgacagagacagcctgcccgagtggtgcctggaggacgccgaggaggagatgggcaccttcgacagcagcggcgccttcctgagcctgaagaaggtgcagaaggagcccatccccgaggagcaggagatggacttcagacccgtggacgagggcgaggagtgcagcgacagcgagggcagccacaacgaggaggccaaggagcccgacaagaccaacaagaaggagggcgagaagaccgacagagtgggcgtggaggccagcgaggagaccccccagaccagcagcagcagcgccagacccggcacccccagcgaccaccagagccaggaggccagccagttcgagagaaaggacgagcccaagaccgagcagaccgagaaggccgaggaggagaccagaatggagaacagcctgcccgccaaggtgcccagcagaggcgacgagatggtggccgacgtgcagcagcccctgagccagatccccagcgacaccgccagccccctgctgatcctgcccccccccgtgcccaaccccagccccaccctgagacccgtggagacccccgtggtgggcgcccccggcatgggcagcgtgagcaccgagcccgacgacgaggagggcctgaagcacctggagcagcaggccgagaagatggtggcctacctgcaggacagcgccctggacgacgagagactggccagcaagctgcaggagcacagagccaagggcgtgagcatccccctgatgcacgaggccatgcagaagtggtactacaaggacccccagggcgagatccagggccccttcaacaaccaggagatggccgagtggttccaggccggctacttcaccatgagcctgctggtgaagagagcctgcgacgagagcttccagcccctgggcgacatcatgaagatgtggggcagagtgcccttcagccccggccccgccccccccccccacatgggcgagctggaccaggagagactgaccagacagcaggagctgaccgccctgtaccagatgcagcacctgcagtaccagcagttcctgatccagcagcagtacgcccaggtgctggcccagcagcagaaggccgccctgagcagccagcagcagcagcagctggccctgctgctgcagcagttccagaccctgaagatgagaatcagcgaccagaacatcatccccagcgtgaccagaagcgtgagcgtgcccgacaccggcagcatctgggagctgcagcccaccgccagccagcccaccgtgtgggagggcggcagcgtgtgggacctgcccctggacaccaccacccccggccccgccctggagcagctgcagcagctggagaaggccaaggccgccaagctggagcaggagagaagagaggccgagatgagagccaagagagaggaggaggagagaaagagacaggaggagctgagaagacagcaggaggagatcctgagaagacagcaggaggaggagagaaagagaagagaggaggaggagctggccagaagaaagcaggaggaggccctgagaagacagagagagcaggagatcgccctgagaagacagagagaggaggaggagagacagcagcaggaggaggccctgagaagactggaggagagaagaagagaggaggaggagagaagaaagcaggaggagctgctgagaaagcaggaggaggaggccgccaagtgggccagagaggaggaggaggcccagagaagactggaggagaacagactgagaatggaggaggaggccgccagactgagacacgaggaggaggagagaaagagaaaggagctggaggtgcagagacagaaggagctgatgagacagagacagcagcagcaggaggccctgagaagactgcagcagcagcagcagcagcagcagctggcccagatgaagctgcccagcagcagcacctggggccagcagagcaacaccaccgcctgccagagccaggccaccctgagcctggccgagatccagaagctggaggaggagagagagagacagctgagagaggagcagagaagacagcagagagagctgatgaaggccctgcagcagcagcagcagcagcagcagcagaagctgagcggctggggcaacgtgagcaagcccagcggcaccaccaagagcctgctggagatccagcaggaggaggccagacagatgcagaagcagcagcagcagcagcagcagcaccagcagcccaacagagccagaaacaacacccacagcaacctgcacaccagcatcggcaacagcgtgtggggcagcatcaacaccggcccccccaaccagtgggccagcgacctggtgagcagcatctggagcaacgccgacaccaagaacagcaacatgggcttctgggacgacgccgtgaaggaggtgggccccagaaacagcaccaacaagaacaagaacaacgccagcctgagcaagagcgtgggcgtgagcaacagacagaacaagaaggtggaggaggaggagaagctgctgaagctgttccagggcgtgaacaaggcccaggacggcttcacccagtggtgcgagcagatgctgcacgccctgaacaccgccaacaacctggacgtgcccaccttcgtgagcttcctgaaggaggtggagagcccctacgaggtgcacgactacatcagagcctacctgggcgacaccagcgaggccaaggagttcgccaagcagttcctggagagaagagccaagcagaaggccaaccagcagagacagcagcagcagctgccccagcagcagcagcagcagcccccccagcagcccccccagcagccccagcagcaggacagcgtgtggggcatgaaccacagcaccctgcacagcgtgttccagaccaaccagagcaacaaccagcagagcaacttcgaggccgtgcagagcggcaagaagaagaagaagcagaagatggtgagagccgaccccagcctgctgggcttcagcgtgaacgccagcagcgagagactgaacatgggcgagatcgagaccctggacgactactag

SEQ ID NO: 83627 - DNA, 3963 bp, synthetic construct
  misc_feature 1..3963: note = Description of Artificial Sequence: Synthetic coding sequence
  source 1..3963: mol_type = other DNA
atggccgccgagacccagaccctgaacttcggccccgagtggctgagagccctgagcagcggcggcagcatcaccagcccccccctgagccccgccctgcccaagtacaagctggccgactacagatacggcagagaggagatgctggccctgttcctgaaggacaacaagatccccagcgacctgctggacaaggagttcctgcccatcctgcaggaggagcccctgccccccctggccctggtgcccttcaccgaggaggagcagagaaacttcagcatgagcgtgaacagcgccgccgtgctgagactgaccggcagaggcggcggcggcaccgtggtgggcgcccccagaggcagaagcagcagcagaggcagaggcagaggcagaggcgagtgcggcttctaccagagaagcttcgacgaggtggagggcgtgttcggcagaggcggcggcagagagatgcacagaagccagagctgggaggagagaggcgacagaagattcgagaagcccggcagaaaggacgtgggcaagaagaacggctactactgcatgtacagccccgtgctgctgctgggccagcccctgtgccagggcagacccaacttcgaggagggcggccccaccagcgtgggcagaaagcacgagttcatcagaagcgagagcgagaactggagaatcttcagagaggagcagaacggcgaggacgaggacggcggctggagactggccggcagcagaagagacggcgagagatggagaccccacagccccgacggccccagaagcgccggctggagagagcacatggagagaagaagaagattcgagttcgacttcagagacagagacgacgagagaggctacagaagagtgagaagcggcagcggcagcatcgacgacgacagagacagcctgcccgagtggtgcctggaggacgccgaggaggagatgggcaccttcgacagcagcggcgccttcctgagcctgaagaaggtgcagaaggagcccatccccgaggagcaggagatggacttcagacccgtggacgagggcgaggagtgcagcgacagcgagggcagccacaacgaggaggccaaggagcccgacaagaccaacaagaaggagggcgagaagaccgacagagtgggcgtggccagcgaggagaccccccagaccagcagcagcagcgccagacccggcacccccagcgaccaccagagccaggaggccagccagttcgagagaaaggacgagcccaagaccgagcagaccgagaaggccgaggaggagaccagaatggagaacagcctgcccgccaaggtgcccagcagaggcgacgagatggtggccgacgtgcagcagcccctgagccagatccccagcgacaccgccagccccctgctgatcctgcccccccccgtgcccaaccccagccccaccctgagacccgtggagacccccgtggtgggcgcccccggcatgggcagcgtgagcaccgagcccgacgacgaggagggcctgaagcacctggagcagcaggccgagaagatggtggcctacctgcaggacagcgccctggacgacgagagactggccagcaagctgcaggagcacagagccaagggcgtgagcatccccctgatgcacgaggccatgcagaagtggtactacaaggacccccagggcgagatccagggccccttcaacaaccaggagatggccgagtggttccaggccggctacttcaccatgagcctgctggtgaagagagcctgcgacgagagcttccagcccctgggcgacatcatgaagatgtggggcagagtgcccttcagccccggccccgccccccccccccacatgggcgagctggaccaggagagactgaccagacagcaggagctgaccgccctgtaccagatgcagcacctgcagtaccagcagttcctgatccagcagcagtacgcccaggtgctggcccagcagcagaaggccgccctgagcagccagcagcagcagcagctggccctgctgctgcagcagttccagaccctgaagatgagaatcagcgaccagaacatcatccccagcgtgaccagaagcgtgagcgtgcccgacaccggcagcatctgggagctgcagcccaccgccagccagcccaccgtgtgggagggcggcagcgtgtgggacctgcccctggacaccaccacccccggccccgccctggagcagctgcagcagctggagaaggccaaggccgccaagctggagcaggagagaagagaggccgagatgagagccaagagagaggaggaggagagaaagagacaggaggagctgagaagacagcaggaggagatcctgagaagacagcaggaggaggagagaaagagaagagaggaggaggagctggccagaagaaagcaggaggaggccctgagaagacagagagagcaggagatcgccctgagaagacagagagaggaggaggagagacagcagcaggaggaggccctgagaagactggaggagagaagaagagaggaggaggagagaagaaagcaggaggagctgctgagaaagcaggaggaggaggccgccaagtgggccagagaggaggaggaggcccagagaagactggaggagaacagactgagaatggaggaggaggccgccagactgagacacgaggaggaggagagaaagagaaaggagctggaggtgcagagacagaaggagctgatgagacagagacagcagcagcaggaggccctgagaagactgcagcagcagcagcagcagcagcagctggcccagatgaagctgcccagcagcagcacctggggccagcagagcaacaccaccgcctgccagagccaggccaccctgagcctggccgagatccagaagctggaggaggagagagagagacagctgagagaggagcagagaagacagcagagagagctgatgaaggccctgcagcagcagcagcagcagcagcagcagaagctgagcggctggggcaacgtgagcaagcccagcggcaccaccaagagcctgctggagatccagcaggaggaggccagacagatgcagaagcagcagcagcagcagcagcagcaccagcagcccaacagagccagaaacaacacccacagcaacctgcacaccagcatcggcaacagcgtgtggggcagcatcaacaccggcccccccaaccagtgggccagcgacctggtgagcagcatctggagcaacgccgacaccaagaacagcaacatgggcttctgggacgacgccgtgaaggaggtgggccccagaaacagcaccaacaagaacaagaacaacgccagcctgagcaagagcgtgggcgtgagcaacagacagaacaagaaggtggaggaggaggagaagctgctgaagctgttccagggcgtgaacaaggcccaggacggcttcacccagtggtgcgagcagatgctgcacgccctgaacaccgccaacaacctggacgtgcccaccttcgtgagcttcctgaaggaggtggagagcccctacgaggtgcacgactacatcagagcctacctgggcgacaccagcgaggccaaggagttcgccaagcagttcctggagagaagagccaagcagaaggccaaccagcagagacagcagcagcagctgccccagcagcagcagcagcagcccccccagcagcccccccagcagccccagcagcaggacagcgtgtggggcatgaaccacagcaccctgcacagcgtgttccagaccaaccagagcaacaaccagcagagcaacttcgaggccgtgcagagcggcaagaagaagaagaagcagaagatggtgagagccgaccccagcctgctgggcttcagcgtgaacgccagcagcgagagactgaacatgggcgagatcgagaccctggacgactactag

SEQ ID NO: 83628 - DNA, 2085 bp, synthetic construct
  misc_feature 1..2085: note = Description of Artificial Sequence: Synthetic coding sequence
  source 1..2085: mol_type = other DNA
atgagcggcggcgaggtggtgtgcagcggctggctgagaaagagcccccccgagaagaagctgaagagatacgcctggaagagaagatggttcgtgctgagaagcggcagactgaccggcgaccccgacgtgctggagtactacaagaacgaccacgccaagaagcccatcagaatcatcgacctgaacctgtgccagcaggtggacgccggcctgaccttcaacaagaaggagttcgagaacagctacatcttcgacatcaacaccatcgacagaatcttctacctggtggccgacagcgaggaggagatgaacaagtgggtgagatgcatctgcgacatctgcggcttcaaccccaccgaggaggaccccgtgaagccccccggcagcagcctgcaggcccccgccgacctgcccctggccatcaacaccgccccccccagcacccaggccgacagcagcagcgccaccctgccccccccctaccagctgatcaacgtgcccccccacctggagaccctgggcatccaggaggacccccaggactacctgctgctgatcaactgccagagcaagaagcccgagcccaccagaacccacgccgacagcgccaagagcaccagcagcgagaccgactgcaacgacaacgtgcccagccacaagaaccccgccagcagccagagcaagcacggcatgaacggcttcttccagcagcagatgatctacgacagcccccccagcagagcccccagcgccagcgtggacagcagcctgtacaacctgcccagaagctacagccacgacgtgctgcccaaggtgagccccagcagcaccgaggccgacggcgagctgtacgtgttcaacacccccagcggcaccagcagcgtggagacccagatgagacacgtgagcatcagctacgacatcccccccacccccggcaacacctaccagatccccagaaccttccccgagggcaccctgggccagaccagcaagctggacaccatccccgacatccccccccccagaccccccaagccccaccccgcccacgacagaagccccgtggagacctgcagcatccccagaaccgccagcgacaccgacagcagctactgcatccccaccgccggcatgagccccagcagaagcaacaccatcagcaccgtggacctgaacaagctgagaaaggacgccagcagccaggactgctacgacatccccagagccttccccagcgacagaagcagcagcctggagggcttccacaaccacttcaaggtgaagaacgtgctgaccgtgggcagcgtgagcagcgaggagctggacgagaactacgtgcccatgaaccccaacagcccccccagacagcacagcagcagcttcaccgagcccatccaggaggccaactacgtgcccatgacccccggcaccttcgacttcagcagcttcggcatgcaggtgcccccccccgcccacatgggcttcagaagcagccccaagaccccccccagaagacccgtgcccgtggccgactgcgagcccccccccgtggacagaaacctgaagcccgacagaaaggtgaagcccgcccccctggagatcaagcccctgcccgagtgggaggagctgcaggcccccgtgagaagccccatcaccagaagcttcgccagagacagcagcagattccccatgagccccagacccgacagcgtgcacagcaccaccagcagcagcgacagccacgacagcgaggagaactacgtgcccatgaaccccaacctgagcagcgaggaccccaacctgttcggcagcaacagcctggacggcggcagcagccccatgatcaagcccaagggcgacaagcaggtggagtacctggacctggacctggacagcggcaagagcaccccccccagaaagcagaagagcagcggcagcggcagcagcgtggccgacgagagagtggactacgtggtggtggaccagcagaagaccctggccctgaagagcaccagagaggcctggaccgacggcagacagagcaccgagagcgagacccccgccaagagcgtgaagtag

SEQ ID NO: 83629 - DNA, 2175 bp, synthetic construct
  misc_feature 1..2175: note = Description of Artificial Sequence: Synthetic coding sequence
  source 1..2175: mol_type = other DNA
atgagcggcggcgaggtggtgtgcagcggctggctgagaaagagcccccccgagaagaagctgaagagatacgcctggaagagaagatggttcgtgctgagaagcggcagactgaccggcgaccccgacgtgctggagtactacaagaacgaccacgccaagaagcccatcagaatcatcgacctgaacctgtgccagcaggtggacgccggcctgaccttcaacaagaaggagttcgagaacagctacatcttcgacatcaacaccatcgacagaatcttctacctggtggccgacagcgaggaggagatgaacaagtgggtgagatgcatctgcgacatctgcggcttcaaccccaccgaggaggaccccgtgaagccccccggcagcagcctgcaggcccccgccgacctgcccctggccatcaacaccgccccccccagcacccaggccgacagcagcagcgccaccctgccccccccctaccagctgatcaacgtgcccccccacctggagaccctgggcatccaggaggacccccaggactacctgctgctgatcaactgccagagcaagaagcccgagcccaccagaacccacgccgacagcgccaagagcaccagcagcgagaccgactgcaacgacaacgtgcccagccacaagaaccccgccagcagccagagcaagcacggcatgaacggcttcttccagcagcagatgatctacgacagcccccccagcagagcccccagcgccagcgtggacagcagcctgtacaacctgcccagaagctacagccacgacgtgctgcccaaggtgagccccagcagcaccgaggccgacggcgagctgtacgtgttcaacacccccagcggcaccagcagcgtggagacccagatgagacacgtgagcatcagctacgacatcccccccacccccggcaacacctaccagatccccagaaccttccccgagggcaccctgggccagaccagcaagctggacaccatccccgacatccccccccccagaccccccaagccccaccccgcccacgacagaagccccgtggagacctgcagcatccccagaaccgccagcgacaccgacagcagctactgcatccccaccgccggcatgagccccagcagaagcaacaccatcagcaccgtggacctgaacaagctgagaaaggacgccagcagccaggactgctacgacatccccagagccttccccagcgacagaagcagcagcctggagggcttccacaaccacttcaaggtgaagaacgtgctgaccgtgggcagcgtgagcagcgaggagctggacgagaactacgtgcccatgaaccccaacagcccccccagacagcacagcagcagcttcaccgagcccatccaggaggccaactacgtgcccatgacccccggcaccttcgacttcagcagcttcggcatgcaggtgcccccccccgcccacatgggcttcagaagcagccccaagaccccccccagaagacccgtgcccgtggccgactgcgagcccccccccgtggacagaaacctgaagcccgacagaaagggccagagccccaagatcctgagactgaagccccacggcctggagagaaccgacagccagaccatcggcgacttcgccaccagaagaaaggtgaagcccgcccccctggagatcaagcccctgcccgagtgggaggagctgcaggcccccgtgagaagccccatcaccagaagcttcgccagagacagcagcagattccccatgagccccagacccgacagcgtgcacagcaccaccagcagcagcgacagccacgacagcgaggagaactacgtgcccatgaaccccaacctgagcagcgaggaccccaacctgttcggcagcaacagcctggacggcggcagcagccccatgatcaagcccaagggcgacaagcaggtggagtacctggacctggacctggacagcggcaagagcaccccccccagaaagcagaagagcagcggcagcggcagcagcgtggccgacgagagagtggactacgtggtggtggaccagcagaagaccctggccctgaagagcaccagagaggcctggaccgacggcagacagagcaccgagagcgagacccccgccaagagcgtgaagtag

SEQ ID NO: 83630 - DNA, 1776 bp, synthetic construct
  misc_feature 1..1776: note = Description of Artificial Sequence: Synthetic coding sequence
  source 1..1776: mol_type = other DNA
atgaacaagtgggtgagatgcatctgcgacatctgcggcttcaaccccaccgaggaggaccccgtgaagccccccggcagcagcctgcaggcccccgccgacctgcccctggccatcaacaccgccccccccagcacccaggccgacagcagcagcgccaccctgccccccccctaccagctgatcaacgtgcccccccacctggagaccctgggcatccaggaggacccccaggactacctgctgctgatcaactgccagagcaagaagcccgagcccaccagaacccacgccgacagcgccaagagcaccagcagcgagaccgactgcaacgacaacgtgcccagccacaagaaccccgccagcagccagagcaagcacggcatgaacggcttcttccagcagcagatgatctacgacagcccccccagcagagcccccagcgccagcgtggacagcagcctgtacaacctgcccagaagctacagccacgacgtgctgcccaaggtgagccccagcagcaccgaggccgacggcgagctgtacgtgttcaacacccccagcggcaccagcagcgtggagacccagatgagacacgtgagcatcagctacgacatcccccccacccccggcaacacctaccagatccccagaaccttccccgagggcaccctgggccagaccagcaagctggacaccatccccgacatccccccccccagaccccccaagccccaccccgcccacgacagaagccccgtggagacctgcagcatccccagaaccgccagcgacaccgacagcagctactgcatccccaccgccggcatgagccccagcagaagcaacaccatcagcaccgtggacctgaacaagctgagaaaggacgccagcagccaggactgctacgacatccccagagccttccccagcgacagaagcagcagcctggagggcttccacaaccacttcaaggtgaagaacgtgctgaccgtgggcagcgtgagcagcgaggagctggacgagaactacgtgcccatgaaccccaacagcccccccagacagcacagcagcagcttcaccgagcccatccaggaggccaactacgtgcccatgacccccggcaccttcgacttcagcagcttcggcatgcaggtgcccccccccgcccacatgggcttcagaagcagccccaagaccccccccagaagacccgtgcccgtggccgactgcgagcccccccccgtggacagaaacctgaagcccgacagaaaggtgaagcccgcccccctggagatcaagcccctgcccgagtgggaggagctgcaggcccccgtgagaagccccatcaccagaagcttcgccagagacagcagcagattccccatgagccccagacccgacagcgtgcacagcaccaccagcagcagcgacagccacgacagcgaggagaactacgtgcccatgaaccccaacctgagcagcgaggaccccaacctgttcggcagcaacagcctggacggcggcagcagccccatgatcaagcccaagggcgacaagcaggtggagtacctggacctggacctggacagcggcaagagcaccccccccagaaagcagaagagcagcggcagcggcagcagcgtggccgacgagagagtggactacgtggtggtggaccagcagaagaccctggccctgaagagcaccagagaggcctggaccgacggcagacagagcaccgagagcgagacccccgccaagagcgtgaagtag

SEQ ID NO: 83631 - DNA, 1917 bp, synthetic construct
  misc_feature 1..1917: note = Description of Artificial Sequence: Synthetic coding sequence
  source 1..1917: mol_type = other DNA
atgagcggcgaccccgacgtgctggagtactacaagaacgaccacagcaagaagcccctgagaatcatcaacctgaacttctgcgagcaggtggacgccggcctgaccttcaacaagaaggagctgcaggacagcttcgtgttcgacatcaagaccagcgagagaaccttctacctggtggccgagaccgaggaggacatgaacaagtgggtgcagagcatctgccagatctgcggcttcaaccaggccgaggagagcaccgacagcctgagaaacgtgagcagcgccggccacggccccagaagcagccccgccgagctgagcagcagcagccagcacctgctgagagagagaaagagcagcgcccccagccacagcagccagcccaccctgttcaccttcgagccccccgtgagcaaccacatgcagcccaccctgagcaccagcgccccccaggagtacctgtacctgcaccagtgcatcagcagaagagccgagaacgccagaagcgccagcttcagccagggcaccagagccagcttcctgatgagaagcgacaccgccgtgcagaagctggcccagggcaacggccactgcgtgaacggcatcagcggccaggtgcacggcttctacagcctgcccaagcccagcagacacaacaccgagttcagagacagcacctacgacctgcccagaagcctggccagccacggccacaccaagggcagcctgaccggcagcgagaccgacaacgaggacgtgtacaccttcaagacccccagcaacaccctgtgcagagagttcggcgacctgctggtggacaacatggacgtgcccgccacccccctgagcgcctaccagatccccagaaccttcaccctggacaagaaccacaacgccatgaccgtggccacccccggcgacagcgccatcgcccccccccccagaccccccaagcccagccaggccgagacccccagatggggcagcccccagcagagaccccccatcagcgagaacagcagaagcgtggccgccaccatccccagaagaaacaccctgcccgccatggacaacagcagactgcacagagccagcagctgcgagacctacgagtacccccagagaggcggcgagagcgccggcagaagcgccgagagcatgagcgacggcgtgggcagcttcctgcccggcaagatgatcgtgggcagaagcgacagcaccaacagcgaggacaactacgtgcccatgaaccccggcagcagcaccctgctggccatggagagagccggcgacaacagccagagcgtgtacatccccatgagccccggcgcccaccacttcgacagcctgggctaccccagcaccaccctgcccgtgcacagaggccccagcagaggcagcgagatccagcccccccccgtgaacagaaacctgaagcccgacagaaaggccaagcccacccccctggacctgagaaacaacaccgtgatcgacgagctgcccttcaagagccccatcaccaagagctggagcagagccaaccacaccttcaacagcagcagcagccagtactgcagacccatcagcacccagagcatcaccagcaccgacagcggcgacagcgaggagaactacgtgcccatgcagaaccccgtgagcgccagccccgtgcccagcggcaccaacagccccgcccccaagaagagcaccggcagcgtggactacctggccctggacttccagcccagcagccccagcccccacagaaagcccagcaccagcagcgtgaccagcgacgagaaggtggactacgtgcaggtggacaaggagaagacccaggccctgcagaacaccatgcaggagtggaccgacgtgagacagagcagcgagcccagcaagggcgccaagctgtag

SEQ ID NO: 83632 - DNA, 2031 bp, synthetic construct
  misc_feature 1..2031: note = Description of Artificial Sequence: Synthetic coding sequence
  source 1..2031: mol_type = other DNA
atgagcggcggcggcgacgtggtgtgcaccggctggctgagaaagagcccccccgagaagaagctgagaagatacgcctggaagaagagatggttcatcctgagaagcggcagaatgagcggcgaccccgacgtgctggagtactacaagaacgaccacagcaagaagcccctgagaatcatcaacctgaacttctgcgagcaggtggacgccggcctgaccttcaacaagaaggagctgcaggacagcttcgtgttcgacatcaagaccagcgagagaaccttctacctggtggccgagaccgaggaggacatgaacaagtgggtgcagagcatctgccagatctgcggcttcaaccaggccgaggagagcaccgacagcctgagaaacgtgagcagcgccggccacggccccagaagcagccccgccgagctgagcagcagcagccagcacctgctgagagagagaaagagcagcgcccccagccacagcagccagcccaccctgttcaccttcgagccccccgtgagcaaccacatgcagcccaccctgagcaccagcgccccccaggagtacctgtacctgcaccagtgcatcagcagaagagccgagaacgccagaagcgccagcttcagccagggcaccagagccagcttcctgatgagaagcgacaccgccgtgcagaagctggcccagggcaacggccactgcgtgaacggcatcagcggccaggtgcacggcttctacagcctgcccaagcccagcagacacaacaccgagttcagagacagcacctacgacctgcccagaagcctggccagccacggccacaccaagggcagcctgaccggcagcgagaccgacaacgaggacgtgtacaccttcaagacccccagcaacaccctgtgcagagagttcggcgacctgctggtggacaacatggacgtgcccgccacccccctgagcgcctaccagatccccagaaccttcaccctggacaagaaccacaacgccatgaccgtggccacccccggcgacagcgccatcgcccccccccccagaccccccaagcccagccaggccgagacccccagatggggcagcccccagcagagaccccccatcagcgagaacagcagaagcgtggccgccaccatccccagaagaaacaccctgcccgccatggacaacagcagactgcacagagccagcagctgcgagacctacgagtacccccagagaggcggcgagagcgccggcagaagcgccgagagcatgagcgacggcgtgggcagcttcctgcccggcaagatgatcgtgggcagaagcgacagcaccaacagcgaggacaactacgtgcccatgaaccccggcagcagcaccctgctggccatggagagagccggcgacaacagccagagcgtgtacatccccatgagccccggcgcccaccacttcgacagcctgggctaccccagcaccaccctgcccgtgcacagaggccccagcagaggcagcgagatccagcccccccccgtgaacagaaacctgaagcccgacagaaaggccaagcccacccccctggacctgagaaacaacaccgtgatcgacgagctgcccttcaagagccccatcaccaagagctggagcagagccaaccacaccttcaacagcagcagcagccagtactgcagacccatcagcacccagagcatcaccagcaccgacagcggcgacagcgaggagaactacgtgcccatgcagaaccccgtgagcgccagccccgtgcccagcggcaccaacagccccgcccccaagaagagcaccggcagcgtggactacctggccctggacttccagcccagcagccccagcccccacagaaagcccagcaccagcagcgtgaccagcgacgagaaggtggactacgtgcaggtggacaaggagaagacccaggccctgcagaacaccatgcaggagtggaccgacgtgagacagagcagcgagcccagcaagggcgccaagctgtag

SEQ ID NO: 83633 - DNA, 396 bp, synthetic construct
  misc_feature 1..396: note = Description of Artificial Sequence: Synthetic coding sequence
  source 1..396: mol_type = other DNA
atgagcggcgaccccgacgtgctggagtactacaagaacgaccacagcaagaagcccctgagaatcatcaacctgaacttctgcgagcaggtggacgccggcctgaccttcaacaagaaggagctgcaggacagcttcgtgttcgacatcaagaccagcgagagaaccttctacctggtggccgagaccgaggaggacatgaacaagtgggtgcagagcatctgccagatctgcggcttcaaccaggccgaggagagcaccgacagcctgagaaacgtgagcagcgccggccacggccccagaagcagccccgccgagctgagcagcagcagccagcacctgctgagagagagaaagagcagcgcccccagccacagcagccagcccaccctgtag

SEQ ID NO: 83634 - DNA, 309 bp, synthetic construct
  misc_feature 1..309: note = Description of Artificial Sequence: Synthetic coding sequence
  source 1..309: mol_type = other DNA
atgagcggcgaccccgacgtgctggagtactacaagaacgaccacagcaagaagcccctgagaatcatcaacctgaacttctgcgagcaggtggacgccggcctgaccttcaacaagaaggagctgcaggacagcttcgtgttcgacatcaagaccagcgagagaaccttctacctggtggccgagaccgaggaggacatgaacaagtgggtgcagagcatctgccagatctgcggcttcaaccaggccgaggagagcaccgacagcctgagaaacgtgagcagcgccggccacggccccagaagctag

SEQ ID NO: 83635 - DNA, 993 bp, synthetic construct
  misc_feature 1..993: note = Description of Artificial Sequence: Synthetic coding sequence
  source 1..993: mol_type = other DNA
atggaggccgtggccaagttcgacttcaccgccagcggcgaggacgagctgagcttccacaccggcgacgtgctgaagatcctgagcaaccaggaggagtggttcaaggccgagctgggcagccaggagggctacgtgcccaagaacttcatcgacatccagttccccaagtggttccacgagggcctgagcagacaccaggccgagaacctgctgatgggcaaggaggtgggcttcttcatcatcagagccagccagagcagccccggcgacttcagcatcagcgtgagacacgaggacgacgtgcagcacttcaaggtgatgagagacaacaagggcaactacttcctgtggaccgagaagttccccagcctgaacaagctggtggactactacagaaccaacagcatcagcagacagaagcagatcttcctgagagacagaaccagagaggaccagggccacagaggcaacagcctggacagaagaagccagggcggcccccacctgagcggcgccgtgggcgaggagatcagacccagcatgaacagaaagctgagcgaccacccccccaccctgcccctgcagcagcaccagcaccagccccagcccccccagtacgcccccgccccccagcagctgcagcagcccccccagcagagatacctgcagcaccaccacttccaccaggagagaagaggcggcagcctggacatcaacgacggccactgcggcaccggcctgggcagcgagatgaacgccgccctgatgcacagaagacacaccgaccccgtgcagctgcaggccgccggcagagtgagatgggccagagccctgtacgacttcgaggccctggaggacgacgagctgggcttccacagcggcgaggtggtggaggtgctggacagcagcaaccccagctggtggaccggcagactgcacaacaagctgggcctgttccccgccaactacgtggcccccatgaccagatag

SEQ ID NO: 83636 - DNA, 654 bp, synthetic construct
  misc_feature 1..654: note = Description of Artificial Sequence: Synthetic coding sequence
  source 1..654: mol_type = other DNA
atggtgagcagaagacccctgagcacccccggcagagagctgacccacggccagggcggctggctgctgcaccaccccggccagcccgagctgcccagaggcctgctgcacctgtgccagggccacagaggcaacagcctggacagaagaagccagggcggcccccacctgagcggcgccgtgggcgaggagatcagacccagcatgaacagaaagctgagcgaccacccccccaccctgcccctgcagcagcaccagcaccagccccagcccccccagtacgcccccgccccccagcagctgcagcagcccccccagcagagatacctgcagcaccaccacttccaccaggagagaagaggcggcagcctggacatcaacgacggccactgcggcaccggcctgggcagcgagatgaacgccgccctgatgcacagaagacacaccgaccccgtgcagctgcaggccgccggcagagtgagatgggccagagccctgtacgacttcgaggccctggaggacgacgagctgggcttccacagcggcgaggtggtggaggtgctggacagcagcaaccccagctggtggaccggcagactgcacaacaagctgggcctgttccccgccaactacgtggcccccatgaccagatag

SEQ ID NO: 83637 - DNA, 993 bp, synthetic construct; identical to SEQ ID NO: 83635
  misc_feature 1..993: note = Description of Artificial Sequence: Synthetic coding sequence
  source 1..993: mol_type = other DNA

SEQ ID NO: 83638 - DNA, 294 bp, synthetic construct
  misc_feature 1..294: note = Description of Artificial Sequence: Synthetic coding sequence
  source 1..294: mol_type = other DNA
atggaggccgtggccaagttcgacttcaccgccagcggcgaggacgagctgagcttccacaccggcgacgtgctgaagatcctgagcaaccaggaggagtggttcaaggccgagctgggcagccaggagggctacgtgcccaagaacttcatcgacatccagttccccaagtggttccacgagggcctgagcagacaccaggccgagaacctgctgatgggcaaggaggtgggcttcttcatcatcagagccagccagagcagccccggcgacttcagcatcagcgtgagatag

SEQ ID NO: 83639 - DNA, 795 bp, synthetic construct
  misc_feature 1..795: note = Description of Artificial Sequence: Synthetic coding sequence
  source 1..795: mol_type = other DNA
atgctggagttcgtgagcctgctggccagaaaggacagcaacaacagcgtgagcaagcccagacacaagctgaaccccttcagcagcaagagacacgaggacgacgtgcagcacttcaaggtgatgagagacaacaagggcaactacttcctgtggaccgagaagttccccagcctgaacaagctggtggactactacagaaccaacagcatcagcagacagaagcagatcttcctgagagacagaaccagagaggaccagggccacagaggcaacagcctggacagaagaagccagggcggcccccacctgagcggcgccgtgggcgaggagatcagacccagcatgaacagaaagctgagcgaccacccccccaccctgcccctgcagcagcaccagcaccagccccagcccccccagtacgcccccgccccccagcagctgcagcagcccccccagcagagatacctgcagcaccaccacttccaccaggagagaagaggcggcagcctggacatcaacgacggccactgcggcaccggcctgggcagcgagatgaacgccgccctgatgcacagaagacacaccgaccccgtgcagctgcaggccgccggcagagtgagatgggccagagccctgtacgacttcgaggccctggaggacgacgagctgggcttccacagcggcgaggtggtggaggtgctggacagcagcaaccccagctggtggaccggcagactgcacaacaagctgggcctgttccccgccaactacgtggcccccatgaccagatag

SEQ ID NO: 83640 - DNA, 837 bp, synthetic construct
  misc_feature 1..837: note = Description of Artificial Sequence: Synthetic coding sequence
  source 1..837: mol_type = other DNA
atggaggccgtggccaagttcgacttcaccgccagcggcgaggacgagctgagcttccacaccggcgacgtgctgaagatcctgagcaaccaggaggagtggttcaaggccgagctgggcagccaggagggctacgtgcccaagaacttcatcgacatccagttccccaagcacgaggacgacgtgcagcacttcaaggtgatgagagacaacaagggcaactacttcctgtggaccgagaagttccccagcctgaacaagctggtggactactacagaaccaacagcatcagcagacagaagcagatcttcctgagagacagaaccagagaggaccagggccacagaggcaacagcctggacagaagaagccagggcggcccccacctgagcggcgccgtgggcgaggagatcagacccagcatgaacagaaagctgagcgaccacccccccaccctgcccctgcagcagcaccagcaccagccccagcccccccagtacgcccccgccccccagcagctgcagcagcccccccagcagagatacctgcagcaccaccacttccaccaggagagaagaggcggcagcctggacatcaacgacggccactgcggcaccggcctgggcagcgagatgaacgccgccctgatgcacagaagacacaccgaccccgtgcagctgcaggccgccggcagagtgagatgggccagagccctgtacgacttcgaggccctggaggaggtgctggacagcagcaaccccagctggtggaccggcagactgcacaacaagctgggcctgttccccgccaactacgtggcccccatgaccagatag

SEQ ID NO: 83641 - DNA, 915 bp, synthetic construct
  misc_feature 1..915: note = Description of Artificial Sequence: Synthetic coding sequence
  source 1..915: mol_type = other DNA
atgctggagttcgtgagcctgctggccagaaaggacagcaacaacagcgtgagcaagcccagacacaagctgaaccccttcagcagcaagagatggttccacgagggcctgagcagacaccaggccgagaacctgctgatgggcaaggaggtgggcttcttcatcatcagagccagccagagcagccccggcgacttcagcatcagcgtgagacacgaggacgacgtgcagcacttcaaggtgatgagagacaacaagggcaactacttcctgtggaccgagaagttccccagcctgaacaagctggtggactactacagaaccaacagcatcagcagacagaagcagatcttcctgagagacagaaccagagaggaccagggccacagaggcaacagcctggacagaagaagccagggcggcccccacctgagcggcgccgtgggcgaggagatcagacccagcatgaacagaaagctgagcgaccacccccccaccctgcccctgcagcagcaccagcaccagccccagcccccccagtacgcccccgccccccagcagctgcagcagcccccccagcagagatacctgcagcaccaccacttccaccaggagagaagaggcggcagcctggacatcaacgacggccactgcggcaccggcctgggcagcgagatgaacgccgccctgatgcacagaagacacaccgaccccgtgcagctgcaggccgccggcagagtgagatgggccagagccctgtacgacttcgaggccctggaggacgacgagctgggcttccacagcggcgaggtggtggaggtgctggacagcagcaaccccagctggtggaccggcagactgcacaacaagctgggcctgttccccgccaactacgtggcccccatgaccagatag

SEQ ID NO: 83642 - DNA, 777 bp, synthetic construct
  misc_feature 1..777: note = Description of Artificial Sequence: Synthetic coding sequence
  source 1..777: mol_type = other DNA
atgggcaaggaggtgggcttcttcatcatcagagccagccagagcagccccggcgacttcagcatcagcgtgagacacgaggacgacgtgcagcacttcaaggtgatgagagacaacaagggcaactacttcctgtggaccgagaagttccccagcctgaacaagctggtggactactacagaaccaacagcatcagcagacagaagcagatcttcctgagagacagaaccagagaggaccagggccacagaggcaacagcctggacagaagaagccagggcggcccccacctgagcggcgccgtgggcgaggagatcagacccagcatgaacagaaagctgagcgaccacccccccaccctgcccctgcagcagcaccagcaccagccccagcccccccagtacgcccccgccccccagcagctgcagcagcccccccagcagagatacctgcagcaccaccacttccaccaggagagaagaggcggcagcctggacatcaacgacggccactgcggcaccggcctgggcagcgagatgaacgccgccctgatgcacagaagacacaccgaccccgtgcagctgcaggccgccggcagagtgagatgggccagagccctgtacgacttcgaggccctggaggacgacgagctgggcttccacagcggcgaggtggtggaggtgctggacagcagcaaccccagctggtggaccggcagactgcacaacaagctgggcctgttccccgccaactacgtggcccccatgaccagatag

SEQ ID NO: 83643 - DNA, 507 bp, synthetic construct
  misc_feature 1..507: note = Description of Artificial Sequence: Synthetic coding sequence
  source 1..507: mol_type = other DNA
atgttctggaagctgagcctgagcctgttcctggtggccgtgctggtgaaggtggccgaggccagaaagaacagacccgccggcgccatccccagcccctacaaggacggcagcagcaacaacagcgagagatggcagcaccagatcaaggaggtgctggccagcagccaggaggccctggtggtgaccgagagaaagtacctgaagagcgactggtgcaagacccagcccctgagacagaccgtgagcgaggagggctgcagaagcagaaccatcctgaacagattctgctacggccagtgcaacagcttctacatccccagacacgtgaagaaggaggaggagagcttccagagctgcgccttctgcaagccccagagagtgaccagcgtgctggtggagctggagtgccccggcctggacccccccttcagactgaagaagatccagaaggtgaagcagtgcagatgcatgagcgtgaacctgagcgacagcgacaagcagtag

SEQ ID NO: 83644 - DNA, 1443 bp, synthetic construct
  misc_feature 1..1443: note = Description of Artificial Sequence: Synthetic coding sequence
  source 1..1443: mol_type = other DNA
atggccggcaccagatgggtgctgggcgccctgctgagaggctgcggctgcaactgcagcagctgcagaagaaccggcgccgcctgcctgcccttctacagcgccgccggcagcatccccagcggcgtgagcggcagaagaagactgctgctgctgctgggcgccgccgccgccgccgccagccagaccagaggcctgcagaccggccccgtgccccccggcagactggccggcccccccgccgtggccaccagcgccgccgccgccgccgccgccagctacagcgccctgagagccagcctgctgccccagagcctggccgccgccgccgccgtgcccaccagaagctacagccaggagagcaagaccacctacctggaggacctgccccccccccccgagtacgagctggcccccagcaagctggaggaggaggtggacgacgtgttcctgatcagagcccagggcctgccctggagctgcaccatggaggacgtgctgaacttcttcagcgactgcagaatcagaaacggcgagaacggcatccacttcctgctgaacagagacggcaagagaagaggcgacgccctgatcgagatggagagcgagcaggacgtgcagaaggccctggagaagcacagaatgtacatgggccagagatacgtggaggtgtacgagatcaacaacgaggacgtggacgccctgatgaagagcctgcaggtgaagagcagccccgtggtgaacgacggcgtggtgagactgagaggcctgccctacagctgcaacgagaaggacatcgtggacttcttcgccggcctgaacatcgtggacatcaccttcgtgatggactacagaggcagaagaaagaccggcgaggcctacgtgcagttcgaggagcccgagatggccaaccaggccctgctgaagcacagagaggagatcggcaacagatacatcgagatcttccccagcagaagaaacgaggtgagaacccacgtgggcagctacaagggcaagaagatcgccagcttccccaccgccaagtacatcaccgagcccgagatggtgttcgaggagcacgaggtgaacgaggacatccagcccatgaccgccttcgagagcgagaaggagatcgagctgcccaaggaggtgcccgagaagctgcccgaggccgccgacttcggcaccaccagcagcctgcacttcgtgcacatgagaggcctgcccttccaggccaacgcccaggacatcatcaacttcttcgcccccctgaagcccgtgagaatcaccatggagtacagcagcagcggcaaggccaccggcgaggccgacgtgcacttcgagacccacgaggacgccgtggccgccatgctgaaggacagaagccacgtgcaccacagatacatcgagctgttcctgaacagctgccccaagggcaagtag

SEQ ID NO: 83645 - DNA, 957 bp, synthetic construct
  misc_feature 1..957: note = Description of Artificial Sequence: Synthetic coding sequence
  source 1..957: mol_type = other DNA
atggaggacgtgctgaacttcttcagcgactgcagaatcagaaacggcgagaacggcatccacttcctgctgaacagagacggcaagagaagaggcgacgccctgatcgagatggagagcgagcaggacgtgcagaaggccctggagaagcacagaatgtacatgggccagagatacgtggaggtgtacgagatcaacaacgaggacgtggacgccctgatgaagagcctgcaggtgaagagcagccccgtggtgaacgacggcgtggtgagactgagaggcctgccctacagctgcaacgagaaggacatcgtggacttcttcgccggcctgaacatcgtggacatcaccttcgtgatggactacagaggcagaagaaagaccggcgaggcctacgtgcagttcgaggagcccgagatggccaaccaggccctgctgaagcacagagaggagatcggcaacagatacatcgagatcttccccagcagaagaaacgaggtgagaacccacgtgggcagctacaagggcaagaagatcgccagcttccccaccgccaagtacatcaccgagcccgagatggtgttcgaggagcacgaggtgaacgaggacatccagcccatgaccgccttcgagagcgagaaggagatcgagctgcccaaggaggtgcccgagaagctgcccgaggccgccgacttcggcaccaccagcagcctgcacttcgtgcacatgagaggcctgcccttccaggccaacgcccaggacatcatcaacttcttcgcccccctgaagcccgtgagaatcaccatggagtacagcagcagcggcaaggccaccggcgaggccgacgtgcacttcgagacccacgaggacgccgtggccgccatgctgaaggacagaagccacgtgcaccacagatacatcgagctgttcctgaacagctgccccaagggcaagtag

SEQ ID NO: 83646 - DNA, 1362 bp, synthetic construct
  misc_feature 1..1362: note = Description of Artificial Sequence: Synthetic coding sequence
  source 1..1362: mol_type = other DNA
gccgccgccgtgcccaccagaagctacagccaggtgagaggcagaagagagggccccggcgccagaagcctgcccggcagagtgcacgccccccccagacccagcgtgcccccctgcgcccccagaggccacgccagaggcagcgccaccctggccgcccaccccccccccagcaccctgtgcagctactgggccctggagcagggcaagctgagccaggccagcggcctgctgctggtgctgttcagccccagagtgagcggcagactgggcagcgagagcaagaccacctacctggaggacctgccccccccccccgagtacgagctggcccccagcaagctggaggaggaggtggacgacgtgttcctgatcagagcccagggcctgccctggagctgcaccatggaggacgtgctgaacttcttcagcgactgcagaatcagaaacggcgagaacggcatccacttcctgctgaacagagacggcaagagaagaggcgacgccctgatcgagatggagagcgagcaggacgtgcagaaggccctggagaagcacagaatgtacatgggccagagatacgtggaggtgtacgagatcaacaacgaggacgtggacgccctgatgaagagcctgcaggtgaagagcagccccgtggtgaacgacggcgtggtgagactgagaggcctgccctacagctgcaacgagaaggacatcgtggacttcttcgccggcctgaacatcgtggacatcaccttcgtgatggactacagaggcagaagaaagaccggcgaggcctacgtgcagttcgaggagcccgagatggccaaccaggccctgctgaagcacagagaggagatcggcaacagatacatcgagatcttccccagcagaagaaacgaggtgagaacccacgtgggcagctacaagggcaagaagatcgccagcttccccaccgccaagtacatcaccgagcccgagatggtgttcgaggagcacgaggtgaacgaggacatccagcccatgaccgccttcgagagcgagaaggagatcgagctgcccaaggaggtgcccgagaagctgcccgaggccgccgacttcggcaccaccagcagcctgcacttcgtgcacatgagaggcctgcccttccaggccaacgcccaggacatcatcaacttcttcgcccccctgaagcccgtgagaatcaccatggagtacagcagcagcggcaaggccaccggcgaggccgacgtgcacttcgagacccacgaggacgccgtggccgccatgctgaaggacagaagccacgtgcaccacagatacatcgagctgttcctgaacagctgccccaagggcaagtag

SEQ ID NO: 83647 - DNA, 957 bp, synthetic construct; identical to SEQ ID NO: 83645
  misc_feature 1..957: note = Description of Artificial Sequence: Synthetic coding sequence
  source 1..957: mol_type = other DNA

SEQ ID NO: 83648 - DNA, 1254 bp, synthetic construct
  misc_feature 1..1254: note = Description of Artificial Sequence: Synthetic coding sequence
  source 1..1254: mol_type = other DNA
tgacccccccccagcaccctgtgcagctactgggccctggagcagggcaagctgagccaggccagcggcctgctgctggtgctgttcagccccagagtgagcggcagactgggcagcgtgagcgtggccggcgtgaacgtggaggccctgttccccgcctggcccatggagagcaagaccacctacctggaggacctgccccccccccccgagtacgagctggcccccagcaagctggaggaggaggtggacgacgtgttcctgatcagagcccagggcctgccctggagctgcaccatggaggacgtgctgaacttcttcagcgactgcagaatcagaaacggcgagaacggcatccacttcctgctgaacagagacggcaagagaagaggcgacgccctgatcgagatggagagcgagcaggacgtgcagaaggccctggagaagcacagaatgtacatgggccagagatacgtggaggtgtacgagatcaacaacgaggacgtggacgccctgatgaagagcctgcaggtgaagagcagccccgtggtgaacgacggcgtggtgagactgagaggcctgccctacagctgcaacgagaaggacatcgtggacttcttcgccggcctgaacatcgtggacatcaccttcgtgatggactacagaggcagaagaaagaccggcgaggcctacgtgcagttcgaggagcccgagatggccaaccaggccctgctgaagcacagagaggagatcggcaacagatacatcgagatcttccccagcagaagaaacgaggtgagaacccacgtgggcagctacaagggcaagaagatcgccagcttccccaccgccaagtacatcaccgagcccgagatggtgttcgaggagcacgaggtgaacgaggacatccagcccatgaccgccttcgagagcgagaaggagatcgagctgcccaaggaggtgcccgagaagctgcccgaggccgccgacttcggcaccaccagcagcctgcacttcgtgcacatgagaggcctgcccttccaggccaacgcccaggacatcatcaacttcttcgcccccctgaagcccgtgagaatcaccatggagtacagcagcagcggcaaggccaccggcgaggccgacgtgcacttcgagacccacgaggacgccgtggccgccatgctgaaggacagaagccacgtgcaccacagatacatcgagctgttcctgaacagctgccccaagggcaagtag

SEQ ID NO: 83649 - DNA, 1239 bp, synthetic construct
  misc_feature 1..1239: note = Description of Artificial Sequence: Synthetic coding sequence
  source 1..1239: mol_type = other DNA
atggccggcaccagatgggtgctgggcgccctgctgagaggctgcggctgcaactgcagcagctgcagaagaaccggcgccgcctgcctgcccttctacagcgccgccggcagcatccccgccgccgccgtgcccaccagaagctacagccaggagagcaagaccacctacctggaggacctgccccccccccccgagtacgagctggcccccagcaagctggaggaggaggtggacgacgtgttcctgatcagagcccagggcctgccctggagctgcaccatggaggacgtgctgaacttcttcagcgactgcagaatcagaaacggcgagaacggcatccacttcctgctgaacagagacggcaagagaagaggcgacgccctgatcgagatggagagcgagcaggacgtgcagaaggccctggagaagcacagaatgtacatgggccagagatacgtggaggtgtacgagatcaacaacgaggacgtggacgccctgatgaagagcctgcaggtgaagagcagccccgtggtgaacgacggcgtggtgagactgagaggcctgccctacagctgcaacgagaaggacatcgtggacttcttcgccggcctgaacatcgtggacatcaccttcgtgatggactacagaggcagaagaaagaccggcgaggcctacgtgcagttcgaggagcccgagatggccaaccaggccctgctgaagcacagagaggagatcggcaacagatacatcgagatcttccccagcagaagaaacgaggtgagaacccacgtgggcagctacaagggcaagaagatcgccagcttccccaccgccaagtacatcaccgagcccgagatggtgttcgaggagcacgaggtgaacgaggacatccagcccatgaccgccttcgagagcgagaaggagatcgagctgcccaaggaggtgcccgagaagctgcccgaggccgccgacttcggcaccaccagcagcctgcacttcgtgcacatgagaggcctgcccttccaggccaacgcccaggacatcatcaacttcttcgcccccctgaagcccgtgagaatcaccatggagtacagcagcagcggcaaggccaccggcgaggccgacgtgcacttcgagacccacgaggacgccgtggccgccatgctgaaggacagaagccacgtgcaccacagatacatcgagctgttcctgaacagctgccccaagggcaagtag

SEQ ID NO: 83650 - DNA, 1089 bp, synthetic construct
  misc_feature 1..1089: note = Description of Artificial Sequence: Synthetic coding sequence
  source 1..1089: mol_type = other DNA
atggagagcaagaccacctacctggaggacctgccccccccccccgagtacgagctggcccccagcaagctggaggaggaggtggacgacgtgttcctgatcagagcccagggcctgccctggagctgcaccatggaggacgtgctgaacttcttcagcgactgcagaatcagaaacggcgagaacggcatccacttcctgctgaacagagacggcaagagaagaggcgacgccctgatcgagatggagagcgagcaggacgtgcagaaggccctggagaagcacagaatgtacatgggccagagatacgtggaggtgtacgagatcaacaacgaggacgtggacgccctgatgaagagcctgcaggtgaagagcagccccgtggtgaacgacggcgtggtgagactgagaggcctgccctacagctgcaacgagaaggacatcgtggacttcttcgccggcctgaacatcgtggacatcaccttcgtgatggactacagaggcagaagaaagaccggcgaggcctacgtgcagttcgaggagcccgagatggccaaccaggccctgctgaagcacagagaggagatcggcaacagatacatcgagatcttccccagcagaagaaacgaggtgagaacccacgtgggcagctacaagggcaagaagatcgccagcttccccaccgccaagtacatcaccgagcccgagatggtgttcgaggagcacgaggtgaacgaggacatccagcccatgaccgccttcgagagcgagaaggagatcgagctgcccaaggaggtgcccgagaagctgcccgaggccgccgacttcggcaccaccagcagcctgcacttcgtgcacatgagaggcctgcccttccaggccaacgcccaggacatcatcaacttcttcgcccccctgaagcccgtgagaatcaccatggagtacagcagcagcggcaaggccaccggcgaggccgacgtgcacttcgagacccacgaggacgccgtggccgccatgctgaaggacagaagccacgtgcaccacagatacatcgagctgttcctgaacagctgccccaagggcaagtag

SEQ ID NO: 83651 - DNA, 1401 bp, synthetic construct
  misc_feature 1..1401: note = Description of Artificial Sequence: Synthetic coding sequence
  source 1..1401: mol_type = other DNA
atgctgagaagcaccagcaccgtgaccctgctgagcggcggcgccgccagaacccccggcgcccccagcagaagagccaacgtgtgcagactgagactgaccgtgccccccgagagccccgtgcccgagcagtgcgagaagaagatcgagagaaaggagcagctgctggacctgagcaacggcgagcccaccagaaagctgccccagggcgtggtgtacggcgtggtgagaagaagcgaccagaaccagcagaaggagatggtggtgtacggctggagcaccagccagctgaaggaggagatgaactacatcaaggacgtgagagccaccctggagaaggtgagaaagagaatgtacggcgactacgacgagatgagacagaagatcagacagctgacccaggagctgagcgtgagccacgcccagcaggagtacctggagaaccacatccagacccagagcagcgccctggacagattcaacgccatgaacagcgccctggccagcgacagcatcggcctgcagaagaccctggtggacgtgaccctggagaacagcaacatcaaggaccagatcagaaacctgcagcagacctacgaggccagcatggacaagctgagagagaagcagagacagctggaggtggcccaggtggagaaccagctgctgaagatgaaggtggagagcagccaggaggccaacgccgaggtgatgagagagatgaccaagaagctgtacagccagtacgaggagaagctgcaggaggagcagagaaagcacagcgccgagaaggaggccctgctggaggagaccaacagcttcctgaaggccatcgaggaggccaacaagaagatgcaggccgccgagatcagcctggaggagaaggaccagagaatcggcgagctggacagactgatcgagagaatggagaaggagagacaccagctgcagctgcagctgctggagcacgagaccgagatgagcggcgagctgaccgacagcgacaaggagagataccagcagctggaggaggccagcgccagcctgagagagagaatcagacacctggacgacatggtgcactgccagcagaagaaggtgaagcagatggtggaggagatcgagagcctgaagaagaagctgcagcagaagcagctgctgatcctgcagctgctggagaagatcagcttcctggagggcgagaacaacgagctgcagagcagactggactacctgaccgagacccaggccaagaccgaggtggagaccagagagatcggcgtgggctgcgacctgctgcccagccagaccggcagaaccagagagatcgtgatgcccagcagaaactacaccccctacaccagagtgctggagctgaccatgaagaagaccctgacctag

SEQ ID NO: 83652 - DNA, 1194 bp, synthetic construct
  misc_feature 1..1194: note = Description of Artificial Sequence: Synthetic coding sequence
  source 1..1194: mol_type = other DNA
atgctgagaagcaccagcaccgtgaccctgctgagcggcggcgccgccagaacccccggcgcccccagcagaagagccaacgtgtgcagactgagactgaccgtgccccccgagagccccgtgcccgagcagtgcgagaagaagatcgagagaaaggagcagctgctggacctgagcaacggcgagcccaccagaaagctgccccagggcgtggtgtacggcgtggtgagaagaagcgaccagaaccagcagaaggagatggtggtgtacggctggagcaccagccagctgaaggaggagatgaactacatcaaggacaagaccctggtggacgtgaccctggagaacagcaacatcaaggaccagatcagaaacctgcagcagacctacgaggccagcatggacaagctgagagagaagcagagacagctggaggtggcccaggtggagaaccagctgctgaagatgaaggtggagagcagccaggaggccaacgccgaggtgatgagagagatgaccaagaagctgtacagccagtacgaggagaagctgcaggaggagcagagaaagcacagcgccgagaaggaggccctgctggaggagaccaacagcttcctgaaggccatcgaggaggccaacaagaagatgcaggccgccgagatcagcctggaggagaaggaccagagaatcggcgagctggacagactgatcgagagaatggagaaggagagacaccagctgcagctgcagctgctggagcacgagaccgagatgagcggcgagctgaccgacagcgacaaggagagataccagcagctggaggaggccagcgccagcctgagagagagaatcagacacctggacgacatggtgcactgccagcagaagaaggtgaagcagatggtggaggagatcgagagcctgaagaagaagctgcagcagaagcagctgctgatcctgcagctgctggagaagatcagcttcctggagggcgagaacaacgagctgcagagcagactggactacctgaccgagacccaggccaagaccgaggtggagaccagagagatcggcgtgggctgcgacctgctgcccagccagaccggcagaaccagagagatcgtgatgcccagcagaaactacaccccctacaccagagtgctggagctgaccatgaagaagaccctgacctag

SEQ ID NO: 83653 - DNA, 1248 bp, synthetic construct
  misc_feature 1..1248: note = Description of Artificial Sequence: Synthetic coding sequence
  source 1..1248: mol_type = other DNA
atgctgagaagcaccagcaccgtgaccctgctgagcggcggcgccgccagaacccccggcgcccccagcagaagagccaacgtgtgcagactgagactgaccgtgccccccgagagccccgtgcccgagcagtgcgagaagaagatcgagagaaaggagcagctgctggacctgagcaacggcgagcccaccagaaagctgccccagggcgtggtgtacggcgtggtgagaagaagcgaccagaaccagcagaaggagatggtggtgtacggctggagcaccagccagctgaaggaggagatgaactacatcaaggacgtgagccacgcccagcaggagtacctggagaaccacatccagacccagagcagcgccctggacagattcaacgccatgaacagcgccctggccagcgacagcatcggcctgcagaagaccctggtggacgtgaccctggagaacagcaacatcaaggaccagatcagaaacctgcagcagacctacgaggccagcatggacaagctgagagagaagcagagacagctggaggtggcccaggtggagaaccagctgctgaagatgaaggtggagagcagccaggaggccaacgccgaggtgatgagagagatgaccaagaagctgtacagccagtacgaggagaagctgcaggaggagcagagaaagcacagcgccgagaaggaggccctgctggaggagaccaacagcttcctgaaggccatcgaggaggccaacaagaagatgcaggccgccgagatcagcctggaggagaaggaccagagaatcggcgagctggacagactgatcgagagaatggagaaggagagacaccagctgcagctgcagctgctggagcacgagaccgagatgagcggcgagctgaccgacagcgacaaggagagataccagcagctggaggaggccagcgccagcctgagagagagaatcagacacctggacgacatggtgcactgccagcagaagaaggtgaagcagatggtggaggagaacaacgagctgcagagcagactggactacctgaccgagacccaggccaagaccgaggtggagaccagagagatcggcgtgggctgcgacctgctgcccagacagagcagaaagttcgagaaggtgctgaacgagttcgtgcagctgctgcccctgccccaccacctgctgtgggccttcggcaacgtgtgctggagaagacacttcggcctgctgcagtag

SEQ ID NO: 83654 - DNA, 1317 bp, synthetic construct
  misc_feature 1..1317: note = Description of Artificial Sequence: Synthetic coding sequence
  source 1..1317: mol_type = other DNA
atgctgagaagcaccagcaccgtgaccctgctgagcggcggcgccgccagaacccccggcgcccccagcagaagagccaacgtgtgcagactgagactgaccgtgccccccgagagccccgtgcccgagcagtgcgagaagaagatcgagagaaaggagcagctgctggacctgagcaacggcgagcccaccagaaagctgccccagggcgtggtgtacggcgtggtgagaagaagcgaccagaaccagcagaaggagatggtggtgtacggctggagcaccagccagctgaaggaggagatgaactacatcaaggacgtgagagccaccctggagaaggtgagaaagagaatgtacggcgactacgacgagatgagacagaagatcagacagctgacccaggagctgagcgtgagccacgcccagcaggagtacctggagaaccacatccagacccagagcagcgccctggacagattcaacgccatgaacagcgccctggccagcgacagcatcggcctgcagaagaccctggtggacgtgaccctggagaacagcaacatcaaggaccagatcagaaacctgcagcagacctacgaggccagcatggacaagctgagagagaagcagagacagctggaggtggcccaggtggagaaccagctgctgaagatgaaggtggagagcagccaggaggccaacgccgaggtgatgagagagatgaccaagaagctgtacagccagtacgaggagaagctgcaggaggagcagagaaagcacagcgccgagaaggaggccctgctggaggagaccaacagcttcctgaaggccatcgaggaggccaacaagaagatgcaggccgccgagatcagcctggaggagaaggaccagagaatcggcgagctggacagactgatcgagagaatggagaaggagagacaccagctgcagctgcagctgctggagcacgagaccgagatgagcggcgagctgaccgacagcgacaaggagagataccagcagctggaggaggccagcgccagcctgagagagagaatcagacacctggacgacatggtgcactgccagcagaagaaggtgaagcagatggtggaggagaacaacgagctgcagagcagactggactacctgaccgagacccaggccaagaccgaggtggagaccagagagatcggcgtgggctgcgacctgctgcccagccagaccggcagaaccagagagatcgtgatgcccagcagaaactacaccccctacaccagagtgctggagctgaccatgaagaagaccctgacctag

SEQ ID NO: 83655 - DNA, 1338 bp, synthetic construct
  misc_feature 1..1338: note = Description of Artificial Sequence: Synthetic coding sequence
  source 1..1338: mol_type = other DNA
atgctgagaagcaccagcaccgtgaccctgctgagcggcggcgccgccagaacccccggcgcccccagcagaagagccaacgtgtgcagactgagactgaccgtgccccccgagagccccgtgcccgagcagtgcgagaagaagatcgagagaaaggagcagctgctggacctgagcaacggcgagcccaccagaaagctgccccagggcgtggtgtacggcgtggtgagaagaagcgaccagaaccagcagaaggagatggtggtgtacggctggagcaccagccagctgaaggaggagatgaactacatcaaggacgtgagagccaccctggagaaggtgagaaagagaatgtacggcgactacgacgagatgagacagaagatcagacagctgacccaggagctgagcgtgagccacgcccagcaggagtacctggagaaccacatccagacccagagcagcgccctggacagattcaacgccatgaacagcgccctggccagcgacagcatcggcctgcagaagaccctggtggacgtgaccctggagaacagcaacatcaaggaccagatcagaaacctgcagcagacctacgaggccagcatggacaagctgagagagaagcagagacagctggaggtggcccaggtggagaaccagctgctgaagatgaaggtggagagcagccaggaggccaacgccgaggtgatgagagagatgaccaagaagctgtacagccagtacgaggagaagctgcaggaggagcagagaaagcacagcgccgagaaggaggccctgctggaggagaccaacagcttcctgaaggccatcgaggaggccaacaagaagatgcaggccgccgagatcagcctggaggagaaggaccagagaatcggcgagctggacagactgatcgagagaatggagaaggagagacaccagctgcagctgcagctgctggagcacgagaccgagatgagcggcgagctgaccgacagcgacaaggagagataccagcagctggaggaggccagcgccagcctgagagagagaatcagacacctggacgacatggtgcactgccagcagaagaaggtgaagcagatggtggaggagatcgagagcctgaagaagaagctgcagcagaagcagctgctgatcctgcagctgctggagaagatcagcttcctggagggcgagaacaacgagctgcagagcagactggactacctgaccgagacccaggccaagaccgaggtggagaccagagagatcggcgtgggctgcgacctgctgcccagaagatgcaagcagagcagccagagaaagaactag

SEQ ID NO: 83656 - DNA, 1653 bp, synthetic construct
  misc_feature 1..1653: note = Description of Artificial Sequence: Synthetic coding sequence
  source 1..1653: mol_type = other DNA
atgctgagaagcaccagcaccgtgaccctgctgagcggcggcgccgccagaacccccggcgcccccagcagaagagccaacgtgtgcagactgagactgaccgtgccccccgagagccccgtgcccgagcagtgcgagaagaagatcgagagaaaggagcagctgctggacctgagcaacggcgagcccaccagaaagctgccccagggcgtggtgtacggcgtggtgagaagaagcgaccagaaccagcagaaggagatggtggtgtacggctggagcaccagccagctgaaggaggagatgaactacatcaaggacgtgagagccaccctggagaaggtgagaaagagaatgtacggcgactacgacgagatgagacagaagatcagacagctgacccaggagctgagcgtgagccacgcccagcaggagtacctggagaaccacatccagacccagagcagcgccctggacagattcaacgccatgaacagcgccctggccagcgacagcatcggcctgcagaagaccctggtggacgtgaccctggagaacagcaacatcaaggaccagatcagaaacctgcagcagacctacgaggccagcatggacaagctgagagagaagcagagacagctggaggtggcccaggtggagaaccagctgctgaagatgaaggtggagagcagccaggaggccaacgccgaggtgatgagagagatgaccaagaagctgtacagccagtacgaggagaagctgcaggaggagcagagaaagcacagcgccgagaaggaggccctgctggaggagaccaacagcttcctgaaggccatcgaggaggccaacaagaagatgcaggccgccgagatcagcctggaggagaaggaccagagaatcggcgagctggacagactgatcgagagaatggagaaggagagacaccagctgcagctgcagctgctggagcacgagaccgagatgagcggcgagctgaccgacagcgacaaggagagataccagcagctggaggaggccagcgccagcctgagagagagaatcagacacctggacgacatggtgcactgccagcagaagaaggtgaagcagatggtggaggagatcgagagcctgaagaagaagctgcagcagaagcagctgctgatcctgcagctgctggagaagatcagcttcctggagggcgagaacaacgagctgcagagcagactggactacctgaccgagacccaggccaagaccgaggtggagaccagagagatcggcgtgggctgcgacctgctgcccagactgcccttcagacagaacgacagcagcagccactgccagaagagcggcagccccatcagcagcgaggagagaagaagaagagacaagcagcacctggacgacatcaccgccgccagactgctgcccctgcaccacatgcccacccagctgctgagcatcgaggagagcctggccctgcagaagcagcagaagcagaactacgaggagatgcaggccaagctggccgcccagaagctggccgagagactgaacatcaagatgagaagctacaaccccgagggcgagagcagcggcagatacagagaggtgagagacgaggacgacgactggagcagcgacgagttctag

SEQ ID NO: 83657 - DNA, 1308 bp, synthetic construct
  misc_feature 1..1308: note = Description of Artificial Sequence: Synthetic coding sequence
  source 1..1308: mol_type = other DNA
atgctgagaagcaccagcaccgtgaccctgctgagcggcggcgccgccagaacccccggcgcccccagcagaagagccaacgtgtgcagactgagactgaccgtgccccccgagagccccgtgcccgagcagtgcgagaagaagatcgagagaaaggagcagctgctggacctgagcaacggcgagcccaccagaaagctgccccagggcgtggtgtacggcgtggtgagaagaagcgaccagaaccagcagaaggagatggtggtgtacggctggagcaccagccagctgaaggaggagatgaactacatcaaggacgtgagccacgcccagcaggagtacctggagaaccacatccagacccagagcagcgccctggacagattcaacgccatgaacagcgccctggccagcgacagcatcggcctgcagaagaccctggtggacgtgaccctggagaacagcaacatcaaggaccagatcagaaacctgcagcagacctacgaggccagcatggacaagctgagagagaagcagagacagctggaggtggcccaggtggagaaccagctgctgaagatgaaggtggagagcagccaggaggccaacgccgaggtgatgagagagatgaccaagaagctgtacagccagtacgaggagaagctgcaggaggagcagagaaagcacagcgccgagaaggaggccctgctggaggagaccaacagcttcctgaaggccatcgaggaggccaacaagaagatgcaggccgccgagatcagcctggaggagaaggaccagagaatcggcgagctggacagactgatcgagagaatggagaaggagagacaccagctgcagctgcagctgctggagcacgagaccgagatgagcggcgagctgaccgacagcgacaaggagagataccagcagctggaggaggccagcgccagcctgagagagagaatcagacacctggacgacatggtgcactgccagcagaagaaggtgaagcagatggtggaggagatcgagagcctgaagaagaagctgcagcagaagcagctgctgatcctgcagctgctggagaagatcagcttcctggagggcgagaacaacgagctgcagagcagactggactacctgaccgagacccaggccaagaccgaggtggagaccagagagatcggcgtgggctgcgacctgctgcccagccagaccggcagaaccagagagatcgtgatgcccagcagaaactacaccccctacaccagagtgctggagctgaccatgaagaagaccctgacctag

SEQ ID NO: 83658 - DNA, 1401 bp, synthetic construct; identical to SEQ ID NO: 83651
  misc_feature 1..1401: note = Description of Artificial Sequence: Synthetic coding sequence
  source 1..1401: mol_type = other DNA

SEQ ID NO: 83659 - DNA, 1317 bp, synthetic construct; identical to SEQ ID NO: 83654
  misc_feature 1..1317: note = Description of Artificial Sequence: Synthetic coding sequence
  source 1..1317: mol_type = other DNA

SEQ ID NO: 83660 - DNA, 1401 bp, synthetic construct; identical to SEQ ID NO: 83651
  misc_feature 1..1401: note = Description of Artificial Sequence: Synthetic coding sequence
  source 1..1401: mol_type = other DNA

SEQ ID NO: 83661 - DNA, 2328 bp, synthetic construct
  misc_feature 1..2328: note = Description of Artificial Sequence: Synthetic coding sequence
  source 1..2328: mol_type = other DNA
atggagaagttcggcatgaacttcggcggcggccccagcaagaaggacctgctggagaccatcgagacccagaagaagcagctgctgcagtaccaggccagactgaaggacgtggtgagagcctacaagagcctgctgaaggagaaggaggccctggaggccagcatcaaggtgctgagcgtgagccacgaggccgacgtgggcctggccggcgtgcagctgcccggcctgaccttccccgacagcgtggacgacagatgcagcacccacagcgaggacagcaccggcaccgccaccagcctggacaccgccgccagcctgaccagcaccaagggcgagttcggcgtggaggacgacagacccgccagaggcccccccccccccaagagcgaggaggccagctggagcgagagcggcgtgagcagcagcagcggcgacggccccttcgccggcggcgaggtggacaagagactgcaccagctgaagacccagctggccaccctgaccagcagcctggccaccgtgacccaggagaagagcagaatggaggccagctacctggccgacaagaagaagatgaagcaggacctggaggacgccagcaacaaggccgaggaggagagagccagactggagggcgagctgaagggcctgcaggagcagatcgccgagaccaaggccagactgatcacccagcagcacgacagagcccaggagcagagcgaccacgccctgatgctgagagagctgcagaagctgctgcaggaggagagaacccagagacaggacctggagctgagactggaggagaccagagaggccctggccggcagagcctacgccgccgagcagatggagggcttcgagctgcagaccaagcagctgaccagagaggtggaggagctgaagagcgagctgcaggccatcagagacgagaagaaccagcccgaccccagactgcaggagctgcaggaggaggccgccagactgaagagccacttccaggcccagctgcagcaggagatgagaaagaccgccctggccgaggaccagctgagacagcagagccaggtggaggagcagagagtggccgccctggagaaccagatcagcgaggtgagcgagctgctgggcacctacgagaaggccaagcagaaggaccagctggccatccagaagctgaaggagagaatcctgcagctggacctggagaacaagaccctggccctggccgccagcagcagaagccccctggacagccacggcgaggagagcagcctggacgtgaacgtgctgaaggacaagatggagaagctgaagagactgctgcaggtggccgccagaaagagccaggtgaccctggacgtggagaagctgtgcgacctggagatcatgcccagcagcgaggccgccgacggcgagaaggccaccgccctgtactaccagcaggagctgaagcagctgaaggaggagttcgagagatacaagatgagagcccaggtggtgctgaagagcaagaacaccaaggacggcaacctgggcaaggagctggaggccgcccaggagcagctggccgagctgaaggagaagtacatcagcctgagactgagctgcgaggagctggagcaccagcaccagcaggaggccgacgactggaagcaggagctggccagactgcagcagctgcacagacaggagctggagagatgccagctggacttcagagacagaaccctgaagctggaggaggagctgcacaagcagagagacagagccctggccgtgctgaccgagaaggacctggagctggagcagctgagaagcgtggccctggccagcggcctgcccggcagaagaagccccgtgggcggcggcggccccggcgaccccgccgacaccagcagcagcgacagcctgacccaggccctgcagctggccgccgccaacgagcccaccttcttcctgtacgccgagcagctggccagaaaggaggtggagatcaccagcctgagaaagcagaagcacagactggaggtggaggtgcaccagctgcaggacagactgctggaggagggcgagagacacagagaggaggtggccgccctgcagagccacatcgagaagaacatcagagaccagagcagagagggcgccaacctggagtacctgaagaacatcatctacagattcctgaccctgcccgacagcctgggcagacagcagaccctgaccgccatcctgaccatcctgcacttcagccccgaggagaagcaggtgatcatgagactgcccaccagcgccagctggtggcccagcggcaagagatag

SEQ ID NO: 83662 - DNA, 5055 bp, synthetic construct
  misc_feature 1..5055: note = Description of Artificial Sequence: Synthetic coding sequence
  source 1..5055: mol_type = other DNA
atggaggacctggtgcaggacggcgtggccagccccgccacccccggcaccggcaagagcaagctggagaccctgcccaaggaggacctgatcaagttcgccaagaagcagatgatgctgatccagaaggccaagagcagatgcaccgagctggagaaggagatcgaggagctgagaagcaagcccgtgaccgagggcaccggcgacatcatcaaggccctgaccgagagactggacgccctgctgctggagaaggccgagaccgagcagcagtgcctgagcctgaagaaggagaacatcaagatgaagcaggaggtggaggacagcgtgaccaagatgggcgacgcccacaaggagctggagcagagccacatcaactacgtgaaggagatcgagaacctgaagaacgagctgatggccgtgagaagcaagtacagcgaggacaaggccaacctgcagaagcagctggaggaggccatgaacacccagctggagctgagcgagcagctgaagttccagaacaacagcgaggacaacgtgaagaagctgcaggaggagatcgagaagatcagacccggcttcgaggagcagatcctgtacctgcagaagcagctggacgccaccaccgacgagaagaaggagaccgtgacccagctgcagaacatcatcgaggccaacagccagcactaccagaagaacatcaacagcctgcaggaggagctgctgcagctgaaggccatccaccaggaggaggtgaaggagctgatgtgccagatcgaggccagcgccaaggagcacgaggccgagatcaacaagctgaacgagctgaaggagaacctggtgaagcagtgcgaggccagcgagaagaacatccagaagaagtacgagtgcgagctggagaacctgagaaaggccaccagcaacgccaaccaggacaaccagatctgcagcatcctgctgcaggagaacaccttcgtggagcaggtggtgaacgagaaggtgaagcacctggaggacaccctgaaggagctggagagccagcacagcatcctgaaggacgaggtgacctacatgaacaacctgaagctgaagctggagatggacgcccagcacatcaaggacgagttcttccacgagagagaggacctggagttcaagatcaacgagctgctgctggccaaggaggagcagggctgcgtgatcgagaagctgaagagcgagctggccggcctgaacaagcagttctgctacaccgtggagcagcacaacagagaggtgcagagcctgaaggagcagcaccagaaggagatcagcgagctgaacgagaccttcctgagcgacagcgagaaggagaagctgaccctgatgttcgagatccagggcctgaaggagcagtgcgagaacctgcagcaggagaagcaggaggccatcctgaactacgagagcctgagagagatcatggagatcctgcagaccgagctgggcgagagcgccggcaagatcagccaggagttcgagagcatgaagcagcagcaggccagcgacgtgcacgagctgcagcagaagctgagaaccgccttcaccgagaaggacgccctgctggagaccgtgaacagactgcagggcgagaacgagaagctgctgagccagcaggagctggtgcccgagctggagaacaccatcaagaacctgcaggagaagaacggcgtgtacctgctgagcctgagccagagagacaccatgctgaaggagctggagggcaagatcaacagcctgaccgaggagaaggacgacttcatcaacaagctgaagaacagccacgaggagatggacaacttccacaagaagtgcgagagagaggagagactgatcctggagctgggcaagaaggtggagcagaccatccagtacaacagcgagctggagcagaaggtgaacgagctgaccggcggcctggaggagaccctgaaggagaaggaccagaacgaccagaagctggagaagctgatggtgcagatgaaggtgctgagcgaggacaaggaggtgctgagcgccgaggtgaagagcctgtacgaggagaacaacaagctgagcagcgagaagaagcagctgagcagagacctggaggtgttcctgagccagaaggaggacgtgatcctgaaggagcacatcacccagctggagaagaagctgcagctgatggtggaggagcaggacaacctgaacaagctgctggagaacgagcaggtgcagaagctgttcgtgaagacccagctgtacggcttcctgaaggagatgggcagcgaggtgagcgaggacagcgaggagaaggacgtggtgaacgtgctgcaggccgtgggcgagagcctggccaagatcaacgaggagaagtgcaacctggccttccagagagacgagaaggtgctggagctggagaaggagatcaagtgcctgcaggaggagagcgtggtgcagtgcgaggagctgaagagcctgctgagagactacgagcaggagaaggtgctgctgagaaaggagctggaggagatccagagcgagaaggaggccctgcagagcgacctgctggagatgaagaacgccaacgagaagaccagactggagaaccagaacctgctgatccaggtggaggaggtgagccagacctgcagcaagagcgagatccacaacgagaaggagaagtgcttcatcaaggagcacgagaacctgaagcccctgctggagcagaaggagctgagagacagaagagccgagctgatcctgctgaaggacagcctggccaagagccccagcgtgaagaacgaccccctgagcagcgtgaaggagctggaggagaagatcgagaacctggagaaggagtgcaaggagaaggaggagaagatcaacaagatcaagctggtggccgtgaaggccaagaaggagctggacagcagcagaaaggagacccagaccgtgaaggaggagctggagagcctgagaagcgagaaggaccagctgagcgccagcatgagagacctgatccagggcgccgagagctacaagaacctgctgctggagtacgagaagcagagcgagcagctggacgtggagaaggagagagccaacaacttcgagcacagaatcgaggacctgaccagacagctgagaaacagcaccctgcagtgcgagaccatcaacagcgacaacgaggacctgctggccagaatcgagaccctgcagagcaacgccaagctgctggaggtgcagatcctggaggtgcagagagccaaggccatggtggacaaggagctggaggccgagaagctgcagaaggagcagaagatcaaggagcacgccaccaccgtgaacgagctggaggagctgcaggtgcagctgcagaagcagaagaagcagctgcagaagaccatgcaggagctggagctggtgaagaaggacgcccagcagaccaccctgatgaacatggagatcgccgactacgagagactgatgaaggagctgaaccagaagctgaccaacaagaacaacaagatcgaggacctggagcaggagatcaagatccagaagcagaagcaggagaccctgcaggaggagatcaccagcctgcagagcagcgtgcagcagtacgaggagaagaacaccaagatcaagcagctgctggtgaagaccaagaaggagctggccgacagcaagcaggccgagaccgaccacctgatcctgcaggccagcctgaagggcgagctggaggccagccagcagcaggtggaggtgtacaagatccagctggccgagatcaccagcgagaagcacaagatccacgagcacctgaagaccagcgccgagcagcaccagagaaccctgagcgcctaccagcagagagtgaccgccctgcaggaggagtgcagagccgccaaggccgagcaggccaccgtgaccagcgagttcgagagctacaaggtgagagtgcacaacgtgctgaagcagcagaagaacaagagcatgagccaggccgagaccgagggcgccaagcaggagagagagcacctggagatgctgatcgaccagctgaagatcaagctgcaggacagccagaacaacctgcagatcaacgtgagcgagctgcagaccctgcagagcgagcacgacaccctgctggagagacacaacaagatgctgcaggagaccgtgagcaaggaggccgagctgagagagaagctgtgcagcatccagagcgagaacatgatgatgaagagcgagcacacccagaccgtgagccagctgaccagccagaacgaggtgctgagaaacagcttcagagaccaggtgagacacctgcaggaggagcacagaaagaccgtggagaccctgcagcagcagctgagcaagatggaggcccagctgttccagctgaagaacgagcccaccaccagaagccccgtgagcagccagcagagcctgaagaacctgagagagagaagaaacaccgacctgcccctgctggacatgcacaccgtgaccagagaggagggcgagggcatggagaccaccgacaccgagagcgtgagcagcgccagcacctacacccagagcctggagcagctgctgaacagccccgagaccaagctggagccccccctgtggcacgccgagttcaccaaggaggagctggtgcagaagctgagcagcaccaccaagagcgccgaccacctgaacggcctgctgagagagaccgaggccaccaacgccatcctgatggagcagatcaagctgctgaagagcgagatcagaagactggagagaaaccaggagagagagaagagcgccgccaacctggagtacctgaagaacgtgctgctgcagttcatcttcctgaagcccggcagcgagagagagagactgctgcccgtgatcaacaccatgctgcagctgagccccgaggagaagggcaagctggccgccgtggcccagggcgaggaggagaacgccagcagaagcagcggctgggccagctacctgcacagctggagcggcctgagatag

SEQ ID NO: 83663 - DNA, 2052 bp, synthetic construct
  misc_feature 1..2052: note = Description of Artificial Sequence: Synthetic coding sequence
  source 1..2052: mol_type = other DNA
atgtgccagatcgaggccagcgccaaggagcacgaggccgagatcaacaagctgaacgagctgaaggagaacctggtgaagcagtgcgaggccagcgagaagaacatccagaagaagtacgagtgcgagctggagaacctgagaaaggccaccagcaacgccaaccaggacaaccagatctgcagcatcctgctgcaggagaacaccttcgtggagcaggtggtgaacgagaaggtgaagcacctggaggacaccctgaaggagctggagagccagcacagcatcctgaaggacgaggtgacctacatgaacaacctgaagctgaagctggagatggacgcccagcacatcaaggacgagttcttccacgagagagaggacctggagttcaagatcaacgagctgctgctggccaaggaggagcagggctgcgtgatcgagaagctgaagagcgagctggccggcctgaacaagcagttctgctacaccgtggagcagcacaacagagaggtgcagagcctgaaggagcagcaccagaaggagatcagcgagctgaacgagaccttcctgagcgacagcgagaaggagaagctgaccctgatgttcgagatccagggcctgaaggagcagtgcgagaacctgcagcaggagaagcaggaggccatcctgaactacgagagcctgagagagatcatggagatcctgcagaccgagctgggcgagagcgccggcaagatcagccaggagttcgagagcatgaagcagcagcaggccagcgacgtgcacgagctgcagcagaagctgagaaccgccttcaccgagaaggacgccctgctggagaccgtgaacagactgcagggcgagaacgagaagctgctgagccagcaggagctggtgcccgagctggagaacaccatcaagaacctgcaggagaagaacggcgtgtacctgctgagcctgagccagagagacaccatgctgaaggagctggagggcaagatcaacagcctgaccgaggagaaggacgacttcatcaacaagctgaagaacagccacgaggagatggacaacttccacaagaagtgcgagagagaggagagactgatcctggagctgggcaagaaggtggagcagaccatccagtacaacagcgagctggagcagaaggtgaacgagctgaccggcggcctggaggagaccctgaaggagaaggaccagaacgaccagaagctggagaagctgatggtgcagatgaaggtgctgagcgaggacaaggaggtgctgagcgccgaggtgaagagcctgtacgaggagaccatcaacagcgtgcagaagaagcagctgagcagagacctggaggtgttcctgagccagaaggaggacgtgatcctgaaggagcacatcacccagctggagaagaagctgcagctgatggtggaggagcaggacaacctgaacaagctgctggagaacgagcaggtgcagaagctgttcgtgaagacccagctgtacggcttcctgaaggagatgggcagcgaggtgagcgaggacagcgaggagaaggacgtggtgaacgtgctgcaggccgtgggcgagagcctggccaagatcaacgaggagaagtgcaacctggccttccagagagacgagaaggtgctggagctggagaaggagatcaagtgcctgcaggaggagagcgtggtgcagtgcgaggagctgaagagcctgctgagagactacgagcaggagaaggtgctgctgagaaaggagctggaggagatccagagcgagaaggaggccctgcagagcgacctgctggagatgaagaacgccaacgagaagaccagactggagaaccagaacctgctgatccaggtggaggaggtgagccagacctgcagcaagagcgagatccacaacgagaaggagaagtgcttcatcaaggagcacgagaacctgaagcccctgctggagcagaaggagctgagagacagaagagccgagctgatcctgctgaaggacagcctggccaagagccccagcaagaagtag

SEQ ID NO: 83664 - DNA, 1347 bp, synthetic construct
  misc_feature 1..1347: note = Description of Artificial Sequence: Synthetic coding sequence
  source 1..1347: mol_type = other DNA
atggaggacctggtgcaggacggcgtggccagccccgccacccccggcaccggcaagagcaagctggagaccctgcccaaggaggacctgatcaagttcgccaagaagcagatgatgctgatccagaaggccaagagcagatgcaccgagctggagaaggagatcgaggagctgagaagcaagcccgtgaccgagggcaccggcgacatcatcaaggccctgaccgagagactggacgccctgctgctggagaaggccgagaccgagcagcagtgcctgagcctgaagaaggagaacatcaagatgaagcaggaggtggaggacagcgtgaccaagatgggcgacgcccacaaggagctggagcagagccacatcaactacgtgaaggagatcgagaacctgaagaacgagctgatggccgtgagaagcaagtacagcgaggacaaggccaacctgcagaagcagctggaggaggccatgaacacccagctggagctgagcgagcagctgaagttccagaacaacagcgaggacaacgtgaagaagctgcaggaggagatcgagaagatcagacccggcttcgaggagcagatcctgtacctgcagaagcagctggacgccaccaccgacgagaagaaggagaccgtgacccagctgcagaacatcatcgaggccaacagccagcactaccagaagaacatcaacagcctgcaggaggagctgctgcagctgaaggccatccaccaggaggaggtgaaggagctgatgtgccagatcgaggccagcgccaaggagcacgaggccgagatcaacaagctgaacgagctgaaggagaacctggtgaagcagtgcgaggccagcgagaagaacatccagaagaagtacgagtgcgagctggagaacctgagaaaggccaccagcaacgccaaccaggacaaccagatctgcagcatcctgctgcaggagaacaccttcgtggagcaggtggtgaacgagaaggtgaagcacctggaggacaccctgaaggagctggagagccagcacagcatcctgaaggacgaggtgacctacatgaacaacctgaagctgaagctggagatggacgcccagcacatcaaggacgagttcttccacgagagagaggacctggagttcaagatcaacgagctgctgctggccaaggaggagcagggctgcgtgatcgagaagctgaagagcgagctggccggcctgaacaagcagttctgctacaccgtggagcagcacaacagagaggtgcagagcctgaaggagcagcaccagaaggagatcagcgagctgaacgagaccttcctgagcgacagctag

SEQ ID NO: 83665 - DNA, 1878 bp, synthetic construct
  misc_feature 1..1878: note = Description of Artificial Sequence: Synthetic coding sequence
  source 1..1878: mol_type = other DNA
atggcccaggccctgagcgaggaggagttccagagaatgcaggcccagctgctggagctgagaaccaacaactaccagctgagcgacgagctgagaaagaacggcgtggagctgaccagcctgagacagaaggtggcctacctggacaaggagttcagcaaggcccagaaggccctgagcaagagcaagaaggcccaggaggtggaggtgctgctgagcgagaacgagatgctgcaggccaagctgcacagccaggaggaggacttcagactgcagaacagcaccctgatggccgagttcagcaaggagagatacggcaaggaggccggcaagttcagcgccgtgagcgagggccagggcgacccccccggcggccccgcccccaccgtgctggcccccatgcccctggccgaggtggagctgaagtgggagatggagaaggaggagaagagactgctgtgggagcagctgcagggcctggagagcagcaagcaggccgagaccagcagactgcaggaggagctggccaagctgagcgagaagctgaagaagaagcaggagagcttctgcagactgcagaccgagaaggagaccctgttcaacgacagcagaaacaagatcgaggagctgcagcagagaaaggaggccgaccacaaggcccagctggccagaacccagaagctgcagcaggagctggaggccgccaaccagagcctggccgagctgagagaccagagacagggcgagagactggagcacgccgccgccctgagagccctgcaggaccaggtgagcatccagagcgccgacgcccaggagcaggtggagggcctgctggccgagaacaacgccctgagaaccagcctggccgccctggagcagatccagaccgccaagacccaggagctgaacatgctgagagagcagaccaccggcctggccgccgagctgcagcagcagcaggccgagtacgaggacctgatgggccagaaggacgacctgaacagccagctgcaggagagcctgagagccaacagcagactgctggagcagctgcaggagatcggccaggagaaggagcagctgacccaggagctgcaggaggccagaaagagcgccgagaagagaaaggccatgctggacgagctggccatggagaccctgcaggagaagagccagcacaaggaggagctgggcgccgtgagactgagacacgagaaggaggtgctgggcgtgagagccagatacgagagagagctgagagagctgcacgaggacaagaagagacaggaggaggagctgagaggccagatcagagaggagaaggccagaaccagagagctggagaccctgcagcagaccgtggaggagctgcaggcccaggtgcacagcatggacggcgccaagggctggttcgagagaagactgaaggaggccgagggcaaggaggaggagctgcaggacgtgagagaccagctggagcaggcccaggaggagagagactgccacctgaagaccatcagcagcctgaagcaggaggtgaaggacaccgtggacggccagagaatcctggagaagaagggcagcgccgccctgaaggacctgaagagacagctgcacctggagagaaagagagccgacaagctgcaggagagactgcaggacatcctgaccaacagcaagagcagaagcggcctggaggagctggtgctgagcgagatgaacagccccagcagaacccagaccggcgacagcagcagcatcagcagcttcagctacagagagatcctgagagagaaggagagcagcgccgtgcccgccagagtgagaggcaaggaggagcccaccgcccccgccagcctgaaccccaagatctag

SEQ ID NO: 83666 - DNA, 2433 bp, synthetic construct
  misc_feature 1..2433: note = Description of Artificial Sequence: Synthetic coding sequence
  source 1..2433: mol_type = other DNA
atggcccaggccctgagcgaggaggagttccagagaatgcaggcccagctgctggagctgagaaccaacaactaccagctgagcgacgagctgagaaagaacggcgtggagctgaccagcctgagacagaaggtggcctacctggacaaggagttcagcaaggcccagaaggccctgagcaagagcaagaaggcccaggaggtggaggtgctgctgagcgagaacgagatgctgcaggccaagctgcacagccaggaggaggacttcagactgcagaacagcaccctgatggccgagttcagcaagctgtgcagccagatggagcagctggagcaggagaaccagcagctgaaggagggcgccgccggcgccggcgtggcccaggccggccccctggtggacggcgagctgctgagactgcaggccgagaacaccgccctgcagaagaacgtggccgccctgcaggagagatacggcaaggaggccggcaagttcagcgccgtgagcgagggccagggcgacccccccggcggccccgcccccaccgtgctggcccccatgcccctggccgaggtggagctgaagtgggagatggagaaggaggagaagagactgctgtgggagcagctgcagggcctggagagcagcaagcaggccgagaccagcagactgcaggaggagctggccaagctgagcgagaagctgaagaagaagcaggagagcttctgcagactgcagaccgagaaggagaccctgttcaacgacagcagaaacaagatcgaggagctgcagcagagaaaggaggccgaccacaaggcccagctggccagaacccagaagctgcagcaggagctggaggccgccaaccagagcctggccgagctgagagaccagagacagggcgagagactggagcacgccgccgccctgagagccctgcaggaccagatccagaccgccaagacccaggagctgaacatgctgagagagcagaccaccggcctggccgccgagctgcagcagcagcaggccgagtacgaggacctgatgggccagaaggacgacctgaacagccagctgcaggagagcctgagagccaacagcagactgctggagcagctgcaggagatcggccaggagaaggagcagctgacccaggagctgcaggaggccagaaagagcgccgagaagagaaaggccatgctggacgagctggccatggagaccctgcaggagaagagccagcacaaggaggagctgggcgccgtgagactgagacacgagaaggaggtgctgggcgtgagagccagatacgagagagagctgagagagctgcacgaggacaagaagagacaggaggaggagctgagaggccagatcagagaggagaaggccagaaccagagagctggagaccctgcagcagaccgtggaggagctgcaggcccaggtgcacagcatggacggcgccaagggctggttcgagagaagactgaaggaggccgaggagagcctgcagcagcagcagcaggagcaggaggaggccctgaagcagtgcagagagcagcacgccgccgagctgaagggcaaggaggaggagctgcaggacgtgagagaccagctggagcaggcccaggaggagagagactgccacctgaagaccatcagcagcctgaagcaggaggtgaaggacaccgtggacggccagagaatcctggagaagaagggcagcgccgccctgaaggacctgaagagacagctgcacctggagagaaagagagccgacaagctgcaggagagactgcaggacatcctgaccaacagcaagagcagaagcggcctggaggagctggtgctgagcgagatgaacagccccagcagaacccagaccggcgacagcagcagcatcagcagcttcagctacagagagatcctgagagagaaggagagcagcgccgtgcccgccagaagcctgagcagcagcccccaggcccagccccccagacccgccgagctgagcgacgaggaggtggccgagctgttccagagactggccgagacccagcaggagaagtggatgctggaggagaaggtgaagcacctggaggtgagcagcgccagcatggccgaggacctgtgcagaaagagcgccatcatcgagacctacgtgatggacagcagaatcgacgtgagcgtggccgccggccacaccgacagaagcggcctgggcagcgtgctgagagacctggtgaagcccggcgacgagaacctgagagagatgaacaagaagctgcagaacatgctggaggagcagctgaccaagaacatgcacctgcacaaggacatggaggtgctgagccaggagatcgtgagactgagcaaggagtgcgtgggcccccccgaccccgacctggagcccggcgagaccagctag

SEQ ID NO: 83667 - DNA, 2526 bp, synthetic construct
  misc_feature 1..2526: note = Description of Artificial Sequence: Synthetic coding sequence
  source 1..2526: mol_type = other DNA
atggcccaggccctgagcgaggaggagttccagagaatgcaggcccagctgctggagctgagaaccaacaactaccagctgagcgacgagctgagaaagaacggcgtggagctgaccagcctgagacagaaggtggcctacctggacaaggagttcagcaaggcccagaaggccctgagcaagagcaagaaggcccaggaggtggaggtgctgctgagcgagaacgagatgctgcaggccaagctgcacagccaggaggaggacttcagactgcagaacagcaccctgatggccgagttcagcaagctgtgcagccagatggagcagctggagcaggagaaccagcagctgaaggagggcgccgccggcgccggcgtggcccaggccggccccctggtggacggcgagctgctgagactgcaggccgagaacaccgccctgcagaagaacgtggccgccctgcaggagagatacggcaaggaggccggcaagttcagcgccgtgagcgagggccagggcgacccccccggcggccccgcccccaccgtgctggcccccatgcccctggccgaggtggagctgaagtgggagatggagaaggaggagaagagactgctgtgggagcagctgcagggcctggagagcagcaagcaggccgagaccagcagactgcaggaggagctggccaagctgagcgagaagctgaagaagaagcaggagagcttctgcagactgcagaccgagaaggagaccctgttcaacgacagcagaaacaagatcgaggagctgcagcagagaaaggaggccgaccacaaggcccagctggccagaacccagaagctgcagcaggagctggaggccgccaaccagagcctggccgagctgagagaccagagacagggcgagagactggagcacgccgccgccctgagagccctgcaggaccaggtgagcatccagagcgccgacgcccaggagcaggtggagggcctgctggccgagaacaacgccctgagaaccagcctggccgccctggagcagatccagaccgccaagacccaggagctgaacatgctgagagagcagaccaccggcctggccgccgagctgcagcagcagcaggccgagtacgaggacctgatgggccagaaggacgacctgaacagccagctgcaggagagcctgagagccaacagcagactgctggagcagctgcaggagatcggccaggagaaggagcagctgacccaggagctgcaggaggccagaaagagcgccgagaagagaaaggccatgctggacgagctggccatggagaccctgcaggagaagagccagcacaaggaggagctgggcgccgtgagactgagacacgagaaggaggtgctgggcgtgagagccagatacgagagagagctgagagagctgcacgaggacaagaagagacaggaggaggagctgagaggccagatcagagaggagaaggccagaaccagagagctggagaccctgcagcagaccgtggaggagctgcaggcccaggtgcacagcatggacggcgccaagggctggttcgagagaagactgaaggaggccgaggagagcctgcagcagcagcagcaggagcaggaggaggccctgaagcagtgcagagagcagcacgccgccgagctgaagggcaaggaggaggagctgcaggacgtgagagaccagctggagcaggcccaggaggagagagactgccacctgaagaccatcagcagcctgaagcaggaggtgaaggacaccgtggacggccagagaatcctggagaagaagggcagcgccgccctgaaggacctgaagagacagctgcacctggagagaaagagagccgacaagctgcaggagagactgcaggacatcctgaccaacagcaagagcagaagcggcctggaggagctggtgctgagcgagatgaacagccccagcagaacccagaccggcgacagcagcagcatcagcagcttcagctacagagagatcctgagagagaaggagagcagcgccgtgcccgccagaagcctgagcagcagcccccaggcccagccccccagacccgccgagctgagcgacgaggaggtggccgagctgttccagagactggccgagacccagcaggagaagtggatgctggaggagaaggtgaagcacctggaggtgagcagcgccagcatggccgaggacctgtgcagaaagagcgccatcatcgagacctacgtgatggacagcagaatcgacgtgagcgtggccgccggccacaccgacagaagcggcctgggcagcgtgctgagagacctggtgaagcccggcgacgagaacctgagagagatgaacaagaagctgcagaacatgctggaggagcagctgaccaagaacatgcacctgcacaaggacatggaggtgctgagccaggagatcgtgagactgagcaaggagtgcgtgggcccccccgaccccgacctggagcccggcgagaccagctag

SEQ ID NO: 83668 - DNA, 2391 bp, synthetic construct
  misc_feature 1..2391: note = Description of Artificial Sequence: Synthetic coding sequence
  source 1..2391: mol_type = other DNA
atggcccaggccctgagcgaggaggagttccagagaatgcaggcccagctgctggagctgagaaccaacaactaccagctgagcgacgagctgagaaagaacggcgtggagctgaccagcctgagacagaaggtggcctacctggacaaggagttcagcaaggcccagaagctgtgcagccagatggagcagctggagcaggagaaccagcagctgaaggagggcgccgccggcgccggcgtggcccaggccggccccctggtggacggcgagctgctgagactgcaggccgagaacaccgccctgcagaagaacgtggccgccctgcaggagagatacggcaaggaggccggcaagttcagcgccgtgagcgagggccagggcgacccccccggcggccccgcccccaccgtgctggcccccatgcccctggccgaggtggagctgaagtgggagatggagaaggaggagaagagactgctgtgggagcagctgcagggcctggagagcagcaagcaggccgagaccagcagactgcaggaggagctggccaagctgagcgagaagctgaagaagaagcaggagagcttctgcagactgcagaccgagaaggagaccctgttcaacgacagcagaaacaagatcgaggagctgcagcagagaaaggaggccgaccacaaggcccagctggccagaacccagaagctgcagcaggagctggaggccgccaaccagagcctggccgagctgagagaccagagacagggcgagagactggagcacgccgccgccctgagagccctgcaggaccaggtgagcatccagagcgccgacgcccaggagcaggtggagggcctgctggccgagaacaacgccctgagaaccagcctggccgccctggagcagatccagaccgccaagacccaggagctgaacatgctgagagagcagaccaccggcctggccgccgagctgcagcagcagcaggccgagtacgaggacctgatgggccagaaggacgacctgaacagccagctgcaggagagcctgagagccaacagcagactgctggagcagctgcaggagatcggccaggagaaggagcagctgacccaggagctgcaggaggccagaaagagcgccgagaagagaaaggccatgctggacgagctggccatggagaccctgcaggagaagagccagcacaaggaggagctgggcgccgtgagactgagacacgagaaggaggtgctgggcgtgagagccagatacgagagagagctgagagagctgcacgaggacaagaagagacaggaggaggagctgagaggccagatcagagaggagaaggccagaaccagagagctggagaccctgcagcagaccgtggaggagctgcaggcccaggtgcacagcatggacggcgccaagggctggttcgagagaagactgaaggaggccgaggagagcctgcagcagcagcagcaggagcaggaggaggccctgaagcagtgcagagagcagcacgccgccgagctgaagggcaaggaggaggagctgcaggacgtgagagaccagctggagcaggcccaggaggagagagactgccacctgaagaccatcagcagcctgaagcaggaggtgaaggacaccgtggacggccagagaatcctggagaagaagggcagcgccgccctgaaggacctgaagagacagctgcacctggagagaaagagagccgacaagctgcaggagagactgcaggacatcctgaccaacagcaagagcagaagcggcctggaggagctggtgctgagcgagatgaacagccccagcagaacccagaccggcgacagcagcagcatcagcagcttcagctacagagagatcctgagagagaaggagagcagcgccgtgcccgccagaagcctgagcagcagcccccaggcccagccccccagacccgccgagctgagcgacgaggaggtggccgagctgttccagagactggccgagacccagcaggagaagtggatgctggaggagaaggtgaagcacctggaggtgagcagcgccagcatggccgaggacctgtgcagaaagagcgccatcatcgagacctacgtgatggacagcagaatcgacgtgagcgtggccgccggccacaccgacagaagcggcctgggcagcgtgctgagagacctggtgaagcccggcgacgagaacctgagagagatgaacaagaagctgcagaacatgctggaggagcagctgaccaagaacatgcacctgcacaaggacatggaggtgctgagccaggagatcgtgagactgagcaaggagtgcgtgggcccccccgaccccgacctggagcccggcgagaccagctag

SEQ ID NO: 83669 - DNA, 2433 bp, synthetic construct
  misc_feature 1..2433: note = Description of Artificial Sequence: Synthetic coding sequence
  source 1..2433: mol_type = other DNA
atggcccaggccctgagcgaggaggagttccagagaatgcaggcccagctgctggagctgagaaccaacaactaccagctgagcgacgagctgagaaagaacggcgtggagctgaccagcctgagacagaaggtggcctacctggacaaggagttcagcaaggcccagaagagccccggcccctgcctgcccctgcaggaggtggaggtgctgctgagcgagaacgagatgctgcaggccaagctgcacagccaggaggaggacttcagactgcagaacagcaccctgatggccgagttcagcaagctgtgcagccagatggagcagctggagcaggagaaccagcagctgaaggagggcgccgccggcgccggcgtggcccaggccggccccctggtggacggcgagctgctgagactgcaggccgagaacaccgccctgcagaagaacgtggccgccctgcaggagagatacggcaaggaggccggcaagttcagcgccgtgagcgagggccagggcgacccccccggcggccccgcccccaccgtgctggcccccatgcccctggccgaggtggagctgaagtgggagatggagaaggaggagaagagactgctgtgggagcagctgcagggcctggagagcagcaagcaggccgagaccagcagactgcaggaggagctggccaagctgagcgagaagctgaagaagaagcaggagagcttctgcagactgcagaccgagaaggagaccctgttcaacgacagcagaaacaagatcgaggagctgcagcagagaaaggaggccgaccacaaggcccagctggccagaacccagaagctgcagcaggagctggaggccgccaaccagagcctggccgagctgagagaccagagacagggcgagagactggagcacgccgccgccctgagagccctgcaggaccagatccagaccgccaagacccaggagctgaacatgctgagagagcagaccaccggcctggccgccgagctgcagcagcagcaggccgagtacgaggacctgatgggccagaaggacgacctgaacagccagctgcaggagagcctgagagccaacagcagactgctggagcagctgcaggagatcggccaggagaaggagcagctgacccaggagctgcaggaggccagaaagagcgccgagaagagaaaggccatgctggacgagctggccatggagaccctgcaggagaagagccagcacaaggaggagctgggcgccgtgagactgagacacgagaaggaggtgctgggcgtgagagccagatacgagagagagctgagagagctgcacgaggacaagaagagacaggaggaggagctgagaggccagatcagagaggagaaggccagaaccagagagctggagaccctgcagcagaccgtggaggagctgcaggcccaggtgcacagcatggacggcgccaagggctggttcgagagaagactgaaggaggccgaggagagcctgcagcagcagcagcaggagcaggaggaggccctgaagcagtgcagagagcagcacgccgccgagctgaagggcaaggaggaggagctgcaggacgtgagagaccagctggagcaggcccaggaggagagagactgccacctgaagaccatcagcagcctgaagcaggaggtgaaggacaccgtggacggccagagaatcctggagaagaagggcagcgccgccctgaaggacctgaagagacagctgcacctggagagaaagagagccgacaagctgcaggagagactgcaggacatcctgaccaacagcaagagcagaagcggcctggaggagctggtgctgagcgagatgaacagccccagcagaacccagaccggcgacagcagcagcatcagcagcttcagctacagagagatcctgagagagaaggagagcagcgccgtgcccgccagaagcctgagcagcagcccccaggcccagccccccagacccgccgagctgagcgacgaggaggtggccgagctgttccagagactggccgagacccagcaggagaagtggatgctggaggagaaggtgaagcacctggaggtgagcagcgccagcatggccgaggacctgtgcagaaagagcgccatcatcgagacctacgtgatggacagcagaatcgacgtgagcgtggccgccggccacaccgacagaagcggcctgggcagcgtgctgagagacctggtgaagcccggcgacgagaacctgagagagatgaacaagaagctgcagaacatgctggaggagcagctgaccaagaacatgcacctgcacaaggacatggaggtgctgagccaggagatcgtgagactgagcaaggagtgcgtgggcccccccgaccccgacctggagcccggcgagaccagctag

SEQ ID NO: 83670 - DNA, 1425 bp, synthetic construct
  misc_feature 1..1425: note = Description of Artificial Sequence: Synthetic coding sequence
  source 1..1425: mol_type = other DNA
atgaagagagtgctggtgctgctgctggccgtggccttcggccacgccctggagagaggcagagactacgagaagaacaaggtgtgcaaggagttcagccacctgggcaaggaggacttcaccagcctgagcctggtgctgtacagcagaaagttccccagcggcaccttcgagcaggtgagccagctggtgaaggaggtggtgagcctgaccgaggcctgctgcgccgagggcgccgaccccgactgctacgacaccagaaccagcgccctgagcgccaagagctgcgagagcaacagccccttccccgtgcaccccggcaccgccgagtgctgcaccaaggagggcctggagagaaagctgtgcatggccgccctgaagcaccagccccaggagttccccacctacgtggagcccaccaacgacgagatctgcgaggccttcagaaaggaccccaaggagtacgccaaccagttcatgtgggagtacagcaccaactacggccaggcccccctgagcctgctggtgagctacaccaagagctacctgagcatggtgggcagctgctgcaccagcgccagccccaccgtgtgcttcctgaaggagagactgcagctgaagcacctgagcctgctgaccaccctgagcaacagagtgtgcagccagtacgccgcctacggcgagaagaagagcagactgagcaacctgatcaagctggcccagaaggtgcccaccgccgacctggaggacgtgctgcccctggccgaggacatcaccaacatcctgagcaagtgctgcgagagcgccagcgaggactgcatggccaaggagctgcccgagcacaccgtgaagctgtgcgacaacctgagcaccaagaacagcaagttcgaggactgctgccaggagaagaccgccatggacgtgttcgtgtgcacctacttcatgcccgccgcccagctgcccgagctgcccgacgtggagctgcccaccaacaaggacgtgtgcgaccccggcaacaccaaggtgatggacaagtacaccttcgagctgagcagaagaacccacctgcccgaggtgttcctgagcaaggtgctggagcccaccctgaagagcctgggcgagtgctgcgacgtggaggacagcaccacctgcttcaacgccaagggccccctgctgaagaaggagctgagcagcttcatcgacaagggccaggagctgtgcgccgactacagcgagaacaccttcaccgagtacaagaagaagctggccgagagactgaaggccaagctgcccgacgccacccccaccgagctggccaagctggtgaacaagcacagcgacttcgccagcaactgctgcagcatcaacagcccccccctgtactgcgacagcgagatcgacgccgagctgaagaacatcctgtag

SEQ ID NO: 83671 - DNA, 438 bp, synthetic construct
  misc_feature 1..438: note = Description of Artificial Sequence: Synthetic coding sequence
  source 1..438: mol_type = other DNA
atgaagagagtgctggtgctgctgctggccgtggccttcggccacgccctggagagaggcagagactacgagaagaacaaggtgtgcaaggagttcagccacctgggcaaggaggacttcaccagcctgagcctggtgctgtacagcagaaagttccccagcggcaccttcgagcaggtgagccagctggtgaaggaggtggtgagcctgaccgaggcctgctgcgccgagggcgccgaccccgactgctacgacaccagaaccagcgccctgagcgccaagagctgcgagagcaacagccccttccccgtgcaccccggcaccgccgagtgctgcaccaaggagggcctggagagaaagctgtgcatggccgccctgaagcaccagccccaggagttccccacctacgtggagcccaccaacgacgagatctgctag

SEQ ID NO: 83672 - DNA, 1482 bp, synthetic construct
  misc_feature 1..1482: note = Description of Artificial Sequence: Synthetic coding sequence
  source 1..1482: mol_type = other DNA
atgctgtggagctggagcgaggagagaggcggcgccgccagactgagcggcagaaagatgaagagagtgctggtgctgctgctggccgtggccttcggccacgccctggagagaggcagagactacgagaagaacaaggtgtgcaaggagttcagccacctgggcaaggaggacttcaccagcctgagcctggtgctgtacagcagaaagttccccagcggcaccttcgagcaggtgagccagctggtgaaggaggtggtgagcctgaccgaggcctgctgcgccgagggcgccgaccccgactgctacgacaccagaaccagcgccctgagcgccaagagctgcgagagcaacagccccttccccgtgcaccccggcaccgccgagtgctgcaccaaggagggcctggagagaaagctgtgcatggccgccctgaagcaccagccccaggagttccccacctacgtggagcccaccaacgacgagatctgcgaggccttcagaaaggaccccaaggagtacgccaaccagttcatgtgggagtacagcaccaactacggccaggcccccctgagcctgctggtgagctacaccaagagctacctgagcatggtgggcagctgctgcaccagcgccagccccaccgtgtgcttcctgaaggagagactgcagctgaagcacctgagcctgctgaccaccctgagcaacagagtgtgcagccagtacgccgcctacggcgagaagaagagcagactgagcaacctgatcaagctggcccagaaggtgcccaccgccgacctggaggacgtgctgcccctggccgaggacatcaccaacatcctgagcaagtgctgcgagagcgccagcgaggactgcatggccaaggagctgcccgagcacaccgtgaagctgtgcgacaacctgagcaccaagaacagcaagttcgaggactgctgccaggagaagaccgccatggacgtgttcgtgtgcacctacttcatgcccgccgcccagctgcccgagctgcccgacgtggagctgcccaccaacaaggacgtgtgcgaccccggcaacaccaaggtgatggacaagtacaccttcgagctgagcagaagaacccacctgcccgaggtgttcctgagcaaggtgctggagcccaccctgaagagcctgggcgagtgctgcgacgtggaggacagcaccacctgcttcaacgccaagggccccctgctgaagaaggagctgagcagcttcatcgacaagggccaggagctgtgcgccgactacagcgagaacaccttcaccgagtacaagaagaagctggccgagagactgaaggccaagctgcccgacgccacccccaccgagctggccaagctggtgaacaagcacagcgacttcgccagcaactgctgcagcatcaacagcccccccctgtactgcgacagcgagatcgacgccgagctgaagaacatcctgtag

SEQ ID NO: 83673 - DNA, 669 bp, synthetic construct
  misc_feature 1..669: note = Description of Artificial Sequence: Synthetic coding sequence
  source 1..669: mol_type = other DNA
atggccgccagcgtgagacaggccagaagcctgctgggcgtggccgccaccctggcccccggcagcagaggctacagagccagacccccccccagaagaagacccggccccagatggcccgaccccgaggacctgctgacccccagatggcagctgggccccagatacgccgccaagcagttcgccagatacggcgccgccagcggcgtggtgcccggcagcctgtggcccagccccgagcagctgagagagctggaggccgaggagagagagtggtaccccagcctggccaccatgcaggagagcctgagagtgaagcagctggccgaggagcagaagagaagagagagagagcagcacatcgccgagtgcatggccaagatgccccagatgatcgtgaactggcagcagcagcagagagagaactgggagaaggcccaggccgacaaggagagaagagccagactgcaggccgaggcccaggagctgctgggctaccaggtggaccccagaagcgccagattccaggagctgctgcaggacctggagaagaaggagagaaagagactgaaggaggagaagcagaagagaaagaaggaggccagagccgccgccctggccgccgccgtggcccaggaccccgccgccagcggcgcccccagcagctag

SEQ ID NO: 83674 - DNA, 1038 bp, synthetic construct
  misc_feature 1..1038: note = Description of Artificial Sequence: Synthetic coding sequence
  source 1..1038: mol_type = other DNA
atggtggccgccctgctgggcggcggcggcgaggccagaggcggcaccgtgcccggcgcctggctgtgcctgatggccctgctgcagctgctgggcagcgcccccagaggcagcggcctggcccacggcagaagactgatctgctggcaggccctgctgcagtgccagggcgagcccgagtgcagctacgcctacaaccagtacgccgaggcctgcgcccccgtgctggcccagcacggcggcggcgacgcccccggcgccgccgccgccgccttccccgccagcgccgccagcttcagcagcagatggagatgccccagccactgcatcagcgccctgatccagctgaaccacaccagaagaggccccgccctggaggactgcgactgcgcccaggacgagaactgcaagagcaccaagagagccatcgagccctgcctgcccagaaccagcggcggcggcgccggcggccccggcgccggcggcgtgatgggctgcaccgaggccagaagaagatgcgacagagacagcagatgcaacctggccctgagcagatacctgacctactgcggcaaggtgttcaacggcctgagatgcaccgacgagtgcagaaccgtgatcgaggacatgctggccatgcccaaggccgccctgctgaacgactgcgtgtgcgacggcctggagagacccatctgcgagagcgtgaaggagaacatggccagactgtgcttcggcgccgagctgggcaacggccccggcagcagcggcagcgacggcggcctggacgactactacgacgaggactacgacgacgagcagagaaccggcggcgccggcggcgagcagcccctggacgacgacgacggcgtgccccacccccccagacccggcagcggcgccgccgccagcggcggcagaggcgacctgccctacggccccggcagaagaagcagcggcggcggcggcagactggcccccagaggcgcctggacccccctggccagcatcctgctgctgctgctgggccccctgttctag

SEQ ID NO: 83675 - DNA, 942 bp, synthetic construct
  misc_feature 1..942: note = Description of Artificial Sequence: Synthetic coding sequence
  source 1..942: mol_type = other DNA
atgtgcaccgccctgagccccaaggtgagaagcggccccggcctgagcgacatgcaccagtacagccagtggctggccagcagacacgaggccaacctgctgcccatgaaggaggacctggccctgtggctgaccaacctgctgggcaaggagatcaccgccgagaccttcatggagaagctggacaacggcgccctgctgtgccagctggccgagaccatgcaggagaagttcaaggagagcatggacgccaacaagcccaccaagaacctgcccctgaagaagatcccctgcaagaccagcgcccccagcggcagcttcttcgccagagacaacaccgccaacttcctgagctggtgcagagacctgggcgtggacgagacctgcctgttcgagagcgagggcctggtgctgcacaagcagcccagagaggtgtgcctgtgcctgctggagctgggcagaatcgccgccagatacggcgtggagccccccggcctgatcaagctggagaaggagatcgagcaggaggagaccctgagcgcccccagccccagccccagccccagcagcaagagcagcggcaagaagagcaccggcaacctgctggacgacgccgtgaagagaatcagcgaggaccccccctgcaagtgccccaacaagttctgcgtggagagactgagccagggcagatacagagtgggcgagaagatcctgttcatcagaatgctgcacaacaagcacgtgatggtgagagtgggcggcggctgggagaccttcgccggctacctgctgaagcacgacccctgcagaatgctgcagatcagcagagtggacggcaagaccagccccatccagagcaagagccccaccctgaaggacatgaaccccgacaactacctggtggtgagcgccagctacaaggccaagaaggagatcaagtag

SEQ ID NO: 83676 - DNA, 942 bp, synthetic construct; identical to SEQ ID NO: 83675
  misc_feature 1..942: note = Description of Artificial Sequence: Synthetic coding sequence
  source 1..942: mol_type = other DNA

SEQ ID NO: 83677 - DNA, 942 bp, synthetic construct; identical to SEQ ID NO: 83675
  misc_feature 1..942: note = Description of Artificial Sequence: Synthetic coding sequence
  source 1..942: mol_type = other DNA

SEQ ID NO: 83678 - DNA, 546 bp, synthetic construct
  misc_feature 1..546: note = Description of Artificial Sequence: Synthetic coding sequence
  source 1..546: mol_type = other DNA
atgtgcaccgccctgagccccaaggtgagaagcggccccggcctgagcgacatgcaccagtacagccagtggctggccagcagacacgaggccaacctgctgcccatgaaggaggacctggccctgtggctgaccaacctgctgggcaaggagatcaccgccgagaccttcatggagaagctggacaacggcgccctgctgtgccagctggccgagaccatgcaggagaagttcaaggagagcatggacgccaacaagcccaccaagaacctgcccctgaagaagatcccctgcaagaccagcgcccccagcggcagcttcttcgccagagacaacaccgccaacttcctgagctggtgcagagacctgggcgtggacgagacctgcctgttcgagagcgagggcctggtgctgcacaagcagcccagagaggtgtgcctgtgcctgctggagctgggcagaatcgccgccagatacggcgtggagccccccggcctgatcaagctggagaaggagatcgagcaggaggagaccctgagcgcctag

SEQ ID NO: 83679 - DNA, 618 bp, synthetic construct
  misc_feature 1..618: note = Description of Artificial Sequence: Synthetic coding sequence
  source 1..618: mol_type = other DNA
atgtgcaccgccctgagccccaaggtgagaagcggccccggcctgagcgacatgcaccagtacagccagtggctggccagcagacacgaggccaacctgctgcccatgaaggaggacctggccctgtggctgaccaacctgctgggcaaggagatcaccgccgagaccttcatggagaagctggacaacggcgccctgctgtgccagctggccgagaccatgcaggagaagttcaaggagagcatggacgccaacaagcccaccaagaacctgcccctgaagaagatcccctgcaagaccagcgcccccagcggcagcttcttcgccagagacaacaccgccaacttcctgagctggtgcagagacctgggcgtggacgagacctgcctgttcgagagcgagggcctggtgctgcacaagcagcccagagaggtgtgcctgtgcctgctggagctgggcagaatcgccgccagatacggcgtggagccccccggcctgatcaagctggagaaggagatcgagcaggaggagaccctgagcgcccccagccccagccccagccccagcagcaagagcagcggcaagaagagcaccggcaacctgctggacgacgcctag

SEQ ID NO: 83680 - DNA, 411 bp, synthetic construct
  misc_feature 1..411: note = Description of Artificial Sequence: Synthetic coding sequence
  source 1..411: mol_type = other DNA
atgtgcaccgccctgagccccaaggtgagaagcggccccggcctgagcgacatgcaccagtacagccagtggctggccagcagacacgaggccaacctgctgcccatgaaggaggacctggccctgtggctgaccaacctgctgggcaaggagatcaccgccgagaccttcatggagaagctggacaacggcgccctgctgtgccagctggccgagaccatgcaggagaagttcaaggagagcatggacgccaacaagcccaccaagaacctgcccctgaagaagatcccctgcaagaccagcgcccccagcggcagcttcttcgccagagacaacaccgccaacttcctgagctggtgcagagacctgggcgtggacgagacctgcctgttcgagagcgagggcctgtag

SEQ ID NO: 83681 - DNA, 468 bp, synthetic construct
  misc_feature 1..468: note = Description of Artificial Sequence: Synthetic coding sequence
  source 1..468: mol_type = other DNA
atgtgcaccgccctgagccccaaggtgagaagcggccccggcctgagcgacatgcaccagtacagccagtggctggccagcagacacgaggccaacctgctgcccatgaaggaggacctggccctgtggctgaccaacctgctgggcaaggagatcaccgccgagaccttcatggagaagctggacaacggcgccctgctgtgccagctggccgagaccatgcaggagaagttcaaggagagcatggacgccaacaagcccaccaagaacctgcccctgaagaagatcccctgcaagaccagcgcccccagcggcagcttcttcgccagagacaacaccgccaacttcctgagctggtgcagagacctgggcgtggacgagacctgcctgttcgagagcgagggcctggtgctgcacaagcagcccagagaggtgtgcctgtgcctgctggagctgggcagaatctag

SEQ ID NO: 83682 - DNA, 2043 bp, synthetic construct
  misc_feature 1..2043: note = Description of Artificial Sequence: Synthetic coding sequence
  source 1..2043: mol_type = other DNA
atggccgaccccgtggccggcatcgccggcagcgccgccaagagcgtgagacccttcagaagcagcgaggcctacgtggaggccatgaaggaggacctggccgagtggctgaacgccctgtacggcctgggcctgcccggcggcggcgacggcttcctgaccggcctggccaccggcaccaccctgtgccagcacgccaacgccgtgaccgaggccgccagagccctggccgccgccagacccgccagaggcgtggccttccaggcccacagcgtggtgcccggcagcttcatggccagagacaacgtggccaccttcatcggctggtgcagagtggagctgggcgtgcccgaggtgctgatgttcgagaccgaggacctggtgctgagaaagaacgagaagagcgtggtgctgtgcctgctggaggtggccagaagaggcgccagactgggcctgctggcccccagactggtgcagttcgagcaggagatcgagagagagctgagagccgccccccccgcccccaacgcccccgccgccggcgaggacaccaccgagaccgcccccgcccccggcacccccgccagaggccccagaatgacccccagcgacctgagaaacctggacgagctggtgagagagatcctgggcagatgcacctgccccgaccagttccccatgatcaaggtgagcgagggcaagtacagagtgggcgacagcagcctgctgatcttcgtgagagtgctgagaagccacgtgatggtgagagtgggcggcggctgggacaccctggagcactacctggacaagcacgacccctgcagatgcagcagcaccgcccacagacccccccagcccagagtgtgcaccttcagcccccagagagtgagccccaccaccagccccagacccgccagccccgtgcccggcagcgagagaagaggcagcagacccgagatgacccccgtgagcctgagaagcaccaaggagggccccgagaccccccccagacccagagaccagctgcccccccaccccagaagcagaagatacagcggcgacagcgacagcagcgccagcagcgcccagagcggccccctgggcaccagaagcgacgacaccggcaccggccccagaagagagagacccagcagaagactgaccaccggcacccccgccagccccagaagaccccccctgagaagccagagcagagacagactggacagaggcagacccagaggcgcccccggcggcagaggcgcccagctgagcgtgcccagccccgccagaagagccagaagccagagcagagaggagcaggccgtgctgctggtgagaagagacagagacggccagcacagctgggtgcccagaggcagaggcagcggcggcagcggcagaagcaccccccagacccccagagccagaagccccgccgcccccagactgagcagagtgagcagccccagccccgagctgggcaccacccccgccagcatcttcagaacccccctgcagctggacccccagcaggagcagcagctgttcagaagactggaggaggagttcctggccaacgccagagccctggaggccgtggccagcgtgacccccaccggccccgcccccgaccccgccagagcccccgacccccccgcccccgacagcgcctactgcagcagcagcagcagcagcagcagcctgagcgtgctgggcggcaagtgcggccagcccggcgacagcggcagaaccgccaacggcctgcccggccccagaagccaggccctgagcagcagcagcgacgagggcagcccctgccccggcatgggcggccccctggacgcccccggcagccccctggcctgcaccgagcccagcagaacctgggccagaggcagaatggacacccagcccgacagaaagcccagcagaatccccacccccagaggccccagaagacccagcggccccgccgagctgggcacctggcacgccctgcacagcgtgacccccagagccgagcccgacagctggatgtag

SEQ ID NO: 83683 - DNA, 1014 bp, synthetic construct
  misc_feature 1..1014: note = Description of Artificial Sequence: Synthetic coding sequence
  source 1..1014: mol_type = other DNA
atggccgaccccgtggccggcatcgccggcagcgccgccaagagcgtgagacccttcagaagcagcgaggcctacgtggaggccatgaaggaggacctggccgagtggctgaacgccctgtacggcctgggcctgcccggcggcggcgacggcttcctgaccggcctggccaccggcaccaccctgtgccagcacgccaacgccgtgaccgaggccgccagagccctggccgccgccagacccgccagaggcgtggccttccaggcccacagcgtggtgcccggcagcttcatggccagagacaacgtggccaccttcatcggctggtgcagagtggagctgggcgtgcccgaggtgctgatgttcgagaccgaggacctggtgctgagaaagaacgagaagagcgtggtgctgtgcctgctggaggtggccagaagaggcgccagactgggcctgctggcccccagactggtgcagttcgagcaggagatcgagagagagctgagagccgccccccccgcccccaacgcccccgccgccggcgaggacaccaccgagaccgcccccgcccccggcacccccgccagaggccccagaatgacccccagcgacctgagaaacctggacgagctggtgagagagatcctgggcagatgcacctgccccgaccagttccccatgatcaaggtgagcgagggcaagtacagagtgggcgacagcagcctgctgatcttcgtgagagtgctgagaagccacgtgatggtgagagtgggcggcggctgggacaccctggagcactacctggacaagcacgacccctgcagatgcagcagcaccgcccacagacccccccagcccagagtgtgcaccttcagcccccagagagtgagccccaccaccagccccagacccgccagccccgtgcccggcagcgagagaagaggcagcagacccgagatgacccccgtgagcctgagaagcaccaaggagggccccgagaccccccccagatag

SEQ ID NO: 83684 - DNA, 990 bp, synthetic construct
  misc_feature 1..990: note = Description of Artificial Sequence: Synthetic coding sequence
  source 1..990: mol_type = other DNA
atggccgaccccgtggccggcatcgccggcagcgccgccaagagcgtgagacccttcagaagcagcgaggcctacgtggaggccatgaaggaggacctggccgagtggctgaacgccctgtacggcctgggcctgcccggcggcggcgacggcttcctgaccggcctggccaccggcaccaccctgtgccagcacgccaacgccgtgaccgaggccgccagagccctggccgccgccagacccgccagaggcgtggccttccaggcccacagcgtggtgcccggcagcttcatggccagagacaacgtggccaccttcatcggctggtgcagagtggagctgggcgtgcccgaggtgctgatgttcgagaccgaggacctggtgctgagaaagaacgagaagagcgtggtgctgtgcctgctggaggtggccagaagaggcgccagactgggcctgctggcccccagactggtgcagttcgagcaggagatcgagagagagctgagagccgccccccccgcccccaacgcccccgccgccggcgaggacaccaccgagaccgcccccgcccccggcacccccgccagaggccccagaatgacccccagcgacctgagaaacctggacgagctggtgagagagatcctgggcagatgcacctgccccgaccagttccccatgatcaaggtgagcgagggcaagtacagagtgggcgacagcagcctgctgatcttcgtgagagtgctgagaagccacgtgatggtgagagtgggcggcggctgggacaccctggagcactacctggacaagcacgacccctgcagatgcagcagcaccggccccggcatcagctgcccccccatccccgcccccgccgccacccccggcaccgtgaccccccagccccccccccccagagccgcccccctggtgcccgccgtgatgacccaggccctggcccccggcggcagcgaccccgccggcggctag

SEQ ID NO: 83685 - DNA, 1614 bp, synthetic construct
  misc_feature 1..1614: note = Description of Artificial Sequence: Synthetic coding sequence
  source 1..1614: mol_type = other DNA
atggccgaccccgtggccggcatcgccggcagcgccgccaagagcgtgagacccttcagaagcagcgaggcctacgtggaggccatgaaggaggacctggccgagtggctgaacgccctgtacggcctgggcctgcccggcggcggcgacggcttcctgaccggcctggccaccggcaccaccctgtgccagcacgccaacgccgtgaccgaggccgccagagccctggccgccgccagacccgccagaggcgtggccttccaggcccacagcgtggtgcccggcagcttcatggccagagacaacgtggccaccttcatcggctggtgcagagtggagctgggcgtgcccgaggtgctgatgttcgagaccgaggacctggtgctgagaaagaacgagaagagcgtggtgctgtgcctgctggaggtggccagaagaggcgccagactgggcctgctggcccccagactggtgcagttcgagcaggagatcgagagagagctgagagccgccccccccgcccccaacgcccccgccgccggcgaggacaccaccgagaccgcccccgcccccggcacccccgccagaggccccagaatgacccccagcgacctgagaaacctggacgagctggtgagagagatcctgggcagatgcacctgccccgaccagttccccatgatcaaggtgagcgagggcaagtacagagtgggcgacagcagcctgctgatcttcgtgagagtgctgagaagccacgtgatggtgagagtgggcggcggctgggacaccctggagcactacctggacaagcacgacccctgcagatgcagcagcaccgcccacagacccccccagcccagagtgtgcaccttcagcccccagagagtgagccccaccaccagccccagacccgccagccccgtgcccggcagcgagagaagaggcagcagacccgagatgacccccgtgagcctgagaagcaccaaggagggccccgagaccccccccagacccagagaccagctgcccccccaccccagaagcagaagatacagcggcgacagcgacagcagcgccagcagcgcccagagcggccccctgggcaccagaagcgacgacaccggcaccggccccagaagagagagacccagcagaagactgaccaccggcacccccgccagccccagaagaccccccgcctgcgccgccagccccgagaccggctggatcgccgccggccccggcggcccccaggaggccggcgagcccagctgcagaagccccgccctgcccggcggccccggcgccagagccgccagaagcagactgtgctgcctgtgcgccggcatcgagaccggcagcacccacggctgccagggcgccggcgccgtgggcgccagagccggcgccccccccagactgcccgtgcccgccgccctgcagcaccccggcttccccggcagccccgcccccgtgcagagctgggccccccacagacccgccagcagcgcccacccctgcagcagcaccagaagcagaagcagcagctgcagcggcgcctggaagagaagcagctggcccatgcccggccccctgagactgctgctggcctag

SEQ ID NO: 83686 - DNA, 1614 bp, synthetic construct; identical to SEQ ID NO: 83685
  misc_feature 1..1614: note = Description of Artificial Sequence: Synthetic coding sequence
  source 1..1614: mol_type = other DNA

SEQ ID NO: 83687 - DNA, 1614 bp, synthetic construct; identical to SEQ ID NO: 83685
  misc_feature 1..1614: note = Description of Artificial Sequence: Synthetic coding sequence
  source 1..1614: mol_type = other DNA

SEQ ID NO: 83688 - DNA, 417 bp, synthetic construct
  misc_feature 1..417: note = Description of Artificial Sequence: Synthetic coding sequence
  source 1..417: mol_type = other DNA
atggccgaccccgtggccggcatcgccggcagcgccgccaagagcgtgagacccttcagaagcagcgaggcctacgtggaggccatgaaggaggacctggccgagtggctgaacgccctgtacggcctgggcctgcccggcggcggcgacggcttcctgaccggcctggccaccggcaccaccctgtgccagcacgccaacgccgtgaccgaggccgccagagccctggccgccgccagacccgccagaggcgtggccttccaggcccacagcgtggtgcccggcagcttcatggccagagacaacgtggccaccttcatcggctggtgcagagtggagctgggcgtgcccgaggtgctgatgttcgagaccgaggacctggtgctgagaaagaacgagaagagcgtggtgctgtag

SEQ ID NO: 83689 - DNA, 432 bp, synthetic construct
  misc_feature 1..432: note = Description of Artificial Sequence: Synthetic coding sequence
  source 1..432: mol_type = other DNA
atggccgaccccgtggccggcatcgccggcagcgccgccaagagcgtgagacccttcagaagcagcgaggcctacgtggaggccatgaaggaggacctggccgagtggctgaacgccctgtacggcctgggcctgcccggcggcggcgacggcttcctgaccggcctggccaccggcaccaccctgtgccagcacgccaacgccgtgaccgaggccgccagagccctggccgccgccagacccgccagaggcgtggccttccaggcccacagcgtggtgcccggcagcttcatggccagagacaacgtggccaccttcatcggctggtgcagagtggagctgggcgtgcccgaggtgctgatgttcgagaccgaggacctggtgctgagaaagaacgagaagagcgtggtgctgtgcctgctggaggtgtag

SEQ ID NO: 83690 - DNA, 1614 bp, synthetic construct; identical to SEQ ID NO: 83685
  misc_feature 1..1614: note = Description of Artificial Sequence: Synthetic coding sequence
  source 1..1614: mol_type = other DNA

SEQ ID NO: 83691 - DNA, 2037 bp, synthetic construct
  misc_feature 1..2037: note = Description of Artificial Sequence: Synthetic coding sequence
  source 1..2037: mol_type = other DNA
atggcccccagcctgagccccggccccgccgccctgagaagagccccccagctgctgctgctgctgctggccgccgagtgcgccctggccgccctgctgcccgccagagaggccacccagttcctgagacccagacagagaagagccttccaggtgttcgaggaggccaagcagggccacctggagagagagtgcgtggaggagctgtgcagcagagaggaggccagagaggtgttcgagaacgaccccgagaccgactacttctaccccagatacctggactgcatcaacaagtacggcagcccctacaccaagaacagcggcttcgccacctgcgtgcagaacctgcccgaccagtgcacccccaacccctgcgacagaaagggcacccaggcctgccaggacctgatgggcaacttcttctgcctgtgcaaggccggctggggcggcagactgtgcgacaaggacgtgaacgagtgcagccaggagaacggcggctgcctgcagatctgccacaacaagcccggcagcttccactgcagctgccacagcggcttcgagctgagcagcgacggcagaacctgccaggacatcgacgagtgcgccgacagcgaggcctgcggcgaggccagatgcaagaacctgcccggcagctacagctgcctgtgcgacgagggcttcgcctacagcagccaggagaaggcctgcagagacgtggacgagtgcctgcagggcagatgcgagcaggtgtgcgtgaacagccccggcagctacacctgccactgcgacggcagaggcggcctgaagctgagccaggacatggacacctgcgaggacatcctgccctgcgtgcccttcagcgtggccaagagcgtgaagagcctgtacctgggcagaatgttcagcggcacccccgtgatcagactgagattcaagagactgcagcccaccagactggtggccgagttcgacttcagaaccttcgaccccgagggcatcctgctgttcgccggcggccaccaggacagcacctggatcgtgctggccctgagagccggcagactggagctgcagctgagatacaacggcgtgggcagagtgaccagcagcggccccgtgatcaaccacggcatgtggcagaccatcagcgtggaggagctggccagaaacctggtgatcaaggtgaacagagacgccgtgatgaagatcgccgtggccggcgacctgttccagcccgagagaggcctgtaccacctgaacctgaccgtgggcggcatccccttccacgagaaggacctggtgcagcccatcaaccccagactggacggctgcatgagaagctggaactggctgaacggcgaggacaccaccatccaggagaccgtgaaggtgaacaccagaatgcagtgcttcagcgtgaccgagagaggcagcttctaccccggcagcggcttcgccttctacagcctggactacatgagaacccccctggacgtgggcaccgagagcacctgggaggtggaggtggtggcccacatcagacccgccgccgacaccggcgtgctgttcgccctgtgggcccccgacctgagagccgtgcccctgagcgtggccctggtggactaccacagcaccaagaagctgaagaagcagctggtggtgctggccgtggagcacaccgccctggccctgatggagatcaaggtgtgcgacggccaggagcacgtggtgaccgtgagcctgagagacggcgaggccaccctggaggtggacggcaccagaggccagagcgaggtgagcgccgcccagctgcaggagagactggccgtgctggagagacacctgagaagccccgtgctgaccttcgccggcggcctgcccgacgtgcccgtgaccagcgcccccgtgaccgccttctacagaggctgcatgaccctggaggtgaacagaagactgctggacctggacgaggccgcctacaagcacagcgacatcaccgcccacagctgcccccccgtggagcccgccgccgcctag

SEQ ID NO: 83692 - DNA, 1875 bp, synthetic construct
  misc_feature 1..1875: note = Description of Artificial Sequence: Synthetic coding sequence
  source 1..1875: mol_type = other DNA
atgtgcatgtgccaggccagccccccccccgccgccctggccggctgcctgctgagcagctgcgtgcagcccgccagagagcacggcggcgccttcagcaaggccgagtggctgagcaactgcatcaacaagtacggcagcccctacaccaagaacagcggcttcgccacctgcgtgcagaacctgcccgaccagtgcacccccaacccctgcgacagaaagggcacccaggcctgccaggacctgatgggcaacttcttctgcctgtgcaaggccggctggggcggcagactgtgcgacaaggacgtgaacgagtgcagccaggagaacggcggctgcctgcagatctgccacaacaagcccggcagcttccactgcagctgccacagcggcttcgagctgagcagcgacggcagaacctgccaggacatcgacgagtgcgccgacagcgaggcctgcggcgaggccagatgcaagaacctgcccggcagctacagctgcctgtgcgacgagggcttcgcctacagcagccaggagaaggcctgcagagacgtggacgagtgcctgcagggcagatgcgagcaggtgtgcgtgaacagccccggcagctacacctgccactgcgacggcagaggcggcctgaagctgagccaggacatggacacctgcgaggacatcctgccctgcgtgcccttcagcgtggccaagagcgtgaagagcctgtacctgggcagaatgttcagcggcacccccgtgatcagactgagattcaagagactgcagcccaccagactggtggccgagttcgacttcagaaccttcgaccccgagggcatcctgctgttcgccggcggccaccaggacagcacctggatcgtgctggccctgagagccggcagactggagctgcagctgagatacaacggcgtgggcagagtgaccagcagcggccccgtgatcaaccacggcatgtggcagaccatcagcgtggaggagctggccagaaacctggtgatcaaggtgaacagagacgccgtgatgaagatcgccgtggccggcgacctgttccagcccgagagaggcctgtaccacctgaacctgaccgtgggcggcatccccttccacgagaaggacctggtgcagcccatcaaccccagactggacggctgcatgagaagctggaactggctgaacggcgaggacaccaccatccaggagaccgtgaaggtgaacaccagaatgcagtgcttcagcgtgaccgagagaggcagcttctaccccggcagcggcttcgccttctacagcctggactacatgagaacccccctggacgtgggcaccgagagcacctgggaggtggaggtggtggcccacatcagacccgccgccgacaccggcgtgctgttcgccctgtgggcccccgacctgagagccgtgcccctgagcgtggccctggtggactaccacagcaccaagaagctgaagaagcagctggtggtgctggccgtggagcacaccgccctggccctgatggagatcaaggtgtgcgacggccaggagcacgtggtgaccgtgagcctgagagacggcgaggccaccctggaggtggacggcaccagaggccagagcgaggtgagcgccgcccagctgcaggagagactggccgtgctggagagacacctgagaagccccgtgctgaccttcgccggcggcctgcccgacgtgcccgtgaccagcgcccccgtgaccgccttctacagaggctgcatgaccctggaggtgaacagaagactgctggacctggacgaggccgcctacaagcacagcgacatcaccgcccacagctgcccccccgtggagcccgccgccgcctag

SEQ ID NO: 83693 - DNA, 2166 bp, synthetic construct
  misc_feature 1..2166: note = Description of Artificial Sequence: Synthetic coding sequence
  source 1..2166: mol_type = other DNA
atggcccccagcctgagccccggccccgccgccctgagaagagccccccagctgctgctgctgctgctggccgccgagtgcgccctggccgccctgctgcccgccagagaggccacccagttcctgagacccagacagagaagagccttccaggtgttcgaggaggccaagcagggccacctggagagagagtgcgtggaggagctgtgcagcagagaggaggccagagaggtgttcgagaacgaccccgagaccgactacttctaccccagatacctggactgcatcaacaagtacggcagcccctacaccaagaacagcggcttcgccacctgcgtgcagaacctgcccgaccagtgcacccccaacccctgcgacagaaagggcacccaggcctgccaggacctgatgggcaacttcttctgcctgtgcaaggccggctggggcggcagactgtgcgacaaggacgtgaacgagtgcagccaggagaacggcggctgcctgcagatctgccacaacaagcccggcagcttccactgcagctgccacagcggcttcgagctgagcagcgacggcagaacctgccaggacatcgacgagtgcgccgacagcgaggcctgcggcgaggccagatgcaagaacctgcccggcagctacagctgcctgtgcgacgagggcttcgcctacagcagccaggagaaggcctgcagagacgtggacgagtgcctgcagggcagatgcgagcaggtgtgcgtgaacagccccggcagctacacctgccactgcgacggcagaggcggcctgaagctgagccaggacatggacacctgcgagctggaggccggctggcccctgcccagacacagaagagacagcggccccgccgccagacccggcagaggcgcccagggcagcagaagcgagggccacatccccgacagaagaggccccagaccctggcaggacatcctgccctgcgtgcccttcagcgtggccaagagcgtgaagagcctgtacctgggcagaatgttcagcggcacccccgtgatcagactgagattcaagagactgcagcccaccagactggtggccgagttcgacttcagaaccttcgaccccgagggcatcctgctgttcgccggcggccaccaggacagcacctggatcgtgctggccctgagagccggcagactggagctgcagctgagatacaacggcgtgggcagagtgaccagcagcggccccgtgatcaaccacggcatgtggcagaccatcagcgtggaggagctggccagaaacctggtgatcaaggtgaacagagacgccgtgatgaagatcgccgtggccggcgacctgttccagcccgagagaggcctgtaccacctgaacctgaccgtgggcggcatccccttccacgagaaggacctggtgcagcccatcaaccccagactggacggctgcatgagaagctggaactggctgaacggcgaggacaccaccatccaggagaccgtgaaggtgaacaccagaatgcagtgcttcagcgtgaccgagagaggcagcttctaccccggcagcggcttcgccttctacagcctggactacatgagaacccccctggacgtgggcaccgagagcacctgggaggtggaggtggtggcccacatcagacccgccgccgacaccggcgtgctgttcgccctgtgggcccccgacctgagagccgtgcccctgagcgtggccctggtggactaccacagcaccaagaagctgaagaagcagctggtggtgctggccgtggagcacaccgccctggccctgatggagatcaaggtgtgcgacggccaggagcacgtggtgaccgtgagcctgagagacggcgaggccaccctggaggtggacggcaccagaggccagagcgaggtgagcgccgcccagctgcaggagagactggccgtgctggagagacacctgagaagccccgtgctgaccttcgccggcggcctgcccgacgtgcccgtgaccagcgcccccgtgaccgccttctacagaggctgcatgaccctggaggtgaacagaagactgctggacctggacgaggccgcctacaagcacagcgacatcaccgcccacagctgcccccccgtggagcccgccgccgcctag

SEQ ID NO: 83694 - DNA, 1140 bp, synthetic construct
  misc_feature 1..1140: note = Description of Artificial Sequence: Synthetic coding sequence
  source 1..1140: mol_type = other DNA
atgttcagcggcacccccgtgatcagactgagattcaagagactgcagcccaccagactggtggccgagttcgacttcagaaccttcgaccccgagggcatcctgctgttcgccggcggccaccaggacagcacctggatcgtgctggccctgagagccggcagactggagctgcagctgagatacaacggcgtgggcagagtgaccagcagcggccccgtgatcaaccacggcatgtggcagaccatcagcgtggaggagctggccagaaacctggtgatcaaggtgaacagagacgccgtgatgaagatcgccgtggccggcgacctgttccagcccgagagaggcctgtaccacctgaacctgaccgtgggcggcatccccttccacgagaaggacctggtgcagcccatcaaccccagactggacggctgcatgagaagctggaactggctgaacggcgaggacaccaccatccaggagaccgtgaaggtgaacaccagaatgcagtgcttcagcgtgaccgagagaggcagcttctaccccggcagcggcttcgccttctacagcctggactacatgagaacccccctggacgtgggcaccgagagcacctgggaggtggaggtggtggcccacatcagacccgccgccgacaccggcgtgctgttcgccctgtgggcccccgacctgagagccgtgcccctgagcgtggccctggtggactaccacagcaccaagaagctgaagaagcagctggtggtgctggccgtggagcacaccgccctggccctgatggagatcaaggtgtgcgacggccaggagcacgtggtgaccgtgagcctgagagacggcgaggccaccctggaggtggacggcaccagaggccagagcgaggtgagcgccgcccagctgcaggagagactggccgtgctggagagacacctgagaagccccgtgctgaccttcgccggcggcctgcccgacgtgcccgtgaccagcgcccccgtgaccgccttctacagaggctgcatgaccctggaggtgaacagaagactgctggacctggacgaggccgcctacaagcacagcgacatcaccgcccacagctgcccccccgtggagcccgccgccgcctag

SEQ ID NO: 83695 - DNA, 1218 bp, synthetic construct
  misc_feature 1..1218: note = Description of Artificial Sequence: Synthetic coding sequence
  source 1..1218: mol_type = other DNA
atggacacctgcgaggacatcctgccctgcgtgcccttcagcgtggccaagagcgtgaagagcctgtacctgggcagaatgttcagcggcacccccgtgatcagactgagattcaagagactgcagcccaccagactggtggccgagttcgacttcagaaccttcgaccccgagggcatcctgctgttcgccggcggccaccaggacagcacctggatcgtgctggccctgagagccggcagactggagctgcagctgagatacaacggcgtgggcagagtgaccagcagcggccccgtgatcaaccacggcatgtggcagaccatcagcgtggaggagctggccagaaacctggtgatcaaggtgaacagagacgccgtgatgaagatcgccgtggccggcgacctgttccagcccgagagaggcctgtaccacctgaacctgaccgtgggcggcatccccttccacgagaaggacctggtgcagcccatcaaccccagactggacggctgcatgagaagctggaactggctgaacggcgaggacaccaccatccaggagaccgtgaaggtgaacaccagaatgcagtgcttcagcgtgaccgagagaggcagcttctaccccggcagcggcttcgccttctacagcctggactacatgagaacccccctggacgtgggcaccgagagcacctgggaggtggaggtggtggcccacatcagacccgccgccgacaccggcgtgctgttcgccctgtgggcccccgacctgagagccgtgcccctgagcgtggccctggtggactaccacagcaccaagaagctgaagaagcagctggtggtgctggccgtggagcacaccgccctggccctgatggagatcaaggtgtgcgacggccaggagcacgtggtgaccgtgagcctgagagacggcgaggccaccctggaggtggacggcaccagaggccagagcgaggtgagcgccgcccagctgcaggagagactggccgtgctggagagacacctgagaagccccgtgctgaccttcgccggcggcctgcccgacgtgcccgtgaccagcgcccccgtgaccgccttctacagaggctgcatgaccctggaggtgaacagaagactgctggacctggacgaggccgcctacaagcacagcgacatcaccgcccacagctgcccccccgtggagcccgccgccgcctag

SEQ ID NO: 83696 - DNA, 1431 bp, synthetic construct
  misc_feature 1..1431: note = Description of Artificial Sequence: Synthetic coding sequence
  source 1..1431: mol_type = other DNA
atgagcggcgccagatgcagaaccctgtaccccttcagcggcgagagacacggccagggcctgagattcgccgccggcgagctgatcaccctgctgcaggtgcccgacggcggctggtgggagggcgagaaggaggacggcctgagaggctggttccccgccagctacgtgcagctgctggagaagcccggcatggtgccccccccccccggcgaggagagccagaccgtgatcctgccccccggctggcagagctacctgagcccccagggcagaagatactacgtgaacaccaccaccaacgagaccacctgggagagacccagcagcagccccggcatccccgccagccccggcagccacagaagcagcctgccccccaccgtgaacggctaccacgccagcggcacccccgcccacccccccgagaccgcccacatgagcgtgagaaagagcaccggcgacagccagaacctgggcagcagcagccccagcaagaagcagagcaaggagaacaccatcaccatcaactgcgtgaccttcccccaccccgacaccatgcccgagcagcagctgctgaagcccaccgagtggagctactgcgactacttctgggccgacaagaaggacccccagggcaacggcaccgtggccggcttcgagctgctgctgcagaagcagctgaagggcaagcagatgcagaaggagatgagcgagttcatcagagagagaatcaagatcgaggaggactacgccaagaacctggccaagctgagccagaacagcctggccagccaggaggagggcagcctgggcgaggcctgggcccaggtgaagaagagcctggccgacgaggccgaggtgcacctgaagttcagcgccaagctgcacagcgaggtggagaagcccctgatgaacttcagagagaacttcaagaaggacatgaagaagtgcgaccaccacatcgccgacctgagaaagcagctggccagcagatacgccagcgtggagaaggccagaaaggccctgaccgagagacagagagacctggagatgaagacccagcagctggagatcaagctgagcaacaagaccgaggaggacatcaagaaggccagaagaaagagcacccaggccggcgacgacctgatgagatgcgtggacctgtacaaccaggcccagagcaagtggttcgaggagatggtgaccaccaccctggagctggagagactggaggtggagagagtggagatgatcagacagcacctgtgccagtacacccagctgagacacgagaccgacatgttcaaccagagcaccgtggagcccgtggaccagctgctgagaaaggtggaccccgccaaggacagagagctgtgggtgagagagcacaagaccggcaacatcagacccgtggacatggagatctag

SEQ ID NO: 83697 - DNA, 1251 bp, synthetic construct
  misc_feature 1..1251: note = Description of Artificial Sequence: Synthetic coding sequence
  source 1..1251: mol_type = other DNA
atgaagcccggcatggtgccccccccccccggcgaggagagccagaccgtgatcctgccccccggctggcagagctacctgagcccccagggcagaagatactacgtgaacaccaccaccaacgagaccacctgggagagacccagcagcagccccggcatccccgccagccccggcagccacagaagcagcctgccccccaccgtgaacggctaccacgccagcggcacccccgcccacccccccgagaccgcccacatgagcgtgagaaagagcaccggcgacagccagaacctgggcagcagcagccccagcaagaagcagagcaaggagaacaccatcaccatcaactgcgtgaccttcccccaccccgacaccatgcccgagcagcagctgctgaagcccaccgagtggagctactgcgactacttctgggccgacaagaaggacccccagggcaacggcaccgtggccggcttcgagctgctgctgcagaagcagctgaagggcaagcagatgcagaaggagatgagcgagttcatcagagagagaatcaagatcgaggaggactacgccaagaacctggccaagctgagccagaacagcctggccagccaggaggagggcagcctgggcgaggcctgggcccaggtgaagaagagcctggccgacgaggccgaggtgcacctgaagttcagcgccaagctgcacagcgaggtggagaagcccctgatgaacttcagagagaacttcaagaaggacatgaagaagtgcgaccaccacatcgccgacctgagaaagcagctggccagcagatacgccagcgtggagaaggccagaaaggccctgaccgagagacagagagacctggagatgaagacccagcagctggagatcaagctgagcaacaagaccgaggaggacatcaagaaggccagaagaaagagcacccaggccggcgacgacctgatgagatgcgtggacctgtacaaccaggcccagagcaagtggttcgaggagatggtgaccaccaccctggagctggagagactggaggtggagagagtggagatgatcagacagcacctgtgccagtacacccagctgagacacgagaccgacatgttcaaccagagcaccgtggagcccgtggaccagctgctgagaaaggtggaccccgccaaggacagagagctgtgggtgagagagcacaagaccggcaacatcagacccgtggacatggagatctag

SEQ ID NO: 83698 - DNA, 1011 bp, synthetic construct
  misc_feature 1..1011: note = Description of Artificial Sequence: Synthetic coding sequence
  source 1..1011: mol_type = other DNA
atgagcaacatggagaacagcttcgacgacgtgagctgcctgagcccccagaacctgggcagcagcagccccagcaagaagcagagcaaggagaacaccatcaccatcaactgcgtgaccttcccccaccccgacaccatgcccgagcagcagctgctgaagcccaccgagtggagctactgcgactacttctgggccgacaagaaggacccccagggcaacggcaccgtggccggcttcgagctgctgctgcagaagcagctgaagggcaagcagatgcagaaggagatgagcgagttcatcagagagagaatcaagatcgaggaggactacgccaagaacctggccaagctgagccagaacagcctggccagccaggaggagggcagcctgggcgaggcctgggcccaggtgaagaagagcctggccgacgaggccgaggtgcacctgaagttcagcgccaagctgcacagcgaggtggagaagcccctgatgaacttcagagagaacttcaagaaggacatgaagaagtgcgaccaccacatcgccgacctgagaaagcagctggccagcagatacgccagcgtggagaaggccagaaaggccctgaccgagagacagagagacctggagatgaagacccagcagctggagatcaagctgagcaacaagaccgaggaggacatcaagaaggccagaagaaagagcacccaggccggcgacgacctgatgagatgcgtggacctgtacaaccaggcccagagcaagtggttcgaggagatggtgaccaccaccctggagctggagagactggaggtggagagagtggagatgatcagacagcacctgtgccagtacacccagctgagacacgagaccgacatgttcaaccagagcaccgtggagcccgtggaccagctgctgagaaaggtggaccccgccaaggacagagagctgtgggtgagagagcacaagaccggcaacatcagacccgtggacatggagatctag

SEQ ID NO: 83699 - DNA, 1248 bp, synthetic construct
  misc_feature 1..1248: note = Description of Artificial Sequence: Synthetic coding sequence
  source 1..1248: mol_type = other DNA
aagcccggcatggtgccccccccccccggcgaggagagccagaccgtgatcctgccccccggctggcagagctacctgagcccccagggcagaagatactacgtgaacaccaccaccaacgagaccacctgggagagacccagcagcagccccggcatccccgccagccccggcagccacagaagcagcctgccccccaccgtgaacggctaccacgccagcggcacccccgcccacccccccgagaccgcccacatgagcgtgagaaagagcaccggcgacagccagaacctgggcagcagcagccccagcaagaagcagagcaaggagaacaccatcaccatcaactgcgtgaccttcccccaccccgacaccatgcccgagcagcagctgctgaagcccaccgagtggagctactgcgactacttctgggccgacaagaaggacccccagggcaacggcaccgtggccggcttcgagctgctgctgcagaagcagctgaagggcaagcagatgcagaaggagatgagcgagttcatcagagagagaatcaagatcgaggaggactacgccaagaacctggccaagctgagccagaacagcctggccagccaggaggagggcagcctgggcgaggcctgggcccaggtgaagaagagcctggccgacgaggccgaggtgcacctgaagttcagcgccaagctgcacagcgaggtggagaagcccctgatgaacttcagagagaacttcaagaaggacatgaagaagtgcgaccaccacatcgccgacctgagaaagcagctggccagcagatacgccagcgtggagaaggccagaaaggccctgaccgagagacagagagacctggagatgaagacccagcagctggagatcaagctgagcaacaagaccgaggaggacatcaagaaggccagaagaaagagcacccaggccggcgacgacctgatgagatgcgtggacctgtacaaccaggcccagagcaagtggttcgaggagatggtgaccaccaccctggagctggagagactggaggtggagagagtggagatgatcagacagcacctgtgccagtacacccagctgagacacgagaccgacatgttcaaccagagcaccgtggagcccgtggaccagctgctgagaaaggtggaccccgccaaggacagagagctgtgggtgagagagcacaagaccggcaacatcagacccgtggacatggagatctag

SEQ ID NO: 83700 - DNA, 1251 bp, synthetic construct; identical to SEQ ID NO: 83697
  misc_feature 1..1251: note = Description of Artificial Sequence: Synthetic coding sequence
  source 1..1251: mol_type = other DNA

SEQ ID NO: 83701 - DNA, 546 bp, synthetic construct
  misc_feature 1..546: note = Description of Artificial Sequence: Synthetic coding sequence
  source 1..546: mol_type = other DNA
atggtgccccccccccccggcgaggagagccagaccgtgatcctgccccccggctggcagagctacctgagcccccagggcagaagatactacgtgaacaccaccaccaacgagaccacctgggagagacccagcagcagccccggcatccccgccagccccggcagccacagaagcagcctgccccccaccgtgaacggctaccacgccagcggcacccccgcccacccccccgagaccgcccacatgagcgtgagaaagagcaccggcgacagccagaacctgggcagcagcagccccagcaagaagcagagcaaggagaacaccatcaccgagctggagagactggaggtggagagagtggagatgatcagacagcacctgtgccagtacacccagctgagacacgagaccgacatgttcaaccagagcaccgtggagcccgtggaccagctgctgagaaaggtggaccccgccaaggacagagagctgtgggtgagagagcacaagaccggcaacatcagacccgtggacatggagatctag

SEQ ID NO: 83702 - DNA, 873 bp, synthetic construct
  misc_feature 1..873: note = Description of Artificial Sequence: Synthetic coding sequence
  source 1..873: mol_type = other DNA
atgcccgagcagcagctgctgaagcccaccgagtggagctactgcgactacttctgggccgacaagaaggacccccagggcaacggcaccgtggccggcttcgagctgctgctgcagaagcagctgaagggcaagcagatgcagaaggagatgagcgagttcatcagagagagaatcaagatcgaggaggactacgccaagaacctggccaagctgagccagaacagcctggccagccaggaggagggcagcctgggcgaggcctgggcccaggtgaagaagagcctggccgacgaggccgaggtgcacctgaagttcagcgccaagctgcacagcgaggtggagaagcccctgatgaacttcagagagaacttcaagaaggacatgaagaagtgcgaccaccacatcgccgacctgagaaagcagctggccagcagatacgccagcgtggagaaggccagaaaggccctgaccgagagacagagagacctggagatgaagacccagcagctggagatcaagctgagcaacaagaccgaggaggacatcaagaaggccagaagaaagagcacccaggccggcgacgacctgatgagatgcgtggacctgtacaaccaggcccagagcaagtggttcgaggagatggtgaccaccaccctggagctggagagactggaggtggagagagtggagatgatcagacagcacctgtgccagtacacccagctgagacacgagaccgacatgttcaaccagagcaccgtggagcccgtggaccagctgctgagaaaggtggaccccgccaaggacagagagctgtgggtgagagagcacaagaccggcaacatcagacccgtggacatggagatctag

SEQ ID NO: 83703 - DNA, 378 bp, synthetic construct
  misc_feature 1..378: note = Description of Artificial Sequence: Synthetic coding sequence
  source 1..378: mol_type = other DNA
atgaagacccagcagctggagatcaagctgagcaacaagaccgaggaggacatcaagaaggccagaagaaagagcacccaggccggcgacgacctgatgagatgcgtggacctgtacaaccaggcccagagcaagtggttcgaggagatggtgaccaccaccctggagctggagagactggaggtggagagagtggagatgatcagacagcacctgtgccagtacacccagctgagacacgagaccgacatgttcaaccagagcaccgtggagcccgtggaccagctgctgagaaaggtggaccccgccaaggacagagagctgtgggtgagagagcacaagaccggcaacatcagacccgtggacatggagatctag

SEQ ID NO: 83704 - DNA, 1011 bp, synthetic construct; identical to SEQ ID NO: 83698
  misc_feature 1..1011: note = Description of Artificial Sequence: Synthetic coding sequence
  source 1..1011: mol_type = other DNA

SEQ ID NO: 83705 - DNA, 1437 bp, synthetic construct
  misc_feature 1..1437: note = Description of Artificial Sequence: Synthetic coding sequence
  source 1..1437: mol_type = other DNA
atggcccccaagaagaagggcaagaagggcaaggccaagggcacccccatcgtggacggcctggcccccgaggacatgagcaaggagcaggtggaggagcacgtgagcagaatcagagaggagctggacagagagagagaggagagaaactacttccagctggagagagacaagatccacaccttctgggagatcaccagaagacagctggaggagaagaaggccgagctgagaaacaaggacagagagatggaggaggccgaggagagacaccaggtggagatcaaggtgtacaagcagaaggtgaagcacctgctgtacgagcaccagaacaacctgaccgagatgaaggccgagggcaccgtggtgatgaagctggcccagaaggagcacagaatccaggagagcgtgctgagaaaggacatgagagccctgaaggtggagctgaaggagcaggagctggccagcgaggtggtggtgaagaacctgagactgaagcacaccgaggagatcaccagaatgagaaacgacttcgagagacaggtgagagagatcgaggccaagtacgacaagaagatgaagatgctgagagacgagctggacctgagaagaaagaccgagctgcacgaggtggaggagagaaagaacggccagatccacaccctgatgcagagacacgaggaggccttcaccgacatcaagaactactacaacgacatcaccctgaacaacctggccctgatcaacagcctgaaggagcagatggaggacatgagaaagaaggaggaccacctggagagagagatggccgaggtgagcggccagaacaagagactggccgaccccctgcagaaggccagagaggagatgagcgagatgcagaagcagctggccaactacgagagagacaagcagatcctgctgtgcaccaaggccagactgaaggtgagagagaaggagctgaaggacctgcagtgggagcacgaggtgctggagcagagattcaccaaggtgcagcaggagagagacgagctgtacagaaagttcaccgccgccatccaggaggtgcagcagaagaccggcttcaagaacctggtgctggagagaaagctgcaggccctgagcgccgccgtggagaagaaggaggtgcagttcaacgaggtgctggccgccagcaacctggaccccgccgccctgaccctggtgagcagaaagctggaggacgtgctggagagcaagaacagcaccatcaaggacctgcagtacgagctggcccaggtgtgcaaggcccacaacgacctgctgagaacctacgaggccaagctgctggccttcggcatccccctggacaacgtgggcttcaagcccctggagaccgccgtgatcggccagaccctgggccagggccccgccggcctggtgggcacccccacctag

SEQ ID NO: 83706 - DNA, 1362 bp, synthetic construct
  misc_feature 1..1362: note = Description of Artificial Sequence: Synthetic coding sequence
  source 1..1362: mol_type = other DNA
atgagcaaggagcaggtggaggagcacgtgagcagaatcagagaggagctggacagagagagagaggagagaaactacttccagctggagagagacaagatccacaccttctgggagatcaccagaagacagctggaggagaagaaggccgagctgagaaacaaggacagagagatggaggaggccgaggagagacaccaggtggagatcaaggtgtacaagcagaaggtgaagcacctgctgtacgagcaccagaacaacctgaccgagatgaaggccgagggcaccgtggtgatgaagctggcccagaaggagcacagaatccaggagagcgtgctgagaaaggacatgagagccctgaaggtggagctgaaggagcaggagctggccagcgaggtggtggtgaagaacctgagactgaagcacaccgaggagatcaccagaatgagaaacgacttcgagagacaggtgagagagatcgaggccaagtacgacaagaagatgaagatgctgagagacgagctggacctgagaagaaagaccgagctgcacgaggtggaggagagaaagaacggccagatccacaccctgatgcagagacacgaggaggccttcaccgacatcaagaactactacaacgacatcaccctgaacaacctggccctgatcaacagcctgaaggagcagatggaggacatgagaaagaaggaggaccacctggagagagagatggccgaggtgagcggccagaacaagagactggccgaccccctgcagaaggccagagaggagatgagcgagatgcagaagcagctggccaactacgagagagacaagcagatcctgctgtgcaccaaggccagactgaaggtgagagagaaggagctgaaggacctgcagtgggagcacgaggtgctggagcagagattcaccaaggtgcagcaggagagagacgagctgtacagaaagttcaccgccgccatccaggaggtgcagcagaagaccggcttcaagaacctggtgctggagagaaagctgcaggccctgagcgccgccgtggagaagaaggaggtgcagttcaacgaggtgctggccgccagcaacctggaccccgccgccctgaccctggtgagcagaaagctggaggacgtgctggagagcaagaacagcaccatcaaggacctgcagtacgagctggcccaggtgtgcaaggcccacaacgacctgctgagaacctacgaggccaagctgctggccttcggcatccccctggacaacgtgggcttcaagcccctggagaccgccgtgatcggccagaccctgggccagggccccgccggcctggtgggcacccccacctag

SEQ ID NO: 83707 - DNA, 525 bp, synthetic construct
  misc_feature 1..525: note = Description of Artificial Sequence: Synthetic coding sequence
  source 1..525: mol_type = other DNA
atggcccccaagaagaagggcaagaagggcaaggccaagggcacccccatcgtggacggcctggcccccgaggacatgagcaaggagcaggtggaggagcacgtgagcagaatcagagaggagctggacagagagagagaggagagaaactacttccagctggagagagacaagatccacaccttctgggagatcaccagaagacagctggaggagaagaaggccgagctgagaaacaaggacagagagatggaggaggccgaggagagacaccaggtggagatcaaggtgtacaagcagaaggtgaagcacctgctgtacgagcaccagaacaacctgaccgagatgaaggccgagggcaccgtggtgatgaagctggcccagaaggagcacagaatccaggagagcgtgctgagaaaggacatgagagccctgaaggtggagctgaaggagcaggagctggccagcgaggtggtggtgaagaacctgagactgaagctgagacccagcatgatcagaagatag

SEQ ID NO: 83708 - DNA, 1149 bp, synthetic construct
  misc_feature 1..1149: note = Description of Artificial Sequence: Synthetic coding sequence
  source 1..1149: mol_type = other DNA
atggtggaggagcacgtgagcagaatcagagaggagctggacagagagagagaggagagaaactacttccagctggagagagacaagatccacaccttctgggagatcaccagaagacagctggaggagaagaaggccgagctgagaaacaaggacagagagatggaggaggccgaggagagacaccaggtggagatcaaggtgtacaagcagaaggtgaagcacctgctgtacgagcaccagaacaacctgaccgagatgaaggccgagggcaccgtggtgatgaagctggcccagaaggagcacagaatccaggagagcgtgctgagaaaggacatgagagccctgaaggtggagctgaaggagcaggagctggccagcgaggtggtggtgaagaacctgagactgaagcacaccgaggagatcaccagaatgagaaacgacttcgagagacaggtgagagagatcgaggccaagtacgacaagaagatgaagatgctgagagacgagctggacctgagaagaaagaccgagctgcacgaggtggaggagagaaagaacggccagatccacaccctgatgcagagacacgaggaggccttcaccgacatcaagaactactacaacgacatcaccctgaacaacctggccctgatcaacagcctgaaggagcagatggaggacatgagaaagaaggaggaccacctggagagagagatggccgaggtgagcggccagaacaagagactggccgaccccctgcagaaggccagagaggagatgagcgagatgcagaagcagctggccaactacgagagagacaagcagatcctgctgtgcaccaaggccagactgaaggtgagagagaaggagctgaaggacctgcagtgggagcacgaggtgctggagcagagattcaccaaggtgcagcaggagagagacgagctgtacagaaagttcaccgccgccatccaggaggtgcagcagaagaccggcttcaagaacctggtgctggagagaaagctgcaggccctgagcgccgccgtggagaagaaggaggtgcagttcaacgaggtgctggccgccagcaacctggaccccgccgccctgaccctggtgagcagaaagctggagaccttcttctgctag

SEQ ID NO: 83709 - DNA, 717 bp, synthetic construct
  misc_feature 1..717: note = Description of Artificial Sequence: Synthetic coding sequence
  source 1..717: mol_type = other DNA
atgctgtgctgcatgagaagaaccaagcaggtggagaagaacgacgacgaccagaagatcgagcaggacggcatcaagcccgaggacaaggcccacaaggccgccaccaagatccaggccagcttcagaggccacatcaccagaaagaagctgaagggcgagaagaaggacgacgtgcaggccgccgaggccgaggccaacaagaaggacgaggcccccgtggccgacggcgtggagaagaagggcgagggcaccaccaccgccgaggccgcccccgccaccggcagcaagcccgacgagcccggcaaggccggcgagacccccagcgaggagaagaagggcgagggcgacgccgccaccgagcaggccgccccccaggcccccgccagcagcgaggagaaggccggcagcgccgagaccgagagcgccaccaaggccagcaccgacaacagccccagcagcaaggccgaggacgcccccgccaaggaggagcccaagcaggccgacgtgcccgccgccgtgaccgccgccgccgccaccacccccgccgccgaggacgccgccgccaaggccaccgcccagccccccaccgagaccggcgagagcagccaggccgaggagaacatcgaggccgtggacgagaccaagcccaaggagagcgccagacaggacgagggcaaggaggaggagcccgaggccgaccaggagcacgcctag

SEQ ID NO: 83710 - DNA, 825 bp, synthetic construct
  misc_feature 1..825: note = Description of Artificial Sequence: Synthetic coding sequence
  source 1..825: mol_type = other DNA
atgaccaagagctgcagcgagctgtgccaccccgccctgcacttcctgccctgcctgggcggcctgagaaagaacctgcagagagccgtgagacccagcccctacagcctgggcttcctgaccttctggatcagcagagtggagaagaacgacgacgaccagaagatcgagcaggacggcatcaagcccgaggacaaggcccacaaggccgccaccaagatccaggccagcttcagaggccacatcaccagaaagaagctgaagggcgagaagaaggacgacgtgcaggccgccgaggccgaggccaacaagaaggacgaggcccccgtggccgacggcgtggagaagaagggcgagggcaccaccaccgccgaggccgcccccgccaccggcagcaagcccgacgagcccggcaaggccggcgagacccccagcgaggagaagaagggcgagggcgacgccgccaccgagcaggccgccccccaggcccccgccagcagcgaggagaaggccggcagcgccgagaccgagagcgccaccaaggccagcaccgacaacagccccagcagcaaggccgaggacgcccccgccaaggaggagcccaagcaggccgacgtgcccgccgccgtgaccgccgccgccgccaccacccccgccgccgaggacgccgccgccaaggccaccgcccagccccccaccgagaccggcgagagcagccaggccgaggagaacatcgaggccgtggacgagaccaagcccaaggagagcgccagacaggacgagggcaaggaggaggagcccgaggccgaccaggagcacgcctag

SEQ ID NO: 83711 - DNA, 1119 bp, synthetic construct
  misc_feature 1..1119: note = Description of Artificial Sequence: Synthetic coding sequence
  source 1..1119: mol_type = other DNA
atgccccccccccagcagggcccctgcggccaccacctgctgctgctgctggccctgctgctgcccagcctgcccctgaccagagcccccgtgccccccggccccgccgccgccctgctgcaggccctgggcctgagagacgagccccagggcgcccccagactgagacccgtgccccccgtgatgtggagactgttcagaagaagagacccccaggagaccagaagcggcagcagaagaaccagccccggcgtgaccctgcagccctgccacgtggaggagctgggcgtggccggcaacatcgtgagacacatccccgacagaggcgcccccaccagagccagcgagcccgccagcgccgccggccactgccccgagtggaccgtggtgttcgacctgagcgccgtggagcccgccgagagacccagcagagccagactggagctgagattcgccgccgccgccgccgccgcccccgagggcggctgggagctgagcgtggcccaggccggccagggcgccggcgccgaccccggccccgtgctgctgagacagctggtgcccgccctgggcccccccgtgagagccgagctgctgggcgccgcctgggccagaaacgccagctggcccagaagcctgagactggccctggccctgagacccagagcccccgccgcctgcgccagactggccgaggccagcctgctgctggtgaccctggaccccagactgtgccaccccctggccagacccagaagagacgccgagcccgtgctgggcggcggccccggcggcgcctgcagagccagaagactgtacgtgagcttcagagaggtgggctggcacagatgggtgatcgcccccagaggcttcctggccaactactgccagggccagtgcgccctgcccgtggccctgagcggcagcggcggcccccccgccctgaaccacgccgtgctgagagccctgatgcacgccgccgcccccggcgccgccgacctgccctgctgcgtgcccgccagactgagccccatcagcgtgctgttcttcgacaacagcgacaacgtggtgctgagacagtacgaggacatggtggtggacgagtgcggctgcagatag

SEQ ID NO: 83712 - DNA, 1224 bp, synthetic construct
  misc_feature 1..1224: note = Description of Artificial Sequence: Synthetic coding sequence
  source 1..1224: mol_type = other DNA
atggtgctggccgcccccctgctgctgggcttcctgctgctggccctggagctgagacccagaggcgaggccgccgagggccccgccgccgccgccgccgccgccgccgccgccgccgccgccggcgtgggcggcgagagaagcagcagacccgcccccagcgtggcccccgagcccgacggctgccccgtgtgcgtgtggagacagcacagcagagagctgagactggagagcatcaagagccagatcctgagcaagctgagactgaaggaggcccccaacatcagcagagaggtggtgaagcagctgctgcccaaggccccccccctgcagcagatcctggacctgcacgacttccagggcgacgccctgcagcccgaggacttcctggaggaggacgagtaccacgccaccaccgagaccgtgatcagcatggcccaggagaccgaccccgccgtgcagaccgacggcagccccctgtgctgccacttccacttcagccccaaggtgatgttcaccaaggtgctgaaggcccagctgtgggtgtacctgagacccgtgcccagacccgccaccgtgtacctgcagatcctgagactgaagcccctgaccggcgagggcaccgccggcggcggcggcggcggcagaagacacatcagaatcagaagcctgaagatcgagctgcacagcagaagcggccactggcagagcatcgacttcaagcaggtgctgcacagctggttcagacagccccagagcaactggggcatcgagatcaacgccttcgaccccagcggcaccgacctggccgtgaccagcctgggccccggcgccgagggcctgcaccccttcatggagctgagagtgctggagaacaccaagagaagcagaagaaacctgggcctggactgcgacgagcacagcagcgagagcagatgctgcagataccccctgaccgtggacttcgaggccttcggctgggactggatcatcgcccccaagagatacaaggccaactactgcagcggccagtgcgagtacatgttcatgcagaagtacccccacacccacctggtgcagcaggccaaccccagaggcagcgccggcccctgctgcacccccaccaagatgagccccatcaacatgctgtacttcaacgacaagcagcagatcatctacggcaagatccccggcatggtggtggacagatgcggctgcagctag

SEQ ID NO: 83713 - DNA, 1143 bp, synthetic construct
  misc_feature 1..1143: note = Description of Artificial Sequence: Synthetic coding sequence
  source 1..1143: mol_type = other DNA
tgagccgccgccgccgccgccgccgccgccgccgccgccgccggcgtgggcggcgagagaagcagcagacccgcccccagcgtggcccccgagcccgacggctgccccgtgtgcgtgtggagacagcacagcagagagctgagactggagagcatcaagagccagatcctgagcaagctgagactgaaggaggcccccaacatcagcagagaggtggtgaagcagctgctgcccaaggccccccccctgcagcagatcctggacctgcacgacttccagggcgacgccctgcagcccgaggacttcctggaggaggacgagtaccacgccaccaccgagaccgtgatcagcatggcccaggagaccgaccccgccgtgcagaccgacggcagccccctgtgctgccacttccacttcagccccaaggtgatgttcaccaaggtgctgaaggcccagctgtgggtgtacctgagacccgtgcccagacccgccaccgtgtacctgcagatcctgagactgaagcccctgaccggcgagggcaccgccggcggcggcggcggcggcagaagacacatcagaatcagaagcctgaagatcgagctgcacagcagaagcggccactggcagagcatcgacttcaagcaggtgctgcacagctggttcagacagccccagagcaactggggcatcgagatcaacgccttcgaccccagcggcaccgacctggccgtgaccagcctgggccccggcgccgagggcctgcaccccttcatggagctgagagtgctggagaacaccaagagaagcagaagaaacctgggcctggactgcgacgagcacagcagcgagagcagatgctgcagataccccctgaccgtggacttcgaggccttcggctgggactggatcatcgcccccaagagatacaaggccaactactgcagcggccagtgcgagtacatgttcatgcagaagtacccccacacccacctggtgcagcaggccaaccccagaggcagcgccggcccctgctgcacccccaccaagatgagccccatcaacatgctgtacttcaacgacaagcagcagatcatctacggcaagatccccggcatggtggtggacagatgcggctgcagctag

SEQ ID NO: 83714 - DNA, 927 bp, synthetic construct
  misc_feature 1..927: note = Description of Artificial Sequence: Synthetic coding sequence
  source 1..927: mol_type = other DNA
atgcccggccaggagctgagaaccgtgaacggcagccagatgctgctggtgctgctggtgctgagctggctgccccacggcggcgccctgagcctggccgaggccagcagagccagcttccccggccccagcgagctgcacagcgaggacagcagattcagagagctgagaaagagatacgaggacctgctgaccagactgagagccaaccagagctgggaggacagcaacaccgacctggtgcccgcccccgccgtgagaatcctgacccccgaggtgagactgggcagcggcggccacctgcacctgagaatcagcagagccgccctgcccgagggcctgcccgaggccagcagactgcacagagccctgttcagactgagccccaccgccagcagaagctgggacgtgaccagacccctgagaagacagctgagcctggccagaccccaggcccccgccctgcacctgagactgagccccccccccagccagagcgaccagctgctggccgagagcagcagcgccagaccccagctggagctgcacctgagaccccaggccgccagaggcagaagaagagccagagccagaaacggcgaccactgccccctgggccccggcagatgctgcagactgcacaccgtgagagccagcctggaggacctgggctgggccgactgggtgctgagccccagagaggtgcaggtgaccatgtgcatcggcgcctgccccagccagttcagagccgccaacatgcacgcccagatcaagaccagcctgcacagactgaagcccgacaccgtgcccgccccctgctgcgtgcccgccagctacaaccccatggtgctgatccagaagaccgacaccggcgtgagcctgcagacctacgacgacctgctggccaaggactgccactgcatctag

SEQ ID NO: 83715 - DNA, 927 bp, synthetic construct; identical to SEQ ID NO: 83714
  misc_feature 1..927: note = Description of Artificial Sequence: Synthetic coding sequence
  source 1..927: mol_type = other DNA

SEQ ID NO: 83716 - DNA, 1290 bp, synthetic construct
  misc_feature 1..1290: note = Description of Artificial Sequence: Synthetic coding sequence
  source 1..1290: mol_type = other DNA
atgtgccccggcgccctgtgggtggccctgcccctgctgagcctgctggccggcagcctgcagggcaagcccctgcagagctggggcagaggcagcgccggcggcaacgcccacagccccctgggcgtgcccggcggcggcctgcccgagcacaccttcaacctgaagatgttcctggagaacgtgaaggtggacttcctgagaagcctgaacctgagcggcgtgcccagccaggacaagaccagagtggagcccccccagtacatgatcgacctgtacaacagatacaccagcgacaagagcaccacccccgccagcaacatcgtgagaagcttcagcatggaggacgccatcagcatcaccgccaccgaggacttccccttccagaagcacatcctgctgttcaacatcagcatccccagacacgagcagatcaccagagccgagctgagactgtacgtgagctgccagaaccacgtggaccccagccacgacctgaagggcagcgtggtgatctacgacgtgctggacggcaccgacgcctgggacagcgccaccgagaccaagaccttcctggtgagccaggacatccaggacgagggctgggagaccctggaggtgagcagcgccgtgaagagatgggtgagaagcgacagcaccaagagcaagaacaagctggaggtgaccgtggagagccacagaaagggctgcgacaccctggacatcagcgtgccccccggcagcagaaacctgcccttcttcgtggtgttcagcaacgaccacagcagcggcaccaaggagaccagactggagctgagagagatgatcagccacgagcaggagagcgtgctgaagaagctgagcaaggacggcagcaccgaggccggcgagagcagccacgaggaggacaccgacggccacgtggccgccggcagcaccctggccagaagaaagagaagcgccggcgccggcagccactgccagaagaccagcctgagagtgaacttcgaggacatcggctgggacagctggatcatcgcccccaaggagtacgaggcctacgagtgcaagggcggctgcttcttccccctggccgacgacgtgacccccaccaagcacgccatcgtgcagaccctggtgcacctgaagttccccaccaaggtgggcaaggcctgctgcgtgcccaccaagctgagccccatcagcgtgctgtacaaggacgacatgggcgtgcccaccctgaagtaccactacgagggcatgagcgtggccgagtgcggctgcagatag

SEQ ID NO: 83717 - DNA, 1095 bp, synthetic construct
  misc_feature 1..1095: note = Description of Artificial Sequence: Synthetic coding sequence
  source 1..1095: mol_type = other DNA
atgctgagattcctgcccgacctggccttcagcttcctgctgatcctggccctgggccaggccgtgcagttccaggagtacgtgttcctgcagttcctgggcctggacaaggcccccagcccccagaagttccagcccgtgccctacatcctgaagaagatcttccaggacagagaggccgccgccaccaccggcgtgagcagagacctgtgctacgtgaaggagctgggcgtgagaggcaacgtgctgagattcctgcccgaccagggcttcttcctgtaccccaagaagatcagccaggccagcagctgcctgcagaagctgctgtacttcaacctgagcgccatcaaggagagagagcagctgaccctggcccagctgggcctggacctgggccccaacagctactacaacctgggccccgagctggagctggccctgttcctggtgcaggagccccacgtgtggggccagaccacccccaagcccggcaagatgttcgtgctgagaagcgtgccctggccccagggcgccgtgcacttcaacctgctggacgtggccaaggactggaacgacaaccccagaaagaacttcggcctgttcctggagatcctggtgaaggaggacagagacagcggcgtgaacttccagcccgaggacacctgcgccagactgagatgcagcctgcacgccagcctgctggtggtgaccctgaaccccgaccagtgccaccccagcagaaagagaagagccgccatccccgtgcccaagctgagctgcaagaacctgtgccacagacaccagctgttcatcaacttcagagacctgggctggcacaagtggatcatcgcccccaagggcttcatggccaactactgccacggcgagtgccccttcagcctgaccatcagcctgaacagcagcaactacgccttcatgcaggccctgatgcacgccgtggaccccgagatcccccaggccgtgtgcatccccaccaagctgagccccatcagcatgctgtaccaggacaacaacgacaacgtgatcctgagacactacgaggacatggtggtggacgagtgcggctgcggctag

SEQ ID NO: 83718 - DNA, 1506 bp, synthetic construct
  misc_feature 1..1506: note = Description of Artificial Sequence: Synthetic coding sequence
  source 1..1506: mol_type = other DNA
atgagactgcccaagctgctgaccttcctgctgtggtacctggcctggctggacctggagttcatctgcaccgtgctgggcgcccccgacctgggccagagaccccagggcaccagacccggcctggccaaggccgaggccaaggagagaccccccctggccagaaacgtgttcagacccggcggccacagctacggcggcggcgccaccaacgccaacgccagagccaagggcggcaccggccagaccggcggcctgacccagcccaagaaggacgagcccaagaagctgccccccagacccggcggccccgagcccaagcccggccaccccccccagaccagacaggccaccgccagaaccgtgacccccaagggccagctgcccggcggcaaggccccccccaaggccggcagcgtgcccagcagcttcctgctgaagaaggccagagagcccggcccccccagagagcccaaggagcccttcagacccccccccatcaccccccacgagtacatgctgagcctgtacagaaccctgagcgacgccgacagaaagggcggcaacagcagcgtgaagctggaggccggcctggccaacaccatcaccagcttcatcgacaagggccaggacgacagaggccccgtggtgagaaagcagagatacgtgttcgacatcagcgccctggagaaggacggcctgctgggcgccgagctgagaatcctgagaaagaagcccagcgacaccgccaagcccgccgcccccggcggcggcagagccgcccagctgaagctgagcagctgccccagcggcagacagcccgccagcctgctggacgtgagaagcgtgcccggcctggacggcagcggctgggaggtgttcgacatctggaagctgttcagaaacttcaagaacagcgcccagctgtgcctggagctggaggcctgggagagaggcagagccgtggacctgagaggcctgggcttcgacagagccgccagacaggtgcacgagaaggccctgttcctggtgttcggcagaaccaagaagagagacctgttcttcaacgagatcaaggccagaagcggccaggacgacaagaccgtgtacgagtacctgttcagccagagaagaaagagaagagcccccctggccaccagacagggcaagagacccagcaagaacctgaaggccagatgcagcagaaaggccctgcacgtgaacttcaaggacatgggctgggacgactggatcatcgcccccctggagtacgaggccttccactgcgagggcctgtgcgagttccccctgagaagccacctggagcccaccaaccacgccgtgatccagaccctgatgaacagcatggaccccgagagcaccccccccacctgctgcgtgcccaccagactgagccccatcagcatcctgttcatcgacagcgccaacaacgtggtgtacaagcagtacgaggacatggtggtggagagctgcggctgcagatag

SEQ ID NO: 83719 - DNA, 1506 bp, synthetic construct; identical to SEQ ID NO: 83718
  misc_feature 1..1506: note = Description of Artificial Sequence: Synthetic coding sequence
  source 1..1506: mol_type = other DNA

SEQ ID NO: 83720 - DNA, 1368 bp, synthetic construct
  misc_feature 1..1368: note = Description of Artificial Sequence: Synthetic coding sequence
  source 1..1368: mol_type = other DNA
atggacacccccagagtgctgctgagcgccgtgttcctgatcagcttcctgtgggacctgcccggcttccagcaggccagcatcagcagcagcagcagcagcgccgagctgggcagcaccaagggcatgagaagcagaaaggagggcaagatgcagagagcccccagagacagcgacgccggcagagagggccaggagccccagcccagaccccaggacgagcccagagcccagcagcccagagcccaggagccccccggcagaggccccagagtggtgccccacgagtacatgctgagcatctacagaacctacagcatcgccgagaagctgggcatcaacgccagcttcttccagagcagcaagagcgccaacaccatcaccagcttcgtggacagaggcctggacgacctgagccacacccccctgagaagacagaagtacctgttcgacgtgagcatgctgagcgacaaggaggagctggtgggcgccgagctgagactgttcagacaggcccccagcgccccctggggcccccccgccggccccctgcacgtgcagctgttcccctgcctgagccccctgctgctggacgccagaaccctggacccccagggcgccccccccgccggctgggaggtgttcgacgtgtggcagggcctgagacaccagccctggaagcagctgtgcctggagctgagagccgcctggggcgagctggacgccggcgaggccgaggccagagccagaggcccccagcagccccccccccccgacctgagaagcctgggcttcggcagaagagtgagacccccccaggagagagccctgctggtggtgttcaccagaagccagagaaagaacctgttcgccgagatgagagagcagctgggcagcgccgaggccgccggccccggcgccggcgccgagggcagctggcccccccccagcggcgcccccgacgccagaccctggctgcccagccccggcagaagaagaagaagaaccgccttcgccagcagacacggcaagagacacggcaagaagagcagactgagatgcagcaagaagcccctgcacgtgaacttcaaggagctgggctgggacgactggatcatcgcccccctggagtacgaggcctaccactgcgagggcgtgtgcgacttccccctgagaagccacctggagcccaccaaccacgccatcatccagaccctgatgaacagcatggaccccggcagcaccccccccagctgctgcgtgcccaccaagctgacccccatcagcatcctgtacatcgacgccggcaacaacgtggtgtacaagcagtacgaggacatggtggtggagagctgcggctgcagatag

SEQ ID NO: 83721 - DNA, 1062 bp, synthetic construct
  misc_feature 1..1062: note = Description of Artificial Sequence: Synthetic coding sequence
  source 1..1062: mol_type = other DNA
atggacacccccagagtgctgctgagcgccgtgttcctgatcagcttcctgtgggacctgcccggcttccagcaggccagcatcagcagcagcagcagcagcgccgagctgggcagcaccaagggcatgagaagcagaaaggagggcaagatgcagagagcccccagagacagcgacgccggcagagagggccaggagccccagcccagaccccaggacgagcccagagcccagcagcccagagcccaggagccccccggcagaggccccagagtggtgccccacgagtacatgctgagcatctacagaacctacagcatcgccgagaagctgggcatcaacgccagcttcttccagagcagcaagagcgccaacaccatcaccagcttcgtggacagaggcctggacgacctgagccacacccccctgagaagacagaagtacctgttcgacgtgagcatgctgagcgacaaggaggagctggtgggcgccgagctgagactgttcagacaggcccccagcgccccctggggcccccccgccggccccctgcacgtgcagctgttcccctgcctgagccccctgctgctggacgccagaaccctggacccccagggcgccccccccgccggctgggaggtgttcgacgtgtggcagggcctgagacaccagccctggaagcagctgtgcctggagctgagagccgcctggggcgagctggacgccggcgaggccgaggccagagccagaggcccccagcagccccccccccccgacctgagaagcctgggcttcggcagaagagtgagacccccccaggagagagccctgctggtggtgttcaccagaagccagagaaagaacctgttcgcccccggcgtgagaggcctgagcctgagaggctgcatgagactgcccgccgccctggcccccggcgcccaccagcccagacaccaccccgacgccgacgagctgcacggccccagactgcaccccgcccagctgctgagagcccaccagatcgacagccaccagcacagcatccacagaagaggccagtag

SEQ ID NO: 83722 - DNA, 816 bp, synthetic construct
  misc_feature 1..816: note = Description of Artificial Sequence: Synthetic coding sequence
  source 1..816: mol_type = other DNA
atggacacccccagagtgctgctgagcgccgtgttcctgatcagcttcctgtgggacctgcccggcttccagcaggccagcatcagcagcagcagcagcagcgccgagctgggcagcaccaagggcatgagaagcagaaaggagggcaagatgcagagagcccccagagacagcgacgccggcagagagggccaggagccccagcccagaccccaggacgagcccagagcccagcagcccagagcccaggagccccccggcagaggccccagagtggtgccccacgagtacatgctgagcatctacagaacctacagcatcgccgagaagctgggcatcaacgccagcttcttccagagcagcaagagcgccaacaccatcaccagcttcgtggacagaggcctggacgacctgagccacacccccctgagaagacagaagtacctgttcgacgtgagcatgctgagcgacaaggaggagctggtgggcgccgagctgagactgttcagacaggcccccagcgccccctggggcccccccgccggccccctgcacgtgcagctgttcccctgcctgagccccctgctgctggacgccagaaccctggacccccagggcgccccccccgccggctgggaggtgttcgacgtgtggcagggcctgagacaccagccctggaagcagctgtgcctggagctgagagccgcccccggccccgccgagagcggcctgagacccgagggcgccgccagccccggcgccggccccgccggcggcatccaccagatccccgccgccgcctgcccccccaactag

SEQ ID NO: 83723 - DNA, 1353 bp, synthetic construct
  misc_feature 1..1353: note = Description of Artificial Sequence: Synthetic coding sequence
  source 1..1353: mol_type = other DNA
atggacctgagcgccgccgccgccctgtgcctgtggctgctgagcgcctgcagacccagagacggcctggaggccgccgccgtgctgagagccgccggcgccggccccgtgagaagccccggcggcggcggcggcggcggcggcggcggcagaaccctggcccaggccgccggcgccgccgccgtgcccgccgccgccgtgcccagagccagagccgccagaagagccgccggcagcggcttcagaaacggcagcgtggtgccccaccacttcatgatgagcctgtacagaagcctggccggcagagcccccgccggcgccgccgccgtgagcgccagcggccacggcagagccgacaccatcaccggcttcaccgaccaggccacccaggacgagagcgccgccgagaccggccagagcttcctgttcgacgtgagcagcctgaacgacgccgacgaggtggtgggcgccgagctgagagtgctgagaagaggcagccccgagagcggccccggcagctggaccagcccccccctgctgctgctgagcacctgccccggcgccgccagagcccccagactgctgtacagcagagccgccgagcccctggtgggccagagatgggaggccttcgacgtggccgacgccatgagaagacacagaagagagcccagaccccccagagccttctgcctgctgctgagagccgtggccggccccgtgcccagccccctggccctgagaagactgggcttcggctggcccggcggcggcggcagcgccgccgaggagagagccgtgctggtggtgagcagcagaacccagagaaaggagagcctgttcagagagatcagagcccaggccagagccctgggcgccgccctggccagcgagcccctgcccgaccccggcaccggcaccgccagccccagagccgtgatcggcggcagaagaagaagaagaaccgccctggccggcaccagaaccgcccagggcagcggcggcggcgccggcagaggccacggcagaagaggcagaagcagatgcagcagaaagcccctgcacgtggacttcaaggagctgggctgggacgactggatcatcgcccccctggactacgaggcctaccactgcgagggcctgtgcgacttccccctgagaagccacctggagcccaccaaccacgccatcatccagaccctgctgaacagcatggcccccgacgccgcccccgccagctgctgcgtgcccgccagactgagccccatcagcatcctgtacatcgacgccgccaacaacgtggtgtacaagcagtacgaggacatggtggtggaggcctgcggctgcagatag

SEQ ID NO: 83724 - DNA, 1269 bp, synthetic construct
  misc_feature 1..1269: note = Description of Artificial Sequence: Synthetic coding sequence
  source 1..1269: mol_type = other DNA
atgcccagaagcttcctggtgaagagcaagaaggcccacagctaccaccagcccagaagccccggccccgactacagcctgagactggagaacgtgcccgcccccagcagagccgacagcaccagcaacgccggcggcgccaaggccgagcccagagacagactgagccccgagagccagctgaccgaggcccccgacagagccagcgccagccccgacagctgcgagggcagcgtgtgcgagagaagcagcgagttcgaggacttctggagaccccccagccccagcgccagccccgccagcgagaagagcatgtgccccagcctggacgaggcccagcccttccccctgcccttcaagccctacagctggagcggcctggccggcagcgacctgagacacctggtgcagagctacagaccctgcggcgccctggagagaggcgccggcctgggcctgttctgcgagcccgcccccgagcccggccaccccgccgccctgtacggccccaagagagccgccggcggcgccggcgccggcgcccccggcagctgcagcgccggcgccggcgccaccgccggccccggcctgggcctgtacggcgacttcggcagcgccgccgccggcctgtacgagagacccaccgccgccgccggcctgctgtaccccgagagaggccacggcctgcacgccgacaagggcgccggcgtgaaggtggagagcgagctgctgtgcaccagactgctgctgggcggcggcagctacaagtgcatcaagtgcagcaaggtgttcagcaccccccacggcctggaggtgcacgtgagaagaagccacagcggcaccagacccttcgcctgcgagatgtgcggcaagaccttcggccacgccgtgagcctggagcagcacaaggccgtgcacagccaggagagaagcttcgactgcaagatctgcggcaagagcttcaagagaagcagcaccctgagcacccacctgctgatccacagcgacaccagaccctacccctgccagtactgcggcaagagattccaccagaagagcgacatgaagaagcacaccttcatccacaccggcgagaagccccacaagtgccaggtgtgcggcaaggccttcagccagagcagcaacctgatcacccacagcagaaagcacaccggcttcaagcccttcggctgcgacctgtgcggcaagggcttccagagaaaggtggacctgagaagacacagagagacccagcacggcctgaagtag

SEQ ID NO: 83725 - DNA, 1269 bp, synthetic construct; identical to SEQ ID NO: 83724
  misc_feature 1..1269: note = Description of Artificial Sequence: Synthetic coding sequence
  source 1..1269: mol_type = other DNA

SEQ ID NO: 83726 - DNA, 1269 bp, synthetic construct; identical to SEQ ID NO: 83724
  misc_feature 1..1269: note = Description of Artificial Sequence: Synthetic coding sequence
  source 1..1269: mol_type = other DNA

SEQ ID NO: 83727 - DNA, 993 bp, synthetic construct
  misc_feature 1..993: note = Description of Artificial Sequence: Synthetic coding sequence
  source 1..993: mol_type = other DNA
atgcccagaagcttcctggtgaagagcaagaaggcccacacctaccaccagcccagagtgcaggaggacgagcccctgtggccccccgccctgacccccgtgcccagagaccaggcccccagcaacagccccgtgctgagcaccctgttccccaaccagtgcctggactggaccaacctgaagagagagcccgagctggagcaggaccagaacctggccagaatggcccccgcccccgagggccccatcgtgctgagcagaccccaggacggcgacagccccctgagcgacagcccccccttctacaagcccagcttcagctgggacaccctggccaccacctacggccacagctacagacaggcccccagcaccatgcagagcgccttcctggagcacagcgtgagcctgtacggcagccccctggtgcccagcaccgagcccgccctggacttcagcctgagatacagccccggcatggacgcctaccactgcgtgaagtgcaacaaggtgttcagcaccccccacggcctggaggtgcacgtgagaagaagccacagcggcaccagacccttcgcctgcgacatctgcggcaagaccttcggccacgccgtgagcctggagcagcacacccacgtgcacagccaggagagaagcttcgagtgcagaatgtgcggcaaggccttcaagagaagcagcaccctgagcacccacctgctgatccacagcgacaccagaccctacccctgccagttctgcggcaagagattccaccagaagagcgacatgaagaagcacacctacatccacaccggcgagaagccccacaagtgccaggtgtgcggcaaggccttcagccagagcagcaacctgatcacccacagcagaaagcacaccggcttcaagcccttcagctgcgagctgtgcaccaagggcttccagagaaaggtggacctgagaagacacagagagagccagcacaacctgaagtag

SEQ ID NO: 83728 - DNA, 993 bp, synthetic construct; identical to SEQ ID NO: 83727
  misc_feature 1..993: note = Description of Artificial Sequence: Synthetic coding sequence
  source 1..993: mol_type = other DNA

SEQ ID NO: 83729 - DNA, 855 bp, synthetic construct
  misc_feature 1..855: note = Description of Artificial Sequence: Synthetic coding sequence
  source 1..855: mol_type = other DNA
atgcccagaagcttcctggtgaagagcaagaaggcccacacctaccaccagcccagagtgcaggaggacgagcccctgtggccccccgccctgacccccgtgcccagagaccaggcccccagcaacagccccgtgctgagcaccctgttccccaaccagtgcctggactggaccaacctgaagagagagcccgagctggagcaggaccagaacctggccagaatggcccccgcccccgagggccccatcgtgctgagcagaccccaggacggcgacagccccctgagcgacagcccccccttctacaagcccagcttcagctgggacaccctggccaccacctacggccacagctacagacaggcccccagcaccatgcagagcgccttcctggagcacagcgtgagcctgtacggcagccccctggtgcccagcaccgagcccgccctggacttcagcctgagatacagccccggcatggacgcctaccactgcgtgaagtgcaacaaggagagaagcttcgagtgcagaatgtgcggcaaggccttcaagagaagcagcaccctgagcacccacctgctgatccacagcgacaccagaccctacccctgccagttctgcggcaagagattccaccagaagagcgacatgaagaagcacacctacatccacaccggcgagaagccccacaagtgccaggtgtgcggcaaggccttcagccagagcagcaacctgatcacccacagcagaaagcacaccggcttcaagcccttcagctgcgagctgtgcaccaagggcttccagagaaaggtggacctgagaagacacagagagagccagcacaacctgaagtag

SEQ ID NO: 83730 - DNA, 855 bp, synthetic construct; identical to SEQ ID NO: 83729
  misc_feature 1..855: note = Description of Artificial Sequence: Synthetic coding sequence
  source 1..855: mol_type = other DNA

SEQ ID NO: 83731 - DNA, 993 bp, synthetic construct; identical to SEQ ID NO: 83727
  misc_feature 1..993: note = Description of Artificial Sequence: Synthetic coding sequence
  source 1..993: mol_type = other DNA

SEQ ID NO: 83732 - DNA, 855 bp, synthetic construct; identical to SEQ ID NO: 83729
  misc_feature 1..855: note = Description of Artificial Sequence: Synthetic coding sequence
  source 1..855: mol_type = other DNA

SEQ ID NO: 83733 - DNA, 1623 bp, synthetic construct
  misc_feature 1..1623: note = Description of Artificial Sequence: Synthetic coding sequence
  source 1..1623: mol_type = other DNA
atgaccaccagcctgcaggacggccagagcgccgccagcagagccgccgccagagacagccccctggccgcccaggtgtgcggcgccgcccagggcagaggcgacgcccacgacctggcccccgccccctggctgcacgccagagccctgctgcccctgcccgacggcaccagaggctgcgccgccgacagaagaaagaagaaggacctggacgtgcccgagatgcccagcatccccaaccccttccccgagctgtgctgcagccccttcaccagcgtgctgagcgccgacctgttccccaaggccaacagcagaaagaagcaggtgatcaaggtgtacagcgaggacgagaccagcagagccctggacgtgcccagcgacatcaccgccagagacgtgtgccagctgctgatcctgaagaaccactacatcgacgaccacagctggaccctgttcgagcacctgccccacatcggcgtggagagaaccatcgaggaccacgagctggtgatcgaggtgctgagcaactggggcatcgaggaggagaacaagctgtacttcagaaagaactacgccaagtacgagttcttcaagaaccccatgtacttcttccccgagcacatggtgagcttcgccaccgagaccaacggcgagatcagccccacccagatcctgcagatgttcctgagcagcagcacctaccccgagatccacggcttcctgcacgccaaggagcagggcaagaagagctggaagaagatctacttcttcctgagaagaagcggcctgtacttcagcaccaagggcaccagcaaggagcccagacacctgcagttcttcagcgagttcggcaacagcgacatctacgtgagcctggccggcaagaagaagcacggcgcccccaccaactacggcttctgcttcaagcccaacaaggccggcggccccagagacctgaagatgctgtgcgccgaggaggagcagagcagaacctgctgggtgaccgccatcagactgctgaagtacggcatgcagctgtaccagaactacatgcacccctaccagggcagaagcggctgcagcagccagagcatcagccccatgagaagcatcagcgagaacagcctggtggccatggacttcagcggccagaagagcagagtgatcgagaaccccaccgaggccctgagcgtggccgtggaggagggcctggcctggagaaagaagggctgcctgagactgggcacccacggcagccccaccgccagcagccagagcagcgccaccaacatggccatccacagaagccagccctggttccaccacaagatcagcagagacgaggcccagagactgatcatccagcagggcctggtggacggcgtgttcctggtgagagacagccagagcaaccccaagaccttcgtgctgagcatgagccacggccagaagatcaagcacttccagatcatccccgtggaggacgacggcgagatgttccacaccctggacgacggccacaccagattcaccgacctgatccagctggtggagttctaccagctgaacaagggcgtgctgccctgcaagctgaagcactactgcgccagaatcgccctgtag

SEQ ID NO: 83734 - DNA, 1362 bp, synthetic construct
  misc_feature 1..1362: note = Description of Artificial Sequence: Synthetic coding sequence
  source 1..1362: mol_type = other DNA
atgagcctgagcgccagaagagtgaccctgcccgccatcacccccatcatcctgcagaagagagtgatcaaggtgtacagcgaggacgagaccagcagagccctggacgtgcccagcgacatcaccgccagagacgtgtgccagctgctgatcctgaagaaccactacatcgacgaccacagctggaccctgttcgagcacctgccccacatcggcgtggagagaaccatcgaggaccacgagctggtgatcgaggtgctgagcaactggggcatcgaggaggagaacaagctgtacttcagaaagaactacgccaagtacgagttcttcaagaaccccatgtacttcttccccgagcacatggtgagcttcgccaccgagaccaacggcgagatcagccccacccagatcctgcagatgttcctgagcagcagcacctaccccgagatccacggcttcctgcacgccaaggagcagggcaagaagagctggaagaagatctacttcttcctgagaagaagcggcctgtacttcagcaccaagggcaccagcaaggagcccagacacctgcagttcttcagcgagttcggcaacagcgacatctacgtgagcctggccggcaagaagaagcacggcgcccccaccaactacggcttctgcttcaagcccaacaaggccggcggccccagagacctgaagatgctgtgcgccgaggaggagcagagcagaacctgctgggtgaccgccatcagactgctgaagtacggcatgcagctgtaccagaactacatgcacccctaccagggcagaagcggctgcagcagccagagcatcagccccatgagaagcatcagcgagaacagcctggtggccatggacttcagcggccagaagagcagagtgatcgagaaccccaccgaggccctgagcgtggccgtggaggagggcctggcctggagaaagaagggctgcctgagactgggcacccacggcagccccaccgccagcagccagagcagcgccaccaacatggccatccacagaagccagccctggttccaccacaagatcagcagagacgaggcccagagactgatcatccagcagggcctggtggacggcgtgttcctggtgagagacagccagagcaaccccaagaccttcgtgctgagcatgagccacggccagaagatcaagcacttccagatcatccccgtggaggacgacggcgagatgttccacaccctggacgacggccacaccagattcaccgacctgatccagctggtggagttctaccagctgaacaagggcgtgctgccctgcaagctgaagcactactgcgccagaatcgccctgtag

SEQ ID NO: 83735 - DNA, 1599 bp, synthetic construct
  misc_feature 1..1599: note = Description of Artificial Sequence: Synthetic coding sequence
  source 1..1599: mol_type = other DNA
atggagctggacctgagccccccccacctgagcagcagccccgaggacctgtgccccgcccccggcaccccccccggcacccccagaccccccgacacccccctgcccgaggaggtgaagagaagccagcccctgctgatccccaccaccggcagaaagctgagagaggaggagagaagagccaccagcctgcccagcatccccaaccccttccccgagctgtgcagcccccccagccagagccccatcctgggcggccccagcagcgccagaggcctgctgcccagagacgccagcagaccccacgtggtgaaggtgtacagcgaggacggcgcctgcagaagcgtggaggtggccgccggcgccaccgccagacacgtgtgcgagatgctggtgcagagagcccacgccctgagcgacgagacctggggcctggtggagtgccacccccacctggccctggagagaggcctggaggaccacgagagcgtggtggaggtgcaggccgcctggcccgtgggcggcgacagcagattcgtgttcagaaagaacttcgccaagtacgagctgttcaagagcagcccccacagcctgttccccgagaagatggtgagcagctgcctggacgcccacaccggcatcagccacgaggacctgatccagaacttcctgaacgccggcagcttccccgagatccagggcttcctgcagctgagaggcagcggcagaaagctgtggaagagattcttctgcttcctgagaagaagcggcctgtactacagcaccaagggcaccagcaaggaccccagacacctgcagtacgtggccgacgtgaacgagagcaacgtgtacgtggtgacccagggcagaaagctgtacggcatgcccaccgacttcggcttctgcgtgaagcccaacaagctgagaaacggccacaagggcctgagaatcttctgcagcgaggacgagcagagcagaacctgctggctggccgccttcagactgttcaagtacggcgtgcagctgtacaagaactaccagcaggcccagagcagacacctgcaccccagctgcctgggcagcccccccctgagaagcgccagcgacaacaccctggtggccatggacttcagcggccacgccggcagagtgatcgagaaccccagagaggccctgagcgtggccctggaggaggcccaggcctggagaaagaagaccaaccacagactgagcctgcccatgcccgccagcggcaccagcctgagcgccgccatccacagaacccagctgtggttccacggcagaatcagcagagaggagagccagagactgatcggccagcagggcctggtggacggcctgttcctggtgagagagagccagagaaacccccagggcttcgtgctgagcctgtgccacctgcagaaggtgaagcactacctgatcctgcccagcgaggaggagggcagactgtacttcagcatggacgacggccagaccagattcaccgacctgctgcagctggtggagttccaccagctgaacagaggcatcctgccctgcctgctgagacactgctgcaccagagtggccctgtag

SEQ ID NO: 83736 - DNA, 1344 bp, synthetic construct
  misc_feature 1..1344: note = Description of Artificial Sequence: Synthetic coding sequence
  source 1..1344: mol_type = other DNA
atggagctggacctgagccccccccacctgagcagcagccccgaggacctgtgccccgcccccggcaccccccccggcacccccagaccccccgacacccccctgcccgaggaggtgaagagaagccagcccctgctgatccccaccaccggcagaaagctgagagaggaggagagaagagccaccagcctgcccagcatccccaaccccttccccgagctgtgcagcccccccagccagagccccatcctgggcggccccagcagcgccagaggcctgctgcccagagacgccagcagaccccacgtggtgaaggtgtacagcgaggacggcgcctgcagaagcgtggaggtggccgccggcgccaccgccagacacgtgtgcgagatgctggtgcagagagcccacgccctgagcgacgagacctggggcctggtggagtgccacccccacctggccctggagagaggcctggaggaccacgagagcgtggtggaggtgcaggccgcctggcccgtgggcggcgacagcagattcgtgttcagaaagaacttcgccaagtacgagctgttcaagagcagcccccacagcctgttccccgagaagatggtgagcagctgcctggacgcccacaccggcatcagccacgaggacctgatccagaacttcctgaacgccggcagcttccccgagatccagggcttcctgcagctgagaggcagcggcagaaagctgtggaagagattcttctgcttcctgagaagaagcggcctgtactacagcaccaagggcaccagcaaggaccccagacacctgcagtacgtggccgacgtgaacgagagcaacgtgtacgtggtgacccagggcagaaagctgtacggcatgcccaccgacttcggcttctgcgtgaagcccaacaagctgagaaacggccacaagggcctgagaatcttctgcagcgaggacgagcagagcagaacctgctggctggccgccttcagactgttcaagtacggcgtgcagctgtacaagaactaccagcaggcccagagcagacacctgcaccccagctgcctgggcagcccccccctgagaagcgccagcgacaacaccctggtggccatggacttcagcggccacgccggcagagtgatcgagaaccccagagaggccctgagcgtggccctggaggaggcccaggcctggagaaagaagaccaaccacagactgagcctgcccatgcccgccagcggcaccagcctgagcgccgcctgcagctggagcggcagagtgagcggcacccccagagccctgagcagcctgtgcgccacctgcagaaagtag

SEQ ID NO: 83737 - DNA, 1344 bp, synthetic construct; identical to SEQ ID NO: 83736
  misc_feature 1..1344: note = Description of Artificial Sequence: Synthetic coding sequence
  source 1..1344: mol_type = other DNA

SEQ ID NO: 83738 - DNA, 1599 bp, synthetic construct; identical to SEQ ID NO: 83735
  misc_feature 1..1599: note = Description of Artificial Sequence: Synthetic coding sequence
  source 1..1599: mol_type = other DNA

SEQ ID NO: 83739 - DNA, 1599 bp, synthetic construct; identical to SEQ ID NO: 83735
  misc_feature 1..1599: note = Description of Artificial Sequence: Synthetic coding sequence
  source 1..1599: mol_type = other DNA

SEQ ID NO: 83740 - DNA, 1668 bp, synthetic construct
  misc_feature 1..1668: note = Description of Artificial Sequence: Synthetic coding sequence
  source 1..1668: mol_type = other DNA
atgggcaagtggagacccggccagggccacaccaccggcagcgtgaagcccctgagctgcagcgacgccatggagctggacctgagccccccccacctgagcagcagccccgaggacctgtgccccgcccccggcaccccccccggcacccccagaccccccgacacccccctgcccgaggaggtgaagagaagccagcccctgctgatccccaccaccggcagaaagctgagagaggaggagagaagagccaccagcctgcccagcatccccaaccccttccccgagctgtgcagcccccccagccagagccccatcctgggcggccccagcagcgccagaggcctgctgcccagagacgccagcagaccccacgtggtgaaggtgtacagcgaggacggcgcctgcagaagcgtggaggtggccgccggcgccaccgccagacacgtgtgcgagatgctggtgcagagagcccacgccctgagcgacgagacctggggcctggtggagtgccacccccacctggccctggagagaggcctggaggaccacgagagcgtggtggaggtgcaggccgcctggcccgtgggcggcgacagcagattcgtgttcagaaagaacttcgccaagtacgagctgttcaagagcagcccccacagcctgttccccgagaagatggtgagcagctgcctggacgcccacaccggcatcagccacgaggacctgatccagaacttcctgaacgccggcagcttccccgagatccagggcttcctgcagctgagaggcagcggcagaaagctgtggaagagattcttctgcttcctgagaagaagcggcctgtactacagcaccaagggcaccagcaaggaccccagacacctgcagtacgtggccgacgtgaacgagagcaacgtgtacgtggtgacccagggcagaaagctgtacggcatgcccaccgacttcggcttctgcgtgaagcccaacaagctgagaaacggccacaagggcctgagaatcttctgcagcgaggacgagcagagcagaacctgctggctggccgccttcagactgttcaagtacggcgtgcagctgtacaagaactaccagcaggcccagagcagacacctgcaccccagctgcctgggcagcccccccctgagaagcgccagcgacaacaccctggtggccatggacttcagcggccacgccggcagagtgatcgagaaccccagagaggccctgagcgtggccctggaggaggcccaggcctggagaaagaagaccaaccacagactgagcctgcccatgcccgccagcggcaccagcctgagcgccgccatccacagaacccagctgtggttccacggcagaatcagcagagaggagagccagagactgatcggccagcagggcctggtggacggcctgttcctggtgagagagagccagagaaacccccagggcttcgtgctgagcctgtgccacctgcagaaggtgaagcactacctgatcctgcccagcgaggaggagggcagactgtacttcagcatggacgacggccagaccagattcaccgacctgctgcagctggtggagttccaccagctgaacagaggcatcctgccctgcctgctgagacactgctgcaccagagtggccctgtag

SEQ ID NO: 83741 - DNA, 618 bp, synthetic construct
  misc_feature 1..618: note = Description of Artificial Sequence: Synthetic coding sequence
  source 1..618: mol_type = other DNA
atggccgcccccggcgagagaggcagattccacggcggcaacctgttcttcctgcccggcggcgccagaagcgagatgatggacgacctggccaccgacgccagaggcagaggcgccggcagaagagacgccgccgccagcgccagcacccccgcccaggcccccaccagcgacagccccgtggccgaggacgccagcagaagaagaccctgcagagcctgcgtggacttcaagacctggatgagaacccagcagaagagagacaccaagttcagagaggactgcccccccgacagagaggagctgggcagacacagctgggccgtgctgcacaccctggccgcctactaccccgacctgcccacccccgagcagcagcaggacatggcccagttcatccacctgttcagcaagttctacccctgcgaggagtgcgccgaggacctgagaaagagactgtgcagaaaccaccccgacaccagaaccagagcctgcttcacccagtggctgtgccacctgcacaacgaggtgaacagaaagctgggcaagcccgacttcgactgcagcaaggtggacgagagatggagagacggctggaaggacggcagctgcgactag

SEQ ID NO: 83742 - DNA, 285 bp, synthetic construct
  misc_feature 1..285: note = Description of Artificial Sequence: Synthetic coding sequence
  source 1..285: mol_type = other DNA
atgagaacccagcagaagagagacaccaagttcagagaggactgcccccccgacagagaggagctgggcagacacagctgggccgtgctgcacaccctggccgcctactaccccgacctgcccacccccgagcagcagcaggacatggcccagttcatccacctgttcagcaagttctacccctgcgaggagtgcgccgaggacctgagaaagagactgtgcagaaaccaccccgacaccagaaccagagcctgcttcaccgtggccgtgccccccgcccagtag

SEQ ID NO: 83743 - DNA, 1629 bp, synthetic construct
  misc_feature 1..1629: note = Description of Artificial Sequence: Synthetic coding sequence
  source 1..1629: mol_type = other DNA
atgagcccctgccccgaggaggccgccatgagaagagaggtggtgaagagaatcgagaccgtggtgaaggacctgtggcccaccgccgacgtgcagatcttcggcagcttcagcaccggcctgtacctgcccaccagcgacatcgacctggtggtgttcggcaagtgggagagaccccccctgcagctgctggagcaggccctgagaaagcacaacgtggccgagccctgcagcatcaaggtgctggacaaggccaccgtgcccatcatcaagctgaccgaccaggagaccgaggtgaaggtggacatcagcttcaacatggagaccggcgtgagagccgccgagttcatcaagaactacatgaagaagtacagcctgctgccctacctgatcctggtgctgaagcagttcctgctgcagagagacctgaacgaggtgttcaccggcggcatcagcagctacagcctgatcctgatggccatcagcttcctgcagctgcaccccagaatcgacgccagaagagccgacgagaacctgggcatgctgctggtggagttcttcgagctgtacggcagaaacttcaactacctgaagaccggcatcagaatcaaggagggcggcgcctacatcgccaaggaggagatcatgaaggccatgaccagcggctacagacccagcatgctgtgcatcgaggaccccctgctgcccggcaacgacgtgggcagaagcagctacggcgccatgcaggtgaagcaggtgttcgactacgcctacatcgtgctgagccacgccgtgagccccctggccagaagctaccccaacagagacgccgagagcaccctgggcagaatcatcaaggtgacccaggaggtgatcgactacagaagatggatcaaggagaagtggggcagcaaggcccaccccagccccggcatggacagcagaatcaagatcaaggagagaatcgccacctgcaacggcgagcagacccagaacagagagcccgagagcccctacggccagagactgaccctgagcctgagcagcccccagctgctgagcagcggcagcagcgccagcagcgtgagcagcctgagcggcagcgacgtggacagcgacacccccccctgcaccacccccagcgtgtaccagttcagcctgcaggcccccgcccccctgatggccggcctgcccaccgccctgcccatgcccagcggcaagccccagcccaccaccagcagaaccctgatcatgaccaccaacaaccagaccagattcaccatccccccccccaccctgggcgtggcccccgtgccctgcagacaggccggcgtggagggcaccgccagcctgaaggccgtgcaccacatgagcagccccgccatccccagcgccagccccaaccccctgagcagcccccacctgtaccacaagcagcacaacggcatgaagctgagcatgaagggcagccacggccacacccagggcggcggctacagcagcgtgggcagcggcggcgtgagaccccccgtgggcaacagaggccaccaccagtacaacagaaccggctggagaagaaagaagcacacccacaccagagacagcctgcccgtgagcctgagcagatag

SEQ ID NO: 83744 - DNA, 885 bp, synthetic construct
  misc_feature 1..885: note = Description of Artificial Sequence: Synthetic coding sequence
  source 1..885: mol_type = other DNA
atggacctgtggcagctgctgctgaccctggccctggccggcagcagcgacgccttcagcggcagcgaggccaccgccgccatcctgagcagagccccctggagcctgcagagcgtgaaccccggcctgaagaccaacagcagcaaggagcccaagttcaccaagtgcagaagccccgagagagagaccttcagctgccactggaccgacgaggtgcaccacggcaccaagaacctgggccccatccagctgttctacaccagaagaaacacccaggagtggacccaggagtggaaggagtgccccgactacgtgagcgccggcgagaacagctgctacttcaacagcagcttcaccagcatctggatcccctactgcatcaagctgaccagcaacggcggcaccgtggacgagaagtgcttcagcgtggacgagatcgtgcagcccgacccccccatcgccctgaactggaccctgctgaacgtgagcctgaccggcatccacgccgacatccaggtgagatgggaggcccccagaaacgccgacatccagaagggctggatggtgctggagtacgagctgcagtacaaggaggtgaacgagaccaagtggaagatgatggaccccatcctgaccaccagcgtgcccgtgtacagcctgaaggtggacaaggagtacgaggtgagagtgagaagcaagcagagaaacagcggcaactacggcgagttcagcgaggtgctgtacgtgaccctgccccagatgagccagttcacctgcgaggaggacttctacttcccctggctgctgatcatcatcttcggcatcttcggcctgaccgtgatgctgttcgtgttcctgttcagcaagcagcagagccagaactag

SEQ ID NO: 83745 - DNA, 1851 bp, synthetic construct
  misc_feature 1..1851: note = Description of Artificial Sequence: Synthetic coding sequence
  source 1..1851: mol_type = other DNA
atggacctgtggcagctgctgctgaccctggccctggccggcagcagcgacgccttcagcggcagcgaggacagcagcaaggagcccaagttcaccaagtgcagaagccccgagagagagaccttcagctgccactggaccgacgaggtgcaccacggcaccaagaacctgggccccatccagctgttctacaccagaagaaacacccaggagtggacccaggagtggaaggagtgccccgactacgtgagcgccggcgagaacagctgctacttcaacagcagcttcaccagcatctggatcccctactgcatcaagctgaccagcaacggcggcaccgtggacgagaagtgcttcagcgtggacgagatcgtgcagcccgacccccccatcgccctgaactggaccctgctgaacgtgagcctgaccggcatccacgccgacatccaggtgagatgggaggcccccagaaacgccgacatccagaagggctggatggtgctggagtacgagctgcagtacaaggaggtgaacgagaccaagtggaagatgatggaccccatcctgaccaccagcgtgcccgtgtacagcctgaaggtggacaaggagtacgaggtgagagtgagaagcaagcagagaaacagcggcaactacggcgagttcagcgaggtgctgtacgtgaccctgccccagatgagccagttcacctgcgaggaggacttctacttcccctggctgctgatcatcatcttcggcatcttcggcctgaccgtgatgctgttcgtgttcctgttcagcaagcagcagagaatcaagatgctgatcctgccccccgtgcccgtgcccaagatcaagggcatcgaccccgacctgctgaaggagggcaagctggaggaggtgaacaccatcctggccatccacgacagctacaagcccgagttccacagcgacgacagctgggtggagttcatcgagctggacatcgacgagcccgacgagaagaccgaggagagcgacaccgacagactgctgagcagcgaccacgagaagagccacagcaacctgggcgtgaaggacggcgacagcggcagaaccagctgctgcgagcccgacatcctggagaccgacttcaacgccaacgacatccacgagggcaccagcgaggtggcccagccccagagactgaagggcgaggccgacctgctgtgcctggaccagaagaaccagaacaacagcccctaccacgacgcctgccccgccacccagcagcccagcgtgatccaggccgagaagaacaagccccagcccctgcccaccgagggcgccgagagcacccaccaggccgcccacatccagctgagcaaccccagcagcctgagcaacatcgacttctacgcccaggtgagcgacatcacccccgccggcagcgtggtgctgagccccggccagaagaacaaggccggcatgagccagtgcgacatgcaccccgagatggtgagcctgtgccaggagaacttcctgatggacaacgcctacttctgcgaggccgacgccaagaagtgcatccccgtggccccccacatcaaggtggagagccacatccagcccagcctgaaccaggaggacatctacatcaccaccgagagcctgaccaccgccgccggcagacccggcaccggcgagcacgtgcccggcagcgagatgcccgtgcccgactacaccagcatccacatcgtgcagagcccccagggcctgatcctgaacgccaccgccctgcccctgcccgacaaggagttcctgagcagctgcggctacgtgagcaccgaccagctgaacaagatcatgccctag

SEQ ID NO: 83746 - DNA, 1356 bp, synthetic construct
  misc_feature 1..1356: note = Description of Artificial Sequence: Synthetic coding sequence
  source 1..1356: mol_type = other DNA
atggtgctggagtacgagctgcagtacaaggaggtgaacgagaccaagtggaagatgatggaccccatcctgaccaccagcgtgcccgtgtacagcctgaaggtggacaaggagtacgaggtgagagtgagaagcaagcagagaaacagcggcaactacggcgagttcagcgaggtgctgtacgtgaccctgccccagatgagccagttcacctgcgaggaggacttctacttcccctggctgctgatcatcatcttcggcatcttcggcctgaccgtgatgctgttcgtgttcctgttcagcaagcagcagagaatcaagatgctgatcctgccccccgtgcccgtgcccaagatcaagggcatcgaccccgacctgctgaaggagggcaagctggaggaggtgaacaccatcctggccatccacgacagctacaagcccgagttccacagcgacgacagctgggtggagttcatcgagctggacatcgacgagcccgacgagaagaccgaggagagcgacaccgacagactgctgagcagcgaccacgagaagagccacagcaacctgggcgtgaaggacggcgacagcggcagaaccagctgctgcgagcccgacatcctggagaccgacttcaacgccaacgacatccacgagggcaccagcgaggtggcccagccccagagactgaagggcgaggccgacctgctgtgcctggaccagaagaaccagaacaacagcccctaccacgacgcctgccccgccacccagcagcccagcgtgatccaggccgagaagaacaagccccagcccctgcccaccgagggcgccgagagcacccaccaggccgcccacatccagctgagcaaccccagcagcctgagcaacatcgacttctacgcccaggtgagcgacatcacccccgccggcagcgtggtgctgagccccggccagaagaacaaggccggcatgagccagtgcgacatgcaccccgagatggtgagcctgtgccaggagaacttcctgatggacaacgcctacttctgcgaggccgacgccaagaagtgcatccccgtggccccccacatcaaggtggagagccacatccagcccagcctgaaccaggaggacatctacatcaccaccgagagcctgaccaccgccgccggcagacccggcaccggcgagcacgtgcccggcagcgagatgcccgtgcccgactacaccagcatccacatcgtgcagagcccccagggcctgatcctgaacgccaccgccctgcccctgcccgacaaggagttcctgagcagctgcggctacgtgagcaccgaccagctgaacaagatcatgccctag

SEQ ID NO: 83747 - DNA, 327 bp, synthetic construct
  misc_feature 1..327: note = Description of Artificial Sequence: Synthetic coding sequence
  source 1..327: mol_type = other DNA
atgcccctgtgggtgttcttcttcgtgatcctgaccctgagcaacagcagccactgcagcccccccccccccctgaccctgagaatgagaagatacgccgacgccatcttcaccaacagctacagaaaggtgctgggccagctgagcgccagaaagctgctgcaggacatcatgagcagacagcagggcgagagcaaccaggagagaggcgccagagccagactgggcagacaggtggacagcatgtgggccgagcagaagcagatggagctggagagcatcctggtggccctgctgcagaagcacagcagaaacagccagggctag

SEQ ID NO: 83748 - DNA, 324 bp, synthetic construct
  misc_feature 1..324: note = Description of Artificial Sequence: Synthetic coding sequence
  source 1..324: mol_type = other DNA
atgcccctgtgggtgttcttcttcgtgatcctgaccctgagcaacagcagccactgcagcccccccccccccctgaccctgagaatgagaagatacgccgacgccatcttcaccaacagctacagaaaggtgctgggccagctgagcgccagaaagctgctgcaggacatcatgagcagacagcagggcgagagcaaccaggagagaggcgccagagccagactgggcagacaggtggacagcatgtgggccgagcagaagcagatggagctggagagcatcctggtggccctgctgcagaagcacagaaacagccagggctag

SEQ ID NO: 83749 - DNA, 327 bp, synthetic construct; identical to SEQ ID NO: 83747
  misc_feature 1..327: note = Description of Artificial Sequence: Synthetic coding sequence
  source 1..327: mol_type = other DNA

SEQ ID NO: 83750 - DNA, 1272 bp, synthetic construct
  misc_feature 1..1272: note = Description of Artificial Sequence: Synthetic coding sequence
  source 1..1272: mol_type = other DNA
atggacagaagaatgtggggcgcccacgtgttctgcgtgctgagccccctgcccaccgtgctgggccacatgcaccccgagtgcgacttcatcacccagctgagagaggacgagagcgcctgcctgcaggccgccgaggagatgcccaacaccaccctgggctgccccgccacctgggacggcctgctgtgctggcccaccgccggcagcggcgagtgggtgaccctgccctgccccgacttcttcagccacttcagcagcgagagcggcgccgtgaagagagactgcaccatcaccggctggagcgagcccttccccccctaccccgtggcctgccccgtgcccctggagctgctggccgaggaggagagctacttcagcaccgtgaagatcatctacaccgtgggccacagcatcagcatcgtggccctgttcgtggccatcaccatcctggtggccctgagaagactgcactgccccagaaactacgtgcacacccagctgttcaccaccttcatcctgaaggccggcgccgtgttcctgaaggacgccgccctgttccacagcgacgacaccgaccactgcagcttcagcaccgtgctgtgcaaggtgagcgtggccgccagccacttcgccaccatgaccaacttcagctggctgctggccgaggccgtgtacctgaactgcctgctggccagcaccagccccagcagcagaagagccttctggtggctggtgctggccggctggggcctgcccgtgctgttcaccggcacctgggtgagctgcaagctggccttcgaggacatcgcctgctgggacctggacgacaccagcccctactggtggatcatcaagggccccatcgtgctgagcgtgggcgtgaacttcggcctgttcctgaacatcatcagaatcctggtgagaaagctggagcccgcccagggcagcctgcacacccagagccagtactggagactgagcaagagcaccctgttcctgatccccctgttcggcatccactacatcatcttcaacttcctgcccgacaacgccggcctgggcatcagactgcccctggagctgggcctgggcagcttccagggcttcatcgtggccatcctgtactgcttcctgaaccaggaggtgagaaccgagatcagcagaaagtggcacggccacgaccccgagctgctgcccgcctggagaaccagagccaagtggaccacccccagcagaagcgccgccaaggtgctgaccagcatgtgctag

SEQ ID NO: 83751 - DNA, 207 bp, synthetic construct
  misc_feature 1..207: note = Description of Artificial Sequence: Synthetic coding sequence
  source 1..207: mol_type = other DNA
atggtgcccggcacccccagccccctgctgggcagaggcaaggagctgtggctggagagcctggcctgcctgcccggcgccgtgaagagagactgcaccatcaccggctggagcgagcccttccccccctaccccgtggcctgccccgtgcccctggagctgctggccgaggagggctgcccctgcagcagcctggccagaggctag

SEQ ID NO: 83752 - DNA, 438 bp, synthetic construct
  misc_feature 1..438: note = Description of Artificial Sequence: Synthetic coding sequence
  source 1..438: mol_type = other DNA
atggtgcccggcacccccagccccctgctgggcagaggcaaggagctgtggctggagagcctggcctgcctgcccggcgccgtgaagagagactgcaccatcaccggctggagcgagcccttccccccctaccccgtggcctgccccgtgcccctggagctgctggccgaggaggagagctacttcagcaccgtgaagatcatctacaccgtgggccacagcatcagcatcgtggccctgttcgtggccatcaccatcctggtggccctgagaagactgcactgccccagaaactacgtgcacacccagctgttcaccaccttcatcctgaaggccggcgccgtgttcctgaaggacgccgccctgttccacagcgacgacaccgaccactgcagcttcagcaccggctgcccctgcagcagcctggccagaggctag

SEQ ID NO: 83753 - DNA, 456 bp, synthetic construct
  misc_feature 1..456: note = Description of Artificial Sequence: Synthetic coding sequence
  source 1..456: mol_type = other DNA
atgctgcccttcagcaccgccaccaccctgaccaccgccgccagccccctggccgccagagccctgcactggcacgtgggcgagctgcagaccggcctgagaggccacagagtgctgggccccggcagacacctgcccctgctggtggaccaccagagagcccactgccccctgggcagaggcgagctgtgggccttcagccagtactacccccaccccggcgaggagaccggcgccagcagcggccagcccccctaccccgtgagcgtgctggccagcctgcaggtggacaccttccccgaccccaccctgtggaacagcctgcaccacctgcagctgcccgccagacagtgctggcccggccacccccccccccccggcgccggcaccggcttcctgcccggcctgcactgctgccaccccctgctgctgccccagcccagaggcgaggactag

SEQ ID NO: 83754 - DNA, 1080 bp, synthetic construct
  misc_feature 1..1080: note = Description of Artificial Sequence: Synthetic coding sequence
  source 1..1080: mol_type = other DNA
atggtgcccggcacccccagccccctgctgggcagaggcaaggagctgtggctggagagcctggcctgcctgcccggcgccgtgaagagagactgcaccatcaccggctggagcgagcccttccccccctaccccgtggcctgccccgtgcccctggagctgctggccgaggaggagagctacttcagcaccgtgaagatcatctacaccgtgggccacagcatcagcatcgtggccctgttcgtggccatcaccatcctggtggccctgagaagactgcactgccccagaaactacgtgcacacccagctgttcaccaccttcatcctgaaggccggcgccgtgttcctgaaggacgccgccctgttccacagcgacgacaccgaccactgcagcttcagcaccgtgctgtgcaaggtgagcgtggccgccagccacttcgccaccatgaccaacttcagctggctgctggccgaggccgtgtacctgaactgcctgctggccagcaccagccccagcagcagaagagccttctggtggctggtgctggccggctggggcctgcccgtgctgttcaccggcacctgggtgagctgcaagctggccttcgaggacatcgcctgctgggacctggacgacaccagcccctactggtggatcatcaagggccccatcgtgctgagcgtgggcgtgaacttcggcctgttcctgaacatcatcagaatcctggtgagaaagctggagcccgcccagggcagcctgcacacccagagccagtactggagactgagcaagagcaccctgttcctgatccccctgttcggcatccactacatcatcttcaacttcctgcccgacaacgccggcctgggcatcagactgcccctggagctgggcctgggcagcttccagggcttcatcgtggccatcctgtactgcttcctgaaccaggaggtgagaaccgagatcagcagaaagtggcacggccacgaccccgagctgctgcccgcctggagaaccagagccaagtggaccacccccagcagaagcgccgccaaggtgctgaccagcatgtgctag

SEQ ID NO: 83755 - DNA, 1101 bp, synthetic construct
  misc_feature 1..1101: note = Description of Artificial Sequence: Synthetic coding sequence
  source 1..1101: mol_type = other DNA
atgtggaacgccacccccagcgaggagcccggcttcaacctgaccctggccgacctggactgggacgccagccccggcaacgacagcctgggcgacgagctgctgcagctgttccccgcccccctgctggccggcgtgaccgccacctgcgtggccctgttcgtggtgggcatcgccggcaacctgctgaccatgctggtggtgagcagattcagagagctgagaaccaccaccaacctgtacctgagcagcatggccttcagcgacctgctgatcttcctgtgcatgcccctggacctggtgagactgtggcagtacagaccctggaacttcggcgacctgctgtgcaagctgttccagttcgtgagcgagagctgcacctacgccaccgtgctgaccatcaccgccctgagcgtggagagatacttcgccatctgcttccccctgagagccaaggtggtggtgaccaagggcagagtgaagctggtgatcttcgtgatctgggccgtggccttctgcagcgccggccccatcttcgtgctggtgggcgtggagcacgagaacggcaccgacccctgggacaccaacgagtgcagacccaccgagttcgccgtgagaagcggcctgctgaccgtgatggtgtgggtgagcagcatcttcttcttcctgcccgtgttctgcctgaccgtgctgtacagcctgatcggcagaaagctgtggagaagaagaagaggcgacgccgtggtgggcgccagcctgagagaccagaaccacaagcagaccgtgaagatgctggccgtggtggtgttcgccttcatcctgtgctggctgcccttccacgtgggcagatacctgttcagcaagagcttcgagcccggcagcctggagatcgcccagatcagccagtactgcaacctggtgagcttcgtgctgttctacctgagcgccgccatcaaccccatcctgtacaacatcatgagcaagaagtacagagtggccgtgttcagactgctgggcttcgagcccttcagccagagaaagctgagcaccctgaaggacgagagcagcagagcctggaccgagagcagcatcaacacctag

SEQ ID NO: 83756 - DNA, 870 bp, synthetic construct
  misc_feature 1..870: note = Description of Artificial Sequence: Synthetic coding sequence
  source 1..870: mol_type = other DNA
atgtggaacgccacccccagcgaggagcccggcttcaacctgaccctggccgacctggactgggacgccagccccggcaacgacagcctgggcgacgagctgctgcagctgttccccgcccccctgctggccggcgtgaccgccacctgcgtggccctgttcgtggtgggcatcgccggcaacctgctgaccatgctggtggtgagcagattcagagagctgagaaccaccaccaacctgtacctgagcagcatggccttcagcgacctgctgatcttcctgtgcatgcccctggacctggtgagactgtggcagtacagaccctggaacttcggcgacctgctgtgcaagctgttccagttcgtgagcgagagctgcacctacgccaccgtgctgaccatcaccgccctgagcgtggagagatacttcgccatctgcttccccctgagagccaaggtggtggtgaccaagggcagagtgaagctggtgatcttcgtgatctgggccgtggccttctgcagcgccggccccatcttcgtgctggtgggcgtggagcacgagaacggcaccgacccctgggacaccaacgagtgcagacccaccgagttcgccgtgagaagcggcctgctgaccgtgatggtgtgggtgagcagcatcttcttcttcctgcccgtgttctgcctgaccgtgctgtacagcctgatcggcagaaagctgtggagaagaagaagaggcgacgccgtggtgggcgccagcctgagagaccagaaccacaagcagaccgtgaagatgctgggcggcagccagagagccctgagactgagcctggccggccccatcctgagcctgtgcctgctgcccagcctgtag

SEQ ID NO: 83757 - DNA, 666 bp, synthetic construct
  misc_feature 1..666: note = Description of Artificial Sequence: Synthetic coding sequence
  source 1..666: mol_type = other DNA
atggccttcgtgaagagcggctggctgctgagacagagcaccatcctgaagagatggaagaagaactggttcgacctgtggagcgacggccacctgatctactacgacgaccagaccagacagaacatcgaggacaaggtgcacatgcccatggactgcatcaacatcagaaccggccaggagtgcagagacacccagccccccgacggcaagagcaaggactgcatgctgcagatcgtgtgcagagacggcaagaccatcagcctgtgcgccgagagcaccgacgactgcctggcctggaagttcaccctgcaggacagcagaaccaacaccgcctacgtgggcagcgccgtgatgaccgacgagaccagcgtggtgagcagcccccccccctacaccgcctacgccgcccccgcccccgaggcctacggctacggcccctacggcggcgcctacccccccggcacccaggtggtgtacgccgccaacggccaggcctacgccgtgccctaccagtacccctacgccggcctgtacggccagcagcccgccaaccaggtgatcatcagagagagatacagagacaacgacagcgacctggccctgggcatgctggccggcgccgccaccggcatggccctgggcagcctgttctgggtgttctag

SEQ ID NO: 83758 - DNA, 1230 bp, synthetic construct
  misc_feature 1..1230: note = Description of Artificial Sequence: Synthetic coding sequence
  source 1..1230: mol_type = other DNA
atgggcaacagctacgccggccagctgaagaccaccagattcgaggaggtgctgcacaacagcatcgaggccagcctgagaagcaacaacctggtgcccagacccatcttcagccagctgtacctggaggccgagcagcagctggccgccctggagggcggcagcagagtggacaacgaggaggaggaggaggagggcgagggcggcctggagaccaacggcccccccaaccccttccagctgcaccccctgcccgagggctgctgcaccaccgacggcttctgccaggccggcaaggacctgagactggtgagcatcagcaacgagcccatggacgtgcccgccggcttcctgctggtgggcgtgaagagccccagcctgcccgaccacctgctggtgtgcgccgtggacaagagattcctgcccgacgacaacggccacaacgccctgctgggcttcagcggcaactgcgtgggctgcggcaagaagggcttctgctacttcaccgagttcagcaaccacatcaacctgaagctgaccacccagcccaagaagcagaagcacctgaagtactacctggtgagaaacgcccagggcaccctgaccaagggccccctgatctgctggaagggcagcgagttcagaagcagacagatccccgccagcacctgcagcagcagcctgttccccgccctggagagcaccgccgccttccccagcgagcccgtgcccggcaccaaccccagcatcctgatgggcgcccagcaggccggccccgccagcgaccaccccagcctgaacgccgccatgggccccgccgtgttcaacggcaaggacagccccaagtgccagcagctggccaagaacaacctgctggccctgcccagacccagcgccctgggcatcctgagcaacagcggcccccccaagaagagacacaagggctggagccccgagagccccagcgcccccgacggcggctgcccccagggcggcggcaacagagccaagtacgagagcgccggcatgagctgcgtgccccaggtgggcctggtgggccccgccagcgtgaccttccccgtggtggccagcggcgagcccgtgagcgtgcccgacaacctgctgaagatctgcaaggccaagcccgtgatcttcaaggtgttcgtgaacggcgccacccagatggtggccctgggccccgccgagcccgccagccccagaagcctgtag

SEQ ID NO: 83759 - DNA, 1374 bp, synthetic construct
  misc_feature 1..1374: note = Description of Artificial Sequence: Synthetic coding sequence
  source 1..1374: mol_type = other DNA
atgggcaacagctacgccggccagctgaagaccaccagattcgaggaggtgctgcacaacagcatcgaggccagcctgagaagcaacaacctggtgcccagacccatcttcagccagctgtacctggaggccgagcagcagctggccgccctggagggcggcagcagagtggacaacgaggaggaggaggaggagggcgagggcggcctggagaccaacggcccccccaaccccttccagctgcaccccctgcccgagggctgctgcaccaccgacggcttctgccaggccggcaaggacctgagactggtgagcatcagcaacgagcccatggacgtgcccgccggcttcctgctggtgggcgtgaagagccccagcctgcccgaccacctgctggtgtgcgccgtggacaagagattcctgcccgacgacaacggccacaacgccctgctgggcttcagcggcaactgcgtgggctgcggcaagaagggcttctgctacttcaccgagttcagcaaccacatcaacctgaagctgaccacccagcccaagaagcagaagcacctgaagtactacctggtgagaaacgcccagggcaccctgaccaagggccccctgatctgctggaagggcagcgagttcagaagcagacagatccccgccagcacctgcagcagcagcctgttccccgccctggagagcaccgccgccttccccagcgagcccgtgcccggcaccaaccccagcatcctgatgggcgcccagcaggccggccccgccagcgaccaccccagcctgaacgccgccatgggccccgccgtgttcaacggcaaggacagccccaagtgccagcagctggccaagaacaacctgctggccctgcccagacccagcgccctgggcatcctgagcaacagcggcccccccaagaagagacacaagggctggagccccgagagccccagcgcccccgacggcggctgcccccagggcggcggcaacagagccaagtacgagagcgccggcatgagctgcgtgccccaggtgggcctggtgggccccgccagcgtgaccttccccgtggtggccagcggcgagcccgtgagcgtgcccgacaacctgctgaagatctgcaaggccaagcccgtgatcttcaagggccacggcaacttcccctacctgtgcggcaacctgaacgacgtggtggtgagccccctgctgtacacctgctaccagaacagccagagcgtgagcagagcctacgagcagtacggcgccagcgccatccagcccatcagcgaggagatgcagctgctgctgaccgtgtactacctggtgcagctggcccaccagatcagaaaccccgacgtgtag

SEQ ID NO: 83760 - DNA, 5850 bp, synthetic construct
  misc_feature 1..5850: note = Description of Artificial Sequence: Synthetic coding sequence
  source 1..5850: mol_type = other DNA
atgggcaacagctacgccggccagctgaagaccaccagattcgaggaggtgctgcacaacagcatcgaggccagcctgagaagcaacaacctggtgcccagacccatcttcagccagctgtacctggaggccgagcagcagctggccgccctggagggcggcagcagagtggacaacgaggaggaggaggaggagggcgagggcggcctggagaccaacggcccccccaaccccttccagctgcaccccctgcccgagggctgctgcaccaccgacggcttctgccaggccggcaaggacctgagactggtgagcatcagcaacgagcccatggacgtgcccgccggcttcctgctggtgggcgtgaagagccccagcctgcccgaccacctgctggtgtgcgccgtggacaagagattcctgcccgacgacaacggccacaacgccctgctgggcttcagcggcaactgcgtgggctgcggcaagaagggcttctgctacttcaccgagttcagcaaccacatcaacctgaagctgaccacccagcccaagaagcagaagcacctgaagtactacctggtgagaaacgcccagggcaccctgaccaagggccccctgatctgctggaagggcagcgagttcagaagcagacagatccccgccagcacctgcagcagcagcctgttccccgccctggagagcaccgccgccttccccagcgagcccgtgcccggcaccaaccccagcatcctgatgggcgcccagcaggccggccccgccagcgaccaccccagcctgaacgccgccatgggccccgccgtgttcaacggcaaggacagccccaagtgccagcagctggccaagaacaacctgctggccctgcccagacccagcgccctgggcatcctgagcaacagcggcccccccaagaagagacacaagggctggagccccgagagccccagcgcccccgacggcggctgcccccagggcggcggcaacagagccaagtacgagagcgccggcatgagctgcgtgccccaggtgggcctggtgggccccgccagcgtgaccttccccgtggtggccagcggcgagcccgtgagcgtgcccgacaacctgctgaagatctgcaaggccaagcccgtgatcttcaagggccacggcaacttcccctacctgtgcggcaacctgaacgacgtggtggtgagccccctgctgtacacctgctaccagaacagccagagcgtgagcagagcctacgagcagtacggcgccagcgccatccagcccatcagcgaggagatgcagctgctgctgaccgtgtactacctggtgcagctggccgccgaccaggtgcccctgatggaggacctggagcagatcttcctgagaagctggagagagagccacctgaccgagatcagacagtaccagcaggcccccccccagcccttcccccccgcccccagcgccgccgcccccgtgaccagcgcccagctgccctggctggccagcctggccgccagcagctgcaacgacagcgtgcacgtgatcgagtgcgcctacagcctggccgagggcctgagcgagatgttcagactgctggtggagggcaagctggccaagaccaactacgtggtgatcatctgcgcctgcagaagcgccgccatcgacagctgcatcgccgtgaccggcaagtaccaggccagaatcctgagcgagagcctgctgacccccgccgagtaccagaaggaggtgaactacgagctggtgaccggcaaggtggacagcctgggcgccttcttcagcaccctgtgccccgagggcgacatcgacatcctgctggacaagttccaccaggagaaccagggccacatcagcagcagcctggccgccagcagcgtgaccaaggccgccagcctggacgtgagcggcacccccgtgtgcaccagctacaacctggagccccacagcatcagacccttccagctggccgtggcccagaagctgctgagccacgtgtgcagcatcgccgacagcagcacccagaacctggacctgggcagcttcgagaaggtggacttcctgatctgcatcccccccagcgaggtgacctaccagcagaccctgctgcacgtgtggcacagcggcgtgctgctggagctgggcctgaagaaggagcacatgaccaagcagagagtggagcagtacgtgctgaagctggacaccgaggcccagaccaagttcaaggccttcctgcagaacagcttccagaacccccacaccctgttcgtgctgatccacgaccacgcccactgggacctggtgagcagcaccgtgcacaacctgtacagccagagcgaccccagcgtgggcctggtggacagactgctgaactgcagagaggtgaaggaggcccccaacatcgtgaccctgcacgtgaccagcttcccctacgccctgcagacccagcacaccctgatcagcccctacaacgagatccactggcccgccagctgcagcaacggcgtggacctgtaccacgagaacaagaagtacttcggcctgagcgagttcatcgagagcaccctgagcggccacagcctgcccctgctgagatacgacagcagcttcgaggccatggtgaccgccctgggcaagagattccccagactgcacagcgccgtgatcagaaccttcgtgctggtgcagcactacgccgccgccctgatggccgtgagcggcctgccccagatgaagaactacaccagcgtggagaccctggagatcacccagaacctgctgaacagccccaagcagtgcccctgcggccacggcctgatggtgctgctgagagtgccctgcagccccctggccgtggtggcctacgagagactggcccacgtgagagccagactggccctggaggagcacttcgagatcatcctgggcagccccagcagcggcgtgaccgtgggcaagcacttcgtgaagcagctgagaatgtggcagaagatcgaggacgtggagtggagaccccagacctacctggagctggagggcctgccctgcatcctgatcttcagcggcatggacccccacggcgagagcctgcccagaagcctgagatactgcgacctgagactgatcaacagcagctgcctggtgagaaccgccctggagcaggagctgggcctggccgcctacttcgtgagcaacgaggtgcccctggagaagggcgccagaaacgaggccctggagagcgacgccgagaagctgagcagcaccgacaacgaggacgaggagctgggcaccgagggcagcaccagcgagaagagaagccccatgaagagagagagaagcagaagccacgacagcgccagcagcagcctgagcagcaaggccagcggcagcgccctgggcggcgagagcagcgcccagcccaccgccctgccccagggcgagcacgccagaagcccccagcccagaggccccgccgaggagggcagagcccccggcgagaagcagagacccagagccagccagggcccccccagcgccatcagcagacacagccccggccccaccccccagcccgactgcagcctgagaaccggccagagaagcgtgcaggtgagcgtgaccagcagctgcagccagctgagcagcagcagcggcagcagcagcagcagcgtggcccccgccgccggcacctgggtgctgcaggccagccagtgcagcctgaccaaggcctgcagacagccccccatcgtgttcctgcccaagctggtgtacgacatggtggtgagcaccgacagcagcggcctgcccaaggccgccagcctgctgcccagccccagcgtgatgtgggccagcagcttcagacccctgctgagcaagaccatgaccagcaccgagcagagcctgtactacagacagtggaccgtgcccagacccagccacatggactacggcaacagagccgagggcagagtggacggcttccaccccagaagactgctgctgagcggccccccccagatcggcaagaccggcgcctacctgcagttcctgagcgtgctgagcagaatgctggtgagactgaccgaggtggacgtgtacgacgaggaggagatcaacatcaacctgagagaggagagcgactggcactacctgcagctgagcgacccctggcccgacctggagctgttcaagaagctgcccttcgactacatcatccacgaccccaagtacgaggacgccagcctgatctgcagccactaccagggcatcaagagcgaggacagaggcatgagcagaaagcccgaggacctgtacgtgagaagacagaccgccagaatgagactgagcaagtacgccgcctacaacacctaccaccactgcgagcagtgccaccagtacatgggcttccaccccagataccagctgtacgagagcaccctgcacgccttcgccttcagctacagcatgctgggcgaggagatccagctgcacttcatcatccccaagagcaaggagcaccacttcgtgttcagccagcccggcggccagctggagagcatgagactgcccctggtgaccgacaagagccacgagtacatcaagagccccaccttcacccccaccaccggcagacacgagcacggcctgttcaacctgtaccacgccatggacggcgccagccacctgcacgtgctggtggtgaaggagtacgagatggccatctacaagaagtactggcccaaccacatcatgctggtgctgcccagcatcttcaacagcgccggcgtgggcgccgcccacttcctgatcaaggagctgagctaccacaacctggagctggagagaaacagacaggaggagctgggcatcaagccccaggacatctggcccttcatcgtgatcagcgacgacagctgcgtgatgtggaacgtggtggacgtgaacagcgccggcgagagaagcagagagttcagctggagcgagagaaacgtgagcctgaagcacatcatgcagcacatcgaggccgcccccgacatcatgcactacgccctgctgggcctgagaaagtggagcagcaagaccagagccagcgaggtgcaggagcccttcagcagatgccacgtgcacaacttcatcatcctgaacgtggacctgacccagaacgtgcagtacaaccagaacagattcctgtgcgacgacgtggacttcaacctgagagtgcacagcgccggcctgctgctgtgcagattcaacagattcagcgtgatgaagaagcagatcgtggtgggcggccacagaagcttccacatcaccagcaaggtgagcgacaacagcgccgccgtggtgcccgcccagtacatctgcgcccccgacagcaagcacaccttcctggccgcccccgcccagctgctgctggagaagttcctgcagcaccacagccacctgttcttccccctgagcctgaagaaccacgaccaccccgtgctgagcgtggactgctacctgaacctgggcagccagatcagcgtgtgctacgtgagcagcagaccccacagcctgaacatcagctgcagcgacctgctgttcagcggcctgctgctgtacctgtgcgacagcttcgtgggcgccagcttcctgaagaagttccacttcctgaagggcgccaccctgtgcgtgatctgccaggacagaagcagcctgagacagaccgtggtgagactggagctggaggacgagtggcagttcagactgagagacgagttccagaccgccaacgccagagaggacagacccctgttcttcctgaccggcagacacatctag

SEQ ID NO: 83761 - DNA, 1188 bp, synthetic construct
  misc_feature 1..1188: note = Description of Artificial Sequence: Synthetic coding sequence
  source 1..1188: mol_type = other DNA
atgaccctgagaagactgagaaagctgcagcagaaggaggaggccgccgccacccccgaccccgccgccagaacccccgacagcgaggtggcccccgccgcccccgtgcccacccccggcccccccgccgccgccgccacccccggcccccccgccgacgagctgtacgccgccctggaggactaccaccccgccgagctgtacagagccctggccgtgagcggcggcaccctgcccagaagaaagggcagcggcttcagatggaagaacctgagccagagccccgagcagcagagaaaggtgctgaccctggagaaggaggacaaccagaccttcggcttcgagatccagacctacggcctgcaccacagagaggagcagagagtggagatggtgaccttcgtgtgcagagtgcacgagagcagccccgcccagctggccggcctgacccccggcgacaccatcgccagcgtgaacggcctgaacgtggagggcatcagacacagagagatcgtggacatcatcaaggccagcggcaacgtgctgagactggagaccctgtacggcaccagcatcagaaaggccgagctggaggccagactgcagtacctgaagcagaccctgtacgagaagtggggcgagtacagaagcctgatggtgcaggagcagagactggtgcacggcctggtggtgaaggaccccagcatctacgacaccctggagagcgtgagaagctgcctgtacggcgccggcctgctgcccggcagcctgcccttcggccccctgctggccgtgcccggcagacccagaggcggcgccagaagagccagaggcgacgccgacgacgccgtgtaccacacctgcttcttcggcgacagcgagccccccgccctgccccccccccccccccccgccagagccttcggccccggccccgccgagacccccgccgtgggccccggccccggccccagagccgccctgagcagaagcgccagcgtgagatgcgccggccccggcggcggcggcggcggcggcgcccccggcgccctgtggaccgaggccagagagcaggccctgtgcggccccggcctgagaaagaccaagtacagaagcttcagaagaagactgctgaagttcatccccggcctgaacagaagcctggaggaggaggagagccagctgtag

SEQ ID NO: 83762 - DNA, 759 bp, synthetic construct
  misc_feature 1..759: note = Description of Artificial Sequence: Synthetic coding sequence
  source 1..759: mol_type = other DNA
atgaccctgctgcccagcaagggcggcgacaccatcgccagcgtgaacggcctgaacgtggagggcatcagacacagagagatcgtggacatcatcaaggccagcggcaacgtgctgagactggagaccctgtacggcaccagcatcagaaaggccgagctggaggccagactgcagtacctgaagcagaccctgtacgagaagtggggcgagtacagaagcctgatggtgcaggagcagagactggtgcacggcctggtggtgaaggaccccagcatctacgacaccctggagagcgtgagaagctgcctgtacggcgccggcctgctgcccggcagcctgcccttcggccccctgctggccgtgcccggcagacccagaggcggcgccagaagagccagaggcgacgccgacgacgccgtgtaccacacctgcttcttcggcgacagcgagccccccgccctgccccccccccccccccccgccagagccttcggccccggccccgccgagacccccgccgtgggccccggccccggccccagagccgccctgagcagaagcgccagcgtgagatgcgccggccccggcggcggcggcggcggcggcgcccccggcgccctgtggaccgaggccagagagcaggccctgtgcggccccggcctgagaaagaccaagtacagaagcttcagaagaagactgctgaagttcatccccggcctgaacagaagcctggaggaggaggagagccagctgtag

SEQ ID NO: 83763 - DNA, 759 bp, synthetic construct; identical to SEQ ID NO: 83762
  misc_feature 1..759: note = Description of Artificial Sequence: Synthetic coding sequence
  source 1..759: mol_type = other DNA

SEQ ID NO: 83764 - DNA, 654 bp, synthetic construct
  misc_feature 1..654: note = Description of Artificial Sequence: Synthetic coding sequence
  source 1..654: mol_type = other DNA
atggccgcccagtgcgtgagactggccagaagaagcctgcccgccctggccctgagcctgagacccagccccagactgctgtgcaccgccaccaagcagaagaacagcggccagaacctggaggaggacatgggccagagcgagcagaaggccgacccccccgccaccgagaagaccctgctggaggagaaggtgaagctggaggagcagctgaaggagaccgtggagaagtacaagagagccctggccgacaccgagaacctgagacagagaagccagaagctggtggaggaggccaagctgtacggcatccaggccttctgcaaggacctgctggaggtggccgacgtgctggagaaggccacccagtgcgtgcccaaggaggagatcaaggacgacaacccccacctgaagaacctgtacgagggcctggtgatgaccgaggtgcagatccagaaggtgttcaccaagcacggcctgctgaagctgaaccccgtgggcgccaagttcgacccctacgagcacgaggccctgttccacacccccgtggagggcaaggagcccggcaccgtggccctggtgagcaaggtgggctacaagctgcacggcagaaccctgagacccgccctggtgggcgtggtgaaggaggcctag

SEQ ID NO: 83765 - DNA, 591 bp, synthetic construct
  misc_feature 1..591: note = Description of Artificial Sequence: Synthetic coding sequence
  source 1..591: mol_type = other DNA
atggccgcccagtgcgtgagactggccagaagaagcctgcccgccctggccctgagcctgagacccagccccagactgctgtgcaccgccaccaagcagaagaacagcggccagaacctggaggaggacatgggccagagcgagcagctgaaggagaccgtggagaagtacaagagagccctggccgacaccgagaacctgagacagagaagccagaagctggtggaggaggccaagctgtacggcatccaggccttctgcaaggacctgctggaggtggccgacgtgctggagaaggccacccagtgcgtgcccaaggaggagatcaaggacgacaacccccacctgaagaacctgtacgagggcctggtgatgaccgaggtgcagatccagaaggtgttcaccaagcacggcctgctgaagctgaaccccgtgggcgccaagttcgacccctacgagcacgaggccctgttccacacccccgtggagggcaaggagcccggcaccgtggccctggtgagcaaggtgggctacaagctgcacggcagaaccctgagacccgccctggtgggcgtggtgaaggaggcctag

SEQ ID NO: 83766 - DNA, 2880 bp, synthetic construct
  misc_feature 1..2880: note = Description of Artificial Sequence: Synthetic coding sequence
  source 1..2880: mol_type = other DNA
atggccctgctgggcaagagatgcgacgtgcccaccaacggctgcggccccgacagatggaacagcgccttcaccagaaaggacgagatcatcaccagcctggtgagcgccctggacagcatgtgcagcgccctgagcaagctgaacgccgaggtggcctgcgtggccgtgcacgacgagagcgccttcgtggtgggcaccgagaagggcagaatgttcctgaacgccagaaaggagctgcagagcgacttcctgagattctgcagaggccccccctggaaggaccccgaggccgagcaccccaagaaggtgcagagaggcgagggcggcggcagaagcctgcccagaagcagcctggagcacggcagcgacgtgtacctgctgagaaagatggtggaggaggtgttcgacgtgctgtacagcgaggccctgggcagagccagcgtggtgcccctgccctacgagagactgctgagagagcccggcctgctggccgtgcagggcctgcccgagggcctggccttcagaagacccgccgagtacgaccccaaggccctgatggccatcctggagcacagccacagaatcagattcaagctgaagagacccctggaggacggcggcagagacagcaaggccctggtggagctgaacggcgtgagcctgatccccaagggcagcagagactgcggcctgcacggccaggcccccaaggtgcccccccaggacctgccccccaccgccaccagcagcagcatggccagcttcctgtacagcaccgccctgcccaaccacgccatcagagagctgaagcaggaggcccccagctgccccctggcccccagcgacctgggcctgagcagacccatgcccgagcccaaggccaccggcgcccaggacttcagcgactgctgcggccagaagcccaccggccccggcggccccctgatccagaacgtgcacgccagcaagagaatcctgttcagcatcgtgcacgacaagagcgagaagtgggacgccttcatcaaggagaccgaggacatcaacaccctgagagagtgcgtgcagatcctgttcaacagcagatacgccgaggccctgggcctggaccacatggtgcccgtgccctacagaaagatcgcctgcgaccccgaggccgtggagatcgtgggcatccccgacaagatccccttcaagagaccctgcacctacggcgtgcccaagctgaagagaatcctggaggagagacacagcatccacttcatcatcaagagaatgttcgacgagagaatcttcaccggcaacaagttcaccaaggacaccaccaagctggagcccgccagcccccccgaggacaccagcgccgaggtgagcagagccaccgtgctggacctggccggcaacgccagaagcgacaagggcagcatgagcgaggactgcggccccggcaccagcggcgagctgggcggcctgagacccatcaagatcgagcccgaggacctggacatcatccaggtgaccgtgcccgaccccagccccaccagcgaggagatgaccgacagcatgcccggccacctgcccagcgaggacagcggctacggcatggagatgctgaccgacaagggcctgagcgaggacgccagacccgaggagagacccgtggaggacagccacggcgacgtgatcagacccctgagaaagcaggtggagctgctgttcaacaccagatacgccaaggccatcggcatcagcgagcccgtgaaggtgccctacagcaagttcctgatgcaccccgaggagctgttcgtggtgggcctgcccgagggcatcagcctgagaagacccaactgcttcggcatcgccaagctgagaaagatcctggaggccagcaacagcatccagttcgtgatcaagagacccgagctgctgaccgagggcgtgaaggagcccatcatggacagccagggcaccgccagcagcctgggcttcagcccccccgccctgccccccgagagagacagcggcgaccccctggtggacgagagcctgaagagacagggcttccaggagaactacgacgccagactgagcagaatcgacatcgccaacaccctgagagagcaggtgcaggacctgttcaacaagaagtacggcgaggccctgggcatcaagtaccccgtgcaggtgccctacaagagaatcaagagcaaccccggcagcgtgatcatcgagggcctgccccccggcatccccttcagaaagccctgcaccttcggcagccagaacctggagagaatcctggccgtggccgacaagatcaagttcaccgtgaccagacccttccagggcctgatccccaagcccgacgaggacgacgccaacagactgggcgagaaggtgatcctgagagagcaggtgaaggagctgttcaacgagaagtacggcgaggccctgggcctgaacagacccgtgctggtgccctacaagctgatcagagacagccccgacgccgtggaggtgaccggcctgcccgacgacatccccttcagaaaccccaacacctacgacatccacagactggagaagatcctgaaggccagagagcacgtgagaatggtgatcatcaaccagctgcagcccttcgccgagatctgcaacgacgccaaggtgcccgccaaggacagcagcatccccaagagaaagagaaagagagtgagcgagggcaacagcgtgagcagcagcagcagcagcagcagcagcagcagcagcaaccccgacagcgtggccagcgccaaccagatcagcctggtgcagtggcccatgtacatggtggactacgccggcctgaacgtgcagctgcccggccccctgaactactag

SEQ ID NO: 83767 - DNA, 2835 bp, synthetic construct
  misc_feature 1..2835: note = Description of Artificial Sequence: Synthetic coding sequence
  source 1..2835: mol_type = other DNA
atggccctgctgggcaagagatgcgacgtgcccaccaacggctgcggccccgacagatggaacagcgccttcaccagaaaggacgagatcatcaccagcctggtgagcgccctggacagcatgtgcagcgccctgagcaagctgaacgccgaggtggcctgcgtggccgtgcacgacgagagcgccttcgtggtgggcaccgagaagggcagaatgttcctgaacgccagaaaggagctgcagagcgacttcctgagattctgcagaggccccccctggaaggaccccgaggccgagcaccccaagaaggtgcagagaggcgagggcggcggcagaagcctgcccagaagcagcctggagcacggcagcgacgtgtacctgctgagaaagatggtggaggaggtgttcgacgtgctgtacagcgaggccctgggcagagccagcgtggtgcccctgccctacgagagactgctgagagagcccggcctgctggccgtgcagggcctgcccgagggcctggccttcagaagacccgccgagtacgaccccaaggccctgatggccatcctggagcacagccacagaatcagattcaagctgaagagacccctggaggacggcggcagagacagcaaggccctggtggagctgaacggcgtgagcctgatccccaagggcagcagagactgcggcctgcacggccaggcccccaaggtgcccccccaggacctgccccccaccgccaccagcagcagcatggccagcttcctgtacagcaccgccctgcccaaccacgccatcagagagctgaagcaggaggcccccagctgccccctggcccccagcgacctgggcctgagcagacccatgcccgagcccaaggccaccggcgcccaggacttcagcgactgctgcggccagaagcccaccggccccggcggccccctgatccagaacgtgcacgccagcaagagaatcctgttcagcatcgtgcacgacaagagcgagaagtgggacgccttcatcaaggagaccgaggacatcaacaccctgagagagtgcgtgcagatcctgttcaacagcagatacgccgaggccctgggcctggaccacatggtgcccgtgccctacagaaagatcgcctgcgaccccgaggccgtggagatcgtgggcatccccgacaagatccccttcaagagaccctgcacctacggcgtgcccaagctgaagagaatcctggaggagagacacagcatccacttcatcatcaagagaatgttcgacgagagaatcttcaccggcaacaagttcaccaaggacaccaccaagctggagcccgccagcccccccgaggacaccagcgccgaggtgagcagagccaccgtgctggacctggccggcaacgccagaagcgacaagggcagcatgagcgaggactgcggccccggcaccagcggcgagctgggcggcctgagacccatcaagatcgagcccgaggacctggacatcatccaggtgaccgtgcccgaccccagccccaccagcgaggagatgaccgacagcatgcccggccacctgcccagcgaggacagcggctacggcatggagatgctgaccgacaagggcctgagcgaggacgccagacccgaggagagacccgtggaggacagccacggcgacgtgatcagacccctgagaaagcaggtggagctgctgttcaacaccagatacgccaaggccatcggcatcagcgagcccgtgaaggtgccctacagcaagttcctgatgcaccccgaggagctgttcgtggtgggcctgcccgagggcatcagcctgagaagacccaactgcttcggcatcgccaagctgagaaagatcctggaggccagcaacagcatccagttcgtgatcaagagacccgagctgctgaccgagggcgtgaaggagcccatcatggacagccaggagagagacagcggcgaccccctggtggacgagagcctgaagagacagggcttccaggagaactacgacgccagactgagcagaatcgacatcgccaacaccctgagagagcaggtgcaggacctgttcaacaagaagtacggcgaggccctgggcatcaagtaccccgtgcaggtgccctacaagagaatcaagagcaaccccggcagcgtgatcatcgagggcctgccccccggcatccccttcagaaagccctgcaccttcggcagccagaacctggagagaatcctggccgtggccgacaagatcaagttcaccgtgaccagacccttccagggcctgatccccaagcccgacgaggacgacgccaacagactgggcgagaaggtgatcctgagagagcaggtgaaggagctgttcaacgagaagtacggcgaggccctgggcctgaacagacccgtgctggtgccctacaagctgatcagagacagccccgacgccgtggaggtgaccggcctgcccgacgacatccccttcagaaaccccaacacctacgacatccacagactggagaagatcctgaaggccagagagcacgtgagaatggtgatcatcaaccagctgcagcccttcgccgagatctgcaacgacgccaaggtgcccgccaaggacagcagcatccccaagagaaagagaaagagagtgagcgagggcaacagcgtgagcagcagcagcagcagcagcagcagcagcagcagcaaccccgacagcgtggccagcgccaaccagatcagcctggtgcagtggcccatgtacatggtggactacgccggcctgaacgtgcagctgcccggccccctgaactactag

SEQ ID NO: 83768 - DNA, 2931 bp, synthetic construct
  misc_feature 1..2931: note = Description of Artificial Sequence: Synthetic coding sequence
  source 1..2931: mol_type = other DNA
atggccctgctgggcaagagatgcgacgtgcccaccaacggctgcggccccgacagatggaacagcgccttcaccagaaaggacgagatcatcaccagcctggtgagcgccctggacagcatgtgcagcgccctgagcaagctgaacgccgaggtggcctgcgtggccgtgcacgacgagagcgccttcgtggtgggcaccgagaagggcagaatgttcctgaacgccagaaaggagctgcagagcgacttcctgagattctgcctgagcgccgcccagcacagagccgccaccagccagctggagggcagagtggtgagaagagtgctgaccgtggccagcagagccctgtgccccaccggcggccccccctggaaggaccccgaggccgagcaccccaagaaggtgcagagaggcgagggcggcggcagaagcctgcccagaagcagcctggagcacggcagcgacgtgtacctgctgagaaagatggtggaggaggtgttcgacgtgctgtacagcgaggccctgggcagagccagcgtggtgcccctgccctacgagagactgctgagagagcccggcctgctggccgtgcagggcctgcccgagggcctggccttcagaagacccgccgagtacgaccccaaggccctgatggccatcctggagcacagccacagaatcagattcaagctgaagagacccctggaggacggcggcagagacagcaaggccctggtggagctgaacggcgtgagcctgatccccaagggcagcagagactgcggcctgcacggccaggcccccaaggtgcccccccaggacctgccccccaccgccaccagcagcagcatggccagcttcctgtacagcaccgccctgcccaaccacgccatcagagagctgaagcaggaggcccccagctgccccctggcccccagcgacctgggcctgagcagacccatgcccgagcccaaggccaccggcgcccaggacttcagcgactgctgcggccagaagcccaccggccccggcggccccctgatccagaacgtgcacgccagcaagagaatcctgttcagcatcgtgcacgacaagagcgagaagtgggacgccttcatcaaggagaccgaggacatcaacaccctgagagagtgcgtgcagatcctgttcaacagcagatacgccgaggccctgggcctggaccacatggtgcccgtgccctacagaaagatcgcctgcgaccccgaggccgtggagatcgtgggcatccccgacaagatccccttcaagagaccctgcacctacggcgtgcccaagctgaagagaatcctggaggagagacacagcatccacttcatcatcaagagaatgttcgacgagagaatcttcaccggcaacaagttcaccaaggacaccaccaagctggagcccgccagcccccccgaggacaccagcgccgaggtgagcagagccaccgtgctggacctggccggcaacgccagaagcgacaagggcagcatgagcgaggactgcggccccggcaccagcggcgagctgggcggcctgagacccatcaagatcgagcccgaggacctggacatcatccaggtgaccgtgcccgaccccagccccaccagcgaggagatgaccgacagcatgcccggccacctgcccagcgaggacagcggctacggcatggagatgctgaccgacaagggcctgagcgaggacgccagacccgaggagagacccgtggaggacagccacggcgacgtgatcagacccctgagaaagcaggtggagctgctgttcaacaccagatacgccaaggccatcggcatcagcgagcccgtgaaggtgccctacagcaagttcctgatgcaccccgaggagctgttcgtggtgggcctgcccgagggcatcagcctgagaagacccaactgcttcggcatcgccaagctgagaaagatcctggaggccagcaacagcatccagttcgtgatcaagagacccgagctgctgaccgagggcgtgaaggagcccatcatggacagccaggagagagacagcggcgaccccctggtggacgagagcctgaagagacagggcttccaggagaactacgacgccagactgagcagaatcgacatcgccaacaccctgagagagcaggtgcaggacctgttcaacaagaagtacggcgaggccctgggcatcaagtaccccgtgcaggtgccctacaagagaatcaagagcaaccccggcagcgtgatcatcgagggcctgccccccggcatccccttcagaaagccctgcaccttcggcagccagaacctggagagaatcctggccgtggccgacaagatcaagttcaccgtgaccagacccttccagggcctgatccccaagcccgacgaggacgacgccaacagactgggcgagaaggtgatcctgagagagcaggtgaaggagctgttcaacgagaagtacggcgaggccctgggcctgaacagacccgtgctggtgccctacaagctgatcagagacagccccgacgccgtggaggtgaccggcctgcccgacgacatccccttcagaaaccccaacacctacgacatccacagactggagaagatcctgaaggccagagagcacgtgagaatggtgatcatcaaccagctgcagcccttcgccgagatctgcaacgacgccaaggtgcccgccaaggacagcagcatccccaagagaaagagaaagagagtgagcgagggcaacagcgtgagcagcagcagcagcagcagcagcagcagcagcagcaaccccgacagcgtggccagcgccaaccagatcagcctggtgcagtggcccatgtacatggtggactacgccggcctgaacgtgcagctgcccggccccctgaactactag

SEQ ID NO: 83769 - DNA, 609 bp, synthetic construct
  misc_feature 1..609: note = Description of Artificial Sequence: Synthetic coding sequence
  source 1..609: mol_type = other DNA
atgagctgcgtgccctggaagggcgacaaggccaagagcgagagcctggagctgccccaggccgcccccccccagatctaccacgagaagcagagaagagagctgtgcgccctgcacgccctgaacaacgtgttccaggacagcaacgccttcaccagagacaccctgcaggagatcttccagagactgagccccaacaccatggtgaccccccacaagaagagcatgctgggcaacggcaactacgacgtgaacgtgatcatggccgccctgcagaccaagggctacgaggccgtgtggtgggacaagagaagagacgtgggcgtgatcgccctgaccaacgtgatgggcttcatcatgaacctgcccagcagcctgtgctggggccccctgaagctgcccctgaagagacagcactggatctgcgtgagagaggtgggcggcgcctactacaacctggacagcaagctgaagatgcccgagtggatcggcggcgagagcgagctgagaaagttcctgaagcaccacctgagaggcaagaactgcgagctgctgctggtggtgcccgaggaggtggaggcccaccagagctggagaaccgacgtgtag

SEQ ID NO: 83770 - DNA, 1545 bp, synthetic construct
  misc_feature 1..1545: note = Description of Artificial Sequence: Synthetic coding sequence
  source 1..1545: mol_type = other DNA
atgaagtggagactgcaggagggcagaggcgaggccgtgtaccagatcggcgtggaggacaacggcctgctggtgggcctggccgaggaggagatgagagccagcctgaagaccctgcacagaatggccgagaaggtgggcgccgacatcaccgtgctgagagagagagaggtggactacgacagcgacatgcccagaaagatcaccgaggtgctggtgagaaaggtgcccgacaaccagcagttcctggacctgagagtggccgtgctgggcaacgtggacagcggcaagagcaccctgctgggcgtgctgacccagggcgagctggacaacggcagaggcagagccagactgaacctgttcagacacctgcacgagatccagagcggcagaaccagcagcatcagcttcgagatcctgggcttcaacagcaagggcgaggtggtgaactacagcgacagcagaaccgccgaggagatctgcgagagcagcagcaagatgatcaccttcatcgacctggccggccaccacaagtacctgcacaccaccatcttcggcctgaccagctactgccccgactgcgccctgctgctggtgagcgccaacaccggcatcgccggcaccaccagagagcacctgggcctggccctggccctgaaggtgcccttcttcatcgtggtgagcaagatcgacctgtgcgccaagaccaccgtggagagaaccgtgagacagctggagagagtgctgaagcagcccggctgccacaaggtgcccatgctggtgaccagcgaggacgacgccgtgaccgccgcccagcagttcgcccagagccccaacgtgacccccatcttcaccctgagcagcgtgagcggcgagagcctggacctgctgaaggtgttcctgaacatcctgccccccctgaccaacagcaaggagcaggaggagctgatgcagcagctgaccgagttccaggtggacgagatctacaccgtgcccgaggtgggcaccgtggtgggcggcaccctgagcagcggcatctgcagagagggcgaccagctggtggtgggccccaccgacgacggctgcttcctggagctgagagtgtgcagcatccagagaaacagaagcgcctgcagagtgctgagagccggccaggccgccaccctggccctgggcgacttcgacagagccctgctgagaaagggcatggtgatggtgagccccgagatgaaccccaccatctgcagcgtgttcgaggccgagatcgtgctgctgttccacgccaccaccttcagaagaggcttccaggtgaccgtgcacgtgggcaacgtgagacagaccgccgtggtggagaagatccacgccaaggacaagctgagaaccggcgagaaggccgtggtgagattcagattcctgaagcaccccgagtacctgaaggtgggcgccaagctgctgttcagagagggcgtgaccaagggcatcggccacgtgaccgacgtgcaggccatcaccgccggcgaggcccaggccaacatgggcttctag

SEQ ID NO: 83771 - DNA, 1809 bp, synthetic construct
  misc_feature 1..1809: note = Description of Artificial Sequence: Synthetic coding sequence
  source 1..1809: mol_type = other DNA
atggacagcagagtgagcgagctgttcggcggctgctgcagacccggcggcggccccgccgtgggcggcaccctgaaggccagaggcgccggcagcagcagcggctgcggcggccccaagggcaagaagaagaacggcagaaacagaggcggcaaggccaacaaccccccctacctgccccccgaggccgaggacggcaacatcgagtacaagctgaagctggtgaaccccagccagtacagattcgagcacctggtgacccagatgaagtggagactgcaggagggcagaggcgaggccgtgtaccagatcggcgtggaggacaacggcctgctggtgggcctggccgaggaggagatgagagccagcctgaagaccctgcacagaatggccgagaaggtgggcgccgacatcaccgtgctgagagagagagaggtggactacgacagcgacatgcccagaaagatcaccgaggtgctggtgagaaaggtgcccgacaaccagcagttcctggacctgagagtggccgtgctgggcaacgtggacagcggcaagagcaccctgctgggcgtgctgacccagggcgagctggacaacggcagaggcagagccagactgaacctgttcagacacctgcacgagatccagagcggcagaaccagcagcatcagcttcgagatcctgggcttcaacagcaagggcgaggtggtgaactacagcgacagcagaaccgccgaggagatctgcgagagcagcagcaagatgatcaccttcatcgacctggccggccaccacaagtacctgcacaccaccatcttcggcctgaccagctactgccccgactgcgccctgctgctggtgagcgccaacaccggcatcgccggcaccaccagagagcacctgggcctggccctggccctgaaggtgcccttcttcatcgtggtgagcaagatcgacctgtgcgccaagaccaccgtggagagaaccgtgagacagctggagagagtgctgaagcagcccggctgccacaaggtgcccatgctggtgaccagcgaggacgacgccgtgaccgccgcccagcagttcgcccagagccccaacgtgacccccatcttcaccctgagcagcgtgagcggcgagagcctggacctgctgaaggtgttcctgaacatcctgccccccctgaccaacagcaaggagcaggaggagctgatgcagcagctgaccgagttccaggtggacgagatctacaccgtgcccgaggtgggcaccgtggtgggcggcaccctgagcagcggcatctgcagagagggcgaccagctggtggtgggccccaccgacgacggctgcttcctggagctgagagtgtgcagcatccagagaaacagaagcgcctgcagagtgctgagagccggccaggccgccaccctggccctgggcgacttcgacagagccctgctgagaaagggcatggtgatggtgagccccgagatgaaccccaccatctgcagcgtgttcgaggccgagatcgtgctgctgttccacgccaccaccttcagaagaggcttccaggtgaccgtgcacgtgggcaacgtgagacagaccgccgtggtggagaagatccacgccaaggacaagctgagaaccggcgagaaggccgtggtgagattcagattcctgaagcaccccgagtacctgaaggtgggcgccaagctgctgttcagagagggcgtgaccaagggcatcggccacgtgaccgacgtgcaggccatcaccgccggcgaggcccaggccaacatgggcttctag

SEQ ID NO: 83772 - DNA, 735 bp, synthetic construct
  misc_feature 1..735: note = Description of Artificial Sequence: Synthetic coding sequence
  source 1..735: mol_type = other DNA
atgaagtggagactgcaggagggcagaggcgaggccatcttcaccctgagcagcgtgagcggcgagagcctggacctgctgaaggtgttcctgaacatcctgccccccctgaccaacagcaaggagcaggaggagctgatgcagcagctgaccgagttccaggtggacgagatctacaccgtgcccgaggtgggcaccgtggtgggcggcaccctgagcagcggcatctgcagagagggcgaccagctggtggtgggccccaccgacgacggctgcttcctggagctgagagtgtgcagcatccagagaaacagaagcgcctgcagagtgctgagagccggccaggccgccaccctggccctgggcgacttcgacagagccctgctgagaaagggcatggtgatggtgagccccgagatgaaccccaccatctgcagcgtgttcgaggccgagatcgtgctgctgttccacgccaccaccttcagaagaggcttccaggtgaccgtgcacgtgggcaacgtgagacagaccgccgtggtggagaagatccacgccaaggacaagctgagaaccggcgagaaggccgtggtgagattcagattcctgaagcaccccgagtacctgaaggtgggcgccaagctgctgttcagagagggcgtgaccaagggcatcggccacgtgaccgacgtgcaggccatcaccgccggcgaggcccaggccaacatgggcttctag

SEQ ID NO: 83773 - DNA, 462 bp, synthetic construct
  misc_feature 1..462: note = Description of Artificial Sequence: Synthetic coding sequence
  source 1..462: mol_type = other DNA
tgaggcatctgcagagagggcgaccagctggtggtgggccccaccgacgacggctgcttcctggagctgagagtgtgcagcatccagagaaacagaagcgcctgcagagtgctgagagccggccaggccgccaccctggccctgggcgacttcgacagagccctgctgagaaagggcatggtgatggtgagccccgagatgaaccccaccatctgcagcgtgttcgaggccgagatcgtgctgctgttccacgccaccaccttcagaagaggcttccaggtgaccgtgcacgtgggcaacgtgagacagaccgccgtggtggagaagatccacgccaaggacaagctgagaaccggcgagaaggccgtggccagagagagaggcgtgctgagcgccacctgcagcctgcccaccttctggagaggcgccaagctgggcgtggccagaaagggccagagctag

SEQ ID NO: 83774 - DNA, 465 bp, synthetic construct
  misc_feature 1..465: note = Description of Artificial Sequence: Synthetic coding sequence
  source 1..465: mol_type = other DNA
tgaggcatctgcagagagggcgaccagctggtggtgggccccaccgacgacggctgcttcctggagctgagagtgtgcagcatccagagaaacagaagcgcctgcagagtgctgagagccggccaggccgccaccctggccctgggcgacttcgacagagccctgctgagaaagggcatggtgatggtgagccccgagatgaaccccaccatctgcagcgtgttcgaggccgagatcgtgctgctgttccacgccaccaccttcagaagaggcttccaggtgaccgtgcacgtgggcaacgtgagacagaccgccgtggtggagaagatccacgccaaggtgagaggcacctggcccagcatcagccccgaggtgagaaaggagggcggcctgccccagaccggcagagagctgctggaccccaccatgggcatcaagccccacctgggctgggtggccgcctag

SEQ ID NO: 83775 - DNA, 543 bp, synthetic construct
  misc_feature 1..543: note = Description of Artificial Sequence: Synthetic coding sequence
  source 1..543: mol_type = other DNA
atgcagcagctgaccgagttccaggtggacgagatctacaccgtgcccgaggtgggcaccgtggtgggcggcaccctgagcagcggcatctgcagagagggcgaccagctggtggtgggccccaccgacgacggctgcttcctggagctgagagtgtgcagcatccagagaaacagaagcgcctgcagagtgctgagagccggccaggccgccaccctggccctgggcgacttcgacagagccctgctgagaaagggcatggtgatggtgagccccgagatgaaccccaccatctgcagcgtgttcgaggccgagatcgtgctgctgttccacgccaccaccttcagaagaggcttccaggtgaccgtgcacgtgggcaacgtgagacagaccgccgtggtggagaagatccacgccaaggacaagctgagaaccggcgagaaggccgtggccagagagagaggcgtgctgagcgccacctgcagcctgcccaccttctggagaggcgccaagctgggcgtggccagaaagggccagagctag

SEQ ID NO: 83776 - DNA, 951 bp, synthetic construct
  misc_feature 1..951: note = Description of Artificial Sequence: Synthetic coding sequence
  source 1..951: mol_type = other DNA
tgacagggcggcggcgccagagaggagaacaccagcttcagaagcagagaccccagagaggagggccagagactggacagccaggccgaggacggcaacatcgagtacaagctgaagctggtgaaccccagccagtacagattcgagcacctggtgacccagatgaagtggagactgcaggagggcagaggcgaggccgtgtaccagatcggcgtggaggacaacggcctgctggtgggcctggccgaggaggagatgagagccagcctgaagaccctgcacagaatggccgagaaggtgggcgccgacatcaccgtgctgagagagagagaggtggactacgacagcgacatgcccagaaagatcaccgaggtgctggtgagaaaggtgcccgacaaccagcagttcctggacctgagagtggccgtgctgggcaacgtggacagcggcaagagcaccctgctgggcgtgctgacccagggcgagctggacaacggcagaggcagagccagactgaacctgttcagacacctgcacgagatccagagcggcagaaccagcagcatcagcttcgagatcctgggcttcaacagcaagggcgaggtggtgaactacagcgacagcagaaccgccgaggagatctgcgagagcagcagcaagatgatcaccttcatcgacctggccggccaccacaagtacctgcacaccaccatcttcggcctgaccagctactgccccgactgcgccctgctgctggtgagcgccaacaccggcatcgccggcaccaccagagagcacctgggcctggccctggccctgaaggtgcccttcttcatcgtggtgagcaagatcgacctgtgcgccaagaccaccgtggagagaaccgtgagacagctggagagagtgctgaagcagcccggctgccacaaggtgcccatgctggtgacctag

SEQ ID NO: 83777 - DNA, 684 bp, synthetic construct
  misc_feature 1..684: note = Description of Artificial Sequence: Synthetic coding sequence
  source 1..684: mol_type = other DNA
atggacagcagagtgagcgagctgttcggcggctgctgcagacccggcggcggccccgccgtgggcggcaccctgaaggccagaggcgccggcagcagcagcggctgcggcggccccaagggcaagaagaagaacggcagaaacagaggcggcaaggccaacaaccccccctacctgccccccgaggccgaggacggcaacatcgagtacaagtacagattcgagcacctggtgacccagatgaagtggagactgcaggagggcagaggcgaggccgtgtaccagatcggcgtggaggacaacggcctgctggtgggcctggccgaggaggagatgagagccagcctgaagaccctgcacagaatggccgagaaggtgggcgccgacatcaccgtgctgagagagagagaggtggactacgacagcgacatgcccagaaagatcaccgaggtgctggtgagaaaggtgcccgacaaccagcagttcctggacctgagagtggccgtgctgggcaacgtggacagcggcaagagcaccctgctgggcgtgctgacccagggcgagctggacaacggcagaggcagagccagactgaacctgttcagacacctgcacgagatccagagcggcagaaccagcagcatcagcttcgagatcctgggcttcaacagcaagggcgagtag

SEQ ID NO: 83778 - DNA, 1221 bp, synthetic construct
  misc_feature 1..1221: note = Description of Artificial Sequence: Synthetic coding sequence
  source 1..1221: mol_type = other DNA
atggcccccgccagatgcttcagcgccagactgagaaccgtgttccagggcgtgggccactgggccctgagcacctgggccggcctgaagcccagcagactgctgccccagagagccagccccagactgctgagcgtgggcagagccgacctggccaagcaccaggagctgcccggcaagaagctgctgagcgagaagaagctgaagagatacttcgtggactacagaagagtgctggtgtgcggcggcaacggcggcgccggcgccagctgcttccacagcgagcccagaaaggagttcggcggccccgacggcggcgacggcggcaacggcggccacgtgatcctgagagtggaccagcaggtgaagagcctgagcagcgtgctgagcagataccagggcttcagcggcgaggacggcggcagcaagaactgcttcggcagaagcggcgccgtgctgtacatcagagtgcccgtgggcaccctggtgaaggagggcggcagagtggtggccgacctgagctgcgtgggcgacgagtacatcgccgccctgggcggcgccggcggcaagggcaacagattcttcctggccaacaacaacagagcccccgtgacctgcacccccggccagcccggccagcagagagtgctgcacctggagctgaagaccgtggcccacgccggcatggtgggcttccccaacgccggcaagagcagcctgctgagagccatcagcaacgccagacccgccgtggccagctaccccttcaccaccctgaagccccacgtgggcatcgtgcactacgagggccacctgcagatcgccgtggccgacatccccggcatcatcagaggcgcccaccagaacagaggcctgggcagcgccttcctgagacacatcgagagatgcagattcctgctgttcgtggtggacctgagccagcccgagccctggacccaggtggacgacctgaagtacgagctggagatgtacgagaagggcctgagcgccagaccccacgccatcgtggccaacaagatcgacctgcccgaggcccaggccaacctgagccagctgagagaccacctgggccaggaggtgatcgtgctgagcgccctgaccggcgagaacctggagcagctgctgctgcacctgaaggtgctgtacgacgcctacgccgaggccgagctgggccagggcagacagcccctgagatggtag

SEQ ID NO: 83779 - DNA, 747 bp, synthetic construct
  misc_feature 1..747: note = Description of Artificial Sequence: Synthetic coding sequence
  source 1..747: mol_type = other DNA
atggcccccgccagatgcttcagcgccagactgagaaccgtgttccagggcgtgggccactgggccctgagcacctgggccggcctgaagcccagcagactgctgccccagagagccagccccagactgctgagcgtgggcagagccgacctggccaagcaccaggagctgcccggcaagaagctgctgagcgagaagaagctgaagagatacttcgtggactacagaagagtgctggtgtgcggcggcaacggcggcgccggcgccagctgcttccacagcgagcccagaaaggagttcggcggccccgacggcggcgacggcggcaacggcggccacgtgatcctgagagtggccgacatccccggcatcatcagaggcgcccaccagaacagaggcctgggcagcgccttcctgagacacatcgagagatgcagattcctgctgttcgtggtggacctgagccagcccgagccctggacccaggtggacgacctgaagtacgagctggagatgtacgagaagggcctgagcgccagaccccacgccatcgtggccaacaagatcgacctgcccgaggcccaggccaacctgagccagctgagagaccacctgggccaggaggtgatcgtgctgagcgccctgaccggcgagaacctggagcagctgctgctgcacctgaaggtgctgtacgacgcctacgccgaggccgagctgggccagggcagacagcccctgagatggtag

SEQ ID NO: 83780 - DNA, 702 bp, synthetic construct
  misc_feature 1..702: note = Description of Artificial Sequence: Synthetic coding sequence
  source 1..702: mol_type = other DNA
atggcccccgccagatgcttcagcgccagactgagaaccgtgttccagggcgtgggccactgggccctgagcacctgggccggcctgaagcccagcagactgctgccccagagagccagccccagactgctgagcgtgggcagagccgacctggccaagcaccaggagctgcccggcaagaagctgctgagcgagaagaagctgaagagatacttcgtggactacagaagagtgctggtgtgcggcggcaacggcggcgccggcgccagctgcttccacagcgagcccagaaaggagttcggcggccccgacggcggcgacggcggcaacggcggccacgtgatcctgagagtggaccagcaggtgaagagcctgagcagcgtgctgagcagataccagggcttcagcggcgaggacggcggcagcaagaactgcttcggcagaagcggcgccgtgctgtacatcagagtgcccgtgggcaccctggtgaaggagggcggcagagtggtggccgacctgagctgcgtgggcgacgagtacatcgccgccctgggcggcgccggcggcaagggcaacagattcttcctggccaacaacaacagagcccccgtgacctgcacccccggccagcccggccagcagagagtgctgcacctggagctgaagaccgtggcccacgccggcatggtgggcttcccctag

SEQ ID NO: 83781 - DNA, 537 bp, synthetic construct
  misc_feature 1..537: note = Description of Artificial Sequence: Synthetic coding sequence
  source 1..537: mol_type = other DNA
atggtgggcttccccaacgccggcaagagcagcctgctgagagccatcagcaacgccagacccgccgtggccagctaccccttcaccaccctgaagccccacgtgggcatcgtgcactacgagggccacctgcagatcgccgtggccgacatccccggcatcatcagaggcgcccaccagaacagaggcctgggcagcgccttcctgagacacatcgagagatgcagattcctgctgttcgtggtggacctgagccagcccgagccctggacccaggtggacgacctgaagtacgagctggagatgtacgagaagggcctgagcgccagaccccacgccatcgtggccaacaagatcgacctgcccgaggcccaggccaacctgagccagctgagagaccacctgggccaggaggtgatcgtgctgagcgccctgaccggcgagaacctggagcagctgctgctgcacctgaaggtgctgtacgacgcctacgccgaggccgagctgggccagggcagacagcccctgagatggtag

SEQ ID NO: 83782 - DNA, 864 bp, synthetic construct
  misc_feature 1..864: note = Description of Artificial Sequence: Synthetic coding sequence
  source 1..864: mol_type = other DNA
agaagcaacctgaagagagacgtggcccacctgtacagaggcgtgggcagcagatacatcatgggcagcggcgagagcttcatgcagctgcagcagagactgctgagagagaaggaggccaagatcagaaaggccctggacagactgagaaagaagagacacctgctgagaagacagagaaccagaagagagttccccgtgatcagcgtggtgggctacaccaactgcggcaagaccaccctgatcaaggccctgaccggcgacgccgccatccagcccagagaccagctgttcgccaccctggacgtgaccgcccacgccggcaccctgcccagcagaatgaccgtgctgtacgtggacaccatcggcttcctgagccagctgccccacggcctgatcgagagcttcagcgccaccctggaggacgtggcccacagcgacctgatcctgcacgtgagagacgtgagccaccccgaggccgagctgcagaagtgcagcgtgctgagcaccctgagaggcctgcagctgcccgcccccctgctggacagcatggtggaggtgcacaacaaggtggacctggtgcccggctacagccccaccgagcccaacgtggtgcccgtgagcgccctgagaggccacggcctgcaggagctgaaggccgagctggacgccgccgtgctgaaggccaccggcagacagatcctgaccctgagagtgagactggccggcgcccagctgagctggctgtacaaggaggccaccgtgcaggaggtggacgtgatccccgaggacggcgccgccgacgtgagagtgatcatcagcaacagcgcctacggcaagttcagaaagctgttccccggctag

SEQ ID NO: 83783 - DNA, 864 bp, synthetic construct
  misc_feature 1..864: note = Description of Artificial Sequence: Synthetic coding sequence
  source 1..864: mol_type = other DNA
tgaagcaacctgaagagagacgtggcccacctgtacagaggcgtgggcagcagatacatcatgggcagcggcgagagcttcatgcagctgcagcagagactgctgagagagaaggaggccaagatcagaaaggccctggacagactgagaaagaagagacacctgctgagaagacagagaaccagaagagagttccccgtgatcagcgtggtgggctacaccaactgcggcaagaccaccctgatcaaggccctgaccggcgacgccgccatccagcccagagaccagctgttcgccaccctggacgtgaccgcccacgccggcaccctgcccagcagaatgaccgtgctgtacgtggacaccatcggcttcctgagccagctgccccacggcctgatcgagagcttcagcgccaccctggaggacgtggcccacagcgacctgatcctgcacgtgagagacgtgagccaccccgaggccgagctgcagaagtgcagcgtgctgagcaccctgagaggcctgcagctgcccgcccccctgctggacagcatggtggaggtgcacaacaaggtggacctggtgcccggctacagccccaccgagcccaacgtggtgcccgtgagcgccctgagaggccacggcctgcaggagctgaaggccgagctggacgccgccgtgctgaaggccaccggcagacagatcctgaccctgagagtgagactggccggcgcccagctgagctggctgtacaaggaggccaccgtgcaggaggtggacgtgatccccgaggacggcgccgccgacgtgagagtgatcatcagcaacagcgcctacggcaagttcagaaagctgttccccggctag

SEQ ID NO: 83784 - DNA, 891 bp, synthetic construct
  misc_feature 1..891: note = Description of Artificial Sequence: Synthetic coding sequence
  source 1..891: mol_type = other DNA
atgaccctgaacaacgtgaccatgagacagggcaccgtgggcatgcagccccagcagcagagatggagcatccccgccgacggcagacacctgatggtgcagaaggagccccaccagtacagccacagaaacagacacagcgccacccccgaggaccactgcagaagaagctggagcagcgacagcaccgacagcgtgatcagcagcgagagcggcaacacctactacagagtggtgctgatcggcgagcagggcgtgggcaagagcaccctggccaacatcttcgccggcgtgcacgacagcatggacagcgactgcgaggtgctgggcgaggacacctacgagagaaccctgatggtggacggcgagagcgccaccatcatcctgctggacatgtgggagaacaagggcgagaacgagtggctgcacgaccactgcatgcaggtgggcgacgcctacctgatcgtgtacagcatcaccgacagagccagcttcgagaaggccagcgagctgagaatccagctgagaagagccagacagaccgaggacatccccatcatcctggtgggcaacaagagcgacctggtgagatgcagagaggtgagcgtgagcgagggcagagcctgcgccgtggtgttcgactgcaagttcatcgagaccagcgccgccgtgcagcacaacgtgaaggagctgttcgagggcatcgtgagacaggtgagactgagaagagacagcaaggagaagaacgagagaagactggcctaccagaagagaaaggagagcatgcccagaaaggccagaagattctggggcaagatcgtggccaagaacaacaagaacatggccttcaagctgaagagcaagagctgccacgacctgagcgtgctgtag

SEQ ID NO: 83785 - DNA, 891 bp, synthetic construct; identical to SEQ ID NO: 83784
  misc_feature 1..891: note = Description of Artificial Sequence: Synthetic coding sequence
  source 1..891: mol_type = other DNA

SEQ ID NO: 83786 - DNA, 282 bp, synthetic construct
  misc_feature 1..282: note = Description of Artificial Sequence: Synthetic coding sequence
  source 1..282: mol_type = other DNA
atgaccctgaacaacgtgaccatgagacagggcaccgtgggcatgcagccccagcagcagagatggagcatccccgccgacggcagacacctgatggtgcagaaggagccccaccagtacagccacagaaacagacacagcgccacccccgaggaccactgcagaagaagctggagcagcgacagcaccgacagcgtgatcagcagcgagagcggcaacacctactacagagtggtgctgatcggcgagcagggcgtgggcaagagcaccctggccaactag

SEQ ID NO: 83787 - DNA, 927 bp, synthetic construct
  misc_feature 1..927: note = Description of Artificial Sequence: Synthetic coding sequence
  source 1..927: mol_type = other DNA
atggtgatggagaagcccagccccctgctggtgggcagagagttcgtgagacagtactacaccctgctgaaccaggcccccgacatgctgcacagattctacggcaagaacagcagctacgtgcacggcggcctggacagcaacggcaagcccgccgacgccgtgtacggccagaaggaggtggaggagcccgaggagagacagcagacccccgaggtggtgcccgacgacagcggcaccttctacgaccaggccgtggtgagcaacgacatggaggagcacctggaggagcccgtggccgagcccgagcccgaccccgagcccgagcccgagcaggagcccgtgagcgagatccaggaggagaagccccccagacccgagagcaagcccgagagccagatccccccccagagaccccagagagaccagagagtgagagagcagagaatcaacatccccccccagagaggccccagacccatcagagaggccggcgagcagggcgacatcgagcccagaagaatggtgagacaccccgacagccaccagctgttcatcggcaacctgccccacgaggtggacaagagcgagctgaaggacttcttccagagctacggcaacgtggtggagctgagaatcaacagcggcggcaagctgcccaacttcggcttcgtggtgttcgacgacagcgagcccgtgcagaaggtgctgagcaacagacccatcatgttcagaggcgaggtgagactgaacgtggaggagaagaagaccagagccgccagagagggcgacagaagagacaacagactgagaggccccggcggccccagaggcggcctgggcggcggcatgagaggcccccccagaggcggcatggtgcagaagcccggcttcggcgtgggcagaggcctggcccccagacagtag

SEQ ID NO: 83788 - DNA, 1401 bp, synthetic construct
  misc_feature 1..1401: note = Description of Artificial Sequence: Synthetic coding sequence
  source 1..1401: mol_type = other DNA
atggtgatggagaagcccagccccctgctggtgggcagagagttcgtgagacagtactacaccctgctgaaccaggcccccgacatgctgcacagattctacggcaagaacagcagctacgtgcacggcggcctggacagcaacggcaagcccgccgacgccgtgtacggccagaaggagatccacagaaaggtgatgagccagaacttcaccaactgccacaccaagatcagacacgtggacgcccacgccaccctgaacgacggcgtggtggtgcaggtgatgggcctgctgagcaacaacaaccaggccctgagaagattcatgcagaccttcgtgctggcccccgagggcagcgtggccaacaagttctacgtgcacaacgacatcttcagataccaggacgaggtgttcggcggcttcgtgaccgagccccaggaggagagcgaggaggaggtggaggagcccgaggagagacagcagacccccgaggtggtgcccgacgacagcggcaccttctacgaccaggccgtggtgagcaacgacatggaggagcacctggaggagcccgtggccgagcccgagcccgaccccgagcccgagcccgagcaggagcccgtgagcgagatccaggaggagaagcccgagcccgtgctggaggagaccgcccccgaggacgcccagaagagcagcagccccgcccccgccgacatcgcccagaccgtgcaggaggacctgagaaccttcagctgggccagcgtgaccagcaagaacctgccccccagcggcgccgtgcccgtgaccggcatccccccccacgtggtgaaggtgcccgccagccagcccagacccgagagcaagcccgagagccagatccccccccagagaccccagagagaccagagagtgagagagcagagaatcaacatccccccccagagaggccccagacccatcagagaggccggcgagcagggcgacatcgagcccagaagaatggtgagacaccccgacagccaccagctgttcatcggcaacctgccccacgaggtggacaagagcgagctgaaggacttcttccagagctacggcaacgtggtggagctgagaatcaacagcggcggcaagctgcccaacttcggcttcgtggtgttcgacgacagcgagcccgtgcagaaggtgctgagcaacagacccatcatgttcagaggcgaggtgagactgaacgtggaggagaagaagaccagagccgccagagagggcgacagaagagacaacagactgagaggccccggcggccccagaggcggcctgggcggcggcatgagaggcccccccagaggcggcatggtgcagaagcccggcttcggcgtgggcagaggcctggcccccagacagtag

SEQ ID NO: 83789 - DNA, 1401 bp, synthetic construct; identical to SEQ ID NO: 83788
  misc_feature 1..1401: note = Description of Artificial Sequence: Synthetic coding sequence
  source 1..1401: mol_type = other DNA

SEQ ID NO: 83790 - DNA, 318 bp, synthetic construct
  misc_feature 1..318: note = Description of Artificial Sequence: Synthetic coding sequence
  source 1..318: mol_type = other DNA
atggtgatggagaagcccagccccctgctggtgggcagagagttcgtgagacagtactacaccctgctgaaccaggcccccgacatgctgcacagattctacggcaagaacagcagctacgtgcacggcggcctggacagcaacggcaagcccgccgacgccgtgtacggccagaaggagatccacagaaaggtgatgagccagaacttcaccaactgccacaccaagatcagacacgtggacgcccacgccaccctgaacgacggcgtggtggtgcaggtgatgggcctgctgagcaacaacaaccaggccctgtag

SEQ ID NO: 83791 - DNA, 369 bp, synthetic construct
  misc_feature 1..369: note = Description of Artificial Sequence: Synthetic coding sequence
  source 1..369: mol_type = other DNA
atggtgatggagaagcccagccccctgctggtgggcagagagttcgtgagacagtactacaccctgctgaaccaggcccccgacatgctgcacagattctacggcaagaacagcagctacgtgcacggcggcctggacagcaacggcaagcccgccgacgccgtgtacggccagaaggagatccacagaaaggtgatgagccagaacttcaccaactgccacaccaagatcagacacgtggacgcccacgccaccctgaacgacggcgtggtggtgcaggtgatgggcctgctgagcaacaacaaccaggccctgagaagattcatgcagaccttcgtgctggcccccgagagcctgaagaagaagtag

SEQ ID NO: 83792 - DNA, 354 bp, synthetic construct
  misc_feature 1..354: note = Description of Artificial Sequence: Synthetic coding sequence
  source 1..354: mol_type = other DNA
atggtgatggagaagcccagccccctgctggtgggcagagagttcgtgagacagtactacaccctgctgaaccaggcccccgacatgctgcacagattctacggcaagaacagcagctacgtgcacggcggcctggacagcaacggcaagcccgccgacgccgtgtacggccagaaggagatccacagaaaggtgatgagccagaacttcaccaactgccacaccaagatcagacacgtggacgcccacgccaccctgaacgacggcgtggtggtgcaggtgatgggcctgctgagcaacaacaaccaggccctgagaagattcatgcagaccttcgtgctggcccccgagtag

SEQ ID NO: 83793 - DNA, 369 bp, synthetic construct; identical to SEQ ID NO: 83791
  misc_feature 1..369: note = Description of Artificial Sequence: Synthetic coding sequence
  source 1..369: mol_type = other DNA

SEQ ID NO: 83794 - DNA, 321 bp, synthetic construct
  misc_feature 1..321: note = Description of Artificial Sequence: Synthetic coding sequence
  source 1..321: mol_type = other DNA
atggtgatggagaagcccagccccctgctggtgggcagagagttcgtgagacagtactacaccctgctgaaccaggcccccgacatgctgcacagattctacggcaagaacagcagctacgtgcacggcggcctggacagcaacggcaagcccgccgacgccgtgtacggccagaaggagatccacagaaaggtgatgagccagaacttcaccaactgccacaccaagatcagacacgtggacgcccacgccaccctgaacgacggcgtggtggtgcaggtgatgggcctgctgagcaacaacaaccaggccctgagatag

SEQ ID NO: 83795 - DNA, 855 bp, synthetic construct
  misc_feature 1..855: note = Description of Artificial Sequence: Synthetic coding sequence
  source 1..855: mol_type = other DNA
atggaggagcacctggaggagcccgtggccgagcccgagcccgaccccgagcccgagcccgagcaggagcccgtgagcgagatccaggaggagaagcccgagcccgtgctggaggagaccgcccccgaggacgcccagaagagcagcagccccgcccccgccgacatcgcccagaccgtgcaggaggacctgagaaccttcagctgggccagcgtgaccagcaagaacctgccccccagcggcgccgtgcccgtgaccggcatccccccccacgtggtgaaggtgcccgccagccagcccagacccgagagcaagcccgagagccagatccccccccagagaccccagagagaccagagagtgagagagcagagaatcaacatccccccccagagaggccccagacccatcagagaggccggcgagcagggcgacatcgagcccagaagaatggtgagacaccccgacagccaccagctgttcatcggcaacctgccccacgaggtggacaagagcgagctgaaggacttcttccagagctacggcaacgtggtggagctgagaatcaacagcggcggcaagctgcccaacttcggcttcgtggtgttcgacgacagcgagcccgtgcagaaggtgctgagcaacagacccatcatgttcagaggcgaggtgagactgaacgtggaggagaagaagaccagagccgccagagagggcgacagaagagacaacagactgagaggccccggcggccccagaggcggcctgggcggcggcatgagaggcccccccagaggcggcatggtgcagaagcccggcttcggcgtgggcagaggcctggcccccagacagtag

SEQ ID NO: 83796 - DNA, 4359 bp, synthetic construct
  misc_feature 1..4359: note = Description of Artificial Sequence: Synthetic coding sequence
  source 1..4359: mol_type = other DNA
atggtgaagctggacatccacaccctggcccaccacctgaagcaggagagactgtacgtgaacagcgagaagcagctgatccagagactgaacgccgacgtgctgaagaccgccgagaagctgtacagaaccgcctggatcgccaagcagcagagaatcaacctggacagactgatcatcaccagcgccgaggccagccccgccgagtgctgccagcacgccaagatcctggaggacacccagttcgtggacggctacaagcagctgggcttccaggagaccgcctacggcgagttcctgagcagactgagagagaaccccagactgatcgccagcagcctggtggccggcgagaagctgaaccaggagaacacccagagcgtgatctacaccgtgttcaccagcctgtacggcaactgcatcatgcaggaggacgagagctacctgctgcaggtgctgagatacctgatcgagttcgagctgaaggagagcgacaaccccagaagactgctgagaagaggcacctgcgccttcagcatcctgttcaagctgttcagcgagggcctgttcagcgccaagctgttcctgaccgccaccctgcacgagcccatcatgcagctgctggtggaggacgaggaccacctggagaccgaccccaacaagctgatcgagagattcagccccagccagcaggagaagctgttcggcgagaagggcagcgacagattcagacagaaggtgcaggagatggtggagagcaacgaggccaagctggtggccctggtgaacaagttcatcggctacctgaagcagaacacctactgcttcccccacagcctgagatggatcgtgagccagatgtacaagaccctgagctgcgtggacagactggaggtgggcgaggtgagagccatgtgcaccgacctgctgctggcctgcttcatctgccccgccgtggtgaaccccgagcagtacggcatcatcagcgacgcccccatcaacgaggtggccagattcaacctgatgcaggtgggcagactgctgcagcagctggccatgaccggcagcgaggagggcgaccccagaaccaagagcagcctgggcaagttcgacaagagctgcgtggccgccttcctggacgtggtgatcggcggcagagccgtggagaccccccccctgagcagcgtgaacctgctggagggcctgagcagaaccgtggtgtacatcacctacagccagctgatcaccctggtgaacttcatgaagagcgtgatgagcggcgaccagctgagagaggacagaatggccctggacaacctgctggccaacctgccccccgccaagcccggcaagagcagcagcctggagatgaccccctacaacaccccccagctgagccccgccaccacccccgccaacaagaagaacagactgcccatcgccaccagaagcagaagcagaaccaacatgctgatggacctgcacatggaccacgagggcagcagccaggagaccatccaggaggtgcagcccgaggaggtgctggtgatcagcctgggcaccggcccccagctgacccccggcatgatgagcgagaacgaggtgctgaacatgcagctgagcgacggcggccagggcgacgtgcccgtggacgagaacaagctgcacggcaagcccgacaagaccctgagattcagcctgtgcagcgacaacctggagggcatcagcgagggccccagcaacagaagcaacagcgtgagcagcctggacctggagggcgagagcgtgagcgagctgggcgccggccccagcggcagcaacggcgtggaggccctgcagctgctggagcacgagcaggccaccacccaggacaacctggacgacaagctgagaaagttcgagatcagagacatgatgggcctgaccgacgacagagacatcagcgagaccgtgagcgagacctggagcaccgacgtgctgggcagcgacttcgaccccaacatcgacgaggacagactgcaggagatcgccggcgccgccgccgagaacatgctgggcagcctgctgtgcctgcccggcagcggcagcgtgctgctggacccctgcaccggcagcaccatcagcgagaccaccagcgaggcctggagcgtggaggtgctgcccagcgacagcgaggcccccgacctgaagcaggaggagagactgcaggagctggagagctgcagcggcctgggcagcaccagcgacgacaccgacgtgagagaggtgagcagcagacccagcacccccggcctgagcgtggtgagcggcatcagcgccaccagcgaggacatccccaacaagatcgaggacctgagaagcgagtgcagcagcgacttcggcggcaaggacagcgtgaccagccccgacatggacgagatcacccacggcgccagcgccgtggtgagacccaaggtgcactacgccagacccagccaccccccccccgacccccccatcctggagggcgccgtgggcggcaacgaggccagactgcccaacttcggcagccacgtgctgacccccgccgagatggaggccttcaagcagagacacagctaccccgagagactggtgagaagcagaagcagcgacatcgtgagcagcgtgagaagacccatgagcgaccccagctggaacagaagacccggcaacgaggagagagagctgccccccgccgccgccatcggcgccaccagcctggtggccgccccccacagcagcagcagcagccccagcaaggacagcagcagaggcgagaccgaggagagaaaggacagcgacgacgagaagagcgacagaaacagaccctggtggagaaagagattcgtgagcgccatgcccaaggcccccatccccttcagaaagaaggagaagcaggagaaggacaaggacgacctgggccccgacagattcagcaccctgaccgacgaccccagccccagactgagcgcccaggcccaggtggccgaggacatcctggacaagtacagaaacgccatcaagagaaccagccccagcgacggcgccatggccaactacgagagcaccggcgacaaccacgacagagacctgagcagcaagctgctgtaccacagcgacaaggaggtgatgggcgacggcgagagcgcccacgacagccccagagacgaggccctgcagaacatcagcgccgacgacctgcccgacagcgccagccaggccgcccacccccaggacagcgccttcagctacagagacgccaagaagaagctgagactggccctgtgcagcgccgacagcgtggccttccccgtgctgacccacagcaccagaaacggcctgcccgaccacaccgaccccgaggacaacgagatcgtgtgcttcctgaaggtgcagatcgccgaggccatcaacctgcaggacaagaacctgatggcccagctgcaggagaccatgagatgcgtgtgcagattcgacaacagaacctgcagaaagctgctggccagcatcgccgaggactacagaaagagagccccctacatcgcctacctgaccagatgcagacagggcctgcagaccacccaggcccacctggagagactgctgcagagagtgctgagagacaaggaggtggccaacagatacttcaccaccgtgtgcgtgagactgctgctggagagcaaggagaagaagatcagagagttcatccaggacttccagaagctgaccgccgccgacgacaagaccgcccaggtggaggacttcctgcagttcctgtacggcgccatggcccaggacgtgatctggcagaacgccagcgaggagcagctgcaggacgcccagctggccatcgagagaagcgtgatgaacagaatcttcaagctggccttctaccccaaccaggacggcgacatcctgagagaccaggtgctgcacgagcacatccagagactgagcaaggtggtgaccgccaaccacagagccctgcagatccccgaggtgtacctgagagaggccccctggcccagcgcccagagcgagatcagaaccatcagcgcctacaagacccccagagacaaggtgcagtgcatcctgagaatgtgcagcaccatcatgaacctgctgagcctggccaacgaggacagcgtgcccggcgccgacgacttcgtgcccgtgctggtgttcgtgctgatcaaggccaaccccccctgcctgctgagcaccgtgcagtacatcagcagcttctacgccagctgcctgagcggcgaggagagctactggtggatgcagttcaccgccgccgtggagttcatcaagaccatcgacgacagaaagtag

SEQ ID NO: 83797 - DNA, 1494 bp, synthetic construct
  misc_feature 1..1494: note = Description of Artificial Sequence: Synthetic coding sequence
  source 1..1494: mol_type = other DNA
atggtgaagctggacatccacaccctggcccaccacctgaagcaggagagactgtacgtgaacagcgagaagcagctgatccagagactgaacgccgacgtgctgaagaccgccgagaagctgtacagaaccgcctggatcgccaagcagcagagaatcaacctggacagactgatcatcaccagcgccgaggccagccccgccgagtgctgccagcacgccaagatcctggaggacacccagttcgtggacggctacaagcagctgggcttccaggagaccgcctacggcgagttcctgagcagactgagagagaaccccagactgatcgccagcagcctggtggccggcgagaagctgaaccaggagaacacccagagcgtgatctacaccgtgttcaccagcctgtacggcaactgcatcatgcaggaggacgagagctacctgctgcaggtgctgagatacctgatcgagttcgagctgaaggagagcgacaaccccagaagactgctgagaagaggcacctgcgccttcagcatcctgttcaagctgttcagcgagggcctgttcagcgccaagctgttcctgaccgccaccctgcacgagcccatcatgcagctgctggtggaggacgaggaccacctggagaccgaccccaacaagctgatcgagagattcagccccagccagcaggagaagctgttcggcgagaagggcagcgacagattcagacagaaggtgcaggagatggtggagagcaacgaggccaagctggtggccctggtgaacaagttcatcggctacctgaagcagaacacctactgcttcccccacagcctgagatggatcgtgagccagatgtacaagaccctgagctgcgtggacagactggaggtgggcgaggtgagagccatgtgcaccgacctgctgctggcctgcttcatctgccccgccgtggtgaaccccgagcagtacggcatcatcagcgacgcccccatcaacgaggtggccagattcaacctgatgcaggtgggcagactgctgcagcagctggccatgaccggcagcgaggagggcgaccccagaaccaagagcagcctgggcaagttcgacaagagctgcgtggccgccttcctggacgtggtgatcggcggcagagccgtggagaccccccccctgagcagcgtgaacctgctggagggcctgagcagaaccgtggtgtacatcacctacagccagctgatcaccctggtgaacttcatgaagagcgtgatgagcggcgaccagctgagagaggacagaatggccctggacaacctgctggccaacctgccccccgccaagcccggcaagagcagcagcctggagatgaccccctacaacaccccccagctgagccccgccaccacccccgccaacaagaagaacagactgcccatcggcaaggagaacttcagctactggagcttcctgctgaacctgatcttccactag

SEQ ID NO: 83798 - DNA, 4437 bp, synthetic construct
  misc_feature 1..4437: note = Description of Artificial Sequence: Synthetic coding sequence
  source 1..4437: mol_type = other DNA
atggtgaagctggacatccacaccctggcccaccacctgaagcaggagagactgtacgtgaacagcgagaagcagctgatccagagactgaacgccgacgtgctgaagaccgccgagaagctgtacagaaccgcctggatcgccaagcagcagagaatcaacctggacagactgatcatcaccagcgccgaggccagccccgccgagtgctgccagcacgccaagatcctggaggacacccagttcgtggacggctacaagcagctgggcttccaggagaccgcctacggcgagttcctgagcagactgagagagaaccccagactgatcgccagcagcctggtggccggcgagaagctgaaccaggagaacacccagagcgtgatctacaccgtgttcaccagcctgtacggcaactgcatcatgcaggaggacgagagctacctgctgcaggtgctgagatacctgatcgagttcgagctgaaggagagcgacaaccccagaagactgctgagaagaggcacctgcgccttcagcatcctgttcaagctgttcagcgagggcctgttcagcgccaagctgttcctgaccgccaccctgcacgagcccatcatgcagctgctggtggaggacgaggaccacctggagaccgaccccaacaagctgatcgagagattcagccccagccagcaggagaagctgttcggcgagaagggcagcgacagattcagacagaaggtgcaggagatggtggagagcaacgaggccaagctggtggccctggtgaacaagttcatcggctacctgaagcagaacacctactgcttcccccacagcctgagatggatcgtgagccagatgtacaagaccctgagctgcgtggacagactggaggtgggcgaggtgagagccatgtgcaccgacctgctgctggcctgcttcatctgccccgccgtggtgaaccccgagcagtacggcatcatcagcgacgcccccatcaacgaggtggccagattcaacctgatgcaggtgggcagactgctgcagcagctggccatgaccggcagcgaggagggcgaccccagaaccaagagcagcctgggcaagttcgacaagagctgcgtggccgccttcctggacgtggtgatcggcggcagagccgtggagaccccccccctgagcagcgtgaacctgctggagggcctgagcagaaccgtggtgtacatcacctacagccagctgatcaccctggtgaacttcatgaagagcgtgatgagcggcgaccagctgagagaggacagaatggccctggacaacctgctggccaacctgccccccgccaagcccggcaagagcagcagcctggagatgaccccctacaacaccccccagctgagccccgccaccacccccgccaacaagaagaacagactgcccatcgccaccagaagcagaagcagaaccaacatgctgatggacctgcacatggaccacgagggcagcagccaggagaccatccaggaggtgcagcccgaggaggtgctggtgatcagcctgggcaccggcccccagctgacccccggcatgatgagcgagaacgaggtgctgaacatgcagctgagcgacggcggccagggcgacgtgcccgtggacgagaacaagctgcacggcaagcccgacaagaccctgagattcagcctgtgcagcgacaacctggagggcatcagcgagggccccagcaacagaagcaacagcgtgagcagcctggacctggagggcgagagcgtgagcgagctgggcgccggccccagcggcagcaacggcgtggaggccctgcagctgctggagcacgagcaggccaccacccaggacaacctggacgacaagctgagaaagttcgagatcagagacatgatgggcctgaccgacgacagagacatcagcgagaccgtgagcgagacctggagcaccgacgtgctgggcagcgacttcgaccccaacatcgacgaggacagactgcaggagatcgccggcgccgccgccgagaacatgctgggcagcctgctgtgcctgcccggcagcggcagcgtgctgctggacccctgcaccggcagcaccatcagcgagaccaccagcgaggcctggagcgtggaggtgctgcccagcgacagcgaggcccccgacctgaagcaggaggagagactgcaggagctggagagctgcagcggcctgggcagcaccagcgacgacaccgacgtgagagaggtgagcagcagacccagcacccccggcctgagcgtggtgagcggcatcagcgccaccagcgaggacatccccaacaagatcgaggacctgagaagcgagtgcagcagcgacttcggcggcaaggacagcgtgaccagccccgacatggacgagatcacccacggcgcccaccagctgaccagcccccccagccagagcgagagcctgctggccatgttcgaccccctgagcagccacgagggcgccagcgccgtggtgagacccaaggtgcactacgccagacccagccaccccccccccgacccccccatcctggagggcgccgtgggcggcaacgaggccagactgcccaacttcggcagccacgtgctgacccccgccgagatggaggccttcaagcagagacacagctaccccgagagactggtgagaagcagaagcagcgacatcgtgagcagcgtgagaagacccatgagcgaccccagctggaacagaagacccggcaacgaggagagagagctgccccccgccgccgccatcggcgccaccagcctggtggccgccccccacagcagcagcagcagccccagcaaggacagcagcagaggcgagaccgaggagagaaaggacagcgacgacgagaagagcgacagaaacagaccctggtggagaaagagattcgtgagcgccatgcccaaggcccccatccccttcagaaagaaggagaagcaggagaaggacaaggacgacctgggccccgacagattcagcaccctgaccgacgaccccagccccagactgagcgcccaggcccaggtggccgaggacatcctggacaagtacagaaacgccatcaagagaaccagccccagcgacggcgccatggccaactacgagagcaccggcgacaaccacgacagagacctgagcagcaagctgctgtaccacagcgacaaggaggtgatgggcgacggcgagagcgcccacgacagccccagagacgaggccctgcagaacatcagcgccgacgacctgcccgacagcgccagccaggccgcccacccccaggacagcgccttcagctacagagacgccaagaagaagctgagactggccctgtgcagcgccgacagcgtggccttccccgtgctgacccacagcaccagaaacggcctgcccgaccacaccgaccccgaggacaacgagatcgtgtgcttcctgaaggtgcagatcgccgaggccatcaacctgcaggacaagaacctgatggcccagctgcaggagaccatgagatgcgtgtgcagattcgacaacagaacctgcagaaagctgctggccagcatcgccgaggactacagaaagagagccccctacatcgcctacctgaccagatgcagacagggcctgcagaccacccaggcccacctggagagactgctgcagagagtgctgagagacaaggaggtggccaacagatacttcaccaccgtgtgcgtgagactgctgctggagagcaaggagaagaagatcagagagttcatccaggacttccagaagctgaccgccgccgacgacaagaccgcccaggtggaggacttcctgcagttcctgtacggcgccatggcccaggacgtgatctggcagaacgccagcgaggagcagctgcaggacgcccagctggccatcgagagaagcgtgatgaacagaatcttcaagctggccttctaccccaaccaggacggcgacatcctgagagaccaggtgctgcacgagcacatccagagactgagcaaggtggtgaccgccaaccacagagccctgcagatccccgaggtgtacctgagagaggccccctggcccagcgcccagagcgagatcagaaccatcagcgcctacaagacccccagagacaaggtgcagtgcatcctgagaatgtgcagcaccatcatgaacctgctgagcctggccaacgaggacagcgtgcccggcgccgacgacttcgtgcccgtgctggtgttcgtgctgatcaaggccaaccccccctgcctgctgagcaccgtgcagtacatcagcagcttctacgccagctgcctgagcggcgaggagagctactggtggatgcagttcaccgccgccgtggagttcatcaagaccatcgacgacagaaagtag

SEQ ID NO: 83799 - DNA, 4464 bp, synthetic construct
  misc_feature 1..4464: note = Description of Artificial Sequence: Synthetic coding sequence
  source 1..4464: mol_type = other DNA
atggtgaagctggacatccacaccctggcccaccacctgaagcaggagagactgtacgtgaacagcgagaagcagctgatccagagactgaacgccgacgtgctgaagaccgccgagaagctgtacagaaccgcctggatcgccaagcagcagagaatcaacctggacagactgatcatcaccagcgccgaggccagccccgccgagtgctgccagcacgccaagatcctggaggacacccagttcgtggacggctacaagcagctgggcttccaggagaccgcctacggcgagttcctgagcagactgagagagaaccccagactgatcgccagcagcctggtggccggcgagaagctgaaccaggagaacacccagagcgtgatctacaccgtgttcaccagcctgtacggcaactgcatcatgcaggaggacgagagctacctgctgcaggtgctgagatacctgatcgagttcgagctgaaggagagcgacaaccccagaagactgctgagaagaggcacctgcgccttcagcatcctgttcaagctgttcagcgagggcctgttcagcgccaagctgttcctgaccgccaccctgcacgagcccatcatgcagctgctggtggaggacgaggaccacctggagaccgaccccaacaagctgatcgagagattcagccccagccagcaggagaagctgttcggcgagaagggcagcgacagattcagacagaaggtgcaggagatggtggagagcaacgaggccaagctggtggccctggtgaacaagttcatcggctacctgaagcagaacacctactgcttcccccacagcctgagatggatcgtgagccagatgtacaagaccctgagctgcgtggacagactggaggtgggcgaggtgagagccatgtgcaccgacctgctgctggcctgcttcatctgccccgccgtggtgaaccccgagcagtacggcatcatcagcgacgcccccatcaacgaggtggccagattcaacctgatgcaggtgggcagactgctgcagcagctggccatgaccggcagcgaggagggcgaccccagaaccaagagcagcctgggcaagttcgacaagagctgcgtggccgccttcctggacgtggtgatcggcggcagagccgtggagaccccccccctgagcagcgtgaacctgctggagggcctgagcagaaccgtggtgtacatcacctacagccagctgatcaccctggtgaacttcatgaagagcgtgatgagcggcgaccagctgagagaggacagaatggccctggacaacctgctggccaacctgccccccgccaagcccggcaagagcagcagcctggagatgaccccctacaacaccccccagctgagccccgccaccacccccgccaacaagaagaacagactgcccatcgccaccagaagcagaagcagaaccaacatgctgatggacctgcacatggaccacgagggcagcagccaggagaccatccaggaggtgcagcccgaggaggtgctggtgatcagcctgggcaccggcccccagctgacccccggcatgatgagcgagaacgaggtgctgaacatgcagctgagcgacggcggccagggcgacgtgcccgtggacgagaacaagctgcacggcaagcccgacaagaccctgagattcagcctgtgcagcgacaacctggagggcatcagcgagggccccagcaacagaagcaacagcgtgagcagcctggacctggagggcgagagcgtgagcgagctgggcgccggccccagcggcagcaacggcgtggaggccctgcagctgctggagcacgagcaggccaccacccaggacaacctggacgacaagctgagaaagttcgagatcagagacatgatgggcctgaccgacgacagagacatcagcgagaccgtgagcgagacctggagcaccgacgtgctgggcagcgacttcgaccccaacatcgacgaggacagactgcaggagatcgccggcgccgccgccgagaacatgctgggcagcctgctgtgcctgcccggcagcggcagcgtgctgctggacccctgcaccggcagcaccatcagcgagaccaccagcgaggcctggagcgtggaggtgctgcccagcgacagcgaggcccccgacctgaagcaggaggagagactgcaggagctggagagctgcagcggcctgggcagcaccagcgacgacaccgacgtgagagaggtgagcagcagacccagcacccccggcctgagcgtggtgagcggcatcagcgccaccagcgaggacatccccaacaagatcgaggacctgagaagcgagtgcagcagcgacttcggcggcaaggacagcgtgaccagccccgacatggacgagatcacccacgacttcctgtacatcctgcagcccaagcagcacttccagcacatcgaggccgaggccgacatgagaatccagctgagcagcagcgcccaccagctgaccagcccccccagccagagcgagagcctgctggccatgttcgaccccctgagcagccacgagggcgccagcgccgtggtgagacccaaggtgcactacgccagacccagccaccccccccccgacccccccatcctggagggcgccgtgggcggcaacgaggccagactgcccaacttcggcagccacgtgctgacccccgccgagatggaggccttcaagcagagacacagctaccccgagagactggtgagaagcagaagcagcgacatcgtgagcagcgtgagaagacccatgagcgaccccagctggaacagaagacccggcaacgaggagagagagctgccccccgccgccgccatcggcgccaccagcctggtggccgccccccacagcagcagcagcagccccagcaaggacagcagcagaggcgagaccgaggagagaaaggacagcgacgacgagaagagcgacagaaacagaccctggtggagaaagagattcgtgagcgccatgcccaaggcccccatccccttcagaaagaaggagaagcaggagaaggacaaggacgacctgggccccgacagattcagcaccctgaccgacgaccccagccccagactgagcgcccaggcccaggtggccgaggacatcctggacaagtacagaaacgccatcaagagaaccagccccagcgacggcgccatggccaactacgagagcaccgaggtgatgggcgacggcgagagcgcccacgacagccccagagacgaggccctgcagaacatcagcgccgacgacctgcccgacagcgccagccaggccgcccacccccaggacagcgccttcagctacagagacgccaagaagaagctgagactggccctgtgcagcgccgacagcgtggccttccccgtgctgacccacagcaccagaaacggcctgcccgaccacaccgaccccgaggacaacgagatcgtgtgcttcctgaaggtgcagatcgccgaggccatcaacctgcaggacaagaacctgatggcccagctgcaggagaccatgagatgcgtgtgcagattcgacaacagaacctgcagaaagctgctggccagcatcgccgaggactacagaaagagagccccctacatcgcctacctgaccagatgcagacagggcctgcagaccacccaggcccacctggagagactgctgcagagagtgctgagagacaaggaggtggccaacagatacttcaccaccgtgtgcgtgagactgctgctggagagcaaggagaagaagatcagagagttcatccaggacttccagaagctgaccgccgccgacgacaagaccgcccaggtggaggacttcctgcagttcctgtacggcgccatggcccaggacgtgatctggcagaacgccagcgaggagcagctgcaggacgcccagctggccatcgagagaagcgtgatgaacagaatcttcaagctggccttctaccccaaccaggacggcgacatcctgagagaccaggtgctgcacgagcacatccagagactgagcaaggtggtgaccgccaaccacagagccctgcagatccccgaggtgtacctgagagaggccccctggcccagcgcccagagcgagatcagaaccatcagcgcctacaagacccccagagacaaggtgcagtgcatcctgagaatgtgcagcaccatcatgaacctgctgagcctggccaacgaggacagcgtgcccggcgccgacgacttcgtgcccgtgctggtgttcgtgctgatcaaggccaaccccccctgcctgctgagcaccgtgcagtacatcagcagcttctacgccagctgcctgagcggcgaggagagctactggtggatgcagttcaccgccgccgtggagttcatcaagaccatcgacgacagaaagtag

SEQ ID NO: 83800 - DNA, 2514 bp, synthetic construct
  misc_feature 1..2514: note = Description of Artificial Sequence: Synthetic coding sequence
  source 1..2514: mol_type = other DNA
tgaaactgcatcatgcaggaggacgagagctacctgctgcaggtgctgagatacctgatcgagttcgagctgaaggagagcgacaaccccagaagactgctgagaagaggcacctgcgccttcagcatcctgttcaagctgttcagcgagggcctgttcagcgccaagctgttcctgaccgccaccctgcacgagcccatcatgcagctgctggtggaggacgaggaccacctggagaccgaccccaacaagctgatcgagagattcagccccagccagcaggagaagctgttcggcgagaagggcagcgacagattcagacagaaggtgcaggagatggtggagagcaacgaggccaagctggtggccctggtgaacaagttcatcggctacctgaagcagaacacctactgcttcccccacagcctgagatggatcgtgagccagatgtacaagaccctgagctgcgtggacagactggaggtgggcgaggtgagagccatgtgcaccgacctgctgctggcctgcttcatctgccccgccgtggtgaaccccgagcagtacggcatcatcagcgacgcccccatcaacgaggtggccagattcaacctgatgcaggtgggcagactgctgcagcagctggccatgaccggcagcgaggagggcgaccccagaaccaagagcagcctgggcaagttcgacaagagctgcgtggccgccttcctggacgtggtgatcggcggcagagccgtggagaccccccccctgagcagcgtgaacctgctggagggcctgagcagaaccgtggtgtacatcacctacagccagctgatcaccctggtgaacttcatgaagagcgtgatgagcggcgaccagctgagagaggacagaatggccctggacaacctgctggccaacctgccccccgccaagcccggcaagagcagcagcctggagatgaccccctacaacaccccccagctgagccccgccaccacccccgccaacaagaagaacagactgcccatcgccaccagaagcagaagcagaaccaacatgctgatggacctgcacatggaccacgagggcagcagccaggagaccatccaggaggtgcagcccgaggaggtgctggtgatcagcctgggcaccggcccccagctgacccccggcatgatgagcgagaacgaggtgctgaacatgcagctgagcgacggcggccagggcgacgtgcccgtggacgagaacaagctgcacggcaagcccgacaagaccctgagattcagcctgtgcagcgacaacctggagggcatcagcgagggccccagcaacagaagcaacagcgtgagcagcctggacctggagggcgagagcgtgagcgagctgggcgccggccccagcggcagcaacggcgtggaggccctgcagctgctggagcacgagcaggccaccacccaggacaacctggacgacaagctgagaaagttcgagatcagagacatgatgggcctgaccgacgacagagacatcagcgagaccgtgagcgagacctggagcaccgacgtgctgggcagcgacttcgaccccaacatcgacgaggacagactgcaggagatcgccggcgccgccgccgagaacatgctgggcagcctgctgtgcctgcccggcagcggcagcgtgctgctggacccctgcaccggcagcaccatcagcgagaccaccagcgaggcctggagcgtggaggtgctgcccagcgacagcgaggcccccgacctgaagcaggaggagagactgcaggagctggagagctgcagcggcctgggcagcaccagcgacgacaccgacgtgagagaggtgagcagcagacccagcacccccggcctgagcgtggtgagcggcatcagcgccaccagcgaggacatccccaacaagatcgaggacctgagaagcgagtgcagcagcgacttcggcggcaaggacagcgtgaccagccccgacatggacgagatcacccacggcgccagcgccgtggtgagacccaaggtgcactacgccagacccagccaccccccccccgacccccccatcctggagggcgccgtgggcggcaacgaggccagactgcccaacttcggcagccacgtgctgacccccgccgagatggaggccttcaagcagagacacagctaccccgagagactggtgagaagcagaagcagcgacatcgtgagcagcgtgagaagacccatgagcgaccccagctggaacagaagacccggcaacgaggagagagagctgccccccgccgccgccatcggcgccaccagcctggtggccgccccccacagcagcagcagcagccccagcaaggacagcagcagaggcgagaccgaggagagaaaggacagcgacgacgagaagagcgacagaaacagaccctggtggagaaagagattcgtgagcgccatgcccaaggcccccatccccttcagaaagaaggagaagcaggagtag

SEQ ID NO: 83801 - DNA, 2493 bp, synthetic construct
  misc_feature 1..2493: note = Description of Artificial Sequence: Synthetic coding sequence
  source 1..2493: mol_type = other DNA
tgactgagaagaggcacctgcgccttcagcatcctgttcaagctgttcagcgagggcctgttcagcgccaagctgttcctgaccgccaccctgcacgagcccatcatgcagctgctggtggaggacgaggaccacctggagaccgaccccaacaagctgatcgagagattcagccccagccagcaggagaagctgttcggcgagaagggcagcgacagattcagacagaaggtgcaggagatggtggagagcaacgaggccaagctggtggccctggtgaacaagttcatcggctacctgaagcagaacacctactgcttcccccacagcctgagatggatcgtgagccagatgtacaagaccctgagctgcgtggacagactggaggtgggcgaggtgagagccatgtgcaccgacctgctgctggcctgcttcatctgccccgccgtggtgaaccccgagcagtacggcatcatcagcgacgcccccatcaacgaggtggccagattcaacctgatgcaggtgggcagactgctgcagcagctggccatgaccggcagcgaggagggcgaccccagaaccaagagcagcctgggcaagttcgacaagagctgcgtggccgccttcctggacgtggtgatcggcggcagagccgtggagaccccccccctgagcagcgtgaacctgctggagggcctgagcagaaccgtggtgtacatcacctacagccagctgatcaccctggtgaacttcatgaagagcgtgatgagcggcgaccagctgagagaggacagaatggccctggacaacctgctggccaacctgccccccgccaagcccggcaagagcagcagcctggagatgaccccctacaacaccccccagctgagccccgccaccacccccgccaacaagaagaacagactgcccatcggccagcagctggccgccatcaccgcctgggacagcagcgccaccaacatcaccagccacatcaccgtggtgacccccttcgccaccagaagcagaagcagaaccaacatgctgatggacctgcacatggaccacgagggcagcagccaggagaccatccaggaggtgcagcccgaggaggtgctggtgatcagcctgggcaccggcccccagctgacccccggcatgatgagcgagaacgaggtgctgaacatgcagctgagcgacggcggccagggcgacgtgcccgtggacgagaacaagctgcacggccccagcaacagaagcaacagcgtgagcagcctggacctggagggcgagagcgtgagcgagctgggcgccggccccagcggcagcaacggcgtggaggccctgcagctgctggagcacgagcaggccaccacccaggacaacctggacgacaagctgagaaagttcgagatcagagacatgatgggcctgaccgacgacagagacatcagcgagaccgtgagcgagacctggagcaccgacgtgctgggcagcgacttcgaccccaacatcgacgaggacagactgcaggagatcgccggcgccgccgccgagaacatgctgggcagcctgctgtgcctgcccggcagcggcagcgtgctgctggacccctgcaccggcagcaccatcagcgagaccaccagcgaggcctggagcgtggaggtgctgcccagcgacagcgaggcccccgacctgaagcaggaggagagactgcaggagctggagagctgcagcggcctgggcagcaccagcgacgacaccgacgtgagagaggtgagcagcagacccagcacccccggcctgagcgtggtgagcggcatcagcgccaccagcgaggacatccccaacaagatcgaggacctgagaagcgagtgcagcagcgacttcggcggcaaggacagcgtgaccagccccgacatggacgagatcacccacggcgcccaccagctgaccagcccccccagccagagcgagagcctgctggccatgttcgaccccctgagcagccacgagggcgccagcgccgtggtgagacccaaggtgcactacgccagacccagccaccccccccccgacccccccatcctggagggcgccgtgggcggcaacgaggccagactgcccaacttcggcagccacgtgctgacccccgccgagatggaggccttcaagcagagacacagctaccccgagagactggtgagaagcagaagcagcgacatcgtgagcagcgtgagaagacccatgagcgaccccagctggaacagaagacccggcaacgaggagagagagctgccccccgccgccgccatcggcgccaccagcctggtggccgccccccacagcagcagcagcagccccagcaaggacagcagcagaggcgagaccgaggagagaaaggacagcgacgacgagaagagcgacagaaacagaccctggtggagaaagagattcgtgagcgccatgcccaaggcccccatccccttctag

SEQ ID NO: 83802 - DNA, 516 bp, synthetic construct
  misc_feature 1..516: note = Description of Artificial Sequence: Synthetic coding sequence
  source 1..516: mol_type = other DNA
atggtgcagtggcccagaatgagctacggcaagaccagagtgatgaacagaatcttcaagctggccttctaccccaaccaggacggcgacatcctgagagaccaggtgctgcacgagcacatccagagactgagcaaggtggtgaccgccaaccacagagccctgcagatccccgaggtgtacctgagagaggccccctggcccagcgcccagagcgagatcagaaccatcagcgcctacaagacccccagagacaaggtgcagtgcatcctgagaatgtgcagcaccatcatgaacctgctgagcctggccaacgaggacagcgtgcccggcgccgacgacttcgtgcccgtgctggtgttcgtgctgatcaaggccaaccccccctgcctgctgagcaccgtgcagtacatcagcagcttctacgccagctgcctgagcggcgaggagagctactggtggatgcagttcaccgccgccgtggagttcatcaagaccatcgacgacagaaagtag

SEQ ID NO: 83803 - DNA, 354 bp, synthetic construct
  misc_feature 1..354: note = Description of Artificial Sequence: Synthetic coding sequence
  source 1..354: mol_type = other DNA
atggtgaagctggacatccacaccctggcccaccacctgaagcaggagagactgtacgtgaacagcgagaagcagctgatccagagactgaacgccgacgtgctgaagaccgccgagaagctgtacagaaccgcctggatcgccaagcagcagagaatcaacctggacagactgatcatcaccagcgccgaggccagccccgccgagtgctgccagcacgccaagatcctggaggacacccagttcgtggacggctacaagcagctgggcttccaggagaccgcctacggcgagttcctgagcagactgagagagaaccccagactgatcgccagcagcctggtggccggctag

SEQ ID NO: 83804 - DNA, 2967 bp, synthetic construct
  misc_feature 1..2967: note = Description of Artificial Sequence: Synthetic coding sequence
  source 1..2967: mol_type = other DNA
atggtgaagctggacatccacaccctggcccaccacctgaagcaggagagactgtacgtgaacagcgagaagcagctgatccagagactgaacgccgacgtgctgaagaccgccgagaagctgtacagaaccgcctggatcgccaagcagcagagaatcaacctggacagactgatcatcaccagcgccgaggccagccccgccgagtgctgccagcacgccaagatcctggaggacacccagttcgtggacggctacaagcagctgggcttccaggagaccgcctacggcgagttcctgagcagactgagagagaaccccagactgatcgccagcagcctggtggccggcgagaagctgaaccaggagaacacccagagcgtgatctacaccgtgttcaccagcctgtacggcaactgcatcatgcaggaggacgagagctacctgctgcaggtgctgagatacctgatcgagttcgagctgaaggagagcgacaaccccagaagactgctgagaagaggcacctgcgccttcagcatcctgttcaagctgttcagcgagggcctgttcagcgccaagctgttcctgaccgccaccctgcacgagcccatcatgcagctgctggtggaggacgaggaccacctggagaccgaccccaacaagctgatcgagagattcagccccagccagcaggagaagctgttcggcgagaagggcagcgacagattcagacagaaggtgcaggagatggtggagagcaacgaggccaagctggtggccctggtgaacaagttcatcggctacctgaagcagaacacctactgcttcccccacagcctgagatggatcgtgagccagatgtacaagaccctgagctgcgtggacagactggaggtgggcgaggtgagagccatgtgcaccgacctgctgctggcctgcttcatctgccccgccgtggtgaaccccgagcagtacggcatcatcagcgacgcccccatcaacgaggtggccagattcaacctgatgcaggtgggcagactgctgcagcagctggccatgaccggcagcgaggagggcgaccccagaaccaagagcagcctgggcaagttcgacaagagctgcgtggccgccttcctggacgtggtgatcggcggcagagccgtggagaccccccccctgagcagcgtgaacctgctggagggcctgagcagaaccgtggtgtacatcacctacagccagctgatcaccctggtgaacttcatgaagagcgtgatgagcggcgaccagctgagagaggacagaatggccctggacaacctgctggccaacctgccccccgccaagcccggcaagagcagcagcctggagatgaccccctacaacaccccccagctgagccccgccaccacccccgccaacaagaagaacagactgcccatcgccaccagaagcagaagcagaaccaacatgctgatggacctgcacatggaccacgagggcagcagccaggagaccatccaggaggtgcagcccgaggaggtgctggtgatcagcctgggcaccggcccccagctgacccccggcatgatgagcgagaacgaggtgctgaacatgcagctgagcgacggcggccagggcgacgtgcccgtggacgagaacaagctgcacggcaagcccgacaagaccctgagattcagcctgtgcagcgacaacctggagggcatcagcgagggccccagcaacagaagcaacagcgtgagcagcctggacctggagggcgagagcgtgagcgagctgggcgccggccccagcggcagcaacggcgtggaggccctgcagctgctggagcacgagcaggccaccacccaggacaacctggacgacaagctgagaaagttcgagatcagagacatgatgggcctgaccgacgacagagacatcagcgagaccgtgagcgagacctggagcaccgacgtgctgggcagcgacttcgaccccaacatcgacgaggacagactgcaggagatcgccggcgccgccgccgagaacatgctgggcagcctgctgtgcctgcccggcagcggcagcgtgctgctggacccctgcaccggcagcaccatcagcgagaccaccagcgaggcctggagcgtggaggtgctgcccagcgacagcgaggcccccgacctgaagcaggaggagagactgcaggagctggagagctgcagcggcctgggcagcaccagcgacgacaccgacgtgagagaggtgagcagcagacccagcacccccggcctgagcgtggtgagcggcatcagcgccaccagcgaggacatccccaacaagatcgaggacctgagaagcgagtgcagcagcgacttcggcggcaaggacagcgtgaccagccccgacatggacgagatcacccacggcgcccaccagctgaccagcccccccagccagagcgagagcctgctggccatgttcgaccccctgagcagccacgagggcgccagcgccgtggtgagacccaaggtgcactacgccagacccagccaccccccccccgacccccccatcctggagggcgccgtgggcggcaacgaggccagactgcccaacttcggcagccacgtgctgacccccgccgagatggaggccttcaagcagagacacagctaccccgagagactggtgagaagcagaagcagcgacatcgtgagcagcgtgagaagacccatgagcgaccccagctggaacagaagacccggcaacgaggagagagagctgccccccgccgccgccatcggcgccaccagcctggtggccgccccccacagcagcagcagcagccccagcaaggacagcagcagaggcgagaccgaggagagaaaggacagcgacgacgagaagagcgacagaaacagaccctggtggagaaagagattcgtgagcgccatgcccaagtag

SEQ ID NO: 83805 - DNA, 4437 bp, synthetic construct; identical to SEQ ID NO: 83798
  misc_feature 1..4437: note = Description of Artificial Sequence: Synthetic coding sequence
  source 1..4437: mol_type = other DNA

SEQ ID NO: 83806 - DNA, 2271 bp, synthetic construct
  misc_feature 1..2271: note = Description of Artificial Sequence: Synthetic coding sequence
  source 1..2271: mol_type = other DNA
atggtgaagctggacatccacaccctggcccaccacctgaagcaggagagactgtacgtgaacagcgagaagcagctgatccagagactgaacgccgacgtgctgaagaccgccgagaagctgtacagaaccgcctggatcgccaagcagcagagaatcaacctggacagactgatcatcaccagcgccgaggccagccccgccgagtgctgccagcacgccaagatcctggaggacacccagttcgtggacggctacaagcagctgggcttccaggagaccgcctacggcgagttcctgagcagactgagagagaaccccagactgatcgccagcagcctggtggccggcgagaagctgaaccaggagaacacccagagcgtgatctacaccgtgttcaccagcctgtacggcaactgcatcatgcaggaggacgagagctacctgctgcaggtgctgagatacctgatcgagttcgagctgaaggagagcgacaaccccagaagactgctgagaagaggcacctgcgccttcagcatcctgttcaagctgttcagcgagggcctgttcagcgccaagctgttcctgaccgccaccctgcacgagcccatcatgcagctgctggtggaggacgaggaccacctggagaccgaccccaacaagctgatcgagagattcagccccagccagcaggagaagctgttcggcgagaagggcagcgacagattcagacagaaggtgcaggagatggtggagagcaacgaggccaagctggtggccctggtgaacaagttcatcggctacctgaagcagaacacctactgcttcccccacagcctgagatggatcgtgagccagatgtacaagaccctgagctgcgtggacagactggaggtgggcgaggtgagagccatgtgcaccgacctgctgctggcctgcttcatctgccccgccgtggtgaaccccgagcagtacggcatcatcagcgacgcccccatcaacgaggtggccagattcaacctgatgcaggtgggcagactgctgcagcagctggccatgaccggcagcgaggagggcgaccccagaaccaagagcagcctgggcaagttcgacaagagctgcgtggccgccttcctggacgtggtgatcggcggcagagccgtggagaccccccccctgagcagcgtgaacctgctggagggcctgagcagaaccgtggtgtacatcacctacagccagctgatcaccctggtgaacttcatgaagagcgtgatgagcggcgaccagctgagagaggacagaatggccctggacaacctgctggccaacctgccccccgccaagcccggcaagagcagcagcctggagatgaccccctacaacaccccccagctgagccccgccaccacccccgccaacaagaagaacagactgcccatcgccaccagaagcagaagcagaaccaacatgctgatggacctgcacatggaccacgagggcagcagccaggagaccatccaggaggtgcagcccgaggaggtgctggtgatcagcctgggcaccggcccccagctgacccccggcatgatgagcgagaacgaggtgctgaacatgcagctgagcgacggcggccagggcgacgtgcccgtggacgagaacaagctgcacggcaagcccgacaagaccctgagattcagcctgtgcagcgacaacctggagggcatcagcgagggccccagcaacagaagcaacagcgtgagcagcctggacctggagggcgagagcgtgagcgagctgggcgccggccccagcggcagcaacggcgtggaggccctgcagctgctggagcacgagcaggccaccacccaggacaacctggacgacaagctgagaaagttcgagatcagagacatgatgggcctgaccgacgacagagacatcagcgagaccgtgagcgagacctggagcaccgacgtgctgggcagcgacttcgaccccaacatcgacgaggacagactgcaggagatcgccggcgccgccgccgagaacatgctgggcagcctgctgtgcctgcccggcagcggcagcgtgctgctggacccctgcaccggcagcaccatcagcgagaccaccagcgaggcctggagcgtggaggtgctgcccagcgacagcgaggcccccgacctgaagcaggaggagagactgcaggagctggagagctgcagcggcctgggcagcaccagcgacgacaccgacgtgagagaggcctag

SEQ ID NO: 83807 - DNA, 921 bp, synthetic construct
  misc_feature 1..921: note = Description of Artificial Sequence: Synthetic coding sequence
  source 1..921: mol_type = other DNA
atgggcggcagaaagatggccaccgacgaggagaacgtgtacggcctggaggagaacgcccagagcagacaggagagcaccagaagactgatcctggtgggcagaaccggcgccggcaagagcgccaccggcaacagcatcctgggccagagaagattcttcagcagactgggcgccaccagcgtgaccagagcctgcaccaccggcagcagaagatgggacaagtgccacgtggaggtggtggacacccccgacatcttcagcagccaggtgagcaagaccgaccccggctgcgaggagagaggccactgctacctgctgagcgcccccggcccccacgccctgctgctggtgacccagctgggcagattcaccgcccaggaccagcaggccgtgagacaggtgagagacatgttcggcgaggacgtgctgaagtggatggtgatcgtgttcaccagaaaggaggacctggccggcggcagcctgcacgactacgtgagcaacaccgagaacagagccctgagagagctggtggccgagtgcggcggcagagtgtgcgccttcgacaacagagccaccggcagagagcaggaggcccaggtggagcagctgctgggcatggtggagggcctggtgctggagcacaagggcgcccactacagcaacgaggtgtacgagctggcccaggtgctgagatgggccggccccgaggagagactgagaagagtggccgagagagtggccgccagagtgcagagaagaccctggggcgcctggctgagcgccagactgtggaagtggctgaagagccccagaagctggagactgggcctggccctgctgctgggcggcgccctgctgttctgggtgctgctgcacagaagatggagcgaggccgtggccgaggtgggccccgactag

SEQ ID NO: 83808 - DNA, 681 bp, synthetic construct
  misc_feature 1..681: note = Description of Artificial Sequence: Synthetic coding sequence
  source 1..681: mol_type = other DNA
atgagctgggtgcaggccgccagcctgatccagggccccggcgacaagggcgacgtgttcgacgaggaggccgacgagagcctgctggcccagagagagtggcagagcaacatgcagagaagagtgaaggagggctacagagacggcatcgacgccggcaaggccgtgaccctgcagcagggcttcaaccagggctacaagaagggcgccgaggtgatcctgaactacggcagactgagaggcaccctgagcgccctgctgagctggtgccacctgcacaacaacaacagcaccctgatcaacaagatcaacaacctgctggacgccgtgggccagtgcgaggagtacgtgctgaagcacctgaagagcatcaccccccccagccacgtggtggacctgctggacagcatcgaggacatggacctgtgccacgtggtgcccgccgagaagaagatcgacgaggccaaggacgagagactgtgcgagaacaacgccgagttcaacaagaactgcagcaagagccacagcggcatcgactgcagctacgtggagtgctgcagaacccaggagcacgcccacagcgagaaccccagccccacctggatcctggagcagaccgccagcctggtgaagcagctgggcctgagcgtggacgtgctgcagcacctgaagcagctgtag

SEQ ID NO: 83809 - DNA, 990 bp, synthetic construct
  misc_feature 1..990: note = Description of Artificial Sequence: Synthetic coding sequence
  source 1..990: mol_type = other DNA
atggccgcccagtacggcagcatgagcttcaaccccagcacccccggcgccagctacggccccggcagacaggagcccagaaacagccagctgagaatcgtgctggtgggcaagaccggcgccggcaagagcgccaccggcaacagcatcctgggcagaaaggtgttccacagcggcaccgccgccaagagcatcaccaagaagtgcgagaagagaagcagcagctggaaggagaccgagctggtggtggtggacacccccggcatcttcgacaccgaggtgcccaacgccgagaccagcaaggagatcatcagatgcatcctgctgaccagccccggcccccacgccctgctgctggtggtgcccctgggcagatacaccgaggaggagcacaaggccaccgagaagatcctgaagatgttcggcgagagagccagaagcttcatgatcctgatcttcaccagaaaggacgacctgggcgacaccaacctgcacgactacctgagagaggcccccgaggacatccaggacctgatggacatcttcggcgacagatactgcgccctgaacaacaaggccaccggcgccgagcaggaggcccagagagcccagctgctgggcctgatccagagagtggtgagagagaacaaggagggctgctacaccaacagaatgtaccagagagccgaggaggagatccagaagcagacccaggccatgcaggagctgcacagagtggagctggagagagagaaggccagaatcagagaggagtacgaggagaagatcagaaagctggaggacaaggtggagcaggagaagagaaagaagcagatggagaagaagctggccgagcaggaggcccactacgccgtgagacagcagagagccagaaccgaggtggagagcaaggacggcatcctggagctgatcatgaccgccctgcagatcgccagcttcatcctgctgagactgttcgccgaggactag

SEQ ID NO: 83810 - DNA, 786 bp, synthetic construct
  misc_feature 1..786: note = Description of Artificial Sequence: Synthetic coding sequence
  source 1..786: mol_type = other DNA
atggccgcccagtacggcagcatgagcttcaaccccagcacccccggcgccagctacggccccggcagacaggagcccagaaacagccagctgagaatcgtgctggtgggcaagaccggcgccggcaagagcgccaccggcaacagcatcctgggcagaaaggtgttccacagcggcaccgccgccaagagcatcaccaagaagatcctgaagatgttcggcgagagagccagaagcttcatgatcctgatcttcaccagaaaggacgacctgggcgacaccaacctgcacgactacctgagagaggcccccgaggacatccaggacctgatggacatcttcggcgacagatactgcgccctgaacaacaaggccaccggcgccgagcaggaggcccagagagcccagctgctgggcctgatccagagagtggtgagagagaacaaggagggctgctacaccaacagaatgtaccagagagccgaggaggagatccagaagcagacccaggccatgcaggagctgcacagagtggagctggagagagagaaggccagaatcagagaggagtacgaggagaagatcagaaagctggaggacaaggtggagcaggagaagagaaagaagcagatggagaagaagctggccgagcaggaggcccactacgccgtgagacagcagagagccagaaccgaggtggagagcaaggacggcatcctggagctgatcatgaccgccctgcagatcgccagcttcatcctgctgagactgttcgccgaggactag

SEQ ID NO: 83811 - DNA, 456 bp, synthetic construct
  misc_feature 1..456: note = Description of Artificial Sequence: Synthetic coding sequence
  source 1..456: mol_type = other DNA
atggccgcccagtacggcagcatgagcttcaaccccagcacccccggcgccagctacggcgagagagccttcagcgccccccagaccagactgcagggcggccccggcagacaggagcccagaaacagccagctgagaatcgtgctggtgggcaagaccggcgccggcaagagcgccaccggcaacagcatcctgggcagaaaggtgttccacagcggcaccgccgccaagagcatcaccaagaagtgcgagaagagaagcagcagctggaaggagaccgagctggtggtggtggacacccccggcatcttcgacaccgaggtgcccaacgccgagaccagcaaggagatcatcagatgcatcctgctgaccagccccggcccccacgccctgctgctggtggtgcccctgggcagatacaccgaggaggagcacaaggccaccgagaagatctag

SEQ ID NO: 83812 - DNA, 924 bp, synthetic construct
  misc_feature 1..924: note = Description of Artificial Sequence: Synthetic coding sequence
  source 1..924: mol_type = other DNA
atgggcggcttccagagaggcaagtacggcaccatggccgagggcagaagcgaggacaacctgagcgccaccccccccgccctgagaatcatcctggtgggcaagaccggctgcggcaagagcgccaccggcaacagcatcctgggccagcccgtgttcgagagcaagctgagagcccagagcgtgaccagaacctgccaggtgaagaccggcacctggaacggcagaaaggtgctggtggtggacacccccagcatcttcgagagccaggccgacacccaggagctgtacaagaacatcggcgactgctacctgctgagcgcccccggcccccacgtgctgctgctggtgatccagctgggcagattcaccgcccaggacaccgtggccatcagaaaggtgaaggaggtgttcggcaccggcgccatgagacacgtggtgatcctgttcacccacaaggaggacctgggcggccaggccctggacgactacgtggccaacaccgacaactgcagcctgaaggacctggtgagagagtgcgagagaagatactgcgccttcaacaactggggcagcgtggaggagcagagacagcagcaggccgagctgctggccgtgatcgagagactgggcagagagagagagggcagcttccacagcaacgacctgttcctggacgcccagctgctgcagagaaccggcgccggcgcctgccaggaggactacagacagtaccaggccaaggtggagtggcaggtggagaagcacaagcaggagctgagagagaacgagagcaactgggcctacaaggccctgctgagagtgaagcacctgatgctgctgcactacgagatcttcgtgttcctgctgctgtgcagcatcctgttcttcatcatcttcctgttcatcttccactacatctag

SEQ ID NO: 83813 - DNA, 1032 bp, synthetic construct
  misc_feature 1..1032: note = Description of Artificial Sequence: Synthetic coding sequence
  source 1..1032: mol_type = other DNA
atggagctgagcgcccccgcccacggcagcagcctgaccgccagcgcccagccccccagcgtgaccgccaccctggaggacagagcccagcagcccttcctggagagaatgggcggcttccagagaggcaagtacggcaccatggccgagggcagaagcgaggacaacctgagcgccaccccccccgccctgagaatcatcctggtgggcaagaccggctgcggcaagagcgccaccggcaacagcatcctgggccagcccgtgttcgagagcaagctgagagcccagagcgtgaccagaacctgccaggtgaagaccggcacctggaacggcagaaaggtgctggtggtggacacccccagcatcttcgagagccaggccgacacccaggagctgtacaagaacatcggcgactgctacctgctgagcgcccccggcccccacgtgctgctgctggtgatccagctgggcagattcaccgcccaggacaccgtggccatcagaaaggtgaaggaggtgttcggcaccggcgccatgagacacgtggtgatcctgttcacccacaaggaggacctgggcggccaggccctggacgactacgtggccaacaccgacaactgcagcctgaaggacctggtgagagagtgcgagagaagatactgcgccttcaacaactggggcagcgtggaggagcagagacagcagcaggccgagctgctggccgtgatcgagagactgggcagagagagagagggcagcttccacagcaacgacctgttcctggacgcccagctgctgcagagaaccggcgccggcgcctgccaggaggactacagacagtaccaggccaaggtggagtggcaggtggagaagcacaagcaggagctgagagagaacgagagcaactgggcctacaaggccctgctgagagtgaagcacctgatgctgctgcactacgagatcttcgtgttcctgctgctgtgcagcatcctgttcttcatcatcttcctgttcatcttccactacatctag

SEQ ID NO: 83814 - DNA, 879 bp, synthetic construct
  misc_feature 1..879: note = Description of Artificial Sequence: Synthetic coding sequence
  source 1..879: mol_type = other DNA
atggaggaggaggagtacgagcagatcccccaggagaacccccccgaggagctgagccaggaccccgtgctggagctgagcggcggcctgagagagaaggagcagaagacccccagaagactgagactgatcctgatgggcaagaccggcagcggcaagagcgccaccggcaacagcatcctgggcagagacgtgttcgagagcaagctgagcaccagacccgtgaccaagaccagccagagaagaagcagagagtgggccggcaaggagctggaggtgatcgacacccccaacatcctgagcccccaggtgagccccgaggtggccgacgccatctgccaggccatcgtgctgagcgcccccggcccccacgccgtgctgctggtgacccagctgggcagattcaccgacgaggaccagcaggtggtgagaagactgcaggaggtgttcggcgtgggcgtgctgggccacaccatcctggtgttcaccagaaaggaggacctggccggcggcagcctggaggactacgtgagagagaccaacaaccaggccctggcctggctggacgtgaccctggccagaagacactgcggcttcaacaacagagcccagggcgaggagcaggaggcccagctgagagagctgatggagaaggtggaggccatcatgtgggagaacgagggcgactactacagcaacaaggcctaccagtacacccagcagaacttcagactgaaggagctgcaggagagacaggtgagccagggccagggcagcgaggacgtgcccggcgaggagagctggctggagggcctgagccagatccagaaggagagcgaggaggcccacagatgcctgctgggcaaggccgacctgtag

SEQ ID NO: 83815 - DNA, 1062 bp, synthetic construct
  misc_feature 1..1062: note = Description of Artificial Sequence: Synthetic coding sequence
  source 1..1062: mol_type = other DNA
aagccctggtactgggtgagctggtgcagcatcggccaggtgagcctgttcttcctgggcagcgccctggccctgggcgagaacgtgcagccccacctgcagggctgcggccccagaatggtggcccagagatggttccagggcagatgctggagcttcaccatctgcccctgcagcctgggcgtgcaccccgaggcccccggcgacgacaagatgggctacatgggcccctaccccagcagcctgtgcttcctgtggatcttcctgggcctgagagagaaggagcagaagacccccagaagactgagactgatcctgatgggcaagaccggcagcggcaagagcgccaccggcaacagcatcctgggcagagacgtgttcgagagcaagctgagcaccagacccgtgaccaagaccagccagagaagaagcagagagtgggccggcaaggagctggaggtgatcgacacccccaacatcctgagcccccaggtgagccccgaggtggccgacgccatctgccaggccatcgtgctgagcgcccccggcccccacgccgtgctgctggtgacccagctgggcagattcaccgacgaggaccagcaggtggtgagaagactgcaggaggtgttcggcgtgggcgtgctgggccacaccatcctggtgttcaccagaaaggaggacctggccggcggcagcctggaggactacgtgagagagaccaacaaccaggccctggcctggctggacgtgaccctggccagaagacactgcggcttcaacaacagagcccagggcgaggagcaggaggcccagctgagagagctgatggagaaggtggaggccatcatgtgggagaacgagggcgactactacagcaacaaggcctaccagtacacccagcagaacttcagactgaaggagctgcaggagagacaggtgagccagggccagggcagcgaggacgtgcccggcgaggagagctggctggagggcctgagccagatccagaaggagagcgaggaggcccacagatgcctgctgggcaaggccgacctgtag

SEQ ID NO: 83816 - DNA, 189 bp, synthetic construct
  misc_feature 1..189: note = Description of Artificial Sequence: Synthetic coding sequence
  source 1..189: mol_type = other DNA
atggaggaggaggagtacgagcagatcccccaggagaacccccccgaggagctgagccaggaccccgtgctggagctgagcggcggcctggccagaggcggcagaagatacctgcccagccacagactgatcagacccagagcccccagaagagcccccggcgacaccaccggccccgtgcacggctag

SEQ ID NO: 83817 - DNA, 1266 bp, synthetic construct
  misc_feature 1..1266: note = Description of Artificial Sequence: Synthetic coding sequence
  source 1..1266: mol_type = other DNA
atgagatggatcctgttcatcggcgccctgatcggcagcagcatctgcggccaggagaagttcttcggcgaccaggtgctgagaatcaacgtgagaaacggcgacgagatcagcaagctgagccagctggtgaacagcaacaacctgaagctgaacttctggaagagccccagcagcttcaacagacccgtggacgtgctggtgcccagcgtgagcctgcaggccttcaagagcttcctgagaagccagggcctggagtacgccgtgaccatcgaggacctgcaggccctgctggacaacgaggacgacgagatgcagcacaacgagggccaggagagaagcagcaacaacttcaactacggcgcctaccacagcctggaggccatctaccacgagatggacaacatcgccgccgacttccccgacctggccagaagagtgaagatcggccacagcttcgagaacagacccatgtacgtgctgaagttcagcaccggcaagggcgtgagaagacccgccgtgtggctgaacgccggcatccacagcagagagtggatcagccaggccaccgccatctggaccgccagaaagatcgtgagcgactaccagagagaccccgccatcaccagcatcctggagaagatggacatcttcctgctgcccgtggccaaccccgacggctacgtgtacacccagacccagaacagactgtggagaaagaccagaagcagaaaccccggcagcagctgcatcggcgccgaccccaacagaaactggaacgccagcttcgccggcaagggcgccagcgacaacccctgcagcgaggtgtaccacggcccccacgccaacagcgaggtggaggtgaagagcgtggtggacttcatccagaagcacggcaacttcaagggcttcatcgacctgcacagctacagccagctgctgatgtacccctacggctacagcgtgaagaaggcccccgacgccgaggagctggacaaggtggccagactggccgccaaggccctggccagcgtgagcggcaccgagtaccaggtgggccccacctgcaccaccgtgtaccccgccagcggcagcagcatcgactgggcctacgacaacggcatcaagttcgccttcaccttcgagctgagagacaccggcacctacggcttcctgctgcccgccaaccagatcatccccaccgccgaggagacctggctgggcctgaagaccatcatggagcacgtgagagacaacctgtactag

SEQ ID NO: 83818 - DNA, 927 bp, synthetic construct
  misc_feature 1..927: note = Description of Artificial Sequence: Synthetic coding sequence
  source 1..927: mol_type = other DNA
atggtgcactgcagctgcgtgctgttcagaaagtacggcaacttcatcgacaagctgagactgttcaccagaggcggcagcggcggcatgggctaccccagactgggcggcgagggcggcaagggcggcgacgtgtgggtggtggcccagaacagaatgaccctgaagcagctgaaggacagataccccagaaagagattcgtggccggcgtgggcgccaacagcaagttccccaacgccggcaagagcagcctgctgagctgcgtgagccacgccaagcccgccatcgccgactacgccttcaccaccctgaagcccgagctgggcaagatcatgtacagcgacttcaagcagatcagcgtggccgacctgcccggcctgatcgagggcgcccacatgaacaagggcatgggccacaagttcctgaagcacatcgagagaaccagacagctgctgttcgtggtggacatcagcggcttccagctgagcagccacacccagtacagaaccgccttcgagaccatcatcctgctgaccaaggagctggagctgtacaaggaggagctgcagaccaagcccgccctgctggccgtgaacaagatggacctgcccgacgcccaggacaagttccacgagctgatgagccagctgcagaaccccaaggacttcctgcacctgttcgagaagaacatgatccccgagagaaccgtggagttccagcacatcatccccatcagcgccgtgaccggcgagggcatcgaggagctgaagaactgcatcagaaagagcctggacgagcaggccaaccaggagaacgacgccctgcacaagaagcagctgctgaacctgtggatcagcgacaccatgagcagcaccgagccccccagcaagcacgccgtgaccaccagcaagatggacatcatctag

SEQ ID NO: 83819 - DNA, 711 bp, synthetic construct
  misc_feature 1..711: note = Description of Artificial Sequence: Synthetic coding sequence
  source 1..711: mol_type = other DNA
atgagcgcccccagcgccacccccatcttcgcccccggcgagaactgcagccccgcctggggcgccgcccccgccgcctacgacgccgccgacacccacctgagaatcctgggcaagcccgtgatggagagatgggagaccccctacatgcacgccctggccgccgccgccagcagcaagggcggcagagtgctggaggtgggcttcggcatggccatcgccgccagcaaggtgcaggaggcccccatcgacgagcactggatcatcgagtgcaacgacggcgtgttccagagactgagagactgggcccccagacagacccacaaggtgatccccctgaagggcctgtgggaggacgtggcccccaccctgcccgacggccacttcgacggcatcctgtacgacacctaccccctgagcgaggagacctggcacacccaccagttcaacttcatcaagaaccacgccttcagactgctgaagcccggcggcgtgctgacctactgcaacctgaccagctggggcgagctgatgaagagcaagtacagcgacatcaccatcatgttcgaggagacccaggtgcccgccctgctggaggccggcttcagaagagagaacatcagaaccgaggtgatggccctggtgccccccgccgactgcagatactacgccttcccccagatgatcacccccctggtgaccaagggctag

SEQ ID NO: 83820 - DNA, 810 bp, synthetic construct
  misc_feature 1..810: note = Description of Artificial Sequence: Synthetic coding sequence
  source 1..810: mol_type = other DNA
atgagcgcccccagcgccacccccatcttcgcccccggcgagaactgcagccccgcctggggcgccgcccccgccgcctacgacgccgccgacacccacctgagaatcctgggcaagcccgtgatggagagatgggagaccccctacatgcacgccctggccgccgccgccagcagcaagggcggcagagtgctggaggtgggcttcggcatggccatcgccgccagcaaggtgcaggaggcccccatcgacgagcactggatcatcgagtgcaacgacggcgtgttccagagactgagagactgggcccccagacagacccacaaggtgatccccctgaagggcctgtgggaggacgtggcccccaccctgcccgacggccacttcgacggcatcctgtacgacacctaccccctgagcgaggagacctggcacacccaccagttcaacttcatcaagaaccacgccttcagactgctgaagcccggcggcgtgctgacctactgcaacctgaccagctggggcgagctgatgaagagcaagtacagcgacatcaccatcatgttcgaggtgagaccccccgaggtgccccacggcagccccggcagcgacctgggctggggctgggagggcgccgccggcgccaccctgctgcccggcgagggccccttcctgaccccctgggtgggctggaccgtgctggtgcacctggagatcaaggtgctgtgcctggcccagtggctgcccggcgccgtggcccaggtgtacaaccccagcaccgtggagggcagaggcggccagatcgcctag

SEQ ID NO: 83821 - DNA, 1416 bp, synthetic construct
  misc_feature 1..1416: note = Description of Artificial Sequence: Synthetic coding sequence
  source 1..1416: mol_type = other DNA
atgtgcgccgcccagatgccccccctggcccacatcttcagaggcaccttcgtgcacagcacctggacctgccccatggaggtgctgagagaccacctgctgggcgtgagcgacagcggcaagatcgtgttcctggaggaggccagccagcaggagaagctggccaaggagtggtgcttcaagccctgcgagatcagagagctgagccaccacgagttcttcatgcccggcctggtggacacccacatccacgccagccagtacagcttcgccggcagcagcatcgacctgcccctgctggagtggctgaccaagtacaccttccccgccgagcacagattccagaacatcgacttcgccgaggaggtgtacaccagagtggtgagaagaaccctgaagaacggcaccaccaccgcctgctacttcgccaccatccacaccgacagcagcctgctgctggccgacatcaccgacaagttcggccagagagccttcgtgggcaaggtgtgcatggacctgaacgacaccttccccgagtacaaggagaccaccgaggagagcatcaaggagaccgagagattcgtgagcgagatgctgcagaagaactacagcagagtgaagcccatcgtgacccccagattcagcctgagctgcagcgagaccctgatgggcgagctgggcaacatcgccaagaccagagacctgcacatccagagccacatcagcgagaacagagacgaggtggaggccgtgaagaacctgtaccccagctacaagaactacaccagcgtgtacgacaagaacaacctgctgaccaacaagaccgtgatggcccacggctgctacctgagcgccgaggagctgaacgtgttccacgagagaggcgccagcatcgcccactgccccaacagcaacctgagcctgagcagcggcttcctgaacgtgctggaggtgctgaagcacgaggtgaagatcggcctgggcaccgacgtggccggcggctacagctacagcatgctggacgccatcagaagagccgtgatggtgagcaacatcctgctgatcaacaaggtgaacgagaagagcctgaccctgaaggaggtgttcagactggccaccctgggcggcagccaggccctgggcctggacggcgagatcggcaacttcgaggtgggcaaggagttcgacgccatcctgatcaaccccaaggccagcgacagccccatcgacctgttctacggcgacttcttcggcgacatcagcgaggccgtgatccagaagttcctgtacctgggcgacgacagaaacatcgaggaggtgtacgtgggcggcaagcaggtggtgcccttcagcagcagcgtgaaggagaccatccacctgcccgccagcagcccccaccccccccccttcccctag

SEQ ID NO: 83822 - DNA, 1365 bp, synthetic construct
  misc_feature 1..1365: note = Description of Artificial Sequence: Synthetic coding sequence
  source 1..1365: mol_type = other DNA
atgtgcgccgcccagatgccccccctggcccacatcttcagaggcaccttcgtgcacagcacctggacctgccccatggaggtgctgagagaccacctgctgggcgtgagcgacagcggcaagatcgtgttcctggaggaggccagccagcaggagaagctggccaaggagtggtgcttcaagccctgcgagatcagagagctgagccaccacgagttcttcatgcccggcctggtggacacccacatccacgccagccagtacagcttcgccggcagcagcatcgacctgcccctgctggagtggctgaccaagtacaccttccccgccgagcacagattccagaacatcgacttcgccgaggaggtgtacaccagagtggtgagaagaaccctgaagaacggcaccaccaccgcctgctacttcgccaccatccacaccgacagcagcctgctgctggccgacatcaccgacaagttcggccagagagccttcgtgggcaaggtgtgcatggacctgaacgacaccttccccgagtacaaggagaccaccgaggagagcatcaaggagaccgagagattcgtgagcgagatgctgcagaagaactacagcagagtgaagcccatcgtgacccccagattcagcctgagctgcagcgagaccctgatgggcgagctgggcaacatcgccaagaccagagacctgcacatccagagccacatcagcgagaacagagacgaggtggaggccgtgaagaacctgtaccccagctacaagaactacaccagcgtgtacgacaagaacaacctgctgaccaacaagaccgtgatggcccacggctgctacctgagcgccgaggagctgaacgtgttccacgagagaggcgccagcatcgcccactgccccaacagcaacctgagcctgagcagcggcttcctgaacgtgctggaggtgctgaagcacgaggtgaagatcggcctgggcaccgacgtggccggcggctacagctacagcatgctggacgccatcagaagagccgtgatggtgagcaacatcctgctgatcaacaaggtgaacgagaagagcctgaccctgaaggaggtgttcagactggccaccctgggcggcagccaggccctgggcctggacggcgagatcggcaacttcgaggtgggcaaggagttcgacgccatcctgatcaaccccaaggccagcgacagccccatcgacctgttctacggcgacttcttcggcgacatcagcgaggccgtgatccagaagttcctgtacctgggcgacgacagaaacatcgaggaggtgtacgtgggcggcaagcaggtggtgcccttcagcagcagcgtgtag

SEQ ID NO: 83823 - DNA, 1182 bp, synthetic construct
  misc_feature 1..1182: note = Description of Artificial Sequence: Synthetic coding sequence
  source 1..1182: mol_type = other DNA
atgttcctggaggaggccagccagcaggagaagctggccaaggagtggtgcttcaagccctgcgagatcagagagctgagccaccacgagttcttcatgcccggcctggtggacacccacatccacgccagccagtacagcttcgccggcagcagcatcgacctgcccctgctggagtggctgaccaagtacaccttccccgccgagcacagattccagaacatcgacttcgccgaggaggtgtacaccagagtggtgagaagaaccctgaagaacggcaccaccaccgcctgctacttcgccaccatccacaccgacagcagcctgctgctggccgacatcaccgacaagttcggccagagagccttcgtgggcaaggtgtgcatggacctgaacgacaccttccccgagtacaaggagaccaccgaggagagcatcaaggagaccgagagattcgtgagcgagatgctgcagaagaacagccacatcagcgagaacagagacgaggtggaggccgtgaagaacctgtaccccagctacaagaactacaccagcgtgtacgacaagaacaacctgctgaccaacaagaccgtgatggcccacggctgctacctgagcgccgaggagctgaacgtgttccacgagagaggcgccagcatcgcccactgccccaacagcaacctgagcctgagcagcggcttcctgaacgtgctggaggtgctgaagcacgaggtgaagatcggcctgggcaccgacgtggccggcggctacagctacagcatgctggacgccatcagaagagccgtgatggtgagcaacatcctgctgatcaacaaggtgaacgagaagagcctgaccctgaaggaggtgttcagactggccaccctgggcggcagccaggccctgggcctggacggcgagatcggcaacttcgaggtgggcaaggagttcgacgccatcctgatcaaccccaaggccagcgacagccccatcgacctgttctacggcgacttcttcggcgacatcagcgaggccgtgatccagaagttcctgtacctgggcgacgacagaaacatcgaggaggtgtacgtgggcggcaagcaggtggtgcccttcagcagcagcgtgaaggagaccatccacctgcccgccagcagcccccaccccccccccttcccctag

SEQ ID NO: 83824 - DNA, 1233 bp, synthetic construct
  misc_feature 1..1233: note = Description of Artificial Sequence: Synthetic coding sequence
  source 1..1233: mol_type = other DNA
atggaggtgctgagagaccacctgctgggcgtgagcgacagcggcaagatcgtgttcctggaggaggccagccagcaggagaagctggccaaggagtggtgcttcaagccctgcgagatcagagagctgagccaccacgagttcttcatgcccggcctggtggacacccacatccacgccagccagtacagcttcgccggcagcagcatcgacctgcccctgctggagtggctgaccaagtacaccttccccgccgagcacagattccagaacatcgacttcgccgaggaggtgtacaccagagtggtgagaagaaccctgaagaacggcaccaccaccgcctgctacttcgccaccatccacaccgacagcagcctgctgctggccgacatcaccgacaagttcggccagagagccttcgtgggcaaggtgtgcatggacctgaacgacaccttccccgagtacaaggagaccaccgaggagagcatcaaggagaccgagagattcgtgagcgagatgctgcagaagaacagccacatcagcgagaacagagacgaggtggaggccgtgaagaacctgtaccccagctacaagaactacaccagcgtgtacgacaagaacaacctgctgaccaacaagaccgtgatggcccacggctgctacctgagcgccgaggagctgaacgtgttccacgagagaggcgccagcatcgcccactgccccaacagcaacctgagcctgagcagcggcttcctgaacgtgctggaggtgctgaagcacgaggtgaagatcggcctgggcaccgacgtggccggcggctacagctacagcatgctggacgccatcagaagagccgtgatggtgagcaacatcctgctgatcaacaaggtgaacgagaagagcctgaccctgaaggaggtgttcagactggccaccctgggcggcagccaggccctgggcctggacggcgagatcggcaacttcgaggtgggcaaggagttcgacgccatcctgatcaaccccaaggccagcgacagccccatcgacctgttctacggcgacttcttcggcgacatcagcgaggccgtgatccagaagttcctgtacctgggcgacgacagaaacatcgaggaggtgtacgtgggcggcaagcaggtggtgcccttcagcagcagcgtgaaggagaccatccacctgcccgccagcagcccccaccccccccccttcccctag

SEQ ID NO: 83825 - DNA, 588 bp, synthetic construct
  misc_feature 1..588: note = Description of Artificial Sequence: Synthetic coding sequence
  source 1..588: mol_type = other DNA
atgaccctgttccagaacaccagaagacccctgagaaacagaagcagaaagctgagagactgccacagcgtgacccaggccggcgtgcagtggagagacctgagcagcctgaagccccccccccccgtgttcaagagattcagctgcctgagcctgcccagcagctgggactacagattcgtgagcgagatgctgcagaagaactacagcagagtgaagcccatcgtgacccccagattcagcctgagctgcagcgagaccctgatgggcgagctgggcaacatcgccaagaccagagacctgcacatccagagccacatcagcgagaacagagacgaggtggaggccgtgaagaacctgtaccccagctacaagaactacaccagcgtgtacgacaagaacaacctgctgaccaacaagaccgtgatggcccacggctgctacctgagcgccgaggagctgaacgtgttccacgagagaggcgccagcatcgcccactgccccaacagcaacctgagcctgagcagcggcttcctgaacgtgctggaggtgctgaagcacgaggtgaagatcggcctgggcacctag

SEQ ID NO: 83826 - DNA, 540 bp, synthetic construct
  misc_feature 1..540: note = Description of Artificial Sequence: Synthetic coding sequence
  source 1..540: mol_type = other DNA
gagagaggcgccagcatcgcccactgccccaacagcaacctgagcctgagcagcggcttcctgaacgtgctggaggtgctgaagcacgaggtgaagatcggcctgggcaccgacgtggccggcggctacagctacagcatgctggacgccatcagaagagccgtgatggtgagcaacatcctgctgatcaacaaggtgaacgagaagagcctgaccctgaaggaggtgttcagactggccaccctgggcggcagccaggccctgggcctggacggcgagatcggcaacttcgaggtgggcaaggagttcgacgccatcctgatcaaccccaaggccagcgacagccccatcgacctgttctacggcgacttcttcggcgacatcagcgaggccgtgatccagaagttcctgtacctgggcgacgacagaaacatcgaggaggtgtacgtgggcggcaagcaggtggtgcccttcagcagcagcgtgaaggagaccatccacctgcccgccagcagcccccaccccccccccttcccctag

SEQ ID NO: 83827 - DNA, 1365 bp, synthetic construct; identical to SEQ ID NO: 83822
  misc_feature 1..1365: note = Description of Artificial Sequence: Synthetic coding sequence
  source 1..1365: mol_type = other DNA

SEQ ID NO: 83828 - DNA, 1143 bp, synthetic construct
  misc_feature 1..1143: note = Description of Artificial Sequence: Synthetic coding sequence
  source 1..1143: mol_type = other DNA
atgcccggcctggtggacacccacatccacgccagccagtacagcttcgccggcagcagcatcgacctgcccctgctggagtggctgaccaagtacaccttccccgccgagcacagattccagaacatcgacttcgccgaggaggtgtacaccagagtggtgagaagaaccctgaagaacggcaccaccaccgcctgctacttcgccaccatccacaccgacagcagcctgctgctggccgacatcaccgacaagttcggccagagagccttcgtgggcaaggtgtgcatggacctgaacgacaccttccccgagtacaaggagaccaccgaggagagcatcaaggagaccgagagattcgtgagcgagatgctgcagaagaactacagcagagtgaagcccatcgtgacccccagattcagcctgagctgcagcgagaccctgatgggcgagctgggcaacatcgccaagaccagagacctgcacatccagagccacatcagcgagaacagagacgaggtggaggccgtgaagaacctgtaccccagctacaagaactacaccagcgtgtacgacaagaacaacctgctgaccaacaagaccgtgatggcccacggctgctacctgagcgccgaggagctgaacgtgttccacgagagaggcgccagcatcgcccactgccccaacagcaacctgagcctgagcagcggcttcctgaacgtgctggaggtgctgaagcacgaggtgaagatcggcctgggcaccgacgtggccggcggctacagctacagcatgctggacgccatcagaagagccgtgatggtgagcaacatcctgctgatcaacaaggtgaacgagaagagcctgaccctgaaggaggtgttcagactggccaccctgggcggcagccaggccctgggcctggacggcgagatcggcaacttcgaggtgggcaaggagttcgacgccatcctgatcaaccccaaggccagcgacagccccatcgacctgttctacggcgacttcttcggcgacatcagcgaggccgtgatccagaagttcctgtacctgggcgacgacagaaacatcgaggaggtgtacgtgggcggcaagcaggtggtgcccttcagcagcagcgtgtag

SEQ ID NO: 83829 - DNA, 2082 bp, synthetic construct
  misc_feature 1..2082: note = Description of Artificial Sequence: Synthetic coding sequence
  source 1..2082: mol_type = other DNA
atggccctgtgcaacggcgacagcaagctggagaacgccggcggcgacctgaaggacggccaccaccactacgagggcgccgtggtgatcctggacgccggcgcccagtacggcaaggtgatcgacagaagagtgagagagctgttcgtgcagagcgagatcttccccctggagacccccgccttcgccatcaaggagcagggcttcagagccatcatcatcagcggcggccccaacagcgtgtacgccgaggacgccccctggttcgaccccgccatcttcaccatcggcaagcccgtgctgggcatctgctacggcatgcagatgatgaacaaggtgttcggcggcaccgtgcacaagaagagcgtgagagaggacggcgtgttcaacatcagcgtggacaacacctgcagcctgttcagaggcctgcagaaggaggaggtggtgctgctgacccacggcgacagcgtggacaaggtggccgacggcttcaaggtggtggccagaagcggcaacatcgtggccggcatcgccaacgagagcaagaagctgtacggcgcccagttccaccccgaggtgggcctgaccgagaacggcaaggtgatcctgaagaacttcctgtacgacatcgccggctgcagcggcaccttcaccgtgcagaacagagagctggagtgcatcagagagatcaaggagagagtgggcaccagcaaggtgctggtgctgctgagcggcggcgtggacagcaccgtgtgcaccgccctgctgaacagagccctgaaccaggagcaggtgatcgccgtgcacatcgacaacggcttcatgagaaagagagagagccagagcgtggaggaggccctgaagaagctgggcatccaggtgaaggtgatcaacgccgcccacagcttctacaacggcaccaccaccctgcccatcagcgacgaggacagaacccccagaaagagaatcagcaagaccctgaacatgaccaccagccccgaggagaagagaaagatcatcggcgacaccttcgtgaagatcgccaacgaggtgatcggcgagatgaacctgaagcccgaggaggtgttcctggcccagggcaccctgagacccgacctgatcgagagcgccagcctggtggccagcggcaaggccgagctgatcaagacccaccacaacgacaccgagctgatcagaaagctgagagaggagggcaaggtgatcgagcccctgaaggacttccacaaggacgaggtgagaatcctgggcagagagctgggcctgcccgaggagctggtgagcagacaccccttccccggccccggcctggccatcagagtgatctgcgccgaggagccctacatctgcaaggacttccccgagaccaacaacatcctgaagatcgtggccgacttcagcgccagcgtgaagaagccccacaccctgctgcagagagtgaaggcctgcaccaccgaggaggaccaggagaagctgatgcagatcaccagcctgcacagcctgaacgccttcctgctgcccatcaagaccgtgggcgtgcagggcgactgcagaagctacagctacgtgtgcggcatcagcagcaaggacgagcccgactgggagagcctgatcttcctggccagactgatccccagaatgtgccacaacgtgaacagagtggtgtacatcttcggcccccccgtgaaggagccccccaccgacgtgacccccaccttcctgaccaccggcgtgctgagcaccctgagacaggccgacttcgaggcccacaacatcctgagagagagcggctacgccggcaagatcagccagatgcccgtgatcctgacccccctgcacttcgacagagaccccctgcagaagcagcccagctgccagagaagcgtggtgatcagaaccttcatcaccagcgacttcatgaccggcatccccgccacccccggcaacgagatccccgtggaggtggtgctgaagatggtgaccgagatcaagaagatccccggcatcagcagaatcatgtacgacctgaccagcaagccccccggcaccaccgagtgggagtag

SEQ ID NO: 83830 - DNA, 1929 bp, synthetic construct
  misc_feature 1..1929: note = Description of Artificial Sequence: Synthetic coding sequence
  source 1..1929: mol_type = other DNA
atgctggaggagaccctgagaatggccaccaccaccatcaaggagcagggcttcagagccatcatcatcagcggcggccccaacagcgtgtacgccgaggacgccccctggttcgaccccgccatcttcaccatcggcaagcccgtgctgggcatctgctacggcatgcagatgatgaacaaggtgttcggcggcaccgtgcacaagaagagcgtgagagaggacggcgtgttcaacatcagcgtggacaacacctgcagcctgttcagaggcctgcagaaggaggaggtggtgctgctgacccacggcgacagcgtggacaaggtggccgacggcttcaaggtggtggccagaagcggcaacatcgtggccggcatcgccaacgagagcaagaagctgtacggcgcccagttccaccccgaggtgggcctgaccgagaacggcaaggtgatcctgaagaacttcctgtacgacatcgccggctgcagcggcaccttcaccgtgcagaacagagagctggagtgcatcagagagatcaaggagagagtgggcaccagcaaggtgctggtgctgctgagcggcggcgtggacagcaccgtgtgcaccgccctgctgaacagagccctgaaccaggagcaggtgatcgccgtgcacatcgacaacggcttcatgagaaagagagagagccagagcgtggaggaggccctgaagaagctgggcatccaggtgaaggtgatcaacgccgcccacagcttctacaacggcaccaccaccctgcccatcagcgacgaggacagaacccccagaaagagaatcagcaagaccctgaacatgaccaccagccccgaggagaagagaaagatcatcggcgacaccttcgtgaagatcgccaacgaggtgatcggcgagatgaacctgaagcccgaggaggtgttcctggcccagggcaccctgagacccgacctgatcgagagcgccagcctggtggccagcggcaaggccgagctgatcaagacccaccacaacgacaccgagctgatcagaaagctgagagaggagggcaaggtgatcgagcccctgaaggacttccacaaggacgaggtgagaatcctgggcagagagctgggcctgcccgaggagctggtgagcagacaccccttccccggccccggcctggccatcagagtgatctgcgccgaggagccctacatctgcaaggacttccccgagaccaacaacatcctgaagatcgtggccgacttcagcgccagcgtgaagaagccccacaccctgctgcagagagtgaaggcctgcaccaccgaggaggaccaggagaagctgatgcagatcaccagcctgcacagcctgaacgccttcctgctgcccatcaagaccgtgggcgtgcagggcgactgcagaagctacagctacgtgtgcggcatcagcagcaaggacgagcccgactgggagagcctgatcttcctggccagactgatccccagaatgtgccacaacgtgaacagagtggtgtacatcttcggcccccccgtgaaggagccccccaccgacgtgacccccaccttcctgaccaccggcgtgctgagcaccctgagacaggccgacttcgaggcccacaacatcctgagagagagcggctacgccggcaagatcagccagatgcccgtgatcctgacccccctgcacttcgacagagaccccctgcagaagcagcccagctgccagagaagcgtggtgatcagaaccttcatcaccagcgacttcatgaccggcatccccgccacccccggcaacgagatccccgtggaggtggtgctgaagatggtgaccgagatcaagaagatccccggcatcagcagaatcatgtacgacctgaccagcaagccccccggcaccaccgagtgggagtag

SEQ ID NO: 83831 - DNA, 2082 bp, synthetic construct; identical to SEQ ID NO: 83829
  misc_feature 1..2082: note = Description of Artificial Sequence: Synthetic coding sequence
  source 1..2082: mol_type = other DNA

SEQ ID NO: 83832 - DNA, 1146 bp, synthetic construct
  misc_feature 1..1146: note = Description of Artificial Sequence: Synthetic coding sequence
  source 1..1146: mol_type = other DNA
atgagcggcgtggtgagaaccctgagcagatgcctgctgcccgccgaggccggcggcgccagagagagaagagccggcagcggcgccagagacgccgagagagaggccagaagaagaagcagagacatcgacgccctgctggccagagagagaagagccgtgagaagactggtgaagatcctgctgctgggcgccggcgagagcggcaagagcaccttcctgaagcagatgagaatcatccacggcagagagttcgaccagaaggccctgctggagttcagagacaccatcttcgacaacatcctgaagggcagcagagtgctggtggacgccagagacaagctgggcatcccctggcagtacagcgagaacgagaagcacggcatgttcctgatggccttcgagaacaaggccggcctgcccgtggagcccgccaccttccagctgtacgtgcccgccctgagcgccctgtggagagacagcggcatcagagaggccttcagcagaagaagcgagttccagctgggcgagagcgtgaagtacttcctggacaacctggacagaatcggccagctgaactacttccccagcaagcaggacatcctgctggccagaaaggccaccaagggcatcgtggagcacgacttcgtgatcaagaagatccccttcaagatggtggacgtgggcggccagagaagccagagacagaagtggttccagtgcttcgacggcatcaccagcatcctgttcatggtgagcagcagcgagtacgaccaggtgctgatggaggacagaagaaccaacagactggtggagagcatgaacatcttcgagaccatcgtgaacaacaagctgttcttcaacgtgagcatcatcctgttcctgaacaagatggacctgctggtggagaaggtgaagaccgtgagcatcaagaagcacttccccgacttcagaggcgacccccacagactggaggacgtgcagagatacctggtgcagtgcttcgacagaaagagaagaaacagaagcaagcccctgttccaccacttcaccaccgccatcgacaccgagaacgtgagattcgtgttccacgccgtgaaggacaccatcctgcaggagaacctgaaggacatcatgctgcagtag

SEQ ID NO: 83833 - DNA, 702 bp, synthetic construct
  misc_feature 1..702: note = Description of Artificial Sequence: Synthetic coding sequence
  source 1..702: mol_type = other DNA
atgatctaccccctgatcgtgctgcccctgtgcgccagctggcactggggcctgatcagaaagggcatcgtgctgttctggggcgagagcgtgaagtacttcctggacaacctggacagaatcggccagctgaactacttccccagcaagcaggacatcctgctggccagaaaggccaccaagggcatcgtggagcacgacttcgtgatcaagaagatccccttcaagatggtggacgtgggcggccagagaagccagagacagaagtggttccagtgcttcgacggcatcaccagcatcctgttcatggtgagcagcagcgagtacgaccaggtgctgatggaggacagaagaaccaacagactggtggagagcatgaacatcttcgagaccatcgtgaacaacaagctgttcttcaacgtgagcatcatcctgttcctgaacaagatggacctgctggtggagaaggtgaagaccgtgagcatcaagaagcacttccccgacttcagaggcgacccccacagactggaggacgtgcagagatacctggtgcagtgcttcgacagaaagagaagaaacagaagcaagcccctgttccaccacttcaccaccgccatcgacaccgagaacgtgagattcgtgttccacgccgtgaaggacaccatcctgcaggagaacctgaaggacatcatgctgcagtag

SEQ ID NO: 83834 - DNA, 867 bp, synthetic construct
  misc_feature 1..867: note = Description of Artificial Sequence: Synthetic coding sequence
  source 1..867: mol_type = other DNA
atgagaatcatccacggcagagagttcgaccagaaggccctgctggagttcagagacaccatcttcgacaacatcctgaagggcagcagagtgctggtggacgccagagacaagctgggcatcccctggcagtacagcgagaacgagaagcacggcatgttcctgatggccttcgagaacaaggccggcctgcccgtggagcccgccaccttccagctgtacgtgcccgccctgagcgccctgtggagagacagcggcatcagagaggccttcagcagaagaagcgagttccagctgaactacttccccagcaagcaggacatcctgctggccagaaaggccaccaagggcatcgtggagcacgacttcgtgatcaagaagatccccttcaagatggtggacgtgggcggccagagaagccagagacagaagtggttccagtgcttcgacggcatcaccagcatcctgttcatggtgagcagcagcgagtacgaccaggtgctgatggaggacagaagaaccaacagactggtggagagcatgaacatcttcgagaccatcgtgaacaacaagctgttcttcaacgtgagcatcatcctgttcctgaacaagatggacctgctggtggagaaggtgaagaccgtgagcatcaagaagcacttccccgacttcagaggcgacccccacagactggaggacgtgcagagatacctggtgcagtgcttcgacagaaagagaagaaacagaagcaagcccctgttccaccacttcaccaccgccatcgacaccgagaacgtgagattcgtgttccacgccgtgaaggacaccatcctgcaggagaacctgaaggacatcatgctgcagtag

SEQ ID NO: 83835 - DNA, 1080 bp, synthetic construct
  misc_feature 1..1080: note = Description of Artificial Sequence: Synthetic coding sequence
  source 1..1080: mol_type = other DNA
atgaccctggagagcatgatggcctgctgcctgagcgacgaggtgaaggagagcaagagaatcaacgccgagatcgagaagcagctgagaagagacaagagagacgccagaagagagctgaagctgctgctgctgggcaccggcgagagcggcaagagcaccttcatcaagcagatgagaatcatccacggcgccggctacagcgaggaggacaagagaggcttcaccaagctggtgtaccagaacatcttcaccgccatgcaggccatgatcagagccatggagaccctgaagatcctgtacaagtacgagcagaacaaggccaacgccctgctgatcagagaggtggacgtggagaaggtgaccaccttcgagcaccagtacgtgagcgccatcaagaccctgtgggaggaccccggcatccaggagtgctacgacagaagaagagagtaccagctgagcgacagcgccaagtactacctgaccgacgtggacagaatcgccaccctgggctacctgcccacccagcaggacgtgctgagagtgagagtgcccaccaccggcatcatcgagtaccccttcgacctggagaacatcatcttcagaatggtggacgtgggcggccagagaagcgagagaagaaagtggatccactgcttcgagaacgtgaccagcatcatgttcctggtggccctgagcgagtacgaccaggtgctggtggagagcgacaacgagaacagaatggaggagagcaaggccctgttcagaaccatcatcacctacccctggttccagaacagcagcgtgatcctgttcctgaacaagaaggacctgctggaggacaagatcctgtacagccacctggtggactacttccccgagttcgacggcccccagagagacgcccaggccgccagagagttcatcctgaagatgttcgtggacctgaaccccgacagcgacaagatcatctacagccacttcacctgcgccaccgacaccgagaacatcagattcgtgttcgccgccgtgaaggacaccatcctgcagctgaacctgaaggagtacaacctggtgtag

SEQ ID NO: 83836 - DNA, 1059 bp, synthetic construct
  misc_feature 1..1059: note = Description of Artificial Sequence: Synthetic coding sequence
  source 1..1059: mol_type = other DNA
atggccgacttcctgcccagcagaagcgtgctgagcgtgtgcttccccggctgcctgctgaccagcggcgaggccgagcagcagagaaagagcaaggagatcgacaagtgcctgagcagagagaagacctacgtgaagagactggtgaagatcctgctgctgggcgccggcgagagcggcaagagcacctacagcaacgtgatcaagggcatgagagtgctggtggacgccagagagaagctgcacatcccctggggcgacaacagcaaccagcagcacggcgacaagatgatgagcttcgacaccagagcccccatggccgcccagggcatggtggagaccagagtgttcctgcagtacctgcccgccatcagagccctgtgggccgacagcggcatccagaacgcctacgacagaagaagagagttccagctgggcgagagcgtgaagtacttcctggacaacctggacaagctgggcgagcccgactacatccccagccagcaggacatcctgctggccagaagacccaccaagggcatccacgagtacgacttcgagatcaagaacgtgcccttcaagatggtggacgtgggcggccagagaagcgagagaaagagatggttcgagtgcttcgacagcgtgaccagcatcctgttcctggtgagcagcagcgagttcgaccaggtgctgatggaggacagactgaccaacagactgaccgagagcctgaacatcttcgagaccatcgtgaacaacagagtgttcagcaacgtgagcatcatcctgttcctgaacaagaccgacctgctggaggagaaggtgcagatcgtgagcatcaaggactacttcctggagttcgagggcgacccccactgcctgagagacgtgcagaagttcctggtggagtgcttcagaaacaagagaagagaccagcagcagaagcccctgtaccaccacttcaccaccgccatcaacaccgagaacatcagactggtgttcagagacgtgaaggacaccatcctgcacgacaacctgaagcagctgatgctgcagtag

SEQ ID NO: 83837 - DNA, 1134 bp, synthetic construct
  misc_feature 1..1134: note = Description of Artificial Sequence: Synthetic coding sequence
  source 1..1134: mol_type = other DNA
atggccgacttcctgcccagcagaagcgtgctgagcgtgtgcttccccggctgcctgctgaccagcggcgaggccgagcagcagagaaagagcaaggagatcgacaagtgcctgagcagagagaagacctacgtgaagagactggtgaagatcctgctgctgggcgccggcgagagcggcaagagcaccttcctgaagcagatgagaatcatccacggccaggacttcgaccagagagccagagaggagttcagacccaccatctacagcaacgtgatcaagggcatgagagtgctggtggacgccagagagaagctgcacatcccctggggcgacaacagcaaccagcagcacggcgacaagatgatgagcttcgacaccagagcccccatggccgcccagggcatggtggagaccagagtgttcctgcagtacctgcccgccatcagagccctgtgggccgacagcggcatccagaacgcctacgacagaagaagagagttccagctgggcgagagcgtgaagtacttcctggacaacctggacaagctgggcgagcccgactacatccccagccagcaggacatcctgctggccagaagacccaccaagggcatccacgagtacgacttcgagatcaagaacgtgcccttcaagatggtggacgtgggcggccagagaagcgagagaaagagatggttcgagtgcttcgacagcgtgaccagcatcctgttcctggtgagcagcagcgagttcgaccaggtgctgatggaggacagactgaccaacagactgaccgagagcctgaacatcttcgagaccatcgtgaacaacagagtgttcagcaacgtgagcatcatcctgttcctgaacaagaccgacctgctggaggagaaggtgcagatcgtgagcatcaaggactacttcctggagttcgagggcgacccccactgcctgagagacgtgcagaagttcctggtggagtgcttcagaaacaagagaagagaccagcagcagaagcccctgtaccaccacttcaccaccgccatcaacaccgagaacatcagactggtgttcagagacgtgaaggacaccatcctgcacgacaacctgaagcagctgatgctgcagtag

SEQ ID NO: 83838 - DNA, 849 bp, synthetic construct
  misc_feature 1..849: note = Description of Artificial Sequence: Synthetic coding sequence
  source 1..849: mol_type = other DNA
atgagagtgctggtggacgccagagagaagctgcacatcccctggggcgacaacagcaaccagcagcacggcgacaagatgatgagcttcgacaccagagcccccatggccgcccagggcatggtggagaccagagtgttcctgcagtacctgcccgccatcagagccctgtgggccgacagcggcatccagaacgcctacgacagaagaagagagttccagctgggcgagagcgtgaagtacttcctggacaacctggacaagctgggcgagcccgactacatccccagccagcaggacatcctgctggccagaagacccaccaagggcatccacgagtacgacttcgagatcaagaacgtgcccttcaagatggtggacgtgggcggccagagaagcgagagaaagagatggttcgagtgcttcgacagcgtgaccagcatcctgttcctggtgagcagcagcgagttcgaccaggtgctgatggaggacagactgaccaacagactgaccgagagcctgaacatcttcgagaccatcgtgaacaacagagtgttcagcaacgtgagcatcatcctgttcctgaacaagaccgacctgctggaggagaaggtgcagatcgtgagcatcaaggactacttcctggagttcgagggcgacccccactgcctgagagacgtgcagaagttcctggtggagtgcttcagaaacaagagaagagaccagcagcagaagcccctgtaccaccacttcaccaccgccatcaacaccgagaacatcagactggtgttcagagacgtgaaggacaccatcctgcacgacaacctgaagcagctgatgctgcagtag

SEQ ID NO: 83839 - DNA, 1068 bp, synthetic construct
  misc_feature 1..1068: note = Description of Artificial Sequence: Synthetic coding sequence
  source 1..1068: mol_type = other DNA
atggccggctgctgctgcctgagcgccgaggagaaggagagccagagaatcagcgccgagatcgagagacagctgagaagagacaagaaggacgccagaagagagctgaagctgctgctgctgggcaccggcgagagcggcaagagcaccttcatcaagcagatgagaatcatccacggcagcggctacagcgacgaggacagaaagggcttcaccaagctggtgtaccagaacatcttcaccgccatgcaggccatgatcagagccatggacaccctgagaatccagtacgtgtgcgagcagaacaaggagaacgcccagatcatcagagaggtggaggtggacaaggtgagcatgctgagcagagagcaggtggaggccatcaagcagctgtggcaggaccccggcatccaggagtgctacgacagaagaagagagtaccagctgagcgacagcgccaagtactacctgaccgacatcgacagaatcgccacccccagcttcgtgcccacccagcaggacgtgctgagagtgagagtgcccaccaccggcatcatcgagtaccccttcgacctggagaacatcatcttcagaatggtggacgtgggcggccagagaagcgagagaagaaagtggatccactgcttcgagagcgtgaccagcatcatcttcctggtggccctgagcgagtacgaccaggtgctggccgagtgcgacaacgagaacagaatggaggagagcaaggccctgttcaagaccatcatcacctacccctggttcctgaacagcagcgtgatcctgttcctgaacaagaaggacctgctggaggagaagatcatgtacagccacctgatcagctacttccccgagtacaccggccccaagcaggacgtgagagccgccagagacttcatcctgaagctgtaccaggaccagaaccccgacaaggagaaggtgatctacagccacttcacctgcgccaccgacaccgacaacatcagattcgtgttcgccgccgtgaaggacaccatcctgcagctgaacctgagagagttcaacctggtgtag

SEQ ID NO: 83840 - DNA, 1125 bp, synthetic construct
  misc_feature 1..1125: note = Description of Artificial Sequence: Synthetic coding sequence
  source 1..1125: mol_type = other DNA
atggccagaagcctgacctggagatgctgcccctggtgcctgaccgaggacgagaaggccgccgccagagtggaccaggagatcaacagaatcctgctggagcagaagaagcaggacagaggcgagctgaagctgctgctgctgggccccggcgagagcggcaagagcaccttcatcaagcagatgagaatcatccacggcgccggctacagcgaggaggagagaaagggcttcagacccctggtgtaccagaacatcttcgtgagcatgagagccatgatcgaggccatggagagactgcagatccccttcagcagacccgagagcaagcaccacgccagcctggtgatgagccaggacccctacaaggtgaccaccttcgagaagagatacgccgccgccatgcagtggctgtggagagacgccggcatcagagcctactacgagagaagaagagagttccacctgctggacagcgccgtgtactacctgagccacctggagagaatcaccgaggagggctacgtgcccaccgcccaggacgtgctgagaagcagaatgcccaccaccggcatcaacgagtactgcttcagcgtgcagaagaccaacctgagaatcgtggacgtgggcggccagaagagcgagagaaagaagtggatccactgcttcgagaacgtgatcgccctgatctacctggccagcctgagcgagtacgaccagtgcctggaggagaacaaccaggagaacagaatgaaggagagcctggccctgttcggcaccatcctggagctgccctggttcaagagcaccagcgtgatcctgttcctgaacaagaccgacatcctggaggagaagatccccaccagccacctggccacctacttccccagcttccagggccccaagcaggacgccgaggccgccaagagattcatcctggacatgtacaccagaatgtacaccggctgcgtggacggccccgagggcagcaagaagggcgccagaagcagaagactgttcagccactacacctgcgccaccgacacccagaacatcagaaaggtgttcaaggacgtgagagacagcgtgctggccagatacctggacgagatcaacctgctgtag

SEQ ID NO: 83841 - DNA, 1065 bp, synthetic construct
  misc_feature 1..1065: note = Description of Artificial Sequence: Synthetic coding sequence
  source 1..1065: mol_type = other DNA
atgggctgcaccctgagcgccgaggagagagccgccctggagagaagcaaggccatcgagaagaacctgaaggaggacggcatcagcgccgccaaggacgtgaagctgctgctgctgggcgccggcgagagcggcaagagcaccatcgtgaagcagatgaagatcatccacgaggacggcttcagcggcgaggacgtgaagcagtacaagcccgtggtgtacagcaacaccatccagagcctggccgccatcgtgagagccatggacaccctgggcatcgagtacggcgacaaggagagaaaggccgacgccaagatggtgtgcgacgtggtgagcagaatggaggacaccgagcccttcagcgccgagctgctgagcgccatgatgagactgtggggcgacagcggcatccaggagtgcttcaacagaagcagagagtaccagctgaacgacagcgccaagtactacctggacagcctggacagaatcggcgccgccgactaccagcccaccgagcaggacatcctgagaaccagagtgaagaccaccggcatcgtggagacccacttcaccttcaagaacctgcacttcagactgttcgacgtgggcggccagagaagcgagagaaagaagtggatccactgcttcgaggacgtgaccgccatcatcttctgcgtggccctgagcggctacgaccaggtgctgcacgaggacgagaccaccaacagaatgcacgagagcctgatgctgttcgacagcatctgcaacaacaagttcttcatcgacaccagcatcatcctgttcctgaacaagaaggacctgttcggcgagaagatcaagaagagccccctgaccatctgcttccccgagtacaccggccccaacacctacgaggacgccgccgcctacatccaggcccagttcgagagcaagaacagaagccccaacaaggagatctactgccacatgacctgcgccaccgacaccaacaacatccaggtggtgttcgacgccgtgaccgacatcatcatcgccaacaacctgagaggctgcggcctgtactag

SEQ ID NO: 83842 - DNA, 1065 bp, synthetic construct
  misc_feature 1..1065: note = Description of Artificial Sequence: Synthetic coding sequence
  source 1..1065: mol_type = other DNA
atgggctgcaccctgagcgccgaggagagagccgccctggagagaagcaaggccatcgagaagaacctgaaggaggacggcatcagcgccgccaaggacgtgaagctgctgctgctgggcgccggcgagagcggcaagagcaccatcgtgaagcagatgaagatcatccacgaggacggcttcagcggcgaggacgtgaagcagtacaagcccgtggtgtacagcaacaccatccagagcctggccgccatcgtgagagccatggacaccctgggcatcgagtacggcgacaaggagagaaaggccgacgccaagatggtgtgcgacgtggtgagcagaatggaggacaccgagcccttcagcgccgagctgctgagcgccatgatgagactgtggggcgacagcggcatccaggagtgcttcaacagaagcagagagtaccagctgaacgacagcgccaagtactacctggacagcctggacagaatcggcgccgccgactaccagcccaccgagcaggacatcctgagaaccagagtgaagaccaccggcatcgtggagacccacttcaccttcaagaacctgcacttcagactgttcgacgtgggcggccagagaagcgagagaaagaagtggatccactgcttcgaggacgtgaccgccatcatcttctgcgtggccctgagcggctacgaccaggtgctgcacgaggacgagaccaccaacagaatgcacgagagcctgaagctgttcgacagcatctgcaacaacaagtggttcaccgacaccagcatcatcctgttcctgaacaagaaggacatcttcgaggagaagatcaagaagagccccctgaccatctgcttccccgagtacaccggccccagcgccttcaccgaggccgtggcctacatccaggcccagtacgagagcaagaacaagagcgcccacaaggagatctacacccacgtgacctgcgccaccgacaccaacaacatccagttcgtgttcgacgccgtgaccgacgtgatcatcgccaagaacctgagaggctgcggcctgtactag

SEQ ID NO: 83843 - DNA, 1146 bp, synthetic construct
  misc_feature 1..1146: note = Description of Artificial Sequence: Synthetic coding sequence
  source 1..1146: mol_type = other DNA
atgggctgcctgggcggcaacagcaagaccaccgaggaccagggcgtggacgagaaggagagaagagaggccaacaagaagatcgagaagcagctgcagaaggagagactggcctacaaggccacccacagactgctgctgctgggcgccggcgagagcggcaagagcaccatcgtgaagcagatgagaatcctgcacgtgaacggcttcaaccccgaggagaagaagcagaagatcctggacatcagaaagaacgtgaaggacgccatcgtgaccatcgtgagcgccatgagcaccatcatcccccccgtgcccctggccaaccccgagaaccagttcagaagcgactacatcaagagcatcgcccccatcaccgacttcgagtacagccaggagttcttcgaccacgtgaagaagctgtgggacgacgagggcgtgaaggcctgcttcgagagaagcaacgagtaccagctgatcgactgcgcccagtacttcctggagagaatcgacagcgtgagcctggtggactacacccccaccgaccaggacctgctgagatgcagagtgctgaccagcggcatcttcgagaccagattccaggtggacaaggtgaacttccacatgttcgacgtgggcggccagagagacgagagaagaaagtggatccagtgcttcaacgacgtgaccgccatcatctacgtggccgcctgcagcagctacaacatggtgatcagagaggacaacaacaccaacagactgagagagagcctggacctgttcgagagcatctggaacaacagatggctgagaaccatcagcatcatcctgttcctgaacaagcaggacatgctggccgagaaggtgctggccggcaagagcaagatcgaggactacttccccgagtacgccaactacaccgtgcccgaggacgccacccccgacgccggcgaggaccccaaggtgaccagagccaagttcttcatcagagacctgttcctgagaatcagcaccgccaccggcgacggcaagcactactgctacccccacttcacctgcgccgtggacaccgagaacatcagaagagtgttcaacgactgcagagacatcatccagagaatgcacctgaagcagtacgagctgctgtag

SEQ ID NO: 83844 - DNA, 1377 bp, synthetic construct
  misc_feature 1..1377: note = Description of Artificial Sequence: Synthetic coding sequence
  source 1..1377: mol_type = other DNA
atgggcctgtgctacagcctgagacccctgctgttcggcggccccggcgacgacccctgcgccgccagcgagccccccgtggaggacgcccagcccgcccccgcccccgccctggcccccgtgagagccgccgccagagacaccgccagaaccctgctgcccagaggcggcgagggcagccccgcctgcgccagacccaaggccgacaagcccaaggagaagagacagagaaccgagcagctgagcgccgaggagagagaggccgccaaggagagagaggccgtgaaggaggccagaaaggtgagcagaggcatcgacagaatgctgagagaccagaagagagacctgcagcagacccacagactgctgctgctgggcgccggcgagagcggcaagagcaccatcgtgaagcagatgagaatcctgcacgtgaacggcttcaaccccgaggagaagaagcagaagatcctggacatcagaaagaacgtgaaggacgccatcgtgaccatcgtgagcgccatgagcaccatcatcccccccgtgcccctggccaaccccgagaaccagttcagaagcgactacatcaagagcatcgcccccatcaccgacttcgagtacagccaggagttcttcgaccacgtgaagaagctgtgggacgacgagggcgtgaaggcctgcttcgagagaagcaacgagtaccagctgatcgactgcgcccagtacttcctggagagaatcgacagcgtgagcctggtggactacacccccaccgaccaggacctgctgagatgcagagtgctgaccagcggcatcttcgagaccagattccaggtggacaaggtgaacttccacatgttcgacgtgggcggccagagagacgagagaagaaagtggatccagtgcttcaacgacgtgaccgccatcatctacgtggccgcctgcagcagctacaacatggtgatcagagaggacaacaacaccaacagactgagagagagcctggacctgttcgagagcatctggaacaacagatggctgagaaccatcagcatcatcctgttcctgaacaagcaggacatgctggccgagaaggtgctggccggcaagagcaagatcgaggactacttccccgagtacgccaactacaccgtgcccgaggacgccacccccgacgccggcgaggaccccaaggtgaccagagccaagttcttcatcagagacctgttcctgagaatcagcaccgccaccggcgacggcaagcactactgctacccccacttcacctgcgccgtggacaccgagaacatcagaagagtgttcaacgactgcagagacatcatccagagaatgcacctgaagcagtacgagctgctgtag

SEQ ID NO: 83845 - DNA, 1146 bp, synthetic construct; identical to SEQ ID NO: 83843
  misc_feature 1..1146: note = Description of Artificial Sequence: Synthetic coding sequence
  source 1..1146: mol_type = other DNA

SEQ ID NO: 83846 - DNA, 1146 bp, synthetic construct; identical to SEQ ID NO: 83843
  misc_feature 1..1146: note = Description of Artificial Sequence: Synthetic coding sequence
  source 1..1146: mol_type = other DNA

SEQ ID NO: 83847 - DNA, 525 bp, synthetic construct
  misc_feature 1..525: note = Description of Artificial Sequence: Synthetic coding sequence
  source 1..525: mol_type = other DNA
atgttcgacgtgggcggccagagagacgagagaagaaagtggatccagtgcttcaacgacgtgaccgccatcatctacgtggccgcctgcagcagctacaacatggtgatcagagaggacaacaacaccaacagactgagagagagcctggacctgttcgagagcatctggaacaacagatggctgagaaccatcagcatcatcctgttcctgaacaagcaggacatgctggccgagaaggtgctggccggcaagagcaagatcgaggactacttccccgagtacgccaactacaccgtgcccgaggacgccacccccgacgccggcgaggaccccaaggtgaccagagccaagttcttcatcagagacctgttcctgagaatcagcaccgccaccggcgacggcaagcactactgctacccccacttcacctgcgccgtggacaccgagaacatcagaagagtgttcaacgactgcagagacatcatccagagaatgcacctgaagcagtacgagctgctgtag

SEQ ID NO: 83848 - DNA, 963 bp, synthetic construct
  misc_feature 1..963: note = Description of Artificial Sequence: Synthetic coding sequence
  source 1..963: mol_type = other DNA
atgagaatcctgcacgtgaacggcttcaaccccgaggagaagaagcagaagatcctggacatcagaaagaacgtgaaggacgccatcgtgaccatcgtgagcgccatgagcaccatcatcccccccgtgcccctggccaaccccgagaaccagttcagaagcgactacatcaagagcatcgcccccatcaccgacttcgagtacagccaggagttcttcgaccacgtgaagaagctgtgggacgacgagggcgtgaaggcctgcttcgagagaagcaacgagtaccagctgatcgactgcgcccagtacttcctggagagaatcgacagcgtgagcctggtggactacacccccaccgaccaggacctgctgagatgcagagtgctgaccagcggcatcttcgagaccagattccaggtggacaaggtgaacttccacatgttcgacgtgggcggccagagagacgagagaagaaagtggatccagtgcttcaacgacgtgaccgccatcatctacgtggccgcctgcagcagctacaacatggtgatcagagaggacaacaacaccaacagactgagagagagcctggacctgttcgagagcatctggaacaacagatggctgagaaccatcagcatcatcctgttcctgaacaagcaggacatgctggccgagaaggtgctggccggcaagagcaagatcgaggactacttccccgagtacgccaactacaccgtgcccgaggacgccacccccgacgccggcgaggaccccaaggtgaccagagccaagttcttcatcagagacctgttcctgagaatcagcaccgccaccggcgacggcaagcactactgctacccccacttcacctgcgccgtggacaccgagaacatcagaagagtgttcaacgactgcagagacatcatccagagaatgcacctgaagcagtacgagctgctgtag

SEQ ID NO: 83849 - DNA, 1065 bp, synthetic construct
  misc_feature 1..1065: note = Description of Artificial Sequence: Synthetic coding sequence
  source 1..1065: mol_type = other DNA
atgggctgcaccctgagcgccgaggacaaggccgccgtggagagaagcaagatgatcgacagaaacctgagagaggacggcgagaaggccgccagagaggtgaagctgctgctgctgggcgccggcgagagcggcaagagcaccatcgtgaagcagatgaagatcatccacgaggccggctacagcgaggaggagtgcaagcagtacaaggccgtggtgtacagcaacaccatccagagcatcatcgccatcatcagagccatgggcagactgaagatcgacttcggcgacagcgccagagccgacgacgccagacagctgttcgtgctggccggcgccgccgaggagggcttcatgaccgccgagctggccggcgtgatcaagagactgtggaaggacagcggcgtgcaggcctgcttcaacagaagcagagagtaccagctgaacgacagcgccgcctactacctgaacgacctggacagaatcgcccagcccaactacatccccacccagcaggacgtgctgagaaccagagtgaagaccaccggcatcgtggagacccacttcaccttcaaggacctgcacttcaagatgttcgacgtgggcggccagagaagcgagagaaagaagtggatccactgcttcgagggcgtgaccgccatcatcttctgcgtggccctgagcgactacgacctggtgctggccgaggacgaggagatgaacagaatgcacgagagcatgaagctgttcgacagcatctgcaacaacaagtggttcaccgacaccagcatcatcctgttcctgaacaagaaggacctgttcgaggagaagatcaagaagagccccctgaccatctgctaccccgagtacgccggcagcaacacctacgaggaggccgccgcctacatccagtgccagttcgaggacctgaacaagagaaaggacaccaaggagatctacacccacttcacctgcgccaccgacaccaagaacgtgcagttcgtgttcgacgccgtgaccgacgtgatcatcaagaacaacctgaaggactgcggcctgttctag

SEQ ID NO: 83850 - DNA, 72 bp, synthetic construct
  misc_feature 1..72: note = Description of Artificial Sequence: Synthetic coding sequence
  source 1..72: mol_type = other DNA
atgggctgcaccctgagcgccgaggacaaggccgccgtggagagaagcaagatgatcgacagaaacctgtag

SEQ ID NO: 83851 - DNA, 909 bp, synthetic construct
  misc_feature 1..909: note = Description of Artificial Sequence: Synthetic coding sequence
  source 1..909: mol_type = other DNA
atgaagatcatccacgaggccggctacagcgaggaggagtgcaagcagtacaaggccgtggtgtacagcaacaccatccagagcatcatcgccatcatcagagccatgggcagactgaagatcgacttcggcgacagcgccagagccgacgacgccagacagctgttcgtgctggccggcgccgccgaggagggcttcatgaccgccgagctggccggcgtgatcaagagactgtggaaggacagcggcgtgcaggcctgcttcaacagaagcagagagtaccagctgaacgacagcgccgcctactacctgaacgacctggacagaatcgcccagcccaactacatccccacccagcaggacgtgctgagaaccagagtgaagaccaccggcatcgtggagacccacttcaccttcaaggacctgcacttcaagatgttcgacgtgggcggccagagaagcgagagaaagaagtggatccactgcttcgagggcgtgaccgccatcatcttctgcgtggccctgagcgactacgacctggtgctggccgaggacgaggagatgaacagaatgcacgagagcatgaagctgttcgacagcatctgcaacaacaagtggttcaccgacaccagcatcatcctgttcctgaacaagaaggacctgttcgaggagaagatcaagaagagccccctgaccatctgctaccccgagtacgccggcagcaacacctacgaggaggccgccgcctacatccagtgccagttcgaggacctgaacaagagaaaggacaccaaggagatctacacccacttcacctgcgccaccgacaccaagaacgtgcagttcgtgttcgacgccgtgaccgacgtgatcatcaagaacaacctgaaggactgcggcctgttctag

SEQ ID NO: 83852 - DNA, 1020 bp, synthetic construct
  misc_feature 1..1020: note = Description of Artificial Sequence: Synthetic coding sequence
  source 1..1020: mol_type = other DNA
atggagtacgccggccacctgcccgccagcagcgcccagggcaccatcctggcctgcaccagctgcaccggcgccggcgagagcggcaagagcaccatcgtgaagcagatgaagatcatccacgaggacggctacagcgaggaggagtgcagacagtacagagccgtggtgtacagcaacaccatccagagcatcatggccatcgtgaaggccatgggcaacctgcagatcgacttcgccgaccccagcagagccgacgacgccagacagctgttcgccctgagctgcaccgccgaggagcagggcgtgctgcccgacgacctgagcggcgtgatcagaagactgtgggccgaccacggcgtgcaggcctgcttcggcagaagcagagagtaccagctgaacgacagcgccgcctactacctgaacgacctggagagaatcgcccagagcgactacatccccacccagcaggacgtgctgagaaccagagtgaagaccaccggcatcgtggagacccacttcaccttcaaggacctgcacttcaagatgttcgacgtgggcggccagagaagcgagagaaagaagtggatccactgcttcgagggcgtgaccgccatcatcttctgcgtggccctgagcgcctacgacctggtgctggccgaggacgaggagatgaacagaatgcacgagagcatgaagctgttcgacagcatctgcaacaacaagtggttcaccgacaccagcatcatcctgttcctgaacaagaaggacctgttcgaggagaagatcacccacagccccctgaccatctgcttccccgagtacaccggcgccaacaagtacgacgaggccgccagctacatccagagcaagttcgaggacctgaacaagagaaaggacaccaaggagatctacacccacttcacctgcgccaccgacaccaagaacgtgcagttcgtgttcgacgccgtgaccgacgtgatcatcaagaacaacctgaaggactgcggcctgttctag

SEQ ID NO: 83853 - DNA, 1068 bp, synthetic construct
  misc_feature 1..1068: note = Description of Artificial Sequence: Synthetic coding sequence
  source 1..1068: mol_type = other DNA
atgggctgcaccgtgagcgccgaggacaaggccgccgccgagagaagcaagatgatcgacaagaacctgagagaggacggcgagaaggccgccagagaggtgaagctgctgctgctgggcgccggcgagagcggcaagagcaccatcgtgaagcagatgaagatcatccacgaggacggctacagcgaggaggagtgcagacagtacagagccgtggtgtacagcaacaccatccagagcatcatggccatcgtgaaggccatgggcaacctgcagatcgacttcgccgaccccagcagagccgacgacgccagacagctgttcgccctgagctgcaccgccgaggagcagggcgtgctgcccgacgacctgagcggcgtgatcagaagactgtgggccgaccacggcgtgcaggcctgcttcggcagaagcagagagtaccagctgaacgacagcgccgcctactacctgaacgacctggagagaatcgcccagagcgactacatccccacccagcaggacgtgctgagaaccagagtgaagaccaccggcatcgtggagacccacttcaccttcaaggacctgcacttcaagatgttcgacgtgggcggccagagaagcgagagaaagaagtggatccactgcttcgagggcgtgaccgccatcatcttctgcgtggccctgagcgcctacgacctggtgctggccgaggacgaggagatgaacagaatgcacgagagcatgaagctgttcgacagcatctgcaacaacaagtggttcaccgacaccagcatcatcctgttcctgaacaagaaggacctgttcgaggagaagatcacccacagccccctgaccatctgcttccccgagtacaccggcgccaacaagtacgacgaggccgccagctacatccagagcaagttcgaggacctgaacaagagaaaggacaccaaggagatctacacccacttcacctgcgccaccgacaccaagaacgtgcagttcgtgttcgacgccgtgaccgacgtgatcatcaagaacaacctgaaggactgcggcctgttctag

SEQ ID NO: 83854 - DNA, 1020 bp, synthetic construct
  misc_feature 1..1020: note = Description of Artificial Sequence: Synthetic coding sequence
  source 1..1020: mol_type = other DNA
atgaccgagggcgtgaagaccctgggctggaccaagcagaagggcggctgccactggggcagaagcgagggcgccggcgagagcggcaagagcaccatcgtgaagcagatgaagatcatccacgaggacggctacagcgaggaggagtgcagacagtacagagccgtggtgtacagcaacaccatccagagcatcatggccatcgtgaaggccatgggcaacctgcagatcgacttcgccgaccccagcagagccgacgacgccagacagctgttcgccctgagctgcaccgccgaggagcagggcgtgctgcccgacgacctgagcggcgtgatcagaagactgtgggccgaccacggcgtgcaggcctgcttcggcagaagcagagagtaccagctgaacgacagcgccgcctactacctgaacgacctggagagaatcgcccagagcgactacatccccacccagcaggacgtgctgagaaccagagtgaagaccaccggcatcgtggagacccacttcaccttcaaggacctgcacttcaagatgttcgacgtgggcggccagagaagcgagagaaagaagtggatccactgcttcgagggcgtgaccgccatcatcttctgcgtggccctgagcgcctacgacctggtgctggccgaggacgaggagatgaacagaatgcacgagagcatgaagctgttcgacagcatctgcaacaacaagtggttcaccgacaccagcatcatcctgttcctgaacaagaaggacctgttcgaggagaagatcacccacagccccctgaccatctgcttccccgagtacaccggcgccaacaagtacgacgaggccgccagctacatccagagcaagttcgaggacctgaacaagagaaaggacaccaaggagatctacacccacttcacctgcgccaccgacaccaagaacgtgcagttcgtgttcgacgccgtgaccgacgtgatcatcaagaacaacctgaaggactgcggcctgttctag

SEQ ID NO: 83855 - DNA, 912 bp, synthetic construct
  misc_feature 1..912: note = Description of Artificial Sequence: Synthetic coding sequence
  source 1..912: mol_type = other DNA
atgaagatcatccacgaggacggctacagcgaggaggagtgcagacagtacagagccgtggtgtacagcaacaccatccagagcatcatggccatcgtgaaggccatgggcaacctgcagatcgacttcgccgaccccagcagagccgacgacgccagacagctgttcgccctgagctgcaccgccgaggagcagggcgtgctgcccgacgacctgagcggcgtgatcagaagactgtgggccgaccacggcgtgcaggcctgcttcggcagaagcagagagtaccagctgaacgacagcgccgcctactacctgaacgacctggagagaatcgcccagagcgactacatccccacccagcaggacgtgctgagaaccagagtgaagaccaccggcatcgtggagacccacttcaccttcaaggacctgcacttcaagatgttcgacgtgggcggccagagaagcgagagaaagaagtggatccactgcttcgagggcgtgaccgccatcatcttctgcgtggccctgagcgcctacgacctggtgctggccgaggacgaggagatgaacagaatgcacgagagcatgaagctgttcgacagcatctgcaacaacaagtggttcaccgacaccagcatcatcctgttcctgaacaagaaggacctgttcgaggagaagatcacccacagccccctgaccatctgcttccccgagtacaccggcgccaacaagtacgacgaggccgccagctacatccagagcaagttcgaggacctgaacaagagaaaggacaccaaggagatctacacccacttcacctgcgccaccgacaccaagaacgtgcagttcgtgttcgacgccgtgaccgacgtgatcatcaagaacaacctgaaggactgcggcctgttctag

SEQ ID NO: 83856 - DNA, 957 bp, synthetic construct
  misc_feature 1..957: note = Description of Artificial Sequence: Synthetic coding sequence
  source 1..957: mol_type = other DNA
atgagaggcgccggcgagagcggcaagagcaccatcgtgaagcagatgaagatcatccacgaggacggctacagcgaggaggagtgcagacagtacagagccgtggtgtacagcaacaccatccagagcatcatggccatcgtgaaggccatgggcaacctgcagatcgacttcgccgaccccagcagagccgacgacgccagacagctgttcgccctgagctgcaccgccgaggagcagggcgtgctgcccgacgacctgagcggcgtgatcagaagactgtgggccgaccacggcgtgcaggcctgcttcggcagaagcagagagtaccagctgaacgacagcgccgcctactacctgaacgacctggagagaatcgcccagagcgactacatccccacccagcaggacgtgctgagaaccagagtgaagaccaccggcatcgtggagacccacttcaccttcaaggacctgcacttcaagatgttcgacgtgggcggccagagaagcgagagaaagaagtggatccactgcttcgagggcgtgaccgccatcatcttctgcgtggccctgagcgcctacgacctggtgctggccgaggacgaggagatgaacagaatgcacgagagcatgaagctgttcgacagcatctgcaacaacaagtggttcaccgacaccagcatcatcctgttcctgaacaagaaggacctgttcgaggagaagatcacccacagccccctgaccatctgcttccccgagtacaccggcgccaacaagtacgacgaggccgccagctacatccagagcaagttcgaggacctgaacaagagaaaggacaccaaggagatctacacccacttcacctgcgccaccgacaccaagaacgtgcagttcgtgttcgacgccgtgaccgacgtgatcatcaagaacaacctgaaggactgcggcctgttctag

SEQ ID NO: 83857 - DNA, 825 bp, synthetic construct
  misc_feature 1..825: note = Description of Artificial Sequence: Synthetic coding sequence
  source 1..825: mol_type = other DNA
atggccatcgtgaaggccatgggcaacctgcagatcgacttcgccgaccccagcagagccgacgacgccagacagctgttcgccctgagctgcaccgccgaggagcagggcgtgctgcccgacgacctgagcggcgtgatcagaagactgtgggccgaccacggcgtgcaggcctgcttcggcagaagcagagagtaccagctgaacgacagcgccgcctactacctgaacgacctggagagaatcgcccagagcgactacatccccacccagcaggacgtgctgagaaccagagtgaagaccaccggcatcgtggagacccacttcaccttcaaggacctgcacttcaagatgttcgacgtgggcggccagagaagcgagagaaagaagtggatccactgcttcgagggcgtgaccgccatcatcttctgcgtggccctgagcgcctacgacctggtgctggccgaggacgaggagatgaacagaatgcacgagagcatgaagctgttcgacagcatctgcaacaacaagtggttcaccgacaccagcatcatcctgttcctgaacaagaaggacctgttcgaggagaagatcacccacagccccctgaccatctgcttccccgagtacaccggcgccaacaagtacgacgaggccgccagctacatccagagcaagttcgaggacctgaacaagagaaaggacaccaaggagatctacacccacttcacctgcgccaccgacaccaagaacgtgcagttcgtgttcgacgccgtgaccgacgtgatcatcaagaacaacctgaaggactgcggcctgttctag

SEQ ID NO: 83858 - DNA, 1086 bp, synthetic construct
  misc_feature 1..1086: note = Description of Artificial Sequence: Synthetic coding sequence
  source 1..1086: mol_type = other DNA
atgggctgcaccgtgagcgccgaggacaaggccgccgccgagagaagcaagatgatcgacaagaacctgagagaggacggcgagaaggccgccagagaggtgaagctgctgctgctgggcgccggcgagagcggcaagagcaccatcgtgaagcagatgaagatcatccacgaggacggctacagcgaggaggagtgcagacagtacagagccgtggtgtacagcaacaccatccagagcatcatggccatcgtgaaggccatgggcaacctgcagatcgacttcgccgaccccagcagagccgacgacgccagacagctgttcgccctgagctgcaccgccgaggagcagggcgtgctgcccgacgacctgagcggcgtgatcagaagactgtgggccgaccacggcgtgcaggcctgcttcggcagaagcagagagtaccagctgaacgacagcgccgcctactacctgaacgacctggagagaatcgcccagagcgactacatccccacccagcaggacgtgctgagaaccagagtgaagaccaccggcatcgtggagacccacttcaccttcaaggacctgcacttcaagatgttcgacgtgggcggccagagaagcgagagaaagaagtggatccactgcttcgagggcgtgaccgccatcatcttctgcgtggccctgagcgcctacgacctggtgctggccgaggacgaggagatgaacagaatgcacgagagcatgaagctgttcgacagcatctgcaacaacaagtggttcaccgacaccagcatcatcctgttcctgaacaagaaggacctgttcgaggagaagatcacccacagccccctgaccatctgcttccccgagtacaccggcgccaacaagtacgacgaggccgccagctacatccagagcaagttcgaggacctgaacaagagaaaggacaccaaggagatctacacccacttcacctgcgccaccgacaccaagagcagaaagctgttcagagagaactacctgaagctgagcgaccccgaccagcagcccccccccgcccccctgcccagcgacagcgtgccctag

SEQ ID NO: 83859 - DNA, 1065 bp, synthetic construct
  misc_feature 1..1065: note = Description of Artificial Sequence: Synthetic coding sequence
  source 1..1065: mol_type = other DNA
atgggctgcaccctgagcgccgaggacaaggccgccgtggagagaagcaagatgatcgacagaaacctgagagaggacggcgagaaggccgccaaggaggtgaagctgctgctgctgggcgccggcgagagcggcaagagcaccatcgtgaagcagatgaagatcatccacgaggacggctacagcgaggacgagtgcaagcagtacaaggtggtggtgtacagcaacaccatccagagcatcatcgccatcatcagagccatgggcagactgaagatcgacttcggcgaggccgccagagccgacgacgccagacagctgttcgtgctggccggcagcgccgaggagggcgtgatgacccccgagctggccggcgtgatcaagagactgtggagagacggcggcgtgcaggcctgcttcagcagaagcagagagtaccagctgaacgacagcgccagctactacctgaacgacctggacagaatcagccagagcaactacatccccacccagcaggacgtgctgagaaccagagtgaagaccaccggcatcgtggagacccacttcaccttcaaggacctgtacttcaagatgttcgacgtgggcggccagagaagcgagagaaagaagtggatccactgcttcgagggcgtgaccgccatcatcttctgcgtggccctgagcgactacgacctggtgctggccgaggacgaggagatgaacagaatgcacgagagcatgaagctgttcgacagcatctgcaacaacaagtggttcaccgagaccagcatcatcctgttcctgaacaagaaggacctgttcgaggagaagatcaagagaagccccctgaccatctgctaccccgagtacaccggcagcaacacctacgaggaggccgccgcctacatccagtgccagttcgaggacctgaacagaagaaaggacaccaaggagatctacacccacttcacctgcgccaccgacaccaagaacgtgcagttcgtgttcgacgccgtgaccgacgtgatcatcaagaacaacctgaaggagtgcggcctgtactag

SEQ ID NO: 83860 - DNA, 2652 bp, synthetic construct
  misc_feature 1..2652: note = Description of Artificial Sequence: Synthetic coding sequence
  source 1..2652: mol_type = other DNA
atggccgagaacagcgtgctgaccagcaccaccggcagaaccagcctggccgacagcagcatcttcgacagcaaggtgaccgagatcagcaaggagaacctgctgatcggcagcaccagctacgtggaggaggagatgccccagatcgagaccagagtgatcctggtgcaggaggccggcaagcaggaggagctgatcaaggccctgaaggacatcaaggtgggcttcgtgaagatggagagcgtggaggagttcgagggcctggacagccccgagttcgagaacgtgttcgtggtgaccgacttccaggacagcgtgttcaacgacctgtacaaggccgactgcagagtgatcggcccccccgtggtgctgaactgcagccagaagggcgagcccctgcccttcagctgcagacccctgtactgcaccagcatgatgaacctggtgctgtgcttcaccggcttcagaaagaaggaggagctggtgagactggtgaccctggtgcaccacatgggcggcgtgatcagaaaggacttcaacagcaaggtgacccacctggtggccaactgcacccagggcgagaagttcagagtggccgtgagcctgggcacccccatcatgaagcccgagtggatctacaaggcctgggagagaagaaacgagcaggacttctacgccgccgtggacgacttcagaaacgagttcaaggtgccccccttccaggactgcatcctgagcttcctgggcttcagcgacgaggagaagaccaacatggaggagatgaccgagatgcagggcggcaagtacctgcccctgggcgacgagagatgcacccacctggtggtggaggagaacatcgtgaaggacctgcccttcgagcccagcaagaagctgtacgtggtgaagcaggagtggttctggggcagcatccagatggacgccagagccggcgagaccatgtacctgtacgagaaggccaacacccccgagctgaagaagagcgtgagcatgctgagcctgaacacccccaacagcaacagaaagagaagaagactgaaggagaccctggcccagctgagcagagagaccgacgtgagccccttcccccccagaaagagacccagcgccgagcacagcctgagcatcggcagcctgctggacatcagcaacacccccgagagcagcatcaactacggcgacacccccaagagctgcaccaagagcagcaagagcagcacccccgtgcccagcaagcagagcgccagatggcaggtggccaaggagctgtaccagaccgagagcaactacgtgaacatcctggccaccatcatccagctgttccaggtgcccctggaggaggagggccagagaggcggccccatcctggcccccgaggagatcaagaccatcttcggcagcatccccgacatcttcgacgtgcacaccaagatcaaggacgacctggaggacctgatcgtgaactgggacgagagcaagagcatcggcgacatcttcctgaagtacagcaaggacctggtgaagacctacccccccttcgtgaacttcttcgagatgagcaaggagaccatcatcaagtgcgagaagcagaagcccagattccacgccttcctgaagatcaaccaggccaagcccgagtgcggcagacagagcctggtggagctgctgatcagacccgtgcagagactgcccagcgtggccctgctgctgaacgacctgaagaagcacaccgccgacgagaaccccgacaagagcaccctggagaaggccatcggcagcctgaaggaggtgatgacccacatcaacgaggacaagagaaagaccgaggcccagaagcagatcttcgacgtggtgtacgaggtggacggctgccccgccaacctgctgagcagccacagaagcctggtgcagagagtggagaccatcagcctgggcgagcacccctgcgacagaggcgagcaggtgaccctgttcctgttcaacgactgcctggagatcgccagaaagagacacaaggtgatcggcaccttcagaagcccccacggccagaccagaccccccgccagcctgaagcacatccacctgatgcccctgagccagatcaagaaggtgctggacatcagagagaccgaggactgccacaacgccttcgccctgctggtgagaccccccaccgagcaggccaacgtgctgctgagcttccagatgaccagcgacgagctgcccaaggagaactggctgaagatgctgtgcagacacgtggccaacaccatctgcaaggccgacgccgagaacctgatctacaccgccgaccccgagagcttcgaggtgaacaccaaggacatggacagcaccctgagcagagccagcagagccatcaagaagaccagcaagaaggtgaccagagccttcagcttcagcaagacccccaagagagccctgagaagagccctgatgaccagccacggcagcgtggagggcagaagccccagcagcaacgacaagcacgtgatgagcagactgagcagcaccagcagcctggccggcatccccagccccagcctggtgagcctgcccagcttcttcgagagaagaagccacaccctgagcagaagcaccacccacctgatctag

SEQ ID NO: 83861 - DNA, 1053 bp, synthetic construct
  misc_feature 1..1053: note = Description of Artificial Sequence: Synthetic coding sequence
  source 1..1053: mol_type = other DNA
atgggcgccggcgccagcgccgaggagaagcacagcagagagctggagaagaagctgaaggaggacgccgagaaggacgccagaaccgtgaagctgctgctgctgggcgccggcgagagcggcaagagcaccatcgtgaagcagatgaagatcatccaccaggacggctacagcctggaggagtgcctggagttcatcgccatcatctacggcaacaccctgcagagcatcctggccatcgtgagagccatgaccaccctgaacatccagtacggcgacagcgccagacaggacgacgccagaaagctgatgcacatggccgacaccatcgaggagggcaccatgcccaaggagatgagcgacatcatccagagactgtggaaggacagcggcatccaggcctgcttcgagagagccagcgagtaccagctgaacgacagcgccggctactacctgagcgacctggagagactggtgacccccggctacgtgcccaccgagcaggacgtgctgagaagcagagtgaagaccaccggcatcatcgagacccagttcagcttcaaggacctgaacttcagaatgttcgacgtgggcggccagagaagcgagagaaagaagtggatccactgcttcgagggcgtgacctgcatcatcttcatcgccgccctgagcgcctacgacatggtgctggtggaggacgacgaggtgaacagaatgcacgagagcctgcacctgttcaacagcatctgcaaccacagatacttcgccaccaccagcatcgtgctgttcctgaacaagaaggacgtgttcttcgagaagatcaagaaggcccacctgagcatctgcttccccgactacgacggccccaacacctacgaggacgccggcaactacatcaaggtgcagttcctggagctgaacatgagaagagacgtgaaggagatctacagccacatgacctgcgccaccgacacccagaacgtgaagttcgtgttcgacgccgtgaccgacatcatcatcaaggagaacctgaaggactgcggcctgttctag

SEQ ID NO: 83862 - DNA, 1065 bp, synthetic construct
  misc_feature 1..1065: note = Description of Artificial Sequence: Synthetic coding sequence
  source 1..1065: mol_type = other DNA
atgggcagcggcgccagcgccgaggacaaggagctggccaagagaagcaaggagctggagaagaagctgcaggaggacgccgacaaggaggccaagaccgtgaagctgctgctgctgggcgccggcgagagcggcaagagcaccatcgtgaagcagatgaagatcatccaccaggacggctacagccccgaggagtgcctggagttcaaggccatcatctacggcaacgtgctgcagagcatcctggccatcatcagagccatgaccaccctgggcatcgactacgccgagcccagctgcgccgacgacggcagacagctgaacaacctggccgacagcatcgaggagggcaccatgccccccgagctggtggaggtgatcagaagactgtggaaggacggcggcgtgcaggcctgcttcgagagagccgccgagtaccagctgaacgacagcgccagctactacctgaaccagctggagagaatcaccgaccccgagtacctgcccagcgagcaggacgtgctgagaagcagagtgaagaccaccggcatcatcgagaccaagttcagcgtgaaggacctgaacttcagaatgttcgacgtgggcggccagagaagcgagagaaagaagtggatccactgcttcgagggcgtgacctgcatcatcttctgcgccgccctgagcgcctacgacatggtgctggtggaggacgacgaggtgaacagaatgcacgagagcctgcacctgttcaacagcatctgcaaccacaagttcttcgccgccaccagcatcgtgctgttcctgaacaagaaggacctgttcgaggagaagatcaagaaggtgcacctgagcatctgcttccccgagtacgacggcaacaacagctacgacgacgccggcaactacatcaagagccagttcctggacctgaacatgagaaaggacgtgaaggagatctacagccacatgacctgcgccaccgacacccagaacgtgaagttcgtgttcgacgccgtgaccgacatcatcatcaaggagaacctgaaggactgcggcctgttctag

SEQ ID NO: 83863 - DNA, 1068 bp, synthetic construct
  misc_feature 1..1068: note = Description of Artificial Sequence: Synthetic coding sequence
  source 1..1068: mol_type = other DNA
atgggctgcagacagagcagcgaggagaaggaggccgccagaagaagcagaagaatcgacagacacctgagaagcgagagccagagacagagaagagagatcaagctgctgctgctgggcaccagcaacagcggcaagagcaccatcgtgaagcagatgaagatcatccacagcggcggcttcaacctggaggcctgcaaggagtacaagcccctgatcatctacaacgccatcgacagcctgaccagaatcatcagagccctggccgccctgagaatcgacttccacaaccccgacagagcctacgacgccgtgcagctgttcgccctgaccggccccgccgagagcaagggcgagatcacccccgagctgctgggcgtgatgagaagactgtgggccgaccccggcgcccaggcctgcttcagcagaagcagcgagtaccacctggaggacaacgccgcctactacctgaacgacctggagagaatcgccgccgccgactacatccccaccgtggaggacatcctgagaagcagagacatgaccaccggcatcgtggagaacaagttcaccttcaaggagctgaccttcaagatggtggacgtgggcggccagagaagcgagagaaagaagtggatccactgcttcgagggcgtgaccgccatcatcttctgcgtggagctgagcggctacgacctgaagctgtacgaggacaaccagaccagcagaatggccgagagcctgagactgttcgacagcatctgcaacaacaactggttcatcaacaccagcctgatcctgttcctgaacaagaaggacctgctggccgagaagatcagaagaatccccctgaccatctgcttccccgagtacaagggccagaacacctacgaggaggccgccgtgtacatccagagacagttcgaggacctgaacagaaacaaggagaccaaggagatctacagccacttcacctgcgccaccgacaccagcaacatccagttcgtgttcgacgccgtgaccgacgtgatcatccagaacaacctgaagtacatcggcctgtgctag

SEQ ID NO: 83864 - DNA, 912 bp, synthetic construct
  misc_feature 1..912: note = Description of Artificial Sequence: Synthetic coding sequence
  source 1..912: mol_type = other DNA
atgaagatcatccacagcggcggcttcaacctggaggcctgcaaggagtacaagcccctgatcatctacaacgccatcgacagcctgaccagaatcatcagagccctggccgccctgagaatcgacttccacaaccccgacagagcctacgacgccgtgcagctgttcgccctgaccggccccgccgagagcaagggcgagatcacccccgagctgctgggcgtgatgagaagactgtgggccgaccccggcgcccaggcctgcttcagcagaagcagcgagtaccacctggaggacaacgccgcctactacctgaacgacctggagagaatcgccgccgccgactacatccccaccgtggaggacatcctgagaagcagagacatgaccaccggcatcgtggagaacaagttcaccttcaaggagctgaccttcaagatggtggacgtgggcggccagagaagcgagagaaagaagtggatccactgcttcgagggcgtgaccgccatcatcttctgcgtggagctgagcggctacgacctgaagctgtacgaggacaaccagaccagcagaatggccgagagcctgagactgttcgacagcatctgcaacaacaactggttcatcaacaccagcctgatcctgttcctgaacaagaaggacctgctggccgagaagatcagaagaatccccctgaccatctgcttccccgagtacaagggccagaacacctacgaggaggccgccgtgtacatccagagacagttcgaggacctgaacagaaacaaggagaccaaggagatctacagccacttcacctgcgccaccgacaccagcaacatccagttcgtgttcgacgccgtgaccgacgtgatcatccagaacaacctgaagtacatcggcctgtgctag

SEQ ID NO: 83865 - DNA, 1188 bp, synthetic construct
  misc_feature 1..1188: note = Description of Artificial Sequence: Synthetic coding sequence
  source 1..1188: mol_type = other DNA
atgtgcgaccagaccttcctggtgaacgtgttcggcagctgcgacaagtgcttcaagcagagagccctgagacccgtgttcaagaagagccagcagctgagctactgcagcacctgcgccgagatcatggccaccgagggcctgcacgagaacgagaccctggccagcctgaagagcgaggccgagagcctgaagggcaagctggaggaggagagagccaagctgcacgacgtggagctgcaccaggtggccgagagagtggaggccctgggccagttcgtgatgaagaccagaagaaccctgaagggccacggcaacaaggtgctgtgcatggactggtgcaaggacaagagaagaatcgtgagcagcagccaggacggcaaggtgatcgtgtgggacagcttcaccaccaacaaggagcacgccgtgaccatgccctgcacctgggtgatggcctgcgcctacgcccccagcggctgcgccatcgcctgcggcggcctggacaacaagtgcagcgtgtaccccctgaccttcgacaagaacgagaacatggccgccaagaagaagagcgtggccatgcacaccaactacctgagcgcctgcagcttcaccaacagcgacatgcagatcctgaccgccagcggcgacggcacctgcgccctgtgggacgtggagagcggccagctgctgcagagcttccacggccacggcgccgacgtgctgtgcctggacctggcccccagcgagaccggcaacaccttcgtgagcggcggctgcgacaagaaggccatggtgtgggacatgagaagcggccagtgcgtgcaggccttcgagacccacgagagcgacatcaacagcgtgagatactaccccagcggcgacgccttcgccagcggcagcgacgacgccacctgcagactgtacgacctgagagccgacagagaggtggccatctacagcaaggagagcatcatcttcggcgccagcagcgtggacttcagcctgagcggcagactgctgttcgccggctacaacgactacaccatcaacgtgtgggacgtgctgaagggcagcagagtgagcatcctgttcggccacgagaacagagtgagcaccctgagagtgagccccgacggcaccgccttctgcagcggcagctgggaccacaccctgagagtgtgggcctag

SEQ ID NO: 83866 - DNA, 1062 bp, synthetic construct
  misc_feature 1..1062: note = Description of Artificial Sequence: Synthetic coding sequence
  source 1..1062: mol_type = other DNA
atggccaccgagggcctgcacgagaacgagaccctggccagcctgaagagcgaggccgagagcctgaagggcaagctggaggaggagagagccaagctgcacgacgtggagctgcaccaggtggccgagagagtggaggccctgggccagttcgtgatgaagaccagaagaaccctgaagggccacggcaacaaggtgctgtgcatggactggtgcaaggacaagagaagaatcgtgagcagcagccaggacggcaaggtgatcgtgtgggacagcttcaccaccaacaaggagcacgccgtgaccatgccctgcacctgggtgatggcctgcgcctacgcccccagcggctgcgccatcgcctgcggcggcctggacaacaagtgcagcgtgtaccccctgaccttcgacaagaacgagaacatggccgccaagaagaagagcgtggccatgcacaccaactacctgagcgcctgcagcttcaccaacagcgacatgcagatcctgaccgccagcggcgacggcacctgcgccctgtgggacgtggagagcggccagctgctgcagagcttccacggccacggcgccgacgtgctgtgcctggacctggcccccagcgagaccggcaacaccttcgtgagcggcggctgcgacaagaaggccatggtgtgggacatgagaagcggccagtgcgtgcaggccttcgagacccacgagagcgacatcaacagcgtgagatactaccccagcggcgacgccttcgccagcggcagcgacgacgccacctgcagactgtacgacctgagagccgacagagaggtggccatctacagcaaggagagcatcatcttcggcgccagcagcgtggacttcagcctgagcggcagactgctgttcgccggctacaacgactacaccatcaacgtgtgggacgtgctgaagggcagcagagtgagcatcctgttcggccacgagaacagagtgagcaccctgagagtgagccccgacggcaccgccttctgcagcggcagctgggaccacaccctgagagtgtgggcctag

SEQ ID NO: 83867 - DNA, 852 bp, synthetic construct
  misc_feature 1..852: note = Description of Artificial Sequence: Synthetic coding sequence
  source 1..852: mol_type = other DNA
atggccaccgagggcctgcacgagaacgagaccctggccagcctgaagagcgaggccgagagcctgaagggcaagctggaggaggagagagccaagctgcacgacgtggagctgcaccaggtggccgagagagtggaggccctgggccagttcgtgatgaagaccagaagaaccctgaagggccacggcaacaaggtgctgtgcatggactggtgcaaggacaagagaagaatcgtgagcagcagccaggacggcaaggtgatcgtgtgggacagcttcaccaccaacaagatcctgaccgccagcggcgacggcacctgcgccctgtgggacgtggagagcggccagctgctgcagagcttccacggccacggcgccgacgtgctgtgcctggacctggcccccagcgagaccggcaacaccttcgtgagcggcggctgcgacaagaaggccatggtgtgggacatgagaagcggccagtgcgtgcaggccttcgagacccacgagagcgacatcaacagcgtgagatactaccccagcggcgacgccttcgccagcggcagcgacgacgccacctgcagactgtacgacctgagagccgacagagaggtggccatctacagcaaggagagcatcatcttcggcgccagcagcgtggacttcagcctgagcggcagactgctgttcgccggctacaacgactacaccatcaacgtgtgggacgtgctgaagggcagcagagtgagcatcctgttcggccacgagaacagagtgagcaccctgagagtgagccccgacggcaccgccttctgcagcggcagctgggaccacaccctgagagtgtgggcctag

SEQ ID NO: 83868 - DNA, 582 bp, synthetic construct
  misc_feature 1..582: note = Description of Artificial Sequence: Synthetic coding sequence
  source 1..582: mol_type = other DNA
atgagcaagctgctgatcctgatcctgaccgccagcggcgacggcacctgcgccctgtgggacgtggagagcggccagctgctgcagagcttccacggccacggcgccgacgtgctgtgcctggacctggcccccagcgagaccggcaacaccttcgtgagcggcggctgcgacaagaaggccatggtgtgggacatgagaagcggccagtgcgtgcaggccttcgagacccacgagagcgacatcaacagcgtgagatactaccccagcggcgacgccttcgccagcggcagcgacgacgccacctgcagactgtacgacctgagagccgacagagaggtggccatctacagcaaggagagcatcatcttcggcgccagcagcgtggacttcagcctgagcggcagactgctgttcgccggctacaacgactacaccatcaacgtgtgggacgtgctgaagggcagcagagtgagcatcctgttcggccacgagaacagagtgagcaccctgagagtgagccccgacggcaccgccttctgcagcggcagctgggaccacaccctgagagtgtgggcctag

SEQ ID NO: 83869 - DNA, 1023 bp, synthetic construct
  misc_feature 1..1023: note = Description of Artificial Sequence: Synthetic coding sequence
  source 1..1023: mol_type = other DNA
atgagcgagctggaccagctgagacaggaggccgagcagctgaagaaccagatcagagacgccagaaaggcctgcgccgacgccaccctgagccagatcaccaacaacatcgaccccgtgggcagaatccagatgagaaccagaagaaccctgagaggccacctggccaagatctacgccatgcactggggcaccgacagcagactgctggtgagcgccagccaggacggcaagctgatcatctgggacagctacaccaccaacaaggtgcacgccatccccctgagaagcagctgggtgatgacctgcgcctacgcccccagcggcaactacgtggcctgcggcggcctggacaacatctgcagcatctacaacctgaagaccagagagggcaacgtgagagtgagcagagagctggccggccacaccggctacctgagctgctgcagattcctggacgacaaccagatcgtgaccagcagcggcgacaccacctgcgccctgtgggacatcgagaccggccagcagaccaccaccttcaccggccacaccggcgacgtgatgagcctgagcctggcccccgacaccagactgttcgtgagcggcgcctgcgacgccagcgccaagctgtgggacgtgagagagggcatgtgcagacagaccttcaccggccacgagagcgacatcaacgccatctgcttcttccccaacggcaacgccttcgccaccggcagcgacgacgccacctgcagactgttcgacctgagagccgaccaggagctgatgacctacagccacgacaacatcatctgcggcatcaccagcgtgagcttcagcaagagcggcagactgctgctggccggctacgacgacttcaactgcaacgtgtgggacgccctgaaggccgacagagccggcgtgctggccggccacgacaacagagtgagctgcctgggcgtgaccgacgacggcatggccgtggccaccggcagctgggacagcttcctgaagatctggaactag

SEQ ID NO: 83870 - DNA, 1023 bp, synthetic construct; identical to SEQ ID NO: 83869
  misc_feature 1..1023: note = Description of Artificial Sequence: Synthetic coding sequence
  source 1..1023: mol_type = other DNA

SEQ ID NO: 83871 - DNA, 597 bp, synthetic construct
  misc_feature 1..597: note = Description of Artificial Sequence: Synthetic coding sequence
  source 1..597: mol_type = other DNA
tgaggctacctgagctgctgcagattcctggacgacaaccagatcgtgaccagcagcggcgacaccacctgcgccctgtgggacatcgagaccggccagcagaccaccaccttcaccggccacaccggcgacgtgatgagcctgagcctggcccccgacaccagactgttcgtgagcggcgcctgcgacgccagcgccaagctgtgggacgtgagagagggcatgtgcagacagaccttcaccggccacgagagcgacatcaacgccatctgcttcttccccaacggcaacgccttcgccaccggcagcgacgacgccacctgcagactgttcgacctgagagccgaccaggagctgatgacctacagccacgacaacatcatctgcggcatcaccagcgtgagcttcagcaagagcggcagactgctgctggccggctacgacgacttcaactgcaacgtgtgggacgccctgaaggccgacagagccggcgtgctggccggccacgacaacagagtgagctgcctgggcgtgaccgacgacggcatggccgtggccaccggcagctgggacagcttcctgaagatctggaactag

SEQ ID NO: 83872 - DNA, 444 bp, synthetic construct
  misc_feature 1..444: note = Description of Artificial Sequence: Synthetic coding sequence
  source 1..444: mol_type = other DNA
atgagcgagctggaccagctgagacaggaggccgagcagctgaagaaccagatcagagacgccagaaaggcctgcgccgacgccaccctgagccagatcaccaacaacatcgaccccgtgggcagaatccagatgagaaccagaagaaccctgagaggccacctggccaagatctacgccatgcactggggcaccgacagcagactgctggtgagcgccagccaggacggcaagctgatcatctgggacagctacaccaccaacaaggtgcacgccatccccctgagaagcagctgggtgatgacctgcgcctacgcccccagcggcaactacgtggcctgcggcggcctggacaacatctgcagcatctacaacctgaagaccagagagggcaacgtgagagtgagcagagagctggccggccacaccggcacctgcccctag

SEQ ID NO: 83873 - DNA, 327 bp, synthetic construct
  misc_feature 1..327: note = Description of Artificial Sequence: Synthetic coding sequence
  source 1..327: mol_type = other DNA
atgagcgagctggaccagctgagacaggaggccgagcagctgaagaaccagatcagagacgccagaaaggcctgcgccgacgccaccctgagccagatcaccaacaacatcgaccccgtgggcagaatccagatgagaaccagaagaaccctgagaggccacctggccaagatctacgccatgcactggggcaccgacagcagactgctggtgagcgccagccaggacggcaagctgatcatctgggacagctacaccaccaacaaggtgcacgccatccccctgagaagcagctgggtgatgacctgcgcctacgcccccagctag

SEQ ID NO: 83874 - DNA, 405 bp, synthetic construct
  misc_feature 1..405: note = Description of Artificial Sequence: Synthetic coding sequence
  source 1..405: mol_type = other DNA
atgagcgagctggaccagctgagacaggaggccgagcagctgaagaaccagatcagaatcaccaacaacatcgaccccgtgggcagaatccagatgagaaccagaagaaccctgagaggccacctggccaagatctacgccatgcactggggcaccgacagcagactgctggtgagcgccagccaggacggcaagctgatcatctgggacagctacaccaccaacaaggtgcacgccatccccctgagaagcagctgggtgatgacctgcgcctacgcccccagcggcaactacgtggcctgcggcggcctggacaacatctgcagcatctacaacctgaagaccagagagggcaacgtgagagtgagcagagagctggccggccacaccggcacctgcccctag

SEQ ID NO: 83875 - DNA, 723 bp, synthetic construct
  misc_feature 1..723: note = Description of Artificial Sequence: Synthetic coding sequence
  source 1..723: mol_type = other DNA
atgacctgcgcctacgcccccagcggcaactacgtggcctgcggcggcctggacaacatctgcagcatctacaacctgaagaccagagagggcaacgtgagagtgagcagagagctggccggccacaccggctacctgagctgctgcagattcctggacgacaaccagatcgtgaccagcagcggcgacaccacctgcgccctgtgggacatcgagaccggccagcagaccaccaccttcaccggccacaccggcgacgtgatgagcctgagcctggcccccgacaccagactgttcgtgagcggcgcctgcgacgccagcgccaagctgtgggacgtgagagagggcatgtgcagacagaccttcaccggccacgagagcgacatcaacgccatctgcttcttccccaacggcaacgccttcgccaccggcagcgacgacgccacctgcagactgttcgacctgagagccgaccaggagctgatgacctacagccacgacaacatcatctgcggcatcaccagcgtgagcttcagcaagagcggcagactgctgctggccggctacgacgacttcaactgcaacgtgtgggacgccctgaaggccgacagagccggcgtgctggccggccacgacaacagagtgagctgcctgggcgtgaccgacgacggcatggccgtggccaccggcagctgggacagcttcctgaagatctggaactag

SEQ ID NO: 83876 - DNA, 984 bp, synthetic construct
  misc_feature 1..984: note = Description of Artificial Sequence: Synthetic coding sequence
  source 1..984: mol_type = other DNA
atgaccgccccctgccccccccccccccccgacccccagttcgtgctgagaggcacccagagccccgtgcacgccctgcacttctgcgagggcgcccaggcccagggcagacccctgctgttcagcggcagccagagcggcctggtgcacatctggagcctgcagaccagaagagccgtgaccaccctggacggccacggcggccagtgcgtgacctggctgcagaccctgccccagggcagacagctgctgagccagggcagagacctgaagctgtgcctgtgggacctggccgagggcagaagcgccgtggtggacagcgtgtgcctggagagcgtgggcttctgcagaagcagcatcctggccggcggccagcccagatggaccctggccgtgcccggcagaggcagcgacgaggtgcagatcctggagatgcccagcaagaccagcgtgtgcgccctgaagcccaaggccgacgccaagctgggcatgcccatgtgcctgagactgtggcaggccgactgcagcagcagacccctgctgctggccggctacgaggacggcagcgtggtgctgtgggacgtgagcgagcagaaggtgtgcagcagaatcgcctgccacgaggagcccgtgatggacctggacttcgacagccagaaggccagaggcatcagcggcagcgccggcaaggccctggccgtgtggagcctggactggcagcaggccctgcaggtgagaggcacccacgagctgaccaaccccggcatcgccgaggtgaccatcagacccgacagaaagatcctggccaccgccggctgggaccacagaatcagagtgttccactggagaaccatgcagcccctggccgtgctggccttccacagcgccgccgtgcagtgcgtggccttcaccgccgacggcctgctggccgccggcagcaaggaccagagaatcagcctgtggagcctgtaccccagagcctag

SEQ ID NO: 83877 - DNA, 984 bp, synthetic construct; identical to SEQ ID NO: 83876
  misc_feature 1..984: note = Description of Artificial Sequence: Synthetic coding sequence
  source 1..984: mol_type = other DNA

SEQ ID NO: 83878 - DNA, 639 bp, synthetic construct
  misc_feature 1..639: note = Description of Artificial Sequence: Synthetic coding sequence
  source 1..639: mol_type = other DNA
atgaccgccccctgccccccccccccccccgacccccagttcgtgctgagaggcacccagagccccgtgcacgccctgcacttctgcgagggcgcccaggcccagggcagacccctgctgttcagcggcagccagagcggcctggtgcacatctggagcctgcagaccagaagagccgtgaccaccctggacggccacggcggccagtgcgtgacctggctgcagaccctgccccagggcagacagctgctgagccagggcagagacctgaagctgtgcctgtgggacctggccgagggcagaagcgccgtggtggacagcgtgtgcctggagagcgtgggcttctgcagaagcagcatcctggccggcggccagcccagatggaccctggccgtgcccggcagaggcagcgacgaggtgcagatcctggagatgcccagcaagaccagcgtgtgcgccctgaagcccaaggccgacgccaagctgggcatgcccatgtgcctgagactgtggcaggccgactgcagcagcagacccctgctgctggccggctacgaggacggcagcgtggtgctgtgggacgtgagcgagcagaaggtgtgcagcagaatcgcctgccacgaggagcccggcctgtag

SEQ ID NO: 83879 - DNA, 1023 bp, synthetic construct
  misc_feature 1..1023: note = Description of Artificial Sequence: Synthetic coding sequence
  source 1..1023: mol_type = other DNA
atgagcgagctggagcagctgagacaggaggccgagcagctgagaaaccagatcagagacgccagaaaggcctgcggcgacagcaccctgacccagatcaccgccggcctggaccccgtgggcagaatccagatgagaaccagaagaaccctgagaggccacctggccaagatctacgccatgcactggggcaccgacagcagactgctggtgagcgccagccaggacggcaagctgatcatctgggacagctacaccaccaacaaggtgcacgccatccccctgagaagcagctgggtgatgacctgcgcctacgcccccagcggcaacttcgtggcctgcggcggcctggacaacatctgcagcatctacagcctgaagaccagagagggcaacgtgagagtgagcagagagctgcccggccacaccggctacctgagctgctgcagattcctggacgacaaccagatcatcaccagcagcggcgacaccacctgcgccctgtgggacatcgagaccggccagcagaccgtgggcttcgccggccacagcggcgacgtgatgagcctgagcctggcccccgacggcagaaccttcgtgagcggcgcctgcgacgccagcatcaagctgtgggacgtgagagacagcatgtgcagacagaccttcatcggccacgagagcgacatcaacgccgtggccttcttccccaacggctacgccttcaccaccggcagcgacgacgccacctgcagactgttcgacctgagagccgaccaggagctgctgatgtacagccacgacaacatcatctgcggcatcaccagcgtggccttcagcagaagcggcagactgctgctggccggctacgacgacttcaactgcaacatctgggacgccatgaagggcgacagagccggcgtgctggccggccacgacaacagagtgagctgcctgggcgtgaccgacgacggcatggccgtggccaccggcagctgggacagcttcctgaagatctggaactag

SEQ ID NO: 83880 - DNA, 1023 bp, synthetic construct; identical to SEQ ID NO: 83879
  misc_feature 1..1023: note = Description of Artificial Sequence: Synthetic coding sequence
  source 1..1023: mol_type = other DNA

SEQ ID NO: 83881 - DNA, 1023 bp, synthetic construct; identical to SEQ ID NO: 83879
  misc_feature 1..1023: note = Description of Artificial Sequence: Synthetic coding sequence
  source 1..1023: mol_type = other DNA

SEQ ID NO: 83882 - DNA, 459 bp, synthetic construct
  misc_feature 1..459: note = Description of Artificial Sequence: Synthetic coding sequence
  source 1..459: mol_type = other DNA
atgagcgagctggagcagctgagacaggaggccgagcagctgagaaaccagatcagagacgccagaaaggcctgcggcgacagcaccctgacccagatcaccgccggcctggaccccgtgggcagaatccagatgagaaccagaagaaccctgagaggccacctggccaagatctacgccatgcactggggcaccgacagcagactgctggtgagcgccagccaggacggcaagctgatcatctgggacagctacaccaccaacaaggtgcacgccatccccctgagaagcagctgggtgatgacctgcgcctacgcccccagcggcaacttcgtggcctgcggcggcctggacaacatctgcagcatctacagcctgaagaccagagagggcaacgtgagagtgagcagagagctgcccggccacaccggctacctgagctgctgcagattcctgtag

SEQ ID NO: 83883 - DNA, 723 bp, synthetic construct
  misc_feature 1..723: note = Description of Artificial Sequence: Synthetic coding sequence
  source 1..723: mol_type = other DNA
atgacctgcgcctacgcccccagcggcaacttcgtggcctgcggcggcctggacaacatctgcagcatctacagcctgaagaccagagagggcaacgtgagagtgagcagagagctgcccggccacaccggctacctgagctgctgcagattcctggacgacaaccagatcatcaccagcagcggcgacaccacctgcgccctgtgggacatcgagaccggccagcagaccgtgggcttcgccggccacagcggcgacgtgatgagcctgagcctggcccccgacggcagaaccttcgtgagcggcgcctgcgacgccagcatcaagctgtgggacgtgagagacagcatgtgcagacagaccttcatcggccacgagagcgacatcaacgccgtggccttcttccccaacggctacgccttcaccaccggcagcgacgacgccacctgcagactgttcgacctgagagccgaccaggagctgctgatgtacagccacgacaacatcatctgcggcatcaccagcgtggccttcagcagaagcggcagactgctgctggccggctacgacgacttcaactgcaacatctgggacgccatgaagggcgacagagccggcgtgctggccggccacgacaacagagtgagctgcctgggcgtgaccgacgacggcatggccgtggccaccggcagctgggacagcttcctgaagatctggaactag

SEQ ID NO: 83884 - DNA, 891 bp, synthetic construct
  misc_feature 1..891: note = Description of Artificial Sequence: Synthetic coding sequence
  source 1..891: mol_type = other DNA
atgagaaccagaagaaccctgagaggccacctggccaagatctacgccatgcactggggcaccgacagcagactgctggtgagcgccagccaggacggcaagctgatcatctgggacagctacaccaccaacaaggtgcacgccatccccctgagaagcagctgggtgatgacctgcgcctacgcccccagcggcaacttcgtggcctgcggcggcctggacaacatctgcagcatctacagcctgaagaccagagagggcaacgtgagagtgagcagagagctgcccggccacaccggctacctgagctgctgcagattcctggacgacaaccagatcatcaccagcagcggcgacaccacctgcgccctgtgggacatcgagaccggccagcagaccgtgggcttcgccggccacagcggcgacgtgatgagcctgagcctggcccccgacggcagaaccttcgtgagcggcgcctgcgacgccagcatcaagctgtgggacgtgagagacagcatgtgcagacagaccttcatcggccacgagagcgacatcaacgccgtggccttcttccccaacggctacgccttcaccaccggcagcgacgacgccacctgcagactgttcgacctgagagccgaccaggagctgctgatgtacagccacgacaacatcatctgcggcatcaccagcgtggccttcagcagaagcggcagactgctgctggccggctacgacgacttcaactgcaacatctgggacgccatgaagggcgacagagccggcgtgctggccggccacgacaacagagtgagctgcctgggcgtgaccgacgacggcatggccgtggccaccggcagctgggacagcttcctgaagatctggaactag

SEQ ID NO: 83885 - DNA, 723 bp, synthetic construct; identical to SEQ ID NO: 83883
  misc_feature 1..723: note = Description of Artificial Sequence: Synthetic coding sequence
  source 1..723: mol_type = other DNA

SEQ ID NO: 83886 - DNA, 699 bp, synthetic construct
  misc_feature 1..699: note = Description of Artificial Sequence: Synthetic coding sequence
  source 1..699: mol_type = other DNA
atgagcgagctggagcagctgagacaggaggccgagcagctgagaaaccagatcagagacgccagaaaggcctgcggcgacagcaccctgacccagatcaccgccggcctggaccccgtgggcagaatccagatgagaaccagaagaaccctgagaggccacctggccaagatctacgccatgcactggggcaccgacagcagactgctggtgagcgccagccaggacggcaagctgatcatctgggacagctacaccaccaacaaggtgcacgccatccccctgagaagcagctgggtgatgacctgcgcctacgcccccagcggcaacttcgtggcctgcggcggcctggacaacatctgcagcatctacagcctgaagaccagagagggcaacgtgagagtgagcagagagctgcccggccacaccggctacctgagctgctgcagattcctggacgacaaccagatcatcaccagcagcggcgacaccacctgcgccctgtgggacatcgagaccggccagcagaccgtgggcttcgccggccacagcggcgacgtgatgagcctgagcctggcccccgacggcagaaccttcgtgagcggcgcctgcgacgccagcatcaagctgtgggacgtgagagacagcatgtgcagacagaccttcatcggccacgagagcgacatcaacgccgtgtag

SEQ ID NO: 83887 - DNA, 891 bp, synthetic construct; identical to SEQ ID NO: 83884
  misc_feature 1..891: note = Description of Artificial Sequence: Synthetic coding sequence
  source 1..891: mol_type = other DNA

SEQ ID NO: 83888 - DNA, 756 bp, synthetic construct
  misc_feature 1..756: note = Description of Artificial Sequence: Synthetic coding sequence
  source 1..756: mol_type = other DNA
atgagcgagctggagcagctgagacaggaggccgagcagctgagaaaccagatcagagacgccagaaaggcctgcggcgacagcaccctgacccagatcaccgccggcctggaccccgtgggcagaatccagatgagaaccagaagaaccctgagaggccacctggccaagatctacgccatgcactggggcaccgacagcagactgctggtgagcgccagccaggacggcaagctgatcatctgggacagctacaccaccaacaaggtgcacgccatccccctgagaagcagctgggtgatgacctgcgcctacgcccccagcggcaacttcgtggcctgcggcggcctggacaacatctgcagcatctacagcctgaagaccagagagggcaacgtgagagtgagcagagagctgcccggccacaccggctacctgagctgctgcagattcctggacgacaaccagatcatcaccagcagcggcgacaccacctgcgccctgtgggacatcgagaccggccagcagaccgtgggcttcgccggccacagcggcgacgtgatgagcctgagcctggcccccgacggcagaaccttcgtgagcggcgcctgcgacgccagcatcaagctgtgggacgtgagagacagcatgtgcagacagaccttcatcggccacgagagcgacatcaacgccgtggccttcttccccaacggctacgccttcaccaccggcagcgacgacgccacctgcagatag

SEQ ID NO: 83889 - DNA, 828 bp, synthetic construct
  misc_feature 1..828: note = Description of Artificial Sequence: Synthetic coding sequence
  source 1..828: mol_type = other DNA
atgagcgccgaggtgaaggtgaccggccagaaccaggagcagttcctgctgctggccaagagcgccaagggcgccgccctggccaccctgatccaccaggtgctggaggcccccggcgtgtacgtgttcggcgagctgctggacatgcccaacgtgagagagctggccgagagcgacttcgccagcaccttcagactgctgaccgtgttcgcctacggcacctacgccgactacctggccgaggccagaaacctgccccccctgaccgaggcccagaagaacaagctgagacacctgagcgtggtgaccctggccgccaaggtgaagtgcatcccctacgccgtgctgctggaggccctggccctgagaaacgtgagacagctggaggacctggtgatcgaggccgtgtacgccgacgtgctgagaggcagcctggaccagagaaaccagagactggaggtggactacagcatcggcagagacatccagagacaggacctgagcgccatcgccagaaccctgcaggagtggtgcgtgggctgcgaggtggtgctgagcggcatcgaggagcaggtgagcagagccaaccagcacaaggagcagcagctgggcctgaagcagcagatcgagagcgaggtggccaacctgaagaagaccatcaaggtgaccaccgccgccgccgccgccgccaccagccaggaccccgagcagcacctgaccgagctgagagagcccgcccccggcaccaaccagagacagcccagcaagaaggccagcaagggcaagggcctgagaggcagcgccaagatctggagcaagagcaactag

SEQ ID NO: 83890 - DNA, 387 bp, synthetic construct
  misc_feature 1..387: note = Description of Artificial Sequence: Synthetic coding sequence
  source 1..387: mol_type = other DNA
atgaccagcctgttcgcccaggagatcagactgagcaagagacacgaggagatcgtgagccagagactgatgctgctgcagcagatggagaacaagctgggcgaccagcacaccgagaaggccagccagctgcagaccgtggagaccgccttcaagagaaacctgagcctgctgaaggacatcgaggccgccgagaagagcctgcagaccagaatccaccccctgcccagacccgaggtggtgagcctggagaccagatactgggccagcgtggaggagtacatccccaagtgggagcagttcctgctgggcagagccccctaccccttcgccgtggagaaccagaacgaggccgagaacaccatccagaacgaggcccagagatag

SEQ ID NO: 83891 - DNA, 1023 bp, synthetic construct
  misc_feature 1..1023: note = Description of Artificial Sequence: Synthetic coding sequence
  source 1..1023: mol_type = other DNA
atgagcgagctggagcagctgagacaggaggccgagcagctgagaaaccagatccaggacgccagaaaggcctgcaacgacgccaccctggtgcagatcaccagcaacatggacagcgtgggcagaatccagatgagaaccagaagaaccctgagaggccacctggccaagatctacgccatgcactggggctacgacagcagactgctggtgagcgccagccaggacggcaagctgatcatctgggacagctacaccaccaacaagatgcacgccatccccctgagaagcagctgggtgatgacctgcgcctacgcccccagcggcaactacgtggcctgcggcggcctggacaacatctgcagcatctacaacctgaagaccagagagggcaacgtgagagtgagcagagagctgcccggccacaccggctacctgagctgctgcagattcctggacgacagccagatcgtgaccagcagcggcgacaccacctgcgccctgtgggacatcgagaccgcccagcagaccaccaccttcaccggccacagcggcgacgtgatgagcctgagcctgagccccgacatgagaaccttcgtgagcggcgcctgcgacgccagcagcaagctgtgggacatcagagacggcatgtgcagacagagcttcaccggccacgtgagcgacatcaacgccgtgagcttcttccccaacggctacgccttcgccaccggcagcgacgacgccacctgcagactgttcgacctgagagccgaccaggagctgctgctgtacagccacgacaacatcatctgcggcatcaccagcgtggccttcagcaagagcggcagactgctgctggccggctacgacgacttcaactgcaacgtgtgggacaccctgaagggcgacagagccggcgtgctggccggccacgacaacagagtgagctgcctgggcgtgaccgacgacggcatggccgtggccaccggcagctgggacagcttcctgagaatctggaactag

SEQ ID NO: 83892 - DNA, 240 bp, synthetic construct
  misc_feature 1..240: note = Description of Artificial Sequence: Synthetic coding sequence
  source 1..240: mol_type = other DNA
atgagcgagctggagcagctgagacaggaggccgagcagctgagaaaccagatccaggacgccagaaaggcctgcaacgacgccaccctggtgcagatcaccagcaacatggacagcgtgggcagaatccagatgagaaccagaagaaccctgagaggccacctggccaagatctacgccatgcactggggctacgacagcagactgctggtgagcgccagccaggacggcaagctgtag

SEQ ID NO: 83893 - DNA, 204 bp, synthetic construct
  misc_feature 1..204: note = Description of Artificial Sequence: Synthetic coding sequence
  source 1..204: mol_type = other DNA
atggaggagtgggacgtgccccagatgaagaaggaggtggagagcctgaagtaccagctggccttccagagagagatggccagcaagaccatccccgagctgctgaagtggatcgaggacggcatccccaaggaccccttcctgaaccccgacctgatgaagaacaacccctgggtggagaagggcaagtgcaccatcctgtag

SEQ ID NO: 83894 - DNA, 216 bp, synthetic construct
  misc_feature 1..216: note = Description of Artificial Sequence: Synthetic coding sequence
  source 1..216: mol_type = other DNA
atggccagcaacaacaccgccagcatcgcccaggccagaaagctggtggagcagctgaagatggaggccaacatcgacagaatcaaggtgagcaaggccgccgccgacctgatggcctactgcgaggcccacgccaaggaggaccccctgctgacccccgtgcccgccagcgagaaccccttcagagagaagaagttcttctgcgccatcctgtag

SEQ ID NO: 83895 - DNA, 309 bp, synthetic construct
  misc_feature 1..309: note = Description of Artificial Sequence: Synthetic coding sequence
  source 1..309: mol_type = other DNA
atgcagggcaagctgcagccccccatggagagagaggccagagacggcgtgcccagcggcaaggtgttcctgaaggacctgagcagcacccccatggccagcaacaacaccgccagcatcgcccaggccagaaagctggtggagcagctgaagatggaggccaacatcgacagaatcaaggtgagcaaggccgccgccgacctgatggcctactgcgaggcccacgccaaggaggaccccctgctgacccccgtgcccgccagcgagaaccccttcagagagaagaagttcttctgcgccatcctgtag

SEQ ID NO: 83896 - DNA, 216 bp, synthetic construct; identical to SEQ ID NO: 83894
  misc_feature 1..216: note = Description of Artificial Sequence: Synthetic coding sequence
  source 1..216: mol_type = other DNA

SEQ ID NO: 83897 - DNA, 216 bp, synthetic construct; identical to SEQ ID NO: 83894
  misc_feature 1..216: note = Description of Artificial Sequence: Synthetic coding sequence
  source 1..216: mol_type = other DNA

SEQ ID NO: 83898 - DNA, 216 bp, synthetic construct; identical to SEQ ID NO: 83894
  misc_feature 1..216: note = Description of Artificial Sequence: Synthetic coding sequence
  source 1..216: mol_type = other DNA

SEQ ID NO: 83899 - DNA, 216 bp, synthetic construct; identical to SEQ ID NO: 83894
  misc_feature 1..216: note = Description of Artificial Sequence: Synthetic coding sequence
  source 1..216: mol_type = other DNA

SEQ ID NO: 83900 - DNA, 333 bp, synthetic construct
  misc_feature 1..333: note = Description of Artificial Sequence: Synthetic coding sequence
  source 1..333: mol_type = other DNA
atggtgtacctgcaggccaagaccagaatccccgagcacagaaaggtgacccagctgatcaagtgctggagccccgacctgaaccccgtgttcctgaaggacctgagcagcacccccatggccagcaacaacaccgccagcatcgcccaggccagaaagctggtggagcagctgaagatggaggccaacatcgacagaatcaaggtgagcaaggccgccgccgacctgatggcctactgcgaggcccacgccaaggaggaccccctgctgacccccgtgcccgccagcgagaaccccttcagagagaagaagttcttctgcgccatcctgtag

SEQ ID NO: 83901 - DNA, 207 bp, synthetic construct
  misc_feature 1..207: note = Description of Artificial Sequence: Synthetic coding sequence
  source 1..207: mol_type = other DNA
atgagcggcagcagcagcgtggccgccatgaagaaggtggtgcagcagctgagactggaggccggcctgaacagagtgaaggtgagccaggccgccgccgacctgaagcagttctgcctgcagaacgcccagcacgaccccctgctgaccggcgtgagcagcagcaccaaccccttcagaccccagaaggtgtgcagcttcctgtag

SEQ ID NO: 83902 - DNA, 207 bp, synthetic construct; identical to SEQ ID NO: 83901
  misc_feature 1..207: note = Description of Artificial Sequence: Synthetic coding sequence
  source 1..207: mol_type = other DNA

SEQ ID NO: 83903 - DNA, 225 bp, synthetic construct
  misc_feature 1..225: note = Description of Artificial Sequence: Synthetic coding sequence
  source 1..225: mol_type = other DNA
atgcccgtgatcaacatcgaggacctgaccgagaaggacaagctgaagatggaggtggaccagctgaagaaggaggtgaccctggagagaatgctggtgagcaagtgctgcgaggaggtgagagactacgtggaggagagaagcggcgaggaccccctggtgaagggcatccccgaggacaagaaccccttcaaggagctgaagggcggctgcgtgatcagctag

SEQ ID NO: 83904 - DNA, 225 bp, synthetic construct; identical to SEQ ID NO: 83903
  misc_feature 1..225: note = Description of Artificial Sequence: Synthetic coding sequence
  source 1..225: mol_type = other DNA

SEQ ID NO: 83905 - DNA, 210 bp, synthetic construct
  misc_feature 1..210: note = Description of Artificial Sequence: Synthetic coding sequence
  source 1..210: mol_type = other DNA
atggcccaggacctgagcgagaaggacctgctgaagatggaggtggagcagctgaagaaggaggtgaagaacaccagaatccccatcagcaaggccggcaaggagatcaaggagtacgtggaggcccaggccggcaacgaccccttcctgaagggcatccccgaggacaagaaccccttcaaggagaagggcggctgcctgatcagctag

SEQ ID NO: 83906 - DNA, 210 bp, synthetic construct; identical to SEQ ID NO: 83905
  misc_feature 1..210: note = Description of Artificial Sequence: Synthetic coding sequence
  source 1..210: mol_type = other DNA

SEQ ID NO: 83907 - DNA, 210 bp, synthetic construct; identical to SEQ ID NO: 83905
  misc_feature 1..210: note = Description of Artificial Sequence: Synthetic coding sequence
  source 1..210: mol_type = other DNA

SEQ ID NO: 83908 - DNA, 210 bp, synthetic construct; identical to SEQ ID NO: 83905
  misc_feature 1..210: note = Description of Artificial Sequence: Synthetic coding sequence
  source 1..210: mol_type = other DNA

SEQ ID NO: 83909 - DNA, 210 bp, synthetic construct; identical to SEQ ID NO: 83905
  misc_feature 1..210: note = Description of Artificial Sequence: Synthetic coding sequence
  source 1..210: mol_type = other DNA

SEQ ID NO: 83910 - DNA, 1080 bp, synthetic construct
  misc_feature 1..1080: note = Description of Artificial Sequence: Synthetic coding sequence
  source 1..1080: mol_type = other DNA
atgaccctggagagcatcatggcctgctgcctgagcgaggaggccaaggaggccagaagaatcaacgacgagatcgagagacagctgagaagagacaagagagacgccagaagagagctgaagctgctgctgctgggcaccggcgagagcggcaagagcaccttcatcaagcagatgagaatcatccacggcagcggctacagcgacgaggacaagagaggcttcaccaagctggtgtaccagaacatcttcaccgccatgcaggccatgatcagagccatggacaccctgaagatcccctacaagtacgagcacaacaaggcccacgcccagctggtgagagaggtggacgtggagaaggtgagcgccttcgagaacccctacgtggacgccatcaagagcctgtggaacgaccccggcatccaggagtgctacgacagaagaagagagtaccagctgagcgacagcaccaagtactacctgaacgacctggacagagtggccgaccccgcctacctgcccacccagcaggacgtgctgagagtgagagtgcccaccaccggcatcatcgagtaccccttcgacctgcagagcgtgatcttcagaatggtggacgtgggcggccagagaagcgagagaagaaagtggatccactgcttcgagaacgtgaccagcatcatgttcctggtggccctgagcgagtacgaccaggtgctggtggagagcgacaacgagaacagaatggaggagagcaaggccctgttcagaaccatcatcacctacccctggttccagaacagcagcgtgatcctgttcctgaacaagaaggacctgctggaggagaagatcatgtacagccacctggtggactacttccccgagtacgacggcccccagagagacgcccaggccgccagagagttcatcctgaagatgttcgtggacctgaaccccgacagcgacaagatcatctacagccacttcacctgcgccaccgacaccgagaacatcagattcgtgttcgccgccgtgaaggacaccatcctgcagctgaacctgaaggagtacaacctggtgtag

SEQ ID NO: 83911 - DNA, 474 bp, synthetic construct
  misc_feature 1..474: note = Description of Artificial Sequence: Synthetic coding sequence
  source 1..474: mol_type = other DNA
atggtggacgtgggcggccagagaagcgagagaagaaagtggatccactgcttcgagaacgtgaccagcatcatgttcctggtggccctgagcgagtacgaccaggtgctggtggagagcgacaacgagaacagaatggaggagagcaaggccctgttcagaaccatcatcacctacccctggttccagaacagcagcgtgatcctgttcctgaacaagaaggacctgctggaggagaagatcatgtacagccacctggtggactacttccccgagtacgacggcccccagagagacgcccaggccgccagagagttcatcctgaagatgttcgtggacctgaaccccgacagcgacaagatcatctacagccacttcacctgcgccaccgacaccgagaacatcagattcgtgttcgccgccgtgaaggacaccatcctgcagctgaacctgaaggagtacaacctggtgtag

SEQ ID NO: 83912 - DNA, 513 bp, synthetic construct
  misc_feature 1..513: note = Description of Artificial Sequence: Synthetic coding sequence
  source 1..513: mol_type = other DNA
atgggcgagagatgggccgacagccagctggacagcagaagcacccacggcaccggcgagagcggcaagagcaccttcatcaagcagatgagaatcatccacggcagcggctacagcgacgaggacaagagaggcttcaccaagctggtgtaccagaacatcttcaccgccatgcaggccatgatcagagccatggacaccctgaagatcccctacaagtacgagcacaacaaggcccacgcccagctggtgagagaggtggacgtggagaaggtgagcgccttcgagaacccctacgtggacgccatcaagagcctgtggaacgaccccggcatccaggagtgctacgacagaagaagagagtaccagctgagcgacagcaccaagtactacctgaacgacctggacagagtggccgaccccgcctacctgcccacccagcaggacgtgctgagagtgagagtgcccaccaccggcatcatcgagtaccccttcgacctgcagagcgtgtag

SEQ ID NO: 83913 - DNA, 1824 bp, synthetic construct
  misc_feature 1..1824: note = Description of Artificial Sequence: Synthetic coding sequence
  source 1..1824: mol_type = other DNA
atgcccagaaagaagcccttcagcgtgaagcagaagaagaagcagctgcaggacaagagagagagaaagagaggcctgcaggacggcctgagaagcagcagcaacagcagaagcggcagcagagagagaagagaggagcagaccgacaccagcgacggcgagagcgtgacccaccacatcagaagactgaaccagcagcccagccagggcctgggccccagaggctacgaccccaacagatacagactgcacttcgagagagacagcagagaggaggtggagagaagaaagagagccgccagagagcaggtgctgcagcccgtgagcgccgagctgctggagctggacatcagagaggtgtaccagcccggcagcgtgctggacttccccagaagacccccctggagctacgagatgagcaaggagcagctgatgagccaggaggagagaagcttccaggactacctgggcaagatccacggcgcctacagcagcgagaagctgagctacttcgagcacaacctggagacctggagacagctgtggagagtgctggagatgagcgacatcgtgctgctgatcaccgacatcagacaccccgtggtgaacttcccccccgccctgtacgagtacgtgaccggcgagctgggcctggccctggtgctggtgctgaacaaggtggacctggccccccccgccctggtggtggcctggaagcactacttccaccagcactacccccagctgcacgtggtgctgttcaccagcttccccagagaccccagaaccccccaggaccccagcagcgtgctgaagaagagcagaagaagaggcagaggctggaccagagccctgggccccgagcagctgctgagagcctgcgaggccatcaccgtgggcaaggtggacctgagcagctggagagagaagatcgccagagacgtggccggcgccacctggggcaacggcagcggcgaggaggaggaggaggaggacggccccgccgtgctggtggagcagcagaccgacagcgccatggagcccaccggccccacccaggagagatacaaggacggcgtggtgaccatcggctgcgtgggcttccccaacgtgggcaagagcagcctgatcaacggcctggtgggcagaaaggtggtgagcgtgagcagaacccccggccacaccagatacttccagacctacttcctgacccccagcgtgaagctgtgcgactgccccggcctgatcttccccagcctgctgcccagacagctgcaggtgctggccggcatctaccccatcgcccagatccaggagccctacaccgccgtgggctacctggccagcagaatccccgtgcaggccctgctgcacctgagacaccccgaggccgaggaccccagcgccgagcacccctggtgcgcctgggacatctgcgaggcctgggccgagaagagaggctacaagaccgccaaggccgccagaaacgacgtgtacagagccgccaacagcctgctgagactggccgtggacggcagactgagcctgtgcttccacccccccggctacagcgagcagaagggcacctgggagagccaccccgagaccaccgagctggtggtgctgcagggcagagtgggccccgccggcgacgaggaggaggaggaggaggaggagctgagcagcagctgcgaggaggagggcgaggaggacagagacgccgacgaggagggcgagggcgacgaggagacccccaccagcgcccccggcagcagcctggccggcagaaacccctacgccctgctgggcgaggacgagtgctag

SEQ ID NO: 83914 - DNA, 1224 bp, synthetic construct
  misc_feature 1..1224: note = Description of Artificial Sequence: Synthetic coding sequence
  source 1..1224: mol_type = other DNA
gtggtgaacttcccccccgccctgtacgagtacgtgaccggcgagctgggcctggccctggtgctggtgctgaacaaggtggacctggccccccccgccctggtggtggcctggaagcactacttccaccagcactacccccagctgcacgtggtgctgttcaccagcttccccagagaccccagaaccccccaggaccccagcagcgtgctgaagaagagcagaagaagaggcagaggctggaccagagccctgggccccgagcagctgctgagagcctgcgaggccatcaccgtgggcaaggtggacctgagcagctggagagagaagatcgccagagacgtggccggcgccacctggggcaacggcagcggcgaggaggaggaggaggaggacggccccgccgtgctggtggagcagcagaccgacagcgccatggagcccaccggccccacccaggagagatacaaggacggcgtggtgaccatcggctgcgtgggcttccccaacgtgggcaagagcagcctgatcaacggcctggtgggcagaaaggtggtgagcgtgagcagaacccccggccacaccagatacttccagacctacttcctgacccccagcgtgaagctgtgcgactgccccggcctgatcttccccagcctgctgcccagacagctgcaggtgctggccggcatctaccccatcgcccagatccaggagccctacaccgccgtgggctacctggccagcagaatccccgtgcaggccctgctgcacctgagacaccccgaggccgaggaccccagcgccgagcacccctggtgcgcctgggacatctgcgaggcctgggccgagaagagaggctacaagaccgccaaggccgccagaaacgacgtgtacagagccgccaacagcctgctgagactggccgtggacggcagactgagcctgtgcttccacccccccggctacagcgagcagaagggcacctgggagagccaccccgagaccaccgagctggtggtgctgcagggcagagtgggccccgccggcgacgaggaggaggaggaggaggaggagctgagcagcagctgcgaggaggagggcgaggaggacagagacgccgacgaggagggcgagggcgacgaggagacccccaccagcgcccccggcagcagcctggccggcagaaacccctacgccctgctgggcgaggacgagtgctag

SEQ ID NO: 83915 - DNA, 1824 bp, synthetic construct; identical to SEQ ID NO: 83913
  misc_feature 1..1824: note = Description of Artificial Sequence: Synthetic coding sequence
  source 1..1824: mol_type = other DNA

SEQ ID NO: 83916 - DNA, 795 bp, synthetic construct
  misc_feature 1..795: note = Description of Artificial Sequence: Synthetic coding sequence
  source 1..795: mol_type = other DNA
atgggcgagagagtgctgtggcccctgagagccggccagcactggagacacagacccctgcccgccggcctgcaggacggcctgagaagcagcagcaacagcagaagcggcagcagagagagaagagaggagcagaccgacaccagcgacggcgagagcgtgacccaccacatcagaagactgaaccagcagcccagccagggcctgggccccagaggctacgaccccaacagatacagactgcacttcgagagagacagcagagaggaggtggagagaagaaagagagccgccagagagcaggtgctgcagcccgtgagcgccgagctgctggagctggacatcagagaggtgtaccagcccggcagcgtgctggacttccccagaagacccccctggagctacgagatgagcaaggagcagctgatgagccaggaggagagaagcttccaggactacctgggcaagatccacggcgcctacagcagcgagaagctgagctacttcgagcacaacctggagacctggagacagctgtggagagtgctggagatgagcgacatcgtgctgctgatcaccgacatcagacaccccgtggtgaacttcccccccgccctgtacgagtacgtgaccggcgagctgggcctggccctggtgctggtgctgaacaaggtggacctggccccccccgccctggtggtggcctggaagcactacttccaccagcactacccccagctgcacgtggtgctgttcaccagcttccccagagaccccagaaccccccaggactag

SEQ ID NO: 83917 - DNA, 1824 bp, synthetic construct; identical to SEQ ID NO: 83913
  misc_feature 1..1824: note = Description of Artificial Sequence: Synthetic coding sequence
  source 1..1824: mol_type = other DNA

SEQ ID NO: 83918 - DNA, 1290 bp, synthetic construct
  misc_feature 1..1290: note = Description of Artificial Sequence: Synthetic coding sequence
  source 1..1290: mol_type = other DNA
atggaggccgccgtggtgctggagatgagcgacatcgtgctgctgatcaccgacatcagacaccccgtggtgaacttcccccccgccctgtacgagtacgtgaccggcgagctgggcctggccctggtgctggtgctgaacaaggtggacctggccccccccgccctggtggtggcctggaagcactacttccaccagcactacccccagctgcacgtggtgctgttcaccagcttccccagagaccccagaaccccccaggaccccagcagcgtgctgaagaagagcagaagaagaggcagaggctggaccagagccctgggccccgagcagctgctgagagcctgcgaggccatcaccgtgggcaaggtggacctgagcagctggagagagaagatcgccagagacgtggccggcgccacctggggcaacggcagcggcgaggaggaggaggaggaggacggccccgccgtgctggtggagcagcagaccgacagcgccatggagcccaccggccccacccaggagagatacaaggacggcgtggtgaccatcggctgcgtgggcttccccaacgtgggcaagagcagcctgatcaacggcctggtgggcagaaaggtggtgagcgtgagcagaacccccggccacaccagatacttccagacctacttcctgacccccagcgtgaagctgtgcgactgccccggcctgatcttccccagcctgctgcccagacagctgcaggtgctggccggcatctaccccatcgcccagatccaggagccctacaccgccgtgggctacctggccagcagaatccccgtgcaggccctgctgcacctgagacaccccgaggccgaggaccccagcgccgagcacccctggtgcgcctgggacatctgcgaggcctgggccgagaagagaggctacaagaccgccaaggccgccagaaacgacgtgtacagagccgccaacagcctgctgagactggccgtggacggcagactgagcctgtgcttccacccccccggctacagcgagcagaagggcacctgggagagccaccccgagaccaccgagctggtggtgctgcagggcagagtgggccccgccggcgacgaggaggaggaggaggaggaggagctgagcagcagctgcgaggaggagggcgaggaggacagagacgccgacgaggagggcgagggcgacgaggagacccccaccagcgcccccggcagcagcctggccggcagaaacccctacgccctgctgggcgaggacgagtgctag

SEQ ID NO: 83919 - DNA, 1824 bp, synthetic construct; identical to SEQ ID NO: 83913
  misc_feature 1..1824: note = Description of Artificial Sequence: Synthetic coding sequence
  source 1..1824: mol_type = other DNA

SEQ ID NO: 83920 - DNA, 1215 bp, synthetic construct
  misc_feature 1..1215: note = Description of Artificial Sequence: Synthetic coding sequence
  source 1..1215: mol_type = other DNA
atgagcaaggagcagctgatgagccaggaggagagaagcttccaggactacctgggcaagatccacggcgcctacagcagcgagaagctgagctacttcgagcacaacctggagacctggagacagctgtggagagtgctggagatgagcgacatcgtgctgctgatcaccgacatcagacaccccgtggtgaacttcccccccgccctgtacgagtacgtgaccggcgagctgggcctggccctggtgctggtgctgaacaaggtggacctggccccccccgccctggtggtggcctggaagcactacttccaccagcactacccccagctgcacgtggtgctgttcaccagcttccccagagaccccagaaccccccaggaccccagcagcgtgctgaagaagagcagaagaagaggcagaggctggaccagagccctgggccccgagcagctgctgagagcctgcgaggccatcaccgtgggcaagggcttccccaacgtgggcaagagcagcctgatcaacggcctggtgggcagaaaggtggtgagcgtgagcagaacccccggccacaccagatacttccagacctacttcctgacccccagcgtgaagctgtgcgactgccccggcctgatcttccccagcctgctgcccagacagctgcaggtgctggccggcatctaccccatcgcccagatccaggagccctacaccgccgtgggctacctggccagcagaatccccgtgcaggccctgctgcacctgagacaccccgaggccgaggaccccagcgccgagcacccctggtgcgcctgggacatctgcgaggcctgggccgagaagagaggctacaagaccgccaaggccgccagaaacgacgtgtacagagccgccaacagcctgctgagactggccgtggacggcagactgagcctgtgcttccacccccccggctacagcgagcagaagggcacctgggagagccaccccgagaccaccgagctggtggtgctgcagggcagagtgggccccgccggcgacgaggaggaggaggaggaggaggagctgagcagcagctgcgaggaggagggcgaggaggacagagacgccgacgaggagggcgagggcgacgaggagacccccaccagcgcccccggcagcagcctggccggcagaaacccctacgccctgctgggcgaggacgagtgctag

SEQ ID NO: 83921 - DNA, 795 bp, synthetic construct; identical to SEQ ID NO: 83916
  misc_feature 1..795: note = Description of Artificial Sequence: Synthetic coding sequence
  source 1..795: mol_type = other DNA

SEQ ID NO: 83922 - DNA, 795 bp, synthetic construct; identical to SEQ ID NO: 83916
  misc_feature 1..795: note = Description of Artificial Sequence: Synthetic coding sequence
  source 1..795: mol_type = other DNA

SEQ ID NO: 83923 - DNA, 795 bp, synthetic construct; identical to SEQ ID NO: 83916
  misc_feature 1..795: note = Description of Artificial Sequence: Synthetic coding sequence
  source 1..795: mol_type = other DNA

SEQ ID NO: 83924 - DNA, 1824 bp, synthetic construct; identical to SEQ ID NO: 83913
  misc_feature 1..1824: note = Description of Artificial Sequence: Synthetic coding sequence
  source 1..1824: mol_type = other DNA

SEQ ID NO: 83925 - DNA, 1824 bp, synthetic construct; identical to SEQ ID NO: 83913
  misc_feature 1..1824: note = Description of Artificial Sequence: Synthetic coding sequence
  source 1..1824: mol_type = other DNA

SEQ ID NO: 83926 - DNA, 795 bp, synthetic construct; identical to SEQ ID NO: 83916
  misc_feature 1..795: note = Description of Artificial Sequence: Synthetic coding sequence
  source 1..795: mol_type = other DNA

SEQ ID NO: 83927 - DNA, 795 bp, synthetic construct; identical to SEQ ID NO: 83916
  misc_feature 1..795: note = Description of Artificial Sequence: Synthetic coding sequence
  source 1..795: mol_type = other DNA

SEQ ID NO: 83928 - DNA, 1824 bp, synthetic construct; identical to SEQ ID NO: 83913
  misc_feature 1..1824: note = Description of Artificial Sequence: Synthetic coding sequence
  source 1..1824: mol_type = other DNA

SEQ ID NO: 83929 - DNA, 201 bp, synthetic construct
  misc_feature 1..201: note = Description of Artificial Sequence: Synthetic coding sequence
  source 1..201: mol_type = other DNA
gtggtgaacttcccccccgccctgtacgagtacgtgaccggcgagctgggcctggccctggtgctggtgctgaacaaggtggacctggccccccccgccctggtggtggcctggaagcactacttccaccagcactacccccagctgcacgtggtgctgttcaccagcttccccagagaccccagaaccccccaggactag

SEQ ID NO: 83930 - DNA, 795 bp, synthetic construct; identical to SEQ ID NO: 83916
  misc_feature 1..795: note = Description of Artificial Sequence: Synthetic coding sequence
  source 1..795: mol_type = other DNA

SEQ ID NO: 83931 - DNA, 1215 bp, synthetic construct; identical to SEQ ID NO: 83920
  misc_feature 1..1215: note = Description of Artificial Sequence: Synthetic coding sequence
  source 1..1215: mol_type = other DNA

SEQ ID NO: 83932 - DNA, 789 bp, synthetic construct
  misc_feature 1..789: note = Description of Artificial Sequence: Synthetic coding sequence
  source 1..789: mol_type = other DNA
atggagcccaccggccccacccaggagagatacaaggacggcgtggtgaccatcggctgcgtgggcttccccaacgtgggcaagagcagcctgatcaacggcctggtgggcagaaaggtggtgagcgtgagcagaacccccggccacaccagatacttccagacctacttcctgacccccagcgtgaagctgtgcgactgccccggcctgatcttccccagcctgctgcccagacagctgcaggtgctggccggcatctaccccatcgcccagatccaggagccctacaccgccgtgggctacctggccagcagaatccccgtgcaggccctgctgcacctgagacaccccgaggccgaggaccccagcgccgagcacccctggtgcgcctgggacatctgcgaggcctgggccgagaagagaggctacaagaccgccaaggccgccagaaacgacgtgtacagagccgccaacagcctgctgagactggccgtggacggcagactgagcctgtgcttccacccccccggctacagcgagcagaagggcacctgggagagccaccccgagaccaccgagctggtggtgctgcagggcagagtgggccccgccggcgacgaggaggaggaggaggaggaggagctgagcagcagctgcgaggaggagggcgaggaggacagagacgccgacgaggagggcgagggcgacgaggagacccccaccagcgcccccggcagcagcctggccggcagaaacccctacgccctgctgggcgaggacgagtgctag

SEQ ID NO: 83933 - DNA, 789 bp, synthetic construct; identical to SEQ ID NO: 83932
  misc_feature 1..789: note = Description of Artificial Sequence: Synthetic coding sequence
  source 1..789: mol_type = other DNA

SEQ ID NO: 83934 - DNA, 1290 bp, synthetic construct; identical to SEQ ID NO: 83918
  misc_feature 1..1290: note = Description of Artificial Sequence: Synthetic coding sequence
  source 1..1290: mol_type = other DNA

SEQ ID NO: 83935 - DNA, 1215 bp, synthetic construct; identical to SEQ ID NO: 83920
  misc_feature 1..1215: note = Description of Artificial Sequence: Synthetic coding sequence
  source 1..1215: mol_type = other DNA

SEQ ID NO: 83936 - DNA, 1215 bp, synthetic construct; identical to SEQ ID NO: 83920
  misc_feature 1..1215: note = Description of Artificial Sequence: Synthetic coding sequence
  source 1..1215: mol_type = other DNA

SEQ ID NO: 83937 - DNA, 789 bp, synthetic construct; identical to SEQ ID NO: 83932
  misc_feature 1..789: note = Description of Artificial Sequence: Synthetic coding sequence
  source 1..789: mol_type = other DNA

SEQ ID NO: 83938 - DNA, 1290 bp, synthetic construct; identical to SEQ ID NO: 83918
  misc_feature 1..1290: note = Description of Artificial Sequence: Synthetic coding sequence
  source 1..1290: mol_type = other DNA

SEQ ID NO: 83939 - DNA, 1290 bp, synthetic construct; identical to SEQ ID NO: 83918
  misc_feature 1..1290: note = Description of Artificial Sequence: Synthetic coding sequence
  source 1..1290: mol_type = other DNA

SEQ ID NO: 83940 - DNA, 789 bp, synthetic construct; identical to SEQ ID NO: 83932
  misc_feature 1..789: note = Description of Artificial Sequence: Synthetic coding sequence
  source 1..789: mol_type = other DNA

SEQ ID NO: 83941 - DNA, 1215 bp, synthetic construct; identical to SEQ ID NO: 83920
  misc_feature 1..1215: note = Description of Artificial Sequence: Synthetic coding sequence
  source 1..1215: mol_type = other DNA

SEQ ID NO: 83942 - DNA, 1290 bp, synthetic construct; identical to SEQ ID NO: 83918
  misc_feature 1..1290: note = Description of Artificial Sequence: Synthetic coding sequence
  source 1..1290: mol_type = other DNA

SEQ ID NO: 83943 - DNA, 1290 bp, synthetic construct; identical to SEQ ID NO: 83918
  misc_feature 1..1290: note = Description of Artificial Sequence: Synthetic coding sequence
  source 1..1290: mol_type = other DNA

SEQ ID NO: 83944 - DNA, 789 bp, synthetic construct; identical to SEQ ID NO: 83932
  misc_feature 1..789: note = Description of Artificial Sequence: Synthetic coding sequence
  source 1..789: mol_type = other DNA

SEQ ID NO: 83945 - DNA, 1290 bp, synthetic construct; identical to SEQ ID NO: 83918
  misc_feature 1..1290: note = Description of Artificial Sequence: Synthetic coding sequence
  source 1..1290: mol_type = other DNA

SEQ ID NO: 83946 - DNA, 1215 bp, synthetic construct; identical to SEQ ID NO: 83920
  misc_feature 1..1215: note = Description of Artificial Sequence: Synthetic coding sequence
  source 1..1215: mol_type = other DNA

SEQ ID NO: 83947 - DNA, 1215 bp, synthetic construct; identical to SEQ ID NO: 83920
  misc_feature 1..1215: note = Description of Artificial Sequence: Synthetic coding sequence
  source 1..1215: mol_type = other DNA

SEQ ID NO: 83948 - DNA, 789 bp, synthetic construct; identical to SEQ ID NO: 83932
  misc_feature 1..789: note = Description of Artificial Sequence: Synthetic coding sequence
  source 1..789: mol_type = other DNA

SEQ ID NO: 83949 - DNA, 2196 bp, synthetic construct
  misc_feature 1..2196: note = Description of Artificial Sequence: Synthetic coding sequence
  source 1..2196: mol_type = other DNA
atggtgaagcccaagtacaagggcagaagcaccatcaaccccagcaaggccagcaccaaccccgacagagtgcagggcgccggcggccagaacatgagagacagagccaccatcagaagactgaacatgtacagacagaaggagagaagaaacagcagaggcaagatcatcaagcccctgcagtaccagagcaccgtggccagcggcaccgtggccagagtggagcccaacatcaagtggttcggcaacaccagagtgatcaagcagagcagcctgcagaagttccaggaggagatggacaccgtgatgaaggacccctacaaggtggtgatgaagcagagcaagctgcccatgagcctgctgcacgacagaatcagaccccacaacctgaaggtgcacatcctggacaccgagagcttcgagaccaccttcggccccaagagccagagaaagagacccaacctgttcgccagcgacatgcagagcctgatcgagaacgccgagatgagcaccgagagctacgaccagggcaaggacagagacctggtgaccgaggacaccggcgtgagaaacgaggcccaggaggagatctacaagaagggccagagcaagagaatctggggcgagctgtacaaggtgatcgacagcagcgacgtggtggtgcaggtgctggacgccagagaccccatgggcaccagaagcccccacatcgagacctacctgaagaaggagaagccctggaagcacctgatcttcgtgctgaacaagtgcgacctggtgcccacctgggccaccaagagatgggtggccgtgctgagccaggactaccccaccctggccttccacgccagcctgaccaaccccttcggcaagggcgccttcatccagctgctgagacagttcggcaagctgcacaccgacaagaagcagatcagcgtgggcttcatcggctaccccaacgtgggcaagagcagcgtgatcaacaccctgagaagcaagaaggtgtgcaacgtggcccccatcgccggcgagaccaaggtgtggcagtacatcaccctgatgagaagaatcttcctgatcgactgccccggcgtggtgtaccccagcgaggacagcgagaccgacatcgtgctgaagggcgtggtgcaggtggagaagatcaagagccccgaggaccacatcggcgccgtgctggagagagccaagcccgagtacatcagcaagacctacaagatcgacagctgggagaacgccgaggacttcctggagaagctggccttcagaaccggcaagctgctgaagggcggcgagcccgacctgcagaccgtgggcaagatggtgctgaacgactggcagagaggcagaatccccttcttcgtgaagccccccaacgccgagcccctggtggccccccagctgctgcccagcagcagcctggaggtggtgcccgaggccgcccagaacaaccccggcgaggaggtgaccgagaccgccggcgagggcagcgagagcatcatcaaggaggagaccgaggagaacagccactgcgacgccaacaccgagatgcagcagatcctgaccagagtgagacagaacttcggcaagatcaacgtggtgccccagttcagcggcgacgacctggtgcccgtggaggtgagcgacctggaggaggagctggagagcttcagcgacgaggaggaggaggagcaggagcagcagagagacgacgccgaggagagcagcagcgagcccgaggaggagaacgtgggcaacgacaccaaggccgtgatcaaggccctggacgagaagatcgccaagtaccagaagttcctggacaaggccaaggccaagaagttcagcgccgtgagaatcagcaagggcctgagcgagaagatcttcgccaagcccgaggagcagagaaagaccctggaggaggacgtggacgacagagcccccagcaagaagggcaagaagagaaaggcccagagagaggaggagcaggagcacagcaacaaggcccccagagccctgaccagcaaggagagaagaagagccgtgagacagcagagacccaagaaggtgggcgtgagatactacgagacccacaacgtgaagaacagaaacagaaacaagaagaagaccaacgacagcgagggccagaagcacaagagaaagaagttcagacagaagcagtag

SEQ ID NO: 83950 - DNA, 579 bp, synthetic construct
  misc_feature 1..579: note = Description of Artificial Sequence: Synthetic coding sequence
  source 1..579: mol_type = other DNA
atgcagagcctgatcgagaacgccgagatgagcaccgagagctacgaccagggcaaggacagagacctggtgaccgaggacaccggcgtgagaaacgaggcccaggaggagatctacaagaagggccagagcaagagaatctggggcgagctgtacaaggtgatcgacagcagcgacgtggtggtgcaggtgctggacgccagagaccccatgggcaccagaagcccccacatcgagacctacctgaagaaggagaagccctggaagcacctgatcttcgtgctgaacaagtgcgacctggtgcccacctgggccaccaagagatgggtggccgtgctgagccaggactaccccaccctggccttccacgccagcctgaccaaccccttcggcaagggcgccttcatccagctgctgagacagttcggcaagctgcacaccgacaagaagcagatcagcgtgggcttcatcggctaccccaacgtgggcaagagcagcgtgatcaacaccctgagaagcaagaaggtgtgcaacgtggcccccatcgccggcgagaccaaggtgagcatcctgctgtag

SEQ ID NO: 83951 - DNA, 1614 bp, synthetic construct
  misc_feature 1..1614: note = Description of Artificial Sequence: Synthetic coding sequence
  source 1..1614: mol_type = other DNA
atgacctgccacaagagatacaagatccagaagaaggtgagagagcaccacagaaagctgagaaaggaggccaagaagagaggccacaagaagcccagaaaggaccccggcgtgcccaacagcgcccccttcaaggaggccctgctgagagaggccgagctgagaaagcagagactggaggagctgaagcagcagcagaagctggacagacagaaggagctggagaagaagagaaagctggagaccaaccccgacatcaagcccagcaacgtggagcccatggagaaggagttcggcctgtgcaagaccgagaacaaggccaagagcggcaagcagaacagcaagaagctgtactgccaggagctgaagaaggtgatcgaggccagcgacgtggtgctggaggtgctggacgccagagaccccctgggctgcagatgcccccaggtggaggaggccatcgtgcagagcggccagaagaagctggtgctgatcctgaacaagagcgacctggtgcccaaggagaacctggagagctggctgaactacctgaagaaggagctgcccaccgtggtgttcagagccagcaccaagcccaaggacaagggcaagatcaccaagagagtgaaggccaagaagaacgccgcccccttcagaagcgaggtgtgcttcggcaaggagggcctgtggaagctgctgggcggcttccaggagacctgcagcaaggccatcagagtgggcgtgatcggcttccccaacgtgggcaagagcagcatcatcaacagcctgaagcaggagcagatgtgcaacgtgggcgtgagcatgggcctgaccagaagcatgcaggtggtgcccctggacaagcagatcaccatcatcgacagccccagcttcatcgtgagccccctgaacagcagcagcgccctggccctgagaagccccgccagcatcgaggtggtgaagcccatggaggccgccagcgccatcctgagccaggccgacgccagacaggtggtgctgaagtacaccgtgcccggctacagaaacagcctggagttcttcaccgtgctggcccagagaagaggcatgcaccagaagggcggcatccccaacgtggagggcgccgccaagctgctgtggagcgagtggaccggcgccagcctggcctactactgccacccccccaccagctggaccccccccccctacttcaacgagagcatcgtggtggacatgaagagcggcttcaacctggaggagctggagaagaacaacgcccagagcatcagagccatcaagggcccccacctggccaacagcatcctgttccagagcagcggcctgaccaacggcatcatcgaggagaaggacatccacgaggagctgcccaagagaaaggagagaaagcaggaggagagagaggacgacaaggacagcgaccaggagaccgtggacgaggaggtggacgagaacagcagcggcatgttcgccgccgaggagaccggcgaggccctgagcgaggagaccaccgccggcgagcagagcaccagaagcttcatcctggacaagatcatcgaggaggacgacgcctacgacttcagcaccgactacgtgtag

SEQ ID NO: 83952 - DNA, 1650 bp, synthetic construct
  misc_feature 1..1650: note = Description of Artificial Sequence: Synthetic coding sequence
  source 1..1650: mol_type = other DNA
atgaagagacccaagctgaagaaggccagcaagagaatgacctgccacaagagatacaagatccagaagaaggtgagagagcaccacagaaagctgagaaaggaggccaagaagagaggccacaagaagcccagaaaggaccccggcgtgcccaacagcgcccccttcaaggaggccctgctgagagaggccgagctgagaaagcagagactggaggagctgaagcagcagcagaagctggacagacagaaggagctggagaagaagagaaagctggagaccaaccccgacatcaagcccagcaacgtggagcccatggagaaggagttcggcctgtgcaagaccgagaacaaggccaagagcggcaagcagaacagcaagaagctgtactgccaggagctgaagaaggtgatcgaggccagcgacgtggtgctggaggtgctggacgccagagaccccctgggctgcagatgcccccaggtggaggaggccatcgtgcagagcggccagaagaagctggtgctgatcctgaacaagagcgacctggtgcccaaggagaacctggagagctggctgaactacctgaagaaggagctgcccaccgtggtgttcagagccagcaccaagcccaaggacaagggcaagatcaccaagagagtgaaggccaagaagaacgccgcccccttcagaagcgaggtgtgcttcggcaaggagggcctgtggaagctgctgggcggcttccaggagacctgcagcaaggccatcagagtgggcgtgatcggcttccccaacgtgggcaagagcagcatcatcaacagcctgaagcaggagcagatgtgcaacgtgggcgtgagcatgggcctgaccagaagcatgcaggtggtgcccctggacaagcagatcaccatcatcgacagccccagcttcatcgtgagccccctgaacagcagcagcgccctggccctgagaagccccgccagcatcgaggtggtgaagcccatggaggccgccagcgccatcctgagccaggccgacgccagacaggtggtgctgaagtacaccgtgcccggctacagaaacagcctggagttcttcaccgtgctggcccagagaagaggcatgcaccagaagggcggcatccccaacgtggagggcgccgccaagctgctgtggagcgagtggaccggcgccagcctggcctactactgccacccccccaccagctggaccccccccccctacttcaacgagagcatcgtggtggacatgaagagcggcttcaacctggaggagctggagaagaacaacgcccagagcatcagagccatcaagggcccccacctggccaacagcatcctgttccagagcagcggcctgaccaacggcatcatcgaggagaaggacatccacgaggagctgcccaagagaaaggagagaaagcaggaggagagagaggacgacaaggacagcgaccaggagaccgtggacgaggaggtggacgagaacagcagcggcatgttcgccgccgaggagaccggcgaggccctgagcgaggagaccaccgccggcgagcagagcaccagaagcttcatcctggacaagatcatcgaggaggacgacgcctacgacttcagcaccgactacgtgtag

SEQ ID NO: 83953 - DNA, 291 bp, synthetic construct
  misc_feature 1..291: note = Description of Artificial Sequence: Synthetic coding sequence
  source 1..291: mol_type = other DNA
atgacctgccacaagagatacaagatccagaagaaggtgagagagcaccacagaaagctgagaaaggaggccaagaagagaggccacaagaagcccagaaaggaccccggcgtgcccaacagcgcccccttcaaggaggccctgctgagagaggccgagctgagaaagcagagactggaggagctgaagcagcagcagaagctggacagacagaaggagctggagaagaagagaaagctggagaccaaccccgacatcaagcccagcaacgtggagcccatggagaagtag

SEQ ID NO: 83954 - DNA, 408 bp, synthetic construct
  misc_feature 1..408: note = Description of Artificial Sequence: Synthetic coding sequence
  source 1..408: mol_type = other DNA
atgacctgccacaagagatacaagatccagaagaaggtgagagagcaccacagaaagctgagaaaggaggccaagaagagaggccacaagaagcccagaaaggaccccggcgtgcccaacagcgcccccttcaaggaggccctgctgagagaggccgagctgagaaagcagagactggaggagctgaagcagcagcagaagctggacagacagaaggagctggagaagaagagaaagctggagaccaaccccgacatcaagcccagcaacgtggagcccatggagaaggagttcggcctgtgcaagaccgagaacaaggccaagagcggcaagcagaacagcaagaagctgtactgccaggagctgaagaaggtgatcgaggccagcgacgtggtgctggaggtgtag

SEQ ID NO: 83955 - DNA, 417 bp, synthetic construct
  misc_feature 1..417: note = Description of Artificial Sequence: Synthetic coding sequence
  source 1..417: mol_type = other DNA
atgaagagacccaagctgaagaaggccagcaagagaatgacctgccacaagagatacaagatccagaagaaggtgagagagcaccacagaaagctgagaaaggaggccaagaagagaggccacaagaagcccagaaaggaccccggcgtgcccaacagcgcccccttcaaggaggccctgctgagagaggccgagctgagaaagcagagactggaggagctgaagcagcagcagaagctggacagacagaaggagctggagaagaagagaaagctggagaccaaccccgacatcaagcccagcaacgtggagcccatggagaaggagttcggcctgtgcaagaccgagaacaaggccaagagcggcaagcagaacagcaagaagctgtactgccaggagctgaagaaggtgagctag

SEQ ID NO: 83956 - DNA, 1038 bp, synthetic construct
  misc_feature 1..1038: note = Description of Artificial Sequence: Synthetic coding sequence
  source 1..1038: mol_type = other DNA
atgcccagaatcgacgccgacctgaagctggacttcaaggacgtgctgctgagacccaagagaagcagcctgaagagcagagccgaggtggacctggagagaaccttcaccttcagaaacagcaagcagacctacagcggcatccccatcatcgtggccaacatggacaccgtgggcaccttcgagatggccgccgtgatgagccagcacagcatgttcaccgccatccacaagcactacagcctggacgactggaagctgttcgccaccaaccaccccgagtgcctgcagaacgtggccgtgagcagcggcagcggccagaacgacctggagaagatgaccagcatcctggaggccgtgccccaggtgaagttcatctgcctggacgtggccaacggctacagcgagcacttcgtggagttcgtgaagctggtgagagccaagttccccgagcacaccatcatggccggcaacgtggtgaccggcgagatggtggaggagctgatcctgagcggcgccgacatcatcaaggtgggcgtgggccccggcagcgtgtgcaccaccagaaccaagaccggcgtgggctacccccagctgagcgccgtgatcgagtgcgccgacagcgcccacggcctgaagggccacatcatcagcgacggcggctgcacctgccccggcgacgtggccaaggccttcggcgccggcgccgacttcgtgatgctgggcggcatgttcagcggccacaccgagtgcgccggcgaggtgttcgagagaaacggcagaaagctgaagctgttctacggcatgagcagcgacaccgccatgaacaagcacgccggcggcgtggccgagtacagagccagcgagggcaagaccgtggaggtgccctacaagggcgacgtggagaacaccatcctggacatcctgggcggcctgagaagcacctgcacctacgtgggcgccgccaagctgaaggagctgagcagaagagccaccttcatcagagtgacccagcagcacaacaccgtgttcagctag

SEQ ID NO: 83957 - DNA, 1230 bp, synthetic construct
  misc_feature 1..1230: note = Description of Artificial Sequence: Synthetic coding sequence
  source 1..1230: mol_type = other DNA
atgccccacatcgacaacgacgtgaagctggacttcaaggacgtgctgctgagacccaagagaagcaccctgaagagcagaagcgaggtggacctgaccagaagcttcagcttcagaaacagcaagcagacctacagcggcgtgcccatcatcgccgccaacatggacaccgtgggcaccttcgagatggccaaggtgctgtgcaagttcagcctgttcaccgccgtgcacaagcactacagcctggtgcagtggcaggagttcgccggccagaaccccgactgcctggagcacctggccgccagcagcggcaccggcagcagcgacttcgagcagctggagcagatcctggaggccatcccccaggtgaagtacatctgcctggacgtggccaacggctacagcgagcacttcgtggagttcgtgaaggacgtgagaaagagattcccccagcacaccatcatggccggcaacgtggtgaccggcgagatggtggaggagctgatcctgagcggcgccgacatcatcaaggtgggcatcggccccggcagcgtgtgcaccaccagaaagaagaccggcgtgggctacccccagctgagcgccgtgatggagtgcgccgacgccgcccacggcctgaagggccacatcatcagcgacggcggctgcagctgccccggcgacgtggccaaggccttcggcgccggcgccgacttcgtgatgctgggcggcatgctggccggccacagcgagagcggcggcgagctgatcgagagagacggcaagaagtacaagctgttctacggcatgagcagcgagatggccatgaagaagtacgccggcggcgtggccgagtacagatacgtgtggagacccagaagcctggtgatcgtgtggagacagaacagctggctgctgagaggcggctggtacagcagccagagaagcatggtgaacagaggcagcatgctgggcagcgtggagaagagcctgggcctgagaaaccccgagggcgaggacaacaaggtgttccccaccctgagagccagcgagggcaagaccgtggaggtgcccttcaagggcgacgtggagcacaccatcagagacatcctgggcggcatcagaagcacctgcacctacgtgggcgccgccaagctgaaggagctgagcagaagaaccaccttcatcagagtgacccagcaggtgaaccccatcttcagcgaggcctgctag

SEQ ID NO: 83958 - DNA, 1047 bp, synthetic construct
  misc_feature 1..1047: note = Description of Artificial Sequence: Synthetic coding sequence
  source 1..1047: mol_type = other DNA
atgccccacatcgacaacgacgtgaagctggacttcaaggacgtgctgctgagacccaagagaagcaccctgaagagcagaagcgaggtggacctgaccagaagcttcagcttcagaaacagcaagcagacctacagcggcgtgcccatcatcgccgccaacatggacaccgtgggcaccttcgagatggccaaggtgctgtgcaagttcagcctgttcaccgccgtgcacaagcactacagcctggtgcagtggcaggagttcgccggccagaaccccgactgcctggagcacctggccgccagcagcggcaccggcagcagcgacttcgagcagctggagcagatcctggaggccatcccccaggtgaagtacatctgcctggacgtggccaacggctacagcgagcacttcgtggagttcgtgaaggacgtgagaaagagattcccccagcacaccatcatggccggcaacgtggtgaccggcgagatggtggaggagctgatcctgagcggcgccgacatcatcaaggtgggcatcggccccggcagcgtgtgcaccaccagaaagaagaccggcgtgggctacccccagctgagcgccgtgatggagtgcgccgacgccgcccacggcctgaagggccacatcatcagcgacggcggctgcagctgccccggcgacgtggccaaggccttcggcgccggcgccgacttcgtgatgctgggcggcatgctggccggccacagcgagagcggcggcgagctgatcgagagagacggcaagaagtacaagctgttctacggcatgagcagcgagatggccatgaagaagtacgccggcggcgtggccgagtacagagccagcgagggcaagaccgtggaggtgcccttcaagggcgacgtggagcacaccatcagagacatcctgggcggcatcagaagcacctgcacctacgtgggcgccgccaagctgaaggagctgagcagaagaaccaccttcatcagagtgacccagcaggtgaaccccatcttcagcgaggcctgctag

SEQ ID NO: 83959 - DNA, 1047 bp, synthetic construct; identical to SEQ ID NO: 83958
  misc_feature 1..1047: note = Description of Artificial Sequence: Synthetic coding sequence
  source 1..1047: mol_type = other DNA

SEQ ID NO: 83960 - DNA, 1101 bp, synthetic construct
  misc_feature 1..1101: note = Description of Artificial Sequence: Synthetic coding sequence
  source 1..1101: mol_type = other DNA
atgaccagctgcctgcccgccctgagattcatcgccacccccagactgagcgccatgccccacatcgacaacgacgtgaagctggacttcaaggacgtgctgctgagacccaagagaagcaccctgaagagcagaagcgaggtggacctgaccagaagcttcagcttcagaaacagcaagcagacctacagcggcgtgcccatcatcgccgccaacatggacaccgtgggcaccttcgagatggccaaggtgctgtgcaagttcagcctgttcaccgccgtgcacaagcactacagcctggtgcagtggcaggagttcgccggccagaaccccgactgcctggagcacctggccgccagcagcggcaccggcagcagcgacttcgagcagctggagcagatcctggaggccatcccccaggtgaagtacatctgcctggacgtggccaacggctacagcgagcacttcgtggagttcgtgaaggacgtgagaaagagattcccccagcacaccatcatggccggcaacgtggtgaccggcgagatggtggaggagctgatcctgagcggcgccgacatcatcaaggtgggcatcggccccggcagcgtgtgcaccaccagaaagaagaccggcgtgggctacccccagctgagcgccgtgatggagtgcgccgacgccgcccacggcctgaagggccacatcatcagcgacggcggctgcagctgccccggcgacgtggccaaggccttcggcgccggcgccgacttcgtgatgctgggcggcatgctggccggccacagcgagagcggcggcgagctgatcgagagagacggcaagaagtacaagctgttctacggcatgagcagcgagatggccatgaagaagtacgccggcggcgtggccgagtacagagccagcgagggcaagaccgtggaggtgcccttcaagggcgacgtggagcacaccatcagagacatcctgggcggcatcagaagcacctgcacctacgtgggcgccgccaagctgaaggagctgagcagaagaaccaccttcatcagagtgacccagcaggtgaaccccatcttcagcgaggcctgctag

SEQ ID NO: 83961 - DNA, 1047 bp, synthetic construct
  misc_feature 1..1047: note = Description of Artificial Sequence: Synthetic coding sequence
  source 1..1047: mol_type = other DNA
atgccccacatcgacaacgacgtgaagctggacttcaaggacgtgctgctgagacccaagagaagcaccctgaagagcagaagcgaggtggacctgaccagaagcttcagcttcagaaacagcaagcagacctacagcggcgtgcccatcatcgccgccaacatggacaccgtgggcaccttcgagatggccaaggtgctgtgcaagttcagcctgttcaccgccgtgcacaagcactacagcctggtgcagtggcaggagttcgccggccagaaccccgactgcctggagagcatctggctgcccgcccaggcccaggccctgctgaccctgagcagctggaacagaagctggaagctgttccccagaaagtacatctgcctggacgtggccaacggctacagcgagcacttcgtggagttcgtgaaggacgtgagaaagagattcccccagcacaccatcatggccggcaacgtggtgaccggcgagatggtggaggagctgatcctgagcggcgccgacatcatcaaggtgggcatcggccccggcagcgtgtgcaccaccagaaagaagaccggcgtgggctacccccagctgagcgccgtgatggagtgcgccgacgccgcccacggcctgaagggccacatcatcagcgacggcggctgcagctgccccggcgacgtggccaaggccttcggcgccggcgccgacttcgtgatgctgggcggcatgctggccggccacagcgagagcggcggcgagctgatcgagagagacggcaagaagtacaagctgttctacggcatgagcagcgagatggccatgaagaagtacgccggcggcgtggccgagtacagagccagcgagggcaagaccgtggaggtgcccttcaagggcgacgtggagcacaccatcagagacatcctgggcggcatcagaagcacctgcacctacgtgggcgccgccaagctgaaggagctgagcagaagaaccaccttcatcagagtgacccagcaggtgaaccccatcttcagcgaggcctgctag

SEQ ID NO: 83962 - DNA, 1047 bp, synthetic construct; identical to SEQ ID NO: 83958
  misc_feature 1..1047: note = Description of Artificial Sequence: Synthetic coding sequence
  source 1..1047: mol_type = other DNA

SEQ ID NO: 83963 - DNA, 1779 bp, synthetic construct
  misc_feature 1..1779: note = Description of Artificial Sequence: Synthetic coding sequence
  source 1..1779: mol_type = other DNA
atggccagcgagatccacatgaccggccccatgtgcctgatcgagaacaccaacggcagactgatggccaaccccgaggccctgaagatcctgagcgccatcacccagcccatggtggtggtggccatcgtgggcctgtacagaaccggcaagagctacctgatgaacaagctggccggcaagaagaagggcttcagcctgggcagcaccgtgcagagccacaccaagggcatctggatgtggtgcgtgccccaccccaagaagcccggccacatcctggtgctgctggacaccgagggcctgggcgacgtggagaagggcgacaaccagaacgacagctggatcttcgccctggccgtgctgctgagcagcaccttcgtgtacaacagcatcggcaccatcaaccagcaggccatggaccagctgtactacgtgaccgagctgacccacagaatcagaagcaagagcagccccgacgagaacgagaacgaggtggaggacagcgccgacttcgtgagcttcttccccgacttcgtgtggaccctgagagacttcagcctggacctggaggccgacggccagcccctgacccccgacgagtacctgacctacagcctgaagctgaagaagggcaccagccagaaggacgagaccttcaacctgcccagactgtgcatcagaaagttcttccccaagaagaagtgcttcgtgttcgacagacccgtgcacagaagaaagctggcccagctggagaagctgcaggacgaggagctggaccccgagttcgtgcagcaggtggccgacttctgcagctacatcttcagcaacagcaagaccaagaccctgagcggcggcatccaggtgaacggccccagactggagagcctggtgctgacctacgtgaacgccatcagcagcggcgacctgccctgcatggagaacgccgtgctggccctggcccagatcgagaacagcgccgccgtgcagaaggccatcgcccactacgagcagcagatgggccagaaggtgcagctgcccaccgagaccctgcaggagctgctggacctgcacagagacagcgagagagaggccatcgaggtgttcatcagaagcagcttcaaggacgtggaccacctgttccagaaggagctggccgcccagctggagaagaagagagacgacttctgcaagcagaaccaggaggccagcagcgacagatgcagcgccctgctgcaggtgatcttcagccccctggaggaggaggtgaaggccggcatctacagcaagcccggcggctacagactgttcgtgcagaagctgcaggacctgaagaagaagtactacgaggagcccagaaagggcatccaggccgaggagatcctgcagacctacctgaagagcaaggagagcatgaccgacgccatcctgcagaccgaccagaccctgaccgagaaggagaaggagatcgaggtggagagagtgaaggccgagagcgcccaggccagcgccaagatgctgcaggagatgcagagaaagaacgagcagatgatggagcagaaggagagaagctaccaggagcacctgaagcagctgaccgagaagatggagaacgacagagtgcagctgctgaaggagcaggagagaaccctggccctgaagctgcaggagcaggagcagctgctgaaggagggcttccagaaggagagcagaatcatgaagaacgagatccaggacctgcagaccaagatgagaagaagaaaggcctgcaccatcagctag

SEQ ID NO: 83964 - DNA, 1668 bp, synthetic construct
  misc_feature 1..1668: note = Description of Artificial Sequence: Synthetic coding sequence
  source 1..1668: mol_type = other DNA
atggtggtggtggccatcgtgggcctgtacagaaccggcaagagctacctgatgaacaagctggccggcaagaagaagggcttcagcctgggcagcaccgtgcagagccacaccaagggcatctggatgtggtgcgtgccccaccccaagaagcccggccacatcctggtgctgctggacaccgagggcctgggcgacgtggagaagggcgacaaccagaacgacagctggatcttcgccctggccgtgctgctgagcagcaccttcgtgtacaacagcatcggcaccatcaaccagcaggccatggaccagctgtactacgtgaccgagctgacccacagaatcagaagcaagagcagccccgacgagaacgagaacgaggtggaggacagcgccgacttcgtgagcttcttccccgacttcgtgtggaccctgagagacttcagcctggacctggaggccgacggccagcccctgacccccgacgagtacctgacctacagcctgaagctgaagaagggcaccagccagaaggacgagaccttcaacctgcccagactgtgcatcagaaagttcttccccaagaagaagtgcttcgtgttcgacagacccgtgcacagaagaaagctggcccagctggagaagctgcaggacgaggagctggaccccgagttcgtgcagcaggtggccgacttctgcagctacatcttcagcaacagcaagaccaagaccctgagcggcggcatccaggtgaacggccccagactggagagcctggtgctgacctacgtgaacgccatcagcagcggcgacctgccctgcatggagaacgccgtgctggccctggcccagatcgagaacagcgccgccgtgcagaaggccatcgcccactacgagcagcagatgggccagaaggtgcagctgcccaccgagaccctgcaggagctgctggacctgcacagagacagcgagagagaggccatcgaggtgttcatcagaagcagcttcaaggacgtggaccacctgttccagaaggagctggccgcccagctggagaagaagagagacgacttctgcaagcagaaccaggaggccagcagcgacagatgcagcgccctgctgcaggtgatcttcagccccctggaggaggaggtgaaggccggcatctacagcaagcccggcggctacagactgttcgtgcagaagctgcaggacctgaagaagaagtactacgaggagcccagaaagggcatccaggccgaggagatcctgcagacctacctgaagagcaaggagagcatgaccgacgccatcctgcagaccgaccagaccctgaccgagaaggagaaggagatcgaggtggagagagtgaaggccgagagcgcccaggccagcgccaagatgctgcaggagatgcagagaaagaacgagcagatgatggagcagaaggagagaagctaccaggagcacctgaagcagctgaccgagaagatggagaacgacagagtgcagctgctgaaggagcaggagagaaccctggccctgaagctgcaggagcaggagcagctgctgaaggagggcttccagaaggagagcagaatcatgaagaacgagatccaggacctgcagaccaagatgagaagaagaaaggcctgcaccatcagctag

SEQ ID NO: 83965 - DNA, 1776 bp, synthetic construct
  misc_feature 1..1776: note = Description of Artificial Sequence: Synthetic coding sequence
  source 1..1776: mol_type = other DNA
atggcccccgagatcaacctgcccggccccatgagcctgatcgacaacaccaagggccagctggtggtgaaccccgaggccctgaagatcctgagcgccatcacccagcccgtggtggtggtggccatcgtgggcctgtacagaaccggcaagagctacctgatgaacaagctggccggcaagaagaacggcttcagcctgggcagcaccgtgaagagccacaccaagggcatctggatgtggtgcgtgccccaccccaagaagcccgagcacaccctggtgctgctggacaccgagggcctgggcgacatcgagaagggcgacaacgagaacgacagctggatcttcgccctggccatcctgctgagcagcaccttcgtgtacaacagcatgggcaccatcaaccagcaggccatggaccagctgcactacgtgaccgagctgaccgacagaatcaaggccaacagcagccccggcaacaacagcgtggacgacagcgccgacttcgtgagcttcttccccgccttcgtgtggaccctgagagacttcaccctggagctggaggtggacggcgagcccatcaccgccgacgactacctggagctgagcctgaagctgagaaagggcaccgacaagaagagcaagagcttcaacgaccccagactgtgcatcagaaagttcttccccaagagaaagtgcttcgtgttcgactggcccgcccccaagaagtacctggcccacctggagcagctgaaggaggaggagctgaaccccgacttcatcgagcaggtggccgagttctgcagctacatcctgagccacagcaacgtgaagaccctgagcggcggcatccccgtgaacggccccagactggagagcctggtgctgacctacgtgaacgccatcagcagcggcgacctgccctgcatggagaacgccgtgctggccctggcccagatcgagaacagcgccgccgtggagaaggccatcgcccactacgagcagcagatgggccagaaggtgcagctgcccaccgagaccctgcaggagctgctggacctgcacagagacagcgagagagaggccatcgaggtgttcatgaagaacagcttcaaggacgtggaccagatgttccagagaaagctgggcgcccagctggaggccagaagagacgacttctgcaagcagaacagcaaggccagcagcgactgctgcatggccctgctgcaggacatcttcggccccctggaggaggacgtgaagcagggcaccttcagcaagcccggcggctacagactgttcacccagaagctgcaggagctgaagaacaagtactaccaggtgcccagaaagggcatccaggccaaggaggtgctgaagaagtacctggagagcaaggaggacgtggccgacgccctgctgcagaccgaccagagcctgagcgagaaggagaaggccatcgaggtggagagaatcaaggccgagagcgccgaggccgccaagaagatgctggaggagatccagaagaagaacgaggagatgatggagcagaaggagaagagctaccaggagcacgtgaagcagctgaccgagaagatggagagagacagagcccagctgatggccgagcaggagaagaccctggccctgaagctgcaggagcaggagagactgctgaaggagggcttcgagaacgagagcaagagactgcagaaggacatctgggacatccagatgagaagcaagagcctggagcccatctgcaacatcctgtag

SEQ ID NO: 83966 - DNA, 1776 bp, synthetic construct; identical to SEQ ID NO: 83965
  misc_feature 1..1776: note = Description of Artificial Sequence: Synthetic coding sequence
  source 1..1776: mol_type = other DNA

SEQ ID NO: 83967 - DNA, 1323 bp, synthetic construct
  misc_feature 1..1323: note = Description of Artificial Sequence: Synthetic coding sequence
  source 1..1323: mol_type = other DNA
atggcccccgagatccacatgaccggccccatgtgcctgatcgagaacaccaacggcgagctggtggccaaccccgaggccctgaagatcctgagcgccatcacccagcccgtggtggtggtggccatcgtgggcctgtacagaaccggcaagagctacctgatgaacaagctggccggcaagaacaagggcttcagcctgggcagcaccgtgaagagccacaccaagggcatctggatgtggtgcgtgccccaccccaagaagcccgagcacaccctggtgctgctggacaccgagggcctgggcgacgtgaagaagggcgacaaccagaacgacagctggatcttcaccctggccgtgctgctgagcagcaccctggtgtacaacagcatgggcaccatcaaccagcaggccatggaccagctgtactacgtgaccgagctgacccacagaatcagaagcaagagcagccccgacgagaacgagaacgaggacagcgccgacttcgtgagcttcttccccgacttcgtgtggaccctgagagacttcagcctggacctggaggccgacggccagcccctgacccccgacgagtacctggagtacagcctgaagctgacccagggcaccagccagaaggacaagaacttcaacctgcccagactgtgcatcagaaagttcttccccaagaagaagtgcttcgtgttcgacctgcccatccacagaagaaagctggcccagctggagaagctgcaggacgaggagctggaccccgagttcgtgcagcaggtggccgacttctgcagctacatcttcagcaacagcaagaccaagaccctgagcggcggcatcaaggtgaacggccccagactggagagcctggtgctgacctacatcaacgccatcagcagaggcgacctgccctgcatggagaacgccgtgctggccctggcccagatcgagaacagcgccgccgtgcagaaggccatcgcccactacgaccagcagatgggccagaaggtgcagctgcccgccgagaccctgcaggagctgctggacctgcacagagtgagcgagagagaggccaccgaggtgtacatgaagaacagcttcaaggacgtggaccacctgttccagaagaagctggccgcccagctggacaagaagagagacgacttctgcaagcagaaccaggaggccagcagcgacagatgcagcgccctgctgcaggtgatcttcagccccctggaggaggaggtgaaggccggcatctacagcaagcccggcggctactgcctgttcatccagaagctgcaggactag

SEQ ID NO: 83968 - DNA, 1788 bp, synthetic construct
  misc_feature 1..1788: note = Description of Artificial Sequence: Synthetic coding sequence
  source 1..1788: mol_type = other DNA
atggcccccgagatccacatgaccggccccatgtgcctgatcgagaacaccaacggcgagctggtggccaaccccgaggccctgaagatcctgagcgccatcacccagcccgtggtggtggtggccatcgtgggcctgtacagaaccggcaagagctacctgatgaacaagctggccggcaagaacaagggcttcagcctgggcagcaccgtgaagagccacaccaagggcatctggatgtggtgcgtgccccaccccaagaagcccgagcacaccctggtgctgctggacaccgagggcctgggcgacgtgaagaagggcgacaaccagaacgacagctggatcttcaccctggccgtgctgctgagcagcaccctggtgtacaacagcatgggcaccatcaaccagcaggccatggaccagctgtactacgtgaccgagctgacccacagaatcagaagcaagagcagccccgacgagaacgagaacgaggacagcgccgacttcgtgagcttcttccccgacttcgtgtggaccctgagagacttcagcctggacctggaggccgacggccagcccctgacccccgacgagtacctggagtacagcctgaagctgacccagggcaccagccagaaggacaagaacttcaacctgcccagactgtgcatcagaaagttcttccccaagaagaagtgcttcgtgttcgacctgcccatccacagaagaaagctggcccagctggagaagctgcaggacgaggagctggaccccgagttcgtgcagcaggtggccgacttctgcagctacatcttcagcaacagcaagaccaagaccctgagcggcggcatcaaggtgaacggccccagactggagagcctggtgctgacctacatcaacgccatcagcagaggcgacctgccctgcatggagaacgccgtgctggccctggcccagatcgagaacagcgccgccgtgcagaaggccatcgcccactacgaccagcagatgggccagaaggtgcagctgcccgccgagaccctgcaggagctgctggacctgcacagagtgagcgagagagaggccaccgaggtgtacatgaagaacagcttcaaggacgtggaccacctgttccagaagaagctggccgcccagctggacaagaagagagacgacttctgcaagcagaaccaggaggccagcagcgacagatgcagcgccctgctgcaggtgatcttcagccccctggaggaggaggtgaaggccggcatctacagcaagcccggcggctactgcctgttcatccagaagctgcaggacctggagaagaagtactacgaggagcccagaaagggcatccaggccgaggagatcctgcagacctacctgaagagcaaggagagcgtgaccgacgccatcctgcagaccgaccagatcctgaccgagaaggagaaggagatcgaggtggagtgcgtgaaggccgagagcgcccaggccagcgccaagatggtggaggagatgcagatcaagtaccagcagatgatggaggagaaggagaagagctaccaggagcacgtgaagcagctgaccgagaagatggagagagagagagcccagctgctggaggagcaggagaagaccctgaccagcaagctgcaggagcaggccagagtgctgaaggagagatgccagggcgagagcacccagctgcagaacgagatccagaagctgcagaagaccctgaagaagaagaccaagagatacatgagccacaagctgaagatctag

SEQ ID NO: 83969 - DNA, 1692 bp, synthetic construct
  misc_feature 1..1692: note = Description of Artificial Sequence: Synthetic coding sequence
  source 1..1692: mol_type = other DNA
atggcccccgagatccacatgaccggccccatgtgcctgatcgagaacaccaacggcgagctggtggccaaccccgaggccctgaagatcctgagcgccatcacccagcccgtggtggtggtggccatcgtgggcctgtacagaaccggcaagagctacctgatgaacaagctggccggcaagaacaagggcttcagcctgggcagcaccgtgaagagccacaccaagggcatctggatgtggtgcgtgccccaccccaagaagcccgagcacaccctggtgctgctggacaccgagggcctgggcgacgtgaagaagggcgacaaccagaacgacagctggatcttcaccctggccgtgctgctgagcagcaccctggtgtacaacagcatgggcaccatcaaccagcaggccatggaccagctgtactacgtgaccgagctgacccacagaatcagaagcaagagcagccccgacgagaacgagaacgaggacagcgccgacttcgtgagcttcttccccgacttcgtgtggaccctgagagacttcagcctggacctggaggccgacggccagcccctgacccccgacgagtacctggagtacagcctgaagctgacccagggcaacagaaagctggcccagctggagaagctgcaggacgaggagctggaccccgagttcgtgcagcaggtggccgacttctgcagctacatcttcagcaacagcaagaccaagaccctgagcggcggcatcaaggtgaacggccccagactggagagcctggtgctgacctacatcaacgccatcagcagaggcgacctgccctgcatggagaacgccgtgctggccctggcccagatcgagaacagcgccgccgtgcagaaggccatcgcccactacgaccagcagatgggccagaaggtgcagctgcccgccgagaccctgcaggagctgctggacctgcacagagtgagcgagagagaggccaccgaggtgtacatgaagaacagcttcaaggacgtggaccacctgttccagaagaagctggccgcccagctggacaagaagagagacgacttctgcaagcagaaccaggaggccagcagcgacagatgcagcgccctgctgcaggtgatcttcagccccctggaggaggaggtgaaggccggcatctacagcaagcccggcggctactgcctgttcatccagaagctgcaggacctggagaagaagtactacgaggagcccagaaagggcatccaggccgaggagatcctgcagacctacctgaagagcaaggagagcgtgaccgacgccatcctgcagaccgaccagatcctgaccgagaaggagaaggagatcgaggtggagtgcgtgaaggccgagagcgcccaggccagcgccaagatggtggaggagatgcagatcaagtaccagcagatgatggaggagaaggagaagagctaccaggagcacgtgaagcagctgaccgagaagatggagagagagagagcccagctgctggaggagcaggagaagaccctgaccagcaagctgcaggagcaggccagagtgctgaaggagagatgccagggcgagagcacccagctgcagaacgagatccagaagctgcagaagaccctgaagaagaagaccaagagatacatgagccacaagctgaagatctag

SEQ ID NO: 83970 - DNA, 414 bp, synthetic construct
  misc_feature 1..414: note = Description of Artificial Sequence: Synthetic coding sequence
  source 1..414: mol_type = other DNA
caggacgaggagctggaccccgagttcgtgcagcaggtggccgacttctgcagctacatcttcagcaacagcaagaccaagaccctgagcggcggcatcaaggccgaggagatcctgcagacctacctgaagagcaaggagagcgtgaccgacgccatcctgcagaccgaccagatcctgaccgagaaggagaaggagatcgaggtggagtgcgtgaaggccgagagcgcccaggccagcgccaagatggtggaggagatgcagatcaagtaccagcagatgatggaggagaaggagaagagctaccaggagcacgtgaagcagctgaccgagaagatggagagagagagagcccagctgctggaggagcaggagaagaccctgaccagcaagctgcaggtgagcaagtgctag

SEQ ID NO: 83971 - DNA, 1923 bp, synthetic construct
  misc_feature 1..1923: note = Description of Artificial Sequence: Synthetic coding sequence
  source 1..1923: mol_type = other DNA
atgggcgagagaaccctgcacgccgccgtgcccacccccggctaccccgagagcgagagcatcatgatggcccccatctgcctggtggagaaccaggaggagcagctgaccgtgaacagcaaggccctggagatcctggacaagatcagccagcccgtggtggtggtggccatcgtgggcctgtacagaaccggcaagagctacctgatgaacagactggccggcaagagaaacggcttccccctgggcagcaccgtgcagagcgagaccaagggcatctggatgtggtgcgtgccccacctgagcaagcccaaccacaccctggtgctgctggacaccgagggcctgggcgacgtggagaagagcaaccccaagaacgacagctggatcttcgccctggccgtgctgctgagcagcagcttcgtgtacaacagcgtgagcaccatcaaccaccaggccctggagcagctgcactacgtgaccgagctggccgagctgatcagagccaagagctgccccagacccgacgaggccgaggacagcagcgagttcgccagcttcttccccgacttcatctggaccgtgagagacttcaccctggagctgaagctggacggcaaccccatcaccgaggacgagtacctggagaacgccctgaagctgatccccggcaagaaccccaagatccagaacagcaacatgcccagagagtgcatcagacacttcttcagaaagagaaagtgcttcgtgttcgacagacccaccaacgacaagcagtacctgaaccacatggacgaggtgcccgaggagaacctggagagacacttcctgatgcagagcgacaacttctgcagctacatcttcacccacgccaagaccaagaccctgagagagggcatcatcgtgaccggcaagagactgggcaccctggtggtgacctacgtggacgccatcaacagcggcgccgtgccctgcctggagaacgccgtgaccgccctggcccagctggagaaccccgccgccgtgcagagagccgccgaccactacagccagcagatggcccagcagctgagactgcccaccgacaccctgcaggagctgctggacgtgcacgccgcctgcgagagagaggccatcgccgtgttcatggagcacagcttcaaggacgagaaccacgagttccagaagaagctggtggacaccatcgagaagaagaagggcgacttcgtgctgcagaacgaggaggccagcgccaagtactgccaggccgagctgaagagactgagcgagcacctgaccgagagcatcctgagaggcatcttcagcgtgcccggcggccacaacctgtacctggaggagaagaagcaggtggagtgggactacaagctggtgcccagaaagggcgtgaaggccaacgaggtgctgcagaacttcctgcagagccaggtggtggtggaggagagcatcctgcagagcgacaaggccctgaccgccggcgagaaggccatcgccgccgagagagccatgaaggaggccgccgagaaggagcaggagctgctgagagagaagcagaaggagcagcagcagatgatggaggcccaggagagaagcttccaggagtacatggcccagatggagaagaagctggaggaggagagagagaacctgctgagagagcacgagagactgctgaagcacaagctgaaggtgcaggaggagatgctgaaggaggagttccagaagaagagcgagcagctgaacaaggagatcaaccagctgaaggagaagatcgagagcaccaagaacgagcagctgagactgctgaagatcctggacatggccagcaacatcatgatcgtgaccctgcccggcgccagcaagctgctgggcgtgggcaccaagtacctgggcagcagaatctag

SEQ ID NO: 83972 - DNA, 1761 bp, synthetic construct
  misc_feature 1..1761: note = Description of Artificial Sequence: Synthetic coding sequence
  source 1..1761: mol_type = other DNA
atggccctggagatccacatgagcgaccccatgtgcctgatcgagaacttcaacgagcagctgaaggtgaaccaggaggccctggagatcctgagcgccatcacccagcccgtggtggtggtggccatcgtgggcctgtacagaaccggcaagagctacctgatgaacaagctggccggcaagaacaagggcttcagcgtggccagcaccgtgcagagccacaccaagggcatctggatctggtgcgtgccccaccccaactggcccaaccacaccctggtgctgctggacaccgagggcctgggcgacgtggagaaggccgacaacaagaacgacatccagatcttcgccctggccctgctgctgagcagcaccttcgtgtacaacaccgtgaacaagatcgaccagggcgccatcgacctgctgcacaacgtgaccgagctgaccgacctgctgaaggccagaaacagccccgacctggacagagtggaggaccccgccgacagcgccagcttcttccccgacctggtgtggaccctgagagacttctgcctgggcctggagatcgacggccagctggtgacccccgacgagtacctggagaacagcctgagacccaagcagggcagcgaccagagagtgcagaacttcaacctgcccagactgtgcatccagaagttcttccccaagaagaagtgcttcatcttcgacctgcccgcccaccagaagaagctggcccagctggagaccctgcccgacgacgagctggagcccgagttcgtgcagcaggtgaccgagttctgcagctacatcttcagccacagcatgaccaagaccctgcccggcggcatcatggtgaacggcagcagactgaagaacctggtgctgacctacgtgaacgccatcagcagcggcgacctgccctgcatcgagaacgccgtgctggccctggcccagagagagaacagcgccgccgtgcagaaggccatcgcccactacgaccagcagatgggccagaaggtgcagctgcccatggagaccctgcaggagctgctggacctgcacagaaccagcgagagagaggccatcgaggtgttcatgaagaacagcttcaaggacgtggaccagagcttccagaaggagctggagaccctgctggacgccaagcagaacgacatctgcaagagaaacctggaggccagcagcgactactgcagcgccctgctgaaggacatcttcggccccctggaggaggccgtgaagcagggcatctacagcaagcccggcggccacaacctgttcatccagaagaccgaggagctgaaggccaagtactacagagagcccagaaagggcatccaggccgaggaggtgctgcagaagtacctgaagagcaaggagagcgtgagccacgccatcctgcagaccgaccaggccctgaccgagaccgagaagaagaagaaggaggcccaggtgaaggccgaggccgagaaggccgaggcccagagactggccgccatccagagacagaacgagcagatgatgcaggagagagagagactgcaccaggagcaggtgagacagatggagatcgccaagcagaactggctggccgagcagcagaagatgcaggagcagcagatgcaggagcaggccgcccagctgagcaccaccttccaggcccagaacagaagcctgctgagcgagctgcagcacgcccagagaaccgtgaacaacgacgacccctgcgtgctgctgtag

SEQ ID NO: 83973 - DNA, 1761 bp, synthetic construct; identical to SEQ ID NO: 83972
  misc_feature 1..1761: note = Description of Artificial Sequence: Synthetic coding sequence
  source 1..1761: mol_type = other DNA

SEQ ID NO: 83974 - DNA, 1452 bp, synthetic construct
  misc_feature 1..1452: note = Description of Artificial Sequence: Synthetic coding sequence
  source 1..1452: mol_type = other DNA
atggccctggagatccacatgagcgaccccatgtgcctgatcgagaacttcaacgagcagctgaaggtgaaccaggaggccctggagatcctgagcgccatcacccagcccgtggtggtggtggccatcgtgggcctgtacagaaccggcaagagctacctgatgaacaagctggccggcaagaacaagggcttcagcgtggccagcaccgtgcagagccacaccaagggcatctggatctggtgcgtgccccaccccaactggcccaaccacaccctggtgctgctggacaccgagggcctgggcgacgtggagaaggccgacaacaagaacgacatccagatcttcgccctggccctgctgctgagcagcaccttcgtgtacaacaccgtgaacaagatcgaccagggcgccatcgacctgctgcacaacgtgaccgagctgaccgacctgctgaaggccagaaacagccccgacctggacagagtggaggaccccgccgacagcgccagcttcttccccgacctggtgtggaccctgagagacttctgcctgggcctggagatcgacggccagctggtgacccccgacgagtacctggagaacagcctgagacccaagcagggcagcgaccagagagtgcagaacttcaacctgcccagactgtgcatccagaagttcttccccaagaagaagtgcttcatcttcgacctgcccgcccaccagaagaagctggcccagctggagaccctgcccgacgacgagctggagcccgagttcgtgcagcaggtgaccgagttctgcagctacatcttcagccacagcatgaccaagaccctgcccggcggcatcatggtgaacggcagcagactgaagaacctggtgctgacctacgtgaacgccatcagcagcggcgacctgccctgcatcgagaacgccgtgctggccctggcccagagagagaacagcgccgccgtgcagaaggccatcgcccactacgaccagcagatgggccagaaggtgcagctgcccatggagaccctgcaggagctgctggacctgcacagaaccagcgagagagaggccatcgaggtgttcatgaagaacagcttcaaggacgtggaccagagcttccagaaggagctggagaccctgctggacgccaagcagaacgacatctgcaagagaaacctggaggccagcagcgactactgcagcgccctgctgaaggacatcttcggccccctggaggaggccgtgaagcagggcatctacagcaagcccggcggccacaacctgttcatccagaagaccgaggagctgaaggccaagtactacagagagcccagaaagggcatccaggccgaggaggtgctgcagaagtacctgaagagcaaggagagcgtgagccacgccatcctgcagaccgaccaggccctgaccgagacctag

SEQ ID NO: 83975 - DNA, 1917 bp, synthetic construct
  misc_feature 1..1917: note = Description of Artificial Sequence: Synthetic coding sequence
  source 1..1917: mol_type = other DNA
atggccagcgagatccacatgcccggccccgtgtgcctgaccgagaacaccaagggccacctggtggtgaacagcgaggccctggagatcctgagcgccatcacccagcccgtggtggtggtggccatcgtgggcctgtacagaaccggcaagagctacctgatgaacaagctggccggcaagaacaagggcttccccctgggctgcaccgtgaagagcgagaccaagggcatctggatgtggtgcgtgccccaccccagcaagcccaaccacaccctgatcctgctggacaccgagggcctgggcgacatggagaagagcgaccccaagagcgacagctggatcttcgccctggccgtgctgctgagcagcagcttcgtgtacaacagcatgggcaccatcaaccaccaggccctggagcagctgcactacgtgaccgagctgaccgagctgatcagagccaagagctgccccagacccgacgaggtggaggacagcagcgagttcgtgagcttcttccccgacttcatctggaccgtgagagacttcaccctggagctgaagctggacggccaccccatcaccgaggacgagtacctggagaacgccctgaagctgatcagcggcaagaacccccagatccagaacagcaacaagcccagagagtggatcagacacttcttccccaagcagaagtgcttcgtgttcgacagacccatcaacgacaagaagctgctgctgcacgtggaggaggtgagagaggaccagctggacagcaacttccagatgcagagcgagaacttctgcagctacatcttcacccacgccaagaccaagaccctgagagagggcatcctggtgaccggcaacagactgggcatgctggtggagacctacctggacgccatcaacagcggcgccaccccctgcctggagaacgccatggccgtgctggcccagtgcgagaacagcgccgccgtgcagagagccgccaaccactacagccagcagatggcccagcaggtgagattccccaccgacaccctgcaggagctgctggacgtgcacgccgtgtgcgagagagaggccatcgccgtgttcatggagtacagcttcaaggacaagagccaggagttccagaagaagctggtggacaccatggagaagaagaaggaggacttcgtgctgcagaacgaggaggccagcgccaagtactgccaggccgagctgaagagactgagcgagctgctgaccgagagcatcagcagaggcaccttcttcgtgcccggcggccacaacatctacctggaggccaagaagaagatcgagcaggactacaccctggtgcccagaaagggcgtgaaggccgacgaggtgctgcagagcttcctgcagagccaggtggtgatcgaggagagcatcctgcagagcgacaaggccctgaccgccggcgagaaggccatcgccgccaagcaggccaagaaggaggccgccgagaaggagcaggagctgctgagacagaagcagaaggagcagcagcagatgatggaggcccaggagagaagcttccaggagaacatcgcccagctgaagaagaagatggagagagagagagagaactacatgagagagctgagaaagatgctgagccacaagatgaaggtgctggaggagctgctgaccgagggcttcaaggagatcttcgagagcctgaacgaggagatcaacagactgaaggagcagatcgaggccgccgagaacgaggagcccagcgtgttcagccagatcctggacgtggccggcagcatcttcatcgccgccctgcccggcgccgccaagctggtggacctgggcatgaagatcctgagcagcctgtgcaacagactgagaaaccccggcaagaagatcatcagctag

SEQ ID NO: 83976 - DNA, 1902 bp, synthetic construct
  misc_feature 1..1902: note = Description of Artificial Sequence: Synthetic coding sequence
  source 1..1902: mol_type = other DNA
atggagagcggccccaagatgctggcccccgtgtgcctggtggagaacaacaacgagcagctgctggtgaaccagcaggccatccagatcctggagaagatcagccagcccgtggtggtggtggccatcgtgggcctgtacagaaccggcaagagctacctgatgaaccacctggccggccagaaccacggcttccccctgggcagcaccgtgcagagcgagaccaagggcatctggatgtggtgcgtgccccaccccagcaagcccaaccacaccctggtgctgctggacaccgagggcctgggcgacgtggagaagggcgaccccaagaacgacagctggatcttcgccctggccgtgctgctgtgcagcaccttcgtgtacaacagcatgagcaccatcaaccaccaggccctggagcagctgcactacgtgaccgagctgaccgagctgatcaaggccaagagcagccccagacccgacggcgtggaggacagcaccgagttcgtgagcttcttccccgacttcctgtggaccgtgagagacttcaccctggagctgaagctgaacggccaccccatcaccgaggacgagtacctggagaacgccctgaagctgatccagggcaacaaccccagagtgcagaccagcaacttccccagagagtgcatcagaagattcttccccaagagaaagtgcttcgtgttcgacagacccaccaacgacaaggacctgctggccaacatcgagaaggtgagcgagaagcagctggaccccaagttccaggagcagaccaacatcttctgcagctacatcttcacccacgccagaaccaagaccctgagagagggcatcaccgtgaccggcaacagactgggcaccctggccgtgacctacgtggaggccatcaacagcggcgccgtgccctgcctggagaacgccgtgatcaccctggcccagagagagaacagcgccgccgtgcagagagccgccgactactacagccagcagatggcccagagagtgaagctgcccaccgacaccctgcaggagctgctggacatgcacgccgcctgcgagagagaggccatcgccatcttcatggagcacagcttcaaggacgagaaccaggagttccagaagaagttcatggagaccaccatgaacaagaagggcgacttcctgctgcagaacgaggagagcagcgtgcagtactgccaggccaagctgaacgagctgagcaagggcctgatggagagcatcagcgccggcagcttcagcgtgcccggcggccacaagctgtacatggagaccaaggagagaatcgagcaggactactggcaggtgcccagaaagggcgtgaaggccaaggaggtgttccagagattcctggagagccagatggtgatcgaggagagcatcctgcagagcgacaaggccctgaccgacagagagaaggccgtggccgtggacagagccaagaaggaggccgccgagaaggagcaggagctgctgaagcagaagctgcaggagcagcagcagcagatggaggcccaggacaagagcagaaaggagaacatcgcccagctgaaggagaagctgcagatggagagagagcacctgctgagagagcagatcatgatgctggagcacacccagaaggtgcagaacgactggctgcacgagggcttcaagaagaagtacgaggagatgaacgccgagatcagccagttcaagagaatgatcgacaccaccaagaacgacgacaccccctggatcgccagaaccctggacaacctggccgacgagctgaccgccatcctgagcgcccccgccaagctgatcggccacggcgtgaagggcgtgagcagcctgttcaagaagcacaagctgcccttctag

SEQ ID NO: 83977 - DNA, 1512 bp, synthetic construct
  misc_feature 1..1512: note = Description of Artificial Sequence: Synthetic coding sequence
  source 1..1512: mol_type = other DNA
atgagcaccatcaaccaccaggccctggagcagctgcactacgtgaccgagctgaccgagctgatcaaggccaagagcagccccagacccgacggcgtggaggacagcaccgagttcgtgagcttcttccccgacttcctgtggaccgtgagagacttcaccctggagctgaagctgaacggccaccccatcaccgaggacgagtacctggagaacgccctgaagctgatccagggcaacaaccccagagtgcagaccagcaacttccccagagagtgcatcagaagattcttccccaagagaaagtgcttcgtgttcgacagacccaccaacgacaaggacctgctggccaacatcgagaaggtgagcgagaagcagctggaccccaagttccaggagcagaccaacatcttctgcagctacatcttcacccacgccagaaccaagaccctgagagagggcatcaccgtgaccggcaacagactgggcaccctggccgtgacctacgtggaggccatcaacagcggcgccgtgccctgcctggagaacgccgtgatcaccctggcccagagagagaacagcgccgccgtgcagagagccgccgactactacagccagcagatggcccagagagtgaagctgcccaccgacaccctgcaggagctgctggacatgcacgccgcctgcgagagagaggccatcgccatcttcatggagcacagcttcaaggacgagaaccaggagttccagaagaagttcatggagaccaccatgaacaagaagggcgacttcctgctgcagaacgaggagagcagcgtgcagtactgccaggccaagctgaacgagctgagcaagggcctgatggagagcatcagcgccggcagcttcagcgtgcccggcggccacaagctgtacatggagaccaaggagagaatcgagcaggactactggcaggtgcccagaaagggcgtgaaggccaaggaggtgttccagagattcctggagagccagatggtgatcgaggagagcatcctgcagagcgacaaggccctgaccgacagagagaaggccgtggccgtggacagagccaagaaggaggccgccgagaaggagcaggagctgctgaagcagaagctgcaggagcagcagcagcagatggaggcccaggacaagagcagaaaggagaacatcgcccagctgaaggagaagctgcagatggagagagagcacctgctgagagagcagatcatgatgctggagcacacccagaaggtgcagaacgactggctgcacgagggcttcaagaagaagtacgaggagatgaacgccgagatcagccagttcaagagaatgatcgacaccaccaagaacgacgacaccccctggatcgccagaaccctggacaacctggccgacgagctgaccgccatcctgagcgcccccgccaagctgatcggccacggcgtgaagggcgtgagcagcctgttcaagaagcacaagctgcccttctag

SEQ ID NO: 83978 - DNA, 1815 bp, synthetic construct
  misc_feature 1..1815: note = Description of Artificial Sequence: Synthetic coding sequence
  source 1..1815: mol_type = other DNA
atggagagcggccccaagatgctggcccccgtgtgcctggtggagaacaacaacgagcagctgctggtgaaccagcaggccatccagatcctggagaagatcagccagcccgtggtggtggtggccatcgtgggcctgtacagaaccggcaagagctacctgatgaaccacctggccggccagaaccacggcttccccctggacaccgagggcctgggcgacgtggagaagggcgaccccaagaacgacagctggatcttcgccctggccgtgctgctgtgcagcaccttcgtgtacaacagcatgagcaccatcaaccaccaggccctggagcagctgcactacgtgaccgagctgaccgagctgatcaaggccaagagcagccccagacccgacggcgtggaggacagcaccgagttcgtgagcttcttccccgacttcctgtggaccgtgagagacttcaccctggagctgaagctgaacggccaccccatcaccgaggacgagtacctggagaacgccctgaagctgatccagggcaacaaccccagagtgcagaccagcaacttccccagagagtgcatcagaagattcttccccaagagaaagtgcttcgtgttcgacagacccaccaacgacaaggacctgctggccaacatcgagaaggtgagcgagaagcagctggaccccaagttccaggagcagaccaacatcttctgcagctacatcttcacccacgccagaaccaagaccctgagagagggcatcaccgtgaccggcaacagactgggcaccctggccgtgacctacgtggaggccatcaacagcggcgccgtgccctgcctggagaacgccgtgatcaccctggcccagagagagaacagcgccgccgtgcagagagccgccgactactacagccagcagatggcccagagagtgaagctgcccaccgacaccctgcaggagctgctggacatgcacgccgcctgcgagagagaggccatcgccatcttcatggagcacagcttcaaggacgagaaccaggagttccagaagaagttcatggagaccaccatgaacaagaagggcgacttcctgctgcagaacgaggagagcagcgtgcagtactgccaggccaagctgaacgagctgagcaagggcctgatggagagcatcagcgccggcagcttcagcgtgcccggcggccacaagctgtacatggagaccaaggagagaatcgagcaggactactggcaggtgcccagaaagggcgtgaaggccaaggaggtgttccagagattcctggagagccagatggtgatcgaggagagcatcctgcagagcgacaaggccctgaccgacagagagaaggccgtggccgtggacagagccaagaaggaggccgccgagaaggagcaggagctgctgaagcagaagctgcaggagcagcagcagcagatggaggcccaggacaagagcagaaaggagaacatcgcccagctgaaggagaagctgcagatggagagagagcacctgctgagagagcagatcatgatgctggagcacacccagaaggtgcagaacgactggctgcacgagggcttcaagaagaagtacgaggagatgaacgccgagatcagccagttcaagagaatgatcgacaccaccaagaacgacgacaccccctggatcgccagaaccctggacaacctggccgacgagctgaccgccatcctgagcgcccccgccaagctgatcggccacggcgtgaagggcgtgagcagcctgttcaagaagcacaagctgcccttctag

SEQ ID NO: 83979 - DNA, 1299 bp, synthetic construct
  misc_feature 1..1299: note = Description of Artificial Sequence: Synthetic coding sequence
  source 1..1299: mol_type = other DNA
atgaagagcaccaagcccagcctgagccccagcaagccccagagcagcctggtgatccccaccagcctgttctgcaagaccttccccttccacttcatgttcgacaaggacatgaccatcctgcagttcggcaacggcatcagaagactgatgaacagaagagacttccagggcaagcccaacttcgaggagtacttcgagatcctgacccccaagatcaaccagaccttcagcggcatcatgaccatgctgaacatgcagttcgtggtgagagtgagaagatgggacaacagcgtgaagaagagcagcagagtgatggacctgaagggccagatgatctacatcgtggagagcagcgccatcctgttcctgggcagcccctgcgtggacagactggaggacttcaccggcagaggcctgtacctgagcgacatccccatccacaacgccctgagagacgtggtgctgatcggcgagcaggccagagcccaggacggcctgaagaagagactgggcaagctgaaggccaccctggagcaggcccaccaggccctggaggaggagaagaagaagaccgtggacctgctgtgcagcatcttcccctgcgaggtggcccagcagctgtggcagggccaggtggtgcaggccaagaagttcagcaacgtgaccatgctgttcagcgacatcgtgggcttcaccgccatctgcagccagtgcagccccctgcaggtgatcaccatgctgaacgccctgtacaccagattcgaccagcagtgcggcgagctggacgtgtacaaggtggagaccatcggcgacgcctactgcgtggccggcggcctgcacaaggagagcgacacccacgccgtgcagatcgccctgatggccctgaagatgatggagctgagcgacgaggtgatgagcccccacggcgagcccatcaagatgagaatcggcctgcacagcggcagcgtgttcgccggcgtggtgggcgtgaagatgcccagatactgcctgttcggcaacaacgtgaccctggccaacaagttcgagagctgcagcgtgcccagaaagatcaacgtgagccccaccacctacagactgctgaaggactgccccggcttcgtgttcacccccagaagcagagaggagctgccccccaacttccccagcgagatccccggcatctgccacttcctggacgcctaccagcagggcaccaacagcaagccctgcttccagaagaaggacgtggaggacggcaacgccaacttcctgggcaaggccagcggcatcgactag

SEQ ID NO: 83980 - DNA, 1875 bp, synthetic construct
  misc_feature 1..1875: note = Description of Artificial Sequence: Synthetic coding sequence
  source 1..1875: mol_type = other DNA
atgttctgcaccaagctgaaggacctgaagatcaccggcgagtgccccttcagcctgctggcccccggccaggtgcccaacgagagcagcgaggaggccgccggcagcagcgagagctgcaaggccaccgtgcccatctgccaggacatccccgagaagaacatccaggagagcctgccccagagaaagaccagcagaagcagagtgtacctgcacaccctggccgagagcatctgcaagctgatcttccccgagttcgagagactgaacgtggccctgcagagaaccctggccaagcacaagatcaaggagagcagaaagagcctggagagagaggacttcgagaagaccatcgccgagcaggccgtggccgccggcgtgcccgtggaggtgatcaaggagagcctgggcgaggaggtgttcaagatctgctacgaggaggacgagaacatcctgggcgtggtgggcggcaccctgaaggacttcctgaacagcttcagcaccctgctgaagcagagcagccactgccaggaggccggcaagagaggcagactggaggacgccagcatcctgtgcctggacaaggaggacgacttcctgcacgtgtactacttcttccccaagagaaccaccagcctgatcctgcccggcatcatcaaggccgccgcccacgtgctgtacgagaccgaggtggaggtgagcctgatgcccccctgcttccacaacgactgcagcgagttcgtgaaccagccctacctgctgtacagcgtgcacatgaagagcaccaagcccagcctgagccccagcaagccccagagcagcctggtgatccccaccagcctgttctgcaagaccttccccttccacttcatgttcgacaaggacatgaccatcctgcagttcggcaacggcatcagaagactgatgaacagaagagacttccagggcaagcccaacttcgaggagtacttcgagatcctgacccccaagatcaaccagaccttcagcggcatcatgaccatgctgaacatgcagttcgtggtgagagtgagaagatgggacaacagcgtgaagaagagcagcagagtgatggacctgaagggccagatgatctacatcgtggagagcagcgccatcctgttcctgggcagcccctgcgtggacagactggaggacttcaccggcagaggcctgtacctgagcgacatccccatccacaacgccctgagagacgtggtgctgatcggcgagcaggccagagcccaggacggcctgaagaagagactgggcaagctgaaggccaccctggagcaggcccaccaggccctggaggaggagaagaagaagaccgtggacctgctgtgcagcatcttcccctgcgaggtggcccagcagctgtggcagggccaggtggtgcaggccaagaagttcagcaacgtgaccatgctgttcagcgacatcgtgggcttcaccgccatctgcagccagtgcagccccctgcaggtgatcaccatgctgaacgccctgtacaccagattcgaccagcagtgcggcgagctggacgtgtacaaggtggagaccatcggcgacgcctactgcgtggccggcggcctgcacaaggagagcgacacccacgccgtgcagatcgccctgatggccctgaagatgatggagctgagcgacgaggtgatgagcccccacggcgagcccatcaagatgagaatcggcctgcacagcggcagcgtgttcgccggcgtggtgggcgtgaagatgcccagatactgcctgttcggcaacaacgtgaccctggccaacaagttcgagagctgcagcgtgcccagaaagatcaacgtgagccccaccacctacagatag

SEQ ID NO: 83981 - DNA, 2292 bp, synthetic construct
  misc_feature 1..2292: note = Description of Artificial Sequence: Synthetic coding sequence
  source 1..2292: mol_type = other DNA
atgagcagaagaaagatcagcagcgagagcttcagcagcctgggcagcgactacctggagaccagccccgaggaggagggcgagtgccccctgagcagactgtgctggaacggcagcagaagcccccccggccccctggagcccagccccgccgccgccgccgccgccgccgcccccgcccccacccccgccgccagcgccgccgccgccgccgccaccgccggcgccagaagagtgcagagaagaagaagagtgaacctggacagcctgggcgagagcatcagcagactgaccgcccccagcccccagaccatccagcagaccctgaagagaaccctgcagtactacgagcaccaggtgatcggctacagagacgccgagaagaacttccacaacatcagcaacagatgcagctacgccgaccacagcaacaaggaggagatcgaggacgtgagcggcatcctgcagtgcaccgccaacatcctgggcctgaagttcgaggagatccagaagagattcggcgaggagttcttcaacatctgcttccacgagaacgagagagtgctgagagccgtgggcggcaccctgcaggacttcttcaacggcttcgacgccctgctggagcacatcagaaccagcttcggcaagcaggccaccctggagagccccagcttcctgtgcaaggagctgcccgagggcaccctgatgctgcactacttccacccccaccacatcgtgggcttcgccatgctgggcatgatcaaggccgccggcaagaagatctacagactggacgtggaggtggagcaggtggccaacgagaagctgtgcagcgacgtgagcaaccccggcaactgcagctgcctgaccttcctgatcaaggagtgcgagaacaccaacatcatgaagaacctgccccagggcaccagccaggtgcccgccgacctgagaatcagcatcaacaccttctgcagagccttccccttccacctgatgttcgaccccagcatgagcgtgctgcagctgggcgagggcctgagaaagcagctgagatgcgacacccacaaggtgctgaagttcgaggactgcttcgagatcgtgagccccaaggtgaacgccaccttcgagagagtgctgctgagactgagcacccccttcgtgatcagaaccaagcccgaggccagcggcagcgagaacaaggacaaggtgatggaggtgaagggccagatgatccacgtgcccgagagcaacagcatcctgttcctgggcagcccctgcgtggacaagctggacgagctgatgggcagaggcctgcacctgagcgacatccccatccacgacgccaccagagacgtgatcctggtgggcgagcaggccaaggcccaggacggcctgaagaagagaatggacaagctgaaggccaccctggagagaacccaccaggccctggaggaggagaagaagaagaccgtggacctgctgtacagcatcttccccggcgacgtggcccagcagctgtggcagggccagcaggtgcaggccagaaagttcgacgacgtgaccatgctgttcagcgacatcgtgggcttcaccgccatctgcgcccagtgcacccccatgcaggtgatcagcatgctgaacgagctgtacaccagattcgaccaccagtgcggcttcctggacatctacaaggtggagaccatcggcgacgcctactgcgtggccgccggcctgcacagaaagagcctgtgccacgccaagcccatcgccctgatggccctgaagatgatggagctgagcgaggaggtgctgacccccgacggcagacccatccagccccagagaagcgagctgctgttcagcttccccgtgagcatccagctggtgcccgaccagcaccagagcgagaccgacctgggcaccgagaagatgagaatcggcatccacagcggcagcgtgctggccggcgtggtgggcgtgagaatgcccagatactgcctgttcggcaacaacgtgaccctggccagcaagttcgagagcggcagccaccccagaagaatcaacgtgagccccaccacctaccagctgctgaagagagaggagagcttcaccttcatccccagaagcagagaggagctgcccgacaacttccccaaggagatccccggcatctgctacttcctggaggtgagaaccggccccaagccccccaagcccagcctgagcagcagcagaatcaagaaggtgagctacaacatcggcaccatgttcctgagagagaccagcctgtag

SEQ ID NO: 83982 - DNA, 2199 bp, synthetic construct
  misc_feature 1..2199: note = Description of Artificial Sequence: Synthetic coding sequence
  source 1..2199: mol_type = other DNA
atgagcagaagaaagatcagcagcgagagcttcagcagcctgggcagcgactacctggagaccagccccgaggaggagggcgagtgccccctgagcagactgtgctggaacggcagcagaagcccccccggccccctggagcccagccccgccgccgccgccgccgccgccgcccccgcccccacccccgccgccagcgccgccgccgccgccgccaccgccggcgccagaagagtgcagagaagaagaagagtgaacctggacagcctgggcgagagcatcagcagactgaccgcccccagcccccagaccatccagcagaccctgaagagaaccctgcagtactacgagcaccaggtgatcggctacagagacgccgagaagaacttccacaacatcagcaacagatgcagctacgccgaccacagcaacaaggaggagatcgaggacgtgagcggcatcctgcagtgcaccgccaacatcctgggcctgaagttcgaggagatccagaagagattcggcgaggagttcttcaacatctgcttccacgagaacgagagagtgctgagagccgtgggcggcaccctgcaggacttcttcaacggcttcgacgccctgctggagcacatcagaaccagcttcggcaagcaggccaccctggagagccccagcttcctgtgcaaggagctgcccgagggcaccctgatgctgcactacttccacccccaccacatcgtgggcttcgccatgctgggcatgatcaaggccgccggcaagaagatctacagactggacgtggaggtggagcaggtggccaacgagaagctgtgcagcgacgtgagcaaccccggcaactgcagctgcctgaccttcctgatcaaggagtgcgagaacaccaacatcatgaagaacctgccccagggcaccagccaggtgcccgccgacctgagaatcagcatcaacaccttctgcagagccttccccttccacctgatgttcgaccccagcatgagcgtgctgcagctgggcgagggcctgagaaagcagctgagatgcgacacccacaaggtgctgaagttcgaggactgcttcgagatcgtgagccccaaggtgaacgccaccttcgagagagtgctgctgagactgagcacccccttcgtgatcagaaccaagcccgaggccagcggcagcgagaacaaggacaaggtgatggaggtgaagggccagatgatccacgtgcccgagagcaacagcatcctgttcctgggcagcccctgcgtggacaagctggacgagctgatgggcagaggcctgcacctgagcgacatccccatccacgacgccaccagagacgtgatcctggtgggcgagcaggccaaggcccaggacggcctgaagaagagaatggacaagctgaaggccaccctggagagaacccaccaggccctggaggaggagaagaagaagaccgtggacctgctgtacagcatcttccccggcgacgtggcccagcagctgtggcagggccagcaggtgcaggccagaaagttcgacgacgtgaccatgctgttcagcgacatcgtgggcttcaccgccatctgcgcccagtgcacccccatgcaggtgatcagcatgctgaacgagctgtacaccagattcgaccaccagtgcggcttcctggacatctacaaggtggagaccatcggcgacgcctactgcgtggccgccggcctgcacagaaagagcctgtgccacgccaagcccatcgccctgatggccctgaagatgatggagctgagcgaggaggtgctgacccccgacggcagacccatccagatgagaatcggcatccacagcggcagcgtgctggccggcgtggtgggcgtgagaatgcccagatactgcctgttcggcaacaacgtgaccctggccagcaagttcgagagcggcagccaccccagaagaatcaacgtgagccccaccacctaccagctgctgaagagagaggagagcttcaccttcatccccagaagcagagaggagctgcccgacaacttccccaaggagatccccggcatctgctacttcctggaggtgagaaccggccccaagccccccaagcccagcctgagcagcagcagaatcaagaaggtgagctacaacatcggcaccatgttcctgagagagaccagcctgtag

SEQ ID NO: 83983 - DNA, 2073 bp, synthetic construct
  misc_feature 1..2073: note = Description of Artificial Sequence: Synthetic coding sequence
  source 1..2073: mol_type = other DNA
atgttctgcaccaagctgaaggacctgaagatcaccggcgagtgccccttcagcctgctggcccccggccaggtgcccaacgagagcagcgaggaggccgccggcagcagcgagagctgcaaggccaccgtgcccatctgccaggacatccccgagaagaacatccaggagagcctgccccagagaaagaccagcagaagcagagtgtacctgcacaccctggccgagagcatctgcaagctgatcttccccgagttcgagagactgaacgtggccctgcagagaaccctggccaagcacaagatcaaggagagcagaaagagcctggagagagaggacttcgagaagaccatcgccgagcaggccgtggccgccggcgtgcccgtggaggtgatcaaggagagcctgggcgaggaggtgttcaagatctgctacgaggaggacgagaacatcctgggcgtggtgggcggcaccctgaaggacttcctgaacagcttcagcaccctgctgaagcagagcagccactgccaggaggccggcaagagaggcagactggaggacgccagcatcctgtgcctggacaaggaggacgacttcctgcacgtgtactacttcttccccaagagaaccaccagcctgatcctgcccggcatcatcaaggccgccgcccacgtgctgtacgagaccgaggtggaggtgagcctgatgcccccctgcttccacaacgactgcagcgagttcgtgaaccagccctacctgctgtacagcgtgcacatgaagagcaccaagcccagcctgagccccagcaagccccagagcagcctggtgatccccaccagcctgttctgcaagaccttccccttccacttcatgttcgacaaggacatgaccatcctgcagttcggcaacggcatcagaagactgatgaacagaagagacttccagggcaagcccaacttcgaggagtacttcgagatcctgacccccaagatcaaccagaccttcagcggcatcatgaccatgctgaacatgcagttcgtggtgagagtgagaagatgggacaacagcgtgaagaagagcagcagagtgatggacctgaagggccagatgatctacatcgtggagagcagcgccatcctgttcctgggcagcccctgcgtggacagactggaggacttcaccggcagaggcctgtacctgagcgacatccccatccacaacgccctgagagacgtggtgctgatcggcgagcaggccagagcccaggacggcctgaagaagagactgggcaagctgaaggccaccctggagcaggcccaccaggccctggaggaggagaagaagaagaccgtggacctgctgtgcagcatcttcccctgcgaggtggcccagcagctgtggcagggccaggtggtgcaggccaagaagttcagcaacgtgaccatgctgttcagcgacatcgtgggcttcaccgccatctgcagccagtgcagccccctgcaggtgatcaccatgctgaacgccctgtacaccagattcgaccagcagtgcggcgagctggacgtgtacaaggtggagaccatcggcgacgcctactgcgtggccggcggcctgcacaaggagagcgacacccacgccgtgcagatcgccctgatggccctgaagatgatggagctgagcgacgaggtgatgagcccccacggcgagcccatcaagatgagaatcggcctgcacagcggcagcgtgttcgccggcgtggtgggcgtgaagatgcccagatactgcctgttcggcaacaacgtgaccctggccaacaagttcgagagctgcagcgtgcccagaaagatcaacgtgagccccaccacctacagactgctgaaggactgccccggcttcgtgttcacccccagaagcagagaggagctgccccccaacttccccagcgagatccccggcatctgccacttcctggacgcctaccagcagggcaccaacagcaagccctgcttccagaagaaggacgtggaggacggcaacgccaacttcctgggcaaggccagcggcatcgactag

SEQ ID NO: 83984 - DNA, 2073 bp, synthetic construct; identical to SEQ ID NO: 83983
  misc_feature 1..2073: note = Description of Artificial Sequence: Synthetic coding sequence
  source 1..2073: mol_type = other DNA

SEQ ID NO: 83985 - DNA, 2073 bp, synthetic construct; identical to SEQ ID NO: 83983
  misc_feature 1..2073: note = Description of Artificial Sequence: Synthetic coding sequence
  source 1..2073: mol_type = other DNA

SEQ ID NO: 83986 - DNA, 2073 bp, synthetic construct; identical to SEQ ID NO: 83983
  misc_feature 1..2073: note = Description of Artificial Sequence: Synthetic coding sequence
  source 1..2073: mol_type = other DNA

SEQ ID NO: 83987 - DNA, 2073 bp, synthetic construct; identical to SEQ ID NO: 83983
  misc_feature 1..2073: note = Description of Artificial Sequence: Synthetic coding sequence
  source 1..2073: mol_type = other DNA

SEQ ID NO: 83988 - DNA, 1860 bp, synthetic construct
  misc_feature 1..1860: note = Description of Artificial Sequence: Synthetic coding sequence
  source 1..1860: mol_type = other DNA
atgtacggcttcgtgaaccacgccctggagctgctggtgatcagaaactacggccccgaggtgtgggaggacatcaagaaggaggcccagctggacgaggagggccagttcctggtgagaatcatctacgacgacagcaagacctacgacctggtggccgccgccagcaaggtgctgaacctgaacgccggcgagatcctgcagatgttcggcaagatgttcttcgtgttctgccaggagagcggctacgacaccatcctgagagtgctgggcagcaacgtgagagagttcctgcagaacctggacgccctgcacgaccacctggccaccatctaccccggcatgagagcccccagcttcagatgcaccgacgccgagaagggcaagggcctgatcctgcactactacagcgagagagagggcctgcaggacatcgtgatcggcatcatcaagaccgtggcccagcagatccacggcaccgagatcgacatgaaggtgatccagcagagaaacgaggagtgcgaccacacccagttcctgatcgaggagaaggagagcaaggaggaggacttctacgaggacctggacagattcgaggagaacggcacccaggagagcagaatcagcccctacaccttctgcaaggccttccccttccacatcatcttcgacagagacctggtggtgacccagtgcggcaacgccatctacagagtgctgccccagctgcagcccggcaactgcagcctgctgagcgtgttcagcctggtgagaccccacatcgacatcagcttccacggcatcctgagccacatcaacaccgtgttcgtgctgagaagcaaggagggcctgctggacgtggagaagctggagtgcgaggacgagctgaccggcaccgagatcagctgcctgagactgaagggccagatgatctacctgcccgaggccgacagcatcctgttcctgtgcagccccagcgtgatgaacctggacgacctgaccagaagaggcctgtacctgagcgacatccccctgcacgacgccaccagagacctggtgctgctgggcgagcagttcagagaggagtacaagctgacccaggagctggagatcctgaccgacagactgcagctgaccctgagagccctggaggacgagaagaagaagaccgacaccctgctgtacagcgtgctgccccccagcgtggccaacgagctgagacacaagagacccgtgcccgccaagagatacgacaacgtgaccatcctgttcagcggcatcgtgggcttcaacgccttctgcagcaagcacgccagcggcgagggcgccatgaagatcgtgaacctgctgaacgacctgtacaccagattcgacaccctgaccgacagcagaaagaaccccttcgtgtacaaggtggagaccgtgggcgacaagtacatgaccgtgagcggcctgcccgagccctgcatccaccacgccagaagcatctgccacctggccctggacatgatggagatcgccggccaggtgcaggtggacggcgagagcgtgcagatcaccatcggcatccacaccggcgaggtggtgaccggcgtgatcggccagagaatgcccagatactgcctgttcggcaacaccgtgaacctgaccagcagaaccgagaccaccggcgagaagggcaagatcaacgtgagcgagtacacctacagatgcctgatgagccccgagaacagcgacccccagttccacctggagcacagaggccccgtgagcatgaagggcaagaaggagcccatgcaggtgtggttcctgagcagaaagaacaccggcaccgaggagaccaagcaggacgacgactag

SEQ ID NO: 83989 - DNA, 1656 bp, synthetic construct
  misc_feature 1..1656: note = Description of Artificial Sequence: Synthetic coding sequence
  source 1..1656: mol_type = other DNA
atgttcggcaagatgttcttcgtgttctgccaggagagcggctacgacaccatcctgagagtgctgggcagcaacgtgagagagttcctgcagaacctggacgccctgcacgaccacctggccaccatctaccccggcatgagagcccccagcttcagatgcaccgacgccgagaagggcaagggcctgatcctgcactactacagcgagagagagggcctgcaggacatcgtgatcggcatcatcaagaccgtggcccagcagatccacggcaccgagatcgacatgaaggtgatccagcagagaaacgaggagtgcgaccacacccagttcctgatcgaggagaaggagagcaaggaggaggacttctacgaggacctggacagattcgaggagaacggcacccaggagagcagaatcagcccctacaccttctgcaaggccttccccttccacatcatcttcgacagagacctggtggtgacccagtgcggcaacgccatctacagagtgctgccccagctgcagcccggcaactgcagcctgctgagcgtgttcagcctggtgagaccccacatcgacatcagcttccacggcatcctgagccacatcaacaccgtgttcgtgctgagaagcaaggagggcctgctggacgtggagaagctggagtgcgaggacgagctgaccggcaccgagatcagctgcctgagactgaagggccagatgatctacctgcccgaggccgacagcatcctgttcctgtgcagccccagcgtgatgaacctggacgacctgaccagaagaggcctgtacctgagcgacatccccctgcacgacgccaccagagacctggtgctgctgggcgagcagttcagagaggagtacaagctgacccaggagctggagatcctgaccgacagactgcagctgaccctgagagccctggaggacgagaagaagaagaccgacaccctgctgtacagcgtgctgccccccagcgtggccaacgagctgagacacaagagacccgtgcccgccaagagatacgacaacgtgaccatcctgttcagcggcatcgtgggcttcaacgccttctgcagcaagcacgccagcggcgagggcgccatgaagatcgtgaacctgctgaacgacctgtacaccagattcgacaccctgaccgacagcagaaagaaccccttcgtgtacaaggtggagaccgtgggcgacaagtacatgaccgtgagcggcctgcccgagccctgcatccaccacgccagaagcatctgccacctggccctggacatgatggagatcgccggccaggtgcaggtggacggcgagagcgtgcagatcaccatcggcatccacaccggcgaggtggtgaccggcgtgatcggccagagaatgcccagatactgcctgttcggcaacaccgtgaacctgaccagcagaaccgagaccaccggcgagaagggcaagatcaacgtgagcgagtacacctacagatgcctgatgagccccgagaacagcgacccccagttccacctggagcacagaggccccgtgagcatgaagggcaagaaggagcccatgcaggtgtggttcctgagcagaaagaacaccggcaccgaggagaccaagcaggacgacgactag

SEQ ID NO: 83990 - DNA, 1800 bp, synthetic construct
  misc_feature 1..1800: note = Description of Artificial Sequence: Synthetic coding sequence
  source 1..1800: mol_type = other DNA
atgctgatgtgcttcatcaaggaggcccagctggacgaggagggccagttcctggtgagaatcatctacgacgacagcaagacctacgacctggtggccgccgccagcaaggtgctgaacctgaacgccggcgagatcctgcagatgttcggcaagatgttcttcgtgttctgccaggagagcggctacgacaccatcctgagagtgctgggcagcaacgtgagagagttcctgcagaacctggacgccctgcacgaccacctggccaccatctaccccggcatgagagcccccagcttcagatgcaccgacgccgagaagggcaagggcctgatcctgcactactacagcgagagagagggcctgcaggacatcgtgatcggcatcatcaagaccgtggcccagcagatccacggcaccgagatcgacatgaaggtgatccagcagagaaacgaggagtgcgaccacacccagttcctgatcgaggagaaggagagcaaggaggaggacttctacgaggacctggacagattcgaggagaacggcacccaggagagcagaatcagcccctacaccttctgcaaggccttccccttccacatcatcttcgacagagacctggtggtgacccagtgcggcaacgccatctacagagtgctgccccagctgcagcccggcaactgcagcctgctgagcgtgttcagcctggtgagaccccacatcgacatcagcttccacggcatcctgagccacatcaacaccgtgttcgtgctgagaagcaaggagggcctgctggacgtggagaagctggagtgcgaggacgagctgaccggcaccgagatcagctgcctgagactgaagggccagatgatctacctgcccgaggccgacagcatcctgttcctgtgcagccccagcgtgatgaacctggacgacctgaccagaagaggcctgtacctgagcgacatccccctgcacgacgccaccagagacctggtgctgctgggcgagcagttcagagaggagtacaagctgacccaggagctggagatcctgaccgacagactgcagctgaccctgagagccctggaggacgagaagaagaagaccgacaccctgctgtacagcgtgctgccccccagcgtggccaacgagctgagacacaagagacccgtgcccgccaagagatacgacaacgtgaccatcctgttcagcggcatcgtgggcttcaacgccttctgcagcaagcacgccagcggcgagggcgccatgaagatcgtgaacctgctgaacgacctgtacaccagattcgacaccctgaccgacagcagaaagaaccccttcgtgtacaaggtggagaccgtgggcgacaagtacatgaccgtgagcggcctgcccgagccctgcatccaccacgccagaagcatctgccacctggccctggacatgatggagatcgccggccaggtgcaggtggacggcgagagcgtgcagatcaccatcggcatccacaccggcgaggtggtgaccggcgtgatcggccagagaatgcccagatactgcctgttcggcaacaccgtgaacctgaccagcagaaccgagaccaccggcgagaagggcaagatcaacgtgagcgagtacacctacagatgcctgatgagccccgagaacagcgacccccagttccacctggagcacagaggccccgtgagcatgaagggcaagaaggagcccatgcaggtgtggttcctgagcagaaagaacaccggcaccgaggagaccaagcaggacgacgactag

SEQ ID NO: 83991 - DNA, 1656 bp, synthetic construct; identical to SEQ ID NO: 83989
  misc_feature 1..1656: note = Description of Artificial Sequence: Synthetic coding sequence
  source 1..1656: mol_type = other DNA

SEQ ID NO: 83992 - DNA, 3222 bp, synthetic construct
  misc_feature 1..3222: note = Description of Artificial Sequence: Synthetic coding sequence
  source 1..3222: mol_type = other DNA
atgaagaccctgctgctggacctggccctgtggagcctgctgttccagcccggctggctgagcttcagcagccaggtgagccagaactgccacaacggcagctacgagatcagcgtgctgatgatgggcaacagcgccttcgccgagcccctgaagaacctggaggacgccgtgaacgagggcctggagatcgtgagaggcagactgcagaacgccggcctgaacgtgaccgtgaacgccaccttcatgtacagcgacggcctgatccacaacagcggcgactgcagaagcagcacctgcgagggcctggacctgctgagaaagatcagcaacgcccagagaatgggctgcgtgctgatcggccccagctgcacctacagcaccttccagatgtacctggacaccgagctgagctaccccatgatcagcgccggcagcttcggcctgagctgcgactacaaggagaccctgaccagactgatgagccccgccagaaagctgatgtacttcctggtgaacttctggaagaccaacgacctgcccttcaagacctacagctggagcaccagctacgtgtacaagaacggcaccgagaccgaggactgcttctggtacctgaacgccctggaggccagcgtgagctacttcagccacgagctgggcttcaaggtggtgctgagacaggacaaggagttccaggacatcctgatggaccacaacagaaagagcaacgtgatcatcatgtgcggcggccccgagttcctgtacaagctgaagggcgacagagccgtggccgaggacatcgtgatcatcctggtggacctgttcaacgaccagtacttcgaggacaacgtgaccgcccccgactacatgaagaacgtgctggtgctgaccctgagccccggcaacagcctgctgaacagcagcttcagcagaaacctgagccccaccaagagagacttcgccctggcctacctgaacggcatcctgctgttcggccacatgctgaagatcttcctggagaacggcgagaacatcaccacccccaagttcgcccacgccttcagaaacctgaccttcgagggctacgacggccccgtgaccctggacgactggggcgacgtggacagcaccatggtgctgctgtacaccagcgtggacaccaagaagtacaaggtgctgctgacctacgacacccacgtgaacaagacctaccccgtggacatgagccccaccttcacctggaagaacagcaagctgcccaacgacatcaccggcagaggcccccagatcctgatgatcgccgtgttcaccctgaccggcgccgtggtgctgctgctgctggtggccctgctgatgctgagaaagtacagaaaggactacgagctgagacagaagaagtggagccacatcccccccgagaacatcttccccctggagaccaacgagaccaaccacgtgagcctgaagatcgacgacgacaagagaagagacaccatccagagactgagacagtgcaagtacgacaagaagagagtgatcctgaaggacctgaagcacaacgacggcaacttcaccgagaagcagaagatcgagctgaacaagctgctgcagatcgactactacaacctgaccaagttctacggcaccgtgaagctggacaccatgatcttcggcgtgatcgagtactgcgagagaggcagcctgagagaggtgctgaacgacaccatcagctaccccgacggcaccttcatggactgggagttcaagatcagcgtgctgtacgacatcgccaagggcatgagctacctgcacagcagcaagaccgaggtgcacggcagactgaagagcaccaactgcgtggtggacagcagaatggtggtgaagatcaccgacttcggctgcaacagcatcctgccccccaagaaggacctgtggaccgcccccgagcacctgagacaggccaacatcagccagaagggcgacgtgtacagctacggcatcatcgcccaggagatcatcctgagaaaggagaccttctacaccctgagctgcagagacagaaacgagaagatcttcagagtggagaacagcaacggcatgaagcccttcagacccgacctgttcctggagaccgccgaggagaaggagctggaggtgtacctgctggtgaagaactgctgggaggaggaccccgagaagagacccgacttcaagaagatcgagaccaccctggccaagatcttcggcctgttccacgaccagaagaacgagagctacatggacaccctgatcagaagactgcagctgtacagcagaaacctggagcacctggtggaggagagaacccagctgtacaaggccgagagagacagagccgacagactgaacttcatgctgctgcccagactggtggtgaagagcctgaaggagaagggcttcgtggagcccgagctgtacgaggaggtgaccatctacttcagcgacatcgtgggcttcaccaccatctgcaagtacagcacccccatggaggtggtggacatgctgaacgacatctacaagagcttcgaccacatcgtggaccaccacgacgtgtacaaggtggagaccatcggcgacgcctacatggtggccagcggcctgcccaagagaaacggcaacagacacgccatcgacatcgccaagatggccctggagatcctgagcttcatgggcaccttcgagctggagcacctgcccggcctgcccatctggatcagaatcggcgtgcacagcggcccctgcgccgccggcgtggtgggcatcaagatgcccagatactgcctgttcggcgacaccgtgaacaccgccagcagaatggagagcaccggcctgcccctgagaatccacgtgagcggcagcaccatcgccatcctgaagagaaccgagtgccagttcctgtacgaggtgagaggcgagacctacctgaagggcagaggcaacgagaccacctactggctgaccggcatgaaggaccagaagttcaacctgcccaccccccccaccgtggagaaccagcagagactgcaggccgagttcagcgacatgatcgccaacagcctgcagaagagacaggccgccggcatcagaagccagaagcccagaagagtggccagctacaagaagggcaccctggagtacctgcagctgaacaccaccgacaaggagagcacctacttctag

SEQ ID NO: 83993 - DNA, 3312 bp, synthetic construct
  misc_feature 1..3312: note = Description of Artificial Sequence: Synthetic coding sequence
  source 1..3312: mol_type = other DNA
atgaccgcctgcgccagaagagccggcggcctgcccgaccccggcctgtgcggccccgcctggtgggcccccagcctgcccagactgcccagagccctgcccagactgcccctgctgctgctgctgctgctgctgcagccccccgccctgagcgccgtgttcaccgtgggcgtgctgggcccctgggcctgcgaccccatcttcagcagagccagacccgacctggccgccagactggccgccgccagactgaacagagaccccggcctggccggcggccccagattcgaggtggccctgctgcccgagccctgcagaacccccggcagcctgggcgccgtgagcagcgccctggccagagtgagcggcctggtgggccccgtgaaccccgccgcctgcagacccgccgagctgctggccgaggaggccggcatcgccctggtgccctggggctgcccctggacccaggccgagggcaccaccgcccccgccgtgacccccgccgccgacgccctgtacgccctgctgagagccttcggctgggccagagtggccctggtgaccgccccccaggacctgtgggtggaggccggcagaagcctgagcaccgccctgagagccagaggcctgcccgtggccagcgtgaccagcatggagcccctggacctgagcggcgccagagaggccctgagaaaggtgagagacggccccagagtgaccgccgtgatcatggtgatgcacagcgtgctgctgggcggcgaggagcagagatacctgctggaggccgccgaggagctgggcctgaccgacggcagcctggtgttcctgcccttcgacaccatccactacgccctgagccccggccccgaggccctggccgccctggccaacagcagccagctgagaagagcccacgacgccgtgctgaccctgaccagacactgccccagcgagggcagcgtgctggacagcctgagaagagcccaggagagaagagagctgcccagcgacctgaacctgcagcaggtgagccccctgttcggcaccatctacgacgccgtgttcctgctggccagaggcgtggccgaggccagagccgccgccggcggcagatgggtgagcggcgccgccgtggccagacacatcagagacgcccaggtgcccggcttctgcggcgacctgggcggcgacgaggagccccccttcgtgctgctggacaccgacgccgccggcgacagactgttcgccacctacatgctggaccccgccagaggcagcttcctgagcgccggcaccagaatgcacttccccagaggcggcagcgcccccggccccgaccccagctgctggttcgaccccaacaacatctgcggcggcggcctggagcccggcctggtgttcctgggcttcctgctggtggtgggcatgggcctggccggcgccttcctggcccactacgtgagacacagactgctgcacatgcagatggtgagcggccccaacaagatcatcctgaccgtggacgacatcaccttcctgcacccccacggcggcaccagcagaaaggtggcccagggcagcagaagcagcctgggcgccagaagcatgagcgacatcagaagcggccccagccagcacctggacagccccaacatcggcgtgtacgagggcgacagagtgtggctgaagaagttccccggcgaccagcacatcgccatcagacccgccaccaagaccgccttcagcaagctgcaggagctgagacacgagaacgtggccctgtacctgggcctgttcctggccagaggcgccgagggccccgccgccctgtgggagggcaacctggccgtggtgagcgagcactgcaccagaggcagcctgcaggacctgctggcccagagagagatcaagctggactggatgttcaagagcagcctgctgctggacctgatcaagggcatcagatacctgcaccacagaggcgtggcccacggcagactgaagagcagaaactgcatcgtggacggcagattcgtgctgaagatcaccgaccacggccacggcagactgctggaggcccagaaggtgctgcccgagccccccagagccgaggaccagctgtggaccgcccccgagctgctgagagaccccgccctggagagaagaggcaccctggccggcgacgtgttcagcctggccatcatcatgcaggaggtggtgtgcagaagcgccccctacgccatgctggagctgacccccgaggaggtggtgcagagagtgagaagccccccccccctgtgcagacccctggtgagcatggaccaggcccccgtggagtgcatcctgctgatgaagcagtgctgggccgagcagcccgagctgagacccagcatggaccacaccttcgacctgttcaagaacatcaacaagggcagaaagaccaacatcatcgacagcatgctgagaatgctggagcagtacagcagcaacctggaggacctgatcagagagagaaccgaggagctggagctggagaagcagaagaccgacagactgctgacccagatgctgccccccagcgtggccgaggccctgaagaccggcacccccgtggagcccgagtacttcgagcaggtgaccctgtacttcagcgacatcgtgggcttcaccaccatcagcgccatgagcgagcccatcgaggtggtggacctgctgaacgacctgtacaccctgttcgacgccatcatcggcagccacgacgtgtacaaggtggagaccatcggcgacgcctacatggtggccagcggcctgccccagagaaacggccagagacacgccgccgagatcgccaacatgagcctggacatcctgagcgccgtgggcaccttcagaatgagacacatgcccgaggtgcccgtgagaatcagaatcggcctgcacagcggcccctgcgtggccggcgtggtgggcctgaccatgcccagatactgcctgttcggcgacaccgtgaacaccgccagcagaatggagagcaccggcctgccctacagaatccacgtgaacctgagcaccgtgggcatcctgagagccctggacagcggctaccaggtggagctgagaggcagaaccgagctgaagggcaagggcgccgaggacaccttctggctggtgggcagaagaggcttcaacaagcccatccccaagccccccgacctgcagcccggcagcagcaaccacggcatcagcctgcaggagatcccccccgagagaagaagaaagctggagaaggccagacccggccagttcagctag

SEQ ID NO: 83994 - DNA, 594 bp, synthetic construct
  misc_feature 1..594: note = Description of Artificial Sequence: Synthetic coding sequence
  source 1..594: mol_type = other DNA
atgagaaagtacagaagccactggagccagggcgacagagagggctaccagagaagaagcaactactacgagggcccccacaccagccacagcagccccgccgacagaaccagagaggaggtggtgacccccaccctgcccgagcacaccgccaccagaagccagatggccaccagcctggacttcaagacctacgtggaccaggcctgcagagccgccgaggagttcgtgaacatctactacgagaccatggacaagagaagaagagccctgaccagactgtacctggacaaggccaccctgatctggaacggcaacgccgtgagcggcctggacgccctgaacaacttcttcgacaccctgcccagcagcgagttccaggtgaacatgctggactgccagcccgtgcacgagcaggccacccagagccagaccaccgtgctggtggtgaccagcggcaccgtgaagttcgacggcaacaagcagcacttcttcaaccagaacttcctgctgaccgcccagagcacccccaacaacaccgtgtggaagatcgccagcgactgcttcagattccaggactggagcagcagctag

SEQ ID NO: 83995 - DNA, 606 bp, synthetic construct
  misc_feature 1..606: note = Description of Artificial Sequence: Synthetic coding sequence
  source 1..606: mol_type = other DNA
atgggcaacgtgatggagggcaagagcgtggaggagctgagcagcaccgagtgccaccagtggtacaagaagttcatgaccgagtgccccagcggccagctgaccctgtacgagttcagacagttcttcggcctgaagaacctgagccccagcgccagccagtacgtggagcagatgttcgagaccttcgacttcaacaaggacggctacatcgacttcatggagtacgtggccgccctgagcctggtgctgaagggcaaggtggagcagaagctgagatggtacttcaagctgtacgacgtggacggcaacggctgcatcgacagagacgagctgctgaccatcatccaggccatcagagccatcaacccctgcagcgacaccaccatgaccgccgaggagttcaccgacaccgtgttcagcaagatcgacgtgaacggcgacggcgagctgagcctggaggagttcatcgagggcgtgcagaaggaccagatgctgctggacaccctgaccagaagcctggacctgaccagaatcgtgagaagactgcagaacggcgagcaggacgaggagggcgccgacgaggccgccgaggccgccggctag

SEQ ID NO: 83996 - DNA, 606 bp, synthetic construct; identical to SEQ ID NO: 83995
  misc_feature 1..606: note = Description of Artificial Sequence: Synthetic coding sequence
  source 1..606: mol_type = other DNA

SEQ ID NO: 83997 - DNA, 618 bp, synthetic construct
  misc_feature 1..618: note = Description of Artificial Sequence: Synthetic coding sequence
  source 1..618: mol_type = other DNA
atggagggcaagagcgtggaggagctgagcagcaccgagtgccaccagtggtacaagaagttcatgaccgagtgccccagcggccagctgaccctgtacgagttcagacagttcttcggcctgaagaacctgagccccagcgccagccagtacgtggagcagatgttcgagaccttcgacttcaacaaggacggctacatcgacttcatggagtacgtggccgccctgagcctggtgctgaagggcaaggtggagcagaagctgagatggtacttcaagctgtacgacgtggacggcaacggctgcatcgacagagacgagctgctgaccatcatccagttcccccaccagtaccagaagaccgccatcagagccatcaacccctgcagcgacaccaccatgaccgccgaggagttcaccgacaccgtgttcagcaagatcgacgtgaacggcgacggcgagctgagcctggaggagttcatcgagggcgtgcagaaggaccagatgctgctggacaccctgaccagaagcctggacctgaccagaatcgtgagaagactgcagaacggcgagcaggacgaggagggcgccgacgaggccgccgaggccgccggctag

SEQ ID NO: 83998 - DNA, 606 bp, synthetic construct; identical to SEQ ID NO: 83995
  misc_feature 1..606: note = Description of Artificial Sequence: Synthetic coding sequence
  source 1..606: mol_type = other DNA

SEQ ID NO: 83999 - DNA, 267 bp, synthetic construct
  misc_feature 1..267: note = Description of Artificial Sequence: Synthetic coding sequence
  source 1..267: mol_type = other DNA
atgggcaacgtgatggagggcaagagcgtggaggagctgagcagcaccgagtgccaccagtggtacaagaagttcatgaccgagtgccccagcggccagctgaccctgtacgagttcagacagttcttcggcctgaagaacctgagccccagcgccagccagtacgtggagcagatgttcgagaccttcgacttcaacaaggacggctacatcgacttcatggagtacgtggccgccctgagcctggtgctgaagggcaaggtgtag

SEQ ID NO: 84000 - DNA, 606 bp, synthetic construct; identical to SEQ ID NO: 83995
  misc_feature 1..606: note = Description of Artificial Sequence: Synthetic coding sequence
  source 1..606: mol_type = other DNA

SEQ ID NO: 84001 - DNA, 1020 bp, synthetic construct
  misc_feature 1..1020: note = Description of Artificial Sequence: Synthetic coding sequence
  source 1..1020: mol_type = other DNA
atggaccagaacaacagcctgcccccctacgcccagggcctggccagcccccagggcgccatgacccccggcatccccatcttcagccccatgatgccctacggcaccggcctgaccccccagcccatccagaacaccaacagcctgagcatcctggaggagcagcagagacagcagcagcagcagcagcagcagcagcagcagcagcagcagcagcagcagcagcagcagcagcagcagcagcagcagcagcagcagcagcagcagcagcagcagcagcagcaggccgtggccgccgccgccgtgcagcagagcaccagccagcaggccacccagggcaccagcggccaggccccccagctgttccacagccagaccctgaccaccgcccccctgcccggcaccacccccctgtaccccagccccatgacccccatgacccccatcacccccgccacccccgccagcgagagcagcggcatcgtgccccagctgcagaacatcgtgagcaccgtgaacctgggctgcaagctggacctgaagaccatcgccctgagagccagaaacgccgagtacaaccccaagagattcgccgccgtgatcatgagaatcagagagcccagaaccaccgccctgatcttcagcagcggcaagatggtgtgcaccggcgccaagagcgaggagcagagcagactggccgccagaaagtacgccagagtggtgcagaagctgggcttccccgccaagttcctggacttcaagatccagaacatggtgggcagctgcgacgtgaagttccccatcagactggagggcctggtgctgacccaccagcagttcagcagctacgagcccgagctgttccccggcctgatctacagaatgatcaagcccagaatcgtgctgctgatcttcgtgagcggcaaggtggtgctgaccggcgccaaggtgagagccgagatctacgaggccttcgagaacatctaccccatcctgaagggcttcagaaagaccacctag

SEQ ID NO: 84002 - DNA, 519 bp, synthetic construct
  misc_feature 1..519: note = Description of Artificial Sequence: Synthetic coding sequence
  source 1..519: mol_type = other DNA
atgggccaggagttcagctgggaggaggccgaggccgccggcgagatcgacgtggccgagctgcaggagtggtacaagaagttcgtgatggagtgccccagcggcaccctgttcatgcacgagttcaagagattcttcaaggtgaccgacgacgaggaggccagccagtacgtggagggcatgttcagagccttcgacaagaacggcgacaacaccatcgacttcctggagtacgtggccgccctgaacctggtgctgagaggcaccctggagcacaagctgaagtggaccttcaagatctacgacaaggacggcaacggctgcatcgacagactggagctgctgaacatcgtggagtgcagaagagagctgcagaccgagcagggccagctgctgacccccgaggaggtggtggacagaatcttcctgctggtggacgagaacggcgacggccagctgagcctgaacgagttcgtggagggcgccagaagagacaacctgctgatgcccaccctgtag

SEQ ID NO: 84003 - DNA, 630 bp, synthetic construct
  misc_feature 1..630: note = Description of Artificial Sequence: Synthetic coding sequence
  source 1..630: mol_type = other DNA
atgggcaacggcaagagcatcgccggcgaccagaaggccgtgcccacccaggagacccacgtgtggtacagaaccttcatgatggagtaccccagcggcctgcagaccctgcacgagttcaagaccctgctgggcctgcagggcctgaaccagaaggccaacaagcacatcgaccaggtgtacaacaccttcgacaccaacaaggacggcttcgtggacttcctggagttcatcgccgccgtgaacctgatcatgcaggagaagatggagcagaagctgaagtggtacttcaagctgtacgacgccgacggcaacggcagcatcgacaagaacgagctgctggacatgttcatggccgtgcaggccctgaacggccagcagaccctgagccccgaggagttcatcaacctggtgttccacaagatcgacatcaacaacgacggcgagctgaccctggaggagttcatcaacggcatggccaaggaccaggacctgctggagatcgtgtacaagagcttcgacttcagcaacgtgctgagagtgatctgcaacggcaagcagcccgacatggagaccgacagcagcaagagccccgacaaggccggcctgggcaaggtgaagatgaagtag

SEQ ID NO: 84004 - DNA, 591 bp, synthetic construct
  misc_feature 1..591: note = Description of Artificial Sequence: Synthetic coding sequence
  source 1..591: mol_type = other DNA
atgggcaacggcaagagcatcgccggcgaccagaaggccgtgcccacccaggagacccacgtgtggtacagaaccttcatgatggagtaccccagcggcctgcagaccctgcacgagttcaagaccctgctgggcctgcagggcctgaaccagaaggccaacaagcacatcgaccaggtgtacaacaccttcgacaccaacaaggacggcttcgtggacttcctggagttcatcgccgccgtgaacctgatcatgcaggagaagatggagcagaagctgaagtggtacttcaagctgtacgacgccgacggcaacggcagcatcgacaagaacgagctgctggacatgttcatggccgtgcaggccctgaacggccagcagaccctgagccccgaggagttcatcaacctggtgttccacaagatcgacatcaacaacgacggcaacggcgccaccctgtactggatcaccttccccaccaagggcatcgacttcagaagaatctaccagtggcacggcaagagaagcggcagccccggcgactgcctgcaggagctgagactgctgcagtgcgccgagagcaacctgtag

SEQ ID NO: 84005 - DNA, 348 bp, synthetic construct
  misc_feature 1..348: note = Description of Artificial Sequence: Synthetic coding sequence
  source 1..348: mol_type = other DNA
atgaacgccttcctgctgagcgccctgtgcctgctgggcgcctgggccgccctggccggcggcgtgaccgtgcaggacggcaacttcagcttcagcctggagagcgtgaagaagctgaaggacctgcaggagccccaggagcccagagtgggcaagctgagaaacttcgcccccatccccggcgagcccgtggtgcccatcctgtgcagcaaccccaacttccccgaggagctgaagcccctgtgcaaggagcccaacgcccaggagatcctgcagagactggaggagatcgccgaggaccccggcacctgcgagatctgcgcctacgccgcctgcaccggctgctag

SEQ ID NO: 84006 - DNA, 339 bp, synthetic construct
  misc_feature 1..339: note = Description of Artificial Sequence: Synthetic coding sequence
  source 1..339: mol_type = other DNA
atgggctgcagagccgccagcggcctgctgcccggcgtggccgtggtgctgctgctgctgctgcagagcacccagagcgtgtacatccagtaccagggcttcagagtgcagctggagagcatgaagaagctgagcgacctggaggcccagtgggcccccagccccagactgcaggcccagagcctgctgcccgccgtgtgccaccaccccgccctgccccaggacctgcagcccgtgtgcgccagccaggaggccagcagcatcttcaagaccctgagaaccatcgccaacgacgactgcgagctgtgcgtgaacgtggcctgcaccggctgcctgtag

SEQ ID NO: 84007 - DNA, 594 bp, synthetic construct
  misc_feature 1..594: note = Description of Artificial Sequence: Synthetic coding sequence
  source 1..594: mol_type = other DNA
atgagcggccccagacccgtggtgctgagcggccccagcggcgccggcaagagcaccctgctgaagagactgctgcaggagcacagcggcatcttcggcttcagcgtgagccacaccaccagaaaccccagacccggcgaggagaacggcaaggactactacttcgtgaccagagaggtgatgcagagagacatcgccgccggcgacttcatcgagcacgccgagttcagcggcaacctgtacggcaccagcaaggtggccgtgcaggccgtgcaggccatgaacagaatctgcgtgctggacgtggacctgcagggcgtgagaaacatcaaggccaccgacctgagacccatctacatcagcgtgcagccccccagcctgcacgtgctggagcagagactgagacagagaaacaccgagaccgaggagagcctggtgaagagactggccgccgcccaggccgacatggagagcagcaaggagcccggcctgttcgacgtggtgatcatcaacgacagcctggaccaggcctacgccgagctgaaggaggccctgagcgaggagatcaagaaggcccagagaaccggcgcctag

SEQ ID NO: 84008 - DNA, 594 bp, synthetic construct; identical to SEQ ID NO: 84007
  misc_feature 1..594: note = Description of Artificial Sequence: Synthetic coding sequence
  source 1..594: mol_type = other DNA

SEQ ID NO: 84009 - DNA, 594 bp, synthetic construct; identical to SEQ ID NO: 84007
  misc_feature 1..594: note = Description of Artificial Sequence: Synthetic coding sequence
  source 1..594: mol_type = other DNA

SEQ ID NO: 84010 - DNA, 600 bp, synthetic construct
  misc_feature 1..600: note = Description of Artificial Sequence: Synthetic coding sequence
  source 1..600: mol_type = other DNA
atgagcggccccagacccgtggtgctgagcggccccagcggcgccggcaagagcaccctgctgaagagactgctgcaggagcacagcggcatcttcggcttcagcgtgagcagagagagcagagccctggtggagggctaccacgaggagcccgaggccagaagaggcgagagacagagagaggtgatgcagagagacatcgccgccggcgacttcatcgagcacgccgagttcagcggcaacctgtacggcaccagcaaggtggccgtgcaggccgtgcaggccatgaacagaatctgcgtgctggacgtggacctgcagggcgtgagaaacatcaaggccaccgacctgagacccatctacatcagcgtgcagccccccagcctgcacgtgctggagcagagactgagacagagaaacaccgagaccgaggagagcctggtgaagagactggccgccgcccaggccgacatggagagcagcaaggagcccggcctgttcgacgtggtgatcatcaacgacagcctggaccaggcctacgccgagctgaaggaggccctgagcgaggagatcaagaaggcccagagaaccggcgcctag

SEQ ID NO: 84011 - DNA, 729 bp, synthetic construct
  misc_feature 1..729: note = Description of Artificial Sequence: Synthetic coding sequence
  source 1..729: mol_type = other DNA
atgagcggccccagacccgtggtgctgagcggccccagcggcgccggcaagagcaccctgctgaagagactgctgcaggagcacagcggcatcttcggcttcagcgtgagccacaccaccagaaaccccagacccggcgaggagaacggcaaggactactacttcgtgaccagagaggtgatgcagagagacatcgccgccggcgacttcatcgagcacgccgagttcagcggcaacctgtacggcaccagcaaggtggccgtgcaggccgtgcaggccatgaacagaatctgcgtgctggacgtggacctgcagggcgtgagaaacatcaaggccaccgacctgagacccatctacatcagcgtgcagccccccagcctgcacgtgctgagactgagacagagaaacaccgagaccgaggagagcctggtgaagagactggccgccgcccaggccgacatggagagcagcaaggagcccggcctgttcgacgtggtgatcatcaacgacagcctggaccaggcctacgccgagctgaaggaggccctgagcgaggtgggccccagcctgtgcctgcccggccagggccccagaggcggcctgggcgccagacccctgctgagcatgagacccctgagaaagagcagaaagctgaagggccccgcccccgaggcctgctgcctgttcagcgcccccagagcccacaccggccccggccagcagcactag

SEQ ID NO: 84012 - DNA, 657 bp, synthetic construct
  misc_feature 1..657: note = Description of Artificial Sequence: Synthetic coding sequence
  source 1..657: mol_type = other DNA
atgctgagaagacccctggccggcctggccgccgccgccctgggcagagccccccccgacggcatgagcggccccagacccgtggtgctgagcggccccagcggcgccggcaagagcaccctgctgaagagactgctgcaggagcacagcggcatcttcggcttcagcgtgagccacaccaccagaaaccccagacccggcgaggagaacggcaaggactactacttcgtgaccagagaggtgatgcagagagacatcgccgccggcgacttcatcgagcacgccgagttcagcggcaacctgtacggcaccagcaaggtggccgtgcaggccgtgcaggccatgaacagaatctgcgtgctggacgtggacctgcagggcgtgagaaacatcaaggccaccgacctgagacccatctacatcagcgtgcagccccccagcctgcacgtgctggagcagagactgagacagagaaacaccgagaccgaggagagcctggtgaagagactggccgccgcccaggccgacatggagagcagccccgccggcctggagagctgccccaccgccgccgtgagaaccgccgccggccagagccccgcctgcctgatgtggagcagcctgaccaccgcctggaccagacccacccagagctag

SEQ ID NO: 84013 - DNA, 594 bp, synthetic construct; identical to SEQ ID NO: 84007
  misc_feature 1..594: note = Description of Artificial Sequence: Synthetic coding sequence
  source 1..594: mol_type = other DNA

SEQ ID NO: 84014 - DNA, 726 bp, synthetic construct
  misc_feature 1..726: note = Description of Artificial Sequence: Synthetic coding sequence
  source 1..726: mol_type = other DNA
atgctgagaagacccctggccggcctggccgccgccgccctgggcagagccccccccgacggcatgagcggccccagacccgtggtgctgagcggccccagcggcgccggcaagagcaccctgctgaagagactgctgcaggagcacagcggcatcttcggcttcagcgtgagccacaccaccagaaaccccagacccggcgaggagaacggcaaggactactacttcgtgaccagagaggtgatgcagagagacatcgccgccggcgacttcatcgagcacgccgagttcagcggcaacctgtacggcaccagcaaggtggccgtgcaggccgtgcaggccatgaacagaatctgcgtgctggacgtggacctgcagggcgtgagaaacatcaaggccaccgacctgagacccatctacatcagcgtgcagccccccagcctgcacgtgctggagcagagactgagacagagaaacaccgagaccgaggagagcctggtgaagagactggccgccgcccaggccgacatggagagcagaaaccaggagagcagcaaggacagaagactgagactggccgtgtgcagcagacaccccggccccatccaggaccagggcagcagcatcgagccccccccctggcaggccatcagacagctgtgcgccctgggccagcacgtggagtggagaagatgctgcccctgcggctggaacatcctgggctag

SEQ ID NO: 84015 - DNA, 594 bp, synthetic construct; identical to SEQ ID NO: 84007
  misc_feature 1..594: note = Description of Artificial Sequence: Synthetic coding sequence
  source 1..594: mol_type = other DNA

SEQ ID NO: 84016 - DNA, 657 bp, synthetic construct
  misc_feature 1..657: note = Description of Artificial Sequence: Synthetic coding sequence
  source 1..657: mol_type = other DNA
atgctgagaagacccctggccggcctggccgccgccgccctgggcagagccccccccgacggcatgagcggccccagacccgtggtgctgagcggccccagcggcgccggcaagagcaccctgctgaagagactgctgcaggagcacagcggcatcttcggcttcagcgtgagccacaccaccagaaaccccagacccggcgaggagaacggcaaggactactacttcgtgaccagagaggtgatgcagagagacatcgccgccggcgacttcatcgagcacgccgagttcagcggcaacctgtacggcaccagcaaggtggccgtgcaggccgtgcaggccatgaacagaatctgcgtgctggacgtggacctgcagggcgtgagaaacatcaaggccaccgacctgagacccatctacatcagcgtgcagccccccagcctgcacgtgctggagcagagactgagacagagaaacaccgagaccgaggagagcctggtgaagagactggccgccgcccaggccgacatggagagcagcaaggagcccggcctgttcgacgtggtgatcatcaacgacagcctggaccaggcctacgccgagctgaaggaggccctgagcgaggagatcaagaaggcccagagaaccggcgcctag

SEQ ID NO: 84017 - DNA, 762 bp, synthetic construct
  misc_feature 1..762: note = Description of Artificial Sequence: Synthetic coding sequence
  source 1..762: mol_type = other DNA
atggccggcagccagaaggaggagatcatgcccccccagcagggcgtgcccttccaggagagcggctgctggggcagcatgggcgcccagagcagagagagaagcggcagagaccacagcggcacctggatctgcgccggcggcagccaggagaccttccacctgggcgcccccgtggagaccacctgcctggccggcatgagcggccccagacccgtggtgctgagcggccccagcggcgccggcaagagcaccctgctgaagagactgctgcaggagcacagcggcatcttcggcttcagcgtgagccacaccaccagaaaccccagacccggcgaggagaacggcaaggactactacttcgtgaccagagaggtgatgcagagagacatcgccgccggcgacttcatcgagcacgccgagttcagcggcaacctgtacggcaccagcaaggtggccgtgcaggccgtgcaggccatgaacagaatctgcgtgctggacgtggacctgcagggcgtgagaaacatcaaggccaccgacctgagacccatctacatcagcgtgcagccccccagcctgcacgtgctggagcagagactgagacagagaaacaccgagaccgaggagagcctggtgaagagactggccgccgcccaggccgacatggagagcagcaaggagcccggcctgttcgacgtggtgatcatcaacgacagcctggaccaggcctacgccgagctgaaggaggccctgagcgagtag

SEQ ID NO: 84018 - DNA, 516 bp, synthetic construct
  misc_feature 1..516: note = Description of Artificial Sequence: Synthetic coding sequence
  source 1..516: mol_type = other DNA
atgagcggccccagacccgtggtgctgagcggccccagcggcgccggcaagagcaccctgctgaagagactgctgcaggagcacagcggcatcttcggcttcagcgtgagcagagagagcaacaccaccagaaaccccagacccggcgaggagaacggcaaggactactacttcgtgaccagagaggtgatgcagagagacatcgccgccggcgacttcatcgagcacgccgagttcagcggcaacctgtacggcaccagcaaggtggccgtgcaggccgtgcaggccatgaacagaatctgcgtgctggacgtggacctgcagggcgtgagaaacatcaaggccaccgacctgagacccatctacatcagcgtgcagccccccagcctgcacgtgctggagcagagactgagacagagaaacaccgagaccgaggagagcctggtgaagagactggccgccgcccaggccgacatggagagcgagatcaagaaggcccagagaaccggcgcctag

SEQ ID NO: 84019 - DNA, 819 bp, synthetic construct
  misc_feature 1..819: note = Description of Artificial Sequence: Synthetic coding sequence
  source 1..819: mol_type = other DNA
atggccggcagccagaaggaggagatcatgcccccccagcagggcgtgcccttccaggagagcggctgctggggcagcatgggcgcccagagcagagagagaagcggcagagaccacagcggcacctggatctgcgccggcggcagccaggagaccttccacctgggcgcccccgtggagaccacctgcctggccgccagcctgctgacccccagacacgtgggcccccaggcctgcggcgccgagagagccttcggcagctgggaggagcaccccgccgaggaggccgcccccggcgcccagagacacctgtggctgcagagagtgccctaccacgaggagcccgaggccagaagaggcgagagacagagagaggtgatgcagagagacatcgccgccggcgacttcatcgagcacgccgagttcagcggcaacctgtacggcaccagcaaggtggccgtgcaggccgtgcaggccatgaacagaatctgcgtgctggacgtggacctgcagggcgtgagaaacatcaaggccaccgacctgagacccatctacatcagcgtgcagccccccagcctgcacgtgctggagcagagactgagacagagaaacaccgagaccgaggagagcctggtgaagagactggccgccgcccaggccgacatggagagcagaaaccaggagagcagcaaggacagaagactgagactggccgtgtgcagcagacaccccggccccatccaggaccagggcagcagcatcgagccccccccctggcaggccatcagacagctgtgcgccctgggccagcacgtgtag

SEQ ID NO: 84020 - DNA, 654 bp, synthetic construct
  misc_feature 1..654: note = Description of Artificial Sequence: Synthetic coding sequence
  source 1..654: mol_type = other DNA
atgctgagaagacccctggccggcctggccgccgccgccctgggcagagccccccccgacggcatgagcggccccagacccgtggtgctgagcggccccagcggcgccggcaagagcaccctgctgaagagactgctgcaggagcacagcggcatcttcggcttcagcgtgagccacaccaccagaaaccccagacccggcgaggagaacggcaaggactactacttcgtgaccagagaggtgatgcagagagacatcgccgccggcgacttcatcgagcacgccgagttcagcggcaacctgtacggcaccagcaaggtggccgtgcaggccgtgcaggccatgaacagaatctgcgtgctggacgtggacctgcagggcgtgagaaacatcaaggccaccgacctgagacccatctacatcagcgtgcagccccccagcctgcacgtgctggagcagagactgagacagagaaacaccgagaccgaggagagcctggtgaagagactggccgccgcccaggccgacatggagagcagcaaggagcccggcctgttcgacgtggtgatcatcaacgacagcctggaccaggcctacgccgagctgaaggaggccctgagcgaggagatcaagaaggcccagagaaccggctag

SEQ ID NO: 84021 - DNA, 915 bp, synthetic construct
  misc_feature 1..915: note = Description of Artificial Sequence: Synthetic coding sequence
  source 1..915: mol_type = other DNA
atgaacagagccttcagcagaaagaaggacaagacctggatgcacacccccgaggccctgagcaagcacttcatcccctacaacgccaagttcctgggcagcaccgaggtggagcagcccaagggcaccgaggtggtgagagacgccgtgagaaagctgaagttcgccagacacatcaagaagagcgagggccagaagatccccaaggtggagctgcagatcagcatctacggcgtgaagatcctggagcccaagaccaaggaggtgcagcacaactgccagctgcacagaatcagcttctgcgccgacgacaagaccgacaagagaatcttcaccttcatctgcaaggacagcgagagcaacaagcacctgtgctacgtgttcgacagcgagaagtgcgccgaggagatcaccctgaccatcggccaggccttcgacctggcctacagaaagttcctggagagcggcggcaaggacgtggagaccagaaagcagatcgccggcctgcagaagagaatccaggacctggagaccgagaacatggagctgaagaacaaggtgcaggacctggagaaccagctgagaatcacccaggtgagcgccccccccgccggcagcatgacccccaagagccccagcaccgacatcttcgacatgatccccttcagccccatcagccaccagagcagcatgcccaccagaaacggcacccagcccccccccgtgcccagcagaagcaccgagatcaagagagacctgttcggcgccgagcccttcgaccccttcaactgcggcgccgccgacttcccccccgacatccagagcaagctggacgagatgcaggagggcttcaagatgggcctgaccctggagggcaccgtgttctgcctggaccccctggacagcagatgctag

SEQ ID NO: 84022 - DNA, 915 bp, synthetic construct; identical to SEQ ID NO: 84021
  misc_feature 1..915: note = Description of Artificial Sequence: Synthetic coding sequence
  source 1..915: mol_type = other DNA

SEQ ID NO: 84023 - DNA, 915 bp, synthetic construct; identical to SEQ ID NO: 84021
  misc_feature 1..915: note = Description of Artificial Sequence: Synthetic coding sequence
  source 1..915: mol_type = other DNA

SEQ ID NO: 84024 - DNA, 504 bp, synthetic construct
  misc_feature 1..504: note = Description of Artificial Sequence: Synthetic coding sequence
  source 1..504: mol_type = other DNA
atgaacagagccttcagcagaaagaaggacaagacctggatgcacacccccgaggccctgagcaagcacttcatcccctacaacgccaagttcctgggcagcaccgaggtggagcagcccaagggcaccgaggtggtgagagacgccgtgagaaagctgaagttcgccagacacatcaagaagagcgagggccagaagatccccaaggtggagctgcagatcagcatctacggcgtgaagatcctggagcccaagaccaaggaggtgcagcacaactgccagctgcacagaatcagcttctgcgccgacgacaagaccgacaagagaatcttcaccttcatctgcaaggacagcgagagcaacaagcacctgtgctacgtgttcgacagcgagaagtgcgtgagcatccccgacgtggtgggctggttcgtgctgttctacaagcccggcatcgtgctgctgctggccctggccaagtacctgaagatgaacaacttcctgtag

SEQ ID NO: 84025 - DNA, 915 bp, synthetic construct; identical to SEQ ID NO: 84021
  misc_feature 1..915: note = Description of Artificial Sequence: Synthetic coding sequence
  source 1..915: mol_type = other DNA

SEQ ID NO: 84026 - DNA, 207 bp, synthetic construct
  misc_feature 1..207: note = Description of Artificial Sequence: Synthetic coding sequence
  source 1..207: mol_type = other DNA
atgaacagagccttcagcagaaagaaggacaagacctggatgcacacccccgaggccctgagcaagcacttcatcccctacaacgccaagttcctgggcagcaccgaggtggagcagcccaagggcaccgaggtggtgagagacgccgtgagaaagctgaagttcgccagacacatcaagaagagcgagggccagaagatcccctag

SEQ ID NO: 84027 - DNA, 504 bp, synthetic construct; identical to SEQ ID NO: 84024
  misc_feature 1..504: note = Description of Artificial Sequence: Synthetic coding sequence
  source 1..504: mol_type = other DNA

SEQ ID NO: 84028 - DNA, 585 bp, synthetic construct
  misc_feature 1..585: note = Description of Artificial Sequence: Synthetic coding sequence
  source 1..585: mol_type = other DNA
atgaccgagaacagcaccagcgcccccgccgccaagcccaagagagccaaggccagcaagaagagcaccgaccaccccaagtacagcgacatgatcgtggccgccatccaggccgagaagaacagagccggcagcagcagacagagcatccagaagtacatcaagagccactacaaggtgggcgagaacgccgacagccagatcaagctgagcatcaagagactggtgaccaccggcgtgctgaagcagaccaagggcgtgggcgccagcggcagcttcagactggccaagagcgacgagcccaagaagagcgtggccttcaagaagaccaagaaggagatcaagaaggtggccacccccaagaaggccagcaagcccaagaaggccgccagcaaggcccccaccaagaagcccaaggccacccccgtgaagaaggccaagaagaagctggccgccacccccaagaaggccaagaagcccaagaccgtgaaggccaagcccgtgaaggccagcaagcccaagaaggccaagcccgtgaagcccaaggccaagagcagcgccaagagagccggcaagaagaagtag

SEQ ID NO: 84029 - DNA, 534 bp, synthetic construct
  misc_feature 1..534: note = Description of Artificial Sequence: Synthetic coding sequence
  source 1..534: mol_type = other DNA
atgaccgagaagagcaccgaccaccccaagtacagcgacatgatcgtggccgccatccaggccgagaagaacagagccggcagcagcagacagagcatccagaagtacatcaagagccactacaaggtgggcgagaacgccgacagccagatcaagctgagcatcaagagactggtgaccaccggcgtgctgaagcagaccaagggcgtgggcgccagcggcagcttcagactggccaagagcgacgagcccaagaagagcgtggccttcaagaagaccaagaaggagatcaagaaggtggccacccccaagaaggccagcaagcccaagaaggccgccagcaaggcccccaccaagaagcccaaggccacccccgtgaagaaggccaagaagaagctggccgccacccccaagaaggccaagaagcccaagaccgtgaaggccaagcccgtgaaggccagcaagcccaagaaggccaagcccgtgaagcccaaggccaagagcagcgccaagagagccggcaagaagaagtag

SEQ ID NO: 84030 - DNA, 411 bp, synthetic construct
  misc_feature 1..411: note = Description of Artificial Sequence: Synthetic coding sequence
  source 1..411: mol_type = other DNA
atggccagaaccaagcagaccgccagaaagagcaccggcggcaaggcccccagaaagcagctggccaccaaggccgccagaaagagcgcccccagcaccggcggcgtgaagaagccccacagatacagacccggcaccgtggccctgagagagatcagaagataccagaagagcaccgagctgctgatcagaaagctgcccttccagagactggtgagagagatcgcccaggacttcaagaccgacctgagattccagagcgccgccatcggcgccctgcaggaggccagcgaggcctacctggtgggcctgttcgaggacaccaacctgtgcgccatccacgccaagagagtgaccatcatgcccaaggacatccagctggccagaagaatcagaggcgagagagcctag

SEQ ID NO: 84031 - DNA, 372 bp, synthetic construct
  misc_feature 1..372: note = Description of Artificial Sequence: Synthetic coding sequence
  source 1..372: mol_type = other DNA
atggccagaaccaagcagaccgccagaaagagcaccggcggcaaggcccccagaaagcagctggccaccaaggccgccagaaagagcgcccccagcaccggcggcgtgaagaagccccacagatacagacccggcaccgtggccctgagagagatcagaagataccagaagagcaccgagctgctgatcagaaagctgcccttccagagactggtgagagagatcgcccaggacttcaagaccgacctgagattccagagcgccgccatcggcgccctgcaggtgaagtggtgggtgggcagactgagagtgtgcatccccgtggtgtaccaggagcagttccagatcgtggcctgcgcctacatcatctag

SEQ ID NO: 84032 - DNA, 411 bp, synthetic construct; identical to SEQ ID NO: 84030
  misc_feature 1..411: note = Description of Artificial Sequence: Synthetic coding sequence
  source 1..411: mol_type = other DNA

SEQ ID NO: 84033 - DNA, 411 bp, synthetic construct; identical to SEQ ID NO: 84030
  misc_feature 1..411: note = Description of Artificial Sequence: Synthetic coding sequence
  source 1..411: mol_type = other DNA

SEQ ID NO: 84034 - DNA, 411 bp, synthetic construct; identical to SEQ ID NO: 84030
  misc_feature 1..411: note = Description of Artificial Sequence: Synthetic coding sequence
  source 1..411: mol_type = other DNA

SEQ ID NO: 84035 - DNA, 1047 bp, synthetic construct
  misc_feature 1..1047: note = Description of Artificial Sequence: Synthetic coding sequence
  source 1..1047: mol_type = other DNA
atgcccgacgagctgaccgagcccggcagagccacccccgccagagccagcagcttcctgatcgagaacctgctggccgccgaggccaagggcgccggcagagccacccagggcgacggcagcagagaggacgaggaggaggacgacgacgaccccgaggacgaggacgccgagcaggccagaagaagaagactgcagagaagaagacagctgctggccggcaccggccccggcggcgaggccagagccagagccctgctgggccccggcgccctgggcctgggccccagacccccccccggccccggcccccccttcgccctgggctgcggcggcgccgccagatggtaccccagagcccacggcggctacggcggcggcctgagccccgacaccagcgacagagacagccccgagaccggcgaggagatgggcagagccgagggcgcctggcccagaggccccggccccggcgccgtgcagagagaggccgccgagctggccgccagaggccccgccgccggcaccgaggaggccagcgagctggccgaggtgcccgccgccgccggcgagaccagaggcggcgtgggcgtgggcggcggcagaaagaagaagaccagaaccgtgttcagcagaagccaggtgttccagctggagagcaccttcgacctgaagagatacctgagcagcgccgagagagccggcctggccgccagcctgcagctgaccgagacccaggtgaagatctggttccagaacagaagaaacaagtggaagagacagctggccgccgagctggaggccgccagcctgagcccccccggcgcccagagactggtgagagtgcccgtgctgtaccacgagagcccccccgccgccgccgccgccggcccccccgccaccctgcccttccccctggcccccgccgcccccgccccccccccccccctgctgggcttcagcggcgccctggcctaccccctggccgccttccccgccgccgccagcgtgcccttcctgagagcccagatgcccggcctggtgtag

SEQ ID NO: 84036 - DNA, 822 bp, synthetic construct
  misc_feature 1..822: note = Description of Artificial Sequence: Synthetic coding sequence
  source 1..822: mol_type = other DNA
atgggcagcaaggaggacgccggcaagggctgccccgccgccggcggcgtgagcagcttcaccatccagagcatcctgggcggcggccccagcgaggcccccagagagcccgtgggctggcccgccagaaagagaagcctgagcgtgagcagcgaggaggaggagcccgacgacggctggaaggcccccgcctgcttctgccccgaccagcacggccccaaggagcagggccccaagcaccacccccccatccccttcccctgcctgggcacccccaagggcagcggcggcagcggccccggcggcctggagagaacccccttcctgagccccagccacagcgacttcaaggaggagaaggagagactgctgcccgccggcagccccagccccggcagcgagagacccagagacggcggcgccgagagacaggccggcgccgccaagaagaagaccagaaccgtgttcagcagaagccaggtgtaccagctggagagcaccttcgacatgaagagatacctgagcagcagcgagagagcctgcctggccagcagcctgcagctgaccgagacccaggtgaagacctggttccagaacagaagaaacaagtggaagagacagctgagcgccgagctggaggccgccaacatggcccacgccagcgcccagaccctggtgagcatgcccctggtgttcagagacagcagcctgctgagagtgcccgtgcccagaagcctggccttccccgcccccctgtactaccccggcagcaacctgagcgccctgcccctgtacaacctgtacaacaagctggactactag

SEQ ID NO: 84037 - DNA, 1074 bp, synthetic construct
  misc_feature 1..1074: note = Description of Artificial Sequence: Synthetic coding sequence
  source 1..1074: mol_type = other DNA
atgcccgagcccggccccgacgccgccggcaccgccagcgcccagccccagcccccccccccccccccccccgcccccaaggagagccccttcagcatcaagaacctgctgaacggcgaccaccacagacccccccccaagccccagcccccccccagaaccctgttcgcccccgccagcgccgccgccgccgccgccgccgccgccgccgccgccgccaagggcgccctggagggcgccgccggcttcgccctgagccaggtgggcgacctggccttccccagattcgagatccccgcccagagattcgccctgcccgcccactacctggagagaagccccgcctggtggtacccctacaccctgacccccgccggcggccacctgcccagacccgaggccagcgagaaggccctgctgagagacagcagccccgccagcggcaccgacagagacagccccgagcccctgctgaaggccgaccccgaccacaaggagctggacagcaagagccccgacgagatcatcctggaggagagcgacagcgaggagagcaagaaggagggcgaggccgcccccggcgccgccggcgccagcgtgggcgccgccgccgccacccccggcgccgaggactggaagaagggcgccgagagccccgagaagaagcccgcctgcagaaagaagaagaccagaaccgtgttcagcagaagccaggtgttccagctggagagcaccttcgacatgaagagatacctgagcagcagcgagagagccggcctggccgccagcctgcacctgaccgagacccaggtgaagatctggttccagaacagaagaaacaagtggaagagacagctggccgccgagctggaggccgccaacctgagccacgccgccgcccagagaatcgtgagagtgcccatcctgtaccacgagaacagcgccgccgagggcgccgccgccgccgccgccggcgcccccgtgcccgtgagccagcccctgctgaccttcccccaccccgtgtactacagccaccccgtggtgagcagcgtgcccctgctgagacccgtgtag

SEQ ID NO: 84038 - DNA, 3405 bp, synthetic construct
  misc_feature 1..3405: note = Description of Artificial Sequence: Synthetic coding sequence
  source 1..3405: mol_type = other DNA
atggagagcacccccagcttcctgaagggcacccccacctgggagaagaccgcccccgagaacggcatcgtgagacaggagcccggcagcccccccagagacggcctgcaccacggccccctgtgcctgggcgagcccgcccccttctggagaggcgtgctgagcacccccgacagctggctgccccccggcttcccccagggccccaaggacatgctgcccctggtggagggcgagggcccccagaacggcgagagaaaggtgaactggctgggcagcaaggagggcctgagatggaaggaggccatgctgacccaccccctggccttctgcggccccgcctgcccccccagatgcggccccctgatgcccgagcacagcggcggccacctgaagagcgaccccgtggccttcagaccctggcactgccccttcctgctggagaccaagatcctggagagagcccccttctgggtgcccacctgcctgcccccctacctggtgagcggcctgccccccgagcacccctgcgactggcccctgaccccccacccctgggtgtacagcggcggccagcccaaggtgcccagcgccttcagcctgggcagcaagggcttctactacaaggaccccagcatccccagactggccaaggagcccctggccgccgccgagcccggcctgttcggcctgaacagcggcggccacctgcagagagccggcgaggccgagagacccagcctgcaccagagagacggcgagatgggcgccggcagacagcagaacccctgccccctgttcctgggccagcccgacaccgtgccctggaccagctggcccgcctgcccccccggcctggtgcacaccctgggcaacgtgtgggccggccccggcgacggcaacctgggctaccagctgggcccccccgccacccccagatgccccagccccgagccccccgtgacccagagaggctgctgcagcagctacccccccaccaagggcggcggcctgggcccctgcggcaagtgccaggagggcctggagggcggcgccagcggcgccagcgagcccagcgaggaggtgaacaaggccagcggccccagagcctgcccccccagccaccacaccaagctgaagaagacctggctgaccagacacagcgagcagttcgagtgccccagaggctgccccgaggtggaggagagacccgtggccagactgagagccctgaagagagccggcagccccgaggtgcagggcgccatgggcagccccgcccccaagagaccccccgaccccttccccggcaccgccgagcagggcgccggcggctggcaggaggtgagagacaccagcatcggcaacaaggacgtggacagcggccagcacgacgagcagaagggcccccaggacggccaggccagcctgcaggaccccggcctgcaggacatcccctgcctggccctgcccgccaagctggcccagtgccagagctgcgcccaggccgccggcgagggcggcggccacgcctgccacagccagcaggtgagaagaagccccctgggcggcgagctgcagcaggaggaggacaccgccaccaacagcagcagcgaggagggccccggcagcggccccgacagcagactgagcaccggcctggccaagcacctgctgagcggcctgggcgacagactgtgcagactgctgagaagagagagagaggccctggcctgggcccagagagagggccagggccccgccgtgaccgaggacagccccggcatccccagatgctgcagcagatgccaccacggcctgttcaacacccactggagatgccccagatgcagccacagactgtgcgtggcctgcggcagagtggccggcaccggcagagccagagagaaggccggcttccaggagcagagcgccgaggagtgcacccaggaggccggccacgccgcctgcagcctgatgctgacccagttcgtgagcagccaggccctggccgagctgagcaccgccatgcaccaggtgtgggtgaagttcgacatcagaggccactgcccctgccaggccgacgccagagtgtgggcccccggcgacgccggccagcagaaggagagcacccagaagaccccccccaccccccagcccagctgcaacggcgacacccacagaaccaagagcatcaaggaggagacccccgacagcgccgagacccccgccgaggacagagccggcagaggccccctgccctgccccagcctgtgcgagctgctggccagcaccgccgtgaagctgtgcctgggccacgagagaatccacatggccttcgcccccgtgacccccgccctgcccagcgacgacagaatcaccaacatcctggacagcatcatcgcccaggtggtggagagaaagatccaggagaaggccctgggccccggcctgagagccggccccggcctgagaaagggcctgggcctgcccctgagccccgtgagacccagactgcccccccccggcgccctgctgtggctgcaggagccccagccctgccccagaagaggcttccacctgttccaggagcactggagacagggccagcccgtgctggtgagcggcatccagagaaccctgcagggcaacctgtggggcaccgaggccctgggcgccctgggcggccaggtgcaggccctgagccccctgggccccccccagcccagcagcctgggcagcaccaccttctgggagggcttcagctggcccgagctgagacccaagagcgacgagggcagcgtgctgctgctgcacagagccctgggcgacgaggacaccagcagagtggagaacctggccgccagcctgcccctgcccgagtactgcgccctgcacggcaagctgaacctggccagctacctgccccccggcctggccctgagacccctggagccccagctgtgggccgcctacggcgtgagcccccacagaggccacctgggcaccaagaacctgtgcgtggaggtggccgacctggtgagcatcctggtgcacgccgacacccccctgcccgcctggcacagagcccagaaggacttcctgagcggcctggacggcgagggcctgtggagccccggcagccaggtgagcaccgtgtggcacgtgttcagagcccaggacgcccagagaatcagaagattcctgcagatggtgcagggcctggtgagcaccgtgagcgtgacccagcacttcctgagccccgagaccagcgccctgagcgcccagctgtgccaccagggccccagcctgccccccgactgccacctgctgtacgcccagatggactgggccgtgttccaggccgtgaaggtggccgtgggcaccctgcaggaggccaagtag

SEQ ID NO: 84039 - DNA, 3570 bp, synthetic construct
  misc_feature 1..3570: note = Description of Artificial Sequence: Synthetic coding sequence
  source 1..3570: mol_type = other DNA
atggagagcacccccagcttcctgaagggcacccccacctgggagaagaccgcccccgagaacggcatcgtgagacaggagcccggcagcccccccagagacggcctgcaccacggccccctgtgcctgggcgagcccgcccccttctggagaggcgtgctgagcacccccgacagctggctgccccccggcttcccccagggccccaaggacatgctgcccctggtggagggcgagggcccccagaacggcgagagaaaggtgaactggctgggcagcaaggagggcctgagatggaaggaggccatgctgacccaccccctggccttctgcggccccgcctgcccccccagatgcggccccctgatgcccgagcacagcggcggccacctgaagagcgaccccgtggccttcagaccctggcactgccccttcctgctggagaccaagatcctggagagagcccccttctgggtgcccacctgcctgcccccctacctggtgagcggcctgccccccgagcacccctgcgactggcccctgaccccccacccctgggtgtacagcggcggccagcccaaggtgcccagcgccttcagcctgggcagcaagggcttctactacaaggaccccagcatccccagactggccaaggagcccctggccgccgccgagcccggcctgttcggcctgaacagcggcggccacctgcagagagccggcgaggccgagagacccagcctgcaccagagagacggcgagatgggcgccggcagacagcagaacccctgccccctgttcctgggccagcccgacaccgtgccctggaccagctggcccgcctgcccccccggcctggtgcacaccctgggcaacgtgtgggccggccccggcgacggcaacctgggctaccagctgggcccccccgccacccccagatgccccagccccgagccccccgtgacccagagaggctgctgcagcagctacccccccaccaagggcggcggcctgggcccctgcggcaagtgccaggagggcctggagggcggcgccagcggcgccagcgagcccagcgaggaggtgaacaaggccagcggccccagagcctgcccccccagccaccacaccaagctgaagaagacctggctgaccagacacagcgagcagttcgagtgccccagaggctgccccgaggtggaggagagacccgtggccagactgagagccctgaagagagccggcagccccgaggtgcagggcgccatgggcagccccgcccccaagagaccccccgaccccttccccggcaccgccgagcagggcgccggcggctggcaggaggtgagagacaccagcatcggcaacaaggacgtggacagcggccagcacgacgagcagaagggcccccaggacggccaggccagcctgcaggaccccggcctgcaggacatcccctgcctggccctgcccgccaagctggcccagtgccagagctgcgcccaggccgccggcgagggcggcggccacgcctgccacagccagcaggtgagaagaagccccctgggcggcgagctgcagcaggaggaggacaccgccaccaacagcagcagcgaggagggccccggcagcggccccgacagcagactgagcaccggcctggccaagcacctgctgagcggcctgggcgacagactgtgcagactgctgagaagagagagagaggccctggcctgggcccagagagagggccagggccccgccgtgaccgaggacagccccggcatccccagatgctgcagcagatgccaccacggcctgttcaacacccactggagatgccccagatgcagccacagactgtgcgtggcctgcggcagagtggccggcaccggcagagccagagagaaggccggcttccaggagcagagcgccgaggagtgcacccaggaggccggccacgccgcctgcagcctgatgctgacccagttcgtgagcagccaggccctggccgagctgagcaccgccatgcaccaggtgtgggtgaagttcgacatcagaggccactgcccctgccaggccgacgccagagtgtgggcccccggcgacgccggccagcagaaggagagcacccagaagaccccccccaccccccagcccagctgcaacggcgacacccacagaaccaagagcatcaaggaggagacccccgacagcgccgagacccccgccgaggacagagccggcagaggccccctgccctgccccagcctgtgcgagctgctggccagcaccgccgtgaagctgtgcctgggccacgagagaatccacatggccttcgcccccgtgacccccgccctgcccagcgacgacagaatcaccaacatcctggacagcatcatcgcccaggtggtggagagaaagatccaggagaaggccctgggccccggcctgagagccggccccggcctgagaaagggcctgggcctgcccctgagccccgtgagacccagactgcccccccccggcgccctgctgtggctgcaggagccccagccctgccccagaagaggcttccacctgttccaggagcactggagacagggccagcccgtgctggtgagcggcatccagagaaccctgcagggcaacctgtggggcaccgaggccctgggcgccctgggcggccaggtgcaggccctgagccccctgggccccccccagcccagcagcctgggcagcaccaccttctgggagggcttcagctggcccgagctgagacccaagagcgacgagggcagcgtgctgctgctgcacagagccctgggcgacgaggacaccagcagagtggagaacctggccgccagcctgcccctgcccgagtactgcgccctgcacggcaagctgaacctggccagctacctgccccccggcctggccctgagacccctggagccccagctgtgggccgcctacggcgtgagcccccacagaggccacctgggcaccaagaacctgtgcgtggaggtggccgacctggtgagcatcctggtgcacgccgacacccccctgcccgcctggcacagagcccagaaggacttcctgagcggcctggacggcgagggcctgtggagccccggcagccaggtgagcaccgtgtggcacgtgttcagagcccaggacgcccagagaatcagaagattcctgcagatggtgtgccccgccggcgccggcgccctggagcccggcgcccccggcagctgctacctggacgccggcctgagaagaagactgagagaggagtggggcgtgagctgctggaccctgctgcaggcccccggcgaggccgtgctggtgcccgccggcgccccccaccaggtgcagggcctggtgagcaccgtgagcgtgacccagcacttcctgagccccgagaccagcgccctgagcgcccagctgtgccaccagggccccagcctgccccccgactgccacctgctgtacgcccagatggactgggccgtgttccaggccgtgaaggtggccgtgggcaccctgcaggaggccaagtag

SEQ ID NO: 84040 - DNA, 1410 bp, synthetic construct
  misc_feature 1..1410: note = Description of Artificial Sequence: Synthetic coding sequence
  source 1..1410: mol_type = other DNA
atggccagccccagagagctgacccagaaccccctgaagaagatctggatgccctacagcaacggcagacccgccctgcacgcctgccagagaggcgtgtgcatgaccaactgccccaccctgatcgtgatggtgggcctgcccgccagaggcaagacctacatcagcaagaagctgaccagatacctgaactggatcggcgtgcccaccagagagttcaacgtgggccagtacagaagagacgtggtgaagacctacaagagcttcgagttcttcctgcccgacaacgaggagggcctgaagatcagaaagcagtgcgccctggccgccctgagagacgtgagaagattcctgagcgaggagggcggccacgtggccgtgttcgacgccaccaacaccaccagagagagaagagccaccatcttcaacttcggcgagcagaacggctacaagaccttcttcgtggagagcatctgcgtggaccccgaggtgatcgccgccaacatcgtgcaggtgaagctgggcagccccgactacgtgaacagagacagcgacgaggccaccgaggacttcatgagaagaatcgagtgctacgagaacagctacgagagcctggacgaggacctggacagagacctgagctacatcaagatcatggacgtgggccagagctacgtggtgaacagagtggccgaccacatccagagcagaatcgtgtactacctgatgaacatccacgtgacccccagaagcatctacctgtgcagacacggcgagagcgagctgaacctgaagggcagaatcggcggcgaccccggcctgagccccagaggcagagagttcgccaagagcctggcccagttcatcagcgaccagaacatcaaggacctgaaggtgtggaccagccagatgaagagaaccatccagaccgccgaggccctgggcgtgccctacgagcagtggaaggtgctgaacgagatcgacgccggcgtgtgcgaggagatgacctacgaggagatccaggacaactaccccctggagttcgccctgagagaccaggacaagtacagatacagataccccaagggcgagagctacgaggacctggtgcagagactggagcccgtgatcatggagctggagagacaggagaacgtgctggtgatctgccaccaggccgtgatgagatgcctgctggcctacttcctggacaaggccgccgagcagctgccctacctgaagtgccccctgcacaccgtgctgaagctgacccccgtggcctacggctgcaaggtggagagcatcttcctgaacgtggccgccgtgaacacccacagagacagaccccagaacgtggacatcagcagaccccccgaggaggccctggtgaccgtgcccgcccaccagtag

SEQ ID NO: 84041 - DNA, 522 bp, synthetic construct
  misc_feature 1..522: note = Description of Artificial Sequence: Synthetic coding sequence
  source 1..522: mol_type = other DNA
atgggcctgcccagaagagccggcgacgccgccgagctgagaaagagcctgaagcccctgctggagaagagaagaagagccagaatcaaccagagcctgagccagctgaagggcctgatcctgcccctgctgggcagagagaacagcaactgcagcaagctggagaaggccgacgtgctggagatgaccgtgagattcctgcaggagctgcccgccagcagctggcccaccgccgcccccctgccctgcgacagctacagagagggctacagcgcctgcgtggccagactggccagagtgctgcccgcctgcagagtgctggagcccgccgtgagcgccagactgctggagcacctgtggagaagagccgccagcgccaccctggacggcggcagagccggcgacagcagcggccccagcgcccccgcccccgcccccgccagcgcccccgagcccgccagcgcccccgtgcccagcccccccagccccccctgcggccccggcctgtggagaccctggtag

SEQ ID NO: 84042 - DNA, 231 bp, synthetic construct
  misc_feature 1..231: note = Description of Artificial Sequence: Synthetic coding sequence
  source 1..231: mol_type = other DNA
atgggcctgcccagaagagccggcgacgccgccgagctgagaaagagcctgaagcccctgctggagaagagaagaagagccagaatcaaccagagcctgagccagctgaagggcctgatcctgcccctgctgggcagagaggacgccagcggctggcacacctggctgcccctgcacgcccagaactgcttcctgctgtacatccaggcccccgagcagccccccgcctag

SEQ ID NO: 84043 - DNA, 231 bp, synthetic construct; identical to SEQ ID NO: 84042
  misc_feature 1..231: note = Description of Artificial Sequence: Synthetic coding sequence
  source 1..231: mol_type = other DNA

SEQ ID NO: 84044 - DNA, 561 bp, synthetic construct
  misc_feature 1..561: note = Description of Artificial Sequence: Synthetic coding sequence
  source 1..561: mol_type = other DNA
atggagaagaagagaagagccagaatcaacgtgagcctggagcagctgaagagcctgctggagaagcactacagccaccagatcagaaagagaaagctggagaaggccgacatcctggagctgagcgtgaagtacatgagaagcctgcagaacagcctgcagggcctgtggcccgtgcccagaggcgccgagcagcccagcggcttcagaagctgcctgcccggcgtgagccagctgctgagaagaggcgacgaggtgggcagcggcctgagatgccccctggtgcccgagagcgccgccggcagcaccatggacagcgccggcctgggccaggaggcccccgccctgttcagaccctgcacccccgccgtgtgggcccccgcccccgccgccggcggccccagaagccccccccccctgctgctgctgcccgagagcctgcccggcagcagcgccagcgtgccccccccccagcccgccagcagcagatgcgccgagagccccggcctgggcctgagagtgtggagaccctggggcagccccggcgacgacctgaactag

SEQ ID NO: 84045 - DNA, 666 bp, synthetic construct
  misc_feature 1..666: note = Description of Artificial Sequence: Synthetic coding sequence
  source 1..666: mol_type = other DNA
atggccgccgacacccccggcaagcccagcgccagccccatggccggcgcccccgccagcgccagcagaacccccgacaagcccagaagcgccgccgagcacagaaagagcagcaagcccgtgatggagaagagaagaagagccagaatcaacgagagcctggcccagctgaagaccctgatcctggacgccctgagaaaggagagcagcagacacagcaagctggagaaggccgacatcctggagatgaccgtgagacacctgagaagcctgagaagagtgcaggtgaccgccgccctgagcgccgaccccgccgtgctgggcaagtacagagccggcttccacgagtgcctggccgaggtgaacagattcctggccggctgcgagggcgtgcccgccgacgtgagaagcagactgctgggccacctggccgcctgcctgagacagctgggccccagcagaagacccgccagcctgagccccgccgcccccgccgaggcccccgcccccgaggtgtacgccggcagacccctgctgcccagcctgggcggccccttccccctgctggccccccccctgctgcccggcctgaccagagccctgcccgccgcccccagagccggcccccagggccccggcggcccctggagaccctggctgagatag

SEQ ID NO: 84046 - DNA, 744 bp, synthetic construct
  misc_feature 1..744: note = Description of Artificial Sequence: Synthetic coding sequence
  source 1..744: mol_type = other DNA
atggccgccgacacccccggcaagcccagcgccagccccatggccggcgcccccgccagcgccagcagaacccccgacaagcccagaagcgccgccgagcacagaaaggtgggcagcagacccggcgtgagaggcgccaccggcggcagagagggcagaggcacccagcccgtgcccgacccccagagcagcaagcccgtgatggagaagagaagaagagccagaatcaacgagagcctggcccagctgaagaccctgatcctggacgccctgagaaaggagagcagcagacacagcaagctggagaaggccgacatcctggagatgaccgtgagacacctgagaagcctgagaagagtgcaggtgaccgccgccctgagcgccgaccccgccgtgctgggcaagtacagagccggcttccacgagtgcctggccgaggtgaacagattcctggccggctgcgagggcgtgcccgccgacgtgagaagcagactgctgggccacctggccgcctgcctgagacagctgggccccagcagaagacccgccagcctgagccccgccgcccccgccgaggcccccgcccccgaggtgtacgccggcagacccctgctgcccagcctgggcggccccttccccctgctggccccccccctgctgcccggcctgaccagagccctgcccgccgcccccagagccggcccccagggccccggcggcccctggagaccctggctgagatag

SEQ ID NO: 84047 - DNA, 501 bp, synthetic construct
  misc_feature 1..501: note = Description of Artificial Sequence: Synthetic coding sequence
  source 1..501: mol_type = other DNA
atggcccccagcaccgtggccgtggagctgctgagccccaaggagaagaacagactgagaaagcccgtggtggagaagatgagaagagacagaatcaacagcagcatcgagcagctgaagctgctgctggagcaggagttcgccagacaccagcccaacagcaagctggagaaggccgacatcctggagatggccgtgagctacctgaagcacagcaaggccttcgtggccgccgccggccccaagagcctgcaccaggactacagcgagggctacagctggtgcctgcaggaggccgtgcagttcctgaccctgcacgccgccagcgacacccagatgaagctgctgtaccacttccagagaccccccgccgcccccgccgcccccgccaaggagcccaaggcccccggcgccgcccccccccccgccctgagcgccaaggccaccgccgccgccgccgccgcccaccagcccgcctgcggcctgtggagaccctggtag

SEQ ID NO: 84048 - DNA, 675 bp, synthetic construct
  misc_feature 1..675: note = Description of Artificial Sequence: Synthetic coding sequence
  source 1..675: mol_type = other DNA
atggccccccccgccgcccccggcagagacagagtgggcagagaggacgaggacggctgggagaccagaggcgacagaaaggccagaaagcccctggtggagaagaagagaagagccagaatcaacgagagcctgcaggagctgagactgctgctggccggcgccgaggtgcaggccaagctggagaacgccgaggtgctggagctgaccgtgagaagagtgcagggcgtgctgagaggcagagccagagagagagagcagctgcaggccgaggccagcgagagattcgccgccggctacatccagtgcatgcacgaggtgcacaccttcgtgagcacctgccaggccatcgacgccaccgtggccgccgagctgctgaaccacctgctggagagcatgcccctgagagagggcagcagcttccaggacctgctgggcgacgccctggccggcccccccagagcccccggcagaagcggctggcccgccggcggcgcccccggcagccccatccccagcccccccggccccggcgacgacctgtgcagcgacctggaggaggcccccgaggccgagctgagccaggcccccgccgagggccccgacctggtgcccgccgccctgggcagcctgaccaccgcccagatcgccagaagcgtgtggagaccctggtag

SEQ ID NO: 84049 - DNA, 645 bp, synthetic construct
  misc_feature 1..645: note = Description of Artificial Sequence: Synthetic coding sequence
  source 1..645: mol_type = other DNA
atggccccccccgccgcccccggcagagacagagtgggcagagaggacgaggacggctgggagaccagaggcgacagaaaggccagaaagcccctggtggagaagaagagaagagccagaatcaacgagagcctgcaggagctgagactgctgctggccggcgccgaggtgcaggccaagctggagaacgccgaggtgctggagctgaccgtgagaagagtgcagggcgtgctgagaggcagagccagaggcgagtggagaagaggcggcagaggcagaagacccagagcccccgtgacccccgccagaagaagaaccagcctgcccgcccccctgagctgcagaagaagaggcctgccccccgagcagggcgccccccccagactgctgggcgagcccagacccagaggccccggcggcctgggccacgccgtggccgcccacagagccggcagaggcagcctgccccccaccctgggccccagagccagagccgccgccggcggcagcgagagagccctgagatgcagactgcaccccgtgcacgccagaggcgcccacgtgagagtgcacgtgcccggccacagaagatacagaagatgcagagcccccgagcccagcgccagagtgcacgccgccgcctag

SEQ ID NO: 84050 - DNA, 669 bp, synthetic construct
  misc_feature 1..669: note = Description of Artificial Sequence: Synthetic coding sequence
  source 1..669: mol_type = other DNA
atggccccccccgccgcccccggcagagacagagtgggcagagaggacgaggacggctgggagaccagaggcgacagaaaggccagaaagcccctggtggagaagaagagaagagccagaatcaacgagagcctgcaggagctgagactgctgctggccggcgccgaggccaagctggagaacgccgaggtgctggagctgaccgtgagaagagtgcagggcgtgctgagaggcagagccagagagagagagcagctgcaggccgaggccagcgagagattcgccgccggctacatccagtgcatgcacgaggtgcacaccttcgtgagcacctgccaggccatcgacgccaccgtggccgccgagctgctgaaccacctgctggagagcatgcccctgagagagggcagcagcttccaggacctgctgggcgacgccctggccggcccccccagagcccccggcagaagcggctggcccgccggcggcgcccccggcagccccatccccagcccccccggccccggcgacgacctgtgcagcgacctggaggaggcccccgaggccgagctgagccaggcccccgccgagggccccgacctggtgcccgccgccctgggcagcctgaccaccgcccagatcgccagaagcgtgtggagaccctggtag

SEQ ID NO: 84051 - DNA, 678 bp, synthetic construct
  misc_feature 1..678: note = Description of Artificial Sequence: Synthetic coding sequence
  source 1..678: mol_type = other DNA
atggtgaccagagacagagccgagaacagagacggccccaagatgctgaagcccctggtggagaagagaagaagagacagaatcaacagaagcctggaggagctgagactgctgctgctggagagaaccagagaccagaacctgagaaaccccaagctggagaaggccgagatcctggagttcgccgtgggctacctgagagagagaagcagagtggagccccccggcgtgcccagaagccccgtgcaggacgccgaggccctggccagctgctacctgagcggcttcagagagtgcctgctgagactggccgccttcgcccacgacgccagccccgccgccagagcccagctgttcagcgccctgcacggctacctgagacccaagccccccagacccaagcccgtggaccccagaccccccgcccccagacccagcctggaccccgccgcccccgccctgggccccgccctgcaccagagaccccccgtgcaccagggccaccccagccccagatgcgcctggagccccagcctgtgcagccccagagccggcgacagcggcgcccccgcccccctgaccggcctgctgcccccccccccccccccccacagacaggacggcgcccccaaggcccccctgccccccccccccgccttctggagaccctggccctag

SEQ ID NO: 84052 - DNA, 693 bp, synthetic construct
  misc_feature 1..693: note = Description of Artificial Sequence: Synthetic coding sequence
  source 1..693: mol_type = other DNA
atggtgaccagagacagagccgagaacagagacggccccaagatgctgaagcccctggtggagaagagaagaagagacagaatcaacagaagcctggaggagctgagactgctgctgctggagagaaccagagaccagaacctgagaaaccccaagctggagaaggccgagatcctggagttcgccgtgggctacctgagagagagaagcagagtggagccccccgccgccgccgcccccggcgtgcccagaagccccgtgcaggacgccgaggccctggccagctgctacctgagcggcttcagagagtgcctgctgagactggccgccttcgcccacgacgccagccccgccgccagagcccagctgttcagcgccctgcacggctacctgagacccaagccccccagacccaagcccgtggaccccagaccccccgcccccagacccagcctggaccccgccgcccccgccctgggccccgccctgcaccagagaccccccgtgcaccagggccaccccagccccagatgcgcctggagccccagcctgtgcagccccagagccggcgacagcggcgcccccgcccccctgaccggcctgctgcccccccccccccccccccacagacaggacggcgcccccaaggcccccctgccccccccccccgccttctggagaccctggccctag

SEQ ID NO: 84053 - DNA, 1014 bp, synthetic construct
  misc_feature 1..1014: note = Description of Artificial Sequence: Synthetic coding sequence
  source 1..1014: mol_type = other DNA
atgaagagaccctgcgaggagaccaccagcgagagcgacatggacgagaccatcgacgtgggcagcgagaacaactacagcggccagagcaccagcagcgtgatcagactgaacagccccaccaccaccagccagatcatggccagaaagaagagaagaggcatcatcgagaagagaagaagagacagaatcaacaacagcctgagcgagctgagaagactggtgcccaccgccttcgagaagcagggcagcgccaagctggagaaggccgagatcctgcagatgaccgtggaccacctgaagatgctgcaggccaccggcggcaagggctacttcgacgcccacgccctggccatggacttcatgagcatcggcttcagagagtgcctgaccgaggtggccagatacctgagcagcgtggagggcctggacagcagcgaccccctgagagtgagactggtgagccacctgagcacctgcgccacccagagagaggccgccgccatgaccagcagcatggcccaccaccaccaccccctgcacccccaccactgggccgccgccttccaccacctgcccgccgccctgctgcagcccaacggcctgcacgccagcgagagcaccccctgcagactgagcaccaccagcgaggtgccccccgcccacggcagcgccctgctgaccgccaccttcgcccacgccgacagcgccctgagaatgcccagcaccggcagcgtggccccctgcgtgccccccctgagcaccagcctgctgagcctgagcgccaccgtgcacgccgccgccgccgccgccaccgccgccgcccacagcttccccctgagcttcgccggcgccttccccatgctgccccccaacgccgccgccgccgtggccgccgccaccgccatcagcccccccctgagcgtgagcgccaccagcagcccccagcagaccagcagcggcaccaacaacaagccctacagaccctggggcaccgaggtgggcgccttctag

SEQ ID NO: 84054 - DNA, 876 bp, synthetic construct
  misc_feature 1..876: note = Description of Artificial Sequence: Synthetic coding sequence
  source 1..876: mol_type = other DNA
atggccagaaagaagagaagaggcatcatcgagaagagaagaagagacagaatcaacaacagcctgagcgagctgagaagactggtgcccaccgccttcgagaagcagggcagcgccaagctggagaaggccgagatcctgcagatgaccgtggaccacctgaagatgctgcaggccaccggcggcaagggctacttcgacgcccacgccctggccatggacttcatgagcatcggcttcagagagtgcctgaccgaggtggccagatacctgagcagcgtggagggcctggacagcagcgaccccctgagagtgagactggtgagccacctgagcacctgcgccacccagagagaggccgccgccatgaccagcagcatggcccaccaccaccaccccctgcacccccaccactgggccgccgccttccaccacctgcccgccgccctgctgcagcccaacggcctgcacgccagcgagagcaccccctgcagactgagcaccaccagcgaggtgccccccgcccacggcagcgccctgctgaccgccaccttcgcccacgccgacagcgccctgagaatgcccagcaccggcagcgtggccccctgcgtgccccccctgagcaccagcctgctgagcctgagcgccaccgtgcacgccgccgccgccgccgccaccgccgccgcccacagcttccccctgagcttcgccggcgccttccccatgctgccccccaacgccgccgccgccgtggccgccgccaccgccatcagcccccccctgagcgtgagcgccaccagcagcccccagcagaccagcagcggcaccaacaacaagccctacagaccctggggcaccgaggtgggcgccttctag

SEQ ID NO: 84055 - DNA, 1221 bp, synthetic construct
  misc_feature 1..1221: note = Description of Artificial Sequence: Synthetic coding sequence
  source 1..1221: mol_type = other DNA
atgagcgccctgggcgccgtgatcgccctgctgctgtggggccagctgttcgccgtggacagcggcaacgacgtgaccgacatcgccgacgacggctgccccaagccccccgagatcgcccacggctacgtggagcacagcgtgagataccagtgcaagaactactacaagctgagaaccgagggcgacggcgtgtacaccctgaacgacaagaagcagtggatcaacaaggccgtgggcgacaagctgcccgagtgcgaggccgacgacggctgccccaagccccccgagatcgcccacggctacgtggagcacagcgtgagataccagtgcaagaactactacaagctgagaaccgagggcgacggcgtgtacaccctgaacaacgagaagcagtggatcaacaaggccgtgggcgacaagctgcccgagtgcgaggccgtgtgcggcaagcccaagaaccccgccaaccccgtgcagagaatcctgggcggccacctggacgccaagggcagcttcccctggcaggccaagatggtgagccaccacaacctgaccaccggcgccaccctgatcaacgagcagtggctgctgaccaccgccaagaacctgttcctgaaccacagcgagaacgccaccgccaaggacatcgcccccaccctgaccctgtacgtgggcaagaagcagctggtggagatcgagaaggtggtgctgcaccccaactacagccaggtggacatcggcctgatcaagctgaagcagaaggtgagcgtgaacgagagagtgatgcccatctgcctgcccagcaaggactacgccgaggtgggcagagtgggctacgtgagcggctggggcagaaacgccaacttcaagttcaccgaccacctgaagtacgtgatgctgcccgtggccgaccaggaccagtgcatcagacactacgagggcagcaccgtgcccgagaagaagacccccaagagccccgtgggcgtgcagcccatcctgaacgagcacaccttctgcgccggcatgagcaagtaccaggaggacacctgctacggcgacgccggcagcgccttcgccgtgcacgacctggaggaggacacctggtacgccaccggcatcctgagcttcgacaagagctgcgccgtggccgagtacggcgtgtacgtgaaggtgaccagcatccaggactgggtgcagaagaccatcgccgagaactag

SEQ ID NO: 84056 - DNA, 1149 bp, synthetic construct
  misc_feature 1..1149: note = Description of Artificial Sequence: Synthetic coding sequence
  source 1..1149: mol_type = other DNA
gtgtacgcctgcgtgtgcgtgtgcgtgtacatgcacgtgtgcgtggacgcctgcatgtgctgcgaggccggcagactggccttccacagcagcctgagcagcctgtgcagcgccctgggcgccgtgatcgccctgctgctgtggggccagctgttcgccgtggacagcggcaacgacgtgaccgacatcgccgacgacggctgccccaagccccccgagatcgcccacggctacgtggagcacagcgtgagataccagtgcaagaactactacaagctgagaaccgagggcgacggcgtgtacaccctgaacgacaagaagcagtggatcaacaaggccgtgggcgacaagctgcccgagtgcgaggccgtgtgcggcaagcccaagaaccccgccaaccccgtgcagagaatcctgggcggccacctggacgccaagggcagcttcccctggcaggccaagatggtgagccaccacaacctgaccaccggcgccaccctgatcaacgagcagtggctgctgaccaccgccaagaacctgttcctgaaccacagcgagaacgccaccgccaaggacatcgcccccaccctgaccctgtacgtgggcaagaagcagctggtggagatcgagaaggtggtgctgcaccccaactacagccaggtggacatcggcctgatcaagctgaagcagaaggtgagcgtgaacgagagagtgatgcccatctgcctgcccagcaaggactacgccgaggtgggcagagtgggctacgtgagcggctggggcagaaacgccaacttcaagttcaccgaccacctgaagtacgtgatgctgcccgtggccgaccaggaccagtgcatcagacactacgagggcagcaccgtgcccgagaagaagacccccaagagccccgtgggcgtgcagcccatcctgaacgagcacaccttctgcgccggcatgagcaagtaccaggaggacacctgctacggcgacgccggcagcgccttcgccgtgcacgacctggaggaggacacctggtacgccaccggcatcctgagcttcgacaagagctgcgccgtggccgagtacggcgtgtacgtgaaggtgaccagcatccaggactgggtgcagaagaccatcgccgagaactag

SEQ ID NO: 84057 - DNA, 1044 bp, synthetic construct
  misc_feature 1..1044: note = Description of Artificial Sequence: Synthetic coding sequence
  source 1..1044: mol_type = other DNA
atgagcgccctgggcgccgtgatcgccctgctgctgtggggccagctgttcgccgtggacagcggcaacgacgtgaccgacatcgccgacgacggctgccccaagccccccgagatcgcccacggctacgtggagcacagcgtgagataccagtgcaagaactactacaagctgagaaccgagggcgacggcgtgtacaccctgaacaacgagaagcagtggatcaacaaggccgtgggcgacaagctgcccgagtgcgaggccgtgtgcggcaagcccaagaaccccgccaaccccgtgcagagaatcctgggcggccacctggacgccaagggcagcttcccctggcaggccaagatggtgagccaccacaacctgaccaccggcgccaccctgatcaacgagcagtggctgctgaccaccgccaagaacctgttcctgaaccacagcgagaacgccaccgccaaggacatcgcccccaccctgaccctgtacgtgggcaagaagcagctggtggagatcgagaaggtggtgctgcaccccaactacagccaggtggacatcggcctgatcaagctgaagcagaaggtgagcgtgaacgagagagtgatgcccatctgcctgcccagcaaggactacgccgaggtgggcagagtgggctacgtgagcggctggggcagaaacgccaacttcaagttcaccgaccacctgaagtacgtgatgctgcccgtggccgaccaggaccagtgcatcagacactacgagggcagcaccgtgcccgagaagaagacccccaagagccccgtgggcgtgcagcccatcctgaacgagcacaccttctgcgccggcatgagcaagtaccaggaggacacctgctacggcgacgccggcagcgccttcgccgtgcacgacctggaggaggacacctggtacgccaccggcatcctgagcttcgacaagagctgcgccgtggccgagtacggcgtgtacgtgaaggtgaccagcatccaggactgggtgcagaagaccatcgccgagaactag

SEQ ID NO: 84058 - DNA, 846 bp, synthetic construct
  misc_feature 1..846: note = Description of Artificial Sequence: Synthetic coding sequence
  source 1..846: mol_type = other DNA
atgagcagaatcagccagatgaccgccgccagaagcccccccagactgcacatggccatgtggagcaccagattcgccaccagcgtgagaaccaaccccgtgcagagaatcctgggcggccacctggacgccaagggcagcttcccctggcaggccaagatggtgagccaccacaacctgaccaccggcgccaccctgatcaacgagcagtggctgctgaccaccgccaagaacctgttcctgaaccacagcgagaacgccaccgccaaggacatcgcccccaccctgaccctgtacgtgggcaagaagcagctggtggagatcgagaaggtggtgctgcaccccaactacagccaggtggacatcggcctgatcaagctgaagcagaaggtgagcgtgaacgagagagtgatgcccatctgcctgcccagcaaggactacgccgaggtgggcagagtgggctacgtgagcggctggggcagaaacgccaacttcaagttcaccgaccacctgaagtacgtgatgctgcccgtggccgaccaggaccagtgcatcagacactacgagggcagcaccgtgcccgagaagaagacccccaagagccccgtgggcgtgcagcccatcctgaacgagcacaccttctgcgccggcatgagcaagtaccaggaggacacctgctacggcgacgccggcagcgccttcgccgtgcacgacctggaggaggacacctggtacgccaccggcatcctgagcttcgacaagagctgcgccgtggccgagtacggcgtgtacgtgaaggtgaccagcatccaggactgggtgcagaagaccatcgccgagaactag

SEQ ID NO: 84059 - DNA, 552 bp, synthetic construct
  misc_feature 1..552: note = Description of Artificial Sequence: Synthetic coding sequence
  source 1..552: mol_type = other DNA
atgagcgccgccagagagagccacccccacggcgtgaagagaagcgccagccccgacgacgacctgggcagcagcaactgggaggccgccgacctgggcaacgaggagagaaagcagaagttcctgagactgatgggcgccggcaagaaggagcacaccggcagactggtgatcggcgaccacaagagcaccagccacttcagaaccggcgaggaggacaagaagatcaacgaggagctggagagccagtaccagcagagcatggacagcaagctgagcggcagatacagaagacactgcggcctgggcttcagcgaggtggaggaccacgacggcgagggcgacgtggccggcgacgacgacgacgacgacgacgacagccccgaccccgagagccccgacgacagcgagagcgacagcgagagcgagaaggaggagagcgccgaggagctgcaggccgccgagcaccccgacgaggtggaggaccccaagaacaagaaggacgccaagagcaactacaagatgatgttcgtgaagagcagcggcagctag

SEQ ID NO: 84060 - DNA, 1047 bp, synthetic construct
  misc_feature 1..1047: note = Description of Artificial Sequence: Synthetic coding sequence
  source 1..1047: mol_type = other DNA
atgagcgacctgggcgccgtgatcagcctgctgctgtggggcagacagctgttcgccctgtacagcggcaacgacgtgaccgacatcagcgacgacagattccccaagccccccgagatcgccaacggctacgtggagcacctgttcagataccagtgcaagaactactacagactgagaaccgagggcgacggcgtgtacaccctgaacgacaagaagcagtggatcaacaaggccgtgggcgacaagctgcccgagtgcgaggccgtgtgcggcaagcccaagaaccccgccaaccccgtgcagagaatcctgggcggccacctggacgccaagggcagcttcccctggcaggccaagatggtgagccaccacaacctgaccaccggcgccaccctgatcaacgagcagtggctgctgaccaccgccaagaacctgttcctgaaccacagcgagaacgccaccgccaaggacatcgcccccaccctgaccctgtacgtgggcaagaagcagctggtggagatcgagaaggtggtgctgcaccccaactaccaccaggtggacatcggcctgatcaagctgaagcagaaggtgctggtgaacgagagagtgatgcccatctgcctgcccagcaagaactacgccgaggtgggcagagtgggctacgtgagcggctggggccagagcgacaacttcaagctgaccgaccacctgaagtacgtgatgctgcccgtggccgaccagtacgactgcatcacccactacgagggcagcacctgccccaagtggaaggcccccaagagccccgtgggcgtgcagcccatcctgaacgagcacaccttctgcgtgggcatgagcaagtaccaggaggacacctgctacggcgacgccggcagcgccttcgccgtgcacgacctggaggaggacacctggtacgccgccggcatcctgagcttcgacaagagctgcgccgtggccgagtacggcgtgtacgtgaaggtgaccagcatccagcactgggtgcagaagaccatcgccgagaactag

SEQ ID NO: 84061 - DNA, 1047 bp, synthetic construct; identical to SEQ ID NO: 84060
  misc_feature 1..1047: note = Description of Artificial Sequence: Synthetic coding sequence
  source 1..1047: mol_type = other DNA

SEQ ID NO: 84062 - DNA, 615 bp, synthetic construct
  misc_feature 1..615: note = Description of Artificial Sequence: Synthetic coding sequence
  source 1..615: mol_type = other DNA
atggccgccgccaacccctgggaccccgccagcgcccccaacggcgccggcctggtgctgggccacttcatcgccagcggcatggtgaaccagaagaacctggagatcgagctgctgaagctggagaaggacaccgccgacgtggtgcaccccttcttcctggcccagaagtgccacaccctgcagagcatgaacaaccacctggaggccgtgctgaaggagaagagaagcctgagacagagactgctgaagcccatgtgccaggagaacctgcccatcgaggccgtgtaccacagatacatggtgcacctgctggagctggccgtgaccttcatcgagagactggagacccacctggagaccatcagaaacatcccccacctggccgccaacctgaagaagatgaaccaggccctggccaagatggacatcctggtgaccgagaccgaggagctggccgagaacatcctgaagtggagaaagcagcagaacgaggtgagcagctgcatccccaagatcctggccgaggagagctacctgtacaagcacgacatcatcatgccccccctgcccttcaccagcaaggtgcacgtgcagaccatcaacgccaagtag

SEQ ID NO: 84063 - DNA, 837 bp, synthetic construct
  misc_feature 1..837: note = Description of Artificial Sequence: Synthetic coding sequence
  source 1..837: mol_type = other DNA
atggagccccaggaggagagagagacccaggtggccgcctggctgaagaagatcttcggcgaccaccccatcccccagtacgaggtgaaccccagaaccaccgagatcctgcaccacctgagcgagagaaacagagtgagagacagagacgtgtacctggtgatcgaggacctgaagcagaaggccagcgagtacgagagcgaggccaagtacctgcaggacctgctgatggagagcgtgaacttcagccccgccaacctgagcagcaccggcagcagatacctgaacgccctggtggacagcgccgtggccctggagaccaaggacaccagcctggccagcttcatccccgccgtgaacgacctgaccagcgacctgttcagaaccaagagcaagagcgaggagatcaagatcgagctggagaagctggagaagaacctgaccgccaccctggtgctggagaagtgcctgcaggaggacgtgaagaaggccgagctgcacctgagcaccgagagagccaaggtggacaacagaagacagaacatggacttcctgaaggccaagagcgaggagttcagattcggcatcaaggccgccgaggagcagctgagcgccagaggcatggacgccagcctgagccaccagagcctggtggccctgagcgagaagctggccagactgaagcagcagaccatccccctgaagaagaagctggagagctacctggacctgatgcccaaccccagcctggcccaggtgaagatcgaggaggccaagagagagctggacagcatcgaggccgagctgaccagaagagtggacatgatggagctgtag

SEQ ID NO: 84064 - DNA, 708 bp, synthetic construct
  misc_feature 1..708: note = Description of Artificial Sequence: Synthetic coding sequence
  source 1..708: mol_type = other DNA
atggccgccgccaacccctgggaccccgccagcgcccccaacggcgccggcctggtgctgggccacttcatcgccagcggcatggtgaaccaggagatgctgaacatgagcaagaagaccgtgagctgcttcgtgaacttcaccagactgcagcagatcaccaacatccaggccgagatctaccagaagaacctggagatcgagctgctgaagctggagaaggacaccgccgacgtggtgcaccccttcttcctggcccagaagtgccacaccctgcagagcatgaacaaccacctggaggccgtgctgaaggagaagagaagcctgagacagagactgctgaagcccatgtgccaggagaacctgcccatcgaggccgtgtaccacagatacatggtgcacctgctggagctggccgtgaccttcatcgagagactggagacccacctggagaccatcagaaacatcccccacctggccgccaacctgaagaagatgaaccaggccctggccaagatggacatcctggtgaccgagaccgaggagctggccgagaacatcctgaagtggagaaagcagcagaacgaggtgagcagctgcatccccaagatcctggccgaggagagctacctgtacaagcacgacatcatcatgccccccctgcccttcaccagcaaggtgcacgtgcagaccatcaacgccaagtag

SEQ ID NO: 84065 - DNA, 615 bp, synthetic construct; identical to SEQ ID NO: 84062
  misc_feature 1..615: note = Description of Artificial Sequence: Synthetic coding sequence
  source 1..615: mol_type = other DNA

SEQ ID NO: 84066 - DNA, 1812 bp, synthetic construct
  misc_feature 1..1812: note = Description of Artificial Sequence: Synthetic coding sequence
  source 1..1812: mol_type = other DNA
atgagctgcggcaacgagttcgtggagaccctgaagaagatcggctaccccaaggccgacaacctgaacggcgaggacttcgactggctgttcgagggcgtggaggacgagagcttcctgaagtggttctgcggcaacgtgaacgagcagaacgtgctgagcgagagagagctggaggccttcagcatcctgcagaagagcggcaagcccatcctggagggcgccgccctggacgaggccctgaagacctgcaagaccagcgacctgaagacccccagactggacgacaaggagctggagaagctggaggacgaggtgcagaccctgctgaagctgaagaacctgaagatccagagaagaaacaagtgccagctgatggccagcgtgaccagccacaagagcctgagactgaacgccaaggaggaggaggccaccaagaagctgaagcagagccagggcatcctgaacgccatgatcaccaagatcagcaacgagctgcaggccctgaccgacgaggtgacccagctgatgatgttcttcagacacagcaacctgggccagggcaccaaccccctggtgttcctgagccagttcagcctggagaagtacctgagccaggaggagcagagcaccgccgccctgaccctgtacaccaagaagcagttcttccagggcatccacgaggtggtggagagcagcaacgaggacaacttccagctgctggacatccagacccccagcatctgcgacaaccaggagatcctggaggagagaagactggagatggccagactgcagctggcctacatctgcgcccagcaccagctgatccacctgaaggccagcaacagcagcatgaagagcagcatcaagtgggccgaggagagcctgcacagcctgaccagcaaggccgtggacaaggagaacctggacgccaagatcagcagcctgaccagcgagatcatgaagctggagaaggaggtgacccagatcaaggacagaagcctgcccgccgtggtgagagagaacgcccagctgctgaacatgcccgtggtgaagggcgacttcgacctgcagatcgccaagcaggactactacaccgccagacaggagctggtgctgaaccagctgatcaagcagaaggccagcttcgagctgctgcagctgagctacgagatcgagctgagaaagcacagagacatctacagacagctggagaacctggtgcaggagctgagccagagcaacatgatgctgtacaagcagctggagatgctgaccgaccccagcgtgagccagcagatcaaccccagaaacaccatcgacaccaaggactacagcacccacagactgtaccaggtgctggagggcgagaacaagaagaaggagctgttcctgacccacggcaacctggaggaggtggccgagaagctgaagcagaacatcagcctggtgcaggaccagctggccgtgagcgcccaggagcacagcttcttcctgagcaagagaaacaaggacgtggacatgctgtgcgacaccctgtaccagggcggcaaccagctgctgctgagcgaccaggagctgaccgagcagttccacaaggtggagagccagctgaacaagctgaaccacctgctgaccgacatcctggccgacgtgaagaccaagagaaagaccctggccaacaacaagctgcaccagatggagagagagttctacgtgtacttcctgaaggacgaggactacctgaaggacatcgtggagaacctggagacccagagcaagatcaaggccgtgagcctggaggactag

SEQ ID NO: 84067 - DNA, 1812 bp, synthetic construct; identical to SEQ ID NO: 84066
  misc_feature 1..1812: note = Description of Artificial Sequence: Synthetic coding sequence
  source 1..1812: mol_type = other DNA

SEQ ID NO: 84068 - DNA, 33 bp, synthetic construct
  misc_feature 1..33: note = Description of Artificial Sequence: Synthetic coding sequence
  source 1..33: mol_type = other DNA
atgagctgcggcaacgagttcgtggagacctag

SEQ ID NO: 84069 - DNA, 102 bp, synthetic construct
  misc_feature 1..102: note = Description of Artificial Sequence: Synthetic coding sequence
  source 1..102: mol_type = other DNA
atgagctgcggcaacgagttcgtggagaccctgaagaagatcggctaccccaaggccgacaacctgaacggcgaggacttcgactggctgttcgagggctag

SEQ ID NO: 84070 - DNA, 456 bp, synthetic construct
  misc_feature 1..456: note = Description of Artificial Sequence: Synthetic coding sequence
  source 1..456: mol_type = other DNA
atgggcaagagacccaacctgctggccctgcagctgagcgacagcaccctggccgacatcatcgccagactgcaggccggccagaagctgagcggcagcagccccttcagcagcgccttcaacagcctgagcctggacaaggagagcggcctgctgatgttcaagggcgacaagaagcccagagtgtgggtggtgcccacccagctgagaagagacctgatcttcagcgtgcacgacatccccctgggcgcccaccagagacccgaggagacctacaagaagctgagactgctgggctggtggcccggcatgcaggagcacgtgaaggactactgcagaagctgcctgttctgcatccccagaaacctgatcggcagcgagctgaaggtgatcgagagcccccccgccagcgtgctgagaggccagggcgtgtgcaacagaagcggcaccagatag

SEQ ID NO: 84071 - DNA, 957 bp, synthetic construct
  misc_feature 1..957: note = Description of Artificial Sequence: Synthetic coding sequence
  source 1..957: mol_type = other DNA
atggccagcggcgacttctgcagccccggcgagggcatggagatcctgcagcaggtgtgcagcaagcagctgcccccctgcaacctgagcaaggaggacctgctgcagaacccctacttcagcaagctgctgctgaacctgagccagcacgtggacgagagcggcctgagcctgaccctggccaaggagcaggcccaggcctggaaggaggtgagactgcacaagaccacctggctgagaagcgagatcctgcacagagtgatccaggagctgctggtggactactacgtgaagatccaggacaccaacgtgaccagcgaggacaagaaggacttcgtgtggatgagagccagactgcagcaggaggtggaggagcagctgaagaagaagtgcttcaccctgctgtgctactacgaccccaacagcgacgccgacagcgagaccgtgaaggccgccaaggtgtggaagctggccgaggtgctggtgggcgagcagcagcagtgccaggacgccaagagccagcagaaggagcagatgctgctgctggagaagaagagcgccgcctacagccaggtgctgctgagatgcctgaccctgctgcagagactgctgcaggagcacagactgaagacccagagcgagctggacagaatcaacgcccagtacctggaggtgaagtgcggcgccatgatcctgaagctgagaatggaggagctgaagatcctgagcgacacctacaccgtggagaaggtggaggtgcacagactgatcagagacagactggagggcgccatccacctgcaggagcaggacatggagaacagcagacaggtgctgaacagctacgaggtgctgggcgaggagttcgacagactggtgaaggagtacaccgtgctgaagcaggccaccgagaacaagagatgggccctgcaggagttcagcaaggtgtacagatag

SEQ ID NO: 84072 - DNA, 714 bp, synthetic construct
  misc_feature 1..714: note = Description of Artificial Sequence: Synthetic coding sequence
  source 1..714: mol_type = other DNA
atggccagcggcgacttctgcagccccggcgagggcatggagatcctgcagcaggtgtgcagcaagcagctgcccccctgcaacctgagcaaggaggacctgctgcagaacccctacttcagcaagctgctgctgaacctgagccagcacgtggacgagagcggcctgagcctgaccctggccaaggagcaggcccaggcctggaaggaggtgagactgcacaagaccacctggctgagaagcgagatcctgcacagagtgatccaggagctgctggtggactactacgtgaagatccaggacaccaacgtgaccagcgaggacaagaaggtgctgctgagatgcctgaccctgctgcagagactgctgcaggagcacagactgaagacccagagcgagctggacagaatcaacgcccagtacctggaggtgaagtgcggcgccatgatcctgaagctgagaatggaggagctgaagatcctgagcgacacctacaccgtggagaaggtggaggtgcacagactgatcagagacagactggagggcgccatccacctgcaggagcaggacatggagaacagcagacaggtgctgaacagctacgaggtgctgggcgaggagttcgacagactggtgaaggagtacaccgtgctgaagcaggccaccgagaacaagagatgggccctgcaggagttcagcaaggtgtacagatag

SEQ ID NO: 84073 - DNA, 714 bp, synthetic construct; identical to SEQ ID NO: 84072
  misc_feature 1..714: note = Description of Artificial Sequence: Synthetic coding sequence
  source 1..714: mol_type = other DNA

SEQ ID NO: 84074 - DNA, 720 bp, synthetic construct
  misc_feature 1..720: note = Description of Artificial Sequence: Synthetic coding sequence
  source 1..720: mol_type = other DNA
atgagactgctgggccccagccaggagagagagatcccccccctgctgggcctggagaaggccgacctgctggagctgatgcccctgagcgaggacttcgtgtggatgagagccagactgcagcaggaggtggaggagcagctgaagaagaagtgcttcaccctgctgtgctactacgaccccaacagcgacgccgacagcgagaccgtgaaggccgccaaggtgtggaagctggccgaggtgctggtgggcgagcagcagcagtgccaggacgccaagagccagcagaaggagcagatgctgctgctggagaagaagagcgccgcctacagccaggtgctgctgagatgcctgaccctgctgcagagactgctgcaggagcacagactgaagacccagagcgagctggacagaatcaacgcccagtacctggaggtgaagtgcggcgccatgatcctgaagctgagaatggaggagctgaagatcctgagcgacacctacaccgtggagaaggtggaggtgcacagactgatcagagacagactggagggcgccatccacctgcaggagcaggacatggagaacagcagacaggtgctgaacagctacgaggtgctgggcgaggagttcgacagactggtgaaggagtacaccgtgctgaagcaggccaccgagaacaagagatgggccctgcaggagttcagcaaggtgtacagatag

SEQ ID NO: 84075 - DNA, 1092 bp, synthetic construct; identical to SEQ ID NO: 75767
  misc_feature 1..1092: note = Description of Artificial Sequence: Synthetic coding sequence
  source 1..1092: mol_type = other DNA

SEQ ID NO: 84076 - DNA, 54 bp, synthetic construct
  misc_feature 1..54: note = Description of Artificial Sequence: Synthetic coding sequence
  source 1..54: mol_type = other DNA
atgagactgctgggccccagccaggagagagagatcccccccctgctgggctag

SEQ ID NO: 84077 - DNA, 564 bp, synthetic construct
  misc_feature 1..564: note = Description of Artificial Sequence: Synthetic coding sequence
  source 1..564: mol_type = other DNA
atggccagcggcgacttctgcagccccggcgagggcatggagatcctgcagcaggtgtgcagcaagcagctgcccccctgcaacctgagcaaggaggacctgctgcagaacccctacttcagcaagctgctgctgaacctgagccagcacgtggacgagagcggcctgagcctgaccctggccaaggagcaggcccaggcctggaaggaggtgagactgcacaagaccacctggctgagaagcgagatcctgcacagagtgatccaggagctgctggtggactactacgtgaagatccaggacaccaacgtgaccagcgaggacaagaagttccacgagaccctggagcagagactgctggtgaccgagctgatgagactgctgggccccagccaggagagagagatcccccccctgctgggcctggagaaggccgacctgctggagctgatgcccctgagcgaggacttcgtgtggatgagagccagactgcagcaggaggtggaggagcagctgaagaagaagtgcttcaccctgctgtgctactacgaccccaacagctag

SEQ ID NO: 84078 - DNA, 840 bp, synthetic construct
  misc_feature 1..840: note = Description of Artificial Sequence: Synthetic coding sequence
  source 1..840: mol_type = other DNA
atggccagcggcgacttctgcagccccggcgagggcatggagatcctgcagcaggtgtgcagcaagcagctgcccccctgcaacctgagcaaggaggacctgctgcagaacccctacttcagcaagctgctgctgaacctgagccagcacgtggacgagagcggcctgagcctgaccctggccaaggagcaggcccaggcctggaaggaggtgagactgcacaagaccacctggctgagaagcgagatcctgcacagagtgatccaggagctgctggtggactactacgtgaagatccaggacaccaacgtgaccagcgaggacaagaagttccacgagaccctggagcagagactgctggtgaccgagctgatgagactgctgggccccagccaggagagagagatcccccccctgctgggcctggagaaggccgacctgctggagctgatgcccctgagcgaggacttcgtgtggatgagagccagactgcagcaggaggtggaggagcagctgaagaagaagtgcttcaccctgctgtgctactacgaccccaacagcgacgccgacagcgagaccgtgaaggccgccaaggtgtggaagctggccgaggtgctggtgggcgagcagcagcagtgccaggacgccaagagccagcagaaggagcagatgctgctgctggagaagaagagcgccgcctacagccaggtgctgctgagatgcctgaccctgctgcagagactgctgcaggagcacagactgaagacccagagcgagctggacagaatcaacgcccagtacctggaggtgaagtgcggcgccatgatcctgaagctgtag

SEQ ID NO: 84079 - DNA, 957 bp, synthetic construct; identical to SEQ ID NO: 84071
  misc_feature 1..957: note = Description of Artificial Sequence: Synthetic coding sequence
  source 1..957: mol_type = other DNA

SEQ ID NO: 84080 - DNA, 957 bp, synthetic construct; identical to SEQ ID NO: 84071
  misc_feature 1..957: note = Description of Artificial Sequence: Synthetic coding sequence
  source 1..957: mol_type = other DNA

SEQ ID NO: 84081 - DNA, 483 bp, synthetic construct
  misc_feature 1..483: note = Description of Artificial Sequence: Synthetic coding sequence
  source 1..483: mol_type = other DNA
atggccagcggcgacttctgcagccccggcgagggcatggagatcctgcagcaggtgtgcagcaagcagctgcccccctgcaacctgagcaaggaggacctgctgcagaacccctacttcagcaagctgctgctgaacctgagccagcacgtggacgagagcggcctgagcctgaccctggccaaggagcaggcccaggcctggaaggaggtgagactgcacaagaccacctggctgagaagcgagatcctgcacagagtgatccaggagctgctggtggactactacgtgaagatccaggacaccaacgtgaccagcgaggacaagaagttccacgagaccctggagcagagactgctggtgaccgagctgatgagactgctgggccccagccaggagagagagatcccccccctgctgggcctggagaaggccgacctgctggagctgatgcccctgagcgaggacttcgtgtggatgtag

SEQ ID NO: 84082 - DNA, 1902 bp, synthetic construct
  misc_feature 1..1902: note = Description of Artificial Sequence: Synthetic coding sequence
  source 1..1902: mol_type = other DNA
atggagctggcccaggaggccagagagctgggctgctgggccgtggaggagatgggcgtgcccgtggccgccagagcccccgagagcaccctgagaagactgtgcctgggccagggcgccgacatctgggcctacatcctgcagcacgtgcacagccagagaaccgtgaagaagatcagaggcaacctgctgtggtacggccaccaggacagcccccaggtgagaagaaagctggagctggaggccgccgtgaccagactgagagccgagatccaggagctggaccagagcctggagctgatggagagagacaccgaggcccaggacaccgccatggagcaggccagacagcacacccaggacacccagagaagagccctgctgctgagagcccaggccggcgccatgagaagacagcagcacaccctgagagaccccatgcagagactgcagaaccagctgagaagactgcaggacatggagagaaaggccaaggtggacgtgaccttcggcagcctgaccagcgccgccctgggcctggagcccgtggtgctgagagacgtgagaaccgcctgcaccctgagagcccagttcctgcagaacctgctgctgccccaggccaagagaggcagcctgcccaccccccacgacgaccacttcggcaccagctaccagcagtggctgagcagcgtggagaccctgctgaccaaccacccccccggccacgtgctggccgccctggagcacctggccgccgagagagaggccgagatcagaagcctgtgcagcggcgacggcctgggcgacaccgagatcagcagaccccaggcccccgaccagagcgacagcagccagaccctgcccagcatggtgcacctgatccaggagggctggagaaccgtgggcgtgctggtgagccagagaagcaccctgctgaaggagagacaggtgctgacccagagactgcagggcctggtggaggaggtggagagaagagtgctgggcagcagcgagagacaggtgctgatcctgggcctgagaagatgctgcctgtggaccgagctgaaggccctgcacgaccagagccaggagctgcaggacgccgccggccacagacagctgctgctgagagagctgcaggccaagcagcagagaatcctgcactggagacagctggtggaggagacccaggagcaggtgagactgctgatcaagggcaacagcgccagcaagaccagactgtgcagaagccccggcgaggtgctggccctggtgcagagaaaggtggtgcccaccttcgaggccgtggccccccagagcagagagctgctgagatgcctggaggaggaggtgagacacctgccccacatcctgctgggcaccctgctgagacacagacccggcgagctgaagcccctgcccaccgtgctgcccagcatccaccagctgcaccccgccagccccagaggcagcagcttcatcgccctgagccacaagctgggcctgccccccggcaaggccagcgagctgctgctgcccgccgccgccagcctgagacaggacctgctgctgctgcaggaccagagaagcctgtggtgctgggacctgctgcacatgaagaccagcctgccccccggcctgcccacccaggagctgctgcagatccaggccagccaggagaagcagcagaaggagaacctgggccaggccctgaagagactggagaagctgctgaagcaggccctggagagaatccccgagctgcagggcatcgtgggcgactggtgggagcagcccggccaggccgccctgagcgaggagctgtgccagggcctgagcctgccccagtggagactgagatgggtgcaggcccagggcgccctgcagaagctgtgcagctag

SEQ ID NO: 84083 - DNA, 873 bp, synthetic construct
  misc_feature 1..873: note = Description of Artificial Sequence: Synthetic coding sequence
  source 1..873: mol_type = other DNA
atggagctggcccaggaggccagagagctgggctgctgggccgtggaggagatgggcgtgcccgtggccgccagagcccccgagagcaccctgagaagactgtgcctgggccagggcgccgacatctgggcctacatcctgcagcacgtgcacagccagagaaccgtgaagaagatcagaggcaacctgctgtggtacggccaccaggacagcccccaggtgagaagaaagctggagctggaggccgccgtgaccagactgagagccgagatccaggagctggaccagagcctggagctgatggagagagacaccgaggcccaggacaccgccatggagcaggccagacagcacacccaggacacccagagaagagccctgctgctgagagcccaggccggcgccatgagaagacagcagcacaccctgagagaccccatgcagagactgcagaaccagctgagaagactgcaggacatggagagaaaggccaaggtggacgtgaccttcggcagcctgaccagcgccgccctgggcctggagcccgtggtgctgagagacgtgagaaccgcctgcaccctgagagcccagttcctgcagaacctgctgctgccccaggccaagagaggcagcctgcccaccccccacgacgaccacttcggcaccagctaccagcagtggctgagcagcgtggagaccctgctgaccaaccacccccccggccacgtgctggccgccctggagcacctggccgccgagagagaggccgagatcagaagcctgtgcagcggcgacggcctgggcgacaccgagatcagcagaagagccggcggcctgtgggtgtgctggagccccagcggcgcccccagctag

SEQ ID NO: 84084 - DNA, 2409 bp, synthetic construct
  misc_feature 1..2409: note = Description of Artificial Sequence: Synthetic coding sequence
  source 1..2409: mol_type = other DNA
atgaagtacatcaagagcaacagcaagaacagcagccaccacttcgtggagaccttcaacatcaagccccaggacctgcacaagtgcatcgccagatgccacttcgccagaagcagattcctgcagatcctgcagagacaggactgcgtgacccagaagtaccaggagaacgcccagctgagcgtgaagcaggtgagaaacctgagaagcgagtgcatcggcctggagaaccagatcaagaagatggagccctacgacgaccacagcaacatggaggagaagatccagaaggtgagaagcctgtgggccagcgtgaacgagaccctgatgttcctggagaaggagagagaggtggtgagcagcgtgctgagcctggtgaaccagtacgccctggacggcaccaacgtggccatcaacatccccagactgctgctggacaagatcgagaagcagatgttccagctgcacatcggcaacgtgtacgaggccggcaagctgaacctgctgaccgtgatccagctgctgaacgaggtgctgaaggtgatgaagtacgagagatgccaggccgaccaggccagactgaccgtggacctgcactacctggagaaggagaccaagttccagaaggagagactgagcgacctgaagcacatgagatacagaatcaaggacgacctgaccaccatcagacacagcgtggtggagaagcagggcgagtggcacaagaagtggaaggagttcctgggcctgagccccttcagcctgatcaagggctggacccccagcgtggacctgctgccccccatgagccccctgagcttcgaccccgccagcgaggaggtgtacgccaagagcatcctgtgccagtaccccgccagcctgcccgacgcccacaagcagcacaaccaggagaacggctgcagaggcgacagcgacaccctgggcgccctgcacgacctggccaacagccccgccagcttcctgagccagagcgtgagcagcagcgacagaaacagcgtgaccgtgctggagaaggacaccaagatgggcacccccaaggagaagaacgaggccatcagcaagaagatccccgagttcgaggtggagaacagccccctgagcgacgtggccaagaacaccgagagcagcgccttcggcggcagcctgcccgccaagaagagcgaccccttccagaaggagcaggaccacctggtggaggaggtggccagagccgtgctgagcgacagcccccagctgagcgagggcaaggagatcaagctggaggagctgatcgacagcctgggcagcaaccccttcctgaccagaaaccagatccccagaacccccgagaacctgatcaccgagatcagaagcagctggagaaaggccatcgagatggaggagaacagaaccaaggagcccatccagatggacgccgagcacagagaggtgctgcccgagagcctgcccgtgctgcacaaccagagagagttcagcatggccgacttcctgctggagaccaccgtgagcgacttcggccagagccacctgaccgaggagaaggtgatcagcgactgcgagtgcgtgccccagaagcacgtgctgaccagccacatcgacgagccccccacccagaaccagagcgacctgctgaacaagaaggtgatctgcaagcaggacctggagtgcctggccttcaccaagctgagcgagaccagcagaatggagaccttcagccccgccgtgggcaacagaatcgacgtgatgggcggcagcgaggaggagttcatgaagatcctggaccacctggaggtgagctgcaacaagcccagcaccaacaagaccatgctgtggaacagcttccagatcagcagcggcatcagcagcaagagcttcaaggacaacgacttcggcatcctgcacgagaccctgcccgaggaggtgggccacctgagcttcaacagcagcagcagcagcgaggccaacttcaagctggagcccaacagccccatgcacggcggcaccctgctggaggacgtggtgggcggcagacagaccacccccgagagcgacttcaacctgcaggccctgagaagcagatacgaggccctgaagaagagcctgagcaagaagagagaggagagctacctgagcaacagccagacccccgagagacacaagcccgagctgagccccaccccccagaacgtgcagaccgacgacaccctgaacttcctggacacctgcgacctgcacaccgagcacatcaagcccagcctgagaaccagcatcggcgagagaaagagaagcctgagccccctgatcaagttcagccccgtggagcagagactgagaaccaccatcgcctgcagcctgggcgagctgcccaacctgaagggcaaggtgtag

SEQ ID NO: 84085 - DNA, 2868 bp, synthetic construct
  misc_feature 1..2868: note = Description of Artificial Sequence: Synthetic coding sequence
  source 1..2868: mol_type = other DNA
atgagcagcgccagcgtgaccgccttcgagaaggagcacctgtggatgtacctgcaggccctgggcttcgagcccggccccgccaccatcgcctgcggcaagatcgtgagccacacccacctgggcgtgaacatgttcgacaagctgaacagagacgccttccacatcatcagctacttcctgttccaggtgctggaccagagcctgaccaaggaggtgttcaagttctgctggccccccttcgaccagaagagcgacaccgagttcagaaagcactgctgcgagtggatcaagagaatcagcggcgagtgcggcagcagcttcccccaggtggtgggcagcctgttcctgagccccggcggccccaagttcatccacctgatgtaccacttcgccagattcgtggccatgaagtacatcaagagcaacagcaagaacagcagccaccacttcgtggagaccttcaacatcaagccccaggacctgcacaagtgcatcgccagatgccacttcgccagaagcagattcctgcagatcctgcagagacaggactgcgtgacccagaagtaccaggagaacgcccagctgagcgtgaagcaggtgagaaacctgagaagcgagtgcatcggcctggagaaccagatcaagaagatggagccctacgacgaccacagcaacatggaggagaagatccagaaggtgagaagcctgtgggccagcgtgaacgagaccctgatgttcctggagaaggagagagaggtggtgagcagcgtgctgagcctggtgaaccagtacgccctggacggcaccaacgtggccatcaacatccccagactgctgctggacaagatcgagaagcagatgttccagctgcacatcggcaacgtgtacgaggccggcaagctgaacctgctgaccgtgatccagctgctgaacgaggtgctgaaggtgatgaagtacgagagatgccaggccgaccaggccagactgaccgtggacctgcactacctggagaaggagaccaagttccagaaggagagactgagcgacctgaagcacatgagatacagaatcaaggacgacctgaccaccatcagacacagcgtggtggagaagcagggcgagtggcacaagaagtggaaggagttcctgggcctgagccccttcagcctgatcaagggctggacccccagcgtggacctgctgccccccatgagccccctgagcttcgaccccgccagcgaggaggtgtacgccaagagcatcctgtgccagtaccccgccagcctgcccgacgcccacaagcagcacaaccaggagaacggctgcagaggcgacagcgacaccctgggcgccctgcacgacctggccaacagccccgccagcttcctgagccagagcgtgagcagcagcgacagaaacagcgtgaccgtgctggagaaggacaccaagatgggcacccccaaggagaagaacgaggccatcagcaagaagatccccgagttcgaggtggagaacagccccctgagcgacgtggccaagaacaccgagagcagcgccttcggcggcagcctgcccgccaagaagagcgaccccttccagaaggagcaggaccacctggtggaggaggtggccagagccgtgctgagcgacagcccccagctgagcgagggcaaggagatcaagctggaggagctgatcgacagcctgggcagcaaccccttcctgaccagaaaccagatccccagaacccccgagaacctgatcaccgagatcagaagcagctggagaaaggccatcgagatggaggagaacagaaccaaggagcccatccagatggacgccgagcacagagaggtgctgcccgagagcctgcccgtgctgcacaaccagagagagttcagcatggccgacttcctgctggagaccaccgtgagcgacttcggccagagccacctgaccgaggagaaggtgatcagcgactgcgagtgcgtgccccagaagcacgtgctgaccagccacatcgacgagccccccacccagaaccagagcgacctgctgaacaagaaggtgatctgcaagcaggacctggagtgcctggccttcaccaagctgagcgagaccagcagaatggagaccttcagccccgccgtgggcaacagaatcgacgtgatgggcggcagcgaggaggagttcatgaagatcctggaccacctggaggtgagctgcaacaagcccagcaccaacaagaccatgctgtggaacagcttccagatcagcagcggcatcagcagcaagagcttcaaggacaacgacttcggcatcctgcacgagaccctgcccgaggaggtgggccacctgagcttcaacagcagcagcagcagcgaggccaacttcaagctggagcccaacagccccatgcacggcggcaccctgctggaggacgtggtgggcggcagacagaccacccccgagagcgacttcaacctgcaggccctgagaagcagatacgaggccctgaagaagagcctgagcaagaagagagaggagagctacctgagcaacagccagacccccgagagacacaagcccgagctgagccccaccccccagaacgtgcagaccgacgacaccctgaacttcctggacacctgcgacctgcacaccgagcacatcaagcccagcctgagaaccagcatcggcgagagaaagagaagcctgagccccctgatcaagttcagccccgtggagcagagactgagaaccaccatcgcctgcagcctgggcgagctgcccaacctgaaggaggaggacatcctgaacaagagcctggacgccaaggagccccccagcgacctgaccagatag

SEQ ID NO: 84086 - DNA, 552 bp, synthetic construct
  misc_feature 1..552: note = Description of Artificial Sequence: Synthetic coding sequence
  source 1..552: mol_type = other DNA
atgggcacccccaaggagaagaacgaggccatcagcaagaagatccccgagttcgaggtggagaacagccccctgagcgacgtggccaagaacaccgagagcagcgccttcggcggcagcctgcccgccaagaagagcgaccccttccagaaggagcaggaccacctggtggaggaggtggccagagccgtgctgagcgacagcccccagctgagcgagggcaaggagatcaagctggaggagctgatcgacagcctgggcagcaaccccttcctgaccagaaaccagatccccagaacccccgagaacctgatcaccgagatcagaagcagctggagaaaggccatcgagatggaggagaacagaaccaaggagcccatccagatggacgccgagcacagagaggtgctgcccgagagcctgcccgtgctgcacaaccagagagagttcagcatggccgacttcctgctggagaccaccgtgagcgacttcggccagagccacctgaccgaggagaaggtgatcagcgactgcgagtgcgtgccccagtag

SEQ ID NO: 84087 - DNA, 1077 bp, synthetic construct
  misc_feature 1..1077: note = Description of Artificial Sequence: Synthetic coding sequence
  source 1..1077: mol_type = other DNA
atggccggccaggacgccggctgcggcagaggcggcgacgactacagcgaggacgagggcgacagcagcgtgagcagagccgccgtggaggtgttcggcaagctgaaggacctgaactgccccttcctggagggcctgtacatcaccgagcccaagaccatccaggagctgctgtgcagccccagcgagtacagactggagatcctggagtggatgtgcaccagagtgtggcccagcctgcaggacagattcagcagcctgaagggcgtgcccaccgaggtgaagatccaggagatgaccaagctgggccacgagctgatgctgtgcgcccccgacgaccaggagctgctgaagggctgcgcctgcgcccagaagcagctgcacttcatggaccagctgctggacaccatcagaagcctgaccatcggctgcagcagctgcagcagcctgatggagcacttcgaggacaccagagagaagaacgaggccctgctgggcgagctgttcagcagcccccacctgcagatgctgctgaaccccgagtgcgacccctggcccctggacatgcagcccctgctgaacaagcagagcgacgactggcagtgggccagcgccagcgccaagagcgaggaggaggagaagctggccgagctggccagacagctgcaggagagcgccgccaagctgcacgccctgagaaccgagtacttcgcccagcacgagcagggcgccgccgccggcgccgccgacatcagcaccctggaccagaagctgagactggtgaccagcgacttccaccagctgatcctggccttcctgcaggtgtacgacgacgagctgggcgagtgctgccagagacccggccccgacctgcacccctgcggccccatcatccaggccacccaccagaacctgaccagctacagccagctgctgcaggtggtgatggccgtggccgacaccagcgccaaggccgtggagaccgtgaagaagcagcagggcgagcagatctgctggggcggcagcagcagcgtgatgagcctggccaccaagatgaacgagctgatggagaagtag

SEQ ID NO: 84088 - DNA, 1284 bp, synthetic construct
  misc_feature 1..1284: note = Description of Artificial Sequence: Synthetic coding sequence
  source 1..1284: mol_type = other DNA
atgggcggcgccagactgggcgccagaaacatggccggccaggacgccggctgcggcagaggcggcgacgactacagcgaggacgagggcgacagcagcgtgagcagagccgccgtggaggtgttcggcaagctgaaggacctgaactgccccttcctggagggcctgtacatcaccgagcccaagaccatccaggagctgctgtgcagccccagcgagtacagactggagatcctggagtggatgtgcaccagagtgtggcccagcctgcaggacagattcagcagcctgaagggcgtgcccaccgaggtgaagatccaggagatgaccaagctgggccacgagctgatgctgtgcgcccccgacgaccaggagctgctgaagggctgcgcctgcgcccagaagcagctgcacttcatggaccagctgctggacaccatcagaagcctgaccatcggctgcagcagctgcagcagcctgatggagcacttcgaggacaccagagagaagaacgaggccctgctgggcgagctgttcagcagcccccacctgcagatgctgctgaaccccgagtgcgacccctggcccctggacatgcagcccctgctgaacaagcagagcgacgactggcagtgggccagcgccagcgccaagagcgaggaggaggagaagctggccgagctggccagacagctgcaggagagcgccgccaagctgcacgccctgagaaccgagtacttcgcccagcacgagcagggcgccgccgccggcgccgccgacatcagcaccctggaccagaagctgagactggtgaccagcgacttccaccagctgatcctggccttcctgcaggtgtacgacgacgagctgggcgagtgctgccagagacccggccccgacctgcacccctgcggccccatcatccaggccacccaccagaacctgaccagctacagccagatccccagaggccagcccaagaagcccgccctggtgaccatgaccaccgtgcccacctgcgccaccctgcccctggcccagggcttcagagacgtgcacttcggcttcctgagcgagagactgagagccttccagcccctgaccggctggagctgcgagacccccagaagcggcatgctgctgcaggtggtgatggccgtggccgacaccagcgccaaggccgtggagaccgtgaagaagcagcagggcgagcagatctgctggggcggcagcagcagcgtgatgagcctggccaccaagatgaacgagctgatggagaagtag

SEQ ID NO: 84089 - DNA, 1107 bp, synthetic construct
  misc_feature 1..1107: note = Description of Artificial Sequence: Synthetic coding sequence
  source 1..1107: mol_type = other DNA
atgggcggcgccagactgggcgccagaaacatggccggccaggacgccggctgcggcagaggcggcgacgactacagcgaggacgagggcgacagcagcgtgagcagagccgccgtggaggtgttcggcaagctgaaggacctgaactgccccttcctggagggcctgtacatcaccgagcccaagaccatccaggagctgctgtgcagccccagcgagtacagactggagatcctggagtggatgtgcaccagagtgtggcccagcctgcaggacagattcagcagcctgaagggcgtgcccaccgaggtgaagatccaggagatgaccaagctgggccacgagctgatgctgtgcgcccccgacgaccaggagctgctgaagggctgcgcctgcgcccagaagcagctgcacttcatggaccagctgctggacaccatcagaagcctgaccatcggctgcagcagctgcagcagcctgatggagcacttcgaggacaccagagagaagaacgaggccctgctgggcgagctgttcagcagcccccacctgcagatgctgctgaaccccgagtgcgacccctggcccctggacatgcagcccctgctgaacaagcagagcgacgactggcagtgggccagcgccagcgccaagagcgaggaggaggagaagctggccgagctggccagacagctgcaggagagcgccgccaagctgcacgccctgagaaccgagtacttcgcccagcacgagcagggcgccgccgccggcgccgccgacatcagcaccctggaccagaagctgagactggtgaccagcgacttccaccagctgatcctggccttcctgcaggtgtacgacgacgagctgggcgagtgctgccagagacccggccccgacctgcacccctgcggccccatcatccaggccacccaccagaacctgaccagctacagccagctgctgcaggtggtgatggccgtggccgacaccagcgccaaggccgtggagaccgtgaagaagcagcagggcgagcagatctgctggggcggcagcagcagcgtgatgagcctggccaccaagatgaacgagctgatggagaagtag

SEQ ID NO: 84090 - DNA, 411 bp, synthetic construct
  misc_feature 1..411: note = Description of Artificial Sequence: Synthetic coding sequence
  source 1..411: mol_type = other DNA
atggaccagctgctggacaccatcagaagcctgaccatcggctgcagcagctgcagcagcctgatggagcacttcgaggacaccagagagaagaacgaggccctgctgggcgagctgttcagcagcccccacctgcagatgctgctgaaccccgagtgcgacccctggcccctggacatgcagcccctgctgaacaagcagagcgacgactggcagtgggccagcgccagcgccaagagcgaggaggaggagaagctggccgagctggccagacagctgcaggagagcgccgccaagctgcacgccctgagaaccgagagcaccaccaccagctgggccagcgccgccagcgcccaggccctgaccagcaccagagccgcccccagcagcagacccagaaccagaatctag

SEQ ID NO: 84091 - DNA, 516 bp, synthetic construct
  misc_feature 1..516: note = Description of Artificial Sequence: Synthetic coding sequence
  source 1..516: mol_type = other DNA
atggtgaagagaagaagaagccccgccctgggcgaggagagattcagccccagcagcatcctgcaccccagactgcccctggtgctgctgggcaccagagtgcccctgagcggcggcggccccggcgagcccgaccagggcagaagcgcccccagctggaagagcctggccagcacccaccaccacagcagacccgccgccggcgccacccccgccagacccgccacccagagccagctgggccccttcgccccccccctgcccggcgtgagacccgcccccttccccgccgtggaggtgttcggcaagctgaaggacctgaactgccccttcctggagggcctgtacatcaccgagcccaagaccatccaggagctgctgtgcagccccagcgagtacagactggagatcctggagtggatgtgcaccagagtgtggcccagcctgcaggacagattcagcagcctgaagggcgtgcccaccgaggtgaagatccagggcctgctggccggctag

SEQ ID NO: 84092 - DNA, 1233 bp, synthetic construct
  misc_feature 1..1233: note = Description of Artificial Sequence: Synthetic coding sequence
  source 1..1233: mol_type = other DNA
atggccgacagcagcggcagaggcgccggcaagcccgccaccggccccaccaacagcagcagcgccaagaagaaggacaagagagtgcagggcggcagagtgatcgagagcagatacctgcagtacgagaagaagaccacccagaaggcccccgccggcgacggcagccagaccagaggcaagatgagcgagggcggcagaaagagcagcctgctgcagaagagcaaggccgacagcagcggcgtgggcaagggcgacctgcagagcaccctgctggagggccacggcaccgccccccccgacctggacctgagcgccatcaacgacaagagcatcgtgaagaagaccccccagctggccaagaccatcagcaagaagcccgagagcaccagcttcagcgcccccagaaagaagagccccgacctgagcgaggccatggagatgatggagagccagaccctgctgctgaccctgctgagcgtgaagatggagaacaacctggccgagttcgagagaagagccgagaagaacctgctgatcatgtgcaaggagaaggagaagctgcagaagaaggcccacgagctgaagagaagactgctgctgagccagagaaagagagagctggccgacgtgctggacgcccagatcgagatgctgagccccttcgaggccgtggccaccagattcaaggagcagtacagaaccttcgccaccgccctggacaccaccagacacgagctgcccgtgagaagcatccacctggagggcgacggccagcagctgctggacgccctgcagcacgagctggtgaccacccagagactgctgggcgagctggacgtgggcgacagcgaggagaacgtgcaggtgctggacctgctgagcgagctgaaggacgtgaccgccaagaaggacctggagctgagaagaagcttcgcccaggtgctggagctgagcgccgaggccagcaaggaggccgccctggccaaccaggaggtgtgggaggagacccagggcatggccccccccagcagatggtacttcaaccaggacagcgcctgcagagagagcggcggcgcccccaagaacacccccctgagcgaggacgacaaccccggcgccagcagcgcccccgcccaggccaccttcatcagccccagcgaggacttcagcagcagcagccaggccgaggtgccccccagcctgagcagaagcggcagagacctgagctag

SEQ ID NO: 84093 - DNA, 1230 bp, synthetic construct
  misc_feature 1..1230: note = Description of Artificial Sequence: Synthetic coding sequence
  source 1..1230: mol_type = other DNA
atggccgacagcagcggcagaggcgccggcaagcccgccaccggccccaccaacagcagcagcgccaagaagaaggacaagagagtgcagggcggcagagtgatcgagagcagatacctgcagtacgagaagaagaccacccagaaggcccccgccggcgacggcagccagaccagaggcaagatgagcgagggcggcagaaagagcagcctgctgcagaagagcaaggacagcagcggcgtgggcaagggcgacctgcagagcaccctgctggagggccacggcaccgccccccccgacctggacctgagcgccatcaacgacaagagcatcgtgaagaagaccccccagctggccaagaccatcagcaagaagcccgagagcaccagcttcagcgcccccagaaagaagagccccgacctgagcgaggccatggagatgatggagagccagaccctgctgctgaccctgctgagcgtgaagatggagaacaacctggccgagttcgagagaagagccgagaagaacctgctgatcatgtgcaaggagaaggagaagctgcagaagaaggcccacgagctgaagagaagactgctgctgagccagagaaagagagagctggccgacgtgctggacgcccagatcgagatgctgagccccttcgaggccgtggccaccagattcaaggagcagtacagaaccttcgccaccgccctggacaccaccagacacgagctgcccgtgagaagcatccacctggagggcgacggccagcagctgctggacgccctgcagcacgagctggtgaccacccagagactgctgggcgagctggacgtgggcgacagcgaggagaacgtgcaggtgctggacctgctgagcgagctgaaggacgtgaccgccaagaaggacctggagctgagaagaagcttcgcccaggtgctggagctgagcgccgaggccagcaaggaggccgccctggccaaccaggaggtgtgggaggagacccagggcatggccccccccagcagatggtacttcaaccaggacagcgcctgcagagagagcggcggcgcccccaagaacacccccctgagcgaggacgacaaccccggcgccagcagcgcccccgcccaggccaccttcatcagccccagcgaggacttcagcagcagcagccaggccgaggtgccccccagcctgagcagaagcggcagagacctgagctag

SEQ ID NO: 84094 - DNA, 1899 bp, synthetic construct
  misc_feature 1..1899: note = Description of Artificial Sequence: Synthetic coding sequence
  source 1..1899: mol_type = other DNA
atggccagacacagaaacgtgagaggctacaactacgacgaggacttcgaggacgacgacctgtacggccagagcgtggaggacgactactgcatcagccccagcaccgccgcccagttcatctacagcagaagagacaagcccagcgtggagcccgtggaggagtacgactacgaggacctgaaggagagcagcaacagcgtgagcaaccaccagctgagcggcttcgaccaggccagactgtacagctgcctggaccacatgagagaggtgctgggcgacgccgtgcccgacgagatcctgatcgaggccgtgctgaagaacaagttcgacgtgcagaaggccctgagcggcgtgctggagcaggacagagtgcagagcctgaaggacaagaacgaggccaccgtgagcaccggcaagatcgccaagggcgtgctgttcagcagcagcgaggtgagcgccgacaacgtgcagagcagctacccccagagcgccaaccacctggactacagcagcaagcccttcgacttcgccagcagcgtgggcaagtacggcctgagccacaacagcagcgtgcccacccactgcctgctgcacagaaagaagaagctggacaccagaaagagcgagaagaagctggagagctgcaagctgaccaaggagctgagcctggccaacctgatccacgacatgagcagagacagctgcgagagccagcccagcgtgagactgagcagcaccgacagcctggagagcctgctgagcaagaacctggacgccgacctgctgagaccccacgccagcgagtgcatcagcaaggacgacagcgccttcaaggagatccccgacctgaagaccatcatcatcaagggcaccacccccaacaacagcctgtacatccagaacaacagcctgagcgacttccagaacatccccgtgcaggacagcctgggcagcagcaacaaccccctgtacctgaccagcagcctggagaacatgaccgtggacaacctgaacgccagcaaggagaccgaggtgggcaacgtgagcctggtggagcagagcgccaagaaccacaccttcaagaacgacaacctgcagttcagccagtgcgagagccccagcctgaccgagctgttccaggagcacaaggagaacaacatcagccagtgcttcaccctgagcgacctgtgcaaccagagcagcgccagcttcaccgacctgagcctgggcagcttccccctgagccagctggccaacagatgccagagcagccccggcatcagcgagctgaccggcagcctgagcagcctggccttccacaaggccagccccaccagagacctggagaacctgagcctgagcgagctgatcgccgagaccatcgacgtggacaacagccagatcaagaaggagagcttcgaggtgagcctgagcgaggtgagaagccccggcatcgacagcaacatcgacctgagcgtgctgatcaagaaccccgacttcgtgcccaagcccgtggtggaccccagcatcgcccccagcagcagaaccaaggtgctgagcagcaagctgggcaagaacagcaacttcgccaaggacaacaagaagaacaacaagggcagcctgaccagaaagccccccttcagcctgagctggaccaaggccctggccgccagacccagcgccttcgccagcaccctgtgcctgagataccccctgaagagctgcaagagaagaaccctggacctgtacaagaccttcctgtacagcagacaggtgcaggacgtgaaggacaaggagatcagccccctggtggccatcacccccttcgacttcaagagcgccagccccgacgacatcgtgaaggccaaccagaagaaggccttcaccagagagtag

SEQ ID NO: 84095 - DNA, 1563 bp, synthetic construct
  misc_feature 1..1563: note = Description of Artificial Sequence: Synthetic coding sequence
  source 1..1563: mol_type = other DNA
atgaccgtgagcggcaagaagcagaccatgggcttcgaggtgcccggcgtgagcagcgaggagaacggccacagcttccacaccccccagaagggcccccccatcgaggacgccatcgccagcagcgacgtgctggagaccgccagcaagagcgccaaccccccccacaccatccaggccagcgaggagcagagcagcacccccgcccccgtgaagaagagcggcaagctgagacagcagatcgacgtgaaggccgagctggagaagagacagggcggcaagcagctgctgaacctggtggtgatcggccacgtggacgccggcaagagcaccctgatgggccacatgctgtacctgctgggcaacatcaacaagagaaccatgcacaagtacgagcaggagagcaagaaggccggcaaggccagcttcgcctacgcctgggtgctggacgagaccggcgaggagagagagagaggcgtgaccatggacgtgggcatgaccaagttcgagaccaccaccaaggtgatcaccctgatggacgcccccggccacaaggacttcatccccaacatgatcaccggcgccgcccaggccgacgtggccgtgctggtggtggacgccagcagaggcgagttcgaggccggcttcgagaccggcggccagaccagagagcacggcctgctggtgagaagcctgggcgtgacccagctggccgtggccgtgaacaagatggaccaggtgaactggcagcaggagagattccaggagatcaccggcaagctgggccacttcctgaagcaggccggcttcaaggagagcgacgtgggcttcatccccaccagcggcctgagcggcgagaacctgatcaccagaagccagagcagcgagctgaccaagtggtacaagggcctgtgcctgctggagcagatcgacagcttcaagcccccccagagaagcatcgacaagcccttcagactgtgcgtgagcgacgtgttcaaggaccagggcagcggcttctgcatcaccggcaagatcgaggccggctacatccagaccggcgacagactgctggccatgccccccaacgagacctgcaccgtgaagggcatcaccctgcacgacgagcccgtggactgggccgccgccggcgaccacgtgagcctgaccctggtgggcatggacatcatcaagatcaacgtgggctgcatcttctgcggccccaaggtgcccatcaaggcctgcaccagattcagagccagaatcctgatcttcaacatcgagatccccatcaccaagggcttccccgtgctgctgcactaccagaccgtgagcgagcccgccgtgatcaagagactgatcagcgtgctgaacaagagcaccggcgaggtgaccaagaagaagcccaagttcctgaccaagggccagaacgccctggtggagctgcagacccagagacccatcgccctggagctgtacaaggacttcaaggagctgggcagattcatgctgagatacggcggcagcaccatcgccgccggcgtggtgaccgagatcaaggagtag

SEQ ID NO: 84096 - DNA, 1929 bp, synthetic construct
  misc_feature 1..1929: note = Description of Artificial Sequence: Synthetic coding sequence
  source 1..1929: mol_type = other DNA
atggccagacacagaaacgtgagaggctacaactacgacgaggacttcgaggacgacgacctgtacggccagagcgtggaggacgactactgcatcagccccagcaccgccagactgtacagctgcctggaccacatgagagaggtgctgggcgacgccgtgcccgacgagatcctgatcgaggccgtgctgaagaacaagttcgacgtgcagaaggccctgagcggcgtgctggagcaggacagagtgcagagcctgaaggacaagaacgaggccaccgtgagcaccggcaagatcgccaagggcaagcccgtggacagccagaccagcagaagcgagagcgagatcgtgcccaaggtggccaagatgaccgtgagcggcaagaagcagaccatgggcttcgaggtgcccggcgtgagcagcgaggagaacggccacagcttccacaccccccagaagggcccccccatcgaggacgccatcgccagcagcgacgtgctggagaccgccagcaagagcgccaaccccccccacaccatccaggccagcgaggagcagagcagcacccccgcccccgtgaagaagagcggcaagctgagacagcagatcgacgtgaaggccgagctggagaagagacagggcggcaagcagctgctgaacctggtggtgatcggccacgtggacgccggcaagagcaccctgatgggccacatgctgtacctgctgggcaacatcaacaagagaaccatgcacaagtacgagcaggagagcaagaaggccggcaaggccagcttcgcctacgcctgggtgctggacgagaccggcgaggagagagagagaggcgtgaccatggacgtgggcatgaccaagttcgagaccaccaccaaggtgatcaccctgatggacgcccccggccacaaggacttcatccccaacatgatcaccggcgccgcccaggccgacgtggccgtgctggtggtggacgccagcagaggcgagttcgaggccggcttcgagaccggcggccagaccagagagcacggcctgctggtgagaagcctgggcgtgacccagctggccgtggccgtgaacaagatggaccaggtgaactggcagcaggagagattccaggagatcaccggcaagctgggccacttcctgaagcaggccggcttcaaggagagcgacgtgggcttcatccccaccagcggcctgagcggcgagaacctgatcaccagaagccagagcagcgagctgaccaagtggtacaagggcctgtgcctgctggagcagatcgacagcttcaagcccccccagagaagcatcgacaagcccttcagactgtgcgtgagcgacgtgttcaaggaccagggcagcggcttctgcatcaccggcaagatcgaggccggctacatccagaccggcgacagactgctggccatgccccccaacgagacctgcaccgtgaagggcatcaccctgcacgacgagcccgtggactgggccgccgccggcgaccacgtgagcctgaccctggtgggcatggacatcatcaagatcaacgtgggctgcatcttctgcggccccaaggtgcccatcaaggcctgcaccagattcagagccagaatcctgatcttcaacatcgagatccccatcaccaagggcttccccgtgctgctgcactaccagaccgtgagcgagcccgccgtgatcaagagactgatcagcgtgctgaacaagagcaccggcgaggtgaccaagaagaagcccaagttcctgaccaagggccagaacgccctggtggagctgcagacccagagacccatcgccctggagctgtacaaggacttcaaggagctgggcagattcatgctgagatacggcggcagcaccatcgccgccggcgtggtgaccgagatcaaggagtag

SEQ ID NO: 84097 - DNA, 2055 bp, synthetic construct
  misc_feature 1..2055: note = Description of Artificial Sequence: Synthetic coding sequence
  source 1..2055: mol_type = other DNA
atggccagacacagaaacgtgagaggctacaactacgacgaggacttcgaggacgacgacctgtacggccagagcgtggaggacgactactgcatcagccccagcaccgccgcccagttcatctacagcagaagagacaagcccagcgtggagcccgtggaggagtacgactacgaggacctgaaggagagcagcaacagcgtgagcaaccaccagctgagcggcttcgaccaggccagactgtacagctgcctggaccacatgagagaggtgctgggcgacgccgtgcccgacgagatcctgatcgaggccgtgctgaagaacaagttcgacgtgcagaaggccctgagcggcgtgctggagcaggacagagtgcagagcctgaaggacaagaacgaggccaccgtgagcaccggcaagatcgccaagggcaagcccgtggacagccagaccagcagaagcgagagcgagatcgtgcccaaggtggccaagatgaccgtgagcggcaagaagcagaccatgggcttcgaggtgcccggcgtgagcagcgaggagaacggccacagcttccacaccccccagaagggcccccccatcgaggacgccatcgccagcagcgacgtgctggagaccgccagcaagagcgccaaccccccccacaccatccaggccagcgaggagcagagcagcacccccgcccccgtgaagaagagcggcaagctgagacagcagatcgacgtgaaggccgagctggagaagagacagggcggcaagcagctgctgaacctggtggtgatcggccacgtggacgccggcaagagcaccctgatgggccacatgctgtacctgctgggcaacatcaacaagagaaccatgcacaagtacgagcaggagagcaagaaggccggcaaggccagcttcgcctacgcctgggtgctggacgagaccggcgaggagagagagagaggcgtgaccatggacgtgggcatgaccaagttcgagaccaccaccaaggtgatcaccctgatggacgcccccggccacaaggacttcatccccaacatgatcaccggcgccgcccaggccgacgtggccgtgctggtggtggacgccagcagaggcgagttcgaggccggcttcgagaccggcggccagaccagagagcacggcctgctggtgagaagcctgggcgtgacccagctggccgtggccgtgaacaagatggaccaggtgaactggcagcaggagagattccaggagatcaccggcaagctgggccacttcctgaagcaggccggcttcaaggagagcgacgtgggcttcatccccaccagcggcctgagcggcgagaacctgatcaccagaagccagagcagcgagctgaccaagtggtacaagggcctgtgcctgctggagcagatcgacagcttcaagcccccccagagaagcatcgacaagcccttcagactgtgcgtgagcgacgtgttcaaggaccagggcagcggcttctgcatcaccggcaagatcgaggccggctacatccagaccggcgacagactgctggccatgccccccaacgagacctgcaccgtgaagggcatcaccctgcacgacgagcccgtggactgggccgccgccggcgaccacgtgagcctgaccctggtgggcatggacatcatcaagatcaacgtgggctgcatcttctgcggccccaaggtgcccatcaaggcctgcaccagattcagagccagaatcctgatcttcaacatcgagatccccatcaccaagggcttccccgtgctgctgcactaccagaccgtgagcgagcccgccgtgatcaagagactgatcagcgtgctgaacaagagcaccggcgaggtgaccaagaagaagcccaagttcctgaccaagggccagaacgccctggtggagctgcagacccagagacccatcgccctggagctgtacaaggacttcaaggagctgggcagattcatgctgagatacggcggcagcaccatcgccgccggcgtggtgaccgagatcaaggagtag

SEQ ID NO: 84098 - DNA, 1227 bp, synthetic construct
  misc_feature 1..1227: note = Description of Artificial Sequence: Synthetic coding sequence
  source 1..1227: mol_type = other DNA
atgggccacatgctgtacctgctgggcaacatcaacaagagaaccatgcacaagtacgagcaggagagcaagaaggccggcaaggccagcttcgcctacgcctgggtgctggacgagaccggcgaggagagagagagaggcgtgaccatggacgtgggcatgaccaagttcgagaccaccaccaaggtgatcaccctgatggacgcccccggccacaaggacttcatccccaacatgatcaccggcgccgcccaggccgacgtggccgtgctggtggtggacgccagcagaggcgagttcgaggccggcttcgagaccggcggccagaccagagagcacggcctgctggtgagaagcctgggcgtgacccagctggccgtggccgtgaacaagatggaccaggtgaactggcagcaggagagattccaggagatcaccggcaagctgggccacttcctgaagcaggccggcttcaaggagagcgacgtgggcttcatccccaccagcggcctgagcggcgagaacctgatcaccagaagccagagcagcgagctgaccaagtggtacaagggcctgtgcctgctggagcagatcgacagcttcaagcccccccagagaagcatcgacaagcccttcagactgtgcgtgagcgacgtgttcaaggaccagggcagcggcttctgcatcaccggcaagatcgaggccggctacatccagaccggcgacagactgctggccatgccccccaacgagacctgcaccgtgaagggcatcaccctgcacgacgagcccgtggactgggccgccgccggcgaccacgtgagcctgaccctggtgggcatggacatcatcaagatcaacgtgggctgcatcttctgcggccccaaggtgcccatcaaggcctgcaccagattcagagccagaatcctgatcttcaacatcgagatccccatcaccaagggcttccccgtgctgctgcactaccagaccgtgagcgagcccgccgtgatcaagagactgatcagcgtgctgaacaagagcaccggcgaggtgaccaagaagaagcccaagttcctgaccaagggccagaacgccctggtggagctgcagacccagagacccatcgccctggagctgtacaaggacttcaaggagctgggcagattcatgctgagatacggcggcagcaccatcgccgccggcgtggtgaccgagatcaaggagtag

SEQ ID NO: 84099 - DNA, 840 bp, synthetic construct
  misc_feature 1..840: note = Description of Artificial Sequence: Synthetic coding sequence
  source 1..840: mol_type = other DNA
atgagcctgttcgacctgttcagaggcttcttcggcttccccggccccagaagccacagagaccccttcttcggcggcatgaccagagacgaggacgacgacgaggaggaggaggaggagggcggcagctggggcagaggcaaccccagattccacagcccccagcacccccccgaggagttcggcttcggcttcagcttcagccccggcggcggcatcagattccacgacaacttcggcttcgacgacctggtgagagacttcaacagcatcttcagcgacatgggcgcctggaccctgcccagccacccccccgagctgcccggccccgagagcgagacccccggcgagagactgagagagggccagaccctgagagacagcatgctgaagtaccccgacagccaccagcccagaatcttcggcggcgtgctggagagcgacgccagaagcgagagcccccagcccgcccccgactggggcagccagagacccttccacagattcgacgacgtgtggcccatggacccccaccccagaaccagagaggacaacgacctggacagccaggtgagccaggagggcctgggccccgtgctgcagccccagcccaagagctacttcaagagcatcagcgtgaccaagatcaccaagcccgacggcatcgtggaggagagaagaaccgtggtggacagcgagggcagaaccgagaccaccgtgaccagacacgaggccgacagcagccccagaggcgaccccgagagccccagaccccccgccctggacgacgccttcagcatcctggacctgttcctgggcagatggttcagaagcagatag

SEQ ID NO: 84100 - DNA, 696 bp, synthetic construct
  misc_feature 1..696: note = Description of Artificial Sequence: Synthetic coding sequence
  source 1..696: mol_type = other DNA
atgagcctgttcgacctgttcagaggcttcttcggcttccccggccccagaagcttcagccccggcggcggcatcagattccacgacaacttcggcttcgacgacctggtgagagacttcaacagcatcttcagcgacatgggcgcctggaccctgcccagccacccccccgagctgcccggccccgagagcgagacccccggcgagagactgagagagggccagaccctgagagacagcatgctgaagtaccccgacagccaccagcccagaatcttcggcggcgtgctggagagcgacgccagaagcgagagcccccagcccgcccccgactggggcagccagagacccttccacagattcgacgacgtgtggcccatggacccccaccccagaaccagagaggacaacgacctggacagccaggtgagccaggagggcctgggccccgtgctgcagccccagcccaagagctacttcaagagcatcagcgtgaccaagatcaccaagcccgacggcatcgtggaggagagaagaaccgtggtggacagcgagggcagaaccgagaccaccgtgaccagacacgaggccgacagcagccccagaggcgaccccgagagccccagaccccccgccctggacgacgccttcagcatcctggacctgttcctgggcagatggttcagaagcagatag

SEQ ID NO: 84101 - DNA, 864 bp, synthetic construct
  misc_feature 1..864: note = Description of Artificial Sequence: Synthetic coding sequence
  source 1..864: mol_type = other DNA
atgagcctgttcgacctgttcagaggcttcttcggcttccccggccccagaagccacagagaccccttcttcggcggcatgaccagagacgaggacgacgacgaggaggaggaggaggagggcggcagctggggcagaggcaaccccagattccacagcccccagcacccccccgaggagttcggcttcggcttcagcttcagccccggcggcggcatcagattccacgacaacttcggcttcgacgacctggtgagagacttcaacagcatcttcagcgacatgggcgcctggaccctgcccagccacccccccgccaacacctgccacctgagcgccgagctgcccggccccgagagcgagacccccggcgagagactgagagagggccagaccctgagagacagcatgctgaagtaccccgacagccaccagcccagaatcttcggcggcgtgctggagagcgacgccagaagcgagagcccccagcccgcccccgactggggcagccagagacccttccacagattcgacgacgtgtggcccatggacccccaccccagaaccagagaggacaacgacctggacagccaggtgagccaggagggcctgggccccgtgctgcagccccagcccaagagctacttcaagagcatcagcgtgaccaagatcaccaagcccgacggcatcgtggaggagagaagaaccgtggtggacagcgagggcagaaccgagaccaccgtgaccagacacgaggccgacagcagccccagaggcgaccccgagagccccagaccccccgccctggacgacgccttcagcatcctggacctgttcctgggcagatggttcagaagcagatag

SEQ ID NO: 84102 - DNA, 1179 bp, synthetic construct
  misc_feature 1..1179: note = Description of Artificial Sequence: Synthetic coding sequence
  source 1..1179: mol_type = other DNA
atgcagagccccgccgtgctggtgaccagcagaagactgcagaacgcccacaccggcctggacctgaccgtgccccagcaccaggaggtgagaggcaagatgatgagcggccacgtggagtaccagatcctggtggtgaccagactggccgccttcaagagcgccaagcacagacccgaggacgtggtgcagttcctggtgagcaagaagtacagcgagatcgaggagttctaccagaagctgagcagcagatacgccgccgccagcctgccccccctgcccagaaaggtgctgttcgtgggcgagagcgacatcagagagagaagagccgtgttcaacgagatcctgagatgcgtgagcaaggacgccgagctggccggcagccccgagctgctggagttcctgggcaccagaagccccggcgccgccggcctgaccagcagagacagcagcgtgctggacggcaccgacagccagaccggcaacgacgaggaggccttcgacttcttcgaggagcaggaccaggtggccgaggagggcccccccgtgcagagcctgaagggcgaggacgccgaggagagcctggaggaggaggaggccctggaccccctgggcatcatgagaagcaagaagcccaagaagcaccccaaggtggccgtgaaggccaagcccagccccagactgaccatcttcgacgaggaggtggaccccgacgagggcctgttcggccccggcagaaagctgagcccccaggaccccagcgaggacgtgagcagcgtggaccccctgaagctgttcgacgaccccgacctgggcggcgccatccccctgggcgacagcctgctgctgcccgccgcctgcgagagcggcggccccacccccagcctgagccacagagacgccagcaaggagctgttcagagtggaggaggacctggaccagatcctgaacctgggcgccgagcccaagcccaagccccagctgaagcccaagccccccgtggccgccaagcccgtgatccccagaaagcccgccgtgccccccaaggccggccccgccgaggccgtggccggccagcagaagccccaggagcagatccaggccatggacgagatggacatcctgcagtacatccaggaccacgacacccccgcccaggccgcccccagcctgttctag

SEQ ID NO: 84103 - DNA, 654 bp, synthetic construct
  misc_feature 1..654: note = Description of Artificial Sequence: Synthetic coding sequence
  source 1..654: mol_type = other DNA
atgagcctggtgggcggcttcccccaccaccccgtggtgcaccacgagggctaccccttcgccgccgccgccgccgccgccgccgccgccgccgccagcagatgcagccacgaggagaacccctacttccacggctggctgatcggccaccccgagatgagcccccccgactacagcatggccctgagctacagccccgagtacgccagcggcgccgccggcctggaccacagccactacggcggcgtgccccccggcgccggcccccccggcctgggcggccccagacccgtgaagagaagaggcaccgccaacagaaaggagagaagaagaacccagagcatcaacagcgccttcgccgagctgagagagtgcatccccaacgtgcccgccgacaccaagctgagcaagatcaagaccctgagactggccaccagctacatcgcctacctgatggacctgctggccaaggacgaccagaacggcgaggccgaggccttcaaggccgagatcaagaagaccgacgtgaaggaggagaagagaaagaaggagctgaacgagatcctgaagagcaccgtgagcagcaacgacaagaagaccaagggcagaaccggctggccccagcacgtgtgggccctggagctgaagcagtag

SEQ ID NO: 84104 - DNA, 561 bp, synthetic construct
  misc_feature 1..561: note = Description of Artificial Sequence: Synthetic coding sequence
  source 1..561: mol_type = other DNA
atgagcctggtgggcggcttcccccaccaccccgtggtgcaccacgagggctaccccttcgccgccgccgccgccgccgccgccgccgccgccgccagcagatgcagccacgaggagaacccctacttccacggctggctgatcggccaccccgagatgagcccccccgactacagcatggccctgagctacagccccgagtacgccagcggcaccgccaacagaaaggagagaagaagaacccagagcatcaacagcgccttcgccgagctgagagagtgcatccccaacgtgcccgccgacaccaagctgagcaagatcaagaccctgagactggccaccagctacatcgcctacctgatggacctgctggccaaggacgaccagaacggcgaggccgaggccttcaaggccgagatcaagaagaccgacgtgaaggaggagaagagaaagaaggagctgaacgagatcctgaagagcaccgtgagcagcaacgacaagaagaccaagggcagaaccggctggccccagcacgtgtgggccctggagctgaagcagtag

SEQ ID NO: 84105 - DNA, 498 bp, synthetic construct
  misc_feature 1..498: note = Description of Artificial Sequence: Synthetic coding sequence
  source 1..498: mol_type = other DNA
atgagcccccccgactacagcatggccctgagctacagccccgagtacgccagcggcgccgccggcctggaccacagccactacggcggcgtgccccccggcgccggcccccccggcctgggcggccccagacccgtgaagagaagaggcaccgccaacagaaaggagagaagaagaacccagagcatcaacagcgccttcgccgagctgagagagtgcatccccaacgtgcccgccgacaccaagctgagcaagatcaagaccctgagactggccaccagctacatcgcctacctgatggacctgctggccaaggacgaccagaacggcgaggccgaggccttcaaggccgagatcaagaagaccgacgtgaaggaggagaagagaaagaaggagctgaacgagatcctgaagagcaccgtgagcagcaacgacaagaagaccaagggcagaaccggctggccccagcacgtgtgggccctggagctgaagcagtag

SEQ ID NO: 84106 - DNA, 2577 bp, synthetic construct
  misc_feature 1..2577: note = Description of Artificial Sequence: Synthetic coding sequence
  source 1..2577: mol_type = other DNA
atgagcgtggtgggcctggacgtgggcagccagagctgctacatcgccgtggccagagccggcggcatcgagaccatcgccaacgagttcagcgacagatgcacccccagcgtgatcagcttcggcagcaagaacagaaccatcggcgtggccgccaagaaccagcagatcacccacgccaacaacaccgtgagcaacttcaagagattccacggcagagccttcaacgaccccttcatccagaaggagaaggagaacctgagctacgacctggtgcccctgaagaacggcggcgtgggcatcaaggtgatgtacatgggcgaggagcacctgttcagcgtggagcagatcaccgccatgctgctgaccaagctgaaggagaccgccgagaacagcctgaagaagcccgtgaccgactgcgtgatcagcgtgcccagcttcttcaccgacgccgagagaagaagcgtgctggacgccgcccagatcgtgggcctgaactgcctgagactgatgaacgacatgaccgccgtggccctgaactacggcatctacaagcaggacctgcccagcctggacgagaagcccagaatcgtggtgttcgtggacatgggccacagcgccttccaggtgagcgcctgcgccttcaacaagggcaagctgaaggtgctgggcaccgccttcgaccccttcctgggcggcaagaacttcgacgagaagctggtggagcacttctgcgccgagttcaagaccaagtacaagctggacgccaagagcaagatcagagccctgctgagactgtaccaggagtgcgagaagctgaagaagctgatgagcagcaacagcaccgacctgcccctgaacatcgagtgcttcatgaacgacaaggacgtgagcggcaagatgaacagaagccagttcgaggagctgtgcgccgagctgctgcagaagatcgaggtgcccctgtacagcctgctggagcagacccacctgaaggtggaggacgtgagcgccgtggagatcgtgggcggcgccaccagaatccccgccgtgaaggagagaatcgccaagttcttcggcaaggacatcagcaccaccctgaacgccgacgaggccgtggccagaggctgcgccctgcagtgcgccatcctgagccccgccttcaaggtgagagagttcagcgtgaccgacgccgtgcccttccccatcagcctgatctggaaccacgacagcgaggacaccgagggcgtgcacgaggtgttcagcagaaaccacgccgcccccttcagcaaggtgctgaccttcctgagaagaggccccttcgagctggaggccttctacagcgacccccagggcgtgccctaccccgaggccaagatcggcagattcgtggtgcagaacgtgagcgcccagaaggacggcgagaagagcagagtgaaggtgaaggtgagagtgaacacccacggcatcttcaccatcagcaccgccagcatggtggagaaggtgcccaccgaggagaacgagatgagcagcgaggccgacatggagtgcctgaaccagagaccccccgagaaccccgacaccgacaagaacgtgcagcaggacaacagcgaggccggcacccagccccaggtgcagaccgacgcccagcagaccagccagagcccccccagccccgagctgaccagcgaggagaacaagatccccgacgccgacaaggccaacgagaagaaggtggaccagccccccgaggccaagaagcccaagatcaaggtggtgaacgtggagctgcccatcgaggccaacctggtgtggcagctgggcaaggacctgctgaacatgtacatcgagaccgagggcaagatgatcatgcaggacaagctggagaaggagagaaacgacgccaagaacgccgtggaggagtacgtgtacgagttcagagacaagctgtgcggcccctacgagaagttcatctgcgagcaggaccaccagaacttcctgagactgctgaccgagaccgaggactggctgtacgaggagggcgaggaccaggccaagcaggcctacgtggacaagctggaggagctgatgaagatcggcacccccgtgaaggtgagattccaggaggccgaggagagacccaagatgttcgaggagctgggccagagactgcagcactacgccaagatcgccgccgacttcagaaacaaggacgagaagtacaaccacatcgacgagagcgagatgaagaaggtggagaagagcgtgaacgaggtgatggagtggatgaacaacgtgatgaacgcccaggccaagaagagcctggaccaggaccccgtggtgagagcccaggagatcaagaccaagatcaaggagctgaacaacacctgcgagcccgtggtgacccagcccaagcccaagatcgagagccccaagctggagagaacccccaacggccccaacatcgacaagaaggaggaggacctggaggacaagaacaacttcggcgccgagcccccccaccagaacggcgagtgctaccccaacgagaagaacagcgtgaacatggacctggactag

SEQ ID NO: 84107 - DNA, 414 bp, synthetic construct
  misc_feature 1..414: note = Description of Artificial Sequence: Synthetic coding sequence
  source 1..414: mol_type = other DNA
atgttcgaggagctgggccagagactgcagcactacgccaagatcgccgccgacttcagaaacaaggacgagaagtacaaccacatcgacgagagcgagatgaagaaggtggagaagagcgtgaacgaggtgatggagtggatgaacaacgtgatgaacgcccaggccaagaagagcctggaccaggaccccgtggtgagagcccaggagatcaagaccaagatcaaggagctgaacaacacctgcgagcccgtggtgacccagcccaagcccaagatcgagagccccaagctggagagaacccccaacggccccaacatcgacaagaaggaggaggacctggaggacaagaacaacttcggcgccgagcccccccaccagaacgacagctgcggcatcgtgaacagctactag

SEQ ID NO: 84108 - DNA, 2034 bp, synthetic construct
  misc_feature 1..2034: note = Description of Artificial Sequence: Synthetic coding sequence
  source 1..2034: mol_type = other DNA
atgtacatgggcgaggagcacctgttcagcgtggagcagatcaccgccatgctgctgaccaagctgaaggagaccgccgagaacagcctgaagaagcccgtgaccgactgcgtgatcagcgtgctgggcaccgccttcgaccccttcctgggcggcaagaacttcgacgagaagctggtggagcacttctgcgccgagttcaagaccaagtacaagctggacgccaagagcaagatcagagccctgctgagactgtaccaggagtgcgagaagctgaagaagctgatgagcagcaacagcaccgacctgcccctgaacatcgagtgcttcatgaacgacaaggacgtgagcggcaagatgaacagaagccagttcgaggagctgtgcgccgagctgctgcagaagatcgaggtgcccctgtacagcctgctggagcagacccacctgaaggtggaggacgtgagcgccgtggagatcgtgggcggcgccaccagaatccccgccgtgaaggagagaatcgccaagttcttcggcaaggacatcagcaccaccctgaacgccgacgaggccgtggccagaggctgcgccctgcagtgcgccatcctgagccccgccttcaaggtgagagagttcagcgtgaccgacgccgtgcccttccccatcagcctgatctggaaccacgacagcgaggacaccgagggcgtgcacgaggtgttcagcagaaaccacgccgcccccttcagcaaggtgctgaccttcctgagaagaggccccttcgagctggaggccttctacagcgacccccagggcgtgccctaccccgaggccaagatcggcagattcgtggtgcagaacgtgagcgcccagaaggacggcgagaagagcagagtgaaggtgaaggtgagagtgaacacccacggcatcttcaccatcagcaccgccagcatggtggagaaggtgcccaccgaggagaacgagatgagcagcgaggccgacatggagtgcctgaaccagagaccccccgagaaccccgacaccgacaagaacgtgcagcaggacaacagcgaggccggcacccagccccaggtgcagaccgacgcccagcagaccagccagagcccccccagccccgagctgaccagcgaggagaacaagatccccgacgccgacaaggccaacgagaagaaggtggaccagccccccgaggccaagaagcccaagatcaaggtggtgaacgtggagctgcccatcgaggccaacctggtgtggcagctgggcaaggacctgctgaacatgtacatcgagaccgagggcaagatgatcatgcaggacaagctggagaaggagagaaacgacgccaagaacgccgtggaggagtacgtgtacgagttcagagacaagctgtgcggcccctacgagaagttcatctgcgagcaggaccaccagaacttcctgagactgctgaccgagaccgaggactggctgtacgaggagggcgaggaccaggccaagcaggcctacgtggacaagctggaggagctgatgaagatcggcacccccgtgaaggtgagattccaggaggccgaggagagacccaagatgttcgaggagctgggccagagactgcagcactacgccaagatcgccgccgacttcagaaacaaggacgagaagtacaaccacatcgacgagagcgagatgaagaaggtggagaagagcgtgaacgaggtgatggagtggatgaacaacgtgatgaacgcccaggccaagaagagcctggaccaggaccccgtggtgagagcccaggagatcaagaccaagatcaaggagctgaacaacacctgcgagcccgtggtgacccagcccaagcccaagatcgagagccccaagctggagagaacccccaacggccccaacatcgacaagaaggaggaggacctggaggacaagaacaacttcggcgccgagcccccccaccagaacggcgagtgctaccccaacgagaagaacagcgtgaacatggacctggactag

SEQ ID NO: 84109 - DNA, 1920 bp, synthetic construct
  misc_feature 1..1920: note = Description of Artificial Sequence: Synthetic coding sequence
  source 1..1920: mol_type = other DNA
atggccagagagagaccctgcagatgccacggcaacggcggcagaagccccggcaccggctgccccctgggcagaatcttccccgagggcagcagaagaagaaagagaaagtggcacgtggagggccccgtggaggcccccagaaacggccagacccccagagccggcgccgagagaggccagggcagaaagagaagacaggagaagcaggccggcggcatcgagaccatcgccaacgagttcagcgacagatgcacccccagcgtgatcagcttcggcagcaagaacagaaccatcggcgtggccgccaagaaccagcagatcacccacgccaacaacaccgtgagcaacttcaagagattccacggcagagccttcaacgaccccttcatccagaaggagaaggagaacctgagctacgacctggtgcccctgaagaacggcggcgtgggcatcaaggtgatgtacatgggcgaggagcacctgttcagcgtggagcagatcaccgccatgctgctgaccaagctgaaggagaccgccgagaacagcctgaagaagcccgtgaccgactgcgtgatcagcgtgcccagcttcttcaccgacgccgagagaagaagcgtgctggacgccgcccagatcgtgggcctgaactgcctgagactgatgaacgacatgaccgccgtggccctgaactacggcatctacaagcaggacctgcccagcctggacgagaagcccagaatcgtggtgttcgtggacatgggccacagcgccttccaggtgagcgcctgcgccttcaacaagggcaagctgaaggtgctgggcaccgccttcgaccccttcctgggcggcaagaacttcgacgagaagctggtggagcacttctgcgccgagttcaagaccaagtacaagctggacgccaagagcaagatcagagccctgctgagactgtaccaggagtgcgagaagctgaagaagctgatgagcagcaacagcaccgacctgcccctgaacatcgagtgcttcatgaacgacaaggacgtgagcggcaagatgaacagaagccagttcgaggagctgtgcgccgagctgctgcagaagatcgaggtgcccctgtacagcctgctggagcagacccacctgaaggtggaggacgtgagcgccgtggagatcgtgggcggcgccaccagaatccccgccgtgaaggagagaatcgccaagttcttcggcaaggacatcagcaccaccctgaacgccgacgaggccgtggccagaggctgcgccctgcagtgcgccatcctgagccccgccttcaaggtgagagagttcagcgtgaccgacgccgtgcccttccccatcagcctgatctggaaccacgacagcgaggacaccgagggcgtgcacgaggtgttcagcagaaaccacgccgcccccttcagcaaggtgctgaccttcctgagaagaggccccttcgagctggaggccttctacagcgacccccagggcgtgccctaccccgaggccaagatcggcagattcgtggtgcagaacgtgagcgcccagaaggacggcgagaagagcagagtgaaggtgaaggtgagagtgaacacccacggcatcttcaccatcagcaccgccagcatggtggagaaggtgcccaccgaggagaacgagatgagcagcgaggccgacatggagtgcctgaaccagagaccccccgagaaccccgacaccgacaagaacgtgcagcaggacaacagcgaggccggcacccagccccaggtgcagaccgacgcccagcagaccagccagagcccccccagccccgagctgaccagcgaggagaacaagatccccgacgccgacaagcagatgaagaagaagctgaccagcctgcagaagctgaagagccccaagtag

SEQ ID NO: 84110 - DNA, 2583 bp, synthetic construct
  misc_feature 1..2583: note = Description of Artificial Sequence: Synthetic coding sequence
  source 1..2583: mol_type = other DNA
atggccaccgccgccgtgctgagaggccccgccgcccactgggtggagagcttccagaaggccagagaggagggcagcggcagcggcacctggagaggcagatggagaagaagaagcgtgatcagcttcggcagcaagaacagaaccatcggcgtggccgccaagaaccagcagatcacccacgccaacaacaccgtgagcaacttcaagagattccacggcagagccttcaacgaccccttcatccagaaggagaaggagaacctgagctacgacctggtgcccctgaagaacggcggcgtgggcatcaaggtgatgtacatgggcgaggagcacctgttcagcgtggagcagatcaccgccatgctgctgaccaagctgaaggagaccgccgagaacagcctgaagaagcccgtgaccgactgcgtgatcagcgtgcccagcttcttcaccgacgccgagagaagaagcgtgctggacgccgcccagatcgtgggcctgaactgcctgagactgatgaacgacatgaccgccgtggccctgaactacggcatctacaagcaggacctgcccagcctggacgagaagcccagaatcgtggtgttcgtggacatgggccacagcgccttccaggtgagcgcctgcgccttcaacaagggcaagctgaaggtgctgggcaccgccttcgaccccttcctgggcggcaagaacttcgacgagaagctggtggagcacttctgcgccgagttcaagaccaagtacaagctggacgccaagagcaagatcagagccctgctgagactgtaccaggagtgcgagaagctgaagaagctgatgagcagcaacagcaccgacctgcccctgaacatcgagtgcttcatgaacgacaaggacgtgagcggcaagatgaacagaagccagttcgaggagctgtgcgccgagctgctgcagaagatcgaggtgcccctgtacagcctgctggagcagacccacctgaaggtggaggacgtgagcgccgtggagatcgtgggcggcgccaccagaatccccgccgtgaaggagagaatcgccaagttcttcggcaaggacatcagcaccaccctgaacgccgacgaggccgtggccagaggctgcgccctgcagtgcgccatcctgagccccgccttcaaggtgagagagttcagcgtgaccgacgccgtgcccttccccatcagcctgatctggaaccacgacagcgaggacaccgagggcgtgcacgaggtgttcagcagaaaccacgccgcccccttcagcaaggtgctgaccttcctgagaagaggccccttcgagctggaggccttctacagcgacccccagggcgtgccctaccccgaggccaagatcggcagattcgtggtgcagaacgtgagcgcccagaaggacggcgagaagagcagagtgaaggtgaaggtgagagtgaacacccacggcatcttcaccatcagcaccgccagcatggtggagaaggtgcccaccgaggagaacgagatgagcagcgaggccgacatggagtgcctgaaccagagaccccccgagaaccccgacaccgacaagaacgtgcagcaggacaacagcgaggccggcacccagccccaggtgcagaccgacgcccagcagaccagccagagcccccccagccccgagctgaccagcgaggagaacaagatccccgacgccgacaaggccaacgagaagaaggtggaccagccccccgaggccaagaagcccaagatcaaggtggtgaacgtggagctgcccatcgaggccaacctggtgtggcagctgggcaaggacctgctgaacatgtacatcgagaccgagggcaagatgatcatgcaggacaagctggagaaggagagaaacgacgccaagaacgccgtggaggagtacgtgtacgagttcagagacaagctgtgcggcccctacgagaagttcatctgcgagcaggaccaccagaacttcctgagactgctgaccgagaccgaggactggctgtacgaggagggcgaggaccaggccaagcaggcctacgtggacaagctggaggagctgatgaagatcggcacccccgtgaaggtgagattccaggaggccgaggagagacccaagatgttcgaggagctgggccagagactgcagcactacgccaagatcgccgccgacttcagaaacaaggacgagaagtacaaccacatcgacgagagcgagatgaagaaggtggagaagagcgtgaacgaggtgatggagtggatgaacaacgtgatgaacgcccaggccaagaagagcctggaccaggaccccgtggtgagagcccaggagatcaagaccaagatcaaggagctgaacaacacctgcgagcccgtggtgacccagcccaagcccaagatcgagagccccaagctggagagaacccccaacggccccaacatcgacaagaaggaggaggacctggaggacaagaacaacttcggcgccgagcccccccaccagaacggcgagtgctaccccaacgagaagaacagcgtgaacatggacctggactag

SEQ ID NO: 84111 - DNA, 582 bp, synthetic construct
  misc_feature 1..582: note = Description of Artificial Sequence: Synthetic coding sequence
  source 1..582: mol_type = other DNA
atggacagcaccctggccgtgcagcagtacatccagcagaacatcagagccgactgcagcaacatcgacaagatcctggagccccccgagggccaggacgagggcgtgtggaagtacgagcacctgagacagttctgcctggagctgaacggcctggccgtgaagctgcagagcgagtgccaccccgacacctgcacccagatgaccgccaccgagcagtggatcttcctgtgcgccgcccacaagacccccaaggagtgccccgccatcgactacaccagacacaccctggacggcgccgcctgcctgctgaacagcaacaagtacttccccagcagagtgagcatcaaggagagcagcgtggccaagctgggcagcgtgtgcagaagaatctacagaatcttcagccacgcctacttccaccacagacagatcttcgacgagtacgagaacgagaccttcctgtgccacagattcaccaagttcgtgatgaagtacaacctgatgagcaaggacaacctgatcgtgcccatcctggaggaggaggtgcagaacagcgtgagcggcgagagcgaggcctag

SEQ ID NO: 84112 - DNA, 306 bp, synthetic construct
  misc_feature 1..306: note = Description of Artificial Sequence: Synthetic coding sequence
  source 1..306: mol_type = other DNA
atggccggccaggccttcagaaagttcctgcccctgttcgacagagtgctggtggagagaagcgccgccgagaccgtgaccaagggcggcatcatgctgcccgagaagagccagggcaaggtgctgcaggccaccgtggtggccgtgggcagcggcagcaagggcaagggcggcgagatccagcccgtgagcgtgaaggtgggcgacaaggtgctgctgcccgagtacggcggcaccaaggtggtgctggacgacaaggtgtgcaagctgaacaacagcaagaagaagagcgacatctgcaactag

SEQ ID NO: 84113 - DNA, 144 bp, synthetic construct
  misc_feature 1..144: note = Description of Artificial Sequence: Synthetic coding sequence
  source 1..144: mol_type = other DNA
atgggcggcgagatccagcccgtgagcgtgaaggtgggcgacaaggtgctgctgcccgagtacggcggcaccaaggtggtgctggacgacaaggactacttcctgttcagagacggcgacatcctgggcaagtacgtggactag

SEQ ID NO: 84114 - DNA, 591 bp, synthetic construct
  misc_feature 1..591: note = Description of Artificial Sequence: Synthetic coding sequence
  source 1..591: mol_type = other DNA
atggccgacggccagatgcccttcagctgccactaccccagcagactgagaagagaccccttcagagacagccccctgagcagcagactgctggacgacggcttcggcatggaccccttccccgacgacctgaccgccagctggcccgactgggccctgcccagactgagcagcgcctggcccggcaccctgagaagcggcatggtgcccagaggccccaccgccaccgccagattcggcgtgcccgccgagggcagaacccccccccccttccccggcgagccctggaaggtgtgcgtgaacgtgcacagcttcaagcccgaggagctgatggtgaagaccaaggacggctacgtggaggtgagcggcaagcacgaggagaagcagcaggagggcggcatcgtgagcaagaacttcaccaagaagatccagctgcccgccgaggtggaccccgtgaccgtgttcgccagcctgagccccgagggcctgctgatcatcgaggccccccaggtgcccccctacagcaccttcggcgagagcagcttcaacaacgagctgccccaggacagccaggaggtgacctgcacctag

SEQ ID NO: 84115 - DNA, 453 bp, synthetic construct
  misc_feature 1..453: note = Description of Artificial Sequence: Synthetic coding sequence
  source 1..453: mol_type = other DNA
atggccaagatcatcctgagacacctgatcgagatccccgtgagataccaggaggagttcgaggccagaggcctggaggactgcagactggaccacgccctgtacgccctgcccggccccaccatcgtggacctgagaaagaccagagccgcccagagcccccccgtggacagcgccgccgagaccccccccagagagggcaagagccacttccagatcctgctggacgtggtgcagttcctgcccgaggacatcatcatccagaccttcgagggctggctgctgatcaaggcccagcacggcaccagaatggacgagcacggcttcatcagcagaagcttcaccagacagtacaagctgcccgacggcgtggagatcaaggacctgagcgccgtgctgtgccacgacggcatcctggtggtggaggtgaaggaccccgtgggcaccaagtag

SEQ ID NO: 84116 - DNA, 513 bp, synthetic construct
  misc_feature 1..513: note = Description of Artificial Sequence: Synthetic coding sequence
  source 1..513: mol_type = other DNA
atgagccacagaaccagcagcaccttcagagccgagagaagcttccacagcagcagcagcagcagcagcagcagcaccagcagcagcgccagcagagccctgcccgcccaggacccccccatggagaaggccctgagcatgttcagcgacgacttcggcagcttcatgagaccccacagcgagcccctggccttccccgccagacccggcggcgccggcaacatcaagaccctgggcgacgcctacgagttcgccgtggacgtgagagacttcagccccgaggacatcatcgtgaccaccagcaacaaccacatcgaggtgagagccgagaagctggccgccgacggcaccgtgatgaacaccttcgcccacaagtgccagctgcccgaggacgtggaccccaccagcgtgaccagcgccctgagagaggacggcagcctgaccatcagagccagaagacacccccacaccgagcacgtgcagcagaccttcagaaccgagatcaagatctag

SEQ ID NO: 84117 - DNA, 792 bp, synthetic construct
  misc_feature 1..792: note = Description of Artificial Sequence: Synthetic coding sequence
  source 1..792: mol_type = other DNA
atgagcggctgcgagctgagccccctgggcctgagagtgggcctgagcgccggccccgcccacggcagaagattccccgcccccagcggcccctggagaggcctgaacctggccagcagacagggcgccggccccaagcccagagacagcagaccctacaaggccgccgccgtgggcgcctggcacgccagacccgaggcctgcgcccacaccctgagctgccccgccctggccagactgggcagagccagaagaagaccctggatgagccacagaaccagcagcaccttcagagccgagagaagcttccacagcagcagcagcagcagcagcagcagcaccagcagcagcgccagcagagccctgcccgcccaggacccccccatggagaaggccctgagcatgttcagcgacgacttcggcagcttcatgagaccccacagcgagcccctggccttccccgccgcccaccccaccgccagacccggcggcgccggcaacatcaagaccctgggcgacgcctacgagttcgccgtggacgtgagagacttcagccccgaggacatcatcgtgaccaccagcaacaaccacatcgaggtgagagccgagaagctggccgccgacggcaccgtgatgaacaccttcgcccacaagtgccagctgcccgaggacgtggaccccaccagcgtgaccagcgccctgagagaggacggcagcctgaccatcagagccagaagacacccccacaccgagcacgtgcagcagaccttcagaaccgagatcaagatctag

SEQ ID NO: 84118 - DNA, 528 bp, synthetic construct
  misc_feature 1..528: note = Description of Artificial Sequence: Synthetic coding sequence
  source 1..528: mol_type = other DNA
atgagccacagaaccagcagcaccttcagagccgagagaagcttccacagcagcagcagcagcagcagcagcagcaccagcagcagcgccagcagagccctgcccgcccaggacccccccatggagaaggccctgagcatgttcagcgacgacttcggcagcttcatgagaccccacagcgagcccctggccttccccgccgcccaccccaccgccagacccggcggcgccggcaacatcaagaccctgggcgacgcctacgagttcgccgtggacgtgagagacttcagccccgaggacatcatcgtgaccaccagcaacaaccacatcgaggtgagagccgagaagctggccgccgacggcaccgtgatgaacaccttcgcccacaagtgccagctgcccgaggacgtggaccccaccagcgtgaccagcgccctgagagaggacggcagcctgaccatcagagccagaagacacccccacaccgagcacgtgcagcagaccttcagaaccgagatcaagatctag

SEQ ID NO: 84119 - DNA, 207 bp, synthetic construct
  misc_feature 1..207: note = Description of Artificial Sequence: Synthetic coding sequence
  source 1..207: mol_type = other DNA
atgagccacagaaccagcagcaccttcagagccgagagaagcttccacagcagcagcagcagcagcagcagcagcaccagcagcagcgccagcagagccctgcccgcccaggacccccccatggagaaggccctgagcatgttcagcgacgacttcggcagcttcatgagaccccacagcgagcccctggccttccccggcaagtag

SEQ ID NO: 84120 - DNA, 1722 bp, synthetic construct
  misc_feature 1..1722: note = Description of Artificial Sequence: Synthetic coding sequence
  source 1..1722: mol_type = other DNA
atgctgagactgcccaccgtgttcagacagatgagacccgtgagcagagtgctggccccccacctgaccagagcctacgccaaggacgtgaagttcggcgccgacgccagagccctgatgctgcagggcgtggacctgctggccgacgccgtggccgtgaccatgggccccaagggcagaaccgtgatcatcgagcagagctggggcagccccaaggtgaccaaggacggcgtgaccgtggccaagagcatcgacctgaaggacaagtacaagaacatcggcgccaagctggtgcaggacgtggccaacaacaccaacgaggaggccggcgacggcaccaccaccgccaccgtgctggccagaagcatcgccaaggagggcttcgagaagatcagcaagggcgccaaccccgtggagatcagaagaggcgtgatgctggccgtggacgccgtgatcgccgagctgaagaagcagagcaagcccgtgaccacccccgaggagatcgcccaggtggccaccatcagcgccaacggcgacaaggagatcggcaacatcatcagcgacgccatgaagaaggtgggcagaaagggcgtgatcaccgtgaaggacggcaagaccctgaacgacgagctggagatcatcgagggcatgaagttcgacagaggctacatcagcccctacttcatcaacaccagcaagggccagaagtgcgagttccaggacgcctacgtgctgctgagcgagaagaagatcagcagcatccagagcatcgtgcccgccctggagatcgccaacgcccacagaaagcccctggtgatcatcgccgaggacgtggacggcgaggccctgagcaccctggtgctgaacagactgaaggtgggcctgcaggtggtggccgtgaaggcccccggcttcggcgacaacagaaagaaccagctgaaggacatggccatcgccaccggcggcgccgtgttcggcgaggagggcctgaccctgaacctggaggacgtgcagccccacgacctgggcaaggtgggcgaggtgatcgtgaccaaggacgacgccatgctgctgaagggcaagggcgacaaggcccagatcgagaagagaatccaggagatcatcgagcagctggacgtgaccaccagcgagtacgagaaggagaagctgaacgagagactggccaagctgagcgacggcgtggccgtgctgaaggtgggcggcaccagcgacgtggaggtgaacgagaagaaggacagagtgaccgacgccctgaacgccaccagagccgccgtggaggagggcatcgtgctgggcggcggctgcgccctgctgagatgcatccccgccctggacagcctgacccccgccaacgaggaccagaagatcggcatcgagatcatcaagagaaccctgaagatccccgccatgaccatcgccaagaacgccggcgtggagggcagcctgatcgtggagaagatcatgcagagcagcagcgaggtgggctacgacgccatggccggcgacttcgtgaacatggtggagaagggcatcatcgaccccaccaaggtggtgagaaccgccctgctggacgccgccggcgtggccagcctgctgaccaccgccgaggtggtggtgaccgagatccccaaggaggagaaggaccccggcatgggcgccatgggcggcatgggcggcggcatgggcggcggcatgttctag

SEQ ID NO: 84121 - DNA, 1722 bp, synthetic construct; identical to SEQ ID NO: 84120
  misc_feature 1..1722: note = Description of Artificial Sequence: Synthetic coding sequence
  source 1..1722: mol_type = other DNA

SEQ ID NO: 84122 - DNA, 177 bp, synthetic construct
  misc_feature 1..177: note = Description of Artificial Sequence: Synthetic coding sequence
  source 1..177: mol_type = other DNA
atgctgagactgcccaccgtgttcagacagatgagacccgtgagcagagtgctggccccccacctgaccagagcctacgccaaggacgtgaagttcggcgccgacgccagagccctgatgctgcagggcgtggacctgctggccgacgccgtggccgtgaccatgggccccaagtag

SEQ ID NO: 84123 - DNA, 285 bp, synthetic construct
  misc_feature 1..285: note = Description of Artificial Sequence: Synthetic coding sequence
  source 1..285: mol_type = other DNA
atgctgagactgcccaccgtgttcagacagatgagacccgtgagcagagtgctggccccccacctgaccagagcctacgccaaggacgtgaagttcggcgccgacgccagagccctgatgctgcagggcgtggacctgctggccgacgccgtggccgtgaccatgggccccaagggcagaaccgtgatcatcgagcagagctggggcagccccaaggtgaccaaggacggcgtgaccgtggccaagagcatcgacctgaaggacaagtacaagaacatcggctag

SEQ ID NO: 84124 - DNA, 705 bp, synthetic construct
  misc_feature 1..705: note = Description of Artificial Sequence: Synthetic coding sequence
  source 1..705: mol_type = other DNA
atgctgagactgcccaccgtgttcagacagatgagacccgtgagcagagtgctggccccccacctgaccagagcctacgccaaggacgtgaagttcggcgccgacgccagagccctgatgctgcagggcgtggacctgctggccgacgccgtggccgtgaccatgggccccaagggcagaaccgtgatcatcgagcagagctggggcagccccaaggtgaccaaggacggcgtgaccgtggccaagagcatcgacctgaaggacaagtacaagaacatcggcgccaagctggtgcaggacgtggccaacaacaccaacgaggaggccggcgacggcaccaccaccgccaccgtgctggccagaagcatcgccaaggagggcttcgagaagatcagcaagggcgccaaccccgtggagatcagaagaggcgtgatgctggccgtggacgccgtgatcgccgagctgaagaagcagagcaagcccgtgaccacccccgaggagatcgcccaggtggccaccatcagcgccaacggcgacaaggagatcggcaacatcatcagcgacgccatgaagaaggtgggcagaaagggcgtgatcaccgacggcaagaccctgaacgacgagctggagatcatcgagggcatgaagttcgacagaggctacatcagcccctacttcatcaacaccagcaagggcaagaactag

SEQ ID NO: 84125 - DNA, 252 bp, synthetic construct
  misc_feature 1..252: note = Description of Artificial Sequence: Synthetic coding sequence
  source 1..252: mol_type = other DNA
atgctgagactgcccaccgtgttcagacagatgagacccgtgagcagagtgctggccccccacctgaccagagcctacgccaaggacgtgaagttcggcgccgacgccagagccctgatgctgcagggcgtggacctgctggccgacgccgtggccgtgaccatgggccccaagggcagaaccgtgatcatcgagcagagctggggcagccccaaggtgaccaaggacggcgtgaccgtggccaagagctag

SEQ ID NO: 84126 - DNA, 666 bp, synthetic construct
  misc_feature 1..666: note = Description of Artificial Sequence: Synthetic coding sequence
  source 1..666: mol_type = other DNA
atgctgagactgcccaccgtgttcagacagatgagacccgtgagcagagtgctggccccccacctgaccagagcctacgccaaggacgtgaagttcggcgccgacgccagagccctgatgctgcagggcgtggacctgctggccgacgccgtggccgtgaccatgggccccaagggcagaaccgtgatcatcgagcagagctggggcagccccaaggtgaccaaggacggcgtgaccgtggccaagagcatcgacctgaaggacaagtacaagaacatcggcgccaagctggtgcaggacgtggccaacaacaccaacgaggaggccggcgacggcaccaccaccgccaccgtgctggccagaagcatcgccaaggagggcttcgagaagatcagcaagggcgccaaccccgtggagatcagaagaggcgtgatgctggccgtggacgccgtgatcgccgagctgaagaagcagagcaagcccgtgaccacccccgaggagatcgcccaggtggccaccatcagcgccaacggcgacaaggagatcggcaacatcatcagcgacgccatgaagaaggtgggcagaaagggcgtgatcaccgtgaaggacggcaagaccctgaacgacgagctggagatcatcgagggcatgaagttcgacagatag

SEQ ID NO: 84127 - DNA, 738 bp, synthetic construct
  misc_feature 1..738: note = Description of Artificial Sequence: Synthetic coding sequence
  source 1..738: mol_type = other DNA
atgctggccgtggacgccgtgatcgccgagctgaagaagcagagcaagcccgtgaccacccccgaggagatcgcccaggtggccaccatcagcgccaacggcgacaaggagatcggcaacatcatcagcgacgccatgaagaaggtgggcagaaagggcgtgatcaccgtgaaggacggcaagaccctgaacgacgagctggagatcatcgagggcatgaagttcgacagaggctacatcagcccctacttcatcaacaccagcaagggccagaagtgcgagttccaggacgcctacgtgctgctgagcgagaagaagatcagcagcatccagagcatcgtgcccgccctggagatcgccaacgcccacagaaagcccctggtgatcatcgccgaggacgtggacggcgaggccctgagcaccctggtgctgaacagactgaaggtgggcctgcaggtggtggccgtgaaggcccccggcttcggcgacaacagaaagaaccagctgaaggacatggccatcgccaccggcggcgccgtgttcggcgaggagggcctgaccctgaacctggaggacgtgcagccccacgacctgggcaaggtgggcgaggtgatcgtgaccaaggacgacgccatgctgctgaagggcaagggcgacaaggcccagatcgagaagagaatccaggagatcatcgagcagctggacgtgaccaccagcgagtacgagaaggagaactag

SEQ ID NO: 84128 - DNA, 477 bp, synthetic construct
  misc_feature 1..477: note = Description of Artificial Sequence: Synthetic coding sequence
  source 1..477: mol_type = other DNA
atgctgagactgcccaccgtgttcagacagatgagacccgtgagcagagtgctggccccccacctgaccagagcctacgccaaggacgtgaagttcggcgccgacgccagagccctgatgctgcagggcgtggacctgctggccgacgccgtggccgtgaccatgggccccaagggcagaaccgtgatcatcgagcagagctggggcagccccaaggtgaccaaggacggcgtgaccgtggccaagagcatcgacctgaaggacaagtacaagaacatcggcgccaagctggtgcaggacgtggccaacaacaccaacgaggaggccggcgacggcaccaccaccgccaccgtgctggccagaagcatcgccaaggagggcttcgagaagatcagcaagggcgccaaccccgtggagatcagaagaggcagaaacgtgtgctgccaccacagcgtgctgaacttcagcgtgctgtag

SEQ ID NO: 84129 - DNA, 2061 bp, synthetic construct
  misc_feature 1..2061: note = Description of Artificial Sequence: Synthetic coding sequence
  source 1..2061: mol_type = other DNA
atgctggccgtgcccgagatgggcctgcagggcctgtacatcggcagcagccccgagagaagccccgtgcccagcccccccggcagccccagaacccaggagagctgcggcatcgcccccctgacccccagccagagccccaagcccgaggtgagagccccccagcaggccagcttcagcgtggtggtggccatcgacttcggcaccaccagcagcggctacgccttcagcttcgccagcgaccccgaggccatccacatgatgagaaagtgggagggcggcgaccccggcgtggcccaccagaagacccccacctgcctgctgctgacccccgagggcgccttccacagcttcggctacaccgccagagactactaccacgacctggaccccgaggaggccagagactggctgtacttcgagaagttcaagatgaagatccacagcgccaccgacctgaccctgaagacccagctggaggccgtgaacggcaagaccatgcccgccctggaggtgttcgcccacgccctgagattcttcagagagcacgccctgcaggagctgagagagcagagccccagcctgcccgagaaggacaccgtgagatgggtgctgaccgtgcccgccatctggaagcagcccgccaagcagttcatgagagaggccgcctacctggccggcctggtgagcagagagaacgccgagcagctgctgatcgccctggagcccgaggccgccagcgtgtactgcagaaagctgagactgcaccagctgctggacctgagcggcagagcccccggcggcggcagactgggcgagagaagaagcatcgacagcagcttcagacaggccagagagcagctgagaagaagcagacacagcagaaccttcctggtggagagcggcgtgggcgagctgtgggccgagatgcaggccggcgacagatacgtggtggccgactgcggcggcggcaccgtggacctgaccgtgcaccagctggagcagccccacggcaccctgaaggagctgtacaaggccagcggcggcccctacggcgccgtgggcgtggacctggccttcgagcagctgctgtgcagaatcttcggcgaggacttcatcgccaccttcaagagacagagacccgccgcctgggtggacctgaccatcgccttcgaggccagaaagagaaccgccggcccccacagagccggcgccctgaacatcagcctgcccttcagcttcatcgacttctacagaaagcagagaggccacaacgtggagaccgccctgagaagaagcagcgtgaacttcgtgaagtggagcagccagggcatgctgagaatgagctgcgaggccatgaacgagctgttccagcccaccgtgagcggcatcatccagcacatcgaggccctgctggccagacccgaggtgcagggcgtgaagctgctgttcctggtgggcggcttcgccgagagcgccgtgctgcagcacgccgtgcaggccgccctgggcgccagaggcctgagagtggtggtgccccacgacgtgggcctgaccatcctgaagggcgccgtgctgttcggccaggcccccggcgtggtgagagtgagaagaagccccctgacctacggcgtgggcgtgctgaacagattcgtgcccggcagacacccccccgagaagctgctggtgagagacggcagaagatggtgcaccgacgtgttcgagagattcgtggccgccgagcagagcgtggccctgggcgaggaggtgagaagaagctactgccccgccagacccggccagagaagagtgctgatcaacctgtactgctgcgccgccgaggacgccagattcatcaccgaccccggcgtgagaaagtgcggcgccctgagcctggagctggagcccgccgactgcggccaggacaccgccggcgccccccccggcagaagagagatcagagccgccatgcagttcggcgacaccgagatcaaggtgaccgccgtggacgtgagcaccaacagaagcgtgagagccagcatcgacttcctgagcaactag

SEQ ID NO: 84130 - DNA, 1803 bp, synthetic construct
  misc_feature 1..1803: note = Description of Artificial Sequence: Synthetic coding sequence
  source 1..1803: mol_type = other DNA
atgatgagaaagtgggagggcggcgaccccggcgtggcccaccagaagacccccacctgcctgctgctgacccccgagggcgccttccacagcttcggctacaccgccagagactactaccacgacctggaccccgaggaggccagagactggctgtacttcgagaagttcaagatgaagatccacagcgccaccgacctgaccctgaagacccagctggaggccgtgaacggcaagaccatgcccgccctggaggtgttcgcccacgccctgagattcttcagagagcacgccctgcaggagctgagagagcagagccccagcctgcccgagaaggacaccgtgagatgggtgctgaccgtgcccgccatctggaagcagcccgccaagcagttcatgagagaggccgcctacctggccggcctggtgagcagagagaacgccgagcagctgctgatcgccctggagcccgaggccgccagcgtgtactgcagaaagctgagactgcaccagctgctggacctgagcggcagagcccccggcggcggcagactgggcgagagaagaagcatcgacagcagcttcagacaggccagagagcagctgagaagaagcagacacagcagaaccttcctggtggagagcggcgtgggcgagctgtgggccgagatgcaggccggcgacagatacgtggtggccgactgcggcggcggcaccgtggacctgaccgtgcaccagctggagcagccccacggcaccctgaaggagctgtacaaggccagcggcggcccctacggcgccgtgggcgtggacctggccttcgagcagctgctgtgcagaatcttcggcgaggacttcatcgccaccttcaagagacagagacccgccgcctgggtggacctgaccatcgccttcgaggccagaaagagaaccgccggcccccacagagccggcgccctgaacatcagcctgcccttcagcttcatcgacttctacagaaagcagagaggccacaacgtggagaccgccctgagaagaagcagcgtgaacttcgtgaagtggagcagccagggcatgctgagaatgagctgcgaggccatgaacgagctgttccagcccaccgtgagcggcatcatccagcacatcgaggccctgctggccagacccgaggtgcagggcgtgaagctgctgttcctggtgggcggcttcgccgagagcgccgtgctgcagcacgccgtgcaggccgccctgggcgccagaggcctgagagtggtggtgccccacgacgtgggcctgaccatcctgaagggcgccgtgctgttcggccaggcccccggcgtggtgagagtgagaagaagccccctgacctacggcgtgggcgtgctgaacagattcgtgcccggcagacacccccccgagaagctgctggtgagagacggcagaagatggtgcaccgacgtgttcgagagattcgtggccgccgagcagagcgtggccctgggcgaggaggtgagaagaagctactgccccgccagacccggccagagaagagtgctgatcaacctgtactgctgcgccgccgaggacgccagattcatcaccgaccccggcgtgagaaagtgcggcgccctgagcctggagctggagcccgccgactgcggccaggacaccgccggcgccccccccggcagaagagagatcagagccgccatgcagttcggcgacaccgagatcaaggtgaccgccgtggacgtgagcaccaacagaagcgtgagagccagcatcgacttcctgagcaactag

SEQ ID NO: 84131 - DNA, 1563 bp, synthetic construct
  misc_feature 1..1563: note = Description of Artificial Sequence: Synthetic coding sequence
  source 1..1563: mol_type = other DNA
atgcccgccctggaggtgttcgcccacgccctgagattcttcagagagcacgccctgcaggagctgagagagcagagccccagcctgcccgagaaggacaccgtgagatgggtgctgaccgtgcccgccatctggaagcagcccgccaagcagttcatgagagaggccgcctacctggccggcctggtgagcagagagaacgccgagcagctgctgatcgccctggagcccgaggccgccagcgtgtactgcagaaagctgagactgcaccagctgctggacctgagcggcagagcccccggcggcggcagactgggcgagagaagaagcatcgacagcagcttcagacaggccagagagcagctgagaagaagcagacacagcagaaccttcctggtggagagcggcgtgggcgagctgtgggccgagatgcaggccggcgacagatacgtggtggccgactgcggcggcggcaccgtggacctgaccgtgcaccagctggagcagccccacggcaccctgaaggagctgtacaaggccagcggcggcccctacggcgccgtgggcgtggacctggccttcgagcagctgctgtgcagaatcttcggcgaggacttcatcgccaccttcaagagacagagacccgccgcctgggtggacctgaccatcgccttcgaggccagaaagagaaccgccggcccccacagagccggcgccctgaacatcagcctgcccttcagcttcatcgacttctacagaaagcagagaggccacaacgtggagaccgccctgagaagaagcagcgtgaacttcgtgaagtggagcagccagggcatgctgagaatgagctgcgaggccatgaacgagctgttccagcccaccgtgagcggcatcatccagcacatcgaggccctgctggccagacccgaggtgcagggcgtgaagctgctgttcctggtgggcggcttcgccgagagcgccgtgctgcagcacgccgtgcaggccgccctgggcgccagaggcctgagagtggtggtgccccacgacgtgggcctgaccatcctgaagggcgccgtgctgttcggccaggcccccggcgtggtgagagtgagaagaagccccctgacctacggcgtgggcgtgctgaacagattcgtgcccggcagacacccccccgagaagctgctggtgagagacggcagaagatggtgcaccgacgtgttcgagagattcgtggccgccgagcagagcgtggccctgggcgaggaggtgagaagaagctactgccccgccagacccggccagagaagagtgctgatcaacctgtactgctgcgccgccgaggacgccagattcatcaccgaccccggcgtgagaaagtgcggcgccctgagcctggagctggagcccgccgactgcggccaggacaccgccggcgccccccccggcagaagagagatcagagccgccatgcagttcggcgacaccgagatcaaggtgaccgccgtggacgtgagcaccaacagaagcgtgagagccagcatcgacttcctgagcaactag

SEQ ID NO: 84132 - DNA, 2028 bp, synthetic construct
  misc_feature 1..2028: note = Description of Artificial Sequence: Synthetic coding sequence
  source 1..2028: mol_type = other DNA
atggccgacaaggaggccggcggcagcgacggccccagagagaccgcccccaccagcgcctacagcagccccgccagaagcctgggcgacaccggcatcacccccctgagccccagccacatcgtgaacgacaccgacagcaacgtgagcgagcagcagagcttcctggtggtggtggccgtggacttcggcaccaccagcagcggctacgcctacagcttcaccaaggagcccgagtgcatccacgtgatgagaagatgggagggcggcgaccccggcgtgagcaaccagaagacccccaccaccatcctgctgacccccgagagaaagttccacagcttcggctacgccgccagagacttctaccacgacctggaccccaacgaggccaagcagtggctgtacctggagaagttcaagatgaagctgcacaccaccggcgacctgaccatggacaccgacctgaccgccgccaacggcaagaaggtgaaggccctggagatcttcgcctacgccctgcagtacttcaaggagcaggccctgaaggagctgagcgaccaggccggcagcgagttcgagaacagcgacgtgagatgggtgatcaccgtgcccgccatctggaagcagcccgccaagcagttcatgagacaggccgcctaccaggccggcctggccagccccgagaacagcgagcagctgatcatcgccctggagcccgaggccgccagcatctactgcagaaagctgagactgcaccagatgatcgagctgagcagcaaggccgccgtgaacggctacagcggcagcgacaccgtgggcgccggcttcacccaggccaaggagcacatcagaagaaacagacagagcagaaccttcctggtggagaacgtgatcggcgagatctggagcgagctggaggagggcgacaagtacgtggtggtggacagcggcggcggcaccgtggacctgaccgtgcaccagatcagactgcccgagggccacctgaaggagctgtacaaggccaccggcggcccctacggcagcctgggcgtggactacgagttcgagaagctgctgtacaagatcttcggcgaggacttcatcgagcagttcaagatcaagagacccgccgcctgggtggacctgatgatcgccttcgagagcagaaagagagccgccgcccccgacagaaccaaccccctgaacatcaccctgcccttcagcttcatcgactactacaagaagttcagaggccacagcgtggagcacgccctgagaaagagcaacgtggacttcgtgaagtggagcagccagggcatgctgagaatgagccccgacgccatgaacgccctgttcaagcccaccatcgacagcatcatcgagcacctgagagacctgttccagaagcccgaggtgagcaccgtgaagttcctgttcctggtgggcggcttcgccgaggcccccctgctgcagcaggccgtgcaggccgccttcggcgaccagtgcagaatcatcatcccccaggacgtgggcctgaccatcctgaagggcgccgtgctgttcggcctggaccccgccgtgatcaaggtgagaagaagccccctgacctacggcgtgggcgtgctgaacagatacgtggagggcaagcacccccccgagaagctgctggtgaaggacggcaccagatggtgcaccgacgtgttcgacaagttcatcagcgccgaccagagcgtggccctgggcgagctggtgaagagaagctacacccccgccaagcccagccagctggtgatcgtgatcaacatctacagcagcgagcacgacaacgtgagcttcatcaccgaccccggcgtgaagaagtgcggcaccctgagactggacctgaccggcaccagcggcaccgccgtgcccgccagaagagagatccagaccctgatgcagttcggcgacaccgagatcaaggccaccgccatcgacatcgccaccagcaagagcgtgaaggtgggcatcgacttcctgaactactag

SEQ ID NO: 84133 - DNA, 819 bp, synthetic construct
  misc_feature 1..819: note = Description of Artificial Sequence: Synthetic coding sequence
  source 1..819: mol_type = other DNA
atgagaagcctggacctggccagccagctgctgagaaaccagatcgtgaccgaccccgacaacctgatggaggacgccgcctgggccaagcactgcgaccagaacctggtggccagcgacgcccccggcgaggagggcaccggcatcctgaagagcaagagaacccaggccgccgaccaccagcccatcctgaagaccgtgaaggccagcgacgaggactgccagctgagaatcagcgacagaatcagagagaccagcgacctggaggacagctgggacgagagcagcggcgccggctgcagccagggcacccccagctacagcagcagccacagcctgttcagaggcgccgtggccccctgccagagcagccccatggccagactgggcgtgagcggcgagcccagcccctgcaccagcaccaacagaagcacccccggcgtggccagcaccccccagacccccgtgagcagcagcagagccggcttcgtgagcggcggcgacagacccctgaccagcgagcccccccccagatgggccagaagaagaagaagaagcgtggccagaaccatcgccgccgagctggccgagaacagaagactggccagagagctgagcaagagagaggaggagaagctggacagactgatcgccatcggcgaggaggccagcgcccagcaggacaccgccaacgagctgagaagagacgccgtgatcgccgtgagaagactggccaccgccgtggaggaggccaccggcgccttccagctgggcctggagaagctgctgcagagactgatcagcaacaccaagagctag

SEQ ID NO: 84134 - DNA, 1530 bp, synthetic construct
  misc_feature 1..1530: note = Description of Artificial Sequence: Synthetic coding sequence
  source 1..1530: mol_type = other DNA
atggccgccatcggcgtgcacctgggctgcaccagcgcctgcgtggccgtgtacaaggacggcagagccggcgtggtggccaacgacgccggcgacagagtgacccccgccgtggtggcctacagcgagaacgaggagatcgtgggcctggccgccaagcagagcagaatcagaaacatcagcaacaccgtgatgaaggtgaagcagatcctgggcagaagcagcagcgacccccaggcccagaagtacatcgccgagagcaagtgcctggtgatcgagaagaacggcaagctgagatacgagatcgacaccggcgaggagaccaagttcgtgaaccccgaggacgtggccagactgatcttcagcaagatgaaggagaccgcccacagcgtgctgggcagcgacgccaacgacgtggtgatcaccgtgcccttcgacttcggcgagaagcagaagaacgccctgggcgaggccgccagagccgccggcttcaacgtgctgagactgatccacgagcccagcgccgccctgctggcctacggcatcggccaggacagccccaccggcaagagcaacatcctggtgttcaagctgggcggcaccagcctgagcctgagcgtgatggaggtgaacagcggcatctacagagtgctgagcaccaacaccgacgacaacatcggcggcgcccacttcaccgagaccctggcccagtacctggccagcgagttccagagaagcttcaagcacgacgtgagaggcaacgccagagccatgatgaagctgaccaacagcgccgaggtggccaagcacagcctgagcaccctgggcagcgccaactgcttcctggacagcctgtacgagggccaggacttcgactgcaacgtgagcagagccagattcgagctgctgtgcagccccctgttcaacaagtgcatcgaggccatcagaggcctgctggaccagaacggcttcaccgccgacgacatcaacaaggtggtgctgtgcggcggcagcagcagaatccccaagctgcagcagctgatcaaggacctgttccccgccgtggagctgctgaacagcatcccccccgacgaggtgatccccatcggcgccgccatcgaggccggcatcctgatcggcaaggagaacctgctggtggaggacagcctgatgatcgagtgcagcgccagagacatcctggtgaagggcgtggacgagagcggcgccagcagattcaccgtgctgttccccagcggcacccccctgcccgccagaagacagcacaccctgcaggcccccggcagcatcagcagcgtgtgcctggagctgtacgagagcgacggcaagaacagcgccaaggaggagaccaagttcgcccaggtggtgctgcaggacctggacaagaaggagaacggcctgagagacatcctggccgtgctgaccatgaagagagacggcagcctgcacgtgacctgcaccgaccaggagaccggcaagtgcgaggccatcagcatcgagatcgccagctag

SEQ ID NO: 84135 - DNA, 432 bp, synthetic construct
  misc_feature 1..432: note = Description of Artificial Sequence: Synthetic coding sequence
  source 1..432: mol_type = other DNA
atggccgccatcggcgtgcacctgggctgcaccagcgcctgcgtggccgtgtacaaggacggcagagccggcgtggtggccaacgacgccggcgacagagtgacccccgccgtggtggcctacagcgagaacgaggagatcgtgggcctggccgccaagcagagcagaatcagaaacatcagcaacaccgtgatgaaggtgaagcagatcctgggcagaagagtgctgagcagagacccccagctgcagcagctgccccagcccttccagagatgcagctgcagcctgagcgagcagccccacggccagaccggctgcgtgagaggcgcccagcccctgcaccagcaccagccccagcacagctggggcagcctgcacaccgccgacagcagcctgctgttcgagagctggttctgcttctggtggggctag

SEQ ID NO: 84136 - DNA, 387 bp, synthetic construct
  misc_feature 1..387: note = Description of Artificial Sequence: Synthetic coding sequence
  source 1..387: mol_type = other DNA
tgagcctgcgtggccgtgtacaaggacggcagagccggcgtggtggccaacgacgccggcgacagagtgacccccgccgtggtggcctacagcgagaacgaggagatcgtgggcctggccgccaagcagagcagaatcagaaacatcagcaacaccgtgatgaaggtgaagcagatcctgggcagaagcagcagcgacccccaggcccagaagtacatcgccgagagcaagtgcctggtgatcgagaagaacggcaagctgagatacgagatcgacaccggcgaggagaccaagttcgtgaaccccgaggacgtggccagactgatcttcagcaagatgaagggcgcctacagcccctggagccagagcaacagcgaggacggctag

SEQ ID NO: 84137 - DNA, 1926 bp, synthetic construct
  misc_feature 1..1926: note = Description of Artificial Sequence: Synthetic coding sequence
  source 1..1926: mol_type = other DNA
atggccaaggccgccgccatcggcatcgacctgggcaccacctacagctgcgtgggcgtgttccagcacggcaaggtggagatcatcgccaacgaccagggcaacagaaccacccccagctacgtggccttcaccgacaccgagagactgatcggcgacgccgccaagaaccaggtggccctgaacccccagaacaccgtgttcgacgccaagagactgatcggcagaaagttcggcgaccccgtggtgcagagcgacatgaagcactggcccttccaggtgatcaacgacggcgacaagcccaaggtgcaggtgagctacaagggcgagaccaaggccttctaccccgaggagatcagcagcatggtgctgaccaagatgaaggagatcgccgaggcctacctgggctaccccgtgaccaacgccgtgatcaccgtgcccgcctacttcaacgacagccagagacaggccaccaaggacgccggcgtgatcgccggcctgaacgtgctgagaatcatcaacgagcccaccgccgccgccatcgcctacggcctggacagaaccggcaagggcgagagaaacgtgctgatcttcgacctgggcggcggcaccttcgacgtgagcatcctgaccatcgacgacggcatcttcgaggtgaaggccaccgccggcgacacccacctgggcggcgaggacttcgacaacagactggtgaaccacttcgtggaggagttcaagagaaagcacaagaaggacatcagccagaacaagagagccgtgagaagactgagaaccgcctgcgagagagccaagagaaccctgagcagcagcacccaggccagcctggagatcgacagcctgttcgagggcatcgacttctacaccagcatcaccagagccagattcgaggagctgtgcagcgacctgttcagaagcaccctggagcccgtggagaaggccctgagagacgccaagctggacaaggcccagatccacgacctggtgctggtgggcggcagcaccagaatccccaaggtgcagaagctgctgcaggacttcttcaacggcagagacctgaacaagagcatcaaccccgacgaggccgtggcctacggcgccgccgtgcaggccgccatcctgatgggcgacaagagcgagaacgtgcaggacctgctgctgctggacgtggcccccctgagcctgggcctggagaccgccggcggcgtgatgaccgccctgatcaagagaaacagcaccatccccaccaagcagacccagatcttcaccacctacagcgacaaccagcccggcgtgctgatccaggtgtacgagggcgagagagccatgaccaaggacaacaacctgctgggcagattcgagctgagcggcatcccccccgcccccagaggcgtgccccagatcgaggtgaccttcgacatcgacgccaacggcatcctgaacgtgaccgccaccgacaagagcaccggcaaggccaacaagatcaccatcaccaacgacaagggcagactgagcaaggaggagatcgagagaatggtgcaggaggccgagaagtacaaggccgaggacgaggtgcagagagagagagtgagcgccaagaacgccctggagagctacgccttcaacatgaagagcgccgtggaggacgagggcctgaagggcaagatcagcgaggccgacaagaagaaggtgctggacaagtgccaggaggtgatcagctggctggacgccaacaccctggccgagaaggacgagttcgagcacaagagaaaggagctggagcaggtgtgcaaccccatcatcagcggcctgtaccagggcgccggcggccccggccccggcggcttcggcgcccagggccccaagggcggcagcggcagcggccccaccatcgaggaggtggactag

SEQ ID NO: 84138 - DNA, 1431 bp, synthetic construct
  misc_feature 1..1431: note = Description of Artificial Sequence: Synthetic coding sequence
  source 1..1431: mol_type = other DNA
atggccaaggccgccgccatcggcatcgacctgggcaccacctacagctgcgtgggcgtgttccagcacggcaagggcgagagaaacgtgctgatcttcgacctgggcggcggcaccttcgacgtgagcatcctgaccatcgacgacggcatcttcgaggtgaaggccaccgccggcgacacccacctgggcggcgaggacttcgacaacagactggtgaaccacttcgtggaggagttcaagagaaagcacaagaaggacatcagccagaacaagagagccgtgagaagactgagaaccgcctgcgagagagccaagagaaccctgagcagcagcacccaggccagcctggagatcgacagcctgttcgagggcatcgacttctacaccagcatcaccagagccagattcgaggagctgtgcagcgacctgttcagaagcaccctggagcccgtggagaaggccctgagagacgccaagctggacaaggcccagatccacgacctggtgctggtgggcggcagcaccagaatccccaaggtgcagaagctgctgcaggacttcttcaacggcagagacctgaacaagagcatcaaccccgacgaggccgtggcctacggcgccgccgtgcaggccgccatcctgatgggcgacaagagcgagaacgtgcaggacctgctgctgctggacgtggcccccctgagcctgggcctggagaccgccggcggcgtgatgaccgccctgatcaagagaaacagcaccatccccaccaagcagacccagatcttcaccacctacagcgacaaccagcccggcgtgctgatccaggtgtacgagggcgagagagccatgaccaaggacaacaacctgctgggcagattcgagctgagcggcatcccccccgcccccagaggcgtgccccagatcgaggtgaccttcgacatcgacgccaacggcatcctgaacgtgaccgccaccgacaagagcaccggcaaggccaacaagatcaccatcaccaacgacaagggcagactgagcaaggaggagatcgagagaatggtgcaggaggccgagaagtacaaggccgaggacgaggtgcagagagagagagtgagcgccaagaacgccctggagagctacgccttcaacatgaagagcgccgtggaggacgagggcctgaagggcaagatcagcgaggccgacaagaagaaggtgctggacaagtgccaggaggtgatcagctggctggacgccaacaccctggccgagaaggacgagttcgagcacaagagaaaggagctggagcaggtgtgcaaccccatcatcagcggcctgtaccagggcgccggcggccccggccccggcggcttcggcgcccagggccccaagggcggcagcggcagcggccccaccatcgaggaggtggactag

SEQ ID NO: 84139 - DNA, 1431 bp, synthetic construct; identical to SEQ ID NO: 84138
  misc_feature 1..1431: note = Description of Artificial Sequence: Synthetic coding sequence
  source 1..1431: mol_type = other DNA

SEQ ID NO: 84140 - DNA, 1926 bp, synthetic construct
  misc_feature 1..1926: note = Description of Artificial Sequence: Synthetic coding sequence
  source 1..1926: mol_type = other DNA
atggccaaggccgccgccatcggcatcgacctgggcaccacctacagctgcgtgggcgtgttccagcacggcaaggtggagatcatcgccaacgaccagggcaacagaaccacccccagctacgtggccttcaccgacaccgagagactgatcggcgacgccgccaagaaccaggtggccctgaacccccagaacaccgtgttcgacgccaagagactgatcggcagaaagttcggcgaccccgtggtgcagagcgacatgaagcactggcccttccaggtgatcaacgacggcgacaagcccaaggtgcaggtgagctacaagggcgacaccaaggccttctaccccgaggagatcagcagcatggtgctgaccaagatgaaggagatcgccgaggcctacctgggctaccccgtgaccaacgccgtgatcaccgtgcccgcctacttcaacgacagccagagacaggccaccaaggacgccggcgtgatcgccggcctgaacgtgctgagaatcatcaacgagcccaccgccgccgccatcgcctacggcctggacagaaccggcaagggcgagagaaacgtgctgatcttcgacctgggcggcggcaccttcgacgtgagcatcctgaccatcgacgacggcatcttcgaggtgaaggccaccgccggcgacacccacctgggcggcgaggacttcgacaacagactggtgaaccacttcgtggaggagttcaagagaaagcacaagaaggacatcagccagaacaagagagccgtgagaagactgagaaccgcctgcgagagagccaagagaaccctgagcagcagcacccaggccagcctggagatcgacagcctgttcgagggcatcgacttctacaccagcatcaccagagccagattcgaggagctgtgcagcgacctgttcagaagcaccctggagcccgtggagaaggccctgagagacgccaagctggacaaggcccagatccacgacctggtgctggtgggcggcagcaccagaatccccaaggtgcagaagctgctgcaggacttcttcaacggcagagacctgaacaagagcatcaaccccgacgaggccgtggcctacggcgccgccgtgcaggccgccatcctgatgggcgacaagagcgagaacgtgcaggacctgctgctgctggacgtggcccccctgagcctgggcctggagaccgccggcggcgtgatgaccgccctgatcaagagaaacagcaccatccccaccaagcagacccagatcttcaccacctacagcgacaaccagcccggcgtgctgatccaggtgtacgagggcgagagagccatgaccaaggacaacaacctgctgggcagattcgagctgagcggcatcccccccgcccccagaggcgtgccccagatcgaggtgaccttcgacatcgacgccaacggcatcctgaacgtgaccgccaccgacaagagcaccggcaaggccaacaagatcaccatcaccaacgacaagggcagactgagcaaggaggagatcgagagaatggtgcaggaggccgagaagtacaaggccgaggacgaggtgcagagagagagagtgagcgccaagaacgccctggagagctacgccttcaacatgaagagcgccgtggaggacgagggcctgaagggcaagatcagcgaggccgacaagaagaaggtgctggacaagtgccaggaggtgatcagctggctggacgccaacaccctggccgagaaggacgagttcgagcacaagagaaaggagctggagcaggtgtgcaaccccatcatcagcggcctgtaccagggcgccggcggccccggccccggcggcttcggcgcccagggccccaagggcggcagcggcagcggccccaccatcgaggaggtggactag

SEQ ID NO: 84141 - DNA, 1431 bp, synthetic construct; identical to SEQ ID NO: 84138
  misc_feature 1..1431: note = Description of Artificial Sequence: Synthetic coding sequence
  source 1..1431: mol_type = other DNA

SEQ ID NO: 84142 - DNA, 1926 bp, synthetic construct; identical to SEQ ID NO: 84137
  misc_feature 1..1926: note = Description of Artificial Sequence: Synthetic coding sequence
  source 1..1926: mol_type = other DNA

SEQ ID NO: 84143 - DNA, 1926 bp, synthetic construct; identical to SEQ ID NO: 84137
  misc_feature 1..1926: note = Description of Artificial Sequence: Synthetic coding sequence
  source 1..1926: mol_type = other DNA

SEQ ID NO: 84144 - DNA, 699 bp, synthetic construct
  misc_feature 1..699: note = Description of Artificial Sequence: Synthetic coding sequence
  source 1..699: mol_type = other DNA
atggccaaggccgccgccatcggcatcgacctgggcaccacctacagctgcgtgggcgtgttccagcacggcaaggtggagatcatcgccaacgaccagggcaacagaaccacccccagctacgtggccttcaccgacaccgagagactgatcggcgacgccggcgtgatcgccggcctgaacgtgctgagaatcatcaacgagcccaccgccgccgccatcgcctacggcctggacagaaccggcaagggcgagagaaacgtgctgatcttcgacctgggcggcggcaccttcgacgtgagcatcctgaccatcgacgacggcatcttcgaggtgaaggccaccgccggcgacacccacctgggcggcgaggacttcgacaacagactggtgaaccacttcgtggaggagttcaagagaaagcacaagaaggacatcagccagaacaagagagccgtgagaagactgagaaccgcctgcgagagagccaagagaaccctgagcagcagcacccaggccagcctggagatcgacagcctgttcgagggcatcgacttctacaccagcatcaccagagccagattcgaggagctgtgcagcgacctgttcagaagcaccctggagcccgtggagaaggccccccccgccagccccagatgcagaagctgctgcagaaccagcagcaccggcgccacctag

SEQ ID NO: 84145 - DNA, 1926 bp, synthetic construct; identical to SEQ ID NO: 84137
  misc_feature 1..1926: note = Description of Artificial Sequence: Synthetic coding sequence
  source 1..1926: mol_type = other DNA

SEQ ID NO: 84146 - DNA, 1431 bp, synthetic construct; identical to SEQ ID NO: 84138
  misc_feature 1..1431: note = Description of Artificial Sequence: Synthetic coding sequence
  source 1..1431: mol_type = other DNA

SEQ ID NO: 84147 - DNA, 1431 bp, synthetic construct; identical to SEQ ID NO: 84138
  misc_feature 1..1431: note = Description of Artificial Sequence: Synthetic coding sequence
  source 1..1431: mol_type = other DNA

SEQ ID NO: 84148 - DNA, 1653 bp, synthetic construct
  misc_feature 1..1653: note = Description of Artificial Sequence: Synthetic coding sequence
  source 1..1653: mol_type = other DNA
atggccaaggccgccgccatcggcatcgacctgggcaccacctacagctgcgtgggcgtgttccagcacggcaaggtgcagatcagcagcatggtgctgaccaagatgaaggagatcgccgaggcctacctgggctaccccgtgaccaacgccgtgatcaccgtgcccgcctacttcaacgacagccagagacaggccaccaaggacgccggcgtgatcgccggcctgaacgtgctgagaatcatcaacgagcccaccgccgccgccatcgcctacggcctggacagaaccggcaagggcgagagaaacgtgctgatcttcgacctgggcggcggcaccttcgacgtgagcatcctgaccatcgacgacggcatcttcgaggtgaaggccaccgccggcgacacccacctgggcggcgaggacttcgacaacagactggtgaaccacttcgtggaggagttcaagagaaagcacaagaaggacatcagccagaacaagagagccgtgagaagactgagaaccgcctgcgagagagccaagagaaccctgagcagcagcacccaggccagcctggagatcgacagcctgttcgagggcatcgacttctacaccagcatcaccagagccagattcgaggagctgtgcagcgacctgttcagaagcaccctggagcccgtggagaaggccctgagagacgccaagctggacaaggcccagatccacgacctggtgctggtgggcggcagcaccagaatccccaaggtgcagaagctgctgcaggacttcttcaacggcagagacctgaacaagagcatcaaccccgacgaggccgtggcctacggcgccgccgtgcaggccgccatcctgatgggcgacaagagcgagaacgtgcaggacctgctgctgctggacgtggcccccctgagcctgggcctggagaccgccggcggcgtgatgaccgccctgatcaagagaaacagcaccatccccaccaagcagacccagatcttcaccacctacagcgacaaccagcccggcgtgctgatccaggtgtacgagggcgagagagccatgaccaaggacaacaacctgctgggcagattcgagctgagcggcatcccccccgcccccagaggcgtgccccagatcgaggtgaccttcgacatcgacgccaacggcatcctgaacgtgaccgccaccgacaagagcaccggcaaggccaacaagatcaccatcaccaacgacaagggcagactgagcaaggaggagatcgagagaatggtgcaggaggccgagaagtacaaggccgaggacgaggtgcagagagagagagtgagcgccaagaacgccctggagagctacgccttcaacatgaagagcgccgtggaggacgagggcctgaagggcaagatcagcgaggccgacaagaagaaggtgctggacaagtgccaggaggtgatcagctggctggacgccaacaccctggccgagaaggacgagttcgagcacaagagaaaggagctggagcaggtgtgcaaccccatcatcagcggcctgtaccagggcgccggcggccccggccccggcggcttcggcgcccagggccccaagggcggcagcggcagcggccccaccatcgaggaggtggactag

SEQ ID NO: 84149 - DNA, 1872 bp, synthetic construct
  misc_feature 1..1872: note = Description of Artificial Sequence: Synthetic coding sequence
  source 1..1872: mol_type = other DNA
atggccaaggccgccgccatcggcatcgacctgggcaccacctacagctgcgtgggcgtgttccagcacggcaaggtggagatcatcgccaacgaccagggcaacagaaccacccccagctacgtggccttcaccgacaccgagagactgatcggcgacgccgccaagaaccaggtggccctgaaccccgtggtgcagagcgacatgaagcactggcccttccaggtgatcaacgacggcgacaagcccaaggtgcaggtgagctacaagggcgagaccaaggccttctaccccgaggagatcagcagcatggtgctgaccaagatgaaggagatcgccgaggcctacctgggctaccccgtgaccaacgccgtgatcaccgtgcccgcctacttcaacgacagccagagacaggccaccaaggacgccggcgtgatcgccggcctgaacgtgctgagaatcatcaacgagcccaccgccgccgccatcgcctacggcctggacagaaccggcaagggcgagagaaacgtgctgatcttcgacctgggcggcggcaccttcgacgtgagcatcctgaccatcgacgacggcatcttcgaggtgaaggccaccgccggcgacacccacctgggcggcgaggacttcgacaacagactggtgaaccacttcgtggaggagttcaagagaaagcacaagaaggacatcagccagaacaagagagccgtgagaagactgagaaccgcctgcgagagagccaagagaaccctgagcagcagcacccaggccagcctggagatcgacagcctgttcgagggcatcgacttctacaccagcatcaccagagccagattcgaggagctgtgcagcgacctgttcagaagcaccctggagcccgtggagaaggccctgagagacgccaagctggacaaggcccagatccacgacctggtgctggtgggcggcagcaccagaatccccaaggtgcagaagctgctgcaggacttcttcaacggcagagacctgaacaagagcatcaaccccgacgaggccgtggcctacggcgccgccgtgcaggccgccatcctgatgggcgacaagagcgagaacgtgcaggacctgctgctgctggacgtggcccccctgagcctgggcctggagaccgccggcggcgtgatgaccgccctgatcaagagaaacagcaccatccccaccaagcagacccagatcttcaccacctacagcgacaaccagcccggcgtgctgatccaggtgtacgagggcgagagagccatgaccaaggacaacaacctgctgggcagattcgagctgagcggcatcccccccgcccccagaggcgtgccccagatcgaggtgaccttcgacatcgacgccaacggcatcctgaacgtgaccgccaccgacaagagcaccggcaaggccaacaagatcaccatcaccaacgacaagggcagactgagcaaggaggagatcgagagaatggtgcaggaggccgagaagtacaaggccgaggacgaggtgcagagagagagagtgagcgccaagaacgccctggagagctacgccttcaacatgaagagcgccgtggaggacgagggcctgaagggcaagatcagcgaggccgacaagaagaaggtgctggacaagtgccaggaggtgatcagctggctggacgccaacaccctggccgagaaggacgagttcgagcacaagagaaaggagctggagcaggtgtgcaaccccatcatcagcggcctgtaccagggcgccggcggccccggccccggcggcttcggcgcccagggccccaagggcggcagcggcagcggccccaccatcgaggaggtggactag

SEQ ID NO: 84150 - DNA, 1653 bp, synthetic construct; identical to SEQ ID NO: 84148
  misc_feature 1..1653: note = Description of Artificial Sequence: Synthetic coding sequence
  source 1..1653: mol_type = other DNA

SEQ ID NO: 84151 - DNA, 1653 bp, synthetic construct; identical to SEQ ID NO: 84148
  misc_feature 1..1653: note = Description of Artificial Sequence: Synthetic coding sequence
  source 1..1653: mol_type = other DNA

SEQ ID NO: 84152 - DNA, 1653 bp, synthetic construct; identical to SEQ ID NO: 84148
  misc_feature 1..1653: note = Description of Artificial Sequence: Synthetic coding sequence
  source 1..1653: mol_type = other DNA

SEQ ID NO: 84153 - DNA, 699 bp, synthetic construct; identical to SEQ ID NO: 84144
  misc_feature 1..699: note = Description of Artificial Sequence: Synthetic coding sequence
  source 1..699: mol_type = other DNA

SEQ ID NO: 84154 - DNA, 1653 bp, synthetic construct; identical to SEQ ID NO: 84148
  misc_feature 1..1653: note = Description of Artificial Sequence: Synthetic coding sequence
  source 1..1653: mol_type = other DNA

SEQ ID NO: 84155 - DNA, 699 bp, synthetic construct; identical to SEQ ID NO: 84144
  misc_feature 1..699: note = Description of Artificial Sequence: Synthetic coding sequence
  source 1..699: mol_type = other DNA

SEQ ID NO: 84156 - DNA, 699 bp, synthetic construct; identical to SEQ ID NO: 84144
  misc_feature 1..699: note = Description of Artificial Sequence: Synthetic coding sequence
  source 1..699: mol_type = other DNA

SEQ ID NO: 84157 - DNA, 699 bp, synthetic construct; identical to SEQ ID NO: 84144
  misc_feature 1..699: note = Description of Artificial Sequence: Synthetic coding sequence
  source 1..699: mol_type = other DNA

SEQ ID NO: 84158 - DNA, 1926 bp, synthetic construct; identical to SEQ ID NO: 84137
  misc_feature 1..1926: note = Description of Artificial Sequence: Synthetic coding sequence
  source 1..1926: mol_type = other DNA

SEQ ID NO: 84159 - DNA, 1926 bp, synthetic construct; identical to SEQ ID NO: 84137
  misc_feature 1..1926: note = Description of Artificial Sequence: Synthetic coding sequence
  source 1..1926: mol_type = other DNA

SEQ ID NO: 84160 - DNA, 1926 bp, synthetic construct; identical to SEQ ID NO: 84137
  misc_feature 1..1926: note = Description of Artificial Sequence: Synthetic coding sequence
  source 1..1926: mol_type = other DNA

SEQ ID NO: 84161 - DNA, 699 bp, synthetic construct; identical to SEQ ID NO: 84144
  misc_feature 1..699: note = Description of Artificial Sequence: Synthetic coding sequence
  source 1..699: mol_type = other DNA

SEQ ID NO: 84162 - DNA, 1926 bp, synthetic construct; identical to SEQ ID NO: 84137
  misc_feature 1..1926: note = Description of Artificial Sequence: Synthetic coding sequence
  source 1..1926: mol_type = other DNA

SEQ ID NO: 84163 - DNA, 1926 bp, synthetic construct; identical to SEQ ID NO: 84137
  misc_feature 1..1926: note = Description of Artificial Sequence: Synthetic coding sequence
  source 1..1926: mol_type = other DNA

SEQ ID NO: 84164 - DNA, 2127 bp, synthetic construct
  misc_feature 1..2127: note = Description of Artificial Sequence: Synthetic coding sequence
  source 1..2127: mol_type = other DNA
ctgagaagctgctgcgagggccccctgagactgagcagagtgacccccgccgtgcccagactgagcagagccaacctgtgcggctgcagacacagaagagtggagttccccgccttcagaagaaccgagctgctgagcagaatccccagcgccgtgagcagcccccagagccagagcggcgcccacagacagggcaccggcatggccaaggccgccgccatcggcatcgacctgggcaccacctacagctgcgtgggcgtgttccagcacggcaaggtggagatcatcgccaacgaccagggcaacagaaccacccccagctacgtggccttcaccgacaccgagagactgatcggcgacgccgccaagaaccaggtggccctgaacccccagaacaccgtgttcgacgccaagagactgatcggcagaaagttcggcgaccccgtggtgcagagcgacatgaagcactggcccttccaggtgatcaacgacggcgacaagcccaaggtgcaggtgagctacaagggcgagaccaaggccttctaccccgaggagatcagcagcatggtgctgaccaagatgaaggagatcgccgaggcctacctgggctaccccgtgaccaacgccgtgatcaccgtgcccgcctacttcaacgacagccagagacaggccaccaaggacgccggcgtgatcgccggcctgaacgtgctgagaatcatcaacgagcccaccgccgccgccatcgcctacggcctggacagaaccggcaagggcgagagaaacgtgctgatcttcgacctgggcggcggcaccttcgacgtgagcatcctgaccatcgacgacggcatcttcgaggtgaaggccaccgccggcgacacccacctgggcggcgaggacttcgacaacagactggtgaaccacttcgtggaggagttcaagagaaagcacaagaaggacatcagccagaacaagagagccgtgagaagactgagaaccgcctgcgagagagccaagagaaccctgagcagcagcacccaggccagcctggagatcgacagcctgttcgagggcatcgacttctacaccagcatcaccagagccagattcgaggagctgtgcagcgacctgttcagaagcaccctggagcccgtggagaaggccctgagagacgccaagctggacaaggcccagatccacgacctggtgctggtgggcggcagcaccagaatccccaaggtgcagaagctgctgcaggacttcttcaacggcagagacctgaacaagagcatcaaccccgacgaggccgtggcctacggcgccgccgtgcaggccgccatcctgatgggcgacaagagcgagaacgtgcaggacctgctgctgctggacgtggcccccctgagcctgggcctggagaccgccggcggcgtgatgaccgccctgatcaagagaaacagcaccatccccaccaagcagacccagatcttcaccacctacagcgacaaccagcccggcgtgctgatccaggtgtacgagggcgagagagccatgaccaaggacaacaacctgctgggcagattcgagctgagcggcatcccccccgcccccagaggcgtgccccagatcgaggtgaccttcgacatcgacgccaacggcatcctgaacgtgaccgccaccgacaagagcaccggcaaggccaacaagatcaccatcaccaacgacaagggcagactgagcaaggaggagatcgagagaatggtgcaggaggccgagaagtacaaggccgaggacgaggtgcagagagagagagtgagcgccaagaacgccctggagagctacgccttcaacatgaagagcgccgtggaggacgagggcctgaagggcaagatcagcgaggccgacaagaagaaggtgctggacaagtgccaggaggtgatcagctggctggacgccaacaccctggccgagaaggacgagttcgagcacaagagaaaggagctggagcaggtgtgcaaccccatcatcagcggcctgtaccagggcgccggcggccccggccccggcggcttcggcgcccagggccccaagggcggcagcggcagcggccccaccatcgaggaggtggactag

SEQ ID NO: 84165 - DNA, 1653 bp, synthetic construct; identical to SEQ ID NO: 84148
  misc_feature 1..1653: note = Description of Artificial Sequence: Synthetic coding sequence
  source 1..1653: mol_type = other DNA

SEQ ID NO: 84166 - DNA, 1875 bp, synthetic construct
  misc_feature 1..1875: note = Description of Artificial Sequence: Synthetic coding sequence
  source 1..1875: mol_type = other DNA
atggccaaggccgccgccatcggcatcgacctgggcaccacctacagctgcgtgggcgtgttccagcacggcaaggtggagatcatcgccaacgaccagggcaacagaaccacccccagctacgtggccttcaccgacaccgagagactgatcggcgacgccgccaagaaccaggtggccctgaacccccccgtggtgcagagcgacatgaagcactggcccttccaggtgatcaacgacggcgacaagcccaaggtgcaggtgagctacaagggcgagaccaaggccttctaccccgaggagatcagcagcatggtgctgaccaagatgaaggagatcgccgaggcctacctgggctaccccgtgaccaacgccgtgatcaccgtgcccgcctacttcaacgacagccagagacaggccaccaaggacgccggcgtgatcgccggcctgaacgtgctgagaatcatcaacgagcccaccgccgccgccatcgcctacggcctggacagaaccggcaagggcgagagaaacgtgctgatcttcgacctgggcggcggcaccttcgacgtgagcatcctgaccatcgacgacggcatcttcgaggtgaaggccaccgccggcgacacccacctgggcggcgaggacttcgacaacagactggtgaaccacttcgtggaggagttcaagagaaagcacaagaaggacatcagccagaacaagagagccgtgagaagactgagaaccgcctgcgagagagccaagagaaccctgagcagcagcacccaggccagcctggagatcgacagcctgttcgagggcatcgacttctacaccagcatcaccagagccagattcgaggagctgtgcagcgacctgttcagaagcaccctggagcccgtggagaaggccctgagagacgccaagctggacaaggcccagatccacgacctggtgctggtgggcggcagcaccagaatccccaaggtgcagaagctgctgcaggacttcttcaacggcagagacctgaacaagagcatcaaccccgacgaggccgtggcctacggcgccgccgtgcaggccgccatcctgatgggcgacaagagcgagaacgtgcaggacctgctgctgctggacgtggcccccctgagcctgggcctggagaccgccggcggcgtgatgaccgccctgatcaagagaaacagcaccatccccaccaagcagacccagatcttcaccacctacagcgacaaccagcccggcgtgctgatccaggtgtacgagggcgagagagccatgaccaaggacaacaacctgctgggcagattcgagctgagcggcatcccccccgcccccagaggcgtgccccagatcgaggtgaccttcgacatcgacgccaacggcatcctgaacgtgaccgccaccgacaagagcaccggcaaggccaacaagatcaccatcaccaacgacaagggcagactgagcaaggaggagatcgagagaatggtgcaggaggccgagaagtacaaggccgaggacgaggtgcagagagagagagtgagcgccaagaacgccctggagagctacgccttcaacatgaagagcgccgtggaggacgagggcctgaagggcaagatcagcgaggccgacaagaagaaggtgctggacaagtgccaggaggtgatcagctggctggacgccaacaccctggccgagaaggacgagttcgagcacaagagaaaggagctggagcaggtgtgcaaccccatcatcagcggcctgtaccagggcgccggcggccccggccccggcggcttcggcgcccagggccccaagggcggcagcggcagcggccccaccatcgaggaggtggactag

SEQ ID NO: 84167 - DNA, 1857 bp, synthetic construct
  misc_feature 1..1857: note = Description of Artificial Sequence: Synthetic coding sequence
  source 1..1857: mol_type = other DNA
atggccaaggccgccgccatcggcatcgacctgggcaccacctacagctgcgtgggcgtgttccagcacggcaaggtggagatcatcgccaacgaccagggcaacagaaccacccccagctacgtggccttcaccgacaccgagagactgatcggcgacgccgccaagaaccaggtggtgcagagcgacatgaagcactggcccttccaggtgatcaacgacggcgacaagcccaaggtgcaggtgagctacaagggcgagaccaaggccttctaccccgaggagatcagcagcatggtgctgaccaagatgaaggagatcgccgaggcctacctgggctaccccgtgaccaacgccgtgatcaccgtgcccgcctacttcaacgacagccagagacaggccaccaaggacgccggcgtgatcgccggcctgaacgtgctgagaatcatcaacgagcccaccgccgccgccatcgcctacggcctggacagaaccggcaagggcgagagaaacgtgctgatcttcgacctgggcggcggcaccttcgacgtgagcatcctgaccatcgacgacggcatcttcgaggtgaaggccaccgccggcgacacccacctgggcggcgaggacttcgacaacagactggtgaaccacttcgtggaggagttcaagagaaagcacaagaaggacatcagccagaacaagagagccgtgagaagactgagaaccgcctgcgagagagccaagagaaccctgagcagcagcacccaggccagcctggagatcgacagcctgttcgagggcatcgacttctacaccagcatcaccagagccagattcgaggagctgtgcagcgacctgttcagaagcaccctggagcccgtggagaaggccctgagagacgccaagctggacaaggcccagatccacgacctggtgctggtgggcggcagcaccagaatccccaaggtgcagaagctgctgcaggacttcttcaacggcagagacctgaacaagagcatcaaccccgacgaggccgtggcctacggcgccgccgtgcaggccgccatcctgatgggcgacaagagcgagaacgtgcaggacctgctgctgctggacgtggcccccctgagcctgggcctggagaccgccggcggcgtgatgaccgccctgatcaagagaaacagcaccatccccaccaagcagacccagatcttcaccacctacagcgacaaccagcccggcgtgctgatccaggtgtacgagggcgagagagccatgaccaaggacaacaacctgctgggcagattcgagctgagcggcatcccccccgcccccagaggcgtgccccagatcgaggtgaccttcgacatcgacgccaacggcatcctgaacgtgaccgccaccgacaagagcaccggcaaggccaacaagatcaccatcaccaacgacaagggcagactgagcaaggaggagatcgagagaatggtgcaggaggccgagaagtacaaggccgaggacgaggtgcagagagagagagtgagcgccaagaacgccctggagagctacgccttcaacatgaagagcgccgtggaggacgagggcctgaagggcaagatcagcgaggccgacaagaagaaggtgctggacaagtgccaggaggtgatcagctggctggacgccaacaccctggccgagaaggacgagttcgagcacaagagaaaggagctggagcaggtgtgcaaccccatcatcagcggcctgtaccagggcgccggcggccccggccccggcggcttcggcgcccagggccccaagggcggcagcggcagcggccccaccatcgaggaggtggactag

SEQ ID NO: 84168 - DNA, 1857 bp, synthetic construct; identical to SEQ ID NO: 84167
  misc_feature 1..1857: note = Description of Artificial Sequence: Synthetic coding sequence
  source 1..1857: mol_type = other DNA

SEQ ID NO: 84169 - DNA, 1653 bp, synthetic construct; identical to SEQ ID NO: 84148
  misc_feature 1..1653: note = Description of Artificial Sequence: Synthetic coding sequence
  source 1..1653: mol_type = other DNA

SEQ ID NO: 84170 - DNA, 1857 bp, synthetic construct; identical to SEQ ID NO: 84167
  misc_feature 1..1857: note = Description of Artificial Sequence: Synthetic coding sequence
  source 1..1857: mol_type = other DNA

SEQ ID NO: 84171 - DNA, 1653 bp, synthetic construct; identical to SEQ ID NO: 84148
  misc_feature 1..1653: note = Description of Artificial Sequence: Synthetic coding sequence
  source 1..1653: mol_type = other DNA

SEQ ID NO: 84172 - DNA, 1761 bp, synthetic construct
  misc_feature 1..1761: note = Description of Artificial Sequence: Synthetic coding sequence
  source 1..1761: mol_type = other DNA
atggccaccgccaagggcatcgccatcggcatcgacctgggcaccacctacagctgcgtgggcgtgttccagcacggcaaggtggagatcatcgccaacgaccagggcaacagaaccacccccagctacgtggccttcaccgacaccgagagactgatcggcgacgccgccaagaaccaggtggccatgaacccccagaacaccgtgttcgacgccaagagactgatcggcagaaagttcaacgaccccgtggtgcaggccgacatgaagctgtggcccttccaggtgatcaacgacagccagagacaggccaccaaggacgccggcgtgatcgccggcctgaacgtgctgagaatcatcaacgagcccaccgccgccgccatcgcctacggcctggacaagggcggccagggcgagagacacgtgctgatcttcgacctgggcggcggcaccttcgacgtgagcatcctgaccatcgacgacggcatcttcgaggtgaaggccaccgccggcgacacccacctgggcggcgaggacttcgacaacagactggtgagccacttcgtggaggagttcaagagaaagcacaagaaggacatcagccagaacaagagagccgtgagaagactgagaaccgcctgcgagagagccaagagaaccctgagcagcagcacccaggccaacctggagatcgacagcctgtacgagggcatcgacttctacaccagcatcaccagagccagattcgaggagctgtgcgccgacctgttcagaggcaccctggagcccgtggagaaggccctgagagacgccaagatggacaaggccaagatccacgacatcgtgctggtgggcggcagcaccagaatccccaaggtgcagagactgctgcaggactacttcaacggcagagacctgaacaagagcatcaaccccgacgaggccgtggcctacggcgccgccgtgcaggccgccatcctgatgggcgacaagagcgagaaggtgcaggacctgctgctgctggacgtggcccccctgagcctgggcctggagaccgccggcggcgtgatgaccgccctgatcaagagaaacagcaccatccccaccaagcagacccagatcttcaccacctacagcgacaaccagcccggcgtgctgatccaggtgtacgagggcgagagagccatgaccaaggacaacaacctgctgggcagattcgacctgaccggcatcccccccgcccccagaggcgtgccccagatcgaggtgaccttcgacatcgacgccaacggcatcctgaacgtgaccgccaccgacaagagcaccggcaaggtgaacaagatcaccatcaccaacgacaagggcagactgagcaaggaggagatcgagagaatggtgctggacgccgagaagtacaaggccgaggacgaggtgcagagagagaagatcgccgccaagaacgccctggagagctacgccttcaacatgaagagcgtggtgagcgacgagggcctgaagggcaagatcagcgagagcgacaagaacaagatcctggacaagtgcaacgagctgctgagctggctggaggtgaaccagctggccgagaaggacgagttcgaccacaagagaaaggagctggagcagatgtgcaaccccatcatcaccaagctgtaccagggcggctgcaccggccccgcctgcggcaccggctacgtgcccggcagacccgccaccggccccaccatcgaggaggtggactag

SEQ ID NO: 84173 - DNA, 1926 bp, synthetic construct
  misc_feature 1..1926: note = Description of Artificial Sequence: Synthetic coding sequence
  source 1..1926: mol_type = other DNA
atggccaccgccaagggcatcgccatcggcatcgacctgggcaccacctacagctgcgtgggcgtgttccagcacggcaaggtggagatcatcgccaacgaccagggcaacagaaccacccccagctacgtggccttcaccgacaccgagagactgatcggcgacgccgccaagaaccaggtggccatgaacccccagaacaccgtgttcgacgccaagagactgatcggcagaaagttcaacgaccccgtggtgcaggccgacatgaagctgtggcccttccaggtgatcaacgagggcggcaagcccaaggtgctggtgagctacaagggcgagaacaaggccttctaccccgaggagatcagcagcatggtgctgaccaagctgaaggagaccgccgaggccttcctgggccaccccgtgaccaacgccgtgatcaccgtgcccgcctacttcaacgacagccagagacaggccaccaaggacgccggcgtgatcgccggcctgaacgtgctgagaatcatcaacgagcccaccgccgccgccatcgcctacggcctggacaagggcggccagggcgagagacacgtgctgatcttcgacctgggcggcggcaccttcgacgtgagcatcctgaccatcgacgacggcatcttcgaggtgaaggccaccgccggcgacacccacctgggcggcgaggacttcgacaacagactggtgagccacttcgtggaggagttcaagagaaagcacaagaaggacatcagccagaacaagagagccgtgagaagactgagaaccgcctgcgagagagccaagagaaccctgagcagcagcacccaggccaacctggagatcgacagcctgtacgagggcatcgacttctacaccagcatcaccagagccagattcgaggagctgtgcgccgacctgttcagaggcaccctggagcccgtggagaaggccctgagagacgccaagatggacaaggccaagatccacgacatcgtgctggtgggcggcagcaccagaatccccaaggtgcagagactgctgcaggactacttcaacggcagagacctgaacaagagcatcaaccccgacgaggccgtggcctacggcgccgccgtgcaggccgccatcctgatgggcgacaagagcgagaaggtgcaggacctgctgctgctggacgtggcccccctgagcctgggcctggagaccgccggcggcgtgatgaccgccctgatcaagagaaacagcaccatccccaccaagcagacccagatcttcaccacctacagcgacaaccagcccggcgtgctgatccaggtgtacgagggcgagagagccatgaccaaggacaacaacctgctgggcagattcgacctgaccggcatcccccccgcccccagaggcgtgccccagatcgaggtgaccttcgacatcgacgccaacggcatcctgaacgtgaccgccaccgacaagagcaccggcaaggtgaacaagatcaccatcaccaacgacaagggcagactgagcaaggaggagatcgagagaatggtgctggacgccgagaagtacaaggccgaggacgaggtgcagagagagaagatcgccgccaagaacgccctggagagctacgccttcaacatgaagagcgtggtgagcgacgagggcctgaagggcaagatcagcgagagcgacaagaacaagatcctggacaagtgcaacgagctgctgagctggctggaggtgaaccagctggccgagaaggacgagttcgaccacaagagaaaggagctggagcagatgtgcaaccccatcatcaccaagctgtaccagggcggctgcaccggccccgcctgcggcaccggctacgtgcccggcagacccgccaccggccccaccatcgaggaggtggactag

SEQ ID NO: 84174 - DNA, 1926 bp, synthetic construct
  misc_feature 1..1926: note = Description of Artificial Sequence: Synthetic coding sequence
  source 1..1926: mol_type = other DNA
atggccaccgccaagggcatcgccatcggcatcgacctgggcaccacctacagctgcgtgggcgtgttccagcacggcaaggtggagatcatcgccaacgaccagggcaacagaaccacccccagctacgtggccttcaccgacaccgagagactgatcggcgacgccgccaagaaccaggtggccatgaacccccagaacaccgtgttcgacgccaagagactgatcggcagaaagttcaacgaccccgtggtgcaggccgacatgaagctgtggcccttccaggtgatcaacgagggcggcaagcccaaggtgctggtgagctacaagggcgagaacaaggccttctaccccgaggagatcagcagcatggtgctgaccaagctgaaggagaccgccgaggccttcctgggccaccccgtgaccaacgccgtgatcaccgtgcccgcctacttcaacgacagccagagacaggccaccaaggacgccggcgtgatcgccggcctgaacgtgctgagaatcatcaacgagcccaccgccgccgccatcgcctacggcctggacaagggcggccagggcgagagacacgtgctgatcttcgacctgggcggcggcaccttcgacgtgagcatcctgaccatcgacgacggcatcttcgaggtgaaggccaccgccggcgacacccacctgggcggcgaggacttcgacaacagactggtgagccacttcgtggaggagttcaagagaaagcacaagaaggacatcagccagaacaagagagccgtgagaagactgagaaccgcctgcgagagagccaagagaaccctgagcagcagcacccaggccaacctggagatcgacagcctgtacgagggcatcgacttctacaccagcatcaccagagccagattcgaggagctgtgcgccgacctgttcagaggcaccctggagcccgtggagaaggccctgagagacgccaagatggacaaggccaagatccacgacatcgtgctggtgggcggcagcaccagaatccccaaggtgcagagactgctgcaggactacttcaacggcagagacctgaacaagagcatcaaccccgacgaggccgtggcctacggcgccgccgtgcaggccgccatcctgatgggcgacaagagcgagaaggtgcaggacctgctgctgctggacgtggcccccctgagcctgggcctggagaccgccggcggcgtgatgaccgccctgatcaagagaaacagcaccatccccaccaagcagacccagatcttcaccacctacagcgacaaccagcccggcgtgctgatccaggtgtacgagggcgagagagccatgaccaaggacaacaacctgctgggcagattcgacctgaccggcatcccccccgcccccagaggcgtgccccagatcgaggtgaccttcgacatcgacgccaacggcatcctgaacgtgaccgccatggacaagagcaccggcaaggtgaacaagatcaccatcaccaacgacaagggcagactgagcaaggaggagatcgagagaatggtgctggacgccgagaagtacaaggccgaggacgaggtgcagagagagaagatcgccgccaagaacgccctggagagctacgccttcaacatgaagagcgtggtgagcgacgagggcctgaagggcaagatcagcgagagcgacaagaacaagatcctggacaagtgcaacgagctgctgagctggctggaggtgaaccagctggccgagaaggacgagttcgaccacaagagaaaggagctggagcagatgtgcaaccccatcatcaccaagctgtaccagggcggctgcaccggccccgcctgcggcaccggctacgtgcccggcagacccgccaccggccccaccatcgaggaggtggactag

SEQ ID NO: 84175 - DNA, 1926 bp, synthetic construct; identical to SEQ ID NO: 84173
  misc_feature 1..1926: note = Description of Artificial Sequence: Synthetic coding sequence
  source 1..1926: mol_type = other DNA

SEQ ID NO: 84176 - DNA, 1926 bp, synthetic construct; identical to SEQ ID NO: 84173
  misc_feature 1..1926: note = Description of Artificial Sequence: Synthetic coding sequence
  source 1..1926: mol_type = other DNA

SEQ ID NO: 84177 - DNA, 699 bp, synthetic construct
  misc_feature 1..699: note = Description of Artificial Sequence: Synthetic coding sequence
  source 1..699: mol_type = other DNA
gccaagggcatcgccatcggcatcgacctgggcaccacctacagctgcgtgggcgtgttccagcacggcaaggtggagatcatcgccaacgaccagggcaacagaaccacccccagctacgtggccttcaccgacaccgagagactgatcggcgacgccggcgtgatcgccggcctgaacgtgctgagaatcatcaacgagcccaccgccgccgccatcgcctacggcctggacaagggcggccagggcgagagacacgtgctgatcttcgacctgggcggcggcaccttcgacgtgagcatcctgaccatcgacgacggcatcttcgaggtgaaggccaccgccggcgacacccacctgggcggcgaggacttcgacaacagactggtgagccacttcgtggaggagttcaagagaaagcacaagaaggacatcagccagaacaagagagccgtgagaagactgagaaccgcctgcgagagagccaagagaaccctgagcagcagcacccaggccaacctggagatcgacagcctgtacgagggcatcgacttctacaccagcatcaccagagccagattcgaggagctgtgcgccgacctgttcagaggcaccctggagcccgtggagaagggcgccccccccgccagccccagatgcagcggctgcttcagaaccaccagcatggacgtgatctag

SEQ ID NO: 84178 - DNA, 1926 bp, synthetic construct; identical to SEQ ID NO: 84174
  misc_feature 1..1926: note = Description of Artificial Sequence: Synthetic coding sequence
  source 1..1926: mol_type = other DNA

SEQ ID NO: 84179 - DNA, 1599 bp, synthetic construct
  misc_feature 1..1599: note = Description of Artificial Sequence: Synthetic coding sequence
  source 1..1599: mol_type = other DNA
atggccaccgccaagggcatcgccatcggcatcgacctgggcaccacctacagctgcgtgggcgtgttccagcacggcaaggtggagatcatcgccaacgaccagggcaacagaaccacccccagctacgtggccttcaccgacaccgagagactgatcggcgacgccgccaagaaccaggtggccatgaacccccagaacaccgtgttcgacgccaagagactgatcggcagaaagttcaacgaccccgtggtgcaggccgacatgaagctgtggcccttccaggtgatcaacgagggcggcaagcccaaggtgctggtgagctacaagggcgagaacaaggccttctaccccgaggagatcagcagcatggtgctgaccaagctgaaggagaccgccgaggccttcctgggccaccccgtgaccaacgccgtgatcaccgtgcccgcctacttcaacgacagccagagacaggccaccaaggacgccggcgtgatcgccggcctgaacgtgctgagaatcatcaacgagcccaccgccgccgccatcgcctacggcctggacaagggcggccagggcgagagacacgtgctgatcttcgacctgggcggcggcaccttcgacgtgagcatcctgaccatcgacgacggcatcttcgaggtgaaggccaccgccggcgacacccacctgggcggcgaggacttcgacaacagactggtgagccacttcgtggaggagttcaagagaaagcacaagaaggacatcagccagaacaagagagccgtgagaagactgagaaccgcctgcgagagagccaagagaaccctgagcagcagcacccaggccaacctggagatcgacagcctgtacgagggcatcgacttctacaccagcatcaccagagccagattcgaggagctgtgcgccgacctgttcagaggcaccctggagcccgtggagaaggccctgagagacgccaagatggacaaggccaagatccacgacatcgtgctggtgggcggcagcaccagaatccccaaggtgcagagactgctgcaggactacttcaacggcagagacctgaacaagagcatcaaccccgacgaggccgtggcctacggcgccgccgtgcaggccgccatcctgatgggcgacaagagcgagaaggtgcaggacctgctgctgctggacgtggcccccctgagcctgggcctggagaccgccggcggcgtgatgaccgccctgatcaagagaaacagcaccatccccaccaagcagacccagatcttcaccacctacagcgacaaccagcccggcgtgctgatccaggtgtacgagggcgagagagccatgaccaaggacaacaacctgctgggcagattcgacctgaccggcatcccccccgcccccagaggcgtgccccagatcgaggtgaccttcgacatcgacgccaacggcatcctgaacgtgaccgccatggacaagagcaccggcaaggtgaacaagatcaccatcaccaacgacaagggcagactgagcaaggaggagatcgagagaatggtgctggacgccgagaagtacaaggccgaggacgtgtag

SEQ ID NO: 84180 - DNA, 699 bp, synthetic construct; identical to SEQ ID NO: 84177
  misc_feature 1..699: note = Description of Artificial Sequence: Synthetic coding sequence
  source 1..699: mol_type = other DNA

SEQ ID NO: 84181 - DNA, 1926 bp, synthetic construct; identical to SEQ ID NO: 84173
  misc_feature 1..1926: note = Description of Artificial Sequence: Synthetic coding sequence
  source 1..1926: mol_type = other DNA

SEQ ID NO: 84182 - DNA, 1599 bp, synthetic construct; identical to SEQ ID NO: 84179
  misc_feature 1..1599: note = Description of Artificial Sequence: Synthetic coding sequence
  source 1..1599: mol_type = other DNA

SEQ ID NO: 84183 - DNA, 1599 bp, synthetic construct
  misc_feature 1..1599: note = Description of Artificial Sequence: Synthetic coding sequence
  source 1..1599: mol_type = other DNA
atggccaccgccaagggcatcgccatcggcatcgacctgggcaccacctacagctgcgtgggcgtgttccagcacggcaaggtggagatcatcgccaacgaccagggcaacagaaccacccccagctacgtggccttcaccgacaccgagagactgatcggcgacgccgccaagaaccaggtggccatgaacccccagaacaccgtgttcgacgccaagagactgatcggcagaaagttcaacgaccccgtggtgcaggccgacatgaagctgtggcccttccaggtgatcaacgagggcggcaagcccaaggtgctggtgagctacaagggcgagaacaaggccttctaccccgaggagatcagcagcatggtgctgaccaagctgaaggagaccgccgaggccttcctgggccaccccgtgaccaacgccgtgatcaccgtgcccgcctacttcaacgacagccagagacaggccaccaaggacgccggcgtgatcgccggcctgaacgtgctgagaatcatcaacgagcccaccgccgccgccatcgcctacggcctggacaagggcggccagggcgagagacacgtgctgatcttcgacctgggcggcggcaccttcgacgtgagcatcctgaccatcgacgacggcatcttcgaggtgaaggccaccgccggcgacacccacctgggcggcgaggacttcgacaacagactggtgagccacttcgtggaggagttcaagagaaagcacaagaaggacatcagccagaacaagagagccgtgagaagactgagaaccgcctgcgagagagccaagagaaccctgagcagcagcacccaggccaacctggagatcgacagcctgtacgagggcatcgacttctacaccagcatcaccagagccagattcgaggagctgtgcgccgacctgttcagaggcaccctggagcccgtggagaaggccctgagagacgccaagatggacaaggccaagatccacgacatcgtgctggtgggcggcagcaccagaatccccaaggtgcagagactgctgcaggactacttcaacggcagagacctgaacaagagcatcaaccccgacgaggccgtggcctacggcgccgccgtgcaggccgccatcctgatgggcgacaagagcgagaaggtgcaggacctgctgctgctggacgtggcccccctgagcctgggcctggagaccgccggcggcgtgatgaccgccctgatcaagagaaacagcaccatccccaccaagcagacccagatcttcaccacctacagcgacaaccagcccggcgtgctgatccaggtgtacgagggcgagagagccatgaccaaggacaacaacctgctgggcagattcgacctgaccggcatcccccccgcccccagaggcgtgccccagatcgaggtgaccttcgacatcgacgccaacggcatcctgaacgtgaccgccaccgacaagagcaccggcaaggtgaacaagatcaccatcaccaacgacaagggcagactgagcaaggaggagatcgagagaatggtgctggacgccgagaagtacaaggccgaggacgtgtag

SEQ ID NO: 84184 - DNA, 1926 bp, synthetic construct; identical to SEQ ID NO: 84174
  misc_feature 1..1926: note = Description of Artificial Sequence: Synthetic coding sequence
  source 1..1926: mol_type = other DNA

SEQ ID NO: 84185 - DNA, 699 bp, synthetic construct; identical to SEQ ID NO: 84177
  misc_feature 1..699: note = Description of Artificial Sequence: Synthetic coding sequence
  source 1..699: mol_type = other DNA

SEQ ID NO: 84186 - DNA, 699 bp, synthetic construct; identical to SEQ ID NO: 84177
  misc_feature 1..699: note = Description of Artificial Sequence: Synthetic coding sequence
  source 1..699: mol_type = other DNA

SEQ ID NO: 84187 - DNA, 1926 bp, synthetic construct; identical to SEQ ID NO: 84174
  misc_feature 1..1926: note = Description of Artificial Sequence: Synthetic coding sequence
  source 1..1926: mol_type = other DNA

SEQ ID NO: 84188 - DNA, 1920 bp, synthetic construct
  misc_feature 1..1920: note = Description of Artificial Sequence: Synthetic coding sequence
  source 1..1920: mol_type = other DNA
atgagcgccagaggccccgccatcggcatcgacctgggcaccacctacagctgcgtgggcgtgttccagcacggcaaggtggagatcatcgccaacgaccagggcaacagaaccacccccagctacgtggccttcaccgacaccgagagactgatcggcgacgccgccaagaaccaggtggccatgaaccccaccaacaccatcttcgacgccaagagactgatcggcagaaagttcgaggacgccaccgtgcagagcgacatgaagcactggcccttcagagtggtgagcgagggcggcaagcccaaggtgcaggtggagtacaagggcgagaccaagaccttcttccccgaggagatcagcagcatggtgctgaccaagatgaaggagatcgccgaggcctacctgggcggcaaggtgcacagcgccgtgatcaccgtgcccgcctacttcaacgacagccagagacaggccaccaaggacgccggcaccatcaccggcctgaacgtgctgagaatcatcaacgagcccaccgccgccgccatcgcctacggcctggacaagaagggctgcgccggcggcgagaagaacgtgctgatcttcgacctgggcggcggcaccttcgacgtgagcatcctgaccatcgaggacggcatcttcgaggtgaagagcaccgccggcgacacccacctgggcggcgaggacttcgacaacagaatggtgagccacctggccgaggagttcaagagaaagcacaagaaggacatcggccccaacaagagagccgtgagaagactgagaaccgcctgcgagagagccaagagaaccctgagcagcagcacccaggccagcatcgagatcgacagcctgtacgagggcgtggacttctacaccagcatcaccagagccagattcgaggagctgaacgccgacctgttcagaggcaccctggagcccgtggagaaggccctgagagacgccaagctggacaagggccagatccaggagatcgtgctggtgggcggcagcaccagaatccccaagatccagaagctgctgcaggacttcttcaacggcaaggagctgaacaagagcatcaaccccgacgaggccgtggcctacggcgccgccgtgcaggccgccatcctgatcggcgacaagagcgagaacgtgcaggacctgctgctgctggacgtgacccccctgagcctgggcatcgagaccgccggcggcgtgatgacccccctgatcaagagaaacaccaccatccccaccaagcagacccagaccttcaccacctacagcgacaaccagagcagcgtgctggtgcaggtgtacgagggcgagagagccatgaccaaggacaacaacctgctgggcaagttcgacctgaccggcatcccccccgcccccagaggcgtgccccagatcgaggtgaccttcgacatcgacgccaacggcatcctgaacgtgaccgccgccgacaagagcaccggcaaggagaacaagatcaccatcaccaacgacaagggcagactgagcaaggacgacatcgacagaatggtgcaggaggccgagagatacaagagcgaggacgaggccaacagagacagagtggccgccaagaacgccctggagagctacacctacaacatcaagcagaccgtggaggacgagaagctgagaggcaagatcagcgagcaggacaagaacaagatcctggacaagtgccaggaggtgatcaactggctggacagaaaccagatggccgagaaggacgagtacgagcacaagcagaaggagctggagagagtgtgcaaccccatcatcagcaagctgtaccagggcggccccggcggcggcagcggcggcggcggcagcggcgccagcggcggccccaccatcgaggaggtggactag

SEQ ID NO: 84189 - DNA, 1920 bp, synthetic construct; identical to SEQ ID NO: 84188
  misc_feature 1..1920: note = Description of Artificial Sequence: Synthetic coding sequence
  source 1..1920: mol_type = other DNA

SEQ ID NO: 84190 - DNA, 1242 bp, synthetic construct
  misc_feature 1..1242: note = Description of Artificial Sequence: Synthetic coding sequence
  source 1..1242: mol_type = other DNA
atgagcgccagaggccccgccatcggcatcgacctgggcaccacctacagctgcgtgggcgtgttccagcacggcaaggtggagatcatcgccaacgaccagggcaacagaaccacccccagctacgtggccttcaccgacaccgagagactgatcggcgacgccgccaagaaccaggtggccatgaaccccaccaacaccatcttcgacgccaagagactgatcggcagaaagttcgaggagctgaacgccgacctgttcagaggcaccctggagcccgtggagaaggccctgagagacgccaagctggacaagggccagatccaggagatcgtgctggtgggcggcagcaccagaatccccaagatccagaagctgctgcaggacttcttcaacggcaaggagctgaacaagagcatcaaccccgacgaggccgtggcctacggcgccgccgtgcaggccgccatcctgatcggcgacaagagcgagaacgtgcaggacctgctgctgctggacgtgacccccctgagcctgggcatcgagaccgccggcggcgtgatgacccccctgatcaagagaaacaccaccatccccaccaagcagacccagaccttcaccacctacagcgacaaccagagcagcgtgctggtgcaggtgtacgagggcgagagagccatgaccaaggacaacaacctgctgggcaagttcgacctgaccggcatcccccccgcccccagaggcgtgccccagatcgaggtgaccttcgacatcgacgccaacggcatcctgaacgtgaccgccgccgacaagagcaccggcaaggagaacaagatcaccatcaccaacgacaagggcagactgagcaaggacgacatcgacagaatggtgcaggaggccgagagatacaagagcgaggacgaggccaacagagacagagtggccgccaagaacgccctggagagctacacctacaacatcaagcagaccgtggaggacgagaagctgagaggcaagatcagcgagcaggacaagaacaagatcctggacaagtgccaggaggtgatcaactggctggacagaaaccagatggccgagaaggacgagtacgagcacaagcagaaggagctggagagagtgtgcaaccccatcatcagcaagctgtaccagggcggccccggcggcggcagcggcggcggcggcagcggcgccagcggcggccccaccatcgaggaggtggactag

SEQ ID NO: 84191 - DNA, 2523 bp, synthetic construct
  misc_feature 1..2523: note = Description of Artificial Sequence: Synthetic coding sequence
  source 1..2523: mol_type = other DNA
atgagcgtggtgggcatcgacctgggcttccagagctgctacgtggccgtggccagagccggcggcatcgagaccatcgccaacgagtacagcgacagatgcacccccgcctgcatcagcttcggccccaagaacagaagcatcggcgccgccgccaagagccaggtgatcagcaacgccaagaacaccgtgcagggcttcaagagattccacggcagagccttcagcgaccccttcgtggaggccgagaagagcaacctggcctacgacatcgtgcagctgcccaccggcctgaccggcatcaaggtgacctacatggaggaggagagaaacttcaccaccgagcaggtgaccgccatgctgctgagcaagctgaaggagaccgccgagagcgtgctgaagaagcccgtggtggactgcgtggtgagcgtgccctgcttctacaccgacgccgagagaagaagcgtgatggacgccacccagatcgccggcctgaactgcctgagactgatgaacgagaccaccgccgtggccctggcctacggcatctacaagcaggacctgcccgccctggaggagaagcccagaaacgtggtgttcgtggacatgggccacagcgcctaccaggtgagcgtgtgcgccttcaacagaggcaagctgaaggtgctggccaccgccttcgacaccaccctgggcggcagaaagttcgacgaggtgctggtgaaccacttctgcgaggagttcggcaagaagtacaagctggacatcaagagcaagatcagagccctgctgagactgagccaggagtgcgagaagctgaagaagctgatgagcgccaacgccagcgacctgcccctgagcatcgagtgcttcatgaacgacgtggacgtgagcggcaccatgaacagaggcaagttcctggagatgtgcaacgacctgctggccagagtggagccccccctgagaagcgtgctggagcagaccaagctgaagaaggaggacatctacgccgtggagatcgtgggcggcgccaccagaatccccgccgtgaaggagaagatcagcaagttcttcggcaaggagctgagcaccaccctgaacgccgacgaggccgtgaccagaggctgcgccctgcagtgcgccatcctgagccccgccttcaaggtgagagagttcagcatcaccgacgtggtgccctaccccatcagcctgagatggaacagccccgccgaggagggcagcagcgactgcgaggtgttcagcaagaaccacgccgcccccttcagcaaggtgctgaccttctacagaaaggagcccttcaccctggaggcctactacagcagcccccaggacctgccctaccccgaccccgccatcgcccagttcagcgtgcagaaggtgaccccccagagcgacggcagcagcagcaaggtgaaggtgaaggtgagagtgaacgtgcacggcatcttcagcgtgagcagcgccagcctggtggaggtgcacaagagcgaggagaacgaggagcccatggagaccgaccagaacgccaaggaggaggagaagatgcaggtggaccaggaggagccccacgtggaggagcagcagcagcagacccccgccgagaacaaggccgagagcgaggagatggagaccagccaggccggcagcaaggacaagaagatggaccagcccccccaggccaagaaggccaaggtgaagaccagcaccgtggacctgcccatcgagaaccagctgctgtggcagatcgacagagagatgctgaacctgtacatcgagaacgagggcaagatgatcatgcaggacaagctggagaaggagagaaacgacgccaagaacgccgtggaggagtacgtgtacgagatgagagacaagctgagcggcgagtacgagaagttcgtgagcgaggacgacagaaacagcttcaccctgaagctggaggacaccgagaactggctgtacgaggacggcgaggaccagcccaagcaggtgtacgtggacaagctggccgagctgaagaacctgggccagcccatcaagatcagattccaggagagcgaggagagacccaagctgttcgaggagctgggcaagcagatccagcagtacatgaagatcatcagcagcttcaagaacaaggaggaccagtacgaccacctggacgccgccgacatgaccaaggtggagaagagcaccaacgaggccatggagtggatgaacaacaagctgaacctgcagaacaagcagagcctgaccatggaccccgtggtgaagagcaaggagatcgaggccaagatcaaggagctgaccagcacctgcagccccatcatcagcaagcccaagcccaaggtggagccccccaaggaggagcagaagaacgccgagcagaacggccccgtggacggccagggcgacaaccccggcccccaggccgccgagcagggcaccgacaccgccgtgcccagcgacagcgacaagaagctgcccgagatggacatcgactag

SEQ ID NO: 84192 - DNA, 447 bp, synthetic construct
  misc_feature 1..447: note = Description of Artificial Sequence: Synthetic coding sequence
  source 1..447: mol_type = other DNA
atgagcgtggtgggcatcgacctgggcttccagagctgctacgtggccgtggccagagccggcggcatcgagaccatcgccaacgagtacagcgacagatgcacccccgcctgcatcagcttcggccccaagaacagaagcatcggcgccgccgccaagagccaggtgatcagcaacgccaagaacaccgtgcagggcttcaagagattccacggcagagccttcagcgaccccttcgtggaggccgagaagagcaacctggcctacgacatcgtgcagctgcccaccggcctgaccggcatcaaggtgacctacatggaggaggagcagaacggccccgtggacggccagggcgacaaccccggcccccaggccgccgagcagggcaccgacaccgccgtgcccagcgacagcgacaagaagctgcccgagatggacatcgactag

SEQ ID NO: 84193 - DNA, 1422 bp, synthetic construct
  misc_feature 1..1422: note = Description of Artificial Sequence: Synthetic coding sequence
  source 1..1422: mol_type = other DNA
atgagcgtggtgggcatcgacctgggcttccagagctgctacgtggccgtggccagagccggcggcatcgagaccatcgccaacgagtacagcgacagatgcacccccgcctgcatcagcttcggccccaagaacagaagcatcggcgccgccgccaagagccaggtgatcagcaacgccaagaacaccgtgcagggcttcaagagattccacggcagagccttcagcgaccccttcgtggaggccgagaagagcaacctggcctacgacatcgtgcagctgcccaccggcctgaccggcatcaaggtgacctacatggaggaggagagaaacttcaccaccgagcaggtgaccgccatgctgctgagcaagctgaaggagaccgccgagagcgtgctgaagaagcccgtggtggactgcgtggtgagcgtgccctgcttctacaccgacgccgagagaagaagcgtgatggacgccacccagatcgccggcctgaactgcctgagactgatgaacgagaccaccgccgtggccctggcctacggcatctacaagcaggacctgcccgccctggaggagaagcccagaaacgtggtgttcgtggacatgggccacagcgcctaccaggtgagcgtgtgcgccttcaacagaggcaagctgaaggtgctggccaccgccttcgacaccaccctgggcggcagaaagttcgacgaggtgctggtgaaccacttctgcgaggagttcggcaagaagtacaagctggacatcaagagcaagatcagagccctgctgagactgagccaggagtgcgagaagctgaagaagctgatgagcgccaacgccagcgacctgcccctgagcatcgagtgcttcatgaacgacgtggacgtgagcggcaccatgaacagaggcaagttcctggagatgtgcaacgacctgctggccagagtggagccccccctgagaagcgtgctggagcagaccaagctgaagaaggaggacatctacgccgtggagatcgtgggcggcgccaccagaatccccgccgtgaaggagaagatcagcaagttcttcggcaaggagctgagcaccaccctgaacgccgacgaggccgtgaccagaggctgcgccctgcagtgcgccatcctgagccccgccttcaaggtgagagagttcagcatcaccgacgtggtgccctaccccatcagcctgagatggaacagccccgccgaggagggcagcagcgactgcgaggtgttcagcaagaaccacgccgcccccttcagcaaggtgctgaccttctacagaaaggagcccttcaccctggaggcctactacagcagccccggcttcgccctgagcagaagctgctacagcatcatcaagagcctgctgagcctgatggcccccgtgcagaagtag

SEQ ID NO: 84194 - DNA, 1965 bp, synthetic construct
  misc_feature 1..1965: note = Description of Artificial Sequence: Synthetic coding sequence
  source 1..1965: mol_type = other DNA
atgaagctgagcctggtggccgccatgctgctgctgctgagcgccgccagagccgaggaggaggacaagaaggaggacgtgggcaccgtggtgggcatcgacctgggcaccacctacagctgcgtgggcgtgttcaagaacggcagagtggagatcatcgccaacgaccagggcaacagaatcacccccagctacgtggccttcacccccgagggcgagagactgatcggcgacgccgccaagaaccagctgaccagcaaccccgagaacaccgtgttcgacgccaagagactgatcggcagaacctggaacgaccccagcgtgcagcaggacatcaagttcctgcccttcaaggtggtggagaagaagaccaagccctacatccaggtggacatcggcggcggccagaccaagaccttcgcccccgaggagatcagcgccatggtgctgaccaagatgaaggagaccgccgaggcctacctgggcaagaaggtgacccacgccgtggtgaccgtgcccgcctacttcaacgacgcccagagacaggccaccaaggacgccggcaccatcgccggcctgaacgtgatgagaatcatcaacgagcccaccgccgccgccatcgcctacggcctggacaagagagagggcgagaagaacatcctggtgttcgacctgggcggcggcaccttcgacgtgagcctgctgaccatcgacaacggcgtgttcgaggtggtggccaccaacggcgacacccacctgggcggcgaggacttcgaccagagagtgatggagcacttcatcaagctgtacaagaagaagaccggcaaggacgtgagaaaggacaacagagccgtgcagaagctgagaagagaggtggagaaggccaagagagccctgagcagccagcaccaggccagaatcgagatcgagagcttctacgagggcgaggacttcagcgagaccctgaccagagccaagttcgaggagctgaacatggacctgttcagaagcaccatgaagcccgtgcagaaggtgctggaggacagcgacctgaagaagagcgacatcgacgagatcgtgctggtgggcggcagcaccagaatccccaagatccagcagctggtgaaggagttcttcaacggcaaggagcccagcagaggcatcaaccccgacgaggccgtggcctacggcgccgccgtgcaggccggcgtgctgagcggcgaccaggacaccggcgacctggtgctgctggacgtgtgccccctgaccctgggcatcgagaccgtgggcggcgtgatgaccaagctgatccccagaaacaccgtggtgcccaccaagaagagccagatcttcagcaccgccagcgacaaccagcccaccgtgaccatcaaggtgtacgagggcgagagacccctgaccaaggacaaccacctgctgggcaccttcgacctgaccggcatcccccccgcccccagaggcgtgccccagatcgaggtgaccttcgagatcgacgtgaacggcatcctgagagtgaccgccgaggacaagggcaccggcaacaagaacaagatcaccatcaccaacgaccagaacagactgacccccgaggagatcgagagaatggtgaacgacgccgagaagttcgccgaggaggacaagaagctgaaggagagaatcgacaccagaaacgagctggagagctacgcctacagcctgaagaaccagatcggcgacaaggagaagctgggcggcaagctgagcagcgaggacaaggagaccatggagaaggccgtggaggagaagatcgagtggctggagagccaccaggacgccgacatcgaggacttcaaggccaagaagaaggagctggaggagatcgtgcagcccatcatcagcaagctgtacggcagcgccggccccccccccaccggcgaggaggacaccgccgagaaggacgagctgtag

SEQ ID NO: 84195 - DNA, 837 bp, synthetic construct
  misc_feature 1..837: note = Description of Artificial Sequence: Synthetic coding sequence
  source 1..837: mol_type = other DNA
atgaagctgagcctggtggccgccatgctgctgctgctgagcgccgccagagccgaggaggaggacaagaaggaggacgtgggcaccgtggtgggcatcgacctgggcaccacctacagctgcgtgggcgtgttcaagaacggcagagtggagatcatcgccaacgaccagggcaacagaatcacccccagctacgtggccttcacccccgagggcgagagactgatcggcgacgccgccaagaaccagctgaccagcaaccccgagaacaccgtgttcgacgccaagagactgatcggcagaacctggaacgaccccagcgtgcagcaggacatcaagttcctgcccttcaaggtggtggagaagaagaccaagccctacatccaggtggacatcggcggcggccagaccaagaccttcgcccccgaggagatcagcgccatggtgctgaccaagatgaaggagaccgccgaggcctacctgggcaagaaggtgacccacgccgtggtgaccgtgcccgcctacttcaacgacgcccagagacaggccaccaaggacgccggcaccatcgccggcctgaacgtgatgagaatcatcaacgagcccaccgccgccgccatcgcctacggcctggacaagagagagggcgagaagaacatcctggtgttcgacctgggcggcggcaccttcgacgtgagcctgctgaccatcgacaacggcgtgttcgaggtggtggccaccaacggcgacacccacctgggcggcgaggacttcgaccagagagtgatggagcacttcatcaagctgtacaagaagaagaccttcctgagaccctag

SEQ ID NO: 84196 - DNA, 1932 bp, synthetic construct
  misc_feature 1..1932: note = Description of Artificial Sequence: Synthetic coding sequence
  source 1..1932: mol_type = other DNA
atgcaggcccccagagagctggccgtgggcatcgacctgggcaccacctacagctgcgtgggcgtgttccagcagggcagagtggagatcctggccaacgaccagggcaacagaaccacccccagctacgtggccttcaccgacaccgagagactggtgggcgacgccgccaagagccaggccgccctgaacccccacaacaccgtgttcgacgccaagagactgatcggcagaaagttcgccgacaccaccgtgcagagcgacatgaagcactggcccttcagagtggtgagcgagggcggcaagcccaaggtgagagtgtgctacagaggcgaggacaagaccttctaccccgaggagatcagcagcatggtgctgagcaagatgaaggagaccgccgaggcctacctgggccagcccgtgaagcacgccgtgatcaccgtgcccgcctacttcaacgacagccagagacaggccaccaaggacgccggcgccatcgccggcctgaacgtgctgagaatcatcaacgagcccaccgccgccgccatcgcctacggcctggacagaagaggcgccggcgagagaaacgtgctgatcttcgacctgggcggcggcaccttcgacgtgagcgtgctgagcatcgacgccggcgtgttcgaggtgaaggccaccgccggcgacacccacctgggcggcgaggacttcgacaacagactggtgaaccacttcatggaggagttcagaagaaagcacggcaaggacctgagcggcaacaagagagccctgagaagactgagaaccgcctgcgagagagccaagagaaccctgagcagcagcacccaggccaccctggagatcgacagcctgttcgagggcgtggacttctacaccagcatcaccagagccagattcgaggagctgtgcagcgacctgttcagaagcaccctggagcccgtggagaaggccctgagagacgccaagctggacaaggcccagatccacgacgtggtgctggtgggcggcagcaccagaatccccaaggtgcagaagctgctgcaggacttcttcaacggcaaggagctgaacaagagcatcaaccccgacgaggccgtggcctacggcgccgccgtgcaggccgccgtgctgatgggcgacaagtgcgagaaggtgcaggacctgctgctgctggacgtggcccccctgagcctgggcctggagaccgccggcggcgtgatgaccaccctgatccagagaaacgccaccatccccaccaagcagacccagaccttcaccacctacagcgacaaccagcccggcgtgttcatccaggtgtacgagggcgagagagccatgaccaaggacaacaacctgctgggcagattcgagctgagcggcatcccccccgcccccagaggcgtgccccagatcgaggtgaccttcgacatcgacgccaacggcatcctgagcgtgaccgccaccgacagaagcaccggcaaggccaacaagatcaccatcaccaacgacaagggcagactgagcaaggaggaggtggagagaatggtgcacgaggccgagcagtacaaggccgaggacgaggcccagagagacagagtggccgccaagaacagcctggaggcccacgtgttccacgtgaagggcagcctgcaggaggagagcctgagagacaagatccccgaggaggacagaagaaagatgcaggacaagtgcagagaggtgctggcctggctggagcacaaccagctggccgagaaggaggagtacgagcaccagaagagagagctggagcagatctgcagacccatcttcagcagactgtacggcggccccggcgtgcccggcggcagcagctgcggcacccaggccagacagggcgaccccagcaccggccccatcatcgaggaggtggactag

SEQ ID NO: 84197 - DNA, 1860 bp, synthetic construct
  misc_feature 1..1860: note = Description of Artificial Sequence: Synthetic coding sequence
  source 1..1860: mol_type = other DNA
atgcaggcccccagagagctggccgtgggcatcgacctgggcaccacctacagctgcgtggccttcaccgacaccgagagactggtgggcgacgccgccaagagccaggccgccctgaacccccacaacaccgtgttcgacgccaagagactgatcggcagaaagttcgccgacaccaccgtgcagagcgacatgaagcactggcccttcagagtggtgagcgagggcggcaagcccaaggtgagagtgtgctacagaggcgaggacaagaccttctaccccgaggagatcagcagcatggtgctgagcaagatgaaggagaccgccgaggcctacctgggccagcccgtgaagcacgccgtgatcaccgtgcccgcctacttcaacgacagccagagacaggccaccaaggacgccggcgccatcgccggcctgaacgtgctgagaatcatcaacgagcccaccgccgccgccatcgcctacggcctggacagaagaggcgccggcgagagaaacgtgctgatcttcgacctgggcggcggcaccttcgacgtgagcgtgctgagcatcgacgccggcgtgttcgaggtgaaggccaccgccggcgacacccacctgggcggcgaggacttcgacaacagactggtgaaccacttcatggaggagttcagaagaaagcacggcaaggacctgagcggcaacaagagagccctgagaagactgagaaccgcctgcgagagagccaagagaaccctgagcagcagcacccaggccaccctggagatcgacagcctgttcgagggcgtggacttctacaccagcatcaccagagccagattcgaggagctgtgcagcgacctgttcagaagcaccctggagcccgtggagaaggccctgagagacgccaagctggacaaggcccagatccacgacgtggtgctggtgggcggcagcaccagaatccccaaggtgcagaagctgctgcaggacttcttcaacggcaaggagctgaacaagagcatcaaccccgacgaggccgtggcctacggcgccgccgtgcaggccgccgtgctgatgggcgacaagtgcgagaaggtgcaggacctgctgctgctggacgtggcccccctgagcctgggcctggagaccgccggcggcgtgatgaccaccctgatccagagaaacgccaccatccccaccaagcagacccagaccttcaccacctacagcgacaaccagcccggcgtgttcatccaggtgtacgagggcgagagagccatgaccaaggacaacaacctgctgggcagattcgagctgagcggcatcccccccgcccccagaggcgtgccccagatcgaggtgaccttcgacatcgacgccaacggcatcctgagcgtgaccgccaccgacagaagcaccggcaaggccaacaagatcaccatcaccaacgacaagggcagactgagcaaggaggaggtggagagaatggtgcacgaggccgagcagtacaaggccgaggacgaggcccagagagacagagtggccgccaagaacagcctggaggcccacgtgttccacgtgaagggcagcctgcaggaggagagcctgagagacaagatccccgaggaggacagaagaaagatgcaggacaagtgcagagaggtgctggcctggctggagcacaaccagctggccgagaaggaggagtacgagcaccagaagagagagctggagcagatctgcagacccatcttcagcagactgtacggcggccccggcgtgcccggcggcagcagctgcggcacccaggccagacagggcgaccccagcaccggccccatcatcgaggaggtggactag

SEQ ID NO: 84198 - DNA, 2337 bp, synthetic construct
  misc_feature 1..2337: note = Description of Artificial Sequence: Synthetic coding sequence
  source 1..2337: mol_type = other DNA
atgagcaagagaaagctgatccccaagctgagcatccagagccccgtgctgcacaccaacctgaacgtgcagagcacccacccccccctgaagaaggaggacctgcacagaatcagcaaggacagcctggagagcgacagcgagagcctgacccaggagatcatgtgccacagcgagttcgacgacagaatcagaggcaacggcatggagcccgacagcctggacgaggaggagagccccagatggggcagcctgcacgagatggaggaggaggccagcggcaaggccgcccagatggccagagagcagaaccaccacacctgggaccagggcgccaacaacagacagcagcccatcgaggacaagtacagcgacctgagatacgaccccaactggaagagcaagaaggaggagggccagctgctgagcgtggaggccctgcccgagagcaccgacagcagcctggagaacctgcccctggcccccctgtaccccagccaggagaccagcatggagctgagcggcggcaagggcgagcagaaggagagcccccagagcgccgccagcctgctgggcagcgagttcctgagccccaactacgagcacggcgccagaagaagcaagcccttcagcgagctgagcgacagcgacctggaggagaagagcagcagcctgagcccctacgtgaagagcagcagcagccacaacgaggtgttcctgcccggcagcagaggccccagaagaagaaagagcaagcagcacttcgtggagaagaacaagctgaccctgggcctgcccacccccaagaccgacagctacctgcagctgcacaacaagaagagaggcgagagccaccccgagcagatcagctaccccgtgagagtgaccgacaagaccagcatccagaacgccaaggagatggagaacgccgccatcgaccccgaggacaagtggcaccagagagcccagcagctgaagaactaccaggagcactggagccagtacgagagcaccaagagcagcaacgtgcccagaggccagcccagcgacatggtgaacgaccaccagcccagcagaagacccgccaagctgaagatcagaaagcagtgcaagcaccagaacggcctgaagagcagcaccaccgaggaggtgaccgccagccagggcaaccagaacaacccccccagacagcagcagaaccagaacaagcccctggacaccagcaccaagcccgagagcatcgtgatcatgcacgccagcaacaacgacgtgcaggccagcagagccctgagaagccacaacctgaaggagaccagcaacaccttcgccccccccaagcaggccttcgacaaggtgctgagcaagaacagcaccggctgcgacagcggcctgaacgtgaacaaggagagaggccacaaggaccaggaggagaagagattcagctaccagcagctgcacaccctgagcgacatggacctgaacaacctgaacgagctgagcaagagacacgtgctgctgagccagaagggcagccagttcgtgtaccacatcaacacccacggcagcaccaagaacaagaagcagctgaagcagccctacaccgagaccaagtacagaaacctggagatgctgtggaagttccacagcagcagcgacagccagaccgtgagagccagccccgacagctggctgacccagatcatggagcagcaccagcaggccctggtgcagctgaccgacgtgcagcccagcgagggcgccctgagcagcgtgaccctgccccccatcctgagcagagtggagagcgagagccagctgagcagcgagagaagccagagaaaccaggtgaagatcagcagaagcaacagcgagggctacctgttccagctggagaagggcaagaagcacaagaagagaagcagcagcaagaacaccaagctgaagggctaccagaagagagacgtgaagctgggcggcctgggccccgacttcgagagcatcagagacaagacccagaagctgatccagcagaaggagtacgccaagcaggtgaaggagtacaacatgaagaccctgagcatcctgagcaagccccagaccgagaagacccagaagaagagcgccatccccagacagaaggccctggagtacgccaagaccatccccaagcccaagcccagcaacctgacccaccaggccagcaaggagcagaagaaccccacctacgccggcaaggaggagagcctgcccgagatcagcctgctggagatcctgcagaacagacacgagagagagaagcaggccgtggccgccttcaaggtgctgcacatcgtgtag

SEQ ID NO: 84199 - DNA, 1482 bp, synthetic construct
  misc_feature 1..1482: note = Description of Artificial Sequence: Synthetic coding sequence
  source 1..1482: mol_type = other DNA
atgagcaagggccccgccgtgggcatcgacctgggcaccacctacagctgcgtgggcgtgttccagcacggcaaggtggagatcatcgccaacgaccagggcaacagaaccacccccagctacgtggccttcaccgacaccgagagactgatcggcgacgccgccaagaaccaggtggccatgaaccccaccaacaccgtgttcgacgccaagagactgatcggcagaagattcgacgacgccgtggtgcagagcgacatgaagcactggcccttcatggtggtgaacgacgccggcagacccaaggtgcaggtggagtacaagggcgagaccaagagcttctaccccgaggaggtgagcagcatggtgctgaccaagatgaaggagatcgccgaggcctacctgggcaagaccgtgaccaacgccgtggtgaccgtgcccgcctacttcaacgacagccagagacaggccaccaaggacgccggcaccatcgccggcctgaacgtgctgagaatcatcaacgagcccaccgccgccgccatcgcctacggcctggacaagaaggtgggcgccgagagaaacgtgctgatcttcgacctgggcggcggcaccttcgacgtgagcatcctgaccatcgaggacggcatcttcgaggtgaagagcaccgccggcgacacccacctgggcggcgaggacttcgacaacagaatggtgaaccacttcatcgccgagttcaagagaaagcacaagaaggacatcagcgagaacaagagagccgtgagaagactgagaaccgcctgcgagagagccaagagaaccctgagcagcagcacccaggccagcatcgagatcgacagcctgtacgagggcatcgacttctacaccagcatcaccagagccagattcgaggagctgaacgccgacctgttcagaggcaccctggaccccgtggagaaggccctgagagacgccaagctggacaagagccagatccacgacatcgtgctggtgggcggcagcaccagaatccccaagatccagaagctgctgcaggacttcttcaacggcaaggagctgaacaagagcatcaaccccgacgaggccgtggcctacggcgccgccgtgcaggccgccatcctgagcggcgacaagagcgagaacgtgcaggacctgctgctgctggacgtgacccccctgagcctgggcatcgagaccgccggcggcgtgatgaccgtgctgatcaagagaaacaccaccatccccaccaagcagacccagaccttcaccacctacagcgacaaccagcccggcgtgctgatccaggtgtacgagggcgagagagccatgaccaaggacaacaacctgctgggcaagttcgagctgaccggcatgcccggcggcatgcccggcggcttccccggcggcggcgccccccccagcggcggcgccagcagcggccccaccatcgaggaggtggactag

SEQ ID NO: 84200 - DNA, 1884 bp, synthetic construct
  misc_feature 1..1884: note = Description of Artificial Sequence: Synthetic coding sequence
  source 1..1884: mol_type = other DNA
atgagcaagggccccgccgtgggcatcgacctgggcaccacctacagctgcgtgggcgtgttccagcacggcaaggtggagatcatcgccaacgaccagggcaacagaaccacccccagctacgtggccttcaccgacaccgagagactgatcggcgacgccgccaagaaccaggtggccatgaaccccaccaacaccgtgttcgacgccaagagactgatcggcagaagattcgacgacgccgtggtgcagagcgacatgaagcactggcccttcatggtggtgaacgacgccggcagacccaaggtgcaggtggagtacaagggcgagaccaagagcttctaccccgaggaggtgagcagcatggtgctgaccaagatgaaggagatcgccgaggcctacctgggcaaggccaccaaggacgccggcaccatcgccggcctgaacgtgctgagaatcatcaacgagcccaccgccgccgccatcgcctacggcctggacaagaaggtgggcgccgagagaaacgtgctgatcttcgacctgggcggcggcaccttcgacgtgagcatcctgaccatcgaggacggcatcttcgaggtgaagagcaccgccggcgacacccacctgggcggcgaggacttcgacaacagaatggtgaaccacttcatcgccgagttcaagagaaagcacaagaaggacatcagcgagaacaagagagccgtgagaagactgagaaccgcctgcgagagagccaagagaaccctgagcagcagcacccaggccagcatcgagatcgacagcctgtacgagggcatcgacttctacaccagcatcaccagagccagattcgaggagctgaacgccgacctgttcagaggcaccctggaccccgtggagaaggccctgagagacgccaagctggacaagagccagatccacgacatcgtgctggtgggcggcagcaccagaatccccaagatccagaagctgctgcaggacttcttcaacggcaaggagctgaacaagagcatcaaccccgacgaggccgtggcctacggcgccgccgtgcaggccgccatcctgagcggcgacaagagcgagaacgtgcaggacctgctgctgctggacgtgacccccctgagcctgggcatcgagaccgccggcggcgtgatgaccgtgctgatcaagagaaacaccaccatccccaccaagcagacccagaccttcaccacctacagcgacaaccagcccggcgtgctgatccaggtgtacgagggcgagagagccatgaccaaggacaacaacctgctgggcaagttcgagctgaccggcatcccccccgcccccagaggcgtgccccagatcgaggtgaccttcgacatcgacgccaacggcatcctgaacgtgagcgccgtggacaagagcaccggcaaggagaacaagatcaccatcaccaacgacaagggcagactgagcaaggaggacatcgagagaatggtgcaggaggccgagaagtacaaggccgaggacgagaagcagagagacaaggtgagcagcaagaacagcctggagagctacgccttcaacatgaaggccaccgtggaggacgagaagctgcagggcaagatcaacgacgaggacaagcagaagatcctggacaagtgcaacgagatcatcaactggctggacaagaaccagaccgccgagaaggaggagttcgagcaccagcagaaggagctggagaaggtgtgcaaccccatcatcaccaagctgtaccagagcgccggcggcatgcccggcggcatgcccggcggcttccccggcggcggcgccccccccagcggcggcgccagcagcggccccaccatcgaggaggtggactag

SEQ ID NO: 84201 - DNA, 1941 bp, synthetic construct
  misc_feature 1..1941: note = Description of Artificial Sequence: Synthetic coding sequence
  source 1..1941: mol_type = other DNA
atgagcaagggccccgccgtgggcatcgacctgggcaccacctacagctgcgtgggcgtgttccagcacggcaaggtggagatcatcgccaacgaccagggcaacagaaccacccccagctacgtggccttcaccgacaccgagagactgatcggcgacgccgccaagaaccaggtggccatgaaccccaccaacaccgtgttcgacgccaagagactgatcggcagaagattcgacgacgccgtggtgcagagcgacatgaagcactggcccttcatggtggtgaacgacgccggcagacccaaggtgcaggtggagtacaagggcgagaccaagagcttctaccccgaggaggtgagcagcatggtgctgaccaagatgaaggagatcgccgaggcctacctgggcaagaccgtgaccaacgccgtggtgaccgtgcccgcctacttcaacgacagccagagacaggccaccaaggacgccggcaccatcgccggcctgaacgtgctgagaatcatcaacgagcccaccgccgccgccatcgcctacggcctggacaagaaggtgggcgccgagagaaacgtgctgatcttcgacctgggcggcggcaccttcgacgtgagcatcctgaccatcgaggacggcatcttcgaggtgaagagcaccgccggcgacacccacctgggcggcgaggacttcgacaacagaatggtgaaccacttcatcgccgagttcaagagaaagcacaagaaggacatcagcgagaacaagagagccgtgagaagactgagaaccgcctgcgagagagccaagagaaccctgagcagcagcacccaggccagcatcgagatcgacagcctgtacgagggcatcgacttctacaccagcatcaccagagccagattcgaggagctgaacgccgacctgttcagaggcaccctggaccccgtggagaaggccctgagagacgccaagctggacaagagccagatccacgacatcgtgctggtgggcggcagcaccagaatccccaagatccagaagctgctgcaggacttcttcaacggcaaggagctgaacaagagcatcaaccccgacgaggccgtggcctacggcgccgccgtgcaggccgccatcctgagcggcgacaagagcgagaacgtgcaggacctgctgctgctggacgtgacccccctgagcctgggcatcgagaccgccggcggcgtgatgaccgtgctgatcaagagaaacaccaccatccccaccaagcagacccagaccttcaccacctacagcgacaaccagcccggcgtgctgatccaggtgtacgagggcgagagagccatgaccaaggacaacaacctgctgggcaagttcgagctgaccggcatcccccccgcccccagaggcgtgccccagatcgaggtgaccttcgacatcgacgccaacggcatcctgaacgtgagcgccgtggacaagagcaccggcaaggagaacaagatcaccatcaccaacgacaagggcagactgagcaaggaggacatcgagagaatggtgcaggaggccgagaagtacaaggccgaggacgagaagcagagagacaaggtgagcagcaagaacagcctggagagctacgccttcaacatgaaggccaccgtggaggacgagaagctgcagggcaagatcaacgacgaggacaagcagaagatcctggacaagtgcaacgagatcatcaactggctggacaagaaccagaccgccgagaaggaggagttcgagcaccagcagaaggagctggagaaggtgtgcaaccccatcatcaccaagctgtaccagagcgccggcggcatgcccggcggcatgcccggcggcttccccggcggcggcgccccccccagcggcggcgccagcagcggccccaccatcgaggaggtggactag

SEQ ID NO: 84202 - DNA, 1503 bp, synthetic construct
  misc_feature 1..1503: note = Description of Artificial Sequence: Synthetic coding sequence
  source 1..1503: mol_type = other DNA
atgagcaagggccccgccgtgggcatcgacctgggcaccacctacagctgcgtgggcgtgttccagcacggcaaggtggagatcatcgccaacgaccagggcaacagaaccacccccagctacgtggccttcaccgacaccgagagactgatcggcgacgccgccaagaaccaggtggccatgaaccccaccaacaccgtgttcgacgccaagagactgatcggcagaagattcgacgacgccgtggtgcagagcgacatgaagcactggcccttcatggtggtgaacgacgccggcagacccaagcacaagaaggacatcagcgagaacaagagagccgtgagaagactgagaaccgcctgcgagagagccaagagaaccctgagcagcagcacccaggccagcatcgagatcgacagcctgtacgagggcatcgacttctacaccagcatcaccagagccagattcgaggagctgaacgccgacctgttcagaggcaccctggaccccgtggagaaggccctgagagacgccaagctggacaagagccagatccacgacatcgtgctggtgggcggcagcaccagaatccccaagatccagaagctgctgcaggacttcttcaacggcaaggagctgaacaagagcatcaaccccgacgaggccgtggcctacggcgccgccgtgcaggccgccatcctgagcggcgacaagagcgagaacgtgcaggacctgctgctgctggacgtgacccccctgagcctgggcatcgagaccgccggcggcgtgatgaccgtgctgatcaagagaaacaccaccatccccaccaagcagacccagaccttcaccacctacagcgacaaccagcccggcgtgctgatccaggtgtacgagggcgagagagccatgaccaaggacaacaacctgctgggcaagttcgagctgaccggcatcccccccgcccccagaggcgtgccccagatcgaggtgaccttcgacatcgacgccaacggcatcctgaacgtgagcgccgtggacaagagcaccggcaaggagaacaagatcaccatcaccaacgacaagggcagactgagcaaggaggacatcgagagaatggtgcaggaggccgagaagtacaaggccgaggacgagaagcagagagacaaggtgagcagcaagaacagcctggagagctacgccttcaacatgaaggccaccgtggaggacgagaagctgcagggcaagatcaacgacgaggacaagcagaagatcctggacaagtgcaacgagatcatcaactggctggacaagaaccagaccgccgagaaggaggagttcgagcaccagcagaaggagctggagaaggtgtgcaaccccatcatcaccaagctgtaccagagcgccggcggcatgcccggcggcatgcccggcggcttccccggcggcggcgccccccccagcggcggcgccagcagcggccccaccatcgaggaggtggactag

SEQ ID NO: 84203 - DNA, 1233 bp, synthetic construct
  misc_feature 1..1233: note = Description of Artificial Sequence: Synthetic coding sequence
  source 1..1233: mol_type = other DNA
atggtgaaccacttcatcgccgagttcaagagaaagcacaagaaggacatcagcgagaacaagagagccgtgagaagactgagaaccgcctgcgagagagccaagagaaccctgagcagcagcacccaggccagcatcgagatcgacagcctgtacgagggcatcgacttctacaccagcatcaccagagccagattcgaggagctgaacgccgacctgttcagaggcaccctggaccccgtggagaaggccctgagagacgccaagctggacaagagccagatccacgacatcgtgctggtgggcggcagcaccagaatccccaagatccagaagctgctgcaggacttcttcaacggcaaggagctgaacaagagcatcaaccccgacgaggccgtggcctacggcgccgccgtgcaggccgccatcctgagcggcgacaagagcgagaacgtgcaggacctgctgctgctggacgtgacccccctgagcctgggcatcgagaccgccggcggcgtgatgaccgtgctgatcaagagaaacaccaccatccccaccaagcagacccagaccttcaccacctacagcgacaaccagcccggcgtgctgatccaggtgtacgagggcgagagagccatgaccaaggacaacaacctgctgggcaagttcgagctgaccggcatcccccccgcccccagaggcgtgccccagatcgaggtgaccttcgacatcgacgccaacggcatcctgaacgtgagcgccgtggacaagagcaccggcaaggagaacaagatcaccatcaccaacgacaagggcagactgagcaaggaggacatcgagagaatggtgcaggaggccgagaagtacaaggccgaggacgagaagcagagagacaaggtgagcagcaagaacagcctggagagctacgccttcaacatgaaggccaccgtggaggacgagaagctgcagggcaagatcaacgacgaggacaagcagaagatcctggacaagtgcaacgagatcatcaactggctggacaagaaccagaccgccgagaaggaggagttcgagcaccagcagaaggagctggagaaggtgtgcaaccccatcatcaccaagctgtaccagagcgccggcggcatgcccggcggcatgcccggcggcttccccggcggcggcgccccccccagcggcggcgccagcagcggccccaccatcgaggaggtggactag

SEQ ID NO: 84204 - DNA, 1941 bp, synthetic construct; identical to SEQ ID NO: 84201
  misc_feature 1..1941: note = Description of Artificial Sequence: Synthetic coding sequence
  source 1..1941: mol_type = other DNA

SEQ ID NO: 84205 - DNA, 2040 bp, synthetic construct
  misc_feature 1..2040: note = Description of Artificial Sequence: Synthetic coding sequence
  source 1..2040: mol_type = other DNA
atgatcagcgccagcagagccgccgccgccagactggtgggcgccgccgccagcagaggccccaccgccgccagacaccaggacagctggaacggcctgagccacgaggccttcagactggtgagcagaagagactacgccagcgaggccatcaagggcgccgtggtgggcatcgacctgggcaccaccaacagctgcgtggccgtgatggagggcaagcaggccaaggtgctggagaacgccgagggcgccagaaccacccccagcgtggtggccttcaccgccgacggcgagagactggtgggcatgcccgccaagagacaggccgtgaccaaccccaacaacaccttctacgccaccaagagactgatcggcagaagatacgacgaccccgaggtgcagaaggacatcaagaacgtgcccttcaagatcgtgagagccagcaacggcgacgcctgggtggaggcccacggcaagctgtacagccccagccagatcggcgccttcgtgctgatgaagatgaaggagaccgccgagaactacctgggccacaccgccaagaacgccgtgatcaccgtgcccgcctacttcaacgacagccagagacaggccaccaaggacgccggccagatcagcggcctgaacgtgctgagagtgatcaacgagcccaccgccgccgccctggcctacggcctggacaagagcgaggacaaggtgatcgccgtgtacgacctgggcggcggcaccttcgacatcagcatcctggagatccagaagggcgtgttcgaggtgaagagcaccaacggcgacaccttcctgggcggcgaggacttcgaccaggccctgctgagacacatcgtgaaggagttcaagagagagaccggcgtggacctgaccaaggacaacatggccctgcagagagtgagagaggccgccgagaaggccaagtgcgagctgagcagcagcgtgcagaccgacatcaacctgccctacctgaccatggacagcagcggccccaagcacctgaacatgaagctgaccagagcccagttcgagggcatcgtgaccgacctgatcagaagaaccatcgccccctgccagaaggccatgcaggacgccgaggtgagcaagagcgacatcggcgaggtgatcctggtgggcggcatgaccagaatgcccaaggtgcagcagaccgtgcaggacctgttcggcagagcccccagcaaggccgtgaaccccgacgaggccgtggccatcggcgccgccatccagggcggcgtgctggccggcgacgtgaccgacgtgctgctgctggacgtgacccccctgagcctgggcatcgagaccctgggcggcgtgttcaccaagctgatcaacagaaacaccaccatccccaccaagaagagccaggtgttcagcaccgccgccgacggccagacccaggtggagatcaaggtgtgccagggcgagagagagatggccggcgacaacaagctgctgggccagttcaccctgatcggcatcccccccgcccccagaggcgtgccccagatcgaggtgaccttcgacatcgacgccaacggcatcgtgcacgtgagcgccaaggacaagggcaccggcagagagcagcagatcgtgatccagagcagcggcggcctgagcaaggacgacatcgagaacatggtgaagaacgccgagaagtacgccgaggaggacagaagaaagaaggagagagtggaggccgtgaacatggccgagggcatcatccacgacaccgagaccaagatggaggagttcaaggaccagctgcccgccgacgagtgcaacaagctgaaggaggagatcagcaagatgagagagctgctggccagaaaggacagcgagaccggcgagaacatcagacaggccgccagcagcctgcagcaggccagcctgaagctgttcgagatggcctacaagaagatggccagcgagagagagggcagcggcagcagcggcaccggcgagcagaaggaggaccagaaggaggagaagcagtag

SEQ ID NO: 84206 - DNA, 1998 bp, synthetic construct
  misc_feature 1..1998: note = Description of Artificial Sequence: Synthetic coding sequence
  source 1..1998: mol_type = other DNA
atgatcagcgccagcagagccgccgccgccagacaccaggacagctggaacggcctgagccacgaggccttcagactggtgagcagaagagactacgccagcgaggccatcaagggcgccgtggtgggcatcgacctgggcaccaccaacagctgcgtggccgtgatggagggcaagcaggccaaggtgctggagaacgccgagggcgccagaaccacccccagcgtggtggccttcaccgccgacggcgagagactggtgggcatgcccgccaagagacaggccgtgaccaaccccaacaacaccttctacgccaccaagagactgatcggcagaagatacgacgaccccgaggtgcagaaggacatcaagaacgtgcccttcaagatcgtgagagccagcaacggcgacgcctgggtggaggcccacggcaagctgtacagccccagccagatcggcgccttcgtgctgatgaagatgaaggagaccgccgagaactacctgggccacaccgccaagaacgccgtgatcaccgtgcccgcctacttcaacgacagccagagacaggccaccaaggacgccggccagatcagcggcctgaacgtgctgagagtgatcaacgagcccaccgccgccgccctggcctacggcctggacaagagcgaggacaaggtgatcgccgtgtacgacctgggcggcggcaccttcgacatcagcatcctggagatccagaagggcgtgttcgaggtgaagagcaccaacggcgacaccttcctgggcggcgaggacttcgaccaggccctgctgagacacatcgtgaaggagttcaagagagagaccggcgtggacctgaccaaggacaacatggccctgcagagagtgagagaggccgccgagaaggccaagtgcgagctgagcagcagcgtgcagaccgacatcaacctgccctacctgaccatggacagcagcggccccaagcacctgaacatgaagctgaccagagcccagttcgagggcatcgtgaccgacctgatcagaagaaccatcgccccctgccagaaggccatgcaggacgccgaggtgagcaagagcgacatcggcgaggtgatcctggtgggcggcatgaccagaatgcccaaggtgcagcagaccgtgcaggacctgttcggcagagcccccagcaaggccgtgaaccccgacgaggccgtggccatcggcgccgccatccagggcggcgtgctggccggcgacgtgaccgacgtgctgctgctggacgtgacccccctgagcctgggcatcgagaccctgggcggcgtgttcaccaagctgatcaacagaaacaccaccatccccaccaagaagagccaggtgttcagcaccgccgccgacggccagacccaggtggagatcaaggtgtgccagggcgagagagagatggccggcgacaacaagctgctgggccagttcaccctgatcggcatcccccccgcccccagaggcgtgccccagatcgaggtgaccttcgacatcgacgccaacggcatcgtgcacgtgagcgccaaggacaagggcaccggcagagagcagcagatcgtgatccagagcagcggcggcctgagcaaggacgacatcgagaacatggtgaagaacgccgagaagtacgccgaggaggacagaagaaagaaggagagagtggaggccgtgaacatggccgagggcatcatccacgacaccgagaccaagatggaggagttcaaggaccagctgcccgccgacgagtgcaacaagctgaaggaggagatcagcaagatgagagagctgctggccagaaaggacagcgagaccggcgagaacatcagacaggccgccagcagcctgcagcaggccagcctgaagctgttcgagatggcctacaagaagatggccagcgagagagagggcagcggcagcagcggcaccggcgagcagaaggaggaccagaaggaggagaagcagtag

SEQ ID NO: 84207 - DNA, 1899 bp, synthetic construct
  misc_feature 1..1899: note = Description of Artificial Sequence: Synthetic coding sequence
  source 1..1899: mol_type = other DNA
atggccctggtgatgagactgctggacctgttccagggcggcatcatgcaccagaagcagagcagagagcagctgctggtgctgatctgggtgctgcccacccccgcctggcagctgtggaaggtgaacaagcagagatgctggagaatgcccaaggtgcccgagccccccctgcagctgtggcccctgcagcagatggtgagcgacctgctggagtgcagacccagcgacagactgagccccacccagaccatccacttcatgctgcccagcgtgagcctggccggcgacatgatgatcctgaagtacagaaagaccctgaagatgttccccctgaagctgagcgtgccccccatggtgatgcccgtgctgatgaagatgaaggagaccgccgagaactacctgggccacaccgccaagaacgccgtgatcaccgtgcccgcctacttcaacgacagccagagacaggccaccaaggacgccggccagatcagcggcctgaacgtgctgagagtgatcaacgagcccaccgccgccgccctggcctacggcctggacaagagcgaggacaaggtgatcgccgtgtacgacctgggcggcggcaccttcgacatcagcatcctggagatccagaagggcgtgttcgaggtgaagagcaccaacggcgacaccttcctgggcggcgaggacttcgaccaggccctgctgagacacatcgtgaaggagttcaagagagagaccggcgtggacctgaccaaggacaacatggccctgcagagagtgagagaggccgccgagaaggccaagtgcgagctgagcagcagcgtgcagaccgacatcaacctgccctacctgaccatggacagcagcggccccaagcacctgaacatgaagctgaccagagcccagttcgagggcatcgtgaccgacctgatcagaagaaccatcgccccctgccagaaggccatgcaggacgccgaggtgagcaagagcgacatcggcgaggtgatcctggtgggcggcatgaccagaatgcccaaggtgcagcagaccgtgcaggacctgttcggcagagcccccagcaaggccgtgaaccccgacgaggccgtggccatcggcgccgccatccagggcggcgtgctggccggcgacgtgaccgacgtgctgctgctggacgtgacccccctgagcctgggcatcgagaccctgggcggcgtgttcaccaagctgatcaacagaaacaccaccatccccaccaagaagagccaggtgttcagcaccgccgccgacggccagacccaggtggagatcaaggtgtgccagggcgagagagagatggccggcgacaacaagctgctgggccagttcaccctgatcggcatcccccccgcccccagaggcgtgccccagatcgaggtgaccttcgacatcgacgccaacggcatcgtgcacgtgagcgccaaggacaagggcaccggcagagagcagcagatcgtgatccagagcagcggcggcctgagcaaggacgacatcgagaacatggtgaagaacgccgagaagtacgccgaggaggacagaagaaagaaggagagagtggaggccgtgaacatggccgagggcatcatccacgacaccgagaccaagatggaggagttcaaggaccagctgcccgccgacgagtgcaacaagctgaaggaggagatcagcaagatgagagagctgctggccagaaaggacagcgagaccggcgagaacatcagacaggccgccagcagcctgcagcaggccagcctgaagctgttcgagatggcctacaagaagatggccagcgagagagagggcagcggcagcagcggcaccggcgagcagaaggaggaccagaaggaggagaagcagtag

SEQ ID NO: 84208 - DNA, 2175 bp, synthetic construct
  misc_feature 1..2175: note = Description of Artificial Sequence: Synthetic coding sequence
  source 1..2175: mol_type = other DNA
atgcccgaggaggtgcaccacggcgaggaggaggtggagaccttcgccttccaggccgagatcgcccagctgatgagcctgatcatcaacaccttctacagcaacaaggagatcttcctgagagagctgatcagcaacgccagcgacgccctggacaagatcagatacgagagcctgaccgaccccagcaagctggacagcggcaaggagctgaagatcgacatcatccccaacccccaggagagaaccctgaccctggtggacaccggcatcggcatgaccaaggccgacctgatcaacaacctgggcaccatcgccaagagcggcaccaaggccttcatggaggccctgcaggccggcgccgacatcagcatgatcggccagttcggcgtgggcttctacagcgcctacctggtggccgagaaggtggtggtgatcaccaagcacaacgacgacgagcagtacgcctgggagagcagcgccggcggcagcttcaccgtgagagccgaccacggcgagcccatcggcagaggcaccaaggtgatcctgcacctgaaggaggaccagaccgagtacctggaggagagaagagtgaaggaggtggtgaagaagcacagccagttcatcggctaccccatcaccctgtacctggagaaggagagagagaaggagatcagcgacgacgaggccgaggaggagaagggcgagaaggaggaggaggacaaggacgacgaggagaagcccaagatcgaggacgtgggcagcgacgaggaggacgacagcggcaaggacaagaagaagaagaccaagaagatcaaggagaagtacatcgaccaggaggagctgaacaagaccaagcccatctggaccagaaaccccgacgacatcacccaggaggagtacggcgagttctacaagagcctgaccaacgactgggaggaccacctggccgtgaagcacttcagcgtggagggccagctggagttcagagccctgctgttcatccccagaagagcccccttcgacctgttcgagaacaagaagaagaagaacaacatcaagctgtacgtgagaagagtgttcatcatggacagctgcgacgagctgatccccgagtacctgaacttcatcagaggcgtggtggacagcgaggacctgcccctgaacatcagcagagagatgctgcagcagagcaagatcctgaaggtgatcagaaagaacatcgtgaagaagtgcctggagctgttcagcgagctggccgaggacaaggagaactacaagaagttctacgaggccttcagcaagaacctgaagctgggcatccacgaggacagcaccaacagaagaagactgagcgagctgctgagataccacaccagccagagcggcgacgagatgaccagcctgagcgagtacgtgagcagaatgaaggagacccagaagagcatctactacatcaccggcgagagcaaggagcaggtggccaacagcgccttcgtggagagagtgagaaagagaggcttcgaggtggtgtacatgaccgagcccatcgacgagtactgcgtgcagcagctgaaggagttcgacggcaagagcctggtgagcgtgaccaaggagggcctggagctgcccgaggacgaggaggagaagaagaagatggaggagagcaaggccaagttcgagaacctgtgcaagctgatgaaggagatcctggacaagaaggtggagaaggtgaccatcagcaacagactggtgagcagcccctgctgcatcgtgaccagcacctacggctggaccgccaacatggagagaatcatgaaggcccaggccctgagagacaacagcaccatgggctacatgatggccaagaagcacctggagatcaaccccgaccaccccatcgtggagaccctgagacagaaggccgaggccgacaagaacgacaaggccgtgaaggacctggtggtgctgctgttcgagaccgccctgctgagcagcggcttcagcctggaggacccccagacccacagcaacagaatctacagaatgatcaagctgggcctgggcatcgacgaggacgaggtggccgccgaggagcccaacgccgccgtgcccgacgagatcccccccctggagggcgacgaggacgccagcagaatggaggaggtggactag

SEQ ID NO: 84209 - DNA, 2175 bp, synthetic construct; identical to SEQ ID NO: 84208
  misc_feature 1..2175: note = Description of Artificial Sequence: Synthetic coding sequence
  source 1..2175: mol_type = other DNA

SEQ ID NO: 84210 - DNA, 465 bp, synthetic construct
  misc_feature 1..465: note = Description of Artificial Sequence: Synthetic coding sequence
  source 1..465: mol_type = other DNA
atggacagctgcgacgagctgatccccgagtacctgaacttcatcagaggcgtggtggacagcgaggacctgcccctgaacatcagcagagagatgctgcagcagagcaagatcctgaaggtgatcagaaagaacatcgtgaagaagtgcctggagctgttcagcgagctggccgaggacaaggagaactacaagaagttctacgaggccttcagcaagaacctgaagctgggcatccacgaggacagcaccaacagaagaagactgagcgagctgctgagataccacaccagccagagcggcgacgagatgaccagcctgagcgagtacgtgagcagaatgaaggagacccagaagagcatctactacatcaccggcgagagcaaggagcaggtgtgcccctgccccacctggctgcccctgctggtgagcagcgtgttcttccccctgctgagcctgtgctag

SEQ ID NO: 84211 - DNA, 489 bp, synthetic construct
  misc_feature 1..489: note = Description of Artificial Sequence: Synthetic coding sequence
  source 1..489: mol_type = other DNA
atggacagctgcgacgagctgatccccgagtacctgaacttcatcagaggcgtggtggacagcgaggacctgcccctgaacatcagcagagagatgctgcagcagagcaagatcctgaaggtgatcagaaagaacatcgtgaagaagtgcctggagctgttcagcgagctggccgaggacaaggagaactacaagaagttctacgaggccttcagcaagaacctgaagctgggcatccacgaggacagcaccaacagaagaagactgagcgagctgctgagataccacaccagccagagcggcgacgagatgaccagcctgagcgagtacgtgagcagaatgaaggagacccagaagagcatctactacatcaccggcgagagcaaggagcaggtggccaacagcgccttcgtggagagatgcccctgccccacctggctgcccctgctggtgagcagcgtgttcttccccctgctgagcctgtgctag

SEQ ID NO: 84212 - DNA, 552 bp, synthetic construct
  misc_feature 1..552: note = Description of Artificial Sequence: Synthetic coding sequence
  source 1..552: mol_type = other DNA
atggacagctgcgacgagctgatccccgagtacctgaacttcatcagaggcgtggtggacagcgaggacctgcccctgaacatcagcagagagatgctgcagcagagcaagatcctgaaggtgatcagaaagaacatcgtgaagaagtgcctggagctgttcagcgagctggccgaggacaaggagaactacaagaagttctacgaggccttcagcaagaacctgaagctgggcatccacgaggacagcaccaacagaagaagactgagcgagctgctgagataccacaccagccagagcggcgacgagatgaccagcctgagcgagtacgtgagcagaatgaaggagacccagaagagcatctactacatcaccggcagcccctgctggtgcctggtgttcttcagcctgagctgcccctgcgtggagggcagcaagctgagagtgagcagccccatccccagcctgctgctgaccgccggcctggacgtggtgtactgcggcctgttctacttcctgcacttcgtgctgaagctgaagtacgccaagtag

SEQ ID NO: 84213 - DNA, 2175 bp, synthetic construct; identical to SEQ ID NO: 84208
  misc_feature 1..2175: note = Description of Artificial Sequence: Synthetic coding sequence
  source 1..2175: mol_type = other DNA

SEQ ID NO: 84214 - DNA, 429 bp, synthetic construct
  misc_feature 1..429: note = Description of Artificial Sequence: Synthetic coding sequence
  source 1..429: mol_type = other DNA
tgattcatcagaggcgtggtggacagcgaggacctgcccctgaacatcagcagagagatgctgcagcagagcaagatcctgaaggtgatcagaaagaacatcgtgaagaagtgcctggagctgttcagcgagctggccgaggacaaggagaactacaagaagttctacgaggccttcagcaagaacctgaagctgggcatccacgaggacagcaccaacagaagaagactgagcgagctgctgagataccacaccagccagagcggcgacgagatgaccagcctgagcgagtacgtgagcagaatgaaggagacccagaagagcatctactacatcaccggcgagagcaaggagcaggtgtgcccctgccccacctggctgcccctgctggtgagcagcgtgttcttccccctgctgagcctgtgctag

SEQ ID NO: 84215 - DNA, 453 bp, synthetic construct
  misc_feature 1..453: note = Description of Artificial Sequence: Synthetic coding sequence
  source 1..453: mol_type = other DNA
tgattcatcagaggcgtggtggacagcgaggacctgcccctgaacatcagcagagagatgctgcagcagagcaagatcctgaaggtgatcagaaagaacatcgtgaagaagtgcctggagctgttcagcgagctggccgaggacaaggagaactacaagaagttctacgaggccttcagcaagaacctgaagctgggcatccacgaggacagcaccaacagaagaagactgagcgagctgctgagataccacaccagccagagcggcgacgagatgaccagcctgagcgagtacgtgagcagaatgaaggagacccagaagagcatctactacatcaccggcgagagcaaggagcaggtggccaacagcgccttcgtggagagatgcccctgccccacctggctgcccctgctggtgagcagcgtgttcttccccctgctgagcctgtgctag

SEQ ID NO: 84216 - DNA, 516 bp, synthetic construct
  misc_feature 1..516: note = Description of Artificial Sequence: Synthetic coding sequence
  source 1..516: mol_type = other DNA
tgattcatcagaggcgtggtggacagcgaggacctgcccctgaacatcagcagagagatgctgcagcagagcaagatcctgaaggtgatcagaaagaacatcgtgaagaagtgcctggagctgttcagcgagctggccgaggacaaggagaactacaagaagttctacgaggccttcagcaagaacctgaagctgggcatccacgaggacagcaccaacagaagaagactgagcgagctgctgagataccacaccagccagagcggcgacgagatgaccagcctgagcgagtacgtgagcagaatgaaggagacccagaagagcatctactacatcaccggcagcccctgctggtgcctggtgttcttcagcctgagctgcccctgcgtggagggcagcaagctgagagtgagcagccccatccccagcctgctgctgaccgccggcctggacgtggtgtactgcggcctgttctacttcctgcacttcgtgctgaagctgaagtacgccaagtag

SEQ ID NO: 84217 - DNA, 507 bp, synthetic construct
  misc_feature 1..507: note = Description of Artificial Sequence: Synthetic coding sequence
  source 1..507: mol_type = other DNA
atgcccgaggaggtgcaccacggcgaggaggaggtggagaccttcgccttccaggccgagatcgcccagctgatgagcctgatcatcaacaccttctacagcaacaaggagatcttcctgagagagctgatcagcaacgccagcgacgccctggacaagatcagatacgagagcctgaccgaccccagcaagctggacagcggcaaggagctgaagatcgacatcagcatgatcggccagttcggcgtgggcttctacagcgcctacctggtggccgagaaggtggtggtgatcaccaagcacaacgacgacgagcagtacgcctgggagagcagcgccggcggcagcttcaccgtgagagccgaccacggcgagcccatcggcagaggcaccaaggtgatcctgcacctgaaggaggaccagaccgagtacctggaggagagaagagtgaaggaggtggtgaagaagcacagccagttcatcggctaccccatcaccctgtactag

SEQ ID NO: 84218 - DNA, 483 bp, synthetic construct
  misc_feature 1..483: note = Description of Artificial Sequence: Synthetic coding sequence
  source 1..483: mol_type = other DNA
atggagatccccgtgcccgtgcagcccagctggctgagaagagccagcgcccccctgcccggcctgagcgcccccggcagactgttcgaccagagattcggcgagggcctgctggaggccgagctggccgccctgtgccccaccaccctggccccctactacctgagagcccccagcgtggccctgcccgtggcccaggtgcccaccgaccccggccacttcagcgtgctgctggacgtgaagcacttcagccccgaggagatcgccgtgaaggtggtgggcgagcacgtggaggtgcacgccagacacgaggagagacccgacgagcacggcttcgtggccagagagttccacagaagatacagactgccccccggcgtggaccccgccgccgtgaccagcgccctgagccccgagggcgtgctgagcatccaggccgcccccgccagcgcccaggcccccccccccgccgccgccaagtag

SEQ ID NO: 84219 - DNA, 483 bp, synthetic construct; identical to SEQ ID NO: 84218
  misc_feature 1..483: note = Description of Artificial Sequence: Synthetic coding sequence
  source 1..483: mol_type = other DNA

SEQ ID NO: 84220 - DNA, 591 bp, synthetic construct
  misc_feature 1..591: note = Description of Artificial Sequence: Synthetic coding sequence
  source 1..591: mol_type = other DNA
atggagatccccgtgcccgtgcagcccagctggctgagaagagccagcgcccccctgcccggcctgagcgcccccggcagactgttcgaccagagattcggcgagggcctgctggaggccgagctggccgccctgtgccccaccaccctggccccctactacctgagagcccccagcgtggccctgcccgtggcccaggtgcccaccgaccccggccacttcagcgtgctgctggacgtgaagcacttcagccccgaggagatcgccgtgaaggtggtgggcgagcacgtggaggtgcacgccagacacgaggagagacccgacgagcacggcttcgtggccagagagttccacagaagatacagactgccccccggcgtggaccccgccgccgtgaccagcgccctgagccccgagggcgtgctgagcatccaggccgcccccgcccccagagagcccccccaggcccccagcatcaaggccgacctgaccccccccagccagatgagcagagtgagacagggcctgagcagccaccccctgctggacagcgccctgaccagcatcctggacaccgccctgatcacctag

SEQ ID NO: 84221 - DNA, 1590 bp, synthetic construct
  misc_feature 1..1590: note = Description of Artificial Sequence: Synthetic coding sequence
  source 1..1590: mol_type = other DNA
atggacctgcccgtgggccccggcgccgccggccccagcaacgtgcccgccttcctgaccaagctgtggaccctggtgagcgaccccgacaccgacgccctgatctgctggagccccagcggcaacagcttccacgtgttcgaccagggccagttcgccaaggaggtgctgcccaagtacttcaagcacaacaacatggccagcttcgtgagacagctgaacatgtacggcttcagaaaggtggtgcacatcgagcagggcggcctggtgaagcccgagagagacgacaccgagttccagcacccctgcttcctgagaggccaggagcagctgctggagaacatcaagagaaaggtgaccagcgtgagcaccctgaagagcgaggacatcaagatcagacaggacagcgtgaccaagctgctgaccgacgtgcagctgatgaagggcaagcaggagtgcatggacagcaagctgctggccatgaagcacgagaacgaggccctgtggagagaggtggccagcctgagacagaagcacgcccagcagcagaaggtggtgaacaagctgatccagttcctgatcagcctggtgcagagcaacagaatcctgggcgtgaagagaaagatccccctgatgctgaacgacagcggcagcgcccacagcatgcccaagtacagcagacagttcagcctggagcacgtgcacggcagcggcccctacagcgcccccagccccgcctacagcagcagcagcctgtacgcccccgacgccgtggccagcagcggccccatcatcagcgacatcaccgagctggcccccgccagccccatggccagccccggcggcagcatcgacgagagacccctgagcagcagccccctggtgagagtgaaggaggagccccccagccccccccagagccccagagtggaggaggccagccccggcagacccagcagcgtggacaccctgctgagccccaccgccctgatcgacagcatcctgagagagagcgagcccgcccccgccagcgtgaccgccctgaccgacgccagaggccacaccgacaccgagggcagaccccccagccccccccccaccagcacccccgagaagtgcctgagcgtggcctgcctggacaagaacgagctgagcgaccacctggacgccatggacagcaacctggacaacctgcagaccatgctgagcagccacggcttcagcgtggacaccagcgccctgctggacctgttcagccccagcgtgaccgtgcccgacatgagcctgcccgacctggacagcagcctggccagcatccaggagctgctgagcccccaggagccccccagaccccccgaggccgagaacagcagccccgacagcggcaagcagctggtgcactacaccgcccagcccctgttcctgctggaccccggcagcgtggacaccggcagcaacgacctgcccgtgctgttcgagctgggcgagggcagctacttcagcgagggcgacggcttcgccgaggaccccaccatcagcctgctgaccggcagcgagccccccaaggccaaggaccccaccgtgagctag

SEQ ID NO: 84222 - DNA, 1611 bp, synthetic construct
  misc_feature 1..1611: note = Description of Artificial Sequence: Synthetic coding sequence
  source 1..1611: mol_type = other DNA
atgaagcagagcagcaacgtgcccgccttcctgagcaagctgtggaccctggtggaggagacccacaccaacgagttcatcacctggagccagaacggccagagcttcctggtgctggacgagcagagattcgccaaggagatcctgcccaagtacttcaagcacaacaacatggccagcttcgtgagacagctgaacatgtacggcttcagaaaggtggtgcacatcgacagcggcatcgtgaagcaggagagagacggccccgtggagttccagcacccctacttcaagcagggccaggacgacctgctggagaacatcaagagaaaggtgagcagcagcaagcccgaggagaacaagatcagacaggaggacctgaccaagatcatcagcagcgcccagaaggtgcagatcaagcaggagaccatcgagagcagactgagcgagctgaagagcgagaacgagagcctgtggaaggaggtgagcgagctgagagccaagcacgcccagcagcagcaggtgatcagaaagatcgtgcagttcatcgtgaccctggtgcagaacaaccagctggtgagcctgaagagaaagagacccctgctgctgaacaccaacggcgcccagaagaagaacctgttccagcacatcgtgaaggagcccaccgacaaccaccaccacaaggtgccccacagcagaaccgagggcctgaagcccagagagagaatcagcgacgacatcatcatctacgacgtgaccgacgacaacgccgacgaggagaacatccccgtgatccccgagaccaacgaggacgtgatcagcgaccccagcaactgcagccagtaccccgacatcgtgatcgtggaggacgacaacgaggacgagtacgcccccgtgatccagagcggcgagcagaacgagcccgccagagagagcctgagcagcggcagcgacggcagcagccccctgatgagcagcgccgtgcagctgaacggcagcagcagcctgaccagcgaggaccccgtgaccatgatggacagcatcctgaacgacaacatcaacctgctgggcaaggtggagctgctggactacctggacagcatcgactgcagcctggaggacttccaggccatgctgagcggcagacagttcagcatcgaccccgacctgctggtggacctgttcaccagcagcgtgcagatgaaccccaccgactacatcaacaacaccaagagcgagaacaagggcctggagaccaccaagaacaacgtggtgcagcccgtgagcgaggagggcagaaagagcaagagcaagcccgacaagcagctgatccagtacaccgccttccccctgctggccttcctggacggcaaccccgccagcagcgtggagcaggccagcaccaccgccagcagcgaggtgctgagcagcgtggacaagcccatcgaggtggacgagctgctggacagcagcctggaccccgagcccacccagagcaagctggtgagactggagcccctgaccgaggccgaggccagcgaggccaccctgttctacctgtgcgagctggcccccgcccccctggacagcgacatgcccctgctggacagctag

SEQ ID NO: 84223 - DNA, 1557 bp, synthetic construct
  misc_feature 1..1557: note = Description of Artificial Sequence: Synthetic coding sequence
  source 1..1557: mol_type = other DNA
atgaagcagagcagcaacgtgcccgccttcctgagcaagctgtggaccctggtggaggagacccacaccaacgagttcatcacctggagccagaacggccagagcttcctggtgctggacgagcagagattcgccaaggagatcctgcccaagtacttcaagcacaacaacatggccagcttcgtgagacagctgaacatgtacggcttcagaaaggtggtgcacatcgacagcggcatcgtgaagcaggagagagacggccccgtggagttccagcacccctacttcaagcagggccaggacgacctgctggagaacatcaagagaaaggtgagcagcagcaagcccgaggagaacaagatcagacaggaggacctgaccaagatcatcagcagcgcccagaaggtgcagatcaagcaggagaccatcgagagcagactgagcgagctgaagagcgagaacgagagcctgtggaaggaggtgagcgagctgagagccaagcacgcccagcagcagcaggtgatcagaaagatcgtgcagttcatcgtgaccctggtgcagaacaaccagctggtgagcctgaagagaaagagacccctgctgctgaacaccaacggcgcccagaagaagaacctgttccagcacatcgtgaaggagcccaccgacaaccaccaccacaaggtgccccacagcagaaccgagggcctgaagcccagagagagaatcagcgacgacatcatcatctacgacgtgaccgacgacaacgccgacgaggagaacatccccgtgatccccgagaccaacgaggacgtgatcagcgaccccagcaactgcagccagtaccccgacatcgtgatcgtggaggacgacaacgaggacgagtacgcccccgtgatccagagcggcgagcagaacgagcccgccagagagagcctgagcagcggcagcgacggcagcagccccctgatgagcagcgccgtgcagctgaacggcagcagcagcctgaccagcgaggaccccgtgaccatgatggacagcatcctgaacgacaacatcaacctgctgggcaaggtggagctgctggactacctggacagcatcgactgcagcctggaggacttccaggccatgctgagcggcagacagttcagcatcgaccccgacctgctggtggacagcgagaacaagggcctggagaccaccaagaacaacgtggtgcagcccgtgagcgaggagggcagaaagagcaagagcaagcccgacaagcagctgatccagtacaccgccttccccctgctggccttcctggacggcaaccccgccagcagcgtggagcaggccagcaccaccgccagcagcgaggtgctgagcagcgtggacaagcccatcgaggtggacgagctgctggacagcagcctggaccccgagcccacccagagcaagctggtgagactggagcccctgaccgaggccgaggccagcgaggccaccctgttctacctgtgcgagctggcccccgcccccctggacagcgacatgcccctgctggacagctag

SEQ ID NO: 84224 - DNA, 1005 bp, synthetic construct
  misc_feature 1..1005: note = Description of Artificial Sequence: Synthetic coding sequence
  source 1..1005: mol_type = other DNA
atgggcgaggccggcgccgccgaggaggcctgcagacacatgggcaccaaggaggagttcgtgaaggtgagaaagaaggacctggagagactgaccaccgaggtgatgcagatcagagacttcctgcccagaatcctgaacggcgaggtgctggagagcttccagaagctgaagatcgtggagaagaacctggagagaaaggagcaggagctggagcagctgaagatggactgcgagcacttcaaggccagactggagaccgtgcaggccgacaacatcagagagaagaaggagaagctggccctgagacagcagctgaacgaggccaagcagcagctgctgcagcaggccgagtactgcaccgagatgggcgccgccgcctgcaccctgctgtggggcgtgagcagcagcgaggaggtggtgaaggccatcctgggcggcgacaaggccctgaagttcttcagcatcaccggccagaccatggagagcttcgtgaagagcctggacggcgacgtgcaggagctggacagcgacgagagccagttcgtgttcgccctggccggcatcgtgaccaacgtggccgccatcgcctgcggcagagagttcctggtgaacagcagcagagtgctgctggacaccatcctgcagctgctgggcgacctgaagcccggccagtgcaccaagctgaaggtgctgatgctgatgagcctgtacaacgtgagcatcaacctgaagggcctgaagtacatcagcgagagccccggcttcatccccctgctgtggtggctgctgagcgaccccgacgccgaggtgtgcctgcacgtgctgagactggtgcagagcgtggtgctggagcccgaggtgttcagcaagagcgccagcgagttcagaagcagcctgcccctgcagagaatcctggccatgagcaagagcagaaaccccagactgcagaccgccgcccaggagctgctggaggacctgagaaccctggagcacaacgtgtag

SEQ ID NO: 84225 - DNA, 780 bp, synthetic construct
  misc_feature 1..780: note = Description of Artificial Sequence: Synthetic coding sequence
  source 1..780: mol_type = other DNA
atggactgcgagcacttcaaggccagactggagaccgtgcaggccgacaacatcagagagaagaaggagaagctggccctgagacagcagctgaacgaggccaagcagcagctgctgcagcaggccgagtactgcaccgagatgggcgccgccgcctgcaccctgctgtggggcgtgagcagcagcgaggaggtggtgaaggccatcctgggcggcgacaaggccctgaagttcttcagcatcaccggccagaccatggagagcttcgtgaagagcctggacggcgacgtgcaggagctggacagcgacgagagccagttcgtgttcgccctggccggcatcgtgaccaacgtggccgccatcgcctgcggcagagagttcctggtgaacagcagcagagtgctgctggacaccatcctgcagctgctgggcgacctgaagcccggccagtgcaccaagctgaaggtgctgatgctgatgagcctgtacaacgtgagcatcaacctgaagggcctgaagtacatcagcgagagccccggcttcatccccctgctgtggtggctgctgagcgaccccgacgccgaggtgtgcctgcacgtgctgagactggtgcagagcgtggtgctggagcccgaggtgttcagcaagagcgccagcgagttcagaagcagcctgcccctgcagagaatcctggccatgagcaagagcagaaaccccagactgcagaccgccgcccaggagctgctggaggacctgagaaccctggagcacaacgtgtag

SEQ ID NO: 84226 - DNA, 1479 bp, synthetic construct
  misc_feature 1..1479: note = Description of Artificial Sequence: Synthetic coding sequence
  source 1..1479: mol_type = other DNA
atgcaggaggcccccgccgccctgcccaccgagcccggccccagccccgtgcccgccttcctgggcaagctgtgggccctggtgggcgaccccggcaccgaccacctgatcagatggagccccagcggcaccagcttcctggtgagcgaccagagcagattcgccaaggaggtgctgccccagtacttcaagcacagcaacatggccagcttcgtgagacagctgaacatgtacggcttcagaaaggtggtgagcatcgagcagggcggcctgctgagacccgagagagaccacgtggagttccagcaccccagcttcgtgagaggcagagagcagctgctggagagagtgagaagaaaggtgcccgccctgagaggcgacgacggcagatggagacccgaggacctgggcagactgctgggcgaggtgcaggccctgagaggcgtgcaggagagcaccgaggccagactgagagagctgagacagcagaacgagatcctgtggagagaggtggtgaccctgagacagagccacggccagcagcacagagtgatcggcaagctgatccagtgcctgttcggccccctgcaggccggccccagcaacgccggcggcaagagaaagctgagcctgatgctggacgagggcagcagctgccccacccccgccaagttcaacacctgccccctgcccggcgccctgctgcaggacccctacttcatccagagccccctgcccgagaccaacctgggcctgagcccccacagagccagaggccccatcatcagcgacatccccgaggacagccccagccccgagggcaccagactgagccccagcagcgacggcagaagagagaagggcctggccctgctgaaggaggagcccgccagccccggcggcgacggcgaggccggcctggccctggcccccaacgagtgcgacttctgcgtgaccgcccccccccccctgcccgtggccgtggtgcaggccatcctggagggcaagggcagcttcagccccgagggccccagaaacgcccagcagcccgagcccggcgaccccagagagatccccgacagaggccccctgggcctggagagcggcgacagaagccccgagagcctgctgccccccatgctgctgcagcccccccaggagagcgtggagcccgccggccccctggacgtgctgggccccagcctgcagggcagagagtggaccctgatggacctggacatggagctgagcctgatgcagcccctggtgcccgagagaggcgagcccgagctggccgtgaagggcctgaacagccccagccccggcaaggaccccaccctgggcgcccccctgctgctggacgtgcaggccgccctgggcggccccgccctgggcctgcccggcgccctgaccatctacagcacccccgagagcagaaccgccagctacctgggccccgaggccagccccagcccctag

SEQ ID NO: 84227 - DNA, 1389 bp, synthetic construct
  misc_feature 1..1389: note = Description of Artificial Sequence: Synthetic coding sequence
  source 1..1389: mol_type = other DNA
atgcaggaggcccccgccgccctgcccaccgagcccggccccagccccgtgcccgccttcctgggcaagctgtgggccctggtgggcgaccccggcaccgaccacctgatcagatggagccccagcggcaccagcttcctggtgagcgaccagagcagattcgccaaggaggtgctgccccagtacttcaagcacagcaacatggccagcttcgtgagacagctgaacatgtacggcttcagaaaggtggtgagcatcgagcagggcggcctgctgagacccgagagagaccacgtggagttccagcaccccagcttcgtgagaggcagagagcagctgctggagagagtgagaagaaaggtgcccgccctgagaggcgacgacggcagatggagacccgaggacctgggcagactgctgggcgaggtgcaggccctgagaggcgtgcaggagagcaccgaggccagactgagagagctgagacagcagaacgagatcctgtggagagaggtggtgaccctgagacagagccacggccagcagcacagagtgatcggcaagctgatccagtgcctgttcggccccctgcaggccggccccagcaacgccggcggcaagagaaagctgagcctgatgctggacgagggcagcagctgccccacccccgccaagttcaacacctgccccctgcccggcgccctgctgcaggacccctacttcatccagagccccagcacctacagcctgagccagagacagatctgggccctggccctgaccggccccggcgcccccagcagcctgaccagccagaagaccctgcaccccctgagaggccccggcttcctgccccccgtgatggccggcgcccccccccccctgcccgtggccgtggtgcaggccatcctggagggcaagggcagcttcagccccgagggccccagaaacgcccagcagcccgagcccggcgaccccagagagatccccgacagaggccccctgggcctggagagcggcgacagaagccccgagagcctgctgccccccatgctgctgcagcccccccaggagagcgtggagcccgccggccccctggacgtgctgggccccagcctgcagggcagagagtggaccctgatggacctggacatggagctgagcctgatgcagcccctggtgcccgagagaggcgagcccgagctggccgtgaagggcctgaacagccccagccccggcaaggaccccaccctgggcgcccccctgctgctggacgtgcaggccgccctgggcggccccgccctgggcctgcccggcgccctgaccatctacagcacccccgagagcagaaccgccagctacctgggccccgaggccagccccagcccctag

SEQ ID NO: 84228 - DNA, 1251 bp, synthetic construct
  misc_feature 1..1251: note = Description of Artificial Sequence: Synthetic coding sequence
  source 1..1251: mol_type = other DNA
atgcaggaggcccccgccgccctgcccaccgagcccggccccagccccgtgcccgccttcctgggcaagctgtgggccctggtgggcgaccccggcaccgaccacctgatcagatggagccccagcggcaccagcttcctggtgagcgaccagagcagattcgccaaggaggtgctgccccagtacttcaagcacagcaacatggccagcttcgtgagacagctgaacatgtacggcttcagaaaggtggtgagcatcgagcagggcggcctgctgagacccgagagagaccacgtggagttccagcaccccagcttcgtgagaggcagagagcagctgctggagagagtgagaagaaaggtgcccgccctgagaggcgacgacggcagatggagacccgaggacctgggcagactgctgggcgaggtgcaggccctgagaggcgtgcaggagagcaccgaggccagactgagagagctgagacagcagaacgagatcctgtggagagaggtggtgaccctgagacagagccacggccagcagcacagagtgatcggcaagctgatccagtgcctgttcggccccctgcaggccggccccagcaacgccggcggcaagagaaagctgagcctgatgctggacgagggcagcagctgccccacccccgccaagttcaacacctgccccctgcccggcgccctgctgcaggacccctacttcatccagagccccctgcccgagaccaacctgggcctgagcccccacagagccagaggccccatcatcagcgacatccccgaggacagccccagccccgagggcaccagactgagccccagcagcgacggcagaagaggccccctgggcctggagagcggcgacagaagccccgagagcctgctgccccccatgctgctgcagcccccccaggagagcgtggagcccgccggccccctggacgtgctgggccccagcctgcagggcagagagtggaccctgatggacctggacatggagctgagcctgatgcagcccctggtgcccgagagaggcgagcccgagctggccgtgaagggcctgaacagccccagccccggcaaggaccccaccctgggcgcccccctgctgctggacgtgcaggccgccctgggcggccccgccctgggcctgcccggcgccctgaccatctacagcacccccgagagcagaaccgccagctacctgggccccgaggccagccccagcccctag

SEQ ID NO: 84229 - DNA, 1479 bp, synthetic construct; identical to SEQ ID NO: 84226
  misc_feature 1..1479: note = Description of Artificial Sequence: Synthetic coding sequence
  source 1..1479: mol_type = other DNA

SEQ ID NO: 84230 - skipped

SEQ ID NO: 84231 - DNA, 414 bp, synthetic construct
  misc_feature 1..414: note = Description of Artificial Sequence: Synthetic coding sequence
  source 1..414: mol_type = other DNA
atgagcagcctgatcagaagagtgatcagcaccgccaaggcccccggcgccatcggcccctacagccaggccgtgctggtggacagaaccatctacatcagcggccagatcggcatggaccccagcagcggccagctggtgagcggcggcgtggccgaggaggccaagcaggccctgaagaacatgggcgagatcctgaaggccgccggctgcgacttcaccaacgtggtgaagaccaccgtgctgctggccgacatcaacgacttcaacaccgtgaacgagatctacaagcagtacttcaagagcaacttccccgccagagccgcctaccaggtggccgccctgcccaagggcagcagaatcgagatcgaggccgtggccatccagggccccctgaccaccgccagcctgtag

SEQ ID NO: 84232 - DNA, 14505 bp, synthetic construct
  misc_feature 1..14505: note = Description of Artificial Sequence: Synthetic coding sequence
  source 1..14505: mol_type = other DNA
atgcccagcgagagcttctgcctggccgcccaggccagactggacagcaagtggctgaagaccgacatccagctggccttcaccagagacggcctgtgcggcctgtggaacgagatggtgaaggacggcgagatcgtgtacaccggcaccgagagcacccagaacggcgagctgccccccagaaaggacgacagcgtggagcccagcggcaccaagaaggaggacctgaacgacaaggagaagaaggacgaggaggagacccccgcccccatctacagagccaagagcatcctggacagctgggtgtggggcaagcagcccgacgtgaacgagctgaaggagtgcctgagcgtgctggtgaaggagcagcaggccctggccgtgcagagcgccaccaccaccctgagcgccctgagactgaagcagagactggtgatcctggagagatacttcatcgccctgaacagaaccgtgttccaggagaacgtgaaggtgaagtggaagagcagcggcatcagcctgccccccgtggacaagaagagcagcagacccgccggcaagggcgtggagggcctggccagagtgggcagcagagccgccctgagcttcgccttcgccttcctgagaagagcctggagaagcggcgaggacgccgacctgtgcagcgagctgctgcaggagagcctggacgccctgagagccctgcccgaggccagcctgttcgacgagagcaccgtgagcagcgtgtggctggaggtggtggagagagccaccagattcctgagaagcgtggtgaccggcgacgtgcacggcacccccgccaccaagggccccggcagcatccccctgcaggaccagcacctggccctggccatcctgctggagctggccgtgcagagaggcaccctgagccagatgctgagcgccatcctgctgctgctgcagctgtgggacagcggcgcccaggagaccgacaacgagagaagcgcccagggcaccagcgcccccctgctgcccctgctgcagagattccagagcatcatctgcagaaaggacgccccccacagcgagggcgacatgcacctgctgagcggccccctgagccccaacgagagcttcctgagatacctgaccctgccccaggacaacgagctggccatcgacctgagacagaccgccgtggtggtgatggcccacctggacagactggccaccccctgcatgccccccctgtgcagcagccccaccagccacaagggcagcctgcaggaggtgatcggctggggcctgatcggctggaagtactacgccaacgtgatcggccccatccagtgcgagggcctggccaacctgggcgtgacccagatcgcctgcgccgagaagagattcctgatcctgagcagaaacggcagagtgtacacccaggcctacaacagcgacaccctggccccccagctggtgcagggcctggccagcagaaacatcgtgaagatcgccgcccacagcgacggccaccactacctggccctggccgccaccggcgaggtgtacagctggggctgcggcgacggcggcagactgggccacggcgacaccgtgcccctggaggagcccaaggtgatcagcgccttcagcggcaagcaggccggcaagcacgtggtgcacatcgcctgcggcagcacctacagcgccgccatcaccgccgagggcgagctgtacacctggggcagaggcaactacggcagactgggccacggcagcagcgaggacgaggccatccccatgctggtggccggcctgaagggcctgaaggtgatcgacgtggcctgcggcagcggcgacgcccagaccctggccgtgaccgagaacggccaggtgtggagctggggcgacggcgactacggcaagctgggcagaggcggcagcgacggctgcaagacccccaagctgatcgagaagctgcaggacctggacgtggtgaaggtgagatgcggcagccagttcagcatcgccctgaccaaggacggccaggtgtacagctggggcaagggcgacaaccagagactgggccacggcaccgaggagcacgtgagataccccaagctgctggagggcctgcagggcaagaaggtgatcgacgtggccgccggcagcacccactgcctggccctgaccgaggacagcgaggtgcacagctggggcagcaacgaccagtgccagcacttcgacaccctgagagtgaccaagcccgagcccgccgccctgcccggcctggacaccaagcacatcgtgggcatcgcctgcggccccgcccagagcttcgcctggagcagctgcagcgagtggagcatcggcctgagagtgcccttcgtggtggacatctgcagcatgaccttcgagcagctggacctgctgctgagacaggtgagcgagggcatggacggcagcgccgactggccccccccccaggagaaggagtgcgtggccgtggccaccctgaacctgctgagactgcagctgcacgccgccatcagccaccaggtggaccccgagttcctgggcctgggcctgggcagcatcctgctgaacagcctgaagcagaccgtggtgaccctggccagcagcgccggcgtgctgagcaccgtgcagagcgccgcccaggccgtgctgcagagcggctggagcgtgctgctgcccaccgccgaggagagagccagagccctgagcgccctgctgccctgcgccgtgagcggcaacgaggtgaacatcagccccggcagaagattcatgatcgacctgctggtgggcagcctgatggccgacggcggcctggagagcgccctgcacgccgccatcaccgccgagatccaggacatcgaggccaagaaggaggcccagaaggagaaggagatcgacgagcaggaggccaacgccagcaccttccacagaagcagaacccccctggacaaggacctgatcaacaccggcatctgcgagagcagcggcaagcagtgcctgcccctggtgcagctgatccagcagctgctgagaaacatcgccagccagaccgtggccagactgaaggacgtggccagaagaatcagcagctgcctggacttcgagcagcacagcagagagagaagcgccagcctggacctgctgctgagattccagagactgctgatcagcaagctgtaccccggcgagagcatcggccagaccagcgacatcagcagccccgagctgatgggcgtgggcagcctgctgaagaagtacaccgccctgctgtgcacccacatcggcgacatcctgcccgtggccgccagcatcgccagcaccagctggagacacttcgccgaggtggcctacatcgtggagggcgacttcaccggcgtgctgctgcccgagctggtggtgagcatcgtgctgctgctgagcaagaacgccggcctgatgcaggaggccggcgccgtgcccctgctgggcggcctgctggagcacctggacagattcaaccacctggcccccggcaaggagagagacgaccacgaggagctggcctggcccggcatcatggagagcttcttcaccggccagaactgcagaaacaacgaggaggtgaccctgatcagaaaggccgacctggagaaccacaacaaggacggcggcttctggaccgtgatcgacggcaaggtgtacgacatcaaggacttccagacccagagcctgaccggcaacagcatcctggcccagttcgccggcgaggaccccgtggtggccctggaggccgccctgcagttcgaggacaccagagagagcatgcacgccttctgcgtgggccagtacctggagcccgaccaggagatcgtgaccatccccgacctgggcagcctgagcagccccctgatcgacaccgagagaaacctgggcctgctgctgggcctgcacgccagctacctggccatgagcacccccctgagccccgtggagatcgagtgcgccaagtggctgcagagcagcatcttcagcggcggcctgcagaccagccagatccactacagctacaacgaggagaaggacgaggaccactgcagcagccccggcggcacccccgccagcaagagcagactgtgcagccacagaagagccctgggcgaccacagccaggccttcctgcaggccatcgccgacaacaacatccaggaccacaacgtgaaggacttcctgtgccagatcgagagatactgcagacagtgccacctgaccacccccatcatgttcccccccgagcaccccgtggaggaggtgggcagactgctgctgtgctgcctgctgaagcacgaggacctgggccacgtggccctgagcctggtgcacgccggcgccctgggcatcgagcaggtgaagcacagaaccctgcccaagagcgtggtggacgtgtgcagagtggtgtaccaggccaagtgcagcctgatcaagacccaccaggagcagggcagaagctacaaggaggtgtgcgcccccgtgatcgagagactgagattcctgttcaacgagctgagacccgccgtgtgcaacgacctgagcatcatgagcaagttcaagctgctgagcagcctgcccagatggagaagaatcgcccagaagatcatcagagagagaagaaagaagagagtgcccaagaagcccgagagcaccgacgacgaggagaagatcggcaacgaggagagcgacctggaggaggcctgcatcctgccccacagccccatcaacgtggacaagagacccatcgccatcaagagccccaaggacaagtggcagcccctgctgagcaccgtgaccggcgtgcacaagtacaagtggctgaagcagaacgtgcagggcctgtacccccagagccccctgctgagcaccatcgccgagttcgccctgaaggaggagcccgtggacgtggagaagatgagaaagtgcctgctgaagcagctggagagagccgaggtgagactggagggcatcgacaccatcctgaagctggccagcaagaacttcctgctgcccagcgtgcagtacgccatgttctgcggctggcagagactgatccccgagggcatcgacatcggcgagcccctgaccgactgcctgaaggacgtggacctgatcccccccttcaacagaatgctgctggaggtgaccttcggcaagctgtacgcctgggccgtgcagaacatcagaaacgtgctgatggacgccagcgccaagttcaaggagctgggcatccagcccgtgcccctgcagaccatcaccaacgagaaccccagcggccccagcctgggcaccatcccccaggccagattcctgctggtgatgctgagcatgctgaccctgcagcacggcgccaacaacctggacctgctgctgaacagcggcatgctggccctgacccagaccgccctgagactgatcggccccagctgcgacaacgtggaggaggacatgaacgccagcgcccagggcgccagcgccaccgtgctggaggagaccagaaaggagaccgcccccgtgcagctgcccgtgagcggccccgagctggccgccatgatgaagatcggcaccagagtgatgagaggcgtggactggaagtggggcgaccaggacggccccccccccggcctgggcagagtgatcggcgagctgggcgaggacggctggatcagagtgcagtgggacaccggcagcaccaacagctacagaatgggcaaggagggcaagtacgacctgaagctggccgagctgcccgccgccgcccagcccagcgccgaggacagcgacaccgaggacgacagcgaggccgagcagaccgagagaaacatccaccccaccgccatgatgttcaccagcaccatcaacctgctgcagaccctgtgcctgagcgccggcgtgcacgccgagatcatgcagagcgaggccaccaagaccctgtgcggcctgctgagaatgctggtggagagcggcaccaccgacaagaccagcagccccaacagactggtgtacagagagcagcacagaagctggtgcaccctgggcttcgtgagaagcatcgccctgaccccccaggtgtgcggcgccctgagcagcccccagtggatcaccctgctgatgaaggtggtggagggccacgcccccttcaccgccaccagcctgcagagacagatcctggccgtgcacctgctgcaggccgtgctgcccagctgggacaagaccgagagagccagagacatgaagtgcctggtggagaagctgttcgacttcctgggcagcctgctgaccacctgcagcagcgacgtgcccctgctgagagagagcaccctgagaagaagaagagtgagaccccaggccagcctgaccgccacccacagcagcaccctggccgaggaggtggtggccctgctgagaaccctgcacagcctgacccagtggaacggcctgatcaacaagtacatcaacagccagctgagaagcatcacccacagcttcgtgggcagacccagcgagggcgcccagctggaggactacttccccgacagcgagaaccccgaggtgggcggcctgatggccgtgctggccgtgatcggcggcatcgacggcagactgagactgggcggccaggtgatgcacgacgagttcggcgagggcaccgtgaccagaatcacccccaagggcaagatcaccgtgcagttcagcgacatgagaacctgcagagtgtgccccctgaaccagctgaagcccctgcccgccgtggccttcaacgtgaacaacctgcccttcaccgagcccatgctgagcgtgtgggcccagctggtgaacctggccggcagcaagctggagaagcacaagatcaagaagagcaccaagcaggccttcgccggccaggtggacctggacctgctgagatgccagcagctgaagctgtacatcctgaaggccggcagagccctgctgagccaccaggacaagctgagacagatcctgagccagcccgccgtgcaggagaccggcaccgtgcacaccgacgacggcgccgtggtgagccccgacctgggcgacatgagccccgagggcccccagccccccatgatcctgctgcagcagctgctggccagcgccacccagcccagccccgtgaaggccatcttcgacaagcaggagctggaggccgccgccctggccgtgtgccagtgcctggccgtggagagcacccaccccagcagccccggcttcgaggactgcagcagcagcgaggccaccacccccgtggccgtgcagcacatcagacccgccagagtgaagagaagaaagcagagccccgtgcccgccctgcccatcgtggtgcagctgatggagatgggcttcagcagaagaaacatcgagttcgccctgaagagcctgaccggcgccagcggcaacgccagcagcctgcccggcgtggaggccctggtgggctggctgctggaccacagcgacatccaggtgaccgagctgagcgacgccgacaccgtgagcgacgagtacagcgacgaggaggtggtggaggacgtggacgacgccgcctacagcatgagcaccggcgccgtggtgaccgagagccagacctacaagaagagagccgacttcctgagcaacgacgactacgccgtgtacgtgagagagaacatccaggtgggcatgatggtgagatgctgcagagcctacgaggaggtgtgcgagggcgacgtgggcaaggtgatcaagctggacagagacggcctgcacgacctgaacgtgcagtgcgactggcagcagaagggcggcacctactgggtgagatacatccacgtggagctgatcggctaccccccccccagcagcagcagccacatcaagatcggcgacaaggtgagagtgaaggccagcgtgaccacccccaagtacaagtggggcagcgtgacccaccagagcgtgggcgtggtgaaggccttcagcgccaacggcaaggacatcatcgtggacttcccccagcagagccactggaccggcctgctgagcgagatggagctggtgcccagcatccaccccggcgtgacctgcgacggctgccagatgttccccatcaacggcagcagattcaagtgcagaaactgcgacgacttcgacttctgcgagacctgcttcaagaccaagaagcacaacaccagacacaccttcggcagaatcaacgagcccggccagagcgccgtgttctgcggcagaagcggcaagcagctgaagagatgccacagcagccagcccggcatgctgctggacagctggagcagaatggtgaagagcctgaacgtgagcagcagcgtgaaccaggccagcagactgatcgacggcagcgagccctgctggcagagcagcggcagccagggcaagcactggatcagactggagatcttccccgacgtgctggtgcacagactgaagatgatcgtggaccccgccgacagcagctacatgcccagcctggtggtggtgagcggcggcaacagcctgaacaacctgatcgagctgaagaccatcaacatcaaccccagcgacaccaccgtgcccctgctgaacgactgcaccgagtaccacagatacatcgagatcgccatcaagcagtgcagaagcagcggcatcgactgcaagatccacggcctgatcctgctgggcagaatcagagccgaggaggaggacctggccgccgtgcccttcctggccagcgacaacgaggaggaggaggacgagaagggcaacagcggcagcctgatcagaaagaaggccgccggcctggagagcgccgccaccatcagaaccaaggtgttcgtgtggggcctgaacgacaaggaccagctgggcggcctgaagggcagcaagatcaaggtgcccagcttcagcgagaccctgagcgccctgaacgtggtgcaggtggccggcggcagcaagagcctgttcgccgtgaccgtggagggcaaggtgtacgcctgcggcgaggccaccaacggcagactgggcctgggcatcagcagcggcaccgtgcccatccccagacagatcaccgccctgagcagctacgtggtgaagaaggtggccgtgcacagcggcggcagacacgccaccgccctgaccgtggacggcaaggtgttcagctggggcgagggcgacgacggcaagctgggccacttcagcagaatgaactgcgacaagcccagactgatcgaggccctgaagaccaagagaatcagagacatcgcctgcggcagcagccacagcgccgccctgaccagcagcggcgagctgtacacctggggcctgggcgagtacggcagactgggccacggcgacaacaccacccagctgaagcccaagatggtgaaggtgctgctgggccacagagtgatccaggtggcctgcggcagcagagacgcccagaccctggccctgaccgacgagggcctggtgttcagctggggcgacggcgacttcggcaagctgggcagaggcggcagcgagggctgcaacatcccccagaacatcgagagactgaacggccagggcgtgtgccagatcgagtgcggcgcccagttcagcctggccctgaccaagagcggcgtggtgtggacctggggcaagggcgactacttcagactgggccacggcagcgacgtgcacgtgagaaagccccaggtggtggagggcctgagaggcaagaagatcgtgcacgtggccgtgggcgccctgcactgcctggccgtgaccgacagcggccaggtgtacgcctggggcgacaacgaccacggccagcagggcaacggcaccaccaccgtgaacagaaagcccaccctggtgcagggcctggagggccagaagatcaccagagtggcctgcggcagcagccacagcgtggcctggaccaccgtggacgtggccacccccagcgtgcacgagcccgtgctgttccagaccgccagagaccccctgggcgccagctacctgggcgtgcccagcgacgccgacagcagcgccgccagcaacaagatcagcggcgccagcaacagcaagcccaacagacccagcctggccaagatcctgctgagcctggacggcaacctggccaagcagcaggccctgagccacatcctgaccgccctgcagatcatgtacgccagagacgccgtggtgggcgccctgatgcccgccgccatgatcgcccccgtggagtgccccagcttcagcagcgccgcccccagcgacgccagcgccatggccagccccatgaacggcgaggagtgcatgctggccgtggacatcgaggacagactgagccccaacccctggcaggagaagagagagatcgtgagcagcgaggacgccgtgacccccagcgccgtgacccccagcgcccccagcgccagcgccagacccttcatccccgtgaccgacgacctgggcgccgccagcatcatcgccgagaccatgaccaagaccaaggaggacgtggagagccagaacaaggccgccggccccgagccccaggccctggacgagttcaccagcctgctgatcgccgacgacaccagagtggtggtggacctgctgaagctgagcgtgtgcagcagagccggcgacagaggcagagacgtgctgagcgccgtgctgagcggcatgggcaccgcctacccccaggtggccgacatgctgctggagctgtgcgtgaccgagctggaggacgtggccaccgacagccagagcggcagactgagcagccagcccgtggtggtggagagcagccacccctacaccgacgacaccagcaccagcggcaccgtgaagatccccggcgccgagggcctgagagtggagttcgacagacagtgcagcaccgagagaagacacgaccccctgaccgtgatggacggcgtgaacagaatcgtgagcgtgagaagcggcagagagtggagcgactggagcagcgagctgagaatccccggcgacgagctgaagtggaagttcatcagcgacggcagcgtgaacggctggggctggagattcaccgtgtaccccatcatgcccgccgccggccccaaggagctgctgagcgacagatgcgtgctgagctgccccagcatggacctggtgacctgcctgctggacttcagactgaacctggccagcaacagaagcatcgtgcccagactggccgccagcctggccgcctgcgcccagctgagcgccctggccgccagccacagaatgtgggccctgcagagactgagaaagctgctgaccaccgagttcggccagagcatcaacatcaacagactgctgggcgagaacgacggcgagaccagagccctgagcttcaccggcagcgccctggccgccctggtgaagggcctgcccgaggccctgcagagacagttcgagtacgaggaccccatcgtgagaggcggcaagcagctgctgcacagccccttcttcaaggtgctggtggccctggcctgcgacctggagctggacaccctgccctgctgcgccgagacccacaagtgggcctggttcagaagatactgcatggccagcagagtggccgtggccctggacaagagaacccccctgcccagactgttcctggacgaggtggccaagaagatcagagagctgatggccgacagcgagaacatggacgtgctgcacgagagccacgacatcttcaagagagagcaggacgagcagctggtgcagtggatgaacagaagacccgacgactggaccctgagcgccggcggcagcggcaccatctacggctggggccacaaccacagaggccagctgggcggcatcgagggcgccaaggtgaaggtgcccaccccctgcgaggccctggccaccctgagacccgtgcagctgatcggcggcgagcagaccctgttcgccgtgaccgccgacggcaagctgtacgccaccggctacggcgccggcggcagactgggcatcggcggcaccgagagcgtgagcacccccaccctgctggagagcatccagcacgtgttcatcaagaaggtggccgtgaacagcggcggcaagcactgcctggccctgagcagcgagggcgaggtgtacagctggggcgaggccgaggacggcaagctgggccacggcaacagaagcccctgcgacagacccagagtgatcgagagcctgagaggcatcgaggtggtggacgtggccgccggcggcgcccacagcgcctgcgtgaccgccgccggcgacctgtacacctggggcaagggcagatacggcagactgggccacagcgacagcgaggaccagctgaagcccaagctggtggaggccctgcagggccacagagtggtggacatcgcctgcggcagcggcgacgcccagaccctgtgcctgaccgacgacgacaccgtgtggagctggggcgacggcgactacggcaagctgggcagaggcggcagcgacggctgcaaggtgcccatgaagatcgacagcctgaccggcctgggcgtggtgaaggtggagtgcggcagccagttcagcgtggccctgaccaagagcggcgccgtgtacacctggggcaagggcgactaccacagactgggccacggcagcgacgaccacgtgagaagacccagacaggtgcagggcctgcagggcaagaaggtgatcgccatcgccaccggcagcctgcactgcgtgtgctgcaccgaggacggcgaggtgtacacctggggcgacaacgacgagggccagctgggcgacggcaccaccaacgccatccagagacccagactggtggccgccctgcagggcaagaaggtgaacagagtggcctgcggcagcgcccacaccctggcctggagcaccagcaagcccgccagcgccggcaagctgcccgcccaggtgcccatggagtacaaccacctgcaggagatccccatcatcgccctgagaaacagactgctgctgctgcaccacctgagcgagctgttctgcccctgcatccccatgttcgacctggagggcagcctggacgagaccggcctgggccccagcgtgggcttcgacaccctgagaggcatcctgatcagccagggcaaggaggccgccttcagaaaggtggtgcaggccaccatggtgagagacagacagcacggccccgtggtggagctgaacagaatccaggtgaagagaagcagaagcaagggcggcctggccggccccgacggcaccaagagcgtgttcggccagatgtgcgccaagatgagcagcttcggccccgacagcctgctgctgccccacagagtgtggaaggtgaagttcgtgggcgagagcgtggacgactgcggcggcggctacagcgagagcatcgccgagatctgcgaggagctgcagaacggcctgacccccctgctgatcgtgacccccaacggcagagacgagagcggcgccaacagagactgctacctgctgagccccgccgccagagcccccgtgcacagcagcatgttcagattcctgggcgtgctgctgggcatcgccatcagaaccggcagccccctgagcctgaacctggccgagcccgtgtggaagcagctggccggcatgagcctgaccatcgccgacctgagcgaggtggacaaggacttcatccccggcctgatgtacatcagagacaacgaggccaccagcgaggagttcgaggccatgagcctgcccttcaccgtgcccagcgccagcggccaggacatccagctgagcagcaagcacacccacatcaccctggacaacagagccgagtacgtgagactggccatcaactacagactgcacgagttcgacgagcaggtggccgccgtgagagagggcatggccagagtggtgcccgtgcccctgctgagcctgttcaccggctacgagctggagaccatggtgtgcggcagccccgacatccccctgcacctgctgaagagcgtggccacctacaagggcatcgagcccagcgccagcctgatccagtggttctgggaggtgatggagagcttcagcaacaccgagagaagcctgttcctgagattcgtgtggggcagaaccagactgcccagaaccatcgccgacttcagaggcagagacttcgtgatccaggtgctggacaagtacaacccccccgaccacttcctgcccgagagctacacctgcttcttcctgctgaagctgcccagatacagctgcaagcaggtgctggaggagaagctgaagtacgccatccacttctgcaagagcatcgacaccgacgactacgccagaatcgccctgaccggcgagcccgccgccgacgacagcagcgacgacagcgacaacgaggacgtggacagcttcgccagcgacagcacccaggactacctgaccggccactag

SEQ ID NO: 84233 - DNA, 3075 bp, synthetic construct
  misc_feature 1..3075: note = Description of Artificial Sequence: Synthetic coding sequence
  source 1..3075: mol_type = other DNA
atggagagaagaagcagaagaaagagcagaagaaacggcagaagcaccgccggcaaggccgccgccacccagcccgccaagagccccggcgcccagctgtggctgttccccagcgccgccggcctgcacagagccctgctgagaagagtggaggtgaccagacagctgtgctgcagccccggcagactggccgtgctggagagaggcggcgccggcgtgcaggtgcaccagctgctggccggcagcggcggcgccagaacccccaagtgcatcaagctgggcaagaacatgaagatccacagcgtggaccagggcgccgagcacatgctgatcctgagcagcgacggcaagcccttcgagtacgacaactacagcatgaagcacctgagattcgagagcatcctgcaggagaagaagatcatccagatcacctgcggcgactaccacagcctggccctgagcaagggcggcgagctgttcgcctggggccagaacctgcacggccagctgggcgtgggcagaaagttccccagcaccaccaccccccagatcgtggagcacctggccggcgtgcccctggcccagatcagcgccggcgaggcccacagcatggccctgagcatgagcggcaacatctacagctggggcaagaacgagtgcggccagctgggcctgggccacaccgagagcaaggacgaccccagcctgatcgagggcctggacaaccagaaggtggagttcgtggcctgcggcggcagccacagcgccctgctgacccaggacggcctgctgttcaccttcggcgccggcaagcacggccagctgggccacaacagcacccagaacgagctgagaccctgcctggtggccgagctggtgggctacagagtgacccagatcgcctgcggcagatggcacaccctggcctacgtgagcgacctgggcaaggtgttcagcttcggcagcggcaaggacggccagctgggcaacggcggcaccagagaccagctgatgcccctgcccgtgaaggtgagcagcagcgaggagctgaagctggagagccacaccagcgagaaggagctgatcatgatcgccggcggcaaccagagcatcctgctgtggatcaagaaggagaacagctacgtgaacctgaagagaaccatccccaccctgaacgagggcaccgtgaagagatggatcgccgacgtggagaccaagagatggcagagcaccaagagagagatccaggagatcttcagcagccccgcctgcctgaccggcagcttcctgagaaagagaagaaccaccgagatgatgcccgtgtacctggacctgaacaaggccagaaacatcttcaaggagctgacccagaaggactggatcaccaacatgatcaccacctgcctgaaggacaacctgctgaagagactgcccttccacagccccccccaggaggccctggagatcttcttcctgctgcccgagtgccccatgatgcacatcagcaacaactgggagagcctggtggtgcccttcgccaaggtggtgtgcaagatgagcgaccagagcagcctggtgctggaggagtactgggccaccctgcaggagagcaccttcagcaagctggtgcagatgttcaagaccgccgtgatctgccagctggactactgggacgagagcgccgaggagaacggcaacgtgcaggccctgctggagatgctgaagaagctgcacagagtgaaccaggtgaagtgccagctgcccgagagcatcttccaggtggacgagctgctgcacagactgaacttcttcgtggaggtgtgcagaagatacctgtggaagatgaccgtggacgccagcgagaacgtgcagtgctgcgtgatcttcagccacttccccttcatcttcaacaacctgagcaagatcaagctgctgcacaccgacaccctgctgaagatcgagagcaagaagcacaaggcctacctgagaagcgccgccatcgaggaggagagagagagcgagttcgccctgagacccaccttcgacctgaccgtgagaagaaaccacctgatcgaggacgtgctgaaccagctgagccagttcgagaacgaggacctgagaaaggagctgtgggtgagcttcagcggcgagatcggctacgacctgggcggcgtgaagaaggagttcttctactgcctgttcgccgagatgatccagcccgagtacggcatgttcatgtaccccgagggcgccagctgcatgtggttccccgtgaagcccaagttcgagaagaagagatacttcttcttcggcgtgctgtgcggcctgagcctgttcaactgcaacgtggccaacctgcccttccccctggccctgttcaagaagctgctggaccagatgcccagcctggaggacctgaaggagctgagccccgacctgggcaagaacctgcagaccctgctggacgacgagggcgacaacttcgaggaggtgttctacatccacttcaacgtgcactgggacagaaacgacaccaacctgatccccaacggcagcagcatcaccgtgaaccagaccaacaagagagactacgtgagcaagtacatcaactacatcttcaacgacagcgtgaaggccgtgtacgaggagttcagaagaggcttctacaagatgtgcgacgaggacatcatcaagctgttccaccccgaggagctgaaggacgtgatcgtgggcaacaccgactacgactggaagaccttcgagaagaacgccagatacgagcccggctacaacagcagccaccccaccatcgtgatgttctggaaggccttccacaagctgaccctggaggagaagaagaagttcctggtgttcctgaccggcaccgacagactgcagatgaaggacctgaacaacatgaagatcaccttctgctgccccgagagctggaacgagagagaccccatcagagccctgacctgcttcagcgtgctgttcctgcccaagtacagcaccatggagaccgtggaggaggccctgcaggaggccatcaacaacaacagaggcttcggctag

SEQ ID NO: 84234 - DNA, 1854 bp, synthetic construct
  misc_feature 1..1854: note = Description of Artificial Sequence: Synthetic coding sequence
  source 1..1854: mol_type = other DNA
atgggccccaccctggccgtgcccaccccctacggctgcatcggctgcaagctgccccagcccgagtacccccccgccctgatcatcttcatgttctgcgccatggtgatcaccatcgtggtggacctgatcggcaacagcatggtgatcctggccgtgaccaagaacaagaagctgagaaacagcggcaacatcttcgtggtgagcctgagcgtggccgacatgctggtggccatctacccctaccccctgatgctgcacgccatgagcatcggcggctgggacctgagccagctgcagtgccagatggtgggcttcatcaccggcctgagcgtggtgggcagcatcttcaacatcgtggccatcgccatcaacagatactgctacatctgccacagcctgcagtacgagagaatcttcagcgtgagaaacacctgcatctacctggtgatcacctggatcatgaccgtgctggccgtgctgcccaacatgtacatcggcaccatcgagtacgaccccagaacctacacctgcatcttcaactacctgaacaaccccgtgttcaccgtgaccatcgtgtgcatccacttcgtgctgcccctgctgatcgtgggcttctgctacgtgagaatctggaccaaggtgctggccgccagagaccccgccggccagaaccccgacaaccagctggccgaggtgagaaacttcctgaccatgttcgtgatcttcctgctgttcgccgtgtgctggtgccccatcaacgtgctgaccgtgctggtggccgtgagccccaaggagatggccggcaagatccccaactggctgtacctggccgcctacttcatcgcctacttcaacagctgcctgaacgccgtgatctacggcctgctgaacgagaacttcagaagagagtactggaccatcttccacgccatgagacaccccatcatcttcttcagcggcctgatcagcgacatcagagagatgcaggaggccagaaccctggccagagccagagcccacgccagagaccaggccagagagcaggacagagcccacgcctgccccgccgtggaggagacccccatgaacgtgagaaacgtgcccctgcccggcgacgccgccgccggccaccccgacagagccagcggccaccccaagccccacagcagaagcagcagcgcctacagaaagagcgccagcacccaccacaagagcgtgttcagccacagcaaggccgccagcggccacctgaagcccgtgagcggccacagcaagcccgccagcggccaccccaagagcgccaccgtgtaccccaagcccgccagcgtgcacttcaaggccgacagcgtgcacttcaagggcgacagcgtgcacttcaagcccgacagcgtgcacttcaagcccgccagcagcaaccccaagcccatcaccggccaccacgtgagcgccggcagccacagcaagagcgccttcagcgccgccaccagccaccccaagcccaccaccggccacatcaagcccgccaccagccacgccgagcccaccaccgccgactaccccaagcccgccaccaccagccaccccaagcccaccgccgccgacaaccccgagctgagcgccagccactgccccgagatccccgccatcgcccaccccgtgagcgacgacagcgacctgcccgagagcgccagcagccccgccgccggccccaccaagcccgccgccagccagctggagagcgacaccatcgccgacctgcccgaccccaccgtggtgaccaccagcaccaacgactaccacgacgtggtggtgatcgacgtggaggacgaccccgacgagatggccgtgtag

SEQ ID NO: 84235 - DNA, 13125 bp, synthetic construct
  misc_feature 1..13125: note = Description of Artificial Sequence: Synthetic coding sequence
  source 1..13125: mol_type = other DNA
atgaaggtggacagaaccaagctgaagaagacccccaccgaggcccccgccgactgcagagccctgatcgacaagctgaaggtgtgcaacgacgagcagctgctgctggagctgcagcagatcaagacctggaacatcggcaagtgcgagctgtaccactgggtggacctgctggacagattcgacggcatcctggccgacgccggccagaccgtggagaacatgagctggatgctggtgtgcgacagacccgagagagagcagctgaagatgctgctgctggccgtgctgaacttcaccgccctgctgatcgagtacagcttcagcagacacctgtacagcagcatcgagcacctgaccaccctgctggccagcagcgacatgcaggtggtgctggccgtgctgaacctgctgtacgtgttcagcaagagaagcaactacatcaccagactgggcagcgacaagagaacccccctgctgaccagactgcagcacctggccgagagctggggcggcaaggagaacggcttcggcctggccgagtgctgcagagacctgcacatgatgaagtacccccccagcgccaccaccctgcacttcgagttctacgccgaccccggcgccgaggtgaagatcgagaagagaaccaccagcaacaccctgcactacatccacatcgagcagctggacaagatcagcgagagccccagcgagatcatggagagcctgaccaagatgtacagcatccccaaggacaagcagatgctgctgttcacccacatcagactggcccacggcttcagcaaccacagaaagagactgcaggccgtgcaggccagactgcacgccatcagcatcctggtgtacagcaacgccctgcaggagagcgccaacagcatcctgtacaacggcctgatcgaggagctggtggacgtgctgcagatcaccgacaagcagctgatggagatcaaggccgccagcctgagaaccctgaccagcatcgtgcacctggagagaacccccaagctgagcagcatcatcgactgcaccggcaccgccagctaccacggcttcctgcccgtgctggtgagaaactgcatccaggccatgatcgaccccagcatggacccctacccccaccagttcgccaccgccctgttcagcttcctgtaccacctggccagctacgacgccggcggcgaggccctggtgagctgcggcatgatggaggccctgctgaaggtgatcaagttcctgggcgacgagcaggaccagatcaccttcgtgaccagagccgtgagagtggtggacctgatcaccaacctggacatggccgccttccagagccacagcggcctgagcatcttcatctacagactggagcacgaggtggacctgtgcagaaaggagtgccccttcgtgatcaagcccaagatccagagacccaacaccacccaggagggcgaggagatggagaccgacatggacggcgtgcagtgcatcccccagagagccgccctgctgaagagcatgctgaacttcctgaagaaggccatccaggaccccgccttcagcgacggcatcagacacgtgatggacggcagcctgcccaccagcctgaagcacatcatcagcaacgccgagtactacggccccagcctgttcctgctggccaccgaggtggtgaccgtgttcgtgttccaggagcccagcctgctgagcagcctgcaggacaacggcctgaccgacgtgatgctgcacgccctgctgatcaaggacgtgcccgccaccagagaggtgctgggcagcctgcccaacgtgttcagcgccctgtgcctgaacgccagaggcctgcagagcttcgtgcagtgccagcccttcgagagactgttcaaggtgctgctgagccccgactacctgcccgccatgagaagaagaagaagcagcgaccccctgggcgacaccgccagcaacctgggcagcgccgtggacgagctgatgagacaccagcccaccctgaagaccgacgccaccaccgccatcatcaagctgctggaggagatctgcaacctgggcagagaccccaagtacatctgccagaagcccagcatccagaaggccgacggcaccgccaccgcccccccccccagaagcaaccacgccgccgaggaggccagcagcgaggacgaggaggaggaggaggtgcaggccatgcagagcttcaacagcacccagcagaacgagaccgagcccaaccagcaggtggtgggcaccgaggagagaatccccatccccctgatggactacatcctgaacgtgatgaagttcgtggagagcatcctgagcaacaacaccaccgacgaccactgccaggagttcgtgaaccagaagggcctgctgcccctggtgaccatcctgggcctgcccaacctgcccatcgacttccccaccagcgccgcctgccaggccgtggccggcgtgtgcaagagcatcctgaccctgagccacgagcccaaggtgctgcaggagggcctgctgcagctggacagcatcctgagcagcctggagcccctgcacagacccatcgagagccccggcggcagcgtgctgctgagagagctggcctgcgccggcaacgtggccgacgccaccctgagcgcccaggccacccccctgctgcacgccctgaccgccgcccacgcctacatcatgatgttcgtgcacacctgcagagtgggccagagcgagatcagaagcatcagcgtgaaccagtggggcagccagctgggcctgagcgtgctgagcaagctgagccagctgtactgcagcctggtgtgggagagcaccgtgctgctgagcctgtgcacccccaacagcctgcccagcggctgcgagttcggccaggccgacatgcagaagctggtgcccaaggacgagaaggccggcaccacccagggcggcaagagaagcgacggcgagcaggacggcgccgccggcagcatggacgccagcacccagggcctgctggagggcatcggcctggacggcgacaccctggcccccatggagaccgacgagcccaccgccagcgacagcaagggcaagagcaagatcacccccgccatggccgccagaatcaagcagatcaagcccctgctgagcgccagcagcagactgggcagagccctggccgagctgttcggcctgctggtgaagctgtgcgtgggcagccccgtgagacagagaagaagccaccacgccgccagcaccaccaccgcccccacccccgccgccagaagcaccgccagcgccctgaccaagctgctgaccaagggcctgagctggcagccccccccctacacccccacccccagattcagactgaccttcttcatctgcagcgtgggcttcaccagccccatgctgttcgacgagagaaagtacccctaccacctgatgctgcagaagttcctgtgcagcggcggccacaacgccctgttcgagaccttcaactgggccctgagcatgggcggcaaggtgcccgtgagcgagggcctggagcacagcgacctgcccgacggcaccggcgagttcctggacgcctggctgatgctggtggagaagatggtgaaccccaccaccgtgctggagagcccccacagcctgcccgccaagctgcccggcggcgtgcagaacttcccccagttcagcgccctgagattcctggtggtgacccagaaggccgccttcacctgcatcaagaacctgtggaacagaaagcccctgaaggtgtacggcggcagaatggccgagagcatgctggccatcctgtgccacatcctgagaggcgagcccgtgatcagagagagactgagcaaggagaaggagggcagcagaggcgaggaggacaccggccaggaggagggcggcagcagaagagagccccaggtgaaccagcagcagctgcagcagctgatggacatgggcttcaccagagagcacgccatggaggccctgctgaacaccagcaccatggagcaggccaccgagtacctgctgacccaccccccccccatcatgggcggcgtggtgagagacctgagcatgagcgaggaggaccagatgatgagagccatcgccatgagcctgggccaggacatccccatggaccagagagccgagagccccgaggaggtggcctgcagaaaggaggaggaggagagaaaggccagagagaagcaggaggaggaggaggccaagtgcctggagaagttccaggacgccgaccccctggagcaggacgagctgcacaccttcaccgacaccatgctgcccggctgcttccacctgctggacgagctgcccgacaccgtgtacagagtgtgcgacctgatcatgaccgccatcaagagaaacggcgccgactacagagacatgatcctgaagcaggtggtgaaccaggtgtgggaggccgccgacgtgctgatcaaggccgccctgcccctgaccaccagcgacaccaagaccgtgagcgagtggatcagccagatggccaccctgccccaggccagcaacctggccaccagaatcctgctgctgaccctgctgttcgaggagctgaagctgccctgcgcctgggtggtggagagcagcggcatcctgaacgtgctgatcaagctgctggaggtggtgcagccctgcctgcaggccgccaaggagcagaaggaggtgcagacccccaagtggatcacccccgtgctgctgctgatcgacttctacgagaagaccgccatcagcagcaagagaagagcccagatgaccaagtacctgcagagcaacagcaacaactggagatggttcgacgacagaagcggcagatggtgcagctacagcgccagcaacaacagcaccatcgacagcgcctggaagagcggcgagaccagcgtgagattcaccgccggcagaagaagatacaccgtgcagttcaccaccatggtgcaggtgaacgaggagaccggcaacagaagacccgtgatgctgaccctgctgagagtgcccagactgaacaagaacagcaagaacagcaacggccaggagctggagaagaccctggaggagagcaaggagatggacatcaagagaaaggagaacaagggcaacgacacccccctggccctggagagcaccaacaccgagaaggagaccagcctggaggagaccaagatcggcgagatcctgatccagggcctgaccgaggacatggtgaccgtgctgatcagagcctgcgtgagcatgctgggcgtgcccgtggaccccgacaccctgcacgccaccctgagactgtgcctgagactgaccagagaccacaagtacgccatgatgttcgccgagctgaagagcaccagaatgatcctgaacctgacccagagcagcggcttcaacggcttcacccccctggtgaccctgctgctgagacacatcatcgaggacccctgcaccctgagacacaccatggagaaggtggtgagaagcgccgccaccagcggcgccggcagcaccaccagcggcgtggtgagcggcagcctgggcagcagagagatcaactacatcctgagagtgctgggccccgccgcctgcagaaaccccgacatcttcaccgaggtggccaactgctgcatcagaatcgccctgcccgcccccagaggcagcggcaccgccagcgacgacgagttcgagaacctgagaatcaagggccccaacgccgtgcagctggtgaagaccacccccctgaagcccagccccctgcccgtgatccccgacaccatcaaggaggtgatctacgacatgctgaacgccctggccgcctaccacgcccccgaggaggccgacaagagcgaccccaagcccggcgtgatgacccaggaggtgggccagctgctgcaggacatgggcgacgacgtgtaccagcagtacagaagcctgaccagacagagcagcgacttcgacacccagagcggcttcagcatcaacagccaggtgttcgccgccgacggcgccagcaccgagaccagcgccagcggcaccagccagggcgaggccagcacccccgaggagagcagagacggcaagaaggacaaggagggcgacagagccagcgaggagggcaagcagaagggcaagggcagcaagcccctgatgcccaccagcaccatcctgagactgctggccgagctggtgagaagctacgtgggcatcgccaccctgatcgccaactacagctacaccgtgggccagagcgagctgatcaaggaggactgcagcgtgctggccttcgtgctggaccacctgctgccccacacccagaacgccgaggacaaggacacccccgccctggccagactgttcctggccagcctggccgccgccggcagcggcaccgacgcccaggtggccctggtgaacgaggtgaaggccgccctgggcagagccctggccatggccgagagcaccgagaagcacgccagactgcaggccgtgatgtgcatcatcagcaccatcatggagagctgccccagcaccagcagcttctacagcagcgccaccgccaagacccagcacaacggcatgaacaacatcatcagactgttcctgaagaagggcctggtgaacgacctggccagagtgccccacagcctggacctgagcagccccaacatggccaacaccgtgaacgccgccctgaagcccctggagaccctgagcagaatcgtgaaccagcccagcagcctgttcggcagcaagagcgccagcagcaagaacaagagcgagcaggacgcccagggcgccagccaggacagcagcagcaaccagcaggaccccggcgagcccggcgaggccgaggtgcaggaggaggaccacgacgtgacccagaccgaggtggccgacggcgacatcatggacggcgaggccgagaccgacagcgtggtgatcgccggccagcccgaggtgctgagcagccaggagatgcaggtggagaacgagctggaggacctgatcgacgagctgctggagagagacggcggcagcggcaacagcaccatcatcgtgagcagaagcggcgaggacgagagccaggaggacgtgctgatggacgaggcccccagcaacctgagccaggccagcaccctgcaggccaacagagaggacagcatgaacatcctggaccccgaggacgaggaggagcacacccaggaggaggacagcagcggcagcaacgaggacgaggacgacagccaggacgaggaggaggaggaggaggaggacgaggaggacgaccaggaggacgacgagggcgaggagggcgacgaggacgacgacgacgacggcagcgagatggagctggacgaggactaccccgacatgaacgccagccccctggtgagattcgagagattcgacagagaggacgacctgatcatcgagttcgacaacatgttcagcagcgccaccgacatcccccccagccccggcaacatccccaccacccaccccctgatggtgagacacgccgaccacagcagcctgaccctgggcagcggcagcagcaccaccagactgacccagggcatcggcagaagccagagaaccctgagacagctgaccgccaacaccggccacaccatccacgtgcactaccccggcaacagacagcccaacccccccctgatcctgcagagactgctgggccccagcgccgccgccgacatcctgcagctgagcagcagcctgcccctgcagagcagaggcagagccagactgctggtgggcaacgacgacgtgcacatcatcgccagaagcgacgacgagctgctggacgacttcttccacgaccagagcaccgccaccagccaggccggcaccctgagcagcatccccaccgccctgaccagatggaccgaggagtgcaaggtgctggacgccgagagcatgcacgactgcgtgagcgtggtgaaggtgagcatcgtgaaccacctggagttcctgagagacgaggagctggaggagagaagagagaagagaagaaagcagctggccgaggaggagaccaagatcaccgacaagggcaaggaggacaaggagaacagagaccagagcgcccagtgcaccgccagcaagagcaacgacagcaccgagcagaacctgagcgacggcacccccatgcccgacagctaccccaccacccccagcagcaccgacgccgccaccagcgagagcaaggagaccctgggcaccctgcagagcagccagcagcagcccaccctgcccaccccccccgccctgggcgaggtgccccaggagctgcagagccccgccggcgagggcggcagcagcacccagctgctgatgcccgtggagcccgaggagctgggccccaccagacccagcggcgaggccgagaccacccagatggagctgagccccgcccccaccatcaccagcctgagccccgagagagccgaggacagcgacgccctgaccgccgtgagcagccagctggagggcagccccatggacaccagcagcctggccagctgcaccctggaggaggccgtgggcgacaccagcgccgccggcagcagcgagcagcccagagccggcagcagcacccccggcgacgccccccccgccgtggccgaggtgcagggcagaagcgacggcagcggcgagagcgcccagccccccgaggacagcagcccccccgccagcagcgagagcagcagcaccagagacagcgccgtggccatcagcggcgccgacagcagaggcatcctggaggagcccctgcccagcaccagcagcgaggaggaggaccccctggccggcatcagcctgcccgagggcgtggaccccagcttcctggccgccctgcccgacgacatcagaagagaggtgctgcagaaccagctgggcatcagaccccccaccagaaccgcccccagcaccaacagcagcgcccccgccgtggtgggcaaccccggcgtgaccgaggtgagccccgagttcctggccgccctgccccccgccatccaggaggaggtgctggcccagcagagagccgagcagcagagaagagagctggcccagaacgccagcagcgacacccccatggaccccgtgaccttcatccagaccctgcccagcgacctgagaagaagcgtgctggaggacatggaggacagcgtgctggccgtgatgccccccgacatcgccgccgaggcccaggccctgagaagagagcaggaggccagacagagacagctgatgcacgagagactgttcggccacagcagcaccagcgccctgagcgccatcctgagaagccccgccttcaccagcagactgagcggcaacagaggcgtgcagtacaccagactggccgtgcagagaggcggcaccttccagatgggcggcagcagcagccacaacagacccagcggcagcaacgtggacaccctgctgagactgagaggcagactgctgctggaccacgaggccctgagctgcctgctggtgctgctgttcgtggacgagcccaagctgaacaccagcagactgcacagagtgctgagaaacctgtgctaccacgcccagaccagacactgggtgatcagaagcctgctgagcatcctgcagagaagcagcgagagcgagctgtgcatcgagacccccaagctgaccaccagcgaggagaagggcaagaagagcagcaagagctgcggcagcagcagccacgagaacagacccctggacctgctgcacaagatggagagcaagagcagcaaccagctgagctggctgagcgtgagcatggacgccgccctgggctgcagaaccaacatcttccagatccagagaagcggcggcagaaagcacaccgagaagcacgccagcggcggcagcaccgtgcacatccacccccaggccgcccccgtggtgtgcagacacgtgctggacaccctgatccagctggccaaggtgttccccagccacttcacccagcagagaaccaaggagaccaactgcgagagcgacagagagagaggcaacaaggcctgcagcccctgcagcagccagagcagcagcagcggcatctgcaccgacttctgggacctgctggtgaagctggacaacatgaacgtgagcagaaagggcaagaacagcgtgaagagcgtgcccgtgagcgccggcggcgagggcgagaccagcccctacagcctggaggccagccccctgggccagctgatgaacatgctgagccaccccgtgatcagaagaagcagcctgctgaccgagaagctgctgagactgctgagcctgatcagcatcgccctgcccgagaacaaggtgagcgaggcccaggccaacagcggcagcggcgccagcagcaccaccaccgccaccagcaccaccagcaccaccaccaccaccgccgccagcaccacccccaccccccccaccgcccccacccccgtgaccagcgcccccgccctggtggccgccaccgccatcagcaccatcgtggtggccgccagcaccaccgtgaccacccccaccaccgccaccaccaccgtgagcatcagccccaccaccaagggcagcaagagccccgccaaggtgagcgacggcggcagcagcagcaccgacttcaagatggtgagcagcggcctgaccgagaaccagctgcagctgagcgtggaggtgctgaccagccacagctgcagcgaggagggcctggaggacgccgccaacgtgctgctgcagctgagcagaggcgacagcggcaccagagacaccgtgctgaagctgctgctgaacggcgccagacacctgggctacaccctgtgcaagcagatcggcaccctgctggccgagctgagagagtacaacctggagcagcagagaagagcccagtgcgagaccctgagccccgacggcctgcccgaggagcagccccagaccaccaagctgaagggcaagatgcagagcagattcgacatggccgagaacgtggtgatcgtggccagccagaagagacccctgggcggcagagagctgcagctgcccagcatgagcatgctgaccagcaagaccagcacccagaagttcttcctgagagtgctgcaggtgatcatccagctgagagacgacaccagaagagccaacaagaaggccaagcagaccggcagactgggcagcagcggcctgggcagcgccagcagcatccaggccgccgtgagacagctggaggccgaggccgacgccatcatccagatggtgagagagggccagagagccagaagacagcagcaggccgccaccagcgagagcagccagagcgaggccagcgtgagaagagaggagagccccatggacgtggaccagcccagccccagcgcccaggacacccagagcatcgccagcgacggcaccccccagggcgagaaggagaaggaggagagaccccccgagctgcccctgctgagcgagcagctgagcctggacgagctgtgggacatgctgggcgagtgcctgaaggagctggaggagagccacgaccagcacgccgtgctggtgctgcagcccgccgtggaggccttcttcctggtgcacgccaccgagagagagagcaagccccccgtgagagacaccagagagagccagctggcccacatcaaggacgagcccccccccctgagccccgcccccctgacccccgccacccccagcagcctggaccccttcttcagcagagagcccagcagcatgcacatcagcagcagcctgccccccgacacccagaagttcctgagattcgccgagacccacagaaccgtgctgaaccagatcctgagacagagcaccacccacctggccgacggccccttcgccgtgctggtggactacatcagagtgctggacttcgacgtgaagagaaagtacttcagacaggagctggagagactggacgagggcctgagaaaggaggacatggccgtgcacgtgagaagagaccacgtgttcgaggacagctacagagagctgcacagaaagagccccgaggagatgaagaacagactgtacatcgtgttcgagggcgaggagggccaggacgccggcggcctgctgagagagtggtacatgatcatcagcagagagatgttcaaccccatgtacgccctgttcagaaccagccccggcgacagagtgacctacaccatcaaccccagcagccactgcaaccccaaccacctgagctacttcaagttcgtgggcagaatcgtggccaaggccgtgtacgacaacagactgctggagtgctacttcaccagaagcttctacaagcacatcctgggcaagagcgtgagatacaccgacatggagagcgaggactaccacttctaccagggcctggtgtacctgctggagaacgacgtgagcaccctgggctacgacctgaccttcagcaccgaggtgcaggagttcggcgtgtgcgaggtgagagacctgaagcccaacggcgccaacatcctggtgaccgaggagaacaagaaggagtacgtgcacctggtgtgccagatgagaatgaccggcgccatcagaaagcagctggccgccttcctggagggcttctacgagatcatccccaagagactgatcagcatcttcaccgagcaggagctggagctgctgatcagcggcctgcccaccatcgacatcgacgacctgaagagcaacaccgagtaccacaagtaccagagcaacagcatccagatccagtggttctggagagccctgagaagcttcgaccaggccgacagagccaagttcctgcagttcgtgaccggcaccagcaaggtgcccctgcagggcttcgccgccctggagggcatgaacggcatccagaagttccagatccacagagacgacagaagcaccgacagactgcccagcgcccacacctgcttcaaccagctggacctgcccgcctacgagagcttcgagaagctgagacacatgctgctgctggccatccaggagtgcagcgagggcttcggcctggcctag

SEQ ID NO: 84236 - DNA, 13125 bp, synthetic construct; identical to SEQ ID NO: 84235
  misc_feature 1..13125: note = Description of Artificial Sequence: Synthetic coding sequence
  source 1..13125: mol_type = other DNA

SEQ ID NO: 84237 - DNA, 771 bp, synthetic construct
  misc_feature 1..771: note = Description of Artificial Sequence: Synthetic coding sequence
  source 1..771: mol_type = other DNA
atggacccctacccccaccagttcgccaccgccctgttcagcttcctgtaccacctggccagctacgacgccggcggcgaggccctggtgagctgcggcatgatggaggccctgctgaaggtgatcaagttcctgggcgacgagcaggaccagatcaccttcgtgaccagagccgtgagagtggtggacctgatcaccaacctggacatggccgccttccagagccacagcggcctgagcatcttcatctacagactggagcacgaggtggacctgtgcagaaaggagtgccccttcgtgatcaagcccaagatccagagacccaacaccacccaggagggcgaggagatggagaccgacatggacgtggccgacgtggccatggagagcagccccggcagcagcatcagcatggagcacagactggacgtggagctgagagccagcggcagcagcagcagcaccaacatcagcagcggccccagccccggccccagccccggcaccggccccggccccggccccggccccggccccggccccggccccggccccggccccggccccggccccggccccggccccggccccggccccggccccagacccggcgtgcagtgcatcccccagagagccgccctgctgaagagcatgctgaacttcctgaagaaggccatccaggaccccgccttcagcgacggcatcagacacgtgatggacggcagcctgcccaccagcctgaagcacatcatcagcaacgccgagtactag

SEQ ID NO: 84238 - DNA, 687 bp, synthetic construct
  misc_feature 1..687: note = Description of Artificial Sequence: Synthetic coding sequence
  source 1..687: mol_type = other DNA
tgagtgagctgcggcatgatggaggccctgctgaaggtgatcaagttcctgggcgacgagcaggaccagatcaccttcgtgaccagagccgtgagagtggtggacctgatcaccaacctggacatggccgccttccagagccacagcggcctgagcatcttcatctacagactggagcacgaggtggacctgtgcagaaaggagtgccccttcgtgatcaagcccaagatccagagacccaacaccacccaggagggcgaggagatggagaccgacatggacgtggccgacgtggccatggagagcagccccggcagcagcatcagcatggagcacagactggacgtggagctgagagccagcggcagcagcagcagcaccaacatcagcagcggccccagccccggccccagccccggcaccggccccggccccggccccggccccggccccggccccggccccggccccggccccggccccggccccggccccggccccggccccggccccggccccagacccggcgtgcagtgcatcccccagagagccgccctgctgaagagcatgctgaacttcctgaagaaggccatccaggaccccgccttcagcgacggcatcagacacgtgatggacggcagcctgcccaccagcctgaagcacatcatcagcaacgccgagtactag

SEQ ID NO: 84239 - DNA, 3594 bp, synthetic construct
  misc_feature 1..3594: note = Description of Artificial Sequence: Synthetic coding sequence
  source 1..3594: mol_type = other DNA
tgacccagcggcagcaacgtggacaccctgctgagactgagaggcagactgctgctggaccacgaggccctgagctgcctgctggtgctgctgttcgtggacgagcccaagctgaacaccagcagactgcacagagtgctgagaaacctgtgctaccacgcccagaccagacactgggtgatcagaagcctgctgagcatcctgcagagaagcagcgagagcgagctgtgcatcgagacccccaagctgaccaccagcgaggagaagggcaagaagagcagcaagagctgcggcagcagcagccacgagaacagacccctggacctgctgcacaagatggagagcaagagcagcaaccagctgagctggctgagcgtgagcatggacgccgccctgggctgcagaaccaacatcttccagatccagagaagcggcggcagaaagcacaccgagaagcacgccagcggcggcagcaccgtgcacatccacccccaggccgcccccgtggtgtgcagacacgtgctggacaccctgatccagctggccaaggtgttccccagccacttcacccagcagagaaccaaggagaccaactgcgagagcgacagagagagaggcaacaaggcctgcagcccctgcagcagccagagcagcagcagcggcatctgcaccgacttctgggacctgctggtgaagctggacaacatgaacgtgagcagaaagggcaagaacagcgtgaagagcgtgcccgtgagcgccggcggcgagggcgagaccagcccctacagcctggaggccagccccctgggccagctgatgaacatgctgagccaccccgtgatcagaagaagcagcctgctgaccgagaagctgctgagactgctgagcctgatcagcatcgccctgcccgagaacaaggtgagcgaggcccaggccaacagcggcagcggcgccagcagcaccaccaccgccaccagcaccaccagcaccaccaccaccaccgccgccagcaccacccccaccccccccaccgcccccacccccgtgaccagcgcccccgccctggtggccgccaccgccatcagcaccatcgtggtggccgccagcaccaccgtgaccacccccaccaccgccaccaccaccgtgagcatcagccccaccaccaagggcagcaagagccccgccaaggtgagcgacggcggcagcagcagcaccgacttcaagatggtgagcagcggcctgaccgagaaccagctgcagctgagcgtggaggtgctgaccagccacagctgcagcgaggagggcctggaggacgccgccaacgtgctgctgcagctgagcagaggcgacagcggcaccagagacaccgtgctgaagctgctgctgaacggcgccagacacctgggctacaccctgtgcaagcagatcggcaccctgctggccgagctgagagagtacaacctggagcagcagagaagagcccagtgcgagaccctgagccccgacggcctgcccgaggagcagccccagaccaccaagctgaagggcaagatgcagagcagattcgacatggccgagaacgtggtgatcgtggccagccagaagagacccctgggcggcagagagctgcagctgcccagcatgagcatgctgaccagcaagaccagcacccagaagttcttcctgagagtgctgcaggtgatcatccagctgagagacgacaccagaagagccaacaagaaggccaagcagaccggcagactgggcagcagcggcctgggcagcgccagcagcatccaggccgccgtgagacagctggaggccgaggccgacgccatcatccagatgagcgagagcagccagagcgaggccagcgtgagaagagaggagagccccatggacgtggaccagcccagccccagcgcccaggacacccagagcatcgccagcgacggcaccccccagggcgagaaggagaaggaggagagaccccccgagctgcccctgctgagcgagcagctgagcctggacgagctgtgggacatgctgggcgagtgcctgaaggagctggaggagagccacgaccagcacgccgtgctggtgctgcagcccgccgtggaggccttcttcctggtgcacgccaccgagagagagagcaagccccccgtgagagacaccagagagagccagctggcccacatcaaggacgagcccccccccctgagccccgcccccctgacccccgccacccccagcagcctggaccccttcttcagcagagagcccagcagcatgcacatcagcagcagcctgccccccgacacccagaagttcctgagattcgccgagacccacagaaccgtgctgaaccagatcctgagacagagcaccacccacctggccgacggccccttcgccgtgctggtggactacatcagagtgctggacttcgacgtgaagagaaagtacttcagacaggagctggagagactggacgagggcctgagaaaggaggacatggccgtgcacgtgagaagagaccacgtgttcgaggacagctacagagagctgcacagaaagagccccgaggagatgaagaacagactgtacatcgtgttcgagggcgaggagggccaggacgccggcggcctgctgagagagtggtacatgatcatcagcagagagatgttcaaccccatgtacgccctgttcagaaccagccccggcgacagagtgacctacaccatcaaccccagcagccactgcaaccccaaccacctgagctacttcaagttcgtgggcagaatcgtggccaaggccgtgtacgacaacagactgctggagtgctacttcaccagaagcttctacaagcacatcctgggcaagagcgtgagatacaccgacatggagagcgaggactaccacttctaccagggcctggtgtacctgctggagaacgacgtgagcaccctgggctacgacctgaccttcagcaccgaggtgcaggagttcggcgtgtgcgaggtgagagacctgaagcccaacggcgccaacatcctggtgaccgaggagaacaagaaggagtacgtgcacctggtgtgccagatgagaatgaccggcgccatcagaaagcagctggccgccttcctggagggcttctacgagatcatccccaagagactgatcagcatcttcaccgagcaggagctggagctgctgatcagcggcctgcccaccatcgacatcgacgacctgaagagcaacaccgagtaccacaagtaccagagcaacagcatccagatccagtggttctggagagccctgagaagcttcgaccaggccgacagagccaagttcctgcagttcgtgaccggcaccagcaaggtgcccctgcagggcttcgccgccctggagggcatgaacggcatccagaagttccagatccacagagacgacagaagcaccgacagactgcccagcgcccacacctgcttcaaccagctggacctgcccgcctacgagagcttcgagaagctgagacacatgctgctgctggccatccaggagtgcagcgagggcttcggcctggcctag

SEQ ID NO: 84240 - DNA, 10227 bp, synthetic construct
  misc_feature 1..10227: note = Description of Artificial Sequence: Synthetic coding sequence
  source 1..10227: mol_type = other DNA
tgaagcctgcccagcggctgcgagttcggccaggccgacatgcagaagctggtgcccaaggacgagaaggccgacggcgagcaggacggcgccgccggcagcatggacgccagcacccagggcctgctggagggcatcggcctggacggcgacaccctggcccccatggagaccgacgagcccaccgccagcgacagcaagggcaagagcaagatcacccccgccatggccgccagaatcaagcagatcaagcccctgctgagcgccagcagcagactgggcagagccctggccgagctgttcggcctgctggtgaagctgtgcgtgggcagccccgtgagacagagaagaagccaccacgccgccagcaccaccaccgcccccacccccgccgccagaagcaccgccagcgccctgaccaagctgctgaccaagggcctgagctggcagccccccccctacacccccacccccagattcagactgaccttcttcatctgcagcgtgggcttcaccagccccatgctgttcgacgagagaaagtacccctaccacctgatgctgcagaagttcctgtgcagcggcggccacaacgccctgttcgagaccttcaactgggccctgagcatgggcggcaaggtgcccgtgagcgagggcctggagcacagcgacctgcccgacggcaccggcgagttcctggacgcctggctgatgctggtggagaagatggtgaaccccaccaccgtgctggagagcccccacagcctgcccgccaagctgcccggcggcgtgcagaacttcccccagttcagcgccctgagattcctggtggtgacccagaaggccgccttcacctgcatcaagaacctgtggaacagaaagcccctgaaggtgtacggcggcagaatggccgagagcatgctggccatcctgtgccacatcctgagaggcgagcccgtgatcagagagagactgagcaaggagaaggagggcagcagaggcgaggaggacaccggccaggaggagggcggcagcagaagagagccccaggtgaaccagcagcagctgcagcagctgatggacatgggcttcaccagagagcacgccatggaggccctgctgaacaccagcaccatggagcaggccaccgagtacctgctgacccaccccccccccatcatgggcggcgtggtgagagacctgagcatgagcgaggaggaccagatgatgagagccatcgccatgagcctgggccaggacatccccatggaccagagagccgagagccccgaggaggtggcctgcagaaaggaggaggaggagagaaaggccagagagaagcaggaggaggaggaggccaagtgcctggagaagttccaggacgccgaccccctggagcaggacgagctgcacaccttcaccgacaccatgctgcccggctgcttccacctgctggacgagctgcccgacaccgtgtacagagtgtgcgacctgatcatgaccgccatcaagagaaacggcgccgactacagagacatgatcctgaagcaggtggtgaaccaggtgtgggaggccgccgacgtgctgatcaaggccgccctgcccctgaccaccagcgacaccaagaccgtgagcgagtggatcagccagatggccaccctgccccaggccagcaacctggccaccagaatcctgctgctgaccctgctgttcgaggagctgaagctgccctgcgcctgggtggtggagagcagcggcatcctgaacgtgctgatcaagctgctggaggtggtgcagccctgcctgcaggccgccaaggagcagaaggaggtgcagacccccaagtggatcacccccgtgctgctgctgatcgacttctacgagaagaccgccatcagcagcaagagaagagcccagatgaccaagtacctgcagagcaacagcaacaactggagatggttcgacgacagaagcggcagatggtgcagctacagcgccagcaacaacagcaccatcgacagcgcctggaagagcggcgagaccagcgtgagattcaccgccggcagaagaagatacaccgtgcagttcaccaccatggtgcaggtgaacgaggagaccggcaacagaagacccgtgatgctgaccctgctgagagtgcccagactgaacaagaacagcaagaacagcaacggccaggagctggagaagaccctggaggagagcaaggagatggacatcaagagaaaggagaacaagggcaacgacacccccctggccctggagagcaccaacaccgagaaggagaccagcctggaggagaccaagatcggcgagatcctgatccagggcctgaccgaggacatggtgaccgtgctgatcagagcctgcgtgagcatgctgggcgtgcccgtggaccccgacaccctgcacgccaccctgagactgtgcctgagactgaccagagaccacaagtacgccatgatgttcgccgagctgaagagcaccagaatgatcctgaacctgacccagagcagcggcttcaacggcttcacccccctggtgaccctgctgctgagacacatcatcgaggacccctgcaccctgagacacaccatggagaaggtggtgagaagcgccgccaccagcggcgccggcagcaccaccagcggcgtggtgagcggcagcctgggcagcagagagatcaactacatcctgagagtgctgggccccgccgcctgcagaaaccccgacatcttcaccgaggtggccaactgctgcatcagaatcgccctgcccgcccccagaggcagcggcaccgccagcgacgacgagttcgagaacctgagaatcaagggccccaacgccgtgcagctggtgaagaccacccccctgaagcccagccccctgcccgtgatccccgacaccatcaaggaggtgatctacgacatgctgaacgccctggccgcctaccacgcccccgaggaggccgacaagagcgaccccaagcccggcgtgatgacccaggaggtgggccagctgctgcaggacatgggcgacgacgtgtaccagcagtacagaagcctgaccagacagagcagcgacttcgacacccagagcggcttcagcatcaacagccaggtgttcgccgccgacggcgccagcaccgagaccagcgccagcggcaccagccagggcgaggccagcacccccgaggagagcagagacggcaagaaggacaaggagggcgacagagccagcgaggagggcaagcagaagggcaagggcagcaagcccctgatgcccaccagcaccatcctgagactgctggccgagctggtgagaagctacgtgggcatcgccaccctgatcgccaactacagctacaccgtgggccagagcgagctgatcaaggaggactgcagcgtgctggccttcgtgctggaccacctgctgccccacacccagaacgccgaggacaaggacacccccgccctggccagactgttcctggccagcctggccgccgccggcagcggcaccgacgcccaggtggccctggtgaacgaggtgaaggccgccctgggcagagccctggccatggccgagagcaccgagaagcacgccagactgcaggccgtgatgtgcatcatcagcaccatcatggagagctgccccagcaccagcagcttctacagcagcgccaccgccaagacccagcacaacggcatgaacaacatcatcagactgttcctgaagaagggcctggtgaacgacctggccagagtgccccacagcctggacctgagcagccccaacatggccaacaccgtgaacgccgccctgaagcccctggagaccctgagcagaatcgtgaaccagcccagcagcctgttcggcagcaagagcgccagcagcaagaacaagagcgagcaggacgcccagggcgccagccaggacagcagcagcaaccagcaggaccccggcgagcccggcgaggccgaggtgcaggaggaggaccacgacgtgacccagaccgaggtggccgacggcgacatcatggacggcgaggccgagaccgacagcgtggtgatcgccggccagcccgaggtgctgagcagccaggagatgcaggtggagaacgagctggaggacctgatcgacgagctgctggagagagacggcggcagcggcaacagcaccatcatcgtgagcagaagcggcgaggacgagagccaggaggacgtgctgatggacgaggcccccagcaacctgagccaggccagcaccctgcaggccaacagagaggacagcatgaacatcctggaccccgaggacgaggaggagcacacccaggaggaggacagcagcggcagcaacgaggacgaggacgacagccaggacgaggaggaggaggaggaggaggacgaggaggacgaccaggaggacgacgagggcgaggagggcgacgaggacgacgacgacgacggcagcgagatggagctggacgaggactaccccgacatgaacgccagccccctggtgagattcgagagattcgacagagaggacgacctgatcatcgagttcgacaacatgttcagcagcgccaccgacatcccccccagccccggcaacatccccaccacccaccccctgatggtgagacacgccgaccacagcagcctgaccctgggcagcggcagcagcaccaccagactgacccagggcatcggcagaagccagagaaccctgagacagctgaccgccaacaccggccacaccatccacgtgcactaccccggcaacagacagcccaacccccccctgatcctgcagagactgctgggccccagcgccgccgccgacatcctgcagctgagcagcagcctgcccctgcagagcagaggcagagccagactgctggtgggcaacgacgacgtgcacatcatcgccagaagcgacgacgagctgctggacgacttcttccacgaccagagcaccgccaccagccaggccggcaccctgagcagcatccccaccgccctgaccagatggaccgaggagtgcaaggtgctggacgccgagagcatgcacgactgcgtgagcgtggtgaaggtgagcatcgtgaaccacctggagttcctgagagacgaggagctggaggagagaagagagaagagaagaaagcagctggccgaggaggagaccaagatcaccgacaagggcaaggaggacaaggagaacagagaccagagcgcccagtgcaccgccagcaagagcaacgacagcaccgagcagaacctgagcgacggcacccccatgcccgacagctaccccaccacccccagcagcaccgacgccgccaccagcgagagcaaggagaccctgggcaccctgcagagcagccagcagcagcccaccctgcccaccccccccgccctgggcgaggtgccccaggagctgcagagccccgccggcgagggcggcagcagcacccagctgctgatgcccgtggagcccgaggagctgggccccaccagacccagcggcgaggccgagaccacccagatggagctgagccccgcccccaccatcaccagcctgagccccgagagagccgaggacagcgacgccctgaccgccgtgagcagccagctggagggcagccccatggacaccagcagcctggccagctgcaccctggaggaggccgtgggcgacaccagcgccgccggcagcagcgagcagcccagagccggcagcagcacccccggcgacgccccccccgccgtggccgaggtgcagggcagaagcgacggcagcggcgagagcgcccagccccccgaggacagcagcccccccgccagcagcgagagcagcagcaccagagacagcgccgtggccatcagcggcgccgacagcagaggcatcctggaggagcccctgcccagcaccagcagcgaggaggaggaccccctggccggcatcagcctgcccgagggcgtggaccccagcttcctggccgccctgcccgacgacatcagaagagaggtgctgcagaaccagctgggcatcagaccccccaccagaaccgcccccagcaccaacagcagcgcccccgccgtggtgggcaaccccggcgtgaccgaggtgagccccgagttcctggccgccctgccccccgccatccaggaggaggtgctggcccagcagagagccgagcagcagagaagagagctggcccagaacgccagcagcgacacccccatggaccccgtgaccttcatccagaccctgcccagcgacctgagaagaagcgtgctggaggacatggaggacagcgtgctggccgtgatgccccccgacatcgccgccgaggcccaggccctgagaagagagcaggaggccagacagagacagctgatgcacgagagactgttcggccacagcagcaccagcgccctgagcgccatcctgagaagccccgccttcaccagcagactgagcggcaacagaggcgtgcagtacaccagactggccgtgcagagaggcggcaccttccagatgggcggcagcagcagccacaacagacccagcggcagcaacgtggacaccctgctgagactgagaggcagactgctgctggaccacgaggccctgagctgcctgctggtgctgctgttcgtggacgagcccaagctgaacaccagcagactgcacagagtgctgagaaacctgtgctaccacgcccagaccagacactgggtgatcagaagcctgctgagcatcctgcagagaagcagcgagagcgagctgtgcatcgagacccccaagctgaccaccagcgaggagaagggcaagaagagcagcaagagctgcggcagcagcagccacgagaacagacccctggacctgctgcacaagatggagagcaagagcagcaaccagctgagctggctgagcgtgagcatggacgccgccctgggctgcagaaccaacatcttccagatccagagaagcggcggcagaaagcacaccgagaagcacgccagcggcggcagcaccgtgcacatccacccccaggccgcccccgtggtgtgcagacacgtgctggacaccctgatccagctggccaaggtgttccccagccacttcacccagcagagaaccaaggagaccaactgcgagagcgacagagagagaggcaacaaggcctgcagcccctgcagcagccagagcagcagcagcggcatctgcaccgacttctgggacctgctggtgaagctggacaacatgaacgtgagcagaaagggcaagaacagcgtgaagagcgtgcccgtgagcgccggcggcgagggcgagaccagcccctacagcctggaggccagccccctgggccagctgatgaacatgctgagccaccccgtgatcagaagaagcagcctgctgaccgagaagctgctgagactgctgagcctgatcagcatcgccctgcccgagaacaaggtgagcgaggcccaggccaacagcggcagcggcgccagcagcaccaccaccgccaccagcaccaccagcaccaccaccaccaccgccgccagcaccacccccaccccccccaccgcccccacccccgtgaccagcgcccccgccctggtggccgccaccgccatcagcaccatcgtggtggccgccagcaccaccgtgaccacccccaccaccgccaccaccaccgtgagcatcagccccaccaccaagggcagcaagagccccgccaaggtgagcgacggcggcagcagcagcaccgacttcaagatggtgagcagcggcctgaccgagaaccagctgcagctgagcgtggaggtgctgaccagccacagctgcagcgaggagggcctggaggacgccgccaacgtgctgctgcagctgagcagaggcgacagcggcaccagagacaccgtgctgaagctgctgctgaacggcgccagacacctgggctacaccctgtgcaagcagatcggcaccctgctggccgagctgagagagtacaacctggagcagcagagaagagcccagtgcgagaccctgagccccgacggcctgcccgaggagcagccccagaccaccaagctgaagggcaagatgcagagcagattcgacatggccgagaacgtggtgatcgtggccagccagaagagacccctgggcggcagagagctgcagctgcccagcatgagcatgctgaccagcaagaccagcacccagaagttcttcctgagagtgctgcaggtgatcatccagctgagagacgacaccagaagagccaacaagaaggccaagcagaccggcagactgggcagcagcggcctgggcagcgccagcagcatccaggccgccgtgagacagctggaggccgaggccgacgccatcatccagatggtgagagagggccagagagccagaagacagcagcaggccgccaccagcgagagcagccagagcgaggccagcgtgagaagagaggagagccccatggacgtggaccagcccagccccagcgcccaggacacccagagcatcgccagcgacggcaccccccagggcgagaaggagaaggaggagagaccccccgagctgcccctgctgagcgagcagctgagcctggacgagctgtgggacatgctgggcgagtgcctgaaggagctggaggagagccacgaccagcacgccgtgctggtgctgcagcccgccgtggaggccttcttcctggtgcacgccaccgagagagagagcaagccccccgtgagagacaccagagagagccagctggcccacatcaaggacgagcccccccccctgagccccgcccccctgacccccgccacccccagcagcctggaccccttcttcagcagagagcccagcagcatgcacatcagcagcagcctgccccccgacacccagaagttcctgagattcgccgagacccacagaaccgtgctgaaccagatcctgagacagagcaccacccacctggccgacggccccttcgccgtgctggtggactacatcagagtgctggacttcgacgtgaagagaaagtacttcagacaggagctggagagactggacgagggcctgagaaaggaggacatggccgtgcacgtgagaagagaccacgtgttcgaggacagctacagagagctgcacagaaagagccccgaggagatgaagaacagactgtacatcgtgttcgagggcgaggagggccaggacgccggcggcctgctgagagagtggtacatgatcatcagcagagagatgttcaaccccatgtacgccctgttcagaaccagccccggcgacagagtgacctacaccatcaaccccagcagccactgcaaccccaaccacctgagctacttcaagttcgtgggcagaatcgtggccaaggccgtgtacgacaacagactgctggagtgctacttcaccagaagcttctacaagcacatcctgggcaagagcgtgagatacaccgacatggagagcgaggactaccacttctaccagggcctggtgtacctgctggagaacgacgtgagcaccctgggctacgacctgaccttcagcaccgaggtgcaggagttcggcgtgtgcgaggtgagagacctgaagcccaacggcgccaacatcctggtgaccgaggagaacaagaaggagtacgtgcacctggtgtgccagatgagaatgaccggcgccatcagaaagcagctggccgccttcctggagggcttctacgagatcatccccaagagactgatcagcatcttcaccgagcaggagctggagctgctgatcagcggcctgcccaccatcgacatcgacgacctgaagagcaacaccgagtaccacaagtaccagagcaacagcatccagatccagtggttctggagagccctgagaagcttcgaccaggccgacagagccaagttcctgcagttcgtgaccggcaccagcaaggtgcccctgcagggcttcgccgccctggagggcatgaacggcatccagaagttccagatccacagagacgacagaagcaccgacagactgcccagcgcccacacctgcttcaaccagctggacctgcccgcctacgagagcttcgagaagctgagacacatgctgctgctggccatccaggagtgcagcgagggcttcggcctggcctag

SEQ ID NO: 84241 - DNA, 651 bp, synthetic construct
  misc_feature 1..651: note = Description of Artificial Sequence: Synthetic coding sequence
  source 1..651: mol_type = other DNA
atgaaggtggacagaaccaagctgaagaagacccccaccgaggcccccgccgactgcagagccctgatcgacaagctgaaggtgtgcaacgacgagcagctgctgctggagctgcagcagatcaagacctggaacatcggcaagtgcgagctgtaccactgggtggacctgctggacagattcgacggcatcctggccgacgccggccagaccgtggagaacatgagctggatgctggtgtgcgacagacccgagagagagcagctgaagatgctgctgctggccgtgctgaacttcaccgccctgctgatcgagtacagcttcagcagacacctgtacagcagcatcgagcacctgaccaccctgctggccagcagcgacatgcaggtggtgctggccgtgctgaacctgctgtacgtgttcagcaagagaagcaactacatcaccagactgggcagcgacaagagaacccccctgctgaccagactgcagcacctggccgagagctggggcggcaaggagaacggcttcggcctggccgagtgctgcagagacctgcacatgatgaagtacccccccagcgccaccaccctgcacttcgagttctacgccgaccccggcgccgaggtgaagatcgagaagagaaagtag

SEQ ID NO: 84242 - DNA, 282 bp, synthetic construct
  misc_feature 1..282: note = Description of Artificial Sequence: Synthetic coding sequence
  source 1..282: mol_type = other DNA
atgaaggtggacagaaccaagctgaagaagacccccaccgaggcccccgccgactgcagagccctgatcgacaagctgaaggtgtgcaacgacgagcagctgctgctggagctgcagcagatcaagacctggaacatcggcaagtgcgagctgtaccactgggtggacctgctggacagattcgacggcatcctggccgacgccggccagaccgtggagaacatgagctggatgctggtgtgcgacagacccgagagagagcagctgaagatgctgctgtag

SEQ ID NO: 84243 - DNA, 1482 bp, synthetic construct
  misc_feature 1..1482: note = Description of Artificial Sequence: Synthetic coding sequence
  source 1..1482: mol_type = other DNA
atgctgcccagatgggagctggccctgtacctgctggccagcctgggcttccacttctacagcttctacgaggtgtacaaggtgagcagagagcacgaggaggagctggaccaggagttcgagctggagaccgacaccctgttcggcggcctgaagaaggacgccaccgacttcgagtggagcttctggatggagtggggcaagcagtggctggtgtggctgctgctgggccacatggtggtgagccagatggccaccctgctggccagaaagcacagaccctggatcctgatgctgtacggcatgtgggcctgctggtgcgtgctgggcacccccggcgtggccatggtgctgctgcacaccaccatcagcttctgcgtggcccagttcagaagccagctgctgacctggctgtgcagcctgctgctgctgagcaccctgagactgcagggcgtggaggaggtgaagagaagatggtacaagaccgagaacgagtactacctgctgcagttcaccctgaccgtgagatgcctgtactacaccagcttcagcctggagctgtgctggcagcagctgcccgccgccagcaccagctacagcttcccctggatgctggcctacgtgttctactaccccgtgctgcacaacggccccatcctgagcttcagcgagttcatcaagcagatgcagcagcaggagcacgacagcctgaaggccagcctgtgcgtgctggccctgggcctgggcagactgctgtgctggtggtggctggccgagctgatggcccacctgatgtacatgcacgccatctacagcagcatccccctgctggagaccgtgagctgctggaccctgggcggcctggccctggcccaggtgctgttcttctacgtgaagtacctggtgctgttcggcgtgcccgccctgctgatgagactggacggcctgaccccccccgccctgcccagatgcgtgagcaccatgttcagcttcaccggcatgtggagatacttcgacgtgggcctgcacaacttcctgatcagatacgtgtacatccccgtgggcggcagccagcacggcctgctgggcaccctgttcagcaccgccatgaccttcgccttcgtgagctactggcacggcggctacgactacctgtggtgctgggccgccctgaactggctgggcgtgaccgtggagaacggcgtgagaagactggtggagaccccctgcatccaggacagcctggccagatacttcagcccccaggccagaagaagattccacgccgccctggccagctgcagcaccagcatgctgatcctgagcaacctggtgttcctgggcggcaacgaggtgggcaagacctactggaacagaatcttcatccagggctggccctgggtgaccctgagcgtgctgggcttcctgtactgctacagccacgtgggcatcgcctgggcccagacctacgccaccgactag

SEQ ID NO: 84244 - DNA, 1347 bp, synthetic construct
  misc_feature 1..1347: note = Description of Artificial Sequence: Synthetic coding sequence
  source 1..1347: mol_type = other DNA
atgaagttcaccaagagccccgaggacgccaccgacttcgagtggagcttctggatggagtggggcaagcagtggctggtgtggctgctgctgggccacatggtggtgagccagatggccaccctgctggccagaaagcacagaccctggatcctgatgctgtacggcatgtgggcctgctggtgcgtgctgggcacccccggcgtggccatggtgctgctgcacaccaccatcagcttctgcgtggcccagttcagaagccagctgctgacctggctgtgcagcctgctgctgctgagcaccctgagactgcagggcgtggaggaggtgaagagaagatggtacaagaccgagaacgagtactacctgctgcagttcaccctgaccgtgagatgcctgtactacaccagcttcagcctggagctgtgctggcagcagctgcccgccgccagcaccagctacagcttcccctggatgctggcctacgtgttctactaccccgtgctgcacaacggccccatcctgagcttcagcgagttcatcaagcagatgcagcagcaggagcacgacagcctgaaggccagcctgtgcgtgctggccctgggcctgggcagactgctgtgctggtggtggctggccgagctgatggcccacctgatgtacatgcacgccatctacagcagcatccccctgctggagaccgtgagctgctggaccctgggcggcctggccctggcccaggtgctgttcttctacgtgaagtacctggtgctgttcggcgtgcccgccctgctgatgagactggacggcctgaccccccccgccctgcccagatgcgtgagcaccatgttcagcttcaccggcatgtggagatacttcgacgtgggcctgcacaacttcctgatcagatacgtgtacatccccgtgggcggcagccagcacggcctgctgggcaccctgttcagcaccgccatgaccttcgccttcgtgagctactggcacggcggctacgactacctgtggtgctgggccgccctgaactggctgggcgtgaccgtggagaacggcgtgagaagactggtggagaccccctgcatccaggacagcctggccagatacttcagcccccaggccagaagaagattccacgccgccctggccagctgcagcaccagcatgctgatcctgagcaacctggtgttcctgggcggcaacgaggtgggcaagacctactggaacagaatcttcatccagggctggccctgggtgaccctgagcgtgctgggcttcctgtactgctacagccacgtgggcatcgcctgggcccagacctacgccaccgactag

SEQ ID NO: 84245 - DNA, 552 bp, synthetic construct
  misc_feature 1..552: note = Description of Artificial Sequence: Synthetic coding sequence
  source 1..552: mol_type = other DNA
atgagactggacggcctgaccccccccgccctgcccagatgcgtgagcaccatgttcagcttcaccggcatgtggagatacttcgacgtgggcctgcacaacttcctgatcagatacgtgtacatccccgtgggcggcagccagcacggcctgctgggcaccctgttcagcaccgccatgaccttcgccttcgtgagctactggcacggcggctacgactacctgtggtgctgggccgccctgaactggctgggcgtgaccgtggagaacggcgtgagaagactggtggagaccccctgcatccaggacagcctggccagatacttcagcccccaggccagaagaagattccacgccgccctggccagctgcagcaccagcatgctgatcctgagcaacctggtgttcctgggcggcaacgaggtgggcaagacctactggaacagaatcttcatccagggctggccctgggtgaccctgagcgtgctgggcttcctgtactgctacagccacgtgggcatcgcctgggcccagacctacgccaccgactag

SEQ ID NO: 84246 - DNA, 1482 bp, synthetic construct; identical to SEQ ID NO: 84243
  misc_feature 1..1482: note = Description of Artificial Sequence: Synthetic coding sequence
  source 1..1482: mol_type = other DNA

SEQ ID NO: 84247 - DNA, 1557 bp, synthetic construct
  misc_feature 1..1557: note = Description of Artificial Sequence: Synthetic coding sequence
  source 1..1557: mol_type = other DNA
atgctgcccagatgggagctggccctgtacctgctggccagcctgggcttccacttctacagcttctacgaggtgtacaaggtgagcagagagcacgaggaggagctggaccaggagttcgagctggagaccgacaccctgttcggcggcctgaagaaggacgccaccgacttcgagtggagcttctggatggagtggggcaagcagtggctggtgtggctgctgctgggccacatggtggtgagccagatggccaccctgctggccagaaagcacagaccctggatcctgatgctgtacggcatgtgggcctgctggtgcgtgctgggcacccccggcgtggccatggtgctgctgcacaccaccatcagcttctgcgtggcccagttcagaagccagctgctgacctggctgtgcagcctgctgctgctgagcaccctgagactgcagggcgtggaggaggtgaagagaagatggtacaagaccgagaacgagtactacctgctgcagttcaccctgaccgtgagatgcctgtactacaccagcttcagcctggagctgtgctggcagcagctgcccgccgccagcaccagctacagcttcccctggatgctggcctacgtgttctactaccccgtgctgcacaacggccccatcctgagcttcagcgagttcatcaagcagatgcagcagcaggagcacgacagcctgaaggccagcctgtgcgtgctggccctgggcctgggcagactgctgtgctggtggtggctggccgagctgatggcccacctgatgtacatgcacgccatctacagcagcatccccctgctggagaccgtgagctgctggaccctgggcggcctggccctggcccaggtgctgttcttctacgtgaagtacctggtgctgttcggcgtgcccgccctgctgatgagactggacggcctgaccccccccgccctgcccagatgcgtgagcaccatgttcagcttcaccggcatgtggagatacttcgacgtgggcctgcacaacttcctgatcagatacgtgtacatccccgtgggcggcagccagcacggcctgctgggcaccctgttcagcaccgccatgaccttcgccttcgtgagctactggcacggcggctacgactacctgtggtgctgggccgccctgaactggctgggcgtgaccgtggagaacggcgtgagaagactggtggagaccccctgcatccaggacagcctggccagatacttcagcccccaggccagaagaagattccacgccgccctggccagctgcagcaccagcatgctgatcctgagcaacctggtgttcctgggcggcaacgaggtgggcaagacctactggaacagaatcttcatccagggcggcctgttcctgttcttcctgctgaacccctgctgggagaccgccttccagggcttccccgtgttcctgcacttcctgcagaccgaggtgctggccaccttcgtgcccaactacttcagctggaacatctgcatcgagaacaccagcgagctgagcagctactag

SEQ ID NO: 84248 - DNA, 1482 bp, synthetic construct; identical to SEQ ID NO: 84243
  misc_feature 1..1482: note = Description of Artificial Sequence: Synthetic coding sequence
  source 1..1482: mol_type = other DNA

SEQ ID NO: 84249 - DNA, 624 bp, synthetic construct
  misc_feature 1..624: note = Description of Artificial Sequence: Synthetic coding sequence
  source 1..624: mol_type = other DNA
atggagtggggcaagcagtggctggtgtggctgctgctgggccacatggtggtgagccagatggccaccctgctggccagaaagagaagatggtacaagaccgagaacgagtactacctgctgcagttcaccctgaccgtgagatgcctgtactacaccagcttcagcctggagctgtgctggcagcagctgcccgccgccagcaccagctacagcttcccctggatgctggcctacgtgttctactaccccgtgctgcacaacggccccatcctgagcttcagcgagttcatcaagcagatgcagcagcaggagcacgacagcctgaaggccagcctgtgcgtgctggccctgggcctgggcagactgctgtgctggtggtggctggccgagctgatggcccacctgatgtacatgcacgccatctacagcagcatccccctgctggagaccgtgagctgctggaccctgggcggcctggccctggcccaggtgctgttcttctacgtgaagtacctggtgctgttcggcgtgcccgccctgctgatgagactggacggcctgaccccccccgccctgcccagatgcgtgagcaccatgttcagcttcaccggcatgtggtag

SEQ ID NO: 84250 - DNA, 1287 bp, synthetic construct
  misc_feature 1..1287: note = Description of Artificial Sequence: Synthetic coding sequence
  source 1..1287: mol_type = other DNA
atgctgcccagatgggagctggccctgtacctgctggccagcctgggcttccacttctacagcttctacgaggtgtacaaggtgagcagagagcacgaggaggagctggaccaggagttcgagctggagaccgacaccctgttcggcggcctgaagaaggacgccaccgacttcgagtggagcttctggatggagtggggcaagcagtggctggtgtggctgctgctgggccacatggtggtgagccagatggccaccctgctggccagaaagagaagatggtacaagaccgagaacgagtactacctgctgcagttcaccctgaccgtgagatgcctgtactacaccagcttcagcctggagctgtgctggcagcagctgcccgccgccagcaccagctacagcttcccctggatgctggcctacgtgttctactaccccgtgctgcacaacggccccatcctgagcttcagcgagttcatcaagcagatgcagcagcaggagcacgacagcctgaaggccagcctgtgcgtgctggccctgggcctgggcagactgctgtgctggtggtggctggccgagctgatggcccacctgatgtacatgcacgccatctacagcagcatccccctgctggagaccgtgagctgctggaccctgggcggcctggccctggcccaggtgctgttcttctacgtgaagtacctggtgctgttcggcgtgcccgccctgctgatgagactggacggcctgaccccccccgccctgcccagatgcgtgagcaccatgttcagcttcaccggcatgtggagatacttcgacgtgggcctgcacaacttcctgatcagatacgtgtacatccccgtgggcggcagccagcacggcctgctgggcaccctgttcagcaccgccatgaccttcgccttcgtgagctactggcacggcggctacgactacctgtggtgctgggccgccctgaactggctgggcgtgaccgtggagaacggcgtgagaagactggtggagaccccctgcatccaggacagcctggccagatacttcagcccccaggccagaagaagattccacgccgccctggccagctgcagcaccagcatgctgatcctgagcaacctggtgttcctgggcggcaacgaggtgggcaagacctactggaacagaatcttcatccagggctggccctgggtgaccctgagcgtgctgggcttcctgtactgctacagccacgtgggcatcgcctgggcccagacctacgccaccgactag

SEQ ID NO: 84251 - DNA, 1071 bp, synthetic construct
  misc_feature 1..1071: note = Description of Artificial Sequence: Synthetic coding sequence
  source 1..1071: mol_type = other DNA
atgctgcccagatgggagctggccctgtacctgctggccagcctgggcttccacttctacagcttctacgaggtgtacaaggtgagcagagagcacgaggaggagctggaccaggagttcgagctggagaccgacaccctgttcggcggcctgaagaaggacgccaccgacttcgagtggagcttctggatggagtggggcaagcagtggctggtgtggctgctgctgggccacatggtggtgagccagatggccaccctgctggccagaaagatgcagcagcaggagcacgacagcctgaaggccagcctgtgcgtgctggccctgggcctgggcagactgctgtgctggtggtggctggccgagctgatggcccacctgatgtacatgcacgccatctacagcagcatccccctgctggagaccgtgagctgctggaccctgggcggcctggccctggcccaggtgctgttcttctacgtgaagtacctggtgctgttcggcgtgcccgccctgctgatgagactggacggcctgaccccccccgccctgcccagatgcgtgagcaccatgttcagcttcaccggcatgtggagatacttcgacgtgggcctgcacaacttcctgatcagatacgtgtacatccccgtgggcggcagccagcacggcctgctgggcaccctgttcagcaccgccatgaccttcgccttcgtgagctactggcacggcggctacgactacctgtggtgctgggccgccctgaactggctgggcgtgaccgtggagaacggcgtgagaagactggtggagaccccctgcatccaggacagcctggccagatacttcagcccccaggccagaagaagattccacgccgccctggccagctgcagcaccagcatgctgatcctgagcaacctggtgttcctgggcggcaacgaggtgggcaagacctactggaacagaatcttcatccagggctggccctgggtgaccctgagcgtgctgggcttcctgtactgctacagccacgtgggcatcgcctgggcccagacctacgccaccgactag

SEQ ID NO: 84252 - DNA, 1485 bp, synthetic construct
  misc_feature 1..1485: note = Description of Artificial Sequence: Synthetic coding sequence
  source 1..1485: mol_type = other DNA
atgagcctgggcctgggcagcgccgagagaggcgtgctgggcaccagaggcgccagagagagatgcagaagaagaagacccggccagcccggcgagcacgaggaggagctggaccaggagttcgagctggagaccgacaccctgttcggcggcctgaagaaggacgccaccgacttcgagtggagcttctggatggagtggggcaagcagtggctggtgtggctgctgctgggccacatggtggtgagccagatggccaccctgctggccagaaagcacagaccctggatcctgatgctgtacggcatgtgggcctgctggtgcgtgctgggcacccccggcgtggccatggtgctgctgcacaccaccatcagcttctgcgtggcccagttcagaagccagctgctgacctggctgtgcagcctgctgctgctgagcaccctgagactgcagggcgtggaggaggtgaagagaagatggtacaagaccgagaacgagtactacctgctgcagttcaccctgaccgtgagatgcctgtactacaccagcttcagcctggagctgtgctggcagcagctgcccgccgccagcaccagctacagcttcccctggatgctggcctacgtgttctactaccccgtgctgcacaacggccccatcctgagcttcagcgagttcatcaagcagatgcagcagcaggagcacgacagcctgaaggccagcctgtgcgtgctggccctgggcctgggcagactgctgtgctggtggtggctggccgagctgatggcccacctgatgtacatgcacgccatctacagcagcatccccctgctggagaccgtgagctgctggaccctgggcggcctggccctggcccaggtgctgttcttctacgtgaagtacctggtgctgttcggcgtgcccgccctgctgatgagactggacggcctgaccccccccgccctgcccagatgcgtgagcaccatgttcagcttcaccggcatgtggagatacttcgacgtgggcctgcacaacttcctgatcagatacgtgtacatccccgtgggcggcagccagcacggcctgctgggcaccctgttcagcaccgccatgaccttcgccttcgtgagctactggcacggcggctacgactacctgtggtgctgggccgccctgaactggctgggcgtgaccgtggagaacggcgtgagaagactggtggagaccccctgcatccaggacagcctggccagatacttcagcccccaggccagaagaagattccacgccgccctggccagctgcagcaccagcatgctgatcctgagcaacctggtgttcctgggcggcaacgaggtgggcaagacctactggaacagaatcttcatccagggctggccctgggtgaccctgagcgtgctgggcttcctgtactgctacagccacgtgggcatcgcctgggcccagacctacgccaccgactag

SEQ ID NO: 84253 - DNA, 1293 bp, synthetic construct
  misc_feature 1..1293: note = Description of Artificial Sequence: Synthetic coding sequence
  source 1..1293: mol_type = other DNA
atggagtggggcaagcagtggctggtgtggctgctgctgggccacatggtggtgagccagatggccaccctgctggccagaaagcacagaccctggatcctgatgctgtacggcatgtgggcctgctggtgcgtgctgggcacccccggcgtggccatggtgctgctgcacaccaccatcagcttctgcgtggcccagttcagaagccagctgctgacctggctgtgcagcctgctgctgctgagcaccctgagactgcagggcgtggaggaggtgaagagaagatggtacaagaccgagaacgagtactacctgctgcagttcaccctgaccgtgagatgcctgtactacaccagcttcagcctggagctgtgctggcagcagctgcccgccgccagcaccagctacagcttcccctggatgctggcctacgtgttctactaccccgtgctgcacaacggccccatcctgagcttcagcgagttcatcaagcagatgcagcagcaggagcacgacagcctgaaggccagcctgtgcgtgctggccctgggcctgggcagactgctgtgctggtggtggctggccgagctgatggcccacctgatgtacatgcacgccatctacagcagcatccccctgctggagaccgtgagctgctggaccctgggcggcctggccctggcccaggtgctgttcttctacgtgaagtacctggtgctgttcggcgtgcccgccctgctgatgagactggacggcctgaccccccccgccctgcccagatgcgtgagcaccatgttcagcttcaccggcatgtggagatacttcgacgtgggcctgcacaacttcctgatcagatacgtgtacatccccgtgggcggcagccagcacggcctgctgggcaccctgttcagcaccgccatgaccttcgccttcgtgagctactggcacggcggctacgactacctgtggtgctgggccgccctgaactggctgggcgtgaccgtggagaacggcgtgagaagactggtggagaccccctgcatccaggacagcctggccagatacttcagcccccaggccagaagaagattccacgccgccctggccagctgcagcaccagcatgctgatcctgagcaacctggtgttcctgggcggcaacgaggtgggcaagacctactggaacagaatcttcatccagggctggccctgggtgaccctgagcgtgctgggcttcctgtactgctacagccacgtgggcatcgcctgggcccagacctacgccaccgactag

SEQ ID NO: 84254 - DNA, 2103 bp, synthetic construct
  misc_feature 1..2103: note = Description of Artificial Sequence: Synthetic coding sequence
  source 1..2103: mol_type = other DNA
atgctgaagatgctgagcttcaagctgctgctgctggccgtggccctgggcttcttcgagggcgacgccaagttcggcgagagaaacgagggcagcggcgccagaagaagaagatgcctgaacggcaacccccccaagagactgaagagaagagacagaagaatgatgagccagctggagctgctgagcggcggcgagatgctgtgcggcggcttctaccccagactgagctgctgcctgagaagcgacagccccggcctgggcagactggagaacaagatcttcagcgtgaccaacaacaccgagtgcggcaagctgctggaggagatcaagtgcgccctgtgcagcccccacagccagagcctgttccacagccccgagagagaggtgctggagagagacctggtgctgcccctgctgtgcaaggactactgcaaggagttcttctacacctgcagaggccacatccccggcttcctgcagaccaccgccgacgagttctgcttctactacgccagaaaggacggcggcctgtgcttccccgacttccccagaaagcaggtgagaggccccgccagcaactacctggaccagatggaggagtacgacaaggtggaggagatcagcagaaagcacaagcacaactgcttctgcatccaggaggtggtgagcggcctgagacagcccgtgggcgccctgcacagcggcgacggcagccagagactgttcatcctggagaaggagggctacgtgaagatcctgacccccgagggcgagatcttcaaggagccctacctggacatccacaagctggtgcagagcggcatcaagggcggcgacgagagaggcctgctgagcctggccttccaccccaactacaagaagaacggcaagctgtacgtgagctacaccaccaaccaggagagatgggccatcggcccccacgaccacatcctgagagtggtggagtacaccgtgagcagaaagaacccccaccaggtggacctgagaaccgccagagtgttcctggaggtggccgagctgcacagaaagcacctgggcggccagctgctgttcggccccgacggcttcctgtacatcatcctgggcgacggcatgatcaccctggacgacatggaggagatggacggcctgagcgacttcaccggcagcgtgctgagactggacgtggacaccgacatgtgcaacgtgccctacagcatccccagaagcaacccccacttcaacagcaccaaccagccccccgaggtgttcgcccacggcctgcacgaccccggcagatgcgccgtggacagacaccccaccgacatcaacatcaacctgaccatcctgtgcagcgacagcaacggcaagaacagaagcagcgccagaatcctgcagatcatcaagggcaaggactacgagagcgagcccagcctgctggagttcaagcccttcagcaacggccccctggtgggcggcttcgtgtacagaggctgccagagcgagagactgtacggcagctacgtgttcggcgacagaaacggcaacttcctgaccctgcagcagagccccgtgaccaagcagtggcaggagaagcccctgtgcctgggcaccagcggcagctgcagaggctacttcagcggccacatcctgggcttcggcgaggacgagctgggcgaggtgtacatcctgagcagcagcaagagcatgacccagacccacaacggcaagctgtacaagatcgtggaccccaagagacccctgatgcccgaggagtgcagagccaccgtgcagcccgcccagaccctgaccagcgagtgcagcagactgtgcagaaacggctactgcacccccaccggcaagtgctgctgcagccccggctgggagggcgacttctgcagaaccgccaagtgcgagcccgcctgcagacacggcggcgtgtgcgtgagacccaacaagtgcctgtgcaagaagggctacctgggcccccagtgcgagcaggtggacagaaacatcagaagagtgaccagagccggcatcctggaccagatcatcgacatgaccagctacctgctggacctgaccagctacatcgtgtag

SEQ ID NO: 84255 - DNA, 963 bp, synthetic construct
  misc_feature 1..963: note = Description of Artificial Sequence: Synthetic coding sequence
  source 1..963: mol_type = other DNA
atgctgaagatgctgagcttcaagctgctgctgctggccgtggccctgggcttcttcgagggcgacgccaagttcggcgagagaaacgagggcagcggcgccagaagaagaagatgcctgaacggcaacccccccaagagactgaagagaagagacagaagaatgatgagccagctggagctgctgagcggcggcgagatgctgtgcggcggcttctaccccagactgagctgctgcctgagaagcgacagccccggcctgggcagactggagaacaagatcttcagcgtgaccaacaacaccgagtgcggcaagctgctggaggagatcaagtgcgccctgtgcagcccccacagccagagcctgttccacagccccgagagagaggtgctggagagagacctggtgctgcccctgctgtgcaaggactactgcaaggagttcttctacacctgcagaggccacatccccggcttcctgcagaccaccgccgacgagttctgcttctactacgccagaaaggacggcggcctgtgcttccccgacttccccagaaagcaggtgagaggccccgccagcaactacctggaccagatggaggagtacgacaaggtggaggagatcagcagaaagcacaagcacaactgcttctgcatccaggaggtggtgagcggcctgagacagcccgtgggcgccctgcacagcggcgacggcagccagagactgttcatcctggagaaggagggctacgtgaagatcctgacccccgagggcgagatcttcaaggagccctacctggacatccacaagctggtgcagagcggcatcaaggtgggcttcctgaacttcatctacttctgcgccggctacgtgaacttcatcctggtgctgcccagcagcctgaaggtgttcctgtgcaacaagagaaagaacctggccggcgagaacaagggcgccacctag

SEQ ID NO: 84256 - DNA, 4146 bp, synthetic construct
  misc_feature 1..4146: note = Description of Artificial Sequence: Synthetic coding sequence
  source 1..4146: mol_type = other DNA
atggccagccccagagccagcagatggcccccccccctgctgctgctgctgctgcccctgctgctgctgccccccgccgcccccggcaccagagaccccccccccagccccgccagaagagccctgagcctggcccccctggccggcgccggcctggagctgcagctggagagaagacccgagagagagcccccccccaccccccccagagagagaagaggccccgccacccccggccccagctacagagcccccgagcccggcgccgccacccagagaggccccagcggcagagcccccagaggcggcagcgccgacgccgcctggaagcactggcccgagagcaacaccgaggcccacgtggagaacatcaccttctaccagaaccaggaggacttcagcaccgtgagcagcaaggagggcgtgatggtgcagaccagcggcaagagccacgccgccagcgacgcccccgagaacctgaccctgctggccgagaccgccgacgccagaggcagaagcggcagcagcagcagaaccaacttcaccatcctgcccgtgggctacagcctggagatcgccaccgccctgaccagccagagcggcaacctggccagcgagagcctgcacctgcccagcagcagcagcgagttcgacgagagaatcgccgccttccagaccaagagcggcaccgccagcgagatgggcaccgagagagccatgggcctgagcgaggagtggaccgtgcacagccaggaggccaccaccagcgcctggagccccagcttcctgcccgccctggagatgggcgagctgaccacccccagcagaaagagaaacagcagcggccccgacctgagctggctgcacttctacagaaccgccgccagcagccccctgctggacctgagcagcagcagcgagagcaccgagaagctgaacaacagcaccggcctgcagagcagcagcgtgagccagaccaagaccatgcacgtggccaccgtgttcaccgacggcggccccagaaccctgagaagcctgaccgtgagcctgggccccgtgagcaagaccgagggcttccccaaggacagcagaatcgccaccaccagcagcagcgtgctgctgagccccagcgccgtggagagcagaagaaacagcagagtgaccggcaaccccggcgacgaggagttcatcgagcccagcaccgagaacgagttcggcctgaccagcctgagatggcagaacgacagccccaccttcggcgagcaccagctggccagcagcagcgaggtgcagaacggcagccccatgagccagaccgagaccgtgagcagaagcgtggcccccatgagaggcggcgagatcaccgcccactggctgctgaccaacagcaccaccagcgccgacgtgaccggcagcagcgccagctaccccgagggcgtgaacgccagcgtgctgacccagttcagcgacagcaccgtgcagagcggcggcagccacaccgccctgggcgacagaagctacagcgagagcagcagcaccagcagcagcgagagcctgaacagcagcgcccccagaggcgagagaagcatcgccggcatcagctacggccaggtgagaggcaccgccatcgagcagagaaccagcagcgaccacaccgaccacacctacctgagcagcaccttcaccaagggcgagagagccctgctgagcatcaccgacaacagcagcagcagcgacatcgtggagagcagcaccagctacatcaagatcagcaacagcagccacagcgagtacagcagcttcttccacgcccagaccgagagaagcaacatcagcagctacgacggcgagtacgcccagcccagcaccgagagccccgtgctgcacaccagcaacctgcccagctacacccccaccatcaacatgcccaacaccagcgtggtgctggacaccgacgccgagttcgtgagcgacagcagcagcagcagcagcagcagcagcagcagcagcagcagcggcccccccctgcccctgcccagcgtgagccagagccaccacctgttcagcagcatcctgcccagcaccagagccagcgtgcacctgctgaagagcaccagcgacgccagcaccccctggagcagcagccccagccccctgcccgtgagcctgaccaccagcaccagcgcccccctgagcgtgagccagaccaccctgccccagagcagcagcacccccgtgctgcccagagccagagagacccccgtgaccagcttccagaccagcaccatgaccagcttcatgaccatgctgcacagcagccagaccgccgacctgaagagccagagcaccccccaccaggagaaggtgatcaccgagagcaagagccccagcctggtgagcctgcccaccgagagcaccaaggccgtgaccaccaacagccccctgccccccagcctgaccgagagcagcaccgagcagaccctgcccgccaccagcaccaacctggcccagatgagccccaccttcaccaccaccatcctgaagaccagccagcccctgatgaccacccccggcaccctgagcagcaccgccagcctggtgaccggccccatcgccgtgcagaccaccgccggcaagcagctgagcctgacccaccccgagatcctggtgccccagatcagcaccgagggcggcatcagcaccgagagaaacagagtgatcgtggacgccaccaccggcctgatccccctgaccagcgtgcccaccagcgccaaggagatgaccaccaagctgggcgtgaccgccgagtacagccccgccagcagaagcctgggcaccagccccagcccccagaccaccgtggtgagcaccgccgaggacctggcccccaagagcgccaccttcgccgtgcagagcagcacccagagccccaccaccgtgagcagcagcgccagcgtgaacagctgcgccgtgaacccctgcctgcacaacggcgagtgcgtggccgacaacaccagcagaggctaccactgcagatgcccccccagctggcagggcgacgactgcagcgtggacgtgaacgagtgcctgagcaacccctgccccagcaccgccatgtgcaacaacacccagggcagcttcatctgcaagtgccccgtgggctaccagctggagaagggcatctgcaacctggtgagaaccttcgtgaccgagttcaagctgaagagaaccttcctgaacaccaccgtggagaagcacagcgacctgcaggaggtggagaacgagatcaccaagaccctgaacatgtgcttcagcgccctgcccagctacatcagaagcaccgtgcacgccagcagagagagcaacgccgtggtgatcagcctgcagaccaccttcagcctggccagcaacgtgaccctgttcgacctggccgacagaatgcagaagtgcgtgaacagctgcaagagcagcgccgaggtgtgccagctgctgggcagccagagaagaatcttcagagccggcagcctgtgcaagagaaagagccccgagtgcgacaaggacaccagcatctgcaccgacctggacggcgtggccctgtgccagtgcaagagcggctacttccagttcaacaagatggaccacagctgcagagcctgcgaggacggctacagactggagaacgagacctgcatgagctgccccttcggcctgggcggcctgaactgcggcaacccctaccagctgatcaccgtggtgatcgccgccgccggcggcggcctgctgctgatcctgggcatcgccctgatcgtgacctgctgcagaaagaacaagaacgacatcagcaagctgatcttcaagagcggcgacttccagatgagcccctacgccgagtaccccaagaaccccagaagccaggagtggggcagagaggccatcgagatgcacgagaacggcagcaccaagaacctgctgcagatgaccgacgtgtactacagccccaccagcgtgagaaaccccgagctggagagaaacggcctgtaccccgcctacaccggcctgcccggcagcagacacagctgcatcttccccggccagtacaaccccagcttcatcagcgacgagagcagaagaagagactacttctag

SEQ ID NO: 84257 - DNA, 5829 bp, synthetic construct
  misc_feature 1..5829: note = Description of Artificial Sequence: Synthetic coding sequence
  source 1..5829: mol_type = other DNA
atggaggacagaagagccgagaagagctgcgagcaggcctgcgagagcctgaagagacaggactacgagatggccctgaagcactgcaccgaggccctgctgagcctgggccagtacagcatggccgacttcaccggcccctgccccctggagatcgagagaatcaagatcgagagcctgctgtacagaatcgccagcttcctgcagctgaagaactacgtgcaggccgacgaggactgcagacacgtgctgggcgagggcctggccaagggcgaggacgccttcagagccgtgctgtgctgcatgcagctgaagggcaagctgcagcccgtgagcaccatcctggccaagagcctgaccggcgagagcctgaacggcatggtgaccaaggacctgaccagactgaagaccctgctgagcgagaccgagaccgccaccagcaacgccctgagcggctaccacgtggaggacctggacgagggcagctgcaacggctggcacttcagacccccccccagaggcatcaccagcagcgaggagtacaccctgtgcaagagattcctggagcagggcatctgcagatacggcgcccagtgcaccagcgcccacagccaggaggagctggccgagtggcagaagagatacgccagcagactgatcaagctgaagcagcagaacgagaacaagcagctgagcggcagctacatggagaccctgatcgagaagtggatgaacagcctgagccccgagaaggtgctgagcgagtgcatcgagggcgtgaaggtggagcacaaccccgacctgagcgtgaccgtgagcaccaagaagagccaccagacctggaccttcgccctgacctgcaagcccgccagaatgctgtacagagtggccctgctgtacgacgcccacagaccccacttcagcatcatcgccatcagcgccggcgacagcaccacccaggtgagccaggaggtgcccgagaactgccaggagtggatcggcggcaagatggcccagaacggcctggaccactacgtgtacaaggtgggcatcgccttcaacaccgagatcttcggcaccttcagacagaccatcgtgttcgacttcggcctggagcccgtgctgatgcagagagtgatgatcgacgccgccagcaccgaggacctggagtacctgatgcacgccaagcagcagctggtgaccaccgccaagagatgggacagcagcagcaagaccatcatcgacttcgagcccaacgagaccaccgacctggagaagagcctgctgatcagataccagatccccctgagcgccgaccagctgttcacccagagcgtgctggacaagagcctgaccaagagcaactaccagagcagactgcacgacctgctgtacatcgaggagatcgcccagtacaaggagatcagcaagttcaacctgaaggtgcagctgcagatcctggccagcttcatgctgaccggcgtgagcggcggcgccaagtacgcccagaacggccagctgttcggcagattcaagctgaccgagaccctgagcgaggacaccctggccggcagactggtgatgaccaaggtgaacgccgtgtacctgctgcccgtgcccaagcagaagctggtgcagacccagggcaccaaggagaaggtgtacgaggccaccatcgaggagaagaccaaggagtacatcttcctgagactgagcagagagtgctgcgaggagctgaacctgagacccgactgcgacacccaggtggagctgcagttccagctgaacagactgcccctgtgcgagatgcactacgccctggacagaatcaaggacaacggcgtgctgttccccgacatcagcatgacccccaccatcccctggagccccaacagacagtgggacgagcagctggaccccagactgaacgccaagcagaaggaggccgtgctggccatcaccacccccctggccatccagctgccccccgtgctgatcatcggcccctacggcaccggcaagaccttcaccctggcccaggccgtgaagcacatcctgcagcagcaggagaccagaatcctgatctgcacccacagcaacagcgccgccgacctgtacatcaaggactacctgcacccctacgtggaggccggcaacccccaggccagacccctgagagtgtacttcagaaacagatgggtgaagaccgtgcaccccgtggtgcaccagtactgcctgatcagcagcgcccacagcaccttccagatgccccagaaggaggacatcctgaagcacagagtggtggtggtgaccctgaacaccagccagtacctgtgccagctggacctggagcccggcttcttcacccacatcctgctggacgaggccgcccaggccatggagtgcgagaccatcatgcccctggccctggccacccagaacaccagaatcgtgctggccggcgaccacatgcagctgagccccttcgtgtacagcgagttcgccagagagagaaacctgcacgtgagcctgctggacagactgtacgagcactaccccgccgagttcccctgcagaatcctgctgtgcgagaactacagaagccacgaggccatcatcaactacaccagcgagctgttctacgagggcaagctgatggccagcggcaagcagcccgcccacaaggacttctaccccctgaccttcttcaccgccagaggcgaggacgtgcaggagaagaacagcaccgccttctacaacaacgccgaggtgttcgaggtggtggagagagtggaggagctgagaagaaagtggcccgtggcctggggcaagctggacgacggcagcatcggcgtggtgaccccctacgccgaccaggtgttcagaatcagagccgagctgagaaagaagagactgagcgacgtgaacgtggagagagtgctgaacgtgcagggcaagcagttcagagtgctgttcctgagcaccgtgagaaccagacacacctgcaagcacaagcagacccccatcaagaagaaggagcagctgctggaggacagcaccgaggacctggactacggcttcctgagcaactacaagctgctgaacaccgccatcaccagagcccagagcctggtggccgtggtgggcgaccccatcgccctgtgcagcatcggcagatgcagaaagttctgggagagattcatcgccctgtgccacgagaacagcagcctgcacggcatcaccttcgagcagatcaaggcccagctggaggccctggagctgaagaagacctacgtgctgaaccccctggcccccgagttcatccccagagccctgagactgcagcacagcggcagcaccaacaagcagcagcagagcccccccaagggcaagagcctgcaccacacccagaacgaccacttccagaacgacggcatcgtgcagcccaaccccagcgtgctgatcggcaaccccatcagagcctacaccccccccccccccctgggcccccaccccaacctgggcaagagccccagccccgtgcagagaatcgacccccacaccggcaccagcatcctgtacgtgcccgccgtgtacggcggcaacgtggtgatgagcgtgcccctgcccgtgccctggaccggctaccagggcagattcgccgtggaccccagaatcatcacccaccaggccgccatggcctacaacatgaacctgctgcagacccacggcagaggcagccccatcccctacggcctgggccaccacccccccgtgaccatcggccagccccagaaccagcaccaggagaaggaccagcacgagcagaacagaaacggcaagagcgacaccaacaacagcggccccgagatcaacaagatcagaacccccgagaagaagcccaccgagcccaagcaggtggacctggagagcaacccccagaacagaagccccgagagcagacccagcgtggtgtaccccagcaccaagttccccagaaaggacaacctgaaccccagacacatcaacctgcccctgcccgccccccacgcccagtacgccatccccaacagacacttccaccccctgccccagctgcccagaccccccttccccatcccccagcagcacaccctgctgaaccagcagcagaacaacctgcccgagcagcccaaccagatccccccccagcccaaccaggtggtgcagcagcagagccagctgaaccagcagccccagcagccccccccccagctgagccccgcctaccaggccggccccaacaacgccttcttcaacagcgccgtggcccacagaccccagagcccccccgccgaggccgtgatccccgagcagcagcccccccccatgctgcaggagggccacagccccctgagagccatcgcccagcccggccccatcctgcccagccacctgaacagcttcatcgacgagaaccccagcggcctgcccatcggcgaggccctggacagaatccacggcagcgtggccctggagaccctgagacagcagcaggccagattccagcagtggagcgagcaccacgccttcctgagccagggcagcgccccctacccccaccaccaccacccccacctgcagcacctgccccagccccccctgggcctgcaccagccccccgtgagagccgactggaagctgaccagcagcgccgaggacgaggtggagaccacctacagcagattccaggacctgatcagagagctgagccacagagaccagagcgagaccagagagctggccgagatgccccccccccagagcagactgctgcagtacagacaggtgcagagcagaagcccccccgccgtgcccagcccccccagcagcaccgaccacagcagccacttcagcaacttcaacgacaacagcagagacatcgaggtggccagcaaccccgccttcccccagagactgcccccccagatcttcaacagccccttcagcctgcccagcgagcacctggcccccccccccctgaagtacctggcccccgacggcgcctggaccttcgccaacctgcagcagaaccacctgatgggccccggcttcccctacggcctgccccccctgccccacagacccccccagaaccccttcgtgcagatccagaaccaccagcacgccatcggccaggagcccttccaccccctgagcagcagaaccgtgagcagcagcagcctgcccagcctggaggagtacgagcccagaggccccggcagacccctgtaccagagaagaatcagcagcagcagcgtgcagccctgcagcgaggaggtgagcaccccccaggacagcctggcccagtgcaaggagctgcaggaccacagcaaccagagcagcttcaacttcagcagccccgagagctgggtgaacaccaccagcagcaccccctaccagaacatcccctgcaacggcagcagcagaaccgcccagcccagagagctgatcgccccccccaagaccgtgaagccccccgaggaccagctgaagagcgagaacctggaggtgagcagcagcttcaactacagcgtgctgcagcacctgggccagttcccccccctgatgcccaacaagcagatcgccgagagcgccaacagcagcagcccccagagcagcgccggcggcaagcccgccatgagctacgccagcgccctgagagccccccccaagcccagacccccccccgagcaggccaagaagagcagcgaccccctgagcctgttccaggagctgagcctgggcagcagcagcggcagcaacggcttctacagctacttcaagtag

SEQ ID NO: 84258 - DNA, 1365 bp, synthetic construct
  misc_feature 1..1365: note = Description of Artificial Sequence: Synthetic coding sequence
  source 1..1365: mol_type = other DNA
atggaggacagaagagccgagaagagctgcgagcaggcctgcgagagcctgaagagacaggactacgagatggccctgaagcactgcaccgaggccctgctgagcctgggccagtacagcatggccgacttcaccggcccctgccccctggagatcgagagaatcaagatcgagagcctgctgtacagaatcgccagcttcctgcagctgaagaactacgtgcaggccgacgaggactgcagacacgtgctgggcgagggcctggccaagggcgaggacgccttcagagccgtgctgtgctgcatgcagctgaagggcaagctgcagcccgtgagcaccatcctggccaagagcctgaccggcgagagcctgaacggcatggtgaccaaggacctgaccagactgaagaccctgctgagcgagaccgagaccgccaccagcaacgccctgagcggctaccacgtggaggacctggacgagggcagctgcaacggctggcacttcagacccccccccagaggcatcaccagcagcgaggagtacaccctgtgcaagagattcctggagcagggcatctgcagatacggcgcccagtgcaccagcgcccacagccaggaggagctggccgagtggcagaagagatacgccagcagactgatcaagctgaagcagcagaacgagaacaagcagctgagcggcagctacatggagaccctgatcgagaagtggatgaacagcctgagccccgagaaggtgctgagcgagtgcatcgagggcgtgaaggtggagcacaaccccgacctgagcgtgaccgtgagcaccaagaagagccaccagacctggaccttcgccctgacctgcaagcccgccagaatgctgtacagagtggccctgctgtacgacgcccacagaccccacttcagcatcatcgccatcagcgccggcgacagcaccacccaggtgagccaggaggtgcccgagaactgccaggagtggatcggcggcaagatggcccagaacggcctggaccactacgtgtacaaggtgggcatcgccttcaacaccgagatcttcggcaccttcagacagaccatcgtgttcgacttcggcctggagcccgtgctgatgcagagagtgatgatcgacgccgccagcaccgaggacctggagtacctgatgcacgccaagcagcagctggtgaccaccgccaagagatgggacagcagcagcaagaccatcatcgacttcgagcccaacgagaccaccgacctggagaagagcctgctgatcagataccagatccccctgagcgagaagaagaagaagaagaagaagaagaagaagaagaagaagaagaagaagtag

SEQ ID NO: 84259 - DNA, 294 bp, synthetic construct
  misc_feature 1..294: note = Description of Artificial Sequence: Synthetic coding sequence
  source 1..294: mol_type = other DNA
atgcccgccgagagacccgccggcagcggcggcagcgaggcccccgccatggtggagcagctggacaccgccgtgatcacccccgccatgctggaggaggaggagcagctggaggccgccggcctggagagagagagaaagatgctggagaaggccagaatgagctgggacagagagagcaccgagatcagatacagaagactgcagcacctgctggagaagagcaacatctacagcaagttcctgctgaccaagatggagcagcagcagctggagaccgtgatgaagatctag

SEQ ID NO: 84260 - DNA, 2517 bp, synthetic construct
  misc_feature 1..2517: note = Description of Artificial Sequence: Synthetic coding sequence
  source 1..2517: mol_type = other DNA
atgcccgccgagagacccgccggcagcggcggcagcgaggcccccgccatggtggagcagctggacaccgccgtgatcacccccgccatgctggaggaggaggagcagctggaggccgccggcctggagagagagagaaagatgctggagaaggccagaatgagctgggacagagagagcaccgagatcagatacagaagactgcagcacctgctggagaagagcaacatctacagcaagttcctgctgaccaagatggagcagcagcagctggaggagcagaagaagaaggagaagctggagagaaagaaggagagcctgaaggtgaagaagggcaagaacagcatcgacgccagcgaggagaagcccgtgatgagaaagaagagaggcagagaggacgagagctacaacatcagcgaggtgatgagcaaggaggagatcctgagcgtggccaagaagaacaagaaggagaacgaggacgagaacagcagcagcaccaacctgtgcgtggaggacctgcagaagaacaaggacagcaacagcatcatcaaggacagactgagcgagaccgtgagacagaacaccaagttcttcttcgaccccgtgagaaagtgcaacggccagcccgtgcccttccagcagcccaagcacttcaccggcggcgtgatgagatggtaccaggtggagggcatggagtggctgagaatgctgtgggagaacggcatcaacggcatcctggccgacgagatgggcctgggcaagaccgtgcagtgcatcgccaccatcgccctgatgatccagagaggcgtgcccggccccttcctggtgtgcggccccctgagcaccctgcccaactggatggccgagttcaagagattcacccccgacatccccaccatgctgtaccacggcacccaggaggagagacagaagctggtgagaaacatctacaagagaaagggcaccctgcagatccaccccgtggtgatcaccagcttcgagatcgccatgagagacagaaacgccctgcagcactgctactggaagtacctgatcgtggacgagggccacagaatcaagaacatgaagtgcagactgatcagagagctgaagagattcaacgccgacaacaagctgctgctgaccggcacccccctgcagaacaacctgagcgagctgtggagcctgctgaacttcctgctgcccgacgtgttcgacgacctgaagagcttcgagagctggttcgacatcaccagcctgagcgagaccgccgaggacatcatcgccaaggagagagagcagaacgtgctgcacatgctgcaccagatcctgacccccttcctgctgagaagactgaagagcgacgtggccctggaggtgccccccaagagagaggtggtggtgtacgcccccctgagcaagaagcaggagatcttctacaccgccatcgtgaacagaaccatcgccaacatgttcggcagcagcgagaaggagaccatcgagctgagccccaccggcagacccaagagaagaaccagaaagagcatcaactacagcaagatcgacgacttccccaacgagctggagaagctgatcagccagatccagcccgaggtggacagagagagagccgtggtggaggtgaacatccccgtggagagcgaggtgaacctgaagctgcagaacatcatgatgctgctgagaaagtgctgcaaccacccctacctgatcgagtaccccatcgaccccgtgacccaggagttcaagatcgacgaggagctggtgaccaacagcggcaagttcctgatcctggacagaatgctgcccgagctgaagaagagaggccacaaggtgctgctgttcagccagatgaccagcatgctggacatcctgatggactactgccacctgagagacttcaacttcagcagactggacggcagcatgagctacagcgagagagagaagaacatgcacagcttcaacaccgaccccgaggtgttcatcttcctggtgagcaccagagccggcggcctgggcatcaacctgaccgccgccgacaccgtgatcatctacgacagcgactggaacccccagagcgacctgcaggcccaggacagatgccacagaatcggccagaccaagcccgtggtggtgtacagactggtgaccgccaacaccatcgaccagaagatcgtggagagagccgccgccaagagaaagctggagaagctgatcatccacaagaaccacttcaagggcggccagagcggcctgaacctgagcaagaacttcctggaccccaaggagctgatggagctgctgaagagcagagactacgagagagagatcaagggcagcagagagaaggtgatcagcgacaaggacctggagctgctgctggacagaagcgacctgatcgaccagatgaacgccagcggccccatcaaggagaagatgggcatcttcaagatcctggagaacagcgaggacagcagccccgagtgcctgttctag

SEQ ID NO: 84261 - DNA, 2655 bp, synthetic construct
  misc_feature 1..2655: note = Description of Artificial Sequence: Synthetic coding sequence
  source 1..2655: mol_type = other DNA
atgcccgccgagagacccgccggcagcggcggcagcgaggcccccgccatggtggagcagctggacaccgccgtgatcacccccgccatgctggaggaggaggagcagctggaggccgccggcctggagagagagagaaagatgctggagaaggccagaatgagctgggacagagagagcaccgagatcagatacagaagactgcagcacctgctggagaagagcaacatctacagcaagttcctgctgaccaagatggagcagcagcagctggaggagcagaagaagaaggagaagctggagagaaagaaggagagcctgaaggtgaagaagggcaagaacagcatcgacgccagcgaggagaagcccgtgatgagaaagaagagaggcagagaggacgagagctacaacatcagcgaggtgatgagcaaggaggagatcctgagcgtggccaagaagaacaagaaggagaacgaggacgagaacagcagcagcaccaacctgtgcgtggaggacctgcagaagaacaaggacagcaacagcatcatcaaggacagactgagcgagaccgtgagacagaacaccaagttcttcttcgaccccgtgagaaagtgcaacggccagcccgtgcccttccagcagcccaagcacttcaccggcggcgtgatgagatggtaccaggtggagggcatggagtggctgagaatgctgtgggagaacggcatcaacggcatcctggccgacgagatgggcctgggcaagaccgtgcagtgcatcgccaccatcgccctgatgatccagagaggcgtgcccggccccttcctggtgtgcggccccctgagcaccctgcccaactggatggccgagttcaagagattcacccccgacatccccaccatgctgtaccacggcacccaggaggagagacagaagctggtgagaaacatctacaagagaaagggcaccctgcagatccaccccgtggtgatcaccagcttcgagatcgccatgagagacagaaacgccctgcagcactgctactggaagtacctgatcgtggacgagggccacagaatcaagaacatgaagtgcagactgatcagagagctgaagagattcaacgccgacaacaagctgctgctgaccggcacccccctgcagaacaacctgagcgagctgtggagcctgctgaacttcctgctgcccgacgtgttcgacgacctgaagagcttcgagagctggttcgacatcaccagcctgagcgagaccgccgaggacatcatcgccaaggagagagagcagaacgtgctgcacatgctgcaccaggagagaatccccagaatgtacgtgagcgagttcaccgacgagggcttcttcgagggcaagctgcccagcagaaaggacctgtacgacatcagaccctacgagaacacctacctgctgaagctgcacaccaacttcgagatcctgacccccttcctgctgagaagactgaagagcgacgtggccctggaggtgccccccaagagagaggtggtggtgtacgcccccctgagcaagaagcaggagatcttctacaccgccatcgtgaacagaaccatcgccaacatgttcggcagcagcgagaaggagaccatcgagctgagccccaccggcagacccaagagaagaaccagaaagagcatcaactacagcaagatcgacgacttccccaacgagctggagaagctgatcagccagatccagcccgaggtggacagagagagagccgtggtggaggtgaacatccccgtggagagcgaggtgaacctgaagctgcagaacatcatgatgctgctgagaaagtgctgcaaccacccctacctgatcgagtaccccatcgaccccgtgacccaggagttcaagatcgacgaggagctggtgaccaacagcggcaagttcctgatcctggacagaatgctgcccgagctgaagaagagaggccacaaggtgctgctgttcagccagatgaccagcatgctggacatcctgatggactactgccacctgagagacttcaacttcagcagactggacggcagcatgagctacagcgagagagagaagaacatgcacagcttcaacaccgaccccgaggtgttcatcttcctggtgagcaccagagccggcggcctgggcatcaacctgaccgccgccgacaccgtgatcatctacgacagcgactggaacccccagagcgacctgcaggcccaggacagatgccacagaatcggccagaccaagcccgtggtggtgtacagactggtgaccgccaacaccatcgaccagaagatcgtggagagagccgccgccaagagaaagctggagaagctgatcatccacaagaaccacttcaagggcggccagagcggcctgaacctgagcaagaacttcctggaccccaaggagctgatggagctgctgaagagcagagactacgagagagagatcaagggcagcagagagaaggtgatcagcgacaaggacctggagctgctgctggacagaagcgacctgatcgaccagatgaacgccagcggccccatcaaggagaagatgggcatcttcaagatcctggagaacagcgaggacagcagccccgagtgcctgttctag

SEQ ID NO: 84262 - DNA, 390 bp, synthetic construct
  misc_feature 1..390: note = Description of Artificial Sequence: Synthetic coding sequence
  source 1..390: mol_type = other DNA
atgcccgccgagagacccgccggcagcggcggcagcgaggcccccgccatggtggagcagctggacaccgccgtgatcacccccgccatgctggaggaggaggagcagctggaggccgccggcctggagagagagagaaagatgctggagaaggccagaatgagctgggacagagagagcaccgagatcagatacagaagactgcagcacctgctggagaagagcaacatctacagcaagttcctgctgaccaagatggagcagcagcagctggaggagcagaagaagaaggagaagctggagagaaagaaggagagcctgaaggtgaagaagggcaagaacagcatcgacgccagcgaggagaagcccggcaacttcgtgtgcggctag

SEQ ID NO: 84263 - DNA, 948 bp, synthetic construct
  misc_feature 1..948: note = Description of Artificial Sequence: Synthetic coding sequence
  source 1..948: mol_type = other DNA
atgcccgccgagagacccgccggcagcggcggcagcgaggcccccgccatggtggagcagctggacaccgccgtgatcacccccgccatgctggaggaggaggagcagctggaggccgccggcctggagagagagagaaagatgctggagaaggccagaatgagctgggacagagagagcaccgagatcagatacagaagactgcagcacctgctggagaagagcaacatctacagcaagttcctgctgaccaagatggagcagcagcagctggaggagcagaagaagaaggagaagctggagagaaagaaggagagcctgaaggtgaagaagggcaagaacagcatcgacgccagcgaggagaagcccgtgatgagaaagaagagaggcagagaggacgagagctacaacatcagcgaggtgatgagcaaggaggagatcctgagcgtggccaagaagaacaagaaggagaacgaggacgagaacagcagcagcaccaacctgtgcgtggaggacctgcagaagaacaaggacagcaacagcatcatcaaggacagactgagcgagaccgtgagacagaacaccaagttcttcttcgaccccgtgagaaagtgcaacggccagcccgtgcccttccagcagcccaagcacttcaccggcggcgtgatgagatggtaccaggtggagggcatggagtggctgagaatgctgtgggagaacggcatcaacggcatcctggccgacgagatgggcctgggcaagaccgtgcagtgcatcgccaccatcgccctgatgatccagagaggcgtgcccggccccttcctggtgtgcggccccctgagcaccctgcccaactggatggccgagttcaagagattcacccccgacatccccaccatgctgtaccacggcacccaggaggagagacagaagctgatctacctgtag

SEQ ID NO: 84264 - DNA, 2223 bp, synthetic construct
  misc_feature 1..2223: note = Description of Artificial Sequence: Synthetic coding sequence
  source 1..2223: mol_type = other DNA
atgcccgccgagagacccgccggcagcggcggcagcgaggcccccgccatggtggagcagctggacaccgccgtgatcacccccgccatgctggaggaggaggagcagctggaggccgccggcctggagagagagagaaagatgctggagaaggccagaatgagctgggacagagagagcaccgagatcagatacagaagactgcagcacctgctggagaagagcaacatctacagcaagttcctgctgaccaagatggagcagcagcagctggaggagcagaagaagaaggagaagctggagagaaagaaggagagcctgaaggtgaagaagggcaagaacagcatcgacgccagcgaggagaagcccgtgatgagaaagaagagaggcagagaggacgagagctacaacatcagcgaggtgatgagcaaggaggagatcctgagcgtggccaagaagaacaagaaggagaacgaggacgagaacagcagcagcaccaacctgtgcgtggaggacctgcagaagaacaaggacagcaacagcatcatcaaggacagactgagcgagaccgtgagacagaacaccaagttcttcttcgaccccgtgagaaagtgcaacggccagcccgtgcccttccagcagcccaagcacttcaccggcggcgtgatgagatggtaccaggtggagggcatggagtggctgagaatgctgtgggagaacggcatcaacggcatcctggccgacgagatgggcctgggcaagaccgtgcagtgcatcgccaccatcgccctgatgatccagagaggcgtgcccggccccttcctggtgtgcggccccctgagcaccctgcccaactggatggccgagttcaagagattcacccccgacatccccaccatgctgtaccacggcacccaggaggagagacagaagctggtgagaaacatctacaagagaaagggcaccctgcagatccaccccgtggtgatcaccagcttcgagatcgccatgagagacagaaacgccctgcagatcctgacccccttcctgctgagaagactgaagagcgacgtggccctggaggtgccccccaagagagaggtggtggtgtacgcccccctgagcaagaagcaggagatcttctacaccgccatcgtgaacagaaccatcgccaacatgttcggcagcagcgagaaggagaccatcgagctgagccccaccggcagacccaagagaagaaccagaaagagcatcaactacagcaagatcgacgacttccccaacgagctggagaagctgatcagccagatccagcccgaggtggacagagagagagccgtggtggaggtgaacatccccgtggagagcgaggtgaacctgaagctgcagaacatcatgatgctgctgagaaagtgctgcaaccacccctacctgatcgagtaccccatcgaccccgtgacccaggagttcaagatcgacgaggagctggtgaccaacagcggcaagttcctgatcctggacagaatgctgcccgagctgaagaagagaggccacaaggtgctgctgttcagccagatgaccagcatgctggacatcctgatggactactgccacctgagagacttcaacttcagcagactggacggcagcatgagctacagcgagagagagaagaacatgcacagcttcaacaccgaccccgaggtgttcatcttcctggtgagcaccagagccggcggcctgggcatcaacctgaccgccgccgacaccgtgatcatctacgacagcgactggaacccccagagcgacctgcaggcccaggacagatgccacagaatcggccagaccaagcccgtggtggtgtacagactggtgaccgccaacaccatcgaccagaagatcgtggagagagccgccgccaagagaaagctggagaagctgatcatccacaagaaccacttcaagggcggccagagcggcctgaacctgagcaagaacttcctggaccccaaggagctgatggagctgctgaagagcagagactacgagagagagatcaagggcagcagagagaaggtgatcagcgacaaggacctggagctgctgctggacagaagcgacctgatcgaccagatgaacgccagcggccccatcaaggagaagatgggcatcttcaagatcctggagaacagcgaggacagcagccccgagtgcctgttctag

SEQ ID NO: 84265 - DNA, 579 bp, synthetic construct
  misc_feature 1..579: note = Description of Artificial Sequence: Synthetic coding sequence
  source 1..579: mol_type = other DNA
atggtggagcagctggacaccgccgtgatcacccccgccatgctggaggaggaggagcagctggaggccgccggcctggagagagagagaaagatgctggagaaggccagaatgagctgggacagagagagcaccgagatcagatacagaagactgcagcacctgctggagaagagcaacatctacagcaagttcctgctgaccaagatggagcagcagcagctggaggagcagaagaagaaggagaagctggagagaaagaaggagagcctgaaggtgaagaagggcaagaacagcatcgacgccagcgaggagaagcccgtgatgagaaagaagagaggcagagaggacgagagctacaacatcagcgaggtgatgagcaaggaggagatcctgagcgtggccaagaagaacaagaaggagaacgaggacgagaacagcagcagcaccaacctgtgcgtggaggacctgcagaagaacaaggacagcaacagcatcatcaaggacagactgagcgagaccgtgagacagaacaccaagttcttcttcgaccccgtgagaaagtgcaacggccagtag

SEQ ID NO: 84266 - DNA, 1461 bp, synthetic construct
  misc_feature 1..1461: note = Description of Artificial Sequence: Synthetic coding sequence
  source 1..1461: mol_type = other DNA
atgtggaagagcgtggtgggccacgacgtgagcgtgagcgtggagacccagggcgacgactgggacaccgaccccgacttcgtgaacgacatcagcgagaaggagcagagatggggcgccaagaccatcgagggcagcggcagaaccgagcacatcaacatccaccagctgagaaacaaggtgagcgaggagcacgacgtgctgagaaagaaggagatggagagcggccccaaggccagccacggctacggcggcagattcggcgtggagagagacagaatggacaagagcgccgtgggccacgagtacgtggccgaggtggagaagcacagcagccagaccgacgccgccaagggcttcggcggcaagtacggcgtggagagagacagagccgacaagagcgccgtgggcttcgactacaagggcgaggtggagaagcacaccagccagaaggactacagcagaggcttcggcggcagatacggcgtggagaaggacaagtgggacaaggccgccctgggctacgactacaagggcgagaccgagaagcacgagagccagagagactacgccaagggcttcggcggccagtacggcatccagaaggacagagtggacaagagcgccgtgggcttcaacgagatggaggcccccaccaccgcctacaagaagaccacccccatcgaggccgccagcagcggcaccagaggcctgaaggccaagttcgagagcatggccgaggagaagagaaagagagaggaggaggagaaggcccagcaggtggccagaagacagcaggagagaaaggccgtgaccaagagaagccccgaggccccccagcccgtgatcgccatggaggagcccgccgtgcccgcccccctgcccaagaagatcagcagcgaggcctggccccccgtgggcaccccccccagcagcgagagcgagcccgtgagaaccagcagagagcaccccgtgcccctgctgcccatcagacagaccctgcccgaggacaacgaggagccccccgccctgccccccagaaccctggagggcctgcaggtggaggaggagcccgtgtacgaggccgagcccgagcccgagcccgagcccgagcccgagcccgagaacgactacgaggacgtggaggagatggacagacacgagcaggaggacgagcccgagggcgactacgaggaggtgctggagcccgaggacagcagcttcagcagcgccctggccggcagcagcggctgccccgccggcgccggcgccggcgccgtggccctgggcatcagcgccgtggccgtgtacgactaccagggcgagggcagcgacgagctgagcttcgaccccgacgacgtgatcaccgacatcgagatggtggacgagggctggtggagaggcagatgccacggccacttcggcctgttccccgccaactacgtgaagctgctggagtag

SEQ ID NO: 84267 - DNA, 600 bp, synthetic construct
  misc_feature 1..600: note = Description of Artificial Sequence: Synthetic coding sequence
  source 1..600: mol_type = other DNA
atgcccaactacaagctgacctacttcaacatgagaggcagagccgagatcatcagatacatcttcgcctacctggacatccagtacgaggaccacagaatcgagcaggccgactggcccgagatcaagagcaccctgcccttcggcaagatccccatcctggaggtggacggcctgaccctgcaccagagcctggccatcgccagatacctgaccaagaacaccgacctggccggcaacaccgagatggagcagtgccacgtggacgccatcgtggacaccctggacgacttcatgagctgcttcccctgggccgagaagaagcaggacgtgaaggagcagatgttcaacgagctgctgacctacaacgccccccacctgatgcaggacctggacacctacctgggcggcagagagtggctgatcggcaacagcgtgacctgggccgacttctactgggagatctgcagcaccaccctgctggtgttcaagcccgacctgctggacaaccaccccagactggtgaccctgagaaagaaggtgcaggccatccccgccgtggccaactggatcaagagaagaccccagaccaagctgtag

SEQ ID NO: 84268 - DNA, 813 bp, synthetic construct
  misc_feature 1..813: note = Description of Artificial Sequence: Synthetic coding sequence
  source 1..813: mol_type = other DNA
atgcagtacccccaccccggccccgccgccggcgccgtgggcgtgcccctgtacgcccccacccccctgctgcagcccgcccaccccacccccttctacatcgaggacatcctgggcagaggccccgccgcccccacccccgcccccaccctgcccagccccaacagcagcttcaccagcctggtgagcccctacagaacccccgtgtacgagcccacccccatccaccccgccttcagccaccacagcgccgccgccctggccgccgcctacggccccggcggcttcggcggccccctgtaccccttccccagaaccgtgaacgactacacccacgccctgctgagacacgaccccctgggcaagcccctgctgtggagccccttcctgcagagacccctgcacaagagaaagggcggccaggtgagattcagcaacgaccagaccatcgagctggagaagaagttcgagacccagaagtacctgagcccccccgagagaaagagactggccaagatgctgcagctgagcgagagacaggtgaagacctggttccagaacagaagagccaagtggagaagactgaagcaggagaacccccagagcaacaagaaggaggagctggagagcctggacagcagctgcgaccagagacaggacctgcccagcgagcagaacaagggcgccagcctggacagcagccagtgcagccccagccccgccagccaggaggacctggagagcgagatcagcgaggacagcgaccaggaggtggacatcgagggcgacaagagctacttcaacgccggctag

SEQ ID NO: 84269 - DNA, 570 bp, synthetic construct
  misc_feature 1..570: note = Description of Artificial Sequence: Synthetic coding sequence
  source 1..570: mol_type = other DNA
atgctgggcatgatcaagaacagcctgttcggcagcgtggagacctggccctggcaggtgctgagcaagggcgacaaggaggaggtggcctacgaggagagagcctgcgagggcggcaagttcgccaccgtggaggtgaccgacaagcccgtggacgaggccctgagagaggccatgcccaaggtggccaagtacgccggcggcaccaacgacaagggcatcggcatgggcatgaccgtgcccatcagcttcgccgtgttccccaacgaggacggcagcctgcagaagaagctgaaggtgtggttcagaatccccaaccagttccagagcgacccccccgcccccagcgacaagagcgtgaagatcgaggagagagagggcatcaccgtgtacagcatgcagttcggcggctacgccaaggaggccgactacgtggcccaggccaccagactgagagccgccctggagggcaccgccacctacagaggcgacatctacttctgcaccggctacgacccccccatgaagccctacggcagaagaaacgagatctggctgctgaagacctag

SEQ ID NO: 84270 - DNA, 4059 bp, synthetic construct
  misc_feature 1..4059: note = Description of Artificial Sequence: Synthetic coding sequence
  source 1..4059: mol_type = other DNA
atgagcaaggtgaccgcccccggcagcggcccccccgccgccgccagcggcaaggagaagagaagcttcagcaagagactgttcagaagcggcagagccggcggcggcggcgccggcggccccggcgccagcggccccgccgcccccagcagccccagcagccccagcagcgccagaagcgtgggcagcttcatgagcagagtgctgaagaccctgagcaccctgagccacctgagcagcgagggcgccgcccccgacagaggcggcctgagaagctgcttcccccccggccccgccgccgcccccaccccccccccctgcccccccccccccgccagccccgccccccccgcctgcgccgccgagcccgtgcccggcgtggccggcctgagaaaccacggcaacacctgcttcatgaacgccaccctgcagtgcctgagcaacaccgagctgttcgccgagtacctggccctgggccagtacagagccggcagacccgagcccagccccgaccccgagcagcccgccggcagaggcgcccagggccagggcgaggtgaccgagcagctggcccacctggtgagagccctgtggaccctggagtacaccccccagcacagcagagacttcaagaccatcgtgagcaagaacgccctgcagtacagaggcaacagccagcacgacgcccaggagttcctgctgtggctgctggacagagtgcacgaggacctgaaccacagcgtgaagcagagcggccagccccccctgaagccccccagcgagaccgacatgatgcccgagggccccagcttccccgtgtgcagcaccttcgtgcaggagctgttccaggcccagtacagaagcagcctgacctgcccccactgccagaagcagagcaacaccttcgaccccttcctgtgcatcagcctgcccatccccctgccccacaccagacccctgtacgtgaccgtggtgtaccagggcaagtgcagccactgcatgagaatcggcgtggccgtgcccctgagcggcaccgtggccagactgagagaggccgtgagcatggagaccaagatccccaccgaccagatcgtgctgaccgagatgtactacgacggcttccacagaagcttctgcgacaccgacgacctggagaccgtgcacgagagcgactgcatcttcgccttcgagacccccgagatcttcagacccgagggcatcctgagccagagaggcatccacctgaacaacaacctgaaccacctgaagttcggcctggactaccacagactgagcagccccacccagaccgccgccaagcagggcaagatggacagccccaccagcagagccggcagcgacaagatcgtgctgctggtgtgcaacagagcctgcaccggccagcagggcaagagattcggcctgcccttcgtgctgcacctggagaagaccatcgcctgggacctgctgcagaaggagatcctggagaagatgaagtacttcctgagacccaccgtgtgcatccaggtgtgccccttcagcctgagagtggtgagcgtggtgggcatcacctacctgctgccccaggaggagcagcccctgtgccaccccatcgtggagagagccctgaagagctgcggccccggcggcaccgcccacgtgaagctggtggtggagtgggacaaggagaccagagacttcctgttcgtgaacaccgaggacgagtacatccccgacgccgagagcgtgagactgcagagagagagacaccaccagccccagacctgcaccctgagccagtgcttccagctgtacaccaaggaggagagactggcccccgacgacgcctggagatgcccccactgcaagcagctgcagcagggcagcatcaccctgagcctgtggaccctgcccgacgtgctgatcatccacctgaagagattcagacaggagggcgacagaagaatgaagctgcagaacatggtgaagttccccctgaccggcctggacatgaccccccacgtggtgaagagaagccagagcagctggagcctgcccagccactggagcccctggagaagaccctacggcctgggcagagaccccgaggactacatctacgacctgtacgccgtgtgcaaccaccacggcaccatgcagggcggccactacaccgcctactgcaagaacagcgtggacggcctgtggtactgcttcgacgacagcgacgtgcagcagctgagcgaggacgaggtgtgcacccagaccgcctacatcctgttctaccagagaagaaccgccatccccagctggagcgccaacagcagcgtggccggcagcaccagcagcagcctgtgcgagcactgggtgagcagactgcccggcagcaagcccgccagcgtgaccagcgccgccagcagcagaagaaccagcctggccagcctgagcgagagcgtggagatgaccggcgagagaagcgaggacgacggcggcttcagcaccagacccttcgtgagaagcgtgcagagacagagcctgagcagcagaagcagcgtgaccagccccctggccgtgaacgagaactgcatgagacccagctggagcctgagcgccaagctgcagatgagaagcaacagccccagcagattcagcggcgacagccccatccacagcagcgccagcaccctggagaagatcggcgaggccgccgacgacaaggtgagcatcagctgcttcggcagcctgagaaacctgagcagcagctaccaggagcccagcgacagccacagcagaagagagcacaaggccgtgggcagagcccccctggccgtgatggagggcgtgttcaaggacgagagcgacaccagaagactgaacagcagcgtggtggacacccagagcaagcacagcgcccagggcgacagactgccccccctgagcggccccttcgacaacaacaaccagatcgcctacgtggaccagagcgacagcgtggacagcagccccgtgaaggaggtgaaggcccccagccaccccggcagcctggccaagaagcccgagagcaccaccaagagaagccccagcagcaagggcaccagcgagcccgagaagagcctgagaaagggcagacccgccctggccagccaggagagcagcctgagcagcaccagccccagcagccccctgcccgtgaaggtgagcctgaagcccagcagaagcagaagcaaggccgacagcagcagcagaggcagcggcagacacagcagccccgcccccgcccagcccaagaaggagagcagccccaagagccaggacagcgtgagcagccccagcccccagaagcagaagagcgccagcgccctgacctacaccgccagcagcaccagcgccaagaaggccagcggccccgccaccagaagccccttcccccccggcaagagcagaaccagcgaccacagcctgagcagagagggcagcagacagagcctgggcagcgacagagccagcgccaccagcaccagcaagcccaacagccccagagtgagccaggccagagccggcgagggcagaggcgccggcaagcacgtgagaagcagcagcatggccagcctgagaagccccagcaccagcatcaagagcggcctgaagagagacagcaagagcgaggacaagggcctgagcttcttcaagagcgccctgagacagaaggagaccagaagaagcaccgacctgggcaagaccgccctgctgagcaagaaggccggcggcagcagcgtgaagagcgtgtgcaagaacaccggcgacgacgaggccgagagaggccaccagccccccgccagccagcagcccaacgccaacaccaccggcaaggagcagctggtgaccaaggaccccgccagcgccaagcacagcctgctgagcgccagaaagagcaagagcagccagctggacagcggcgtgcccagcagccccggcggcagacagagcgccgagaagagcagcaagaagctgagcagcagcatgcagaccagcgccagacccagccagaagccccagtag

SEQ ID NO: 84271 - DNA, 951 bp, synthetic construct
  misc_feature 1..951: note = Description of Artificial Sequence: Synthetic coding sequence
  source 1..951: mol_type = other DNA
atgagcgccgaggtggagaccagcgagggcgtggacgagagcgagaagaagaacagcggcgccctggagaaggagaaccagatgagaatggccgacctgagcgagctgctgaaggagggcaccaaggaggcccacgacagagccgagaacacccagttcgtgaaggacttcctgaagggcaacatcaagaaggagctgttcaagctggccaccaccgccctgtacttcacctacagcgccctggaggaggagatggagagaaacaaggaccaccccgccttcgcccccctgtacttccccatggagctgcacagaaaggaggccctgaccaaggacatggagtacttcttcggcgagaactgggaggagcaggtgcagtgccccaaggccgcccagaagtacgtggagagaatccactacatcggccagaacgagcccgagctgctggtggcccacgcctacaccagatacatgggcgacctgagcggcggccaggtgctgaagaaggtggcccagagagccctgaagctgcccagcaccggcgagggcacccagttctacctgttcgagaacgtggacaacgcccagcagttcaagcagctgtacagagccagaatgaacgccctggacctgaacatgaagaccaaggagagaatcgtggaggaggccaacaaggccttcgagtacaacatgcagatcttcaacgagctggaccaggccggcagcaccctggccagagagaccctggaggacggcttccccgtgcacgacggcaagggcgacatgagaaagtgccccttctacgccgccgagcaggacaagggcgccctggagggcagcagctgccccttcagaaccgccatggccgtgctgagaaagcccagcctgcagttcatcctggccgccggcgtggccctggccgccggcctgctggcctggtactacatgtag

SEQ ID NO: 84272 - DNA, 951 bp, synthetic construct; identical to SEQ ID NO: 84271
  misc_feature 1..951: note = Description of Artificial Sequence: Synthetic coding sequence
  source 1..951: mol_type = other DNA

SEQ ID NO: 84273 - DNA, 951 bp, synthetic construct; identical to SEQ ID NO: 84271
  misc_feature 1..951: note = Description of Artificial Sequence: Synthetic coding sequence
  source 1..951: mol_type = other DNA

SEQ ID NO: 84274 - DNA, 951 bp, synthetic construct; identical to SEQ ID NO: 84271
  misc_feature 1..951: note = Description of Artificial Sequence: Synthetic coding sequence
  source 1..951: mol_type = other DNA

SEQ ID NO: 84275 - DNA, 951 bp, synthetic construct; identical to SEQ ID NO: 84271
  misc_feature 1..951: note = Description of Artificial Sequence: Synthetic coding sequence
  source 1..951: mol_type = other DNA

SEQ ID NO: 84276 - DNA, 16908 bp, synthetic construct
  misc_feature 1..16908: note = Description of Artificial Sequence: Synthetic coding sequence
  source 1..16908: mol_type = other DNA
atgatcagctgggaggtggtgcacaccgtgttcctgttcgccctgctgtacagcagcctggcccaggacgccagcccccagagcgagatcagagccgaggagatccccgagggcgccagcaccctggccttcgtgttcgacgtgaccggcagcatgtacgacgacctggtgcaggtgatcgagggcgccagcaagatcctggagaccagcctgaagagacccaagagacccctgttcaacttcgccctggtgcccttccacgaccccgagatcggccccgtgaccatcaccaccgaccccaagaagttccagtacgagctgagagagctgtacgtgcagggcggcggcgactgccccgagatgagcatcggcgccatcaagatcgccctggagatcagcctgcccggcagcttcatctacgtgttcaccgacgccagaagcaaggactacagactgacccacgaggtgctgcagctgatccagcagaagcagagccaggtggtgttcgtgctgaccggcgactgcgacgacagaacccacatcggctacaaggtgtacgaggagatcgccagcaccagcagcggccaggtgttccacctggacaagaagcaggtgaacgaggtgctgaagtgggtggaggaggccgtgcaggccagcaaggtgcacctgctgagcaccgaccacctggagcaggccgtgaacacctggagaatccccttcgaccccagcctgaaggaggtgaccgtgagcctgagcggccccagccccatgatcgagatcagaaaccccctgggcaagctgatcaagaagggcttcggcctgcacgagctgctgaacatccacaacagcgccaaggtggtgaacgtgaaggagcccgaggccggcatgtggaccgtgaagaccagcagcagcggcagacacagcgtgagaatcaccggcctgagcaccatcgacttcagagccggcttcagcagaaagcccaccctggacttcaagaagaccgtgagcagacccgtgcagggcatccccacctacgtgctgctgaacaccagcggcatcagcacccccgccagaatcgacctgctggagctgctgagcatcagcggcagcagcctgaagaccatccccgtgaagtactacccccacagaaagccctacggcatctggaacatcagcgacttcgtgccccccaacgaggccttcttcctgaaggtgaccggctacgacaaggacgactacctgttccagagagtgagcagcgtgagcttcagcagcatcgtgcccgacgcccccaaggtgaccatgcccgagaagacccccggctactacctgcagcccggccagatcccctgcagcgtggacagcctgctgcccttcaccctgagcttcgtgagaaacggcgtgaccctgggcgtggaccagtacctgaaggagagcgccagcgtgaacctggacatcgccaaggtgaccctgagcgacgagggcttctacgagtgcatcgccgtgagcagcgccggcaccggcagagcccagaccttcttcgacgtgagcgagcccccccccgtgatccaggtgcccaacaacgtgaccgtgacccccggcgagagagccgtgctgacctgcctgatcatcagcgccgtggactacaacctgacctggcagagaaacgacagagacgtgagactggccgagcccgccagaatcagaaccctggccaacctgagcctggagctgaagagcgtgaagttcaacgacgccggcgagtaccactgcatggtgagcagcgagggcggcagcagcgccgccagcgtgttcctgaccgtgcaggagccccccaaggtgaccgtgatgcccaagaaccagagcttcaccggcggcagcgaggtgagcatcatgtgcagcgccaccggctaccccaagcccaagatcgcctggaccgtgaacgacatgttcatcgtgggcagccacagatacagaatgaccagcgacggcaccctgttcatcaagaacgccgcccccaaggacgccggcatctacggctgcctggccagcaacagcgccggcaccgacaagcagaacagcaccctgagatacatcgaggcccccaagctgatggtggtgcagagcgagctgctggtggccctgggcgacatcaccgtgatggagtgcaagaccagcggcatcccccccccccaggtgaagtggttcaagggcgacctggagctgagacccagcaccttcctgatcatcgaccccctgctgggcctgctgaagatccaggagacccaggacctggacgccggcgactacacctgcgtggccatcaacgaggccggcagagccaccggcaagatcaccctggacgtgggcagcccccccgtgttcatccaggagcccgccgacgtgagcatggagatcggcagcaacgtgaccctgccctgctacgtgcagggctaccccgagcccaccatcaagtggagaagactggacaacatgcccatcttcagcagacccttcagcgtgagcagcatcagccagctgagaaccggcgccctgttcatcctgaacctgtgggccagcgacaagggcacctacatctgcgaggccgagaaccagttcggcaagatccagagcgagaccaccgtgaccgtgaccggcctggtggcccccctgatcggcatcagccccagcgtggccaacgtgatcgagggccagcagctgaccctgccctgcaccctgctggccggcaaccccatccccgagagaagatggatcaagaacagcgccatgctgctgcagaacccctacatcaccgtgagaagcgacggcagcctgcacatcgagagagtgcagctgcaggacggcggcgagtacacctgcgtggccagcaacgtggccggcaccaacaacaagaccaccagcgtggtggtgcacgtgctgcccaccatccagcacggccagcagatcctgagcaccatcgagggcatccccgtgaccctgccctgcaaggccagcggcaaccccaagcccagcgtgatctggagcaagaagggcgagctgatcagcaccagcagcgccaagttcagcgccggcgccgacggcagcctgtacgtggtgagccccggcggcgaggagagcggcgagtacgtgtgcaccgccaccaacaccgccggctacgccaagagaaaggtgcagctgaccgtgtacgtgagacccagagtgttcggcgaccagagaggcctgagccaggacaagcccgtggagatcagcgtgctggccggcgaggaggtgaccctgccctgcgaggtgaagagcctgcccccccccatcatcacctgggccaaggagacccagctgatcagccccttcagccccagacacaccttcctgcccagcggcagcatgaagatcaccgagaccagaaccagcgacagcggcatgtacctgtgcgtggccaccaacatcgccggcaacgtgacccaggccgtgaagctgaacgtgcacgtgccccccaagatccagagaggccccaagcacctgaaggtgcaggtgggccagagagtggacatcccctgcaacgcccagggcacccccctgcccgtgatcacctggagcaagggcggcagcaccatgctggtggacggcgagcaccacgtgagcaaccccgacggcaccctgagcatcgaccaggccacccccagcgacgccggcatctacacctgcgtggccaccaacatcgccggcaccgacgagaccgagatcaccctgcacgtgcaggagccccccaccgtggaggacctggagcccccctacaacaccaccttccaggagagagtggccaaccagagaatcgagttcccctgccccgccaagggcacccccaagcccaccatcaagtggctgcacaacggcagagagctgaccggcagagagcccggcatcagcatcctggaggacggcaccctgctggtgatcgccagcgtgaccccctacgacaacggcgagtacatctgcgtggccgtgaacgaggccggcaccaccgagagaaagtacaacctgaaggtgcacgtgccccccgtgatcaaggacaaggagcaggtgaccaacgtgagcgtgctgctgaaccagctgaccaacctgttctgcgaggtggagggcacccccagccccatcatcatgtggtacaaggacaacgtgcaggtgaccgagagcagcaccatccagaccgtgaacaacggcaagatcctgaagctgttcagagccacccccgaggacgccggcagatacagctgcaaggccatcaacatcgccggcaccagccagaagtacttcaacatcgacgtgctggtgccccccaccatcatcggcaccaacttccccaacgaggtgagcgtggtgctgaacagagacgtggccctggagtgccaggtgaagggcacccccttccccgacatccactggttcaaggacggcaagcccctgttcctgggcgaccccaacgtggagctgctggacagaggccaggtgctgcacctgaagaacgccagaagaaacgacaagggcagataccagtgcaccgtgagcaacgccgccggcaagcaggccaaggacatcaagctgaccatctacatcccccccagcatcaagggcggcaacgtgaccaccgacatcagcgtgctgatcaacagcctgatcaagctggagtgcgagaccagaggcctgcccatgcccgccatcacctggtacaaggacggccagcccatcatgagcagcagccaggccctgtacatcgacaagggccagtacctgcacatccccagagcccaggtgagcgacagcgccacctacacctgccacgtggccaacgtggccggcaccgccgagaagagcttccacgtggacgtgtacgtgccccccatgatcgagggcaacctggccacccccctgaacaagcaggtggtgatcgcccacagcctgaccctggagtgcaaggccgccggcaaccccagccccatcctgacctggctgaaggacggcgtgcccgtgaaggccaacgacaacatcagaatcgaggccggcggcaagaagctggagatcatgagcgcccaggagatcgacagaggccagtacatctgcgtggccaccagcgtggccggcgagaaggagatcaagtacgaggtggacgtgctggtgccccccgccatcgagggcggcgacgagaccagctacttcatcgtgatggtgaacaacctgctggagctggactgccacgtgaccggcagccccccccccaccatcatgtggctgaaggacggccagctgatcgacgagagagacggcttcaagatcctgctgaacggcagaaagctggtgatcgcccaggcccaggtgagcaacaccggcctgtacagatgcatggccgccaacaccgccggcgaccacaagaaggagttcgaggtgaccgtgcacgtgccccccaccatcaagagcagcggcctgagcgagagagtggtggtgaagtacaagcccgtggccctgcagtgcatcgccaacggcatccccaaccccagcatcacctggctgaaggacgaccagcccgtgaacaccgcccagggcaacctgaagatccagagcagcggcagagtgctgcagatcgccaagaccctgctggaggacgccggcagatacacctgcgtggccaccaacgccgccggcgagacccagcagcacatccagctgcacgtgcacgagccccccagcctggaggacgccggcaagatgctgaacgagaccgtgctggtgagcaaccccgtgcagctggagtgcaaggccgccggcaaccccgtgcccgtgatcacctggtacaaggacaacagactgctgagcggcagcaccagcatgaccttcctgaacagaggccagatcatcgacatcgagagcgcccagatcagcgacgccggcatctacaagtgcgtggccatcaacagcgccggcgccaccgagctgttctacagcctgcaggtgcacgtggcccccagcatcagcggcagcaacaacatggtggccgtggtggtgaacaaccccgtgagactggagtgcgaggccagaggcatccccgcccccagcctgacctggctgaaggacggcagccccgtgagcagcttcagcaacggcctgcaggtgctgagcggcggcagaatcctggccctgaccagcgcccagatcagcgacaccggcagatacacctgcgtggccgtgaacgccgccggcgagaagcagagagacatcgacctgagagtgtacgtgccccccaacatcatgggcgaggagcagaacgtgagcgtgctgatcagccaggccgtggagctgctgtgccagagcgacgccatccccccccccaccctgacctggctgaaggacggccaccccctgctgaagaagcccggcctgagcatcagcgagaacagaagcgtgctgaagatcgaggacgcccaggtgcaggacaccggcagatacacctgcgaggccaccaacgtggccggcaagaccgagaagaactacaacgtgaacatctgggtgccccccaacatcggcggcagcgacgagctgacccagctgaccgtgatcgagggcaacctgatcagcctgctgtgcgagagcagcggcatccccccccccaacctgatctggaagaagaagggcagccccgtgctgaccgacagcatgggcagagtgagaatcctgagcggcggcagacagctgcagatcagcatcgccgagaagagcgacgccgccctgtacagctgcgtggccagcaacgtggccggcaccgccaagaaggagtacaacctgcaggtgtacatcagacccaccatcaccaacagcggcagccaccccaccgagatcatcgtgaccagaggcaagagcatcagcctggagtgcgaggtgcagggcatccccccccccaccgtgacctggatgaaggacggccaccccctgatcaaggccaagggcgtggagatcctggacgagggccacatcctgcagctgaagaacatccacgtgagcgacaccggcagatacgtgtgcgtggccgtgaacgtggccggcatgaccgacaagaagtacgacctgagcgtgcacgccccccccagcatcatcggcaaccacagaagccccgagaacatcagcgtggtggagaagaacagcgtgagcctgacctgcgaggccagcggcatccccctgcccagcatcacctggttcaaggacggctggcccgtgagcctgagcaacagcgtgagaatcctgagcggcggcagaatgctgagactgatgcagaccaccatggaggacgccggccagtacacctgcgtggtgagaaacgccgccggcgaggagagaaagatcttcggcctgagcgtgctggtgcccccccacatcgtgggcgagaacaccctggaggacgtgaaggtgaaggagaagcagagcgtgaccctgacctgcgaggtgaccggcaaccccgtgcccgagatcacctggcacaaggacggccagcccctgcaggaggacgaggcccaccacatcatcagcggcggcagattcctgcagatcaccaacgtgcaggtgccccacaccggcagatacacctgcctggccagcagccccgccggccacaagagcagaagcttcagcctgaacgtgttcgtgagccccaccatcgccggcgtgggcagcgacggcaaccccgaggacgtgaccgtgatcctgaacagccccaccagcctggtgtgcgaggcctacagctacccccccgccaccatcacctggttcaaggacggcacccccctggagagcaacagaaacatcagaatcctgcccggcggcagaaccctgcagatcctgaacgcccaggaggacaacgccggcagatacagctgcgtggccaccaacgaggccggcgagatgatcaagcactacgaggtgaaggtgtacatcccccccatcatcaacaagggcgacctgtggggccccggcctgagccccaaggaggtgaagatcaaggtgaacaacaccctgaccctggagtgcgaggcctacgccatccccagcgccagcctgagctggtacaaggacggccagcccctgaagagcgacgaccacgtgaacatcgccgccaacggccacaccctgcagatcaaggaggcccagatcagcgacaccggcagatacacctgcgtggccagcaacatcgccggcgaggacgagctggacttcgacgtgaacatccaggtgccccccagcttccagaagctgtgggagatcggcaacatgctggacaccggcagaaacggcgaggccaaggacgtgatcatcaacaaccccatcagcctgtactgcgagaccaacgccgcccccccccccaccctgacctggtacaaggacggccaccccctgaccagcagcgacaaggtgctgatcctgcccggcggcagagtgctgcagatccccagagccaaggtggaggacgccggcagatacacctgcgtggccgtgaacgaggccggcgaggacagcctgcagtacgacgtgagagtgctggtgccccccatcatcaagggcgccaacagcgacctgcccgaggaggtgaccgtgctggtgaacaagagcgccctgatcgagtgcctgagcagcggcagccccgcccccagaaacagctggcagaaggacggccagcccctgctggaggacgaccaccacaagttcctgagcaacggcagaatcctgcagatcctgaacacccagatcaccgacatcggcagatacgtgtgcgtggccgagaacaccgccggcagcgccaagaagtacttcaacctgaacgtgcacgtgccccccagcgtgatcggccccaagagcgagaacctgaccgtggtggtgaacaacttcatcagcctgacctgcgaggtgagcggcttccccccccccgacctgagctggctgaagaacgagcagcccatcaagctgaacaccaacaccctgatcgtgcccggcggcagaaccctgcagatcatcagagccaaggtgagcgacggcggcgagtacacctgcatcgccatcaaccaggccggcgagagcaagaagaagttcagcctgaccgtgtacgtgccccccagcatcaaggaccacgacagcgagagcctgagcgtggtgaacgtgagagagggcaccagcgtgagcctggagtgcgagagcaacgccgtgcccccccccgtgatcacctggtacaagaacggcagaatgatcaccgagagcacccacgtggagatcctggccgacggccagatgctgcacatcaagaaggccgaggtgagcgacaccggccagtacgtgtgcagagccatcaacgtggccggcagagacgacaagaacttccacctgaacgtgtacgtgccccccagcatcgagggccccgagagagaggtgatcgtggagaccatcagcaaccccgtgaccctgacctgcgacgccaccggcatccccccccccaccatcgcctggctgaagaaccacaagagaatcgagaacagcgacagcctggaggtgagaatcctgagcggcggcagcaagctgcagatcgccagaagccagcacagcgacagcggcaactacacctgcatcgccagcaacatggagggcaaggcccagaagtactacttcctgagcatccaggtgccccccagcgtggccggcgccgagatccccagcgacgtgagcgtgctgctgggcgagaacgtggagctggtgtgcaacgccaacggcatccccacccccctgatccagtggctgaaggacggcaagcccatcgccagcggcgagaccgagagaatcagagtgagcgccaacggcagcaccctgaacatctacggcgccctgaccagcgacaccggcaagtacacctgcgtggccaccaaccccgccggcgaggaggacagaatcttcaacctgaacgtgtacgtgacccccaccatcagaggcaacaaggacgaggccgagaagctgatgaccctggtggacaccagcatcaacatcgagtgcagagccaccggcaccccccccccccagatcaactggctgaagaacggcctgcccctgcccctgagcagccacatcagactgctggccgccggccaggtgatcagaatcgtgagagcccaggtgagcgacgtggccgtgtacacctgcgtggccagcaacagagccggcgtggacaacaagcactacaacctgcaggtgttcgccccccccaacatggacaacagcatgggcaccgaggagatcaccgtgctgaagggcagcagcaccagcatggcctgcatcaccgacggcacccccgcccccagcatggcctggctgagagacggccagcccctgggcctggacgcccacctgaccgtgagcacccacggcatggtgctgcagctgctgaaggccgagaccgaggacagcggcaagtacacctgcatcgccagcaacgaggccggcgaggtgagcaagcacttcatcctgaaggtgctggagcccccccacatcaacggcagcgaggagcacgaggagatcagcgtgatcgtgaacaaccccctggagctgacctgcatcgccagcggcatccccgcccccaagatgacctggatgaaggacggcagacccctgccccagaccgaccaggtgcagaccctgggcggcggcgaggtgctgagaatcagcaccgcccaggtggaggacaccggcagatacacctgcctggccagcagccccgccggcgacgacgacaaggagtacctggtgagagtgcacgtgccccccaacatcgccggcaccgacgagcccagagacatcaccgtgctgagaaacagacaggtgaccctggagtgcaagagcgacgccgtgcccccccccgtgatcacctggctgagaaacggcgagagactgcaggccacccccagagtgagaatcctgagcggcggcagatacctgcagatcaacaacgccgacctgggcgacaccgccaactacacctgcgtggccagcaacatcgccggcaagaccaccagagagttcatcctgaccgtgaacgtgccccccaacatcaagggcggcccccagagcctggtgatcctgctgaacaagagcaccgtgctggagtgcatcgccgagggcgtgcccacccccagaatcacctggagaaaggacggcgccgtgctggccggcaaccacgccagatacagcatcctggagaacggcttcctgcacatccagagcgcccacgtgaccgacaccggcagatacctgtgcatggccaccaacgccgccggcaccgacagaagaagaatcgacctgcaggtgcacgtgccccccagcatcgcccccggccccaccaacatgaccgtgatcgtgaacgtgcagaccaccctggcctgcgaggccaccggcatccccaagcccagcatcaactggagaaagaacggccacctgctgaacgtggaccagaaccagaacagctacagactgctgagcagcggcagcctggtgatcatcagccccagcgtggacgacaccgccacctacgagtgcaccgtgaccaacggcgccggcgacgacaagagaaccgtggacctgaccgtgcaggtgccccccagcatcgccgacgagcccaccgacttcctggtgaccaagcacgcccccgccgtgatcacctgcaccgccagcggcgtgcccttccccagcatccactggaccaagaacggcatcagactgctgcccagaggcgacggctacagaatcctgagcagcggcgccatcgagatcctggccacccagctgaaccacgccggcagatacacctgcgtggccagaaacgccgccggcagcgcccacagacacgtgaccctgcacgtgcacgagccccccgtgatccagccccagcccagcgagctgcacgtgatcctgaacaaccccatcctgctgccctgcgaggccaccggcacccccagccccttcatcacctggcagaaggagggcatcaacgtgaacaccagcggcagaaaccacgccgtgctgcccagcggcggcctgcagatcagcagagccgtgagagaggacgccggcacctacatgtgcgtggcccagaaccccgccggcaccgccctgggcaagatcaagctgaacgtgcaggtgccccccgtgatcagcccccacctgaaggagtacgtgatcgccgtggacaagcccatcaccctgagctgcgaggccgacggcctgcccccccccgacatcacctggcacaaggacggcagagccatcgtggagagcatcagacagagagtgctgagcagcggcagcctgcagatcgccttcgtgcagcccggcgacgccggccactacacctgcatggccgccaacgtggccggcagcagcagcaccagcaccaagctgaccgtgcacgtgccccccagaatcagaagcaccgagggccactacaccgtgaacgagaacagccaggccatcctgccctgcgtggccgacggcatccccacccccgccatcaactggaagaaggacaacgtgctgctggccaacctgctgggcaagtacaccgccgagccctacggcgagctgatcctggagaacgtggtgctggaggacagcggcttctacacctgcgtggccaacaacgccgccggcgaggacacccacaccgtgagcctgaccgtgcacgtgctgcccaccttcaccgagctgcccggcgacgtgagcctgaacaagggcgagcagctgagactgagctgcaaggccaccggcatccccctgcccaagctgacctggaccttcaacaacaacatcatccccgcccacttcgacagcgtgaacggccacagcgagctggtgatcgagagagtgagcaaggaggacagcggcacctacgtgtgcaccgccgagaacagcgtgggcttcgtgaaggccatcggcttcgtgtacgtgaaggagccccccgtgttcaagggcgactaccccagcaactggatcgagcccctgggcggcaacgccatcctgaactgcgaggtgaagggcgaccccacccccaccatccagtggaacagaaagggcgtggacatcgagatcagccacagaatcagacagctgggcaacggcagcctggccatctacggcaccgtgaacgaggacgccggcgactacacctgcgtggccaccaacgaggccggcgtggtggagagaagcatgagcctgaccctgcagagcccccccatcatcaccctggagcccgtggagaccgtgatcaacgccggcggcaagatcatcctgaactgccaggccaccggcgagccccagcccaccatcacctggagcagacagggccacagcatcagctgggacgacagagtgaacgtgctgagcaacaacagcctgtacatcgccgacgcccagaaggaggacaccagcgagttcgagtgcgtggccagaaacctgatgggcagcgtgctggtgagagtgcccgtgatcgtgcaggtgcacggcggcttcagccagtggagcgcctggagagcctgcagcgtgacctgcggcaagggcatccagaagagaagcagactgtgcaaccagcccctgcccgccaacggcggcaagccctgccagggcagcgacctggagatgagaaactgccagaacaagccctgccccgtggacggcagctggagcgagtggagcctgtgggaggagtgcaccagaagctgcggcagaggcaaccagaccagaaccagaacctgcaacaaccccagcgtgcagcacggcggcagaccctgcgagggcaacgccgtggagatcatcatgtgcaacatcagaccctgccccgtgcacggcgcctggagcgcctggcagccctggggcacctgcagcgagagctgcggcaagggcacccagaccagagccagactgtgcaacaaccccccccccgccttcggcggcagctactgcgacggcgccgagacccagatgcaggtgtgcaacgagagaaactgccccatccacggcaagtgggccacctgggccagctggagcgcctgcagcgtgagctgcggcggcggcgccagacagagaaccagaggctgcagcgaccccgtgccccagtacggcggcagaaagtgcgagggcagcgacgtgcagagcgacttctgcaacagcgacccctgccccacccacggcaactggagcccctggagcggctggggcacctgcagcagaacctgcaacggcggccagatgagaagatacagaacctgcgacaaccccccccccagcaacggcggcagagcctgcggcggccccgacagccagatccagagatgcaacaccgacatgtgccccgtggacggcagctggggcagctggcacagctggagccagtgcagcgccagctgcggcggcggcgagaagaccagaaagagactgtgcgaccaccccgtgcccgtgaagggcggcagaccctgccccggcgacaccacccaggtgaccagatgcaacgtgcaggcctgccccggcggcccccagagagccagaggcagcgtgatcggcaacatcaacgacgtggagttcggcatcgccttcctgaacgccaccatcaccgacagccccaacagcgacaccagaatcatcagagccaagatcaccaacgtgcccagaagcctgggcagcgccatgagaaagatcgtgagcatcctgaaccccatctactggaccaccgccaaggagatcggcgaggccgtgaacggcttcaccctgaccaacgccgtgttcaagagagagacccaggtggagttcgccaccggcgagatcctgcagatgagccacatcgccagaggcctggacagcgacggcagcctgctgctggacatcgtggtgagcggctacgtgctgcagctgcagagccccgccgaggtgaccgtgaaggactacaccgaggactacatccagaccggccccggccagctgtacgcctacagcaccagactgttcaccatcgacggcatcagcatcccctacacctggaaccacaccgtgttctacgaccaggcccagggcagaatgcccttcctggtggagaccctgcacgccagcagcgtggagagcgactacaaccagatcgaggagaccctgggcttcaagatccacgccagcatcagcaagggcgacagaagcaaccagtgccccagcggcttcaccctggacagcgtgggccccttctgcgccgacgaggacgagtgcgccgccggcaacccctgcagccacagctgccacaacgccatgggcacctactactgcagctgccccaagggcctgaccatcgccgccgacggcagaacctgccaggacatcgacgagtgcgccctgggcagacacacctgccacgccggccaggactgcgacaacaccatcggcagctacagatgcgtggtgagatgcggcagcggcttcagaagaaccagcgacggcctgagctgccaggacatcaacgagtgccaggagagcagcccctgccaccagagatgcttcaacgccatcggcagcttccactgcggctgcgagcccggctaccagctgaagggcagaaagtgcatggacgtgaacgagtgcagacagaacgtgtgcagacccgaccagcactgcaagaacaccagaggcggctacaagtgcatcgacctgtgccccaacggcatgaccaaggccgagaacggcacctgcatcgacatcgacgagtgcaaggacggcacccaccagtgcagatacaaccagatctgcgagaacaccagaggcagctacagatgcgtgtgccccagaggctacagaagccagggcgtgggcagaccctgcatggacatcaacgagtgcgagcaggtgcccaagccctgcgcccaccagtgcagcaacacccccggcagcttcaagtgcatctgcccccccggccagcacctgctgggcgacggcaagagctgcgccggcctggagagactgcccaactacggcacccagtacagcagctacaacctggccagattcagccccgtgagaaacaactaccagccccagcagcactacagacagtacagccacctgtacagcagctacagcgagtacagaaacagcagaaccagcctgagcagaaccagaagaaccatcagaaagacctgccccgagggcagcgaggccagccacgacacctgcgtggacatcgacgagtgcgagaacaccgacgcctgccagcacgagtgcaagaacaccttcggcagctaccagtgcatctgcccccccggctaccagctgacccacaacggcaagacctgccaggacatcgacgagtgcctggagcagaacgtgcactgcggccccaacagaatgtgcttcaacatgagaggcagctaccagtgcatcgacaccccctgcccccccaactaccagagagaccccgtgagcggcttctgcctgaagaactgcccccccaacgacctggagtgcgccctgagcccctacgccctggagtacaagctggtgagcctgcccttcggcatcgccaccaaccaggacctgatcagactggtggcctacacccaggacggcgtgatgcaccccagaaccaccttcctgatggtggacgaggagcagaccgtgcccttcgccctgagagacgagaacctgaagggcgtggtgtacaccaccagacccctgagagaggccgagacctacagaatgagagtgagagccagcagctacagcgccaacggcaccatcgagtaccagaccaccttcatcgtgtacatcgccgtgagcgcctacccctactag

SEQ ID NO: 84277 - DNA, 16557 bp, synthetic construct
  misc_feature 1..16557: note = Description of Artificial Sequence: Synthetic coding sequence
  source 1..16557: mol_type = other DNA
atgatcagctgggaggtggtgcacaccgtgttcctgttcgccctgctgtacagcagcctggcccaggacgccagcccccagagcgagatcagagccgaggagatccccgagggcgccagcaccctggccttcgtgttcgacgtgaccggcagcatgtacgacgacctggtgcaggtgatcgagggcgccagcaagatcctggagaccagcctgaagagacccaagagacccctgttcaacttcgccctggtgcccttccacgaccccgagatcggccccgtgaccatcaccaccgaccccaagaagttccagtacgagctgagagagctgtacgtgcagggcggcggcgactgccccgagatgagcatcggcgccatcaagatcgccctggagatcagcctgcccggcagcttcatctacgtgttcaccgacgccagaagcaaggactacagactgacccacgaggtgctgcagctgatccagcagaagcagagccaggtggtgttcgtgctgaccggcgactgcgacgacagaacccacatcggctacaaggtgtacgaggagatcgccagcaccagcagcggccaggtgttccacctggacaagaagcaggtgaacgaggtgctgaagtgggtggaggaggccgtgcaggccagcaaggtgcacctgctgagcaccgaccacctggagcaggccgtgaacacctggagaatccccttcgaccccagcctgaaggaggtgaccgtgagcctgagcggccccagccccatgatcgagatcagaaaccccctgggcaagctgatcaagaagggcttcggcctgcacgagctgctgaacatccacaacagcgccaaggtggtgaacgtgaaggagcccgaggccggcatgtggaccgtgaagaccagcagcagcggcagacacagcgtgagaatcaccggcctgagcaccatcgacttcagagccggcttcagcagaaagcccaccctggacttcaagaagaccgtgagcagacccgtgcagggcatccccacctacgtgctgctgaacaccagcggcatcagcacccccgccagaatcgacctgctggagctgctgagcatcagcggcagcagcctgaagaccatccccgtgaagtactacccccacagaaagccctacggcatctggaacatcagcgacttcgtgccccccaacgaggccttcttcctgaaggtgaccggctacgacaaggacgactacctgttccagagagtgagcagcgtgagcttcagcagcatcgtgcccgacgcccccaaggtgaccatgcccgagaagacccccggctactacctgcagcccggccagatcccctgcagcgtggacagcctgctgcccttcaccctgagcttcgtgagaaacggcgtgaccctgggcgtggaccagtacctgaaggagagcgccagcgtgaacctggacatcgccaaggtgaccctgagcgacgagggcttctacgagtgcatcgccgtgagcagcgccggcaccggcagagcccagaccttcttcgacgtgagcgagcccccccccgtgatccaggtgcccaacaacgtgaccgtgacccccggcgagagagccgtgctgacctgcctgatcatcagcgccgtggactacaacctgacctggcagagaaacgacagagacgtgagactggccgagcccgccagaatcagaaccctggccaacctgagcctggagctgaagagcgtgaagttcaacgacgccggcgagtaccactgcatggtgagcagcgagggcggcagcagcgccgccagcgtgttcctgaccgtgcaggagccccccaaggtgaccgtgatgcccaagaaccagagcttcaccggcggcagcgaggtgagcatcatgtgcagcgccaccggctaccccaagcccaagatcgcctggaccgtgaacgacatgttcatcgtgggcagccacagatacagaatgaccagcgacggcaccctgttcatcaagaacgccgcccccaaggacgccggcatctacggctgcctggccagcaacagcgccggcaccgacaagcagaacagcaccctgagatacatcgaggcccccaagctgatggtggtgcagagcgagctgctggtggccctgggcgacatcaccgtgatggagtgcaagaccagcggcatcccccccccccaggtgaagtggttcaagggcgacctggagctgagacccagcaccttcctgatcatcgaccccctgctgggcctgctgaagatccaggagacccaggacctggacgccggcgactacacctgcgtggccatcaacgaggccggcagagccaccggcaagatcaccctggacgtgggcagcccccccgtgttcatccaggagcccgccgacgtgagcatggagatcggcagcaacgtgaccctgccctgctacgtgcagggctaccccgagcccaccatcaagtggagaagactggacaacatgcccatcttcagcagacccttcagcgtgagcagcatcagccagctgagaaccggcgccctgttcatcctgaacctgtgggccagcgacaagggcacctacatctgcgaggccgagaaccagttcggcaagatccagagcgagaccaccgtgaccgtgaccggcctggtggcccccctgatcggcatcagccccagcgtggccaacgtgatcgagggccagcagctgaccctgccctgcaccctgctggccggcaaccccatccccgagagaagatggatcaagaacagcgccatgctgctgcagaacccctacatcaccgtgagaagcgacggcagcctgcacatcgagagagtgcagctgcaggacggcggcgagtacacctgcgtggccagcaacgtggccggcaccaacaacaagaccaccagcgtggtggtgcacgtgctgcccaccatccagcacggccagcagatcctgagcaccatcgagggcatccccgtgaccctgccctgcaaggccagcggcaaccccaagcccagcgtgatctggagcaagaagggcgagctgatcagcaccagcagcgccaagttcagcgccggcgccgacggcagcctgtacgtggtgagccccggcggcgaggagagcggcgagtacgtgtgcaccgccaccaacaccgccggctacgccaagagaaaggtgcagctgaccgtgtacgtgagacccagagtgttcggcgaccagagaggcctgagccaggacaagcccgtggagatcagcgtgctggccggcgaggaggtgaccctgccctgcgaggtgaagagcctgcccccccccatcatcacctgggccaaggagacccagctgatcagccccttcagccccagacacaccttcctgcccagcggcagcatgaagatcaccgagaccagaaccagcgacagcggcatgtacctgtgcgtggccaccaacatcgccggcaacgtgacccaggccgtgaagctgaacgtgcacgtgccccccaagatccagagaggccccaagcacctgaaggtgcaggtgggccagagagtggacatcccctgcaacgcccagggcacccccctgcccgtgatcacctggagcaagggcggcagcaccatgctggtggacggcgagcaccacgtgagcaaccccgacggcaccctgagcatcgaccaggccacccccagcgacgccggcatctacacctgcgtggccaccaacatcgccggcaccgacgagaccgagatcaccctgcacgtgcaggagccccccaccgtggaggacctggagcccccctacaacaccaccttccaggagagagtggccaaccagagaatcgagttcccctgccccgccaagggcacccccaagcccaccatcaagtggctgcacaacggcagagagctgaccggcagagagcccggcatcagcatcctggaggacggcaccctgctggtgatcgccagcgtgaccccctacgacaacggcgagtacatctgcgtggccgtgaacgaggccggcaccaccgagagaaagtacaacctgaaggtgcacgtgccccccgtgatcaaggacaaggagcaggtgaccaacgtgagcgtgctgctgaaccagctgaccaacctgttctgcgaggtggagggcacccccagccccatcatcatgtggtacaaggacaacgtgcaggtgaccgagagcagcaccatccagaccgtgaacaacggcaagatcctgaagctgttcagagccacccccgaggacgccggcagatacagctgcaaggccatcaacatcgccggcaccagccagaagtacttcaacatcgacgtgctggtgccccccaccatcatcggcaccaacttccccaacgaggtgagcgtggtgctgaacagagacgtggccctggagtgccaggtgaagggcacccccttccccgacatccactggttcaaggacggcaagcccctgttcctgggcgaccccaacgtggagctgctggacagaggccaggtgctgcacctgaagaacgccagaagaaacgacaagggcagataccagtgcaccgtgagcaacgccgccggcaagcaggccaaggacatcaagctgaccatctacatcccccccagcatcaagggcggcaacgtgaccaccgacatcagcgtgctgatcaacagcctgatcaagctggagtgcgagaccagaggcctgcccatgcccgccatcacctggtacaaggacggccagcccatcatgagcagcagccaggccctgtacatcgacaagggccagtacctgcacatccccagagcccaggtgagcgacagcgccacctacacctgccacgtggccaacgtggccggcaccgccgagaagagcttccacgtggacgtgtacgtgccccccatgatcgagggcaacctggccacccccctgaacaagcaggtggtgatcgcccacagcctgaccctggagtgcaaggccgccggcaaccccagccccatcctgacctggctgaaggacggcgtgcccgtgaaggccaacgacaacatcagaatcgaggccggcggcaagaagctggagatcatgagcgcccaggagatcgacagaggccagtacatctgcgtggccaccagcgtggccggcgagaaggagatcaagtacgaggtggacgtgctggtgccccccgccatcgagggcggcgacgagaccagctacttcatcgtgatggtgaacaacctgctggagctggactgccacgtgaccggcagccccccccccaccatcatgtggctgaaggacggccagctgatcgacgagagagacggcttcaagatcctgctgaacggcagaaagctggtgatcgcccaggcccaggtgagcaacaccggcctgtacagatgcatggccgccaacaccgccggcgaccacaagaaggagttcgaggtgaccgtgcacgtgccccccaccatcaagagcagcggcctgagcgagagagtggtggtgaagtacaagcccgtggccctgcagtgcatcgccaacggcatccccaaccccagcatcacctggctgaaggacgaccagcccgtgaacaccgcccagggcaacctgaagatccagagcagcggcagagtgctgcagatcgccaagaccctgctggaggacgccggcagatacacctgcgtggccaccaacgccgccggcgagacccagcagcacatccagctgcacgtgcacgagccccccagcctggaggacgccggcaagatgctgaacgagaccgtgctggtgagcaaccccgtgcagctggagtgcaaggccgccggcaaccccgtgcccgtgatcacctggtacaaggacaacagactgctgagcggcagcaccagcatgaccttcctgaacagaggccagatcatcgacatcgagagcgcccagatcagcgacgccggcatctacaagtgcgtggccatcaacagcgccggcgccaccgagctgttctacagcctgcaggtgcacgtggcccccagcatcagcggcagcaacaacatggtggccgtggtggtgaacaaccccgtgagactggagtgcgaggccagaggcatccccgcccccagcctgacctggctgaaggacggcagccccgtgagcagcttcagcaacggcctgcaggtgctgagcggcggcagaatcctggccctgaccagcgcccagatcagcgacaccggcagatacacctgcgtggccgtgaacgccgccggcgagaagcagagagacatcgacctgagagtgtacgtgccccccaacatcatgggcgaggagcagaacgtgagcgtgctgatcagccaggccgtggagctgctgtgccagagcgacgccatccccccccccaccctgacctggctgaaggacggccaccccctgctgaagaagcccggcctgagcatcagcgagaacagaagcgtgctgaagatcgaggacgcccaggtgcaggacaccggcagatacacctgcgaggccaccaacgtggccggcaagaccgagaagaactacaacgtgaacatctgggtgccccccaacatcggcggcagcgacgagctgacccagctgaccgtgatcgagggcaacctgatcagcctgctgtgcgagagcagcggcatccccccccccaacctgatctggaagaagaagggcagccccgtgctgaccgacagcatgggcagagtgagaatcctgagcggcggcagacagctgcagatcagcatcgccgagaagagcgacgccgccctgtacagctgcgtggccagcaacgtggccggcaccgccaagaaggagtacaacctgcaggtgtacatcagacccaccatcaccaacagcggcagccaccccaccgagatcatcgtgaccagaggcaagagcatcagcctggagtgcgaggtgcagggcatccccccccccaccgtgacctggatgaaggacggccaccccctgatcaaggccaagggcgtggagatcctggacgagggccacatcctgcagctgaagaacatccacgtgagcgacaccggcagatacgtgtgcgtggccgtgaacgtggccggcatgaccgacaagaagtacgacctgagcgtgcacgccccccccagcatcatcggcaaccacagaagccccgagaacatcagcgtggtggagaagaacagcgtgagcctgacctgcgaggccagcggcatccccctgcccagcatcacctggttcaaggacggctggcccgtgagcctgagcaacagcgtgagaatcctgagcggcggcagaatgctgagactgatgcagaccaccatggaggacgccggccagtacacctgcgtggtgagaaacgccgccggcgaggagagaaagatcttcggcctgagcgtgctggtgcccccccacatcgtgggcgagaacaccctggaggacgtgaaggtgaaggagaagcagagcgtgaccctgacctgcgaggtgaccggcaaccccgtgcccgagatcacctggcacaaggacggccagcccctgcaggaggacgaggcccaccacatcatcagcggcggcagattcctgcagatcaccaacgtgcaggtgccccacaccggcagatacacctgcctggccagcagccccgccggccacaagagcagaagcttcagcctgaacgtgttcgtgagccccaccatcgccggcgtgggcagcgacggcaaccccgaggacgtgaccgtgatcctgaacagccccaccagcctggtgtgcgaggcctacagctacccccccgccaccatcacctggttcaaggacggcacccccctggagagcaacagaaacatcagaatcctgcccggcggcagaaccctgcagatcctgaacgcccaggaggacaacgccggcagatacagctgcgtggccaccaacgaggccggcgagatgatcaagcactacgaggtgaaggtgtacatcccccccatcatcaacaagggcgacctgtggggccccggcctgagccccaaggaggtgaagatcaaggtgaacaacaccctgaccctggagtgcgaggcctacgccatccccagcgccagcctgagctggtacaaggacggccagcccctgaagagcgacgaccacgtgaacatcgccgccaacggccacaccctgcagatcaaggaggcccagatcagcgacaccggcagatacacctgcgtggccagcaacatcgccggcgaggacgagctggacttcgacgtgaacatccaggtgccccccagcttccagaagctgtgggagatcggcaacatgctggacaccggcagaaacggcgaggccaaggacgtgatcatcaacaaccccatcagcctgtactgcgagaccaacgccgcccccccccccaccctgacctggtacaaggacggccaccccctgaccagcagcgacaaggtgctgatcctgcccggcggcagagtgctgcagatccccagagccaaggtggaggacgccggcagatacacctgcgtggccgtgaacgaggccggcgaggacagcctgcagtacgacgtgagagtgctggtgccccccatcatcaagggcgccaacagcgacctgcccgaggaggtgaccgtgctggtgaacaagagcgccctgatcgagtgcctgagcagcggcagccccgcccccagaaacagctggcagaaggacggccagcccctgctggaggacgaccaccacaagttcctgagcaacggcagaatcctgcagatcctgaacacccagatcaccgacatcggcagatacgtgtgcgtggccgagaacaccgccggcagcgccaagaagtacttcaacctgaacgtgcacgtgccccccagcgtgatcggccccaagagcgagaacctgaccgtggtggtgaacaacttcatcagcctgacctgcgaggtgagcggcttccccccccccgacctgagctggctgaagaacgagcagcccatcaagctgaacaccaacaccctgatcgtgcccggcggcagaaccctgcagatcatcagagccaaggtgagcgacggcggcgagtacacctgcatcgccatcaaccaggccggcgagagcaagaagaagttcagcctgaccgtgtacgtgccccccagcatcaaggaccacgacagcgagagcctgagcgtggtgaacgtgagagagggcaccagcgtgagcctggagtgcgagagcaacgccgtgcccccccccgtgatcacctggtacaagaacggcagaatgatcaccgagagcacccacgtggagatcctggccgacggccagatgctgcacatcaagaaggccgaggtgagcgacaccggccagtacgtgtgcagagccatcaacgtggccggcagagacgacaagaacttccacctgaacgtgtacgtgccccccagcatcgagggccccgagagagaggtgatcgtggagaccatcagcaaccccgtgaccctgacctgcgacgccaccggcatccccccccccaccatcgcctggctgaagaaccacaagagaatcgagaacagcgacagcctggaggtgagaatcctgagcggcggcagcaagctgcagatcgccagaagccagcacagcgacagcggcaactacacctgcatcgccagcaacatggagggcaaggcccagaagtactacttcctgagcatccaggtgccccccagcgtggccggcgccgagatccccagcgacgtgagcgtgctgctgggcgagaacgtggagctggtgtgcaacgccaacggcatccccacccccctgatccagtggctgaaggacggcaagcccatcgccagcggcgagaccgagagaatcagagtgagcgccaacggcagcaccctgaacatctacggcgccctgaccagcgacaccggcaagtacacctgcgtggccaccaaccccgccggcgaggaggacagaatcttcaacctgaacgtgtacgtgacccccaccatcagaggcaacaaggacgaggccgagaagctgatgaccctggtggacaccagcatcaacatcgagtgcagagccaccggcaccccccccccccagatcaactggctgaagaacggcctgcccctgcccctgagcagccacatcagactgctggccgccggccaggtgatcagaatcgtgagagcccaggtgagcgacgtggccgtgtacacctgcgtggccagcaacagagccggcgtggacaacaagcactacaacctgcaggtgttcgccccccccaacatggacaacagcatgggcaccgaggagatcaccgtgctgaagggcagcagcaccagcatggcctgcatcaccgacggcacccccgcccccagcatggcctggctgagagacggccagcccctgggcctggacgcccacctgaccgtgagcacccacggcatggtgctgcagctgctgaaggccgagaccgaggacagcggcaagtacacctgcatcgccagcaacgaggccggcgaggtgagcaagcacttcatcctgaaggtgctggagcccccccacatcaacggcagcgaggagcacgaggagatcagcgtgatcgtgaacaaccccctggagctgacctgcatcgccagcggcatccccgcccccaagatgacctggatgaaggacggcagacccctgccccagaccgaccaggtgcagaccctgggcggcggcgaggtgctgagaatcagcaccgcccaggtggaggacaccggcagatacacctgcctggccagcagccccgccggcgacgacgacaaggagtacctggtgagagtgcacgtgccccccaacatcgccggcaccgacgagcccagagacatcaccgtgctgagaaacagacaggtgaccctggagtgcaagagcgacgccgtgcccccccccgtgatcacctggctgagaaacggcgagagactgcaggccacccccagagtgagaatcctgagcggcggcagatacctgcagatcaacaacgccgacctgggcgacaccgccaactacacctgcgtggccagcaacatcgccggcaagaccaccagagagttcatcctgaccgtgaacgtgccccccaacatcaagggcggcccccagagcctggtgatcctgctgaacaagagcaccgtgctggagtgcatcgccgagggcgtgcccacccccagaatcacctggagaaaggacggcgccgtgctggccggcaaccacgccagatacagcatcctggagaacggcttcctgcacatccagagcgcccacgtgaccgacaccggcagatacctgtgcatggccaccaacgccgccggcaccgacagaagaagaatcgacctgcaggtgcacgtgccccccagcatcgcccccggccccaccaacatgaccgtgatcgtgaacgtgcagaccaccctggcctgcgaggccaccggcatccccaagcccagcatcaactggagaaagaacggccacctgctgaacgtggaccagaaccagaacagctacagactgctgagcagcggcagcctggtgatcatcagccccagcgtggacgacaccgccacctacgagtgcaccgtgaccaacggcgccggcgacgacaagagaaccgtggacctgaccgtgcaggtgccccccagcatcgccgacgagcccaccgacttcctggtgaccaagcacgcccccgccgtgatcacctgcaccgccagcggcgtgcccttccccagcatccactggaccaagaacggcatcagactgctgcccagaggcgacggctacagaatcctgagcagcggcgccatcgagatcctggccacccagctgaaccacgccggcagatacacctgcgtggccagaaacgccgccggcagcgcccacagacacgtgaccctgcacgtgcacgagccccccgtgatccagccccagcccagcgagctgcacgtgatcctgaacaaccccatcctgctgccctgcgaggccaccggcacccccagccccttcatcacctggcagaaggagggcatcaacgtgaacaccagcggcagaaaccacgccgtgctgcccagcggcggcctgcagatcagcagagccgtgagagaggacgccggcacctacatgtgcgtggcccagaaccccgccggcaccgccctgggcaagatcaagctgaacgtgcaggtgccccccgtgatcagcccccacctgaaggagtacgtgatcgccgtggacaagcccatcaccctgagctgcgaggccgacggcctgcccccccccgacatcacctggcacaaggacggcagagccatcgtggagagcatcagacagagagtgctgagcagcggcagcctgcagatcgccttcgtgcagcccggcgacgccggccactacacctgcatggccgccaacgtggccggcagcagcagcaccagcaccaagctgaccgtgcacgtgccccccagaatcagaagcaccgagggccactacaccgtgaacgagaacagccaggccatcctgccctgcgtggccgacggcatccccacccccgccatcaactggaagaaggacaacgtgctgctggccaacctgctgggcaagtacaccgccgagccctacggcgagctgatcctggagaacgtggtgctggaggacagcggcttctacacctgcgtggccaacaacgccgccggcgaggacacccacaccgtgagcctgaccgtgcacgtgctgcccaccttcaccgagctgcccggcgacgtgagcctgaacaagggcgagcagctgagactgagctgcaaggccaccggcatccccctgcccaagctgacctggaccttcaacaacaacatcatccccgcccacttcgacagcgtgaacggccacagcgagctggtgatcgagagagtgagcaaggaggacagcggcacctacgtgtgcaccgccgagaacagcgtgggcttcgtgaaggccatcggcttcgtgtacgtgaaggagccccccgtgttcaagggcgactaccccagcaactggatcgagcccctgggcggcaacgccatcctgaactgcgaggtgaagggcgaccccacccccaccatccagtggaacagaaagggcgtggacatcgagatcagccacagaatcagacagctgggcaacggcagcctggccatctacggcaccgtgaacgaggacgccggcgactacacctgcgtggccaccaacgaggccggcgtggtggagagaagcatgagcctgaccctgcagagcccccccatcatcaccctggagcccgtggagaccgtgatcaacgccggcggcaagatcatcctgaactgccaggccaccggcgagccccagcccaccatcacctggagcagacagggccacagcatcagctgggacgacagagtgaacgtgctgagcaacaacagcctgtacatcgccgacgcccagaaggaggacaccagcgagttcgagtgcgtggccagaaacctgatgggcagcgtgctggtgagagtgcccgtgatcgtgcaggtgcacggcggcttcagccagtggagcgcctggagagcctgcagcgtgacctgcggcaagggcatccagaagagaagcagactgtgcaaccagcccctgcccgccaacggcggcaagccctgccagggcagcgacctggagatgagaaactgccagaacaagccctgccccgtggacggcagctggagcgagtggagcctgtgggaggagtgcaccagaagctgcggcagaggcaaccagaccagaaccagaacctgcaacaaccccagcgtgcagcacggcggcagaccctgcgagggcaacgccgtggagatcatcatgtgcaacatcagaccctgccccgtgcacggcgcctggagcgcctggcagccctggggcacctgcagcgagagctgcggcaagggcacccagaccagagccagactgtgcaacaaccccccccccgccttcggcggcagctactgcgacggcgccgagacccagatgcaggtgtgcaacgagagaaactgccccatccacggcaagtgggccacctgggccagctggagcgcctgcagcgtgagctgcggcggcggcgccagacagagaaccagaggctgcagcgaccccgtgccccagtacggcggcagaaagtgcgagggcagcgacgtgcagagcgacttctgcaacagcgacccctgccccacccacggcaactggagcccctggagcggctggggcacctgcagcagaacctgcaacggcggccagatgagaagatacagaacctgcgacaaccccccccccagcaacggcggcagagcctgcggcggccccgacagccagatccagagatgcaacaccgacatgtgccccgtggacggcagctggggcagctggcacagctggagccagtgcagcgccagctgcggcggcggcgagaagaccagaaagagactgtgcgaccaccccgtgcccgtgaagggcggcagaccctgccccggcgacaccacccaggtgaccagatgcaacgtgcaggcctgccccggcggcccccagagagccagaggcagcgtgatcggcaacatcaacgacgtggagttcggcatcgccttcctgaacgccaccatcaccgacagccccaacagcgacaccagaatcatcagagccaagatcaccaacgtgcccagaagcctgggcagcgccatgagaaagatcgtgagcatcctgaaccccatctactggaccaccgccaaggagatcggcgaggccgtgaacggcttcaccctgaccaacgccgtgttcaagagagagacccaggtggagttcgccaccggcgagatcctgcagatgagccacatcgccagaggcctggacagcgacggcagcctgctgctggacatcgtggtgagcggctacgtgctgcagctgcagagccccgccgaggtgaccgtgaaggactacaccgaggactacatccagaccggccccggccagctgtacgcctacagcaccagactgttcaccatcgacggcatcagcatcccctacacctggaaccacaccgtgttctacgaccaggcccagggcagaatgcccttcctggtggagaccctgcacgccagcagcgtggagagcgactacaaccagatcgaggagaccctgggcttcaagatccacgccagcatcagcaagggcgacagaagcaaccagtgccccagcggcttcaccctggacagcgtgggccccttctgcgccgacgaggacgagtgcgccgccggcaacccctgcagccacagctgccacaacgccatgggcacctactactgcagctgccccaagggcctgaccatcgccgccgacggcagaacctgccaggacatcgacgagtgcgccctgggcagacacacctgccacgccggccaggactgcgacaacaccatcggcagctacagatgcgtggtgagatgcggcagcggcttcagaagaaccagcgacggcctgagctgccaggacatcaacgagtgccaggagagcagcccctgccaccagagatgcttcaacgccatcggcagcttccactgcggctgcgagcccggctaccagctgaagggcagaaagtgcatggacgtgaacgagtgcagacagaacgtgtgcagacccgaccagcactgcaagaacaccagaggcggctacaagtgcatcgacctgtgccccaacggcatgaccaaggccgagaacggcacctgcatcgacatcgacgagtgcaaggacggcacccaccagtgcagatacaaccagatctgcgagaacaccagaggcagctacagatgcgtgtgccccagaggctacagaagccagggcgtgggcagaccctgcatggacatcgacgagtgcgagaacaccgacgcctgccagcacgagtgcaagaacaccttcggcagctaccagtgcatctgcccccccggctaccagctgacccacaacggcaagacctgccaggacatcgacgagtgcctggagcagaacgtgcactgcggccccaacagaatgtgcttcaacatgagaggcagctaccagtgcatcgacaccccctgcccccccaactaccagagagaccccgtgagcggcttctgcctgaagaactgcccccccaacgacctggagtgcgccctgagcccctacgccctggagtacaagctggtgagcctgcccttcggcatcgccaccaaccaggacctgatcagactggtggcctacacccaggacggcgtgatgcaccccagaaccaccttcctgatggtggacgaggagcagaccgtgcccttcgccctgagagacgagaacctgaagggcgtggtgtacaccaccagacccctgagagaggccgagacctacagaatgagagtgagagccagcagctacagcgccaacggcaccatcgagtaccagaccaccttcatcgtgtacatcgccgtgagcgcctacccctactag

SEQ ID NO: 84278 - DNA, 723 bp, synthetic construct
  misc_feature 1..723: note = Description of Artificial Sequence: Synthetic coding sequence
  source 1..723: mol_type = other DNA
gccatcggcagcttccactgcggctgcgagcccggctaccagctgaagggcagaaagtgcatggacgtgaacgagtgcagacagaacgtgtgcagacccgaccagcactgcaagaacaccagaggcggctacaagtgcatcgacctgtgccccaacggcatgaccaaggccgagaacggcacctgcatcgacatcgacgagtgcaaggacggcacccaccagtgcagatacaaccagatctgcgagaacaccagaggcagctacagatgcgtgtgccccagaggctacagaagccagggcgtgggcagaccctgcatggacatcgacgagtgcgagaacaccgacgcctgccagcacgagtgcaagaacaccttcggcagctaccagtgcatctgcccccccggctaccagctgacccacaacggcaagacctgccaggacatcgacgagtgcctggagcagaacgtgcactgcggccccaacagaatgtgcttcaacatgagaggcagctaccagtgcatcgacaccccctgcccccccaactaccagagagaccccgtgagcggcttctgcctgaagaactgcccccccaacgacctggagtgcgccctgagcccctacgccctggagtacaagctggtgagcctgcccttcggcatcgccaccaaccaggacctgatcagactggtggcctacacccaggacggcgtgatgcacccctag

SEQ ID NO: 84279 - DNA, 1455 bp, synthetic construct
  misc_feature 1..1455: note = Description of Artificial Sequence: Synthetic coding sequence
  source 1..1455: mol_type = other DNA
atggacctgggcaaggaccagagccacctgaagcaccaccagacccccgacccccaccaggaggagaaccacagccccgaggtgatcggcacctggagcctgagaaacagagagctgctgagaaagagaaaggccgaggtgcacgagaaggagaccagccagtggctgttcggcgagcagaagaagagaaagcagcagagaaccggcaagggcaacagaagaggcagaaagagacagcagaacaccgagctgaaggtggagccccagccccagatcgagaaggagatcgtggagaaggccctggcccccatcgagaagaagaccgagccccccggcagcatcaccaaggtgttccccagcgtggccagcccccagaaggtggtgcccgaggagcacttcagcgagatctgccaggagagcaacatctaccaggagaacttcagcgagtaccaggagatcgccgtgcagaaccacagcagcgagacctgccagcacgtgagcgagcccgaggacctgagccccaagatgtaccaggagatcagcgtgctgcaggacaacagcagcaagatctgccaggacatgaaggagcccgaggacaacagccccaacacctgccaggtgatcagcgtgatccaggaccaccccttcaagatgtaccaggacatggccaagagagaggacctggcccccaagatgtgccaggaggccgccgtgcccaagatcctgccctgccccaccagcgaggacaccgccgacctggccggctgcagcctgcaggcctaccccaagcccgacgtgcccaagggctacatcctggacaccgaccagaaccccgccgagcccgaggagtacaacgagaccgaccagggcatcgccgagaccgagggcctgttccccaagatccaggagatcgccgagcccaaggacctgagcaccaagacccaccaggagagcgccgagcccaagtacctgccccacaagacctgcaacgagatcatcgtgcccaaggcccccagccacaagaccatccaggagaccccccacagcgaggactacagcatcgagatcaaccaggagacccccggcagcgagaagtacagccccgagacctaccaggagatccccggcctggaggagtacagccccgagatctaccaggagaccagccagctggaggagtacagccccgagatctaccaggagacccccggccccgaggacctgagcaccgagacctacaagaacaaggacgtgcccaaggagtgcttccccgagccccaccaggagaccggcggcccccagggccaggaccccaaggcccaccaggaggacgccaaggacgcctacaccttcccccaggagatgaaggagaagcccaaggaggagcccggcatccccgccatcctgaacgagagccaccccgagaacgacgtgtacagctacgtgctgttctag

SEQ ID NO: 84280 - DNA, 1455 bp, synthetic construct; identical to SEQ ID NO: 84279
  misc_feature 1..1455: note = Description of Artificial Sequence: Synthetic coding sequence
  source 1..1455: mol_type = other DNA

SEQ ID NO: 84281 - DNA, 429 bp, synthetic construct
  misc_feature 1..429: note = Description of Artificial Sequence: Synthetic coding sequence
  source 1..429: mol_type = other DNA
atggtgctgagccccgccgacaagaccaacgtgaaggccgcctggggcaaggtgggcgcccacgccggcgagtacggcgccgaggccctggagagaatgttcctgagcttccccaccaccaagacctacttcccccacttcgacctgagccacggcagcgcccaggtgaagggccacggcaagaaggtggccgacgccctgaccaacgccgtggcccacgtggacgacatgcccaacgccctgagcgccctgagcgacctgcacgcccacaagctgagagtggaccccgtgaacttcaagctgctgagccactgcctgctggtgaccctggccgcccacctgcccgccgagttcacccccgccgtgcacgccagcctggacaagttcctggccagcgtgagcaccgtgctgaccagcaagtacagatag

SEQ ID NO: 84282 - DNA, 429 bp, synthetic construct; identical to SEQ ID NO: 84281
  misc_feature 1..429: note = Description of Artificial Sequence: Synthetic coding sequence
  source 1..429: mol_type = other DNA

SEQ ID NO: 84283 - DNA, 333 bp, synthetic construct
  misc_feature 1..333: note = Description of Artificial Sequence: Synthetic coding sequence
  source 1..333: mol_type = other DNA
atgttcctgagcttccccaccaccaagacctacttcccccacttcgacctgagccacggcagcgcccaggtgaagggccacggcaagaaggtggccgacgccctgaccaacgccgtggcccacgtggacgacatgcccaacgccctgagcgccctgagcgacctgcacgcccacaagctgagagtggaccccgtgaacttcaagctgctgagccactgcctgctggtgaccctggccgcccacctgcccgccgagttcacccccgccgtgcacgccagcctggacaagttcctggccagcgtgagcaccgtgctgaccagcaagtacagatag

SEQ ID NO: 84284 - DNA, 444 bp, synthetic construct
  misc_feature 1..444: note = Description of Artificial Sequence: Synthetic coding sequence
  source 1..444: mol_type = other DNA
atggtgcacctgacccccgaggagaagagcgccgtgaccgccctgtggggcaaggtgaacgtggacgaggtgggcggcgaggccctgggcagactgctggtggtgtacccctggacccagagattcttcgagagcttcggcgacctgagcacccccgacgccgtgatgggcaaccccaaggtgaaggcccacggcaagaaggtgctgggcgccttcagcgacggcctggcccacctggacaacctgaagggcaccttcgccaccctgagcgagctgcactgcgacaagctgcacgtggaccccgagaacttcagactgctgggcaacgtgctggtgtgcgtgctggcccaccacttcggcaaggagttcaccccccccgtgcaggccgcctaccagaaggtggtggccggcgtggccaacgccctggcccacaagtaccactag

SEQ ID NO: 84285 - DNA, 273 bp, synthetic construct
  misc_feature 1..273: note = Description of Artificial Sequence: Synthetic coding sequence
  source 1..273: mol_type = other DNA
atggtgcacctgacccccgaggagaagagcgccgtgaccgccctgtggggcaaggtgaacgtggacgaggtgggcggcgaggccctgggcagactgctggtggtgtacccctggacccagagattcttcgagagcttcggcgacctgagcacccccgacgccgtgatgggcaaccccaaggtgaaggcccacggcaagaaggtgctgggcgccttcagcgacggcctggcccacctggacaacctgaagggcaccttcgccaccctgagctag

SEQ ID NO: 84286 - DNA, 426 bp, synthetic construct
  misc_feature 1..426: note = Description of Artificial Sequence: Synthetic coding sequence
  source 1..426: mol_type = other DNA
atggtgcacctgacccccgaggagaagaccgccgtgaacgccctgtggggcaaggtgaacgtggacgccgtgggcggcgaggccctgggcagactgctggtggtgtacccctggacccagagattcttcgagagcttcggcgacctgagcagccccgacgccgtgatgggcaaccccaaggtgaaggcccacggcaagaaggtgctgggcgccttcagcgacggcctggcccacctggacaacctgaagggcaccttcagccagctgagcgagctgcactgcgacaagctgcacgtggaccccgagaacttcagagtgtgcaagaaggtgcccgaggccctgcagatcggcagcacctgcctgttctacaaggagtacatgggcaaggagaagagcaagggcaccgtgcagggcatcaacggctag

SEQ ID NO: 84287 - DNA, 444 bp, synthetic construct
  misc_feature 1..444: note = Description of Artificial Sequence: Synthetic coding sequence
  source 1..444: mol_type = other DNA
atggtgcacctgacccccgaggagaagaccgccgtgaacgccctgtggggcaaggtgaacgtggacgccgtgggcggcgaggccctgggcagactgctggtggtgtacccctggacccagagattcttcgagagcttcggcgacctgagcagccccgacgccgtgatgggcaaccccaaggtgaaggcccacggcaagaaggtgctgggcgccttcagcgacggcctggcccacctggacaacctgaagggcaccttcagccagctgagcgagctgcactgcgacaagctgcacgtggaccccgagaacttcagactgctgggcaacgtgctggtgtgcgtgctggccagaaacttcggcaaggagttcaccccccagatgcaggccgcctaccagaaggtggtggccggcgtggccaacgccctggcccacaagtaccactag

SEQ ID NO: 84288 - DNA, 315 bp, synthetic construct
  misc_feature 1..315: note = Description of Artificial Sequence: Synthetic coding sequence
  source 1..315: mol_type = other DNA
atggtgcacctgacccccgaggagaagaccgccgtgaacgccctgtggggcaaggtgaacgtggacgccgtgggcggcgaggccctgggcagactgctggtggtgtacccctggacccagagattcttcgagagcttcggcgacctgagcagccccgacgccgtgatgggcaaccccaaggtgaaggcccacggcaagaaggtgctgggcgccttcagcgacggcctggcccacctggacaacctgaagggcaccttcagccagctgagcgagctgcactgcgacaagctgcacgtggaccccgagaacttctag

SEQ ID NO: 84289 - DNA, 444 bp, synthetic construct
  misc_feature 1..444: note = Description of Artificial Sequence: Synthetic coding sequence
  source 1..444: mol_type = other DNA
atggtgcacttcaccgccgaggagaaggccgccgtgaccagcctgtggagcaagatgaacgtggaggaggccggcggcgaggccctgggcagactgctggtggtgtacccctggacccagagattcttcgacagcttcggcaacctgagcagccccagcgccatcctgggcaaccccaaggtgaaggcccacggcaagaaggtgctgaccagcttcggcgacgccatcaagaacatggacaacctgaagcccgccttcgccaagctgagcgagctgcactgcgacaagctgcacgtggaccccgagaacttcaagctgctgggcaacgtgatggtgatcatcctggccacccacttcggcaaggagttcacccccgaggtgcaggccgcctggcagaagctggtgagcgccgtggccatcgccctggcccacaagtaccactag

SEQ ID NO: 84290 - DNA, 444 bp, synthetic construct; identical to SEQ ID NO: 84289
  misc_feature 1..444: note = Description of Artificial Sequence: Synthetic coding sequence
  source 1..444: mol_type = other DNA

SEQ ID NO: 84291 - DNA, 264 bp, synthetic construct
  misc_feature 1..264: note = Description of Artificial Sequence: Synthetic coding sequence
  source 1..264: mol_type = other DNA
atggtgcacttcaccgccgaggagaaggccgccgtgaccagcctgtggagcaagatgaacgtggaggaggccggcggcgaggccctgggcagactgctggtggtgtacccctggacccagagattcttcgacagcttcggcaacctgagcagccccagcgccatcctgggcaaccccaaggtgaaggcccacggcaagaaggtgctgaccagcttcggcgacgccatcaagaacatggacaacctgaagcccgccttcgcctag

SEQ ID NO: 84292 - DNA, 444 bp, synthetic construct
  misc_feature 1..444: note = Description of Artificial Sequence: Synthetic coding sequence
  source 1..444: mol_type = other DNA
atgggccacttcaccgaggaggacaaggccaccatcaccagcctgtggggcaaggtgaacgtggaggacgccggcggcgagaccctgggcagactgctggtggtgtacccctggacccagagattcttcgacagcttcggcaacctgagcagcgccagcgccatcatgggcaaccccaaggtgaaggcccacggcaagaaggtgctgaccagcctgggcgacgccaccaagcacctggacgacctgaagggcaccttcgcccagctgagcgagctgcactgcgacaagctgcacgtggaccccgagaacttcaagctgctgggcaacgtgctggtgaccgtgctggccatccacttcggcaaggagttcacccccgaggtgcaggccagctggcagaagatggtgaccgccgtggccagcgccctgagcagcagataccactag

SEQ ID NO: 84293 - DNA, 444 bp, synthetic construct
  misc_feature 1..444: note = Description of Artificial Sequence: Synthetic coding sequence
  source 1..444: mol_type = other DNA
atgggccacttcaccgaggaggacaaggccaccatcaccagcctgtggggcaaggtgaacgtggaggacgccggcggcgagaccctgggcagactgctggtggtgtacccctggacccagagattcttcgacagcttcggcaacctgagcagcgccagcgccatcatgggcaaccccaaggtgaaggcccacggcaagaaggtgctgaccagcctgggcgacgccatcaagcacctggacgacctgaagggcaccttcgcccagctgagcgagctgcactgcgacaagctgcacgtggaccccgagaacttcaagctgctgggcaacgtgctggtgaccgtgctggccatccacttcggcaaggagttcacccccgaggtgcaggccagctggcagaagatggtgaccggcgtggccagcgccctgagcagcagataccactag

SEQ ID NO: 84294 - DNA, 477 bp, synthetic construct
  misc_feature 1..477: note = Description of Artificial Sequence: Synthetic coding sequence
  source 1..477: mol_type = other DNA
atgggccacttcaccgaggaggacaaggccaccatcaccagcctgtggggcaaggtgaacgtggaggacgccggcggcgagaccctgggcagactgctggtggtgtacccctggacccagagattcttcgacagcttcggcaacctgagcagcgccagcgccatcatgggcaaccccaaggtgaaggcccacggcaagaaggtgctgaccagcctgggcgacgccatcaagcacctggacgacctgaagggcaccttcgcccagctgagcgagctgcactgcgacaagctgcacgtggaccccgagaacttcaagctgctgggcaacgtgctggtgaccgtgctggccatccacttcggcaaggagttcacccccgaggtgcaggccagctggcagaagatggactggagcggccagtgccccgtgctgcagatccccctgagcagcctgcccatgatgcagagcttccagggctag

SEQ ID NO: 84295 - DNA, 414 bp, synthetic construct
  misc_feature 1..414: note = Description of Artificial Sequence: Synthetic coding sequence
  source 1..414: mol_type = other DNA
atggtggtgctgggcgagatgaagagaaaggtgctgcccctgcacttcctgcccttcatgagactgctggtggtgtacccctggacccagagattcttcgacagcttcggcaacctgagcagcgccagcgccatcatgggcaaccccaaggtgaaggcccacggcaagaaggtgctgaccagcctgggcgacgccatcaagcacctggacgacctgaagggcaccttcgcccagctgagcgagctgcactgcgacaagctgcacgtggaccccgagaacttcaagctgctgggcaacgtgctggtgaccgtgctggccatccacttcggcaaggagttcacccccgaggtgcaggccagctggcagaagatggtgaccggcgtggccagcgccctgagcagcagataccactag

SEQ ID NO: 84296 - DNA, 444 bp, synthetic construct; identical to SEQ ID NO: 84293
  misc_feature 1..444: note = Description of Artificial Sequence: Synthetic coding sequence
  source 1..444: mol_type = other DNA

SEQ ID NO: 84297 - DNA, 426 bp, synthetic construct
  misc_feature 1..426: note = Description of Artificial Sequence: Synthetic coding sequence
  source 1..426: mol_type = other DNA
atgctgagcgcccaggagagagcccagatcgcccaggtgtgggacctgatcgccggccacgaggcccagttcggcgccgagctgctgctgagactgttcaccgtgtaccccagcaccaaggtgtacttcccccacctgagcgcctgccaggacgccacccagctgctgagccacggccagagaatgctggccgccgtgggcgccgccgtgcagcacgtggacaacctgagagccgccctgagccccctggccgacctgcacgccctggtgctgagagtggaccccgccaacttccccctgctgatccagtgcttccacgtggtgctggccagccacctgcaggacgagttcaccgtgcagatgcaggccgcctgggacaagttcctgaccggcgtggccgtggtgctgaccgagaagtacagatag

SEQ ID NO: 84298 - DNA, 429 bp, synthetic construct
  misc_feature 1..429: note = Description of Artificial Sequence: Synthetic coding sequence
  source 1..429: mol_type = other DNA
atggccctgagcgccgaggacagagccctggtgagagccctgtggaagaagctgggcagcaacgtgggcgtgtacaccaccgaggccctggagagaaccttcctggccttccccgccaccaagacctacttcagccacctggacctgagccccggcagcagccaggtgagagcccacggccagaaggtggccgacgccctgagcctggccgtggagagactggacgacctgccccacgccctgagcgccctgagccacctgcacgcctgccagctgagagtggaccccgccagcttccagctgctgggccactgcctgctggtgaccctggccagacactaccccggcgacttcagccccgccctgcaggccagcctggacaagttcctgagccacgtgatcagcgccctggtgagcgagtacagatag

SEQ ID NO: 84299 - DNA, 429 bp, synthetic construct
  misc_feature 1..429: note = Description of Artificial Sequence: Synthetic coding sequence
  source 1..429: mol_type = other DNA
atgagcctgaccaagaccgagagaaccatcatcgtgagcatgtgggccaagatcagcacccaggccgacaccatcggcaccgagaccctggagagactgttcctgagccacccccagaccaagacctacttcccccacttcgacctgcaccccggcagcgcccagctgagagcccacggcagcaaggtggtggccgccgtgggcgacgccgtgaagagcatcgacgacatcggcggcgccctgagcaagctgagcgagctgcacgcctacatcctgagagtggaccccgtgaacttcaagctgctgagccactgcctgctggtgaccctggccgccagattccccgccgacttcaccgccgaggcccacgccgcctgggacaagttcctgagcgtggtgagcagcgtgctgaccgagaagtacagatag

SEQ ID NO: 84300 - DNA, 1389 bp, synthetic construct
  misc_feature 1..1389: note = Description of Artificial Sequence: Synthetic coding sequence
  source 1..1389: mol_type = other DNA
atggccagagtgctgggcgcccccgtggccctgggcctgtggagcctgtgctggagcctggccatcgccacccccctgccccccaccagcgcccacggcaacgtggccgagggcgagaccaagcccgaccccgacgtgaccgagagatgcagcgacggctggagcttcgacgccaccaccctggacgacaacggcaccatgctgttcttcaagggcgagttcgtgtggaagagccacaagtgggacagagagctgatcagcgagagatggaagaacttccccagccccgtggacgccgccttcagacagggccacaacagcgtgttcctgatcaagggcgacaaggtgtgggtgtacccccccgagaagaaggagaagggctaccccaagctgctgcaggacgagttccccggcatccccagccccctggacgccgccgtggagtgccacagaggcgagtgccaggccgagggcgtgctgttcttccagggcgacagagagtggttctgggacctggccaccggcaccatgaaggagagaagctggcccgccgtgggcaactgcagcagcgccctgagatggctgggcagatactactgcttccagggcaaccagttcctgagattcgaccccgtgagaggcgaggtgccccccagataccccagagacgtgagagactacttcatgccctgccccggcagaggccacggccacagaaacggcaccggccacggcaacagcacccaccacggccccgagtacatgagatgcagcccccacctggtgctgagcgccctgaccagcgacaaccacggcgccacctacgccttcagcggcacccactactggagactggacaccagcagagacggctggcacagctggcccatcgcccaccagtggccccagggccccagcgccgtggacgccgccttcagctgggaggagaagctgtacctggtgcagggcacccaggtgtacgtgttcctgaccaagggcggctacaccctggtgagcggctaccccaagagactggagaaggaggtgggcaccccccacggcatcatcctggacagcgtggacgccgccttcatctgccccggcagcagcagactgcacatcatggccggcagaagactgtggtggctggacctgaagagcggcgcccaggccacctggaccgagctgccctggccccacgagaaggtggacggcgccctgtgcatggagaagagcctgggccccaacagctgcagcgccaacggccccggcctgtacctgatccacggccccaacctgtactgctacagcgacgtggagaagctgaacgccgccaaggccctgccccagccccagaacgtgaccagcctgctgggctgcacccactag

SEQ ID NO: 84301 - DNA, 765 bp, synthetic construct
  misc_feature 1..765: note = Description of Artificial Sequence: Synthetic coding sequence
  source 1..765: mol_type = other DNA
atggccagagtgctgggcgcccccgtggccctgggcctgtggagcctgtgctggagcctggccatcgccacccccctgccccccaccagcgcccacggcaacgtggccgagggcgagaccaagcccgaccccgacgtgaccgagagatgcagcgacggctggagcttcgacgccaccaccctggacgacaacggcaccatgctgttcttcaagggcgagttcgtgtggaagagccacaagtgggacagagagctgatcagcgagagatggaagaacttccccagccccgtggacgccgccttcagacagggccacaacagcgtgttcctgatcaagggcgacaaggtgtgggtgtacccccccgagaagaaggagaagggctaccccaagctgctgcaggacgagttccccggcatccccagccccctggacgccgccgtggagtgccacagaggcgagtgccaggccgagggcgtgctgttcttccagggcgacagagagtggttctgggacctggccaccggcaccatgaaggagagaagctggcccgccgtgggcaactgcagcagcgccctgagatggctgggcagatactactgcttccagggcaaccagttcctgagattcgaccccgtgagaggcgaggtgccccccagataccccagagacgtgagagactacttcatgccctgccccggcagaggccacggccacagaaacggcaccggccacggcaacagcatctgcgccgtggcccacatctag

SEQ ID NO: 84302 - DNA, 1353 bp, synthetic construct
  misc_feature 1..1353: note = Description of Artificial Sequence: Synthetic coding sequence
  source 1..1353: mol_type = other DNA
atgtggctgaaggtgttcaccaccttcctgagcttcgccaccggcgcctgcagcggcctgaaggtgaccgtgcccagccacaccgtgcacggcgtgagaggccaggccctgtacctgcccgtgcactacggcttccacacccccgccagcgacatccagatcatctggctgttcgagagaccccacaccatgcccaagtacctgctgggcagcgtgaacaagagcgtggtgcccgacctggagtaccagcacaagttcaccatgatgccccccaacgccagcctgctgatcaaccccctgcagttccccgacgagggcaactacatcgtgaaggtgaacatccagggcaacggcaccctgagcgccagccagaagatccaggtgaccgtggacgaccccgtgaccaagcccgtggtgcagatccacccccccagcggcgccgtggagtacgtgggcaacatgaccctgacctgccacgtggagggcggcaccagactggcctaccagtggctgaagaacggcagacccgtgcacaccagcagcacctacagcttcagcccccagaacaacaccctgcacatcgcccccgtgaccaaggaggacatcggcaactacagctgcctggtgagaaaccccgtgagcgagatggagagcgacatcatcatgcccatcatctactacggcccctacggcctgcaggtgaacagcgacaagggcctgaaggtgggcgaggtgttcaccgtggacctgggcgaggccatcctgttcgactgcagcgccgacagccacccccccaacacctacagctggatcagaagaaccgacaacaccacctacatcatcaagcacggccccagactggaggtggccagcgagaaggtggcccagaagaccatggactacgtgtgctgcgcctacaacaacatcaccggcagacaggacgagacccacttcaccgtgatcatcaccagcgtgggcctggagaagctggcccagaagggcaagagcctgagccccctggccagcatcaccggcatcagcctgttcctgatcatcagcatgtgcctgctgttcctgtggaagaagtaccagccctacaaggtgatcaagcagaagctggagggcagacccgagaccgagtacagaaaggcccagaccttcagcggccacgaggacgccctggacgacttcggcatctacgagttcgtggccttccccgacgtgagcggcgtgagcagaatccccagcagaagcgtgcccgccagcgactgcgtgagcggccaggacctgcacagcaccgtgtacgaggtgatccagcacatccccgcccagcagcaggaccaccccgagtag

SEQ ID NO: 84303 - DNA, 1389 bp, synthetic construct
  misc_feature 1..1389: note = Description of Artificial Sequence: Synthetic coding sequence
  source 1..1389: mol_type = other DNA
atgggccaggacgccttcatggagcccttcggcgacaccctgggcgtgttccagtgcaagatctacctgctgctgttcggcgcctgcagcggcctgaaggtgaccgtgcccagccacaccgtgcacggcgtgagaggccaggccctgtacctgcccgtgcactacggcttccacacccccgccagcgacatccagatcatctggctgttcgagagaccccacaccatgcccaagtacctgctgggcagcgtgaacaagagcgtggtgcccgacctggagtaccagcacaagttcaccatgatgccccccaacgccagcctgctgatcaaccccctgcagttccccgacgagggcaactacatcgtgaaggtgaacatccagggcaacggcaccctgagcgccagccagaagatccaggtgaccgtggacgaccccgtgaccaagcccgtggtgcagatccacccccccagcggcgccgtggagtacgtgggcaacatgaccctgacctgccacgtggagggcggcaccagactggcctaccagtggctgaagaacggcagacccgtgcacaccagcagcacctacagcttcagcccccagaacaacaccctgcacatcgcccccgtgaccaaggaggacatcggcaactacagctgcctggtgagaaaccccgtgagcgagatggagagcgacatcatcatgcccatcatctactacggcccctacggcctgcaggtgaacagcgacaagggcctgaaggtgggcgaggtgttcaccgtggacctgggcgaggccatcctgttcgactgcagcgccgacagccacccccccaacacctacagctggatcagaagaaccgacaacaccacctacatcatcaagcacggccccagactggaggtggccagcgagaaggtggcccagaagaccatggactacgtgtgctgcgcctacaacaacatcaccggcagacaggacgagacccacttcaccgtgatcatcaccagcgtgggcctggagaagctggcccagaagggcaagagcctgagccccctggccagcatcaccggcatcagcctgttcctgatcatcagcatgtgcctgctgttcctgtggaagaagtaccagccctacaaggtgatcaagcagaagctggagggcagacccgagaccgagtacagaaaggcccagaccttcagcggccacgaggacgccctggacgacttcggcatctacgagttcgtggccttccccgacgtgagcggcgtgagcagaatccccagcagaagcgtgcccgccagcgactgcgtgagcggccaggacctgcacagcaccgtgtacgaggtgatccagcacatccccgcccagcagcaggaccaccccgagtag

SEQ ID NO: 84304 - DNA, 1104 bp, synthetic construct
  misc_feature 1..1104: note = Description of Artificial Sequence: Synthetic coding sequence
  source 1..1104: mol_type = other DNA
atggcctacagagtgctgggcagagccggccccccccagcccagaagagccagaagactgctgttcgccttcaccctgagcctgagctgcacctacctgtgctacagcttcctgtgctgctgcgacgacctgggcagaagcagactgctgggcgcccccagatgcctgagaggccccagcgccggcggccagaagctgctgcagaagagcagaccctgcgaccccagcggccccacccccagcgagcccagcgcccccagcgcccccgccgccgccgtgcccgcccccagactgagcggcagcaaccacagcggcagccccaagctgggcaccaagagactgccccaggccctgatcgtgggcgtgaagaagggcggcaccagagccgtgctggagttcatcagagtgcaccccgacgtgagagccctgggcaccgagccccacttcttcgacagaaactacggcagaggcctggactggtacagaagcctgatgcccagaaccctggagagccagatcaccctggagaagacccccagctacttcgtgacccaggaggcccccagaagaatcttcaacatgagcagagacaccaagctgatcgtggtggtgagaaaccccgtgaccagagccatcagcgactacacccagaccctgagcaagaagcccgacatccccaccttcgagggcctgagcttcagaaacagaaccctgggcctggtggacgtgagctggaacgccatcagaatcggcatgtacgtgctgcacctggagagctggctgcagtacttccccctggcccagatccacttcgtgagcggcgagagactgatcaccgaccccgccggcgagatgggcagagtgcaggacttcctgggcatcaagagattcatcaccgacaagcacttctacttcaacaagaccaagggcttcccctgcctgaagaagaccgagagcagcctgctgcccagatgcctgggcaagagcaagggcagaacccacgtgcagatcgaccccgaggtgatcgaccagctgagagagttctacagaccctacaacatcaagttctacgagaccgtgggccaggacttcagatgggagtag

SEQ ID NO: 84305 - DNA, 1035 bp, synthetic construct
  misc_feature 1..1035: note = Description of Artificial Sequence: Synthetic coding sequence
  source 1..1035: mol_type = other DNA
ccccccgccagagcccacggcgccatggcctacagagtgctgggcagagccggccccccccagcccagaagagccagaagactgctgttcgccttcaccctgagcctgagctgcacctacctgtgctacagcttcctgtgctgctgcgacgacctgggcagaagcagactgctgggcgcccccagatgcctgagaggccccagcgccggcggccagaagctgctgcagaagagcagaccctgcgaccccagcggccccacccccagcgagcccagcgcccccagcgcccccgccgccgccgtgcccgcccccagactgagcggcagcaaccacagcggcagccccaagctgggcaccaagagactgccccaggccctgatcgtgggcgtgaagaagggcggcaccagagccgtgctggagttcatcagagtgcaccccgacgtgagagccctgggcaccgagccccacttcttcgacagaaactacggcagaggcctggactggtacagaagcctgatgcccagaaccctggagagccagatcaccctggagaagacccccagctacttcgtgacccaggaggcccccagaagaatcttcaacatgagcagagacaccaagctgatcgtggtggtgagaaaccccgtgaccagagccatcagcgactacacccagaccctgagcaagaagcccgacatccccaccttcgagggcctgagcttcagaaacagaaccctgggcctggtggacgtgagctggaacgccatcagaatcggcatgtacgtgctgcacctggagagctggctgcagtacttccccctggcccagatccacttcgtgagcggcgagagactgatcaccgaccccgccggcgagatgggcagagtgcaggacttcctgggcatcaagagattcatcaccgacaagcacttctacttcaacaagaccaagggcttcccctgcctgaagaacagaatcgagccccccgccagcatgctgggccagatcaagagagagaacagctgcaccgactag

SEQ ID NO: 84306 - DNA, 1221 bp, synthetic construct
  misc_feature 1..1221: note = Description of Artificial Sequence: Synthetic coding sequence
  source 1..1221: mol_type = other DNA
atggccccccccggccccgccagcgccctgagcaccagcgccgagcccctgagcagaagcatcttcagaaagttcctgctgatgctgtgcagcctgctgaccagcctgtacgtgttctactgcctggccgagagatgccagaccctgagcggccccgtggtgggcctgagcggcggcggcgaggaggccggcgcccccggcggcggcgtgctggccggcggccccagagagctggccgtgtggcccgccgccgcccagagaaagagactgctgcagctgccccagtggagaagaagaagaccccccgcccccagagacgacggcgaggaggccgcctgggaggaggagagccccggcctgagcggcggccccggcggcagcggcgccggcagcaccgtggccgaggccccccccggcaccctggccctgctgctggacgagggcagcaagcagctgccccaggccatcatcatcggcgtgaagaagggcggcaccagagccctgctggagttcctgagagtgcaccccgacgtgagagccgtgggcgccgagccccacttcttcgacagaagctacgacaagggcctggcctggtacagagacctgatgcccagaaccctggacggccagatcaccatggagaagacccccagctacttcgtgaccagagaggcccccgccagaatcagcgccatgagcaaggacaccaagctgatcgtggtggtgagagaccccgtgaccagagccatcagcgactacacccagaccctgagcaagagacccgacatccccaccttcgagagcctgaccttcaagaacagaaccgccggcctgatcgacaccagctggagcgccatccagatcggcatctacgccaagcacctggagcactggctgagacacttccccatcagacagatgctgttcgtgagcggcgagagactgatcagcgaccccgccggcgagctgggcagagtgcaggacttcctgggcctgaagagaatcatcaccgacaagcacttctacttcaacaagaccaagggcttcccctgcctgaagaaggccgagggcagcagcagaccccactgcctgggcaagaccaagggcagaacccaccccgagatcgacagagaggtggtgagaagactgagagagttctacagacccttcaacctgaagttctaccagatgaccggccacgacttcggctgggacggctag

SEQ ID NO: 84307 - DNA, 1173 bp, synthetic construct
  misc_feature 1..1173: note = Description of Artificial Sequence: Synthetic coding sequence
  source 1..1173: mol_type = other DNA
atgggccagagactgagcggcggcagaagctgcctggacgtgcccggcagactgctgccccagcccccccccccccccccccccgtgagaagaaagctggccctgctgttcgccatgctgtgcgtgtggctgtacatgttcctgtacagctgcgccggcagctgcgccgccgcccccggcctgctgctgctgggcagcggcagcagagccgcccacgacccccccgccctggccaccgcccccgacggcaccccccccagactgcccttcagagccccccccgccacccccctggccagcggcaaggagatggccgagggcgccgccagccccgaggagcagagccccgaggtgcccgacagccccagccccatcagcagcttcttcagcggcagcggcagcaagcagctgccccaggccatcatcatcggcgtgaagaagggcggcaccagagccctgctggagttcctgagagtgcaccccgacgtgagagccgtgggcgccgagccccacttcttcgacagaagctacgacaagggcctggcctggtacagagacctgatgcccagaaccctggacggccagatcaccatggagaagacccccagctacttcgtgaccagagaggcccccgccagaatcagcgccatgagcaaggacaccaagctgatcgtggtggtgagagaccccgtgaccagagccatcagcgactacacccagaccctgagcaagagacccgacatccccaccttcgagagcctgaccttcaagaacagaaccgccggcctgatcgacaccagctggagcgccatccagatcggcatctacgccaagcacctggagcactggctgagacacttccccatcagacagatgctgttcgtgagcggcgagagactgatcagcgaccccgccggcgagctgggcagagtgcaggacttcctgggcctgaagagaatcatcaccgacaagcacttctacttcaacaagaccaagggcttcccctgcctgaagaaggccgagggcagcagcagaccccactgcctgggcaagaccaagggcagaacccaccccgagatcgacagagaggtggtgagaagactgagagagttctacagacccttcaacctgaagttctaccagatgaccggccacgacttcggctgggactag

SEQ ID NO: 84308 - DNA, 1173 bp, synthetic construct; identical to SEQ ID NO: 84307
  misc_feature 1..1173: note = Description of Artificial Sequence: Synthetic coding sequence
  source 1..1173: mol_type = other DNA

SEQ ID NO: 84309 - DNA, 1371 bp, synthetic construct
  misc_feature 1..1371: note = Description of Artificial Sequence: Synthetic coding sequence
  source 1..1371: mol_type = other DNA
atggccagatggcccgccccccccccccccccccccccccccccccccctggccgccccccccccccccggcgccagcgccaagggcccccccgccagaaagctgctgttcatgtgcaccctgagcctgagcgtgacctacctgtgctacagcctgctgggcggcagcggcagcctgcagttccccctggccctgcaggagagccccggcgccgccgccgagcccccccccagcccccccccccccagcctgctgcccacccccgtgagactgggcgcccccagccagccccccgcccccccccccctggacaacgccagccacggcgagccccccgagccccccgagcagcccgccgcccccggcaccgacggctggggcctgcccagcggcggcggcggcgcccaggacgcctggctgagaacccccctggcccccagcgagatgatcaccgcccagagcgccctgcccgagagagaggcccaggagagcagcaccaccgacgaggacctggccggcagaagagccgccaacggcagcagcgagagaggcggcgccgtgagcacccccgactacggcgagaagaagctgccccaggccctgatcatcggcgtgaagaagggcggcaccagagccctgctggaggccatcagagtgcaccccgacgtgagagccgtgggcgtggagccccacttcttcgacagaaactacgagaagggcctggagtggtacagaaacgtgatgcccaagaccctggacggccagatcaccatggagaagacccccagctacttcgtgaccaacgaggcccccaagagaatccacagcatggccaaggacatcaagctgatcgtggtggtgagaaaccccgtgaccagagccatcagcgactacacccagaccctgagcaagaagcccgagatccccaccttcgaggtgctggccttcaagaacagaaccctgggcctgatcgacgccagctggagcgccatcagaatcggcatctacgccctgcacctggagaactggctgcagtacttccccctgagccagatcctgttcgtgagcggcgagagactgatcgtggaccccgccggcgagatggccaaggtgcaggacttcctgggcctgaagagagtggtgaccgagaagcacttctacttcaacaagaccaagggcttcccctgcctgaagaagcccgaggacagcagcgcccccagatgcctgggcaagagcaagggcagaacccaccccagaatcgaccccgacgtgatccacagactgagaaagttctacaagcccttcaacctgatgttctaccagatgaccggccaggacttccagtgggagcaggaggagggcgacaagtag

SEQ ID NO: 84310 - DNA, 1041 bp, synthetic construct
  misc_feature 1..1041: note = Description of Artificial Sequence: Synthetic coding sequence
  source 1..1041: mol_type = other DNA
atgctgttcaagcagcaggcctggctgagacagaagctgctggtgctgggcagcctggccgtgggcagcctgctgtacctggtggccagagtgggcagcctggacagactgcagcccatctgccccatcgagggcagactgggcggcgccagaacccaggccgagttccccctgagagccctgcagttcaagagaggcctgctgcacgagttcagaaagggcaacgccagcaaggagcaggtgagactgcacgacctggtgcagcagctgcccaaggccatcatcatcggcgtgagaaagggcggcaccagagccctgctggagatgctgaacctgcaccccgccgtggtgaaggccagccaggagatccacttcttcgacaacgacgagaactacggcaagggcatcgagtggtacagaaagaagatgcccttcagctacccccagcagatcaccatcgagaagagccccgcctacttcatcaccgaggaggtgcccgagagaatctacaagatgaacagcagcatcaagctgctgatcatcgtgagagagcccaccaccagagccatcagcgactacacccaggtgctggagggcaaggagagaaagaacaagacctactacaagttcgagaagctggccatcgaccccaacacctgcgaggtgaacaccaagtacaaggccgtgagaaccagcatctacaccaagcacctggagagatggctgaagtacttccccatcgagcagttccacgtggtggacggcgacagactgatcaccgagcccctgcccgagctgcagctggtggagaagttcctgaacctgccccccagaatcagccagtacaacctgtacttcaacgccaccagaggcttctactgcctgagattcaacatcatcttcaacaagtgcctggccggcagcaagggcagaatccaccccgaggtggaccccagcgtgatcaccaagctgagaaagttcttccaccccttcaaccagaagttctaccagatcaccggcagaaccctgaactggccctag

SEQ ID NO: 84311 - DNA, 1041 bp, synthetic construct; identical to SEQ ID NO: 84310
  misc_feature 1..1041: note = Description of Artificial Sequence: Synthetic coding sequence
  source 1..1041: mol_type = other DNA

SEQ ID NO: 84312 - DNA, 969 bp, synthetic construct
  misc_feature 1..969: note = Description of Artificial Sequence: Synthetic coding sequence
  source 1..969: mol_type = other DNA
atgctgttcatcaagttcatccacctggaggtgttcagcatgcccgagagagccatcgccagacacgaggtgagagagatcgagcagagacacaccatggacggccccagacaggacgccaccctggacgaggaggaggacatggtgatcatctacaacagagtgcccaagaccgccagcaccagcttcaccaacatcgcctacgacctgtgcgccaagaacaagtaccacgtgctgcacatcaacaccaccaagaacaaccccgtgatgagcctgcaggaccaggtgagattcgtgaagaacatcaccagctggaaggagatgaagcccggcttctaccacggccacgtgagctacctggacttcgccaagttcggcgtgaagaagaagcccatctacatcaacgtgatcagagaccccatcgagagactggtgagctactactacttcctgagattcggcgacgactacagacccggcctgagaagaagaaagcagggcgacaagaagaccttcgacgagtgcgtggccgagggcggcagcgactgcgcccccgagaagctgtggctgcagatccccttcttctgcggccacagcagcgagtgctggaacgtgggcagcagatgggccatggaccaggccaagtacaacctgatcaacgagtacttcctggtgggcgtgaccgaggagctggaggacttcatcatgctgctggaggccgccctgcccagattcttcagaggcgccaccgagctgtacagaaccgcccccgacaccgccacccccagccacagacacggccccatctgcggcagcaagagcatcagcagcctgctggtgaaggtgagccccgtgtgcaaggacagccactgccactgcagaagaggcaccggcacccccaagggcgagaccctggccaccctggccccctgcagccagagctggagcagcgtgacccacagatggtag

SEQ ID NO: 84313 - DNA, 912 bp, synthetic construct
  misc_feature 1..912: note = Description of Artificial Sequence: Synthetic coding sequence
  source 1..912: mol_type = other DNA
atgctgttcatcaagttcatccacctggaggtgttcagcatgcccgagagagccatcgccagacacgaggtgagagagatcgagcagagacacaccatggacggccccagacaggacgccaccctggacgaggaggaggacatggtgatcatctacaacagagtgcccaagaccgccagcaccagcttcaccaacatcgcctacgacctgtgcgccaagaacaagtaccacgtgctgcacatcaacaccaccaagaacaaccccgtgatgagcctgcaggaccaggtgagattcgtgaagaacatcaccagctggaaggagatgaagcccggcttctaccacggccacgtgagctacctggacttcgccaagttcggcgtgaagaagaagcccatctacatcaacgtgatcagagaccccatcgagagactggtgagctactactacttcctgagattcggcgacgactacagacccggcctgagaagaagaaagcagggcgacaagaagaccttcgacgagtgcgtggccgagggcggcagcgactgcgcccccgagaagctgtggctgcagatccccttcttctgcggccacagcagcgagtgctggaacgtgggcagcagatgggccatggaccaggccaagtacaacctgatcaacgagtacttcctggtgggcgtgaccgaggagctggaggacttcatcatgctgctggaggccgccctgcccagattcttcagaggcgccaccgagctgtacagaaccgcccccgacaccgccacccccagccacagacacggccccatctgcggcagcaagagcatcagcagcctgctggtgaaggtgagccccgtgtgcaaggacagccactgcctgggcaagtgcagcagaaacggcctgagcgccgtgtag

SEQ ID NO: 84314 - DNA, 1071 bp, synthetic construct
  misc_feature 1..1071: note = Description of Artificial Sequence: Synthetic coding sequence
  source 1..1071: mol_type = other DNA
atgggcctgctgagaatcatgatgccccccaagctgcagctgctggccgtggtggccttcgccgtggccatgctgttcctggagaaccagatccagaagctggaggagagcagaagcaagctggagagagccatcgccagacacgaggtgagagagatcgagcagagacacaccatggacggccccagacaggacgccaccctggacgaggaggaggacatggtgatcatctacaacagagtgcccaagaccgccagcaccagcttcaccaacatcgcctacgacctgtgcgccaagaacaagtaccacgtgctgcacatcaacaccaccaagaacaaccccgtgatgagcctgcaggaccaggtgagattcgtgaagaacatcaccagctggaaggagatgaagcccggcttctaccacggccacgtgagctacctggacttcgccaagttcggcgtgaagaagaagcccatctacatcaacgtgatcagagaccccatcgagagactggtgagctactactacttcctgagattcggcgacgactacagacccggcctgagaagaagaaagcagggcgacaagaagaccttcgacgagtgcgtggccgagggcggcagcgactgcgcccccgagaagctgtggctgcagatccccttcttctgcggccacagcagcgagtgctggaacgtgggcagcagatgggccatggaccaggccaagtacaacctgatcaacgagtacttcctggtgggcgtgaccgaggagctggaggacttcatcatgctgctggaggccgccctgcccagattcttcagaggcgccaccgagctgtacagaaccggcaagaagagccacctgagaaagaccaccgagaagaagctgcccaccaagcagaccatcgccaagctgcagcagagcgacatctggaagatggagaacgagttctacgagttcgccctggagcagttccagttcatcagagcccacgccgtgagagagaaggacggcgacctgtacatcctggcccagaacttcttctacgagaagatctaccccaagagcaactag

SEQ ID NO: 84315 - DNA, 690 bp, synthetic construct
  misc_feature 1..690: note = Description of Artificial Sequence: Synthetic coding sequence
  source 1..690: mol_type = other DNA
atgggcctgctgagaatcatgatgccccccaagctgcagctgctggccgtggtggccttcgccgtggccatgctgttcctggagaaccagatccagaagctggaggagagcagaagcaagctggagagagccatcgccagacacgaggtgagagagatcgagcagagacacaccatggacggccccagacaggacgccaccctggacgaggaggaggacatggtgatcatctacaacagagtgcccaagaccgccagcaccagcttcaccaacatcgcctacgacctgtgcgccaagaacaagtaccacgtgctgcacatcaacaccaccaagaacaaccccgtgatgagcctgcaggaccaggtgagattcgtgaagaacatcaccagctggaaggagatgaagcccggcttctaccacggccacgtgagctacctggacttcgccaagttcggcgtgaagaagaagcccatctacatcaacgtgatcagagaccccatcgagagactggtgagctactactacttcctgagattcggcgacgactacagacccggcctgagaagaagaaagcagggcgacaagaagaccttcgacgagtgcgtggccgagggcggcagcgactgcgcccccgagaagctgtggctgcagatccccttcttctgcggccacagcagcgagtgctggtag

SEQ ID NO: 84316 - DNA, 1236 bp, synthetic construct
  misc_feature 1..1236: note = Description of Artificial Sequence: Synthetic coding sequence
  source 1..1236: mol_type = other DNA
atgagaagaagaagagccggcggcagaaccatggtggagagagccagcaagttcgtgctggtggtggccggcagcgtgtgcttcatgctgatcctgtaccagtacgccggccccggcctgagcctgggcgcccccggcggcagagccccccccgacgacctggacctgttccccacccccgacccccactacgagaagaagtactacttccccgtgagagagctggagagaagcctgagattcgacatgaagggcgacgacgtgatcgtgttcctgcacatccagaagaccggcggcaccaccttcggcagacacctggtgcagaacgtgagactggaggtgccctgcgactgcagacccggccagaagaagtgcacctgctacagacccaacagaagagagacctggctgttcagcagattcagcaccggctggagctgcggcctgcacgccgactggaccgagctgaccaactgcgtgcccggcgtgctggacagaagagacagcgccgccctgagaacccccagaaagttctactacatcaccctgctgagagaccccgtgagcagatacctgagcgagtggagacacgtgcagagaggcgccacctggaagaccagcctgcacatgtgcgacggcagaacccccacccccgaggagctgcccccctgctacgagggcaccgactggagcggctgcaccctgcaggagttcatggactgcccctacaacctggccaacaacagacaggtgagaatgctggccgacctgagcctggtgggctgctacaacctgagcttcatccccgagggcaagagagcccagctgctgctggagagcgccaagaagaacctgagaggcatggccttcttcggcctgaccgagttccagagaaagacccagtacctgttcgagagaaccttcaacctgaagttcatcagacccttcatgcagtacaacagcaccagagccggcggcgtggaggtggacgaggacaccatcagaagaatcgaggagctgaacgacctggacatgcagctgtacgactacgccaaggacctgttccagcagagataccagtacaagagacagctggagagaagagagcagagactgagaagcagagaggagagactgctgcacagagccaaggaggccctgcccagagaggacgccgacgagcccggcagagtgcccaccgaggactacatgagccacatcatcgagaagtggtag

SEQ ID NO: 84317 - DNA, 831 bp, synthetic construct
  misc_feature 1..831: note = Description of Artificial Sequence: Synthetic coding sequence
  source 1..831: mol_type = other DNA
atgctgttcctgttcgccgtgatcgtgctgcagtacgtgtgccccggcaccgagtgccagctgctgagactgcaggccttcagcagccccgtgcccgacccctacagaagcgaggacgagagcagcgccagattcgtgcccagatacaacttcaccagaggcgacctgctgagaaaggtggacttcgacatcaagggcgacgacctgatcgtgttcctgcacatccagaagaccggcggcaccaccttcggcagacacctggtgagaaacatccagctggagcagccctgcgagtgcagagtgggccagaagaagtgcacctgccacagacccggcaagagagagacctggctgttcagcagattcagcaccggctggagctgcggcctgcacgccgactggaccgagctgaccagctgcgtgcccagcgtggtggacggcaagagagacgccagactgagacccagcagatggagaatcttccagatcctggacgccgccagcaaggacaagagaggcagccccaacaccaacgccggcgccaacagccccagcagcaccaagaccagaaacaccagcaagagcggcaagaacttccactacatcaccatcctgagagaccccgtgagcagatacctgagcgagtggagacacgtgcagagaggcgccacctggaaggccagcctgcacgtgtgcgacggcagaccccccaccagcgaggagctgcccagctgctacaccggcgacgactggagcggctgccccctgaaggagttcatggactgcccctacaacctggccaacaacagatgcgcctgcagccccacctag

SEQ ID NO: 84318 - DNA, 1389 bp, synthetic construct
  misc_feature 1..1389: note = Description of Artificial Sequence: Synthetic coding sequence
  source 1..1389: mol_type = other DNA
atggacgagaagagcaacaagctgctgctggccctggtgatgctgttcctgttcgccgtgatcgtgctgcagtacgtgtgccccggcaccgagtgccagctgctgagactgcaggccttcagcagccccgtgcccgacccctacagaagcgaggacgagagcagcgccagattcgtgcccagatacaacttcaccagaggcgacctgctgagaaaggtggacttcgacatcaagggcgacgacctgatcgtgttcctgcacatccagaagaccggcggcaccaccttcggcagacacctggtgagaaacatccagctggagcagccctgcgagtgcagagtgggccagaagaagtgcacctgccacagacccggcaagagagagacctggctgttcagcagattcagcaccggctggagctgcggcctgcacgccgactggaccgagctgaccagctgcgtgcccagcgtggtggacggcaagagagacgccagactgagacccagcagatggagaatcttccagatcctggacgccgccagcaaggacaagagaggcagccccaacaccaacgccggcgccaacagccccagcagcaccaagaccagaaacaccagcaagagcggcaagaacttccactacatcaccatcctgagagaccccgtgagcagatacctgagcgagtggagacacgtgcagagaggcgccacctggaaggccagcctgcacgtgtgcgacggcagaccccccaccagcgaggagctgcccagctgctacaccggcgacgactggagcggctgccccctgaaggagttcatggactgcccctacaacctggccaacaacagacaggtgagaatgctgagcgacctgaccctggtgggctgctacaacctgagcgtgatgcccgagaagcagagaaacaaggtgctgctggagagcgccaagagcaacctgaagcacatggccttcttcggcctgaccgagttccagagaaagacccagtacctgttcgagaagaccttcaacatgaacttcatcagccccttcacccagtacaacaccaccagagccagcagcgtggagatcaacgaggagatccagaagagaatcgagggcctgaacttcctggacatggagctgtacagctacgccaaggacctgttcctgcagagataccagttcatgagacagaaggagcaccaggaggccagaagaaagagacaggagcagagaaagttcctgaagggcagactgctgcagacccacttccagagccagggccagggccagagccagaaccccaaccagaaccagagcaaggagcagaacgacaacaccagcaacggcaccaacgactacatcggcagcgtggagaagtggagatag

SEQ ID NO: 84319 - DNA, 1818 bp, synthetic construct
  misc_feature 1..1818: note = Description of Artificial Sequence: Synthetic coding sequence
  source 1..1818: mol_type = other DNA
atggccctgcccgcctgcgccgtgagagagttcgagccccccagacagcccgagagaggcgcccccgtgagaaccacctgccccagaagacacagcagagtggaggccgagctggccgccagcagacccggcagcgtggccgccagcgtgagagccggcccccccagaggcgtgagccacggcttccacaccagacccctgctggacaagcccagaaaggccagcagcagcctggccggcgccgcctgcgcccccctgttcgccctgctgagcagaggcagaagaagaagaatgcacgtgctgagaagaagatgggacctgggcagcctgtgcagagccctgctgaccagaggcctggccgccctgggccacagcctgaagcacgtgctgggcgccatcttcagcaagatcttcggccccatggccagcgtgggcaacatggacgagaagagcaacaagctgctgctggccctggtgatgctgttcctgttcgccgtgatcgtgctgcagtacgtgtgccccggcaccgagtgccagctgctgagactgcaggccttcagcagccccgtgcccgacccctacagaagcgaggacgagagcagcgccagattcgtgcccagatacaacttcaccagaggcgacctgctgagaaaggtggacttcgacatcaagggcgacgacctgatcgtgttcctgcacatccagaagaccggcggcaccaccttcggcagacacctggtgagaaacatccagctggagcagccctgcgagtgcagagtgggccagaagaagtgcacctgccacagacccggcaagagagagacctggctgttcagcagattcagcaccggctggagctgcggcctgcacgccgactggaccgagctgaccagctgcgtgcccagcgtggtggacggcaagagagacgccagactgagacccagcagaaacttccactacatcaccatcctgagagaccccgtgagcagatacctgagcgagtggagacacgtgcagagaggcgccacctggaaggccagcctgcacgtgtgcgacggcagaccccccaccagcgaggagctgcccagctgctacaccggcgacgactggagcggctgccccctgaaggagttcatggactgcccctacaacctggccaacaacagacaggtgagaatgctgagcgacctgaccctggtgggctgctacaacctgagcgtgatgcccgagaagcagagaaacaaggtgctgctggagagcgccaagagcaacctgaagcacatggccttcttcggcctgaccgagttccagagaaagacccagtacctgttcgagaagaccttcaacatgaacttcatcagccccttcacccagtacaacaccaccagagccagcagcgtggagatcaacgaggagatccagaagagaatcgagggcctgaacttcctggacatggagctgtacagctacgccaaggacctgttcctgcagagataccagttcatgagacagaaggagcaccaggaggccagaagaaagagacaggagcagagaaagttcctgaagggcagactgctgcagacccacttccagagccagggccagggccagagccagaaccccaaccagaaccagagccagaaccccaaccccaacgccaaccagaacctgacccagaacctgatgcagaacctgacccagagcctgagccagaaggagaacagagagagccccaagcagaacagcggcaaggagcagaacgacaacaccagcaacggcaccaacgactacatcggcagcgtggagaagtggagatag

SEQ ID NO: 84320 - DNA, 1380 bp, synthetic construct
  misc_feature 1..1380: note = Description of Artificial Sequence: Synthetic coding sequence
  source 1..1380: mol_type = other DNA
atggacgagaagagcaacaagctgctgctggccctggtgatgctgttcctgttcgccgtgatcgtgctgcagtacgtgtgccccggcaccgagtgccagctgctgagactgcaggccttcagcagccccgtgcccgacccctacagaagcgaggacgagagcagcgccagattcgtgcccagatacaacttcaccagaggcgacctgctgagaaaggtggacttcgacatcaagggcgacgacctgatcgtgttcctgcacatccagaagaccggcggcaccaccttcggcagacacctggtgagaaacatccagctggagcagccctgcgagtgcagagtgggccagaagaagtgcacctgccacagacccggcaagagagagacctggctgttcagcagattcagcaccggctggagctgcggcctgcacgccgactggaccgagctgaccagctgcgtgcccagcgtggtggacggcaagagagacgccagactgagacccagcagaaacttccactacatcaccatcctgagagaccccgtgagcagatacctgagcgagtggagacacgtgcagagaggcgccacctggaaggccagcctgcacgtgtgcgacggcagaccccccaccagcgaggagctgcccagctgctacaccggcgacgactggagcggctgccccctgaaggagttcatggactgcccctacaacctggccaacaacagacaggtgagaatgctgagcgacctgaccctggtgggctgctacaacctgagcgtgatgcccgagaagcagagaaacaaggtgctgctggagagcgccaagagcaacctgaagcacatggccttcttcggcctgaccgagttccagagaaagacccagtacctgttcgagaagaccttcaacatgaacttcatcagccccttcacccagtacaacaccaccagagccagcagcgtggagatcaacgaggagatccagaagagaatcgagggcctgaacttcctggacatggagctgtacagctacgccaaggacctgttcctgcagagataccagttcatgagacagaaggagcaccaggaggccagaagaaagagacaggagcagagaaagttcctgaagggcagactgctgcagacccacttccagagccagggccagggccagagccagaaccccaaccagaaccagagccagaaccccaaccccaacgccaaccagaacctgacccagaacctgatgcagaacctgacccagagcctgagccagaaggagaacagagagagccccaagcagaacagcggcaaggagcagaacgacaacaccagcaacggcaccaacgactacatcggcagcgtggagaagtggagatag

SEQ ID NO: 84321 - DNA, 996 bp, synthetic construct
  misc_feature 1..996: note = Description of Artificial Sequence: Synthetic coding sequence
  source 1..996: mol_type = other DNA
atgctgctgaagcacaacggcaagctgctgctgttctacctgctgagctaccaggccctggccagcgactggttctactgcagcttcaacagatggagaatcttccagatcctggacgccgccagaaacttccactacatcaccatcctgagagaccccgtgagcagatacctgagcgagtggagacacgtgcagagaggcgccacctggaaggccagcctgcacgtgtgcgacggcagaccccccaccagcgaggagctgcccagctgctacaccggcgacgactggagcggctgccccctgaaggagttcatggactgcccctacaacctggccaacaacagacaggtgagaatgctgagcgacctgaccctggtgggctgctacaacctgagcgtgatgcccgagaagcagagaaacaaggtgctgctggagagcgccaagagcaacctgaagcacatggccttcttcggcctgaccgagttccagagaaagacccagtacctgttcgagaagaccttcaacatgaacttcatcagccccttcacccagtacaacaccaccagagccagcagcgtggagatcaacgaggagatccagaagagaatcgagggcctgaacttcctggacatggagctgtacagctacgccaaggacctgttcctgcagagataccagttcatgagacagaaggagcaccaggaggccagaagaaagagacaggagcagagaaagttcctgaagggcagactgctgcagacccacttccagagccagggccagggccagagccagaaccccaaccagaaccagagccagaaccccaaccccaacgccaaccagaacctgacccagaacctgatgcagaacctgacccagagcctgagccagaaggagaacagagagagccccaagcagaacagcggcaaggagcagaacgacaacaccagcaacggcaccaacgactacatcggcagcgtggagaagtggagatag

SEQ ID NO: 84322 - DNA, 1938 bp, synthetic construct
  misc_feature 1..1938: note = Description of Artificial Sequence: Synthetic coding sequence
  source 1..1938: mol_type = other DNA
atggccctgcccgcctgcgccgtgagagagttcgagccccccagacagcccgagagaggcgcccccgtgagaaccacctgccccagaagacacagcagagtggaggccgagctggccgccagcagacccggcagcgtggccgccagcgtgagagccggcccccccagaggcgtgagccacggcttccacaccagacccctgctggacaagcccagaaaggccagcagcagcctggccggcgccgcctgcgcccccctgttcgccctgctgagcagaggcagaagaagaagaatgcacgtgctgagaagaagatgggacctgggcagcctgtgcagagccctgctgaccagaggcctggccgccctgggccacagcctgaagcacgtgctgggcgccatcttcagcaagatcttcggccccatggccagcgtgggcaacatggacgagaagagcaacaagctgctgctggccctggtgatgctgttcctgttcgccgtgatcgtgctgcagtacgtgtgccccggcaccgagtgccagctgctgagactgcaggccttcagcagccccgtgcccgacccctacagaagcgaggacgagagcagcgccagattcgtgcccagatacaacttcaccagaggcgacctgctgagaaaggtggacttcgacatcaagggcgacgacctgatcgtgttcctgcacatccagaagaccggcggcaccaccttcggcagacacctggtgagaaacatccagctggagcagccctgcgagtgcagagtgggccagaagaagtgcacctgccacagacccggcaagagagagacctggctgttcagcagattcagcaccggctggagctgcggcctgcacgccgactggaccgagctgaccagctgcgtgcccagcgtggtggacggcaagagagacgccagactgagacccagcagatggagaatcttccagatcctggacgccgccagcaaggacaagagaggcagccccaacaccaacgccggcgccaacagccccagcagcaccaagaccagaaacaccagcaagagcggcaagaacttccactacatcaccatcctgagagaccccgtgagcagatacctgagcgagtggagacacgtgcagagaggcgccacctggaaggccagcctgcacgtgtgcgacggcagaccccccaccagcgaggagctgcccagctgctacaccggcgacgactggagcggctgccccctgaaggagttcatggactgcccctacaacctggccaacaacagacaggtgagaatgctgagcgacctgaccctggtgggctgctacaacctgagcgtgatgcccgagaagcagagaaacaaggtgctgctggagagcgccaagagcaacctgaagcacatggccttcttcggcctgaccgagttccagagaaagacccagtacctgttcgagaagaccttcaacatgaacttcatcagccccttcacccagtacaacaccaccagagccagcagcgtggagatcaacgaggagatccagaagagaatcgagggcctgaacttcctggacatggagctgtacagctacgccaaggacctgttcctgcagagataccagttcatgagacagaaggagcaccaggaggccagaagaaagagacaggagcagagaaagttcctgaagggcagactgctgcagacccacttccagagccagggccagggccagagccagaaccccaaccagaaccagagccagaaccccaaccccaacgccaaccagaacctgacccagaacctgatgcagaacctgacccagagcctgagccagaaggagaacagagagagccccaagcagaacagcggcaaggagcagaacgacaacaccagcaacggcaccaacgactacatcggcagcgtggagaagtggagatag

SEQ ID NO: 84323 - DNA, 1416 bp, synthetic construct
  misc_feature 1..1416: note = Description of Artificial Sequence: Synthetic coding sequence
  source 1..1416: mol_type = other DNA
atggacgagagattcaacaagtggctgctgacccccgtgctgaccctgctgttcgtggtgatcatgtaccagtacgtgagccccagctgcaccagcagctgcaccaacttcggcgagcagcccagagccggcgaggccggcccccccgccgtgcccggccccgccagaagagcccaggccccccccgaggagtgggagagaagaccccagctgccccccccccccagaggcccccccgagggccccagaggcgccgccgcccccgaggaggaggacgaggagcccggcgaccccagagagggcgaggaggaggaggaggaggacgagcccgaccccgaggcccccgagaacggcagcctgcccagattcgtgcccagattcaacttcagcctgaaggacctgaccagattcgtggacttcaacatcaagggcagagacgtgatcgtgttcctgcacatccagaagaccggcggcaccaccttcggcagacacctggtgaagaacatcagactggagcagccctgcagctgcaaggccggccagaagaagtgcacctgccacagacccggcaagaaggagacctggctgttcagcagattcagcaccggctggagctgcggcctgcacgccgactggaccgagctgaccaactgcgtgcccgccatcatggagaagaaggactgccccagaaaccacagccacaccagaaacttctactacatcaccatgctgagagaccccgtgagcagatacctgagcgagtggaagcacgtgcagagaggcgccacctggaagaccagcctgcacatgtgcgacggcagaagccccacccccgacgagctgcccacctgctaccccggcgacgactggagcggcgtgagcctgagagagttcatggactgcacctacaacctggccaacaacagacaggtgagaatgctggccgacctgagcctggtgggctgctacaacctgaccttcatgaacgagagcgagagaaacaccatcctgctgcagagcgccaagaacaacctgaagaacatggccttcttcggcctgaccgagttccagagaaagacccagttcctgttcgagagaaccttcaacctgaagttcatcagccccttcacccagttcaacatcaccagagccagcaacgtggagatcaacgagggcgccagacagagaatcgaggacctgaacttcctggacatgcagctgtacgagtacgccaaggacctgttccagcagagataccaccacaccaagcagctggagcaccagagagacagacagaagagaagagaggagagaagactgcagagagagcacagagaccaccagtggcccaaggaggacggcgccgccgagggcaccgtgaccgaggactacaacagccaggtggtgagatggtag

SEQ ID NO: 84324 - DNA, 543 bp, synthetic construct
  misc_feature 1..543: note = Description of Artificial Sequence: Synthetic coding sequence
  source 1..543: mol_type = other DNA
tgagcccagacccccccccccccccccgccgccgtggccgtggccgtgacccccgtgccccagttccccagagcctgcaccgaggccgagttcgcctgccacagctacaacgagtgcgtggccctggagtacagatgcgacagaagacccgactgcagagacatgagcgacgagctgaactgcgaggagcccgtgctgggcatcagccccaccttcagcctgctggtggagaccaccagcctgccccccagacccgagaccaccatcatgagacagccccccgtgacccacgccccccagcccctgctgcccggcagcgtgagacccctgccctgcggcccccaggaggccgcctgcagaaacggccactgcatccccagagactacctgtgcgacggccaggaggactgcgaggacggcagcgacgagctggactgcggccccccccccccctgcgagcccaacgagttcccctgcggcaacggccactgcgccctgaagctgtggagatgcgacggcgacttcgactgcgaggacagatag

SEQ ID NO: 84325 - DNA, 285 bp, synthetic construct
  misc_feature 1..285: note = Description of Artificial Sequence: Synthetic coding sequence
  source 1..285: mol_type = other DNA
tgaggccacccccacagccccagcagcggcgccgcctgggccgccgccttcctgggcggcagaccccccggcaccagctgctgcaccctgagcgtgcagcccctgagaacccaggccgccaccgccgccggcagccccaccagatgggcccagcccagacccctgcccagctgcagcagcaagaaccccgagctgggccccgagctgcccagagacgtgtacatgcccggcccctggaccctgggcgagggccccggccagtgccccgccggctaccccagatag

SEQ ID NO: 84326 - DNA, 13176 bp, synthetic construct
  misc_feature 1..13176: note = Description of Artificial Sequence: Synthetic coding sequence
  source 1..13176: mol_type = other DNA
atgggctggagagccgccggcgccctgctgctggccctgctgctgcacggcagactgctggccgtgacccacggcctgagagcctacgacggcctgagcctgcccgaggacatcgagaccgtgaccgccagccagatgagatggacccacagctacctgagcgacgacgaggacatgctggccgacagcatcagcggcgacgacctgggcagcggcgacctgggcagcggcgacttccagatggtgtacttcagagccctggtgaacttcaccagaagcatcgagtacagcccccagctggaggacgccggcagcagagagttcagagaggtgagcgaggccgtggtggacaccctggagagcgagtacctgaagatccccggcgaccaggtggtgagcgtggtgttcatcaaggagctggacggctgggtgttcgtggagctggacgtgggcagcgagggcaacgccgacggcgcccagatccaggagatgctgctgagagtgatcagcagcggcagcgtggccagctacgtgaccagcccccagggcttccagttcagaagactgggcaccgtgccccagttccccagagcctgcaccgaggccgagttcgcctgccacagctacaacgagtgcgtggccctggagtacagatgcgacagaagacccgactgcagagacatgagcgacgagctgaactgcgaggagcccgtgctgggcatcagccccaccttcagcctgctggtggagaccaccagcctgccccccagacccgagaccaccatcatgagacagccccccgtgacccacgccccccagcccctgctgcccggcagcgtgagacccctgccctgcggcccccaggaggccgcctgcagaaacggccactgcatccccagagactacctgtgcgacggccaggaggactgcgaggacggcagcgacgagctggactgcggccccccccccccctgcgagcccaacgagttcccctgcggcaacggccactgcgccctgaagctgtggagatgcgacggcgacttcgactgcgaggacagaaccgacgaggccaactgccccaccaagagacccgaggaggtgtgcggccccacccagttcagatgcgtgagcaccaacatgtgcatccccgccagcttccactgcgacgaggagagcgactgccccgacagaagcgacgagttcggctgcatgcccccccaggtggtgaccccccccagagagagcatccaggccagcagaggccagaccgtgaccttcacctgcgtggccatcggcgtgcccacccccatcatcaactggagactgaactggggccacatccccagccaccccagagtgaccgtgaccagcgagggcggcagaggcaccctgatcatcagagacgtgaaggagagcgaccagggcgcctacacctgcgaggccatgaacgccagaggcatggtgttcggcatccccgacggcgtgctggagctggtgccccagagaggcccctgccccgacggccacttctacctggagcacagcgccgcctgcctgccctgcttctgcttcggcatcaccagcgtgtgccagagcaccagaagattcagagaccagatcagactgagattcgaccagcccgacgacttcaagggcgtgaacgtgaccatgcccgcccagcccggcaccccccccctgagcagcacccagctgcagatcgaccccagcctgcacgagttccagctggtggacctgagcagaagattcctggtgcacgacagcttctgggccctgcccgagcagttcctgggcaacaaggtggacagctacggcggcagcctgagatacaacgtgagatacgagctggccagaggcatgctggagcccgtgcagagacccgacgtggtgctgatgggcgccggctacagactgctgagcagaggccacacccccacccagcccggcgccctgaaccagagacaggtgcagttcagcgaggagcactgggtgcacgagagcggcagacccgtgcagagagccgagctgctgcaggtgctgcagagcctggaggccgtgctgatccagaccgtgtacaacaccaagatggccagcgtgggcctgagcgacatcgccatggacaccaccgtgacccacgccaccagccacggcagagcccacagcgtggaggagtgcagatgccccatcggctacagcggcctgagctgcgagagctgcgacgcccacttcaccagagtgcccggcggcccctacctgggcacctgcagcggctgcaactgcaacggccacgccagcagctgcgaccccgtgtacggccactgcctgaactgccagcacaacaccgagggcccccagtgcaacaagtgcaaggccggcttcttcggcgacgccatgaaggccaccgccaccagctgcagaccctgcccctgcccctacatcgacgccagcagaagattcagcgacacctgcttcctggacaccgacggccaggccacctgcgacgcctgcgcccccggctacaccggcagaagatgcgagagctgcgcccccggctacgagggcaaccccatccagcccggcggcaagtgcagacccgtgaaccaggagatcgtgagatgcgacgagagaggcagcatgggcaccagcggcgaggcctgcagatgcaagaacaacgtggtgggcagactgtgcaacgagtgcgccgacggcagcttccacctgagcaccagaaaccccgacggctgcctgaagtgcttctgcatgggcgtgagcagacactgcaccagcagcagctggagcagagcccagctgcacggcgccagcgaggagcccggccacttcagcctgaccaacgccgccagcacccacaccaccaacgagggcatcttcagccccacccccggcgagctgggcttcagcagcttccacagactgctgagcggcccctacttctggagcctgcccagcagattcctgggcgacaaggtgaccagctacggcggcgagctgagattcaccgtgacccagagaagccagcccggcagcacccccctgcacggccagcccctggtggtgctgcagggcaacaacatcatcctggagcaccacgtggcccaggagcccagccccggccagcccagcaccttcatcgtgcccttcagagagcaggcctggcagagacccgacggccagcccgccaccagagagcacctgctgatggccctggccggcatcgacaccctgctgatcagagccagctacgcccagcagcccgccgagagcagagtgagcggcatcagcatggacgtggccgtgcccgaggagaccggccaggaccccgccctggaggtggagcagtgcagctgcccccccggctacagaggccccagctgccaggactgcgacaccggctacaccagaacccccagcggcctgtacctgggcacctgcgagagatgcagctgccacggccacagcgaggcctgcgagcccgagaccggcgcctgccagggctgccagcaccacaccgagggccccagatgcgagcagtgccagcccggctactacggcgacgcccagagaggcaccccccaggactgccagctgtgcccctgctacggcgaccccgccgccggccaggccgcccacacctgcttcctggacaccgacggccaccccacctgcgacgcctgcagccccggccacagcggcagacactgcgagagatgcgcccccggctactacggcaaccccagccagggccagccctgccagagagacagccaggtgcccggccccatcggctgcaactgcgacccccagggcagcgtgagcagccagtgcgacgccgccggccagtgccagtgcaaggcccaggtggagggcctgacctgcagccactgcagaccccaccacttccacctgagcgccagcaaccccgacggctgcctgccctgcttctgcatgggcatcacccagcagtgcgccagcagcgcctacaccagacacctgatcagcacccacttcgcccccggcgacttccagggcttcgccctggtgaacccccagagaaacagcagactgaccggcgagttcaccgtggagcccgtgcccgagggcgcccagctgagcttcggcaacttcgcccagctgggccacgagagcttctactggcagctgcccgagacctaccagggcgacaaggtggccgcctacggcggcaagctgagatacaccctgagctacaccgccggcccccagggcagccccctgagcgaccccgacgtgcagatcaccggcaacaacatcatgctggtggccagccagcccgccctgcagggccccgagagaagaagctacgagatcatgttcagagaggagttctggagaagacccgacggccagcccgccaccagagagcacctgctgatggccctggccgacctggacgagctgctgatcagagccaccttcagcagcgtgcccctggccgccagcatcagcgccgtgagcctggaggtggcccagcccggccccagcaacagacccagagccctggaggtggaggagtgcagatgcccccccggctacatcggcctgagctgccaggactgcgcccccggctacaccagaaccggcagcggcctgtacctgggccactgcgagctgtgcgagtgcaacggccacagcgacctgtgccaccccgagaccggcgcctgcagccagtgccagcacaacgccgccggcgagttctgcgagctgtgcgcccccggctactacggcgacgccaccgccggcacccccgaggactgccagccctgcgcctgccccctgaccaaccccgagaacatgttcagcagaacctgcgagagcctgggcgccggcggctacagatgcaccgcctgcgagcccggctacaccggccagtactgcgagcagtgcggccccggctacgtgggcaaccccagcgtgcagggcggccagtgcctgcccgagaccaaccaggcccccctggtggtggaggtgcaccccgccagaagcatcgtgccccagggcggcagccacagcctgagatgccaggtgagcggcagccccccccactacttctactggagcagagaggacggcagacccgtgcccagcggcacccagcagagacaccagggcagcgagctgcacttccccagcgtgcagcccagcgacgccggcgtgtacatctgcacctgcagaaacctgcaccagagcaacaccagcagagccgagctgctggtgaccgaggcccccagcaagcccatcaccgtgaccgtggaggagcagagaagccagagcgtgagacccggcgccgacgtgaccttcatctgcaccgccaagagcaagagccccgcctacaccctggtgtggaccagactgcacaacggcaagctgcccaccagagccatggacttcaacggcatcctgaccatcagaaacgtgcagctgagcgacgccggcacctacgtgtgcaccggcagcaacatgttcgccatggaccagggcaccgccaccctgcacgtgcaggccagcggcaccctgagcgcccccgtggtgagcatccaccccccccagctgaccgtgcagcccggccagctggccgagttcagatgcagcgccaccggcagccccacccccaccctggagtggaccggcggccccggcggccagctgcccgccaaggcccagatccacggcggcatcctgagactgcccgccgtggagcccaccgaccaggcccagtacctgtgcagagcccacagcagcgccggccagcaggtggccagagccgtgctgcacgtgcacggcggcggcggccccagagtgcaggtgagccccgagagaacccaggtgcacgccggcagaaccgtgagactgtactgcagagccgccggcgtgcccagcgccaccatcacctggagaaaggagggcggcagcctgcccccccaggccagaagcgagagaaccgacatcgccaccctgctgatccccgccatcaccaccgccgacgccggcttctacctgtgcgtggccaccagccccgccggcaccgcccaggccagaatccaggtggtggtgctgagcgccagcgacgccagccccccccccgtgaagatcgagagcagcagccccagcgtgaccgagggccagaccctggacctgaactgcgtggtggccggcagcgcccacgcccaggtgacctggtacagaagaggcggcagcctgcccccccacacccaggtgcacggcagcagactgagactgccccaggtgagccccgccgacagcggcgagtacgtgtgcagagtggagaacggcagcggccccaaggaggccagcatcaccgtgagcgtgctgcacggcacccacagcggccccagctacacccccgtgcccggcagcaccagacccatcagaatcgagcccagcagcagccacgtggccgagggccagaccctggacctgaactgcgtggtgcccggccaggcccacgcccaggtgacctggcacaagagaggcggcagcctgcccgccagacaccagacccacggcagcctgctgagactgcaccaggtgacccccgccgacagcggcgagtacgtgtgccacgtggtgggcaccagcggccccctggaggccagcgtgctggtgaccatcgaggccagcgtgatccccggccccatcccccccgtgagaatcgagagcagcagcagcaccgtggccgagggccagaccctggacctgagctgcgtggtggccggccaggcccacgcccaggtgacctggtacaagagaggcggcagcctgcccgccagacaccaggtgagaggcagcagactgtacatcttccaggccagccccgccgacgccggccagtacgtgtgcagagccagcaacggcatggaggccagcatcaccgtgaccgtgaccggcacccagggcgccaacctggcctaccccgccggcagcacccagcccatcagaatcgagcccagcagcagccaggtggccgagggccagaccctggacctgaactgcgtggtgcccggccagagccacgcccaggtgacctggcacaagagaggcggcagcctgcccgtgagacaccagacccacggcagcctgctgagactgtaccaggccagccccgccgacagcggcgagtacgtgtgcagagtgctgggcagcagcgtgcccctggaggccagcgtgctggtgaccatcgagcccgccggcagcgtgcccgccctgggcgtgacccccaccgtgagaatcgagagcagcagcagccaggtggccgagggccagaccctggacctgaactgcctggtggccggccaggcccacgcccaggtgacctggcacaagagaggcggcagcctgcccgccagacaccaggtgcacggcagcagactgagactgctgcaggtgacccccgccgacagcggcgagtacgtgtgcagagtggtgggcagcagcggcacccaggaggccagcgtgctggtgaccatccagcagagactgagcggcagccacagccagggcgtggcctaccccgtgagaatcgagagcagcagcgccagcctggccaacggccacaccctggacctgaactgcctggtggccagccaggccccccacaccatcacctggtacaagagaggcggcagcctgcccagcagacaccagatcgtgggcagcagactgagaatcccccaggtgacccccgccgacagcggcgagtacgtgtgccacgtgagcaacggcgccggcagcagagagaccagcctgatcgtgaccatccagggcagcggcagcagccacgtgcccagcgtgagcccccccatcagaatcgagagcagcagccccaccgtggtggagggccagaccctggacctgaactgcgtggtggccagacagccccaggccatcatcacctggtacaagagaggcggcagcctgcccagcagacaccagacccacggcagccacctgagactgcaccagatgagcgtggccgacagcggcgagtacgtgtgcagagccaacaacaacatcgacgccctggaggccagcatcgtgatcagcgtgagccccagcgccggcagccccagcgcccccggcagcagcatgcccatcagaatcgagagcagcagcagccacgtggccgagggcgagaccctggacctgaactgcgtggtgcccggccaggcccacgcccaggtgacctggcacaagagaggcggcagcctgcccagccaccaccagaccagaggcagcagactgagactgcaccacgtgagccccgccgacagcggcgagtacgtgtgcagagtgatgggcagcagcggccccctggaggccagcgtgctggtgaccatcgaggccagcggcagcagcgccgtgcacgtgcccgcccccggcggcgccccccccatcagaatcgagcccagcagcagcagagtggccgagggccagaccctggacctgaagtgcgtggtgcccggccaggcccacgcccaggtgacctggcacaagagaggcggcaacctgcccgccagacaccaggtgcacggccccctgctgagactgaaccaggtgagccccgccgacagcggcgagtacagctgccaggtgaccggcagcagcggcaccctggaggccagcgtgctggtgaccatcgagcccagcagccccggccccatccccgcccccggcctggcccagcccatctacatcgaggccagcagcagccacgtgaccgagggccagaccctggacctgaactgcgtggtgcccggccaggcccacgcccaggtgacctggtacaagagaggcggcagcctgcccgccagacaccagacccacggcagccagctgagactgcacctggtgagccccgccgacagcggcgagtacgtgtgcagagccgccagcggccccggccccgagcaggaggccagcttcaccgtgaccgtgccccccagcgagggcagcagctacagactgagaagccccgtgatcagcatcgacccccccagcagcaccgtgcagcagggccaggacgccagcttcaagtgcctgatccacgacggcgccgcccccatcagcctggagtggaagaccagaaaccaggagctggaggacaacgtgcacatcagccccaacggcagcatcatcaccatcgtgggcaccagacccagcaaccacggcacctacagatgcgtggccagcaacgcctacggcgtggcccagagcgtggtgaacctgagcgtgcacggcccccccaccgtgagcgtgctgcccgagggccccgtgtgggtgaaggtgggcaaggccgtgaccctggagtgcgtgagcgccggcgagcccagaagcagcgccagatggaccagaatcagcagcacccccgccaagctggagcagagaacctacggcctgatggacagccacgccgtgctgcagatcagcagcgccaagcccagcgacgccggcacctacgtgtgcctggcccagaacgccctgggcaccgcccagaagcaggtggaggtgatcgtggacaccggcgccatggcccccggcgccccccaggtgcaggccgaggaggccgagctgaccgtggaggccggccacaccgccaccctgagatgcagcgccaccggcagccccgcccccaccatccactggagcaagctgagaagccccctgccctggcagcacagactggagggcgacaccctgatcatccccagagtggcccagcaggacagcggccagtacatctgcaacgccaccagccccgccggccacgccgaggccaccatcatcctgcacgtggagagccccccctacgccaccaccgtgcccgagcacgccagcgtgcaggccggcgagaccgtgcagctgcagtgcctggcccacggcaccccccccctgaccttccagtggagcagagtgggcagcagcctgcccggcagagccaccgccagaaacgagctgctgcacttcgagagagccgcccccgaggacagcggcagatacagatgcagagtgaccaacaaggtgggcagcgccgaggccttcgcccagctgctggtgcagggcccccccggcagcctgcccgccaccagcatccccgccggcagcacccccaccgtgcaggtgaccccccagctggagaccaagagcatcggcgccagcgtggagttccactgcgccgtgcccagcgacagaggcacccagctgagatggttcaaggagggcggccagctgccccccggccacagcgtgcaggacggcgtgctgagaatccagaacctggaccagagctgccagggcacctacatctgccaggcccacggcccctggggcaaggcccaggccagcgcccagctggtgatccaggccctgcccagcgtgctgatcaacatcagaaccagcgtgcagaccgtggtggtgggccacgccgtggagttcgagtgcctggccctgggcgaccccaagccccaggtgacctggagcaaggtgggcggccacctgagacccggcatcgtgcagagcggcggcgtggtgagaatcgcccacgtggagctggccgacgccggccagtacagatgcaccgccaccaacgccgccggcaccacccagagccacgtgctgctgctggtgcaggccctgccccagatcagcatgccccaggaggtgagagtgcccgccggcagcgccgccgtgttcccctgcatcgccagcggctaccccacccccgacatcagctggagcaagctggacggcagcctgccccccgacagcagactggagaacaacatgctgatgctgcccagcgtgagaccccaggacgccggcacctacgtgtgcaccgccaccaacagacagggcaaggtgaaggccttcgcccacctgcaggtgcccgagagagtggtgccctacttcacccagaccccctacagcttcctgcccctgcccaccatcaaggacgcctacagaaagttcgagatcaagatcaccttcagacccgacagcgccgacggcatgctgctgtacaacggccagaagagagtgcccggcagccccaccaacctggccaacagacagcccgacttcatcagcttcggcctggtgggcggcagacccgagttcagattcgacgccggcagcggcatggccaccatcagacaccccacccccctggccctgggccacttccacaccgtgaccctgctgagaagcctgacccagggcagcctgatcgtgggcgacctggcccccgtgaacggcaccagccagggcaagttccagggcctggacctgaacgaggagctgtacctgggcggctaccccgactacggcgccatccccaaggccggcctgagcagcggcttcatcggctgcgtgagagagctgagaatccagggcgaggagatcgtgttccacgacctgaacctgaccgcccacggcatcagccactgccccacctgcagagacagaccctgccagaacggcggccagtgccacgacagcgagagcagcagctacgtgtgcgtgtgccccgccggcttcaccggcagcagatgcgagcacagccaggccctgcactgccaccccgaggcctgcggccccgacgccacctgcgtgaacagacccgacggcagaggctacacctgcagatgccacctgggcagaagcggcctgagatgcgaggagggcgtgaccgtgaccacccccagcctgagcggcgccggcagctacctggccctgcccgccctgaccaacacccaccacgagctgagactggacgtggagttcaagcccctggcccccgacggcgtgctgctgttcagcggcggcaagagcggccccgtggaggacttcgtgagcctggccatggtgggcggccacctggagttcagatacgagctgggcagcggcctggccgtgctgagaagcgccgagcccctggccctgggcagatggcacagagtgagcgccgagagactgaacaaggacggcagcctgagagtgaacggcggcagacccgtgctgagaagcagccccggcaagagccagggcctgaacctgcacaccctgctgtacctgggcggcgtggagcccagcgtgcccctgagccccgccaccaacatgagcgcccacttcagaggctgcgtgggcgaggtgagcgtgaacggcaagagactggacctgacctacagcttcctgggcagccagggcatcggccagtgctacgacagcagcccctgcgagagacagccctgccagcacggcgccacctgcatgcccgccggcgagtacgagttccagtgcctgtgcagagacggcttcaagggcgacctgtgcgagcacgaggagaacccctgccagctgagagagccctgcctgcacggcggcacctgccagggcaccagatgcctgtgcctgcccggcttcagcggccccagatgccagcagggcagcggccacggcatcgccgagagcgactggcacctggagggcagcggcggcaacgacgcccccggccagtacggcgcctacttccacgacgacggcttcctggccttccccggccacgtgttcagcagaagcctgcccgaggtgcccgagaccatcgagctggaggtgagaaccagcaccgccagcggcctgctgctgtggcagggcgtggaggtgggcgaggccggccagggcaaggacttcatcagcctgggcctgcaggacggccacctggtgttcagataccagctgggcagcggcgaggccagactggtgagcgaggaccccatcaacgacggcgagtggcacagagtgaccgccctgagagagggcagaagaggcagcatccaggtggacggcgaggagctggtgagcggcagaagccccggccccaacgtggccgtgaacgccaagggcagcgtgtacatcggcggcgcccccgacgtggccaccctgaccggcggcagattcagcagcggcatcaccggctgcgtgaagaacctggtgctgcacagcgccagacccggcgccccccccccccagcccctggacctgcagcacagagcccaggccggcgccaacaccagaccctgccccagctag

SEQ ID NO: 84327 - DNA, 720 bp, synthetic construct
  misc_feature 1..720: note = Description of Artificial Sequence: Synthetic coding sequence
  source 1..720: mol_type = other DNA
gtgacccacggcctgagagcctacgacggcctgagcctgcccgaggacatcgagaccgtgaccgccagccagatgagatggacccacagctacctgagcgacgacgaggacatgctggccgacagcatcagcggcgacgacctgggcagcggcgacctgggcagcggcgacttccagatgggcagctggatggccggcttcctgtggagctggatgtgggccagaaagggcatgagaatgggcctgagattcagaagatgctgcagcggcagcagccccgccgccctgtggccccccaccagccccctgcccagagacagcagcagcgacgcctgggcccagtgccccagcagccaggagcccgccagaagacccagcctgcccgccaccgccaccatgagcgtgtggccctggagcatcgccgtgaccggcggccccaccgccggcacctgcctgatgagcagcatcgtgagaagccagagctgggtgagcgccccccacagcctgagcctgtggagaagacacctgtacagacccggccagagacagcccagctgcgacagccaccagagccccaccctgctgagcccctgcttccccgtgcccagcggcccctgccccgtgggccccagaagaccccacgccgccatgggcaccgccagccccgagaccaccagcgccaccgacagaagaaccgccagaaccgccgccatgagctag

SEQ ID NO: 84328 - DNA, 567 bp, synthetic construct
  misc_feature 1..567: note = Description of Artificial Sequence: Synthetic coding sequence
  source 1..567: mol_type = other DNA
atgaacgccggcgccagcgtgctgaccttcccctgggccgtgtacggcctgcccagagccagacccgccgtgaccgacctgaccggccccctgccccccagcagccccgccctgcccagcgtgctgatcaacatcagaaccagcgtgcagaccgtggtggtgggccacgccgtggagttcgagtgcctggccctgggcgaccccaagccccaggtgacctggagcaaggtgggcggccacctgagacccggcatcgtgcagagcggcggcgtggtgagaatcgcccacgtggagctggccgacgccggccagtacagatgcaccgccaccaacgccgccggcaccacccagagccacgtgctgctgctggtgcaggccctgccccagatcagcatgccccaggaggtgagagtgcccgccggcagcgccgccgtgttcccctgcatcgccagcggctaccccacccccgacatcagctggagcaagctggacggcagcctgccccccgacagcagactggagaacaacatgctgatgctgcccagcgtgagaccccaggacgcctag

SEQ ID NO: 84329 - DNA, 594 bp, synthetic construct
  misc_feature 1..594: note = Description of Artificial Sequence: Synthetic coding sequence
  source 1..594: mol_type = other DNA
tgaacccccagcggcctgtacctgggcacctgcgagagatgcagctgccacggccacagcgaggcctgcgagcccgagaccggcgcctgccagggctgccagcaccacaccgagggccccagatgcgagcagtgccagcccggctactacggcgacgcccagagaggcaccccccaggactgccagctgtgcccctgctacggcgaccccgccgccggccaggccgcccacacctgcttcctggacaccgacggccaccccacctgcgacgcctgcagccccggccacagcggcagacactgcgagagatgcgcccccggctactacggcaaccccagccagggccagccctgccagagagacagccaggtgcccggccccatcggctgcaactgcgacccccagggcagcgtgagcagccagtgcgacgccgccggccagtgccagtgcaaggtgagccccaacccctgcccctgcggcgcctgcagcgcccccctgcccagaccctgcggcgagatcagacagcacctggtggaggccgagacctgggcctggggcgccggccacggcggccagggcagaggctgcccctag

SEQ ID NO: 84330 - DNA, 492 bp, synthetic construct
  misc_feature 1..492: note = Description of Artificial Sequence: Synthetic coding sequence
  source 1..492: mol_type = other DNA
ccccccgtgaagatcgagagcagcagccccagcgtgaccgagggccagaccctggacctgaactgcgtggtggccggcagcgcccacgcccaggtgacctggtacagaagaggcggcagcctgcccccccacacccaggtgcacggcagcagactgagactgccccaggtgagccccgccgacagcggcgagtacgtgtgcagagtggagaacggcagcggccccaaggaggccagcatcaccgtgagctactgcccccccgcctggagctggtgcgtgcccggcagcaccagacccatcagaatcgagcccagcagcagccacgtggccgagggccagaccctggacctgaactgcgtggtgcccggccaggcccacgcccaggtgacctggcacaagagaggcggcagcctgcccgccagacaccagacccacggcagcctgctgagactgcaccaggtgacccccgccgacagcggcgagtacgtgtag

SEQ ID NO: 84331 - DNA, 573 bp, synthetic construct
  misc_feature 1..573: note = Description of Artificial Sequence: Synthetic coding sequence
  source 1..573: mol_type = other DNA
cccgaggacatcgagaccgtgaccgccagccagatgagatggacccacagctacctgagcgacgacgaggacatgctggccgacagcatcagcggcgacgacctgggcagcggcgacctgggcagcggcgacttccagatggtgtacttcagagccctggtgaacttcaccagaagcatcgagtacagcccccagctggaggacgccggcagcagagagttcagagaggtgagcgaggccgtggtggacaccctggagagcgagtacctgaagatccccggcgaccaggtggtgagcgtggtgttcatcaaggagctggacggctgggtgttcgtggagctggacgtgggcagcgagggcaacgccgacggcgcccagatccaggagatgctgctgagagtgatcagcagcggcagcgtggccagctacgtgaccagcccccagggcttccagttcagaagactgggcaccggcgagcccatcctggtgagcggcatcgccagcagcagactggtgggcagccccttcagcgtgagcgccatcggcagccagctgggcctggcccaccactag

SEQ ID NO: 84332 - DNA, 624 bp, synthetic construct
  misc_feature 1..624: note = Description of Artificial Sequence: Synthetic coding sequence
  source 1..624: mol_type = other DNA
ggcgagagcagagagggcagaggctacagacaggtggcccagagagtggccgagagaagccccgtgcccagcctgctgagccacagcggctgcgtggtgcacaccagactgagccccgtgcccagcgtgagcccccccatcagaatcgagagcagcagccccaccgtggtggagggccagaccctggacctgaactgcgtggtggccagacagccccaggccatcatcacctggtacaagagaggcggcagcctgcccagcagacaccagacccacggcagccacctgagactgcaccagatgagcgtggccgacagcggcgagtacgtgtgcagagccaacaacaacatcgacgccctggaggccagcatcgtgatcagcgtgagccccagcgccggcagccccagcgcccccggcagcagcatgcccatcagaatcgagagcagcagcagccacgtggccgagggcgagaccctggacctgaactgcgtggtgcccggccaggcccacgcccaggtgacctggcacaagagaggcggcagcctgcccagccaccaccagaccagaggcagcagactgagactgcaccacgtgagccccgccgacagcggcgagtacgtgtag

SEQ ID NO: 84333 - DNA, 1104 bp, synthetic construct
  misc_feature 1..1104: note = Description of Artificial Sequence: Synthetic coding sequence
  source 1..1104: mol_type = other DNA
atgggctggagaagaggcagaggcgcccccagattccccgacggcatggccgccggccagagaagaagcagcctgagcagactgggcagccaggccgagggcctgctgaccagccagaccatgggcggccaggccgagaccctgctgaccagccagaccggctggctgctgggcagaggctgcaacctgggcagccccggcggccaggtgagctgggacaaggtgagaatccccggcgtgctgcagagactgggcgtgacctacttcgtggtggccgtgctggagctgctgttcgccaagcccgtgcccgagcactgcgccagcgagagaagctgcctgagcctgagagacatcaccagcagctggccccagtggctgctgatcctggtgctggagggcctgtggctgggcctgaccttcctgctgcccgtgcccggctgccccaccggctacctgggccccggcggcatcggcgacttcggcaagtaccccaactgcaccggcggcgccgccggctacatcgacagactgctgctgggcgacgaccacctgtaccagcaccccagcagcgccgtgctgtaccacaccgaggtggcctacgaccccgagggcatcctgggcaccatcaacagcatcgtgatggccttcctgggcgtgcaggccggcaagatcctgctgtactacaaggccagaaccaaggacatcctgatcagattcaccgcctggtgctgcatcctgggcctgatcagcgtggccctgaccaaggtgagcgagaacgagggcttcatccccgtgaacaagaacctgtggagcctgagctacgtgaccaccctgagcagcttcgccttcttcatcctgctggtgctgtaccccgtggtggacgtgaagggcctgtggaccggcacccccttcttctaccccggcatgaacagcatcctggtgtacgtgggccacgaggtgttcgagaactacttccccttccagtggaagctgaaggacaaccagagccacaaggagcacctgacccagaacatcgtggccaccgccctgtgggtgctgatcgcctacatcctgtacagaaagaagatcttctggaagatctag

SEQ ID NO: 84334 - DNA, 669 bp, synthetic construct
  misc_feature 1..669: note = Description of Artificial Sequence: Synthetic coding sequence
  source 1..669: mol_type = other DNA
atgagcggcgccggcagagccctggccgccctgctgctggccgccagcgtgctgagcgccgccctgctggcccccggcggcagcagcggcagagacgcccaggccgccccccccagagacctggacaagaagagacacgccgagctgaagatggaccaggccctgctgctgatccacaacgagctgctgtggaccaacctgaccgtgtactggaagagcgagtgctgctaccactgcctgttccaggtgctggtgaacgtgccccagagccccaaggccggcaagcccagcgccgccgccgccagcgtgagcacccagcacggcagcatcctgcagctgaacgacaccctggaggagaaggaggtgtgcagactggagtacagattcggcgagttcggcaactacagcctgctggtgaagaacatccacaacggcgtgagcgagatcgcctgcgacctggccgtgaacgaggaccccgtggacagcaacctgcccgtgagcatcgccttcctgatcggcctggccgtgatcatcgtgatcagcttcctgagactgctgctgagagtgctgctgtgccaccccggctggagcgccgtggcccccagcagactgacccccagcagcgccagcagagtgcacaccatcctgctgccccagccccccgagtag

SEQ ID NO: 84335 - DNA, 1908 bp, synthetic construct
  misc_feature 1..1908: note = Description of Artificial Sequence: Synthetic coding sequence
  source 1..1908: mol_type = other DNA
atgagcggcgccggcagagccctggccgccctgctgctggccgccagcgtgctgagcgccgccctgctggcccccggcggcagcagcggcagagacgcccaggccgccccccccagagacctggacaagaagagacacgccgagctgaagatggaccaggccctgctgctgatccacaacgagctgctgtggaccaacctgaccgtgtactggaagagcgagtgctgctaccactgcctgttccaggtgctggtgaacgtgccccagagccccaaggccggcaagcccagcgccgccgccgccagcgtgagcacccagcacggcagcatcctgcagctgaacgacaccctggaggagaaggaggtgtgcagactggagtacagattcggcgagttcggcaactacagcctgctggtgaagaacatccacaacggcgtgagcgagatcgcctgcgacctggccgtgaacgaggaccccgtggacagcaacctgcccgtgagcatcgccttcctgatcggcctggccgtgatcatcgtgatcagcttcctgagactgctgctgagcctggacgacttcaacaactggatcagcaaggccatcagcagcagagagaccgacagactgatcaacagcgagctgggcagccccagcagaaccgaccccctggacggcgacgtgcagcccgccacctggagactgagcgccctgccccccagactgagaagcgtggacaccttcagaggcatcgccctgatcctgatggtgttcgtgaactacggcggcggcaagtactggtacttcaagcacgccagctggaacggcctgaccgtggccgacctggtgttcccctggttcgtgttcatcatgggcagcagcatcttcctgagcatgaccagcatcctgcagagaggctgcagcaagttcagactgctgggcaagatcgcctggagaagcttcctgctgatctgcatcggcatcatcatcgtgaaccccaactactgcctgggccccctgagctgggacaaggtgagaatccccggcgtgctgcagagactgggcgtgacctacttcgtggtggccgtgctggagctgctgttcgccaagcccgtgcccgagcactgcgccagcgagagaagctgcctgagcctgagagacatcaccagcagctggccccagtggctgctgatcctggtgctggagggcctgtggctgggcctgaccttcctgctgcccgtgcccggctgccccaccggctacctgggccccggcggcatcggcgacttcggcaagtaccccaactgcaccggcggcgccgccggctacatcgacagactgctgctgggcgacgaccacctgtaccagcaccccagcagcgccgtgctgtaccacaccgaggtggcctacgaccccgagggcatcctgggcaccatcaacagcatcgtgatggccttcctgggcgtgcaggccggcaagatcctgctgtactacaaggccagaaccaaggacatcctgatcagattcaccgcctggtgctgcatcctgggcctgatcagcgtggccctgaccaaggtgagcgagaacgagggcttcatccccgtgaacaagaacctgtggagcctgagctacgtgaccaccctgagcagcttcgccttcttcatcctgctggtgctgtaccccgtggtggacgtgaagggcctgtggaccggcacccccttcttctaccccggcatgaacagcatcctggtgtacgtgggccacgaggtgttcgagaactacttccccttccagtggaagctgaaggacaaccagagccacaaggagcacctgacccagaacatcgtggccaccgccctgtgggtgctgatcgcctacatcctgtacagaaagaagatcttctggaagatctag

SEQ ID NO: 84336 - DNA, 1992 bp, synthetic construct
  misc_feature 1..1992: note = Description of Artificial Sequence: Synthetic coding sequence
  source 1..1992: mol_type = other DNA
atgaccggcgccagagccagcgccgccgagcagagaagagccggcagaagcggccaggccagagccgccgagagagccgccggcatgagcggcgccggcagagccctggccgccctgctgctggccgccagcgtgctgagcgccgccctgctggcccccggcggcagcagcggcagagacgcccaggccgccccccccagagacctggacaagaagagacacgccgagctgaagatggaccaggccctgctgctgatccacaacgagctgctgtggaccaacctgaccgtgtactggaagagcgagtgctgctaccactgcctgttccaggtgctggtgaacgtgccccagagccccaaggccggcaagcccagcgccgccgccgccagcgtgagcacccagcacggcagcatcctgcagctgaacgacaccctggaggagaaggaggtgtgcagactggagtacagattcggcgagttcggcaactacagcctgctggtgaagaacatccacaacggcgtgagcgagatcgcctgcgacctggccgtgaacgaggaccccgtggacagcaacctgcccgtgagcatcgccttcctgatcggcctggccgtgatcatcgtgatcagcttcctgagactgctgctgagcctggacgacttcaacaactggatcagcaaggccatcagcagcagagagaccgacagactgatcaacagcgagctgggcagccccagcagaaccgaccccctggacggcgacgtgcagcccgccacctggagactgagcgccctgccccccagactgagaagcgtggacaccttcagaggcatcgccctgatcctgatggtgttcgtgaactacggcggcggcaagtactggtacttcaagcacgccagctggaacggcctgaccgtggccgacctggtgttcccctggttcgtgttcatcatgggcagcagcatcttcctgagcatgaccagcatcctgcagagaggctgcagcaagttcagactgctgggcaagatcgcctggagaagcttcctgctgatctgcatcggcatcatcatcgtgaaccccaactactgcctgggccccctgagctgggacaaggtgagaatccccggcgtgctgcagagactgggcgtgacctacttcgtggtggccgtgctggagctgctgttcgccaagcccgtgcccgagcactgcgccagcgagagaagctgcctgagcctgagagacatcaccagcagctggccccagtggctgctgatcctggtgctggagggcctgtggctgggcctgaccttcctgctgcccgtgcccggctgccccaccggctacctgggccccggcggcatcggcgacttcggcaagtaccccaactgcaccggcggcgccgccggctacatcgacagactgctgctgggcgacgaccacctgtaccagcaccccagcagcgccgtgctgtaccacaccgaggtggcctacgaccccgagggcatcctgggcaccatcaacagcatcgtgatggccttcctgggcgtgcaggccggcaagatcctgctgtactacaaggccagaaccaaggacatcctgatcagattcaccgcctggtgctgcatcctgggcctgatcagcgtggccctgaccaaggtgagcgagaacgagggcttcatccccgtgaacaagaacctgtggagcctgagctacgtgaccaccctgagcagcttcgccttcttcatcctgctggtgctgtaccccgtggtggacgtgaagggcctgtggaccggcacccccttcttctaccccggcatgaacagcatcctggtgtacgtgggccacgaggtgttcgagaactacttccccttccagtggaagctgaaggacaaccagagccacaaggagcacctgacccagaacatcgtggccaccgccctgtgggtgctgatcgcctacatcctgtacagaaagaagatcttctggaagatctag

SEQ ID NO: 84337 - DNA, 1647 bp, synthetic construct
  misc_feature 1..1647: note = Description of Artificial Sequence: Synthetic coding sequence
  source 1..1647: mol_type = other DNA
atgagagtgctgtgcgccttccccgaggccatgcccagcagcaacagcagaccccccgcctgcctggcccccggcgccctgtacctggccctgctgctgcacctgagcctgagcagccaggccggcgacagaagacccctgcccgtggacagagccgccggcctgaaggagaagaccctgatcctgctggacgtgagcaccaagaaccccgtgagaaccgtgaacgagaacttcctgagcctgcagctggaccccagcatcatccacgacggctggctggacttcctgagcagcaagagactggtgaccctggccagaggcctgagccccgccttcctgagattcggcggcaagagaaccgacttcctgcagttccagaacctgagaaaccccgccaagagcagaggcggccccggccccgactactacctgaagaactacgaggacgacatcgtgagaagcgacgtggccctggacaagcagaagggctgcaagatcgcccagcaccccgacgtgatgctggagctgcagagagagaaggccgcccagatgcacctggtgctgctgaaggagcagttcagcaacacctacagcaacctgatcctgaccgccagaagcctggacaagctgtacaacttcgccgactgcagcggcctgcacctgatcttcgccctgaacgccctgagaagaaaccccaacaacagctggaacagcagcagcgccctgagcctgctgaagtacagcgccagcaagaagtacaacatcagctgggagctgggcaacgagcccaacaactacagaaccatgcacggcagagccgtgaacggcagccagctgggcaaggactacatccagctgaagagcctgctgcagcccatcagaatctacagcagagccagcctgtacggccccaacatcggcagacccagaaagaacgtgatcgccctgctggacggcttcatgaaggtggccggcagcaccgtggacgccgtgacctggcagcactgctacatcgacggcagagtggtgaaggtgatggacttcctgaagaccagactgctggacaccctgagcgaccagatcagaaagatccagaaggtggtgaacacctacacccccggcaagaagatctggctggagggcgtggtgaccaccagcgccggcggcaccaacaacctgagcgacagctacgccgccggcttcctgtggctgaacaccctgggcatgctggccaaccagggcatcgacgtggtgatcagacacagcttcttcgaccacggctacaaccacctggtggaccagaacttcaaccccctgcccgactactggctgagcctgctgtacaagagactgatcggccccaaggtgctggccgtgcacgtggccggcctgcagagaaagcccagacccggcagagtgatcagagacaagctgagaatctacgcccactgcaccaaccaccacaaccacaactacgtgagaggcagcatcaccctgttcatcatcaacctgcacagaagcagaaagaagatcaagctggccggcaccctgagagacaagctggtgcaccagtacctgctgcagccctacggccaggagggcctgaagagcaagacccagagatgccagtactgcggcatcatctag

SEQ ID NO: 84338 - DNA, 1605 bp, synthetic construct
  misc_feature 1..1605: note = Description of Artificial Sequence: Synthetic coding sequence
  source 1..1605: mol_type = other DNA
atgagagtgctgtgcgccttccccgaggccatgcccagcagcaacagcagaccccccgcctgcctggcccccggcgccctgtacctggccctgctgctgcacctgagcctgagcagccaggccggcgacagaagacccctgcccgtggacagagccgccggcctgaaggagaagaccctgatcctgctggacgtgagcaccaagaaccccgtgagaaccgtgaacgagaacttcctgagcctgcagctggaccccagcatcatccacgacggctggctggacttcctgagcagcaagagactggtgaccctggccagaggcctgagccccgccttcctgagattcggcggcaagagaaccgacttcctgcagttccagaacctgagaaaccccgccaagagcagaggcggccccggccccgactactacctgaagaactacgaggacgacatcgtgagaagcgacgtggccctggacaagcagaagggctgcaagatcgcccagcaccccgacgtgatgctggagctgcagagagagaaggccgcccagatgcacctggtgctgctgaaggagcagttcagcaacacctacagcaacctgatcctgaccgagcccaacaactacagaaccatgcacggcagagccgtgaacggcagccagctgggcaaggactacatccagctgaagagcctgctgcagcccatcagaatctacagcagagccagcctgtacggccccaacatcggcagacccagaaagaacgtgatcgccctgctggacggcttcatgaaggtggccggcagcaccgtggacgccgtgacctggcagcactgctacatcgacggcagagtggtgaaggtgatggacttcctgaagaccagactgctggacaccctgagcgaccagatcagaaagatccagaaggtggtgaacacctacacccccggcaagaagatctggctggagggcgtggtgaccaccagcgccggcggcaccaacaacctgagcgacagctacgccgccggcttcctgtggctgaacaccctgggcatgctggccaaccagggcatcgacgtggtgatcagacacagcttcttcgaccacggctacaaccacctggtggaccagaacttcaaccccctgcccgactactggctgagcctgctgtacaagagactgatcggccccaaggtgctggccgtgcacgtggccggcctgcagagaaagcccagacccggcagagtgatcagagacaagctgagaatctacgcccactgcaccaaccaccacaaccacaactacgtgagaggcagcatcaccctgttcatcatcaacctgcacagaagcagaaagaagatcaagctggccggcaccctgagagacaagctggtgcaccagtacctgctgcagccctacggccaggagggcctgaagagcaagagcgtgcagctgaacggccagcccctggtgatggtggacgacggcaccctgcccgagctgaagcccagacccctgagagccggcagaaccctggtgatcccccccgtgaccatgggcttctacgtggtgaagaacgtgaacgccctggcctgcagatacagatag

SEQ ID NO: 84339 - DNA, 1779 bp, synthetic construct
  misc_feature 1..1779: note = Description of Artificial Sequence: Synthetic coding sequence
  source 1..1779: mol_type = other DNA
atgagagtgctgtgcgccttccccgaggccatgcccagcagcaacagcagaccccccgcctgcctggcccccggcgccctgtacctggccctgctgctgcacctgagcctgagcagccaggccggcgacagaagacccctgcccgtggacagagccgccggcctgaaggagaagaccctgatcctgctggacgtgagcaccaagaaccccgtgagaaccgtgaacgagaacttcctgagcctgcagctggaccccagcatcatccacgacggctggctggacttcctgagcagcaagagactggtgaccctggccagaggcctgagccccgccttcctgagattcggcggcaagagaaccgacttcctgcagttccagaacctgagaaaccccgccaagagcagaggcggccccggccccgactactacctgaagaactacgaggacgacatcgtgagaagcgacgtggccctggacaagcagaagggctgcaagatcgcccagcaccccgacgtgatgctggagctgcagagagagaaggccgcccagatgcacctggtgctgctgaaggagcagttcagcaacacctacagcaacctgatcctgaccgccagaagcctggacaagctgtacaacttcgccgactgcagcggcctgcacctgatcttcgccctgaacgccctgagaagaaaccccaacaacagctggaacagcagcagcgccctgagcctgctgaagtacagcgccagcaagaagtacaacatcagctgggagctgggcaacgagcccaacaactacagaaccatgcacggcagagccgtgaacggcagccagctgggcaaggactacatccagctgaagagcctgctgcagcccatcagaatctacagcagagccagcctgtacggccccaacatcggcagacccagaaagaacgtgatcgccctgctggacggcttcatgaaggtggccggcagcaccgtggacgccgtgacctggcagcactgctacatcgacggcagagtggtgaaggtgatggacttcctgaagaccagactgctggacaccctgagcgaccagatcagaaagatccagaaggtggtgaacacctacacccccggcaagaagatctggctggagggcgtggtgaccaccagcgccggcggcaccaacaacctgagcgacagctacgccgccggcttcctgtggctgaacaccctgggcatgctggccaaccagggcatcgacgtggtgatcagacacagcttcttcgaccacggctacaaccacctggtggaccagaacttcaaccccctgcccgactactggctgagcctgctgtacaagagactgatcggccccaaggtgctggccgtgcacgtggccggcctgcagagaaagcccagacccggcagagtgatcagagacaagctgagaatctacgcccactgcaccaaccaccacaaccacaactacgtgagaggcagcatcaccctgttcatcatcaacctgcacagaagcagaaagaagatcaagctggccggcaccctgagagacaagctggtgcaccagtacctgctgcagccctacggccaggagggcctgaagagcaagagcgtgcagctgaacggccagcccctggtgatggtggacgacggcaccctgcccgagctgaagcccagacccctgagagccggcagaaccctggtgatcccccccgtgaccatgggcttctacgtggtgaagaacgtgaacgccctggcctgcagatacagatag

SEQ ID NO: 84340 - DNA, 1443 bp, synthetic construct
  misc_feature 1..1443: note = Description of Artificial Sequence: Synthetic coding sequence
  source 1..1443: mol_type = other DNA
atgagagtgctgtgcgccttccccgaggccatgcccagcagcaacagcagaccccccgcctgcctggcccccggcgccctgtacctggccctgctgctgcacctgagcctgagcagccaggccggcgacagaagacccctgcccgtggacagagccgccggcctgaaggagaagaccctgatcctgctggacgtgagcaccaagaaccccgtgagaaccgtgaacgagaacttcctgagcctgcagctggaccccagcatcatccacgacggctggctggacttcctgagcagcaagagactggtgaccctggccagaggcctgagccccgccttcctgagattcggcggcaagagaaccgacttcctgcagttccagaacctgagaaaccccgccaagagcagaggcggccccggccccgactactacctgaagaactacgaggacgagcccaacaactacagaaccatgcacggcagagccgtgaacggcagccagctgggcaaggactacatccagctgaagagcctgctgcagcccatcagaatctacagcagagccagcctgtacggccccaacatcggcagacccagaaagaacgtgatcgccctgctggacggcttcatgaaggtggccggcagcaccgtggacgccgtgacctggcagcactgctacatcgacggcagagtggtgaaggtgatggacttcctgaagaccagactgctggacaccctgagcgaccagatcagaaagatccagaaggtggtgaacacctacacccccggcaagaagatctggctggagggcgtggtgaccaccagcgccggcggcaccaacaacctgagcgacagctacgccgccggcttcctgtggctgaacaccctgggcatgctggccaaccagggcatcgacgtggtgatcagacacagcttcttcgaccacggctacaaccacctggtggaccagaacttcaaccccctgcccgactactggctgagcctgctgtacaagagactgatcggccccaaggtgctggccgtgcacgtggccggcctgcagagaaagcccagacccggcagagtgatcagagacaagctgagaatctacgcccactgcaccaaccaccacaaccacaactacgtgagaggcagcatcaccctgttcatcatcaacctgcacagaagcagaaagaagatcaagctggccggcaccctgagagacaagctggtgcaccagtacctgctgcagccctacggccaggagggcctgaagagcaagagcgtgcagctgaacggccagcccctggtgatggtggacgacggcaccctgcccgagctgaagcccagacccctgagagccggcagaaccctggtgatcccccccgtgaccatgggcttctacgtggtgaagaacgtgaacgccctggcctgcagatacagatag

SEQ ID NO: 84341 - DNA, 1251 bp, synthetic construct
  misc_feature 1..1251: note = Description of Artificial Sequence: Synthetic coding sequence
  source 1..1251: mol_type = other DNA
atgaagagagagagaggcgccctgagcagagccagcagagccctgagactggcccccttcgtgtacctgctgctgatccagaccgaccccctggagggcgtgaacatcaccagccccgtgagactgatccacggcaccgtgggcaagagcgccctgctgagcgtgcagtacagcagcaccagcagcgacagacccgtggtgaagtggcagctgaagagagacaagcccgtgaccgtggtgcagagcatcggcaccgaggtgatcggcaccctgagacccgactacagagacagaatcagactgttcgagaacggcagcctgctgctgagcgacctgcagctggccgacgagggcacctacgaggtggagatcagcatcaccgacgacaccttcaccggcgagaagaccatcaacctgaccgtggacgtgcccatcagcagaccccaggtgctggtggccagcaccaccgtgctggagctgagcgaggccttcaccctgaactgcagccacgagaacggcaccaagcccagctacacctggctgaaggacggcaagcccctgctgaacgacagcagaatgctgctgagccccgaccagaaggtgctgaccatcaccagagtgctgatggaggacgacgacctgtacagctgcatggtggagaaccccatcagccagggcagaagcctgcccgtgaagatcaccgtgtacagaagaagcagcctgtacatcatcctgagcaccggcggcatcttcctgctggtgaccctggtgaccgtgtgcgcctgctggaagcccagcaagagaaagcagaagaagctggagaagcagaacagcctggagtacatggaccagaacgacgacagactgaagcccgaggccgacaccctgcccagaagcggcgagcaggagagaaagaaccccatggccctgtacatcctgaaggacaaggacagccccgagaccgaggagaaccccgcccccgagcccagaagcgccaccgagcccggcccccccggctacagcgtgagccccgccgtgcccggcagaagccccggcctgcccatcagaagcgccagaagataccccagaagccccgccagaagccccgccaccggcagaacccacagcagcccccccagagcccccagcagccccggcagaagcagaagcgccagcagaaccctgagaaccgccggcgtgcacatcatcagagagcaggacgaggccggccccgtggagatcagcgcctag

SEQ ID NO: 84342 - DNA, 1104 bp, synthetic construct
  misc_feature 1..1104: note = Description of Artificial Sequence: Synthetic coding sequence
  source 1..1104: mol_type = other DNA
atgaagagagagagaggcgccctgagcagagccagcagagccctgagactggcccccttcgtgtacctgctgctgatccagaccgaccccctggagggcgtgaacatcaccagccccgtgagactgatccacggcaccgtgggcaagagcgccctgctgagcgtgcagtacagcagcaccagcagcgacagacccgtggtgaagtggcagctgaagagagacaagcccgtgaccgtggtgcagagcatcggcaccgaggtgatcggcaccctgagacccgactacagagacagaatcagactgttcgagaacggcagcctgctgctgagcgacctgcagctggccgacgagggcacctacgaggtggagatcagcatcaccgacgacaccttcaccggcgagaagaccatcaacctgaccgtggacgtgcccatcagcagaccccaggtgctggtggccagcaccaccgtgctggagctgagcgaggccttcaccctgaactgcagccacgagaacggcaccaagcccagctacacctggctgaaggacggcaagcccctgctgaacgacagcagaatgctgctgagccccgaccagaaggtgctgaccatcaccagagtgctgatggaggacgacgacctgtacagctgcatggtggagaaccccatcagccagggcagaagcctgcccgtgaagatcaccgtgtacagaagaagcagcctgtacatcatcctgagcaccggcggcatcttcctgctggtgaccctggtgaccgtgtgcgcctgctggaagcccagcaagagaaagcagaagaagctggagaagcagaacagcctggagtacatggaccagaacgacgacagactgaagcccgagggcgagctgcccgccacccagagccccatccccagcaccatcagaagcgtgggctgctgggagaaggccgagctgggcgacaaggagaacagcagcgccggcaccctgcccagcgacctgggcgccagcaagggcaaggagcccgagcccgccagcctggccagcagccacagcctgcccagaagacacgccatgcccagcaccctgagcgtgagcgtgcacgagtag

SEQ ID NO: 84343 - DNA, 669 bp, synthetic construct
  misc_feature 1..669: note = Description of Artificial Sequence: Synthetic coding sequence
  source 1..669: mol_type = other DNA
atgagccagaccaagatgctgaaggtgagagtgaccctgttctgcatcctggccggcatcgtgctggccatgaccgccgtggtgaccgaccactgggccgtgctgagcccccacatggagcaccacaacaccacctgcgaggccgcccacttcggcctgtggagaatctgcaccaagagaatccccatggacgacagcaagacctgcggccccatcaccctgcccggcgagaagaactgcagctacttcagacacttcaaccccggcgagagcagcgagatcttcgagttcaccacccagaaggagtacagcatcagcgccgccgccatcgccatcttcagcctgggcttcatcatcctgggcagcctgtgcgtgctgctgagcctgggcaagaagagagactacctgctgagacccgccagcatgttctacgccttcgccggcctgtgcatcctggtgagcgtggaggtgatgagacagagcgtgaagagaatgatcgacagcgaggacaccgtgtggatcgagtactactacagctggagcttcgcctgcgcctgcgccgccttcatcctgctgttcctgggcggcctggccctgctgctgttcagcctgcccagaatgcccagaaacccctgggagagctgcatggacgccgagcccgagcactag

SEQ ID NO: 84344 - DNA, 633 bp, synthetic construct
  misc_feature 1..633: note = Description of Artificial Sequence: Synthetic coding sequence
  source 1..633: mol_type = other DNA
atggacctggaggagttcctgagcgagaacggcatcccccccagccccagccagcacgaccacagcccccacccccccggcctgcagcccgccagcagcgccgcccccagcgtgatggacctgagcagcagagccagcgcccccctgcaccccggcatccccagccccaactgcatgcagagccccatcagacccggccagctgctgcccgccaacagaaacacccccagccccatcgaccccgacaccatccaggtgcccgtgggctacgagcccgaccccgccgacctggccctgagcagcatccccggccaggagatgttcgaccccagaaagagaaagttcagcgaggaggagctgaagccccagcccatgatcaagaaggccagaaaggtgttcatccccgacgacctgaaggacgacaagtactgggccagaagaagaaagaacaacatggccgccaagagaagcagagacgccagaagactgaaggagaaccagatcgccatcagagccagcttcctggagaaggagaacagcgccctgagacaggaggtggccgacctgagaaaggagctgggcaagtgcaagaacatcctggccaagtacgaggccagacacggccccctgtag

SEQ ID NO: 84345 - DNA, 1095 bp, synthetic construct
  misc_feature 1..1095: note = Description of Artificial Sequence: Synthetic coding sequence
  source 1..1095: mol_type = other DNA
atgcacccccaggtggtgatcctgagcctgatcctgcacctggccgacagcgtggccggcagcgtgaaggtgggcggcgaggccggccccagcgtgaccctgccctgccactacagcggcgccgtgaccagcatgtgctggaacagaggcagctgcagcctgttcacctgccagaacggcatcgtgtggaccaacggcacccacgtgacctacagaaaggacaccagatacaagctgctgggcgacctgagcagaagagacgtgagcctgaccatcgagaacaccgccgtgagcgacagcggcgtgtactgctgcagagtggagcacagaggctggttcaacgacatgaagatcaccgtgagcctggagatcgtgccccccaaggtgaccaccacccccatcgtgaccaccgtgcccaccgtgaccaccgtgagaaccagcaccaccgtgcccaccaccaccaccgtgcccatgaccaccgtgcccaccaccaccgtgcccaccaccatgagcatccccaccaccaccaccgtgctgaccaccatgaccgtgagcaccaccaccagcgtgcccaccaccaccagcatccccaccaccaccagcgtgcccgtgaccaccaccgtgagcaccttcgtgccccccatgcccctgcccagacagaaccacgagcccgtggccaccagccccagcagcccccagcccgccgagacccaccccaccaccctgcagggcgccatcagaagagagcccaccagcagccccctgtacagctacaccaccgacggcaacgacaccgtgaccgagagcagcgacggcctgtggaacaacaaccagacccagctgttcctggagcacagcctgctgaccgccaacaccaccaagggcatctacgccggcgtgtgcatcagcgtgctggtgctgctggccctgctgggcgtgatcatcgccaagaagtacttcttcaagaaggaggtgcagcagctgagcgtgagcttcagcagcctgcagatcaaggccctgcagaacgccgtggagaaggaggtgcaggccgaggacaacatctacatcgagaacagcctgtacgccaccgactag

SEQ ID NO: 84346 - DNA, 1206 bp, synthetic construct
  misc_feature 1..1206: note = Description of Artificial Sequence: Synthetic coding sequence
  source 1..1206: mol_type = other DNA
atgcacccccaggtggtgatcctgagcctgatcctgcacctggccgacagcgtggccggcagcgtgaaggtgggcggcgaggccggccccagcgtgaccctgccctgccactacagcggcgccgtgaccagcatgtgctggaacagaggcagctgcagcctgttcacctgccagaacggcatcgtgtggaccaacggcacccacgtgacctacagaaaggacaccagatacaagctgctgggcgacctgagcagaagagacgtgagcctgaccatcgagaacaccgccgtgagcgacagcggcgtgtactgctgcagagtggagcacagaggctggttcaacgacatgaagatcaccgtgagcctggagatcgtgccccccaaggtgaccaccacccccatcgtgaccaccgtgcccaccgtgaccaccgtgagaaccagcaccaccgtgcccaccaccaccaccgtgcccatgaccaccgtgcccaccaccaccgtgcccaccaccatgagcatccccaccaccaccaccgtgctgaccaccatgaccgtgagcaccaccaccagcgtgcccaccaccaccagcatccccaccaccaccagcgtgcccgtgaccaccaccgtgagcaccttcgtgccccccatgcccctgcccagacagaaccacgagcccgtggccaccagccccagcagcccccagcccgccgagacccaccccaccaccctgcagggcgccatcagaagagagcccaccagcagccccctgtacagctacaccaccgacggcaacgacaccgtgaccgagagcagcgacggcctgtggaacaacaaccagacccagctgttcctggagcacagcctgctgaccgccaacaccaccaagggcatctacgccggcgtgtgcatcagcgtgctggtgctgctggccctgctgggcgtgatcatcgccaagatgttccacctggccgccttcaagctgaagctgtgcaagatgcagctgaagagaaagagcaagcagaagaccatcagcaccctgagaatcgtgttcatgcccagaaccaagacccagtggtgcagcctgagagtgtacgcccacgagtgcagaagactgaacagacaccagcacatcagaagactgctggaccccaagaccatcttcctgttccagttccacctggccttccagcacgtgagcgacaccggctag

SEQ ID NO: 84347 - DNA, 672 bp, synthetic construct
  misc_feature 1..672: note = Description of Artificial Sequence: Synthetic coding sequence
  source 1..672: mol_type = other DNA
atgcacccccaggtggtgatcctgagcctgatcctgcacctggccgacagcgtggccggcagcgtgaaggtgggcggcgaggccggccccagcgtgaccctgccctgccactacagcggcgccgtgaccagcatgtgctggaacagaggcagctgcagcctgttcacctgccagaacggcatcgtgtggaccaacggcacccacgtgacctacagaaaggacaccagatacaagctgctgggcgacctgagcagaagagacgtgagcctgaccatcgagaacaccgccgtgagcgacagcggcgtgtactgctgcagagtggagcacagaggctggttcaacgacatgaagatcaccgtgagcctggagatcgtgccccccaaggtgaccaccacccccatcgtgaccaccgtgcccaccgtgaccaccgtgagaaccagcaccaccgtgcccaccaccaccaccgtgcccatgaccaccgtgcccaccaccaccgtgcccaccaccatgagcatccccaccaccaccaccgtgctgaccaccatgaccgtgagcaccaccaccagcgtgcccaccaccaccagcatccccaccaccaccagcgtgcccgtgaccaccaccgtgagcaccttcgtgccccccatgcccctgcccagacagaaccacgagtag

SEQ ID NO: 84348 - DNA, 1095 bp, synthetic construct; identical to SEQ ID NO: 84345
  misc_feature 1..1095: note = Description of Artificial Sequence: Synthetic coding sequence
  source 1..1095: mol_type = other DNA

SEQ ID NO: 84349 - DNA, 1095 bp, synthetic construct; identical to SEQ ID NO: 84345
  misc_feature 1..1095: note = Description of Artificial Sequence: Synthetic coding sequence
  source 1..1095: mol_type = other DNA

SEQ ID NO: 84350 - DNA, 522 bp, synthetic construct
  misc_feature 1..522: note = Description of Artificial Sequence: Synthetic coding sequence
  source 1..522: mol_type = other DNA
atggagcccggcgccggccacctggacggccacagagccggcagccccagcctgagacaggccctgtgcgacggcagcgccgtgatgttcagcagcaaggagagaggcagatgcaccgtgatcaacttcgtgcccctggaggcccccctgagaagcacccccagaagcagacaggtgaccgaggcctgcggcggcgagggcagagccgtgcccctgggcagcgagcccgagtggagcgtgggcggcatggaggccaccctggagcagcacctggaggacaccatgaagaaccccagcatcgtgggcgtgctgtgcaccgacagccagggcctgaacctgggctgcagaggcaccctgagcgacgagcacgccggcgtgatcagcgtgctggcccagcaggccgccaagctgaccagcgaccccaccgacatccccgtggtgtgcctggagagcgacaacggcaacatcatgatccagaagcacgacggcatcaccgtggccgtgcacaagatggccagctag

SEQ ID NO: 84351 - DNA, 267 bp, synthetic construct
  misc_feature 1..267: note = Description of Artificial Sequence: Synthetic coding sequence
  source 1..267: mol_type = other DNA
atgggcaactggggcctgggcatcgccccctgggtggacggcgagagcgagctggagttcagaagactgggcatgcagggccccctggaggccctgagaagaagagagtggaacacccagagagccagcttcagcttcagcttcctgatcgccctgagcccccacaccgtggactactgccacagctacgagctgttcaacagaagatggcacggccacgtgctggccacccagagacccagcctgttcatcctgatgctggtgtag

SEQ ID NO: 84352 - DNA, 2334 bp, synthetic construct
  misc_feature 1..2334: note = Description of Artificial Sequence: Synthetic coding sequence
  source 1..2334: mol_type = other DNA
atgggcagaggcagcggcaccttcgagagactgctggacaaggccaccagccagctgctgctggagaccgactgggagagcatcctgcagatctgcgacctgatcagacagggcgacacccaggccaagtacgccgtgaacagcatcaagaagaaggtgaacgacaagaacccccacgtggccctgtacgccctggaggtgatggagagcgtggtgaagaactgcggccagaccgtgcacgacgaggtggccaacaagcagaccatggaggagctgaaggacctgctgaagagacaggtggaggtgaacgtgagaaacaagatcctgtacctgatccaggcctgggcccacgccttcagaaacgagcccaagtacaaggtggtgcaggacacctaccagatcatgaaggtggagggccacgtgttccccgagttcaaggagagcgacgccatgttcgccgccgagagagcccccgactgggtggacgccgaggagtgccacagatgcagagtgcagttcggcgtgatgaccagaaagcaccactgcagagcctgcggccagatcttctgcggcaagtgcagcagcaagtacagcaccatccccaagttcggcatcgagaaggaggtgagagtgtgcgagccctgctacgagcagctgaacagaaaggccgagggcaaggccaccagcaccaccgagctgccccccgagtacctgaccagccccctgagccagcagagccagctgccccccaagagagacgagaccgccctgcaggaggaggaggagctgcagctggccctggccctgagccagagcgaggccgaggagaaggagagactgagacagaagagcacctacaccagctaccccaaggccgagcccatgcccagcgccagcagcgccccccccgccagcagcctgtacagcagccccgtgaacagcagcgcccccctggccgaggacatcgaccccgagctggccagatacctgaacagaaactactgggagaagaagcaggaggaggccagaaagagccccacccccagcgcccccgtgcccctgaccgagcccgccgcccagcccggcgagggccacgccgcccccaccaacgtggtggagaaccccctgcccgagaccgacagccagcccatcccccccagcggcggccccttcagcgagccccagttccacaacggcgagagcgaggagagccacgagcagttcctgaaggccctgcagaacgccgtgaccaccttcgtgaacagaatgaagagcaaccacatgagaggcagaagcatcaccaacgacagcgccgtgctgagcctgttccagagcatcaacggcatgcacccccagctgctggagctgctgaaccagctggacgagagaagactgtactacgagggcctgcaggacaagctggcccagatcagagacgccagaggcgccctgagcgccctgagagaggagcacagagagaagctgagaagagccgccgaggaggccgagagacagagacagatccagctggcccagaagctggagatcatgagacagaagaagcaggagtacctggaggtgcagagacagctggccatccagagactgcaggagcaggagaaggagagacagatgagactggagcagcagaagcagaccgtgcagatgagagcccagatgcccgccttccccctgccctacgcccagctgcaggccatgcccgccgccggcggcgtgctgtaccagcccagcggccccgccagcttccccagcaccttcagccccgccggcagcgtggagggcagccccatgcacggcgtgtacatgagccagcccgcccccgccgccggcccctaccccagcatgcccagcaccgccgccgaccccagcatggtgagcgcctacatgtaccccgccggcgccaccggcgcccaggccgccccccaggcccaggccggccccaccgccagccccgcctacagcagctaccagcccacccccaccgccggctaccagaacgtggccagccaggccccccagagcctgcccgccatcagccagcccccccagagcagcaccatgggctacatgggcagccagagcgtgagcatgggctaccagccctacaacatgcagaacctgatgaccaccctgcccagccaggacgccagcctgcccccccagcagccctacatcgccggccagcagcccatgtaccagcagatggcccccagcggcggccccccccagcagcagccccccgtggcccagcagccccaggcccagggcccccccgcccagggcagcgaggcccagctgatcagcttcgactag

SEQ ID NO: 84353 - DNA, 2076 bp, synthetic construct
  misc_feature 1..2076: note = Description of Artificial Sequence: Synthetic coding sequence
  source 1..2076: mol_type = other DNA
atgggcagaggcagcggcaccttcgagagactgctggacaaggccaccagccagctgctgctggagaccgactgggagagcatcctgcagatctgcgacctgatcagacagggcgacacccaggccaagtacgccgtgaacagcatcaagaagaaggtgaacgacaagaacccccacgtggccctgtacgccctggaggtgatggagagcgtggtgaagaactgcggccagaccgtgcacgacgaggtggccaacaagcagaccatggaggagctgaaggacctgctgaagagacaggtggaggtgaacgtgagaaacaagatcctgtacctgatccaggcctgggcccacgccttcagaaacgagcccaagtacaaggtggtgcaggacacctaccagatcatgaaggtggagggccacgtgttccccgagttcaaggagagcgacgccatgttcgccgccgagagagcccccgactgggtggacgccgaggagtgccacagatgcagagtgcagttcggcgtgatgaccagaaagcaccactgcagagcctgcggccagatcttctgcggcaagtgcagcagcaagtacagcaccatccccaagttcggcatcgagaaggaggtgagagtgtgcgagccctgctacgagcagctgaacagaaaggccgagggcaaggccaccagcaccaccgagctgccccccgagtacctgaccagccccctgagccagcagagccagctgccccccaagagagacgagaccgccctgcaggaggaggaggagctgcagctggccctggccctgagccagagcgaggccgaggagaaggagagactgagacagaagagcacctacaccagctaccccaaggccgagcccatgcccagcgccagcagcgccccccccgccagcagcctgtacagcagccccgtgaacagcagcgcccccctggccgaggacatcgaccccgagctggccagatacctgaacagaaactactgggagaagaagcaggaggaggccagaaagagccccacccccagcgcccccgtgcccctgaccgagcccgccgcccagcccggcgagggccacgccgcccccaccaacgtggtggagaaccccctgcccgagaccgacagccagcccatcccccccagcggcggccccttcagcgagccccagttccacaacggcgagagcgaggagagccacgagcagttcctgaaggccctgcagaacgccgtgaccaccttcgtgaacagaatgaagagcaaccacatgagaggcagaagcatcaccaacgacagcgccgtgctgagcctgttccagagcatcaacggcatgcacccccagctgctggagctgctgaaccagctggacgagagaagactgtactacgagggcctgcaggacaagctggcccagatcagagacgccagaggcgccctgagcgccctgagagaggagcacagagagaagctgagaagagccgccgaggaggccgagagacagagacagatccagctggcccagaagctggagatcatgatgcacggcgtgtacatgagccagcccgcccccgccgccggcccctaccccagcatgcccagcaccgccgccgaccccagcatggtgagcgcctacatgtaccccgccggcgccaccggcgcccaggccgccccccaggcccaggccggccccaccgccagccccgcctacagcagctaccagcccacccccaccgccggctaccagaacgtggccagccaggccccccagagcctgcccgccatcagccagcccccccagagcagcaccatgggctacatgggcagccagagcgtgagcatgggctaccagccctacaacatgcagaacctgatgaccaccctgcccagccaggacgccagcctgcccccccagcagccctacatcgccggccagcagcccatgtaccagcagatggcccccagcggcggccccccccagcagcagccccccgtggcccagcagccccaggcccagggcccccccgcccagggcagcgaggcccagctgatcagcttcgactag

SEQ ID NO: 84354 - DNA, 324 bp, synthetic construct
  misc_feature 1..324: note = Description of Artificial Sequence: Synthetic coding sequence
  source 1..324: mol_type = other DNA
atgagactgagcaagaccctggtggacatggacatggccgactacagcgccgccctggaccccgcctacaccaccctggagttcgagaacgtgcaggtgctgaccatgggcaacgacttcgtggccgccgccagcagacagatcgaggccagcccccccaccagcctggagcacatctggagaggcggccagttcagcaccggcagacacgtgcccatcagaagacaccagccccagagagcccagcagcccggctgccagagacccgtgtgccacctgagaggccccggccacggccagaccctgagatgcctggagctgtag

SEQ ID NO: 84355 - DNA, 1425 bp, synthetic construct
  misc_feature 1..1425: note = Description of Artificial Sequence: Synthetic coding sequence
  source 1..1425: mol_type = other DNA
atgagactgagcaagaccctggtggacatggacatggccgactacagcgccgccctggaccccgcctacaccaccctggagttcgagaacgtgcaggtgctgaccatgggcaacgacaccagccccagcgagggcaccaacctgaacgcccccaacagcctgggcgtgagcgccctgtgcgccatctgcggcgacagagccaccggcaagcactacggcgccagcagctgcgacggctgcaagggcttcttcagaagaagcgtgagaaagaaccacatgtacagctgcagattcagcagacagtgcgtggtggacaaggacaagagaaaccagtgcagatactgcagactgaagaagtgcttcagagccggcatgaagaaggaggccgtgcagaacgagagagacagaatcagcaccagaagaagcagctacgaggacagcagcctgcccagcatcaacgccctgctgcaggccgaggtgctgagcagacagatcaccagccccgtgagcggcatcaacggcgacatcagagccaagaagatcgccagcatcgccgacgtgtgcgagagcatgaaggagcagctgctggtgctggtggagtgggccaagtacatccccgccttctgcgagctgcccctggacgaccaggtggccctgctgagagcccacgccggcgagcacctgctgctgggcgccaccaagagaagcatggtgttcaaggacgtgctgctgctgggcaacgactacatcgtgcccagacactgccccgagctggccgagatgagcagagtgagcatcagaatcctggacgagctggtgctgcccttccaggagctgcagatcgacgacaacgagtacgcctacctgaaggccatcatcttcttcgaccccgacgccaagggcctgagcgaccccggcaagatcaagagactgagaagccaggtgcaggtgagcctggaggactacatcaacgacagacagtacgacagcagaggcagattcggcgagctgctgctgctgctgcccaccctgcagagcatcacctggcagatgatcgagcagatccagttcatcaagctgttcggcatggccaagatcgacaacctgctgcaggagatgctgctgggcggcagccccagcgacgccccccacgcccaccaccccctgcacccccacctgatgcaggagcacatgggcaccaacgtgatcgtggccaacaccatgcccacccacctgagcaacggccagatgtgcgagtggcccagacccagaggccaggccgccacccccgagaccccccagcccagcccccccggcggcagcggcagcgagccctacaagctgctgcccggcgccgtggccaccatcgtgaagcccctgagcgccatcccccagcccaccatcaccaagcaggaggtgatctag

SEQ ID NO: 84356 - DNA, 1359 bp, synthetic construct
  misc_feature 1..1359: note = Description of Artificial Sequence: Synthetic coding sequence
  source 1..1359: mol_type = other DNA
atggtgagcgtgaacgcccccctgggcgcccccgtggagagcagctacgacaccagccccagcgagggcaccaacctgaacgcccccaacagcctgggcgtgagcgccctgtgcgccatctgcggcgacagagccaccggcaagcactacggcgccagcagctgcgacggctgcaagggcttcttcagaagaagcgtgagaaagaaccacatgtacagctgcagattcagcagacagtgcgtggtggacaaggacaagagaaaccagtgcagatactgcagactgaagaagtgcttcagagccggcatgaagaaggaggccgtgcagaacgagagagacagaatcagcaccagaagaagcagctacgaggacagcagcctgcccagcatcaacgccctgctgcaggccgaggtgctgagcagacagatcaccagccccgtgagcggcatcaacggcgacatcagagccaagaagatcgccagcatcgccgacgtgtgcgagagcatgaaggagcagctgctggtgctggtggagtgggccaagtacatccccgccttctgcgagctgcccctggacgaccaggtggccctgctgagagcccacgccggcgagcacctgctgctgggcgccaccaagagaagcatggtgttcaaggacgtgctgctgctgggcaacgactacatcgtgcccagacactgccccgagctggccgagatgagcagagtgagcatcagaatcctggacgagctggtgctgcccttccaggagctgcagatcgacgacaacgagtacgcctacctgaaggccatcatcttcttcgaccccgacgccaagggcctgagcgaccccggcaagatcaagagactgagaagccaggtgcaggtgagcctggaggactacatcaacgacagacagtacgacagcagaggcagattcggcgagctgctgctgctgctgcccaccctgcagagcatcacctggcagatgatcgagcagatccagttcatcaagctgttcggcatggccaagatcgacaacctgctgcaggagatgctgctgggcggcagccccagcgacgccccccacgcccaccaccccctgcacccccacctgatgcaggagcacatgggcaccaacgtgatcgtggccaacaccatgcccacccacctgagcaacggccagatgtgcgagtggcccagacccagaggccaggccgccacccccgagaccccccagcccagcccccccggcggcagcggcagcgagccctacaagctgctgcccggcgccgtggccaccatcgtgaagcccctgagcgccatcccccagcccaccatcaccaagcaggaggtgatctag

SEQ ID NO: 84357 - DNA, 1515 bp, synthetic construct
  misc_feature 1..1515: note = Description of Artificial Sequence: Synthetic coding sequence
  source 1..1515: mol_type = other DNA
atgagactgagcaagaccctggtggacatggacatggccgactacagcgccgccctggaccccgcctacaccaccctggagttcgagaacgtgcaggtgctgaccatgggcaacgtgctgctgcccctgagactggccagactgagacaccccctgagacaccactggagcatcagcggcggcgtggacagcagcccccagggcgacaccagccccagcgagggcaccaacctgaacgcccccaacagcctgggcgtgagcgccctgtgcgccatctgcggcgacagagccaccggcaagcactacggcgccagcagctgcgacggctgcaagggcttcttcagaagaagcgtgagaaagaaccacatgtacagctgcagattcagcagacagtgcgtggtggacaaggacaagagaaaccagtgcagatactgcagactgaagaagtgcttcagagccggcatgaagaaggaggccgtgcagaacgagagagacagaatcagcaccagaagaagcagctacgaggacagcagcctgcccagcatcaacgccctgctgcaggccgaggtgctgagcagacagatcaccagccccgtgagcggcatcaacggcgacatcagagccaagaagatcgccagcatcgccgacgtgtgcgagagcatgaaggagcagctgctggtgctggtggagtgggccaagtacatccccgccttctgcgagctgcccctggacgaccaggtggccctgctgagagcccacgccggcgagcacctgctgctgggcgccaccaagagaagcatggtgttcaaggacgtgctgctgctgggcaacgactacatcgtgcccagacactgccccgagctggccgagatgagcagagtgagcatcagaatcctggacgagctggtgctgcccttccaggagctgcagatcgacgacaacgagtacgcctacctgaaggccatcatcttcttcgaccccgacgccaagggcctgagcgaccccggcaagatcaagagactgagaagccaggtgcaggtgagcctggaggactacatcaacgacagacagtacgacagcagaggcagattcggcgagctgctgctgctgctgcccaccctgcagagcatcacctggcagatgatcgagcagatccagttcatcaagctgttcggcatggccaagatcgacaacctgctgcaggagatgctgctgggcggcagccccagcgacgccccccacgcccaccaccccctgcacccccacctgatgcaggagcacatgggcaccaacgtgatcgtggccaacaccatgcccacccacctgagcaacggccagatgtgcgagtggcccagacccagaggccaggccgccacccccgagaccccccagcccagcccccccggcggcagcggcagcgagccctacaagctgctgcccggcgccgtggccaccatcgtgaagcccctgagcgccatcccccagcccaccatcaccaagcaggaggtgatctag

SEQ ID NO: 84358 - DNA, 1395 bp, synthetic construct
  misc_feature 1..1395: note = Description of Artificial Sequence: Synthetic coding sequence
  source 1..1395: mol_type = other DNA
atgagactgagcaagaccctggtggacatggacatggccgactacagcgccgccctggaccccgcctacaccaccctggagttcgagaacgtgcaggtgctgaccatgggcaacgacaccagccccagcgagggcaccaacctgaacgcccccaacagcctgggcgtgagcgccctgtgcgccatctgcggcgacagagccaccggcaagcactacggcgccagcagctgcgacggctgcaagggcttcttcagaagaagcgtgagaaagaaccacatgtacagctgcagattcagcagacagtgcgtggtggacaaggacaagagaaaccagtgcagatactgcagactgaagaagtgcttcagagccggcatgaagaaggaggccgtgcagaacgagagagacagaatcagcaccagaagaagcagctacgaggacagcagcctgcccagcatcaacgccctgctgcaggccgaggtgctgagcagacagatcaccagccccgtgagcggcatcaacggcgacatcagagccaagaagatcgccagcatcgccgacgtgtgcgagagcatgaaggagcagctgctggtgctggtggagtgggccaagtacatccccgccttctgcgagctgcccctggacgaccaggtggccctgctgagagcccacgccggcgagcacctgctgctgggcgccaccaagagaagcatggtgttcaaggacgtgctgctgctgggcaacgactacatcgtgcccagacactgccccgagctggccgagatgagcagagtgagcatcagaatcctggacgagctggtgctgcccttccaggagctgcagatcgacgacaacgagtacgcctacctgaaggccatcatcttcttcgaccccgacgccaagggcctgagcgaccccggcaagatcaagagactgagaagccaggtgcaggtgagcctggaggactacatcaacgacagacagtacgacagcagaggcagattcggcgagctgctgctgctgctgcccaccctgcagagcatcacctggcagatgatcgagcagatccagttcatcaagctgttcggcatggccaagatcgacaacctgctgcaggagatgctgctgggcggcagccccagcgacgccccccacgcccaccaccccctgcacccccacctgatgcaggagcacatgggcaccaacgtgatcgtggccaacaccatgcccacccacctgagcaacggccagatgagcacccccgagaccccccagcccagcccccccggcggcagcggcagcgagccctacaagctgctgcccggcgccgtggccaccatcgtgaagcccctgagcgccatcccccagcccaccatcaccaagcaggaggtgatctag

SEQ ID NO: 84359 - DNA, 1254 bp, synthetic construct
  misc_feature 1..1254: note = Description of Artificial Sequence: Synthetic coding sequence
  source 1..1254: mol_type = other DNA
atgagactgagcaagaccctggtggacatggacatggccgactacagcgccgccctggaccccgcctacaccaccctggagttcgagaacgtgcaggtgctgaccatgggcaacgacaccagccccagcgagggcaccaacctgaacgcccccaacagcctgggcgtgagcgccctgtgcgccatctgcggcgacagagccaccggcaagcactacggcgccagcagctgcgacggctgcaagggcttcttcagaagaagcgtgagaaagaaccacatgtacagctgcagattcagcagacagtgcgtggtggacaaggacaagagaaaccagtgcagatactgcagactgaagaagtgcttcagagccggcatgaagaaggaggccgtgcagaacgagagagacagaatcagcaccagaagaagcagctacgaggacagcagcctgcccagcatcaacgccctgctgcaggccgaggtgctgagcagacagatcaccagccccgtgagcggcatcaacggcgacatcagagccaagaagatcgccagcatcgccgacgtgtgcgagagcatgaaggagcagctgctggtgctggtggagtgggccaagtacatccccgccttctgcgagctgcccctggacgaccaggtggccctgctgagagcccacgccggcgagcacctgctgctgggcgccaccaagagaagcatggtgttcaaggacgtgctgctgctgggcaacgactacatcgtgcccagacactgccccgagctggccgagatgagcagagtgagcatcagaatcctggacgagctggtgctgcccttccaggagctgcagatcgacgacaacgagtacgcctacctgaaggccatcatcttcttcgaccccgacgccaagggcctgagcgaccccggcaagatcaagagactgagaagccaggtgcaggtgagcctggaggactacatcaacgacagacagtacgacagcagaggcagattcggcgagctgctgctgctgctgcccaccctgcagagcatcacctggcagatgatcgagcagatccagttcatcaagctgttcggcatggccaagatcgacaacctgctgcaggagatgctgctgggcggcccctgccaggcccaggagggcagaggctggagcggcgacagccccggcgacagaccccacaccgtgagcagccccctgagcagcctggccagccccctgtgcagattcggccaggtggcctag

SEQ ID NO: 84360 - DNA, 1329 bp, synthetic construct
  misc_feature 1..1329: note = Description of Artificial Sequence: Synthetic coding sequence
  source 1..1329: mol_type = other DNA
atggtgagcgtgaacgcccccctgggcgcccccgtggagagcagctacgacaccagccccagcgagggcaccaacctgaacgcccccaacagcctgggcgtgagcgccctgtgcgccatctgcggcgacagagccaccggcaagcactacggcgccagcagctgcgacggctgcaagggcttcttcagaagaagcgtgagaaagaaccacatgtacagctgcagattcagcagacagtgcgtggtggacaaggacaagagaaaccagtgcagatactgcagactgaagaagtgcttcagagccggcatgaagaaggaggccgtgcagaacgagagagacagaatcagcaccagaagaagcagctacgaggacagcagcctgcccagcatcaacgccctgctgcaggccgaggtgctgagcagacagatcaccagccccgtgagcggcatcaacggcgacatcagagccaagaagatcgccagcatcgccgacgtgtgcgagagcatgaaggagcagctgctggtgctggtggagtgggccaagtacatccccgccttctgcgagctgcccctggacgaccaggtggccctgctgagagcccacgccggcgagcacctgctgctgggcgccaccaagagaagcatggtgttcaaggacgtgctgctgctgggcaacgactacatcgtgcccagacactgccccgagctggccgagatgagcagagtgagcatcagaatcctggacgagctggtgctgcccttccaggagctgcagatcgacgacaacgagtacgcctacctgaaggccatcatcttcttcgaccccgacgccaagggcctgagcgaccccggcaagatcaagagactgagaagccaggtgcaggtgagcctggaggactacatcaacgacagacagtacgacagcagaggcagattcggcgagctgctgctgctgctgcccaccctgcagagcatcacctggcagatgatcgagcagatccagttcatcaagctgttcggcatggccaagatcgacaacctgctgcaggagatgctgctgggcggcagccccagcgacgccccccacgcccaccaccccctgcacccccacctgatgcaggagcacatgggcaccaacgtgatcgtggccaacaccatgcccacccacctgagcaacggccagatgagcacccccgagaccccccagcccagcccccccggcggcagcggcagcgagccctacaagctgctgcccggcgccgtggccaccatcgtgaagcccctgagcgccatcccccagcccaccatcaccaagcaggaggtgatctag

SEQ ID NO: 84361 - DNA, 1227 bp, synthetic construct
  misc_feature 1..1227: note = Description of Artificial Sequence: Synthetic coding sequence
  source 1..1227: mol_type = other DNA
atgaacaccaccgacaacggcgtgaactgcctgtgcgccatctgcggcgacagagccaccggcaagcactacggcgccagcagctgcgacggctgcaagggcttcttcagaagaagcatcagaaagagccacgtgtacagctgcagattcagcagacagtgcgtggtggacaaggacaagagaaaccagtgcagatactgcagactgagaaagtgcttcagagccggcatgaagaaggaggccgtgcagaacgagagagacagaatcagcaccagaagaagcaccttcgacggcagcaacatccccagcatcaacaccctggcccaggccgaggtgagaagcagacagatcagcgtgagcagccccggcagcagcaccgacatcaacgtgaagaagatcgccagcatcggcgacgtgtgcgagagcatgaagcagcagctgctggtgctggtggagtgggccaagtacatccccgccttctgcgagctgcccctggacgaccaggtggccctgctgagagcccacgccggcgagcacctgctgctgggcgccaccaagagaagcatgatgtacaaggacatcctgctgctgggcaacaactacgtgatccacagaaacagctgcgaggtggagatcagcagagtggccaacagagtgctggacgagctggtgagacccttccaggagatccagatcgacgacaacgagtacgcctgcctgaaggccatcgtgttcttcgaccccgacgccaagggcctgagcgaccccgtgaagatcaagaacatgagattccaggtgcagatcggcctggaggactacatcaacgacagacagtacgacagcagaggcagattcggcgagctgctgctgctgctgcccaccctgcagagcatcacctggcagatgatcgagcagatccagttcgtgaagctgttcggcatggtgaagatcgacaacctgctgcaggagatgctgctgggcggcgccagcaacgacggcagccacctgcaccaccccatgcacccccacctgagccaggaccccctgaccggccagaccatcctgctgggccccatgagcaccctggtgcacgccgaccagatcagcacccccgagacccccctgcccagccccccccagggcagcggccaggagcagtacaagatcgccgccaaccaggccagcgtgatcagccaccagcacctgagcaagcagaagcagctgtag

SEQ ID NO: 84362 - DNA, 1338 bp, synthetic construct
  misc_feature 1..1338: note = Description of Artificial Sequence: Synthetic coding sequence
  source 1..1338: mol_type = other DNA
atggacatggccaactacagcgaggtgctggaccccacctacaccaccctggagttcgagaccatgcagatcctgtacaacagcagcgacagcagcgcccccgagaccagcatgaacaccaccgacaacggcgtgaactgcctgtgcgccatctgcggcgacagagccaccggcaagcactacggcgccagcagctgcgacggctgcaagggcttcttcagaagaagcatcagaaagagccacgtgtacagctgcagattcagcagacagtgcgtggtggacaaggacaagagaaaccagtgcagatactgcagactgagaaagtgcttcagagccggcatgaagaaggaggccgtgcagaacgagagagacagaatcagcaccagaagaagcaccttcgacggcagcaacatccccagcatcaacaccctggcccaggccgaggtgagaagcagacagatcagcgtgagcagccccggcagcagcaccgacatcaacgtgaagaagatcgccagcatcggcgacgtgtgcgagagcatgaagcagcagctgctggtgctggtggagtgggccaagtacatccccgccttctgcgagctgcccctggacgaccaggtggccctgctgagagcccacgccggcgagcacctgctgctgggcgccaccaagagaagcatgatgtacaaggacatcctgctgctgggcaacaactacgtgatccacagaaacagctgcgaggtggagatcagcagagtggccaacagagtgctggacgagctggtgagacccttccaggagatccagatcgacgacaacgagtacgcctgcctgaaggccatcgtgttcttcgaccccgacgccaagggcctgagcgaccccgtgaagatcaagaacatgagattccaggtgcagatcggcctggaggactacatcaacgacagacagtacgacagcagaggcagattcggcgagctgctgctgctgctgcccaccctgcagagcatcacctggcagatgatcgagcagatccagttcgtgaagctgttcggcatggtgaagatcgacaacctgctgcaggagatgctgctgggcggcgccagcaacgacggcagccacctgcaccaccccatgcacccccacctgagccaggaccccctgaccggccagaccatcctgctgggccccatgagcaccctggtgcacgccgaccagatcagcacccccgagacccccctgcccagccccccccagggcagcggccaggagcagtacaagatcgccgccaaccaggccagcgtgatcagccaccagcacctgagcaagcagaagcagctgtag

SEQ ID NO: 84363 - DNA, 723 bp, synthetic construct
  misc_feature 1..723: note = Description of Artificial Sequence: Synthetic coding sequence
  source 1..723: mol_type = other DNA
atgagcagaagcaacagacagaaggagtacaagtgcggcgacctggtgttcgccaagatgaagggctacccccactggcccgccagaatcgacgagatgcccgaggccgccgtgaagagcaccgccaacaagtaccaggtgttcttcttcggcacccacgagaccgccttcctgggccccaaggacctgttcccctacgaggagagcaaggagaagttcggcaagcccaacaagagaaagggcttcagcgagggcctgtgggagatcgagaacaaccccaccgtgaaggccagcggctaccagagcagccagaagaagagctgcgtggaggagcccgagcccgagcccgaggccgccgagggcgacggcgacaagaagggcaacgccgagggcagcagcgacgaggagggcaagctggtgatcgacgagcccgccaaggagaagaacgagaagggcgccctgaagagaagagccggcgacctgctggaggacagccccaagagacccaaggaggccgagaaccccgagggcgaggagaaggaggccgccaccctggaggtggagagacccctgcccatggaggtggagaagaacagcacccccagcgagcccggcagcggcagaggccccccccaggaggaggaggaggaggaggacgaggaggaggaggccaccaaggaggacgccgaggcccccggcatcagagaccacgagagcctgtag

SEQ ID NO: 84364 - DNA, 771 bp, synthetic construct
  misc_feature 1..771: note = Description of Artificial Sequence: Synthetic coding sequence
  source 1..771: mol_type = other DNA
atgcaccccgagggcggccagttcgtgccccagctgctgggccacctgctggccaccaagctgaagagattcctgctgagcaagggcggcagaagagcccagatccccgacgtgagcagagccaccccccacaccatcgacgagatgcccgaggccgccgtgaagagcaccgccaacaagtaccaggtgttcttcttcggcacccacgagaccgccttcctgggccccaaggacctgttcccctacgaggagagcaaggagaagttcggcaagcccaacaagagaaagggcttcagcgagggcctgtgggagatcgagaacaaccccaccgtgaaggccagcggctaccagagcagccagaagaagagctgcgtggaggagcccgagcccgagcccgaggccgccgagggcgacggcgacaagaagggcaacgccgagggcagcagcgacgaggagggcaagctggtgatcgacgagcccgccaaggagaagaacgagaagggcgccctgaagagaagagccggcgacctgctggaggacagccccaagagacccaaggaggccgagaaccccgagggcgaggagaaggaggccgccaccctggaggtggagagacccctgcccatggaggtggagaagaacagcacccccagcgagcccggcagcggcagaggccccccccaggaggaggaggaggaggaggacgaggaggaggaggccaccaaggaggacgccgaggcccccggcatcagagaccacgagagcctgtag

SEQ ID NO: 84365 - DNA, 702 bp, synthetic construct
  misc_feature 1..702: note = Description of Artificial Sequence: Synthetic coding sequence
  source 1..702: mol_type = other DNA
atggagcagagagccggcggcaacagagtgcagaccagcaccctgaactgcgccggcgccgccgtgatcgacgagatgcccgaggccgccgtgaagagcaccgccaacaagtaccaggtgttcttcttcggcacccacgagaccgccttcctgggccccaaggacctgttcccctacgaggagagcaaggagaagttcggcaagcccaacaagagaaagggcttcagcgagggcctgtgggagatcgagaacaaccccaccgtgaaggccagcggctaccagagcagccagaagaagagctgcgtggaggagcccgagcccgagcccgaggccgccgagggcgacggcgacaagaagggcaacgccgagggcagcagcgacgaggagggcaagctggtgatcgacgagcccgccaaggagaagaacgagaagggcgccctgaagagaagagccggcgacctgctggaggacagccccaagagacccaaggaggccgagaaccccgagggcgaggagaaggaggccgccaccctggaggtggagagacccctgcccatggaggtggagaagaacagcacccccagcgagcccggcagcggcagaggccccccccaggaggaggaggaggaggaggacgaggaggaggaggccaccaaggaggacgccgaggcccccggcatcagagaccacgagagcctgtag

SEQ ID NO: 84366 - DNA, 789 bp, synthetic construct
  misc_feature 1..789: note = Description of Artificial Sequence: Synthetic coding sequence
  source 1..789: mol_type = other DNA
atgagcagaagcaacagacagaaggagtacaagtgcggcgacctggtgttcgccaagatgaagggctacccccactggcccgccagaatcgacgagatgcccgaggccgccgtgaagagcaccgccaacaagtaccaggtgttcttcagcggccccaccagaagacacagctgggcccccaagaccagcagcctgaccagaaaccccagaagaagcctggccagccccaccagaggcaagggcagcgccagaggctgcggcagaagcagaaccaccctgctgagcagactgcccgccatcagccccccccccagctgcaccgagccctgcctgcccggccagtgggtgtaccccggcgccaaccccaccgagagcagccagaagaagagctgcgtggaggagcccgagcccgagcccgaggccgccgagggcgacggcgacaagaagggcaacgccgagggcagcagcgacgaggagggcaagctggtgatcgacgagcccgccaaggagaagaacgagaagggcgccctgaagagaagagccggcgacctgctggaggacagccccaagagacccaaggaggccgagaaccccgagggcgaggagaaggaggccgccaccctggaggtggagagacccctgcccatggaggtggagaagaacagcacccccagcgagcccggcagcggcagaggccccccccaggaggaggaggaggaggaggacgaggaggaggaggccaccaaggaggacgccgaggcccccggcatcagagaccacgagagatag

SEQ ID NO: 84367 - DNA, 627 bp, synthetic construct
  misc_feature 1..627: note = Description of Artificial Sequence: Synthetic coding sequence
  source 1..627: mol_type = other DNA
atgcccgaggccgccgtgaagagcaccgccaacaagtaccaggtgttcttcttcggcacccacgagaccgccttcctgggccccaaggacctgttcccctacgaggagagcaaggagaagttcggcaagcccaacaagagaaagggcttcagcgagggcctgtgggagatcgagaacaaccccaccgtgaaggccagcggctaccagagcagccagaagaagagctgcgtggaggagcccgagcccgagcccgaggccgccgagggcgacggcgacaagaagggcaacgccgagggcagcagcgacgaggagggcaagctggtgatcgacgagcccgccaaggagaagaacgagaagggcgccctgaagagaagagccggcgacctgctggaggacagccccaagagacccaaggaggccgagaaccccgagggcgaggagaaggaggccgccaccctggaggtggagagacccctgcccatggaggtggagaagaacagcacccccagcgagcccggcagcggcagaggccccccccaggaggaggaggaggaggaggacgaggaggaggaggccaccaaggaggacgccgaggcccccggcatcagagaccacgagagcctgtag

SEQ ID NO: 84368 - DNA, 723 bp, synthetic construct; identical to SEQ ID NO: 84363
  misc_feature 1..723: note = Description of Artificial Sequence: Synthetic coding sequence
  source 1..723: mol_type = other DNA

SEQ ID NO: 84369 - DNA, 2676 bp, synthetic construct
  misc_feature 1..2676: note = Description of Artificial Sequence: Synthetic coding sequence
  source 1..2676: mol_type = other DNA
atgcacgccatcaacggcttcgtgttcggcaacctgcccgagctgaacatgtgcgcccagaagagagtggcctggcacctgttcggcatgggcaacgagatcgacgtgcacaccgccttcttccacggccagatgctgaccaccagaggccaccacaccgacgtggccaacatcttccccgccaccttcgtgaccgccgagatggtgccctgggagcccggcacctggctgatcagctgccaggtgaacagccacttcagagacggcatgcaggccctgtacaaggtgaagagctgcagcatggccccccccgtggacctgctgaccggcaaggtgagacagtacttcatcgaggcccacgagatccagtgggactacggccccatgggccacgacggcagcaccggcaagaacctgagagagcccggcagcatcagcgacaagttcttccagaagagcagcagcagaatcggcggcacctactggaaggtgagatacgaggccttccaggacgagaccttccaggagaagatgcacctggaggaggacagacacctgggcatcctgggccccgtgatcagagccgaggtgggcgacaccatccaggtggtgttctacaacagagccagccagcccttcagcatgcagccccacggcgtgttctacgagaaggactacgagggcaccgtgtacaacgacggcagcagctaccccggcctggtggccaagcccttcgagaaggtgacctacagatggaccgtgcccccccacgccggccccaccgcccaggaccccgcctgcctgacctggatgtacttcagcgccgccgaccccatcagagacaccaacagcggcctggtgggccccctgctggtgtgcagagccggcgccctgggcgccgacggcaagcagaagggcgtggacaaggagttcttcctgctgttcaccgtgctggacgagaacaagagctggtacagcaacgccaaccaggccgccgccatgctggacttcagactgctgagcgaggacatcgagggcttccaggacagcaacagaatgcacgccatcaacggcttcctgttcagcaacctgcccagactggacatgtgcaagggcgacaccgtggcctggcacctgctgggcctgggcaccgagaccgacgtgcacggcgtgatgttccagggcaacaccgtgcagctgcagggcatgagaaagggcgccgccatgctgttcccccacaccttcgtgatggccatcatgcagcccgacaacctgggcaccttcgagatctactgccaggccggcagccacagagaggccggcatgagagccatctacaacgtgagccagtgccccggccaccaggccacccccagacagagataccaggccgccagaatctactacatcatggccgaggaggtggagtgggactactgccccgacagaagctgggagagagagtggcacaaccagagcgagaaggacagctacggctacatcttcctgagcaacaaggacggcctgctgggcagcagatacaagaaggccgtgttcagagagtacaccgacggcaccttcagaatccccagacccagaaccggccccgaggagcacctgggcatcctgggccccctgatcaagggcgaggtgggcgacatcctgaccgtggtgttcaagaacaacgccagcagaccctacagcgtgcacgcccacggcgtgctggagagcaccaccgtgtggcccctggccgccgagcccggcgaggtggtgacctaccagtggaacatccccgagagaagcggccccggccccaacgacagcgcctgcgtgagctggatctactacagcgccgtggaccccatcaaggacatgtacagcggcctggtgggccccctggccatctgccagaagggcatcctggagccccacggcggcagaagcgacatggacagagagttcgccctgctgttcctgatcttcgacgagaacaagagctggtacctggaggagaacgtggccacccacggcagccaggaccccggcagcatcaacctgcaggacgagaccttcctggagagcaacaagatgcacgccatcaacggcaagctgtacgccaacctgagaggcctgaccatgtaccagggcgagagagtggcctggtacatgctggccatgggccaggacgtggacctgcacaccatccacttccacgccgagagcttcctgtacagaaacggcgagaactacagagccgacgtggtggacctgttccccggcaccttcgaggtggtggagatggtggccagcaaccccggcacctggctgatgcactgccacgtgaccgaccacgtgcacgccggcatggagaccctgttcaccgtgttcagcagaaccgagcacctgagccccctgaccgtgatcaccaaggagaccgagaaggccgtgccccccagagacatcgaggagggcaacgtgaagatgctgggcatgcagatccccatcaagaacgtggagatgctggccagcgtgctggtggccatcagcgtgaccctgctgctggtggtgctggccctgggcggcgtggtgtggtaccagcacagacagagaaagctgagaagaaacagaagaagcatcctggacgacagcttcaagctgctgagcttcaagcagtag

SEQ ID NO: 84370 - DNA, 3477 bp, synthetic construct
  misc_feature 1..3477: note = Description of Artificial Sequence: Synthetic coding sequence
  source 1..3477: mol_type = other DNA
atggagagcggccacctgctgtgggccctgctgttcatgcagagcctgtggccccagctgaccgacggcgccaccagagtgtactacctgggcatcagagacgtgcagtggaactacgcccccaagggcagaaacgtgatcaccaaccagcccctggacagcgacatcgtggccagcagcttcctgaagagcgacaagaacagaatcggcggcacctacaagaagaccatctacaaggagtacaaggacgacagctacaccgacgaggtggcccagcccgcctggctgggcttcctgggccccgtgctgcaggccgaggtgggcgacgtgatcctgatccacctgaagaacttcgccaccagaccctacaccatccacccccacggcgtgttctacgagaaggacagcgagggcagcctgtaccccgacggcagcagcggccccctgaaggccgacgacagcgtgccccccggcggcagccacatctacaactggaccatccccgagggccacgcccccaccgacgccgaccccgcctgcctgacctggatctaccacagccacgtggacgcccccagagacatcgccaccggcctgatcggccccctgatcacctgcaagagaggcgccctggacggcaacagccccccccagagacaggacgtggaccacgacttcttcctgctgttcagcgtggtggacgagaacctgagctggcacctgaacgagaacatcgccacctactgcagcgaccccgccagcgtggacaaggaggacgagaccttccaggagagcaacagaatgcacgccatcaacggcttcgtgttcggcaacctgcccgagctgaacatgtgcgcccagaagagagtggcctggcacctgttcggcatgggcaacgagatcgacgtgcacaccgccttcttccacggccagatgctgaccaccagaggccaccacaccgacgtggccaacatcttccccgccaccttcgtgaccgccgagatggtgccctgggagcccggcacctggctgatcagctgccaggtgaacagccacttcagagacggcatgcaggccctgtacaaggtgaagagctgcagcatggccccccccgtggacctgctgaccggcaaggtgagacagtacttcatcgaggcccacgagatccagtgggactacggccccatgggccacgacggcagcaccggcaagaacctgagagagcccggcagcatcagcgacaagttcttccagaagagcagcagcagaatcggcggcacctactggaaggtgagatacgaggccttccaggacgagaccttccaggagaagatgcacctggaggaggacagacacctgggcatcctgggccccgtgatcagagccgaggtgggcgacaccatccaggtggtgttctacaacagagccagccagcccttcagcatgcagccccacggcgtgttctacgagaaggactacgagggcaccgtgtacaacgacggcagcagctaccccggcctggtggccaagcccttcgagaaggtgacctacagatggaccgtgcccccccacgccggccccaccgcccaggaccccgcctgcctgacctggatgtacttcagcgccgccgaccccatcagagacaccaacagcggcctggtgggccccctgctggtgtgcagagccggcgccctgggcgccgacggcaagcagaagggcgtggacaaggagttcttcctgctgttcaccgtgctggacgagaacaagagctggtacagcaacgccaaccaggccgccgccatgctggacttcagactgctgagcgaggacatcgagggcttccaggacagcaacagaatgcacgccatcaacggcttcctgttcagcaacctgcccagactggacatgtgcaagggcgacaccgtggcctggcacctgctgggcctgggcaccgagaccgacgtgcacggcgtgatgttccagggcaacaccgtgcagctgcagggcatgagaaagggcgccgccatgctgttcccccacaccttcgtgatggccatcatgcagcccgacaacctgggcaccttcgagatctactgccaggccggcagccacagagaggccggcatgagagccatctacaacgtgagccagtgccccggccaccaggccacccccagacagagataccaggccgccagaatctactacatcatggccgaggaggtggagtgggactactgccccgacagaagctgggagagagagtggcacaaccagagcgagaaggacagctacggctacatcttcctgagcaacaaggacggcctgctgggcagcagatacaagaaggccgtgttcagagagtacaccgacggcaccttcagaatccccagacccagaaccggccccgaggagcacctgggcatcctgggccccctgatcaagggcgaggtgggcgacatcctgaccgtggtgttcaagaacaacgccagcagaccctacagcgtgcacgcccacggcgtgctggagagcaccaccgtgtggcccctggccgccgagcccggcgaggtggtgacctaccagtggaacatccccgagagaagcggccccggccccaacgacagcgcctgcgtgagctggatctactacagcgccgtggaccccatcaaggacatgtacagcggcctggtgggccccctggccatctgccagaagggcatcctggagccccacggcggcagaagcgacatggacagagagttcgccctgctgttcctgatcttcgacgagaacaagagctggtacctggaggagaacgtggccacccacggcagccaggaccccggcagcatcaacctgcaggacgagaccttcctggagagcaacaagatgcacgccatcaacggcaagctgtacgccaacctgagaggcctgaccatgtaccagggcgagagagtggcctggtacatgctggccatgggccaggacgtggacctgcacaccatccacttccacgccgagagcttcctgtacagaaacggcgagaactacagagccgacgtggtggacctgttccccggcaccttcgaggtggtggagatggtggccagcaaccccggcacctggctgatgcactgccacgtgaccgaccacgtgcacgccggcatggagaccctgttcaccgtgttcagcagaaccgagcacctgagccccctgaccgtgatcaccaaggagaccgagaaggccgtgccccccagagacatcgaggagggcaacgtgaagatgctgggcatgcagatccccatcaagaacgtggagatgctggccagcgtgctggtggccatcagcgtgaccctgctgctggtggtgctggccctgggcggcgtggtgtggtaccagcacagacagagaaagctgagaagaaacagaagaagcatcctggacgacagcttcaagctgctgagcttcaagcagtag

SEQ ID NO: 84371 - DNA, 3486 bp, synthetic construct
  misc_feature 1..3486: note = Description of Artificial Sequence: Synthetic coding sequence
  source 1..3486: mol_type = other DNA
atgtgggccatggagagcggccacctgctgtgggccctgctgttcatgcagagcctgtggccccagctgaccgacggcgccaccagagtgtactacctgggcatcagagacgtgcagtggaactacgcccccaagggcagaaacgtgatcaccaaccagcccctggacagcgacatcgtggccagcagcttcctgaagagcgacaagaacagaatcggcggcacctacaagaagaccatctacaaggagtacaaggacgacagctacaccgacgaggtggcccagcccgcctggctgggcttcctgggccccgtgctgcaggccgaggtgggcgacgtgatcctgatccacctgaagaacttcgccaccagaccctacaccatccacccccacggcgtgttctacgagaaggacagcgagggcagcctgtaccccgacggcagcagcggccccctgaaggccgacgacagcgtgccccccggcggcagccacatctacaactggaccatccccgagggccacgcccccaccgacgccgaccccgcctgcctgacctggatctaccacagccacgtggacgcccccagagacatcgccaccggcctgatcggccccctgatcacctgcaagagaggcgccctggacggcaacagccccccccagagacaggacgtggaccacgacttcttcctgctgttcagcgtggtggacgagaacctgagctggcacctgaacgagaacatcgccacctactgcagcgaccccgccagcgtggacaaggaggacgagaccttccaggagagcaacagaatgcacgccatcaacggcttcgtgttcggcaacctgcccgagctgaacatgtgcgcccagaagagagtggcctggcacctgttcggcatgggcaacgagatcgacgtgcacaccgccttcttccacggccagatgctgaccaccagaggccaccacaccgacgtggccaacatcttccccgccaccttcgtgaccgccgagatggtgccctgggagcccggcacctggctgatcagctgccaggtgaacagccacttcagagacggcatgcaggccctgtacaaggtgaagagctgcagcatggccccccccgtggacctgctgaccggcaaggtgagacagtacttcatcgaggcccacgagatccagtgggactacggccccatgggccacgacggcagcaccggcaagaacctgagagagcccggcagcatcagcgacaagttcttccagaagagcagcagcagaatcggcggcacctactggaaggtgagatacgaggccttccaggacgagaccttccaggagaagatgcacctggaggaggacagacacctgggcatcctgggccccgtgatcagagccgaggtgggcgacaccatccaggtggtgttctacaacagagccagccagcccttcagcatgcagccccacggcgtgttctacgagaaggactacgagggcaccgtgtacaacgacggcagcagctaccccggcctggtggccaagcccttcgagaaggtgacctacagatggaccgtgcccccccacgccggccccaccgcccaggaccccgcctgcctgacctggatgtacttcagcgccgccgaccccatcagagacaccaacagcggcctggtgggccccctgctggtgtgcagagccggcgccctgggcgccgacggcaagcagaagggcgtggacaaggagttcttcctgctgttcaccgtgctggacgagaacaagagctggtacagcaacgccaaccaggccgccgccatgctggacttcagactgctgagcgaggacatcgagggcttccaggacagcaacagaatgcacgccatcaacggcttcctgttcagcaacctgcccagactggacatgtgcaagggcgacaccgtggcctggcacctgctgggcctgggcaccgagaccgacgtgcacggcgtgatgttccagggcaacaccgtgcagctgcagggcatgagaaagggcgccgccatgctgttcccccacaccttcgtgatggccatcatgcagcccgacaacctgggcaccttcgagatctactgccaggccggcagccacagagaggccggcatgagagccatctacaacgtgagccagtgccccggccaccaggccacccccagacagagataccaggccgccagaatctactacatcatggccgaggaggtggagtgggactactgccccgacagaagctgggagagagagtggcacaaccagagcgagaaggacagctacggctacatcttcctgagcaacaaggacggcctgctgggcagcagatacaagaaggccgtgttcagagagtacaccgacggcaccttcagaatccccagacccagaaccggccccgaggagcacctgggcatcctgggccccctgatcaagggcgaggtgggcgacatcctgaccgtggtgttcaagaacaacgccagcagaccctacagcgtgcacgcccacggcgtgctggagagcaccaccgtgtggcccctggccgccgagcccggcgaggtggtgacctaccagtggaacatccccgagagaagcggccccggccccaacgacagcgcctgcgtgagctggatctactacagcgccgtggaccccatcaaggacatgtacagcggcctggtgggccccctggccatctgccagaagggcatcctggagccccacggcggcagaagcgacatggacagagagttcgccctgctgttcctgatcttcgacgagaacaagagctggtacctggaggagaacgtggccacccacggcagccaggaccccggcagcatcaacctgcaggacgagaccttcctggagagcaacaagatgcacgccatcaacggcaagctgtacgccaacctgagaggcctgaccatgtaccagggcgagagagtggcctggtacatgctggccatgggccaggacgtggacctgcacaccatccacttccacgccgagagcttcctgtacagaaacggcgagaactacagagccgacgtggtggacctgttccccggcaccttcgaggtggtggagatggtggccagcaaccccggcacctggctgatgcactgccacgtgaccgaccacgtgcacgccggcatggagaccctgttcaccgtgttcagcagaaccgagcacctgagccccctgaccgtgatcaccaaggagaccgagaaggccgtgccccccagagacatcgaggagggcaacgtgaagatgctgggcatgcagatccccatcaagaacgtggagatgctggccagcgtgctggtggccatcagcgtgaccctgctgctggtggtgctggccctgggcggcgtggtgtggtaccagcacagacagagaaagctgagaagaaacagaagaagcatcctggacgacagcttcaagctgctgagcttcaagcagtag

SEQ ID NO: 84372 - DNA, 2910 bp, synthetic construct
  misc_feature 1..2910: note = Description of Artificial Sequence: Synthetic coding sequence
  source 1..2910: mol_type = other DNA
atgtgggccatggagagcggccacctgctgtgggccctgctgttcatgcagagcctgtggccccagctgaccgacggcgccaccagagtgtactacctgggcatcagagacgtgcagtggaactacgcccccaagggcagaaacgtgatcaccaaccagcccctggacagcgacatcgtggccagcagcttcctgaagagcgacaagaacagaatcggcggcacctacaagaagaccatctacaaggagtacaaggacgacagctacaccgacgaggtggcccagcccgcctggctgggcttcctgggccccgtgctgcaggccgaggtgggcgacgtgatcctgatccacctgaagaacttcgccaccagaccctacaccatccacccccacggcgtgttctacgagaaggacagcgagggcagcctgtaccccgacggcagcagcggccccctgaaggccgacgacagcgtgccccccggcggcagccacatctacaactggaccatccccgagggccacgcccccaccgacgccgaccccgcctgcctgacctggatctaccacagccacgtggacgcccccagagacatcgccaccggcctgatcggccccctgatcacctgcaagagaggcgccctggacggcaacagccccccccagagacaggacgtggaccacgacttcttcctgctgttcagcgtggtggacgagaacctgagctggcacctgaacgagaacatcgccacctactgcagcgaccccgccagcgtggacaaggaggacgagaccttccaggagagcaacagaatgcacgccatcaacggcttcgtgttcggcaacctgcccgagctgaacatgtgcgcccagaagagagtggcctggcacctgttcggcatgggcaacgagatcgacgtgcacaccgccttcttccacggccagatgctgaccaccagaggccaccacaccgacgtggccaacatcttccccgccaccttcgtgaccgccgagatggtgccctgggagcccggcacctggctgatcagctgccaggtgaacagccacttcagagacggcatgcaggccctgtacaaggtgaagagctgcagcatggccccccccgtggacctgctgaccggcaaggtgagacagtacttcatcgaggcccacgagatccagtgggactacggccccatgggccacgacggcagcaccggcaagaacctgagagagcccggcagcatcagcgacaagttcttccagaagagcagcagcagaatcggcggcacctactggaaggtgagatacgaggccttccaggacgagaccttccaggagaagatgcacctggaggaggacagacacctgggcatcctgggccccgtgatcagagccgaggtgggcgacaccatccaggtggtgttctacaacagagccagccagcccttcagcatgcagccccacggcgtgttctacgagaaggactacgagggcaccgtgtacaacgacggcaccttcgagatctactgccaggccggcagccacagagaggccggcatgagagccatctacaacgtgagccagtgccccggccaccaggccacccccagacagagataccaggccgccagaatctactacatcatggccgaggaggtggagtgggactactgccccgacagaagctgggagagagagtggcacaaccagagcgagaaggacagctacggctacatcttcctgagcaacaaggacggcctgctgggcagcagatacaagaaggccgtgttcagagagtacaccgacggcaccttcagaatccccagacccagaaccggccccgaggagcacctgggcatcctgggccccctgatcaagggcgaggtgggcgacatcctgaccgtggtgttcaagaacaacgccagcagaccctacagcgtgcacgcccacggcgtgctggagagcaccaccgtgtggcccctggccgccgagcccggcgaggtggtgacctaccagtggaacatccccgagagaagcggccccggccccaacgacagcgcctgcgtgagctggatctactacagcgccgtggaccccatcaaggacatgtacagcggcctggtgggccccctggccatctgccagaagggcatcctggagccccacggcggcagaagcgacatggacagagagttcgccctgctgttcctgatcttcgacgagaacaagagctggtacctggaggagaacgtggccacccacggcagccaggaccccggcagcatcaacctgcaggacgagaccttcctggagagcaacaagatgcacgccatcaacggcaagctgtacgccaacctgagaggcctgaccatgtaccagggcgagagagtggcctggtacatgctggccatgggccaggacgtggacctgcacaccatccacttccacgccgagagcttcctgtacagaaacggcgagaactacagagccgacgtggtggacctgttccccggcaccttcgaggtggtggagatggtggccagcaaccccggcacctggctgatgcactgccacgtgaccgaccacgtgcacgccggcatggagaccctgttcaccgtgttcagcagaaccgagcacctgagccccctgaccgtgatcaccaaggagaccgagaaggccgtgccccccagagacatcgaggagggcaacgtgaagatgctgggcatgcagatccccatcaagaacgtggagatgctggccagcgtgctggtggccatcagcgtgaccctgctgctggtggtgctggccctgggcggcgtggtgtggtaccagcacagacagagaaagctgagaagaaacagaagaagcatcctggacgacagcttcaagctgctgagcttcaagcagtag

SEQ ID NO: 84373 - DNA, 2436 bp, synthetic construct
  misc_feature 1..2436: note = Description of Artificial Sequence: Synthetic coding sequence
  source 1..2436: mol_type = other DNA
atggagagcggccacctgctgtgggccctgctgttcatgcagagcctgtggccccagctgaccgacggcgccaccagagtgtactacctgggcatcagagacgtgcagtggaactacgcccccaagggcagaaacgtgatcaccaaccagcccctggacagcgacatcgtggccagcagcttcctgaagagcgacaagaacagaatcggcggcacctacaagaagaccatctacaaggagtacaaggacgacagctacaccgacgaggtggcccagcccgcctggctgggcttcctgggccccgtgctgcaggccgaggtgggcgacgtgatcctgatccacctgaagaacttcgccaccagaccctacaccatccacccccacggcgtgttctacgagaaggacagcgagggcagcctgtaccccgacggcagcagcggccccctgaaggccgacgacagcgtgccccccggcggcagccacatctacaactggaccatccccgagggccacgcccccaccgacgccgaccccgcctgcctgacctggatctaccacagccacgtggacgcccccagagacatcgccaccggcctgatcggccccctgatcacctgcaagagaggcgccctggacggcaacagccccccccagagacaggacgtggaccacgacttcttcctgctgttcagcgtggtggacgagaacctgagctggcacctgaacgagaacatcgccacctactgcagcgaccccgccagcgtggacaaggaggacgagaccttccaggagagcaacagaatgcacgccatcaacggcttcgtgttcggcaacctgcccgagctgaacatgtgcgcccagaagagagtggcctggcacctgttcggcatgggcaacgagatcgacgtgcacaccgccttcttccacggccagatgctgaccaccagaggccaccacaccgacgtggccaacatcttccccgccaccttcgtgaccgccgagatggtgccctgggagcccggcacctggctgatcagctgccaggtgaacagccacttcagagacggcatgcaggccctgtacaaggtgaagagctgcagcatggccccccccgtggacctgctgaccggcaaggtgagacagtacttcatcgaggcccacgagatccagtgggactacggccccatgggccacgacggcagcaccggcaagaacctgagagagcccggcagcatcagcgacaagttcttccagaagagcagcagcagaatcggcggcacctactggaaggtgagatacgaggccttccaggacgagaccttccaggagaagatgcacctggaggaggacagacacctgggcatcctgggccccgtgatcagagccgaggtgggcgacaccatccaggtggtgttctacaacagagccagccagcccttcagcatgcagccccacggcgtgttctacgagaaggactacgagggcaccgtgtacaacgacgaccccatcagagacaccaacagcggcctggtgggccccctgctggtgtgcagagccggcgccctgggcgccgacggcaagcagaagggcgtggacaaggagttcttcctgctgttcaccgtgctggacgagaacaagagctggtacagcaacgccaaccaggccgccgccatgctggacttcagactgctgagcgaggacatcgagggcttccaggacagcaacagaatgcacgccatcaacggcttcctgttcagcaacctgcccagactggacatgtgcaagggcgacaccgtggcctggcacctgctgggcctgggcaccgagaccgacgtgcacggcgtgatgttccagggcaacaccgtgcagctgcagggcatgagaaagggcgccgccatgctgttcccccacaccttcgtgatggccatcatgcagcccgacaacctgggcaccttcgagatctactgccaggccggcagccacagagaggccggcatgagagccatctacaacgtgagccagtgccccggccaccaggccacccccagacagagataccaggccgccagaatctactacatcatggccgaggaggtggagtgggactactgccccgacagaagctgggagagagagtggcacaaccagagcgagaaggacagctacggctacatcttcctgagcaacaaggacggcctgctgggcagcagatacaagaaggccgtgttcagagagtacaccgacggcaccttcagaatccccagacccagaaccggccccgaggagcacctgggcatcctgggccccctgatcaagggcgaggtgggcgacatcctgaccgtggtgttcaagaacaacgccagcagaccctacagcgtgcacgcccacggcgtgctggagagcaccaccgtgtggcccctggccgccgagccctag

SEQ ID NO: 84374 - DNA, 3483 bp, synthetic construct
  misc_feature 1..3483: note = Description of Artificial Sequence: Synthetic coding sequence
  source 1..3483: mol_type = other DNA
atgtgggccatggagagcggccacctgctgtgggccctgctgttcatgcagagcctgtggccccagctgaccgacggcgccaccagagtgtactacctgggcatcagagacgtgcagtggaactacgcccccaagggcagaaacgtgatcaccaaccagcccctggacagcgacatcgtggccagcagcttcctgaagagcgacaagaacagaatcggcggcacctacaagaagaccatctacaaggagtacaaggacgacagctacaccgacgaggtggcccagcccgcctggctgggcttcctgggccccgtgctgcaggccgaggtgggcgacgtgatcctgatccacctgaagaacttcgccaccagaccctacaccatccacccccacggcgtgttctacgagaaggacagcgagggcagcctgtaccccgacggcagcagcggccccctgaaggccgacgacagcgtgccccccggcggcagccacatctacaactggaccatccccgagggccacgcccccaccgacgccgaccccgcctgcctgacctggatctaccacagccacgtggacgcccccagagacatcgccaccggcctgatcggccccctgatcacctgcaagagaggcgccctggacggcaacagccccccccagagacaggacgtggaccacgacttcttcctgctgttcagcgtggtggacgagaacctgagctggcacctgaacgagaacatcgccacctactgcagcgaccccgccagcgtggacaaggaggacgagaccttccaggagagcaacagaatgcacgccatcaacggcttcgtgttcggcaacctgcccgagctgaacatgtgcgcccagaagagagtggcctggcacctgttcggcatgggcaacgagatcgacgtgcacaccgccttcttccacggccagatgctgaccaccagaggccaccacaccgacgtggccaacatcttccccgccaccttcgtgaccgccgagatggtgccctgggagcccggcacctggctgatcagctgccaggtgaacagccacttcagagacggcatgcaggccctgtacaaggtgaagagctgcagcatggccccccccgtggacctgctgaccggcaaggtgagacagtacttcatcgaggcccacgagatccagtgggactacggccccatgggccacgacggcagcaccggcaagaacctgagagagcccggcagcatcagcgacaagttcttccagaagagcagcagcagaatcggcggcacctactggaaggtgagatacgaggccttccaggacgagaccttccaggagaagatgcacctggaggaggacagacacctgggcatcctgggccccgtgatcagagccgaggtgggcgacaccatccaggtggtgttctacaacagagccagccagcccttcagcatgcagccccacggcgtgttctacgagaaggactacgagggcaccgtgtacaacgacggcagcagctaccccggcctggtggccaagcccttcgagaaggtgacctacagatggaccgtgcccccccacgccggccccaccgcccaggaccccgcctgcctgacctggatgtacttcagcgccgccgaccccatcagagacaccaacagcggcctggtgggccccctgctggtgtgcagagccggcgccctgggcgccgacggcaagcagaagggcgtggacaaggagttcttcctgctgttcaccgtgctggacgagaacaagagctggtacagcaacgccaaccaggccgccgccatgctggacttcagactgctgagcgaggacatcgagggcttccaggacagcaacagaatgcacgccatcaacggcttcctgttcagcaacctgcccagactggacatgtgcaagggcgacaccgtggcctggcacctgctgggcctgggcaccgagaccgacgtgcacggcgtgatgttccagggcaacaccgtgcagctgcagggcatgagaaagggcgccgccatgctgttcccccacaccttcgtgatggccatcatgcagcccgacaacctgggcaccttcgagatctactgccaggccggcagccacagagaggccggcatgagagccatctacaacgtgagccagtgccccggccaccaggccacccccagacagagataccaggccgccagaatctactacatcatggccgaggaggtggagtgggactactgccccgacagaagctgggagagagagtggcacaaccagagcgagaaggacagctacggctacatcttcctgagcaacaaggacggcctgctgggcagcagatacaagaaggccgtgttcagagagtacaccgacggcaccttcagaatccccagacccagaaccggccccgaggagcacctgggcatcctgggccccctgatcaagggcgaggtgggcgacatcctgaccgtggtgttcaagaacaacgccagcagaccctacagcgtgcacgcccacggcgtgctggagagcaccaccgtgtggcccctggccgccgagcccggcgaggtggtgacctaccagtggaacatccccgagagaagcggccccggccccaacgacagcgcctgcgtgagctggatctactacagcgccgtggaccccatcaaggacatgtacagcggcctggtgggccccctggccatctgccagaagggcatcctggagccccacggcggcagaagcgacatggacagagagttcgccctgctgttcctgatcttcgacgagaacaagagctggtacctggaggagaacgtggccacccacggcagccaggaccccggcagcatcaacctgcaggacgagaccttcctggagagcaacaagatgcacgccatcaacggcaagctgtacgccaacctgagaggcctgaccatgtaccagggcgagagagtggcctggtacatgctggccatgggccaggacgtggacctgcacaccatccacttccacgccgagagcttcctgtacagaaacggcgagaactacagagccgacgtggtggacctgttccccggcaccttcgaggtggtggagatggtggccagcaaccccggcacctggctgatgcactgccacgtgaccgaccacgtgcacgccggcatggagaccctgttcaccgtgttcagcagaaccgagcacctgagccccctgaccgtgatcaccaaggagaccgagaaggtgccccccagagacatcgaggagggcaacgtgaagatgctgggcatgcagatccccatcaagaacgtggagatgctggccagcgtgctggtggccatcagcgtgaccctgctgctggtggtgctggccctgggcggcgtggtgtggtaccagcacagacagagaaagctgagaagaaacagaagaagcatcctggacgacagcttcaagctgctgagcttcaagcagtag

SEQ ID NO: 84375 - DNA, 627 bp, synthetic construct
  misc_feature 1..627: note = Description of Artificial Sequence: Synthetic coding sequence
  source 1..627: mol_type = other DNA
atggagagcggccacctgctgtgggccctgctgttcatgcagagcctgtggccccagctgaccgacggcgccaccagagtgtactacctgggcatcagagacgtgcagtggaactacgcccccaagggcagaaacgtgatcaccaaccagcccctggacagcgacatcgtggccagcagcttcctgaagagcgacaagaacagaatcggcggcacctacaagaagaccatctacaaggagtacaaggacgacagctacaccgacgaggtggcccagcccgcctggctgggcttcctgggccccgtgctgcaggccgaggtgggcgacgtgatcctgatccacctgaagaacttcgccaccagaccctacaccatccacccccacggcgtgttctacgagaaggacagcgagggcagcctgtaccccgacggcagcagcggccccctgaaggccgacgacagcgtgccccccggcggcagccacatctacaactggaccatccccgagggccacgcccccaccgacgccgaccccgcctgcctgacctggatctaccacagccacgtggacgcccccagagacatcgccaccggcctgatcggccccctgatcacctgcaagagatag

SEQ ID NO: 84376 - DNA, 3639 bp, synthetic construct
  misc_feature 1..3639: note = Description of Artificial Sequence: Synthetic coding sequence
  source 1..3639: mol_type = other DNA
atgacccagaccctgccctaccacctgagcctgctgaacgtgctgttccccggcccctgcagcagacacttcaagttcagaagaggcaagtgcgcccagcccgcctggagaaaggtgagcgcccccagccaggacctgctgatcaccaaggtgatgtgggccatggagagcggccacctgctgtgggccctgctgttcatgcagagcctgtggccccagctgaccgacggcgccaccagagtgtactacctgggcatcagagacgtgcagtggaactacgcccccaagggcagaaacgtgatcaccaaccagcccctggacagcgacatcgtggccagcagcttcctgaagagcgacaagaacagaatcggcggcacctacaagaagaccatctacaaggagtacaaggacgacagctacaccgacgaggtggcccagcccgcctggctgggcttcctgggccccgtgctgcaggccgaggtgggcgacgtgatcctgatccacctgaagaacttcgccaccagaccctacaccatccacccccacggcgtgttctacgagaaggacagcgagggcagcctgtaccccgacggcagcagcggccccctgaaggccgacgacagcgtgccccccggcggcagccacatctacaactggaccatccccgagggccacgcccccaccgacgccgaccccgcctgcctgacctggatctaccacagccacgtggacgcccccagagacatcgccaccggcctgatcggccccctgatcacctgcaagagaggcgccctggacggcaacagccccccccagagacaggacgtggaccacgacttcttcctgctgttcagcgtggtggacgagaacctgagctggcacctgaacgagaacatcgccacctactgcagcgaccccgccagcgtggacaaggaggacgagaccttccaggagagcaacagaatgcacgccatcaacggcttcgtgttcggcaacctgcccgagctgaacatgtgcgcccagaagagagtggcctggcacctgttcggcatgggcaacgagatcgacgtgcacaccgccttcttccacggccagatgctgaccaccagaggccaccacaccgacgtggccaacatcttccccgccaccttcgtgaccgccgagatggtgccctgggagcccggcacctggctgatcagctgccaggtgaacagccacttcagagacggcatgcaggccctgtacaaggtgaagagctgcagcatggccccccccgtggacctgctgaccggcaaggtgagacagtacttcatcgaggcccacgagatccagtgggactacggccccatgggccacgacggcagcaccggcaagaacctgagagagcccggcagcatcagcgacaagttcttccagaagagcagcagcagaatcggcggcacctactggaaggtgagatacgaggccttccaggacgagaccttccaggagaagatgcacctggaggaggacagacacctgggcatcctgggccccgtgatcagagccgaggtgggcgacaccatccaggtggtgttctacaacagagccagccagcccttcagcatgcagccccacggcgtgttctacgagaaggactacgagggcaccgtgtacaacgacggcagcagctaccccggcctggtggccaagcccttcgagaaggtgacctacagatggaccgtgcccccccacgccggccccaccgcccaggaccccgcctgcctgacctggatgtacttcagcgccgccgaccccatcagagacaccaacagcggcctggtgggccccctgctggtgtgcagagccggcgccctgggcgccgacggcaagcagaagggcgtggacaaggagttcttcctgctgttcaccgtgctggacgagaacaagagctggtacagcaacgccaaccaggccgccgccatgctggacttcagactgctgagcgaggacatcgagggcttccaggacagcaacagaatgcacgccatcaacggcttcctgttcagcaacctgcccagactggacatgtgcaagggcgacaccgtggcctggcacctgctgggcctgggcaccgagaccgacgtgcacggcgtgatgttccagggcaacaccgtgcagctgcagggcatgagaaagggcgccgccatgctgttcccccacaccttcgtgatggccatcatgcagcccgacaacctgggcaccttcgagatctactgccaggccggcagccacagagaggccggcatgagagccatctacaacgtgagccagtgccccggccaccaggccacccccagacagagataccaggccgccagaatctactacatcatggccgaggaggtggagtgggactactgccccgacagaagctgggagagagagtggcacaaccagagcgagaaggacagctacggctacatcttcctgagcaacaaggacggcctgctgggcagcagatacaagaaggccgtgttcagagagtacaccgacggcaccttcagaatccccagacccagaaccggccccgaggagcacctgggcatcctgggccccctgatcaagggcgaggtgggcgacatcctgaccgtggtgttcaagaacaacgccagcagaccctacagcgtgcacgcccacggcgtgctggagagcaccaccgtgtggcccctggccgccgagcccggcgaggtggtgacctaccagtggaacatccccgagagaagcggccccggccccaacgacagcgcctgcgtgagctggatctactacagcgccgtggaccccatcaaggacatgtacagcggcctggtgggccccctggccatctgccagaagggcatcctggagccccacggcggcagaagcgacatggacagagagttcgccctgctgttcctgatcttcgacgagaacaagagctggtacctggaggagaacgtggccacccacggcagccaggaccccggcagcatcaacctgcaggacgagaccttcctggagagcaacaagatgcacgccatcaacggcaagctgtacgccaacctgagaggcctgaccatgtaccagggcgagagagtggcctggtacatgctggccatgggccaggacgtggacctgcacaccatccacttccacgccgagagcttcctgtacagaaacggcgagaactacagagccgacgtggtggacctgttccccggcaccttcgaggtggtggagatggtggccagcaaccccggcacctggctgatgcactgccacgtgaccgaccacgtgcacgccggcatggagaccctgttcaccgtgttcagcagaaccgagcacctgagccccctgaccgtgatcaccaaggagaccgagaaggccgtgccccccagagacatcgaggagggcaacgtgaagatgctgggcatgcagatccccatcaagaacgtggagatgctggccagcgtgctggtggccatcagcgtgaccctgctgctggtggtgctggccctgggcggcgtggtgtggtaccagcacagacagagaaagctgagaagaaacagaagaagcatcctggacgacagcttcaagctgctgagcttcaagcagtag

SEQ ID NO: 84377 - DNA, 1254 bp, synthetic construct
  misc_feature 1..1254: note = Description of Artificial Sequence: Synthetic coding sequence
  source 1..1254: mol_type = other DNA
atggcccagaaggagggcggcagaaccgtgccctgctgcagcagacccaaggtggccgccctgaccgccggcaccctgctgctgctgaccgccatcggcgccgccagctgggccatcgtggccgtgctgctgagaagcgaccaggagcccctgtaccccgtgcaggtgagcagcgccgacgccagactgatggtgttcgacaagaccgagggcacctggagactgctgtgcagcagcagaagcaacgccagagtggccggcctgagctgcgaggagatgggcttcctgagagccctgacccacagcgagctggacgtgagaaccgccggcgccaacggcaccagcggcttcttctgcgtggacgagggcagactgccccacacccagagactgctggaggtgatcagcgtgtgcgactgccccagaggcagattcctggccgccatctgccaggactgcggcagaagaaagctgcccgtggacagaatcgtgggcggcagagacaccagcctgggcagatggccctggcaggtgagcctgagatacgacggcgcccacctgtgcggcggcagcctgctgagcggcgactgggtgctgaccgccgcccactgcttccccgagagaaacagagtgctgagcagatggagagtgttcgccggcgccgtggcccaggccagcccccacggcctgcagctgggcgtgcaggccgtggtgtaccacggcggctacctgcccttcagagaccccaacagcgaggagaacagcaacgacatcgccctggtgcacctgagcagccccctgcccctgaccgagtacatccagcccgtgtgcctgcccgccgccggccaggccctggtggacggcaagatctgcaccgtgaccggctggggcaacacccagtactacggccagcaggccggcgtgctgcaggaggccagagtgcccatcatcagcaacgacgtgtgcaacggcgccgacttctacggcaaccagatcaagcccaagatgttctgcgccggctaccccgagggcggcatcgacgcctgccagggcgacagcggcggccccttcgtgtgcgaggacagcatcagcagaacccccagatggagactgtgcggcatcgtgagctggggcaccggctgcgccctggcccagaagcccggcgtgtacaccaaggtgagcgacttcagagagtggatcttccaggccatcaagacccacagcgaggccagcggcatggtgacccagctgtag

SEQ ID NO: 84378 - DNA, 1254 bp, synthetic construct; identical to SEQ ID NO: 84377
  misc_feature 1..1254: note = Description of Artificial Sequence: Synthetic coding sequence
  source 1..1254: mol_type = other DNA

SEQ ID NO: 84379 - DNA, 1182 bp, synthetic construct
  misc_feature 1..1182: note = Description of Artificial Sequence: Synthetic coding sequence
  source 1..1182: mol_type = other DNA
atgtgcaagatgagaaccagagaggacatgcagctgggcaacgagggccccggcaccgccctgagactgatccacctgcaggtgagcagcgccgacgccagactgatggtgttcgacaagaccgagggcacctggagactgctgtgcagcagcagaagcaacgccagagtggccggcctgagctgcgaggagatgggcttcctgagagccctgacccacagcgagctggacgtgagaaccgccggcgccaacggcaccagcggcttcttctgcgtggacgagggcagactgccccacacccagagactgctggaggtgatcagcgtgtgcgactgccccagaggcagattcctggccgccatctgccaggactgcggcagaagaaagctgcccgtggacagaatcgtgggcggcagagacaccagcctgggcagatggccctggcaggtgagcctgagatacgacggcgcccacctgtgcggcggcagcctgctgagcggcgactgggtgctgaccgccgcccactgcttccccgagagaaacagagtgctgagcagatggagagtgttcgccggcgccgtggcccaggccagcccccacggcctgcagctgggcgtgcaggccgtggtgtaccacggcggctacctgcccttcagagaccccaacagcgaggagaacagcaacgacatcgccctggtgcacctgagcagccccctgcccctgaccgagtacatccagcccgtgtgcctgcccgccgccggccaggccctggtggacggcaagatctgcaccgtgaccggctggggcaacacccagtactacggccagcaggccggcgtgctgcaggaggccagagtgcccatcatcagcaacgacgtgtgcaacggcgccgacttctacggcaaccagatcaagcccaagatgttctgcgccggctaccccgagggcggcatcgacgcctgccagggcgacagcggcggccccttcgtgtgcgaggacagcatcagcagaacccccagatggagactgtgcggcatcgtgagctggggcaccggctgcgccctggcccagaagcccggcgtgtacaccaaggtgagcgacttcagagagtggatcttccaggccatcaaggtgaaggtgggcagcagatgggagcccggctggggcagactgggcgtgtag

SEQ ID NO: 84380 - DNA, 2103 bp, synthetic construct
  misc_feature 1..2103: note = Description of Artificial Sequence: Synthetic coding sequence
  source 1..2103: mol_type = other DNA
atgaagtgcgtgctggtggccaccgagggcgccgaggtgctgttctactggaccgaccaggagttcgaggagagcctgagactgaagttcggccagagcgagaacgaggaggaggagctgcccgccctggaggaccagctgagcaccctgctggcccccgtgatcatcagcagcatgaccatgctggagaagctgagcgacacctacacctgcttcagcaccgagaacggcaacttcctgtacgtgctgcacctgttcggcgagtgcctgttcatcgccatcaacggcgaccacaccgagagcgagggcgacctgagaagaaagctgtacgtgctgaagtacctgttcgaggtgcacttcggcctggtgaccgtggacggccacctgatcagaaaggagctgagaccccccgacctggcccagagagtgcagctgtgggagcacttccagagcctgctgtggacctacagcagactgagagagcaggagcagtgcttcgccgtggaggccctggagagactgatccacccccagctgtgcgagctgtgcatcgaggccctggagagacacgtgatccaggccgtgaacaccagccccgagagaggcggcgaggaggccctgcacgccttcctgctggtgcacagcaagctgctggccttctacagcagccacagcgccagcagcctgagacccgccgacctgctggccctgatcctgctggtgcaggacctgtaccccagcgagagcaccgccgaggacgacatccagcccagccccagaagagccagaagcagccagaacatccccgtgcagcaggcctggagcccccacagcaccggccccaccggcggcagcagcgccgagaccgagaccgacagcttcagcctgcccgaggagtacttcacccccgcccccagccccggcgaccagagcagcggcagcaccatctggctggagggcggcaccccccccatggacgccctgcagatcgccgaggacaccctgcagaccctggtgccccactgccccgtgcccagcggccccagaagaatcttcctggacgccaacgtgaaggagagctactgccccctggtgccccacaccatgtactgcctgcccctgtggcagggcatcaacctggtgctgctgaccagaagccccagcgcccccctggccctggtgctgagccagctgatggacggcttcagcatgctggagaagaagctgaaggagggccccgagcccggcgccagcctgagaagccagcccctggtgggcgacctgagacagagaatggacaagttcgtgaagaacagaggcgcccaggagatccagagcacctggctggagttcaaggccaaggccttcagcaagagcgagcccggcagcagctgggagctgctgcaggcctgcggcaagctgaagagacagctgtgcgccatctacagactgaacttcctgaccaccgcccccagcagaggcggcccccacctgccccagcacctgcaggaccaggtgcagagactgatgagagagaagctgaccgactggaaggacttcctgctggtgaagagcagaagaaacatcaccatggtgagctacctggaggacttccccggcctggtgcacttcatctacgtggacagaaccaccggccagatggtggcccccagcctgaactgcagccagaagaccagcagcgagctgggcaagggccccctggccgccttcgtgaagaccaaggtgtggagcctgatccagctggccagaagatacctgcagaagggctacaccaccctgctgttccaggagggcgacttctactgcagctacttcctgtggttcgagaacgacatgggctacaagctgcagatgatcgaggtgcccgtgctgagcgacgacagcgtgcccatcggcatgctgggcggcgactactacagaaagctgctgagatactacagcaagaacagacccaccgaggccgtgagatgctacgagctgctggccctgcacctgagcgtgatccccaccgacctgctggtgcagcaggccggccagctggccagaagactgtgggaggccagcagaatccccctgctgtag

SEQ ID NO: 84381 - DNA, 975 bp, synthetic construct
  misc_feature 1..975: note = Description of Artificial Sequence: Synthetic coding sequence
  source 1..975: mol_type = other DNA
atgaagtgcgtgctggtggccaccgagggcgccgaggtgctgttctactggaccgaccaggagttcgaggagagcctgagactgaagttcggccagagcgagaacgaggaggaggagctgcccgccctggaggaccagctgagcaccctgctggcccccgtgatcatcagcagcatgaccatgctggagaagctgagcgacacctacacctgcttcagcaccgagaacggcaacttcctgtacgtgctgcacctgttcggcgagtgcctgttcatcgccatcaacggcgaccacaccgagagcgagggcgacctgagaagaaagctgtacgtgctgaagtacctgttcgaggtgcacttcggcctggtgaccgtggacggccacctgatcagaaaggagctgagaccccccgacctggcccagagagtgcagctgtgggagcacttccagagcctgctgtggacctacagcagactgagagagcaggagcagtgcttcgccgtggaggccctggagagactgatccacccccagctgtgcgagctgtgcatcgaggccctggagagacacgtgatccaggccgtgaacaccagccccgagagaggcggcgaggaggccctgcacgccttcctgctggtgcacagcaagctgctggccttctacagcagccacagcgccagcagcctgagacccgccgacctgctggccctgatcctgctggtgcaggacctgtaccccagcgagagcaccgccgaggacgacatccagcccagccccagaagagccagaagcagccagaacatccccgtgcagcaggcctggagcccccacagcaccggccccaccggcggcagcagcgccgagaccgagaccgacagcttcagcctgcccgaggagtacttcacccccgcccccagccccggcgaccagagcagcggcgaggacagaagaaaggccggcggcaacaacagctag

SEQ ID NO: 84382 - DNA, 981 bp, synthetic construct
  misc_feature 1..981: note = Description of Artificial Sequence: Synthetic coding sequence
  source 1..981: mol_type = other DNA
agactgatccacccccagctgtgcgagctgtgcatcgaggccctggagagacacgtgatccaggccgtgaacaccagccccgagagaggcggcgaggaggccctgcacgccttcctgctggtgcacagcaagctgctggccttctacagcagccacagcgccagcagcctgagacccgccgacctgctggccctgatcctgctggtgcaggacctgtaccccagcgagagcaccgccgaggacgacatccaggagaccgacagcttcagcctgcccgaggagtacttcacccccgcccccagccccggcgaccagagcagcggcagcaccatctggctggagggcggcaccccccccatggacgccctgcagatcgccgaggacaccctgcagaccctggtgccccactgccccgtgcccagcggccccagaagaatcttcctggacgccaacgtgaaggagagctactgccccctggtgccccacaccatgtactgcctgcccctgtggcagggcatcaacctggtgctgctgaccagaagccccagcgcccccctggccctggtgctgagccagctgatggacggcttcagcatgctggagaagaagctgaaggagggccccgagcccggcgccagcctgagaagccagcccctggtgggcgacctgagacagagaatggacaagttcgtgaagaacagaggcgcccaggagatccagagcacctggctggagttcaaggccaaggccttcagcaagagcgagcccggcagcagctgggagctgctgcaggcctgcggcaagctgaagagacagctgtgcgccatctacagactgaacttcctgaccaccgcccccagcagaggcggcccccacctgccccagcacctgcaggaccaggtgcagagactgatgagagagaagctgaccgactggaaggacttcctgctggtgaagagcagaagaaacatcaccatgtag

SEQ ID NO: 84383 - DNA, 2103 bp, synthetic construct; identical to SEQ ID NO: 84380
  misc_feature 1..2103: note = Description of Artificial Sequence: Synthetic coding sequence
  source 1..2103: mol_type = other DNA

SEQ ID NO: 84384 - DNA, 2004 bp, synthetic construct
  misc_feature 1..2004: note = Description of Artificial Sequence: Synthetic coding sequence
  source 1..2004: mol_type = other DNA
atgaagtgcgtgctggtggccaccgagggcgccgaggtgctgttctactggaccgaccaggagttcgaggagagcctgagactgaagttcggccagagcgagaacgaggaggaggagctgcccgccctggaggaccagctgagcaccctgctggcccccgtgatcatcagcagcatgaccatgctggagaagctgagcgacacctacacctgcttcagcaccgagaacggcaacttcctgtacgtgctgcacctgttcggcgagtgcctgttcatcgccatcaacggcgaccacaccgagagcgagggcgacctgagaagaaagctgtacgtgctgaagtacctgttcgaggtgcacttcggcctggtgaccgtggacggccacctgatcagaaaggagctgagaccccccgacctggcccagagagtgcagctgtgggagcacttccagagcctgctgtggacctacagcagactgagagagcaggagcagtgcttcgccgtggaggccctggagagactgatccacccccagctgtgcgagctgtgcatcgaggccctggagagacacgtgatccaggccgtgaacaccagccccgagagaggcggcgaggaggccctgcacgccttcctgctggtgcacagcaagctgctggccttctacagcagccacagcgccagcagcctgagacccgccgacctgctggccctgatcctgctggtgcaggacctgtaccccagcgagagcaccgccgaggacgacatccaggagaccgacagcttcagcctgcccgaggagtacttcacccccgcccccagccccggcgaccagagcagcggcagcaccatctggctggagggcggcaccccccccatggacgccctgcagatcgccgaggacaccctgcagaccctggtgccccactgccccgtgcccagcggccccagaagaatcttcctggacgccaacgtgaaggagagctactgccccctggtgccccacaccatgtactgcctgcccctgtggcagggcatcaacctggtgctgctgaccagaagccccagcgcccccctggccctggtgctgagccagctgatggacggcttcagcatgctggagaagaagctgaaggagggccccgagcccggcgccagcctgagaagccagcccctggtgggcgacctgagacagagaatggacaagttcgtgaagaacagaggcgcccaggagatccagagcacctggctggagttcaaggccaaggccttcagcaagagcgagcccggcagcagctgggagctgctgcaggcctgcggcaagctgaagagacagctgtgcgccatctacagactgaacttcctgaccaccgcccccagcagaggcggcccccacctgccccagcacctgcaggaccaggtgcagagactgatgagagagaagctgaccgactggaaggacttcctgctggtgaagagcagaagaaacatcaccatggtgagctacctggaggacttccccggcctggtgcacttcatctacgtggacagaaccaccggccagatggtggcccccagcctgaactgcagccagaagaccagcagcgagctgggcaagggccccctggccgccttcgtgaagaccaaggtgtggagcctgatccagctggccagaagatacctgcagaagggctacaccaccctgctgttccaggagggcgacttctactgcagctacttcctgtggttcgagaacgacatgggctacaagctgcagatgatcgaggtgcccgtgctgagcgacgacagcgtgcccatcggcatgctgggcggcgactactacagaaagctgctgagatactacagcaagaacagacccaccgaggccgtgagatgctacgagctgctggccctgcacctgagcgtgatccccaccgacctgctggtgcagcaggccggccagctggccagaagactgtgggaggccagcagaatccccctgctgtag

SEQ ID NO: 84385 - DNA, 480 bp, synthetic construct
  misc_feature 1..480: note = Description of Artificial Sequence: Synthetic coding sequence
  source 1..480: mol_type = other DNA
tgactgagaccccccgacctggcccagagagtgcagctgtgggagcacttccagagcctgctgtggacctacagcagactgagagagcaggagcagtgcttcgccgtggaggccctggagagactgatccacccccagctgtgcgagctgtgcatcgaggccctggagagacacgtgatccaggccgtgaacaccagccccgagagaggcggcgaggaggccctgcacgccttcctgctggtgcacagcaagctgctggccttctacagcagccacagcgccagcagcctgagacccgccgacctgctggccctgatcctgctggtgcaggacctgtaccccagcgagagcaccgccgaggacgacatccaggagaccgacagcttcagcctgcccgaggagtacttcacccccgcccccagccccggcgaccagagcagcggcgaggacagaagaaaggccggcggcaacaacagctag

SEQ ID NO: 84386 - DNA, 3015 bp, synthetic construct
  misc_feature 1..3015: note = Description of Artificial Sequence: Synthetic coding sequence
  source 1..3015: mol_type = other DNA
atggtgcagctgtacaacctgcaccccttcggcagccagcaggtggtgccctgcaagctggagcccgacagattctgcggcggcggcagagacgccctgttcgtggccgccggctgcaaggtggaggccttcgccgtggccggccaggagctgtgccagcccagatgcgccttcagcaccctgggcagagtgctgagactggcctacagcgaggccggcgactacctggtggccatcgaggagaagaacaaggccaccttcctgagagcctacgtgaactggagaaacaagagaaccgagaacagcagagtgtgcatcagaatgatcggccacaacgtggagggccccttcagcaaggccttcagagaccagatgtacatcatcgagatgcccctgagcgaggcccccctgtgcatcagctgctgccccgtgaagggcgacctgctggtgggctgcaccaacaagctggtgctgttcagcctgaagtaccagatcatcaacgaggagttcagcctgctggacttcgagagaagcctgatcatccacatcgacaacatcacccccgtggaggtgagcttctgcgtgggctacgtggccgtgatgagcgacctggaggtgctgatcgtgaagctggagagcggccccaagaacggcgagagagtgcaccaccacccccacaagaccaacaacagaatcagaagaaccgaggagggcatcagcaacgagatcagccagctggagagcgacgacttcgtgatctgccagaagcccctggagctgctgggcgagaagagcgagcagagcggcctgagcgtgaccctggagagcaccggcctggccgacgagaagagaaagtacagccacttccagcacctgctgtacagaagattcgcccccgacatcagcagctacgtgctgagcgacgacatcaagctgcacagcctgcagctgctgcccatctaccagaccggcagcctgaccagcgacggcaagaacctgagccaggagaaggagctgctgagcctgttctgcttcttcagcctgccccacgtgggctacctgtacatggtggtgaagagcgtggagctgatgagcgtgtaccagtaccccgagaagagccagcaggccgtgctgaccccccagttcctgcacgtgatcaccagcaacaacctgcagtgcttcaccgtgagatgcagcgccgccgccgccagagaggaggacccctacatggacaccaccctgaaggcctgcccccccgtgagcatggacgtgtgcgccctgagaatccagctgttcatcggcctgaaggccatctgccacttcaagaaccacatcatcctgctgaccaaggccgagcccgaggccatccccgagagaagacagagccccaagagactgctgagcagaaaggacaccagcgtgaagatcaagatcccccccgtggccgaggccggctggaacctgtacatcgtgaacaccatcagccccgtgcagctgtacaaggagatggtggactacagcaacacctacaagaccgtgaagacccagagctgcatccacctgctgagcgaggcccacctgctggtgagagccgccctgatggacgccagccagctggagcccggcgagaaggccgagctgctggaggccttcaaggagagctgcggccacctgggcgactgctacagcagactggacagccagcacagccacctgaccctgccctactacaagatgagcggcctgagcatggccgaggtgctggccagaaccgactggaccgtggaggacggcctgcagaagtacgagagaggcctgatcttctacatcaaccacagcctgtacgagaacctggacgaggagctgaacgaggagctggccgccaaggtggtgcagatgttctacgtggccgagcccaagcaggtgccccacatcctgtgcagccccagcatgaagaacatcaaccccctgaccgccatgagctacctgagaaagctggacaccagcggcttcagcagcatcctggtgaccctgaccaaggccgccgtggccctgaagatgggcgacctggacatgcacagaaacgagatgaagagccacagcgagatgaagctggtgtgcggcttcatcctggagcccagactgctgatccagcagagaaagggccagatcgtgcccaccgagctggccctgcacctgaaggagacccagcccggcctgctggtggccagcgtgctgggcctgcagaagaacaacaagatcggcatcgaggaggccgacagcttcttcaaggtgctgtgcgccaaggacgaggacaccatcccccagctgctggtggacttctgggaggcccagctggtggcctgcctgcccgacgtggtgctgcaggagctgttcttcaagctgaccagccagtacatctggagactgagcaagagacagccccccgacaccacccccctgagaaccagcgaggacctgatcaacgcctgcagccactacggcctgatctacccctgggtgcacgtggtgatcagcagcgacagcctggccgacaagaactacaccgaggacctgagcaagctgcagagcctgatctgcggccccagcttcgacatcgccagcatcatccccttcctggagcccctgagcgaggacaccatcgccggcctgagcgtgcacgtgctgtgcagaaccagactgaaggagtacgagcagtgcatcgacatcctgctggagagatgccccgaggccgtgatcccctacgccaaccacgagctgaaggaggagaacagaaccctgtggtggaagaagctgctgcccgagctgtgccagagaatcaagtgcggcggcgagaagtaccagctgtacctgagcagcctgaaggagaccctgagcatcgtggccgtggagctggagctgaaggacttcatgaacgtgctgcccgaggacggcaccgccaccttcttcctgccctacctgctgtactgcagcagaaagaagcccctgacctag

SEQ ID NO: 84387 - DNA, 1587 bp, synthetic construct
  misc_feature 1..1587: note = Description of Artificial Sequence: Synthetic coding sequence
  source 1..1587: mol_type = other DNA
atggccaccagcaccagcaccgaggccaagagcgccagctggtggaactacttcttcctgtacgacggcagcaaggtgaaggaggagggcgaccccaccagagccggcatctgctacttctaccccagccagaccctgctggaccagcaggagctgctgtgcggccagatcgccggcgtggtgagatgcgtgagcgacatcagcgacagcccccccaccctggtgagactgagaaagctgaagttcgccatcaaggtggacggcgactacctgtgggtgctgggctgcgccgtggagctgcccgacgtgagctgcaagagattcctggaccagctggtgggcttcttcaacttctacaacggccccgtgagcctggcctacgagaactgcagccaggaggagctgagcaccgagtgggacaccttcatcgagcagatcctgaagaacaccagcgacctgcacaagatcttcaacagcctgtggaacctggaccagaccaaggtggagcccctgctgctgctgaaggccgccagaatcctgcagacctgccagagaagcccccacatcctggccggctgcatcctgtacaagggcctgatcgtgagcacccagctgccccccagcctgaccgccaaggtgctgctgcacagaaccgccccccaggagcagagactgcccaccggcgaggacgccccccaggagcacggcaagtggatgctgtggagcttcaagaacagagtgacccaccagaaccccaacggcgccgccctgccccccaacgtgcagatcatccccgtgttcgtgaccaaggaggaggccatcagcctgcacgagttccccgtggagcagatgaccagaagcctggccagccccgccggcctgcaggacggcagcgcccagcaccaccccaagggcggcagcaccagcgccctgaaggagaacgccaccggccacgtggagagcatggcctggaccacccccgaccccaccagccccgacgaggcctgccccgacggcagaaaggagaacggctgcctgagcggccacgacctggagagcatcagacccgccggcctgcacaacagcgccagaggcgaggtgctgggcctgagcagcagcctgggcaaggagctggtgttcctgcaggaggagctggacctgagcgagatccacatccccgaggcccaggaggtggagatggccagcggccacttcgccttcctgcacgtgcccgtgcccgacggcagagccccctactgcaaggccagcctgagcgccagcagcagcctggagcccaccccccccgaggacaccgccatcagcagcctgagaccccccagcgcccccgagatgctgacccagcacggcgcccaggagcagctggaggaccaccccggccacagcagccaggcccccatccccagagccgaccccctgcccaagagcaccgtgctgttcagcggcggctgcgtgaagggcagcgacacccagctgtgcgtgcccggcctggtgtggtacctggagccccagttctactacgtgatcgtgagacacttcttcgacagcatgagacagaccgccggctag

SEQ ID NO: 84388 - DNA, 2127 bp, synthetic construct
  misc_feature 1..2127: note = Description of Artificial Sequence: Synthetic coding sequence
  source 1..2127: mol_type = other DNA
atggccaccagcaccagcaccgaggccaagagcgccagctggtggaactacttcttcctgtacgacggcagcaaggtgaaggaggagggcgaccccaccagagccggcatctgctacttctaccccagccagaccctgctggaccagcaggagctgctgtgcggccagatcgccggcgtggtgagatgcgtgagcgacatcagcgacagcccccccaccctggtgagactgagaaagctgaagttcgccatcaaggtggacggcgactacctgtgggtgctgggctgcgccgtggagctgcccgacgtgagctgcaagagattcctggaccagctggtgggcttcttcaacttctacaacggccccgtgagcctggcctacgagaactgcagccaggaggagctgagcaccgagtgggacaccttcatcgagcagatcctgaagaacaccagcgacctgcacaagatcttcaacagcctgtggaacctggaccagaccaaggtggagcccctgctgctgctgaaggccgccagaatcctgcagacctgccagagaagcccccacatcctggccggctgcatcctgtacaagggcctgatcgtgagcacccagctgccccccagcctgaccgccaaggtgctgctgcacagaaccgccccccaggagcagagactgcccaccggcgaggacgccccccaggagcacggcgccgccctgccccccaacgtgcagatcatccccgtgttcgtgaccaaggaggaggccatcagcctgcacgagttccccgtggagcagatgaccagaagcctggccagccccgccggcctgcaggacggcagcgcccagcaccaccccaagggcggcagcaccagcgccctgaaggagaacgccaccggccacgtggagagcatggcctggaccacccccgaccccaccagccccgacgaggcctgccccgacggcagaaaggagaacggctgcctgagcggccacgacctggagagcatcagacccgccggcctgcacaacagcgccagaggcgaggtgctgggcctgagcagcagcctgggcaaggagctggtgttcctgcaggaggagctggacctgagcgagatccacatccccgaggcccaggaggtggagatggccagcggccacttcgccttcctgcacgtgcccgtgcccgacggcagagccccctactgcaaggccagcctgagcgccagcagcagcctggagcccaccccccccgaggacaccgccatcagcagcctgagaccccccagcgcccccgagatgctgacccagcacggcgcccaggagcagctggaggaccaccccggccacagcagccaggcccccatccccagagccgaccccctgcccagaagaaccagaagacccctgctgctgcccagactggaccccggccagagaggcaacaagctgcccaccggcgagcagggcctggacgaggacgtggacggcgtgtgcgagagccacgccgcccccggcctggagtgcagcagcggcagcgccaactgccagggcgccggccccagcgccgacggcatcagcagcagactgacccccgccgagagctgcatgggcctggtgagaatgaacctgtacacccactgcgtgaagggcctggtgctgagcctgctggccgaggagcccctgctgggcgacagcgccgccatcgaggaggtgtaccacagcagcctggccagcctgaacggcctggaggtgcacctgaaggagaccctgcccagagacgaggccgccagcaccagcagcacctacaacttcacccactacgacagaatccagagcctgctgatggccaacctgccccaggtggccaccccccaggacagaagattcctgcaggccgtgagcctgatgcacagcgagttcgcccagctgcccgccctgtacgagatgaccgtgagaaacgccagcaccgccgtgtacgcctgctgcaaccccatccaggagacctacttccagcagctggcccccgccgccagaagcagcggcttccccaacccccaggacggcgccttcagcctgagcggcaaggccaagcagaagctgctgaagcacggcgtgaacctgctgtag

SEQ ID NO: 84389 - DNA, 2166 bp, synthetic construct
  misc_feature 1..2166: note = Description of Artificial Sequence: Synthetic coding sequence
  source 1..2166: mol_type = other DNA
atggcccccctgtgcagcctggccagatggaactacttcttcctgtacgacggcagcaaggtgaaggaggagggcgaccccaccagagccggcatctgctacttctaccccagccagaccctgctggaccagcaggagctgctgtgcggccagatcgccggcgtggtgagatgcgtgagcgacatcagcgacagcccccccaccctggtgagactgagaaagctgaagttcgccatcaaggtggacggcgactacctgtgggtgctgggctgcgccgtggagctgcccgacgtgagctgcaagagattcctggaccagctggtgggcttcttcaacttctacaacggccccgtgagcctggcctacgagaactgcagccaggaggagctgagcaccgagtgggacaccttcatcgagcagatcctgaagaacaccagcgacctgcacaagatcttcaacagcctgtggaacctggaccagaccaaggtggagcccctgctgctgctgaaggccgccagaatcctgcagacctgccagagaagcccccacatcctggccggctgcatcctgtacaagggcctgatcgtgagcacccagctgccccccagcctgaccgccaaggtgctgctgcacagaaccgccccccaggagcagagactgcccaccggcgaggacgccccccaggagcacggcaagtggatgctgtggagcttcaagaacagagtgacccaccagaaccccaacggcgccgccctgccccccaacgtgcagatcatccccgtgttcgtgaccaaggaggaggccatcagcctgcacgagttccccgtggagcagatgaccagaagcctggccagccccgccggcctgcaggacggcagcgcccagcaccaccccaagggcggcagcaccagcgccctgaaggagaacgccaccggccacgtggagagcatggcctggaccacccccgaccccaccagccccgacgaggcctgccccgacggcagaaaggagaacggctgcctgagcggccacgacctggagagcatcagacccgccggcctgcacaacagcgccagaggcgaggtgctgggcctgagcagcagcctgggcaaggagctggtgttcctgcaggaggagctggacctgagcgagatccacatccccgaggcccaggaggtggagatggccagcggccacttcgccttcctgcacgtgcccgtgcccgacggcagagccccctactgcaaggccagcctgagcgccagcagcagcctggagcccaccccccccgaggacaccgccatcagcagcctgagaccccccagcgcccccgagatgctgacccagcacggcgcccaggagcagctggaggaccaccccggccacagcagccaggcccccatccccagagccgaccccctgcccagaagaaccagaagacccctgctgctgcccagactggaccccggccagagaggcaacaagctgcccaccggcgagcagggcctggacgaggacgtggacggcgtgtgcgagagccacgccgcccccggcctggagtgcagcagcggcagcgccaactgccagggcgccggccccagcgccgacggcatcagcagcagactgacccccgccgagagctgcatgggcctggtgagaatgaacctgtacacccactgcgtgaagggcctggtgctgagcctgctggccgaggagcccctgctgggcgacagcgccgccatcgaggaggtgtaccacagcagcctggccagcctgaacggcctggaggtgcacctgaaggagaccctgcccagagacgaggccgccagcaccagcagcacctacaacttcacccactacgacagaatccagagcctgctgatggccaacctgccccaggtggccaccccccaggacagaagattcctgcaggccgtgagcctgatgcacagcgagttcgcccagctgcccgccctgtacgagatgaccgtgagaaacgccagcaccgccgtgtacgcctgctgcaaccccatccaggagacctacttccagcagctggcccccgccgccagaagcagcggcttccccaacccccaggacggcgccttcagcctgagcggcaaggccaagcagaagctgctgaagcacggcgtgaacctgctgtag

SEQ ID NO: 84390 - DNA, 2127 bp, synthetic construct; identical to SEQ ID NO: 84388
  misc_feature 1..2127: note = Description of Artificial Sequence: Synthetic coding sequence
  source 1..2127: mol_type = other DNA

SEQ ID NO: 84391 - DNA, 2112 bp, synthetic construct
  misc_feature 1..2112: note = Description of Artificial Sequence: Synthetic coding sequence
  source 1..2112: mol_type = other DNA
atggcccccctgtgcagcctggccagatggaactacttcttcctgtacgacggcagcaaggtgaaggaggagggcgaccccaccagagccggcatctgctacttctaccccagccagaccctgctggaccagcaggagctgctgtgcggccagatcgccggcgtggtgagatgcgtgagcgacatcagcgacagcccccccaccctggtgagactgagaaagctgaagttcgccatcaaggtggacggcgactacctgtgggtgctgggctgcgccgtggagctgcccgacgtgagctgcaagagattcctggaccagctggtgggcttcttcaacttctacaacggccccgtgagcctggcctacgagaactgcagccaggaggagctgagcaccgagtgggacaccttcatcgagcagatcctgaagaacaccagcgacctgcacaagatcttcaacagcctgtggaacctggaccagaccaaggtggagcccctgctgctgctgaaggccgccagaatcctgcagacctgccagagaagcccccacatcctggccggctgcatcctgtacaagggcctgatcgtgagcacccagctgccccccagcctgaccgccaaggtgctgctgcacagaaccgccccccaggagcagagactgcccaccggcgaggacgccccccaggagcacggcgccgccctgccccccaacgtgcagatcatccccgtgttcgtgaccaaggaggaggccatcagcctgcacgagttccccgtggagcagatgaccagaagcctggccagccccgccggcctgcaggacggcagcgcccagcaccaccccaagggcggcagcaccagcgccctgaaggagaacgccaccggccacgtggagagcatggcctggaccacccccgaccccaccagccccgacgaggcctgccccgacggcagaaaggagaacggctgcctgagcggccacgacctggagagcatcagacccgccggcctgcacaacagcgccagaggcgaggtgctgggcctgagcagcagcctgggcaaggagctggtgttcctgcaggaggagctggacctgagcgagatccacatccccgaggcccaggaggtggagatggccagcggccacttcgccttcctgcacgtgcccgtgcccgacggcagagccccctactgcaaggccagcctgagcgccagcagcagcctggagcccaccccccccgaggacaccgccatcagcagcctgagaccccccagcgcccccgagatgctgacccagcacggcgcccaggagcagctggaggaccaccccggccacagcagccaggcccccatccccagagccgaccccctgcccagaagaaccagaagacccctgctgctgcccagactggaccccggccagagaggcaacaagctgcccaccggcgagcagggcctggacgaggacgtggacggcgtgtgcgagagccacgccgcccccggcctggagtgcagcagcggcagcgccaactgccagggcgccggccccagcgccgacggcatcagcagcagactgacccccgccgagagctgcatgggcctggtgagaatgaacctgtacacccactgcgtgaagggcctggtgctgagcctgctggccgaggagcccctgctgggcgacagcgccgccatcgaggaggtgtaccacagcagcctggccagcctgaacggcctggaggtgcacctgaaggagaccctgcccagagacgaggccgccagcaccagcagcacctacaacttcacccactacgacagaatccagagcctgctgatggccaacctgccccaggtggccaccccccaggacagaagattcctgcaggccgtgagcctgatgcacagcgagttcgcccagctgcccgccctgtacgagatgaccgtgagaaacgccagcaccgccgtgtacgcctgctgcaaccccatccaggagacctacttccagcagctggcccccgccgccagaagcagcggcttccccaacccccaggacggcgccttcagcctgagcggcaaggccaagcagaagctgctgaagcacggcgtgaacctgctgtag

SEQ ID NO: 84392 - DNA, 3390 bp, synthetic construct
  misc_feature 1..3390: note = Description of Artificial Sequence: Synthetic coding sequence
  source 1..3390: mol_type = other DNA
atggccttcgtgcccgtgatccccgagagctacagccacgtgctggccgagttcgagagcctggaccccctgctgagcgccctgagactggacagcagcagactgaagtgcaccagcatcgccgtgagcagaaagtggctggccctgggcagcagcggcggcggcctgcacctgatccagaaggagggctggaagcacagactgttcctgagccacagagagggcgccatcagccaggtggcctgctgcctgcacgacgacgactacgtggccgtggccaccagccagggcctggtggtggtgtgggagctgaaccaggagagaagaggcaagcccgagcagatgtacgtgagcagcgagcacaagggcagaagagtgaccgccctgtgctgggacaccgccatcctgagagtgttcgtgggcgaccacgccggcaaggtgagcgccatcaagctgaacaccagcaagcaggccaaggccgccgccgccttcgtgatgttccccgtgcagaccatcaccaccgtggacagctgcgtggtgcagctggactacctggacggcagactgctgatcagcagcctgaccagaagcttcctgtgcgacaccgagagagagaagttctggaagatcggcaacaaggagagagacggcgagtacggcgcctgcttcttccccggcagatgcagcggcggccagcagcccctgatctactgcgccagacccggcagcagaatgtgggaggtgaacttcgacggcgaggtgatcagcacccaccagttcaagaagctgctgagcctgccccccctgcccgtgatcaccctgagaagcgagccccagtacgaccacaccgccggcagcagccagagcctgagcttccccaagctgctgcacctgagcgagcactgcgtgctgacctggaccgagagaggcatctacatcttcatcccccagaacgtgcaggtgctgctgtggagcgaggtgaaggacatccaggacgtggccgtgtgcagaaacgagctgttctgcctgcacctgaacggcaaggtgagccacctgagcctgatcagcgtggagagatgcgtggagagactgctgagaagaggcctgtggaacctggccgccagaacctgctgcctgttccagaacagcgtgatcgccagcagagccagaaagaccctgaccgccgacaagctggagcacctgaagagccagctggaccacggcacctacaacgacctgatcagccagctggaggagctgatcctgaagttcgagcccctggacagcgcctgcagcagcagaagaagcagcatcagcagccacgagagcttcagcatcctggacagcggcatctacagaatcatcagcagcagaagaggcagccagagcgacgaggacagctgcagcctgcacagccagaccctgagcgaggacgagagattcaaggagttcaccagccagcaggaggaggacctgcccgaccagtgctgcggcagccacggcaacgaggacaacgtgagccacgcccccgtgatgttcgagaccgacaagaacgagaccttcctgcccttcggcatccccctgcccttcagaagccccagccccctggtgagcctgcaggccgtgaaggagagcgtgagcagcttcgtgagaaagaccaccgagaagatcggcaccctgcacaccagccccgacctgaaggtgagacccgagctgagaggcgacgagcagagctgcgaggaggacgtgagcagcgacacctgccccaaggaggaggacaccgaggaggagaaggaggtgaccagccccccccccgaggaggacagattccaggagctgaaggtggccaccgccgaggccatgaccaagctgcaggaccccctggtgctgttcgagagcgagagcctgagaatggtgctgcaggagtggctgagccacctggagaagaccttcgccatgaaggacttcagcggcgtgagcgacaccgacaacagcagcatgaagctgaaccaggacgtgctgctggtgaacgagagcaagaagggcatcctggacgaggacaacgagaaggagaagagagacagcctgggcaacgaggagagcgtggacaagaccgcctgcgagtgcgtgagaagccccagagagagcctggacgacctgttccagatctgcagcccctgcgccatcgccagcggcctgagaaacgacctggccgagctgaccaccctgtgcctggagctgaacgtgctgaacagcaagatcaagagcaccagcggccacgtggaccacaccctgcagcagtacagccccgagatcctggcctgccagttcctgaagaagtacttcttcctgctgaacctgaagagagccaaggagagcatcaagctgagctacagcaacagccccagcgtgtgggacaccttcatcgagggcctgaaggagatggccagcagcaaccccgtgtacatggagatggagaagggcgacctgcccaccagactgaagctgctggacgacgaggtgcccttcgacagccccctgctggtggtgtacgccaccagactgtacgagaagttcggcgagagcgccctgagaagcctgatcaagttcttccccagcatcctgcccagcgacatcatccagctgtgccaccaccaccccgccgagttcctggcctacctggacagcctggtgaagagcagacccgaggaccagagaagcagcttcctggagagcctgctgcagcccgagagcctgagactggactggctgctgctggccgtgagcctggacgccccccccagcaccagcaccatggacgacgagggctaccccagaccccacagccacctgctgagctggggctacagccagctgatcctgcacctgatcaagctgcccgccgacttcatcaccaaggagaagatgaccgacatctgcagaagctgcggcttctggcccggctacctgatcctgtgcctggagctggagagaagaagagaggccttcaccaacatcgtgtacctgaacgacatgagcctgatggagggcgacaacggctggatccccgagaccgtggaggagtggaagctgctgctgcacctgatccagagcaagagcaccagacccgccccccaggagagcctgaacggcagcctgagcgacggccccagccccatcaacgtggagaacgtggccctgctgctggccaaggccatgggccccgacagagcctggagcctgctgcaggagtgcggcctggccctggagctgagcgagaagttcaccagaacctgcgacatcctgagaatcgccgagaagagacagagagccctgatccagagcatgctggagaagtgcgacagattcctgtggagccagcaggcctag

SEQ ID NO: 84393 - DNA, 3048 bp, synthetic construct
  misc_feature 1..3048: note = Description of Artificial Sequence: Synthetic coding sequence
  source 1..3048: mol_type = other DNA
atgtacgtgagcagcgagcacaagggcagaagagtgaccgccctgtgctgggacaccgccatcctgagagtgttcgtgggcgaccacgccggcaaggtgagcgccatcaagctgaacaccagcaagcaggccaaggccgccgccgccttcgtgatgttccccgtgcagaccatcaccaccgtggacagctgcgtggtgcagctggactacctggacggcagactgctgatcagcagcctgaccagaagcttcctgtgcgacaccgagagagagaagttctggaagatcggcaacaaggagagagacggcgagtacggcgcctgcttcttccccggcagatgcagcggcggccagcagcccctgatctactgcgccagacccggcagcagaatgtgggaggtgaacttcgacggcgaggtgatcagcacccaccagttcaagaagctgctgagcctgccccccctgcccgtgatcaccctgagaagcgagccccagtacgaccacaccgccggcagcagccagagcctgagcttccccaagctgctgcacctgagcgagcactgcgtgctgacctggaccgagagaggcatctacatcttcatcccccagaacgtgcaggtgctgctgtggagcgaggtgaaggacatccaggacgtggccgtgtgcagaaacgagctgttctgcctgcacctgaacggcaaggtgagccacctgagcctgatcagcgtggagagatgcgtggagagactgctgagaagaggcctgtggaacctggccgccagaacctgctgcctgttccagaacagcgtgatcgccagcagagccagaaagaccctgaccgccgacaagctggagcacctgaagagccagctggaccacggcacctacaacgacctgatcagccagctggaggagctgatcctgaagttcgagcccctggacagcgcctgcagcagcagaagaagcagcatcagcagccacgagagcttcagcatcctggacagcggcatctacagaatcatcagcagcagaagaggcagccagagcgacgaggacagctgcagcctgcacagccagaccctgagcgaggacgagagattcaaggagttcaccagccagcaggaggaggacctgcccgaccagtgctgcggcagccacggcaacgaggacaacgtgagccacgcccccgtgatgttcgagaccgacaagaacgagaccttcctgcccttcggcatccccctgcccttcagaagccccagccccctggtgagcctgcaggccgtgaaggagagcgtgagcagcttcgtgagaaagaccaccgagaagatcggcaccctgcacaccagccccgacctgaaggtgagacccgagctgagaggcgacgagcagagctgcgaggaggacgtgagcagcgacacctgccccaaggaggaggacaccgaggaggagaaggaggtgaccagccccccccccgaggaggacagattccaggagctgaaggtggccaccgccgaggccatgaccaagctgcaggaccccctggtgctgttcgagagcgagagcctgagaatggtgctgcaggagtggctgagccacctggagaagaccttcgccatgaaggacttcagcggcgtgagcgacaccgacaacagcagcatgaagctgaaccaggacgtgctgctggtgaacgagagcaagaagggcatcctggacgaggacaacgagaaggagaagagagacagcctgggcaacgaggagagcgtggacaagaccgcctgcgagtgcgtgagaagccccagagagagcctggacgacctgttccagatctgcagcccctgcgccatcgccagcggcctgagaaacgacctggccgagctgaccaccctgtgcctggagctgaacgtgctgaacagcaagatcaagagcaccagcggccacgtggaccacaccctgcagcagtacagccccgagatcctggcctgccagttcctgaagaagtacttcttcctgctgaacctgaagagagccaaggagagcatcaagctgagctacagcaacagccccagcgtgtgggacaccttcatcgagggcctgaaggagatggccagcagcaaccccgtgtacatggagatggagaagggcgacctgcccaccagactgaagctgctggacgacgaggtgcccttcgacagccccctgctggtggtgtacgccaccagactgtacgagaagttcggcgagagcgccctgagaagcctgatcaagttcttccccagcatcctgcccagcgacatcatccagctgtgccaccaccaccccgccgagttcctggcctacctggacagcctggtgaagagcagacccgaggaccagagaagcagcttcctggagagcctgctgcagcccgagagcctgagactggactggctgctgctggccgtgagcctggacgccccccccagcaccagcaccatggacgacgagggctaccccagaccccacagccacctgctgagctggggctacagccagctgatcctgcacctgatcaagctgcccgccgacttcatcaccaaggagaagatgaccgacatctgcagaagctgcggcttctggcccggctacctgatcctgtgcctggagctggagagaagaagagaggccttcaccaacatcgtgtacctgaacgacatgagcctgatggagggcgacaacggctggatccccgagaccgtggaggagtggaagctgctgctgcacctgatccagagcaagagcaccagacccgccccccaggagagcctgaacggcagcctgagcgacggccccagccccatcaacgtggagaacgtggccctgctgctggccaaggccatgggccccgacagagcctggagcctgctgcaggagtgcggcctggccctggagctgagcgagaagttcaccagaacctgcgacatcctgagaatcgccgagaagagacagagagccctgatccagagcatgctggagaagtgcgacagattcctgtggagccagcaggcctag

SEQ ID NO: 84394 - DNA, 3048 bp, synthetic construct; identical to SEQ ID NO: 84393
  misc_feature 1..3048: note = Description of Artificial Sequence: Synthetic coding sequence
  source 1..3048: mol_type = other DNA

SEQ ID NO: 84395 - DNA, 2328 bp, synthetic construct
  misc_feature 1..2328: note = Description of Artificial Sequence: Synthetic coding sequence
  source 1..2328: mol_type = other DNA
atgaagagaagcggcaccctgagactgctgagcgacctgagcgccttcggcggcgccgccagactgagagagctggtggccggcgacagcgccgtgagagtgagaggcagccccgacggcagacacctgctgctgctgagaccccccggcgccgtggccccccagctgctggtggccagcagaggccccggcgccgagctggagagagcctggcccgccggccagcccagccccctggacgccttcttcctgccctggcccgccagacccgccctggtgctggtgtgggagagcggcctggccgaggtgtggggcgccggcgtgggccccggctggagacccctgcagagcaccgagctgtgccccggcggcggcgccagagtggtggccgtggccgccctgagaggcagactggtgtggtgcgaggagagacaggccagagccgagggccccagcggcagccccgccgccgccttcagccactgcgtgtgcgtgagaaccctggagcccagcggcgaggccagcaccagcctgggcagaacccacgtgctgctgcaccactgccccgccttcggcctgctggccagctgcagacagctgttcctggtgcccaccgccaccacctggcccggcgtggcccacgtgctgctgatctggagccccggcaagggcaaggtgatggtggccgcccccagactgggcctgagctacagcaagagcctgaaccccggcagaggcgacacctgggacttcagaaccctgctgagaggcctgcccggcctgctgagccccagagagcccctggccgtgcacacctgggcccccaccccccagggcctgctgctgctggacttcggcggcaccgtgagcctgctgcagagccacggcggcaccagagccgtgggcaccctgcaggaggcccccgtgggcccctggggcagcgccgccctgggcaccttccagggcaccctggcctgcgtgctgggcagcaccctggagctgctggacatgggcagcggccagctgctggagagaaaggtgctgagcaccgacagagtgcacctgctggagccccccgcccccggcatggaggacgaggaggagctggagaccagaggcaacctgagactgctgagcgccctgggcctgttctgcgtgggctgggaggccccccagggcgtggagctgcccagcgccaaggacctggtgttcgaggaggcctgcggctactaccagagaagaagcctgagaggcgcccagctgacccccgaggagctgagacacagcagcaccttcagagccccccaggccctggccagcatcctgcagggccacctgccccccagcgccctgctgaccatgctgagaaccgagctgagagactacagaggcctggagcagctgaaggcccagctggtggccggcgacgacgaggaggccggctggaccgagctggccgagcaggaggtggccagactgctgagaaccgagctgatcggcgaccagctggcccagctgaacaccgtgttccaggccctgcccaccgccgcctggggcgccaccctgagagccctgcagctgcagctggacggcaacggcaagctgagaagccaggccccccccgacgtgtggaagaaggtgctgggcggcatcaccgccggcaaggagccccccaacggcatcctgccccccttcgagctgctgtgccagtgcctgtgccagctggagcccagatggctgccccccttcgtggagctggcccagcagcagggcggccccggctggggcgccggcggccccggcctgcccctgtacagaagagccctggccgtgctgggcgaggagggcaccagacccgaggccctggagctggagctgctgctgagcagcggcagacccaaggccgtgctgcaggccgtgggccagctggtgcagaaggagcagtgggacagagccctggacgccggcctggccctgggccccagcagccccctgctgagaagcgagatcttcaagctgctgctggccgagttcgcccagcacagaagactggacgcccacctgcccctgctgtgcagactgtgcccccccgagctggcccccgccgagctgctgctgctgctgagaacctacctgcccgacgaggtgggcccccccacccccttccccgagcccggcgccgagccccccctgaccgtgggcctgctgaaggccctgctggagcagaccggcgcccagggctggctgagcggccccgtgctgagcccctacgaggacatcctgtgggaccccagcacccccccccccaccccccccagagacctgtag

SEQ ID NO: 84396 - DNA, 1596 bp, synthetic construct
  misc_feature 1..1596: note = Description of Artificial Sequence: Synthetic coding sequence
  source 1..1596: mol_type = other DNA
atgctgggcttcctgagcagaggccccagcatgaagctgtgcatgggcctggcctgcgtgctgagcctgtggaacaccgtgagcggcatcaagggcgaggccaagaaggagaagggcatgaccttcctgcccaccaccgtgagcggcctgagagaggaggagagaaaggagaagggcgtggccttcctggccaccaccgagctgcccgccagaagcatcgacctgagcgccctgaacctgaccgagctggtgaacggcatgctgagcagagccctgaaggacagcaagaagttcttcagcctgctgagcgtgaccagctacagcagcttcgccttccacaagttcagcgtggccgtgtacaacatcagcaacctgaagaccgtggaccccgccaagttccccaccagatactgctactgcctgaacaacagaaccaacgacctgagcgacttcaccgccctgctggtggacatcatcggcaacagcaccagctacctgaccgagatcttcaagagcaccagcatcctgagcgtgaaccagagcaacgagagcgactgcatcttcatctgcgtgatgaccggcaagagcggcagaaacctgagcgacttctgggagatcgaggagaagtaccccatcatcaactacaccttcaccagcggcctgagcggcgtgctgggcgccgccaccagaggcaccgccagaaccagcaagcccaccaccaagagccagaagaccctgcccagcaccagccccggccactggacccagagcaccccctgggccagcgccctgagaagcagcccctggaccgagaccgccgcccccagcgagaccgaggagaccctgaacaccggcagaccccccgagctgcccgccagagccaccgccacctggttcagcgccagccacaccctgcccgccctggccaccagaagagtggccagaacccagtggctgaccgccgacagacagacctgggccagcatcagcagcgtgccctgggcccagaccatcagcgagaagaagcccggcggcagcctgtgggagaccagaagcagcccccccaccaccgccggcaccgaggaggccatgaacaccaccagcctgctggcccccgccgccgagatcatggccacccccggcagccccagccaggccagccccaccctgggcgccttcacccacggcacccagacccccagccccaccaaggccaccgcccccagatacccccagaccggcgacctgagcgccgagtggcccttcaccgccggcgaggagcccgtgctggtgcccagaccccaccaggtgagcagatgcccccagcccctgttcaaggtgggcgccatggccgccgcccccctgaccctggccatccagagactgaacccctgcctgatggagctgtgccagttcttccagcagtgcctgtgcatgagccagagaagccccagaaccgaggacatgagatactgcctggagtactacagctggttcctgaagaacgccacctacatctgccagagagtgaagagagtgagccacagccacaccctgaagcagaagtgcctggagaacatctgcaagagcgtgtag

SEQ ID NO: 84397 - DNA, 558 bp, synthetic construct
  misc_feature 1..558: note = Description of Artificial Sequence: Synthetic coding sequence
  source 1..558: mol_type = other DNA
atgagccccagcctgcaggagggcgcccagctgggcgagaacaagcccagcacctgcagcttcagcatcgagagaatcctgggcctggaccagaagaaggactgcgtgcccctgatgaagccccacagaccctgggccgacacctgcagcagcagcggcaaggacggcaacctgtgcctgcacgtgcccaacccccccagcggcatcagcttccccagcgtggtggaccaccccatgcccgaggagagagccagcaagtacgagaactacttcagcgccagcgagagactgagcctgaagagagagctgagctggtacagaggcagaagacccagaaccgccttcacccagaaccagatcgaggtgctggagaacgtgttcagagtgaactgctaccccggcatcgacatcagagaggacctggcccagaagctgaacctggaggaggacagaatccagatctggttccagaacagaagagccaagctgaagagaagccacagagagagccagttcctgatggccaagaagaacttcaacaccaacctgctggagtag

SEQ ID NO: 84398 - DNA, 324 bp, synthetic construct
  misc_feature 1..324: note = Description of Artificial Sequence: Synthetic coding sequence
  source 1..324: mol_type = other DNA
atgagccccagcctgcaggagggcgcccagctgggcgagaacaagcccagcacctgcagcttcagcatcgagagaatcctgggcctggaccagaagaaggactgcgtgcccctgatgaagccccacagaccctgggccgacacctgcagcagcagcggcaaggacggcaacctgtgcctgcacgtgcccaacccccccagcggcatcagcttccccagcgtggtggaccaccccatgcccgaggagagagccagcaagtacgagaactacttcagcgccagcgagagactgagcctgaagagagagctgagctggtacagatag

SEQ ID NO: 84399 - DNA, 1263 bp, synthetic construct
  misc_feature 1..1263: note = Description of Artificial Sequence: Synthetic coding sequence
  source 1..1263: mol_type = other DNA
atggaggtgccccccagactgagccacgtgcccccccccctgttccccagcgcccccgccaccctggccagcagaagcctgagccactggagacccagaccccccagacagctggcccccctgctgcccagcctggcccccagcagcgccagacagggcgccagaagagcccagagacacgtgaccgcccagcagcccagcagactggccggcggcgccgccatcaagggcggcagaagaagaagacccgacctgttcagaagacacttcaagagcagcagcatccagagaagcgccgccgccgccgccgccaccagaaccgccagacagcacccccccgccgacagcagcgtgaccatggaggacatgaacgagtacagcaacatcgaggagttcgccgagggcagcaagatcaacgccagcaagaaccagcaggacgacggcaagatgttcatcggcggcctgagctgggacaccagcaagaaggacctgaccgagtacctgagcagattcggcgaggtggtggactgcaccatcaagaccgaccccgtgaccggcagaagcagaggcttcggcttcgtgctgttcaaggacgccgccagcgtggacaaggtgctggagctgaaggagcacaagctggacggcaagctgatcgaccccaagagagccaaggccctgaagggcaaggagccccccaagaaggtgttcgtgggcggcctgagccccgacaccagcgaggagcagatcaaggagtacttcggcgccttcggcgagatcgagaacatcgagctgcccatggacaccaagaccaacgagagaagaggcttctgcttcatcacctacaccgacgaggagcccgtgaagaagctgctggagagcagataccaccagatcggcagcggcaagtgcgagatcaaggtggcccagcccaaggaggtgtacagacagcagcagcagcagcagaagggcggcagaggcgccgccgccggcggcagaggcggcaccagaggcagaggcagaggccagggccagaactggaaccagggcttcaacaactactacgaccagggctacggcaactacaacagcgcctacggcggcgaccagaactacagcggctacggcggctacgactacaccggctacaactacggcaactacggctacggccagggctacgccgactacagcggccagcagagcacctacggcaaggccagcagaggcggcggcaaccaccagaacaactaccagccctactag

SEQ ID NO: 84400 - DNA, 735 bp, synthetic construct
  misc_feature 1..735: note = Description of Artificial Sequence: Synthetic coding sequence
  source 1..735: mol_type = other DNA
atggaggacatgaacgagtacagcaacatcgaggagttcgccgagggcagcaagatcaacgccagcaagaaccagcaggacgacggcaagatgttcatcggcggcctgagctgggacaccagcaagaaggacctgaccgagtacctgagcagattcggcgaggtggtggactgcaccatcaagaccgaccccgtgaccggcagaagcagaggcttcggcttcgtgctgttcaaggacgccgccagcgtggacaaggtgctggagctgaaggagcacaagctggacggcaagctgatcgaccccaagagagccaaggccctgaagggcaaggagccccccaagaaggtgttcgtgggcggcctgagccccgacaccagcgaggagcagatcaaggagtacttcggcgccttcggcgagatcgagaacatcgagctgcccatggacaccaagaccaacgagagaagaggcttctgcttcatcacctacaccgacgaggagcccgtgaagaagctgctggagagcagataccaccagatcggcagcggcaagtgcgagatcaaggtggcccagcccaaggaggtgtacagacagcagcagcagcagcagaagggcggcagaggcgccgccgccggcggcagaggcggcaccagaggcagaggcagaggccagcagagcacctacggcaaggccagcagaggcggcggcaaccaccagaacaactaccagccctactag

SEQ ID NO: 84401 - DNA, 1263 bp, synthetic construct; identical to SEQ ID NO: 84399
  misc_feature 1..1263: note = Description of Artificial Sequence: Synthetic coding sequence
  source 1..1263: mol_type = other DNA

SEQ ID NO: 84402 - DNA, 1902 bp, synthetic construct
  misc_feature 1..1902: note = Description of Artificial Sequence: Synthetic coding sequence
  source 1..1902: mol_type = other DNA
atggccaaccaggtgaacggcaacgccgtgcagctgaaggaggaggaggagcccatggacaccagcagcgtgacccacaccgagcactacaagaccctgatcgaggccggcctgccccagaaggtggccgagagactggacgagatcttccagaccggcctggtggcctacgtggacctggacgagagagccatcgacgccctgagagagttcaacgaggagggcgccctgagcgtgctgcagcagttcaaggagagcgacctgagccacgtgcagaacaagagcgccttcctgtgcggcgtgatgaagacctacagacagagagagaagcagggcagcaaggtgcaggagagcaccaagggccccgacgaggccaagatcaaggccctgctggagagaaccggctacaccctggacgtgaccaccggccagagaaagtacggcggccccccccccgacagcgtgtacagcggcgtgcagcccggcatcggcaccgaggtgttcgtgggcaagatccccagagacctgtacgaggacgagctggtgcccctgttcgagaaggccggccccatctgggacctgagactgatgatggaccccctgagcggccagaacagaggctacgccttcatcaccttctgcggcaaggaggccgcccaggaggccgtgaagctgtgcgacagctacgagatcagacccggcaagcacctgggcgtgtgcatcagcgtggccaacaacagactgttcgtgggcagcatccccaagaacaagaccaaggagaacatcctggaggagttcagcaaggtgaccgagggcctggtggacgtgatcctgtaccaccagcccgacgacaagaagaagaacagaggcttctgcttcctggagtacgaggaccacaagagcgccgcccaggccagaagaagactgatgagcggcaaggtgaaggtgtggggcaacgtggtgaccgtggagtgggccgaccccgtggaggagcccgaccccgaggtgatggccaaggtgaaggtgctgttcgtgagaaacctggccaccaccgtgaccgaggagatcctggagaagagcttcagcgagttcggcaagctggagagagtgaagaagctgaaggactacgccttcgtgcacttcgaggacagaggcgccgccgtgaaggccatggacgagatgaacggcaaggagatcgagggcgaggagatcgagatcgtgctggccaagccccccgacaagaagagaaaggagagacaggccgccagacaggccagcagaagcaccgcctacgaggactactactaccaccccccccccagaatgcccccccccatcagaggcagaggcagaggcggcggcagaggcggctacggctacccccccgactactacggctacgaggactactacgacgactactacggctacgactaccacgactacagaggcggctacgaggacccctactacggctacgacgacggctacgccgtgagaggcagaggcggcggcagaggcggcagaggcgccccccccccccccagaggcagaggcgcccccccccccagaggcagagccggctacagccagagaggcgcccccctgggcccccccagaggcagcagaggcggcagaggcggccccgcccagcagcagagaggcagaggcagcagaggcagcagaggcaacagaggcggcaacgtgggcggcaagagaaaggccgacggctacaaccagcccgacagcaagagaagacagaccaacaaccagcagaactggggcagccagcccatcgcccagcagcccctgcagcagggcggcgactacagcggcaactacggctacaacaacgacaaccaggagttctaccaggacacctacggccagcagtggaagtag

SEQ ID NO: 84403 - DNA, 1902 bp, synthetic construct; identical to SEQ ID NO: 84402
  misc_feature 1..1902: note = Description of Artificial Sequence: Synthetic coding sequence
  source 1..1902: mol_type = other DNA

SEQ ID NO: 84404 - DNA, 1911 bp, synthetic construct
  misc_feature 1..1911: note = Description of Artificial Sequence: Synthetic coding sequence
  source 1..1911: mol_type = other DNA
atggccaaccaggtgaacggcaacgccgtgcagctgaaggaggaggaggagcccatggacaccagcagcgtgacccacaccgagcactacaagaccctgatcgaggccggcctgccccagaaggtggccgagagactggacgagatcttccagaccggcctggtggcctacgtggacctggacgagagagccatcgacgccctgagagagttcaacgaggagggcgccctgagcgtgctgcagcagttcaaggagagcgacctgagccacgtgcagaacaagagcgccttcctgtgcggcgtgatgaagacctacagacagagagagaagcagggcagcaaggtgcaggagagcaccaagggccccgacgaggccaagatcaaggccctgctggagagaaccggctacaccctggacgtgaccaccggccagagaaagtacggcggccccccccccgacagcgtgtacagcggcgtgcagcccggcatcggcaccgaggtgttcgtgggcaagatccccagagacctgtacgaggacgagctggtgcccctgttcgagaaggccggccccatctgggacctgagactgatgatggaccccctgagcggccagaacagaggctacgccttcatcaccttctgcggcaaggaggccgcccaggaggccgtgaagctgtgcgacagctacgagatcagacccggcaagcacctgggcgtgtgcatcagcgtggccaacaacagactgttcgtgggcagcatccccaagaacaagaccaaggagaacatcctggaggagttcagcaaggtgaccggcctgaccgagggcctggtggacgtgatcctgtaccaccagcccgacgacaagaagaagaacagaggcttctgcttcctggagtacgaggaccacaagagcgccgcccaggccagaagaagactgatgagcggcaaggtgaaggtgtggggcaacgtggtgaccgtggagtgggccgaccccgtggaggagcccgaccccgaggtgatggccaaggtgaaggtgctgttcgtgagaaacctggccaccaccgtgaccgaggagatcctggagaagagcttcagcgagttcggcaagctggagagagtgaagaagctgaaggactacgccttcgtgcacttcgaggacagaggcgccgccgtgaaggccatggacgagatgaacggcaaggagatcgagggcgaggagatcgagatcgtgctggccaagccccccgacaagaagagaaaggagagacaggccgccagacaggccagcagaagcaccgcctacgaggactactactaccaccccccccccagaatgcccccccccatcagaggcagaggcagaggcggcggcagaggcggctacggctacccccccgactactacggctacgaggactactacgacgactactacggctacgactaccacgactacagaggcggctacgaggacccctactacggctacgacgacggctacgccgtgagaggcagaggcggcggcagaggcggcagaggcgccccccccccccccagaggcagaggcgcccccccccccagaggcagagccggctacagccagagaggcgcccccctgggcccccccagaggcagcagaggcggcagaggcggccccgcccagcagcagagaggcagaggcagcagaggcagcagaggcaacagaggcggcaacgtgggcggcaagagaaaggccgacggctacaaccagcccgacagcaagagaagacagaccaacaaccagcagaactggggcagccagcccatcgcccagcagcccctgcagcagggcggcgactacagcggcaactacggctacaacaacgacaaccaggagttctaccaggacacctacggccagcagtggaagtag

SEQ ID NO: 84405 - DNA, 1422 bp, synthetic construct
  misc_feature 1..1422: note = Description of Artificial Sequence: Synthetic coding sequence
  source 1..1422: mol_type = other DNA
atgaagacctacagacagagagagaagcagggcagcaaggtgcaggagagcaccaagggccccgacgaggccaagatcaaggccctgctggagagaaccggctacaccctggacgtgaccaccggccagagaaagtacggcggccccccccccgacagcgtgtacagcggcgtgcagcccggcatcggcaccgagtgcgacagctacgagatcagacccggcaagcacctgggcgtgtgcatcagcgtggccaacaacagactgttcgtgggcagcatccccaagaacaagaccaaggagaacatcctggaggagttcagcaaggtgaccgagggcctggtggacgtgatcctgtaccaccagcccgacgacaagaagaagaacagaggcttctgcttcctggagtacgaggaccacaagagcgccgcccaggccagaagaagactgatgagcggcaaggtgaaggtgtggggcaacgtggtgaccgtggagtgggccgaccccgtggaggagcccgaccccgaggtgatggccaaggtgaaggtgctgttcgtgagaaacctggccaccaccgtgaccgaggagatcctggagaagagcttcagcgagttcggcaagctggagagagtgaagaagctgaaggactacgccttcgtgcacttcgaggacagaggcgccgccgtgaaggccatggacgagatgaacggcaaggagatcgagggcgaggagatcgagatcgtgctggccaagccccccgacaagaagagaaaggagagacaggccgccagacaggccagcagaagcaccgcctacgaggactactactaccaccccccccccagaatgcccccccccatcagaggcagaggcagaggcggcggcagaggcggctacggctacccccccgactactacggctacgaggactactacgacgactactacggctacgactaccacgactacagaggcggctacgaggacccctactacggctacgacgacggctacgccgtgagaggcagaggcggcggcagaggcggcagaggcgccccccccccccccagaggcagaggcgcccccccccccagaggcagagccggctacagccagagaggcgcccccctgggcccccccagaggcagcagaggcggcagaggcggccccgcccagcagcagagaggcagaggcagcagaggcagcagaggcaacagaggcggcaacgtgggcggcaagagaaaggccgacggctacaaccagcccgacagcaagagaagacagaccaacaaccagcagaactggggcagccagcccatcgcccagcagcccctgcagcagggcggcgactacagcggcaactacggctacaacaacgacaaccaggagttctaccaggacacctacggccagcagtggaagtag

SEQ ID NO: 84406 - DNA, 1788 bp, synthetic construct
  misc_feature 1..1788: note = Description of Artificial Sequence: Synthetic coding sequence
  source 1..1788: mol_type = other DNA
atggccaaccaggtgaacggcaacgccgtgcagctgaaggaggaggaggagcccatggacaccagcagcgtgacccacaccgagcactacaagaccctgatcgaggccggcctgccccagaaggtggccgagagactggacgagatcttccagaccggcctggtggcctacgtggacctggacgagagagccatcgacgccctgagagagttcaacgaggagggcgccctgagcgtgctgcagcagttcaaggagagcgacctgagccacgtgcagaacaagagcgccttcctgtgcggcgtgatgaagacctacagacagagagagaagcagggcagcaaggtgcaggagagcaccaagggccccgacgaggccaagatcaaggtgttcgtgggcaagatccccagagacctgtacgaggacgagctggtgcccctgttcgagaaggccggccccatctgggacctgagactgatgatggaccccctgagcggccagaacagaggctacgccttcatcaccttctgcggcaaggaggccgcccaggaggccgtgaagctgtgcgacagctacgagatcagacccggcaagcacctgggcgtgtgcatcagcgtggccaacaacagactgttcgtgggcagcatccccaagaacaagaccaaggagaacatcctggaggagttcagcaaggtgaccgagggcctggtggacgtgatcctgtaccaccagcccgacgacaagaagaagaacagaggcttctgcttcctggagtacgaggaccacaagagcgccgcccaggccagaagaagactgatgagcggcaaggtgaaggtgtggggcaacgtggtgaccgtggagtgggccgaccccgtggaggagcccgaccccgaggtgatggccaaggtgaaggtgctgttcgtgagaaacctggccaccaccgtgaccgaggagatcctggagaagagcttcagcgagttcggcaagctggagagagtgaagaagctgaaggactacgccttcgtgcacttcgaggacagaggcgccgccgtgaaggccatggacgagatgaacggcaaggagatcgagggcgaggagatcgagatcgtgctggccaagccccccgacaagaagagaaaggagagacaggccgccagacaggccagcagaagcaccgcctacgaggactactactaccaccccccccccagaatgcccccccccatcagaggcagaggcagaggcggcggcagaggcggctacggctacccccccgactactacggctacgaggactactacgacgactactacggctacgactaccacgactacagaggcggctacgaggacccctactacggctacgacgacggctacgccgtgagaggcagaggcggcggcagaggcggcagaggcgccccccccccccccagaggcagaggcgcccccccccccagaggcagagccggctacagccagagaggcgcccccctgggcccccccagaggcagcagaggcggcagaggcggccccgcccagcagcagagaggcagaggcagcagaggcagcagaggcaacagaggcggcaacgtgggcggcaagagaaaggccgacggctacaaccagcccgacagcaagagaagacagaccaacaaccagcagaactggggcagccagcccatcgcccagcagcccctgcagcagggcggcgactacagcggcaactacggctacaacaacgacaaccaggagttctaccaggacacctacggccagcagtggaagtag

SEQ ID NO: 84407 - DNA, 2304 bp, synthetic construct
  misc_feature 1..2304: note = Description of Artificial Sequence: Synthetic coding sequence
  source 1..2304: mol_type = other DNA
atgagaagctgggccttcagctacctggacgccatggacaacatcaccagacagaaccagttctacgacacccaggtgatcaagcaggagaacgagagcggctacgagagaagacccctggagatggagcagcagcaggcctacagacccgagatgaagaccgagatgaagcagggcgcccccaccagcttcctgccccccgaggccagccagctgaagcccgacagacagcagttccagagcagaaagagaccctacgaggagaacagaggcagaggctacttcgagcacagagaggacagaagaggcagaagcccccagccccccgccgaggaggacgaggacgacttcgacgacaccctggtggccatcgacacctacaactgcgacctgcacttcaaggtggccagagacagaagcagcggctaccccctgaccatcgagggcttcgcctacctgtggagcggcgccagagccagctacggcgtgagaagaggcagagtgtgcttcgagatgaagatcaacgaggagatcagcgtgaagcacctgcccagcaccgagcccgacccccacgtggtgagaatcggctggagcctggacagctgcagcacccagctgggcgaggagcccttcagctacggctacggcggcaccggcaagaagagcaccaacagcagattcgagaactacggcgacaagttcgccgagaacgacgtgatcggctgcttcgccgacttcgagtgcggcaacgacgtggagctgagcttcaccaagaacggcaagtggatgggcatcgccttcagaatccagaaggaggccctgggcggccaggccctgtacccccacgtgctggtgaagaactgcgccgtggagttcaacttcggccagagagccgagccctactgcagcgtgctgcccggcttcaccttcatccagcacctgcccctgagcgagagaatcagaggcaccgtgggccccaagagcaaggccgagtgcgagatcctgatgatggtgggcctgcccgccgccggcaagaccacctgggccatcaagcacgccgccagcaaccccagcaagaagtacaacatcctgggcaccaacgccatcatggacaagatgagagtgatgggcctgagaagacagagaaactacgccggcagatgggacgtgctgatccagcaggccacccagtgcctgaacagactgatccagatcgccgccagaaagaagagaaactacatcctggaccagaccaacgtgtacggcagcgcccagagaagaaagatgagacccttcgagggcttccagagaaaggccatcgtgatctgccccaccgacgaggacctgaaggacagaaccatcaagagaaccgacgaggagggcaaggacgtgcccgaccacgccgtgctggagatgaaggccaacttcaccctgcccgacgtgggcgacttcctggacgaggtgctgttcatcgagctgcagagagaggaggccgacaagctggtgagacagtacaacgaggagggcagaaaggccggccccccccccgagaagagattcgacaacagaggcggcggcggcttcagaggcagaggcggcggcggcggcttccagagatacgagaacagaggcccccccggcggcaacagaggcggcttccagaacagaggcggcggcagcggcggcggcggcaactacagaggcggcttcaacagaagcggcggcggcggctacagccagaacagatggggcaacaacaacagagacaacaacaacagcaacaacagaggcagctacaacagagccccccagcagcagccccccccccagcagcccccccccccccagccccccccccagcagcccccccccccccccagctacagccccgccagaaacccccccggcgccagcacctacaacaagaacagcaacatccccggcagcagcgccaacaccagcacccccaccgtgagcagctacagccccccccagcccagctacagccagcccccctacaaccagggcggctacagccagggctacaccgcccccccccccccccccccccccccccccgcctacaactacggcagctacggcggctacaaccccgccccctacacccccccccccccccccaccgcccagacctacccccagcccagctacaaccagtaccagcagtacgcccagcagtggaaccagtactaccagaaccagggccagtggcccccctactacggcaactacgactacggcagctacagcggcaacacccagggcggcaccagcacccagtag

SEQ ID NO: 84408 - DNA, 369 bp, synthetic construct
  misc_feature 1..369: note = Description of Artificial Sequence: Synthetic coding sequence
  source 1..369: mol_type = other DNA
atggacgtgagaagactgaaggtgaacgagctgagagaggagctgcagagaagaggcctggacaccagaggcctgaaggccgagctggccgagagactgcaggccgccctggaggccgaggagcccgacgacgagagagagctggacgccgacgacgagcccggcagacccggccacatcaacgaggaggccgagctgcagcccgccaccctgcagcccggcagactgcagcccggcctgcacagccccaccgccagcaccagcaccaccacctgcctgcagctgtgggagctgagaagactgcagcccggccccctgtaccccaccgccaccccccactgcaccgacctgcccagcgcccagctgtag

SEQ ID NO: 84409 - DNA, 2271 bp, synthetic construct
  misc_feature 1..2271: note = Description of Artificial Sequence: Synthetic coding sequence
  source 1..2271: mol_type = other DNA
atggacaacatcaccagacagaaccagttctacgacacccaggtgatcaagcaggagaacgagagcggctacgagagaagacccctggagatggagcagcagcaggcctacagacccgagatgaagaccgagatgaagcagggcgcccccaccagcttcctgccccccgaggccagccagctgaagcccgacagacagcagttccagagcagaaagagaccctacgaggagaacagaggcagaggctacttcgagcacagagaggacagaagaggcagaagcccccagccccccgccgaggaggacgaggacgacttcgacgacaccctggtggccatcgacacctacaactgcgacctgcacttcaaggtggccagagacagaagcagcggctaccccctgaccatcgagggcttcgcctacctgtggagcggcgccagagccagctacggcgtgagaagaggcagagtgtgcttcgagatgaagatcaacgaggagatcagcgtgaagcacctgcccagcaccgagcccgacccccacgtggtgagaatcggctggagcctggacagctgcagcacccagctgggcgaggagcccttcagctacggctacggcggcaccggcaagaagagcaccaacagcagattcgagaactacggcgacaagttcgccgagaacgacgtgatcggctgcttcgccgacttcgagtgcggcaacgacgtggagctgagcttcaccaagaacggcaagtggatgggcatcgccttcagaatccagaaggaggccctgggcggccaggccctgtacccccacgtgctggtgaagaactgcgccgtggagttcaacttcggccagagagccgagccctactgcagcgtgctgcccggcttcaccttcatccagcacctgcccctgagcgagagaatcagaggcaccgtgggccccaagagcaaggccgagtgcgagatcctgatgatggtgggcctgcccgccgccggcaagaccacctgggccatcaagcacgccgccagcaaccccagcaagaagtacaacatcctgggcaccaacgccatcatggacaagatgagagtgatgggcctgagaagacagagaaactacgccggcagatgggacgtgctgatccagcaggccacccagtgcctgaacagactgatccagatcgccgccagaaagaagagaaactacatcctggaccagaccaacgtgtacggcagcgcccagagaagaaagatgagacccttcgagggcttccagagaaaggccatcgtgatctgccccaccgacgaggacctgaaggacagaaccatcaagagaaccgacgaggagggcaaggacgtgcccgaccacgccgtgctggagatgaaggccaacttcaccctgcccgacgtgggcgacttcctggacgaggtgctgttcatcgagctgcagagagaggaggccgacaagctggtgagacagtacaacgaggagggcagaaaggccggccccccccccgagaagagattcgacaacagaggcggcggcggcttcagaggcagaggcggcggcggcggcttccagagatacgagaacagaggcccccccggcggcaacagaggcggcttccagaacagaggcggcggcagcggcggcggcggcaactacagaggcggcttcaacagaagcggcggcggcggctacagccagaacagatggggcaacaacaacagagacaacaacaacagcaacaacagaggcagctacaacagagccccccagcagcagccccccccccagcagcccccccccccccagccccccccccagcagcccccccccccccccagctacagccccgccagaaacccccccggcgccagcacctacaacaagaacagcaacatccccggcagcagcgccaacaccagcacccccaccgtgagcagctacagccccccccagcccagctacagccagcccccctacaaccagggcggctacagccagggctacaccgcccccccccccccccccccccccccccccgcctacaactacggcagctacggcggctacaaccccgccccctacacccccccccccccccccaccgcccagacctacccccagcccagctacaaccagtaccagcagtacgcccagcagtggaaccagtactaccagaaccagggccagtggcccccctactacggcaactacgactacggcagctacagcggcaacacccagggcggcaccagcacccagtag

SEQ ID NO: 84410 - DNA, 2259 bp, synthetic construct
  misc_feature 1..2259: note = Description of Artificial Sequence: Synthetic coding sequence
  source 1..2259: mol_type = other DNA
atggacgtgagaagactgaaggtgaacgagctgagagaggagctgcagagaagaggcctggacaccagaggcctgaaggccgagctggccgagagactgcagccccccccccccggcctgcagccccacgccgagcccggcggctacagcggccccgacggccactacgccatggacaacatcaccagacagaaccagttctacgacacccaggtgatcaagcaggagaacgagagcggctacgagagaagacccctggagatggagcagcagcaggcctacagacccgagatgaagaccgagatgaagcagggcgcccccaccagcttcctgccccccgaggccagccagctgaagcccgacagacagcagttccagagcagaaagagaccctacgaggagaacagaggcagaggctacttcgagcacagagaggacagaagaggcagaagcccccagccccccgccgaggaggacgaggacgacttcgacgacaccctggtggccatcgacacctacaactgcgacctgcacttcaaggtggccagagacagaagcagcggctaccccctgaccatcgagggcttcgcctacctgtggagcggcgccagagccagctacggcgtgagaagaggcagagtgtgcttcgagatgaaggacttcgagtgcggcaacgacgtggagctgagcttcaccaagaacggcaagtggatgggcatcgccttcagaatccagaaggaggccctgggcggccaggccctgtacccccacgtgctggtgaagaactgcgccgtggagttcaacttcggccagagagccgagccctactgcagcgtgctgcccggcttcaccttcatccagcacctgcccctgagcgagagaatcagaggcaccgtgggccccaagagcaaggccgagtgcgagatcctgatgatggtgggcctgcccgccgccggcaagaccacctgggccatcaagcacgccgccagcaaccccagcaagaagtacaacatcctgggcaccaacgccatcatggacaagatgagagtgatgggcctgagaagacagagaaactacgccggcagatgggacgtgctgatccagcaggccacccagtgcctgaacagactgatccagatcgccgccagaaagaagagaaactacatcctggaccagaccaacgtgtacggcagcgcccagagaagaaagatgagacccttcgagggcttccagagaaaggccatcgtgatctgccccaccgacgaggacctgaaggacagaaccatcaagagaaccgacgaggagggcaaggacgtgcccgaccacgccgtgctggagatgaaggccaacttcaccctgcccgacgtgggcgacttcctggacgaggtgctgttcatcgagctgcagagagaggaggccgacaagctggtgagacagtacaacgaggagggcagaaaggccggccccccccccgagaagagattcgacaacagaggcggcggcggcttcagaggcagaggcggcggcggcggcttccagagatacgagaacagaggcccccccggcggcaacagaggcggcttccagaacagaggcggcggcagcggcggcggcggcaactacagaggcggcttcaacagaagcggcggcggcggctacagccagaacagatggggcaacaacaacagagacaacaacaacagcaacaacagaggcagctacaacagagccccccagcagcagccccccccccagcagcccccccccccccagccccccccccagcagcccccccccccccccagctacagccccgccagaaacccccccggcgccagcacctacaacaagaacagcaacatccccggcagcagcgccaacaccagcacccccaccgtgagcagctacagccccccccagagcttcggcttcttccccagcaccttccagcccagctacagccagcccccctacaaccagggcggctacagccagggctacaccgcccccccccccccccccccccccccccccgcctacaactacggcagctacggcggctacaaccccgccccctacacccccccccccccccccaccgcccagacctacccccagcccagctacaaccagtaccagcagtacgcccagcagtggaaccagtactaccagaaccagggccagtggcccccctactacggcaactacgactacggcagctacagcggcaacacccagggcggcaccagcacccagtag

SEQ ID NO: 84411 - DNA, 2571 bp, synthetic construct
  misc_feature 1..2571: note = Description of Artificial Sequence: Synthetic coding sequence
  source 1..2571: mol_type = other DNA
atggacgtgagaagactgaaggtgaacgagctgagagaggagctgcagagaagaggcctggacaccagaggcctgaaggccgagctggccgagagactgcaggccgccctggaggccgaggagcccgacgacgagagagagctggacgccgacgacgagcccggcagacccggccacatcaacgaggaggtggagaccgagggcggcagcgagctggagggcaccgcccagccccccccccccggcctgcagccccacgccgagcccggcggctacagcggccccgacggccactacgccatggacaacatcaccagacagaaccagttctacgacacccaggtgatcaagcaggagaacgagagcggctacgagagaagacccctggagatggagcagcagcaggcctacagacccgagatgaagaccgagatgaagcagggcgcccccaccagcttcctgccccccgaggccagccagctgaagcccgacagacagcagttccagagcagaaagagaccctacgaggagaacagaggcagaggctacttcgagcacagagaggacagaagaggcagaagcccccagccccccgccgaggaggacgaggacgacttcgacgacaccctggtggccatcgacacctacaactgcgacctgcacttcaaggtggccagagacagaagcagcggctaccccctgaccatcgagggcttcgcctacctgtggagcggcgccagagccagctacggcgtgagaagaggcagagtgtgcttcgagatgaagatcaacgaggagatcagcgtgaagcacctgcccagcaccgagcccgacccccacgtggtgagaatcggctggagcctggacagctgcagcacccagctgggcgaggagcccttcagctacggctacggcggcaccggcaagaagagcaccaacagcagattcgagaactacggcgacaagttcgccgagaacgacgtgatcggctgcttcgccgacttcgagtgcggcaacgacgtggagctgagcttcaccaagaacggcaagtggatgggcatcgccttcagaatccagaaggaggccctgggcggccaggccctgtacccccacgtgctggtgaagaactgcgccgtggagttcaacttcggccagagagccgagccctactgcagcgtgctgcccggcttcaccttcatccagcacctgcccctgagcgagagaatcagaggcaccgtgggccccaagagcaaggccgagtgcgagatcctgatgatggtgggcctgcccgccgccggcaagaccacctgggccatcaagcacgccgccagcaaccccagcaagaagtacaacatcctgggcaccaacgccatcatggacaagatgagagtgatgggcctgagaagacagagaaactacgccggcagatgggacgtgctgatccagcaggccacccagtgcctgaacagactgatccagatcgccgccagaaagaagagaaactacatcctggaccagaccaacgtgtacggcagcgcccagagaagaaagatgagacccttcgagggcttccagagaaaggccatcgtgatctgccccaccgacgaggacctgaaggacagaaccatcaagagaaccgacgaggagggcaaggacgtgcccgaccacgccgtgctggagatgaaggccaacttcaccctgcccgacgtgggcgacttcctggacgaggtgctgttcatcgagctgcagagagaggaggccgacaagctggtgagacagtacaacgaggagggcagaaaggccggccccccccccgagaagagattcgacaacagaggcggcggcggcttcagaggcagaggcggcggcggcggcttccagagatacgagaacagaggcccccccggcggcaacagaggcggcttccagaacagaggcggcggcagcggcggcggcggcaactacagaggcggcttcaacagaagcggcggcggcggctacagccagaacagatggggcaacaacaacagagacaacaacaacagcaacaacagaggcagctacaacagagccccccagcagcagccccccccccagcagcccccccccccccagccccccccccagcagcccccccccccccccagctacagccccgccagaaacccccccggcgccagcacctacaacaagaacagcaacatccccggcagcagcgccaacaccagcacccccaccgtgagcagctacagccccccccagcccagctacagccagcccccctacaaccagggcggctacagccagggctacaccgcccccccccccccccccccccccccccccgcctacaactacggcagctacggcggctacaaccccgccccctacacccccccccccccccccaccgcccagacctacccccagcccagctacaaccagtaccagcagtacgcccagcagtggaaccagtactaccagaaccagggccagtggcccccctactacggcaactacgactacggcagctacagcggcaacacccagggcggcaccagcacccagtag

SEQ ID NO: 84412 - DNA, 2751 bp, synthetic construct
  misc_feature 1..2751: note = Description of Artificial Sequence: Synthetic coding sequence
  source 1..2751: mol_type = other DNA
atggactgcgagcacagcctgagcctgccctgcagaggcgccgaggcctgggagatcggcatcgacaagtacctgtacgccatgagactgagcgacgagaccctgatcgacatcatgaccagattcagaaaggagatgaagaacggcctgagcagagacttcaaccccaccgccaccgtgaagatgctgcccaccttcgtgagaagcatccccgacggcagcgagaagggcgacttcatcgccctggacctgggcggcagcagcttcagaatcctgagagtgcaggtgaaccacgagaagaaccagaacgtgcacatggagagcgaggtgtacgacacccccgagaacatcgtgcacggcagcggcagccagctgttcgaccacgtggccgagtgcctgggcgacttcatggagaagagaaagatcaaggacaagaagctgcccgtgggcttcaccttcagcttcccctgccagcagagcaagatcgacgaggccatcctgatcacctggaccaagagattcaaggccagcggcgtggagggcgccgacgtggtgaagctgctgaacaaggccatcaagaagagaggcgactacgacgccaacatcgtggccgtggtgaacgacaccgtgggcaccatgatgacctgcggctacgacgaccagcactgcgaggtgggcctgatcatcggcaccggcaccaacgcctgctacatggaggagctgagacacatcgacctggtggagggcgacgagggcagaatgtgcatcaacaccgagtggggcgccttcggcgacgacggcagcctggaggacatcagaaccgagttcgacagagagatcgacagaggcagcctgaaccccggcaagcagctgttcgagaagatggtgagcggcatgtacctgggcgagctggtgagactgatcctggtgaagatggccaaggagggcctgctgttcgagggcagaatcacccccgagctgctgaccagaggcaagttcaacaccagcgacgtgagcgccatcgagaagaacaaggagggcctgcacaacgccaaggagatcctgaccagactgggcgtggagcccagcgacgacgactgcgtgagcgtgcagcacgtgtgcaccatcgtgagcttcagaagcgccaacctggtggccgccaccctgggcgccatcctgaacagactgagagacaacaagggcacccccagactgagaaccaccgtgggcgtggacggcagcctgtacaagacccacccccagtacagcagaagattccacaagaccctgagaagactggtgcccgacagcgacgtgagattcctgctgagcgagagcggcagcggcaagggcgccgccatggtgaccgccgtggcctacagactggccgagcagcacagacagatcgaggagaccctggcccacttccacctgaccaaggacatgctgctggaggtgaagaagagaatgagagccgagatggagctgggcctgagaaagcagacccacaacaacgccgtggtgaagatgctgcccagcttcgtgagaagaacccccgacggcaccgagaacggcgacttcctggccctggacctgggcggcaccaacttcagagtgctgctggtgaagatcagaagcggcaagaagagaaccgtggagatgcacaacaagatctacgccatccccatcgagatcatgcagggcaccggcgaggagctgttcgaccacatcgtgagctgcatcagcgacttcctggactacatgggcatcaagggccccagaatgcccctgggcttcaccttcagcttcccctgccagcagaccagcctggacgccggcatcctgatcacctggaccaagggcttcaaggccaccgactgcgtgggccacgacgtggtgaccctgctgagagacgccatcaagagaagagaggagttcgacctggacgtggtggccgtggtgaacgacaccgtgggcaccatgatgacctgcgcctacgaggagcccacctgcgaggtgggcctgatcgtgggcaccggcagcaacgcctgctacatggaggagatgaagaacgtggagatggtggagggcgaccagggccagatgtgcatcaacatggagtggggcgccttcggcgacaacggctgcctggacgacatcagaacccactacgacagactggtggacgagtacagcctgaacgccggcaagcagagatacgagaagatgatcagcggcatgtacctgggcgagatcgtgagaaacatcctgatcgacttcaccaagaagggcttcctgttcagaggccagatcagcgagaccctgaagaccagaggcatcttcgagaccaagttcctgagccagatcgagagcgacagactggccctgctgcaggtgagagccatcctgcagcagctgggcctgaacagcacctgcgacgacagcatcctggtgaagaccgtgtgcggcgtggtgagcagaagagccgcccagctgtgcggcgccggcatggccgccgtggtggacaagatcagagagaacagaggcctggacagactgaacgtgaccgtgggcgtggacggcaccctgtacaagctgcacccccacttcagcagaatcatgcaccagaccgtgaaggagctgagccccaagtgcaacgtgagcttcctgctgagcgaggacggcagcggcaagggcgccgccctgatcaccgccgtgggcgtgagactgagaaccgaggccagcagctag

SEQ ID NO: 84413 - DNA, 2754 bp, synthetic construct
  misc_feature 1..2754: note = Description of Artificial Sequence: Synthetic coding sequence
  source 1..2754: mol_type = other DNA
atgatcgccgcccagctgctggcctactacttcaccgagctgaaggacgaccaggtgaagaagatcgacaagtacctgtacgccatgagactgagcgacgagaccctgatcgacatcatgaccagattcagaaaggagatgaagaacggcctgagcagagacttcaaccccaccgccaccgtgaagatgctgcccaccttcgtgagaagcatccccgacggcagcgagaagggcgacttcatcgccctggacctgggcggcagcagcttcagaatcctgagagtgcaggtgaaccacgagaagaaccagaacgtgcacatggagagcgaggtgtacgacacccccgagaacatcgtgcacggcagcggcagccagctgttcgaccacgtggccgagtgcctgggcgacttcatggagaagagaaagatcaaggacaagaagctgcccgtgggcttcaccttcagcttcccctgccagcagagcaagatcgacgaggccatcctgatcacctggaccaagagattcaaggccagcggcgtggagggcgccgacgtggtgaagctgctgaacaaggccatcaagaagagaggcgactacgacgccaacatcgtggccgtggtgaacgacaccgtgggcaccatgatgacctgcggctacgacgaccagcactgcgaggtgggcctgatcatcggcaccggcaccaacgcctgctacatggaggagctgagacacatcgacctggtggagggcgacgagggcagaatgtgcatcaacaccgagtggggcgccttcggcgacgacggcagcctggaggacatcagaaccgagttcgacagagagatcgacagaggcagcctgaaccccggcaagcagctgttcgagaagatggtgagcggcatgtacctgggcgagctggtgagactgatcctggtgaagatggccaaggagggcctgctgttcgagggcagaatcacccccgagctgctgaccagaggcaagttcaacaccagcgacgtgagcgccatcgagaagaacaaggagggcctgcacaacgccaaggagatcctgaccagactgggcgtggagcccagcgacgacgactgcgtgagcgtgcagcacgtgtgcaccatcgtgagcttcagaagcgccaacctggtggccgccaccctgggcgccatcctgaacagactgagagacaacaagggcacccccagactgagaaccaccgtgggcgtggacggcagcctgtacaagacccacccccagtacagcagaagattccacaagaccctgagaagactggtgcccgacagcgacgtgagattcctgctgagcgagagcggcagcggcaagggcgccgccatggtgaccgccgtggcctacagactggccgagcagcacagacagatcgaggagaccctggcccacttccacctgaccaaggacatgctgctggaggtgaagaagagaatgagagccgagatggagctgggcctgagaaagcagacccacaacaacgccgtggtgaagatgctgcccagcttcgtgagaagaacccccgacggcaccgagaacggcgacttcctggccctggacctgggcggcaccaacttcagagtgctgctggtgaagatcagaagcggcaagaagagaaccgtggagatgcacaacaagatctacgccatccccatcgagatcatgcagggcaccggcgaggagctgttcgaccacatcgtgagctgcatcagcgacttcctggactacatgggcatcaagggccccagaatgcccctgggcttcaccttcagcttcccctgccagcagaccagcctggacgccggcatcctgatcacctggaccaagggcttcaaggccaccgactgcgtgggccacgacgtggtgaccctgctgagagacgccatcaagagaagagaggagttcgacctggacgtggtggccgtggtgaacgacaccgtgggcaccatgatgacctgcgcctacgaggagcccacctgcgaggtgggcctgatcgtgggcaccggcagcaacgcctgctacatggaggagatgaagaacgtggagatggtggagggcgaccagggccagatgtgcatcaacatggagtggggcgccttcggcgacaacggctgcctggacgacatcagaacccactacgacagactggtggacgagtacagcctgaacgccggcaagcagagatacgagaagatgatcagcggcatgtacctgggcgagatcgtgagaaacatcctgatcgacttcaccaagaagggcttcctgttcagaggccagatcagcgagaccctgaagaccagaggcatcttcgagaccaagttcctgagccagatcgagagcgacagactggccctgctgcaggtgagagccatcctgcagcagctgggcctgaacagcacctgcgacgacagcatcctggtgaagaccgtgtgcggcgtggtgagcagaagagccgcccagctgtgcggcgccggcatggccgccgtggtggacaagatcagagagaacagaggcctggacagactgaacgtgaccgtgggcgtggacggcaccctgtacaagctgcacccccacttcagcagaatcatgcaccagaccgtgaaggagctgagccccaagtgcaacgtgagcttcctgctgagcgaggacggcagcggcaagggcgccgccctgatcaccgccgtgggcgtgagactgagaaccgaggccagcagctag

SEQ ID NO: 84414 - DNA, 2718 bp, synthetic construct
  misc_feature 1..2718: note = Description of Artificial Sequence: Synthetic coding sequence
  source 1..2718: mol_type = other DNA
atggccaagagagccctgcacgacttcatcgacaagtacctgtacgccatgagactgagcgacgagaccctgatcgacatcatgaccagattcagaaaggagatgaagaacggcctgagcagagacttcaaccccaccgccaccgtgaagatgctgcccaccttcgtgagaagcatccccgacggcagcgagaagggcgacttcatcgccctggacctgggcggcagcagcttcagaatcctgagagtgcaggtgaaccacgagaagaaccagaacgtgcacatggagagcgaggtgtacgacacccccgagaacatcgtgcacggcagcggcagccagctgttcgaccacgtggccgagtgcctgggcgacttcatggagaagagaaagatcaaggacaagaagctgcccgtgggcttcaccttcagcttcccctgccagcagagcaagatcgacgaggccatcctgatcacctggaccaagagattcaaggccagcggcgtggagggcgccgacgtggtgaagctgctgaacaaggccatcaagaagagaggcgactacgacgccaacatcgtggccgtggtgaacgacaccgtgggcaccatgatgacctgcggctacgacgaccagcactgcgaggtgggcctgatcatcggcaccggcaccaacgcctgctacatggaggagctgagacacatcgacctggtggagggcgacgagggcagaatgtgcatcaacaccgagtggggcgccttcggcgacgacggcagcctggaggacatcagaaccgagttcgacagagagatcgacagaggcagcctgaaccccggcaagcagctgttcgagaagatggtgagcggcatgtacctgggcgagctggtgagactgatcctggtgaagatggccaaggagggcctgctgttcgagggcagaatcacccccgagctgctgaccagaggcaagttcaacaccagcgacgtgagcgccatcgagaagaacaaggagggcctgcacaacgccaaggagatcctgaccagactgggcgtggagcccagcgacgacgactgcgtgagcgtgcagcacgtgtgcaccatcgtgagcttcagaagcgccaacctggtggccgccaccctgggcgccatcctgaacagactgagagacaacaagggcacccccagactgagaaccaccgtgggcgtggacggcagcctgtacaagacccacccccagtacagcagaagattccacaagaccctgagaagactggtgcccgacagcgacgtgagattcctgctgagcgagagcggcagcggcaagggcgccgccatggtgaccgccgtggcctacagactggccgagcagcacagacagatcgaggagaccctggcccacttccacctgaccaaggacatgctgctggaggtgaagaagagaatgagagccgagatggagctgggcctgagaaagcagacccacaacaacgccgtggtgaagatgctgcccagcttcgtgagaagaacccccgacggcaccgagaacggcgacttcctggccctggacctgggcggcaccaacttcagagtgctgctggtgaagatcagaagcggcaagaagagaaccgtggagatgcacaacaagatctacgccatccccatcgagatcatgcagggcaccggcgaggagctgttcgaccacatcgtgagctgcatcagcgacttcctggactacatgggcatcaagggccccagaatgcccctgggcttcaccttcagcttcccctgccagcagaccagcctggacgccggcatcctgatcacctggaccaagggcttcaaggccaccgactgcgtgggccacgacgtggtgaccctgctgagagacgccatcaagagaagagaggagttcgacctggacgtggtggccgtggtgaacgacaccgtgggcaccatgatgacctgcgcctacgaggagcccacctgcgaggtgggcctgatcgtgggcaccggcagcaacgcctgctacatggaggagatgaagaacgtggagatggtggagggcgaccagggccagatgtgcatcaacatggagtggggcgccttcggcgacaacggctgcctggacgacatcagaacccactacgacagactggtggacgagtacagcctgaacgccggcaagcagagatacgagaagatgatcagcggcatgtacctgggcgagatcgtgagaaacatcctgatcgacttcaccaagaagggcttcctgttcagaggccagatcagcgagaccctgaagaccagaggcatcttcgagaccaagttcctgagccagatcgagagcgacagactggccctgctgcaggtgagagccatcctgcagcagctgggcctgaacagcacctgcgacgacagcatcctggtgaagaccgtgtgcggcgtggtgagcagaagagccgcccagctgtgcggcgccggcatggccgccgtggtggacaagatcagagagaacagaggcctggacagactgaacgtgaccgtgggcgtggacggcaccctgtacaagctgcacccccacttcagcagaatcatgcaccagaccgtgaaggagctgagccccaagtgcaacgtgagcttcctgctgagcgaggacggcagcggcaagggcgccgccctgatcaccgccgtgggcgtgagactgagaaccgaggccagcagctag

SEQ ID NO: 84415 - DNA, 2766 bp, synthetic construct
  misc_feature 1..2766: note = Description of Artificial Sequence: Synthetic coding sequence
  source 1..2766: mol_type = other DNA
atgggccagatctgccagagagagagcgccaccgccgccgagaagcccaagctgcacctgctggccgagagcgagatcgacaagtacctgtacgccatgagactgagcgacgagaccctgatcgacatcatgaccagattcagaaaggagatgaagaacggcctgagcagagacttcaaccccaccgccaccgtgaagatgctgcccaccttcgtgagaagcatccccgacggcagcgagaagggcgacttcatcgccctggacctgggcggcagcagcttcagaatcctgagagtgcaggtgaaccacgagaagaaccagaacgtgcacatggagagcgaggtgtacgacacccccgagaacatcgtgcacggcagcggcagccagctgttcgaccacgtggccgagtgcctgggcgacttcatggagaagagaaagatcaaggacaagaagctgcccgtgggcttcaccttcagcttcccctgccagcagagcaagatcgacgaggccatcctgatcacctggaccaagagattcaaggccagcggcgtggagggcgccgacgtggtgaagctgctgaacaaggccatcaagaagagaggcgactacgacgccaacatcgtggccgtggtgaacgacaccgtgggcaccatgatgacctgcggctacgacgaccagcactgcgaggtgggcctgatcatcggcaccggcaccaacgcctgctacatggaggagctgagacacatcgacctggtggagggcgacgagggcagaatgtgcatcaacaccgagtggggcgccttcggcgacgacggcagcctggaggacatcagaaccgagttcgacagagagatcgacagaggcagcctgaaccccggcaagcagctgttcgagaagatggtgagcggcatgtacctgggcgagctggtgagactgatcctggtgaagatggccaaggagggcctgctgttcgagggcagaatcacccccgagctgctgaccagaggcaagttcaacaccagcgacgtgagcgccatcgagaagaacaaggagggcctgcacaacgccaaggagatcctgaccagactgggcgtggagcccagcgacgacgactgcgtgagcgtgcagcacgtgtgcaccatcgtgagcttcagaagcgccaacctggtggccgccaccctgggcgccatcctgaacagactgagagacaacaagggcacccccagactgagaaccaccgtgggcgtggacggcagcctgtacaagacccacccccagtacagcagaagattccacaagaccctgagaagactggtgcccgacagcgacgtgagattcctgctgagcgagagcggcagcggcaagggcgccgccatggtgaccgccgtggcctacagactggccgagcagcacagacagatcgaggagaccctggcccacttccacctgaccaaggacatgctgctggaggtgaagaagagaatgagagccgagatggagctgggcctgagaaagcagacccacaacaacgccgtggtgaagatgctgcccagcttcgtgagaagaacccccgacggcaccgagaacggcgacttcctggccctggacctgggcggcaccaacttcagagtgctgctggtgaagatcagaagcggcaagaagagaaccgtggagatgcacaacaagatctacgccatccccatcgagatcatgcagggcaccggcgaggagctgttcgaccacatcgtgagctgcatcagcgacttcctggactacatgggcatcaagggccccagaatgcccctgggcttcaccttcagcttcccctgccagcagaccagcctggacgccggcatcctgatcacctggaccaagggcttcaaggccaccgactgcgtgggccacgacgtggtgaccctgctgagagacgccatcaagagaagagaggagttcgacctggacgtggtggccgtggtgaacgacaccgtgggcaccatgatgacctgcgcctacgaggagcccacctgcgaggtgggcctgatcgtgggcaccggcagcaacgcctgctacatggaggagatgaagaacgtggagatggtggagggcgaccagggccagatgtgcatcaacatggagtggggcgccttcggcgacaacggctgcctggacgacatcagaacccactacgacagactggtggacgagtacagcctgaacgccggcaagcagagatacgagaagatgatcagcggcatgtacctgggcgagatcgtgagaaacatcctgatcgacttcaccaagaagggcttcctgttcagaggccagatcagcgagaccctgaagaccagaggcatcttcgagaccaagttcctgagccagatcgagagcgacagactggccctgctgcaggtgagagccatcctgcagcagctgggcctgaacagcacctgcgacgacagcatcctggtgaagaccgtgtgcggcgtggtgagcagaagagccgcccagctgtgcggcgccggcatggccgccgtggtggacaagatcagagagaacagaggcctggacagactgaacgtgaccgtgggcgtggacggcaccctgtacaagctgcacccccacttcagcagaatcatgcaccagaccgtgaaggagctgagccccaagtgcaacgtgagcttcctgctgagcgaggacggcagcggcaagggcgccgccctgatcaccgccgtgggcgtgagactgagaaccgaggccagcagctag

SEQ ID NO: 84416 - DNA, 2748 bp, synthetic construct
  misc_feature 1..2748: note = Description of Artificial Sequence: Synthetic coding sequence
  source 1..2748: mol_type = other DNA
atgatcgccgcccagctgctggcctactacttcaccgagctgaaggacgaccaggtgaagaagatcgacaagtacctgtacgccatgagactgagcgacgagaccctgatcgacatcatgaccagattcagaaaggagatgaagaacggcctgagcagagacttcaaccccaccgccaccgtgaagatgctgcccaccttcgtgagaagcatccccgacggcagcgagaagggcgacttcatcgccctggacctgggcggcagcagcttcagaatcctgagagtgcaggtgaaccacgagaagaaccagaacgtgcacatggagagcgaggtgtacgacacccccgagaacatcgtgcacggcagcggcagccagctgttcgaccacgtggccgagtgcctgggcgacttcatggagaagagaaagatcaaggacaagaagctgcccgtgggcttcaccttcagcttcccctgccagcagagcaagatcgacgaggccatcctgatcacctggaccaagagattcaaggccagcggcgtggagggcgccgacgtggtgaagctgctgaacaaggccatcaagaagagaggcgactacgacgccaacatcgtggccgtggtgaacgacaccgtgggcaccatgatgacctgcggctacgacgaccagcactgcgaggtgggcctgatcatcggcaccggcaccaacgcctgctacatggaggagctgagacacatcgacctggtggagggcgacgagggcagaatgtgcatcaacaccgagtggggcgccttcggcgacgacggcagcctggaggacatcagaaccgagttcgacagagagatcgacagaggcagcctgaaccccggcaagcagctgttcgagaagatggtgagcggcatgtacctgggcgagctggtgagactgatcctggtgaagatggccaaggagggcctgctgttcgagggcagaatcacccccgagctgctgaccagaggcaagttcaacaccagcgacgtgagcgccatcgagaagaacaaggagggcctgcacaacgccaaggagatcctgaccagactgggcgtggagcccagcgacgacgactgcgtgagcgtgcagcacgtgtgcaccatcgtgagcttcagaagcgccaacctggtggccgccaccctgggcgccatcctgaacagactgagagacaacaagggcacccccagactgagaaccaccgtgggcgtggacggcagcctgtacaagacccacccccagtacagcagaagattccacaagaccctgagaagactggtgcccgacagcgacgtgagattcctgctgagcgagagcggcagcggcaagggcgccgccatggtgaccgccgtggcctacagactggccgagcagcacagacagatcgaggagaccctggcccacttccacctgaccaaggacatgctgctggaggtgaagaagagaatgagagccgagatggagctgggcctgagaaagcagacccacaacaacgccgtggtgaagatgctgcccagcttcgtgagaagaacccccgacggcaccgagaacggcgacttcctggccctggacctgggcggcaccaacttcagagtgctgctggtgaagatcagaagcggcaagaagagaaccgtggagatgcacaacaagatctacgccatccccatcgagatcatgcagggcaccggcgaggagctgttcgaccacatcgtgagctgcatcagcgacttcctggactacatgggcatcaagggccccagaatgcccctgggcttcaccttcagcttcccctgccagcagaccagcctggacgccggcatcctgatcacctggaccaagggcttcaaggccaccgactgcgtgggccacgacgtggtgaccctgctgagagacgccatcaagagaagagaggagttcgacctggacgtggtggccgtggtgaacgacaccgtgggcaccatgatgacctgcgcctacgaggagcccacctgcgaggtgggcctgatcgtgggcaccggcagcaacgcctgctacatggaggagatgaagaacgtggagatggtggagggcgaccagggccagatgtgcatcaacatggagtggggcgccttcggcgacaacggctgcctggacgacatcagaacccactacgacagactggtggacgagtacagcctgaacgccggcaagcagagatacgagaagatgatcagcggcatgtacctgggcgagatcgtgagaaacatcctgatcgacttcaccaagaagggcttcctgttcagaggccagatcagcgagaccctgaagaccagaggcatcttcgagaccaagttcctgagccagatcgagagcgacagactggccctgctgcaggtgagagccatcctgcagcagctgggcctgaacagcacctgcgacgacagcatcctggtgaagaccgtgtgcggcgtggtgagcagaagagccgcccagctgtgcggcgccggcatggccgccgtggtggacaagatcagagagaacagaggcctggacagactgaacgtgaccgtgggcgtggacggcaccctgtacaagctgcacccccacttcagcagaatcatgcaccagaccgtgaaggagctgagccccaagtgcaacgtgagcttcctgctgagcgaggacggcagcggcaagggcgccgccctgatcaccgccgtgggcgtgagactgagaaccgaggcctag

SEQ ID NO: 84417 - DNA, 345 bp, synthetic construct
  misc_feature 1..345: note = Description of Artificial Sequence: Synthetic coding sequence
  source 1..345: mol_type = other DNA
atggccaagagagccctgcacgacttcatcgacaagtacctgtacgccatgagactgagcgacgagaccctgatcgacatcatgaccagattcagaaaggagatgaagaacggcctgagcagagacttcaaccccaccgccaccgtgaagatgctgcccaccttcgtgagaagcatccccgacggcagcgagaagggcgacttcatcgccctggacctgggcggcagcagcttcagaatcctgagagtgcaggtgaaccacgagaagaaccagaacgtgcacatggagagcgaggtgtacgacacccccgagaacatcgtgcacggcagcggcagccagctgtag

SEQ ID NO: 84418 - DNA, 876 bp, synthetic construct
  misc_feature 1..876: note = Description of Artificial Sequence: Synthetic coding sequence
  source 1..876: mol_type = other DNA
atggactgcgagcacagcctgagcctgccctgcagaggcgccgaggcctgggagatcggcatcgacaagtacctgtacgccatgagactgagcgacgagaccctgatcgacatcatgaccagattcagaaaggagatgaagaacggcctgagcagagacttcaaccccaccgccaccgtgaagatgctgcccaccttcgtgagaagcatccccgacggcagcgagaagggcgacttcatcgccctggacctgggcggcagcagcttcagaatcctgagagtgcaggtgaaccacgagaagaaccagaacgtgcacatggagagcgaggtgtacgacacccccgagaacatcgtgcacggcagcggcagccagctgttcgaccacgtggccgagtgcctgggcgacttcatggagaagagaaagatcaaggacaagaagctgcccgtgggcttcaccttcagcttcccctgccagcagagcaagatcgacgaggccatcctgatcacctggaccaagagattcaaggccagcggcgtggagggcgccgacgtggtgaagctgctgaacaaggccatcaagaagagaggcgactacgacgccaacatcgtggccgtggtgaacgacaccgtgggcaccatgatgacctgcggctacgacgaccagcactgcgaggtgggcctgatcatcggcaccggcaccaacgcctgctacatggaggagctgagacacatcgacctggtggagggcgacgagggcagaatgtgcatcaacaccgagtggggcgccttcggcgacgacggcagcctggaggacatcagaaccgagttcgacagagagatcgacagaggcagcctgaaccccggcaagcagctgtag

SEQ ID NO: 84419 - DNA, 2859 bp, synthetic construct
  misc_feature 1..2859: note = Description of Artificial Sequence: Synthetic coding sequence
  source 1..2859: mol_type = other DNA
atgggccagatctgccagagagagagcagacagggcctggccatgctgcccagactgttcctgaacccctggagacaggtgatcctgctgccccagccccccaaggtgctgggcctgcaggccaccgccgccgagaagcccaagctgcacctgctggccgagagcgagatcgacaagtacctgtacgccatgagactgagcgacgagaccctgatcgacatcatgaccagattcagaaaggagatgaagaacggcctgagcagagacttcaaccccaccgccaccgtgaagatgctgcccaccttcgtgagaagcatccccgacggcagcgagaagggcgacttcatcgccctggacctgggcggcagcagcttcagaatcctgagagtgcaggtgaaccacgagaagaaccagaacgtgcacatggagagcgaggtgtacgacacccccgagaacatcgtgcacggcagcggcagccagctgttcgaccacgtggccgagtgcctgggcgacttcatggagaagagaaagatcaaggacaagaagctgcccgtgggcttcaccttcagcttcccctgccagcagagcaagatcgacgaggccatcctgatcacctggaccaagagattcaaggccagcggcgtggagggcgccgacgtggtgaagctgctgaacaaggccatcaagaagagaggcgactacgacgccaacatcgtggccgtggtgaacgacaccgtgggcaccatgatgacctgcggctacgacgaccagcactgcgaggtgggcctgatcatcggcaccggcaccaacgcctgctacatggaggagctgagacacatcgacctggtggagggcgacgagggcagaatgtgcatcaacaccgagtggggcgccttcggcgacgacggcagcctggaggacatcagaaccgagttcgacagagagatcgacagaggcagcctgaaccccggcaagcagctgttcgagaagatggtgagcggcatgtacctgggcgagctggtgagactgatcctggtgaagatggccaaggagggcctgctgttcgagggcagaatcacccccgagctgctgaccagaggcaagttcaacaccagcgacgtgagcgccatcgagaagaacaaggagggcctgcacaacgccaaggagatcctgaccagactgggcgtggagcccagcgacgacgactgcgtgagcgtgcagcacgtgtgcaccatcgtgagcttcagaagcgccaacctggtggccgccaccctgggcgccatcctgaacagactgagagacaacaagggcacccccagactgagaaccaccgtgggcgtggacggcagcctgtacaagacccacccccagtacagcagaagattccacaagaccctgagaagactggtgcccgacagcgacgtgagattcctgctgagcgagagcggcagcggcaagggcgccgccatggtgaccgccgtggcctacagactggccgagcagcacagacagatcgaggagaccctggcccacttccacctgaccaaggacatgctgctggaggtgaagaagagaatgagagccgagatggagctgggcctgagaaagcagacccacaacaacgccgtggtgaagatgctgcccagcttcgtgagaagaacccccgacggcaccgagaacggcgacttcctggccctggacctgggcggcaccaacttcagagtgctgctggtgaagatcagaagcggcaagaagagaaccgtggagatgcacaacaagatctacgccatccccatcgagatcatgcagggcaccggcgaggagctgttcgaccacatcgtgagctgcatcagcgacttcctggactacatgggcatcaagggccccagaatgcccctgggcttcaccttcagcttcccctgccagcagaccagcctggacgccggcatcctgatcacctggaccaagggcttcaaggccaccgactgcgtgggccacgacgtggtgaccctgctgagagacgccatcaagagaagagaggagttcgacctggacgtggtggccgtggtgaacgacaccgtgggcaccatgatgacctgcgcctacgaggagcccacctgcgaggtgggcctgatcgtgggcaccggcagcaacgcctgctacatggaggagatgaagaacgtggagatggtggagggcgaccagggccagatgtgcatcaacatggagtggggcgccttcggcgacaacggctgcctggacgacatcagaacccactacgacagactggtggacgagtacagcctgaacgccggcaagcagagatacgagaagatgatcagcggcatgtacctgggcgagatcgtgagaaacatcctgatcgacttcaccaagaagggcttcctgttcagaggccagatcagcgagaccctgaagaccagaggcatcttcgagaccaagttcctgagccagatcgagagcgacagactggccctgctgcaggtgagagccatcctgcagcagctgggcctgaacagcacctgcgacgacagcatcctggtgaagaccgtgtgcggcgtggtgagcagaagagccgcccagctgtgcggcgccggcatggccgccgtggtggacaagatcagagagaacagaggcctggacagactgaacgtgaccgtgggcgtggacggcaccctgtacaagctgcacccccacttcagcagaatcatgcaccagaccgtgaaggagctgagccccaagtgcaacgtgagcttcctgctgagcgaggacggcagcggcaagggcgccgccctgatcaccgccgtgggcgtgagactgagaaccgaggccagcagctag

SEQ ID NO: 84420 - DNA, 420 bp, synthetic construct
  misc_feature 1..420: note = Description of Artificial Sequence: Synthetic coding sequence
  source 1..420: mol_type = other DNA
atgggccagatctgccagagagagagcgccaccgccgccgagaagcccaagctgcacctgctggccgagagcgagatcgacaagtacctgtacgccatgagactgagcgacgagaccctgatcgacatcatgaccagattcagaaaggagatgaagaacggcctgagcagagacttcaaccccaccgccaccgtgaagatgctgcccaccttcgtgagaagcatccccgacggcagcgagaagggcgacttcatcgccctggacctgggcggcagcagcttcagaatcctgagagtgcaggtgaaccacgagaagaaccagaacgtgcacatggagagcgaggtgtacgacacccccgagaacatcgtgcacggcagcggcagccagctgttcgaccacgtggccgagtgcctgggctag

SEQ ID NO: 84421 - DNA, 2754 bp, synthetic construct
  misc_feature 1..2754: note = Description of Artificial Sequence: Synthetic coding sequence
  source 1..2754: mol_type = other DNA
atgatcgccagccacctgctggcctacttcttcaccgagctgaaccacgaccaggtgcagaaggtggaccagtacctgtaccacatgagactgagcgacgagaccctgctggagatcagcaagagattcagaaaggagatggagaagggcctgggcgccaccacccaccccaccgccgccgtgaagatgctgcccaccttcgtgagaagcacccccgacggcaccgagcacggcgagttcctggccctggacctgggcggcaccaacttcagagtgctgtgggtgaaggtgaccgacaacggcctgcagaaggtggagatggagaaccagatctacgccatccccgaggacatcatgagaggcagcggcacccagctgttcgaccacatcgccgagtgcctggccaacttcatggacaagctgcagatcaaggacaagaagctgcccctgggcttcaccttcagcttcccctgccaccagaccaagctggacgagagcttcctggtgagctggaccaagggcttcaagagcagcggcgtggagggcagagacgtggtggccctgatcagaaaggccatccagagaagaggcgacttcgacatcgacatcgtggccgtggtgaacgacaccgtgggcaccatgatgacctgcggctacgacgaccacaactgcgagatcggcctgatcgtgggcaccggcagcaacgcctgctacatggaggagatgagacacatcgacatggtggagggcgacgagggcagaatgtgcatcaacatggagtggggcgccttcggcgacgacggcagcctgaacgacatcagaaccgagttcgaccaggagatcgacatgggcagcctgaaccccggcaagcagctgttcgagaagatgatcagcggcatgtacatgggcgagctggtgagactgatcctggtgaagatggccaaggaggagctgctgttcggcggcaagctgagccccgagctgctgaacaccggcagattcgagaccaaggacatcagcgacatcgagggcgagaaggacggcatcagaaaggccagagaggtgctgatgagactgggcctggaccccacccaggaggactgcgtggccacccacagaatctgccagatcgtgagcaccagaagcgccagcctgtgcgccgccaccctggccgccgtgctgcagagaatcaaggagaacaagggcgaggagagactgagaagcaccatcggcgtggacggcagcgtgtacaagaagcacccccacttcgccaagagactgcacaagaccgtgagaagactggtgcccggctgcgacgtgagattcctgagaagcgaggacggcagcggcaagggcgccgccatggtgaccgccgtggcctacagactggccgaccagcacagagccagacagaagaccctggagcacctgcagctgagccacgaccagctgctggaggtgaagagaagaatgaaggtggagatggagagaggcctgagcaaggagacccacgccagcgcccccgtgaagatgctgcccacctacgtgtgcgccacccccgacggcaccgagaagggcgacttcctggccctggacctgggcggcaccaacttcagagtgctgctggtgagagtgagaaacggcaagtggggcggcgtggagatgcacaacaagatctacgccatcccccaggaggtgatgcacggcaccggcgacgagctgttcgaccacatcgtgcagtgcatcgccgacttcctggagtacatgggcatgaagggcgtgagcctgcccctgggcttcaccttcagcttcccctgccagcagaacagcctggacgagagcatcctgctgaagtggaccaagggcttcaaggccagcggctgcgagggcgaggacgtggtgaccctgctgaaggaggccatccacagaagagaggagttcgacctggacgtggtggccgtggtgaacgacaccgtgggcaccatgatgacctgcggcttcgaggacccccactgcgaggtgggcctgatcgtgggcaccggcagcaacgcctgctacatggaggagatgagaaacgtggagctggtggagggcgaggagggcagaatgtgcgtgaacatggagtggggcgccttcggcgacaacggctgcctggacgacttcagaaccgagttcgacgtggccgtggacgagctgagcctgaaccccggcaagcagagattcgagaagatgatcagcggcatgtacctgggcgagatcgtgagaaacatcctgatcgacttcaccaagagaggcctgctgttcagaggcagaatcagcgagagactgaagaccagaggcatcttcgagaccaagttcctgagccagatcgagagcgactgcctggccctgctgcaggtgagagccatcctgcagcacctgggcctggagagcacctgcgacgacagcatcatcgtgaaggaggtgtgcaccgtggtggccagaagagccgcccagctgtgcggcgccggcatggccgccgtggtggacagaatcagagagaacagaggcctggacgccctgaaggtgaccgtgggcgtggacggcaccctgtacaagctgcacccccacttcgccaaggtgatgcacgagaccgtgaaggacctggcccccaagtgcgacgtgagcttcctgcagagcgaggacggcagcggcaagggcgccgccctgatcaccgccgtggcctgcagaatcagagaggccggccagagatag

SEQ ID NO: 84422 - DNA, 2670 bp, synthetic construct
  misc_feature 1..2670: note = Description of Artificial Sequence: Synthetic coding sequence
  source 1..2670: mol_type = other DNA
atgagactgagcgacgagaccctgctggagatcagcaagagattcagaaaggagatggagaagggcctgggcgccaccacccaccccaccgccgccgtgaagatgctgcccaccttcgtgagaagcacccccgacggcaccgagcacggcgagttcctggccctggacctgggcggcaccaacttcagagtgctgtgggtgaaggtgaccgacaacggcctgcagaaggtggagatggagaaccagatctacgccatccccgaggacatcatgagaggcagcggcacccagctgttcgaccacatcgccgagtgcctggccaacttcatggacaagctgcagatcaaggacaagaagctgcccctgggcttcaccttcagcttcccctgccaccagaccaagctggacgagagcttcctggtgagctggaccaagggcttcaagagcagcggcgtggagggcagagacgtggtggccctgatcagaaaggccatccagagaagaggcgacttcgacatcgacatcgtggccgtggtgaacgacaccgtgggcaccatgatgacctgcggctacgacgaccacaactgcgagatcggcctgatcgtgggcaccggcagcaacgcctgctacatggaggagatgagacacatcgacatggtggagggcgacgagggcagaatgtgcatcaacatggagtggggcgccttcggcgacgacggcagcctgaacgacatcagaaccgagttcgaccaggagatcgacatgggcagcctgaaccccggcaagcagctgttcgagaagatgatcagcggcatgtacatgggcgagctggtgagactgatcctggtgaagatggccaaggaggagctgctgttcggcggcaagctgagccccgagctgctgaacaccggcagattcgagaccaaggacatcagcgacatcgagggcgagaaggacggcatcagaaaggccagagaggtgctgatgagactgggcctggaccccacccaggaggactgcgtggccacccacagaatctgccagatcgtgagcaccagaagcgccagcctgtgcgccgccaccctggccgccgtgctgcagagaatcaaggagaacaagggcgaggagagactgagaagcaccatcggcgtggacggcagcgtgtacaagaagcacccccacttcgccaagagactgcacaagaccgtgagaagactggtgcccggctgcgacgtgagattcctgagaagcgaggacggcagcggcaagggcgccgccatggtgaccgccgtggcctacagactggccgaccagcacagagccagacagaagaccctggagcacctgcagctgagccacgaccagctgctggaggtgaagagaagaatgaaggtggagatggagagaggcctgagcaaggagacccacgccagcgcccccgtgaagatgctgcccacctacgtgtgcgccacccccgacggcaccgagaagggcgacttcctggccctggacctgggcggcaccaacttcagagtgctgctggtgagagtgagaaacggcaagtggggcggcgtggagatgcacaacaagatctacgccatcccccaggaggtgatgcacggcaccggcgacgagctgttcgaccacatcgtgcagtgcatcgccgacttcctggagtacatgggcatgaagggcgtgagcctgcccctgggcttcaccttcagcttcccctgccagcagaacagcctggacgagagcatcctgctgaagtggaccaagggcttcaaggccagcggctgcgagggcgaggacgtggtgaccctgctgaaggaggccatccacagaagagaggagttcgacctggacgtggtggccgtggtgaacgacaccgtgggcaccatgatgacctgcggcttcgaggacccccactgcgaggtgggcctgatcgtgggcaccggcagcaacgcctgctacatggaggagatgagaaacgtggagctggtggagggcgaggagggcagaatgtgcgtgaacatggagtggggcgccttcggcgacaacggctgcctggacgacttcagaaccgagttcgacgtggccgtggacgagctgagcctgaaccccggcaagcagagattcgagaagatgatcagcggcatgtacctgggcgagatcgtgagaaacatcctgatcgacttcaccaagagaggcctgctgttcagaggcagaatcagcgagagactgaagaccagaggcatcttcgagaccaagttcctgagccagatcgagagcgactgcctggccctgctgcaggtgagagccatcctgcagcacctgggcctggagagcacctgcgacgacagcatcatcgtgaaggaggtgtgcaccgtggtggccagaagagccgcccagctgtgcggcgccggcatggccgccgtggtggacagaatcagagagaacagaggcctggacgccctgaaggtgaccgtgggcgtggacggcaccctgtacaagctgcacccccacttcgccaaggtgatgcacgagaccgtgaaggacctggcccccaagtgcgacgtgagcttcctgcagagcgaggacggcagcggcaagggcgccgccctgatcaccgccgtggcctgcagaatcagagaggccggccagagatag

SEQ ID NO: 84423 - DNA, 2754 bp, synthetic construct; identical to SEQ ID NO: 84421
  misc_feature 1..2754: note = Description of Artificial Sequence: Synthetic coding sequence
  source 1..2754: mol_type = other DNA

SEQ ID NO: 84424 - DNA, 2772 bp, synthetic construct
  misc_feature 1..2772: note = Description of Artificial Sequence: Synthetic coding sequence
  source 1..2772: mol_type = other DNA
atggacagcatcggcagcagcggcctgagacagggcgaggagaccctgagctgcagcgaggagggcctgcccggccccagcgacagcagcgagctggtgcaggagtgcctgcagcagttcaaggtgaccagagcccagctgcagcagatccaggccagcctgctgggcagcatggagcaggccctgagaggccaggccagccccgcccccgccgtgagaatgctgcccacctacgtgggcagcaccccccacggcaccgagcagggcgacttcgtggtgctggagctgggcgccaccggcgccagcctgagagtgctgtgggtgaccctgaccggcatcgagggccacagagtggagcccagaagccaggagttcgtgatcccccaggaggtgatgctgggcgccggccagcagctgttcgacttcgccgcccactgcctgagcgagttcctggacgcccagcccgtgaacaagcagggcctgcagctgggcttcagcttcagcttcccctgccaccagaccggcctggacagaagcaccctgatcagctggaccaagggcttcagatgcagcggcgtggagggccaggacgtggtgcagctgctgagagacgccatcagaagacagggcgcctacaacatcgacgtggtggccgtggtgaacgacaccgtgggcaccatgatgggctgcgagcccggcgtgagaccctgcgaggtgggcctggtggtggacaccggcaccaacgcctgctacatggaggaggccagacacgtggccgtgctggacgaggacagaggcagagtgtgcgtgagcgtggagtggggcagcttcagcgacgacggcgccctgggccccgtgctgaccaccttcgaccacaccctggaccacgagagcctgaaccccggcgcccagagattcgagaagatgatcggcggcctgtacctgggcgagctggtgagactggtgctggcccacctggccagatgcggcgtgctgttcggcggctgcaccagccccgccctgctgagccagggcagcatcctgctggagcacgtggccgagatggaggaccccagcaccggcgccgccagagtgcacgccatcctgcaggacctgggcctgagccccggcgccagcgacgtggagctggtgcagcacgtgtgcgccgccgtgtgcaccagagccgcccagctgtgcgccgccgccctggccgccgtgctgagctgcctgcagcacagcagagagcagcagaccctgcaggtggccgtggccaccggcggcagagtgtgcgagagacaccccagattctgcagcgtgctgcagggcaccgtgatgctgctggcccccgagtgcgacgtgagcctgatccccagcgtggacggcggcggcagaggcgtggccatggtgaccgccgtggccgccagactggccgcccacagaagactgctggaggagaccctggcccccttcagactgaaccacgaccagctggccgccgtgcaggcccagatgagaaaggccatggccaagggcctgagaggcgaggccagcagcctgagaatgctgcccaccttcgtgagagccacccccgacggcagcgagagaggcgacttcctggccctggacctgggcggcaccaacttcagagtgctgctggtgagagtgaccaccggcgtgcagatcaccagcgagatctacagcatccccgagaccgtggcccagggcagcggccagcagctgttcgaccacatcgtggactgcatcgtggacttccagcagaagcagggcctgagcggccagagcctgcccctgggcttcaccttcagcttcccctgcagacagctgggcctggaccagggcatcctgctgaactggaccaagggcttcaaggccagcgactgcgagggccaggacgtggtgagcctgctgagagaggccatcaccagaagacaggccgtggagctgaacgtggtggccatcgtgaacgacaccgtgggcaccatgatgagctgcggctacgaggaccccagatgcgagatcggcctgatcgtgggcaccggcaccaacgcctgctacatggaggagctgagaaacgtggccggcgtgcccggcgacagcggcagaatgtgcatcaacatggagtggggcgccttcggcgacgacggcagcctggccatgctgagcaccagattcgacgccagcgtggaccaggccagcatcaaccccggcaagcagagattcgagaagatgatcagcggcatgtacctgggcgagatcgtgagacacatcctgctgcacctgaccagcctgggcgtgctgttcagaggccagcagatccagagactgcagaccagagacatcttcaagaccaagttcctgagcgagatcgagagcgacagcctggccctgagacaggtgagagccatcctggaggacctgggcctgcccctgaccagcgacgacgccctgatggtgctggaggtgtgccaggccgtgagccagagagccgcccagctgtgcggcgccggcgtggccgccgtggtggagaagatcagagagaacagaggcctggaggagctggccgtgagcgtgggcgtggacggcaccctgtacaagctgcaccccagattcagcagcctggtggccgccaccgtgagagagctggcccccagatgcgtggtgaccttcctgcagagcgaggacggcagcggcaagggcgccgccctggtgaccgccgtggcctgcagactggcccagctgaccagagtgtag

SEQ ID NO: 84425 - DNA, 1590 bp, synthetic construct
  misc_feature 1..1590: note = Description of Artificial Sequence: Synthetic coding sequence
  source 1..1590: mol_type = other DNA
atgaccagcagcagactgtggttcagcctgctgctggccgccgccttcgccggcagagccaccgccctgtggccctggccccagaacttccagaccagcgaccagagatacgtgctgtaccccaacaacttccagttccagtacgacgtgagcagcgccgcccagcccggctgcagcgtgctggacgaggccttccagagatacagagacctgctgttcggcagcggcagctggcccagaccctacctgaccggcaagagacacaccctggagaagaacgtgctggtggtgagcgtggtgacccccggctgcaaccagctgcccaccctggagagcgtggagaactacaccctgaccatcaacgacgaccagtgcctgctgctgagcgagaccgtgtggggcgccctgagaggcctggagaccttcagccagctggtgtggaagagcgccgagggcaccttcttcatcaacaagaccgagatcgaggacttccccagattcccccacagaggcctgctgctggacaccagcagacactacctgcccctgagcagcatcctggacaccctggacgtgatggcctacaacaagctgaacgtgttccactggcacctggtggacgaccccagcttcccctacgagagcttcaccttccccgagctgatgagaaagggcagctacaaccccgtgacccacatctacaccgcccaggacgtgaaggaggtgatcgagtacgccagactgagaggcatcagagtgctggccgagttcgacacccccggccacaccctgagctggggccccggcatccccggcctgctgaccccctgctacagcggcagcgagcccagcggcaccttcggccccgtgaaccccagcctgaacaacacctacgagttcatgagcaccttcttcctggaggtgagcagcgtgttccccgacttctacctgcacctgggcggcgacgaggtggacttcacctgctggaagagcaaccccgagatccaggacttcatgagaaagaagggcttcggcgaggacttcaagcagctggagagcttctacatccagaccctgctggacatcgtgagcagctacggcaagggctacgtggtgtggcaggaggtgttcgacaacaaggtgaagatccagcccgacaccatcatccaggtgtggagagaggacatccccgtgaactacatgaaggagctggagctggtgaccaaggccggcttcagagccctgctgagcgccccctggtacctgaacagaatcagctacggccccgactggaaggacttctacatcgtggagcccctggccttcgagggcacccccgagcagaaggccctggtgatcggcggcgaggcctgcatgtggggcgagtacgtggacaacaccaacctggtgcccagactgtggcccagagccggcgccgtggccgagagactgtggagcaacaagctgaccagcgacctgaccttcgcctacgagagactgagccacttcagatgcgagctgctgagaagaggcgtgcaggcccagcccctgaacgtgggcttctgcgagcaggagttcgagcagacctag

SEQ ID NO: 84426 - DNA, 906 bp, synthetic construct
  misc_feature 1..906: note = Description of Artificial Sequence: Synthetic coding sequence
  source 1..906: mol_type = other DNA
atgatgaccagcgtgtacagcagcctgagactgagcggcgagctgagcgaggacgtgatggcctacaacaagctgaacgtgttccactggcacctggtggacgaccccagcttcccctacgagagcttcaccttccccgagctgatgagaaagggcagctacaaccccgtgacccacatctacaccgcccaggacgtgaaggaggtgatcgagtacgccagactgagaggcatcagagtgctggccgagttcgacacccccggccacaccctgagctggggccccggcatccccggcctgctgaccccctgctacagcggcagcgagcccagcggcaccttcggccccgtgaaccccagcctgaacaacacctacgagttcatgagcaccttcttcctggaggtgagcagcgtgttccccgacttctacctgcacctgggcggcgacgaggtggacttcacctgctggaagagcaaccccgagatccaggacttcatgagaaagaagggcttcggcgaggacttcaagcagctggagagcttctacatccagaccctgctggacatcgtgagcagctacggcaagggctacgtggtgtggcaggaggtgttcgacaacaaggtgaagatccagcccgacaccatcatccaggtgtggagagaggacatccccgtgaactacatgaaggagctggagctggtgaccaaggccggcttcagagccctgctgagcgccccctggtacctgaacagaatcagctacggccccgactggaaggacttctacatcgtggagcccctggccttcgagggcacccccgagcagaaggccctggtgatcggcggcgaggcctgcatgtggggcgagtacgtggacaacaccaacctggtgcccagactgtggtag

SEQ ID NO: 84427 - DNA, 507 bp, synthetic construct
  misc_feature 1..507: note = Description of Artificial Sequence: Synthetic coding sequence
  source 1..507: mol_type = other DNA
atggcctacaacaagctgaacgtgttccactggcacctggtggacgaccccagcttcccctacgagagcttcaccttccccgagctgatgagaaagggcagctacaaccccgtgacccacatctacaccgcccaggacgtgaaggaggtgatcgagtacgccagactgagaggcatcagagtgctggccgagttcgacacccccggccacaccctgagctggggccccggcatccccggcctgctgaccccctgctacagcggcagcgagcccagcggcaccttcggccccgtgaaccccagcctgaacaacacctacgagttcatgagcaccttcttcctggaggtgagcagcgtgttccccgacttctacctgcacctgggcggcgacgaggtggacttcacctgctggaagagcaaccccgagatccaggacttcatgagaaagaagggcttcggcgaggacttcaagcagctggagagcttctacatccagacctacccctag

SEQ ID NO: 84428 - DNA, 1671 bp, synthetic construct
  misc_feature 1..1671: note = Description of Artificial Sequence: Synthetic coding sequence
  source 1..1671: mol_type = other DNA
atggagctgtgcggcctgggcctgcccagaccccccatgctgctggccctgctgctggccaccctgctggccgccatgctggccctgctgacccaggtggccctggtggtgcaggtggccgaggccgccagagcccccagcgtgagcgccaagcccggccccgccctgtggcccctgcccctgctggtgaagatgacccccaacctgctgcacctggcccccgagaacttctacatcagccacagccccaacagcaccgccggccccagctgcaccctgctggaggaggccttcagaagataccacggctacatcttcggcttctacaagtggcaccacgagcccgccgagttccaggccaagacccaggtgcagcagctgctggtgagcatcaccctgcagagcgagtgcgacgccttccccaacatcagcagcgacgagagctacaccctgctggtgaaggagcccgtggccgtgctgaaggccaacagagtgtggggcgccctgagaggcctggagaccttcagccagctggtgtaccaggacagctacggcaccttcaccatcaacgagagcaccatcatcgacagccccagattcagccacagaggcatcctgatcgacaccagcagacactacctgcccgtgaagatcatcctgaagaccctggacgccatggccttcaacaagttcaacgtgctgcactggcacatcgtggacgaccagagcttcccctaccagagcatcaccttccccgagctgagcaacaagggcagctacagcctgagccacgtgtacacccccaacgacgtgagaatggtgatcgagtacgccagactgagaggcatcagagtgctgcccgagttcgacacccccggccacaccctgagctggggcaagggccagaaggacctgctgaccccctgctacagcagacagaacaagctggacagcttcggccccatcaaccccaccctgaacaccacctacagcttcctgaccaccttcttcaaggagatcagcgaggtgttccccgaccagttcatccacctgggcggcgacgaggtggagttcaagtgctgggagagcaaccccaagatccaggacttcatgagacagaagggcttcggcaccgacttcaagaagctggagagcttctacatccagaaggtgctggacatcatcgccaccatcaacaagggcagcatcgtgtggcaggaggtgttcgacgacaaggccaagctggcccccggcaccatcgtggaggtgtggaaggacagcgcctaccccgaggagctgagcagagtgaccgccagcggcttccccgtgatcctgagcgccccctggtacctggacctgatcagctacggccaggactggagaaagtactacaaggtggagcccctggacttcggcggcacccagaagcagaagcagctgttcatcggcggcgaggcctgcctgtggggcgagtacgtggacgccaccaacctgacccccagactgtggcccagagccagcgccgtgggcgagagactgtggagcagcaaggacgtgagagacatggacgacgcctacgacagactgaccagacacagatgcagaatggtggagagaggcatcgccgcccagcccctgtacgccggctactgcaaccacgagaacatgtag

SEQ ID NO: 84429 - DNA, 996 bp, synthetic construct
  misc_feature 1..996: note = Description of Artificial Sequence: Synthetic coding sequence
  source 1..996: mol_type = other DNA
atggccttcaacaagttcaacgtgctgcactggcacatcgtggacgaccagagcttcccctaccagagcatcaccttccccgagctgagcaacaagggcagctacagcctgagccacgtgtacacccccaacgacgtgagaatggtgatcgagtacgccagactgagaggcatcagagtgctgcccgagttcgacacccccggccacaccctgagctggggcaagggccagaaggacctgctgaccccctgctacagcagacagaacaagctggacagcttcggccccatcaaccccaccctgaacaccacctacagcttcctgaccaccttcttcaaggagatcagcgaggtgttccccgaccagttcatccacctgggcggcgacgaggtggagttcaagtgctgggagagcaaccccaagatccaggacttcatgagacagaagggcttcggcaccgacttcaagaagctggagagcttctacatccagaaggtgctggacatcatcgccaccatcaacaagggcagcatcgtgtggcaggaggtgttcgacgacaaggccaagctggcccccggcaccatcgtggaggtgtggaaggacagcgcctaccccgaggagctgagcagagtgaccgccagcggcttccccgtgatcctgagcgccccctggtacctggacctgatcagctacggccaggactggagaaagtactacaaggtggagcccctggacttcggcggcacccagaagcagaagcagctgttcatcggcggcgaggcctgcctgtggggcgagtacgtggacgccaccaacctgacccccagactgtggcccagagccagcgccgtgggcgagagactgtggagcagcaaggacgtgagagacatggacgacgcctacgacagactgaccagacacagatgcagaatggtggagagaggcatcgccgcccagcccctgtacgccggctactgcaaccacgagaacatgtag

SEQ ID NO: 84430 - DNA, 2376 bp, synthetic construct
  misc_feature 1..2376: note = Description of Artificial Sequence: Synthetic coding sequence
  source 1..2376: mol_type = other DNA
atgtggaacatgctgatcgtggccatgtgcctggccctgctgggctgcctgcaggcccaggagctgcagggccacgtgagcatcatcctgctgggcgccaccggcgacctggccaagaagtacctgtggcagggcctgttccagctgtacctggacgaggccggcagaggccacagcttcagcttccacggcgccgccctgaccgcccccaagcagggccaggagctgatggccaaggccctggagagcctgagctgccccaaggacatggcccccagccactgcgccgagcacaaggaccagttcctgcagctgagccagtacagacagctgaagaccgccgaggactaccaggccctgaacaaggacatcgaggcccagctgcagcacgccggcctgagagaggccggcagaatcttctacttcagcgtgccccccttcgcctacgaggacatcgccagaaacatcaacagcagctgcagacccggccccggcgcctggctgagagtggtgctggagaagcccttcggccacgaccacttcagcgcccagcagctggccaccgagctgggcaccttcttccaggaggaggagatgtacagagtggaccactacctgggcaagcaggccgtggcccagatcctgcccttcagagaccagaacagaaaggccctggacggcctgtggaacagacaccacgtggagagagtggagatcatcatgaaggagaccgtggacgccgagggcagaaccagcttctacgaggagtacggcgtgatcagagacgtgctgcagaaccacctgaccgaggtgctgaccctggtggccatggagctgccccacaacgtgagcagcgccgaggccgtgctgagacacaagctgcaggtgttccaggccctgagaggcctgcagagaggcagcgccgtggtgggccagtaccagagctacagcgagcaggtgagaagagagctgcagaagcccgacagcttccacagcctgacccccaccttcgccgccgtgctggtgcacatcgacaacctgagatgggagggcgtgcccttcatcctgatgagcggcaaggccctggacgagagagtgggctacgccagaatcctgttcaagaaccaggcctgctgcgtgcagagcgagaagcactgggccgccgcccagagccagtgcctgcccagacagctggtgttccacatcggccacggcgacctgggcagccccgccgtgctggtgagcagaaacctgttcagacccagcctgcccagcagctggaaggagatggagggcccccccggcctgagactgttcggcagccccctgagcgactactacgcctacagccccgtgagagagagagacgcccacagcgtgctgctgagccacatcttccacggcagaaagaacttcttcatcaccaccgagaacctgctggccagctggaacttctggacccccctgctggagagcctggcccacaaggcccccagactgtaccccggcggcgccgagaacggcagactgctggacttcgagttcagcagcggcagactgttcttcagccagcagcagcccgagcagctggtgcccggccccggccccgcccccatgcccagcgacttccaggtgctgagagccaagtacagagagagccccctggtgagcgcctggagcgaggagctgatcagcaagctggccaacgacatcgaggccaccgccgtgagagccgtgagaagattcggccagttccacctggccctgagcggcggcagcagccccgtggccctgttccagcagctggccaccgcccactacggcttcccctgggcccacacccacctgtggctggtggacgagagatgcgtgcccctgagcgaccccgagagcaacttccagggcctgcaggcccacctgctgcagcacgtgagaatcccctactacaacatccaccccatgcccgtgcacctgcagcagagactgtgcgccgaggaggaccagggcgcccagatctacgccagagagatcagcgccctggtggccaacagcagcttcgacctggtgctgctgggcatgggcgccgacggccacaccgccagcctgttcccccagagccccaccggcctggacggcgagcagctggtggtgctgaccaccagccccagccagccccacagaagaatgagcctgagcctgcccctgatcaacagagccaagaaggtggccgtgctggtgatgggcagaatgaagagagagatcaccaccctggtgagcagagtgggccacgagcccaagaagtggcccatcagcggcgtgctgccccacagcggccagctggtgtggtacatggactacgacgccttcctgggctag

SEQ ID NO: 84431 - DNA, 1968 bp, synthetic construct
  misc_feature 1..1968: note = Description of Artificial Sequence: Synthetic coding sequence
  source 1..1968: mol_type = other DNA
atgggcagatgggcctgggtgcccagcccctggcccccccccggcctgggccccttcctgctgctgctgctgctgctgctgctgctgcccagaggcttccagccccagcccggcggcaacagaaccgagagccccgagcccaacgccaccgccacccccgccatccccaccatcctggtgaccagcgtgaccagcgagacccccgccaccagcgcccccgaggccgagggcccccagagcggcggcctgccccccccccccagagccgtgcccagcagcagcagcccccaggcccaggccctgaccgaggacggcagaccctgcagattccccttcagatacggcggcagaatgctgcacgcctgcaccagcgagggcagcgcccacagaaagtggtgcgccaccacccacaactacgacagagacagagcctggggctactgcgtggaggccacccccccccccggcggccccgccgccctggacccctgcgccagcggcccctgcctgaacggcggcagctgcagcaacacccaggacccccagagctaccactgcagctgccccagagccttcaccggcaaggactgcggcaccgagaagtgcttcgacgagaccagatacgagtacctggagggcggcgacagatgggccagagtgagacagggccacgtggagcagtgcgagtgcttcggcggcagaacctggtgcgagggcaccagacacaccgcctgcctgagcagcccctgcctgaacggcggcacctgccacctgatcgtggccaccggcaccaccgtgtgcgcctgcccccccggcttcgccggcagactgtgcaacatcgagcccgacgagagatgcttcctgggcaacggcaccggctacagaggcgtggccagcaccagcgccagcggcctgagctgcctggcctggaacagcgacctgctgtaccaggagctgcacgtggacagcgtgggcgccgccgccctgctgggcctgggcccccacgcctactgcagaaaccccgacaacgacgagagaccctggtgctacgtggtgaaggacagcgccctgagctgggagtactgcagactggaggcctgcgagagcctgaccagagtgcagctgagccccgacctgctggccaccctgcccgagcccgccagccccggcagacaggcctgcggcagaagacacaagaagagaaccttcctgagacccagaatcatcggcggcagcagcagcctgcccggcagccacccctggctggccgccatctacatcggcgacagcttctgcgccggcagcctggtgcacacctgctgggtggtgagcgccgcccactgcttcagccacagcccccccagagacagcgtgagcgtggtgctgggccagcacttcttcaacagaaccaccgacgtgacccagaccttcggcatcgagaagtacatcccctacaccctgtacagcgtgttcaaccccagcgaccacgacctggtgctgatcagactgaagaagaagggcgacagatgcgccaccagaagccagttcgtgcagcccatctgcctgcccgagcccggcagcaccttccccgccggccacaagtgccagatcgccggctggggccacctggacgagaacgtgagcggctacagcagcagcctgagagaggccctggtgcccctggtggccgaccacaagtgcagcagccccgaggtgtacggcgccgacatcagccccaacatgctgtgcgccggctacttcgactgcaagagcgacgcctgccagggcgacagcggcggccccctggcctgcgagaagaacggcgtggcctacctgtacggcatcatcagctggggcgacggctgcggcagactgcacaagcccggcgtgtacaccagagtggccaactacgtggactggatcaacgacagaatcagaccccccagaagactggtggcccccagctag

SEQ ID NO: 84432 - DNA, 3807 bp, synthetic construct
  misc_feature 1..3807: note = Description of Artificial Sequence: Synthetic coding sequence
  source 1..3807: mol_type = other DNA
atgagcagcgtggccgtgctgacccaggagagcttcgccgagcacagaagcggcctggtgccccagcagatcaaggtggccaccctgaacagcgaggaggagagcgacccccccacctacaaggacgccttcccccccctgcccgagaaggccgcctgcctggagagcgcccaggagcccagcggcgcctggggcaacaagatcagacccatcaaggccagcgtgatcacccaggtgttccacgtgcccctggaggagagaaagtacaaggacatgaaccagttcggcgagggcgagcaggccaagatctgcctggagatcatgcagagaaccggcgcccacctggagctgagcctggccaaggaccagggcctgagcatcatggtgagcggcaagctggacgccgtgatgaaggccagaaaggacatcgtggccagactgcagacccaggccagcgccaccgtggccatccccaaggagcaccacagattcgtgatcggcaagaacggcgagaagctgcaggacctggagctgaagaccgccaccaagatccagatccccagacccgacgaccccagcaaccagatcaagatcaccggcaccaaggagggcatcgagaaggccagacacgaggtgctgctgatcagcgccgagcaggacaagagagccgtggagagactggaggtggagaaggccttccaccccttcatcgccggcccctacaacagactggtgggcgagatcatgcaggagaccggcaccagaatcaacatccccccccccagcgtgaacagaaccgagatcgtgttcaccggcgagaaggagcagctggcccaggccgtggccagaatcaagaagatctacgaggagaagaagaagaagaccaccaccatcgccgtggaggtgaagaagagccagcacaagtacgtgatcggccccaagggcaacagcctgcaggagatcctggagagaaccggcgtgagcgtggagatcccccccagcgacagcatcagcgagaccgtgatcctgagaggcgagcccgagaagctgggccaggccctgaccgaggtgtacgccaaggccaacagcttcaccgtgagcagcgtggccgcccccagctggctgcacagattcatcatcggcaagaagggccagaacctggccaagatcacccagcagatgcccaaggtgcacatcgagttcaccgagggcgaggacaagatcaccctggagggccccaccgaggacgtgaacgtggcccaggagcagatcgagggcatggtgaaggacctgatcaacagaatggactacgtggagatcaacatcgaccacaagttccacagacacctgatcggcaagagcggcgccaacatcaacagaatcaaggaccagtacaaggtgagcgtgagaatcccccccgacagcgagaagagcaacctgatcagaatcgagggcgacccccagggcgtgcagcaggccaagagagagctgctggagctggccagcagaatggagaacgagagaaccaaggacctgatcatcgagcagagattccacagaaccatcatcggccagaagggcgagagaatcagagagatcagagacaagttccccgaggtgatcatcaacttccccgaccccgcccagaagagcgacatcgtgcagctgagaggccccaagaacgaggtggagaagtgcaccaagtacatgcagaagatggtggccgacctggtggagaacagctacagcatcagcgtgcccatcttcaagcagttccacaagaacatcatcggcaagggcggcgccaacatcaagaagatcagagaggagagcaacaccaagatcgacctgcccgccgagaacagcaacagcgagaccatcatcatcaccggcaagagagccaactgcgaggccgccagaagcagaatcctgagcatccagaaggacctggccaacatcgccgaggtggaggtgagcatccccgccaagctgcacaacagcctgatcggcaccaagggcagactgatcagaagcatcatggaggagtgcggcggcgtgcacatccacttccccgtggagggcagcggcagcgacaccgtggtgatcagaggccccagcagcgacgtggagaaggccaagaagcagctgctgcacctggccgaggagaagcagaccaagagcttcaccgtggacatcagagccaagcccgagtaccacaagttcctgatcggcaagggcggcggcaagatcagaaaggtgagagacagcaccggcgccagagtgatcttccccgccgccgaggacaaggaccaggacctgatcaccatcatcggcaaggaggacgccgtgagagaggcccagaaggagctggaggccctgatccagaacctggacaacgtggtggaggacagcatgctggtggaccccaagcaccacagacacttcgtgatcagaagaggccaggtgctgagagagatcgccgaggagtacggcggcgtgatggtgagcttccccagaagcggcacccagagcgacaaggtgaccctgaagggcgccaaggactgcgtggaggccgccaagaagagaatccaggagatcatcgaggacctggaggcccaggtgaccctggagtgcgccatcccccagaagttccacagaagcgtgatgggccccaagggcagcagaatccagcagatcaccagagacttcagcgtgcagatcaagttccccgacagagaggagaacgccgtgcacagcaccgagcccgtggtgcaggagaacggcgacgaggccggcgagggcagagaggccaaggactgcgaccccggcagccccagaagatgcgacatcatcatcatcagcggcagaaaggagaagtgcgaggccgccaaggaggccctggaggccctggtgcccgtgaccatcgaggtggaggtgcccttcgacctgcacagatacgtgatcggccagaagggcagcggcatcagaaagatgatggacgagttcgaggtgaacatccacgtgcccgcccccgagctgcagagcgacatcatcgccatcaccggcctggccgccaacctggacagagccaaggccggcctgctggagagagtgaaggagctgcaggccgagcaggaggacagagccctgagaagcttcaagctgagcgtgaccgtggaccccaagtaccaccccaagatcatcggcagaaagggcgccgtgatcacccagatcagactggagcacgacgtgaacatccagttccccgacaaggacgacggcaaccagccccaggaccagatcaccatcaccggctacgagaagaacaccgaggccgccagagacgccatcctgagaatcgtgggcgagctggagcagatggtgagcgaggacgtgcccctggaccacagagtgcacgccagaatcatcggcgccagaggcaaggccatcagaaagatcatggacgagttcaaggtggacatcagattcccccagagcggcgcccccgaccccaactgcgtgaccgtgaccggcctgcccgagaacgtggaggaggccatcgaccacatcctgaacctggaggaggagtacctggccgacgtggtggacagcgaggccctgcaggtgtacatgaagccccccgcccacgaggaggccaaggcccccagcagaggcttcgtggtgagagacgccccctggaccgccagcagcagcgagaaggcccccgacatgagcagcagcgaggagttccccagcttcggcgcccaggtggcccccaagaccctgccctggggccccaagagatag

SEQ ID NO: 84433 - DNA, 3807 bp, synthetic construct; identical to SEQ ID NO: 84432
  misc_feature 1..3807: note = Description of Artificial Sequence: Synthetic coding sequence
  source 1..3807: mol_type = other DNA

SEQ ID NO: 84434 - DNA, 3807 bp, synthetic construct; identical to SEQ ID NO: 84432
  misc_feature 1..3807: note = Description of Artificial Sequence: Synthetic coding sequence
  source 1..3807: mol_type = other DNA

SEQ ID NO: 84435 - DNA, 249 bp, synthetic construct
  misc_feature 1..249: note = Description of Artificial Sequence: Synthetic coding sequence
  source 1..249: mol_type = other DNA
atgagcagcgtggccgtgctgacccaggagagcttcgccgagcacagaagcggcctggtgccccagcagatcaaggtggccaccctgaacagcgaggaggagagcgacccccccacctacaaggacgccttcccccccctgcccgagaaggccgcctgcctggagagcgcccaggagcccagcggcgcctggggcaacaagatcagacccatcaaggccagcgtgatcacccaggtgttccacgtgtag

SEQ ID NO: 84436 - DNA, 45 bp, synthetic construct
  misc_feature 1..45: note = Description of Artificial Sequence: Synthetic coding sequence
  source 1..45: mol_type = other DNA
atgagcagcgtggccgtgctgacccaggagagcttcgccgagtag

SEQ ID NO: 84437 - DNA, 210 bp, synthetic construct
  misc_feature 1..210: note = Description of Artificial Sequence: Synthetic coding sequence
  source 1..210: mol_type = other DNA
atgagcagcgtggccgtgctgacccaggagagcttcgccgagcacagaagcggcctggtgccccagcagatcaaggtggccaccctgaacagcgaggaggagagcgacccccccacctacaaggacgccttcccccccctgcccgagaaggccgcctgcctggagagcgcccaggagcccagcggcgcctggggcaacaagatcagatag

SEQ ID NO: 84438 - DNA, 165 bp, synthetic construct
  misc_feature 1..165: note = Description of Artificial Sequence: Synthetic coding sequence
  source 1..165: mol_type = other DNA
atgagcagcgtggccgtgctgacccaggagagcttcgccgagcacagaagcggcctggtgccccagcagatcaaggtggccaccctgaacagcgaggaggagagcgacccccccacctacaaggacgccttcccccccctgcccgagaaggccgcctgcctgtag

SEQ ID NO: 84439 - DNA, 675 bp, synthetic construct
  misc_feature 1..675: note = Description of Artificial Sequence: Synthetic coding sequence
  source 1..675: mol_type = other DNA
atgagcagcgtggccgtgctgacccaggagagcttcgccgagcacagaagcggcctggtgccccagcagatcaaggtggccaccctgaacagcgaggaggagagcgacccccccacctacaaggacgccttcccccccctgcccgagaaggccgcctgcctggagagcgcccaggagcccagcggcgcctggggcaacaagatcagacccatcaaggccagcgtgatcacccaggtgttccacgtgcccctggaggagagaaagtacaaggacatgaaccagttcggcgagggcgagcaggccaagatctgcctggagatcatgcagagaaccggcgcccacctggagctgagcctggccaaggaccagggcctgagcatcatggtgagcggcaagctggacgccgtgatgaaggccagaaaggacatcgtggccagactgcagacccaggccagcgccaccgtggccatccccaaggagcaccacagattcgtgatcggcaagaacggcgagaagctgcaggacctggagctgaagaccgccaccaagatccagatccccagacccgacgaccccagcaaccagatcaagatcaccggcaccaaggagggcatcgagaaggccagacacgaggtgctgctgatcagcgccgagcaggacaagagagccgtgtag

SEQ ID NO: 84440 - DNA, 246 bp, synthetic construct
  misc_feature 1..246: note = Description of Artificial Sequence: Synthetic coding sequence
  source 1..246: mol_type = other DNA
atgagcagcgtggccgtgctgacccaggagagcttcgccgagcacagaagcggcctggtgccccagcagatcaaggtggccaccctgaacagcgaggaggagagcgacccccccacctacaaggacgccttcccccccctgcccgagaaggccgcctgcctggagagcgcccaggagcccagcggcgcctggggcaacaagatcagacccatcaaggccagcgtgatcacccaggtgttccactag

SEQ ID NO: 84441 - DNA, 240 bp, synthetic construct
  misc_feature 1..240: note = Description of Artificial Sequence: Synthetic coding sequence
  source 1..240: mol_type = other DNA
atgagcagcgtggccgtgctgacccaggagagcttcgccgagcacagaagcggcctggtgccccagcagatcaaggtggccaccctgaacagcgaggaggagagcgacccccccacctacaaggacgccttcccccccctgcccgagaaggccgcctgcctggagagcgcccaggagcccagcggcgcctggggcaacaagatcagacccatcaaggccagcgtgatcacccaggtgtag

SEQ ID NO: 84442 - DNA, 291 bp, synthetic construct
  misc_feature 1..291: note = Description of Artificial Sequence: Synthetic coding sequence
  source 1..291: mol_type = other DNA
atgagcagcgtggccgtgctgacccaggagagcttcgccgagcacagaagcggcctggtgccccagcagatcaaggtggccaccctgaacagcgaggaggagagcgacccccccacctacaaggacgccttcccccccctgcccgagaaggccgcctgcctggagagcgcccaggagcccagcggcgcctggggcaacaagatcagacccatcaaggccagcgtgatcacccaggtgttccacgtgcccctggaggagagaaagtacaaggacatgaaccagttcggctag

SEQ ID NO: 84443 - DNA, 60 bp, synthetic construct
  misc_feature 1..60: note = Description of Artificial Sequence: Synthetic coding sequence
  source 1..60: mol_type = other DNA
atgagcagcgtggccgtgctgacccaggagagcttcgccgagcacagaagcggcctgtag

SEQ ID NO: 84444 - DNA, 3708 bp, synthetic construct
  misc_feature 1..3708: note = Description of Artificial Sequence: Synthetic coding sequence
  source 1..3708: mol_type = other DNA
atgcacctggccgagagagacagatggctgttcgtggccaccgtgatgatgcacttcgtgagcatcaagagcggcttccccggcctgtgcgtgggcgtgagaagcaccatgagcagcgtggccgtgctgacccaggagagcttcgccgagcacagaagcggcctggtgccccagcagatcaaggtggccaccctgaacagcgaggaggagagcgacccccccacctacaaggacgccttcccccccctgcccgagaaggccgcctgcctggagagcgcccaggagcccagcggcgcctggggcaacaagatcagacccatcaaggccagcgtgatcacccaggtgttccacgtgcccctggaggagagaaagtacaaggacatgaaccagttcggcgagggcgagcaggccaagatctgcctggagatcatgcagagaaccggcgcccacctggagctgagcctggccaaggaccagggcctgagcatcatggtgagcggcaagctggacgccgtgatgaaggccagaaaggacatcgtggccagactgcagacccaggccagcgccaccgtggccatccccaaggagcaccacagattcgtgatcggcaagaacggcgagaagctgcaggacctggagctgaagaccgccaccaagatccagatccccagacccgacgaccccagcaaccagatcaagatcaccggcaccaaggagggcatcgagaaggccagacacgaggtgctgctgatcagcgccgagcaggacaagagagccgtggagagactggaggtggagaaggccttccaccccttcatcgccggcccctacaacagactggtgggcgagatcatgcaggagaccggcaccagaatcaacatccccccccccagcgtgaacagaaccgagatcgtgttcaccggcgagaaggagcagctggcccaggccgtggccagaatcaagaagatctacgaggagaaggccaacagcttcaccgtgagcagcgtggccgcccccagctggctgcacagattcatcatcggcaagaagggccagaacctggccaagatcacccagcagatgcccaaggtgcacatcgagttcaccgagggcgaggacaagatcaccctggagggccccaccgaggacgtgaacgtggcccaggagcagatcgagggcatggtgaaggacctgatcaacagaatggactacgtggagatcaacatcgaccacaagttccacagacacctgatcggcaagagcggcgccaacatcaacagaatcaaggaccagtacaaggtgagcgtgagaatcccccccgacagcgagaagagcaacctgatcagaatcgagggcgacccccagggcgtgcagcaggccaagagagagctgctggagctggccagcagaatggagaacgagagaaccaaggacctgatcatcgagcagagattccacagaaccatcatcggccagaagggcgagagaatcagagagatcagagacaagttccccgaggtgatcatcaacttccccgaccccgcccagaagagcgacatcgtgcagctgagaggccccaagaacgaggtggagaagtgcaccaagtacatgcagaagatggtggccgacctggtggagaacagctacagcatcagcgtgcccatcttcaagcagttccacaagaacatcatcggcaagggcggcgccaacatcaagaagatcagagaggagagcaacaccaagatcgacctgcccgccgagaacagcaacagcgagaccatcatcatcaccggcaagagagccaactgcgaggccgccagaagcagaatcctgagcatccagaaggacctggccaacatcgccgaggtggaggtgagcatccccgccaagctgcacaacagcctgatcggcaccaagggcagactgatcagaagcatcatggaggagtgcggcggcgtgcacatccacttccccgtggagggcagcggcagcgacaccgtggtgatcagaggccccagcagcgacgtggagaaggccaagaagcagctgctgcacctggccgaggagaagcagaccaagagcttcaccgtggacatcagagccaagcccgagtaccacaagttcctgatcggcaagggcggcggcaagatcagaaaggtgagagacagcaccggcgccagagtgatcttccccgccgccgaggacaaggaccaggacctgatcaccatcatcggcaaggaggacgccgtgagagaggcccagaaggagctggaggccctgatccagaacctggacaacgtggtggaggacagcatgctggtggaccccaagcaccacagacacttcgtgatcagaagaggccaggtgctgagagagatcgccgaggagtacggcggcgtgatggtgagcttccccagaagcggcacccagagcgacaaggtgaccctgaagggcgccaaggactgcgtggaggccgccaagaagagaatccaggagatcatcgaggacctggaggcccaggtgaccctggagtgcgccatcccccagaagttccacagaagcgtgatgggccccaagggcagcagaatccagcagatcaccagagacttcagcgtgcagatcaagttccccgacagagaggagaacgccgtgcacagcaccgagcccgtggtgcaggagaacggcgacgaggccggcgagggcagagaggccaaggactgcgaccccggcagccccagaagatgcgacatcatcatcatcagcggcagaaaggagaagtgcgaggccgccaaggaggccctggaggccctggtgcccgtgaccatcgaggtggaggtgcccttcgacctgcacagatacgtgatcggccagaagggcagcggcatcagaaagatgatggacgagttcgaggtgaacatccacgtgcccgcccccgagctgcagagcgacatcatcgccatcaccggcctggccgccaacctggacagagccaaggccggcctgctggagagagtgaaggagctgcaggccgagcaggaggacagagccctgagaagcttcaagctgagcgtgaccgtggaccccaagtaccaccccaagatcatcggcagaaagggcgccgtgatcacccagatcagactggagcacgacgtgaacatccagttccccgacaaggacgacggcaaccagccccaggaccagatcaccatcaccggctacgagaagaacaccgaggccgccagagacgccatcctgagaatcgtgggcgagctggagcagatggtgagcgaggacgtgcccctggaccacagagtgcacgccagaatcatcggcgccagaggcaaggccatcagaaagatcatggacgagttcaaggtggacatcagattcccccagagcggcgcccccgaccccaactgcgtgaccgtgaccggcctgcccgagaacgtggaggaggccatcgaccacatcctgaacctggaggaggagtacctggccgacgtggtggacagcgaggccctgcaggtgtacatgaagccccccgcccacgaggaggccaaggcccccagcagaggcttcgtggtgagagacgccccctggaccgccagcagcagcgagaaggcccccgacatgagcagcagcgaggagttccccagcttcggcgcccaggtggcccccaagaccctgccctggggccccaagagatag

SEQ ID NO: 84445 - DNA, 666 bp, synthetic construct
  misc_feature 1..666: note = Description of Artificial Sequence: Synthetic coding sequence
  source 1..666: mol_type = other DNA
atgagcagcgtggccgtgctgacccaggagagcttcgccgagcacagaagcggcctggtgccccagcagatcaaggtggccaccctgaacagcgaggaggagagcgacccccccacctacaaggacgccttcccccccctgcccgagaaggccgcctgcctggagagcgcccaggagcccagcggcgcctggggcaacaagatcagacccatcaaggccagcgtgatcacccaggtgttccacgtgcccctggaggagagaaagtacaaggacatgaaccagttcggcgagggcgagcaggccaagatctgcctggagatcatgcagagaaccggcgcccacctggagctgagcctggccaaggaccagggcctgagcatcatggtgagcggcaagctggacgccgtgatgaaggccagaaaggacatcgtggccagactgcagacccaggccagcgccaccgtggccatccccaaggagcaccacagattcgtgatcggcaagaacggcgagaagctgcaggacctggagctgaagaccgccaccaagatccagatccccagacccgacgaccccagcaaccagatcaagatcaccggcaccaaggagggcatcgagaaggccagacacgaggtgctgctgatcagcgccgagcaggacaagtag

SEQ ID NO: 84446 - DNA, 426 bp, synthetic construct
  misc_feature 1..426: note = Description of Artificial Sequence: Synthetic coding sequence
  source 1..426: mol_type = other DNA
atgagcagcgtggccgtgctgacccaggagagcttcgccgagcacagaagcggcctggtgccccagcagatcaaggtggccaccctgaacagcgaggaggagagcgacccccccacctacaaggacgccttcccccccctgcccgagaaggccgcctgcctggagagcgcccaggagcccagcggcgcctggggcaacaagatcagacccatcaaggccagcgtgatcacccaggtgttccacgtgcccctggaggagagaaagtacaaggacatgaaccagttcggcgagggcgagcaggccaagatctgcctggagatcatgcagagaaccggcgcccacctggagctgagcctggccaaggaccagggcctgagcatcatggtgagcggcaagctggacgccgtgatgaaggccagaaagtag

SEQ ID NO: 84447 - DNA, 381 bp, synthetic construct
  misc_feature 1..381: note = Description of Artificial Sequence: Synthetic coding sequence
  source 1..381: mol_type = other DNA
atgagcagcgtggccgtgctgacccaggagagcttcgccgagcacagaagcggcctggtgccccagcagatcaaggtggccaccctgaacagcgaggaggagagcgacccccccacctacaaggacgccttcccccccctgcccgagaaggccgcctgcctggagagcgcccaggagcccagcggcgcctggggcaacaagatcagacccatcaaggccagcgtgatcacccaggtgttccacgtgcccctggaggagagaaagtacaaggacatgaaccagttcggcgagggcgagcaggccaagatctgcctggagatcatgcagagaaccggcgcccacctggagctgagcctggccaaggaccagggcctgagctag

SEQ ID NO: 84448 - DNA, 444 bp, synthetic construct
  misc_feature 1..444: note = Description of Artificial Sequence: Synthetic coding sequence
  source 1..444: mol_type = other DNA
atgagcagcgtggccgtgctgacccaggagagcttcgccgagcacagaagcggcctggtgccccagcagatcaaggtggccaccctgaacagcgaggaggagagcgacccccccacctacaaggacgccttcccccccctgcccgagaaggccgcctgcctggagagcgcccaggagcccagcggcgcctggggcaacaagatcagacccatcaaggccagcgtgatcacccaggtgttccacgtgcccctggaggagagaaagtacaaggacatgaaccagttcggcgagggcgagcaggccaagatctgcctggagatcatgcagagaaccggcgcccacctggagctgagcctggccaaggaccagggcctgagcatcatggtgagcggcaagctggacgccgtgatgaaggccagaaaggacatcgtggccagactgtag

SEQ ID NO: 84449 - DNA, 54 bp, synthetic construct
  misc_feature 1..54: note = Description of Artificial Sequence: Synthetic coding sequence
  source 1..54: mol_type = other DNA
atgagcagcgtggccgtgctgacccaggagagcttcgccgagcacagaagctag

SEQ ID NO: 84450 - DNA, 495 bp, synthetic construct
  misc_feature 1..495: note = Description of Artificial Sequence: Synthetic coding sequence
  source 1..495: mol_type = other DNA
atgagcagcgtggccgtgctgacccaggagagcttcgccgagcacagaagcggcctggtgccccagcagatcaaggtggccaccctgaacagcgaggaggagagcgacccccccacctacaaggacgccttcccccccctgcccgagaaggccgcctgcctggagagcgcccaggagcccagcggcgcctggggcaacaagatcagacccatcaaggccagcgtgatcacccaggtgttccacgtgcccctggaggagagaaagtacaaggacatgaaccagttcggcgagggcgagcaggccaagatctgcctggagatcatgcagagaaccggcgcccacctggagctgagcctggccaaggaccagggcctgagcatcatggtgagcggcaagctggacgccgtgatgaaggccagaaaggacatcgtggccagactgcagacccaggccagcgccaccgtggccatccccaaggagcaccacagattctag

SEQ ID NO: 84451 - DNA, 144 bp, synthetic construct
  misc_feature 1..144: note = Description of Artificial Sequence: Synthetic coding sequence
  source 1..144: mol_type = other DNA
atgagcagcgtggccgtgctgacccaggagagcttcgccgagcacagaagcggcctggtgccccagcagatcaaggtggccaccctgaacagcgaggaggagagcgacccccccacctacaaggacgccttcccccccctgtag

SEQ ID NO: 84452 - DNA, 1044 bp, synthetic construct
  misc_feature 1..1044: note = Description of Artificial Sequence: Synthetic coding sequence
  source 1..1044: mol_type = other DNA
atggagaacctgatgaccagcagcaccctgccccccctgttcgccgacgaggacggcagcaaggagagcaacgacctggccaccaccggcctgaaccaccccgaggtgccctacagcagcggcgccaccagcagcaccaacaaccccgagttcgtggaggacctgagccagggccagctgctgcagagcgagagcagcaacgccgccgagggcaacgagcagagacacgaggacgagcagagaagcaagagaggcggctggagcaagggcagaaagagaaagaagcccctgagagacagcaacgcccccaagagccccctgaccggctacgtgagattcatgaacgagagaagagagcagctgagagccaagagacccgaggtgcccttccccgagatcaccagaatgctgggcaacgagtggagcaagctgccccccgaggagaagcagagatacctggacgaggccgacagagacaaggagagatacatgaaggagctggagcagtaccagaagaccgaggcctacaaggtgttcagcagaaagacccaggacagacagaagggcaagagccacagacaggacgccgccagacaggccacccacgaccacgagaaggagaccgaggtgaaggagagaagcgtgttcgacatccccatcttcaccgaggagttcctgaaccacagcaaggccagagaggccgagctgagacagctgagaaagagcaacatggagttcgaggagagaaacgccgccctgcagaagcacgtggagagcatgagaaccgccgtggagaagctggaggtggacgtgatccaggagagaagcagaaacaccgtgctgcagcagcacctggagaccctgagacaggtgctgaccagcagcttcgccagcatgcccctgcccggcagcggcgagacccccaccgtggacaccatcgacagctacatgaacagactgcacagcatcatcctggccaacccccaggacaacgagaacttcatcgccaccgtgagagaggtggtgaacagactggacagatag

SEQ ID NO: 84453 - DNA, 1044 bp, synthetic construct; identical to SEQ ID NO: 84452
  misc_feature 1..1044: note = Description of Artificial Sequence: Synthetic coding sequence
  source 1..1044: mol_type = other DNA

SEQ ID NO: 84454 - DNA, 471 bp, synthetic construct
  misc_feature 1..471: note = Description of Artificial Sequence: Synthetic coding sequence
  source 1..471: mol_type = other DNA
atggagaacctgatgaccagcagcaccctgccccccctgttcgccgacgaggacggcagcaaggagagcaacgacctggccaccaccggcctgaaccaccccgaggtgccctacagcagcggcgccaccagcagcaccaacaaccccgagttcgtggaggacctgagccagggccagctgctgcagagcgagagcagcaacgccgccgagggcaacgagcagagacacgaggacgagcagagaagcaagagaggcggctggagcaagggcagaaagagaaagaagcccctgagagacagcaacgcccccaagagccccctgaccggctacgtgagattcatgaacgagagaagagagcagctgagagccaagagacccgaggtgcccttccccgagatcaccagaatgctgggcaacgagtggagcaagctgccccccgaggagaagcagagatacctggacgaggcctag

SEQ ID NO: 84455 - DNA, 303 bp, synthetic construct
  misc_feature 1..303: note = Description of Artificial Sequence: Synthetic coding sequence
  source 1..303: mol_type = other DNA
atggagaacctgatgaccagcagcaccctgccccccctgttcgccgacgaggacggcagcaaggagagcaacgacctggccaccaccggcctgaaccaccccgaggtgccctacagcagcggcgccaccagcagcaccaacaaccccgagttcgtggaggacctgagccagggccagctgctgcagagcgagagcagcaacgccgccgagggcaacgagcagagacacgaggacgagcagagaagcaagagaggcggctggagcaagggcagaaagagaaagaagcccctgagagacagctag

SEQ ID NO: 84456 - DNA, 489 bp, synthetic construct
  misc_feature 1..489: note = Description of Artificial Sequence: Synthetic coding sequence
  source 1..489: mol_type = other DNA
atggagaacctgatgaccagcagcaccctgccccccctgttcgccgacgaggacggcagcaaggagagcaacgacctggccaccaccggcctgaaccaccccgaggtgccctacagcagcggcgccaccagcagcaccaacaaccccgagttcgtggaggacctgagccagggccagctgctgcagagcgagagcagcaacgccgccgagggcaacgagcagagacacgaggacgagcagagaagcaagagaggcggctggagcaagggcagaaagagaaagaagcccctgagagacagcaacgcccccaagagccccctgaccggctacgtgagattcatgaacgagagaagagagcagctgagagccaagagacccgaggtgcccttccccgagatcaccagaatgctgggcaacgagtggagcaagctgccccccgaggagaagcagagatacctggacgaggccgacagagacaaggagagatag

SEQ ID NO: 84457 - DNA, 954 bp, synthetic construct
  misc_feature 1..954: note = Description of Artificial Sequence: Synthetic coding sequence
  source 1..954: mol_type = other DNA
atgagccacggccccaagcagcccggcgccgccgccgcccccgccggcggcaaggcccccggccagcacggcggcttcgtggtgaccgtgaagcaggagagaggcgagggccccagagccggcgagaagggcagccacgaggaggagcccgtgaagaagagaggctggcccaagggcaagaagagaaagaagatcctgcccaacggccccaaggcccccgtgaccggctacgtgagattcctgaacgagagaagagagcagatcagaaccagacaccccgacctgcccttccccgagatcaccaagatgctgggcgccgagtggagcaagctgcagcccaccgagaagcagagatacctggacgaggccgagagagagaagcagcagtacatgaaggagctgagagcctaccagcagagcgaggcctacaagatgtgcaccgagaagatccaggagaagaagatcaagaaggaggacagcagcagcggcctgatgaacaccctgctgaacggccacaagggcggcgactgcgacggcttcagcaccttcgacgtgcccatcttcaccgaggagttcctggaccagaacaaggccagagaggccgagctgagaagactgagaaagatgaacgtggccttcgaggagcagaacgccgtgctgcagagacacacccagagcatgagcagcgccagagagagactggagcaggagctggccctggaggagagaagaaccctggccctgcagcagcagctgcaggccgtgagacaggccctgaccgccagcttcgccagcctgcccgtgcccggcaccggcgagacccccaccctgggcaccctggacttctacatggccagactgcacggcgccatcgagagagaccccgcccagcacgagaagctgatcgtgagaatcaaggagatcctggcccaggtggccagcgagcacctgtag

SEQ ID NO: 84458 - DNA, 807 bp, synthetic construct
  misc_feature 1..807: note = Description of Artificial Sequence: Synthetic coding sequence
  source 1..807: mol_type = other DNA
atggacaccagagtgggcaccgccatggccagcccccccagcatgttccccagcagcctgaagagcagctggaccaagaccaagagagtgagaagaagcttcggcgccgaggacgagtgcggcctgagaggcgccgagagaggcaccgccgaggcccacgccgagcacgagcagagagccagagccagcggcgccggcgccggcgccggcggcgccgaggacgccggcgccgccgccgccgcccccggcagagcccccggcgcccacagacagctgagactgaccgccggcgccggccacggcagaaacgcccacgccggccacagcggcctgctgcacggccccgccagcagaagccacagagccagacccagacccgccagagaggcccacagaccccaccagggcaaccccggccccggcagacagagagcccccgtgagaagcggcagagcccacgacgccgaggagaagctgtgggccagaccctgccacaccccccccagaggcagagaggccggcggcccccccggccccggccccatcctgcacctgggcggcagcagcccccccaagatcaagttcctgcagcaccccttcagcttccagagcccccagccccccgagcccggcaagagcaccagagacacccccagaagaaccagccagcccagagtgcccctgctgggcggccagaccagatacaccggcagccccggccacccccaggacaccggccagaccaagcccacccccagcaccagacaggacccccccaactacagcctgagaggcgccgtgccctag

SEQ ID NO: 84459 - DNA, 648 bp, synthetic construct
  misc_feature 1..648: note = Description of Artificial Sequence: Synthetic coding sequence
  source 1..648: mol_type = other DNA
atgagccacggccccaagcagcccggcgccgccgccgcccccgccggcggcaaggcccccggccagcacggcggcttcgtggtgaccgtgaagcaggagagaggcgagggccccagagccggcgagaagggcagccacgaggaggagcccgtgaagaagagaggctggcccaagggcaagaagagaaagaagatcctgcccaacggccccaaggcccccgtgaccggctacgtgagattcctgaacgagagaagagagcagatcagaaccagacaccccgacctgcccttccccgagatcaccaagatgctgggcgccgagtggagcaagctgcagcccaccgagaagcagagatacctggacgaggccgagagagagaagcagcagtacatgaaggagctgagagcctaccagcagagcgaggcctacaagatgtgcaccgagaagatccaggagaagaagatcaagaaggaggacagcagcagcggcctgatgaacaccctgctgaacggccacaagggcggcgactgcgacggcttcagcaccttcgacgtgcccatcttcaccgaggagttcctggaccagaacaaggccagagaggccgagctgagaagactgagaaagatgaacgtggccttcgaggagtag

SEQ ID NO: 84460 - DNA, 429 bp, synthetic construct
  misc_feature 1..429: note = Description of Artificial Sequence: Synthetic coding sequence
  source 1..429: mol_type = other DNA
atgagccacggccccaagcagcccggcgccgccgccgcccccgccggcggcaaggcccccggccagcacggcggcttcgtggtgaccgtgaagcaggagagaggcgagggccccagagccggcgagaagggcagccacgaggaggagcccgtgaagaagagaggctggcccaagggcaagaagagaaagaagatcctgcccaacggccccaaggcccccgtgaccggctacgtgagattcctgaacgagagaagagagcagatcagaaccagacaccccgacctgcccttccccgagatcaccaagatgctgggcgccgagtggagcaagctgcagcccaccgagaagcagagatacctggacgaggccgagagagagaagcagcagtacatgaaggagctgagagcctaccagcagagcgaggcctag

SEQ ID NO: 84461 - DNA, 324 bp, synthetic construct
  misc_feature 1..324: note = Description of Artificial Sequence: Synthetic coding sequence
  source 1..324: mol_type = other DNA
atgagcgagagcagcagcaagagcagccagcccctggccagcaagcaggagaaggacggcaccgagaagagaggcagaggcagacccagaaagcagccccccgtgagccccggcaccgccctggtgggcagccagaaggagcccagcgaggtgcccacccccaagagacccagaggcagacccaagggcagcaagaacaagggcgccgccaagaccagaaagaccaccaccacccccggcagaaagcccagaggcagacccaagaagctggagaaggaggaggaggagggcatcagccaggagagcagcgaggaggagcagtag

SEQ ID NO: 84462 - DNA, 291 bp, synthetic construct
  misc_feature 1..291: note = Description of Artificial Sequence: Synthetic coding sequence
  source 1..291: mol_type = other DNA
atgagcgagagcagcagcaagagcagccagcccctggccagcaagcaggagaaggacggcaccgagaagagaggcagaggcagacccagaaagcagccccccaaggagcccagcgaggtgcccacccccaagagacccagaggcagacccaagggcagcaagaacaagggcgccgccaagaccagaaagaccaccaccacccccggcagaaagcccagaggcagacccaagaagctggagaaggaggaggaggagggcatcagccaggagagcagcgaggaggagcagtag

SEQ ID NO: 84463 - DNA, 291 bp, synthetic construct; identical to SEQ ID NO: 84462
  misc_feature 1..291: note = Description of Artificial Sequence: Synthetic coding sequence
  source 1..291: mol_type = other DNA

SEQ ID NO: 84464 - DNA, 324 bp, synthetic construct; identical to SEQ ID NO: 84461
  misc_feature 1..324: note = Description of Artificial Sequence: Synthetic coding sequence
  source 1..324: mol_type = other DNA

SEQ ID NO: 84465 - DNA, 291 bp, synthetic construct; identical to SEQ ID NO: 84462
  misc_feature 1..291: note = Description of Artificial Sequence: Synthetic coding sequence
  source 1..291: mol_type = other DNA

SEQ ID NO: 84466 - DNA, 987 bp, synthetic construct
  misc_feature 1..987: note = Description of Artificial Sequence: Synthetic coding sequence
  source 1..987: mol_type = other DNA
atgagcgagagcagcagcaagagcagccagcccctggccagcaagcaggagaaggacggcaccgagaagagaggcagaggcagacccagaaagcagccccccgtgagccccggcaccgccctggtgggcagccagaaggagcccagcgaggtgcccacccccaagagacccagaggcagacccaagggcagcaagaacaagggcgagggcggcagaggcggccacctggccggcgtgctgggcggcggcgccgtgacccacgcctgcagactgctgctgaccggcggcgccgccagcttctgggactggaccgccctgctgagaagccacagaccccaccccttccccagacccaccatcaccaccgccagcggcagacacccccacctgccccccgtgcccagccccccccactacaccgcccaccagcccctgcagggcagccacggcctgagcggcgagcagttcagccccggcctgagcagccagctgcccccccccacccacgcctacacccacgccctgctggacaaggccaacatccccctgagcagaaccctgcacctgctgagaccccacagcctgggcggcggcgacatcgccctgtgggccttcggcctgggcgcccccagcctgctgctgcactgcagcctgtggctgcccatcgtgggccccggcagagtgcccctggccctgaagggcgcccaggcccccagccaccccggcaccccctacagcaccgccctggccgccgccggcgtggccaacggcggcggctgctggccccccggcttcccccagcccaactgcctgtgccaccacgtgggcctgaccttccaccccagccccaccagcctggtgcccgtgctgggctggaccgcccccttcggctacagaaaggccggcggcgtgagccccctgctgcccctgcactgcggccacagccccctggccctgagactgggcagcgagtacatcctgtggtag

SEQ ID NO: 84467 - DNA, 291 bp, synthetic construct; identical to SEQ ID NO: 84462
  misc_feature 1..291: note = Description of Artificial Sequence: Synthetic coding sequence
  source 1..291: mol_type = other DNA

SEQ ID NO: 84468 - DNA, 324 bp, synthetic construct; identical to SEQ ID NO: 84461
  misc_feature 1..324: note = Description of Artificial Sequence: Synthetic coding sequence
  source 1..324: mol_type = other DNA

SEQ ID NO: 84469 - DNA, 321 bp, synthetic construct
  misc_feature 1..321: note = Description of Artificial Sequence: Synthetic coding sequence
  source 1..321: mol_type = other DNA
atgagcgccagaggcgagggcgccggccagcccagcaccagcgcccagggccagcccgccgcccccgccccccagaagagaggcagaggcagacccagaaagcagcagcaggagcccaccggcgagcccagccccaagagacccagaggcagacccaagggcagcaagaacaagagccccagcaaggccgcccagaagaaggccgaggccaccggcgagaagagacccagaggcagacccagaaagtgggacaacctgctgcccagaaccagcagcaagaagaagaccagcctgggcaacagcaccaagagaagccactag

SEQ ID NO: 84470 - DNA, 357 bp, synthetic construct
  misc_feature 1..357: note = Description of Artificial Sequence: Synthetic coding sequence
  source 1..357: mol_type = other DNA
atgagcgccagaggcgagggcgccggccagcccagcaccagcgcccagggccagcccgccgcccccgccccccagaagagaggcagaggcagacccagaaagcagcagcaggagcccaccggcgagcccagccccaagagacccagaggcagacccaagggcagcaagaacaagagccccagcaaggccgcccagaagaaggccgaggccaccggcgagaagagacccagaggcagacccagaaagtggccccagcaggtggtgcagaagaagcccgcccaggtgaacgtggccctgcccggcaaggaccaccccggcaacctgatctacctgctgttcagcaagaacgccacctag

SEQ ID NO: 84471 - DNA, 273 bp, synthetic construct
  misc_feature 1..273: note = Description of Artificial Sequence: Synthetic coding sequence
  source 1..273: mol_type = other DNA
atgagcgccagaggcgagggcgccggccagcccagcaccagcgcccagggccagcccgccgcccccgccccccagaagagaggcagaggcagacccagaaagcagcagcaggagcccaccggcgagcccagccccaagagacccagaggcagacccaagggcagcaagaacaagagccccagcaaggccgcccagaagaaggccgaggccaccggcgagaagagacccagaggcagacccagaaagtgggaggagttctacatcgccgcctag

SEQ ID NO: 84472 - DNA, 330 bp, synthetic construct
  misc_feature 1..330: note = Description of Artificial Sequence: Synthetic coding sequence
  source 1..330: mol_type = other DNA
atgagcgccagaggcgagggcgccggccagcccagcaccagcgcccagggccagcccgccgcccccgccccccagaagagaggcagaggcagacccagaaagcagcagcaggagcccaccggcgagcccagccccaagagacccagaggcagacccaagggcagcaagaacaagagccccagcaaggccgcccagaagaaggccgaggccaccggcgagaagagacccagaggcagacccagaaagtggccccagcaggtggtgcagaagaagcccgcccaggaggagaccgaggagaccagcagccaggagagcgccgaggaggactag

SEQ ID NO: 84473 - DNA, 279 bp, synthetic construct
  misc_feature 1..279: note = Description of Artificial Sequence: Synthetic coding sequence
  source 1..279: mol_type = other DNA
atgagcgccagaggcgagggcgccggccagcccagcaccagcgcccagggccagcccgccgcccccgccccccagaagagaggcagaggcagacccagaaagcagcagcaggagcccaccggcgagcccagccccaagagacccagaggcagacccaagggcagcaagaacaagagccccagcaaggccgcccagaagaaggccgaggccaccggcgagaagagacccagaggcagacccagaaagtggtggctgctgatgaagagcccctgctggtag

SEQ ID NO: 84474 - DNA, 312 bp, synthetic construct
  misc_feature 1..312: note = Description of Artificial Sequence: Synthetic coding sequence
  source 1..312: mol_type = other DNA
atgagcgccagaggcgagggcgccggccagcccagcaccagcgcccagggccagcccgccgcccccgccccccagaagagaggcagaggcagacccagaaagcagcagcaggagcccaccggcgagcccagccccaagagacccagaggcagacccaagggcagcaagaacaagagccccagcaaggccgcccagaagaaggccgaggccaccggcgagaagagacccagaggcagacccagaaagtggctgagagcccaggccctggacagcgacggcctgggcagcaacagcggccccagcctgagctag

SEQ ID NO: 84475 - DNA, 261 bp, synthetic construct
  misc_feature 1..261: note = Description of Artificial Sequence: Synthetic coding sequence
  source 1..261: mol_type = other DNA
atgagcgccagaggcgagggcgccggccagcccagcaccagcgcccagggccagcccgccgcccccgccccccagaagagaggcagaggcagacccagaaagcagcagcaggagcccaccggcgagcccagccccaagagacccagaggcagacccaagggcagcaagaacaagagccccagcaaggccgcccagaagaaggccgaggccaccggcgagaagagacccagaggcagacccagaaagtggctgcagaactag

SEQ ID NO: 84476 - DNA, 300 bp, synthetic construct
  misc_feature 1..300: note = Description of Artificial Sequence: Synthetic coding sequence
  source 1..300: mol_type = other DNA
atgagcgccagaggcgagggcgccggccagcccagcaccagcgcccagggccagcccgccgcccccgccccccagaagagaggcagaggcagacccagaaagcagcagcaggagcccaccggcgagcccagccccaagagacccagaggcagacccaagggcagcaagaacaagagccccagcaaggccgcccagaagaaggccgaggccaccggcgagaagagacccagaggcagacccagaaagtggccccagcaggtggtgcagaagaagcccgcccaggtgagacacagccactag

SEQ ID NO: 84477 - DNA, 477 bp, synthetic construct
  misc_feature 1..477: note = Description of Artificial Sequence: Synthetic coding sequence
  source 1..477: mol_type = other DNA
atgggcaagggcgaccccaagaagcccagaggcaagatgagcagctacgccttcttcgtgcagacctgcagagaggagcacaagaagaagcaccccgacgccagcgtgaacttcagcgagttcagcaagaagtgcagcgagagatggaagaccatgagcgccaaggagaagggcaagttcgaggacatggccaaggccgacaaggccagatacgagagagagatgaagacctacatcccccccaagggcgagaccaagaagaagttcaaggaccccaacgcccccaagagaccccccagcgccttcttcctgttctgcagcgagtacagacccaagatcaagggcgagcaccccggcctgagcatcggcgacgtggccaagaagctgggcgagatgtggaacaacaccgccgccgacgacaagcagccctacgagaagaaggccgccaagctgaaggagaagtacgagaagttctag

SEQ ID NO: 84478 - DNA, 648 bp, synthetic construct
  misc_feature 1..648: note = Description of Artificial Sequence: Synthetic coding sequence
  source 1..648: mol_type = other DNA
atgggcaagggcgaccccaagaagcccagaggcaagatgagcagctacgccttcttcgtgcagacctgcagagaggagcacaagaagaagcaccccgacgccagcgtgaacttcagcgagttcagcaagaagtgcagcgagagatggaagaccatgagcgccaaggagaagggcaagttcgaggacatggccaaggccgacaaggccagatacgagagagagatgaagacctacatcccccccaagggcgagaccaagaagaagttcaaggaccccaacgcccccaagagaccccccagcgccttcttcctgttctgcagcgagtacagacccaagatcaagggcgagcaccccggcctgagcatcggcgacgtggccaagaagctgggcgagatgtggaacaacaccgccgccgacgacaagcagccctacgagaagaaggccgccaagctgaaggagaagtacgagaaggacatcgccgcctacagagccaagggcaagcccgacgccgccaagaagggcgtggtgaaggccgagaagagcaagaagaagaaggaggaggaggaggacgaggaggacgaggaggacgaggaggaggaggaggacgaggaggacgaggacgaggaggaggacgacgacgacgagtag

SEQ ID NO: 84479 - DNA, 648 bp, synthetic construct; identical to SEQ ID NO: 84478
  misc_feature 1..648: note = Description of Artificial Sequence: Synthetic coding sequence
  source 1..648: mol_type = other DNA

SEQ ID NO: 84480 - DNA, 294 bp, synthetic construct
  misc_feature 1..294: note = Description of Artificial Sequence: Synthetic coding sequence
  source 1..294: mol_type = other DNA
atgggcaagggcgaccccaagaagcccagaggcaagatgagcagctacgccttcttcgtgcagacctgcagagaggagcacaagaagaagcaccccgacgccagcgtgaacttcagcgagttcagcaagaagtgcagcgagagatggaagaccatgagcgccaaggagaagggcaagttcgaggacatggccaaggccgacaaggccagatacgagagagagatgaagacctacatcccccccaagggcgagaccaagaagaagttcaaggaccccaacgcccccaagagatag

SEQ ID NO: 84481 - DNA, 477 bp, synthetic construct; identical to SEQ ID NO: 84477
  misc_feature 1..477: note = Description of Artificial Sequence: Synthetic coding sequence
  source 1..477: mol_type = other DNA

SEQ ID NO: 84482 - DNA, 648 bp, synthetic construct; identical to SEQ ID NO: 84478
  misc_feature 1..648: note = Description of Artificial Sequence: Synthetic coding sequence
  source 1..648: mol_type = other DNA

SEQ ID NO: 84483 - DNA, 648 bp, synthetic construct; identical to SEQ ID NO: 84478
  misc_feature 1..648: note = Description of Artificial Sequence: Synthetic coding sequence
  source 1..648: mol_type = other DNA

SEQ ID NO: 84484 - DNA, 489 bp, synthetic construct
  misc_feature 1..489: note = Description of Artificial Sequence: Synthetic coding sequence
  source 1..489: mol_type = other DNA
atgggcaagggcgaccccaagaagcccagaggcaagatgagcagctacgccttcttcgtgcagacctgcagagaggagcacaagaagaagcaccccgacgccagcgtgaacttcagcgagttcagcaagaagtgcagcgagagatggaagaccatgagcgccaaggagaagggcaagttcgaggacatggccaaggccgacaaggccagatacgagagagagatgaagacctacatcccccccaagggcgagaccaagaagaagttcaaggaccccaacgcccccaagagaccccccagcgccttcttcctgttctgcagcgagtacagacccaagatcaagggcgagcaccccggcctgagcatcggcgacgtggccaagaagctgggcgagatgtggaacaacaccgccgccgacgacaagcagccctacgagaagatcctgctgcacatcgagctgaaggagagcctgatgcagcagaagagatag

SEQ ID NO: 84485 - DNA, 630 bp, synthetic construct
  misc_feature 1..630: note = Description of Artificial Sequence: Synthetic coding sequence
  source 1..630: mol_type = other DNA
atgggcaagggcgaccccaacaagcccagaggcaagatgagcagctacgccttcttcgtgcagacctgcagagaggagcacaagaagaagcaccccgacagcagcgtgaacttcgccgagttcagcaagaagtgcagcgagagatggaagaccatgagcgccaaggagaagagcaagttcgaggacatggccaagagcgacaaggccagatacgacagagagatgaagaactacgtgccccccaagggcgacaagaagggcaagaagaaggaccccaacgcccccaagagaccccccagcgccttcttcctgttctgcagcgagcacagacccaagatcaagagcgagcaccccggcctgagcatcggcgacaccgccaagaagctgggcgagatgtggagcgagcagagcgccaaggacaagcagccctacgagcagaaggccgccaagctgaaggagaagtacgagaaggacatcgccgcctacagagccaagggcaagagcgaggccggcaagaagggccccggcagacccaccggcagcaagaagaagaacgagcccgaggacgaggaggaggaggaggaggaggaggacgaggacgaggaggaggaggacgaggacgaggagtag

SEQ ID NO: 84486 - DNA, 630 bp, synthetic construct; identical to SEQ ID NO: 84485
  misc_feature 1..630: note = Description of Artificial Sequence: Synthetic coding sequence
  source 1..630: mol_type = other DNA

SEQ ID NO: 84487 - DNA, 630 bp, synthetic construct; identical to SEQ ID NO: 84485
  misc_feature 1..630: note = Description of Artificial Sequence: Synthetic coding sequence
  source 1..630: mol_type = other DNA

SEQ ID NO: 84488 - DNA, 405 bp, synthetic construct
  misc_feature 1..405: note = Description of Artificial Sequence: Synthetic coding sequence
  source 1..405: mol_type = other DNA
atgggcaagggcgaccccaacaagcccagaggcaagatgagcagctacgccttcttcgtgcagacctgcagagaggagcacaagaagaagcaccccgacagcagcgtgaacttcgccgagttcagcaagaagtgcagcgagagatggaagaccatgagcgccaaggagaagagcaagttcgaggacatggccaagagcgacaaggccagatacgacagagagatgaagaactacgtgccccccaagggcgacaagaagggcaagaagaaggaccccaacgcccccaagagaccccccagcgccttcttcctgttctgcagcgagcacagacccaagatcaagagcgagcaccccggcctgagcatcggcgacaccgccaagaagctgggcgagatgtggagctag

SEQ ID NO: 84489 - DNA, 603 bp, synthetic construct
  misc_feature 1..603: note = Description of Artificial Sequence: Synthetic coding sequence
  source 1..603: mol_type = other DNA
atggccaagggcgaccccaagaagcccaagggcaagatgagcgcctacgccttcttcgtgcagacctgcagagaggagcacaagaagaagaaccccgaggtgcccgtgaacttcgccgagttcagcaagaagtgcagcgagagatggaagaccatgagcggcaaggagaagagcaagttcgacgagatggccaaggccgacaaggtgagatacgacagagagatgaaggactacggccccgccaagggcggcaagaagaagaaggaccccaacgcccccaagagaccccccagcggcttcttcctgttctgcagcgagttcagacccaagatcaagagcaccaaccccggcatcagcatcggcgacgtggccaagaagctgggcgagatgtggaacaacctgaacgacagcgagaagcagccctacatcaccaaggccgccaagctgaaggagaagtacgagaaggacgtggccgactacaagagcaagggcaagttcgacggcgccaagggccccgccaaggtggccagaaagaaggtggaggaggaggacgaggaggaggaggaggaggaggaggaggaggaggaggaggaggacgagtag

SEQ ID NO: 84490 - DNA, 567 bp, synthetic construct
  misc_feature 1..567: note = Description of Artificial Sequence: Synthetic coding sequence
  source 1..567: mol_type = other DNA
atggccaagggcgaccccaagaagcccaagggcaagatgagcgcctacgccttcttcgtgcagacctgcagagaggagcacaagaagaagaaccccgaggtgcccgtgaacttcgccgagttcagcaagaagtgcagcgagagatggaagaccatgagcggcaaggagaagagcaagttcgacgagatggccaaggccgacaaggtgagatacgacagagagatgaaggactacggccccgccaagggcggcaagaagaagaaggaccccaacgcccccaagagaccccccagcggcttcttcctgttctgcagcgagttcagacccaagatcaagagcaccaaccccggcatcagcatcggcgacgtggccaagaagctgggcgagatgtggaacaacctgaacgacagcgagaagcagccctacatcaccaaggccgccaagctgaaggagaagtacgagaaggacgtggccgactacaagagcaagggcaagttcgacggcgccaagggccccgccaaggtggccagaaagaaggtggaggaggaggacgaggaggaggagtag

SEQ ID NO: 84491 - DNA, 462 bp, synthetic construct
  misc_feature 1..462: note = Description of Artificial Sequence: Synthetic coding sequence
  source 1..462: mol_type = other DNA
atggccaagggcgaccccaagaagcccaagggcaagatgagcgcctacgccttcttcgtgcagacctgcagagaggagcacaagaagaagaaccccgaggtgcccgtgaacttcgccgagttcagcaagaagtgcagcgagagatggaagaccatgagcggcaaggagaagagcaagttcgacgagatggccaaggccgacaaggtgagatacgacagagagatgaaggactacggccccgccaagggcggcaagaagaagaaggaccccaacgcccccaagagaccccccagcggcttcttcctgttctgcagcgagttcagacccaagatcaagagcaccaaccccggcatcagcatcggcgacgtggccaagaagctgggcgagatgtggaacaacctgaacgacagcgagaagcagccctacatcaccaaggccgccaagctgaaggagaagtactag

SEQ ID NO: 84492 - DNA, 603 bp, synthetic construct; identical to SEQ ID NO: 84489
  misc_feature 1..603: note = Description of Artificial Sequence: Synthetic coding sequence
  source 1..603: mol_type = other DNA

SEQ ID NO: 84493 - DNA, 582 bp, synthetic construct
  misc_feature 1..582: note = Description of Artificial Sequence: Synthetic coding sequence
  source 1..582: mol_type = other DNA
atggccaagggcgaccccaagaagcccaagggcaagatgagcgcctacgccttcttcgtgcagacctgcagagaggagcacaagaagaagaaccccgaggtgcccgtgaacttcgccgagttcagcaagaagtgcagcgagagatggaagaccatgagcggcaaggagaagagcaagttcgacgagatggccaaggccgacaaggtgagatacgacagagagatgaaggactacggccccgccaagggcggcaagaagaagaaggaccccaacgcccccaagagaccccccagcggcttcttcctgttctgcagcgagttcagacccaagatcaagagcaccaaccccggcatcagcatcggcgacgtggccaagaagctgggcgagatgtggaacaacctgaacgacagcgagaagcagccctacatcaccaaggccgccaagctgaaggagaagtacgagaaggacgtggccgactacaagagcaagggcaagttcgacggcgccaagggccccgccaaggtggccagaaagaaggtggaggaggaggacgaggaggaggaggaggaggaggaggagtag

SEQ ID NO: 84494 - DNA, 273 bp, synthetic construct
  misc_feature 1..273: note = Description of Artificial Sequence: Synthetic coding sequence
  source 1..273: mol_type = other DNA
atgcccaagagaaaggccgagggcgacgccaagggcgacaaggccaaggtgaaggacgagccccagagaagaagcgccagactgagcgccaagcccgccccccccaagcccgagcccaagcccaagaaggcccccgccaagaagggcgagaaggtgcccaagggcaagaagggcaaggccgacgccggcaaggagggcaacaaccccgccgagaacggcgacgccaagaccgaccaggcccagaaggccgagggcgccggcgacgccaagtag

SEQ ID NO: 84495 - DNA, 234 bp, synthetic construct
  misc_feature 1..234: note = Description of Artificial Sequence: Synthetic coding sequence
  source 1..234: mol_type = other DNA
atgcccaagagaaagagccccgagaacaccgagggcaaggacggcagcaaggtgaccaagcaggagcccaccagaagaagcgccagactgagcgccaagcccgccccccccaagcccgagcccaagcccagaaagaccagcgccaagaaggagcccggcgccaagatcagcagaggcgccaagggcaagaaggaggagaagcaggaggccggcaaggagggcaccgagaactag

SEQ ID NO: 84496 - DNA, 300 bp, synthetic construct
  misc_feature 1..300: note = Description of Artificial Sequence: Synthetic coding sequence
  source 1..300: mol_type = other DNA
atgcccaagagaaagagccccgagaacaccgagggcaaggacggcagcaaggtgaccaagcaggagcccaccagaagaagcgccagactgagcgccaagcccgccccccccaagcccgagcccaagcccagaaagaccagcgccaagaaggagcccggcgccaagatcagcagaggcgccaagggcaagaaggaggagaagcaggaggccggcaaggagggcaccgcccccagcgagaacggcgagaccaaggccgaggaggcccagaagaccgagagcgtggacaacgagggcgagtag

SEQ ID NO: 84497 - DNA, 507 bp, synthetic construct
  misc_feature 1..507: note = Description of Artificial Sequence: Synthetic coding sequence
  source 1..507: mol_type = other DNA
atggtgctgttcttcagaatcaacctgcagaccaagaagtgcaagcagaagggcaagggcgagcagagagagaacagacccaagtggctgaccaagaagctgaagaagacctacctgagaaagaccggcaagagaagactgagaagagtgcagcccctgatgaagcaggagagaaagaagcccagcctgatcaacaaccacatcccctgcctgatcagcggcccctgcctgcccagctgcaccatccagagaaacatcttcatcaactacttcgtgaacgccagcttcctggtggccctggagaccttcctgagaagaagagagagccacctgatccccttcttcaagtgcaagtgcttcttcctgagaggcgagatcatctgctggctgttcatcttctggtacaaccagaagatcgtgtgggacatcgagctgtgggaggccctgaccgtgagcggcgtgagcctgaccttccacagatggggcgtgagcttctacatcctgtag

SEQ ID NO: 84498 - DNA, 303 bp, synthetic construct
  misc_feature 1..303: note = Description of Artificial Sequence: Synthetic coding sequence
  source 1..303: mol_type = other DNA
atgcccaagagaaaggtgagcagcgccgagggcgccgccaaggaggagcccaagagaagaagcgccagactgagcgccaagccccccgccaaggtggaggccaagcccaagaaggccgccgccaaggacaagagcagcgacaagaaggtgcagaccaagggcaagagaggcgccaagggcaagcaggccgaggtggccaaccaggagaccaaggaggacctgcccgccgagaacggcgagaccaagaccgaggagagccccgccagcgacgaggccggcgagaaggaggccaagagcgactag

SEQ ID NO: 84499 - DNA, 582 bp, synthetic construct
  misc_feature 1..582: note = Description of Artificial Sequence: Synthetic coding sequence
  source 1..582: mol_type = other DNA
atgggcaagcagaacagcaagctgagacccgagatgctgcaggacctgagagagaacaccgagttcagcgagctggagctgcaggagtggtacaagggcttcctgaaggactgccccaccggcatcctgaacgtggacgagttcaagaagatctacgccaacttcttcccctacggcgacgccagcaagttcgccgagcacgtgttcagaaccttcgacaccaacagcgacggcaccatcgacttcagagagttcatcatcgccctgagcgtgaccagcagaggcagactggagcagaagctgatgtgggccttcagcatgtacgacctggacggcaacggctacatcagcagagaggagatgctggagatcgtgcaggccatctacaagatggtgagcagcgtgatgaagatgcccgaggacgagagcacccccgagaagagaaccgagaagatcttcagacagatggacaccaacaacgacggcaagctgagcctggaggagttcatcagaggcgccaagagcgaccccagcatcgtgagactgctgcagtgcgaccccagcagcgccagccagttctag

SEQ ID NO: 84500 - DNA, 582 bp, synthetic construct
  misc_feature 1..582: note = Description of Artificial Sequence: Synthetic coding sequence
  source 1..582: mol_type = other DNA
atgggcaagcagaacagcaagctgagacccgaggtgctgcaggacctgagagagaacaccgagttcaccgaccacgagctgcaggagtggtacaagggcttcctgaaggactgccccaccggccacctgaccgtggacgagttcaagaagatctacgccaacttcttcccctacggcgacgccagcaagttcgccgagcacgtgttcagaaccttcgacaccaacggcgacggcaccatcgacttcagagagttcatcatcgccctgagcgtgaccagcagaggcaagctggagcagaagctgaagtgggccttcagcatgtacgacctggacggcaacggctacatcagcagaagcgagatgctggagatcgtgcaggccatctacaagatggtgagcagcgtgatgaagatgcccgaggacgagagcacccccgagaagagaaccgacaagatcttcagacagatggacaccaacaacgacggcaagctgagcctggaggagttcatcagaggcgccaagagcgaccccagcatcgtgagactgctgcagtgcgaccccagcagcgccagccagttctag

SEQ ID NO: 84501 - DNA, 582 bp, synthetic construct; identical to SEQ ID NO: 84500
  misc_feature 1..582: note = Description of Artificial Sequence: Synthetic coding sequence
  source 1..582: mol_type = other DNA

SEQ ID NO: 84502 - DNA, 93 bp, synthetic construct
  misc_feature 1..93: note = Description of Artificial Sequence: Synthetic coding sequence
  source 1..93: mol_type = other DNA
atgggcaagcagaacagcaagctgagacccgaggtgctgcaggacctgagagagaacaccgagttcaccgaccacgagctgcaggagtggtag

SEQ ID NO: 84503 - DNA, 3054 bp, synthetic construct
  misc_feature 1..3054: note = Description of Artificial Sequence: Synthetic coding sequence
  source 1..3054: mol_type = other DNA
atgaagctgctgaagcccacctgggtgaaccacaacggcaagcccatcttcagcgtggacatccaccccgacggcaccaagttcgccaccggcggccagggccaggacagcggcaaggtggtgatctggaacatgagccccgtgctgcaggaggacgacgagaaggacgagaacatccccaagatgctgtgccagatggacaaccacctggcctgcgtgaactgcgtgagatggagcaacagcggcatgtacctggccagcggcggcgacgacaagctgatcatggtgtggaagagagccacctacatcggccccagcaccgtgttcggcagcagcggcaagctggccaacgtggagcagtggagatgcgtgagcatcctgagaaaccacagcggcgacgtgatggacgtggcctggagcccccacgacgcctggctggccagctgcagcgtggacaacaccgtggtgatctggaacgccgtgaagttccccgagatcctggccaccctgagaggccacagcggcctggtgaagggcctgacctgggaccccgtgggcaagtacatcgccagccaggccgacgacagaagcctgaaggtgtggagaaccctggactggcagctggagaccagcatcaccaagcccttcgacgagtgcggcggcaccacccacgtgctgagactgagctggagccccgacggccactacctggtgagcgcccacgccatgaacaacagcggccccaccgcccagatcatcgagagagagggctggaagaccaacatggacttcgtgggccacagaaaggccgtgaccgtggtgaagttcaaccccaagatcttcaagaagaagcagaagaacggcagcagcgccaagcccagctgcccctactgctgctgcgccgtgggcagcaaggacagaagcctgagcgtgtggctgacctgcctgaagagacccctggtggtgatccacgagctgttcgacaagagcatcatggacatcagctggaccctgaacggcctgggcatcctggtgtgcagcatggacggcagcgtggccttcctggacttcagccaggacgagctgggcgaccccctgagcgaggaggagaagagcagaatccaccagagcacctacggcaagagcctggccatcatgaccgaggcccagctgagcaccgccgtgatcgagaaccccgagatgctgaagtaccagagaagacagcagcagcagcagctggaccagaagagcgccgccaccagagagatgggcagcgccaccagcgtggccggcgtggtgaacggcgagagcctggaggacatcagaaagaacctgctgaagaagcaggtggagaccagaaccgccgacggcagaagaagaatcacccccctgtgcatcgcccagctggacaccggcgacttcagcaccgccttcttcaacagcatccccctgagcggcagcctggccggcaccatgctgagcagccacagcagcccccagctgctgcccctggacagcagcacccccaacagcttcggcgccagcaagccctgcaccgagcccgtggtggccgccagcgccagacccgccggcgacagcgtgaacaaggacagcatgaacgccaccagcacccccgccgccctgagccccagcgtgctgaccacccccagcaagatcgagcccatgaaggccttcgacagcagattcaccgagagaagcaaggccacccccggcgcccccgccctgaccagcatgacccccaccgccgtggagagactgaaggagcagaacctggtgaaggagctgagacccagagacctgctggagagcagcagcgacagcgacgagaaggtgcccctggccaaggccagcagcctgagcaagagaaagctggagctggaggtggagaccgtggagaagaagaagaagggcagacccagaaaggacagcagactgatgcccgtgagcctgagcgtgcagagccccgccgccctgaccgccgagaaggaggccatgtgcctgagcgcccccgccctggccctgaagctgcccatccccagcccccagagagccttcaccctgcaggtgagcagcgaccccagcatgtacatcgaggtggagaacgaggtgaccgtggtgggcggcgtgaagctgagcagactgaagtgcaacagagagggcaaggagtgggagaccgtgctgaccagcagaatcctgaccgccgccggcagctgcgacgtggtgtgcgtggcctgcgagaagagaatgctgagcgtgttcagcacctgcggcagaagactgctgagccccatcctgctgcccagccccatcagcaccctgcactgcaccggcagctacgtgatggccctgaccgccgccgccaccctgagcgtgtgggacgtgcacagacaggtggtggtggtgaaggaggagagcctgcacagcatcctggccggcagcgacatgaccgtgagccagatcctgctgacccagcacggcatccccgtgatgaacctgagcgacggcaaggcctactgcttcaaccccagcctgagcacctggaacctggtgagcgacaagcaggacagcctggcccagtgcgccgacttcagaagcagcctgcccagccaggacgccatgctgtgcagcggccccctggccatcatccagggcagaaccagcaacagcggcagacaggccgccagactgttcagcgtgccccacgtggtgcagcaggagaccaccctggcctacctggagaaccaggtggccgccgccctgaccctgcagagcagccacgagtacagacactggctgctggtgtacgccagatacctggtgaacgagggcttcgagtacagactgagagagatctgcaaggacctgctgggccccgtgcactacagcaccggcagccagtgggagagcaccgtggtgggcctgagaaagagagagctgctgaaggagctgctgcccgtgatcggccagaacctgagattccagagactgttcaccgagtgccaggagcagctggacatcctgagagacaagtag

SEQ ID NO: 84504 - DNA, 2433 bp, synthetic construct
  misc_feature 1..2433: note = Description of Artificial Sequence: Synthetic coding sequence
  source 1..2433: mol_type = other DNA
atgaagctgctgaagcccacctgggtgaaccacaacggcaagcccatcttcagcgtggacatccaccccgacggcaccaagttcgccaccggcggccagggccaggacagcggcaaggtggtgatctggaacatgagccccgtgctgcaggaggacgacgagaaggacgagaacatccccaagatgctgtgccagatggacaaccacctggcctgcgtgaactgcgtgagatggagcaacagcggcatgtacctggccagcggcggcgacgacaagctgatcatggtgtggaagagagccacctacatcggccccagcaccgtgttcggcagcagcggcaagctggccaacgtggagcagtggagatgcgtgagcatcctgagaaaccacagcggcgacgtgatggacgtggcctggagcccccacgacgcctggctggccagctgcagcgtggacaacaccgtggtgatctggaacgccgtgaagttccccgagatcctggccaccctgagaggccacagcggcctggtgaagggcctgacctgggaccccgtgggcaagtacatcgccagccaggccgacgacagaagcctgaaggtgtggagaaccctggactggcagctggagaccagcatcaccaagcccttcgacgagtgcggcggcaccacccacgtgctgagactgagctggagccccgacggccactacctggtgagcgcccacgccatgaacaacagcggccccaccgcccagatcatcgagagagagggctggaagaccaacatggacttcgtgggccacagaaaggccgtgaccgtggtgaagttcaaccccaagatcttcaagaagaagcagaagaacggcagcagcgccaagcccagctgcccctactgctgctgcgccgtgggcagcaaggacagaagcctgagcgtgtggctgacctgcctgaagagacccctggtggtgatccacgagctgttcgacaagagcatcatggacatcagctggaccctgaacggcctgggcatcctggtgtgcagcatggacggcagcgtggccttcctggacttcagccaggacgagctgggcgaccccctgagcgaggaggagaagagcagaatccaccagagcacctacggcaagagcctggccatcatgaccgaggcccagctgagcaccgccgtgatcgagaaccccgagatgctgaagtaccagagaagacagcagcagcagcagctggaccagaagagcgccgccaccagagagatgggcagcgccaccagcgtggccggcgtggtgaacggcgagagcctggaggacatcagaaagaacctgctgaagaagcaggtggagaccagaaccgccgacggcagaagaagaatcacccccctgtgcatcgcccagctggacaccggcgacttcagcaccgccttcttcaacagcatccccctgagcggcagcctggccggcaccatgctgagcagccacagcagcccccagctgctgcccctggacagcagcacccccaacagcttcggcgccagcaagccctgcaccgagcccgtggtggccgccagcgccagacccgccggcgacagcgtgaacaaggacagcatgaacgccaccagcacccccgccgccctgagccccagcgtgctgaccacccccagcaagatcgagcccatgaaggccttcgacagcagattcaccgagagaagcaaggccacccccggcgcccccgccctgaccagcatgacccccaccgccgtggagagagacgtgcacagacaggtggtggtggtgaaggaggagagcctgcacagcatcctggccggcagcgacatgaccgtgagccagatcctgctgacccagcacggcatccccgtgatgaacctgagcgacggcaaggcctactgcttcaaccccagcctgagcacctggaacctggtgagcgacaagcaggacagcctggcccagtgcgccgacttcagaagcagcctgcccagccaggacgccatgctgtgcagcggccccctggccatcatccagggcagaaccagcaacagcggcagacaggccgccagactgttcagcgtgccccacgtggtgcagcaggagaccaccctggcctacctggagaaccaggtggccgccgccctgaccctgcagagcagccacgagtacagacactggctgctggtgtacgccagatacctggtgaacgagggcttcgagtacagactgagagagatctgcaaggacctgctgggccccgtgcactacagcaccggcagccagtgggagagcaccgtggtgggcctgagaaagagagagctgctgaaggagctgctgcccgtgatcggccagaacctgagattccagagactgttcaccgagtgccaggagcagctggacatcctgagagacaagtag

SEQ ID NO: 84505 - DNA, 1815 bp, synthetic construct
  misc_feature 1..1815: note = Description of Artificial Sequence: Synthetic coding sequence
  source 1..1815: mol_type = other DNA
atgctgagcagccacagcagcccccagctgctgcccctggacagcagcacccccaacagcttcggcgccagcaagccctgcaccgagcccgtggtggccgccagcgccagacccgccggcgacagcgtgaacaaggacagcatgaacgccaccagcacccccgccgccctgagccccagcgtgctgaccacccccagcaagatcgagcccatgaaggccttcgacagcagattcaccgagagaagcaaggccacccccggcgcccccgccctgaccagcatgacccccaccgccgtggagagactgaaggagcagaacctggtgaaggagctgagacccagagacctgctggagagcagcagcgacagcgacgagaaggtgcccctggccaaggccagcagcctgagcaagagaaagctggagctggaggtggagaccgtggagaagaagaagaagggcagacccagaaaggacagcagactgatgcccgtgagcctgagcgtgcagagccccgccgccctgaccgccgagaaggaggccatgtgcctgagcgcccccgccctggccctgaagctgcccatccccagcccccagagagccttcaccctgcaggtgagcagcgaccccagcatgtacatcgaggtggagaacgaggtgaccgtggtgggcggcgtgaagctgagcagactgaagtgcaacagagagggcaaggagtgggagaccgtgctgaccagcagaatcctgaccgccgccggcagctgcgacgtggtgtgcgtggcctgcgagaagagaatgctgagcgtgttcagcacctgcggcagaagactgctgagccccatcctgctgcccagccccatcagcaccctgcactgcaccggcagctacgtgatggccctgaccgccgccgccaccctgagcgtgtgggacgtgcacagacaggtggtggtggtgaaggaggagagcctgcacagcatcctggccggcagcgacatgaccgtgagccagatcctgctgacccagcacggcatccccgtgatgaacctgagcgacggcaaggcctactgcttcaaccccagcctgagcacctggaacctggtgagcgacaagcaggacagcctggcccagtgcgccgacttcagaagcagcctgcccagccaggacgccatgctgtgcagcggccccctggccatcatccagggcagaaccagcaacagcggcagacaggccgccagactgttcagcgtgccccacgtggtgcagcaggagaccaccctggcctacctggagaaccaggtggccgccgccctgaccctgcagagcagccacgagtacagacactggctgctggtgtacgccagatacctggtgaacgagggcagcgccgaggagggcgccgccgagggcgccgccaccagccacagagccgagccccccatccccgcccccctgcacagagtgagcggcaccgccagacaccccgagggccaggtggcctgccccagcctgccctggctgcagcagggccagggccacaccctggccgccgacgacatgcaggacagactgagccccgaccaggccgtgggcggcggcgacaccggcagaagatgcgccgtgctgcaccagagacagcccagcagcctgggcagatgcgccctgtgccccggcagcgacatcgccagcggcggcggcagcagcagcctgccccccagccccagatgcggcgccagagccggcgccctgcccagatgccccggcgccagcaaggccgtgcccggcctgcccagccccgccagaccccagggcggccactag

SEQ ID NO: 84506 - DNA, 2922 bp, synthetic construct
  misc_feature 1..2922: note = Description of Artificial Sequence: Synthetic coding sequence
  source 1..2922: mol_type = other DNA
atgagccccgtgctgcaggaggacgacgagaaggacgagaacatccccaagatgctgtgccagatggacaaccacctggcctgcgtgaactgcgtgagatggagcaacagcggcatgtacctggccagcggcggcgacgacaagctgatcatggtgtggaagagagccacctacatcggccccagcaccgtgttcggcagcagcggcaagctggccaacgtggagcagtggagatgcgtgagcatcctgagaaaccacagcggcgacgtgatggacgtggcctggagcccccacgacgcctggctggccagctgcagcgtggacaacaccgtggtgatctggaacgccgtgaagttccccgagatcctggccaccctgagaggccacagcggcctggtgaagggcctgacctgggaccccgtgggcaagtacatcgccagccaggccgacgacagaagcctgaaggtgtggagaaccctggactggcagctggagaccagcatcaccaagcccttcgacgagtgcggcggcaccacccacgtgctgagactgagctggagccccgacggccactacctggtgagcgcccacgccatgaacaacagcggccccaccgcccagatcatcgagagagagggctggaagaccaacatggacttcgtgggccacagaaaggccgtgaccgtggtgaagttcaaccccaagatcttcaagaagaagcagaagaacggcagcagcgccaagcccagctgcccctactgctgctgcgccgtgggcagcaaggacagaagcctgagcgtgtggctgacctgcctgaagagacccctggtggtgatccacgagctgttcgacaagagcatcatggacatcagctggaccctgaacggcctgggcatcctggtgtgcagcatggacggcagcgtggccttcctggacttcagccaggacgagctgggcgaccccctgagcgaggaggagaagagcagaatccaccagagcacctacggcaagagcctggccatcatgaccgaggcccagctgagcaccgccgtgatcgagaaccccgagatgctgaagtaccagagaagacagcagcagcagcagctggaccagaagagcgccgccaccagagagatgggcagcgccaccagcgtggccggcgtggtgaacggcgagagcctggaggacatcagaaagaacctgctgaagaagcaggtggagaccagaaccgccgacggcagaagaagaatcacccccctgtgcatcgcccagctggacaccggcgacttcagcaccgccttcttcaacagcatccccctgagcggcagcctggccggcaccatgctgagcagccacagcagcccccagctgctgcccctggacagcagcacccccaacagcttcggcgccagcaagccctgcaccgagcccgtggtggccgccagcgccagacccgccggcgacagcgtgaacaaggacagcatgaacgccaccagcacccccgccgccctgagccccagcgtgctgaccacccccagcaagatcgagcccatgaaggccttcgacagcagattcaccgagagaagcaaggccacccccggcgcccccgccctgaccagcatgacccccaccgccgtggagagactgaaggagcagaacctggtgaaggagctgagacccagagacctgctggagagcagcagcgacagcgacgagaaggtgcccctggccaaggccagcagcctgagcaagagaaagctggagctggaggtggagaccgtggagaagaagaagaagggcagacccagaaaggacagcagactgatgcccgtgagcctgagcgtgcagagccccgccgccctgaccgccgagaaggaggccatgtgcctgagcgcccccgccctggccctgaagctgcccatccccagcccccagagagccttcaccctgcaggtgagcagcgaccccagcatgtacatcgaggtggagaacgaggtgaccgtggtgggcggcgtgaagctgagcagactgaagtgcaacagagagggcaaggagtgggagaccgtgctgaccagcagaatcctgaccgccgccggcagctgcgacgtggtgtgcgtggcctgcgagaagagaatgctgagcgtgttcagcacctgcggcagaagactgctgagccccatcctgctgcccagccccatcagcaccctgcactgcaccggcagctacgtgatggccctgaccgccgccgccaccctgagcgtgtgggacgtgcacagacaggtggtggtggtgaaggaggagagcctgcacagcatcctggccggcagcgacatgaccgtgagccagatcctgctgacccagcacggcatccccgtgatgaacctgagcgacggcaaggcctactgcttcaaccccagcctgagcacctggaacctggtgagcgacaagcaggacagcctggcccagtgcgccgacttcagaagcagcctgcccagccaggacgccatgctgtgcagcggccccctggccatcatccagggcagaaccagcaacagcggcagacaggccgccagactgttcagcgtgccccacgtggtgcagcaggagaccaccctggcctacctggagaaccaggtggccgccgccctgaccctgcagagcagccacgagtacagacactggctgctggtgtacgccagatacctggtgaacgagggcttcgagtacagactgagagagatctgcaaggacctgctgggccccgtgcactacagcaccggcagccagtgggagagcaccgtggtgggcctgagaaagagagagctgctgaaggagctgctgcccgtgatcggccagaacctgagattccagagactgttcaccgagtgccaggagcagctggacatcctgagagacaagtag

SEQ ID NO: 84507 - DNA, 2421 bp, synthetic construct
  misc_feature 1..2421: note = Description of Artificial Sequence: Synthetic coding sequence
  source 1..2421: mol_type = other DNA
atgagccccgtgctgcaggaggacgacgagaaggacgagaacatccccaagatgctgtgccagatggacaaccacctggcctgcgtgaactgcgtgagatggagcaacagcggcatgtacctggccagcggcggcgacgacaagctgatcatggtgtggaagagagccacctacatcggccccagcaccgtgttcggcagcagcggcaagctggccaacgtggagcagtggagatgcgtgagcatcctgagaaaccacagcggcgacgtgatggacgtggcctggagcccccacgacgcctggctggccagctgcagcgtggacaacaccgtggtgatctggaacgccgtgaagttccccgagatcctggccaccctgagaggccacagcggcctggtgaagggcctgacctgggaccccgtgggcaagtacatcgccagccaggccgacgacagaagcctgaaggtgtggagaaccctggactggcagctggagaccagcatcaccaagcccttcgacgagtgcggcggcaccacccacgtgctgagactgagctggagccccgacggccactacctggtgagcgcccacgccatgaacaacagcggccccaccgcccagatcatcgagagagagggctggaagaccaacatggacttcgtgggccacagaaaggccgtgaccgtggtgaagttcaaccccaagatcttcaagaagaagcagaagaacggcagcagcgccaagcccagctgcccctactgctgctgcgccgtgggcagcaaggacagaagcctgagcgtgtggctgacctgcctgaagagacccctggtggtgatccacgagctgttcgacaagagcatcatggacatcagctggaccctgaacggcctgggcatcctggtgtgcagcatggacggcagcgtggccttcctggacttcagccaggacgagctgggcgaccccctgagcgaggaggagaagagcagaatccaccagagcacctacggcaagagcctggccatcatgaccgaggcccagctgagcaccgccgtgatcgagaaccccgagatgctgaagtaccagagaagacagcagcagcagcagctggaccagaagagcgccgccaccagagagatgggcagcgccaccagcgtggccggcgtggtgaacggcgagagcctggaggacatcagaaagaacctgctgaagaagcaggtggagaccagaaccgccgacggcagaagaagaatcacccccctgtgcatcgcccagctggacaccggcgacttcagcaccgccttcttcaacagcatccccctgagcggcagcctggccggcaccatgctgagcagccacagcagcccccagctgctgcccctggacagcagcacccccaacagcttcggcgccagcaagccctgcaccgagcccgtggtggccgccagcgccagacccgccggcgacagcgtgaacaaggacagcatgaacgccaccagcacccccgccgccctgagccccagcgtgctgaccacccccagcaagatcgagcccatgaaggccttcgacagcagattcaccgagagaagcaaggccacccccggcgcccccgccctgaccagcatgacccccaccgccgtggagagactgaaggagcagaacctggtgaaggagctgagacccagagacctgctggagagcagcagcgacagcgacgagaaggtgcccctggccaaggccagcagcctgagcaagagaaagctggagctggaggtggagaccgtggagaagaagaagaagggcagacccagaaaggacagcagactgatgcccgtgagcctgagcgtgcagagccccgccgccctgaccgccgagaaggaggccatgtgcctgagcgcccccgccctggccctgaagctgcccatccccagcccccagagagccttcaccctgcaggtgagcagcgaccccagcatgtacatcgaggtggagaacgaggtgaccgtggtgggcggcgtgaagctgagcagactgaagtgcaacagagagggcaaggagtgggagaccgtgctgaccagcagaatcctgaccgccgccggcagctgcgacgtggtgtgcgtggcctgcgagaagagaatgctgagcgtgttcagcacctgcggcagaagactgctgagccccatcctgctgcccagccccatcagcaccctgcactgcaccggcagctacgtgatggccctgaccgccgccgccaccctgagcgtgtgggacgtgcacagacaggtggtggtggtgaaggaggagagcctgcacagcatcctggccggcacctggttcctgaccagcagaacccactggctgagcgtgcagaccctgggcgccgcctgccaccccagaaccccctgctgcgcccaggacagatag

SEQ ID NO: 84508 - DNA, 156 bp, synthetic construct
  misc_feature 1..156: note = Description of Artificial Sequence: Synthetic coding sequence
  source 1..156: mol_type = other DNA
atggccagcagcatgagaagcctgttcagcgaccacggcaagtacgtggagagcttcagaagattcctgaaccacagcaccgagcaccagtgcatgcaggagttcatggacaagaagctgcccggcatcatcggcagataccagaactgctgctag

SEQ ID NO: 84509 - DNA, 879 bp, synthetic construct
  misc_feature 1..879: note = Description of Artificial Sequence: Synthetic coding sequence
  source 1..879: mol_type = other DNA
atggccagcagcatgagaagcctgttcagcgaccacggcaagtacgtggagagcttcagaagattcctgaaccacagcaccgagcaccagtgcatgcaggagttcatggacaagaagctgcccggcatcatcggcagaatcggcgacaccaagagcgagatcaagatcctgagcatcggcggcggcgccggcgagatcgacctgcagatcctgagcaaggtgcaggcccagtaccccggcgtgtgcatcaacaacgaggtggtggagcccagcgccgagcagatcgccaagtacaaggagctggtggccaagaccagcaacctggagaacgtgaagttcgcctggcacaaggagaccagcagcgagtaccagagcagaatgctggagaagaaggagctgcagaagtgggacttcatccacatgatccagatgctgtactacgtgaaggacatccccgccaccctgaagttcttccacagcctgctgggcaccaacgccaagatgctgatcatcgtggtgagcggcagcagcggctgggacaagctgtggaagaagtacggcagcagattcccccaggacgacctgtgccagtacatcaccagcgacgacctgacccagatgctggacaacctgggcctgaagtacgagtgctacgacctgctgagcaccatggacatcagcgactgcttcatcgacggcaacgagaacggcgacctgctgtgggacttcctgaccgagacctgcaacttcaacgccaccgccccccccgacctgagagccgagctgggcaaggacctgcaggagcccgagttcagcgccaagaaggagggcaaggtgctgttcaacaacaccctgagcttcatcgtgatcgaggcctag

SEQ ID NO: 84510 - DNA, 381 bp, synthetic construct
  misc_feature 1..381: note = Description of Artificial Sequence: Synthetic coding sequence
  source 1..381: mol_type = other DNA
atggccagcagcatgagaagcctgttcagcgaccacggcaagtacgtggagagcttcagaagattcctgaaccacagcaccgagcaccagtgcatgcaggagttcatggacaagaagctgcccggcatcatcggcagaatcggcgacaccaagagcgagatcaagatcctgagcatcggcggcggcgccgactgcctgatcagaggcagcagcagagtgctgaagagaaacagctgcttcatcctgtgcagcaccagacagaaggacaagcccggcatgagaatccacgacgagagaagcagcgagctgcccttcggcgccgccagactggagagcaagagcgccttccccagcttcctggtgagcttcatcctgttctag

SEQ ID NO: 84511 - DNA, 879 bp, synthetic construct; identical to SEQ ID NO: 84509
  misc_feature 1..879: note = Description of Artificial Sequence: Synthetic coding sequence
  source 1..879: mol_type = other DNA

SEQ ID NO: 84512 - DNA, 1464 bp, synthetic construct
  misc_feature 1..1464: note = Description of Artificial Sequence: Synthetic coding sequence
  source 1..1464: mol_type = other DNA
atgagcctgcccaacagcagctgcctgctggaggacaagatgtgcgagggcaacaagaccaccatggccagcccccagctgatgcccctggtggtggtgctgagcaccatctgcctggtgaccgtgggcctgaacctgctggtgctgtacgccgtgagaagcgagagaaagctgcacaccgtgggcaacctgtacatcgtgagcctgagcgtggccgacctgatcgtgggcgccgtggtgatgcccatgaacatcctgtacctgctgatgagcaagtggagcctgggcagacccctgtgcctgttctggctgagcatggactacgtggccagcaccgccagcatcttcagcgtgttcatcctgtgcatcgacagatacagaagcgtgcagcagcccctgagatacctgaagtacagaaccaagaccagagccagcgccaccatcctgggcgcctggttcctgagcttcctgtgggtgatccccatcctgggctggaaccacttcatgcagcagaccagcgtgagaagagaggacaagtgcgagaccgacttctacgacgtgacctggttcaaggtgatgaccgccatcatcaacttctacctgcccaccctgctgatgctgtggttctacgccaagatctacaaggccgtgagacagcactgccagcacagagagctgatcaacagaagcctgcccagcttcagcgagatcaagctgagacccgagaaccccaagggcgacgccaagaagcccggcaaggagagcccctgggaggtgctgaagagaaagcccaaggacgccggcggcggcagcgtgctgaagagccccagccagacccccaaggagatgaagagccccgtggtgttcagccaggaggacgacagagaggtggacaagctgtactgcttccccctggacatcgtgcacatgcaggccgccgccgagggcagcagcagagactacgtggccgtgaacagaagccacggccagctgaagaccgacgagcagggcctgaacacccacggcgccagcgagatcagcgaggaccagatgctgggcgacagccagagcttcagcagaaccgacagcgacaccaccaccgagaccgcccccggcaagggcaagctgagaagcggcagcaacaccggcctggactacatcaagttcacctggaagagactgagaagccacagcagacagtacgtgagcggcctgcacatgaacagagagagaaaggccgccaagcagctgggcttcatcatggccgccttcatcctgtgctggatcccctacttcatcttcttcatggtgatcgccttctgcaagaactgctgcaacgagcacctgcacatgttcaccatctggctgggctacatcaacagcaccctgaaccccctgatctaccccctgtgcaacgagaacttcaagaagaccttcaagagaatcctgcacatcagaagctag

SEQ ID NO: 84513 - DNA, 39 bp, synthetic construct
  misc_feature 1..39: note = Description of Artificial Sequence: Synthetic coding sequence
  source 1..39: mol_type = other DNA
atgagcctgcccaacagcagctgcctgctggaggactag

SEQ ID NO: 84514 - DNA, 1464 bp, synthetic construct; identical to SEQ ID NO: 84512
  misc_feature 1..1464: note = Description of Artificial Sequence: Synthetic coding sequence
  source 1..1464: mol_type = other DNA

SEQ ID NO: 84515 - DNA, 1464 bp, synthetic construct; identical to SEQ ID NO: 84512
  misc_feature 1..1464: note = Description of Artificial Sequence: Synthetic coding sequence
  source 1..1464: mol_type = other DNA

SEQ ID NO: 84516 - DNA, 816 bp, synthetic construct
  misc_feature 1..816: note = Description of Artificial Sequence: Synthetic coding sequence
  source 1..816: mol_type = other DNA
atggccgccccccaggacgtgcacgtgagaatctgcaaccaggagatcgtgaagttcgacctggaggtgaaggccctgatccaggacatcagagactgcagcggccccctgagcgccctgaccgagctgaacaccaaggtgaaggagaagttccagcagctgagacacagaatccagcccgtgctgtaccagagagccttcatctggaccgccagcaccttcttcttcaagctgacctacagcctgaccgacttcagcagcacccagcacgacttcaacagccccaccacccccgtgaccttcagcgacctggagcagctggccaaggagcaggacaaggagagcgagaagcagctgctgctgcaggaggtggagaaccacaagaagcagatgctgagcaaccaggccagctggagaaaggccaacctgacctgcaagatcgccatcgacaacctggagaaggccgagctgctgcagggcggcgacctgctgagacagagaaagaccaccaaggagagcctggcccagaccagcagcaccatcaccgagagcctgatgggcatcagcagaatgatggcccagcaggtgcagcagagcgaggaggccatgcagagcctggtgaccagcagcagaaccatcctggacgccaacgaggagttcaagagcatgagcggcaccatccagctgggcagaaagctgatcaccaagtacaacagaagagagctgaccgacaagctgctgatcttcctggccctggccctgttcctggccaccgtgctgtacatcgtgaagaagagactgttccccttcctgtag

SEQ ID NO: 84517 - DNA, 1194 bp, synthetic construct
  misc_feature 1..1194: note = Description of Artificial Sequence: Synthetic coding sequence
  source 1..1194: mol_type = other DNA
atggcccccaacggcaccgccagcagcttctgcctggacagcaccgcctgcaagatcaccatcaccgtggtgctggccgtgctgatcctgatcaccgtggccggcaacgtggtggtgtgcctggccgtgggcctgaacagaagactgagaaacctgaccaactgcttcatcgtgagcctggccatcaccgacctgctgctgggcctgctggtgctgcccttcagcgccatctaccagctgagctgcaagtggagcttcggcaaggtgttctgcaacatctacaccagcctggacgtgatgctgtgcaccgccagcatcctgaacctgttcatgatcagcctggacagatactgcgccgtgatggaccccctgagataccccgtgctggtgacccccgtgagagtggccatcagcctggtgctgatctgggtgatcagcatcaccctgagcttcctgagcatccacctgggctggaacagcagaaacgagaccagcaagggcaaccacaccaccagcaagtgcaaggtgcaggtgaacgaggtgtacggcctggtggacggcctggtgaccttctacctgcccctgctgatcatgtgcatcacctactacagaatcttcaaggtggccagagaccaggccaagagaatcaaccacatcagcagctggaaggccgccaccatcagagagcacaaggccaccgtgaccctggccgccgtgatgggcgccttcatcatctgctggttcccctacttcaccgccttcgtgtacagaggcctgagaggcgacgacgccatcaacgaggtgctggaggccatcgtgctgtggctgggctacgccaacagcgccctgaaccccatcctgtacgccgccctgaacagagacttcagaaccggctaccagcagctgttctgctgcagactggccaacagaaacagccacaagaccagcctgagaagcaacgccagccagctgagcagaacccagagcagagagcccagacagcaggaggagaagcccctgaagctgcaggtgtggagcggcaccgaggtgaccgccccccagggcgccaccgacagaccctggctgtgcctgcccgagtgctggagcgtggagctgacccacagcttcatccacctgttcatccacagcttcgccaacatccaccccatccccaccacctgccaggagctgtag

SEQ ID NO: 84518 - DNA, 1173 bp, synthetic construct
  misc_feature 1..1173: note = Description of Artificial Sequence: Synthetic coding sequence
  source 1..1173: mol_type = other DNA
atgcccgacaccaacagcaccatcaacctgagcctgagcaccagagtgaccctggccttcttcatgagcctggtggccttcgccatcatgctgggcaacgccctggtgatcctggccttcgtggtggacaagaacctgagacacagaagcagctacttcttcctgaacctggccatcagcgacttcttcgtgggcgtgatcagcatccccctgtacatcccccacaccctgttcgagtgggacttcggcaaggagatctgcgtgttctggctgaccaccgactacctgctgtgcaccgccagcgtgtacaacatcgtgctgatcagctacgacagatacctgagcgtgagcaacgccgtgagctacagaacccagcacaccggcgtgctgaagatcgtgaccctgatggtggccgtgtgggtgctggccttcctggtgaacggccccatgatcctggtgagcgagagctggaaggacgagggcagcgagtgcgagcccggcttcttcagcgagtggtacatcctggccatcaccagcttcctggagttcgtgatccccgtgatcctggtggcctacttcaacatgaacatctactggagcctgtggaagagagaccacctgagcagatgccagagccaccccggcctgaccgccgtgagcagcaacatctgcggccacagcttcagaggcagactgagcagcagaagaagcctgagcgccagcaccgaggtgcccgccagcttccacagcgagagacagagaagaaagagcagcctgatgttcagcagcagaaccaagatgaacagcaacaccatcgccagcaagatgggcagcttcagccagagcgacagcgtggccctgcaccagagagagcacgtggagctgctgagagccagaagactggccaagagcctggccatcctgctgggcgtgttcgccgtgtgctgggccccctacagcctgttcaccatcgtgctgagcttctacagcagcgccaccggccccaagagcgtgtggtacagaatcgccttctggctgcagtggttcaacagcttcgtgaaccccctgctgtaccccctgtgccacaagagattccagaaggccttcctgaagatcttctgcatcaagaagcagcccctgcccagccagcacagcagaagcgtgagcagctag

SEQ ID NO: 84519 - DNA, 909 bp, synthetic construct
  misc_feature 1..909: note = Description of Artificial Sequence: Synthetic coding sequence
  source 1..909: mol_type = other DNA
atgcccgacaccaacagcaccatcaacctgagcctgagcaccagagtgaccctggccttcttcatgagcctggtggccttcgccatcatgctgggcaacgccctggtgatcctggccttcgtggtggacaagaacctgagacacagaagcagctacttcttcctgaacctggccatcagcgacttcttcgtggtgagcgagagctggaaggacgagggcagcgagtgcgagcccggcttcttcagcgagtggtacatcctggccatcaccagcttcctggagttcgtgatccccgtgatcctggtggcctacttcaacatgaacatctactggagcctgtggaagagagaccacctgagcagatgccagagccaccccggcctgaccgccgtgagcagcaacatctgcggccacagcttcagaggcagactgagcagcagaagaagcctgagcgccagcaccgaggtgcccgccagcttccacagcgagagacagagaagaaagagcagcctgatgttcagcagcagaaccaagatgaacagcaacaccatcgccagcaagatgggcagcttcagccagagcgacagcgtggccctgcaccagagagagcacgtggagctgctgagagccagaagactggccaagagcctggccatcctgctgggcgtgttcgccgtgtgctgggccccctacagcctgttcaccatcgtgctgagcttctacagcagcgccaccggccccaagagcgtgtggtacagaatcgccttctggctgcagtggttcaacagcttcgtgaaccccctgctgtaccccctgtgccacaagagattccagaaggccttcctgaagatcttctgcatcaagaagcagcccctgcccagccagcacagcagaagcgtgagcagctag

SEQ ID NO: 84520 - DNA, 174 bp, synthetic construct
  misc_feature 1..174: note = Description of Artificial Sequence: Synthetic coding sequence
  source 1..174: mol_type = other DNA
atgaagttcttcgtgttcgccctggtgctggccctgatgatcagcatgatcagcgccgacagccacgagaagagacaccacggctacagaagaaagttccacgagaagcaccacagccacagagagttccccttctacggcgactacggcagcaactacctgtacgacaactag

SEQ ID NO: 84521 - DNA, 174 bp, synthetic construct; identical to SEQ ID NO: 84520
  misc_feature 1..174: note = Description of Artificial Sequence: Synthetic coding sequence
  source 1..174: mol_type = other DNA

SEQ ID NO: 84522 - DNA, 156 bp, synthetic construct
  misc_feature 1..156: note = Description of Artificial Sequence: Synthetic coding sequence
  source 1..156: mol_type = other DNA
atgaagttcttcgtgttcgccctgatcctggccctgatgctgagcatgaccggcgccgacagccacgccaagagacaccacggctacaagagaaagttccacgagaagcaccacagccacagaggctacagaagcaactacctgtacgacaactag

SEQ ID NO: 84523 - DNA, 156 bp, synthetic construct; identical to SEQ ID NO: 84522
  misc_feature 1..156: note = Description of Artificial Sequence: Synthetic coding sequence
  source 1..156: mol_type = other DNA

SEQ ID NO: 84524 - DNA, 1989 bp, synthetic construct
  misc_feature 1..1989: note = Description of Artificial Sequence: Synthetic coding sequence
  source 1..1989: mol_type = other DNA
atgatggagcccgaggagtacagagagagaggcagagagatggtggactacatctgccagtacctgagcaccgtgagagagagaagagtgacccccgacgtgcagcccggctacctgagagcccagctgcccgagagcgcccccgaggaccccgacagctgggacagcatcttcggcgacatcgagagaatcatcatgcccggcgtggtgcactggcagagcccccacatgcacgcctactaccccgccctgaccagctggcccagcctgctgggcgacatgctggccgacgccatcaactgcctgggcttcacctgggccagcagccccgcctgcaccgagctggagatgaacgtgatggactggctggccaagatgctgggcctgcccgagcacttcctgcaccaccaccccagcagccagggcggcggcgtgctgcagagcaccgtgagcgagagcaccctgatcgccctgctggccgccagaaagaacaagatcctggagatgaagaccagcgagcccgacgccgacgagagctgcctgaacgccagactggtggcctacgccagcgaccaggcccacagcagcgtggagaaggccggcctgatcagcctggtgaagatgaagttcctgcccgtggacgacaacttcagcctgagaggcgaggccctgcagaaggccatcgaggaggacaagcagagaggcctggtgcccgtgttcgtgtgcgccaccctgggcaccaccggcgtgtgcgccttcgactgcctgagcgagctgggccccatctgcgccagagagggcctgtggctgcacatcgacgccgcctacgccggcaccgccttcctgtgccccgagttcagaggcttcctgaagggcatcgagtacgccgacagcttcaccttcaaccccagcaagtggatgatggtgcacttcgactgcaccggcttctgggtgaaggacaagtacaagctgcagcagaccttcagcgtgaaccccatctacctgagacacgccaacagcggcgtggccaccgacttcatgcactggcagatccccctgagcagaagattcagaagcgtgaagctgtggttcgtgatcagaagcttcggcgtgaagaacctgcaggcccacgtgagacacggcaccgagatggccaagtacttcgagagcctggtgagaaacgaccccagcttcgagatccccgccaagagacacctgggcctggtggtgttcagactgaagggccccaactgcctgaccgagaacgtgctgaaggagatcgccaaggccggcagactgttcctgatccccgccaccatccaggacaagctgatcatcagattcaccgtgaccagccagttcaccaccagagacgacatcctgagagactggaacctgatcagagacgccgccaccctgatcctgagccagcactgcaccagccagcccagccccagagtgggcaacctgatcagccagatcagaggcgccagagcctgggcctgcggcaccagcctgcagagcgtgagcggcgccggcgacgaccccgtgcaggccagaaagatcatcaagcagccccagagagtgggcgccggccccatgaagagagagaacggcctgcacctggagaccctgctggaccccgtggacgactgcttcagcgaggaggcccccgacgccaccaagcacaagctgagcagcttcctgttcagctacctgagcgtgcagaccaagaagaagaccgtgagaagcctgagctgcaacagcgtgcccgtgagcgcccagaagcccctgcccaccgaggccagcgtgaagaacggcggcagcagcagagtgagaatcttcagcagattccccgaggacatgatgatgctgaagaagagcgccttcaagaagctgatcaagttctacagcgtgcccagcttccccgagtgcagcagccagtgcggcctgcagctgccctgctgccccctgcaggccatggtgtag

SEQ ID NO: 84525 - DNA, 2100 bp, synthetic construct
  misc_feature 1..2100: note = Description of Artificial Sequence: Synthetic coding sequence
  source 1..2100: mol_type = other DNA
atgggccaccacagaccctggctgcacgccagcgtgctgtgggccggcgtggccagcctgctgctgccccccgccatgacccagcagctgagaggcgacggcctgggcttcagaaacagaaacaacagcaccggcgtggccggcctgagcgaggaggccagcgccgagctgagacaccacctgcacagccccagagaccaccccgacgagaacaaggacgtgagcaccgagaacggccaccacttctggagccaccccgacagagagaaggaggacgaggacgtgagcaaggagtacggccacctgctgcccggccacagaagccaggaccacaaggtgggcgacgagggcgtgagcggcgaggaggtgttcgccgagcacggcggccaggccagaggccacagaggccacggcagcgaggacaccgaggacagcgccgagcacagacaccacctgcccagccacagaagccacagccaccaggacgaggacgaggacgaggtggtgagcagcgagcaccaccaccacatcctgagacacggccacagaggccacgacggcgaggacgacgagggcgaggaggaggaggaggaggaggaggaggaggaggaggccagcaccgagtacggccaccaggcccacagacacagaggccacggcagcgaggaggacgaggacgtgagcgacggccaccaccaccacggccccagccacagacaccagggccacgaggaggacgacgacgacgacgacgacgacgacgacgacgacgacgacgacgacgtgagcatcgagtacagacaccaggcccacagacaccagggccacggcatcgaggaggacgaggacgtgagcgacggccaccaccacagagaccccagccacagacacagaagccacgaggaggacgacaacgacgacgacgacgtgagcaccgagtacggccaccaggcccacagacaccaggaccacagaaaggaggaggtggaggccgtgagcggcgagcaccaccaccacgtgcccgaccacagacaccagggccacagagacgaggaggaggacgaggacgtgagcaccgagagatggcaccagggcccccagcacgtgcaccacggcctggtggacgaggaggaggaggaggaggagatcaccgtgcagttcggccactacgtggccagccaccagcccagaggccacaagagcgacgaggaggacttccaggacgagtacaagaccgaggtgccccaccaccaccaccacagagtgcccagagaggaggacgaggaggtgagcgccgagctgggccaccaggcccccagccacagacagagccaccaggacgaggagaccggccacggccagagaggcagcatcaaggagatgagccaccacccccccggccacaccgtggtgaaggacagaagccacctgagaaaggacgacagcgaggaggagaaggagaaggaggaggaccccggcagccacgaggaggacgacgagagcagcgagcagggcgagaagggcacccaccacggcagcagagaccaggaggacgaggaggacgaggaggagggccacggcctgagcctgaaccaggaggaggaggaggaggaggacaaggaggaggaggaggaggaggaggacgaggagagaagagaggagagagccgaggtgggcgcccccctgagccccgaccacagcgaggaggaggaggaggaggaggagggcctggaggaggacgagcccagattcaccatcatccccaaccccctggacagaagagaggaggccggcggcgccagcagcgaggaggagagcggcgaggacaccggcccccaggacgcccaggagtacggcaactaccagcccggcagcctgtgcggctactgcagcttctgcaacagatgcaccgagtgcgagagctgccactgcgacgaggagaacatgggcgagcactgcgaccagtgccagcactgccagttctgctacctgtgccccctggtgtgcgagaccgtgtgcgcccccggcagctacgtggactacttcagcagcagcctgtaccaggccctggccgacatgctggagacccccgagccctag

SEQ ID NO: 84526 - DNA, 1170 bp, synthetic construct
  misc_feature 1..1170: note = Description of Artificial Sequence: Synthetic coding sequence
  source 1..1170: mol_type = other DNA
gaggacgacaacgacgacgacgacgtgagcaccgagtacggccaccaggcccacagacaccaggaccacagaaaggaggaggtggaggccgtgagcggcgagcaccaccaccacgtgcccgaccacagacaccagggccacagagacgaggaggaggacgaggacgtgagcaccgagagatggcaccagggcccccagcacgtgcaccacggcctggtggacgaggaggaggaggaggaggagatcaccgtgcagttcggccactacgtggccagccaccagcccagaggccacaagagcgacgaggaggacttccaggacgagtacaagaccgaggtgccccaccaccaccaccacagagtgcccagagaggaggacgaggaggtgagcgccgagctgggccaccaggcccccagccacagacagagccaccaggacgaggagaccggccacggccagagaggcagcatcaaggagatgagccaccacccccccggccacaccgtggtgaaggacagaagccacctgagaaaggacgacagcgaggaggagaaggagaaggaggaggaccccggcagccacgaggaggacgacgagagcagcgagcagggcgagaagggcacccaccacggcagcagagaccaggaggacgaggaggacgaggaggagggccacggcctgagcctgaaccaggaggaggaggaggaggaggacgaggagagaagagaggagagagccgaggtgggcgcccccctgagccccgaccacagcgaggaggaggaggaggaggaggagggcctggaggaggacgagcccagattcaccatcatccccaaccccctggacagaagagaggaggccggcggcgccagcagcgaggaggagagcggcgaggacaccggcccccaggacgcccaggagtacggcaactaccagcccggcagcctgtgcggctactgcagcttctgcaacagatgcaccgagtgcgagagctgccactgcgacgaggagaacatgggcgagcactgcgaccagtgccagcactgccagttctgctacctgtgccccctggtgtgcgagaccgtgtgcgcccccggcagctacgtggactacttcagcagcagcctgtaccaggccctggccgacatgctggagacccccgagccctag

SEQ ID NO: 84527 - DNA, 1365 bp, synthetic construct
  misc_feature 1..1365: note = Description of Artificial Sequence: Synthetic coding sequence
  source 1..1365: mol_type = other DNA
atgggccaccacagaccctggctgcacgccagcgtgctgtgggccggcgtggccagcctgctgctgccccccgccatgacccagcagctgagaggcgacggcctgggcttcagaaacagaaacaaggacgtgagcaccgagaacggccaccacttctggagccaccccgacagagagaaggaggacgaggacgtgagcaaggagtacggccacctgctgcccggccacagaagccaggaccacaaggtgggcgacgagggcgtgagcggcgaggaggtgttcgccgagcacggcggccaggccagaggccacagaggccacggcagcgaggacaccgaggacagcgccgagcacagacaccacctgcccagccacagaagccacagccaccaggacgaggacgaggacgaggtggtgagcagcgagcaccaccaccacatcctgagacacggccacagaggccacgacggcgaggacgacgagggcgaggaggaggaggaggaggaggaggaggaggaggaggccagcaccgagtacggccaccaggcccacagacacagaggccacggcagcgaggaggacgaggacgtgagcgacggccaccaccaccacggccccagccacagacaccagggccacgaggaggacgacgacgacgacgacgacgacgacgacgacgacgacgacgacgacgtgagcatcgagtacagacaccaggcccacagacaccagggccacggcatcgaggaggacgaggacgtgagcgacggccaccaccacagagaccccagccacagacacagaagccacgaggaggacgacaacgacgacgacgacgtgagcaccgagtacggccaccaggcccacagacaccaggaccacagaaaggaggaggtggaggccgtgagcggcgagcaccaccaccacgtgcccgaccacagacaccagggccacagagacgaggaggaggacgaggacgtgagcaccgagagatggcaccagggcccccagcacgtgcaccacggcctggtggacgaggaggaggaggaggaggagatcaccgtgcagttcggccactacgtggccagccaccagcccagaggccacaagagcgacgaggaggacttccaggacgagtacaagaccgaggtgccccaccaccaccaccacagagtgcccagagaggaggacgaggaggtgagcgccgagctgggccaccaggcccccagccacagacagagccaccaggacgaggagaccggccacggccagagaggcagcatcaaggagatgagccaccacccccccggccacaccgtggtgaaggacagaagccacctgagaaaggacgacagcgaggagtag

SEQ ID NO: 84528 - DNA, 381 bp, synthetic construct
  misc_feature 1..381: note = Description of Artificial Sequence: Synthetic coding sequence
  source 1..381: mol_type = other DNA
atggccgacgagatcgccaaggcccaggtggccagacccggcggcgacaccatcttcggcaagatcatcagaaaggagatccccgccaagatcatcttcgaggacgacagatgcctggccttccacgacatcagcccccaggcccccacccacttcctggtgatccccaagaagcacatcagccagatcagcgtggccgaggacgacgacgagagcctgctgggccacctgatgatcgtgggcaagaagtgcgccgccgacctgggcctgaacaagggctacagaatggtggtgaacgagggcagcgacggcggccagagcgtgtaccacgtgcacctgcacgtgctgggcggcagacagatgcactggccccccggctag

SEQ ID NO: 84529 - DNA, 492 bp, synthetic construct
  misc_feature 1..492: note = Description of Artificial Sequence: Synthetic coding sequence
  source 1..492: mol_type = other DNA
atggccgccgccgtggtgctggccgccggcctgagagccgccagaagagccgtggccgccaccggcgtgagaggcggccaggtgagaggcgccgccggcgtgaccgacggcaacgaggtggccaaggcccagcaggccacccccggcggcgccgcccccaccatcttcagcagaatcctggacaagagcctgcccgccgacatcctgtacgaggaccagcagtgcctggtgttcagagacgtggccccccaggcccccgtgcacttcctggtgatccccaagaagcccatccccagaatcagccaggccgaggaggaggaccagcagctgctgggccacctgctgctggtggccaagcagaccgccaaggccgagggcctgggcgacggctacagactggtgatcaacgacggcaagctgggcgcccagagcgtgtaccacctgcacatccacgtgctgggcggcagacagctgcagtggccccccggctag

SEQ ID NO: 84530 - DNA, 615 bp, synthetic construct
  misc_feature 1..615: note = Description of Artificial Sequence: Synthetic coding sequence
  source 1..615: mol_type = other DNA
atggccaaggtgcaggtgaacaacgtggtggtgctggacaaccccagccccttctacaaccccttccagttcgagatcaccttcgagtgcatcgaggacctgagcgaggacctggagtggaagatcatctacgtgggcagcgccgagagcgaggagtacgaccaggtgctggacagcgtgctggtgggccccgtgcccgccggcagacacatgttcgtgttccaggccgacgcccccaaccccggcctgatccccgacgccgacgccgtgggcgtgaccgtggtgctgatcacctgcacctacagaggccaggagttcatcagagtgggctactacgtgaacaacgagtacaccgagaccgagctgagagagaacccccccgtgaagcccgacttcagcaagctgcagagaaacatcctggccagcaaccccagagtgaccagattccacatcaactgggaggacaacaccgagaagctggaggacgccgagagcagcaaccccaacctgcagagcctgctgagcaccgacgccctgcccagcgccagcaagggctggagcaccagcgagaacagcctgaacgtgatgctggagagccacatggactgcatgtag

SEQ ID NO: 84531 - DNA, 1329 bp, synthetic construct
  misc_feature 1..1329: note = Description of Artificial Sequence: Synthetic coding sequence
  source 1..1329: mol_type = other DNA
atggccggcgagggcgaccagcaggacgccgcccacaacatgggcaaccacctgcccctgctgcccgccgagagcgaggaggaggacgagatggaggtggaggaccaggacagcaaggaggccaagaagcccaacatcatcaacttcgacaccagcctgcccaccagccacacctacctgggcgccgacatggaggagttccacggcagaaccctgcacgacgacgacagctgccaggtgatccccgtgctgccccaggtgatgatgatcctgatccccggccagaccctgcccctgcagctgttccacccccaggaggtgagcatggtgagaaacctgatccagaaggacagaaccttcgccgtgctggcctacagcaacgtgcaggagagagaggcccagttcggcaccaccgccgagatctacgcctacagagaggagcaggacttcggcatcgagatcgtgaaggtgaaggccatcggcagacagagattcaaggtgctggagctgagaacccagagcgacggcatccagcaggccaaggtgcagatcctgcccgagtgcgtgctgcccagcaccatgagcgccgtgcagctggagagcctgaacaagtgccagatcttccccagcaagcccgtgagcagagaggaccagtgcagctacaagtggtggcagaagtaccagaagagaaagttccactgcgccaacctgaccagctggcccagatggctgtacagcctgtacgacgccgagaccctgatggacagaatcaagaagcagctgagagagtgggacgagaacctgaaggacgacagcctgcccagcaaccccatcgacttcagctacagagtggccgcctgcctgcccatcgacgacgtgctgagaatccagctgctgaagatcggcagcgccatccagagactgagatgcgagctggacatcatgaacaagtgcaccagcctgtgctgcaagcagtgccaggagaccgagatcaccaccaagaacgagatcttcagcctgagcctgtgcggccccatggccgcctacgtgaacccccacggctacgtgcacgagaccctgaccgtgtacaaggcctgcaacctgaacctgatcggcagacccagcaccgagcacagctggttccccggctacgcctggaccgtggcccagtgcaagatctgcgccagccacatcggctggaagttcaccgccaccaagaaggacatgagcccccagaagttctggggcctgaccagaagcgccctgctgcccaccatccccgacaccgaggacgagatcagccccgacaaggtgatcctgtgcctgtag

SEQ ID NO: 84532 - DNA, 1308 bp, synthetic construct
  misc_feature 1..1308: note = Description of Artificial Sequence: Synthetic coding sequence
  source 1..1308: mol_type = other DNA
atggccgagagagccgccctggaggagctggtgaagctgcagggcgagagagtgagaggcctgaagcagcagaaggccagcgccgagctgatcgaggaggaggtggccaagctgctgaagctgaaggcccagctgggccccgacgagagcaagcagaagttcgtgctgaagacccccaagggcaccagagactacagccccagacagatggccgtgagagagaaggtgttcgacgtgatcatcagatgcttcaagagacacggcgccgaggtgatcgacacccccgtgttcgagctgaaggacttcgacatcgccggcaacttcgaccccatgatccccgacgccgagtgcctgaagatcatgtgcgagatcctgagcagcctgcagatcggcgacttcctggtgaaggtgaacgacagaagaatcctggacggcatgttcgccatctgcggcgtgagcgacagcaagttcagaaccatctgcagcagcgtggacaagctggacaaggtgagctgggaggaggtgaagaacgagatggtgggcgagaagggcctggcccccgaggtggccgacagaatcggcgactacgtgcagcagcacggcggcgtgagcctggtggagcagctgctgcaggaccccaagctgagccagaacaagcaggccctggagggcctgggcgacctgaagctgctgttcgagtacctgaccctgttcggcatcgacgacaagatcagcttcgacctgagcctggccagaggcctggactactacaccggcgtgatctacgaggccgtgctgctgcagacccccgcccaggccggcgaggagcccctgggcgtgggcagcgtggccgccggcggcagatacgacggcctggtgggcatgttcgaccccaagggcagaaaggtgccctgcgtgggcctgagcatcggcgtggagagaatcttcagcatcgtggagcagagactggaggccctggaggagaagatcagaaccaccgagacccaggtgctggtggccagcgcccagaagaagctgctggaggagagactgaagctggtgagcgagctgtgggacgccggcatcaaggccgagctgctgtacaagaagaaccccaagctgctgaaccagctgcagtactgcgaggaggccggcatccccctggtggccatcatcggcgagcaggagctgaaggacggcgtgatcaagctgagaagcgtgaccagcagagaggaggtggacgtgagaagagaggacctggtggaggagatcaagagaagaaccggccagcccctgtgcatctgctag

SEQ ID NO: 84533 - DNA, 1188 bp, synthetic construct
  misc_feature 1..1188: note = Description of Artificial Sequence: Synthetic coding sequence
  source 1..1188: mol_type = other DNA
atggccgagagagccgccctggaggagctggtgaagctgcagggcgagagagtgagaggcctgaagcagcagaaggccagcgccgagctgatcgaggaggaggtggccaagctgctgaagctgaaggcccagctgggccccgacgagagcaagcagaagttcgtgctgaagacccccaaggacttcgacatcgccggcaacttcgaccccatgatccccgacgccgagtgcctgaagatcatgtgcgagatcctgagcagcctgcagatcggcgacttcctggtgaaggtgaacgacagaagaatcctggacggcatgttcgccatctgcggcgtgagcgacagcaagttcagaaccatctgcagcagcgtggacaagctggacaaggtgagctgggaggaggtgaagaacgagatggtgggcgagaagggcctggcccccgaggtggccgacagaatcggcgactacgtgcagcagcacggcggcgtgagcctggtggagcagctgctgcaggaccccaagctgagccagaacaagcaggccctggagggcctgggcgacctgaagctgctgttcgagtacctgaccctgttcggcatcgacgacaagatcagcttcgacctgagcctggccagaggcctggactactacaccggcgtgatctacgaggccgtgctgctgcagacccccgcccaggccggcgaggagcccctgggcgtgggcagcgtggccgccggcggcagatacgacggcctggtgggcatgttcgaccccaagggcagaaaggtgccctgcgtgggcctgagcatcggcgtggagagaatcttcagcatcgtggagcagagactggaggccctggaggagaagatcagaaccaccgagacccaggtgctggtggccagcgcccagaagaagctgctggaggagagactgaagctggtgagcgagctgtgggacgccggcatcaaggccgagctgctgtacaagaagaaccccaagctgctgaaccagctgcagtactgcgaggaggccggcatccccctggtggccatcatcggcgagcaggagctgaaggacggcgtgatcaagctgagaagcgtgaccagcagagaggaggtggacgtgagaagagaggacctggtggaggagatcaagagaagaaccggccagcccctgtgcatctgctag

SEQ ID NO: 84534 - DNA, 1410 bp, synthetic construct
  misc_feature 1..1410: note = Description of Artificial Sequence: Synthetic coding sequence
  source 1..1410: mol_type = other DNA
atggccgagagagccgccctggaggagctggtgaagctgcagggcgagagagtgagaggcctgaagcagcagaaggccagcgccgagctgatcgaggaggaggtggccaagctgctgaagctgaaggcccagctgggccccgacgagagcaagcagaagttcgtgctgaagacccccaaggagaccctgatgggcaagtacggcgaggacagcaagctgatctacgacctgaaggaccagggcggcgagctgctgagcctgagatacgacctgaccgtgcccttcgccagatacctggccatgaacaagctgaccaacatcaagagataccacatcgccaaggtgtacagaagagacaaccccgccatgaccagaggcagatacagagagttctaccagtgcgacttcgacatcgccggcaacttcgaccccatgatccccgacgccgagtgcctgaagatcatgtgcgagatcctgagcagcctgcagatcggcgacttcctggtgaaggtgaacgacagaagaatcctggacggcatgttcgccatctgcggcgtgagcgacagcaagttcagaaccatctgcagcagcgtggacaagctggacaaggtgagctgggaggaggtgaagaacgagatggtgggcgagaagggcctggcccccgaggtggccgacagaatcggcgactacgtgcagcagcacggcggcgtgagcctggtggagcagctgctgcaggaccccaagctgagccagaacaagcaggccctggagggcctgggcgacctgaagctgctgttcgagtacctgaccctgttcggcatcgacgacaagatcagcttcgacctgagcctggccagaggcctggactactacaccggcgtgatctacgaggccgtgctgctgcagacccccgcccaggccggcgaggagcccctgggcgtgggcagcgtggccgccggcggcagatacgacggcctggtgggcatgttcgaccccaagggcagaaaggtgccctgcgtgggcctgagcatcggcgtggagagaatcttcagcatcgtggagcagagactggaggccctggaggagaagatcagaaccaccgagacccaggtgctggtggccagcgcccagaagaagctgctggaggagagactgaagctggtgagcgagctgtgggacgccggcatcaaggccgagctgctgtacaagaagaaccccaagctgctgaaccagctgcagtactgcgaggaggccggcatccccctggtggccatcatcggcgagcaggagctgaaggacggcgtgatcaagctgagaagcgtgaccagcagagaggaggtggacgtgagaagagaggacctggtggaggagatcaagagaagaaccggccagcccctgtgcatctgctag

SEQ ID NO: 84535 - DNA, 945 bp, synthetic construct
  misc_feature 1..945: note = Description of Artificial Sequence: Synthetic coding sequence
  source 1..945: mol_type = other DNA
atgaccagaggcagatacagagagttctaccagtgcgacttcgacatcgccggcaacttcgaccccatgatccccgacgccgagtgcctgaagatcatgtgcgagatcctgagcagcctgcagatcggcgacttcctggtgaaggtgagctgggaggaggtgaagaacgagatggtgggcgagaagggcctggcccccgaggtggccgacagaatcggcgactacgtgcagcagcacggcggcgtgagcctggtggagcagctgctgcaggaccccaagctgagccagaacaagcaggccctggagggcctgggcgacctgaagctgctgttcgagtacctgaccctgttcggcatcgacgacaagatcagcttcgacctgagcctggccagaggcctggactactacaccggcgtgatctacgaggccgtgctgctgcagacccccgcccaggccggcgaggagcccctgggcgtgggcagcgtggccgccggcggcagatacgacggcctggtgggcatgttcgaccccaagggcagaaaggtgccctgcgtgggcctgagcatcggcgtggagagaatcttcagcatcgtggagcagagactggaggccctggaggagaagatcagaaccaccgagacccaggtgctggtggccagcgcccagaagaagctgctggaggagagactgaagctggtgagcgagctgtgggacgccggcatcaaggccgagctgctgtacaagaagaaccccaagctgctgaaccagctgcagtactgcgaggaggccggcatccccctggtggccatcatcggcgagcaggagctgaaggacggcgtgatcaagctgagaagcgtgaccagcagagaggaggtggacgtgagaagagaggacctggtggaggagatcaagagaagaaccggccagcccctgtgcatctgctag

SEQ ID NO: 84536 - DNA, 1530 bp, synthetic construct
  misc_feature 1..1530: note = Description of Artificial Sequence: Synthetic coding sequence
  source 1..1530: mol_type = other DNA
atggccgagagagccgccctggaggagctggtgaagctgcagggcgagagagtgagaggcctgaagcagcagaaggccagcgccgagctgatcgaggaggaggtggccaagctgctgaagctgaaggcccagctgggccccgacgagagcaagcagaagttcgtgctgaagacccccaagggcaccagagactacagccccagacagatggccgtgagagagaaggtgttcgacgtgatcatcagatgcttcaagagacacggcgccgaggtgatcgacacccccgtgttcgagctgaaggagaccctgatgggcaagtacggcgaggacagcaagctgatctacgacctgaaggaccagggcggcgagctgctgagcctgagatacgacctgaccgtgcccttcgccagatacctggccatgaacaagctgaccaacatcaagagataccacatcgccaaggtgtacagaagagacaaccccgccatgaccagaggcagatacagagagttctaccagtgcgacttcgacatcgccggcaacttcgaccccatgatccccgacgccgagtgcctgaagatcatgtgcgagatcctgagcagcctgcagatcggcgacttcctggtgaaggtgaacgacagaagaatcctggacggcatgttcgccatctgcggcgtgagcgacagcaagttcagaaccatctgcagcagcgtggacaagctggacaaggtgagctgggaggaggtgaagaacgagatggtgggcgagaagggcctggcccccgaggtggccgacagaatcggcgactacgtgcagcagcacggcggcgtgagcctggtggagcagctgctgcaggaccccaagctgagccagaacaagcaggccctggagggcctgggcgacctgaagctgctgttcgagtacctgaccctgttcggcatcgacgacaagatcagcttcgacctgagcctggccagaggcctggactactacaccggcgtgatctacgaggccgtgctgctgcagacccccgcccaggccggcgaggagcccctgggcgtgggcagcgtggccgccggcggcagatacgacggcctggtgggcatgttcgaccccaagggcagaaaggtgccctgcgtgggcctgagcatcggcgtggagagaatcttcagcatcgtggagcagagactggaggccctggaggagaagatcagaaccaccgagacccaggtgctggtggccagcgcccagaagaagctgctggaggagagactgaagctggtgagcgagctgtgggacgccggcatcaaggccgagctgctgtacaagaagaaccccaagctgctgaaccagctgcagtactgcgaggaggccggcatccccctggtggccatcatcggcgagcaggagctgaaggacggcgtgatcaagctgagaagcgtgaccagcagagaggaggtggacgtgagaagagaggacctggtggaggagatcaagagaagaaccggccagcccctgtgcatctgctag

SEQ ID NO: 84537 - DNA, 1323 bp, synthetic construct
  misc_feature 1..1323: note = Description of Artificial Sequence: Synthetic coding sequence
  source 1..1323: mol_type = other DNA
atggccgtgagagagaaggtgttcgacgtgatcatcagatgcttcaagagacacggcgccgaggtgatcgacacccccgtgttcgagctgaaggagaccctgatgggcaagtacggcgaggacagcaagctgatctacgacctgaaggaccagggcggcgagctgctgagcctgagatacgacctgaccgtgcccttcgccagatacctggccatgaacaagctgaccaacatcaagagataccacatcgccaaggtgtacagaagagacaaccccgccatgaccagaggcagatacagagagttctaccagtgcgacttcgacatcgccggcaacttcgaccccatgatccccgacgccgagtgcctgaagatcatgtgcgagatcctgagcagcctgcagatcggcgacttcctggtgaaggtgaacgacagaagaatcctggacggcatgttcgccatctgcggcgtgagcgacagcaagttcagaaccatctgcagcagcgtggacaagctggacaaggtgagctgggaggaggtgaagaacgagatggtgggcgagaagggcctggcccccgaggtggccgacagaatcggcgactacgtgcagcagcacggcggcgtgagcctggtggagcagctgctgcaggaccccaagctgagccagaacaagcaggccctggagggcctgggcgacctgaagctgctgttcgagtacctgaccctgttcggcatcgacgacaagatcagcttcgacctgagcctggccagaggcctggactactacaccggcgtgatctacgaggccgtgctgctgcagacccccgcccaggccggcgaggagcccctgggcgtgggcagcgtggccgccggcggcagatacgacggcctggtgggcatgttcgaccccaagggcagaaaggtgccctgcgtgggcctgagcatcggcgtggagagaatcttcagcatcgtggagcagagactggaggccctggaggagaagatcagaaccaccgagacccaggtgctggtggccagcgcccagaagaagctgctggaggagagactgaagctggtgagcgagctgtgggacgccggcatcaaggccgagctgctgtacaagaagaaccccaagctgctgaaccagctgcagtactgcgaggaggccggcatccccctggtggccatcatcggcgagcaggagctgaaggacggcgtgatcaagctgagaagcgtgaccagcagagaggaggtggacgtgagaagagaggacctggtggaggagatcaagagaagaaccggccagcccctgtgcatctgctag

SEQ ID NO: 84538 - DNA, 867 bp, synthetic construct
  misc_feature 1..867: note = Description of Artificial Sequence: Synthetic coding sequence
  source 1..867: mol_type = other DNA
atggccgagagagccgccctggaggagctggtgaagctgcagggcgagagagtgagaggcctgaagcagcagaaggccagcgccgagctgatcgaggaggaggtggccaagctgctgaagctgaaggcccagctgggccccgacgagagcaagcagaagttcgtgctgaagacccccaagggcaccagagactacagccccagacagatggccgtgagagagaaggtgttcgacgtgatcatcagatgcttcaagagacacggcgccgaggtgatcgacacccccgtgttcgagctgaaggtgaacgacagaagaatcctggacggcatgttcgccatctgcggcgtgagcgacagcaagttcagaaccatctgcagcagcgtggacaagctggacaaggtgagctgggaggaggtgaagaacgagatggtgggcgagaagggcctggcccccgaggtggccgacagaatcggcgactacgtgcagcagcacggcggcgtgagcctggtggagcagctgctgcaggaccccaagctgagccagaacaagcaggccctggagggcctgggcgacctgaagctgctgttcgagtacctgaccctgttcggcatcgacgacaagatcagcttcgacctgagcctggccagaggcctggactactacaccggcgtgatctacgaggccgtgctgctgcagacccccgcccaggccggcgaggagcccctgggcgtgggcagcgtggccgccggcggcagatacgacggcctggtgggcatgttcgaccccaagggcagaaaggtgccctgcgtgggcctgagcatcggcgtggagagaatcttcagcatcgtggagcagagactggagtag

SEQ ID NO: 84539 - DNA, 1350 bp, synthetic construct
  misc_feature 1..1350: note = Description of Artificial Sequence: Synthetic coding sequence
  source 1..1350: mol_type = other DNA
atggccgagagagccgccctggaggagctggtgaagctgcagggcgagagagtgagaggcctgaagcagcagaaggccagcgccgagctgatcgaggaggaggtggccaagctgctgaagctgaaggcccagctgggccccgacgagagcaagcagaagttcgtgctgaagacccccaaggagaccctgatgggcaagtacggcgaggacagcaagctgatctacgacctgaaggaccagggcggcgagctgctgagcctgagatacgacctgaccgtgcccttcgccagatacctggccatgaacaagctgaccaacatcaagagataccacatcgccaaggacttcgacatcgccggcaacttcgaccccatgatccccgacgccgagtgcctgaagatcatgtgcgagatcctgagcagcctgcagatcggcgacttcctggtgaaggtgaacgacagaagaatcctggacggcatgttcgccatctgcggcgtgagcgacagcaagttcagaaccatctgcagcagcgtggacaagctggacaaggtgagctgggaggaggtgaagaacgagatggtgggcgagaagggcctggcccccgaggtggccgacagaatcggcgactacgtgcagcagcacggcggcgtgagcctggtggagcagctgctgcaggaccccaagctgagccagaacaagcaggccctggagggcctgggcgacctgaagctgctgttcgagtacctgaccctgttcggcatcgacgacaagatcagcttcgacctgagcctggccagaggcctggactactacaccggcgtgatctacgaggccgtgctgctgcagacccccgcccaggccggcgaggagcccctgggcgtgggcagcgtggccgccggcggcagatacgacggcctggtgggcatgttcgaccccaagggcagaaaggtgccctgcgtgggcctgagcatcggcgtggagagaatcttcagcatcgtggagcagagactggaggccctggaggagaagatcagaaccaccgagacccaggtgctggtggccagcgcccagaagaagctgctggaggagagactgaagctggtgagcgagctgtgggacgccggcatcaaggccgagctgctgtacaagaagaaccccaagctgctgaaccagctgcagtactgcgaggaggccggcatccccctggtggccatcatcggcgagcaggagctgaaggacggcgtgatcaagctgagaagcgtgaccagcagagaggaggtggacgtgagaagagaggacctggtggaggagatcaagagaagaaccggccagcccctgtgcatctgctag

SEQ ID NO: 84540 - DNA, 1470 bp, synthetic construct
  misc_feature 1..1470: note = Description of Artificial Sequence: Synthetic coding sequence
  source 1..1470: mol_type = other DNA
atggccgagagagccgccctggaggagctggtgaagctgcagggcgagagagtgagaggcctgaagcagcagaaggccagcgccgagctgatcgaggaggaggtggccaagctgctgaagctgaaggcccagctgggccccgacgagagcaagcagaagttcgtgctgaagacccccaagggcaccagagactacagccccagacagatggccgtgagagagaaggtgttcgacgtgatcatcagatgcttcaagagacacggcgccgaggtgatcgacacccccgtgttcgagctgaaggagaccctgatgggcaagtacggcgaggacagcaagctgatctacgacctgaaggaccagggcggcgagctgctgagcctgagatacgacctgaccgtgcccttcgccagatacctggccatgaacaagctgaccaacatcaagagataccacatcgccaaggacttcgacatcgccggcaacttcgaccccatgatccccgacgccgagtgcctgaagatcatgtgcgagatcctgagcagcctgcagatcggcgacttcctggtgaaggtgaacgacagaagaatcctggacggcatgttcgccatctgcggcgtgagcgacagcaagttcagaaccatctgcagcagcgtggacaagctggacaaggtgagctgggaggaggtgaagaacgagatggtgggcgagaagggcctggcccccgaggtggccgacagaatcggcgactacgtgcagcagcacggcggcgtgagcctggtggagcagctgctgcaggaccccaagctgagccagaacaagcaggccctggagggcctgggcgacctgaagctgctgttcgagtacctgaccctgttcggcatcgacgacaagatcagcttcgacctgagcctggccagaggcctggactactacaccggcgtgatctacgaggccgtgctgctgcagacccccgcccaggccggcgaggagcccctgggcgtgggcagcgtggccgccggcggcagatacgacggcctggtgggcatgttcgaccccaagggcagaaaggtgccctgcgtgggcctgagcatcggcgtggagagaatcttcagcatcgtggagcagagactggaggccctggaggagaagatcagaaccaccgagacccaggtgctggtggccagcgcccagaagaagctgctggaggagagactgaagctggtgagcgagctgtgggacgccggcatcaaggccgagctgctgtacaagaagaaccccaagctgctgaaccagctgcagtactgcgaggaggccggcatccccctggtggccatcatcggcgagcaggagctgaaggacggcgtgatcaagctgagaagcgtgaccagcagagaggaggtggacgtgagaagagaggacctggtggaggagatcaagagaagaaccggccagcccctgtgcatctgctag

SEQ ID NO: 84541 - DNA, 1017 bp, synthetic construct
  misc_feature 1..1017: note = Description of Artificial Sequence: Synthetic coding sequence
  source 1..1017: mol_type = other DNA
atgatggccatgaacagcaagcagcccttcggcatgcaccccgtgctgcaggagcccaagttcagcagcctgcacagcggcagcgaggccatgagaagagtgtgcctgcccgccccccagctgcagggcaacatcttcggcagcttcgacgagagcctgctggccagagccgaggccctggccgccgtggacatcgtgagccacggcaagaaccaccccttcaagcccgacgccacctaccacaccatgagcagcgtgccctgcaccagcaccagcagcaccgtgcccatcagccaccccgccgccctgaccagccacccccaccacgccgtgcaccagggcctggagggcgacctgctggagcacatcagccccaccctgagcgtgagcggcctgggcgcccccgagcacagcgtgatgcccgcccagatccacccccaccacctgggcgccatgggccacctgcaccaggccatgggcatgagccacccccacaccgtggccccccacagcgccatgcccgcctgcctgagcgacgtggagagcgaccccagagagctggaggccttcgccgagagattcaagcagagaagaatcaagctgggcgtgacccaggccgacgtgggcgccgccctggccaacctgaagatccccggcgtgggcagcctgagccagagcaccatctgcagattcgagagcctgaccctgagccacaacaacatgatcgccctgaagcccgtgctgcaggcctggctggaggaggccgaggccgcctacagagagaagaacagcaagcccgagctgttcaacggcagcgagagaaagagaaagagaaccagcatcgccgcccccgagaagagaagcctggaggcctacttcgccatccagcccagacccagcagcgagaagatcgccgccatcgccgagaagctggacctgaagaagaacgtggtgagagtgtggttctgcaaccagagacagaagcagaagagaatgaagtacagcgccgtgcactag

SEQ ID NO: 84542 - DNA, 1038 bp, synthetic construct
  misc_feature 1..1038: note = Description of Artificial Sequence: Synthetic coding sequence
  source 1..1038: mol_type = other DNA
atgaccctgctggaggtgcccttcgccagatacctggccatgaacaaggtgaagaagatgaagagataccacgtgggcaaggtgtggagaagagagagccccaccatcgtgcagggcagatacagagagttctgccagtgcgacttcgacatcgccggccagttcgaccccatgatccccgacgccgagtgcctgaagatcatgtgcgagatcctgagcggcctgcagctgggcgacttcctgatcaagatggcctggaaggacgtgagacacgagatggtggtgaagaagggcctggcccccgaggtggccgacagaatcggcgactacgtgcagtgccacggcggcgtgagcctggtggagcagatgttccaggaccccagactgagccagaacaagcaggccctggagggcctgggcgacctgaagctgctgttcgagtacctgaccctgttcggcatcgccgacaagatcagcttcgacctgagcctggccagaggcctggactactacaccggcgtgatctacgaggccgtgctgctgcagacccccacccaggccggcgaggagcccctgaacgtgggcagcgtggccgccggcggcagatacgacggcctggtgggcatgttcgaccccaagggccacaaggtgccctgcgtgggcctgagcatcggcgtggagagaatcttctacatcgtggagcagagaatgaagaccaagggcgagaaggtgagaaccaccgagacccaggtgttcgtggccaccccccagaagaacttcctgcaggagagactgaagctgatcgccgagctgtgggacagcggcatcaaggccgagatgctgtacaagaacaaccccaagctgctgacccagctgcactactgcgagagcaccggcatccccctggtggtgatcatcggcgagcaggagctgaaggagggcgtgatcaagatcagaagcgtggccagcagagaggaggtggccatcaagagagagaacttcgtggccgagatccagaagagactgagcgagagctag

SEQ ID NO: 84543 - DNA, 1179 bp, synthetic construct
  misc_feature 1..1179: note = Description of Artificial Sequence: Synthetic coding sequence
  source 1..1179: mol_type = other DNA
atgcccctgctgggcctgctgcccagaagagcctgggccagcctgctgagccagctgctgagacccccctgcgccagctgcaccggcgccgtgagatgccagagccaggtggccgaggccgtgctgaccagccagctgaaggcccaccaggagaagcccaacttcatcatcaagacccccaaggacttcgacatcgccggccagttcgaccccatgatccccgacgccgagtgcctgaagatcatgtgcgagatcctgagcggcctgcagctgggcgacttcctgatcaaggtgaacgacagaagaatcgtggacggcatgttcgccgtgtgcggcgtgcccgagagcaagttcagagccatctgcagcagcatcgacaagctggacaagatggcctggaaggacgtgagacacgagatggtggtgaagaagggcctggcccccgaggtggccgacagaatcggcgactacgtgcagtgccacggcggcgtgagcctggtggagcagatgttccaggaccccagactgagccagaacaagcaggccctggagggcctgggcgacctgaagctgctgttcgagtacctgaccctgttcggcatcgccgacaagatcagcttcgacctgagcctggccagaggcctggactactacaccggcgtgatctacgaggccgtgctgctgcagacccccacccaggccggcgaggagcccctgaacgtgggcagcgtggccgccggcggcagatacgacggcctggtgggcatgttcgaccccaagggccacaaggtgccctgcgtgggcctgagcatcggcgtggagagaatcttctacatcgtggagcagagaatgaagaccaagggcgagaaggtgagaaccaccgagacccaggtgttcgtggccaccccccagaagaacttcctgcaggagagactgaagctgatcgccgagctgtgggacagcggcatcaaggccgagatgctgtacaagaacaaccccaagctgctgacccagctgcactactgcgagagcaccggcatccccctggtggtgatcatcggcgagcaggagctgaaggagggcgtgatcaagatcagaagcgtggccagcagagaggaggtggccatcaagagagagaacttcgtggccgagatccagaagagactgagcgagagctag

SEQ ID NO: 84544 - DNA, 1401 bp, synthetic construct
  misc_feature 1..1401: note = Description of Artificial Sequence: Synthetic coding sequence
  source 1..1401: mol_type = other DNA
atgcccctgctgggcctgctgcccagaagagcctgggccagcctgctgagccagctgctgagacccccctgcgccagctgcaccggcgccgtgagatgccagagccaggtggccgaggccgtgctgaccagccagctgaaggcccaccaggagaagcccaacttcatcatcaagacccccaaggagaccctgaccgagaagtacggcgaggacagcggcctgatgtacgacctgaaggaccagggcggcgagctgctgagcctgagatacgacctgaccgtgcccttcgccagatacctggccatgaacaaggtgaagaagatgaagagataccacgtgggcaaggtgtggagaagagagagccccaccatcgtgcagggcagatacagagagttctgccagtgcgacttcgacatcgccggccagttcgaccccatgatccccgacgccgagtgcctgaagatcatgtgcgagatcctgagcggcctgcagctgggcgacttcctgatcaaggtgaacgacagaagaatcgtggacggcatgttcgccgtgtgcggcgtgcccgagagcaagttcagagccatctgcagcagcatcgacaagctggacaagatggcctggaaggacgtgagacacgagatggtggtgaagaagggcctggcccccgaggtggccgacagaatcggcgactacgtgcagtgccacggcggcgtgagcctggtggagcagatgttccaggaccccagactgagccagaacaagcaggccctggagggcctgggcgacctgaagctgctgttcgagtacctgaccctgttcggcatcgccgacaagatcagcttcgacctgagcctggccagaggcctggactactacaccggcgtgatctacgaggccgtgctgctgcagacccccacccaggccggcgaggagcccctgaacgtgggcagcgtggccgccggcggcagatacgacggcctggtgggcatgttcgaccccaagggccacaaggtgccctgcgtgggcctgagcatcggcgtggagagaatcttctacatcgtggagcagagaatgaagaccaagggcgagaaggtgagaaccaccgagacccaggtgttcgtggccaccccccagaagaacttcctgcaggagagactgaagctgatcgccgagctgtgggacagcggcatcaaggccgagatgctgtacaagaacaaccccaagctgctgacccagctgcactactgcgagagcaccggcatccccctggtggtgatcatcggcgagcaggagctgaaggagggcgtgatcaagatcagaagcgtggccagcagagaggaggtggccatcaagagagagaacttcgtggccgagatccagaagagactgagcgagagctag

SEQ ID NO: 84545 - DNA, 1005 bp, synthetic construct
  misc_feature 1..1005: note = Description of Artificial Sequence: Synthetic coding sequence
  source 1..1005: mol_type = other DNA
atgcccctgctgggcctgctgcccagaagagcctgggccagcctgctgagccagctgctgagacccccctgcgccagctgcaccggcgccgtgagatgccagagccaggacttcgacatcgccggccagttcgaccccatgatccccgacgccgagtgcctgaagatcatgtgcgagatcctgagcggcctgcagctgggcgacttcctgatcaagatggcctggaaggacgtgagacacgagatggtggtgaagaagggcctggcccccgaggtggccgacagaatcggcgactacgtgcagtgccacggcggcgtgagcctggtggagcagatgttccaggaccccagactgagccagaacaagcaggccctggagggcctgggcgacctgaagctgctgttcgagtacctgaccctgttcggcatcgccgacaagatcagcttcgacctgagcctggccagaggcctggactactacaccggcgtgatctacgaggccgtgctgctgcagacccccacccaggccggcgaggagcccctgaacgtgggcagcgtggccgccggcggcagatacgacggcctggtgggcatgttcgaccccaagggccacaaggtgccctgcgtgggcctgagcatcggcgtggagagaatcttctacatcgtggagcagagaatgaagaccaagggcgagaaggtgagaaccaccgagacccaggtgttcgtggccaccccccagaagaacttcctgcaggagagactgaagctgatcgccgagctgtgggacagcggcatcaaggccgagatgctgtacaagaacaaccccaagctgctgacccagctgcactactgcgagagcaccggcatccccctggtggtgatcatcggcgagcaggagctgaaggagggcgtgatcaagatcagaagcgtggccagcagagaggaggtggccatcaagagagagaacttcgtggccgagatccagaagagactgagcgagagctag

SEQ ID NO: 84546 - DNA, 1446 bp, synthetic construct
  misc_feature 1..1446: note = Description of Artificial Sequence: Synthetic coding sequence
  source 1..1446: mol_type = other DNA
atgcccctgctgggcctgctgcccagaagagcctgggccagcctgctgagccagctgctgagacccccctgcgccagctgcaccggcgccgtgagatgccagagccagggcaccagagacctgagcccccagcacatggtggtgagagagaagatcctggacctggtgatcagctgcttcaagagacacggcgccaagggcatggacacccccgccttcgagctgaaggagaccctgaccgagaagtacggcgaggacagcggcctgatgtacgacctgaaggaccagggcggcgagctgctgagcctgagatacgacctgaccgtgcccttcgccagatacctggccatgaacaaggtgaagaagatgaagagataccacgtgggcaaggtgtggagaagagagagccccaccatcgtgcagggcagatacagagagttctgccagtgcgacttcgacatcgccggccagttcgaccccatgatccccgacgccgagtgcctgaagatcatgtgcgagatcctgagcggcctgcagctgggcgacttcctgatcaaggtgaacgacagaagaatcgtggacggcatgttcgccgtgtgcggcgtgcccgagagcaagttcagagccatctgcagcagcatcgacaagctggacaagatggcctggaaggacgtgagacacgagatggtggtgaagaagggcctggcccccgaggtggccgacagaatcggcgactacgtgcagtgccacggcggcgtgagcctggtggagcagatgttccaggaccccagactgagccagaacaagcaggccctggagggcctgggcgacctgaagctgctgttcgagtacctgaccctgttcggcatcgccgacaagatcagcttcgacctgagcctggccagaggcctggactactacaccggcgtgatctacgaggccgtgctgctgcagacccccacccaggccggcgaggagcccctgaacgtgggcagcgtggccgccggcggcagatacgacggcctggtgggcatgttcgaccccaagggccacaaggtgccctgcgtgggcctgagcatcggcgtggagagaatcttctacatcgtggagcagagaatgaagaccaagggcgagaaggtgagaaccaccgagacccaggtgttcgtggccaccccccagaagaacttcctgcaggagagactgaagctgatcgccgagctgtgggacagcggcatcaaggccgagatgctgtacaagaacaaccccaagctgctgacccagctgcactactgcgagagcaccggcatccccctggtggtgatcatcggcgagcaggagctgaaggagggcgtgatcaagatcagaagcgtggccagcagagaggaggtggccatcaagagagagaacttcgtggccgagatccagaagagactgagcgagagctag

SEQ ID NO: 84547 - DNA, 1185 bp, synthetic construct
  misc_feature 1..1185: note = Description of Artificial Sequence: Synthetic coding sequence
  source 1..1185: mol_type = other DNA
atggacagcgccctgagcgacccccacaacggcagcgccgaggccggcggccccaccaacagcaccaccagaccccccagcacccccgagggcatcgccctggcctacggcagcctgctgctgatggccctgctgcccatcttcttcggcgccctgagaagcgtgagatgcgccagaggcaagaacgccagcgacatgcccgagaccatcaccagcagagacgccgccagattccccatcatcgccagctgcaccctgctgggcctgtacctgttcttcaagatcttcagccaggagtacatcaacctgctgctgagcatgtacttcttcgtgctgggcatcctggccctgagccacaccatcagccccttcatgaacaagttcttccccgccagcttccccaacagacagtaccagctgctgttcacccagggcagcggcgagaacaaggaggagatcatcaactacgagttcgacaccaaggacctggtgtgcctgggcctgagcagcatcgtgggcgtgtggtacctgctgagaaagcactggatcgccaacaacctgttcggcctggccttcagcctgaacggcgtggagctgctgcacctgaacaacgtgagcaccggctgcatcctgctgggcggcctgttcatctacgacgtgttctgggtgttcggcaccaacgtgatggtgaccgtggccaagagcttcgaggcccccatcaagctggtgttcccccaggacctgctggagaagggcctggaggccaacaacttcgccatgctgggcctgggcgacgtggtgatccccggcatcttcatcgccctgctgctgagattcgacatcagcctgaagaagaacacccacacctacttctacaccagcttcgccgcctacatcttcggcctgggcctgaccatcttcatcatgcacatcttcaagcacgcccagcccgccctgctgtacctggtgcccgcctgcatcggcttccccgtgctggtggccctggccaagggcgaggtgaccgagatgttcagctacgagagcagcgccgagatcctgccccacacccccagactgacccacttccccaccgtgagcggcagccccgccagcctggccgacagcatgcagcagaagctggccggccccagaagaagaagaccccagaaccccagcgccatgtag

SEQ ID NO: 84548 - DNA, 1134 bp, synthetic construct
  misc_feature 1..1134: note = Description of Artificial Sequence: Synthetic coding sequence
  source 1..1134: mol_type = other DNA
atggacagcgccctgagcgacccccacaacggcagcgccgaggccggcggccccaccaacagcaccaccagaccccccagcacccccgagggcatcgccctggcctacggcagcctgctgctgatggccctgctgcccatcttcttcggcgccctgagaagcgtgagatgcgccagaggcaagaacgccagcgacatgcccgagaccatcaccagcagagacgccgccagattccccatcatcgccagctgcaccctgctgggcctgtacctgttcttcaagatcttcagccaggagtacatcaacctgctgctgagcatgtacttcttcgtgctgggcatcctggccctgagccacaccatcagccccttcatgaacaagttcttccccgccagcttccccaacagacagtaccagctgctgttcacccagggcagcggcgagaacaaggaggagatcatcaactacgagttcgacaccaaggacctggtgtgcctgggcctgagcagcatcgtgggcgtgtggtacctgctgagaaagcactggatcgccaacaacctgttcggcctggccttcagcctgaacggcgtggagctgctgcacctgaacaacgtgagcaccggctgcatcctgctgggcggcctgttcatctacgacgtgttctgggtgttcggcaccaacgtgatggtgaccgtggccaagagcttcgaggcccccatcaagctggtgttcccccaggacctgctggagaagggcctggaggccaacaacttcgccatgctgggcctgggcgacgtggtgatccccggcatcttcatcgccctgctgctgagattcgacatcagcctgaagaagaacacccacacctacttctacaccagcttcgccgcctacatcttcggcctgggcctgaccatcttcatcatgcacatcttcaagcacgcccagcccgccctgctgtacctggtgcccgcctgcatcggcttccccgtgctggtggccctggccaagggcgaggtgaccgagatgttcagctacgaggagagcaaccccaaggaccccgccgccgtgaccgagagcaaggagggcaccgaggccagcgccagcaagggcctggagaagaaggagaagtag

SEQ ID NO: 84549 - DNA, 1008 bp, synthetic construct
  misc_feature 1..1008: note = Description of Artificial Sequence: Synthetic coding sequence
  source 1..1008: mol_type = other DNA
atggacagcgccctgagcgacccccacaacggcagcgccgaggccggcggccccaccaacagcaccaccagaccccccagcacccccgagggcatcgccctggcctacggcagcctgctgctgatggccctgctgcccatcttcttcggcgccctgagaagcgtgagatgcgccagaggcaagaacgccagcgacatgcccgagaccatcaccagcagagacgccgccagattccccatcatcgccagctgcaccctgctgggcctgtacctgttcttcaagatcttcagccaggagtacatcaacctgctgctgagcatgtacttcttcgtgctgggcatcctggccctgagccacaccatcagccccttcatgaacaagttcttccccgccagcttccccaacagacagtaccagctgctgttcacccagggcagcggcgagaacaaggaggagatcatcaactacgagttcgacaccaaggacctggtgtgcctgggcctgagcagcatcgtgggcgtgtggtacctgctgagaaaggtgttcggcaccaacgtgatggtgaccgtggccaagagcttcgaggcccccatcaagctggtgttcccccaggacctgctggagaagggcctggaggccaacaacttcgccatgctgggcctgggcgacgtggtgatccccggcatcttcatcgccctgctgctgagattcgacatcagcctgaagaagaacacccacacctacttctacaccagcttcgccgcctacatcttcggcctgggcctgaccatcttcatcatgcacatcttcaagcacgcccagcccgccctgctgtacctggtgcccgcctgcatcggcttccccgtgctggtggccctggccaagggcgaggtgaccgagatgttcagctacgaggagagcaaccccaaggaccccgccgccgtgaccgagagcaaggagggcaccgaggccagcgccagcaagggcctggagaagaaggagaagtag

SEQ ID NO: 84550 - DNA, 1281 bp, synthetic construct
  misc_feature 1..1281: note = Description of Artificial Sequence: Synthetic coding sequence
  source 1..1281: mol_type = other DNA
atggacagcgccctgagcgacccccacaacggcagcgccgaggccggcggccccaccaacagcaccaccagaccccccagcacccccgagggcatcgccctggcctacggcagcctgctgctgatggccctgctgcccatcttcttcggcgccctgagaagcgtgagatgcgccagaggcaagaacgccagcgacatgcccgagaccatcaccagcagagacgccgccagattccccatcatcgccagctgcaccctgctgggcctgtacctgttcttcaagatcttcagccaggagtacatcaacctgctgctgagcatgtacttcttcgtgctgggcatcctggccctgagccacaccatcagccccttcatgaacaagttcttccccgccagcttccccaacagacagtaccagctgctgttcacccagggcagcggcgagaacaaggaggagatcatcaactacgagttcgacaccaaggacctggtgtgcctgggcctgagcagcatcgtgggcgtgtggtacctgctgagaaagcactggatcgccaacaacctgttcggcctggccttcagcctgaacggcgtggagctgctgcacctgaacaacgtgagcaccggctgcatcctgctgggcggcctgttcatctacgacgtgttctgggtgttcggcaccaacgtgatggtgaccgtggccaagagcttcgaggcccccatcaagctggtgttcccccaggacctgctggagaagggcctggaggccaacaacttcgccatgctgggcctgggcgacgtggtgatccccggcatcttcatcgccctgctgctgagattcgacatcagcctgaagaagaacacccacacctacttctacaccagcttcgccgcctacatcttcggcctgggcctgaccatcttcatcatgcacatcttcaagcacgcccagcccgccctgctgtacctggtgcccgcctgcatcggcttccccgtgctggtggccctggccaagggcgaggtgaccgagatgttcagctacgagagcagcgccgagatcctgccccacacccccagactgacccacttccccaccgtgagcggcagccccgccagcctggccgacagcatgcagcagaagctggccggccccagaagaagaagaccccagaaccccagcgccatctacgaggagagcaaccccaaggaccccgccgccgtgaccgagagcaaggagggcaccgaggccagcgccagcaagggcctggagaagaaggagaagtag

SEQ ID NO: 84551 - DNA, 3411 bp, synthetic construct
  misc_feature 1..3411: note = Description of Artificial Sequence: Synthetic coding sequence
  source 1..3411: mol_type = other DNA
atgttcagcagaaagaagagagagctgatgaagacccccagcatcagcaagaagaacagagccggcagccccagcccccagcccagcggcgagctgcccagaaaggacggcgccgacgccgtgttccccggccccagcctggagccccccgccggcagcagcggcgtgaaggccaccggcaccctgaagagacccaccagcctgagcagacacgccagcgccgccggcttccccctgagcggcgccgccagctggaccctgggcagaagccacagaagccccctgaccgccgccagccccggcgagctgcccaccgagggcgccggccccgacgtggtggaggacatcagccacctgctggccgacgtggccagattcgccgagggcctggagaagctgaaggagtgcgtgctgagagacgacctgctggaggccagaagacccagagcccacgagtgcctgggcgaggccctgagagtgatgcaccagatcatcagcaagtaccccctgctgaacaccgtggagaccctgaccgccgccggcaccctgatcgccaaggtgaaggccttccactacgagagcaacaacgacctggagaagcaggagttcgagaaggccctggagaccatcgccgtggccttcagcagcaccgtgagcgagttcctgatgggcgaggtggacagcagcaccctgctggccgtgccccccggcgacagcagccagagcatggagagcctgtacggccccggcagcgagggcaccccccccagcctggaggactgcgacgccggctgcctgcccgccgaggaggtggacgtgctgctgcagagatgcgagggcggcgtggacgccgccctgctgtacgccaagaacatggccaagtacatgaaggacctgatcagctacctggagaagagaaccaccctggagatggagttcgccaagggcctgcagaagatcgcccacaactgcagacagagcgtgatgcaggagccccacatgcccctgctgagcatctacagcctggccctggagcaggacctggagttcggccacagcatggtgcaggccgtgggcaccctgcagacccagaccttcatgcagcccctgaccctgagaagactggagcacgagaagagaagaaaggagatcaaggaggcctggcacagagcccagagaaagctgcaggaggccgagagcaacctgagaaaggccaagcagggctacgtgcagagatgcgaggaccacgacaaggccagattcctggtggccaaggccgaggaggagcaggccggcagcgcccccggcgccggcagcaccgccaccaagaccctggacaagagaagaagactggaggaggaggccaagaacaaggccgaggaggccatggccacctacagaacctgcgtggccgacgccaagacccagaagcaggagctggaggacaccaaggtgaccgccctgagacagatccaggaggtgatcagacagagcgaccagaccatcaagagcgccaccatcagctactaccagatgatgcacatgcagaccgcccccctgcccgtgcacttccagatgctgtgcgagagcagcaagctgtacgaccccggccagcagtacgccagccacgtgagacagctgcagagagaccaggagcccgacgtgcactacgacttcgagccccacgtgagcgccaacgcctggagccccgtgatgagagccagaaagagcagcttcaacgtgagcgacgtggccagacccgaggccgccggcagcccccccgaggagggcggctgcaccgagggcacccccgccaaggaccacagagccggcagaggccaccaggtgcacaagagctggcccctgagcatcagcgacagcgacagcggcctggaccccggccccggcgccggcgacttcaagaagttcgagagaaccagcagcagcggcaccatgagcagcaccgaggagctggtggaccccgacggcggcgccggcgccagcgccttcgagcaggccgacctgaacggcatgacccccgagctgcccgtggccgtgcccagcggccccttcagacacgagggcctgagcaaggccgccagaacccacagactgagaaagctgagaacccccgccaagtgcagagagtgcaacagctacgtgtacttccagggcgccgagtgcgaggagtgctgcctggcctgccacaagaagtgcctggagaccctggccatccagtgcggccacaagaagctgcagggcagactgcagctgttcggccaggacttcagccacgccgccagaagcgcccccgacggcgtgcccttcatcgtgaagaagtgcgtgtgcgagatcgagagaagagccctgagaaccaagggcatctacagagtgaacggcgtgaagaccagagtggagaagctgtgccaggccttcgagaacggcaaggagctggtggagctgagccaggccagcccccacgacatcagcaacgtgctgaagctgtacctgagacagctgcccgagcccctgatcagcttcagactgtaccacgagctggtgggcctggccaaggacagcctgaaggccgaggccgaggccaaggccgccagcagaggcagacaggacggcagcgagagcgaggccgtggccgtggccctggccggcagactgagagagctgctgagagacctgccccccgagaacagagccagcctgcagtacctgctgagacacctgagaagaatcgtggaggtggagcaggacaacaagatgacccccggcaacctgggcatcgtgttcggccccaccctgctgagacccagacccaccgaggccaccgtgagcctgagcagcctggtggactacccccaccaggccagagtgatcgagaccctgatcgtgcactacggcctggtgttcgaggaggagcccgaggagacccccggcggccaggacgagagcagcaaccagagagccgaggtggtggtgcaggtgccctacctggaggccggcgaggccgtggtgtaccccctgcaggaggccgccgccgacggctgcagagagagcagagtggtgagcaacgacagcgacagcgacctggaggaggccagcgagctgctgagcagcagcgaggccagcgccctgggccacctgagcttcctggagcagcagcagagcgaggccagcctggaggtggccagcggcagccacagcggcagcgaggagcagctggaggccaccgccagagaggacggcgacggcgacgaggacggccccgcccagcagctgagcggcttcaacaccaaccagagcaacaacgtgctgcaggcccccctgccccccatgagactgagaggcggcagaatgaccctgggcagctgcagagagagacagcccgagttcgtgtag

SEQ ID NO: 84552 - DNA, 3393 bp, synthetic construct
  misc_feature 1..3393: note = Description of Artificial Sequence: Synthetic coding sequence
  source 1..3393: mol_type = other DNA
agctacagcccctacagagccggcagacagggcccccagcagagaggcagagaccccggcatccagctgaccgagctgcccagaaaggacggcgccgacgccgtgttccccggccccagcctggagccccccgccggcagcagcggcgtgaaggccaccggcaccctgaagagacccaccagcctgagcagacacgccagcgccgccggcttccccctgagcggcgccgccagctggaccctgggcagaagccacagaagccccctgaccgccgccagccccggcgagctgcccaccgagggcgccggccccgacgtggtggaggacatcagccacctgctggccgacgtggccagattcgccgagggcctggagaagctgaaggagtgcgtgctgagagacgacctgctggaggccagaagacccagagcccacgagtgcctgggcgaggccctgagagtgatgcaccagatcatcagcaagtaccccctgctgaacaccgtggagaccctgaccgccgccggcaccctgatcgccaaggtgaaggccttccactacgagagcaacaacgacctggagaagcaggagttcgagaaggccctggagaccatcgccgtggccttcagcagcaccgtgagcgagttcctgatgggcgaggtggacagcagcaccctgctggccgtgccccccggcgacagcagccagagcatggagagcctgtacggccccggcagcgagggcaccccccccagcctggaggactgcgacgccggctgcctgcccgccgaggaggtggacgtgctgctgcagagatgcgagggcggcgtggacgccgccctgctgtacgccaagaacatggccaagtacatgaaggacctgatcagctacctggagaagagaaccaccctggagatggagttcgccaagggcctgcagaagatcgcccacaactgcagacagagcgtgatgcaggagccccacatgcccctgctgagcatctacagcctggccctggagcaggacctggagttcggccacagcatggtgcaggccgtgggcaccctgcagacccagaccttcatgcagcccctgaccctgagaagactggagcacgagaagagaagaaaggagatcaaggaggcctggcacagagcccagagaaagctgcaggaggccgagagcaacctgagaaaggccaagcagggctacgtgcagagatgcgaggaccacgacaaggccagattcctggtggccaaggccgaggaggagcaggccggcagcgcccccggcgccggcagcaccgccaccaagaccctggacaagagaagaagactggaggaggaggccaagaacaaggccgaggaggccatggccacctacagaacctgcgtggccgacgccaagacccagaagcaggagctggaggacaccaaggtgaccgccctgagacagatccaggaggtgatcagacagagcgaccagaccatcaagagcgccaccatcagctactaccagatgatgcacatgcagaccgcccccctgcccgtgcacttccagatgctgtgcgagagcagcaagctgtacgaccccggccagcagtacgccagccacgtgagacagctgcagagagaccaggagcccgacgtgcactacgacttcgagccccacgtgagcgccaacgcctggagccccgtgatgagagccagaaagagcagcttcaacgtgagcgacgtggccagacccgaggccgccggcagcccccccgaggagggcggctgcaccgagggcacccccgccaaggaccacagagccggcagaggccaccaggtgcacaagagctggcccctgagcatcagcgacagcgacagcggcctggaccccggccccggcgccggcgacttcaagaagttcgagagaaccagcagcagcggcaccatgagcagcaccgaggagctggtggaccccgacggcggcgccggcgccagcgccttcgagcaggccgacctgaacggcatgacccccgagctgcccgtggccgtgcccagcggccccttcagacacgagggcctgagcaaggccgccagaacccacagactgagaaagctgagaacccccgccaagtgcagagagtgcaacagctacgtgtacttccagggcgccgagtgcgaggagtgctgcctggcctgccacaagaagtgcctggagaccctggccatccagtgcggccacaagaagctgcagggcagactgcagctgttcggccaggacttcagccacgccgccagaagcgcccccgacggcgtgcccttcatcgtgaagaagtgcgtgtgcgagatcgagagaagagccctgagaaccaagggcatctacagagtgaacggcgtgaagaccagagtggagaagctgtgccaggccttcgagaacggcaaggagctggtggagctgagccaggccagcccccacgacatcagcaacgtgctgaagctgtacctgagacagctgcccgagcccctgatcagcttcagactgtaccacgagctggtgggcctggccaaggacagcctgaaggccgaggccgaggccaaggccgccagcagaggcagacaggacggcagcgagagcgaggccgtggccgtggccctggccggcagactgagagagctgctgagagacctgccccccgagaacagagccagcctgcagtacctgctgagacacctgagaagaatcgtggaggtggagcaggacaacaagatgacccccggcaacctgggcatcgtgttcggccccaccctgctgagacccagacccaccgaggccaccgtgagcctgagcagcctggtggactacccccaccaggccagagtgatcgagaccctgatcgtgcactacggcctggtgttcgaggaggagcccgaggagacccccggcggccaggacgagagcagcaaccagagagccgaggtggtggtgcaggtgccctacctggaggccggcgaggccgtggtgtaccccctgcaggaggccgccgccgacggctgcagagagagcagagtggtgagcaacgacagcgacagcgacctggaggaggccagcgagctgctgagcagcagcgaggccagcgccctgggccacctgagcttcctggagcagcagcagagcgaggccagcctggaggtggccagcggcagccacagcggcagcgaggagcagctggaggccaccgccagagaggacggcgacggcgacgaggacggccccgcccagcagctgagcggcttcaacaccaaccagagcaacaacgtgctgcaggcccccctgccccccatgagactgagaggcggcagaatgaccctgggcagctgcagagagagacagcccgagttcgtgtag

SEQ ID NO: 84553 - DNA, 3015 bp, synthetic construct
  misc_feature 1..3015: note = Description of Artificial Sequence: Synthetic coding sequence
  source 1..3015: mol_type = other DNA
atgcaccagatcatcagcaagtaccccctgctgaacaccgtggagaccctgaccgccgccggcaccctgatcgccaaggtgaaggccttccactacgagagcaacaacgacctggagaagcaggagttcgagaaggccctggagaccatcgccgtggccttcagcagcaccgtgagcgagttcctgatgggcgaggtggacagcagcaccctgctggccgtgccccccggcgacagcagccagagcatggagagcctgtacggccccggcagcgagggcaccccccccagcctggaggactgcgacgccggctgcctgcccgccgaggaggtggacgtgctgctgcagagatgcgagggcggcgtggacgccgccctgctgtacgccaagaacatggccaagtacatgaaggacctgatcagctacctggagaagagaaccaccctggagatggagttcgccaagggcctgcagaagatcgcccacaactgcagacagagcgtgatgcaggagccccacatgcccctgctgagcatctacagcctggccctggagcaggacctggagttcggccacagcatggtgcaggccgtgggcaccctgcagacccagaccttcatgcagcccctgaccctgagaagactggagcacgagaagagaagaaaggagatcaaggaggcctggcacagagcccagagaaagctgcaggaggccgagagcaacctgagaaaggccaagcagggctacgtgcagagatgcgaggaccacgacaaggccagattcctggtggccaaggccgaggaggagcaggccggcagcgcccccggcgccggcagcaccgccaccaagaccctggacaagagaagaagactggaggaggaggccaagaacaaggccgaggaggccatggccacctacagaacctgcgtggccgacgccaagacccagaagcaggagctggaggacaccaaggtgaccgccctgagacagatccaggaggtgatcagacagagcgaccagaccatcaagagcgccaccatcagctactaccagatgatgcacatgcagaccgcccccctgcccgtgcacttccagatgctgtgcgagagcagcaagctgtacgaccccggccagcagtacgccagccacgtgagacagctgcagagagaccaggagcccgacgtgcactacgacttcgagccccacgtgagcgccaacgcctggagccccgtgatgagagccagaaagagcagcttcaacgtgagcgacgtggccagacccgaggccgccggcagcccccccgaggagggcggctgcaccgagggcacccccgccaaggaccacagaggcgagtgccccgccggccccagaggcggcagatggctgcccgccacccaccccggccccagccccgagacccccctgagccccgccggcagaggccaccaggtgcacaagagctggcccctgagcatcagcgacagcgacagcggcctggaccccggccccggcgccggcgacttcaagaagttcgagagaaccagcagcagcggcaccatgagcagcaccgaggagctggtggaccccgacggcggcgccggcgccagcgccttcgagcaggccgacctgaacggcatgacccccgagctgcccgtggccgtgcccagcggccccttcagacacgagggcctgagcaaggccgccagaacccacagactgagaaagctgagaacccccgccaagtgcagagagtgcaacagctacgtgtacttccagggcgccgagtgcgaggagtgctgcctggcctgccacaagaagtgcctggagaccctggccatccagtgcggccacaagaagctgcagggcagactgcagctgttcggccaggacttcagccacgccgccagaagcgcccccgacggcgtgcccttcatcgtgaagaagtgcgtgtgcgagatcgagagaagagccctgagaaccaagggcatctacagagtgaacggcgtgaagaccagagtggagaagctgtgccaggccttcgagaacggcaaggagctggtggagctgagccaggccagcccccacgacatcagcaacgtgctgaagctgtacctgagacagctgcccgagcccctgatcagcttcagactgtaccacgagctggtgggcctggccaaggacagcctgaaggccgaggccgaggccaaggccgccagcagaggcagacaggacggcagcgagagcgaggccgtggccgtggccctggccggcagactgagagagctgctgagagacctgccccccgagaacagagccagcctgcagtacctgctgagacacctgagaagaatcgtggaggtggagcaggacaacaagatgacccccggcaacctgggcatcgtgttcggccccaccctgctgagacccagacccaccgaggccaccgtgagcctgagcagcctggtggactacccccaccaggccagagtgatcgagaccctgatcgtgcactacggcctggtgttcgaggaggagcccgaggagacccccggcggccaggacgagagcagcaaccagagagccgaggtggtggtgcaggtgccctacctggaggccggcgaggccgtggtgtaccccctgcaggaggccgccgccgacggctgcagagagagcagagtggtgagcaacgacagcgacagcgacctggaggaggccagcgagctgctgagcagcagcgaggccagcgccctgggccacctgagcttcctggagcagcagcagagcgaggccagcctggaggtggccagcggcagccacagcggcagcgaggagcagctggaggccaccgccagagaggacggcgacggcgacgaggacggccccgcccagcagctgagcggcttcaacaccaaccagagcaacaacgtgctgcaggcccccctgccccccatgagactgagaggcggcagaatgaccctgggcagctgcagagagagacagcccgagttcgtgtag

SEQ ID NO: 84554 - DNA, 3459 bp, synthetic construct
  misc_feature 1..3459: note = Description of Artificial Sequence: Synthetic coding sequence
  source 1..3459: mol_type = other DNA
atgagcagaggccagagagtgctgaagggcctgctgggctgggtgtgcacctggacctgggcctggagagccagactgggcgccagaggctgcggcctgcacgtgctgtgccccagagacctgcccctgccccccgaggagctgcccagaaaggacggcgccgacgccgtgttccccggccccagcctggagccccccgccggcagcagcggcgtgaaggccaccggcaccctgaagagacccaccagcctgagcagacacgccagcgccgccggcttccccctgagcggcgccgccagctggaccctgggcagaagccacagaagccccctgaccgccgccagccccggcgagctgcccaccgagggcgccggccccgacgtggtggaggacatcagccacctgctggccgacgtggccagattcgccgagggcctggagaagctgaaggagtgcgtgctgagagacgacctgctggaggccagaagacccagagcccacgagtgcctgggcgaggccctgagagtgatgcaccagatcatcagcaagtaccccctgctgaacaccgtggagaccctgaccgccgccggcaccctgatcgccaaggtgaaggccttccactacgagagcaacaacgacctggagaagcaggagttcgagaaggccctggagaccatcgccgtggccttcagcagcaccgtgagcgagttcctgatgggcgaggtggacagcagcaccctgctggccgtgccccccggcgacagcagccagagcatggagagcctgtacggccccggcagcgagggcaccccccccagcctggaggactgcgacgccggctgcctgcccgccgaggaggtggacgtgctgctgcagagatgcgagggcggcgtggacgccgccctgctgtacgccaagaacatggccaagtacatgaaggacctgatcagctacctggagaagagaaccaccctggagatggagttcgccaagggcctgcagaagatcgcccacaactgcagacagagcgtgatgcaggagccccacatgcccctgctgagcatctacagcctggccctggagcaggacctggagttcggccacagcatggtgcaggccgtgggcaccctgcagacccagaccttcatgcagcccctgaccctgagaagactggagcacgagaagagaagaaaggagatcaaggaggcctggcacagagcccagagaaagctgcaggaggccgagagcaacctgagaaaggccaagcagggctacgtgcagagatgcgaggaccacgacaaggccagattcctggtggccaaggccgaggaggagcaggccggcagcgcccccggcgccggcagcaccgccaccaagaccctggacaagagaagaagactggaggaggaggccaagaacaaggccgaggaggccatggccacctacagaacctgcgtggccgacgccaagacccagaagcaggagctggaggacaccaaggtgaccgccctgagacagatccaggaggtgatcagacagagcgaccagaccatcaagagcgccaccatcagctactaccagatgatgcacatgcagaccgcccccctgcccgtgcacttccagatgctgtgcgagagcagcaagctgtacgaccccggccagcagtacgccagccacgtgagacagctgcagagagaccaggagcccgacgtgcactacgacttcgagccccacgtgagcgccaacgcctggagccccgtgatgagagccagaaagagcagcttcaacgtgagcgacgtggccagacccgaggccgccggcagcccccccgaggagggcggctgcaccgagggcacccccgccaaggaccacagagccggcagaggccaccaggtgcacaagagctggcccctgagcatcagcgacagcgacagcggcctggaccccggccccggcgccggcgacttcaagaagttcgagagaaccagcagcagcggcaccatgagcagcaccgaggagctggtggaccccgacggcggcgccggcgccagcgccttcgagcaggccgacctgaacggcatgacccccgagctgcccgtggccgtgcccagcggccccttcagacacgagggcctgagcaaggccgccagaacccacagactgagaaagctgagaacccccgccaagtgcagagagtgcaacagctacgtgtacttccagggcgccgagtgcgaggagtgctgcctggcctgccacaagaagtgcctggagaccctggccatccagtgcggccacaagaagctgcagggcagactgcagctgttcggccaggacttcagccacgccgccagaagcgcccccgacggcgtgcccttcatcgtgaagaagtgcgtgtgcgagatcgagagaagagccctgagaaccaagggcatctacagagtgaacggcgtgaagaccagagtggagaagctgtgccaggccttcgagaacggcaaggagctggtggagctgagccaggccagcccccacgacatcagcaacgtgctgaagctgtacctgagacagctgcccgagcccctgatcagcttcagactgtaccacgagctggtgggcctggccaaggacagcctgaaggccgaggccgaggccaaggccgccagcagaggcagacaggacggcagcgagagcgaggccgtggccgtggccctggccggcagactgagagagctgctgagagacctgccccccgagaacagagccagcctgcagtacctgctgagacacctgagaagaatcgtggaggtggagcaggacaacaagatgacccccggcaacctgggcatcgtgttcggccccaccctgctgagacccagacccaccgaggccaccgtgagcctgagcagcctggtggactacccccaccaggccagagtgatcgagaccctgatcgtgcactacggcctggtgttcgaggaggagcccgaggagacccccggcggccaggacgagagcagcaaccagagagccgaggtggtggtgcaggtgccctacctggaggccggcgaggccgtggtgtaccccctgcaggaggccgccgccgacggctgcagagagagcagagtggtgagcaacgacagcgacagcgacctggaggaggccagcgagctgctgagcagcagcgaggccagcgccctgggccacctgagcttcctggagcagcagcagagcgaggccagcctggaggtggccagcggcagccacagcggcagcgaggagcagctggaggccaccgccagagaggacggcgacggcgacgaggacggccccgcccagcagctgagcggcttcaacaccaaccagagcaacaacgtgctgcaggcccccctgccccccatgagactgagaggcggcagaatgaccctgggcagctgcagagagagacagcccgagttcgtgtag

SEQ ID NO: 84555 - DNA, 3060 bp, synthetic construct
  misc_feature 1..3060: note = Description of Artificial Sequence: Synthetic coding sequence
  source 1..3060: mol_type = other DNA
atgtgcatctgcggcaccgcccaccccgtgctggacgagggccccgtgagatgcagagccggccccagagacctgctggaggccagaagacccagagcccacgagtgcctgggcgaggccctgagagtgatgcaccagatcatcagcaagtaccccctgctgaacaccgtggagaccctgaccgccgccggcaccctgatcgccaaggtgaaggccttccactacgagagcaacaacgacctggagaagcaggagttcgagaaggccctggagaccatcgccgtggccttcagcagcaccgtgagcgagttcctgatgggcgaggtggacagcagcaccctgctggccgtgccccccggcgacagcagccagagcatggagagcctgtacggccccggcagcgagggcaccccccccagcctggaggactgcgacgccggctgcctgcccgccgaggaggtggacgtgctgctgcagagatgcgagggcggcgtggacgccgccctgctgtacgccaagaacatggccaagtacatgaaggacctgatcagctacctggagaagagaaccaccctggagatggagttcgccaagggcctgcagaagatcgcccacaactgcagacagagcgtgatgcaggagccccacatgcccctgctgagcatctacagcctggccctggagcaggacctggagttcggccacagcatggtgcaggccgtgggcaccctgcagacccagaccttcatgcagcccctgaccctgagaagactggagcacgagaagagaagaaaggagatcaaggaggcctggcacagagcccagagaaagctgcaggaggccgagagcaacctgagaaaggccaagcagggctacgtgcagagatgcgaggaccacgacaaggccagattcctggtggccaaggccgaggaggagcaggccggcagcgcccccggcgccggcagcaccgccaccaagaccctggacaagagaagaagactggaggaggaggccaagaacaaggccgaggaggccatggccacctacagaacctgcgtggccgacgccaagacccagaagcaggagctggaggacaccaaggtgaccgccctgagacagatccaggaggtgatcagacagagcgaccagaccatcaagagcgccaccatcagctactaccagatgatgcacatgcagaccgcccccctgcccgtgcacttccagatgctgtgcgagagcagcaagctgtacgaccccggccagcagtacgccagccacgtgagacagctgcagagagaccaggagcccgacgtgcactacgacttcgagccccacgtgagcgccaacgcctggagccccgtgatgagagccagaaagagcagcttcaacgtgagcgacgtggccagacccgaggccgccggcagcccccccgaggagggcggctgcaccgagggcacccccgccaaggaccacagagccggcagaggccaccaggtgcacaagagctggcccctgagcatcagcgacagcgacagcggcctggaccccggccccggcgccggcgacttcaagaagttcgagagaaccagcagcagcggcaccatgagcagcaccgaggagctggtggaccccgacggcggcgccggcgccagcgccttcgagcaggccgacctgaacggcatgacccccgagctgcccgtggccgtgcccagcggccccttcagacacgagggcctgagcaaggccgccagaacccacagactgagaaagctgagaacccccgccaagtgcagagagtgcaacagctacgtgtacttccagggcgccgagtgcgaggagtgctgcctggcctgccacaagaagtgcctggagaccctggccatccagtgcggccacaagaagctgcagggcagactgcagctgttcggccaggacttcagccacgccgccagaagcgcccccgacggcgtgcccttcatcgtgaagaagtgcgtgtgcgagatcgagagaagagccctgagaaccaagggcatctacagagtgaacggcgtgaagaccagagtggagaagctgtgccaggccttcgagaacggcaaggagctggtggagctgagccaggccagcccccacgacatcagcaacgtgctgaagctgtacctgagacagctgcccgagcccctgatcagcttcagactgtaccacgagctggtgggcctggccaaggacagcctgaaggccgaggccgaggccaaggccgccagcagaggcagacaggacggcagcgagagcgaggccgtggccgtggccctggccggcagactgagagagctgctgagagacctgccccccgagaacagagccagcctgcagtacctgctgagacacctgagaagaatcgtggaggtggagcaggacaacaagatgacccccggcaacctgggcatcgtgttcggccccaccctgctgagacccagacccaccgaggccaccgtgagcctgagcagcctggtggactacccccaccaggccagagtgatcgagaccctgatcgtgcactacggcctggtgttcgaggaggagcccgaggagacccccggcggccaggacgagagcagcaaccagagagccgaggtggtggtgcaggtgccctacctggaggccggcgaggccgtggtgtaccccctgcaggaggccgccgccgacggctgcagagagagcagagtggtgagcaacgacagcgacagcgacctggaggaggccagcgagctgctgagcagcagcgaggccagcgccctgggccacctgagcttcctggagcagcagcagagcgaggccagcctggaggtggccagcggcagccacagcggcagcgaggagcagctggaggccaccgccagagaggacggcgacggcgacgaggacggccccgcccagcagctgagcggcttcaacaccaaccagagcaacaacgtgctgcaggcccccctgccccccatgagactgagaggcggcagaatgaccctgggcagctgcagagagagacagcccgagttcgtgtag

SEQ ID NO: 84556 - DNA, 2847 bp, synthetic construct
  misc_feature 1..2847: note = Description of Artificial Sequence: Synthetic coding sequence
  source 1..2847: mol_type = other DNA
atgttcagcagaaagaagagagagctgatgaagacccccagcatcagcaagaagaacagagccggcagccccagcccccagcccagcggcgagctgcccagaaaggacggcgccgacgccgtgttccccggccccagcctggagccccccgccggcagcagcggcgtgaaggccaccggcaccctgaagagacccaccagcctgagcagacacgccagcgccgccggcttccccctgagcggcgccgccagctggaccctgggcagaagccacagaagccccctgaccgccgccagccccggcgagctgcccaccgagggcgccggccccgacgtggtggaggacatcagccacctgctggccgacgtggccagattcgccgagggcctggagaagctgaaggagtgcgtgctgagagacgacctgctggaggccagaagacccagagcccacgagtgcctgggcgaggccctgagagtgatgcaccagatcatcagcaagtaccccctgctgaacaccgtggagaccctgaccgccgccggcaccctgatcgccaaggtgaaggccttccactacgagagcaacaacgacctggagaagcaggagttcgagaaggccctggagaccatcgccgtggccttcagcagcaccgtgagcgagttcctgatgggcgaggtggacagcagcaccctgctggccgtgccccccggcgacagcagccagagcatggagagcctgtacggccccggcagcgagggcaccccccccagcctggaggactgcgacgccggctgcctgcccgccgaggaggtggacgtgctgctgcagagatgcgagggcggcgtggacgccgccctgctgtacgccaagaacatggccaagtacatgaaggacctgatcagctacctggagaagagaaccaccctggagatggagttcgccaagggcctgcagaagatcgcccacaactgcagacagagcgtgatgcaggagccccacatgcccctgctgagcatctacagcctggccctggagcaggacctggagttcggccacagcatggtgcaggccgtgggcaccctgcagacccagaccttcatgcagcccctgaccctgagaagactggagcacgagaagagaagaaaggagatcaaggaggcctggcacagagcccagagaaagctgcaggaggccgagagcaacctgagaaaggccaagcagggctacgtgcagagatgcgaggaccacgacaaggccagattcctggtggccaaggccgaggaggagcaggccggcagcgcccccggcgccggcagcaccgccaccaagaccctggacaagagaagaagactggaggaggaggccaagaacaaggccgaggaggccatggccacctacagaacctgcgtggccgacgccaagacccagaagcaggagctggaggacaccaaggtgaccgccctgagacagatccaggaggtgatcagacagagcgaccagaccatcaagagcgccaccatcagctactaccagatgatgcacatgcagaccgcccccctgcccgtgcacttccagatgctgtgcgagagcagcaagctgtacgaccccggccagcagtacgccagccacgtgagacagctgcagagagaccaggagcccgacgtgcactacgacttcgagccccacgtgagcgccaacgcctggagccccgtgatgagagccagaaagagcagcttcaacgtgagcgacgtggccagacccgaggccgccggcagcccccccgaggagggcggctgcaccgagggcacccccgccaaggaccacagagccggcagaggccaccaggtgcacaagagctggcccctgagcatcagcgacagcgacagcggcctggaccccggccccggcgccggcgacttcaagaagttcgagagaaccagcagcagcggcaccatgagcagcaccgaggagctggtggaccccgacggcggcgccggcgccagcgccttcgagcaggccgacctgaacggcatgacccccgagctgcccgtggccgtgcccagcggccccttcagacacgagggcctgagcaaggccgccagaacccacagactgagaaagctgagaacccccgccaagtgcagagagtgcaacagctacgtgtacttccagggcgccgagtgcgaggagtgctgcctggcctgccacaagaagtgcctggagaccctggccatccagtgcggccacaagaagctgcagggcagactgcagctgttcggccaggacttcagccacgccgccagaagcgcccccgacggcgtgcccttcatcgtgaagaagtgcgtgtgcgagatcgagagaagagccctgagaaccaagggcatctacagagtgaacggcgtgaagaccagagtggagaagctgtgccaggccttcgagaacggcaaggagctggtggagctgagccaggccagcccccacgacatcagcaacgtgctgaagctgtacctgagacagctgcccgagcccctgatcagcttcagactgtaccacgagctggtgggcctggccaaggacagcctgaaggccgaggccgaggccaaggccgccagcagaggcagacaggacggcagcgagagcgaggccgtggccgtggccctggccggcagactgagagagctgctgagagacctgccccccgagaacagagccagcctgcagtacctgctgagacacctgagaagaatcgtggaggtggagcaggacaacaagatgacccccatgagactgagaggcggcagaatgaccctgggcagctgcagagagagacagcccgagttcgtgtag

SEQ ID NO: 84557 - DNA, 3492 bp, synthetic construct
  misc_feature 1..3492: note = Description of Artificial Sequence: Synthetic coding sequence
  source 1..3492: mol_type = other DNA
atgttcagcagaaagaagagagagctgatgaagacccccagcatcagcaagaagaacagagccggcagccccagcccccagcccagcggcccccacttcatcagcggcgagaccgaggccgtgagcagacccgagaaccccttcaacgagctgcccagcgacctgcccaaggagctgcccagaaaggacggcgccgacgccgtgttccccggccccagcctggagccccccgccggcagcagcggcgtgaaggccaccggcaccctgaagagacccaccagcctgagcagacacgccagcgccgccggcttccccctgagcggcgccgccagctggaccctgggcagaagccacagaagccccctgaccgccgccagccccggcgagctgcccaccgagggcgccggccccgacgtggtggaggacatcagccacctgctggccgacgtggccagattcgccgagggcctggagaagctgaaggagtgcgtgctgagagacgacctgctggaggccagaagacccagagcccacgagtgcctgggcgaggccctgagagtgatgcaccagatcatcagcaagtaccccctgctgaacaccgtggagaccctgaccgccgccggcaccctgatcgccaaggtgaaggccttccactacgagagcaacaacgacctggagaagcaggagttcgagaaggccctggagaccatcgccgtggccttcagcagcaccgtgagcgagttcctgatgggcgaggtggacagcagcaccctgctggccgtgccccccggcgacagcagccagagcatggagagcctgtacggccccggcagcgagggcaccccccccagcctggaggactgcgacgccggctgcctgcccgccgaggaggtggacgtgctgctgcagagatgcgagggcggcgtggacgccgccctgctgtacgccaagaacatggccaagtacatgaaggacctgatcagctacctggagaagagaaccaccctggagatggagttcgccaagggcctgcagaagatcgcccacaactgcagacagagcgtgatgcaggagccccacatgcccctgctgagcatctacagcctggccctggagcaggacctggagttcggccacagcatggtgcaggccgtgggcaccctgcagacccagaccttcatgcagcccctgaccctgagaagactggagcacgagaagagaagaaaggagatcaaggaggcctggcacagagcccagagaaagctgcaggaggccgagagcaacctgagaaaggccaagcagggctacgtgcagagatgcgaggaccacgacaaggccagattcctggtggccaaggccgaggaggagcaggccggcagcgcccccggcgccggcagcaccgccaccaagaccctggacaagagaagaagactggaggaggaggccaagaacaaggccgaggaggccatggccacctacagaacctgcgtggccgacgccaagacccagaagcaggagctggaggacaccaaggtgaccgccctgagacagatccaggaggtgatcagacagagcgaccagaccatcaagagcgccaccatcagctactaccagatgatgcacatgcagaccgcccccctgcccgtgcacttccagatgctgtgcgagagcagcaagctgtacgaccccggccagcagtacgccagccacgtgagacagctgcagagagaccaggagcccgacgtgcactacgacttcgagccccacgtgagcgccaacgcctggagccccgtgatgagagccagaaagagcagcttcaacgtgagcgacgtggccagacccgaggccgccggcagcccccccgaggagggcggctgcaccgagggcacccccgccaaggaccacagagccggcagaggccaccaggtgcacaagagctggcccctgagcatcagcgacagcgacagcggcctggaccccggccccggcgccggcgacttcaagaagttcgagagaaccagcagcagcggcaccatgagcagcaccgaggagctggtggaccccgacggcggcgccggcgccagcgccttcgagcaggccgacctgaacggcatgacccccgagctgcccgtggccgtgcccagcggccccttcagacacgagggcctgagcaaggccgccagaacccacagactgagaaagctgagaacccccgccaagtgcagagagtgcaacagctacgtgtacttccagggcgccgagtgcgaggagtgctgcctggcctgccacaagaagtgcctggagaccctggccatccagtgcggccacaagaagctgcagggcagactgcagctgttcggccaggacttcagccacgccgccagaagcgcccccgacggcgtgcccttcatcgtgaagaagtgcgtgtgcgagatcgagagaagagccctgagaaccaagggcatctacagagtgaacggcgtgaagaccagagtggagaagctgtgccaggccttcgagaacggcaaggagctggtggagctgagccaggccagcccccacgacatcagcaacgtgctgaagctgtacctgagacagctgcccgagcccctgatcagcttcagactgtaccacgagctggtgggcctggccaaggacagcctgaaggccgaggccgaggccaaggccgccagcagaggcagacaggacggcagcgagagcgaggccgtggccgtggccctggccggcagactgagagagctgctgagagacctgccccccgagaacagagccagcctgcagtacctgctgagacacctgagaagaatcgtggaggtggagcaggacaacaagatgacccccggcaacctgggcatcgtgttcggccccaccctgctgagacccagacccaccgaggccaccgtgagcctgagcagcctggtggactacccccaccaggccagagtgatcgagaccctgatcgtgcactacggcctggtgttcgaggaggagcccgaggagacccccggcggccaggacgagagcagcaaccagagagccgaggtggtggtgcaggtgccctacctggaggccggcgaggccgtggtgtaccccctgcaggaggccgccgccgacggctgcagagagagcagagtggtgagcaacgacagcgacagcgacctggaggaggccagcgagctgctgagcagcagcgaggccagcgccctgggccacctgagcttcctggagcagcagcagagcgaggccagcctggaggtggccagcggcagccacagcggcagcgaggagcagctggaggccaccgccagagaggacggcgacggcgacgaggacggccccgcccagcagctgagcggcttcaacaccaaccagagcaacaacgtgctgcaggcccccctgccccccatgagactgagaggcggcagaatgaccctgggcagctgcagagagagacagcccgagttcgtgtag

SEQ ID NO: 84558 - DNA, 420 bp, synthetic construct
  misc_feature 1..420: note = Description of Artificial Sequence: Synthetic coding sequence
  source 1..420: mol_type = other DNA
atgagcatcagcagcgccctggccatggtgttcatgggcgccaagggcaacaccgccgcccagatgagccaggccctgtgcttcagcaagatcggcggcgaggacggcgacatccacagaggcttccagagcctgctggtggccatcaacagaaccgacaccgagtacgtgctgagaaccgccaacggcctgttcggcgagaagagctacgacttcctgaccggcttcaccgacagctgcggcaagttctaccaggccaccatcaagcagctggacttcgtgaacgacaccgagaagagcaccaccagagtgaacagctgggtggccgacaagaccaagggcgagaacatcctgctgttctacttcgacaacatcctgaacagcttcatcgtgagcagcctgcagaactgccagatctag

SEQ ID NO: 84559 - DNA, 162 bp, synthetic construct
  misc_feature 1..162: note = Description of Artificial Sequence: Synthetic coding sequence
  source 1..162: mol_type = other DNA
atggagatcttcatcgaggtgttcagccacttcctgctgcagctgaccgagctgaccctgaacatgtgcctggagctgcccaccggcagcctggagaagagcctgatgatcagcagccaggtgctgcagatccccgtggccaacagcaccaagcagagatag

SEQ ID NO: 84560 - DNA, 648 bp, synthetic construct
  misc_feature 1..648: note = Description of Artificial Sequence: Synthetic coding sequence
  source 1..648: mol_type = other DNA
atgagcgagaccgtgccccccgcccccgccgccagcgccgcccccgagaagcccctggccggcaagaaggccaagaagcccgccaaggccgccgccgccagcaagaagaagcccgccggccccagcgtgagcgagctgatcgtgcaggccgccagcagcagcaaggagagaggcggcgtgagcctggccgccctgaagaaggccctggccgccgccggctacgacgtggagaagaacaacagcagaatcaagctgggcatcaagagcctggtgagcaagggcaccctggtgcagaccaagggcaccggcgccagcggcagcttcaagctgaacaagaaggccagcagcgtggagaccaagcccggcgccagcaaggtggccaccaagaccaaggccaccggcgccagcaagaagctgaagaaggccaccggcgccagcaagaagagcgtgaagacccccaagaaggccaagaagcccgccgccaccagaaagagcagcaagaaccccaagaagcccaagaccgtgaagcccaagaaggtggccaagagccccgccaaggccaaggccgtgaagcccaaggccgccaaggccagagtgaccaagcccaagaccgccaagcccaagaaggccgcccccaagaagaagtag

SEQ ID NO: 84561 - DNA, 681 bp, synthetic construct
  misc_feature 1..681: note = Description of Artificial Sequence: Synthetic coding sequence
  source 1..681: mol_type = other DNA
atgagcgagaccgcccccgccgagaccgccacccccgcccccgtggagaagagccccgccaagaagaaggccaccaagaaggccgccggcgccggcgccgccaagagaaaggccaccggcccccccgtgagcgagctgatcaccaaggccgtggccgccagcaaggagagaaacggcctgagcctggccgccctgaagaaggccctggccgccggcggctacgacgtggagaagaacaacagcagaatcaagctgggcctgaagagcctggtgagcaagggcaccctggtgcagaccaagggcaccggcgccagcggcagcttcaagctgaacaagaaggccgccagcggcgaggccaagcccaaggccaagaaggccggcgccgccaaggccaagaagcccgccggcgccacccccaagaaggccaagaaggccgccggcgccaagaaggccgtgaagaagacccccaagaaggccaagaagcccgccgccgccggcgtgaagaaggtggccaagagccccaagaaggccaaggccgccgccaagcccaagaaggccaccaagagccccgccaagcccaaggccgtgaagcccaaggccgccaagcccaaggccgccaagcccaaggccgccaagcccaaggccgccaaggccaagaaggccgccgccaagaagaagtag

SEQ ID NO: 84562 - DNA, 642 bp, synthetic construct
  misc_feature 1..642: note = Description of Artificial Sequence: Synthetic coding sequence
  source 1..642: mol_type = other DNA
atgagcgagaccgcccccgccgcccccgccgccgccccccccgccgagaaggcccccgtgaagaagaaggccgccaagaaggccggcggcacccccagaaaggccagcggcccccccgtgagcgagctgatcaccaaggccgtggccgccagcaaggagagaagcggcgtgagcctggccgccctgaagaaggccctggccgccgccggctacgacgtggagaagaacaacagcagaatcaagctgggcctgaagagcctggtgagcaagggcaccctggtgcagaccaagggcaccggcgccagcggcagcttcaagctgaacaagaaggccgccagcggcgaggccaagcccaaggtgaagaaggccggcggcaccaagcccaagaagcccgtgggcgccgccaagaagcccaagaaggccgccggcggcgccacccccaagaagagcgccaagaagacccccaagaaggccaagaagcccgccgccgccaccgtgaccaagaaggtggccaagagccccaagaaggccaaggtggccaagcccaagaaggccgccaagagcgccgccaaggccgtgaagcccaaggccgccaagcccaaggtggtgaagcccaagaaggccgcccccaagaagaagtag

SEQ ID NO: 84563 - DNA, 666 bp, synthetic construct
  misc_feature 1..666: note = Description of Artificial Sequence: Synthetic coding sequence
  source 1..666: mol_type = other DNA
atgagcgagaccgcccccctggcccccaccatccccgcccccgccgagaagacccccgtgaagaagaaggccaagaaggccggcgccaccgccggcaagagaaaggccagcggcccccccgtgagcgagctgatcaccaaggccgtggccgccagcaaggagagaagcggcgtgagcctggccgccctgaagaaggccctggccgccgccggctacgacgtggagaagaacaacagcagaatcaagctgggcctgaagagcctggtgagcaagggcaccctggtgcagaccaagggcaccggcgccagcggcagcttcaagctgaacaagaaggccgccagcggcgagggcaagcccaaggccaagaaggccggcgccgccaagcccagaaagcccgccggcgccgccaagaagcccaagaaggtggccggcgccgccacccccaagaagagcatcaagaagacccccaagaaggtgaagaagcccgccaccgccgccggcaccaagaaggtggccaagagcgccaagaaggtgaagaccccccagcccaagaaggccgccaagagccccgccaaggccaaggcccccaagcccaaggccgccaagcccaagagcggcaagcccaaggtgaccaaggccaagaaggccgcccccaagaagaagtag

SEQ ID NO: 84564 - DNA, 660 bp, synthetic construct
  misc_feature 1..660: note = Description of Artificial Sequence: Synthetic coding sequence
  source 1..660: mol_type = other DNA
atgagcgagaccgcccccgccgcccccgccgcccccgcccccgccgagaagacccccgtgaagaagaaggccagaaagagcgccggcgccgccaagagaaaggccagcggcccccccgtgagcgagctgatcaccaaggccgtggccgccagcaaggagagaagcggcgtgagcctggccgccctgaagaaggccctggccgccgccggctacgacgtggagaagaacaacagcagaatcaagctgggcctgaagagcctggtgagcaagggcaccctggtgcagaccaagggcaccggcgccagcggcagcttcaagctgaacaagaaggccgccagcggcgaggccaagcccaaggccaagaaggccggcgccgccaaggccaagaagcccgccggcgccgccaagaagcccaagaaggccaccggcgccgccacccccaagaagagcgccaagaagacccccaagaaggccaagaagcccgccgccgccgccggcgccaagaaggccaagagccccaagaaggccaaggccgccaagcccaagaaggcccccaagagccccgccaaggccaaggccgtgaagcccaaggccgccaagcccaagaccgccaagcccaaggccgccaagcccaagaaggccgccgccaagaagaagtag

SEQ ID NO: 84565 - DNA, 624 bp, synthetic construct
  misc_feature 1..624: note = Description of Artificial Sequence: Synthetic coding sequence
  source 1..624: mol_type = other DNA
atgagcgagaccgtgcccgccgccagcgccagcgccggcgtggccgccatggagaagctgcccaccaagaagagaggcagaaagcccgccggcctgatcagcgccagcagaaaggtgcccaacctgagcgtgagcaagctgatcaccgaggccctgagcgtgagccaggagagagtgggcatgagcctggtggccctgaagaaggccctggccgccgccggctacgacgtggagaagaacaacagcagaatcaagctgagcctgaagagcctggtgaacaagggcatcctggtgcagaccagaggcaccggcgccagcggcagcttcaagctgagcaagaaggtgatccccaagagcaccagaagcaaggccaagaagagcgtgagcgccaagaccaagaagctggtgctgagcagagacagcaagagccccaagaccgccaagaccaacaagagagccaagaagcccagagccaccacccccaagaccgtgagaagcggcagaaaggccaagggcgccaagggcaagcagcagcagaagagccccgtgaaggccagagccagcaagagcaagctgacccagcaccacgaggtgaacgtgagaaaggccaccagcaagaagtag

SEQ ID NO: 84566 - DNA, 393 bp, synthetic construct
  misc_feature 1..393: note = Description of Artificial Sequence: Synthetic coding sequence
  source 1..393: mol_type = other DNA
atgagcggcagaggcaagcagggcggcaaggccagagccaaggccaagaccagaagcagcagagccggcctgcagttccccgtgggcagagtgcacagactgctgagaaagggcaactacagcgagagagtgggcgccggcgcccccgtgtacctggccgccgtgctggagtacctgaccgccgagatcctggagctggccggcaacgccgccagagacaacaagaagaccagaatcatccccagacacctgcagctggccatcagaaacgacgaggagctgaacaagctgctgggcagagtgaccatcgcccagggcggcgtgctgcccaacatccaggccgtgctgctgcccaagaagaccgagagccaccacaaggccaagggcaagtag

SEQ ID NO: 84567 - DNA, 393 bp, synthetic construct
  misc_feature 1..393: note = Description of Artificial Sequence: Synthetic coding sequence
  source 1..393: mol_type = other DNA
atgagcggcagaggcaagcagggcggcaaggccagagccaaggccaagagcagaagcagcagagccggcctgcagttccccgtgggcagagtgcacagactgctgagaaagggcaactacgccgagagagtgggcgccggcgcccccgtgtacctggccgccgtgctggagtacctgaccgccgagatcctggagctggccggcaacgccgccagagacaacaagaagaccagaatcatccccagacacctgcagctggccatcagaaacgacgaggagctgaacaagctgctgggcagagtgaccatcgcccagggcggcgtgctgcccaacatccaggccgtgctgctgcccaagaagaccgagagccaccacaaggccaagggcaagtag

SEQ ID NO: 84568 - DNA, 393 bp, synthetic construct; identical to SEQ ID NO: 84567
  misc_feature 1..393: note = Description of Artificial Sequence: Synthetic coding sequence
  source 1..393: mol_type = other DNA

SEQ ID NO: 84569 - DNA, 393 bp, synthetic construct
  misc_feature 1..393: note = Description of Artificial Sequence: Synthetic coding sequence
  source 1..393: mol_type = other DNA
atgagcggcagaggcaagcagggcggcaaggccagagccaaggccaagaccagaagcagcagagccggcctgcagttccccgtgggcagagtgcacagactgctgagaaagggcaactacagcgagagagtgggcgccggcgcccccgtgtacctggccgccgtgctggagtacctgaccgccgagatcctggagctggccggcaacgccgccagagacaacaagaagaccagaatcatccccagacacctgcagctggccatcagaaacgacgaggagctgaacaagctgctgggcaaggtgaccatcgcccagggcggcgtgctgcccaacatccaggccgtgctgctgcccaagaagaccgagagccaccacaaggccaagggcaagtag

SEQ ID NO: 84570 - DNA, 393 bp, synthetic construct; identical to SEQ ID NO: 84566
  misc_feature 1..393: note = Description of Artificial Sequence: Synthetic coding sequence
  source 1..393: mol_type = other DNA

SEQ ID NO: 84571 - DNA, 393 bp, synthetic construct
  misc_feature 1..393: note = Description of Artificial Sequence: Synthetic coding sequence
  source 1..393: mol_type = other DNA
atgagcggcagaggcaagcagggcggcaaggccagagccaaggccaagaccagaagcagcagagccggcctgcagttccccgtgggcagagtgcacagactgctgagaaagggcaactacgccgagagagtgggcgccggcgcccccgtgtacctggccgccgtgctggagtacctgaccgccgagatcctggagctggccggcaacgccgccagagacaacaagaagaccagaatcatccccagacacctgcagctggccatcagaaacgacgaggagctgaacaagctgctgggcaaggtgaccatcgcccagggcggcgtgctgcccaacatccaggccgtgctgctgcccaagaagaccgagagccaccacaaggccaagggcaagtag

SEQ ID NO: 84572 - DNA, 387 bp, synthetic construct
  misc_feature 1..387: note = Description of Artificial Sequence: Synthetic coding sequence
  source 1..387: mol_type = other DNA
atgagcggcagaggcaagcagggcggcaaggccagagccaaggccaagaccagaagcagcagagccggcctgcagttccccgtgggcagagtgcacagactgctgagaaagggcaactacgccgagagagtgggcgccggcgcccccgtgtacctggccgccgtgctggagtacctgaccgccgagatcctggagctggccggcaacgccgccagagacaacaagaagaccagaatcatccccagacacctgcagctggccatcagaaacgacgaggagctgaacaagctgctgggcaaggtgaccatcgcccagggcggcgtgctgcccaacatccaggccgtgctgctgcccaagaagaccgagagccaccacaagaccaagtag

SEQ ID NO: 84573 - DNA, 393 bp, synthetic construct; identical to SEQ ID NO: 84571
  misc_feature 1..393: note = Description of Artificial Sequence: Synthetic coding sequence
  source 1..393: mol_type = other DNA

SEQ ID NO: 84574 - DNA, 393 bp, synthetic construct; identical to SEQ ID NO: 84571
  misc_feature 1..393: note = Description of Artificial Sequence: Synthetic coding sequence
  source 1..393: mol_type = other DNA

SEQ ID NO: 84575 - DNA, 393 bp, synthetic construct; identical to SEQ ID NO: 84571
  misc_feature 1..393: note = Description of Artificial Sequence: Synthetic coding sequence
  source 1..393: mol_type = other DNA

SEQ ID NO: 84576 - DNA, 384 bp, synthetic construct
  misc_feature 1..384: note = Description of Artificial Sequence: Synthetic coding sequence
  source 1..384: mol_type = other DNA
atgcccgaggtgagcagcaagggcgccaccatcagcaagaagggcttcaagaaggccgtggtgaagacccagaagaaggagggcaagaagagaaagagaaccagaaaggagagctacagcatctacatctacaaggtgctgaagcaggtgcaccccgacaccggcatcagcagcaaggccatgagcatcatgaacagcttcgtgaccgacatcttcgagagaatcgccagcgaggccagcagactggcccactacagcaagagaagcaccatcagcagcagagagatccagaccgccgtgagactgctgctgcccggcgagctggccaagcacgccgtgagcgagggcaccaaggccgtgaccaagtacaccagcagcaagtag

SEQ ID NO: 84577 - DNA, 381 bp, synthetic construct
  misc_feature 1..381: note = Description of Artificial Sequence: Synthetic coding sequence
  source 1..381: mol_type = other DNA
atgcccgagcccagcaagagcgcccccgcccccaagaagggcagcaagaaggccatcaccaaggcccagaagaaggacggcaagaagagaaagagaagcagaaaggagagctacagcatctacgtgtacaaggtgctgaagcaggtgcaccccgacaccggcatcagcagcaaggccatgggcatcatgaacagcttcgtgaacgacatcttcgagagaatcgccggcgaggccagcagactggcccactacaacaagagaagcaccatcaccagcagagagatccagaccgccgtgagactgctgctgcccggcgagctggccaagcacgccgtgagcgagggcaccaaggccgtgaccaagtacaccagcagcaagtag

SEQ ID NO: 84578 - DNA, 381 bp, synthetic construct
  misc_feature 1..381: note = Description of Artificial Sequence: Synthetic coding sequence
  source 1..381: mol_type = other DNA
atgcccgagcccgccaagagcgcccccgcccccaagaagggcagcaagaaggccgtgaccaaggcccagaagaaggacggcaagaagagaaagagaagcagaaaggagagctacagcgtgtacgtgtacaaggtgctgaagcaggtgcaccccgacaccggcatcagcagcaaggccatgggcatcatgaacagcttcgtgaacgacatcttcgagagaatcgccggcgaggccagcagactggcccactacaacaagagaagcaccatcaccagcagagagatccagaccgccgtgagactgctgctgcccggcgagctggccaagcacgccgtgagcgagggcaccaaggccgtgaccaagtacaccagcagcaagtag

SEQ ID NO: 84579 - DNA, 381 bp, synthetic construct; identical to SEQ ID NO: 84578
  misc_feature 1..381: note = Description of Artificial Sequence: Synthetic coding sequence
  source 1..381: mol_type = other DNA

SEQ ID NO: 84580 - DNA, 381 bp, synthetic construct
  misc_feature 1..381: note = Description of Artificial Sequence: Synthetic coding sequence
  source 1..381: mol_type = other DNA
atgcccgagcccaccaagagcgcccccgcccccaagaagggcagcaagaaggccgtgaccaaggcccagaagaaggacggcaagaagagaaagagaagcagaaaggagagctacagcgtgtacgtgtacaaggtgctgaagcaggtgcaccccgacaccggcatcagcagcaaggccatgggcatcatgaacagcttcgtgaacgacatcttcgagagaatcgccggcgaggccagcagactggcccactacaacaagagaagcaccatcaccagcagagagatccagaccgccgtgagactgctgctgcccggcgagctggccaagcacgccgtgagcgagggcaccaaggccgtgaccaagtacaccagcagcaagtag

SEQ ID NO: 84581 - DNA, 381 bp, synthetic construct; identical to SEQ ID NO: 84580
  misc_feature 1..381: note = Description of Artificial Sequence: Synthetic coding sequence
  source 1..381: mol_type = other DNA

SEQ ID NO: 84582 - DNA, 381 bp, synthetic construct; identical to SEQ ID NO: 84578
  misc_feature 1..381: note = Description of Artificial Sequence: Synthetic coding sequence
  source 1..381: mol_type = other DNA

SEQ ID NO: 84583 - DNA, 381 bp, synthetic construct; identical to SEQ ID NO: 84578
  misc_feature 1..381: note = Description of Artificial Sequence: Synthetic coding sequence
  source 1..381: mol_type = other DNA

SEQ ID NO: 84584 - DNA, 381 bp, synthetic construct; identical to SEQ ID NO: 84578
  misc_feature 1..381: note = Description of Artificial Sequence: Synthetic coding sequence
  source 1..381: mol_type = other DNA

SEQ ID NO: 84585 - DNA, 381 bp, synthetic construct
  misc_feature 1..381: note = Description of Artificial Sequence: Synthetic coding sequence
  source 1..381: mol_type = other DNA
atgcccgaccccgccaagagcgcccccgcccccaagaagggcagcaagaaggccgtgaccaaggcccagaagaaggacggcaagaagagaaagagaagcagaaaggagagctacagcgtgtacgtgtacaaggtgctgaagcaggtgcaccccgacaccggcatcagcagcaaggccatgggcatcatgaacagcttcgtgaacgacatcttcgagagaatcgccggcgaggccagcagactggcccactacaacaagagaagcaccatcaccagcagagagatccagaccgccgtgagactgctgctgcccggcgagctggccaagcacgccgtgagcgagggcaccaaggccgtgaccaagtacaccagcagcaagtag

SEQ ID NO: 84586 - DNA, 381 bp, synthetic construct; identical to SEQ ID NO: 84578
  misc_feature 1..381: note = Description of Artificial Sequence: Synthetic coding sequence
  source 1..381: mol_type = other DNA

SEQ ID NO: 84587 - DNA, 381 bp, synthetic construct
  misc_feature 1..381: note = Description of Artificial Sequence: Synthetic coding sequence
  source 1..381: mol_type = other DNA
atgcccgagctggccaagagcgcccccgcccccaagaagggcagcaagaaggccgtgaccaaggcccagaagaaggacggcaagaagagaaagagaagcagaaaggagagctacagcgtgtacgtgtacaaggtgctgaagcaggtgcaccccgacaccggcatcagcagcaaggccatgggcatcatgaacagcttcgtgaacgacatcttcgagagaatcgccagcgaggccagcagactggcccactacaacaagagaagcaccatcaccagcagagagatccagaccgccgtgagactgctgctgcccggcgagctggccaagcacgccgtgagcgagggcaccaaggccgtgaccaagtacaccagcagcaagtag

SEQ ID NO: 84588 - DNA, 381 bp, synthetic construct
  misc_feature 1..381: note = Description of Artificial Sequence: Synthetic coding sequence
  source 1..381: mol_type = other DNA
atgcccgagcccgtgaagagcgcccccgtgcccaagaagggcagcaagaaggccatcaacaaggcccagaagaaggacggcaagaagagaaagagaagcagaaaggagagctacagcgtgtacgtgtacaaggtgctgaagcaggtgcaccccgacaccggcatcagcagcaaggccatgggcatcatgaacagcttcgtgaacgacatcttcgagagaatcgccggcgaggccagcagactggcccactacaacaagagaagcaccatcaccagcagagagatccagaccgccgtgagactgctgctgcccggcgagctggccaagcacgccgtgagcgagggcaccaaggccgtgaccaagtacaccagcagcaagtag

SEQ ID NO: 84589 - DNA, 381 bp, synthetic construct
  misc_feature 1..381: note = Description of Artificial Sequence: Synthetic coding sequence
  source 1..381: mol_type = other DNA
atgcccgagcccagcaagagcgcccccgcccccaagaagggcagcaagaaggccgtgaccaaggcccagaagaaggacggcaagaagagaaagagaagcagaaaggagagctacagcgtgtacgtgtacaaggtgctgaagcaggtgcaccccgacaccggcatcagcagcaaggccatgggcatcatgaacagcttcgtgaacgacatcttcgagagaatcgccggcgaggccagcagactggcccactacaacaagagaagcaccatcaccagcagagagatccagaccgccgtgagactgctgctgcccggcgagctggccaagcacgccgtgagcgagggcaccaaggccgtgaccaagtacaccagcagcaagtag

SEQ ID NO: 84590 - DNA, 381 bp, synthetic construct; identical to SEQ ID NO: 84589
  misc_feature 1..381: note = Description of Artificial Sequence: Synthetic coding sequence
  source 1..381: mol_type = other DNA

SEQ ID NO: 84591 - DNA, 381 bp, synthetic construct
  misc_feature 1..381: note = Description of Artificial Sequence: Synthetic coding sequence
  source 1..381: mol_type = other DNA
atgcccgaccccgccaagagcgcccccgcccccaagaagggcagcaagaaggccgtgaccaaggcccagaagaaggacggcaagaagagaaagagaagcagaaaggagagctacagcatctacgtgtacaaggtgctgaagcaggtgcaccccgacaccggcatcagcagcaaggccatgggcatcatgaacagcttcgtgaacgacatcttcgagagaatcgccggcgaggccagcagactggcccactacaacaagagaagcaccatcaccagcagagagatccagaccgccgtgagactgctgctgcccggcgagctggccaagcacgccgtgagcgagggcaccaaggccgtgaccaagtacaccagcagcaagtag

SEQ ID NO: 84592 - DNA, 411 bp, synthetic construct
  misc_feature 1..411: note = Description of Artificial Sequence: Synthetic coding sequence
  source 1..411: mol_type = other DNA
atggccagaaccaagcagaccgccagaaagagcaccggcggcaaggcccccagaaagcagctggccaccaaggccgccagaaagagcgcccccgccaccggcggcgtgaagaagccccacagatacagacccggcaccgtggccctgagagagatcagaagataccagaagagcaccgagctgctgatcagaaagctgcccttccagagactggtgagagagatcgcccaggacttcaagaccgacctgagattccagagcagcgccgtgatggccctgcaggaggcctgcgaggcctacctggtgggcctgttcgaggacaccaacctgtgcgccatccacgccaagagagtgaccatcatgcccaaggacatccagctggccagaagaatcagaggcgagagagcctag

SEQ ID NO: 84593 - DNA, 411 bp, synthetic construct; identical to SEQ ID NO: 84592
  misc_feature 1..411: note = Description of Artificial Sequence: Synthetic coding sequence
  source 1..411: mol_type = other DNA

SEQ ID NO: 84594 - DNA, 411 bp, synthetic construct; identical to SEQ ID NO: 84592
  misc_feature 1..411: note = Description of Artificial Sequence: Synthetic coding sequence
  source 1..411: mol_type = other DNA

SEQ ID NO: 84595 - DNA, 411 bp, synthetic construct; identical to SEQ ID NO: 84592
  misc_feature 1..411: note = Description of Artificial Sequence: Synthetic coding sequence
  source 1..411: mol_type = other DNA

SEQ ID NO: 84596 - DNA, 411 bp, synthetic construct; identical to SEQ ID NO: 84592
  misc_feature 1..411: note = Description of Artificial Sequence: Synthetic coding sequence
  source 1..411: mol_type = other DNA

SEQ ID NO: 84597 - DNA, 411 bp, synthetic construct; identical to SEQ ID NO: 84592
  misc_feature 1..411: note = Description of Artificial Sequence: Synthetic coding sequence
  source 1..411: mol_type = other DNA

SEQ ID NO: 84598 - DNA, 411 bp, synthetic construct; identical to SEQ ID NO: 84592
  misc_feature 1..411: note = Description of Artificial Sequence: Synthetic coding sequence
  source 1..411: mol_type = other DNA

SEQ ID NO: 84599 - DNA, 411 bp, synthetic construct; identical to SEQ ID NO: 84592
  misc_feature 1..411: note = Description of Artificial Sequence: Synthetic coding sequence
  source 1..411: mol_type = other DNA

SEQ ID NO: 84600 - DNA, 411 bp, synthetic construct; identical to SEQ ID NO: 84592
  misc_feature 1..411: note = Description of Artificial Sequence: Synthetic coding sequence
  source 1..411: mol_type = other DNA

SEQ ID NO: 84601 - DNA, 411 bp, synthetic construct; identical to SEQ ID NO: 84592
  misc_feature 1..411: note = Description of Artificial Sequence: Synthetic coding sequence
  source 1..411: mol_type = other DNA

SEQ ID NO: 84602 - DNA, 411 bp, synthetic construct; identical to SEQ ID NO: 84592
  misc_feature 1..411: note = Description of Artificial Sequence: Synthetic coding sequence
  source 1..411: mol_type = other DNA

SEQ ID NO: 84603 - DNA, 339 bp, synthetic construct
  misc_feature 1..339: note = Description of Artificial Sequence: Synthetic coding sequence
  source 1..339: mol_type = other DNA
atgagcggcagaggcaagggcggcaagggcctggccaaggccaagacctgcagcagcctgcccggcctgcagttccccggcagagtgagacacctgttcagaaagggcaactacttcgagcccgtgggcgccggcgcccccgtgtacctgcagtacctggccgccgagatcctggagctggtgggcagcgccatcagagacaagaccagaagcatcatccccagacacctgcagctggccatcagaaacgacgaggaggtgaacaagcagctgggcaacgtgaccatcgcccagggcggcgtgctgagcaacatccaggccgtgctgctgcccaagtag

SEQ ID NO: 84604 - DNA, 312 bp, synthetic construct
  misc_feature 1..312: note = Description of Artificial Sequence: Synthetic coding sequence
  source 1..312: mol_type = other DNA
atgagcggcagaggcaagggcggcaagggcctgggcaagggcggcgccaagagacacagaaaggtgctgagagacaacatccagggcatcaccaagcccgccatcagaagactggccagaagaggcggcgtgaagagaatcagcggcctgatctacgaggagaccagaggcgtgctgaaggtgttcctggagaacgtgatcagagacgccgtgacctacaccgagcacgccaagagaaagaccgtgaccgccatggacgtggtgtacgccctgaagagacagggcagaaccctgtacggcttcggcggctag

SEQ ID NO: 84605 - DNA, 312 bp, synthetic construct; identical to SEQ ID NO: 84604
  misc_feature 1..312: note = Description of Artificial Sequence: Synthetic coding sequence
  source 1..312: mol_type = other DNA

SEQ ID NO: 84606 - DNA, 312 bp, synthetic construct; identical to SEQ ID NO: 84604
  misc_feature 1..312: note = Description of Artificial Sequence: Synthetic coding sequence
  source 1..312: mol_type = other DNA

SEQ ID NO: 84607 - DNA, 312 bp, synthetic construct; identical to SEQ ID NO: 84604
  misc_feature 1..312: note = Description of Artificial Sequence: Synthetic coding sequence
  source 1..312: mol_type = other DNA

SEQ ID NO: 84608 - DNA, 312 bp, synthetic construct; identical to SEQ ID NO: 84604
  misc_feature 1..312: note = Description of Artificial Sequence: Synthetic coding sequence
  source 1..312: mol_type = other DNA

SEQ ID NO: 84609 - DNA, 312 bp, synthetic construct; identical to SEQ ID NO: 84604
  misc_feature 1..312: note = Description of Artificial Sequence: Synthetic coding sequence
  source 1..312: mol_type = other DNA

SEQ ID NO: 84610 - DNA, 297 bp, synthetic construct
  misc_feature 1..297: note = Description of Artificial Sequence: Synthetic coding sequence
  source 1..297: mol_type = other DNA
atgagcgtgagaggcaaggccggcaagggcctgggcaagggcggcgccaagtgccacagaaaggtgctgagcgacaacatccagggcatcaccaagtgcaccatcagaagactggccagacacggcggcgtgaagagaatcctgggcctgatctacgaggagaccagaagagtgttcaaggtgttcctggagaacgtgatctggtacgccgtgaccaacaccgagcacgccaagagaaagaccgtgaccgccatggccgtggtgtacgtgctgaagagacagggcagaaccctgtag

SEQ ID NO: 84611 - DNA, 312 bp, synthetic construct; identical to SEQ ID NO: 84604
  misc_feature 1..312: note = Description of Artificial Sequence: Synthetic coding sequence
  source 1..312: mol_type = other DNA

SEQ ID NO: 84612 - DNA, 312 bp, synthetic construct; identical to SEQ ID NO: 84604
  misc_feature 1..312: note = Description of Artificial Sequence: Synthetic coding sequence
  source 1..312: mol_type = other DNA

SEQ ID NO: 84613 - DNA, 312 bp, synthetic construct; identical to SEQ ID NO: 84604
  misc_feature 1..312: note = Description of Artificial Sequence: Synthetic coding sequence
  source 1..312: mol_type = other DNA

SEQ ID NO: 84614 - DNA, 312 bp, synthetic construct; identical to SEQ ID NO: 84604
  misc_feature 1..312: note = Description of Artificial Sequence: Synthetic coding sequence
  source 1..312: mol_type = other DNA

SEQ ID NO: 84615 - DNA, 312 bp, synthetic construct; identical to SEQ ID NO: 84604
  misc_feature 1..312: note = Description of Artificial Sequence: Synthetic coding sequence
  source 1..312: mol_type = other DNA

SEQ ID NO: 84616 - DNA, 312 bp, synthetic construct; identical to SEQ ID NO: 84604
  misc_feature 1..312: note = Description of Artificial Sequence: Synthetic coding sequence
  source 1..312: mol_type = other DNA

SEQ ID NO: 84617 - DNA, 390 bp, synthetic construct
  misc_feature 1..390: note = Description of Artificial Sequence: Synthetic coding sequence
  source 1..390: mol_type = other DNA
atgagcggcagaggcaagcagggcggcaaggccagagccaaggccaagagcagaagcagcagagccggcctgcagttccccgtgggcagagtgcacagactgctgagaaagggcaactacgccgagagagtgggcgccggcgcccccgtgtacatggccgccgtgctggagtacctgaccgccgagatcctggagctggccggcaacgccgccagagacaacaagaagaccagaatcatccccagacacctgcagctggccatcagaaacgacgaggagctgaacaagctgctgggcaaggtgaccatcgcccagggcggcgtgctgcccaacatccaggccgtgctgctgcccaagaagaccgagagccacaaggccaagagcaagtag

SEQ ID NO: 84618 - DNA, 381 bp, synthetic construct
  misc_feature 1..381: note = Description of Artificial Sequence: Synthetic coding sequence
  source 1..381: mol_type = other DNA
atgcccgagcccgccaagagcgcccccgcccccaagaagggcagcaagaaggccgtgaccaaggcccagaagaaggacggcaagaagagaaagagaagcagaaaggagagctacagcatctacgtgtacaaggtgctgaagcaggtgcaccccgacaccggcatcagcagcaaggccatgggcatcatgaacagcttcgtgaacgacatcttcgagagaatcgccggcgaggccagcagactggcccactacaacaagagaagcaccatcaccagcagagagatccagaccgccgtgagactgctgctgcccggcgagctggccaagcacgccgtgagcgagggcaccaaggccgtgaccaagtacaccagcagcaagtag

SEQ ID NO: 84619 - DNA, 411 bp, synthetic construct
  misc_feature 1..411: note = Description of Artificial Sequence: Synthetic coding sequence
  source 1..411: mol_type = other DNA
atggccagaaccaagcagaccgccagaaagagcaccggcggcaaggcccccagaaagcagctggccaccaaggccgccagaaagagcgcccccgccaccggcggcgtgaagaagccccacagatacagacccggcaccgtggccctgagagagatcagaagataccagaagagcaccgagctgctgatcagaaagctgcccttccagagactggtgagagagatcgcccaggacttcaagaccgacctgagattccagagcagcgccgtgatggccctgcaggaggccagcgaggcctacctggtgggcctgttcgaggacaccaacctgtgcgccatccacgccaagagagtgaccatcatgcccaaggacatccagctggccagaagaatcagaggcgagagagcctag

SEQ ID NO: 84620 - DNA, 411 bp, synthetic construct
  misc_feature 1..411: note = Description of Artificial Sequence: Synthetic coding sequence
  source 1..411: mol_type = other DNA
atggccagaaccaagcagaccgccagaaagagcaccggcggcaaggcccccagaaagcagctggccaccaaggtggccagaaagagcgcccccgccaccggcggcgtgaagaagccccacagatacagacccggcaccgtggccctgagagagatcagaagataccagaagagcaccgagctgctgatcagaaagctgcccttccagagactgatgagagagatcgcccaggacttcaagaccgacctgagattccagagcagcgccgtgatggccctgcaggaggcctgcgagagctacctggtgggcctgttcgaggacaccaacctgtgcgtgatccacgccaagagagtgaccatcatgcccaaggacatccagctggccagaagaatcagaggcgagagagcctag

SEQ ID NO: 84621 - DNA, 684 bp, synthetic construct
  misc_feature 1..684: note = Description of Artificial Sequence: Synthetic coding sequence
  source 1..684: mol_type = other DNA
atggagggccagagcggcagatgcaagatcgtggtggtgggcgacgccgagtgcggcaagaccgccctgctgcaggtgttcgccaaggacgcctaccccggcagctacgtgcccaccgtgttcgagaactacaccgccagcttcgagatcgacaagagaagaatcgagctgaacatgtgggacaccagcggcagcagctactacgacaacgtgagacccctggcctaccccgacagcgacgccgtgctgatctgcttcgacatcagcagacccgagaccctggacagcgtgctgaagaagtggcagggcgagacccaggagttctgccccaacgccaaggtggtgctggtgggctgcaagctggacatgagaaccgacctggccaccctgagagagctgagcaagcagagactgatccccgtgacccacgagcagggcaccgtgctggccaagcaggtgggcgccgtgagctacgtggagtgcagcagcagaagcagcgagagaagcgtgagagacgtgttccacgtggccaccgtggccagcctgggcagaggccacagacagctgagaagaaccgacagcagaagaggcatgcagagaagcgcccagctgagcggcagacccgacagaggcaacgagggcgagatccacaaggacagagccaagagctgcaacctgatgtag

SEQ ID NO: 84622 - DNA, 3114 bp, synthetic construct
  misc_feature 1..3114: note = Description of Artificial Sequence: Synthetic coding sequence
  source 1..3114: mol_type = other DNA
atgaacagccccaacgagagcgacggcatgagcggcagagagcccagcctggagatcctgcccagaaccagcctgcacagcatccccgtgaccgtggaggtgaagcccgtgctgcccagagccatgcccagcagcatgggcggcggcggcggcggcagccccagccccgtggagctgagaggcgccctggtgggcagcgtggaccccaccctgagagagcagcagctgcagcaggagctgctggccctgaagcagcagcagcagctgcagaagcagctgctgttcgccgagttccagaagcagcacgaccacctgaccagacagcacgaggtgcagctgcagaagcacctgaagcagcagcaggagatgctggccgccaagcagcagcaggagatgctggccgccaagagacagcaggagctggagcagcagagacagagagagcagcagagacaggaggagctggagaagcagagactggagcagcagctgctgatcctgagaaacaaggagaagagcaaggagagcgccatcgccagcaccgaggtgaagctgagactgcaggagttcctgctgagcaagagcaaggagcccacccccggcggcctgaaccacagcctgccccagcaccccaagtgctggggcgcccaccacgccagcctggaccagagcagccccccccagagcggcccccccggcaccccccccagctacaagctgcccctgcccggcccctacgacagcagagacgacttccccctgagaaagaccgccagcgagcccaacctgaaggtgagaagcagactgaagcagaaggtggccgagagaagaagcagccccctgctgagaagaaaggacggcaccgtgatcagcaccttcaagaagagagccgtggagatcaccggcgccggccccggcgccagcagcgtgtgcaacagcgcccccggcagcggccccagcagccccaacagcagccacagcaccatcgccgagaacggcttcaccggcagcgtgcccaacatccccaccgagatgctgccccagcacagagccctgcccctggacagcagccccaaccagttcagcctgtacaccagccccagcctgcccaacatcagcctgggcctgcaggccaccgtgaccgtgaccaacagccacctgaccgccagccccaagctgagcacccagcaggaggccgagagacaggccctgcagagcctgagacagggcggcaccctgaccggcaagttcatgagcaccagcagcatccccggctgcctgctgggcgtggccctggagggcgacggcagcccccacggccacgccagcctgctgcagcacgtgctgctgctggagcaggccagacagcagagcaccctgatcgccgtgcccctgcacggccagagccccctggtgaccggcgagagagtggccaccagcatgagaaccgtgggcaagctgcccagacacagacccctgagcagaacccagagcagccccctgccccagagcccccaggccctgcagcagctggtgatgcagcagcagcaccagcagttcctggagaagcagaagcagcagcagctgcagctgggcaagatcctgaccaagaccggcgagctgcccagacagcccaccacccaccccgaggagaccgaggaggagctgaccgagcagcaggaggtgctgctgggcgagggcgccctgaccatgcccagagagggcagcaccgagagcgagagcacccaggaggacctggaggaggaggacgaggaggacgacggcgaggaggaggaggactgcatccaggtgaaggacgaggagggcgagagcggcgccgaggagggccccgacctggaggagcccggcgccggctacaagaagctgttcagcgacgcccagcccctgcagcccctgcaggtgtaccaggcccccctgagcctggccaccgtgccccaccaggccctgggcagaacccagagcagccccgccgcccccggcggcatgaagagcccccccgaccagcccgtgaagcacctgttcaccaccggccccatcagccagaagatgtacgccgtgctgccctgcggcggcatcggcgtggacagcgacaccgtgtggaacgagatgcacagcagcagcgccgtgagaatggccgtgggctgcctgctggagctggccttcaaggtggccgccggcgagctgaagaacggcttcgccatcatcagaccccccggccaccacgccgaggagagcaccgccatgggcttctgcttcttcaacagcgtggccatcaccgccaagctgctgcagcagaagctgaacgtgggcaaggtgctgatcgtggactgggacatccaccacggcaacggcacccagcaggccttctacaacgaccccagcgtgctgtacatcagcctgcacagatacgacaacggcaacttcttccccggcagcggcgcccccgaggaggtgggcggcggccccggcgtgggctacaacgtgaacgtggcctggaccggcggcgtggacccccccatcggcgacgtggagtacctgaccgccttcagaaccgtggtgatgcccatcgcccacgagttcagccccgacgtggtgctggtgagcgccggcttcgacgccgtggagggccacctgagccccctgggcggctacagcgtgaccgccagatgcttcggccacctgaccagacagctgatgaccctggccggcggcagagtggtgctggccctggagggcggccacgacctgaccgccatctgcgacgccagcgaggcctgcgtgagcgccctgctgagcgtggagctgcagcccctggacgaggccgtgctgcagcagaagcccaacatcaacgccgtggccaccctggagaaggtgatcgagatccagagcaagcactggagctgcgtgcagaagttcgccgccggcctgggcagaagcctgagagaggcccaggccggcgagaccgaggaggccgagaccgtgagcgccatggccctgctgagcgtgggcgccgagcaggcccaggccgccgccgccagagagcacagccccagacccgccgaggagcccatggagcaggagcccgccctgtag

SEQ ID NO: 84623 - DNA, 3369 bp, synthetic construct
  misc_feature 1..3369: note = Description of Artificial Sequence: Synthetic coding sequence
  source 1..3369: mol_type = other DNA
atgaacagccccaacgagagcgacggcatgagcggcagagagcccagcctggagatcctgcccagaaccagcctgcacagcatccccgtgaccgtggaggtgaagcccgtgctgcccagagccatgcccagcagcatgggcggcggcggcggcggcagccccagccccgtggagctgagaggcgccctggtgggcagcgtggaccccaccctgagagagcagcagctgcagcaggagctgctggccctgaagcagcagcagcagctgcagaagcagctgctgttcgccgagttccagaagcagcacgaccacctgaccagacagcacgaggtgcagctgcagaagcacctgaagcagcagcaggagatgctggccgccaagcagcagcaggagatgctggccgccaagagacagcaggagctggagcagcagagacagagagagcagcagagacaggaggagctggagaagcagagactggagcagcagctgctgatcctgagaaacaaggagaagagcaaggagagcgccatcgccagcaccgaggtgaagctgagactgcaggagttcctgctgagcaagagcaaggagcccacccccggcggcctgaaccacagcctgccccagcaccccaagtgctggggcgcccaccacgccagcctggaccagagcagccccccccagagcggcccccccggcaccccccccagctacaagctgcccctgcccggcccctacgacagcagagacgacttccccctgagaaagaccgccagcgagcccaacctgaaggtgagaagcagactgaagcagaaggtggccgagagaagaagcagccccctgctgagaagaaaggacggcaccgtgatcagcaccttcaagaagagagccgtggagatcaccggcgccggccccggcgccagcagcgtgtgcaacagcgcccccggcagcggccccagcagccccaacagcagccacagcaccatcgccgagaacggcttcaccggcagcgtgcccaacatccccaccgagatgctgccccagcacagagccctgcccctggacagcagccccaaccagttcagcctgtacaccagccccagcctgcccaacatcagcctgggcctgcaggccaccgtgaccgtgaccaacagccacctgaccgccagccccaagctgagcacccagcaggaggccgagagacaggccctgcagagcctgagacagggcggcaccctgaccggcaagttcatgagcaccagcagcatccccggctgcctgctgggcgtggccctggagggcgacggcagcccccacggccacgccagcctgctgcagcacgtgctgctgctggagcaggccagacagcagagcaccctgatcgccgtgcccctgcacggccagagccccctggtgaccggcgagagagtggccaccagcatgagaaccgtgggcaagctgcccagacacagacccctgagcagaacccagagcagccccctgccccagagcccccaggccctgcagcagctggtgatgcagcagcagcaccagcagttcctggagaagcagaagcagcagcagctgcagctgggcaagatcctgaccaagaccggcgagctgcccagacagcccaccacccaccccgaggagaccgaggaggagctgaccgagcagcaggaggtgctgctgggcgagggcgccctgaccatgcccagagagggcagcaccgagagcgagagcacccaggaggacctggaggaggaggacgaggaggacgacggcgaggaggaggaggactgcatccaggtgaaggacgaggagggcgagagcggcgccgaggagggccccgacctggaggagcccggcgccggctacaagaagctgttcagcgacgcccagcccctgcagcccctgcaggtgtaccaggcccccctgagcctggccaccgtgccccaccaggccctgggcagaacccagagcagccccgccgcccccggcggcatgaagagcccccccgaccagcccgtgaagcacctgttcaccaccggcgtggtgtacgacaccttcatgctgaagcaccagtgcatgtgcggcaacacccacgtgcaccccgagcacgccggcagaatccagagcatctggagcagactgcaggagaccggcctgctgagcaagtgcgagagaatcagaggcagaaaggccaccctggacgagatccagaccgtgcacagcgagtaccacaccctgctgtacggcaccagccccctgaacagacagaagctggacagcaagaagctgctgggccccatcagccagaagatgtacgccgtgctgccctgcggcggcatcggcgtggacagcgacaccgtgtggaacgagatgcacagcagcagcgccgtgagaatggccgtgggctgcctgctggagctggccttcaaggtggccgccggcgagctgaagaacggcttcgccatcatcagaccccccggccaccacgccgaggagagcaccgccatgggcttctgcttcttcaacagcgtggccatcaccgccaagctgctgcagcagaagctgaacgtgggcaaggtgctgatcgtggactgggacatccaccacggcaacggcacccagcaggccttctacaacgaccccagcgtgctgtacatcagcctgcacagatacgacaacggcaacttcttccccggcagcggcgcccccgaggaggtgggcggcggccccggcgtgggctacaacgtgaacgtggcctggaccggcggcgtggacccccccatcggcgacgtggagtacctgaccgccttcagaaccgtggtgatgcccatcgcccacgagttcagccccgacgtggtgctggtgagcgccggcttcgacgccgtggagggccacctgagccccctgggcggctacagcgtgaccgccagatgcttcggccacctgaccagacagctgatgaccctggccggcggcagagtggtgctggccctggagggcggccacgacctgaccgccatctgcgacgccagcgaggcctgcgtgagcgccctgctgagcgtggagctgcagcccctggacgaggccgtgctgcagcagaagcccaacatcaacgccgtggccaccctggagaaggtgatcgagatccagagcaagcactggagctgcgtgcagaagttcgccgccggcctgggcagaagcctgagagaggcccaggccggcgagaccgaggaggccgagaccgtgagcgccatggccctgctgagcgtgggcgccgagcaggcccaggccgccgccgccagagagcacagccccagacccgccgaggagcccatggagcaggagcccgccctgtag

SEQ ID NO: 84624 - DNA, 1776 bp, synthetic construct
  misc_feature 1..1776: note = Description of Artificial Sequence: Synthetic coding sequence
  source 1..1776: mol_type = other DNA
atgatgagcagccccgcccagagcagaagccccgacctgatgtggaacctggtgccctgggtgctgttctgcggctgctgcagaatcttccccgacggcgtggccggcagagagcagctgctggcccagcagagaatgcacagcatgatcagcagcgtggacgtgaagagcgaggtgcccgtgggcctggagcccatcagccccctggacctgagaaccgacctgagaatgatgatgcccgtggtggaccccgtggtgagagagaagcagctgcagcaggagctgctgctgatccagcagcagcagcagatccagaagcagctgctgatcgccgagttccagaagcagcacgagaacctgaccagacagcaccaggcccagctgcaggagcacatcaaggagctgctggccatcaagcagcagcaggagctgctggagaaggagcagaagctggagcagcagagacaggagcaggaggtggagagacacagaagagagcagcagctgccccccctgagaggcaaggacagaggcagagagagagccgtggccagcaccgaggtgaagcagaagctgcaggagttcctgctgagcaagagcgccaccaaggacacccccaccaacggcaagaaccacagcgtgagcagacaccccaagctgtggtacaccgccgcccaccacaccagcctggaccagagcagcccccccctgagcggcaccagccccagctacaagtacaccctgcccggcgcccaggacgccaaggacgacttccccctgagaaagaccgagagcagcgtgagcagcagcagccccggcagcggccccagcagccccaacaacggccccaccggcagcgtgaccgagaacgagaccagcgtgctgccccccaccccccacgccgagcagatggtgagccagcagagaatcctgatccacgaggacagcatgaacctgctgagcctgtacaccagccccagcctgcccaacatcaccctgggcctgcccgccgtgcccagccagctgaacgccagcaacagcctgaaggagaagcagaagtgcgagacccagaccctgagacagggcgtgcccctgcccggccagtacggcggcagcatccccgccagcagcagccacccccacgtgaccctggagggcaagccccccaacagcagccaccaggccctgctgcagcacctgctgctgaaggagcagatgagacagcagaagctgctggtggccggcggcgtgcccctgcacccccagagccccctggccaccaaggagagaatcagccccggcatcagaggcacccacaagctgcccagacacagacccctgaacagaacccagagcgcccccctgccccagagcaccctggcccagctggtgatccagcagcagcaccagcagttcctggagaagcagaagcagtaccagcagcagatccacatgaacaagctgctgagcaagagcatcgagcagctgaagcagcccggcagccacctggaggaggccgaggaggagctgcagggcgaccaggccatgcaggaggacagagcccccagcagcggcaacagcaccagaagcgacagcagcgcctgcgtggacgacaccctgggccaggtgggcgccgtgaaggtgaaggaggagcccgtggacagcgacgaggacgcccagatccaggagatggagagcggcgagcaggccgccttcatgcagcaggtgatcggcaaggacctggcccccggcttcgtgatcaaggtgatcatctag

SEQ ID NO: 84625 - DNA, 2772 bp, synthetic construct
  misc_feature 1..2772: note = Description of Artificial Sequence: Synthetic coding sequence
  source 1..2772: mol_type = other DNA
ctgcacaagctgagcagcctggtggacgtgaagagcgaggtgcccgtgggcctggagcccatcagccccctggacctgagaaccgacctgagaatgatgatgcccgtggtggaccccgtggtgagagagaagcagctgcagcaggagctgctgctgatccagcagcagcagcagatccagaagcagctgctgatcgccgagttccagaagcagcacgagaacctgaccagacagcaccaggcccagctgcaggagcacatcaaggagctgctggccatcaagcagcagcaggagctgctggagaaggagcagaagctggagcagcagagacaggagcaggaggtggagagacacagaagagagcagcagctgccccccctgagaggcaaggacagaggcagagagagagccgtggccagcaccgaggtgaagcagaagctgcaggagttcctgctgagcaagagcgccaccaaggacacccccaccaacggcaagaaccacagcgtgagcagacaccccaagctgtggtacaccgccgcccaccacaccagcctggaccagagcagcccccccctgagcggcaccagccccagctacaagtacaccctgcccggcgcccaggacgccaaggacgacttccccctgagaaagaccgccagcgagcccaacctgaaggtgagaagcagactgaagcagaaggtggccgagagaagaagcagccccctgctgagaagaaaggacggcaacgtggtgaccagcttcaagaagagaatgttcgaggtgaccgagagcagcgtgagcagcagcagccccggcagcggccccagcagccccaacaacggccccaccggcagcgtgaccgagaacgagaccagcgtgctgccccccaccccccacgccgagcagatggtgagccagcagagaatcctgatccacgaggacagcatgaacctgctgagcctgtacaccagccccagcctgcccaacatcaccctgggcctgcccgccgtgcccagccagctgaacgccagcaacagcctgaaggagaagcagaagtgcgagacccagaccctgagacagggcgtgcccctgcccggccagtacggcggcagcatccccgccagcagcagccacccccacgtgaccctggagggcaagccccccaacagcagccaccaggccctgctgcagcacctgctgctgaaggagcagatgagacagcagaagctgctggtggccggcggcgtgcccctgcacccccagagccccctggccaccaaggagagaatcagccccggcatcagaggcacccacaagctgcccagacacagacccctgaacagaacccagagcgcccccctgccccagagcaccctggcccagctggtgatccagcagcagcaccagcagttcctggagaagcagaagcagtaccagcagcagatccacatgaacaagcccttcctggagcccacccacaccagagccctgagcgtgagacaggcccccctggccgccgtgggcatggacggcctggagaagcacagactggtgagcagaacccacagcagccccgccgccagcgtgctgccccaccccgccatggacagacccctgcagcccggcagcgccaccggcatcgcctacgaccccctgatgctgaagcaccagtgcgtgtgcggcaacagcaccacccaccccgagcacgccggcagaatccagagcatctggagcagactgcaggagaccggcctgctgaacaagtgcgagagaatccagggcagaaaggccagcctggaggagatccagctggtgcacagcgagcaccacagcctgctgtacggcaccaaccccctggacggccagaagctggaccccagaatcctgctgggcgacgacagccagaagttcttcagcagcctgccctgcggcggcctgggcgtggacagcgacaccatctggaacgagctgcacagcagcggcgccgccagaatggccgtgggctgcgtgatcgagctggccagcaaggtggccagcggcgagctgaagaacggcttcgccgtggtgagaccccccggccaccacgccgaggagagcaccgccatgggcttctgcttcttcaacagcgtggccatcaccgccaagtacctgagagaccagctgaacatcagcaagatcctgatcgtggacctggacgtgcaccacggcaacggcacccagcaggccttctacgccgaccccagcatcctgtacatcagcctgcacagatacgacgagggcaacttcttccccggcagcggcgcccccaacgaggtgggcaccggcctgggcgagggctacaacatcaacatcgcctggaccggcggcctggacccccccatgggcgacgtggagtacctggaggccttcagaaccatcgtgaagcccgtggccaaggagttcgaccccgacatggtgctggtgagcgccggcttcgacgccctggagggccacaccccccccctgggcggctacaaggtgaccgccaagtgcttcggccacctgaccaagcagctgatgaccctggccgacggcagagtggtgctggccctggagggcggccacgacctgaccgccatctgcgacgccagcgaggcctgcgtgaacgccctgctgggcaacgagctggagcccctggccgaggacatcctgcaccagagccccaacatgaacgccgtgatcagcctgcagaagatcatcgagatccagagcatgagcctgaagttcagctag

SEQ ID NO: 84626 - DNA, 3078 bp, synthetic construct
  misc_feature 1..3078: note = Description of Artificial Sequence: Synthetic coding sequence
  source 1..3078: mol_type = other DNA
atgcacagcatgatcagcagcgtggacgtgaagagcgaggtgcccgtgggcctggagcccatcagccccctggacctgagaaccgacctgagaatgatgatgcccgtggtggaccccgtggtgagagagaagcagctgcagcaggagctgctgctgatccagcagcagcagcagatccagaagcagctgctgatcgccgagttccagaagcagcacgagaacctgaccagacagcaccaggcccagctgcaggagcacatcaagctgcagcaggagctgctggccatcaagcagcagcaggagctgctggagaaggagcagaagctggagcagcagagacaggagcaggaggtggagagacacagaagagagcagcagctgccccccctgagaggcaaggacagaggcagagagagagccgtggccagcaccgaggtgaagcagaagctgcaggagttcctgctgagcaagagcgccaccaaggacacccccaccaacggcaagaaccacagcgtgagcagacaccccaagctgtggtacaccgccgcccaccacaccagcctggaccagagcagcccccccctgagcggcaccagccccagctacaagtacaccctgcccggcgcccaggacgccaaggacgacttccccctgagaaagaccgagagcagcgtgagcagcagcagccccggcagcggccccagcagccccaacaacggccccaccggcagcgtgaccgagaacgagaccagcgtgctgccccccaccccccacgccgagcagatggtgagccagcagagaatcctgatccacgaggacagcatgaacctgctgagcctgtacaccagccccagcctgcccaacatcaccctgggcctgcccgccgtgcccagccagctgaacgccagcaacagcctgaaggagaagcagaagtgcgagacccagaccctgagacagggcgtgcccctgcccggccagtacggcggcagcatccccgccagcagcagccacccccacgtgaccctggagggcaagccccccaacagcagccaccaggccctgctgcagcacctgctgctgaaggagcagatgagacagcagaagctgctggtggccggcggcgtgcccctgcacccccagagccccctggccaccaaggagagaatcagccccggcatcagaggcacccacaagctgcccagacacagacccctgaacagaacccagagcgcccccctgccccagagcaccctggcccagctggtgatccagcagcagcaccagcagttcctggagaagcagaagcagtaccagcagcagatccacatgaacaagctgctgagcaagagcatcgagcagctgaagcagcccggcagccacctggaggaggccgaggaggagctgcagggcgaccaggccatgcaggaggacagagcccccagcagcggcaacagcaccagaagcgacagcagcgcctgcgtggacgacaccctgggccaggtgggcgccgtgaaggtgaaggaggagcccgtggacagcgacgaggacgcccagatccaggagatggagagcggcgagcaggccgccttcatgcagcagcccttcctggagcccacccacaccagagccctgagcgtgagacaggcccccctggccgccgtgggcatggacggcctggagaagcacagactggtgagcagaacccacagcagccccgccgccagcgtgctgccccaccccgccatggacagacccctgcagcccggcagcgccaccggcatcgcctacgaccccctgatgctgaagcaccagtgcgtgtgcggcaacagcaccacccaccccgagcacgccggcagaatccagagcatctggagcagactgcaggagaccggcctgctgaacaagtgcgagagaatccagggcagaaaggccagcctggaggagatccagctggtgcacagcgagcaccacagcctgctgtacggcaccaaccccctggacggccagaagctggaccccagaatcctgctgggcgacgacagccagaagttcttcagcagcctgccctgcggcggcctgggcgtggacagcgacaccatctggaacgagctgcacagcagcggcgccgccagaatggccgtgggctgcgtgatcgagctggccagcaaggtggccagcggcgagctgaagaacggcttcgccgtggtgagaccccccggccaccacgccgaggagagcaccgccatgggcttctgcttcttcaacagcgtggccatcaccgccaagtacctgagagaccagctgaacatcagcaagatcctgatcgtggacctggacgtgcaccacggcaacggcacccagcaggccttctacgccgaccccagcatcctgtacatcagcctgcacagatacgacgagggcaacttcttccccggcagcggcgcccccaacgaggtgggcaccggcctgggcgagggctacaacatcaacatcgcctggaccggcggcctggacccccccatgggcgacgtggagtacctggaggccttcagaaccatcgtgaagcccgtggccaaggagttcgaccccgacatggtgctggtgagcgccggcttcgacgccctggagggccacaccccccccctgggcggctacaaggtgaccgccaagtgcttcggccacctgaccaagcagctgatgaccctggccgacggcagagtggtgctggccctggagggcggccacgacctgaccgccatctgcgacgccagcgaggcctgcgtgaacgccctgctgggcaacgagctggagcccctggccgaggacatcctgcaccagagccccaacatgaacgccgtgatcagcctgcagaagatcatcgagatccagagcaagtactggaagagcgtgagaatggtggccgtgcccagaggctgcgccctggccggcgcccagctgcaggaggagaccgagaccgtgagcgccctggccagcctgaccgtggacgtggagcagcccttcgcccaggaggacagcagaaccgccggcgagcccatggaggaggagcccgccctgtag

SEQ ID NO: 84627 - DNA, 1773 bp, synthetic construct
  misc_feature 1..1773: note = Description of Artificial Sequence: Synthetic coding sequence
  source 1..1773: mol_type = other DNA
atgcacagcatgatcagcagcgtggacgtgaagagcgaggtgcccgtgggcctggagcccatcagccccctggacctgagaaccgacctgagaatgatgatgcccgtggtggaccccgtggtgagagagaagcagctgcagcaggagctgctgctgatccagcagcagcagcagatccagaagcagctgctgatcgccgagttccagaagcagcacgagaacctgaccagacagcaccaggcccagctgcaggagcacatcaaggagctgctggccatcaagcagcagcaggagctgctggagaaggagcagaagctggagcagcagagacaggagcaggaggtggagagacacagaagagagcagcagctgccccccctgagaggcaaggacagaggcagagagagagccgtggccagcaccgaggtgaagcagaagctgcaggagttcctgctgagcaagagcgccaccaaggacacccccaccaacggcaagaaccacagcgtgagcagacaccccaagctgtggtacaccgccgcccaccacaccagcctggaccagagcagcccccccctgagcggcaccagccccagctacaagtacaccctgcccggcgcccaggacgccaaggacgacttccccctgagaaagaccgccagcgagcccaacctgaaggtgagaagcagactgaagcagaaggtggccgagagaagaagcagccccctgctgagaagaaaggacggcaacgtggtgaccagcttcaagaagagaatgttcgaggtgaccgagagcagcgtgagcagcagcagccccggcagcggccccagcagccccaacaacggccccaccggcagcgtgaccgagaacgagaccagcgtgctgccccccaccccccacgccgagcagatggtgagccagcagagaatcctgatccacgaggacagcatgaacctgctgagcctgtacaccagccccagcctgcccaacatcaccctgggcctgcccgccgtgcccagccagctgaacgccagcaacagcctgaaggagaagcagaagtgcgagacccagaccctgagacagggcgtgcccctgcccggccagtacggcggcagcatccccgccagcagcagccacccccacgtgaccctggagggcaagccccccaacagcagccaccaggccctgctgcagcacctgctgctgaaggagcagatgagacagcagaagctgctggtggccggcggcgtgcccctgcacccccagagccccctggccaccaaggagagaatcagccccggcatcagaggcacccacaagctgcccagacacagacccctgaacagaacccagagcgcccccctgccccagagcaccctggcccagctggtgatccagcagcagcaccagcagttcctggagaagcagaagcagtaccagcagcagatccacatgaacaagctgctgagcaagagcatcgagcagctgaagcagcccggcagccacctggaggaggccgaggaggagctgcagggcgaccaggccatgcaggaggacagagcccccagcagcggcaacagcaccagaagcgacagcagcgcctgcgtggacgacaccctgggccaggtgggcgccgtgaaggtgaaggaggagcccgtggacagcgacgaggacgcccagatccaggagatggagagcggcgagcaggccgccttcatgcagcaggtgatcggcaaggacctggcccccggcttcgtgatcaaggtgatcatctag

SEQ ID NO: 84628 - DNA, 1734 bp, synthetic construct
  misc_feature 1..1734: note = Description of Artificial Sequence: Synthetic coding sequence
  source 1..1734: mol_type = other DNA
atgctgcagaccatctacgagagcgacagctgcttcagcagcgacggcgtggccggcagagagcagctgctggcccagcagagaatgcacagcatgatcagcagcgtggacgtgaagagcgaggtgcccgtgggcctggagcccatcagccccctggacctgagaaccgacctgagaatgatgatgcccgtggtggaccccgtggtgagagagaagcagctgcagcaggagctgctgctgatccagcagcagcagcagatccagaagcagctgctgatcgccgagttccagaagcagcacgagaacctgaccagacagcaccaggcccagctgcaggagcacatcaagctgcagcaggagctgctggccatcaagcagcagcaggagctgctggagaaggagcagaagctggagcagcagagacaggagcaggaggtggagagacacagaagagagcagcagctgccccccctgagaggcaaggacagaggcagagagagagccgtggccagcaccgaggtgaagcagaagctgcaggagttcctgctgagcaagagcgccaccaaggacacccccaccaacggcaagaaccacagcgtgagcagacaccccaagctgtggtacaccgccgcccaccacaccagcctggaccagagcagcccccccctgagcggcaccagccccagctacaagtacaccctgcccggcgcccaggacgccaaggacgacttccccctgagaaagaccgagagcagcgtgagcagcagcagccccggcagcggccccagcagccccaacaacggccccaccggcagcgtgaccgagaacgagaccagcgtgctgccccccaccccccacgccgagcagatggtgagccagcagagaatcctgatccacgaggacagcatgaacctgctgagcctgtacaccagccccagcctgcccaacatcaccctgggcctgcccgccgtgcccagccagctgaacgccagcaacagcctgaaggagaagcagaagtgcgagacccagaccctgagacagggcgtgcccctgcccggccagtacggcggcagcatccccgccagcagcagccacccccacgtgaccctggagggcaagccccccaacagcagccaccaggccctgctgcagcacctgctgctgaaggagcagatgagacagcagaagctgctggtggccggcggcgtgcccctgcacccccagagccccctggccaccaaggagagaatcagccccggcatcagaggcacccacaagctgcccagacacagacccctgaacagaacccagagcgcccccctgccccagagcaccctggcccagctggtgatccagcagcagcaccagcagttcctggagaagcagaagcagtaccagcagcagatccacatgaacaagctgctgagcaagagcatcgagcagctgaagcagcccggcagccacctggaggaggccgaggaggagctgcagggcgaccaggccatgcaggaggacagagcccccagcagcggcaacagcaccagaagcgacagcagcgcctgcgtggacgacaccctgggccaggtgggcgccgtgaaggtgaaggaggagcccgtggacagcgacgaggacgcccagatccaggagatggagagcggcgagcaggccgccttcatgcagcaggtgatcggcaaggacctggcccccggcttcgtgatcaaggtgatcatctag

SEQ ID NO: 84629 - DNA, 3201 bp, synthetic construct
  misc_feature 1..3201: note = Description of Artificial Sequence: Synthetic coding sequence
  source 1..3201: mol_type = other DNA
atgcacagcatgatcagcagcgtggacgtgaagagcgaggtgcccgtgggcctggagcccatcagccccctggacctgagaaccgacctgagaatgatgatgcccgtggtggaccccgtggtgagagagaagcagctgcagcaggagctgctgctgatccagcagcagcagcagatccagaagcagctgctgatcgccgagttccagaagcagcacgagaacctgaccagacagcaccaggcccagctgcaggagcacatcaaggagctgctggccatcaagcagcagcaggagctgctggagaaggagcagaagctggagcagcagagacaggagcaggaggtggagagacacagaagagagcagcagctgccccccctgagaggcaaggacagaggcagagagagagccgtggccagcaccgaggtgaagcagaagctgcaggagttcctgctgagcaagagcgccaccaaggacacccccaccaacggcaagaaccacagcgtgagcagacaccccaagctgtggtacaccgccgcccaccacaccagcctggaccagagcagcccccccctgagcggcaccagccccagctacaagtacaccctgcccggcgcccaggacgccaaggacgacttccccctgagaaagaccgccagcgagcccaacctgaaggtgagaagcagactgaagcagaaggtggccgagagaagaagcagccccctgctgagaagaaaggacggcaacgtggtgaccagcttcaagaagagaatgttcgaggtgaccgagagcagcgtgagcagcagcagccccggcagcggccccagcagccccaacaacggccccaccggcagcgtgaccgagaacgagaccagcgtgctgccccccaccccccacgccgagcagatggtgagccagcagagaatcctgatccacgaggacagcatgaacctgctgagcctgtacaccagccccagcctgcccaacatcaccctgggcctgcccgccgtgcccagccagctgaacgccagcaacagcctgaaggagaagcagaagtgcgagacccagaccctgagacagggcgtgcccctgcccggccagtacggcggcagcatccccgccagcagcagccacccccacgtgaccctggagggcaagccccccaacagcagccaccaggccctgctgcagcacctgctgctgaaggagcagatgagacagcagaagctgctggtggccggcggcgtgcccctgcacccccagagccccctggccaccaaggagagaatcagccccggcatcagaggcacccacaagctgcccagacacagacccctgaacagaacccagagcgcccccctgccccagagcaccctggcccagctggtgatccagcagcagcaccagcagttcctggagaagcagaagcagtaccagcagcagatccacatgaacaagctgctgagcaagagcatcgagcagctgaagcagcccggcagccacctggaggaggccgaggaggagctgcagggcgaccaggccatgcaggaggacagagcccccagcagcggcaacagcaccagaagcgacagcagcgcctgcgtggacgacaccctgggccaggtgggcgccgtgaaggtgaaggaggagcccgtggacagcgacgaggacgcccagatccaggagatggagagcggcgagcaggccgccttcatgcagcagcccttcctggagcccacccacaccagagccctgagcgtgagacaggcccccctggccgccgtgggcatggacggcctggagaagcacagactggtgagcagaacccacagcagccccgccgccagcgtgctgccccaccccgccatggacagacccctgcagcccggcagcgccaccggcatcgcctacgaccccctgatgctgaagcaccagtgcgtgtgcggcaacagcaccacccaccccgagcacgccggcagaatccagagcatctggagcagactgcaggagaccggcctgctgaacaagtgcgagagaatccagggcagaaaggccagcctggaggagatccagctggtgcacagcgagcaccacagcctgctgtacggcaccaaccccctggacggccagaagctggaccccagaatcctgctgggcgacgacagccagaagttcttcagcagcctgccctgcggcggcctgggcgtggacagcgacaccatctggaacgagctgcacagcagcggcgccgccagaatggccgtgggctgcgtgatcgagctggccagcaaggtggccagcggcgagctgaagaacggcttcgccgtggtgagaccccccggccaccacgccgaggagagcaccgccatgggcttctgcttcttcaacagcgtggccatcaccgccaagtacctgagagaccagctgaacatcagcaagatcctgatcgtggacctggacgtgcaccacggcaacggcacccagcaggccttctacgccgaccccagcatcctgtacatcagcctgcacagatacgacgagggcaacttcttccccggcagcggcgcccccaacgaggtgggcaccggcctgggcgagggctacaacatcaacatcgcctggaccggcggcctggacccccccatgggcgacgtggagtacctggaggccttcagaaccatcgtgaagcccgtggccaaggagttcgaccccgacatggtgctggtgagcgccggcttcgacgccctggagggccacaccccccccctgggcggctacaaggtgaccgccaagtgcttcggccacctgaccaagcagctgatgaccctggccgacggcagagtggtgctggccctggagggcggccacgacctgaccgccatctgcgacgccagcgaggcctgcgtgaacgccctgctgggcaacgagctggagcccctggccgaggacatcctgcaccagagccccaacatgaacgccgtgatcagcctgcagaagatcatcgagatccagagcaagtactggaagagcgtgagaatggtggccgtgcccagaggctgcgccctggccggcgcccagctgcaggaggagaccgagaccgtgagcgccctggccagcctgaccgtggacgtggagcagcccttcgcccaggaggacagcagaaccgccggcgagcccatggaggaggagcccgccctgtag

SEQ ID NO: 84630 - DNA, 447 bp, synthetic construct
  misc_feature 1..447: note = Description of Artificial Sequence: Synthetic coding sequence
  source 1..447: mol_type = other DNA
atgcacagcatgatcagcagcgtggacgtgaagagcgaggtgcccgtgggcctggagcccatcagccccctggacctgagaaccgacctgagaatgatgatgcccgtggtggaccccgtggtgagagagaagcagctgcagcaggagctgctgctgatccagcagcagcagcagatccagaagcagctgctgatcgccgagttccagaagcagcacgagaacctgaccagacagcaccaggcccagctgcaggagcacatcaagctgcagcaggagctgctggccatcaagcagcagcaggagctgctggagaaggagcagaagctggagcagcagagacaggagcaggaggtggagagacacagaagagagcagcagctgccccccctgagaggcaaggacagaggcagagagagagccgtggccagcaccgaggtgaagcagtag

SEQ ID NO: 84631 - DNA, 417 bp, synthetic construct
  misc_feature 1..417: note = Description of Artificial Sequence: Synthetic coding sequence
  source 1..417: mol_type = other DNA
atgcacagcatgatcagcagcgtggacgtgaagagcgaggtgcccgtgggcctggagcccatcagccccctggacctgagaaccgacctgagaatgatgatgcccgtggtggaccccgtggtgagagagaagcagctgcagcaggagctgctgctgatccagcagcagcagcagatccagaagcagctgctgatcgccgagttccagaagcagcacgagaacctgaccagacagcaccaggcccagctgcaggagcacatcaagctgcagcaggagctgctggccatcaagcagcagcaggagctgctggagaaggagcagaagctggagcagcagagacaggagcaggaggtggagagacacagaagagagcagcagctgccccccctgagaggcaaggacagaggcagagagtag

SEQ ID NO: 84632 - DNA, 1767 bp, synthetic construct
  misc_feature 1..1767: note = Description of Artificial Sequence: Synthetic coding sequence
  source 1..1767: mol_type = other DNA
atgatgagcagccccgcccagcccgacctgatgtggaacctggtgccctgggtgctgttctgcggctgctgcagaatcttccccgacggcgtggccggcagagagcagctgctggcccagcagagaatgcacagcatgatcagcagcgtggacgtgaagagcgaggtgcccgtgggcctggagcccatcagccccctggacctgagaaccgacctgagaatgatgatgcccgtggtggaccccgtggtgagagagaagcagctgcagcaggagctgctgctgatccagcagcagcagcagatccagaagcagctgctgatcgccgagttccagaagcagcacgagaacctgaccagacagcaccaggcccagctgcaggagcacatcaaggagctgctggccatcaagcagcagcaggagctgctggagaaggagcagaagctggagcagcagagacaggagcaggaggtggagagacacagaagagagcagcagctgccccccctgagaggcaaggacagaggcagagagagagccgtggccagcaccgaggtgaagcagaagctgcaggagttcctgctgagcaagagcgccaccaaggacacccccaccaacggcaagaaccacagcgtgagcagacaccccaagctgtggtacaccgccgcccaccacaccagcctggaccagagcagcccccccctgagcggcaccagccccagctacaagtacaccctgcccggcgcccaggacgccaaggacgacttccccctgagaaagaccgagagcagcgtgagcagcagcagccccggcagcggccccagcagccccaacaacggccccaccggcagcgtgaccgagaacgagaccagcgtgctgccccccaccccccacgccgagcagatggtgagccagcagagaatcctgatccacgaggacagcatgaacctgctgagcctgtacaccagccccagcctgcccaacatcaccctgggcctgcccgccgtgcccagccagctgaacgccagcaacagcctgaaggagaagcagaagtgcgagacccagaccctgagacagggcgtgcccctgcccggccagtacggcggcagcatccccgccagcagcagccacccccacgtgaccctggagggcaagccccccaacagcagccaccaggccctgctgcagcacctgctgctgaaggagcagatgagacagcagaagctgctggtggccggcggcgtgcccctgcacccccagagccccctggccaccaaggagagaatcagccccggcatcagaggcacccacaagctgcccagacacagacccctgaacagaacccagagcgcccccctgccccagagcaccctggcccagctggtgatccagcagcagcaccagcagttcctggagaagcagaagcagtaccagcagcagatccacatgaacaagctgctgagcaagagcatcgagcagctgaagcagcccggcagccacctggaggaggccgaggaggagctgcagggcgaccaggccatgcaggaggacagagcccccagcagcggcaacagcaccagaagcgacagcagcgcctgcgtggacgacaccctgggccaggtgggcgccgtgaaggtgaaggaggagcccgtggacagcgacgaggacgcccagatccaggagatggagagcggcgagcaggccgccttcatgcagcaggtgatcggcaaggacctggcccccggcttcgtgatcaaggtgatcatctag

SEQ ID NO: 84633 - DNA, 1641 bp, synthetic construct
  misc_feature 1..1641: note = Description of Artificial Sequence: Synthetic coding sequence
  source 1..1641: mol_type = other DNA
atgcacagcatgatcagcagcgtggacgtgaagagcgaggtgcccgtgggcctggagcccatcagccccctggacctgagaaccgacctgagaatgatgatgcccgtggtggaccccgtggtgagagagaagcagctgcagcaggagctgctgctgatccagcagcagcagcagatccagaagcagctgctgatcgccgagttccagaagcagcacgagaacctgaccagacagcaccaggcccagctgcaggagcacatcaaggagctgctggccatcaagcagcagcaggagctgctggagaaggagcagaagctggagcagcagagacaggagcaggaggtggagagacacagaagagagcagcagctgccccccctgagaggcaaggacagaggcagagagagagccgtggccagcaccgaggtgaagcagaagctgcaggagttcctgctgagcaagagcgccaccaaggacacccccaccaacggcaagaaccacagcgtgagcagacaccccaagctgtggtacaccgccgcccaccacaccagcctggaccagagcagcccccccctgagcggcaccagccccagctacaagtacaccctgcccggcgcccaggacgccaaggacgacttccccctgagaaagaccgagagcagcgtgagcagcagcagccccggcagcggccccagcagccccaacaacggccccaccggcagcgtgaccgagaacgagaccagcgtgctgccccccaccccccacgccgagcagatggtgagccagcagagaatcctgatccacgaggacagcatgaacctgctgagcctgtacaccagccccagcctgcccaacatcaccctgggcctgcccgccgtgcccagccagctgaacgccagcaacagcctgaaggagaagcagaagtgcgagacccagaccctgagacagggcgtgcccctgcccggccagtacggcggcagcatccccgccagcagcagccacccccacgtgaccctggagggcaagccccccaacagcagccaccaggccctgctgcagcacctgctgctgaaggagcagatgagacagcagaagctgctggtggccggcggcgtgcccctgcacccccagagccccctggccaccaaggagagaatcagccccggcatcagaggcacccacaagctgcccagacacagacccctgaacagaacccagagcgcccccctgccccagagcaccctggcccagctggtgatccagcagcagcaccagcagttcctggagaagcagaagcagtaccagcagcagatccacatgaacaagctgctgagcaagagcatcgagcagctgaagcagcccggcagccacctggaggaggccgaggaggagctgcagggcgaccaggccatgcaggaggacagagcccccagcagcggcaacagcaccagaagcgacagcagcgcctgcgtggacgacaccctgggccaggtgggcgccgtgaaggtgaaggaggagcccgtggacagcgacgaggacgcccagatccaggagatggagagcggcgagcaggccgccttcatgcagcaggtgatcggcaaggacctggcccccggcttcgtgatcaaggtgatcatctag

SEQ ID NO: 84634 - DNA, 3036 bp, synthetic construct
  misc_feature 1..3036: note = Description of Artificial Sequence: Synthetic coding sequence
  source 1..3036: mol_type = other DNA
atgcacagcatgatcagcagcgtggacgtgaagagcgaggtgcccgtgggcctggagcccatcagccccctggacctgagaaccgacctgagaatgatgatgcccgtggtggaccccgtggtgagagagaagcagctgcagcaggagctgctgctgatccagcagcagcagcagatccagaagcagctgctgatcgccgagttccagaagcagcacgagaacctgaccagacagcaccaggcccagctgcaggagcacatcaaggagctgctggccatcaagcagcagcaggagctgctggagaaggagcagaagctggagcagcagagacaggagcaggaggtggagagacacagaagagagcagcagctgccccccctgagaggcaaggacagaggcagagagagagccgtggccagcaccgaggtgaagcagaagctgcaggagttcctgctgagcaagagcgccaccaaggacacccccaccaacggcaagaaccacagcgtgagcagacaccccaagctgtggtacaccgccgcccaccacaccagcctggaccagagcagcccccccctgagcggcaccagccccagctacaagtacaccctgcccggcgcccaggacgccaaggacgacttccccctgagaaagaccgccagcgagcccaacctgaaggtgagaagcagactgaagcagaaggtggccgagagaagaagcagccccctgctgagaagaaaggacggcaacgtggtgaccagcttcaagaagagaatgttcgaggtgaccgagagcagcgtgagcagcagcagccccggcagcggccccagcagccccaacaacggccccaccggcagcgtgaccgagaacgagaccagcgtgctgccccccaccccccacgccgagcagatggtgagccagcagagaatcctgatccacgaggacagcatgaacctgctgagcctgtacaccagccccagcctgcccaacatcaccctgggcctgcccgccgtgcccagccagctgaacgccagcaacagcctgaaggagaagcagaagtgcgagacccagaccctgagacagggcgtgcccctgcccggccagtacggcggcagcatccccgccagcagcagccacccccacgtgaccctggagggcaagccccccaacagcagccaccaggccctgctgcagcacctgctgctgaaggagcagatgagacagcagaagctgctggtggccggcggcgtgcccctgcacccccagagccccctggccaccaaggagagaatcagccccggcatcagaggcacccacaagctgcccagacacagacccctgaacagaacccagagcgcccccctgccccagagcaccctggcccagctggtgatccagcagcagcaccagcagttcctggagaagcagaagcagtaccagcagcagatccacatgaacaagctgctgagcaagagcatcgagcagctgaagcagcccggcagccacctggaggaggccgaggaggagctgcagggcgaccaggccatgcaggaggacagagcccccagcagcggcaacagcaccagaagcgacagcagcgcctgcgtggacgacaccctgggccaggtgggcgccgtgaaggtgaaggaggagcccgtggacagcgacgaggacgcccagatccaggagatggagagcggcgagcaggccgccttcatgcagcagcccttcctggagcccacccacaccagagccctgagcgtgagacaggcccccctggccgccgtgggcatggacggcctggagaagcacagactggtgagcagaacccacagcagccccgccgccagcgtgctgccccaccccgccatggacagacccctgcagcccggcagcgccaccggcatcgcctacgaccccctgatgctgaagcaccagtgcgtgtgcggcaacagcaccacccaccccgagcacgccggcagaatccagagcatctggagcagactgcaggagaccggcctgctgaacaagtgcgagagaatccagggcagaaaggccagcctggaggagatccagctggtgcacagcgagcaccacagcctgctgtacggcaccaaccccctggacggccagaagctggaccccagaatcctgctgggcgacgacagccagaagttcttcagcagcctgccctgcggcggcctgggcgtggacagcgacaccatctggaacgagctgcacagcagcggcgccgccagaatggccgtgggctgcgtgatcgagctggccagcaaggtggccagcggcgagctgaagaacggcttcgccgtggtgagaccccccggccaccacgccgaggagagcaccgccatgggcttctgcttcttcaacagcgtggccatcaccgccaagtacctgagagaccagctgaacatcagcaagatcctgatcgtggacctggacgtgcaccacggcaacggcacccagcaggccttctacgccgaccccagcatcctgtacatcagcctgcacagatacgacgagggcaacttcttccccggcagcggcgcccccaacgaggtgggcaccggcctgggcgagggctacaacatcaacatcgcctggaccggcggcctggacccccccatgggcgacgtggagtacctggaggccttcagaaccatcgtgaagcccgtggccaaggagttcgaccccgacatggtgctggtgagcgccggcttcgacgccctggagggccacaccccccccctgggcggctacaaggtgaccgccaagtgcttcggccacctgaccaagcagctgatgaccctggccgacggcagagtggtgctggccctggagggcggccacgacctgaccgccatctgcgacgccagcgaggcctgcgtgaacgccctgctgggcaacgagctggagcccctggccgaggacatcctgcaccagagccccaacatgaacgccgtgatcagcctgcagaagatcatcgagatccagagcatgagcctgaagttcagctag

SEQ ID NO: 84635 - DNA, 72 bp, synthetic construct
  misc_feature 1..72: note = Description of Artificial Sequence: Synthetic coding sequence
  source 1..72: mol_type = other DNA
atgcacagcatgatcagcagcgtggacgtgaagagcgaggtgcccgtgggcctggagcccatcagcccctag

SEQ ID NO: 84636 - DNA, 3210 bp, synthetic construct
  misc_feature 1..3210: note = Description of Artificial Sequence: Synthetic coding sequence
  source 1..3210: mol_type = other DNA
atgcacagcatgatcagcagcgtggacgtgaagagcgaggtgcccgtgggcctggagcccatcagccccctggacctgagaaccgacctgagaatgatgatgcccgtggtggaccccgtggtgagagagaagcagctgcagcaggagctgctgctgatccagcagcagcagcagatccagaagcagctgctgatcgccgagttccagaagcagcacgagaacctgaccagacagcaccaggcccagctgcaggagcacatcaagctgcagcaggagctgctggccatcaagcagcagcaggagctgctggagaaggagcagaagctggagcagcagagacaggagcaggaggtggagagacacagaagagagcagcagctgccccccctgagaggcaaggacagaggcagagagagagccgtggccagcaccgaggtgaagcagaagctgcaggagttcctgctgagcaagagcgccaccaaggacacccccaccaacggcaagaaccacagcgtgagcagacaccccaagctgtggtacaccgccgcccaccacaccagcctggaccagagcagcccccccctgagcggcaccagccccagctacaagtacaccctgcccggcgcccaggacgccaaggacgacttccccctgagaaagaccgccagcgagcccaacctgaaggtgagaagcagactgaagcagaaggtggccgagagaagaagcagccccctgctgagaagaaaggacggcaacgtggtgaccagcttcaagaagagaatgttcgaggtgaccgagagcagcgtgagcagcagcagccccggcagcggccccagcagccccaacaacggccccaccggcagcgtgaccgagaacgagaccagcgtgctgccccccaccccccacgccgagcagatggtgagccagcagagaatcctgatccacgaggacagcatgaacctgctgagcctgtacaccagccccagcctgcccaacatcaccctgggcctgcccgccgtgcccagccagctgaacgccagcaacagcctgaaggagaagcagaagtgcgagacccagaccctgagacagggcgtgcccctgcccggccagtacggcggcagcatccccgccagcagcagccacccccacgtgaccctggagggcaagccccccaacagcagccaccaggccctgctgcagcacctgctgctgaaggagcagatgagacagcagaagctgctggtggccggcggcgtgcccctgcacccccagagccccctggccaccaaggagagaatcagccccggcatcagaggcacccacaagctgcccagacacagacccctgaacagaacccagagcgcccccctgccccagagcaccctggcccagctggtgatccagcagcagcaccagcagttcctggagaagcagaagcagtaccagcagcagatccacatgaacaagctgctgagcaagagcatcgagcagctgaagcagcccggcagccacctggaggaggccgaggaggagctgcagggcgaccaggccatgcaggaggacagagcccccagcagcggcaacagcaccagaagcgacagcagcgcctgcgtggacgacaccctgggccaggtgggcgccgtgaaggtgaaggaggagcccgtggacagcgacgaggacgcccagatccaggagatggagagcggcgagcaggccgccttcatgcagcagcccttcctggagcccacccacaccagagccctgagcgtgagacaggcccccctggccgccgtgggcatggacggcctggagaagcacagactggtgagcagaacccacagcagccccgccgccagcgtgctgccccaccccgccatggacagacccctgcagcccggcagcgccaccggcatcgcctacgaccccctgatgctgaagcaccagtgcgtgtgcggcaacagcaccacccaccccgagcacgccggcagaatccagagcatctggagcagactgcaggagaccggcctgctgaacaagtgcgagagaatccagggcagaaaggccagcctggaggagatccagctggtgcacagcgagcaccacagcctgctgtacggcaccaaccccctggacggccagaagctggaccccagaatcctgctgggcgacgacagccagaagttcttcagcagcctgccctgcggcggcctgggcgtggacagcgacaccatctggaacgagctgcacagcagcggcgccgccagaatggccgtgggctgcgtgatcgagctggccagcaaggtggccagcggcgagctgaagaacggcttcgccgtggtgagaccccccggccaccacgccgaggagagcaccgccatgggcttctgcttcttcaacagcgtggccatcaccgccaagtacctgagagaccagctgaacatcagcaagatcctgatcgtggacctggacgtgcaccacggcaacggcacccagcaggccttctacgccgaccccagcatcctgtacatcagcctgcacagatacgacgagggcaacttcttccccggcagcggcgcccccaacgaggtgggcaccggcctgggcgagggctacaacatcaacatcgcctggaccggcggcctggacccccccatgggcgacgtggagtacctggaggccttcagaaccatcgtgaagcccgtggccaaggagttcgaccccgacatggtgctggtgagcgccggcttcgacgccctggagggccacaccccccccctgggcggctacaaggtgaccgccaagtgcttcggccacctgaccaagcagctgatgaccctggccgacggcagagtggtgctggccctggagggcggccacgacctgaccgccatctgcgacgccagcgaggcctgcgtgaacgccctgctgggcaacgagctggagcccctggccgaggacatcctgcaccagagccccaacatgaacgccgtgatcagcctgcagaagatcatcgagatccagagcaagtactggaagagcgtgagaatggtggccgtgcccagaggctgcgccctggccggcgcccagctgcaggaggagaccgagaccgtgagcgccctggccagcctgaccgtggacgtggagcagcccttcgcccaggaggacagcagaaccgccggcgagcccatggaggaggagcccgccctgtag

SEQ ID NO: 84637 - DNA, 1689 bp, synthetic construct
  misc_feature 1..1689: note = Description of Artificial Sequence: Synthetic coding sequence
  source 1..1689: mol_type = other DNA
atgatgatgcccgtggtggaccccgtggtgagagagaagcagctgcagcaggagctgctgctgatccagcagcagcagcagatccagaagcagctgctgatcgccgagttccagaagcagcacgagaacctgaccagacagcaccaggcccagctgcaggagcacatcaagctgcagcaggagctgctggccatcaagcagcagcaggagctgctggagaaggagcagaagctggagcagcagagacaggagcaggaggtggagagacacagaagagagcagcagctgccccccctgagaggcaaggacagaggcagagagagagccgtggccagcaccgaggtgaagcagaagctgcaggagttcctgctgagcaagagcgccaccaaggacacccccaccaacggcaagaaccacagcgtgagcagacaccccaagctgtggtacaccgccgcccaccacaccagcctggaccagagcagcccccccctgagcggcaccagccccagctacaagtacaccctgcccggcgcccaggacgccaaggacgacttccccctgagaaagaccgccagcgagcccaacctgaaggtgagaagcagactgaagcagaaggtggccgagagaagaagcagccccctgctgagaagaaaggacggcaacgtggtgaccagcttcaagaagagaatgttcgaggtgaccgagagcagcgtgagcagcagcagccccggcagcggccccagcagccccaacaacggccccaccggcagcgtgaccgagaacgagaccagcgtgctgccccccaccccccacgccgagcagatggtgagccagcagagaatcctgatccacgaggacagcatgaacctgctgagcctgtacaccagccccagcctgcccaacatcaccctgggcctgcccgccgtgcccagccagctgaacgccagcaacagcctgaaggagaagcagaagtgcgagacccagaccctgagacagggcgtgcccctgcccggccagtacggcggcagcatccccgccagcagcagccacccccacgtgaccctggagggcaagccccccaacagcagccaccaggccctgctgcagcacctgctgctgaaggagcagatgagacagcagaagctgctggtggccggcggcgtgcccctgcacccccagagccccctggccaccaaggagagaatcagccccggcatcagaggcacccacaagctgcccagacacagacccctgaacagaacccagagcgcccccctgccccagagcaccctggcccagctggtgatccagcagcagcaccagcagttcctggagaagcagaagcagtaccagcagcagatccacatgaacaagctgctgagcaagagcatcgagcagctgaagcagcccggcagccacctggaggaggccgaggaggagctgcagggcgaccaggccatgcaggaggacagagcccccagcagcggcaacagcaccagaagcgacagcagcgcctgcgtggacgacaccctgggccaggtgggcgccgtgaaggtgaaggaggagcccgtggacagcgacgaggacgcccagatccaggagatggagagcggcgagcaggccgccttcatgcagcaggtgatcggcaaggacctggcccccggcttcgtgatcaaggtgatcatctag

SEQ ID NO: 84638 - DNA, 1542 bp, synthetic construct
  misc_feature 1..1542: note = Description of Artificial Sequence: Synthetic coding sequence
  source 1..1542: mol_type = other DNA
atgatgatgcccgtggtggaccccgtggtgagagagaagcagctgcagcaggagctgctgctgatccagcagcagcagcagatccagaagcagctgctgatcgccgagttccagaagcagcacgagaacctgaccagacagcaccaggcccagctgcaggagcacatcaaggagctgctggccatcaagcagcagcaggagctgctggagaaggagcagaagctggagcagcagagacaggagcaggaggtggagagacacagaagagagcagcagctgccccccctgagaggcaaggacagaggcagagagagagccgtggccagcaccgaggtgaagcagaagctgcaggagttcctgctgagcaagagcgccaccaaggacacccccaccaacggcaagaaccacagcgtgagcagacaccccaagctgtgggccgcccaccacaccagcctggaccagagcagcccccccctgagcggcaccagccccagctacaagtacaccctgcccggcgcccaggacgccaaggacgacttccccctgagaaagaccgagagcagcgtgagcagcagcagccccggcagcggccccagcagccccaacaacggccccaccggcagcgtgaccgagaacgagaccagcgtgctgccccccaccccccacgccgagcagatggtgagccagcagagaatcctgatccacgaggacagcatgaacctgctgagcctgtacaccagccccagcctgcccaacatcaccctgggcctgcccgccgtgcccagccagctgaacgccagcaacagcctgaaggagaagcagaagtgcgagacccagaccctgagacagggcgtgcccctgcccggccagtacggcggcagcatccccgccagcagcagccacccccacgtgaccctggagggcaagccccccaacagcagccaccaggccctgctgcagcacctgctgctgaaggagcagatgagacagcagaagctgctggtggccggcggcgtgcccctgcacccccagagccccctggccaccaaggagagaatcagccccggcatcagaggcacccacaagctgcccagacacagacccctgaacagaacccagagcgcccccctgccccagagcaccctggcccagctggtgatccagcagcagcaccagcagttcctggagaagcagaagcagtaccagcagcagatccacatgaacaagctgctgagcaagagcatcgagcagctgaagcagcccggcagccacctggaggaggccgaggaggagctgcagggcgaccaggccatgcaggaggacagagcccccagcagcggcaacagcaccagaagcgacagcagcgcctgcgtggacgacaccctgggccaggtgggcgccgtgaaggtgaaggaggagcccgtggacagcgacgaggacgcccagatccaggagatggagagcggcgagcaggccgccttcatgcagcaggtgatcggcaaggacctggcccccggcttcgtgatcaaggtgatcatctag

SEQ ID NO: 84639 - DNA, 1980 bp, synthetic construct
  misc_feature 1..1980: note = Description of Artificial Sequence: Synthetic coding sequence
  source 1..1980: mol_type = other DNA
atgagagtgaaccacaccgtgagcaccatgctgcccacctgcatggtgcacagacagaccatgagctgcagcggcgccggcggcatcaccgccttcgtggccttcagagacgtggccgtgtacttcacccaggaggagtggagactgctgagccccgcccagagaaccctgcacagagaggtgatgctggagacctacaaccacctggtgagcctggagatccccagcagcaagcccaagctgatcgcccagctggagagaggcgaggccccctggagagaggagagaaagtgccccctggacctgtgccccgagagcaagcccgagatccagctgagccccagctgccccctgatcttcagcagccagcaggccctgagccagcacgtgtggctgagccacctgagccagctgttcagcagcctgtgggccggcaaccccctgcacctgggcaagcactaccccgaggaccagaagcagcagcaggaccccttctgcttcagcggcaaggccgagtggatccaggagggcgaggacagcagactgctgttcggcagagtgagcaagaacggcaccagcaaggccctgagcagcccccccgaggagcagcagcccgcccagagcaaggaggacaacaccgtggtggacatcggcagcagccccgagagaagagccgacctggaggagaccgacaaggtgctgcacggcctggaggtgagcggcttcggcgagatcaagtacgaggagttcggccccggcttcatcaaggagagcaacctgctgagcctgcagaagacccagaccggcgagaccccctacatgtacaccgagtggggcgacagcttcggcagcatgagcgtgctgatcaagaaccccagaacccacagcggcggcaagccctacgtgtgcagagagtgcggcagaggcttcacctggaagagcaacctgatcacccaccagagaacccacagcggcgagaagccctacgtgtgcaaggactgcggcagaggcttcacctggaagagcaacctgttcacccaccagagaacccacagcggcctgaagccctacgtgtgcaaggagtgcggccagagcttcagcctgaagagcaacctgatcacccaccagagagcccacaccggcgagaagccctacgtgtgcagagagtgcggcagaggcttcagacagcacagccacctggtgagacacaagagaacccacagcggcgagaagccctacatctgcagagagtgcgagcagggcttcagccagaagagccacctgatcagacacctgagaacccacaccggcgagaagccctacgtgtgcaccgagtgcggcagacacttcagctggaagagcaacctgaagacccaccagagaacccacagcggcgtgaagccctacgtgtgcctggagtgcggccagtgcttcagcctgaagagcaacctgaacaagcaccagagaagccacaccggcgagaagcccttcgtgtgcaccgagtgcggcagaggcttcaccagaaagagcaccctgagcacccaccagagaacccacagcggcgagaagcccttcgtgtgcgccgagtgcggcagaggcttcaacgacaagagcaccctgatcagccaccagagaacccacagcggcgagaagcccttcatgtgcagagagtgcggcagaagattcagacagaagcccaacctgttcagacacaagagagcccacagcggcgccttcgtgtgcagagagtgcggccagggcttctgcgccaagctgaccctgatcaagcaccagagagcccacgccggcggcaagccccacgtgtgcagagagtgcggccagggcttcagcagacagagccacctgatcagacaccagagaacccacagcggcgagaagccctacatctgcagaaagtgcggcagaggcttcagcagaaagagcaacctgatcagacaccagagaacccacagcggctag

SEQ ID NO: 84640 - DNA, 1923 bp, synthetic construct
  misc_feature 1..1923: note = Description of Artificial Sequence: Synthetic coding sequence
  source 1..1923: mol_type = other DNA
atggccaccggcctgctgagagccaagaaggaggccttcgtggccttcagagacgtggccgtgtacttcacccaggaggagtggagactgctgagccccgcccagagaaccctgcacagagaggtgatgctggagacctacaaccacctggtgagcctggagatccccagcagcaagcccaagctgatcgcccagctggagagaggcgaggccccctggagagaggagagaaagtgccccctggacctgtgccccgagagcaagcccgagatccagctgagccccagctgccccctgatcttcagcagccagcaggccctgagccagcacgtgtggctgagccacctgagccagctgttcagcagcctgtgggccggcaaccccctgcacctgggcaagcactaccccgaggaccagaagcagcagcaggaccccttctgcttcagcggcaaggccgagtggatccaggagggcgaggacagcagactgctgttcggcagagtgagcaagaacggcaccagcaaggccctgagcagcccccccgaggagcagcagcccgcccagagcaaggaggacaacaccgtggtggacatcggcagcagccccgagagaagagccgacctggaggagaccgacaaggtgctgcacggcctggaggtgagcggcttcggcgagatcaagtacgaggagttcggccccggcttcatcaaggagagcaacctgctgagcctgcagaagacccagaccggcgagaccccctacatgtacaccgagtggggcgacagcttcggcagcatgagcgtgctgatcaagaaccccagaacccacagcggcggcaagccctacgtgtgcagagagtgcggcagaggcttcacctggaagagcaacctgatcacccaccagagaacccacagcggcgagaagccctacgtgtgcaaggactgcggcagaggcttcacctggaagagcaacctgttcacccaccagagaacccacagcggcctgaagccctacgtgtgcaaggagtgcggccagagcttcagcctgaagagcaacctgatcacccaccagagagcccacaccggcgagaagccctacgtgtgcagagagtgcggcagaggcttcagacagcacagccacctggtgagacacaagagaacccacagcggcgagaagccctacatctgcagagagtgcgagcagggcttcagccagaagagccacctgatcagacacctgagaacccacaccggcgagaagccctacgtgtgcaccgagtgcggcagacacttcagctggaagagcaacctgaagacccaccagagaacccacagcggcgtgaagccctacgtgtgcctggagtgcggccagtgcttcagcctgaagagcaacctgaacaagcaccagagaagccacaccggcgagaagcccttcgtgtgcaccgagtgcggcagaggcttcaccagaaagagcaccctgagcacccaccagagaacccacagcggcgagaagcccttcgtgtgcgccgagtgcggcagaggcttcaacgacaagagcaccctgatcagccaccagagaacccacagcggcgagaagcccttcatgtgcagagagtgcggcagaagattcagacagaagcccaacctgttcagacacaagagagcccacagcggcgccttcgtgtgcagagagtgcggccagggcttctgcgccaagctgaccctgatcaagcaccagagagcccacgccggcggcaagccccacgtgtgcagagagtgcggccagggcttcagcagacagagccacctgatcagacaccagagaacccacagcggcgagaagccctacatctgcagaaagtgcggcagaggcttcagcagaaagagcaacctgatcagacaccagagaacccacagcggctag

SEQ ID NO: 84641 - DNA, 1317 bp, synthetic construct
  misc_feature 1..1317: note = Description of Artificial Sequence: Synthetic coding sequence
  source 1..1317: mol_type = other DNA
atgctggagacctacaaccacctggtgagcctggagatccccagcagcaagcccaagctgatcgcccagctggagagaggcgaggccccctggagagaggagagaaagtgccccctggacctgtgccccgagagcaagcccgagatccagctgagccccagctgccccctgatcttcagcagccagcaggccctgagccagcacgtgtggctgagccacctgagccagctgttcagcagcctgtgggccggcaaccccctgcacctgggcaagcactaccccgaggaccagaagcagcagcaggaccccttctgcttcagcggcaaggccgagtggatccaggagggcgaggacagcagactgctgttcggcagagtgagcaagaacggcaccagcaaggccctgagcagcccccccgaggagcagcagcccgcccagagcaaggaggacaacaccgtggtggacatcggcagcagccccgagagaagagccgacctggaggagaccgacaaggtgctgcacggcctggaggtgagcggcttcggcgagatcaagtacgaggagttcggccccggcttcatcaaggagagcaacctgctgagcctgcagaagagccacctgatcagacacctgagaacccacaccggcgagaagccctacgtgtgcaccgagtgcggcagacacttcagctggaagagcaacctgaagacccaccagagaacccacagcggcgtgaagccctacgtgtgcctggagtgcggccagtgcttcagcctgaagagcaacctgaacaagcaccagagaagccacaccggcgagaagcccttcgtgtgcaccgagtgcggcagaggcttcaccagaaagagcaccctgagcacccaccagagaacccacagcggcgagaagcccttcgtgtgcgccgagtgcggcagaggcttcaacgacaagagcaccctgatcagccaccagagaacccacagcggcgagaagcccttcatgtgcagagagtgcggcagaagattcagacagaagcccaacctgttcagacacaagagagcccacagcggcgccttcgtgtgcagagagtgcggccagggcttctgcgccaagctgaccctgatcaagcaccagagagcccacgccggcggcaagccccacgtgtgcagagagtgcggccagggcttcagcagacagagccacctgatcagacaccagagaacccacagcggcgagaagccctacatctgcagaaagtgcggcagaggcttcagcagaaagagcaacctgatcagacaccagagaacccacagcggctag

SEQ ID NO: 84642 - DNA, 1797 bp, synthetic construct
  misc_feature 1..1797: note = Description of Artificial Sequence: Synthetic coding sequence
  source 1..1797: mol_type = other DNA
atgctggagacctacaaccacctggtgagcctggagatccccagcagcaagcccaagctgatcgcccagctggagagaggcgaggccccctggagagaggagagaaagtgccccctggacctgtgccccgagagcaagcccgagatccagctgagccccagctgccccctgatcttcagcagccagcaggccctgagccagcacgtgtggctgagccacctgagccagctgttcagcagcctgtgggccggcaaccccctgcacctgggcaagcactaccccgaggaccagaagcagcagcaggaccccttctgcttcagcggcaaggccgagtggatccaggagggcgaggacagcagactgctgttcggcagagtgagcaagaacggcaccagcaaggccctgagcagcccccccgaggagcagcagcccgcccagagcaaggaggacaacaccgtggtggacatcggcagcagccccgagagaagagccgacctggaggagaccgacaaggtgctgcacggcctggaggtgagcggcttcggcgagatcaagtacgaggagttcggccccggcttcatcaaggagagcaacctgctgagcctgcagaagacccagaccggcgagaccccctacatgtacaccgagtggggcgacagcttcggcagcatgagcgtgctgatcaagaaccccagaacccacagcggcggcaagccctacgtgtgcagagagtgcggcagaggcttcacctggaagagcaacctgatcacccaccagagaacccacagcggcgagaagccctacgtgtgcaaggactgcggcagaggcttcacctggaagagcaacctgttcacccaccagagaacccacagcggcctgaagccctacgtgtgcaaggagtgcggccagagcttcagcctgaagagcaacctgatcacccaccagagagcccacaccggcgagaagccctacgtgtgcagagagtgcggcagaggcttcagacagcacagccacctggtgagacacaagagaacccacagcggcgagaagccctacatctgcagagagtgcgagcagggcttcagccagaagagccacctgatcagacacctgagaacccacaccggcgagaagccctacgtgtgcaccgagtgcggcagacacttcagctggaagagcaacctgaagacccaccagagaacccacagcggcgtgaagccctacgtgtgcctggagtgcggccagtgcttcagcctgaagagcaacctgaacaagcaccagagaagccacaccggcgagaagcccttcgtgtgcaccgagtgcggcagaggcttcaccagaaagagcaccctgagcacccaccagagaacccacagcggcgagaagcccttcgtgtgcgccgagtgcggcagaggcttcaacgacaagagcaccctgatcagccaccagagaacccacagcggcgagaagcccttcatgtgcagagagtgcggcagaagattcagacagaagcccaacctgttcagacacaagagagcccacagcggcgccttcgtgtgcagagagtgcggccagggcttctgcgccaagctgaccctgatcaagcaccagagagcccacgccggcggcaagccccacgtgtgcagagagtgcggccagggcttcagcagacagagccacctgatcagacaccagagaacccacagcggcgagaagccctacatctgcagaaagtgcggcagaggcttcagcagaaagagcaacctgatcagacaccagagaacccacagcggctag

SEQ ID NO: 84643 - DNA, 2190 bp, synthetic construct
  misc_feature 1..2190: note = Description of Artificial Sequence: Synthetic coding sequence
  source 1..2190: mol_type = other DNA
agctggctgggccccggcaaggccagcctgctgagaagcttcccccacctgtgcaccctgctgcccgacttcagactgcaggacccccagagagcccccgccttccacctgagcagcgagaccctgcccttcagcagaaagagcacccaggagaccagaaagatggccaccggcctgctgagagccaagaaggaggccttcgtggccttcagagacgtggccgtgtacttcacccaggaggagtggagactgctgagccccgcccagagaaccctgcacagagaggtgatgctggagacctacaaccacctggtgagcctggagatccccagcagcaagcccaagctgatcgcccagctggagagaggcgaggccccctggagagaggagagaaagtgccccctggacctgtgccccgccgagagcaagcccgagatccagctgagccccagctgccccctgatcttcagcagccagcaggccctgagccagcacgtgtggctgagccacctgagccagctgttcagcagcctgtgggccggcaaccccctgcacctgggcaagcactaccccgaggaccagaagcagcagcaggaccccttctgcttcagcggcaaggccgagtggatccaggagggcgaggacagcagactgctgttcggcagagtgagcaagaacggcaccagcaaggccctgagcagcccccccgaggagcagcagcccgcccagagcaaggaggacaacaccgtggtggacatcggcagcagccccgagagaagagccgacctggaggagaccgacaaggtgctgcacggcctggaggtgagcggcttcggcgagatcaagtacgaggagttcggccccggcttcatcaaggagagcaacctgctgagcctgcagaagacccagaccggcgagaccccctacatgtacaccgagtggggcgacagcttcggcagcatgagcgtgctgatcaagaaccccagaacccacagcggcggcaagccctacgtgtgcagagagtgcggcagaggcttcacctggaagagcaacctgatcacccaccagagaacccacagcggcgagaagccctacgtgtgcaaggactgcggcagaggcttcacctggaagagcaacctgttcacccaccagagaacccacagcggcctgaagccctacgtgtgcaaggagtgcggccagagcttcagcctgaagagcaacctgatcacccaccagagagcccacaccggcgagaagccctacgtgtgcagagagtgcggcagaggcttcagacagcacagccacctggtgagacacaagagaacccacagcggcgagaagccctacatctgcagagagtgcgagcagggcttcagccagaagagccacctgatcagacacctgagaacccacaccggcgagaagccctacgtgtgcaccgagtgcggcagacacttcagctggaagagcaacctgaagacccaccagagaacccacagcggcgtgaagccctacgtgtgcctggagtgcggccagtgcttcagcctgaagagcaacctgaacaagcaccagagaagccacaccggcgagaagcccttcgtgtgcaccgagtgcggcagaggcttcaccagaaagagcaccctgagcacccaccagagaacccacagcggcgagaagcccttcgtgtgcgccgagtgcggcagaggcttcaacgacaagagcaccctgatcagccaccagagaacccacagcggcgagaagcccttcatgtgcagagagtgcggcagaagattcagacagaagcccaacctgttcagacacaagagagcccacagcggcgccttcgtgtgcagagagtgcggccagggcttctgcgccaagctgaccctgatcaagcaccagagagcccacggcggcagcctgatgtgcgccggcagcgtgggcaaggccctggccggcagccacaccagcctggacaccagaggccacatccaggagagaagcctgatcttcgccgagagcgtggacggcgccctggtgggcagccccaccctgagcgacatcagaggccacacccaggacagaaacttcatgtgcatcggcaacgtggtgcagcccctggccagaagccacaccagcagcgacaccagaggccacacccagtgctgcggcttcttcagccactgctag

SEQ ID NO: 84644 - DNA, 1161 bp, synthetic construct
  misc_feature 1..1161: note = Description of Artificial Sequence: Synthetic coding sequence
  source 1..1161: mol_type = other DNA
atgtacaccgagtggggcgacagcttcggcagcatgagcgtgctgatcaagaaccccagaacccacagcggcggcaagccctacgtgtgcagagagtgcggcagaggcttcacctggaagagcaacctgatcacccaccagagaacccacagcggcgagaagccctacgtgtgcaaggactgcggcagaggcttcacctggaagagcaacctgttcacccaccagagaacccacagcggcctgaagccctacgtgtgcaaggagtgcggccagagcttcagcctgaagagcaacctgatcacccaccagagagcccacaccggcgagaagccctacgtgtgcagagagtgcggcagaggcttcagacagcacagccacctggtgagacacaagagaacccacagcggcgagaagccctacatctgcagagagtgcgagcagggcttcagccagaagagccacctgatcagacacctgagaacccacaccggcgagaagccctacgtgtgcaccgagtgcggcagacacttcagctggaagagcaacctgaagacccaccagagaacccacagcggcgtgaagccctacgtgtgcctggagtgcggccagtgcttcagcctgaagagcaacctgaacaagcaccagagaagccacaccggcgagaagcccttcgtgtgcaccgagtgcggcagaggcttcaccagaaagagcaccctgagcacccaccagagaacccacagcggcgagaagcccttcgtgtgcgccgagtgcggcagaggcttcaacgacaagagcaccctgatcagccaccagagaacccacagcggcgagaagcccttcatgtgcagagagtgcggcagaagattcagacagaagcccaacctgttcagacacaagagagcccacagcggcgccttcgtgtgcagagagtgcggccagggcttctgcgccaagctgaccctgatcaagcaccagagagcccacgccggcggcaagccccacgtgtgcagagagtgcggccagggcttcagcagacagagccacctgatcagacaccagagaacccacagcggcgagaagccctacatctgcagaaagtgcggcagaggcttcagcagaaagagcaacctgatcagacaccagagaacccacagcggctag

SEQ ID NO: 84645 - DNA, 612 bp, synthetic construct
  misc_feature 1..612: note = Description of Artificial Sequence: Synthetic coding sequence
  source 1..612: mol_type = other DNA
atgggcggcagcctgagagtggccgtgctgggcgcccccggcgtgggcaagaccgccatcatcagacagttcctgttcggcgactaccccgagagacacagacccaccgacggccccagactgtacagacccgccgtgctgctggacggcgccgtgtacgacctgagcatcagagacggcgacgtggccggccccggcagcagccccggcggccccgaggagtggcccgacgccaaggactggagcctgcaggacaccgacgccttcgtgctggtgtacgacatctgcagccccgacagcttcgactacgtgaaggccctgagacagagaatcgccgagaccagacccgccggcgcccccgaggcccccatcctggtggtgggcaacaagagagacagacagagactgagattcggccccagaagagccctggccgccctggtgagaagaggctggagatgcggctacctggagtgcagcgccaagtacaactggcacgtgctgagactgttcagagagctgctgagatgcgccctggtgagagccagacccgcccaccccgccctgagactgcagggcgccctgcaccccgccagatgcagcctgatgtag

SEQ ID NO: 84646 - DNA, 1479 bp, synthetic construct
  misc_feature 1..1479: note = Description of Artificial Sequence: Synthetic coding sequence
  source 1..1479: mol_type = other DNA
atggacctgctgaaggccatcaccagccccctggccgccggcagcaagcccagcaagaagaccggcgagaagagcagcggcagcagcagccacagcgagagcaagaaggagcaccacagaaagaaggtgagcggcagcagcggcgagctgcccctggaggacggcggcagccacaagagcaagaagatgaagcccctgtacgtgaacaccgagaccctgaccctgagagagcccgacggcctgaagatgaagctgatcctgagccccaaggagaagggcagcagcagcgtggacgaggagagcttccagtaccccagccagcaggccaccgtgaagaagagcagcaagaagagcgccagagacgagcagggcgccctgctgctgggccacgagctgcagagcttcctgaagaccgccagaaagaagcacaagagcagcagcgacgcccacagcagccccggccccgagggctgcggcagcgacgccagccagttcgccgagagccacagcgccaacctggacctgagcggcctggagcccatcctggtggagagcgacagcagcagcggcggcgagctggaggccggcgagctggtgatcgacgacagctacagagagatcaagaagaagaagaagagcaagaagagcaagaagaagaaggacaaggagaagcacaaggagaagagacacagcaagagcaagagaagcctgggcctgagcgccgtgcccgtgggcgaggtgaccgtgaccagcggccccccccccagcatcccctacgccggcgccgccgccccccccctgcccctgcccggcctgcacaccgacggccacagcgagaagaagaagaagaaggaggagaaggacaaggagagagagagaggcgagaagcccaagaagaagaacatgagcgcctaccaggtgttctgcaaggagtacagagtgaccatcgtggccgaccaccccggcatcgacttcggcgagctgagcaagaagctggccgaggtgtggaagcagctgcccgagaaggacaagctgatctggaagcagaaggcccagtacctgcagcacaagcagaacaaggccgaggccaccaccgtgaagagaaaggccagcagcagcgagggcagcatgaaggtgaaggccagcagcgtgggcgtgctgagcccccagaagaagagcccccccaccaccatgctgctgcccgccagccccgccaaggcccccgagaccgagcccatcgacgtggccgcccacctgcagctgctgggcgagagcctgagcctgatcggccacagactgcaggagaccgagggcatggtggccgtgagcggcagcctgagcgtgctgctggacagcatcatctgcgccctgggccccctggcctgcctgaccacccagctgcccgagctgaacggctgccccaagcaggtgctgagcaacaccctggacaacatcgcctacatcatgcccggcctgtag

SEQ ID NO: 84647 - DNA, 1896 bp, synthetic construct
  misc_feature 1..1896: note = Description of Artificial Sequence: Synthetic coding sequence
  source 1..1896: mol_type = other DNA
atggtgagcaagctgagccagctgcagaccgagctgctggccgccctgctggagagcggcctgagcaaggaggccctgatccaggccctgggcgagcccggcccctacctgctggccggcgagggccccctggacaagggcgagagctgcggcggcggcagaggcgagctggccgagctgcccaacggcctgggcgagaccagaggcagcgaggacgagaccgacgacgacggcgaggacttcaccccccccatcctgaaggagctggagaacctgagccccgaggaggccgcccaccagaaggccgtggtggagaccctgctgcaggaggacccctggagagtggccaagatggtgaagagctacctgcagcagcacaacatcccccagagagaggtggtggacaccaccggcctgaaccagagccacctgagccagcacctgaacaagggcacccccatgaagacccagaagagagccgccctgtacacctggtacgtgagaaagcagagagaggtggcccagcagttcacccacgccggccagggcggcctgatcgaggagcccaccggcgacgagctgcccaccaagaagggcagaagaaacagattcaagtggggccccgccagccagcagatcctgttccaggcctacgagagacagaagaaccccagcaaggaggagagagagaccctggtggaggagtgcaacagagccgagtgcatccagagaggcgtgagccccagccaggcccagggcctgggcagcaacctggtgaccgaggtgagagtgtacaactggttcgccaacagaagaaaggaggaggccttcagacacaagctggccatggacacctacagcggccccccccccggccccggccccggccccgccctgcccgcccacagcagccccggcctgcccccccccgccctgagccccagcaaggtgcacggcgtgagatacggccagcccgccaccagcgagaccgccgaggtgcccagcagcagcggcggccccctggtgaccgtgagcacccccctgcaccaggtgagccccaccggcctggagcccagccacagcctgctgagcaccgaggccaagctggtgagcgccgccggcggccccctgccccccgtgagcaccctgaccgccctgcacagcctggagcagaccagccccggcctgaaccagcagccccagaacctgatcatggccagcctgcccggcgtgatgaccatcggccccggcgagcccgccagcctgggccccaccttcaccaacaccggcgccagcaccctggtgatcggcctggccagcacccaggcccagagcgtgcccgtgatcaacagcatgggcagcagcctgaccaccctgcagcccgtgcagttcagccagcccctgcaccccagctaccagcagcccctgatgccccccgtgcagagccacgtgacccagagccccttcatggccaccatggcccagctgcagagcccccacgccctgtacagccacaagcccgaggtggcccagtacacccacaccggcctgctgccccagaccatgctgatcaccgacaccaccaacctgagcgccctggccagcctgacccccaccaagcaggtgttcaccagcgacaccgaggccagcagcgagagcggcctgcacacccccgccagccaggccaccaccctgcacgtgcccagccaggaccccgccagcatccagcacctgcagcccgcccacagactgagcgccagccccaccgtgagcagcagcagcctggtgctgtaccagagcagcgacagcagcaacggccagagccacctgctgcccagcaaccacagcgtgatcgagaccttcatcagcacccagatggccagcagcagccagtag

SEQ ID NO: 84648 - DNA, 1719 bp, synthetic construct
  misc_feature 1..1719: note = Description of Artificial Sequence: Synthetic coding sequence
  source 1..1719: mol_type = other DNA
atggtgagcaagctgagccagctgcagaccgagctgctggccgccctgctggagagcggcctgagcaaggaggccctgatccaggccctgggcgagcccggcccctacctgctggccggcgagggccccctggacaagggcgagagctgcggcggcggcagaggcgagctggccgagctgcccaacggcctgggcgagaccagaggcagcgaggacgagaccgacgacgacggcgaggacttcaccccccccatcctgaaggagctggagaacctgagccccgaggaggccgcccaccagaaggccgtggtggagaccctgctgcaggaggacccctggagagtggccaagatggtgaagagctacctgcagcagcacaacatcccccagagagaggtggtggacaccaccggcctgaaccagagccacctgagccagcacctgaacaagggcacccccatgaagacccagaagagagccgccctgtacacctggtacgtgagaaagcagagagaggtggcccagcagttcacccacgccggccagggcggcctgatcgaggagcccaccggcgacgagctgcccaccaagaagggcagaagaaacagattcaagtggggccccgccagccagcagatcctgttccaggcctacgagagacagaagaaccccagcaaggaggagagagagaccctggtggaggagtgcaacagagccgagtgcatccagagaggcgtgagccccagccaggcccagggcctgggcagcaacctggtgaccgaggtgagagtgtacaactggttcgccaacagaagaaaggaggaggccttcagacacaagctggccatggacacctacagcggccccccccccggccccggccccggccccgccctgcccgcccacagcagccccggcctgcccccccccgccctgagccccagcaaggtgcacggcgtgagatacggccagcccgccaccagcgagaccgccgaggtgcccagcagcagcggcggccccctggtgaccgtgagcacccccctgcaccaggtgagccccaccggcctggagcccagccacagcctgctgagcaccgaggccaagctggtgagcgccgccggcggccccctgccccccgtgagcaccctgaccgccctgcacagcctggagcagaccagccccggcctgaaccagcagccccagaacctgatcatggccagcctgcccggcgtgatgaccatcggccccggcgagcccgccagcctgggccccaccttcaccaacaccggcgccagcaccctggtgatcggcctggccagcacccaggcccagagcgtgcccgtgatcaacagcatgggcagcagcctgaccaccctgcagcccgtgcagttcagccagcccctgcaccccagctaccagcagcccctgatgccccccgtgcagagccacgtgacccagagccccttcatggccaccatggcccagctgcagagcccccacggcgagagacccgtgccccacaccgccggcgacgacgacagaggctggctgagcatggacgccggcgagagaggcgcctggcaggccctgcagagcgcctgcgtgagcggcaccagcgtgttcccctacagcagcaacggccagagccacctgctgcccagcaaccacagcgtgatcgagaccttcatcagcacccagatggccagcagcagccagtag

SEQ ID NO: 84649 - DNA, 1566 bp, synthetic construct
  misc_feature 1..1566: note = Description of Artificial Sequence: Synthetic coding sequence
  source 1..1566: mol_type = other DNA
atggtgagcaagctgagccagctgcagaccgagctgctggccgccctgctggagagcggcctgagcaaggaggccctgatccaggccctgggcgagcccggcccctacctgctggccggcgagggccccctggacaagggcgagagctgcggcggcggcagaggcgagctggccgagctgcccaacggcctgggcgagaccagaggcagcgaggacgagaccgacgacgacggcgaggacttcaccccccccatcctgaaggagctggagaacctgagccccgaggaggccgcccaccagaaggccgtggtggagaccctgctgcaggaggacccctggagagtggccaagatggtgaagagctacctgcagcagcacaacatcccccagagagaggtggtggacaccaccggcctgaaccagagccacctgagccagcacctgaacaagggcacccccatgaagacccagaagagagccgccctgtacacctggtacgtgagaaagcagagagaggtggcccagcagttcacccacgccggccagggcggcctgatcgaggagcccaccggcgacgagctgcccaccaagaagggcagaagaaacagattcaagtggggccccgccagccagcagatcctgttccaggcctacgagagacagaagaaccccagcaaggaggagagagagaccctggtggaggagtgcaacagagccgagtgcatccagagaggcgtgagccccagccaggcccagggcctgggcagcaacctggtgaccgaggtgagagtgtacaactggttcgccaacagaagaaaggaggaggccttcagacacaagctggccatggacacctacagcggccccccccccggccccggccccggccccgccctgcccgcccacagcagccccggcctgcccccccccgccctgagccccagcaaggtgcacggcgtgagatacggccagcccgccaccagcgagaccgccgaggtgcccagcagcagcggcggccccctggtgaccgtgagcacccccctgcaccaggtgagccccaccggcctggagcccagccacagcctgctgagcaccgaggccaagctggtgagcgccgccggcggccccctgccccccgtgagcaccctgaccgccctgcacagcctggagcagaccagccccggcctgaaccagcagccccagaacctgatcatggccagcctgcccggcgtgatgaccatcggccccggcgagcccgccagcctgggccccaccttcaccaacaccggcgccagcaccctggtgatcggcaagctggtgggcatgggcggccacctgggcggcagactgatgggccagccccagaaccccggcgccggcagagccaccggcacccacagcttcatccaccagcacgtgttcatccagtgcctgctgtggaccagccactgcgccaccagcgtgatccccggcgacagcagcaacggccagagccacctgctgcccagcaaccacagcgtgatcgagaccttcatcagcacccagatggccagcagcagccagtag

SEQ ID NO: 84650 - DNA, 1572 bp, synthetic construct
  misc_feature 1..1572: note = Description of Artificial Sequence: Synthetic coding sequence
  source 1..1572: mol_type = other DNA
atggtgagcaagctgagccagctgcagaccgagctgctggccgccctgctggagagcggcctgagcaaggaggccctgatccaggccctgggcgagcccggcccctacctgctggccggcgagggccccctggacaagggcgagagctgcggcggcggcagaggcgagctggccgagctgcccaacggcctgggcgagaccagaggcagcgaggacgagaccgacgacgacggcgaggacttcaccccccccatcctgaaggagctggagaacctgagccccgaggaggccgcccaccagaaggccgtggtggagaccctgctgcaggaggacccctggagagtggccaagatggtgaagagctacctgcagcagcacaacatcccccagagagaggtggtggacaccaccggcctgaaccagagccacctgagccagcacctgaacaagggcacccccatgaagacccagaagagagccgccctgtacacctggtacgtgagaaagcagagagaggtggcccagcagttcacccacgccggccagggcggcctgatcgaggagcccaccggcgacgagctgcccaccaagaagggcagaagaaacagattcaagtggggccccgccagccagcagatcctgttccaggcctacgagagacagaagaaccccagcaaggaggagagagagaccctggtggaggagtgcaacagagccgagtgcatccagagaggcgtgagccccagccaggcccagggcctgggcagcaacctggtgaccgaggtgagcgccgccggcggccccctgccccccgtgagcaccctgaccgccctgcacagcctggagcagaccagccccggcctgaaccagcagccccagaacctgatcatggccagcctgcccggcgtgatgaccatcggccccggcgagcccgccagcctgggccccaccttcaccaacaccggcgccagcaccctggtgatcggcctggccagcacccaggcccagagcgtgcccgtgatcaacagcatgggcagcagcctgaccaccctgcagcccgtgcagttcagccagcccctgcaccccagctaccagcagcccctgatgccccccgtgcagagccacgtgacccagagccccttcatggccaccatggcccagctgcagagcccccacgccctgtacagccacaagcccgaggtggcccagtacacccacaccggcctgctgccccagaccatgctgatcaccgacaccaccaacctgagcgccctggccagcctgacccccaccaagcaggtgttcaccagcgacaccgaggccagcagcgagagcggcctgcacacccccgccagccaggccaccaccctgcacgtgcccagccaggaccccgccagcatccagcacctgcagcccgcccacagactgagcgccagccccaccgtgagcagcagcagcctggtgctgtaccagagcagcgacagcagcaacggccagagccacctgctgcccagcaaccacagcgtgatcgagaccttcatcagcacccagatggccagcagcagccagtag

SEQ ID NO: 84651 - DNA, 1812 bp, synthetic construct
  misc_feature 1..1812: note = Description of Artificial Sequence: Synthetic coding sequence
  source 1..1812: mol_type = other DNA
atggtgagcaagctgagccagctgcagaccgagctgctggccgccctgctggagagcggcctgagcaaggaggccctgatccaggccctgggcgagcccggcccctacctgctggccggcgagggccccctggacaagggcgagagctgcggcggcggcagaggcgagctggccgagctgcccaacggcctgggcgagaccagaggcagcgaggacgagaccgacgacgacggcgaggacttcaccccccccatcctgaaggagctggagaacctgagccccgaggaggccgcccaccagaaggccgtggtggagaccctgctgcaggaggacccctggagagtggccaagatggtgaagagctacctgcagcagcacaacatcccccagagagaggtggtggacaccaccggcctgaaccagagccacctgagccagcacctgaacaagggcacccccatgaagacccagaagagagccgccctgtacacctggtacgtgagaaagcagagagaggtggcccagcagttcacccacgccggccagggcggcctgatcgaggagcccaccggcgacgagctgcccaccaagaagggcagaagaaacagattcaagtggggccccgccagccagcagatcctgttccaggcctacgagagacagaagaaccccagcaaggaggagagagagaccctggtggaggagtgcaacagagccgagtgcatccagagaggcgtgagccccagccaggcccagggcctgggcagcaacctggtgaccgaggtgagagtgtacaactggttcgccaacagaagaaaggaggaggccttcagacacaagctggccatggacacctacagcggccccccccccggccccggccccggccccgccctgcccgcccacagcagccccggcctgcccccccccgccctgagccccagcaaggtgcacggcgtgagatacggccagcccgccaccagcgagaccgccgaggtgcccagcagcagcggcggccccctggtgaccgtgagcacccccctgcaccaggtgagccccaccggcctggagcccagccacagcctgctgagcaccgaggccaagctggtgagcgccgccggcggccccctgccccccgtgagcaccctgaccgccctgcacagcctggagcagaccagccccggcctgaaccagcagccccagaacctgatcatggccagcctgcccggcgtgatgaccatcggccccggcgagcccgccagcctgggccccaccttcaccaacaccggcgccagcaccctggtgatcggcctggccagcacccaggcccagagcgtgcccgtgatcaacagcatgggcagcagcctgaccaccctgcagcccgtgcagttcagccagcccctgcaccccagctaccagcagcccctgatgccccccgtgcagagccacgtgacccagagccccttcatggccaccatggcccagctgcagagcccccacgccctgtacagccacaagcccgaggtggcccagtacacccacaccggcctgctgccccagaccatgctgatcaccgacaccaccaacctgagcgccctggccagcctgacccccaccaagcaggtgttcaccagcgacaccgaggccagcagcgagagcggcctgcacacccccgccagccaggccaccaccctgcacgtgcccagccaggaccccgccagcatccagcacctgcagcccgcccacagactgagcgccagccccaccgtgagcagcagcagcctggtgctgtaccagagcctgggcctgtag

SEQ ID NO: 84652 - DNA, 837 bp, synthetic construct
  misc_feature 1..837: note = Description of Artificial Sequence: Synthetic coding sequence
  source 1..837: mol_type = other DNA
atggtgagcaagctgagccagctgcagaccgagctgctggccgccctgctggagagcggcctgagcaaggaggccctgatccaggccctgggcgagcccggcccctacctgctggccggcgagggccccctggacaagggcgagagctgcggcggcggcagaggcgagctggccgagctgcccaacggcctgggcgagaccagaggcagcgaggacgagaccgacgacgacggcgaggacttcaccccccccatcctgaaggagctggagaacctgagccccgaggaggccgcccaccagaaggccgtggtggagaccctgctgcaggaggacccctggagagtggccaagatggtgaagagctacctgcagcagcacaacatcccccagagagaggtggtggacaccaccggcctgaaccagagccacctgagccagcacctgaacaagggcacccccatgaagacccagaagagagccgccctgtacacctggtacgtgagaaagcagagagaggtggcccagagaagaaacgccagcagagagggctgcccccaccacagacacagaggctgggcccccaccagcagcagaagatgcgtgagcaccaccggcctgcccaccggcgccaagaagaagcccagcggcaccagctggccctggaccagaaccgccggccccccccagggccaggccagagacctgagatgccccctgaccgcccccctggcctgcctgcacctgcccagcccccccgtgagaagcaccgtgtgcgccatggacagcctgagacccgtgagactgcagaagtacccccaggccgccgccgtgccctag

SEQ ID NO: 84653 - DNA, 360 bp, synthetic construct
  misc_feature 1..360: note = Description of Artificial Sequence: Synthetic coding sequence
  source 1..360: mol_type = other DNA
atggtgagcaagctgagccagctgcagaccgagctgctggccgccctgctggagagcggcctgagcaaggaggccctgatccaggccctgggcgagcccggcccctacctgctggccggcgagggccccctggacaagggcgagagctgcggcggcggcagaggcgagctggccgagctgcccaacggcctgggcgagaccagaggcagcgaggacgagaccgacgacgacggcgaggacttcaccccccccatcctgaaggagctggagaacctgagccccgaggaggccgcccaccagaaggccgtggtggagaccctgctgcaggtgcacccctgcagagccggcagagccgactag

SEQ ID NO: 84654 - DNA, 1989 bp, synthetic construct
  misc_feature 1..1989: note = Description of Artificial Sequence: Synthetic coding sequence
  source 1..1989: mol_type = other DNA
atggtgagcaagctgagccagctgcagaccgagctgctggccgccctgctggagagcggcctgagcaaggaggccctgatccaggccctgggcgagcccggcccctacctgctggccggcgagggccccctggacaagggcgagagctgcggcggcggcagaggcgagctggccgagctgcccaacggcctgggcgagaccagaggcagcgaggacgagaccgacgacgacggcgaggacttcaccccccccatcctgaaggagctggagaacctgagccccgaggaggccgcccaccagaaggccgtggtggagaccctgctgcaggaggacccctggagagtggccaagatggtgaagagctacctgcagcagcacaacatcccccagagagaggtggtggacaccaccggcctgaaccagagccacctgagccagcacctgaacaagggcacccccatgaagacccagaagagagccgccctgtacacctggtacgtgagaaagcagagagaggtggcccagcagttcacccacgccggccagggcggcctgatcgaggagcccaccggcgacgagctgcccaccaagaagggcagaagaaacagattcaagtggggccccgccagccagcagatcctgttccaggcctacgagagacagaagaaccccagcaaggaggagagagagaccctggtggaggagtgcaacagagccgagtgcatccagagaggcgtgagccccagccaggcccagggcctgggcagcaacctggtgaccgaggtgagagtgtacaactggttcgccaacagaagaaaggaggaggccttcagacacaagctggccatggacacctacagcggccccccccccggccccggccccggccccgccctgcccgcccacagcagccccggcctgcccccccccgccctgagccccagcaaggtgcacggcgtgagatacggccagcccgccaccagcgagaccgccgaggtgcccagcagcagcggcggccccctggtgaccgtgagcacccccctgcaccaggtgagccccaccggcctggagcccagccacagcctgctgagcaccgaggccaagctggtgagcgccgccggcggccccctgccccccgtgagcaccctgaccgccctgcacagcctggagcagaccagccccggcctgaaccagcagccccagaacctgatcatggccagcctgcccggcgtgatgaccatcggccccggcgagcccgccagcctgggccccaccttcaccaacaccggcgccagcaccctggtgatcggcctggccagcacccaggcccagagcgtgcccgtgatcaacagcatgggcagcagcctgaccaccctgcagcccgtgcagttcagccagcccctgcaccccagctaccagcagcccctgatgccccccgtgcagagccacgtgacccagagccccttcatggccaccatggcccagctgcagagcccccacgccctgtacagccacaagcccgaggtggcccagtacacccacaccggcctgctgccccagaccatgctgatcaccgacaccaccaacctgagcgccctggccagcctgacccccaccaagcaggtgagaagcagacccgccggcccccccctggcctgcgacagagccccccacccccacatccccagagcccaggaggccgccctgctgccccaggtgttcaccagcgacaccgaggccagcagcgagagcggcctgcacacccccgccagccaggccaccaccctgcacgtgcccagccaggaccccgccagcatccagcacctgcagcccgcccacagactgagcgccagccccaccgtgagcagcagcagcctggtgctgtaccagagcagcgacagcagcaacggccagagccacctgctgcccagcaaccacagcgtgatcgagaccttcatcagcacccagatggccagcagcagccagtag

SEQ ID NO: 84655 - DNA, 744 bp, synthetic construct
  misc_feature 1..744: note = Description of Artificial Sequence: Synthetic coding sequence
  source 1..744: mol_type = other DNA
atggtgagcaagctgagccagctgcagaccgagctgctggccgccctgctggagagcggcctgagcaaggaggccctgatccaggccctgggcgagcccggcccctacctgctggccggcgagggccccctggacaagggcgagagctgcggcggcggcagaggcgagctggccgagctgcccaacggcctgggcgagaccagaggcagcgaggacgagaccgacgacgacggcgaggacttcaccccccccatcctgaaggagctggagaacctgagccccgaggaggccgcccaccagaaggccgtggtggagaccctgctgcaggaggacccctggagagtggccaagatggtgaagagctacctgcagcagcacaacatcccccagagagaggtggtggacaccaccggcctgaaccagagccacctgagccagcacctgaacaagggcacccccatgaagacccagaagagagccgccctgtacacctggtacgtgagaaagcagagagaggtggcccagcagttcacccacgccggccagggcggcctgatcgaggagcccaccggcgacgagctgcccaccaagaagggcagaagaaacagattcaagtggggccccgccagccagcagatcctgttccaggcctacgagagacagaagaaccccagcaaggaggagagagagaccctggtggaggagtgcaacagatgcgccctgtggaccgcctgcgaccagtag

SEQ ID NO: 84656 - DNA, 1359 bp, synthetic construct
  misc_feature 1..1359: note = Description of Artificial Sequence: Synthetic coding sequence
  source 1..1359: mol_type = other DNA
atggtgagcaagctgagccagctgcagaccgagctgctggccgccctgctggagagcggcctgagcaaggaggccctgatccaggccctgggcgagcccggcccctacctgctggccggcgagggccccctggacaagggcgagagctgcggcggcggcagaggcgagctggccgagctgcccaacggcctgggcgagaccagaggcagcgaggacgagaccgacgacgacggcgaggacttcaccccccccatcctgaaggagctggagaacctgagccccgaggaggccgcccaccagaaggccgtggtggagaccctgctgcaggaggacccctggagagtggccaagatggtgaagagctacctgcagcagcacaacatcccccagagagaggtggtggacaccaccggcctgaaccagagccacctgagccagcacctgaacaagggcacccccatgaagacccagaagagagccgccctgtacacctggtacgtgagaaagcagagagaggtggcccagcagttcacccacgccggccagggcggcctgatcgaggagcccaccggcgacgagctgcccaccaagaagggcagaagaaacagattcaagtggggccccgccagccagcagaccagccccggcctgaaccagcagccccagaacctgatcatggccagcctgcccggcgtgatgaccatcggccccggcgagcccgccagcctgggccccaccttcaccaacaccggcgccagcaccctggtgatcggcctggccagcacccaggcccagagcgtgcccgtgatcaacagcatgggcagcagcctgaccaccctgcagcccgtgcagttcagccagcccctgcaccccagctaccagcagcccctgatgccccccgtgcagagccacgtgacccagagccccttcatggccaccatggcccagctgcagagcccccacgccctgtacagccacaagcccgaggtggcccagtacacccacaccggcctgctgccccagaccatgctgatcaccgacaccaccaacctgagcgccctggccagcctgacccccaccaagcaggtgttcaccagcgacaccgaggccagcagcgagagcggcctgcacacccccgccagccaggccaccaccctgcacgtgcccagccaggaccccgccagcatccagcacctgcagcccgcccacagactgagcgccagccccaccgtgagcagcagcagcctggtgctgtaccagagcagcgacagcagcaacggccagagccacctgctgcccagcaaccacagcgtgatcgagaccttcatcagcacccagatggccagcagcagccagtag

SEQ ID NO: 84657 - DNA, 1212 bp, synthetic construct
  misc_feature 1..1212: note = Description of Artificial Sequence: Synthetic coding sequence
  source 1..1212: mol_type = other DNA
atggtgaagagctacctgcagcagcacaacatcccccagagagaggtggtggacaccaccggcctgaaccagagccacctgagccagcacctgaacaagggcacccccatgaagacccagaagagagccgccctgtacacctggtacgtgagaaagcagagagaggtggcccagcagttcacccacgccggccagggcggcctgatcgaggagcccaccggcgacgagctgcccaccaagaagggcagaagaaacagattcaagtggggccccgccagccagcagatcctgttccaggcctacgagagacagaagaaccccagcaaggaggagagagagaccctggtggaggagtgcaacagagccgagtgcatccagagaggcgtgagccccagccaggcccagggcctgggcagcaacctggtgaccgaggtgagagtgtacaactggttcgccaacagaagaaaggaggaggccttcagacacaagctggccatggacacctacagcggccccccccccggccccggccccggccccgccctgcccgcccacagcagccccggcctgcccccccccgccctgagccccagcaaggtgcacggcgtgagatacggccagcccgccaccagcgagaccgccgaggtgcccagcagcagcggcggccccctggtgaccgtgagcacccccctgcaccaggtgagccccaccggcctggagcccagccacagcctgctgagcaccgaggccaagctggtgagcgccgccggcggccccctgccccccgtgagcaccctgaccgccctgcacagcctggagcagaccagccccggcctgaaccagcagccccagaacctgatcatggccagcctgcccggcgtgatgaccatcggccccggcgagcccgccagcctgggccccaccttcaccaacaccggcgccagcaccctggtgatcggcaagctggtgggcatgggcggccacctgggcggcagactgatgggccagccccagaaccccggcgccggcagagccaccggcacccacagcttcatccacaccacctgcatctaccccgtgcccaccctggaccagagcctgtgctacatcagcgacacctgggtgaaccagaccgaccagaacctgagcaacagcagcagagaggccggcaccaagcacaacaccagcatcctgtggtacctgagaagatag

SEQ ID NO: 84658 - DNA, 1185 bp, synthetic construct
  misc_feature 1..1185: note = Description of Artificial Sequence: Synthetic coding sequence
  source 1..1185: mol_type = other DNA
atggtgagcaagctgagccagctgcagaccgagctgctggccgccctgctggagagcggcctgagcaaggaggccctgatccaggccctgggcgagcccggcccctacctgctggccggcgagggccccctggacaagggcgagagctgcggcggcggcagaggcgagctggccgagctgcccaacggcctgggcgagaccagaggcagcgaggacgagaccgacgacgacggcgaggacttcaccccccccatcctgaaggagctggagaacctgagccccgaggaggccgcccaccagaaggccgtggtggagaccctgctgcaggaggacccctggagagtggccaagatggtgaagagctacctgcagcagcacaacatcccccagagagaggtggtggacaccaccggcctgaaccagagccacctgagccagcacctgaacaagggcacccccatgaagacccagaagagagccgccctgtacacctggtacgtgagaaagcagagagaggtggcccagcagttcacccacgccggccagggcggcctgatcgaggagcccaccggcgacgagctgcccaccaagaagggcagaagaaacagattcaagtggggccccgccagccagcagatcctgttccaggcctacgagagacagaagaaccccagcaaggaggagagagagaccctggtggaggagtgcaacagagccgagtgcatccagagaggcgtgagccccagccaggcccagggcctgggcagcaacctggtgaccgaggtgagagtgtacaactggttcgccaacagaagaaaggaggaggccttcagacacaagctggccatggacacctacagcggccccccccccggccccggccccggccccgccctgcccgcccacagcagccccggcctgcccccccccgccctgagccccagcaaggtgcacggcgtgagatacggccagcccgccaccagcgagaccgccgaggtgcccagcagcagcggcggccccctggtgaccgtgagcacccccctgcaccaggtgagccccaccggcctggagcccagccacagcctgctgagcaccgaggccaagctggtgagcgccgccggcggccccctgccccccgccgcctgcagccagcccggcagagtggccagactgttcaacttctag

SEQ ID NO: 84659 - DNA, 1917 bp, synthetic construct
  misc_feature 1..1917: note = Description of Artificial Sequence: Synthetic coding sequence
  source 1..1917: mol_type = other DNA
atggtgagcaagctgagccagctgcagaccgagctgctggccgccctgctggagagcggcctgagcaaggaggccctgatccaggccctgggcgagcccggcccctacctgctggccggcgagggccccctggacaagggcgagagctgcggcggcggcagaggcgagctggccgagctgcccaacggcctgggcgagaccagaggcagcgaggacgagaccgacgacgacggcgaggacttcaccccccccatcctgaaggagctggagaacctgagccccgaggaggccgcccaccagaaggccgtggtggagaccctgctgcaggaggacccctggagagtggccaagatggtgaagagctacctgcagcagcacaacatcccccagagagaggtggtggacaccaccggcctgaaccagagccacctgagccagcacctgaacaagggcacccccatgaagacccagaagagagccgccctgtacacctggtacgtgagaaagcagagagaggtggcccagcagttcacccacgccggccagggcggcctgatcgaggagcccaccggcgacgagctgcccaccaagaagggcagaagaaacagattcaagtggggccccgccagccagcagatcctgttccaggcctacgagagacagaagaaccccagcaaggaggagagagagaccctggtggaggagtgcaacagagccgagtgcatccagagaggcgtgagccccagccaggcccagggcctgggcagcaacctggtgaccgaggtgagagtgtacaactggttcgccaacagaagaaaggaggaggccttcagacacaagctggccatggacacctacagcggccccccccccggccccggccccggccccgccctgcccgcccacagcagccccggcctgcccccccccgccctgagccccagcaaggtgcacggcgtgagatacggccagcccgccaccagcgagaccgccgaggtgcccagcagcagcggcggccccctggtgaccgtgagcacccccctgcaccaggtgagccccaccggcctggagcccagccacagcctgctgagcaccgaggccaagctggtgagcgccgccggcggccccctgccccccgtgagcaccctgaccgccctgcacagcctggagcagaccagccccggcctgaaccagcagccccagaacctgatcatggccagcctgcccggcgtgatgaccatcggccccggcgagcccgccagcctgggccccaccttcaccaacaccggcgccagcaccctggtgatcggcctggccagcacccaggcccagagcgtgcccgtgatcaacagcatgggcagcagcctgaccaccctgcagcccgtgcagttcagccagcccctgcaccccagctaccagcagcccctgatgccccccgtgcagagccacgtgacccagagccccttcatggccaccatggcccagctgcagagcccccacgccctgtacagccacaagcccgaggtggcccagtacacccacaccggcctgctgccccagaccatgctgatcaccgacaccaccaacctgagcgccctggccagcctgacccccaccaagcaggaggccgccctgctgccccaggtgttcaccagcgacaccgaggccagcagcgagagcggcctgcacacccccgccagccaggccaccaccctgcacgtgcccagccaggaccccgccagcatccagcacctgcagcccgcccacagactgagcgccagccccaccgtgagcagcagcagcctggtgctgtaccagagcagcgacagcagcaacggccagagccacctgctgcccagcaaccacagcgtgatcgagaccttcatcagcacccagatggccagcagcagccagtag

SEQ ID NO: 84660 - DNA, 1416 bp, synthetic construct
  misc_feature 1..1416: note = Description of Artificial Sequence: Synthetic coding sequence
  source 1..1416: mol_type = other DNA
atggtgagcaagctgagccagctgcagaccgagctgctggccgccctgctggagagcggcctgagcaaggaggccctgatccaggccctgggcgagcccggcccctacctgctggccggcgagggccccctggacaagggcgagagctgcggcggcggcagaggcgagctggccgagctgcccaacggcctgggcgagaccagaggcagcgaggacgagaccgacgacgacggcgaggacttcaccccccccatcctgaaggagctggagaacctgagccccgaggaggccgcccaccagaaggccgtggtggagaccctgctgcaggaggacccctggagagtggccaagatggtgaagagctacctgcagcagcacaacatcccccagagagaggtggtggacaccaccggcctgaaccagagccacctgagccagcacctgaacaagggcacccccatgaagacccagaagagagccgccctgtacacctggtacgtgagaaagcagagagaggtggcccagcagttcacccacgccggccagggcggcctgatcgaggagcccaccggcgacgagctgcccaccaagaagggcagaagaaacagattcaagtggggccccgccagccagcagatcctgttccaggcctacgagagacagaagaaccccagcaaggaggagagagagaccctggtggaggagtgcaacagagccgagtgcatccagagaggcgtgagccccagccaggcccagggcctgggcagcaacctggtgaccgaggtgagagtgtacaactggttcgccaacagaagaaaggaggaggccttcagacacaagctggccatggacacctacagcggccccccccccggccccggccccggccccgccctgcccgcccacagcagccccggcctgcccccccccgccctgagccccagcaaggtgcacggcgtgagatacggccagcccgccaccagcgagaccgccgaggtgcccagcagcagcggcggccccctggtgaccgtgagcacccccctgcaccaggtgagccccaccggcctggagcccagccacagcctgctgagcaccgaggccaagctggtgagcgccgccggcggccccctgccccccgtgagcaccctgaccgccctgcacagcctggagcagaccagccccggcctgaaccagcagccccagaacctgatcatggccagcctgcccggcgtgatgaccatcggccccggcgagcccgccagcctgggccccaccttcaccaacaccggcgccagcaccctggtgatcggcctggccagcacccaggcccagagcgtgcccgtgatcaacagcatgggcagcagcctgaccaccctgcagcccgtgcagttcagccagcagggccccagcagctag

SEQ ID NO: 84661 - DNA, 1359 bp, synthetic construct
  misc_feature 1..1359: note = Description of Artificial Sequence: Synthetic coding sequence
  source 1..1359: mol_type = other DNA
atggtgagcaagctgagccagctgcagaccgagctgctggccgccctgctggagagcggcctgagcaaggaggccctgatccaggccctgggcgagcccggcccctacctgctggccggcgagggccccctggacaagggcgagagctgcggcggcggcagaggcgagctggccgagctgcccaacggcctgggcgagaccagaggcagcgaggacgagaccgacgacgacggcgaggacttcaccccccccatcctgaaggagctggagaacctgagccccgaggaggccgcccaccagaaggccgtggtggagaccctgctgcaggaggacccctggagagtggccaagatggtgaagagctacctgcagcagcacaacatcccccagagagaggtggtggacaccaccggcctgaaccagagccacctgagccagcacctgaacaagggcacccccatgaagacccagaagagagccgccctgtacacctggtacgtgagaaagcagagagaggtggcccagcagttcacccacgccggccagggcggcctgatcgaggagcccaccggcgacgagctgcccaccaagaagggcagaagaaacagattcaagtggggccccgccagccagcagatcctgttccaggcctacgagagacagaagaaccccagcaaggaggagagagagaccctggtggaggagtgcaacagagccgagtgcatccagagaggcgtgagccccagccaggcccagggcctgggcagcaacctggtgaccgaggtgagagtgtacaactggttcgccaacagaagaaaggaggaggccttcagacacaagctggccatggacacctacagcggccccccccccggccccggccccggccccgccctgcccgcccacagcagccccggcctgcccccccccgccctgagccccagcaaggtgcacggcgtgagatacggccagcccgccaccagcgagaccgccgaggtgcccagcagcagcggcggccccctggtgaccgtgagcacccccctgcaccaggtgagccccaccggcctggagcccagccacagcctgctgagcaccgaggccaagctggtgagcgccgccggcggccccctgccccccgtgagcaccctgaccgccctgcacagcctggagcagaccagccccggcctgaaccagcagccccagaacctgatcatggccagcctgcccggcgtgatgaccatcggccccggcgagcccgccagcctgggccccaccttcaccaacaccggcgccagcaccctgcccctgttcggcgccggcgtggccgagctgaccagacagcagggccccagcagctag

SEQ ID NO: 84662 - DNA, 1071 bp, synthetic construct
  misc_feature 1..1071: note = Description of Artificial Sequence: Synthetic coding sequence
  source 1..1071: mol_type = other DNA
tgatggctggtgggcttctggggcggcagcggctgcaaggagttcggcctgtgcctgcccgccggcagacagacccagcccaccagatggggcagaagactggcctggtggaccagagccgcctggccctgcggcagcagagccatggtgagcaagctgagccagctgcagaccgagctgctggccgccctgctggagagcggcctgagcaaggaggccctgatccaggccctgggcgagcccggcccctacctgctggccggcgagggccccctggacaagggcgagagctgcggcggcggcagaggcgagctggccgagctgcccaacggcctgggcgagaccagaggcagcgaggacgagaccgacgacgacggcgaggacttcaccccccccatcctgaaggagctggagaacctgagccccgaggaggccgcccaccagaaggccgtggtggagaccctgctgcaggaggacccctggagagtggccaagatggtgaagagctacctgcagcagcacaacatcccccagagagaggtggtggacaccaccggcctgaaccagagccacctgagccagcacctgaacaagggcacccccatgaagacccagaagagagccgccctgtacacctggtacgtgagaaagcagagagaggtggcccagcagttcacccacgccggccagggcggcctgatcgaggagcccaccggcgacgagctgcccaccaagaagggcagaagaaacagattcaagtggggccccgccagccagcagatcctgttccaggcctacgagagacagaagaaccccagcaaggaggagagagagaccctggtggaggagtgcaacagagccgagtgcatccagagaggcgtgagccccagccagccccagcccgccgagtacagaagccaggccggcctgagcagctggggccccccccccccctgccagcaccccgacagcaccgcccagctgggcgccgacatccccagaccccagcccgccgcccccgagccccaccacggcctgaccagctggggccacgaccacagagcctggtag

SEQ ID NO: 84663 - DNA, 2247 bp, synthetic construct
  misc_feature 1..2247: note = Description of Artificial Sequence: Synthetic coding sequence
  source 1..2247: mol_type = other DNA
atgctgggcaccctgagagccatggagggcgaggacgtggaggacgaccagctgctgcagaagctgagagccagcagaagaagattccagagaagaatgcagagactgatcgagaagtacaaccagcccttcgaggacacccccgtggtgcagatggccaccctgacctacgagaccccccagggcctgagaatctggggcggcagactgatcaaggagagaaacgagggcgagatccaggacagcagcatgaagcccgccgacagaaccgacggcagcgtgcaggccgccgcctggggccccgagctgcccagccacagaaccgtgctgggcgccgacagcaagagcggcgaggtggacgccaccagcgaccaggaggagagcgtggcctgggccctggcccccgccgtgccccagagccccctgaagaacgagctgagaagaaagtacctgacccaggtggacatcctgctgcagggcgccgagtacttcgagtgcgccggcaacagagccggcagagacgtgagagtgacccccctgcccagcctggccagccccgccgtgcccgcccccggctactgcagcagaatcagcagaaagagccccggcgaccccgccaagcccgccagcagccccagagagtgggaccccctgcaccccagcagcaccgacatggccctggtgcccagaaacgacagcctgagcctgcaggagaccagcagcagcagcttcctgagcagccagcccttcgaggacgacgacatctgcaacgtgaccatcagcgacctgtacgccggcatgctgcacagcatgagcagactgctgagcaccaagcccagcagcatcatcagcaccaagaccttcatcatgcagaactggaacagcagaagaagacacagatacaagagcagaatgaacaagacctactgcaagggcgccagaagaagccagagaagcagcaaggagaacttcatcccctgcagcgagcccgtgaagggcaccggcgccctgagagactgcaagaacgtgctggacgtgagctgcagaaagaccggcctgaagctggagaaggccttcctggaggtgaacagaccccagatccacaagctggaccccagctggaaggagagaaaggtgacccccagcaagtacagcagcctgatctacttcgacagcagcgccacctacaacctggacgaggagaacagattcagaaccctgaagtggctgatcagccccgtgaagatcgtgagcagacccaccatcagacagggccacggcgagaacagacagagagagatcgagatcagattcgaccagctgcacagagagtactgcctgagccccagaaaccagcccagaagaatgtgcctgcccgacagctgggccatgaacatgtacagaggcggccccgccagccccggcggcctgcagggcctggagaccagaagactgagcctgcccagcagcaaggccaaggccaagagcctgagcgaggccttcgagaacctgggcaagagaagcctggaggccggcagatgcctgcccaagagcgacagcagcagcagcctgcccaagaccaaccccacccacagcgccaccagaccccagcagaccagcgacctgcacgtgcagggcaacagcagcggcatcttcagaaagagcgtgagccccagcaagaccctgagcgtgcccgacaaggaggtgcccggccacggcagaaacagatacgacgagatcaaggaggagttcgacaagctgcaccagaagtactgcctgaagagccccggccagatgaccgtgcccctgtgcatcggcgtgagcaccgacaaggccagcatggaggtgagataccagaccgagggcttcctgggcaagctgaaccccgacccccacttccagggcttccagaagctgcccagcagccccctgggctgcagaaagagcctgctgggcagcaccgccatcgaggcccccagcagcacctgcgtggccagagccatcaccagagacggcaccagagaccaccagttccccgccaagagacccagactgagcgagccccagggcagcggcagacagggcaacagcctgggcgccagcgacggcgtggacaacaccgtgagacccggcgaccagggcagcagcagccagcccaacagcgaggagagaggcgagaacaccagctacagaatggaggagaagagcgacttcatgctggagaagctggagaccaagagcgtgtag

SEQ ID NO: 84664 - DNA, 2085 bp, synthetic construct
  misc_feature 1..2085: note = Description of Artificial Sequence: Synthetic coding sequence
  source 1..2085: mol_type = other DNA
atgctgggcaccctgagagccatggagggcgaggacgtggaggacgaccagctgctgcagaagctgagagccagcagaagaagattccagagaagaatgcagagactgatcgagaagtacaaccagcccttcgaggacacccccgtggtgcagatggccaccctgacctacgagaccccccagggcctgagaatctggggcggcagactgatcaaggagagaaacgagggcgagatccagcccgccgtgccccagagccccctgaagaacgagctgagaagaaagtacctgacccaggtggacatcctgctgcagggcgccgagtacttcgagtgcgccggcaacagagccggcagagacgtgagagtgacccccctgcccagcctggccagccccgccgtgcccgcccccggctactgcagcagaatcagcagaaagagccccggcgaccccgccaagcccgccagcagccccagagagtgggaccccctgcaccccagcagcaccgacatggccctggtgcccagaaacgacagcctgagcctgcaggagaccagcagcagcagcttcctgagcagccagcccttcgaggacgacgacatctgcaacgtgaccatcagcgacctgtacgccggcatgctgcacagcatgagcagactgctgagcaccaagcccagcagcatcatcagcaccaagaccttcatcatgcagaactggaacagcagaagaagacacagatacaagagcagaatgaacaagacctactgcaagggcgccagaagaagccagagaagcagcaaggagaacttcatcccctgcagcgagcccgtgaagggcaccggcgccctgagagactgcaagaacgtgctggacgtgagctgcagaaagaccggcctgaagctggagaaggccttcctggaggtgaacagaccccagatccacaagctggaccccagctggaaggagagaaaggtgacccccagcaagtacagcagcctgatctacttcgacagcagcgccacctacaacctggacgaggagaacagattcagaaccctgaagtggctgatcagccccgtgaagatcgtgagcagacccaccatcagacagggccacggcgagaacagacagagagagatcgagatcagattcgaccagctgcacagagagtactgcctgagccccagaaaccagcccagaagaatgtgcctgcccgacagctgggccatgaacatgtacagaggcggccccgccagccccggcggcctgcagggcctggagaccagaagactgagcctgcccagcagcaaggccaaggccaagagcctgagcgaggccttcgagaacctgggcaagagaagcctggaggccggcagatgcctgcccaagagcgacagcagcagcagcctgcccaagaccaaccccacccacagcgccaccagaccccagcagaccagcgacctgcacgtgcagggcaacagcagcggcatcttcagaaagagcgtgagccccagcaagaccctgagcgtgcccgacaaggaggtgcccggccacggcagaaacagatacgacgagatcaaggaggagttcgacaagctgcaccagaagtactgcctgaagagccccggccagatgaccgtgcccctgtgcatcggcgtgagcaccgacaaggccagcatggaggtgagataccagaccgagggcttcctgggcaagctgaaccccgacccccacttccagggcttccagaagctgcccagcagccccctgggctgcagaaagagcctgctgggcagcaccgccatcgaggcccccagcagcacctgcgtggccagagccatcaccagagacggcaccagagaccaccagttccccgccaagagacccagactgagcgagccccagggcagcggcagacagggcaacagcctgggcgccagcgacggcgtggacaacaccgtgagacccggcgaccagggcagcagcagccagcccaacagcgaggagagaggcgagaacaccagctacagaatggaggagaagagcgacttcatgctggagaagctggagaccaagagcgtgtag

SEQ ID NO: 84665 - DNA, 1992 bp, synthetic construct
  misc_feature 1..1992: note = Description of Artificial Sequence: Synthetic coding sequence
  source 1..1992: mol_type = other DNA
atgctgggcaccctgagagccatggagggcgaggacgtggaggacgaccagctgctgcagaagctgagagccagcagaagaagattccagagaagaatgcagagactgatcgagaagtacaaccagcccttcgaggacacccccgtggtgcagatggccaccctgacctacgagaccccccagggcctgagaatctggggcggcagactgatcaaggagagaaacgagggcgagatccagtgcgccggcaacagagccggcagagacgtgagagtgacccccctgcccagcctggccagccccgccgtgcccgcccccggctactgcagcagaatcagcagaaagagccccggcgaccccgccaagcccgccagcagccccagagagtgggaccccctgcaccccagcagcaccgacatggccctggtgcccagaaacgacagcctgagcctgcaggagaccagcagcagcagcttcctgagcagccagcccttcgaggacgacgacatctgcaacgtgaccatcagcgacctgtacgccggcatgctgcacagcatgagcagactgctgagcaccaagcccagcagcatcatcagcaccaagaccttcatcatgcagaactggaacagcagaagaagacacagatacaagagcagaatgaacaagacctactgcaagggcgccagaagaagccagagaagcagcaaggagaacttcatcccctgcagcgagcccgtgaagggcaccggcgccctgagagactgcaagaacgtgctggacgtgagctgcagaaagaccggcctgaagctggagaaggccttcctggaggtgaacagaccccagatccacaagctggaccccagctggaaggagagaaaggtgacccccagcaagtacagcagcctgatctacttcgacagcagcgccacctacaacctggacgaggagaacagattcagaaccctgaagtggctgatcagccccgtgaagatcgtgagcagacccaccatcagacagggccacggcgagaacagacagagagagatcgagatcagattcgaccagctgcacagagagtactgcctgagccccagaaaccagcccagaagaatgtgcctgcccgacagctgggccatgaacatgtacagaggcggccccgccagccccggcggcctgcagggcctggagaccagaagactgagcctgcccagcagcaaggccaaggccaagagcctgagcgaggccttcgagaacctgggcaagagaagcctggaggccggcagatgcctgcccaagagcgacagcagcagcagcctgcccaagaccaaccccacccacagcgccaccagaccccagcagaccagcgacctgcacgtgcagggcaacagcagcggcatcttcagaaagagcgtgagccccagcaagaccctgagcgtgcccgacaaggaggtgcccggccacggcagaaacagatacgacgagatcaaggaggagttcgacaagctgcaccagaagtactgcctgaagagccccggccagatgaccgtgcccctgtgcatcggcgtgagcaccgacaaggccagcatggaggtgagataccagaccgagggcttcctgggcaagctgaaccccgacccccacttccagggcttccagaagctgcccagcagccccctgggctgcagaaagagcctgctgggcagcaccgccatcgaggcccccagcagcacctgcgtggccagagccatcaccagagacggcaccagagaccaccagttccccgccaagagacccagactgagcgagccccagggcagcggcagacagggcaacagcctgggcgccagcgacggcgtggacaacaccgtgagacccggcgaccagggcagcagcagccagcccaacagcgaggagagaggcgagaacaccagctacagaatggaggagaagagcgacttcatgctggagaagctggagaccaagagcgtgtag

SEQ ID NO: 84666 - DNA, 2181 bp, synthetic construct
  misc_feature 1..2181: note = Description of Artificial Sequence: Synthetic coding sequence
  source 1..2181: mol_type = other DNA
atggaggacagactgcacatggacaacggcctggtgccccagaagatcgtgagcgtgcacctgcaggacagcaccctgaaggaggtgaaggaccaggtgagcaacaagcaggcccagatcctggagcccaagcccgagcccagcctggagatcaagcccgagcaggacggcatggagcacgtgggcagagacgaccccaaggccctgggcgaggagcccaagcagagaagaggcagcgccagcggcagcgagcccgccggcgacagcgacagaggcggcggccccgtggagcactaccacctgcacctgagcagctgccacgagtgcctggagctggagaacagcaccatcgagagcgtgaagttcgccagcgccgagaacatccccgacctgccctacgactacagcagcagcctggagagcgtggccgacgagaccagccccgagagagagggcagaagagtgaacctgaccggcaaggcccccaacatcctgctgtacgtgggcagcgacagccaggaggccctgggcagattccacgaggtgagaagcgtgctggccgactgcgtggacatcgacagctacatcctgtaccacctgctggaggacagcgccctgagagacccctggaccgacaactgcctgctgctggtgatcgccaccagagagagcatccccgaggacctgtaccagaagttcatggcctacctgagccagggcggcaaggtgctgggcctgagcagcagcttcaccttcggcggcttccaggtgaccagcaagggcgccctgcacaagaccgtgcagaacctggtgttcagcaaggccgaccagagcgaggtgaagctgagcgtgctgagcagcggctgcagataccaggagggccccgtgagactgagccccggcagactgcagggccacctggagaacgaggacaaggacagaatgatcgtgcacgtgcccttcggcaccagaggcggcgaggccgtgctgtgccaggtgcacctggagctgccccccagcagcaacatcgtgcagacccccgaggacttcaacctgctgaagagcagcaacttcagaagatacgaggtgctgagagagatcctgaccaccctgggcctgagctgcgacatgaagcaggtgcccgccctgacccccctgtacctgctgagcgccgccgaggagatcagagaccccctgatgcagtggctgggcaagcacgtggacagcgagggcgagatcaagagcggccagctgagcctgagattcgtgagcagctacgtgagcgaggtggagatcacccccagctgcatccccgtggtgaccaacatggaggccttcagcagcgagcacttcaacctggagatctacagacagaacctgcagaccaagcagctgggcaaggtgatcctgttcgccgaggtgacccccaccaccatgagactgctggacggcctgatgttccagaccccccaggagatgggcctgatcgtgatcgccgccagacagaccgagggcaagggcagaggcggcaacgtgtggctgagccccgtgggctgcgccctgagcaccctgctgatcagcatccccctgagaagccagctgggccagagaatccccttcgtgcagcacctgatgagcgtggccgtggtggaggccgtgagaagcatccccgagtaccaggacatcaacctgagagtgaagtggcccaacgacatctactacagcgacctgatgaagatcggcggcgtgctggtgaacagcaccctgatgggcgagaccttctacatcctgatcggctgcggcttcaacgtgaccaacagcaaccccaccatctgcatcaacgacctgatcaccgagtacaacaagcagcacaaggccgagctgaagcccctgagagccgactacctgatcgccagagtggtgaccgtgctggagaagctgatcaaggagttccaggacaagggccccaacagcgtgctgcccctgtactacagatactgggtgcacagcggccagcaggtgcacctgggcagcgccgagggccccaaggtgagcatcgtgggcctggacgacagcggcttcctgcaggtgcaccaggagggcggcgaggtggtgaccgtgcaccccgacggcaacagcttcgacatgctgagaaacctgatcctgcccaagagaagatag

SEQ ID NO: 84667 - DNA, 2181 bp, synthetic construct; identical to SEQ ID NO: 84666
  misc_feature 1..2181: note = Description of Artificial Sequence: Synthetic coding sequence
  source 1..2181: mol_type = other DNA

SEQ ID NO: 84668 - DNA, 264 bp, synthetic construct
  misc_feature 1..264: note = Description of Artificial Sequence: Synthetic coding sequence
  source 1..264: mol_type = other DNA
atggaggacagactgcacatggacaacggcctggtgccccagaagatcgtgagcgtgcacctgcaggacagcaccctgaaggaggtgaaggaccaggtgagcaacaagcaggcccagatcctggagcccaagcccgagcccagcctggagatcaagcccgagcaggacggcatggagcacgtgggcagagacgaccccaaggccctgggcgaggagcccaagcagagaagaggcagcgccagcggcagcgagcccgccggctag

SEQ ID NO: 84669 - DNA, 234 bp, synthetic construct
  misc_feature 1..234: note = Description of Artificial Sequence: Synthetic coding sequence
  source 1..234: mol_type = other DNA
atggaggacagactgcacatggacaacggcctggtgccccagaagatcgtgagcgtgcacctgcaggacagcaccctgaaggaggtgaaggaccaggtgagcaacaagcaggcccagatcctggagcccaagcccgagcccagcctggagatcaagcccgagcaggacggcatggagcacgtgggcagagacgaccccaaggccctgggcgaggagcccaagcagagaagatag

SEQ ID NO: 84670 - DNA, 279 bp, synthetic construct
  misc_feature 1..279: note = Description of Artificial Sequence: Synthetic coding sequence
  source 1..279: mol_type = other DNA
atggaggacagactgcacatggacaacggcctggtgccccagaagatcgtgagcgtgcacctgcaggacagcaccctgaaggaggtgaaggaccaggtgagcaacaagcaggcccagatcctggagcccaagcccgagcccagcctggagatcaagcccgagcaggacggcatggagcacgtgggcagagacgaccccaaggccctgggcgaggagcccaagcagagaagaggcagcgccagcggcagcgagcccgccggcgacagcgacagaggctag

SEQ ID NO: 84671 - DNA, 807 bp, synthetic construct
  misc_feature 1..807: note = Description of Artificial Sequence: Synthetic coding sequence
  source 1..807: mol_type = other DNA
atgggcctgagccccagcgcccccgccgtggccgtgcaggccagcaacgccagcgccagcccccccagcggctgccccatgcacgagggcaagatgaagggctgccccgtgaacaccgagcccagcggccccacctgcgagaagaagacctacagcgtgcccgcccaccaggagagagcctacgagtacgtggagtgccccatcagaggcaccgccgccgagaacaaggagaacctggaccccagcaacctgatgcccccccccaaccagacccccgcccccgaccagcccttcgccctgagcaccgtgagagaggagagcagcatccccagagccgacagcgagaagaagtgggtgtaccccagcgagcagatgttctggaacgccatgctgaagaagggctggaagtggaaggacgaggacatcagccagaaggacatgtacaacatcatcagaatccacaaccagaacaacgagcaggcctggaaggagatcctgaagtgggaggccctgcacgccgccgagtgcccctgcggccccagcctgatcagattcggcggcaaggccaaggagtacagccccagagccagaatcagaagctggatgggctacgagctgcccttcgacagacacgactggatcatcaacagatgcggcaccgaggtgagatacgtgatcgactactacgacggcggcgaggtgaacaaggactaccagttcaccatcctggacgtgagacccgccctggacagcctgagcgccgtgtgggacagaatgaaggtggcctggtggagatggaccagctag

SEQ ID NO: 84672 - DNA, 807 bp, synthetic construct; identical to SEQ ID NO: 84671
  misc_feature 1..807: note = Description of Artificial Sequence: Synthetic coding sequence
  source 1..807: mol_type = other DNA

SEQ ID NO: 84673 - DNA, 807 bp, synthetic construct; identical to SEQ ID NO: 84671
  misc_feature 1..807: note = Description of Artificial Sequence: Synthetic coding sequence
  source 1..807: mol_type = other DNA

SEQ ID NO: 84674 - DNA, 1008 bp, synthetic construct
  misc_feature 1..1008: note = Description of Artificial Sequence: Synthetic coding sequence
  source 1..1008: mol_type = other DNA
atggacaacgccagaatgaacagcttcctggagtaccccatcctgagcagcggcgacagcggcacctgcagcgccagagcctaccccagcgaccacagaatcaccaccttccagagctgcgccgtgagcgccaacagctgcggcggcgacgacagattcctggtgggcagaggcgtgcagatcggcagcccccaccaccaccaccaccaccaccacagacacccccagcccgccacctaccagaccagcggcaacctgggcgtgagctacagccacagcagctgcggccccagctacggcagccagaacttcagcgccccctacagcccctacgccctgaaccaggaggccgacgtgagcggcggctacccccagtgcgcccccgccgtgtacagcggcaacctgagcagccccatggtgcagcaccaccaccaccaccagggctacgccggcggcgccgtgggcagcccccagtacatccaccacagctacggccaggagcaccagagcctggccctggccacctacaacaacagcctgagccccctgcacgccagccaccaggaggcctgcagaagccccgccagcgagaccagcagccccgcccagaccttcgactggatgaaggtgaagagaaacccccccaagaccggcaaggtgggcgagtacggctacctgggccagcccaacgccgtgagaaccaacttcaccaccaagcagctgaccgagctggagaaggagttccacttcaacaagtacctgaccagagccagaagagtggagatcgccgccagcctgcagctgaacgagacccaggtgaagatctggttccagaacagaagaatgaagcagaagaagagagagaaggagggcctgctgcccatcagccccgccaccccccccggcaacgacgagaaggccgaggagagcagcgagaagagcagcagcagcccctgcgtgcccagccccggcagcagcaccagcgacaccctgaccaccagccactag

SEQ ID NO: 84675 - DNA, 414 bp, synthetic construct
  misc_feature 1..414: note = Description of Artificial Sequence: Synthetic coding sequence
  source 1..414: mol_type = other DNA
atggacaacgccagaatgaacagcttcctggagtaccccatcctgagcagcggcgacagcggcacctgcagcgccagagcctaccccagcgaccacagaatcaccaccttccagagctgcgccgtgagcgccaacagctgcggcggcgacgacagattcctggtgggcagaggcgtgcagatcggcagcccccaccaccaccaccaccaccaccacagacacccccagcccgccacctaccagaccagcggcaacctgggcgtgagctacagccacagcagctgcggccccagctacggcagccagaacttcagcgccccctacagcccctacgccctgaaccaggaggccgacccccccagaagcctgagcctgcccagaatcggcgacatcttcagcagcgccgacttctag

SEQ ID NO: 84676 - DNA, 1233 bp, synthetic construct
  misc_feature 1..1233: note = Description of Artificial Sequence: Synthetic coding sequence
  source 1..1233: mol_type = other DNA
atgagcgccagaaagggctacctgctgcccagccccaactaccccaccaccatgagctgcagcgagagccccgccgccaacagcttcctggtggacagcctgatcagcagcggcagaggcgaggccggcggcggcggcggcggcgccggcggcggcggcggcggcggctactacgcccacggcggcgtgtacctgccccccgccgccgacctgccctacggcctgcagagctgcggcctgttccccaccctgggcggcaagagaaacgaggccgccagccccggcagcggcggcggcggcggcggcctgggccccggcgcccacggctacggccccagccccatcgacctgtggctggacgcccccagaagctgcagaatggagccccccgacggcccccccccccccccccagcagcagccccccccccccccccagcccccccagcccgccccccaggccaccagctgcagcttcgcccagaacatcaaggaggagagcagctactgcctgtacgacagcgccgacaagtgccccaaggtgagcgccaccgccgccgagctggcccccttccccagaggccccccccccgacggctgcgccctgggcaccagcagcggcgtgcccgtgcccggctacttcagactgagccaggcctacggcaccgccaagggctacggcagcggcggcggcggcgcccagcagctgggcgccggccccttccccgcccagccccccggcagaggcttcgacctgccccccgccctggccagcggcagcgccgacgccgccagaaaggagagagccctggacagcccccccccccccaccctggcctgcggcagcggcggcggcagccagggcgacgaggaggcccacgccagcagcagcgccgccgaggagctgagccccgcccccagcgagagcagcaaggccagccccgagaaggacagcctgggcaacagcaagggcgagaacgccgccaactggctgaccgccaagagcggcagaaagaagagatgcccctacaccaagcaccagaccctggagctggagaaggagttcctgttcaacatgtacctgaccagagagagaagactggagatcagcagaagcgtgcacctgaccgacagacaggtgaagatctggttccagaacagaagaatgaagctgaagaagatgaacagagagaacagaatcagagagctgaccgccaacttcaacttcagctag

SEQ ID NO: 84677 - DNA, 609 bp, synthetic construct
  misc_feature 1..609: note = Description of Artificial Sequence: Synthetic coding sequence
  source 1..609: mol_type = other DNA
atgagctgcagcgagagccccgccgccaacagcttcctggtggacagcctgatcagcagcggcagaggcgaggccggcggcggcggcggcggcgccggcggcggcggcggcggcggctactacgcccacggcggcgtgtacctgccccccgccgccgacctgccctacggcctgcagagctgcggcctgttccccaccctgggcggcaagagaaacgaggccgccagccccggcagcggcggcggcggcggcggcctgggccccggcgcccacggctacggccccagccccatcgacctgtggctggacgcccccagaagctgcagaagaagagccgccaccagaggctggcccgtgcccagagccgcccccggcgccagattcagaagccccgccagagccagcctgagactgggcagatgcggccccgagggcgccagccccagattcgccgccgccccccacgccggcctgagacagagaagaggcctggccggcagaagaggcggcgccagagtggtgctgggcagaggcggcgccctgcccggccccttcagagagcagcagagcctggccggcgagggcttccccggccagttccagagatag

SEQ ID NO: 84678 - DNA, 285 bp, synthetic construct
  misc_feature 1..285: note = Description of Artificial Sequence: Synthetic coding sequence
  source 1..285: mol_type = other DNA
atgtgccagggcaacagcaagggcgagaacgccgccaactggctgaccgccaagagcggcagaaagaagagatgcccctacaccaagcaccagaccctggagctggagaaggagttcctgttcaacatgtacctgaccagagagagaagactggagatcagcagaagcgtgcacctgaccgacagacaggtgaagatctggttccagaacagaagaatgaagctgaagaagatgaacagagagaacagaatcagagagctgaccgccaacttcaacttcagctag

SEQ ID NO: 84679 - DNA, 942 bp, synthetic construct
  misc_feature 1..942: note = Description of Artificial Sequence: Synthetic coding sequence
  source 1..942: mol_type = other DNA
atggacttcgacgagagaggcccctgcagcagcaacatgtacctgcccagctgcacctactacgtgagcggccccgacttcagcagcctgcccagcttcctgccccagacccccagcagcagacccatgacctacagctacagcagcaacctgccccaggtgcagcccgtgagagaggtgaccttcagagagtacgccatcgagcccgccaccaagtggcaccccagaggcaacctggcccactgctacagcgccgaggagctggtgcacagagactgcctgcaggcccccagcgccgccggcgtgcccggcgacgtgctggccaagagcagcgccaacgtgtaccaccaccccacccccgccgtgagcagcaacttctacagcaccgtgggcagaaacggcgtgctgccccaggccttcgaccagttcttcgagaccgcctacggcacccccgagaacctggccagcagcgactaccccggcgacaagagcgccgagaagggcccccccgccgccaccgccaccagcgccgccgccgccgccgccgccaccggcgcccccgccaccagcagcagcgacagcggcggcggcggcggctgcagagagaccgccgccgccgccgaggagaaggagagaagaagaagacccgagagcagcagcagccccgagagcagcagcggccacaccgaggacaaggccggcggcagcagcggccagagaaccagaaagaagagatgcccctacaccaagtaccagatcagagagctggagagagagttcttcttcagcgtgtacatcaacaaggagaagagactgcagctgagcagaatgctgaacctgaccgacagacaggtgaagatctggttccagaacagaagaatgaaggagaagaagatcaacagagacagactgcagtactacagcgccaaccccctgctgtag

SEQ ID NO: 84680 - DNA, 918 bp, synthetic construct
  misc_feature 1..918: note = Description of Artificial Sequence: Synthetic coding sequence
  source 1..918: mol_type = other DNA
atggccagagaggacagcgtgaagtgcctgagatgcctgctgtacgccctgaacctgctgttctggctgatgagcatcagcgtgctggccgtgagcgcctggatgagagactacctgaacaacgtgctgaccctgaccgccgagaccagagtggaggaggccgtgatcctgacctacttccccgtggtgcaccccgtgatgatcgccgtgtgctgcttcctgatcatcgtgggcatgctgggctactgcggcaccgtgaagagaaacctgctgctgctggcctggtacttcggcagcctgctggtgatcttctgcgtggagctggcctgcggcgtgtggacctacgagcaggagctgatggtgcccgtgcagtggagcgacatggtgaccctgaaggccagaatgaccaactacggcctgcccagatacagatggctgacccacgcctggaacttcttccagagagagttcaagtgctgcggcgtggtgtacttcaccgactggctggagatgaccgagatggactggccccccgacagctgctgcgtgagagagttccccggctgcagcaagcaggcccaccaggaggacctgagcgacctgtaccaggagggctgcggcaagaagatgtacagcttcctgagaggcaccaagcagctgcaggtgctgagattcctgggcatcagcatcggcgtgacccagatcctggccatgatcctgaccatcaccctgctgtgggccctgtactacgacagaagagagcccggcaccgaccagatgatgagcctgaagaacgacaacagccagcacctgagctgccccagcgtggagctgctgaagcccagcctgagcagaatcttcgagcacaccagcatggccaacagcttcaacacccacttcgagatggaggagctgtag

SEQ ID NO: 84681 - DNA, 489 bp, synthetic construct
  misc_feature 1..489: note = Description of Artificial Sequence: Synthetic coding sequence
  source 1..489: mol_type = other DNA
atgggcctggagaccgagaaggccgacgtgcagctgttcatggacgacgacagctacagccaccacagcggcctggagtacgccgaccccgagaagttcgccgacagcgaccaggacagagacccccacagactgaacagccacctgaagctgggcttcgaggacgtgatcgccgagcccgtgaccacccacagcttcgacaaggtgtggatctgcagccacgccctgttcgagatcagcaagtacgtgatgtacaagttcctgaccgtgttcctggccatccccctggccttcatcgccggcatcctgttcgccaccctgagctgcctgcacatctggatcctgatgcccttcgtgaagacctgcctgatggtgctgcccagcgtgcagaccatctggaagagcgtgaccgacgtgatcatcgcccccctgtgcaccagcgtgggcagatgcttcagcagcgtgagcctgcagctgagccaggactag

SEQ ID NO: 84682 - DNA, 963 bp, synthetic construct
  misc_feature 1..963: note = Description of Artificial Sequence: Synthetic coding sequence
  source 1..963: mol_type = other DNA
atgaccatgagcagcttcctgatcaacagcaactacatcgagcccaagttcccccccttcgaggagtacgcccagcacagcggcagcggcggcgccgacggcggccccggcggcggccccggctaccagcagccccccgccccccccacccagcacctgcccctgcagcagccccagctgccccacgccggcggcggcagagagcccaccgccagctactacgcccccagaaccgccagagagcccgcctaccccgccgccgccctgtaccccgcccacggcgccgccgacaccgcctacccctacggctacagaggcggcgccagccccggcagacccccccagcccgagcagccccccgcccaggccaagggccccgcccacggcctgcacgccagccacgtgctgcagccccagctgcccccccccctgcagcccagagccgtgccccccgccgcccccagaagatgcgaggccgcccccgccacccccggcgtgcccgccggcggcagcgcccccgcctgccccctgctgctggccgacaagagccccctgggcctgaagggcaaggagcccgtggtgtacccctggatgaagaagatccacgtgagcgccgtgaaccccagctacaacggcggcgagcccaagagaagcagaaccgcctacaccagacagcaggtgctggagctggagaaggagttccacttcaacagatacctgaccagaagaagaagaatcgagatcgcccacaccctgtgcctgagcgagagacaggtgaagatctggttccagaacagaagaatgaagtggaagaaggaccacaagctgcccaacaccaagatgagaagcagcaacagcgccagcgccagcgccggcccccccggcaaggcccagacccagagcccccacctgcacccccacccccaccccagcaccagcacccccgtgcccagcagcatctag

SEQ ID NO: 84683 - DNA, 963 bp, synthetic construct; identical to SEQ ID NO: 84682
  misc_feature 1..963: note = Description of Artificial Sequence: Synthetic coding sequence
  source 1..963: mol_type = other DNA

SEQ ID NO: 84684 - DNA, 1140 bp, synthetic construct
  misc_feature 1..1140: note = Description of Artificial Sequence: Synthetic coding sequence
  source 1..1140: mol_type = other DNA
atgctgaagagatgcggcagaagactgctgctggccctggccggcgccctgctggcctgcctgctggtgctgaccgccgaccccccccccccccccctgcccgccgagagaggcagaagagccctgagaagcctggccggccccgccggcgccgcccccgcccccggcctgggcgccgccgccgccgcccccggcgccctggtgagagacgtgcacagcctgagcgagtacttcagcctgctgaccagagccagaagagacgccggccccccccccggcgccgcccccagacccgccgacggccaccccagacccctggccgagcccctggcccccagagacgtgttcatcgccgtgaagaccaccaagaagttccacagagccagactggacctgctgctggagacctggatcagcagacacaaggagatgaccttcatcttcaccgacggcgaggacgaggccctggccagacacaccggcaacgtggtgatcaccaactgcagcgccgcccacagcagacaggccctgagctgcaagatggccgtggagtacgacagattcatcgagagcggcagaaagtggttctgccacgtggacgacgacaactacgtgaacctgagagccctgctgagactgctggccagctacccccacaccagagacgtgtacgtgggcaagcccagcctggacagacccatccaggccatggagagagtgagcgagaacaaggtgagacccgtgcacttctggttcgccaccggcggcgccggcttctgcatcagcagaggcctggccctgaagatgagcccctgggccagcggcggccacttcatgaacaccgccgagagaatcagactgcccgacgactgcaccatcggctacatcgtggaggccctgctgggcgtgcccctgatcagaagcggcctgttccacagccacctggagaacctgcagcaggtgcccaccagcgagctgcacgagcaggtgaccctgagctacggcatgttcgagaacaagagaaacgccgtgcacgtgaagggccccttcagcgtggaggccgaccccagcagattcagaagcatccactgccacctgtaccccgacaccccctggtgccccagaaccgccatcttctag

SEQ ID NO: 84685 - DNA, 813 bp, synthetic construct
  misc_feature 1..813: note = Description of Artificial Sequence: Synthetic coding sequence
  source 1..813: mol_type = other DNA
atgagcagctacttcgtgaacagcttctgcggcagataccccaacggccccgactaccagctgcacaactacggcgaccacagcagcgtgagcgagcagttcagagacagcgccagcatgcacagcggcagatacggctacggctacaacggcatggacctgagcgtgggcagaagcggcagcggccacttcggcagcggcgagagagccagaagctacgccgccagcgccagcgccgcccccgccgagcccagatacagccagcccgccaccagcacccacagcccccagcccgaccccctgccctgcagcgccgtggcccccagccccggcagcgacagccaccacggcggcaagaacagcctgagcaacagcagcggcgccagcgccgacgccggcagcacccacatcagcagcagagagggcgtgggcaccgccagcggcgccgaggaggacgcccccgccagcagcgagcaggccagcgcccagagcgagcccagccccgccccccccgcccagccccagatctacccctggatgagaaagctgcacatcagccacgacaacatcggcggccccgagggcaagagagccagaaccgcctacaccagataccagaccctggagctggagaaggagttccacttcaacagatacctgaccagaagaagaagaatcgagatcgcccacgccctgtgcctgagcgagagacagatcaagatctggttccagaacagaagaatgaagtggaagaaggacaacaagctgaagagcatgagcatggccgccgccggcggcgccttcagaccctag

SEQ ID NO: 84686 - DNA, 693 bp, synthetic construct
  misc_feature 1..693: note = Description of Artificial Sequence: Synthetic coding sequence
  source 1..693: mol_type = other DNA
atgagcagcagctactacgtgaacgccctgttcagcaagtacaccgccggcgccagcctgttccagaacgccgagcccaccagctgcagcttcgcccccaacagccagagaagcggctacggcgccggcgccggcgccttcgccagcaccgtgcccggcctgtacaacgtgaacagccccctgtaccagagccccttcgccagcggctacggcctgggcgccgacgcctacggcaacctgccctgcgccagctacgaccagaacatccccggcctgtgcagcgacctggccaagggcgcctgcgacaagaccgacgagggcgccctgcacggcgccgccgaggccaacttcagaatctacccctggatgagaagcagcggccccgacagaaagagaggcagacagacctacaccagataccagaccctggagctggagaaggagttccacttcaacagatacctgaccagaagaagaagaatcgagatcgcccacgccctgtgcctgaccgagagacagatcaagatctggttccagaacagaagaatgaagtggaagaaggagcacaaggacgagggccccaccgccgccgccgcccccgagggcgccgtgcccagcgccgccgccaccgccgccgccgacaaggccgacgaggaggacgacgacgaggaggaggaggacgaggaggagtag

SEQ ID NO: 84687 - DNA, 93 bp, synthetic construct
  misc_feature 1..93: note = Description of Artificial Sequence: Synthetic coding sequence
  source 1..93: mol_type = other DNA
atgagcagcagctactacgtgaacgccctgttcagcaagtacaccgccggcgccagcctgttccagaacgccgagcccaccagctgcagctag

SEQ ID NO: 84688 - DNA, 792 bp, synthetic construct
  misc_feature 1..792: note = Description of Artificial Sequence: Synthetic coding sequence
  source 1..792: mol_type = other DNA
caccactggggcggcaactactacgtggacagcttcctgctgggcgccgacgccgccgacgagctgagcgtgggcatgagaagaggcccctggccccccagacaggccgccaccctggccgagcaccccgacttcagcccctgcagcttccagagcaaggccaccgtgttcggcgccagctggaaccccgtgcacagagcccccaccctgtaccccgtgtaccaccaccaccaccaccacccctacgtgcacccccaggcccccgtggccgccgccgcccccgacggcagatacatgagaagctggctggagcccacccccggcgccctgagcttcgccggcctgcccagcagcagaccctacggcatcaagcccgagcccctgagcgccagaagaggcgactgccccaccctggacacccacaccctgagcctgaccgactacgcctgcggcagcccccccgtggacagagagaagcagcccagcgagggcgccttcagcgagaacaacgccgagaacgagagcggcggcgacaagccccccatcgaccccaacaaccccgccgccaactggctgcacgccagaagcaccagaaagaagagatgcccctacaccaagcaccagaccctggagctggagaaggagttcctgttcaacatgtacctgaccagagacagaagatacgaggtggccagactgctgaacctgaccgagagacaggtgaagatctggttccagaacagaagaatgaagatgaagaagatcaacaaggacagagccaaggacgagtag

SEQ ID NO: 84689 - DNA, 819 bp, synthetic construct
  misc_feature 1..819: note = Description of Artificial Sequence: Synthetic coding sequence
  source 1..819: mol_type = other DNA
atggccaccaccggcgccctgggcaactactacgtggacagcttcctgctgggcgccgacgccgccgacgagctgagcgtgggcagatacgcccccggcaccctgggccagccccccagacaggccgccaccctggccgagcaccccgacttcagcccctgcagcttccagagcaaggccaccgtgttcggcgccagctggaaccccgtgcacgccgccggcgccaacgccgtgcccgccgccgtgtaccaccaccaccaccaccacccctacgtgcacccccaggcccccgtggccgccgccgcccccgacggcagatacatgagaagctggctggagcccacccccggcgccctgagcttcgccggcctgcccagcagcagaccctacggcatcaagcccgagcccctgagcgccagaagaggcgactgccccaccctggacacccacaccctgagcctgaccgactacgcctgcggcagcccccccgtggacagagagaagcagcccagcgagggcgccttcagcgagaacaacgccgagaacgagagcggcggcgacaagccccccatcgaccccaacaaccccgccgccaactggctgcacgccagaagcaccagaaagaagagatgcccctacaccaagcaccagaccctggagctggagaaggagttcctgttcaacatgtacctgaccagagacagaagatacgaggtggccagactgctgaacctgaccgagagacaggtgaagatctggttccagaacagaagaatgaagatgaagaagatcaacaaggacagagccaaggacgagtag

SEQ ID NO: 84690 - DNA, 591 bp, synthetic construct
  misc_feature 1..591: note = Description of Artificial Sequence: Synthetic coding sequence
  source 1..591: mol_type = other DNA
atggccggcttcagcccctggagaagaagacagagaagaagaagaagaagaagaagagccagacagagcagagccgcccccgagctggtgggcgacctgggcagcttcctgctgctgggcagcaccttcctgagcaccgccagacactgcttcatcaccagcgtggagatcgtgagcagatacctgtgcgccagaggcagcggcagagccggccaccacggccccggcagagccagacccgccgtggccaccagcgccttccccgcccaggagcccagagtgttcctgagaagcgccctgcccgccggcagactgagccccagcaccacccacctgcacctggtgaccgccgacaaccccgccgccaactggctgcacgccagaagcaccagaaagaagagatgcccctacaccaagcaccagaccctggagctggagaaggagttcctgttcaacatgtacctgaccagagacagaagatacgaggtggccagactgctgaacctgaccgagagacaggtgaagatctggttccagaacagaagaatgaagatgaagaagatcaacaaggacagagccaaggacgagtag

SEQ ID NO: 84691 - DNA, 906 bp, synthetic construct
  misc_feature 1..906: note = Description of Artificial Sequence: Synthetic coding sequence
  source 1..906: mol_type = other DNA
atggactacaacagaatgaacagcttcctggagtaccccctgtgcaacagaggccccagcgcctacagcgcccacagcgcccccaccagcttcccccccagcagcgcccaggccgtggacagctacgccagcgagggcagatacggcggcggcctgagcagccccgccttccagcagaacagcggctaccccgcccagcagccccccagcaccctgggcgtgcccttccccagcagcgcccccagcggctacgcccccgccgcctgcagccccagctacggccccagccagtactaccccctgggccagagcgagggcgacggcggctacttccaccccagcagctacggcgcccagctgggcggcctgagcgacggctacggcgccggcggcgccggccccggcccctaccccccccagcaccccccctacggcaacgagcagaccgccagcttcgcccccgcctacgccgacctgctgagcgaggacaaggagaccccctgccccagcgagcccaacacccccaccgccagaaccttcgactggatgaaggtgaagagaaacccccccaagaccgccaaggtgagcgagcccggcctgggcagccccagcggcctgagaaccaacttcaccaccagacagctgaccgagctggagaaggagttccacttcaacaagtacctgagcagagccagaagagtggagatcgccgccaccctggagctgaacgagacccaggtgaagatctggttccagaacagaagaatgaagcagaagaagagagagagagaggagggcagagtgccccccgccccccccggctgccccaaggaggccgccggcgacgccagcgaccagagcacctgcaccagccccgaggccagccccagcagcgtgaccagctag

SEQ ID NO: 84692 - DNA, 855 bp, synthetic construct
  misc_feature 1..855: note = Description of Artificial Sequence: Synthetic coding sequence
  source 1..855: mol_type = other DNA
atggagcccggcaactacgccaccctggacggcgccaaggacatcgagggcctgctgggcgccggcggcggcagaaacctggtggcccacagccccctgaccagccaccccgccgcccccaccctgatgcccgccgtgaactacgcccccctggacctgcccggcagcgccgagccccccaagcagtgccacccctgccccggcgtgccccagggcaccagccccgcccccgtgccctacggctacttcggcggcggctactacagctgcagagtgagcagaagcagcctgaagccctgcgcccaggccgccaccctggccgcctaccccgccgagacccccaccgccggcgaggagtaccccagcagacccaccgagttcgccttctaccccggctaccccggcacctaccagcccatggccagctacctggacgtgagcgtggtgcagaccctgggcgcccccggcgagcccagacacgacagcctgctgcccgtggacagctaccagagctgggccctggccggcggctggaacagccagatgtgctgccagggcgagcagaacccccccggccccttctggaaggccgccttcgccgacagcagcggccagcacccccccgacgcctgcgccttcagaagaggcagaaagaagagaatcccctacagcaagggccagctgagagagctggagagagagtacgccgccaacaagttcatcaccaaggacaagagaagaaagatcagcgccgccaccagcctgagcgagagacagatcaccatctggttccagaacagaagagtgaaggagaagaaggtgctggccaaggtgaagaacagcgccaccccctag

SEQ ID NO: 84693 - DNA, 531 bp, synthetic construct
  misc_feature 1..531: note = Description of Artificial Sequence: Synthetic coding sequence
  source 1..531: mol_type = other DNA
cccagatgcccccccggccccagagtgcccctggacgagagagaggagatcagacaggagacccagcccatcagacacgtgagcttcagcggcagactgagaagaagcggcggcgtgggcagccccgccgacggcctgggcagaagactggtggccgccggccaggccgcccacggcctgcaccagcacgccgccgccggcaccggcgagttccacttcaacaagtacctgtgcagacccagaagagtggagatcgccgccctgctggacctgaccgagagacaggtgaaggtgtggttccagaacagaagaatgaagcacaagagacagacccagcacagagagccccccgacggcgagcccgcctgccccggcgccctggaggacatctgcgaccccgccgaggagcccgccgccagccccggcggccccctggccggcggcgtgggcagcctgctgagccccgccggcggcggcgccggcggcctgaagagaggcccccccgccttcagcagaagcctgagaggctag

SEQ ID NO: 84694 - DNA, 1071 bp, synthetic construct
  misc_feature 1..1071: note = Description of Artificial Sequence: Synthetic coding sequence
  source 1..1071: mol_type = other DNA
atgaacttcgagttcgagagagagatcggcttcatcaacagccagcccagcctggccgagtgcctgaccagcttccccgccgtgctggagaccttccagaccagcagcatcaaggagagcaccctgatccccccccccccccccttcgagcagaccttccccagcctgcagcccggcgccagcaccctgcagagacccagaagccagaagagagccgaggacggccccgccctgcccccccccccccccccccccctgcccgccgccccccccgcccccgagttcccctggatgaaggagaagaagagcgccaagaagcccagccagagcgccaccagccccagccccgccgccagcgccgtgcccgccagcggcgtgggcagccccgccgacggcctgggcctgcccgaggccggcggcggcggcgccagaagactgagaaccgcctacaccaacacccagctgctggagctggagaaggagttccacttcaacaagtacctgtgcagacccagaagagtggagatcgccgccctgctggacctgaccgagagacaggtgaaggtgtggttccagaacagaagaatgaagcacaagagacagacccagcacagagagccccccgacggcgagcccgcctgccccggcgccctggaggacatctgcgaccccgccgaggagcccgccgccagccccggcggccccagcgccagcagagccgcctgggaggcctgctgccacccccccgaggtggtgcccggcgccctgagcgccgaccccagacccctggccgtgagactggagggcgccggcgccagcagccccggctgcgccctgagaggcgccggcggcctggagcccggccccctgcccgaggacgtgttcagcggcagacaggacagccccttcctgcccgacctgaacttcttcgccgccgacagctgcctgcagctgagcggcggcctgagccccagcctgcagggcagcctggacagccccgtgcccttcagcgaggaggagctggacttcttcaccagcaccctgtgcgccatcgacctgcagttcccctag

SEQ ID NO: 84695 - DNA, 1296 bp, synthetic construct
  misc_feature 1..1296: note = Description of Artificial Sequence: Synthetic coding sequence
  source 1..1296: mol_type = other DNA
atgcagaaggccacctactacgacaacgccgccgccgccctgttcggcggctacagcagctaccccggcagcaacggcttcggcttcgacgtgcccccccagccccccttccaggccgccacccacctggagggcgactaccagagaagcgcctgcagcctgcagagcctgggcaacgccgccccccacgccaagagcaaggagctgaacggcagctgcatgagacccggcctggcccccgagcccctgagcgccccccccggcagccccccccccagcgccgcccccaccagcgccaccagcaacagcagcaacggcggcggccccagcaagagcggcccccccaagtgcggccccggcaccaacagcaccctgaccaagcagatcttcccctggatgaaggagagcagacagaccagcaagctgaagaacaacagccccggcaccgccgagggctgcggcggcggcggcggcggcggcggcggcggcggcagcggcggcagcggcggcggcggcggcggcggcggcggcggcgacaagagcccccccggcagcgccgccagcaagagagccagaaccgcctacaccagcgcccagctggtggagctggagaaggagttccacttcaacagatacctgtgcagacccagaagagtggagatggccaacctgctgaacctgagcgagagacagatcaagatctggttccagaacagaagaatgaagtacaagaaggaccagaaggccaagggcctggccagcagcagcggcggccccagccccgccggcagccccccccagcccatgcagagcaccgccggcttcatgaacgccctgcacagcatgacccccagctacgagagccccagcccccccgccttcggcaaggcccaccagaacgcctacgccctgcccagcaactaccagccccccctgaagggctgcggcgccccccagaagtacccccccacccccgcccccgagtacgagccccacgtgctgcaggccaacggcggcgcctacggcacccccaccatgcagggcagccccgtgtacgtgggcggcggcggctacgccgaccccctgcccccccccgccggccccagcctgtacggcctgaaccacctgagccaccaccccagcggcaacctggactacaacggcgccccccccatggcccccagccagcaccacggcccctgcgagccccaccccacctacaccgacctgagcagccaccacgccccccccccccagggcagaatccaggaggcccccaagctgacccacctgtag

SEQ ID NO: 84696 - DNA, 900 bp, synthetic construct
  misc_feature 1..900: note = Description of Artificial Sequence: Synthetic coding sequence
  source 1..900: mol_type = other DNA
atgaaggagagcagacagaccagcaagctgaagaacaacagccccggcaccgccgagggctgcggcggcggcggcggcggcggcggcggcggcggcagcggcggcagcggcggcggcggcggcggcggcggcggcggcgacaagagcccccccggcagcgccgccagcaagagagccagaaccgcctacaccagcgcccagctggtggagctggagaaggagttccacttcaacagatacctgtgcagacccagaagagtggagatggccaacctgctgaacctgagcgagagacagatcaagatctggttccagaacagaagaatgaagtacaagaaggaccagaaggccaagggcctggccagcagcagcggcggccccagccccgccggcagccccccccagcccatgcagagcaccgccggcttcatgaacgccctgcacagcatgacccccagctacgagagccccagcccccccgccttcggcaaggcccaccagaacgcctacgccctgcccagcaactaccagccccccctgaagggctgcggcgccccccagaagtacccccccacccccgcccccgagtacgagccccacgtgctgcaggccaacggcggcgcctacggcacccccaccatgcagggcagccccgtgtacgtgggcggcggcggctacgccgaccccctgcccccccccgccggccccagcctgtacggcctgaaccacctgagccaccaccccagcggcaacctggactacaacggcgccccccccatggcccccagccagcaccacggcccctgcgagccccaccccacctacaccgacctgagcagccaccacgccccccccccccagggcagaatccaggaggcccccaagctgacccacctgtag

SEQ ID NO: 84697 - DNA, 1296 bp, synthetic construct; identical to SEQ ID NO: 84695
  misc_feature 1..1296: note = Description of Artificial Sequence: Synthetic coding sequence
  source 1..1296: mol_type = other DNA

SEQ ID NO: 84698 - DNA, 1077 bp, synthetic construct
  misc_feature 1..1077: note = Description of Artificial Sequence: Synthetic coding sequence
  source 1..1077: mol_type = other DNA
atgagacccggcctggcccccgagcccctgagcgccccccccggcagccccccccccagcgccgcccccaccagcgccaccagcaacagcagcaacggcggcggccccagcaagagcggcccccccaagtgcggccccggcaccaacagcaccctgaccaagcagatcttcccctggatgaaggagagcagacagaccagcaagctgaagaacaacagccccggcaccgccgagggctgcggcggcggcggcggcggcggcggcggcggcggcagcggcggcagcggcggcggcggcggcggcggcggcggcggcgacaagagcccccccggcagcgccgccagcaagagagccagaaccgcctacaccagcgcccagctggtggagctggagaaggagttccacttcaacagatacctgtgcagacccagaagagtggagatggccaacctgctgaacctgagcgagagacagatcaagatctggttccagaacagaagaatgaagtacaagaaggaccagaaggccaagggcctggccagcagcagcggcggccccagccccgccggcagccccccccagcccatgcagagcaccgccggcttcatgaacgccctgcacagcatgacccccagctacgagagccccagcccccccgccttcggcaaggcccaccagaacgcctacgccctgcccagcaactaccagccccccctgaagggctgcggcgccccccagaagtacccccccacccccgcccccgagtacgagccccacgtgctgcaggccaacggcggcgcctacggcacccccaccatgcagggcagccccgtgtacgtgggcggcggcggctacgccgaccccctgcccccccccgccggccccagcctgtacggcctgaaccacctgagccaccaccccagcggcaacctggactacaacggcgccccccccatggcccccagccagcaccacggcccctgcgagccccaccccacctacaccgacctgagcagccaccacgccccccccccccagggcagaatccaggaggcccccaagctgacccacctgtag

SEQ ID NO: 84699 - DNA, 1296 bp, synthetic construct; identical to SEQ ID NO: 84695
  misc_feature 1..1296: note = Description of Artificial Sequence: Synthetic coding sequence
  source 1..1296: mol_type = other DNA

SEQ ID NO: 84700 - DNA, 900 bp, synthetic construct; identical to SEQ ID NO: 84696
  misc_feature 1..900: note = Description of Artificial Sequence: Synthetic coding sequence
  source 1..900: mol_type = other DNA

SEQ ID NO: 84701 - DNA, 1077 bp, synthetic construct; identical to SEQ ID NO: 84698
  misc_feature 1..1077: note = Description of Artificial Sequence: Synthetic coding sequence
  source 1..1077: mol_type = other DNA

SEQ ID NO: 84702 - DNA, 1296 bp, synthetic construct; identical to SEQ ID NO: 84695
  misc_feature 1..1296: note = Description of Artificial Sequence: Synthetic coding sequence
  source 1..1296: mol_type = other DNA

SEQ ID NO: 84703 - DNA, 756 bp, synthetic construct
  misc_feature 1..756: note = Description of Artificial Sequence: Synthetic coding sequence
  source 1..756: mol_type = other DNA
atggccatgagcagcttcctgatcaacagcaactacgtggaccccaagttccccccctgcgaggagtacagccagagcgactacctgcccagcgaccacagccccggctactacgccggcggccagagaagagagagcagcttccagcccgaggccggcttcggcagaagagccgcctgcaccgtgcagagatacgccgcctgcagagaccccggccccccccccccccccccccccccccccccccccccccccccccccggcctgagccccagagcccccgcccccccccccgccggcgccctgctgcccgagcccggccagagatgcgaggccgtgagcagcagcccccccccccccccctgcgcccagaaccccctgcaccccagccccagccacagcgcctgcaaggagcccgtggtgtacccctggatgagaaaggtgcacgtgagcaccgtgaaccccaactacgccggcggcgagcccaagagaagcagaaccgcctacaccagacagcaggtgctggagctggagaaggagttccactacaacagatacctgaccagaagaagaagagtggagatcgcccacgccctgtgcctgagcgagagacagatcaagatctggttccagaacagaagaatgaagtggaagaaggaccacaagctgcccaacaccaagatcagaagcggcggcgccgccggcagcgccggcggcccccccggcagacccaacggcggccccagagccctgtag

SEQ ID NO: 84704 - DNA, 810 bp, synthetic construct
  misc_feature 1..810: note = Description of Artificial Sequence: Synthetic coding sequence
  source 1..810: mol_type = other DNA
atgagcagctacttcgtgaacagcttcagcggcagataccccaacggccccgactaccagctgctgaactacggcagcggcagcagcctgagcggcagctacagagaccccgccgccatgcacaccggcagctacggctacaactacaacggcatggacctgagcgtgaacagaagcagcgccagcagcagccacttcggcgccgtgggcgagagcagcagagccttccccgcccccgcccaggagcccagattcagacaggccgccagcagctgcagcctgagcagccccgagagcctgccctgcaccaacggcgacagccacggcgccaagcccagcgccagcagccccagcgaccaggccaccagcgccagcagcagcgccaacttcaccgagatcgacgaggccagcgccagcagcgagcccgaggaggccgccagccagctgagcagccccagcctggccagagcccagcccgagcccatggccaccagcaccgccgcccccgagggccagaccccccagatcttcccctggatgagaaagctgcacatcagccacgacatgaccggccccgacggcaagagagccagaaccgcctacaccagataccagaccctggagctggagaaggagttccacttcaacagatacctgaccagaagaagaagaatcgagatcgcccacgccctgtgcctgagcgagagacagatcaagatctggttccagaacagaagaatgaagtggaagaaggacaacaagctgaagagcatgagcctggccaccgccggcagcgccttccagccctag

SEQ ID NO: 84705 - DNA, 1179 bp, synthetic construct
  misc_feature 1..1179: note = Description of Artificial Sequence: Synthetic coding sequence
  source 1..1179: mol_type = other DNA
atggccgccctgagacagccccaggtggccgagctgctggccgaggccagaagagccttcagagaggagttcggcgccgagcccgagctggccgtgagcgcccccggcagagtgaacctgatcggcgagcacaccgactacaaccagggcctggtgctgcccatggccctggagctgatgaccgtgctggtgggcagccccagaaaggacggcctggtgagcctgctgaccaccagcgagggcgccgacgagccccagagactgcagttccccctgcccaccgcccagagaagcctggagcccggcacccccagatgggccaactacgtgaagggcgtgatccagtactaccccgccgcccccctgcccggcttcagcgccgtggtggtgagcagcgtgcccctgggcggcggcctgagcagcagcgccagcctggaggtggccacctacaccttcctgcagcagctgtgccccgacagcggcaccatcgccgccagagcccaggtgtgccagcaggccgagcacagcttcgccggcatgccctgcggcatcatggaccagttcatcagcctgatgggccagaagggccacgccctgctgatcgactgcagaagcctggagaccagcctggtgcccctgagcgaccccaagctggccgtgctgatcaccaacagcaacgtgagacacagcctggccagcagcgagtaccccgtgagaagaagacagtgcgaggaggtggccagagccctgggcaaggagagcctgagagaggtgcagctggaggagctggaggccgccagagacctggtgagcaaggagggcttcagaagagccagacacgtggtgggcgagatcagaagaaccgcccaggccgccgccgccctgagaagaggcgactacagagccttcggcagactgatggtggagagccacagaagcctgagagacgactacgaggtgagctgccccgagctggaccagctggtggaggccgccctggccgtgcccggcgtgtacggcagcagaatgaccggcggcggcttcggcggctgcaccgtgaccctgctggaggccagcgccgccccccacgccatgagacacatccaggagcactacggcggcaccgccaccttctacctgagccaggccgccgacggcgccaaggtgctgtgcctgtag

SEQ ID NO: 84706 - DNA, 675 bp, synthetic construct
  misc_feature 1..675: note = Description of Artificial Sequence: Synthetic coding sequence
  source 1..675: mol_type = other DNA
atgagcagctacttcgtgaacagcaccttccccgtgaccctggccagcggccaggagagcttcctgggccagctgcccctgtacagcagcggctacgccgaccccctgagacactaccccgccccctacggccccggccccggccaggacaagggcttcgccaccagcagctactacccccccgccggcggcggctacggcagagccgccccctgcgactacggccccgcccccgccttctacagagagaaggagagcgcctgcgccctgagcggcgccgacgagcagccccccttccaccccgagcccagaaagagcgactgcgcccaggacaagagcgtgttcggcgagaccgaggagcagaagtgcagcacccccgtgtacccctggatgcagagaatgaacagctgcaacagcagcagcttcggccccagcggcagaagaggcagacagacctacaccagataccagaccctggagctggagaaggagttccactacaacagatacctgaccagaagaagaagaatcgagatcgcccacgccctgtgcctgaccgagagacagatcaagatctggttccagaacagaagaatgaagtggaagaaggagagcaagctgctgagcgccagccagctgagcgccgaggaggaggaggagaagcaggccgagtag

SEQ ID NO: 84707 - DNA, 654 bp, synthetic construct
  misc_feature 1..654: note = Description of Artificial Sequence: Synthetic coding sequence
  source 1..654: mol_type = other DNA
atgagcagcctgtactacgccaacaccctgttcagcaagtaccccgccagcagcagcgtgttcgccaccggcgccttccccgagcagaccagctgcgccttcgccagcaacccccagagacccggctacggcgccggcagcggcgccagcttcgccgccagcatgcagggcctgtaccccggcggcggcggcatggccggccagagcgccgccggcgtgtacgccgccggctacggcctggagcccagcagcttcaacatgcactgcgcccccttcgagcagaacctgagcggcgtgtgccccggcgacagcgccaaggccgccggcgccaaggagcagagagacagcgacctggccgccgagagcaacttcagaatctacccctggatgagaagcagcggcaccgacagaaagagaggcagacagacctacaccagataccagaccctggagctggagaaggagttccactacaacagatacctgaccagaagaagaagaatcgagatcgcccacaccctgtgcctgaccgagagacagatcaagatctggttccagaacagaagaatgaagtggaagaaggagaacaagaccgccggccccggcaccaccggccaggacagagccgaggccgaggaggaggaggaggagtag

SEQ ID NO: 84708 - DNA, 87 bp, synthetic construct
  misc_feature 1..87: note = Description of Artificial Sequence: Synthetic coding sequence
  source 1..87: mol_type = other DNA
atgaagtggaagaaggagaacaagaccgccggccccggcaccaccggccaggacagagccgaggccgaggaggaggaggaggagtag

SEQ ID NO: 84709 - DNA, 732 bp, synthetic construct
  misc_feature 1..732: note = Description of Artificial Sequence: Synthetic coding sequence
  source 1..732: mol_type = other DNA
atgagcagctacttcgtgaacagcctgttcagcaagtacaagaccggcgagagcctgagacccaactactacgactgcggcttcgcccaggacctgggcggcagacccaccgtggtgtacggccccagcagcggcggcagcttccagcaccccagccagatccaggagttctaccacggccccagcagcctgagcaccgccccctaccagcagaacccctgcgccgtggcctgccacggcgaccccggcaacttctacggctacgaccccctgcagagacagagcctgttcggcgcccaggaccccgacctggtgcagtacgccgactgcaagctggccgccgccagcggcctgggcgaggaggccgagggcagcgagcagagccccagccccacccagctgttcccctggatgagaccccaggccgccgccggcagaagaagaggcagacagacctacagcagataccagaccctggagctggagaaggagttcctgttcaacccctacctgaccagaaagagaagaatcgaggtgagccacgccctgggcctgaccgagagacaggtgaagatctggttccagaacagaagaatgaagtggaagaaggagaacaacaaggacaagttccccagcagcaagtgcgagcaggaggagctggagaagcagaagctggagagagcccccgaggccgccgacgagggcgacgcccagaagggcgacaagaagtag

SEQ ID NO: 84710 - DNA, 753 bp, synthetic construct
  misc_feature 1..753: note = Description of Artificial Sequence: Synthetic coding sequence
  source 1..753: mol_type = other DNA
atgagcatcagcggcaccctgagcagctactacgtggacagcatcatcagccacgagagcgaggacgccccccccgccaagttccccagcggccagtacgccagcagcagacagcccggccacgccgagcacctggagttccccagctgcagcttccagcccaaggcccccgtgttcggcgccagctgggcccccctgagcccccacgccagcggcagcctgcccagcgtgtaccacccctacatccagccccagggcgtgccccccgccgagagcagatacctgagaacctggctggagcccgcccccagaggcgaggccgcccccggccagggccaggccgccgtgaaggccgagcccctgctgggcgcccccggcgagctgctgaagcagggcacccccgagtacagcctggagaccagcgccggcagagaggccgtgctgagcaaccagagacccggctacggcgacaacaagatctgcgagggcagcgaggacaaggagagacccgaccagaccaaccccagcgccaactggctgcacgccagaagcagcagaaagaagagatgcccctacaccaagtaccagaccctggagctggagaaggagttcctgttcaacatgtacctgaccagagacagaagacacgaggtggccagactgctgaacctgagcgagagacaggtgaagatctggttccagaacagaagaatgaagatgaagaagatgaacaaggagcagggcaaggagtag

SEQ ID NO: 84711 - DNA, 387 bp, synthetic construct
  misc_feature 1..387: note = Description of Artificial Sequence: Synthetic coding sequence
  source 1..387: mol_type = other DNA
atgagcatcagcggcaccctgagcagctactacgtggacagcatcatcagccacgagagcgaggacgccccccccgccaagttccccagcggccagtacgccagcagcagacagcccggccacgccgagcacctggagttccccagctgcagcttccagcccaaggcccccgtgttcggcgccagctgggcccccctgagcccccacgccagcggcagcctgcccagcgtgtaccacccctacatccagccccagggcgtgccccccgccgagagcagatacctgagaacctggctggagcccgcccccagaggcggcgccgcccagaccggccacgccagagtgcagttcggcaacttcggcggccagggcggcagagccgtgtag

SEQ ID NO: 84712 - DNA, 1029 bp, synthetic construct
  misc_feature 1..1029: note = Description of Artificial Sequence: Synthetic coding sequence
  source 1..1029: mol_type = other DNA
atgacctgccccagaaacgtgacccccaacagctacgccgagcccctggccgcccccggcggcggcgagagatacagcagaagcgccggcatgtacatgcagagcggcagcgacttcaactgcggcgtgatgagaggctgcggcctggcccccagcctgagcaagagagacgagggcagcagccccagcctggccctgaacacctaccccagctacctgagccagctggacagctggggcgaccccaaggccgcctacagactggagcagcccgtgggcagacccctgagcagctgcagctacccccccagcgtgaaggaggagaacgtgtgctgcatgtacagcgccgagaagagagccaagagcggccccgaggccgccctgtacagccaccccctgcccgagagctgcctgggcgagcacgaggtgcccgtgcccagctactacagagccagccccagctacagcgccctggacaagaccccccactgcagcggcgccaacgacttcgaggcccccttcgagcagagagccagcctgaaccccagagccgagcacctggagagcccccagctgggcggcaaggtgagcttccccgagacccccaagagcgacagccagacccccagccccaacgagatcaagaccgagcagagcctggccggccccaagggcagccccagcgagagcgagaaggagagagccaaggccgccgacagcagccccgacaccagcgacaacgaggccaaggaggagatcaaggccgagaacaccaccggcaactggctgaccgccaagagcggcagaaagaagagatgcccctacaccaagcaccagaccctggagctggagaaggagttcctgttcaacatgtacctgaccagagagagaagactggagatcagcaagaccatcaacctgaccgacagacaggtgaagatctggttccagaacagaagaatgaagctgaagaagatgaacagagagaacagaatcagagagctgaccagcaacttcaacttcacctag

SEQ ID NO: 84713 - DNA, 915 bp, synthetic construct
  misc_feature 1..915: note = Description of Artificial Sequence: Synthetic coding sequence
  source 1..915: mol_type = other DNA
atgttcaacagcgtgaacctgggcaacttctgcagccccagcagaaaggagagaggcgccgacttcggcgagagaggcagctgcgccagcaacctgtacctgcccagctgcacctactacatgcccgagttcagcaccgtgagcagcttcctgccccaggcccccagcagacagatcagctacccctacagcgcccaggtgccccccgtgagagaggtgagctacggcctggagcccagcggcaagtggcaccacagaaacagctacagcagctgctacgccgccgccgacgagctgatgcacagagagtgcctgccccccagcaccgtgaccgagatcctgatgaagaacgagggcagctacggcggccaccaccaccccagcgccccccacgccacccccgccggcttctacagcagcgtgaacaagaacagcgtgctgccccaggccttcgacagattcttcgacaacgcctactgcggcggcggcgacccccccgccgagcccccctgcagcggcaagggcgaggccaagggcgagcccgaggccccccccgccagcggcctggccagcagagccgaggccggcgccgaggccgaggccgaggaggagaacaccaaccccagcagcagcggcagcgcccacagcgtggccaaggagcccgccaagggcgccgcccccaacgcccccagaaccagaaagaagagatgcccctacagcaagttccagatcagagagctggagagagagttcttcttcaacgtgtacatcaacaaggagaagagactgcagctgagcagaatgctgaacctgaccgacagacaggtgaagatctggttccagaacagaagaatgaaggagaagaagctgagcagagacagactgcagtacttcagcggcaaccccctgctgtag

SEQ ID NO: 84714 - DNA, 849 bp, synthetic construct
  misc_feature 1..849: note = Description of Artificial Sequence: Synthetic coding sequence
  source 1..849: mol_type = other DNA
atgggcgagcacaacctgctgaaccccggcttcgtgggccccctggtgaacatccacaccggcgacaccttctacttccccaacttcagagccagcggcgcccagctgcccggcctgcccagcctgagctaccccagaagagacaacgtgtgcagcctgagctggcccagcgccgagccctgcaacggctacccccagccctacctgggcagccccgtgagcctgaacccccccttcggcagaacctgcgagctggccagagtggaggacggcaagggctactacagagagccctgcgccgagggcggcggcggcggcctgaagagagaggagagaggcagagaccccggcgccggccccggcgccgccctgctgcccctggagcccagcggcccccccgccctgggcttcaagtacgactacgccgccggcggcggcggcggcgacggcggcggcggcgccggccccccccacgacccccccagctgccagagcctggagagcgacagcagcagcagcctgctgaacgagggcaacaagggcgccggcgccggcgaccccggcagcctggtgagccccctgaaccccggcggcggcctgagcgccagcggcgccccctggtaccccatcaacagcagaagcagaaagaagagaaagccctacagcaagctgcagctggccgagctggagggcgagttcctggtgaacgagttcatcaccagacagagaagaagagagctgagcgacagactgaacctgagcgaccagcaggtgaagatctggttccagaacagaagaatgaagaagaagagactgctgctgagagagcaggccctgagcttcttctag

SEQ ID NO: 84715 - DNA, 993 bp, synthetic construct
  misc_feature 1..993: note = Description of Artificial Sequence: Synthetic coding sequence
  source 1..993: mol_type = other DNA
atgaccaccagcctgctgctgcaccccagatggcccgagagcctgatgtacgtgtacgaggacagcgccgccgagagcggcatcggcggcggcggcggcggcggcggcggcggcaccggcggcgccggcggcggctgcagcggcgccagccccggcaaggcccccagcatggacggcctgggcagcagctgccccgccagccactgcagagacctgctgccccaccccgtgctgggcagaccccccgcccccctgggcgccccccagggcgccgtgtacaccgacatccccgcccccgaggccgccagacagtgcgcccccccccccgccccccccaccagcagcagcgccaccctgggctacggctaccccttcggcggcagctactacggctgcagactgagccacaacgtgaacctgcagcagaagccctgcgcctaccaccccggcgacaagtaccccgagcccagcggcgccctgcccggcgacgacctgagcagcagagccaaggagttcgccttctaccccagcttcgccagcagctaccaggccatgcccggctacctggacgtgagcgtggtgcccggcatcagcggccaccccgagcccagacacgacgccctgatccccgtggagggctaccagcactgggccctgagcaacggctgggacagccaggtgtactgcagcaaggagcagagccagagcgcccacctgtggaagagccccttccccgacgtggtgcccctgcagcccgaggtgagcagctacagaagaggcagaaagaagagagtgccctacaccaaggtgcagctgaaggagctggagaaggagtacgccgccagcaagttcatcaccaaggagaagagaagaagaatcagcgccaccaccaacctgagcgagagacaggtgaccatctggttccagaacagaagagtgaaggagaagaaggtggtgagcaagagcaaggccccccacctgcacagcacctag

SEQ ID NO: 84716 - DNA, 795 bp, synthetic construct
  misc_feature 1..795: note = Description of Artificial Sequence: Synthetic coding sequence
  source 1..795: mol_type = other DNA
atgatcatgagcagctacctgatggacagcaactacatcgaccccaagttccccccctgcgaggagtacagccagaacagctacatccccgagcacagccccgagtactacggcagaaccagagagagcggcttccagcaccaccaccaggagctgtaccccccccccccccccagacccagctaccccgagagacagtacagctgcaccagcctgcagggccccggcaacagcagaggccacggccccgcccaggccggccaccaccaccccgagaagagccagagcctgtgcgagcccgcccccctgagcggcgccagcgccagccccagccccgccccccccgcctgcagccagcccgcccccgaccaccccagcagcgccgccagcaagcagcccatcgtgtacccctggatgaagaagatccacgtgagcaccgtgaaccccaactacaacggcggcgagcccaagagaagcagaaccgcctacaccagacagcaggtgctggagctggagaaggagttccactacaacagatacctgaccagaagaagaagaatcgagatcgcccacagcctgtgcctgagcgagagacagatcaagatctggttccagaacagaagaatgaagtggaagaaggaccacagactgcccaacaccaaggtgagaagcgccccccccgccggcgccgcccccagcaccctgagcgccgccacccccggcaccagcgaggaccacagccagagcgccaccccccccgagcagcagagagccgaggacatcaccagactgtag

SEQ ID NO: 84717 - DNA, 795 bp, synthetic construct; identical to SEQ ID NO: 84716
  misc_feature 1..795: note = Description of Artificial Sequence: Synthetic coding sequence
  source 1..795: mol_type = other DNA

SEQ ID NO: 84718 - DNA, 669 bp, synthetic construct
  misc_feature 1..669: note = Description of Artificial Sequence: Synthetic coding sequence
  source 1..669: mol_type = other DNA
atgagcagctacgtggccaacagcttctacaagcagagccccaacatccccgcctacaacatgcagacctgcggcaactacggcagcgccagcgaggtgcaggccagcagatactgctacggcggcctggacctgagcatcaccttccccccccccgcccccagcaacagcctgcacggcgtggacatggccgccaaccccagagcccaccccgacagacccgcctgcagcgccgccgccgcccccggccacgcccccggcagagacgaggccgcccccctgaaccccggcatgtacagccagaaggccgccagacccgccctggaggagagagccaagagcagcggcgagatcaaggaggagcaggcccagaccggccagcccgccggcctgagccagccccccgcccccccccagatctacccctggatgaccaagctgcacatgagccacgagaccgacggcaagagaagcagaaccagctacaccagataccagaccctggagctggagaaggagttccacttcaacagatacctgaccagaagaagaagaatcgagatcgccaacaacctgtgcctgaacgagagacagatcaagatctggttccagaacagaagaatgaagtggaagaaggacagcaagatgaagagcaaggaggccctgtag

SEQ ID NO: 84719 - DNA, 708 bp, synthetic construct
  misc_feature 1..708: note = Description of Artificial Sequence: Synthetic coding sequence
  source 1..708: mol_type = other DNA
atgaacagctacttcaccaaccccagcctgagctgccacctggccggcggccaggacgtgctgcccaacgtggccctgaacagcaccgcctacgaccccgtgagacacttcagcacctacggcgccgccgtggcccagaacagaatctacagcacccccttctacagcccccaggagaacgtggtgttcagcagcagcagaggcccctacgactacggcagcaacagcttctaccaggagaaggacatgctgagcaactgcagacagaacaccctgggccacaacacccagaccagcatcgcccaggacttcagcagcgagcagggcagaaccgccccccaggaccagaaggccagcatccagatctacccctggatgcagagaatgaacagccacagcggcgtgggctacggcgccgacagaagaagaggcagacagatctacagcagataccagaccctggagctggagaaggagttccacttcaacagatacctgaccagaagaagaagaatcgagatcgccaacgccctgtgcctgaccgagagacagatcaagatctggttccagaacagaagaatgaagtggaagaaggagagcaacctgaccagcaccctgagcggcggcggcggcggcgccaccgccgacagcctgggcggcaaggaggagaagagagaggagaccgaggaggagaagcagaaggagtag

SEQ ID NO: 84720 - DNA, 462 bp, synthetic construct
  misc_feature 1..462: note = Description of Artificial Sequence: Synthetic coding sequence
  source 1..462: mol_type = other DNA
atgctgagcaactgcagacagaacaccctgggccacaacacccagaccagcatcgcccaggacttcagcagcgagcagggcagaaccgccccccaggaccagaaggccagcatccagatctacccctggatgcagagaatgaacagccacagcggcgtgggctacggcgccgacagaagaagaggcagacagatctacagcagataccagaccctggagctggagaaggagttccacttcaacagatacctgaccagaagaagaagaatcgagatcgccaacgccctgtgcctgaccgagagacagatcaagatctggttccagaacagaagaatgaagtggaagaaggagagcaacctgaccagcaccctgagcggcggcggcggcggcgccaccgccgacagcctgggcggcaaggaggagaagagagaggagaccgaggaggagaagcagaaggagtag

SEQ ID NO: 84721 - DNA, 159 bp, synthetic construct
  misc_feature 1..159: note = Description of Artificial Sequence: Synthetic coding sequence
  source 1..159: mol_type = other DNA
atgctgagcaactgcagacagaacaccctgggccacaacacccagaccagcatcgcccaggacttcagcagcgagcagggcagaaccgccccccaggaccagaaggccagcatccagatctacccctggatgcagagaatgaacagccacagcggctag

SEQ ID NO: 84722 - DNA, 216 bp, synthetic construct
  misc_feature 1..216: note = Description of Artificial Sequence: Synthetic coding sequence
  source 1..216: mol_type = other DNA
atgctgagcaactgcagacagaacaccctgggccacaacacccagaccagcatcgcccaggacttcagcagcgagcagggcagaaccgccccccaggaccagaaggccagcatccagatctacccctggatgcagagaatgaacagccacagcgtgtgcttcgtgcccggcagcctgggcgtgggctacggcgccgacagaagaagaggcagatag

SEQ ID NO: 84723 - DNA, 729 bp, synthetic construct
  misc_feature 1..729: note = Description of Artificial Sequence: Synthetic coding sequence
  source 1..729: mol_type = other DNA
atgagcagctacttcgtgaaccccctgttcagcaagtacaaggccggcgagagcctggagcccgcctactacgactgcagattcccccagagcgtgggcagaagccacgccctggtgtacggccccggcggcagcgcccccggcttccagcacgccagccaccacgtgcaggacttcttccaccacggcaccagcggcatcagcaacagcggctaccagcagaacccctgcagcctgagctgccacggcgacgccagcaagttctacggctacgaggccctgcccagacagagcctgtacggcgcccagcaggaggccagcgtggtgcagtaccccgactgcaagagcagcgccaacaccaacagcagcgagggccagggccacctgaaccagaacagcagccccagcctgatgttcccctggatgagaccccacgcccccggcagaagaagcggcagacagacctacagcagataccagaccctggagctggagaaggagttcctgttcaacccctacctgaccagaaagagaagaatcgaggtgagccacgccctgggcctgaccgagagacaggtgaagatctggttccagaacagaagaatgaagtggaagaaggagaacaacaaggacaagctgcccggcgccagagacgaggagaaggtggaggaggagggcaacgaggaggaggagaaggaggaggaggagaaggaggagaacaaggactag

SEQ ID NO: 84724 - DNA, 783 bp, synthetic construct
  misc_feature 1..783: note = Description of Artificial Sequence: Synthetic coding sequence
  source 1..783: mol_type = other DNA
atgagcgccaccggccccatcagcaactactacgtggacagcctgatcagccacgacaacgaggacctgctggccagcagattccccgccaccggcgcccaccccgccgccgccagacccagcggcctggtgcccgactgcagcgacttccccagctgcagcttcgcccccaagcccgccgtgttcagcaccagctgggcccccgtgcccagccagagcagcgtggtgtaccacccctacggcccccagccccacctgggcgccgacaccagatacatgagaacctggctggagcccctgagcggcgccgtgagcttccccagcttccccgccggcggcagacactacgccctgaagcccgacgcctaccccggcagaagagccgactgcggccccggcgagggcagaagctaccccgactacatgtacggcagccccggcgagctgagagacagagccccccagaccctgcccagccccgaggccgacgccctggccggcagcaagcacaaggaggagaaggccgacctggaccccagcaaccccgtggccaactggatccacgccagaagcaccagaaagaagagatgcccctacaccaagtaccagaccctggagctggagaaggagttcctgttcaacatgtacctgaccagagacagaagatacgaggtggccagagtgctgaacctgaccgagagacaggtgaagatctggttccagaacagaagaatgaagatgaagaagatgaacaaggagaagaccgacaaggagcagagctag

SEQ ID NO: 84725 - DNA, 783 bp, synthetic construct; identical to SEQ ID NO: 84724
  misc_feature 1..783: note = Description of Artificial Sequence: Synthetic coding sequence
  source 1..783: mol_type = other DNA

SEQ ID NO: 84726 - DNA, 987 bp, synthetic construct
  misc_feature 1..987: note = Description of Artificial Sequence: Synthetic coding sequence
  source 1..987: mol_type = other DNA
atgagcagctacctggagtacgtgagctgcagcagcagcggcggcgtgggcggcgacgtgctgagcctggcccccaagttctgcagaagcgacgccagacccgtggccctgcagcccgccttccccctgggcaacggcgacggcgccttcgtgagctgcctgcccctggccgccgccagacccagccccagcccccccgccgcccccgccagacccagcgtgcccccccccgccgccccccagtacgcccagtgcaccctggagggcgcctacgagcccggcgccgcccccgccgccgccgccggcggcgccgactacggcttcctgggcagcggccccgcctacgacttccccggcgtgctgggcagagccgccgacgacggcggcagccacgtgcactacgccaccagcgccgtgttcagcggcggcggcagcttcctgctgagcggccaggtggactacgccgccttcggcgagcccggccccttccccgcctgcctgaaggccagcgccgacggccaccccggcgccttccagaccgccagccccgcccccggcacctaccccaagagcgtgagccccgccagcggcctgcccgccgccttcagcaccttcgagtggatgaaggtgaagagaaacgccagcaagaagggcaagctggccgagtacggcgccgccagccccagcagcgccatcagaaccaacttcagcaccaagcagctgaccgagctggagaaggagttccacttcaacaagtacctgaccagagccagaagaatcgagatcgccaactgcctgcacctgaacgacacccaggtgaagatctggttccagaacagaagaatgaagcagaagaagagagagagagagggcctgctggccaccgccatccccgtggcccccctgcagctgcccctgagcggcaccacccccaccaagttcatcaagaaccccggcagccccagccagagccaggagcccagctag

SEQ ID NO: 84727 - DNA, 630 bp, synthetic construct
  misc_feature 1..630: note = Description of Artificial Sequence: Synthetic coding sequence
  source 1..630: mol_type = other DNA
ctggagagagccgccagagtggagagagccggcggcgccgcccagaccgccgccgtgctgctgagcctgtgccccgccccctacagcggccccggcctgagaccccacctggccttcgcccccggcagacccagagccgccgtgagaaccgccagcggcagagcccccgtgagagccgtgcaccccggcggcggcctgagaacctggtgcagaacctgcagaggcagctggggcagaggcctgagactgcccggcgtgagagccggcgtgagactgcccggcagagccggcgccggcggccccttccccgcctgcctgaaggccagcgccgacggccaccccggcgccttccagaccgccagccccgcccccggcacctaccccaagagcgtgagccccgccagcggcctgcccgccgccttcagcaccttcgagtggatgaaggtgaagagaaacgccagcaagaaggacagcggcctgggcttcgtggaggagaccagaagcagagccaacagcatggagagcgccagcagcaccgacagcgagaacgtgcccggcatcgagaagatcagcggcagaagcagcccctggaacttcagctggcagaccagaagagtgtggggcagatag

SEQ ID NO: 84728 - DNA, 1023 bp, synthetic construct
  misc_feature 1..1023: note = Description of Artificial Sequence: Synthetic coding sequence
  source 1..1023: mol_type = other DNA
atgagcttccccaacagcagccccgccgccaacaccttcctggtggacagcctgatcagcgcctgcagaagcgacagcttctacagcagcagcgccagcatgtacatgcccccccccagcgccgacatgggcacctacggcatgcagacctgcggcctgctgcccagcctggccaagagagaggtgaaccaccagaacatgggcatgaacgtgcacccctacatcccccaggtggacagctggaccgaccccaacagaagctgcagaatcgagcagcccgtgacccagcaggtgcccacctgcagcttcaccaccaacatcaaggaggagagcaactgctgcatgtacagcgacaagagaaacaagctgatcagcgccgaggtgcccagctaccagagactggtgcccgagagctgccccgtggagaaccccgaggtgcccgtgcccggctacttcagactgagccagacctacgccaccggcaagacccaggagtacaacaacagccccgagggcagcagcaccgtgatgctgcagctgaaccccagaggcgccgccaagccccagctgagcgccgcccagctgcagatggagaagaagatgaacgagcccgtgagcggccaggagcccaccaaggtgagccaggtggagagccccgaggccaagggcggcctgcccgaggagagaagctgcctggccgaggtgagcgtgagcagccccgaggtgcaggagaaggagagcaaggaggagatcaagagcgacacccccaccagcaactggctgaccgccaagagcggcagaaagaagagatgcccctacaccaagcaccagaccctggagctggagaaggagttcctgttcaacatgtacctgaccagagagagaagactggagatcagcaagagcgtgaacctgaccgacagacaggtgaagatctggttccagaacagaagaatgaagctgaagaagatgagcagagagaacagaatcagagagctgaccgccaacctgaccttcagctag

SEQ ID NO: 84729 - DNA, 1017 bp, synthetic construct
  misc_feature 1..1017: note = Description of Artificial Sequence: Synthetic coding sequence
  source 1..1017: mol_type = other DNA
atgaacgacttcgacgagtgcggccagagcgccgccagcatgtacctgcccggctgcgcctactacgtggcccccagcgacttcgccagcaagcccagcttcctgagccagcccagcagctgccagatgaccttcccctacagcagcaacctggccccccacgtgcagcccgtgagagaggtggccttcagagactacggcctggagagagccaagtggccctacagaggcggcggcggcggcggcagcgccggcggcggcagcagcggcggcggccccggcggcggcggcggcggcgccggcggctacgccccctactacgccgccgccgccgccgccgccgccgccgccgccgccgccgaggaggccgccatgcagagagagctgctgccccccgccggcagaagacccgacgtgctgttcaaggcccccgagcccgtgtgcgccgcccccggccccccccacggccccgccggcgccgccagcaacttctacagcgccgtgggcagaaacggcatcctgccccagggcttcgaccagttctacgaggccgcccccggcccccccttcgccggcccccagcccccccccccccccgcccccccccagcccgagggcgccgccgacaagggcgaccccagaaccggcgccggcggcggcggcggcagcccctgcaccaaggccacccccggcagcgagcccaagggcgccgccgagggcagcggcggcgacggcgagggcccccccggcgaggccggcgccgagaagagcagcagcgccgtggccccccagagaagcagaaagaagagatgcccctacaccaagtaccagatcagagagctggagagagagttcttcttcaacgtgtacatcaacaaggagaagagactgcagctgagcagaatgctgaacctgaccgacagacaggtgaagatctggttccagaacagaagaatgaaggagaagaagctgaacagagacagactgcagtacttcaccggcaaccccctgttctag

SEQ ID NO: 84730 - DNA, 480 bp, synthetic construct
  misc_feature 1..480: note = Description of Artificial Sequence: Synthetic coding sequence
  source 1..480: mol_type = other DNA
atgtacctgcccggctgcgcctactacgtggcccccagcgacttcgccagcaagcccagcttcctgagccagcccagcagctgccagatgaccttcccctacagcagcaacctggcccccggcggcggcagcccctgcaccaaggccacccccggcagcgagcccaagggcgccgccgagggcagcggcggcgacggcgagggcccccccggcgaggccggcgccgagaagagcagcagcgccgtggccccccagagaagcagaaagaagagatgcccctacaccaagtaccagatcagagagctggagagagagttcttcttcaacgtgtacatcaacaaggagaagagactgcagctgagcagaatgctgaacctgaccgacagacaggtgaagatctggttccagaacagaagaatgaaggagaagaagctgaacagagacagactgcagtacttcaccggcaaccccctgttctag

SEQ ID NO: 84731 - DNA, 813 bp, synthetic construct
  misc_feature 1..813: note = Description of Artificial Sequence: Synthetic coding sequence
  source 1..813: mol_type = other DNA
atgtgcgagagaagcctgtacagagccggctacgtgggcagcctgctgaacctgcagagccccgacagcttctacttcagcaacctgagacccaacggcggccagctggccgccctgccccccatcagctaccccagaggcgccctgccctgggccgccacccccgccagctgcgcccccgcccagcccgccggcgccaccgccttcggcggcttcagccagccctacctggccggcagcggccccctgggcctgcagccccccaccgccaaggacggccccgaggagcaggccaagttctacgcccccgaggccgccgccggccccgaggagagaggcagaaccagacccagcttcgcccccgagagcagcctggcccccgccgtggccgccctgaaggccgccaagtacgactacgccggcgtgggcagagccacccccggcagcaccaccctgctgcagggcgccccctgcgcccccggcttcaaggacgacaccaagggccccctgaacctgaacatgaccgtgcaggccgccggcgtggccagctgcctgagacccagcctgcccgacggcctgccctggggcgccgcccccggcagagccagaaagaagagaaagccctacaccaagcagcagatcgccgagctggagaacgagttcctggtgaacgagttcatcaacagacagaagagaaaggagctgagcaacagactgaacctgagcgaccagcaggtgaagatctggttccagaacagaagaatgaagaagaagagagtggtgctgagagagcaggccctggccctgtactag

SEQ ID NO: 84732 - DNA, 1299 bp, synthetic construct
  misc_feature 1..1299: note = Description of Artificial Sequence: Synthetic coding sequence
  source 1..1299: mol_type = other DNA
atgctgttcgagcagggccagcaggccctggagctgcccgagtgcaccatgcagaaggccgcctactacgagaaccccggcctgttcggcggctacggctacagcaagaccaccgacacctacggctacagcaccccccaccagccctaccccccccccgccgccgccagcagcctggacaccgactaccccggcagcgcctgcagcatccagagcagcgcccccctgagagcccccgcccacaagggcgccgagctgaacggcagctgcatgagacccggcaccggcaacagccagggcggcggcggcggcagccagccccccggcctgaacagcgagcagcagcccccccagccccccccccccccccccaccctgccccccagcagccccaccaaccccggcggcggcgtgcccgccaagaagcccaagggcggccccaacgccagcagcagcagcgccaccatcagcaagcagatcttcccctggatgaaggagagcagacagaacagcaagcagaagaacagctgcgccaccgccggcgagagctgcgaggacaagagcccccccggccccgccagcaagagagtgagaaccgcctacaccagcgcccagctggtggagctggagaaggagttccacttcaacagatacctgtgcagacccagaagagtggagatggccaacctgctgaacctgaccgagagacagatcaagatctggttccagaacagaagaatgaagtacaagaaggaccagaaggccaagggcatcctgcacagccccgccagccagagccccgagagaagcccccccctgggcggcgccgccggccacgtggcctacagcggccagctgccccccgtgcccggcctggcctacgacgcccccagcccccccgccttcgccaagagccagcccaacatgtacggcctggccgcctacaccgcccccctgagcagctgcctgccccagcagaagagatacgccgcccccgagttcgagccccaccccatggccagcaacggcggcggcttcgccagcgccaacctgcagggcagccccgtgtacgtgggcggcaacttcgtggagagcatggcccccgccagcggccccgtgttcaacctgggccacctgagccaccccagcagcgccagcgtggactacagctgcgccgcccagatccccggcaaccaccaccacggcccctgcgacccccaccccacctacaccgacctgagcgcccaccacagcagccagggcagactgcccgaggcccccaagctgacccacctgtag

SEQ ID NO: 84733 - DNA, 1299 bp, synthetic construct; identical to SEQ ID NO: 84732
  misc_feature 1..1299: note = Description of Artificial Sequence: Synthetic coding sequence
  source 1..1299: mol_type = other DNA

SEQ ID NO: 84734 - DNA, 303 bp, synthetic construct
  misc_feature 1..303: note = Description of Artificial Sequence: Synthetic coding sequence
  source 1..303: mol_type = other DNA
atgctgttcgagcagggccagcaggccctggagctgcccgagtgcaccatgcagaaggccgcctactacgagaaccccggcctgttcggcggctacggctacagcaagaccaccgacacctacggctacagcaccccccaccagccctaccccccccccgccgccgccagcagcctggacaccgactaccccggcagcgcctgcagcatccagagcagcgcccccctgagagcccccgcccacaagggcgccgagctgaacggcagctgcatgagacccggcaccggcaacagccagggctag

SEQ ID NO: 84735 - DNA, 1299 bp, synthetic construct; identical to SEQ ID NO: 84732
  misc_feature 1..1299: note = Description of Artificial Sequence: Synthetic coding sequence
  source 1..1299: mol_type = other DNA

SEQ ID NO: 84736 - DNA, 768 bp, synthetic construct
  misc_feature 1..768: note = Description of Artificial Sequence: Synthetic coding sequence
  source 1..768: mol_type = other DNA
atggtgatgagcagctacatggtgaacagcaagtacgtggaccccaagttccccccctgcgaggagtacctgcagggcggctacctgggcgagcagggcgccgactactacggcggcggcgcccagggcgccgacttccagccccccggcctgtaccccagacccgacttcggcgagcagcccttcggcggcagcggccccggccccggcagcgccctgcccgccagaggccacggccaggagcccggcggccccggcggccactacgccgcccccggcgagccctgccccgccccccccgcccccccccccgcccccctgcccggcgccagagcctacagccagagcgaccccaagcagccccccagcggcaccgccctgaagcagcccgccgtggtgtacccctggatgaagaaggtgcacgtgaacagcgtgaaccccaactacaccggcggcgagcccaagagaagcagaaccgcctacaccagacagcaggtgctggagctggagaaggagttccacttcaacagatacctgaccagaagaagaagaatcgagatcgcccacaccctgtgcctgagcgagagacagatcaagatctggttccagaacagaagaatgaagtggaagaaggaccacaagctgcccaacaccaagggcagaagcagcagcagcagcagcagcagcagctgcagcagcagcgtggcccccagccagcacctgcagcccatggccaaggaccaccacaccgacctgaccaccctgtag

SEQ ID NO: 84737 - DNA, 873 bp, synthetic construct
  misc_feature 1..873: note = Description of Artificial Sequence: Synthetic coding sequence
  source 1..873: mol_type = other DNA
atgagcagctacttcgtgaaccccctgtacagcaagtacaaggccgccgccgccgccgccgccgccgccggcgaggccatcaaccccacctactacgactgccacttcgcccccgaggtgggcggcagacacgccgccgccgccgccgccctgcagctgtacggcaacagcgccgccggcttcccccacgcccccccccaggcccacgcccacccccaccccagccccccccccagcggcaccggctgcggcggcagagagggcagaggccaggagtacttccaccccggcggcggcagccccgccgccgcctaccaggccgccccccccccccccccccacccccccccccccccccccccccccccctgcggcggcatcgcctgccacggcgagcccgccaagttctacggctacgacaacctgcagagacagcccatcttcaccacccagcaggaggccgagctggtgcagtaccccgactgcaagagcagcagcggcaacatcggcgaggaccccgaccacctgaaccagagcagcagccccagccagatgttcccctggatgagaccccaggccgcccccggcagaagaagaggcagacagacctacagcagattccagaccctggagctggagaaggagttcctgttcaacccctacctgaccagaaagagaagaatcgaggtgagccacgccctggccctgaccgagagacaggtgaagatctggttccagaacagaagaatgaagtggaagaaggagaacaacaaggacaagttccccgtgagcagacaggaggtgaaggacggcgagaccaagaaggaggcccaggagctggaggaggacagagccgagggcctgaccaactag

SEQ ID NO: 84738 - DNA, 870 bp, synthetic construct
  misc_feature 1..870: note = Description of Artificial Sequence: Synthetic coding sequence
  source 1..870: mol_type = other DNA
atgagcagctacttcgtgaaccccctgtacagcaagtacaaggccgccgccgccgccgccgccgccgccggcgaggccatcaaccccacctactacgactgccacttcgcccccgaggtgggcggcagacacgccgccgccgccgccgccctgcagctgtacggcaacagcgccgccggcttcccccacgcccccccccaggcccacgcccacccccaccccagccccccccccagcggcaccggctgcggcggcagagagggcagaggccaggagtacttccaccccggcggcggcagccccgccgccgcctaccaggccgccccccccccccccccccacccccccccccccccccccccccccccctgcggcggcatcgcctgccacggcgagcccgccaagttctacggctacgacaacctgcagagacagcccatcttcaccacccagcaggaggccgagctggtgcagtaccccgactgcaagagcagcagcggcaacatcggcgaggaccccgaccacctgaaccagagcagcagccccagccagatgttcccctggatgagaccccaggcccccggcagaagaagaggcagacagacctacagcagattccagaccctggagctggagaaggagttcctgttcaacccctacctgaccagaaagagaagaatcgaggtgagccacgccctggccctgaccgagagacaggtgaagatctggttccagaacagaagaatgaagtggaagaaggagaacaacaaggacaagttccccgtgagcagacaggaggtgaaggacggcgagaccaagaaggaggcccaggagctggaggaggacagagccgagggcctgaccaactag

SEQ ID NO: 84739 - DNA, 870 bp, synthetic construct; identical to SEQ ID NO: 84738
  misc_feature 1..870: note = Description of Artificial Sequence: Synthetic coding sequence
  source 1..870: mol_type = other DNA

SEQ ID NO: 84740 - DNA, 321 bp, synthetic construct
  misc_feature 1..321: note = Description of Artificial Sequence: Synthetic coding sequence
  source 1..321: mol_type = other DNA
atgttcccctggatgagaccccaggccgcccccggcagaagaagaggcagacagacctacagcagattccagaccctggagctggagaaggagttcctgttcaacccctacctgaccagaaagagaagaatcgaggtgagccacgccctggccctgaccgagagacaggtgaagatctggttccagaacagaagaatgaagtggaagaaggagaacaacaaggacaagttccccgtgagcagacaggaggtgaaggacggcgagaccaagaaggaggcccaggagctggaggaggacagagccgagggcctgaccaactag

SEQ ID NO: 84741 - DNA, 1059 bp, synthetic construct
  misc_feature 1..1059: note = Description of Artificial Sequence: Synthetic coding sequence
  source 1..1059: mol_type = other DNA
atgctgggcggcagcgccggcagactgaagatgagcagcagcggcaccctgagcaactactacgtggacagcctgatcggccacgagggcgacgaggtgttcgccgccagattcggcccccccggccccggcgcccagggcagacccgccggcgtggccgacggccccgccgccaccgccgccgagttcgccagctgcagcttcgcccccagaagcgccgtgttcagcgccagctggagcgccgtgcccagccagccccccgccgccgccgccatgagcggcctgtaccacccctacgtgccccccccccccctggccgccagcgccagcgagcccggcagatacgtgagaagctggatggagcccctgcccggcttccccggcggcgccggcggcggcggcggcggcggcggcggcggccccggcagaggccccagccccggccccagcggccccgccaacggcagacactacggcatcaagcccgagaccagagccgcccccgcccccgccaccgccgccagcaccaccagcagcagcagcaccagcctgagcagcagcagcaagagaaccgagtgcagcgtggccagagagagccagggcagcagcggccccgagttcagctgcaacagcttcctgcaggagaaggccgccgccgccaccggcggcaccggccccggcgccggcatcggcgccgccaccggcaccggcggcagcagcgagcccagcgcctgcagcgaccaccccatccccggctgcagcctgaaggaggaggagaagcagcacagccagccccagcagcagcagctggaccccaacaaccccgccgccaactggatccacgccagaagcaccagaaagaagagatgcccctacaccaagtaccagaccctggagctggagaaggagttcctgttcaacatgtacctgaccagagacagaagatacgaggtggccagaatcctgaacctgaccgagagacaggtgaagatctggttccagaacagaagaatgaagatgaagaagatgagcaaggagaagtgccccaagggcgactag

SEQ ID NO: 84742 - DNA, 2757 bp, synthetic construct
  misc_feature 1..2757: note = Description of Artificial Sequence: Synthetic coding sequence
  source 1..2757: mol_type = other DNA
ctgcagcccgtgtacgagagcatggccagccacgtgcaggtgttcagcccccacaccctgcagagcagcgccttctgcagcgtgaagaagctgaagatcgagcccagcagcaactgggacatgaccggctacggcagccacagcaaggtgtacagccagagcaagaacatccccctgagccagcccgccaccaccaccgtgagcaccagcctgcccgtgcccaaccccagcctgccctacgagcagaccatcgtgttccccggcagcaccggccacatcgtggtgaccagcgccagcagcaccagcgtgaccggccaggtgctgggcggcccccacaacctgatgagaagaagcaccgtgagcctgctggacacctaccagaagtgcggcctgaagagaaagagcgaggagatcgagaacaccagcagcgtgcagatcatcgaggagcacccccccatgatccagaacaacgccagcggcgccaccgtggccaccgccaccaccagcaccgccaccagcaagaacagcggcagcaacagcgagggcgactaccagctggtgcagcacgaggtgctgtgcagcatgaccaacacctacgaggtgctggagttcctgggcagaggcaccttcggccaggtggtgaagtgctggaagagaggcaccaacgagatcgtggccatcaagatcctgaagaaccaccccagctacgccagacagggccagatcgaggtgagcatcctggccagactgagcaccgagagcgccgacgactacaacttcgtgagagcctacgagtgcttccagcacaagaaccacacctgcctggtgttcgagatgctggagcagaacctgtacgacttcctgaagcagaacaagttcagccccctgcccctgaagtacatcagacccgtgctgcagcaggtggccaccgccctgatgaagctgaagagcctgggcctgatccacgccgacctgaagcccgagaacatcatgctggtggaccccagcagacagccctacagagtgaaggtgatcgacttcggcagcgccagccacgtgagcaaggccgtgtgcagcacctacctgcagagcagatactacagagcccccgagatcatcctgggcctgcccttctgcgaggccatcgacatgtggagcctgggctgcgtgatcgccgagctgttcctgggctggcccctgtaccccggcgccagcgagtacgaccagatcagatacatcagccagacccagggcctgcccgccgagtacctgctgagcgccggcaccaagaccaccagattcttcaacagagacaccgacagcccctaccccctgtggagactgaagacccccgacgaccacgaggccgagaccggcatcaagagcaaggaggccagaaagtacatcttcaactgcctggacgacatggcccaggtgaacatgaccaccgacctggagggcagcgacatgctggtggagaaggccgacagaagagagttcatcgacctgctgaagaagatgctgaccatcgacgccgacaagagaatcacccccatcgagaccctgaaccaccccttcgtgaccatgacccacctgctggacttcccccacagcacccacgtgaagagctgcttccagaacatggagatctgcaagagaagagtgaacatgtacgacaccgtgaaccagagcaagacccccttcatcacccacgtggcccccagcaccagcaccaacctgaccatgaccttcaacaaccagctgaccaccgtgcacaaccaggcccccagcagcaccagcgccaccatcagcctggccaaccccgaggtgagcatcctgaactaccccagcaccctgtaccagcccagcgccgccagcatggccgccgtggcccagagaagcatgcccctgcagaccggcaccgcccagatctgcgccagacccgaccccttccagcaggccctgatcgtgtgcccccccggcttccagggcctgcaggccagccccagcaagcacgccggctacagcgtgagaatggagaacgccgtgcccatcgtgacccaggcccccggcgcccagcccctgcagatccagcccggcctgctggcccagcaggcctggcccagcggcacccagcagatcctgctgccccccgcctggcagcagctgaccggcgtggccacccacaccagcgtgcagcacgccaccgtgatccccgagaccatggccggcacccagcagctggccgactggagaaacacccacgcccacggcagccactacaaccccatcatgcagcagcccgccctgctgaccggccacgtgaccctgcccgccgcccagcccctgaacgtgggcgtggcccacgtgatgagacagcagcccaccagcaccaccagcagcagaaagagcaagcagcaccagagcagccagagaaagaacgtgatcagctgcgtgaccgtgcacgacagcccctacagcgacagcagcagcaacaccagcccctacagcgtgcagcagagagccggccacaacaacgccaacgccttcgacaccaagggcagcctggagaaccactgcaccggcaaccccagaaccatcatcgtgccccccctgaagacccaggccagcgaggtgctggtggagtgcgacagcctggtgcccggcaacctgggccccggccagggcagaaacctgagcctggagagcggcttccccgccttcctgctgctggagatgctgctgtacggcagctag

SEQ ID NO: 84743 - DNA, 3597 bp, synthetic construct
  misc_feature 1..3597: note = Description of Artificial Sequence: Synthetic coding sequence
  source 1..3597: mol_type = other DNA
atggcccccgtgtacgagggcatggccagccacgtgcaggtgttcagcccccacaccctgcagagcagcgccttctgcagcgtgaagaagctgaagatcgagcccagcagcaactgggacatgaccggctacggcagccacagcaaggtgtacagccagagcaagaacatccccctgagccagcccgccaccaccaccgtgagcaccagcctgcccgtgcccaaccccagcctgccctacgagcagaccatcgtgttccccggcagcaccggccacatcgtggtgaccagcgccagcagcaccagcgtgaccggccaggtgctgggcggcccccacaacctgatgagaagaagcaccgtgagcctgctggacacctaccagaagtgcggcctgaagagaaagagcgaggagatcgagaacaccagcagcgtgcagatcatcgaggagcacccccccatgatccagaacaacgccagcggcgccaccgtggccaccgccaccaccagcaccgccaccagcaagaacagcggcagcaacagcgagggcgactaccagctggtgcagcacgaggtgctgtgcagcatgaccaacacctacgaggtgctggagttcctgggcagaggcaccttcggccaggtggtgaagtgctggaagagaggcaccaacgagatcgtggccatcaagatcctgaagaaccaccccagctacgccagacagggccagatcgaggtgagcatcctggccagactgagcaccgagagcgccgacgactacaacttcgtgagagcctacgagtgcttccagcacaagaaccacacctgcctggtgttcgagatgctggagcagaacctgtacgacttcctgaagcagaacaagttcagccccctgcccctgaagtacatcagacccgtgctgcagcaggtggccaccgccctgatgaagctgaagagcctgggcctgatccacgccgacctgaagcccgagaacatcatgctggtggaccccagcagacagccctacagagtgaaggtgatcgacttcggcagcgccagccacgtgagcaaggccgtgtgcagcacctacctgcagagcagatactacagagcccccgagatcatcctgggcctgcccttctgcgaggccatcgacatgtggagcctgggctgcgtgatcgccgagctgttcctgggctggcccctgtaccccggcgccagcgagtacgaccagatcagatacatcagccagacccagggcctgcccgccgagtacctgctgagcgccggcaccaagaccaccagattcttcaacagagacaccgacagcccctaccccctgtggagactgaagacccccgacgaccacgaggccgagaccggcatcaagagcaaggaggccagaaagtacatcttcaactgcctggacgacatggcccaggtgaacatgaccaccgacctggagggcagcgacatgctggtggagaaggccgacagaagagagttcatcgacctgctgaagaagatgctgaccatcgacgccgacaagagaatcacccccatcgagaccctgaaccaccccttcgtgaccatgacccacctgctggacttcccccacagcacccacgtgaagagctgcttccagaacatggagatctgcaagagaagagtgaacatgtacgacaccgtgaaccagagcaagacccccttcatcacccacgtggcccccagcaccagcaccaacctgaccatgaccttcaacaaccagctgaccaccgtgcacaaccaggcccccagcagcaccagcgccaccatcagcctggccaaccccgaggtgagcatcctgaactaccccagcaccctgtaccagcccagcgccgccagcatggccgccgtggcccagagaagcatgcccctgcagaccggcaccgcccagatctgcgccagacccgaccccttccagcaggccctgatcgtgtgcccccccggcttccagggcctgcaggccagccccagcaagcacgccggctacagcgtgagaatggagaacgccgtgcccatcgtgacccaggcccccggcgcccagcccctgcagatccagcccggcctgctggcccagcaggcctggcccagcggcacccagcagatcctgctgccccccgcctggcagcagctgaccggcgtggccacccacaccagcgtgcagcacgccaccgtgatccccgagaccatggccggcacccagcagctggccgactggagaaacacccacgcccacggcagccactacaaccccatcatgcagcagcccgccctgctgaccggccacgtgaccctgcccgccgcccagcccctgaacgtgggcgtggcccacgtgatgagacagcagcccaccagcaccaccagcagcagaaagagcaagcagcaccagagcagcgtgagaaacgtgagcacctgcgaggtgagcagcagccaggccatcagcagcccccagagaagcaagagagtgaaggagaacaccccccccagatgcgccatggtgcacagcagccccgcctgcagcaccagcgtgacctgcggctggggcgacgtggccagcagcaccaccagagagagacagagacagaccatcgtgatccccgacacccccagccccaccgtgagcgtgatcaccatcagcagcgacaccgacgaggaggaggagcagaagcacgcccccaccagcaccgtgagcaagcagagaaagaacgtgatcagctgcgtgaccgtgcacgacagcccctacagcgacagcagcagcaacaccagcccctacagcgtgcagcagagagccggccacaacaacgccaacgccttcgacaccaagggcagcctggagaaccactgcaccggcaaccccagaaccatcatcgtgccccccctgaagacccaggccagcgaggtgctggtggagtgcgacagcctggtgcccgtgaacaccagccaccacagcagcagctacaagagcaagagcagcagcaacgtgaccagcaccagcggccacagcagcggcagcagcagcggcgccatcacctacagacagcagagacccggcccccacttccagcagcagcagcccctgaacctgagccaggcccagcagcacatcaccaccgacagaaccggcagccacagaagacagcaggcctacatcacccccaccatggcccaggccccctacagcttcccccacaacagccccagccacggcaccgtgcacccccacctggccgccgccgccgccgccgcccacctgcccacccagccccacctgtacacctacaccgcccccgccgccctgggcagcaccggcaccgtggcccacctggtggccagccagggcagcgccagacacaccgtgcagcacaccgcctaccccgccagcatcgtgcaccaggtgcccgtgagcatgggccccagagtgctgcccagccccaccatccaccccagccagtaccccgcccagttcgcccaccagacctacatcagcgccagccccgccagcaccgtgtacaccggctaccccctgagccccgccaaggtgaaccagtacccctacatctag

SEQ ID NO: 84744 - DNA, 3516 bp, synthetic construct
  misc_feature 1..3516: note = Description of Artificial Sequence: Synthetic coding sequence
  source 1..3516: mol_type = other DNA
atggcccccgtgtacgagggcatggccagccacgtgcaggtgttcagcccccacaccctgcagagcagcgccttctgcagcgtgaagaagctgaagatcgagcccagcagcaactgggacatgaccggctacggcagccacagcaaggtgtacagccagagcaagaacatccccctgagccagcccgccaccaccaccgtgagcaccagcctgcccgtgcccaaccccagcctgccctacgagcagaccatcgtgttccccggcagcaccggccacatcgtggtgaccagcgccagcagcaccagcgtgaccggccaggtgctgggcggcccccacaacctgatgagaagaagcaccgtgagcctgctggacacctaccagaagtgcggcctgaagagaaagagcgaggagatcgagaacaccagcagcgtgcagatcatcgaggagcacccccccatgatccagaacaacgccagcggcgccaccgtggccaccgccaccaccagcaccgccaccagcaagaacagcggcagcaacagcgagggcgactaccagctggtgcagcacgaggtgctgtgcagcatgaccaacacctacgaggtgctggagttcctgggcagaggcaccttcggccaggtggtgaagtgctggaagagaggcaccaacgagatcgtggccatcaagatcctgaagaaccaccccagctacgccagacagggccagatcgaggtgagcatcctggccagactgagcaccgagagcgccgacgactacaacttcgtgagagcctacgagtgcttccagcacaagaaccacacctgcctggtgttcgagatgctggagcagaacctgtacgacttcctgaagcagaacaagttcagccccctgcccctgaagtacatcagacccgtgctgcagcaggtggccaccgccctgatgaagctgaagagcctgggcctgatccacgccgacctgaagcccgagaacatcatgctggtggaccccagcagacagccctacagagtgaaggtgatcgacttcggcagcgccagccacgtgagcaaggccgtgtgcagcacctacctgcagagcagatactacagagcccccgagatcatcctgggcctgcccttctgcgaggccatcgacatgtggagcctgggctgcgtgatcgccgagctgttcctgggctggcccctgtaccccggcgccagcgagtacgaccagatcagatacatcagccagacccagggcctgcccgccgagtacctgctgagcgccggcaccaagaccaccagattcttcaacagagacaccgacagcccctaccccctgtggagactgaagacccccgacgaccacgaggccgagaccggcatcaagagcaaggaggccagaaagtacatcttcaactgcctggacgacatggcccaggtgaacatgaccaccgacctggagggcagcgacatgctggtggagaaggccgacagaagagagttcatcgacctgctgaagaagatgctgaccatcgacgccgacaagagaatcacccccatcgagaccctgaaccaccccttcgtgaccatgacccacctgctggacttcccccacagcacccacgtgaagagctgcttccagaacatggagatctgcaagagaagagtgaacatgtacgacaccgtgaaccagagcaagacccccttcatcacccacgtggcccccagcaccagcaccaacctgaccatgaccttcaacaaccagctgaccaccgtgcacaaccagcccagcgccgccagcatggccgccgtggcccagagaagcatgcccctgcagaccggcaccgcccagatctgcgccagacccgaccccttccagcaggccctgatcgtgtgcccccccggcttccagggcctgcaggccagccccagcaagcacgccggctacagcgtgagaatggagaacgccgtgcccatcgtgacccaggcccccggcgcccagcccctgcagatccagcccggcctgctggcccagcaggcctggcccagcggcacccagcagatcctgctgccccccgcctggcagcagctgaccggcgtggccacccacaccagcgtgcagcacgccaccgtgatccccgagaccatggccggcacccagcagctggccgactggagaaacacccacgcccacggcagccactacaaccccatcatgcagcagcccgccctgctgaccggccacgtgaccctgcccgccgcccagcccctgaacgtgggcgtggcccacgtgatgagacagcagcccaccagcaccaccagcagcagaaagagcaagcagcaccagagcagcgtgagaaacgtgagcacctgcgaggtgagcagcagccaggccatcagcagcccccagagaagcaagagagtgaaggagaacaccccccccagatgcgccatggtgcacagcagccccgcctgcagcaccagcgtgacctgcggctggggcgacgtggccagcagcaccaccagagagagacagagacagaccatcgtgatccccgacacccccagccccaccgtgagcgtgatcaccatcagcagcgacaccgacgaggaggaggagcagaagcacgcccccaccagcaccgtgagcaagcagagaaagaacgtgatcagctgcgtgaccgtgcacgacagcccctacagcgacagcagcagcaacaccagcccctacagcgtgcagcagagagccggccacaacaacgccaacgccttcgacaccaagggcagcctggagaaccactgcaccggcaaccccagaaccatcatcgtgccccccctgaagacccaggccagcgaggtgctggtggagtgcgacagcctggtgcccgtgaacaccagccaccacagcagcagctacaagagcaagagcagcagcaacgtgaccagcaccagcggccacagcagcggcagcagcagcggcgccatcacctacagacagcagagacccggcccccacttccagcagcagcagcccctgaacctgagccaggcccagcagcacatcaccaccgacagaaccggcagccacagaagacagcaggcctacatcacccccaccatggcccaggccccctacagcttcccccacaacagccccagccacggcaccgtgcacccccacctggccgccgccgccgccgccgcccacctgcccacccagccccacctgtacacctacaccgcccccgccgccctgggcagcaccggcaccgtggcccacctggtggccagccagggcagcgccagacacaccgtgcagcacaccgcctaccccgccagcatcgtgcaccaggtgcccgtgagcatgggccccagagtgctgcccagccccaccatccaccccagccagtaccccgcccagttcgcccaccagacctacatcagcgccagccccgccagcaccgtgtacaccggctaccccctgagccccgccaaggtgaaccagtacccctacatctag

SEQ ID NO: 84745 - DNA, 3648 bp, synthetic construct
  misc_feature 1..3648: note = Description of Artificial Sequence: Synthetic coding sequence
  source 1..3648: mol_type = other DNA
atggccagccaggtgctggtgtaccccccctacgtgtaccagacccagagcagcgccttctgcagcgtgaagaagctgaaggtggagcccagcagctgcgtgttccaggagagaaactaccccagaacctacgtgaacggcagaaacttcggcaacagccacccccccaccaagggcagcgccttccagaccaagatccccttcaacagacccagaggccacaacttcagcctgcagaccagcgccgtggtgctgaagaacaccgccggcgccaccaaggtgatcgccgcccaggcccagcaggcccacgtgcaggccccccagatcggcgcctggagaaacagactgcacttcctggagggcccccagagatgcggcctgaagagaaagagcgaggagctggacaaccacagcagcgccatgcagatcgtggacgagctgagcatcctgcccgccatgctgcagaccaacatgggcaaccccgtgaccgtggtgaccgccaccaccggcagcaagcagaactgcaccaccggcgagggcgactaccagctggtgcagcacgaggtgctgtgcagcatgaagaacacctacgaggtgctggacttcctgggcagaggcaccttcggccaggtggtgaagtgctggaagagaggcaccaacgagatcgtggccatcaagatcctgaagaaccaccccagctacgccagacagggccagatcgaggtgagcatcctggccagactgagcaccgagaacgccgacgagtacaacttcgtgagagcctacgagtgcttccagcacagaaaccacacctgcctggtgttcgagatgctggagcagaacctgtacgacttcctgaagcagaacaagttcagccccctgcccctgaaggtgatcagacccatcctgcagcaggtggccaccgccctgaagaagctgaagagcctgggcctgatccacgccgacctgaagcccgagaacatcatgctggtggaccccgtgagacagccctacagagtgaaggtgatcgacttcggcagcgccagccacgtgagcaagaccgtgtgcagcacctacctgcagagcagatactacagagcccccgagatcatcctgggcctgcccttctgcgaggccatcgacatgtggagcctgggctgcgtgatcgccgagctgttcctgggctggcccctgtaccccggcgccctggagtacgaccagatcagatacatcagccagacccagggcctgcccggcgagcagctgctgaacgtgggcaccaagagcaccagattcttctgcaaggagaccgacatgagccacagcggctggagactgaagaccctggaggagcacgaggccgagaccggcatgaagagcaaggaggccagaaagtacatcttcaacagcctggacgacgtggcccacgtgaacaccgtgatggacctggagggcagcgacctgctggccgagaaggccgacagaagagagttcgtgagcctgctgaagaagatgctgctgatcgacgccgacctgagaatcacccccgccgagaccctgaaccaccccttcgtgaacatgaagcacctgctggacttcccccacagcaaccacgtgaagagctgcttccacatcatggacatctgcaagagccacctgaacagctgcgacaccaacaaccacaacaagaccagcctgctgagacccgtggccagcagcagcaccgccaccctgaccgccaacttcaccaagatcggcaccctgagaagccaggccctgaccaccagcgcccacagcgtggtgcaccacggcatccccctgcaggccggcaccgcccagttcggctgcggcgacgccttccagcagaccctgatcatctgcccccccgccatccagggcatccccgccacccacggcaagcccaccagctacagcatcagagtggacaacaccgtgcccctggtgacccaggcccccgccgtgcagcccctgcagatcagacccggcgtgctgagccagacctggagcggcagaacccagcagatgctggtgcccgcctggcagcaggtgacccccctggcccccgccaccaccaccctgaccagcgagagcgtggccggcagccacagactgggcgactggggcaagatgatcagctgcagcaaccactacaacagcgtgatgccccagcccctgctgaccaaccagatcaccctgagcgccccccagcccgtgagcgtgggcatcgcccacgtggtgtggccccagcccgccaccaccaagaagaacaagcagtgccagaacagaggcatcctggtgaagctgatggagtgggagcccggcagagaggagatcaacgccttcagctggagcaacagcctgcagaacaccaacatcccccacagcgccttcatcagccccaagatcatcaacggcaaggacgtggaggaggtgagctgcatcgagacccaggacaaccagaacagcgagggcgaggccagaaactgctgcgagaccagcatcagacaggacagcgacagcagcgtgagcgacaagcagagacagaccatcatcatcgccgacagccccagccccgccgtgagcgtgatcaccatcagcagcgacaccgacgaggaggagaccagccagagacacagcctgagagagtgcaagggcagcctggactgcgaggcctgccagagcaccctgaacatcgacagaatgtgcagcctgagcagccccgacagcaccctgagcaccagcagcagcggccagagcagccccagcccctgcaagagacccaacagcatgagcgacgaggagcaggagagcagctgcgacaccgtggacggcagccccaccagcgacagcagcggccacgacagccccttcgccgagagcaccttcgtggaggacacccacgagaacaccgagctggtgagcagcgccgacaccgagaccaagcccgccgtgtgcagcgtggtggtgccccccgtggagctggagaacggcctgaacgccgacgagcacatggccaacaccgacagcatctgccagcccctgatcaagggcagaagcgcccccggcagactgaaccagcccagcgccgtgggcaccagacagcagaagctgaccagcgccttccagcagcagcacctgaacttcagccaggtgcagcacttcggcagcggccaccaggagtggaacggcaacttcggccacagaagacagcaggcctacatccccaccagcgtgaccagcaaccccttcaccctgagccacggcagccccaaccacaccgccgtgcacgcccacctggccggcaacacccacctgggcggccagcccaccctgctgccctaccccagcagcgccaccctgagcagcgccgcccccgtggcccacctgctggccagcccctgcaccagcagacccatgctgcagcaccccacctacaacatcagccaccccagcggcatcgtgcaccaggtgcccgtgggcctgaaccccagactgctgcccagccccaccatccaccagacccagtacaagcccatcttccccccccacagctacatcgccgccagccccgcctacaccggcttccccctgagccccaccaagctgagccagtacccctacatgtag

SEQ ID NO: 84746 - DNA, 3585 bp, synthetic construct
  misc_feature 1..3585: note = Description of Artificial Sequence: Synthetic coding sequence
  source 1..3585: mol_type = other DNA
atggccagccaggtgctggtgtaccccccctacgtgtaccagacccagagcagcgccttctgcagcgtgaagaagctgaaggtggagcccagcagctgcgtgttccaggagagaaactaccccagaacctacgtgaacggcagaaacttcggcaacagccacccccccaccaagggcagcgccttccagaccaagatccccttcaacagacccagaggccacaacttcagcctgcagaccagcgccgtggtgctgaagaacaccgccggcgccaccaaggtgatcgccgcccaggcccagcaggcccacgtgcaggccccccagatcggcgcctggagaaacagactgcacttcctggagggcccccagagatgcggcctgaagagaaagagcgaggagctggacaaccacagcagcgccatgcagatcgtggacgagctgagcatcctgcccgccatgctgcagaccaacatgggcaaccccgtgaccgtggtgaccgccaccaccggcagcaagcagaactgcaccaccggcgagggcgactaccagctggtgcagcacgaggtgctgtgcagcatgaagaacacctacgaggtgctggacttcctgggcagaggcaccttcggccaggtggtgaagtgctggaagagaggcaccaacgagatcgtggccatcaagatcctgaagaaccaccccagctacgccagacagggccagatcgaggtgagcatcctggccagactgagcaccgagaacgccgacgagtacaacttcgtgagagcctacgagtgcttccagcacagaaaccacacctgcctggtgttcgagatgctggagcagaacctgtacgacttcctgaagcagaacaagttcagccccctgcccctgaaggtgatcagacccatcctgcagcaggtggccaccgccctgaagaagctgaagagcctgggcctgatccacgccgacctgaagcccgagaacatcatgctggtggaccccgtgagacagccctacagagtgaaggtgatcgacttcggcagcgccagccacgtgagcaagaccgtgtgcagcacctacctgcagagcagatactacagagcccccgagatcatcctgggcctgcccttctgcgaggccatcgacatgtggagcctgggctgcgtgatcgccgagctgttcctgggctggcccctgtaccccggcgccctggagtacgaccagatcagatacatcagccagacccagggcctgcccggcgagcagctgctgaacgtgggcaccaagagcaccagattcttctgcaaggagaccgacatgagccacagcggctggagactgaagaccctggaggagcacgaggccgagaccggcatgaagagcaaggaggccagaaagtacatcttcaacagcctggacgacgtggcccacgtgaacaccgtgatggacctggagggcagcgacctgctggccgagaaggccgacagaagagagttcgtgagcctgctgaagaagatgctgctgatcgacgccgacctgagaatcacccccgccgagaccctgaaccaccccttcgtgaacatgaagcacctgctggacttcccccacagcaaccacgtgaagagctgcttccacatcatggacatctgcaagagccacctgaacagctgcgacaccaacaaccacaacaagaccagcctgctgagacccgtggccagcagcagcaccgccaccctgaccgccaacttcaccaagatcggcaccctgagaagccaggccctgaccaccagcgcccacagcgtggtgcaccacggcatccccctgcaggccggcaccgcccagttcggctgcggcgacgccttccagcagaccctgatcatctgcccccccgccatccagggcatccccgccacccacggcaagcccaccagctacagcatcagagtggacaacaccgtgcccctggtgacccaggcccccgccgtgcagcccctgcagatcagacccggcgtgctgagccagacctggagcggcagaacccagcagatgctggtgcccgcctggcagcaggtgacccccctggcccccgccaccaccaccctgaccagcgagagcgtggccggcagccacagactgggcgactggggcaagatgatcagctgcagcaaccactacaacagcgtgatgccccagcccctgctgaccaaccagatcaccctgagcgccccccagcccgtgagcgtgggcatcgcccacgtggtgtggccccagcccgccaccaccaagaagaacaagcagtgccagaacagaagcaacagcctgcagaacaccaacatcccccacagcgccttcatcagccccaagatcatcaacggcaaggacgtggaggaggtgagctgcatcgagacccaggacaaccagaacagcgagggcgaggccagaaactgctgcgagaccagcatcagacaggacagcgacagcagcgtgagcgacaagcagagacagaccatcatcatcgccgacagccccagccccgccgtgagcgtgatcaccatcagcagcgacaccgacgaggaggagaccagccagagacacagcctgagagagtgcaagggcagcctggactgcgaggcctgccagagcaccctgaacatcgacagaatgtgcagcctgagcagccccgacagcaccctgagcaccagcagcagcggccagagcagccccagcccctgcaagagacccaacagcatgagcgacgaggagcaggagagcagctgcgacaccgtggacggcagccccaccagcgacagcagcggccacgacagccccttcgccgagagcaccttcgtggaggacacccacgagaacaccgagctggtgagcagcgccgacaccgagaccaagcccgccgtgtgcagcgtggtggtgccccccgtggagctggagaacggcctgaacgccgacgagcacatggccaacaccgacagcatctgccagcccctgatcaagggcagaagcgcccccggcagactgaaccagcccagcgccgtgggcaccagacagcagaagctgaccagcgccttccagcagcagcacctgaacttcagccaggtgcagcacttcggcagcggccaccaggagtggaacggcaacttcggccacagaagacagcaggcctacatccccaccagcgtgaccagcaaccccttcaccctgagccacggcagccccaaccacaccgccgtgcacgcccacctggccggcaacacccacctgggcggccagcccaccctgctgccctaccccagcagcgccaccctgagcagcgccgcccccgtggcccacctgctggccagcccctgcaccagcagacccatgctgcagcaccccacctacaacatcagccaccccagcggcatcgtgcaccaggtgcccgtgggcctgaaccccagactgctgcccagccccaccatccaccagacccagtacaagcccatcttccccccccacagctacatcgccgccagccccgcctacaccggcttccccctgagccccaccaagctgagccagtacccctacatgtag

SEQ ID NO: 84747 - DNA, 3585 bp, synthetic construct; identical to SEQ ID NO: 84746
  misc_feature 1..3585: note = Description of Artificial Sequence: Synthetic coding sequence
  source 1..3585: mol_type = other DNA

SEQ ID NO: 84748 - DNA, 3585 bp, synthetic construct; identical to SEQ ID NO: 84746
  misc_feature 1..3585: note = Description of Artificial Sequence: Synthetic coding sequence
  source 1..3585: mol_type = other DNA

SEQ ID NO: 84749 - DNA, 231 bp, synthetic construct
  misc_feature 1..231: note = Description of Artificial Sequence: Synthetic coding sequence
  source 1..231: mol_type = other DNA
atggccagccaggtgctggtgtaccccccctacgtgtaccagacccagagcagcgccttctgcagcgtgaagaagctgaaggtggagcccagcagctgcgtgttccaggagagaaactaccccagaacctacgtgaacggcagaaacttcggcaacagccacccccccaccaagggcagcgccttccagaccaagatccccttcaacagacccagaggccacaacttctag

SEQ ID NO: 84750 - DNA, 1851 bp, synthetic construct
  misc_feature 1..1851: note = Description of Artificial Sequence: Synthetic coding sequence
  source 1..1851: mol_type = other DNA
atgagcaccatccagagcgagaccgactgctacgacatcatcgaggtgctgggcaagggcaccttcggcgaggtggccaagggctggagaagaagcaccggcgagatggtggccatcaagatcctgaagaacgacgcctacagaaacagaatcatcaagaacgagctgaagctgctgcactgcatgagaggcctggaccccgaggaggcccacgtgatcagattcctggagttcttccacgacgccctgaagttctacctggtgttcgagctgctggagcagaacctgttcgagttccagaaggagaacaacttcgcccccctgcccgccagacacatcagaaccgtgaccctgcaggtgctgaccgccctggccagactgaaggagctggccatcatccacgccgacctgaagcccgagaacatcatgctggtggaccagaccagatgccccttcagagtgaaggtgatcgacttcggcagcgccagcatcttcagcgaggtgagatacgtgaaggagccctacatccagagcagattctacagagcccccgagatcctgctgggcctgcccttctgcgagaaggtggacgtgtggagcctgggctgcgtgatggccgagctgcacctgggctggcccctgtaccccggcaacaacgagtacgaccaggtgagatacatctgcgagacccagggcctgcccaagccccacctgctgcacgccgcctgcaaggcccaccacttcttcaagagaaacccccaccccgacgccgccaacccctggcagctgaagagcagcgccgactacctggccgagaccaaggtgagacccctggagagaagaaagtacatgctgaagagcctggaccagatcgagaccgtgaacggcggcagcgtggccagcagactgaccttccccgacagagaggccctggccgagcacgccgacctgaagagcatggtggagctgatcaagagaatgctgacctgggagagccacgagagaatcagccccagcgccgccctgagacaccccttcgtgagcatgcagcagctgagaagcgcccacgagaccacccactactaccagctgagcctgagaagctacagactgagcctgcaggtggagggcaagccccccacccccgtggtggccgccgaggacggcaccccctactactgcctggccgaggagaaggaggccgccggcatgggcagcgtggccggcagcagccccttcttcagagaggagaaggcccccggcatgcagagagccatcgaccagctggacgacctgagcctgcaggaggccggccacggcctgtggggcgagacctgcaccaacgccgtgagcgacatgatggtgcccctgaaggccgccatcaccggccaccacgtgcccgacagcggccccgagcccatcctggccttctacagcagcagactggccggcagacacaaggccagaaagccccccgccggcagcaagagcgacagcaacttcagcaacctgatcagactgagccaggtgagccccgaggacgacagaccctgcagaggcagcagctgggaggagggcgagcacctgggcgccagcgccgagcccctggccatcctgcagagagacgaggacggccccaacatcgacaacatgaccatggaggccgagagacccgaccccgagctgttcgaccccagcagctgccccggcgagtggctgagcgagcccgactgcaccctggagagcgtgagaggccccagagcccagggcctgccccccagaagaagccaccagcacggcccccccagaggcgccaccagcttcctgcagcacgtgaccggccaccactag

SEQ ID NO: 84751 - DNA, 1746 bp, synthetic construct
  misc_feature 1..1746: note = Description of Artificial Sequence: Synthetic coding sequence
  source 1..1746: mol_type = other DNA
atggtggccatcaagatcctgaagaacgacgcctacagaaacagaatcatcaagaacgagctgaagctgctgcactgcatgagaggcctggaccccgaggaggcccacgtgatcagattcctggagttcttccacgacgccctgaagttctacctggtgttcgagctgctggagcagaacctgttcgagttccagaaggagaacaacttcgcccccctgcccgccagacacatcagaaccgtgaccctgcaggtgctgaccgccctggccagactgaaggagctggccatcatccacgccgacctgaagcccgagaacatcatgctggtggaccagaccagatgccccttcagagtgaaggtgatcgacttcggcagcgccagcatcttcagcgaggtgagatacgtgaaggagccctacatccagagcagattctacagagcccccgagatcctgctgggcctgcccttctgcgagaaggtggacgtgtggagcctgggctgcgtgatggccgagctgcacctgggctggcccctgtaccccggcaacaacgagtacgaccaggtgagatacatctgcgagacccagggcctgcccaagccccacctgctgcacgccgcctgcaaggcccaccacttcttcaagagaaacccccaccccgacgccgccaacccctggcagctgaagagcagcgccgactacctggccgagaccaaggtgagacccctggagagaagaaagtacatgctgaagagcctggaccagatcgagaccgtgaacggcggcagcgtggccagcagactgaccttccccgacagagaggccctggccgagcacgccgacctgaagagcatggtggagctgatcaagagaatgctgacctgggagagccacgagagaatcagccccagcgccgccctgagacaccccttcgtgagcatgcagcagctgagaagcgcccacgagaccacccactactaccagctgagcctgagaagctacagactgagcctgcaggtggagggcaagccccccacccccgtggtggccgccgaggacggcaccccctactactgcctggccgaggagaaggaggccgccggcatgggcagcgtggccggcagcagccccttcttcagagaggagaaggcccccggcatgcagagagccatcgaccagctggacgacctgagcctgcaggaggccggccacggcctgtggggcgagacctgcaccaacgccgtgagcgacatgatggtgcccctgaaggccgccatcaccggccaccacgtgcccgacagcggccccgagcccatcctggccttctacagcagcagactggccggcagacacaaggccagaaagccccccgccggcagcaagagcgacagcaacttcagcaacctgatcagactgagccaggtgagccccgaggacgacagaccctgcagaggcagcagctgggaggagggcgagcacctgggcgccagcgccgagcccctggccatcctgcagagagacgaggacggccccaacatcgacaacatgaccatggaggccgagagacccgaccccgagctgttcgaccccagcagctgccccggcgagtggctgagcgagcccgactgcaccctggagagcgtgagaggccccagagcccagggcctgccccccagaagaagccaccagcacggcccccccagaggcgccaccagcttcctgcagcacgtgaccggccaccactag

SEQ ID NO: 84752 - DNA, 675 bp, synthetic construct
  misc_feature 1..675: note = Description of Artificial Sequence: Synthetic coding sequence
  source 1..675: mol_type = other DNA
atgggcgagcagcccatcttcagcaccagagcccacgtgttccagatcgaccccaacaccaagaagaactgggtgcccaccagcaagcacgccgtgaccgtgagctacttctacgacagcaccagaaacgtgtacagaatcatcagcctggacggcagcaaggccatcatcaacagcaccatcacccccaacatgaccttcaccaagaccagccagaagttcggccagtgggccgacagcagagccaacaccgtgtacggcctgggcttcagcagcgagcaccacctgagcaaggtgaccgagctggagtgcgtgagcagccaggccaacgccgtgcacacccacaagaccgagctgaaccagaccatccaggagctggaggagaccctgaagctgaaggaggaggagatcgagagactgaagcaggagatcgacaacgccagagagctgcaggagcagagagacagcctgacccagaagctgcaggaggtggagatcagaaacaaggacctggagggccagctgagcgacctggagcagagactggagaagagccagaacgagcaggaggccttcagaaacaacctgaagaccctgctggagatcctggacggcaagatcttcgagctgaccgagctgagagacaacctggccaagctgctggagtgcagctag

SEQ ID NO: 84753 - DNA, 1065 bp, synthetic construct
  misc_feature 1..1065: note = Description of Artificial Sequence: Synthetic coding sequence
  source 1..1065: mol_type = other DNA
atgggcgagcagcccatcttcagcaccagagcccacgtgttccagatcgaccccaacaccaagaagaactgggtgcccaccagcaagcacgccgtgaccgtgagctacttctacgacagcaccagaaacgtgtacagaatcatcagcctggacggcagcaaggccatcatcaacagcaccatcacccccaacatgaccttcaccaagaccagccagaagttcggccagtgggccgacagcagagccaacaccgtgtacggcctgggcttcagcagcgagcaccacctgagcaagttcgccgagaagttccaggagttcaaggaggccgccagactggccaaggagaagagccaggagaagatggagctgaccagcacccccagccaggagagcgccggcggcgacctgcagagccccctgacccccgagagcatcaacggcaccgacgacgagagaacccccgacgtgacccagaacagcgagcccagagccgagcccacccagaacgccctgcccttcagccacagcagcgccatcagcaagcactgggaggccgagctggccaccctgaagggcaacaacgccaagctgaccgccgccctgctggagagcaccgccaacgtgaagcagtggaagcagcagctggccgcctaccaggaggaggccgagagactgcacaagagagtgaccgagctggagtgcgtgagcagccaggccaacgccgtgcacacccacaagaccgagctgaaccagaccatccaggagctggaggagaccctgaagctgaaggaggaggagatcgagagactgaagcaggagatcgacaacgccagagagctgcaggagcagagagacagcctgacccagaagctgcaggaggtggagatcagaaacaaggacctggagggccagctgagcgacctggagcagagactggagaagagccagaacgagcaggaggccttcagaaacaacctgaagaccctgctggagatcctggacggcaagatcttcgagctgaccgagctgagagacaacctggccaagctgctggagtgcagctag

SEQ ID NO: 84754 - DNA, 534 bp, synthetic construct
  misc_feature 1..534: note = Description of Artificial Sequence: Synthetic coding sequence
  source 1..534: mol_type = other DNA
atgggcgagcagcccatcttcagcaccagagcccacgtgttccagatcgaccccaacaccaagaagaactgggtgcccaccagcaagcacgccgtgaccgtgagctacttctacgacagcaccagaaacgtgtacagaatcatcagcctggacggcagcaaggccatcatcaacagcaccatcacccccaacatgaccttcaccaagaccagccagaagttcggccagtgggccgacagcagagccaacaccgtgtacggcctgggcttcagcagcgagcaccacctgagcaagttcgccgagaagttccaggagttcaaggaggccgccagactggccaaggagaagagccaggagaagatggagctgaccagcacccccagccaggagagcgccggcggcgacctgcagagccccctgacccccgagagcatcaacggcaccgacgacgagagaacccccgacgtgacccagaacagcgagcccagagccgagcccacccagaacgccctgcccttcagccacagaaagtag

SEQ ID NO: 84755 - DNA, 543 bp, synthetic construct
  misc_feature 1..543: note = Description of Artificial Sequence: Synthetic coding sequence
  source 1..543: mol_type = other DNA
atgggcagcgccatcagcaagcactgggaggccgagctggccaccctgaagggcaacaacgccaagctgaccgccgccctgctggagagcaccgccaacgtgaagcagtggaagcagcagctggccgcctaccaggaggaggccgagagactgcacaagagagtgaccgagctggagtgcgtgagcagccaggccaacgccgtgcacacccacaagaccgagctgaaccagaccatccaggagctggaggagaccctgaagctgaaggaggaggagatcgagagactgaagcaggagatcgacaacgccagagagctgcaggagcagagagacagcctgacccagaagctgcaggaggtggagatcagaaacaaggacctggagggccagctgagcgacctggagcagagactggagaagagccagaacgagcaggaggccttcagaaacaacctgaagaccctgctggagatcctggacggcaagatcttcgagctgaccgagctgagagacaacctggccaagctgctggagtgcagctag

SEQ ID NO: 84756 - DNA, 1065 bp, synthetic construct
  misc_feature 1..1065: note = Description of Artificial Sequence: Synthetic coding sequence
  source 1..1065: mol_type = other DNA
atgggcgagcagcccatcttcaccaccagagcccacgtgttccagatcgaccccaacaccaagaagaactggatgcccgccagcaagcaggccgtgaccgtgagctacttctacgacgtgaccagaaacagctacagaatcatcagcgtggacggcgccaaggtgatcatcaacagcaccatcacccccaacatgaccttcaccaagaccagccagaagttcggccagtgggccgacagcagagccaacaccgtgttcggcctgggcttcagcagcgagcagcagctgaccaagttcgccgagaagttccaggaggtgaaggaggccgccaagatcgccaaggacaagacccaggagaagatcgagaccagcagcaaccacagccaggagagcggcagagagacccccagcagcacccaggccagcagcgtgaacggcaccgacgacgagaaggccagccacgccggccccgccaacacccacctgaagagcgagaacgacaagctgaagatcgccctgacccagagcgccgccaacgtgaagaagtgggagatcgagctgcagaccctgagagagagcaacgccagactgaccaccgccctgcaggagagcgccgccagcgtggagcagtggaagagacagttcagcatctgcagagacgagaacgacagactgagaaacaagatcgacgagctggaggagcagtgcagcgagatcaacagagagaaggagaagaacacccagctgaagagaagaatcgaggagctggaggccgagctgagagagaaggagaccgagctgaaggacctgagaaagcagagcgagatcatcccccagctgatgagcgagtgcgagtacgtgagcgagaagctggaggccgccgagagagacaaccagaacctggaggacaaggtgagaagcctgaagaccgacatcgaggagagcaagtacagacagagacacctgaaggtggagctgaagagcttcctggaggtgctggacggcaagatcgacgacctgcacgacttcagaagaggcctgagcaagctgggcaccgacaactag

SEQ ID NO: 84757 - DNA, 867 bp, synthetic construct
  misc_feature 1..867: note = Description of Artificial Sequence: Synthetic coding sequence
  source 1..867: mol_type = other DNA
atgggcgagcagcccatcttcaccaccagagcccacgtgttccagatcgaccccaacaccaagaagaactggatgcccgccagcaagcaggccgtgaccgtgagctacttctacgacgtgaccagaaacagctacagaatcatcagcgtggacggcgccaaggtgatcatcaacagcaccatcacccccaacatgaccttcaccaagaccagccagaagttcggccagtgggccgacagcagagccaacaccgtgttcggcctgggcttcagcagcgagcagcagctgaccaagttcgccgagaagttccaggaggtgaaggaggccgccaagatcgccaaggacaagacccaggagaagatcgagaccagcagcaaccacagccaggccagcagcgtgaacggcaccgacgacgagaaggccagccacgccggccccgccaacacccacctgaagagcgagaacgacaagctgaagatcgccctgacccagagcgccgccaacgtgaagaacgagatcaacagagagaaggagaagaacacccagctgaagagaagaatcgaggagctggaggccgagctgagagagaaggagaccgagctgaaggacctgagaaagcagagcgagatcatcccccagctgatgagcgagtgcgagtacgtgagcgagaagctggaggccgccgagagagacaaccagaacctggaggacaaggtgagaagcctgaagaccgacatcgaggagagcaagtacagacagagacacctgaaggtggagctgaagagcttcctggaggtgctggacggcaagatcgacgacctgcacgacttcagaagaggcctgagcaagctgggcaccgacaactag

SEQ ID NO: 84758 - DNA, 900 bp, synthetic construct
  misc_feature 1..900: note = Description of Artificial Sequence: Synthetic coding sequence
  source 1..900: mol_type = other DNA
atgggcgagcagcccatcttcaccaccagagcccacgtgttccagatcgaccccaacaccaagaagaactggatgcccgccagcaagcaggccgtgaccgtgagctacttctacgacgtgaccagaaacagctacagaatcatcagcgtggacggcgccaaggtgatcatcaacagcaccatcacccccaacatgaccttcaccaagaccagccagaagttcggccagtgggccgacagcagagccaacaccgtgttcggcctgggcttcagcagcgagcagcagctgaccaagttcgccgagaagttccaggaggtgaaggaggccgccaagatcgccaaggacaagacccaggagaagatcgagaccagcagcaaccacagccaggagagcggcagagagacccccagcagcacccaggccagcagcgtgaacggcaccgacgacgagaaggccagccacgccggccccgccaacacccacctgaagagcgagaacgacaagctgaagatcgccctgacccagagcgccgccaacgtgaagaacgagatcaacagagagaaggagaagaacacccagctgaagagaagaatcgaggagctggaggccgagctgagagagaaggagaccgagctgaaggacctgagaaagcagagcgagatcatcccccagctgatgagcgagtgcgagtacgtgagcgagaagctggaggccgccgagagagacaaccagaacctggaggacaaggtgagaagcctgaagaccgacatcgaggagagcaagtacagacagagacacctgaaggtggagctgaagagcttcctggaggtgctggacggcaagatcgacgacctgcacgacttcagaagaggcctgagcaagctgggcaccgacaactag

SEQ ID NO: 84759 - DNA, 1032 bp, synthetic construct
  misc_feature 1..1032: note = Description of Artificial Sequence: Synthetic coding sequence
  source 1..1032: mol_type = other DNA
atgggcgagcagcccatcttcaccaccagagcccacgtgttccagatcgaccccaacaccaagaagaactggatgcccgccagcaagcaggccgtgaccgtgagctacttctacgacgtgaccagaaacagctacagaatcatcagcgtggacggcgccaaggtgatcatcaacagcaccatcacccccaacatgaccttcaccaagaccagccagaagttcggccagtgggccgacagcagagccaacaccgtgttcggcctgggcttcagcagcgagcagcagctgaccaagttcgccgagaagttccaggaggtgaaggaggccgccaagatcgccaaggacaagacccaggagaagatcgagaccagcagcaaccacagccaggccagcagcgtgaacggcaccgacgacgagaaggccagccacgccggccccgccaacacccacctgaagagcgagaacgacaagctgaagatcgccctgacccagagcgccgccaacgtgaagaagtgggagatcgagctgcagaccctgagagagagcaacgccagactgaccaccgccctgcaggagagcgccgccagcgtggagcagtggaagagacagttcagcatctgcagagacgagaacgacagactgagaaacaagatcgacgagctggaggagcagtgcagcgagatcaacagagagaaggagaagaacacccagctgaagagaagaatcgaggagctggaggccgagctgagagagaaggagaccgagctgaaggacctgagaaagcagagcgagatcatcccccagctgatgagcgagtgcgagtacgtgagcgagaagctggaggccgccgagagagacaaccagaacctggaggacaaggtgagaagcctgaagaccgacatcgaggagagcaagtacagacagagacacctgaaggtggagctgaagagcttcctggaggtgctggacggcaagatcgacgacctgcacgacttcagaagaggcctgagcaagctgggcaccgacaactag

SEQ ID NO: 84760 - DNA, 15 bp, synthetic construct
  misc_feature 1..15: note = Description of Artificial Sequence: Synthetic coding sequence
  source 1..15: mol_type = other DNA
tgaaccgacaactag

SEQ ID NO: 84761 - DNA, 4176 bp, synthetic construct
  misc_feature 1..4176: note = Description of Artificial Sequence: Synthetic coding sequence
  source 1..4176: mol_type = other DNA
atggccgtggagggcagcaccatcaccagcagaatcaagaacctgctgagaagccccagcatcaagctgagaagaagcaaggccggcaacagaagagaggacctgagcagcaaggtgaccctggagaaggtgctgggcatcaccgtgagcggcggcagaggcctggcctgcgaccccagaagcggcctggtggcctaccccgccggctgcgtggtggtgctgttcaaccccagaaagcacaagcagcaccacatcctgaacagcagcagaaagaccatcaccgccctggccttcagccccgacggcaagtacctggtgaccggcgagagcggccacatgcccgccgtgagagtgtgggacgtggccgagcacagccaggtggccgagctgcaggagcacaagtacggcgtggcctgcgtggccttcagccccagcgccaagtacatcgtgagcgtgggctaccagcacgacatgatcgtgaacgtgtgggcctggaagaagaacatcgtggtggccagcaacaaggtgagcagcagagtgaccgccgtgagcttcagcgaggactgcagctacttcgtgaccgccggcaacagacacatcaagttctggtacctggacgacagcaagaccagcaaggtgaacgccaccgtgcccctgctgggcagaagcggcctgctgggcgagctgagaaacaacctgttcaccgacgtggcctgcggcagaggcaagaaggccgacagcaccttctgcatcaccagcagcggcctgctgtgcgagttcagcgacagaagactgctggacaagtgggtggagctgagagtgtaccccgaggtgaaggacagcaaccaggcctgcctgccccccagcagcttcatcacctgcagcagcgacaacaccatcagactgtggaacaccgagagcagcggcgtgcacggcagcaccctgcacagaaacatcctgagcagcgacctgatcaagatcatctacgtggacggcaacacccaggccctgctggacaccgagctgcccggcggcgacaaggccgacgccagcctgctggaccccagagtgggcatcagaagcgtgtgcgtgagccccaacggccagcacctggccagcggcgacagaatgggcaccctgagagtgcacgagctgcagagcctgagcgagatgctgaaggtggaggcccacgacagcgagatcctgtgcctggagtacagcaagcccgacaccggcctgaagctgctggccagcgccagcagagacagactgatccacgtgctggacgccggcagagagtacagcctgcagcagaccctggacgagcacagcagcagcatcaccgccgtgaagttcgccgccagcgacggccaggtgagaatgatcagctgcggcgccgacaagagcatctacttcagaaccgcccagaagagcggcgacggcgtgcagttcaccagaacccaccacgtggtgagaaagaccaccctgtacgacatggacgtggagcccagctggaagtacaccgccatcggctgccaggacagaaacatcagaatcttcaacatcagcagcggcaagcagaagaagctgttcaagggcagccagggcgaggacggcaccctgatcaaggtgcagaccgaccccagcggcatctacatcgccaccagctgcagcgacaagaacctgagcatcttcgacttcagcagcggcgagtgcgtggccaccatgttcggccacagcgagatcgtgaccggcatgaagttcagcaacgactgcaagcacctgatcagcgtgagcggcgacagctgcatcttcgtgtggagactgagcagcgagatgaccatcagcatgagacagagactggccgagctgagacagagacagagaggcggcaagcagcagggccccagcagcccccagagagccagcggccccaacagacaccaggcccccagcatgctgagccccggccccgccctgagcagcgacagcgacaaggagggcgaggacgagggcaccgaggaggagctgcccgccctgcccgtgctggccaagagcaccaagaaggccctggccagcgtgcccagccccgccctgcccagaagcctgagccactgggagatgagcagagcccaggagagcgtgggcttcctggaccccgcccccgccgccaaccccggccccagaagaagaggcagatgggtgcagcccggcgtggagctgagcgtgagaagcatgctggacctgagacagctggagaccctggcccccagcctgcaggaccccagccaggacagcctggccatcatccccagcggccccagaaagcacggccaggaggccctggagaccagcctgaccagccagaacgagaagccccccagaccccaggccagccagccctgcagctacccccacatcatcagactgctgagccaggaggagggcgtgttcgcccaggacctggagcccgcccccatcgaggacggcatcgtgtaccccgagcccagcgacaaccccaccatggacaccagcgagttccaggtgcaggcccccgccagaggcaccctgggcagagtgtaccccggcagcagaagcagcgagaagcacagccccgacagcgcctgcagcgtggactacagcagcagctgcctgagcagccccgagcaccccaccgaggacagcgagagcaccgagcccctgagcgtggacggcatcagcagcgacctggaggagcccgccgagggcgacgaggaggaggaggaggaggagggcggcatgggcccctacggcctgcaggagggcagcccccagacccccgaccaggagcagttcctgaagcagcacttcgagaccctggccagcggcgccgcccccggcgcccccgtgcaggtgcccgagagaagcgagagcagaagcatcagcagcagattcctgctgcaggtgcagaccagacccctgagagagcccagccccagcagcagcagcctggccctgatgagcagacccgcccaggtgccccaggccagcggcgagcagcccagaggcaacggcgccaacccccccggcgccccccccgaggtggagcccagcagcggcaaccccagcccccagcaggccgccagcgtgctgctgcccagatgcagactgaaccccgacagcagctgggcccccaagagagtggccaccgccagccccttcagcggcctgcagaaggcccagagcgtgcacagcctggtgccccaggagagacacgaggccagcctgcaggcccccagccccggcgccctgctgagcagagagatcgaggcccaggacggcctgggcagcctgccccccgccgacggcagacccagcagaccccacagctaccagaaccccaccaccagcagcatggccaagatcagcagaagcatcagcgtgggcgagaacctgggcctggtggccgagccccaggcccacgcccccatcagagtgagccccctgagcaagctggccctgcccagcagagcccacctggtgctggacatccccaagcccctgcccgacagacccaccctggccgccttcagccccgtgaccaagggcagagcccccggcgaggccgagaagcccggcttccccgtgggcctgggcaaggcccacagcaccaccgagagatgggcctgcctgggcgagggcaccacccccaagcccagaaccgagtgccaggcccaccccggccccagcagcccctgcgcccagcagctgcccgtgagcagcctgttccagggccccgagaacctgcagccccccccccccgagaagacccccaaccccatggagtgcaccaagcccggcgccgccctgagccaggacagcgagcccgccgtgagcctggagcagtgcgagcagctggtggccgagctgagaggcagcgtgagacaggccgtgagactgtaccacagcgtggccggctgcaagatgcccagcgccgagcagagcagaatcgcccagctgctgagagacaccttcagcagcgtgagacaggagctggaggccgtggccggcgccgtgctgagcagccccggcagcagccccggcgccgtgggcgccgagcagacccaggccctgctggagcagtacagcgagctgctgctgagagccgtggagagaagaatggagagaaagctgtag

SEQ ID NO: 84762 - DNA, 1077 bp, synthetic construct
  misc_feature 1..1077: note = Description of Artificial Sequence: Synthetic coding sequence
  source 1..1077: mol_type = other DNA
atgagcaccgccagagagcagcccatcttcagcaccagagcccacgtgttccagatcgaccccgccaccaagagaaactggatccccgccggcaagcacgccctgaccgtgagctacttctacgacgccaccagaaacgtgtacagaatcatcagcatcggcggcgccaaggccatcatcaacagcaccgtgacccccaacatgaccttcaccaagaccagccagaagttcggccagtgggccgacagcagagccaacaccgtgtacggcctgggcttcgccagcgagcagcacctgacccagttcgccgagaagttccaggaggtgaaggaggccgccagactggccagagagaagagccaggacggcggcgagctgaccagccccgccctgggcctggccagccaccaggtgccccccagccccctggtgagcgccaacggccccggcgaggagaagctgttcagaagccagagcgccgacgcccccggccccaccgagagagagagactgaagaagatgctgagcgagggcagcgtgggcgaggtgcagtgggaggccgagttcttcgccctgcaggacagcaacaacaagctggccggcgccctgagagaggccaacgccgccgccgcccagtggagacagcagctggaggcccagagagccgaggccgagagactgagacagagagtggccgagctggaggcccaggccgccagcgaggtgacccccaccggcgagaaggagggcctgggccagggccagagcctggagcagctggaggccctggtgcagaccaaggaccaggagatccagaccctgaagagccagaccggcggccccagagaggccctggaggccgccgagagagaggagacccagcagaaggtgcagaccagaaacgccgagctggagcaccagctgagagccatggagagaagcctggaggaggccagagccgagagagagagagccagagccgaggtgggcagagccgcccagctgctggacgtgagcctgttcgagctgagcgagctgagagagggcctggccagactggccgaggccgccccctag

SEQ ID NO: 84763 - DNA, 438 bp, synthetic construct
  misc_feature 1..438: note = Description of Artificial Sequence: Synthetic coding sequence
  source 1..438: mol_type = other DNA
atgagcaccgccagagagcagcccatcttcagcaccagagcccacgtgttccagatcgaccccgccaccaagagaaactggatccccgccggcaagcacgccctgaccgtgagctacttctacgacgccaccagaaacgtgtacagaatcatcagcatcggcggcgccaaggccatcatcaacagcaccgtgacccccaacatgaccttcaccaagaccagccagaagttcggccagtgggccgacagcagagccaacaccgtgtacggcctgggcttcgccagcgagcagcacctgacccagttcgccgagaagttccaggaggtgaaggaggccgccagactggccagagagaagagccaggacggctggggcggcccccagagcgccctggtggtgggcagcttcggcgccgtgttcgagctgctgatcgtgtag

SEQ ID NO: 84764 - DNA, 1086 bp, synthetic construct
  misc_feature 1..1086: note = Description of Artificial Sequence: Synthetic coding sequence
  source 1..1086: mol_type = other DNA
atgagcaccgccagagagcagcccatcttcagcaccagagcccacgtgttccagatcgaccccgccaccaagagaaactggatccccgccggcaagcacgccctgaccgtgagctacttctacgacgccaccagaaacgtgtacagaatcatcagcatcggcggcgccaaggccatcatcaacagcaccgtgacccccaacatgaccttcaccaagaccagccagaagttcggccagtgggccgacagcagagccaacaccgtgtacggcctgggcttcgccagcgagcagcacctgacccagttcgccgagaagttccaggaggtgaaggaggccgccagactggccagagagaagagccaggacggcggcgagctgaccagccccgccctgggcctggccagccaccaggtgccccccagccccctggtgagcgccaacggccccggcgaggagaagctgttcagaagccagagcgccgacgcccccggccccaccgagagagagagactgaagaagatgctgagcgagggcagcgtgggcgaggtgcagtgggaggccgagttcttcgccctgcaggacagcaacaacaagctggccggcgccctgagagaggccaacgccgccgccgcccagtggagacagcagctggaggcccagagagccgaggccgagagactgagacagagagtggccgagctggaggcccaggccgccagcgaggtgacccccaccggcgagaaggagggcctgggccagggccagagcctggagcagctggaggccctggtgcagaccaaggaccaggagatccagaccctgaagagccagaccggcggccccagagaggccctggaggccgccgagagagaggagacccagcagaaggtgcaggacctggagaccagaaacgccgagctggagcaccagctgagagccatggagagaagcctggaggaggccagagccgagagagagagagccagagccgaggtgggcagagccgcccagctgctggacgtgagcctgttcgagctgagcgagctgagagagggcctggccagactggccgaggccgccccctag

SEQ ID NO: 84765 - DNA, 1077 bp, synthetic construct; identical to SEQ ID NO: 84762
  misc_feature 1..1077: note = Description of Artificial Sequence: Synthetic coding sequence
  source 1..1077: mol_type = other DNA

SEQ ID NO: 84766 - DNA, 1086 bp, synthetic construct; identical to SEQ ID NO: 84764
  misc_feature 1..1086: note = Description of Artificial Sequence: Synthetic coding sequence
  source 1..1086: mol_type = other DNA

SEQ ID NO: 84767 - DNA, 1086 bp, synthetic construct; identical to SEQ ID NO: 84764
  misc_feature 1..1086: note = Description of Artificial Sequence: Synthetic coding sequence
  source 1..1086: mol_type = other DNA

SEQ ID NO: 84768 - DNA, 978 bp, synthetic construct; identical to SEQ ID NO: 75796
  misc_feature 1..978: note = Description of Artificial Sequence: Synthetic coding sequence
  source 1..978: mol_type = other DNA

SEQ ID NO: 84769 - DNA, 1176 bp, synthetic construct
  misc_feature 1..1176: note = Description of Artificial Sequence: Synthetic coding sequence
  source 1..1176: mol_type = other DNA
atggagagcgagaccgagcccgagcccgtgaccctgctggtgaagagccccaaccagagacacagagacctggagctgagcggcgacagaggctggagcgtgggccacctgaaggcccacctgagcagagtgtaccccgagagacccagacccgaggaccagagactgatctacagcggcaagctgctgctggaccaccagtgcctgagagacctgctgcccaagcaggagaagagacacgtgctgcacctggtgtgcaacgtgaagagccccagcaagatgcccgagatcaacgccaaggtggccgagagcaccgaggagcccgccggcagcaacagaggccagtaccccgaggacagcagcagcgacggcctgagacagagagaggtgctgagaaacctgagcagccccggctgggagaacatcagcagacccgaggccgcccagcaggccttccagggcctgggccccggcttcagcggctacaccccctacggctggctgcagctgagctggttccagcagatctacgccagacagtactacatgcagtacctggccgccaccgccgccagcggcgccttcgtgcccccccccagcgcccaggagatccccgtggtgagcgcccccgcccccgcccccatccacaaccagttccccgccgagaaccagcccgccaaccagaacgccgccccccaggtggtggtgaaccccggcgccaaccagaacctgagaatgaacgcccagggcggccccatcgtggaggaggacgacgagatcaacagagactggctggactggacctacagcgccgccaccttcagcgtgttcctgagcatcctgtacttctacagcagcctgagcagattcctgatggtgatgggcgccaccgtggtgatgtacctgcaccacgtgggctggttccccttcagacccagacccgtgcagaacttccccaacgacggccccccccccgacgtggtgaaccaggaccccaacaacaacctgcaggagggcaccgaccccgagaccgaggaccccaaccacctgccccccgacagagacgtgctggacggcgagcagaccagccccagcttcatgagcaccgcctggctggtgttcaagaccttcttcgccagcctgctgcccgagggcccccccgccatcgccaactag

SEQ ID NO: 84770 - DNA, 699 bp, synthetic construct
  misc_feature 1..699: note = Description of Artificial Sequence: Synthetic coding sequence
  source 1..699: mol_type = other DNA
atggagagcgagaccgagcccgagcccgtgaccctgctggtgaagagccccaaccagagacacagagacctggagctgagcggcgacagaggctggagcgtgggccacctgaaggcccacctgagcagagtgtaccccgagagacccagacccgaggaccagagactgatctacagcggcaagctgctgctggaccaccagtgcctgagagacctgctgcccaaggagaagagacacgtgctgcacctggtgtgcaacgtgaagagccccagcaagatgcccgagatcaacgccaaggtggccgagagcaccgaggagcccgccggcagcaacagaggccagtaccccgaggacagcagcagcgacggcctgagacagagagaggtgctgagaaacctgagcagccccggctgggagaacatcagcagacaccacgtgggctggttccccttcagacccagacccgtgcagaacttccccaacgacggccccccccccgacgtggtgaaccaggaccccaacaacaacctgcaggagggcaccgaccccgagaccgaggaccccaaccacctgccccccgacagagacgtgctggacggcgagcagaccagccccagcttcatgagcaccgcctggctggtgttcaagaccttcttcgccagcctgctgcccgagggcccccccgccatcgccaactag

SEQ ID NO: 84771 - DNA, 1101 bp, synthetic construct
  misc_feature 1..1101: note = Description of Artificial Sequence: Synthetic coding sequence
  source 1..1101: mol_type = other DNA
atggagagcgagaccgagcccgagcccgtgaccctgctggtgaagagccccaaccagagacacagagacctggagctgagcggcgacagaggctggagcgtgggccacctgaaggcccacctgagcagagtgtaccccgagagacccagacccgaggaccagagactgatctacagcggcaagctgctgctggaccaccagtgcctgagagacctgctgcccaaggtggccgagagcaccgaggagcccgccggcagcaacagaggccagtaccccgaggacagcagcagcgacggcctgagacagagagaggtgctgagaaacctgagcagccccggctgggagaacatcagcagacccgaggccgcccagcaggccttccagggcctgggccccggcttcagcggctacaccccctacggctggctgcagctgagctggttccagcagatctacgccagacagtactacatgcagtacctggccgccaccgccgccagcggcgccttcgtgcccccccccagcgcccaggagatccccgtggtgagcgcccccgcccccgcccccatccacaaccagttccccgccgagaaccagcccgccaaccagaacgccgccccccaggtggtggtgaaccccggcgccaaccagaacctgagaatgaacgcccagggcggccccatcgtggaggaggacgacgagatcaacagagactggctggactggacctacagcgccgccaccttcagcgtgttcctgagcatcctgtacttctacagcagcctgagcagattcctgatggtgatgggcgccaccgtggtgatgtacctgcaccacgtgggctggttccccttcagacccagacccgtgcagaacttccccaacgacggccccccccccgacgtggtgaaccaggaccccaacaacaacctgcaggagggcaccgaccccgagaccgaggaccccaaccacctgccccccgacagagacgtgctggacggcgagcagaccagccccagcttcatgagcaccgcctggctggtgttcaagaccttcttcgccagcctgctgcccgagggcccccccgccatcgccaactag

SEQ ID NO: 84772 - DNA, 1173 bp, synthetic construct
  misc_feature 1..1173: note = Description of Artificial Sequence: Synthetic coding sequence
  source 1..1173: mol_type = other DNA
atggagagcgagaccgagcccgagcccgtgaccctgctggtgaagagccccaaccagagacacagagacctggagctgagcggcgacagaggctggagcgtgggccacctgaaggcccacctgagcagagtgtaccccgagagacccagacccgaggaccagagactgatctacagcggcaagctgctgctggaccaccagtgcctgagagacctgctgcccaaggagaagagacacgtgctgcacctggtgtgcaacgtgaagagccccagcaagatgcccgagatcaacgccaaggtggccgagagcaccgaggagcccgccggcagcaacagaggccagtaccccgaggacagcagcagcgacggcctgagacagagagaggtgctgagaaacctgagcagccccggctgggagaacatcagcagacccgaggccgcccagcaggccttccagggcctgggccccggcttcagcggctacaccccctacggctggctgcagctgagctggttccagcagatctacgccagacagtactacatgcagtacctggccgccaccgccgccagcggcgccttcgtgcccccccccagcgcccaggagatccccgtggtgagcgcccccgcccccgcccccatccacaaccagttccccgccgagaaccagcccgccaaccagaacgccgccccccaggtggtggtgaaccccggcgccaaccagaacctgagaatgaacgcccagggcggccccatcgtggaggaggacgacgagatcaacagagactggctggactggacctacagcgccgccaccttcagcgtgttcctgagcatcctgtacttctacagcagcctgagcagattcctgatggtgatgggcgccaccgtggtgatgtacctgcaccacgtgggctggttccccttcagacccagacccgtgcagaacttccccaacgacggccccccccccgacgtggtgaaccaggaccccaacaacaacctgcaggagggcaccgaccccgagaccgaggaccccaaccacctgccccccgacagagacgtgctggacggcgagcagaccagccccagcttcatgagcaccgcctggctggtgttcaagaccttcttcgccagcctgctgcccgagggcccccccgccatcgccaactag

SEQ ID NO: 84773 - DNA, 1338 bp, synthetic construct
  misc_feature 1..1338: note = Description of Artificial Sequence: Synthetic coding sequence
  source 1..1338: mol_type = other DNA
atggccgagctgaagtacatcagcggcttcggcaacgagtgcagcagcgaggaccccagatgccccggcagcctgcccgagggccagaacaacccccaggtgtgcccctacaacctgtacgccgagcagctgagcggcagcgccttcacctgccccagaagcaccaacaagagaagctggctgtacagaatcctgcccagcgtgagccacaagcccttcgagagcatcgacgagggccaggtgacccacaactgggacgaggtggaccccgaccccaaccagctgagatggaagcccttcgagatccccaaggccagccagaagaaggtggacttcgtgagcggcctgcacaccctgtgcggcgccggcgacatcaagagcaacaacggcctggccatccacatcttcctgtgcaacaccagcatggagaacagatgcttctacaacagcgacggcgacttcctgatcgtgccccagaagggcaacctgctgatctacaccgagttcggcaagatgctggtgcagcccaacgagatctgcgtgatccagagaggcatgagattcagcatcgacgtgttcgaggagaccagaggctacatcctggaggtgtacggcgtgcacttcgagctgcccgacctgggccccatcggcgccaacggcctggccaaccccagagacttcctgatccccatcgcctggtacgaggacagacaggtgcccggcggctacaccgtgatcaacaagtaccagggcaagctgttcgccgccaagcaggacgtgagccccttcaacgtggtggcctggcacggcaactacaccccctacaagtacaacctgaagaacttcatggtgatcaacagcgtggccttcgaccacgccgaccccagcatcttcaccgtgctgaccgccaagagcgtgagacccggcgtggccatcgccgacttcgtgatcttcccccccagatggggcgtggccgacaagaccttcagacccccctactaccacagaaactgcatgagcgagttcatgggcctgatcagaggccactacgaggccaagcagggcggcttcctgcccggcggcggcagcctgcacagcaccatgaccccccacggccccgacgccgactgcttcgagaaggccagcaaggtgaagctggcccccgagagaatcgccgacggcaccatggccttcatgttcgagagcagcctgagcctggccgtgaccaagtggggcctgaaggccagcagatgcctggacgagaactaccacaagtgctgggagcccctgaagagccacttcacccccaacagcagaaaccccgccgagcccaactag

SEQ ID NO: 84774 - DNA, 2187 bp, synthetic construct
  misc_feature 1..2187: note = Description of Artificial Sequence: Synthetic coding sequence
  source 1..2187: mol_type = other DNA
atggaggagacccagccccccccccagcccaagctgcccctgtgcgacagcctgatgatctggctgcagaccttcaacaccgccagcccctgccaggacgtgaagcagctgaccagcggcgtggccatggcccaggtgctgcaccagatcgacgccgcctggttcaacgagagctggctgagcagaatcaaggaggacgtgggcgacaactggagaatcaaggccagcaacgtgaagaaggtgctgcagggcatcatgagctactaccacgagttcctgggccagcagatcagcgaggccctgatccccgacctgaaccagatcaccgagtgcagcgaccccgtggagctgggcagactgctgcagctgatcctgggctgcgccatcaactgcgagaagaagcaggagcacatccagaacatcatgaccctggaggagagcgtgcagcacgtggtgatgaccgccatccaggagctgatgagcaaggagatcctgagcagcccccccaacgacgccgtgggcgagctggagcagcagctgaagagagccctggaggagctgcaggaggccctggccgagaaggaggagctgagacagagatgcgaggagctggacatgcaggtgaccaccctgcaggacgagaagaacagcctggtgagcgagaacgagatgatgaacgagaagctggaccagctggacggcagcttcgacgaccccaacaccgtggtggccaagaagtacttccacgcccagctgcagctggagcagctgcaggaggagaacttcagactggaggccgccaaggacgactacagagtgcactgcgaggagctggagaagcagctgatcgagttccagcacagaaacgacgagctgaccagcctggccgaggagaccagagccctgaaggacgagatcgacgtgctgagagccaccagcgacaaggccaacaagctggagagcaccgtggagatctacagacagaagctgcaggacctgaacgacctgagaaagcaggtgaagaccctgcaggagaccaacatgatgtacatgcacaacaccgtgagcctggaggaggagctgaagaaggccaacgccgccagaacccagctggagacctacaagagacaggtgcaggacctgcacgtgaagctgagcagcgagagcaagagagccgacaccctggccttcgagatgaagagactggaggagaagcacgaggccctgctgaaggagaaggagagactgatcgagcagagagacaccctgaaggagaccaacgaggagctgagatgcagccaggtgcagcaggaccacctgaaccagaccgacgccagcgccaccaagagctacgagaacctggccgccgagatcatgcccgtggagtacagagaggtgttcatcagactgcagcacgagaacaagatgctgagactgcagcaggagggcagcgagaacgagagaatcgaggagctgcaggagcagctggagcagaagcacagaaagatgaacgagctggagaccgagcagagactgagcaaggagagaatcagagagctgcagcagcagatcgaggacctgcagaagagcctgcaggagcagggcagcaagagcgagggcgagagcagcagcaagctgaagcagaagctggaggcccacatggagaagctgaccgaggtgcacgaggagctgcagaagaagcaggagctgatcgaggacctgcagcccgacatcaaccagaacgtgcagaagatcaacgagctggaggccgccctgcagaagaaggacgaggacatgaaggccatggaggagagatacaagatgtacctggagaaggccagaaacgtgatcaagaccctggaccccaagctgaaccccgccagcgccgagatcatgctgctgagaaagcagctggccgagaaggagagaagaatcgagatcctggagagcgagtgcaaggtggccaagttcagagactacgaggagaagctgatcgtgagcgcctggtacaacaagagcctggccttccagaagctgggcatggagagcagactggtgagcggcggcggcgcctgcagcgacaccggcgcctgcacccccgccagaagcttcctggcccagcagagacacatcaccaacaccagaagaaacctgagcgtgaaggtgcccgccaccaccagcgactag

SEQ ID NO: 84775 - DNA, 2061 bp, synthetic construct
  misc_feature 1..2061: note = Description of Artificial Sequence: Synthetic coding sequence
  source 1..2061: mol_type = other DNA
atggcccaggtgctgcaccagatcgacgccgcctggttcaacgagagctggctgagcagaatcaaggaggacgtgggcgacaactggagaatcaaggccagcaacgtgaagaaggtgctgcagggcatcatgagctactaccacgagttcctgggccagcagatcagcgaggccctgatccccgacctgaaccagatcaccgagtgcagcgaccccgtggagctgggcagactgctgcagctgatcctgggctgcgccatcaactgcgagaagaagcaggagcacatccagaacatcatgaccctggaggagagcgtgcagcacgtggtgatgaccgccatccaggagctgatgagcaaggagatcctgagcagcccccccaacgacgccgtgggcgagctggagcagcagctgaagagagccctggaggagctgcaggaggccctggccgagaaggaggagctgagacagagatgcgaggagctggacatgcaggtgaccaccctgcaggacgagaagaacagcctggtgagcgagaacgagatgatgaacgagaagctggaccagctggacggcagcttcgacgaccccaacaccgtggtggccaagaagtacttccacgcccagctgcagctggagcagctgcaggaggagaacttcagactggaggccgccaaggacgactacagagtgcactgcgaggagctggagaagcagctgatcgagttccagcacagaaacgacgagctgaccagcctggccgaggagaccagagccctgaaggacgagatcgacgtgctgagagccaccagcgacaaggccaacaagctggagagcaccgtggagatctacagacagaagctgcaggacctgaacgacctgagaaagcaggtgaagaccctgcaggagaccaacatgatgtacatgcacaacaccgtgagcctggaggaggagctgaagaaggccaacgccgccagaacccagctggagacctacaagagacaggtgcaggacctgcacgtgaagctgagcagcgagagcaagagagccgacaccctggccttcgagatgaagagactggaggagaagcacgaggccctgctgaaggagaaggagagactgatcgagcagagagacaccctgaaggagaccaacgaggagctgagatgcagccaggtgcagcaggaccacctgaaccagaccgacgccagcgccaccaagagctacgagaacctggccgccgagatcatgcccgtggagtacagagaggtgttcatcagactgcagcacgagaacaagatgctgagactgcagcaggagggcagcgagaacgagagaatcgaggagctgcaggagcagctggagcagaagcacagaaagatgaacgagctggagaccgagcagagactgagcaaggagagaatcagagagctgcagcagcagatcgaggacctgcagaagagcctgcaggagcagggcagcaagagcgagggcgagagcagcagcaagctgaagcagaagctggaggcccacatggagaagctgaccgaggtgcacgaggagctgcagaagaagcaggagctgatcgaggacctgcagcccgacatcaaccagaacgtgcagaagatcaacgagctggaggccgccctgcagaagaaggacgaggacatgaaggccatggaggagagatacaagatgtacctggagaaggccagaaacgtgatcaagaccctggaccccaagctgaaccccgccagcgccgagatcatgctgctgagaaagcagctggccgagaaggagagaagaatcgagatcctggagagcgagtgcaaggtggccaagttcagagactacgaggagaagctgatcgtgagcgcctggtacaacaagagcctggccttccagaagctgggcatggagagcagactggtgagcggcggcggcgcctgcagcgacaccggcgcctgcacccccgccagaagcttcctggcccagcagagacacatcaccaacaccagaagaaacctgagcgtgaaggtgcccgccaccaccagcgactag

SEQ ID NO: 84776 - DNA, 414 bp, synthetic construct
  misc_feature 1..414: note = Description of Artificial Sequence: Synthetic coding sequence
  source 1..414: mol_type = other DNA
atggaggagacccagccccccccccagcccaagctgcccctgtgcgacagcctgatgatctggctgcagaccttcaacaccgccagcccctgccaggacgtgaagcagctgaccagcggcgtggccatggcccaggtgctgcaccagatcgacgccgcctggttcaacgagagctggctgagcagaatcaaggaggacgtgggcgacaactggagaatcaaggccagcaacgtgaagaaggtgctgcagggcatcatgagctactaccacgagttcctgggccagcagatcagcgaggccctgatccccgacctgaaccagatcaccgagtgcagcgaccccgtggagctgggcagactgctgcagctgatcctgggctgcgccatcaactgcgagaagaagcaggagcactag

SEQ ID NO: 84777 - DNA, 2154 bp, synthetic construct
  misc_feature 1..2154: note = Description of Artificial Sequence: Synthetic coding sequence
  source 1..2154: mol_type = other DNA
atgagcgtggacaaggccgagctgtgcggcagcctgctgacctggctgcagaccttccacgtgcccagcccctgcgccagcccccaggacctgagcagcggcctggccgtggcctacgtgctgaaccagatcgaccccagctggttcaacgaggcctggctgcagggcatcagcgaggaccccggccccaactggaagctgaaggtgagcaacctgaagatggtgctgagaagcctggtggagtacagccaggacgtgctggcccaccccgtgagcgaggagcacctgcccgacgtgagcctgatcggcgagttcagcgaccccgccgagctgggcaagctgctgcagctggtgctgggctgcgccatcagctgcgagaagaagcaggaccacatccagagaatcatgaccctggaggagagcgtgcagcacgtggtgatggaggccatccaggagctgatgaccaaggacacccccgacagcctgagccccgagacctacggcaacttcgacagccagagcagaagatactacttcctgagcgaggaggccgaggagggcgacgagctgcagcagagatgcctggacctggagagacagctgatgctgctgagcgaggagaagcagagcctggcccaggagaacgccggcctgagagagagaatgggcagacccgagggcgagggcacccccggcctgaccgccaagaagctgctgctgctgcagagccagctggagcagctgcaggaggagaacttcagactggagagcggcagagaggacgagagactgagatgcgccgagctggagagagaggtggccgagctgcagcacagaaaccaggccctgaccagcctggcccaggaggcccaggccctgaaggacgagatggacgagctgagacagagcagcgagagagccggccagctggaggccaccctgaccagctgcagaagaagactgggcgagctgagagagctgagaagacaggtgagacagctggaggagagaaacgccggccacgccgagagaaccagacagctggaggacgagctgagaagagccggcagcctgagagcccagctggaggcccagagaagacaggtgcaggagctgcagggccagagacaggaggaggccatgaaggccgagaagtggctgttcgagtgcagaaacctggaggagaagtacgagagcgtgaccaaggagaaggagagactgctggccgagagagacagcctgagagaggccaacgaggagctgagatgcgcccagctgcagcccagaggcctgacccaggccgaccccagcctggaccccaccagcacccccgtggacaacctggccgccgagatcctgcccgccgagctgagagagaccctgctgagactgcagctggagaacaagagactgtgcagacaggaggccgccgacagagagagacaggaggagctgcagagacacctggaggacgccaacagagccagacacggcctggagacccagcacagactgaaccagcagcagctgagcgagctgagagcccaggtggaggacctgcagaaggccctgcaggagcagggcggcaagaccgaggacagcatcctgctgaagagaaagctggaggagcacctgcagaagctgcacgaggccgacctggagctgcagagaaagagagagtacatcgaggagctggagccccccaccgacagcagcaccgccagaagaatcgaggagctgcagcacaacctgcagaagaaggacgccgacctgagagccatggaggagagatacagaagatacgtggacaaggccagaatggtgatgcagaccatggagcccaagcagagacccgccgccggcgccccccccgagctgcacagcctgagaacccagctgagagagagagacgtgagaatcagacacctggagatggacttcgagaagagcagaagccagagagagcaggaggagaagctgctgatcagcgcctggtacaacatgggcatggccctgcagcagagagccggcgaggagagagcccccgcccacgcccagagcttcctggcccagcagagactggccaccaacagcagaagaggccccctgggcagactggccagcctgaacctgagacccaccgacaagcactag

SEQ ID NO: 84778 - DNA, 2160 bp, synthetic construct
  misc_feature 1..2160: note = Description of Artificial Sequence: Synthetic coding sequence
  source 1..2160: mol_type = other DNA
atgagcgtggacaaggccgagctgtgcggcagcctgctgacctggctgcagaccttccacgtgcccagcccctgcgccagcccccaggacctgagcagcggcctggccgtggcctacgtgctgaaccagatcgaccccagctggttcaacgaggcctggctgcagggcatcagcgaggaccccggccccaactggaagctgaaggtgagcaacctgaagatggtgctgagaagcctggtggagtacagccaggacgtgctggcccaccccgtgagcgaggagcacctgcccgacgtgagcctgatcggcgagttcagcgaccccgccgagctgggcaagctgctgcagctggtgctgggctgcgccatcagctgcgagaagaagcaggaccacatccagagaatcatgaccctggaggagagcgtgcagcacgtggtgatggaggccatccaggagctgatgaccaaggacacccccgacagcctgagccccgagacctacggcaacttcgacagccagagcagaagatactacttcctgagcgaggaggccgaggagggcgacgagctgcagcagagatgcctggacctggagagacagctgatgctgctgagcgaggagaagcagagcctggcccaggagaacgccggcctgagagagagaatgggcagacccgagggcgagggcacccccggcctgaccgccaagaagctgctgctgctgcagagccagctggagcagctgcaggaggagaacttcagactggagagcggcagagaggacgagagactgagatgcgccgagctggagagagaggtggccgagctgcagcacagaaaccaggccctgaccagcctggcccaggaggcccaggccctgaaggacgagatggacgagctgagacagagcagcgagagagccggccagctggaggccaccctgaccagctgcagaagaagactgggcgagctgagagagctgagaagacaggtgagacagctggaggagagaaacgccggccacgccgagagaaccagacagctggaggacgagctgagaagagccggcagcctgagagcccagctggaggcccagagaagacaggtgcaggagctgcagggccagagacaggaggaggccatgaaggccgagaagtggctgttcgagtgcagaaacctggaggagaagtacgagagcgtgaccaaggagaaggagagactgctggccgagagagacagcctgagagaggccaacgaggagctgagatgcgcccagctgcagcccagaggcctgacccaggccgaccccagcctggaccccaccagcacccccgtggacaacctggccgccgagatcctgcccgccgagctgagagagaccctgctgagactgcagctggagaacaagagactgtgcagacaggaggccgccgacagagagagacaggaggagctgcagagacacctggaggacgccaacagagccagacacggcctggagacccagcacagactgaaccagcagcagctgagcgagctgagagcccaggtggaggacctgcagaaggccctgcaggagcagggcggcaagaccgaggacgccatcagcatcctgctgaagagaaagctggaggagcacctgcagaagctgcacgaggccgacctggagctgcagagaaagagagagtacatcgaggagctggagccccccaccgacagcagcaccgccagaagaatcgaggagctgcagcacaacctgcagaagaaggacgccgacctgagagccatggaggagagatacagaagatacgtggacaaggccagaatggtgatgcagaccatggagcccaagcagagacccgccgccggcgccccccccgagctgcacagcctgagaacccagctgagagagagagacgtgagaatcagacacctggagatggacttcgagaagagcagaagccagagagagcaggaggagaagctgctgatcagcgcctggtacaacatgggcatggccctgcagcagagagccggcgaggagagagcccccgcccacgcccagagcttcctggcccagcagagactggccaccaacagcagaagaggccccctgggcagactggccagcctgaacctgagacccaccgacaagcactag

SEQ ID NO: 84779 - DNA, 2157 bp, synthetic construct
  misc_feature 1..2157: note = Description of Artificial Sequence: Synthetic coding sequence
  source 1..2157: mol_type = other DNA
atgttcagcgtggagagcctggagagagccgagctgtgcgagagcctgctgacctggatccagaccttcaacgtggacgccccctgccagaccgtggaggacctgaccaacggcgtggtgatggcccaggtgctgcagaagatcgaccccgcctacttcgacgagaactggctgaacagaatcaagaccgaggtgggcgacaactggagactgaagatcagcaacctgaagaagatcctgaagggcatcctggactacaaccacgagatcctgggccagcagatcaacgacttcaccctgcccgacgtgaacctgatcggcgagcacagcgacgccgccgagctgggcagaatgctgcagctgatcctgggctgcgccgtgaactgcgagcagaagcaggagtacatccaggccatcatgatgatggaggagagcgtgcagcacgtggtgatgaccgccatccaggagctgatgagcaaggagagccccgtgagcgccggcaacgacgcctacgtggacctggacagacagctgaagaagaccaccgaggagctgaacgaggccctgagcgccaaggaggagatcgcccagagatgccacgagctggacatgcaggtggccgccctgcaggaggagaagagcagcctgctggccgagaaccaggtgctgatggagagactgaaccagagcgacagcatcgaggaccccaacagccccgccggcagaagacacctgcagctgcagacccagctggagcagctgcaggaggagaccttcagactggaggccgccaaggacgactacagaatcagatgcgaggagctggagaaggagatcagcgagctgagacagcagaacgacgagctgaccaccctggccgacgaggcccagagcctgaaggacgagatcgacgtgctgagacacagcagcgacaaggtgagcaagctggagggccaggtggagagctacaagaagaagctggaggacctgggcgacctgagaagacaggtgaagctgctggaggagaagaacaccatgtacatgcagaacaccgtgagcctggaggaggagctgagaaaggccaacgccgccagaagccagctggagacctacaagagacaggtggtggagctgcagaacagactgagcgaggagagcaagaaggccgacaagctggacttcgagtacaagagactgaaggagaaggtggacagcctgcagaaggagaaggacagactgagaaccgagagagacagcctgaaggagaccatcgaggagctgagatgcgtgcaggcccaggagggccagctgaccacccagggcctgatgcccctgggcagccaggagagcagcgacagcctggccgccgagatcgtgacccccgagatcagagagaagctgatcagactgcagcacgagaacaagatgctgaagctgaaccaggagggcagcgacaacgagaagatcgccctgctgcagagcctgctggacgacgccaacctgagaaagaacgagctggagaccgagaacagactggtgaaccagagactgctggaggtgcagagccaggtggaggagctgcagaagagcctgcaggaccagggcagcaaggccgaggacagcgtgctgctgaagaagaagctggaggagcacctggagaagctgcacgaggccaacaacgagctgcagaagaagagagccatcatcgaggacctggagcccagattcaacaacagcagcctgaagatcgaggagctgcaggaggccctgagaaagaaggaggaggagatgaagcagatggaggagagatacaagaagtacctggagaaggccaagagcgtgatcagaaccctggaccccaagcagaaccagggcgccgcccccgagatccaggccctgaagaaccagctgcaggagagagacagactgttccacagcctggagaaggagtacgagaagaccaagagccagagagagatggaggagaagtacatcgtgagcgcctggtacaacatgggcatgaccctgcacaagaaggccgccgaggacagactggccagcaccggcagcggccagagcttcctggccagacagagacaggccaccagcagcagaagaagctaccccggccacgtgcagcccgccaccgccagatag

SEQ ID NO: 84780 - DNA, 222 bp, synthetic construct
  misc_feature 1..222: note = Description of Artificial Sequence: Synthetic coding sequence
  source 1..222: mol_type = other DNA
atgagcgccgagaccgccagcggccccaccgaggaccaggtggagatcctggagtacaacttcaacaaggtggacaagcaccccgacagcaccaccctgtgcctgatcgccgccgaggccggcctgagcgaggaggagacccagaagtggttcaagcagagactggccaagtggagaagaagcgagggcctgcccagcgagtgcagaagcgtgaccgactag

SEQ ID NO: 84781 - DNA, 222 bp, synthetic construct; identical to SEQ ID NO: 84780
  misc_feature 1..222: note = Description of Artificial Sequence: Synthetic coding sequence
  source 1..222: mol_type = other DNA

SEQ ID NO: 84782 - DNA, 222 bp, synthetic construct; identical to SEQ ID NO: 84780
  misc_feature 1..222: note = Description of Artificial Sequence: Synthetic coding sequence
  source 1..222: mol_type = other DNA

SEQ ID NO: 84783 - DNA, 285 bp, synthetic construct
  misc_feature 1..285: note = Description of Artificial Sequence: Synthetic coding sequence
  source 1..285: mol_type = other DNA
atgagcgccgagaccgccagcggccccaccgaggaccaggtggagatcctggagtacaacttcaacaaggtggacaagcaccccgacagcaccaccctgtgcctgatcgccgccgaggccggcctgagcgaggaggagacccagggcagcgacctgatcagcagaagcaagatctggcaccccgagagcagcccccagagagagggctacccccacgacagcctgccctgcctggccttcgactacttcagcctgctgcccccccagtgcaaggagatggtgtag

SEQ ID NO: 84784 - DNA, 276 bp, synthetic construct
  misc_feature 1..276: note = Description of Artificial Sequence: Synthetic coding sequence
  source 1..276: mol_type = other DNA
atgctgatcttcctgggctgctacagaagaagactggaggagagagccggcaccatgagcgccgagaccgccagcggccccaccgaggaccaggtggagatcctggagtacaacttcaacaaggtggacaagcaccccgacagcaccaccctgtgcctgatcgccgccgaggccggcctgagcgaggaggagacccagaagtggttcaagcagagactggccaagtggagaagaagcgagggcctgcccagcgagtgcagaagcgtgaccgactag

SEQ ID NO: 84785 - DNA, 222 bp, synthetic construct; identical to SEQ ID NO: 84780
  misc_feature 1..222: note = Description of Artificial Sequence: Synthetic coding sequence
  source 1..222: mol_type = other DNA

SEQ ID NO: 84786 - DNA, 285 bp, synthetic construct; identical to SEQ ID NO: 84783
  misc_feature 1..285: note = Description of Artificial Sequence: Synthetic coding sequence
  source 1..285: mol_type = other DNA

SEQ ID NO: 84787 - DNA, 222 bp, synthetic construct; identical to SEQ ID NO: 84780
  misc_feature 1..222: note = Description of Artificial Sequence: Synthetic coding sequence
  source 1..222: mol_type = other DNA

SEQ ID NO: 84788 - DNA, 276 bp, synthetic construct; identical to SEQ ID NO: 84784
  misc_feature 1..276: note = Description of Artificial Sequence: Synthetic coding sequence
  source 1..276: mol_type = other DNA

SEQ ID NO: 84789 - DNA, 285 bp, synthetic construct; identical to SEQ ID NO: 84783
  misc_feature 1..285: note = Description of Artificial Sequence: Synthetic coding sequence
  source 1..285: mol_type = other DNA

SEQ ID NO: 84790 - DNA, 222 bp, synthetic construct; identical to SEQ ID NO: 84780
  misc_feature 1..222: note = Description of Artificial Sequence: Synthetic coding sequence
  source 1..222: mol_type = other DNA

SEQ ID NO: 84791 - DNA, 222 bp, synthetic construct; identical to SEQ ID NO: 84780
  misc_feature 1..222: note = Description of Artificial Sequence: Synthetic coding sequence
  source 1..222: mol_type = other DNA

SEQ ID NO: 84792 - DNA, 339 bp, synthetic construct
  misc_feature 1..339: note = Description of Artificial Sequence: Synthetic coding sequence
  source 1..339: mol_type = other DNA
atgctgatcttcctgggctgctacagaagaagactggaggagagagccggcaccatgagcgccgagaccgccagcggccccaccgaggaccaggtggagatcctggagtacaacttcaacaaggtggacaagcaccccgacagcaccaccctgtgcctgatcgccgccgaggccggcctgagcgaggaggagacccagggcagcgacctgatcagcagaagcaagatctggcaccccgagagcagcccccagagagagggctacccccacgacagcctgccctgcctggccttcgactacttcagcctgctgcccccccagtgcaaggagatggtgtag

SEQ ID NO: 84793 - DNA, 222 bp, synthetic construct; identical to SEQ ID NO: 84780
  misc_feature 1..222: note = Description of Artificial Sequence: Synthetic coding sequence
  source 1..222: mol_type = other DNA

SEQ ID NO: 84794 - DNA, 222 bp, synthetic construct; identical to SEQ ID NO: 84780
  misc_feature 1..222: note = Description of Artificial Sequence: Synthetic coding sequence
  source 1..222: mol_type = other DNA

SEQ ID NO: 84795 - DNA, 222 bp, synthetic construct; identical to SEQ ID NO: 84780
  misc_feature 1..222: note = Description of Artificial Sequence: Synthetic coding sequence
  source 1..222: mol_type = other DNA

SEQ ID NO: 84796 - DNA, 144 bp, synthetic construct
  misc_feature 1..144: note = Description of Artificial Sequence: Synthetic coding sequence
  source 1..144: mol_type = other DNA
atgagcgccgagaccgccagcggccccaccgaggaccaggtggagatcctggagtacaacttcaacaaggtggacaagcaccccgacagcaccaccctgtgcctgatcgccgccgaggccggcctgagcgaggaggagacctag

SEQ ID NO: 84797 - DNA, 1164 bp, synthetic construct
  misc_feature 1..1164: note = Description of Artificial Sequence: Synthetic coding sequence
  source 1..1164: mol_type = other DNA
atggccaccgcccagctgcagagaacccccatgagcgccctggtgttccccaacaagatcagcaccgagcaccagagcctggtgctggtgaagagactgctggccgtgagcgtgagctgcatcacctacctgagaggcatcttccccgagtgcgcctacggcaccagatacctggacgacctgtgcgtgaagatcctgagagaggacaagaactgccccggcagcacccagctggtgaagtggatgctgggctgctacgacgccctgcagaagaagtacgtgtacaccaaccccgaggacccccagaccatcagcgagtgctaccagttcaagttcaagtacaccaacaacggccccctgatggacttcatcagcaagaaccagagcaacgagagcagcatgctgagcaccgacaccaagaaggccagcatcctgctgatcagaaagatctacatcctgatgcagaacctgggccccctgcccaacgacgtgtgcctgaccatgaagctgttctactacgacgaggtgaccccccccgactaccagccccccggcttcaaggacggcgactgcgagggcgtgatcttcgagggcgagcccatgtacctgaacgtgggcgaggtgagcacccccttccacatcttcaaggtgaaggtgaccaccgagagagagagaatggagaacatcgacagcaccatcctgagccccaagcagatcaagacccccttccagaagatcctgagagacaaggacgtggaggacgagcaggagcactacaccagcgacgacctggacatcgagaccaagatggaggagcaggagaagaaccccgccagcagcgagctggaggagcccagcctggtgtgcgaggaggacgagatcatgagaagcaaggagagccccgacctgagcatcagccacagccaggtggagcagctggtgaacaagaccagcgagctggacatgagcgagagcaagaccagaagcggcaaggtgttccagaacaagatggccaacggcaaccagcccgtgaagagcagcaaggagaacagaaagagaagccagcacgagagcggcagaatcgtgctgcaccacttcgacagcagcagccaggagagcgtgcccaagagaagaaagttcagcgagcccaaggagcacatctag

SEQ ID NO: 84798 - DNA, 1185 bp, synthetic construct
  misc_feature 1..1185: note = Description of Artificial Sequence: Synthetic coding sequence
  source 1..1185: mol_type = other DNA
atggccaccgcccagctgcagagaacccccatgagcgccctggtgttccccaacaagatcagcaccgagcaccagagcctggtgctggtgaagagactgctggccgtgagcgtgagctgcatcacctacctgagaggcatcttccccgagtgcgcctacggcaccagatacctggacgacctgtgcgtgaagatcctgagagaggacaagaactgccccggcagcacccagctggtgaagtggatgctgggctgctacgacgccctgcagaagaagtacctgagaatggtggtgctggccgtgtacaccaaccccgaggacccccagaccatcagcgagtgctaccagttcaagttcaagtacaccaacaacggccccctgatggacttcatcagcaagaaccagagcaacgagagcagcatgctgagcaccgacaccaagaaggccagcatcctgctgatcagaaagatctacatcctgatgcagaacctgggccccctgcccaacgacgtgtgcctgaccatgaagctgttctactacgacgaggtgaccccccccgactaccagccccccggcttcaaggacggcgactgcgagggcgtgatcttcgagggcgagcccatgtacctgaacgtgggcgaggtgagcacccccttccacatcttcaaggtgaaggtgaccaccgagagagagagaatggagaacatcgacagcaccatcctgagccccaagcagatcaagacccccttccagaagatcctgagagacaaggacgtggaggacgagcaggagcactacaccagcgacgacctggacatcgagaccaagatggaggagcaggagaagaaccccgccagcagcgagctggaggagcccagcctggtgtgcgaggaggacgagatcatgagaagcaaggagagccccgacctgagcatcagccacagccaggtggagcagctggtgaacaagaccagcgagctggacatgagcgagagcaagaccagaagcggcaaggtgttccagaacaagatggccaacggcaaccagcccgtgaagagcagcaaggagaacagaaagagaagccagcacgagagcggcagaatcgtgctgcaccacttcgacagcagcagccaggagagcgtgcccaagagaagaaagttcagcgagcccaaggagcacatctag

SEQ ID NO: 84799 - DNA, 573 bp, synthetic construct
  misc_feature 1..573: note = Description of Artificial Sequence: Synthetic coding sequence
  source 1..573: mol_type = other DNA
atgagactgtggaacaagatcagcagatggatgctgggctgctacgacgccctgcagaagaagtacctgagaatggtggtgctggccgtgtacaccaaccccgaggacccccagaccatcagcgagtgctaccagttcaagttcaagtacaccaacaacggccccctgatggacttcatcagcaagaaccagagcaacgagagcagcatgctgagcaccgacaccaagaaggccagcatcctgctgatcagaaagatctacatcctgatgcagaacctgggccccctgcccaacgacgtgtgcctgaccatgaagctgttctactacgacgaggtgaccccccccgactaccagccccccggcttcaaggacggcgactgcgagggcgtgatcttcgagggcgagcccatgtacctgaacgtgggcgaggtgagcacccccttccacatcttcaaggtgaaggtgaccaccgagagagagagaatggagaacatcgacagcaccatcctgagccccaagcagatcaagacccccttccagaagatcctgagagacaaggacgtggaggactag

SEQ ID NO: 84800 - DNA, 972 bp, synthetic construct
  misc_feature 1..972: note = Description of Artificial Sequence: Synthetic coding sequence
  source 1..972: mol_type = other DNA
atgagactgtggaacaagatcagcagatggatgctgggctgctacgacgccctgcagaagaagtacctgaagatcatggagctgaccgtgtacaccaaccccgaggacccccagaccatcagcgagtgctaccagttcaagttcaagtacaccaacaacggccccctgatggacttcatcagcaagaaccagagcaacgagagcagcatgctgagcaccgacaccaagaaggccagcatcctgctgatcagaaagatctacatcctgatgcagaacctgggccccctgcccaacgacgtgtgcctgaccatgaagctgttctactacgacgaggtgaccccccccgactaccagccccccggcttcaaggacggcgactgcgagggcgtgatcttcgagggcgagcccatgtacctgaacgtgggcgaggtgagcacccccttccacatcttcaaggtgaaggtgaccaccgagagagagagaatggagaacatcgacagcaccatcctgagccccaagcagatcaagacccccttccagaagatcctgagagacaaggacgtggaggacgagcaggagcactacaccagcgacgacctggacatcgagaccaagatggaggagcaggagaagaaccccgccagcagcgagctggaggagcccagcctggtgtgcgaggaggacgagatcatgagaagcaaggagagccccgacctgagcatcagccacagccaggtggagcagctggtgaacaagaccagcgagctggacatgagcgagagcaagaccagaagcggcaaggtgttccagaacaagatggccaacggcaaccagcccgtgaagagcagcaaggagaacagaaagagaagccagcacgagagcggcagaatcgtgctgcaccacttcgacagcagcagccaggagagcgtgcccaagagaagaaagttcagcgagcccaaggagcacatctag

SEQ ID NO: 84801 - DNA, 1185 bp, synthetic construct
  misc_feature 1..1185: note = Description of Artificial Sequence: Synthetic coding sequence
  source 1..1185: mol_type = other DNA
atggccaccgcccagctgcagagaacccccatgagcgccctggtgttccccaacaagatcagcaccgagcaccagagcctggtgctggtgaagagactgctggccgtgagcgtgagctgcatcacctacctgagaggcatcttccccgagtgcgcctacggcaccagatacctggacgacctgtgcgtgaagatcctgagagaggacaagaactgccccggcagcacccagctggtgaagtggatgctgggctgctacgacgccctgcagaagaagtacctgaagatcatggagctgaccgtgtacaccaaccccgaggacccccagaccatcagcgagtgctaccagttcaagttcaagtacaccaacaacggccccctgatggacttcatcagcaagaaccagagcaacgagagcagcatgctgagcaccgacaccaagaaggccagcatcctgctgatcagaaagatctacatcctgatgcagaacctgggccccctgcccaacgacgtgtgcctgaccatgaagctgttctactacgacgaggtgaccccccccgactaccagccccccggcttcaaggacggcgactgcgagggcgtgatcttcgagggcgagcccatgtacctgaacgtgggcgaggtgagcacccccttccacatcttcaaggtgaaggtgaccaccgagagagagagaatggagaacatcgacagcaccatcctgagccccaagcagatcaagacccccttccagaagatcctgagagacaaggacgtggaggacgagcaggagcactacaccagcgacgacctggacatcgagaccaagatggaggagcaggagaagaaccccgccagcagcgagctggaggagcccagcctggtgtgcgaggaggacgagatcatgagaagcaaggagagccccgacctgagcatcagccacagccaggtggagcagctggtgaacaagaccagcgagctggacatgagcgagagcaagaccagaagcggcaaggtgttccagaacaagatggccaacggcaaccagcccgtgaagagcagcaaggagaacagaaagagaagccagcacgagagcggcagaatcgtgctgcaccacttcgacagcagcagccaggagagcgtgcccaagagaagaaagttcagcgagcccaaggagcacatctag

SEQ ID NO: 84802 - DNA, 945 bp, synthetic construct
  misc_feature 1..945: note = Description of Artificial Sequence: Synthetic coding sequence
  source 1..945: mol_type = other DNA
atgagactgtggaacaagatcagcagatggatgctgggctgctacgacgccctgcagaagaagtacctgagaatggtggtgctggccaccatcagcgagtgctaccagttcaagttcaagtacaccaacaacggccccctgatggacttcatcagcaagaaccagagcaacgagagcagcatgctgagcaccgacaccaagaaggccagcatcctgctgatcagaaagatctacatcctgatgcagaacctgggccccctgcccaacgacgtgtgcctgaccatgaagctgttctactacgacgaggtgaccccccccgactaccagccccccggcttcaaggacggcgactgcgagggcgtgatcttcgagggcgagcccatgtacctgaacgtgggcgaggtgagcacccccttccacatcttcaaggtgaaggtgaccaccgagagagagagaatggagaacatcgacagcaccatcctgagccccaagcagatcaagacccccttccagaagatcctgagagacaaggacgtggaggacgagcaggagcactacaccagcgacgacctggacatcgagaccaagatggaggagcaggagaagaaccccgccagcagcgagctggaggagcccagcctggtgtgcgaggaggacgagatcatgagaagcaaggagagccccgacctgagcatcagccacagccaggtggagcagctggtgaacaagaccagcgagctggacatgagcgagagcaagaccagaagcggcaaggtgttccagaacaagatggccaacggcaaccagcccgtgaagagcagcaaggagaacagaaagagaagccagcacgagagcggcagaatcgtgctgcaccacttcgacagcagcagccaggagagcgtgcccaagagaagaaagttcagcgagcccaaggagcacatctag

SEQ ID NO: 84803 - DNA, 495 bp, synthetic construct
  misc_feature 1..495: note = Description of Artificial Sequence: Synthetic coding sequence
  source 1..495: mol_type = other DNA
atgagactgtggaacaagatcagcagatggatgctgggctgctacgacgccctgcagaagaagtacgtgtacaccaaccccgaggacccccagaccatcagcgagtgctaccagttcaagttcaagtacaccaacaacggccccctgatggacttcatcagcaagaaccagagcaacgagagcagcatgctgagcaccgacaccaagaaggccagcatcctgctgatcagaaagatctacatcctgatgcagaacctgggccccctgcccaacgacgtgtgcctgaccatgaagctgttctactacgacgaggtgaccccccccgactaccagccccccggcttcaaggacggcgactgcgagggcgtgatcttcgagggcgagcccatgtacctgaacgtgggcgaggtgagcacccccttccacatcttcaaggtgaaggtgaccaccgagagagagagaatggagaacatcgacagcaccatcctgagctag

SEQ ID NO: 84804 - DNA, 945 bp, synthetic construct
  misc_feature 1..945: note = Description of Artificial Sequence: Synthetic coding sequence
  source 1..945: mol_type = other DNA
atgagactgtggaacaagatcagcagatggatgctgggctgctacgacgccctgcagaagaagtacctgagatacttcctgttcaagaccatcagcgagtgctaccagttcaagttcaagtacaccaacaacggccccctgatggacttcatcagcaagaaccagagcaacgagagcagcatgctgagcaccgacaccaagaaggccagcatcctgctgatcagaaagatctacatcctgatgcagaacctgggccccctgcccaacgacgtgtgcctgaccatgaagctgttctactacgacgaggtgaccccccccgactaccagccccccggcttcaaggacggcgactgcgagggcgtgatcttcgagggcgagcccatgtacctgaacgtgggcgaggtgagcacccccttccacatcttcaaggtgaaggtgaccaccgagagagagagaatggagaacatcgacagcaccatcctgagccccaagcagatcaagacccccttccagaagatcctgagagacaaggacgtggaggacgagcaggagcactacaccagcgacgacctggacatcgagaccaagatggaggagcaggagaagaaccccgccagcagcgagctggaggagcccagcctggtgtgcgaggaggacgagatcatgagaagcaaggagagccccgacctgagcatcagccacagccaggtggagcagctggtgaacaagaccagcgagctggacatgagcgagagcaagaccagaagcggcaaggtgttccagaacaagatggccaacggcaaccagcccgtgaagagcagcaaggagaacagaaagagaagccagcacgagagcggcagaatcgtgctgcaccacttcgacagcagcagccaggagagcgtgcccaagagaagaaagttcagcgagcccaaggagcacatctag

SEQ ID NO: 84805 - DNA, 6108 bp, synthetic construct
  misc_feature 1..6108: note = Description of Artificial Sequence: Synthetic coding sequence
  source 1..6108: mol_type = other DNA
atggccagcgccgtgagccccgccaacctgcccgccgtgctgctgcagcccagatggaagagagtggtgggctggagcggccccgtgcccagacccagacacggccacagagccgtggccatcaaggagctgatcgtggtgttcggcggcggcaacgagggcatcgtggacgagctgcacgtgtacaacaccgccaccaaccagtggttcatccccgccgtgagaggcgacatcccccccggctgcgccgcctacggcttcgtgtgcgacggcaccagactgctggtgttcggcggcatggtggagtacggcaagtacagcaacgacctgtacgagctgcaggccagcagatgggagtggaagagactgaaggccaagacccccaagaacggcccccccccctgccccagactgggccacagcttcagcctggtgggcaacaagtgctacctgttcggcggcctggccaacgacagcgaggaccccaagaacaacatccccagatacctgaacgacctgtacatcctggagctgagacccggcagcggcgtggtggcctgggacatccccatcacctacggcgtgctgcccccccccagagagagccacaccgccgtggtgtacaccgagaaggacaacaagaagagcaagctggtgatctacggcggcatgagcggctgcagactgggcgacctgtggaccctggacatcgacaccctgacctggaacaagcccagcctgagcggcgtggcccccctgcccagaagcctgcacagcgccaccaccatcggcaacaagatgtacgtgttcggcggctgggtgcccctggtgatggacgacgtgaaggtggccacccacgagaaggagtggaagtgcaccaacaccctggcctgcctgaacctggacaccatggcctgggagaccatcctgatggacaccctggaggacaacatccccagagccagagccggccactgcgccgtggccatcaacaccagactgtacatctggagcggcagagacggctacagaaaggcctggaacaaccaggtgtgctgcaaggacctgtggtacctggagaccgagaagccccccccccccgccagagtgcagctggtgagagccaacaccaacagcctggaggtgagctggggcgccgtggccaccgccgacagctacctgctgcagctgcagaagtacgacatccccgccaccgccgccaccgccaccagccccacccccaaccccgtgcccagcgtgcccgccaacccccccaagagccccgcccccgccgccgccgcccccgccgtgcagcccctgacccaggtgggcatcaccctgctgccccaggccgcccccgccccccccaccaccaccaccatccaggtgctgcccaccgtgcccggcagcagcatcagcgtgcccaccgccgccagaacccagggcgtgcccgccgtgctgaaggtgaccggcccccaggccaccaccggcacccccctggtgaccatgagacccgccagccaggccggcaaggcccccgtgaccgtgaccagcctgcccgccggcgtgagaatggtggtgcccacccagagcgcccagggcaccgtgatcggcagcagcccccagatgagcggcatggccgccctggccgccgccgccgccgccacccagaagatcccccccagcagcgcccccaccgtgctgagcgtgcccgccggcaccaccatcgtgaagaccatggccgtgacccccggcaccaccaccctgcccgccaccgtgaaggtggccagcagccccgtgatggtgagcaaccccgccaccagaatgctgaagaccgccgccgcccaggtgggcaccagcgtgagcagcgccaccaacaccagcaccagacccatcatcaccgtgcacaagagcggcaccgtgaccgtggcccagcaggcccaggtggtgaccaccgtggtgggcggcgtgaccaagaccatcaccctggtgaagagccccatcagcgtgcccggcggcagcgccctgatcagcaacctgggcaaggtgatgagcgtggtgcagaccaagcccgtgcagaccagcgccgtgaccggccaggccagcaccggccccgtgacccagatcatccagaccaagggccccctgcccgccggcaccatcctgaagctggtgaccagcgccgacggcaagcccaccaccatcatcaccaccacccaggccagcggcgccggcaccaagcccaccatcctgggcatcagcagcgtgagccccagcaccaccaagcccggcaccaccaccatcatcaagaccatccccatgagcgccatcatcacccaggccggcgccaccggcgtgaccagcagccccggcatcaagagccccatcaccatcatcaccaccaaggtgatgaccagcggcaccggcgcccccgccaagatcatcaccgccgtgcccaagatcgccaccggccacggccagcagggcgtgacccaggtggtgctgaagggcgcccccggccagcccggcaccatcctgagaaccgtgcccatgggcggcgtgagactggtgacccccgtgaccgtgagcgccgtgaagcccgccgtgaccaccctggtggtgaagggcaccaccggcgtgaccaccctgggcaccgtgaccggcaccgtgagcaccagcctggccggcgccggcggccacagcaccagcgccagcctggccacccccatcaccaccctgggcaccatcgccaccctgagcagccaggtgatcaaccccaccgccatcaccgtgagcgccgcccagaccaccctgaccgccgccggcggcctgaccacccccaccatcaccatgcagcccgtgagccagcccacccaggtgaccctgatcaccgcccccagcggcgtggaggcccagcccgtgcacgacctgcccgtgagcatcctggccagccccaccaccgagcagcccaccgccaccgtgaccatcgccgacagcggccagggcgacgtgcagcccggcaccgtgaccctggtgtgcagcaaccccccctgcgagacccacgagaccggcaccaccaacaccgccaccaccaccgtggtggccaacctgggcggccacccccagcccacccaggtgcagttcgtgtgcgacagacaggaggccgccgccagcctggtgaccagcaccgtgggccagcagaacggcagcgtggtgagagtgtgcagcaaccccccctgcgagacccacgagaccggcaccaccaacaccgccaccaccgccaccagcaacatggccggccagcacggctgcagcaaccccccctgcgagacccacgagaccggcaccaccaacaccgccaccaccgccatgagcagcgtgggcgccaaccaccagagagacgccagaagagcctgcgccgccggcacccccgccgtgatcagaatcagcgtggccaccggcgccctggaggccgcccagggcagcaagagccagtgccagaccagacagaccagcgccaccagcaccaccatgaccgtgatggccaccggcgccccctgcagcgccggccccctgctgggccccagcatggccagagagcccggcggcagaagccccgccttcgtgcagctggcccccctgagcagcaaggtgagactgagcagccccagcatcaaggacctgcccgccggcagacacagccacgccgtgagcaccgccgccatgaccagaagcagcgtgggcgccggcgagcccagaatggcccccgtgtgcgagagcctgcagggcggcagccccagcaccaccgtgaccgtgaccgccctggaggccctgctgtgccccagcgccaccgtgacccaggtgtgcagcaaccccccctgcgagacccacgagaccggcaccaccaacaccgccaccaccagcaacgccggcagcgcccagagagtgtgcagcaaccccccctgcgagacccacgagaccggcaccacccacaccgccaccaccgccaccagcaacggcggcaccggccagcccgagggcggccagcagccccccgccggcagaccctgcgagacccaccagaccaccagcaccggcaccaccatgagcgtgagcgtgggcgccctgctgcccgacgccaccagcagccacagaaccgtggagagcggcctggaggtggccgccgcccccagcgtgaccccccaggccggcaccgccctgctggcccccttccccacccagagagtgtgcagcaaccccccctgcgagacccacgagaccggcaccacccacaccgccaccaccgtgaccagcaacatgagcagcaaccaggaccccccccccgccgccagcgaccagggcgaggtggagagcacccagggcgacagcgtgaacatcaccagcagcagcgccatcaccaccaccgtgagcagcaccctgaccagagccgtgaccaccgtgacccagagcacccccgtgcccggccccagcgtgcccccccccgaggagctgcaggtgagccccggccccagacagcagctgccccccagacagctgctgcagagcgccagcaccgccctgatgggcgagagcgccgaggtgctgagcgccagccagacccccgagctgcccgccgccgtggacctgagcagcaccggcgagcccagcagcggccaggagagcgccggcagcgccgtggtggccaccgtggtggtgcagccccccccccccacccagagcgaggtggaccagctgagcctgccccaggagctgatggccgaggcccaggccggcaccaccaccctgatggtgaccggcctgacccccgaggagctggccgtgaccgccgccgccgaggccgccgcccaggccgccgccaccgaggaggcccaggccctggccatccaggccgtgctgcaggccgcccagcaggccgtgatgggcaccggcgagcccatggacaccagcgaggccgccgccaccgtgacccaggccgagctgggccacctgagcgccgagggccaggagggccaggccaccaccatccccatcgtgctgacccagcaggagctggccgccctggtgcagcagcagcagctgcaggaggcccaggcccagcagcagcaccaccacctgcccaccgaggccctggcccccgccgacagcctgaacgaccccgccatcgagagcaactgcctgaacgagctggccggcaccgtgcccagcaccgtggccctgctgcccagcaccgccaccgagagcctggcccccagcaacaccttcgtggccccccagcccgtggtggtggccagccccgccaagctgcaggccgccgccaccctgaccgaggtggccaacggcatcgagagcctgggcgtgaagcccgacctgccccccccccccagcaaggcccccatgaagaaggagaaccagtggttcgacgtgggcgtgatcaagggcaccaacgtgatggtgacccactacttcctgccccccgacgacgccgtgcccagcgacgacgacctgggcaccgtgcccgactacaaccagctgaagaagcaggagctgcagcccggcaccgcctacaagttcagagtggccggcatcaacgcctgcggcagaggccccttcagcgagatcagcgccttcaagacctgcctgcccggcttccccggcgccccctgcgccatcaagatcagcaagagccccgacggcgcccacctgacctgggagccccccagcgtgaccagcggcaagatcatcgagtacagcgtgtacctggccatccagagcagccaggccggcggcgagctgaagagcagcacccccgcccagctggccttcatgagagtgtactgcggccccagccccagctgcctggtgcagagcagcagcctgagcaacgcccacatcgactacaccaccaagcccgccatcatcttcagaatcgccgccagaaacgagaagggctacggccccgccacccaggtgagatggctgcaggagaccagcaaggacagcagcggcaccaagcccgccaacaagagacccatgagcagccccgagatgaagagcgcccccaagaagagcaaggccgacggccagtag

SEQ ID NO: 84806 - DNA, 5901 bp, synthetic construct
  misc_feature 1..5901: note = Description of Artificial Sequence: Synthetic coding sequence
  source 1..5901: mol_type = other DNA
atggccagcgccgtgagccccgccaacctgcccgccgtgctgctgcagcccagatggaagagagtggtgggctggagcggccccgtgcccagacccagacacggccacagagccgtggccatcaaggagctgatcgtggtgttcggcggcggcaacgagggcatcgtggacgagctgcacgtgtacaacaccgccaccaaccagtggttcatccccgccgtgagaggcgacatcccccccggctgcgccgcctacggcttcgtgtgcgacggcaccagactgctggtgttcggcggcatggtggagtacggcaagtacagcaacgacctgtacgagctgcaggccagcagatgggagtggaagagactgaaggccaagacccccaagaacggcccccccccctgccccagactgggccacagcttcagcctggtgggcaacaagtgctacctgttcggcggcctggccaacgacagcgaggaccccaagaacaacatccccagatacctgaacgacctgtacatcctggagctgagacccggcagcggcgtggtggcctgggacatccccatcacctacggcgtgctgcccccccccagagagagccacaccgccgtggtgtacaccgagaaggacaacaagaagagcaagctggtgatctacggcggcatgagcggctgcagactgggcgacctgtggaccctggacatcgacaccctgacctggaacaagcccagcctgagcggcgtggcccccctgcccagaagcctgcacagcgccaccaccatcggcaacaagatgtacgtgttcggcggctgggtgcccctggtgatggacgacgtgaaggtggccacccacgagaaggagtggaagtgcaccaacaccctggcctgcctgaacctggacaccatggcctgggagaccatcctgatggacaccctggaggacaacatccccagagccagagccggccactgcgccgtggccatcaacaccagactgtacatctggagcggcagagacggctacagaaaggcctggaacaaccaggtgtgctgcaaggacctgtggtacctggagaccgagaagccccccccccccgccagagtgcagctggtgagagccaacaccaacagcctggaggccgcccccgccccccccaccaccaccaccatccaggtgctgcccaccgtgcccggcagcagcatcagcgtgcccaccgccgccagaacccagggcgtgcccgccgtgctgaaggtgaccggcccccaggccaccaccggcacccccctggtgaccatgagacccgccagccaggccggcaaggcccccgtgaccgtgaccagcctgcccgccggcgtgagaatggtggtgcccacccagagcgcccagggcaccgtgatcggcagcagcccccagatgagcggcatggccgccctggccgccgccgccgccgccacccagaagatcccccccagcagcgcccccaccgtgctgagcgtgcccgccggcaccaccatcgtgaagaccatggccgtgacccccggcaccaccaccctgcccgccaccgtgaaggtggccagcagccccgtgatggtgagcaaccccgccaccagaatgctgaagaccgccgccgcccaggtgggcaccagcgtgagcagcgccaccaacaccagcaccagacccatcatcaccgtgcacaagagcggcaccgtgaccgtggcccagcaggcccaggtggtgaccaccgtggtgggcggcgtgaccaagaccatcaccctggtgaagagccccatcagcgtgcccggcggcagcgccctgatcagcaacctgggcaaggtgatgagcgtggtgcagaccaagcccgtgcagaccagcgccgtgaccggccaggccagcaccggccccgtgacccagatcatccagaccaagggccccctgcccgccggcaccatcctgaagctggtgaccagcgccgacggcaagcccaccaccatcatcaccaccacccaggccagcggcgccggcaccaagcccaccatcctgggcatcagcagcgtgagccccagcaccaccaagcccggcaccaccaccatcatcaagaccatccccatgagcgccatcatcacccaggccggcgccaccggcgtgaccagcagccccggcatcaagagccccatcaccatcatcaccaccaaggtgatgaccagcggcaccggcgcccccgccaagatcatcaccgccgtgcccaagatcgccaccggccacggccagcagggcgtgacccaggtggtgctgaagggcgcccccggccagcccggcaccatcctgagaaccgtgcccatgggcggcgtgagactggtgacccccgtgaccgtgagcgccgtgaagcccgccgtgaccaccctggtggtgaagggcaccaccggcgtgaccaccctgggcaccgtgaccggcaccgtgagcaccagcctggccggcgccggcggccacagcaccagcgccagcctggccacccccatcaccaccctgggcaccatcgccaccctgagcagccaggtgatcaaccccaccgccatcaccgtgagcgccgcccagaccaccctgaccgccgccggcggcctgaccacccccaccatcaccatgcagcccgtgagccagcccacccaggtgaccctgatcaccgcccccagcggcgtggaggcccagcccgtgcacgacctgcccgtgagcatcctggccagccccaccaccgagcagcccaccgccaccgtgaccatcgccgacagcggccagggcgacgtgcagcccggcaccgtgaccctggtgtgcagcaaccccccctgcgagacccacgagaccggcaccaccaacaccgccaccaccaccgtggtggccaacctgggcggccacccccagcccacccaggtgcagttcgtgtgcgacagacaggaggccgccgccagcctggtgaccagcaccgtgggccagcagaacggcagcgtggtgagagtgtgcagcaaccccccctgcgagacccacgagaccggcaccaccaacaccgccaccaccgccaccagcaacatggccggccagcacggctgcagcaaccccccctgcgagacccacgagaccggcaccaccaacaccgccaccaccgccatgagcagcgtgggcgccaaccaccagagagacgccagaagagcctgcgccgccggcacccccgccgtgatcagaatcagcgtggccaccggcgccctggaggccgcccagggcagcaagagccagtgccagaccagacagaccagcgccaccagcaccaccatgaccgtgatggccaccggcgccccctgcagcgccggccccctgctgggccccagcatggccagagagcccggcggcagaagccccgccttcgtgcagctggcccccctgagcagcaaggtgagactgagcagccccagcatcaaggacctgcccgccggcagacacagccacgccgtgagcaccgccgccatgaccagaagcagcgtgggcgccggcgagcccagaatggcccccgtgtgcgagagcctgcagggcggcagccccagcaccaccgtgaccgtgaccgccctggaggccctgctgtgccccagcgccaccgtgacccaggtgtgcagcaaccccccctgcgagacccacgagaccggcaccaccaacaccgccaccaccagcaacgccggcagcgcccagagagtgtgcagcaaccccccctgcgagacccacgagaccggcaccacccacaccgccaccaccgccaccagcaacggcggcaccggccagcccgagggcggccagcagccccccgccggcagaccctgcgagacccaccagaccaccagcaccggcaccaccatgagcgtgagcgtgggcgccctgctgcccgacgccaccagcagccacagaaccgtggagagcggcctggaggtggccgccgcccccagcgtgaccccccaggccggcaccgccctgctggcccccttccccacccagagagtgtgcagcaaccccccctgcgagacccacgagaccggcaccacccacaccgccaccaccgtgaccagcaacatgagcagcaaccaggaccccccccccgccgccagcgaccagggcgaggtggagagcacccagggcgacagcgtgaacatcaccagcagcagcgccatcaccaccaccgtgagcagcaccctgaccagagccgtgaccaccgtgacccagagcacccccgtgcccggccccagcgtgcccccccccgaggagctgcaggtgagccccggccccagacagcagctgccccccagacagctgctgcagagcgccagcaccgccctgatgggcgagagcgccgaggtgctgagcgccagccagacccccgagctgcccgccgccgtggacctgagcagcaccggcgagcccagcagcggccaggagagcgccggcagcgccgtggtggccaccgtggtggtgcagccccccccccccacccagagcgaggtggaccagctgagcctgccccaggagctgatggccgaggcccaggccggcaccaccaccctgatggtgaccggcctgacccccgaggagctggccgtgaccgccgccgccgaggccgccgcccaggccgccgccaccgaggaggcccaggccctggccatccaggccgtgctgcaggccgcccagcaggccgtgatgggcaccggcgagcccatggacaccagcgaggccgccgccaccgtgacccaggccgagctgggccacctgagcgccgagggccaggagggccaggccaccaccatccccatcgtgctgacccagcaggagctggccgccctggtgcagcagcagcagctgcaggaggcccaggcccagcagcagcaccaccacctgcccaccgaggccctggcccccgccgacagcctgaacgaccccgccatcgagagcaactgcctgaacgagctggccggcaccgtgcccagcaccgtggccctgctgcccagcaccgccaccgagagcctggcccccagcaacaccttcgtggccccccagcccgtggtggtggccagccccgccaagctgcaggccgccgccaccctgaccgaggtggccaacggcatcgagagcctgggcgtgaagcccgacctgccccccccccccagcaaggcccccatgaagaaggagaaccagtggttcgacgtgggcgtgatcaagggcaccaacgtgatggtgacccactacttcctgccccccgacgacgccgtgcccagcgacgacgacctgggcaccgtgcccgactacaaccagctgaagaagcaggagctgcagcccggcaccgcctacaagttcagagtggccggcatcaacgcctgcggcagaggccccttcagcgagatcagcgccttcaagacctgcctgcccggcttccccggcgccccctgcgccatcaagatcagcaagagccccgacggcgcccacctgacctgggagccccccagcgtgaccagcggcaagatcatcgagtacagcgtgtacctggccatccagagcagccaggccggcggcgagctgaagagcagcacccccgcccagctggccttcatgagagtgtactgcggccccagccccagctgcctggtgcagagcagcagcctgagcaacgcccacatcgactacaccaccaagcccgccatcatcttcagaatcgccgccagaaacgagaagggctacggccccgccacccaggtgagatggctgcaggagaccagcaaggacagcagcggcaccaagcccgccaacaagagacccatgagcagccccgagatgaagagcgcccccaagaagagcaaggccgacggccagtag

SEQ ID NO: 84807 - DNA, 6243 bp, synthetic construct
  misc_feature 1..6243: note = Description of Artificial Sequence: Synthetic coding sequence
  source 1..6243: mol_type = other DNA
atggccagcgccgtgagccccgccaacctgcccgccgtgctgctgcagcccagatggaagagagtggtgggctggagcggccccgtgcccagacccagacacggccacagagccgtggccatcaaggagctgatcgtggtgttcggcggcggcaacgagggcatcgtggacgagctgcacgtgtacaacaccgccaccaaccagtggttcatccccgccgtgagaggcgacatcccccccggctgcgccgcctacggcttcgtgtgcgacggcaccagactgctggtgttcggcggcatggtggagtacggcaagtacagcaacgacctgtacgagctgcaggccagcagatgggagtggaagagactgaaggccaagacccccaagaacggcccccccccctgccccagactgggccacagcttcagcctggtgggcaacaagtgctacctgttcggcggcctggccaacgacagcgaggaccccaagaacaacatccccagatacctgaacgacctgtacatcctggagctgagacccggcagcggcgtggtggcctgggacatccccatcacctacggcgtgctgcccccccccagagagagccacaccgccgtggtgtacaccgagaaggacaacaagaagagcaagctggtgatctacggcggcatgagcggctgcagactgggcgacctgtggaccctggacatcgacaccctgacctggaacaagcccagcctgagcggcgtggcccccctgcccagaagcctgcacagcgccaccaccatcggcaacaagatgtacgtgttcggcggctgggtgcccctggtgatggacgacgtgaaggtggccacccacgagaaggagtggaagtgcaccaacaccctggcctgcctgaacctggacaccatggcctgggagaccatcctgatggacaccctggaggacaacatccccagagccagagccggccactgcgccgtggccatcaacaccagactgtacatctggagcggcagagacggctacagaaaggcctggaacaaccaggtgtgctgcaaggacctgtggtacctggagaccgagaagccccccccccccgccagagtgcagctggtgagagccaacaccaacagcctggaggtgagctggggcgccgtggccaccgccgacagctacctgctgcagctgcagaagtacgacatccccgccaccgccgccaccgccaccagccccacccccaaccccgtgcccagcgtgcccgccaacccccccaagagccccgcccccgccgccgccgcccccgccgtgcagcccctgacccaggtgggcatcaccctgctgccccaggccgcccccgccccccccaccaccaccaccatccaggtgctgcccaccgtgcccggcagcagcatcagcgtgcccaccgccgccagaacccagggcgtgcccgccgtgctgaaggtgaccggcccccaggccaccaccggcacccccctggtgaccatgagacccgccagccaggccggcaaggcccccgtgaccgtgaccagcctgcccgccggcgtgagaatggtggtgcccacccagagcgcccagggcaccgtgatcggcagcagcccccagatgagcggcatggccgccctggccgccgccgccgccgccacccagaagatcccccccagcagcgcccccaccgtgctgagcgtgcccgccggcaccaccatcgtgaagaccatggccgtgacccccggcaccaccaccctgcccgccaccgtgaaggtggccagcagccccgtgatggtgagcaaccccgccaccagaatgctgaagaccgccgccgcccaggtgggcaccagcgtgagcagcgccaccaacaccagcaccagacccatcatcaccgtgcacaagagcggcaccgtgaccgtggcccagcaggcccaggtggtgaccaccgtggtgggcggcgtgaccaagaccatcaccctggtgaagagccccatcagcgtgcccggcggcagcgccctgatcagcaacctgggcaaggtgatgagcgtggtgcagaccaagcccgtgcagaccagcgccgtgaccggccaggccagcaccggccccgtgacccagatcatccagaccaagggccccctgcccgccggcaccatcctgaagctggtgaccagcgccgacggcaagcccaccaccatcatcaccaccacccaggccagcggcgccggcaccaagcccaccatcctgggcatcagcagcgtgagccccagcaccaccaagcccggcaccaccaccatcatcaagaccatccccatgagcgccatcatcacccaggccggcgccaccggcgtgaccagcagccccggcatcaagagccccatcaccatcatcaccaccaaggtgatgaccagcggcaccggcgcccccgccaagatcatcaccgccgtgcccaagatcgccaccggccacggccagcagggcgtgacccaggtggtgctgaagggcgcccccggccagcccggcaccatcctgagaaccgtgcccatgggcggcgtgagactggtgacccccgtgaccgtgagcgccgtgaagcccgccgtgaccaccctggtggtgaagggcaccaccggcgtgaccaccctgggcaccgtgaccggcaccgtgagcaccagcctggccggcgccggcggccacagcaccagcgccagcctggccacccccatcaccaccctgggcaccatcgccaccctgagcagccaggtgatcaaccccaccgccatcaccgtgagcgccgcccagaccaccctgaccgccgccggcggcctgaccacccccaccatcaccatgcagcccgtgagccagcccacccaggtgaccctgatcaccgcccccagcggcgtggaggcccagcccgtgcacgacctgcccgtgagcatcctggccagccccaccaccgagcagcccaccgccaccgtgaccatcgccgacagcggccagggcgacgtgcagcccggcaccgtgaccctggtgtgcagcaaccccccctgcgagacccacgagaccggcaccaccaacaccgccaccaccaccgtggtggccaacctgggcggccacccccagcccacccaggtgcagttcgtgtgcgacagacaggaggccgccgccagcctggtgaccagcaccgtgggccagcagaacggcagcgtggtgagagtgtgcagcaaccccccctgcgagacccacgagaccggcaccaccaacaccgccaccaccgccaccagcaacatggccggccagcacggctgcagcaaccccccctgcgagacccacgagaccggcaccaccaacaccgccaccaccgccatgagcagcgtgggcgccaaccaccagagagacgccagaagagcctgcgccgccggcacccccgccgtgatcagaatcagcgtggccaccggcgccctggaggccgcccagggcagcaagagccagtgccagaccagacagaccagcgccaccagcaccaccatgaccgtgatggccaccggcgccccctgcagcgccggccccctgctgggccccagcatggccagagagcccggcggcagaagccccgccttcgtgcagctggcccccctgagcagcaaggtgagactgagcagccccagcatcaaggacctgcccgccggcagacacagccacgccgtgagcaccgccgccatgaccagaagcagcgtgggcgccggcgagcccagaatggcccccgtgtgcgagagcctgcagggcggcagccccagcaccaccgtgaccgtgaccgccctggaggccctgctgtgccccagcgccaccgtgacccaggtgtgcagcaaccccccctgcgagacccacgagaccggcaccaccaacaccgccaccaccagcaacgccggcagcgcccagagagtgtgcagcaaccccccctgcgagacccacgagaccggcaccacccacaccgccaccaccgccaccagcaacggcggcaccggccagcccgagggcggccagcagccccccgccggcagaccctgcgagacccaccagaccaccagcaccggcaccaccatgagcgtgagcgtgggcgccctgctgcccgacgccaccagcagccacagaaccgtggagagcggcctggaggtggccgccgcccccagcgtgaccccccaggccggcaccgccctgctggcccccttccccacccagagagtgtgcagcaaccccccctgcgagacccacgagaccggcaccacccacaccgccaccaccgtgaccagcaacatgagcagcaaccaggaccccccccccgccgccagcgaccagggcgaggtggagagcacccagggcgacagcgtgaacatcaccagcagcagcgccatcaccaccaccgtgagcagcaccctgaccagagccgtgaccaccgtgacccagagcacccccgtgcccggccccagcgtgcccaagatcagcagcatgaccgagaccgcccccagagccctgaccaccgaggtgcccatccccgccaagatcaccgtgaccatcgccaacaccgagaccagcgacatgcccttcagcgccgtggacatcctgcagccccccgaggagctgcaggtgagccccggccccagacagcagctgccccccagacagctgctgcagagcgccagcaccgccctgatgggcgagagcgccgaggtgctgagcgccagccagacccccgagctgcccgccgccgtggacctgagcagcaccggcgagcccagcagcggccaggagagcgccggcagcgccgtggtggccaccgtggtggtgcagccccccccccccacccagagcgaggtggaccagctgagcctgccccaggagctgatggccgaggcccaggccggcaccaccaccctgatggtgaccggcctgacccccgaggagctggccgtgaccgccgccgccgaggccgccgcccaggccgccgccaccgaggaggcccaggccctggccatccaggccgtgctgcaggccgcccagcaggccgtgatggccggcaccggcgagcccatggacaccagcgaggccgccgccaccgtgacccaggccgagctgggccacctgagcgccgagggccaggagggccaggccaccaccatccccatcgtgctgacccagcaggagctggccgccctggtgcagcagcagcagctgcaggaggcccaggcccagcagcagcaccaccacctgcccaccgaggccctggcccccgccgacagcctgaacgaccccgccatcgagagcaactgcctgaacgagctggccggcaccgtgcccagcaccgtggccctgctgcccagcaccgccaccgagagcctggcccccagcaacaccttcgtggccccccagcccgtggtggtggccagccccgccaagctgcaggccgccgccaccctgaccgaggtggccaacggcatcgagagcctgggcgtgaagcccgacctgccccccccccccagcaaggcccccatgaagaaggagaaccagtggttcgacgtgggcgtgatcaagggcaccaacgtgatggtgacccactacttcctgccccccgacgacgccgtgcccagcgacgacgacctgggcaccgtgcccgactacaaccagctgaagaagcaggagctgcagcccggcaccgcctacaagttcagagtggccggcatcaacgcctgcggcagaggccccttcagcgagatcagcgccttcaagacctgcctgcccggcttccccggcgccccctgcgccatcaagatcagcaagagccccgacggcgcccacctgacctgggagccccccagcgtgaccagcggcaagatcatcgagtacagcgtgtacctggccatccagagcagccaggccggcggcgagctgaagagcagcacccccgcccagctggccttcatgagagtgtactgcggccccagccccagctgcctggtgcagagcagcagcctgagcaacgcccacatcgactacaccaccaagcccgccatcatcttcagaatcgccgccagaaacgagaagggctacggccccgccacccaggtgagatggctgcaggagaccagcaaggacagcagcggcaccaagcccgccaacaagagacccatgagcagccccgagatgaagagcgcccccaagaagagcaaggccgacggccagtag

SEQ ID NO: 84808 - DNA, 1305 bp, synthetic construct
  misc_feature 1..1305: note = Description of Artificial Sequence: Synthetic coding sequence
  source 1..1305: mol_type = other DNA
atggacagcgtggagaagggcgccgccaccagcgtgagcaaccccagaggcagacccagcagaggcagaccccccaagctgcagagaaacagcagaggcggccagggcagaggcgtggagaagcccccccacctggccgccctgatcctggccagaggcggcagcaagggcatccccctgaagaacatcaagcacctggccggcgtgcccctgatcggctgggtgctgagagccgccctggacagcggcgccttccagagcgtgtgggtgagcaccgaccacgacgagatcgagaacgtggccaagcagttcggcgcccaggtgcacagaagaagcagcgaggtgagcaaggacagcagcaccagcctggacgccatcatcgagttcctgaactaccacaacgaggtggacatcgtgggcaacatccaggccaccagcccctgcctgcaccccaccgacctgcagaaggtggccgagatgatcagagaggagggctacgacagcgtgttcagcgtggtgagaagacaccagttcagatggagcgagatccagaagggcgtgagagaggtgaccgagcccctgaacctgaaccccgccaagagacccagaagacaggactgggacggcgagctgtacgagaacggcagcttctacttcgccaagagacacctgatcgagatgggctacctgcagggcggcaagatggcctactacgagatgagagccgagcacagcgtggacatcgacgtggacatcgactggcccatcgccgagcagagagtgctgagatacggctacttcggcaaggagaagctgaaggagatcaagctgctggtgtgcaacatcgacggctgcctgaccaacggccacatctacgtgagcggcgaccagaaggagatcatcagctacgacgtgaaggacgccatcggcatcagcctgctgaagaagagcggcatcgaggtgagactgatcagcgagagagcctgcagcaagcagaccctgagcagcctgaagctggactgcaagatggaggtgagcgtgagcgacaagctggccgtggtggacgagtggagaaaggagatgggcctgtgctggaaggaggtggcctacctgggcaacgaggtgagcgacgaggagtgcctgaagagagtgggcctgagcggcgcccccgccgacgcctgcagcaccgcccagaaggccgtgggctacatctgcaagtgcaacggcggcagaggcgccatcagagagttcgccgagcacatctgcctgctgatggagaaggtgaacaacagctgccagaagtag

SEQ ID NO: 84809 - DNA, 507 bp, synthetic construct
  misc_feature 1..507: note = Description of Artificial Sequence: Synthetic coding sequence
  source 1..507: mol_type = other DNA
atggccttcaacgactgcttcagcctgaactaccccggcaacccctgccccggcgacctgatcgaggtgttcagacccggctaccagcactgggccctgtacctgggcgacggctacgtgatcaacatcgcccccgtggacggcatccccgccagcttcaccagcgccaagagcgtgttcagcagcaaggccctggtgaagatgcagctgctgaaggacgtggtgggcaacgacacctacagaatcaacaacaagtacgacgagacctacccccccctgcccgtggaggagatcatcaagagaagcgagttcgtgatcggccaggaggtggcctacaacctgctggtgaacaactgcgagcacttcgtgaccctgctgagatacggcgagggcgtgagcgagcaggccaacagagccatcagcaccgtggagttcgtgaccgccgccgtgggcgtgttcagcttcctgggcctgttccccaagggccagagagccaagtactactag

SEQ ID NO: 84810 - DNA, 489 bp, synthetic construct
  misc_feature 1..489: note = Description of Artificial Sequence: Synthetic coding sequence
  source 1..489: mol_type = other DNA
atggccctggccagacccagacccagactgggcgacctgatcgagatcagcagattcggctacgcccactgggccatctacgtgggcgacggctacgtggtgcacctggcccccgccagcgagatcgccggcgccggcgccgccagcgtgctgagcgccctgaccaacaaggccatcgtgaagaaggagctgctgagcgtggtggccggcggcgacaactacagagtgaacaacaagcacgacgacagatacacccccctgcccagcaacaagatcgtgaagagagccgaggagctggtgggccaggagctgccctacagcctgaccagcgacaactgcgagcacttcgtgaaccacctgagatacggcgtgagcagaagcgaccaggtgaccggcgccgtgaccaccgtgggcgtggccgccggcctgctggccgccgccagcctggtgggcatcctgctggccagaagcaagagagagagacagtag

SEQ ID NO: 84811 - DNA, 1023 bp, synthetic construct
  misc_feature 1..1023: note = Description of Artificial Sequence: Synthetic coding sequence
  source 1..1023: mol_type = other DNA
atgaaggaggaccaggtggtggccgaggagcccggcttccaggacgaggaggagagcctgttccaggacatcgacctgctgcagaagcacggcatcaacgtggccgacatcaagaagctgaagagcgtgggcatctgcaccatcaagggcatccagatgaccaccagaagagccctgtgcaacgtgaagggcctgagcgaggccaaggtggacaagatcaaggaggccgccaacaagctgatcgagcccggcttcctgaccgccttcgagtacagcgagaagagaaagatggtgttccacatcaccaccggcagccaggagttcgacaagctgctgggcggcggcatcgagagcatggccatcaccgaggccttcggcgagttcagaaccggcaagacccagctgagccacaccctgtgcgtgaccgcccagctgcccggcgccggcggctaccccggcggcaagatcatcttcatcgacaccgagaacaccttcagacccgacagactgagagacatcgccgacagattcaacgtggaccacgacgccgtgctggacaacgtgctgtacgccagagcctacaccagcgagcaccagatggagctgctggactacgtggccgccaagttccacgaggaggccggcatcttcaagctgctgatcatcgacagcatcatggccctgttcagagtggacttcagcggcagaggcgagctggccgagagacagcagaagctggcccagatgctgagcagactgcagaagatcagcgaggagtacaacgtggccgtgttcgtgaccaaccagatgaccgccgaccccggcgccaccatgaccttccaggccgaccccaagaagcccatcggcggccacatcctggcccacgccagcaccaccagaatcagcctgagaaagggcagaggcgagctgagaatcgccaagatctacgacagccccgagatgcccgagaacgaggccaccttcgccatcaccgccggcggcatcggcgacgccaaggagtag

SEQ ID NO: 84812 - DNA, 1080 bp, synthetic construct
  misc_feature 1..1080: note = Description of Artificial Sequence: Synthetic coding sequence
  source 1..1080: mol_type = other DNA
atgagcgacgagggcagcagaggcagcagactgcccctggccctgccccccgccagccagggctgcagcagcggcggcggcggcggcggcagcagcgccggcggcagcggcaacagcagaccccccagaaacctgcagggcctgctgcagatggccatcaccgccggcagcgaggagcccgaccccccccccgagcccatgagcgaggagagaagacagtggctgcaggaggccatgagcgccgccttcagaggccagagagaggaggtggagcagatgaagagctgcctgagagtgctgagccagcccatgccccccaccgccggcgaggccgagcaggccgccgaccagcaggagagagagggcgccctggagctgctggccgacctgtgcgagaacatggacaacgccgccgacttctgccagctgagcggcatgcacctgctggtgggcagatacctggaggccggcgccgccggcctgagatggagagccgcccagctgatcggcacctgcagccagaacgtggccgccatccaggagcaggtgctgggcctgggcgccctgagaaagctgctgagactgctggacagagacgcctgcgacaccgtgagagtgaaggccctgttcgccatcagctgcctggtgagagagcaggaggccggcctgctgcagttcctgagactggacggcttcagcgtgctgatgagagccatgcagcagcaggtgcagaagctgaaggtgaagagcgccttcctgctgcagaacctgctggtgggccaccccgagcacaagggcaccctgtgcagcatgggcatggtgcagcagctggtggccctggtgagaaccgagcacagccccttccacgagcacgtgctgggcgccctgtgcagcctggtgaccgacttcccccagggcgtgagagagtgcagagagcccgagctgggcctggaggagctgctgagacacagatgccagctgctgcagcagcacgaggagtaccaggaggagctggagttctgcgagaagctgctgcagacctgcttcagcagccccgccgacgacagcatggacagatag

SEQ ID NO: 84813 - DNA, 774 bp, synthetic construct
  misc_feature 1..774: note = Description of Artificial Sequence: Synthetic coding sequence
  source 1..774: mol_type = other DNA
atgagcgacgagggcagcagaggcagcagactgcccctggccctgccccccgccagccagggctgcagcagcggcggcggcggcggcggcagcagcgccggcggcagcggcaacagcagaccccccagaaacctgcagggcctgctgcagatggccatcaccgccggcagcgaggagcccgaccccccccccgagcccatgagcgaggagagaagacagtggctgcaggaggccatgagcgccgccttcagaggccagagagaggaggtggagcagatgaagagctgcctgagagtgctgagccagcccatgccccccaccgccggcgaggccgagcaggccgccgaccagcaggagagagagggcgccctggagctgctggccgacctgtgcgagaacatggacaacgccgccgacttctgccagctgagcggcatgcacctgctggtgggcagatacctggaggccggcgccgccggcctgagatggagagccgcccagctgatcggcacctgcagccagaacgtggccgccatccaggagcaggtgctgggcctgggcgccctgagaaagctgctgagactgctggacagagacgcctgcgacaccggcgtgagagagtgcagagagcccgagctgggcctggaggagctgctgagacacagatgccagctgctgcagcagcacgaggagtaccaggaggagctggagttctgcgagaagctgctgcagacctgcttcagcagccccgccgacgacagcatggacagatag

SEQ ID NO: 84814 - DNA, 1080 bp, synthetic construct; identical to SEQ ID NO: 84812
  misc_feature 1..1080: note = Description of Artificial Sequence: Synthetic coding sequence
  source 1..1080: mol_type = other DNA

SEQ ID NO: 84815 - DNA, 1443 bp, synthetic construct
  misc_feature 1..1443: note = Description of Artificial Sequence: Synthetic coding sequence
  source 1..1443: mol_type = other DNA
atgcagatccccagagccgccctgctgcccctgctgctgctgctgctggccgcccccgccagcgcccagctgagcagagccggcagaagcgcccccctggccgccggctgccccgacagatgcgagcccgccagatgccccccccagcccgagcactgcgagggcggcagagccagagacgcctgcggctgctgcgaggtgtgcggcgcccccgagggcgccgcctgcggcctgcaggagggcccctgcggcgagggcctgcagtgcgtggtgcccttcggcgtgcccgccagcgccaccgtgagaagaagagcccaggccggcctgtgcgtgtgcgccagcagcgagcccgtgtgcggcagcgacgccaacacctacgccaacctgtgccagctgagagccgccagcagaagaagcgagagactgcacagaccccccgtgatcgtgctgcagagaggcgcctgcggccagggccaggaggaccccaacagcctgagacacaagtacaacttcatcgccgacgtggtggagaagatcgcccccgccgtggtgcacatcgagctgttcagaaagctgcccttcagcaagagagaggtgcccgtggccagcggcagcggcttcatcgtgagcgaggacggcctgatcgtgaccaacgcccacgtggtgaccaacaagcacagagtgaaggtggagctgaagaacggcgccacctacgaggccaagatcaaggacgtggacgagaaggccgacatcgccctgatcaagatcgaccaccagggcaagctgcccgtgctgctgctgggcagaagcagcgagctgagacccggcgagttcgtggtggccatcggcagccccttcagcctgcagaacaccgtgaccaccggcatcgtgagcaccacccagagaggcggcaaggagctgggcctgagaaacagcgacatggactacatccagaccgacgccatcatcaactacggcaacagcggcggccccctggtgaacctggacggcgaggtgatcggcatcaacaccctgaaggtgaccgccggcatcagcttcgccatccccagcgacaagatcaagaagttcctgaccgagagccacgacagacaggccaagggcaaggccatcaccaagaagaagtacatcggcatcagaatgatgagcctgaccagcagcaaggccaaggagctgaaggacagacacagagacttccccgacgtgatcagcggcgcctacatcatcgaggtgatccccgacacccccgccgaggccggcggcctgaaggagaacgacgtgatcatcagcatcaacggccagagcgtggtgagcgccaacgacgtgagcgacgtgatcaagagagagagcaccctgaacatggtggtgagaagaggcaacgaggacatcatgatcaccgtgatccccgaggagatcgacccctag

SEQ ID NO: 84816 - DNA, 666 bp, synthetic construct
  misc_feature 1..666: note = Description of Artificial Sequence: Synthetic coding sequence
  source 1..666: mol_type = other DNA
ggcaagctgcccgtgctgctgctgggcagaagcagcgagctgagacccggcgagttcgtggtggccatcggcagccccttcagcctgcagaacaccgtgaccaccggcatcgtgagcaccacccagagaggcggcaaggagctgggcctgagaaacagcgacatggactacatccagaccgacgccatcatcaactacggcaacagcggcggccccctggtgaacctggacggcgaggtgatcggcatcaacaccctgaaggtgaccgccggcatcagcttcgccatccccagcgacaagatcaagaagttcctgaccgagagccacgacagacaggccaagggcaaggccatcaccaagaagaagtacatcggcatcagaatgatgagcctgaccagcagcaaggccaaggagctgaaggacagacacagagacttccccgacgtgatcagcggcgcctacatcatcgaggtgatccccgacacccccgccgaggccggcggcctgaaggagaacgacgtgatcatcagcatcaacggccagagcgtggtgagcgccaacgacgtgagcgacgtgatcaagagagagagcaccctgaacatggtggtgagaagaggcaacgaggacatcatgatcaccgtgatccccgaggagatcgacccctag

SEQ ID NO: 84817 - DNA, 1344 bp, synthetic construct
  misc_feature 1..1344: note = Description of Artificial Sequence: Synthetic coding sequence
  source 1..1344: mol_type = other DNA
atgggctgggccgccagacccagagccctggcccccgccgcccccgaggccctgctgcacagccccagaagaagaagccccgccctggccctgagcgccgccaccgccgccgccgccagaggccccggcagagtgagactgctgagaggcgtgagaagagccagaggcagaagagtgagacccgccggcggccccgtgagaagaggcgccgccgtgagaggcgccctgagaggcgccagcctgggccacggcgccgccgccagagccggcagacccctgtgcgtgagacagcagctgagagccgccagcagaagaagcgagagactgcacagaccccccgtgatcgtgctgcagagaggcgcctgcggccagggccaggaggaccccaacagcctgagacacaagtacaacttcatcgccgacgtggtggagaagatcgcccccgccgtggtgcacatcgagctgttcagaaagctgcccttcagcaagagagaggtgcccgtggccagcggcagcggcttcatcgtgagcgaggacggcctgatcgtgaccaacgcccacgtggtgaccaacaagcacagagtgaaggtggagctgaagaacggcgccacctacgaggccaagatcaaggacgtggacgagaaggccgacatcgccctgatcaagatcgaccaccagggcaagctgcccgtgctgctgctgggcagaagcagcgagctgagacccggcgagttcgtggtggccatcggcagccccttcagcctgcagaacaccgtgaccaccggcatcgtgagcaccacccagagaggcggcaaggagctgggcctgagaaacagcgacatggactacatccagaccgacgccatcatcaactacggcaacagcggcggccccctggtgaacctggacggcgaggtgatcggcatcaacaccctgaaggtgaccgccggcatcagcttcgccatccccagcgacaagatcaagaagttcctgaccgagagccacgacagacaggccaagggcaaggccatcaccaagaagaagtacatcggcatcagaatgatgagcctgaccagcagcaaggccaaggagctgaaggacagacacagagacttccccgacgtgatcagcggcgcctacatcatcgaggtgatccccgacacccccgccgaggccggcggcctgaaggagaacgacgtgatcatcagcatcaacggccagagcgtggtgagcgccaacgacgtgagcgacgtgatcaagagagagagcaccctgaacatggtggtgagaagaggcaacgaggacatcatgatcaccgtgatccccgaggagatcgacccctag

SEQ ID NO: 84818 - DNA, 1377 bp, synthetic construct
  misc_feature 1..1377: note = Description of Artificial Sequence: Synthetic coding sequence
  source 1..1377: mol_type = other DNA
atggccgcccccagagccggcagaggcgccggctggagcctgagagcctggagagccctgggcggcatcagatggggcagaagacccagactgacccccgacctgagagccctgctgaccagcggcaccagcgaccccagagccagagtgacctacggcacccccagcctgtgggccagactgagcgtgggcgtgaccgagcccagagcctgcctgaccagcggcacccccggccccagagcccagctgaccgccgtgacccccgacaccagaaccagagaggccagcgagaacagcggcaccagaagcagagcctggctggccgtggccctgggcgccggcggcgccgtgctgctgctgctgtggggcggcggcagaggcccccccgccgtgctggccgccgtgcccagccccccccccgccagccccagaagccagtacaacttcatcgccgacgtggtggagaagaccgcccccgccgtggtgtacatcgagatcctggacagacaccccttcctgggcagagaggtgcccatcagcaacggcagcggcttcgtggtggccgccgacggcctgatcgtgaccaacgcccacgtggtggccgacagaagaagagtgagagtgagactgctgagcggcgacacctacgaggccgtggtgaccgccgtggaccccgtggccgacatcgccaccctgagaatccagaccaaggagcccctgcccaccctgcccctgggcagaagcgccgacgtgagacagggcgagttcgtggtggccatgggcagccccttcgccctgcagaacaccatcaccagcggcatcgtgagcagcgcccagagacccgccagagacctgggcctgccccagaccaacgtggagtacatccagaccgacgccgccatcgacttcggcaacagcggcggccccctggtgaacctggacggcgaggtgatcggcgtgaacaccatgaaggtgaccgccggcatcagcttcgccatccccagcgacagactgagagagttcctgcacagaggcgagaagaagaacagcagcagcggcatcagcggcagccagagaagatacatcggcgtgatgatgctgaccctgagccccagcatcctggccgagctgcagctgagagagcccagcttccccgacgtgcagcacggcgtgctgatccacaaggtgatcctgggcagccccgcccacagagccggcctgagacccggcgacgtgatcctggccatcggcgagcagatggtgcagaacgccgaggacgtgtacgaggccgtgagaacccagagccagctggccgtgcagatcagaagaggcagagagaccctgaccctgtacgtgacccccgaggtgaccgagtag

SEQ ID NO: 84819 - DNA, 1086 bp, synthetic construct
  misc_feature 1..1086: note = Description of Artificial Sequence: Synthetic coding sequence
  source 1..1086: mol_type = other DNA
atggccgcccccagagccggcagaggcgccggctggagcctgagagcctggagagccctgggcggcatcagatggggcagaagacccagactgacccccgacctgagagccctgctgaccagcggcaccagcgaccccagagccagagtgacctacggcacccccagcctgtgggccagactgagcgtgggcgtgaccgagcccagagcctgcctgaccagcggcacccccggccccagagcccagctgaccgccgtgacccccgacaccagaaccagagaggccagcgagaacagcggcaccagaagcagagcctggctggccgtggccctgggcgccggcggcgccgtgctgctgctgctgtggggcggcggcagaggcccccccgccgtgctggccgccgtgcccagccccccccccgccagccccagaagccagtacaacttcatcgccgacgtggtggagaagaccgcccccgccgtggtgtacatcgagatcctggacagacaccccttcctgggcagagaggtgcccatcagcaacggcagcggcttcgtggtggccgccgacggcctgatcgtgaccaacgcccacgtggtggccgacagaagaagagtgagagtgagactgctgagcggcgacacctacgaggccgtggtgaccgccgtggaccccgtggccgacatcgccaccctgagaatccagaccaagttcggcaacagcggcggccccctggtgaacctggacggcgaggtgatcggcgtgaacaccatgaaggtgaccgccggcatcagcttcgccatccccagcgacagactgagagagttcctgcacagaggcgagaagaagaacagcagcagcggcatcagcggcagccagagaagatacatcggcgtgatgatgctgaccctgagccccagagccggcctgagacccggcgacgtgatcctggccatcggcgagcagatggtgcagaacgccgaggacgtgtacgaggccgtgagaacccagagccagctggccgtgcagatcagaagaggcagagagaccctgaccctgtacgtgacccccgaggtgaccgagtag

SEQ ID NO: 84820 - DNA, 1362 bp, synthetic construct
  misc_feature 1..1362: note = Description of Artificial Sequence: Synthetic coding sequence
  source 1..1362: mol_type = other DNA
atgcaggccagagccctgctgctggccgccctggccgccctggccctggccagagagccccccgccgccccctgccccgccagatgcgacgtgagcagatgccccagccccagatgccccggcggctacgtgcccgacctgtgcaactgctgcctggtgtgcgccgccagcgagggcgagccctgcggcggccccctggacagcccctgcggcgagagcctggagtgcgtgagaggcctgtgcagatgcagatggagccacgccgtgtgcggcaccgacggccacacctacgccaacgtgtgcgccctgcaggccgccagcagaagagccctgcagctgagcggcacccccgtgagacagctgcagaagggcgcctgccccctgggcctgcaccagctgagcagccccagatacaagttcaacttcatcgccgacgtggtggagaagatcgcccccgccgtggtgcacatcgagctgttcctgagacaccccctgttcggcagaaacgtgcccctgagcagcggcagcggcttcatcatgagcgaggccggcctgatcatcaccaacgcccacgtggtgagcagcaacagcgccgcccccggcagacagcagctgaaggtgcagctgcagaacggcgacagctacgaggccaccatcaaggacatcgacaagaagagcgacatcgccaccatcaagatccaccccaagaagaagctgcccgtgctgctgctgggccacagcgccgacctgagacccggcgagttcgtggtggccatcggcagccccttcgccctgcagaacaccgtgaccaccggcatcgtgagcaccgcccagagagagggcagagagctgggcctgagagacagcgacatggactacatccagaccgacgccatcatcaactacggcaacagcggcggccccctggtgaacctggacggcgaggtgatcggcatcaacaccctgaaggtgaccgccggcatcagcttcgccatccccagcgacagaatcaccagattcctgaccgagttccaggacaagcagatcaaggactggaagaagagattcatcggcatcagaatgagaaccatcacccccagcctggtggacgagctgaaggccagcaaccccgacttccccgaggtgagcagcggcatctacgtgcaggaggtggcccccaacagccccagccagagaggcggcatccaggacggcgacatcatcgtgaaggtgaacggcagacccctggtggacagcagcgagctgcaggaggccgtgctgaccgagagccccctgctgctggaggtgagaagaggcaacgacgacctgctgttcagcatcgcccccgaggtggtgatgtag

SEQ ID NO: 84821 - DNA, 1431 bp, synthetic construct
  misc_feature 1..1431: note = Description of Artificial Sequence: Synthetic coding sequence
  source 1..1431: mol_type = other DNA
atgatcagaccccagctgagaaccgccggcctgggcagatgcctgctgcccggcctgctgctgctgctggtgcccgtgctgtgggccggcgccgagaagctgcacacccagcccagctgccccgccgtgtgccagcccaccagatgccccgccctgcccacctgcgccctgggcaccacccccgtgttcgacctgtgcagatgctgcagagtgtgccccgccgccgagagagaggtgtgcggcggcgcccagggccagccctgcgcccccggcctgcagtgcctgcagcccctgagacccggcttccccagcacctgcggctgccccaccctgggcggcgccgtgtgcggcagcgacagaagaacctaccccagcatgtgcgccctgagagccgagaacagagccgccagaagactgggcaaggtgcccgccgtgcccgtgcagtggggcaactgcggcgacaccggcaccagaagcgccggccccctgagaagaaactacaacttcatcgccgccgtggtggagaaggtggcccccagcgtggtgcacgtgcagctgtggggcagactgctgcacggcagcagactggtgcccgtgtacagcggcagcggcttcatcgtgagcgaggacggcctgatcatcaccaacgcccacgtggtgagaaaccagcagtggatcgaggtggtgctgcagaacggcgccagatacgaggccgtggtgaaggacatcgacctgaagctggacctggccgtgatcaagatcgagagcaacgccgagctgcccgtgctgatgctgggcagaagcagcgacctgagagccggcgagttcgtggtggccctgggcagccccttcagcctgcagaacaccgccaccgccggcatcgtgagcaccaagcagagaggcggcaaggagctgggcatgaaggacagcgacatggactacgtgcagatcgacgccaccatcaactacggcaacagcggcggccccctggtgaacctggacggcgacgtgatcggcgtgaacagcctgagagtgaccgacggcatcagcttcgccatccccagcgacagagtgagacagttcctggccgagtaccacgagcaccagatgaagggcaaggccttcagcaacaagaagtacctgggcctgcagatgctgagcctgaccgtgcccctgagcgaggagctgaagatgcactaccccgacttccccgacgtgagcagcggcgtgtacgtgtgcaaggtggtggagggcaccgccgcccagagcagcggcctgagagaccacgacgtgatcgtgaacatcaacggcaagcccatcaccaccaccaccgacgtggtgaaggccctggacagcgacagcctgagcatggccgtgctgagaggcaaggacaacctgctgctgaccgtgatccccgagaccatcaactag

SEQ ID NO: 84822 - DNA, 8157 bp, synthetic construct
  misc_feature 1..8157: note = Description of Artificial Sequence: Synthetic coding sequence
  source 1..8157: mol_type = other DNA
atgcccagaaccaagcagatccaccccagaaacctgagagacaagatcgaggaggcccagaaggagctgaacggcgccgaggtgagcaagaaggagatcctgcaggccggcgtgaagggcaccagcgagagcctgaagggcgtgaagagaaagaagatcgtggccgagaaccacctgaagaagatccccaagagccccctgagaaaccccctgcaggccaagcacaagcagaacaccgaggagagcagcttcgccgtgctgcacagcgccagcgagagccacaagaagcagaactacatccccgtgaagaacggcaagcagttcaccaagcagaacggcgagacccccggcatcatcgccgaggccagcaagagcgaggagagcgtgagccccaagaagcccctgttcctgcagcagcccagcgagctgagaagatggagaagcgagggcgccgaccccgccaagttcagcgacctggacgagcagtgcgacagcagcagcctgagcagcaagaccagaaccgacaacagcgagtgcatcagcagccactgcggcaccaccagccccagctacaccaacaccgccttcgacgtgctgctgaaggccatggagcccgagctgagcaccctgagccagaagggcagcccctgcgccatcaagaccgagaagctgagacccaacaagaccgccagaagcccccccaagctgaagaacagcagcatggacgcccccaaccagaccagccaggagctggtggccgagagccagagcagctgcaccagctacaccgtgcacatgagcgccgcccagaagaacgagcagggcgccatgcagagcgccagccacctgtaccaccagcacgagcacttcgtgcccaagagcaaccagcacaaccagcagctgcccggctgcagcggcttcaccggcagcctgaccaacctgcagaaccaggagaacgccaagctggagcaggtgtacaacatcgccgtgaccagcagcgtgggcctgaccagccccagcagcagaagccaggtgaccccccagaaccagcagatggacagcgccagccccctgagcatcagccccgccaacagcacccagagcccccccatgcccatctacaacagcacccacgtggccagcgtggtgaaccagagcgtggagcagatgtgcaacctgctgctgaaggaccagaagcccaagaagcagggcaagtacatctgcgagtactgcaacagagcctgcgccaagcccagcgtgctgctgaagcacatcagaagccacaccggcgagagaccctacccctgcgtgacctgcggcttcagcttcaagaccaagagcaacctgtacaagcacaagaagagccacgcccacaccatcaagctgggcctggtgctgcagcccgacgccggcggcctgttcctgagccacgagagccccaaggccctgagcatccacagcgacgtggaggacagcggcgagagcgaggaggagggcgccaccgacgagagacagcacgacctgggcgccatggagctgcagcccgtgcacatcatcaagagaatgagcaacgccgagaccctgctgaagagcagcttcacccccagcagccccgagaacgtgatcggcgacttcctgctgcaggacagaagcgccgagagccaggccgtgaccgagctgcccaaggtggtggtgcaccacgtgaccgtgagccccctgagaaccgacagccccaaggccatggaccccaagcccgagctgagcagcgcccagaagcagaaggacctgcaggtgaccaacgtgcagcccctgagcgccaacatgagccagggcggcgtgagcagactggagaccaacgagaacagccaccagaagggcgacatgaaccccctggagggcaagcaggacagccacgtgggcaccgtgcacgcccagctgcagagacagcaggccaccgactacagccaggagcagcagggcaagctgctgagccccagaagcctgggcagcaccgacagcggctacttcagcagaagcgagagcgccgaccagaccgtgagcccccccacccccttcgccagaagactgcccagcaccgagcaggacagcggcagaagcaacggccccagcgccgccctggtgaccaccagcacccccagcgccctgcccaccggcgagaaggccctgctgctgcccggccagatgagaccccccctggccaccaagaccctggaggagagaatcagcaagctgatcagcgacaacgaggccctggtggacgacaagcagctggacagcgtgaagcccagaagaaccagcctgagcagaagaggcagcatcgacagccccaagagctacatcttcaaggacagcttccagttcgacctgaagcccgtgggcagaagaaccagcagcagcagcgacatccccaagagccccttcacccccaccgagaagagcaagcaggtgttcctgctgagcgtgcccagcctggactgcctgcccatcaccagaagcaacagcatgcccaccaccggctacagcgccgtgcccgccaacatcatcccccccccccaccccctgagaggcagccagagcttcgacgacaagatcggcaccttctacgacgacgtgttcgtgagcggccccaacgcccccgtgccccagagcggccaccccagaaccctggtgagacaggccgccatcgaggacagcagcgccaacgagagccacgtgctgggcaccggccagagcctggacgagagccaccagggctgccacgccgccggcgaggccatgagcgtgagaagcaaggccctggcccagggcccccacatcgagaagaagaagagccaccagggcagaggcaccatgttcgagtgcgagacctgcagaaacagatacagaaagctggagaacttcgagaaccacaagaagttctactgcagcgagctgcacggccccaagaccaaggtggccatgagagagcccgagcacagccccgtgcccggcggcctgcagccccagatcctgcactacagagtggccggcagcagcggcatctgggagcagaccccccagatcagaaagagaagaaagatgaagagcgtgggcgacgacgaggagctgcagcagaacgagagcggcaccagccccaagagcagcgagggcctgcagttccagaacgccctgggctgcaaccccagcctgcccaagcacaacgtgaccatcagaagcgaccagcagcacaagaacatccagctgcagaacagccacatccacctggtggccagaggccccgagcagaccatggaccccaagctgagcaccatcatggagcagcagatcagcagcgccgcccaggacaagatcgagctgcagagacacggcaccggcatcagcgtgatccagcacaccaacagcctgagcagacccaacagcttcgacaagcccgagcccttcgagagagccagccccgtgagcttccaggagctgaacagaaccggcaagagcggcagcctgaaggtgatcggcatcagccaggaggagagccaccccagcagagacggcagccacccccaccagctggccctgagcgacgccctgagaggcgagctgcaggagagcagcagaaagagccccagcgagagacacgtgctgggccagcccagcagactggtgagacagcacaacatccaggtgcccgagatcctggtgaccgaggagcccgacagagacctggaggcccagtgccacgaccaggagaagagcgagaagttcagctggccccagagaagcgagaccctgagcaagctgcccaccgagaagctgccccccaagaagaagagactgagactggccgagatcgagcacagcagcaccgagagcagcttcgacagcaccctgagcagaagcctgagcagagagagcagcctgagccacaccagcagcttcagcgccagcctggacatcgaggacgtgagcaagaccgaggccagccccaagatcgacttcctgaacaaggccgagttcctgatgatccccgccggcctgaacaccctgaacgtgcccggctgccacagagagatgagaagaaccgccagcgagcagatcaactgcacccagaccagcatggaggtgagcgacctgagaagcaagagcttcgactgcggcagcatcacccccccccagaccacccccctgaccgagctgcagccccccagcagccccagcagagtgggcgtgaccggccacgtgcccctgctggagagaagaagaggccccctggtgagacagatcagcctgaacatcgcccccgacagccacctgagccccgtgcaccccaccagcttccagaacaccgccctgcccagcgtgaacgccgtgccctaccagggcccccagctgaccagcaccagcctggccgagttcagcgccaacaccctgcacagccagacccaggtgaaggacctgcaggccgagaccagcaacagcagcagcaccaacgtgttccccgtgcagcagctgtgcgacatcaacctgctgaaccagatccacgccccccccagccaccagagcacccagctgagcctgcaggtgagcacccagggcagcaagcccgacaagaacagcgtgctgagcggcagcagcaagagcgaggactgcttcgcccccaagtaccagctgcactgccaggtgttcaccagcggccccagctgcagcagcaaccccgtgcacagcctgcccaaccaggtgatcagcgaccccgtgggcaccgaccactgcgtgaccagcgccaccctgcccaccaagctgatcgacagcatgagcaacagccaccccctgctgccccccgagctgagacccctgggcagccaggtgcagaaggtgcccagcagcttcatgctgcccatcagactgcagagcagcgtgcccgcctactgcttcgccaccctgaccagcctgccccagatcctggtgacccaggacctgcccaaccagcccatctgccagaccaaccacagcgtggtgcccatcagcgaggagcagaacagcgtgcccaccctgcagaagggccaccagaacgccctgcccaaccccgagaaggagttcctgtgcgagaacgtgttcagcgagatgagccagaacagcagcctgagcgagagcctgcccatcacccagaagatcagcgtgggcagactgagcccccagcaggagagcagcgccagcagcaagagaatgctgagccccgccaacagcctggacatcgccatggagaagcaccagaagagagccaaggacgagaacggcgccgtgtgcgccaccgacgtgagacccctggaggccctgagcagcagagtgaacgaggccagcaagcagaagaagcccatcctggtgagacaggtgtgcaccaccgagcccctggacggcgtgatgctggagaaggacgtgttcagccagcccgagatcagcaacgaggccgtgaacctgaccaacgtgctgcccgccgacaacagcagcaccggctgcagcaagttcgtggtgatcgagcccatcagcgagctgcaggagttcgagaacatcaagagcagcaccagcctgaccctgaccgtgagaagcagccccgcccccagcgagaacacccacatcagccccctgaagtgcaccgacaacaaccaggagagaaagagccccggcgtgaagaaccagggcgacaaggtgaacatccaggagcagagccagcagcccgtgaccagcctgagcctgttcaacatcaaggacacccagcagctggccttccccagcctgaagaccaccaccaacttcacctggtgctacctgctgagacagaagagcctgcacctgccccagaaggaccagaagaccagcgcctacaccgactggaccgtgagcgccagcaaccccaaccccctgggcctgcccaccaaggtggccctggccctgctgaacagcaagcagaacaccggcaagagcctgtactgccaggccatcaccacccacagcaagagcgacctgctggtgtacagcagcaagtggaagagcagcctgagcaagagagccctgggcaaccagaagagcaccgtggtggagttcagcaacaaggacgccagcgagatcaacagcgagcaggacaaggagaacagcctgatcaagagcgagcccagaagaatcaagatcttcgacggcggctacaagagcaacgaggagtacgtgtacgtgagaggcagaggcagaggcaagtacatctgcgaggagtgcggcatcagatgcaagaagcccagcatgctgaagaagcacatcagaacccacaccgacgtgagaccctaccactgcacctactgcaacttcagcttcaagaccaagggcaacctgaccaagcacatgaagagcaaggcccacagcaagaagtgcgtggacctgggcgtgagcgtgggcctgatcgacgagcaggacaccgaggagagcgacgagaagcagagattcagctacgagagaagcggctacgacctggaggagagcgacggccccgacgaggacgacaacgagaacgaggacgacgacgaggacagccaggccgagagcgtgctgagcgccacccccagcgtgaccgccagcccccagcacctgcccagcagaagcagcctgcaggaccccgtgagcaccgacgaggacgtgagaatcaccgactgcttcagcggcgtgcacaccgaccccatggacgtgctgcccagagccctgctgaccagaatgaccgtgctgagcaccgcccagagcgactacaacagaaagaccctgagccccggcaaggccagacagagagccgccagagacgagaacgacaccatccccagcgtggacaccagcagaagcccctgccaccagatgagcgtggactaccccgagagcgaggagatcctgagaagcagcatggccggcaaggccgtggccatcacccagagccccagcagcgtgagactgccccccgccgccgccgagcacagcccccagaccgccgccggcatgcccagcgtggccagcccccaccccgacccccaggagcagaagcagcagatcaccctgcagcccacccccggcctgcccagcccccacacccacctgttcagccacctgcccctgcacagccagcagcagagcagaaccccctacaacatggtgcccgtgggcggcatccacgtggtgcccgccggcctgacctacagcaccttcgtgcccctgcaggccggccccgtgcagctgaccatccccgccgtgagcgtggtgcacagaaccctgggcacccacagaaacaccgtgaccgaggtgagcggcaccaccaaccccgccggcgtggccgagctgagcagcgtggtgccctgcatccccatcggccagatcagagtgcccggcctgcagaacctgagcacccccggcctgcagagcctgcccagcctgagcatggagaccgtgaacatcgtgggcctggccaacaccaacatggccccccaggtgcacccccccggcctggccctgaacgccgtgggcctgcaggtgctgaccgccaaccccagcagccagagcagccccgccccccaggcccacatccccggcctgcagatcctgaacatcgccctgcccaccctgatccccagcgtgagccaggtggccgtggacgcccagggcgcccccgagatgcccgccagccagagcaaggcctgcgagacccagcccaagcagaccagcgtggccagcgccaaccaggtgagcagaaccgagagcccccagggcctgcccaccgtgcagagagagaacgccaagaaggtgctgaacccccccgcccccgccggcgaccacgccagactggacggcctgagcaagatggacaccgagaaggccgccagcgccaaccacgtgaagcccaagcccgagctgaccagcatccagggccagcccgccagcaccagccagcccctgctgaaggcccacagcgaggtgttcaccaagcccagcggccagcagaccctgagccccgacagacaggtgcccagacccaccgccctgcccagaagacagcccaccgtgcacttcagcgacgtgagcagcgacgacgacgaggacagactggtgatcgccacctag

SEQ ID NO: 84823 - DNA, 387 bp, synthetic construct
  misc_feature 1..387: note = Description of Artificial Sequence: Synthetic coding sequence
  source 1..387: mol_type = other DNA
atgcccagaaccaagcagatccaccccagaaacctgagagacaagatcgaggaggcccagaaggagctgaacggcgccgaggtgagcaagaaggagatcctgcaggccggcgtgaagggcaccagcgagagcctgaagggcgtgaagagaaagaagatcgtggccgagaaccacctgaagaagatccccaagagccccctgagaaaccccctgcaggccaagcacaagcagaacaccgaggagagcagcttcgccgtgctgcacagcgccagcgagagccacaagaagcagaactacatccccgtgaagaacggcaagcagttcaccaagcagaacggcgagacccccggcatcatcgccgaggccagcaagagcgaggagagctag

SEQ ID NO: 84824 - DNA, 429 bp, synthetic construct
  misc_feature 1..429: note = Description of Artificial Sequence: Synthetic coding sequence
  source 1..429: mol_type = other DNA
atgcccagaaccaagcagatccaccccagaaacctgagagacaagatcgaggaggcccagaaggagctgaacggcgccgaggtgagcaagaaggagatcctgcaggccggcgtgaagggcaccagcgagagcctgaagggcgtgaagagaaagaagatcgtggccgagaaccacctgaagaagatccccaagagccccctgagaaaccccctgcaggccaagcacaagcagaacaccgaggagagcagcttcgccgtgctgcacagcgccagcgagagccacaagaagcagaactacatccccgtgaagaacggcaagcagttcaccaagcagaacggcgagacccccggcatcatcgccgaggccagcaagagcgaggagagcgtgagccccaagaagcccctgttcctgcagcagcccagcgagtag

SEQ ID NO: 84825 - DNA, 363 bp, synthetic construct
  misc_feature 1..363: note = Description of Artificial Sequence: Synthetic coding sequence
  source 1..363: mol_type = other DNA
atgcccagaaccaagcagatccaccccagaaacctgagagacaagatcgaggaggcccagaaggagctgaacggcgccgaggtgagcaagaaggagatcctgcaggccggcgtgaagggcaccagcgagagcctgaagggcgtgaagagaaagaagatcgtggccgagaaccacctgaagaagatccccaagagccccctgagaaaccccctgcaggccaagcacaagcagaacaccgaggagagcagcttcgccgtgctgcacagcgccagcgagagccacaagaagcagaactacatccccgtgaagaacggcaagcagttcaccaagcagaacggcgagacccccggcatcatcgcctag

SEQ ID NO: 84826 - DNA, 1752 bp, synthetic construct
  misc_feature 1..1752: note = Description of Artificial Sequence: Synthetic coding sequence
  source 1..1752: mol_type = other DNA
atgctgaagaagcacatcagaacccacaccgacgtgagaccctaccactgcacctactgcaacttcagcttcaagaccaaggacgagaagcagagattcagctacgagagaagcggctacgacctggaggagagcgacggccccgacgaggacgacaacgagaacgaggacgacgacgaggacagccaggccgagagcgtgctgagcgccacccccagcgtgaccgccagcccccagcacctgcccagcagaagcagcctgcaggaccccgtgagcaccgacgaggacgtgagaatcaccgactgcttcagcggcgtgcacaccgaccccatggacgtgctgcccagagccctgctgaccagaatgaccgtgctgagcaccgcccagagcgactacaacagaaagaccctgagccccggcaaggccagacagagagccgccagagacgagaacgacaccatccccagcgtggacaccagcagaagcccctgccaccagatgagcgtggactaccccgagagcgaggagatcctgagaagcagcatggccggcaaggccgtggccatcacccagagccccagcagcgtgagactgccccccgccgccgccgagcacagcccccagaccgccgccggcatgcccagcgtggccagcccccaccccgacccccaggagcagaagcagcagatcaccctgcagcccacccccggcctgcccagcccccacacccacctgttcagccacctgcccctgcacagccagcagcagagcagaaccccctacaacatggtgcccgtgggcggcatccacgtggtgcccgccggcctgacctacagcaccttcgtgcccctgcaggccggccccgtgcagctgaccatccccgccgtgagcgtggtgcacagaaccctgggcacccacagaaacaccgtgaccgaggtgagcggcaccaccaaccccgccggcgtggccgagctgagcagcgtggtgccctgcatccccatcggccagatcagagtgcccggcctgcagaacctgagcacccccggcctgcagagcctgcccagcctgagcatggagaccgtgaacatcgtgggcctggccaacaccaacatggccccccaggtgcacccccccggcctggccctgaacgccgtgggcctgcaggtgctgaccgccaaccccagcagccagagcagccccgccccccaggcccacatccccggcctgcagatcctgaacatcgccctgcccaccctgatccccagcgtgagccaggtggccgtggacgcccagggcgcccccgagatgcccgccagccagagcaaggcctgcgagacccagcccaagcagaccagcgtggccagcgccaaccaggtgagcagaaccgagagcccccagggcctgcccaccgtgcagagagagaacgccaagaaggtgctgaacccccccgcccccgccggcgaccacgccagactggacggcctgagcaagatggacaccgagaaggccgccagcgccaaccacgtgaagcccaagcccgagctgaccagcatccagggccagcccgccagcaccagccagcccctgctgaaggcccacagcgaggtgttcaccaagcccagcggccagcagaccctgagccccgacagacaggtgcccagacccaccgccctgcccagaagacagcccaccgtgcacttcagcgacgtgagcagcgacgacgacgaggacagactggtgatcgccacctag

SEQ ID NO: 84827 - DNA, 2103 bp, synthetic construct
  misc_feature 1..2103: note = Description of Artificial Sequence: Synthetic coding sequence
  source 1..2103: mol_type = other DNA
ggcgacaagttcagcttccagagagccctgggcaaccagaagagcaccgtggtggagttcagcaacaaggacgccagcgagatcaacagcgagcaggacaaggagaacagcctgatcaagagcgagcccagaagaatcaagatcttcgacggcggctacaagagcaacgaggagtacgtgtacgtgagaggcagaggcagaggcaagtacatctgcgaggagtgcggcatcagatgcaagaagcccagcatgctgaagaagcacatcagaacccacaccgacgtgagaccctaccactgcacctactgcaacttcagcttcaagaccaagggcaacctgaccaagcacatgaagagcaaggcccacagcaagaagtgcgtggacctgggcgtgagcgtgggcctgatcgacgagcaggacaccgaggagagcgacgagaagcagagattcagctacgagagaagcggctacgacctggaggagagcgacggccccgacgaggacgacaacgagaacgaggacgacgacgaggacagccaggccgagagcgtgctgagcgccacccccagcgtgaccgccagcccccagcacctgcccagcagaagcagcctgcaggaccccgtgagcaccgacgaggacgtgagaatcaccgactgcttcagcggcgtgcacaccgaccccatggacgtgctgcccagagccctgctgaccagaatgaccgtgctgagcaccgcccagagcgactacaacagaaagaccctgagccccggcaaggccagacagagagccgccagagacgagaacgacaccatccccagcgtggacaccagcagaagcccctgccaccagatgagcgtggactaccccgagagcgaggagatcctgagaagcagcatggccggcaaggccgtggccatcacccagagccccagcagcgtgagactgccccccgccgccgccgagcacagcccccagaccgccgccggcatgcccagcgtggccagcccccaccccgacccccaggagcagaagcagcagatcaccctgcagcccacccccggcctgcccagcccccacacccacctgttcagccacctgcccctgcacagccagcagcagagcagaaccccctacaacatggtgcccgtgggcggcatccacgtggtgcccgccggcctgacctacagcaccttcgtgcccctgcaggccggccccgtgcagctgaccatccccgccgtgagcgtggtgcacagaaccctgggcacccacagaaacaccgtgaccgaggtgagcggcaccaccaaccccgccggcgtggccgagctgagcagcgtggtgccctgcatccccatcggccagatcagagtgcccggcctgcagaacctgagcacccccggcctgcagagcctgcccagcctgagcatggagaccgtgaacatcgtgggcctggccaacaccaacatggccccccaggtgcacccccccggcctggccctgaacgccgtgggcctgcaggtgctgaccgccaaccccagcagccagagcagccccgccccccaggcccacatccccggcctgcagatcctgaacatcgccctgcccaccctgatccccagcgtgagccaggtggccgtggacgcccagggcgcccccgagatgcccgccagccagagcaaggcctgcgagacccagcccaagcagaccagcgtggccagcgccaaccaggtgagcagaaccgagagcccccagggcctgcccaccgtgcagagagagaacgccaagaaggtgctgaacccccccgcccccgccggcgaccacgccagactggacggcctgagcaagatggacaccgagaaggccgccagcgccaaccacgtgaagcccaagcccgagctgaccagcatccagggccagcccgccagcaccagccagcccctgctgaaggcccacagcgaggtgttcaccaagcccagcggccagcagaccctgagccccgacagacaggtgcccagacccaccgccctgcccagaagacagcccaccgtgcacttcagcgacgtgagcagcgacgacgacgaggacagactggtgatcgccacctag

SEQ ID NO: 84828 - DNA, 7341 bp, synthetic construct
  misc_feature 1..7341: note = Description of Artificial Sequence: Synthetic coding sequence
  source 1..7341: mol_type = other DNA
atggacaccggcgacaccgccctgggccagaaggccaccagcagaagcggcgagaccgacaaggccagcggcagatggagacaggagcagagcgccgtgatcaagatgagcaccttcggcagccacgagggccagagacagccccagatcgagcccgagcagatcggcaacaccgccagcgcccagctgttcggcagcggcaagctggccagccccagcgaggtggtgcagcaggtggccgagaagcagtaccccccccacagacccagcccctacagctgccagcacagcctgagcttcccccagcacagcctgccccagggcgtgatgcacagcaccaagccccaccagagcctggagggccccccctggctgttccccggccccctgcccagcgtggccagcgaggacctgttccccttccccatccacggccacagcggcggctaccccagaaagaagatcagcagcctgaaccccgcctacagccagtacagccagaagagcatcgagcaggccgaggaggcccacaagaaggagcacaagcccaagaagcccggcaagtacatctgcccctactgcagcagagcctgcgccaagcccagcgtgctgaagaagcacatcagaagccacaccggcgagagaccctacccctgcatcccctgcggcttcagcttcaagaccaagagcaacctgtacaagcacagaaagagccacgcccacgccatcaaggccggcctggtgcccttcaccgagagcgccgtgagcaagctggacctggaggccggcttcatcgacgtggaggccgagatccacagcgacggcgagcagagcaccgacaccgacgaggagagcagcctgttcgccgaggccagcgacaagatgagccccggcccccccatccccctggacatcgccagcagaggcggctaccacggcagcctggaggagagcctgggcggccccatgaaggtgcccatcctgatcatccccaagagcggcatccccctgcccaacgagagcagccagtacatcggccccgacatgctgcccaaccccagcctgaacaccaaggccgacgacagccacaccgtgaagcagaagctggccctgagactgagcgagaagaagggccaggacagcgagcccagcctgaacctgctgagcccccacagcaagggcagcaccgacagcggctacttcagcagaagcgagagcgccgagcagcagatcagcccccccaacaccaacgccaagagctacgaggagatcatcttcggcaagtactgcagactgagccccagaaacgccctgagcgtgaccaccaccagccaggagagagccgccatgggcagaaagggcatcatggagcccctgccccacgtgaacaccagactggacgtgaagatgttcgaggaccccgtgagccagctgatccccagcaagggcgacgtggaccccagccagaccagcatgctgaagagcaccaagttcaacagcgagagcagacagccccagatcatccccagcagcatcagaaacgagggcaagctgtaccccgccaacttccagggcagcaaccccgtgctgctggaggcccccgtggacagcagccccctgatcagaagcaacagcgtgcccaccagcagcgccaccaacctgaccatcccccccagcctgagaggcagccacagcttcgacgagagaatgaccggcagcgacgacgtgttctaccccggcaccgtgggcatccccccccagagaatgctgagaagacaggccgccttcgagctgcccagcgtgcaggagggccacgtggaggtggagcaccacggcagaatgctgaagggcatcagcagcagcagcctgaaggagaagaagctgagccccggcgacagagtgggctacgactacgacgtgtgcagaaagccctacaagaagtgggaggacagcgagacccccaagcagaactacagagacatcagctgcctgagcagcctgaagcacggcggcgagtacttcatggaccccgtggtgcccctgcagggcgtgcccagcatgttcggcaccacctgcgagaacagaaagagaagaaaggagaagagcgtgggcgacgaggaggacacccccatgatctgcagcagcatcgtgagcacccccgtgggcatcatggccagcgactacgaccccaagctgcagatgcaggagggcgtgagaagcggcttcgccatggccggccacgagaacctgagccacggccacaccgagagattcgacccctgcagaccccagctgcagcccggcagccccagcctggtgagcgaggagagccccagcgccatcgacagcgacaagatgagcgacctgggcggcagaaagccccccggcaacgtgatcagcgtgatccagcacaccaacagcctgagcagacccaacagcttcgagagaagcgagagcgccgagctggtggcctgcacccaggacaaggcccccagccccagcgagacctgcgacagcgagatcagcgaggcccccgtgagccccgagtgggccccccccggcgacggcgccgagagcggcggcaagcccagccccagccagcaggtgcagcagcagagctaccacacccagcccagactggtgagacagcacaacatccaggtgcccgagatcagagtgaccgaggagcccgacaagcccgagaaggagaaggaggcccagagcaaggagcccgagaagcccgtggaggagttccagtggccccagagaagcgagaccctgagccagctgcccgccgagaagctgccccccaagaagaagagactgagactggccgacatggagcacagcagcggcgagagcagcttcgagagcaccggcaccggcctgagcagaagccccagccaggagagcaacctgagccacagcagcagcttcagcatgagcttcgagagagaggagaccagcaagctgagcgccctgcccaagcaggacgagttcggcaagcacagcgagttcctgaccgtgcccgccggcagctacagcctgagcgtgcccggccaccaccaccagaaggagatgagaagatgcagcagcgagcagatgccctgcccccaccccgccgaggtgcccgaggtgagaagcaagagcttcgactacggcaacctgagccacgcccccgtgagcggcgccgccgccagcaccgtgagccccagcagagagagaaagaagtgcttcctggtgagacaggccagcttcagcggcagccccgagatcagccagggcgaggtgggcatggaccagagcgtgaagcaggagcagctggagcacctgcacgccggcctgagaagcggctggcaccacggcccccccgccgtgctgccccccctgcagcaggaggaccccggcaagcaggtggccggcccctgcccccccctgagcagcggccccctgcacctggcccagccccagatcatgcacatggacagccaggagagcctgagaaaccccctgatccagcccaccagctacatgaccagcaagcacctgcccgagcagccccacctgttcccccaccaggagaccatccccttcagccccatccagaacgccctgttccagttccagtaccccaccgtgtgcatggtgcacctgcccgcccagcagcccccctggtggcaggcccacttcccccaccccttcgcccagcacccccagaagagctacggcaagcccagcttccagaccgagatccacagcagctaccccctggagcacgtggccgagcacaccggcaagaagcccgccgagtacgcccacaccaaggagcagacctacccctgctacagcggcgccagcggcctgcaccccaagaacctgctgcccaagttccccagcgaccagagcagcaagagcaccgagacccccagcgagcaggtgctgcaggaggacttcgccagcgccaacgccggcagcctgcagagcctgcccggcaccgtggtgcccgtgagaatccagacccacgtgcccagctacggcagcgtgatgtacaccagcatcagccagatcctgggccagaacagccccgccatcgtgatctgcaaggtggacgagaacatgacccagagaaccctggtgaccaacgccgccatgcagggcatcggcttcaacatcgcccaggtgctgggccagcacgccggcctggagaagtaccccatctggaaggccccccagaccctgcccctgggcctggagagcagcatccccctgtgcctgcccagcaccagcgacagcgtggccaccctgggcggcagcaagagaatgctgagccccgccagcagcctggagctgttcatggagaccaagcagcagaagagagtgaaggaggagaagatgtacggccagatcgtggaggagctgagcgccgtggagctgaccaacagcgacatcaagaaggacctgagcagaccccagaagccccagctggtgagacagggctgcgccagcgagcccaaggacggcctgcagagcggcagcagcagcttcagcagcctgagccccagcagcagccaggactaccccagcgtgagccccagcagcagagagcccttcctgcccagcaaggagatgctgagcggcagcagagcccccctgcccggccagaagagcagcggccccagcgagagcaaggagagcagcgacgagctggacatcgacgagaccgccagcgacatgagcatgagcccccagagcagcagcctgcccgccggcgacggccagctggaggaggagggcaagggccacaagagacccgtgggcatgctggtgagaatggccagcgcccccagcggcaacgtggccgacagcaccctgctgctgaccgacatggccgacttccagcagatcctgcagttccccagcctgagaaccaccaccaccgtgagctggtgcttcctgaactacaccaagcccaactacgtgcagcaggccaccttcaagagcagcgtgtacgccagctggtgcatcagcagctgcaaccccaaccccagcggcctgaacaccaagaccaccctggccctgctgagaagcaagcagaagatcaccgccgagatctacaccctggccgccatgcacagacccggcaccggcaagctgaccagcagcagcgcctggaagcagttcacccagatgaagcccgacgccagcttcctgttcggcagcaagctggagagaaagctggtgggcaacatcctgaaggagagaggcaagggcgacatccacggcgacaaggacatcggcagcaagcagaccgagcccatcagaatcaagatcttcgagggcggctacaagagcaacgaggactacgtgtacgtgagaggcagaggcagaggcaagtacatctgcgaggagtgcggcatcagatgcaagaagcccagcatgctgaagaagcacatcagaacccacaccgacgtgagaccctacgtgtgcaagctgtgcaacttcgccttcaagaccaagggcaacctgaccaagcacatgaagagcaaggcccacatgaagaagtgcctggagctgggcgtgagcatgaccagcgtggacgacaccgagaccgaggaggccgagaacctggaggacctgcacaaggccgccgagaagcacagcatgagcagcatcagcaccgaccaccagttcagcgacgccgaggagagcgacggcgaggacggcgacgacaacgacgacgacgacgaggacgaggacgacttcgacgaccagggcgacctgacccccaagaccagaagcagaagcaccagcccccagccccccagattcagcagcctgcccgtgaacgtgggcgccgtgccccacggcgtgcccagcgacagcagcctgggccacagcagcctgatcagctacctggtgaccctgcccagcatcagagtgacccagctgatgacccccagcgacagctgcgaggacacccagatgaccgagtaccagagactgttccagagcaagagcaccgacagcgagcccgacaaggacagactggacatccccagctgcatggacgaggagtgcatgctgcccagcgagcccagcagcagccccagagacttcagccccagcagccaccacagcagccccggctacgacagcagcccctgcagagacaacagccccaagagatacctgatccccaagggcgacctgagccccagaagacacctgagccccagaagagacctgagccccatgagacacctgagccccagaaaggaggccgccctgagaagagagatgagccagagagacgtgagccccagaagacacctgagccccagaagacccgtgagccccggcaaggacatcaccgccagaagagacctgagccccagaagagagagaagatacatgaccaccatcagagcccccagccccagaagagccctgtaccacaacccccccctgagcatgggccagtacctgcaggccgagcccatcgtgctgggcccccccaacctgagaagaggcctgccccaggtgccctacttcagcctgtacggcgaccaggagggcgcctacgagcaccccggcagcagcctgttccccgagggccccaacgactacgtgttcagccacctgcccctgcacagccagcagcaggtgagagcccccatccccatggtgcccgtgggcggcatccagatggtgcacagcatgccccccgccctgagcagcctgcaccccagccccaccctgcccctgcccatggagggcttcgaggagaagaagggcgccagcggcgagagcttcagcaaggacccctacgtgctgagcaagcagcacgagaagagaggcccccacgccctgcagagcagcggcccccccagcacccccagcagccccagactgctgatgaagcagagcaccagcgaggacagcctgaacgccaccgagagagagcaggaggagaacatccagacctgcaccaaggccatcgccagcctgagaatcgccaccgaggaggccgccctgctgggccccgaccagcccgccagagtgcaggagccccaccagaaccccctgggcagcgcccacgtgagcatcagacacttcagcagacccgagcccggccagccctgcaccagcgccacccaccccgacctgcacgacggcgagaaggacaacttcggcaccagccagacccccctggcccacagcaccttctacagcaagagctgcgtggacgacaagcagctggacttccacagcagcaaggagctgagcagcagcaccgaggagagcaaggaccccagcagcgagaagagccagctgcactag

SEQ ID NO: 84829 - DNA, 7341 bp, synthetic construct; identical to SEQ ID NO: 84828
  misc_feature 1..7341: note = Description of Artificial Sequence: Synthetic coding sequence
  source 1..7341: mol_type = other DNA

SEQ ID NO: 84830 - DNA, 7341 bp, synthetic construct; identical to SEQ ID NO: 84828
  misc_feature 1..7341: note = Description of Artificial Sequence: Synthetic coding sequence
  source 1..7341: mol_type = other DNA

SEQ ID NO: 84831 - DNA, 7221 bp, synthetic construct
  misc_feature 1..7221: note = Description of Artificial Sequence: Synthetic coding sequence
  source 1..7221: mol_type = other DNA
atggaccccgagcagagcgtgaagggcaccaagaaggccgagggcagccccagaaagagactgaccaagggcgaggccatccagaccagcgtgagcagcagcgtgccctaccccggcagcggcaccgccgccacccaggagagccccgcccaggagctgctggccccccagcccttccccggccccagcagcgtgctgagagagggcagccaggagaagaccggccagcagcagaagccccccaagagaccccccatcgaggccagcgtgcacatcagccagctgccccagcaccccctgacccccgccttcatgagccccggcaagcccgagcacctgctggagggcagcacctggcagctggtggaccccatgagacccggccccagcggcagcttcgtggcccccggcctgcacccccagagccagctgctgcccagccacgccagcatcatcccccccgaggacctgcccggcgtgcccaaggtgttcgtgcccagacccagccaggtgagcctgaagcccaccgaggaggcccacaagaaggagagaaagccccagaagcccggcaagtacatctgccagtactgcagcagaccctgcgccaagcccagcgtgctgcagaagcacatcagaagccacaccggcgagagaccctacccctgcggcccctgcggcttcagcttcaagaccaagagcaacctgtacaagcacagaaagagccacgcccacagaatcaaggccggcctggccagcggcatgggcggcgagatgtacccccacggcctggagatggagagaatccccggcgaggagttcgaggagcccaccgagggcgagagcaccgacagcgaggaggagaccagcgccaccagcggccaccccgccgagctgagccccagacccaagcagcccctgctgagcagcggcctgtacagcagcggcagccacagcagcagccacgagagatgcagcctgagccagagcagcaccgcccagagcctggaggaccccccccccttcgtggagcccagcagcgagcaccccctgagccacaagcccgaggacacccacaccatcaagcagaagctggccctgagactgagcgagagaaagaaggtgatcgacgagcaggccttcctgagccccggcagcaagggcagcaccgagagcggctacttcagcagaagcgagagcgccgagcagcaggtgagcccccccaacaccaacgccaagagctacgccgagatcatcttcggcaagtgcggcagaatcggccagagaaccgccatgctgaccgccaccagcacccagcccctgctgcccctgagcaccgaggacaagcccagcctggtgcccctgagcgtgcccagaacccaggtgatcgagcacatcaccaagctgatcaccatcaacgaggccgtggtggacaccagcgagatcgacagcgtgaagcccagaagaagcagcctgagcagaagaagcagcatggagagccccaagagcagcctgtacagagagcccctgagcagccacagcgagaagaccaagcccgagcagagcctgctgagcctgcagcacccccccagcaccgccccccccgtgcccctgctgagaagccacagcatgcccagcgccgcctgcaccatcagcaccccccaccaccccttcagaggcagctacagcttcgacgaccacatcaccgacagcgaggccctgagccacagcagccacgtgttcaccagccaccccagaatgctgaagagacagcccgccatcgagctgcccctgggcggcgagtacagcagcgaggagcccggccccagcagcaaggacaccgccagcaagcccagcgacgaggtggagcccaaggagagcgagctgaccaagaagaccaagaagggcctgaagaccaagggcgtgatctacgagtgcaacatctgcggcgccagatacaagaagagagacaactacgaggcccacaagaagtactactgcagcgagctgcagatcgccaagcccatcagcgccggcacccacaccagccccgaggccgagaagagccagatcgagcacgagccctggagccagatgatgcactacaagctgggcaccaccctggagctgacccccctgagaaagagaagaaaggagaagagcctgggcgacgaggaggagccccccgccttcgagagcaccaagagccagttcggcagccccggccccagcgacgccgccagaaacctgcccctggagagcaccaagagccccgccgagcccagcaagagcgtgcccagcctggagggccccaccggcttccagcccagaacccccaagcccggcagcggcagcgagagcggcaaggagagaagaaccaccagcaaggagatcagcgtgatccagcacaccagcagcttcgagaagagcgacagcctggagcagcccagcggcctggagggcgaggacaagcccctggcccagttccccagccccccccccgccccccacggcagaagcgcccacagcctgcagcccaagctggtgagacagcccaacatccaggtgcccgagatcctggtgaccgaggagcccgacagacccgacaccgagcccgagcccccccccaaggagcccgagaagaccgaggagttccagtggccccagagaagccagaccctggcccagctgcccgccgagaagctgccccccaagaagaagagactgagactggccgagatggcccagagcagcggcgagagcagcttcgagagcagcgtgcccctgagcagaagccccagccaggagagcaacgtgagcctgagcggcagcagcagaagcgccagcttcgagagagacgaccacggcaaggccgaggcccccagccccagcagcgacatgagacccaagcccctgggcacccacatgctgaccgtgcccagccaccacccccacgccagagagatgagaagaagcgccagcgagcagagccccaacgtgagccacagcgcccacatgaccgagaccagaagcaagagcttcgactacggcagcctgagcctgaccggccccagcgcccccgcccccgtggccccccccgccagagtggccccccccgagagaagaaagtgcttcctggtgagacaggccagcctgagcagaccccccgagagcgagctggaggtggcccccaagggcagacaggagagcgaggagccccagcccagcagcagcaagcccagcgccaagagcagcctgagccagatcagcagcgccgccaccagccacggcggcccccccggcggcaagggccccggccaggacagaccccccctgggccccaccgtgccctacaccgaggccctgcaggtgttccaccaccccgtggcccagacccccctgcacgagaagccctacctgcccccccccgtgagcctgttcagcttccagcacctggtgcagcacgagcccggccagagccccgagttcttcagcacccaggccatgagcagcctgctgagcagcccctacagcatgccccccctgccccccagcctgttccaggccccccccctgcccctgcagcccaccgtgctgcaccccggccagctgcacctgccccagctgatgccccaccccgccaacatccccttcagacagccccccagcttcctgcccatgccctaccccaccagcagcgccctgagcagcggcttcttcctgcccctgcagagccagttcgccctgcagctgcccggcgacgtggagagccacctgccccagatcaagaccagcctggcccccctggccaccggcagcgccggcctgagccccagcaccgagtacagcagcgacatcagactgccccccgtggccccccccgccagcagcagcgcccccaccagcgccccccccctggccctgcccgcctgccccgacaccatggtgagcctggtggtgcccgtgagagtgcagaccaacatgcccagctacggcagcgccatgtacaccaccctgagccagatcctggtgacccagagccagggcagcagcgccaccgtggccctgcccaagttcgaggagccccccagcaagggcaccaccgtgtgcggcgccgacgtgcacgaggtgggccccggccccagcggcctgagcgaggagcagagcagagccttccccaccccctacctgagagtgcccgtgaccctgcccgagagaaagggcaccagcctgagcagcgagagcatcctgagcctggagggcagcagcagcaccgccggcggcagcaagagagtgctgagccccgccggcagcctggagctgaccatggagacccagcagcagaagagagtgaaggaggaggaggccagcaaggccgacgagaagctggagctggtgaagccctgcagcgtggtgctgaccagcaccgaggacggcaagagacccgagaagagccacctgggcaaccagggccagggcagaagagagctggagatgctgagcagcctgagcagcgaccccagcgacaccaaggagatcccccccctgccccaccccgccctgagccacggcaccgcccccggcagcgaggccctgaaggagtacccccagcccagcggcaagccccacagaagaggcctgacccccctgagcgtgaagaaggaggacagcaaggagcagcccgacctgcccagcctggccccccccagcagcctgcccctgagcgagaccagcagcagacccgccaagagccaggagggcaccgacagcaagaaggtgctgcagttccccagcctgcacaccaccaccaacgtgagctggtgctacctgaactacatcaagcccaaccacatccagcacgccgacagaagaagcagcgtgtacgccggctggtgcatcagcctgtacaaccccaacctgcccggcgtgagcaccaaggccgccctgagcctgctgagaagcaagcagaaggtgagcaaggagacctacaccatggccaccgccccccaccccgaggccggcagactggtgcccagcagcagcagaaagcccagaatgaccgaggtgcacctgcccagcctggtgagccccgagggccagaaggacctggccagagtggagaaggaggaggagagaagaggcgagcccgaggaggacgcccccgccagccagagaggcgagcccgccagaatcaagatcttcgagggcggctacaagagcaacgaggagtacgtgtacgtgagaggcagaggcagaggcaagtacgtgtgcgaggagtgcggcatcagatgcaagaagcccagcatgctgaagaagcacatcagaacccacaccgacgtgagaccctacgtgtgcaagcactgccacttcgccttcaagaccaagggcaacctgaccaagcacatgaagagcaaggcccacagcaagaagtgccaggagaccggcgtgctggaggagctggaggccgaggagggcaccagcgacgacctgttccaggacagcgagggcagagagggcagcgaggccgtggaggagcaccagttcagcgacctggaggacagcgacagcgacagcgacctggacgaggacgaggacgaggacgaggaggagagccaggacgagctgagcagacccagcagcgaggcccccccccccggccccccccacgccctgagagccgacagcagccccatcctgggcccccagccccccgacgcccccgccagcggcaccgaggccaccagaggcagcagcgtgagcgaggccgagagactgaccgccagcagctgcagcatgagcagccagagcatgcccggcctgccctggctgggccccgcccccctgggcagcgtggagaaggacaccggcagcgccctgagctacaagcccgtgagccccagaagaccctggagccccagcaaggaggccggcagcagaccccccctggccagaaagcacagcctgaccaagaacgacagcagcccccagagatgcagccccgccagagagccccaggccagcgcccccagcccccccggcctgcacgtggaccccggcagaggcatgggcgccctgccctgcggcagccccagactgcagctgagccccctgaccctgtgccccctgggcagagagctggcccccagagcccacgtgctgagcaagctggagggcaccaccgaccccggcctgcccagatacagccccaccagaagatggagccccggccaggccgagagcccccccagaagcgccccccccggcaagtgggccctggccggccccggcagccccagcgccggcgagcacggccccggcctgggcctggaccccagagtgctgttcccccccgcccccctgccccacaagctgctgagcagaagccccgagacctgcgccagcccctggcagaaggccgagagcagaagccccagctgcagccccggccccgcccaccccctgagcagcagacccttcagcgccctgcacgacttccacggccacatcctggccagaaccgaggagaacatcttcagccacctgcccctgcacagccagcacctgaccagagccccctgccccctgatccccatcggcggcatccagatggtgcaggccagacccggcgcccaccccaccctgctgcccggccccaccgccgcctgggtgagcggcttcagcggcggcggcagcgacctgaccggcgccagagaggcccaggagagaggcagatggagccccaccgagagcagcagcgccagcgtgagccccgtggccaaggtgagcaagttcaccctgagcagcgagctggagggcggcgactaccccaaggagagagagagaaccggcggcggccccggcagaccccccgactggaccccccacggcaccggcgcccccgccgagcccacccccacccacagcccctgcaccccccccgacaccctgcccagacccccccagggcagaagagccgcccagagctggagccccagactggagagccccagagcccccaccaaccccgagcccagcgccaccccccccctggacagaagcagcagcgtgggctgcctggccgaggccagcgccagattccccgccagaaccagaaacctgagcggcgagcccagaaccagacaggacagccccaagcccagcggcagcggcgagcccagagcccacccccaccagcccgaggacagagtgccccccaacgcctag

SEQ ID NO: 84832 - DNA, 7221 bp, synthetic construct; identical to SEQ ID NO: 84831
  misc_feature 1..7221: note = Description of Artificial Sequence: Synthetic coding sequence
  source 1..7221: mol_type = other DNA

SEQ ID NO: 84833 - DNA, 7218 bp, synthetic construct
  misc_feature 1..7218: note = Description of Artificial Sequence: Synthetic coding sequence
  source 1..7218: mol_type = other DNA
atggaccccgagcagagcgtgaagggcaccaagaaggccgagggcagccccagaaagagactgaccaagggcgaggccatccagaccagcgtgagcagcagcgtgccctaccccggcagcggcaccgccgccacccaggagagccccgcccaggagctgctggccccccagcccttccccggccccagcagcgtgctgagagagggcagccaggagaagaccggccagcagcagaagccccccaagagaccccccatcgaggccagcgtgcacatcagccagctgccccagcaccccctgacccccgccttcatgagccccggcaagcccgagcacctgctggagggcagcacctggcagctggtggaccccatgagacccggccccagcggcagcttcgtggcccccggcctgcacccccagagccagctgctgcccagccacgccagcatcatcccccccgaggacctgcccggcgtgcccaaggtgttcgtgcccagacccagccaggtgagcctgaagcccaccgaggaggcccacaagaaggagagaaagccccagaagcccggcaagtacatctgccagtactgcagcagaccctgcgccaagcccagcgtgctgcagaagcacatcagaagccacaccggcgagagaccctacccctgcggcccctgcggcttcagcttcaagaccaagagcaacctgtacaagcacagaaagagccacgcccacagaatcaaggccggcctggccagcggcatgggcggcgagatgtacccccacggcctggagatggagagaatccccggcgaggagttcgaggagcccaccgagggcgagagcaccgacagcgaggaggagaccagcgccaccagcggccaccccgccgagctgagccccagacccaagcagcccctgctgagcagcggcctgtacagcagcggcagccacagcagcagccacgagagatgcagcctgagccagagcagcaccgcccagagcctggaggaccccccccccttcgtggagcccagcagcgagcaccccctgagccacaagcccgaggacacccacaccatcaagcagaagctggccctgagactgagcgagagaaagaaggtgatcgacgagcaggccttcctgagccccggcagcaagggcagcaccgagagcggctacttcagcagaagcgagagcgccgagcagcaggtgagcccccccaacaccaacgccaagagctacgccgagatcatcttcggcaagtgcggcagaatcggccagagaaccgccatgctgaccgccaccagcacccagcccctgctgcccctgagcaccgaggacaagcccagcctggtgcccctgagcgtgcccagaacccaggtgatcgagcacatcaccaagctgatcaccatcaacgaggccgtggtggacaccagcgagatcgacagcgtgaagcccagaagaagcagcctgagcagaagaagcagcatggagagccccaagagcagcctgtacagagagcccctgagcagccacagcgagaagaccaagcccgagcagagcctgctgagcctgcagcacccccccagcaccgccccccccgtgcccctgctgagaagccacagcatgcccagcgccgcctgcaccatcagcaccccccaccaccccttcagaggcagctacagcttcgacgaccacatcaccgacagcgaggccctgagccacagcagccacgtgttcaccagccaccccagaatgctgaagagacagcccgccatcgagctgcccctgggcggcgagtacagcagcgaggagcccggccccagcagcaaggacaccgccagcaagcccagcgacgaggtggagcccaaggagagcgagctgaccaagaagaccaagaagggcctgaagaccaagggcgtgatctacgagtgcaacatctgcggcgccagatacaagaagagagacaactacgaggcccacaagaagtactactgcagcgagctgcagatcgccaagcccatcagcgccggcacccacaccagccccgaggccgagaagagccagatcgagcacgagccctggagccagatgatgcactacaagctgggcaccaccctggagctgacccccctgagaaagagaagaaaggagaagagcctgggcgacgaggaggagccccccgccttcgagagcaccaagagccagttcggcagccccggccccagcgacgccgccagaaacctgcccctggagagcaccaagagccccgccgagcccagcaagagcgtgcccagcctggagggccccaccggcttccagcccagaacccccaagcccggcagcggcagcgagagcggcaaggagagaagaaccaccagcaaggagatcagcgtgatccagcacaccagcagcttcgagaagagcgacagcctggagcagcccagcggcctggagggcgaggacaagcccctggcccagttccccagccccccccccgccccccacggcagaagcgcccacagcctgcagcccaagctggtgagacagcccaacatccaggtgcccgagatcctggtgaccgaggagcccgacagacccgacaccgagcccgagcccccccccaaggagcccgagaagaccgaggagttccagtggccccagagaagccagaccctggcccagctgcccgccgagaagctgccccccaagaagaagagactgagactggccgagatggcccagagcagcggcgagagcagcttcgagagcagcgtgcccctgagcagaagccccagccaggagagcaacgtgagcctgagcggcagcagcagaagcgccagcttcgagagagacgaccacggcaaggccgaggcccccagccccagcagcgacatgagacccaagcccctgggcacccacatgctgaccgtgcccagccaccacccccacgccagagagatgagaagaagcgccagcgagcagagccccaacgtgagccacagcgcccacatgaccgagaccagaagcaagagcttcgactacggcagcctgagcctgaccggccccagcgcccccgcccccgtggccccccccgccagagtggccccccccgagagaagaaagtgcttcctggtgagacaggccagcctgagcagaccccccgagagcgagctggaggtggcccccaagggcagacaggagagcgaggagccccagcccagcagcagcaagcccagcgccaagagcagcctgagccagatcagcagcgccgccaccagccacggcggcccccccggcggcaagggccccggccaggacagaccccccctgggccccaccgtgccctacaccgaggccctgcaggtgttccaccaccccgtggcccagacccccctgcacgagaagccctacctgcccccccccgtgagcctgttcagcttccagcacctggtgcagcacgagcccggccagagccccgagttcttcagcacccaggccatgagcagcctgctgagcagcccctacagcatgccccccctgccccccagcctgttccaggccccccccctgcccctgcagcccaccgtgctgcaccccggccagctgcacctgccccagctgatgccccaccccgccaacatccccttcagacagccccccagcttcctgcccatgccctaccccaccagcagcgccctgagcagcggcttcttcctgcccctgcagagccagttcgccctgcagctgcccggcgacgtggagagccacctgccccagatcaagaccagcctggcccccctggccaccggcagcgccggcctgagccccagcaccgagtacagcagcgacatcagactgccccccgtggccccccccgccagcagcagcgcccccaccagcgccccccccctggccctgcccgcctgccccgacaccatggtgagcctggtggtgcccgtgagagtgcagaccaacatgcccagctacggcagcgccatgtacaccaccctgagccagatcctggtgacccagagccagggcagcagcgccaccgtggccctgcccaagttcgaggagccccccagcaagggcaccaccgtgtgcggcgccgacgtgcacgaggtgggccccggccccagcggcctgagcgaggagcagagcagagccttccccaccccctacctgagagtgcccgtgaccctgcccgagagaaagggcaccagcctgagcagcgagagcatcctgagcctggagggcagcagcagcaccgccggcggcagcaagagagtgctgagccccgccggcagcctggagctgaccatggagacccagcagcagaagagagtgaaggaggaggaggccagcaaggccgacgagaagctggagctggtgaagccctgcagcgtggtgctgaccagcaccgaggacggcaagagacccgagaagagccacctgggcaaccagggccagggcagaagagagctggagatgctgagcagcctgagcagcgaccccagcgacaccaaggagatcccccccctgccccaccccgccctgagccacggcaccgcccccggcagcgaggccctgaaggagtacccccagcccagcggcaagccccacagaagaggcctgacccccctgagcgtgaagaaggaggacagcaaggagcagcccgacctgcccagcctggccccccccagcagcctgcccctgagcgagaccagcagcagacccgccaagagccaggagggcaccgacagcaagaaggtgctgcagttccccagcctgcacaccaccaccaacgtgagctggtgctacctgaactacatcaagcccaaccacatccagcacgccgacagaagaagcagcgtgtacgccggctggtgcatcagcctgtacaaccccaacctgcccggcgtgagcaccaaggccgccctgagcctgctgagaagcaagcagaaggtgagcaaggagacctacaccatggccaccgccccccaccccgaggccggcagactggtgcccagcagcagcagaaagcccagaatgaccgaggtgcacctgcccagcctggtgagccccgagggccagaaggacctggccagagtggagaaggaggaggagagaagaggcgagcccgaggaggacgcccccgccagccagagaggcgagcccgccagaatcaagatcttcgagggcggctacaagagcaacgaggagtacgtgtacgtgagaggcagaggcagaggcaagtacgtgtgcgaggagtgcggcatcagatgcaagaagcccagcatgctgaagaagcacatcagaacccacaccgacgtgagaccctacgtgtgcaagcactgccacttcgccttcaagaccaagggcaacctgaccaagcacatgaagagcaaggcccacagcaagaagtgccaggagaccggcgtgctggaggagctggaggccgaggagggcaccagcgacgacctgttccaggacagcgagggcagagagggcagcgaggccgtggaggagcaccagttcagcgacctggaggacagcgacagcgacagcgacctggacgaggacgaggacgaggacgaggaggagagccaggacgagctgagcagacccagcagcgaggcccccccccccggccccccccacgccctgagagccgacagcagccccatcctgggcccccagccccccgacgcccccgccagcggcaccgaggccaccagaggcagcagcgtgagcgaggccgagagactgaccgccagcagctgcagcatgagcagccagagcatgcccggcctgccctggctgggccccgcccccctgggcagcgtggagaaggacaccggcagcgccctgagctacaagcccgtgagccccagaagaccctggagccccagcaaggaggccggcagcagaccccccctggccagaaagcacagcctgaccaagaacgacagcagcccccagagatgcagccccgccagagagccccaggccagcgcccccagcccccccggcctgcacgtggaccccggcagaggcatgggcgccctgccctgcggcagccccagactgcagctgagccccctgaccctgtgccccctgggcagagagctggcccccagagcccacgtgctgagcaagctggagggcaccaccgaccccggcctgcccagatacagccccaccagaagatggagccccggccaggccgagagcccccccagaagcgccccccccggcaagtgggccctggccggccccggcagccccagcgccggcgagcacggccccggcctgggcctggaccccagagtgctgttcccccccgcccccctgccccacaagctgctgagcagaagccccgagacctgcgccagcccctggaaggccgagagcagaagccccagctgcagccccggccccgcccaccccctgagcagcagacccttcagcgccctgcacgacttccacggccacatcctggccagaaccgaggagaacatcttcagccacctgcccctgcacagccagcacctgaccagagccccctgccccctgatccccatcggcggcatccagatggtgcaggccagacccggcgcccaccccaccctgctgcccggccccaccgccgcctgggtgagcggcttcagcggcggcggcagcgacctgaccggcgccagagaggcccaggagagaggcagatggagccccaccgagagcagcagcgccagcgtgagccccgtggccaaggtgagcaagttcaccctgagcagcgagctggagggcggcgactaccccaaggagagagagagaaccggcggcggccccggcagaccccccgactggaccccccacggcaccggcgcccccgccgagcccacccccacccacagcccctgcaccccccccgacaccctgcccagacccccccagggcagaagagccgcccagagctggagccccagactggagagccccagagcccccaccaaccccgagcccagcgccaccccccccctggacagaagcagcagcgtgggctgcctggccgaggccagcgccagattccccgccagaaccagaaacctgagcggcgagcccagaaccagacaggacagccccaagcccagcggcagcggcgagcccagagcccacccccaccagcccgaggacagagtgccccccaacgcctag

SEQ ID NO: 84834 - DNA, 7218 bp, synthetic construct; identical to SEQ ID NO: 84833
  misc_feature 1..7218: note = Description of Artificial Sequence: Synthetic coding sequence
  source 1..7218: mol_type = other DNA

SEQ ID NO: 84835 - DNA, 9429 bp, synthetic construct
  misc_feature 1..9429: note = Description of Artificial Sequence: Synthetic coding sequence
  source 1..9429: mol_type = other DNA
atggccaccctggagaagctgatgaaggccttcgagagcctgaagagcttccagcagcagcagcagcagcagcagcagcagcagcagcagcagcagcagcagcagcagcagcagccccccccccccccccccccccccccccccccccagctgccccagccccccccccaggcccagcccctgctgccccagccccagccccccccccccccccccccccccccccccggccccgccgtggccgaggagcccctgcacagacccaagaaggagctgagcgccaccaagaaggacagagtgaaccactgcctgaccatctgcgagaacatcgtggcccagagcgtgagaaacagccccgagttccagaagctgctgggcatcgccatggagctgttcctgctgtgcagcgacgacgccgagagcgacgtgagaatggtggccgacgagtgcctgaacaaggtgatcaaggccctgatggacagcaacctgcccagactgcagctggagctgtacaaggagatcaagaagaacggcgcccccagaagcctgagagccgccctgtggagattcgccgagctggcccacctggtgagaccccagaagtgcagaccctacctggtgaacctgctgccctgcctgaccagaaccagcaagagacccgaggagagcgtgcaggagaccctggccgccgccgtgcccaagatcatggccagcttcggcaacttcgccaacgacaacgagatcaaggtgctgctgaaggccttcatcgccaacctgaagagcagcagccccaccatcagaagaaccgccgccggcagcgccgtgagcatctgccagcacagcagaagaacccagtacttctacagctggctgctgaacgtgctgctgggcctgctggtgcccgtggaggacgagcacagcaccctgctgatcctgggcgtgctgctgaccctgagatacctggtgcccctgctgcagcagcaggtgaaggacaccagcctgaagggcagcttcggcgtgaccagaaaggagatggaggtgagccccagcgccgagcagctggtgcaggtgtacgagctgaccctgcaccacacccagcaccaggaccacaacgtggtgaccggcgccctggagctgctgcagcagctgttcagaacccccccccccgagctgctgcagaccctgaccgccgtgggcggcatcggccagctgaccgccgccaaggaggagagcggcggcagaagcagaagcggcagcatcgtggagctgatcgccggcggcggcagcagctgcagccccgtgctgagcagaaagcagaagggcaaggtgctgctgggcgaggaggaggccctggaggacgacagcgagagcagaagcgacgtgagcagcagcgccctgaccgccagcgtgaaggacgagatcagcggcgagctggccgccagcagcggcgtgagcacccccggcagcgccggccacgacatcatcaccgagcagcccagaagccagcacaccctgcaggccgacagcgtggacctggccagctgcgacctgaccagcagcgccaccgacggcgacgaggaggacatcctgagccacagcagcagccaggtgagcgccgtgcccagcgaccccgccatggacctgaacgacggcacccaggccagcagccccatcagcgacagcagccagaccaccaccgagggccccgacagcgccgtgacccccagcgacagcagcgagatcgtgctggacggcaccgacaaccagtacctgggcctgcagatcggccagccccaggacgaggacgaggaggccaccggcatcctgcccgacgaggccagcgaggccttcagaaacagcagcatggccctgcagcaggcccacctgctgaagaacatgagccactgcagacagcccagcgacagcagcgtggacaagttcgtgctgagagacgaggccaccgagcccggcgaccaggagaacaagccctgcagaatcaagggcgacatcggccagagcaccgacgacgacagcgcccccctggtgcactgcgtgagactgctgagcgccagcttcctgctgaccggcggcaagaacgtgctggtgcccgacagagacgtgagagtgagcgtgaaggccctggccctgagctgcgtgggcgccgccgtggccctgcaccccgagagcttcttcagcaagctgtacaaggtgcccctggacaccaccgagtaccccgaggagcagtacgtgagcgacatcctgaactacatcgaccacggcgacccccaggtgagaggcgccaccgccatcctgtgcggcaccctgatctgcagcatcctgagcagaagcagattccacgtgggcgactggatgggcaccatcagaaccctgaccggcaacaccttcagcctggccgactgcatccccctgctgagaaagaccctgaaggacgagagcagcgtgacctgcaagctggcctgcaccgccgtgagaaactgcgtgatgagcctgtgcagcagcagctacagcgagctgggcctgcagctgatcatcgacgtgctgaccctgagaaacagcagctactggctggtgagaaccgagctgctggagaccctggccgagatcgacttcagactggtgagcttcctggaggccaaggccgagaacctgcacagaggcgcccaccactacaccggcctgctgaagctgcaggagagagtgctgaacaacgtggtgatccacctgctgggcgacgaggaccccagagtgagacacgtggccgccgccagcctgatcagactggtgcccaagctgttctacaagtgcgaccagggccaggccgaccccgtggtggccgtggccagagaccagagcagcgtgtacctgaagctgctgatgcacgagacccagccccccagccacttcagcgtgagcaccatcaccagaatctacagaggctacaacctgctgcccagcatcaccgacgtgaccatggagaacaacctgagcagagtgatcgccgccgtgagccacgagctgatcaccagcaccaccagagccctgaccttcggctgctgcgaggccctgtgcctgctgagcaccgccttccccgtgtgcatctggagcctgggctggcactgcggcgtgccccccctgagcgccagcgacgagagcagaaagagctgcaccgtgggcatggccaccatgatcctgaccctgctgagcagcgcctggttccccctggacctgagcgcccaccaggacgccctgatcctggccggcaacctgctggccgccagcgcccccaagagcctgagaagcagctgggccagcgaggaggaggccaaccccgccgccaccaagcaggaggaggtgtggcccgccctgggcgacagagccctggtgcccatggtggagcagctgttcagccacctgctgaaggtgatcaacatctgcgcccacgtgctggacgacgtggcccccggccccgccatcaaggccgccctgcccagcctgaccaacccccccagcctgagccccatcagaagaaagggcaaggagaaggagcccggcgagcaggccagcgtgcccctgagccccaagaagggcagcgaggccagcgccgccagcagacagagcgacaccagcggccccgtgaccaccagcaagagcagcagcctgggcagcttctaccacctgcccagctacctgaagctgcacgacgtgctgaaggccacccacgccaactacaaggtgaccctggacctgcagaacagcaccgagaagttcggcggcttcctgagaagcgccctggacgtgctgagccagatcctggagctggccaccctgcaggacatcggcaagtgcgtggaggagatcctgggctacctgaagagctgcttcagcagagagcccatgatggccaccgtgtgcgtgcagcagctgctgaagaccctgttcggcaccaacctggccagccagttcgacggcctgagcagcaaccccagcaagagccagggcagagcccagagactgggcagcagcagcgtgagacccggcctgtaccactactgcttcatggccccctacacccacttcacccaggccctggccgacgccagcctgagaaacatggtgcaggccgagcaggagaacgacaccagcggctggttcgacgtgctgcagaaggtgagcacccagctgaagaccaacctgaccagcgtgaccaagaacagagccgacaagaacgccatccacaaccacatcagactgttcgagcccctggtgatcaaggccctgaagcagtacaccaccaccacctgcgtgcagctgcagaagcaggtgctggacctgctggcccagctggtgcagctgagagtgaactactgcctgctggacagcgaccaggtgttcatcggcttcgtgctgaagcagttcgagtacatcgaggtgggccagttcagagagagcgaggccatcatccccaacatcttcttcttcctggtgctgctgagctacgagagataccacagcaagcagatcatcggcatccccaagatcatccagctgtgcgacggcatcatggccagcggcagaaaggccgtgacccacgccatccccgccctgcagcccatcgtgcacgacctgttcgtgctgagaggcaccaacaaggccgacgccggcaaggagctggagacccagaaggaggtggtggtgagcatgctgctgagactgatccagtaccaccaggtgctggagatgttcatcctggtgctgcagcagtgccacaaggagaacgaggacaagtggaagagactgagcagacagatcgccgacatcatcctgcccatgctggccaagcagcagatgcacatcgacagccacgaggccctgggcgtgctgaacaccctgttcgagatcctggcccccagcagcctgagacccgtggacatgctgctgagaagcatgttcgtgacccccaacaccatggccagcgtgagcaccgtgcagctgtggatcagcggcatcctggccatcctgagagtgctgatcagccagagcaccgaggacatcgtgctgagcagaatccaggagctgagcttcagcccctacctgatcagctgcaccgtgatcaacagactgagagacggcgacagcaccagcaccctggaggagcacagcgagggcaagcagatcaagaacctgcccgaggagaccttcagcagattcctgctgcagctggtgggcatcctgctggaggacatcgtgaccaagcagctgaaggtggagatgagcgagcagcagcacaccttctactgccaggagctgggcaccctgctgatgtgcctgatccacatcttcaagagcggcatgttcagaagaatcaccgccgccgccaccagactgttcagaagcgacggctgcggcggcagcttctacaccctggacagcctgaacctgagagccagaagcatgatcaccacccaccccgccctggtgctgctgtggtgccagatcctgctgctggtgaaccacaccgactacagatggtgggccgaggtgcagcagacccccaagagacacagcctgagcagcaccaagctgctgagcccccagatgagcggcgaggaggaggacagcgacctggccgccaagctgggcatgtgcaacagagagatcgtgagaagaggcgccctgatcctgttctgcgactacgtgtgccagaacctgcacgacagcgagcacctgacctggctgatcgtgaaccacatccaggacctgatcagcctgagccacgagccccccgtgcaggacttcatcagcgccgtgcacagaaacagcgccgccagcggcctgttcatccaggccatccagagcagatgcgagaacctgagcacccccaccatgctgaagaagaccctgcagtgcctggagggcatccacctgagccagagcggcgccgtgctgaccctgtacgtggacagactgctgtgcacccccttcagagtgctggccagaatggtggacatcctggcctgcagaagagtggagatgctgctggccgccaacctgcagagcagcatggcccagctgcccatggaggagctgaacagaatccaggagtacctgcagagcagcggcctggcccagagacaccagagactgtacagcctgctggacagattcagactgagcaccatgcaggacagcctgagccccagcccccccgtgagcagccaccccctggacggcgacggccacgtgagcctggagaccgtgagccccgacaaggactggtacgtgcacctggtgaagagccagtgctggaccagaagcgacagcgccctgctggagggcgccgagctggtgaacagaatccccgccgaggacatgaacgccttcatgatgaacagcgagttcaacctgagcctgctggccccctgcctgagcctgggcatgagcgagatcagcggcggccagaagagcgccctgttcgaggccgccagagaggtgaccctggccagagtgagcggcaccgtgcagcagctgcccgccgtgcaccacgtgttccagcccgagctgcccgccgagcccgccgcctactggagcaagctgaacgacctgttcggcgacgccgccctgtaccagagcctgcccaccctggccagagccctggcccagtacctggtggtggtgagcaagctgcccagccacctgcacctgccccccgagaaggagaaggacatcgtgaagttcgtggtggccaccctggaggccctgagctggcacctgatccacgagcagatccccctgagcctggacctgcaggccggcctggactgctgctgcctggccctgcagctgcccggcctgtggagcgtggtgagcagcaccgagttcgtgacccacgcctgcagcctgatctactgcgtgcacttcatcctggaggccgtggccgtgcagcccggcgagcagctgctgagccccgagagaagaaccaacacccccaaggccatcagcgaggaggaggaggaggtggaccccaacacccagaaccccaagtacatcaccgccgcctgcgagatggtggccgagatggtggagagcctgcagagcgtgctggccctgggccacaagagaaacagcggcgtgcccgccttcctgacccccctgctgagaaacatcatcatcagcctggccagactgcccctggtgaacagctacaccagagtgccccccctggtgtggaagctgggctggagccccaagcccggcggcgacttcggcaccgccttccccgagatccccgtggagttcctgcaggagaaggaggtgttcaaggagttcatctacagaatcaacaccctgggctggaccagcagaacccagttcgaggagacctgggccaccctgctgggcgtgctggtgacccagcccctggtgatggagcaggaggagagcccccccgaggaggacaccgagagaacccagatcaacgtgctggccgtgcaggccatcaccagcctggtgctgagcgccatgaccgtgcccgtggccggcaaccccgccgtgagctgcctggagcagcagcccagaaacaagcccctgaaggccctggacaccagattcggcagaaagctgagcatcatcagaggcatcgtggagcaggagatccaggccatggtgagcaagagagagaacatcgccacccaccacctgtaccaggcctgggaccccgtgcccagcctgagccccgccaccaccggcgccctgatcagccacgagaagctgctgctgcagatcaaccccgagagagagctgggcagcatgagctacaagctgggccaggtgagcatccacagcgtgtggctgggcaacagcatcacccccctgagagaggaggagtgggacgaggaggaggaggaggaggccgacgcccccgcccccagcagcccccccaccagccccgtgaacagcagaaagcacagagccggcgtggacatccacagctgcagccagttcctgctggagctgtacagcagatggatcctgcccagcagcagcgccagaagaacccccgccatcctgatcagcgaggtggtgagaagcctgctggtggtgagcgacctgttcaccgagagaaaccagttcgagctgatgtacgtgaccctgaccgagctgagaagagtgcaccccagcgaggacgagatcctggcccagtacctggtgcccgccacctgcaaggccgccgccgtgctgggcatggacaaggccgtggccgagcccgtgagcagactgctggagagcaccctgagaagcagccacctgcccagcagagtgggcgccctgcacggcgtgctgtacgtgctggagtgcgacctgctggacgacaccgccaagcagctgatccccgtgatcagcgactacctgctgagcaacctgaagggcatcgcccactgcgtgaacatccacagccagcagcacgtgctggtgatgtgcgccaccgccttctacctgatcgagaactaccccctggacgtgggccccgagttcagcgccagcatcatccagatgtgcggcgtgatgctgagcggcagcgaggagagcacccccagcatcatctaccactgcgccctgagaggcctggagagactgctgctgagcgagcagctgagcagactggacgccgagagcctggtgaagctgagcgtggacagagtgaacgtgcacagcccccacagagccatggccgccctgggcctgatgctgacctgcatgtacaccggcaaggagaaggtgagccccggcagaaccagcgaccccaaccccgccgcccccgacagcgagagcgtgatcgtggccatggagagagtgagcgtgctgttcgacagaatcagaaagggcttcccctgcgaggccagagtggtggccagaatcctgccccagttcctggacgacttcttccccccccaggacatcatgaacaaggtgatcggcgagttcctgagcaaccagcagccctacccccagttcatggccaccgtggtgtacaaggtgttccagaccctgcacagcaccggccagagcagcatggtgagagactgggtgatgctgagcctgagcaacttcacccagagagcccccgtggccatggccacctggagcctgagctgcttcttcgtgagcgccagcaccagcccctgggtggccgccatcctgccccacgtgatcagcagaatgggcaagctggagcaggtggacgtgaacctgttctgcctggtggccaccgacttctacagacaccagatcgaggaggagctggacagaagagccttccagagcgtgctggaggtggtggccgcccccggcagcccctaccacagactgctgacctgcctgagaaacgtgcacaaggtgaccacctgctag

SEQ ID NO: 84836 - DNA, 3114 bp, synthetic construct
  misc_feature 1..3114: note = Description of Artificial Sequence: Synthetic coding sequence
  source 1..3114: mol_type = other DNA
atggacagaatggccagcagcatgaagcaggtgcccaaccccctgcccaaggtgctgagcagaagaggcgtgggcgccggcctggaggccgccgagagagagagcttcgagagaacccagaccgtgagcatcaacaaggccatcaacacccaggaggtggccgtgaaggagaagcacgccagaacctgcatcctgggcacccaccacgagaagggcgcccagaccttctggagcgtggtgaacagactgcccctgagcagcaacgccgtgctgtgctggaagttctgccacgtgttccacaagctgctgagagacggccaccccaacgtgctgaaggacagcctgagatacagaaacgagctgagcgacatgagcagaatgtggggccacctgagcgagggctacggccagctgtgcagcatctacctgaagctgctgagaaccaagatggagtaccacaccaagaaccccagattccccggcaacctgcagatgagcgacagacagctggacgaggccggcgagagcgacgtgaacaacttcttccagctgaccgtggagatgttcgactacctggagtgcgagctgaacctgttccagaccgtgttcaacagcctggacatgagcagaagcgtgagcgtgaccgccgccggccagtgcagactggcccccctgatccaggtgatcctggactgcagccacctgtacgactacaccgtgaagctgctgttcaagctgcacagctgcctgcccgccgacaccctgcagggccacagagacagattcatggagcagttcaccaagctgaaggacctgttctacagaagcagcaacctgcagtacttcaagagactgatccagatcccccagctgcccgagaacccccccaacttcctgagagccagcgccctgagcgagcacatcagccccgtggtggtgatccccgccgaggccagcagccccgacagcgagcccgtgctggagaaggacgacctgatggacatggacgccagccagcagaacctgttcgacaacaagttcgacgacatcttcggcagcagcttcagcagcgaccccttcaacttcaacagccagaacggcgtgaacaaggacgagaaggaccacctgatcgagagactgtacagagagatcagcggcctgaaggcccagctggagaacatgaagaccgagagccagagagtggtgctgcagctgaagggccacgtgagcgagctggaggccgacctggccgagcagcagcacctgagacagcaggccgccgacgactgcgagttcctgagagccgagctggacgagctgagaagacagagagaggacaccgagaaggcccagagaagcctgagcgagatcgagagaaaggcccaggccaacgagcagagatacagcaagctgaaggagaagtacagcgagctggtgcagaaccacgccgacctgctgagaaagaacgccgaggtgaccaagcaggtgagcatggccagacaggcccaggtggacctggagagagagaagaaggagctggaggacagcctggagagaatcagcgaccagggccagagaaagacccaggagcagctggaggtgctggagagcctgaagcaggagctggccaccagccagagagagctgcaggtgctgcagggcagcctggagaccagcgcccagagcgaggccaactgggccgccgagttcgccgagctggagaaggagagagacagcctggtgagcggcgccgcccacagagaggaggagctgagcgccctgagaaaggagctgcaggacacccagctgaagctggccagcaccgaggagagcatgtgccagctggccaaggaccagagaaagatgctgctggtgggcagcagaaaggccgccgagcaggtgatccaggacgccctgaaccagctggaggagccccccctgatcagctgcgccggcagcgccgaccacctgctgagcaccgtgaccagcatcagcagctgcatcgagcagctggagaagagctggagccagtacctggcctgccccgaggacatcagcggcctgctgcacagcatcaccctgctggcccacctgaccagcgacgccatcgcccacggcgccaccacctgcctgagagccccccccgagcccgccgacagcctgaccgaggcctgcaagcagtacggcagagagaccctggcctacctggccagcctggaggaggagggcagcctggagaacgccgacagcaccgccatgagaaactgcctgagcaagatcaaggccatcggcgaggagctgctgcccagaggcctggacatcaagcaggaggagctgggcgacctggtggacaaggagatggccgccaccagcgccgccatcgagaccgccaccgccagaatcgaggagatgctgagcaagagcagagccggcgacaccggcgtgaagctggaggtgaacgagagaatcctgggctgctgcaccagcctgatgcaggccatccaggtgctgatcgtggccagcaaggacctgcagagagagatcgtggagagcggcagaggcaccgccagccccaaggagttctacgccaagaacagcagatggaccgagggcctgatcagcgccagcaaggccgtgggctggggcgccaccgtgatggtggacgccgccgacctggtggtgcagggcagaggcaagttcgaggagctgatggtgtgcagccacgagatcgccgccagcaccgcccagctggtggccgccagcaaggtgaaggccgacaaggacagccccaacctggcccagctgcagcaggccagcagaggcgtgaaccaggccaccgccggcgtggtggccagcaccatcagcggcaagagccagatcgaggagaccgacaacatggacttcagcagcatgaccctgacccagatcaagagacaggagatggacagccaggtgagagtgctggagctggagaacgagctgcagaaggagagacagaagctgggcgagctgagaaagaagcactacgagctggccggcgtggccgagggctgggaggagggcaccgaggccagcccccccaccctgcaggaggtggtgaccgagaaggagtag

SEQ ID NO: 84837 - DNA, 2961 bp, synthetic construct
  misc_feature 1..2961: note = Description of Artificial Sequence: Synthetic coding sequence
  source 1..2961: mol_type = other DNA
atggacagaatggccagcagcatgaagcaggtgcccaaccccctgcccaaggtgctgagcagaagaggcgtgggcgccggcctggaggccgccgagagagagagcttcgagagaacccagaccgtgagcatcaacaaggccatcaacacccaggaggtggccgtgaaggagaagcacgccagaacctgcatcctgggcacccaccacgagaagggcgcccagaccttctggagcgtggtgaacagactgcccctgagcagcaacgccgtgctgtgctggaagttctgccacgtgttccacaagctgctgagagacggccaccccaacgtgctgaaggacagcctgagatacagaaacgagctgagcgacatgagcagaatgtggggccacctgagcgagggctacggccagctgtgcagcatctacctgaagctgctgagaaccaagatggagtaccacaccaagaaccccagattccccggcaacctgcagatgagcgacagacagctggacgaggccggcgagagcgacgtgaacaacttcttccagctgaccgtggagatgttcgactacctggagtgcgagctgaacctgttccagaccgtgttcaacagcctggacatgagcagaagcgtgagcgtgaccgccgccggccagtgcagactggcccccctgatccaggtgatcctggactgcagccacctgtacgactacaccgtgaagctgctgttcaagctgcacagctgcctgcccgccgacaccctgcagggccacagagacagattcatggagcagttcaccaagctgaaggacctgttctacagaagcagcaacctgcagtacttcaagagactgatccagatcccccagctgcccgagaacccccccaacttcctgagagccagcgccctgagcgagcacatcagccccgtggtggtgatccccgccgaggccagcagccccgacagcgagcccgtgctggagaaggacgacctgatggacatggacgccagccagcagaacctgttcgacaacaagttcgacgacatcttcggcagcagcttcagcagcgaccccttcaacttcaacagccagaacggcgtgaacaaggacgagaaggaccacctgatcgagagactgtacagagagatcagcggcctgaaggcccagctggagaacatgaagaccgagagccagagagtggtgctgcagctgaagggccacgtgagcgagctggaggccgacctggccgagcagcagcacctgagacagcaggccgccgacgactgcgagttcctgagagccgagctggacgagctgagaagacagagagaggacaccgagaaggcccagagaagcctgagcgagatcgagagaaaggcccaggccaacgagcagagatacagcaagctgaaggagaagtacagcgagctggtgcagaaccacgccgacctgctgagaaagaacgccgaggtgaccaagcaggtgagcatggccagacaggcccaggtggacctggagagagagaagaaggagctggaggacagcctggagagaatcagcgaccagggccagagaaagacccaggagcagctggaggtgctggagagcctgaagcaggagctggccaccagccagagagagctgcaggtgctgcagggcagcctggagaccagcgcccagagcgaggccaactgggccgccgagttcgccgagctggagaaggagagagacagcctggtgagcggcgccgcccacagagaggaggagctgagcgccctgagaaaggagctgcaggacacccagctgaagctggccagcaccgaggagagcatgtgccagctggccaaggaccagagaaagatgctgctggtgggcagcagaaaggccgccgagcaggtgatccaggacgccctgaaccagctggaggagccccccctgatcagctgcgccggcagcgccgaccacctgctgagcaccgtgaccagcatcagcagctgcatcgagcagctggagaagagctggagccagtacctggcctgccccgaggacatcagcggcctgctgcacagcatcaccctgctggcccacctgaccagcgacgccatcgcccacggcgccaccacctgcctgagagccccccccgagcccgccgacagcctgaccgaggcctgcaagcagtacggcagagagaccctggcctacctggccagcctggaggaggagggcagcctggagaacgccgacagcaccgccatgagaaactgcctgagcaagatcaaggccatcggcgaggagctgctgcccagaggcctggacatcaagcaggaggagctgggcgacctggtggacaaggagatggccgccaccagcgccgccatcgagaccgccaccgccagaatcgagggcaccgccagccccaaggagttctacgccaagaacagcagatggaccgagggcctgatcagcgccagcaaggccgtgggctggggcgccaccgtgatggtggacgccgccgacctggtggtgcagggcagaggcaagttcgaggagctgatggtgtgcagccacgagatcgccgccagcaccgcccagctggtggccgccagcaaggtgaaggccgacaaggacagccccaacctggcccagctgcagcaggccagcagaggcgtgaaccaggccaccgccggcgtggtggccagcaccatcagcggcaagagccagatcgaggagaccgacaacatggacttcagcagcatgaccctgacccagatcaagagacaggagatggacagccaggtgagagtgctggagctggagaacgagctgcagaaggagagacagaagctgggcgagctgagaaagaagcactacgagctggccggcgtggccgagggctgggaggagggcaccgaggccagcccccccaccctgcaggaggtggtgaccgagaaggagtag

SEQ ID NO: 84838 - DNA, 3207 bp, synthetic construct
  misc_feature 1..3207: note = Description of Artificial Sequence: Synthetic coding sequence
  source 1..3207: mol_type = other DNA
atgaacagcatcaagaacgtgcccgccagagtgctgagcagaagacccggccacagcctggaggccgagagagagcagttcgacaagacccaggccatcagcatcagcaaggccatcaacacccaggaggcccccgtgaaggagaagcacgccagaagaatcatcctgggcacccaccacgagaagggcgccttcaccttctggagctacgccatcggcctgcccctgcccagcagcagcatcctgagctggaagttctgccacgtgctgcacaaggtgctgagagacggccaccccaacgtgctgcacgactgccagagatacagaagcaacatcagagagatcggcgacctgtggggccacctgcacgacagatacggccagctggtgaacgtgtacaccaagctgctgctgaccaagatcagcttccacctgaagcacccccagttccccgccggcctggaggtgaccgacgaggtgctggagaaggccgccggcaccgacgtgaacaacatcttccagctgaccgtggagatgttcgactacatggactgcgagctgaagctgagcgagagcgtgttcagacagctgaacaccgccatcgccgtgagccagatgagcagcggccagtgcagactggcccccctgatccaggtgatccaggactgcagccacctgtaccactacaccgtgaagctgctgttcaagctgcacagctgcctgcccgccgacaccctgcagggccacagagacagattccacgagcagttccacagcctgagaaacttcttcagaagagccagcgacatgctgtacttcaagagactgatccagatccccagactgcccgagggcccccccaacttcctgagagccagcgccctggccgagcacatcaagcccgtggtggtgatccccgaggaggcccccgaggacgaggagcccgagaacctgatcgagatcagcaccggcccccccgccggcgagcccgtggtggtggccgacctgttcgaccagaccttcggcccccccaacggcagcgtgaaggacgacagagacctgcagatcgagagcctgaagagagaggtggagatgctgagaagcgagctggagaagatcaagctggaggcccagagatacatcgcccagctgaagagccaggtgaacgccctggagggcgagctggaggagcagagaaagcagaagcagaaggccctggtggacaacgagcagctgagacacgagctggcccagctgagagccgcccagctggagggcgagagaagccagggcctgagagaggaggccgagagaaaggccagcgccaccgaggccagatacaacaagctgaaggagaagcacagcgagctggtgcacgtgcacgccgagctgctgagaaagaacgccgacaccgccaagcagctgaccgtgacccagcagagccaggaggaggtggccagagtgaaggagcagctggccttccaggtggagcaggtgaagagagagagcgagctgaagctggaggagaagagcgaccagctggagaagctgaagagagagctggaggccaaggccggcgagctggccagagcccaggaggccctgagccacaccgagcagagcaagagcgagctgagcagcagactggacaccctgagcgccgagaaggacgccctgagcggcgccgtgagacagagagaggccgacctgctggccgcccagagcctggtgagagagaccgaggccgccctgagcagagagcagcagagaagcagccaggagcagggcgagctgcagggcagactggccgagagagagagccaggagcagggcctgagacagagactgctggacgagcagttcgccgtgctgagaggcgccgccgccgaggccgccggcatcctgcaggacgccgtgagcaagctggacgaccccctgcacctgagatgcaccagcagccccgactacctggtgagcagagcccaggaggccctggacgccgtgagcaccctggaggagggccacgcccagtacctgaccagcctggccgacgccagcgccctggtggccgccctgaccagattcagccacctggccgccgacaccatcatcaacggcggcgccaccagccacctggcccccaccgaccccgccgacagactgatcgacacctgcagagagtgcggcgccagagccctggagctgatgggccagctgcaggaccagcaggccctgagacacatgcaggccagcctggtgagaacccccctgcagggcatcctgcagctgggccaggagctgaagcccaagagcctggacgtgagacaggaggagctgggcgccgtggtggacaaggagatggccgccaccagcgccgccatcgaggacgccgtgagaagaatcgaggacatgatgaaccaggccagacacgccagcagcggcgtgaagctggaggtgaacgagagaatcctgaacagctgcaccgacctgatgaaggccatcagactgctggtgaccaccagcaccagcctgcagaaggagatcgtggagagcggcagaggcgccgccacccagcaggagttctacgccaagaacagcagatggaccgagggcctgatcagcgccagcaaggccgtgggctggggcgccacccagctggtggaggccgccgacaaggtggtgctgcacaccggcaagtacgaggagctgatcgtgtgcagccacgagatcgccgccagcaccgcccagctggtggccgccagcaaggtgaaggccaacaagcacagcccccacctgagcagactgcaggagtgcagcagaaccgtgaacgagagagccgccaacgtggtggccagcaccaagagcggccaggagcagatcgaggacagagacaccatggacttcagcggcctgagcctgatcaagctgaagaagcaggagatggagacccaggtgagagtgctggagctggagaagaccctggaggccgagagaatgagactgggcgagctgagaaagcagcactacgtgctggccggcgccagcggcagccccggcgaggaggtggccatcagacccagcaccgcccccagaagcgtgaccaccaagaagccccccctggcccagaagcccagcgtggcccccagacaggaccaccagctggacaagaaggacggcatctaccccgcccagctggtgaactactag

SEQ ID NO: 84839 - DNA, 753 bp, synthetic construct
  misc_feature 1..753: note = Description of Artificial Sequence: Synthetic coding sequence
  source 1..753: mol_type = other DNA
atggcccacgtgggcaccagcagagtgggcagcgtgctgagcatgagcctgagcatccacctgctggtgcccaccatgaccaagggcgagaccggcaagcccggccaccacgaggcccccagaaccctgcaggccttcccctggacctgggccagagccagccccggcgtgagcgtggacatgagcgccggcctgccccagagcctgctgtgctggcccggcgcccccctgctgcccaccccccccctgcccagcgccacctacgtgggccacagcctgggcctgcccagagccggcagcagcgtgggcccctggttcagcggcagatgggtgggcggcgccctggtgcagtggcccctgggcggcggcggccccggcagcgtggccgccggcctgggcggccccctggtgagatggctgctgggcggcggcgccctggtgagatggcccctgggcggcggcggccccggcagcgtggccgccggctggggcggcccctggttcggcggcagatgggtgggcggcccccccggcagcgtggccgccggctggggcggccccgtgagatggcccctgggcggcggcggccccggcagcgtggccaccggctggggcggcccctggttcggcggcagatgggtgggcggcccccccggcagcgtggccgccggctgcggcggcgccctggtgcagtggcccctgggcggcggcagcctgcacagcatccccagcttccccagagcctggagatag

SEQ ID NO: 84840 - DNA, 2016 bp, synthetic construct
  misc_feature 1..2016: note = Description of Artificial Sequence: Synthetic coding sequence
  source 1..2016: mol_type = other DNA
atgagacccaagagactgggcagatgctgcgccggcagcagactgggccccggcgaccccgccgccctgacctgcgcccccagccccagcgccagccccgcccccgagcccagcgcccagccccaggccagaggcaccggccagagagtgggcagcagagccaccagcggcagccagttcctgagcgaggccagaaccggcgccagacccgccagcgaggccggcgccaaggccggcgccagaagacccagcgccttcagcgccatccagggcgacgtgagaagcatgcccgacaacagcgacgccccctggaccagattcgtgttccagggccccttcggcagcagagccaccggcagaggcaccggcaaggccgccggcatctggaagacccccgccgcctacgtgggcagaagacccggcgtgagcggccccgagagagccgccttcatcagagagctggaggaggccctgtgccccaacctgcccccccccgtgaagaagatcacccaggaggacgtgaaggtgatgctgtacctgctggaggagctgctgccccccgtgtgggagagcgtgacctacggcatggtgctgcagagagagagagacctgaacaccgccgccagaatcggccagagcctggtgaagcagaacagcgtgctgatggaggagaacagcaagctggaggccctgctgggcagcgccaaggaggagatcctgtacctgagacaccaggtgaacctgagagacgagctgctgcagctgtacagcgacagcgacgaggaggacgaggacgaggaggaggaggaggaggagaaggaggccgaggaggagcaggaggaggaggaggccgaggaggacctgcagtgcgcccacccctgcgacgcccccaagctgatcagccaggaggccctgctgcaccagcaccactgcccccagctggaggccctgcaggagaagctgagactgctggaggaggagaaccaccagctgagagaggaggccagccagctggacaccctggaggacgaggagcagatgctgatcctggagtgcgtggagcagttcagcgaggccagccagcagatggccgagctgagcgaggtgctggtgctgagactggagaactacgagagacagcagcaggaggtggccagactgcaggcccaggtgctgaagctgcagcagagatgcagaatgtacggcgccgagaccgagaagctgcagaagcagctggccagcgagaaggagatccagatgcagctgcaggaggagagcgtgtgggtgggcagccagctgcaggacctgagagagaagtacatggactgcggcggcatgctgatcgagatgcaggaggaggtgaagaccctgagacagcagccccccgtgagcaccggcagcgccacccactacccctacagcgtgcccctggagaccctgcccggcttccaggagaccctggccgaggagctgagaaccagcctgagaagaatgatcagcgaccccgtgtacttcatggagagaaactacgagatgcccagaggcgacaccagcagcctgagatacgacttcagatacagcgaggacagagagcaggtgagaggcttcgaggccgaggagggcctgatgctggccgccgacatcatgagaggcgaggacttcacccccgccgaggagttcgtgccccaggaggagctgggcgccgccaagaaggtgcccgccgaggagggcgtgatggaggaggccgagctggtgagcgaggagaccgagggctgggaggaggtggagctggagctggacgaggccaccagaatgaacgtggtgaccagcgccctggaggccagcggcctgggccccagccacctggacatgaactacgtgctgcagcagctggccaactggcaggacgcccactacagaagacagctgagatggaagatgctgcagaagggcgagtgcccccacggcgccctgcccgccgccagcagaaccagctgcagaagcagctgcagatag

SEQ ID NO: 84841 - DNA, 1809 bp, synthetic construct
  misc_feature 1..1809: note = Description of Artificial Sequence: Synthetic coding sequence
  source 1..1809: mol_type = other DNA
atgagacccaagagactgggcagatgctgcgccggcagcagactgggccccggcgaccccgccgccctgacctgcgcccccagccccagcgccagccccgcccccgagcccagcgcccagccccaggccagaggcaccggccagagagtgggcagcagagccaccagcggcagccagttcctgagcgaggccagaaccggcgccagacccgccagcgaggccggcgccaaggccggcgccagaagacccagcgccttcagcgccatccagggcgacgtgagaagcatgcccgacaacagcgacgccccctggaccagattcgtgttccagggccccttcggcagcagagccaccggcagaggcaccggcaaggccgccggcatctggaagacccccgccgcctacgtgggcagaagacccggcgtgagcggccccgagagagccgccttcatcagagagctggaggaggccctgtgccccaacctgcccccccccgtgaagaagatcacccaggaggacgtgaaggtgatgctgtacctgctggaggaggtgtgcaccgccttcctgatccagctgctgccccccgtgtgggagagcgtgacctacggcatggtgctgcagagagagagagacctgaacaccgccgccagaatcggccagagcctggtgaagcagaacagcgtgctgatggaggagaacagcaagctggaggccctgctgggcagcgccaaggaggagatcctgtacctgagacaccaggtgaacctgagagacgagctgctgcagctgtacagcgacagcgacgaggaggacgaggacgaggaggaggaggaggaggagaaggaggccgaggaggagcaggaggaggaggaggccgaggaggacctgcagtgcgcccacccctgcgacgcccccaagctgatcagccaggaggccctgctgcaccagcaccactgcccccagctggaggccctgcaggagaagctgagactgctggaggaggagaaccaccagctgagagaggaggccagccagctggacaccctggaggacgaggagcagatgctgatcctggagtgcgtggagcagttcagcgaggccagccagcagatggccgagctgagcgaggtgctggtgctgagactggagaactacgagagacagcagcaggaggtggccagactgcaggcccaggtgctgaagctgcagcagagatgcagaatggagaccctgcccggcttccaggagaccctggccgaggagctgagaaccagcctgagaagaatgatcagcgaccccgtgtacttcatggagagaaactacgagatgcccagaggcgacaccagcagcctgagatacgacttcagatacagcgaggacagagagcaggtgagaggcttcgaggccgaggagggcctgatgctggccgccgacatcatgagaggcgaggacttcacccccgccgaggagttcgtgccccaggaggagctgggcgccgccaagaaggtgcccgccgaggagggcgtgatggaggaggccgagctggtgagcgaggagaccgagggctgggaggaggtggagctggagctggacgaggccaccagaatgaacgtggtgaccagcgccctggaggccagcggcctgggccccagccacctggacatgaactacgtgctgcagcagctggccaactggcaggacgcccactacagaagacagctgagatggaagatgctgcagaagggcgagtgcccccacggcgccctgcccgccgccagcagaaccagctgcagaagcagctgcagatag

SEQ ID NO: 84842 - DNA, 1860 bp, synthetic construct
  misc_feature 1..1860: note = Description of Artificial Sequence: Synthetic coding sequence
  source 1..1860: mol_type = other DNA
atgagacccaagagactgggcagatgctgcgccggcagcagactgggccccggcgaccccgccgccctgacctgcgcccccagccccagcgccagccccgcccccgagcccagcgcccagccccaggccagaggcaccggccagagagtgggcagcagagccaccagcggcagccagttcctgagcgaggccagaaccggcgccagacccgccagcgaggccggcgccaaggccggcgccagaagacccagcgccttcagcgccatccagggcgacgtgagaagcatgcccgacaacagcgacgccccctggaccagattcgtgttccagggccccttcggcagcagagccaccggcagaggcaccggcaaggccgccggcatctggaagacccccgccgcctacgtgggcagaagacccggcgtgagcggccccgagagagccgccttcatcagagagctggaggaggccctgtgccccaacctgcccccccccgtgaagaagatcacccaggaggacgtgaaggtgatgctgtacctgctggaggagctgctgccccccgtgtgggagagcgtgacctacggcatggtgctgcagagagagagagacctgaacaccgccgccagaatcggccagagcctggtgaagcagaacagcgtgctgatggaggagaacagcaagctggaggccctgctgggcagcgccaaggaggagatcctgtacctgagacaccaggtgaacctgagagacgagctgctgcagctgtacagcgacagcgacgaggaggacgaggacgaggaggaggaggaggaggagaaggaggccgaggaggagcaggaggaggaggaggccgaggaggacctgcagtgcgcccacccctgcgacgcccccaagctgatcagccaggaggccctgctgcaccagcaccactgcccccagctggaggccctgcaggagaagctgagactgctggaggaggagaaccaccagctgagagaggaggccagccagctggacaccctggaggacgaggagcagatgctgatcctggagtgcgtggagcagttcagcgaggccagccagcagatggccgagctgagcgaggtgctggtgctgagactggagaactacgagagacagcagcaggaggtggccagactgcaggcccaggtgctgaagctgcagcagagatgcagaatgtacggcgccgagaccgagaagctgcagaagcagctggccagcgagaaggagatccagatgcagctgcaggaggaggagaccctgcccggcttccaggagaccctggccgaggagctgagaaccagcctgagaagaatgatcagcgaccccgtgtacttcatggagagaaactacgagatgcccagaggcgacaccagcagcctgagatacgacttcagatacagcgaggacagagagcaggtgagaggcttcgaggccgaggagggcctgatgctggccgccgacatcatgagaggcgaggacttcacccccgccgaggagttcgtgccccaggaggagctgggcgccgccaagaaggtgcccgccgaggagggcgtgatggaggaggccgagctggtgagcgaggagaccgagggctgggaggaggtggagctggagctggacgaggccaccagaatgaacgtggtgaccagcgccctggaggccagcggcctgggccccagccacctggacatgaactacgtgctgcagcagctggccaactggcaggacgcccactacagaagacagctgagatggaagatgctgcagaagggcgagtgcccccacggcgccctgcccgccgccagcagaaccagctgcagaagcagctgcagatag

SEQ ID NO: 84843 - DNA, 1785 bp, synthetic construct
  misc_feature 1..1785: note = Description of Artificial Sequence: Synthetic coding sequence
  source 1..1785: mol_type = other DNA
atgagacccaagagactgggcagatgctgcgccggcagcagactgggccccggcgaccccgccgccctgacctgcgcccccagccccagcgccagccccgcccccgagcccagcgcccagccccaggccagaggcaccggccagagagtgggcagcagagccaccagcggcagccagttcctgagcgaggccagaaccggcgccagacccgccagcgaggccggcgccaaggccggcgccagaagacccagcgccttcagcgccatccagggcgacgtgagaagcatgcccgacaacagcgacgccccctggaccagattcgtgttccagggccccttcggcagcagagccaccggcagaggcaccggcaaggccgccggcatctggaagacccccgccgcctacgtgggcagaagacccggcgtgagcggccccgagagagccgccttcatcagagagctggaggaggccctgtgccccaacctgcccccccccgtgaagaagatcacccaggaggacgtgaaggtgatgctgtacctgctggaggagctgctgccccccgtgtgggagagcgtgacctacggcatggtgctgcagagagagagagacctgaacaccgccgccagaatcggccagagcctggtgaagcagaacagcgtgctgatggaggagaacagcaagctggaggccctgctgggcagcgccaaggaggagatcctgtacctgagacaccaggtgaacctgagagacgagctgctgcagctgtacagcgacagcgacgaggaggacgaggacgaggaggaggaggaggaggagaaggaggccgaggaggagcaggaggaggaggaggccgaggaggacctgcagtgcgcccacccctgcgacgcccccaagctgatcagccaggaggccctgctgcaccagcaccactgcccccagctggaggccctgcaggagaagctgagactgctggaggaggagaaccaccagctgagagaggaggccagccagctggacaccctggaggacgaggagcagatgctgatcctggagtgcgtggagcagttcagcgaggccagccagcagatggccgagctgagcgaggtgctggtgctgagactggagaactacgagagacagcagcaggaggtggccagactgcaggcccaggtgctgaagctgcagcagagatgcagaatggagaccctgcccggcttccaggagaccctggccgaggagctgagaaccagcctgagaagaatgatcagcgaccccgtgtacttcatggagagaaactacgagatgcccagaggcgacaccagcagcctgagatacgacttcagatacagcgaggacagagagcaggtgagaggcttcgaggccgaggagggcctgatgctggccgccgacatcatgagaggcgaggacttcacccccgccgaggagttcgtgccccaggaggagctgggcgccgccaagaaggtgcccgccgaggagggcgtgatggaggaggccgagctggtgagcgaggagaccgagggctgggaggaggtggagctggagctggacgaggccaccagaatgaacgtggtgaccagcgccctggaggccagcggcctgggccccagccacctggacatgaactacgtgctgcagcagctggccaactggcaggacgcccactacagaagacagctgagatggaagatgctgcagaagggcgagtgcccccacggcgccctgcccgccgccagcagaaccagctgcagaagcagctgcagatag

SEQ ID NO: 84844 - DNA, 837 bp, synthetic construct
  misc_feature 1..837: note = Description of Artificial Sequence: Synthetic coding sequence
  source 1..837: mol_type = other DNA
atgaagttcagagccaagatcaccggcaagggctgcctggagctgttcatccacgtgagcggcaccgtggccagactggccaaggtgtgcgtgctgagagtgagacccgacagcctgtgcttcggccccgccggcagcggcggcctgcacgaggccagactgtggtgcgaggtgagacagggcgccttccagcagttcagaatggagggcgtgagcgaggacctggacgagatccacctggagctgaccgccgagcacctgagcagagccgccagaagcgccgccggcgccagcagcctgaagctgcagctgacccacaagagaagacccagcctgaccgtggccgtggagctggtgagcagcctgggcagagccagaagcgtggtgcacgacctgcccgtgagagtgctgcccagaagagtgtggagagactgcctgccccccagcctgagagccagcgacgccagcatcagactgcccagatggagaaccctgagaagcatcgtggagagaatggccaacgtgggcagccacgtgctggtggaggccaacctgagcggcagaatgaccctgagcatcgagaccgaggtggtgagcatccagagctacttcaagaacctgggcaaccccccccagagcgccgtgggcgtgcccgagaacagagacctggagagcatggtgcaggtgagagtggacaacagaaagctgctgcagttcctggagggccagcagatccaccccaccaccgccctgtgcaacatctgggacaacaccctgctgcagctggtgctggtgcaggaggacgtgagcctgcagtacttcatccccgccctgtag

SEQ ID NO: 84845 - DNA, 1065 bp, synthetic construct
  misc_feature 1..1065: note = Description of Artificial Sequence: Synthetic coding sequence
  source 1..1065: mol_type = other DNA
atgaagagcctgctgctgctggtgctgatcagcatctgctgggccgaccacctgagcgacaactacaccctggaccacgacagagccatccacatccaggccgagaacggcccccacctgctggtggaggccgagcaggccaaggtgttcagccacagaggcggcaacgtgaccctgccctgcaagttctacagagaccccaccgccttcggcagcggcatccacaagatcagaatcaagtggaccaagctgaccagcgactacctgaaggaggtggacgtgttcgtgagcatgggctaccacaagaagacctacggcggctaccagggcagagtgttcctgaagggcggcagcgacagcgacgccagcctggtgatcaccgacctgaccctggaggactacggcagatacaagtgcgaggtgatcgagggcctggaggacgacaccgtggtggtggccctggacctgcagggcgtggtgttcccctacttccccagactgggcagatacaacctgaacttccacgaggcccagcaggcctgcctggaccaggacgccgtgatcgccagcttcgaccagctgtacgacgcctggagaggcggcctggactggtgcaacgccggctggctgagcgacggcagcgtgcagtaccccatcaccaagcccagagagccctgcggcggccagaacaccgtgcccggcgtgagaaactacggcttctgggacaaggacaagagcagatacgacgtgttctgcttcaccagcaacttcaacggcagattctactacctgatccaccccaccaagctgacctacgacgaggccgtgcaggcctgcctgaacgacggcgcccagatcgccaaggtgggccagatcttcgccgcctggaagatcctgggctacgacagatgcgacgccggctggctggccgacggcagcgtgagataccccatcagcagacccagaagaagatgcagccccaccgaggccgccgtgagattcgtgggcttccccgacaagaagcacaagctgtacggcgtgtactgcttcagagcctacaactag

SEQ ID NO: 84846 - DNA, 549 bp, synthetic construct
  misc_feature 1..549: note = Description of Artificial Sequence: Synthetic coding sequence
  source 1..549: mol_type = other DNA
atgaagagcctgctgctgctggtgctgatcagcatctgctgggccgaccacctgagcgacaactacaccctggaccacgacagagccatccacatccaggagaacggcccccacctgctggtggaggccgagcaggccaaggtgttcagccacagaggcggcaacgtgaccctgccctgcaagttctacagagaccccaccgccttcggcagcggcatccacaagatcagaatcaagtggaccaagctgaccagcgactacctgaaggaggtggacgtgttcgtgagcatgggctaccacaagaagacctacggcggctaccagggcagagtgttcctgaagggcggcagcgacagcgacgccagcctggtgatcaccgacctgaccctggaggactacggcagatacaagtgcgaggtgatcgagggcctggaggacgacaccgtggtggtggccctggacctgcagggcgtggtgttcccctacttccccagactgggcagatacaacctgaacttccacgaggcccagcaggcctgcctggactag

SEQ ID NO: 84847 - DNA, 477 bp, synthetic construct
  misc_feature 1..477: note = Description of Artificial Sequence: Synthetic coding sequence
  source 1..477: mol_type = other DNA
atgaagagcctgctgctgctggtgctgatcagcatctgctgggccgaccacctgagcgacaactacaccctggaccacgacagagccatccacatccaggccgagaacggcccccacctgctggtggaggccgagcaggccaaggtgttcagccacagaggcggcaacgtgaccctgccctgcaagttctacagagaccccaccgccttcggcagcggcatccacaagatcagaatcaagtggaccaagctgaccagcgactacctgaaggaggtggacgtgttcgtgagcatgggctaccacaagaagacctacggcggctaccagggcagagtgttcctgaagggcggcagcgacagcgacgccagcctggtgatcaccgacctgaccctggaggactacggcagatacaagtgcgaggtgatcgagggcctggaggacgacaccgtggtggtggccctggacctgcagggctag

SEQ ID NO: 84848 - DNA, 600 bp, synthetic construct
  misc_feature 1..600: note = Description of Artificial Sequence: Synthetic coding sequence
  source 1..600: mol_type = other DNA
atgaagagcctgctgctgctggtgctgatcagcatctgctgggccgaccacctgagcgacaactacaccctggaccacgacagagccatccacatccaggccgagaacggcccccacctgctggtggaggccgagcaggccaaggtgttcagccacagaggcggcaacgtgaccctgccctgcaagttctacagagaccccaccgccttcggcagcggcatccacaagatcagaatcaagtggaccaagctgaccagcgactacctgaaggaggtggacgtgttcgtgagcatgggctaccacaagaagacctacggcggctaccagggcagagtgttcctgaagggcggcagcgacagcgacgccagcctggtgatcaccgacctgaccctggaggactacggcagatacaagtgcgaggtgatcgagggcctggaggacgacaccgtggtggtggccctggacctgcagggcgtggtgttcccctacttccccagactgggcagatacaacctgaacttccacgaggcccagcaggcctgcctggaccaggacgccgtgatcgccagcttcgaccagctgtacgacgcctggagatag

SEQ ID NO: 84849 - DNA, 777 bp, synthetic construct
  misc_feature 1..777: note = Description of Artificial Sequence: Synthetic coding sequence
  source 1..777: mol_type = other DNA
atgaagagcctgctgctgctggtgctgatcagcatctgctgggccgaccacctgagcgacaactacaccctggaccacgacagagccatccacatccaggccgagaacggcccccacctgctggtggaggccgagcaggccaaggtgttcagccacagaggcggcaacgtgaccctgccctgcaagttctacagagaccccaccgccttcggcagcggcatccacaagatcagaatcaagtggaccaagctgaccagcgactacctgaaggaggtggacgtgttcgtgagcatgggctaccacaagaagacctacggcggctaccagggcagagtgttcctgaagggcggcagcgacagcgacgccagcctggtgatcaccgacctgaccctggaggactacggcagatacaagtgcgaggtgatcgagggcctggaggacgacaccgtggtggtggccctggacctgcagggcgtggtgttcccctacttccccagactgggcagatacaacctgaacttccacgaggcccagcaggcctgcctggaccaggacgccgtgatcgccagcttcgaccagctgtacgacgcctggagaggcggcctggactggtgcaacgccggctggctgagcgacggcagcgtgcagtaccccatcaccaagcccagagagccctgcggcggccagaacaccgtgcccggcgtgagaaactacggcttctgggacaaggacaagagcagatacgacgtgttctgcttcaccagcaacttcaactag

SEQ ID NO: 84850 - DNA, 462 bp, synthetic construct
  misc_feature 1..462: note = Description of Artificial Sequence: Synthetic coding sequence
  source 1..462: mol_type = other DNA
atgaagagcctgctgctgctggtgctgatcagcatctgctgggccgaccacctgagcgacaactacaccctggaccacgacagagccatccacatccaggccgagaacggcccccacctgctggtggaggccgagcaggccaaggtgttcagccacagaggcggcaacgtgaccctgccctgcaagttctacagagaccccaccgccttcggcagcggcatccacaagatcagaatcaagtggaccaagctgaccagcgactacctgaaggaggtggacgtgttcgtgagcatgggctaccacaagaagacctacggcggctaccagggcagagtgttcctgaagggcggcagcgacagcgacgccagcctggtgatcaccgacctgaccctggaggactacggcagatacaagtgcgaggtgatcgagggcctggaggacgacaccgtggtggtggcctag

SEQ ID NO: 84851 - DNA, 1683 bp, synthetic construct
  misc_feature 1..1683: note = Description of Artificial Sequence: Synthetic coding sequence
  source 1..1683: mol_type = other DNA
atgttcgccagaatgagcgacctgcacgtgctgctgctgatggccctggtgggcaagaccgcctgcggcttcagcctgatgagcctgctggagagcctggaccccgactggacccccgaccagtacgactacagctacgaggactacaaccaggaggagaacaccagcagcaccctgacccacgccgagaaccccgactggtactacaccgaggaccaggccgacccctgccagcccaacccctgcgagcacggcggcgactgcctggtgcacggcagcaccttcacctgcagctgcctggcccccttcagcggcaacaagtgccagaaggtgcagaacacctgcaaggacaacccctgcggcagaggccagtgcctgatcacccagagccccccctactacagatgcgtgtgcaagcacccctacaccggccccagctgcagccaggtggtgcccgtgtgcagacccaacccctgccagaacggcgccacctgcagcagacacaagagaagaagcaagttcacctgcgcctgccccgaccagttcaagggcaagttctgcgagatcggcagcgacgactgctacgtgggcgacggctacagctacagaggcaagatgaacagaaccgtgaaccagcacgcctgcctgtactggaacagccacctgctgctgcaggagaactacaacatgttcatggaggacgccgagacccacggcatcggcgagcacaacttctgcagaaaccccgacgccgacgagaagccctggtgcttcatcaaggtgaccaacgacaaggtgaagtgggagtactgcgacgtgagcgcctgcagcgcccaggacgtggcctaccccgaggagagccccaccgagcccagcaccaagctgcccggcttcgacagctgcggcaagaccgagatcgccgagagaaagatcaagagaatctacggcggcttcaagagcaccgccggcaagcacccctggcaggccagcctgcagagcagcctgcccctgaccatcagcatgccccagggccacttctgcggcggcgccctgatccacccctgctgggtgctgaccgccgcccactgcaccgacatcaagaccagacacctgaaggtggtgctgggcgaccaggacctgaagaaggaggagttccacgagcagagcttcagagtggagaagatcttcaagtacagccactacaacgagagagacgagatcccccacaacgacatcgccctgctgaagctgaagcccgtggacggccactgcgccctggagagcaagtacgtgaagaccgtgtgcctgcccgacggcagcttccccagcggcagcgagtgccacatcagcggctggggcgtgaccgagaccggcaagggcagcagacagctgctggacgccaaggtgaagctgatcgccaacaccctgtgcaacagcagacagctgtacgaccacatgatcgacgacagcatgatctgcgccggcaacctgcagaagcccggccaggacacctgccagggcgacagcggcggccccctgacctgcgagaaggacggcacctactacgtgtacggcatcgtgagctggggcctggagtgcggcaagagacccggcgtgtacacccaggtgaccaagttcctgaactggatcaaggccaccatcaagagcgagagcggcttctag

SEQ ID NO: 84852 - DNA, 534 bp, synthetic construct
  misc_feature 1..534: note = Description of Artificial Sequence: Synthetic coding sequence
  source 1..534: mol_type = other DNA
atggaggagaacttcatctgcagcagaaagaccatggccctgagcagcacctggatcctgagccccaagaagaccggccccctgaccagcatgatcaccgccaccagaatcatcatcagaaagagaacccccgtggcccacctgcccaccctgagaatcctgaccggcaccaccctgagaaccaagctgatccacgccagccccacccccgtgaacaccgtgggcaccgccagcagcatgggcgcccccagccacgccgccgcctggctgctgagcctgggcatcagcgtgagaaagtgcaagatcagagccagaaccacccacgtggccggcgccaacgtgagcctgcccagagtgctgcccaccaccgccgtgagcgtgaacaccctgacccaggtgcccgccgcccccaagtggttcctgtacgccggccagacccccgccagaatgggcctgcccgcccccggcatcagcggcgaccccagcagccccgtgcccgtgcccaccagcagcagaggcaacagcgtgaagtag

SEQ ID NO: 84853 - DNA, 843 bp, synthetic construct
  misc_feature 1..843: note = Description of Artificial Sequence: Synthetic coding sequence
  source 1..843: mol_type = other DNA
atgttcgccagaatgagcgacctgcacgtgctgctgctgatggccctggtgggcaagaccgcctgcggcttcagcctgatgagcctgctggagagcctggaccccgactggacccccgaccagtacgactacagctacgaggactacaaccaggaggagaacaccagcagcaccctgacccacgccgagaaccccgactggtactacaccgaggaccaggccgacccctgccagcccaacccctgcgagcacggcggcgactgcctggtgcacggcagcaccttcacctgcagctgcctggcccccttcagcggcaacaagtgccagaaggtgcagaacacctgcaaggacaacccctgcggcagaggccagtgcctgatcacccagagccccccctactacagatgcgtgtgcaagcacccctacaccggccccagctgcagccaggtggtgcccgtgtgcagacccaacccctgccagaacggcgccacctgcagcagacacaagagaagaagcaagttcacctgcgcctgccccgaccagttcaagggcaagttctgcgagatcggcagcgacgactgctacgtgggcgacggctacagctacagaggcaagatgaacagaaccgtgaaccagcacgcctgcctgtactggaacagccacctgctgctgcaggagaactacaacatgttcatggaggacgccgagacccacggcatcggcgagcacaacttctgcagaaaccccgacgccgacgagaagccctggtgcttcatcaaggtgaccaacgacaaggtgaagtgggagtactgcgacgtgagcgcctgcagcgcccaggcctag

SEQ ID NO: 84854 - DNA, 1605 bp, synthetic construct
  misc_feature 1..1605: note = Description of Artificial Sequence: Synthetic coding sequence
  source 1..1605: mol_type = other DNA
atgagcctgctggagagcctggaccccgactggacccccgaccagtacgactacagctacgaggactacaaccaggaggagaacaccagcagcaccctgacccacgccgagaaccccgactggtactacaccgaggaccaggccgacccctgccagcccaacccctgcgagcacggcggcgactgcctggtgcacggcagcaccttcacctgcagctgcctggcccccttcagcggcaacaagtgccagaaggtgcagaacacctgcaaggacaacccctgcggcagaggccagtgcctgatcacccagagccccccctactacagatgcgtgtgcaagcacccctacaccggccccagctgcagccaggtggtgcccgtgtgcagacccaacccctgccagaacggcgccacctgcagcagacacaagagaagaagcaagttcacctgcgcctgccccgaccagttcaagggcaagttctgcgagatcggcagcgacgactgctacgtgggcgacggctacagctacagaggcaagatgaacagaaccgtgaaccagcacgcctgcctgtactggaacagccacctgctgctgcaggagaactacaacatgttcatggaggacgccgagacccacggcatcggcgagcacaacttctgcagaaaccccgacgccgacgagaagccctggtgcttcatcaaggtgaccaacgacaaggtgaagtgggagtactgcgacgtgagcgcctgcagcgcccaggacgtggcctaccccgaggagagccccaccgagcccagcaccaagctgcccggcttcgacagctgcggcaagaccgagatcgccgagagaaagatcaagagaatctacggcggcttcaagagcaccgccggcaagcacccctggcaggccagcctgcagagcagcctgcccctgaccatcagcatgccccagggccacttctgcggcggcgccctgatccacccctgctgggtgctgaccgccgcccactgcaccgacatcaagaccagacacctgaaggtggtgctgggcgaccaggacctgaagaaggaggagttccacgagcagagcttcagagtggagaagatcttcaagtacagccactacaacgagagagacgagatcccccacaacgacatcgccctgctgaagctgaagcccgtggacggccactgcgccctggagagcaagtacgtgaagaccgtgtgcctgcccgacggcagcttccccagcggcagcgagtgccacatcagcggctggggcgtgaccgagaccggcaagggcagcagacagctgctggacgccaaggtgaagctgatcgccaacaccctgtgcaacagcagacagctgtacgaccacatgatcgacgacagcatgatctgcgccggcaacctgcagaagcccggccaggacacctgccagggcgacagcggcggccccctgacctgcgagaaggacggcacctactacgtgtacggcatcgtgagctggggcctggagtgcggcaagagacccggcgtgtacacccaggtgaccaagttcctgaactggatcaaggccaccatcaagagcgagagcggcttctag

SEQ ID NO: 84855 - DNA, 1656 bp, synthetic construct
  misc_feature 1..1656: note = Description of Artificial Sequence: Synthetic coding sequence
  source 1..1656: mol_type = other DNA
atgctgcccctgctgctgctgcccctgctgtggggcggcagcctgcaggagaagcccgtgtacgagctgcaggtgcagaagagcgtgaccgtgcaggagggcctgtgcgtgctggtgccctgcagcttcagctacccctggagaagctggtacagcagcccccccctgtacgtgtactggttcagagacggcgagatcccctactacgccgaggtggtggccaccaacaaccccgacagaagagtgaagcccgagacccagggcagattcagactgctgggcgacgtgcagaagaagaactgcagcctgagcatcggcgacgccagaatggaggacaccggcagctacttcttcagagtggagagaggcagagacgtgaagtacagctaccagcagaacaagctgaacctggaggtgaccgccctgatcgagaagcccgacatccacttcctggagcccctggagagcggcagacccaccagactgagctgcagcctgcccggcagctgcgaggccggcccccccctgaccttcagctggaccggcaacgccctgagccccctggaccccgagaccaccagaagcagcgagctgaccctgacccccagacccgaggaccacggcaccaacctgacctgccagatgaagagacagggcgcccaggtgaccaccgagagaaccgtgcagctgaacgtgagctacgccccccagaccatcaccatcttcagaaacggcatcgccctggagatcctgcagaacaccagctacctgcccgtgctggagggccaggccctgagactgctgtgcgacgcccccagcaacccccccgcccacctgagctggttccagggcagccccgccctgaacgccacccccatcagcaacaccggcatcctggagctgagaagagtgagaagcgccgaggagggcggcttcacctgcagagcccagcaccccctgggcttcctgcagatcttcctgaacctgagcgtgtacagcctgccccagctgctgggccccagctgcagctgggaggccgagggcctgcactgcagatgcagcttcagagccagacccgcccccagcctgtgctggagactggaggagaagcccctggagggcaacagcagccagggcagcttcaaggtgaacagcagcagcgccggcccctgggccaacagcagcctgatcctgcacggcggcctgagcagcgacctgaaggtgagctgcaaggcctggaacatctacggcagccagagcggcagcgtgctgctgctgcagggcagaagcaacctgggcaccggcgtggtgcccgccgccctgggcggcgccggcgtgatggccctgctgtgcatctgcctgtgcctgatcttcttcctgatcgtgaaggccagaagaaagcaggccgccggcagacccgagaagatggacgacgaggaccccatcatgggcaccatcaccagcggcagcagaaagaagccctggcccgacagccccggcgaccaggccagcccccccggcgacgccccccccctggaggagcagaaggagctgcactacgccagcctgagcttcagcgagatgaagagcagagagcccaaggaccaggaggcccccagcaccaccgagtacagcgagatcaagaccagcaagtag

SEQ ID NO: 84856 - DNA, 558 bp, synthetic construct
  misc_feature 1..558: note = Description of Artificial Sequence: Synthetic coding sequence
  source 1..558: mol_type = other DNA
atgttcagagaggtgttcgccgacgaggaccccgccacctacgtgtgggacggcaactaccaccagccctgggagcccgccgccgccggcgccgtgggcgccggcgcctacagagaggtggaggccgaggaccccggcagactggccgtggaggccctggtgagaaccagaagatgcgtgtgcgtggcccagagatggggcggcaagagagaggtgatgtacaccgccttcaaggccctgggcgacagcgtggactacgtgcagttctgcagagtgtgcgacagcgacaccagactggaccccatggccctgctggagctggtgagagtgctggacgaggaccccagagtgggcgccgtgggcggcgacgtgagaatcctgaaccccctggacagctgggtgagcttcctgagcagcctgagatactgggtggccttcaacgtggagagagcctgccagagctacttccactgcgtgagctgcatcagcggccccctgggcaccccccccggccccgccgccacccagagaagacccagacccagctgcggcggctag

SEQ ID NO: 84857 - DNA, 645 bp, synthetic construct
  misc_feature 1..645: note = Description of Artificial Sequence: Synthetic coding sequence
  source 1..645: mol_type = other DNA
atgttcagagaggtgttcgccgacgaggaccccgccacctacgtgtgggacggcaactaccaccagccctgggagcccgccgccgccggcgccgtgggcgccggcgcctacagagaggtggaggccgaggaccccggcagactggccgtggaggccctggtgagaaccagaagatgcgtgtgcgtggcccagagatggggcggcaagagagaggtgatgtacaccgccttcaaggccctgggcgacagcgtggactacgtgcaggtgtgcgacagcgacaccagactggaccccatggccctgctggagctggtgagagtgctggacgaggaccccagagtgggcgccgtgggcggcgacgtgagaatcctgaaccccctggacagctgggtgagcttcctgagcagcctgagatactgggtggccttcaacgtggagagagcctgccagagctacttccactgcgtgagctgcatcagcggccccctggagagctgccccggccccagagagcacgccatgatgcccagcttcctggcccccgtgcaggtgcacctgcaggtgcccctgctgctgagagacgccctggtgctgcccgccgtggccgagcccgccgacaccctggtgcaggtggtgctgccctag

SEQ ID NO: 84858 - DNA, 1734 bp, synthetic construct
  misc_feature 1..1734: note = Description of Artificial Sequence: Synthetic coding sequence
  source 1..1734: mol_type = other DNA
atgagacaggacgcccccaagcccacccccgccgcctgcagatgcagcggcctggccagaagagtgctgaccatcgccttcgccctgctgatcctgggcctgatgacctgggcctacgccgccggcgtgcccctggccagcgacagatacggcctgctggccttcggcctgtacggcgccttcctgagcgcccacctggtggcccagagcctgttcgcctacctggagcacagaagagtggccgccgccgccagaggccccctggacgccgccaccgccagaagcgtggccctgaccatcagcgcctaccaggaggaccccgcctacctgagacagtgcctggccagcgccagagccctgctgtaccccagagccagactgagagtgctgatggtggtggacggcaacagagccgaggacctgtacatggtggacatgttcagagaggtgttcgccgacgaggaccccgccacctacgtgtgggacggcaactaccaccagccctgggagcccgccgccgccggcgccgtgggcgccggcgcctacagagaggtggaggccgaggaccccggcagactggccgtggaggccctggtgagaaccagaagatgcgtgtgcgtggcccagagatggggcggcaagagagaggtgatgtacaccgccttcaaggccctgggcgacagcgtggactacgtgcaggtgtgcgacagcgacaccagactggaccccatggccctgctggagctggtgagagtgctggacgaggaccccagagtgggcgccgtgggcggcgacgtgagaatcctgaaccccctggacagctgggtgagcttcctgagcagcctgagatactgggtggccttcaacgtggagagagcctgccagagctacttccactgcgtgagctgcatcagcggccccctgggcctgtacagaaacaacctgctgcagcagttcctggaggcctggtacaaccagaagttcctgggcacccactgcaccttcggcgacgacagacacctgaccaacagaatgctgagcatgggctacgccaccaagtacaccagcagaagcagatgctacagcgagacccccagcagcttcctgagatggctgagccagcagaccagatggagcaagagctacttcagagagtggctgtacaacgccctgtggtggcacagacaccacgcctggatgacctacgaggccgtggtgagcggcctgttccccttcttcgtggccgccaccgtgctgagactgttctacgccggcagaccctgggccctgctgtgggtgctgctgtgcgtgcagggcgtggccctggccaaggccgccttcgccgcctggctgagaggctgcctgagaatggtgctgctgagcctgtacgcccccctgtacatgtgcggcctgctgcccgccaagttcctggccctggtgaccatgaaccagagcggctggggcaccagcggcagaagaaagctggccgccaactacgtgcccctgctgcccctggccctgtgggccctgctgctgctgggcggcctggtgagaagcgtggcccacgaggccagagccgactggagcggccccagcagagccgccgaggcctaccacctggccgccggcgccggcgcctacgtgggctactgggtggccatgctgaccctgtactgggtgggcgtgagaagactgtgcagaagaagaaccggcggctacagagtgcaggtgtag

SEQ ID NO: 84859 - DNA, 1659 bp, synthetic construct
  misc_feature 1..1659: note = Description of Artificial Sequence: Synthetic coding sequence
  source 1..1659: mol_type = other DNA
atgcactgcgagagattcctgtgcatcctgagaatcatcggcaccaccctgttcggcgtgagcctgctgctgggcatcaccgccgcctacatcgtgggctaccagttcatccagaccgacaactactacttcagcttcggcctgtacggcgccttcctggccagccacctgatcatccagagcctgttcgccttcctggagcacagaaagatgaagaagagcctggagacccccatcaagctgaacaagaccgtggccctgtgcatcgccgcctaccaggaggaccccgactacctgagaaagtgcctgcagagcgtgaagagactgacctaccccggcatcaaggtggtgatggtgatcgacggcaacagcgaggacgacctgtacatgatggacatcttcagcgaggtgatgggcagagacaagagcgccacctacatctggaagaacaacttccacgagaagggccccggcgagaccgacgagagccacaaggagagcagccagcacgtgacccagctggtgctgagcaacaagagcatctgcatcatgcagaagtggggcggcaagagagaggtgatgtacaccgccttcagagccctgggcagaagcgtggactacgtgcaggtgtgcgacagcgacaccatgctggaccccgccagcagcgtggagatggtgaaggtgctggaggaggaccccatggtgggcggcgtgggcggcgacgtgcagatcctgaacaagtacgacagctggatcagcttcctgagcagcgtgagatactggatggccttcaacatcgagagagcctgccagagctacttcggctgcgtgcagtgcatcagcggccccctgggcatgtacagaaacagcctgctgcacgagttcgtggaggactggtacaaccaggagttcatgggcaaccagtgcagcttcggcgacgacagacacctgaccaacagagtgctgagcctgggctacgccaccaagtacaccgccagaagcaagtgcctgaccgagacccccatcgagtacctgagatggctgaaccagcagaccagatggagcaagagctacttcagagagtggctgtacaacgccatgtggttccacaagcaccacctgtggatgacctacgaggccatcatcaccggcttcttccccttcttcctgatcgccaccgtgatccagctgttctacagaggcaagatctggaacatcctgctgttcctgctgaccgtgcagctggtgggcctgatcaagagcagcttcgccagctgcctgagaggcaacatcgtgatggtgttcatgagcctgtacagcgtgctgtacatgagcagcctgctgcccgccaagatgttcgccatcgccaccatcaacaaggccggctggggcaccagcggcagaaagaccatcgtggtgaacttcatcggcctgatccccgtgagcgtgtggttcaccatcctgctgggcggcgtgatcttcaccatctacaaggagagcaagagacccttcagcgagagcaagcagaccgtgctgatcgtgggcaccctgctgtacgcctgctactgggtgatgctgctgaccctgtacgtggtgctgatcaacaagtgcggcagaagaaagaagggccagcagtacgacatggtgctggacgtgtag

SEQ ID NO: 84860 - DNA, 951 bp, synthetic construct
  misc_feature 1..951: note = Description of Artificial Sequence: Synthetic coding sequence
  source 1..951: mol_type = other DNA
atgcactgcgagagattcctgtgcatcctgagaatcatcggcaccaccctgttcggcgtgagcctgctgctgggcatcaccgccgcctacatcgtgggctaccagttcatccagaccgacaactactacttcagcttcggcctgtacggcgccttcctggccagccacctgatcatccagagcctgttcgccttcctggagcacagaaagatgaagaagagcctggagacccccatcaagctgaacaagaccgtggccctgtgcatcgccgcctaccaggaggaccccgactacctgagaaagtgcctgcagagcgtgaagagactgacctaccccggcatcaaggtggtgatggtgatcgacggcaacagcgaggacgacctgtacatgatggacatcttcagcgaggtgatgggcagagacaagagcgccacctacatctggaagaacaacttccacgagaagggccccggcgagaccgacgagagccacaaggagagcagccagcacgtgacccagctggtgctgagcaacaagagcatctgcatcatgcagaagtggggcggcaagagagaggtgatgtacaccgccttcagagccctgggcagaagcgtggactacgtgcaggtgtgcgacagcgacaccatgctggaccccgccagcagcgtggagatggtgaaggtgctggaggaggaccccatggtgggcggcgtgggcggcgacgtgcagatcctgaacaagtacgacagctggatcagcttcctgagcagcgtgagatactggatggccttcaacatcgagagagcctgccagagctacttcggctgcgtgcagtgcatcagcggccccctgggcatgtacagaaacagcctgctgcacgtgctgaccttcgccgtgacccacaacaccctggtgcccctgggcgccgtgcagtactgcggcatcagatag

SEQ ID NO: 84861 - DNA, 1389 bp, synthetic construct
  misc_feature 1..1389: note = Description of Artificial Sequence: Synthetic coding sequence
  source 1..1389: mol_type = other DNA
atggcccaggtgagcatcaacaacgactacagcgagtgggacctgagcaccgacgccggcgagagagccagactgctgcagagcccctgcgtggacaccgcccccaagagcgagtgggaggccagccccggcggcctggacagaggcaccaccagcaccctgggcgccatcttcatcgtggtgaacgcctgcctgggcgccggcctgctgaacttccccgccgccttcagcaccgccggcggcgtggccgccggcatcgccctgcagatgggcatgctggtgttcatcatcagcggcctggtgatcctggcctactgcagccaggccagcaacgagagaacctaccaggaggtggtgtgggccgtgtgcggcaagctgaccggcgtgctgtgcgaggtggccatcgccgtgtacaccttcggcacctgcatcgccttcctgatcatcatcggcgaccagcaggacaagatcatcgccgtgatggccaaggagcccgagggcgccagcggcccctggtacaccgacagaaagttcaccatcagcctgaccgccttcctgttcatcctgcccctgagcatccccagagagatcggcttccagaagtacgccagcttcctgagcgtggtgggcacctggtacgtgaccgccatcgtgatcatcaagtacatctggcccgacaaggagatgacccccggcaacatcctgaccagacccgccagctggatggccgtgttcaacgccatgcccaccatctgcttcggcttccagtgccacgtgagcagcgtgcccgtgttcaacagcatgcagcagcccgaggtgaagacctggggcggcgtggtgaccgccgccatggtgatcgccctggccgtgtacatgggcaccggcatctgcggcttcctgaccttcggcgccgccgtggaccccgacgtgctgctgagctaccccagcgaggacatggccgtggccgtggccagagccttcatcatcctgagcgtgctgaccagctaccccatcctgcacttctgcggcagagccgtggtggagggcctgtggctgagataccagggcgtgcccgtggaggaggacgtgggcagagagagaagaagaagagtgctgcagaccctggtgtggttcctgctgaccctgctgctggccctgttcatccccgacatcggcaaggtgatcagcgtgatcggcggcctggccgcctgcttcatcttcgtgttccccggcctgtgcctgatccaggccaagctgagcgagatggaggaggtgaagcccgccagctggtgggtgctggtgagctacggcgtgctgctggtgaccctgggcgccttcatcttcggccagaccaccgccaacgccatcttcgtggacctgctggcctag

SEQ ID NO: 84862 - DNA, 1662 bp, synthetic construct
  misc_feature 1..1662: note = Description of Artificial Sequence: Synthetic coding sequence
  source 1..1662: mol_type = other DNA
atgcccgtgcagctgaccaccgccctgagagtggtgggcaccagcctgttcgccctggccgtgctgggcggcatcctggccgcctacgtgaccggctaccagttcatccacaccgagaagcactacctgagcttcggcctgtacggcgccatcctgggcctgcacctgctgatccagagcctgttcgccttcctggagcacagaagaatgagaagagccggccaggccctgaagctgcccagccccagaagaggcagcgtggccctgtgcatcgccgcctaccaggaggaccccgactacctgagaaagtgcctgagaagcgcccagagaatcagcttccccgacctgaaggtggtgatggtggtggacggcaacagacaggaggacgcctacatgctggacatcttccacgaggtgctgggcggcaccgagcaggccggcttcttcgtgtggagaagcaacttccacgaggccggcgagggcgagaccgaggccagcctgcaggagggcatggacagagtgagagacgtggtgagagccagcaccttcagctgcatcatgcagaagtggggcggcaagagagaggtgatgtacaccgccttcaaggccctgggcgacagcgtggactacatccaggtgtgcgacagcgacaccgtgctggaccccgcctgcaccatcgagatgctgagagtgctggaggaggacccccaggtgggcggcgtgggcggcgacgtgcagatcctgaacaagtacgacagctggatcagcttcctgagcagcgtgagatactggatggccttcaacgtggagagagcctgccagagctacttcggctgcgtgcagtgcatcagcggccccctgggcatgtacagaaacagcctgctgcagcagttcctggaggactggtaccaccagaagttcctgggcagcaagtgcagcttcggcgacgacagacacctgaccaacagagtgctgagcctgggctacagaaccaagtacaccgccagaagcaagtgcctgaccgagacccccaccaagtacctgagatggctgaaccagcagaccagatggagcaagagctacttcagagagtggctgtacaacagcctgtggttccacaagcaccacctgtggatgacctacgagagcgtggtgaccggcttcttccccttcttcctgatcgccaccgtgatccagctgttctacagaggcagaatctggaacatcctgctgttcctgctgaccgtgcagctggtgggcatcatcaaggccacctacgcctgcttcctgagaggcaacgccgagatgatcttcatgagcctgtacagcctgctgtacatgagcagcctgctgcccgccaagatcttcgccatcgccaccatcaacaagagcggctggggcaccagcggcagaaagaccatcgtggtgaacttcatcggcctgatccccgtgagcatctgggtggccgtgctgctgggcggcctggcctacaccgcctactgccaggacctgttcagcgagaccgagctggccttcctggtgagcggcgccatcctgtacggctgctactgggtggccctgctgatgctgtacctggccatcatcgccagaagatgcggcaagaagcccgagcagtacagcctggccttcgccgaggtgtag

SEQ ID NO: 84863 - DNA, 1308 bp, synthetic construct
  misc_feature 1..1308: note = Description of Artificial Sequence: Synthetic coding sequence
  source 1..1308: mol_type = other DNA
atggccgcccacctgctgcccatctgcgccctgttcctgaccctgctggacatggcccagggcttcagaggccccctgctgcccaacagacccttcaccaccgtgtggaacgccaacacccagtggtgcctggagagacacggcgtggacgtggacgtgagcgtgttcgacgtggtggccaaccccggccagaccttcagaggccccgacatgaccatcttctacagcagccagctgggcacctacccctactacacccccaccggcgagcccgtgttcggcggcctgccccagaacgccagcctgatcgcccacctggccagaaccttccaggacatcctggccgccatccccgcccccgacttcagcggcctggccgtgatcgactgggaggcctggagacccagatgggccttcaactgggacaccaaggacatctacagacagagaagcagagccctggtgcaggcccagcaccccgactggcccgccccccaggtggaggccgtggcccaggaccagttccagggcgccgccagagcctggatggccggcaccctgcagctgggcagagccctgagacccagaggcctgtggggcttctacggcttccccgactgctacaactacgacttcctgagccccaactacaccggccagtgccccagcggcatcagagcccagaacgaccagctgggctggctgtggggccagagcagagccctgtaccccagcatctacatgcccgccgtgctggagggcaccggcaagagccagatgtacgtgcagcacagagtggccgaggccttcagagtggccgtggccgccggcgaccccaacctgcccgtgctgccctacgtgcagatcttctacgacaccaccaaccacttcctgcccctggacgagctggagcacagcctgggcgagagcgccgcccagggcgccgccggcgtggtgctgtgggtgagctgggagaacaccagaaccaaggagagctgccaggccatcaaggagtacatggacaccaccctgggccccttcatcctgaacgtgaccagcggcgccctgctgtgcagccaggccctgtgcagcggccacggcagatgcgtgagaagaaccagccaccccaaggccctgctgctgctgaaccccgccagcttcagcatccagctgacccccggcggcggccccctgagcctgagaggcgccctgagcctggaggaccaggcccagatggccgtggagttcaagtgcagatgctaccccggctggcaggccccctggtgcgagagaaagagcatgtggtag

SEQ ID NO: 84864 - DNA, 1308 bp, synthetic construct; identical to SEQ ID NO: 84863
  misc_feature 1..1308: note = Description of Artificial Sequence: Synthetic coding sequence
  source 1..1308: mol_type = other DNA

SEQ ID NO: 84865 - DNA, 1218 bp, synthetic construct
  misc_feature 1..1218: note = Description of Artificial Sequence: Synthetic coding sequence
  source 1..1218: mol_type = other DNA
atggccgcccacctgctgcccatctgcgccctgttcctgaccctgctggacatggcccagggcttcagaggccccctgctgcccaacagacccttcaccaccgtgtggaacgccaacacccagtggtgcctggagagacacggcgtggacgtggacgtgagcgtgttcgacgtggtggccaaccccggccagaccttcagaggccccgacatgaccatcttctacagcagccagctgggcacctacccctactacacccccaccggcgagcccgtgttcggcggcctgccccagaacgccagcctgatcgcccacctggccagaaccttccaggacatcctggccgccatccccgcccccgacttcagcggcctggccgtgatcgactgggaggcctggagacccagatgggccttcaactgggacaccaaggacatctacagacagagaagcagagccctggtgcaggcccagcaccccgactggcccgccccccaggtggaggccgtggcccaggaccagttccagggcgccgccagagcctggatggccggcaccctgcagctgggcagagccctgagacccagaggcctgtggggcttctacggcttccccgactgctacaactacgacttcctgagccccaactacaccggccagtgccccagcggcatcagagcccagaacgaccagctgggctggctgtggggccagagcagagccctgtaccccagcatctacatgcccgccgtgctggagggcaccggcaagagccagatgtacgtgcagcacagagtggccgaggccttcagagtggccgtggccgccggcgaccccaacctgcccgtgctgccctacgtgcagatcttctacgacaccaccaaccacttcctgcccctggagagctgccaggccatcaaggagtacatggacaccaccctgggccccttcatcctgaacgtgaccagcggcgccctgctgtgcagccaggccctgtgcagcggccacggcagatgcgtgagaagaaccagccaccccaaggccctgctgctgctgaaccccgccagcttcagcatccagctgacccccggcggcggccccctgagcctgagaggcgccctgagcctggaggaccaggcccagatggccgtggagttcaagtgcagatgctaccccggctggcaggccccctggtgcgagagaaagagcatgtggtag

SEQ ID NO: 84866 - DNA, 1308 bp, synthetic construct; identical to SEQ ID NO: 84863
  misc_feature 1..1308: note = Description of Artificial Sequence: Synthetic coding sequence
  source 1..1308: mol_type = other DNA

SEQ ID NO: 84867 - DNA, 312 bp, synthetic construct
  misc_feature 1..312: note = Description of Artificial Sequence: Synthetic coding sequence
  source 1..312: mol_type = other DNA
atggccgcccacctgctgcccatctgcgccctgttcctgaccctgctggacatggcccagggcttcagaggccccctgctgcccaacagacccttcaccaccgtgtggaacgccaacacccagtggtgcctggagagacacggcgtggacgtggacgtgagcgtgttcgacgtggtggccaaccccggccagaccttcagaggccccgacatgaccatcttctacagcagccagctgggcacctacccctactacacccccaccggcgagcccgtgttcggcggcctgccccagaacgccagcctgatctag

SEQ ID NO: 84868 - DNA, 531 bp, synthetic construct
  misc_feature 1..531: note = Description of Artificial Sequence: Synthetic coding sequence
  source 1..531: mol_type = other DNA
atgtacgtgcagcacagagtggccgaggccttcagagtggccgtggccgccggcgaccccaacctgcccgtgctgccctacgtgcagatcttctacgacaccaccaaccacttcctgcccctggacgagctggagcacagcctgggcgagagcgccgcccagggcgccgccggcgtggtgctgtgggtgagctgggagaacaccagaaccaaggagagctgccaggccatcaaggagtacatggacaccaccctgggccccttcatcctgaacgtgaccagcggcgccctgctgtgcagccaggccctgtgcagcggccacggcagatgcgtgagaagaaccagccaccccaaggccctgctgctgctgaaccccgccagcttcagcatccagctgacccccggcggcggccccctgagcctgagaggcgccctgagcctggaggaccaggcccagatggccgtggagttcaagtgcagatgctaccccggctggcaggccccctggtgcgagagaaagagcatgtggtag

SEQ ID NO: 84869 - DNA, 210 bp, synthetic construct
  misc_feature 1..210: note = Description of Artificial Sequence: Synthetic coding sequence
  source 1..210: mol_type = other DNA
atggccgcccacctgctgcccatctgcgccctgttcctgaccctgctggacatggcccagggcttcagaggccccctgctgcccaacagacccttcaccaccgtgtggaacgccaacacccagtggtgcctggagagacacggcgtggacgtggacgtgagcgtgttcgacgtggtggccaaccccggccagaccttcagaggcccctag

SEQ ID NO: 84870 - DNA, 762 bp, synthetic construct
  misc_feature 1..762: note = Description of Artificial Sequence: Synthetic coding sequence
  source 1..762: mol_type = other DNA
atggccggcaccctgcagctgggcagagccctgagacccagaggcctgtggggcttctacggcttccccgactgctacaactacgacttcctgagccccaactacaccggccagtgccccagcggcatcagagcccagaacgaccagctgggctggctgtggggccagagcagagccctgtaccccagcatctacatgcccgccgtgctggagggcaccggcaagagccagatgtacgtgcagcacagagtggccgaggccttcagagtggccgtggccgccggcgaccccaacctgcccgtgctgccctacgtgcagatcttctacgacaccaccaaccacttcctgcccctggacgagctggagcacagcctgggcgagagcgccgcccagggcgccgccggcgtggtgctgtgggtgagctgggagaacaccagaaccaaggagagctgccaggccatcaaggagtacatggacaccaccctgggccccttcatcctgaacgtgaccagcggcgccctgctgtgcagccaggccctgtgcagcggccacggcagatgcgtgagaagaaccagccaccccaaggccctgctgctgctgaaccccgccagcttcagcatccagctgacccccggcggcggccccctgagcctgagaggcgccctgagcctggaggaccaggcccagatggccgtggagttcaagtgcagatgctaccccggctggcaggccccctggtgcgagagaaagagcatgtggtag

SEQ ID NO: 84871 - DNA, 1422 bp, synthetic construct
  misc_feature 1..1422: note = Description of Artificial Sequence: Synthetic coding sequence
  source 1..1422: mol_type = other DNA
atgagagccggccccggccccaccgtgaccctggccctggtgctggccgtgagctgggccatggagctgaagcccaccgccccccccatcttcaccggcagacccttcgtggtggcctgggacgtgcccacccaggactgcggccccagactgaaggtgcccctggacctgaacgccttcgacgtgcaggccagccccaacgagggcttcgtgaaccagaacatcaccatcttctacagagacagactgggcctgtaccccagattcgacagcgccggcagaagcgtgcacggcggcgtgccccagaacgtgagcctgtgggcccacagaaagatgctgcagaagagagtggagcactacatcagaacccaggagagcgccggcctggccgtgatcgactgggaggactggagacccgtgtgggtgagaaactggcaggacaaggacgtgtacagaagactgagcagacagctggtggccagcagacaccccgactggccccccgacagaatcgtgaagcaggcccagtacgagttcgagttcgccgcccagcagttcatgctggagaccctgagatacgtgaaggccgtgagacccagacacctgtggggcttctacctgttccccgactgctacaaccacgactacgtgcagaactgggagagctacaccggcagatgccccgacgtggaggtggccagaaacgaccagctggcctggctgtgggccgagagcaccgccctgttccccagcgtgtacctggacgagaccctggccagcagcagacacggcagaaacttcgtgagcttcagagtgcaggaggccctgagagtggccagaacccaccacgccaaccacgccctgcccgtgtacgtgttcaccagacccacctacagcagaagactgaccggcctgagcgagatggacctgatcagcaccatcggcgagagcgccgccctgggcgccgccggcgtgatcctgtggggcgacgccggctacaccaccagcaccgagacctgccagtacctgaaggactacctgaccagactgctggtgccctacgtggtgaacgtgagctgggccacccagtactgcagcagagcccagtgccacggccacggcagatgcgtgagaagaaaccccagcgccagcaccttcctgcacctgagcaccaacagcttcagactggtgcccggccacgcccccggcgagccccagctgagacccgtgggcgagctgagctgggccgacatcgaccacctgcagacccacttcagatgccagtgctacctgggctggagcggcgagcagtgccagtgggaccacagacaggccgccggcggcgccagcgaggcctgggccggcagccacctgaccagcctgctggccctggccgccctggccttcacctggaccctgtag

SEQ ID NO: 84872 - DNA, 1422 bp, synthetic construct; identical to SEQ ID NO: 84871
  misc_feature 1..1422: note = Description of Artificial Sequence: Synthetic coding sequence
  source 1..1422: mol_type = other DNA

SEQ ID NO: 84873 - DNA, 147 bp, synthetic construct
  misc_feature 1..147: note = Description of Artificial Sequence: Synthetic coding sequence
  source 1..147: mol_type = other DNA
atgagagccggccccggccccaccgtgaccctggccctggtgctggccgtgagctgggccatggagctgaagcccaccgccccccccatcttcaccggcagacccttcgtggtggcctgggacgtgcccacccaggactgcggctag

SEQ ID NO: 84874 - DNA, 354 bp, synthetic construct
  misc_feature 1..354: note = Description of Artificial Sequence: Synthetic coding sequence
  source 1..354: mol_type = other DNA
atgagagccggccccggccccaccgtgaccctggccctggtgctggccgtgagctgggccatggagctgaagcccaccgccccccccatcttcaccggcagacccttcgtggtggcctgggacgtgcccacccaggactgcggccccagactgaaggtgcccctggacctgaacgccttcgacgtgcaggccagccccaacgagggcttcgtgaaccagaacatcaccatcttctacagagacagactgggcctgtaccccagattcgacagcgccggcagaagcgtgcacggcggcgtgccccagaacgtgagcctgtgggcccacagaaagatgctgcagaagagagtgtag

SEQ ID NO: 84875 - DNA, 246 bp, synthetic construct
  misc_feature 1..246: note = Description of Artificial Sequence: Synthetic coding sequence
  source 1..246: mol_type = other DNA
atgagagccggccccggccccaccgtgaccctggccctggtgctggccgtgagctgggccatggagctgaagcccaccgccccccccatcttcaccggcagacccttcgtggtggcctgggacgtgcccacccaggactgcggccccagactgaaggtgcccctggacctgaacgccttcgacgtgcaggccagccccaacgagggcttcgtgaaccagaacatcaccatcttctacagagactag

SEQ ID NO: 84876 - DNA, 231 bp, synthetic construct
  misc_feature 1..231: note = Description of Artificial Sequence: Synthetic coding sequence
  source 1..231: mol_type = other DNA
atgagagccggccccggccccaccgtgaccctggccctggtgctggccgtgagctgggccatggagctgaagcccaccgccccccccatcttcaccggcagacccttcgtggtggcctgggacgtgcccacccaggactgcggccccagactgaaggtgcccctggacctgaacgccttcgacgtgcaggccagccccaacgagggcttcgtgaaccagaacatcacctag

SEQ ID NO: 84877 - DNA, 1422 bp, synthetic construct; identical to SEQ ID NO: 84871
  misc_feature 1..1422: note = Description of Artificial Sequence: Synthetic coding sequence
  source 1..1422: mol_type = other DNA

SEQ ID NO: 84878 - DNA, 1422 bp, synthetic construct; identical to SEQ ID NO: 84871
  misc_feature 1..1422: note = Description of Artificial Sequence: Synthetic coding sequence
  source 1..1422: mol_type = other DNA

SEQ ID NO: 84879 - DNA, 366 bp, synthetic construct
  misc_feature 1..366: note = Description of Artificial Sequence: Synthetic coding sequence
  source 1..366: mol_type = other DNA
atgagagccggccccggccccaccgtgaccctggccctggtgctggccgtgagctgggccatggagctgaagcccaccgccccccccatcttcaccggcagacccttcgtggtggcctgggacgtgcccacccaggactgcggccccagactgaaggtgcccctggacctgaacgccttcgacgtgcaggccagccccaacgagggcttcgtgaaccagaacatcaccatcttctacagagacagactgggcctgtaccccagattcgacagcgccggcagaagcgtgcacggcggcgtgccccagaacgtgagcctgtgggcccacagaaagatgctgcagaagagagtggagcactacatctag

SEQ ID NO: 84880 - DNA, 1254 bp, synthetic construct
  misc_feature 1..1254: note = Description of Artificial Sequence: Synthetic coding sequence
  source 1..1254: mol_type = other DNA
atgaccacccagctgggccccgccctggtgctgggcgtggccctgtgcctgggctgcggccagcccctgccccaggtgcccgagagacccttcagcgtgctgtggaacgtgcccagcgcccactgcgaggccagattcggcgtgcacctgcccctgaacgccctgggcatcatcgccaacagaggccagcacttccacggccagaacatgaccatcttctacaagaaccagctgggcctgtacccctacttcggccccagaggcaccgcccacaacggcggcatcccccaggccctgcccctggacagacacctggccctggccgcctaccagatccaccacagcctgagacccggcttcgccggccccgccgtgctggactgggaggagtggtgccccctgtgggccggcaactggggcagaagaagagcctaccaggccgccagctgggcctgggcccagcaggtgttccccgacctggacccccaggagcagctgtacaaggcctacaccggcttcgagcaggccgccagagccctgatggaggacaccctgagagtggcccaggccctgagaccccacggcctgtggggcttctaccactaccccgcctgcggcaacggctggcacagcatggccagcaactacaccggcagatgccacgccgccaccctggccagaaacacccagctgcactggctgtgggccgccagcagcgccctgttccccagcatctacctgccccccagactgccccccgcccaccaccaggccttcgtgagacacagactggaggaggccttcagagtggccctggtgggccacagacaccccctgcccgtgctggcctacgtgagactgacccacagaagaagcggcagattcctgagccaggacgacctggtgcagagcatcggcgtgagcgccgccctgggcgccgccggcgtggtgctgtggggcgacctgagcctgagcagcagcgaggaggagtgctggcacctgcacgactacctggtggacaccctgggcccctacgtgatcaacgtgaccagagccgccatggcctgcagccaccagagatgccacggccacggcagatgcgccagaagagaccccggccagatggaggccttcctgcacctgtggcccgacggcagcctgggcgactggaagagcttcagctgccactgctactggggctgggccggccccacctgccaggagcccagacccggccccaaggaggccgtgtag

SEQ ID NO: 84881 - DNA, 1164 bp, synthetic construct
  misc_feature 1..1164: note = Description of Artificial Sequence: Synthetic coding sequence
  source 1..1164: mol_type = other DNA
atgaccacccagctgggccccgccctggtgctgggcgtggccctgtgcctgggctgcggccagcccctgccccaggtgcccgagagacccttcagcgtgctgtggaacgtgcccagcgcccactgcgaggccagattcggcgtgcacctgcccctgaacgccctgggcatcatcgccaacagaggccagcacttccacggccagaacatgaccatcttctacaagaaccagctgggcctgtacccctacttcggccccagaggcaccgcccacaacggcggcatcccccaggccctgcccctggacagacacctggccctggccgcctaccagatccaccacagcctgagacccggcttcgccggccccgccgtgctggactgggaggagtggtgccccctgtgggccggcaactggggcagaagaagagcctaccaggccgccagctgggcctgggcccagcaggtgttccccgacctggacccccaggagcagctgtacaaggcctacaccggcttcgagcaggccgccagagccctgatggaggacaccctgagagtggcccaggccctgagaccccacggcctgtggggcttctaccactaccccgcctgcggcaacggctggcacagcatggccagcaactacaccggcagatgccacgccgccaccctggccagaaacacccagctgcactggctgtgggccgccagcagcgccctgttccccagcatctacctgccccccagactgccccccgcccaccaccaggccttcgtgagacacagactggaggaggccttcagagtggccctggtgggccacagacaccccctgcccgtgctggcctacgtgagactgacccacagaagaagcggcagattcctgagccaggaggagtgctggcacctgcacgactacctggtggacaccctgggcccctacgtgatcaacgtgaccagagccgccatggcctgcagccaccagagatgccacggccacggcagatgcgccagaagagaccccggccagatggaggccttcctgcacctgtggcccgacggcagcctgggcgactggaagagcttcagctgccactgctactggggctgggccggccccacctgccaggagcccagacccggccccaaggaggccgtgtag

SEQ ID NO: 84882 - DNA, 507 bp, synthetic construct
  misc_feature 1..507: note = Description of Artificial Sequence: Synthetic coding sequence
  source 1..507: mol_type = other DNA
atgctgccccccgcccaccaccaggccttcgtgagacacagactggaggaggccttcagagtggccctggtgggccacagacaccccctgcccgtgctggcctacgtgagactgacccacagaagaagcggcagattcctgagccaggacgacctggtgcagagcatcggcgtgagcgccgccctgggcgccgccggcgtggtgctgtggggcgacctgagcctgagcagcagcgaggaggagtgctggcacctgcacgactacctggtggacaccctgggcccctacgtgatcaacgtgaccagagccgccatggcctgcagccaccagagatgccacggccacggcagatgcgccagaagagaccccggccagatggaggccttcctgcacctgtggcccgacggcagcctgggcgactggaagagcttcagctgccactgctactggggctgggccggccccacctgccaggagcccagacccggccccaaggaggccgtgtag

SEQ ID NO: 84883 - DNA, 483 bp, synthetic construct
  misc_feature 1..483: note = Description of Artificial Sequence: Synthetic coding sequence
  source 1..483: mol_type = other DNA
atgaccacccagctgggccccgccctggtgctgggcgtggccctgtgcctgggctgcggccagcccctgccccaggtgcccgagagacccttcagcgtgctgtggaacgtgcccagcgcccactgcgaggccagattcggcgtgcacctgcccctgaacgccctgggcatcatcgccaacagaggccagcacttccacggccagaacatgaccatcttctacaagaaccagctgggcctgtacccctacttcggccccagaggcaccgcccacaacggcggcatcccccaggccctgcccctggacagacacctggccctggccgcctaccagatccaccacagcctgagacccggcttcgccggccccgccgtgctggactgggaggagtggtgccccctgtgggccggcaactggggcagaagaagagcctaccaggccgccagctgggcctgggcccagcaggtgttccccgacctgtag

SEQ ID NO: 84884 - DNA, 1164 bp, synthetic construct; identical to SEQ ID NO: 84881
  misc_feature 1..1164: note = Description of Artificial Sequence: Synthetic coding sequence
  source 1..1164: mol_type = other DNA

SEQ ID NO: 84885 - DNA, 417 bp, synthetic construct
  misc_feature 1..417: note = Description of Artificial Sequence: Synthetic coding sequence
  source 1..417: mol_type = other DNA
atgctgccccccgcccaccaccaggccttcgtgagacacagactggaggaggccttcagagtggccctggtgggccacagacaccccctgcccgtgctggcctacgtgagactgacccacagaagaagcggcagattcctgagccaggaggagtgctggcacctgcacgactacctggtggacaccctgggcccctacgtgatcaacgtgaccagagccgccatggcctgcagccaccagagatgccacggccacggcagatgcgccagaagagaccccggccagatggaggccttcctgcacctgtggcccgacggcagcctgggcgactggaagagcttcagctgccactgctactggggctgggccggccccacctgccaggagcccagacccggccccaaggaggccgtgtag

SEQ ID NO: 84886 - DNA, 1518 bp, synthetic construct
  misc_feature 1..1518: note = Description of Artificial Sequence: Synthetic coding sequence
  source 1..1518: mol_type = other DNA
atgagcagcgtgcagcagcagccccccccccccagaagagtgaccaacgtgggcagcctgctgctgaccccccaggagaacgagagcctgttcaccttcctgggcaagaagtgcgtgaccatgagcagcgccgtggtgcagctgtacgccgccgacagaaactgcatgtggagcaagaagtgcagcggcgtggcctgcctggtgaaggacaacccccagagaagctacttcctgagaatcttcgacatcaaggacggcaagctgctgtgggagcaggagctgtacaacaacttcgtgtacaacagccccagaggctacttccacaccttcgccggcgacacctgccaggtggccctgaacttcgccaacgaggaggaggccaagaagttcagaaaggccgtgaccgacctgctgggcagaagacagagaaagagcgagaagagaagagacccccccaacggccccaacctgcccatggccaccgtggacatcaagaaccccgagatcaccaccaacagattctacggcccccaggtgaacaacatcagccacaccaaggagaagaagaagggcaaggccaagaagaagagactgaccaaggccgacatcggcacccccagcaacttccagcacatcggccacgtgggctgggaccccaacaccggcttcgacctgaacaacctggaccccgagctgaagaacctgttcgacatgtgcggcatcagcgaggcccagctgaaggacagagagaccagcaaggtgatctacgacttcatcgagaagaccggcggcgtggaggccgtgaagaacgagctgagaagacaggccccccccccccccccccccagcagaggcggccccccccccccccccccccccccccacaacagcggccccccccccccccccgccagaggcagaggcgcccccccccccccccccagcagagcccccaccgccgccccccccccccccccccccagcagacccagcgtggccgtgcccccccccccccccaacagaatgtaccccccccccccccccgccctgcccagcagcgcccccagcggcccccccccccccccccccagcgtgctgggcgtgggccccgtggcccccccccccccccccccccccccccccccccccggccccccccccccccccggcctgcccagcgacggcgaccaccaggtgcccaccaccgccggcaacaaggccgccctgctggaccagatcagagagggcgcccagctgaagaaggtggagcagaacagcagacccgtgagctgcagcggcagagacgccctgctggaccagatcagacagggcatccagctgaagagcgtggccgacggccaggagagcaccccccccacccccgcccccaccagcggcatcgtgggcgccctgatggaggtgatgcagaagagaagcaaggccatccacagcagcgacgaggacgaggacgaggacgacgaggaggacttcgaggacgacgacgagtgggaggactag

SEQ ID NO: 84887 - DNA, 1446 bp, synthetic construct
  misc_feature 1..1446: note = Description of Artificial Sequence: Synthetic coding sequence
  source 1..1446: mol_type = other DNA
atgaaggtgctgagcgagggccagctgaagctgtgcgtggtgcagcccgtgcacctgaccagctggctgctgatcttcttcatcctgaagagcatcagctgcctgaagcccgccagactgcccatctaccagagaaagcccttcatcgccgcctggaacgcccccaccgaccagtgcctgatcaagtacaacctgagactgaacctgaagatgttccccgtgatcggcagccccctggccaaggccagaggccagaacgtgaccatcttctacgtgaacagactgggctactacccctggtacaccagccagggcgtgcccatcaacggcggcctgccccagaacatcagcctgcaggtgcacctggagaaggccgaccaggacatcaactactacatccccgccgaggacttcagcggcctggccgtgatcgactgggagtactggagaccccagtgggccagaaactggaacagcaaggacgtgtacagacagaagagcagaaagctgatcagcgacatgggcaagaacgtgagcgccaccgacatcgagtacctggccaaggtgaccttcgaggagagcgccaaggccttcatgaaggagaccatcaagctgggcatcaagagcagacccaagggcctgtggggctactacctgtaccccgactgccacaactacaacgtgtacgcccccaactacagcggcagctgccccgaggacgaggtgctgagaaacaacgagctgagctggctgtggaacagcagcgccgccctgtaccccagcatcggcgtgtggaagagcctgggcgacagcgagaacatcctgagattcagcaagttcagagtgcacgagagcatgagaatcagcaccatgaccagccacgactacgccctgcccgtgttcgtgtacaccagactgggctacagagacgagcccctgttcttcctgagcaagcaggacctggtgagcaccatcggcgagagcgccgccctgggcgccgccggcatcgtgatctggggcgacatgaacctgaccgccagcaaggccaactgcaccaaggtgaagcagttcgtgagcagcgacctgggcagctacatcgccaacgtgaccagagccgccgaggtgtgcagcctgcacctgtgcagaaacaacggcagatgcatcagaaagatgtggaacgcccccagctacctgcacctgaaccccgccagctaccacatcgaggccagcgaggacggcgagttcaccgtgaagggcaaggccagcgacaccgacctggccgtgatggccgacaccttcagctgccactgctaccagggctacgagggcgccgactgcagagagatcaagaccgccgacggctgcagcggcgtgagccccagccccggcagcctgatgaccctgtgcctgctgctgctggccagctacagaagcatccagctgtag

SEQ ID NO: 84888 - DNA, 138 bp, synthetic construct
  misc_feature 1..138: note = Description of Artificial Sequence: Synthetic coding sequence
  source 1..138: mol_type = other DNA
atgaaggtgctgagcgagggccagctgaagctgtgcgtggtgcagcccgtgcacctgaccagctggctgctgatcttcttcatcctgaagagcatcagctgcctgaagcccgccagactgcccatctaccagagatag

SEQ ID NO: 84889 - DNA, 192 bp, synthetic construct
  misc_feature 1..192: note = Description of Artificial Sequence: Synthetic coding sequence
  source 1..192: mol_type = other DNA
atgaaggtgctgagcgagggccagctgaagctgtgcgtggtgcagcccgtgcacctgaccagctggctgctgatcttcttcatcctgaagagcatcagctgcctgaagcccgccagactgcccatctaccagagaaagcccttcatcgccgcctggaacgcccccaccgaccagtgcctgatcaagtactag

SEQ ID NO: 84890 - DNA, 15366 bp, synthetic construct
  misc_feature 1..15366: note = Description of Artificial Sequence: Synthetic coding sequence
  source 1..15366: mol_type = other DNA
atgaccagcagaagactggaggagagcatgggcgccgtgcagatgggcctggtgaacatgttcaagggcttccagagcaaggtgctgccccccctgagccccaaggtggtgaccgaggaggaggtgaacagaatgctgacccccagcgagttcctgaaggagatgagcctgaccaccgagcagagactggccaagaccagactgatgtgcagaccccagatcatcgagctgctggacatgggcgagaccacccaccagaagttcagcggcatcgacctggaccaggccctgttccagcccttccccagcgagatcatcttccagaactacaccccctgcgaggtgtacgaggtgcccctgatcctgagaaacaacgacaagatccccagactggtgaaggtggtggaggagagcagcccctacttcaaggtgatcagccccaaggacatcggccacaaggtggcccccggcgtgcccagcatcttcagaatcctgttcacccccgaggagaacaaggactacgcccacaccctgacctgcgtgaccgagagagagaagttcatcgtgcccatcaaggccagaggcgccagagccatcctggacttccccgacaagctgaacttcagcacctgccccgtgaagtacagcacccagaagatcctgctggtgagaaacatcggcaacaagaacgccgtgttccacatcaagacctgcagacccttcagcatcgagcccgccatcggcaccctgaacgtgggcgagagcatgcagctggaggtggagttcgagccccagagcgtgggcgaccacagcggcagactgatcgtgtgctacgacaccggcgagaaggtgttcgtgagcctgtacggcgccgccatcgacatgaacatcagactggacaagaacagcctgaccatcgagaagacctacatcagcctggccaaccagagaaccatcaccatccacaacagaagcaacatcatcgcccacttcctgtggaaggtgttcgccacccagcaggaggaggacagagagaagtacagagcctgcgacgacctgatcaaggaggagaaggacgagaccgacgagttcttcgaggagtgcatcaccgaccccctgctgagagagcacctgagcgtgctgagcagaaccttcgccaaccagagaagactggtgcagggcgacagcaagctgttcttcaacaacgtgttcaccgtggagcccctggagggcgacgtgtggcccaacagcagcgccgagatcaccgtgtacttcaaccccctggaggccaagctgtaccagcagaccatctactgcgacatcctgggcagagagatcagactgcccctgagaatcaagggcgagggcatgggccccaagatccacttcaacttcgagctgctggacatcggcaaggtgttcaccggcagcgcccactgctacgaggccatcctgtacaacaagggcagcatcgacgccctgttcaacatgaccccccccaccagcgccctgggcgcctgcttcgtgttcagccccaaggagggcatcatcgagcccagcggcgtgcaggccatccagatcagcttcagcagcaccatcctgggcaacttcgaggaggagttcctggtgaacgtgaacggcagccccgagcccgtgaagctgaccatcagaggctgcgtgatcggccccaccttccacttcaacgtgcccgccctgcacttcggcgacgtgagcttcggcttcccccacaccctgatctgcagcctgaacaacaccagcctgatccccatgacctacaagctgagaatccccggcgacggcctgggccacaagagcatcagctactgcgagcagcacgtggactacaagagacccagctggaccaaggaggagatcagcagcatgaagcccaaggagttcaccatcagccccgactgcggcaccatcagaccccagggcttcgccgccatcagagtgaccctgtgcagcaacaccgtgcagaagtacgagctggccctggtggtggacgtggagggcatcggcgaggaggtgctggccctgctgatcaccgccagatgcgtggtgcccgccctgcacctggtgaacaccgaggtggacttcggccactgcttcctgaagtacccctacgagaagaccctgcagctggccaaccaggacgacctgcccggcttctacgaggtgcagccccaggtgtgcgaggaggtgcccaccgtgctgttcagcagccccacccccagcggcgtgatcagccccagcagcaccatccacatccccctggtgctggagacccaggtgaccggcgagcacagaagcaccgtgtacatcagcatcttcggcagccaggacccccccctggtgtgccacctgaagagcgccggcgagggccccgtgatctacgtgcaccccaaccaggtggacttcggcaacatctacgtgctgaaggacagcagcagaatcctgaacctgtgcaaccagagcttcatccccgccttcttccaggcccacatggcccacaagaagagcctgtggaccatcgagcccaacgagggcatggtgccccccgagaccgacgtgcagctggccctgaccgccaacctgaacgacaccctgaccttcaaggactgcgtgatcctggacatcgagaacagcagcacctacagaatccccgtgcaggccagcggcaccggcagcaccatcgtgagcgacaagcccttcgcccccgagctgaacctgggcgcccacttcagcctggacacccactactaccacttcaagctgatcaacaagggcagaagaatccagcagctgttctggatgaacgacagcttcagaccccaggccaagctgagcaagaagggcagagtgaagaagggccacgcccacgtgcagccccagcccagcggcagccaggagcccagagacccccagagccccgtgttccacctgcaccccgccagcatggagctgtaccccggccaggccatcgacgtgatcctggagggctacagcgccacccccagaatcgtgaaggagaagctggtgtgccacgccatcatcggcgcccagaagggcaagagcctggtgatggccgtgaacatcacctgcgagttcgtggcccccctgatccagctgagcaccaagcagctgatctacagactggagaagaagcccaacagcatcctgaagcccgactaccagcccctggccatcaagaacatcagcaccctgcccgtgaacctgctgctgagcaccagcggccccttcttcatctgcgagaccgacaagagcctgctgcccgccacccccgagcccatcaagctggagatcgacgaggagaagaacctgctgatcaagttcgaccccagctacagaaacgacctgaacaactgggtggccgaggagatcctggccatcaagtacgtggagcacccccagatcgacagcctggacctgagaggcgaggtgcactaccccaacctgagcttcgagaccaaggagctggacttcggctgcatcctgaacgacaccgagctgatcagatacgtgaccatcaccaactgcagccccctggtggtgaagttcagatggttcttcctggtgaacgacgaggagaaccagatcagattcgtgaccctgcccaagaagccctacagcgcccccgtgagccagatggagagcatccccgccaccagcgaggccgccagcccccccgccatcctggtgaccgtggagagccccgagatggacctgaacgacttcgtgaagaccgtgctggtggacgaggacgccagacccgaggagaaggagctgagaaagaccaaggccagcagcgtgatcagcgacgagatcaagatcagcagcaccgagatcgagagaatctacagcagccagagccaggtggaggaccaggagagcctgcagacctgcgagcagaacgagatgctgagcatcggcatcgaggaggtgttcgacatcctgcccctgttcggcgtgctgcagccccacagcagccaccagatcagcttcaccttctacggccacgccaacatcatcgcccaggccaaggccctgtgcgaggtggaggagggccccacctacgagatcaccctgaagggcgaggccagcctggtgaactacagcttcgacaccaaggacatccactacggcctgcagctgttcgaccacgtgaccgagagagagatcaccctgaccaacatgggcaaggtgggcttcgagttcaaggtgctgaccgaccaccagagcagccccgacaacctgctgcccggcgtgcccctgatcctgcccgtgagcggcttcatcagcagccaccaggagcaggtgctgaaggtgtactacctgcccggcgtgcccgaggtgttcaagagaagcttccagatccagatcgcccacctggaccccgagaacatcaccctgagcggcgagggcatcttcccccagatctgcctggacctgcccagaaacctgaccgccaacgagaagtacgagatgttcctgaaccaggccagaaagaacaccgacaaggagtacaacaagtgcgagatgctggaccacttcgacatcatcaccgaggaggtgcccgaggacgagcccgccgaggtgagcgcccacctgcagatggaggtggagagactgatcgtgcagagctacgtgctggagcaccagaagaccaccacccccgaccccatggacgacccctgcttcagccacagaagcagaagaaagctggccaagatccagctgcccgagtacatcctggacttcggctacatcatcctgggcgaggtgagaacccacatcatcaagatcatcaacaccagccacttccccgtgagcttccacgccgacaagagagtgctgcacgagaccggcttcagcaccgagctggacagagtgaagaacctgccccactgcgagaccgagatcttcgaggtgagattcgacccccagggcgccaacctgcccgtgggcagcaaggaggtgatcctgcccatcaaggtggtgggcggccccaccgtgcacatctgcctgcaggccaaggtgaccatccccaccatgaccctgagcagaggcaaggtggacttcgccaccatccagtgcggccagtgcctggtggagaccatccagctgagcaaccacctgcaggtgccctgcgagtggttcgtgcagagccagaagcccgtggacaagctggagaagcacatgcccaagtacctgagacagaagctgagagccgagctgaagcccaagaccagaatcttcgagatccagcccatcagcggcgtgctggaccccggcgagaagagcaacgtgcaggtgaagttcatgcccaaggaggagaagttctacagccagaccctggtgttccagatcgcccagagcgcccagaagctgaccctgctggccagaggccagggcctggagcccagactggagttcagccccagcgtgctggacctgggccccctgctgctgtgcgcccccggcgacgaggccgaggtgatcgtgaagaacccctgcaacttccccatcgagttctacagcctggagttcgaccagcagtacctgatcgaggagaagatcctgagaaagctgaagggctacgacagctacaacaccctgctgctgccccccagaaaccccggcgagaagctgccccccgagctgtacgagtacttcaaggagatcaagaagagcaaggaggagcagatgagagccaagtacctggagaacctggcccaggagaacgaggaggaggacatcaccagcagcgaccagggcaccagcaacagcaccaagagaaccagcctgagcagaggcatcagcgtgaccagcaacctggaggagtggcacgccctgctggtggagagcaagacctacctggaggaggaggaggacgaggagagcctggagaagatcatcttccagaccgacaagctgcagagcatcgacagccacagcatggaggaggtgggcgaggtggagaacaaccccgtgagcaaggccatcgccagacacctgggcatcgacatcagcgccgagggcagactggccaagaacagaaagggcatcgccatcatcatccacggcacccccctgagcggcaagagcgccaacgccgtgagcgtggccaagtactacaacgccgcctgcctgagcatcgacagcatcgtgctggaggccgtggccaacagcaacaacatccccggcatcagagccagagagctgtgcatcagagccgccatcgagcagagcgtgaaggagggcgaggaggccgcccaggaggccgccgtgggccagaacgtgatcggccagggcagactgagcaccgacaccctgggcaagctggccagcgagatgaccctggtggcccccgagatcaagcccggcaagagcgtgagaggcagcgtggtgatcaccaagagcaaggccgacagccacggcagcggcagccagaagcagcaccacagccaccagagcgagaccccccagatcagcagcagccccctgccccccggccccatccacagatggctgagcgtgagccccagcgtgggcggcgagaccggcctgatgagctgcgtgctgcccgacgagctgctggtgcagatcctggccgagagaatccagctgagcgactgctacagaggcgtggtgttcgacggcctggacaccctgttcgcccagaacgccgccgccgccctgctgtgcctgctgaaggccatcggcagcagagagcacatctacatcctgaacatggcccaggactacgccgccatgaaggcccaggagaaggccaagaaggagcaggaggagagaaagcacaagggcgccctggagaaggagaaggagagactgcagaacatggacgaggaggagtacgacgccctgaccgaggaggagaagctgaccttcgacagaggcatccagcaggccctgagagagagaaagaagagagagcaggagagactggccaaggagatgcaggagaagaagctgcagcaggagctggagagacagaaggaggaggacgagctgaagagaagagtgaagaagggcaagcagggccccatcaaggaggagccccccatgaagaagagccaggccgccaacaagcaggtgccccccctgaccaaggtggacgtgaagatggagaccatcgagagaaagatcagcgtgagagagcagaccatgagcgagaaggaggagctgaacaagaagaagagaaacatgggcgacgtgagcatgcacggcctgcccctggtgcaggaccaggaggacagcgagggcgacaacagcaaggaccccgacaagcagctggcccccaagttcaagacctacgagctgaccctgaaggacgtgcagaacatcctgatgtactgggacagaaagcagggcgtgcagctgccccccgccggcatggaggaggccccccacgagcccgacgaccagagacaggtgcccctgggcggcagaagaggcagaaaggacagagagagagagagactggagaaggagagaaccgagaaggagagactggagagagagaaggccgagagagagagactggagaagctgagagccctggaggagagaagcgactgggagggcgagggcgaggaggaccacgagggcaagaaggagaaggacctgggcgtgcccttcctggacatccagacccccgacttcgagggcctgagctggaagcaggccctggagagcgacaagctgcccaagggcgagcagatcctggacatcctgggcctgggcgccagcggcccccccatccccccccccgccctgttcagcatcgtgagctaccccgtgaagagaccccccctgaccatgaccgacgacctggagcacttcgtgttcgtgatcccccccagcgaggacatcagcctggacgagaagaaggagatggagatcgagagcgacttcctggccaccaccaacaccaccaaggcccaggaggagcagaccagcagcagcaagggcggcaagcagaagatgaaggagaagatcgaccaggtgttcgagatccagaaggacaagagacacatggccctgaacagaaaggtgctgagcggcgagcccgccggcaccatcagccagctgagcgacaccgacctggacaacttcaacggccagcacagccaggagaagttcaccagactgaaccacttcagatggatcgtgcccgccaacggcgaggtgaccctgcaggtgcacttcagcagcgacgagttcggcaacttcgaccagaccttcaacttcgagatcctgggcacctgctgccagtaccagctgtactgcagaggcatctgcacctacccctacatctgccaggaccccaaggtggtgttcccccagagaaagatggacatgaagaccaacgaggtgatcttcaagaagtacgtgatgagcaccgagacctactacttcggccccctgctgtgcggcaagagcagagacaagtacaagagcagcctgttccccggcaacatggagaccctgaccatcctgaacaccagcctgatggtggtggaggccagcttctacttccagaacgacgtgaaggccaacacctacttcctggagcccaacaccatggtgctgaagcccaacgagaagcagatcctgaacgtgtgggcctaccccaccagcgtgggcgtgttcgaggacagcatcgtgtgctgcatcaacgacaaccccgagcccgccatcttccagctgagctgccagggcatcagacccgagctggagctggagcccagacagctgcacttcgacagactgctgctgcacagacaggagagcagagtggtgctgctgagaaacgtgaccctgctgcccgtggcctggagaatcaccagcctggagcacctgggcgacgacttcaccgtgagcctgatgcagggcaccatcccccccgaggccgagtacggcctgcacctgtacttccagcccaccaagcccgtgaacatcaagaaggccatcagactggaggtgctggacgccgagaacctgctgggcgtggtgcagatcgagaacatcatggtgttcgccgaggcctacgacatcgccctggacatcaccttccccaagggcgccgagggcggcctggacttcggcatcgtgagagtgaccgaggaggccaagcagcccctgcagctgaagaacagaggcaagtacgagatcgccttcagcttcagcgtggacagcgtgggcatcagcacccccaacatcaacagcatgatcagcgtgcagcccaagaagggcagcctgacccccaccgagaagcccaccaacgtgcaggtgttcttccacgccaagaaggaggtgaagatcgagcaccagcccgtgctgagatgccagatcatcgagcccaacatcagcgagggcggcgagatcatcgccagcatccccatcaagttcagcgccaacgccgtgtacagcaagtacaacatcacccccagcagcgtgatcaacttcggcgccctgatctgcggcaccagaaagagcaccaccttcaccatcgagaaccagggcgtgaccgacttcaagttcgccctgtacaagctgaccggcgagagccccatccaccagaagaaggccgccagccacgtgagacacgccagaagcagagagagcgagagcttctacaagaccggcagcagcagagccgccaagttcagcgacaccatccagaaggaggtgaccaccaccggccaggccagattcgcccacggcatgttcaccgtgtaccccggcttcggcagcatccccagcggcggccagcaggtgatcaacgtggactgcgtggccgacgccatgggcaagtgcgaggagttcatcgccatcgacatcagcggcagagaccccgccgtgcaccccgccggcatcctgtacaccctgctggccgaggcctgcctgcccgccttcgtgaccgagaacaacgccctgatcttcgaggagcaccagatctgcaccagcgccaacctgcaccacatcctgcagaccatcgagagcggcggcctgttcgtggaggacgagaacaagttcatcttctgcaacgtgctggtgggcagacaggccaaggccagattcaagatcagcaacgtgggcaagatcacctgcgacgtgaacatcgtggtgagacccatcagcaacaagcccttcgccagaatcgtggacatcttcgaggtggagcccagcaagatgtgcatcgccagccacagccacgccttcgccaccgtgagcttcaccccccagatcatgcagaactaccagtgcatcttcgaggccaccctggacggcctgcccagcaccctggccaagagcagaggcctggtgttcgacatcgccggcgagggcaacctgcccagagtgaccgtggtgagacccgtgctgcacaaccagtacggcaaccccctgctgctgttcaagagactgctgctgggccacagcgagaagctgcccctgatcctgaagaacaacggcgtgctgcccgcccagctgcacgtggacctgcaggacgagctgggcgtgttcagcctgaagggcagacccaccaccgcctacatctacatcaccgaggagaacaagccccacgtgaaggccaagaaggcccacaccgccagcctggtggtgagccccggcgacaccgccgagttcgacgtggtgttccacagccagaaggtgggcagaatgagaggcatcatccacctgagcgtgatcaacaaccagtacgaggagaccagcatccacatggtgggcgagggctacgaggacgacatcaccctggacaacatccacggcctggtggcccccaccagccaggaggacatcagcatcagcgagttcaccgagatcatcgaggacaacgacatggaggacctggtggccgccgccctggtggaccacatccagttcggcgactgccacatcggccacagctacaacgccagcttcaccgtgaccaaccacagccaggtgaacctgatcagattcgagtggcccgtgagcgccaccatcgccttcagcccccagatgggccacctgcaccccggctgcgccaaggacatcgtggtgaccatgaagagcgacgtgcccatcaacctgaagaacatgagaatcagatgcaagctgagcagaatcatgttccagctgcccgccgaccaggtgcccgactgggacgacagaatgcacaccgtgaagtgggtggacgtgcccagaaacatgcccggcaccttcaccaccaagagaaaggtgatcgagaccgaccccgagcccgcccacagcgtgctggaggagaactaccaggagctgcagctgcagatcagcgccaacgtggacttcgccagctaccactgccaggccagagacgtgagattcaaggagaccctggtgtaccagaccagagtgttcgagttcgacgtgatcaacagcggcagagtgcagctggagttcagctgggtgagcgaggacaccagcaaggccgtgagcttcgccaagcccgaccaccagggcagcgcccagaaggaccagctgagccagggcaccatgcacaccggcagcaccctggacagcaccatggaccactgggccgagggcagcccccagcccttcagcgtggagcccagcagcggcatcgtgcccgtgggcaagatccagaagttcaaggtgaagttcagccccctggacatcggcgacttcgagagcaacctgttctgccagatccccaacctgccccccggcgagcagggccccgtgctggtggccaagggcagaagcaccctgcccatctgccacttcgacctgaaggacagcgactacatcagcggccaccagagaaaccccgagctgagaggcagcagcggcggcgccctggaccccaacaccagagtgatcgagttcaccaccgtgggcatcggcggcaagaacctgagaaccttcaccatcctgaaccccaccaacagcacctacagcttctgctggatcagcgaggagatcgagagcctgcagaaccccgccgccttcacctgcctgaccgagaagggcttcatccaccccgagaagaaggccgagatcgtgttccagttcacccccttccacctgggcatcaccgagagcagctggaccttcctgatccccgagcacaacatcaccgtgcccttcctgctggtgggcaagaccaccgagcccctgatcagcctgaacaagagccacctgaacttcagcagcctgctgatcggcagagaggccagagagaccgtgcagatcatcaacaaggaggagcagggcttcgacttcagcttccaggacaacagcagatacagcgagggcttcagcaacagcctgctggtgtgccccatggagggctggatcccccccctgagcagattccccatcgacatcttcttcacccccaagcaggagggcgacgtgaacttcaacctgatctgcaacgtggagaagaaggtgcaccccgtgaccctgaacgtgaaggccgagggctacaccatgaacgtggagatcaagtgcaaggacagaaccggcagcatcaccctgctgacccccaaccagaccaacatcatcaacttctacgaggtggagctgaacgagtgcgtgcagtgcgagttcaacttcatcaacaccggcaagttcaccttcagcttccaggcccagctgtgcggcagcaagaccctgctgcagtacctggagttcagccccatcgacagcaccgtggacgtgggccagagcgtgcacgccaccctgagcttccagcccctgaagaagtgcgtgctgaccgacctggagctgatcatcaagatcagccacggccccaccttcatgtgcaacatcagcggctgcgccgtgagccccgccatccacttcagcttcaccagctacaacttcggcacctgcttcatctaccaggccggcatgcccccctacaagcagaccctggtgatcaccaacaaggaggagacccccatgagcatcgactgcctgtacaccaacaccacccacctggaggtgaacagcagagtggacgtggtgaagcccggcaacaccctggagatccccatcaccttctaccccagagagagcatcaactaccaggagctgatccccttcgagatcaacggcctgagccagcagaccgtggagatcaagggcaagggcaccaagatgaagatcctggtgctggaccccgccaacagaatcgtgaagctgggcgccgtgctgcccggccaggtggtgaagagaaccgtgagcatcatgaacaacagcctggcccagctgaccttcaaccagagcatcctgttcaccatccccgagctgcaggagcccaaggtgctgaccctggcccccttccacaacatcaccctgaagcccaaggaggtgtgcaagctggaggtgatcttcgcccccaagaagagagtgccccccttcagcgaggaggtgttcatggagtgcatgggcctgctgagacccctgttcctgctgagcggctgctgccaggccctggagatcagcctggaccaggagcacatccccttcggccccgtggtgtaccagacccaggccaccagaagaatcctgatgatgaacaccggcgacgtgggcgccagattcaagtgggacatcaagaagttcgagccccacttcagcatcagccccgaggagggctacatcaccagcggcatggaggtgagcttcgaggtgacctaccaccccaccgaggtgggcaaggagagcctgtgcaagaacatcctgtgctacatccagggcggcagccccctgagcctgaccctgagcggcgtgtgcgtgggcccccccgccgtgaaggaggtggtgaacttcacctgccaggtgagaagcaagcacacccagaccatcctgctgagcaacagaaccaaccagacctggaacctgcaccccatcttcgagggcgagcactgggagggccccgagttcatcaccctggaggcccaccagcagaacaagccctacgagatcacctacagacccagaaccatgaacctggagaacagaaagcaccagggcaccctgttcttccccctgcccgacggcaccggctggctgtacgccctgcacggcaccagcgagctgcccaaggccgtggccaacatctacagagaggtgccctgcaagaccccctacaccgagctgctgcccatcaccaactggctgaacaagccccagagattcagagtgatcgtggagatcctgaagcccgagaagcccgacctgagcatcaccatgaagggcctggactacatcgacgtgctgagcggcagcaagaaggactacaagctgaacttcttcagccacaaggagggcacctacgccgccaaggtgatcttcagaaacgaggtgaccaacgagttcctgtactacaacgtgagcttcagagtgatccccagcggcatcatcaagaccatcgagatggtgacccccgtgagacaggtggccagcgccagcatcaagctggagaaccccctgccctacagcgtgaccttcagcaccgagtgcagaatgcccgacatcgccctgcccagccagttcgtggtgcccgccaacagcgagggcaccttcagcttcgagttccagcccctgaaggccggcgagaccttcggcagactgaccctgcacaacaccgacctgggctactaccagtacgagctgtacctgaaggccacccccgccctgcccgagaagcccgtgcacttccagaccgtgctgggcagcagccagatcatcctggtgaagttcatcaactacaccagacagagaaccgagtactactgcagaaccgactgcaccgacttccacgccgagaagctgatcaacgccgcccccggcggccagggcggcaccgaggccagcgtggaggtgctgttcgagcccagccacctgggcgagaccaagggcatcctgatcctgagcagcctggccggcggcgagtacatcatccccctgttcggcatggccctgccccccaagccccagggccccttcagcatcagagccggctacagcatcatcatccccttcaagaacgtgttctaccacatggtgaccttcagcatcatcgtggacaaccccgccttcaccatcagagccggcgagagcgtgagacccaagaagatcaacaacatcaccgtgagcttcgagggcaaccccagcggcagcaagacccccatcaccaccaagctgaccgtgagctgcccccccggcgagggcagcgagaccggcgtgaagtgggtgtactacctgaagggcatcaccctgtag

SEQ ID NO: 84891 - DNA, 2853 bp, synthetic construct
  misc_feature 1..2853: note = Description of Artificial Sequence: Synthetic coding sequence
  source 1..2853: mol_type = other DNA
atggagagcgccggcggcttcaagctgggcatggagcccctgagcggcggcggcgtgtgcgagaagaagaagctgctgaagatgaccagcagaagactggaggagagcatgggcgccgtgcagatgggcctggtgaacatgttcaagggcttccagagcaaggtgctgccccccctgagccccaaggtggtgaccgaggaggaggtgaacagaatgctgacccccagcgagttcctgaaggagatgagcctgaccaccgagcagagactggccaagaccagactgatgtgcagaccccagatcatcgagctgctggacatgggcgagaccacccaccagaagttcagcggcatcgacctggaccaggccctgttccagcccttccccagcgagatcatcttccagaactacaccccctgcgaggtgtacgaggtgcccctgatcctgagaaacaacgacaagatccccagactggtgaaggtggtggaggagagcagcccctacttcaaggtgatcagccccaaggacatcggccacaaggtggcccccggcgtgcccagcatcttcagaatcctgttcacccccgaggagaacaaggactacgcccacaccctgacctgcgtgaccgagagagagaagttcatcgtgcccatcaaggccagaggcgccagagccatcctggacttccccgacaagctgaacttcagcacctgccccgtgaagtacagcacccagaagatcctgctggtgagaaacatcggcaacaagaacgccgtgttccacatcaagacctgcagacccttcagcatcgagcccgccatcggcaccctgaacgtgggcgagagcatgcagctggaggtggagttcgagccccagagcgtgggcgaccacagcggcagactgatcgtgtgctacgacaccggcgagaaggtgttcgtgagcctgtacggcgccgccatcgacatgaacatcagactggacaagaacagcctgaccatcgagaagacctacatcagcctggccaaccagagaaccatcaccatccacaacagaagcaacatcatcgcccacttcctgtggaaggtgttcgccacccagcaggaggaggacagagagaagtacagagcctgcgacgacctgatcaaggaggagaaggacgagaccgacgagttcttcgaggagtgcatcaccgaccccctgctgagagagcacctgagcgtgctgagcagaaccttcgccaaccagagaagactggtgcagggcgacagcaagctgttcttcaacaacgtgttcaccgtggagcccctggagggcgacgtgtggcccaacagcagcgccgagatcaccgtgtacttcaaccccctggaggccaagctgtaccagcagaccatctactgcgacatcctgggcagagagatcagactgcccctgagaatcaagggcgagggcatgggccccaagatccacttcaacttcgagctgctggacatcggcaaggtgttcaccggcagcgcccactgctacgaggccatcctgtacaacaagggcagcatcgacgccctgttcaacatgaccccccccaccagcgccctgggcgcctgcttcgtgttcagccccaaggagggcatcatcgagcccagcggcgtgcaggccatccagatcagcttcagcagcaccatcctgggcaacttcgaggaggagttcctggtgaacgtgaacggcagccccgagcccgtgaagctgaccatcagaggctgcgtgatcggccccaccttccacttcaacgtgcccgccctgcacttcggcgacgtgagcttcggcttcccccacaccctgatctgcagcctgaacaacaccagcctgatccccatgacctacaagctgagaatccccggcgacggcctgggccacaagagcatcagctactgcgagcagcacgtggactacaagagacccagctggaccaaggaggagatcagcagcatgaagcccaaggagttcaccatcagccccgactgcggcaccatcagaccccagggcttcgccgccatcagagtgaccctgtgcagcaacaccgtgcagaagtacgagctggccctggtggtggacgtggagggcatcggcgaggaggtgctggccctgctgatcaccgccagatgcgtggtgcccgccctgcacctggtgaacaccgaggtggacttcggccactgcttcctgaagtacccctacgagaagaccctgcagctggccaaccaggacgacctgcccggcttctacgaggtgcagccccaggtgtgcgaggaggtgcccaccgtgctgttcagcagccccacccccagcggcgtgatcagccccagcagcaccatccacatccccctggtgctggagacccaggtgaccggcgagcacagaagcaccgtgtacatcagcatcttcggcagccaggacccccccctggtgtgccacctgaagagcgccggcgagggccccgtgatctacgtgcaccccaaccaggtggacttcggcaacatctacgtgctgaaggacagcagcagaatcctgaacctgtgcaaccagagcttcatccccgccttcttccaggcccacatggcccacaagaagagcctgtggaccatcgagcccaacgagggcatggtgccccccgagaccgacgtgcagctggccctgaccgccaacctgaacgacaccctgaccttcaaggactgcgtgatcctggacatcgagaacagcagcacctacagaatccccgtgcaggccagcggcaccggcagcaccatcgtgagcgacaagcccttcgcccccgagctgaacctgggcgcccacttcagatag

SEQ ID NO: 84892 - DNA, 2823 bp, synthetic construct
  misc_feature 1..2823: note = Description of Artificial Sequence: Synthetic coding sequence
  source 1..2823: mol_type = other DNA
atggagagcgccggcggcttcaagctgggcgagaagaagaagctgctgaagatgaccagcagaagactggaggagagcatgggcgccgtgcagatgggcctggtgaacatgttcaagggcttccagagcaaggtgctgccccccctgagccccaaggtggtgaccgaggaggaggtgaacagaatgctgacccccagcgagttcctgaaggagatgagcctgaccaccgagcagagactggccaagaccagactgatgtgcagaccccagatcatcgagctgctggacatgggcgagaccacccaccagaagttcagcggcatcgacctggaccaggccctgttccagcccttccccagcgagatcatcttccagaactacaccccctgcgaggtgtacgaggtgcccctgatcctgagaaacaacgacaagatccccagactggtgaaggtggtggaggagagcagcccctacttcaaggtgatcagccccaaggacatcggccacaaggtggcccccggcgtgcccagcatcttcagaatcctgttcacccccgaggagaacaaggactacgcccacaccctgacctgcgtgaccgagagagagaagttcatcgtgcccatcaaggccagaggcgccagagccatcctggacttccccgacaagctgaacttcagcacctgccccgtgaagtacagcacccagaagatcctgctggtgagaaacatcggcaacaagaacgccgtgttccacatcaagacctgcagacccttcagcatcgagcccgccatcggcaccctgaacgtgggcgagagcatgcagctggaggtggagttcgagccccagagcgtgggcgaccacagcggcagactgatcgtgtgctacgacaccggcgagaaggtgttcgtgagcctgtacggcgccgccatcgacatgaacatcagactggacaagaacagcctgaccatcgagaagacctacatcagcctggccaaccagagaaccatcaccatccacaacagaagcaacatcatcgcccacttcctgtggaaggtgttcgccacccagcaggaggaggacagagagaagtacagagcctgcgacgacctgatcaaggaggagaaggacgagaccgacgagttcttcgaggagtgcatcaccgaccccctgctgagagagcacctgagcgtgctgagcagaaccttcgccaaccagagaagactggtgcagggcgacagcaagctgttcttcaacaacgtgttcaccgtggagcccctggagggcgacgtgtggcccaacagcagcgccgagatcaccgtgtacttcaaccccctggaggccaagctgtaccagcagaccatctactgcgacatcctgggcagagagatcagactgcccctgagaatcaagggcgagggcatgggccccaagatccacttcaacttcgagctgctggacatcggcaaggtgttcaccggcagcgcccactgctacgaggccatcctgtacaacaagggcagcatcgacgccctgttcaacatgaccccccccaccagcgccctgggcgcctgcttcgtgttcagccccaaggagggcatcatcgagcccagcggcgtgcaggccatccagatcagcttcagcagcaccatcctgggcaacttcgaggaggagttcctggtgaacgtgaacggcagccccgagcccgtgaagctgaccatcagaggctgcgtgatcggccccaccttccacttcaacgtgcccgccctgcacttcggcgacgtgagcttcggcttcccccacaccctgatctgcagcctgaacaacaccagcctgatccccatgacctacaagctgagaatccccggcgacggcctgggccacaagagcatcagctactgcgagcagcacgtggactacaagagacccagctggaccaaggaggagatcagcagcatgaagcccaaggagttcaccatcagccccgactgcggcaccatcagaccccagggcttcgccgccatcagagtgaccctgtgcagcaacaccgtgcagaagtacgagctggccctggtggtggacgtggagggcatcggcgaggaggtgctggccctgctgatcaccgccagatgcgtggtgcccgccctgcacctggtgaacaccgaggtggacttcggccactgcttcctgaagtacccctacgagaagaccctgcagctggccaaccaggacgacctgcccggcttctacgaggtgcagccccaggtgtgcgaggaggtgcccaccgtgctgttcagcagccccacccccagcggcgtgatcagccccagcagcaccatccacatccccctggtgctggagacccaggtgaccggcgagcacagaagcaccgtgtacatcagcatcttcggcagccaggacccccccctggtgtgccacctgaagagcgccggcgagggccccgtgatctacgtgcaccccaaccaggtggacttcggcaacatctacgtgctgaaggacagcagcagaatcctgaacctgtgcaaccagagcttcatccccgccttcttccaggcccacatggcccacaagaagagcctgtggaccatcgagcccaacgagggcatggtgccccccgagaccgacgtgcagctggccctgaccgccaacctgaacgacaccctgaccttcaaggactgcgtgatcctggacatcgagaacagcagcacctacagaatccccgtgcaggccagcggcaccggcagcaccatcgtgagcgacaagcccttcgcccccgagctgaacctgggcgcccacttcagatag

SEQ ID NO: 84893 - DNA, 15363 bp, synthetic construct
  misc_feature 1..15363: note = Description of Artificial Sequence: Synthetic coding sequence
  source 1..15363: mol_type = other DNA
atgaccagcagaagactggaggagagcatgggcgccgtgcagatgggcctggtgaacatgttcaagggcttccagagcaaggtgctgccccccctgagccccaaggtggtgaccgaggaggaggtgaacagaatgctgacccccagcgagttcctgaaggagatgagcctgaccaccgagcagagactggccaagaccagactgatgtgcagaccccagatcatcgagctgctggacatgggcgagaccacccaccagaagttcagcggcatcgacctggaccaggccctgttccagcccttccccagcgagatcatcttccagaactacaccccctgcgaggtgtacgaggtgcccctgatcctgagaaacaacgacaagatccccagactggtgaaggtggtggaggagagcagcccctacttcaaggtgatcagccccaaggacatcggccacaaggtggcccccggcgtgcccagcatcttcagaatcctgttcacccccgaggagaacaaggactacgcccacaccctgacctgcgtgaccgagagagagaagttcatcgtgcccatcaaggccagaggcgccagagccatcctggacttccccgacaagctgaacttcagcacctgccccgtgaagtacagcacccagaagatcctgctggtgagaaacatcggcaacaagaacgccgtgttccacatcaagacctgcagacccttcagcatcgagcccgccatcggcaccctgaacgtgggcgagagcatgcagctggaggtggagttcgagccccagagcgtgggcgaccacagcggcagactgatcgtgtgctacgacaccggcgagaaggtgttcgtgagcctgtacggcgccgccatcgacatgaacatcagactggacaagaacagcctgaccatcgagaagacctacatcagcctggccaaccagagaaccatcaccatccacaacagaagcaacatcatcgcccacttcctgtggaaggtgttcgccacccagcaggaggaggacagagagaagtacagagcctgcgacgacctgatcaaggaggagaaggacgagaccgacgagttcttcgaggagtgcatcaccgaccccctgctgagagagcacctgagcgtgctgagcagaaccttcgccaaccagagaagactggtgcagggcgacagcaagctgttcttcaacaacgtgttcaccgtggagcccctggagggcgacgtgtggcccaacagcagcgccgagatcaccgtgtacttcaaccccctggaggccaagctgtaccagcagaccatctactgcgacatcctgggcagagagatcagactgcccctgagaatcaagggcgagggcatgggccccaagatccacttcaacttcgagctgctggacatcggcaaggtgttcaccggcagcgcccactgctacgaggccatcctgtacaacaagggcagcatcgacgccctgttcaacatgaccccccccaccagcgccctgggcgcctgcttcgtgttcagccccaaggagggcatcatcgagcccagcggcgtgcaggccatccagatcagcttcagcagcaccatcctgggcaacttcgaggaggagttcctggtgaacgtgaacggcagccccgagcccgtgaagctgaccatcagaggctgcgtgatcggccccaccttccacttcaacgtgcccgccctgcacttcggcgacgtgagcttcggcttcccccacaccctgatctgcagcctgaacaacaccagcctgatccccatgacctacaagctgagaatccccggcgacggcctgggccacaagagcatcagctactgcgagcagcacgtggactacaagagacccagctggaccaaggaggagatcagcagcatgaagcccaaggagttcaccatcagccccgactgcggcaccatcagaccccagggcttcgccgccatcagagtgaccctgtgcagcaacaccgtgcagaagtacgagctggccctggtggtggacgtggagggcatcggcgaggaggtgctggccctgctgatcaccgccagatgcgtggtgcccgccctgcacctggtgaacaccgaggtggacttcggccactgcttcctgaagtacccctacgagaagaccctgcagctggccaaccaggacgacctgcccggcttctacgaggtgcagccccaggtgtgcgaggaggtgcccaccgtgctgttcagcagccccacccccagcggcgtgatcagccccagcagcaccatccacatccccctggtgctggagacccaggtgaccggcgagcacagaagcaccgtgtacatcagcatcttcggcagccaggacccccccctggtgtgccacctgaagagcgccggcgagggccccgtgatctacgtgcaccccaaccaggtggacttcggcaacatctacgtgctgaaggacagcagcagaatcctgaacctgtgcaaccagagcttcatccccgccttcttccaggcccacatggcccacaagaagagcctgtggaccatcgagcccaacgagggcatggtgccccccgagaccgacgtgcagctggccctgaccgccaacctgaacgacaccctgaccttcaaggactgcgtgatcctggacatcgagaacagcagcacctacagaatccccgtgcaggccagcggcaccggcagcaccatcgtgagcgacaagcccttcgcccccgagctgaacctgggcgcccacttcagcctggacacccactactaccacttcaagctgatcaacaagggcagaagaatccagcagctgttctggatgaacgacagcttcagaccccaggccaagctgagcaagaagggcagagtgaagaagggccacgcccacgtgcagccccagcccagcggcagccaggagcccagagacccccagagccccgtgttccacctgcaccccgccagcatggagctgtaccccggccaggccatcgacgtgatcctggagggctacagcgccacccccagaatcgtgaaggagaagctggtgtgccacgccatcatcggcgcccagaagggcaagagcctggtgatggccgtgaacatcacctgcgagttcgtggcccccctgatccagctgagcaccaagcagctgatctacagactggagaagaagcccaacagcatcctgaagcccgactaccagcccctggccatcaagaacatcagcaccctgcccgtgaacctgctgctgagcaccagcggccccttcttcatctgcgagaccgacaagagcctgctgcccgccacccccgagcccatcaagctggagatcgacgaggagaagaacctgctgatcaagttcgaccccagctacagaaacgacctgaacaactgggtggccgaggagatcctggccatcaagtacgtggagcacccccagatcgacagcctggacctgagaggcgaggtgcactaccccaacctgagcttcgagaccaaggagctggacttcggctgcatcctgaacgacaccgagctgatcagatacgtgaccatcaccaactgcagccccctggtggtgaagttcagatggttcttcctggtgaacgacgaggagaaccagatcagattcgtgaccctgcccaagaagccctacagcgcccccgtgagccagatggagagcatccccgccaccagcgaggccgccagcccccccgccatcctggtgaccgtggagagccccgagatggacctgaacgacttcgtgaagaccgtgctggtggacgaggacgccagacccgaggagaaggagctgagaaagaccaaggccagcagcgtgatcagcgacgtgagatgccccttccacggcgaggagagaatctacagcagccagagccaggtggaggaccaggagagcctgcagacctgcgagcagaacgagatgctgagcatcggcatcgaggaggtgttcgacatcctgcccctgttcggcgtgctgcagccccacagcagccaccagatcagcttcaccttctacggccacgccaacatcatcgcccaggccaaggccctgtgcgaggtggaggagggccccacctacgagatcaccctgaagggcgaggccagcctggtgaactacagcttcgacaccaaggacatccactacggcctgcagctgttcgaccacgtgaccgagagagagatcaccctgaccaacatgggcaaggtgggcttcgagttcaaggtgctgaccgaccaccagagcagccccgacaacctgctgcccggcgtgcccctgatcctgcccgtgagcggcttcatcagcagccaccaggagcaggtgctgaaggtgtactacctgcccggcgtgcccgaggtgttcaagagaagcttccagatccagatcgcccacctggaccccgagaacatcaccctgagcggcgagggcatcttcccccagatctgcctggacctgcccagaaacctgaccgccaacgagaagtacgagatgttcctgaaccaggccagaaagaacaccgacaaggagtacaacaagtgcgagatgctggaccacttcgacatcatcaccgaggaggtgcccgaggacgagcccgccgaggtgagcgcccacctgcagatggaggtggagagactgatcgtgcagagctacgtgctggagcaccagaagaccaccacccccgaccccatggacgacccctgcttcagccacagaagcagaagaaagctggccaagatccagctgcccgagtacatcctggacttcggctacatcatcctgggcgaggtgagaacccacatcatcaagatcatcaacaccagccacttccccgtgagcttccacgccgacaagagagtgctgcacgagaccggcttcagcaccgagctggacagagtgaagaacctgccccactgcgagaccgagatcttcgaggtgagattcgacccccagggcgccaacctgcccgtgggcagcaaggaggtgatcctgcccatcaaggtggtgggcggccccaccgtgcacatctgcctgcaggccaaggtgaccatccccaccatgaccctgagcagaggcaaggtggacttcgccaccatccagtgcggccagtgcctggtggagaccatccagctgagcaaccacctgcaggtgccctgcgagtggttcgtgcagagccagaagcccgtggacaagctggagaagcacatgcccaagtacctgagacagaagctgagagccgagctgaagcccaagaccagaatcttcgagatccagcccatcagcggcgtgctggaccccggcgagaagagcaacgtgcaggtgaagttcatgcccaaggaggagaagttctacagccagaccctggtgttccagatcgcccagagcgcccagaagctgaccctgctggccagaggccagggcctggagcccagactggagttcagccccagcgtgctggacctgggccccctgctgctgtgcgcccccggcgacgaggccgaggtgatcgtgaagaacccctgcaacttccccatcgagttctacagcctggagttcgaccagcagtacctgatcgaggagaagatcctgagaaagctgaagggctacgacagctacaacaccctgctgctgccccccagaaaccccggcgagaagctgccccccgagctgtacgagtacttcaaggagatcaagaagagcaaggaggagcagatgagagccaagtacctggagaacctggcccaggagaacgaggaggaggacatcaccagcagcgaccagggcaccagcaacagcaccaagagaaccagcctgagcagaggcatcagcgtgaccagcaacctggaggagtggcacgccctgctggtggagagcaagacctacctggaggaggaggaggacgaggagagcctggagaagatcatcttccagaccgacaagctgcagagcatcgacagccacagcatggaggaggtgggcgaggtggagaacaaccccgtgagcaaggccatcgccagacacctgggcatcgacatcagcgccgagggcagactggccaagaacagaaagggcatcgccatcatcatccacggcacccccctgagcggcaagagcgccaacgccgtgagcgtggccaagtactacaacgccgcctgcctgagcatcgacagcatcgtgctggaggccgtggccaacagcaacaacatccccggcatcagagccagagagctgtgcatcagagccgccatcgagcagagcgtgaaggagggcgaggaggccgcccaggaggccgccgtgggccagaacgtgatcggccagggcagactgagcaccgacaccctgggcaagctggccagcgagatgaccctggtggcccccgagatcaagcccggcaagagcgtgagaggcagcgtggtgatcaccaagagcaaggccgacagccacggcagcggcagccagaagcagcaccacagccaccagagcgagaccccccagatcagcagcagccccctgccccccggccccatccacagatggctgagcgtgagccccagcgtgggcggcgagaccggcctgatgagctgcgtgctgcccgacgagctgctggtgcagatcctggccgagagaatccagctgagcgactgctacagaggcgtggtgttcgacggcctggacaccctgttcgcccagaacgccgccgccgccctgctgtgcctgctgaaggccatcggcagcagagagcacatctacatcctgaacatggcccaggactacgccgccatgaaggcccaggagaaggccaagaaggagcaggaggagagaaagcacaagggcgccctggagaaggagaaggagagactgcagaacatggacgaggaggagtacgacgccctgaccgaggaggagaagctgaccttcgacagaggcatccagcaggccctgagagagagaaagaagagagagcaggagagactggccaaggagatgcaggagaagaagctgcagcaggagctggagagacagaaggaggaggacgagctgaagagaagagtgaagaagggcaagcagggccccatcaaggaggagccccccatgaagaagagccaggccgccaacaagcaggtgccccccctgaccaaggtggacgtgaagatggagaccatcgagagaaagatcagcgtgagagagcagaccatgagcgagaaggaggagctgaacaagaagaagagaaacatgggcgacgtgagcatgcacggcctgcccctggtgcaggaccaggaggacagcgagggcgacaacagcaaggaccccgacaagcagctggcccccaagttcaagacctacgagctgaccctgaaggacgtgcagaacatcctgatgtactgggacagaaagcagggcgtgcagctgccccccgccggcatggaggaggccccccacgagcccgacgaccagagacaggtgcccctgggcggcagaagaggcagaaaggacagagagagagagagactggagaaggagagaaccgagaaggagagactggagagagagaaggccgagagagagagactggagaagctgagagccctggaggagagaagcgactgggagggcgagggcgaggaggaccacgagggcaagaaggagaaggacctgggcgtgcccttcctggacatccagacccccgacttcgagggcctgagctggaagcaggccctggagagcgacaagctgcccaagggcgagcagatcctggacatcctgggcctgggcgccagcggcccccccatccccccccccgccctgttcagcatcgtgagctaccccgtgaagagaccccccctgaccatgaccgacgacctggagcacttcgtgttcgtgatcccccccagcgaggacatcagcctggacgagaagaaggagatggagatcgagagcgacttcctggccaccaccaacaccaccaaggcccaggaggagcagaccagcagcagcaagggcggcaagcagaagatgaaggagaagatcgaccaggtgttcgagatccagaaggacaagagacacatggccctgaacagaaaggtgctgagcggcgagcccgccggcaccatcagccagctgagcgacaccgacctggacaacttcaacggccagcacagccaggagaagttcaccagactgaaccacttcagatggatcgtgcccgccaacggcgaggtgaccctgcaggtgcacttcagcagcgacgagttcggcaacttcgaccagaccttcaacttcgagatcctgggcacctgctgccagtaccagctgtactgcagaggcatctgcacctacccctacatctgccaggaccccaaggtggtgttcccccagagaaagatggacatgaagaccaacgaggtgatcttcaagaagtacgtgatgagcaccgagacctactacttcggccccctgctgtgcggcaagagcagagacaagtacaagagcagcctgttccccggcaacatggagaccctgaccatcctgaacaccagcctgatggtggtggaggccagcttctacttccagaacgacgtgaaggccaacacctacttcctggagcccaacaccatggtgctgaagcccaacgagaagcagatcctgaacgtgtgggcctaccccaccagcgtgggcgtgttcgaggacagcatcgtgtgctgcatcaacgacaaccccgagcccgccatcttccagctgagctgccagggcatcagacccgagctggagctggagcccagacagctgcacttcgacagactgctgctgcacagacaggagagcagagtggtgctgctgagaaacgtgaccctgctgcccgtggcctggagaatcaccagcctggagcacctgggcgacgacttcaccgtgagcctgatgcagggcaccatcccccccgaggccgagtacggcctgcacctgtacttccagcccaccaagcccgtgaacatcaagaaggccatcagactggaggtgctggacgccgagaacctgctgggcgtggtgcagatcgagaacatcatggtgttcgccgaggcctacgacatcgccctggacatcaccttccccaagggcgccgagggcggcctggacttcggcatcgtgagagtgaccgaggaggccaagcagcccctgcagctgaagaacagaggcaagtacgagatcgccttcagcttcagcgtggacagcgtgggcatcagcacccccaacatcaacagcatgatcagcgtgcagcccaagaagggcagcctgacccccaccgagaagcccaccaacgtgcaggtgttcttccacgccaagaaggaggtgaagatcgagcaccagcccgtgctgagatgccagatcatcgagcccaacatcagcgagggcggcgagatcatcgccagcatccccatcaagttcagcgccaacgccgtgtacagcaagtacaacatcacccccagcagcgtgatcaacttcggcgccctgatctgcggcaccagaaagagcaccaccttcaccatcgagaaccagggcgtgaccgacttcaagttcgccctgtacaagctgaccggcgagagccccatccaccagaagaaggccgccagccacgtgagacacgccagaagcagagagagcgagagcttctacaagaccggcagcagcagagccgccaagttcagcgacaccatccagaaggaggtgaccaccaccggccaggccagattcgcccacggcatgttcaccgtgtaccccggcttcggcagcatccccagcggcggccagcaggtgatcaacgtggactgcgtggccgacgccatgggcaagtgcgaggagttcatcgccatcgacatcagcggcagagaccccgccgtgcaccccgccggcatcctgtacaccctgctggccgaggcctgcctgcccgccttcgtgaccgagaacaacgccctgatcttcgaggagcaccagatctgcaccagcgccaacctgcaccacatcctgcagaccatcgagagcggcggcctgttcgtggaggacgagaacaagttcatcttctgcaacgtgctggtgggcagacaggccaaggccagattcaagatcagcaacgtgggcaagatcacctgcgacgtgaacatcgtggtgagacccatcagcaacaagcccttcgccagaatcgtggacatcttcgaggtggagcccagcaagatgtgcatcgccagccacagccacgccttcgccaccgtgagcttcaccccccagatcatgcagaactaccagtgcatcttcgaggccaccctggacggcctgcccagcaccctggccaagagcagaggcctggtgttcgacatcgccggcgagggcaacctgcccagagtgaccgtggtgagacccgtgctgcacaaccagtacggcaaccccctgctgctgttcaagagactgctgctgggccacagcgagaagctgcccctgatcctgaagaacaacggcgtgctgcccgcccagctgcacgtggacctgcaggacgagctgggcgtgttcagcctgaagggcagacccaccaccgcctacatctacatcaccgaggagaacaagccccacgtgaaggccaagaaggcccacaccgccagcctggtggtgagccccggcgacaccgccgagttcgacgtggtgttccacagccagaaggtgggcagaatgagaggcatcatccacctgagcgtgatcaacaaccagtacgaggagaccagcatccacatggtgggcgagggctacgaggacgacatcaccctggacaacatccacggcctggtggcccccaccagccaggaggacatcagcatcagcgagttcaccgagatcatcgaggacaacgacatggaggacctggtggccgccgccctggtggaccacatccagttcggcgactgccacatcggccacagctacaacgccagcttcaccgtgaccaaccacagccaggtgaacctgatcagattcgagtggcccgtgagcgccaccatcgccttcagcccccagatgggccacctgcaccccggctgcgccaaggacatcgtggtgaccatgaagagcgacgtgcccatcaacctgaagaacatgagaatcagatgcaagctgagcagaatcatgttccagctgcccgccgaccaggtgcccgactgggacgacagaatgcacaccgtgaagtgggtggacgtgcccagaaacatgcccggcaccttcaccaccaagagaaaggtgatcgagaccgaccccgagcccgcccacagcgtgctggaggagaactaccaggagctgcagctgcagatcagcgccaacgtggacttcgccagctaccactgccaggccagagacgtgagattcaaggagaccctggtgtaccagaccagagtgttcgagttcgacgtgatcaacagcggcagagtgcagctggagttcagctgggtgagcgaggacaccagcaaggccgtgagcttcgccaagcccgaccaccagggcagcgcccagaaggaccagctgagccagggcaccatgcacaccggcagcaccctggacagcaccatggaccactgggccgagggcagcccccagcccttcagcgtggagcccagcagcggcatcgtgcccgtgggcaagatccagaagttcaaggtgaagttcagccccctggacatcggcgacttcgagagcaacctgttctgccagatccccaacctgccccccggcgagcagggccccgtgctggtggccaagggcagaagcaccctgcccatctgccacttcgacctgaaggacagcgactacatcagcggccaccagagaaaccccgagctgagaggcagcagcggcggcgccctggaccccaacaccagagtgatcgagttcaccaccgtgggcatcggcggcaagaacctgagaaccttcaccatcctgaaccccaccaacagcacctacagcttctgctggatcagcgaggagatcgagagcctgcagaaccccgccgccttcacctgcctgaccgagaagggcttcatccaccccgagaagaaggccgagatcgtgttccagttcacccccttccacctgggcatcaccgagagcagctggaccttcctgatccccgagcacaacatcaccgtgcccttcctgctggtgggcaagaccaccgagcccctgatcagcctgaacaagagccacctgaacttcagcagcctgctgatcggcagagaggccagagagaccgtgcagatcatcaacaaggaggagcagggcttcgacttcagcttccaggacaacagcagatacagcgagggcttcagcaacagcctgctggtgtgccccatggagggctggatcccccccctgagcagattccccatcgacatcttcttcacccccaagcaggagggcgacgtgaacttcaacctgatctgcaacgtggagaagaaggtgcaccccgtgaccctgaacgtgaaggccgagggctacaccatgaacgtggagatcaagtgcaaggacagaaccggcagcatcaccctgctgacccccaaccagaccaacatcatcaacttctacgaggtggagctgaacgagtgcgtgcagtgcgagttcaacttcatcaacaccggcaagttcaccttcagcttccaggcccagctgtgcggcagcaagaccctgctgcagtacctggagttcagccccatcgacagcaccgtggacgtgggccagagcgtgcacgccaccctgagcttccagcccctgaagaagtgcgtgctgaccgacctggagctgatcatcaagatcagccacggccccaccttcatgtgcaacatcagcggctgcgccgtgagccccgccatccacttcagcttcaccagctacaacttcggcacctgcttcatctaccaggccggcatgcccccctacaagcagaccctggtgatcaccaacaaggaggagacccccatgagcatcgactgcctgtacaccaacaccacccacctggaggtgaacagcagagtggacgtggtgaagcccggcaacaccctggagatccccatcaccttctaccccagagagagcatcaactaccaggagctgatccccttcgagatcaacggcctgagccagcagaccgtggagatcaagggcaagggcaccaagatgaagatcctggtgctggaccccgccaacagaatcgtgaagctgggcgccgtgctgcccggccaggtggtgaagagaaccgtgagcatcatgaacaacagcctggcccagctgaccttcaaccagagcatcctgttcaccatccccgagctgcaggagcccaaggtgctgaccctggcccccttccacaacatcaccctgaagcccaaggaggtgtgcaagctggaggtgatcttcgcccccaagaagagagtgccccccttcagcgaggaggtgttcatggagtgcatgggcctgctgagacccctgttcctgctgagcggctgctgccaggccctggagatcagcctggaccaggagcacatccccttcggccccgtggtgtaccagacccaggccaccagaagaatcctgatgatgaacaccggcgacgtgggcgccagattcaagtgggacatcaagaagttcgagccccacttcagcatcagccccgaggagggctacatcaccagcggcatggaggtgagcttcgaggtgacctaccaccccaccgaggtgggcaaggagagcctgtgcaagaacatcctgtgctacatccagggcggcagccccctgagcctgaccctgagcggcgtgtgcgtgggcccccccgccgtgaaggaggtggtgaacttcacctgccaggtgagaagcaagcacacccagaccatcctgctgagcaacagaaccaaccagacctggaacctgcaccccatcttcgagggcgagcactgggagggccccgagttcatcaccctggaggcccaccagcagaacaagccctacgagatcacctacagacccagaaccatgaacctggagaacagaaagcaccagggcaccctgttcttccccctgcccgacggcaccggctggctgtacgccctgcacggcaccagcgagctgcccaaggccgtggccaacatctacagagaggtgccctgcaagaccccctacaccgagctgctgcccatcaccaactggctgaacaagccccagagattcagagtgatcgtggagatcctgaagcccgagaagcccgacctgagcatcaccatgaagggcctggactacatcgacgtgctgagcggcagcaagaaggactacaagctgaacttcttcagccacaaggagggcacctacgccgccaaggtgatcttcagaaacgaggtgaccaacgagttcctgtactacaacgtgagcttcagagtgatccccagcggcatcatcaagaccatcgagatggtgacccccgtgagacaggtggccagcgccagcatcaagctggagaaccccctgccctacagcgtgaccttcagcaccgagtgcagaatgcccgacatcgccctgcccagccagttcgtggtgcccgccaacagcgagggcaccttcagcttcgagttccagcccctgaaggccggcgagaccttcggcagactgaccctgcacaacaccgacctgggctactaccagtacgagctgtacctgaaggccacccccgccctgcccgagaagcccgtgcacttccagaccgtgctgggcagcagccagatcatcctggtgaagttcatcaactacaccagacagagaaccgagtactactgcagaaccgactgcaccgacttccacgccgagaagctgatcaacgccgcccccggcggccagggcggcaccgaggccagcgtggaggtgctgttcgagcccagccacctgggcgagaccaagggcatcctgatcctgagcagcctggccggcggcgagtacatcatccccctgttcggcatggccctgccccccaagccccagggccccttcagcatcagagccggctacagcatcatcatccccttcaagaacgtgttctaccacatggtgaccttcagcatcatcgtggacaaccccgccttcaccatcagagccggcgagagcgtgagacccaagaagatcaacaacatcaccgtgagcttcgagggcaaccccagcggcagcaagacccccatcaccaccaagctgaccgtgagctgcccccccggcgagggcagcgagaccggcgtgaagtgggtgtactacctgaagggcatcaccctgtag

SEQ ID NO: 84894 - DNA, 3054 bp, synthetic construct
  misc_feature 1..3054: note = Description of Artificial Sequence: Synthetic coding sequence
  source 1..3054: mol_type = other DNA
atgaccagcagaagactggaggagagcatgggcgccgtgcagatgggcctggtgaacatgttcaagggcttccagagcaaggtgctgccccccctgagccccaaggtggtgaccgaggaggaggtgaacagaatgctgacccccagcgagttcctgaaggagatgagcctgaccaccgagcagagactggccaagaccagactgatgtgcagaccccagatcatcgagctgctggacatgggcgagaccacccaccagaagttcagcggcatcgacctggaccaggccctgttccagcccttccccagcgagatcatcttccagaactacaccccctgcgaggtgtacgaggtgcccctgatcctgagaaacaacgacaagatccccagactggtgaaggtggtggaggagagcagcccctacttcaaggtgatcagccccaaggacatcggccacaaggtggcccccggcgtgcccagcatcttcagaatcctgttcacccccgaggagaacaaggactacgcccacaccctgacctgcgtgaccgagagagagaagttcatcgtgcccatcaaggccagaggcgccagagccatcctggacttccccgacaagctgaacttcagcacctgccccgtgaagtacagcacccagaagatcctgctggtgagaaacatcggcaacaagaacgccgtgttccacatcaagacctgcagacccttcagcatcgagcccgccatcggcaccctgaacgtgggcgagagcatgcagctggaggtggagttcgagccccagagcgtgggcgaccacagcggcagactgatcgtgtgctacgacaccggcgagaaggtgttcgtgagcctgtacggcgccgccatcgacatgaacatcagactggacaagaacagcctgaccatcgagaagacctacatcagcctggccaaccagagaaccatcaccatccacaacagaagcaacatcatcgcccacttcctgtggaaggtgttcgccacccagcaggaggaggacagagagaagtacagagcctgcgacgacctgatcaaggaggagaaggacgagaccgacgagttcttcgaggagtgcatcaccgaccccctgctgagagagcacctgagcgtgctgagcagaaccttcgccaaccagagaagactggtgcagggcgacagcaagctgttcttcaacaacgtgttcaccgtggagcccctggagggcgacgtgtggcccaacagcagcgccgagatcaccgtgtacttcaaccccctggaggccaagctgtaccagcagaccatctactgcgacatcctgggcagagagatcagactgcccctgagaatcaagggcgagggcatgggccccaagatccacttcaacttcgagctgctggacatcggcaaggtgttcaccggcagcgcccactgctacgaggccatcctgtacaacaagggcagcatcgacgccctgttcaacatgaccccccccaccagcgccctgggcgcctgcttcgtgttcagccccaaggagggcatcatcgagcccagcggcgtgcaggccatccagatcagcttcagcagcaccatcctgggcaacttcgaggaggagttcctggtgaacgtgaacggcagccccgagcccgtgaagctgaccatcagaggctgcgtgatcggccccaccttccacttcaacgtgcccgccctgcacttcggcgacgtgagcttcggcttcccccacaccctgatctgcagcctgaacaacaccagcctgatccccatgacctacaagctgagaatccccggcgacggcctgggccacaagagcatcagctactgcgagcagcacgtggactacaagagacccagctggaccaaggaggagatcagcagcatgaagcccaaggagttcaccatcagccccgactgcggcaccatcagaccccagggcttcgccgccatcagagtgaccctgtgcagcaacaccgtgcagaagtacgagctggccctggtggtggacgtggagggcatcggcgaggaggtgctggccctgctgatcaccgccagatgcgtggtgcccgccctgcacctggtgaacaccgaggtggacttcggccactgcttcctgaagtacccctacgagaagaccctgcagctggccaaccaggacgacctgcccggcttctacgaggtgcagccccaggtgtgcgaggaggtgcccaccgtgctgttcagcagccccacccccagcggcgtgatcagccccagcagcaccatccacatccccctggtgctggagacccaggtgaccggcgagcacagaagcaccgtgtacatcagcatcttcggcagccaggacccccccctggtgtgccacctgaagagcgccggcgagggccccgtgatctacgtgcaccccaaccaggtggacttcggcaacatctacgtgctgaaggacagcagcagaatcctgaacctgtgcaaccagagcttcatccccgccttcttccaggcccacatggcccacaagaagagcctgtggaccatcgagcccaacgagggcatggtgccccccgagaccgacgtgcagctggccctgaccgccaacctgaacgacaccctgaccttcaaggactgcgtgatcctggacatcgagaacagcagcacctacagaatccccgtgcaggccagcggcaccggcagcaccatcgtgagcgacaagcccttcgcccccgagctgaacctgggcgcccacttcagcctggacacccactactaccacttcaagctgatcaacaagggcagaagaatccagcagctgttctggatgaacgacagcttcagaccccaggccaagctgagcaagaagggcagagtgaagaagggccacgcccacgtgcagccccagcccagcggcagccaggagcccagagacccccagagccccgtgttccacctgcaccccgccagcatggagctgtaccccggccaggccatcgacgtgatcctggagggctacagcgccacccccagagtgagaggctag

SEQ ID NO: 84895 - DNA, 2223 bp, synthetic construct
  misc_feature 1..2223: note = Description of Artificial Sequence: Synthetic coding sequence
  source 1..2223: mol_type = other DNA
atgaccagcagaagactggaggagagcatgggcgccgtgcagatgggcctggtgaacatgttcaagggcttccagagcaaggtgctgccccccctgagccccaaggtggtgaccgaggaggaggtgaacagaatgctgacccccagcgagttcctgaaggagatgagcctgaccaccgagcagagactggccaagaccagactgatgtgcagaccccagatcatcgagctgctggacatgggcgagaccacccaccagaagttcagcggcatcgacctggaccaggccctgttccagcccttccccagcgagatcatcttccagaactacaccccctgcgaggtgtacgaggtgcccctgatcctgagaaacaacgacaagatccccagactggtgaaggtggtggaggagagcagcccctacttcaaggtgatcagccccaaggacatcggccacaaggtggcccccggcgtgcccagcatcttcagaatcctgttcacccccgaggagaacaaggactacgcccacaccctgacctgcgtgaccgagagagagaagttcatcgtgcccatcaaggccagaggcgccagagccatcctggacttccccgacaagctgaacttcagcacctgccccgtgaagtacagcacccagaagatcctgctggtgagaaacatcggcaacaagaacgccgtgttccacatcaagacctgcagacccttcagcatcgagcccgccatcggcaccctgaacgtgggcgagagcatgcagctggaggtggagttcgagccccagagcgtgggcgaccacagcggcagactgatcgtgtgctacgacaccggcgagaaggtgttcgtgagcctgtacggcgccgccatcgacatgaacatcagactggacaagaacagcctgaccatcgagaagacctacatcagcctggccaaccagagaaccatcaccatccacaacagaagcaacatcatcgcccacttcctgtggaaggtgttcgccacccagcaggaggaggacagagagaagtacagagcctgcgacgacctgatcaaggaggagaaggacgagaccgacgagttcttcgaggagtgcatcaccgaccccctgctgagagagcacctgagcgtgctgagcagaaccttcgccaaccagagaagactggtgcagggcgacagcaagctgttcttcaacaacgtgttcaccgtggagcccctggagggcgacgtgtggcccaacagcagcgccgagatcaccgtgtacttcaaccccctggaggccaagctgtaccagcagaccatctactgcgacatcctgggcagagagatcagactgcccctgagaatcaagggcgagggcatgggccccaagatccacttcaacttcgagctgctggacatcggcaaggtgttcaccggcagcgcccactgctacgaggccatcctgtacaacaagggcagcatcgacgccctgttcaacatgaccccccccaccagcgccctgggcgcctgcttcgtgttcagccccaaggagggcatcatcgagcccagcggcgtgcaggccatccagatcagcttcagcagcaccatcctgggcaacttcgaggaggagttcctggtgaacgtgaacggcagccccgagcccgtgaagctgaccatcagaggctgcgtgatcggccccaccttccacttcaacgtgcccgccctgcacttcggcgacgtgagcttcgccacccaggagctgagagacccccaggtgctgatccccttccagagattcccccacaccctgatctgcagcctgaacaacaccagcctgatccccatgacctacaagctgagaatccccggcgacggcctgggccacaagagcatcagctactgcgagcagcacgtggactacaagagacccagctggaccaaggaggagatcagcagcatgaagcccaaggagttcaccatcagccccgactgcggcaccatcagaccccagggcttcgccgccatcagagtgaccctgtgcagcaacaccgtgcagaagtacgagctggccctggtggtggacgtggagggcatcggcgaggaggtgctggccctgctgatcaccgccagcgcccccgagctgtgcaacagaaaggtgatgctgagcgtgctgcagtggaagatccacagagccaagagaagcctgcccagagacaccgtggccgtgacctag

SEQ ID NO: 84896 - DNA, 3645 bp, synthetic construct
  misc_feature 1..3645: note = Description of Artificial Sequence: Synthetic coding sequence
  source 1..3645: mol_type = other DNA
atgaccagcagaagactggaggagagcatgggcgccgtgcagatgggcctggtgaacatgttcaagggcttccagagcaaggtgctgccccccctgagccccaaggtggtgaccgaggaggaggtgaacagaatgctgacccccagcgagttcctgaaggagatgagcctgaccaccgagcagagactggccaagaccagactgatgtgcagaccccagatcatcgagctgctggacatgggcgagaccacccaccagaagttcagcggcatcgacctggaccaggccctgttccagcccttccccagcgagatcatcttccagaactacaccccctgcgaggtgtacgaggtgcccctgatcctgagaaacaacgacaagatccccagactggtgaaggtggtggaggagagcagcccctacttcaaggtgatcagccccaaggacatcggccacaaggtggcccccggcgtgcccagcatcttcagaatcctgttcacccccgaggagaacaaggactacgcccacaccctgacctgcgtgaccgagagagagaagttcatcgtgcccatcaaggccagaggcgccagagccatcctggacttccccgacaagctgaacttcagcacctgccccgtgaagtacagcacccagaagatcctgctggtgagaaacatcggcaacaagaacgccgtgttccacatcaagacctgcagacccttcagcatcgagcccgccatcggcaccctgaacgtgggcgagagcatgcagctggaggtggagttcgagccccagagcgtgggcgaccacagcggcagactgatcgtgtgctacgacaccggcgagaaggtgttcgtgagcctgtacggcgccgccatcgacatgaacatcagactggacaagaacagcctgaccatcgagaagacctacatcagcctggccaaccagagaaccatcaccatccacaacagaagcaacatcatcgcccacttcctgtggaaggtgttcgccacccagcaggaggaggacagagagaagtacagagcctgcgacgacctgatcaaggaggagaaggacgagaccgacgagttcttcgaggagtgcatcaccgaccccctgctgagagagcacctgagcgtgctgagcagaaccttcgccaaccagagaagactggtgcagggcgacagcaagctgttcttcaacaacgtgttcaccgtggagcccctggagggcgacgtgtggcccaacagcagcgccgagatcaccgtgtacttcaaccccctggaggccaagctgtaccagcagaccatctactgcgacatcctgggcagagagatcagactgcccctgagaatcaagggcgagggcatgggccccaagatccacttcaacttcgagctgctggacatcggcaaggtgttcaccggcagcgcccactgctacgaggccatcctgtacaacaagggcagcatcgacgccctgttcaacatgaccccccccaccagcgccctgggcgcctgcttcgtgttcagccccaaggagggcatcatcgagcccagcggcgtgcaggccatccagatcagcttcagcagcaccatcctgggcaacttcgaggaggagttcctggtgaacgtgaacggcagccccgagcccgtgaagctgaccatcagaggctgcgtgatcggccccaccttccacttcaacgtgcccgccctgcacttcggcgacgtgagcttcggcttcccccacaccctgatctgcagcctgaacaacaccagcctgatccccatgacctacaagctgagaatccccggcgacggcctgggccacaagagcatcagctactgcgagcagcacgtggactacaagagacccagctggaccaaggaggagatcagcagcatgaagcccaaggagttcaccatcagccccgactgcggcaccatcagaccccagggcttcgccgccatcagagtgaccctgtgcagcaacaccgtgcagaagtacgagctggccctggtggtggacgtggagggcatcggcgaggaggtgctggccctgctgatcaccgccagatgcgtggtgcccgccctgcacctggtgaacaccgaggtggacttcggccactgcttcctgaagtacccctacgagaagaccctgcagctggccaaccaggacgacctgcccggcttctacgaggtgcagccccaggtgtgcgaggaggtgcccaccgtgctgttcagcagccccacccccagcggcgtgatcagccccagcagcaccatccacatccccctggtgctggagacccaggtgaccggcgagcacagaagcaccgtgtacatcagcatcttcggcagccaggacccccccctggtgtgccacctgaagagcgccggcgagggccccgtgatctacgtgcaccccaaccaggtggacttcggcaacatctacgtgctgaaggacagcagcagaatcctgaacctgtgcaaccagagcttcatccccgccttcttccaggcccacatggcccacaagaagagcctgtggaccatcgagcccaacgagggcatggtgccccccgagaccgacgtgcagctggccctgaccgccaacctgaacgacaccctgaccttcaaggactgcgtgatcctggacatcgagaacagcagcacctacagaatccccgtgcaggccagcggcaccggcagcaccatcgtgagcgacaagcccttcgcccccgagctgaacctgggcgcccacttcagcctggacacccactactaccacttcaagctgatcaacaagggcagaagaatccagcagctgttctggatgaacgacagcttcagaccccaggccaagctgagcaagaagggcagagtgaagaagggccacgcccacgtgcagccccagcccagcggcagccaggagcccagagacccccagagccccgtgttccacctgcaccccgccagcatggagctgtaccccggccaggccatcgacgtgatcctggagggctacagcgccacccccagaaagcccaacagcatcctgaagcccgactaccagcccctggccatcaagaacatcagcaccctgcccgtgaacctgctgctgagcaccagcggccccttcttcatctgcgagaccgacaagagcctgctgcccgccacccccgagcccatcaagctggagatcgacgaggagaagaacctgctgatcaagttcgaccccagctacagaaacgacctgaacaactgggtggccgaggagatcctggccatcaagtacgtggagcacccccagatcgacagcctggacctgagaggcgaggtgcactaccccaacctgagcttcgagaccaaggagctggacttcggctgcatcctgaacgacaccgagctgatcagatacgtgaccatcaccaactgcagccccctggtggtgaagttcagatggttcttcctggtgaacgacgaggagaaccagatcagattcgtgaccctgcccaagaagccctacagcgcccccgtgagccagatggagagcatccccgccaccagcgaggccgccagcccccccgccatcctggtgaccgtggagagccccgagatggacctgaacgacttcgtgaagtag

SEQ ID NO: 84897 - DNA, 3054 bp, synthetic construct; identical to SEQ ID NO: 84894
  misc_feature 1..3054: note = Description of Artificial Sequence: Synthetic coding sequence
  source 1..3054: mol_type = other DNA

SEQ ID NO: 84898 - DNA, 822 bp, synthetic construct
  misc_feature 1..822: note = Description of Artificial Sequence: Synthetic coding sequence
  source 1..822: mol_type = other DNA
atggccacctgggacgagaaggccgtgaccagaagagccaaggtggcccccgccgagagaatgagcaagttcctgagacacttcaccgtggtgggcgacgactaccacgcctggaacatcaactacaagaagtgggagaacgaggaggaggaggaggaggaggagcagcccccccccacccccgtgagcggcgaggagggcagagccgccgcccccgacgtggcccccgcccccggccccgcccccagagcccccctggacttcagaggcatgctgagaaagctgttcagcagccacagattccaggtgatcatcatctgcctggtggtgctggacgccctgctggtgctggccgagctgatcctggacctgaagatcatccagcccgacaagaacaactacgccgccatggtgttccactacatgagcatcaccatcctggtgttcttcatgatggagatcatcttcaagctgttcgtgttcagactggagttcttccaccacaagttcgagatcctggacgccgtggtggtggtggtgagcttcatcctggacatcgtgctgctgttccaggagcaccagttcgaggccctgggcctgctgatcctgctgagactgtggagagtggccagaatcatcaacggcatcatcatcagcgtgaagaccagaagcgagagacagctgctgagactgaagcagatgaacgtgcagctggccgccaagatccagcacctggagttcagctgcagcgagaaggagcaggagatcgagagactgaacaagctgctgagacagcacggcctgctgggcgaggtgaactag

SEQ ID NO: 84899 - DNA, 822 bp, synthetic construct; identical to SEQ ID NO: 84898
  misc_feature 1..822: note = Description of Artificial Sequence: Synthetic coding sequence
  source 1..822: mol_type = other DNA

SEQ ID NO: 84900 - DNA, 237 bp, synthetic construct
  misc_feature 1..237: note = Description of Artificial Sequence: Synthetic coding sequence
  source 1..237: mol_type = other DNA
atggccacctgggacgagaaggccgtgaccagaagagccaaggtggcccccgccgagagaatgagcaagttcctgagacacttcaccgtggtgggcgacgactaccacgcctggaacatcaactacaagaagtgggagaacgaggaggaggaggaggaggaggagcagcccccccccacccccgtgagcggcgaggagggcagagccgccgcccccgacgtggcccccgccccctag

SEQ ID NO: 84901 - DNA, 900 bp, synthetic construct
  misc_feature 1..900: note = Description of Artificial Sequence: Synthetic coding sequence
  source 1..900: mol_type = other DNA
atggaggagctgctgcccgacggccagatctgggccaacatggaccccgaggagagaatgctggccgccgccaccgccttcacccacatctgcgccggccagggcgagggcgacgtgagaagagaggcccagagcatccagtacgacccctacagcaaggccagcgtggcccccggcaagagacccgccctgcccgtgcagctgcagtacccccacgtggagagcaacgtgcccagcgagaccgtgagcgaggccagccagagactgagaaagcccgtgatgaagagaaaggtgctgagaagaaagcccgacggcgaggtgctggtgaccgacgagagcatcatcagcgagagcgagagcggcaccgagaacgaccaggacctgtgggacctgagacagagactgatgaacgtgcagttccaggaggacaaggagagcagcttcgacgtgagccagaagttcaacctgccccacgagtaccagggcatcagccaggaccagctgatctgcagcctgcagagagagggcatgggcagccccgcctacgagcaggacctgatcgtggccagcagacccaagagcttcatcctgcccaagctggaccagctgagcagaaacagaggcaagaccgacagagtggccagatacttcgagtacaagagagactgggacagcatcagactgcccggcgaggaccacagaaaggagctgagatggggcgtgagagagcagatgctgtgcagagccgagccccagagcaagccccagcacatctacgtgcccaacaactacctggtgcccaccgagaagaagagaagcgccctgagatggggcgtgagatgcgacctggccaacggcgtgatccccagaaagctgcccttccccctgagccccagctag

SEQ ID NO: 84902 - DNA, 900 bp, synthetic construct; identical to SEQ ID NO: 84901
  misc_feature 1..900: note = Description of Artificial Sequence: Synthetic coding sequence
  source 1..900: mol_type = other DNA

SEQ ID NO: 84903 - DNA, 900 bp, synthetic construct; identical to SEQ ID NO: 84901
  misc_feature 1..900: note = Description of Artificial Sequence: Synthetic coding sequence
  source 1..900: mol_type = other DNA

SEQ ID NO: 84904 - DNA, 1113 bp, synthetic construct
  misc_feature 1..1113: note = Description of Artificial Sequence: Synthetic coding sequence
  source 1..1113: mol_type = other DNA
atgctgcccagactgatctgcatcaacgactacgagcagcacgccaagagcgtgctgcccaagagcatctacgactactacagaagcggcgccaacgacgaggagaccctggccgacaacatcgccgccttcagcagatggaagctgtaccccagaatgctgagaaacgtggccgagaccgacctgagcaccagcgtgctgggccagagagtgagcatgcccatctgcgtgggcgccaccgccatgcagagaatggcccacgtggacggcgagctggccaccgtgagagcctgccagagcctgggcaccggcatgatgctgagcagctgggccaccagcagcatcgaggaggtggccgaggccggccccgaggccctgagatggctgcagctgtacatctacaaggacagagaggtgaccaagaagctggtgagacaggccgagaagatgggctacaaggccatcttcgtgaccgtggacaccccctacctgggcaacagactggacgacgtgagaaacagattcaagctgcccccccagctgagaatgaagaacttcgagaccagcaccctgagcttcagccccgaggagaacttcggcgacgacagcggcctggccgcctacgtggccaaggccatcgaccccagcatcagctgggaggacatcaagtggctgagaagactgaccagcctgcccatcgtggccaagggcatcctgagaggcgacgacgccagagaggccgtgaagcacggcctgaacggcatcctggtgagcaaccacggcgccagacagctggacggcgtgcccgccaccatcgacgtgctgcccgagatcgtggaggccgtggagggcaaggtggaggtgttcctggacggcggcgtgagaaagggcaccgacgtgctgaaggccctggccctgggcgccaaggccgtgttcgtgggcagacccatcgtgtggggcctggccttccagggcgagaagggcgtgcaggacgtgctggagatcctgaaggaggagttcagactggccatggccctgagcggctgccagaacgtgaaggtgatcgacaagaccctggtgagaaagaaccccctggccgtgagcaagatctag

SEQ ID NO: 84905 - DNA, 1056 bp, synthetic construct
  misc_feature 1..1056: note = Description of Artificial Sequence: Synthetic coding sequence
  source 1..1056: mol_type = other DNA
atgagcctggtgtgcctgaccgacttccaggcccacgccagagagcagctgagcaagagcaccagagacttcatcgagggcggcgccgacgacagcatcaccagagacgacaacatcgccgccttcaagagaatcagactgagacccagatacctgagagacgtgagcgaggtggacaccagaaccaccatccagggcgaggagatcagcgcccccatctgcatcgcccccaccggcttccactgcctggtgtggcccgacggcgagatgagcaccgccagagccgcccaggccgccggcatctgctacatcaccagcaccttcgccagctgcagcctggaggacatcgtgatcgccgcccccgagggcctgagatggttccagctgtacgtgcaccccgacctgcagctgaacaagcagctgatccagagagtggagagcctgggcttcaaggccctggtgatcaccctggacacccccgtgtgcggcaacagaagacacgacatcagaaaccagctgagaagaaacctgaccctgaccgacctgcagagccccaagaagggcaacgccatcccctacttccagatgacccccatcagcaccagcctgtgctggaacgacctgagctggttccagagcatcaccagactgcccatcatcctgaagggcatcctgaccaaggaggacgccgagctggccgtgaagcacaacgtgcagggcatcatcgtgagcaaccacggcggcagacagctggacgaggtgctggccagcatcgacgccctgaccgaggtggtggccgccgtgaagggcaagatcgaggtgtacctggacggcggcgtgagaaccggcaacgacgtgctgaaggccctggccctgggcgccaagtgcatcttcctgggcagacccatcctgtggggcctggcctgcaagggcgagcacggcgtgaaggaggtgctgaacatcctgaccaacgagttccacaccagcatggccctgaccggctgcagaagcgtggccgagatcaacagaaacctggtgcagttcagcagactgtag

SEQ ID NO: 84906 - DNA, 1095 bp, synthetic construct
  misc_feature 1..1095: note = Description of Artificial Sequence: Synthetic coding sequence
  source 1..1095: mol_type = other DNA
atggaggacaagatgtggagcgagtgcgagggccccgagatgagcctggtgtgcctgaccgacttccaggcccacgccagagagcagctgagcaagagcaccagagacttcatcgagggcggcgccgacgacagcatcaccagagacgacaacatcgccgccttcaagagaatcagactgagacccagatacctgagagacgtgagcgaggtggacaccagaaccaccatccagggcgaggagatcagcgcccccatctgcatcgcccccaccggcttccactgcctggtgtggcccgacggcgagatgagcaccgccagagccgcccaggccgccggcatctgctacatcaccagcaccttcgccagctgcagcctggaggacatcgtgatcgccgcccccgagggcctgagatggttccagctgtacgtgcaccccgacctgcagctgaacaagcagctgatccagagagtggagagcctgggcttcaaggccctggtgatcaccctggacacccccgtgtgcggcaacagaagacacgacatcagaaaccagctgagaagaaacctgaccctgaccgacctgcagagccccaagaagggcaacgccatcccctacttccagatgacccccatcagcaccagcctgtgctggaacgacctgagctggttccagagcatcaccagactgcccatcatcctgaagggcatcctgaccaaggaggacgccgagctggccgtgaagcacaacgtgcagggcatcatcgtgagcaaccacggcggcagacagctggacgaggtgctggccagcatcgacgccctgaccgaggtggtggccgccgtgaagggcaagatcgaggtgtacctggacggcggcgtgagaaccggcaacgacgtgctgaaggccctggccctgggcgccaagtgcatcttcctgggcagacccatcctgtggggcctggcctgcaagggcgagcacggcgtgaaggaggtgctgaacatcctgaccaacgagttccacaccagcatggccctgaccggctgcagaagcgtggccgagatcaacagaaacctggtgcagttcagcagactgtag

SEQ ID NO: 84907 - DNA, 561 bp, synthetic construct
  misc_feature 1..561: note = Description of Artificial Sequence: Synthetic coding sequence
  source 1..561: mol_type = other DNA
atgagcctggtgtgcctgaccgacttccaggcccacgccagagagcagctgagcaagagcaccagagacttcatcgagggcggcgccgacgacagcatcaccagagacgacaacatcgccgccttcaagagaatcagactgagacccagatacctgagagacgtgagcgaggtggacaccagaaccaccatccagggcgaggagatcagcgcccccatctgcatcgcccccaccggcttccactgcctggtgtggcccgacggcgagatgagcaccgccagagcccccgagggcctgagatggttccagctgtacgtgcaccccgacctgcagctgaacaagcagctgatccagagagtggagagcctgggcttcaaggccctggtgatcaccctggacacccccgtgtgcggcaacagaagacacgacatcagaaaccagctgagaagaaacctgaccctgaccgacctgcagagccccaagaagggcaacgccatcccctacttccagatgacccccatcagcaccagcctgtgctggaacgacctgagctggttctag

SEQ ID NO: 84908 - DNA, 2292 bp, synthetic construct
  misc_feature 1..2292: note = Description of Artificial Sequence: Synthetic coding sequence
  source 1..2292: mol_type = other DNA
atggtggcctgcagagccatcggcatcctgagcagattcagcgccttcagaatcctgagaagcagaggctacatctgcagaaacttcaccggcagcagcgccctgctgaccagaacccacatcaactacggcgtgaagggcgacgtggccgtggtgagaatcaacagccccaacagcaaggtgaacaccctgagcaaggagctgcacagcgagttcagcgaggtgatgaacgagatctgggccagcgaccagatcagaagcgccgtgctgatcagcagcaagcccggctgcttcatcgccggcgccgacatcaacatgctggccgcctgcaagaccctgcaggaggtgacccagctgagccaggaggcccagagaatcgtggagaagctggagaagagcaccaagcccatcgtggccgccatcaacggcagctgcctgggcggcggcctggaggtggccatcagctgccagtacagaatcgccaccaaggacagaaagaccgtgctgggcacccccgaggtgctgctgggcgccctgcccggcgccggcggcacccagagactgcccaagatggtgggcgtgcccgccgccctggacatgatgctgaccggcagaagcatcagagccgacagagccaagaagatgggcctggtggaccagctggtggagcccctgggccccggcctgaagccccccgaggagagaaccatcgagtacctggaggaggtggccatcaccttcgccaagggcctggccgacaagaagatcagccccaagagagacaagggcctggtggagaagctgaccgcctacgccatgaccatccccttcgtgagacagcaggtgtacaagaaggtggaggagaaggtgagaaagcagaccaagggcctgtaccccgcccccctgaagatcatcgacgtggtgaagaccggcatcgagcagggcagcgacgccggctacctgtgcgagagccagaagttcggcgagctggtgatgaccaaggagagcaaggccctgatgggcctgtaccacggccaggtgctgtgcaagaagaacaagttcggcgccccccagaaggacgtgaagcacctggccatcctgggcgccggcctgatgggcgccggcatcgcccaggtgagcgtggacaagggcctgaagaccatcctgaaggacgccaccctgaccgccctggacagaggccagcagcaggtgttcaagggcctgaacgacaaggtgaagaagaaggccctgaccagcttcgagagagacagcatcttcagcaacctgaccggccagctggactaccagggcttcgagaaggccgacatggtgatcgaggccgtgttcgaggacctgagcctgaagcacagagtgctgaaggaggtggaggccgtgatccccgaccactgcatcttcgccagcaacaccagcgccctgcccatcagcgagatcgccgccgtgagcaagagacccgagaaggtgatcggcatgcactacttcagccccgtggacaagatgcagctgctggagatcatcaccaccgagaagaccagcaaggacaccagcgccagcgccgtggccgtgggcctgaagcagggcaaggtgatcatcgtggtgaaggacggccccggcttctacaccaccagatgcctggcccccatgatgagcgaggtgatcagaatcctgcaggagggcgtggaccccaagaagctggacagcctgaccaccagcttcggcttccccgtgggcgccgccaccctggtggacgaggtgggcgtggacgtggccaagcacgtggccgaggacctgggcaaggtgttcggcgagagattcggcggcggcaaccccgagctgctgacccagatggtgagcaagggcttcctgggcagaaagagcggcaagggcttctacatctaccaggagggcgtgaagagaaaggacctgaacagcgacatggacagcatcctggccagcctgaagctgccccccaagagcgaggtgagcagcgacgaggacatccagttcagactggtgaccagattcgtgaacgaggccgtgatgtgcctgcaggagggcatcctggccacccccgccgagggcgacatcggcgccgtgttcggcctgggcttccccccctgcctgggcggccccttcagattcgtggacctgtacggcgcccagaagatcgtggacagactgaagaagtacgaggccgcctacggcaagcagttcaccccctgccagctgctggccgaccacgccaacagccccaacaagaagttctaccagtag

SEQ ID NO: 84909 - DNA, 783 bp, synthetic construct
  misc_feature 1..783: note = Description of Artificial Sequence: Synthetic coding sequence
  source 1..783: mol_type = other DNA
atggagagcaagggcatgtggcagctgttcgagctgaccctgcccatccagagcatgctggccgcctgcaagaccctgcaggaggtgacccagctgagccaggaggcccagagaatcgtggagaagctggagaagagcaccaagcccatcgtggccgccatcaacggcagctgcctgggcggcggcctggaggtggccatcagctgccagtacagaatcgccaccaaggacagaaagaccgtgctgggcacccccgaggtgctgctgggcgccctgcccggcgccggcggcacccagagactgcccaagatggtgggcgtgcccgccgccctggacatgatgctgaccggcagaagcatcagagccgacagagccaagaagatgggcctggtggaccagctggtggagcccctgggccccggcctgaagccccccgaggagagaaccatcgagtacctggaggaggtggccatcaccttcgccaagggcctggccgacaagaagatcagccccaagagagacaagggcctggtggagaagctgaccgcctacgccatgaccatccccttcgtgagacagcaggtgtacaagaaggtggaggagaaggtgagaaagcagaccaagggcctgtaccccgcccccctgaagatcatcgacgtggtgaagaccggcatcgagcagggcagcgacgccggctacctgtgcgagagccaggtgaacctgttccccttcaacgtgctgctgagcgtgaagggcaagctgaagatccagagcagcgtgtag

SEQ ID NO: 84910 - DNA, 1425 bp, synthetic construct
  misc_feature 1..1425: note = Description of Artificial Sequence: Synthetic coding sequence
  source 1..1425: mol_type = other DNA
atgaccatcctgacctaccccttcaagaacctgcccaccgccagcaagtgggccctgagattcagcatcagacccctgagctgcagcagccagctgagagccgcccccgccgtgcagaccaagaccaagaagaccctggccaagcccaacatcagaaacgtggtggtggtggacggcgtgagaacccccttcctgctgagcggcaccagctacaaggacctgatgccccacgacctggccagagccgccctgaccggcctgctgcacagaaccagcgtgcccaaggaggtggtggactacatcatcttcggcaccgtgatccaggaggtgaagaccagcaacgtggccagagaggccgccctgggcgccggcttcagcgacaagacccccgcccacaccgtgaccatggcctgcatcagcgccaaccaggccatgaccaccggcgtgggcctgatcgccagcggccagtgcgacgtgatcgtggccggcggcgtggagctgatgagcgacgtgcccatcagacacagcagaaagatgagaaagctgatgctggacctgaacaaggccaagagcatgggccagagactgagcctgatcagcaagttcagattcaacttcctggcccccgagctgcccgccgtgagcgagttcagcaccagcgagaccatgggccacagcgccgacagactggccgccgccttcgccgtgagcagactggagcaggacgagtacgccctgagaagccacagcctggccaagaaggcccaggacgagggcctgctgagcgacgtggtgcccttcaaggtgcccggcaaggacaccgtgaccaaggacaacggcatcagacccagcagcctggagcagatggccaagctgaagcccgccttcatcaagccctacggcaccgtgaccgccgccaacagcagcttcctgaccgacggcgccagcgccatgctgatcatggccgaggagaaggccctggccatgggctacaagcccaaggcctacctgagagacttcatgtacgtgagccaggaccccaaggaccagctgctgctgggccccacctacgccacccccaaggtgctggagaaggccggcctgaccatgaacgacatcgacgccttcgagttccacgaggccttcagcggccagatcctggccaacttcaaggccatggacagcgactggttcgccgagaactacatgggcagaaagaccaaggtgggcctgccccccctggagaagttcaacaactggggcggcagcctgagcctgggccaccccttcggcgccaccggctgcagactggtgatggccgccgccaacagactgagaaaggagggcggccagtacggcctggtggccgcctgcgccgccggcggccagggccacgccatgatcgtggaggcctaccccaagtag

SEQ ID NO: 84911 - DNA, 258 bp, synthetic construct
  misc_feature 1..258: note = Description of Artificial Sequence: Synthetic coding sequence
  source 1..258: mol_type = other DNA
atgaccatcctgacctaccccttcaagaacctgcccaccgccagcaagtgggccctgagattcagcatcagacccctgagctgcagcagccagctgagagccgcccccgccgtgcagaccaagaccaagaagaccctggccaagcccaacatcagaaacgtggtggtggtggacggcgtgagaacccccttcctgctgagcggcaccagctacaaggacctgatgccccacgacctggccagagccgccctgacctag

SEQ ID NO: 84912 - DNA, 531 bp, synthetic construct
  misc_feature 1..531: note = Description of Artificial Sequence: Synthetic coding sequence
  source 1..531: mol_type = other DNA
atgaccatcctgacctaccccttcaagaacctgcccaccgccagcaagtgggccctgagattcagcatcagacccctgagctgcagcagccagctgagagccgcccccgccgtgcagaccaagaccaagaagaccctggccaagcccaacatcagaaacgtggtggtggtggacggcgtgagaacccccttcctgctgagcggcaccagctacaaggacctgatgccccacgacctggccagagccgccctgaccggcctgctgcacagaaccagcgtgcccaaggaggtggtggactacatcatcttcggcaccgtgatccaggaggtgaagaccagcaacgtggccagagaggccgccctgggcgccggcttcagcgacaagacccccgcccacaccgtgaccatggcctgcatcagcgccaaccaggccatgaccaccggcgtgggcctgatcgccagcggccagtgcgacgtgatcgtggccggcggcgtggagctgatgagcgacgtgcccatcagacacagctag

SEQ ID NO: 84913 - DNA, 453 bp, synthetic construct
  misc_feature 1..453: note = Description of Artificial Sequence: Synthetic coding sequence
  source 1..453: mol_type = other DNA
atgaccatcctgacctaccccttcaagaacctgcccaccgccagcaagtgggccctgagattcagcatcagacccctgagctgcagcagccagctgagagccgcccccgccgtgcagaccaagaccaagaagaccctggccaagcccaacatcagaaacgtggtggtggtggacggcgtgagaacccccttcctgctgagcggcaccagctacaaggacctgatgccccacgacctggccagagccgccctgaccggcctgctgcacagaaccagcgtgcccaaggaggtggtggactacatcatcttcggcaccgtgatccaggaggtgaagaccagcaacgtggccagagaggccgccctgggcgccggcttcagcgacaagacccccgcccacaccgtgaccatggcctgcatcagcgccaaccaggccatgaccaccggcgtgggctag

SEQ ID NO: 84914 - DNA, 1380 bp, synthetic construct
  misc_feature 1..1380: note = Description of Artificial Sequence: Synthetic coding sequence
  source 1..1380: mol_type = other DNA
atgaccatcctgacctaccccttcaagaacctgcccaccgccagcaagtgggccctgagattcagcatcagacccctgagctgcagcagccagctgagagccgcccccgccgtgcagaccaagaccaagaagaccctggccaagcccaacatcagaaacgtggtggtggtggacggcgtgagaacccccttcctgctgagcggcaccagcggcctgctgcacagaaccagcgtgcccaaggaggtggtggactacatcatcttcggcaccgtgatccaggaggtgaagaccagcaacgtggccagagaggccgccctgggcgccggcttcagcgacaagacccccgcccacaccgtgaccatggcctgcatcagcgccaaccaggccatgaccaccggcgtgggcctgatcgccagcggccagtgcgacgtgatcgtggccggcggcgtggagctgatgagcgacgtgcccatcagacacagcagaaagatgagaaagctgatgctggacctgaacaaggccaagagcatgggccagagactgagcctgatcagcaagttcagattcaacttcctggcccccgagctgcccgccgtgagcgagttcagcaccagcgagaccatgggccacagcgccgacagactggccgccgccttcgccgtgagcagactggagcaggacgagtacgccctgagaagccacagcctggccaagaaggcccaggacgagggcctgctgagcgacgtggtgcccttcaaggtgcccggcaaggacaccgtgaccaaggacaacggcatcagacccagcagcctggagcagatggccaagctgaagcccgccttcatcaagccctacggcaccgtgaccgccgccaacagcagcttcctgaccgacggcgccagcgccatgctgatcatggccgaggagaaggccctggccatgggctacaagcccaaggcctacctgagagacttcatgtacgtgagccaggaccccaaggaccagctgctgctgggccccacctacgccacccccaaggtgctggagaaggccggcctgaccatgaacgacatcgacgccttcgagttccacgaggccttcagcggccagatcctggccaacttcaaggccatggacagcgactggttcgccgagaactacatgggcagaaagaccaaggtgggcctgccccccctggagaagttcaacaactggggcggcagcctgagcctgggccaccccttcggcgccaccggctgcagactggtgatggccgccgccaacagactgagaaaggagggcggccagtacggcctggtggccgcctgcgccgccggcggccagggccacgccatgatcgtggaggcctaccccaagtag

SEQ ID NO: 84915 - DNA, 1359 bp, synthetic construct
  misc_feature 1..1359: note = Description of Artificial Sequence: Synthetic coding sequence
  source 1..1359: mol_type = other DNA
atgaccctggtgagcggctggctgctgtacggctggatcatcgccgtgcagaccaagaccaagaagaccctggccaagcccaacatcagaaacgtggtggtggtggacggcgtgagaacccccttcctgctgagcggcaccagctacaaggacctgatgccccacgacctggccagagccgccctgaccggcctgctgcacagaaccagcgtgcccaaggaggtggtggactacatcatcttcggcaccgtgatccaggaggtgaagaccagcaacgtggccagagaggccgccctgggcgccggcttcagcgacaagacccccgcccacaccgtgaccatggcctgcatcagcgccaaccaggccatgaccaccggcgtgggcctgatcgccagcggccagtgcgacgtgatcgtggccggcggcgtggagctgatgagcgacgtgcccatcagacacagcagaaagatgagaaagctgatgctggacctgaacaaggccaagagcatgggccagagactgagcctgatcagcaagttcagattcaacttcctggcccccgagctgcccgccgtgagcgagttcagcaccagcgagaccatgggccacagcgccgacagactggccgccgccttcgccgtgagcagactggagcaggacgagtacgccctgagaagccacagcctggccaagaaggcccaggacgagggcctgctgagcgacgtggtgcccttcaaggtgcccggcaaggacaccgtgaccaaggacaacggcatcagacccagcagcctggagcagatggccaagctgaagcccgccttcatcaagccctacggcaccgtgaccgccgccaacagcagcttcctgaccgacggcgccagcgccatgctgatcatggccgaggagaaggccctggccatgggctacaagcccaaggcctacctgagagacttcatgtacgtgagccaggaccccaaggaccagctgctgctgggccccacctacgccacccccaaggtgctggagaaggccggcctgaccatgaacgacatcgacgccttcgagttccacgaggccttcagcggccagatcctggccaacttcaaggccatggacagcgactggttcgccgagaactacatgggcagaaagaccaaggtgggcctgccccccctggagaagttcaacaactggggcggcagcctgagcctgggccaccccttcggcgccaccggctgcagactggtgatggccgccgccaacagactgagaaaggagggcggccagtacggcctggtggccgcctgcgccgccggcggccagggccacgccatgatcgtggaggcctaccccaagtag

SEQ ID NO: 84916 - DNA, 783 bp, synthetic construct
  misc_feature 1..783: note = Description of Artificial Sequence: Synthetic coding sequence
  source 1..783: mol_type = other DNA
atgaaggtggaggtgctgcccgccctgaccgacaactacatgtacctggtgatcgacgacgagaccaaggaggccgccatcgtggaccccgtgcagccccagaaggtggtggacgccgccagaaagcacggcgtgaagctgaccaccgtgctgaccacccaccaccactgggaccacgccggcggcaacgagaagctggtgaagctggagagcggcctgaaggtgtacggcggcgacgacagaatcggcgccctgacccacaagatcacccacctgagcaccctgcaggtgggcagcctgaacgtgaagtgcctggccaccccctgccacaccagcggccacatctgctacttcgtgagcaagcccggcggcagcgagccccccgccgtgttcaccggcgacaccctgttcgtggccggctgcggcaagttctacgagggcaccgccgacgagatgtgcaaggccctgctggaggtgctgggcagactgccccccgacaccagagtgtactgcggccacgagtacaccatcaacaacctgaagttcgccagacacgtggagcccggcaacgccgccatcagagagaagctggcctgggccaaggagaagtacagcatcggcgagcccaccgtgcccagcaccctggccgaggagttcacctacaaccccttcatgagagtgagagagaagaccgtgcagcagcacgccggcgagaccgaccccgtgaccaccatgagagccgtgagaagagagaaggaccagttcaagatgcccagagactag

SEQ ID NO: 84917 - DNA, 927 bp, synthetic construct
  misc_feature 1..927: note = Description of Artificial Sequence: Synthetic coding sequence
  source 1..927: mol_type = other DNA
atggtggtgggcagaggcctgctgggcagaagaagcctggccgccctgggcgccgcctgcgccagaagaggcctgggccccgccctgctgggcgtgttctgccacaccgacctgagaaagaacctgaccgtggacgagggcaccatgaaggtggaggtgctgcccgccctgaccgacaactacatgtacctggtgatcgacgacgagaccaaggaggccgccatcgtggaccccgtgcagccccagaaggtggtggacgccgccagaaagcacggcgtgaagctgaccaccgtgctgaccacccaccaccactgggaccacgccggcggcaacgagaagctggtgaagctggagagcggcctgaaggtgtacggcggcgacgacagaatcggcgccctgacccacaagatcacccacctgagcaccctgcaggtgggcagcctgaacgtgaagtgcctggccaccccctgccacaccagcggccacatctgctacttcgtgagcaagcccggcggcagcgagccccccgccgtgttcaccggcgacaccctgttcgtggccggctgcggcaagttctacgagggcaccgccgacgagatgtgcaaggccctgctggaggtgctgggcagactgccccccgacaccagagtgtactgcggccacgagtacaccatcaacaacctgaagttcgccagacacgtggagcccggcaacgccgccatcagagagaagctggcctgggccaaggagaagtacagcatcggcgagcccaccgtgcccagcaccctggccgaggagttcacctacaaccccttcatgagagtgagagagaagaccgtgcagcagcacgccggcgagaccgaccccgtgaccaccatgagagccgtgagaagagagaaggaccagttcaagatgcccagagactag

SEQ ID NO: 84918 - DNA, 711 bp, synthetic construct
  misc_feature 1..711: note = Description of Artificial Sequence: Synthetic coding sequence
  source 1..711: mol_type = other DNA
atggtggtgggcagaggcctgctgggcagaagaagcctggccgccctgggcgccgcctgcgccagaagaggcctgggccccgccctgctgggcgtgttctgccacaccgacctgagaaagaacctgaccgtggacgagggcaccatgaaggtggaggtgctgcccgccctgaccgacaactacatgtacctggtgatcgacgacgagaccaaggaggccgccatcgtggaccccgtgcagccccagaaggtggtggacgccgccagaaagcacggcgtgaagctgaccaccgtgctgaccacccaccaccactgggaccacgccggcggcaacgagaagctggtgaagctggagagcggcctgaaggtgtacggcggcgacgacagaatcggcgccctgacccacaagatcacccacctgagcaccctgcaggtgaccccctgcctgtggctggccgccggcagcagcatgaagggcctgagaatgagatgcgtgaagctgtgctggagaagctgggccggcagccccagaacccaggagagcaccgtggccaccagcacccccagcaccaccagcagcctgcacgccacctggagccccgccatgccccccagcggcagaagctggcccggccccagaagaagcaccgccagcggcagcccccagtgccaccccccctggcagagaagcctgcccaccacccccagctag

SEQ ID NO: 84919 - DNA, 1128 bp, synthetic construct
  misc_feature 1..1128: note = Description of Artificial Sequence: Synthetic coding sequence
  source 1..1128: mol_type = other DNA
atggccatgaccggctggagctgcctggtgaccggcgccggcggcttcctgggccagagaatcatcagactgctggtgaaggagaaggagctgaaggagatcagagtgctggacaaggccttcggccccgagctgagagaggagttcagcaagctgcagaacaagaccaagctgaccgtgctggagggcgacatcctggacgagcccttcctgaagagagcctgccaggacgtgagcgtgatcatccacaccgcctgcatcatcgacgtgttcggcgtgacccacagagagagcatcatgaacgtgaacgtgaagggcacccagctgctgctggaggcctgcgtgcaggccagcgtgcccgtgttcatctacaccagcagcatcgaggtggccggccccaacagctacaaggagatcatccagaacggccacgaggaggagcccctggagaacacctggcccgccccctacccccacagcaagaagctggccgagaaggccgtgctggccgccaacggctggaacctgaagaacggcggcaccctgtacacctgcgccctgagacccatgtacatctacggcgagggcagcagattcctgagcgccagcatcaacgaggccctgaacaacaacggcatcctgagcagcgtgggcaagttcagcaccgtgaaccccgtgtacgtgggcaacgtggcctgggcccacatcctggccctgagagccctgcaggaccccaagaaggcccccagcatcagaggccagttctactacatcagcgacgacaccccccaccagagctacgacaacctgaactacaccctgagcaaggagttcggcctgagactggacagcagatggagcttccccctgagcctgatgtactggatcggcttcctgctggagatcgtgagcttcctgctgagacccatctacacctacagaccccccttcaacagacacatcgtgaccctgagcaacagcgtgttcaccttcagctacaagaaggcccagagagacctggcctacaagcccctgtacagctgggaggaggccaagcagaagaccgtggagtgggtgggcagcctggtggacagacacaaggagaccctgaagagcaagacccagtag

SEQ ID NO: 84920 - DNA, 1122 bp, synthetic construct
  misc_feature 1..1122: note = Description of Artificial Sequence: Synthetic coding sequence
  source 1..1122: mol_type = other DNA
atgaccggctggagctgcctggtgaccggcgccggcggcttcctgggccagagaatcatcagactgctggtgaaggagaaggagctgaaggagatcagagtgctggacaaggccttcggccccgagctgagagaggagttcagcaagctgcagaacaagaccaagctgaccgtgctggagggcgacatcctggacgagcccttcctgaagagagcctgccaggacgtgagcgtgatcatccacaccgcctgcatcatcgacgtgttcggcgtgacccacagagagagcatcatgaacgtgaacgtgaagggcacccagctgctgctggaggcctgcgtgcaggccagcgtgcccgtgttcatctacaccagcagcatcgaggtggccggccccaacagctacaaggagatcatccagaacggccacgaggaggagcccctggagaacacctggcccgccccctacccccacagcaagaagctggccgagaaggccgtgctggccgccaacggctggaacctgaagaacggcggcaccctgtacacctgcgccctgagacccatgtacatctacggcgagggcagcagattcctgagcgccagcatcaacgaggccctgaacaacaacggcatcctgagcagcgtgggcaagttcagcaccgtgaaccccgtgtacgtgggcaacgtggcctgggcccacatcctggccctgagagccctgcaggaccccaagaaggcccccagcatcagaggccagttctactacatcagcgacgacaccccccaccagagctacgacaacctgaactacaccctgagcaaggagttcggcctgagactggacagcagatggagcttccccctgagcctgatgtactggatcggcttcctgctggagatcgtgagcttcctgctgagacccatctacacctacagaccccccttcaacagacacatcgtgaccctgagcaacagcgtgttcaccttcagctacaagaaggcccagagagacctggcctacaagcccctgtacagctgggaggaggccaagcagaagaccgtggagtgggtgggcagcctggtggacagacacaaggagaccctgaagagcaagacccagtag

SEQ ID NO: 84921 - DNA, 1122 bp, synthetic construct; identical to SEQ ID NO: 84920
  misc_feature 1..1122: note = Description of Artificial Sequence: Synthetic coding sequence
  source 1..1122: mol_type = other DNA

SEQ ID NO: 84922 - DNA, 249 bp, synthetic construct
  misc_feature 1..249: note = Description of Artificial Sequence: Synthetic coding sequence
  source 1..249: mol_type = other DNA
atgaccggctggagctgcctggtgaccggcgccggcggcttcctgggccagagaatcatcagactgctggtgaaggagaaggagctgaaggagatcagagtgctggacaaggccttcggccccgagctgagagaggagttcagcaagctgcagaacaagaccaagctgaccgtgctggagggcgacatcctggacgagcccttcctgaagagagcctgccaggacgtgagcgtgatcatccacacctag

SEQ ID NO: 84923 - DNA, 1119 bp, synthetic construct
  misc_feature 1..1119: note = Description of Artificial Sequence: Synthetic coding sequence
  source 1..1119: mol_type = other DNA
atgggctggagctgcctggtgaccggcgccggcggcctgctgggccagagaatcgtgagactgctggtggaggagaaggagctgaaggagatcagagccctggacaaggccttcagacccgagctgagagaggagttcagcaagctgcagaacagaaccaagctgaccgtgctggagggcgacatcctggacgagcccttcctgaagagagcctgccaggacgtgagcgtggtgatccacaccgcctgcatcatcgacgtgttcggcgtgacccacagagagagcatcatgaacgtgaacgtgaagggcacccagctgctgctggaggcctgcgtgcaggccagcgtgcccgtgttcatctacaccagcagcatcgaggtggccggccccaacagctacaaggagatcatccagaacggccacgaggaggagcccctggagaacacctggcccaccccctacccctacagcaagaagctggccgagaaggccgtgctggccgccaacggctggaacctgaagaacggcgacaccctgtacacctgcgccctgagacccacctacatctacggcgagggcggccccttcctgagcgccagcatcaacgaggccctgaacaacaacggcatcctgagcagcgtgggcaagttcagcaccgtgaaccccgtgtacgtgggcaacgtggcctgggcccacatcctggccctgagagccctgagagaccccaagaaggcccccagcgtgagaggccagttctactacatcagcgacgacaccccccaccagagctacgacaacctgaactacatcctgagcaaggagttcggcctgagactggacagcagatggagcctgcccctgaccctgatgtactggatcggcttcctgctggaggtggtgagcttcctgctgagccccatctacagctaccagccccccttcaacagacacaccgtgaccctgagcaacagcgtgttcaccttcagctacaagaaggcccagagagacctggcctacaagcccctgtacagctgggaggaggccaagcagaagaccgtggagtgggtgggcagcctggtggacagacacaaggagaccctgaagagcaagacccagtag

SEQ ID NO: 84924 - DNA, 588 bp, synthetic construct
  misc_feature 1..588: note = Description of Artificial Sequence: Synthetic coding sequence
  source 1..588: mol_type = other DNA
atgggctggagctgcctggtgaccggcgccggcggcctgctgggccagagaatcgtgagactgctggtggaggagaaggagctgaaggagatcagagccctggacaaggccttcagacccgagctgagagaggagttcagcaagctgcagaacagaaccaagctgaccgtgctggagggcgacatcctggacgagcccttcctgaagagagcctgccaggacgtgagcgtggtgatccacaccgcctgcatcatcgacgtgttcggcgtgacccacagagagagcatcatgaacgtgaacgtgaagggcacccagctgctgctggaggcctgcgtgcaggccagcgtgcccgtgttcatctacaccagcagcatcgaggtggccggccccaacagctacaaggagatcatccagaacggccacgaggaggagcccctggagaacacctggcccaccccctacccctacagcaagaagctggccgagaaggccgtgctggccgccaacggctggaacctgaagaacggcgacaccctgtacacctgcgccctgagacccacctacatctacggcgagggcggcccctag

SEQ ID NO: 84925 - DNA, 1119 bp, synthetic construct; identical to SEQ ID NO: 84923
  misc_feature 1..1119: note = Description of Artificial Sequence: Synthetic coding sequence
  source 1..1119: mol_type = other DNA

SEQ ID NO: 84926 - DNA, 591 bp, synthetic construct
  misc_feature 1..591: note = Description of Artificial Sequence: Synthetic coding sequence
  source 1..591: mol_type = other DNA
atggccgacagcgcccaggcccagaagctggtgtacctggtgaccggcggctgcggcttcctgggcgagcacgtggtgagaatgctgctgcagagagagcccagactgggcgagctgagagtgttcgaccagcacctgggcccctggctggaggagctgaagaccggccccgtgagagtgaccgccatccagggcgacgtgacccaggcccacgaggtggccgccgccgtggccggcgcccacgtggtgatccacaccgccggcctggtggacgtgttcggcagagccagccccaagaccatccacgaggtgaacgtgcagggcaccagaaacgtgatcgaggcctgcgtgcagaccggcaccagattcctggtgtacaccagcagcatggaggtggtgggccccaacaccaagggccaccccttctacagaggcaacgaggacaccccctacgaggccgtgcacagacacccctacccctgcagcaaggccctggccgagtggctggtgctggaggccaacggcagaaaggccatgctgcccggctgcacctgctggcagcccggcagctggagcagcggccagccctag

SEQ ID NO: 84927 - DNA, 1110 bp, synthetic construct
  misc_feature 1..1110: note = Description of Artificial Sequence: Synthetic coding sequence
  source 1..1110: mol_type = other DNA
atggccgacagcgcccaggcccagaagctggtgtacctggtgaccggcggctgcggcttcctgggcgagcacgtggtgagaatgctgctgcagagagagcccagactgggcgagctgagagtgttcgaccagcacctgggcccctggctggaggagctgaagaccggccccgtgagagtgaccgccatccagggcgacgtgacccaggcccacgaggtggccgccgccgtggccggcgcccacgtggtgatccacaccgccggcctggtggacgtgttcggcagagccagccccaagaccatccacgaggtgaacgtgcagggcaccagaaacgtgatcgaggcctgcgtgcagaccggcaccagattcctggtgtacaccagcagcatggaggtggtgggccccaacaccaagggccaccccttctacagaggcaacgaggacaccccctacgaggccgtgcacagacacccctacccctgcagcaaggccctggccgagtggctggtgctggaggccaacggcagaaaggtgagaggcggcctgcccctggtgacctgcgccctgagacccaccggcatctacggcgagggccaccagatcatgagagacttctacagacagggcctgagactgggcggctggctgttcagagccatccccgccagcgtggagcacggcagagtgtacgtgggcaacgtggcctggatgcacgtgctggccgccagagagctggagcagagagccaccctgatgggcggccaggtgtacttctgctacgacggcagcccctacagaagctacgaggacttcaacatggagttcctgggcccctgcggcctgagactggtgggcgccagacccctgctgccctactggctgctggtgttcctggccgccctgaacgccctgctgcagtggctgctgagacccctggtgctgtacgcccccctgctgaacccctacaccctggccgtggccaacaccaccttcaccgtgagcaccgacaaggcccagagacacttcggctacgagcccctgttcagctgggaggacagcagaaccagaaccatcctgtgggtgcaggccgccaccggcagcgcccagtag

SEQ ID NO: 84928 - DNA, 591 bp, synthetic construct; identical to SEQ ID NO: 84926
  misc_feature 1..591: note = Description of Artificial Sequence: Synthetic coding sequence
  source 1..591: mol_type = other DNA

SEQ ID NO: 84929 - DNA, 1086 bp, synthetic construct
  misc_feature 1..1086: note = Description of Artificial Sequence: Synthetic coding sequence
  source 1..1086: mol_type = other DNA
atgagcggcaacggcaacgccgccgccaccgccgaggagaacagccccaagatgagagtgatcagagtgggcaccagaaagagccagctggccagaatccagaccgacagcgtggtggccaccctgaaggccagctaccccggcctgcagttcgagatcatcgccatgagcaccaccggcgacaagatcctggacaccgccctgagcaagatcggcgagaagagcctgttcaccaaggagctggagcacgccctggagaagaacgaggtggacctggtggtgcacagcctgaaggacctgcccaccgtgctgccccccggcttcaccatcggcgccatctgcaagagagagaacccccacgacgccgtggtgttccaccccaagttcgtgggcaagaccctggagaccctgcccgagaagagcgtggtgggcaccagcagcctgagaagagccgcccagctgcagagaaagttcccccacctggagttcagaagcatcagaggcaacctgaacaccagactgagaaagctggacgagcagcaggagttcagcgccatcatcctggccaccgccggcctgcagagaatgggctggcacaacagagtgggccagatcctgcaccccgaggagtgcatgtacgccgtgggccagggcgccctgggcgtggaggtgagagccaaggaccaggacatcctggacctggtgggcgtgctgcacgaccccgagaccctgctgagatgcatcgccgagagagccttcctgagacacctggagggcggctgcagcgtgcccgtggccgtgcacaccgccatgaaggacggccagctgtacctgaccggcggcgtgtggagcctggacggcagcgacagcatccaggagaccatgcaggccaccatccacgtgcccgcccagcacgaggacggccccgaggacgacccccagctggtgggcatcaccgccagaaacatccccagaggcccccagctggccgcccagaacctgggcatcagcctggccaacctgctgctgagcaagggcgccaagaacatcctggacgtggccagacagctgaacgacgcccactag

SEQ ID NO: 84930 - DNA, 1035 bp, synthetic construct
  misc_feature 1..1035: note = Description of Artificial Sequence: Synthetic coding sequence
  source 1..1035: mol_type = other DNA
atgagagtgatcagagtgggcaccagaaagagccagctggccagaatccagaccgacagcgtggtggccaccctgaaggccagctaccccggcctgcagttcgagatcatcgccatgagcaccaccggcgacaagatcctggacaccgccctgagcaagatcggcgagaagagcctgttcaccaaggagctggagcacgccctggagaagaacgaggtggacctggtggtgcacagcctgaaggacctgcccaccgtgctgccccccggcttcaccatcggcgccatctgcaagagagagaacccccacgacgccgtggtgttccaccccaagttcgtgggcaagaccctggagaccctgcccgagaagagcgtggtgggcaccagcagcctgagaagagccgcccagctgcagagaaagttcccccacctggagttcagaagcatcagaggcaacctgaacaccagactgagaaagctggacgagcagcaggagttcagcgccatcatcctggccaccgccggcctgcagagaatgggctggcacaacagagtgggccagatcctgcaccccgaggagtgcatgtacgccgtgggccagggcgccctgggcgtggaggtgagagccaaggaccaggacatcctggacctggtgggcgtgctgcacgaccccgagaccctgctgagatgcatcgccgagagagccttcctgagacacctggagggcggctgcagcgtgcccgtggccgtgcacaccgccatgaaggacggccagctgtacctgaccggcggcgtgtggagcctggacggcagcgacagcatccaggagaccatgcaggccaccatccacgtgcccgcccagcacgaggacggccccgaggacgacccccagctggtgggcatcaccgccagaaacatccccagaggcccccagctggccgcccagaacctgggcatcagcctggccaacctgctgctgagcaagggcgccaagaacatcctggacgtggccagacagctgaacgacgcccactag

SEQ ID NO: 84931 - DNA, 1035 bp, synthetic construct; identical to SEQ ID NO: 84930
  misc_feature 1..1035: note = Description of Artificial Sequence: Synthetic coding sequence
  source 1..1035: mol_type = other DNA

SEQ ID NO: 84932 - DNA, 564 bp, synthetic construct
  misc_feature 1..564: note = Description of Artificial Sequence: Synthetic coding sequence
  source 1..564: mol_type = other DNA
atgagagtgatcagagtgggcaccagaaagagccagctggccagaatccagaccgacagcgtggtggccaccctgaaggccagctaccccggcctgcagttcgagatcatcgccatgagcaccaccggcgacaagatcctggacaccgccctgagcaagatcggcgagaagagcctgttcaccaaggagctggagcacgccctggagaagaacgaggtggacctggtggtgcacagcctgaaggacctgcccaccgtgctgccccccggcttcaccatcggcgccatctgcaagagagagaacccccacgacgccgtggtgttccaccccaagttcgtgggcaagaccctggagaccctgcccgagaagagcgtggtgggcaccagcagcctgagaagagccgcccagctgcagagaaagttcccccacctggagttcagaagcatcagaggcaacctgaacaccagactgagaaagctggacgagcagcaggagttcagcgccatcatcctggccaccgccggcctgcagagaatgggctggcacaacagagtgggccagtag

SEQ ID NO: 84933 - DNA, 1035 bp, synthetic construct; identical to SEQ ID NO: 84930
  misc_feature 1..1035: note = Description of Artificial Sequence: Synthetic coding sequence
  source 1..1035: mol_type = other DNA

SEQ ID NO: 84934 - DNA, 564 bp, synthetic construct; identical to SEQ ID NO: 84932
  misc_feature 1..564: note = Description of Artificial Sequence: Synthetic coding sequence
  source 1..564: mol_type = other DNA

SEQ ID NO: 84935 - DNA, 915 bp, synthetic construct
  misc_feature 1..915: note = Description of Artificial Sequence: Synthetic coding sequence
  source 1..915: mol_type = other DNA
atgagagtgatcagagtgggcaccagaaagagccagctggccagaatccagaccgacagcgtggtggccaccctgaaggccagctaccccggcctgcagttcgagatcatcgccatgagcaccaccggcgacaagatcctggacaccgccctgagcaagatcggcgagaagagcctgttcaccaaggagctggagcacgccctggagaagaacgaggtggacctggtggtgcacagcctgaaggacctgcccaccgtgctgccccccggcttcaccatcggcgccatctgcaagagagagaacccccacgacgccgtggtgttccaccccaagttcgtgggcaagaccctggagaccctgcccgagaagagcgtggtgggcaccagcagcctgagaagagccgcccagctgcagagaaagttcccccacctggagttcagaagcatcagaggcaacctgaacaccagactgagaaagctggacgagcagcaggagttcagcgccatcatcctggccaccgccggcctgcagagaatgggctggcacaacagagtgggccagatcctgcaccccgaggagtgcatgtacgccgtgggccaggagggcggctgcagcgtgcccgtggccgtgcacaccgccatgaaggacggccagctgtacctgaccggcggcgtgtggagcctggacggcagcgacagcatccaggagaccatgcaggccaccatccacgtgcccgcccagcacgaggacggccccgaggacgacccccagctggtgggcatcaccgccagaaacatccccagaggcccccagctggccgcccagaacctgggcatcagcctggccaacctgctgctgagcaagggcgccaagaacatcctggacgtggccagacagctgaacgacgcccactag

SEQ ID NO: 84936 - DNA, 966 bp, synthetic construct
  misc_feature 1..966: note = Description of Artificial Sequence: Synthetic coding sequence
  source 1..966: mol_type = other DNA
atgagcggcaacggcaacgccgccgccaccgccgaggagaacagccccaagatgagagtgatcagagtgggcaccagaaagagccagctggccagaatccagaccgacagcgtggtggccaccctgaaggccagctaccccggcctgcagttcgagatcatcgccatgagcaccaccggcgacaagatcctggacaccgccctgagcaagatcggcgagaagagcctgttcaccaaggagctggagcacgccctggagaagaacgaggtggacctggtggtgcacagcctgaaggacctgcccaccgtgctgccccccggcttcaccatcggcgccatctgcaagagagagaacccccacgacgccgtggtgttccaccccaagttcgtgggcaagaccctggagaccctgcccgagaagagcgtggtgggcaccagcagcctgagaagagccgcccagctgcagagaaagttcccccacctggagttcagaagcatcagaggcaacctgaacaccagactgagaaagctggacgagcagcaggagttcagcgccatcatcctggccaccgccggcctgcagagaatgggctggcacaacagagtgggccagatcctgcaccccgaggagtgcatgtacgccgtgggccaggagggcggctgcagcgtgcccgtggccgtgcacaccgccatgaaggacggccagctgtacctgaccggcggcgtgtggagcctggacggcagcgacagcatccaggagaccatgcaggccaccatccacgtgcccgcccagcacgaggacggccccgaggacgacccccagctggtgggcatcaccgccagaaacatccccagaggcccccagctggccgcccagaacctgggcatcagcctggccaacctgctgctgagcaagggcgccaagaacatcctggacgtggccagacagctgaacgacgcccactag

SEQ ID NO: 84937 - DNA, 879 bp, synthetic construct
  misc_feature 1..879: note = Description of Artificial Sequence: Synthetic coding sequence
  source 1..879: mol_type = other DNA
atggccttcatgaagaagtacctgctgcccatcctgggcctgttcatggcctactactactacagcgccaacgaggagttcagacccgagatgctgcagggcaagaaggtgatcgtgaccggcgccagcaagggcatcggcagagagatggcctaccacctggccaagatgggcgcccacgtggtggtgaccgccagaagcaaggagaccctgcagaaggtggtgagccactgcctggagctgggcgccgccagcgcccactacatcgccggcaccatggaggacatgaccttcgccgagcagttcgtggcccaggccggcaagctgatgggcggcctggacatgctgatcctgaaccacatcaccaacaccagcctgaacctgttccacgacgacatccaccacgtgagaaagagcatggaggtgaacttcctgagctacgtggtgctgaccgtggccgccctgcccatgctgaagcagagcaacggcagcatcgtggtggtgagcagcctggccggcaaggtggcctaccccatggtggccgcctacagcgccagcaagttcgccctggacggcttcttcagcagcatcagaaaggagtacagcgtgagcagagtgaacgtgagcatcaccctgtgcgtgctgggcctgatcgacaccgagaccgccatgaaggccgtgagcggcatcgtgcacatgcaggccgcccccaaggaggagtgcgccctggagatcatcaagggcggcgccctgagacaggaggaggtgtactacgacagcagcctgtggaccaccctgctgatcagaaacccctgcagaaagatcctggagttcctgtacagcaccagctacaacatggacagattcatcaacaagtag

SEQ ID NO: 84938 - DNA, 879 bp, synthetic construct; identical to SEQ ID NO: 84937
  misc_feature 1..879: note = Description of Artificial Sequence: Synthetic coding sequence
  source 1..879: mol_type = other DNA

SEQ ID NO: 84939 - DNA, 879 bp, synthetic construct; identical to SEQ ID NO: 84937
  misc_feature 1..879: note = Description of Artificial Sequence: Synthetic coding sequence
  source 1..879: mol_type = other DNA

SEQ ID NO: 84940 - DNA, 1218 bp, synthetic construct
  misc_feature 1..1218: note = Description of Artificial Sequence: Synthetic coding sequence
  source 1..1218: mol_type = other DNA
atggagagatggccctggcccagcggcggcgcctggctgctggtggccgccagagccctgctgcagctgctgagaagcgacctgagactgggcagacccctgctggccgccctggccctgctggccgccctggactggctgtgccagagactgctgcccccccccgccgccctggccgtgctggccgccgccggctggatcgccctgagcagactggccagaccccagagactgcccgtggccaccagagccgtgctgatcaccggctgcgacagcggcttcggcaaggagaccgccaagaagctggacagcatgggcttcaccgtgctggccaccgtgctggagctgaacagccccggcgccatcgagctgagaacctgctgcagccccagactgagactgctgcagatggacctgaccaagcccggcgacatcagcagagtgctggagttcaccaaggcccacaccaccagcaccggcctgtggggcctggtgaacaacgccggccacaacgaggtggtggccgacgccgagctgagccccgtggccaccttcagaagctgcatggaggtgaacttcttcggcgccctggagctgaccaagggcctgctgcccctgctgagaagcagcagaggcagaatcgtgaccgtgggcagccccgccggcgacatgccctacccctgcctgggcgcctacggcaccagcaaggccgccgtggccctgctgatggacaccttcagctgcgagctgctgccctggggcgtgaaggtgagcatcatccagcccggctgcttcaagaccgagagcgtgagaaacgtgggccagtgggagaagagaaagcagctgctgctggccaacctgccccaggagctgctgcaggcctacggcaaggactacatcgagcacctgcacggccagttcctgcacagcctgagactggccatgagcgacctgacccccgtggtggacgccatcaccgacgccctgctggccgccagacccagaagaagatactaccccggccagggcctgggcctgatgtacttcatccactactacctgcccgagggcctgagaagaagattcctgcaggccttcttcatcagccactgcctgcccagagccctgcagcccggccagcccggcaccacccccccccaggacgccgcccaggaccccaacctgagccccggccccagccccgccgtggccagatag

SEQ ID NO: 84941 - DNA, 2232 bp, synthetic construct
  misc_feature 1..2232: note = Description of Artificial Sequence: Synthetic coding sequence
  source 1..2232: mol_type = other DNA
atggaggccgtggccgtggccgccgccgtgggcgtgctgctgctggccggcgccggcggcgccgccggcgacgaggccagagaggccgccgccgtgagagccctggtggccagactgctgggccccggccccgccgccgacttcagcgtgagcgtggagagagccctggccgccaagcccggcctggacacctacagcctgggcggcggcggcgccgccagagtgagagtgagaggcagcaccggcgtggccgccgccgccggcctgcacagatacctgagagacttctgcggctgccacgtggcctggagcggcagccagctgagactgcccagacccctgcccgccgtgcccggcgagctgaccgaggccacccccaacagatacagatactaccagaacgtgtgcacccagagctacagcttcgtgtggtgggactgggccagatgggagagagagatcgactggatggccctgaacggcatcaacctggccctggcctggagcggccaggaggccatctggcagagagtgtacctggccctgggcctgacccaggccgagatcaacgagttcttcaccggccccgccttcctggcctggggcagaatgggcaacctgcacacctgggacggccccctgccccccagctggcacatcaagcagctgtacctgcagcacagagtgctggaccagatgagaagcttcggcatgacccccgtgctgcccgccttcgccggccacgtgcccgaggccgtgaccagagtgttcccccaggtgaacgtgaccaagatgggcagctggggccacttcaactgcagctacagctgcagcttcctgctggcccccgaggaccccatcttccccatcatcggcagcctgttcctgagagagctgatcaaggagttcggcaccgaccacatctacggcgccgacaccttcaacgagatgcagccccccagcagcgagcccagctacctggccgccgccaccaccgccgtgtacgaggccatgaccgccgtggacaccgaggccgtgtggctgctgcagggctggctgttccagcaccagccccagttctggggccccgcccagatcagagccgtgctgggcgccgtgcccagaggcagactgctggtgctggacctgttcgccgagagccagcccgtgtacaccagaaccgccagcttccagggccagcccttcatctggtgcatgctgcacaacttcggcggcaaccacggcctgttcggcgccctggaggccgtgaacggcggccccgaggccgccagactgttccccaacagcaccatggtgggcaccggcatggcccccgagggcatcagccagaacgaggtggtgtacagcctgatggccgagctgggctggagaaaggaccccgtgcccgacctggccgcctgggtgaccagcttcgccgccagaagatacggcgtgagccaccccgacgccggcgccgcctggagactgctgctgagaagcgtgtacaactgcagcggcgaggcctgcagaggccacaacagaagccccctggtgagaagacccagcctgcagatgaacaccagcatctggtacaacagaagcgacgtgttcgaggcctggagactgctgctgaccagcgcccccagcctggccaccagccccgccttcagatacgacctgctggacctgaccagacaggccgtgcaggagctggtgagcctgtactacgaggaggccagaagcgcctacctgagcaaggagctggccagcctgctgagagccggcggcgtgctggcctacgagctgctgcccgccctggacgaggtgctggccagcgacagcagattcctgctgggcagctggctggagcaggccagagccgccgccgtgagcgaggccgaggccgacttctacgagcagaacagcagataccagctgaccctgtggggccccgagggcaacatcctggactacgccaacaagcagctggccggcctggtggccaactactacacccccagatggagactgttcctggaggccctggtggacagcgtggcccagggcatccccttccagcagcaccagttcgacaagaacgtgttccagctggagcaggccttcgtgctgagcaagcagagataccccagccagcccagaggcgacaccgtggacctggccaagaagatcttcctgaagtactaccccagatgggtggccggcagctggtag

SEQ ID NO: 84942 - DNA, 450 bp, synthetic construct
  misc_feature 1..450: note = Description of Artificial Sequence: Synthetic coding sequence
  source 1..450: mol_type = other DNA
atggccagaaccgtggtgctgatcaccggctgcagcagcggcatcggcctgcacctggccgtgagactggccagcgaccccagccagagcttcaaggtgtacgccaccctgagagacctgaagacccagggcagactgtgggaggccgccagagccctggcctgcccccccggcagcctggagaccctgcagctggacgtgagagacagcaagagcgtggccgccgccagagagagagtgaccgagggcagagtggacgtgctggtgtgcaacgccggcctgggcctgctgggccccctggaggccctgggcgaggacgccgtggccagcgtgctggacgtgaacgtggtgggcaccgtgagaatgctgcaggccttcctgcccgacatgaagagaagaggcagcggcagagtgctggtgaccggcagcgtgggcggcctgatggcctag

SEQ ID NO: 84943 - DNA, 987 bp, synthetic construct
  misc_feature 1..987: note = Description of Artificial Sequence: Synthetic coding sequence
  source 1..987: mol_type = other DNA
atggccagaaccgtggtgctgatcaccggctgcagcagcggcatcggcctgcacctggccgtgagactggccagcgaccccagccagagcttcaaggtgtacgccaccctgagagacctgaagacccagggcagactgtgggaggccgccagagccctggcctgcccccccggcagcctggagaccctgcagctggacgtgagagacagcaagagcgtggccgccgccagagagagagtgaccgagggcagagtggacgtgctggtgtgcaacgccggcctgggcctgctgggccccctggaggccctgggcgaggacgccgtggccagcgtgctggacgtgaacgtggtgggcaccgtgagaatgctgcaggccttcctgcccgacatgaagagaagaggcagcggcagagtgctggtgaccggcagcgtgggcggcctgatgggcctgcccttcaacgacgtgtactgcgccagcaagttcgccctggagggcctgtgcgagagcctggccgtgctgctgctgcccttcggcgtgcacctgagcctgatcgagtgcggccccgtgcacaccgccttcatggagaaggtgctgggcagccccgaggaggtgctggacagaaccgacatccacaccttccacagattctaccagtacctggcccacagcaagcaggtgttcagagaggccgcccagaaccccgaggaggtggccgaggtgttcctgaccgccctgagagcccccaagcccaccctgagatacttcaccaccgagagattcctgcccctgctgagaatgagactggacgaccccagcggcagcaactacgtgaccgccatgcacagagaggtgttcggcgacgtgcccgccaaggccgaggccggcgccgaggccggcggcggcgccggccccggcgccgaggacgaggccggcagaggcgccgtgggcgaccccgagctgggcgacccccccgccgccccccagtag

SEQ ID NO: 84944 - DNA, 447 bp, synthetic construct
  misc_feature 1..447: note = Description of Artificial Sequence: Synthetic coding sequence
  source 1..447: mol_type = other DNA
atggcctgcaccgtggtgctgatcaccggctgcagcagcggcatcggcctgcacctggccatccacctggccctggaccccagccagagcttcaaggtgtacgccaccctgagagacctgaagacccagggcagactgtgggaggccgccagagccctggcctgcccccagggcagcctggagagactgcagctggacgtgagaaacagcagcagcctggccgccgccagagagagagtgaccgagggcagagtggacgtgctggtgtgcgacaccggcctgggcctgctgggccccctgggcgaggacgccgtggccagcgtgctggacgtgaacgtggtgggcaccgtgagagtgctgcaggacttcctgcccgacatgaagagacccggcagcggcagagtgctggtgaccggcagcatgggcggcctgatgggcgagtggtag

SEQ ID NO: 84945 - DNA, 786 bp, synthetic construct
  misc_feature 1..786: note = Description of Artificial Sequence: Synthetic coding sequence
  source 1..786: mol_type = other DNA
atggccgccgcctgcagaagcgtgaagggcctggtggccgtgatcaccggcggcgccagcggcctgggcctggccaccgccgagagactggtgggccagggcgccagcgccgtgctgctggacctgcccaacagcggcggcgaggcccaggccaagaagctgggcaacaactgcgtgttcgcccccgccgacgtgaccagcgagaaggacgtgcagaccgccctggccctggccaagggcaagttcggcagagtggacgtggccgtgaactgcgccggcatcgccgtggccagcaagacctacaacctgaagaagggccagacccacaccctggaggacttccagagagtgctggacgtgaacctgatgggcaccttcaacgtgatcagactggtggccggcgagatgggccagaacgagcccgaccagggcggccagagaggcgtgatcatcaacaccgccagcgtggccgccttcgagggccaggtgggccaggccgcctacagcgccagcaagggcggcatcgtgggcatgaccctgcccatcgccagagacctggcccccatcggcatcagagtgatgaccatcgcccccggcctgttcggcacccccctgctgaccagcctgcccgagaaggtgtgcaacttcctggccagccaggtgcccttccccagcagactgggcgaccccgccgagtacgcccacctggtgcaggccatcatcgagaaccccttcctgaacggcgaggtgatcagactggacggcgccatcagaatgcagccctag

SEQ ID NO: 84946 - DNA, 510 bp, synthetic construct
  misc_feature 1..510: note = Description of Artificial Sequence: Synthetic coding sequence
  source 1..510: mol_type = other DNA
atggccgccgcctgcagaagcgtgaagggcctggtggccgtgatcaccggcggcgccagcggcctgggcctggccaccgccgagagactggtgggccagggcgccagcgccgtgctgctggacctgcccaacagcggcggcgaggcccaggccaagaagctgggcaacaactgcgtgttcgcccccgccgacgtgaccagcgagaaggacgtgcagaccgccctggccctggccaagggcaagttcggcagagtggacgtggccgtgaactgcgccggcatcgccgtggccagcaagacctacaacctgaagaagggccagacccacaccctggaggacttccagagagtgctggacgtgaacctgatgggcaccttcaacgtgatcagactggtggccggcgagatgggccagaacgagcccgaccagggcggccagagaggcgtgatcatcaacaccgccagcgtggccgccttcgagggccaggtgtgcctggccccccactgctag

SEQ ID NO: 84947 - DNA, 759 bp, synthetic construct
  misc_feature 1..759: note = Description of Artificial Sequence: Synthetic coding sequence
  source 1..759: mol_type = other DNA
atggccgccgcctgcagaagcgtgaagggcctggtggccgtgatcaccggcggcgccagcggcctgggcctggccaccgccgagagactggtgggccagggcgccagcgccgtgctgctggacctgcccaacagcggcggcgaggcccaggccaagaagctgggcaacaactgcgtgttcgcccccgccgacgtgaccagcgagaaggacgtgcagaccgccctggccctggccaagggcaagttcggcagagtggacgtggccgtgaactgcgccggcatcgccgtggccagcaagacctacaacctgaagaagggccagacccacaccctggaggacttccagagagtgctggacgtgaacctgatgggcaccttcaacgtgatcagactggtggccggcgagatgggccagaacgagcccgaccagggcggccagagaggcgtgatcatcaacaccgccagcgtggccgccttcgagggccaggtgggccaggccgcctacagcgccagcaagggcggcatcgtgggcatgaccctgcccatcgccagagacctggcccccatcggcctgttcggcacccccctgctgaccagcctgcccgagaaggtgtgcaacttcctggccagccaggtgcccttccccagcagactgggcgaccccgccgagtacgcccacctggtgcaggccatcatcgagaaccccttcctgaacggcgaggtgatcagactggacggcgccatcagaatgcagccctag

SEQ ID NO: 84948 - DNA, 903 bp, synthetic construct
  misc_feature 1..903: note = Description of Artificial Sequence: Synthetic coding sequence
  source 1..903: mol_type = other DNA
atgaagttcctgctggacatcctgctgctgctgcccctgctgatcgtgtgcagcctggagagcttcgtgaagctgttcatccccaagagaagaaagagcgtgaccggcgagatcgtgctgatcaccggcgccggccacggcatcggcagactgaccgcctacgagttcgccaagctgaagagcaagctggtgctgtgggacatcaacaagcacggcctggaggagaccgccgccaagtgcaagggcctgggcgccaaggtgcacaccttcgtggtggactgcagcaacagagaggacatctacagcagcgccaagaaggtgaaggccgagatcggcgacgtgagcatcctggtgaacaacgccggcgtggtgtacaccagcgacctgttcgccacccaggacccccagatcgagaagaccttcgaggtgaacgtgctggcccacttctggaccaccaaggccttcctgcccgccatgaccaagaacaaccacggccacatcgtgaccgtggccagcgccgccggccacgtgagcgtgcccttcctgctggcctactgcagcagcaagttcgccgccgtgggcttccacaagaccctgaccgacgagctggccgccctgcagatcaccggcgtgaagaccacctgcctgtgccccaacttcgtgaacaccggcttcatcaagaaccccagcaccagcctgggccccaccctggagcccgaggaggtggtgaacagactgatgcacggcatcctgaccgagcagaagatgatcttcatccccagcagcatcgccttcctgaccaccctggagagaatcctgcccgagagattcctggccgtgctgaagcagaagatcagcgtgaagttcgacgccgtgatcggctacaagatgaaggcccagtag

SEQ ID NO: 84949 - DNA, 795 bp, synthetic construct
  misc_feature 1..795: note = Description of Artificial Sequence: Synthetic coding sequence
  source 1..795: mol_type = other DNA
atgaacatcatcctggagatcctgctgctgctgatcaccatcatctacagctacctggagagcctggtgaagttcttcatcccccagagaagaaagagcgtggccggcgagatcgtgctgatcaccggcgccggccacggcatcggcagacagaccacctacgagttcgccaagagacagagcatcctggtgctgtgggacatcaacaaggtgaagaaggaggtgggcgacgtgaccatcgtggtgaacaacgccggcaccgtgtaccccgccgacctgctgagcaccaaggacgaggagatcaccaagaccttcgaggtgaacatcctgggccacttctggatcaccaaggccctgctgcccagcatgatggagagaaaccacggccacatcgtgaccgtggccagcgtgtgcggccacgagggcatcccctacctgatcccctactgcagcagcaagttcgccgccgtgggcttccacagaggcctgaccagcgagctgcaggccctgggcaagaccggcatcaagaccagctgcctgtgccccgtgttcgtgaacaccggcttcaccaagaaccccagcaccagactgtggcccgtgctggagaccgacgaggtggtgagaagcctgatcgacggcatcctgaccaacaagaagatgatcttcgtgcccagctacatcaacatcttcctgagactgcagaagttcctgcccgagagagccagcgccatcctgaacagaatgcagaacatccagttcgaggccgtggtgggccacaagatcaagatgaagtag

SEQ ID NO: 84950 - DNA, 903 bp, synthetic construct
  misc_feature 1..903: note = Description of Artificial Sequence: Synthetic coding sequence
  source 1..903: mol_type = other DNA
atgaacatcatcctggagatcctgctgctgctgatcaccatcatctacagctacctggagagcctggtgaagttcttcatcccccagagaagaaagagcgtggccggcgagatcgtgctgatcaccggcgccggccacggcatcggcagacagaccacctacgagttcgccaagagacagagcatcctggtgctgtgggacatcaacaagagaggcgtggaggagaccgccgccgagtgcagaaagctgggcgtgaccgcccacgcctacgtggtggactgcagcaacagagaggagatctacagaagcctgaaccaggtgaagaaggaggtgggcgacgtgaccatcgtggtgaacaacgccggcaccgtgtaccccgccgacctgctgagcaccaaggacgaggagatcaccaagaccttcgaggtgaacatcctgggccacttctggatcaccaaggccctgctgcccagcatgatggagagaaaccacggccacatcgtgaccgtggccagcgtgtgcggccacgagggcatcccctacctgatcccctactgcagcagcaagttcgccgccgtgggcttccacagaggcctgaccagcgagctgcaggccctgggcaagaccggcatcaagaccagctgcctgtgccccgtgttcgtgaacaccggcttcaccaagaaccccagcaccagactgtggcccgtgctggagaccgacgaggtggtgagaagcctgatcgacggcatcctgaccaacaagaagatgatcttcgtgcccagctacatcaacatcttcctgagactgcagaagttcctgcccgagagagccagcgccatcctgaacagaatgcagaacatccagttcgaggccgtggtgggccacaagatcaagatgaagtag

SEQ ID NO: 84951 - DNA, 813 bp, synthetic construct
  misc_feature 1..813: note = Description of Artificial Sequence: Synthetic coding sequence
  source 1..813: mol_type = other DNA
atggccaccggcaccagatacgccggcaaggtggtggtggtgaccggcggcggcagaggcatcggcgccggcatcgtgagagccttcgtgaacagcggcgccagagtggtgatctgcgacaaggacgagagcggcggcagagccctggagcaggagctgcccggcgccgtgttcatcctgtgcgacgtgacccaggaggacgacgtgaagaccctggtgagcgagaccatcagaagattcggcagactggactgcgtggtgaacaacgccggccaccacccccccccccagagacccgaggagaccagcgcccagggcttcagacagctgctggagctgaacctgctgggcacctacaccctgaccaagctggccctgccctacctgagaaagagccagggcaacgtgatcaacatcagcagcctggtgggcgccatcggccaggcccaggccgtgccctacgtggccaccaagggcgccgtgaccgccatgaccaaggccctggccctggacgagagcccctacggcgtgagagtgaactgcatcagccccggcaacatctggacccccctgtgggaggagctggccgccctgatgcccgaccccagagccaccatcagagagggcatgctggcccagcccctgggcagaatgggccagcccgccgaggtgggcgccgccgccgtgttcctggccagcgaggccaacttctgcaccggcatcgagctgctggtgaccggcggcgccgagctgggctacggctgcaaggccagcagaagcacccccgtggacgcccccgacatccccagctag

SEQ ID NO: 84952 - DNA, 1164 bp, synthetic construct
  misc_feature 1..1164: note = Description of Artificial Sequence: Synthetic coding sequence
  source 1..1164: mol_type = other DNA
atgagcaccttcttcagcgacaccgcctggatctgcctggccgtgcccaccgtgctgtgcggcaccgtgttctgcaagtacaagaagagcagcggccagctgtggagctggatggtgtgcctggccggcctgtgcgccgtgtgcctgctgatcctgagccccttctggggcctgatcctgttcagcgtgagctgcttcctgatgtacacctacctgagcggccaggagctgctgcccgtggaccagaaggccgtgctggtgaccggcggcgactgcggcctgggccacgccctgtgcaagtacctggacgagctgggcttcaccgtgttcgccggcgtgctgaacgagaacggccccggcgccgaggagctgagaagaacctgcagccccagactgagcgtgctgcagatggacatcaccaagcccgtgcagatcaaggacgcctacagcaaggtggccgccatgctgcaggacagaggcctgtgggccgtgatcaacaacgccggcgtgctgggcttccccaccgacggcgagctgctgctgatgaccgactacaagcagtgcatggccgtgaacttcttcggcaccgtggaggtgaccaagaccttcctgcccctgctgagaaagagcaagggcagactggtgaacgtgagcagcatgggcggcggcgcccccatggagagactggccagctacggcagcagcaaggccgccgtgaccatgttcagcagcgtgatgagactggagctgagcaagtggggcatcaaggtggccagcatccagcccggcggcttcctgaccaacatcgccggcaccagcgacaagtgggagaagctggagaaggacatcctggaccacctgcccgccgaggtgcaggaggactacggccaggactacatcctggcccagagaaacttcctgctgctgatcaacagcctggccagcaaggacttcagccccgtgctgagagacatccagcacgccatcctggccaagagccccttcgcctactacacccccggcaagggcgcctacctgtggatctgcctggcccactacctgcccatcggcatctacgactacttcgccaagagacacttcggccaggacaagcccatgcccagagccctgagaatgcccaactacaagaagaaggccacctag

SEQ ID NO: 84953 - DNA, 783 bp, synthetic construct
  misc_feature 1..783: note = Description of Artificial Sequence: Synthetic coding sequence
  source 1..783: mol_type = other DNA
atgggcgacgtgctggagcagttcttcatcctgaccggcctgctggtgtgcctggcctgcctggccaagtgcgtgagattcagcagatgcgtgctgctgaactactggaaggtgctgcccaagagcttcctgagaagcatgggccagtgggccgtgatcaccggcgccggcgacggcatcggcaaggcctacagcttcgagctggccaagagaggcctgaacgtggtgctgatcagcagaaccctggagaagctggaggccatcgccaccgagatcgagagaaccaccggcagaagcgtgaagatcatccaggccgacttcaccaaggacgacatctacgagcacatcaaggagaagctggccggcctggagatcggcatcctggtgaacaacgtgggcatgctgcccaacctgctgcccagccacttcctgaacgcccccgacgagatccagagcctgatccactgcaacatcaccagcgtggtgaagatgacccagctgatcctgaagcacatggagagcagacagaagggcctgatcctgaacatcagcagcggcatcgccctgttcccctggcccctgtacagcatgtacagcgccagcaaggccttcgtgtgcgccttcagcaaggccctgcaggaggagtacaaggccaaggaggtgatcatccaggccggcttcctgagcctgatccccgcctgggccttctacagcggcgccttccagagactgctgctgacccactacgtggcctacctgaagctgaacaccaaggtgagatag

SEQ ID NO: 84954 - DNA, 933 bp, synthetic construct
  misc_feature 1..933: note = Description of Artificial Sequence: Synthetic coding sequence
  source 1..933: mol_type = other DNA
atgggcgacgtgctggagcagttcttcatcctgaccggcctgctggtgtgcctggcctgcctggccaagtgcgtgagattcagcagatgcgtgctgctgaactactggaaggtgctgcccaagagcttcctgagaagcatgggccagtgggccgtgatcaccggcgccggcgacggcatcggcaaggcctacagcttcgagctggccaagagaggcctgaacgtggtgctgatcagcagaaccctggagaagctggaggccatcgccaccgagatcgagagaaccaccggcagaagcgtgaagatcatccaggccgacttcaccaaggacgacatctacgagcacatcaaggagaagctggccggcctggagatcggcatcctggtgaacaacgtgggcatgctgcccaacctgctgcccagccacttcctgaacgcccccgacgagatccagagcctgatccactgcaacatcaccagcgtggtgaagatgacccagctgatcctgaagcacatggagagcagacagaagggcctgatcctgaacatcagcagcggcatcgccctgttcccctggcccctgtacagcatgtacagcgccagcaaggccttcgtgtgcgccttcagcaaggccctgcaggaggagtacaaggccaaggaggtgatcatccaggtgctgaccccctacgccgtgagcaccgccatgaccaagtacctgaacaccaacgtgatcaccaagaccgccgacgagttcgtgaaggagagcctgaactacgtgaccatcggcggcgagacctgcggctgcctggcccacgagatcctggccggcttcctgagcctgatccccgcctgggccttctacagcggcgccttccagagactgctgctgacccactacgtggcctacctgaagctgaacaccaaggtgagatag

SEQ ID NO: 84955 - DNA, 2211 bp, synthetic construct
  misc_feature 1..2211: note = Description of Artificial Sequence: Synthetic coding sequence
  source 1..2211: mol_type = other DNA
atgggcagccccctgagattcgacggcagagtggtgctggtgaccggcgccggcgccggcctgggcagagcctacgccctggccttcgccgagagaggcgccctggtggtggtgaacgacctgggcggcgacttcaagggcgtgggcaagggcagcctggccgccgacaaggtggtggaggagatcagaagaagaggcggcaaggccgtggccaactacgacagcgtggaggagggcgagaaggtggtgaagaccgccctggacgccttcggcagaatcgacgtggtggtgaacaacgccggcatcctgagagacagaagcttcgccagaatcagcgacgaggactgggacatcatccacagagtgcacctgagaggcagcttccaggtgaccagagccgcctgggagcacatgaagaagcagaagtacggcagaatcatcatgaccagcagcgccagcggcatctacggcaacttcggccaggccaactacagcgccgccaagctgggcctgctgggcctggccaacagcctggccatcgagggcagaaagagcaacatccactgcaacaccatcgcccccaacgccggcagcagaatgacccagaccgtgatgcccgaggacctggtggaggccctgaagcccgagtacgtggcccccctggtgctgtggctgtgccacgagagctgcgaggagaacggcggcctgttcgaggtgggcgccggctggatcggcaagctgagatgggagagaaccctgggcgccatcgtgagacagaagaaccaccccatgacccccgaggccgtgaaggccaactggaagaagatctgcgacttcgagaacgccagcaagccccagagcatccaggagagcaccggcagcatcatcgaggtgctgagcaagatcgacagcgagggcggcgtgagcgccaaccacaccagcagagccaccagcaccgccaccagcggcttcgccggcgccatcggccagaagctgccccccttcagctacgcctacaccgagctggaggccatcatgtacgccctgggcgtgggcgccagcatcaaggaccccaaggacctgaagttcatctacgagggcagcagcgacttcagctgcctgcccaccttcggcgtgatcatcggccagaagagcatgatgggcggcggcctggccgagatccccggcctgagcatcaacttcgccaaggtgctgcacggcgagcagtacctggagctgtacaagcccctgcccagagccggcaagctgaagtgcgaggccgtggtggccgacgtgctggacaagggcagcggcgtggtgatcatcatggacgtgtacagctacagcgagaaggagctgatctgccacaaccagttcagcctgttcctggtgggcagcggcggcttcggcggcaagagaaccagcgacaaggtgaaggtggccgtggccatccccaacagaccccccgacgccgtgctgaccgacaccaccagcctgaaccaggccgccctgtacagactgagcggcgactggaaccccctgcacatcgaccccaacttcgccagcctggccggcttcgacaagcccatcctgcacggcctgtgcaccttcggcttcagcgccagaagagtgctgcagcagttcgccgacaacgacgtgagcagattcaaggccatcaaggccagattcgccaagcccgtgtaccccggccagaccctgcagaccgagatgtggaaggagggcaacagaatccacttccagaccaaggtgcaggagaccggcgacatcgtgatcagcaacgcctacgtggacctggcccccaccagcggcaccagcgccaagacccccagcgagggcggcaagctgcagagcaccttcgtgttcgaggagatcggcagaagactgaaggacatcggccccgaggtggtgaagaaggtgaacgccgtgttcgagtggcacatcaccaagggcggcaacatcggcgccaagtggaccatcgacctgaagagcggcagcggcaaggtgtaccagggccccgccaagggcgccgccgacaccaccatcatcctgagcgacgaggacttcatggaggtggtgctgggcaagctggacccccagaaggccttcttcagcggcagactgaaggccagaggcaacatcatgctgagccagaagctgcagatgatcctgaaggactacgccaagctgtag

SEQ ID NO: 84956 - DNA, 2286 bp, synthetic construct
  misc_feature 1..2286: note = Description of Artificial Sequence: Synthetic coding sequence
  source 1..2286: mol_type = other DNA
atggtgatcctggaggccccccacctgctgagaagaaaggagcccgagacccccggcctgagcagcagaatcggccccagcctgtgccccggcttctgcagaaagagaagcgtgagctgctgcttccagaacctgtgcaacaaccccatggagaagatcatcagccagtgcagattcttcgtgagcatgaacgacctgggcggcgacttcaagggcgtgggcaagggcagcctggccgccgacaaggtggtggaggagatcagaagaagaggcggcaaggccgtggccaactacgacagcgtggaggagggcgagaaggtggtgaagaccgccctggacgccttcggcagaatcgacgtggtggtgaacaacgccggcatcctgagagacagaagcttcgccagaatcagcgacgaggactgggacatcatccacagagtgcacctgagaggcagcttccaggtgaccagagccgcctgggagcacatgaagaagcagaagtacggcagaatcatcatgaccagcagcgccagcggcatctacggcaacttcggccaggccaactacagcgccgccaagctgggcctgctgggcctggccaacagcctggccatcgagggcagaaagagcaacatccactgcaacaccatcgcccccaacgccggcagcagaatgacccagaccgtgatgcccgaggacctggtggaggccctgaagcccgagtacgtggcccccctggtgctgtggctgtgccacgagagctgcgaggagaacggcggcctgttcgaggtgggcgccggctggatcggcaagctgagatgggagagaaccctgggcgccatcgtgagacagaagaaccaccccatgacccccgaggccgtgaaggccaactggaagaagatctgcgacttcgagaacgccagcaagccccagagcatccaggagagcaccggcagcatcatcgaggtgctgagcaagatcgacagcgagggcggcgtgagcgccaaccacaccagcagagccaccagcaccgccaccagcggcttcgccggcgccatcggccagaagctgccccccttcagctacgcctacaccgagctggaggccatcatgtacgccctgggcgtgggcgccagcatcaaggaccccaaggacctgaagttcatctacgagggcagcagcgacttcagctgcctgcccaccttcggcgtgatcatcggccagaagagcatgatgggcggcggcctggccgagatccccggcctgagcatcaacttcgccaaggtgctgcacggcgagcagtacctggagctgtacaagcccctgcccagagccggcaagctgaagtgcgaggccgtggtggccgacgtgctggacaagggcagcggcgtggtgatcatcatggacgtgtacagctacagcgagaaggagctgatctgccacaaccagttcagcctgttcctggtgggcagcggcggcttcggcggcaagagaaccagcgacaaggtgaaggtggccgtggccatccccaacagaccccccgacgccgtgctgaccgacaccaccagcctgaaccaggccgccctgtacagactgagcggcgactggaaccccctgcacatcgaccccaacttcgccagcctggccggcttcgacaagcccatcctgcacggcctgtgcaccttcggcttcagcgccagaagagtgctgcagcagttcgccgacaacgacgtgagcagattcaaggccatcaaggccagattcgccaagcccgtgtaccccggccagaccctgcagaccgagatgtggaaggagggcaacagaatccacttccagaccaaggtgcaggagaccggcgacatcgtgatcagcaacgcctacgtggacctggcccccaccagcggcaccagcgccaagacccccagcgagggcggcaagctgcagagcaccttcgtgttcgaggagatcggcagaagactgaaggacatcggccccgaggtggtgaagaaggtgaacgccgtgttcgagtggcacatcaccaagggcggcaacatcggcgccaagtggaccatcgacctgaagagcggcagcggcaaggtgtaccagggccccgccaagggcgccgccgacaccaccatcatcctgagcgacgaggacttcatggaggtggtgctgggcaagctggacccccagaaggccttcttcagcggcagactgaaggccagaggcaacatcatgctgagccagaagctgcagatgatcctgaaggactacgccaagctgtag

SEQ ID NO: 84957 - DNA, 2139 bp, synthetic construct
  misc_feature 1..2139: note = Description of Artificial Sequence: Synthetic coding sequence
  source 1..2139: mol_type = other DNA
atggagaagatcatcagccagtgcagattcttcgtgagcatgaacgacctgggcggcgacttcaagggcgtgggcaagggcagcctggccgccgacaaggtggtggaggagatcagaagaagaggcggcaaggccgtggccaactacgacagcgtggaggagggcgagaaggtggtgaagaccgccctggacgccttcggcagaatcgacgtggtggtgaacaacgccggcatcctgagagacagaagcttcgccagaatcagcgacgaggactgggacatcatccacagagtgcacctgagaggcagcttccaggtgaccagagccgcctgggagcacatgaagaagcagaagtacggcagaatcatcatgaccagcagcgccagcggcatctacggcaacttcggccaggccaactacagcgccgccaagctgggcctgctgggcctggccaacagcctggccatcgagggcagaaagagcaacatccactgcaacaccatcgcccccaacgccggcagcagaatgacccagaccgtgatgcccgaggacctggtggaggccctgaagcccgagtacgtggcccccctggtgctgtggctgtgccacgagagctgcgaggagaacggcggcctgttcgaggtgggcgccggctggatcggcaagctgagatgggagagaaccctgggcgccatcgtgagacagaagaaccaccccatgacccccgaggccgtgaaggccaactggaagaagatctgcgacttcgagaacgccagcaagccccagagcatccaggagagcaccggcagcatcatcgaggtgctgagcaagatcgacagcgagggcggcgtgagcgccaaccacaccagcagagccaccagcaccgccaccagcggcttcgccggcgccatcggccagaagctgccccccttcagctacgcctacaccgagctggaggccatcatgtacgccctgggcgtgggcgccagcatcaaggaccccaaggacctgaagttcatctacgagggcagcagcgacttcagctgcctgcccaccttcggcgtgatcatcggccagaagagcatgatgggcggcggcctggccgagatccccggcctgagcatcaacttcgccaaggtgctgcacggcgagcagtacctggagctgtacaagcccctgcccagagccggcaagctgaagtgcgaggccgtggtggccgacgtgctggacaagggcagcggcgtggtgatcatcatggacgtgtacagctacagcgagaaggagctgatctgccacaaccagttcagcctgttcctggtgggcagcggcggcttcggcggcaagagaaccagcgacaaggtgaaggtggccgtggccatccccaacagaccccccgacgccgtgctgaccgacaccaccagcctgaaccaggccgccctgtacagactgagcggcgactggaaccccctgcacatcgaccccaacttcgccagcctggccggcttcgacaagcccatcctgcacggcctgtgcaccttcggcttcagcgccagaagagtgctgcagcagttcgccgacaacgacgtgagcagattcaaggccatcaaggccagattcgccaagcccgtgtaccccggccagaccctgcagaccgagatgtggaaggagggcaacagaatccacttccagaccaaggtgcaggagaccggcgacatcgtgatcagcaacgcctacgtggacctggcccccaccagcggcaccagcgccaagacccccagcgagggcggcaagctgcagagcaccttcgtgttcgaggagatcggcagaagactgaaggacatcggccccgaggtggtgaagaaggtgaacgccgtgttcgagtggcacatcaccaagggcggcaacatcggcgccaagtggaccatcgacctgaagagcggcagcggcaaggtgtaccagggccccgccaagggcgccgccgacaccaccatcatcctgagcgacgaggacttcatggaggtggtgctgggcaagctggacccccagaaggccttcttcagcggcagactgaaggccagaggcaacatcatgctgagccagaagctgcagatgatcctgaaggactacgccaagctgtag

SEQ ID NO: 84958 - DNA, 1800 bp, synthetic construct
  misc_feature 1..1800: note = Description of Artificial Sequence: Synthetic coding sequence
  source 1..1800: mol_type = other DNA
atgaagaagcagaagtacggcagaatcatcatgaccagcagcgccagcggcatctacggcaacttcggccaggccaactacagcgccgccaagctgggcctgctgggcctggccaacagcctggccatcgagggcagaaagagcaacatccactgcaacaccatcgcccccaacgccggcagcagaatgacccagaccgtgatgcccgaggacctggtggaggccctgaagcccgagtacgtggcccccctggtgctgtggctgtgccacgagagctgcgaggagaacggcggcctgttcgaggtgggcgccggctggatcggcaagctgagatgggagagaaccctgggcgccatcgtgagacagaagaaccaccccatgacccccgaggccgtgaaggccaactggaagaagatctgcgacttcgagaacgccagcaagccccagagcatccaggagagcaccggcagcatcatcgaggtgctgagcaagatcgacagcgagggcggcgtgagcgccaaccacaccagcagagccaccagcaccgccaccagcggcttcgccggcgccatcggccagaagctgccccccttcagctacgcctacaccgagctggaggccatcatgtacgccctgggcgtgggcgccagcatcaaggaccccaaggacctgaagttcatctacgagggcagcagcgacttcagctgcctgcccaccttcggcgtgatcatcggccagaagagcatgatgggcggcggcctggccgagatccccggcctgagcatcaacttcgccaaggtgctgcacggcgagcagtacctggagctgtacaagcccctgcccagagccggcaagctgaagtgcgaggccgtggtggccgacgtgctggacaagggcagcggcgtggtgatcatcatggacgtgtacagctacagcgagaaggagctgatctgccacaaccagttcagcctgttcctggtgggcagcggcggcttcggcggcaagagaaccagcgacaaggtgaaggtggccgtggccatccccaacagaccccccgacgccgtgctgaccgacaccaccagcctgaaccaggccgccctgtacagactgagcggcgactggaaccccctgcacatcgaccccaacttcgccagcctggccggcttcgacaagcccatcctgcacggcctgtgcaccttcggcttcagcgccagaagagtgctgcagcagttcgccgacaacgacgtgagcagattcaaggccatcaaggccagattcgccaagcccgtgtaccccggccagaccctgcagaccgagatgtggaaggagggcaacagaatccacttccagaccaaggtgcaggagaccggcgacatcgtgatcagcaacgcctacgtggacctggcccccaccagcggcaccagcgccaagacccccagcgagggcggcaagctgcagagcaccttcgtgttcgaggagatcggcagaagactgaaggacatcggccccgaggtggtgaagaaggtgaacgccgtgttcgagtggcacatcaccaagggcggcaacatcggcgccaagtggaccatcgacctgaagagcggcagcggcaaggtgtaccagggccccgccaagggcgccgccgacaccaccatcatcctgagcgacgaggacttcatggaggtggtgctgggcaagctggacccccagaaggccttcttcagcggcagactgaaggccagaggcaacatcatgctgagccagaagctgcagatgatcctgaaggactacgccaagctgtag

SEQ ID NO: 84959 - DNA, 2157 bp, synthetic construct
  misc_feature 1..2157: note = Description of Artificial Sequence: Synthetic coding sequence
  source 1..2157: mol_type = other DNA
atgggcagccccctgagattcgacggcagagtggtgctggtgaccggcgccggcgccgtgaacgacctgggcggcgacttcaagggcgtgggcaagggcagcctggccgccgacaaggtggtggaggagatcagaagaagaggcggcaaggccgtggccaactacgacagcgtggaggagggcgagaaggtggtgaagaccgccctggacgccttcggcagaatcgacgtggtggtgaacaacgccggcatcctgagagacagaagcttcgccagaatcagcgacgaggactgggacatcatccacagagtgcacctgagaggcagcttccaggtgaccagagccgcctgggagcacatgaagaagcagaagtacggcagaatcatcatgaccagcagcgccagcggcatctacggcaacttcggccaggccaactacagcgccgccaagctgggcctgctgggcctggccaacagcctggccatcgagggcagaaagagcaacatccactgcaacaccatcgcccccaacgccggcagcagaatgacccagaccgtgatgcccgaggacctggtggaggccctgaagcccgagtacgtggcccccctggtgctgtggctgtgccacgagagctgcgaggagaacggcggcctgttcgaggtgggcgccggctggatcggcaagctgagatgggagagaaccctgggcgccatcgtgagacagaagaaccaccccatgacccccgaggccgtgaaggccaactggaagaagatctgcgacttcgagaacgccagcaagccccagagcatccaggagagcaccggcagcatcatcgaggtgctgagcaagatcgacagcgagggcggcgtgagcgccaaccacaccagcagagccaccagcaccgccaccagcggcttcgccggcgccatcggccagaagctgccccccttcagctacgcctacaccgagctggaggccatcatgtacgccctgggcgtgggcgccagcatcaaggaccccaaggacctgaagttcatctacgagggcagcagcgacttcagctgcctgcccaccttcggcgtgatcatcggccagaagagcatgatgggcggcggcctggccgagatccccggcctgagcatcaacttcgccaaggtgctgcacggcgagcagtacctggagctgtacaagcccctgcccagagccggcaagctgaagtgcgaggccgtggtggccgacgtgctggacaagggcagcggcgtggtgatcatcatggacgtgtacagctacagcgagaaggagctgatctgccacaaccagttcagcctgttcctggtgggcagcggcggcttcggcggcaagagaaccagcgacaaggtgaaggtggccgtggccatccccaacagaccccccgacgccgtgctgaccgacaccaccagcctgaaccaggccgccctgtacagactgagcggcgactggaaccccctgcacatcgaccccaacttcgccagcctggccggcttcgacaagcccatcctgcacggcctgtgcaccttcggcttcagcgccagaagagtgctgcagcagttcgccgacaacgacgtgagcagattcaaggccatcaaggccagattcgccaagcccgtgtaccccggccagaccctgcagaccgagatgtggaaggagggcaacagaatccacttccagaccaaggtgcaggagaccggcgacatcgtgatcagcaacgcctacgtggacctggcccccaccagcggcaccagcgccaagacccccagcgagggcggcaagctgcagagcaccttcgtgttcgaggagatcggcagaagactgaaggacatcggccccgaggtggtgaagaaggtgaacgccgtgttcgagtggcacatcaccaagggcggcaacatcggcgccaagtggaccatcgacctgaagagcggcagcggcaaggtgtaccagggccccgccaagggcgccgccgacaccaccatcatcctgagcgacgaggacttcatggaggtggtgctgggcaagctggacccccagaaggccttcttcagcggcagactgaaggccagaggcaacatcatgctgagccagaagctgcagatgatcctgaaggactacgccaagctgtag

SEQ ID NO: 84960 - DNA, 1026 bp, synthetic construct
  misc_feature 1..1026: note = Description of Artificial Sequence: Synthetic coding sequence
  source 1..1026: mol_type = other DNA
atgagaaaggtggtgctgatcaccggcgccagcagcggcatcggcctggccctgtgcaagagactgctggccgaggacgacgagctgcacctgtgcctggcctgcagaaacatgagcaaggccgaggccgtgtgcgccgccctgctggccagccaccccaccgccgaggtgaccatcgtgcaggtggacgtgagcaacctgcagagcgtgttcagagccagcaaggagctgaagcagagattccagagactggactgcatctacctgaacgccggcatcatgcccaacccccagctgaacatcaaggccctgttcttcggcctgttcagcagaaaggtgatccacatgttcagcaccgccgagggcctgctgacccagggcgacaagatcaccgccgacggcctgcaggaggtgttcgagaccaacgtgttcggccacttcatcctgatcagagagctggagcccctgctgtgccacagcgacaaccccagccagctgatctggaccagcagcagaagcgccagaaagagcaacttcagcctggaggacttccagcacagcaagggcaaggagccctacagcagcagcaagtacgccaccgacctgctgagcgtggccctgaacagaaacttcaaccagcagggcctgtacagcaacgtggcctgccccggcaccgccctgaccaacctgacctacggcatcctgccccccttcatctggaccctgctgatgcccgccatcctgctgctgagattcttcgccaacgccttcaccctgaccccctacaacggcaccgaggccctggtgtggctgttccaccagaagcccgagagcctgaaccccctgatcaagtacctgagcgccaccaccggcttcggcagaaactacatcatgacccagaagatggacctggacgaggacaccgccgagaagttctaccagaagctgctggagctggagaagcacatcagagtgaccatccagaagaccgacaaccaggccagactgagcggcagctgcctgtag

SEQ ID NO: 84961 - DNA, 336 bp, synthetic construct
  misc_feature 1..336: note = Description of Artificial Sequence: Synthetic coding sequence
  source 1..336: mol_type = other DNA
atgagaaaggtggtgctgatcaccggcgccagcagcggcatcggcctggccctgtgcaagagactgctggccgaggacgacgagctgcacctgtgcctggcctgcagaaacatgagcaaggccgaggccgtgtgcgccgccctgctggccagccaccccaccgccgaggtgaccatcgtgcaggtggacgtgagcaacctgcagagcgtgttcagagccagcaaggagctgaagcagagattccagagactggactgcatctacctgaacgccggcatcatgcccaacccccagctgaacatcaaggccctgttcttcggcctgttcagcagctag

SEQ ID NO: 84962 - DNA, 255 bp, synthetic construct
  misc_feature 1..255: note = Description of Artificial Sequence: Synthetic coding sequence
  source 1..255: mol_type = other DNA
atgagaaaggtggtgctgatcaccggcgccagcagcggcatcggcctggccctgtgcaagagactgctggccgaggacgacgagctgcacctgtgcctggcctgcagaaacatgagcaaggccgaggccgtgtgcgccgccctgctggccagccaccccaccgccgaggtgaccatcgtgcaggtggacgtgagcaacctgcagagcgtgttcagagccagcaaggagctgaagcagagatacatcagctgctag

SEQ ID NO: 84963 - DNA, 921 bp, synthetic construct
  misc_feature 1..921: note = Description of Artificial Sequence: Synthetic coding sequence
  source 1..921: mol_type = other DNA
atgagaaaggtggtgctgatcaccggcgccagcagcggcatcggcctggccctgtgcaagagactgctggccgaggacgacgagctgcacctgtgcctggcctgcagaaacatgagcaaggccgaggccgtgtgcgccgccctgctggccagccaccccaccgccgaggtgaccatcgtgcaggtggacgtgagcaacctgcagagcgtgttcagagccagcaaggagctgaagcagagattccagagactggactgcatctacctgaacgccggcatcatgcccaacccccagctgaacatcaaggccctgttcttcggcctgttcagcagaaaggtgatccacatgttcagcaccgccgagggcctgctgacccagggcgacaagatcaccgccgacggcctgcaggaggtgttcgagaccaacgtgttcggccacttcatcctgatcagagagctggagcccctgctgtgccacagcgacaaccccagccagctgatctggaccagcagcagaagcgccagaaagagcaacttcagcctggaggacttccagcacagcaagggcaaggagccctacagcagcagcaagtacgccaccgacctgctgagcgtggccctgaacagaaacttcaaccagcagctgagattcttcgccaacgccttcaccctgaccccctacaacggcaccgaggccctggtgtggctgttccaccagaagcccgagagcctgaaccccctgatcaagtacctgagcgccaccaccggcttcggcagaaactacatcatgacccagaagatggacctggacgaggacaccgccgagaagttctaccagaagctgctggagctggagaagcacatcagagtgaccatccagaagaccgacaaccaggccagactgagcggcagctgcctgtag

SEQ ID NO: 84964 - DNA, 360 bp, synthetic construct
  misc_feature 1..360: note = Description of Artificial Sequence: Synthetic coding sequence
  source 1..360: mol_type = other DNA
gtggtgatcagagagctggagcccctgctgtgccacagcgacaaccccagccagctgatctggaccagcagcagaagcgccagaaagagcaacttcagcctggaggacttccagcacagcaagggcaaggagccctacagcagcagcaagtacgccaccgacctgctgagcgtggccctgaacagaaacttcaaccagcagctgagattcttcgccaacgccttcaccctgaccccctacaacggcaccgaggccctggtgtggctgttccaccagaagcccgagagcctgaaccccctgatcaagtacctgagcgccaccaccggcttcggcagaaactacatcatgacccagaagtag

SEQ ID NO: 84965 - DNA, 966 bp, synthetic construct
  misc_feature 1..966: note = Description of Artificial Sequence: Synthetic coding sequence
  source 1..966: mol_type = other DNA
atggagagaaagaaccagaccgccatcaccgagttcatcatcctgggcttcagcaacctgaacgagtggcagttcctgctgttcaccatcttcttcctgacctacttctgcaccctgggcggcaacatcctgatcatcctgaccaccgtgaccgacccccacctgcacacccccatgtactacttcctgggcaacctggccttcatcgacatctgctacaccaccagcaacgtgccccagatgatggtgcacctgctgagcaagaagaagagcatcagctacgtgggctgcgtggtgcagctgttcgccttcgtgttcttcgtgggcagcgagtgcctgctgctggccgccatggcctacgacagatacatcgccatctgcaaccccctgagatacagcgtgatcctgagcaaggtgctgtgcaaccagctggccgccagctgctgggccgccggcttcctgaacagcgtggtgcacaccgtgctgaccttctgcctgcccttctgcggcaacaaccagatcaactacttcttctgcgacatcccccccctgctgatcctgagctgcggcaacaccagcgtgaacgagctggccctgctgagcaccggcgtgttcatcggctggacccccttcctgtgcatcgtgctgagctacatctgcatcatcagcaccatcctgagaatccagagcagcgagggcagaagaaaggccttcagcacctgcgccagccacctggccatcgtgttcctgttctacggcagcgccatcttcacctacgtgagacccatcagcacctacagcctgaagaaggacagactggtgagcgtgctgtacagcgtggtgacccccatgctgaaccccatcatctacaccctgagaaacaaggacatcaaggaggccgtgaagaccatcggcagcaagtggcagccccccatcagcagcctggacagcaagctgacctactag

SEQ ID NO: 84966 - DNA, 786 bp, synthetic construct
  misc_feature 1..786: note = Description of Artificial Sequence: Synthetic coding sequence
  source 1..786: mol_type = other DNA
atggccagccagctgcagaacagactgagaagcgccctggccctggtgaccggcgccggcagcggcatcggcagagccgtgagcgtgagactggccggcgagggcgccaccgtggccgcctgcgacctggacagagccgccgcccaggagaccgtgagactgctgggcggccccggcagcaaggagggcccccccagaggcaaccacgccgccttccaggccgacgtgagcgaggccagagccgccagatgcctgctggagcaggtgcaggcctgcttcagcagaccccccagcgtggtggtgagctgcgccggcatcacccaggacgagttcctgctgcacatgagcgaggacgactgggacaaggtgatcgccgtgaacctgaagggcaccttcctggtgacccaggccgccgcccaggccctggtgagcaacggctgcagaggcagcatcatcaacatcagcagcatcgtgggcaaggtgggcaacgtgggccagaccaactacgccgccagcaaggccggcgtgatcggcctgacccagaccgccgccagagagctgggcagacacggcatcagatgcaacagcgtgctgcccggcttcatcgccacccccatgacccagaaggtgccccagaaggtggtggacaagatcaccgagatgatccccatgggccacctgggcgaccccgaggacgtggccgacgtggtggccttcctggccagcgaggacagcggctacatcaccggcaccagcgtggaggtgaccggcggcctgttcatgtag

SEQ ID NO: 84967 - DNA, 786 bp, synthetic construct; identical to SEQ ID NO: 84966
  misc_feature 1..786: note = Description of Artificial Sequence: Synthetic coding sequence
  source 1..786: mol_type = other DNA

SEQ ID NO: 84968 - DNA, 786 bp, synthetic construct; identical to SEQ ID NO: 84966
  misc_feature 1..786: note = Description of Artificial Sequence: Synthetic coding sequence
  source 1..786: mol_type = other DNA

SEQ ID NO: 84969 - DNA, 786 bp, synthetic construct; identical to SEQ ID NO: 84966
  misc_feature 1..786: note = Description of Artificial Sequence: Synthetic coding sequence
  source 1..786: mol_type = other DNA

SEQ ID NO: 84970 - DNA, 786 bp, synthetic construct; identical to SEQ ID NO: 84966
  misc_feature 1..786: note = Description of Artificial Sequence: Synthetic coding sequence
  source 1..786: mol_type = other DNA

SEQ ID NO: 84971 - DNA, 1848 bp, synthetic construct
  misc_feature 1..1848: note = Description of Artificial Sequence: Synthetic coding sequence
  source 1..1848: mol_type = other DNA
atggtgagcggccccctggccctgagatggtgcgcctgggccggcagaggcgacatgggccccgacatggagctgcccagccacagcaagcagctgctgctgcagctgaaccagcagagaaccaagggcttcctgtgcgacgtgatcatcatggtggagaacagcatcttcagagcccacaagaacgtgctggccgccagcagcatctacttcaagagcctggtgctgcacgacaacctgatcaacctggacaccgacatggtgagcagcaccgtgttccagcagatcctggacttcatctacaccggcaagctgctgcccagcgaccagcccgccgagcccaacttcagcaccctgctgaccgccgccagctacctgcagctgcccgagctggccgccctgtgcagaagaaagctgaagagagccggcaagcccttcggcagcggcagagccggcagcaccggcatgggcagaccccccagaagccagagactgagcaccgccagcgtgatccaggccagataccagggcctggtggacggcagaaagggcgcccacgccccccaggagctgccccaggccaagggcagcgacgacgagctgttcctgggcggcagcaaccaggacagcgtgcagggcctgggcagagccgtgtgccccgccggcggcgaggccggcctgggcggctgcagcagcagcaccaacggcagcagcggcggctgcgagcaggagctgggcctggacctgagcaagaagagcccccccctgccccccgccacccccggcccccacctgacccccgacgacgccgcccagctgagcgacagccagcacggcagcccccccgccgccagcgccccccccgtggccaacagcgccagctacagcgagctgggcggcacccccgacgagcccatggacctggagggcgccgaggacaaccacctgagcctgctggaggcccccggcggccagcccagaaagagcctgagacacagcaccagaaagaaggagtggggcaagaaggagcccgtggccggcagccccttcgagagaagagaggccggccccaagggcccctgccccggcgaggagggcgagggcgtgggcgacagagtgcccaacggcatcctggccagcggcgccggccccagcggcccctacggcgagcccccctacccctgcaaggaggaggaggagaacggcaaggacgccagcgaggacagcgcccagagcggcagcgagggcggcagcggccacgccagcgcccactacatgtacagacaggagggctacgagaccgtgagctacggcgacaacctgtacgtgtgcatcccctgcgccaagggcttccccagcagcgagcagctgaacgcccacgtggagacccacaccgaggaggagctgttcatcaaggaggagggcgcctacgagaccggcagcggcggcgccgaggaggaggccgaggacctgagcgcccccagcgccgcctacaccgccgagcccagacccttcaagtgcagcgtgtgcgagaagacctacaaggaccccgccaccctgagacagcacgagaagacccactggctgaccagacccttcccctgcaacatctgcggcaagatgttcacccagagaggcaccatgaccagacacatgagaagccacctgggcctgaagcccttcgcctgcgacgagtgcggcatgagattcaccagacagtacagactgaccgagcacatgagagtgcacagcggcgagaagccctacgagtgccagctgtgcggcggcaagttcacccagcagagaaacctgatcagccacctgagaatgcacaccagccccagctag

SEQ ID NO: 84972 - DNA, 1848 bp, synthetic construct; identical to SEQ ID NO: 84971
  misc_feature 1..1848: note = Description of Artificial Sequence: Synthetic coding sequence
  source 1..1848: mol_type = other DNA

SEQ ID NO: 84973 - DNA, 1848 bp, synthetic construct; identical to SEQ ID NO: 84971
  misc_feature 1..1848: note = Description of Artificial Sequence: Synthetic coding sequence
  source 1..1848: mol_type = other DNA

SEQ ID NO: 84974 - DNA, 2670 bp, synthetic construct
  misc_feature 1..2670: note = Description of Artificial Sequence: Synthetic coding sequence
  source 1..2670: mol_type = other DNA
atggacgccagaggcggcggcggcagacccggcgagagccccggcgccacccccgcccccggccccccccccccccccccccccgcccccccccagcagcagcccccccccccccccccccccgcccccccccccggccccggccccgcccccccccagcacccccccagagccgaggccctgccccccgaggccgccgacgagggcggccccagaggcagactgagaagcagagacagcagctgcggcagacccggcacccccggcgccgccagcaccgccaagggcagccccaacggcgagtgcggcagaggcgagccccagtgcagccccgccggccccgagggccccgccagaggccccaaggtgagcttcagctgcagaggcgccgccagcggccccgcccccggccccggccccgccgaggaggccggcagcgaggaggccggccccgccggcgagcccagaggcagccaggccagcttcatgcagagacagttcggcgccctgctgcagcccggcgtgaacaagttcagcctgagaatgttcggcagccagaaggccgtggagagagagcaggagagagtgaagagcgccggcgcctggatcatccacccctacagcgacttcagattctactgggacttcaccatgctgctgttcatggtgggcaacctgatcatcatccccgtgggcatcaccttcttcaaggacgagaccaccgccccctggatcgtgttcaacgtggtgagcgacaccttcttcctgatggacctggtgctgaacttcagaaccggcatcgtgatcgaggacaacaccgagatcatcctggaccccgagaagatcaagaagaagtacctgagaacctggttcgtggtggacttcgtgagcagcatccccgtggactacatcttcctgatcgtggagaagggcatcgacagcgaggtgtacaagaccgccagagccctgagaatcgtgagattcaccaagatcctgagcctgctgagactgctgagactgagcagactgatcagatacatccaccagtgggaggagatcttccacatgacctacgacctggccagcgccgtgatgagaatctgcaacctgatcagcatgatgctgctgctgtgccactgggacggctgcctgcagttcctggtgcccatgctgcaggacttccccagaaactgctgggtgagcatcaacggcatggtgaaccacagctggagcgagctgtacagcttcgccctgttcaaggccatgagccacatgctgtgcatcggctacggcagacaggcccccgagagcatgaccgacatctggctgaccatgctgagcatgatcgtgggcgccacctgctacgccatgttcatcggccacgccaccgccctgatccagagcctggacagcagcagaagacagtaccaggagaagtacaagcaggtggagcagtacatgagcttccacaagctgcccgccgacttcagacagaagatccacgactactacgagcacagataccagggcaagatgttcgacgaggacagcatcctgggcgagctgaacggccccctgagagaggagatcgtgaacttcaactgcagaaagctggtggccagcatgcccctgttcgccaacgccgaccccaacttcgtgaccgccatgctgaccaagctgaagttcgaggtgttccagcccggcgactacatcatcagagagggcaccatcggcaagaagatgtacttcatccagcacggcgtggtgagcgtgctgaccaagggcaacaaggagatgaagctgagcgacggcagctacttcggcgagatctgcctgctgaccagaggcagaagaaccgccagcgtgagagccgacacctactgcagactgtacagcctgagcgtggacaacttcaacgaggtgctggaggagtaccccatgatgagaagagccttcgagaccgtggccatcgacagactggacagaatcggcaagaagaacagcatcctgctgcacaaggtgcagcacgacctgaacagcggcgtgttcaacaaccaggagaacgccatcatccaggagatcgtgaagtacgacagagagatggtgcagcaggccgagctgggccagagagtgggcctgttcccccccccccccccccccccccaggtgaccagcgccatcgccaccctgcagcaggccgccgccatgagcttctgcccccaggtggccagacccctggtgggccccctggccctgggcagccccagactggtgagaagacccccccccggccccgcccccgccgccgccagccccggcccccccccccccgccagcccccccggcgcccccgccagccccagagcccccagaaccagcccctacggcggcctgcccgccgcccccctggccggccccgccctgcccgccagaagactgagcagagccagcagacccctgagcgccagccagcccagcctgccccacggcgcccccggccccgccgccagcaccagacccgccagcagcagcacccccagactgggccccacccccgccgccagagccgccgcccccagccccgacagaagagacagcgccagccccggcgccgccggcggcctggacccccaggacagcgccagaagcagactgagcagcaacctgtag

SEQ ID NO: 84975 - DNA, 2325 bp, synthetic construct
  misc_feature 1..2325: note = Description of Artificial Sequence: Synthetic coding sequence
  source 1..2325: mol_type = other DNA
atggaggccgagcagagacccgccgccggcgccagcgagggcgccacccccggcctggaggccgtgccccccgtggcccccccccccgccaccgccgccagcggccccatccccaagagcggccccgagcccaagagaagacacctgggcaccctgctgcagcccaccgtgaacaagttcagcctgagagtgttcggcagccacaaggccgtggagatcgagcaggagagagtgaagagcgccggcgcctggatcatccacccctacagcgacttcagattctactgggacctgatcatgctgctgctgatggtgggcaacctgatcgtgctgcccgtgggcatcaccttcttcaaggaggagaacagccccccctggatcgtgttcaacgtgctgagcgacaccttcttcctgctggacctggtgctgaacttcagaaccggcatcgtggtggaggagggcgccgagatcctgctggcccccagagccatcagaaccagatacctgagaacctggttcctggtggacctgatcagcagcatccccgtggactacatcttcctggtggtggagctggagcccagactggacgccgaggtgtacaagaccgccagagccctgagaatcgtgagattcaccaagatcctgagcctgctgagactgctgagactgagcagactgatcagatacatccaccagtgggaggagatcttccacatgacctacgacctggccagcgccgtggtgagaatcttcaacctgatcggcatgatgctgctgctgtgccactgggacggctgcctgcagttcctggtgcccatgctgcaggacttcccccccgactgctgggtgagcatcaaccacatggtgaaccacagctggggcagacagtacagccacgccctgttcaaggccatgagccacatgctgtgcatcggctacggccagcaggcccccgtgggcatgcccgacgtgtggctgaccatgctgagcatgatcgtgggcgccacctgctacgccatgttcatcggccacgccaccgccctgatccagagcctggacagcagcagaagacagtaccaggagaagtacaagcaggtggagcagtacatgagcttccacaagctgcccgccgacaccagacagagaatccacgagtactacgagcacagataccagggcaagatgttcgacgaggagagcatcctgggcgagctgagcgagcccctgagagaggagatcatcaacttcacctgcagaggcctggtggcccacatgcccctgttcgcccacgccgaccccagcttcgtgaccgccgtgctgaccaagctgagattcgaggtgttccagcccggcgacctggtggtgagagagggcagcgtgggcagaaagatgtacttcatccagcacggcctgctgagcgtgctggccagaggcgccagagacaccagactgaccgacggcagctacttcggcgagatctgcctgctgaccagaggcagaagaaccgccagcgtgagagccgacacctactgcagactgtacagcctgagcgtggaccacttcaacgccgtgctggaggagttccccatgatgagaagagccttcgagaccgtggccatggacagactgctgagaatcggcaagaagaacagcatcctgcagagaaagagaagcgagcccagccccggcagcagcggcggcatcatggagcagcacctggtgcagcacgacagagacatggccagaggcgtgagaggcagagcccccagcaccggcgcccagctgagcggcaagcccgtgctgtgggagcccctggtgcacgcccccctgcaggccgccgccgtgaccagcaacgtggccatcgccctgacccaccagagaggccccctgcccctgagccccgacagccccgccaccctgctggccagaagcgcctggagaagcgccggcagccccgccagccccctggtgcccgtgagagccggcccctgggccagcaccagcagactgcccgccccccccgccagaaccctgcacgccagcctgagcagagccggcagaagccaggtgagcctgctgggccccccccccggcggcggcggcagaagactgggccccagaggcagacccctgagcgccagccagcccagcctgccccagagagccaccggcgacggcagccccggcagaaagggcagcggcagcgagagactgccccccagcggcctgctggccaagccccccagaaccgcccagccccccagaccccccgtgcccgagcccgccacccccagaggcctgcagctgagcgccaacatgtag

SEQ ID NO: 84976 - DNA, 3612 bp, synthetic construct
  misc_feature 1..3612: note = Description of Artificial Sequence: Synthetic coding sequence
  source 1..3612: mol_type = other DNA
atggacaagctgccccccagcatgagaaagagactgtacagcctgccccagcaggtgggcgccaaggcctggatcatggacgaggaggaggacgccgaggaggagggcgccggcggcagacaggaccccagcagaagaagcatcagactgagacccctgcccagccccagccccagcgccgccgccggcggcaccgagagcagaagcagcgccctgggcgccgccgacagcgagggccccgccagaggcgccggcaagagcagcaccaacggcgactgcagaagattcagaggcagcctggccagcctgggcagcagaggcggcggcagcggcggcaccggcagcggcagcagccacggccacctgcacgacagcgccgaggagagaagactgatcgccgagggcgacgccagccccggcgaggacagaaccccccccggcctggccgccgagcccgagagacccggcgccagcgcccagcccgccgccagccccccccccccccagcagcccccccagcccgccagcgccagctgcgagcagcccagcgtggacaccgccatcaaggtggagggcggcgccgccgccggcgaccagatcctgcccgaggccgaggtgagactgggccaggccggcttcatgcagagacagttcggcgccatgctgcagcccggcgtgaacaagttcagcctgagaatgttcggcagccagaaggccgtggagagagagcaggagagagtgaagagcgccggcttctggatcatccacccctacagcgacttcagattctactgggacctgaccatgctgctgctgatggtgggcaacctgatcatcatccccgtgggcatcaccttcttcaaggacgagaacaccaccccctggatcgtgttcaacgtggtgagcgacaccttcttcctgatcgacctggtgctgaacttcagaaccggcatcgtggtggaggacaacaccgagatcatcctggacccccagagaatcaagatgaagtacctgaagagctggttcatggtggacttcatcagcagcatccccgtggactacatcttcctgatcgtggagaccagaatcgacagcgaggtgtacaagaccgccagagccctgagaatcgtgagattcaccaagatcctgagcctgctgagactgctgagactgagcagactgatcagatacatccaccagtgggaggagatcttccacatgacctacgacctggccagcgccgtggtgagaatcgtgaacctgatcggcatgatgctgctgctgtgccactgggacggctgcctgcagttcctggtgcccatgctgcaggacttccccgacgactgctgggtgagcatcaacaacatggtgaacaacagctggggcaagcagtacagctacgccctgttcaaggccatgagccacatgctgtgcatcggctacggcagacaggcccccgtgggcatgagcgacgtgtggctgaccatgctgagcatgatcgtgggcgccacctgctacgccatgttcatcggccacgccaccgccctgatccagagcctggacagcagcagaagacagtaccaggagaagtacaagcaggtggagcagtacatgagcttccacaagctgccccccgacaccagacagagaatccacgactactacgagcacagataccagggcaagatgttcgacgaggagagcatcctgggcgagctgagcgagcccctgagagaggagatcatcaacttcaactgcagaaagctggtggccagcatgcccctgttcgccaacgccgaccccaacttcgtgaccagcatgctgaccaagctgagattcgaggtgttccagcccggcgactacatcatcagagagggcaccatcggcaagaagatgtacttcatccagcacggcgtggtgagcgtgctgaccaagggcaacaaggagaccaagctggccgacggcagctacttcggcgagatctgcctgctgaccagaggcagaagaaccgccagcgtgagagccgacacctactgcagactgtacagcctgagcgtggacaacttcaacgaggtgctggaggagtaccccatgatgagaagagccttcgagaccgtggccctggacagactggacagaatcggcaagaagaacagcatcctgctgcacaaggtgcagcacgacctgaacagcggcgtgttcaactaccaggagaacgagatcatccagcagatcgtgcagcacgacagagagatggcccactgcgcccacagagtgcaggccgccgccagcgccacccccacccccacccccgtgatctggacccccctgatccaggcccccctgcaggccgccgccgccaccaccagcgtggccatcgccctgacccaccaccccagactgcccgccgccatcttcagacccccccccggcagcggcctgggcaacctgggcgccggccagacccccagacacctgaagagactgcagagcctgatccccagcgccctgggcagcgccagccccgccagcagccccagccaggtggacacccccagcagcagcagcttccacatccagcagctggccggcttcagcgcccccgccggcctgagccccctgctgcccagcagcagcagcagccccccccccggcgcctgcggcagccccagcgcccccacccccagcgccggcgtggccgccaccaccatcgccggcttcggccacttccacaaggccctgggcggcagcctgagcagcagcgacagccccctgctgacccccctgcagcccggcgccagaagcccccaggccgcccagcccagccccgccccccccggcgccagaggcggcctgggcctgcccgagcacttcctgccccccccccccagcagcagaagccccagcagcagccccggccagctgggccagccccccggcgagctgagcctgggcctggccaccggccccctgagcacccccgagaccccccccagacagcccgagccccccagcctggtggccggcgccagcggcggcgccagccccgtgggcttcacccccagaggcggcctgagcccccccggccacagccccggcccccccagaaccttccccagcgccccccccagagccagcggcagccacggcagcctgctgctgccccccgccagcagccccccccccccccaggtgccccagagaagaggcaccccccccctgacccccggcagactgacccaggacctgaagctgatcagcgccagccagcccgccctgccccaggacggcgcccagaccctgagaagagccagcccccacagcagcggcgagagcatggccgccttccccctgttccccagagccggcggcggcagcggcggcagcggcagcagcggcggcctgggcccccccggcagaccctacggcgccatccccggccagcacgtgaccctgcccagaaagaccagcagcggcagcctgcccccccccctgagcctgttcggcgccagagccaccagcagcggcggcccccccctgaccgccggcccccagagagagcccggcgccagacccgagcccgtgagaagcaagctgcccagcaacctgtag

SEQ ID NO: 84977 - DNA, 396 bp, synthetic construct
  misc_feature 1..396: note = Description of Artificial Sequence: Synthetic coding sequence
  source 1..396: mol_type = other DNA
atgaacctgcccagcaccaaggtgagctgggccgccgtgaccctgctgctgctgctgctgctgctgccccccgccctgctgagcagcggcgccgccgcccagcccctgcccgactgctgcagacagaagacctgcagctgcagactgtacgagctgctgcacggcgccggcaaccacgccgccggcatcctgaccctgggcaagagaagaagcggcccccccggcctgcagggcagactgcagagactgctgcaggccagcggcaaccacgccgccggcatcctgaccatgggcagaagagccggcgccgagcccgcccccagaccctgcctgggcagaagatgcagcgcccccgccgccgccagcgtggcccccggcggccagagcggcatctag

SEQ ID NO: 84978 - DNA, 1050 bp, synthetic construct
  misc_feature 1..1050: note = Description of Artificial Sequence: Synthetic coding sequence
  source 1..1050: mol_type = other DNA
atggccgccaccgccgccgaggccgtggccagcggcagcggcgagcccagagaggaggccggcgccctgggccccgcctgggacgagagccagctgagaagctacagcttccccaccagacccatccccagactgagccagagcgaccccagagccgaggagctgatcgagaacgaggagcccgtggtgctgaccgacaccaacctggtgtaccccgccctgaagtgggacctggagtacctgcaggagaacatcggcaacggcgacttcagcgtgtacagcgccagcacccacaagttcctgtactacgacgagaagaagatggccaacttccagaacttcaagcccagaagcaacagagaggagatgaagttccacgagttcgtggagaagctgcaggacatccagcagagaggcggcgaggagagactgtacctgcagcagaccctgaacgacaccgtgggcagaaagatcgtgatggacttcctgggcttcaactggaactggatcaacaagcagcagggcaagagaggctggggccagctgaccagcaacctgctgctgatcggcatggagggcaacgtgacccccgcccactacgacgagcagcagaacttcttcgcccagatcaagggctacaagagatgcatcctgttcccccccgaccagttcgagtgcctgtacccctaccccgtgcaccacccctgcgacagacagagccaggtggacttcgacaaccccgactacgagagattccccaacttccagaacgtggtgggctacgagaccgtggtgggccccggcgacgtgctgtacatccccatgtactggtggcaccacatcgagagcctgctgaacggcggcatcaccatcaccgtgaacttctggtacaagggcgcccccacccccaagagaatcgagtaccccctgaaggcccaccagaaggtggccatcatgagaaacatcgagaagatgctgggcgaggccctgggcaacccccaggaggtgggccccctgctgaacaccatgatcaagggcagatacaactag

SEQ ID NO: 84979 - DNA, 1149 bp, synthetic construct
  misc_feature 1..1149: note = Description of Artificial Sequence: Synthetic coding sequence
  source 1..1149: mol_type = other DNA
atggtgagcgtgggctgcgtggtgttcctgttcttcttcttcggcgtgagaaacagaagaagcttcagattcagatggggccccagcctggccgccgagatggccgccaccgccgccgaggccgtggccagcggcagcggcgagcccagagaggaggccggcgccctgggccccgcctgggacgagagccagctgagaagctacagcttccccaccagacccatccccagactgagccagagcgaccccagagccgaggagctgatcgagaacgaggagcccgtggtgctgaccgacaccaacctggtgtaccccgccctgaagtgggacctggagtacctgcaggagaacatcggcaacggcgacttcagcgtgtacagcgccagcacccacaagttcctgtactacgacgagaagaagatggccaacttccagaacttcaagcccagaagcaacagagaggagatgaagttccacgagttcgtggagaagctgcaggacatccagcagagaggcggcgaggagagactgtacctgcagcagaccctgaacgacaccgtgggcagaaagatcgtgatggacttcctgggcttcaactggaactggatcaacaagcagcagggcaagagaggctggggccagctgaccagcaacctgctgctgatcggcatggagggcaacgtgacccccgcccactacgacgagcagcagaacttcttcgcccagatcaagggctacaagagatgcatcctgttcccccccgaccagttcgagtgcctgtacccctaccccgtgcaccacccctgcgacagacagagccaggtggacttcgacaaccccgactacgagagattccccaacttccagaacgtggtgggctacgagaccgtggtgggccccggcgacgtgctgtacatccccatgtactggtggcaccacatcgagagcctgctgaacggcggcatcaccatcaccgtgaacttctggtacaagggcgcccccacccccaagagaatcgagtaccccctgaaggcccaccagaaggtggccatcatgagaaacatcgagaagatgctgggcgaggccctgggcaacccccaggaggtgggccccctgctgaacaccatgatcaagggcagatacaactag

SEQ ID NO: 84980 - DNA, 579 bp, synthetic construct
  misc_feature 1..579: note = Description of Artificial Sequence: Synthetic coding sequence
  source 1..579: mol_type = other DNA
atggccaacttccagaacttcaagcccagaagcaacagagaggagatgaagttccacgagttcgtggagaagctgcaggacatccagcagagaggcggcgaggagagactgtacctgcagcagaccctgaacgacaccgtgggcagaaagatcgtgatggacttcctgggcttcaactggaactggatcaacaagcagcagggcaagagaggctggggccagctgaccagcaacctgctgctgatcggcatggagggcaacgtgacccccgcccactacgacgagcagcagaacttcttcgcccagatcaagggctacaagagatgcatcctgttcccccccgaccagttcgagtgcctgtacccctaccccgtgcaccacccctgcgacagacagagccaggtggacttcgacaaccccgactacgagagattccccaacttccagaacgtggtgggctacgagaccgtggtgggccccggcgacgtgctgtacatccccatgtactggtggcaccacatcgagagcctgctgaacggcggcatcaccatcaccgtgaacttctggtacaagggctag

SEQ ID NO: 84981 - DNA, 1803 bp, synthetic construct
  misc_feature 1..1803: note = Description of Artificial Sequence: Synthetic coding sequence
  source 1..1803: mol_type = other DNA
atgagacccgccgccggcgccgccagaagacccagatgctgcaccagctggctgaccagatgccccagccccgccgccagcgcccccacctggaccagacccctgagctgcgccagccccagcgccacctgcgcctgcaccgccagcgccccccagctggagctgatcggccacagcatcttcgacttcatccacccctgcgaccaggaggagctgcaggacgccctgaccccccagcagaccctgagcagaagaaaggtggaggcccccaccgagagatgcttcagcctgagaatgaagagcaccctgaccagcagaggcagaaccctgaacctgaaggccgccacctggaaggtgctgaactgcagcggccacatgagagcctacaagccccccgcccagaccagccccgccggcagccccgacagcgagccccccctgcagtgcctggtgctgatctgcgaggccatcccccaccccggcagcctggagccccccctgggcagaggcgccttcctgagcagacacagcctggacatgaagttcacctactgcgacgacagaatcgccgaggtggccggctacagccccgacgacctgatcggctgcagcgcctacgagtacatccacgccctggacagcgacgccgtgagcaagagcatccacaccctgctgagcaagggccaggccgtgaccggccagtacagattcctggccagaagcggcggctacctgtggacccagacccaggccaccgtggtgagcggcggcagaggcccccagagcgagagcatcgtgtgcgtgcacttcctgatcagccaggtggaggagaccggcgtggtgctgagcctggagcagaccgagcagcacagcagaagacccatccagagaggcgcccccagccagaaggacacccccaaccccggcgacagcctggacacccccggccccagaatcctggccttcctgcacccccccagcctgagcgaggccgccctggccgccgaccccagaagattctgcagccccgacctgagaagactgctgggccccatcctggacggcgccagcgtggccgccacccccagcacccccctggccaccagacacccccagagccccctgagcgccgacctgcccgacgagctgcccgtgggcaccgagaacgtgcacagactgttcaccagcggcaaggacaccgaggccgtggagaccgacctggacatcgcccaggacgccgacgccctggacctggagatgctggccccctacatcagcatggacgacgacttccagctgaacgccagcgagcagctgcccagagcctaccacagacccctgggcgccgtgcccagacccagagccagaagcttccacggcctgagcccccccgccctggagcccagcctgctgcccagatggggcagcgaccccagactgagctgcagcagccccagcagaggcgaccccagcgccagcagccccatggccggcgccagaaagagaaccctggcccagagcagcgaggacgaggacgagggcgtggagctgctgggcgtgagaccccccaagagaagccccagccccgagcacgagaacttcctgctgttccccctgagcctgagcttcctgctgaccggcggccccgcccccggcagcctgcaggaccccagcacccccctgctgaacctgaacgagcccctgggcctgggccccagcctgctgagcccctacagcgacgaggacaccacccagcccggcggccccttccagcccagagccggcagcgcccaggccgactag

SEQ ID NO: 84982 - DNA, 1353 bp, synthetic construct
  misc_feature 1..1353: note = Description of Artificial Sequence: Synthetic coding sequence
  source 1..1353: mol_type = other DNA
atgagacccgccgccggcgccgccagaagacccagatgctgcaccagctggctgaccagatgccccagccccgccgccagcgcccccacctggaccagacccctgagctgcgccagccccagcgccacctgcgcctgcaccgccagcgccccccagctggagctgatcggccacagcatcttcgacttcatccacccctgcgaccaggaggagctgcaggacgccctgaccccccagcagaccctgagcagaagaaaggtggaggcccccaccgagagatgcttcagcctgagaatgaagagcaccctgaccagcagaggcagaaccctgaacctgaaggccgccacctggaaggtgctgaactgcagcggccacatgagagcctacaagccccccgcccagaccagccccgccggcagccccgacagcgagccccccctgcagtgcctggtgctgatctgcgaggccatcccccaccccggcagcctggagccccccctgggcagaggcgccttcctgagcagacacagcctggacatgaagttcacctactgcgacgacagaatcgccgaggtggccggctacagccccgacgacctgatcggctgcagcgcctacgagtacatccacgccctggacagcgacgccgtgagcaagagcatccacaccctgctgagcaagggccaggccgtgaccggccagtacagattcctggccagaagcggcggctacctgtggacccagacccaggccaccgtggtgagcggcggcagaggcccccagagcgagagcatcgtgtgcgtgcacttcctgatcagccaggtggaggagaccggcgtggtgctgagcctggagcagaccgagcagcacagcagaagacccatccagagaggcgcccccagccagaaggacacccccaaccccggcgacagcctggacacccccggccccagaatcctggccttcctgcacccccccagcctgagcgaggccgccctggccgccgaccccagaagattctgcagccccgacctgagaagactgctgggccccatcctggacggcgccagcgtggccgccacccccagcacccccctggccaccagacacccccagagccccctgagcgccgacctgcccgacgagctgcccgtgggcaccgagaacgtgcacagactgttcaccagcggcaaggacaccgaggccgtggagaccgacctggacatcgcccaggaccccagcacccccctgctgaacctgaacgagcccctgggcttccacttcgtgacccagagcggcgtgcagtggcacaagcacagcagcccccagcccagaccccccggcctgaagtag

SEQ ID NO: 84983 - DNA, 1899 bp, synthetic construct
  misc_feature 1..1899: note = Description of Artificial Sequence: Synthetic coding sequence
  source 1..1899: mol_type = other DNA
atggccctgggcctgcagagagccagaagcaccaccgagctgagaaaggagaagagcagagacgccgccagaagcagaagaagccaggagaccgaggtgctgtaccagctggcccacaccctgcccttcgccagaggcgtgagcgcccacctggacaaggccagcatcatgagactgaccatcagctacctgagaatgcacagactgtgcgccgccggcgagtggaaccaggtgggcgccggcggcgagcccctggacgcctgctacctgaaggccctggagggcttcgtgatggtgctgaccgccgagggcgacatggcctacctgagcgagaacgtgagcaagcacctgggcctgagccagctggagctgatcggccacagcatcttcgacttcatccacccctgcgaccaggaggagctgcaggacgccctgaccccccagcagaccctgagcagaagaaaggtggaggcccccaccgagagatgcttcagcctgagaatgaagagcaccctgaccagcagaggcagaaccctgaacctgaaggccgccacctggaaggtgctgaactgcagcggccacatgagagcctacaagccccccgcccagaccagccccgccggcagccccgacagcgagccccccctgcagtgcctggtgctgatctgcgaggccatcccccaccccggcagcctggagccccccctgggcagaggcgccttcctgagcagacacagcctggacatgaagttcacctactgcgacgacagaatcgccgaggtggccggctacagccccgacgacctgatcggctgcagcgcctacgagtacatccacgccctggacagcgacgccgtgagcaagagcatccacaccctgctgagcaagggccaggccgtgaccggccagtacagattcctggccagaagcggcggctacctgtggacccagacccaggccaccgtggtgagcggcggcagaggcccccagagcgagagcatcgtgtgcgtgcacttcctgatcagccaggtggaggagaccggcgtggtgctgagcctggagcagaccgagcagcacagcagaagacccatccagagaggcgcccccagccagaaggacacccccaaccccggcgacagcctggacacccccggccccagaatcctggccttcctgcacccccccagcctgagcgaggccgccctggccgccgaccccagaagattctgcagccccgacctgagaagactgctgggccccatcctggacggcgccagcgtggccgccacccccagcacccccctggccaccagacacccccagagccccctgagcgccgacctgcccgacgagctgcccgtgggcaccgagaacgtgcacagactgttcaccagcggcaaggacaccgaggccgtggagaccgacctggacatcgcccaggacgccgacgccctggacctggagatgctggccccctacatcagcatggacgacgacttccagctgaacgccagcgagcagctgcccagagcctaccacagacccctgggcgccgtgcccagacccagagccagaagcttccacggcctgagcccccccgccctggagcccagcctgctgcccagatggggcagcgaccccagactgagctgcagcagccccagcagaggcgaccccagcgccagcagccccatggccggcgccagaaagagaaccctggcccagagcagcgaggacgaggacgagggcgtggagctgctgggcgtgagaccccccaagagaagccccagccccgagcacgagaacttcctgctgttccccctgagcctggtgtgctggggcatcaacggcatcctgtggcccagcctgcccagctggctgaagcccaccgtgctgtag

SEQ ID NO: 84984 - DNA, 1731 bp, synthetic construct
  misc_feature 1..1731: note = Description of Artificial Sequence: Synthetic coding sequence
  source 1..1731: mol_type = other DNA
atgagactgaccatcagctacctgagaatgcacagactgtgcgccgccggcgagtggaaccaggtgggcgccggcggcgagcccctggacgcctgctacctgaaggccctggagggcttcgtgatggtgctgaccgccgagggcgacatggcctacctgagcgagaacgtgagcaagcacctgggcctgagccagctggagctgatcggccacagcatcttcgacttcatccacccctgcgaccaggaggagctgcaggacgccctgaccccccagcagaccctgagcagaagaaaggtggaggcccccaccgagagatgcttcagcctgagaatgaagagcaccctgaccagcagaggcagaaccctgaacctgaaggccgccacctggaaggtgctgaactgcagcggccacatgagagcctacaagccccccgcccagaccagccccgccggcagccccgacagcgagccccccctgcagtgcctggtgctgatctgcgaggccatcccccaccccggcagcctggagccccccctgggcagaggcgccttcctgagcagacacagcctggacatgaagttcacctactgcgacgacagaatcgccgaggtggccggctacagccccgacgacctgatcggctgcagcgcctacgagtacatccacgccctggacagcgacgccgtgagcaagagcatccacaccctgctgagcaagggccaggccgtgaccggccagtacagattcctggccagaagcggcggctacctgtggacccagacccaggccaccgtggtgagcggcggcagaggcccccagagcgagagcatcgtgtgcgtgcacttcctgatcagccaggtggaggagaccggcgtggtgctgagcctggagcagaccgagcagcacagcagaagacccatccagagaggcgcccccagccagaaggacacccccaaccccggcgacagcctggacacccccggccccagaatcctggccttcctgcacccccccagcctgagcgaggccgccctggccgccgaccccagaagattctgcagccccgacctgagaagactgctgggccccatcctggacggcgccagcgtggccgccacccccagcacccccctggccaccagacacccccagagccccctgagcgccgacctgcccgacgagctgcccgtgggcaccgagaacgtgcacagactgttcaccagcggcaaggacaccgaggccgtggagaccgacctggacatcgcccaggacgccgacgccctggacctggagatgctggccccctacatcagcatggacgacgacttccagctgaacgccagcgagcagctgcccagagcctaccacagacccctgggcgccgtgcccagacccagagccagaagcttccacggcctgagcccccccgccctggagcccagcctgctgcccagatggggcagcgaccccagactgagctgcagcagccccagcagaggcgaccccagcgccagcagccccatggccggcgccagaaagagaaccctggcccagagcagcgaggacgaggacgagggcgtggagctgctgggcgtgagaccccccaagagaagccccagccccgagcacgagaacttcctgctgttccccctgagcctggtgtgctggggcatcaacggcatcctgtggcccagcctgcccagctggctgaagcccaccgtgctgtag

SEQ ID NO: 84985 - DNA, 2004 bp, synthetic construct
  misc_feature 1..2004: note = Description of Artificial Sequence: Synthetic coding sequence
  source 1..2004: mol_type = other DNA
atggactggcaggaccacagaagcaccaccgagctgagaaaggagaagagcagagacgccgccagaagcagaagaagccaggagaccgaggtgctgtaccagctggcccacaccctgcccttcgccagaggcgtgagcgcccacctggacaaggccagcatcatgagactgaccatcagctacctgagaatgcacagactgtgcgccgccggcgagtggaaccaggtgggcgccggcggcgagcccctggacgcctgctacctgaaggccctggagggcttcgtgatggtgctgaccgccgagggcgacatggcctacctgagcgagaacgtgagcaagcacctgggcctgagccagctggagctgatcggccacagcatcttcgacttcatccacccctgcgaccaggaggagctgcaggacgccctgaccccccagcagaccctgagcagaagaaaggtggaggcccccaccgagagatgcttcagcctgagaatgaagagcaccctgaccagcagaggcagaaccctgaacctgaaggccgccacctggaaggtgctgaactgcagcggccacatgagagcctacaagccccccgcccagaccagccccgccggcagccccgacagcgagccccccctgcagtgcctggtgctgatctgcgaggccatcccccaccccggcagcctggagccccccctgggcagaggcgccttcctgagcagacacagcctggacatgaagttcacctactgcgacgacagaatcgccgaggtggccggctacagccccgacgacctgatcggctgcagcgcctacgagtacatccacgccctggacagcgacgccgtgagcaagagcatccacaccctgctgagcaagggccaggccgtgaccggccagtacagattcctggccagaagcggcggctacctgtggacccagacccaggccaccgtggtgagcggcggcagaggcccccagagcgagagcatcgtgtgcgtgcacttcctgatcagccaggtggaggagaccggcgtggtgctgagcctggagcagaccgagcagcacagcagaagacccatccagagaggcgcccccagccagaaggacacccccaaccccggcgacagcctggacacccccggccccagaatcctggccttcctgcacccccccagcctgagcgaggccgccctggccgccgaccccagaagattctgcagccccgacctgagaagactgctgggccccatcctggacggcgccagcgtggccgccacccccagcacccccctggccaccagacacccccagagccccctgagcgccgacctgcccgacgagctgcccgtgggcaccgagaacgtgcacagactgttcaccagcggcaaggacaccgaggccgtggagaccgacctggacatcgcccaggacgccgacgccctggacctggagatgctggccccctacatcagcatggacgacgacttccagctgaacgccagcgagcagctgcccagagcctaccacagacccctgggcgccgtgcccagacccagagccagaagcttccacggcctgagcccccccgccctggagcccagcctgctgcccagatggggcagcgaccccagactgagctgcagcagccccagcagaggcgaccccagcgccagcagccccatggccggcgccagaaagagaaccctggcccagagcagcgaggacgaggacgagggcgtggagctgctgggcgtgagaccccccaagagaagccccagccccgagcacgagaacttcctgctgttccccctgagcctgagcttcctgctgaccggcggccccgcccccggcagcctgcaggaccccagcacccccctgctgaacctgaacgagcccctgggcctgggccccagcctgctgagcccctacagcgacgaggacaccacccagcccggcggccccttccagcccagagccggcagcgcccaggccgactag

SEQ ID NO: 84986 - DNA, 1842 bp, synthetic construct
  misc_feature 1..1842: note = Description of Artificial Sequence: Synthetic coding sequence
  source 1..1842: mol_type = other DNA
atgagactgaccatcagctacctgagaatgcacagactgtgcgccgccggcgagtggaaccaggtgggcgccggcggcgagcccctggacgcctgctacctgaaggccctggagggcttcgtgatggtgctgaccgccgagggcgacatggcctacctgagcgagaacgtgagcaagcacctgggcctgagccagctggagctgatcggccacagcatcttcgacttcatccacccctgcgaccaggaggagctgcaggacgccctgaccccccagcagaccctgagcagaagaaaggtggaggcccccaccgagagatgcttcagcctgagaatgaagagcaccctgaccagcagaggcagaaccctgaacctgaaggccgccacctggaaggtgctgaactgcagcggccacatgagagcctacaagccccccgcccagaccagccccgccggcagccccgacagcgagccccccctgcagtgcctggtgctgatctgcgaggccatcccccaccccggcagcctggagccccccctgggcagaggcgccttcctgagcagacacagcctggacatgaagttcacctactgcgacgacagaatcgccgaggtggccggctacagccccgacgacctgatcggctgcagcgcctacgagtacatccacgccctggacagcgacgccgtgagcaagagcatccacaccctgctgagcaagggccaggccgtgaccggccagtacagattcctggccagaagcggcggctacctgtggacccagacccaggccaccgtggtgagcggcggcagaggcccccagagcgagagcatcgtgtgcgtgcacttcctgatcagccaggtggaggagaccggcgtggtgctgagcctggagcagaccgagcagcacagcagaagacccatccagagaggcgcccccagccagaaggacacccccaaccccggcgacagcctggacacccccggccccagaatcctggccttcctgcacccccccagcctgagcgaggccgccctggccgccgaccccagaagattctgcagccccgacctgagaagactgctgggccccatcctggacggcgccagcgtggccgccacccccagcacccccctggccaccagacacccccagagccccctgagcgccgacctgcccgacgagctgcccgtgggcaccgagaacgtgcacagactgttcaccagcggcaaggacaccgaggccgtggagaccgacctggacatcgcccaggacgccgacgccctggacctggagatgctggccccctacatcagcatggacgacgacttccagctgaacgccagcgagcagctgcccagagcctaccacagacccctgggcgccgtgcccagacccagagccagaagcttccacggcctgagcccccccgccctggagcccagcctgctgcccagatggggcagcgaccccagactgagctgcagcagccccagcagaggcgaccccagcgccagcagccccatggccggcgccagaaagagaaccctggcccagagcagcgaggacgaggacgagggcgtggagctgctgggcgtgagaccccccaagagaagccccagccccgagcacgagaacttcctgctgttccccctgagcctgagcttcctgctgaccggcggccccgcccccggcagcctgcaggaccccagcacccccctgctgaacctgaacgagcccctgggcctgggccccagcctgctgagcccctacagcgacgaggacaccacccagcccggcggccccttccagcccagagccggcagcgcccaggccgactag

SEQ ID NO: 84987 - DNA, 2010 bp, synthetic construct
  misc_feature 1..2010: note = Description of Artificial Sequence: Synthetic coding sequence
  source 1..2010: mol_type = other DNA
atggccctgggcctgcagagagccagaagcaccaccgagctgagaaaggagaagagcagagacgccgccagaagcagaagaagccaggagaccgaggtgctgtaccagctggcccacaccctgcccttcgccagaggcgtgagcgcccacctggacaaggccagcatcatgagactgaccatcagctacctgagaatgcacagactgtgcgccgccggcgagtggaaccaggtgggcgccggcggcgagcccctggacgcctgctacctgaaggccctggagggcttcgtgatggtgctgaccgccgagggcgacatggcctacctgagcgagaacgtgagcaagcacctgggcctgagccagctggagctgatcggccacagcatcttcgacttcatccacccctgcgaccaggaggagctgcaggacgccctgaccccccagcagaccctgagcagaagaaaggtggaggcccccaccgagagatgcttcagcctgagaatgaagagcaccctgaccagcagaggcagaaccctgaacctgaaggccgccacctggaaggtgctgaactgcagcggccacatgagagcctacaagccccccgcccagaccagccccgccggcagccccgacagcgagccccccctgcagtgcctggtgctgatctgcgaggccatcccccaccccggcagcctggagccccccctgggcagaggcgccttcctgagcagacacagcctggacatgaagttcacctactgcgacgacagaatcgccgaggtggccggctacagccccgacgacctgatcggctgcagcgcctacgagtacatccacgccctggacagcgacgccgtgagcaagagcatccacaccctgctgagcaagggccaggccgtgaccggccagtacagattcctggccagaagcggcggctacctgtggacccagacccaggccaccgtggtgagcggcggcagaggcccccagagcgagagcatcgtgtgcgtgcacttcctgatcagccaggtggaggagaccggcgtggtgctgagcctggagcagaccgagcagcacagcagaagacccatccagagaggcgcccccagccagaaggacacccccaaccccggcgacagcctggacacccccggccccagaatcctggccttcctgcacccccccagcctgagcgaggccgccctggccgccgaccccagaagattctgcagccccgacctgagaagactgctgggccccatcctggacggcgccagcgtggccgccacccccagcacccccctggccaccagacacccccagagccccctgagcgccgacctgcccgacgagctgcccgtgggcaccgagaacgtgcacagactgttcaccagcggcaaggacaccgaggccgtggagaccgacctggacatcgcccaggacgccgacgccctggacctggagatgctggccccctacatcagcatggacgacgacttccagctgaacgccagcgagcagctgcccagagcctaccacagacccctgggcgccgtgcccagacccagagccagaagcttccacggcctgagcccccccgccctggagcccagcctgctgcccagatggggcagcgaccccagactgagctgcagcagccccagcagaggcgaccccagcgccagcagccccatggccggcgccagaaagagaaccctggcccagagcagcgaggacgaggacgagggcgtggagctgctgggcgtgagaccccccaagagaagccccagccccgagcacgagaacttcctgctgttccccctgagcctgagcttcctgctgaccggcggccccgcccccggcagcctgcaggaccccagcacccccctgctgaacctgaacgagcccctgggcctgggccccagcctgctgagcccctacagcgacgaggacaccacccagcccggcggccccttccagcccagagccggcagcgcccaggccgactag

SEQ ID NO: 84988 - DNA, 1092 bp, synthetic construct
  misc_feature 1..1092: note = Description of Artificial Sequence: Synthetic coding sequence
  source 1..1092: mol_type = other DNA
atggccctgggcctgcagagagccagaagcaccaccgagctgagaaaggagaagagcagagacgccgccagaagcagaagaagccaggagaccgaggtgctgtaccagctggcccacaccctgcccttcgccagaggcgtgagcgcccacctggacaaggccagcatcatgagactgaccatcagctacctgagaatgcacagactgtgcgccgccggcgagtggaaccaggtgggcgccggcggcgagcccctggacgcctgctacctgaaggccctggagggcttcgtgatggtgctgaccgccgagggcgacatggcctacctgagcgagaacgtgagcaagcacctgggcctgagccagctggagctgatcggccacagcatcttcgacttcatccacccctgcgaccaggaggagctgcaggacgccctgaccccccagcagaccctgagcagaagaaaggtggaggcccccaccgagagatgcttcagcctgagaatgaagagcaccctgaccagcagaggcagaaccctgaacctgaaggccgccacctggaaggtgctgaactgcagcggccacatgagagcctacaagccccccgcccagaccagccccgccggcagccccgacagcgagccccccctgcagtgcctggtgctgatctgcgaggccatcccccaccccggcagcctggagccccccctgggcagaggcgccttcctgagcagacacagcctggacatgaagttcacctactgcgacgacagaatcgccgaggtggccggctacagccccgacgacctgatcggctgcagcgcctacgagtacatccacgccctggacagcgacgccgtgagcaagagcatccacacctgcatgtaccccatcagccccggcgccaagcccgccgccacctggccccccgccgacaccagaaccccccagctgcccatcccccaggacgccctgcccccccacctgaacaccagcagcctgctgcccaagccccagggcaccgtgagcttcctggcccccagctaccccgtgcccagatacttcagcccccacctgcccccctggtggccctag

SEQ ID NO: 84989 - DNA, 1839 bp, synthetic construct
  misc_feature 1..1839: note = Description of Artificial Sequence: Synthetic coding sequence
  source 1..1839: mol_type = other DNA
atgctgcccatgcccagcggcagacccagaagctgcgccagaaagagccccggcatgagacccgccgccggcgccgccagaagacccagatgctgcaccagctggctgaccagatgccccagccccgccgccagcgcccccacctggaccagacccctgagctgcgccagccccagcgccacctgcgcctgcaccgccagcgccccccagctggagctgatcggccacagcatcttcgacttcatccacccctgcgaccaggaggagctgcaggacgccctgaccccccagcagaccctgagcagaagaaaggtggaggcccccaccgagagatgcttcagcctgagaatgaagagcaccctgaccagcagaggcagaaccctgaacctgaaggccgccacctggaaggtgctgaactgcagcggccacatgagagcctacaagccccccgcccagaccagccccgccggcagccccgacagcgagccccccctgcagtgcctggtgctgatctgcgaggccatcccccaccccggcagcctggagccccccctgggcagaggcgccttcctgagcagacacagcctggacatgaagttcacctactgcgacgacagaatcgccgaggtggccggctacagccccgacgacctgatcggctgcagcgcctacgagtacatccacgccctggacagcgacgccgtgagcaagagcatccacaccctgctgagcaagggccaggccgtgaccggccagtacagattcctggccagaagcggcggctacctgtggacccagacccaggccaccgtggtgagcggcggcagaggcccccagagcgagagcatcgtgtgcgtgcacttcctgatcagccaggtggaggagaccggcgtggtgctgagcctggagcagaccgagcagcacagcagaagacccatccagagaggcgcccccagccagaaggacacccccaaccccggcgacagcctggacacccccggccccagaatcctggccttcctgcacccccccagcctgagcgaggccgccctggccgccgaccccagaagattctgcagccccgacctgagaagactgctgggccccatcctggacggcgccagcgtggccgccacccccagcacccccctggccaccagacacccccagagccccctgagcgccgacctgcccgacgagctgcccgtgggcaccgagaacgtgcacagactgttcaccagcggcaaggacaccgaggccgtggagaccgacctggacatcgcccaggacgccgacgccctggacctggagatgctggccccctacatcagcatggacgacgacttccagctgaacgccagcgagcagctgcccagagcctaccacagacccctgggcgccgtgcccagacccagagccagaagcttccacggcctgagcccccccgccctggagcccagcctgctgcccagatggggcagcgaccccagactgagctgcagcagccccagcagaggcgaccccagcgccagcagccccatggccggcgccagaaagagaaccctggcccagagcagcgaggacgaggacgagggcgtggagctgctgggcgtgagaccccccaagagaagccccagccccgagcacgagaacttcctgctgttccccctgagcctgagcttcctgctgaccggcggccccgcccccggcagcctgcaggaccccagcacccccctgctgaacctgaacgagcccctgggcttccacttcgtgacccagagcggcgtgcagtggcacaagcacagcagcccccagcccagaccccccggcctgaagtag

SEQ ID NO: 84990 - DNA, 600 bp, synthetic construct
  misc_feature 1..600: note = Description of Artificial Sequence: Synthetic coding sequence
  source 1..600: mol_type = other DNA
atgagacccgccgccggcgccgccagaagacccagatgctgcaccagctggctgaccagatgccccagccccgccgccagcgcccccacctggaccagacccctgagctgcgccagccccagcgccacctgcgcctgcaccgccagcgccccccagctggagctgatcggccacagcatcttcgacttcatccacccctgcgaccaggaggagctgcaggacgccctgaccccccagcagaccctgagcagaagaaaggtggaggcccccaccgagagatgcttcagcctgagaatgaagagcaccctgaccagcagaggcagaaccctgaacctgaaggccgccacctggaaggtgctgaactgcagcggccacatgagagcctacaagccccccgcccagaccagccccgccggcagccccgacagcgagccccccctgcagtgcctggtgctgatctgcgaggccatcccccaccccggcagcctggagccccccctgggcagaggcgccttcctgagcagacacagcctggacatgaagttcacctactgcgacgacagaatcgccgaggtggccggctacagccccatgacctag

SEQ ID NO: 84991 - DNA, 714 bp, synthetic construct
  misc_feature 1..714: note = Description of Artificial Sequence: Synthetic coding sequence
  source 1..714: mol_type = other DNA
atgagacccgccgccggcgccgccagaagacccagatgctgcaccagctggctgaccagatgccccagccccgccgccagcgcccccacctggaccagacccctgagctgcgccagccccagcgccacctgcgcctgcaccgccagcgccccccaggaggagctgcaggacgccctgaccccccagcagaccctgagcagaagaaaggtggaggcccccaccgagagatgcttcagcctgagaatgaagagcaccctgaccagcagaggcagaaccctgaacctgaaggccgccacctggaaggtgctgaactgcagcggccacatgagagcctacaagccccccgcccagaccagccccgccggcagccccgacagcgagccccccctgcagtgcctggtgctgatctgcgaggccatcccccaccccggcagcctggagagattcgtgcccgtgagcagcgccgccaccagcctgtgcctgcccagcctgagccccagcaaggtggccggctacagccccgacgacctgatcggctgcagcgcctacgagtacatccacgccctggacagcgacgccccccaggacgccctgcccccccacctgaacaccagcagcctgctgcccaagccccagggcaccgtgagcttcctggcccccagctaccccgtgcccagatacttcagcccccacctgcccccctggtggccctag

SEQ ID NO: 84992 - DNA, 1092 bp, synthetic construct; identical to SEQ ID NO: 84988
  misc_feature 1..1092: note = Description of Artificial Sequence: Synthetic coding sequence
  source 1..1092: mol_type = other DNA

SEQ ID NO: 84993 - DNA, 2976 bp, synthetic construct
  misc_feature 1..2976: note = Description of Artificial Sequence: Synthetic coding sequence
  source 1..2976: mol_type = other DNA
atggccgacaaggtgagaagacagagacccagaagaagagtgtgctgggccctggtggccgtgctgctggccgacctgctggccctgagcgacaccctggccgtgatgagcgtggacctgggcagcgagagcatgaaggtggccatcgtgctgaacaaggagagcagaagaaagacccccgtgatcgtgaccctgaaggagaacgagagattcttcggcgacagcgccgccagcatggccatcaagaaccccaaggccaccctgagatacttccagcacctgctgggcaagcaggccgacaacccccacgtggccctgtaccaggccagattccccgagcacgagctgaccttcgacccccagagacagaccgtgcacttccagatcagcagccagctgcagttcagccccgaggaggtgctgggcatggtgctgaactacagcagaagcctggccgaggacttcgccgagcagcccatcaaggacgccgtgatcaccgtgcccgtgttcttcaaccaggccgagagaagagccgtgctgcaggccgccagaatggccggcctgaaggtgctgcagctgatcaacgacaacaccgccaccgccctgagctacggcgtgttcagaagaaaggacatcaacaccaccgcccagaacatcatgttctacgacatgggcagcggcagcaccgtgtgcaccatcgtgacctaccagatggtgaagaccaaggaggccggcatgcagccccagctgcagatcagaggcgtgggcttcgacagaaccctgggcggcctggagatggagctgagactgagagagagactggccggcctgttcaacgagcagagaaagggccagagagccaaggacgtgagagagaaccccagagccatggccaagctgctgagagaggccaacagactgaagaccgtgctgagcgccaacgccgaccacatggcccagatcgagggcctgatggacgacgtggacttcaaggccaaggtgaccagagtggagttcgaggagctgtgcgccgacctgttcgagagagtgcccggccccgtgcagcaggccctgcagagcgccgagatgagcctggacgagatcgagcaggtgatcctggtgggcggcgccaccagagtgcccagagtgcaggaggtgctgctgaaggccgtgggcaaggaggagctgggcaagaacatcaacgccgacgaggccgccgccatgggcgccgtgtaccaggccgccgccctgagcaaggccttcaaggtgaagcccttcgtggtgagagacgccgtggtgtaccccatcctggtggagttcaccagagaggtggaggaggagcccggcatccacagcctgaagcacaacaagagagtgctgttcagcagaatgggcccctacccccagagaaaggtgatcaccttcaacagatacagccacgacttcaacttccacatcaactacggcgacctgggcttcctgggccccgaggacctgagagtgttcggcagccagaacctgaccaccgtgaagctgaagggcgtgggcgacagcttcaagaagtaccccgactacgagagcaagggcatcaaggcccacttcaacctggacgagagcggcgtgctgagcctggacagagtggagagcgtgttcgagaccctggtggaggacagcgccgaggaggagagcaccctgaccaagctgggcaacaccatcagcagcctgttcggcggcggcaccacccccgacgccaaggagaacggcaccgacaccgtgcaggaggaggaggagagccccgccgagggcagcaaggacgagcccggcgagcaggtggagctgaaggaggaggccgaggcccccgtggaggacggcagccagccccccccccccgagcccaagggcgacgccacccccgagggcgagaaggccaccgagaaggagaacggcgacaagagcgaggcccagaagcccagcgagaaggccgaggccggccccgagggcgtggcccccgcccccgagggcgagaagaagcagaagcccgccagaaagagaagaatggtggaggagatcggcgtggagctggtggtgctggacctgcccgacctgcccgaggacaagctggcccagagcgtgcagaagctgcaggacctgaccctgagagacctggagaagcaggagagagagaaggccgccaacagcctggaggccttcatcttcgagacccaggacaagctgtaccagcccgagtaccaggaggtgagcaccgaggagcagagagaggagatcagcggcaagctgagcgccgccagcacctggctggaggacgagggcgtgggcgccaccaccgtgatgctgaaggagaagctggccgagctgagaaagctgtgccagggcctgttcttcagagtggaggagagaaagaagtggcccgagagactgagcgccctggacaacctgctgaaccacagcagcatgttcctgaagggcgccagactgatccccgagatggaccagatcttcaccgaggtggagatgaccaccctggagaaggtgatcaacgagacctgggcctggaagaacgccaccctggccgagcaggccaagctgcccgccaccgagaagcccgtgctgctgagcaaggacatcgaggccaagatgatggccctggacagagaggtgcagtacctgctgaacaaggccaagttcaccaagcccagacccagacccaaggacaagaacggcaccagagccgagccccccctgaacgccagcgccagcgaccagggcgagaaggtgatcccccccgccggccagaccgaggacgccgagcccatcagcgagcccgagaaggtggagaccgccggcagcgagcccggcgacaccgagcccctggagctgggcggccccggcgccgagcccgagcagaaggagcagagcaccggccagaagagacccctgaagaacgacgagctgtag

SEQ ID NO: 84994 - DNA, 3000 bp, synthetic construct
  misc_feature 1..3000: note = Description of Artificial Sequence: Synthetic coding sequence
  source 1..3000: mol_type = other DNA
atggccgacaaggtgagaagacagagacccagaagaagagtgtgctgggccctggtggccgtgctgctggccgacctgctggccctgagcgacaccctggccgtgatgagcgtggacctgggcagcgagagcatgaaggtggccatcgtgaagcccggcgtgcccatggagatcgtgctgaacaaggagagcagaagaaagacccccgtgatcgtgaccctgaaggagaacgagagattcttcggcgacagcgccgccagcatggccatcaagaaccccaaggccaccctgagatacttccagcacctgctgggcaagcaggccgacaacccccacgtggccctgtaccaggccagattccccgagcacgagctgaccttcgacccccagagacagaccgtgcacttccagatcagcagccagctgcagttcagccccgaggaggtgctgggcatggtgctgaactacagcagaagcctggccgaggacttcgccgagcagcccatcaaggacgccgtgatcaccgtgcccgtgttcttcaaccaggccgagagaagagccgtgctgcaggccgccagaatggccggcctgaaggtgctgcagctgatcaacgacaacaccgccaccgccctgagctacggcgtgttcagaagaaaggacatcaacaccaccgcccagaacatcatgttctacgacatgggcagcggcagcaccgtgtgcaccatcgtgacctaccagatggtgaagaccaaggaggccggcatgcagccccagctgcagatcagaggcgtgggcttcgacagaaccctgggcggcctggagatggagctgagactgagagagagactggccggcctgttcaacgagcagagaaagggccagagagccaaggacgtgagagagaaccccagagccatggccaagctgctgagagaggccaacagactgaagaccgtgctgagcgccaacgccgaccacatggcccagatcgagggcctgatggacgacgtggacttcaaggccaaggtgaccagagtggagttcgaggagctgtgcgccgacctgttcgagagagtgcccggccccgtgcagcaggccctgcagagcgccgagatgagcctggacgagatcgagcaggtgatcctggtgggcggcgccaccagagtgcccagagtgcaggaggtgctgctgaaggccgtgggcaaggaggagctgggcaagaacatcaacgccgacgaggccgccgccatgggcgccgtgtaccaggccgccgccctgagcaaggccttcaaggtgaagcccttcgtggtgagagacgccgtggtgtaccccatcctggtggagttcaccagagaggtggaggaggagcccggcatccacagcctgaagcacaacaagagagtgctgttcagcagaatgggcccctacccccagagaaaggtgatcaccttcaacagatacagccacgacttcaacttccacatcaactacggcgacctgggcttcctgggccccgaggacctgagagtgttcggcagccagaacctgaccaccgtgaagctgaagggcgtgggcgacagcttcaagaagtaccccgactacgagagcaagggcatcaaggcccacttcaacctggacgagagcggcgtgctgagcctggacagagtggagagcgtgttcgagaccctggtggaggacagcgccgaggaggagagcaccctgaccaagctgggcaacaccatcagcagcctgttcggcggcggcaccacccccgacgccaaggagaacggcaccgacaccgtgcaggaggaggaggagagccccgccgagggcagcaaggacgagcccggcgagcaggtggagctgaaggaggaggccgaggcccccgtggaggacggcagccagccccccccccccgagcccaagggcgacgccacccccgagggcgagaaggccaccgagaaggagaacggcgacaagagcgaggcccagaagcccagcgagaaggccgaggccggccccgagggcgtggcccccgcccccgagggcgagaagaagcagaagcccgccagaaagagaagaatggtggaggagatcggcgtggagctggtggtgctggacctgcccgacctgcccgaggacaagctggcccagagcgtgcagaagctgcaggacctgaccctgagagacctggagaagcaggagagagagaaggccgccaacagcctggaggccttcatcttcgagacccaggacaagctgtaccagcccgagtaccaggaggtgagcaccgaggagcagagagaggagatcagcggcaagctgagcgccgccagcacctggctggaggacgagggcgtgggcgccaccaccgtgatgctgaaggagaagctggccgagctgagaaagctgtgccagggcctgttcttcagagtggaggagagaaagaagtggcccgagagactgagcgccctggacaacctgctgaaccacagcagcatgttcctgaagggcgccagactgatccccgagatggaccagatcttcaccgaggtggagatgaccaccctggagaaggtgatcaacgagacctgggcctggaagaacgccaccctggccgagcaggccaagctgcccgccaccgagaagcccgtgctgctgagcaaggacatcgaggccaagatgatggccctggacagagaggtgcagtacctgctgaacaaggccaagttcaccaagcccagacccagacccaaggacaagaacggcaccagagccgagccccccctgaacgccagcgccagcgaccagggcgagaaggtgatcccccccgccggccagaccgaggacgccgagcccatcagcgagcccgagaaggtggagaccggcagcgagcccggcgacaccgagcccctggagctgggcggccccggcgccgagcccgagcagaaggagcagagcaccggccagaagagacccctgaagaacgacgagctgtag

SEQ ID NO: 84995 - DNA, 2547 bp, synthetic construct
  misc_feature 1..2547: note = Description of Artificial Sequence: Synthetic coding sequence
  source 1..2547: mol_type = other DNA
atggtgctgaactacagcagaagcctggccgaggacttcgccgagcagcccatcaaggacgccgtgatcaccgtgcccgtgttcttcaaccaggccgagagaagagccgtgctgcaggccgccagaatggccggcctgaaggtgctgcagctgatcaacgacaacaccgccaccgccctgagctacggcgtgttcagaagaaaggacatcaacaccaccgcccagaacatcatgttctacgacatgggcagcggcagcaccgtgtgcaccatcgtgacctaccagatggtgaagaccaaggaggccggcatgcagccccagctgcagatcagaggcgtgggcttcgacagaaccctgggcggcctggagatggagctgagactgagagagagactggccggcctgttcaacgagcagagaaagggccagagagccaaggacgtgagagagaaccccagagccatggccaagctgctgagagaggccaacagactgaagaccgtgctgagcgccaacgccgaccacatggcccagatcgagggcctgatggacgacgtggacttcaaggccaaggtgaccagagtggagttcgaggagctgtgcgccgacctgttcgagagagtgcccggccccgtgcagcaggccctgcagagcgccgagatgagcctggacgagatcgagcaggtgatcctggtgggcggcgccaccagagtgcccagagtgcaggaggtgctgctgaaggccgtgggcaaggaggagctgggcaagaacatcaacgccgacgaggccgccgccatgggcgccgtgtaccaggccgccgccctgagcaaggccttcaaggtgaagcccttcgtggtgagagacgccgtggtgtaccccatcctggtggagttcaccagagaggtggaggaggagcccggcatccacagcctgaagcacaacaagagagtgctgttcagcagaatgggcccctacccccagagaaaggtgatcaccttcaacagatacagccacgacttcaacttccacatcaactacggcgacctgggcttcctgggccccgaggacctgagagtgttcggcagccagaacctgaccaccgtgaagctgaagggcgtgggcgacagcttcaagaagtaccccgactacgagagcaagggcatcaaggcccacttcaacctggacgagagcggcgtgctgagcctggacagagtggagagcgtgttcgagaccctggtggaggacagcgccgaggaggagagcaccctgaccaagctgggcaacaccatcagcagcctgttcggcggcggcaccacccccgacgccaaggagaacggcaccgacaccgtgcaggaggaggaggagagccccgccgagggcagcaaggacgagcccggcgagcaggtggagctgaaggaggaggccgaggcccccgtggaggacggcagccagccccccccccccgagcccaagggcgacgccacccccgagggcgagaaggccaccgagaaggagaacggcgacaagagcgaggcccagaagcccagcgagaaggccgaggccggccccgagggcgtggcccccgcccccgagggcgagaagaagcagaagcccgccagaaagagaagaatggtggaggagatcggcgtggagctggtggtgctggacctgcccgacctgcccgaggacaagctggcccagagcgtgcagaagctgcaggacctgaccctgagagacctggagaagcaggagagagagaaggccgccaacagcctggaggccttcatcttcgagacccaggacaagctgtaccagcccgagtaccaggaggtgagcaccgaggagcagagagaggagatcagcggcaagctgagcgccgccagcacctggctggaggacgagggcgtgggcgccaccaccgtgatgctgaaggagaagctggccgagctgagaaagctgtgccagggcctgttcttcagagtggaggagagaaagaagtggcccgagagactgagcgccctggacaacctgctgaaccacagcagcatgttcctgaagggcgccagactgatccccgagatggaccagatcttcaccgaggtggagatgaccaccctggagaaggtgatcaacgagacctgggcctggaagaacgccaccctggccgagcaggccaagctgcccgccaccgagaagcccgtgctgctgagcaaggacatcgaggccaagatgatggccctggacagagaggtgcagtacctgctgaacaaggccaagttcaccaagcccagacccagacccaaggacaagaacggcaccagagccgagccccccctgaacgccagcgccagcgaccagggcgagaaggtgatcccccccgccggccagaccgaggacgccgagcccatcagcgagcccgagaaggtggagaccggcagcgagcccggcgacaccgagcccctggagctgggcggccccggcgccgagcccgagcagaaggagcagagcaccggccagaagagacccctgaagaacgacgagctgtag

SEQ ID NO: 84996 - DNA, 2040 bp, synthetic construct
  misc_feature 1..2040: note = Description of Artificial Sequence: Synthetic coding sequence
  source 1..2040: mol_type = other DNA
atggccgacaaggtgagaagacagagacccagaagaagagtgtgctgggccctggtggccgtgctgctggccgacctgctggccctgagcgacaccctggccgtgatgagcgtggacctgggcagcgagagcatgaaggtggccatcgtgaagcccggcgtgcccatggagatcgtgctgaacaaggagagcagaagaaagacccccgtgatcgtgaccctgaaggagaacgagagattcttcggcgacagcgccgccagcatggccatcaagaaccccaaggccaccctgagatacttccagcacctgctgggcaagcaggccgacaacccccacgtggccctgtaccaggccagattccccgagcacgagctgaccttcgacccccagagacagaccgtgcacttccagatcagcagccagctgcagttcagccccgaggaggtgctgggcatggtgctgaactacagcagaagcctggccgaggacttcgccgagcagcccatcaaggacgccgtgatcaccgtgcccgtgttcttcaaccaggccgagagaagagccgtgctgcaggccgccagaatggccggcctgaaggtgctgcagctgatcaacgacaacaccgccaccgccctgagctacggcgtgttcagaagaaaggacatcaacaccaccgcccagaacatcatgttctacgacatgggcagcggcagcaccgtgtgcaccatcgtgacctaccagatggtgaagaccaaggaggccggcatgcagccccagctgcagatcagaggcgtgggcttcgacagaaccctgggcggcctggagatggagctgagactgagagagagactggccggcctgttcaacgagcagagaaagggccagagagccaaggacgtgagagagaaccccagagccatggccaagctgctgagagaggccaacagactgaagaccgtgctgagcgccaacgccgaccacatggcccagatcgagggcctgatggacgacgtggacttcaaggccaaggtgaccagagtggagttcgaggagctgtgcgccgacctgttcgagagagtgcccggccccgtgcagcaggccctgcagagcgccgagatgagcctggacgagatcgagcaggtgatcctggtgggcggcgccaccagagtgcccagagtgcaggaggtgctgctgaaggccgtgggcaaggaggagctgggcaagaacatcaacgccgacgaggccgccgccatgggcgccgtgtaccaggccgccgccctgagcaaggccttcaaggtgaagcccttcgtggtgagagacgccgtggtgtaccccatcctggtggagttcaccagagaggtggaggaggagcccggcatccacagcctgaagcacaacaagagagtgctgttcagcagaatgggcccctacccccagagaaaggtgatcaccttcaacagatacagccacgacttcaacttccacatcaactacggcgacctgggcttcctgggccccgaggacctgagagtgttcggcagccagaacctgaccaccgtgaagctgaagggcgtgggcgacagcttcaagaagtaccccgactacgagagcaagggcatcaaggcccacttcaacctggacgagagcggcgtgctgagcctggacagagtggagagcgtgttcgagaccctggtggaggacagcgccgaggaggagagcaccctgaccaagctgggcaacaccatcagcagcctgttcggcggcggcaccacccccgacgccaaggagaacggcaccgacaccgtgcaggaggaggaggagagccccgccgagggcagcaaggacgagcccggcgagcaggtggagctgaaggaggaggccgaggcccccgtggaggacggcagccagccccccccccccgagcccaagggcgacgccacccccgagggcgagaaggccaccgagaaggagaacggcgacaagagcgaggcccagaagcccaccagcgtgtgcagagccagcgtgaccagattcggcttctag

SEQ ID NO: 84997 - DNA, 444 bp, synthetic construct
  misc_feature 1..444: note = Description of Artificial Sequence: Synthetic coding sequence
  source 1..444: mol_type = other DNA
atggccgacaaggtgagaagacagagacccagaagaagagtgtgctgggccctggtggccgtgctgctggccgacctgctggccctgagcgacaccctggccgtgatgagcgtggacctgggcagcgagagcatgaaggtggccatcgtgaagcccggcgtgcccatggagatcgtgctgaacaaggagagcagaagaaagacccccgtgatcgtgaccctgaaggagaacgagagattcttcggcgacagcgccgccagcatggccatcaagaaccccaaggccaccctgagatacttccagcacctgctgggcaagcaggccgacaacccccacgtggccctgtaccaggccagattccccgagcacgagctgaccttcgacccccagagacagaccgtgcacttccagatcagcagccagctgcagttcagccccctgtag

SEQ ID NO: 84998 - DNA, 1680 bp, synthetic construct
  misc_feature 1..1680: note = Description of Artificial Sequence: Synthetic coding sequence
  source 1..1680: mol_type = other DNA
atggccatcaagaaccccaaggccaccctgagatacttccagcacctgctgggcaagcaggccgacaacccccacgtggccctgtaccaggccagattccccgagcacgagctgaccttcgacccccagagacagaccgtgcacttccagatcagcagccagctgcagttcagccccgaggaggtgctgggcatggtgctgaactacagcagaagcctggccgaggacttcgccgagcagcccatcaaggacgccgtgatcaccgtgcccgtgttcttcaaccaggccgagagaagagccgtgctgcaggccgccagaatggccggcctgaaggtgctgcagctgatcaacgacaacaccgccaccgccctgagctacggcgtgttcagaagaaaggacatcaacaccaccgcccagaacatcatgttctacgacatgggcagcggcagcaccgtgtgcaccatcgtgacctaccagatggtgaagaccaaggaggccggcatgcagccccagctgcagatcagaggcgtgggcttcgacagaaccctgggcggcctggagatggagctgagactgagagagagactggccggcctgttcaacgagcagagaaagggccagagagccaaggacgtgagagagaaccccagagccatggccaagctgctgagagaggccaacagactgaagaccgtgctgagcgccaacgccgaccacatggcccagatcgagggcctgatggacgacgtggacttcaaggccaaggtgaccagagtggagttcgaggagctgtgcgccgacctgttcgagagagtgcccggccccgtgcagcaggccctgcagagcgccgagatgagcctggacgagatcgagcaggtgatcctggtgggcggcgccaccagagtgcccagagtgcaggaggtgctgctgaaggccgtgggcaaggaggagctgggcaagaacatcaacgccgacgaggccgccgccatgggcgccgtgtaccaggccgccgccctgagcaaggccttcaaggtgaagcccttcgtggtgagagacgccgtggtgtaccccatcctggtggagttcaccagagaggtggaggaggagcccggcatccacagcctgaagcacaacaagagagtgctgttcagcagaatgggcccctacccccagagaaaggtgatcaccttcaacagatacagccacgacttcaacttccacatcaactacggcgacctgggcttcctgggccccgaggacctgagagtgttcggcagccagaacctgaccaccgtgaagctgaagggcgtgggcgacagcttcaagaagtaccccgactacgagagcaagggcatcaaggcccacttcaacctggacgagagcggcgtgctgagcctggacagagtggagagcgtgttcgagaccctggtggaggacagcgccgaggaggagagcaccctgaccaagctgggcaacaccatcagcagcctgttcggcggcggcaccacccccgacgccaaggagaacggcaccgacaccgtgcagatgctgttcctgtgccccgccagactgccccagagcaagcaggccatcgacagattccacaccgccgtgacctgcatggagcccccctggggcagaagatgcagagccagacccgcctggagactgtgcagctag

SEQ ID NO: 84999 - DNA, 2943 bp, synthetic construct
  misc_feature 1..2943: note = Description of Artificial Sequence: Synthetic coding sequence
  source 1..2943: mol_type = other DNA
atgtggcagagcagaggccccatgctgttccacctgggcctgtgcgtgggcgccgccggcatgatcagagagtggttcgtgcccatcagaagagagaagggcagcagactgatctgccccggcggcaccatggccgacaaggtgagaagacagagacccagaagaagagtgtgctgggccctggtggccgtgctgctggccgacctgctggccctgagcgacaccctggccgtgatgagcgtggacctgggcagcgagagcatgaaggtggccatcgtgaagcccggcgtgcccatggagatcgtgctgaacaaggagagcagaagaaagacccccgtgatcgtgaccctgaaggagaacgagagattcttcggcgacagcgccgccagcatggccatcaagaaccccaaggccaccctgagatacttccagcacctgctgggcaagcaggccgacaacccccacgtggccctgtaccaggccagattccccgagcacgagctgaccttcgacccccagagacagaccgtgcacttccagatcagcagccagctgcagttcagccccgaggaggtgctgggcatggtgctgaactacagcagaagcctggccgaggacttcgccgagcagcccatcaaggacgccgtgatcaccgtgcccgtgttcttcaaccaggccgagagaagagccgtgctgcaggccgccagaatggccggcctgaaggtgctgcagctgatcaacgacaacaccgccaccgccctgagctacggcgtgttcagaagaaaggacatcaacaccaccgcccagaacatcatgttctacgacatgggcagcggcagcaccgtgtgcaccatcgtgacctaccagatggtgaagaccaaggaggccggcatgcagccccagctgcagatcagaggcgtgggcttcgacagaaccctgggcggcctggagatggagctgagactgagagagagactggccggcctgttcaacgagcagagaaagggccagagagccaaggacgtgagagagaaccccagagccatggccaagctgctgagagaggccaacagactgaagaccgtgctgagcgccaacgccgaccacatggcccagatcgagggcctgatggacgacgtggacttcaaggccaaggtgaccagagtggagttcgaggagctgtgcgccgacctgttcgagagagtgcccggccccgtgcagcaggccctgcagagcgccgagatgagcctggacgagatcgagcaggtgatcctggtgggcggcgccaccagagtgcccagagtgcaggaggtgctgctgaaggccgtgggcaaggaggagctgggcaagaacatcaacgccgacgaggccgccgccatgggcgccgtgtaccaggccgccgccctgagcaaggccttcaaggtgaagcccttcgtggtgagagacgccgtggtgtaccccatcctggtggagttcaccagagaggtggaggaggagcccggcatccacagcctgaagcacaacaagagagtgctgttcagcagaatgggcccctacccccagagaaaggtgatcaccttcaacagatacagccacgacttcaacttccacatcaactacggcgacctgggcttcctgggccccgaggacctgagagtgttcggcagccagaacctgaccaccgtgaagctgaagggcgtgggcgacagcttcaagaagtaccccgactacgagagcaagggcatcaaggcccacttcaacctggacgagagcggcgtgctgagcctggacagagtggagagcgtgttcgagaccctggtggaggacagcgccgaggaggagagcaccctgaccaagctgggcaacaccatcagcagcctgttcggcggcggcaccacccccgacgccaaggagaacggcaccgacaccgtgcagaagcccagcgagaaggccgaggccggccccgagggcgtggcccccgcccccgagggcgagaagaagcagaagcccgccagaaagagaagaatggtggaggagatcggcgtggagctggtggtgctggacctgcccgacctgcccgaggacaagctggcccagagcgtgcagaagctgcaggacctgaccctgagagacctggagaagcaggagagagagaaggccgccaacagcctggaggccttcatcttcgagacccaggacaagctgtaccagcccgagtaccaggaggtgagcaccgaggagcagagagaggagatcagcggcaagctgagcgccgccagcacctggctggaggacgagggcgtgggcgccaccaccgtgatgctgaaggagaagctggccgagctgagaaagctgtgccagggcctgttcttcagagtggaggagagaaagaagtggcccgagagactgagcgccctggacaacctgctgaaccacagcagcatgttcctgaagggcgccagactgatccccgagatggaccagatcttcaccgaggtggagatgaccaccctggagaaggtgatcaacgagacctgggcctggaagaacgccaccctggccgagcaggccaagctgcccgccaccgagaagcccgtgctgctgagcaaggacatcgaggccaagatgatggccctggacagagaggtgcagtacctgctgaacaaggccaagttcaccaagcccagacccagacccaaggacaagaacggcaccagagccgagccccccctgaacgccagcgccagcgaccagggcgagaaggtgatcccccccgccggccagaccgaggacgccgagcccatcagcgagcccgagaaggtggagaccggcagcgagcccggcgacaccgagcccctggagctgggcggccccggcgccgagcccgagcagaaggagcagagcaccggccagaagagacccctgaagaacgacgagctgtag

SEQ ID NO: 85000 - DNA, 333 bp, synthetic construct
  misc_feature 1..333: note = Description of Artificial Sequence: Synthetic coding sequence
  source 1..333: mol_type = other DNA
atggcccccagaggctgcatcgtggccgtgttcgccatcttctgcatcagcagactgctgtgcagccacggcgcccccgtggcccccatgaccccctacctgatgctgtgccagccccacaagagatgcggcgacaagttctacgaccccctgcagcactgctgctacgacgacgccgtggtgcccctggccagaacccagacctgcggcaactgcaccttcagagtgtgcttcgagcagtgctgcccctggaccttcatggtgaagctgatcaaccagaactgcgacagcgccagaaccagcgacgacagactgtgcagaagcgtgagctag

SEQ ID NO: 85001 - DNA, 360 bp, synthetic construct
  misc_feature 1..360: note = Description of Artificial Sequence: Synthetic coding sequence
  source 1..360: mol_type = other DNA
atggtgcccagaatcttcgcccccgcctacgtgagcgtgtgcctgctgctgctgtgccccagagaggtgatcgcccccgccggcagcgagccctggctgtgccagcccgcccccagatgcggcgacaagatctacaaccccctggagcagtgctgctacaacgacgccatcgtgagcctgagcgagaccagacagtgcggccccccctgcaccttctggccctgcttcgagctgtgctgcctggacagcttcggcctgaccaacgacttcgtggtgaagctgaaggtgcagggcgtgaacagccagtgccacagcagccccatcagcagcaagtgcgagagcagaagaagattcccctag

SEQ ID NO: 85002 - DNA, 393 bp, synthetic construct
  misc_feature 1..393: note = Description of Artificial Sequence: Synthetic coding sequence
  source 1..393: mol_type = other DNA
atgagattcagcgtgagcggcatgagaaccgactaccccagaagcgtgctggcccccgcctacgtgagcgtgtgcctgctgctgctgtgccccagagaggtgatcgcccccgccggcagcgagccctggctgtgccagcccgcccccagatgcggcgacaagatctacaaccccctggagcagtgctgctacaacgacgccatcgtgagcctgagcgagaccagacagtgcggccccccctgcaccttctggccctgcttcgagctgtgctgcctggacagcttcggcctgaccaacgacttcgtggtgaagctgaaggtgcagggcgtgaacagccagtgccacagcagccccatcagcagcaagtgcgagagcagaagaagattcccctag

SEQ ID NO: 85003 - DNA, 378 bp, synthetic construct
  misc_feature 1..378: note = Description of Artificial Sequence: Synthetic coding sequence
  source 1..378: mol_type = other DNA
atgagacccagatgctgcatcctggccctggtgtgctggatcaccgtgttcctgctgcagtgcagcaagggcaccaccgacgcccccgtgggcagcggcctgtggctgtgccagcccacccccagatgcggcaacaagatctacaaccccagcgagcagtgctgctacgacgacgccatcctgagcctgaaggagaccagaagatgcggcagcacctgcaccttctggccctgcttcgagctgtgctgccccgagagcttcggcccccagcagaagttcctggtgaagctgagagtgctgggcatgaagagccagtgccacctgagccccatcagcagaagctgcaccagaaacagaagacacgtgctgtacccctag

SEQ ID NO: 85004 - DNA, 375 bp, synthetic construct
  misc_feature 1..375: note = Description of Artificial Sequence: Synthetic coding sequence
  source 1..375: mol_type = other DNA
atggtgcccagaatcagcgccgccatcttcatcttcgagctgctgggcagcaacagcgagggcgtgaccgacctgagactgtggctgtgccagcccgcccccagatgcggcgagtggacctacaaccccctggagcagtgctgcgacgacggcgtgatcctggacctgaaccagaccagactgtgcggcagcagctgcaccttctggccctgcttccagcactgctgcctggagagcctgggcagccagaaccagaccgtggtgagattcaaggtgcccggcatgaagcccgactgcaagagcagccccatcaccagaatctgcgcccaggagtaccaccccaagagccccgtgagcagaagcgacctgatctag

SEQ ID NO: 85005 - DNA, 1068 bp, synthetic construct
  misc_feature 1..1068: note = Description of Artificial Sequence: Synthetic coding sequence
  source 1..1068: mol_type = other DNA
atgggccccggcagatgcctgctgaccgccctgctgctgctggccctggcccccccccccgaggccagccagtactgcggcagactggagtactggaaccccgacaacaagtgctgcagcagctgcctgcagagattcggcccccccccctgccccgactacgagttcagagagaactgcggcctgaacgaccacggcgacttcgtgaccccccccttcagaaagtgcagcagcggccagtgcaaccccgacggcgccgagctgtgcagcccctgcggcggcggcgccgtgacccccacccccgccgccggcggcggcagaaccccctggagatgcagagagagacccgtgcccgccaagggccactgccccctgacccccggcaaccccggcgcccccagcagccaggagagaagcagccccgccagcagcatcgcctggagaacccccgagcccgtgccccagcaggcctggcccaacttcctgcccctggtggtgctggtgctgctgctgaccctggccgtgatcgccatcctgctgttcatcctgctgtggcacctgtgctggcccaaggagaaggccgacccctacccctaccccggcctggtgtgcggcgtgcccaacacccacacccccagcagcagccacctgagcagccccggcgccctggagaccggcgacacctggaaggaggccagcctgctgcccctgctgagcagagagctgagcagcctggccagccagcccctgagcagactgctggacgagctggaggtgctggaggagctgatcgtgctgctggaccccgagcccggccccggcggcggcatggcccacggcaccaccagacacctggccgccagatacggcctgcccgccgcctggagcaccttcgcctacagcctgagacccagcagaagccccctgagagccctgatcgagatggtggtggccagagagcccagcgccagcctgggccagctgggcacccacctggcccagctgggcagagccgacgccctgagagtgctgagcaagctgggcagcagcggcgtgtgctgggcctag

SEQ ID NO: 85006 - DNA, 504 bp, synthetic construct
  misc_feature 1..504: note = Description of Artificial Sequence: Synthetic coding sequence
  source 1..504: mol_type = other DNA
atgggccccggcagatgcctgctgaccgccctgctgctgctggccctggcccccccccccgaggccagccagtactgcggcagactggagtactggaaccccgacaacaagtgctgcagcagctgcctgcagagattcggcccccccccctgccccgagctgagcagcctggccagccagcccctgagcagactgctggacgagctggaggtgctggaggagctgatcgtgctgctggaccccgagcccggccccggcggcggcatggcccacggcaccaccagacacctggccgccagatacggcctgcccgccgcctggagcaccttcgcctacagcctgagacccagcagaagccccctgagagccctgatcgagatggtggtggccagagagcccagcgccagcctgggccagctgggcacccacctggcccagctgggcagagccgacgccctgagagtgctgagcaagctgggcagcagcggcgtgtgctgggcctag

SEQ ID NO: 85007 - DNA, 723 bp, synthetic construct
  misc_feature 1..723: note = Description of Artificial Sequence: Synthetic coding sequence
  source 1..723: mol_type = other DNA
atgcccgagagagacagcgagcccttcagcaaccccctggcccccgacggccacgacgtggacgacccccacagcttccaccagagcaagctgaccaacgaggacttcagaaagctgctgatgacccccagagccgcccccaccagcgccccccccagcaagagcagacaccacgagatgcccagagagtacaacgaggacgaggaccccgccgccagaagaagaaagaagaagagctactacgccaagctgagacagcaggagatcgagagagagagagagctggccgagaagtacagagacagagccaaggagagaagagacggcgtgaacaaggactacgaggagaccgagctgatcagcaccaccgccaactacagagccgtgggccccaccgccgaggccgacaagagcgccgccgagaagagaagacagctgatccaggagagcaagttcctgggcggcgacatggagcacacccacctggtgaagggcctggacttcgccctgctgcagaaggtgagagccgagatcgccagcaaggagaaggaggaggaggagctgatggagaagccccagaaggagaccaagaaggacgaggaccccgagaacaagatcgagttcaagaccagactgggcagaaacgtgtacagaatgctgttcaagagcaaggcctacgagagaaacgagctgttcctgcccggcagaatggccatgtggtag

SEQ ID NO: 85008 - DNA, 1674 bp, synthetic construct
  misc_feature 1..1674: note = Description of Artificial Sequence: Synthetic coding sequence
  source 1..1674: mol_type = other DNA
atgcccgagagagacagcgagcccttcagcaaccccctggcccccgacggccacgacgtggacgacccccacagcttccaccagagcaagctgaccaacgaggacttcagaaagctgctgatgacccccagagccgcccccaccagcgccccccccagcaagagcagacaccacgagatgcccagagagtacaacgaggacgaggaccccgccgccagaagaagaaagaagaagagctactacgccaagctgagacagcaggagatcgagagagagagagagctggccgagaagtacagagacagagccaaggagagaagagacggcgtgaacaaggactacgaggagaccgagctgatcagcaccaccgccaactacagagccgtgggccccaccgccgaggccgacaagagcgccgccgagaagagaagacagctgatccaggagagcaagttcctgggcggcgacatggagcacacccacctggtgaagggcctggacttcgccctgctgcagaaggtgagagccgagatcgccagcaaggagaaggaggaggaggagctgatggagaagccccagaaggagaccaagaaggacgaggaccccgagaacaagatcgagttcaagaccagactgggcagaaacgtgtacagaatgctgttcaagagcaaggcctacgagagaaacgagctgttcctgcccggcagaatggcctacgtggtggacctggacgacgagtacgccgacaccgacatccccaccaccctgatcagaagcaaggccgactgccccaccatggaggcccagaccaccctgaccaccaacgacatcgtgatcagcaagctgacccagatcctgagctacctgagacagggcaccagaaacaagaagctgaagaagaaggacaagggcaagctggaggagaagaagccccccgaggccgacatgaacatcttcgaggacatcggcgactacgtgcccagcaccaccaagacccccagagacaaggagagagagagatacagagagagagagagagacagagagagagacagagacagagacagagagagagagagagagagagacagagagagagagagagagagagacagagagagagaggaggagaagaagagacacagctacttcgagaagcccaaggtggacgacgagcccatggacgtggacaagggccccggcagcaccaaggagctgatcaagagcatcaacgagaagttcgccggcagcgccggctgggagggcaccgagagcctgaagaagcccgaggacaagaagcagctgggcgacttcttcggcatgagcaacagctacgccgagtgctaccccgccaccatggacgacatggccgtggacagcgacgaggaggtggactacagcaagatggaccagggcaacaagaagggccccctgggcagatgggacttcgacacccaggaggagtacagcgagtacatgaacaacaaggaggccctgcccaaggccgccttccagtacggcatcaagatgagcgagggcagaaagaccagaagattcaaggagaccaacgacaaggccgagctggacagacagtggaagaagatcagcgccatcatcgagaagagaaagaagatggaggccgacggcgtggaggtgaagagacccaagtactag

SEQ ID NO: 85009 - DNA, 1560 bp, synthetic construct
  misc_feature 1..1560: note = Description of Artificial Sequence: Synthetic coding sequence
  source 1..1560: mol_type = other DNA
atggacgccgacgagggccaggacatgagccaggtgagcggcaaggagagcccccccgtgagcgacacccccgacgagggcgacgagcccatgcccatccccgaggacctgagcaccaccagcggcggccagcagagcagcaagagcgacagagtggtggccagcaacgtgaaggtggagacccagagcgacgaggagaacggcagagcctgcgagatgaacggcgaggagtgcgccgaggacctgagaatgctggacgccagcggcgagaagatgaacggcagccacagagaccagggcagcagcgccctgagcggcgtgggcggcatcagactgcccaacggcaagctgaagtgcgacatctgcggcatcatctgcatcggccccaacgtgctgatggtgcacaagagaagccacaccggcgagagacccttccagtgcaaccagtgcggcgccagcttcacccagaagggcaacctgctgagacacatcaagctgcacagcggcgagaagcccttcaagtgccacctgtgcaactacgcctgcagaagaagagacgccctgaccggccacctgagaacccacagcgtgggcaagccccacaagtgcggctactgcggcagaagctacaagcagagaagcagcctggaggagcacaaggagagatgccacaactacctggagagcatgggcctgcccggcaccctgtaccccgtgatcaaggaggagaccaaccacagcgagatggccgaggacctgtgcaagatcggcagcgagagaagcctggtgctggacagactggccagcaacgtggccaagagaaagagcagcatgccccagaagttcctgggcgacaagggcctgagcgacaccccctacgacagcagcgccagctacgagaaggagaacgagatgatgaagagccacgtgatggaccaggccatcaacaacgccatcaactacctgggcgccgagagcctgagacccctggtgcagaccccccccggcggcagcgaggtggtgcccgtgatcagccccatgtaccagctgcacaagcccctggccgagggcacccccagaagcaaccacagcgcccaggacagcgccgtggagaacctgctgctgctgagcaaggccaagctggtgcccagcgagagagaggccagccccagcaacagctgccaggacagcaccgacaccgagagcaacaacgaggagcagagaagcggcctgatctacctgaccaaccacatcgccccccacgccagaaacggcctgagcctgaaggaggagcacagagcctacgacctgctgagagccgccagcgagaacagccaggacgccctgagagtggtgagcaccagcggcgagcagatgaaggtgtacaagtgcgagcactgcagagtgctgttcctggaccacgtgatgtacaccatccacatgggctgccacggcttcagagaccccttcgagtgcaacatgtgcggctaccacagccaggacagatacgagttcagcagccacatcaccagaggcgagcacagattccacatgagctag

SEQ ID NO: 85010 - DNA, 1299 bp, synthetic construct
  misc_feature 1..1299: note = Description of Artificial Sequence: Synthetic coding sequence
  source 1..1299: mol_type = other DNA
atggacgccgacgagggccaggacatgagccaggtgagcggcaaggagagcccccccgtgagcgacacccccgacgagggcgacgagcccatgcccatccccgaggacctgagcaccaccagcggcggccagcagagcagcaagagcgacagagtggtgggcgagagacccttccagtgcaaccagtgcggcgccagcttcacccagaagggcaacctgctgagacacatcaagctgcacagcggcgagaagcccttcaagtgccacctgtgcaactacgcctgcagaagaagagacgccctgaccggccacctgagaacccacagcgtgggcaagccccacaagtgcggctactgcggcagaagctacaagcagagaagcagcctggaggagcacaaggagagatgccacaactacctggagagcatgggcctgcccggcaccctgtaccccgtgatcaaggaggagaccaaccacagcgagatggccgaggacctgtgcaagatcggcagcgagagaagcctggtgctggacagactggccagcaacgtggccaagagaaagagcagcatgccccagaagttcctgggcgacaagggcctgagcgacaccccctacgacagcagcgccagctacgagaaggagaacgagatgatgaagagccacgtgatggaccaggccatcaacaacgccatcaactacctgggcgccgagagcctgagacccctggtgcagaccccccccggcggcagcgaggtggtgcccgtgatcagccccatgtaccagctgcacaagcccctggccgagggcacccccagaagcaaccacagcgcccaggacagcgccgtggagaacctgctgctgctgagcaaggccaagctggtgcccagcgagagagaggccagccccagcaacagctgccaggacagcaccgacaccgagagcaacaacgaggagcagagaagcggcctgatctacctgaccaaccacatcgccccccacgccagaaacggcctgagcctgaaggaggagcacagagcctacgacctgctgagagccgccagcgagaacagccaggacgccctgagagtggtgagcaccagcggcgagcagatgaaggtgtacaagtgcgagcactgcagagtgctgttcctggaccacgtgatgtacaccatccacatgggctgccacggcttcagagaccccttcgagtgcaacatgtgcggctaccacagccaggacagatacgagttcagcagccacatcaccagaggcgagcacagattccacatgagctag

SEQ ID NO: 85011 - DNA, 870 bp, synthetic construct
  misc_feature 1..870: note = Description of Artificial Sequence: Synthetic coding sequence
  source 1..870: mol_type = other DNA
atggacgccgacgagggccaggacatgagccaggtgagcggcaaggagagcccccccgtgagcgacacccccgacgagggcgacgagcccatgcccatccccgaggacctgagcaccaccagcggcggccagcagagcagcaagagcgacagagtggtgggcgacaagggcctgagcgacaccccctacgacagcagcgccagctacgagaaggagaacgagatgatgaagagccacgtgatggaccaggccatcaacaacgccatcaactacctgggcgccgagagcctgagacccctggtgcagaccccccccggcggcagcgaggtggtgcccgtgatcagccccatgtaccagctgcacaagcccctggccgagggcacccccagaagcaaccacagcgcccaggacagcgccgtggagaacctgctgctgctgagcaaggccaagctggtgcccagcgagagagaggccagccccagcaacagctgccaggacagcaccgacaccgagagcaacaacgaggagcagagaagcggcctgatctacctgaccaaccacatcgccccccacgccagaaacggcctgagcctgaaggaggagcacagagcctacgacctgctgagagccgccagcgagaacagccaggacgccctgagagtggtgagcaccagcggcgagcagatgaaggtgtacaagtgcgagcactgcagagtgctgttcctggaccacgtgatgtacaccatccacatgggctgccacggcttcagagaccccttcgagtgcaacatgtgcggctaccacagccaggacagatacgagttcagcagccacatcaccagaggcgagcacagattccacatgagctag

SEQ ID NO: 85012 - DNA, 1131 bp, synthetic construct
  misc_feature 1..1131: note = Description of Artificial Sequence: Synthetic coding sequence
  source 1..1131: mol_type = other DNA
atggacgccgacgagggccaggacatgagccaggtgagcggcaaggagagcccccccgtgagcgacacccccgacgagggcgacgagcccatgcccatccccgaggacctgagcaccaccagcggcggccagcagagcagcaagagcgacagagtggtggccagcaacgtgaaggtggagacccagagcgacgaggagaacggcagagcctgcgagatgaacggcgaggagtgcgccgaggacctgagaatgctggacgccagcggcgagaagatgaacggcagccacagagaccagggcagcagcgccctgagcggcgtgggcggcatcagactgcccaacggcaagctgaagtgcgacatctgcggcatcatctgcatcggccccaacgtgctgatggtgcacaagagaagccacaccggcgacaagggcctgagcgacaccccctacgacagcagcgccagctacgagaaggagaacgagatgatgaagagccacgtgatggaccaggccatcaacaacgccatcaactacctgggcgccgagagcctgagacccctggtgcagaccccccccggcggcagcgaggtggtgcccgtgatcagccccatgtaccagctgcacaagcccctggccgagggcacccccagaagcaaccacagcgcccaggacagcgccgtggagaacctgctgctgctgagcaaggccaagctggtgcccagcgagagagaggccagccccagcaacagctgccaggacagcaccgacaccgagagcaacaacgaggagcagagaagcggcctgatctacctgaccaaccacatcgccccccacgccagaaacggcctgagcctgaaggaggagcacagagcctacgacctgctgagagccgccagcgagaacagccaggacgccctgagagtggtgagcaccagcggcgagcagatgaaggtgtacaagtgcgagcactgcagagtgctgttcctggaccacgtgatgtacaccatccacatgggctgccacggcttcagagaccccttcgagtgcaacatgtgcggctaccacagccaggacagatacgagttcagcagccacatcaccagaggcgagcacagattccacatgagctag

SEQ ID NO: 85013 - DNA, 1299 bp, synthetic construct
  misc_feature 1..1299: note = Description of Artificial Sequence: Synthetic coding sequence
  source 1..1299: mol_type = other DNA
atggacgccgacgagggccaggacatgagccaggtgagcggcaaggagagcccccccgtgagcgacacccccgacgagggcgacgagcccatgcccatccccgaggacctgagcaccaccagcggcggccagcagagcagcaagagcgacagagtggtggccagcaacgtgaaggtggagacccagagcgacgaggagaacggcagagcctgcgagatgaacggcgaggagtgcgccgaggacctgagaatgctggacgccagcggcgagaagatgaacggcagccacagagaccagggcagcagcgccctgagcggcgtgggcggcatcagactgcccaacggcaagctgaagtgcgacatctgcggcatcatctgcatcggccccaacgtgctgatggtgcacaagagaagccacaccggcgagagacccttccagtgcaaccagtgcggcgccagcttcacccagaagggcaacctgctgagacacatcaagctgcacagcggcgagaagcccttcaagtgccacctgtgcaactacgcctgcagaagaagagacgccctgaccggccacctgagaacccacagcggcgacaagggcctgagcgacaccccctacgacagcagcgccagctacgagaaggagaacgagatgatgaagagccacgtgatggaccaggccatcaacaacgccatcaactacctgggcgccgagagcctgagacccctggtgcagaccccccccggcggcagcgaggtggtgcccgtgatcagccccatgtaccagctgcacaagcccctggccgagggcacccccagaagcaaccacagcgcccaggacagcgccgtggagaacctgctgctgctgagcaaggccaagctggtgcccagcgagagagaggccagccccagcaacagctgccaggacagcaccgacaccgagagcaacaacgaggagcagagaagcggcctgatctacctgaccaaccacatcgccccccacgccagaaacggcctgagcctgaaggaggagcacagagcctacgacctgctgagagccgccagcgagaacagccaggacgccctgagagtggtgagcaccagcggcgagcagatgaaggtgtacaagtgcgagcactgcagagtgctgttcctggaccacgtgatgtacaccatccacatgggctgccacggcttcagagaccccttcgagtgcaacatgtgcggctaccacagccaggacagatacgagttcagcagccacatcaccagaggcgagcacagattccacatgagctag

SEQ ID NO: 85014 - DNA, 1434 bp, synthetic construct
  misc_feature 1..1434: note = Description of Artificial Sequence: Synthetic coding sequence
  source 1..1434: mol_type = other DNA
atggacgccgacgagggccaggacatgagccaggtgagcggcaaggagagcccccccgtgagcgacacccccgacgagggcgacgagcccatgcccatccccgaggacctgagcaccaccagcggcggccagcagagcagcaagagcgacagagtggtggccagcaacgtgaaggtggagacccagagcgacgaggagaacggcagagcctgcgagatgaacggcgaggagtgcgccgaggacctgagaatgctggacgccagcggcgagaagatgaacggcagccacagagaccagggcagcagcgccctgagcggcgtgggcggcatcagactgcccaacggcaagctgaagtgcgacatctgcggcatcatctgcatcggccccaacgtgctgatggtgcacaagagaagccacaccggcgagagacccttccagtgcaaccagtgcggcgccagcttcacccagaagggcaacctgctgagacacatcaagctgcacagcggcgagaagcccttcaagtgccacctgtgcaactacgcctgcagaagaagagacgccctgaccggccacctgagaacccacagcgtgatcaaggaggagaccaaccacagcgagatggccgaggacctgtgcaagatcggcagcgagagaagcctggtgctggacagactggccagcaacgtggccaagagaaagagcagcatgccccagaagttcctgggcgacaagggcctgagcgacaccccctacgacagcagcgccagctacgagaaggagaacgagatgatgaagagccacgtgatggaccaggccatcaacaacgccatcaactacctgggcgccgagagcctgagacccctggtgcagaccccccccggcggcagcgaggtggtgcccgtgatcagccccatgtaccagctgcacaagcccctggccgagggcacccccagaagcaaccacagcgcccaggacagcgccgtggagaacctgctgctgctgagcaaggccaagctggtgcccagcgagagagaggccagccccagcaacagctgccaggacagcaccgacaccgagagcaacaacgaggagcagagaagcggcctgatctacctgaccaaccacatcgccccccacgccagaaacggcctgagcctgaaggaggagcacagagcctacgacctgctgagagccgccagcgagaacagccaggacgccctgagagtggtgagcaccagcggcgagcagatgaaggtgtacaagtgcgagcactgcagagtgctgttcctggaccacgtgatgtacaccatccacatgggctgccacggcttcagagaccccttcgagtgcaacatgtgcggctaccacagccaggacagatacgagttcagcagccacatcaccagaggcgagcacagattccacatgagctag

SEQ ID NO: 85015 - DNA, 1299 bp, synthetic construct; identical to SEQ ID NO: 85010
  misc_feature 1..1299: note = Description of Artificial Sequence: Synthetic coding sequence
  source 1..1299: mol_type = other DNA

SEQ ID NO: 85016 - DNA, 1434 bp, synthetic construct; identical to SEQ ID NO: 85014
  misc_feature 1..1434: note = Description of Artificial Sequence: Synthetic coding sequence
  source 1..1434: mol_type = other DNA

SEQ ID NO: 85017 - DNA, 681 bp, synthetic construct
  misc_feature 1..681: note = Description of Artificial Sequence: Synthetic coding sequence
  source 1..681: mol_type = other DNA
atggacgccgacgagggccaggacatgagccaggtgagcggcaaggagagcccccccgtgagcgacacccccgacgagggcgacgagcccatgcccatccccgaggacctgagcaccaccagcggcggccagcagagcagcaagagcgacagagtggtggccagcaacgtgaaggtggagacccagagcgacgaggagaacggcagagcctgcgagatgaacggcgaggagtgcgccgaggacctgagaatgctggacgccagcggcgagaagatgaacggcagccacagagaccagggcagcagcgccctgagcggcgtgggcggcatcagactgcccaacggcaagctgaagtgcgacatctgcggcatcatctgcatcggccccaacgtgctgatggtgcacaagagaagccacaccggcgagagacccttccagtgcaaccagtgcggcgccagcttcacccagaagggcaacctgctgagacacatcaagctgcacagcggcgagaagcccttcaagtgccacctgtgcaactacgcctgcagaagaagagacgccctgaccggccacctgagaacccacagcgtgatcaaggaggagaccaaccacagcgagatggccgaggacctgtgcaagatcggcagcgagatcagcagagccggccagaccagcaagtag

SEQ ID NO: 85018 - DNA, 1758 bp, synthetic construct
  misc_feature 1..1758: note = Description of Artificial Sequence: Synthetic coding sequence
  source 1..1758: mol_type = other DNA
atgcacaccccccccgccctgcccagaagattccagggcggcggcagagtgagaacccccggcagccacagacagggcaaggacaacctggagagagaccccagcggcggctgcgtgcccgacttcctgccccaggcccaggacagcaaccacttcatcatggagagcctgttctgcgagagcagcggcgacagcagcctggagaaggagttcctgggcgcccccgtgggccccagcgtgagcacccccaacagccagcacagcagccccagcagaagcctgagcgccaacagcatcaaggtggagatgtacagcgacgaggagagcagcagactgctgggccccgacgagagactgctggagaaggacgacagcgtgatcgtggaggacagcctgagcgagcccctgggctactgcgacggcagcggccccgagccccacagccccggcggcatcagactgcccaacggcaagctgaagtgcgacgtgtgcggcatggtgtgcatcggccccaacgtgctgatggtgcacaagagaagccacaccggcgagagacccttccactgcaaccagtgcggcgccagcttcacccagaagggcaacctgctgagacacatcaagctgcacagcggcgagaagcccttcaagtgccccttctgcaactacgcctgcagaagaagagacgccctgaccggccacctgagaacccacagcgtgagcagccccaccgtgggcaagccctacaagtgcaactactgcggcagaagctacaagcagcagagcaccctggaggagcacaaggagagatgccacaactacctgcagagcctgagcaccgaggcccaggccctggccggccagcccggcgacgagatcagagacctggagatggtgcccgacagcatgctgcacagcagcagcgagagacccaccttcatcgacagactggccaacagcctgaccaagagaaagagaagcaccccccagaagttcgtgggcgagaagcagatgagattcagcctgagcgacctgccctacgacgtgaacagcggcggctacgagaaggacgtggagctggtggcccaccacagcctggagcccggcttcggcagcagcctggccttcgtgggcgccgagcacctgagacccctgagactgccccccaccaactgcatcagcgagctgacccccgtgatcagcagcgtgtacacccagatgcagcccctgcccggcagactggagctgcccggcagcagagaggccggcgagggccccgaggacctggccgacggcggccccctgctgtacagacccagaggccccctgaccgaccccggcgccagccccagcaacggctgccaggacagcaccgacaccgagagcaaccacgaggacagagtggccggcgtggtgagcctgccccagggcccccccccccagcccccccccaccatcgtggtgggcagacacagccccgcctacgccaaggaggaccccaagccccaggagggcctgctgagaggcacccccggccccagcaaggaggtgctgagagtggtgggcgagagcggcgagcccgtgaaggccttcaagtgcgagcactgcagaatcctgttcctggaccacgtgatgttcaccatccacatgggctgccacggcttcagagaccccttcgagtgcaacatctgcggctaccacagccaggacagatacgagttcagcagccacatcgtgagaggcgagcacaaggtgggctag

SEQ ID NO: 85019 - DNA, 1452 bp, synthetic construct
  misc_feature 1..1452: note = Description of Artificial Sequence: Synthetic coding sequence
  source 1..1452: mol_type = other DNA
atgtacagcgacgaggagagcagcagactgctgggccccgacgagagactgctggagaaggacgacagcgtgatcgtggaggacagcctgagcgagcccctgggctactgcgacggcagcggccccgagccccacagccccggcggcatcagactgcccaacggcaagctgaagtgcgacgtgtgcggcatggtgtgcatcggccccaacgtgctgatggtgcacaagagaagccacaccggcgagagacccttccactgcaaccagtgcggcgccagcttcacccagaagggcaacctgctgagacacatcaagctgcacagcggcgagaagcccttcaagtgccccttctgcaactacgcctgcagaagaagagacgccctgaccggccacctgagaacccacagcgtgagcagccccaccgtgggcaagccctacaagtgcaactactgcggcagaagctacaagcagcagagcaccctggaggagcacaaggagagatgccacaactacctgcagagcctgagcaccgaggcccaggccctggccggccagcccggcgacgagatcagagacctggagatggtgcccgacagcatgctgcacagcagcagcgagagacccaccttcatcgacagactggccaacagcctgaccaagagaaagagaagcaccccccagaagttcgtgggcgagaagcagatgagattcagcctgagcgacctgccctacgacgtgaacagcggcggctacgagaaggacgtggagctggtggcccaccacagcctggagcccggcttcggcagcagcctggccttcgtgggcgccgagcacctgagacccctgagactgccccccaccaactgcatcagcgagctgacccccgtgatcagcagcgtgtacacccagatgcagcccctgcccggcagactggagctgcccggcagcagagaggccggcgagggccccgaggacctggccgacggcggccccctgctgtacagacccagaggccccctgaccgaccccggcgccagccccagcaacggctgccaggacagcaccgacaccgagagcaaccacgaggacagagtggccggcgtggtgagcctgccccagggcccccccccccagcccccccccaccatcgtggtgggcagacacagccccgcctacgccaaggaggaccccaagccccaggagggcctgctgagaggcacccccggccccagcaaggaggtgctgagagtggtgggcgagagcggcgagcccgtgaaggccttcaagtgcgagcactgcagaatcctgttcctggaccacgtgatgttcaccatccacatgggctgccacggcttcagagaccccttcgagtgcaacatctgcggctaccacagccaggacagatacgagttcagcagccacatcgtgagaggcgagcacaaggtgggctag

SEQ ID NO: 85020 - DNA, 1758 bp, synthetic construct; identical to SEQ ID NO: 85018
  misc_feature 1..1758: note = Description of Artificial Sequence: Synthetic coding sequence
  source 1..1758: mol_type = other DNA

SEQ ID NO: 85021 - DNA, 33 bp, synthetic construct
  misc_feature 1..33: note = Description of Artificial Sequence: Synthetic coding sequence
  source 1..33: mol_type = other DNA
atgcacaccccccccgccctgcccagaagatag

SEQ ID NO: 85022 - DNA, 1863 bp, synthetic construct
  misc_feature 1..1863: note = Description of Artificial Sequence: Synthetic coding sequence
  source 1..1863: mol_type = other DNA
atgaacaacttcatcctgctggaggagcagctgatcaagaagagccagcagaagagaagaaccagccccagcaacttcaaggtgagattcttcgtgctgaccaaggccagcctggcctacttcgaggacagacacggcaagaagagaaccctgaagggcagcatcgagctgagcagaatcaagtgcgtggagatcgtgaagagcgacatcagcatcccctgccactacaagtaccccttccaggtggtgcacgacaactacctgctgtacgtgttcgcccccgacagagagagcagacagagatgggtgctggccctgaaggaggagaccagaaacaacaacagcctggtgcccaagtaccaccccaacttctggatggacggcaagtggagatgctgcagccagctggagaagctggccaccggctgcgcccagtacgaccccaccaagaacgccagcaagaagcccctgccccccacccccgaggacaacagaagacccctgtgggagcccgaggagaccgtggtgatcgccctgtacgactaccagaccaacgacccccaggagctggccctgagaagaaacgaggagtactgcctgctggacagcagcgagatccactggtggagagtgcaggacagaaacggccacgagggctacgtgcccagcagctacctggtggagaagagccccaacaacctggagacctacgagtggtacaacaagagcatcagcagagacaaggccgagaagctgctgctggacaccggcaaggagggcgccttcatggtgagagacagcagaaccgccggcacctacaccgtgagcgtgttcaccaaggccgtggtgagcgagaacaacccctgcatcaagcactaccacatcaaggagaccaacgacaaccccaagagatactacgtggccgagaagtacgtgttcgacagcatccccctgctgatcaactaccaccagcacaacggcggcggcctggtgaccagactgagataccccgtgtgcttcggcagacagaaggcccccgtgaccgccggcctgagatacggcaagtgggtgatcgaccccagcgagctgaccttcgtgcaggagatcggcagcggccagttcggcctggtgcacctgggctactggctgaacaaggacaaggtggccatcaagaccatcagagagggcgccatgagcgaggaggacttcatcgaggaggccgaggtgatgatgaagctgagccaccccaagctggtgcagctgtacggcgtgtgcctggagcaggcccccatctgcctggtgttcgagttcatggagcacggctgcctgagcgactacctgagaacccagagaggcctgttcgccgccgagaccctgctgggcatgtgcctggacgtgtgcgagggcatggcctacctggaggaggcctgcgtgatccacagagacctggccgccagaaactgcctggtgggcgagaaccaggtgatcaaggtgagcgacttcggcatgaccagattcgtgctggacgaccagtacaccagcagcaccggcaccaagttccccgtgaagtgggccagccccgaggtgttcagcttcagcagatacagcagcaagagcgacgtgtggagcttcggcgtgctgatgtgggaggtgttcagcgagggcaagatcccctacgagaacagaagcaacagcgaggtggtggaggacatcagcaccggcttcagactgtacaagcccagactggccagcacccacgtgtaccagatcatgaaccactgctggaaggagagacccgaggacagacccgccttcagcagactgctgagacagctggccgagatcgccgagagcggcctgtag

SEQ ID NO: 85023 - DNA, 1899 bp, synthetic construct
  misc_feature 1..1899: note = Description of Artificial Sequence: Synthetic coding sequence
  source 1..1899: mol_type = other DNA
atggagacccccgccgccgccgcccccgccggcagcctgttccccagcttcctgctgctggcctgcggcaccctggtggccgccctgctgggcgccgcccacagactgggcctgttctaccagctgctgcacaaggtggacaaggccagcgtgagacacggcggcgagaacgtggccgccgtgctgagagcccacggcgtgagattcatcttcaccctggtgggcggccacatcagccccctgctggtggcctgcgagaagctgggcatcagagtggtggacaccagacacgaggtgaccgccgtgttcgccgccgacgccatggccagactgagcggcaccgtgggcgtggccgccgtgaccgccggccccggcctgaccaacaccgtgaccgccgtgaagaacgcccagatggcccagagccccatcctgctgctgggcggcgccgccagcaccctgctgcagaacagaggcgccctgcaggccgtggaccagctgagcctgttcagacccctgtgcaagttctgcgtgagcgtgagaagagtgagagacatcgtgcccaccctgagagccgccatggccgccgcccagagcggcacccccggccccgtgttcgtggagctgcccgtggacgtgctgtacccctacttcatggtgcagaaggagatggtgcccgccaagccccccaagggcctggtgggcagagtggtgagctggtacctggagaactacctggccaacctgttcgccggcgcctgggagccccagcccgagggccccctgcccctggacatcccccaggccagcccccagcaggtgcagagatgcgtggagatcctgagcagagccaagagacccctgatggtgctgggcagccaggccctgctgacccccaccagcgccgacaagctgagagccgccgtggagaccctgggcgtgccctgcttcctgggcggcatggccagaggcctgctgggcagaaaccaccccctgcacatcagagagaacagaagcgccgccctgaagaaggccgacgtgatcgtgctggccggcaccgtgtgcgacttcagactgagctacggcagagtgctgagccacagcagcaagatcatcatcgtgaacagaaacagagaggagatgctgctgaacagcgacatcttctggaagccccaggaggccgtgcagggcgacgtgggcagcttcgtgctgaagctggtggagggcctgcagggccagacctgggcccccgactgggtggaggagctgagagaggccgacagacagaaggagcagaccttcagagagaaggccgccatgcccgtggcccagcacctgaaccccgtgcaggtgctgcagctggtggaggagaccctgcccgacaacagcatcctggtggtggacggcggcgacttcgtgggcaccgccgcccacctggtgcagcccagaggccccctgagatggctggaccccggcgccttcggcaccctgggcgtgggcgccggcttcgccctgggcgccaagctgtgcagacccgacgccgaggtgtggtgcctgttcggcgacggcgccttcggctacagcctgatcgagttcgacaccttcgtgagacacaagatccccgtgatggccctggtgggcaacgacgccggctggacccagatcagcagagagcaggtgcccagcctgggcagcaacgtggcctgcggcctggcctacaccgactaccacaaggccgccatgggcctgggcgccagaggcctgctgctgagcagagagaacgaggaccaggtggtgaaggtgctgcacgacgcccagcagcagtgcagagacggccaccccgtggtggtgaacatcctgatcggcagaaccgacttcagagacggcagcatcgccgtgtag

SEQ ID NO: 85024 - DNA, 678 bp, synthetic construct
  misc_feature 1..678: note = Description of Artificial Sequence: Synthetic coding sequence
  source 1..678: mol_type = other DNA
atggagacccccgccgccgccgcccccgccggcagcctgttccccagcttcctgctgctggcctgcggcaccctggtggccgccctgctgggcgccgcccacagactgggcctgttctaccagctgctgcacaaggtggacaaggccagcgtgagacacggcggcgagaacgtggccgccgtgctgagagcccacggcgtgagattcatcttcaccctggtgggcggccacatcagccccctgctggtggcctgcgagaagctgggcatcagagtggtggacaccagacacgaggtgaccgccgtgttcgccgccgacgccatggccagactgagcggcaccgtgggcgtggccgccgtgaccgccggccccggcctgaccaacaccgtgaccgccgtgaagaacgcccagatggcccagagccccatcctgctgctgggcggcgccgccagcaccctgctgcagaacagaggcgccctgcaggccgtggaccagctgagcctgttcagacccccccccggctgcggccagcacccccactgggaggacggcctgcccagatggctgcactgctgcatcggcccctgcggcagcggcagactggccgccttcctgcccctggactgcgtgcagctggtgtggagcctgatcatcgcctgccccggccccatcccctag

SEQ ID NO: 85025 - DNA, 789 bp, synthetic construct
  misc_feature 1..789: note = Description of Artificial Sequence: Synthetic coding sequence
  source 1..789: mol_type = other DNA
atggagacccccgccgccgccgcccccgccggcagcctgttccccagcttcctgctgctggcctgcggcaccctggtggccgccctgctgggcgccgcccacagactgggcctgttctaccagctgctgcacaaggtggacaaggccagcgtgagacacggcggcgagaacgtggccgccgtgctgagagcccacggcgtgagattcatcttcaccctggtgggcggccacatcagccccctgctggtggcctgcgagaagctgggcatcagagtggtggacaccagacacgaggtgaccgccgtgttcgccgccgacgccatggccagactgagcggcaccgtgggcgtggccgccgtgaccgccggccccggcctgaccaacaccgtgaccgccgtgaagaacgcccagatggcccagagccccatcctgctgctgggcggcgccgccagcaccctgctgcagaacagaggcgccctgcaggccgtggaccagctgagcctgttcagacccctgtgcaagttctgcgtgagcgtgagaagagtgagagacatcgtgcccaccctgagagccgccatggccgccgcccagagcggcacccccggccccgtgttcgtggagctgcccgtggacgtgctgtacccctacttcatggtgcagaaggagatggtgcccgccaagccccccaagggcctggtgggcagagtggtgagctggtacctggagaactacctggccaacctgttcgccggcgcctgggagccccagcccgagggccccctgccctag

SEQ ID NO: 85026 - DNA, 501 bp, synthetic construct
  misc_feature 1..501: note = Description of Artificial Sequence: Synthetic coding sequence
  source 1..501: mol_type = other DNA
atggagacccccgccgccgccgcccccgccggcagcctgttccccagcttcctgctgctggcctgcggcaccctggtggccgccctgctgggcgccgcccacagactgggcctgttctaccagctgctgcacaaggtggacaaggccagcgtgagacacggcggcgagaacgtggccgccgtgctgagagcccacggcgtgagattcatcttcaccctggtgggcggccacatcagccccctgctggtggcctgcgagaagctgggcatcagagtggtggacaccagacacgaggtgaccgccgtgttcgccgccgacgccatggccagactgagcggcaccgtgggcgtggccgccgtgaccgccggccccggcctgaccaacaccgtgaccgccgtgaagaacgcccagatggcccagagccccatcctgctgctgggcggcgccgccagcaccctgctgcagaacagaggcgccctgcaggccgtggaccagctgtag

SEQ ID NO: 85027 - DNA, 621 bp, synthetic construct
  misc_feature 1..621: note = Description of Artificial Sequence: Synthetic coding sequence
  source 1..621: mol_type = other DNA
atggccgccaccagatgcctgagatggggcctgagcagagccggcgtgtggctgctgcccccccccgccagatgccccagaagagccctgcacaagcagaaggacggcaccgagttcaagagcatctacagcctggacaagctgtaccccgagagccagggcagcgacaccgcctggagagtgcccaacggcgccaagcaggccgacagcgacatccccctggacagactgaccatcagctactgcagaagcagcggccccggcggccagaacgtgaacaaggtgaacagcaaggccgaggtgagattccacctggccaccgccgagtggatcgccgagcccgtgagacagaagatcgccatcacccacaagaacaagatcaacagactgggcgagctgatcctgaccagcgagagcagcagataccagttcagaaacctggccgactgcctgcagaagatcagagacatgatcaccgaggccagccagacccccaaggagcccaccaaggaggacgtgaagctgcacagaatcagaatcgagaacatgaacagagagagactgagacagaagagaatccacagcgccgtgaagaccagcagaagagtggacatggactag

SEQ ID NO: 85028 - DNA, 471 bp, synthetic construct
  misc_feature 1..471: note = Description of Artificial Sequence: Synthetic coding sequence
  source 1..471: mol_type = other DNA
atgtgccacagcagaagctgccaccccaccatgaccatcctgcaggcccccacccccgcccccagcaccatccccggccccagaagaggcagcggccccgagatcttcaccttcgaccccctgcccgagcccgccgccgcccccgccggcagacccagcgccagcagaggccacagaaagagaagcagaagagtgctgtaccccagagtggtgagaagacagctgcccgtggaggagcccaaccccgccaagagactgctgttcctgctgctgaccatcgtgttctgccagatcctgatggccgaggagggcgtgcccgcccccctgccccccgaggacgcccccaacgccgccagcctggcccccacccccgtgagcgccgtgctggagcccttcaacctgaccagcgagcccagcgactacgccctggacctgagcaccttcctgcagcagcaccccgccgccttctag

SEQ ID NO: 85029 - DNA, 417 bp, synthetic construct
  misc_feature 1..417: note = Description of Artificial Sequence: Synthetic coding sequence
  source 1..417: mol_type = other DNA
atgtgccacagcagaagctgccaccccaccatgaccatcctgcaggcccccacccccgcccccagcaccatccccggccccagaagaggcagcggccccgagatcttcaccttcgaccccctgcccgagcccgccgccgcccccgccggcagacccagcgccagcagaggccacagaaagagaagcagaagagtgctgtaccccagagtggtgagcatcgccgaggtgggcatcagaggcgtgagatgccccggcgtgaccggcgagagacccgacagcagaggcctggacctgacctgcctgctgttctgcctgcccctgggccccgcccccgccgccagcagaggcaccgagcccagccagaaggccagcctgagcgccgcccaccacagactgctgcccgaccccgacggctag

SEQ ID NO: 85030 - DNA, 579 bp, synthetic construct
  misc_feature 1..579: note = Description of Artificial Sequence: Synthetic coding sequence
  source 1..579: mol_type = other DNA
atgtgccacagcagaagctgccaccccaccatgaccatcctgcaggcccccacccccgcccccagcaccatccccggccccagaagaggcagcggccccgagatcttcaccttcgaccccctgcccgagcccgccgccgcccccgccggcagacccagcgccagcagaggccacagaaagagaagcagaagagtgctgcccagcagcggcgagtacagaagaagcggccacagcagaggcgccctgccctggagccactggggcaccaccagactgcagggcctggacctgacctgcctgctgttctgcctgcccctggtgagaagacagctgcccgtggaggagcccaaccccgccaagagactgctgttcctgctgctgaccatcgtgttctgccagatcctgatggccgaggagggcgtgcccgcccccctgccccccgaggacgcccccaacgccgccagcctggcccccacccccgtgagcgccgtgctggagcccttcaacctgaccagcgagcccagcgactacgccctggacctgagcaccttcctgcagcagcaccccgccgccttctag

SEQ ID NO: 85031 - DNA, 471 bp, synthetic construct
  misc_feature 1..471: note = Description of Artificial Sequence: Synthetic coding sequence
  source 1..471: mol_type = other DNA
atgtgccacagcagaagctgccaccccaccatgaccatcctgcaggcccccacccccgcccccagcaccatccccggccccagaagaggcagcggccccgagatcttcaccttcgaccccctgcccgagcccgccgccgcccccgccggcagacccagcgccagcagaggccacagaaagagaagcagaagagtgctgtaccccagagtggtgagaagacagctgcccgtggaggagcccaaccccgccaagagactgctgttcctgctgctgaccatcgtgttctgccagatcctgatggccgaggagggcgtgcccgcccccctgccccccgaggacgcccccaacgccgccagcctggcccccacccccgtgagccccgtgctggagcccttcaacctgaccagcgagcccagcgactacgccctggacctgagcaccttcctgcagcagcaccccgccgccttctag

SEQ ID NO: 85032 - DNA, 417 bp, synthetic construct; identical to SEQ ID NO: 85029
  misc_feature 1..417: note = Description of Artificial Sequence: Synthetic coding sequence
  source 1..417: mol_type = other DNA

SEQ ID NO: 85033 - DNA, 417 bp, synthetic construct; identical to SEQ ID NO: 85029
  misc_feature 1..417: note = Description of Artificial Sequence: Synthetic coding sequence
  source 1..417: mol_type = other DNA

SEQ ID NO: 85034 - DNA, 471 bp, synthetic construct; identical to SEQ ID NO: 85031
  misc_feature 1..471: note = Description of Artificial Sequence: Synthetic coding sequence
  source 1..471: mol_type = other DNA

SEQ ID NO: 85035 - DNA, 417 bp, synthetic construct; identical to SEQ ID NO: 85029
  misc_feature 1..417: note = Description of Artificial Sequence: Synthetic coding sequence
  source 1..417: mol_type = other DNA

SEQ ID NO: 85036 - DNA, 471 bp, synthetic construct; identical to SEQ ID NO: 85031
  misc_feature 1..471: note = Description of Artificial Sequence: Synthetic coding sequence
  source 1..471: mol_type = other DNA

SEQ ID NO: 85037 - DNA, 417 bp, synthetic construct; identical to SEQ ID NO: 85029
  misc_feature 1..417: note = Description of Artificial Sequence: Synthetic coding sequence
  source 1..417: mol_type = other DNA

SEQ ID NO: 85038 - DNA, 471 bp, synthetic construct; identical to SEQ ID NO: 85031
  misc_feature 1..471: note = Description of Artificial Sequence: Synthetic coding sequence
  source 1..471: mol_type = other DNA

SEQ ID NO: 85039 - DNA, 417 bp, synthetic construct; identical to SEQ ID NO: 85029
  misc_feature 1..417: note = Description of Artificial Sequence: Synthetic coding sequence
  source 1..417: mol_type = other DNA

SEQ ID NO: 85040 - DNA, 471 bp, synthetic construct; identical to SEQ ID NO: 85031
  misc_feature 1..471: note = Description of Artificial Sequence: Synthetic coding sequence
  source 1..471: mol_type = other DNA

SEQ ID NO: 85041 - DNA, 249 bp, synthetic construct
  misc_feature 1..249: note = Description of Artificial Sequence: Synthetic coding sequence
  source 1..249: mol_type = other DNA
atggccttcaccctgtacagcctgctgcaggccgccctgctgtgcgtgaacgccatcgccgtgctgcacgaggagagattcctgaagaacatcggctggggcaccgaccagggcatcggcggcttcggcgaggagcccggcatcaagagccagctgatgaacctgatcagaagcgtgagaaccgtgatgagagtgcccctgatcatcgtgaacagcatcgccatcgtgctgctgctgctgttcggctag

SEQ ID NO: 85042 - DNA, 984 bp, synthetic construct
  misc_feature 1..984: note = Description of Artificial Sequence: Synthetic coding sequence
  source 1..984: mol_type = other DNA
atggagttcaagctggaggcccacagaatcgtgagcatcagcctgggcaagatctacaacagcagagtgcagagaggcggcatcaagctgcacaagaacctgctggtgagcctggtgctgagaagcgccagacaggtgtacctgagcgacccctgccccggcctgtacctggccggccccgccggcacccccgccccccccccccagcagcagcccggcgagcccgccgccggcccccccgccggctggggcgagccccccccccccgccgccagagccagctggcccgagaccgagccccagcccgagagaagcagcgtgagcgacgcccccagagtgggcgacgaggtgcccgtggccaccgtgaccggcgtgggcgacgtgttccagggcggcgaggccgacgccaccgaggccgcctggagcagagtggagggccccagacaggccgccgccagagaggccgagggcaccgccggcggctggggcgtgttccccgaggtgagcagagccgccagaagaccctgcggctgccccctgggcggcgaggacccccccggcacccccgccgccacccccagagccgcctgctgctgcgccccccagcccgccgaggacgagccccccgccccccccgccgtgtgccccagaaagagatgcgccgccggcgtgggcggcggccccgccggctgccccgcccccggcagcacccccctgaagaagcccagaagaaacctggagcagccccccagcggcggcgaggacgacgacgccgaggagatggagaccggcaacgtggccaacctgatcagcatcttcggcagcagcttcagcggcctgctgagaaagagccccggcggcggcagagaggaggaggagggcgaggagagcggccccgaggccgccgagcccggccagatctgctgcgacaagcccgtgctgagagacatgaacccctggagcaccgccatcgtggccttctag

SEQ ID NO: 85043 - DNA, 420 bp, synthetic construct
  misc_feature 1..420: note = Description of Artificial Sequence: Synthetic coding sequence
  source 1..420: mol_type = other DNA
atggagttcaagctggaggcccacagaatcgtgagcatcagcctgggcaagatctacaacagcagagtgcagagaggcggcatcaagctgcacaagaacctgctggtgagcctggtgctgagaagcgccagacaggtgtacctgagcgacccctgccccggcctgtacctggccggccccgccggcacccccgccccccccccccagcagcagcccggcgagcccgccgccggcccccccgccggctggggcgagccccccccccccgccgccagagccagctggcccgagaccgagccccagcccgagagaagcagcgtgagcgacgcccccagagtgggcgacgaggtgcccgtggccaccgtgaccggcgtgggcgacgtgttccagggcagaagcgccgccatcagcagatgctag

SEQ ID NO: 85044 - DNA, 546 bp, synthetic construct
  misc_feature 1..546: note = Description of Artificial Sequence: Synthetic coding sequence
  source 1..546: mol_type = other DNA
atggaggccatgaacgtggagaaggccagcgccgacggcaacctgcccgaggtgatcagcaacatcaaggagaccctgaagatcgtgagcagaacccccgtgaacatcaccatggccggcgacagcggcaacggcatgagcaccttcatcagcgccctgagaaacaccggccacgagggcaaggccagcccccccaccgagctggtgaaggccacccagagatgcgccagctacttcagcagccacttcagcaacgtggtgctgtgggacctgcccggcaccggcagcgccaccaccaccctggagaactacctgatggagatgcagttcaacagatacgacttcatcatggtggccagcgcccagttcagcatgaaccacgtgatgctggccaagaccgccgaggacatgggcaagaagttctacatcgtgtggaccaagctggacatggacctgagcaccggcgccctgcccgaggtgcagctgctgcagatcagagagaacgtgctggagaacctgcagaaggagagagtgtgcgagtactag

SEQ ID NO: 85045 - DNA, 1020 bp, synthetic construct
  misc_feature 1..1020: note = Description of Artificial Sequence: Synthetic coding sequence
  source 1..1020: mol_type = other DNA
atggccgccgaggacgagctgcagctgcccagactgcccgagctgttcgagaccggcagacagctgctggacgaggtggaggtggccaccgagcccgccggcagcagaatcgtgcaggagaaggtgttcaagggcctggacctgctggagaaggccgccgagatgctgagccagctggacctgttcagcagaaacgaggacctggaggagatcgccagcaccgacctgaagtacctgctggtgcccgccttccagggcgccctgaccatgaagcaggtgaaccccagcaagagactggaccacctgcagagagccagagagcacttcatcaactacctgacccagtgccactgctaccacgtggccgagttcgagctgcccaagaccatgaacaacagcgccgagaaccacaccgccaacagcagcatggcctaccccagcctggtggccatggccagccagagacaggccaagatccagagatacaagcagaagaaggagctggagcacagactgagcgccatgaagagcgccgtggagagcggccaggccgacgacgagagagtgagagagtactacctgctgcacctgcagagatggatcgacatcagcctggaggagatcgagagcatcgaccaggagatcaagatcctgagagagagagacagcagcagagaggccagcaccagcaacagcagcagacaggagagaccccccgtgaagcccttcatcctgaccagaaacatggcccaggccaaggtgttcggcgccggctaccccagcctgcccaccatgaccgtgagcgactggtacgagcagcacagaaagtacggcgccctgcccgaccagggcatcgccaaggccgcccccgaggagttcagaaaggccgcccagcagcaggaggagcaggaggagaaggaggaggaggacgacgagcagaccctgcacagagccagagagtgggacgactggaaggacacccaccccagaggctacggcaacagacagaacatgggctag

SEQ ID NO: 85046 - DNA, 1020 bp, synthetic construct; identical to SEQ ID NO: 85045
  misc_feature 1..1020: note = Description of Artificial Sequence: Synthetic coding sequence
  source 1..1020: mol_type = other DNA

SEQ ID NO: 85047 - DNA, 480 bp, synthetic construct
  misc_feature 1..480: note = Description of Artificial Sequence: Synthetic coding sequence
  source 1..480: mol_type = other DNA
atgaagaaccacctgctgttctggggcgtgctggccgtgttcatcaaggccgtgcacgtgaaggcccaggaggacgagagaatcgtgctggtggacaacaagtgcaagtgcgccagaatcaccagcagaatcatcagaagcagcgaggaccccaacgaggacatcgtggagagaaacatcagaatcatcgtgcccctgaacaacagagagaacatcagcgaccccaccagccccctgagaaccagattcgtgtaccacctgagcgacctgtgcaagaagtgcgaccccaccgaggtggagctggacaaccagatcgtgaccgccacccagagcaacatctgcgacgaggacagcgccaccgagacctgctacacctacgacagaaacaagtgctacaccgccgtggtgcccctggtgtacggcggcgagaccaagatggtggagaccgccctgacccccgacgcctgctaccccgactag

SEQ ID NO: 85048 - DNA, 213 bp, synthetic construct
  misc_feature 1..213: note = Description of Artificial Sequence: Synthetic coding sequence
  source 1..213: mol_type = other DNA
atgaagaaccacctgctgttctggggcgtgctggccgtgttcatcaaggccgtgcacgtgaaggcccaggaggacgagagaatcgtgctggtggacaacaagtgcaagtgcgccagaatcaccagcagaatcatcagaagcagcgaggaccccaacgaggacatcgtggagagaaacatcagaatcatcgtgcccctgaacaacagagagtag

SEQ ID NO: 85049 - DNA, 480 bp, synthetic construct; identical to SEQ ID NO: 85047
  misc_feature 1..480: note = Description of Artificial Sequence: Synthetic coding sequence
  source 1..480: mol_type = other DNA

SEQ ID NO: 85050 - DNA, 528 bp, synthetic construct
  misc_feature 1..528: note = Description of Artificial Sequence: Synthetic coding sequence
  source 1..528: mol_type = other DNA
atgaagaaccacctgctgttctggggcgtgctggccgtgttcatcaaggccgtgcacgtgaagggcagcagagacagcagcgccagcgccagcagagtggccggcatcaccgcccaggaggacgagagaatcgtgctggtggacaacaagtgcaagtgcgccagaatcaccagcagaatcatcagaagcagcgaggaccccaacgaggacatcgtggagagaaacatcagaatcatcgtgcccctgaacaacagagagaacatcagcgaccccaccagccccctgagaaccagattcgtgtaccacctgagcgacctgtgcaagaagtgcgaccccaccgaggtggagctggacaaccagatcgtgaccgccacccagagcaacatctgcgacgaggacagcgccaccgagacctgctacacctacgacagaaacaagtgctacaccgccgtggtgcccctggtgtacggcggcgagaccaagatggtggagaccgccctgacccccgacgcctgctaccccgactag

SEQ ID NO: 85051 - DNA, 642 bp, synthetic construct
  misc_feature 1..642: note = Description of Artificial Sequence: Synthetic coding sequence
  source 1..642: mol_type = other DNA
atgagacccggcaccggccagggcggcctggaggcccccggcgagcccggccccaacctgagacagagatggcccctgctgctgctgggcctggccgtggtgacccacggcctgctgagacccaccgccgccagccagagcagagccctgggccccggcgcccccggcggcagcagcagaagcagcctgagaagcagatggggcagattcctgctgcagagaggcagctggaccggccccagatgctggcccagaggcttccagagcaagcacaacagcgtgacccacgtgttcggcagcggcacccagctgaccgtgctgagccagcccaaggccacccccagcgtgaccctgttcccccccagcagcgaggagctgcaggccaacaaggccaccctggtgtgcctgatgaacgacttctaccccggcatcctgaccgtgacctggaaggccgacggcacccccatcacccagggcgtggagatgaccacccccagcaagcagagcaacaacaagtacgccgccagcagctacctgagcctgacccccgagcagtggagaagcagaagaagctacagctgccaggtgatgcacgagggcagcaccgtggagaagaccgtggcccccgccgagtgcagctag

SEQ ID NO: 85052 - DNA, 255 bp, synthetic construct
  misc_feature 1..255: note = Description of Artificial Sequence: Synthetic coding sequence
  source 1..255: mol_type = other DNA
atgagacccggcaccggccagggcggcctggaggcccccggcgagcccggccccaacctgagacagagatggcccctgctgctgctgggcctggccgtggtgacccacggcctgctgagacccaccgccgccagccagagcagagccctgggccccggcgcccccggcggcagcagcagaagcagcctgagaagcagatggggcagaagcgcccagggccaccccctgggccacagcgtgcccgccgtgctgtag

SEQ ID NO: 85053 - DNA, 2982 bp, synthetic construct
  misc_feature 1..2982: note = Description of Artificial Sequence: Synthetic coding sequence
  source 1..2982: mol_type = other DNA
atggccagcgccgccgtggagagcttcgtgaccaagcagctggacctgctggagctggagagagacgccgaggtggaggagagaagaagctggcaggagaacatcagcctgaaggagctgcagagcagaggcgtgtgcctgctgaagctgcaggtgagcagccagagaaccggcctgtacggcagactgctggtgaccttcgagcccagaagatacggcagcgccgccgccctgcccagcaacagcttcaccagcggcgacatcgtgggcctgtacgacgccgccaacgagggcagccagctggccaccggcatcctgaccagagtgacccagaagagcgtgaccgtggccttcgacgagagccacgacttccagctgagcctggacagagagaacagctacagactgctgaagctggccaacgacgtgacctacagaagactgaagaaggccctgatcgccctgaagaagtaccacagcggccccgccagcagcctgatcgaggtgctgttcggcagaagcgcccccagccccgccagcgagatccaccccctgaccttcttcaacacctgcctggacaccagccagaaggaggccgtgctgttcgccctgagccagaaggagctggccatcatccacggcccccccggcaccggcaagaccaccaccgtggtggagatcatcctgcaggccgtgaagcagggcctgaaggtgctgtgctgcgcccccagcaacatcgccgtggacaacctggtggagagactggccctgtgcaagcagagaatcctgagactgggccaccccgccagactgctggagagcatccagcagcacagcctggacgccgtgctggccagaagcgacagcgcccagatcgtggccgacatcagaaaggacatcgaccaggtgttcgtgaagaacaagaagacccaggacaagagagagaagagcaacttcagaaacgagatcaagctgctgagaaaggagctgaaggagagagaggaggccgccatgctggagagcctgaccagcgccaacgtggtgctggccaccaacaccggcgccagcgccgacggccccctgaagctgctgcccgagagctacttcgacgtggtggtgatcgacgagtgcgcccaggccctggaggccagctgctggatccccctgctgaaggccagaaagtgcatcctggccggcgaccacaagcagctgccccccaccaccgtgagccacaaggccgccctggccggcctgagcctgagcctgatggagagactggccgaggagtacggcgccagagtggtgagaaccctgaccgtgcagtacagaatgcaccaggccatcatgagatgggccagcgacaccatgtacctgggccagctgaccgcccacagcagcgtggccagacacctgctgagagacctgcccggcgtggccgccaccgaggagaccggcgtgcccctgctgctggtggacaccgccggctgcggcctgttcgagctggaggaggaggacgagcagagcaagggcaaccccggcgaggtgagactggtgagcctgcacatccaggccctggtggacgccggcgtgcccgccagagacatcgccgtggtgagcccctacaacctgcaggtggacctgctgagacagagcctggtgcacagacaccccgagctggagatcaagagcgtggacggcttccagggcagagagaaggaggccgtgatcctgagcttcgtgagaagcaacagaaagggcgaggtgggcttcctggccgaggacagaagaatcaacgtggccgtgaccagagccagaagacacgtggccgtgatctgcgacagcagaaccgtgaacaaccacgccttcctgaagaccctggtggagtacttcacccagcacggcgaggtgagaaccgccttcgagtacctggacgacatcgtgcccgagaactacagccacgagaacagccagggcagcagccacgccgccaccaagccccagggccccgccaccagcaccagaaccggcagccagagacaggagggcggccaggaggccgccgcccccgccagacagggcagaaagaagcccgccggcaagagcctggccagcgaggcccccagccagcccagcctgaacggcggcagccccgagggcgtggagagccaggacggcgtggaccacttcagagccatgatcgtggagttcatggccagcaagaagatgcagctggagttcccccccagcctgaacagccacgacagactgagagtgcaccagatcgccgaggagcacggcctgagacacgacagcagcggcgagggcaagagaagattcatcaccgtgagcaagagagcccccagacccagagccgccctgggcccccccgccggcaccggcggccccgcccccctgcagcccgtgccccccacccccgcccagaccgagcagccccccagagagcagagaggccccgaccagcccgacctgagaaccctgcacctggagagactgcagagagtgagaagcgcccagggccagcccgccagcaaggagcagcaggccagcggccagcagaagctgcccgagaagaagaagaagaaggccaagggccaccccgccaccgacctgcccaccgaggaggacttcgaggccctggtgagcgccgccgtgaaggccgacaacacctgcggcttcgccaagtgcaccgccggcgtgaccaccctgggccagttctgccagctgtgcagcagaagatactgcctgagccaccacctgcccgagatccacggctgcggcgagagagccagagcccacgccagacagagaatcagcagagagggcgtgctgtacgccggcagcggcaccaagaacggcagcctggaccccgccaagagagcccagctgcagagaagactggacaagaagctgagcgagctgagcaaccagagaaccagcagaagaaaggagagaggcacctag

SEQ ID NO: 85054 - DNA, 1287 bp, synthetic construct
  misc_feature 1..1287: note = Description of Artificial Sequence: Synthetic coding sequence
  source 1..1287: mol_type = other DNA
atgcaggagctgcacctgctgtggtgggccctgctgctgggcctggcccaggcctgccccgagccctgcgactgcggcgagaagtacggcttccagatcgccgactgcgcctacagagacctggagagcgtgccccccggcttccccgccaacgtgaccaccctgagcctgagcgccaacagactgcccggcctgcccgagggcgccttcagagaggtgcccctgctgcagagcctgtggctggcccacaacgagatcagaaccgtggccgccggcgccctggccagcctgagccacctgaagagcctggacctgagccacaacctgatcagcgacttcgcctggagcgacctgcacaacctgagcgccctgcagctgctgaagatggacagcaacgagctgaccttcatccccagagacgccttcagaagcctgagagccctgagaagcctgcagctgaaccacaacagactgcacaccctggccgagggcaccttcacccccctgaccgccctgagccacctgcagatcaacgagaaccccttcgactgcacctgcggcatcgtgtggctgaagacctgggccctgaccaccgccgtgagcatccccgagcaggacaacatcgcctgcaccagcccccacgtgctgaagggcacccccctgagcagactgccccccctgccctgcagcgcccccagcgtgcagctgagctaccagcccagccaggacggcgccgagctgagacccggcttcgtgctggccctgcactgcgacgtggacggccagcccgccccccagctgcactggcacatccagatccccagcggcatcgtggagatcaccagccccaacgtgggcaccgacggcagagccctgcccggcacccccgtggccagcagccagcccagattccaggccttcgccaacggcagcctgctgatccccgacttcggcaagctggaggagggcacctacagctgcctggccaccaacgagctgggcagcgccgagagcagcgtggacgtggccctggccacccccggcgagggcggcgaggacaccctgggcagaagattccacggcaaggccgtggagggcaagggctgctacaccgtggacaacgaggtgcagcccagcggccccgaggacaacgtggtgatcatctacctgagcagagccggcaaccccgaggccgccgtggccgagggcgtgcccggccagctgccccccggcctgctgctgctgggccagagcctgctgctgttcttcttcctgaccagcttctag

SEQ ID NO: 85055 - DNA, 1287 bp, synthetic construct; identical to SEQ ID NO: 85054
  misc_feature 1..1287: note = Description of Artificial Sequence: Synthetic coding sequence
  source 1..1287: mol_type = other DNA

SEQ ID NO: 85056 - DNA, 444 bp, synthetic construct
  misc_feature 1..444: note = Description of Artificial Sequence: Synthetic coding sequence
  source 1..444: mol_type = other DNA
atgcaggagctgcacctgctgtggtgggccctgctgctgggcctggcccaggcctgccccgagccctgcgactgcggcgagaagtacggcttccagatcgccgactgcgcctacagagacctggagagcgtgccccccggcttccccgccaacgtgaccaccctgagcctgagcgccaacagactgcccggcctgcccgagggcgccttcagagaggtgcccctgctgcagagcctgtggctggcccacaacgagatcagaaccgtggccgccggcgccctggccagcctgagccacctgaagagcctggacctgagccacaacctgatcagcgacttcgcctggagcgacctgcacaacctgagcgccctgcagctgctgaagatggacagcaacgagctgaccttcatccccagagacgccttcagaagcctgagagcctag

SEQ ID NO: 85057 - DNA, 552 bp, synthetic construct
  misc_feature 1..552: note = Description of Artificial Sequence: Synthetic coding sequence
  source 1..552: mol_type = other DNA
atgcaggagctgcacctgctgtggtgggccctgctgctgggcctggcccaggcctgccccgagccctgcgactgcggcgagaagtacggcttccagatcgccgactgcgcctacagagacctggagagcgtgccccccggcttccccgccaacgtgaccaccctgagcctgagcgccaacagactgcccggcctgcccgagggcgccttcagagaggtgcccctgctgcagagcctgtggctggcccacaacgagatcagaaccgtggccgccggcgccctggccagcctgagccacctgaagagcctggacctgagccacaacctgatcagcgacttcgcctggagcgacctgcacaacctgagcgccctgcagctgctgaagatggacagcaacgagctgaccttcatccccagagacgccttcagaagcctgagagccctgagaagcctgcagctgaaccacaacagactgcacaccctggccgagggcaccttcacccccctgaccgccctgagccacctgcagatcaacgagaaccccttcgactag

SEQ ID NO: 85058 - DNA, 2238 bp, synthetic construct
  misc_feature 1..2238: note = Description of Artificial Sequence: Synthetic coding sequence
  source 1..2238: mol_type = other DNA
atgttccccctgagagccctgtggctggtgtgggccctgctgggcgtggccggcagctgccccgagccctgcgcctgcgtggacaagtacgcccaccagttcgccgactgcgcctacaaggagctgagagaggtgcccgagggcctgcccgccaacgtgaccaccctgagcctgagcgccaacaagatcaccgtgctgagaagaggcgccttcgccgacgtgacccaggtgaccagcctgtggctggcccacaacgaggtgagaaccgtggagcccggcgccctggccgtgctgagccagctgaagaacctggacctgagccacaacttcatcagcagcttcccctggagcgacctgagaaacctgagcgccctgcagctgctgaagatgaaccacaacagactgggcagcctgcccagagacgccctgggcgccctgcccgacctgagaagcctgagaatcaacaacaacagactgagaaccctggcccccggcaccttcgacgccctgagcgccctgagccacctgcagctgtaccacaaccccttccactgcggctgcggcctggtgtggctgcaggcctgggccgccagcaccagagtgagcctgcccgagcccgacagcatcgcctgcgccagcccccccgccctgcagggcgtgcccgtgtacagactgcccgccctgccctgcgccccccccagcgtgcacctgagcgccgagccccccctggaggcccccggcacccccctgagagccggcctggccttcgtgctgcactgcatcgccgacggccaccccacccccagactgcagtggcagctgcagatccccggcggcaccgtggtgctggagccccccgtgctgagcggcgaggacgacggcgtgggcgccgaggagggcgagggcgagggcgacggcgacctgctgacccagacccaggcccagacccccacccccgcccccgcctggcccgccccccccgccacccccagattcctggccctggccaacggcagcctgctggtgcccctgctgagcgccaaggaggccggcgtgtacacctgcagagcccacaacgagctgggcgccaacagcaccagcatcagagtggccgtggccgccaccggcccccccaagcacgcccccggcgccggcggcgagcccgacggccaggcccccaccagcgagagaaagagcaccgccaagggcagaggcaacagcgtgctgcccagcaagcccgagggcaagatcaagggccagggcctggccaaggtgagcatcctgggcgagaccgagaccgagcccgaggaggacaccagcgagggcgaggaggccgaggaccagatcctggccgaccccgccgaggagcagagatgcggcaacggcgaccccagcagatacgtgagcaaccacgccttcaaccagagcgccgagctgaagccccacgtgttcgagctgggcgtgatcgccctggacgtggccgagagagaggccagagtgcagctgacccccctggccgccagatggggccccggccccggcggcgccggcggcgcccccagacccggcagaagacccctgagactgctgtacctgtgccccgccggcggcggcgccgccgtgcagtggagcagagtggaggagggcgtgaacgcctactggttcagaggcctgagacccggcaccaactacagcgtgtgcctggccctggccggcgaggcctgccacgtgcaggtggtgttcagcaccaagaaggagctgcccagcctgctggtgatcgtggccgtgagcgtgttcctgctggtgctggccaccgtgcccctgctgggcgccgcctgctgccacctgctggccaagcaccccggcaagccctacagactgatcctgagaccccaggcccccgaccccatggagaagagaatcgccgccgacttcgaccccagagccagctacctggagagcgagaagagctaccccgccggcggcgaggccggcggcgaggagcccgaggacgtgcagggcgagggcctggacgaggacgccgagcagggcgaccccagcggcgacctgcagagagaggagagcctggccgcctgcagcctggtggagagccagagcaaggccaaccaggaggagttcgaggccggcagcgagtacagcgacagactgcccctgggcgccgaggccgtgaacatcgcccaggagatcaacggcaactacagacagaccgccggctag

SEQ ID NO: 85059 - DNA, 1005 bp, synthetic construct
  misc_feature 1..1005: note = Description of Artificial Sequence: Synthetic coding sequence
  source 1..1005: mol_type = other DNA
atgttccccctgagagccctgtggctggtgtgggccctgctgggcgtggccggcagctgccccgagccctgcgcctgcgtggacaagtacgcccaccagttcgccgactgcgcctacaaggagctgagagaggtgcccgagggcctgcccgccaacgtgaccaccctgagcctgagcgccaacaagatcaccgtgctgagaagaggcgccttcgccgacgtgacccaggtgaccagcctgtggctggcccacaacgaggtgagaaccgtggagcccggcgccctggccgtgctgagccagctgaagaacctggacctgagccacaacttcatcagcagcttcccctggagcgacctgagaaacctgagcgccctgcagctgctgaagatgaaccacaacagactgggcagcctgcccagagacgccctgggcgccctgcccgacctgagaagcctgagaatcaacaacaacagactggccggcgaggcctgccacgtgcaggtggtgttcagcaccaagaaggagctgcccagcctgctggtgatcgtggccgtgagcgtgttcctgctggtgctggccaccgtgcccctgctgggcgccgcctgctgccacctgctggccaagcaccccggcaagccctacagactgatcctgagaccccaggcccccgaccccatggagaagagaatcgccgccgacttcgaccccagagccagctacctggagagcgagaagagctaccccgccggcggcgaggccggcggcgaggagcccgaggacgtgcagggcgagggcctggacgaggacgccgagcagggcgaccccagcggcgacctgcagagagaggagagcctggccgcctgcagcctggtggagagccagagcaaggccaaccaggaggagttcgaggccggcagcgagtacagcgacagactgcccctgggcgccgaggccgtgaacatcgcccaggagatcaacggcaactacagacagaccgccggctag

SEQ ID NO: 85060 - DNA, 2238 bp, synthetic construct; identical to SEQ ID NO: 85058
  misc_feature 1..2238: note = Description of Artificial Sequence: Synthetic coding sequence
  source 1..2238: mol_type = other DNA

SEQ ID NO: 85061 - DNA, 2238 bp, synthetic construct; identical to SEQ ID NO: 85058
  misc_feature 1..2238: note = Description of Artificial Sequence: Synthetic coding sequence
  source 1..2238: mol_type = other DNA

SEQ ID NO: 85062 - DNA, 2238 bp, synthetic construct; identical to SEQ ID NO: 85058
  misc_feature 1..2238: note = Description of Artificial Sequence: Synthetic coding sequence
  source 1..2238: mol_type = other DNA

SEQ ID NO: 85063 - DNA, 2238 bp, synthetic construct; identical to SEQ ID NO: 85058
  misc_feature 1..2238: note = Description of Artificial Sequence: Synthetic coding sequence
  source 1..2238: mol_type = other DNA

SEQ ID NO: 85064 - DNA, 4011 bp, synthetic construct
  misc_feature 1..4011: note = Description of Artificial Sequence: Synthetic coding sequence
  source 1..4011: mol_type = other DNA
atgaccctggacagacccggcgagggcgccaccatgctgaagaccttcaccgtgctgctgttctgcatcagaatgagcctgggcatgaccagcatcgtgatggacccccagcccgagctgtggatcgagagcaactacccccaggccccctgggagaacatcaccctgtggtgcagaagccccagcagaatcagcagcaagttcctgctgctgaaggacaagacccagatgacctggatcagacccagccacaagaccttccaggtgagcttcctgatcggcgccctgaccgagagcaacgccggcctgtacagatgctgctactggaaggagaccggctggagcaagcccagcaaggtgctggagctggaggcccccggccagctgcccaagcccatcttctggatccaggccgagacccccgccctgcccggctgcaacgtgaacatcctgtgccacggctggctgcaggacctggtgttcatgctgttcaaggagggctacgccgagcccgtggactaccaggtgcccaccggcaccatggccatcttcagcatcgacaacctgacccccgaggacgagggcgtgtacatctgcagaacccacatccagatgctgcccaccctgtggagcgagcccagcaaccccctgaagctggtggtggccggcctgtaccccaagcccaccctgaccgcccaccccggccccatcatggcccccggcgagagcctgaacctgagatgccagggccccatctacggcatgaccttcgccctgatgagagtggaggacctggagaagagcttctaccacaagaagaccatcaagaacgaggccaacttcttcttccagagcctgaagatccaggacaccggccactacctgtgcttctactacgacgccagctacagaggcagcctgctgagcgacgtgctgaagatctgggtgaccgacaccttccccaagacctggctgctggccagacccagcgccgtggtgcagatgggccagaacgtgagcctgagatgcagaggccccgtggacggcgtgggcctggccctgtacaagaagggcgaggacaagcccctgcagttcctggacgccaccagcatcgacgacaacaccagcttcttcctgaacaacgtgacctacagcgacaccggcatctacagctgccactacctgctgacctggaagaccagcatcagaatgcccagccacaacaccgtggagctgatggtggtggacaagccccccaagcccagcctgagcgcctggcccagcaccgtgttcaagctgggcaaggccatcaccctgcagtgcagagtgagccaccccgtgctggagttcagcctggagtgggaggagagagagaccttccagaagttcagcgtgaacggcgacttcatcatcagcaacgtggacggcaagggcaccggcacctacagctgcagctacagagtggagacccaccccaacatctggagccacagaagcgagcccctgaagctgatgggccccgccggctacctgacctggaactacgtgctgaacgaggccatcagactgagcctgatcatgcagctggtggccctgctgctggtggtgctgtggatcagatggaagtgcagaagactgagaatcagagaggcctggctgctgggcaccgcccagggcgtgaccatgctgttcatcgtgaccgccctgctgtgctgcggcctgtgcaacggcgtgctgatcgaggagaccgagatcgtgatgcccacccccaagcccgagctgtgggccgagaccaacttccccctggccccctggaagaacctgaccctgtggtgcagaagccccagcggcagcaccaaggagttcgtgctgctgaaggacggcaccggctggatcgccaccagacccgccagcgagcaggtgagagccgccttccccctgggcgccctgacccagagccacaccggcagctaccactgccacagctgggaggagatggccgtgagcgagcccagcgaggccctggagctggtgggcaccgacatcctgcccaagcccgtgatcagcgccagccccaccatcagaggccaggagctgcagctgagatgcaagggctggctggccggcatgggcttcgccctgtacaaggagggcgagcaggagcccgtgcagcagctgggcgccgtgggcagagaggccttcttcaccatccagagaatggaggacaaggacgagggcaactacagctgcagaacccacaccgagaagagacccttcaagtggagcgagcccagcgagcccctggagctggtgatcaaggagatgtaccccaagcccttcttcaagacctgggccagccccgtggtgacccccggcgccagagtgaccttcaactgcagcaccccccaccagcacatgagcttcatcctgtacaaggacggcagcgagatcgccagcagcgacagaagctgggccagccccggcgccagcgccgcccacttcctgatcatcagcgtgggcatcggcgacggcggcaactacagctgcagatactacgacttcagcatctggagcgagcccagcgaccccgtggagctggtggtgaccgagttctaccccaagcccaccctgctggcccagcccggccccgtggtgttccccggcaagagcgtgatcctgagatgccagggcaccttccagggcatgagattcgccctgctgcaggagggcgcccacgtgcccctgcagttcagaagcgtgagcggcaacagcgccgacttcctgctgcacaccgtgggcgccgaggacagcggcaactacagctgcatctactacgagaccaccatgagcaacagaggcagctacctgagcatgcccctgatgatctgggtgaccgacaccttccccaagccctggctgttcgccgagcccagcagcgtggtgcccatgggccagaacgtgaccctgtggtgcagaggccccgtgcacggcgtgggctacatcctgcacaaggagggcgaggccaccagcatgcagctgtggggcagcaccagcaacgacggcgccttccccatcaccaacatcagcggcaccagcatgggcagatacagctgctgctaccaccccgactggaccagcagcatcaagatccagcccagcaacaccctggagctgctggtgaccggcctgctgcccaagcccagcctgctggcccagcccggccccatggtggcccccggcgagaacatgaccctgcagtgccagggcgagctgcccgacagcaccttcgtgctgctgaaggagggcgcccaggagcccctggagcagcagagacccagcggctacagagccgacttctggatgcccgccgtgagaggcgaggacagcggcatctacagctgcgtgtactacctggacagcacccccttcgccgccagcaaccacagcgacagcctggagatctgggtgaccgacaagccccccaagcccagcctgagcgcctggcccagcaccatgttcaagctgggcaaggacatcaccctgcagtgcagaggccccctgcccggcgtggagttcgtgctggagcacgacggcgaggaggccccccagcagttcagcgaggacggcgacttcgtgatcaacaacgtggagggcaagggcatcggcaactacagctgcagctacagactgcaggcctaccccgacatctggagcgagcccagcgaccccctggagctggtgggcgccgccggccccgtggcccaggagtgcaccgtgggcaacatcgtgagaagcagcctgatcgtggtggtggtggtggccctgggcgtggtgctggccatcgagtggaagaagtggcccagactgagaaccagaggcagcgagaccgacggcagagaccagaccatcgccctggaggagtgcaaccaggagggcgagcccggcacccccgccaacagccccagcagcaccagccagagaatcagcgtggagctgcccgtgcccatctag

SEQ ID NO: 85065 - DNA, 729 bp, synthetic construct
  misc_feature 1..729: note = Description of Artificial Sequence: Synthetic coding sequence
  source 1..729: mol_type = other DNA
atgaccctggacagacccggcgagggcgccaccatgctgaagaccttcaccgtgctgctgttctgcatcagaatgagcctgggcatgaccagcatcgtgatggacccccagcccgagctgtggatcgagagcaactacccccaggccccctgggagaacatcaccctgtggtgcagaagccccagcagaatcagcagcaagttcctgctgctgaaggacaagacccagatgacctggatcagacccagccacaagaccttccaggtgagcttcctgatcggcgccctgaccgagagcaacgccggcctgtacagatgctgctactggaaggagaccggctggagcaagcccagcaaggtgctggagctggaggcccccggccagctgcccaagcccatcttctggatccaggccgagacccccgccctgcccggctgcaacgtgaacatcctgtgccacggctggctgcaggacctggtgttcatgctgttcaaggagggctacgccgagcccgtggactaccaggtgcccaccggcaccatggccatcttcagcatcgacaacctgacccccgaggacgagggcgtgtacatctgcagaacccacatccagatgctgcccaccctgtggagcgagcccagcaaccccctgaagctggtggtggccggcggctgcggctacggctgctggcacctggccatcgtggtgcccggcatcatggccggctag

SEQ ID NO: 85066 - DNA, 729 bp, synthetic construct; identical to SEQ ID NO: 85065
  misc_feature 1..729: note = Description of Artificial Sequence: Synthetic coding sequence
  source 1..729: mol_type = other DNA

SEQ ID NO: 85067 - DNA, 4026 bp, synthetic construct
  misc_feature 1..4026: note = Description of Artificial Sequence: Synthetic coding sequence
  source 1..4026: mol_type = other DNA
atgaccctggacagacccggcgagggcgccaccatgctgaagaccttcaccgtgctgctgttctgcatcagaatgagcctgggcatgaccagcatcgtgatggacccccagcccgagctgtggatcgagagcaactacccccaggccccctgggagaacatcaccctgtggtgcagaagccccagcagaatcagcagcaagttcctgctgctgaaggacaagacccagatgacctggatcagacccagccacaagaccttccaggtgagcttcctgatcggcgccctgaccgagagcaacgccggcctgtacagatgctgctactggaaggagaccggctggagcaagcccagcaaggtgctggagctggaggcccccggccagctgcccaagcccatcttctggatccaggccgagacccccgccctgcccggctgcaacgtgaacatcctgtgccacggctggctgcaggacctggtgttcatgctgttcaaggagggctacgccgagcccgtggactaccaggtgcccaccggcaccatggccatcttcagcatcgacaacctgacccccgaggacgagggcgtgtacatctgcagaacccacatccagatgctgcccaccctgtggagcgagcccagcaaccccctgaagctggtggtggccggcctgtaccccaagcccaccctgaccgcccaccccggccccatcatggcccccggcgagagcctgaacctgagatgccagggccccatctacggcatgaccttcgccctgatgagagtggaggacctggagaagagcttctaccacaagaagaccatcaagaacgaggccaacttcttcttccagagcctgaagatccaggacaccggccactacctgtgcttctactacgacgccagctacagaggcagcctgctgagcgacgtgctgaagatctgggtgaccgacaccttccccaagacctggctgctggccagacccagcgccgtggtgcagatgggccagaacgtgagcctgagatgcagaggccccgtggacggcgtgggcctggccctgtacaagaagggcgaggacaagcccctgcagttcctggacgccaccagcatcgacgacaacaccagcttcttcctgaacaacgtgacctacagcgacaccggcatctacagctgccactacctgctgacctggaagaccagcatcagaatgcccagccacaacaccgtggagctgatggtggtggacaagccccccaagcccagcctgagcgcctggcccagcaccgtgttcaagctgggcaaggccatcaccctgcagtgcagagtgagccaccccgtgctggagttcagcctggagtgggaggagagagagaccttccagaagttcagcgtgaacggcgacttcatcatcagcaacgtggacggcaagggcaccggcacctacagctgcagctacagagtggagacccaccccaacatctggagccacagaagcgagcccctgaagctgatgggccccgccggctacctgacctggaactacgtgctgaacgaggccatcagactgagcctgatcatgcagctggtggccctgctgctggtggtgctgtggatcagatggaagtgcagaagactgagaatcagagaggcctggctgctgggcaccgcccagggcgtgaccatgctgttcatcgtgaccgccctgctgtgctgcgccatcagcttcgccggcctgtgcaacggcgtgctgatcgaggagaccgagatcgtgatgcccacccccaagcccgagctgtgggccgagaccaacttccccctggccccctggaagaacctgaccctgtggtgcagaagccccagcggcagcaccaaggagttcgtgctgctgaaggacggcaccggctggatcgccaccagacccgccagcgagcaggtgagagccgccttccccctgggcgccctgacccagagccacaccggcagctaccactgccacagctgggaggagatggccgtgagcgagcccagcgaggccctggagctggtgggcaccgacatcctgcccaagcccgtgatcagcgccagccccaccatcagaggccaggagctgcagctgagatgcaagggctggctggccggcatgggcttcgccctgtacaaggagggcgagcaggagcccgtgcagcagctgggcgccgtgggcagagaggccttcttcaccatccagagaatggaggacaaggacgagggcaactacagctgcagaacccacaccgagaagagacccttcaagtggagcgagcccagcgagcccctggagctggtgatcaaggagatgtaccccaagcccttcttcaagacctgggccagccccgtggtgacccccggcgccagagtgaccttcaactgcagcaccccccaccagcacatgagcttcatcctgtacaaggacggcagcgagatcgccagcagcgacagaagctgggccagccccggcgccagcgccgcccacttcctgatcatcagcgtgggcatcggcgacggcggcaactacagctgcagatactacgacttcagcatctggagcgagcccagcgaccccgtggagctggtggtgaccgagttctaccccaagcccaccctgctggcccagcccggccccgtggtgttccccggcaagagcgtgatcctgagatgccagggcaccttccagggcatgagattcgccctgctgcaggagggcgcccacgtgcccctgcagttcagaagcgtgagcggcaacagcgccgacttcctgctgcacaccgtgggcgccgaggacagcggcaactacagctgcatctactacgagaccaccatgagcaacagaggcagctacctgagcatgcccctgatgatctgggtgaccgacaccttccccaagccctggctgttcgccgagcccagcagcgtggtgcccatgggccagaacgtgaccctgtggtgcagaggccccgtgcacggcgtgggctacatcctgcacaaggagggcgaggccaccagcatgcagctgtggggcagcaccagcaacgacggcgccttccccatcaccaacatcagcggcaccagcatgggcagatacagctgctgctaccaccccgactggaccagcagcatcaagatccagcccagcaacaccctggagctgctggtgaccggcctgctgcccaagcccagcctgctggcccagcccggccccatggtggcccccggcgagaacatgaccctgcagtgccagggcgagctgcccgacagcaccttcgtgctgctgaaggagggcgcccaggagcccctggagcagcagagacccagcggctacagagccgacttctggatgcccgccgtgagaggcgaggacagcggcatctacagctgcgtgtactacctggacagcacccccttcgccgccagcaaccacagcgacagcctggagatctgggtgaccgacaagccccccaagcccagcctgagcgcctggcccagcaccatgttcaagctgggcaaggacatcaccctgcagtgcagaggccccctgcccggcgtggagttcgtgctggagcacgacggcgaggaggccccccagcagttcagcgaggacggcgacttcgtgatcaacaacgtggagggcaagggcatcggcaactacagctgcagctacagactgcaggcctaccccgacatctggagcgagcccagcgaccccctggagctggtgggcgccgccggccccgtggcccaggagtgcaccgtgggcaacatcgtgagaagcagcctgatcgtggtggtggtggtggccctgggcgtggtgctggccatcgagtggaagaagtggcccagactgagaaccagaggcagcgagaccgacggcagagaccagaccatcgccctggaggagtgcaaccaggagggcgagcccggcacccccgccaacagccccagcagcaccagccagagaatcagcgtggagctgcccgtgcccatctag

SEQ ID NO: 85068 - DNA, 3984 bp, synthetic construct
  misc_feature 1..3984: note = Description of Artificial Sequence: Synthetic coding sequence
  source 1..3984: mol_type = other DNA
atgaccctggacagacccggcgagggcgccaccatgctgaagaccttcaccgtgctgctgttctgcatcctgatggacccccagcccgagctgtggatcgagagcaactacccccaggccccctgggagaacatcaccctgtggtgcagaagccccagcagaatcagcagcaagttcctgctgctgaaggacaagacccagatgacctggatcagacccagccacaagaccttccaggtgagcttcctgatcggcgccctgaccgagagcaacgccggcctgtacagatgctgctactggaaggagaccggctggagcaagcccagcaaggtgctggagctggaggcccccggccagctgcccaagcccatcttctggatccaggccgagacccccgccctgcccggctgcaacgtgaacatcctgtgccacggctggctgcaggacctggtgttcatgctgttcaaggagggctacgccgagcccgtggactaccaggtgcccaccggcaccatggccatcttcagcatcgacaacctgacccccgaggacgagggcgtgtacatctgcagaacccacatccagatgctgcccaccctgtggagcgagcccagcaaccccctgaagctggtggtggccggcctgtaccccaagcccaccctgaccgcccaccccggccccatcatggcccccggcgagagcctgaacctgagatgccagggccccatctacggcatgaccttcgccctgatgagagtggaggacctggagaagagcttctaccacaagaagaccatcaagaacgaggccaacttcttcttccagagcctgaagatccaggacaccggccactacctgtgcttctactacgacgccagctacagaggcagcctgctgagcgacgtgctgaagatctgggtgaccgacaccttccccaagacctggctgctggccagacccagcgccgtggtgcagatgggccagaacgtgagcctgagatgcagaggccccgtggacggcgtgggcctggccctgtacaagaagggcgaggacaagcccctgcagttcctggacgccaccagcatcgacgacaacaccagcttcttcctgaacaacgtgacctacagcgacaccggcatctacagctgccactacctgctgacctggaagaccagcatcagaatgcccagccacaacaccgtggagctgatggtggtggacaagccccccaagcccagcctgagcgcctggcccagcaccgtgttcaagctgggcaaggccatcaccctgcagtgcagagtgagccaccccgtgctggagttcagcctggagtgggaggagagagagaccttccagaagttcagcgtgaacggcgacttcatcatcagcaacgtggacggcaagggcaccggcacctacagctgcagctacagagtggagacccaccccaacatctggagccacagaagcgagcccctgaagctgatgggccccgccggctacctgacctggaactacgtgctgaacgaggccatcagactgagcctgatcatgcagctggtggccctgctgctggtggtgctgtggatcagatggaagtgcagaagactgagaatcagagaggcctggctgctgggcaccgcccagggcgtgaccatgctgttcatcgtgaccgccctgctgtgctgcggcctgtgcaacggcgtgctgatcgaggagaccgagatcgtgatgcccacccccaagcccgagctgtgggccgagaccaacttccccctggccccctggaagaacctgaccctgtggtgcagaagccccagcggcagcaccaaggagttcgtgctgctgaaggacggcaccggctggatcgccaccagacccgccagcgagcaggtgagagccgccttccccctgggcgccctgacccagagccacaccggcagctaccactgccacagctgggaggagatggccgtgagcgagcccagcgaggccctggagctggtgggcaccgacatcctgcccaagcccgtgatcagcgccagccccaccatcagaggccaggagctgcagctgagatgcaagggctggctggccggcatgggcttcgccctgtacaaggagggcgagcaggagcccgtgcagcagctgggcgccgtgggcagagaggccttcttcaccatccagagaatggaggacaaggacgagggcaactacagctgcagaacccacaccgagaagagacccttcaagtggagcgagcccagcgagcccctggagctggtgatcaaggagatgtaccccaagcccttcttcaagacctgggccagccccgtggtgacccccggcgccagagtgaccttcaactgcagcaccccccaccagcacatgagcttcatcctgtacaaggacggcagcgagatcgccagcagcgacagaagctgggccagccccggcgccagcgccgcccacttcctgatcatcagcgtgggcatcggcgacggcggcaactacagctgcagatactacgacttcagcatctggagcgagcccagcgaccccgtggagctggtggtgaccgagttctaccccaagcccaccctgctggcccagcccggccccgtggtgttccccggcaagagcgtgatcctgagatgccagggcaccttccagggcatgagattcgccctgctgcaggagggcgcccacgtgcccctgcagttcagaagcgtgagcggcaacagcgccgacttcctgctgcacaccgtgggcgccgaggacagcggcaactacagctgcatctactacgagaccaccatgagcaacagaggcagctacctgagcatgcccctgatgatctgggtgaccgacaccttccccaagccctggctgttcgccgagcccagcagcgtggtgcccatgggccagaacgtgaccctgtggtgcagaggccccgtgcacggcgtgggctacatcctgcacaaggagggcgaggccaccagcatgcagctgtggggcagcaccagcaacgacggcgccttccccatcaccaacatcagcggcaccagcatgggcagatacagctgctgctaccaccccgactggaccagcagcatcaagatccagcccagcaacaccctggagctgctggtgaccggcctgctgcccaagcccagcctgctggcccagcccggccccatggtggcccccggcgagaacatgaccctgcagtgccagggcgagctgcccgacagcaccttcgtgctgctgaaggagggcgcccaggagcccctggagcagcagagacccagcggctacagagccgacttctggatgcccgccgtgagaggcgaggacagcggcatctacagctgcgtgtactacctggacagcacccccttcgccgccagcaaccacagcgacagcctggagatctgggtgaccgacaagccccccaagcccagcctgagcgcctggcccagcaccatgttcaagctgggcaaggacatcaccctgcagtgcagaggccccctgcccggcgtggagttcgtgctggagcacgacggcgaggaggccccccagcagttcagcgaggacggcgacttcgtgatcaacaacgtggagggcaagggcatcggcaactacagctgcagctacagactgcaggcctaccccgacatctggagcgagcccagcgaccccctggagctggtgggcgccgccggccccgtggcccaggagtgcaccgtgggcaacatcgtgagaagcagcctgatcgtggtggtggtggtggccctgggcgtggtgctggccatcgagtggaagaagtggcccagactgagaaccagaggcagcgagaccgacggcagagaccagaccatcgccctggaggagtgcaaccaggagggcgagcccggcacccccgccaacagccccagcagcaccagccagagaatcagcgtggagctgcccgtgcccatctag

SEQ ID NO: 85069 - DNA, 3984 bp, synthetic construct; identical to SEQ ID NO: 85068
  misc_feature 1..3984: note = Description of Artificial Sequence: Synthetic coding sequence
  source 1..3984: mol_type = other DNA

SEQ ID NO: 85070 - DNA, 3645 bp, synthetic construct
  misc_feature 1..3645: note = Description of Artificial Sequence: Synthetic coding sequence
  source 1..3645: mol_type = other DNA
atgaagtgcttcttccccgtgctgagctgcctggccgtgctgggcgtggtgagcgcccagagacaggtgaccgtgcaggagggccccctgtacagaaccgagggcagccacatcaccatctggtgcaacgtgagcggctaccagggccccagcgagcagaacttccagtggagcatctacctgcccagcagccccgagagagaggtgcagatcgtgagcaccatggacagcagcttcccctacgccatctacacccagagagtgagaggcggcaagatcttcatcgagagagtgcagggcaacagcaccctgctgcacatcaccgacctgcaggccagagacgccggcgagtacgagtgccacacccccagcaccgacaagcagtacttcggcagctacagcgccaagatgaacctggtggtgatccccgacagcctgcagaccaccgccatgccccagaccctgcacagagtggagcaggaccccctggagctgacctgcgaggtggccagcgagaccatccagcacagccacctgagcgtggcctggctgagacagaaggtgggcgagaagcccgtggaggtgatcagcctgagcagagacttcatgctgcacagcagcagcgagtacgcccagagacagagcctgggcgaggtgagactggacaagctgggcagaaccaccttcagactgaccatcttccacctgcagcccagcgaccagggcgagttctactgcgaggccgccgagtggatccaggaccccgacggcagctggtacgccatgaccagaaagagaagcgagggcgccgtggtgaacgtgcagcccaccgacaaggagttcaccgtgagactggagaccgagaagagactgcacaccgtgggcgagcccgtggagttcagatgcatcctggaggcccagaacgtgcccgacagatacttcgccgtgagctgggccttcaacagcagcctgatcgccaccatgggccccaacgccgtgcccgtgctgaacagcgagttcgcccacagagaggccagaggccagctgaaggtggccaaggagagcgacagcgtgttcgtgctgaagatctaccacctgagacaggaggacagcggcaagtacaactgcagagtgaccgagagagagaagaccgtgaccggcgagttcatcgacaaggagagcaagagacccaagaacatccccatcatcgtgctgcccctgaccgacaactgggtggtgaaggtgccccagcaccaccagctgctgagccagggccacctggagagcagcatcagcgtggaggtggccagcaacgccagcgtgatcctggagggcgaggacctgagattcagctgcagcgtgagaaccgccggcagaccccagggcagattcagcgtgatctggcagctggtggacagacagaacagaagaagcaacatcatgtggctggacagagacggcaccgtgcagcccggcagcagctactgggagagaagcagcttcggcggcgtgcagatggagcaggtgcagcccaacagcttcagcctgggcatcttcaacagcagaaaggaggacgagggccagtacgagtgccacgtgaccgagtgggtgagagccgtggacggcgagtggcagatcgtgggcgagagaagagccagcacccccatcagcatcaccgccctggagatgggcttcgccgtgaccgccatcagcagaacccccggcgtgacctacagcgacagcttcgacctgcagtgcatcatcaagccccactaccccgcctgggtgcccgtgagcgtgacctggagattccagcccgtgggcaccgtggagttccacgacctggtgaccttcaccagagacggcggcgtgcagtggggcgacagaagcagcagcttcagaaccagaaccgccatcgagaaggccgagagcagcaacaacgtgagactgagcatcagcagagccagcgacaccgaggccggcaagtaccagtgcgtggccgagctgtggagaaagaactacaacaacacctggaccagactggccgagagaaccagcaacctgctggagatcagagtgctgcagcccgtgaccaagctgcaggtgagcaagagcaagagaaccctgaccctggtggagaacaagcccatccagctgaactgcagcgtgaagagccagaccagccagaacagccacttcgccgtgctgtggtacgtgcacaagcccagcgacgccgacggcaagctgatcctgaagaccacccacaacagcgccttcgagtacggcacctacgccgaggaggagggcctgagagccagactgcagttcgagagacacgtgagcggcggcctgttcagcctgaccgtgcagagagccgaggtgagcgacagcggcagctactactgccacgtggaggagtggctgctgagccccaactacgcctggtacaagctggccgaggaggtgagcggcagaaccgaggtgaccgtgaagcagcccgacagcagactgagactgagccaggcccagggcaacctgagcgtgctggagaccagacaggtgcagctggagtgcgtggtgctgaacagaaccagcatcaccagccagctgatggtggagtggttcgtgtggaagcccaaccaccccgagagagagaccgtggccagactgagcagagacgccaccttccactacggcgagcaggccgccaagaacaacctgaagggcagactgcacctggagagccccagccccggcgtgtacagactgttcatccagaacgtggccgtgcaggacagcggcacctacagctgccacgtggaggagtggctgcccagccccagcggcatgtggtacaagagagccgaggacaccgccggccagaccgccctgaccgtgatgagacccgacgccagcctgcaggtggacaccgtggtgcccaacgccaccgtgagcgagaaggccgccttccagctggactgcagcatcgtgagcagaagcagccaggacagcagattcgccgtggcctggtacagcctgagaaccaaggccggcggcaagagaagcagccccggcctggaggagcaggaggaggagagagaggaggaggaggaggaggacgacgacgacgacgacgaccccaccgagagaaccgccctgctgagcgtgggccccgacgccgtgttcggccccgagggcagcccctgggagggcagactgagattccagagactgagccccgtgctgtacagactgaccgtgctgcaggccagcccccaggacaccggcaactacagctgccacgtggaggagtggctgcccagcccccagaaggagtggtacagactgaccgaggaggagagcgcccccatcggcatcagagtgctggacaccagccccaccctgcagagcatcatctgcagcaacgacgccctgttctacttcgtgttcttctaccccttccccatcttcggcatcctgatcatcaccatcctgctggtgagattcaagagcagaaacagcagcaagaacagcgacggcaagaacggcgtgcccctgctgtggatcaaggagccccacctgaactacagccccacctgcctggagccccccgtgctgagcatccaccccggcgccatcgactag

SEQ ID NO: 85071 - DNA, 3645 bp, synthetic construct; identical to SEQ ID NO: 85070
  misc_feature 1..3645: note = Description of Artificial Sequence: Synthetic coding sequence
  source 1..3645: mol_type = other DNA

SEQ ID NO: 85072 - DNA, 3585 bp, synthetic construct
  misc_feature 1..3585: note = Description of Artificial Sequence: Synthetic coding sequence
  source 1..3585: mol_type = other DNA
atgaagtgcttcttccccgtgctgagctgcctggccgtgctgggcgtggtgagcgcccagagacaggtgaccgtgcaggagggccccctgtacagaaccgagggcagccacatcaccatctggtgcaacgtgagcggctaccagggccccagcgagcagaacttccagtggagcatctacctgcccagcagccccgagagagaggtgcagatcgtgagcaccatggacagcagcttcccctacgccatctacacccagagagtgagaggcggcaagatcttcatcgagagagtgcagggcaacagcaccctgctgcacatcaccgacctgcaggccagagacgccggcgagtacgagtgccacacccccagcaccgacaagcagtacttcggcagctacagcgccaagatgaacctggtggtgatccccgacagcctgcagaccaccgccatgccccagaccctgcacagagtggagcaggaccccctggagctgacctgcgaggtggccagcgagaccatccagcacagccacctgagcgtggcctggctgagacagaaggtgggcgagaagcccgtggaggtgatcagcctgagcagagacttcatgctgcacagcagcagcgagtacgcccagagacagagcctgggcgaggtgagactggacaagctgggcagaaccaccttcagactgaccatcttccacctgcagcccagcgaccagggcgagttctactgcgaggccgccgagtggatccaggaccccgacggcagctggtacgccatgaccagaaagagaagcgagggcgccgtggtgaacgtgcagcccaccgacaaggagttcaccgtgagactggagaccgagaagagactgcacaccgtgggcgagcccgtggagttcagatgcatcctggaggcccagaacgtgcccgacagatacttcgccgtgagctgggccttcaacagcagcctgatcgccaccatgggccccaacgccgtgcccgtgctgaacagcgagttcgcccacagagaggccagaggccagctgaaggtggccaaggagagcgacagcgtgttcgtgctgaagatctaccacctgagacaggaggacagcggcaagtacaactgcagagtgaccgagagagagaagaccgtgaccggcgagttcatcgacaaggagagcaagagacccaagaacatccccatcatcgtgctgcccctgaagagcagcatcagcgtggaggtggccagcaacgccagcgtgatcctggagggcgaggacctgagattcagctgcagcgtgagaaccgccggcagaccccagggcagattcagcgtgatctggcagctggtggacagacagaacagaagaagcaacatcatgtggctggacagagacggcaccgtgcagcccggcagcagctactgggagagaagcagcttcggcggcgtgcagatggagcaggtgcagcccaacagcttcagcctgggcatcttcaacagcagaaaggaggacgagggccagtacgagtgccacgtgaccgagtgggtgagagccgtggacggcgagtggcagatcgtgggcgagagaagagccagcacccccatcagcatcaccgccctggagatgggcttcgccgtgaccgccatcagcagaacccccggcgtgacctacagcgacagcttcgacctgcagtgcatcatcaagccccactaccccgcctgggtgcccgtgagcgtgacctggagattccagcccgtgggcaccgtggagttccacgacctggtgaccttcaccagagacggcggcgtgcagtggggcgacagaagcagcagcttcagaaccagaaccgccatcgagaaggccgagagcagcaacaacgtgagactgagcatcagcagagccagcgacaccgaggccggcaagtaccagtgcgtggccgagctgtggagaaagaactacaacaacacctggaccagactggccgagagaaccagcaacctgctggagatcagagtgctgcagcccgtgaccaagctgcaggtgagcaagagcaagagaaccctgaccctggtggagaacaagcccatccagctgaactgcagcgtgaagagccagaccagccagaacagccacttcgccgtgctgtggtacgtgcacaagcccagcgacgccgacggcaagctgatcctgaagaccacccacaacagcgccttcgagtacggcacctacgccgaggaggagggcctgagagccagactgcagttcgagagacacgtgagcggcggcctgttcagcctgaccgtgcagagagccgaggtgagcgacagcggcagctactactgccacgtggaggagtggctgctgagccccaactacgcctggtacaagctggccgaggaggtgagcggcagaaccgaggtgaccgtgaagcagcccgacagcagactgagactgagccaggcccagggcaacctgagcgtgctggagaccagacaggtgcagctggagtgcgtggtgctgaacagaaccagcatcaccagccagctgatggtggagtggttcgtgtggaagcccaaccaccccgagagagagaccgtggccagactgagcagagacgccaccttccactacggcgagcaggccgccaagaacaacctgaagggcagactgcacctggagagccccagccccggcgtgtacagactgttcatccagaacgtggccgtgcaggacagcggcacctacagctgccacgtggaggagtggctgcccagccccagcggcatgtggtacaagagagccgaggacaccgccggccagaccgccctgaccgtgatgagacccgacgccagcctgcaggtggacaccgtggtgcccaacgccaccgtgagcgagaaggccgccttccagctggactgcagcatcgtgagcagaagcagccaggacagcagattcgccgtggcctggtacagcctgagaaccaaggccggcggcaagagaagcagccccggcctggaggagcaggaggaggagagagaggaggaggaggaggaggacgacgacgacgacgacgaccccaccgagagaaccgccctgctgagcgtgggccccgacgccgtgttcggccccgagggcagcccctgggagggcagactgagattccagagactgagccccgtgctgtacagactgaccgtgctgcaggccagcccccaggacaccggcaactacagctgccacgtggaggagtggctgcccagcccccagaaggagtggtacagactgaccgaggaggagagcgcccccatcggcatcagagtgctggacaccagccccaccctgcagagcatcatctgcagcaacgacgccctgttctacttcgtgttcttctaccccttccccatcttcggcatcctgatcatcaccatcctgctggtgagattcaagagcagaaacagcagcaagaacagcgacggcaagaacggcgtgcccctgctgtggatcaaggagccccacctgaactacagccccacctgcctggagccccccgtgctgagcatccaccccggcgccatcgactag

SEQ ID NO: 85073 - DNA, 726 bp, synthetic construct
  misc_feature 1..726: note = Description of Artificial Sequence: Synthetic coding sequence
  source 1..726: mol_type = other DNA
atgggcaccgccagcagaagcaacatcgccagacacctgcagaccaacctgatcctgttctgcgtgggcgccgtgggcgcctgcaccctgagcgtgacccagccctggtacctggaggtggactacacccacgaggccgtgaccatcaagtgcaccttcagcgccaccggctgccccagcgagcagcccacctgcctgtggttcagatacggcgcccaccagcccgagaacctgtgcctggacggctgcaagagcgaggccgacaagttcaccgtgagagaggccctgaaggagaaccaggtgagcctgaccgtgaacagagtgaccagcaacgacagcgccatctacatctgcggcatcgccttccccagcgtgcccgaggccagagccaagcagaccggcggcggcaccaccctggtggtgagagagatcaagctgctgagcaaggagctgagaagcttcctgaccgccctggtgagcctgctgagcgtgtacgtgaccggcgtgtgcgtggccttcatcctgctgagcaagagcaagagcaaccccctgagaaacaaggagatcaaggaggacagccagaagaagaagagcgccagaagaatcttccaggagatcgcccaggagctgtaccacaagagacacgtggagaccaaccagcagagcgagaaggacaacaacacctacgagaacagaagagtgctgagcaactacgagagaccctag

SEQ ID NO: 85074 - DNA, 1842 bp, synthetic construct
  misc_feature 1..1842: note = Description of Artificial Sequence: Synthetic coding sequence
  source 1..1842: mol_type = other DNA
atgggcgccctgagacccaccctgctgccccccagcctgcccctgctgctgctgctgatgctgggcatgggctgctgggccagagaggtgctggtgcccgagggccccctgtacagagtggccggcaccgccgtgagcatcagctgcaacgtgaccggctacgagggccccgcccagcagaacttcgagtggttcctgtacagacccgaggcccccgacaccgccctgggcatcgtgagcaccaaggacacccagttcagctacgccgtgttcaagagcagagtggtggccggcgaggtgcaggtgcagagactgcagggcgacgccgtggtgctgaagatcgccagactgcaggcccaggacgccggcatctacgagtgccacacccccagcaccgacaccagatacctgggcagctacagcggcaaggtggagctgagagtgctgcccgacgtgctgcaggtgagcgccgccccccccggccccagaggcagacaggcccccaccagcccccccagaatgaccgtgcacgagggccaggagctggccctgggctgcctggccagaaccagcacccagaagcacacccacctggccgtgagcttcggcagaagcgtgcccgaggcccccgtgggcagaagcaccctgcaggaggtggtgggcatcagaagcgacctggccgtggaggccggcgccccctacgccgagagactggccgccggcgagctgagactgggcaaggagggcaccgacagatacagaatggtggtgggcggcgcccaggccggcgacgccggcacctaccactgcaccgccgccgagtggatccaggaccccgacggcagctgggcccagatcgccgagaagagagccgtgctggcccacgtggacgtgcagaccctgagcagccagctggccgtgaccgtgggccccggcgagagaagaatcggccccggcgagcccctggagctgctgtgcaacgtgagcggcgccctgccccccgccggcagacacgccgcctacagcgtgggctgggagatggcccccgccggcgcccccggccccggcagactggtggcccagctggacaccgagggcgtgggcagcctgggccccggctacgagggcagacacatcgccatggagaaggtggccagcagaacctacagactgagactggaggccgccagacccggcgacgccggcacctacagatgcctggccaaggcctacgtgagaggcagcggcaccagactgagagaggccgccagcgccagaagcagacccctgcccgtgcacgtgagagaggagggcgtggtgctggaggccgtggcctggctggccggcggcaccgtgtacagaggcgagaccgccagcctgctgtgcaacatcagcgtgagaggcggcccccccggcctgagactggccgccagctggtgggtggagagacccgaggacggcgagctgagcagcgtgcccgcccagctggtgggcggcgtgggccaggacggcgtggccgagctgggcgtgagacccggcggcggccccgtgagcgtggagctggtgggccccagaagccacagactgagactgcacagcctgggccccgaggacgagggcgtgtaccactgcgcccccagcgcctgggtgcagcacgccgactacagctggtaccaggccggcagcgccagaagcggccccgtgaccgtgtacccctacatgcacgccctggacaccctgttcgtgcccctgctggtgggcaccggcgtggccctggtgaccggcgccaccgtgctgggcaccatcacctgctgcttcatgaagagactgagaaagagatag

SEQ ID NO: 85075 - DNA, 1581 bp, synthetic construct
  misc_feature 1..1581: note = Description of Artificial Sequence: Synthetic coding sequence
  source 1..1581: mol_type = other DNA
atgggcgccctgagacccaccctgctgccccccagcctgcccctgctgctgctgctgatgctgggcatgggctgctgggccagagaggtgctggtgcccgagggccccctgtacagagtggccggcaccgccgtgagcatcagctgcaacgtgaccggctacgagggccccgcccagcagaacttcgagtggttcctgtacagacccgaggcccccgacaccgccctgggcatcgtgagcaccaaggacacccagttcagctacgccgtgttcaagagcagagtggtggccggcgaggtgcaggtgcagagactgcagggcgacgccgtggtgctgaagatcgccagactgcaggcccaggacgccggcatctacgagtgccacacccccagcaccgacaccagatacctgggcagctacagcggcaaggtggagctgagagtgctgcccgacgtgctgcaggtgagcgccgccccccccggccccagaggcagacaggcccccaccagcccccccagaatgaccgtgcacgagggccaggagctggccctgggctgcctggccagaaccagcacccagaagcacacccacctggccgtgagcttcggcagaagcgtgcccgaggcccccgtgggcagaagcaccctgcaggaggtggtgggcatcagaagcgacctggccgtggaggccggcgccccctacgccgagagactggccgccggcgagctgagactgggcaaggagggcaccgacagatacagaatggtggtgggcggcgcccaggccggcgacgccggcacctaccactgcaccgccgccgagtggatccaggaccccgacggcagctgggcccagatcgccgagaagagagccgtgctggcccacgtggacgtgcagaccctgagcagccagctggccgtgaccgtgggccccggcgagagaagaatcggccccggcgagcccctggagctgctgtgcaacgtgagcggcgccctgccccccgccggcagacacgccgcctacagcgtgggctgggagatggcccccgccggcgcccccggccccggcagactggtggcccagctggacaccgagggcgtgggcagcctgggccccggctacgagggcagacacatcgccatggagaaggtggccagcagaacctacagactgagactggaggccgccagacccggcgacgccggcacctacagatgcctggccaaggcctacgtgagaggcagcggcaccagactgagagaggccgccagcgccagaagcagacccctgcccgtgcacgtgagagaggagggcgtggtgctggaggccgtggcctggctggccggcggcaccgtgtacagaggcgagaccgccagcctgctgtgcaacatcagcgtgagaggcggcccccccggcctgagaagcgccagaagcggccccgtgaccgtgtacccctacatgcacgccctggacaccctgttcgtgcccctgctggtgggcaccggcgtggccctggtgaccggcgccaccgtgctgggcaccatcacctgctgcttcatgaagagactgagaaagagatag

SEQ ID NO: 85076 - DNA, 1842 bp, synthetic construct; identical to SEQ ID NO: 85074
  misc_feature 1..1842: note = Description of Artificial Sequence: Synthetic coding sequence
  source 1..1842: mol_type = other DNA

SEQ ID NO: 85077 - DNA, 906 bp, synthetic construct
  misc_feature 1..906: note = Description of Artificial Sequence: Synthetic coding sequence
  source 1..906: mol_type = other DNA
atgggcgccctgagacccaccctgctgccccccagcctgcccctgctgctgctgctgatgctgggcatgggctgctgggccagagaggtgctggtgcccgagggccccctgtacagagtggccggcaccgccgtgagcatcagctgcaacgtgaccggctacgagggccccgcccagcagaacttcgagtggttcctgtacagacccgaggcccccgacaccgccctgggcatcgtgagcaccaaggacacccagttcagctacgccgtgttcaagagcagagtggtggccggcgaggtgcaggtgcagagactgcagggcgacgccgtggtgctgaagatcgccagactgcaggcccaggacgccggcatctacgagtgccacacccccagcaccgacaccagatacctgggcagctacagcggcaaggtggagctgagagtgctgcccgacgtgctgcaggtgagcgccgccccccccggccccagaggcagacaggcccccaccagcccccccagaatgaccgtgcacgagggccaggagctggccctgggctgcctggccagaaccagcacccagaagcacacccacctggccgtgagcttcggcagaagcgtgcccgaggcccccgtgggcagaagcaccctgcaggaggtggtgggcatcagaagcgacctggccgtggaggccggcgccccctacgccgagagactggccgccggcgagctgagactgggcaaggagggcaccgacagatacagaatggtggtgggcggcgcccaggccggcgacgccggcacctaccactgcaccgccgccgagtggatccaggaccccgacggcagctgggcccagatcgccgagaagagagccgtgctggcccacgtggacgtgcagaccctgtag

SEQ ID NO: 85078 - DNA, 2154 bp, synthetic construct
  misc_feature 1..2154: note = Description of Artificial Sequence: Synthetic coding sequence
  source 1..2154: mol_type = other DNA
atggtgtggtgcctgggcctggccgtgctgagcctggtgatcagccagggcgccgacggcagaggcaagcccgaggtggtgagcgtggtgggcagagccggcgagagcgtggtgctgggctgcgacctgctgccccccgccggcagaccccccctgcacgtgatcgagtggctgagattcggcttcctgctgcccatcttcatccagttcggcctgtacagccccagaatcgaccccgactacgtgggcagagtgagactgcagaagggcgccagcctgcagatcgagggcctgagagtggaggaccagggctggtacgagtgcagagtgttcttcctggaccagcacatccccgaggacgacttcgccaacggcagctgggtgcacctgaccgtgaacagccccccccagttccaggagaccccccccgccgtgctggaggtgcaggagctggagcccgtgaccctgagatgcgtggccagaggcagccccctgccccacgtgacctggaagctgagaggcaaggacctgggccagggccagggccaggtgcaggtgcagaacggcaccctgagaatcagaagagtggagagaggcagcagcggcgtgtacacctgccaggccagcagcaccgagggcagcgccacccacgccacccagctgctggtgctgggcccccccgtgatcgtggtgccccccaagaacagcaccgtgaacgccagccaggacgtgagcctggcctgccacgccgaggcctaccccgccaacctgacctacagctggttccaggacaacatcaacgtgttccacatcagcagactgcagcccagagtgagaatcctggtggacggcagcctgagactgctggccacccagcccgacgacgccggctgctacacctgcgtgcccagcaacggcctgctgcacccccccagcgccagcgcctacctgaccgtgctgtaccccgcccaggtgaccgccatgccccccgagacccccctgcccatcggcatgcccggcgtgatcagatgccccgtgagagccaacccccccctgctgttcgtgagctggaccaaggacggcaaggccctgcagctggacaagttccccggctggagccagggcaccgagggcagcctgatcatcgccctgggcaacgaggacgccctgggcgagtacagctgcaccccctacaacagcctgggcaccgccggccccagccccgtgaccagagtgctgctgaaggccccccccgccttcatcgagagacccaaggaggagtacttccaggaggtgggcagagagctgctgatcccctgcagcgcccagggcgaccccccccccgccgccccccccagccccctgcccggccccggccccctgctgcagtacctgagcctgcccttcttcagagagatgaacgtggacggcgactggccccccctggaggagcccagccccgccgccccccccgactacatggacaccagaagatgccccaccagcagcttcctgagaagccccgagaccccccccgtgagccccagagagagcctgcccggcgccgtggtgggcgccggcgccaccgccgagcccccctacaccgccctggccgactggaccctgagagagagactgctgcccggcctgctgcccgccgcccccagaggcagcctgaccagccagagcagcggcagaggcagcgccagcttcctgagaccccccagcaccgcccccagcgccggcggcagctacctgagccccgcccccggcgacaccagcagctgggccagcggccccgagagatggcccagaagagagcacgtggtgaccgtgagcaagagaagaaacaccagcgtggacgagaactacgagtgggacagcgagttccccggcgacatggagctgctggagaccctgcacctgggcctggccagcagcagactgagacccgaggccgagcccgagctgggcgtgaagacccccgaggagggctgcctgctgaacaccgcccacgtgaccggccccgaggccagatgcgccgccctgagagaggagttcctggccttcagaagaagaagagacgccaccagagccagactgcccgcctacagacagcccgtgccccaccccgagcaggccaccctgctgtag

SEQ ID NO: 85079 - DNA, 3492 bp, synthetic construct
  misc_feature 1..3492: note = Description of Artificial Sequence: Synthetic coding sequence
  source 1..3492: mol_type = other DNA
atggtgtggtgcctgggcctggccgtgctgagcctggtgatcagccagggcgccgacggcagaggcaagcccgaggtggtgagcgtggtgggcagagccggcgagagcgtggtgctgggctgcgacctgctgccccccgccggcagaccccccctgcacgtgatcgagtggctgagattcggcttcctgctgcccatcttcatccagttcggcctgtacagccccagaatcgaccccgactacgtgggcagagtgagactgcagaagggcgccagcctgcagatcgagggcctgagagtggaggaccagggctggtacgagtgcagagtgttcttcctggaccagcacatccccgaggacgacttcgccaacggcagctgggtgcacctgaccgtgaacagccccccccagttccaggagaccccccccgccgtgctggaggtgcaggagctggagcccgtgaccctgagatgcgtggccagaggcagccccctgccccacgtgacctggaagctgagaggcaaggacctgggccagggccagggccaggtgcaggtgcagaacggcaccctgagaatcagaagagtggagagaggcagcagcggcgtgtacacctgccaggccagcagcaccgagggcagcgccacccacgccacccagctgctggtgctgggcccccccgtgatcgtggtgccccccaagaacagcaccgtgaacgccagccaggacgtgagcctggcctgccacgccgaggcctaccccgccaacctgacctacagctggttccaggacaacatcaacgtgttccacatcagcagactgcagcccagagtgagaatcctggtggacggcagcctgagactgctggccacccagcccgacgacgccggctgctacacctgcgtgcccagcaacggcctgctgcacccccccagcgccagcgcctacctgaccgtgctgtgcatgcccggcgtgatcagatgccccgtgagagccaacccccccctgctgttcgtgagctggaccaaggacggcaaggccctgcagctggacaagttccccggctggagccagggcaccgagggcagcctgatcatcgccctgggcaacgaggacgccctgggcgagtacagctgcaccccctacaacagcctgggcaccgccggccccagccccgtgaccagagtgctgctgaaggccccccccgccttcatcgagagacccaaggaggagtacttccaggaggtgggcagagagctgctgatcccctgcagcgcccagggcgaccccccccccgtggtgagctggaccaaggtgggcagaggcctgcagggccaggcccaggtggacagcaacagcagcctgatcctgagacccctgaccaaggaggcccacggccactgggagtgcagcgccagcaacgccgtggccagagtggccaccagcaccaacgtgtacgtgctgggcaccagcccccacgtggtgaccaacgtgagcgtggtggccctgcccaagggcgccaacgtgagctgggagcccggcttcgacggcggctacctgcagagattcagcgtgtggtacacccccctggccaagagacccgacagaatgcaccacgactgggtgagcctggccgtgcccgtgggcgccgcccacctgctggtgcccggcctgcagccccacacccagtaccagttcagcgtgctggcccagaacaagctgggcagcggccccttcagcgagatcgtgctgagcgcccccgagggcctgcccaccacccccgccgcccccggcctgccccccaccgagatccccccccccctgagcccccccagaggcctggtggccgtgagaacccccagaggcgtgctgctgcactgggacccccccgagctggtgcccaagagactggacggctacgtgctggagggcagacagggcagccagggctgggaggtgctggaccccgccgtggccggcaccgagaccgagctgctggtgcccggcctgatcaaggacgtgctgtacgagttcagactggtggccttcgccggcagcttcgtgagcgaccccagcaacaccgccaacgtgagcaccagcggcctggaggtgtaccccagcagaacccagctgcccggcctgctgccccagcccgtgctggccggcgtggtgggcggcgtgtgcttcctgggcgtggccgtgctggtgagcatcctggccggctgcctgctgaacagaagaagagccgccagaagaagaagaaagagactgagacaggacccccccctgatcttcagccccaccggcaagagcgccgcccccagcgccctgggcagcggcagccccgacagcgtggccaagctgaagctgcagggcagccccgtgcccagcctgagacagagcctgctgtggggcgaccccgccggcacccccagcccccaccccgacccccccagcagcagaggccccctgcccctggagcccatctgcagaggccccgacggcagattcgtgatgggccccaccgtggccgccccccaggagagaagcggcagagagcaggccgagcccagaacccccgcccagagactggccagaagcttcgactgcagcagcagcagccccagcggcgccccccagcccctgtgcatcgaggacatcagccccgtggcccccccccccgccgccccccccagccccctgcccggccccggccccctgctgcagtacctgagcctgcccttcttcagagagatgaacgtggacggcgactggccccccctggaggagcccagccccgccgccccccccgactacatggacaccagaagatgccccaccagcagcttcctgagaagccccgagaccccccccgtgagccccagagagagcctgcccggcgccgtggtgggcgccggcgccaccgccgagcccccctacaccgccctggccgactggaccctgagagagagactgctgcccggcctgctgcccgccgcccccagaggcagcctgaccagccagagcagcggcagaggcagcgccagcttcctgagaccccccagcaccgcccccagcgccggcggcagctacctgagccccgcccccggcgacaccagcagctgggccagcggccccgagagatggcccagaagagagcacgtggtgaccgtgagcaagagaagaaacaccagcgtggacgagaactacgagtgggacagcgagttccccggcgacatggagctgctggagaccctgcacctgggcctggccagcagcagactgagacccgaggccgagcccgagctgggcgtgaagacccccgaggagggctgcctgctgaacaccgcccacgtgaccggccccgaggccagatgcgccgccctgagagaggagttcctggccttcagaagaagaagagacgccaccagagccagactgcccgcctacagacagcccgtgccccaccccgagcaggccaccctgctgtag

SEQ ID NO: 85080 - DNA, 3540 bp, synthetic construct
  misc_feature 1..3540: note = Description of Artificial Sequence: Synthetic coding sequence
  source 1..3540: mol_type = other DNA
atggtgtggtgcctgggcctggccgtgctgagcctggtgatcagccagggcgccgacggcagaggcaagcccgaggtggtgagcgtggtgggcagagccggcgagagcgtggtgctgggctgcgacctgctgccccccgccggcagaccccccctgcacgtgatcgagtggctgagattcggcttcctgctgcccatcttcatccagttcggcctgtacagccccagaatcgaccccgactacgtgggcagagtgagactgcagaagggcgccagcctgcagatcgagggcctgagagtggaggaccagggctggtacgagtgcagagtgttcttcctggaccagcacatccccgaggacgacttcgccaacggcagctgggtgcacctgaccgtgaacagccccccccagttccaggagaccccccccgccgtgctggaggtgcaggagctggagcccgtgaccctgagatgcgtggccagaggcagccccctgccccacgtgacctggaagctgagaggcaaggacctgggccagggccagggccaggtgcaggtgcagaacggcaccctgagaatcagaagagtggagagaggcagcagcggcgtgtacacctgccaggccagcagcaccgagggcagcgccacccacgccacccagctgctggtgctgggcccccccgtgatcgtggtgccccccaagaacagcaccgtgaacgccagccaggacgtgagcctggcctgccacgccgaggcctaccccgccaacctgacctacagctggttccaggacaacatcaacgtgttccacatcagcagactgcagcccagagtgagaatcctggtggacggcagcctgagactgctggccacccagcccgacgacgccggctgctacacctgcgtgcccagcaacggcctgctgcacccccccagcgccagcgcctacctgaccgtgctgtaccccgcccaggtgaccgccatgccccccgagacccccctgcccatcggcatgcccggcgtgatcagatgccccgtgagagccaacccccccctgctgttcgtgagctggaccaaggacggcaaggccctgcagctggacaagttccccggctggagccagggcaccgagggcagcctgatcatcgccctgggcaacgaggacgccctgggcgagtacagctgcaccccctacaacagcctgggcaccgccggccccagccccgtgaccagagtgctgctgaaggccccccccgccttcatcgagagacccaaggaggagtacttccaggaggtgggcagagagctgctgatcccctgcagcgcccagggcgaccccccccccgtggtgagctggaccaaggtgggcagaggcctgcagggccaggcccaggtggacagcaacagcagcctgatcctgagacccctgaccaaggaggcccacggccactgggagtgcagcgccagcaacgccgtggccagagtggccaccagcaccaacgtgtacgtgctgggcaccagcccccacgtggtgaccaacgtgagcgtggtggccctgcccaagggcgccaacgtgagctgggagcccggcttcgacggcggctacctgcagagattcagcgtgtggtacacccccctggccaagagacccgacagaatgcaccacgactgggtgagcctggccgtgcccgtgggcgccgcccacctgctggtgcccggcctgcagccccacacccagtaccagttcagcgtgctggcccagaacaagctgggcagcggccccttcagcgagatcgtgctgagcgcccccgagggcctgcccaccacccccgccgcccccggcctgccccccaccgagatccccccccccctgagcccccccagaggcctggtggccgtgagaacccccagaggcgtgctgctgcactgggacccccccgagctggtgcccaagagactggacggctacgtgctggagggcagacagggcagccagggctgggaggtgctggaccccgccgtggccggcaccgagaccgagctgctggtgcccggcctgatcaaggacgtgctgtacgagttcagactggtggccttcgccggcagcttcgtgagcgaccccagcaacaccgccaacgtgagcaccagcggcctggaggtgtaccccagcagaacccagctgcccggcctgctgccccagcccgtgctggccggcgtggtgggcggcgtgtgcttcctgggcgtggccgtgctggtgagcatcctggccggctgcctgctgaacagaagaagagccgccagaagaagaagaaagagactgagacaggacccccccctgatcttcagccccaccggcaagagcgccgcccccagcgccctgggcagcggcagccccgacagcgtggccaagctgaagctgcagggcagccccgtgcccagcctgagacagagcctgctgtggggcgaccccgccggcacccccagcccccaccccgacccccccagcagcagaggccccctgcccctggagcccatctgcagaggccccgacggcagattcgtgatgggccccaccgtggccgccccccaggagagaagcggcagagagcaggccgagcccagaacccccgcccagagactggccagaagcttcgactgcagcagcagcagccccagcggcgccccccagcccctgtgcatcgaggacatcagccccgtggcccccccccccgccgccccccccagccccctgcccggccccggccccctgctgcagtacctgagcctgcccttcttcagagagatgaacgtggacggcgactggccccccctggaggagcccagccccgccgccccccccgactacatggacaccagaagatgccccaccagcagcttcctgagaagccccgagaccccccccgtgagccccagagagagcctgcccggcgccgtggtgggcgccggcgccaccgccgagcccccctacaccgccctggccgactggaccctgagagagagactgctgcccggcctgctgcccgccgcccccagaggcagcctgaccagccagagcagcggcagaggcagcgccagcttcctgagaccccccagcaccgcccccagcgccggcggcagctacctgagccccgcccccggcgacaccagcagctgggccagcggccccgagagatggcccagaagagagcacgtggtgaccgtgagcaagagaagaaacaccagcgtggacgagaactacgagtgggacagcgagttccccggcgacatggagctgctggagaccctgcacctgggcctggccagcagcagactgagacccgaggccgagcccgagctgggcgtgaagacccccgaggagggctgcctgctgaacaccgcccacgtgaccggccccgaggccagatgcgccgccctgagagaggagttcctggccttcagaagaagaagagacgccaccagagccagactgcccgcctacagacagcccgtgccccaccccgagcaggccaccctgctgtag

SEQ ID NO: 85081 - DNA, 4050 bp, synthetic construct
  misc_feature 1..4050: note = Description of Artificial Sequence: Synthetic coding sequence
  source 1..4050: mol_type = other DNA
atgatctggtacgtggccaccttcatcgccagcgtgatcggcaccagaggcctggccgccgagggcgcccacggcctgagagaggagcccgagttcgtgaccgccagagccggcgagagcgtggtgctgagatgcgacgtgatccaccccgtgaccggccagccccccccctacgtggtggagtggttcaagttcggcgtgcccatccccatcttcatcaagttcggctactaccccccccacgtggaccccgagtacgccggcagagccagcctgcacgacaaggccagcctgagactggagcaggtgagaagcgaggaccagggctggtacgagtgcaaggtgctgatgctggaccagcagtacgacaccttccacaacggcagctgggtgcacctgaccatcaacgccccccccaccttcaccgagacccccccccagtacatcgaggccaaggagggcggcagcatcaccatgacctgcaccgccttcggcaaccccaagcccatcgtgacctggctgaaggagggcaccctgctgggcgccagcggcaagtaccaggtgagcgacggcagcctgaccgtgaccagcgtgagcagagaggacagaggcgcctacacctgcagagcctacagcatccagggcgaggccgtgcacaccacccacctgctggtgcagggcccccccttcatcgtgagcccccccgagaacatcaccgtgaacatcagccaggacgccctgctgacctgcagagccgaggcctaccccggcaacctgacctacacctggtactggcaggacgagaacgtgtacttccagaacgacctgaagctgagagtgagaatcctgatcgacggcaccctgatcatcttcagagtgaagcccgaggacagcggcaagtacacctgcgtgcccagcaacagcctgggcagaagccccagcgccagcgcctacctgaccgtgcagtaccccgccagagtgctgaacatgccccccgtgatctacgtgcccgtgggcatccacggctacatcagatgccccgtggacgccgagccccccgccaccgtggtgaagtggaacaaggacggcagacccctgcaggtggagaagaacctgggctggaccctgatggaggacggcagcatcagaatcgaggaggccaccgaggaggccctgggcacctacacctgcgtgccctacaacaccctgggcaccatgggccagagcgcccccgccagactggtgctgaaggaccccccctacttcaccgtgctgcccggctgggagtacagacaggaggccggcagagagctgctgatcccctgcgccgccgccggcgaccccttccccgtgatcacctggagaaaggtgggcaagcccagcagaagcaagcacagcgccctgcccagcggcagcctgcagttcagagccctgagcaaggaggaccacggcgagtgggagtgcgtggccaccaacgtggtgaccagcatcaccgccagcacccacctgaccgtgatcggcaccagcccccacgcccccggcagcgtgagagtgcaggtgagcatgaccaccgccaacgtgagctgggagcccggctacgacggcggctacgagcagaccttcagcgtgtggatgaagagagcccagttcggcccccacgactggctgagcctgcccgtgccccccggccccagctggctgctggtggacaccctggagcccgagaccgcctaccagttcagcgtgctggcccagaacaagctgggcaccagcgccttcagcgaggtggtgaccgtgaacaccctggccttccccatcaccacccccgagcccctggtgctggtgaccccccccagatgcctgatcgccaacagaacccagcagggcgtgctgctgagctggctgccccccgccaaccacagcttccccatcgacagatacatcatggagttcagagtggccgagagatgggagctgctggacgacggcatccccggcaccgagggcgagttcttcgccaaggacctgagccaggacacctggtacgagttcagagtgctggccgtgatgcaggacctgatcagcgagcccagcaacatcgccggcgtgagcagcaccgacatcttcccccagcccgacctgaccgaggacggcctggccagacccgtgctggccggcatcgtggccaccatctgcttcctggccgccgccatcctgttcagcaccctggccgcctgcttcgtgaacaagcagagaaagagaaagctgaagagaaagaaggacccccccctgagcatcacccactgcagaaagagcctggagagccccctgagcagcggcaaggtgagccccgagagcatcagaaccctgagagcccccagcgagagcagcgacgaccagggccagcccgccgccaagagaatgctgagccccaccagagagaaggagctgagcctgtacaagaagaccaagagagccatcagcagcaagaagtacagcgtggccaaggccgaggccgaggccgaggccaccacccccatcgagctgatcagcagaggccccgacggcagattcgtgatggaccccgccgagatggagcccagcctgaagagcagaagaatcgagggcttccccttcgccgaggagaccgacatgtaccccgagttcagacagagcgacgaggagaacgaggaccccctggtgcccaccagcgtggccgccctgaagagccagctgacccccctgagcagcagccaggagagctacctgcccccccccgcctacagccccagattccagcccagaggcctggagggccccggcggcctggagggcagactgcaggccaccggccaggccagaccccccgcccccagacccttccaccacggccagtactacggctacctgagcagcagcagccccggcgaggtggagcccccccccttctacgtgcccgaggtgggcagccccctgagcagcgtgatgagcagcccccccctgcccaccgagggccccttcggccaccccaccatccccgaggagaacggcgagaacgccagcaacagcaccctgcccctgacccagacccccaccggcggcagaagccccgagccctggggcagacccgagttccccttcggcggcctggagacccccgccatgatgttcccccaccagctgcccccctgcgacgtgcccgagagcctgcagcccaaggccggcctgcccagaggcctgccccccaccagcctgcaggtgcccgccgcctaccccggcatcctgagcctggaggcccccaagggctgggccggcaagagccccggcagaggccccgtgcccgccccccccgccgccaagtggcaggacagacccatgcagcccctggtgagccagggccagctgagacacaccagccagggcatgggcatccccgtgctgccctaccccgagcccgccgagcccggcgcccacggcggccccagcaccttcggcctggacaccagatggtacgagccccagcccagacccagacccagccccagacaggccagaagagccgagcccagcctgcaccaggtggtgctgcagcccagcagactgagccccctgacccagagccccctgagcagcagaaccggcagccccgagctggccgccagagccagacccagacccggcctgctgcagcaggccgagatgagcgagatcaccctgcagccccccgccgccgtgagcttcagcagaaagagcacccccagcaccggcagccccagccagagcagcagaagcggcagccccagctacagacccgccatgggcttcaccaccctggccaccggctaccccagccccccccccggccccgcccccgccggccccggcgacagcctggacgtgttcggccagacccccagccccagaagaaccggcgaggagctgctgagacccgagacccccccccccaccctgcccaccagcggcaagctgcagagagacagacccgcccccgccaccagcccccccgagagagccctgagcaagctgtag

SEQ ID NO: 85082 - DNA, 1509 bp, synthetic construct
  misc_feature 1..1509: note = Description of Artificial Sequence: Synthetic coding sequence
  source 1..1509: mol_type = other DNA
atggcctggcccaagctgcccgccccctggctgctgctgtgcacctggctgcccgccggctgcctgagcctgctggtgaccgtgcagcacaccgagagatacgtgaccctgttcgccagcatcatcctgaagtgcgactacaccaccagcgcccagctgcaggacgtggtggtgacctggagattcaagagcttctgcaaggaccccatcttcgactactacagcgccagctaccaggccgccctgagcctgggccaggaccccagcaacgactgcaacgacaaccagagagaggtgagaatcgtggcccagagaagaggccagaacgagcccgtgctgggcgtggactacagacagagaaagatcaccatccagaacagagccgacctggtgatcaacgaggtgatgtggtgggaccacggcgtgtactactgcaccatcgaggcccccggcgacaccagcggcgaccccgacaaggaggtgaagctgatcgtgctgcactggctgaccgtgatcttcatcatcctgggcgccctgctgctgctgctgctgatcggcgtgtgctggtgccagtgctgcccccagtactgctgctgctacatcagatgcccctgctgccccgcccactgctgctgccccgaggaggacctgagcctgcccagcagcctgccccagatgcccatgacccagaccaccaaccagccccccatcgccaacggcgtgctggagtacctggagaaggagctgagaaacctgaacctggcccagcccctgccccccgacctgaagggcagattcggccacccctgcagcatgctgagcagcctgggcagcgaggtggtggagagaagaatcatccacctgccccccctgatcagagacctgagcagcagcagaagaaccagcgacagcctgcaccagcagtggctgacccccatccccagcagaccctgggacctgagagagggcagaagccaccaccactaccccgacttccaccaggagctgcaggacagaggccccaagagctgggccctggagagaagagagctggaccccagctggagcggcagacacagaagcagcagactgaacggcagccccatccactggagcgacagagacagcctgagcgacgtgcccagcagcagcgaggccagatggagacccagccacccccccttcagaagcagatgccaggagagacccagaagacccagccccagagagagcacccagagacacggcagaagaagaagacacagaagctacagcccccccctgcccagcggcctgagcagctggagcagcgaggaggacaaggagagacagccccagagctggagagcccacagaagaggcagccacagcccccactggcccgaggagaagccccccagctacagaagcctggacatcacccccggcaagaacagcagaaagaagggcagcgtggagagaagaagcgagaaggacagcagccacagcggcagaagcgtggtgatctag

SEQ ID NO: 85083 - DNA, 1641 bp, synthetic construct
  misc_feature 1..1641: note = Description of Artificial Sequence: Synthetic coding sequence
  source 1..1641: mol_type = other DNA
atggcctggcccaagctgcccgccccctggctgctgctgtgcacctggctgcccgccggctgcctgagcctgctggtgaccgtgcagcacaccgagagatacgtgaccctgttcgccagcatcatcctgaagtgcgactacaccaccagcgcccagctgcaggacgtggtggtgacctggagattcaagagcttctgcaaggaccccatcttcgactactacagcgccagctaccaggccgccctgagcctgggccaggaccccagcaacgactgcaacgacaaccagagagaggtgagaatcgtggcccagagaagaggccagaacgagcccgtgctgggcgtggactacagacagagaaagatcaccatccagaacagagccgacctggtgatcaacgaggtgatgtggtgggaccacggcgtgtactactgcaccatcgaggcccccggcgacaccagcggcgaccccgacaaggaggtgaagctgatcgtgctgcactggctgaccgtgatcttcatcatcctgggcgccctgctgctgctgctgctgatcggcgtgtgctggtgccagtgctgcccccagtactgctgctgctacatcagatgcccctgctgccccgcccactgctgctgccccgaggaggccctggccagacacagatacatgaagcaggcccaggccctgggcccccagatgatgggcaagcccctgtactggggcgccgacagaagcagccaggtgagcagctaccccatgcaccccctgctgcagagagacctgagcctgcccagcagcctgccccagatgcccatgacccagaccaccaaccagccccccatcgccaacggcgtgctggagtacctggagaaggagctgagaaacctgaacctggcccagcccctgccccccgacctgaagggcagattcggccacccctgcagcatgctgagcagcctgggcagcgaggtggtggagagaagaatcatccacctgccccccctgatcagagacctgagcagcagcagaagaaccagcgacagcctgcaccagcagtggctgacccccatccccagcagaccctgggacctgagagagggcagaagccaccaccactaccccgacttccaccaggagctgcaggacagaggccccaagagctgggccctggagagaagagagctggaccccagctggagcggcagacacagaagcagcagactgaacggcagccccatccactggagcgacagagacagcctgagcgacgtgcccagcagcagcgaggccagatggagacccagccacccccccttcagaagcagatgccaggagagacccagaagacccagccccagagagagcacccagagacacggcagaagaagaagacacagaagctacagcccccccctgcccagcggcctgagcagctggagcagcgaggaggacaaggagagacagccccagagctggagagcccacagaagaggcagccacagcccccactggcccgaggagaagccccccagctacagaagcctggacatcacccccggcaagaacagcagaaagaagggcagcgtggagagaagaagcgagaaggacagcagccacagcggcagaagcgtggtgatctag

SEQ ID NO: 85084 - DNA, 639 bp, synthetic construct
  misc_feature 1..639: note = Description of Artificial Sequence: Synthetic coding sequence
  source 1..639: mol_type = other DNA
atggcctggcccaagctgcccgccccctggctgctgctgtgcacctggctgcccgccggctgcctgagcctgctggtgaccgtgcagcacaccgagagatacgtgaccctgttcgccagcatcatcctgaagtgcgactacaccaccagcgcccagctgcaggacgtggtggtgacctggagattcaagagcttctgcaaggaccccatcttcgactactacagcgccagctaccaggccgccctgagcctgggccaggaccccagcaacgactgctgctgctgccccgaggaggccctggccagacacagatacatgaagcaggcccaggccctgggcccccagatgatgggcaagcccctgtactggggcgccgacagaagcagccaggtgagcagctaccccatgcaccccctgctgcagagagacctgagcctgcccagcagcctgccccagatgcccatgacccagaccaccaaccagccccccatcgccaacggcgtgctggagtacctggagaaggagctgagaaacctgaacctggcccagcccctgccccccgacctgaagggcagattcggccacccctgcagcatgctgagcagcctgggcagcgagaaccagatcgaggagttctag

SEQ ID NO: 85085 - DNA, 1374 bp, synthetic construct
  misc_feature 1..1374: note = Description of Artificial Sequence: Synthetic coding sequence
  source 1..1374: mol_type = other DNA
atggcctggcccaagctgcccgccccctggctgctgctgtgcacctggctgcccgccggctgcctgagcctgctggtgaccgtgcagcacaccgagagatacgtgaccctgttcgccagcatcatcctgaagtgcgactacaccaccagcgcccagctgcaggacgtggtggtgacctggagattcaagagcttctgcaaggaccccatcttcgactactacagcgccagctaccaggccgccctgagcctgggccaggaccccagcaacgactgcaacgacaaccagagagaggtgagaatcgtggcccagagaagaggccagaacgagcccgtgctgggcgtggactacagacagagaaagatcaccatccagaaccccctggccagacacagatacatgaagcaggcccaggccctgggcccccagatgatgggcaagcccctgtactggggcgccgacagaagcagccaggtgagcagctaccccatgcaccccctgctgcagagagacctgagcctgcccagcagcctgccccagatgcccatgacccagaccaccaaccagccccccatcgccaacggcgtgctggagtacctggagaaggagctgagaaacctgaacctggcccagcccctgccccccgacctgaagggcagattcggccacccctgcagcatgctgagcagcctgggcagcgaggtggtggagagaagaatcatccacctgccccccctgatcagagacctgagcagcagcagaagaaccagcgacagcctgcaccagcagtggctgacccccatccccagcagaccctgggacctgagagagggcagaagccaccaccactaccccgacttccaccaggagctgcaggacagaggccccaagagctgggccctggagagaagagagctggaccccagctggagcggcagacacagaagcagcagactgaacggcagccccatccactggagcgacagagacagcctgagcgacgtgcccagcagcagcgaggccagatggagacccagccacccccccttcagaagcagatgccaggagagacccagaagacccagccccagagagagcacccagagacacggcagaagaagaagacacagaagctacagcccccccctgcccagcggcctgagcagctggagcagcgaggaggacaaggagagacagccccagagctggagagcccacagaagaggcagccacagcccccactggcccgaggagaagccccccagctacagaagcctggacatcacccccggcaagaacagcagaaagaagggcagcgtggagagaagaagcgagaaggacagcagccacagcggcagaagcgtggtgatctag

SEQ ID NO: 85086 - DNA, 1545 bp, synthetic construct
  misc_feature 1..1545: note = Description of Artificial Sequence: Synthetic coding sequence
  source 1..1545: mol_type = other DNA
atggccggcaacatcttctgccccttcgccctgttcttcctgcccatgagcagagtgggccacctgcagcacttcctgctgctgctggccctgggctgcctgagcctgctggtgaccgtgcagcacaccgagagatacgtgaccctgttcgccagcatcatcctgaagtgcgactacaccaccagcgcccagctgcaggacgtggtggtgacctggagattcaagagcttctgcaaggaccccatcttcgactactacagcgccagctaccaggccgccctgagcctgggccaggaccccagcaacgactgcaacgacaaccagagagaggtgagaatcgtggcccagagaagaggccagaacgagcccgtgctgggcgtggactacagacagagaaagatcaccatccagaacagagccgacctggtgatcaacgaggtgatgtggtgggaccacggcgtgtactactgcaccatcgaggcccccggcgacaccagcggcgaccccgacaaggaggtgaagctgatcgtgctgcactggctgaccgtgatcttcatcatcctgggcgccctgctgctgctgctgctgatcggcgtgtgctggtgccagtgctgcccccagtactgctgctgctacatcagatgcccctgctgccccgcccactgctgctgccccgaggaggacctgagcctgcccagcagcctgccccagatgcccatgacccagaccaccaaccagccccccatcgccaacggcgtgctggagtacctggagaaggagctgagaaacctgaacctggcccagcccctgccccccgacctgaagggcagattcggccacccctgcagcatgctgagcagcctgggcagcgaggtggtggagagaagaatcatccacctgccccccctgatcagagacctgagcagcagcagaagaaccagcgacagcctgcaccagcagtggctgacccccatccccagcagaccctgggacctgagagagggcagaagccaccaccactaccccgacttccaccaggagctgcaggacagaggccccaagagctgggccctggagagaagagagctggaccccagctggagcggcagacacagaagcagcagactgaacggcagccccatccactggagcgacagagacagcctgagcgacgtgcccagcagcagcgaggccagatggagacccagccacccccccttcagaagcagatgccaggagagacccagaagacccagccccagagagagcacccagagacacggcagaagaagaagacacagaagctacagcccccccctgcccagcggcctgagcagctggagcagcgaggaggacaaggagagacagccccagagctggagagcccacagaagaggcagccacagcccccactggcccgaggagaagccccccagctacagaagcctggacatcacccccggcaagaacagcagaaagaagggcagcgtggagagaagaagcgagaaggacagcagccacagcggcagaagcgtggtgatctag

SEQ ID NO: 85087 - DNA, 1800 bp, synthetic construct
  misc_feature 1..1800: note = Description of Artificial Sequence: Synthetic coding sequence
  source 1..1800: mol_type = other DNA
atggagggccccctgacccccccccccctgcagggcggcggcgccgccgccgtgcccgagcccggcgccagacagcaccccggccacgagaccgccgcccagagatacagcgccagactgctgcaggccggctacgagcccgagagccccagactggacctggccacccaccccaccacccccagaagcgagctgagcagcgtggtgctgctggccggcgtgggcgtgcagatggacagactgagaagagccagcatggccgactacctgatcagcggcggcaccggctacgtgcccgaggacggcctgaccgcccagcagctgttcgccagcgccgacggcctgacctacaacgacttcctgatcctgcccggcttcatcgacttcatcgccgacgaggtggacctgaccagcgccctgaccagaaagatcaccctgaagacccccctgatcagcagccccatggacaccgtgaccgaggccgacatggccatcgccatggccctgatgggcggcatcggcttcatccaccacaactgcacccccgagttccaggccaacgaggtgagaaaggtgaagaagttcgagcagggcttcatcaccgaccccgtggtgctgagccccagccacaccgtgggcgacgtgctggaggccaagatgagacacggcttcagcggcatccccatcaccgagaccggcaccatgggcagcaagctggtgggcatcgtgaccagcagagacatcgacttcctggccgagaaggaccacaccaccctgctgagcgaggtgatgacccccagaatcgagctggtggtggcccccgccggcgtgaccctgaaggaggccaacgagatcctgcagagaagcaagaagggcaagctgcccatcgtgaacgactgcgacgagctggtggccatcatcgccagaaccgacctgaagaagaacagagactaccccctggccagcaaggacagccagaagcagctgctgtgcggcgccgccgtgggcaccagagaggacgacaagtacagactggacctgctgacccaggccggcgtggacgtgatcgtgctggacagcagccagggcaacagcgtgtaccagatcgccatggtgcactacatcaagcagaagtacccccacctgcaggtgatcggcggcaacgtggtgaccgccgcccaggccaagaacctgatcgacgccggcgtggacggcctgagagtgggcatgggctgcggcagcatctgcatcacccaggaggtgatggcctgcggcagaccccagggcaccgccgtgtacaaggtggccgagtacgccagaagattcggcgtgcccatcatcgccgacggcggcatccagaccgtgggccacgtggtgaaggccctggccctgggcgccagcaccgtgatgatgggcagcctgctggccgccaccaccgaggcccccggcgagtacttcttcagcgacggcgtgagactgaagaagtacagaggcatgggcagcctggacgccatggagaagagcagcagcagccagaagagatacttcagcgagggcgacaaggtgaagatcgcccagggcgtgagcggcagcatccaggacaagggcagcatccagaagttcgtgccctacctgatcgccggcatccagcacggctgccaggacatcggcgccagaagcctgagcgtgctgagaagcatgatgtacagcggcgagctgaagttcgagaagagaaccatgagcgcccagatcgagggcggcgtgcacggcctgcacagctacgagaagagactgtactag

SEQ ID NO: 85088 - DNA, 1470 bp, synthetic construct
  misc_feature 1..1470: note = Description of Artificial Sequence: Synthetic coding sequence
  source 1..1470: mol_type = other DNA
atggccgactacctgatcagcggcggcaccggctacgtgcccgaggacggcctgaccgcccagcagctgttcgccagcgccgacggcctgacctacaacgacttcctgatcctgcccggcttcatcgacttcatcgccgacgaggtggacctgaccagcgccctgaccagaaagatcaccctgaagacccccctgatcagcagccccatggacaccgtgaccgaggccgacatggccatcgccatggccaagttcgagcagggcttcatcaccgaccccgtggtgctgagccccagccacaccgtgggcgacgtgctggaggccaagatgagacacggcttcagcggcatccccatcaccgagaccggcaccatgggcagcaagctggtgggcatcgtgaccagcagagacatcgacttcctggccgagaaggaccacaccaccctgctgagcgaggtgatgacccccagaatcgagctggtggtggcccccgccggcgtgaccctgaaggaggccaacgagatcctgcagagaagcaagaagggcaagctgcccatcgtgaacgactgcgacgagctggtggccatcatcgccagaaccgacctgaagaagaacagagactaccccctggccagcaaggacagccagaagcagctgctgtgcggcgccgccgtgggcaccagagaggacgacaagtacagactggacctgctgacccaggccggcgtggacgtgatcgtgctggacagcagccagggcaacagcgtgtaccagatcgccatggtgcactacatcaagcagaagtacccccacctgcaggtgatcggcggcaacgtggtgaccgccgcccaggccaagaacctgatcgacgccggcgtggacggcctgagagtgggcatgggctgcggcagcatctgcatcacccaggaggtgatggcctgcggcagaccccagggcaccgccgtgtacaaggtggccgagtacgccagaagattcggcgtgcccatcatcgccgacggcggcatccagaccgtgggccacgtggtgaaggccctggccctgggcgccagcaccgtgatgatgggcagcctgctggccgccaccaccgaggcccccggcgagtacttcttcagcgacggcgtgagactgaagaagtacagaggcatgggcagcctggacgccatggagaagagcagcagcagccagaagagatacttcagcgagggcgacaaggtgaagatcgcccagggcgtgagcggcagcatccaggacaagggcagcatccagaagttcgtgccctacctgatcgccggcatccagcacggctgccaggacatcggcgccagaagcctgagcgtgctgagaagcatgatgtacagcggcgagctgaagttcgagaagagaaccatgagcgcccagatcgagggcggcgtgcacggcctgcacagctacgagaagagactgtactag

SEQ ID NO: 85089 - DNA, 1692 bp, synthetic construct
  misc_feature 1..1692: note = Description of Artificial Sequence: Synthetic coding sequence
  source 1..1692: mol_type = other DNA
atggagggccccctgacccccccccccctgcagggcggcggcgccgccgccgtgcccgagcccggcgccagacagcaccccggccacgagaccgccgcccagagatacagcgccagactgctgcaggccggctacgagcccgagagcatggccgactacctgatcagcggcggcaccggctacgtgcccgaggacggcctgaccgcccagcagctgttcgccagcgccgacggcctgacctacaacgacttcctgatcctgcccggcttcatcgacttcatcgccgacgaggtggacctgaccagcgccctgaccagaaagatcaccctgaagacccccctgatcagcagccccatggacaccgtgaccgaggccgacatggccatcgccatggccctgatgggcggcatcggcttcatccaccacaactgcacccccgagttccaggccaacgaggtgagaaaggtgaagaagttcgagcagggcttcatcaccgaccccgtggtgctgagccccagccacaccgtgggcgacgtgctggaggccaagatgagacacggcttcagcggcatccccatcaccgagaccggcaccatgggcagcaagctggtgggcatcgtgaccagcagagacatcgacttcctggccgagaaggaccacaccaccctgctgagcgaggtgatgacccccagaatcgagctggtggtggcccccgccggcgtgaccctgaaggaggccaacgagatcctgcagagaagcaagaagggcaagctgcccatcgtgaacgactgcgacgagctggtggccatcatcgccagaaccgacctgaagaagaacagagactaccccctggccagcaaggacagccagaagcagctgctgtgcggcgccgccgtgggcaccagagaggacgacaagtacagactggacctgctgacccaggccggcgtggacgtgatcgtgctggacagcagccagggcaacagcgtgtaccagatcgccatggtgcactacatcaagcagaagtacccccacctgcaggtgatcggcggcaacgtggtgaccgccgcccaggccaagaacctgatcgacgccggcgtggacggcctgagagtgggcatgggctgcggcagcatctgcatcacccaggaggtgatggcctgcggcagaccccagggcaccgccgtgtacaaggtggccgagtacgccagaagattcggcgtgcccatcatcgccgacggcggcatccagaccgtgggccacgtggtgaaggccctggccctgggcgccagcaccgtgatgatgggcagcctgctggccgccaccaccgaggcccccggcgagtacttcttcagcgacggcgtgagactgaagaagtacagaggcatgggcagcctggacgccatggagaagagcagcagcagccagaagagatacttcagcgagggcgacaaggtgaagatcgcccagggcgtgagcggcagcatccaggacaagggcagcatccagaagttcgtgccctacctgatcgccggcatccagcacggctgccaggacatcggcgccagaagcctgagcgtgctgagaagcatgatgtacagcggcgagctgaagttcgagaagagaaccatgagcgcccagatcgagggcggcgtgcacggcctgcacagctacgagaagagactgtactag

SEQ ID NO: 85090 - DNA, 1770 bp, synthetic construct
  misc_feature 1..1770: note = Description of Artificial Sequence: Synthetic coding sequence
  source 1..1770: mol_type = other DNA
atggagggccccctgacccccccccccctgcagggcggcggcgccgccgccgtgcccgagcccggcgccagacagcaccccggccacgagaccgccgcccagagatacagcgccagactgctgcaggccggctacgagcccgagagctgcttcctgctggagctgagcagcgtggtgctgctggccggcgtgggcgtgcagatggacagactgagaagagccagcatggccgactacctgatcagcggcggcaccggctacgtgcccgaggacggcctgaccgcccagcagctgttcgccagcgccgacggcctgacctacaacgacttcctgatcctgcccggcttcatcgacttcatcgccgacgaggtggacctgaccagcgccctgaccagaaagatcaccctgaagacccccctgatcagcagccccatggacaccgtgaccgaggccgacatggccatcgccatggccctgatgggcggcatcggcttcatccaccacaactgcacccccgagttccaggccaacgaggtgagaaaggtgaagaagttcgagcagggcttcatcaccgaccccgtggtgctgagccccagccacaccgtgggcgacgtgctggaggccaagatgagacacggcttcagcggcatccccatcaccgagaccggcaccatgggcagcaagctggtgggcatcgtgaccagcagagacatcgacttcctggccgagaaggaccacaccaccctgctgagcgaggtgatgacccccagaatcgagctggtggtggcccccgccggcgtgaccctgaaggaggccaacgagatcctgcagagaagcaagaagggcaagctgcccatcgtgaacgactgcgacgagctggtggccatcatcgccagaaccgacctgaagaagaacagagactaccccctggccagcaaggacagccagaagcagctgctgtgcggcgccgccgtgggcaccagagaggacgacaagtacagactggacctgctgacccaggccggcgtggacgtgatcgtgctggacagcagccagggcaacagcgtgtaccagatcgccatggtgcactacatcaagcagaagtacccccacctgcaggtgatcggcggcaacgtggtgaccgccgcccaggccaagaacctgatcgacgccggcgtggacggcctgagagtgggcatgggctgcggcagcatctgcatcacccaggaggtgatggcctgcggcagaccccagggcaccgccgtgtacaaggtggccgagtacgccagaagattcggcgtgcccatcatcgccgacggcggcatccagaccgtgggccacgtggtgaaggccctggccctgggcgccagcaccgtgatgatgggcagcctgctggccgccaccaccgaggcccccggcgagtacttcttcagcgacggcgtgagactgaagaagtacagaggcatgggcagcctggacgccatggagaagagcagcagcagccagaagagatacttcagcgagggcgacaaggtgaagatcgcccagggcgtgagcggcagcatccaggacaagggcagcatccagaagttcgtgccctacctgatcgccggcatccagcacggctgccaggacatcggcgccagaagcctgagcgtgctgagaagcatgatgtacagcggcgagctgaagttcgagaagagaaccatgagcgcccagatcgagggcggcgtgcacggcctgcacagctacgagaagagactgtactag

SEQ ID NO: 85091 - DNA, 1593 bp, synthetic construct
  misc_feature 1..1593: note = Description of Artificial Sequence: Synthetic coding sequence
  source 1..1593: mol_type = other DNA
atggagggccccctgacccccccccccctgcagggcggcggcgccgccgccgtgcccgagcccggcgccagacagcaccccggccacgagaccgccgcccagagatacagcgccagactgctgcaggccggctacgagcccgagagcgacttcctgatcctgcccggcttcatcgacttcatcgccgacgaggtggacctgaccagcgccctgaccagaaagatcaccctgaagacccccctgatcagcagccccatggacaccgtgaccgaggccgacatggccatcgccatggccctgatgggcggcatcggcttcatccaccacaactgcacccccgagttccaggccaacgaggtgagaaaggtgaagaagttcgagcagggcttcatcaccgaccccgtggtgctgagccccagccacaccgtgggcgacgtgctggaggccaagatgagacacggcttcagcggcatccccatcaccgagaccggcaccatgggcagcaagctggtgggcatcgtgaccagcagagacatcgacttcctggccgagaaggaccacaccaccctgctgagcgaggtgatgacccccagaatcgagctggtggtggcccccgccggcgtgaccctgaaggaggccaacgagatcctgcagagaagcaagaagggcaagctgcccatcgtgaacgactgcgacgagctggtggccatcatcgccagaaccgacctgaagaagaacagagactaccccctggccagcaaggacagccagaagcagctgctgtgcggcgccgccgtgggcaccagagaggacgacaagtacagactggacctgctgacccaggccggcgtggacgtgatcgtgctggacagcagccagggcaacagcgtgtaccagatcgccatggtgcactacatcaagcagaagtacccccacctgcaggtgatcggcggcaacgtggtgaccgccgcccaggccaagaacctgatcgacgccggcgtggacggcctgagagtgggcatgggctgcggcagcatctgcatcacccaggaggtgatggcctgcggcagaccccagggcaccgccgtgtacaaggtggccgagtacgccagaagattcggcgtgcccatcatcgccgacggcggcatccagaccgtgggccacgtggtgaaggccctggccctgggcgccagcaccgtgatgatgggcagcctgctggccgccaccaccgaggcccccggcgagtacttcttcagcgacggcgtgagactgaagaagtacagaggcatgggcagcctggacgccatggagaagagcagcagcagccagaagagatacttcagcgagggcgacaaggtgaagatcgcccagggcgtgagcggcagcatccaggacaagggcagcatccagaagttcgtgccctacctgatcgccggcatccagcacggctgccaggacatcggcgccagaagcctgagcgtgctgagaagcatgatgtacagcggcgagctgaagttcgagaagagaaccatgagcgcccagatcgagggcggcgtgcacggcctgcacagctacgagaagagactgtactag

SEQ ID NO: 85092 - DNA, 1701 bp, synthetic construct
  misc_feature 1..1701: note = Description of Artificial Sequence: Synthetic coding sequence
  source 1..1701: mol_type = other DNA
atggagggccccctgacccccccccccctgcagggcggcggcgccgccgccgtgcccgagcccggcgccagacagcaccccggccacgagaccgccgcccagagatacagcgccagactgctgcaggccggctacgagcccgagagccccagactggacctggccacccaccccaccacccccagaagcgagctgagcagcgtggtgctgctggccggcgtgggcgtgcagatggacagactgagaagagccagcgacttcctgatcctgcccggcttcatcgacttcatcgccgacgaggtggacctgaccagcgccctgaccagaaagatcaccctgaagacccccctgatcagcagccccatggacaccgtgaccgaggccgacatggccatcgccatggccctgatgggcggcatcggcttcatccaccacaactgcacccccgagttccaggccaacgaggtgagaaaggtgaagaagttcgagcagggcttcatcaccgaccccgtggtgctgagccccagccacaccgtgggcgacgtgctggaggccaagatgagacacggcttcagcggcatccccatcaccgagaccggcaccatgggcagcaagctggtgggcatcgtgaccagcagagacatcgacttcctggccgagaaggaccacaccaccctgctgagcgaggtgatgacccccagaatcgagctggtggtggcccccgccggcgtgaccctgaaggaggccaacgagatcctgcagagaagcaagaagggcaagctgcccatcgtgaacgactgcgacgagctggtggccatcatcgccagaaccgacctgaagaagaacagagactaccccctggccagcaaggacagccagaagcagctgctgtgcggcgccgccgtgggcaccagagaggacgacaagtacagactggacctgctgacccaggccggcgtggacgtgatcgtgctggacagcagccagggcaacagcgtgtaccagatcgccatggtgcactacatcaagcagaagtacccccacctgcaggtgatcggcggcaacgtggtgaccgccgcccaggccaagaacctgatcgacgccggcgtggacggcctgagagtgggcatgggctgcggcagcatctgcatcacccaggaggtgatggcctgcggcagaccccagggcaccgccgtgtacaaggtggccgagtacgccagaagattcggcgtgcccatcatcgccgacggcggcatccagaccgtgggccacgtggtgaaggccctggccctgggcgccagcaccgtgatgatgggcagcctgctggccgccaccaccgaggcccccggcgagtacttcttcagcgacggcgtgagactgaagaagtacagaggcatgggcagcctggacgccatggagaagagcagcagcagccagaagagatacttcagcgagggcgacaaggtgaagatcgcccagggcgtgagcggcagcatccaggacaagggcagcatccagaagttcgtgccctacctgatcgccggcatccagcacggctgccaggacatcggcgccagaagcctgagcgtgctgagaagcatgatgtacagcggcgagctgaagttcgagaagagaaccatgagcgcccagatcgagggcggcgtgcacggcctgcacagctacgagaagagactgtactag

SEQ ID NO: 85093 - DNA, 1530 bp, synthetic construct
  misc_feature 1..1530: note = Description of Artificial Sequence: Synthetic coding sequence
  source 1..1530: mol_type = other DNA
atggccgactacctgatcagcggcggcaccggctacgtgcccgaggacggcctgaccgcccagcagctgttcgccagcgccgacggcctgacctacaacgacttcctgatcctgcccggcttcatcgacttcatcgccgacgaggtggacctgaccagcgccctgaccagaaagatcaccctgaagacccccctgatcagcagccccatggacaccgtgaccgaggccgacatggccatcgccatggccctgatgggcggcatcggcttcatccaccacaactgcacccccgagttccaggccaacgagaagttcgagcagggcttcatcaccgaccccgtggtgctgagccccagccacaccgtgggcgacgtgctggaggccaagatgagacacggcttcagcggcatccccatcaccgagaccggcaccatgggcagcaagctggtgggcatcgtgaccagcagagacatcgacttcctggccgagaaggaccacaccaccctgctgagcgaggtgatgacccccagaatcgagctggtggtggcccccgccggcgtgaccctgaaggaggccaacgagatcctgcagagaagcaagaagggcaagctgcccatcgtgaacgactgcgacgagctggtggccatcatcgccagaaccgacctgaagaagaacagagactaccccctggccagcaaggacagccagaagcagctgctgtgcggcgccgccgtgggcaccagagaggacgacaagtacagactggacctgctgacccaggccggcgtggacgtgatcgtgctggacagcagccagggcaacagcgtgtaccagatcgccatggtgcactacatcaagcagaagtacccccacctgcaggtgatcggcggcaacgtggtgaccgccgcccaggccaagaacctgatcgacgccggcgtggacggcctgagagtgggcatgggctgcggcagcatctgcatcacccaggaggtgatggcctgcggcagaccccagggcaccgccgtgtacaaggtggccgagtacgccagaagattcggcgtgcccatcatcgccgacggcggcatccagaccgtgggccacgtggtgaaggccctggccctgggcgccagcaccgtgatgatgggcagcctgctggccgccaccaccgaggcccccggcgagtacttcttcagcgacggcgtgagactgaagaagtacagaggcatgggcagcctggacgccatggagaagagcagcagcagccagaagagatacttcagcgagggcgacaaggtgaagatcgcccagggcgtgagcggcagcatccaggacaagggcagcatccagaagttcgtgccctacctgatcgccggcatccagcacggctgccaggacatcggcgccagaagcctgagcgtgctgagaagcatgatgtacagcggcgagctgaagttcgagaagagaaccatgagcgcccagatcgagggcggcgtgcacggcctgcacagctacgagaagagactgtactag

SEQ ID NO: 85094 - DNA, 1470 bp, synthetic construct; identical to SEQ ID NO: 85088
  misc_feature 1..1470: note = Description of Artificial Sequence: Synthetic coding sequence
  source 1..1470: mol_type = other DNA

SEQ ID NO: 85095 - DNA, 1545 bp, synthetic construct
  misc_feature 1..1545: note = Description of Artificial Sequence: Synthetic coding sequence
  source 1..1545: mol_type = other DNA
atggccgactacctgatcagcggcggcaccagctacgtgcccgacgacggcctgaccgcccagcagctgttcaactgcggcgacggcctgacctacaacgacttcctgatcctgcccggctacatcgacttcaccgccgaccaggtggacctgaccagcgccctgaccaagaagatcaccctgaagacccccctggtgagcagccccatggacaccgtgaccgaggccggcatggccatcgccatggccctgaccggcggcatcggcttcatccaccacaactgcacccccgagttccaggccaacgaggtgagaaaggtgaagaagtacgagcagggcttcatcaccgaccccgtggtgctgagccccaaggacagagtgagagacgtgttcgaggccaaggccagacacggcttctgcggcatccccatcaccgacaccggcagaatgggcagcagactggtgggcatcatcagcagcagagacatcgacttcctgaaggaggaggagcacgactgcttcctggaggagatcatgaccaagagagaggacctggtggtggcccccgccggcatcaccctgaaggaggccaacgagatcctgcagagaagcaagaagggcaagctgcccatcgtgaacgaggacgacgagctggtggccatcatcgccagaaccgacctgaagaagaacagagactaccccctggccagcaaggacgccaagaagcagctgctgtgcggcgccgccatcggcacccacgaggacgacaagtacagactggacctgctggcccaggccggcgtggacgtggtggtgctggacagcagccagggcaacagcatcttccagatcaacatgatcaagtacatcaaggacaagtaccccaacctgcaggtgatcggcggcaacgtggtgaccgccgcccaggccaagaacctgatcgacgccggcgtggacgccctgagagtgggcatgggcagcggcagcatctgcatcacccaggaggtgctggcctgcggcagaccccaggccaccgccgtgtacaaggtgagcgagtacgccagaagattcggcgtgcccgtgatcgccgacggcggcatccagaacgtgggccacatcgccaaggccctggccctgggcgccagcaccgtgatgatgggcagcctgctggccgccaccaccgaggcccccggcgagtacttcttcagcgacggcatcagactgaagaagtacagaggcatgggcagcctggacgccatggacaagcacctgagcagccagaacagatacttcagcgaggccgacaagatcaaggtggcccagggcgtgagcggcgccgtgcaggacaagggcagcatccacaagttcgtgccctacctgatcgccggcatccagcacagctgccaggacatcggcgccaagagcctgacccaggtgagagccatgatgtacagcggcgagctgaagttcgagaagagaaccagcagcgcccaggtggagggcggcgtgcacagcctgcacagctacgagaagagactgttctag

SEQ ID NO: 85096 - DNA, 1074 bp, synthetic construct
  misc_feature 1..1074: note = Description of Artificial Sequence: Synthetic coding sequence
  source 1..1074: mol_type = other DNA
atggccgactacctgatcagcggcggcaccagctacgtgcccgacgacggcctgaccgcccagcagctgttcaactgcggcgacggcctgacctacaacgacttcctgatcctgcccggctacatcgacttcaccgccgaccaggtggacctgaccagcgccctgaccaagaagatcaccctgaagacccccctggtgagcagccccatggacaccgtgaccgaggccggcatggccatcgccatggccctgaccggcggcatcggcttcatccaccacaactgcacccccgagttccaggccaacgaggtgagaaaggtgaagaagtacgagcagggcttcatcaccgaccccgtggtgctgagccccaaggacagagtgagagacgtgttcgaggccaaggccagacacggcttctgcggcatccccatcaccgacaccggcagaatgggcagcagactggtgggcatcatcagcagcagagacatcgacttcctgaaggaggaggagcacgactgcttcctggaggagatcatgaccaagagagaggacctggtggtggcccccgccggcatcaccctgaaggaggccaacgagatcctgcagagaagcaagaagggcaagctgcccatcgtgaacgaggacgacgagctggtggccatcatcgccagaaccgacctgaagaagaacagagactaccccctggccagcaaggacgccaagaagcagctgctgtgcggcgccgccatcggcacccacgaggacgacaagtacagactggacctgctggcccaggccggcgtggacgtggtggtgctggacagcagccagggcaacagcatcttccagatcaacatgatcaagtacatcaaggacaagtaccccaacctgcaggtgatcggcggcaacgtggtgaccgccgcccaggccaagaacctgatcgacgccggcgtggacgccctgagagtgggcatgggcagcggcagcatctgcatcacccaggaggtgctggcctgcggcagaccccaggccaccgccgtgtgcacccagaagcagcacccccacttccagtag

SEQ ID NO: 85097 - DNA, 501 bp, synthetic construct
  misc_feature 1..501: note = Description of Artificial Sequence: Synthetic coding sequence
  source 1..501: mol_type = other DNA
atgctgagaggcgtgctgggcaagaccttcagactggtgggctacaccatccagtacggctgcatcgcccactgcgccttcgagtacgtgggcggcgtggtgatgtgcagcggccccagcatggagcccaccatccagaacagcgacatcgtgttcgccgagaacctgagcagacacttctacggcatccagagaggcgacatcgtgatcgccaagagccccagcgaccccaagagcaacatctgcaagagagtgatcggcctggagggcgacaagatcctgaccaccagccccagcgacttcttcaagagccacagctacgtgcccatgggccacgtgtggctggagggcgacaacctgcagaacagcaccgacagcagatgctacggccccatcccctacggcctgatcagaggcagaatcttcttcaagatctggcccctgagcgacttcggcttcctgagagccagccccaacggccacagattcagcgacgactag

SEQ ID NO: 85098 - DNA, 324 bp, synthetic construct
  misc_feature 1..324: note = Description of Artificial Sequence: Synthetic coding sequence
  source 1..324: mol_type = other DNA
atgctgagaggcgtgctgggcaagaccttcagactggtgggctacaccatccagtacggctgcatcgcccactgcgccttcgagtacgtgggcggcgtggtgatgtgcagcggccccagcatggagcccaccatccagaacagcgacatcgtgttcgccgagaacctgagcagacacttctacggcatccagagaggcgacatcgtgatcgccaagagccccagcgaccccaagagcaacatctgcaagagagtgatcggcctggagggcgacaagatcctgaccaccagccccagcgacttcttcaagagccacagctactag

SEQ ID NO: 85099 - DNA, 291 bp, synthetic construct
  misc_feature 1..291: note = Description of Artificial Sequence: Synthetic coding sequence
  source 1..291: mol_type = other DNA
atgctgagaggcgtgctgggcaagaccttcagactggtgggctacaccatccagtacggctgcatcgcccactgcgccttcgagtacgtgggcggcgtggtgatgtgcagcggccccagcatggagcccaccatccagaacagcgacatcgtgttcgccgagaacctgagcagacacttctacggcatccagagaggcgacatcgtgatcgccaagagccccagcgaccccaagagcaacatctgcaagagagtgatcggcctggagggcgacaagatcctgaccacctag

SEQ ID NO: 85100 - DNA, 501 bp, synthetic construct; identical to SEQ ID NO: 85097
  misc_feature 1..501: note = Description of Artificial Sequence: Synthetic coding sequence
  source 1..501: mol_type = other DNA

SEQ ID NO: 85101 - DNA, 528 bp, synthetic construct
  misc_feature 1..528: note = Description of Artificial Sequence: Synthetic coding sequence
  source 1..528: mol_type = other DNA
atggcccagagccagggctgggtgaagagatacatcaaggccttctgcaagggcttcttcgtggccgtgcccgtggccgtgaccttcctggacagagtggcctgcgtggccagagtggagggcgccagcatgcagcccagcctgaaccccggcggcagccagagcagcgacgtggtgctgctgaaccactggaaggtgagaaacttcgaggtgcacagaggcgacatcgtgagcctggtgagccccaagaaccccgagcagaagatcatcaagagagtgatcgccctggagggcgacatcgtgagaaccatcggccacaagaacagatacgtgaaggtgcccagaggccacatctgggtggagggcgaccaccacggccacagcttcgacagcaacagcttcggccccgtgagcctgggcctgctgcacgcccacgccacccacatcctgtggccccccgagagatggcagaagctggagagcgtgctgccccccgagagactgcccgtgcagagagaggaggagtag

SEQ ID NO: 85102 - DNA, 528 bp, synthetic construct; identical to SEQ ID NO: 85101
  misc_feature 1..528: note = Description of Artificial Sequence: Synthetic coding sequence
  source 1..528: mol_type = other DNA

SEQ ID NO: 85103 - DNA, 528 bp, synthetic construct; identical to SEQ ID NO: 85101
  misc_feature 1..528: note = Description of Artificial Sequence: Synthetic coding sequence
  source 1..528: mol_type = other DNA

SEQ ID NO: 85104 - DNA, 333 bp, synthetic construct
  misc_feature 1..333: note = Description of Artificial Sequence: Synthetic coding sequence
  source 1..333: mol_type = other DNA
atggcccagagccagggctgggtgaagagatacatcaaggccttctgcaagggcttcttcgtggccgtgcccgtggccgtgaccttcctggacagagtggcctgcgtggccagagtggagggcgccagcatgcagcccagcctgaaccccggcggcagccagagcagcgacgtggtgctgctgaaccactggaaggtgagaaacttcgaggtgcacagaggcgacatcgtgagcctggtgagccccaagaaccccgagcagaagatcatcaagagagtgatcgccctggagggcgacatcgtgagagacggcagaaagctgaagagaatctag

SEQ ID NO: 85105 - DNA, 240 bp, synthetic construct
  misc_feature 1..240: note = Description of Artificial Sequence: Synthetic coding sequence
  source 1..240: mol_type = other DNA
atggcccagagccagggctgggtgaagagatacatcaaggccttctgcaagggcttcttcgtggccgtgcccgtggccgtgaccttcctggacagagtggcctgcgtggccagagtggagggcgccagcatgcagcccagcctgaaccccggcggcagccagagcagcgacgtggtgctgctgaaccactggaaggtgagaaacttcgaggtgcacagaggcgacatcgtgagcctgtag

SEQ ID NO: 85106 - DNA, 528 bp, synthetic construct; identical to SEQ ID NO: 85101
  misc_feature 1..528: note = Description of Artificial Sequence: Synthetic coding sequence
  source 1..528: mol_type = other DNA

SEQ ID NO: 85107 - DNA, 555 bp, synthetic construct
  misc_feature 1..555: note = Description of Artificial Sequence: Synthetic coding sequence
  source 1..555: mol_type = other DNA
atggtgagaaagctgaagttccacgagcagaagctgctgaagcaggtggacttcctgaactgggaggtgaccgaccacaacctgcacgagctgagagtgctgagaagatacagactgcagagaagagaggactacaccagatacaaccagctgagcagagccgtgagagagctggccagaagactgagagacctgcccgagagagaccagttcagagtgagagccagcgccgccctgctggacaagctgtacgccctgggcctggtgcccaccagaggcagcctggagctgtgcgacttcgtgaccgccagcagcttctgcagaagaagactgcccaccgtgctgctgaagctgagaatggcccagcacctgcaggccgccgtggccttcgtggagcagggccacgtgagagtgggccccgacgtggtgaccgaccccgccttcctggtgaccagaagcatggaggacttcgtgacctgggtggacagcagcaagatcaagagacacgtgctggagtacaacgaggagagagacgacttcgacctggaggcctag

SEQ ID NO: 85108 - DNA, 555 bp, synthetic construct; identical to SEQ ID NO: 85107
  misc_feature 1..555: note = Description of Artificial Sequence: Synthetic coding sequence
  source 1..555: mol_type = other DNA

SEQ ID NO: 85109 - DNA, 96 bp, synthetic construct
  misc_feature 1..96: note = Description of Artificial Sequence: Synthetic coding sequence
  source 1..96: mol_type = other DNA
atggaggacttcgtgacctgggtggacagcagcaagatcaagagacacgtgctggagtacaacgaggagagagacgacttcgacctggaggcctag

SEQ ID NO: 85110 - DNA, 876 bp, synthetic construct
  misc_feature 1..876: note = Description of Artificial Sequence: Synthetic coding sequence
  source 1..876: mol_type = other DNA
atgctgagaagagaggccagactgagaagagagtacctgtacagaaaggccagagaggaggcccagagaagcgcccaggagagaaaggagagactgagaagagccctggaggagaacagactgatccccaccgagctgagaagagaggccctggccctgcagggcagcctggagttcgacgacgccggcggcgagggcgtgaccagccacgtggacgacgagtacagatgggccggcgtggaggaccccaaggtgatgatcaccaccagcagagaccccagcagcagactgaagatgttcgccaaggagctgaagctggtgttccccggcgcccagagaatgaacagaggcagacacgaggtgggcgccctggtgagagcctgcaaggccaacggcgtgaccgacctgctggtggtgcacgagcacagaggcacccccgtgggcctgatcgtgagccacctgcccttcggccccaccgcctacttcaccctgtgcaacgtggtgatgagacacgacatccccgacctgggcaccatgagcgaggccaagccccacctgatcacccacggcttcagcagcagactgggcaagagagtgagcgacatcctgagatacctgttccccgtgcccaaggacgacagccacagagtgatcaccttcgccaaccaggacgactacatcagcttcagacaccacgtgtacaagaagaccgaccacagaaacgtggagctgaccgaggtgggccccagattcgagctgaagctgtacatgatcagactgggcaccctggagcaggaggccaccgccgacgtggagtggagatggcacccctacaccaacaccgccagaaagagagtgttcctgagcaccgagtag

SEQ ID NO: 85111 - DNA, 2928 bp, synthetic construct
  misc_feature 1..2928: note = Description of Artificial Sequence: Synthetic coding sequence
  source 1..2928: mol_type = other DNA
atggacctgaacagcgccagcaccgtggtgctgcaggtgctgacccaggccaccagccaggacaccgccgtgctgaagcccgccgaggagcagctgaagcagtgggagacccagcccggcttctacagcgtgctgctgaacatcttcaccaaccacaccctggacatcaacgtgagatggctggccgtgctgtacttcaagcacggcatcgacagatactggagaagagtggccccccacgccctgagcgaggaggagaagaccaccctgagagccggcctgatcaccaacttcaacgagcccatcaaccagatcgccacccagatcgccgtgctgatcgccaaggtggccagactggactgccccagacagtggcccgagctgatccccaccctgatcgagagcgtgaaggtgcaggacgacctgagacagcacagagccctgctgaccttctaccacgtgaccaagaccctggccagcaagagactggccgccgacagaaagctgttctacgacctggccagcggcatctacaacttcgcctgcagcctgtggaaccaccacaccgacaccttcctgcaggaggtgagcagcggcaacgaggccgccatcctgagcagcctggagagaaccctgctgagcctgaaggtgctgagaaagctgaccgtgaacggcttcgtggagccccacaagaacatggaggtgatgggcttcctgcacggcatcttcgagagactgaagcagttcctggagtgcagcagaagcatcggcaccgacaacgtgtgcagagacagactggagaagaccatcatcctgttcaccaaggtgctgctggacttcctggaccagcaccccttcagcttcacccccctgatccagagaagcctggagttcagcgtgagctacgtgttcaccgaggtgggcgagggcgtgaccttcgagagattcatcgtgcagtgcatgaacctgatcaagatgatcgtgaagaactacgcctacaagcccagcaagaacttcgaggacagcagccccgagaccctggaggcccacaagatcaagatggccttcttcacctaccccaccctgaccgagatctgcagaagactggtgagccactacttcctgctgaccgaggaggagctgaccatgtgggaggaggaccccgagggcttcaccgtggaggagaccggcggcgacagctggaagtacagcctgagaccctgcaccgaggtgctgttcatcgacatcttccacgagtacaaccagaccctgacccccgtgctgctggagatgatgcagaccctgcagggccccaccaacgtggaggacatgaacgccctgctgatcaaggacgccgtgtacaacgccgtgggcctggccgcctacgagctgttcgacagcgtggacttcgaccagtggttcaagaaccagctgctgcccgagctgcaggtgatccacaacagatacaagcccctgagaagaagagtgatctggctgatcggccagtggatcagcgtgaagttcaagagcgacctgagacccatgctgtacgaggccatctgcaacctgctgcaggaccaggacctggtggtgagaatcgagaccgccaccaccctgaagctgaccgtggacgacttcgagttcagaaccgaccagttcctgccctacctggagaccatgttcaccctgctgttccagctgctgcagcaggtgaccgagtgcgacaccaagatgcacgtgctgcacgtgctgagctgcgtgatcgagagagtgaacatgcagatcagaccctacgtgggctgcctggtgcagtacctgcccctgctgtggaagcagagcgaggagcacaacatgctgagatgcgccatcctgaccaccctgatccacctggtgcagggcctgggcgccgacagcaagaacctgtaccccttcctgctgcccgtgatccagctgagcaccgacgtgagccagcccccccacgtgtacctgctggaggacggcctggagctgtggctggtgaccctggagaacagcccctgcatcacccccgagctgctgagaatcttccagaacatgagccccctgctggagctgagcagcgagaacctgagaacctgcttcaagatcatcaacggctacatcttcctgagcagcaccgagttcctgcagacctacgccgtgggcctgtgccagagcttctgcgagctgctgaaggagatcaccaccgagggccaggtgcaggtgctgaaggtggtggagaacgccctgaaggtgaaccccatcctgggcccccagatgttccagcccatcctgccctacgtgttcaagggcatcatcgagggcgagagataccccgtggtgatgagcacctacctgggcgtgatgggcagagtgctgctgcagaacaccagcttcttcagcagcctgctgaacgagatggcccacaagttcaaccaggagatggaccagctgctgggcaacatgatcgagatgtgggtggacagaatggacaacatcacccagcccgagagaagaaagctgagcgccctggccctgctgagcctgctgcccagcgacaacagcgtgatccaggacaagttctgcggcatcatcaacatcagcgtggagggcctgcacgacgtgatgaccgaggaccccgagaccggcacctacaaggactgcatgctgatgagccacctggaggagcccaaggtgaccgaggacgaggagccccccaccgagcaggacaagagaaagaagatgctggccctgaaggaccccgtgcacaccgtgagcctgcagcagttcatctacgagaagctgaaggcccagcaggagatgctgggcgagcagggcttccagagcctgatggagaccgtggacaccgagatcgtgacccagctgcaggagttcctgcagggcttctag

SEQ ID NO: 85112 - DNA, 3048 bp, synthetic construct
  misc_feature 1..3048: note = Description of Artificial Sequence: Synthetic coding sequence
  source 1..3048: mol_type = other DNA
atggtgcagcccatcatccacctgggctacgtggtgtacagcctgctgtacctgggctacaagcccgtgcagcacgtgaccgccctgaacaccgtgagcagctgccacaagatggtgagcatggacctgaacagcgccagcaccgtggtgctgcaggtgctgacccaggccaccagccaggacaccgccgtgctgaagcccgccgaggagcagctgaagcagtgggagacccagcccggcttctacagcgtgctgctgaacatcttcaccaaccacaccctggacatcaacgtgagatggctggccgtgctgtacttcaagcacggcatcgacagatactggagaagagtggccccccacgccctgagcgaggaggagaagaccaccctgagagccggcctgatcaccaacttcaacgagcccatcaaccagatcgccacccagatcgccgtgctgatcgccaaggtggccagactggactgccccagacagtggcccgagctgatccccaccctgatcgagagcgtgaaggtgcaggacgacctgagacagcacagagccctgctgaccttctaccacgtgaccaagaccctggccagcaagagactggccgccgacagaaagctgttctacgacctggccagcggcatctacaacttcgcctgcagcctgtggaaccaccacaccgacaccttcctgcaggaggtgagcagcggcaacgaggccgccatcctgagcagcctggagagaaccctgctgagcctgaaggtgctgagaaagctgaccgtgaacggcttcgtggagccccacaagaacatggaggtgatgggcttcctgcacggcatcttcgagagactgaagcagttcctggagtgcagcagaagcatcggcaccgacaacgtgtgcagagacagactggagaagaccatcatcctgttcaccaaggtgctgctggacttcctggaccagcaccccttcagcttcacccccctgatccagagaagcctggagttcagcgtgagctacgtgttcaccgaggtgggcgagggcgtgaccttcgagagattcatcgtgcagtgcatgaacctgatcaagatgatcgtgaagaactacgcctacaagcccagcaagaacttcgaggacagcagccccgagaccctggaggcccacaagatcaagatggccttcttcacctaccccaccctgaccgagatctgcagaagactggtgagccactacttcctgctgaccgaggaggagctgaccatgtgggaggaggaccccgagggcttcaccgtggaggagaccggcggcgacagctggaagtacagcctgagaccctgcaccgaggtgctgttcatcgacatcttccacgagtacaaccagaccctgacccccgtgctgctggagatgatgcagaccctgcagggccccaccaacgtggaggacatgaacgccctgctgatcaaggacgccgtgtacaacgccgtgggcctggccgcctacgagctgttcgacagcgtggacttcgaccagtggttcaagaaccagctgctgcccgagctgcaggtgatccacaacagatacaagcccctgagaagaagagtgatctggctgatcggccagtggatcagcgtgaagttcaagagcgacctgagacccatgctgtacgaggccatctgcaacctgctgcaggaccaggacctggtggtgagaatcgagaccgccaccaccctgaagctgaccgtggacgacttcgagttcagaaccgaccagttcctgccctacctggagaccatgttcaccctgctgttccagctgctgcagcaggtgaccgagtgcgacaccaagatgcacgtgctgcacgtgctgagctgcgtgatcgagagagtgaacatgcagatcagaccctacgtgggctgcctggtgcagtacctgcccctgctgtggaagcagagcgaggagcacaacatgctgagatgcgccatcctgaccaccctgatccacctggtgcagggcctgggcgccgacagcaagaacctgtaccccttcctgctgcccgtgatccagctgagcaccgacgtgagccagcccccccacgtgtacctgctggaggacggcctggagctgtggctggtgaccctggagaacagcccctgcatcacccccgagctgctgagaatcttccagaacatgagccccctgctggagctgagcagcgagaacctgagaacctgcttcaagatcatcaacggctacatcttcctgagcagcaccgagttcctgcagacctacgccgtgggcctgtgccagagcttctgcgagctgctgaaggagatcaccaccgagggccaggtgcaggtgctgaaggtggtggagaacgccctgaaggtgaaccccatcctgggcccccagatgttccagcccatcctgccctacgtgttcaagggcatcatcgagggcgagagataccccgtggtgatgagcacctacctgggcgtgatgggcagagtgctgctgcagaacaccagcttcttcagcagcctgctgaacgagatggcccacaagttcaaccaggagatggaccagctgctgggcaacatgatcgagatgtgggtggacagaatggacaacatcacccagcccgagagaagaaagctgagcgccctggccctgctgagcctgctgcccagcgacaacagcgtgatccaggacaagttctgcggcatcatcaacatcagcgtggagggcctgcacgacgtgatgaccgaggaccccgagaccggcacctacaaggactgcatgctgatgagccacctggaggagcccaaggtgaccgaggacgaggagccccccaccgagcaggacaagagaaagaagatgctggccctgaaggaccccgtgcacaccgtgagcctgcagcagttcatctacgagaagctgaaggcccagcaggagatgctgggcgagcagggcttccagagcctgatggagaccgtggacaccgagatcgtgacccagctgcaggagttcctgcagggcttctag

SEQ ID NO: 85113 - DNA, 195 bp, synthetic construct
  misc_feature 1..195: note = Description of Artificial Sequence: Synthetic coding sequence
  source 1..195: mol_type = other DNA
atggacctgaacagcgccagcaccgtggtgctgcaggtgctgacccaggccaccagccaggacaccgccgtgctgaagcccgccgaggagcagctgaagcagtgggagacccagcccggcttctacagcgtgctgctgaacatcttcaccaaccacaccctggacatcaacgtgagatggctggccgtgctgtag

SEQ ID NO: 85114 - DNA, 489 bp, synthetic construct
  misc_feature 1..489: note = Description of Artificial Sequence: Synthetic coding sequence
  source 1..489: mol_type = other DNA
atggacctgaacagcgccagcaccgtggtgctgcaggtgctgacccaggccaccagccaggacaccgccgtgctgaagcccgccgaggagcagctgaagcagtgggagacccagcccggcttctacagcgtgctgctgaacatcttcaccaaccacaccctggacatcaacgtgagatggctggccgtgctgtacttcaagcacggcatcgacagatactggagaagagtggccccccacgccctgagcgaggaggagaagaccaccctgagagccggcctgatcaccaacttcaacgagcccatcaaccagatcgccacccagatcgccgtgctgatcgccaaggtggccagactggactgccccagacagtggcccgagctgatccccaccctgatcgagagcgtgaaggtgcaggacgacctgagacagcacagagccctgctgaccttctaccacgtgaccaagaccctggccagcaagagatag

SEQ ID NO: 85115 - DNA, 450 bp, synthetic construct
  misc_feature 1..450: note = Description of Artificial Sequence: Synthetic coding sequence
  source 1..450: mol_type = other DNA
atggacctgaacagcgccagcaccgtggtgctgcaggtgctgacccaggccaccagccaggacaccgccgtgctgaagcccgccgaggagcagctgaagcagtgggagacccagcccggcttctacagcgtgctgctgaacatcttcaccaaccacaccctggacatcaacgtgagatggctggccgtgctgtacttcaagcacggcatcgacagatactggagaagagtggccccccacgccctgagcgaggaggagaagaccaccctgagagccggcctgatcaccaacttcaacgagcccatcaaccagatcgccacccagatcgccgtgctgatcgccaaggtggccagactggactgccccagacagtggcccgagctgatccccaccctgatcgagagcgtgaaggtgcaggacgacctgagacagcacagagccctgctgtag

SEQ ID NO: 85116 - DNA, 1425 bp, synthetic construct
  misc_feature 1..1425: note = Description of Artificial Sequence: Synthetic coding sequence
  source 1..1425: mol_type = other DNA
atgatgcagaccctgcagggccccaccaacgtggaggacatgaacgccctgctgatcaaggacgccgtgtacaacgccgtgggcctggccgcctacgagctgttcgacagcgtggacttcgaccagtggttcaagaaccagctgctgcccgagctgcaggtgatccacaacagatacaagcccctgagaagaagagtgatctggctgatcggccagtggatcagcgtgaagttcaagagcgacctgagacccatgctgtacgaggccatctgcaacctgctgcaggaccaggacctggtggtgagaatcgagaccgccaccaccctgaagctgaccgtggacgacttcgagttcagaaccgaccagttcctgccctacctggagaccatgttcaccctgctgttccagctgctgcagcaggtgaccgagtgcgacaccaagatgcacgtgctgcacgtgctgagctgcgtgatcgagagagtgaacatgcagatcagaccctacgtgggctgcctggtgcagtacctgcccctgctgtggaagcagagcgaggagcacaacatgctgagatgcgccatcctgaccaccctgatccacctggtgcagggcctgggcgccgacagcaagaacctgtaccccttcctgctgcccgtgatccagctgagcaccgacgtgagccagcccccccacgtgtacctgctggaggacggcctggagctgtggctggtgaccctggagaacagcccctgcatcacccccgagctgctgagaatcttccagaacatgagccccctgctggagctgagcagcgagaacctgagaacctgcttcaagatcatcaacggctacatcttcctgagcagcaccgagttcctgcagacctacgccgtgggcctgtgccagagcttctgcgagctgctgaaggagatcaccaccgagggccaggtgcaggtgctgaaggtggtggagaacgccctgaaggtgaaccccatcctgggcccccagatgttccagcccatcctgccctacgtgttcaagggcatcatcgagggcgagagataccccgtggtgatgagcacctacctgggcgtgatgggcagagtgctgctgcagaacaccagcttcttcagcagcctgctgaacgagatggcccacaagttcaaccaggagatggaccagctgctgggcaacatgatcgagatgtgggtggacagaatggacaacatcacccagcccgagagaagaaagctgagcgccctggccctgctgagcctgctgcccagcgacaacagcgtgatccaggacaagttctgcggcatcatcaacatcagcgtggagggcctgcacgacgtgatgaccgaggaccccgagaccggcacctacaaggactgcatgctgatgagccacctggaggagcccaagtag

SEQ ID NO: 85117 - DNA, 3117 bp, synthetic construct
  misc_feature 1..3117: note = Description of Artificial Sequence: Synthetic coding sequence
  source 1..3117: mol_type = other DNA
atggaccccaacaccatcatcgaggccctgagaggcaccatggaccccgccctgagagaggccgccgagagacagctgaacgaggcccacaagagcctgaacttcgtgagcaccctgctgcagatcaccatgagcgagcagctggacctgcccgtgagacaggccggcgtgatctacctgaagaacatgatcacccagtactggcccgacagagagaccgcccccggcgacatcagcccctacaccatccccgaggaggacagacactgcatcagagagaacatcgtggaggccatcatccacagccccgagctgatcagagtgcagctgaccacctgcatccaccacatcatcaagcacgactaccccagcagatggaccgccatcgtggacaagatcggcttctacctgcagagcgacaacagcgcctgctggctgggcatcctgctgtgcctgtaccagctggtgaagaactacgagtacaagaagcccgaggagagaagccccctggtggccgccatgcagcacttcctgcccgtgctgaaggacagattcatccagctgctgagcgaccagagcgaccagagcgtgctgatccagaagcagatcttcaagatcttctacgccctggtgcagtacaccctgcccctggagctgatcaaccagcagaacctgaccgagtggatcgagatcctgaagaccgtggtgaacagagacgtgcccaacgagaccctgcaggtggaggaggacgacagacccgagctgccctggtggaagtgcaagaagtgggccctgcacatcctggccagactgttcgagagatacggcagccccggcaacgtgagcaaggagtacaacgagttcgccgaggtgttcctgaaggccttcgccgtgggcgtgcagcaggtgctgctgaaggtgctgtaccagtacaaggagaagcagtacatggcccccagagtgctgcagcagaccctgaactacatcaaccagggcgtgagccacgccctgacctggaagaacctgaagccccacatccagggcatcatccaggacgtgatcttccccctgatgtgctacaccgacgccgacgaggagctgtggcaggaggacccctacgagtacatcagaatgaagttcgacgtgttcgaggacttcatcagccccaccaccgccgcccagaccctgctgttcaccgcctgcagcaagagaaaggaggtgctgcagaagaccatgggcttctgctaccagatcctgaccgagcccaacgccgaccccagaaagaaggacggcgccctgcacatgatcggcagcctggccgagatcctgctgaagaagaagatctacaaggaccagatggagtacatgctgcagaaccacgtgttccccctgttcagcagcgagctgggctacatgagagccagagcctgctgggtgctgcactacttctgcgaggtgaagttcaagagcgaccagaacctgcagaccgccctggagctgaccagaagatgcctgatcgacgacagagagatgcccgtgaaggtggaggccgccatcgccctgcaggtgctgatcagcaaccaggagaaggccaaggagtacatcacccccttcatcagacccgtgatgcaggccctgctgcacatcatcagagagaccgagaacgacgacctgaccaacgtgatccagaagatgatctgcgagtacagcgaggaggtgacccccatcgccgtggagatgacccagcacctggccatgaccttcaaccaggtgatccagaccggccccgacgaggagggcagcgacgacaaggccgtgaccgccatgggcatcctgaacaccatcgacaccctgctgagcgtggtggaggaccacaaggagatcacccagcagctggagggcatctgcctgcaggtgatcggcaccgtgctgcagcagcacgtgctggagttctacgaggagatcttcagcctggcccacagcctgacctgccagcaggtgagcccccagatgtggcagctgctgcccctggtgttcgaggtgttccagcaggacggcttcgactacttcaccgacatgatgcccctgctgcacaactacgtgaccgtggacaccgacaccctgctgagcgacaccaagtacctggagatgatctacagcatgtgcaagaaggtgctgaccggcgtggccggcgaggacgccgagtgccacgccgccaagctgctggaggtgatcatcctgcagtgcaagggcagaggcatcgaccagtgcatccccctgttcgtggaggccgccctggagagactgaccagagaggtgaagaccagcgagctgagaaccatgtgcctgcaggtggccatcgccgccctgtactacaacccccacctgctgctgaacaccctggagaacctgagattccccaacaacgtggagcccgtgaccaaccacttcatcacccagtggctgaacgacgtggactgcttcctgggcctgcacgacagaaagatgtgcgtgctgggcctgtgcgccctgatcgacatggagcagatcccccaggtgctgaaccaggtgagcggccagatcctgcccgccttcatcctgctgttcaacggcctgaagagagcctacgcctgccacgccgagcacgagaacgacagcgacgacgacgacgaggccgaggacgacgacgagaccgaggagctgggcagcgacgaggacgacatcgacgaggacggccaggagtacctggagatcctggccaagcaggccggcgaggacggcgacgacgaggactgggaggaggacgacgccgaggagaccgccctggagggctacagcaccatcatcgacgacgaggacaaccccgtggacgagtaccagatcttcaaggccatcttccagaccatccagaacagaaaccccgtgtggtaccaggccctgacccacggcctgaacgaggagcagagaaagcagctgcaggacatcgccaccctggccgaccagagaagagccgcccacgagagcaagatgatcgagaagcacggcggctacaagttcagcgcccccgtggtgcccagcagcttcaacttcggcggccccgcccccggcatgaactag

SEQ ID NO: 85118 - DNA, 3114 bp, synthetic construct
  misc_feature 1..3114: note = Description of Artificial Sequence: Synthetic coding sequence
  source 1..3114: mol_type = other DNA
atggacctgaacagaatcatccaggccctgaagggcaccatcgaccccaagctgagaatcgccgccgagaacgagctgaaccagagctacaagatcatcaacttcgcccccagcctgctgagaatcatcgtgagcgaccacgtggagttccccgtgagacaggccgccgccatctacctgaagaacatggtgacccagtactggcccgacagagagcccccccccggcgaggccatcttccccttcaacatccacgagaacgacagacagcagatcagagacaacatcgtggagggcatcatcagaagccccgacctggtgagagtgcagctgaccatgtgcctgagagccatcatcaagcacgacttccccggccactggcccggcgtggtggacaagatcgactactacctgcagagccagagcagcgccagctggctgggcagcctgctgtgcctgtaccagctggtgaagacctacgagtacaagaaggccgaggagagagagcccctgatcatcgccatgcagatcttcctgcccagaatccagcagcagatcgtgcagctgctgcccgacagcagctactacagcgtgctgctgcagaagcagatcctgaagatcttctacgccctggtgcagtacgccctgcccctgcagctggtgaacaaccagaccatgaccacctggatggagatcttcagaaccatcatcgacagaaccgtgccccccgagaccctgcacatcgacgaggacgacagacccgagctggtgtggtggaagtgcaagaagtgggccctgcacatcgtggccagactgttcgagagatacggcagccccggcaacgtgaccaaggagtacttcgagttcagcgagttcttcctgaagacctacgccgtgggcatccagcaggtgctgctgaagatcctggaccagtacagacagaaggagtacgtggcccccagagtgctgcagcaggccttcaactacctgaaccagggcgtggtgcacagcatcacctggaagcagatgaagccccacatccagaacatcagcgaggacgtgatcttcagcgtgatgtgctacaaggacgaggacgaggagctgtggcaggaggacccctacgagtacatcagaatgaagttcgacatcttcgaggactacgccagccccaccaccgccgcccagaccctgctgtacaccgccgccaagaagagaaaggaggtgctgcccaagatgatggccttctgctaccagatcctgaccgaccccaacttcgaccccagaaagaaggacggcgccctgcacgtgatcggcagcctggccgagatcctgctgaagaagagcctgttcaaggaccagatggagctgttcctgcagaaccacgtgttccccctgctgctgagcaacctgggctacctgagagccagaagctgctgggtgctgcacgccttcagcagcctgaagttccacaacgagctgaacctgagaaacgccgtggagctggccaagaagagcctgatcgaggacaaggagatgcccgtgaaggtggaggccgccctggccctgcagagcctgatcagcaaccagatccaggccaaggagtacatgaagccccacgtgagacccatcatgcaggagctgctgcacatcgtgagagagaccgagaacgacgacgtgaccaacgtgatccagaagatgatctgcgagtacagccaggaggtggccagcatcgccgtggacatgacccagcacctggccgagatcttcggcaaggtgctgcagagcgacgagtacgaggaggtggaggacaagaccgtgatggccatgggcatcctgcacaccatcgacaccatcctgaccgtggtggaggaccacaaggagatcacccagcagctggagaacatctgcctgagaatcatcgacctggtgctgcagaagcacgtgatcgagttctacgaggagatcctgagcctggcctacagcctgacctgccacagcatcagcccccagatgtggcagctgctgggcatcctgtacgaggtgttccagcaggactgcttcgagtacttcaccgacatgatgcccctgctgcacaactacgtgaccatcgacaccgacaccctgctgagcaacgccaagcacctggagatcctgttcaccatgtgcagaaaggtgctgtgcggcgacgccggcgaggacgccgagtgccacgccgccaagctgctggaggtgatcatcctgcagtgcaagggcagaggcatcgaccagtgcatccccctgttcgtgcagctggtgctggagagactgaccagaggcgtgaagaccagcgagctgagaaccatgtgcctgcaggtggccatcgccgccctgtactacaaccccgacctgctgctgcacaccctggagagaatccagctgccccacaaccccggccccatcaccgtgcagttcatcaaccagtggatgaacgacaccgactgcttcctgggccaccacgacagaaagatgtgcatcatcggcctgagcatcctgctggagctgcagaacagaccccccgccgtggacgccgtggtgggccagatcgtgcccagcatcctgttcctgttcctgggcctgaagcaggtgtgcgccaccagacagctggtgaacagagaggacagaagcaaggccgagaaggccgacatggaggagaacgaggagatcagcagcgacgaggaggagaccaacgtgaccgcccaggccatgcagagcaacaacggcagaggcgaggacgaggaggaggaggacgacgactgggacgaggaggtgctggaggagaccgccctggagggcttcagcacccccctggacctggacaacagcgtggacgagtaccagttcttcacccaggccctgatcaccgtgcagagcagagacgccgcctggtaccagctgctgatggcccccctgagcgaggaccagagaaccgccctgcaggaggtgtacaccctggccgagcacagaagaaccgtggccgaggccaagaagaagatcgagcagcagggcggcttcaccttcgagaacaagggcgtgctgagcgccttcaacttcggcaccgtgcccagcaacaactag

SEQ ID NO: 85119 - DNA, 2499 bp, synthetic construct
  misc_feature 1..2499: note = Description of Artificial Sequence: Synthetic coding sequence
  source 1..2499: mol_type = other DNA
atggagagcctgaccctgaagggctacgccctgcccctgcagctggtgaacaaccagaccatgaccacctggatggagatcttcagaaccatcatcgacagaaccgtgccccccgagaccctgcacatcgacgaggacgacagacccgagctggtgtggtggaagtgcaagaagtgggccctgcacatcgtggccagactgttcgagagatacggcagccccggcaacgtgaccaaggagtacttcgagttcagcgagttcttcctgaagacctacgccgtgggcatccagcaggtgctgctgaagatcctggaccagtacagacagaaggagtacgtggcccccagagtgctgcagcaggccttcaactacctgaaccagggcgtggtgcacagcatcacctggaagcagatgaagccccacatccagaacatcagcgaggacgtgatcttcagcgtgatgtgctacaaggacgaggacgaggagctgtggcaggaggacccctacgagtacatcagaatgaagttcgacatcttcgaggactacgccagccccaccaccgccgcccagaccctgctgtacaccgccgccaagaagagaaaggaggtgctgcccaagatgatggccttctgctaccagatcctgaccgaccccaacttcgaccccagaaagaaggacggcgccctgcacgtgatcggcagcctggccgagatcctgctgaagaagagcctgttcaaggaccagatggagctgttcctgcagaaccacgtgttccccctgctgctgagcaacctgggctacctgagagccagaagctgctgggtgctgcacgccttcagcagcctgaagttccacaacgagctgaacctgagaaacgccgtggagctggccaagaagagcctgatcgaggacaaggagatgcccgtgaaggtggaggccgccctggccctgcagagcctgatcagcaaccagatccaggccaaggagtacatgaagccccacgtgagacccatcatgcaggagctgctgcacatcgtgagagagaccgagaacgacgacgtgaccaacgtgatccagaagatgatctgcgagtacagccaggaggtggccagcatcgccgtggacatgacccagcacctggccgagatcttcggcaaggtgctgcagagcgacgagtacgaggaggtggaggacaagaccgtgatggccatgggcatcctgcacaccatcgacaccatcctgaccgtggtggaggaccacaaggagatcacccagcagctggagaacatctgcctgagaatcatcgacctggtgctgcagaagcacgtgatcgagttctacgaggagatcctgagcctggcctacagcctgacctgccacagcatcagcccccagatgtggcagctgctgggcatcctgtacgaggtgttccagcaggactgcttcgagtacttcaccgacatgatgcccctgctgcacaactacgtgaccatcgacaccgacaccctgctgagcaacgccaagcacctggagatcctgttcaccatgtgcagaaaggtgctgtgcggcgacgccggcgaggacgccgagtgccacgccgccaagctgctggaggtgatcatcctgcagtgcaagggcagaggcatcgaccagtgcatccccctgttcgtgcagctggtgctggagagactgaccagaggcgtgaagaccagcgagctgagaaccatgtgcctgcaggtggccatcgccgccctgtactacaaccccgacctgctgctgcacaccctggagagaatccagctgccccacaaccccggccccatcaccgtgcagttcatcaaccagtggatgaacgacaccgactgcttcctgggccaccacgacagaaagatgtgcatcatcggcctgagcatcctgctggagctgcagaacagaccccccgccgtggacgccgtggtgggccagatcgtgcccagcatcctgttcctgttcctgggcctgaagcaggtgtgcgccaccagacagctggtgaacagagaggacagaagcaaggccgagaaggccgacatggaggagaacgaggagatcagcagcgacgaggaggagaccaacgtgaccgcccaggccatgcagagcaacaacggcagaggcgaggacgaggaggaggaggacgacgactgggacgaggaggtgctggaggagaccgccctggagggcttcagcacccccctggacctggacaacagcgtggacgagtaccagttcttcacccaggccctgatcaccgtgcagagcagagacgccgcctggtaccagctgctgatggcccccctgagcgaggaccagagaaccgccctgcaggaggtgtacaccctggccgagcacagaagaaccgtggccgaggccaagaagaagatcgagcagcagggcggcttcaccttcgagaacaagggcgtgctgagcgccttcaacttcggcaccgtgcccagcaacaactag

SEQ ID NO: 85120 - DNA, 1542 bp, synthetic construct
  misc_feature 1..1542: note = Description of Artificial Sequence: Synthetic coding sequence
  source 1..1542: mol_type = other DNA
ctgagcagcggccacgagctggccaaggagtacatgaagccccacgtgagacccatcatgcaggagctgctgcacatcgtgagagagaccgagaacgacgacgtgaccaacgtgatccagaagatgatctgcgagtacagccaggaggtggccagcatcgccgtggacatgacccagcacctggccgagatcttcggcaaggtgctgcagagcgacgagtacgaggaggtggaggacaagaccgtgatggccatgggcatcctgcacaccatcgacaccatcctgaccgtggtggaggaccacaaggagatcacccagcagctggagaacatctgcctgagaatcatcgacctggtgctgcagaagcacgtgatcgagttctacgaggagatcctgagcctggcctacagcctgacctgccacagcatcagcccccagatgtggcagctgctgggcatcctgtacgaggtgttccagcaggactgcttcgagtacttcaccgacatgatgcccctgctgcacaactacgtgaccatcgacaccgacaccctgctgagcaacgccaagcacctggagatcctgttcaccatgtgcagaaaggtgctgtgcggcgacgccggcgaggacgccgagtgccacgccgccaagctgctggaggtgatcatcctgcagtgcaagggcagaggcatcgaccagtgcatccccctgttcgtgcagctggtgctggagagactgaccagaggcgtgaagaccagcgagctgagaaccatgtgcctgcaggtggccatcgccgccctgtactacaaccccgacctgctgctgcacaccctggagagaatccagctgccccacaaccccggccccatcaccgtgcagttcatcaaccagtggatgaacgacaccgactgcttcctgggccaccacgacagaaagatgtgcatcatcggcctgagcatcctgctggagctgcagaacagaccccccgccgtggacgccgtggtgggccagatcgtgcccagcatcctgttcctgttcctgggcctgaagcaggtgtgcgccaccagacagctggtgaacagagaggacagaagcaaggccgagaaggccgacatggaggagaacgaggagatcagcagcgacgaggaggagaccaacgtgaccgcccaggccatgcagagcaacaacggcagaggcgaggacgaggaggaggaggacgacgactgggacgaggaggtgctggaggagaccgccctggagggcttcagcacccccctggacctggacaacagcgtggacgagtaccagttcttcacccaggccctgatcaccgtgcagagcagagacgccgcctggtaccagctgctgatggcccccctgagcgaggaccagagaaccgccctgcaggaggtgtacaccctggccgagcacagaagaaccgtggccgaggccaagaagaagatcgagcagcagggcggcttcaccttcgagaacaagggcgtgctgagcgccttcaacttcggcaccgtgcccagcaacaactag

SEQ ID NO: 85121 - DNA, 3546 bp, synthetic construct
  misc_feature 1..3546: note = Description of Artificial Sequence: Synthetic coding sequence
  source 1..3546: mol_type = other DNA
atgcccgagaaccccgccaccgacaagctgcaggtgctgcaggtgctggacagactgaagatgaagctgcaggagaagggcgacaccagccagaacgagaagctgagcatgttctacgagaccctgaagagccccctgttcaaccagatcctgaccctgcagcagagcatcaagcagctgaagggccagctgaaccacatccccagcgactgcagcgccaacttcgacttcagcagaaagggcctgctggtgttcaccgacggcagcatcaccaacggcaacgtgcacagacccagcaacaacagcaccgtgagcggcctgttcccctggacccccaagctgggcaacgaggacttcaacagcgtgatccagcagatggcccagggcagacagatcgagtacatcgacatcgagagacccagcaccggcggcctgggcttcagcgtggtggccctgagaagccagaacctgggcaaggtggacatcttcgtgaaggacgtgcagcccggcagcgtggccgacagagaccagagactgaaggagaacgaccagatcctggccatcaaccacacccccctggaccagaacatcagccaccagcaggccatcgccctgctgcagcagaccaccggcagcctgagactgatcgtggccagagagcccgtgcacaccaagagcagcaccagcagcagcctgaacgacaccaccctgcccgagaccgtgtgctggggccacgtggaggaggtggagctgatcaacgacggcagcggcctgggcttcggcatcgtgggcggcaagaccagcggcgtggtggtgagaaccatcgtgcccggcggcctggccgacagagacggcagactgcagaccggcgaccacatcctgaagatcggcggcaccaacgtgcagggcatgaccagcgagcaggtggcccaggtgctgagaaactgcggcaacagcgtgagaatgctggtggccagagaccccgccggcgacatcagcgtgaccccccccgcccccgccgccctgcccgtggccctgcccaccgtggccagcaagggccccggcagcgacagcagcctgttcgagacctacaacgtggagctggtgagaaaggacggccagagcctgggcatcagaatcgtgggctacgtgggcaccagccacaccggcgaggccagcggcatctacgtgaagagcatcatccccggcagcgccgcctaccacaacggccacatccaggtgaacgacaagatcgtggccgtggacggcgtgaacatccagggcttcgccaaccacgacgtggtggaggtgctgagaaacgccggccaggtggtgcacctgaccctggtgagaagaaagaccagcagcagcaccagccccctggagccccccagcgacagaggcaccgtggtggagcccctgaagccccccgccctgttcctgaccggcgccgtggagaccgagaccaacgtggacggcgaggacgaggagatcaaggagagaatcgacaccctgaagaacgacaacatccaggccctggagaagctggagaaggtgcccgacagccccgagaacgagctgaagagcagatgggagaacctgctgggccccgactacgaggtgatggtggccaccctggacacccagatcgccgacgacgccgagctgcagaagtacagcaagctgctgcccatccacaccctgagactgggcgtggaggtggacagcttcgacggccaccactacatcagcagcatcgtgagcggcggccccgtggacaccctgggcctgctgcagcccgaggacgagctgctggaggtgaacggcatgcagctgtacggcaagagcagaagagaggccgtgagcttcctgaaggaggtgcccccccccttcaccctggtgtgctgcagaagactgttcgacgacgaggccagcgtggacgagcccagaagaaccgagaccagcctgcccgagaccgaggtggaccacaacatggacgtgaacaccgaggaggacgacgacggcgagctggccctgtggagccccgaggtgaagatcgtggagctggtgaaggactgcaagggcctgggcttcagcatcctggactaccaggaccccctggaccccaccagaagcgtgatcgtgatcagaagcctggtggccgacggcgtggccgagagaagcggcggcctgctgcccggcgacagactggtgagcgtgaacgagtactgcctggacaacaccagcctggccgaggccgtggagatcctgaaggccgtgccccccggcctggtgcacctgggcatctgcaagcccctggtggaggacaacgaggaggagagctgctacatcctgcacagcagcagcaacgaggacaagaccgagttcagcggcaccatccacgacatcaacagcagcctgatcctggaggcccccaagggcttcagagacgagccctacttcaaggaggagctggtggacgagcccttcctggacctgggcaagagcttccacagccagcagaaggagatcgagcagagcaaggaggcctgggagatgcacgagttcctgacccccagactgcaggagatggacgaggagagagagatcctggtggacgaggagtacgagctgtaccaggaccccagccccagcatggagctgtaccccctgagccacatccaggaggccacccccgtgcccagcgtgaacgagctgcacttcggcacccagtggctgcacgacaacgagcccagcgagagccaggaggccagaaccggcagaaccgtgtacagccaggaggcccagccctacggctactgccccgagaacgtgatgaaggagaacttcgtgatggagagcctgcccagcgtgcccagcaccgagggcaacagccagcagggcagattcgacgacctggagaacctgaacagcctggccaagaccagcctggacctgggcatgatccccaacgacgtgcagggccccagcctgctgatcgacctgcccgtggtggcccagagaagagagcaggaggacctgcccctgtaccagcaccaggccaccagagtgatcagcaaggccagcgcctacaccggcatgctgagcagcagatacgccaccgacacctgcgagctgcccgagagagaggagggcgagggcgaggagacccccaacttcagccactggggcccccccagaatcgtggagatcttcagagagcccaacgtgagcctgggcatcagcatcgtgggcggccagaccgtgatcaagagactgaagaacggcgaggagctgaagggcatcttcatcaagcaggtgctggaggacagccccgccggcaagaccaacgccctgaagaccggcgacaagatcctggaggtgagcggcgtggacctgcagaacgccagccacagcgaggccgtggaggccatcaagaacgccggcaaccccgtggtgttcatcgtgcagagcctgagcagcacccccgcctgggtgaccgagcaggacagcgtgagcaagaagaagaagaaccacgagggctag

SEQ ID NO: 85122 - DNA, 600 bp, synthetic construct
  misc_feature 1..600: note = Description of Artificial Sequence: Synthetic coding sequence
  source 1..600: mol_type = other DNA
atggtgcagggcggcttccccgagaagatcagacagagatacgccgacctgcccggcgagctgcacatcatcgagctggagaaggacaagaacggcctgggcctgagcctggccggcaacaaggacagaagcagaatgagcatcttcgtggtgggcatcaaccccgagggccccgccgccgccgacggcagaatgagaatcggcgacgagctgctggagatcaacaaccagatcctgtacggcagaagccaccagaacgccagcgccatcatcaagaccgcccccagcaaggtgaagctggtgttcatcagaaacgaggacgccgtgaaccagatggccgtgacccccttccccgtgcccagcagcagccccagcagcatcgaggaccagagcggcaccgagcccatcagcagcgaggaggacggcagcgtggaggtgggcatcaagcagctgcccgagagcgagagcttcaagctggccgtgagccagatgaagcagcagaagtaccccaccaaggtgagcttcagcagccaggagatccccctggcccccgccagcagctaccacagcaccgacgccgacttcaccggctacggctag

SEQ ID NO: 85123 - DNA, 4746 bp, synthetic construct
  misc_feature 1..4746: note = Description of Artificial Sequence: Synthetic coding sequence
  source 1..4746: mol_type = other DNA
atgcccgagaaccccgccaccgacaagctgcaggtgctgcaggtgctggacagactgaagatgaagctgcaggagaagggcgacaccagccagaacgagaagctgagcatgttctacgagaccctgaagagccccctgttcaaccagatcctgaccctgcagcagagcatcaagcagctgaagggccagctgaaccacatccccagcgactgcagcgccaacttcgacttcagcagaaagggcctgctggtgttcaccgacggcagcatcaccaacggcaacgtgcacagacccagcaacaacagcaccgtgagcggcctgttcccctggacccccaagctgggcaacgaggacttcaacagcgtgatccagcagatggcccagggcagacagatcgagtacatcgacatcgagagacccagcaccggcggcctgggcttcagcgtggtggccctgagaagccagaacctgggcaaggtggacatcttcgtgaaggacgtgcagcccggcagcgtggccgacagagaccagagactgaaggagaacgaccagatcctggccatcaaccacacccccctggaccagaacatcagccaccagcaggccatcgccctgctgcagcagaccaccggcagcctgagactgatcgtggccagagagcccgtgcacaccaagagcagcaccagcagcagcctgaacgacaccaccctgcccgagaccgtgtgctggggccacgtggaggaggtggagctgatcaacgacggcagcggcctgggcttcggcatcgtgggcggcaagaccagcggcgtggtggtgagaaccatcgtgcccggcggcctggccgacagagacggcagactgcagaccggcgaccacatcctgaagatcggcggcaccaacgtgcagggcatgaccagcgagcaggtggcccaggtgctgagaaactgcggcaacagcgtgagaatgctggtggccagagaccccgccggcgacatcagcgtgaccccccccgcccccgccgccctgcccgtggccctgcccaccgtggccagcaagggccccggcagcgacagcagcctgttcgagacctacaacgtggagctggtgagaaaggacggccagagcctgggcatcagaatcgtgggctacgtgggcaccagccacaccggcgaggccagcggcatctacgtgaagagcatcatccccggcagcgccgcctaccacaacggccacatccaggtgaacgacaagatcgtggccgtggacggcgtgaacatccagggcttcgccaaccacgacgtggtggaggtgctgagaaacgccggccaggtggtgcacctgaccctggtgagaagaaagaccagcagcagcaccagccccctggagccccccagcgacagaggcaccgtggtggagcccctgaagccccccgccctgttcctgaccggcgccgtggagaccgagaccaacgtggacggcgaggacgaggagatcaaggagagaatcgacaccctgaagaacgacaacatccaggccctggagaagctggagaaggtgcccgacagccccgagaacgagctgaagagcagatgggagaacctgctgggccccgactacgaggtgatggtggccaccctggacacccagatcgccgacgacgccgagctgcagaagtacagcaagctgctgcccatccacaccctgagactgggcgtggaggtggacagcttcgacggccaccactacatcagcagcatcgtgagcggcggccccgtggacaccctgggcctgctgcagcccgaggacgagctgctggaggtgaacggcatgcagctgtacggcaagagcagaagagaggccgtgagcttcctgaaggaggtgcccccccccttcaccctggtgtgctgcagaagactgttcgacgacgaggccagcgtggacgagcccagaagaaccgagaccagcctgcccgagaccgaggtggaccacaacatggacgtgaacaccgaggaggacgacgacggcgagctggccctgtggagccccgaggtgaagatcgtggagctggtgaaggactgcaagggcctgggcttcagcatcctggactaccaggaccccctggaccccaccagaagcgtgatcgtgatcagaagcctggtggccgacggcgtggccgagagaagcggcggcctgctgcccggcgacagactggtgagcgtgaacgagtactgcctggacaacaccagcctggccgaggccgtggagatcctgaaggccgtgccccccggcctggtgcacctgggcatctgcaagcccctggtggaggacaacgaggaggagagctgctacatcctgcacagcagcagcaacgaggacaagaccgagttcagcggcaccatccacgacatcaacagcagcctgatcctggaggcccccaagggcttcagagacgagccctacttcaaggaggagctggtggacgagcccttcctggacctgggcaagagcttccacagccagcagaaggagatcgagcagagcaaggaggcctgggagatgcacgagttcctgacccccagactgcaggagatggacgaggagagagagatcctggtggacgaggagtacgagctgtaccaggaccccagccccagcatggagctgtaccccctgagccacatccaggaggccacccccgtgcccagcgtgaacgagctgcacttcggcacccagtggctgcacgacaacgagcccagcgagagccaggaggccagaaccggcagaaccgtgtacagccaggaggcccagccctacggctactgccccgagaacgtgatgaaggagaacttcgtgatggagagcctgcccagcgtgcccagcaccgagggcaacagccagcagggcagattcgacgacctggagaacctgaacagcctggccaagaccagcctggacctgggcatgatccccaacgacgtgcagggccccagcctgctgatcgacctgcccgtggtggcccagagaagagagcaggaggacctgcccctgtaccagcaccaggccaccagagtgatcagcaaggccagcgcctacaccggcatgctgagcagcagatacgccaccgacacctgcgagctgcccgagagagaggagggcgagggcgaggagacccccaacttcagccactggggcccccccagaatcgtggagatcttcagagagcccaacgtgagcctgggcatcagcatcgtgggcggccagaccgtgatcaagagactgaagaacggcgaggagctgaagggcatcttcatcaagcaggtgctggaggacagccccgccggcaagaccaacgccctgaagaccggcgacaagatcctggaggtgagcggcgtggacctgcagaacgccagccacagcgaggccgtggaggccatcaagaacgccggcaaccccgtggtgttcatcgtgcagagcctgagcagcacccccagagtgatccccaacgtgcacaacaaggccaacaagatcaccggcaaccagaaccaggacacccaggagaagaaggagaagagacagggcaccgcccccccccccatgaagctgccccccccctacaaggccctgaccgacgacagcgacgagaacgaggaggaggacgccttcaccgaccagaagatcagacagagatacgccgacctgcccggcgagctgcacatcatcgagctggagaaggacaagaacggcctgggcctgagcctggccggcaacaaggacagaagcagaatgagcatcttcgtggtgggcatcaaccccgagggccccgccgccgccgacggcagaatgagaatcggcgacgagctgctggagatcaacaaccagatcctgtacggcagaagccaccagaacgccagcgccatcatcaagaccgcccccagcaaggtgaagctggtgttcatcagaaacgaggacgccgtgaaccagatggccgtgacccccttccccgtgcccagcagcagccccagcagcatcgaggaccagagcggcaccgagcccatcagcagcgaggaggacggcagcgtggaggtgggcatcaagcagctgcccgagagcgagagcttcaagctggccgtgagccagatgaagcagcagaagtaccccaccaaggtgagcttcagcagccaggagatccccctggcccccgccagcagctaccacagcaccgacgccgacttcaccggctacggcggcttccaggcccccctgagcgtggaccccgccacctgccccatcgtgcccggccaggagatgatcatcgagatcagcaagggcagaagcggcctgggcctgagcatcgtgggcggcaaggacacccccctgttctggagactgggcagccccagagcctggagccagcacctggtgagagccttcatgctgcaccaccccgtgaccgaggtggagggccagaacgccatcgtgatccacgaggtgtacgaggagggcgccgccgccagagacggcagactgtgggccggcgaccagatcctggaggtgaacggcgtggacctgagaaacagcagccacgaggaggccatcaccgccctgagacagaccccccagaaggtgagactggtggtgtacagagacgaggcccactacagagacgaggagaacctggagatcttccccgtggacctgcagaagaaggccggcagaggcctgggcctgagcatcgtgggcaagtag

SEQ ID NO: 85124 - DNA, 5406 bp, synthetic construct
  misc_feature 1..5406: note = Description of Artificial Sequence: Synthetic coding sequence
  source 1..5406: mol_type = other DNA
atgcccgagaaccccgccaccgacaagctgcaggtgctgcaggtgctggacagactgaagatgaagctgcaggagaagggcgacaccagccagaacgagaagctgagcatgttctacgagaccctgaagagccccctgttcaaccagatcctgaccctgcagcagagcatcaagcagctgaagggccagctgaaccacatccccagcgactgcagcgccaacttcgacttcagcagaaagggcctgctggtgttcaccgacggcagcatcaccaacggcaacgtgcacagacccagcaacaacagcaccgtgagcggcctgttcccctggacccccaagctgggcaacgaggacttcaacagcgtgatccagcagatggcccagggcagacagatcgagtacatcgacatcgagagacccagcaccggcggcctgggcttcagcgtggtggccctgagaagccagaacctgggcaaggtggacatcttcgtgaaggacgtgcagcccggcagcgtggccgacagagaccagagactgaaggagaacgaccagatcctggccatcaaccacacccccctggaccagaacatcagccaccagcaggccatcgccctgctgcagcagaccaccggcagcctgagactgatcgtggccagagagcccgtgcacaccaagagcagcaccagcagcagcctgaacgacaccaccctgcccgagaccgtgtgctggggccacgtggaggaggtggagctgatcaacgacggcagcggcctgggcttcggcatcgtgggcggcaagaccagcggcgtggtggtgagaaccatcgtgcccggcggcctggccgacagagacggcagactgcagaccggcgaccacatcctgaagatcggcggcaccaacgtgcagggcatgaccagcgagcaggtggcccaggtgctgagaaactgcggcaacagcgtgagaatgctggtggccagagaccccgccggcgacatcagcgtgaccccccccgcccccgccgccctgcccgtggccctgcccaccgtggccagcaagggccccggcagcgacagcagcctgttcgagacctacaacgtggagctggtgagaaaggacggccagagcctgggcatcagaatcgtgggctacgtgggcaccagccacaccggcgaggccagcggcatctacgtgaagagcatcatccccggcagcgccgcctaccacaacggccacatccaggtgaacgacaagatcgtggccgtggacggcgtgaacatccagggcttcgccaaccacgacgtggtggaggtgctgagaaacgccggccaggtggtgcacctgaccctggtgagaagaaagaccagcagcagcaccagccccctggagccccccagcgacagaggcaccgtggtggagcccctgaagccccccgccctgttcctgaccggcgccgtggagaccgagaccaacgtggacggcgaggacgaggagatcaaggagagaatcgacaccctgaagaacgacaacatccaggccctggagaagctggagaaggtgcccgacagccccgagaacgagctgaagagcagatgggagaacctgctgggccccgactacgaggtgatggtggccaccctggacacccagatcgccgacgacgccgagctgcagaagtacagcaagctgctgcccatccacaccctgagactgggcgtggaggtggacagcttcgacggccaccactacatcagcagcatcgtgagcggcggccccgtggacaccctgggcctgctgcagcccgaggacgagctgctggaggtgaacggcatgcagctgtacggcaagagcagaagagaggccgtgagcttcctgaaggaggtgcccccccccttcaccctggtgtgctgcagaagactgttcgacgacgaggccagcgtggacgagcccagaagaaccgagaccagcctgcccgagaccgaggtggaccacaacatggacgtgaacaccgaggaggacgacgacggcgagctggccctgtggagccccgaggtgaagatcgtggagctggtgaaggactgcaagggcctgggcttcagcatcctggactaccaggaccccctggaccccaccagaagcgtgatcgtgatcagaagcctggtggccgacggcgtggccgagagaagcggcggcctgctgcccggcgacagactggtgagcgtgaacgagtactgcctggacaacaccagcctggccgaggccgtggagatcctgaaggccgtgccccccggcctggtgcacctgggcatctgcaagcccctggtggaggacaacgaggaggagagctgctacatcctgcacagcagcagcaacgaggacaagaccgagttcagcggcaccatccacgacatcaacagcagcctgatcctggaggcccccaagggcttcagagacgagccctacttcaaggaggagctggtggacgagcccttcctggacctgggcaagagcttccacagccagcagaaggagatcgagcagagcaaggaggcctgggagatgcacgagttcctgacccccagactgcaggagatggacgaggagagagagatcctggtggacgaggagtacgagctgtaccaggaccccagccccagcatggagctgtaccccctgagccacatccaggaggccacccccgtgcccagcgtgaacgagctgcacttcggcacccagtggctgcacgacaacgagcccagcgagagccaggaggccagaaccggcagaaccgtgtacagccaggaggcccagccctacggctactgccccgagaacgtgatgaaggagaacttcgtgatggagagcctgcccagcgtgcccagcaccgagggcaacagccagcagggcagattcgacgacctggagaacctgaacagcctggccaagaccagcctggacctgggcatgatccccaacgacgtgcagggccccagcctgctgatcgacctgcccgtggtggcccagagaagagagcaggaggacctgcccctgtaccagcaccaggccaccagagtgatcagcaaggccagcgcctacaccggcatgctgagcagcagatacgccaccgacacctgcgagctgcccgagagagaggagggcgagggcgaggagacccccaacttcagccactggggcccccccagaatcgtggagatcttcagagagcccaacgtgagcctgggcatcagcatcgtgggcggccagaccgtgatcaagagactgaagaacggcgaggagctgaagggcatcttcatcaagcaggtgctggaggacagccccgccggcaagaccaacgccctgaagaccggcgacaagatcctggaggtgagcggcgtggacctgcagaacgccagccacagcgaggccgtggaggccatcaagaacgccggcaaccccgtggtgttcatcgtgcagagcctgagcagcacccccagagtgatccccaacgtgcacaacaaggccaacaagatcaccggcaaccagaaccaggacacccaggagaagaaggagaagagacagggcaccgcccccccccccatgaagctgccccccccctacaaggccctgaccgacgacagcgacgagaacgaggaggaggacgccttcaccgaccagaagatcagacagagatacgccgacctgcccggcgagctgcacatcatcgagctggagaaggacaagaacggcctgggcctgagcctggccggcaacaaggacagaagcagaatgagcatcttcgtggtgggcatcaaccccgagggccccgccgccgccgacggcagaatgagaatcggcgacgagctgctggagatcaacaaccagatcctgtacggcagaagccaccagaacgccagcgccatcatcaagaccgcccccagcaaggtgaagctggtgttcatcagaaacgaggacgccgtgaaccagatggccgtgacccccttccccgtgcccagcagcagccccagcagcatcgaggaccagagcggcaccgagcccatcagcagcgaggaggacggcagcgtggaggtgggcatcaagcagctgcccgagagcgagagcttcaagctggccgtgagccagatgaagcagcagaagtaccccaccaaggtgagcttcagcagccaggagatccccctggcccccgccagcagctaccacagcaccgacgccgacttcaccggctacggcggcttccaggcccccctgagcgtggaccccgccacctgccccatcgtgcccggccaggagatgatcatcgagatcagcaagggcagaagcggcctgggcctgagcatcgtgggcggcaaggacacccccctgaacgccatcgtgatccacgaggtgtacgaggagggcgccgccgccagagacggcagactgtgggccggcgaccagatcctggaggtgaacggcgtggacctgagaaacagcagccacgaggaggccatcaccgccctgagacagaccccccagaaggtgagactggtggtgtacagagacgaggcccactacagagacgaggagaacctggagatcttccccgtggacctgcagaagaaggccggcagaggcctgggcctgagcatcgtgggcaagagaaacggcagcggcgtgttcatcagcgacatcgtgaagggcggcgccgccgacctggacggcagactgatccagggcgaccagatcctgagcgtgaacggcgaggacatgagaaacgccagccaggagaccgtggccaccatcctgaagtgcgcccagggcctggtgcagctggagatcggcagactgagagccggcagctggaccagcgccagaaccaccagccagaacagccagggcagccagcagagcgcccacagcagctgccaccccagcttcgcccccgtgatcaccggcctgcagaacctggtgggcaccaagagagtgagcgaccccagccagaagaacagcggcaccgacatggagcccagaaccgtggagatcaacagagagctgagcgacgccctgggcatcagcatcgccggcggcagaggcagccccctgggcgacatccccgtgttcatcgccatgatccaggccagcggcgtggccgccagaacccagaagctgaaggtgggcgacagaatcgtgagcatcaacggccagcccctggacggcctgagccacgccgacgtggtgaacctgctgaagaacgcctacggcagaatcatcctgcaggtggtggccgacaccaacatcagcgccatcgccgcccagctggagaacatgagcaccggctaccacctgggcagccccaccgccgagcaccaccccgaggacaccgaggagcagctgcagatgaccgccgactag

SEQ ID NO: 85125 - DNA, 4572 bp, synthetic construct
  misc_feature 1..4572: note = Description of Artificial Sequence: Synthetic coding sequence
  source 1..4572: mol_type = other DNA
atgcccgagaaccccgccaccgacaagctgcaggtgctgcaggtgctggacagactgaagatgaagctgcaggagaagggcgacaccagccagaacgagaagctgagcatgttctacgagaccctgaagagccccctgttcaaccagatcctgaccctgcagcagagcatcaagcagctgaagggccagctgaaccacatccccagcgactgcagcgccaacttcgacttcagcagaaagggcctgctggtgttcaccgacggcagcatcaccaacggcaacgtgcacagacccagcaacaacagcaccgtgagcggcctgttcccctggacccccaagctgggcaacgaggacttcaacagcgtgatccagcagatggcccagggcagacagatcgagtacatcgacatcgagagacccagcaccggcggcctgggcttcagcgtggtggccctgagaagccagaacctgggcaaggtggacatcttcgtgaaggacgtgcagcccggcagcgtggccgacagagaccagagactgaaggagaacgaccagatcctggccatcaaccacacccccctggaccagaacatcagccaccagcaggccatcgccctgctgcagcagaccaccggcagcctgagactgatcgtggccagagagcccgtgcacaccaagagcagcaccagcagcagcctgaacgacaccaccctgcccgagaccgtgtgctggggccacgtggaggaggtggagctgatcaacgacggcagcggcctgggcttcggcatcgtgggcggcaagaccagcggcgtggtggtgagaaccatcgtgcccggcggcctggccgacagagacggcagactgcagaccggcgaccacatcctgaagatcggcggcaccaacgtgcagggcatgaccagcgagcaggtggcccaggtgctgagaaactgcggcaacagcgtgagaatgctggtggccagagaccccgccggcgacatcagcgtgaccccccccgcccccgccgccctgcccgtggccctgcccaccgtggccagcaagggccccggcagcgacagcagcctgttcgagacctacaacgtggagctggtgagaaaggacggccagagcctgggcatcagaatcgtgggctacgtgggcaccagccacaccggcgaggccagcggcatctacgtgaagagcatcatccccggcagcgccgcctaccacaacggccacatccaggtgaacgacaagatcgtggccgtggacggcgtgaacatccagggcttcgccaaccacgacgtggtggaggtgctgagaaacgccggccaggtggtgcacctgaccctggtgagaagaaagaccagcagcagcaccagccccctggagccccccagcgacagaggcaccgtggtggagcccctgaagccccccgccctgttcctgaccggcgccgtggagaccgagaccaacgtggacggcgaggacgaggagatcaaggagagaatcgacaccctgaagaacgacaacatccaggccctggagaagctggagaaggtgcccgacagccccgagaacgagctgaagagcagatgggagaacctgctgggccccgactacgaggtgatggtggccaccctggacacccagatcgccgacgacgccgagctgcagaagtacagcaagctgctgcccatccacaccctgagactgggcgtggaggtggacagcttcgacggccaccactacatcagcagcatcgtgagcggcggccccgtggacaccctgggcctgctgcagcccgaggacgagctgctggaggtgaacggcatgcagctgtacggcaagagcagaagagaggccgtgagcttcctgaaggaggtgcccccccccttcaccctggtgtgctgcagaagactgttcgacgacgaggccagcgtggacgagcccagaagaaccgagaccagcctgcccgagaccgaggtggaccacaacatggacgtgaacaccgaggaggacgacgacggcgagctggccctgtggagccccgaggtgaagatcgtggagctggtgaaggactgcaagggcctgggcttcagcatcctggactaccaggaccccctggaccccaccagaagcgtgatcgtgatcagaagcctggtggccgacggcgtggccgagagaagcggcggcctgctgcccggcgacagactggtgagcgtgaacgagtactgcctggacaacaccagcctggccgaggccgtggagatcctgaaggccgtgccccccggcctggtgcacctgggcatctgcaagcccctggtggaggacaacgaggaggagagctgctacatcctgcacagcagcagcaacgaggacaagaccgagttcagcggcaccatccacgacatcaacagcagcctgatcctggaggcccccaagggcttcagagacgagccctacttcaaggaggagctggtggacgagcccttcctggacctgggcaagagcttccacagccagcagaaggagatcgagcagagcaaggaggcctgggagatgcacgagttcctgacccccagactgcaggagatggacgaggagagagagatcctggtggacgaggagtacgagctgtaccaggaccccagccccagcatggagctgtaccccctgagccacatccaggaggccacccccgtgcccagcgtgaacgagctgcacttcggcacccagtggctgcacgacaacgagcccagcgagagccaggaggccagaaccggcagaaccgtgtacagccaggaggcccagccctacggctactgccccgagaacgtgatgaaggagaacttcgtgatggagagcctgcccagcgtgcccagcaccgagggcaacagccagcagggcagattcgacgacctggagaacctgaacagcctggccaagaccagcctggacctgggcatgatccccaacgacgtgcagggccccagcctgctgatcgacctgcccgtggtggcccagagaagagagcaggaggacctgcccctgtaccagcaccaggccaccagagtgatcagcaaggccagcgcctacaccggcatgctgagcagcagatacgccaccgacacctgcgagctgcccgagagagaggagggcgagggcgaggagacccccaacttcagccactggggcccccccagaatcgtggagatcttcagagagcccaacgtgagcctgggcatcagcatcgtgggcggccagaccgtgatcaagagactgaagaacggcgaggagctgaagggcatcttcatcaagcaggtgctggaggacagccccgccggcaagaccaacgccctgaagaccggcgacaagatcctggaggtgagcggcgtggacctgcagaacgccagccacagcgaggccgtggaggccatcaagaacgccggcaaccccgtggtgttcatcgtgcagagcctgagcagcacccccagagtgatccccaacgtgcacaacaaggccaacaagatcaccggcaaccagaaccaggacacccaggagaagaaggagaagagacagggcaccgcccccccccccatgaagctgccccccccctacaaggccctgaccgacgacagcgacgagaacgaggaggaggacgccttcaccgaccagaagatcagacagagatacgccgacctgcccggcgagctgcacatcatcgagctggagaaggacaagaacggcctgggcctgagcctggccggcaacaaggacagaagcagaatgagcatcttcgtggtgggcatcaaccccgagggccccgccgccgccgacggcagaatgagaatcggcgacgagctgctggagatcaacaaccagatcctgtacggcagaagccaccagaacgccagcgccatcatcaagaccgcccccagcaaggtgaagctggtgttcatcagaaacgaggacgccgtgaaccagatggccgtgacccccttccccgtgcccagcagcagccccagcagcatcgaggaccagagcggcaccgagcccatcagcagcgaggaggacggcagcgtggaggtgggcatcaagcagctgcccgagagcgagagcttcaagctggccgtgagccagatgaagcagcagaagtaccccaccaaggtgagcttcagcagccaggagatccccctggcccccgccagcagctaccacagcaccgacgccgacttcaccggctacggcggcttccaggcccccctgagcgtggaccccgccacctgccccatcgtgcccggccaggagatgatcatcgagatcagcaagggcagaagcggcctgggcctgagcatcgtgggcggcaaggacacccccctggtgaacggcgtggacctgagaaacagcagccacgaggaggccatcaccgccctgagacagaccccccagaaggtgagactggtggtgtacagagacgaggcccactacagagacgaggagaacctggagatcttccccgtggacctgcagaagaaggccggcagaggcctgggcctgagcatcgtgggcaagtag

SEQ ID NO: 85126 - DNA, 1359 bp, synthetic construct
  misc_feature 1..1359: note = Description of Artificial Sequence: Synthetic coding sequence
  source 1..1359: mol_type = other DNA
atggtgcagggcggcttccccgagaagatcagacagagatacgccgacctgcccggcgagctgcacatcatcgagctggagaaggacaagaacggcctgggcctgagcctggccggcaacaaggacagaagcagaatgagcatcttcgtggtgggcatcaaccccgagggccccgccgccgccgacggcagaatgagaatcggcgacgagctgctggagatcaacaaccagatcctgtacggcagaagccaccagaacgccagcgccatcatcaagaccgcccccagcaaggtgaagctggtgttcatcagaaacgaggacgccgtgaaccagatggccgtgacccccttccccgtgcccagcagcagccccagcagcatcgaggaccagagcggcaccgagcccatcagcagcgaggaggacggcagcgtggaggtgggcatcaagcagctgcccgagagcgagagcttcaagctggccgtgagccagatgaagcagcagaagtaccccaccaaggtgagcttcagcagccaggagatccccctggcccccgccagcagctaccacagcaccgacgccgacttcaccggctacggcggcttccaggcccccctgagcgtggaccccgccacctgccccatcgtgcccggccaggagatgatcatcgagatcagcaagggcagaagcggcctgggcctgagcatcgtgggcggcaaggacacccccctgttctggagactgggcagccccagagcctggagccagcacctggtgagagccttcatgctgcaccaccccgtgaccgaggtggagggccagaacgccatcgtgatccacgaggtgtacgaggagggcgccgccgccagagacggcagactgtgggccggcgaccagatcctggaggtgaacggcgtggacctgagaaacagcagccacgaggaggccatcaccgccctgagacagaccccccagaaggtgagactggtggtgtacagagacgaggcccactacagagacgaggagaacctggagatcttccccgtggacctgcagaagaaggccggcagaggcctgggcctgagcatcgtgggcaagagaaacggcagcggcgtgttcatcagcgacatcgtgaagggcggcgccgccgacctggacggcagactgatccagggcgaccagatcctgagcgtgaacggcgaggacatgagaaacgccagccaggagaccgtggccaccatcctgaagtgcgcccagggcctggtgcagctggagatcggcagactgagagccggcagctggaccagcgccagaaccaccagccagaacagccaggtggtggacggcttcagcagcgactag

SEQ ID NO: 85127 - DNA, 594 bp, synthetic construct
  misc_feature 1..594: note = Description of Artificial Sequence: Synthetic coding sequence
  source 1..594: mol_type = other DNA
atggccgtgacccccttccccgtgcccagcagcagccccagcagcatcgaggaccagagcggcaccgagcccatcagcagcgaggaggacggcagcgtggaggtgggcatcaagcagctgcccgagagcgagagcttcaagctggccgtgagccagatgaagcagcagaagtaccccaccaaggtgagcttcagcagccaggagatccccctggcccccgccagcagctaccacagcaccgacgccgacttcaccggctacggcggcttccaggcccccctgagcgtggaccccgccacctgccccatcgtgcccggccaggagatgatcatcgagatcagcaagggcagaagcggcctgggcctgagcatcgtgggcggcaaggacacccccctggtgaacggcgtggacctgagaaacagcagccacgaggaggccatcaccgccctgagacagaccccccagaaggtgagactggtggtgtacagagacgaggcccactacagagacgaggagaacctggagatcttccccgtggacctgcagaagaaggccggcagaggcctgggcctgagcatcgtgggcaagagatag

SEQ ID NO: 85128 - DNA, 1236 bp, synthetic construct
  misc_feature 1..1236: note = Description of Artificial Sequence: Synthetic coding sequence
  source 1..1236: mol_type = other DNA
atgagccccgccagactgagacccagactgcacttctgcctggtgctgctgctgctgctggtggtgcccgccgcctggggctgcggccccggcagagtggtgggcagcagaagaagaccccccagaaagctggtgcccctggcctacaagcagttcagccccaacgtgcccgagaagaccctgggcgccagcggcagatacgagggcaagatcgccagaagcagcgagagattcaaggagctgacccccaactacaaccccgacatcatcttcaaggacgaggagaacaccggcgccgacagactgatgacccagagatgcaaggacagactgaacagcctggccatcagcgtgatgaaccagtggcccggcgtgaagctgagagtgaccgagggctgggacgaggacggccaccacagcgaggagagcctgcactacgagggcagagccgtggacatcaccaccagcgacagagacagaaacaagtacggcctgctggccagactggccgtggaggccggcttcgactgggtgtactacgagagcaaggcccacgtgcactgcagcgtgaagagcgagcacagcgccgccgccaagaccggcggctgcttccccgccggcgcccaggtgagactggagagcggcgccagagtggccctgagcgccgtgagacccggcgacagagtgctggccatgggcgaggacggcagccccaccttcagcgacgtgctgatcttcctggacagagagccccacagactgagagccttccaggtgatcgagacccaggacccccccagaagactggccctgacccccgcccacctgctgttcaccgccgacaaccacaccgagcccgccgccagattcagagccaccttcgccagccacgtgcagcccggccagtacgtgctggtggccggcgtgcccggcctgcagcccgccagagtggccgccgtgagcacccacgtggccctgggcgcctacgcccccctgaccaagcacggcaccctggtggtggaggacgtggtggccagctgcttcgccgccgtggccgaccaccacctggcccagctggccttctggcccctgagactgttccacagcctggcctggggcagctggacccccggcgagggcgtgcactggtacccccagctgctgtacagactgggcagactgctgctggaggagggcagcttccaccccctgggcatgagcggcgccggcagctag

SEQ ID NO: 85129 - DNA, 1212 bp, synthetic construct
  misc_feature 1..1212: note = Description of Artificial Sequence: Synthetic coding sequence
  source 1..1212: mol_type = other DNA
atggcccacgccatggagaacagctggaccatcagcaaggagtaccacatcgacgaggaggtgggcttcgccctgcccaacccccaggagaacctgcccgacttctacaacgactggatgttcatcgccaagcacctgcccgacctgatcgagagcggccagctgagagagagagtggagaagctgaacatgctgagcatcgaccacctgaccgaccacaagagccagagactggccagactggtgctgggctgcatcaccatggcctacgtgtggggcaagggccacggcgacgtgagaaaggtgctgcccagaaacatcgccgtgccctactgccagctgagcaagaagctggagctgccccccatcctggtgtacgccgactgcgtgctggccaactggaagaagaaggaccccaacaagcccctgacctacgagaacatggacgtgctgttcagcttcagagacggcgactgcagcaagggcttcttcctggtgagcctgctggtggagatcgccgccgccagcgccatcaaggtgatccccaccgtgttcaaggccatgcagatgcaggagagagacaccctgctgaaggccctgctggagatcgccagctgcctggagaaggccctgcaggtgttccaccagatccacgaccacgtgaaccccaaggccttcttcagcgtgctgagaatctacctgagcggctggaagggcaacccccagctgagcgacggcctggtgtacgagggcttctgggaggaccccaaggagttcgccggcggcagcgccggccagagcagcgtgttccagtgcttcgacgtgctgctgggcatccagcagaccgccggcggcggccacgccgcccagttcctgcaggacatgagaagatacatgccccccgcccacagaaacttcctgtgcagcctggagagcaaccccagcgtgagagagttcgtgctgagcaagggcgacgccggcctgagagaggcctacgacgcctgcgtgaaggccctggtgagcctgagaagctaccacctgcagatcgtgaccaagtacatcctgatccccgccagccagcagcccaaggagaacaagaccagcgaggaccccagcaagctggaggccaagggcaccggcggcaccgacctgatgaacttcctgaagaccgtgagaagcaccaccgagaagagcctgctgaaggagggctag

SEQ ID NO: 85130 - DNA, 237 bp, synthetic construct
  misc_feature 1..237: note = Description of Artificial Sequence: Synthetic coding sequence
  source 1..237: mol_type = other DNA
atggcccacgccatggagaacagctggaccatcagcaaggagtaccacatcgacgaggaggtgggcttcgccctgcccaacccccaggagaacctgcccgacttctacaacgactggatgttcatcgccaagcacctgcccgacctgatcgagagcggccagctgagagagagagtggagaagctgaacatgctgagcatcgaccacctgaccgaccacaagagccagagactgtag

SEQ ID NO: 85131 - DNA, 543 bp, synthetic construct
  misc_feature 1..543: note = Description of Artificial Sequence: Synthetic coding sequence
  source 1..543: mol_type = other DNA
atggcccacgccatggagaacagctggaccatcagcaaggagtaccacatcgacgaggaggtgggcttcgccctgcccaacccccaggagaacctgcccgacttctacaacgactggatgttcatcgccaagcacctgcccgacctgatcgagagcggccagctgagagagagagtggagaagctgaacatgctgagcatcgaccacctgaccgaccacaagagccagagactggccagactggtgctgggctgcatcaccatggcctacgtgtggggcaagggccacggcgacgtgagaaaggtgctgcccagaaacatcgccgtgccctactgccagctgagcaagaagctggagctgccccccatcctggtgtacgccgactgcgtgctggccaactggaagaagaaggaccccaacaagcccctgacctacgagaacatggacgtgctgttcagcttcagagacggcgactgcagcaagggcttcttcctggtgagcctgctggtggagatcgccgccgccagcgccatcaaggtgtag

SEQ ID NO: 85132 - DNA, 1212 bp, synthetic construct; identical to SEQ ID NO: 85129
  misc_feature 1..1212: note = Description of Artificial Sequence: Synthetic coding sequence
  source 1..1212: mol_type = other DNA

SEQ ID NO: 85133 - DNA, 144 bp, synthetic construct
  misc_feature 1..144: note = Description of Artificial Sequence: Synthetic coding sequence
  source 1..144: mol_type = other DNA
atggcccacgccatggagaacagctggaccatcagcaaggagtaccacatcgacgaggaggtgggcttcgccctgcccaacccccaggagaacctgcccgacttctacaacgactggatgttcatcgccaagcacctgccctag

SEQ ID NO: 85134 - DNA, 1224 bp, synthetic construct
  misc_feature 1..1224: note = Description of Artificial Sequence: Synthetic coding sequence
  source 1..1224: mol_type = other DNA
atggagccccacagacccaacgtgaagaccgccgtgcccctgagcctggagagctaccacatcagcgaggagtacggcttcctgctgcccgacagcctgaaggagctgcccgaccactacagaccctggatggagatcgccaacaagctgccccagctgatcgacgcccaccagctgcaggcccacgtggacaagatgcccctgctgagctgccagttcctgaagggccacagagagcagagactggcccacctggtgctgagcttcctgaccatgggctacgtgtggcaggagggcgaggcccagcccgccgaggtgctgcccagaaacctggccctgcccttcgtggaggtgagcagaaacctgggcctgccccccatcctggtgcacagcgacctggtgctgaccaactggaccaagaaggaccccgacggcttcctggagatcggcaacctggagaccatcatcagcttccccggcggcgagagcctgcacggcttcatcctggtgaccgccctggtggagaaggaggccgtgcccggcatcaaggccctggtgcaggccaccaacgccatcctgcagcccaaccaggaggccctgctgcaggccctgcagagactgagactgagcatccaggacatcaccaagaccctgggccagatgcacgactacgtggaccccgacatcttctacgccggcatcagaatcttcctgagcggctggaaggacaaccccgccatgcccgccggcctgatgtacgagggcgtgagccaggagcccctgaagtacagcggcggcagcgccgcccagagcaccgtgctgcacgccttcgacgagttcctgggcatcagacacagcaaggagagcggcgacttcctgtacagaatgagagactacatgccccccagccacaaggccttcatcgaggacatccacagcgcccccagcctgagagactacatcctgagcagcggccaggaccacctgctgaccgcctacaaccagtgcgtgcaggccctggccgagctgagaagctaccacatcaccatggtgaccaagtacctgatcaccgccgccgccaaggccaagcacggcaagcccaaccacctgcccggccccccccaggccctgaaggacagaggcaccggcggcaccgccgtgatgagcttcctgaagagcgtgagagacaagaccctggagagcatcctgcaccccagaggctag

SEQ ID NO: 85135 - DNA, 1263 bp, synthetic construct
  misc_feature 1..1263: note = Description of Artificial Sequence: Synthetic coding sequence
  source 1..1263: mol_type = other DNA
atgctgcacttccactactacgacaccagcaacaagatcatggagccccacagacccaacgtgaagaccgccgtgcccctgagcctggagagctaccacatcagcgaggagtacggcttcctgctgcccgacagcctgaaggagctgcccgaccactacagaccctggatggagatcgccaacaagctgccccagctgatcgacgcccaccagctgcaggcccacgtggacaagatgcccctgctgagctgccagttcctgaagggccacagagagcagagactggcccacctggtgctgagcttcctgaccatgggctacgtgtggcaggagggcgaggcccagcccgccgaggtgctgcccagaaacctggccctgcccttcgtggaggtgagcagaaacctgggcctgccccccatcctggtgcacagcgacctggtgctgaccaactggaccaagaaggaccccgacggcttcctggagatcggcaacctggagaccatcatcagcttccccggcggcgagagcctgcacggcttcatcctggtgaccgccctggtggagaaggaggccgtgcccggcatcaaggccctggtgcaggccaccaacgccatcctgcagcccaaccaggaggccctgctgcaggccctgcagagactgagactgagcatccaggacatcaccaagaccctgggccagatgcacgactacgtggaccccgacatcttctacgccggcatcagaatcttcctgagcggctggaaggacaaccccgccatgcccgccggcctgatgtacgagggcgtgagccaggagcccctgaagtacagcggcggcagcgccgcccagagcaccgtgctgcacgccttcgacgagttcctgggcatcagacacagcaaggagagcggcgacttcctgtacagaatgagagactacatgccccccagccacaaggccttcatcgaggacatccacagcgcccccagcctgagagactacatcctgagcagcggccaggaccacctgctgaccgcctacaaccagtgcgtgcaggccctggccgagctgagaagctaccacatcaccatggtgaccaagtacctgatcaccgccgccgccaaggccaagcacggcaagcccaaccacctgcccggccccccccaggccctgaaggacagaggcaccggcggcaccgccgtgatgagcttcctgaagagcgtgagagacaagaccctggagagcatcctgcaccccagaggctag

SEQ ID NO: 85136 - DNA, 792 bp, synthetic construct
  misc_feature 1..792: note = Description of Artificial Sequence: Synthetic coding sequence
  source 1..792: mol_type = other DNA
atgaagggcggcttcaccggcggcgacgagtaccagaagcacttcctgcccagagactacctggccacctactacagcttcgacggcagccccagccccgaggccgagatgctgaagttcaacctggagtgcctgcacaagaccttcggccccggcggcctgcagggcgacaccctgatcgacatcggcagcggccccaccatctaccaggtgctggccgcctgcgacagcttccaggacatcaccctgagcgacttcaccgacagaaacagagaggagctggagaagtggctgaagaaggagcccggcgcctacgactggacccccgccgtgaagttcgcctgcgagctggagggcaacagcggcagatgggaggagaaggaggagaagctgagagccgccgtgaagagagtgctgaagtgcgacgtgcacctgggcaaccccctggcccccgccgtgctgcccctggccgactgcgtgctgaccctgctggccatggagtgcgcctgctgcagcctggacgcctacagagccgccctgtgcaacctggccagcctgctgaagcccggcggccacctggtgaccaccgtgaccctgagactgcccagctacatggtgggcaagagagagttcagctgcgtggccctggagaaggaggaggtggagcaggccgtgctggacgccggcttcgacatcgagcagctgctgcacagcccccagagctacagcgtgaccaacgccgccaacaacggcgtgtgcttcatcgtggccagaaagaagcccggcccctag

SEQ ID NO: 85137 - DNA, 789 bp, synthetic construct
  misc_feature 1..789: note = Description of Artificial Sequence: Synthetic coding sequence
  source 1..789: mol_type = other DNA
atgaagggcggcttcaccggcggcgacgagtaccagaagcacttcctgcccagagactacctggccacctactacagcttcgacggcagccccagccccgaggccgagatgctgaagttcaacctggagtgcctgcacaagaccttcggccccggcctgcagggcgacaccctgatcgacatcggcagcggccccaccatctaccaggtgctggccgcctgcgacagcttccaggacatcaccctgagcgacttcaccgacagaaacagagaggagctggagaagtggctgaagaaggagcccggcgcctacgactggacccccgccgtgaagttcgcctgcgagctggagggcaacagcggcagatgggaggagaaggaggagaagctgagagccgccgtgaagagagtgctgaagtgcgacgtgcacctgggcaaccccctggcccccgccgtgctgcccctggccgactgcgtgctgaccctgctggccatggagtgcgcctgctgcagcctggacgcctacagagccgccctgtgcaacctggccagcctgctgaagcccggcggccacctggtgaccaccgtgaccctgagactgcccagctacatggtgggcaagagagagttcagctgcgtggccctggagaaggaggaggtggagcaggccgtgctggacgccggcttcgacatcgagcagctgctgcacagcccccagagctacagcgtgaccaacgccgccaacaacggcgtgtgcttcatcgtggccagaaagaagcccggcccctag

SEQ ID NO: 85138 - DNA, 600 bp, synthetic construct
  misc_feature 1..600: note = Description of Artificial Sequence: Synthetic coding sequence
  source 1..600: mol_type = other DNA
atgaagagcggcctgtggtacttcttcctgttctgcctgagaatcaaggtgctgaccggcgagatcaacggcagcgccaactacgagatgttcatcttccacaacggcggcgtgcagatcctgtgcaagtaccccgacatcgtgcagcagttcaagatgcagctgctgaagggcggccagatcctgtgcgacctgaccaagaccaagggcagcggcaacaccgtgagcatcaagagcctgaagttctgccacagccagctgagcaacaacagcgtgagcttcttcctgtacaacctggaccacagccacgccaactactacttctgcaacctgagcatcttcgaccccccccccttcaaggtgaccctgaccggcggctacctgcacatctacgagagccagctgtgctgccagctgaagttctggctgcccatcggctgcgccgccttcgtggtggtgtgcatcctgggctgcatcctgatctgctggctgaccaagaagaagtacagcagcagcgtgcacgaccccaacggcgagtacatgttcatgagagccgtgaacaccgccaagaagagcagactgaccgacgtgaccctgtag

SEQ ID NO: 85139 - DNA, 507 bp, synthetic construct
  misc_feature 1..507: note = Description of Artificial Sequence: Synthetic coding sequence
  source 1..507: mol_type = other DNA
atgaagagcggcctgtggtacttcttcctgttctgcctgagaatcaaggtgctgaccggcgagatcaacggcagcgccaactacgagatgttcatcttccacaacggcggcgtgcagatcctgtgcaagtaccccgacatcgtgcagcagttcaagatgcagctgctgaagggcggccagatcctgtgcgacctgaccaagaccaagggcagcggcaacaccgtgagcatcaagagcctgaagttctgccacagccagctgagcaacaacagcgtgagcttcttcctgtacaacctggaccacagccacgccaactactacttctgcaacctgagcatcttcgaccccccccccttcaaggtgaccctgaccggcggctacctgcacatctacgagagccagctgtgctgccagctgaagttctggctgcccatcggctgcgccgccttcgtggtggtgtgcatcctgggctgcatcctgatctgctggctgaccaagaagatgtag

SEQ ID NO: 85140 - DNA, 930 bp, synthetic construct
  misc_feature 1..930: note = Description of Artificial Sequence: Synthetic coding sequence
  source 1..930: mol_type = other DNA
atgagactgggcagccccggcctgctgttcctgctgttcagcagcctgagagccgacacccaggagaaggaggtgagagccatggtgggcagcgacgtggagctgagctgcgcctgccccgagggcagcagattcgacctgaacgacgtgtacgtgtactggcagaccagcgagagcaagaccgtggtgacctaccacatcccccagaacagcagcctggagaacgtggacagcagatacagaaacagagccctgatgagccccgccggcatgctgagaggcgacttcagcctgagactgttcaacgtgaccccccaggacgagcagaagttccactgcctggtgctgagccagagcctgggcttccaggaggtgctgagcgtggaggtgaccctgcacgtggccgccaacttcagcgtgcccgtggtgagcgccccccacagccccagccaggacgagctgaccttcacctgcaccagcatcaacggctaccccagacccaacgtgtactggatcaacaagaccgacaacagcctgctggaccaggccctgcagaacgacaccgtgttcctgaacatgagaggcctgtacgacgtggtgagcgtgctgagaatcgccagaacccccagcgtgaacatcggctgctgcatcgagaacgtgctgctgcagcagaacctgaccgtgggcagccagaccggcaacgacatcggcgagagagacaagatcaccgagaaccccgtgagcaccggcgagaagaacgccgccacctggagcatcctggccgtgctgtgcctgctggtggtggtggccgtggccatcggctgggtgtgcagagacagatgcctgcagcacagctacgccggcgcctgggccgtgagccccgagaccgagctgaccgagagctggaacctgctgctgctgctgagctag

SEQ ID NO: 85141 - DNA, 558 bp, synthetic construct
  misc_feature 1..558: note = Description of Artificial Sequence: Synthetic coding sequence
  source 1..558: mol_type = other DNA
atgagactgggcagccccggcctgctgttcctgctgttcagcagcctgagagccgccaacttcagcgtgcccgtggtgagcgccccccacagccccagccaggacgagctgaccttcacctgcaccagcatcaacggctaccccagacccaacgtgtactggatcaacaagaccgacaacagcctgctggaccaggccctgcagaacgacaccgtgttcctgaacatgagaggcctgtacgacgtggtgagcgtgctgagaatcgccagaacccccagcgtgaacatcggctgctgcatcgagaacgtgctgctgcagcagaacctgaccgtgggcagccagaccggcaacgacatcggcgagagagacaagatcaccgagaaccccgtgagcaccggcgagaagaacgccgccacctggagcatcctggccgtgctgtgcctgctggtggtggtggccgtggccatcggctgggtgtgcagagacagatgcctgcagcacagctacgccggcgcctgggccgtgagccccgagaccgagctgaccggccacgtgtag

SEQ ID NO: 85142 - DNA, 909 bp, synthetic construct
  misc_feature 1..909: note = Description of Artificial Sequence: Synthetic coding sequence
  source 1..909: mol_type = other DNA
atgagactgggcagccccggcctgctgttcctgctgttcagcagcctgagagccgacacccaggagaaggaggtgagagccatggtgggcagcgacgtggagctgagctgcgcctgccccgagggcagcagattcgacctgaacgacgtgtacgtgtactggcagaccagcgagagcaagaccgtggtgacctaccacatcccccagaacagcagcctggagaacgtggacagcagatacagaaacagagccctgatgagccccgccggcatgctgagaggcgacttcagcctgagactgttcaacgtgaccccccaggacgagcagaagttccactgcctggtgctgagccagagcctgggcttccaggaggtgctgagcgtggaggtgaccctgcacgtggccgccaacttcagcgtgcccgtggtgagcgccccccacagccccagccaggacgagctgaccttcacctgcaccagcatcaacggctaccccagacccaacgtgtactggatcaacaagaccgacaacagcctgctggaccaggccctgcagaacgacaccgtgttcctgaacatgagaggcctgtacgacgtggtgagcgtgctgagaatcgccagaacccccagcgtgaacatcggctgctgcatcgagaacgtgctgctgcagcagaacctgaccgtgggcagccagaccggcaacgacatcggcgagagagacaagatcaccgagaaccccgtgagcaccggcgagaagaacgccgccacctggagcatcctggccgtgctgtgcctgctggtggtggtggccgtggccatcggctgggtgtgcagagacagatgcctgcagcacagctacgccggcgcctgggccgtgagccccgagaccgagctgaccggccacgtgtag

SEQ ID NO: 85143 - DNA, 1101 bp, synthetic construct
  misc_feature 1..1101: note = Description of Artificial Sequence: Synthetic coding sequence
  source 1..1101: mol_type = other DNA
atggtgctgcacctgctgctgttcctgctgctgaccccccagggcggccacagctgccagggcctggagctggccagagagctggtgctggccaaggtgagagccctgttcctggacgccctgggcccccccgccgtgaccagagagggcggcgaccccggcgtgagaagactgcccagaagacacgccctgggcggcttcacccacagaggcagcgagcccgaggaggaggaggacgtgagccaggccatcctgttccccgccaccgacgccagctgcgaggacaagagcgccgccagaggcctggcccaggaggccgaggagggcctgttcagatacatgttcagacccagccagcacaccagaagcagacaggtgaccagcgcccagctgtggttccacaccggcctggacagacagggcaccgccgccagcaacagcagcgagcccctgctgggcctgctggccctgagccccggcggccccgtggccgtgcccatgagcctgggccacgcccccccccactgggccgtgctgcacctggccaccagcgccctgagcctgctgacccaccccgtgctggtgctgctgctgagatgccccctgtgcacctgcagcgccagacccgaggccacccccttcctggtggcccacaccagaaccagaccccccagcggcggcgagagagccagaagaagcacccccctgatgagctggccctggagccccagcgccctgagactgctgcagagaccccccgaggagcccgccgcccacgccaactgccacagagtggccctgaacatcagcttccaggagctgggctgggagagatggatcgtgtacccccccagcttcatcttccactactgccacggcggctgcggcctgcacatcccccccaacctgagcctgcccgtgcccggcgccccccccacccccgcccagccctacagcctgctgcccggcgcccagccctgctgcgccgccctgcccggcaccatgagacccctgcacgtgagaaccaccagcgacggcggctacagcttcaagtacgagaccgtgcccaacctgctgacccagcactgcgcctgcatctag

SEQ ID NO: 85144 - DNA, 1281 bp, synthetic construct
  misc_feature 1..1281: note = Description of Artificial Sequence: Synthetic coding sequence
  source 1..1281: mol_type = other DNA
atgcccctgctgtggctgagaggcttcctgctggccagctgctggatcatcgtgagaagcagccccacccccggcagcgagggccacagcgccgcccccgactgccccagctgcgccctggccgccctgcccaaggacgtgcccaacagccagcccgagatggtggaggccgtgaagaagcacatcctgaacatgctgcacctgaagaagagacccgacgtgacccagcccgtgcccaaggccgccctgctgaacgccatcagaaagctgcacgtgggcaaggtgggcgagaacggctacgtggagatcgaggacgacatcggcagaagagccgagatgaacgagctgatggagcagaccagcgagatcatcaccttcgccgagagcggcaccgccagaaagaccctgcacttcgagatcagcaaggagggcagcgacctgagcgtggtggagagagccgaggtgtggctgttcctgaaggtgcccaaggccaacagaaccagaaccaaggtgaccatcagactgttccagcagcagaagcacccccagggcagcctggacaccggcgaggaggccgaggaggtgggcctgaagggcgagagaagcgagctgctgctgagcgagaaggtggtggacgccagaaagagcacctggcacgtgttccccgtgagcagcagcatccagagactgctggaccagggcaagagcagcctggacgtgagaatcgcctgcgagcagtgccaggagagcggcgccagcctggtgctgctgggcaagaagaagaagaaggaggaggagggcgagggcaagaagaagggcggcggcgagggcggcgccggcgccgacgaggagaaggagcagagccacagacccttcctgatgctgcaggccagacagagcgaggaccacccccacagaagaagaagaagaggcctggagtgcgacggcaaggtgaacatctgctgcaagaagcagttcttcgtgagcttcaaggacatcggctggaacgactggatcatcgcccccagcggctaccacgccaactactgcgagggcgagtgccccagccacatcgccggcaccagcggcagcagcctgagcttccacagcaccgtgatcaaccactacagaatgagaggccacagccccttcgccaacctgaagagctgctgcgtgcccaccaagctgagacccatgagcatgctgtactacgacgacggccagaacatcatcaagaaggacatccagaacatgatcgtggaggagtgcggctgcagctag

SEQ ID NO: 85145 - DNA, 1281 bp, synthetic construct; identical to SEQ ID NO: 85144
  misc_feature 1..1281: note = Description of Artificial Sequence: Synthetic coding sequence
  source 1..1281: mol_type = other DNA

SEQ ID NO: 85146 - DNA, 1224 bp, synthetic construct
  misc_feature 1..1224: note = Description of Artificial Sequence: Synthetic coding sequence
  source 1..1224: mol_type = other DNA
atggacggcctgcccggcagagccctgggcgccgcctgcctgctgctgctggccgccggctggctgggccccgaggcctggggcagccccacccccccccccacccccgccgcccccccccccccccccccccccggcagccccggcggcagccaggacacctgcaccagctgcggcggcttcagaagacccgaggagctgggcagagtggacggcgacttcctggaggccgtgaagagacacatcctgagcagactgcagatgagaggcagacccaacatcacccacgccgtgcccaaggccgccatggtgaccgccctgagaaagctgcacgccggcaaggtgagagaggacggcagagtggagatcccccacctggacggccacgccagccccggcgccgacggccaggagagagtgagcgagatcatcagcttcgccgagaccgacggcctggccagcagcagagtgagactgtacttcttcatcagcaacgagggcaaccagaacctgttcgtggtgcaggccagcctgtggctgtacctgaagctgctgccctacgtgctggagaagggcagcagaagaaaggtgagagtgaaggtgtacttccaggagcagggccacggcgacagatggaacatggtggagaagagagtggacctgaagagaagcggctggcacaccttccccctgaccgaggccatccaggccctgttcgagagaggcgagagaagactgaacctggacgtgcagtgcgacagctgccaggagctggccgtggtgcccgtgttcgtggaccccggcgaggagagccacagacccttcgtggtggtgcaggccagactgggcgacagcagacacagaatcagaaagagaggcctggagtgcgacggcagaaccaacctgtgctgcagacagcagttcttcatcgacttcagactgatcggctggaacgactggatcatcgcccccaccggctactacggcaactactgcgagggcagctgccccgcctacctggccggcgtgcccggcagcgccagcagcttccacaccgccgtggtgaaccagtacagaatgagaggcctgaaccccggcaccgtgaacagctgctgcatccccaccaagctgagcaccatgagcatgctgtacttcgacgacgagtacaacatcgtgaagagagacgtgcccaacatgatcgtggaggagtgcggctgcgcctag

SEQ ID NO: 85147 - DNA, 1059 bp, synthetic construct
  misc_feature 1..1059: note = Description of Artificial Sequence: Synthetic coding sequence
  source 1..1059: mol_type = other DNA
atgaccagcagcctgctgctggccttcctgctgctggcccccaccaccgtggccacccccagagccggcggccagtgccccgcctgcggcggccccaccctggagctggagagccagagagagctgctgctggacctggccaagagaagcatcctggacaagctgcacctgacccagagacccaccctgaacagacccgtgagcagagccgccctgagaaccgccctgcagcacctgcacggcgtgccccagggcgccctgctggaggacaacagagagcaggagtgcgagatcatcagcttcgccgagaccggcctgagcaccatcaaccagaccagactggacttccacttcagcagcgacagaaccgccggcgacagagaggtgcagcaggccagcctgatgttcttcgtgcagctgcccagcaacaccacctggaccctgaaggtgagagtgctggtgctgggcccccacaacaccaacctgaccctggccacccagtacctgctggaggtggacgccagcggctggcaccagctgcccctgggccccgaggcccaggccgcctgcagccagggccacctgaccctggagctggtgctggagggccaggtggcccagagcagcgtgatcctgggcggcgccgcccacagacccttcgtggccgccagagtgagagtgggcggcaagcaccagatccacagaagaggcatcgactgccagggcggcagcagaatgtgctgcagacaggagttcttcgtggacttcagagagatcggctggcacgactggatcatccagcccgagggctacgccatgaacttctgcatcggccagtgccccctgcacatcgccggcatgcccggcatcgccgccagcttccacaccgccgtgctgaacctgctgaaggccaacaccgccgccggcaccaccggcggcggcagctgctgcgtgcccaccgccagaagacccctgagcctgctgtactacgacagagacagcaacatcgtgaagaccgacatccccgacatggtggtggaggcctgcggctgcagctag

SEQ ID NO: 85148 - DNA, 1053 bp, synthetic construct
  misc_feature 1..1053: note = Description of Artificial Sequence: Synthetic coding sequence
  source 1..1053: mol_type = other DNA
atgagactgcccgacgtgcagctgtggctggtgctgctgtgggccctggtgagagcccagggcaccggcagcgtgtgccccagctgcggcggcagcaagctggccccccaggccgagagagccctggtgctggagctggccaagcagcagatcctggacggcctgcacctgaccagcagacccagaatcacccacccccccccccaggccgccctgaccagagccctgagaagactgcagcccggcagcgtggcccccggcaacggcgaggaggtgatcagcttcgccaccgtgaccgacagcaccagcgcctacagcagcctgctgaccttccacctgagcacccccagaagccaccacctgtaccacgccagactgtggctgcacgtgctgcccaccctgcccggcaccctgtgcctgagaatcttcagatggggccccagaagaagaagacagggcagcagaaccctgctggccgagcaccacatcaccaacctgggctggcacaccctgaccctgcccagcagcggcctgagaggcgagaagagcggcgtgctgaagctgcagctggactgcagacccctggagggcaacagcaccgtgaccggccagcccagaagactgctggacaccgccggccaccagcagcccttcctggagctgaagatcagagccaacgagcccggcgccggcagagccagaagaagaacccccacctgcgagcccgccacccccctgtgctgcagaagagaccactacgtggacttccaggagctgggctggagagactggatcctgcagcccgagggctaccagctgaactactgcagcggccagtgccccccccacctggccggcagccccggcatcgccgccagcttccacagcgccgtgttcagcctgctgaaggccaacaacccctggcccgccagcaccagctgctgcgtgcccaccgccagaagacccctgagcctgctgtacctggaccacaacggcaacgtggtgaagaccgacgtgcccgacatggtggtggaggcctgcggctgcagctag

SEQ ID NO: 85149 - DNA, 4062 bp, synthetic construct
  misc_feature 1..4062: note = Description of Artificial Sequence: Synthetic coding sequence
  source 1..4062: mol_type = other DNA
atgagcagccccatgcccgactgcaccagcaagtgcagaagcctgaagcacgccctggacgtgctgagcgtggtgaccaagggcagcgagaaccagatcaaggccttcctgagcagccactgctacaacgccgccaccatcaaggacgtgttcggcagaaacgccctgcacctggtgagcagctgcggcaagaagggcgtgctggactggctgatccagaagggcgtggacctgctggtgaaggacaaggagagcggctggaccgccctgcacagaagcatcttctacggccacatcgactgcgtgtggagcctgctgaagcacggcgtgagcctgtacatccaggacaaggagggcctgagcgccctggacctggtgatgaaggacagacccacccacgtggtgttcaagaacaccgaccccaccgacgtgtacacctggggcgacaacaccaacttcaccctgggccacggcagccagaacagcaagcaccaccccgagctggtggacctgttcagcagaagcggcatctacatcaagcaggtggtgctgtgcaagttccacagcgtgttcctgagccagaagggccaggtgtacacctgcggccacggccccggcggcagactgggccacggcgacgagcagacctgcctggtgcccagactggtggagggcctgaacggccacaactgcagccaggtggccgccgccaaggaccacaccgtggtgctgaccgaggacggctgcgtgtacaccttcggcctgaacatcttccaccagctgggcatcatccccccccccagcagctgcaacgtgcccagacagatccaggccaagtacctgaagggcagaaccatcatcggcgtggccgccggcagattccacaccgtgctgtggaccagagaggccgtgtacaccatgggcctgaacggcggccagctgggctgcctgctggaccccaacggcgagaagtgcgtgaccgcccccagacaggtgagcgccctgcaccacaaggacatcgccctgagcctggtggccgccagcgacggcgccaccgtgtgcgtgaccaccagaggcgacatctacctgctggccgactaccagtgcaagaagatggccagcaagcagctgaacctgaagaaggtgctggtgagcggcggccacatggagtacaaggtggaccccgagcacctgaaggagaacggcggccagaagatctgcatcctggccatggacggcgccggcagagtgttctgctggagaagcgtgaacagcagcctgaagcagtgcagatgggcctaccccagacaggtgttcatcagcgacatcgccctgaacagaaacgagatcctgttcgtgacccaggacggcgagggcttcagaggcagatggttcgaggagaagagaaagagcagcgagaagaaggagatcctgagcaacctgcacaacagcagcagcgacgtgagctacgtgagcgacatcaacagcgtgtacgagagaatcagactggagaagctgaccttcgcccacagagccgtgagcgtgagcaccgaccccagcggctgcaacttcgccatcctgcagagcgaccccaagaccagcctgtacgagatccccgccgtgagcagcagcagcttcttcgaggagttcggcaagctgctgagagaggccgacgagatggacagcatccacgacgtgaccttccaggtgggcaacagactgttccccgcccacaagtacatcctggccgtgcacagcgacttcttccagaagctgttcctgagcgacggcaacaccagcgagttcaccgacatctaccagaaggacgaggacagcgccggctgccacctgttcgtggtggagaaggtgcaccccgacatgttcgagtacctgctgcagttcatctacaccgacacctgcgacttcctgacccacggcttcaagcccagaatccacctgaacaagaaccccgaggagtaccagggcaccctgaacagccacctgaacaaggtgaacttccacgaggacgacaaccagaagagcgccttcgaggtgtacaagagcaaccaggcccagaccgtgagcgagagacagaagagcaagcccaagagctgcaagaagggcaagaacatcagagaggacgaccccgtgagaatgctgcagaccgtggccaagaagttcgacttcagcaacctgagcagcagactggacggcgtgagattcgagaacgagaagatcaacgtgatcgccaagaacaccggcaacaagctgaagctgagccagaagaagtgcagcttcctgtgcgacgtgaccatgaagagcgtggacggcaaggagttcccctgccacaagtgcgtgctgtgcgccagactggagtacttccacagcatgctgagcagcagctggatcgaggccagcagctgcgccgccctggagatgcccatccacagcgacatcctgaaggtgatcctggactacctgtacaccgacgaggccgtggtgatcaaggagagccagaacgtggacttcatctgcagcgtgctggtggtggccgaccagctgctgatcaccagactgaaggagatctgcgaggtggccctgaccgagaagctgaccctgaagaacgccgccatgctgctggagttcgccgccatgtacagcgccaagcagctgaagctgagctgcctgcagttcatcggcctgaacatggccgccctgctggaggccagaagcctggacgtgctgagcgacggcgtgctgaaggacctgagcgagttctacagaaagatgatccccgccatggacagaagagtgatcaccccctaccaggacggccccgacatcagctacctggaggtggaggacggcgacatcttcctgaaggaggagatcaacatggagcagaaccacagcgagaccatgttcaagaaggccaagaccaaggccaagaagaagcccagaaagagaagcgacagcagcggcggctacaacctgagcgacatcatccagagccccagcagcaccggcctgctgaagagcggcaagaccaacagcgtggagagcctgcccgagctgctgaccagcgacagcgagggcagctacgccggcgtgggcagccccagagacctgcagagccccgacttcaccaccggcttccacagcgacaagatcgaggccaaggtgaagccctacgtgaacggcaccagccccgtgtacagcagagaggacctgaagccctgggagaagagccccatcctgaagatcagcgccccccagcccatccccagcaacagaatcgacaccaccagcagcgccagctgggtggccggcagcttcagccccgtgagcccccccgtggtggacctgagaaccatcatggagatcgaggagagcagacagaagtgcggcgccacccccaagagccacctgggcaagaccgtgagccacggcgtgaagctgagccagaagcagagaaagatgatcgccctgaccaccaaggagaacaacagcggcatgaacagcatggagaccgtgctgttcacccccagcaaggcccccaagcccgtgaacgcctgggccagcagcctgcacagcgtgagcagcaagagcttcagagacttcctgctggaggagaagaagagcgtgaccagccacagcagcggcgaccacgtgaagaaggtgagcttcaagggcatcgagaacagccaggcccccaagatcgtgagatgcagcacccacggcacccccggccccgagggcaaccacatcagcgacctgcccctgctggacagccccaacccctggctgagcagcagcgtgaccgcccccagcatggtggcccccgtgaccttcgccagcatcgtggaggaggagctgcagcaggaggccgccctgatcagaagcagagagaagcccctggccctgatccagatcgaggagcacgccatccaggacctgctggtgttctacgaggccttcggcaaccccgaggagttcgtgatcgtggagagaaccccccagggccccctggccgtgcccatgtggaacaagcacggctgctag

SEQ ID NO: 85150 - DNA, 1386 bp, synthetic construct
  misc_feature 1..1386: note = Description of Artificial Sequence: Synthetic coding sequence
  source 1..1386: mol_type = other DNA
atgtggcagctgaccagcctgctgctgttcgtggccacctggggcatcagcggcacccccgcccccctggacagcgtgttcagcagcagcgagagagcccaccaggtgctgagaatcagaaagagagccaacagcttcctggaggagctgagacacagcagcctggagagagagtgcatcgaggagatctgcgacttcgaggaggccaaggagatcttccagaacgtggacgacaccctggccttctggagcaagcacgtggacggcgaccagtgcctggtgctgcccctggagcacccctgcgccagcctgtgctgcggccacggcacctgcatcgacggcatcggcagcttcagctgcgactgcagaagcggctgggagggcagattctgccagagagaggtgagcttcctgaactgcagcctggacaacggcggctgcacccactactgcctggaggaggtgggctggagaagatgcagctgcgcccccggctacaagctgggcgacgacctgctgcagtgccaccccgccgtgaagttcccctgcggcagaccctggaagagaatggagaagaagagaagccacctgaagagagacaccgaggaccaggaggaccaggtggaccccagactgatcgacggcaagatgaccagaagaggcgacagcccctggcaggtggtgctgctggacagcaagaagaagctggcctgcggcgccgtgctgatccaccccagctgggtgctgaccgccgcccactgcatggacgagagcaagaagctgctggtgagactgggcgagtacgacctgagaagatgggagaagtgggagctggacctggacatcaaggaggtgttcgtgcaccccaactacagcaagagcaccaccgacaacgacatcgccctgctgcacctggcccagcccgccaccctgagccagaccatcgtgcccatctgcctgcccgacagcggcctggccgagagagagctgaaccaggccggccaggagaccctggtgaccggctggggctaccacagcagcagagagaaggaggccaagagaaacagaaccttcgtgctgaacttcatcaagatccccgtggtgccccacaacgagtgcagcgaggtgatgagcaacatggtgagcgagaacatgctgtgcgccggcatcctgggcgacagacaggacgcctgcgagggcgacagcggcggccccatggtggccagcttccacggcacctggttcctggtgggcctggtgagctggggcgagggctgcggcctgctgcacaactacggcgtgtacaccaaggtgagcagatacctggactggatccacggccacatcagagacaaggaggccccccagaagagctgggccccctag

SEQ ID NO: 85151 - DNA, 405 bp, synthetic construct
  misc_feature 1..405: note = Description of Artificial Sequence: Synthetic coding sequence
  source 1..405: mol_type = other DNA
atgaaggccttcagccccgtgagaagcgtgagaaagaacagcctgagcgaccacagcctgggcatcagcagaagcaagacccccgtggacgaccccatgagcctgctgtacaacatgaacgactgctacagcaagctgaaggagctggtgcccagcatcccccagaacaagaaggtgagcaagatggagatcctgcagcacgtgatcgactacatcctggacctgcagatcgccctggacagccaccccaccatcgtgagcctgcaccaccagagacccggccagaaccaggccagcagaacccccctgaccaccctgaacaccgacatcagcatcctgagcctgcaggccagcgagttccccagcgagctgatgagcaacgacagcaaggccctgtgcggctag

SEQ ID NO: 85152 - DNA, 405 bp, synthetic construct; identical to SEQ ID NO: 85151
  misc_feature 1..405: note = Description of Artificial Sequence: Synthetic coding sequence
  source 1..405: mol_type = other DNA

SEQ ID NO: 85153 - DNA, 360 bp, synthetic construct
  misc_feature 1..360: note = Description of Artificial Sequence: Synthetic coding sequence
  source 1..360: mol_type = other DNA
atgaaggccctgagccccgtgagaggctgctacgaggccgtgtgctgcctgagcgagagaagcctggccatcgccagaggcagaggcaagggccccgccgccgaggagcccctgagcctgctggacgacatgaaccactgctacagcagactgagagagctggtgcccggcgtgcccagaggcacccagctgagccaggtggagatcctgcagagagtgatcgactacatcctggacctgcaggtggtgctggccgagcccgcccccggcccccccgacggcccccacctgcccatccagaccgccgagctgacccccgagctggtgatcagcaacgacaagagaagcttctgccactag

SEQ ID NO: 85154 - DNA, 486 bp, synthetic construct
  misc_feature 1..486: note = Description of Artificial Sequence: Synthetic coding sequence
  source 1..486: mol_type = other DNA
atgaaggccgtgagccccgtgagacccagcggcagaaaggcccccagcggctgcggcggcggcgagctggccctgagatgcctggccgagcacggccacagcctgggcggcagcgccgccgccgccgccgccgccgccgccgccagatgcaaggccgccgaggccgccgccgacgagcccgccctgtgcctgcagtgcgacatgaacgactgctacagcagactgagaagactggtgcccaccatcccccccaacaagaaggtgagcaaggtggagatcctgcagcacgtgatcgactacatcctggacctgcagctggccctggagacccaccccgccctgctgagacagccccccccccccgcccccccccaccaccccgccggcacctgccccgccgccccccccagaacccccctgaccgccctgaacaccgaccccgccggcgccgtgaacaagcagggcgacagcatcctgtgcagatag

SEQ ID NO: 85155 - DNA, 843 bp, synthetic construct
  misc_feature 1..843: note = Description of Artificial Sequence: Synthetic coding sequence
  source 1..843: mol_type = other DNA
atgctgggccagcagcagcagcagctgtacagcagcgccgccctgctgaccggcgagagaagcagactgctgacctgctacgtgcaggactacctggagtgcgtggagagcctgccccacgacatgcagagaaacgtgagcgtgctgagagagctggacaacaagtaccaggagaccctgaaggagatcgacgacgtgtacgagaagtacaagaaggaggacgacctgaaccagaagaagagactgcagcagctgctgcagagagccctgatcaacagccaggagctgggcgacgagaagatccagatcgtgacccagatgctggagctggtggagaacagagccagacagatggagctgcacagccagtgcttccaggaccccgccgagagcgagagagccagcgacaaggccaagatggacagcagccagcccgagagaagcagcagaagacccagaagacagagaaccagcgagagcagagacctgtgccacatggccaacggcatcgaggactgcgacgaccagccccccaaggagaagaagagcaagagcgccaagaagaagaagagaagcaaggccaagcaggagagagaggccagccccgtggagttcgccatcgaccccaacgagcccacctactgcctgtgcaaccaggtgagctacggcgagatgatcggctgcgacaacgagcagtgccccatcgagtggttccacttcagctgcgtgagcctgacctacaagcccaagggcaagtggtactgccccaagtgcagaggcgacaacgagaagaccatggacaagagcaccgagaagaccaagaaggacagaagaagcagatag

SEQ ID NO: 85156 - DNA, 723 bp, synthetic construct
  misc_feature 1..723: note = Description of Artificial Sequence: Synthetic coding sequence
  source 1..723: mol_type = other DNA
atggaccaggacggcgaccagcagctgggccccagcagaatcctggccccccagaccctgaaggagatcgacgacgtgtacgagaagtacaagaaggaggacgacctgaaccagaagaagagactgcagcagctgctgcagagagccctgatcaacagccaggagctgggcgacgagaagatccagatcgtgacccagatgctggagctggtggagaacagagccagacagatggagctgcacagccagtgcttccaggaccccgccgagagcgagagagccagcgacaaggccaagatggacagcagccagcccgagagaagcagcagaagacccagaagacagagaaccagcgagagcagagacctgtgccacatggccaacggcatcgaggactgcgacgaccagccccccaaggagaagaagagcaagagcgccaagaagaagaagagaagcaaggccaagcaggagagagaggccagccccgtggagttcgccatcgaccccaacgagcccacctactgcctgtgcaaccaggtgagctacggcgagatgatcggctgcgacaacgagcagtgccccatcgagtggttccacttcagctgcgtgagcctgacctacaagcccaagggcaagtggtactgccccaagtgcagaggcgacaacgagaagaccatggacaagagcaccgagaagaccaagaaggacagaagaagcagatag

SEQ ID NO: 85157 - DNA, 1257 bp, synthetic construct
  misc_feature 1..1257: note = Description of Artificial Sequence: Synthetic coding sequence
  source 1..1257: mol_type = other DNA
atgctgtacctggaggactacctggagatgatcgagcagctgcccatggacctgagagacagattcaccgagatgagagagatggacctgcaggtgcagaacgccatggaccagctggagcagagagtgagcgagttcttcatgaacgccaagaagaacaagcccgagtggagagaggagcagatggccagcatcaagaaggactactacaaggccctggaggacgccgacgagaaggtgcagctggccaaccagatctacgacctggtggacagacacctgagaaagctggaccaggagctggccaagttcaagatggagctggaggccgacaacgccggcatcaccgagatcctggagagaagaagcctggagctggacacccccagccagcccgtgaacaaccaccacgcccacagccacacccccgtggagaagagaaagtacaaccccaccagccaccacaccaccaccgaccacatccccgagaagaagttcaagagcgaggccctgctgagcaccctgaccagcgacgccagcaaggagaacaccctgggctgcagaaacaacaacagcaccgccagcagcaacaacgcctacaacgtgaacagcagccagcccctgggcagctacaacatcggcagcctgagcagcggcaccggcgccggcgccatcaccatggccgccgcccaggccgtgcaggccaccgcccagatgaaggagggcagaagaaccagcagcctgaaggccagctacgaggccttcaagaacaacgacttccagctgggcaaggagttcagcatggccagagagaccgtgggctacagcagcagcagcgccctgatgaccaccctgacccagaacgccagcagcagcgccgccgacagcagaagcggcagaaagagcaagaacaacaacaagagcagcagccagcagagcagcagcagcagcagcagcagcagcctgagcagctgcagcagcagcagcaccgtggtgcaggagatcagccagcagaccaccgtggtgcccgagagcgacagcaacagccaggtggactggacctacgaccccaacgagcccagatactgcatctgcaaccaggtgagctacggcgagatggtgggctgcgacaaccaggactgccccatcgagtggttccactacggctgcgtgggcctgaccgaggcccccaagggcaagtggtactgcccccagtgcaccgccgccatgaagagaagaggcagcagacacaagtag

SEQ ID NO: 85158 - DNA, 279 bp, synthetic construct
  misc_feature 1..279: note = Description of Artificial Sequence: Synthetic coding sequence
  source 1..279: mol_type = other DNA
atgctgtacctggaggactacctggagatgatcgagcagctgcccatggacctgagagacagattcaccgagatgagagagatggacctgcaggtgcagaacgccatggaccagctggagcagagagtgagcgagttcttcatgaacgccaagaagaacaagcccgagtggagagaggagcagatggccagcatcaagaaggactactacaaggccctggaggacgccgacgagaaggtgcagctggccaaccagatctacgacctgcagcacttctag

SEQ ID NO: 85159 - DNA, 723 bp, synthetic construct
  misc_feature 1..723: note = Description of Artificial Sequence: Synthetic coding sequence
  source 1..723: mol_type = other DNA
atggccaccgccatgtacctggagcactacctggacagcatcgagaacctgccctgcgagctgcagagaaacttccagctgatgagagagctggaccagagaaccgaggacaagaaggccgagatcgacatcctggccgccgagtacatcagcaccgtgaagaccctgagccccgaccagagagtggagagactgcagaagatccagaacgcctacagcaagtgcaaggagtacagcgacgacaaggtgcagctggccatgcagacctacgagatggtggacaagcacatcagaagactggacgccgacctggccagattcgaggccgacctgaaggacaagatggagggcagcgacttcgagagcagcggcggcagaggcctgaagaagggcagaggccagaaggagaagagaggcagcagaggcagaggcagaagaaccagcgaggaggacacccccaagaagaagaagcacaagggcggcagcgagttcaccgacaccatcctgagcgtgcaccccagcgacgtgctggacatgcccgtggaccccaacgagcccacctactgcctgtgccaccaggtgagctacggcgagatgatcggctgcgacaaccccgactgccccatcgagtggttccacttcgcctgcgtggacctgaccaccaagcccaagggcaagtggttctgccccagatgcgtgcaggagaagagaaagaagaagtag

SEQ ID NO: 85160 - DNA, 681 bp, synthetic construct
  misc_feature 1..681: note = Description of Artificial Sequence: Synthetic coding sequence
  source 1..681: mol_type = other DNA
atggccaccgccatgtacctggagcactacctggacagcatcgagaacctgccctgcgagctgcagagaaacttccagctgatgagagagctggaccagagaaccgaggacaagaaggccgagatcgacatcctggccgccgagtacatcagcaccgtgaagaccctgagccccgaccagagagtggagagactgcagaagatccagaacgcctacagcaagtgcaaggagtacagcgacgacaaggtgcagctggccatgcagacctacgagatggtggacaagcacatcagaagactggacgccgacctggccagattcgaggccgacctgaaggacaagatggagggcagcgacttcgagagcagcggcggcagaggcctgaagaagggcagaggccagaaggagaagagaggcagcagaggcagaggcagaagaaccagcgaggaggacacccccaagaagaagaagcacaagggcggcagcgagttcaccgacaccatcctgagcgtgcaccccagcgacgtgctggacatgcccgtggaccccaacgagcccacctactgcctgtgccaccaggtgagctacggcgagatgatcggctgcgacaaccccgactgccccatcgagtggttccacttcgcctgcgtggacctgaccaccaagcccaagggcaagtag

SEQ ID NO: 85161 - DNA, 2265 bp, synthetic construct
  misc_feature 1..2265: note = Description of Artificial Sequence: Synthetic coding sequence
  source 1..2265: mol_type = other DNA
atgttcagcggcggctgccacagccccggcttcggcagacccagccccgccttccccgcccccggcagccccccccccgcccccagaccctgcagacaggagaccggcgagcagatcgccatcaagcagtgcagacaggagctgagccccagaaacagagagagatggtgcctggagatccagatcatgagaagactgacccaccccaacgtggtggccgccagagacgtgcccgagggcatgcagaacctggcccccaacgacctgcccctgctggccatggagtactgccagggcggcgacctgagaaagtacctgaaccagttcgagaactgctgcggcctgagagagggcgccatcctgaccctgctgagcgacatcgccagcgccctgagatacctgcacgagaacagaatcatccacagagacctgaagcccgagaacatcgtgctgcagcagggcgagcagagactgatccacaagatcatcgacctgggctacgccaaggagctggaccagggcagcctgtgcaccagcttcgtgggcaccctgcagtacctggcccccgagctgctggagcagcagaagtacaccgtgaccgtggactactggagcttcggcaccctggccttcgagtgcatcaccggcttcagacccttcctgcccaactggcagcccgtgcagtggcacagcaaggtgagacagaagagcgaggtggacatcgtggtgagcgaggacctgaacggcaccgtgaagttcagcagcagcctgccctaccccaacaacctgaacagcgtgctggccgagagactggagaagtggctgcagctgatgctgatgtggcaccccagacagagaggcaccgaccccacctacggccccaacggctgcttcaaggccctggacgacatcctgaacctgaagctggtgcacatcctgaacatggtgaccggcaccatccacacctaccccgtgaccgaggacgagagcctgcagagcctgaaggccagaatccagcaggacaccggcatccccgaggaggaccaggagctgctgcaggaggccggcctggccctgatccccgacaagcccgccacccagtgcatcagcgacggcaagctgaacgagggccacaccctggacatggacctggtgttcctgttcgacaacagcaagatcacctacgagacccagatcagccccagaccccagcccgagagcgtgagctgcatcctgcaggagcccaagagaaacctggccttcttccagctgagaaaggtgtggggccaggtgtggcacagcatccagaccctgaaggaggactgcaacagactgcagcagggccagagagccgccatgatgaacctgctgagaaacaacagctgcctgagcaagatgaagaacagcatggccagcatgagccagcagctgaaggccaagctggacttcttcaagaccagcatccagatcgacctggagaagtacagcgagcagaccgagttcggcatcaccagcgacaagctgctgctggcctggagagagatggagcaggccgtggagctgtgcggcagagagaacgaggtgaagctgctggtggagagaatgatggccctgcagaccgacatcgtggacctgcagagaagccccatgggcagaaagcagggcggcaccctggacgacctggaggagcaggccagagagctgtacagaagactgagagagaagcccagagaccagagaaccgagggcgacagccaggagatggtgagactgctgctgcaggccatccagagcttcgagaagaaggtgagagtgatctacacccagctgagcaagaccgtggtgtgcaagcagaaggccctggagctgctgcccaaggtggaggaggtggtgagcctgatgaacgaggacgagaagaccgtggtgagactgcaggagaagagacagaaggagctgtggaacctgctgaagatcgcctgcagcaaggtgagaggccccgtgagcggcagccccgacagcatgaacgccagcagactgagccagcccggccagctgatgagccagcccagcaccgccagcaacagcctgcccgagcccgccaagaagagcgaggagctggtggccgaggcccacaacctgtgcaccctgctggagaacgccatccaggacaccgtgagagagcaggaccagagcttcaccgccctggactggagctggctgcagaccgaggaggaggagcacagctgcctggagcaggccagctag

SEQ ID NO: 85162 - DNA, 963 bp, synthetic construct
  misc_feature 1..963: note = Description of Artificial Sequence: Synthetic coding sequence
  source 1..963: mol_type = other DNA
atgaacagacacctgtggaagagccagctgtgcgagatggtgcagcccagcggcggccccgccgccgaccaggacgtgctgggcgaggagagccccctgggcaagcccgccatgctgcacctgcccagcgagcagggcgcccccgagaccctgcagagatgcctggaggagaaccaggagctgagagacgccatcagacagagcaaccagatcctgagagagagatgcgaggagctgctgcacttccaggccagccagagagaggagaaggagttcctgatgtgcaagttccaggaggccagaaagctggtggagagactgggcctggagaagctggacctgaagagacagaaggagcaggccctgagagaggtggagcacctgaagagatgccagcagcagatggccgaggacaaggccagcgtgaaggcccaggtgaccagcctgctgggcgagctgcaggagagccagagcagactggaggccgccaccaaggagtgccaggccctggagggcagaagaaagctggcccagctgcaggtggcctaccaccagctgttccaggagtacgacaaccacatcaagagcagcgtggtgggcagcgagagaaagagagccgacatctacaaggccgacttccaggccgagagacaggccagagagaagctggccgagaagaaggagctgctgcaggagcagctggagcagctgcagagagagtacagcaagctgaaggccagctgccaggagagcgccagaatcgaggacatgagaaagagacacgtggaggtgagccaggcccccctgccccccgcccccgcctacctgagcagccccctggccctgcccagccagagaagaagcccccccgaggagccccccgacttctgctgccccaagtgccagtaccaggcccccgacatggacaccctgcagatccacgtgatggagtgcatcgagtag

SEQ ID NO: 85163 - DNA, 1602 bp, synthetic construct
  misc_feature 1..1602: note = Description of Artificial Sequence: Synthetic coding sequence
  source 1..1602: mol_type = other DNA
atgagcagcgacggcaccatcagacacagcaaggtgagacagaagagcgaggtggacatcgtggtgagcgaggacctgaacggcaccgtgaagttcagcagcagcctgccctaccccaacaacctgaacagcgtgctggccgagagactggagaagtggctgcagctgatgctgatgtggcaccccagacagagaggcaccgaccccacctacggccccaacggctgcttcaaggccctggacgacatcctgaacctgaagctggtgcacatcctgaacatggtgaccggcaccatccacacctaccccgtgaccgaggacgagagcctgcagagcctgaaggccagaatccagcaggacaccggcatccccgaggaggaccaggagctgctgcaggaggccggcctggccctgatccccgacaagcccgccacccagtgcatcagcgacggcaagctgaacgagggccacaccctggacatggacctggtgttcctgttcgacaacagcaagatcacctacgagacccagatcagccccagaccccagcccgagagcgtgagctgcatcctgcaggagcccaagagaaacctggccttcttccagctgagaaaggtgtggggccaggtgtggcacagcatccagaccctgaaggaggactgcaacagactgcagcagggccagagagccgccatgatgaacctgctgagaaacaacagctgcctgagcaagatgaagaacagcatggccagcatgagccagcagctgaaggccaagctggacttcttcaagaccagcatccagatcgacctggagaagtacagcgagcagaccgagttcggcatcaccagcgacaagctgctgctggcctggagagagatggagcaggccgtggagctgtgcggcagagagaacgaggtgaagctgctggtggagagaatgatggccctgcagaccgacatcgtggacctgcagagaagccccatgggcagaaagcagggcggcaccctggacgacctggaggagcaggccagagagctgtacagaagactgagagagaagcccagagaccagagaaccgagggcgacagccaggagatggtgagactgctgctgcaggccatccagagcttcgagaagaaggtgagagtgatctacacccagctgagcaagaccgtggtgtgcaagcagaaggccctggagctgctgcccaaggtggaggaggtggtgagcctgatgaacgaggacgagaagaccgtggtgagactgcaggagaagagacagaaggagctgtggaacctgctgaagatcgcctgcagcaaggtgagaggccccgtgagcggcagccccgacagcatgaacgccagcagactgagccagcccggccagctgatgagccagcccagcaccgccagcaacagcctgcccgagcccgccaagaagagcgaggagctggtggccgaggcccacaacctgtgcaccctgctggagaacgccatccaggacaccgtgagagagcaggaccagagcttcaccgccctggactggagctggctgcagaccgaggaggaggagcacagctgcctggagcaggccagctag

SEQ ID NO: 85164 - DNA, 2094 bp, synthetic construct
  misc_feature 1..2094: note = Description of Artificial Sequence: Synthetic coding sequence
  source 1..2094: mol_type = other DNA
atgagcagcgacggcaccatcagactgacccaccccaacgtggtggccgccagagacgtgcccgagggcatgcagaacctggcccccaacgacctgcccctgctggccatggagtactgccagggcggcgacctgagaaagtacctgaaccagttcgagaactgctgcggcctgagagagggcgccatcctgaccctgctgagcgacatcgccagcgccctgagatacctgcacgagaacagaatcatccacagagacctgaagcccgagaacatcgtgctgcagcagggcgagcagagactgatccacaagatcatcgacctgggctacgccaaggagctggaccagggcagcctgtgcaccagcttcgtgggcaccctgcagtacctggcccccgagctgctggagcagcagaagtacaccgtgaccgtggactactggagcttcggcaccctggccttcgagtgcatcaccggcttcagacccttcctgcccaactggcagcccgtgcagtggcacagcaaggtgagacagaagagcgaggtggacatcgtggtgagcgaggacctgaacggcaccgtgaagttcagcagcagcctgccctaccccaacaacctgaacagcgtgctggccgagagactggagaagtggctgcagctgatgctgatgtggcaccccagacagagaggcaccgaccccacctacggccccaacggctgcttcaaggccctggacgacatcctgaacctgaagctggtgcacatcctgaacatggtgaccggcaccatccacacctaccccgtgaccgaggacgagagcctgcagagcctgaaggccagaatccagcaggacaccggcatccccgaggaggaccaggagctgctgcaggaggccggcctggccctgatccccgacaagcccgccacccagtgcatcagcgacggcaagctgaacgagggccacaccctggacatggacctggtgttcctgttcgacaacagcaagatcacctacgagacccagatcagccccagaccccagcccgagagcgtgagctgcatcctgcaggagcccaagagaaacctggccttcttccagctgagaaaggtgtggggccaggtgtggcacagcatccagaccctgaaggaggactgcaacagactgcagcagggccagagagccgccatgatgaacctgctgagaaacaacagctgcctgagcaagatgaagaacagcatggccagcatgagccagcagctgaaggccaagctggacttcttcaagaccagcatccagatcgacctggagaagtacagcgagcagaccgagttcggcatcaccagcgacaagctgctgctggcctggagagagatggagcaggccgtggagctgtgcggcagagagaacgaggtgaagctgctggtggagagaatgatggccctgcagaccgacatcgtggacctgcagagaagccccatgggcagaaagcagggcggcaccctggacgacctggaggagcaggccagagagctgtacagaagactgagagagaagcccagagaccagagaaccgagggcgacagccaggagatggtgagactgctgctgcaggccatccagagcttcgagaagaaggtgagagtgatctacacccagctgagcaagaccgtggtgtgcaagcagaaggccctggagctgctgcccaaggtggaggaggtggtgagcctgatgaacgaggacgagaagaccgtggtgagactgcaggagaagagacagaaggagctgtggaacctgctgaagatcgcctgcagcaaggtgagaggccccgtgagcggcagccccgacagcatgaacgccagcagactgagccagcccggccagctgatgagccagcccagcaccgccagcaacagcctgcccgagcccgccaagaagagcgaggagctggtggccgaggcccacaacctgtgcaccctgctggagaacgccatccaggacaccgtgagagagcaggaccagagcttcaccgccctggactggagctggctgcagaccgaggaggaggagcacagctgcctggagcaggccagctag

SEQ ID NO: 85165 - DNA, 2271 bp, synthetic construct
  misc_feature 1..2271: note = Description of Artificial Sequence: Synthetic coding sequence
  source 1..2271: mol_type = other DNA
atgagctggagccccagcctgaccacccagacctgcggcgcctgggagatgaaggagagactgggcaccggcggcttcggcaacgtgatcagatggcacaaccaggagaccggcgagcagatcgccatcaagcagtgcagacaggagctgagccccagaaacagagagagatggtgcctggagatccagatcatgagaagactgacccaccccaacgtggtggccgccagagacgtgcccgagggcatgcagaacctggcccccaacgacctgcccctgctggccatggagtactgccagggcggcgacctgagaaagtacctgaaccagttcgagaactgctgcggcctgagagagggcgccatcctgaccctgctgagcgacatcgccagcgccctgagatacctgcacgagaacagaatcatccacagagacctgaagcccgagaacatcgtgctgcagcagggcgagcagagactgatccacaagatcatcgacctgggctacgccaaggagctggaccagggcagcctgtgcaccagcttcgtgggcaccctgcagtacctggcccccgagctgctggagcagcagaagtacaccgtgaccgtggactactggagcttcggcaccctggccttcgagtgcatcaccggcttcagacccttcctgcccaactggcagcccgtgcagtggcacagcaaggtgagacagaagagcgaggtggacatcgtggtgagcgaggacctgaacggcaccgtgaagttcagcagcagcctgccctaccccaacaacctgaacagcgtgctggccgagagactggagaagtggctgcagctgatgctgatgtggcaccccagacagagaggcaccgaccccacctacggccccaacggctgcttcaaggccctggacgacatcctgaacctgaagctggtgcacatcctgaacatggtgaccggcaccatccacacctaccccgtgaccgaggacgagagcctgcagagcctgaaggccagaatccagcaggacaccggcatccccgaggaggaccaggagctgctgcaggaggccggcctggccctgatccccgacaagcccgccacccagtgcatcagcgacggcaagctgaacgagggccacaccctggacatggacctggtgttcctgttcgacaacagcaagatcacctacgagacccagatcagccccagaccccagcccgagagcgtgagctgcatcctgcaggagcccaagagaaacctggccttcttccagctgagaaaggtgtggggccaggtgtggcacagcatccagaccctgaaggaggactgcaacagactgcagcagggccagagagccgccatgatgaacctgctgagaaacaacagctgcctgagcaagatgaagaacagcatggccagcatgagccagcagctgaaggccaagctggacttcttcaagaccagcatccagatcgacctggagaagtacagcgagcagaccgagttcggcatcaccagcgacaagctgctgctggcctggagagagatggagcaggccgtggagctgtgcggcagagagaacgaggtgaagctgctggtggagagaatgatggccctgcagaccgacatcgtggacctgcagagaagccccatgggcagaaagcagggcggcaccctggacgacctggaggagcaggccagagagctgtacagaagactgagagagaagcccagagaccagagaaccgagggcgacagccaggagatggtgagactgctgctgcaggccatccagagcttcgagaagaaggtgagagtgatctacacccagctgagcaagaccgtggtgtgcaagcagaaggccctggagctgctgcccaaggtggaggaggtggtgagcctgatgaacgaggacgagaagaccgtggtgagactgcaggagaagagacagaaggagctgtggaacctgctgaagatcgcctgcagcaaggtgagaggccccgtgagcggcagccccgacagcatgaacgccagcagactgagccagcccggccagctgatgagccagcccagcaccgccagcaacagcctgcccgagcccgccaagaagagcgaggagctggtggccgaggcccacaacctgtgcaccctgctggagaacgccatccaggacaccgtgagagagcaggaccagagcttcaccgccctggactggagctggctgcagaccgaggaggaggagcacagctgcctggagcaggccagctag

SEQ ID NO: 85166 - DNA, 3999 bp, synthetic construct
  misc_feature 1..3999: note = Description of Artificial Sequence: Synthetic coding sequence
  source 1..3999: mol_type = other DNA
atgagaaacctgaagctgttcagaaccctggagttcagagacatccagggccccggcaacccccagtgcttcagcctgagaaccgagcagggcaccgtgctgatcggcagcgagcacggcctgatcgaggtggaccccgtgagcagagaggtgaagaacgaggtgagcctggtggccgagggcttcctgcccgaggacggcagcggcagaatcgtgggcgtgcaggacctgctggaccaggagagcgtgtgcgtggccaccgccagcggcgacgtgatcctgtgcagcctgagcacccagcagctggagtgcgtgggcagcgtggccagcggcatcagcgtgatgagctggagccccgaccaggagctggtgctgctggccaccggccagcagaccctgatcatgatgaccaaggacttcgagcccatcctggagcagcagatccaccaggacgacttcggcgagagcaagttcatcaccgtgggctggggcagaaaggagacccagttccacggcagcgagggcagacaggccgccttccagatgcagatgcacgagagcgccctgccctgggacgaccacagaccccaggtgacctggagaggcgacggccagttcttcgccgtgagcgtggtgtgccccgagaccggcgccagaaaggtgagagtgtggaacagagagttcgccctgcagagcaccagcgagcccgtggccggcctgggccccgccctggcctggaagcccagcggcagcctgatcgccagcacccaggacaagcccaaccagcaggacatcgtgttcttcgagaagaacggcctgctgcacggccacttcaccctgcccttcctgaaggacgaggtgaaggtgaacgacctgctgtggaacgccgacagcagcgtgctggccgtgtggctggaggacctgcagagagaggagagcagcatccccaagacctgcgtgcagctgtggaccgtgggcaactaccactggtacctgaagcagagcctgagcttcagcacctgcggcaagagcaagatcgtgagcctgatgtgggaccccgtgaccccctacagactgcacgtgctgtgccagggctggcactacctggcctacgactggcactggaccaccgacagaagcgtgggcgacaacagcagcgacctgagcaacgtggccgtgatcgacggcaacagagtgctggtgaccgtgttcagacagaccgtggtgcccccccccatgtgcacctaccagctgctgttcccccaccccgtgaaccaggtgaccttcctggcccacccccagaagagcaacgacctggccgtgctggacgccagcaaccagatcagcgtgtacaagtgcggcgactgccccagcgccgaccccaccgtgaagctgggcgccgtgggcggcagcggcttcaaggtgtgcctgagaaccccccacctggagaagagatacaagatccagttcgagaacaacgaggaccaggacgtgaaccccctgaagctgggcctgctgacctggatcgaggaggacgtgttcctggccgtgagccacagcgagttcagccccagaagcgtgatccaccacctgaccgccgccagcagcgagatggacgaggagcacggccagctgaacgtgagcagcagcgccgccgtggacggcgtgatcatcagcctgtgctgcaacagcaagaccaagagcgtggtgctgcagctggccgacggccagatcttcaagtacctgtgggagagccccagcctggccatcaagccctggaagaacagcggcggcttccccgtgagattcccctacccctgcacccagaccgagctggccatgatcggcgaggaggagtgcgtgctgggcctgaccgacagatgcagattcttcatcaacgacatcgaggtggccagcaacatcaccagcttcgccgtgtacgacgagttcctgctgctgaccacccacagccacacctgccagtgcttctgcctgagagacgccagcttcaagaccctgcaggccggcctgagcagcaaccacgtgagccacggcgaggtgctgagaaaggtggagagaggcagcagaatcgtgaccgtggtgccccaggacaccaagctggtgctgcagatgcccagaggcaacctggaggtggtgcaccacagagccctggtgctggcccagatcagaaagtggctggacaagctgatgttcaaggaggccttcgagtgcatgagaaagctgagaatcaacctgaacctgatctacgaccacaaccccaaggtgttcctgggcaacgtggagaccttcatcaagcagatcgacagcgtgaaccacatcaacctgttcttcaccgagctgaaggaggaggacgtgaccaagaccatgtaccccgcccccgtgaccagcagcgtgtacctgagcagagaccccgacggcaacaagatcgacctggtgtgcgacgccatgagagccgtgatggagagcatcaacccccacaagtactgcctgagcatcctgaccagccacgtgaagaagaccacccccgagctggagatcgtgctgcagaaggtgcacgagctgcagggcaacgcccccagcgaccccgacgccgtgagcgccgaggaggccctgaagtacctgctgcacctggtggacgtgaacgagctgtacgaccacagcctgggcacctacgacttcgacctggtgctgatggtggccgagaagagccagaaggaccccaaggagtacctgcccttcctgaacaccctgaagaagatggagaccaactaccagagattcaccatcgacaagtacctgaagagatacgagaaggccatcggccacctgagcaagtgcggccccgagtacttccccgagtgcctgaacctgatcaaggacaagaacctgtacaacgaggccctgaagctgtacagccccagcagccagcagtaccaggacatcagcatcgcctacggcgagcacctgatgcaggagcacatgtacgagcccgccggcctgatgttcgccagatgcggcgcccacgagaaggccctgagcgccttcctgacctgcggcaactggaagcaggccctgtgcgtggccgcccagctgaacttcaccaaggaccagctggtgggcctgggcagaaccctggccggcaagctggtggagcagagaaagcacatcgacgccgccatggtgctggaggagtgcgcccaggactacgaggaggccgtgctgctgctgctggagggcgccgcctgggaggaggccctgagactggtgtacaagtacaacagactggacatcatcgagaccaacgtgaagcccagcatcctggaggcccagaagaactacatggccttcctggacagccagaccgccaccttcagcagacacaagaagagactgctggtggtgagagagctgaaggagcaggcccagcaggccggcctggacgacgaggtgccccacggccaggagagcgacctgttcagcgagaccagcagcgtggtgagcggcagcgagatgagcggcaagtacagccacagcaacagcagaatcagcgccagaagcagcaagaacagaagaaaggccgagagaaagaagcacagcctgaaggagggcagccccctggaggacctggccctgctggaggccctgagcgaggtggtgcagaacaccgagaacctgaaggacgaggtgtaccacatcctgaaggtgctgttcctgttcgagttcgacgagcagggcagagagctgcagaaggccttcgaggacaccctgcagctgatggagagaagcctgcccgagatctggaccctgacctaccagcagaacagcgccacccccgtgctgggccccaacagcaccgccaacagcatcatggccagctaccagcagcagaagaccagcgtgcccgtgctggacgccgagctgttcatcccccccaagatcaacagaagaacccagtggaagctgagcctgctggactag

SEQ ID NO: 85167 - DNA, 2952 bp, synthetic construct
  misc_feature 1..2952: note = Description of Artificial Sequence: Synthetic coding sequence
  source 1..2952: mol_type = other DNA
atgtgggaccccgtgaccccctacagactgcacgtgctgtgccagggctggcactacctggcctacgactggcactggaccaccgacagaagcgtgggcgacaacagcagcgacctgagcaacgtggccgtgatcgacggcaacagagtgctggtgaccgtgttcagacagaccgtggtgcccccccccatgtgcacctaccagctgctgttcccccaccccgtgaaccaggtgaccttcctggcccacccccagaagagcaacgacctggccgtgctggacgccagcaaccagatcagcgtgtacaagtgcggcgactgccccagcgccgaccccaccgtgaagctgggcgccgtgggcggcagcggcttcaaggtgtgcctgagaaccccccacctggagaagagatacaagatccagttcgagaacaacgaggaccaggacgtgaaccccctgaagctgggcctgctgacctggatcgaggaggacgtgttcctggccgtgagccacagcgagttcagccccagaagcgtgatccaccacctgaccgccgccagcagcgagatggacgaggagcacggccagctgaacgtgagcagcagcgccgccgtggacggcgtgatcatcagcctgtgctgcaacagcaagaccaagagcgtggtgctgcagctggccgacggccagatcttcaagtacctgtgggagagccccagcctggccatcaagccctggaagaacagcggcggcttccccgtgagattcccctacccctgcacccagaccgagctggccatgatcggcgaggaggagtgcgtgctgggcctgaccgacagatgcagattcttcatcaacgacatcgaggtggccagcaacatcaccagcttcgccgtgtacgacgagttcctgctgctgaccacccacagccacacctgccagtgcttctgcctgagagacgccagcttcaagaccctgcaggccggcctgagcagcaaccacgtgagccacggcgaggtgctgagaaaggtggagagaggcagcagaatcgtgaccgtggtgccccaggacaccaagctggtgctgcagatgcccagaggcaacctggaggtggtgcaccacagagccctggtgctggcccagatcagaaagtggctggacaagctgatgttcaaggaggccttcgagtgcatgagaaagctgagaatcaacctgaacctgatctacgaccacaaccccaaggtgttcctgggcaacgtggagaccttcatcaagcagatcgacagcgtgaaccacatcaacctgttcttcaccgagctgaaggaggaggacgtgaccaagaccatgtaccccgcccccgtgaccagcagcgtgtacctgagcagagaccccgacggcaacaagatcgacctggtgtgcgacgccatgagagccgtgatggagagcatcaacccccacaagtactgcctgagcatcctgaccagccacgtgaagaagaccacccccgagctggagatcgtgctgcagaaggtgcacgagctgcagggcaacgcccccagcgaccccgacgccgtgagcgccgaggaggccctgaagtacctgctgcacctggtggacgtgaacgagctgtacgaccacagcctgggcacctacgacttcgacctggtgctgatggtggccgagaagagccagaaggaccccaaggagtacctgcccttcctgaacaccctgaagaagatggagaccaactaccagagattcaccatcgacaagtacctgaagagatacgagaaggccatcggccacctgagcaagtgcggccccgagtacttccccgagtgcctgaacctgatcaaggacaagaacctgtacaacgaggccctgaagctgtacagccccagcagccagcagtaccaggacatcagcatcgcctacggcgagcacctgatgcaggagcacatgtacgagcccgccggcctgatgttcgccagatgcggcgcccacgagaaggccctgagcgccttcctgacctgcggcaactggaagcaggccctgtgcgtggccgcccagctgaacttcaccaaggaccagctggtgggcctgggcagaaccctggccggcaagctggtggagcagagaaagcacatcgacgccgccatggtgctggaggagtgcgcccaggactacgaggaggccgtgctgctgctgctggagggcgccgcctgggaggaggccctgagactggtgtacaagtacaacagactggacatcatcgagaccaacgtgaagcccagcatcctggaggcccagaagaactacatggccttcctggacagccagaccgccaccttcagcagacacaagaagagactgctggtggtgagagagctgaaggagcaggcccagcaggccggcctggacgacgaggtgccccacggccaggagagcgacctgttcagcgagaccagcagcgtggtgagcggcagcgagatgagcggcaagtacagccacagcaacagcagaatcagcgccagaagcagcaagaacagaagaaaggccgagagaaagaagcacagcctgaaggagggcagccccctggaggacctggccctgctggaggccctgagcgaggtggtgcagaacaccgagaacctgaaggacgaggtgtaccacatcctgaaggtgctgttcctgttcgagttcgacgagcagggcagagagctgcagaaggccttcgaggacaccctgcagctgatggagagaagcctgcccgagatctggaccctgacctaccagcagaacagcgccacccccgtgctgggccccaacagcaccgccaacagcatcatggccagctaccagcagcagaagaccagcgtgcccgtgctggacgccgagctgttcatcccccccaagatcaacagaagaacccagtggaagctgagcctgctggactag

SEQ ID NO: 85168 - DNA, 2151 bp, synthetic construct
  misc_feature 1..2151: note = Description of Artificial Sequence: Synthetic coding sequence
  source 1..2151: mol_type = other DNA
atgcagagcaccgccaactacctgtggcacaccgacgacctgctgggccagggcgccaccgccagcgtgtacaaggccagaaacaagaagagcggcgagctggtggccgtgaaggtgttcaacaccaccagctacctgagacccagagaggtgcaggtgagagagttcgaggtgctgagaaagctgaaccaccagaacatcgtgaagctgttcgccgtggaggagaccggcggcagcagacagaaggtgctggtgatggagtactgcagcagcggcagcctgctgagcgtgctggagagccccgagaacgccttcggcctgcccgaggacgagttcctggtggtgctgagatgcgtggtggccggcatgaaccacctgagagagaacggcatcgtgcacagagacatcaagcccggcaacatcatgagactggtgggcgaggagggccagagcatctacaagctgaccgacttcggcgccgccagagagctggacgacgacgagaagttcgtgagcgtgtacggcaccgaggagtacctgcaccccgacatgtacgagagagccgtgctgagaaagccccagcagaaggccttcggcgtgaccgtggacctgtggagcatcggcgtgaccctgtaccacgccgccaccggcagcctgcccttcatccccttcggcggccccagaagaaacaaggagatcatgtacagaatcaccaccgagaagcccgccggcgccatcgccggcgcccagagaagagagaacggccccctggagtggagctacaccctgcccatcacctgccagctgagcctgggcctgcagagccagctggtgcccatcctggccaacatcctggaggtggagcaggccaagtgctggggcttcgaccagttcttcgccgagaccagcgacatcctgcagagagtggtggtgcacgtgttcagcctgagccaggccgtgctgcaccacatctacatccacgcccacaacaccatcgccatcttccaggaggccgtgcacaagcagaccagcgtggcccccagacaccaggagtacctgttcgagggccacctgtgcgtgctggagcccagcgtgagcgcccagcacatcgcccacaccaccgccagcagccccctgaccctgttcagcaccgccatccccaagggcctggccttcagagaccccgccctggacgtgcccaagttcgtgcccaaggtggacctgcaggccgactacaacaccgccaagggcgtgctgggcgccggctaccaggccctgagactggccagagccctgctggacggccaggagctgatgttcagaggcctgcactgggtgatggaggtgctgcaggccacctgcagaagaaccctggaggtggccagaaccagcctgctgtacctgagcagcagcctgggcaccgagagattcagcagcgtggccggcacccccgagatccaggagctgaaggccgccgccgagctgagaagcagactgagaaccctggccgaggtgctgagcagatgcagccagaacatcaccgagacccaggagagcctgagcagcctgaacagagagctggtgaagagcagagaccaggtgcacgaggacagaagcatccagcagatccagtgctgcctggacaagatgaacttcatctacaagcagttcaagaagagcagaatgagacccggcctgggctacaacgaggagcagatccacaagctggacaaggtgaacttcagccacctggccaagagactgctgcaggtgttccaggaggagtgcgtgcagaagtaccaggccagcctggtgacccacggcaagagaatgagagtggtgcacgagaccagaaaccacctgagactggtgggctgcagcgtggccgcctgcaacaccgaggcccagggcgtgcaggagagcctgagcaagctgctggaggagctgagccaccagctgctgcaggacagagccaagggcgcccaggccagccccccccccatcgccccctaccccagccccaccagaaaggacctgctgctgcacatgcaggagctgtgcgagggcatgaagctgctggccagcgacctgctggacaacaacagaatcatcgagagactgaacagagtgcccgccccccccgacgtgtag

SEQ ID NO: 85169 - DNA, 1896 bp, synthetic construct
  misc_feature 1..1896: note = Description of Artificial Sequence: Synthetic coding sequence
  source 1..1896: mol_type = other DNA
atggagtactgcagcagcggcagcctgctgagcgtgctggagagccccgagaacgccttcggcctgcccgaggacgagttcctggtggtgctgagatgcgtggtggccggcatgaaccacctgagagagaacggcatcgtgcacagagacatcaagcccggcaacatcatgagactggtgggcgaggagggccagagcatctacaagctgaccgacttcggcgccgccagagagctggacgacgacgagaagttcgtgagcgtgtacggcaccgaggagtacctgcaccccgacatgtacgagagagccgtgctgagaaagccccagcagaaggccttcggcgtgaccgtggacctgtggagcatcggcgtgaccctgtaccacgccgccaccggcagcctgcccttcatccccttcggcggccccagaagaaacaaggagatcatgtacagaatcaccaccgagaagcccgccggcgccatcgccggcgcccagagaagagagaacggccccctggagtggagctacaccctgcccatcacctgccagctgagcctgggcctgcagagccagctggtgcccatcctggccaacatcctggaggtggagcaggccaagtgctggggcttcgaccagttcttcgccgagaccagcgacatcctgcagagagtggtggtgcacgtgttcagcctgagccaggccgtgctgcaccacatctacatccacgcccacaacaccatcgccatcttccaggaggccgtgcacaagcagaccagcgtggcccccagacaccaggagtacctgttcgagggccacctgtgcgtgctggagcccagcgtgagcgcccagcacatcgcccacaccaccgccagcagccccctgaccctgttcagcaccgccatccccaagggcctggccttcagagaccccgccctggacgtgcccaagttcgtgcccaaggtggacctgcaggccgactacaacaccgccaagggcgtgctgggcgccggctaccaggccctgagactggccagagccctgctggacggccaggagctgatgttcagaggcctgcactgggtgatggaggtgctgcaggccacctgcagaagaaccctggaggtggccagaaccagcctgctgtacctgagcagcagcctgggcaccgagagattcagcagcgtggccggcacccccgagatccaggagctgaaggccgccgccgagctgagaagcagactgagaaccctggccgaggtgctgagcagatgcagccagaacatcaccgagacccaggagagcctgagcagcctgaacagagagctggtgaagagcagagaccaggtgcacgaggacagaagcatccagcagatccagtgctgcctggacaagatgaacttcatctacaagcagttcaagaagagcagaatgagacccggcctgggctacaacgaggagcagatccacaagctggacaaggtgaacttcagccacctggccaagagactgctgcaggtgttccaggaggagtgcgtgcagaagtaccaggccagcctggtgacccacggcaagagaatgagagtggtgcacgagaccagaaaccacctgagactggtgggctgcagcgtggccgcctgcaacaccgaggcccagggcgtgcaggagagcctgagcaagctgctggaggagctgagccaccagctgctgcaggacagagccaagggcgcccaggccagccccccccccatcgccccctaccccagccccaccagaaaggacctgctgctgcacatgcaggagctgtgcgagggcatgaagctgctggccagcgacctgctggacaacaacagaatcatcgagagactgaacagagtgcccgccccccccgacgtgtag

SEQ ID NO: 85170 - DNA, 1107 bp, synthetic construct
  misc_feature 1..1107: note = Description of Artificial Sequence: Synthetic coding sequence
  source 1..1107: mol_type = other DNA
atgaacagacacctgtggaagagccagctgtgcgagatggtgcagcccagcggcggccccgccgccgaccaggacgtgctgggcgaggagagccccctgggcaagcccgccatgctgcacctgcccagcgagcagggcgcccccgagaccctgcagagatgcctggaggagaaccaggagctgagagacgccatcagacagagcaaccagatcctgagagagagatgcgaggagctgctgcacttccaggccagccagagagaggagaaggagttcctgatgtgcaagttccaggaggccagaaagctggtggagagactgggcctggagaagctggacctgaagagacagaaggagcaggccctgagagaggtggagcacctgaagagatgccagcagcagatggccgaggacaaggccagcgtgaaggcccaggtgaccagcctgctgggcgagctgcaggagagccagagcagactggaggccgccaccaaggagtgccaggccctggagggcagaagaaagctggcccagctgcaggtggcctaccaccagctgttccaggagtacgacaaccacatcaagagcagcgtggtgggcagcgagagaaagagaggcatgcagctggaggacctgaagcagcagctgcagcaggccgaggaggccctggtggccaagcaggaggtgatcgacaagctgaaggaggaggccgagcagcacaagatcgtgatggagaccgtgcccgtgctgaaggcccaggccgacatctacaaggccgacttccaggccgagagacaggccagagagaagctggccgagaagaaggagctgctgcaggagcagctggagcagctgcagagagagtacagcaagctgaaggccagctgccaggagagcgccagaatcgaggacatgagaaagagacacgtggaggtgagccaggcccccctgccccccgcccccgcctacctgagcagccccctggccctgcccagccagagaagaagcccccccgaggagccccccgacttctgctgccccaagtgccagtaccaggcccccgacatggacaccctgcagatccacgtgatggagtgcatcgagtag

SEQ ID NO: 85171 - DNA, 1260 bp, synthetic construct
  misc_feature 1..1260: note = Description of Artificial Sequence: Synthetic coding sequence
  source 1..1260: mol_type = other DNA
atgaacagacacctgtggaagagccagctgtgcgagatggtgcagcccagcggcggccccgccgccgaccaggacgtgctgggcgaggagagccccctgggcaagcccgccatgctgcacctgcccagcgagcagggcgcccccgagaccctgcagagatgcctggaggagaaccaggagctgagagacgccatcagacagagcaaccagatcctgagagagagatgcgaggagctgctgcacttccaggccagccagagagaggagaaggagttcctgatgtgcaagttccaggaggccagaaagctggtggagagactgggcctggagaagctggacctgaagagacagaaggagcaggccctgagagaggtggagcacctgaagagatgccagcagcagatggccgaggacaaggccagcgtgaaggcccaggtgaccagcctgctgggcgagctgcaggagagccagagcagactggaggccgccaccaaggagtgccaggccctggagggcagagccagagccgccagcgagcaggccagacagctggagagcgagagagaggccctgcagcagcagcacagcgtgcaggtggaccagctgagaatgcagggccagagcgtggaggccgccctgagaatggagagacaggccgccagcgaggagaagagaaagctggcccagctgcaggtggcctaccaccagctgttccaggagtacgacaaccacatcaagagcagcgtggtgggcagcgagagaaagagaggcatgcagctggaggacctgaagcagcagctgcagcaggccgaggaggccctggtggccaagcaggaggtgatcgacaagctgaaggaggaggccgagcagcacaagatcgtgatggagaccgtgcccgtgctgaaggcccaggccgacatctacaaggccgacttccaggccgagagacaggccagagagaagctggccgagaagaaggagctgctgcaggagcagctggagcagctgcagagagagtacagcaagctgaaggccagctgccaggagagcgccagaatcgaggacatgagaaagagacacgtggaggtgagccaggcccccctgccccccgcccccgcctacctgagcagccccctggccctgcccagccagagaagaagcccccccgaggagccccccgacttctgctgccccaagtgccagtaccaggcccccgacatggacaccctgcagatccacgtgatggagtgcatcgagtag

SEQ ID NO: 85172 - DNA, 1260 bp, synthetic construct; identical to SEQ ID NO: 85171
  misc_feature 1..1260: note = Description of Artificial Sequence: Synthetic coding sequence
  source 1..1260: mol_type = other DNA

SEQ ID NO: 85173 - DNA, 1260 bp, synthetic construct; identical to SEQ ID NO: 85171
  misc_feature 1..1260: note = Description of Artificial Sequence: Synthetic coding sequence
  source 1..1260: mol_type = other DNA

SEQ ID NO: 85174 - DNA, 1464 bp, synthetic construct
  misc_feature 1..1464: note = Description of Artificial Sequence: Synthetic coding sequence
  source 1..1464: mol_type = other DNA
atggccctggtgatccaggtgggcaagctgagacccagagaggtgagaaccccccagaccatcaaccccagcctgttccccagcctgcccgtgaagctgagcagcatcatcgaggtgcccagcggcggcgagagatgctgcagcagaagaaccctggtgtacaaggccagagccttctggaagggcgcccccctgccctgctggatgaacagacacctgtggaagagccagctgtgcgagatggtgcagcccagcggcggccccgccgccgaccaggacgtgctgggcgaggagagccccctgggcaagcccgccatgctgcacctgcccagcgagcagggcgcccccgagaccctgcagagatgcctggaggagaaccaggagctgagagacgccatcagacagagcaaccagatcctgagagagagatgcgaggagctgctgcacttccaggccagccagagagaggagaaggagttcctgatgtgcaagttccaggaggccagaaagctggtggagagactgggcctggagaagctggacctgaagagacagaaggagcaggccctgagagaggtggagcacctgaagagatgccagcagcagatggccgaggacaaggccagcgtgaaggcccaggtgaccagcctgctgggcgagctgcaggagagccagagcagactggaggccgccaccaaggagtgccaggccctggagggcagagccagagccgccagcgagcaggccagacagctggagagcgagagagaggccctgcagcagcagcacagcgtgcaggtggaccagctgagaatgcagggccagagcgtggaggccgccctgagaatggagagacaggccgccagcgaggagaagagaaagctggcccagctgcaggtggcctaccaccagctgttccaggagtacgacaaccacatcaagagcagcgtggtgggcagcgagagaaagagaggcatgcagctggaggacctgaagcagcagctgcagcaggccgaggaggccctggtggccaagcaggaggtgatcgacaagctgaaggaggaggccgagcagcacaagatcgtgatggagaccgtgcccgtgctgaaggcccaggccgacatctacaaggccgacttccaggccgagagacaggccagagagaagctggccgagaagaaggagctgctgcaggagcagctggagcagctgcagagagagtacagcaagctgaaggccagctgccaggagagcgccagaatcgaggacatgagaaagagacacgtggaggtgagccaggcccccctgccccccgcccccgcctacctgagcagccccctggccctgcccagccagagaagaagcccccccgaggagccccccgacttctgctgccccaagtgccagtaccaggcccccgacatggacaccctgcagatccacgtgatggagtgcatcgagtag

SEQ ID NO: 85175 - DNA, 621 bp, synthetic construct
  misc_feature 1..621: note = Description of Artificial Sequence: Synthetic coding sequence
  source 1..621: mol_type = other DNA
atgaacagacacctgtggaagagccagctgtgcgagatggtgcagcccagcggcggccccgccgccgaccaggacgtgctgggcgaggagagccccctgggcaagcccgccatgctgcacctgcccagcgagcagggcgcccccgagaccctgcagagatgcctggaggagaaccaggagctgagagacgccatcagacagagcaaccagatcctgagagagagatgcgaggagctgctgcacttccaggccagccagagagaggagaaggagttcctgatgtgcaagttccaggaggccagaaagctggtggagagactgggcctggagaagctggacctgaagagacagaaggagcaggccctgagagaggtggagcacctgaagagatgccagcagcagatggccgaggacaaggccagcgtgaaggcccaggtgaccagcctgctgggcgagctgcaggagagccagagcagactggaggccgccaccaaggagtgccaggccctggagggcagagccagagccgccagcgagcaggccagacagctggagagcgagagagaggccctgcagcagcagcacagcgtgcaggtggaccagctgagaatgcagggctag

SEQ ID NO: 85176 - DNA, 756 bp, synthetic construct
  misc_feature 1..756: note = Description of Artificial Sequence: Synthetic coding sequence
  source 1..756: mol_type = other DNA
atgaacagacacctgtggaagagccagctgtgcgagatggtgcagcccagcggcggccccgccgccgaccaggacgtgctgggcgaggagagccccctgggcaagcccgccatgctgcacctgcccagcgagcagggcgcccccgagaccctgcagagatgcctggaggagaaccaggagctgagagacgccatcagacagagcaaccagatcctgagagagagatgcgaggagctgctgcacttccaggccagccagagagaggagaaggagttcctgatgtgcaagttccaggaggccagaaagctggtggagagactgggcctggagaagctggacctgaagagacagaaggagcaggccctgagagaggtggagcacctgaagagatgccagcagcagatggccgaggacaaggccagcgtgaaggcccaggtgaccagcctgctgggcgagctgcaggagagccagagcagactggaggccgccaccaaggagtgccaggccctggagggcagagccagagccgccagcgagcaggccagacagctggagagcgagagagaggccctgcagcagcagcacagcgtgcaggtggaccagctgagaatgcagggccagagcgtggaggccgccctgagaatggagagacaggccgccagcgaggagaagagaaagctggcccagctgcaggtggcctaccaccagctgttccaggagtacgacaaccacatcaagagcagcgtggtgggctag

SEQ ID NO: 85177 - DNA, 417 bp, synthetic construct
  misc_feature 1..417: note = Description of Artificial Sequence: Synthetic coding sequence
  source 1..417: mol_type = other DNA
atgaacagacacctgtggaagagccagctgtgcgagatggtgcagcccagcggcggccccgccgccgaccaggacgtgctgggcgaggagagccccctgggcaagcccgccatgctgcacctgcccagcgagcagggcgcccccgagaccctgcagagatgcctggaggagaaccaggagctgagagacgccatcagacagagcaaccagatcctgagagagagatgcgaggagctgctgcacttccaggccagccagagagaggagaaggagttcctgatgtgcaagttccaggaggccagaaagctggtggagagactgggcctggagaagctggacctgaagagacagaaggagcaggccctgagagaggtggagcacctgaagagatgccagcagcagatggccgaggactag

SEQ ID NO: 85178 - DNA, 1257 bp, synthetic construct
  misc_feature 1..1257: note = Description of Artificial Sequence: Synthetic coding sequence
  source 1..1257: mol_type = other DNA
atgaacagacacctgtggaagagccagctgtgcgagatggtgcagcccagcggcggccccgccgccgaccaggacgtgctgggcgaggagagccccctgggcaagcccgccatgctgcacctgcccagcgagcagggcgcccccgagaccctgcagagatgcctggaggagaaccaggagctgagagacgccatcagacagagcaaccagatcctgagagagagatgcgaggagctgctgcacttccaggccagccagagagaggagaaggagttcctgatgtgcaagttccaggaggccagaaagctggtggagagactgggcctggagaagctggacctgaagagacagaaggagcaggccctgagagaggtggagcacctgaagagatgccagcagatggccgaggacaaggccagcgtgaaggcccaggtgaccagcctgctgggcgagctgcaggagagccagagcagactggaggccgccaccaaggagtgccaggccctggagggcagagccagagccgccagcgagcaggccagacagctggagagcgagagagaggccctgcagcagcagcacagcgtgcaggtggaccagctgagaatgcagggccagagcgtggaggccgccctgagaatggagagacaggccgccagcgaggagaagagaaagctggcccagctgcaggtggcctaccaccagctgttccaggagtacgacaaccacatcaagagcagcgtggtgggcagcgagagaaagagaggcatgcagctggaggacctgaagcagcagctgcagcaggccgaggaggccctggtggccaagcaggaggtgatcgacaagctgaaggaggaggccgagcagcacaagatcgtgatggagaccgtgcccgtgctgaaggcccaggccgacatctacaaggccgacttccaggccgagagacaggccagagagaagctggccgagaagaaggagctgctgcaggagcagctggagcagctgcagagagagtacagcaagctgaaggccagctgccaggagagcgccagaatcgaggacatgagaaagagacacgtggaggtgagccaggcccccctgccccccgcccccgcctacctgagcagccccctggccctgcccagccagagaagaagcccccccgaggagccccccgacttctgctgccccaagtgccagtaccaggcccccgacatggacaccctgcagatccacgtgatggagtgcatcgagtag

SEQ ID NO: 85179 - DNA, 2181 bp, synthetic construct
  misc_feature 1..2181: note = Description of Artificial Sequence: Synthetic coding sequence
  source 1..2181: mol_type = other DNA
atgctgagagcctgccagctgagcggcgtgaccgccgccgcccagagctgcctgtgcggcaagttcgtgctgagacccctgagaccctgcagaagatacagcaccagcggcagcagcggcctgaccaccggcaagatcgccggcgccggcctgctgttcgtgggcggcggcatcggcggcaccatcctgtacgccaagtgggacagccacttcagagagagcgtggagaagaccatcccctacagcgacaagctgttcgagatggtgctgggccccgccgcctacaacgtgcccctgcccaagaagagcatccagagcggccccctgaagatcagcagcgtgagcgaggtgatgaaggagagcaagcagcccgccagccagctgcagaagcagaagggcgacacccccgccagcgccaccgcccccaccgaggccgcccagatcatcagcgccgccggcgacaccctgagcgtgcccgcccccgccgtgcagcccgaggagagcctgaagaccgaccaccccgagatcggcgagggcaagcccacccccgccctgagcgccctggccaagagcctggaggacgccctgagacagaccgccagcgtgaccctgcaggccatcgccgcccagaacgccgccgtgcaggccgtgaacgcccacagcaacatcctgaaggccgccatggacaacagcgagatcgccggcgagaagaagagcgcccagtggagaaccgtggagggcgccctgaaggagagaagaaaggccgtggacgaggccgccgacgccctgctgaaggccaaggaggagctggagaagatgaagagcgtgatcgagaacgccaagaagaaggaggtggccggcgccaagccccacatcaccgccgccgagggcaagctgcacaacatgatcgtggacctggacaacgtggtgaagaaggtgcaggccgcccagagcgaggccaaggtggtgagccagtaccacgagctggtggtgcaggccagagacgacttcaagagagagctggacagcatcacccccgaggtgctgcccggctggaagggcatgagcgagtacaacctggccgacaagctgagcaccgacgacctgaacagcctgatcgcccacgcccacagaagaatcgaccagctgaacagagagctggccgagcagaaggccaccgagaagcagcacatcaccctggccctggagaagcagaagctggaggagaagagagccttcgacagcgccgtggccaaggccctggagcaccacagaagcgagatccaggccgagcaggacagaaagatcgaggaggtgagagacgccatggagaacgagatgagaacccagctgagaagacaggccgccgcccacaccgaccacctgagagacgtgctgagagtgcaggagcaggagctgaagagcgagttcgagcagaacctgagcgagaagctgagcgagcaggagctgcagttcagaagactgagccaggagcaggtggacaacttcaccctggacatcaacaccgcctacgccagactgagaggcatcgagcaggccgtgcagagccacgccgtggccgaggaggaggccagaaaggcccaccagctgtggctgagcgtggaggccctgaagtacagcatgaagaccagcagcgccgagacccccaccatccccctgggcagcgccgtggaggccatcaaggccaactgcagcgacaacgagttcacccaggccctgaccgccgccatcccccccgagagcctgaccagaggcgtgtacagcgaggagaccctgagagccagattctacgccgtgcagaagctggccagaagagtggccatgatcgacgagaccagaaacagcctgtaccagtacttcctgagctacctgcagagcctgctgctgttccccccccagcagctgaagcccccccccgagctgtgccccgaggacatcaacaccttcaagctgctgagctacgccagctactgcatcgagcacggcgacctggagctggccgccaagttcgtgaaccagctgaagggcgagagcagaagagtggcccaggactggctgaaggaggccagaatgaccctggagaccaagcagatcgtggagatcctgaccgcctacgccagcgccgtgggcatcggcaccacccaggtgcagcccgagtag

SEQ ID NO: 85180 - DNA, 1119 bp, synthetic construct
  misc_feature 1..1119: note = Description of Artificial Sequence: Synthetic coding sequence
  source 1..1119: mol_type = other DNA
atgctgagagcctgccagctgagcggcgtgaccgccgccgcccagagctgcctgtgcggcaagttcgtgctgagacccctgagaccctgcagaagatacagcaccagcggcagcagcggcctgaccaccggcaagatcgccggcgccggcctgctgttcgtgggcggcggcatcggcggcaccatcctgtacgccaagtgggacagccacttcagagagagcgtggagaagaccatcccctacagcgacaagctgttcgagatggtgctgggccccgccgcctacaacgtgcccctgcccaagaagagcatccagagcggccccctgaagatcagcagcgtgagcgaggtgatgaaggagagcaagcagcccgccagccagctgcagaagcagaagggcgacacccccgccagcgccaccgccggcgacaccctgagcgtgcccgcccccgccgtgcagcccgaggagagcctgaagaccgaccaccccgagatcggcgagggcaagcccacccccgccctgagcgaggccagcagcagcagcatcagagagagaccccccgaggaggtggccgccagactggcccagcaggagaagcaggagcaggtgaagatcgagagcctggccaagagcctggaggacgccctgagacagaccgccagcgtgaccctgcaggccatcgccgccatcccccccgagagcctgaccagaggcgtgtacagcgaggagaccctgagagccagattctacgccgtgcagaagctggccagaagagtggccatgatcgacgagaccagaaacagcctgtaccagtacttcctgagctacctgcagagcctgctgctgttccccccccagcagctgaagcccccccccgagctgtgccccgaggacatcaacaccttcaagctgctgagctacgccagctactgcatcgagcacggcgacctggagctggccgccaagttcgtgaaccagctgaagggcgagagcagaagagtggcccaggactggctgaaggaggccagaatgaccctggagaccaagcagatcgtggagatcctgaccgcctacgccagcgccgtgggcatcggcaccacccaggtgcagcccgagtag

SEQ ID NO: 85181 - DNA, 1980 bp, synthetic construct
  misc_feature 1..1980: note = Description of Artificial Sequence: Synthetic coding sequence
  source 1..1980: mol_type = other DNA
atgctgagagcctgccagctgagcggcgtgaccgccgccgcccagagctgcctgtgcggcaagttcgtgctgagacccctgagaccctgcagaagatacagcaccagcggcagcagcggcctgaccaccggcaagatcgccggcgccggcctgctgttcgtgggcggcggcatcggcggcaccatcctgtacgccaagtgggacagccacttcagagagagcgtggagaagaccatcccctacagcgacaagctgttcgagatggtgctgggccccgccgcctacaacgtgcccctgcccaagaagagcatccagagcggccccctgaagatcagcagcgtgagcgaggtgatgaaggagagcaagcagcccgccagccagctgcagaagcagaagggcgacacccccgccagcgccaccgccctggccaagagcctggaggacgccctgagacagaccgccagcgtgaccctgcaggccatcgccgcccagaacgccgccgtgcaggccgtgaacgcccacagcaacatcctgaaggccgccatggacaacagcgagatcgccggcgagaagaagagcgcccagtggagaaccgtggagggcgccctgaaggagagaagaaaggccgtggacgaggccgccgacgccctgctgaaggccaaggaggagctggagaagatgaagagcgtgatcgagaacgccaagaagaaggaggtggccggcgccaagccccacatcaccgccgccgagggcaagctgcacaacatgatcgtggacctggacaacgtggtgcaggccagagacgacttcaagagagagctggacagcatcacccccgaggtgctgcccggctggaagggcatgagcgtgagcgacctggccgacaagctgagcaccgacgacctgaacagcctgatcgcccacgcccacagaagaatcgaccagctgaacagagagctggccgagcagaaggccaccgagaagcagcacatcaccctggccctggagaagcagaagctggaggagaagagagccttcgacagcgccgtggccaaggccctggagcaccacagaagcgagatccaggccgagcaggacagaaagatcgaggaggtgagagacgccatggagaacgagatgagaacccagctgagaagacaggccgccgcccacaccgaccacctgagagacgtgctgagagtgcaggagcaggagctgaagagcgagttcgagcagaacctgagcgagaagctgagcgagcaggagctgcagttcagaagactgagccaggagcaggtggacaacttcaccctggacatcaacaccgcctacgccagactgagaggcatcgagcaggccgtgcagagccacgccgtggccgaggaggaggccagaaaggcccaccagctgtggctgagcgtggaggccctgaagtacagcatgaagaccagcagcgccgagacccccaccatccccctgggcagcgccgtggaggccatcaaggccaactgcagcgacaacgagttcacccaggccctgaccgccgccatcccccccgagagcctgaccagaggcgtgtacagcgaggagaccctgagagccagattctacgccgtgcagaagctggccagaagagtggccatgatcgacgagaccagaaacagcctgtaccagtacttcctgagctacctgcagagcctgctgctgttccccccccagcagctgaagcccccccccgagctgtgccccgaggacatcaacaccttcaagctgctgagctacgccagctactgcatcgagcacggcgacctggagctggccgccaagttcgtgaaccagctgaagggcgagagcagaagagtggcccaggactggctgaaggaggccagaatgaccctggagaccaagcagatcgtggagatcctgaccgcctacgccagcgccgtgggcatcggcaccacccaggtgcagcccgagtag

SEQ ID NO: 85182 - DNA, 2277 bp, synthetic construct
  misc_feature 1..2277: note = Description of Artificial Sequence: Synthetic coding sequence
  source 1..2277: mol_type = other DNA
atgctgagagcctgccagctgagcggcgtgaccgccgccgcccagagctgcctgtgcggcaagttcgtgctgagacccctgagaccctgcagaagatacagcaccagcggcagcagcggcctgaccaccggcaagatcgccggcgccggcctgctgttcgtgggcggcggcatcggcggcaccatcctgtacgccaagtgggacagccacttcagagagagcgtggagaagaccatcccctacagcgacaagctgttcgagatggtgctgggccccgccgcctacaacgtgcccctgcccaagaagagcatccagagcggccccctgaagatcagcagcgtgagcgaggtgatgaaggagagcaagcagcccgccagccagctgcagaagcagaagggcgacacccccgccagcgccaccgcccccaccgaggccgcccagatcatcagcgccgccggcgacaccctgagcgtgcccgcccccgccgtgcagcccgaggagagcctgaagaccgaccaccccgagatcggcgagggcaagcccacccccgccctgagcgaggaggccagcagcagcagcatcagagagagaccccccgaggaggtggccgccagactggcccagcaggagaagcaggagcaggtgaagatcgagagcctggccaagagcctggaggacgccctgagacagaccgccagcgtgaccctgcaggccatcgccgcccagaacgccgccgtgcaggccgtgaacgcccacagcaacatcctgaaggccgccatggacaacagcgagatcgccggcgagaagaagagcgcccagtggagaaccgtggagggcgccctgaaggagagaagaaaggccgtggacgaggccgccgacgccctgctgaaggccaaggaggagctggagaagatgaagagcgtgatcgagaacgccaagaagaaggaggtggccggcgccaagccccacatcaccgccgccgagggcaagctgcacaacatgatcgtggacctggacaacgtggtgaagaaggtgcaggccgcccagagcgaggccaaggtggtgagccagtaccacgagctggtggtgcaggccagagacgacttcaagagagagctggacagcatcacccccgaggtgctgcccggctggaagggcatgagcgtgagcgacctggccgacaagctgagcaccgacgacctgaacagcctgatcgcccacgcccacagaagaatcgaccagctgaacagagagctggccgagcagaaggccaccgagaagcagcacatcaccctggccctggagaagcagaagctggaggagaagagagccttcgacagcgccgtggccaaggccctggagcaccacagaagcgagatccaggccgagcaggacagaaagatcgaggaggtgagagacgccatggagaacgagatgagaacccagctgagaagacaggccgccgcccacaccgaccacctgagagacgtgctgagagtgcaggagcaggagctgaagagcgagttcgagcagaacctgagcgagaagctgagcgagcaggagctgcagttcagaagactgagccaggagcaggtggacaacttcaccctggacatcaacaccgcctacgccagactgagaggcatcgagcaggccgtgcagagccacgccgtggccgaggaggaggccagaaaggcccaccagctgtggctgagcgtggaggccctgaagtacagcatgaagaccagcagcgccgagacccccaccatccccctgggcagcgccgtggaggccatcaaggccaactgcagcgacaacgagttcacccaggccctgaccgccgccatcccccccgagagcctgaccagaggcgtgtacagcgaggagaccctgagagccagattctacgccgtgcagaagctggccagaagagtggccatgatcgacgagaccagaaacagcctgtaccagtacttcctgagctacctgcagagcctgctgctgttccccccccagcagctgaagcccccccccgagctgtgccccgaggacatcaacaccttcaagctgctgagctacgccagctactgcatcgagcacggcgacctggagctggccgccaagttcgtgaaccagctgaagggcgagagcagaagagtggcccaggactggctgaaggaggccagaatgaccctggagaccaagcagatcgtggagatcctgaccgcctacgccagcgccgtgggcatcggcaccacccaggtgcagcccgagtag

SEQ ID NO: 85183 - DNA, 2274 bp, synthetic construct
  misc_feature 1..2274: note = Description of Artificial Sequence: Synthetic coding sequence
  source 1..2274: mol_type = other DNA
atgctgagagcctgccagctgagcggcgtgaccgccgccgcccagagctgcctgtgcggcaagttcgtgctgagacccctgagaccctgcagaagatacagcaccagcggcagcagcggcctgaccaccggcaagatcgccggcgccggcctgctgttcgtgggcggcggcatcggcggcaccatcctgtacgccaagtgggacagccacttcagagagagcgtggagaagaccatcccctacagcgacaagctgttcgagatggtgctgggccccgccgcctacaacgtgcccctgcccaagaagagcatccagagcggccccctgaagatcagcagcgtgagcgaggtgatgaaggagagcaagcagcccgccagccagctgcagaagcagaagggcgacacccccgccagcgccaccgcccccaccgaggccgcccagatcatcagcgccgccggcgacaccctgagcgtgcccgcccccgccgtgcagcccgaggagagcctgaagaccgaccaccccgagatcggcgagggcaagcccacccccgccctgagcgaggccagcagcagcagcatcagagagagaccccccgaggaggtggccgccagactggcccagcaggagaagcaggagcaggtgaagatcgagagcctggccaagagcctggaggacgccctgagacagaccgccagcgtgaccctgcaggccatcgccgcccagaacgccgccgtgcaggccgtgaacgcccacagcaacatcctgaaggccgccatggacaacagcgagatcgccggcgagaagaagagcgcccagtggagaaccgtggagggcgccctgaaggagagaagaaaggccgtggacgaggccgccgacgccctgctgaaggccaaggaggagctggagaagatgaagagcgtgatcgagaacgccaagaagaaggaggtggccggcgccaagccccacatcaccgccgccgagggcaagctgcacaacatgatcgtggacctggacaacgtggtgaagaaggtgcaggccgcccagagcgaggccaaggtggtgagccagtaccacgagctggtggtgcaggccagagacgacttcaagagagagctggacagcatcacccccgaggtgctgcccggctggaagggcatgagcgtgagcgacctggccgacaagctgagcaccgacgacctgaacagcctgatcgcccacgcccacagaagaatcgaccagctgaacagagagctggccgagcagaaggccaccgagaagcagcacatcaccctggccctggagaagcagaagctggaggagaagagagccttcgacagcgccgtggccaaggccctggagcaccacagaagcgagatccaggccgagcaggacagaaagatcgaggaggtgagagacgccatggagaacgagatgagaacccagctgagaagacaggccgccgcccacaccgaccacctgagagacgtgctgagagtgcaggagcaggagctgaagagcgagttcgagcagaacctgagcgagaagctgagcgagcaggagctgcagttcagaagactgagccaggagcaggtggacaacttcaccctggacatcaacaccgcctacgccagactgagaggcatcgagcaggccgtgcagagccacgccgtggccgaggaggaggccagaaaggcccaccagctgtggctgagcgtggaggccctgaagtacagcatgaagaccagcagcgccgagacccccaccatccccctgggcagcgccgtggaggccatcaaggccaactgcagcgacaacgagttcacccaggccctgaccgccgccatcccccccgagagcctgaccagaggcgtgtacagcgaggagaccctgagagccagattctacgccgtgcagaagctggccagaagagtggccatgatcgacgagaccagaaacagcctgtaccagtacttcctgagctacctgcagagcctgctgctgttccccccccagcagctgaagcccccccccgagctgtgccccgaggacatcaacaccttcaagctgctgagctacgccagctactgcatcgagcacggcgacctggagctggccgccaagttcgtgaaccagctgaagggcgagagcagaagagtggcccaggactggctgaaggaggccagaatgaccctggagaccaagcagatcgtggagatcctgaccgcctacgccagcgccgtgggcatcggcaccacccaggtgcagcccgagtag

SEQ ID NO: 85184 - DNA, 2244 bp, synthetic construct
  misc_feature 1..2244: note = Description of Artificial Sequence: Synthetic coding sequence
  source 1..2244: mol_type = other DNA
atgctgagagcctgccagctgagcggcgtgaccgccgccgcccagagctgcctgtgcggcaagttcgtgctgagacccctgagaccctgcagaagatacagcaccagcggcagcagcggcctgaccaccggcaagatcgccggcgccggcctgctgttcgtgggcggcggcatcggcggcaccatcctgtacgccaagtgggacagccacttcagagagagcgtggagaagaccatcccctacagcgacaagctgttcgagatggtgctgggccccgccgcctacaacgtgcccctgcccaagaagagcatccagagcggccccctgaagatcagcagcgtgagcgaggtgatgaaggagagcaagcagcccgccagccagctgcagaagcagaagggcgacacccccgccagcgccaccgccggcgacaccctgagcgtgcccgcccccgccgtgcagcccgaggagagcctgaagaccgaccaccccgagatcggcgagggcaagcccacccccgccctgagcgaggaggccagcagcagcagcatcagagagagaccccccgaggaggtggccgccagactggcccagcaggagaagcaggagcaggtgaagatcgagagcctggccaagagcctggaggacgccctgagacagaccgccagcgtgaccctgcaggccatcgccgcccagaacgccgccgtgcaggccgtgaacgcccacagcaacatcctgaaggccgccatggacaacagcgagatcgccggcgagaagaagagcgcccagtggagaaccgtggagggcgccctgaaggagagaagaaaggccgtggacgaggccgccgacgccctgctgaaggccaaggaggagctggagaagatgaagagcgtgatcgagaacgccaagaagaaggaggtggccggcgccaagccccacatcaccgccgccgagggcaagctgcacaacatgatcgtggacctggacaacgtggtgaagaaggtgcaggccgcccagagcgaggccaaggtggtgagccagtaccacgagctggtggtgcaggccagagacgacttcaagagagagctggacagcatcacccccgaggtgctgcccggctggaagggcatgagcgtgagcgacctggccgacaagctgagcaccgacgacctgaacagcctgatcgcccacgcccacagaagaatcgaccagctgaacagagagctggccgagcagaaggccaccgagaagcagcacatcaccctggccctggagaagcagaagctggaggagaagagagccttcgacagcgccgtggccaaggccctggagcaccacagaagcgagatccaggccgagcaggacagaaagatcgaggaggtgagagacgccatggagaacgagatgagaacccagctgagaagacaggccgccgcccacaccgaccacctgagagacgtgctgagagtgcaggagcaggagctgaagagcgagttcgagcagaacctgagcgagaagctgagcgagcaggagctgcagttcagaagactgagccaggagcaggtggacaacttcaccctggacatcaacaccgcctacgccagactgagaggcatcgagcaggccgtgcagagccacgccgtggccgaggaggaggccagaaaggcccaccagctgtggctgagcgtggaggccctgaagtacagcatgaagaccagcagcgccgagacccccaccatccccctgggcagcgccgtggaggccatcaaggccaactgcagcgacaacgagttcacccaggccctgaccgccgccatcccccccgagagcctgaccagaggcgtgtacagcgaggagaccctgagagccagattctacgccgtgcagaagctggccagaagagtggccatgatcgacgagaccagaaacagcctgtaccagtacttcctgagctacctgcagagcctgctgctgttccccccccagcagctgaagcccccccccgagctgtgccccgaggacatcaacaccttcaagctgctgagctacgccagctactgcatcgagcacggcgacctggagctggccgccaagttcgtgaaccagctgaagggcgagagcagaagagtggcccaggactggctgaaggaggccagaatgaccctggagaccaagcagatcgtggagatcctgaccgcctacgccagcgccgtgggcatcggcaccacccaggtgcagcccgagtag

SEQ ID NO: 85185 - DNA, 2244 bp, synthetic construct
  misc_feature 1..2244: note = Description of Artificial Sequence: Synthetic coding sequence
  source 1..2244: mol_type = other DNA
atgctgagagcctgccagctgagcggcgtgaccgccgccgcccagagctgcctgtgcggcaagttcgtgctgagacccctgagaccctgcagaagatacagcaccagcggcagcagcggcctgaccaccggcaagatcgccggcgccggcctgctgttcgtgggcggcggcatcggcggcaccatcctgtacgccaagtgggacagccacttcagagagagcgtggagaagaccatcccctacagcgacaagctgttcgagatggtgctgggccccgccgcctacaacgtgcccctgcccaagaagagcatccagagcggccccctgaagatcagcagcgtgagcgaggtgatgaaggagagcaagcagcccgccagccagctgcagaagcagaagggcgacacccccgccagcgccaccgccggcgacaccctgagcgtgcccgcccccgccgtgcagcccgaggagagcctgaagaccgaccaccccgagatcggcgagggcaagcccacccccgccctgagcgaggaggccagcagcagcagcatcagagagagaccccccgaggaggtggccgccagactggcccagcaggagaagcaggagcaggtgaagatcgagagcctggccaagagcctggaggacgccctgagacagaccgccagcgtgaccctgcaggccatcgccgcccagaacgccgccgtgcaggccgtgaacgcccacagcaacatcctgaaggccgccatggacaacagcgagatcgccggcgagaagaagagcgcccagtggagaaccgtggagggcgccctgaaggagagaagaaaggccgtggacgaggccgccgacgccctgctgaaggccaaggaggagctggagaagatgaagagcgtgatcgagaacgccaagaagaaggaggtggccggcgccaagccccacatcaccgccgccgagggcaagctgcacaacatgatcgtggacctggacaacgtggtgaagaaggtgcaggccgcccagagcgaggccaaggtggtgagccagtaccacgagctggtggtgcaggccagagacgacttcaagagagagctggacagcatcacccccgaggtgctgcccggctggaagggcatgagcgagtacaacctggccgacaagctgagcaccgacgacctgaacagcctgatcgcccacgcccacagaagaatcgaccagctgaacagagagctggccgagcagaaggccaccgagaagcagcacatcaccctggccctggagaagcagaagctggaggagaagagagccttcgacagcgccgtggccaaggccctggagcaccacagaagcgagatccaggccgagcaggacagaaagatcgaggaggtgagagacgccatggagaacgagatgagaacccagctgagaagacaggccgccgcccacaccgaccacctgagagacgtgctgagagtgcaggagcaggagctgaagagcgagttcgagcagaacctgagcgagaagctgagcgagcaggagctgcagttcagaagactgagccaggagcaggtggacaacttcaccctggacatcaacaccgcctacgccagactgagaggcatcgagcaggccgtgcagagccacgccgtggccgaggaggaggccagaaaggcccaccagctgtggctgagcgtggaggccctgaagtacagcatgaagaccagcagcgccgagacccccaccatccccctgggcagcgccgtggaggccatcaaggccaactgcagcgacaacgagttcacccaggccctgaccgccgccatcccccccgagagcctgaccagaggcgtgtacagcgaggagaccctgagagccagattctacgccgtgcagaagctggccagaagagtggccatgatcgacgagaccagaaacagcctgtaccagtacttcctgagctacctgcagagcctgctgctgttccccccccagcagctgaagcccccccccgagctgtgccccgaggacatcaacaccttcaagctgctgagctacgccagctactgcatcgagcacggcgacctggagctggccgccaagttcgtgaaccagctgaagggcgagagcagaagagtggcccaggactggctgaaggaggccagaatgaccctggagaccaagcagatcgtggagatcctgaccgcctacgccagcgccgtgggcatcggcaccacccaggtgcagcccgagtag

SEQ ID NO: 85186 - DNA, 579 bp, synthetic construct
  misc_feature 1..579: note = Description of Artificial Sequence: Synthetic coding sequence
  source 1..579: mol_type = other DNA
atggacagagcccacagactgggccagaccaagcaggtgaccgtgtacagactgatctgcaagggcaccatcgaggagagaatcctgcagagagccaaggagaagagcgagatccagagaatggtgatcagcggcggcaacttcaagcccgacaccctgaagcccaaggaggtggtgagcctgctgctggacgacgaggagctggagaagaagctgagactgagacaggaggagaagagacagcaggaggagaccaacagagtgaaggagagaaagagaaagagagagaagtacgccgagaagaagaagaaggaggacgagctggacggcaagagaagaaaggagggcgtgaacctggtgatccccttcgtgcccagcgccgacaacagcaacctgagcgccgacggcgacgacagcttcatcagcgtggacagcgccatgcccagccccttcagcgagatcagcatcagcagcgagctgcacaccggcagcatccccctggacgagagcagcagcctggcccccgacagcctggtgagaaagcagggcaagggcaccaaccccagcggcggcagatag

SEQ ID NO: 85187 - DNA, 4671 bp, synthetic construct
  misc_feature 1..4671: note = Description of Artificial Sequence: Synthetic coding sequence
  source 1..4671: mol_type = other DNA
atggccagcgagctgggcgccagagacgacggcggctgcaccgagctggccaagcccctgtacctgcagtacctggagagagccctgagactggaccacttcctgagacagaccagcgccatcttcaacagaaacatcagcagcgacgacagcgaggacggcctggacgacagcaaccccctgctgccccagagcggcgaccccctgatccaggtgaaggaggagccccccaacagcctgctgggcgagaccagcggcgccggcagcagcggcatgctgaacacctacagcctgaacggcgtgctgcagagcgagagcaagtgcgacaagggcaacctgtacaacttcagcaagctgaagaagagcagaaagtggctgaagagcatcctgctgagcgacgagagcagcgaggccgacagccagagcgaggacgacgacgaggaggagctgaacctgagcagagaggagctgcacaacatgctgagactgcacaagtacaagaagctgcaccagaacaagtacagcaaggacaaggagctgcagcagtaccagtactacagcgccggcctgctgagcacctacgaccccttctacgagcagcagagacacctgctgggccccaagaagaagaagttcaaggaggagaagaagctgaaggccaagctgaagaaggtgaagaagaagagaagaagagacgaggagctgagcagcgaggagagccccagaagacaccaccaccagaccaaggtgttcgccaagttcagccacgacgcccccccccccggcaccaagaagaagcacctgagcatcgagcagctgaacgccagaagaagaaaggtgtggctgagcatcgtgaagaaggagctgcccaaggccaacaagcagaaggccagcgccagaaacctgttcctgaccaacagcagaaagctggcccaccagtgcatgaaggaggtgagaagagccgccctgcaggcccagaagaactgcaaggagaccctgcccagagccagaagactgaccaaggagatgctgctgtactggaagaagtacgagaaggtggagaaggagcacagaaagagagccgagaaggaggccctggagcagagaaagctggacgaggagatgagagaggccaagagacagcagagaaagctgaacttcctgatcacccagaccgagctgtacgcccacttcatgagcagaaagagagacatgggccacgacggcatccaggaggagatcctgagaaagctggaggacagcagcacccagagacagatcgacatcggcggcggcgtggtggtgaacatcacccaggaggactacgacagcaaccacttcaaggcccaggccctgaagaacgccgagaacgcctaccacatccaccaggccagaaccagaagcttcgacgaggacgccaaggagagcagagccgccgccctgagagccgccaacaagagcggcaccggcttcggcgagagctacagcctggccaaccccagcatcagagccggcgaggacatcccccagcccaccatcttcaacggcaagctgaagggctaccagctgaagggcatgaactggctggccaacctgtacgagcagggcatcaacggcatcctggccgacgagatgggcctgggcaagaccgtgcagagcatcgccctgctggcccacctggccgagagagagaacatctggggccccttcctgatcatcagccccgccagcaccctgaacaactggcaccaggagttcaccagattcgtgcccaagttcaaggtgctgccctactggggcaacccccacgacagaaaggtgatcagaagattctggagccagaagaccctgtacacccaggacgcccccttccacgtggtgatcaccagctaccagctggtggtgcaggacgtgaagtacttccagagagtgaagtggcagtacatggtgctggacgaggcccaggccctgaagagcagcagcagcgtgagatggaagatcctgctgcagttccagtgcagaaacagactgctgctgaccggcacccccatccagaacaccatggccgagctgtgggccctgctgcacttcatcatgcccaccctgttcgacagccacgaggagttcaacgagtggttcagcaaggacatcgagagccacgccgagaacaagagcgccatcgacgagaaccagctgagcagactgcacatgatcctgaagcccttcatgctgagaagaatcaagaaggacgtggagaacgagctgagcgacaagatcgagatcctgatgtactgccagctgaccagcagacagaagctgctgtaccaggccctgaagaacaagatcagcatcgaggacctgctgcagagcagcatgggcagcacccagcaggcccagaacaccaccagcagcctgatgaacctggtgatgcagttcagaaaggtgtgcaaccaccccgagctgttcgagagacaggagacctggagccccttccacatcagcctgaagccctaccacatcagcaagttcatctacagacacggccagatcagagtgttcaaccacagcagagacagatggctgagagtgctgagccccttcgcccccgactacatccagagaagcctgttccacagaaagggcatcaacgaggagagctgcttcagcttcctgagattcatcgacatcagccccgccgagatggccaacctgatgctgcagggcctgctggccagatggctggccctgttcctgagcctgaaggccagctacagactgcaccagctgagaagctggggcgcccccgagggcgagagccaccagagatacctgagaaacaaggacttcctgctgggcgtgaacttccccctgagcttccccaacctgtgcagctgccccctgctgaagagcctggtgttcagcagccactgcaaggccgtgagcggctacagcgaccaggtggtgcaccagagaagaagcgccaccagcagcctgagaagatgcctgctgaccgagctgcccagcttcctgtgcgtggccagccccagagtgaccgccgtgcccctggacagctactgcaacgacagaagcgccgagtacgagagaagagtgctgaaggagggcggcagcctggccgccaagcagtgcctgctgaacggcgcccccgagctggccgccgactggctgaacagaagaagccagttcttccccgagcccgccggcggcctgtggagcatcagaccccagaacggctggagcttcatcagaatccccggcaaggagagcctgatcaccgacagcggcaagctgtacgccctggacgtgctgctgaccagactgaagagccagggccacagagtgctgatctacagccagatgaccagaatgatcgacctgctggaggagtacatggtgtacagaaagcacacctacatgagactggacggcagcagcaagatcagcgagagaagagacatggtggccgacttccagaacagaaacgacatcttcgtgttcctgctgagcaccagagccggcggcctgggcatcaacctgaccgccgccgacaccgtgatcttctacgacagcgactggaaccccaccgtggaccagcaggccatggacagagcccacagactgggccagaccaagcaggtgaccgtgtacagactgatctgcaagggcaccatcgaggagagaatcctgcagagagccaaggagaagagcgagatccagagaatggtgatcagcggcggcaacttcaagcccgacaccctgaagcccaaggaggtggtgagcctgctgctggacgacgaggagctggagaagaagctgagactgagacaggaggagaagagacagcaggaggagaccaacagagtgaaggagagaaagagaaagagagagaagtacgccgagaagaagaagaaggaggacgagctggacggcaagagaagaaaggagggcgtgaacctggtgatccccttcgtgcccagcgccgacaacagcaacctgagcgccgacggcgacgacagcttcatcagcgtggacagcgccatgcccagccccttcagcgagatcagcatcagcagcgagctgcacaccggcagcatccccctggacgagagcagcagcgacatgctggtgatcgtggacgaccccgccagcagcgccccccagagcagagccaccaacagccccgccagcatcaccggcagcgtgagcgacaccgtgaacggcatcagcatccaggagatgcccgccgccggcagaggccacagcgccagaagcagaggcagacccaagggcagcggcagcaccgccaagggcgccggcaagggcagaagcagaaagagcaccgccggcagcgccgccgccatggccggcgccaaggccggcgccgccgccgccagcgccgccgcctacgccgcctacggctacaacgtgagcaagggcatcagcgccagcagccccctgcagaccagcctggtgagacccgccggcctggccgacttcggccccagcagcgccagcagccccctgagcagccccctgagcaagggcaacaacgtgcccggcaaccccaagaacctgcacatgaccagcagcctggcccccgacagcctggtgagaaagcagggcaagggcaccaaccccagcggcggcagatag

SEQ ID NO: 85188 - DNA, 4671 bp, synthetic construct; identical to SEQ ID NO: 85187
  misc_feature 1..4671: note = Description of Artificial Sequence: Synthetic coding sequence
  source 1..4671: mol_type = other DNA

SEQ ID NO: 85189 - DNA, 585 bp, synthetic construct
  misc_feature 1..585: note = Description of Artificial Sequence: Synthetic coding sequence
  source 1..585: mol_type = other DNA
atggccgccagcctggtgggcaagaagatcgtgttcgtgaccggcaacgccaagaagctggaggaggtggtgcagatcctgggcgacaagttcccctgcaccctggtggcccagaagatcgacctgcccgagtaccagggcgagcccgacgagatcagcatccagaagtgccaggaggccgtgagacaggtgcagggccccgtgctggtggaggacacctgcctgtgcttcaacgccctgggcggcctgcccggcccctacatcaagtggttcctggagaagctgaagcccgagggcctgcaccagctgctggccggcttcgaggacaagagcgcctacgccctgtgcaccttcgccctgagcaccggcgaccccagccagcccgtgagactgttcagaggcagaaccagcggcagaatcgtggcccccagaggctgccaggacttcggctgggacccctgcttccagcccgacggctacgagcagacctacgccgagatgcccaaggccgagaagaacgccgtgagccacagattcagagccctgctggagctgcaggagtacttcggcagcctggccgcctag

SEQ ID NO: 85190 - DNA, 462 bp, synthetic construct
  misc_feature 1..462: note = Description of Artificial Sequence: Synthetic coding sequence
  source 1..462: mol_type = other DNA
atggccgccagcctggtgggcaagaagatcgtgttcgtgaccggcaacgccaagaagctggaggaggtgcagggccccgtgctggtggaggacacctgcctgtgcttcaacgccctgggcggcctgcccggcccctacatcaagtggttcctggagaagctgaagcccgagggcctgcaccagctgctggccggcttcgaggacaagagcgcctacgccctgtgcaccttcgccctgagcaccggcgaccccagccagcccgtgagactgttcagaggcagaaccagcggcagaatcgtggcccccagaggctgccaggacttcggctgggacccctgcttccagcccgacggctacgagcagacctacgccgagatgcccaaggccgagaagaacgccgtgagccacagattcagagccctgctggagctgcaggagtacttcggcagcctggccgcctag

SEQ ID NO: 85191 - DNA, 534 bp, synthetic construct
  misc_feature 1..534: note = Description of Artificial Sequence: Synthetic coding sequence
  source 1..534: mol_type = other DNA
atggccgccagcctggtggtgcagatcctgggcgacaagttcccctgcaccctggtggcccagaagatcgacctgcccgagtaccagggcgagcccgacgagatcagcatccagaagtgccaggaggccgtgagacaggtgcagggccccgtgctggtggaggacacctgcctgtgcttcaacgccctgggcggcctgcccggcccctacatcaagtggttcctggagaagctgaagcccgagggcctgcaccagctgctggccggcttcgaggacaagagcgcctacgccctgtgcaccttcgccctgagcaccggcgaccccagccagcccgtgagactgttcagaggcagaaccagcggcagaatcgtggcccccagaggctgccaggacttcggctgggacccctgcttccagcccgacggctacgagcagacctacgccgagatgcccaaggccgagaagaacgccgtgagccacagattcagagccctgctggagctgcaggagtacttcggcagcctggccgcctag

SEQ ID NO: 85192 - DNA, 8232 bp, synthetic construct
  misc_feature 1..8232: note = Description of Artificial Sequence: Synthetic coding sequence
  source 1..8232: mol_type = other DNA
atgagcgacaagatgagcagcttcctgcacatcggcgacatctgcagcctgtacgccgagggcagcaccaacggcttcatcagcaccctgggcctggtggacgacagatgcgtggtgcagcccgagaccggcgacctgaacaacccccccaagaagttcagagactgcctgttcaagctgtgccccatgaacagatacagcgcccagaagcagttctggaaggccgccaagcccggcgccaacagcaccaccgacgccgtgctgctgaacaagctgcaccacgccgccgacctggagaagaagcagaacgagaccgagaacagaaagctgctgggcaccgtgatccagtacggcaacgtgatccagctgctgcacctgaagagcaacaagtacctgaccgtgaacaagagactgcccgccctgctggagaagaacgccatgagagtgaccctggacgaggccggcaacgagggcagctggttctacatccagcccttctacaagctgagaagcatcggcgacagcgtggtgatcggcgacaaggtggtgctgaaccccgtgaacgccggccagcccctgcacgccagcagccaccagctggtggacaaccccggctgcaacgaggtgaacagcgtgaactgcaacaccagctggaagatcgtgctgttcatgaagtggagcgacaacaaggacgacatcctgaagggcggcgacgtggtgagactgttccacgccgagcaggagaagttcctgacctgcgacgagcacagaaagaagcagcacgtgttcctgagaaccaccggcagacagagcgccaccagcgccaccagcagcaaggccctgtgggaggtggaggtggtgcagcacgacccctgcagaggcggcgccggctactggaacagcctgttcagattcaagcacctggccaccggccactacctggccgccgaggtggaccccgaccaggacgccagcagaagcagactgagaaacgcccaggagaagatggtgtacagcctggtgagcgtgcccgagggcaacgacatcagcagcatcttcgagctggaccccaccaccctgagaggcggcgacagcctggtgcccagaaacagctacgtgagactgagacacctgtgcaccaacacctgggtgcacagcaccaacatccccatcgacaaggaggaggagaagcccgtgatgctgaagatcggcaccagccccgtgaaggaggacaaggaggccttcgccatcgtgcccgtgagccccgccgaggtgagagacctggacttcgccaacgacgccagcaaggtgctgggcagcatcgccggcaagctggagaagggcaccatcacccagaacgagagaagaagcgtgaccaagctgctggaggacctggtgtacttcgtgaccggcggcaccaacagcggccaggacgtgctggaggtggtgttcagcaagcccaacagagagagacagaagctgatgagagagcagaacatcctgaagcagatcttcaagctgctgcaggcccccttcaccgactgcggcgacggccccatgctgagactggaggagctgggcgaccagagacacgcccccttcagacacatctgcagactgtgctacagagtgctgagacacagccagcaggactacagaaagaaccaggagtacatcgccaagcagttcggcttcatgcagaagcagatcggctacgacgtgctggccgaggacaccatcaccgccctgctgcacaacaacagaaagctgctggagaagcacatcaccgccgccgagatcgacaccttcgtgagcctggtgagaaagaacagagagcccagattcctggactacctgagcgacctgtgcgtgagcatgaacaagagcatccccgtgacccaggagctgatctgcaaggccgtgctgaaccccaccaacgccgacatcctgatcgagaccaagctggtgctgagcagattcgagttcgagggcgtgagcagcaccggcgagaacgccctggaggccggcgaggacgaggaggaggtgtggctgttctggagagacagcaacaaggagatcagaagcaagagcgtgagagagctggcccaggacgccaaggagggccagaaggaggacagagacgtgctgagctactacagataccagctgaacctgttcgccagaatgtgcctggacagacagtacctggccatcaacgagatcagcggccagctggacgtggacctgatcctgagatgcatgagcgacgagaacctgccctacgacctgagagccagcttctgcagactgatgctgcacatgcacgtggacagagacccccaggagcaggtgacccccgtgaagtacgccagactgtggagcgagatccccagcgagatcgccatcgacgactacgacagcagcggcgccagcaaggacgagatcaaggagagattcgcccagaccatggagttcgtggaggagtacctgagagacgtggtgtgccagagattccccttcagcgacaaggagaagaacaagctgaccttcgaggtggtgaacctggccagaaacctgatctacttcggcttctacaacttcagcgacctgctgagactgaccaagatcctgctggccatcctggactgcgtgcacgtgaccaccatcttccccatcagcaagatggccaagggcgaggagaacaagggcaacaacgacgtggagaagctgaagagcagcaacgtgatgagaagcatccacggcgtgggcgagctgatgacccaggtggtgctgagaggcggcggcttcctgcccatgacccccatggccgccgcccccgagggcaacgtgaagcaggccgagcccgagaaggaggacatcatggtgatggacaccaagctgaagatcatcgagatcctgcagttcatcctgaacgtgagactggactacagaatcagctgcctgctgtgcatcttcaagagagagttcgacgagagcaacagccagaccagcgagaccagcagcggcaacagcagccaggagggccccagcaacgtgcccggcgccctggacttcgagcacatcgaggagcaggccgagggcatcttcggcggcagcgaggagaacacccccctggacctggacgaccacggcggcagaaccttcctgagagtgctgctgcacctgaccatgcacgactacccccccctggtgagcggcgccctgcagctgctgttcagacacttcagccagagacaggaggtgctgcaggccttcaagcaggtgcagctgctggtgaccagccaggacgtggacaactacaagcagatcaagcaggacctggaccagctgagaagcatcgtggagaagagcgagctgtgggtgtacaagggccagggccccgacgagaccatggacggcgccagcggcgagaacgagcacaagaagaccgaggagggcaacaacaagccccagaagcacgagagcaccagcagctacaactacagagtggtgaaggagatcctgatcagactgagcaagctgtgcgtgcaggagagcgccagcgtgagaaagagcagaaagcagcagcagagactgctgagaaacatgggcgcccacgccgtggtgctggagctgctgcagatcccctacgagaaggccgaggacaccaagatgcaggagatcatgagactggcccacgagttcctgcagaacttctgcgccggcaaccagcagaaccaggccctgctgcacaagcacatcaacctgttcctgaaccccggcatcctggaggccgtgaccatgcagcacatcttcatgaacaacttccagctgtgcagcgagatcaacgagagagtggtgcagcacttcgtgcactgcatcgagacccacggcagaaacgtgcagtacatcaagttcctgcagaccatcgtgaaggccgagggcaagttcatcaagaagtgccaggacatggtgatggccgagctggtgaacagcggcgaggacgtgctggtgttctacaacgacagagccagcttccagaccctgatccagatgatgagaagcgagagagacagaatggacgagaacagccccctgatgtaccacatccacctggtggagctgctggccgtgtgcaccgagggcaagaacgtgtacaccgagatcaagtgcaacagcctgctgcccctggacgacatcgtgagagtggtgacccacgaggactgcatccccgaggtgaagatcgcctacatcaacttcctgaaccactgctacgtggacaccgaggtggagatgaaggagatctacaccagcaaccacatgtggaagctgttcgagaacttcctggtggacatctgcagagcctgcaacaacaccagcgacagaaagcacgccgacagcatcctggagaagtacgtgaccgagatcgtgatgagcatcgtgaccaccttcttcagcagccccttcagcgaccagagcaccaccctgcagaccagacagcccgtgttcgtgcagctgctgcagggcgtgttcagagtgtaccactgcaactggctgatgcccagccagaaggccagcgtggagagctgcatcagagtgctgagcgacgtggccaagagcagagccatcgccatccccgtggacctggacagccaggtgaacaacctgttcctgaagagccacagcatcgtgcagaagaccgccatgaactggagactgagcgccagaaacgccgccagaagagacagcgtgctggccgccagcagagactacagaaacatcatcgagagactgcaggacatcgtgagcgccctggaggacagactgagacccctggtgcaggccgagctgagcgtgctggtggacgtgctgcacagacccgagctgctgttccccgagaacaccgacgccagaagaaagtgcgagagcggcggcttcatctgcaagctgatcaagcacaccaagcagctgctggaggagaacgaggagaagctgtgcatcaaggtgctgcagaccctgagagagatgatgaccaaggacagaggctacggcgagaagctgatcagcatcgacgagctggacaacgccgagctgccccccgcccccgacagcgagaacgccaccgaggagctggagcccagcccccccctgagacagctggaggaccacaagagaggcgaggccctgagacaggtgctggtgaacagatactacggcaacgtgagacccagcggcagaagagagagcctgaccagcttcggcaacggccccctgagcgccggcggccccggcaagcccggcggcggcggcggcggcagcggcagcagcagcatgagcagaggcgagatgagcctggccgaggtgcagtgccacctggacaaggagggcgccagcaacctggtgatcgacctgatcatgaacgccagcagcgacagagtgttccacgagagcatcctgctggccatcgccctgctggagggcggcaacaccaccatccagcacagcttcttctgcagactgaccgaggacaagaagagcgagaagttcttcaaggtgttctacgacagaatgaaggtggcccagcaggagatcaaggccaccgtgaccgtgaacaccagcgacctgggcaacaagaagaaggacgacgaggtggacagagacgcccccagcagaaagaaggccaaggagcccaccacccagatcaccgaggaggtgagagaccagctgctggaggccagcgccgccaccagaaaggccttcaccaccttcagaagagaggccgaccccgacgaccactaccagcccggcgagggcacccaggccaccgccgacaaggccaaggacgacctggagatgagcgccgtgatcaccatcatgcagcccatcctgagattcctgcagctgctgtgcgagaaccacaacagagacctgcagaacttcctgagatgccagaacaacaagaccaactacaacctggtgtgcgagaccctgcagttcctggactgcatctgcggcagcaccaccggcggcctgggcctgctgggcctgtacatcaacgagaagaacgtggccctgatcaaccagaccctggagagcctgaccgagtactgccagggcccctgccacgagaaccagaactgcatcgccacccacgagagcaacggcatcgacatcatcaccgccctgatcctgaacgacatcaaccccctgggcaagaagagaatggacctggtgctggagctgaagaacaacgccagcaagctgctgctggccatcatggagagcagacacgacagcgagaacgccgagagaatcctgtacaacatgagacccaaggagctggtggaggtgatcaagaaggcctacatgcagggcgaggtggagttcgaggacggcgagaacggcgaggacggcgccgccagccccagaaacgtgggccacaacatctacatcctggcccaccagctggccagacacaacaaggagctgcagagcatgctgaagcccggcggccaggtggacggcgacgaggccctggagttctacgccaagcacaccgcccagatcgagatcgtgagactggacagaaccatggagcagatcgtgttccccgtgcccagcatctgcgagttcctgaccaaggagagcaagctgagaatctactacaccaccgagagagacgagcagggcagcaagatcaacgacttcttcctgagaagcgaggacctgttcaacgagatgaactggcagaagaagctgagagcccagcccgtgctgtactggtgcgccagaaacatgagcttctggagcagcatcagcttcaacctggccgtgctgatgaacctgctggtggccttcttctaccccttcaagggcgtgagaggcggcaccctggagccccactggagcggcctgctgtggaccgccatgctgatcagcctggccatcgtgatcgccctgcccaagccccacggcatcagagccctgatcgccagcaccatcctgagactgatcttcagcgtgggcctgcagcccaccctgttcctgctgggcgccttcaacgtgtgcaacaagatcatcttcctgatgagcttcgtgggcaactgcggcaccttcaccagaggctacagagccatggtgctggacgtggagttcctgtaccacctgctgtacctggtgatctgcgccatgggcctgttcgtgcacgagttcttctacagcctgctgctgttcgacctggtgtacagagaggagaccctgctgaacgtgatcaagagcgtgaccagaaacggcagaagcatcatcctgaccgccgtgctggccctgatcctggtgtacctgttcagcatcgtgggctacctgttcttcaaggacgacttcatcctggaggtggacagactgcccaacgagaccgccgtgcccgagaccggcgagagcctggccagcgagttcctgttcagcgacgtgtgcagagtggagagcggcgagaactgcagcagccccgcccccagagaggagctggtgcccgccgaggagaccgagcaggacaaggagcacacctgcgagaccctgctgatgtgcatcgtgaccgtgctgagccacggcctgagaagcggcggcggcgtgggcgacgtgctgagaaagcccagcaaggaggagcccctgttcgccgccagagtgatctacgacctgctgttcttcttcatggtgatcatcatcgtgctgaacctgatcttcggcgtgatcatcgacaccttcgccgacctgagaagcgagaagcagaagaaggaggagatcctgaagaccacctgcttcatctgcggcctggagagagacaagttcgacaacaagaccgtgaccttcgaggagcacatcaaggaggagcacaacatgtggcactacctgtgcttcatcgtgctggtgaaggtgaaggacagcaccgagtacaccggccccgagagctacgtggccgagatgatcaaggagagaaacctggactggttccccagaatgagagccatgagcctggtgagcagcgacagcgagggcgagcagaacgagctgagaaacctgcaggagaagctggagagcaccatgaagctggtgaccaacctgagcggccagctgagcgagctgaaggaccagatgaccgagcagagaaagcagaagcagagaatcggcctgctgggccaccccccccacatgaacgtgaacccccagcagcccgcctag

SEQ ID NO: 85193 - DNA, 8232 bp, synthetic construct
  misc_feature 1..8232: note = Description of Artificial Sequence: Synthetic coding sequence
  source 1..8232: mol_type = other DNA
atgagcgacaagatgagcagcttcctgcacatcggcgacatctgcagcctgtacgccgagggcagcaccaacggcttcatcagcaccctgggcctggtggacgacagatgcgtggtgcagcccgagaccggcgacctgaacaacccccccaagaagttcagagactgcctgttcaagctgtgccccatgaacagatacagcgcccagaagcagttctggaaggccgccaagcccggcgccaacagcaccaccgacgccgtgctgctgaacaagctgcaccacgccgccgacctggagaagaagcagaacgagaccgagaacagaaagctgctgggcaccgtgatccagtacggcaacgtgatccagctgctgcacctgaagagcaacaagtacctgaccgtgaacaagagactgcccgccctgctggagaagaacgccatgagagtgaccctggacgaggccggcaacgagggcagctggttctacatccagcccttctacaagctgagaagcatcggcgacagcgtggtgatcggcgacaaggtggtgctgaaccccgtgaacgccggccagcccctgcacgccagcagccaccagctggtggacaaccccggctgcaacgaggtgaacagcgtgaactgcaacaccagctggaagatcgtgctgttcatgaagtggagcgacaacaaggacgacatcctgaagggcggcgacgtggtgagactgttccacgccgagcaggagaagttcctgacctgcgacgagcacagaaagaagcagcacgtgttcctgagaaccaccggcagacagagcgccaccagcgccaccagcagcaaggccctgtgggaggtggaggtggtgcagcacgacccctgcagaggcggcgccggctactggaacagcctgttcagattcaagcacctggccaccggccactacctggccgccgaggtggaccccgacttcgaggaggagtgcctggagttccagcccagcgtggaccccgaccaggacgccagcagaagcagactgagaaacgcccaggagaagatggtgtacagcctggtgagcgtgcccgagggcaacgacatcagcagcatcttcgagctggaccccaccaccctgagaggcggcgacagcctggtgcccagaaacagctacgtgagactgagacacctgtgcaccaacacctgggtgcacagcaccaacatccccatcgacaaggaggaggagaagcccgtgatgctgaagatcggcaccagccccgtgaaggaggacaaggaggccttcgccatcgtgcccgtgagccccgccgaggtgagagacctggacttcgccaacgacgccagcaaggtgctgggcagcatcgccggcaagctggagaagggcaccatcacccagaacgagagaagaagcgtgaccaagctgctggaggacctggtgtacttcgtgaccggcggcaccaacagcggccaggacgtgctggaggtggtgttcagcaagcccaacagagagagacagaagctgatgagagagcagaacatcctgaagcagatcttcaagctgctgcaggcccccttcaccgactgcggcgacggccccatgctgagactggaggagctgggcgaccagagacacgcccccttcagacacatctgcagactgtgctacagagtgctgagacacagccagcaggactacagaaagaaccaggagtacatcgccaagcagttcggcttcatgcagaagcagatcggctacgacgtgctggccgaggacaccatcaccgccctgctgcacaacaacagaaagctgctggagaagcacatcaccgccgccgagatcgacaccttcgtgagcctggtgagaaagaacagagagcccagattcctggactacctgagcgacctgtgcgtgagcatgaacaagagcatccccgtgacccaggagctgatctgcaaggccgtgctgaaccccaccaacgccgacatcctgatcgagaccaagctggtgctgagcagattcgagttcgagggcgtgagcagcaccggcgagaacgccctggaggccggcgaggacgaggaggaggtgtggctgttctggagagacagcaacaaggagatcagaagcaagagcgtgagagagctggcccaggacgccaaggagggccagaaggaggacagagacgtgctgagctactacagataccagctgaacctgttcgccagaatgtgcctggacagacagtacctggccatcaacgagatcagcggccagctggacgtggacctgatcctgagatgcatgagcgacgagaacctgccctacgacctgagagccagcttctgcagactgatgctgcacatgcacgtggacagagacccccaggagcaggtgacccccgtgaagtacgccagactgtggagcgagatccccagcgagatcgccatcgacgactacgacagcagcggcgccagcaaggacgagatcaaggagagattcgcccagaccatggagttcgtggaggagtacctgagagacgtggtgtgccagagattccccttcagcgacaaggagaagaacaagctgaccttcgaggtggtgaacctggccagaaacctgatctacttcggcttctacaacttcagcgacctgctgagactgaccaagatcctgctggccatcctggactgcgtgcacgtgaccaccatcttccccatcagcaagatggccaagggcgaggagaacaagggcaacaacgacgtggagaagctgaagagcagcaacgtgatgagaagcatccacggcgtgggcgagctgatgacccaggtggtgctgagaggcggcggcttcctgcccatgacccccatggccgccgcccccgagggcaacgtgaagcaggccgagcccgagaaggaggacatcatggtgatggacaccaagctgaagatcatcgagatcctgcagttcatcctgaacgtgagactggactacagaatcagctgcctgctgtgcatcttcaagagagagttcgacgagagcaacagccagaccagcgagaccagcagcggcaacagcagccaggagggccccagcaacgtgcccggcgccctggacttcgagcacatcgaggagcaggccgagggcatcttcggcggcagcgaggagaacacccccctggacctggacgaccacggcggcagaaccttcctgagagtgctgctgcacctgaccatgcacgactacccccccctggtgagcggcgccctgcagctgctgttcagacacttcagccagagacaggaggtgctgcaggccttcaagcaggtgcagctgctggtgaccagccaggacgtggacaactacaagcagatcaagcaggacctggaccagctgagaagcatcgtggagaagagcgagctgtgggtgtacaagggccagggccccgacgagaccatggacggcgccagcggcgagaacgagcacaagaagaccgaggagggcaacaacaagccccagaagcacgagagcaccagcagctacaactacagagtggtgaaggagatcctgatcagactgagcaagctgtgcgtgcaggagagcgccagcgtgagaaagagcagaaagcagcagcagagactgctgagaaacatgggcgcccacgccgtggtgctggagctgctgcagatcccctacgagaaggccgaggacaccaagatgcaggagatcatgagactggcccacgagttcctgcagaacttctgcgccggcaaccagcagaaccaggccctgctgcacaagcacatcaacctgttcctgaaccccggcatcctggaggccgtgaccatgcagcacatcttcatgaacaacttccagctgtgcagcgagatcaacgagagagtggtgcagcacttcgtgcactgcatcgagacccacggcagaaacgtgcagtacatcaagttcctgcagaccatcgtgaaggccgagggcaagttcatcaagaagtgccaggacatggtgatggccgagctggtgaacagcggcgaggacgtgctggtgttctacaacgacagagccagcttccagaccctgatccagatgatgagaagcgagagagacagaatggacgagaacagccccctgatgtaccacatccacctggtggagctgctggccgtgtgcaccgagggcaagaacgtgtacaccgagatcaagtgcaacagcctgctgcccctggacgacatcgtgagagtggtgacccacgaggactgcatccccgaggtgaagatcgcctacatcaacttcctgaaccactgctacgtggacaccgaggtggagatgaaggagatctacaccagcaaccacatgtggaagctgttcgagaacttcctggtggacatctgcagagcctgcaacaacaccagcgacagaaagcacgccgacagcatcctggagaagtacgtgaccgagatcgtgatgagcatcgtgaccaccttcttcagcagccccttcagcgaccagagcaccaccctgcagaccagacagcccgtgttcgtgcagctgctgcagggcgtgttcagagtgtaccactgcaactggctgatgcccagccagaaggccagcgtggagagctgcatcagagtgctgagcgacgtggccaagagcagagccatcgccatccccgtggacctggacagccaggtgaacaacctgttcctgaagagccacagcatcgtgcagaagaccgccatgaactggagactgagcgccagaaacgccgccagaagagacagcgtgctggccgccagcagagactacagaaacatcatcgagagactgcaggacatcgtgagcgccctggaggacagactgagacccctggtgcaggccgagctgagcgtgctggtggacgtgctgcacagacccgagctgctgttccccgagaacaccgacgccagaagaaagtgcgagagcggcggcttcatctgcaagctgatcaagcacaccaagcagctgctggaggagaacgaggagaagctgtgcatcaaggtgctgcagaccctgagagagatgatgaccaaggacagaggctacggcgagaagctgatcagcatcgacgagctggacaacgccgagctgccccccgcccccgacagcgagaacgccaccgagaagggcgaggccctgagacaggtgctggtgaacagatactacggcaacgtgagacccagcggcagaagagagagcctgaccagcttcggcaacggccccctgagcgccggcggccccggcaagcccggcggcggcggcggcggcagcggcagcagcagcatgagcagaggcgagatgagcctggccgaggtgcagtgccacctggacaaggagggcgccagcaacctggtgatcgacctgatcatgaacgccagcagcgacagagtgttccacgagagcatcctgctggccatcgccctgctggagggcggcaacaccaccatccagcacagcttcttctgcagactgaccgaggacaagaagagcgagaagttcttcaaggtgttctacgacagaatgaaggtggcccagcaggagatcaaggccaccgtgaccgtgaacaccagcgacctgggcaacaagaagaaggacgacgaggtggacagagacgcccccagcagaaagaaggccaaggagcccaccacccagatcaccgaggaggtgagagaccagctgctggaggccagcgccgccaccagaaaggccttcaccaccttcagaagagaggccgaccccgacgaccactaccagcccggcgagggcacccaggccaccgccgacaaggccaaggacgacctggagatgagcgccgtgatcaccatcatgcagcccatcctgagattcctgcagctgctgtgcgagaaccacaacagagacctgcagaacttcctgagatgccagaacaacaagaccaactacaacctggtgtgcgagaccctgcagttcctggactgcatctgcggcagcaccaccggcggcctgggcctgctgggcctgtacatcaacgagaagaacgtggccctgatcaaccagaccctggagagcctgaccgagtactgccagggcccctgccacgagaaccagaactgcatcgccacccacgagagcaacggcatcgacatcatcaccgccctgatcctgaacgacatcaaccccctgggcaagaagagaatggacctggtgctggagctgaagaacaacgccagcaagctgctgctggccatcatggagagcagacacgacagcgagaacgccgagagaatcctgtacaacatgagacccaaggagctggtggaggtgatcaagaaggcctacatgcagggcgaggtggagttcgaggacggcgagaacggcgaggacggcgccgccagccccagaaacgtgggccacaacatctacatcctggcccaccagctggccagacacaacaaggagctgcagagcatgctgaagcccggcggccaggtggacggcgacgaggccctggagttctacgccaagcacaccgcccagatcgagatcgtgagactggacagaaccatggagcagatcgtgttccccgtgcccagcatctgcgagttcctgaccaaggagagcaagctgagaatctactacaccaccgagagagacgagcagggcagcaagatcaacgacttcttcctgagaagcgaggacctgttcaacgagatgaactggcagaagaagctgagagcccagcccgtgctgtactggtgcgccagaaacatgagcttctggagcagcatcagcttcaacctggccgtgctgatgaacctgctggtggccttcttctaccccttcaagggcgtgagaggcggcaccctggagccccactggagcggcctgctgtggaccgccatgctgatcagcctggccatcgtgatcgccctgcccaagccccacggcatcagagccctgatcgccagcaccatcctgagactgatcttcagcgtgggcctgcagcccaccctgttcctgctgggcgccttcaacgtgtgcaacaagatcatcttcctgatgagcttcgtgggcaactgcggcaccttcaccagaggctacagagccatggtgctggacgtggagttcctgtaccacctgctgtacctggtgatctgcgccatgggcctgttcgtgcacgagttcttctacagcctgctgctgttcgacctggtgtacagagaggagaccctgctgaacgtgatcaagagcgtgaccagaaacggcagaagcatcatcctgaccgccgtgctggccctgatcctggtgtacctgttcagcatcgtgggctacctgttcttcaaggacgacttcatcctggaggtggacagactgcccaacgagaccgccgtgcccgagaccggcgagagcctggccagcgagttcctgttcagcgacgtgtgcagagtggagagcggcgagaactgcagcagccccgcccccagagaggagctggtgcccgccgaggagaccgagcaggacaaggagcacacctgcgagaccctgctgatgtgcatcgtgaccgtgctgagccacggcctgagaagcggcggcggcgtgggcgacgtgctgagaaagcccagcaaggaggagcccctgttcgccgccagagtgatctacgacctgctgttcttcttcatggtgatcatcatcgtgctgaacctgatcttcggcgtgatcatcgacaccttcgccgacctgagaagcgagaagcagaagaaggaggagatcctgaagaccacctgcttcatctgcggcctggagagagacaagttcgacaacaagaccgtgaccttcgaggagcacatcaaggaggagcacaacatgtggcactacctgtgcttcatcgtgctggtgaaggtgaaggacagcaccgagtacaccggccccgagagctacgtggccgagatgatcaaggagagaaacctggactggttccccagaatgagagccatgagcctggtgagcagcgacagcgagggcgagcagaacgagctgagaaacctgcaggagaagctggagagcaccatgaagctggtgaccaacctgagcggccagctgagcgagctgaaggaccagatgaccgagcagagaaagcagaagcagagaatcggcctgctgggccaccccccccacatgaacgtgaacccccagcagcccgcctag

SEQ ID NO: 85194 - DNA, 8277 bp, synthetic construct
  misc_feature 1..8277: note = Description of Artificial Sequence: Synthetic coding sequence
  source 1..8277: mol_type = other DNA
atgagcgacaagatgagcagcttcctgcacatcggcgacatctgcagcctgtacgccgagggcagcaccaacggcttcatcagcaccctgggcctggtggacgacagatgcgtggtgcagcccgagaccggcgacctgaacaacccccccaagaagttcagagactgcctgttcaagctgtgccccatgaacagatacagcgcccagaagcagttctggaaggccgccaagcccggcgccaacagcaccaccgacgccgtgctgctgaacaagctgcaccacgccgccgacctggagaagaagcagaacgagaccgagaacagaaagctgctgggcaccgtgatccagtacggcaacgtgatccagctgctgcacctgaagagcaacaagtacctgaccgtgaacaagagactgcccgccctgctggagaagaacgccatgagagtgaccctggacgaggccggcaacgagggcagctggttctacatccagcccttctacaagctgagaagcatcggcgacagcgtggtgatcggcgacaaggtggtgctgaaccccgtgaacgccggccagcccctgcacgccagcagccaccagctggtggacaaccccggctgcaacgaggtgaacagcgtgaactgcaacaccagctggaagatcgtgctgttcatgaagtggagcgacaacaaggacgacatcctgaagggcggcgacgtggtgagactgttccacgccgagcaggagaagttcctgacctgcgacgagcacagaaagaagcagcacgtgttcctgagaaccaccggcagacagagcgccaccagcgccaccagcagcaaggccctgtgggaggtggaggtggtgcagcacgacccctgcagaggcggcgccggctactggaacagcctgttcagattcaagcacctggccaccggccactacctggccgccgaggtggaccccgacttcgaggaggagtgcctggagttccagcccagcgtggaccccgaccaggacgccagcagaagcagactgagaaacgcccaggagaagatggtgtacagcctggtgagcgtgcccgagggcaacgacatcagcagcatcttcgagctggaccccaccaccctgagaggcggcgacagcctggtgcccagaaacagctacgtgagactgagacacctgtgcaccaacacctgggtgcacagcaccaacatccccatcgacaaggaggaggagaagcccgtgatgctgaagatcggcaccagccccgtgaaggaggacaaggaggccttcgccatcgtgcccgtgagccccgccgaggtgagagacctggacttcgccaacgacgccagcaaggtgctgggcagcatcgccggcaagctggagaagggcaccatcacccagaacgagagaagaagcgtgaccaagctgctggaggacctggtgtacttcgtgaccggcggcaccaacagcggccaggacgtgctggaggtggtgttcagcaagcccaacagagagagacagaagctgatgagagagcagaacatcctgaagcagatcttcaagctgctgcaggcccccttcaccgactgcggcgacggccccatgctgagactggaggagctgggcgaccagagacacgcccccttcagacacatctgcagactgtgctacagagtgctgagacacagccagcaggactacagaaagaaccaggagtacatcgccaagcagttcggcttcatgcagaagcagatcggctacgacgtgctggccgaggacaccatcaccgccctgctgcacaacaacagaaagctgctggagaagcacatcaccgccgccgagatcgacaccttcgtgagcctggtgagaaagaacagagagcccagattcctggactacctgagcgacctgtgcgtgagcatgaacaagagcatccccgtgacccaggagctgatctgcaaggccgtgctgaaccccaccaacgccgacatcctgatcgagaccaagctggtgctgagcagattcgagttcgagggcgtgagcagcaccggcgagaacgccctggaggccggcgaggacgaggaggaggtgtggctgttctggagagacagcaacaaggagatcagaagcaagagcgtgagagagctggcccaggacgccaaggagggccagaaggaggacagagacgtgctgagctactacagataccagctgaacctgttcgccagaatgtgcctggacagacagtacctggccatcaacgagatcagcggccagctggacgtggacctgatcctgagatgcatgagcgacgagaacctgccctacgacctgagagccagcttctgcagactgatgctgcacatgcacgtggacagagacccccaggagcaggtgacccccgtgaagtacgccagactgtggagcgagatccccagcgagatcgccatcgacgactacgacagcagcggcgccagcaaggacgagatcaaggagagattcgcccagaccatggagttcgtggaggagtacctgagagacgtggtgtgccagagattccccttcagcgacaaggagaagaacaagctgaccttcgaggtggtgaacctggccagaaacctgatctacttcggcttctacaacttcagcgacctgctgagactgaccaagatcctgctggccatcctggactgcgtgcacgtgaccaccatcttccccatcagcaagatggccaagggcgaggagaacaagggcaacaacgacgtggagaagctgaagagcagcaacgtgatgagaagcatccacggcgtgggcgagctgatgacccaggtggtgctgagaggcggcggcttcctgcccatgacccccatggccgccgcccccgagggcaacgtgaagcaggccgagcccgagaaggaggacatcatggtgatggacaccaagctgaagatcatcgagatcctgcagttcatcctgaacgtgagactggactacagaatcagctgcctgctgtgcatcttcaagagagagttcgacgagagcaacagccagaccagcgagaccagcagcggcaacagcagccaggagggccccagcaacgtgcccggcgccctggacttcgagcacatcgaggagcaggccgagggcatcttcggcggcagcgaggagaacacccccctggacctggacgaccacggcggcagaaccttcctgagagtgctgctgcacctgaccatgcacgactacccccccctggtgagcggcgccctgcagctgctgttcagacacttcagccagagacaggaggtgctgcaggccttcaagcaggtgcagctgctggtgaccagccaggacgtggacaactacaagcagatcaagcaggacctggaccagctgagaagcatcgtggagaagagcgagctgtgggtgtacaagggccagggccccgacgagaccatggacggcgccagcggcgagaacgagcacaagaagaccgaggagggcaacaacaagccccagaagcacgagagcaccagcagctacaactacagagtggtgaaggagatcctgatcagactgagcaagctgtgcgtgcaggagagcgccagcgtgagaaagagcagaaagcagcagcagagactgctgagaaacatgggcgcccacgccgtggtgctggagctgctgcagatcccctacgagaaggccgaggacaccaagatgcaggagatcatgagactggcccacgagttcctgcagaacttctgcgccggcaaccagcagaaccaggccctgctgcacaagcacatcaacctgttcctgaaccccggcatcctggaggccgtgaccatgcagcacatcttcatgaacaacttccagctgtgcagcgagatcaacgagagagtggtgcagcacttcgtgcactgcatcgagacccacggcagaaacgtgcagtacatcaagttcctgcagaccatcgtgaaggccgagggcaagttcatcaagaagtgccaggacatggtgatggccgagctggtgaacagcggcgaggacgtgctggtgttctacaacgacagagccagcttccagaccctgatccagatgatgagaagcgagagagacagaatggacgagaacagccccctgatgtaccacatccacctggtggagctgctggccgtgtgcaccgagggcaagaacgtgtacaccgagatcaagtgcaacagcctgctgcccctggacgacatcgtgagagtggtgacccacgaggactgcatccccgaggtgaagatcgcctacatcaacttcctgaaccactgctacgtggacaccgaggtggagatgaaggagatctacaccagcaaccacatgtggaagctgttcgagaacttcctggtggacatctgcagagcctgcaacaacaccagcgacagaaagcacgccgacagcatcctggagaagtacgtgaccgagatcgtgatgagcatcgtgaccaccttcttcagcagccccttcagcgaccagagcaccaccctgcagaccagacagcccgtgttcgtgcagctgctgcagggcgtgttcagagtgtaccactgcaactggctgatgcccagccagaaggccagcgtggagagctgcatcagagtgctgagcgacgtggccaagagcagagccatcgccatccccgtggacctggacagccaggtgaacaacctgttcctgaagagccacagcatcgtgcagaagaccgccatgaactggagactgagcgccagaaacgccgccagaagagacagcgtgctggccgccagcagagactacagaaacatcatcgagagactgcaggacatcgtgagcgccctggaggacagactgagacccctggtgcaggccgagctgagcgtgctggtggacgtgctgcacagacccgagctgctgttccccgagaacaccgacgccagaagaaagtgcgagagcggcggcttcatctgcaagctgatcaagcacaccaagcagctgctggaggagaacgaggagaagctgtgcatcaaggtgctgcagaccctgagagagatgatgaccaaggacagaggctacggcgagaagctgatcagcatcgacgagctggacaacgccgagctgccccccgcccccgacagcgagaacgccaccgaggagctggagcccagcccccccctgagacagctggaggaccacaagagaggcgaggccctgagacaggtgctggtgaacagatactacggcaacgtgagacccagcggcagaagagagagcctgaccagcttcggcaacggccccctgagcgccggcggccccggcaagcccggcggcggcggcggcggcagcggcagcagcagcatgagcagaggcgagatgagcctggccgaggtgcagtgccacctggacaaggagggcgccagcaacctggtgatcgacctgatcatgaacgccagcagcgacagagtgttccacgagagcatcctgctggccatcgccctgctggagggcggcaacaccaccatccagcacagcttcttctgcagactgaccgaggacaagaagagcgagaagttcttcaaggtgttctacgacagaatgaaggtggcccagcaggagatcaaggccaccgtgaccgtgaacaccagcgacctgggcaacaagaagaaggacgacgaggtggacagagacgcccccagcagaaagaaggccaaggagcccaccacccagatcaccgaggaggtgagagaccagctgctggaggccagcgccgccaccagaaaggccttcaccaccttcagaagagaggccgaccccgacgaccactaccagcccggcgagggcacccaggccaccgccgacaaggccaaggacgacctggagatgagcgccgtgatcaccatcatgcagcccatcctgagattcctgcagctgctgtgcgagaaccacaacagagacctgcagaacttcctgagatgccagaacaacaagaccaactacaacctggtgtgcgagaccctgcagttcctggactgcatctgcggcagcaccaccggcggcctgggcctgctgggcctgtacatcaacgagaagaacgtggccctgatcaaccagaccctggagagcctgaccgagtactgccagggcccctgccacgagaaccagaactgcatcgccacccacgagagcaacggcatcgacatcatcaccgccctgatcctgaacgacatcaaccccctgggcaagaagagaatggacctggtgctggagctgaagaacaacgccagcaagctgctgctggccatcatggagagcagacacgacagcgagaacgccgagagaatcctgtacaacatgagacccaaggagctggtggaggtgatcaagaaggcctacatgcagggcgaggtggagttcgaggacggcgagaacggcgaggacggcgccgccagccccagaaacgtgggccacaacatctacatcctggcccaccagctggccagacacaacaaggagctgcagagcatgctgaagcccggcggccaggtggacggcgacgaggccctggagttctacgccaagcacaccgcccagatcgagatcgtgagactggacagaaccatggagcagatcgtgttccccgtgcccagcatctgcgagttcctgaccaaggagagcaagctgagaatctactacaccaccgagagagacgagcagggcagcaagatcaacgacttcttcctgagaagcgaggacctgttcaacgagatgaactggcagaagaagctgagagcccagcccgtgctgtactggtgcgccagaaacatgagcttctggagcagcatcagcttcaacctggccgtgctgatgaacctgctggtggccttcttctaccccttcaagggcgtgagaggcggcaccctggagccccactggagcggcctgctgtggaccgccatgctgatcagcctggccatcgtgatcgccctgcccaagccccacggcatcagagccctgatcgccagcaccatcctgagactgatcttcagcgtgggcctgcagcccaccctgttcctgctgggcgccttcaacgtgtgcaacaagatcatcttcctgatgagcttcgtgggcaactgcggcaccttcaccagaggctacagagccatggtgctggacgtggagttcctgtaccacctgctgtacctggtgatctgcgccatgggcctgttcgtgcacgagttcttctacagcctgctgctgttcgacctggtgtacagagaggagaccctgctgaacgtgatcaagagcgtgaccagaaacggcagaagcatcatcctgaccgccgtgctggccctgatcctggtgtacctgttcagcatcgtgggctacctgttcttcaaggacgacttcatcctggaggtggacagactgcccaacgagaccgccgtgcccgagaccggcgagagcctggccagcgagttcctgttcagcgacgtgtgcagagtggagagcggcgagaactgcagcagccccgcccccagagaggagctggtgcccgccgaggagaccgagcaggacaaggagcacacctgcgagaccctgctgatgtgcatcgtgaccgtgctgagccacggcctgagaagcggcggcggcgtgggcgacgtgctgagaaagcccagcaaggaggagcccctgttcgccgccagagtgatctacgacctgctgttcttcttcatggtgatcatcatcgtgctgaacctgatcttcggcgtgatcatcgacaccttcgccgacctgagaagcgagaagcagaagaaggaggagatcctgaagaccacctgcttcatctgcggcctggagagagacaagttcgacaacaagaccgtgaccttcgaggagcacatcaaggaggagcacaacatgtggcactacctgtgcttcatcgtgctggtgaaggtgaaggacagcaccgagtacaccggccccgagagctacgtggccgagatgatcaaggagagaaacctggactggttccccagaatgagagccatgagcctggtgagcagcgacagcgagggcgagcagaacgagctgagaaacctgcaggagaagctggagagcaccatgaagctggtgaccaacctgagcggccagctgagcgagctgaaggaccagatgaccgagcagagaaagcagaagcagagaatcggcctgctgggccaccccccccacatgaacgtgaacccccagcagcccgcctag

SEQ ID NO: 85195 - DNA, 8133 bp, synthetic construct
  misc_feature 1..8133: note = Description of Artificial Sequence: Synthetic coding sequence
  source 1..8133: mol_type = other DNA
atgagcgacaagatgagcagcttcctgcacatcggcgacatctgcagcctgtacgccgagggcagcaccaacggcttcatcagcaccctgggcctggtggacgacagatgcgtggtgcagcccgagaccggcgacctgaacaacccccccaagaagttcagagactgcctgttcaagctgtgccccatgaacagatacagcgcccagaagcagttctggaaggccgccaagcccggcgccaacagcaccaccgacgccgtgctgctgaacaagctgcaccacgccgccgacctggagaagaagcagaacgagaccgagaacagaaagctgctgggcaccgtgatccagtacggcaacgtgatccagctgctgcacctgaagagcaacaagtacctgaccgtgaacaagagactgcccgccctgctggagaagaacgccatgagagtgaccctggacgaggccggcaacgagggcagctggttctacatccagcccttctacaagctgagaagcatcggcgacagcgtggtgatcggcgacaaggtggtgctgaaccccgtgaacgccggccagcccctgcacgccagcagccaccagctggtggacaaccccggctgcaacgaggtgaacagcgtgaactgcaacaccagctggaagatcgtgctgttcatgaagtggagcgacaacaaggacgacatcctgaagggcggcgacgtggtgagactgttccacgccgagcaggagaagttcctgacctgcgacgagcacagaaagaagcagcacgtgttcctgagaaccaccggcagacagagcgccaccagcgccaccagcagcaaggccctgtgggaggtggaggtggtgcagcacgacccctgcagaggcggcgccggctactggaacagcctgttcagattcaagcacctggccaccggccactacctggccgccgaggtggaccccgacttcgaggaggagtgcctggagttccagcccagcgtggaccccgaccaggacgccagcagaagcagactgagaaacgcccaggagaagatggtgtacagcctggtgagcgtgcccgagggcaacgacatcagcagcatcttcgagctggaccccaccaccctgagaggcggcgacagcctggtgcccagaaacagctacgtgagactgagacacctgtgcaccaacacctgggtgcacagcaccaacatccccatcgacaaggaggaggagaagcccgtgatgctgaagatcggcaccagccccgtgaaggaggacaaggaggccttcgccatcgtgcccgtgagccccgccgaggtgagagacctggacttcgccaacgacgccagcaaggtgctgggcagcatcgccggcaagctggagaagggcaccatcacccagaacgagagaagaagcgtgaccaagctgctggaggacctggtgtacttcgtgaccggcggcaccaacagcggccaggacgtgctggaggtggtgttcagcaagcccaacagagagagacagaagctgatgagagagcagaacatcctgaagcagatcttcaagctgctgcaggcccccttcaccgactgcggcgacggccccatgctgagactggaggagctgggcgaccagagacacgcccccttcagacacatctgcagactgtgctacagagtgctgagacacagccagcaggactacagaaagaaccaggagtacatcgccaagcagttcggcttcatgcagaagcagatcggctacgacgtgctggccgaggacaccatcaccgccctgctgcacaacaacagaaagctgctggagaagcacatcaccgccgccgagatcgacaccttcgtgagcctggtgagaaagaacagagagcccagattcctggactacctgagcgacctgtgcgtgagcatgaacaagagcatccccgtgacccaggagctgatctgcaaggccgtgctgaaccccaccaacgccgacatcctgatcgagaccaagctggtgctgagcagattcgagttcgagggcgtgagcagcaccggcgagaacgccctggaggccggcgaggacgaggaggaggtgtggctgttctggagagacagcaacaaggagatcagaagcaagagcgtgagagagctggcccaggacgccaaggagggccagaaggaggacagagacgtgctgagctactacagataccagctgaacctgttcgccagaatgtgcctggacagacagtacctggccatcaacgagatcagcggccagctggacgtggacctgatcctgagatgcatgagcgacgagaacctgccctacgacctgagagccagcttctgcagactgatgctgcacatgcacgtggacagagacccccaggagcaggtgacccccgtgaagtacgccagactgtggagcgagatccccagcgagatcgccatcgacgactacgacagcagcggcgccagcaaggacgagatcaaggagagattcgcccagaccatggagttcgtggaggagtacctgagagacgtggtgtgccagagattccccttcagcgacaaggagaagaacaagctgaccttcgaggtggtgaacctggccagaaacctgatctacttcggcttctacaacttcagcgacctgctgagactgaccaagatcctgctggccatcctggactgcgtgcacgtgaccaccatcttccccatcagcaagatggccaagggcgaggagaacaagggcagcaacgtgatgagaagcatccacggcgtgggcgagctgatgacccaggtggtgctgagaggcggcggcttcctgcccatgacccccatggccgccgcccccgagggcaacgtgaagcaggccgagcccgagaaggaggacatcatggtgatggacaccaagctgaagatcatcgagatcctgcagttcatcctgaacgtgagactggactacagaatcagctgcctgctgtgcatcttcaagagagagttcgacgagagcaacagccagaccagcgagaccagcagcggcaacagcagccaggagggccccagcaacgtgcccggcgccctggacttcgagcacatcgaggagcaggccgagggcatcttcggcggcagcgaggagaacacccccctggacctggacgaccacggcggcagaaccttcctgagagtgctgctgcacctgaccatgcacgactacccccccctggtgagcggcgccctgcagctgctgttcagacacttcagccagagacaggaggtgctgcaggccttcaagcaggtgcagctgctggtgaccagccaggacgtggacaactacaagcagatcaagcaggacctggaccagctgagaagcatcgtggagaagagcgagctgtgggtgtacaagggccagggccccgacgagaccatggacggcgccagcggcgagaacgagcacaagaagaccgaggagggcaacaacaagccccagaagcacgagagcaccagcagctacaactacagagtggtgaaggagatcctgatcagactgagcaagctgtgcgtgcaggagagcgccagcgtgagaaagagcagaaagcagcagcagagactgctgagaaacatgggcgcccacgccgtggtgctggagctgctgcagatcccctacgagaaggccgaggacaccaagatgcaggagatcatgagactggcccacgagttcctgcagaacttctgcgccggcaaccagcagaaccaggccctgctgcacaagcacatcaacctgttcctgaaccccggcatcctggaggccgtgaccatgcagcacatcttcatgaacaacttccagctgtgcagcgagatcaacgagagagtggtgcagcacttcgtgcactgcatcgagacccacggcagaaacgtgcagtacatcaagttcctgcagaccatcgtgaaggccgagggcaagttcatcaagaagtgccaggacatggtgatggccgagctggtgaacagcggcgaggacgtgctggtgttctacaacgacagagccagcttccagaccctgatccagatgatgagaagcgagagagacagaatggacgagaacagccccctgatgtaccacatccacctggtggagctgctggccgtgtgcaccgagggcaagaacgtgtacaccgagatcaagtgcaacagcctgctgcccctggacgacatcgtgagagtggtgacccacgaggactgcatccccgaggtgaagatcgcctacatcaacttcctgaaccactgctacgtggacaccgaggtggagatgaaggagatctacaccagcaaccacatgtggaagctgttcgagaacttcctggtggacatctgcagagcctgcaacaacaccagcgacagaaagcacgccgacagcatcctggagaagtacgtgaccgagatcgtgatgagcatcgtgaccaccttcttcagcagccccttcagcgaccagagcaccaccctgcagaccagacagcccgtgttcgtgcagctgctgcagggcgtgttcagagtgtaccactgcaactggctgatgcccagccagaaggccagcgtggagagctgcatcagagtgctgagcgacgtggccaagagcagagccatcgccatccccgtggacctggacagccaggtgaacaacctgttcctgaagagccacagcatcgtgcagaagaccgccatgaactggagactgagcgccagaaacgccgccagaagagacagcgtgctggccgccagcagagactacagaaacatcatcgagagactgcaggacatcgtgagcgccctggaggacagactgagacccctggtgcaggccgagctgagcgtgctggtggacgtgctgcacagacccgagctgctgttccccgagaacaccgacgccagaagaaagtgcgagagcggcggcttcatctgcaagctgatcaagcacaccaagcagctgctggaggagaacgaggagaagctgtgcatcaaggtgctgcagaccctgagagagatgatgaccaaggacagaggctacggcgagaagggcgaggccctgagacaggtgctggtgaacagatactacggcaacgtgagacccagcggcagaagagagagcctgaccagcttcggcaacggccccctgagcgccggcggccccggcaagcccggcggcggcggcggcggcagcggcagcagcagcatgagcagaggcgagatgagcctggccgaggtgcagtgccacctggacaaggagggcgccagcaacctggtgatcgacctgatcatgaacgccagcagcgacagagtgttccacgagagcatcctgctggccatcgccctgctggagggcggcaacaccaccatccagcacagcttcttctgcagactgaccgaggacaagaagagcgagaagttcttcaaggtgttctacgacagaatgaaggtggcccagcaggagatcaaggccaccgtgaccgtgaacaccagcgacctgggcaacaagaagaaggacgacgaggtggacagagacgcccccagcagaaagaaggccaaggagcccaccacccagatcaccgaggaggtgagagaccagctgctggaggccagcgccgccaccagaaaggccttcaccaccttcagaagagaggccgaccccgacgaccactaccagcccggcgagggcacccaggccaccgccgacaaggccaaggacgacctggagatgagcgccgtgatcaccatcatgcagcccatcctgagattcctgcagctgctgtgcgagaaccacaacagagacctgcagaacttcctgagatgccagaacaacaagaccaactacaacctggtgtgcgagaccctgcagttcctggactgcatctgcggcagcaccaccggcggcctgggcctgctgggcctgtacatcaacgagaagaacgtggccctgatcaaccagaccctggagagcctgaccgagtactgccagggcccctgccacgagaaccagaactgcatcgccacccacgagagcaacggcatcgacatcatcaccgccctgatcctgaacgacatcaaccccctgggcaagaagagaatggacctggtgctggagctgaagaacaacgccagcaagctgctgctggccatcatggagagcagacacgacagcgagaacgccgagagaatcctgtacaacatgagacccaaggagctggtggaggtgatcaagaaggcctacatgcagggcgaggtggagttcgaggacggcgagaacggcgaggacggcgccgccagccccagaaacgtgggccacaacatctacatcctggcccaccagctggccagacacaacaaggagctgcagagcatgctgaagcccggcggccaggtggacggcgacgaggccctggagttctacgccaagcacaccgcccagatcgagatcgtgagactggacagaaccatggagcagatcgtgttccccgtgcccagcatctgcgagttcctgaccaaggagagcaagctgagaatctactacaccaccgagagagacgagcagggcagcaagatcaacgacttcttcctgagaagcgaggacctgttcaacgagatgaactggcagaagaagctgagagcccagcccgtgctgtactggtgcgccagaaacatgagcttctggagcagcatcagcttcaacctggccgtgctgatgaacctgctggtggccttcttctaccccttcaagggcgtgagaggcggcaccctggagccccactggagcggcctgctgtggaccgccatgctgatcagcctggccatcgtgatcgccctgcccaagccccacggcatcagagccctgatcgccagcaccatcctgagactgatcttcagcgtgggcctgcagcccaccctgttcctgctgggcgccttcaacgtgtgcaacaagatcatcttcctgatgagcttcgtgggcaactgcggcaccttcaccagaggctacagagccatggtgctggacgtggagttcctgtaccacctgctgtacctggtgatctgcgccatgggcctgttcgtgcacgagttcttctacagcctgctgctgttcgacctggtgtacagagaggagaccctgctgaacgtgatcaagagcgtgaccagaaacggcagaagcatcatcctgaccgccgtgctggccctgatcctggtgtacctgttcagcatcgtgggctacctgttcttcaaggacgacttcatcctggaggtggacagactgcccaacgagaccgccgtgcccgagaccggcgagagcctggccagcgagttcctgttcagcgacgtgtgcagagtggagagcggcgagaactgcagcagccccgcccccagagaggagctggtgcccgccgaggagaccgagcaggacaaggagcacacctgcgagaccctgctgatgtgcatcgtgaccgtgctgagccacggcctgagaagcggcggcggcgtgggcgacgtgctgagaaagcccagcaaggaggagcccctgttcgccgccagagtgatctacgacctgctgttcttcttcatggtgatcatcatcgtgctgaacctgatcttcggcgtgatcatcgacaccttcgccgacctgagaagcgagaagcagaagaaggaggagatcctgaagaccacctgcttcatctgcggcctggagagagacaagttcgacaacaagaccgtgaccttcgaggagcacatcaaggaggagcacaacatgtggcactacctgtgcttcatcgtgctggtgaaggtgaaggacagcaccgagtacaccggccccgagagctacgtggccgagatgatcaaggagagaaacctggactggttccccagaatgagagccatgagcctggtgagcagcgacagcgagggcgagcagaacgagctgagaaacctgcaggagaagctggagagcaccatgaagctggtgaccaacctgagcggccagctgagcgagctgaaggaccagatgaccgagcagagaaagcagaagcagagaatcggcctgctgggccaccccccccacatgaacgtgaacccccagcagcccgcctag

SEQ ID NO: 85196 - DNA, 8133 bp, synthetic construct
  misc_feature 1..8133: note = Description of Artificial Sequence: Synthetic coding sequence
  source 1..8133: mol_type = other DNA
atgagcgacaagatgagcagcttcctgcacatcggcgacatctgcagcctgtacgccgagggcagcaccaacggcttcatcagcaccctgggcctggtggacgacagatgcgtggtgcagcccgagaccggcgacctgaacaacccccccaagaagttcagagactgcctgttcaagctgtgccccatgaacagatacagcgcccagaagcagttctggaaggccgccaagcccggcgccaacagcaccaccgacgccgtgctgctgaacaagctgcaccacgccgccgacctggagaagaagcagaacgagaccgagaacagaaagctgctgggcaccgtgatccagtacggcaacgtgatccagctgctgcacctgaagagcaacaagtacctgaccgtgaacaagagactgcccgccctgctggagaagaacgccatgagagtgaccctggacgaggccggcaacgagggcagctggttctacatccagcccttctacaagctgagaagcatcggcgacagcgtggtgatcggcgacaaggtggtgctgaaccccgtgaacgccggccagcccctgcacgccagcagccaccagctggtggacaaccccggctgcaacgaggtgaacagcgtgaactgcaacaccagctggaagatcgtgctgttcatgaagtggagcgacaacaaggacgacatcctgaagggcggcgacgtggtgagactgttccacgccgagcaggagaagttcctgacctgcgacgagcacagaaagaagcagcacgtgttcctgagaaccaccggcagacagagcgccaccagcgccaccagcagcaaggccctgtgggaggtggaggtggtgcagcacgacccctgcagaggcggcgccggctactggaacagcctgttcagattcaagcacctggccaccggccactacctggccgccgaggtggaccccgacttcgaggaggagtgcctggagttccagcccagcgtggaccccgaccaggacgccagcagaagcagactgagaaacgcccaggagaagatggtgtacagcctggtgagcgtgcccgagggcaacgacatcagcagcatcttcgagctggaccccaccaccctgagaggcggcgacagcctggtgcccagaaacagctacgtgagactgagacacctgtgcaccaacacctgggtgcacagcaccaacatccccatcgacaaggaggaggagaagcccgtgatgctgaagatcggcaccagccccgtgaaggaggacaaggaggccttcgccatcgtgcccgtgagccccgccgaggtgagagacctggacttcgccaacgacgccagcaaggtgctgggcagcatcgccggcaagctggagaagggcaccatcacccagaacgagagaagaagcgtgaccaagctgctggaggacctggtgtacttcgtgaccggcggcaccaacagcggccaggacgtgctggaggtggtgttcagcaagcccaacagagagagacagaagctgatgagagagcagaacatcctgaagcagatcttcaagctgctgcaggcccccttcaccgactgcggcgacggccccatgctgagactggaggagctgggcgaccagagacacgcccccttcagacacatctgcagactgtgctacagagtgctgagacacagccagcaggactacagaaagaaccaggagtacatcgccaagcagttcggcttcatgcagaagcagatcggctacgacgtgctggccgaggacaccatcaccgccctgctgcacaacaacagaaagctgctggagaagcacatcaccgccgccgagatcgacaccttcgtgagcctggtgagaaagaacagagagcccagattcctggactacctgagcgacctgtgcgtgagcatgaacaagagcatccccgtgacccaggagctgatctgcaaggccgtgctgaaccccaccaacgccgacatcctgatcgagaccaagctggtgctgagcagattcgagttcgagggcgtgagcagcaccggcgagaacgccctggaggccggcgaggacgaggaggaggtgtggctgttctggagagacagcaacaaggagatcagaagcaagagcgtgagagagctggcccaggacgccaaggagggccagaaggaggacagagacgtgctgagctactacagataccagctgaacctgttcgccagaatgtgcctggacagacagtacctggccatcaacgagatcagcggccagctggacgtggacctgatcctgagatgcatgagcgacgagaacctgccctacgacctgagagccagcttctgcagactgatgctgcacatgcacgtggacagagacccccaggagcaggtgacccccgtgaagtacgccagactgtggagcgagatccccagcgagatcgccatcgacgactacgacagcagcggcgccagcaaggacgagatcaaggagagattcgcccagaccatggagttcgtggaggagtacctgagagacgtggtgtgccagagattccccttcagcgacaaggagaagaacaagctgaccttcgaggtggtgaacctggccagaaacctgatctacttcggcttctacaacttcagcgacctgctgagactgaccaagatcctgctggccatcctggactgcgtgcacgtgaccaccatcttccccatcagcaagatggccaagggcgaggagaacaagggcagcaacgtgatgagaagcatccacggcgtgggcgagctgatgacccaggtggtgctgagaggcggcggcttcctgcccatgacccccatggccgccgcccccgagggcaacgtgaagcaggccgagcccgagaaggaggacatcatggtgatggacaccaagctgaagatcatcgagatcctgcagttcatcctgaacgtgagactggactacagaatcagctgcctgctgtgcatcttcaagagagagttcgacgagagcaacagccagaccagcgagaccagcagcggcaacagcagccaggagggccccagcaacgtgcccggcgccctggacttcgagcacatcgaggagcaggccgagggcatcttcggcggcagaaaggagaacacccccctggacctggacgaccacggcggcagaaccttcctgagagtgctgctgcacctgaccatgcacgactacccccccctggtgagcggcgccctgcagctgctgttcagacacttcagccagagacaggaggtgctgcaggccttcaagcaggtgcagctgctggtgaccagccaggacgtggacaactacaagcagatcaagcaggacctggaccagctgagaagcatcgtggagaagagcgagctgtgggtgtacaagggccagggccccgacgagaccatggacggcgccagcggcgagaacgagcacaagaagaccgaggagggcaacaacaagccccagaagcacgagagcaccagcagctacaactacagagtggtgaaggagatcctgatcagactgagcaagctgtgcgtgcaggagagcgccagcgtgagaaagagcagaaagcagcagcagagactgctgagaaacatgggcgcccacgccgtggtgctggagctgctgcagatcccctacgagaaggccgaggacaccaagatgcaggagatcatgagactggcccacgagttcctgcagaacttctgcgccggcaaccagcagaaccaggccctgctgcacaagcacatcaacctgttcctgaaccccggcatcctggaggccgtgaccatgcagcacatcttcatgaacaacttccagctgtgcagcgagatcaacgagagagtggtgcagcacttcgtgcactgcatcgagacccacggcagaaacgtgcagtacatcaagttcctgcagaccatcgtgaaggccgagggcaagttcatcaagaagtgccaggacatggtgatggccgagctggtgaacagcggcgaggacgtgctggtgttctacaacgacagagccagcttccagaccctgatccagatgatgagaagcgagagagacagaatggacgagaacagccccctgatgtaccacatccacctggtggagctgctggccgtgtgcaccgagggcaagaacgtgtacaccgagatcaagtgcaacagcctgctgcccctggacgacatcgtgagagtggtgacccacgaggactgcatccccgaggtgaagatcgcctacatcaacttcctgaaccactgctacgtggacaccgaggtggagatgaaggagatctacaccagcaaccacatgtggaagctgttcgagaacttcctggtggacatctgcagagcctgcaacaacaccagcgacagaaagcacgccgacagcatcctggagaagtacgtgaccgagatcgtgatgagcatcgtgaccaccttcttcagcagccccttcagcgaccagagcaccaccctgcagaccagacagcccgtgttcgtgcagctgctgcagggcgtgttcagagtgtaccactgcaactggctgatgcccagccagaaggccagcgtggagagctgcatcagagtgctgagcgacgtggccaagagcagagccatcgccatccccgtggacctggacagccaggtgaacaacctgttcctgaagagccacagcatcgtgcagaagaccgccatgaactggagactgagcgccagaaacgccgccagaagagacagcgtgctggccgccagcagagactacagaaacatcatcgagagactgcaggacatcgtgagcgccctggaggacagactgagacccctggtgcaggccgagctgagcgtgctggtggacgtgctgcacagacccgagctgctgttccccgagaacaccgacgccagaagaaagtgcgagagcggcggcttcatctgcaagctgatcaagcacaccaagcagctgctggaggagaacgaggagaagctgtgcatcaaggtgctgcagaccctgagagagatgatgaccaaggacagaggctacggcgagaagggcgaggccctgagacaggtgctggtgaacagatactacggcaacgtgagacccagcggcagaagagagagcctgaccagcttcggcaacggccccctgagcgccggcggccccggcaagcccggcggcggcggcggcggcagcggcagcagcagcatgagcagaggcgagatgagcctggccgaggtgcagtgccacctggacaaggagggcgccagcaacctggtgatcgacctgatcatgaacgccagcagcgacagagtgttccacgagagcatcctgctggccatcgccctgctggagggcggcaacaccaccatccagcacagcttcttctgcagactgaccgaggacaagaagagcgagaagttcttcaaggtgttctacgacagaatgaaggtggcccagcaggagatcaaggccaccgtgaccgtgaacaccagcgacctgggcaacaagaagaaggacgacgaggtggacagagacgcccccagcagaaagaaggccaaggagcccaccacccagatcaccgaggaggtgagagaccagctgctggaggccagcgccgccaccagaaaggccttcaccaccttcagaagagaggccgaccccgacgaccactaccagcccggcgagggcacccaggccaccgccgacaaggccaaggacgacctggagatgagcgccgtgatcaccatcatgcagcccatcctgagattcctgcagctgctgtgcgagaaccacaacagagacctgcagaacttcctgagatgccagaacaacaagaccaactacaacctggtgtgcgagaccctgcagttcctggactgcatctgcggcagcaccaccggcggcctgggcctgctgggcctgtacatcaacgagaagaacgtggccctgatcaaccagaccctggagagcctgaccgagtactgccagggcccctgccacgagaaccagaactgcatcgccacccacgagagcaacggcatcgacatcatcaccgccctgatcctgaacgacatcaaccccctgggcaagaagagaatggacctggtgctggagctgaagaacaacgccagcaagctgctgctggccatcatggagagcagacacgacagcgagaacgccgagagaatcctgtacaacatgagacccaaggagctggtggaggtgatcaagaaggcctacatgcagggcgaggtggagttcgaggacggcgagaacggcgaggacggcgccgccagccccagaaacgtgggccacaacatctacatcctggcccaccagctggccagacacaacaaggagctgcagagcatgctgaagcccggcggccaggtggacggcgacgaggccctggagttctacgccaagcacaccgcccagatcgagatcgtgagactggacagaaccatggagcagatcgtgttccccgtgcccagcatctgcgagttcctgaccaaggagagcaagctgagaatctactacaccaccgagagagacgagcagggcagcaagatcaacgacttcttcctgagaagcgaggacctgttcaacgagatgaactggcagaagaagctgagagcccagcccgtgctgtactggtgcgccagaaacatgagcttctggagcagcatcagcttcaacctggccgtgctgatgaacctgctggtggccttcttctaccccttcaagggcgtgagaggcggcaccctggagccccactggagcggcctgctgtggaccgccatgctgatcagcctggccatcgtgatcgccctgcccaagccccacggcatcagagccctgatcgccagcaccatcctgagactgatcttcagcgtgggcctgcagcccaccctgttcctgctgggcgccttcaacgtgtgcaacaagatcatcttcctgatgagcttcgtgggcaactgcggcaccttcaccagaggctacagagccatggtgctggacgtggagttcctgtaccacctgctgtacctggtgatctgcgccatgggcctgttcgtgcacgagttcttctacagcctgctgctgttcgacctggtgtacagagaggagaccctgctgaacgtgatcaagagcgtgaccagaaacggcagaagcatcatcctgaccgccgtgctggccctgatcctggtgtacctgttcagcatcgtgggctacctgttcttcaaggacgacttcatcctggaggtggacagactgcccaacgagaccgccgtgcccgagaccggcgagagcctggccagcgagttcctgttcagcgacgtgtgcagagtggagagcggcgagaactgcagcagccccgcccccagagaggagctggtgcccgccgaggagaccgagcaggacaaggagcacacctgcgagaccctgctgatgtgcatcgtgaccgtgctgagccacggcctgagaagcggcggcggcgtgggcgacgtgctgagaaagcccagcaaggaggagcccctgttcgccgccagagtgatctacgacctgctgttcttcttcatggtgatcatcatcgtgctgaacctgatcttcggcgtgatcatcgacaccttcgccgacctgagaagcgagaagcagaagaaggaggagatcctgaagaccacctgcttcatctgcggcctggagagagacaagttcgacaacaagaccgtgaccttcgaggagcacatcaaggaggagcacaacatgtggcactacctgtgcttcatcgtgctggtgaaggtgaaggacagcaccgagtacaccggccccgagagctacgtggccgagatgatcaaggagagaaacctggactggttccccagaatgagagccatgagcctggtgagcagcgacagcgagggcgagcagaacgagctgagaaacctgcaggagaagctggagagcaccatgaagctggtgaccaacctgagcggccagctgagcgagctgaaggaccagatgaccgagcagagaaagcagaagcagagaatcggcctgctgggccaccccccccacatgaacgtgaacccccagcagcccgcctag

SEQ ID NO: 85197 - DNA, 3615 bp, synthetic construct
  misc_feature 1..3615: note = Description of Artificial Sequence: Synthetic coding sequence
  source 1..3615: mol_type = other DNA
caggagcccggccactgccacagcagaggccccggccagcccagccagcagcccctgagccaggtgccccagcactgcgccgaggccatgaactggagactgagcgccagaaacgccgccagaagagacagcgtgctggccgccagcagagactacagaaacatcatcgagagactgcaggacatcgtgagcgccctggaggacagactgagacccctggtgcaggccgagctgagcgtgctggtggacgtgctgcacagacccgagctgctgttccccgagaacaccgacgccagaagaaagtgcgagagcggcggcttcatctgcaagctgatcaagcacaccaagcagctgctggaggagaacgaggagaagctgtgcatcaaggtgctgcagaccctgagagagatgatgaccaaggacagaggctacggcgagaagctgatcagcatcgacgagctggacaacgccgagctgccccccgcccccgacagcgagaacgccaccgaggagctggagcccagcccccccctgagacagctggaggaccacaagagaggcgaggccctgagacaggtgctggtgaacagatactacggcaacgtgagacccagcggcagaagagagagcctgaccagcttcggcaacggccccctgagcgccggcggccccggcaagcccggcggcggcggcggcggcagcggcagcagcagcatgagcagaggcgagatgagcctggccgaggtgcagtgccacctggacaaggagggcgccagcaacctggtgatcgacctgatcatgaacgccagcagcgacagagtgttccacgagagcatcctgctggccatcgccctgctggagggcggcaacaccaccatccagcacagcttcttctgcagactgaccgaggacaagaagagcgagaagttcttcaaggtgttctacgacagaatgaaggtggcccagcaggagatcaaggccaccgtgaccgtgaacaccagcgacctgggcaacaagaagaaggacgacgaggtggacagagacgcccccagcagaaagaaggccaaggagcccaccacccagatcaccgaggaggtgagagaccagctgctggaggccagcgccgccaccagaaaggccttcaccaccttcagaagagaggccgaccccgacgaccactaccagcccggcgagggcacccaggccaccgccgacaaggccaaggacgacctggagatgagcgccgtgatcaccatcatgcagcccatcctgagattcctgcagctgctgtgcgagaaccacaacagagacctgcagaacttcctgagatgccagaacaacaagaccaactacaacctggtgtgcgagaccctgcagttcctggactgcatctgcggcagcaccaccggcggcctgggcctgctgggcctgtacatcaacgagaagaacgtggccctgatcaaccagaccctggagagcctgaccgagtactgccagggcccctgccacgagaaccagaactgcatcgccacccacgagagcaacggcatcgacatcatcaccgccctgatcctgaacgacatcaaccccctgggcaagaagagaatggacctggtgctggagctgaagaacaacgccagcaagctgctgctggccatcatggagagcagacacgacagcgagaacgccgagagaatcctgtacaacatgagacccaaggagctggtggaggtgatcaagaaggcctacatgcagggcgaggtggagttcgaggacggcgagaacggcgaggacggcgccgccagccccagaaacgtgggccacaacatctacatcctggcccaccagctggccagacacaacaaggagctgcagagcatgctgaagcccggcggccaggtggacggcgacgaggccctggagttctacgccaagcacaccgcccagatcgagatcgtgagactggacagaaccatggagcagatcgtgttccccgtgcccagcatctgcgagttcctgaccaaggagagcaagctgagaatctactacaccaccgagagagacgagcagggcagcaagatcaacgacttcttcctgagaagcgaggacctgttcaacgagatgaactggcagaagaagctgagagcccagcccgtgctgtactggtgcgccagaaacatgagcttctggagcagcatcagcttcaacctggccgtgctgatgaacctgctggtggccttcttctaccccttcaagggcgtgagaggcggcaccctggagccccactggagcggcctgctgtggaccgccatgctgatcagcctggccatcgtgatcgccctgcccaagccccacggcatcagagccctgatcgccagcaccatcctgagactgatcttcagcgtgggcctgcagcccaccctgttcctgctgggcgccttcaacgtgtgcaacaagatcatcttcctgatgagcttcgtgggcaactgcggcaccttcaccagaggctacagagccatggtgctggacgtggagttcctgtaccacctgctgtacctggtgatctgcgccatgggcctgttcgtgcacgagttcttctacagcctgctgctgttcgacctggtgtacagagaggagaccctgctgaacgtgatcaagagcgtgaccagaaacggcagaagcatcatcctgaccgccgtgctggccctgatcctggtgtacctgttcagcatcgtgggctacctgttcttcaaggacgacttcatcctggaggtggacagactgcccaacgagaccgccgtgcccgagaccggcgagagcctggccagcgagttcctgttcagcgacgtgtgcagagtggagagcggcgagaactgcagcagccccgcccccagagaggagctggtgcccgccgaggagaccgagcaggacaaggagcacacctgcgagaccctgctgatgtgcatcgtgaccgtgctgagccacggcctgagaagcggcggcggcgtgggcgacgtgctgagaaagcccagcaaggaggagcccctgttcgccgccagagtgatctacgacctgctgttcttcttcatggtgatcatcatcgtgctgaacctgatcttcggcgtgatcatcgacaccttcgccgacctgagaagcgagaagcagaagaaggaggagatcctgaagaccacctgcttcatctgcggcctggagagagacaagttcgacaacaagaccgtgaccttcgaggagcacatcaaggaggagcacaacatgtggcactacctgtgcttcatcgtgctggtgaaggtgaaggacagcaccgagtacaccggccccgagagctacgtggccgagatgatcaaggagagaaacctggactggttccccagaatgagagccatgagcctggtgagcagcgacagcgagggcgagcagaacgagctgagaaacctgcaggagaagctggagagcaccatgaagctggtgaccaacctgagcggccagctgagcgagctgaaggaccagatgaccgagcagagaaagcagaagcagagaatcggcctgctgggccaccccccccacatgaacgtgaacccccagcagcccgcctag

SEQ ID NO: 85198 - DNA, 8232 bp, synthetic construct; identical to SEQ ID NO: 85192
  misc_feature 1..8232: note = Description of Artificial Sequence: Synthetic coding sequence
  source 1..8232: mol_type = other DNA

SEQ ID NO: 85199 - DNA, 8088 bp, synthetic construct
  misc_feature 1..8088: note = Description of Artificial Sequence: Synthetic coding sequence
  source 1..8088: mol_type = other DNA
atgagcgacaagatgagcagcttcctgcacatcggcgacatctgcagcctgtacgccgagggcagcaccaacggcttcatcagcaccctgggcctggtggacgacagatgcgtggtgcagcccgagaccggcgacctgaacaacccccccaagaagttcagagactgcctgttcaagctgtgccccatgaacagatacagcgcccagaagcagttctggaaggccgccaagcccggcgccaacagcaccaccgacgccgtgctgctgaacaagctgcaccacgccgccgacctggagaagaagcagaacgagaccgagaacagaaagctgctgggcaccgtgatccagtacggcaacgtgatccagctgctgcacctgaagagcaacaagtacctgaccgtgaacaagagactgcccgccctgctggagaagaacgccatgagagtgaccctggacgaggccggcaacgagggcagctggttctacatccagcccttctacaagctgagaagcatcggcgacagcgtggtgatcggcgacaaggtggtgctgaaccccgtgaacgccggccagcccctgcacgccagcagccaccagctggtggacaaccccggctgcaacgaggtgaacagcgtgaactgcaacaccagctggaagatcgtgctgttcatgaagtggagcgacaacaaggacgacatcctgaagggcggcgacgtggtgagactgttccacgccgagcaggagaagttcctgacctgcgacgagcacagaaagaagcagcacgtgttcctgagaaccaccggcagacagagcgccaccagcgccaccagcagcaaggccctgtgggaggtggaggtggtgcagcacgacccctgcagaggcggcgccggctactggaacagcctgttcagattcaagcacctggccaccggccactacctggccgccgaggtggaccccgaccaggacgccagcagaagcagactgagaaacgcccaggagaagatggtgtacagcctggtgagcgtgcccgagggcaacgacatcagcagcatcttcgagctggaccccaccaccctgagaggcggcgacagcctggtgcccagaaacagctacgtgagactgagacacctgtgcaccaacacctgggtgcacagcaccaacatccccatcgacaaggaggaggagaagcccgtgatgctgaagatcggcaccagccccgtgaaggaggacaaggaggccttcgccatcgtgcccgtgagccccgccgaggtgagagacctggacttcgccaacgacgccagcaaggtgctgggcagcatcgccggcaagctggagaagggcaccatcacccagaacgagagaagaagcgtgaccaagctgctggaggacctggtgtacttcgtgaccggcggcaccaacagcggccaggacgtgctggaggtggtgttcagcaagcccaacagagagagacagaagctgatgagagagcagaacatcctgaagcagatcttcaagctgctgcaggcccccttcaccgactgcggcgacggccccatgctgagactggaggagctgggcgaccagagacacgcccccttcagacacatctgcagactgtgctacagagtgctgagacacagccagcaggactacagaaagaaccaggagtacatcgccaagcagttcggcttcatgcagaagcagatcggctacgacgtgctggccgaggacaccatcaccgccctgctgcacaacaacagaaagctgctggagaagcacatcaccgccgccgagatcgacaccttcgtgagcctggtgagaaagaacagagagcccagattcctggactacctgagcgacctgtgcgtgagcatgaacaagagcatccccgtgacccaggagctgatctgcaaggccgtgctgaaccccaccaacgccgacatcctgatcgagaccaagctggtgctgagcagattcgagttcgagggcgtgagcagcaccggcgagaacgccctggaggccggcgaggacgaggaggaggtgtggctgttctggagagacagcaacaaggagatcagaagcaagagcgtgagagagctggcccaggacgccaaggagggccagaaggaggacagagacgtgctgagctactacagataccagctgaacctgttcgccagaatgtgcctggacagacagtacctggccatcaacgagatcagcggccagctggacgtggacctgatcctgagatgcatgagcgacgagaacctgccctacgacctgagagccagcttctgcagactgatgctgcacatgcacgtggacagagacccccaggagcaggtgacccccgtgaagtacgccagactgtggagcgagatccccagcgagatcgccatcgacgactacgacagcagcggcgccagcaaggacgagatcaaggagagattcgcccagaccatggagttcgtggaggagtacctgagagacgtggtgtgccagagattccccttcagcgacaaggagaagaacaagctgaccttcgaggtggtgaacctggccagaaacctgatctacttcggcttctacaacttcagcgacctgctgagactgaccaagatcctgctggccatcctggactgcgtgcacgtgaccaccatcttccccatcagcaagatggccaagggcgaggagaacaagggcagcaacgtgatgagaagcatccacggcgtgggcgagctgatgacccaggtggtgctgagaggcggcggcttcctgcccatgacccccatggccgccgcccccgagggcaacgtgaagcaggccgagcccgagaaggaggacatcatggtgatggacaccaagctgaagatcatcgagatcctgcagttcatcctgaacgtgagactggactacagaatcagctgcctgctgtgcatcttcaagagagagttcgacgagagcaacagccagaccagcgagaccagcagcggcaacagcagccaggagggccccagcaacgtgcccggcgccctggacttcgagcacatcgaggagcaggccgagggcatcttcggcggcagcgaggagaacacccccctggacctggacgaccacggcggcagaaccttcctgagagtgctgctgcacctgaccatgcacgactacccccccctggtgagcggcgccctgcagctgctgttcagacacttcagccagagacaggaggtgctgcaggccttcaagcaggtgcagctgctggtgaccagccaggacgtggacaactacaagcagatcaagcaggacctggaccagctgagaagcatcgtggagaagagcgagctgtgggtgtacaagggccagggccccgacgagaccatggacggcgccagcggcgagaacgagcacaagaagaccgaggagggcaacaacaagccccagaagcacgagagcaccagcagctacaactacagagtggtgaaggagatcctgatcagactgagcaagctgtgcgtgcaggagagcgccagcgtgagaaagagcagaaagcagcagcagagactgctgagaaacatgggcgcccacgccgtggtgctggagctgctgcagatcccctacgagaaggccgaggacaccaagatgcaggagatcatgagactggcccacgagttcctgcagaacttctgcgccggcaaccagcagaaccaggccctgctgcacaagcacatcaacctgttcctgaaccccggcatcctggaggccgtgaccatgcagcacatcttcatgaacaacttccagctgtgcagcgagatcaacgagagagtggtgcagcacttcgtgcactgcatcgagacccacggcagaaacgtgcagtacatcaagttcctgcagaccatcgtgaaggccgagggcaagttcatcaagaagtgccaggacatggtgatggccgagctggtgaacagcggcgaggacgtgctggtgttctacaacgacagagccagcttccagaccctgatccagatgatgagaagcgagagagacagaatggacgagaacagccccctgatgtaccacatccacctggtggagctgctggccgtgtgcaccgagggcaagaacgtgtacaccgagatcaagtgcaacagcctgctgcccctggacgacatcgtgagagtggtgacccacgaggactgcatccccgaggtgaagatcgcctacatcaacttcctgaaccactgctacgtggacaccgaggtggagatgaaggagatctacaccagcaaccacatgtggaagctgttcgagaacttcctggtggacatctgcagagcctgcaacaacaccagcgacagaaagcacgccgacagcatcctggagaagtacgtgaccgagatcgtgatgagcatcgtgaccaccttcttcagcagccccttcagcgaccagagcaccaccctgcagaccagacagcccgtgttcgtgcagctgctgcagggcgtgttcagagtgtaccactgcaactggctgatgcccagccagaaggccagcgtggagagctgcatcagagtgctgagcgacgtggccaagagcagagccatcgccatccccgtggacctggacagccaggtgaacaacctgttcctgaagagccacagcatcgtgcagaagaccgccatgaactggagactgagcgccagaaacgccgccagaagagacagcgtgctggccgccagcagagactacagaaacatcatcgagagactgcaggacatcgtgagcgccctggaggacagactgagacccctggtgcaggccgagctgagcgtgctggtggacgtgctgcacagacccgagctgctgttccccgagaacaccgacgccagaagaaagtgcgagagcggcggcttcatctgcaagctgatcaagcacaccaagcagctgctggaggagaacgaggagaagctgtgcatcaaggtgctgcagaccctgagagagatgatgaccaaggacagaggctacggcgagaagggcgaggccctgagacaggtgctggtgaacagatactacggcaacgtgagacccagcggcagaagagagagcctgaccagcttcggcaacggccccctgagcgccggcggccccggcaagcccggcggcggcggcggcggcagcggcagcagcagcatgagcagaggcgagatgagcctggccgaggtgcagtgccacctggacaaggagggcgccagcaacctggtgatcgacctgatcatgaacgccagcagcgacagagtgttccacgagagcatcctgctggccatcgccctgctggagggcggcaacaccaccatccagcacagcttcttctgcagactgaccgaggacaagaagagcgagaagttcttcaaggtgttctacgacagaatgaaggtggcccagcaggagatcaaggccaccgtgaccgtgaacaccagcgacctgggcaacaagaagaaggacgacgaggtggacagagacgcccccagcagaaagaaggccaaggagcccaccacccagatcaccgaggaggtgagagaccagctgctggaggccagcgccgccaccagaaaggccttcaccaccttcagaagagaggccgaccccgacgaccactaccagcccggcgagggcacccaggccaccgccgacaaggccaaggacgacctggagatgagcgccgtgatcaccatcatgcagcccatcctgagattcctgcagctgctgtgcgagaaccacaacagagacctgcagaacttcctgagatgccagaacaacaagaccaactacaacctggtgtgcgagaccctgcagttcctggactgcatctgcggcagcaccaccggcggcctgggcctgctgggcctgtacatcaacgagaagaacgtggccctgatcaaccagaccctggagagcctgaccgagtactgccagggcccctgccacgagaaccagaactgcatcgccacccacgagagcaacggcatcgacatcatcaccgccctgatcctgaacgacatcaaccccctgggcaagaagagaatggacctggtgctggagctgaagaacaacgccagcaagctgctgctggccatcatggagagcagacacgacagcgagaacgccgagagaatcctgtacaacatgagacccaaggagctggtggaggtgatcaagaaggcctacatgcagggcgaggtggagttcgaggacggcgagaacggcgaggacggcgccgccagccccagaaacgtgggccacaacatctacatcctggcccaccagctggccagacacaacaaggagctgcagagcatgctgaagcccggcggccaggtggacggcgacgaggccctggagttctacgccaagcacaccgcccagatcgagatcgtgagactggacagaaccatggagcagatcgtgttccccgtgcccagcatctgcgagttcctgaccaaggagagcaagctgagaatctactacaccaccgagagagacgagcagggcagcaagatcaacgacttcttcctgagaagcgaggacctgttcaacgagatgaactggcagaagaagctgagagcccagcccgtgctgtactggtgcgccagaaacatgagcttctggagcagcatcagcttcaacctggccgtgctgatgaacctgctggtggccttcttctaccccttcaagggcgtgagaggcggcaccctggagccccactggagcggcctgctgtggaccgccatgctgatcagcctggccatcgtgatcgccctgcccaagccccacggcatcagagccctgatcgccagcaccatcctgagactgatcttcagcgtgggcctgcagcccaccctgttcctgctgggcgccttcaacgtgtgcaacaagatcatcttcctgatgagcttcgtgggcaactgcggcaccttcaccagaggctacagagccatggtgctggacgtggagttcctgtaccacctgctgtacctggtgatctgcgccatgggcctgttcgtgcacgagttcttctacagcctgctgctgttcgacctggtgtacagagaggagaccctgctgaacgtgatcaagagcgtgaccagaaacggcagaagcatcatcctgaccgccgtgctggccctgatcctggtgtacctgttcagcatcgtgggctacctgttcttcaaggacgacttcatcctggaggtggacagactgcccaacgagaccgccgtgcccgagaccggcgagagcctggccagcgagttcctgttcagcgacgtgtgcagagtggagagcggcgagaactgcagcagccccgcccccagagaggagctggtgcccgccgaggagaccgagcaggacaaggagcacacctgcgagaccctgctgatgtgcatcgtgaccgtgctgagccacggcctgagaagcggcggcggcgtgggcgacgtgctgagaaagcccagcaaggaggagcccctgttcgccgccagagtgatctacgacctgctgttcttcttcatggtgatcatcatcgtgctgaacctgatcttcggcgtgatcatcgacaccttcgccgacctgagaagcgagaagcagaagaaggaggagatcctgaagaccacctgcttcatctgcggcctggagagagacaagttcgacaacaagaccgtgaccttcgaggagcacatcaaggaggagcacaacatgtggcactacctgtgcttcatcgtgctggtgaaggtgaaggacagcaccgagtacaccggccccgagagctacgtggccgagatgatcaaggagagaaacctggactggttccccagaatgagagccatgagcctggtgagcagcgacagcgagggcgagcagaacgagctgagaaacctgcaggagaagctggagagcaccatgaagctggtgaccaacctgagcggccagctgagcgagctgaaggaccagatgaccgagcagagaaagcagaagcagagaatcggcctgctgggccaccccccccacatgaacgtgaacccccagcagcccgcctag

SEQ ID NO: 85200 - DNA, 2166 bp, synthetic construct
  misc_feature 1..2166: note = Description of Artificial Sequence: Synthetic coding sequence
  source 1..2166: mol_type = other DNA
atgagcgacaagatgagcagcttcctgcacatcggcgacatctgcagcctgtacgccgagggcagcaccaacggcttcatcagcaccctgggcctggtggacgacagatgcgtggtgcagcccgagaccggcgacctgaacaacccccccaagaagttcagagactgcctgttcaagctgtgccccatgaacagatacagcgcccagaagcagttctggaaggccgccaagcccggcgccaacagcaccaccgacgccgtgctgctgaacaagctgcaccacgccgccgacctggagaagaagcagaacgagaccgagaacagaaagctgctgggcaccgtgatccagtacggcaacgtgatccagctgctgcacctgaagagcaacaagtacctgaccgtgaacaagagactgcccgccctgctggagaagaacgccatgagagtgaccctggacgaggccggcaacgagggcagctggttctacatccagcccttctacaagctgagaagcatcggcgacagcgtggtgatcggcgacaaggtggtgctgaaccccgtgaacgccggccagcccctgcacgccagcagccaccagctggtggacaaccccggctgcaacgaggtgaacagcgtgaactgcaacaccagctggaagatcgtgctgttcatgaagtggagcgacaacaaggacgacatcctgaagggcggcgacgtggtgagactgttccacgccgagcaggagaagttcctgacctgcgacgagcacagaaagaagcagcacgtgttcctgagaaccaccggcagacagagcgccaccagcgccaccagcagcaaggccctgtgggaggtggaggtggtgcagcacgacccctgcagaggcggcgccggctactggaacagcctgttcagattcaagcacctggccaccggccactacctggccgccgaggtggaccccgacttcgaggaggagtgcctggagttccagcccagcgtgtgcaacaagatcatcttcctgatgagcttcgtgggcaactgcggcaccttcaccagaggctacagagccatggtgctggacgtggagttcctgtaccacctgctgtacctggtgatctgcgccatgggcctgttcgtgcacgagttcttctacagcctgctgctgttcgacctggtgtacagagaggagaccctgctgaacgtgatcaagagcgtgaccagaaacggcagaagcatcatcctgaccgccgtgctggccctgatcctggtgtacctgttcagcatcgtgggctacctgttcttcaaggacgacttcatcctggaggtggacagactgcccaacgagaccgccgtgcccgagaccggcgagagcctggccagcgagttcctgttcagcgacgtgtgcagagtggagagcggcgagaactgcagcagccccgcccccagagaggagctggtgcccgccgaggagaccgagcaggacaaggagcacacctgcgagaccctgctgatgtgcatcgtgaccgtgctgagccacggcctgagaagcggcggcggcgtgggcgacgtgctgagaaagcccagcaaggaggagcccctgttcgccgccagagtgatctacgacctgctgttcttcttcatggtgatcatcatcgtgctgaacctgatcttcggcgtgatcatcgacaccttcgccgacctgagaagcgagaagcagaagaaggaggagatcctgaagaccacctgcttcatctgcggcctggagagagacaagttcgacaacaagaccgtgaccttcgaggagcacatcaaggaggagcacaacatgtggcactacctgtgcttcatcgtgctggtgaaggtgaaggacagcaccgagtacaccggccccgagagctacgtggccgagatgatcaaggagagaaacctggactggttccccagaatgagagccatgagcctggtgagcagcgacagcgagggcgagcagaacgagctgagaaacctgcaggagaagctggagagcaccatgaagctggtgaccaacctgagcggccagctgagcgagctgaaggaccagatgaccgagcagagaaagcagaagcagagaatcggcctgctgggccaccccccccacatgaacgtgaacccccagcagcccgcctag

SEQ ID NO: 85201 - DNA, 546 bp, synthetic construct
  misc_feature 1..546: note = Description of Artificial Sequence: Synthetic coding sequence
  source 1..546: mol_type = other DNA
atgaccgagaagatgagcagcttcctgtacatcggcgacatcgtgagcctgtacgccgagggcagcgtgaacggcttcatcagcaccctgggcctggtggacgacagatgcgtggtgcaccccgaggccggcgacctggccaacccccccaagaagttcagagactgcctgttcaaggtgtgccccatgaacagatacagcgcccagaagcagtactggaaggccaagcaggccaagcagggcaaccacaccgaggccgccctgctgaagaagctgcagcacgccgccgagctggagcagaagcagaacgagagcgagaacaagaagctgctgggcgagatcgtgaagtacagcaacgtgatccagctgctgcacatcaagagcaacaagtacctgaccgtgaacaagagactgcccgccctgctggagaagaacgccatgagagtgagcctggacgccgccggcaacgagggcagctggttctacatccaccccttctggaagctgagaagcgagggcgacaacgacgccagcttctggatctag

SEQ ID NO: 85202 - DNA, 8106 bp, synthetic construct
  misc_feature 1..8106: note = Description of Artificial Sequence: Synthetic coding sequence
  source 1..8106: mol_type = other DNA
atgaccgagaagatgagcagcttcctgtacatcggcgacatcgtgagcctgtacgccgagggcagcgtgaacggcttcatcagcaccctgggcctggtggacgacagatgcgtggtgcaccccgaggccggcgacctggccaacccccccaagaagttcagagactgcctgttcaaggtgtgccccatgaacagatacagcgcccagaagcagtactggaaggccaagcaggccaagcagggcaaccacaccgaggccgccctgctgaagaagctgcagcacgccgccgagctggagcagaagcagaacgagagcgagaacaagaagctgctgggcgagatcgtgaagtacagcaacgtgatccagctgctgcacatcaagagcaacaagtacctgaccgtgaacaagagactgcccgccctgctggagaagaacgccatgagagtgagcctggacgccgccggcaacgagggcagctggttctacatccaccccttctggaagctgagaagcgagggcgacaacatcgtggtgggcgacaaggtggtgctgatgcccgtgaacgccggccagcccctgcacgccagcaacatcgagctgctggacaaccccggctgcaaggaggtgaacgccgtgaactgcaacaccagctggaagatcaccctgttcatgaagtacagcagctacagagaggacgtgctgaagggcggcgacgtggtgagactgttccacgccgagcaggagaagttcctgacctgcgacgagtacgagaagaagcagcacatcttcctgagaaccaccctgagacagagcgccaccagcgccaccagcagcaaggccctgtgggagatcgaggtggtgcaccacgacccctgcagaggcggcgccggccagtggaacagcctgttcagattcaagcacctggccaccggcaactacctggccgccgagctgaaccccgactacagagacgcccagaacgagggcaagaacgtgagagacggcgtgccccccaccagcaagaagaagagacaggccggcgagaagatcatgtacaccctggtgagcgtgccccacggcaacgacatcgccagcctgttcgagctggacgccaccaccctgcagagagccgactgcctggtgcccagaaacagctacgtgagactgagacacctgtgcaccaacacctgggtgaccagcaccagcatccccatcgacaccgacgaggagagacccgtgatgctgaagatcggcacctgccagaccaaggaggacaaggaggccttcgccatcgtgagcgtgcccctgagcgaggtgagagacctggacttcgccaacgacgccaacaaggtgctggccaccaccgtgaagaagctggagaacggcaccatcacccagaacgagagaagattcgtgaccaagctgctggaggacctgatcttcttcgtggccgacgtgcccaacaacggccaggaggtgctggacgtggtgatcaccaagcccaacagagagagacagaagctgatgagagagcagaacatcctggcccaggtgttcggcatcctgaaggcccccttcaaggagaaggccggcgagggcagcatgctgagactggaggacctgggcgaccagagatacgccccctacaagtacatgctgagactgtgctacagagtgctgagacacagccagcaggactacagaaagaaccaggagtacatcgccaagaacttctgcgtgatgcagagccagatcggctacgacatcctggccgaggacaccatcaccgccctgctgcacaacaacagaaagctgctggagaagcacatcaccgccaaggagatcgagaccttcgtgagcctgctgagaagaaacagagagcccagattcctggactacctgagcgacctgtgcgtgagcaacaccaccgccatccccgtgacccaggagctgatctgcaagttcatgctgagccccggcaacgccgacatcctgatccagaccaaggtggtgagcatgcaggccgacaaccccatggagagcagcatcctgagcgacgacatcgacgacgaggaggtgtggctgtactggatcgacagcaacaaggagccccacggcaaggccatcagacacctggcccaggaggccaaggagggcaccaaggccgacctggaggtgctgacctactacagataccagctgaacctgttcgccagaatgtgcctggacagacagtacctggccatcaaccagatcagcacccagctgagcgtggacctgatcctgagatgcgtgagcgacgagagcctgcccttcgacctgagagccagcttctgcagactgatgctgcacatgcacgtggacagagacccccaggagagcgtggtgcccgtgagatacgccagactgtggaccgagatccccaccaagatcaccatccacgagtacgacagcatcaccgacagcagcagaaacgacatgaagagaaagttcgccctgaccatggagttcgtggaggagtacctgaaggaggtggtgaaccagcccttccccttcggcgacaaggagaagaacaagctgaccttcgaggtggtgcacctggccagaaacctgatctacttcggcttctacagcttcagcgagctgctgagactgaccagaaccctgctggccatcctggacatcgtgcaggcccccatgagcagctacttcgagagactgagcaagttccaggacggcggcaacaacgtgatgagaaccatccacggcgtgggcgagatgatgacccagatggtgctgagcagaggcagcatcttccccatgagcgtgcccgacgtgccccccagcatccaccccagcaagcagggcagccccaccgagcacgaggacgtgaccgtgatggacaccaagctgaagatcatcgagatcctgcagttcatcctgagcgtgagactggactacagaatcagctacatgctgagcatctacaagaaggagttcggcgaggacaacgacaacgccgagaccagcgccagcggcagccccgacaccctgctgcccagcgccatcgtgcccgacatcgacgagatcgccgcccaggccgagaccatgttcgccggcagaaaggagaagaaccccgtgcagctggacgacgagggcggcagaaccttcctgagagtgctgatccacctgatcatgcacgactacccccccctgctgagcggcgccctgcagctgctgttcaagcacttcagccagagagccgaggtgctgcaggccttcaagcaggtgcagctgctggtgagcaaccaggacgtggacaactacaagcagatcaaggccgacctggaccagctgagactgaccgtggagaagagcgagctgtgggtggagaagagcagcaactacgagaacggcgagatcggcgagagccaggtgaagggcggcgaggagcccatcgaggagagcaacatcctgagccccgtgcaggacggcaccaagaagccccagatcgacagcaacaagagcaacaactacagaatcgtgaaggagatcctgatcagactgagcaagctgtgcgtgcagaacaagaagtgcagaaaccagcaccagagactgctgaagaacatgggcgcccacagcgtggtgctggacctgctgcagatcccctacgagaagaacgacgagaagatgaacgaggtgatgaacctggcccacaccttcctgcagaacttctgcagaggcaacccccagaaccaggtgctgctgcacaagcacctgaacctgttcctgacccccggcctgctggaggccgagaccatgagacacatcttcatgaacaactaccacctgtgcaacgagatcagcgagagagtggtgcagcacttcgtgcactgcatcgagacccacggcagacacgtggagtacctgagattcctgcagaccatcgtgaaggccgacggcaagtacgtgaagaagtgccaggacatggtgatgaccgagctgatcaacggcggcgaggacgtgctgatcttctacaacgacagagccagcttccccatcctgctgcacatgatgtgcagcgagagagacagaggcgacgagagcggccccctggcctaccacatcaccctggtggagctgctggccgcctgcaccgagggcaagaacgtgtacaccgagatcaagtgcaacagcctgctgcccctggacgacatcgtgagagtggtgacccacgacgactgcatccccgaggtgaagatcgcctacgtgaacttcgtgaaccactgctacgtggacaccgaggtggagatgaaggagatctacaccagcaaccacatctggaagctgttcgagaacttcctggtggacatggccagagtgtgcaacaccaccaccgacagaaagcacgccgacatcttcctggagaagtgcgtgaccgagagcatcatgaacatcgtgagcggcttcttcaacagccccttcagcgacaacagcaccagcctgcagacccaccagcccgtgttcatccagctgctgcagagcgccttcagaatctacaactgcacctggcccaaccccgcccagaaggccagcgtggagagctgcatcagaaccctggccgaggtggccaagaacagaggcatcgccatccccgtggacctggacagccaggtgaacaccctgttcatgaagagccacagcaacatggtgcagagagccgccatgggctggagactgagcgccagaagcggccccagattcaaggaggccctgggcggccccgcctgggactacagaaacatcatcgagaagctgcaggacgtggtggccagcctggagcaccagttcagccccatgatgcaggccgagttcagcgtgctggtggacgtgctgtacagccccgagctgctgttccccgagggcagcgacgccagaatcagatgcggcgccttcatgagcaagctgatcaaccacaccaagaagctgatggagaaggaggagaagctgtgcatcaagatcctgcagaccctgagagagatgctggagaagaaggacagcttcgtggaggagggcaacaccctgagaaagatcctgctgaacagatacttcaagggcgactacagcatcggcgtgaacggccacctgagcggcgcctacagcaagaccgcccaggtgggcggcagcttcagcggccaggacagcgacaagatgggcatcagcatgagcgacatccagtgcctgctggacaaggagggcgccagcgagctggtgatcgacgtgatcgtgaacaccaagaacgacagaatcttcagcgagggcatcttcctgggcatcgccctgctggagggcggcaacacccagacccagtacagcttctaccagcagctgcacgagcagaagaagagcgagaagttcttcaaggtgctgtacgacagaatgaaggccgcccagaaggagatcagaagcaccgtgaccgtgaacaccatcgacctgggcaacaagaagagagacgacgacaacgagctgatgaccagcggccccagaatgagagtgagagacagcaccctgcacctgaaggagggcatgaagggccagctgaccgaggccagcagcgccaccagcaaggcctactgcgtgtacagaagagagatggaccccgagatcgacatcatgtgcaccggccccgaggccggcaacaccgaggagaagagcgccgaggaggtgaccatgagccccgccatcgccatcatgcagcccatcctgagattcctgcagctgctgtgcgagaaccacaacagagagctgcagaacttcctgagaaaccagaacaacaagaccaactacaacctggtgtgcgagaccctgcagttcctggactgcatctgcggcagcaccaccggcggcctgggcctgctgggcctgtacatcaacgagaagaacgtggccctggtgaaccagaacctggagagcctgaccgagtactgccagggcccctgccacgagaaccagacctgcatcgccacccacgagagcaacggcatcgacatcatcatcgccctgatcctgaacgacatcaaccccctgggcaagtacagaatggacctggtgctgcagctgaagaacaacgccagcaagctgctgctggccatcatggagagcagacacgacagcgagaacgccgagagaatcctgttcaacatgagacccagagagctggtggacgtgatgaagaacgcctacaaccagggcctggagtgcgaccacggcgacgacgagggcggcgacgacggcgtgagccccaaggacgtgggccacaacatctacatcctggcccaccagctggccagacacaacaagctgctgcagcagatgctgaagcccggcagcgaccccgacgagggcgacgaggccctgaagtactacgccaaccacaccgcccagatcgagatcgtgagacacgacagaaccatggagcagatcgtgttccccgtgcccaacatctgcgagtacctgaccagagagagcaagtgcagagtgttcaacaccaccgagagagacgagcagggcagcaaggtgaacgacttcttccagcagaccgaggacctgtacaacgagatgaagtggcagaagaagatcagaaacaaccccgccctgttctggttcagcagacacatcagcctgtggggcagcatcagcttcaacctggccgtgttcatcaacctggccgtggccctgttctaccccttcggcgacgacggcgacgagggcaccctgagccccctgttcagcgtgctgctgtggatcgccgtggccatctgcaccagcatgctgttcttcttcagcaagcccgtgggcatcagacccttcctggtgagcatcatgctgagaagcatctacaccatcggcctgggccccaccctgatcctgctgggcgccgccaacctgtgcaacaagatcgtgttcctggtgagcttcgtgggcaacagaggcaccttcaccagaggctacagagccgtgatcctggacatggccttcctgtaccacgtggcctacgtgctggtgtgcatgctgggcctgttcgtgcacgagttcttctacagcttcctgctgttcgacctggtgtacagagaggagaccctgctgaacgtgatcaagagcgtgaccagaaacggcagaagcatcatcctgaccgccgtgctggccctgatcctggtgtacctgttcagcatcatcggcttcctgttcctgaaggacgacttcaccatggaggtggacagactgaagaacagaacccccgtgaccggcagccaccaggtgcccaccatgaccctgaccaccatgatggaggcctgcgccaaggagaactgcagccccaccatccccgccagcaacaccgccgacgaggagtacgaggacggcatcgagagaacctgcgacaccctgctgatgtgcatcgtgaccgtgctgaaccagggcctgagaaacggcggcggcgtgggcgacgtgctgagaagacccagcaaggacgagcccctgttcgccgccagagtggtgtacgacctgctgttctacttcatcgtgatcatcatcgtgctgaacctgatcttcggcgtgatcatcgacaccttcgccgacctgagaagcgagaagcagaagaaggaggagatcctgaagaccacctgcttcatctgcggcctggagagagacaagttcgacaacaagaccgtgagcttcgaggagcacatcaagagcgagcacaacatgtggcactacctgtacttcatcgtgctggtgaaggtgaaggaccccaccgagtacaccggccccgagagctacgtggcccagatgatcgtggagaagaacctggactggttccccagaatgagagccatgagcctggtgagcaacgagggcgacagcgagcagaacgagatcagaagcctgcaggagaagctggagagcaccatgagcctggtgaagcagctgagcggccagctggccgagctgaaggagcagatgaccgagcagagaaagaacaagcagagactgggcttcctgggcagcaacaccccccacgtgaaccaccacatgcccccccactag

SEQ ID NO: 85203 - DNA, 8016 bp, synthetic construct
  misc_feature 1..8016: note = Description of Artificial Sequence: Synthetic coding sequence
  source 1..8016: mol_type = other DNA
atgagcgagatgagcagcttcctgcacatcggcgacatcgtgagcctgtacgccgagggcagcgtgaacggcttcatcagcaccctgggcctggtggacgacagatgcgtggtggagcccgccgccggcgacctggacaacccccccaagaagttcagagactgcctgttcaaggtgtgccccatgaacagatacagcgcccagaagcagtactggaaggccaagcagaccaagcaggacaaggagaagatcgccgacgtggtgctgctgcagaagctgcagcacgccgcccagatggagcagaagcagaacgacaccgagaacaagaaggtgcacggcgacgtggtgaagtacggcagcgtgatccagctgctgcacatgaagagcaacaagtacctgaccgtgaacaagagactgcccgccctgctggagaagaacgccatgagagtgaccctggacgccaccggcaacgagggcagctggctgttcatccagcccttctggaagctgagaagcaacggcgacaacgtggtggtgggcgacaaggtgatcctgaaccccgtgaacgccggccagcccctgcacgccagcaactacgagctgagcgacaacgccggctgcaaggaggtgaacagcgtgaactgcaacaccagctggaagatcaacctgttcatgcagttcagagaccacctggaggaggtgctgaagggcggcgacgtggtgagactgttccacgccgagcaggagaagttcctgacctgcgacgagtacaagggcaagctgcaggtgttcctgagaaccaccctgagacagagcgccaccagcgccaccagcagcaacgccctgtgggaggtggaggtggtgcaccacgacccctgcagaggcggcgccggccactggaacggcctgtacagattcaagcacctggccaccggcaactacctggccgccgaggagaaccccagctacaagggcgacgccagcgaccccaaggccgccggcatgggcgcccagggcagaaccggcagaagaaacgccggcgagaagatcaagtactgcctggtggccgtgccccacggcaacgacatcgccagcctgttcgagctggaccccaccaccctgcagaagaccgacagcttcgtgcccagaaacagctacgtgagactgagacacctgtgcaccaacacctggatccagagcaccaacgtgcccatcgacatcgaggaggagagacccatcagactgatgctgggcacctgccccaccaaggaggacaaggaggccttcgccatcgtgagcgtgcccgtgagcgagatcagagacctggacttcgccaacgacgccagcagcatgctggccagcgccgtggagaagctgaacgagggcttcatcagccagaacgacagaagattcgtgatccagctgctggaggacctggtgttcttcgtgagcgacgtgcccaacaacggccagaacgtgctggacatcatggtgaccaagcccaacagagagagacagaagctgatgagagagcagaacatcctgaagcaggtgttcggcatcctgaaggcccccttcagagagaagggcggcgagggccccctggtgagactggaggagctgagcgaccagaagaacgccccctaccagcacatgttcagactgtgctacagagtgctgagacacagccaggaggactacagaaagaaccaggagcacatcgccaagcagttcggcatgatgcagagccagatcggctacgacatcctggccgaggacaccatcaccgccctgctgcacaacaacagaaagctgctggagaagcacatcaccaagaccgaggtggagaccttcgtgagcctggtgagaaagaacagagagcccagattcctggactacctgagcgacctgtgcgtgagcaaccacatcgccatccccgtgacccaggagctgatctgcaagtgcgtgctggaccccaagaacagcgacatcctgatcagaaccgagctgagacccgtgaaggagatggcccagagccacgagtacctgagcatcgagtacagcgaggaggaggtgtggctgacctggaccgacaagaacaacgagcaccacgagaagagcgtgagacagctggcccaggaggccagagccggcaacgcccacgacgagaacgtgctgagctactacagataccagctgaagctgttcgccagaatgtgcctggacagacagtacctggccatcgacgagatcagccagcagctgggcgtggacctgatcttcctgtgcatggccgacgagatgctgcccttcgacctgagagccagcttctgccacctgatgctgcacgtgcacgtggacagagacccccaggagctggtgacccccgtgaagttcgccagactgtggaccgagatccccaccgccatcaccatcaaggactacgacagcaacctgaacgccagcagagacgacaagaagaacaagttcgccaacaccatggagttcgtggaggactacctgaacaacgtggtgagcgaggccgtgcccttcgccaacgaggagaagaacaagctgaccttcgaggtggtgagcctggcccacaacctgatctacttcggcttctacagcttcagcgagctgctgagactgaccagaaccctgctgggcatcatcgactgcgtgcagggcccccccgccatgctgcaggcctacgaggaccccggcggcaagaacgtgagaagaagcatccagggcgtgggccacatgatgagcaccatggtgctgagcagaaagcagagcgtgttcagcgcccccagcctgagcgccggcgccagcgccgccgagcccctggacagaagcaagttcgaggagaacgaggacatcgtggtgatggagaccaagctgaagatcctggagatcctgcagttcatcctgaacgtgagactggactacagaatcagctacctgctgagcgtgttcaagaaggagttcgtggaggtgttccccatgcaggacagcggcgccgacggcaccgcccccgccttcgacagcaccaccgccaacatgaacctggacagaatcggcgagcaggccgaggccatgttcggcgtgggcaagaccagcagcatgctggaggtggacgacgagggcggcagaatgttcctgagagtgctgatccacctgaccatgcacgactacgcccccctggtgagcggcgccctgcagctgctgttcaagcacttcagccagagacaggaggccatgcacaccttcaagcaggtgcagctgctgatcagcgcccaggacgtggagaactacaaggtgatcaagagcgagctggacagactgagaaccatggtggagaagagcgagctgtgggtggacaagaagggcagcggcaagggcgaggaggtggaggccggcgccgccaaggacaagaaggagagacccaccgacgaggagggcttcctgcacccccccggcgagaagagcagcgagaactaccagatcgtgaagggcatcctggagagactgaacaagatgtgcggcgtgggcgagcagatgagaaagaagcagcagagactgctgaagaacatggacgcccacaaggtgatgctggacctgctgcagatcccctacgacaagggcgacgccaagatgatggagatcctgagatacacccaccagttcctgcagaagttctgcgccggcaaccccggcaaccaggccctgctgcacaagcacctgcacctgttcctgacccccggcctgctggaggccgagaccatgcagcacatcttcctgaacaactaccagctgtgcagcgagatcagcgagcccgtgctgcagcacttcgtgcacctgctggccacccacggcagacacgtgcagtacctggacttcctgcacaccgtgatcaaggccgagggcaagtacgtgaagaagtgccaggacatgatcatgaccgagctgaccaacgccggcgacgacgtggtggtgttctacaacgacaaggccagcctggcccacctgctggacatgatgaaggccgccagagacggcgtggaggaccacagccccctgatgtaccacatcagcctggtggacctgctggccgcctgcgccgagggcaagaacgtgtacaccgagatcaagtgcaccagcctgctgcccctggaggacgtggtgagcgtggtgacccacgaggactgcatcaccgaggtgaagatggcctacgtgaacttcgtgaaccactgctacgtggacaccgaggtggagatgaaggagatctacaccagcaaccacatctggaccctgttcgagaacttcaccctggacatggccagagtgtgcagcaagagagagaagagagtggccgaccccaccctggagaagtacgtgctgagcgtggtgctggacaccatcaacgccttcttcagcagccccttcagcgagaacagcaccagcctgcagacccaccagaccatcgtggtgcagctgctgcagagcaccaccagactgctggagtgcccctggctgcagcagcagcacaagggcagcgtggaggcctgcatcagaaccctggccatggtggccaagggcagagccatcctgctgcccatggacctggacgcccacatcagcagcatgctgagcagcggcgccagctgcgccgccgccgcccagagaaacgccagcagctacaaggccaccaccagagccttccccagagtgacccccaccgccaaccagtgggactacaagaacatcatcgagaagctgcaggacatcatcaccgccctggaggagagactgaagcccctggtgcaggccgagctgagcgtgctggtggacgtgctgcactggcccgagctgctgttcctggagggcagcgaggcctaccagagatgcgagagcggcggcttcctgagcaagctgatccagcacaccaaggacctgatggagagcgaggagaagctgtgcatcaaggtgctgagaaccctgcagcagatgctgctgaagaagaccaagtacggcgacagaggcaaccagctgagaaagatgctgctgcagaactacctgcagaacagaaagagcaccagcagaggcgacctgcccgaccccatcggcaccggcctggaccccgactggagcgccatcgccgccacccagtgcagactggacaaggagggcgccaccaagctggtgtgcgacctgatcaccagcaccaagaacgagaagatcttccaggagagcatcggcctggccatccacctgctggacggcggcaacaccgagatccagaagagcttccacaacctgatgatgagcgacaagaagagcgagagattcttcaaggtgctgcacgacagaatgaagagagcccagcaggagaccaagagcaccgtggccgtgaacatgaacgacctgggcagccagccccacgaggacagagagcccgtggaccccaccaccaagggcagagtggccagcttcagcatccccggcagcagcagcagatacagcctgggccccagcctgagaagaggccacgaggtgagcgagagagtgcagagcagcgagatgggcaccagcgtgctgatcatgcagcccatcctgagattcctgcagctgctgtgcgagaaccacaacagagacctgcagaacttcctgagatgccagaacaacaagaccaactacaacctggtgtgcgagaccctgcagttcctggacatcatgtgcggcagcaccaccggcggcctgggcctgctgggcctgtacatcaacgaggacaacgtgggcctggtgatccagaccctggagaccctgaccgagtactgccagggcccctgccacgagaaccagacctgcatcgtgacccacgagagcaacggcatcgacatcatcaccgccctgatcctgaacgacatcagccccctgtgcaagtacagaatggacctggtgctgcagctgaaggacaacgccagcaagctgctgctggccctgatggagagcagacacgacagcgagaacgccgagagaatcctgatcagcctgagaccccaggagctggtggacgtgatcaagaaggcctacctgcaggaggaggagagagagaacagcgaggtgagccccagagaggtgggccacaacatctacatcctggccctgcagctgagcagacacaacaagcagctgcagcacctgctgaagcccgtgaagagaatccaggaggaggaggccgagggcatcagcagcatgctgagcctgaacaacaagcagctgagccagatgctgaagagcagcgcccccgcccaggaggaggaggaggaccccctggcctactacgagaaccacaccagccagatcgagatcgtgagacaggacagaagcatggagcagatcgtgttccccgtgcccggcatctgccagttcctgaccgaggagaccaagcacagactgttcaccaccaccgagcaggacgagcagggcagcaaggtgagcgacttcttcgaccagagcagcttcctgcacaacgagatggagtggcagagaaagctgagaagcatgcccctgatctactggttcagcagaagaatgaccctgtggggcagcatcagcttcaacctggccgtgttcatcaacatcatcatcgccttcttctacccctacatggagggcgccagcaccggcgtgctggacagccccctgatcagcctgctgttctggatcctgatctgcttcagcatcgccgccctgttcaccaagagatacagcatcagacccctgatcgtggccctgatcctgagaagcatctactacctgggcatcggccccaccctgaacatcctgggcgccctgaacctgaccaacaagatcgtgttcgtggtgagcttcgtgggcaacagaggcaccttcatcagaggctacaaggccatggtgatggacatggagttcctgtaccacgtgggctacatcctgaccagcgtgctgggcctgttcgcccacgagctgttctacagcatcctgctgttcgacctgatctacagagaggagaccctgttcaacgtgatcaagagcgtgaccagaaacggcagaagcatcctgctgaccgccctgctggccctgatcctggtgtacctgttcagcatcgtgggcttcctgttcctgaaggacgacttcatcctggaggtggacagactgcccaacaaccacagcaccgccagccccctgggcatgccccacggcgccgccgccttcgtggacacctgcagcggcgacaagatggactgcgtgagcggcctgagcgtgcccgaggtgctggaggaggacagagagctggacagcaccgagagagcctgcgacaccctgctgatgtgcatcgtgaccgtgatgaaccacggcctgagaaacggcggcggcgtgggcgacatcctgagaaagcccagcaaggacgagagcctgttccccgccagagtggtgtacgacctgctgttcttcttcatcgtgatcatcatcgtgctgaacctgatcttcggcgtgatcatcgacaccttcgccgacctgagaagcgagaagcagaagaaggaggagatcctgaagaccacctgcttcatctgcggcctggagagagacaagttcgacaacaagaccgtgagcttcgaggagcacatcaagctggagcacaacatgtggaactacctgtacttcatcgtgctggtgagagtgaagaacaagaccgactacaccggccccgagagctacgtggcccagatgatcaagaacaagaacctggactggttccccagaatgagagccatgagcctggtgagcaacgagggcgagggcgagcagaacgagatcagaatcctgcaggacaagctgaacagcaccatgaagctggtgagccacctgaccgcccagctgaacgagctgaaggagcagatgaccgagcagagaaagagaagacagagactgggcttcgtggacgtgcagaactgcatcagcagatag

SEQ ID NO: 85204 - DNA, 1326 bp, synthetic construct
  misc_feature 1..1326: note = Description of Artificial Sequence: Synthetic coding sequence
  source 1..1326: mol_type = other DNA
atgtgcgtgtgccagaccatggaggtgggccagtacggcaagaacgccagcagagccggcgacagaggcgtgctgctggagcccttcatccaccaggtgggcggccacagcagcatgatgagatacgacgaccacaccgtgtgcaagcccctgatcagcagagagcagagattctacgagagcctgccccccgagatgaaggagttcacccccgagtacaagggcgtggtgagcgtgtgcttcgagggcgacagcgacggctacatcaacctggtggcctacccctacgtggagagcgagaccgtggagcaggacgacaccaccgagagagagcagcccagaagaaagcacagcagaagaagcctgcacagaagcggcagcggcagcgaccacaaggaggagaaggccagcctgagcctggagaccagcgagagcagccaggaggccaagagccccaaggtggagctgcacagccacagcgaggtgcccttccagatgctggacggcaacagcggcctgagcagcgagaagatcagccacaacccctggagcctgagatgccacaagcagcagctgagcagaatgagaagcgagagcaaggacagaaagctgtacaagttcctgctgctggagaacgtggtgcaccacttcaagtacccctgcgtgctggacctgaagatgggcaccagacagcacggcgacgacgccagcgccgagaaggccgccagacagatgagaaagtgcgagcagagcaccagcgccaccctgggcgtgagagtgtgcggcatgcaggtgtaccagctggacaccggccactacctgtgcagaaacaagtactacggcagaggcctgagcatcgagggcttcagaaacgccctgtaccagtacctgcacaacggcctggacctgagaagagacctgttcgagcccatcctgagcaagctgagaggcctgaaggccgtgctggagagacaggccagctacagattctacagcagcagcctgctggtgatctacgacggcaaggagtgcagagccgagagctgcctggacagaagaagcgagatgagactgaagcacctggacatggtgctgcccgaggtggccagcagctgcggccccagcaccagccccagcaacaccagccccgaggccggccccagcagccagcccaaggtggacgtgagaatgatcgacttcgcccacagcaccttcaagggcttcagagacgaccccaccgtgcacgacggccccgacagaggctacgtgttcggcctggagaacctgatcagcatcatggagcagatgagagacgagaaccagtag

SEQ ID NO: 85205 - DNA, 831 bp, synthetic construct
  misc_feature 1..831: note = Description of Artificial Sequence: Synthetic coding sequence
  source 1..831: mol_type = other DNA
atgctggacggcaacagcggcctgagcagcgagaagatcagccacaacccctggagcctgagatgccacaagcagcagctgagcagaatgagaagcgagagcaaggacagaaagctgtacaagttcctgctgctggagaacgtggtgcaccacttcaagtacccctgcgtgctggacctgaagatgggcaccagacagcacggcgacgacgccagcgccgagaaggccgccagacagatgagaaagtgcgagcagagcaccagcgccaccctgggcgtgagagtgtgcggcatgcaggtgtaccagctggacaccggccactacctgtgcagaaacaagtactacggcagaggcctgagcatcgagggcttcagaaacgccctgtaccagtacctgcacaacggcctggacctgagaagagacctgttcgagcccatcctgagcaagctgagaggcctgaaggccgtgctggagagacaggccagctacagattctacagcagcagcctgctggtgatctacgacggcaaggagtgcagagccgagagctgcctggacagaagaagcgagatgagactgaagcacctggacatggtgctgcccgaggtggccagcagctgcggccccagcaccagccccagcaacaccagccccgaggccggccccagcagccagcccaaggtggacgtgagaatgatcgacttcgcccacagcaccttcaagggcttcagagacgaccccaccgtgcacgacggccccgacagaggctacgtgttcggcctggagaacctgatcagcatcatggagcagatgagagacgagaaccagtag

SEQ ID NO: 85206 - DNA, 831 bp, synthetic construct; identical to SEQ ID NO: 85205
  misc_feature 1..831: note = Description of Artificial Sequence: Synthetic coding sequence
  source 1..831: mol_type = other DNA

SEQ ID NO: 85207 - DNA, 1281 bp, synthetic construct
  misc_feature 1..1281: note = Description of Artificial Sequence: Synthetic coding sequence
  source 1..1281: mol_type = other DNA
atgagccccgccttcagagccatggacgtggagcccagagccaagggcgtgctgctggagcccttcgtgcaccaggtgggcggccacagctgcgtgctgagattcaacgagaccaccctgtgcaagcccctggtgcccagagagcaccagttctacgagaccctgcccgccgagatgagaaagttcaccccccagtacaagggcgtggtgagcgtgagattcgaggaggacgaggacagaaacctgtgcctgatcgcctaccccctgaagggcgaccacggcatcgtggacatcgtggacaacagcgactgcgagcccaagagcaagctgctgagatggaccaccaacaagaagcaccacgtgctggagaccgagaagacccccaaggactgggtgagacagcacagaaaggaggagaagatgaagagccacaagctggaggaggagttcgagtggctgaagaagagcgaggtgctgtactacaccgtggagaagaagggcaacatcagcagccagctgaagcactacaacccctggagcatgaagtgccaccagcagcagctgcagagaatgaaggagaacgccaagcacagaaaccagtacaagttcatcctgctggagaacctgaccagcagatacgaggtgccctgcgtgctggacctgaagatgggcaccagacagcacggcgacgacgccagcgaggagaaggccgccaaccagatcagaaagtgccagcagagcaccagcgccgtgatcggcgtgagagtgtgcggcatgcaggtgtaccaggccggcagcggccagctgatgttcatgaacaagtaccacggcagaaagctgagcgtgcagggcttcaaggaggccctgttccagttcttccacaacggcagatacctgagaagagagctgctgggccccgtgctgaagaagctgaccgagctgaaggccgtgctggagagacaggagagctacagattctacagcagcagcctgctggtgatctacgacggcaaggagagacccgaggtggtgctggacagcgacgccgaggacctggaggacctgagcgaggagagcgccgacgagagcgccggcgcctacgcctacaagcccatcggcgccagcagcgtggacgtgagaatgatcgacttcgcccacaccacctgcagactgtacggcgaggacaccgtggtgcacgagggccaggacgccggctacatcttcggcctgcagagcctgatcgacatcgtgaccgagatcagcgaggagagcggcgagtag

SEQ ID NO: 85208 - DNA, 294 bp, synthetic construct
  misc_feature 1..294: note = Description of Artificial Sequence: Synthetic coding sequence
  source 1..294: mol_type = other DNA
atgagccccgccttcagagccatggacgtggagcccagagccaagggcgtgctgctggagcccttcgtgcaccaggtgggcggccacagctgcgtgctgagattcaacgagaccaccctgtgcaagcccctggtgcccagagagcaccagttctacgagaccctgcccgccgagatgagaaagttcaccccccagtacaagggccagagccagagacccctggtgagctggcccagcctgccccacttcttcccctggagcttccccctgtggccccagggcagcgtggcctag

SEQ ID NO: 85209 - DNA, 294 bp, synthetic construct; identical to SEQ ID NO: 85208
  misc_feature 1..294: note = Description of Artificial Sequence: Synthetic coding sequence
  source 1..294: mol_type = other DNA

SEQ ID NO: 85210 - DNA, 558 bp, synthetic construct
  misc_feature 1..558: note = Description of Artificial Sequence: Synthetic coding sequence
  source 1..558: mol_type = other DNA
atgagcctgaacctgcccgaggccagcctgctgagcagagccagctggcccgagcaggccaaggagcccagaagagagggccacaccgacaagcagcagaccgaggacgtgctggccgccggcctgagatgcctgccccacctgcccgccatctgcgccagaagaatgagccccgccttcagagccatggacgtggagcccagagccaagggcgtgctgctggagcccttcgtgcaccaggtgggcggccacagctgcgtgctgagattcaacgagaccaccctgtgcaagcccctggtgcccagagagcaccagttctacgagaccctgcccgccgagatgagaaagttcaccccccagtacaagggcaagagccagctgctggagggcctgccccactggagaggcgacgtgagagacagaggccacggcagaccctggcagcccagcctggagcccagcctgccccccaccctgtgcttccccagcctgagcagcttcagcagcagctggcccagcgcccagcacctgacccccagcgtgttcaacccctggtag

SEQ ID NO: 85211 - DNA, 264 bp, synthetic construct
  misc_feature 1..264: note = Description of Artificial Sequence: Synthetic coding sequence
  source 1..264: mol_type = other DNA
atgagccccgccttcagagccatggacgtggagcccagagccaagggcgtgctgctggagcccttcgtgcaccaggtgggcggccacagctgcgtgctgagattcaacgagaccaccctgtgcaagcccctggtgcccagagagcaccagttctacgagaccctgcccgccgagatgagaaagttcaccccccagtacaagggcgacatcagcagccaccagcacggcggcgtgttcgtgggcgagtggggcagcctgctgtag

SEQ ID NO: 85212 - DNA, 567 bp, synthetic construct
  misc_feature 1..567: note = Description of Artificial Sequence: Synthetic coding sequence
  source 1..567: mol_type = other DNA
atgaacctgtgccagagccccttccaggagggctgccagagcctgctggccagctggcccgagcaggccaaggagcccagaagagagggccacaccgacaagcagcagaccgaggacgtgctggccgccggcctgagatgcctgccccacctgcccgccatctgcgccagaagaatgagccccgccttcagagccatggacgtggagcccagagccaagggcgtgctgctggagcccttcgtgcaccaggtgggcggccacagctgcgtgctgagattcaacgagaccaccctgtgcaagcccctggtgcccagagagcaccagttctacgagaccctgcccgccgagatgagaaagttcaccccccagtacaagggcaagagccagctgctggagggcctgccccactggagaggcgacgtgagagacagaggccacggcagaccctggcagcccagcctggagcccagcctgccccccaccctgtgcttccccagcctgagcagcttcagcagcagctggcccagcgcccagcacctgacccccagcgtgttcaacccctggtag

SEQ ID NO: 85213 - DNA, 1233 bp, synthetic construct
  misc_feature 1..1233: note = Description of Artificial Sequence: Synthetic coding sequence
  source 1..1233: mol_type = other DNA
atggtggtgcagaacagcgccgacgccggcgacatgagagccggcgtgcagctggagcccttcctgcaccaggtgggcggccacatgagcgtgatgaagtacgacgagcacaccgtgtgcaagcccctggtgagcagagagcagagattctacgagagcctgcccctggccatgaagagattcaccccccagtacaagggcaccgtgaccgtgcacctgtggaaggacagcaccggccacctgagcctggtggccaaccccgtgaaggagagccaggagcccttcaaggtgagcaccgagagcgccgccgtggccatctggcagaccctgcagcagaccaccggcagcaacggcagcgactgcaccctggcccagtggccccacgcccagctggccagaagccccaaggagagccccgccaaggccctgctgagaagcgagccccacctgaacacccccgccttcagcctggtggaggacaccaacggcaaccaggtggagagaaagagcttcaacccctggggcctgcagtgccaccaggcccacctgaccagactgtgcagcgagtaccccgagaacaagagacacagattcctgctgctggagaacgtggtgagccagtacacccacccctgcgtgctggacctgaagatgggcaccagacagcacggcgacgacgccagcgaggagaagaaggccagacacatgagaaagtgcgcccagagcaccagcgcctgcctgggcgtgagaatctgcggcatgcaggtgtaccagaccgacaagaagtacttcctgtgcaaggacaagtactacggcagaaagctgagcgtggagggcttcagacaggccctgtaccagttcctgcacaacggcagccacctgagaagagagctgctggagcccatcctgcaccagctgagagccctgctgagcgtgatcagaagccagagcagctacagattctacagcagcagcctgctggtgatctacgacggccaggagccccccgagagagcccccggcagcccccacccccacgaggccccccaggccgcccacggcagcagccccggcggcctgaccaaggtggacatcagaatgatcgacttcgcccacaccacctacaagggctactggaacgagcacaccacctacgacggccccgaccccggctacatcttcggcctggagaacctgatcagaatcctgcaggacatccaggagggcgagtag

SEQ ID NO: 85214 - DNA, 1233 bp, synthetic construct; identical to SEQ ID NO: 85213
  misc_feature 1..1233: note = Description of Artificial Sequence: Synthetic coding sequence
  source 1..1233: mol_type = other DNA

SEQ ID NO: 85215 - DNA, 1080 bp, synthetic construct
  misc_feature 1..1080: note = Description of Artificial Sequence: Synthetic coding sequence
  source 1..1080: mol_type = other DNA
atggcccccatgggcatcagactgagccccctgggcgtggccgtgttctgcctgctgggcctgggcgtgctgtaccacctgtacagcggcttcctggccggcagattcagcctgttcggcctgggcggcgagcccggcggcggcgccgccggccccgccgccgccgccgacggcggcaccgtggacctgagagagatgctggccgtgagcgtgctggccgccgtgagaggcggcgacgaggtgagaagagtgagagagagcaacgtgctgcacgagaagagcaagggcaagaccagagagggcgccgaggacaagatgaccagcggcgacgtgctgagcaacagaaagatgttctacctgctgaagaccgccttccccagcgtgcagatcaacaccgaggagcacgtggacgccgccgaccaggaggtgatcctgtgggaccacaagatccccgaggacatcctgaaggaggtgaccacccccaaggaggtgcccgccgagagcgtgaccgtgtggatcgaccccctggacgccacccaggagtacaccgaggacctgagaaagtacgtgaccaccatggtgtgcgtggccgtgaacggcaagcccatgctgggcgtgatccacaagcccttcagcgagtacaccgcctgggccatggtggacggcggcagcaacgtgaaggccagaagcagctacaacgagaagacccccagaatcgtggtgagcagaagccacagcggcatggtgaagcaggtggccctgcagaccttcggcaaccagaccaccatcatccccgccggcggcgccggctacaaggtgctggccctgctggacgtgcccgacaagagccaggagaaggccgacctgtacatccacgtgacctacatcaagaagtgggacatctgcgccggcaacgccatcctgaaggccctgggcggccacatgaccaccctgagcggcgaggagatcagctacaccggcagcgacggcatcgagggcggcctgctggccagcatcagaatgaaccaccaggccctggtgagaaagctgcccgacctggagaagaccggccacaagtag

SEQ ID NO: 85216 - DNA, 1251 bp, synthetic construct
  misc_feature 1..1251: note = Description of Artificial Sequence: Synthetic coding sequence
  source 1..1251: mol_type = other DNA
atggccaccgagccccccagccccctgagagtggaggcccccggcccccccgagatgagaaccagccccgccatcgagagcacccccgagggcaccccccagcccgccggcggcagactgagattcctgaacggctgcgtgcccctgagccaccaggtggccggccacatgtacggcaaggacaaggtgggcatcctgcagcaccccgacggcaccgtgctgaagcagctgcagcccccccccagaggccccagagagctggagttctacaacatggtgtacgccgccgactgcttcgacggcgtgctgctggagctgagaaagtacctgcccaagtactacggcatctggagcccccccaccgcccccaacgacctgtacctgaagctggaggacgtgacccacaagttcaacaagccctgcatcatggacgtgaagatcggccagaagagctacgaccccttcgccagcagcgagaagatccagcagcaggtgagcaagtaccccctgatggaggagatcggcttcctggtgctgggcatgagagtgtaccacgtgcacagcgacagctacgagaccgagaaccagcactacggcagaagcctgaccaaggagaccatcaaggacggcgtgagcagattcttccacaacggctactgcctgagaaaggacgccgtggccgccagcatccagaagatcgagaagatcctgcagtggttcgagaaccagaagcagctgaacttctacgccagcagcctgctgttcgtgtacgagggcagcagccagcccaccaccaccaagctgaacgacagaaccctggccgagaagttcctgagcaagggccagctgagcgacaccgaggtgctggagtacaacaacaacttccacgtgctgagcagcaccgccaacggcaagatcgagagcagcgtgggcaagagcctgagcaagatgtacgccagacacagaaagatctacaccaagaagcaccacagccagaccagcctgaaggtggagaacctggagcaggacaacggctggaagagcatgagccaggagcacctgaacggcaacgtgctgagccagctggagaaggtgttctaccacctgcccaccggctgccaggagatcgccgaggtggaggtgagaatgatcgacttcgcccacgtgttccccagcaacaccatcgacgagggctacgtgtacggcctgaagcacctgatcagcgtgctgagaagcatcctggacaactag

SEQ ID NO: 85217 - DNA, 3777 bp, synthetic construct
  misc_feature 1..3777: note = Description of Artificial Sequence: Synthetic coding sequence
  source 1..3777: mol_type = other DNA
atggccagcgcctgcggcgcccccggccccggcggcgccctgggcagccaggcccccagctggtaccacagagacctgagcagagccgccgccgaggagctgctggccagagccggcagagacggcagcttcctggtgagagacagcgagagcgtggccggcgccttcgccctgtgcgtgctgtaccagaagcacgtgcacacctacagaatcctgcccgacggcgaggacttcctggccgtgcagaccagccagggcgtgcccgtgagaagattccagaccctgggcgagctgatcggcctgtacgcccagcccaaccagggcctggtgtgcgccctgctgctgcccgtggagggcgagagagagcccgacccccccgacgacagagacgccagcgacggcgaggacgagaagccccccctgccccccagaagcggcagcaccagcatcagcgcccccaccggccccagcagccccctgcccgcccccgagacccccaccgcccccgccgccgagagcgcccccaacggcctgagcaccgtgagccacgactacctgaagggcagctacggcctggacctggaggccgtgagaggcggcgccagccacctgccccacctgaccagaaccctggccaccagctgcagaagactgcacagcgaggtggacaaggtgctgagcggcctggagatcctgagcaaggtgttcgaccagcagagcagccccatggtgaccagactgctgcagcagcagaacctgccccagaccggcgagcaggagctggagagcctggtgctgaagctgagcgtgctgaaggacttcctgagcggcatccagaagaaggccctgaaggccctgcaggacatgagcagcaccgccccccccgccccccagcccagcaccagaaaggccaagaccatccccgtgcaggccttcgaggtgaagctggacgtgaccctgggcgacctgaccaagatcggcaagagccagaagttcaccctgagcgtggacgtggagggcggcagactggtgctgctgagaagacagagagacagccaggaggactggaccaccttcacccacgacagaatcagacagctgatcaagagccagagagtgcagaacaagctgggcgtggtgttcgagaaggagaaggacagaacccagagaaaggacttcatcttcgtgagcgccagaaagagagaggccttctgccagctgctgcagctgatgaagaacaagcacagcaagcaggacgagcccgacatgatcagcgtgttcatcggcacctggaacatgggcagcgtgcccccccccaagaacgtgaccagctggttcaccagcaagggcctgggcaagaccctggacgaggtgaccgtgaccatcccccacgacatctacgtgttcggcacccaggagaacagcgtgggcgacagagagtggctggacctgctgagaggcggcctgaaggagctgaccgacctggactacagacccatcgccatgcagagcctgtggaacatcaaggtggccgtgctggtgaagcccgagcacgagaacagaatcagccacgtgagcaccagcagcgtgaagaccggcatcgccaacaccctgggcaacaagggcgccgtgggcgtgagcttcatgttcaacggcaccagcttcggcttcgtgaactgccacctgaccagcggcaacgagaagaccgccagaagaaaccagaactacctggacatcctgagactgctgagcctgggcgacagacagctgaacgccttcgacatcagcctgagattcacccacctgttctggttcggcgacctgaactacagactggacatggacatccaggagatcctgaactacatcagcagaaaggagttcgagcccctgctgagagtggaccagctgaacctggagagagagaagcacaaggtgttcctgagattcagcgaggaggagatcagcttcccccccacctacagatacgagagaggcagcagagacacctacgcctggcacaagcagaagcccaccggcgtgagaaccaacgtgcccagctggtgcgacagaatcctgtggaagagctaccccgagacccacatcatctgcaacagctacggctgcaccgacgacatcgtgaccagcgaccacagccccgtgttcggcaccttcgaggtgggcgtgaccagccagttcatcagcaagaagggcctgagcaagaccagcgaccaggcctacatcgagttcgagagcatcgaggccatcgtgaagaccgccagcagaaccaagttcttcatcgagttctacagcacctgcctggaggagtacaagaagagcttcgagaacgacgcccagagcagcgacaacatcaacttcctgaaggtgcagtggagcagcagacagctgcccaccctgaagcccatcctggccgacatcgagtacctgcaggaccagcacctgctgctgaccgtgaagagcatggacggctacgagagctacggcgagtgcgtggtggccctgaagagcatgatcggcagcaccgcccagcagttcctgaccttcctgagccacagaggcgaggagaccggcaacatcagaggcagcatgaaggtgagagtgcccaccgagagactgggcaccagagagagactgtacgagtggatcagcatcgacaaggacgaggccggcgccaagagcaaggcccccagcgtgagcagaggcagccaggagcccagaagcggcagcagaaagcccgccttcaccgaggccagctgccccctgagcagactgttcgaggagcccgagaagcccccccccaccggcagaccccccgccccccccagagccgcccccagagaggagcccctgacccccagactgaagcccgagggcgcccccgagcccgagggcgtggccgcccccccccccaagaacagcttcaacaaccccgcctactacgtgctggagggcgtgccccaccagctgctgccccccgagccccccagccccgccagagcccccgtgcccagcgccaccaagaacaaggtggccatcaccgtgcccgccccccagctgggccaccacagacaccccagagtgggcgagggcagcagcagcgacgaggagagcggcggcaccctgcccccccccgacttcccccccccccccctgcccgacagcgccatcttcctgccccccagcctggaccccctgcccggccccgtggtgagaggcagaggcggcgccgaggccagaggcccccccccccccaaggcccaccccagaccccccctgccccccggccccagccccgccagcaccttcctgggcgaggtggccagcggcgacgacagaagctgcagcgtgctgcagatggccaagaccctgagcgaggtggactacgcccccgccggccccgccagaagcgccctgctgcccggccccctggagctgcagccccccagaggcctgcccagcgactacggcagacccctgagcttccccccccccagaatcagagagagcatccaggaggacctggccgaggaggccccctgcctgcagggcggcagagccagcggcctgggcgaggccggcatgagcgcctggctgagagccatcggcctggagagatacgaggagggcctggtgcacaacggctgggacgacctggagttcctgagcgacatcaccgaggaggacctggaggaggccggcgtgcaggaccccgcccacaagagactgctgctggacaccctgcagctgagcaagtag

SEQ ID NO: 85218 - DNA, 105 bp, synthetic construct
  misc_feature 1..105: note = Description of Artificial Sequence: Synthetic coding sequence
  source 1..105: mol_type = other DNA
atggtgaccagactgctgcagcagcagaacctgccccagaccggcgagcaggagctggagagcctggtgctgaagctgagcgtgctgaaggacttcctgagctag

SEQ ID NO: 85219 - DNA, 3051 bp, synthetic construct
  misc_feature 1..3051: note = Description of Artificial Sequence: Synthetic coding sequence
  source 1..3051: mol_type = other DNA
atggtgaccagactgctgcagcagcagaacctgccccagaccggcgagcaggagctggagagcctggtgctgaagctgagcgtgctgaaggacttcctgagcggcatccagaagaaggccctgaaggccctgcaggacatgagcagcaccgccccccccgccccccagcccagcaccagaaaggccaagaccatccccgtgcaggccttcgaggtgaagctggacgtgaccctgggcgacctgaccaagatcggcaagagccagaagttcaccctgagcgtggacgtggagggcggcagactggtgctgctgagaagacagagagacagccaggaggactggaccaccttcacccacgacagaatcagacagctgatcaagagccagagagtgcagaacaagctgggcgtggtgttcgagaaggagaaggacagaacccagagaaaggacttcatcttcgtgagcgccagaaagagagaggccttctgccagctgctgcagctgatgaagaacaagcacagcaagcaggacgagcccgacatgatcagcgtgttcatcggcacctggaacatgggcagcgtgcccccccccaagaacgtgaccagctggttcaccagcaagggcctgggcaagaccctggacgaggtgaccgtgaccatcccccacgacatctacgtgttcggcacccaggagaacagcgtgggcgacagagagtggctggacctgctgagaggcggcctgaaggagctgaccgacctggactacagacccatcgccatgcagagcctgtggaacatcaaggtggccgtgctggtgaagcccgagcacgagaacagaatcagccacgtgagcaccagcagcgtgaagaccggcatcgccaacaccctgggcaacaagggcgccgtgggcgtgagcttcatgttcaacggcaccagcttcggcttcgtgaactgccacctgaccagcggcaacgagaagaccgccagaagaaaccagaactacctggacatcctgagactgctgagcctgggcgacagacagctgaacgccttcgacatcagcctgagattcacccacctgttctggttcggcgacctgaactacagactggacatggacatccaggagatcctgaactacatcagcagaaaggagttcgagcccctgctgagagtggaccagctgaacctggagagagagaagcacaaggtgttcctgagattcagcgaggaggagatcagcttcccccccacctacagatacgagagaggcagcagagacacctacgcctggcacaagcagaagcccaccggcgtgagaaccaacgtgcccagctggtgcgacagaatcctgtggaagagctaccccgagacccacatcatctgcaacagctacggctgcaccgacgacatcgtgaccagcgaccacagccccgtgttcggcaccttcgaggtgggcgtgaccagccagttcatcagcaagaagggcctgagcaagaccagcgaccaggcctacatcgagttcgagagcatcgaggccatcgtgaagaccgccagcagaaccaagttcttcatcgagttctacagcacctgcctggaggagtacaagaagagcttcgagaacgacgcccagagcagcgacaacatcaacttcctgaaggtgcagtggagcagcagacagctgcccaccctgaagcccatcctggccgacatcgagtacctgcaggaccagcacctgctgctgaccgtgaagagcatggacggctacgagagctacggcgagtgcgtggtggccctgaagagcatgatcggcagcaccgcccagcagttcctgaccttcctgagccacagaggcgaggagaccggcaacatcagaggcagcatgaaggtgagagtgcccaccgagagactgggcaccagagagagactgtacgagtggatcagcatcgacaaggacgaggccggcgccaagagcaaggcccccagcgtgagcagaggcagccaggagcccagaagcggcagcagaaagcccgccttcaccgaggccagctgccccctgagcagactgttcgaggagcccgagaagcccccccccaccggcagaccccccgccccccccagagccgcccccagagaggagcccctgacccccagactgaagcccgagggcgcccccgagcccgagggcgtggccgcccccccccccaagaacagcttcaacaaccccgcctactacgtgctggagggcgtgccccaccagctgctgccccccgagccccccagccccgccagagcccccgtgcccagcgccaccaagaacaaggtggccatcaccgtgcccgccccccagctgggccaccacagacaccccagagtgggcgagggcagcagcagcgacgaggagagcggcggcaccctgcccccccccgacttcccccccccccccctgcccgacagcgccatcttcctgccccccagcctggaccccctgcccggccccgtggtgagaggcagaggcggcgccgaggccagaggcccccccccccccaaggcccaccccagaccccccctgccccccggccccagccccgccagcaccttcctgggcgaggtggccagcggcgacgacagaagctgcagcgtgctgcagatggccaagaccctgagcgaggtggactacgcccccgccggccccgccagaagcgccctgctgcccggccccctggagctgcagccccccagaggcctgcccagcgactacggcagacccctgagcttccccccccccagaatcagagagagcatccaggaggacctggccgaggaggccccctgcctgcagggcggcagagccagcggcctgggcgaggccggcatgagcgcctggctgagagccatcggcctggagagatacgaggagggcctggtgcacaacggctgggacgacctggagttcctgagcgacatcaccgaggaggacctggaggaggccggcgtgcaggaccccgcccacaagagactgctgctggacaccctgcagctgagcaagtag

SEQ ID NO: 85220 - DNA, 69 bp, synthetic construct
  misc_feature 1..69: note = Description of Artificial Sequence: Synthetic coding sequence
  source 1..69: mol_type = other DNA
atggccagcgcctgcggcgcccccggccccggcggcgccctgggcagccaggcccccagctggtactag

SEQ ID NO: 85221 - DNA, 3051 bp, synthetic construct; identical to SEQ ID NO: 85219
  misc_feature 1..3051: note = Description of Artificial Sequence: Synthetic coding sequence
  source 1..3051: mol_type = other DNA

SEQ ID NO: 85222 - DNA, 57 bp, synthetic construct
  misc_feature 1..57: note = Description of Artificial Sequence: Synthetic coding sequence
  source 1..57: mol_type = other DNA
atggccagcgcctgcggcgcccccggccccggcggcgccctgggcagccaggcctag

SEQ ID NO: 85223 - DNA, 474 bp, synthetic construct
  misc_feature 1..474: note = Description of Artificial Sequence: Synthetic coding sequence
  source 1..474: mol_type = other DNA
atggtgaccagactgctgcagcagcagaacctgccccagaccggcgagcaggagctggagagcctggtgctgaagctgagcgtgctgaaggacttcctgagcggcatccagaagaaggccctgaaggccctgcaggacatgagcagcaccgccccccccgccccccagcccagcaccagaaaggccaagaccatccccgtgcaggccttcgaggtgaagctggacgtgaccctgggcgacctgaccaagatcggcaagagccagaagttcaccctgagcgtggacgtggagggcggcagactggtgctgctgagaagacagagagacagccaggaggactggaccaccttcacccacgacagaatcagacagctgatcaagagccagagagtgcagaacaagctgggcgtggtgttcgagaaggagaaggacagaacccagagaaaggacttcatcttcgtgagcgccagatag

SEQ ID NO: 85224 - DNA, 1200 bp, synthetic construct
  misc_feature 1..1200: note = Description of Artificial Sequence: Synthetic coding sequence
  source 1..1200: mol_type = other DNA
atgagcgacatcctgagagagctgctgtgcgtgagcgagaaggccgccaacatcgccagagcctgcagacagcaggaggccctgttccagctgctgatcgaggagaagaaggagggcgagaagaacaagaagttcgccgtggacttcaagaccctggccgacgtgctggtgcaggaggtgatcaagcagaacatggagaacaagttccccggcctggagaagaacatcttcggcgaggagagcaacgagttcaccaacgactggggcgagaagatcaccctgagactgtgcagcaccgaggaggagaccgccgagctgctgagcaaggtgctgaacggcaacaaggtggccagcgaggccctggccagagtggtgcaccaggacgtggccttcaccgaccccaccctggacagcaccgagatcaacgtgccccaggacatcctgggcatctgggtggaccccatcgacagcacctaccagtacatcaagggcagcgccgacatcaagagcaaccagggcatcttcccctgcggcctgcagtgcgtgaccatcctgatcggcgtgtacgacatccagaccggcgtgcccctgatgggcgtgatcaaccagcccttcgtgagcagagaccccaacaccctgagatggaagggccagtgctactggggcctgagctacatgggcaccaacatgcacagcctgcagctgaccatcagcagaagaaacggcagcgagacccacaccggcaacaccggcagcgaggccgccttcagccccagcttcagcgccgtgatcagcaccagcgagaaggagaccatcaaggccgccctgagcagagtgtgcggcgacagaatcttcggcgccgccggcgccggctacaagagcctgtgcgtggtgcagggcctggtggacatctacatcttcagcgaggacaccaccttcaagtgggacagctgcgccgcccacgccatcctgagagccatgggcggcggcatcgtggacctgaaggagtgcctggagagaaaccccgagaccggcctggacctgccccagctggtgtaccacgtggagaacgagggcgccgccggcgtggacagatgggccaacaagggcggcctgatcgcctacagaagcagaaagagactggagaccttcctgagcctgctggtgcagaacctggcccccgccgagacccacacctag

SEQ ID NO: 85225 - DNA, 1200 bp, synthetic construct; identical to SEQ ID NO: 85224
  misc_feature 1..1200: note = Description of Artificial Sequence: Synthetic coding sequence
  source 1..1200: mol_type = other DNA

SEQ ID NO: 85226 - DNA, 468 bp, synthetic construct
  misc_feature 1..468: note = Description of Artificial Sequence: Synthetic coding sequence
  source 1..468: mol_type = other DNA
atgagcgacatcctgagagagctgctgtgcgtgagcgagaaggccgccaacatcgccagagcctgcagacagcaggaggccctgttccagctgctgatcgaggagaagaaggagggcgagaagaacaagaagttcgccgtggacttcaagaccctggccgacgtgctggtgcaggaggtgatcaagcagaacatggagaacaagttccccggcctggagaagaacatcttcggcgaggagagcaacgagttcaccaacgactggggcgagaagatcaccctgagactgtgcagcaccgaggaggagaccgccgagctgctgagcaaggtgctgaacggcaacaaggtggccagcgaggccctggccagagtggtgcaccaggacgtggccttcaccgaccccaccctggacagcaccgagatcaacgtgccccaggacatcctgggcatctgggtggaccccatctag

SEQ ID NO: 85227 - DNA, 267 bp, synthetic construct
  misc_feature 1..267: note = Description of Artificial Sequence: Synthetic coding sequence
  source 1..267: mol_type = other DNA
atgagcgacatcctgagagagctgctgtgcgtgagcgagaaggccgccaacatcgccagagcctgcagacagcaggaggccctgttccagctgctgatcgaggagaagaaggagggcgagaagaacaagaagttcgccgtggacttcaagaccctggccgacgtgctggtgcaggaggtgatcaagcagaacatggagaacaagttccccggcctggagaagaacatcttcggcgaggagagcaacgagttcaccaacgactggtag

SEQ ID NO: 85228 - DNA, 639 bp, synthetic construct
  misc_feature 1..639: note = Description of Artificial Sequence: Synthetic coding sequence
  source 1..639: mol_type = other DNA
atgagcgacatcctgagagagctgctgtgcgtgagcgagaaggccgccaacatcgccagagcctgcagacagcaggaggccctgttccagctgctgatcgaggagaagaaggagggcgagaagaacaagaagttcgccgtggacttcaagaccctggccgacgtgctggtgcaggaggtgatcaagcagaacatggagaacaagttccccggcctggagaagaacatcttcggcgaggagagcaacgagttcaccaacgactggggcgagaagatcaccctgagactgtgcagcaccgaggaggagaccgccgagctgctgagcaaggtgctgaacggcaacaaggtggccagcgaggccctggccagagtggtgcaccaggacgtggccttcaccgaccccaccctggacagcaccgagatcaacgtgccccaggacatcctgggcatctgggtggaccccatcgacagcacctaccagtacatcaagggcagcgccgacatcaagagcaaccagggcatcttcccctgcggcctgcagtgcgtgaccatcctgatcggcgtgtacgacatccagaccggcgtgcccctgatgggcgtgatcaaccagcccttcgtgagcagagaccccaacacctag

SEQ ID NO: 85229 - DNA, 30 bp, synthetic construct
  misc_feature 1..30: note = Description of Artificial Sequence: Synthetic coding sequence
  source 1..30: mol_type = other DNA
atgagcgacatcctgagagagctgctgtag

SEQ ID NO: 85230 - DNA, 642 bp, synthetic construct
  misc_feature 1..642: note = Description of Artificial Sequence: Synthetic coding sequence
  source 1..642: mol_type = other DNA
atgagcgacatcctgagagagctgctgtgcgtgagcgagaaggccgccaacatcgccagagcctgcagacagcaggaggccctgttccagctgctgatcgaggagaagaaggagggcgagaagaacaagaagttcgccgtggacttcaagaccctggccgacgtgctggtgcaggaggtgatcaagcagaacatggagaacaagttccccggcctggagaagaacatcttcggcgaggagagcaacgagttcaccaacgactggggcgagaagatcaccctgagactgtgcagcaccgaggaggagaccgccgagctgctgagcaaggtgctgaacggcaacaaggtggccagcgaggccctggccagagtggtgcaccaggacgtggccttcaccgaccccaccctggacagcaccgagatcaacgtgccccaggacatcctgggcatctgggtggaccccatcgacagcacctaccagtacatcaagggcagcgccgacatcaagagcaaccagggcatcttcccctgcggcctgcagtgcgtgaccatcctgatcggcgtgtacgacatccagaccggcgtgcccctgatgggcgtgatcaaccagcccttcgtgagcagagaccccaacaccctgtag

SEQ ID NO: 85231 - DNA, 573 bp, synthetic construct
  misc_feature 1..573: note = Description of Artificial Sequence: Synthetic coding sequence
  source 1..573: mol_type = other DNA
atgagcgacatcctgagagagctgctgtgcgtgagcgagaaggccgccaacatcgccagagcctgcagacagcaggaggccctgttccagctgctgatcgaggagaagaaggagggcgagaagaacaagaagttcgccgtggacttcaagaccctggccgacgtgctggtgcaggaggtgatcaagcagaacatggagaacaagttccccggcctggagaagaacatcttcggcgaggagagcaacgagttcaccaacgactggggcgagaagatcaccctgagactgtgcagcaccgaggaggagaccgccgagctgctgagcaaggtgctgaacggcaacaaggtggccagcgaggccctggccagagtggtgcaccaggacgtggccttcaccgaccccaccctggacagcaccgagatcaacgtgccccaggacatcctgggcatctgggtggaccccatcgacagcacctaccagtacatcaagggcagcgccgacatcaagagcaaccagggcatcttcccctgcggcctgcagtgcgtgaccatcctgatcggcgtgtacgactag

SEQ ID NO: 85232 - DNA, 93 bp, synthetic construct
  misc_feature 1..93: note = Description of Artificial Sequence: Synthetic coding sequence
  source 1..93: mol_type = other DNA
atgagcgacatcctgagagagctgctgtgcgtgagcgagaaggccgccaacatcgccagagcctgcagacagcaggaggccctgttccagtag

SEQ ID NO: 85233 - DNA, 207 bp, synthetic construct
  misc_feature 1..207: note = Description of Artificial Sequence: Synthetic coding sequence
  source 1..207: mol_type = other DNA
atgagcgacatcctgagagagctgctgtgcgtgagcgagaaggccgccaacatcgccagagcctgcagacagcaggaggccctgttccagctgctgatcgaggagaagaaggagggcgagaagaacaagaagttcgccgtggacttcaagaccctggccgacgtgctggtgcaggaggtgatcaagcagaacatggagaacaagtag

SEQ ID NO: 85234 - DNA, 432 bp, synthetic construct
  misc_feature 1..432: note = Description of Artificial Sequence: Synthetic coding sequence
  source 1..432: mol_type = other DNA
atgagcgacatcctgagagagctgctgtgcgtgagcgagaaggccgccaacatcgccagagcctgcagacagcaggaggccctgttccagctgctgatcgaggagaagaaggagggcgagaagaacaagaagttcgccgtggacttcaagaccctggccgacgtgctggtgcaggaggtgatcaagcagaacatggagaacaagttccccggcctggagaagaacatcttcggcgaggagagcaacgagttcaccaacgactggggcgagaagatcaccctgagactgtgcagcaccgaggaggagaccgccgagctgctgagcaaggtgctgaacggcaacaaggtggccagcgaggccctggccagagtggtgcaccaggacgtggccttcaccgaccccaccctggacagcaccgagatcaacgtgtag

SEQ ID NO: 85235 - DNA, 1200 bp, synthetic construct; identical to SEQ ID NO: 85224
  misc_feature 1..1200: note = Description of Artificial Sequence: Synthetic coding sequence
  source 1..1200: mol_type = other DNA

SEQ ID NO: 85236 - DNA, 2934 bp, synthetic construct
  misc_feature 1..2934: note = Description of Artificial Sequence: Synthetic coding sequence
  source 1..2934: mol_type = other DNA
atgaccgccagagagcacagccccagacacggcgccagagccagagccatgcagagagccagcaccatcgacgtggccgccgacatgctgggcctgagcctggccggcaacatccaggaccccgacgagcccatcctggagttcagcctggcctgcagcgagctgcacacccccagcctggacagaaagcccaacagcttcgtggccgtgagcgtgaccacccccccccaggccttctggaccaagcacgcccagaccgagatcatcgagggcaccaacaaccccatcttcctgagcagcatcgccttcttccaggacagcctgatcaaccagatgacccaggtgaagctgagcgtgtacgacgtgaaggacagaagccagggcaccatgtacctgctgggcagcggcaccttcatcgtgaaggacctgctgcaggacagacaccacagactgcacctgaccctgagaagcgccgagagcgacagagtgggcaacatcaccgtgatcggctggcagatggaggagaagagcgaccagagaccccccgtgaccagaagcgtggacaccgtgaacggcagaatggtgctgcccgtggacgagagcctgaccgaggccctgggcatcagaagcaagtacgccagcctgagaaaggacaccctgctgaagagcgtgttcggcggcgccatctgcagaatgtacagattccccaccaccgacggcaaccacctgagaatcctggagcagatggccgagagcgtgctgagcctgcacgtgcccagacagttcgtgaagctgctgctggaggaggacgccgccagagtgtgcgagctggaggagctgggcgagctgagcccctgctgggagagcctgagaagacagatcgtgacccagtaccagaccatcatcctgacctaccaggagaacctgaccgacctgcaccagtacagaggccccagcttcaaggccagcagcctgaaggccgacaagaagctggagttcgtgcccaccaacctgcacatccagagaatgagagtgcaggacgacggcggcagcgaccagaactacgacatcgtgaccatcggcgcccccgccgcccactgccagggcttcaagagcggcggcctgagaaagaagctgcacaagttcgaggagaccaagaagcacttcgaggagtgctgcaccagcagcggctgccagagcatcatctacatcccccaggacgtggtgagagccaaggagatcatcgcccagatcaacaccctgaagacccaggtgagctactacgccgagagactgagcagagccgccaaggacagaagcgccaccggcctggagagaaccctggccatcctggccgacaagaccagacagctggtgaccgtgtgcgactgcaagctgctggccaacagcatccacggcctgaacgccgccagacccgactacatcgccagcaaggccagccccaccagcaccgaggaggagcaggtgatgctgagaaacgaccaggacaccctgatggccagatggaccggcagaaacagcagaagcagcctgcaggtggactggcacgaggaggagtgggagaaggtgtggctgaacgtggacaagagcctggagtgcatcatccagagagtggacaagctgctgcagaaggagagactgcacggcgagggctgcgaggacgtgttcccctgcgccggcagctgcaccagcaagaagggcaaccccgacagccacgcctactggatcagacccgaggaccccttctgcgacgtgcccagcagcccctgccccagcaccatgcccagcaccgcctgccacccccacctgaccacccactgcagccccccccccgaggagagcagccccggcgagtggagcgaggccctgtaccccctgctgaccaccctgaccgactgcgtggccatgatgagcgacaaggccaagaaggccatggtgttcctgctgatgcaggacagcgcccccaccatcgccacctacctgagcctgcagtacagaagagacgtggtgttctgccagaccctgaccgccctgatctgcggcttcatcatcaagctgagaaactgcctgcacgacgacggcttcctgagacagctgtacaccatcggcctgctggcccagttcgagagcctgctgagcacctacggcgaggagctggccatgctggaggacatgagcctgggcatcatggacctgagaaacgtgaccttcaaggtgacccaggccaccagcagcgccagcgccgacatgctgcccgtgatcaccggcaacagagacggcttcaacgtgagagtgcccctgcccggccccctgttcgacgccctgcccagagagatccagagcggcatgctgctgagagtgcagcccgtgctgttcaacgtgggcatcaacgagcagcagaccctggccgagagattcggcgacaccagcctgcaggaggtgatcaacgtggagagcctggtgagactgaacagctacttcgagcagttcaaggaggtgctgcccgaggactgcctgcccagaagcagaagccagacctgcctgcccgagctgctgagattcctgggccagaacgtgcacgccagaaagaacaagaacgtggacatcctgtggcaggccgccgagatctgcagaagactgaacggcgtgagattcaccagctgcaagagcgccaaggacagaaccgccatgagcgtgaccctggagcagtgcctgatcctgcagcacgagcacggcatggccccccaggtgttcacccaggccctggagtgcatgagaagcgagggctgcagaagagagaacaccatgaagaacgtgggcagcagaaagtacgccttcaacagcctgcagctgaaggccttccccaagcactacagaccccccgagggcacctacggcaaggtggagacctag

SEQ ID NO: 85237 - DNA, 2817 bp, synthetic construct
  misc_feature 1..2817: note = Description of Artificial Sequence: Synthetic coding sequence
  source 1..2817: mol_type = other DNA
atgaccgccagagagcacagccccagacacggcgccagagccagagccatgcagagagccagcaccatcgacgtggccgccgacatgctgggcctgagcctggccggcaacatccaggaccccgacgagcccatcctggagttcagcctggcctgcagcgagctgcacacccccagcctggacagaaagcccaacagcttcgtggccgtgagcgtgaccacccccccccaggccttctggaccaagcacgcccagaccgagatcatcgagggcaccaacaaccccatcttcctgagcagcatcgccttcttccaggacagcctgatcaaccagatgacccaggtgaagctgagcgtgtacgacgtgaaggacagaagccagggcaccatgtacctgctgggcagcggcaccttcatcgtgaaggacctgctgcaggacagacaccacagactgcacctgaccctgagaagcgccgagagcgacagagtgggcaacatcaccgtgatcggctggcagatggaggagaagagcgaccagagaccccccgtgaccagaagcgtggacaccgtgaacggcagaatggtgctgcccgtggacgagagcctgaccgaggccctgggcatcagaagcaagtacgccagcctgagaaaggacaccctgctgaagagcgtgttcggcggcgccatctgcagaatgtacagattccccaccaccgacggcaaccacctgagaatcctggagcagatggccgagagcgtgctgagcctgcacgtgcccagacagttcgtgaagctgctgctggaggaggacgccgccagagtgtgcgagctggaggagctgggcgagctgagcccctgctgggagagcctgagaagacagatcgtgacccagtaccagaccatcatcctgacctaccaggagaacctgaccgacctgcaccagtacagaggccccagcttcaaggccagcagcctgaaggccgacaagaagctggagttcgtgcccaccaacctgcacatccagagaatgagagtgcaggacgacggcggcagcgaccagaactacgacatcgtgaccatcggcgcccccgccgcccactgccagggcttcaagagcggcggcctgagaaagaagctgcacaagttcgaggagaccaagaagcacttcgaggagtgctgcaccagcagcggctgccagagcatcatctacatcccccaggacgtggtgagagccaaggagatcatcgcccagatcaacaccctgaagacccaggtgagctactacgccgagagactgagcagagccgccaaggacagaagcgccaccggcctggagagaaccctggccatcctggccgacaagaccagacagctggtgaccgtgtgcgactgcaagctgctggccaacagcatccacggcctgaacgccgccagacccgactacatcgccagcaaggccagccccaccagcaccgaggaggagcaggtgatgctgagaaacgaccaggacaccctgatggccagatggaccggcagaaacagcagaagcagcctgcaggtggactggcacgaggaggagtgggagaaggtgtggctgaacgtggacaagagcctggagtgcatcatccagagagtggacaagctgctgcagaaggagagactgcacggcgagggctgcgaggacgtgttcccctgcgccggcagctgcaccagcaagaaggactgcagccccccccccgaggagagcagccccggcgagtggagcgaggccctgtaccccctgctgaccaccctgaccgactgcgtggccatgatgagcgacaaggccaagaaggccatggtgttcctgctgatgcaggacagcgcccccaccatcgccacctacctgagcctgcagtacagaagagacgtggtgttctgccagaccctgaccgccctgatctgcggcttcatcatcaagctgagaaactgcctgcacgacgacggcttcctgagacagctgtacaccatcggcctgctggcccagttcgagagcctgctgagcacctacggcgaggagctggccatgctggaggacatgagcctgggcatcatggacctgagaaacgtgaccttcaaggtgacccaggccaccagcagcgccagcgccgacatgctgcccgtgatcaccggcaacagagacggcttcaacgtgagagtgcccctgcccggccccctgttcgacgccctgcccagagagatccagagcggcatgctgctgagagtgcagcccgtgctgttcaacgtgggcatcaacgagcagcagaccctggccgagagattcggcgacaccagcctgcaggaggtgatcaacgtggagagcctggtgagactgaacagctacttcgagcagttcaaggaggtgctgcccgaggactgcctgcccagaagcagaagccagacctgcctgcccgagctgctgagattcctgggccagaacgtgcacgccagaaagaacaagaacgtggacatcctgtggcaggccgccgagatctgcagaagactgaacggcgtgagattcaccagctgcaagagcgccaaggacagaaccgccatgagcgtgaccctggagcagtgcctgatcctgcagcacgagcacggcatggccccccaggtgttcacccaggccctggagtgcatgagaagcgagggctgcagaagagagaacaccatgaagaacgtgggcagcagaaagtacgccttcaacagcctgcagctgaaggccttccccaagcactacagaccccccgagggcacctacggcaaggtggagacctag

SEQ ID NO: 85238 - DNA, 2865 bp, synthetic construct
  misc_feature 1..2865: note = Description of Artificial Sequence: Synthetic coding sequence
  source 1..2865: mol_type = other DNA
atgaccgccagagagcacagccccagacacggcgccagagccagagccatgcagagagccagcaccatcgacgtggccgccgacatgctgggcctgagcctggccggcaacatccaggaccccgacgagcccatcctggagttcagcctggcctgcagcgagctgcacacccccagcctggacagaaagcccaacagcttcgtggccgtgagcgtgaccacccccccccaggccttctggaccaagcacgcccagaccgagatcatcgagggcaccaacaaccccatcttcctgagcagcatcgccttcttccaggacagcctgatcaaccagatgacccaggtgaagctgagcgtgtacgacgtgaaggacagaagccagggcaccatgtacctgctgggcagcggcaccttcatcgtgaaggacctgctgcaggacagacaccacagactgcacctgaccctgagaagcgccgagagcgacagagtgggcaacatcaccgtgatcggctggcagatggaggagaagagcgaccagagaccccccgtgaccagaagcgtggacaccgtgaacggcagaatggtgctgcccgtggacgagagcctgaccgaggccctgggcatcagaagcaagtacgccagcctgagaaaggacaccctgctgaagagcgtgttcggcggcgccatctgcagaatgtacagattccccaccaccgacggcaaccacctgagaatcctggagcagatggccgagagcgtgctgagcctgcacgtgcccagacagttcgtgaagctgctgctggaggaggacgccgccagagtgtgcgagctggaggagctgggcgagctgagcccctgctgggagagcctgagaagacagatcgtgacccagtaccagaccatcatcctgacctaccaggagaacctgaccgacctgcaccagtacagaggccccagcttcaaggccagcagcctgaaggccgacaagaagctggagttcgtgcccaccaacctgcacatccagagaatgagagtgcaggacgacggcggcagcgaccagaactacgacatcgtgaccatcggcgcccccgccgcccactgccagggcttcaagagcggcggcctgagaaagaagctgcacaagttcgaggagaccaagaagcacttcgaggagtgctgcaccagcagcggctgccagagcatcatctacatcccccaggacgtggtgagagccaaggagatcatcgcccagatcaacaccctgaagacccaggtgagctactacgccgagagactgagcagagccgccaaggacagaagcgccaccggcctggagagaaccctggccatcctggccgacaagaccagacagctggtgaccgtgtgcgactgcaagctgctggccaacagcatccacggcctgaacgccgccagacccgactacatcgccagcaaggccagccccaccagcaccgaggaggagcaggtgatgctgagaaacgaccaggacaccctgatggccagatggaccggcagaaacagcagaagcagcctgcaggtggactggcacgaggaggagtgggagaaggtgtggctgaacgtggacaagagcctggagtgcatcatccagagagtggacaagctgctgcagaaggagagactgcacggcgagggctgcgaggacgtgttcccctgcgccggcagctgcaccagcaagaaggactgcagccccccccccgaggagagcagccccggcgagtggagcgaggccctgtaccccctgctgaccaccctgaccgactgcgtggccatgatgagcgacaaggccaagaaggccatggtgttcctgctgatgcaggacagcgcccccaccatcgccacctacctgagcctgcagtacagaagagacgtggtgttctgccagaccctgaccgccctgatctgcggcttcatcatcaagctgagaaactgcctgcacgacgacggcttcctgagacagctgtacaccatcggcctgctggcccagttcgagagcctgctgagcacctacggcgaggagctggccatgctggaggacatgagcctgggcatcatggacctgagaaacgtgaccttcaaggtgacccaggccaccagcagcgccagcgccgacatgctgcccgtgatcaccggcaacagagacggcttcaacgtgagagtgcccctgcccggccccctgttcgacgccctgcccagagagatccagagcggcatgctgctgagagtgcagcccgtgctgttcaacgtgggcatcaacgagcagcagaccctggccgagagattcggcgacaccagcctgcaggaggtgatcaacgtggagagcctggtgagactgaacagctacttcgagcagttcaaggaggtgctgcccgaggactgcctgcccagaagcagaagccagacctgcctgcccgagctgctgagattcctgggccagaacgtgcacgccagaaagaacaagaacgtggacatcctgtggcaggccgccgagatctgcagaagactgaacggcgtgagattcaccagctgcaagagcgccaaggacagaaccgccatgagcgtgaccctggagcagtgcctgatcctgcagcacgagcacggcatggccccccaggtgttcacccaggccctggagtgcatgagaagcatcggcaccagagaggtggtgacccagaagaacctgagcggcctggtgcccatcagagacctgagactggaccccagcctgctgtgcagcatccccctgctggccctgagccccaacctgctgatcgtgtggctgttcctgagcatcgcctacctggtgaccaagctgagatgcaagtag

SEQ ID NO: 85239 - DNA, 2919 bp, synthetic construct
  misc_feature 1..2919: note = Description of Artificial Sequence: Synthetic coding sequence
  source 1..2919: mol_type = other DNA
atgaccgccagagagcacagccccagacacggcgccagagccagagccatgcagagagccagcaccatcgacgtggccgccgacatgctgggcctgagcctggccggcaacatccaggaccccgacgagcccatcctggagttcagcctggcctgcagcgagctgcacacccccagcctggacagaaagcccaacagcttcgtggccgtgagcgtgaccacccccccccaggccttctggaccaagcacgcccagaccgagatcatcgagggcaccaacaaccccatcttcctgagcagcatcgccttcttccaggacagcctgatcaaccagatgacccaggtgaagctgagcgtgtacgacgtgaaggacagaagccagggcaccatgtacctgctgggcagcggcaccttcatcgtgaaggacctgctgcaggacagacaccacagactgcacctgaccctgagaagcgccgagagcgacagagtgggcaacatcaccgtgatcggctggcagatggaggagaagagcgaccagagaccccccgtgaccagaagcgtggacaccgtgaacggcagaatggtgctgcccgtggacgagagcctgaccgaggccctgggcatcagaagcaagtacgccagcctgagaaaggacaccctgctgaagagcgtgttcggcggcgccatctgcagaatgtacagattccccaccaccgacggcaaccacctgagaatcctggagcagatggccgagagcgtgctgagcctgcacgtgcccagacagttcgtgaagctgctgctggaggaggacgccgccagagtgtgcgagctggaggagctgggcgagctgagcccctgctgggagagcctgagaagacagatcgtgacccagtaccagaccatcatcctgacctaccaggagaacctgaccgacctgcaccagtacagaggccccagcttcaaggccagcagcctgaaggccgacaagaagctggagttcgtgcccaccaacctgcacatccagagaatgagagtgcaggacgacggcggcagcgaccagaactacgacatcgtgaccatcggcgcccccgccgcccactgccagggcttcaagagcggcggcctgagaaagaagctgcacaagttcgaggagaccaagaagcacaccagcagcggctgccagagcatcatctacatcccccaggacgtggtgagagccaaggagatcatcgcccagatcaacaccctgaagacccaggtgagctactacgccgagagactgagcagagccgccaaggacagaagcgccaccggcctggagagaaccctggccatcctggccgacaagaccagacagctggtgaccgtgtgcgactgcaagctgctggccaacagcatccacggcctgaacgccgccagacccgactacatcgccagcaaggccagccccaccagcaccgaggaggagcaggtgatgctgagaaacgaccaggacaccctgatggccagatggaccggcagaaacagcagaagcagcctgcaggtggactggcacgaggaggagtgggagaaggtgtggctgaacgtggacaagagcctggagtgcatcatccagagagtggacaagctgctgcagaaggagagactgcacggcgagggctgcgaggacgtgttcccctgcgccggcagctgcaccagcaagaagggcaaccccgacagccacgcctactggatcagacccgaggaccccttctgcgacgtgcccagcagcccctgccccagcaccatgcccagcaccgcctgccacccccacctgaccacccactgcagccccccccccgaggagagcagccccggcgagtggagcgaggccctgtaccccctgctgaccaccctgaccgactgcgtggccatgatgagcgacaaggccaagaaggccatggtgttcctgctgatgcaggacagcgcccccaccatcgccacctacctgagcctgcagtacagaagagacgtggtgttctgccagaccctgaccgccctgatctgcggcttcatcatcaagctgagaaactgcctgcacgacgacggcttcctgagacagctgtacaccatcggcctgctggcccagttcgagagcctgctgagcacctacggcgaggagctggccatgctggaggacatgagcctgggcatcatggacctgagaaacgtgaccttcaaggtgacccaggccaccagcagcgccagcgccgacatgctgcccgtgatcaccggcaacagagacggcttcaacgtgagagtgcccctgcccggccccctgttcgacgccctgcccagagagatccagagcggcatgctgctgagagtgcagcccgtgctgttcaacgtgggcatcaacgagcagcagaccctggccgagagattcggcgacaccagcctgcaggaggtgatcaacgtggagagcctggtgagactgaacagctacttcgagcagttcaaggaggtgctgcccgaggactgcctgcccagaagcagaagccagacctgcctgcccgagctgctgagattcctgggccagaacgtgcacgccagaaagaacaagaacgtggacatcctgtggcaggccgccgagatctgcagaagactgaacggcgtgagattcaccagctgcaagagcgccaaggacagaaccgccatgagcgtgaccctggagcagtgcctgatcctgcagcacgagcacggcatggccccccaggtgttcacccaggccctggagtgcatgagaagcgagggctgcagaagagagaacaccatgaagaacgtgggcagcagaaagtacgccttcaacagcctgcagctgaaggccttccccaagcactacagaccccccgagggcacctacggcaaggtggagacctag

SEQ ID NO: 85240 - DNA, 2934 bp, synthetic construct; identical to SEQ ID NO: 85236
  misc_feature 1..2934: note = Description of Artificial Sequence: Synthetic coding sequence
  source 1..2934: mol_type = other DNA

SEQ ID NO: 85241 - DNA, 2817 bp, synthetic construct
  misc_feature 1..2817: note = Description of Artificial Sequence: Synthetic coding sequence
  source 1..2817: mol_type = other DNA
atgaccgccagagagcacagccccagacacggcgccagagccagagccatgcagagagccagcaccatcgacgtggccgccgacatgctgggcctgagcctggccggcaacatccaggaccccgacgagcccatcctggagttcagcctggcctgcagcgagctgcacacccccagcctggacagaaagcccaacagcttcgtggccgtgagcgtgaccacccccccccaggccttctggaccaagcacgcccagaccgagatcatcgagggcaccaacaaccccatcttcctgagcagcatcgccttcttccaggacagcctgatcaaccagatgacccaggtgaagctgagcgtgtacgacgtgaaggacagaagccagggcaccatgtacctgctgggcagcggcaccttcatcgtgaaggacctgctgcaggacagacaccacagactgcacctgaccctgagaagcgccgagagcgacagagtgggcaacatcaccgtgatcggctggcagatggaggagaagagcgaccagagaccccccgtgaccagaagcgtggacaccgtgaacggcagaatggtgctgcccgtggacgagagcctgaccgaggccctgggcatcagaagcaagtacgccagcctgagaaaggacaccctgctgaagagcgtgttcggcggcgccatctgcagaatgtacagattccccaccaccgacggcaaccacctgagaatcctggagcagatggccgagagcgtgctgagcctgcacgtgcccagacagttcgtgaagctgctgctggaggaggacgccgccagagtgtgcgagctggaggagctgggcgagctgagcccctgctgggagagcctgagaagacagatcgtgacccagtaccagaccatcatcctgacctaccaggagaacctgaccgacctgcaccagtacagaggccccagcttcaaggccagcagcctgaaggccgacaagaagctggagttcgtgcccaccaacctgcacatccagagaatgagagtgcaggacgacggcggcagcgaccagaactacgacatcgtgaccatcggcgcccccgccgcccactgccagggcttcaagagcggcggcctgagaaagaagctgcacaagttcgaggagaccaagaagcagcaggaggagagcagaaccagcagcggctgccagagcatcatctacatcccccaggacgtggtgagagccaaggagatcatcgcccagatcaacaccctgaagacccaggtgagctactacgccgagagactgagcagagccgccaaggacagaagcgccaccggcctggagagaaccctggccatcctggccgacaagaccagacagctggtgaccgtgtgcgactgcaagctgctggccaacagcatccacggcctgaacgccgccagacccgactacatcgccagcaaggccagccccaccagcaccgaggaggagcaggtgatgctgagaaacgaccaggacaccctgatggccagatggaccggcagaaacagcagaagcagcctgcaggtggactggcacgaggaggagtgggagaaggtgtggctgaacgtggacaagagcctggagtgcatcatccagagagtggacaagctgctgcagaaggagagactgcacggcgagggctgcgaggacgtgttcccctgcgccggcagctgcaccagcaagaaggactgcagccccccccccgaggagagcagccccggcgagtggagcgaggccctgtaccccctgctgaccaccctgaccgactgcgtggccatgatgagcgacaaggccaagaaggccatggtgttcctgctgatgcaggacagcgcccccaccatcgccacctacctgagcctgcagtacagaagagacgtggtgttctgccagaccctgaccgccctgatctgcggcttcatcatcaagctgagaaactgcctgcacgacgacggcttcctgagacagctgtacaccatcggcctgctggcccagttcgagagcctgctgagcacctacggcgaggagctggccatgctggaggacatgagcctgggcatcatggacctgagaaacgtgaccttcaaggtgacccaggccaccagcagcgccagcgccgacatgctgcccgtgatcaccggcaacagagacggcttcaacgtgagagtgcccctgcccggccccctgttcgacgccctgcccagagagatccagagcggcatgctgctgagagtgcagcccgtgctgttcaacgtgggcatcaacgagcagcagaccctggccgagagattcggcgacaccagcctgcaggaggtgatcaacgtggagagcctggtgagactgaacagctacttcgagcagttcaaggaggtgctgcccgaggactgcctgcccagaagcagaagccagacctgcctgcccgagctgctgagattcctgggccagaacgtgcacgccagaaagaacaagaacgtggacatcctgtggcaggccgccgagatctgcagaagactgaacggcgtgagattcaccagctgcaagagcgccaaggacagaaccgccatgagcgtgaccctggagcagtgcctgatcctgcagcacgagcacggcatggccccccaggtgttcacccaggccctggagtgcatgagaagcgagggctgcagaagagagaacaccatgaagaacgtgggcagcagaaagtacgccttcaacagcctgcagctgaaggccttccccaagcactacagaccccccgagggcacctacggcaaggtggagacctag

SEQ ID NO: 85242 - DNA, 3021 bp, synthetic construct
  misc_feature 1..3021: note = Description of Artificial Sequence: Synthetic coding sequence
  source 1..3021: mol_type = other DNA
atggagggccagagcagcagaggcagcagaagacccggcaccagagccggcctgggcagcctgcccatgccccagggcgtggcccagaccggcgcccccagcaaggtggacagcagcttccagctgcccgccaagaagaacgccgccctgggccccagcgagcccagactggccctggcccccgtgggccccagagccgccatgagcgccagcagcgagggccccagactggccctggccagccccagacccatcctggcccccctgtgcacccccgagggccagaagaccgccaccgcccacagaagcagcagcctggcccccaccagcgtgggccagctggtgatgagcgccagcgccggccccaagcccccccccgccaccaccggcagcgtgctggcccccaccagcctgggcctggtgatgcccgccagcgccggccccagaagcccccccgtgaccctgggccccaacctggcccccaccagcagagaccagaagcaggagccccccgccagcgtgggccccaagcccaccctggccgccagcggcctgagcctggccctggccagcgaggagcagccccccgagctgcccagcacccccagccccgtgcccagccccgtgctgagccccacccaggagcaggccctggcccccgccagcaccgccagcggcgccgccagcgtgggccagaccagcgccagaaagagagacgcccccgcccccagacccctgcccgccagcgagggccacctgcagccccccgcccagaccagcggccccaccggcagccccccctgcatccagaccagccccgaccccagactgagccccagcttcagagccagacccgaggccctgcacagcagccccgaggaccccgtgctgcccagacccccccagaccctgcccctggacgtgggccagggccccagcgagcccggcacccacagccccggcctgctgagccccaccttcagacccggcgcccccagcggccagaccgtgcccccccccctgcccaagccccccagaagccccagcagaagccccagccacagccccaacagaagcccctgcgtgccccccgcccccgacatggccctgcccagactgggcacccagagcaccggccccggcagatgcctgagccccaacctgcaggcccaggaggcccccgcccccgtgaccaccagcagcagcaccagcaccctgagcagcagcccctggagcgcccagcccacctggaagagcgaccccggcttcagaatcaccgtggtgacctggaacgtgggcaccgccatgccccccgacgacgtgaccagcctgctgcacctgggcggcggcgacgacagcgacggcgccgacatgatcgccatcggcctgcaggaggtgaacagcatgctgaacaagagactgaaggacgccctgttcaccgaccagtggagcgagctgttcatggacgccctgggccccttcaacttcgtgctggtgagcagcgtgagaatgcagggcgtgatcctgctgctgttcgccaagtactaccacctgcccttcctgagagacgtgcagaccgactgcaccagaaccggcctgggcggctactggggcaacaagggcggcgtgagcgtgagactggccgccttcggccacatgctgtgcttcctgaactgccacctgcccgcccacatggacaaggccgagcagagaaaggacaacttccagaccatcctgagcctgcagcagttccagggccccggcgcccagggcatcctggaccacgacctggtgttctggttcggcgacctgaacttcagaatcgagagctacgacctgcacttcgtgaagttcgccatcgacagcgaccagctgcaccagctgtgggagaaggaccagctgaacatggccaagaacacctggcccatcctgaagggcttccaggagggccccctgaacttcgcccccaccttcaagttcgacgtgggcaccaacaagtacgacaccagcgccaagaagagaaagcccgcctggaccgacagaatcctgtggaaggtgaaggcccccggcggcggccccagccccagcggcagaaagagccacagactgcaggtgacccagcacagctacagaagccacatggagtacaccgtgagcgaccacaagcccgtggccgcccagttcctgctgcagttcgccttcagagacgacatgcccctggtgagactggaggtggccgacgagtgggtgagacccgagcaggccgtggtgagatacagaatggagaccgtgttcgccagaagcagctgggactggatcggcctgtacagagtgggcttcagacactgcaaggactacgtggcctacgtgtgggccaagcacgaggacgtggacggcaacacctaccaggtgaccttcagcgaggagagcctgcccaagggccacggcgacttcatcctgggctactacagccacaaccacagcatcctgatcggcatcaccgagcccttccagatcagcctgcccagcagcgagctggccagcagcagcaccgacagcagcggcaccagcagcgagggcgaggacgacagcaccctggagctgctggcccccaagagcagaagccccagccccggcaagagcaagagacacagaagcagaagccccggcctggccagattccccggcctggccctgagacccagcagcagagagagaagaggcgccagcagaagccccagcccccagagcagaagactgagcagagtggcccccgacagaagcagcaacggcagcagcagaggcagcagcgaggagggccccagcggcctgcccggcccctgggccttcccccccgccgtgcccagaagcctgggcctgctgcccgccctgagactggagaccgtggaccccggcggcggcggcagctggggccccgacagagaggccctggcccccaacagcctgagccccagcccccagggccacagaggcctggaggagggcggcctgggcccctag

SEQ ID NO: 85243 - DNA, 1920 bp, synthetic construct
  misc_feature 1..1920: note = Description of Artificial Sequence: Synthetic coding sequence
  source 1..1920: mol_type = other DNA
atggccctgcccagactgggcacccagagcaccggccccggcagatgcctgagccccaacctgcaggcccaggaggcccccgcccccgtgaccaccagcagcagcaccagcaccctgagcagcagcccctggagcgcccagcccacctggaagagcgaccccggcttcagaatcaccgtggtgacctggaacgtgggcaccgccatgccccccgacgacgtgaccagcctgctgcacctgggcggcggcgacgacagcgacggcgccgacatgatcgccatcggcctgcaggaggtgaacagcatgctgaacaagagactgaaggacgccctgttcaccgaccagtggagcgagctgttcatggacgccctgggccccttcaacttcgtgctggtgagcagcgtgagaatgcagggcgtgatcctgctgctgttcgccaagtactaccacctgcccttcctgagagacgtgcagaccgactgcaccagaaccggcctgggcggctactggggcaacaagggcggcgtgagcgtgagactggccgccttcggccacatgctgtgcttcctgaactgccacctgcccgcccacatggacaaggccgagcagagaaaggacaacttccagaccatcctgagcctgcagcagttccagggccccggcgcccagggcatcctggaccacgacctggtgttctggttcggcgacctgaacttcagaatcgagagctacgacctgcacttcgtgaagttcgccatcgacagcgaccagctgcaccagctgtgggagaaggaccagctgaacatggccaagaacacctggcccatcctgaagggcttccaggagggccccctgaacttcgcccccaccttcaagttcgacgtgggcaccaacaagtacgacaccagcgccaagaagagaaagcccgcctggaccgacagaatcctgtggaaggtgaaggcccccggcggcggccccagccccagcggcagaaagagccacagactgcaggtgacccagcacagctacagaagccacatggagtacaccgtgagcgaccacaagcccgtggccgcccagttcctgctgcagttcgccttcagagacgacatgcccctggtgagactggaggtggccgacgagtgggtgagacccgagcaggccgtggtgagatacagaatggagaccgtgttcgccagaagcagctgggactggatcggcctgtacagagtgggcttcagacactgcaaggactacgtggcctacgtgtgggccaagcacgaggacgtggacggcaacacctaccaggtgaccttcagcgaggagagcctgcccaagggccacggcgacttcatcctgggctactacagccacaaccacagcatcctgatcggcatcaccgagcccttccagatcagcctgcccagcagcgagctggccagcagcagcaccgacagcagcggcaccagcagcgagggcgaggacgacagcaccctggagctgctggcccccaagagcagaagccccagccccggcaagagcaagagacacagaagcagaagccccggcctggccagattccccggcctggccctgagacccagcagcagagagagaagaggcgccagcagaagccccagcccccagagcagaagactgagcagagtggcccccgacagaagcagcaacggcagcagcagaggcagcagcgaggagggccccagcggcctgcccggcccctgggccttcccccccgccgtgcccagaagcctgggcctgctgcccgccctgagactggagaccgtggaccccggcggcggcggcagctggggccccgacagagaggccctggcccccaacagcctgagccccagcccccagggccacagaggcctggaggagggcggcctgggcccctag

SEQ ID NO: 85244 - DNA, 1917 bp, synthetic construct
  misc_feature 1..1917: note = Description of Artificial Sequence: Synthetic coding sequence
  source 1..1917: mol_type = other DNA
atggagggccagagcagcagaggcagcagaagacccggcaccagagccggcctgggcagcctgcccatgccccagggcgtggcccagaccggcgcccccagcaaggtggacagcagcttccagctgcccgccaagaagaacgccgccctgggccccagcgagcccagaatcaccgtggtgacctggaacgtgggcaccgccatgccccccgacgacgtgaccagcctgctgcacctgggcggcggcgacgacagcgacggcgccgacatgatcgccatcggcctgcaggaggtgaacagcatgctgaacaagagactgaaggacgccctgttcaccgaccagtggagcgagctgttcatggacgccctgggccccttcaacttcgtgctggtgagcagcgtgagaatgcagggcgtgatcctgctgctgttcgccaagtactaccacctgcccttcctgagagacgtgcagaccgactgcaccagaaccggcctgggcggctactggggcaacaagggcggcgtgagcgtgagactggccgccttcggccacatgctgtgcttcctgaactgccacctgcccgcccacatggacaaggccgagcagagaaaggacaacttccagaccatcctgagcctgcagcagttccagggccccggcgcccagggcatcctggaccacgacctggtgttctggttcggcgacctgaacttcagaatcgagagctacgacctgcacttcgtgaagttcgccatcgacagcgaccagctgcaccagctgtgggagaaggaccagctgaacatggccaagaacacctggcccatcctgaagggcttccaggagggccccctgaacttcgcccccaccttcaagttcgacgtgggcaccaacaagtacgacaccagcgccaagaagagaaagcccgcctggaccgacagaatcctgtggaaggtgaaggcccccggcggcggccccagccccagcggcagaaagagccacagactgcaggtgacccagcacagctacagaagccacatggagtacaccgtgagcgaccacaagcccgtggccgcccagttcctgctgcagttcgccttcagagacgacatgcccctggtgagactggaggtggccgacgagtgggtgagacccgagcaggccgtggtgagatacagaatggagaccgtgttcgccagaagcagctgggactggatcggcctgtacagagtgggcttcagacactgcaaggactacgtggcctacgtgtgggccaagcacgaggacgtggacggcaacacctaccaggtgaccttcagcgaggagagcctgcccaagggccacggcgacttcatcctgggctactacagccacaaccacagcatcctgatcggcatcaccgagcccttccagatcagcctgcccagcagcgagctggccagcagcagcaccgacagcagcggcaccagcagcgagggcgaggacgacagcaccctggagctgctggcccccaagagcagaagccccagccccggcaagagcaagagacacagaagcagaagccccggcctggccagattccccggcctggccctgagacccagcagcagagagagaagaggcgccagcagaagccccagcccccagagcagaagactgagcagagtggcccccgacagaagcagcaacggcagcagcagaggcagcagcgaggagggccccagcggcctgcccggcccctgggccttcccccccgccgtgcccagaagcctgggcctgctgcccgccctgagactggagaccgtggaccccggcggcggcggcagctggggccccgacagagaggccctggcccccaacagcctgagccccagcccccagggccacagaggcctggaggagggcggcctgggcccctag

SEQ ID NO: 85245 - DNA, 1920 bp, synthetic construct; identical to SEQ ID NO: 85243
  misc_feature 1..1920: note = Description of Artificial Sequence: Synthetic coding sequence
  source 1..1920: mol_type = other DNA

SEQ ID NO: 85246 - DNA, 2820 bp, synthetic construct
  misc_feature 1..2820: note = Description of Artificial Sequence: Synthetic coding sequence
  source 1..2820: mol_type = other DNA
atgagcgccagcagcgagggccccagactggccctggccagccccagacccatcctggcccccctgtgcacccccgagggccagaagaccgccaccgcccacagaagcagcagcctggcccccaccagcgtgggccagctggtgatgagcgccagcgccggccccaagcccccccccgccaccaccggcagcgtgctggcccccaccagcctgggcctggtgatgcccgccagcgccggccccagaagcccccccgtgaccctgggccccaacctggcccccaccagcagagaccagaagcaggagccccccgccagcgtgggccccaagcccaccctggccgccagcggcctgagcctggccctggccagcgaggagcagccccccgagctgcccagcacccccagccccgtgcccagccccgtgctgagccccacccaggagcaggccctggcccccgccagcaccgccagcggcgccgccagcgtgggccagaccagcgccagaaagagagacgcccccgcccccagacccctgcccgccagcgagggccacctgcagccccccgcccagaccagcggccccaccggcagccccccctgcatccagaccagccccgaccccagactgagccccagcttcagagccagacccgaggccctgcacagcagccccgaggaccccgtgctgcccagacccccccagaccctgcccctggacgtgggccagggccccagcgagcccggcacccacagccccggcctgctgagccccaccttcagacccggcgcccccagcggccagaccgtgcccccccccctgcccaagccccccagaagccccagcagaagccccagccacagccccaacagaagcccctgcgtgccccccgcccccgacatggccctgcccagactgggcacccagagcaccggccccggcagatgcctgagccccaacctgcaggcccaggaggcccccgcccccgtgaccaccagcagcagcaccagcaccctgagcagcagcccctggagcgcccagcccacctggaagagcgaccccggcttcagaatcaccgtggtgacctggaacgtgggcaccgccatgccccccgacgacgtgaccagcctgctgcacctgggcggcggcgacgacagcgacggcgccgacatgatcgccatcggcctgcaggaggtgaacagcatgctgaacaagagactgaaggacgccctgttcaccgaccagtggagcgagctgttcatggacgccctgggccccttcaacttcgtgctggtgagcagcgtgagaatgcagggcgtgatcctgctgctgttcgccaagtactaccacctgcccttcctgagagacgtgcagaccgactgcaccagaaccggcctgggcggctactggggcaacaagggcggcgtgagcgtgagactggccgccttcggccacatgctgtgcttcctgaactgccacctgcccgcccacatggacaaggccgagcagagaaaggacaacttccagaccatcctgagcctgcagcagttccagggccccggcgcccagggcatcctggaccacgacctggtgttctggttcggcgacctgaacttcagaatcgagagctacgacctgcacttcgtgaagttcgccatcgacagcgaccagctgcaccagctgtgggagaaggaccagctgaacatggccaagaacacctggcccatcctgaagggcttccaggagggccccctgaacttcgcccccaccttcaagttcgacgtgggcaccaacaagtacgacaccagcgccaagaagagaaagcccgcctggaccgacagaatcctgtggaaggtgaaggcccccggcggcggccccagccccagcggcagaaagagccacagactgcaggtgacccagcacagctacagaagccacatggagtacaccgtgagcgaccacaagcccgtggccgcccagttcctgctgcagttcgccttcagagacgacatgcccctggtgagactggaggtggccgacgagtgggtgagacccgagcaggccgtggtgagatacagaatggagaccgtgttcgccagaagcagctgggactggatcggcctgtacagagtgggcttcagacactgcaaggactacgtggcctacgtgtgggccaagcacgaggacgtggacggcaacacctaccaggtgaccttcagcgaggagagcctgcccaagggccacggcgacttcatcctgggctactacagccacaaccacagcatcctgatcggcatcaccgagcccttccagatcagcctgcccagcagcgagctggccagcagcagcaccgacagcagcggcaccagcagcgagggcgaggacgacagcaccctggagctgctggcccccaagagcagaagccccagccccggcaagagcaagagacacagaagcagaagccccggcctggccagattccccggcctggccctgagacccagcagcagagagagaagaggcgccagcagaagccccagcccccagagcagaagactgagcagagtggcccccgacagaagcagcaacggcagcagcagaggcagcagcgaggagggccccagcggcctgcccggcccctgggccttcccccccgccgtgcccagaagcctgggcctgctgcccgccctgagactggagaccgtggaccccggcggcggcggcagctggggccccgacagagaggccctggcccccaacagcctgagccccagcccccagggccacagaggcctggaggagggcggcctgggcccctag

SEQ ID NO: 85247 - DNA, 3534 bp, synthetic construct
  misc_feature 1..3534: note = Description of Artificial Sequence: Synthetic coding sequence
  source 1..3534: mol_type = other DNA
atggtgccctgctggaaccacggcaacatcaccagaagcaaggccgaggagctgctgagcagaaccggcaaggacggcagcttcctggtgagagccagcgagagcatcagcagagcctacgccctgtgcgtgctgtacagaaactgcgtgtacacctacagaatcctgcccaacgaggacgacaagttcaccgtgcaggccagcgagggcgtgagcatgagattcttcaccaagctggaccagctgatcgagttctacaagaaggagaacatgggcctggtgacccacctgcagtaccccgtgcccctggaggaggaggacaccggcgacgaccccgaggaggacaccgtggagagcgtggtgagcccccccgagctgccccccagaaacatccccctgaccgccagcagctgcgaggccaaggaggtgcccttcagcaacgagaaccccagagccaccgagaccagcagacccagcctgagcgagaccctgttccagagactgcagagcatggacaccagcggcctgcccgaggagcacctgaaggccatccaggactacctgagcacccagctggcccaggacagcgagttcgtgaagaccggcagcagcagcctgccccacctgaagaagctgaccaccctgctgtgcaaggagctgtacggccagatgctgagaaccgtgcccggcatcggcaaggtgaaggaggaggaccacgtgcccggcgaggccaaccccatcaacatggtgagcaagctgagccagctgaccagcctgctgagcagcatcgaggacaaggtgaaggccctgctgcacgagggccccgagagcccccacagacccagcctgatcccccccgtgaccttcgaggtgaaggccgagagcctgggcatcccccagaagatgcagctgaaggtggacgtggagagcggcaagctgatcatcaagaagagcaaggacggcagcgaggacaagttctacagccacaagaagatcctgcagctgatcaagagccagaagttcctgaacaagctggtgatcctggtggagaccgagaaggagaagatcctgagaaaggagtacgtgttcgccgacagcaagaagagagagggcttctgccagctgctgcagcagatgaagaacaagcacagcgagcagcccgagcccgacatgatcaccatcttcatcggcacctggaacatgggcaacgcccccccccccaagaagatcaccagctggttcctgagcaagggccagggcaagaccagagacgacagcgccgactacatcccccacgacatctacgtgatcggcacccaggaggaccccctgagcgagaaggagtggctggagatcctgaagcacagcctgcaggagatcaccagcgtgaccttcaagaccgtggccatccacaccctgtggaacatcagaatcgtggtgctggccaagcccgagcacgagaacagaatcagccacatctgcaccgacaacgtgaagaccggcatcgccaacaccctgggcaacaagggcgccgtgggcgtgagcttcatgttcaacggcaccagcctgggcttcgtgaacagccacctgaccagcggcagcgagaagaagctgagaagaaaccagaactacatgaacatcctgagattcctggccctgggcgacaagaagctgagccccttcaacatcacccacagattcacccacctgttctggttcggcgacctgaactacagagtggacctgcccacctgggaggccgagaccatcatccagaagatcaagcagcagcagtacgccgacctgctgagccacgaccagctgctgaccgagagaagagagcagaaggtgttcctgcacttcgaggaggaggagatcaccttcgcccccacctacagattcgagagactgaccagagacaagtacgcctacaccaagcagaaggccaccggcatgaagtacaacctgcccagctggtgcgacagagtgctgtggaagagctaccccctggtgcacgtggtgtgccagagctacggcagcaccagcgacatcatgaccagcgaccacagccccgtgttcgccaccttcgaggccggcgtgaccagccagttcgtgagcaagaacggccccggcaccgtggacagccagggccagatcgagttcctgagatgctacgccaccctgaagaccaagagccagaccaagttctacctggagttccacagcagctgcctggagagcttcgtgaagagccaggagggcgagaacgaggagggcagcgagggcgagctggtggtgaagttcggcgagaccctgcccaagctgaagcccatcatcagcgaccccgagtacctgctggaccagcacatcctgatcagcatcaagagcagcgacagcgacgagagctacggcgagggctgcatcgccctgagactggaggccaccgagacccagctgcccatctacacccccctgacccaccacggcgagctgaccggccacttccagggcgagatcaagctgcagaccagccagggcaagaccagagagaagctgtacgacttcgtgaagaccgagagagacgagagcagcggccccaagaccctgaagagcctgaccagccacgaccccatgaagcagtgggaggtgaccagcagagcccccccctgcagcggcagcagcatcaccgagatcatcaaccccaactacatgggcgtgggccccttcggcccccccatgcccctgcacgtgaagcagaccctgagccccgaccagcagcccaccgcctggagctacgaccagccccccaaggacagccccctgggcccctgcagaggcgagagcccccccaccccccccggccagccccccatcagccccaagaagttcctgcccagcaccgccaacagaggcctgccccccagaacccaggagagcagacccagcgacctgggcaagaacgccggcgacaccctgccccaggaggacctgcccctgaccaagcccgagatgttcgagaaccccctgtacggcagcctgagcagcttccccaagcccgcccccagaaaggaccaggagagccccaagatgcccagaaaggagccccccccctgccccgagcccggcatcctgagccccagcatcgtgctgaccaaggcccaggaggccgacagaggcgagggccccggcaagcaggtgcccgcccccagactgagaagcttcacctgcagcagcagcgccgagggcagagccgccggcggcgacaagagccagggcaagcccaagacccccgtgagcagccaggcccccgtgcccgccaagagacccatcaagcccagcagaagcgagatcaaccagcagaccccccccacccccacccccagaccccccctgcccgtgaagagccccgccgtgctgcacctgcagcacagcaagggcagagactacagagacaacaccgagctgccccaccacggcaagcacagacccgaggagggcccccccggccccctgggcagaaccgccatgcagtag

SEQ ID NO: 85248 - DNA, 2433 bp, synthetic construct
  misc_feature 1..2433: note = Description of Artificial Sequence: Synthetic coding sequence
  source 1..2433: mol_type = other DNA
aagagagagggcttctgccagctgctgcagcagatgaagaacaagcacagcgagcagcccgagcccgacatgatcaccatcttcatcggcacctggaacatgggcaacgcccccccccccaagaagatcaccagctggttcctgagcaagggccagggcaagaccagagacgacagcgccgactacatcccccacgacatctacgtgatcggcacccaggaggaccccctgagcgagaaggagtggctggagatcctgaagcacagcctgcaggagatcaccagcgtgaccttcaagaccgtggccatccacaccctgtggaacatcagaatcgtggtgctggccaagcccgagcacgagaacagaatcagccacatctgcaccgacaacgtgaagaccggcatcgccaacaccctgggcaacaagggcgccgtgggcgtgagcttcatgttcaacggcaccagcctgggcttcgtgaacagccacctgaccagcggcagcgagaagaagctgagaagaaaccagaactacatgaacatcctgagattcctggccctgggcgacaagaagctgagccccttcaacatcacccacagattcacccacctgttctggttcggcgacctgaactacagagtggacctgcccacctgggaggccgagaccatcatccagaagatcaagcagcagcagtacgccgacctgctgagccacgaccagctgctgaccgagagaagagagcagaaggtgttcctgcacttcgaggaggaggagatcaccttcgcccccacctacagattcgagagactgaccagagacaagtacgcctacaccaagcagaaggccaccggcatgaagtacaacctgcccagctggtgcgacagagtgctgtggaagagctaccccctggtgcacgtggtgtgccagagctacggcagcaccagcgacatcatgaccagcgaccacagccccgtgttcgccaccttcgaggccggcgtgaccagccagttcgtgagcaagaacggccccggcaccgtggacagccagggccagatcgagttcctgagatgctacgccaccctgaagaccaagagccagaccaagttctacctggagttccacagcagctgcctggagagcttcgtgaagagccaggagggcgagaacgaggagggcagcgagggcgagctggtggtgaagttcggcgagaccctgcccaagctgaagcccatcatcagcgaccccgagtacctgctggaccagcacatcctgatcagcatcaagagcagcgacagcgacgagagctacggcgagggctgcatcgccctgagactggaggccaccgagacccagctgcccatctacacccccctgacccaccacggcgagctgaccggccacttccagggcgagatcaagctgcagaccagccagggcaagaccagagagaagctgtacgacttcgtgaagaccgagagagacgagagcagcggccccaagaccctgaagagcctgaccagccacgaccccatgaagcagtgggaggtgaccagcagagcccccccctgcagcggcagcagcatcaccgagatcatcaaccccaactacatgggcgtgggccccttcggcccccccatgcccctgcacgtgaagcagaccctgagccccgaccagcagcccaccgcctggagctacgaccagccccccaaggacagccccctgggcccctgcagaggcgagagcccccccaccccccccggccagccccccatcagccccaagaagttcctgcccagcaccgccaacagaggcctgccccccagaacccaggagagcagacccagcgacctgggcaagaacgccggcgacaccctgccccaggaggacctgcccctgaccaagcccgagatgttcgagaaccccctgtacggcagcctgagcagcttccccaagcccgcccccagaaaggaccaggagagccccaagatgcccagaaaggagccccccccctgccccgagcccggcatcctgagccccagcatcgtgctgaccaaggcccaggaggccgacagaggcgagggccccggcaagcaggtgcccgcccccagactgagaagcttcacctgcagcagcagcgccgagggcagagccgccggcggcgacaagagccagggcaagcccaagacccccgtgagcagccaggcccccgtgcccgccaagagacccatcaagcccagcagaagcgagatcaaccagcagaccccccccacccccacccccagaccccccctgcccgtgaagagccccgccgtgctgcacctgcagcacagcaagggcagagactacagagacaacaccgagctgccccaccacggcaagcacagacccgaggagggcccccccggccccctgggcagaaccgccatgcagtag

SEQ ID NO: 85249 - DNA, 666 bp, synthetic construct
  misc_feature 1..666: note = Description of Artificial Sequence: Synthetic coding sequence
  source 1..666: mol_type = other DNA
atggtgccctgctggaaccacggcaacatcaccagaagcaaggccgaggagctgctgagcagaaccggcaaggacggcagcttcctggtgagagccagcgagagcatcagcagagcctacgccctgtgcgtgctgtacagaaactgcgtgtacacctacagaatcctgcccaacgaggacgacaagttcaccgtgcaggccagcgagggcgtgagcatgagattcttcaccaagctggaccagctgatcgagttctacaagaaggagaacatgggcctggtgacccacctgcagtaccccgtgcccctggaggaggaggacaccggcgacgaccccgaggaggacaccgagagcgtggtgagcccccccgagctgccccccagaaacatccccctgaccgccagcagctgcgaggccaaggaggtgcccttcagcaacgagaaccccagagccaccgagaccagcagacccagcctgagcgagaccctgttccagagactgcagagcatggacaccagcggcctgcccgaggagcacctgaaggccatccaggactacctgagcacccagctggcccaggacagcgagttcgtgaagaccggcagcagcagcctgccccacctgaagaagctgaccaccctgctgtgcaaggagctgtacggctag

SEQ ID NO: 85250 - DNA, 2433 bp, synthetic construct; identical to SEQ ID NO: 85248
  misc_feature 1..2433: note = Description of Artificial Sequence: Synthetic coding sequence
  source 1..2433: mol_type = other DNA

SEQ ID NO: 85251 - DNA, 2433 bp, synthetic construct; identical to SEQ ID NO: 85248
  misc_feature 1..2433: note = Description of Artificial Sequence: Synthetic coding sequence
  source 1..2433: mol_type = other DNA

SEQ ID NO: 85252 - DNA, 2826 bp, synthetic construct
  misc_feature 1..2826: note = Description of Artificial Sequence: Synthetic coding sequence
  source 1..2826: mol_type = other DNA
agaccccaggtgcccggcgaggccaaccccatcaacatggtgagcaagctgagccagctgaccagcctgctgagcagcatcgaggacaaggtgaaggccctgctgcacgagggccccgagagcccccacagacccagcctgatcccccccgtgaccttcgaggtgaaggccgagagcctgggcatcccccagaagatgcagctgaaggtggacgtggagagcggcaagctgatcatcaagaagagcaaggacggcagcgaggacaagttctacagccacaagaagatcctgcagctgatcaagagccagaagttcctgaacaagctggtgatcctggtggagaccgagaaggagaagatcctgagaaaggagtacgtgttcgccgacagcaagaagagagagggcttctgccagctgctgcagcagatgaagaacaagcacagcgagcagcccgagcccgacatgatcaccatcttcatcggcacctggaacatgggcaacgcccccccccccaagaagatcaccagctggttcctgagcaagggccagggcaagaccagagacgacagcgccgactacatcccccacgacatctacgtgatcggcacccaggaggaccccctgagcgagaaggagtggctggagatcctgaagcacagcctgcaggagatcaccagcgtgaccttcaagaccgtggccatccacaccctgtggaacatcagaatcgtggtgctggccaagcccgagcacgagaacagaatcagccacatctgcaccgacaacgtgaagaccggcatcgccaacaccctgggcaacaagggcgccgtgggcgtgagcttcatgttcaacggcaccagcctgggcttcgtgaacagccacctgaccagcggcagcgagaagaagctgagaagaaaccagaactacatgaacatcctgagattcctggccctgggcgacaagaagctgagccccttcaacatcacccacagattcacccacctgttctggttcggcgacctgaactacagagtggacctgcccacctgggaggccgagaccatcatccagaagatcaagcagcagcagtacgccgacctgctgagccacgaccagctgctgaccgagagaagagagcagaaggtgttcctgcacttcgaggaggaggagatcaccttcgcccccacctacagattcgagagactgaccagagacaagtacgcctacaccaagcagaaggccaccggcatgaagtacaacctgcccagctggtgcgacagagtgctgtggaagagctaccccctggtgcacgtggtgtgccagagctacggcagcaccagcgacatcatgaccagcgaccacagccccgtgttcgccaccttcgaggccggcgtgaccagccagttcgtgagcaagaacggccccggcaccgtggacagccagggccagatcgagttcctgagatgctacgccaccctgaagaccaagagccagaccaagttctacctggagttccacagcagctgcctggagagcttcgtgaagagccaggagggcgagaacgaggagggcagcgagggcgagctggtggtgaagttcggcgagaccctgcccaagctgaagcccatcatcagcgaccccgagtacctgctggaccagcacatcctgatcagcatcaagagcagcgacagcgacgagagctacggcgagggctgcatcgccctgagactggaggccaccgagacccagctgcccatctacacccccctgacccaccacggcgagctgaccggccacttccagggcgagatcaagctgcagaccagccagggcaagaccagagagaagctgtacgacttcgtgaagaccgagagagacgagagcagcggccccaagaccctgaagagcctgaccagccacgaccccatgaagcagtgggaggtgaccagcagagcccccccctgcagcggcagcagcatcaccgagatcatcaaccccaactacatgggcgtgggccccttcggcccccccatgcccctgcacgtgaagcagaccctgagccccgaccagcagcccaccgcctggagctacgaccagccccccaaggacagccccctgggcccctgcagaggcgagagcccccccaccccccccggccagccccccatcagccccaagaagttcctgcccagcaccgccaacagaggcctgccccccagaacccaggagagcagacccagcgacctgggcaagaacgccggcgacaccctgccccaggaggacctgcccctgaccaagcccgagatgttcgagaaccccctgtacggcagcctgagcagcttccccaagcccgcccccagaaaggaccaggagagccccaagatgcccagaaaggagccccccccctgccccgagcccggcatcctgagccccagcatcgtgctgaccaaggcccaggaggccgacagaggcgagggccccggcaagcaggtgcccgcccccagactgagaagcttcacctgcagcagcagcgccgagggcagagccgccggcggcgacaagagccagggcaagcccaagacccccgtgagcagccaggcccccgtgcccgccaagagacccatcaagcccagcagaagcgagatcaaccagcagaccccccccacccccacccccagaccccccctgcccgtgaagagccccgccgtgctgcacctgcagcacagcaagggcagagactacagagacaacaccgagctgccccaccacggcaagcacagacccgaggagggcccccccggccccctgggcagaaccgccatgcagtag

SEQ ID NO: 85253 - DNA, 669 bp, synthetic construct
  misc_feature 1..669: note = Description of Artificial Sequence: Synthetic coding sequence
  source 1..669: mol_type = other DNA
atggtgccctgctggaaccacggcaacatcaccagaagcaaggccgaggagctgctgagcagaaccggcaaggacggcagcttcctggtgagagccagcgagagcatcagcagagcctacgccctgtgcgtgctgtacagaaactgcgtgtacacctacagaatcctgcccaacgaggacgacaagttcaccgtgcaggccagcgagggcgtgagcatgagattcttcaccaagctggaccagctgatcgagttctacaagaaggagaacatgggcctggtgacccacctgcagtaccccgtgcccctggaggaggaggacaccggcgacgaccccgaggaggacaccgtggagagcgtggtgagcccccccgagctgccccccagaaacatccccctgaccgccagcagctgcgaggccaaggaggtgcccttcagcaacgagaaccccagagccaccgagaccagcagacccagcctgagcgagaccctgttccagagactgcagagcatggacaccagcggcctgcccgaggagcacctgaaggccatccaggactacctgagcacccagctggcccaggacagcgagttcgtgaagaccggcagcagcagcctgccccacctgaagaagctgaccaccctgctgtgcaaggagctgtacggctag

SEQ ID NO: 85254 - DNA, 2826 bp, synthetic construct
  misc_feature 1..2826: note = Description of Artificial Sequence: Synthetic coding sequence
  source 1..2826: mol_type = other DNA
cccccccaggtgcccggcgaggccaaccccatcaacatggtgagcaagctgagccagctgaccagcctgctgagcagcatcgaggacaaggtgaaggccctgctgcacgagggccccgagagcccccacagacccagcctgatcccccccgtgaccttcgaggtgaaggccgagagcctgggcatcccccagaagatgcagctgaaggtggacgtggagagcggcaagctgatcatcaagaagagcaaggacggcagcgaggacaagttctacagccacaagaagatcctgcagctgatcaagagccagaagttcctgaacaagctggtgatcctggtggagaccgagaaggagaagatcctgagaaaggagtacgtgttcgccgacagcaagaagagagagggcttctgccagctgctgcagcagatgaagaacaagcacagcgagcagcccgagcccgacatgatcaccatcttcatcggcacctggaacatgggcaacgcccccccccccaagaagatcaccagctggttcctgagcaagggccagggcaagaccagagacgacagcgccgactacatcccccacgacatctacgtgatcggcacccaggaggaccccctgagcgagaaggagtggctggagatcctgaagcacagcctgcaggagatcaccagcgtgaccttcaagaccgtggccatccacaccctgtggaacatcagaatcgtggtgctggccaagcccgagcacgagaacagaatcagccacatctgcaccgacaacgtgaagaccggcatcgccaacaccctgggcaacaagggcgccgtgggcgtgagcttcatgttcaacggcaccagcctgggcttcgtgaacagccacctgaccagcggcagcgagaagaagctgagaagaaaccagaactacatgaacatcctgagattcctggccctgggcgacaagaagctgagccccttcaacatcacccacagattcacccacctgttctggttcggcgacctgaactacagagtggacctgcccacctgggaggccgagaccatcatccagaagatcaagcagcagcagtacgccgacctgctgagccacgaccagctgctgaccgagagaagagagcagaaggtgttcctgcacttcgaggaggaggagatcaccttcgcccccacctacagattcgagagactgaccagagacaagtacgcctacaccaagcagaaggccaccggcatgaagtacaacctgcccagctggtgcgacagagtgctgtggaagagctaccccctggtgcacgtggtgtgccagagctacggcagcaccagcgacatcatgaccagcgaccacagccccgtgttcgccaccttcgaggccggcgtgaccagccagttcgtgagcaagaacggccccggcaccgtggacagccagggccagatcgagttcctgagatgctacgccaccctgaagaccaagagccagaccaagttctacctggagttccacagcagctgcctggagagcttcgtgaagagccaggagggcgagaacgaggagggcagcgagggcgagctggtggtgaagttcggcgagaccctgcccaagctgaagcccatcatcagcgaccccgagtacctgctggaccagcacatcctgatcagcatcaagagcagcgacagcgacgagagctacggcgagggctgcatcgccctgagactggaggccaccgagacccagctgcccatctacacccccctgacccaccacggcgagctgaccggccacttccagggcgagatcaagctgcagaccagccagggcaagaccagagagaagctgtacgacttcgtgaagaccgagagagacgagagcagcggccccaagaccctgaagagcctgaccagccacgaccccatgaagcagtgggaggtgaccagcagagcccccccctgcagcggcagcagcatcaccgagatcatcaaccccaactacatgggcgtgggccccttcggcccccccatgcccctgcacgtgaagcagaccctgagccccgaccagcagcccaccgcctggagctacgaccagccccccaaggacagccccctgggcccctgcagaggcgagagcccccccaccccccccggccagccccccatcagccccaagaagttcctgcccagcaccgccaacagaggcctgccccccagaacccaggagagcagacccagcgacctgggcaagaacgccggcgacaccctgccccaggaggacctgcccctgaccaagcccgagatgttcgagaaccccctgtacggcagcctgagcagcttccccaagcccgcccccagaaaggaccaggagagccccaagatgcccagaaaggagccccccccctgccccgagcccggcatcctgagccccagcatcgtgctgaccaaggcccaggaggccgacagaggcgagggccccggcaagcaggtgcccgcccccagactgagaagcttcacctgcagcagcagcgccgagggcagagccgccggcggcgacaagagccagggcaagcccaagacccccgtgagcagccaggcccccgtgcccgccaagagacccatcaagcccagcagaagcgagatcaaccagcagaccccccccacccccacccccagaccccccctgcccgtgaagagccccgccgtgctgcacctgcagcacagcaagggcagagactacagagacaacaccgagctgccccaccacggcaagcacagacccgaggagggcccccccggccccctgggcagaaccgccatgcagtag

SEQ ID NO: 85255 - DNA, 1791 bp, synthetic construct
  misc_feature 1..1791: note = Description of Artificial Sequence: Synthetic coding sequence
  source 1..1791: mol_type = other DNA
atggtgccctgctggaaccacggcaacatcaccagaagcaaggccgaggagctgctgagcagaaccggcaaggacggcagcttcctggtgagagccagcgagagcatcagcagagcctacgccctgtgcgtgctgtacagaaactgcgtgtacacctacagaatcctgcccaacgaggacgacaagttcaccgtgcaggccagcgagggcgtgagcatgagattcttcaccaagctggaccagctgatcgagttctacaagaaggagaacatgggcctggtgacccacctgcagtaccccgtgcccctggaggaggaggacaccggcgacgaccccgaggaggacaccgtggagagcgtggtgagcccccccgagctgccccccagaaacatccccctgaccgccagcagctgcgaggccaaggaggtgcccttcagcaacgagaaccccagagccaccgagaccagcagacccagcctgagcgagaccctgttccagagactgcagagcatggacaccagcggcctgcccgaggagcacctgaaggccatccaggactacctgagcacccagctggcccaggacagcgagttcgtgaagaccggcagcagcagcctgccccacctgaagaagctgaccaccctgctgtgcaaggagctgtacggctactgcctggaggtgctgctgagctaccccctgagcctgctgagccaggtgcccggcgaggccaaccccatcaacatggtgagcaagctgagccagctgaccagcctgctgagcagcatcgaggacaaggtgaaggccctgctgcacgagggccccgagagcccccacagacccagcctgatcccccccgtgaccttcgaggtgaaggccgagagcctgggcatcccccagaagatgcagctgaaggtggacgtggagagcggcaagctgatcatcaagaagagcaaggacggcagcgaggacaagttctacagccacaagaagatcctgcagctgatcaagagccagaagttcctgaacaagctggtgatcctggtggagaccgagaaggagaagatcctgagaaaggagtacgtgttcgccgacagcaagaagagagagggcttctgccagctgctgcagcagatgaagaacaagcacagcgagcagcccgagcccgacatgatcaccatcttcatcggcacctggaacatgggcaacgcccccccccccaagaagatcaccagctggttcctgagcaagggccagggcaagaccagagacgacagcgccgactacatcccccacgacatctacgtgatcggcacccaggaggaccccctgagcgagaaggagtggctggagatcctgaagcacagcctgcaggagatcaccagcgtgaccttcaagaccgtggccatccacaccctgtggaacatcagaatcgtggtgctggccaagcccgagcacgagaacagaatcagccacatctgcaccgacaacgtgaagaccggcatcgccaacaccctgggcaacaagggcgccgtgggcgtgagcttcatgttcaacggcaccagcctgggcttcgtgaacagccacctgaccagcggcagcgagaagaagctgagaagaaaccagaactacatgaacatcctgagattcctggccctgggcgacaagaagctgagccccttcaacatcacccacagattcacccacctgttctggttcggcgacctgaactacagagtggacctgcccacctgggaggccgagaccatcatccagaagatcaagcagcagtag

SEQ ID NO: 85256 - DNA, 837 bp, synthetic construct
  misc_feature 1..837: note = Description of Artificial Sequence: Synthetic coding sequence
  source 1..837: mol_type = other DNA
tgacagaagaactggctgagagagttctaccaggtggtgcacacccacaagccccacttcatggccctgcactgccaggagttcggcggcaagaactacgaggccagcatgagccacgtggacaagttcgtgaaggagctgctgagcagcgacgccatgaaggagtacaacagagccagagtgtacctggacgagaactacaagagccaggagcacttcaccgccctgggcagcttctacttcctgcacgagagcctgaagaacatctaccagttcgacttcaaggccaagaagtacagaaaggtggccggcaaggagatctacagcgacaccctggagagcacccccatgctggagaaggagaagttcccccaggactacttccccgagtgcaagtggagcagaaagggcttcatcagaaccagatggtgcatcgccgactgcgccttcgacctggtgaacatccacctgttccacgacgccagcaacctggtggcctgggagaccagccccagcgtgtacagcggcatcagacacaaggccctgggctacgtgctggacagaatcatcgaccagagattcgagaaggtgagctacttcgtgttcggcgacttcaacttcagactggacagcaagagcgtggtggagctgctggagttcgacaaggagctgagcgtgttcaaggacagactgtacgagctggacatcagcttcccccccagctacccctacagcgaggacgccagacagggcgagcagtacatgaacaccagatgccccgcctggtgcgacagaatcctgatgagccccagcgccaaggagctggtgctgagatag

SEQ ID NO: 85257 - DNA, 1164 bp, synthetic construct
  misc_feature 1..1164: note = Description of Artificial Sequence: Synthetic coding sequence
  source 1..1164: mol_type = other DNA
atggccggcaaggccgccgcccccggcaccgccgtgctgctggtgaccgccaacgtgggcagcctgttcgacgaccccgagaacctgcagaagaactggctgagagagttctaccaggtggtgcacacccacaagccccacttcatggccctgcactgccaggagttcggcggcaagaactacgaggccagcatgagccacgtggacaagttcgtgaaggagctgctgagcagcgacgccatgaaggagtacaacagagccagagtgtacctggacgagaactacaagagccaggagcacttcaccgccctgggcagcttctacttcctgcacgagagcctgaagaacatctaccagttcgacttcaaggccaagaagtacagaaaggtggccggcaaggagatctacagcgacaccctggagagcacccccatgctggagaaggagaagttcccccaggactacttccccgagtgcaagtggagcagaaagggcttcatcagaaccagatggtgcatcgccgactgcgccttcgacctggtgaacatccacctgttccacgacgccagcaacctggtggcctgggagaccagccccagcgtgtacagcggcatcagacacaaggccctgggctacgtgctggacagaatcatcgaccagagattcgagaaggtgagctacttcgtgttcggcgacttcaacttcagactggacagcaagagcgtggtggagaccctgtgcaccaaggccaccatgcagaccgtgagagccgccgacaccaacgaggtggtgaagctgatcttcagagagagcgacaacgacagaaaggtgatgctgcagctggagaagaagctgttcgactacttcaaccaggaggtgttcagagacaacaacggcaccgccctgctggagttcgacaaggagctgagcgtgttcaaggacagactgtacgagctggacatcagcttcccccccagctacccctacagcgaggacgccagacagggcgagcagtacatgaacaccagatgccccgcctggtgcgacagaatcctgatgagccccagcgccaaggagctggtgctgagagtgagcgtgtgctgccccagccccggccacagaggcatgtggagcgccggcagcggcctggcccagccctggtag

SEQ ID NO: 85258 - DNA, 1239 bp, synthetic construct
  misc_feature 1..1239: note = Description of Artificial Sequence: Synthetic coding sequence
  source 1..1239: mol_type = other DNA
atggccggcaaggccgccgcccccggcaccgccgtgctgctggtgaccgccaacgtgggcagcctgttcgacgaccccgagaacctgcagaagaactggctgagagagttctaccaggtggtgcacacccacaagccccacttcatggccctgcactgccaggagttcggcggcaagaactacgaggccagcatgagccacgtggacaagttcgtgaaggagctgctgagcagcgacgccatgaaggagtacaacagagccagagtgtacctggacgagaactacaagagccaggagcacttcaccgccctgggcagcttctacttcctgcacgagagcctgaagaacatctaccagttcgacttcaaggccaagaagtacagaaaggtggccggcaaggagatctacagcgacaccctggagagcacccccatgctggagaaggagaagttcccccaggactacttccccgagtgcaagtggagcagaaagggcttcatcagaaccagatggtgcatcgccgactgcgccttcgacctggtgaacatccacctgttccacgacgccagcaacctggtggcctgggagaccagccccagcgtgtacagcggcatcagacacaaggccctgggctacgtgctggacagaatcatcgaccagagattcgagaaggtgagctacttcgtgttcggcgacttcaacttcagactggacagcaagagcgtggtggagaccctgtgcaccaaggccaccatgcagaccgtgagagccgccgacaccaacgaggtggtgaagctgatcttcagagagagcgacaacgacagaaaggtgatgctgcagctggagaagaagctgttcgactacttcaaccaggaggtgttcagagacaacaacggcaccgccctgctggagttcgacaaggagctgagcgtgttcaaggacagactgtacgagctggacatcagcttcccccccagctacccctacagcgaggacgccagacagggcgagcagtacatgaacaccagatgccccgcctggtgcgacagaatcctgatgagccccagcgccaaggagctggtgctgagaagcgagagcgaggagaaggtggtgacctacgaccacatcggccccaacgtgtgcatgggcgaccacaagcccgtgttcctggccttcagaatcatgcccggcgccggcaagccccacgcccacgtgcacaagtgctgcgtggtgcagtag

SEQ ID NO: 85259 - DNA, 558 bp, synthetic construct
  misc_feature 1..558: note = Description of Artificial Sequence: Synthetic coding sequence
  source 1..558: mol_type = other DNA
atggccggcaaggccgccgcccccggcaccgccgtgctgctggtgaccgccaacgtgggcagcctgttcgacgaccccgagaacctgcagaagaactggctgagagagttctaccaggtggtgcacacccacaagccccacttcatggccctgcactgccaggagttcggcggcaagaactacgaggccagcatgagccacgtggacaagttcgtgaaggagctgctgagcagcgacgccatgaaggagtacaacagagccagagtgtacctggacgagaactacaagagccaggagcacttcaccgccctgggcagcttctacttcctgcacgagagcctgaagaacatctaccagttcgacttcaaggccaagaagtacagaaaggtggccggcaaggagatctacagcgacaccctggagagcacccccatgctggagaaggagaagttcccccaggactacttccccgagagacacgtgccccacaccagcctggaggccctgctgatcctgcacgaggacccccagctgcccgacccccacctgcccctgtag

SEQ ID NO: 85260 - DNA, 1068 bp, synthetic construct
  misc_feature 1..1068: note = Description of Artificial Sequence: Synthetic coding sequence
  source 1..1068: mol_type = other DNA
atggccggcaaggccgccgcccccggcaccgccgtgctgctggtgaccgccaacgtgggcagcctgttcgacgaccccgagaacctgcagaagaactggctgagagagttctaccaggtggtgcacacccacaagccccacttcatggccctgcactgccaggagttcggcggcaagaactacgaggccagcatgagccacgtggacaagttcgtgaaggagctgctgagcagcgacgccatgaaggagtacaacagagccagagtgtacctggacgagaactacaagagccaggagcacttcaccgccctgggcagcttctacttcctgcacgagagcctgaagaacatctaccagttcgacttcaaggccaagaagtacagaaaggtggccggcaaggagatctacagcgacaccctggagagcacccccatgctggagaaggagaagttcccccaggactacttccccgagtgcaagtggagcagaaagggcttcatcagaaccagatggtgcatcgccgactgcgccttcgacctggtgaacatccacctgttccacgacgccagcaacctggtggcctgggagaccagccccagcgtgtacagcggcatcagacacaaggccctgggctacgtgctggacagaatcatcgaccagagattcgagaaggtgagctacttcgtgttcggcgacttcaacttcagactggacagcaagagcgtggtggagctgctggagttcgacaaggagctgagcgtgttcaaggacagactgtacgagctggacatcagcttcccccccagctacccctacagcgaggacgccagacagggcgagcagtacatgaacaccagatgccccgcctggtgcgacagaatcctgatgagccccagcgccaaggagctggtgctgagaagcgagagcgaggagaaggtggtgacctacgaccacatcggccccaacgtgtgcatgggcgaccacaagcccgtgttcctggccttcagaatcatgcccggcgccggcaagccccacgcccacgtgcacaagtgctgcgtggtgcagtag

SEQ ID NO: 85261 - DNA, 417 bp, synthetic construct
  misc_feature 1..417: note = Description of Artificial Sequence: Synthetic coding sequence
  source 1..417: mol_type = other DNA
gtgaccgccaacgtgggcagcctgttcgacgaccccgagaacctgcagaagaactggctgagagagttctaccaggccctgggcagcttctacttcctgcacgagagcctgaagaacatctaccagttcgacttcaaggccaagaagtacagaaaggtggccggcaaggagatctacagcgacaccctggagagcacccccatgctggagaaggagaagttcccccaggactacttccccgagtgcaagtggagcagaaagggcttcatcagaaccagatggtgcatcgccgactgcgccttcgacctggtgaacatccacctgttccacgacgccagcaacctggtggcctgggagaccagccccagcgtgtacagcggcatcagacacaaggccctgggctacgtgctggactag

SEQ ID NO: 85262 - DNA, 990 bp, synthetic construct
  misc_feature 1..990: note = Description of Artificial Sequence: Synthetic coding sequence
  source 1..990: mol_type = other DNA
atgaaggagtacaacagagccagagtgtacctggacgagaactacaagagccaggagcacttcaccgccctgggcagcttctacttcctgcacgagagcctgaagaacatctaccagttcgacttcaaggccaagaagtacagaaaggtggccggcaaggagatctacagcgacaccctggagagcacccccatgctggagaaggagaagttccccctgctgcccagagtgcagatggtgaagaagagactgcaccccgacgaggtgatcgccgactgcgccttcgacctggtgaacatccacctgttccacgacgccagcaacctggtggcctgggagaccagccccagcgtgtacagcggcatcagacacaaggccctgggctacgtgctggacagaatcatcgaccagagattcgagaaggtgagctacttcgtgttcggcgacttcaacttcagactggacagcaagagcgtggtggagaccctgtgcaccaaggccaccatgcagaccgtgagagccgccgacaccaacgaggtggtgaagctgatcttcagagagagcgacaacgacagaaaggtgatgctgcagctggagaagaagctgttcgactacttcaaccaggaggtgttcagagacaacaacggcaccgccctgctggagttcgacaaggagctgagcgtgttcaaggacagactgtacgagctggacatcagcttcccccccagctacccctacagcgaggacgccagacagggcgagcagtacatgaacaccagatgccccgcctggtgcgacagaatcctgatgagccccagcgccaaggagctggtgctgagaagcgagagcgaggagaaggtggtgacctacgaccacatcggccccaacgtgtgcatgggcgaccacaagcccgtgttcctggccttcagaatcatgcccggcgccggcaagccccacgcccacgtgcacaagtgctgcgtggtgcagtag

SEQ ID NO: 85263 - DNA, 315 bp, synthetic construct
  misc_feature 1..315: note = Description of Artificial Sequence: Synthetic coding sequence
  source 1..315: mol_type = other DNA
ctggacatcagcttcccccccagctacccctacagcgaggacgccagacagggcgagcagtacatgaacaccagatgccccgcctggtgcgacagaatcctgatgagccccagcgccaaggagctggtgctgagaagcgagagcgaggagaaggtggtgacctacgaccacatcggccccaacgtgtgcatgggcgaccacaagcccgtgttcctggccttcagaatcatgcccggcgccggcaagagatgccagagacacgagagaaccctgagagagcccccctgcagcagaggccccaacacccacagctag

SEQ ID NO: 85264 - DNA, 546 bp, synthetic construct
  misc_feature 1..546: note = Description of Artificial Sequence: Synthetic coding sequence
  source 1..546: mol_type = other DNA
gccgccgcccccggcaccgccgtgctgctggtgaccgccaacgtgggcagcctgttcgacgaccccgagaacctgcagaagaactggctgagagagttctaccaggtggtgcacacccacaagccccacttcatggccctgcactgccaggagttcggcggcaagaactacgaggccagcatgagccacgtggacaagttcgtgaaggagctgctgagcagcgacgccatgaaggagtacaacagagccagagtgtacctggacgagaactacaagagccaggagcacttcaccgccctgggcagcttctacttcctgcacgagagcctgaagaacatctaccagttcgacttcaaggccaagaagtacagaaaggtggccggcaaggagatctacagcgacaccctggagagcacccccatgctggagaaggagaagttcccccaggactacttccccgagagacacgtgccccacaccagcctggaggccctgctgatcctgcacgaggacccccagctgcccgacccccacctgcccctgtag

SEQ ID NO: 85265 - DNA, 459 bp, synthetic construct
  misc_feature 1..459: note = Description of Artificial Sequence: Synthetic coding sequence
  source 1..459: mol_type = other DNA
atggccggcaaggccgccgcccccggcaccgccgtgctgctggtgaccgccaacgtgggcagcctgttcgacgaccccgagaacctgcagaagaactggctgagagagttctaccaggccctgggcagcttctacttcctgcacgagagcctgaagaacatctaccagttcgacttcaaggccaagaagtacagaaaggtggccggcaaggagatctacagcgacaccctggagagcacccccatgctggagaaggagaagttcccccaggactacttccccgagtgcaagtggagcagaaagggcttcatcagaaccagatggtgcatcgccgactgcgccttcgacctggtgaacatccacctgttccacgacgccagcaacctggtggcctgggagaccagccccagcgtgtacagcggcatcagacacaaggccctgggctacgtgctggactag

SEQ ID NO: 85266 - DNA, 1935 bp, synthetic construct
  misc_feature 1..1935: note = Description of Artificial Sequence: Synthetic coding sequence
  source 1..1935: mol_type = other DNA
atgcccagcaaggccgagaacctgagacccagcgagcccgccccccagccccccgagggcagaaccctgcagggccagctgcccggcgccccccccgcccagagagccggcagcccccccgacgcccccggcagcgagagccccgccctggcctgcagcacccccgccacccccagcggcgaggacccccccgccagagccgcccccatcgcccccagaccccccgccagacccagactggagagagccctgagcctggacgacaagggctggagaagaagaagattcagaggcagccaggaggacctggaggccagaaacggcaccagccccagcagaggcagcgtgcagagcgagggccccggcgcccccgcccacagctgcagccccccctgcctgagcaccagcctgcaggagatccccaagagcagaggcgtgctgagcagcgagagaggcagccccagcagcggcggcaaccccctgagcggcgtggccagcagcagccccaacctgccccacagagacgccgccgtggccggcagcagccccagactgcccagcctgctgccccccagacccccccccgccctgagcctggacatcgccagcgacagcctgagaaccgccaacaaggtggacagcgacctggccgactacaagctgagagcccagcccctgctggtgagagcccacagcagcctgggccccggcagacccagaagccccctggcctgcgacgactgcagcctgagaagcgccaagagcagcttcagcctgctggcccccatcagaagcaaggacgtgagaagcagaagctacctggagggcagcctgctggccagcggcgccctgctgggcgccgacgagctggccagatacttccccgacagaaacgtggccctgttcgtggccacctggaacatgcagggccagaaggagctgccccccagcctggacgagttcctgctgcccgccgaggccgactacgcccaggacctgtacgtgatcggcgtgcaggagggctgcagcgacagaagagagtgggagaccagactgcaggagaccctgggcccccactacgtgctgctgagcagcgccgcccacggcgtgctgtacatgagcctgttcatcagaagagacctgatctggttctgcagcgaggtggagtgcagcaccgtgaccaccagaatcgtgagccagatcaagaccaagggcgccctgggcatcagcttcaccttcttcggcaccagcttcctgttcatcaccagccacttcaccagcggcgacggcaaggtggccgagagactgctggactacaccagaaccgtgcaggccctggtgctgcccagaaacgtgcccgacaccaacccctacagaagcagcgccgccgacgtgaccaccagattcgacgaggtgttctggttcggcgacttcaacttcagactgagcggcggcagaaccgtggtggacgccctgctgtgccagggcctggtggtggacgtgcccgccctgctgcagcacgaccagctgatcagagagatgagaaagggcagcatcttcaagggcttccaggagcccgacatccacttcctgcccagctacaagttcgacatcggcaaggacacctacgacagcaccagcaagcagagaacccccagctacaccgacagagtgctgtacagaagcagacacaagggcgacatctgccccgtgagctacagcagctgccccggcatcaagaccagcgaccacagacccgtgtacggcctgttcagagtgaaggtgagacccggcagagacaacatccccctggccgccggcaagttcgacagagagctgtacctgctgggcatcaagagaagaatcagcaaggagatccagagacagcaggccctgcagagccagaacagcagcaccatctgcagcgtgagctag

SEQ ID NO: 85267 - DNA, 960 bp, synthetic construct
  misc_feature 1..960: note = Description of Artificial Sequence: Synthetic coding sequence
  source 1..960: mol_type = other DNA
atggaccagagcgtggccatccaggagaccctggccgagggcgagtactgcgtgatcgccgtgcagggcgtgctgtgcgagggcgacagcagacagagcagactgctgggcctggtgagatacagactggagcacggcggccaggagcacgccctgttcctgtacacccacagaagaatggccatcaccggcgacgacgtgagcctggaccagatcgtgcccgtgagcagagacttcaccctggaggaggtgagccccgacggcgagctgtacatcctgggcagcgacgtgaccgtgcagctggacaccgccgagctgagcctggtgttccagctgcccttcggcagccagaccagaatgttcctgcacgaggtggccagagcctgccccggcttcgacagcgccaccagagaccccgagttcctgtggctgagcagatacagatgcgccgagctggagctggagatgcccacccccagaggctgcaacagcgccctggtgacctggcccggctacgccaccatcggcggcggcagataccccagcagaaagaagagatggggcctggaggaggccagaccccagggcgccggcagcgtgctgttctggggcggcgccatggagaagaccggcttcagactgatggagagagcccacggcggcggcttcgtgtggggcagaagcgccagagacggcagaagagacgaggagctggaggaggccggcagagagatgagcgccgccgccggcagcagagagagaaacaccgccggcagcgccggcggcggcaagctgggctggggcgccggccccggcgccgccgtgagacccgccctgggctgggccggcagcgccgtgtggcccgtggacgccagaggcgaggaccagagccccggcggccccctggaggccggcaccctgggccagaagttctgcgacgtgctgctgagaagagcctag

SEQ ID NO: 85268 - DNA, 2982 bp, synthetic construct
  misc_feature 1..2982: note = Description of Artificial Sequence: Synthetic coding sequence
  source 1..2982: mol_type = other DNA
atggaccagagcgtggccatccaggagaccctggccgagggcgagtactgcgtgatcgccgtgcagggcgtgctgtgcgagggcgacagcagacagagcagactgctgggcctggtgagatacagactggagcacggcggccaggagcacgccctgttcctgtacacccacagaagaatggccatcaccggcgacgacgtgagcctggaccagatcgtgcccgtgagcagagacttcaccctggaggaggtgagccccgacggcgagctgtacatcctgggcagcgacgtgaccgtgcagctggacaccgccgagctgagcctggtgttccagctgcccttcggcagccagaccagaatgttcctgcacgaggtggccagagcctgccccggcttcgacagcgccaccagagaccccgagttcctgtggctgagcagatacagatgcgccgagctggagctggagatgcccacccccagaggctgcaacagcgccctggtgacctggcccggctacgccaccatcggcggcggcagataccccagcagaaagaagagatggggcctggaggaggccagaccccagggcgccggcagcgtgctgttctggggcggcgccatggagaagaccggcttcagactgatggagagagcccacggcggcggcttcgtgtggggcagaagcgccagagacggcagaagagacgaggagctggaggaggccggcagagagatgagcgccgccgccggcagcagagagagaaacaccgccggcggcagcaacttcgacggcctgagacccaacggcaagggcgtgcccatggaccagagcagcagaggccaggacaagcccgagagcctgcagcccagacagaacaagagcaagagcgagatcaccgacatggtgagaagcagcaccatcaccgtgagcgacaaggcccacatcctgagcatgcagaagttcggcctgagagacaccatcgtgaagagccacctgctgcagaaggaggaggactacacctacatccagaacttcagattcttcgccggcacctacaacgtgaacggccagagccccaaggagtgcctgagactgtggctgagcaacggcatccaggcccccgacgtgtactgcgtgggcttccaggagctggacctgagcaaggaggccttcttcttccacgacacccccaaggaggaggagtggttcaaggccgtgagcgagggcctgcaccccgacgccaagtacgccaaggtgaagctgatcagactggtgggcatcatgctgctgctgtacgtgaagcaggagcacgccgcctacatcagcgaggtggaggccgagaccgtgggcaccggcatcatgggcagaatgggcaacaagggcggcgtggccatcagattccagttccacaacaccagcatctgcgtggtgaacagccacctggccgcccacatcgaggagtacgagagaagaaaccaggactacaaggacatctgcagcagaatgcagttctgccagcccgaccccagcctgccccccctgaccatcagcaaccacgacgtgatcctgtggctgggcgacctgaactacagaatcgaggagctggacgtggagaaggtgaagaagctgatcgaggagaaggacttccagatgctgtacgcctacgaccagctgaagatccaggtggccgccaagaccgtgttcgagggcttcaccgagggcgagctgaccttccagcccacctacaagtacgacaccggcagcgacgactgggacaccagcgagaagtgcagagcccccgcctggtgcgacagaatcctgtggaagggcaagaacatcacccagctgagctaccagagccacatggccctgaagaccagcgaccacaagcccgtgagcagcgtgttcgacatcggcgtgagagtggtgaacgacgagctgtacagaaagaccctggaggagatcgtgagaagcctggacaagatggagaacgccaacatccccagcgtgagcctgagcaagagagagttctgcttccagaacgtgaagtacatgcagctgaaggtggagagcttcaccatccacaacggccaggtgccctgccacttcgagttcatcaacaagcccgacgaggagagctactgcaagcagtggctgaacgccaaccccagcagaggcttcctgctgcccgacagcgacgtggagatcgacctggagctgttcgtgaacaagatgaccgccaccaagctgaacagcggcgaggacaagatcgaggacatcctggtgctgcacctggacagaggcaaggactacttcctgagcgtgagcggcaactacctgcccagctgcttcggcagccccatccacaccctgtgctacatgagagagcccatcctggacctgcccctggagaccatcagcgagctgaccctgatgcccgtgtggaccggcgacgacggcagccagctggacagccccatggagatccccaaggagctgtggatgatggtggactacctgtacagaaacgccgtgcagcaggaggacctgttccagcagcccggcctgagaagcgagttcgagcacatcagagactgcctggacaccggcatgatcgacaacctgagcgccagcaaccacagcgtggccgaggccctgctgctgttcctggagagcctgcccgagcccgtgatctgctacagcacctaccacaactgcctggagtgcagcggcaactacaccgccagcaagcaggtgatcagcaccctgcccatcttccacaagaacgtgttccactacctgatggccttcctgagagagctgctgaagaacagcgccaagaaccacctggacgagaacatcctggccagcatcttcggcagcctgctgctgagaaaccccgccggccaccagaagctggacatgaccgagaagaagaaggcccaggagttcatccaccagttcctgtgcaaccccctgtag

SEQ ID NO: 85269 - DNA, 2742 bp, synthetic construct
  misc_feature 1..2742: note = Description of Artificial Sequence: Synthetic coding sequence
  source 1..2742: mol_type = other DNA
atggaccagagcgtggccatccaggagaccctggccgagggcgagtactgcgtgatcgccgtgcagggcgtgctgtgcgagggcgacagcagacagagcagactgctgggcctggtgagatacagactggagcacggcggccaggagcacgccctgttcctgtacacccacagaagaatggccatcaccggcgacgacgtgagcctggaccagatcgtgcccgtgagcagagacttcaccctggaggaggtgagccccgacggcgagctgtacatcctgggcagcgacgtgaccgtgcagctggacaccgccgagctgagcctggtgttccagctgcccttcggcagccagaccagaatgttcctgcacgaggtggccagagcctgccccggcttcgacagcgccaccagagaccccgagttcctgtggctgagcagatacagatgcgccgagctggagctggagatgcccacccccagaggctgcaacagcgccctggtgacctggcccggctacgccaccatcggcggcggcggcagcaacttcgacggcctgagacccaacggcaagggcgtgcccatggaccagagcagcagaggccaggacaagcccgagagcctgcagcccagacagaacaagagcaagagcgagatcaccgacatggtgagaagcagcaccatcaccgtgagcgacaaggcccacatcctgagcatgcagaagttcggcctgagagacaccatcgtgaagagccacctgctgcagaaggaggaggactacacctacatccagaacttcagattcttcgccggcacctacaacgtgaacggccagagccccaaggagtgcctgagactgtggctgagcaacggcatccaggcccccgacgtgtactgcgtgggcttccaggagctggacctgagcaaggaggccttcttcttccacgacacccccaaggaggaggagtggttcaaggccgtgagcgagggcctgcaccccgacgccaagtacgccaaggtgaagctgatcagactggtgggcatcatgctgctgctgtacgtgaagcaggagcacgccgcctacatcagcgaggtggaggccgagaccgtgggcaccggcatcatgggcagaatgggcaacaagggcggcgtggccatcagattccagttccacaacaccagcatctgcgtggtgaacagccacctggccgcccacatcgaggagtacgagagaagaaaccaggactacaaggacatctgcagcagaatgcagttctgccagcccgaccccagcctgccccccctgaccatcagcaaccacgacgtgatcctgtggctgggcgacctgaactacagaatcgaggagctggacgtggagaaggtgaagaagctgatcgaggagaaggacttccagatgctgtacgcctacgaccagctgaagatccaggtggccgccaagaccgtgttcgagggcttcaccgagggcgagctgaccttccagcccacctacaagtacgacaccggcagcgacgactgggacaccagcgagaagtgcagagcccccgcctggtgcgacagaatcctgtggaagggcaagaacatcacccagctgagctaccagagccacatggccctgaagaccagcgaccacaagcccgtgagcagcgtgttcgacatcggcgtgagagtggtgaacgacgagctgtacagaaagaccctggaggagatcgtgagaagcctggacaagatggagaacgccaacatccccagcgtgagcctgagcaagagagagttctgcttccagaacgtgaagtacatgcagctgaaggtggagagcttcaccatccacaacggccaggtgccctgccacttcgagttcatcaacaagcccgacgaggagagctactgcaagcagtggctgaacgccaaccccagcagaggcttcctgctgcccgacagcgacgtggagatcgacctggagctgttcgtgaacaagatgaccgccaccaagctgaacagcggcgaggacaagatcgaggacatcctggtgctgcacctggacagaggcaaggactacttcctgagcgtgagcggcaactacctgcccagctgcttcggcagccccatccacaccctgtgctacatgagagagcccatcctggacctgcccctggagaccatcagcgagctgaccctgatgcccgtgtggaccggcgacgacggcagccagctggacagccccatggagatccccaaggagctgtggatgatggtggactacctgtacagaaacgccgtgcagcaggaggacctgttccagcagcccggcctgagaagcgagttcgagcacatcagagactgcctggacaccggcatgatcgacaacctgagcgccagcaaccacagcgtggccgaggccctgctgctgttcctggagagcctgcccgagcccgtgatctgctacagcacctaccacaactgcctggagtgcagcggcaactacaccgccagcaagcaggtgatcagcaccctgcccatcttccacaagaacgtgttccactacctgatggccttcctgagagagctgctgaagaacagcgccaagaaccacctggacgagaacatcctggccagcatcttcggcagcctgctgctgagaaaccccgccggccaccagaagctggacatgaccgagaagaagaaggcccaggagttcatccaccagttcctgtgcaaccccctgtag

SEQ ID NO: 85270 - DNA, 2982 bp, synthetic construct; identical to SEQ ID NO: 85268
  misc_feature 1..2982: note = Description of Artificial Sequence: Synthetic coding sequence
  source 1..2982: mol_type = other DNA

SEQ ID NO: 85271 - DNA, 2250 bp, synthetic construct
  misc_feature 1..2250: note = Description of Artificial Sequence: Synthetic coding sequence
  source 1..2250: mol_type = other DNA
atgagcgccgccgccggcagcagagagagaaacaccgccggcggcagcaacttcgacggcctgagacccaacggcaagggcgtgcccatggaccagagcagcagaggccaggacaagcccgagagcctgcagcccagacagaacaagagcaagagcgagatcaccgacatggtgagaagcagcaccatcaccgtgagcgacaaggcccacatcctgagcatgcagaagttcggcctgagagacaccatcgtgaagagccacctgctgcagaaggaggaggactacacctacatccagaacttcagattcttcgccggcacctacaacgtgaacggccagagccccaaggagtgcctgagactgtggctgagcaacggcatccaggcccccgacgtgtactgcgtgggcttccaggagctggacctgagcaaggaggccttcttcttccacgacacccccaaggaggaggagtggttcaaggccgtgagcgagggcctgcaccccgacgccaagtacgccaaggtgaagctgatcagactggtgggcatcatgctgctgctgtacgtgaagcaggagcacgccgcctacatcagcgaggtggaggccgagaccgtgggcaccggcatcatgggcagaatgggcaacaagggcggcgtggccatcagattccagttccacaacaccagcatctgcgtggtgaacagccacctggccgcccacatcgaggagtacgagagaagaaaccaggactacaaggacatctgcagcagaatgcagttctgccagcccgaccccagcctgccccccctgaccatcagcaaccacgacgtgatcctgtggctgggcgacctgaactacagaatcgaggagctggacgtggagaaggtgaagaagctgatcgaggagaaggacttccagatgctgtacgcctacgaccagctgaagatccaggtggccgccaagaccgtgttcgagggcttcaccgagggcgagctgaccttccagcccacctacaagtacgacaccggcagcgacgactgggacaccagcgagaagtgcagagcccccgcctggtgcgacagaatcctgtggaagggcaagaacatcacccagctgagctaccagagccacatggccctgaagaccagcgaccacaagcccgtgagcagcgtgttcgacatcggcgtgagagtggtgaacgacgagctgtacagaaagaccctggaggagatcgtgagaagcctggacaagatggagaacgccaacatccccagcgtgagcctgagcaagagagagttctgcttccagaacgtgaagtacatgcagctgaaggtggagagcttcaccatccacaacggccaggtgccctgccacttcgagttcatcaacaagcccgacgaggagagctactgcaagcagtggctgaacgccaaccccagcagaggcttcctgctgcccgacagcgacgtggagatcgacctggagctgttcgtgaacaagatgaccgccaccaagctgaacagcggcgaggacaagatcgaggacatcctggtgctgcacctggacagaggcaaggactacttcctgagcgtgagcggcaactacctgcccagctgcttcggcagccccatccacaccctgtgctacatgagagagcccatcctggacctgcccctggagaccatcagcgagctgaccctgatgcccgtgtggaccggcgacgacggcagccagctggacagccccatggagatccccaaggagctgtggatgatggtggactacctgtacagaaacgccgtgcagcaggaggacctgttccagcagcccggcctgagaagcgagttcgagcacatcagagactgcctggacaccggcatgatcgacaacctgagcgccagcaaccacagcgtggccgaggccctgctgctgttcctggagagcctgcccgagcccgtgatctgctacagcacctaccacaactgcctggagtgcagcggcaactacaccgccagcaagcaggtgatcagcaccctgcccatcttccacaagaacgtgttccactacctgatggccttcctgagagagctgctgaagaacagcgccaagaaccacctggacgagaacatcctggccagcatcttcggcagcctgctgctgagaaaccccgccggccaccagaagctggacatgaccgagaagaagaaggcccaggagttcatccaccagttcctgtgcaaccccctgtag

SEQ ID NO: 85272 - DNA, 2487 bp, synthetic construct
  misc_feature 1..2487: note = Description of Artificial Sequence: Synthetic coding sequence
  source 1..2487: mol_type = other DNA
atggaccagagcgtggccatccaggagaccctggccgagggcgagtactgcgtgatcgccgtgcagggcgtgctgtgcgagggcgacagcagacagagcagactgctgggcctggtgagatacagactggagcacggcggccaggagcacgccctgttcctgtacacccacagaagaatggccatcaccggcgacgacgtgagcctggaccagatcgtgcccgtgagcagagacttcaccctggaggaggtgagccccgacggcgagctgtacatcctgggcagcgacgtgaccgtgcagctggacaccgccgagctgagcctggtgttccagctgcccttcggcagccagaccagaatgttcctgcacgaggtggccagagcctgccccggcttcgacagcgccaccagagaccccgagttcctgtggctgagcagatacagatgcgccgagctggagctggagatgcccacccccagaggctgcaacagcgccctggtgacctggcccggctacgccaccatcggcggcggcagataccccagcagaaagaagagatggggcctggaggaggccagaccccagggcgccggcagcgtgctgttctggggcggcgccatggagaagaccggcttcagactgatggagagagcccacggcggcggcttcgtgtggggcagaagcgccagagacggcagaagagacgaggagctggaggaggccggcagagagatgagcgccgccgccggcagcagagagagaaacaccgccggcggcagcaacttcgacggcctgagacccaacggcaagggcgtgcccatggaccagagcagcagaggccaggacaagcccgagagcctgcagcccagacagaacaagagcaagagcgagatcaccgacatggtgagaagcagcaccatcaccgtgagcgacaaggcccacatcctgagcatgcagaagttcggcctgagagacaccatcgtgaagagccacctgctgcagaaggaggaggactacacctacatccagaacttcagattcttcgccggcacctacaacgtgaacggccagagccccaaggagtgcctgagactgtggctgagcaacggcatccaggcccccgacgtgtactgcgtgggcttccaggagctggacctgagcaaggaggccttcttcttccacgacacccccaaggaggaggagtggttcaaggccgtgagcgagggcctgcaccccgacgccaagtacgccaaggtgaagctgatcagactggtgggcatcatgctgctgctgtacgtgaagcaggagcacgccgcctacatcagcgaggtggaggccgagaccgtgggcaccggcatcatgggcagaatgggcaacaagggcggcgtggccatcagattccagttccacaacaccagcatctgcgtggtgaacagccacctggccgcccacatcgaggagtacgagagaagaaaccaggactacaaggacatctgcagcagaatgcagttctgccagcccgaccccagcctgccccccctgaccatcagcaaccacgacgtgatcctgtggctgggcgacctgaactacagaatcgaggagctggacgtggagaaggtgaagaagctgatcgaggagaaggacttccagatgctgtacgcctacgaccagctgaagatccaggtggccgccaagaccgtgttcgagggcttcaccgagggcgagctgaccttccagcccacctacaagtacgacaccggcagcgacgactgggacaccagcgagaagtgcagagcccccgcctggtgcgacagaatcctgtggaagggcaagaacatcacccagctgagctaccagagccacatggccctgaagaccagcgaccacaagcccgtgagcagcgtgttcgacatcggcgtgagagtggtgaacgacgagctgtacagaaagaccctggaggagatcgtgagaagcctggacaagatggagaacgccaacatccccagcgtgagcctgagcaagagagagttctgcttccagaacgtgaagtacatgcagctgaaggtggagagcttcaccatccacaacggccaggtgccctgccacttcgagttcatcaacaagcccgacgaggagagctactgcaagcagtggctgaacgccaaccccagcagaggcttcctgctgcccgacagcgacgtggagatcgacctggagctgttcgtgaacaagatgaccgccaccaagctgaacagcggcgaggacaagatcgaggacatcctggtgctgcacctggacagaggcaaggactacttcctgagcgtgagcggcaactacctgcccagctgcttcggcagccccatccacaccctgtgctacatgagagagcccatcctggacctgcccctggagaccatcagcgagctgctggcctacctggccgcctactgcttcgagacccagctggtgaccaagagcctgatctag

SEQ ID NO: 85273 - DNA, 528 bp, synthetic construct
  misc_feature 1..528: note = Description of Artificial Sequence: Synthetic coding sequence
  source 1..528: mol_type = other DNA
atgcagaagttcggcctgagagacaccatcgtgaagagccacctgctgcagaaggaggaggactacacctacatccagaacttcagattcttcgccggcacctacaacgtgaacggccagagccccaaggagtgcctgagactgtggctgagcaacggcatccaggcccccgacgtgtactgcgtgggcttccaggagctggacctgagcaaggaggccttcttcttccacgacacccccaaggaggaggagtggttcaaggccgtgagcgagggcctgcaccccgacgccaagtacgccaaggtgaagctgatcagactggtgggcatcatgctgctgctgtacgtgaagcaggagcacgccgcctacatcagcgaggtggaggccgagaccgtgggcaccggcatcatgggcagaatgtgcgacctggtggccggcggcccccagctgcaggacagaagagccggctgcggcaagagcgagaaggcccacagaagagagggcctgagcaacgccgtgtgcatctag

SEQ ID NO: 85274 - DNA, 834 bp, synthetic construct
  misc_feature 1..834: note = Description of Artificial Sequence: Synthetic coding sequence
  source 1..834: mol_type = other DNA
atggccgacccctggcaggagtgcatggactacgccgtgaccctggccagacaggccggcgaggtggtgtgcgaggccatcaagaacgagatgaacgtgatgctgaagagcagccccgtggacctggtgaccgccaccgaccagaaggtggagaagatgctgatcagcagcatcaaggagaagtaccccagccacagcttcatcggcgaggagagcgtggccgccggcgagaagagcatcctgaccgacaaccccacctggatcatcgaccccatcgacggcaccaccaacttcgtgcacagattccccttcgtggccgtgagcatcggcttcgccgtgaacaagaagatcgagttcggcgtggtgtacagctgcgtggagggcaagatgtacaccgccagaaagggcaagggcgccttctgcaacggccagaagctgcaggtgagccagcaggaggacatcaccaagagcctgctggtgaccgagctgggcagcagcagaacccccgagaccgtgagaatggtgctgagcaacatggagaagctgttctgcatccccgtgcacggcatcagaagcgtgggcaccgccgccgtgaacatgtgcctggtggccaccggcggcgccgacgcctactacgagatgggcatccactgctgggacgtggccggcgccggcatcatcgtgaccgaggccggcggcgtgctgatggacgtgaccggcggccccttcgacctgatgagcagaagagtgatcgccgccaacaacagaatcctggccgagagaatcgccaaggagatccaggtgatccccctgcagagagacgacgaggactag

SEQ ID NO: 85275 - DNA, 597 bp, synthetic construct
  misc_feature 1..597: note = Description of Artificial Sequence: Synthetic coding sequence
  source 1..597: mol_type = other DNA
atggccgacccctggcaggagtgcatggactacgccgtgaccctggccagacaggccggcgaggtggtgtgcgaggccatcaagaacgagatgaacgtgatgctgaagagcagccccgtggacctggtgaccgccaccgaccagaaggtggagaagatgctgatcagcagcatcaaggagaagtaccccagccacagcttcatcggcgaggagagcgtggccgccggcgagaagagcatcctgaccgacaaccccacctggatcatcgaccccatcgacggcaccaccaacttcgtgcacagattccccttcgtggccgtgagcatcggcttcgccgtgaacaagaagatcgagttcggcgtggtgtacagctgcgtggagggcaagatgtacaccgccagaaagggcaagggcgccttctgcaacggccagaagctgcaggtgagccagcaggagggcagcggcgtgctggagcagcagctgctgatctgcgccctgtggcagctggccgagcagatgcacatcatgaagtgggagttcaccgccggcatgctgcaggagctggccctgctgctgctgaagctggtggcctgctag

SEQ ID NO: 85276 - DNA, 1011 bp, synthetic construct
  misc_feature 1..1011: note = Description of Artificial Sequence: Synthetic coding sequence
  source 1..1011: mol_type = other DNA
atgggccagagacccggccccgtgctgcccgccgtggccgtgctgggccaggtggccaagagaaaggtggcctggctgctgagatggaaggccgtgaccagaaccgagaccgccggcaacagcagcggcgtgtacggcttcggcaagatgaagatcttcgtgaagtacttccagaagatggccgacccctggcaggagtgcatggactacgccgtgaccctggccagacaggccggcgaggtggtgtgcgaggccatcaagaacgagatgaacgtgatgctgaagagcagccccgtggacctggtgaccgccaccgaccagaaggtggagaagatgctgatcagcagcatcaaggagaagtaccccagccacagcttcatcggcgaggagagcgtggccgccggcgagaagagcatcctgaccgacaaccccacctggatcatcgaccccatcgacggcaccaccaacttcgtgcacagattccccttcgtggccgtgagcatcggcttcgccgtgaacaagaagatcgagttcggcgtggtgtacagctgcgtggagggcaagatgtacaccgccagaaagggcaagggcgccttctgcaacggccagaagctgcaggtgagccagcaggaggacatcaccaagagcctgctggtgaccgagctgggcagcagcagaacccccgagaccgtgagaatggtgctgagcaacatggagaagctgttctgcatccccgtgcacggcatcagaagcgtgggcaccgccgccgtgaacatgtgcctggtggccaccggcggcgccgacgcctactacgagatgggcatccactgctgggacgtggccggcgccggcatcatcgtgaccgaggccggcggcgtgctgatggacgtgaccggcggccccttcgacctgatgagcagaagagtgatcgccgccaacaacagaatcctggccgagagaatcgccaaggagatccaggtgatccccctgcagagagacgacgaggactag

SEQ ID NO: 85277 - DNA, 462 bp, synthetic construct
  misc_feature 1..462: note = Description of Artificial Sequence: Synthetic coding sequence
  source 1..462: mol_type = other DNA
atggccgacccctggcaggagtgcatggactacgccgtgaccctggccagacaggccggcgaggtggtgtgcgaggccatcaagaacgagatgaacgtgatgctgaagagcagccccgtggacctggtgaccgccaccgaccagaaggtggagaagatgctgatcagcagcatcaaggagaagtaccccagccacagattccccttcgtggccgtgagcatcggcttcgccgtgaacaagaagatcgagttcggcgtggtgtacagctgcgtggagggcaagatgtacaccgccagaaagggcaagggcgccttctgcaacggccagaagctgcaggtgagccagcaggaggacatcaccaagagcctgctggtgaccgagctgggcagcagcagaacccccgagaccgtgagaatggtgctgagcaacatggagaagctgttctgcatccccgtgcactag

SEQ ID NO: 85278 - DNA, 636 bp, synthetic construct
  misc_feature 1..636: note = Description of Artificial Sequence: Synthetic coding sequence
  source 1..636: mol_type = other DNA
atgggccagagacccggccccgtgctgcccgccgtggccgtgctgggccaggtggccaagagaaaggtggcctggctgctgagatggaaggccgtgaccagaaccgagaccgccggcaacagcagcggcgtgtacggcttcggcaagatgaagatcttcgtgaagtacttccagaagatggccgacccctggcaggagtgcatggactacgccgtgaccctggccagacaggccggcgaggtggtgtgcgaggccatcaagaacgagatgaacgtgatgctgaagagcagccccgtggacctggtgaccgccaccgaccagaaggtggagaagatgctgatcagcagcatcaaggagaagtaccccagccacagcttcatcggcgaggagagcgtggccgccggcgagaagagcatcctgaccgacaaccccacctggatcatcgaccccatcgacggcaccaccaacttcgtgcacagattccccttcgtggccgtgagcatcggcttcgccgtgaacaagaagatcgagttcggcgtggtgtacagctgcgtggagggcaagatgtacaccgccagaaagggcaagggcgccttctgcaacggccagaagctgcaggtgagccagcaggagtag

SEQ ID NO: 85279 - DNA, 867 bp, synthetic construct
  misc_feature 1..867: note = Description of Artificial Sequence: Synthetic coding sequence
  source 1..867: mol_type = other DNA
atgaagcccagcggcgaggaccaggccgccctggccgccggcccctgggaggagtgcttccaggccgccgtgcagctggccctgagagccggccagatcatcagaaaggccctgaccgaggagaagagagtgagcaccaagaccagcgccgccgacctggtgaccgagaccgaccacctggtggaggacctgatcatcagcgagctgagagagagattccccagccacagattcatcgccgaggaggccgccgccagcggcgccaagtgcgtgctgacccacagccccacctggatcatcgaccccatcgacggcacctgcaacttcgtgcacagattccccaccgtggccgtgagcatcggcttcgccgtgagacaggagctggagttcggcgtgatctaccactgcaccgaggagagactgtacaccggcagaagaggcagaggcgccttctgcaacggccagagactgagagtgagcggcgagaccgacctgagcaaggccctggtgctgaccgagatcggccccaagagagaccccgccaccctgaagctgttcctgagcaacatggagagactgctgcacgccaaggcccacggcgtgagagtgatcggcagcagcaccctggccctgtgccacctggccagcggcgccgccgacgcctactaccagttcggcctgcactgctgggacctggccgccgccaccgtgatcatcagagaggccggcggcatcgtgatcgacaccagcggcggccccctggacctgatggcctgcagagtggtggccgccagcaccagagagatggccatgctgatcgcccaggccctgcagaccatcaactacggcagagacgacgagaagtag

SEQ ID NO: 85280 - DNA, 258 bp, synthetic construct
  misc_feature 1..258: note = Description of Artificial Sequence: Synthetic coding sequence
  source 1..258: mol_type = other DNA
atgaagcccagcggcgaggaccaggccgccctggccgccggcccctgggaggagtgcttccaggccgccgtgcagctggccctgagagccggccagatcatcagaaaggccctgaccgaggagaagagagtgagcaccaagaccagcgccgccgacctggtgaccgagaccgaccacctggtggaggacctgatcatcagcgagctgagagagagattccccagccacagaagccccttcagcctggtgcacatgtag

SEQ ID NO: 85281 - DNA, 1071 bp, synthetic construct
  misc_feature 1..1071: note = Description of Artificial Sequence: Synthetic coding sequence
  source 1..1071: mol_type = other DNA
atgctggagcagatcagaagagacatcagagacttcagaagcagcgccggcctggacaaggtgatcgtgctgtggaccgccaacaccgagagattctgcgaggtgatccccggcctgaacgacaccgccgagaacctgctgagaaccatcgagctgggcctggaggtgagccccagcaccctgttcgccgtggccagcatcctggagggctgcgccttcctgaacggcagcccccagaacaccctggtgcccggcgccctggagctggcctggcagcacagagtgttcgtgggcggcgacgacttcaagagcggccagaccaaggtgaagagcgtgctggtggacttcctgatcggcagcggcctgaagaccatgagcatcgtgagctacaaccacctgggcaacaacgacggcgagaacctgagcgcccccctgcagttcagaagcaaggaggtgagcaagagcaacgtggtggacgacatggtgcagagcaaccccgtgctgtacacccccggcgaggagcccgaccactgcgtggtgatcaagtacgtgccctacgtgggcgacagcaagagagccctggacgagtacaccagcgagctgatgctgggcggcaccaacaccctggtgctgcacaacacctgcgaggacagcctgctggccgcccccatcatgctggacctggccctgctgaccgagctgtgccagagagtgagcttctgcaccgacatggaccccgagccccagaccttccaccccgtgctgagcctgctgagcttcctgttcaaggcccccctggtgccccccggcagccccgtggtgaacgccctgttcagacagagaagctgcatcgagaacatcctgagagcctgcgtgggcctgcccccccagaaccacatgctgctggagcacaagatggagagacccggccccagcctgaagagagtgggccccgtggccgccacctaccccatgctgaacaagaagggccccgtgcccgccgccaccaacggctgcaccggcgacgccaacggccacctgcaggaggagccccccatgcccaccacctag

SEQ ID NO: 85282 - DNA, 1677 bp, synthetic construct
  misc_feature 1..1677: note = Description of Artificial Sequence: Synthetic coding sequence
  source 1..1677: mol_type = other DNA
atggaggccgccgcccagttcttcgtggagagccccgacgtggtgtacggccccgaggccatcgaggcccagtacgagtacagaaccaccagagtgagcagagagggcggcgtgctgaaggtgcaccccaccagcaccagattcaccttcagaaccgccagacaggtgcccagactgggcgtgatgctggtgggctggggcggcaacaacggcagcaccctgaccgccgccgtgctggccaacagactgagactgagctggcccaccagaagcggcagaaaggaggccaactactacggcagcctgacccaggccggcaccgtgagcctgggcctggacgccgagggccaggaggtgttcgtgcccttcagcgccgtgctgcccatggtggcccccaacgacctggtgttcgacggctgggacatcagcagcctgaacctggccgaggccatgagaagagccaaggtgctggactggggcctgcaggagcagctgtggccccacatggaggccctgagacccagacccagcgtgtacatccccgagttcatcgccgccaaccagagcgccagagccgacaacctgatccccggcagcagagcccagcagctggagcagatcagaagagacatcagagacttcagaagcagcgccggcctggacaaggtgatcgtgctgtggaccgccaacaccgagagattctgcgaggtgatccccggcctgaacgacaccgccgagaacctgctgagaaccatcgagctgggcctggaggtgagccccagcaccctgttcgccgtggccagcatcctggagggctgcgccttcctgaacggcagcccccagaacaccctggtgcccggcgccctggagctggcctggcagcacagagtgttcgtgggcggcgacgacttcaagagcggccagaccaaggtgaagagcgtgctggtggacttcctgatcggcagcggcctgaagaccatgagcatcgtgagctacaaccacctgggcaacaacgacggcgagaacctgagcgcccccctgcagttcagaagcaaggaggtgagcaagagcaacgtggtggacgacatggtgcagagcaaccccgtgctgtacacccccggcgaggagcccgaccactgcgtggtgatcaagtacgtgccctacgtgggcgacagcaagagagccctggacgagtacaccagcgagctgatgctgggcggcaccaacaccctggtgctgcacaacacctgcgaggacagcctgctggccgcccccatcatgctggacctggccctgctgaccgagctgtgccagagagtgagcttctgcaccgacatggaccccgagccccagaccttccaccccgtgctgagcctgctgagcttcctgttcaaggcccccctggtgccccccggcagccccgtggtgaacgccctgttcagacagagaagctgcatcgagaacatcctgagagcctgcgtgggcctgcccccccagaaccacatgctgctggagcacaagatggagagacccggccccagcctgaagagagtgggccccgtggccgccacctaccccatgctgaacaagaagggccccgtgcccgccgccaccaacggctgcaccggcgacgccaacggccacctgcaggaggagccccccatgcccaccacctag

SEQ ID NO: 85283 - DNA, 1515 bp, synthetic construct
  misc_feature 1..1515: note = Description of Artificial Sequence: Synthetic coding sequence
  source 1..1515: mol_type = other DNA
atggaggccgccgcccagttcttcgtggagagccccgacgtggtgtacggccccgaggccatcgaggcccagtacgagtacagaaccaccagagtgagcagagagggcggcgtgctgaaggaggccaactactacggcagcctgacccaggccggcaccgtgagcctgggcctggacgccgagggccaggaggtgttcgtgcccttcagcgccgtgctgcccatggtggcccccaacgacctggtgttcgacggctgggacatcagcagcctgaacctggccgaggccatgagaagagccaaggtgctggactggggcctgcaggagcagctgtggccccacatggaggccctgagacccagacccagcgtgtacatccccgagttcatcgccgccaaccagagcgccagagccgacaacctgatccccggcagcagagcccagcagctggagcagatcagaagagacatcagagacttcagaagcagcgccggcctggacaaggtgatcgtgctgtggaccgccaacaccgagagattctgcgaggtgatccccggcctgaacgacaccgccgagaacctgctgagaaccatcgagctgggcctggaggtgagccccagcaccctgttcgccgtggccagcatcctggagggctgcgccttcctgaacggcagcccccagaacaccctggtgcccggcgccctggagctggcctggcagcacagagtgttcgtgggcggcgacgacttcaagagcggccagaccaaggtgaagagcgtgctggtggacttcctgatcggcagcggcctgaagaccatgagcatcgtgagctacaaccacctgggcaacaacgacggcgagaacctgagcgcccccctgcagttcagaagcaaggaggtgagcaagagcaacgtggtggacgacatggtgcagagcaaccccgtgctgtacacccccggcgaggagcccgaccactgcgtggtgatcaagtacgtgccctacgtgggcgacagcaagagagccctggacgagtacaccagcgagctgatgctgggcggcaccaacaccctggtgctgcacaacacctgcgaggacagcctgctggccgcccccatcatgctggacctggccctgctgaccgagctgtgccagagagtgagcttctgcaccgacatggaccccgagccccagaccttccaccccgtgctgagcctgctgagcttcctgttcaaggcccccctggtgccccccggcagccccgtggtgaacgccctgttcagacagagaagctgcatcgagaacatcctgagagcctgcgtgggcctgcccccccagaaccacatgctgctggagcacaagatggagagacccggccccagcctgaagagagtgggccccgtggccgccacctaccccatgctgaacaagaagggccccgtgcccgccgccaccaacggctgcaccggcgacgccaacggccacctgcaggaggagccccccatgcccaccacctag

SEQ ID NO: 85284 - DNA, 1227 bp, synthetic construct
  misc_feature 1..1227: note = Description of Artificial Sequence: Synthetic coding sequence
  source 1..1227: mol_type = other DNA
atgagaagagccaaggtgctggactggggcctgcaggagcagctgtggccccacatggaggccctgagacccagacccagcgtgtacatccccgagttcatcgccgccaaccagagcgccagagccgacaacctgatccccggcagcagagcccagcagctggagcagatcagaagagacatcagagacttcagaagcagcgccggcctggacaaggtgatcgtgctgtggaccgccaacaccgagagattctgcgaggtgatccccggcctgaacgacaccgccgagaacctgctgagaaccatcgagctgggcctggaggtgagccccagcaccctgttcgccgtggccagcatcctggagggctgcgccttcctgaacggcagcccccagaacaccctggtgcccggcgccctggagctggcctggcagcacagagtgttcgtgggcggcgacgacttcaagagcggccagaccaaggtgaagagcgtgctggtggacttcctgatcggcagcggcctgaagaccatgagcatcgtgagctacaaccacctgggcaacaacgacggcgagaacctgagcgcccccctgcagttcagaagcaaggaggtgagcaagagcaacgtggtggacgacatggtgcagagcaaccccgtgctgtacacccccggcgaggagcccgaccactgcgtggtgatcaagtacgtgccctacgtgggcgacagcaagagagccctggacgagtacaccagcgagctgatgctgggcggcaccaacaccctggtgctgcacaacacctgcgaggacagcctgctggccgcccccatcatgctggacctggccctgctgaccgagctgtgccagagagtgagcttctgcaccgacatggaccccgagccccagaccttccaccccgtgctgagcctgctgagcttcctgttcaaggcccccctggtgccccccggcagccccgtggtgaacgccctgttcagacagagaagctgcatcgagaacatcctgagagcctgcgtgggcctgcccccccagaaccacatgctgctggagcacaagatggagagacccggccccagcctgaagagagtgggccccgtggccgccacctaccccatgctgaacaagaagggccccgtgcccgccgccaccaacggctgcaccggcgacgccaacggccacctgcaggaggagccccccatgcccaccacctag

SEQ ID NO: 85285 - DNA, 1386 bp, synthetic construct
  misc_feature 1..1386: note = Description of Artificial Sequence: Synthetic coding sequence
  source 1..1386: mol_type = other DNA
atgaccctgcccggcggccccaccggcatggccagacccggcggcgccagaccctgcagccccggcctggagagagcccccagaagaagcgtgggcgagctgagactgctgttcgaggccagatgcgccgccgtggccgccgccgccgccgccggcgagcccagagccagaggcgccaagagaagaggcggccaggtgcccaacggcctgcccagagccccccccgcccccgtgatcccccagctgaccgtgaccgccgaggagcccgacgtgccccccaccagccccggcccccccgagagagagagagactgcctgcccgccgccggcagcagccacctgcagcagcccagaagactgagcaccagcagcgtgagcagcaccggcagcagcagcctgctggaggacagcgaggacgacctgctgagcgacagcgagagcagaagcagaggcaacgtgcagctggaggccggcgaggacgtgggccagaagaaccactggcagaagatcagaaccatggtgaacctgcccgtgatcagccccttcaagaagagatacgcctgggtgcagctggccggccacaccggcagcttcaaggccgccggcaccagcggcctgatcctgaagagatgcagcgagcccgagagatactgcctggccagactgatggccgacgccctgagaggctgcgtgcccgccttccacggcgtggtggagagagacggcgagagctacctgcagctgcaggacctgctggacggcttcgacggcccctgcgtgctggactgcaagatgggcgtgagaacctacctggaggaggagctgaccaaggccagagagagacccaagctgagaaaggacatgtacaagaagatgctggccgtggaccccgaggcccccaccgaggaggagcacgcccagagagccgtgaccaagcccagatacatgcagtggagagagggcatcagcagcagcaccaccctgggcttcagaatcgagggcatcaagaaggccgacggcagctgcagcaccgacttcaagaccaccagaagcagagagcaggtgctgagagtgttcgaggagttcgtgcagggcgacgaggaggtgctgagaagatacctgaacagactgcagcagatcagagacaccctggaggtgagcgagttcttcagaagacacgaggtgatcggcagcagcctgctgttcgtgcacgaccactgccacagagccggcgtgtggctgatcgacttcggcaagaccacccccctgcccgacggccagatcctggaccacagaagaccctgggaggagggcaacagagaggacggctacctgctgggcctggacaacctgatcggcatcctggccagcctggccgagagatag

SEQ ID NO: 85286 - DNA, 2841 bp, synthetic construct
  misc_feature 1..2841: note = Description of Artificial Sequence: Synthetic coding sequence
  source 1..2841: mol_type = other DNA
atggccgtgtactgctacgccctgaacagcctggtgatcatgaacagcgccaacgagatgaagagcggcggcggccccggccccagcggcagcgagaccccccccccccccagaagagccgtgctgagccccggcagcgtgttcagccccggcagaggcgccagcttcctgttcccccccgccgagagcctgagccccgaggagcccagaagccccggcggctggagaagcggcagaagaagactgaacagcagcagcggcagcggcagcggcagcagcggcagcagcgtgagcagccccagctgggccggcagactgagaggcgacagacagcaggtggtggccgccggcaccctgagcccccccggccccgaggaggccaagagaaagctgagaatcctgcagagagagctgcagaacgtgcaggtgaaccagaaggtgggcatgttcgaggcccacatccaggcccagagcagcgccatccaggcccccagaagccccagactgggcagagccagaagccccagcccctgccccttcagaagcagcagccagccccccggcagagtgctggtgcagggcgccagaagcgaggagagaagaaccaagagctggggcgagcagtgccccgagaccagcggcaccgacagcggcagaaagggcggccccagcctgtgcagcagccaggtgaagaagggcatgccccccctgcccggcagagccgcccccaccggcagcgaggcccagggccccagcgccttcgtgagaatggagaagggcatccccgccagccccagatgcggcagccccaccgccatggagatcgacaagagaggcagccccacccccggcaccagaagctgcctggcccccagcctgggcctgttcggcgccagcctgaccatggccaccgaggtggccgccagagtgaccagcaccggcccccacagaccccaggacctggccctgaccgagcccagcggcagagccagagagctggaggacctgcagccccccgaggccctggtggagagacagggccagttcctgggcagcgagaccagccccgcccccgagagaggcggccccagagacggcgagccccccggcaagatgggcaagggctacctgccctgcggcatgcccggcagcggcgagcccgaggtgggcaagagacccgaggagaccaccgtgagcgtgcagagcgccgagagcagcgacagcctgagctggagcagactgcccagagccctggccagcgtgggccccgaggaggccagaagcggcgcccccgtgggcggcggcagatggcagctgagcgacagagtggagggcggcagccccaccctgggcctgctgggcggcagccccagcgcccagcccggcaccggcaacgtggaggccggcatccccagcggcagaatgctggagcccctgccctgctgggacgccgccaaggacctgaaggagccccagtgcccccccggcgacagagtgggcgtgcagcccggcaacagcagagtgtggcagggcaccatggagaaggccggcctggcctggaccagaggcaccggcgtgcagagcgagggcacctgggagagccagagacaggacagcgacgccctgcccagccccgagctgctgccccaggaccccgacaagcccttcctgagaaaggcctgcagccccagcaacatccccgccgtgatcatcaccgacatgggcacccaggaggacggcgccctggaggagacccagggcagccccagaggcaacctgcccctgagaaagctgagcagcagcagcgccagcagcaccggcttcagcagcagctacgaggacagcgaggaggacatcagcagcgaccccgagagaaccctggaccccaacagcgccttcctgcacaccctggaccagcagaagcccagagtgagcaagagctggagaaagatcaagaacatggtgcactggagccccttcgtgatgagcttcaagaagaagtacccctggatccagctggccggccacgccggcagcttcaaggccgccgccaacggcagaatcctgaagaagcactgcgagagcgagcagagatgcctggacagactgatggtggacgtgctgagacccttcgtgcccgcctaccacggcgacgtggtgaaggacggcgagagatacaaccagatggacgacctgctggccgacttcgacagcccctgcgtgatggactgcaagatgggcatcagaacctacctggaggaggagctgaccaaggccagaaagaagcccagcctgagaaaggacatgtaccagaagatgatcgaggtggaccccgaggcccccaccgaggaggagaaggcccagagagccgtgaccaagcccagatacatgcagtggagagagaccatcagcagcaccgccaccctgggcttcagaatcgagggcatcaagaaggaggacggcaccgtgaacagagacttcaagaagaccaagaccagagagcaggtgaccgaggccttcagagagttcaccaagggcaaccacaacatcctgatcgcctacagagacagactgaaggccatcagaaccaccctggaggtgagccccttcttcaagtgccacgaggtgatcggcagcagcctgctgttcatccacgacaagaaggagcaggccaaggtgtggatgatcgacttcggcaagaccacccccctgcccgagggccagaccctgcagcacgacgtgccctggcaggagggcaacagagaggacggctacctgagcggcctgaacaacctggtggacatcctgaccgagatgagccaggacgcccccctggcctag

SEQ ID NO: 85287 - DNA, 1935 bp, synthetic construct
  misc_feature 1..1935: note = Description of Artificial Sequence: Synthetic coding sequence
  source 1..1935: mol_type = other DNA
atggccgtgtactgctacgccctgaacagcctggtgatcatgaacagcgccaacgagatgaagagcggcggcggccccggccccagcggcagcgagaccccccccccccccagaagagccgtgctgagccccggcagcgtgttcagccccggcagaggcgccagcttcctgttcccccccgccgagagcctgagccccgaggagcccagaagccccggcggctggagaagcggcagaagaagactgaacagcagcagcggcagcggcagcggcagcagcggcagcagcgtgagcagccccagctgggccggcagactgagaggcgacagacagcaggtggtggccgccggcaccctgagcccccccggccccgaggaggccaagagaaagctgagaatcctgcagagagagctgcagaacgtgcaggtgaaccagaaggtgggcatgttcgaggcccacatccaggcccagagcagcgccatccaggcccccagaagccccagactgggcagagccagaagccccagcccctgccccttcagaagcagcagccagccccccggcagagtgctggtgcagggcgccagaagcgaggagagaagaaccaagagctggggcgagcagtgccccgagaccagcggcaccgacagcggcagaaagggcggccccagcctgtgcagcagccaggtgaagaagggcatgccccccctgcccggcagagccgcccccaccggcagcgaggcccagggccccagcgccttcgtgagaatggagaagggcatccccgccagccccagatgcggcagccccaccgccatggagatcgacaagagaggcagccccacccccggcaccagaagctgcctggcccccagcctgggcctgttcggcgccagcctgaccatggccaccgaggtggccgccagagtgaccagcaccggcccccacagaccccaggacctggccctgaccgagcccagcggcagagccagagagctggaggacctgcagccccccgaggccctggtggagagacagggccagttcctgggcagcgagaccagccccgcccccgagagaggcggccccagagacggcgagccccccggcaagatgggcaagggctacctgccctgcggcatgcccggcagcggcgagcccgaggtgggcaagagacccgaggagaccaccgtgagcgtgcagagcgccgagagcagcgacagcctgagctggagcagactgcccagagccctggccagcgtgggccccgaggaggccagaagcggcgcccccgtgggcggcggcagatggcagctgagcgacagagtggagggcggcagccccaccctgggcctgctgggcggcagccccagcgcccagcccggcaccggcaacgtggaggccggcatccccagcggcagaatgctggagcccctgccctgctgggacgccgccaaggacctgaaggagccccagtgcccccccggcgacagagtgggcgtgcagcccggcaacagcagagtgtggcagggcaccatggagaaggccggcctggcctggaccagaggcaccggcgtgcagagcgagggcacctgggagagccagagacaggacagcgacgccctgcccagccccgagctgctgccccaggaccccgacaagcccttcctgagaaaggcctgcagccccagcaacatccccgccgtgatcatcaccgacatgggcacccaggaggacggcgccctggaggagacccagggcagccccagaggcaacctgcccctgagaaagctgagcagcagcagcgccagcagcaccggcttcagcagcagctacgaggacagcgaggaggacatcagcagcgaccccgagagaaccctggaccccaacagcgccttcctgcacaccctggaccagcagaagcccagagtgtag

SEQ ID NO: 85288 - DNA, 2841 bp, synthetic construct; identical to SEQ ID NO: 85286
  misc_feature 1..2841: note = Description of Artificial Sequence: Synthetic coding sequence
  source 1..2841: mol_type = other DNA

SEQ ID NO: 85289 - DNA, 2052 bp, synthetic construct
  misc_feature 1..2052: note = Description of Artificial Sequence: Synthetic coding sequence
  source 1..2052: mol_type = other DNA
atgagaagatgcccctgcagaggcagcctgaacgaggccgaggccggcgccctgcccgccgccgccagaatgggcctggaggcccccagaggcggcagaagaagacagcccggccagcagagacccggccccggcgccggcgcccccgccggcagacccgagggcggcggcccctgggccagaaccgagggcagcagcctgcacagcgagcccgagagagccggcctgggccccgcccccggcaccgagagcccccaggccgagttctggaccgacggccagaccgagcccgccgccgccggcctgggcgtggagaccgagagacccaagcagaagaccgagcccgacagaagcagcctgagaacccacctggagtggagctggagcgagctggagaccacctgcctgtggaccgagaccggcaccgacggcctgtggaccgacccccacagaagcgacctgcagttccagcccgaggaggccagcccctggacccagcccggcgtgcacggcccctggaccgagctggagacccacggcagccagacccagcccgagagagtgaagagctgggccgacaacctgtggacccaccagaacagcagcagcctgcagacccaccccgagggcgcctgccccagcaaggagcccagcgccgacggcagctggaaggagctgtacaccgacggcagcagaacccagcaggacatcgagggcccctggaccgagccctacaccgacggcagccagaagaagcaggacaccgaggccgccagaaagcagcccggcaccggcggcttccagatccagcaggacaccgacggcagctggacccagcccagcaccgacggcagccagaccgcccccggcaccgactgcctgctgggcgagcccgaggacggccccctggaggagcccgagcccggcgagctgctgacccacctgtacagccacctgaagtgcagccccctgtgccccgtgcccagactgatcatcacccccgagacccccgagcccgaggcccagcccgtgggcccccccagcagagtggagggcggcagcggcggcttcagcagcgccagcagcttcgacgagagcgaggacgacgtggtggccggcggcggcggcgccagcgaccccgaggacagaagcggcagcaagccctggaagaagctgaagaccgtgctgaagtacagccccttcgtggtgagcttcagaaagcactacccctgggtgcagctgagcggccacgccggcaacttccaggccggcgaggacggcagaatcctgaagagattctgccagtgcgagcagagaagcctggagcagctgatgaaggaccccctgagacccttcgtgcccgcctactacggcatggtgctgcaggacggccagaccttcaaccagatggaggacctgctggccgacttcgagggccccagcatcatggactgcaagatgggcagcagaacctacctggaggaggagctggtgaaggccagagagagacccagacccagaaaggacatgtacgagaagatggtggccgtggaccccggcgcccccacccccgaggagcacgcccagggcgccgtgaccaagcccagatacatgcagtggagagagaccatgagcagcaccagcaccctgggcttcagaatcgagggcatcaagaaggccgacggcacctgcaacaccaacttcaagaagacccaggccctggagcaggtgaccaaggtgctggaggacttcgtggacggcgaccacgtgatcctgcagaagtacgtggcctgcctggaggagctgagagaggccctggagatcagccccttcttcaagacccacgaggtggtgggcagcagcctgctgttcgtgcacgaccacaccggcctggccaaggtgtggatgatcgacttcggcaagaccgtggccctgcccgaccaccagaccctgagccacagactgccctgggccgagggcaacagagaggacggctacctgtggggcctggacaacatgatctgcctgctgcagggcctggcccagagctag

SEQ ID NO: 85290 - DNA, 1740 bp, synthetic construct
  misc_feature 1..1740: note = Description of Artificial Sequence: Synthetic coding sequence
  source 1..1740: mol_type = other DNA
atgagaagaccccccggcaacggcgaggccgccagcgagggccccggcggctggggcctgtggggcgtgcaggagagcagaagactgtgctgcgccggccacgacagatgcaagcaggccctgctgcagatcggcatcaacatgatggccctgcccggcggcagacacctggacagcgtgaccctgcccggccagagactgcacctgatgcaggtggacagcgtgcagagatggatggaggacctgaagctgatgaccgagtgcgagtgcatgtgcgtgctgcaggccaagcccatcagcctggaggaggacgcccagggcgacctgatcctggccggcggccccggccccggcgaccccctgcagctgctgctgaagagaggctgggtgatcagcaccgagctgagaagaatcggccagaagctggcccaggacagatgggccagagtgcacagcatgagcgtgagactgacctgccacgccagaagcatggtgagcgagtacagcgccgtgagcagaaacagcctgaaggagatgggcgagatcgagaagctgctgatggagaagtgcagcgagctgagcgccgtgaccgagagatgcctgcaggtggagaacgagcacgtgctgaagagcatgaaggcctgcgtgagcgagaccctgagcatgctgggccagcacttcggccagctgctggagctggccctgaccagagaggtgcaggccctggtgagaaagatcgacgccagcgacaacatctacaccaccgagagcaccaccggcaacctgttcagcctgacccaggagggcgcccccctgtgcagaatcatcgccaaggagggcggcgtggtggccctgttcaaggtgtgcagacaggacagcttcagatgcctgtacccccaggccctgagaaccctggccagcatctgctgcgtggaggagggcgtgcaccagctggagaaggtggacggcgtgctgtgcctggccgacatcctgaccgacaacagccacagcgaggccaccagagccgaggccgccgccgtggtggcccaggtgaccagcccccacctgcccgtgacccagcacctgagcagcttcctggagagcatggaggagatcgtgaccgccctggtgaagctgtgccaggaggccagcagcggcgaggtgttcctgctggccagcgccgccctggccaacatcaccttcttcgacaccatggcctgcgagatgctgctgcagctgaacgccatcagagtgctgctggaggcctgcagcgacaagcagagagtggacaccccctacaccagagaccagatcgtgaccatcctggccaacatgagcgtgctggagcagtgcgccagcgacatcatccaggagaacggcgtgcagctgatcatgggcatgctgagcgagaagcccagaagcggcacccccgccgaggtggccgcctgcgagagagtgcagcagaaggccgccgtgaccctggccagactgagcagagaccccgacgtggccagagaggccgtgagactgagctgcatgagcagactgatcgagctgtgcagaagccccagcgagagaaacagcagcgacgccgtgctggtggcctgcctggccgccctgagaagactggccggcgtgtgccccgagggcctgcaggacagcgacttccagcagctggtgcagcccagactggtggacagcttcctgctgtgcagcaacatggaggagagcttcgtgtag

SEQ ID NO: 85291 - DNA, 1599 bp, synthetic construct
  misc_feature 1..1599: note = Description of Artificial Sequence: Synthetic coding sequence
  source 1..1599: mol_type = other DNA
atgatggccctgcccggcggcagacacctggacagcgtgaccctgcccggccagagactgcacctgatgcaggtggacagcgtgcagagatggatggaggacctgaagctgatgaccgagtgcgagtgcatgtgcgtgctgcaggccaagcccatcagcctggaggaggacgcccagggcgacctgatcctggccggcggccccggccccggcgaccccctgcagctgctgctgaagagaggctgggtgatcagcaccgagctgagaagaatcggccagaagctggcccaggacagatgggccagagtgcacagcatgagcgtgagactgacctgccacgccagaagcatggtgagcgagtacagcgccgtgagcagaaacagcctgaaggagatgggcgagatcgagaagctgctgatggagaagtgcagcgagctgagcgccgtgaccgagagatgcctgcaggtggagaacgagcacgtgctgaagagcatgaaggcctgcgtgagcgagaccctgagcatgctgggccagcacttcggccagctgctggagctggccctgaccagagaggtgcaggccctggtgagaaagatcgacgccagcgacaacatctacaccaccgagagcaccaccggcaacctgttcagcctgacccaggagggcgcccccctgtgcagaatcatcgccaaggagggcggcgtggtggccctgttcaaggtgtgcagacaggacagcttcagatgcctgtacccccaggccctgagaaccctggccagcatctgctgcgtggaggagggcgtgcaccagctggagaaggtggacggcgtgctgtgcctggccgacatcctgaccgacaacagccacagcgaggccaccagagccgaggccgccgccgtggtggcccaggtgaccagcccccacctgcccgtgacccagcacctgagcagcttcctggagagcatggaggagatcgtgaccgccctggtgaagctgtgccaggaggccagcagcggcgaggtgttcctgctggccagcgccgccctggccaacatcaccttcttcgacaccatggcctgcgagatgctgctgcagctgaacgccatcagagtgctgctggaggcctgcagcgacaagcagagagtggacaccccctacaccagagaccagatcgtgaccatcctggccaacatgagcgtgctggagcagtgcgccagcgacatcatccaggagaacggcgtgcagctgatcatgggcatgctgagcgagaagcccagaagcggcacccccgccgaggtggccgcctgcgagagagtgcagcagaaggccgccgtgaccctggccagactgagcagagaccccgacgtggccagagaggccgtgagactgagctgcatgagcagactgatcgagctgtgcagaagccccagcgagagaaacagcagcgacgccgtgctggtggcctgcctggccgccctgagaagactggccggcgtgtgccccgagggcctgcaggacagcgacttccagcagctggtgcagcccagactggtggacagcttcctgctgtgcagcaacatggaggagagcttcgtgtag

SEQ ID NO: 85292 - DNA, 927 bp, synthetic construct
  misc_feature 1..927: note = Description of Artificial Sequence: Synthetic coding sequence
  source 1..927: mol_type = other DNA
atgatggccctgcccggcggcagacacctggacagcgtgaccctgcccggccagagactgcacctgatgcaggtggacagcgtgcagagatggatggaggacctgaagctgatgaccgagtgcgagtgcatgtgcgtgctgcaggccaagcccatcagcctggaggaggacgcccagggcgacctgatcctggccggcggccccggccccggcgaccccctgcagctgctgctgaagagaggctgggtgatcagcaccgagctgagaagaatcggccagaagctggcccaggacagatgggccagagtgcacagcatgagcgtgagactgacctgccacgccagaagcatggtgagcgagtacagcgccgtgagcagaaacagcctgaaggagatgggcgagatcgagaagctgctgatggagaagtgcagcgagctgagcgccgtgaccgagagatgcctgcaggtggagaacgagcacgtgctgaagagcatgaaggcctgcgtgagcgagaccctgagcatgctgggccagcacttcggccagctgctggagctggccctgaccagagaggtgcaggtggagagccacagcgtgaccagactggagtgcagcggcgccatcagcgcccagtgcaacctgagactgctgggcagcagcgacagccccgccagcgccagccaggccctggtgagaaagatcgacgccagcgacaacatctacaccaccgagagcaccaccggcaacctgttcagcctgacccaggagggcgcccccctgtgcagaatcatcgccaaggagggcggcgtggtggccctgttcaaggtgtgcagacaggacagcttcagatgcctgtacccccaggccctgagaaccctggccagcatctgctgcgtggaggagggcgtgcaccagctggagaagtag

SEQ ID NO: 85293 - DNA, 1473 bp, synthetic construct
  misc_feature 1..1473: note = Description of Artificial Sequence: Synthetic coding sequence
  source 1..1473: mol_type = other DNA
atgatggccctgcccggcggcagacacctggacagcgtgaccctgcccggccagagactgcacctgatgcaggtggacagcgtgcagagatggatggaggacctgaagctgatgaccgagtgcgagtgcatgtgcgtgctgcaggccaagcccatcagcctggaggaggacgcccagggcgacctgatcctggccggcggccccggccccggcgaccccctgcagctgctgctgaagagaggctgggtgatcagcaccgagctgagaagaatcggccagaagctggcccaggacagatgggccagagtgcacagcatgagcgtgagactgacctgccacgccagaagcatggtgagcgagtacagcgccgtgagcagaaacagcctgaaggagatgggcgagatcgagaagctgctgatggagaagtgcagcgagctgagcgccgtgaccgagagatgcctgcaggtggagaacgagcacgtgctgaagagcatgaaggcctgcgtgagcgagaccctgagcatgctgggccagcacttcggccagctgctggagctggccctgaccagagaggtgcaggccctggtgagaaagatcgacgccagcgacaacatctacaccaccgagagcaccaccggcaacctgttcagcctgacccaggagggcgcccccctgtgcagaatcatcgccaaggtggacggcgtgctgtgcctggccgacatcctgaccgacaacagccacagcgaggccaccagagccgaggccgccgccgtggtggcccaggtgaccagcccccacctgcccgtgacccagcacctgagcagcttcctggagagcatggaggagatcgtgaccgccctggtgaagctgtgccaggaggccagcagcggcgaggtgttcctgctggccagcgccgccctggccaacatcaccttcttcgacaccatggcctgcgagatgctgctgcagctgaacgccatcagagtgctgctggaggcctgcagcgacaagcagagagtggacaccccctacaccagagaccagatcgtgaccatcctggccaacatgagcgtgctggagcagtgcgccagcgacatcatccaggagaacggcgtgcagctgatcatgggcatgctgagcgagaagcccagaagcggcacccccgccgaggtggccgcctgcgagagagtgcagcagaaggccgccgtgaccctggccagactgagcagagaccccgacgtggccagagaggccgtgagactgagctgcatgagcagactgatcgagctgtgcagaagccccagcgagagaaacagcagcgacgccgtgctggtggcctgcctggccgccctgagaagactggccggcgtgtgccccgagggcctgcaggacagcgacttccagcagctggtgcagcccagactggtggacagcttcctgctgtgcagcaacatggaggagagcttcgtgtag

SEQ ID NO: 85294 - DNA, 1473 bp, synthetic construct; identical to SEQ ID NO: 85293
  misc_feature 1..1473: note = Description of Artificial Sequence: Synthetic coding sequence
  source 1..1473: mol_type = other DNA

SEQ ID NO: 85295 - DNA, 1599 bp, synthetic construct; identical to SEQ ID NO: 85291
  misc_feature 1..1599: note = Description of Artificial Sequence: Synthetic coding sequence
  source 1..1599: mol_type = other DNA

SEQ ID NO: 85296 - DNA, 834 bp, synthetic construct
  misc_feature 1..834: note = Description of Artificial Sequence: Synthetic coding sequence
  source 1..834: mol_type = other DNA
atgcccagactgcacgaccacttctggagctgcagctgcgcccacagcgccagaagaagaggcccccccagagccagcgccgccggcctggccgccaaggtgggcgagatgatcaacgtgagcgtgagcggccccagcctgctggccgcccacggcgcccccgacgccgaccccgcccccagaggcagaagcgccgccatgagcggccccgagcccggcagcccctaccccaacacctggcaccacagactgctgcagagaagcctggtgctgttcagcgtgggcgtggtgctggccctggtgctgaacctgctgcagatccagagaaacgtgaccctgttccccgaggaggtgatcgccaccatcttcagcagcgcctggtgggtgcccccctgctgcggcaccgccgccgccgtggtgggcctgctgtacccctgcatcgacagccacctgggcgagccccacaagttcaagagagagtgggccagcgtgatgagatgcatcgccgtgttcgtgggcatcaaccacgccagcgccaagctggacttcgccaacaacgtgcagctgagcctgaccctggccgccctgagcctgggcctgtggtggaccttcgacagaagcagaagcggcctgggcctgggcatcaccatcgccttcctggccaccctgatcacccagttcctggtgtacaacggcgtgtaccagtacaccagccccgacttcctgtacatcagaagctggctgccctgcatcttcttcagcggcggcgtgaccgtgggcaacatcggcagacagctggccatgggcgtgcccgagaagccccacagcgactag

SEQ ID NO: 85297 - DNA, 537 bp, synthetic construct
  misc_feature 1..537: note = Description of Artificial Sequence: Synthetic coding sequence
  source 1..537: mol_type = other DNA
atgcccagactgcacgaccacttctggagctgcagctgcgcccacagcgccagaagaagaggcccccccagagccagcgccaagctggacttcgccaacaacgtgcagctgagcctgaccctggccgccctgagcctgggcctgtggtggaccttcgacagaagcagaagcggcctgggcctgggcatcaccatcgccttcctggccaccctgatcacccagttcctggtgtacaacggcgtgtaccagtacaccagccccgacttcctgtacatcagaagctggctgccctgcatcttcttcagcggcggcgtgaccgtgggcaacatcggcagacagctggccatgctgatccccttctgcgaggagctgaacctgaagaccacctggctgttccacaagaccagaagcaactacagagtgttcctgaagagccccatcgtgatcgagagcagcaagccccccatcctgagagccagaaagatcctggaggagaacctgaccgtggactacgacaaggactacctgttcagctag

SEQ ID NO: 85298 - DNA, 372 bp, synthetic construct
  misc_feature 1..372: note = Description of Artificial Sequence: Synthetic coding sequence
  source 1..372: mol_type = other DNA
atgcccagactgcacgaccacttctggagctgcagctgcgcccacagcgccagaagaagaggcccccccagagccagcgccgccggcctggccgccaaggtgggcgagatgatcaacgtgagcgtgagcggccccagcctgctggccgcccacggcgcccccgacgccgaccccgcccccagaggcagaagcgccgccatgagcggccccgagcccggcagcccctaccccaacacctggcaccacagactgctgcagagaagcctggtgctgttcagcgtgggcgtggtgctggccctggtgctgaacctgctgcagatccagagaaacgtgaccctgttccccgaggaggtgatcgccaccatcttctag

SEQ ID NO: 85299 - DNA, 495 bp, synthetic construct
  misc_feature 1..495: note = Description of Artificial Sequence: Synthetic coding sequence
  source 1..495: mol_type = other DNA
atgcccagactgcacgaccacttctggagctgcagctgcgcccacagcgccagaagaagaggcccccccagagccagcgccgccggcctggccgccaaggtgggcgagatgatcaacgtgagcgtgagcggccccagcctgctggccgcccacggcgcccccgacgccgaccccgcccccagaggcagaagcgccgccatgagcggccccgagcccggcagcccctaccccaacacctggcaccacagactgctgcagagaagcctggtgctgttcagcgtgggcgtggtgctggccctggtgctgaacctgctgcagatccagagaaacgtgaccctgttccccgaggaggtgatcgccaccatcttcagcagcgcctggtgggtgcccccctgctgcggcaccgccgccggcatccacccccagatcagcagcatcttcgtgctgggcagcctggtgtacttcagccaggaggccagcagatggggcacctag

SEQ ID NO: 85300 - DNA, 678 bp, synthetic construct
  misc_feature 1..678: note = Description of Artificial Sequence: Synthetic coding sequence
  source 1..678: mol_type = other DNA
atggccgagggcgagaccgagagccccggccccaagaagtgcggcccctacatcagcagcgtgaccagccagagcgtgaacctgatgatcagaggcgtggtgctgttcttcatcggcgtgttcctggccctggtgctgaacctgctgcagatccagagaaacgtgaccctgttcccccccgacgtgatcgccagcatcttcagcagcgcctggtgggtgcccccctgctgcggcaccgccagcgccgtgatcggcctgctgtacccctgcatcgacagacacctgggcgagccccacaagttcaagagagagtggagcagcgtgatgagatgcgtggccgtgttcgtgggcatcaaccacgccagcgccaaggtggacttcgacaacaacatccagctgagcctgaccctggccgccctgagcatcggcctgtggtggaccttcgacagaagcagaagcggcttcggcctgggcgtgggcatcgccttcctggccaccgtggtgacccagctgctggtgtacaacggcgtgtaccagtacaccagccccgacttcctgtacgtgagaagctggctgccctgcatcttcttcgccggcggcatcaccatgggcaacatcggcagacagctggccatgtacgagtgcaaggtgatcgccgagaagagccaccaggagtag

SEQ ID NO: 85301 - DNA, 4149 bp, synthetic construct
  misc_feature 1..4149: note = Description of Artificial Sequence: Synthetic coding sequence
  source 1..4149: mol_type = other DNA
atggccaccggcggcagaagaggcgccgccgccgcccccctgctggtggccgtggccgccctgctgctgggcgccgccggccacctgtaccccggcgaggtgtgccccggcatggacatcagaaacaacctgaccagactgcacgagctggagaactgcagcgtgatcgagggccacctgcagatcctgctgatgttcaagaccagacccgaggacttcagagacctgagcttccccaagctgatcatgatcaccgactacctgctgctgttcagagtgtacggcctggagagcctgaaggacctgttccccaacctgaccgtgatcagaggcagcagactgttcttcaactacgccctggtgatcttcgagatggtgcacctgaaggagctgggcctgtacaacctgatgaacatcaccagaggcagcgtgagaatcgagaagaacaacgagctgtgctacctggccaccatcgactggagcagaatcctggacagcgtggaggacaactacatcgtgctgaacaaggacgacaacgaggagtgcggcgacatctgccccggcaccgccaagggcaagaccaactgccccgccaccgtgatcaacggccagttcgtggagagatgctggacccacagccactgccagaaggtgtgccccaccatctgcaagagccacggctgcaccgccgagggcctgtgctgccacagcgagtgcctgggcaactgcagccagcccgacgaccccaccaagtgcgtggcctgcagaaacttctacctggacggcagatgcgtggagacctgcccccccccctactaccacttccaggactggagatgcgtgaacttcagcttctgccaggacctgcaccacaagtgcaagaacagcagaagacagggctgccaccagtacgtgatccacaacaacaagtgcatccccgagtgccccagcggctacaccatgaacagcagcaacctgctgtgcaccccctgcctgggcccctgccccaaggtgtgccacctgctggagggcgagaagaccatcgacagcgtgaccagcgcccaggagctgagaggctgcaccgtgatcaacggcagcctgatcatcaacatcagaggcggcaacaacctggccgccgagctggaggccaacctgggcctgatcgaggagatcagcggctacctgaagatcagaagaagctacgccctggtgagcctgagcttcttcagaaagctgagactgatcagaggcgagaccctggagatcggcaactacagcttctacgccctggacaaccagaacctgagacagctgtgggactggagcaagcacaacctgaccatcacccagggcaagctgttcttccactacaaccccaagctgtgcctgagcgagatccacaagatggaggaggtgagcggcaccaagggcagacaggagagaaacgacatcgccctgaagaccaacggcgaccaggccagctgcgagaacgagctgctgaagttcagctacatcagaaccagcttcgacaagatcctgctgagatgggagccctactggccccccgacttcagagacctgctgggcttcatgctgttctacaaggaggccccctaccagaacgtgaccgagttcgacggccaggacgcctgcggcagcaacagctggaccgtggtggacatcgacccccccctgagaagcaacgaccccaagagccagaaccaccccggctggctgatgagaggcctgaagccctggacccagtacgccatcttcgtgaagaccctggtgaccttcagcgacgagagaagaacctacggcgccaagagcgacatcatctacgtgcagaccgacgccaccaaccccagcgtgcccctggaccccatcagcgtgagcaacagcagcagccagatcatcctgaagtggaagccccccagcgaccccaacggcaacatcacccactacctggtgttctgggagagacaggccgaggacagcgagctgttcgagctggactactgcctgaagggcctgaagctgcccagcagaacctggagcccccccttcgagagcgaggacagccagaagcacaaccagagcgagtacgaggacagcgccggcgagtgctgcagctgccccaagaccgacagccagatcctgaaggagctggaggagagcagcttcagaaagaccttcgaggactacctgcacaacgtggtgttcgtgcccagaaagaccagcagcggcaccggcgccgaggaccccagacccagcagaaagagaagaagcctgggcgacgtgggcaacgtgaccgtggccgtgcccaccgtggccgccttccccaacaccagcagcaccagcgtgcccaccagccccgaggagcacagacccttcgagaaggtggtgaacaaggagagcctggtgatcagcggcctgagacacttcaccggctacagaatcgagctgcaggcctgcaaccaggacacccccgaggagagatgcagcgtggccgcctacgtgagcgccagaaccatgcccgaggccaaggccgacgacatcgtgggccccgtgacccacgagatcttcgagaacaacgtggtgcacctgatgtggcaggagcccaaggagcccaacggcctgatcgtgctgtacgaggtgagctacagaagatacggcgacgaggagctgcacctgtgcgtgagcagaaagcacttcgccctggagagaggctgcagactgagaggcctgagccccggcaactacagcgtgagaatcagagccaccagcctggccggcaacggcagctggaccgagcccacctacttctacgtgaccgactacctggacgtgcccagcaacatcgccaagatcatcatcggccccctgatcttcgtgttcctgttcagcgtggtgatcggcagcatctacctgttcctgagaaagagacagcccgacggccccctgggccccctgtacgccagcagcaaccccgagtacctgagcgccagcgacgtgttcccctgcagcgtgtacgtgcccgacgagtgggaggtgagcagagagaagatcaccctgctgagagagctgggccagggcagcttcggcatggtgtacgagggcaacgccagagacatcatcaagggcgaggccgagaccagagtggccgtgaagaccgtgaacgagagcgccagcctgagagagagaatcgagttcctgaacgaggccagcgtgatgaagggcttcacctgccaccacgtggtgagactgctgggcgtggtgagcaagggccagcccaccctggtggtgatggagctgatggcccacggcgacctgaagagctacctgagaagcctgagacccgaggccgagaacaaccccggcagacccccccccaccctgcaggagatgatccagatggccgccgagatcgccgacggcatggcctacctgaacgccaagaagttcgtgcacagagacctggccgccagaaactgcatggtggcccacgacttcaccgtgaagatcggcgacttcggcatgaccagagacatctacgagaccgactactacagaaagggcggcaagggcctgctgcccgtgagatggatggcccccgagagcctgaaggacggcgtgttcaccaccagcagcgacatgtggagcttcggcgtggtgctgtgggagatcaccagcctggccgagcagccctaccagggcctgagcaacgagcaggtgctgaagttcgtgatggacggcggctacctggaccagcccgacaactgccccgagagagtgaccgacctgatgagaatgtgctggcagttcaaccccaagatgagacccaccttcctggagatcgtgaacctgctgaaggacgacctgcaccccagcttccccgaggtgagcttcttccacagcgaggagaacaaggcccccgagagcgaggagctggagatggagttcgaggacatggagaacgtgcccctggacagaagcagccactgccagagagaggaggccggcggcagagacggcggcagcagcctgggcttcaagagaagctacgaggagcacatcccctacacccacatgaacggcggcaagaagaacggcagaatcctgaccctgcccagaagcaaccccagctag

SEQ ID NO: 85302 - DNA, 4113 bp, synthetic construct
  misc_feature 1..4113: note = Description of Artificial Sequence: Synthetic coding sequence
  source 1..4113: mol_type = other DNA
atggccaccggcggcagaagaggcgccgccgccgcccccctgctggtggccgtggccgccctgctgctgggcgccgccggccacctgtaccccggcgaggtgtgccccggcatggacatcagaaacaacctgaccagactgcacgagctggagaactgcagcgtgatcgagggccacctgcagatcctgctgatgttcaagaccagacccgaggacttcagagacctgagcttccccaagctgatcatgatcaccgactacctgctgctgttcagagtgtacggcctggagagcctgaaggacctgttccccaacctgaccgtgatcagaggcagcagactgttcttcaactacgccctggtgatcttcgagatggtgcacctgaaggagctgggcctgtacaacctgatgaacatcaccagaggcagcgtgagaatcgagaagaacaacgagctgtgctacctggccaccatcgactggagcagaatcctggacagcgtggaggacaactacatcgtgctgaacaaggacgacaacgaggagtgcggcgacatctgccccggcaccgccaagggcaagaccaactgccccgccaccgtgatcaacggccagttcgtggagagatgctggacccacagccactgccagaaggtgtgccccaccatctgcaagagccacggctgcaccgccgagggcctgtgctgccacagcgagtgcctgggcaactgcagccagcccgacgaccccaccaagtgcgtggcctgcagaaacttctacctggacggcagatgcgtggagacctgcccccccccctactaccacttccaggactggagatgcgtgaacttcagcttctgccaggacctgcaccacaagtgcaagaacagcagaagacagggctgccaccagtacgtgatccacaacaacaagtgcatccccgagtgccccagcggctacaccatgaacagcagcaacctgctgtgcaccccctgcctgggcccctgccccaaggtgtgccacctgctggagggcgagaagaccatcgacagcgtgaccagcgcccaggagctgagaggctgcaccgtgatcaacggcagcctgatcatcaacatcagaggcggcaacaacctggccgccgagctggaggccaacctgggcctgatcgaggagatcagcggctacctgaagatcagaagaagctacgccctggtgagcctgagcttcttcagaaagctgagactgatcagaggcgagaccctggagatcggcaactacagcttctacgccctggacaaccagaacctgagacagctgtgggactggagcaagcacaacctgaccatcacccagggcaagctgttcttccactacaaccccaagctgtgcctgagcgagatccacaagatggaggaggtgagcggcaccaagggcagacaggagagaaacgacatcgccctgaagaccaacggcgaccaggccagctgcgagaacgagctgctgaagttcagctacatcagaaccagcttcgacaagatcctgctgagatgggagccctactggccccccgacttcagagacctgctgggcttcatgctgttctacaaggaggccccctaccagaacgtgaccgagttcgacggccaggacgcctgcggcagcaacagctggaccgtggtggacatcgacccccccctgagaagcaacgaccccaagagccagaaccaccccggctggctgatgagaggcctgaagccctggacccagtacgccatcttcgtgaagaccctggtgaccttcagcgacgagagaagaacctacggcgccaagagcgacatcatctacgtgcagaccgacgccaccaaccccagcgtgcccctggaccccatcagcgtgagcaacagcagcagccagatcatcctgaagtggaagccccccagcgaccccaacggcaacatcacccactacctggtgttctgggagagacaggccgaggacagcgagctgttcgagctggactactgcctgaagggcctgaagctgcccagcagaacctggagcccccccttcgagagcgaggacagccagaagcacaaccagagcgagtacgaggacagcgccggcgagtgctgcagctgccccaagaccgacagccagatcctgaaggagctggaggagagcagcttcagaaagaccttcgaggactacctgcacaacgtggtgttcgtgcccagacccagcagaaagagaagaagcctgggcgacgtgggcaacgtgaccgtggccgtgcccaccgtggccgccttccccaacaccagcagcaccagcgtgcccaccagccccgaggagcacagacccttcgagaaggtggtgaacaaggagagcctggtgatcagcggcctgagacacttcaccggctacagaatcgagctgcaggcctgcaaccaggacacccccgaggagagatgcagcgtggccgcctacgtgagcgccagaaccatgcccgaggccaaggccgacgacatcgtgggccccgtgacccacgagatcttcgagaacaacgtggtgcacctgatgtggcaggagcccaaggagcccaacggcctgatcgtgctgtacgaggtgagctacagaagatacggcgacgaggagctgcacctgtgcgtgagcagaaagcacttcgccctggagagaggctgcagactgagaggcctgagccccggcaactacagcgtgagaatcagagccaccagcctggccggcaacggcagctggaccgagcccacctacttctacgtgaccgactacctggacgtgcccagcaacatcgccaagatcatcatcggccccctgatcttcgtgttcctgttcagcgtggtgatcggcagcatctacctgttcctgagaaagagacagcccgacggccccctgggccccctgtacgccagcagcaaccccgagtacctgagcgccagcgacgtgttcccctgcagcgtgtacgtgcccgacgagtgggaggtgagcagagagaagatcaccctgctgagagagctgggccagggcagcttcggcatggtgtacgagggcaacgccagagacatcatcaagggcgaggccgagaccagagtggccgtgaagaccgtgaacgagagcgccagcctgagagagagaatcgagttcctgaacgaggccagcgtgatgaagggcttcacctgccaccacgtggtgagactgctgggcgtggtgagcaagggccagcccaccctggtggtgatggagctgatggcccacggcgacctgaagagctacctgagaagcctgagacccgaggccgagaacaaccccggcagacccccccccaccctgcaggagatgatccagatggccgccgagatcgccgacggcatggcctacctgaacgccaagaagttcgtgcacagagacctggccgccagaaactgcatggtggcccacgacttcaccgtgaagatcggcgacttcggcatgaccagagacatctacgagaccgactactacagaaagggcggcaagggcctgctgcccgtgagatggatggcccccgagagcctgaaggacggcgtgttcaccaccagcagcgacatgtggagcttcggcgtggtgctgtgggagatcaccagcctggccgagcagccctaccagggcctgagcaacgagcaggtgctgaagttcgtgatggacggcggctacctggaccagcccgacaactgccccgagagagtgaccgacctgatgagaatgtgctggcagttcaaccccaagatgagacccaccttcctggagatcgtgaacctgctgaaggacgacctgcaccccagcttccccgaggtgagcttcttccacagcgaggagaacaaggcccccgagagcgaggagctggagatggagttcgaggacatggagaacgtgcccctggacagaagcagccactgccagagagaggaggccggcggcagagacggcggcagcagcctgggcttcaagagaagctacgaggagcacatcccctacacccacatgaacggcggcaagaagaacggcagaatcctgaccctgcccagaagcaaccccagctag

SEQ ID NO: 85303 - DNA, 252 bp, synthetic construct
  misc_feature 1..252: note = Description of Artificial Sequence: Synthetic coding sequence
  source 1..252: mol_type = other DNA
ccctaccagaacgtgaccgagttcgacggccaggacgcctgcggcagcaacagctggaccgtggtggacatcgacccccccctgagaagcaacgaccccaagagccagaaccaccccggctggctgatgagaggcctgaagccctggacccagtacgccatcttcgtgaagaccctggtgaccttcagcgacgagagaagaacctacggcgccaagagcgacatcatctacgtgcagaccgacgccacctag

SEQ ID NO: 85304 - DNA, 4017 bp, synthetic construct
  misc_feature 1..4017: note = Description of Artificial Sequence: Synthetic coding sequence
  source 1..4017: mol_type = other DNA
atggccagcccccccagacacggcccccccggccccgccagcggcgacggccccaacctgaacaacaacaacaacaacaacaaccacagcgtgagaaagtgcggctacctgagaaagcagaagcacggccacaagagattcttcgtgctgagaggccccggcgccggcggcgacgaggccaccgccggcggcggcagcgccccccagccccccagactggagtactacgagagcgagaagaagtggagaagcaaggccggcgcccccaagagagtgatcgccctggactgctgcctgaacatcaacaagagagccgacgccaagcacaagtacctgatcgccctgtacaccaaggacgagtacttcgccgtggccgccgagaacgagcaggagcaggagggctggtacagagccctgaccgacctggtgagcgagggcagagccgccgccggcgacgccccccccgccgccgcccccgccgccagctgcagcgccagcctgcccggcgccctgggcggcagcgccggcgccgccggcgccgaggacagctacggcctggtggcccccgccaccgccgcctacagagaggtgtggcaggtgaacctgaagcccaagggcctgggccagagcaagaacctgaccggcgtgtacagactgtgcctgagcgccagaaccatcggcttcgtgaagctgaactgcgagcagcccagcgtgaccctgcagctgatgaacatcagaagatgcggccacagcgacagcttcttcttcatcgaggtgggcagaagcgccgtgaccggccccggcgagctgtggatgcaggccgacgacagcgtggtggcccagaacatccacgagaccatcctggaggccatgaaggccctgaaggagctgttcgagttcagacccagaagcaagagccagagcagcggcagcagcgccacccaccccatcagcgtgcccggcgccagaagacaccaccacctggtgaacctgccccccagccagaccggcctggtgagaagaagcagaaccgacagcctggccgccaccccccccgccgccaagtgcagcagctgcagagtgagaaccgccagcgagggcgacggcggcgccgccgccggcgccgccgccgccggcgccagacccgtgagcgtggccggcagccccctgagccccggccccgtgagagcccccctgagcagaagccacaccctgagcggcggctgcggcggcagaggcagcaaggtggccctgctgcccgccggcggcgccctgcagcacagcagaagcatgagcatgcccgtggcccacagcccccccgccgccaccagccccggcagcctgagcagcagcagcggccacggcagcggcagctacccccccccccccggcccccacccccccctgccccaccccctgcaccacggccccggccagagacccagcagcggcagcgccagcgccagcggcagccccagcgaccccggcttcatgagcctggacgagtacggcagcagccccggcgacctgagagccttctgcagccacagaagcaacacccccgagagcatcgccgagaccccccccgccagagacggcggcggcggcggcgagttctacggctacatgaccatggacagacccctgagccactgcggcagaagctacagaagagtgagcggcgacgccgcccaggacctggacagaggcctgagaaagagaacctacagcctgaccacccccgccagacagagacccgtgccccagcccagcagcgccagcctggacgagtacaccctgatgagagccaccttcagcggcagcgccggcagactgtgccccagctgccccgccagcagccccaaggtggcctaccacccctaccccgaggactacggcgacatcgagatcggcagccacagaagcagcagcagcaacctgggcgccgacgacggctacatgcccatgacccccggcgccgccctggccggcagcggcagcggcagctgcagaagcgacgactacatgcccatgagccccgccagcgtgagcgcccccaagcagatcctgcagcccagagccgccgccgccgccgccgccgccgtgcccagcgccggccccgccggccccgcccccaccagcgccgccggcagaaccttccccgccagcggcggcggctacaaggccagcagccccgccgagagcagccccgaggacagcggctacatgagaatgtggtgcggcagcaagctgagcatggagcacgccgacggcaagctgctgcccaacggcgactacctgaacgtgagccccagcgacgccgtgaccaccggcaccccccccgacttcttcagcgccgccctgcaccccggcggcgagcccctgagaggcgtgcccggctgctgctacagcagcctgcccagaagctacaaggccccctacacctgcggcggcgacagcgaccagtacgtgctgatgagcagccccgtgggcagaatcctggaggaggagagactggagccccaggccacccccggccccagccaggccgccagcgccttcggcgccggccccacccagcccccccaccccgtggtgcccagccccgtgagacccagcggcggcagacccgagggcttcctgggccagagaggcagagccgtgagacccaccagactgagcctggagggcctgcccagcctgcccagcatgcacgagtaccccctgccccccgagcccaagagccccggcgagtacatcaacatcgacttcggcgagcccggcgccagactgagcccccccgccccccccctgctggccagcgccgccagcagcagcagcctgctgagcgccagcagccccgccagcagcctgggcagcggcacccccggcaccagcagcgacagcagacagagaagccccctgagcgactacatgaacctggacttcagcagccccaagagccccaagcccggcgcccccagcggccaccccgtgggcagcctggacggcctgctgagccccgaggccagcagcccctacccccccctgccccccagacccagcgccagccccagcagcagcctgcagccccccccccccccccccgcccccggcgagctgtacagactgccccccgccagcgccgtggccaccgcccagggccccggcgccgccagcagcctgagcagcgacaccggcgacaacggcgactacaccgagatggccttcggcgtggccgccacccccccccagcccatcgccgccccccccaagcccgaggccgccagagtggccagccccaccagcggcgtgaagagactgagcctgatggagcaggtgagcggcgtggaggccttcctgcaggccagccagccccccgacccccacagaggcgccaaggtgatcagagccgacccccagggcggcagaagaagacacagcagcgagaccttcagcagcaccaccaccgtgacccccgtgagccccagcttcgcccacaaccccaagagacacaacagcgccagcgtggagaacgtgagcctgagaaagagcagcgagggcggcgtgggcgtgggccccggcggcggcgacgagccccccaccagccccagacagctgcagcccgccccccccctggccccccagggcagaccctggacccccggccagcccggcggcctggtgggctgccccggcagcggcggcagccccatgagaagagagaccagcgccggcttccagaacggcctgaactacatcgccatcgacgtgagagaggagcccggcctgcccccccagccccagcccccccccccccccctgccccagcccggcgacaagagcagctggggcagaaccagaagcctgggcggcctgatcagcgccgtgggcgtgggcagcaccggcggcggctgcggcggccccggccccggcgccctgccccccgccaacacctacgccagcatcgacttcctgagccaccacctgaaggaggccaccatcgtgaaggagtag

SEQ ID NO: 85305 - DNA, 3894 bp, synthetic construct
  misc_feature 1..3894: note = Description of Artificial Sequence: Synthetic coding sequence
  source 1..3894: mol_type = other DNA
atggccgtgcccagcctgtggccctggggcgcctgcctgcccgtgatcttcctgagcctgggcttcggcctggacaccgtggaggtgtgccccagcctggacatcagaagcgaggtggccgagctgagacagctggagaactgcagcgtggtggagggccacctgcagatcctgctgatgttcaccgccaccggcgaggacttcagaggcctgagcttccccagactgacccaggtgaccgactacctgctgctgttcagagtgtacggcctggagagcctgagagacctgttccccaacctggccgtgatcagaggcaccagactgttcctgggctacgccctggtgatcttcgagatgccccacctgagagacgtggccctgcccgccctgggcgccgtgctgagaggcgccgtgagagtggagaagaaccaggagctgtgccacctgagcaccatcgactggggcctgctgcagcccgcccccggcgccaaccacatcgtgggcaacaagctgggcgaggagtgcgccgacgtgtgccccggcgtgctgggcgccgccggcgagccctgcgccaagaccaccttcagcggccacaccgactacagatgctggaccagcagccactgccagagagtgtgcccctgcccccacggcatggcctgcaccgccagaggcgagtgctgccacaccgagtgcctgggcggctgcagccagcccgaggaccccagagcctgcgtggcctgcagacacctgtacttccagggcgcctgcctgtgggcctgcccccccggcacctaccagtacgagagctggagatgcgtgaccgccgagagatgcgccagcctgcacagcgtgcccggcagagccagcaccttcggcatccaccagggcagctgcctggcccagtgccccagcggcttcaccagaaacagcagcagcatcttctgccacaagtgcgagggcctgtgccccaaggagtgcaaggtgggcaccaagaccatcgacagcatccaggccgcccaggacctggtgggctgcacccacgtggagggcagcctgatcctgaacctgagacagggctacaacctggagccccagctgcagcacagcctgggcctggtggagaccatcaccggcttcctgaagatcaagcacagcttcgccctggtgagcctgggcttcttcaagaacctgaagctgatcagaggcgacgccatggtggacggcaactacaccctgtacgtgctggacaaccagaacctgcagcagctgggcagctgggtggccgccggcctgaccatccccgtgggcaagatctacttcgccttcaaccccagactgtgcctggagcacatctacagactggaggaggtgaccggcaccagaggcagacagaacaaggccgagatcaaccccagaaccaacggcgacagagccgcctgccagaccagaaccctgagattcgtgagcaacgtgaccgaggccgacagaatcctgctgagatgggagagatacgagcccctggaggccagagacctgctgagcttcatcgtgtactacaaggagagccccttccagaacgccaccgagcacgtgggccccgacgcctgcggcacccagagctggaacctgctggacgtggagctgcccctgagcagaacccaggagcccggcgtgaccctggccagcctgaagccctggacccagtacgccgtgttcgtgagagccatcaccctgaccaccgaggaggacagcccccaccagggcgcccagagccccatcgtgtacctgagaaccctgcccgccgcccccaccgtgccccaggacgtgatcagcaccagcaacagcagcagccacctgctggtgagatggaagccccccacccagagaaacggcaacctgacctactacctggtgctgtggcagagactggccgaggacggcgacctgtacctgaacgactactgccacagaggcctgagactgcccaccagcaacaacgaccccagattcgacggcgaggacggcgaccccgaggccgagatggagagcgactgctgcccctgccagcaccccccccccggccaggtgctgccccccctggaggcccaggaggccagcttccagaagaagttcgagaacttcctgcacaacgccatcaccatccccatcagcccctggaaggtgaccagcatcaacaagagcccccagagagacagcggcagacacagaagagccgccggccccctgagactgggcggcaacagcagcgacttcgagatccaggaggacaaggtgcccagagagagagccgtgctgagcggcctgagacacttcaccgagtacagaatcgacatccacgcctgcaaccacgccgcccacaccgtgggctgcagcgccgccaccttcgtgttcgccagaaccatgccccacagagaggccgacggcatccccggcaaggtggcctgggaggccagcagcaagaacagcgtgctgctgagatggctggagccccccgaccccaacggcctgatcctgaagtacgagatcaagtacagaagactgggcgaggaggccaccgtgctgtgcgtgagcagactgagatacgccaagttcggcggcgtgcacctggccctgctgccccccggcaactacagcgccagagtgagagccaccagcctggccggcaacggcagctggaccgacagcgtggccttctacatcctgggccccgaggaggaggacgccggcggcctgcacgtgctgctgaccgccacccccgtgggcctgaccctgctgatcgtgctggccgccctgggcttcttctacggcaagaagagaaacagaaccctgtacgccagcgtgaaccccgagtacttcagcgccagcgacatgtacgtgcccgacgagtgggaggtgcccagagagcagatcagcatcatcagagagctgggccagggcagcttcggcatggtgtacgagggcctggccagaggcctggaggccggcgaggagagcacccccgtggccctgaagaccgtgaacgagctggccagccccagagagtgcatcgagttcctgaaggaggccagcgtgatgaaggccttcaagtgccaccacgtggtgagactgctgggcgtggtgagccagggccagcccaccctggtgatcatggagctgatgaccagaggcgacctgaagagccacctgagaagcctgagacccgaggccgagaacaaccccggcctgccccagcccgccctgggcgagatgatccagatggccggcgagatcgccgacggcatggcctacctggccgccaacaagttcgtgcacagagacctggccgccagaaactgcatggtgagccaggacttcaccgtgaagatcggcgacttcggcatgaccagagacgtgtacgagaccgactactacagaaagggcggcaagggcctgctgcccgtgagatggatggcccccgagagcctgaaggacggcatcttcaccacccacagcgacgtgtggagcttcggcgtggtgctgtgggagatcgtgaccctggccgagcagccctaccagggcctgagcaacgagcaggtgctgaagttcgtgatggacggcggcgtgctggaggagctggagggctgccccctgcagctgcaggagctgatgagcagatgctggcagcccaaccccagactgagacccagcttcacccacatcctggacagcatccaggaggagctgagacccagcttcagactgctgagcttctactacagccccgagtgcagaggcgccagaggcagcctgcccaccaccgacgccgagcccgacagcagccccacccccagagactgcagcccccagaacggcggccccggccactag

SEQ ID NO: 85306 - DNA, 3060 bp, synthetic construct
  misc_feature 1..3060: note = Description of Artificial Sequence: Synthetic coding sequence
  source 1..3060: mol_type = other DNA
atgagatacagactggcctggctgctgcaccccgccctgcccagcaccttcagaagcgtgctgggcgccagactgcccccccccgagagactgtgcggcttccagaagaagacctacagcaagatgaacaaccccgccatcaagagaatcggcaaccacatcaccaagagccccgaggacaagagagagtacagaggcctggagctggccaacggcatcaaggtgctgctgatcagcgaccccaccaccgacaagagcagcgccgccctggacgtgcacatcggcagcctgagcgacccccccaacatcgccggcctgagccacttctgcgagcacatgctgttcctgggcaccaagaagtaccccaaggagaacgagtacagccagttcctgagcgagcacgccggcagcagcaacgccttcaccagcggcgagcacaccaactactacttcgacgtgagccacgagcacctggagggcgccctggacagattcgcccagttcttcctgtgccccctgttcgacgagagctgcaaggacagagaggtgaacgccgtggacagcgagcacgagaagaacgtgatgaacgacgcctggagactgttccagctggagaaggccaccggcaaccccaagcaccccttcagcaagttcggcaccggcaacaagtacaccctggagaccagacccaaccaggagggcatcgacgtgagacaggagctgctgaagttccacagcgcctactacagcagcaacctgatggccgtgtgcgtgctgggcagagagagcctggacgacctgaccaacctggtggtgaagctgttcagcgaggtggagaacaagaacgtgcccctgcccgagttccccgagcaccccttccaggaggagcacctgaagcagctgtacaagatcgtgcccatcaaggacatcagaaacctgtacgtgaccttccccatccccgacctgcagaagtactacaagagcaaccccggccactacctgggccacctgatcggccacgagggccccggcagcctgctgagcgagctgaagagcaagggctgggtgaacaccctggtgggcggccagaaggagggcgccagaggcttcatgttcttcatcatcaacgtggacctgaccgaggagggcctgctgcacgtggaggacatcatcctgcacatgttccagtacatccagaagctgagagccgagggcccccaggagtgggtgttccaggagtgcaaggacctgaacgccgtggccttcagattcaaggacaaggagagacccagaggctacaccagcaagatcgccggcatcctgcactactaccccctggaggaggtgctgaccgccgagtacctgctggaggagttcagacccgacctgatcgagatggtgctggacaagctgagacccgagaacgtgagagtggccatcgtgagcaagagcttcgagggcaagaccgacagaaccgaggagtggtacggcacccagtacaagcaggaggccatccccgacgaggtgatcaagaagtggcagaacgccgacctgaacggcaagttcaagctgcccaccaagaacgagttcatccccaccaacttcgagatcctgcccctggagaaggaggccaccccctaccccgccctgatcaaggacaccgccatgagcaagctgtggttcaagcaggacgacaagttcttcctgcccaaggcctgcctgaacttcgagttcttcagccccttcgcctacgtggaccccctgcactgcaacatggcctacctgtacctggagctgctgaaggacagcctgaacgagtacgcctacgccgccgagctggccggcctgagctacgacctgcagaacaccatctacggcatgtacctgagcgtgaagggctacaacgacaagcagcccatcctgctgaagaagatcatcgagaagatggccaccttcgagatcgacgagaagagattcgagatcatcaaggaggcctacatgagaagcctgaacaacttcagagccgagcagccccaccagcacgccatgtactacctgagactgctgatgaccgaggtggcctggaccaaggacgagctgaaggaggccctggacgacgtgaccctgcccagactgaaggccttcatcccccagctgctgagcagactgcacatcgaggccctgctgcacggcaacatcaccaagcaggccgccctgggcatcatgcagatggtggaggacaccctgatcgagcacgcccacaccaagcccctgctgcccagccagctggtgagatacagagaggtgcagctgcccgacagaggctggttcgtgtaccagcagagaaacgaggtgcacaacaactgcggcatcgagatctactaccagaccgacatgcagagcaccagcgagaacatgttcctggagctgttctgccagatcatcagcgagccctgcttcaacaccctgagaaccaaggagcagctgggctacatcgtgttcagcggccccagaagagccaacggcatccagggcctgagattcatcatccagagcgagaagcccccccactacctggagagcagagtggaggccttcctgatcaccatggagaagagcatcgaggacatgaccgaggaggccttccagaagcacatccaggccctggccatcagaagactggacaagcccaagaagctgagcgccgagtgcgccaagtactggggcgagatcatcagccagcagtacaacttcgacagagacaacaccgaggtggcctacctgaagaccctgaccaaggaggacatcatcaagttctacaaggagatgctggccgtggacgcccccagaagacacaaggtgagcgtgcacgtgctggccagagagatggacagctgccccgtggtgggcgagttcccctgccagaacgacatcaacctgagccaggcccccgccctgccccagcccgaggtgatccagaacatgaccgagttcaagagaggcctgcccctgttccccctggtgaagccccacatcaacttcatggccgccaagctgtag

SEQ ID NO: 85307 - DNA, 1395 bp, synthetic construct
  misc_feature 1..1395: note = Description of Artificial Sequence: Synthetic coding sequence
  source 1..1395: mol_type = other DNA
atgagcaagctgtggttcaagcaggacgacaagttcttcctgcccaaggcctgcctgaacttcgagttcttcagccccttcgcctacgtggaccccctgcactgcaacatggcctacctgtacctggagctgctgaaggacagcctgaacgagtacgcctacgccgccgagctggccggcctgagctacgacctgcagaacaccatctacggcatgtacctgagcgtgaagggctacaacgacaagcagcccatcctgctgaagaagatcatcgagaagatggccaccttcgagatcgacgagaagagattcgagatcatcaaggaggcctacatgagaagcctgaacaacttcagagccgagcagccccaccagcacgccatgtactacctgagactgctgatgaccgaggtggcctggaccaaggacgagctgaaggaggccctggacgacgtgaccctgcccagactgaaggccttcatcccccagctgctgagcagactgcacatcgaggccctgctgcacggcaacatcaccaagcaggccgccctgggcatcatgcagatggtggaggacaccctgatcgagcacgcccacaccaagcccctgctgcccagccagctggtgagatacagagaggtgcagctgcccgacagaggctggttcgtgtaccagcagagaaacgaggtgcacaacaactgcggcatcgagatctactaccagaccgacatgcagagcaccagcgagaacatgttcctggagctgttctgccagatcatcagcgagccctgcttcaacaccctgagaaccaaggagcagctgggctacatcgtgttcagcggccccagaagagccaacggcatccagggcctgagattcatcatccagagcgagaagcccccccactacctggagagcagagtggaggccttcctgatcaccatggagaagagcatcgaggacatgaccgaggaggccttccagaagcacatccaggccctggccatcagaagactggacaagcccaagaagctgagcgccgagtgcgccaagtactggggcgagatcatcagccagcagtacaacttcgacagagacaacaccgaggtggcctacctgaagaccctgaccaaggaggacatcatcaagttctacaaggagatgctggccgtggacgcccccagaagacacaaggtgagcgtgcacgtgctggccagagagatggacagctgccccgtggtgggcgagttcccctgccagaacgacatcaacctgagccaggcccccgccctgccccagcccgaggtgatccagaacatgaccgagttcaagagaggcctgcccctgttccccctggtgaagccccacatcaacttcatggccgccaagctgtag

SEQ ID NO: 85308 - DNA, 774 bp, synthetic construct
  misc_feature 1..774: note = Description of Artificial Sequence: Synthetic coding sequence
  source 1..774: mol_type = other DNA
gagttcatcatcagaggcggcagagtgcccagccactgcctgcacttcagcagaagcttccagaagaagacctacagcaagatgaacaaccccgccatcaagagaatcggcaaccacatcaccaagagccccgaggacaagagagagtacagaggcctggagctggccaacggcatcaaggtgctgctgatcagcgaccccaccaccgacaagagcagcgccgccctggacgtgcacatcggcagcctgagcgacccccccaacatcgccggcctgagccacttctgcgagcacatgctgttcctgggcaccaagaagtaccccaaggagaacgagtacagccagttcctgagcgagcacgccggcagcagcaacgccttcaccagcggcgagcacaccaactactacttcgacgtgagccacgagcacctggagggcgccctggacagattcgcccagttcttcctgtgccccctgttcgacgagagctgcaaggacagagaggtgaacgccgtggacagcgagcacgagaagaacgtgatgaacgacgcctggagactgttccagctggagaaggccaccggcaaccccaagcaccccttcagcaagttcggcaccggcaacaagtacaccctggagaccagacccaaccaggagggcatcgacgtgagacaggagctgctgaagttccacagcgcctactacagcagcaacctgatggccgtgtgcgtgctgggcagagagagcctggacgacctgaccaacctggtgtag

SEQ ID NO: 85309 - DNA, 396 bp, synthetic construct
  misc_feature 1..396: note = Description of Artificial Sequence: Synthetic coding sequence
  source 1..396: mol_type = other DNA
atggaccccagactgcccgcctgggccctggtgctgctgggccccgccctggtgttcgccctgggccccgcccccacccccgagatgagagagaagctgtgcggccaccacttcgtgagagccctggtgagagtgtgcggcggccccagatggagcaccgaggccagaagacccgccaccggcggcgacagagagctgctgcagtggctggagagaagacacctgctgcacggcctggtggccgacagcaacctgaccctgggccccggcctgcagcccctgccccagaccagccaccaccacagacaccacagagccgccgccaccaaccccgccagatactgctgcctgagcggctgcacccagcaggacctgctgaccctgtgcccctactag

SEQ ID NO: 85310 - DNA, 474 bp, synthetic construct
  misc_feature 1..474: note = Description of Artificial Sequence: Synthetic coding sequence
  source 1..474: mol_type = other DNA
atggaccccagactgcccgcctgggccctggtgctgctgggccccgccctggtgttcgccctgggccccgcccccacccccgagatgagagagaagctgtgcggccaccacttcgtgagagccctggtgagagtgtgcggcggccccagatggagcaccgaggccagaagacccgccaccggcggcgaccagagagagagccacagcgtgagccaggccggcctgaagctgctgagcagcagcaacccccccaccctgaccttccagagcgtgggcatcagcgacgtgagctgctacagcggctggagagacgacatctgcagcatgggctggtggcccaccgtgatcagcagatgggacctggcctgcagcccctgccccagacccctgaccatcaccgccaccaccgtgcagctgccccccaccctgcacgccaccgccgccagcgtggccgtgcccaacaagacctgctag

SEQ ID NO: 85311 - DNA, 420 bp, synthetic construct
  misc_feature 1..420: note = Description of Artificial Sequence: Synthetic coding sequence
  source 1..420: mol_type = other DNA
atggccagcctgttcagaagctacctgcccgccatctggctgctgctgagccagctgctgagagagagcctggccgccgagctgagaggctgcggccccagattcggcaagcacctgctgagctactgccccatgcccgagaagaccttcaccaccacccccggcggctggctgctggagagcggcagacccaaggagatggtgagcaccagcaacaacaaggacggccaggccctgggcaccaccagcgagttcatccccaacctgagccccgagctgaagaagcccctgagcgagggccagcccagcctgaagaagatcatcctgagcagaaagaagagaagcggcagacacagattcgaccccttctgctgcgaggtgatctgcgacgacggcaccagcgtgaagctgtgcacctag

SEQ ID NO: 85312 - DNA, 408 bp, synthetic construct
  misc_feature 1..408: note = Description of Artificial Sequence: Synthetic coding sequence
  source 1..408: mol_type = other DNA
atgaagggcagcatcttcaccctgttcctgttcagcgtgctgttcgccatcagcgaggtgagaagcaaggagagcgtgagactgtgcggcctggagtacatcagaaccgtgatctacatctgcgccagcagcagatggagaagacaccaggagggcatcccccaggcccagcaggccgagaccggcaacagcttccagctgccccacaagagagagttcagcgaggagaaccccgcccagaacctgcccaaggtggacgccagcggcgaggacagactgtggggcggccagatgcccaccgaggagctgtggaagagcaagaagcacagcgtgatgagcagacaggacctgcagaccctgtgctgcaccgacggctgcagcatgaccgacctgagcgccctgtgctag

SEQ ID NO: 85313 - DNA, 642 bp, synthetic construct
  misc_feature 1..642: note = Description of Artificial Sequence: Synthetic coding sequence
  source 1..642: mol_type = other DNA
atgcccagactgctgagactgagcctgctgtggctgggcctgctgctggtgagattcagcagagagctgagcgacatcagcagcgccagaaagctgtgcggcagatacctggtgaaggagatcgagaagctgtgcggccacgccaactggagccagttcagattcgaggaggagacccccttcagcagactgatcgcccaggccagcgagaaggtggaggcctacagcccctaccagttcgagagcccccagaccgccagccccgccagaggcagaggcaccaaccccgtgagcaccagctgggaggaggccgtgaacagctgggagatgcagagcctgcccgagtacaaggacaagaagggctacagccccctgggcaagaccagagagttcagcagcagccacaacatcaacgtgtacatccacgagaacgccaagttccagaagaagagaagaaacaagatcaagaccctgagcaacctgttctggggccaccacccccagagaaagagaagaggctacagcgagaagtgctgcctgaccggctgcaccaaggaggagctgagcatcgcctgcctgccctacatcgacttcaagagactgaaggagaagagaagcagcctggtgaccaagatctactag

SEQ ID NO: 85314 - DNA, 1734 bp, synthetic construct
  misc_feature 1..1734: note = Description of Artificial Sequence: Synthetic coding sequence
  source 1..1734: mol_type = other DNA
atgaacaagctgtacatcggcaacctgaacgagagcgtgacccccgccgacctggagaaggtgttcgccgagcacaagatcagctacagcggccagttcctggtgaagagcggctacgccttcgtggactgccccgacgagcactgggccatgaaggccatcgagaccttcagcggcaaggtggagctgcagggcaagagactggagatcgagcacagcgtgcccaagaagcagagaagcagaaagatccagatcagaaacatccccccccagctgagatgggaggtgctggacagcctgctggcccagtacggcaccgtggagaactgcgagcaggtgaacaccgagagcgagaccgccgtggtgaacgtgacctacagcaacagagagcagaccagacaggccatcatgaagctgaacggccaccagctggagaaccacgccctgaaggtgagctacatccccgacgagcagatcgcccagggccccgagaacggcagaagaggcggcttcggcagcagaggccagcccagacagggcagccccgtggccgccggcgcccccgccaagcagcagcaggtggacatccccctgagactgctggtgcccacccagtacgtgggcgccatcatcggcaaggagggcgccaccatcagaaacatcaccaagcagacccagagcaagatcgacgtgcacagaaaggagaacgccggcgccgccgagaaggccatcagcgtgcacagcacccccgagggctgcagcagcgcctgcaagatgatcctggagatcatgcacaaggaggccaaggacaccaagaccgccgacgaggtgcccctgaagatcctggcccacaacaacttcgtgggcagactgatcggcaaggagggcagaaacctgaagaaggtggagcaggacaccgagaccaagatcaccatcagcagcctgcaggacctgaccctgtacaaccccgagagaaccatcaccgtgaagggcgccatcgagaactgctgcagagccgagcaggagatcatgaagaaggtgagagaggcctacgagaacgacgtggccgccatgagcctgcagagccacctgatccccggcctgaacctggccgccgtgggcctgttccccgccagcagcagcgccgtgccccccccccccagcagcgtgaccggcgccgccccctacagcagcttcatgcaggcccccgagcaggagatggtgcaggtgttcatccccgcccaggccgtgggcgccatcatcggcaagaagggccagcacatcaagcagctgagcagattcgccagcgccagcatcaagatcgccccccccgagacccccgacagcaaggtgagaatggtgatcatcaccggcccccccgaggcccagttcaaggcccagggcagaatctacggcaagctgaaggaggagaacttcttcggccccaaggaggaggtgaagctggagacccacatcagagtgcccgccagcgccgccggcagagtgatcggcaagggcggcaagaccgtgaacgagctgcagaacctgaccgccgccgaggtggtggtgcccagagaccagacccccgacgagaacgaccaggtgatcgtgaagatcatcggccacttctacgccagccagatggcccagagaaagatcagagacatcctggcccaggtgaagcagcagcaccagaagggccagagcaaccaggcccaggccagaagaaagtag

SEQ ID NO: 85315 - DNA, 1317 bp, synthetic construct
  misc_feature 1..1317: note = Description of Artificial Sequence: Synthetic coding sequence
  source 1..1317: mol_type = other DNA
atgaacaagctgtacatcggcaacctgaacgagagcgtgacccccgccgacctggagaaggtgttcgccgagcacaagatcagctacagcggccagttcctggtgaagagcggctacgccttcgtggactgccccgacgagcactgggccatgaaggccatcgagaccttcagcggcaaggtggagctgcagggcaagagactggagatcgagcacagcgtgcccaagaagcagagaagcagaaagatccagatcagaaacatccccccccagctgagatgggaggtgctggacagcctgctggcccagtacggcaccgtggagaactgcgagcaggtgaacaccgagagcgagaccgccgtggtgaacgtgacctacagcaacagagagcagaccagacaggccgacgaggtgcccctgaagatcctggcccacaacaacttcgtgggcagactgatcggcaaggagggcagaaacctgaagaaggtggagcaggacaccgagaccaagatcaccatcagcagcctgcaggacctgaccctgtacaaccccgagagaaccatcaccgtgaagggcgccatcgagaactgctgcagagccgagcaggagatcatgaagaaggtgagagaggcctacgagaacgacgtggccgccatgagcctgcagagccacctgatccccggcctgaacctggccgccgtgggcctgttccccgccagcagcagcgccgtgccccccccccccagcagcgtgaccggcgccgccccctacagcagcttcatgcaggcccccgagcaggagatggtgcaggtgttcatccccgcccaggccgtgggcgccatcatcggcaagaagggccagcacatcaagcagctgagcagattcgccagcgccagcatcaagatcgccccccccgagacccccgacagcaaggtgagaatggtgatcatcaccggcccccccgaggcccagttcaaggcccagggcagaatctacggcaagctgaaggaggagaacttcttcggccccaaggaggaggtgaagctggagacccacatcagagtgcccgccagcgccgccggcagagtgatcggcaagggcggcaagaccgtgaacgagctgcagaacctgaccgccgccgaggtggtggtgcccagagaccagacccccgacgagaacgaccaggtgatcgtgaagatcatcggccacttctacgccagccagatggcccagagaaagatcagagacatcctggcccaggtgaagcagcagcaccagaagggccagagcaaccaggcccaggccagaagaaagtag

SEQ ID NO: 85316 - DNA, 1671 bp, synthetic construct
  misc_feature 1..1671: note = Description of Artificial Sequence: Synthetic coding sequence
  source 1..1671: mol_type = other DNA
atgatgaacaagctgtacatcggcaacctgagccccgccgtgaccgccgacgacctgagacagctgttcggcgacagaaagctgcccctggccggccaggtgctgctgaagagcggctacgccttcgtggactaccccgaccagaactgggccatcagagccatcgagaccctgagcggcaaggtggagctgcacggcaagatcatggaggtggactacagcgtgagcaagaagctgagaagcagaaagatccagatcagaaacatccccccccacctgcagtgggaggtgctggacggcctgctggcccagtacggcaccgtggagaacgtggagcaggtgaacaccgacaccgagaccgccgtggtgaacgtgacctacgccaccagagaggaggccaagatcgccatggagaagctgagcggccaccagttcgagaactacagcttcaagatcagctacatccccgacgaggaggtgagcagccccagccccccccagagagcccagagaggcgaccacagcagcagagagcagggccacgcccccggcggcaccagccaggccagacagatcgacttccccctgagaatcctggtgcccacccagttcgtgggcgccatcatcggcaaggagggcctgaccatcaagaacatcaccaagcagacccagagcagagtggacatccacagaaaggagaacagcggcgccgccgagaagcccgtgaccatccacgccacccccgagggcaccagcgaggcctgcagaatgatcctggagatcatgcagaaggaggccgacgagaccaagctggccgaggagatccccctgaagatcctggcccacaacggcctggtgggcagactgatcggcaaggagggcagaaacctgaagaagatcgagcacgagaccggcaccaagatcaccatcagcagcctgcaggacctgagcatctacaaccccgagagaaccatcaccgtgaagggcaccgtggaggcctgcgccagcgccgagatcgagatcatgaagaagctgagagaggccttcgagaacgacatgctggccgtgaacacccacagcggctacttcagcagcctgtacccccaccaccagttcggccccttcccccaccaccacagctaccccgagcaggagatcgtgaacctgttcatccccacccaggccgtgggcgccatcatcggcaagaagggcgcccacatcaagcagctggccagattcgccggcgccagcatcaagatcgcccccgccgagggccccgacgtgagcgagagaatggtgatcatcaccggcccccccgaggcccagttcaaggcccagggcagaatcttcggcaagctgaaggaggagaacttcttcaaccccaaggaggaggtgaagctggaggcccacatcagagtgcccagcagcaccgccggcagagtgatcggcaagggcggcaagaccgtgaacgagctgcagaacctgaccagcgccgaggtgatcgtgcccagagaccagacccccgacgagaacgaggaggtgatcgtgagaatcatcggccacttcttcgccagccagaccgcccagagaaagatcagagagatcgtgcagcaggtgaagcagcaggagcagaagtacccccagggcgtggccagccagagaagcaagtag

SEQ ID NO: 85317 - DNA, 1800 bp, synthetic construct
  misc_feature 1..1800: note = Description of Artificial Sequence: Synthetic coding sequence
  source 1..1800: mol_type = other DNA
atgatgaacaagctgtacatcggcaacctgagccccgccgtgaccgccgacgacctgagacagctgttcggcgacagaaagctgcccctggccggccaggtgctgctgaagagcggctacgccttcgtggactaccccgaccagaactgggccatcagagccatcgagaccctgagcggcaaggtggagctgcacggcaagatcatggaggtggactacagcgtgagcaagaagctgagaagcagaaagatccagatcagaaacatccccccccacctgcagtgggaggtgctggacggcctgctggcccagtacggcaccgtggagaacgtggagcaggtgaacaccgacaccgagaccgccgtggtgaacgtgacctacgccaccagagaggaggccaagatcgccatggagaagctgagcggccaccagttcgagaactacagcttcaagatcagctacatccccgacgaggaggtgagcagccccagccccccccagagagcccagagaggcgaccacagcagcagagagcagggccacgcccccggcggcaccagccaggccagacagatcgacttccccctgagaatcctggtgcccacccagttcgtgggcgccatcatcggcaaggagggcctgaccatcaagaacatcaccaagcagacccagagcagagtggacatccacagaaaggagaacagcggcgccgccgagaagcccgtgaccatccacgccacccccgagggcaccagcgaggcctgcagaatgatcctggagatcatgcagaaggaggccgacgagaccaagctggccgaggagatccccctgaagatcctggcccacaacggcctggtgggcagactgatcggcaaggagggcagaaacctgaagaagatcgagcacgagaccggcaccaagatcaccatcagcagcctgcaggacctgagcatctacaaccccgagagaaccatcaccgtgaagggcaccgtggaggcctgcgccagcgccgagatcgagatcatgaagaagctgagagaggccttcgagaacgacatgctggccgtgaaccagcaggccaacctgatccccggcctgaacctgagcgccctgggcatcttcagcaccggcctgagcgtgctgagcccccccgccggccccagaggcgccccccccgccgccccctaccaccccttcaccacccacagcggctacttcagcagcctgtacccccaccaccagttcggccccttcccccaccaccacagctaccccgagcaggagatcgtgaacctgttcatccccacccaggccgtgggcgccatcatcggcaagaagggcgcccacatcaagcagctggccagattcgccggcgccagcatcaagatcgcccccgccgagggccccgacgtgagcgagagaatggtgatcatcaccggcccccccgaggcccagttcaaggcccagggcagaatcttcggcaagctgaaggaggagaacttcttcaaccccaaggaggaggtgaagctggaggcccacatcagagtgcccagcagcaccgccggcagagtgatcggcaagggcggcaagaccgtgaacgagctgcagaacctgaccagcgccgaggtgatcgtgcccagagaccagacccccgacgagaacgaggaggtgatcgtgagaatcatcggccacttcttcgccagccagaccgcccagagaaagatcagagagatcgtgcagcaggtgaagcagcaggagcagaagtacccccagggcgtggccagccagagaagcaagtag

SEQ ID NO: 85318 - DNA, 1629 bp, synthetic construct
  misc_feature 1..1629: note = Description of Artificial Sequence: Synthetic coding sequence
  source 1..1629: mol_type = other DNA
atgttcagctgccccggccactaccacgtggacggcttcctgaaccccggcagcagaaagatccagatcagaaacatccccccccacctgcagtgggaggtgctggacggcctgctggcccagtacggcaccgtggagaacgtggagcaggtgttcgccttcagcctggtgaacaccgacaccgagaccgccgtggtgaacgtgacctacgccaccagagaggaggccaagatcgccatggagaagctgagcggccaccagttcgagaactacagcttcaagatcagctacatccccgacgaggaggtgagcagccccagccccccccagagagcccagagaggcgaccacagcagcagagagcagggccacgcccccggcggcaccagccaggccagacagatcgacttccccctgagaatcctggtgcccacccagttcgtgggcgccatcatcggcaaggagggcctgaccatcaagaacatcaccaagcagacccagagcagagtggacatccacagaaaggagaacagcggcgccgccgagaagcccgtgaccatccacgccacccccgagggcaccagcgaggcctgcagaatgatcctggagatcatgcagaaggaggccgacgagaccaagctggccgaggagatccccctgaagatcctggcccacaacggcctggtgggcagactgatcggcaaggagggcagaaacctgaagaagatcgagcacgagaccggcaccaagatcaccatcagcagcctgcaggacctgagcatctacaaccccgagagaaccatcaccgtgaagggcaccgtggaggcctgcgccagcgccgagatcgagatcatgaagaagctgagagaggccttcgagaacgacatgctggccgtgaaccagcaggccaacctgatccccggcctgaacctgagcgccctgggcatcttcagcaccggcctgagcgtgctgagcccccccgccggccccagaggcgccccccccgccgccccctaccaccccttcaccacccacagcggctacttcagcagcctgtacccccaccaccagttcggccccttcccccaccaccacagctaccccgagcaggagatcgtgaacctgttcatccccacccaggccgtgggcgccatcatcggcaagaagggcgcccacatcaagcagctggccagattcgccggcgccagcatcaagatcgcccccgccgagggccccgacgtgagcgagagaatggtgatcatcaccggcccccccgaggcccagttcaaggcccagggcagaatcttcggcaagctgaaggaggagaacttcttcaaccccaaggaggaggtgaagctggaggcccacatcagagtgcccagcagcaccgccggcagagtgatcggcaagggcggcaagaccgtgaacgagctgcagaacctgaccagcgccgaggtgatcgtgcccagagaccagacccccgacgagaacgaggaggtgatcgtgagaatcatcggccacttcttcgccagccagaccgcccagagaaagatcagagagatcgtgcagcaggtgaagcagcaggagcagaagtacccccagggcgtggccagccagagaagcaagtag

SEQ ID NO: 85319 - DNA, 1740 bp, synthetic construct
  misc_feature 1..1740: note = Description of Artificial Sequence: Synthetic coding sequence
  source 1..1740: mol_type = other DNA
atgaacaagctgtacatcggcaacctgagcgagaacgccgcccccagcgacctggagagcatcttcaaggacgccaagatccccgtgagcggccccttcctggtgaagaccggctacgccttcgtggactgccccgacgagagctgggccctgaaggccatcgaggccctgagcggcaagatcgagctgcacggcaagcccatcgaggtggagcacagcgtgcccaagagacagagaatcagaaagctgcagatcagaaacatccccccccacctgcagtgggaggtgctggacagcctgctggtgcagtacggcgtggtggagagctgcgagcaggtgaacaccgacagcgagaccgccgtggtgaacgtgacctacagcagcaaggaccaggccagacaggccctggacaagctgaacggcttccagctggagaacttcaccctgaaggtggcctacatccccgacgagatggccgcccagcagaaccccctgcagcagcccagaggcagaagaggcctgggccagagaggcagcagcagacagggcagccccggcagcgtgagcaagcagaagccctgcgacctgcccctgagactgctggtgcccacccagttcgtgggcgccatcatcggcaaggagggcgccaccatcagaaacatcaccaagcagacccagagcaagatcgacgtgcacagaaaggagaacgccggcgccgccgagaagagcatcaccatcctgagcacccccgagggcaccagcgccgcctgcaagagcatcctggagatcatgcacaaggaggcccaggacatcaagttcaccgaggagatccccctgaagatcctggcccacaacaacttcgtgggcagactgatcggcaaggagggcagaaacctgaagaagatcgagcaggacaccgacaccaagatcaccatcagccccctgcaggagctgaccctgtacaaccccgagagaaccatcaccgtgaagggcaacgtggagacctgcgccaaggccgaggaggagatcatgaagaagatcagagagagctacgagaacgacatcgccagcatgaacctgcaggcccacctgatccccggcctgaacctgaacgccctgggcctgttcccccccaccagcggcatgcccccccccaccagcggcccccccagcgccatgacccccccctacccccagttcgagcagagcgagaccgagaccgtgcacctgttcatccccgccctgagcgtgggcgccatcatcggcaagcagggccagcacatcaagcagctgagcagattcgccggcgccagcatcaagatcgcccccgccgaggcccccgacgccaaggtgagaatggtgatcatcaccggcccccccgaggcccagttcaaggcccagggcagaatctacggcaagatcaaggaggagaacttcgtgagccccaaggaggaggtgaagctggaggcccacatcagagtgcccagcttcgccgccggcagagtgatcggcaagggcggcaagaccgtgaacgagctgcagaacctgagcagcgccgaggtggtggtgcccagagaccagacccccgacgagaacgaccaggtggtggtgaagatcaccggccacttctacgcctgccaggtggcccagagaaagatccaggagatcctgacccaggtgaagcagcaccagcagcagaaggccctgcagagcggccccccccagagcagaagaaagtag

SEQ ID NO: 85320 - DNA, 7476 bp, synthetic construct
  misc_feature 1..7476: note = Description of Artificial Sequence: Synthetic coding sequence
  source 1..7476: mol_type = other DNA
atgggcgccgccgccggcagaagcccccacctgggccccgcccccgccagaagaccccagagaagcctgctgctgctgcagctgctgctgctggtggccgcccccggcagcacccaggcccaggccgcccccttccccgagctgtgcagctacacctgggaggccgtggacaccaagaacaacgtgctgtacaagatcaacatctgcggcagcgtggacatcgtgcagtgcggccccagcagcgccgtgtgcatgcacgacctgaagaccagaacctaccacagcgtgggcgacagcgtgctgagaagcgccaccagaagcctgctggagttcaacaccaccgtgagctgcgaccagcagggcaccaaccacagagtgcagagcagcatcgccttcctgtgcggcaagaccctgggcacccccgagttcgtgaccgccaccgagtgcgtgcactacttcgagtggagaaccaccgccgcctgcaagaaggacatcttcaaggccaacaaggaggtgccctgctacgtgttcgacgaggagctgagaaagcacgacctgaaccccctgatcaagctgagcggcgcctacctggtggacgacagcgaccccgacaccagcctgttcatcaacgtgtgcagagacatcgacaccctgagagaccccggcagccagctgagagcctgcccccccggcaccgccgcctgcctggtgagaggccaccaggccttcgacgtgggccagcccagagacggcctgaagctggtgagaaaggacagactggtgctgagctacgtgagagaggaggccggcaagctggacttctgcgacggccacagccccgccgtgaccatcaccttcgtgtgccccagcgagagaagagagggcaccatccccaagctgaccgccaagagcaactgcagatacgagatcgagtggatcaccgagtacgcctgccacagagactacctggagagcaagacctgcagcctgagcggcgagcagcaggacgtgagcatcgacctgacccccctggcccagagcggcggcagcagctacatcagcgacggcaaggagtacctgttctacctgaacgtgtgcggcgagaccgagatccagttctgcaacaagaagcaggccgccgtgtgccaggtgaagaagagcgacaccagccaggtgaaggccgccggcagataccacaaccagaccctgagatacagcgacggcgacctgaccctgatctacttcggcggcgacgagtgcagcagcggcttccagagaatgagcgtgatcaacttcgagtgcaacaagaccgccggcaacgacggcaagggcacccccgtgttcaccggcgaggtggactgcacctacttcttcacctgggacaccgagtacgcctgcgtgaaggagaaggaggacctgctgtgcggcgccaccgacggcaagaagagatacgacctgagcgccctggtgagacacgccgagcccgagcagaactgggaggccgtggacggcagccagaccgagaccgagaagaagcacttcttcatcaacatctgccacagagtgctgcaggagggcaaggccagaggctgccccgaggacgccgccgtgtgcgccgtggacaagaacggcagcaagaacctgggcaagttcatcagcagccccatgaaggagaagggcaacatccagctgagctacagcgacggcgacgactgcggccacggcaagaagatcaagaccaacatcaccctggtgtgcaagcccggcgacctggagagcgcccccgtgctgagaaccagcggcgagggcggctgcttctacgagttcgagtggcacaccgccgccgcctgcgtgctgagcaagaccgagggcgagaactgcaccgtgttcgacagccaggccggcttcagcttcgacctgagccccctgaccaagaagaacggcgcctacaaggtggagaccaagaagtacgacttctacatcaacgtgtgcggccccgtgagcgtgagcccctgccagcccgacagcggcgcctgccaggtggccaagagcgacgagaagacctggaacctgggcctgagcaacgccaagctgagctactacgacggcatgatccagctgaactacagaggcggcaccccctacaacaacgagagacacacccccagagccaccctgatcaccttcctgtgcgacagagacgccggcgtgggcttccccgagtaccaggaggaggacaacagcacctacaacttcagatggtacaccagctacgcctgccccgaggagcccctggagtgcgtggtgaccgaccccagcaccctggagcagtacgacctgagcagcctggccaagagcgagggcggcctgggcggcaactggtacgccatggacaacagcggcgagcacgtgacctggagaaagtactacatcaacgtgtgcagacccctgaaccccgtgcccggctgcaacagatacgccagcgcctgccagatgaagtacgagaaggaccagggcagcttcaccgaggtggtgagcatcagcaacctgggcatggccaagaccggccccgtggtggaggacagcggcagcctgctgctggagtacgtgaacggcagcgcctgcaccaccagcgacggcagacagaccacctacaccaccagaatccacctggtgtgcagcagaggcagactgaacagccaccccatcttcagcctgaactgggagtgcgtggtgagcttcctgtggaacaccgaggccgcctgccccatccagaccaccaccgacaccgaccaggcctgcagcatcagagaccccaacagcggcttcgtgttcaacctgaaccccctgaacagcagccagggctacaacgtgagcggcatcggcaagatcttcatgttcaacgtgtgcggcaccatgcccgtgtgcggcaccatcctgggcaagcccgccagcggctgcgaggccgagacccagaccgaggagctgaagaactggaagcccgccagacccgtgggcatcgagaagagcctgcagctgagcaccgagggcttcatcaccctgacctacaagggccccctgagcgccaagggcaccgccgacgccttcatcgtgagattcgtgtgcaacgacgacgtgtacagcggccccctgaagttcctgcaccaggacatcgacagcggccagggcatcagaaacacctacttcgagttcgagaccgccctggcctgcgtgcccagccccgtggactgccaggtgaccgacctggccggcaacgagtacgacctgaccggcctgagcaccgtgagaaagccctggaccgccgtggacaccagcgtggacggcagaaagagaaccttctacctgagcgtgtgcaaccccctgccctacatccccggctgccagggcagcgccgtgggcagctgcctggtgagcgagggcaacagctggaacctgggcgtggtgcagatgagcccccaggccgccgccaacggcagcctgagcatcatgtacgtgaacggcgacaagtgcggcaaccagagattcagcaccagaatcaccttcgagtgcgcccagatcagcggcagccccgccttccagctgcaggacggctgcgagtacgtgttcatctggagaaccgtggaggcctgccccgtggtgagagtggagggcgacaactgcgaggtgaaggaccccagacacggcaacctgtacgacctgaagcccctgggcctgaacgacaccatcgtgagcgccggcgagtacacctactacttcagagtgtgcggcaagctgagcagcgacgtgtgccccaccagcgacaagagcaaggtggtgagcagctgccaggagaagagagagccccagggcttccacaaggtggccggcctgctgacccagaagctgacctacgagaacggcctgctgaagatgaacttcaccggcggcgacacctgccacaaggtgtaccagagaagcaccgccatcttcttctactgcgacagaggcacccagagacccgtgttcctgaaggagaccagcgactgcagctacctgttcgagtggagaacccagtacgcctgcccccccttcgacctgaccgagtgcagcttcaaggacggcgccggcaacagcttcgacctgagcagcctgagcagatacagcgacaactgggaggccatcaccggcaccggcgaccccgagcactacctgatcaacgtgtgcaagagcctggccccccaggccggcaccgagccctgcccccccgaggccgccgcctgcctgctgggcggcagcaagcccgtgaacctgggcagagtgagagacggcccccagtggagagacggcatcatcgtgctgaagtacgtggacggcgacctgtgccccgacggcatcagaaagaagagcaccaccatcagattcacctgcagcgagagccaggtgaacagcagacccatgttcatcagcgccgtggaggactgcgagtacaccttcgcctggcccaccgccaccgcctgccccatgaagagcaacgagcacgacgactgccaggtgaccaaccccagcaccggccacctgttcgacctgagcagcctgagcggcagagccggcttcaccgccgcctacagcgagaagggcctggtgtacatgagcatctgcggcgagaacgagaactgcccccccggcgtgggcgcctgcttcggccagaccagaatcagcgtgggcaaggccaacaagagactgagatacgtggaccaggtgctgcagctggtgtacaaggacggcagcccctgccccagcaagagcggcctgagctacaagagcgtgatcagcttcgtgtgcagacccgaggccagacccaccaacagacccatgctgatcagcctggacaagcagacctgcaccctgttcttcagctggcacacccccctggcctgcgagcaggccaccgagtgcagcgtgagaaacggcagcagcatcgtggacctgagccccctgatccacagaaccggcggctacgaggcctacgacgagagcgaggacgacgccagcgacaccaaccccgacttctacatcaacatctgccagcccctgaaccccatgcacggcgtgccctgccccgccggcgccgccgtgtgcaaggtgcccatcgacggcccccccatcgacatcggcagagtggccggcccccccatcctgaaccccatcgccaacgagatctacctgaacttcgagagcagcaccccctgcctggccgacaagcacttcaactacaccagcctgatcgccttccactgcaagagaggcgtgagcatgggcacccccaagctgctgagaaccagcgagtgcgacttcgtgttcgagtgggagacccccgtggtgtgccccgacgaggtgagaatggacggctgcaccctgaccgacgagcagctgctgtacagcttcaacctgagcagcctgagcaccagcaccttcaaggtgaccagagacagcagaacctacagcgtgggcgtgtgcaccttcgccgtgggccccgagcagggcggctgcaaggacggcggcgtgtgcctgctgagcggcaccaagggcgccagcttcggcagactgcagagcatgaagctggactacagacaccaggacgaggccgtggtgctgagctacgtgaacggcgacagatgcccccccgagaccgacgacggcgtgccctgcgtgttccccttcatcttcaacggcaagagctacgaggagtgcatcatcgagagcagagccaagctgtggtgcagcaccaccgccgactacgacagagaccacgagtggggcttctgcagacacagcaacagctacagaaccagcagcatcatcttcaagtgcgacgaggacgaggacatcggcagaccccaggtgttcagcgaggtgagaggctgcgacgtgaccttcgagtggaagaccaaggtggtgtgcccccccaagaagctggagtgcaagttcgtgcagaagcacaagacctacgacctgagactgctgagcagcctgaccggcagctggagcctggtgcacaacggcgtgagctactacatcaacctgtgccagaagatctacaagggccccctgggctgcagcgagagagccagcatctgcagaagaaccaccaccggcgacgtgcaggtgctgggcctggtgcacacccagaagctgggcgtgatcggcgacaaggtggtggtgacctacagcaagggctacccctgcggcggcaacaagaccgccagcagcgtgatcgagctgacctgcaccaagaccgtgggcagacccgccttcaagagattcgacatcgacagctgcacctactacttcagctgggacagcagagccgcctgcgccgtgaagccccaggaggtgcagatggtgaacggcaccatcaccaaccccatcaacggcaagagcttcagcctgggcgacatctacttcaagctgttcagagccagcggcgacatgagaaccaacggcgacaactacctgtacgagatccagctgagcagcatcaccagcagcagaaaccccgcctgcagcggcgccaacatctgccaggtgaagcccaacgaccagcacttcagcagaaaggtgggcaccagcgacaagaccaagtactacctgcaggacggcgacctggacgtggtgttcgccagcagcagcaagtgcggcaaggacaagaccaagagcgtgagcagcaccatcttcttccactgcgaccccctggtggaggacggcatccccgagttcagccacgagaccgccgactgccagtacctgttcagctggtacaccagcgccgtgtgccccctgggcgtgggcttcgacagcgagaaccccggcgacgacggccagatgcacaagggcctgagcgagagaagccaggccgtgggcgccgtgctgagcctgctgctggtggccctgacctgctgcctgctggccctgctgctgtacaagaaggagagaagagagaccgtgatcagcaagctgaccacctgctgcagaagaagcagcaacgtgagctacaagtacagcaaggtgaacaaggaggaggagaccgacgagaacgagaccgagtggctgatggaggagatccagctgcccccccccagacagggcaaggagggccaggagaacggccacatcaccaccaagagcgtgaaggccctgagcagcctgcacggcgacgaccaggacagcgaggacgaggtgctgaccatccccgaggtgaaggtgcacagcggcagaggcgccggcgccgagagcagccaccccgtgagaaacgcccagagcaacgccctgcaggagagagaggacgacagagtgggcctggtgagaggcgagaaggccagaaagggcaagagcagcagcgcccagcagaagaccgtgagcagcaccaagctggtgagcttccacgacgacagcgacgaggacctgctgcacatctag

SEQ ID NO: 85321 - DNA, 780 bp, synthetic construct
  misc_feature 1..780: note = Description of Artificial Sequence: Synthetic coding sequence
  source 1..780: mol_type = other DNA
atgagcgaggtgcccgtggccagagtgtggctggtgctgctgctgctgaccgtgcaggtgggcgtgaccgccggcgccccctggcagtgcgccccctgcagcgccgagaagctggccctgtgcccccccgtgagcgccagctgcagcgaggtgaccagaagcgccggctgcggctgctgccccatgtgcgccctgcccctgggcgccgcctgcggcgtggccaccgccagatgcgccagaggcctgagctgcagagccctgcccggcgagcagcagcccctgcacgccctgaccagaggccagggcgcctgcgtgcaggagagcgacgccagcgccccccacgccgccgaggccggcagccccgagagccccgagagcaccgagatcaccgaggaggagctgctggacaacttccacctgatggcccccagcgaggaggaccacagcatcctgtgggacgccatcagcacctacgacggcagcaaggccctgcacgtgaccaacatcaagaagtggaaggagccctgcagaatcgagctgtacagagtggtggagagcctggccaaggcccaggagaccagcggcgaggagatcagcaagttctacctgcccaactgcaacaagaacggcttctaccacagcagacagtgcgagaccagcatggacggcgaggccggcctgtgctggtgcgtgtacccctggaacggcaagagaatccccggcagccccgagatcagaggcgaccccaactgccagatctacttcaacgtgcagaactag

SEQ ID NO: 85322 - DNA, 777 bp, synthetic construct
  misc_feature 1..777: note = Description of Artificial Sequence: Synthetic coding sequence
  source 1..777: mol_type = other DNA
atgctgcccctgtgcctggtggccgccctgctgctggccgccggccccggccccagcctgggcgacgaggccatccactgccccccctgcagcgaggagaagctggccagatgcagaccccccgtgggctgcgaggagctggtgagagagcccggctgcggctgctgcgccacctgcgccctgggcctgggcatgccctgcggcgtgtacacccccagatgcggcagcggcctgagatgctacccccccagaggcgtggagaagcccctgcacaccctgatgcacggccagggcgtgtgcatggagctggccgagatcgaggccatccaggagagcctgcagcccagcgacaaggacgagggcgaccaccccaacaacagcttcagcccctgcagcgcccacgacagaagatgcctgcagaagcacttcgccaagatcagagacagaagcaccagcggcggcaagatgaaggtgaacggcgcccccagagaggacgccagacccgtgccccagggcagctgccagagcgagctgcacagagccctggagagactggccgccagccagagcagaacccacgaggacctgtacatcatccccatccccaactgcgacagaaacggcaacttccaccccaagcagtgccaccccgccctggacggccagagaggcaagtgctggtgcgtggacagaaagaccggcgtgaagctgcccggcggcctggagcccaagggcgagctggactgccaccagctggccgacagcttcagagagtag

SEQ ID NO: 85323 - DNA, 477 bp, synthetic construct
  misc_feature 1..477: note = Description of Artificial Sequence: Synthetic coding sequence
  source 1..477: mol_type = other DNA
atggagctggccgagatcgaggccatccaggagagcctgcagcccagcgacaaggacgagggcgaccaccccaacaacagcttcagcccctgcagcgcccacgacagaagatgcctgcagaagcacttcgccaagatcagagacagaagcaccagcggcggcaagatgaaggtgaacggcgcccccagagaggacgccagacccgtgccccagggcagctgccagagcgagctgcacagagccctggagagactggccgccagccagagcagaacccacgaggacctgtacatcatccccatccccaactgcgacagaaacggcaacttccaccccaagcagtgccaccccgccctggacggccagagaggcaagtgctggtgcgtggacagaaagaccggcgtgaagctgcccggcggcctggagcccaagggcgagctggactgccaccagctggccgacagcttcagagagtag

SEQ ID NO: 85324 - DNA, 849 bp, synthetic construct
  misc_feature 1..849: note = Description of Artificial Sequence: Synthetic coding sequence
  source 1..849: mol_type = other DNA
atggagagacccagcctgagagccctgctgctgggcgccgccggcctgctgctgctgctgctgcccctgagcagcagcagcagcagcgacacctgcggcccctgcgagcccgccagctgcccccccctgccccccctgggctgcctgctgggcgagaccagagacgcctgcggctgctgccccatgtgcgccagaggcgagggcgagccctgcggcggcggcggcgccggcagaggctactgcgcccccggcatggagtgcgtgaagagcagaaagagaagaaagggcaaggccggcgccgccgccggcggccccggcgtgagcggcgtgtgcgtgtgcaagagcagataccccgtgtgcggcagcgacggcaccacctaccccagcggctgccagctgagagccgccagccagagagccgagagcagaggcgagaaggccatcacccaggtgagcaagggcacctgcgagcagggccccagcatcgtgaccccccccaaggacatctggaacgtgaccggcgcccaggtgtacctgagctgcgaggtgatcggcatccccacccccgtgctgatctggaacaaggtgaagagaggccactacggcgtgcagagaaccgagctgctgcccggcgacagagacaacctggccatccagaccagaggcggccccgagaagcacgaggtgaccggctgggtgctggtgagccccctgagcaaggaggacgccggcgagtacgagtgccacgccagcaacagccagggccaggccagcgccagcgccaagatcaccgtggtggacgccctgcacgagatccccgtgaagaagggcgagggcgccgagctgtag

SEQ ID NO: 85325 - DNA, 840 bp, synthetic construct
  misc_feature 1..840: note = Description of Artificial Sequence: Synthetic coding sequence
  source 1..840: mol_type = other DNA
atggagagacccagcctgagagccctgctgctgggcgccgccggcctgctgctgctgctgctgcccctgagcagcagcagcagcagcgacacctgcggcccctgcgagcccgccagctgcccccccctgccccccctgggctgcctgctgggcgagaccagagacgcctgcggctgctgccccatgtgcgccagaggcgagggcgagccctgcggcggcggcggcgccggcagaggctactgcgcccccggcatggagtgcgtgaagagcagaaagagaagaaagggcaaggccggcgccgccgccggcggccccggcgtgagcggcgtgtgcgtgtgcaagagcagataccccgtgtgcggcagcgacggcaccacctaccccagcggctgccagctgagagccgccagccagagagccgagagcagaggcgagaaggccatcacccaggtgagcaagggcacctgcgagcagggccccagcatcgtgaccccccccaaggacatctggaacgtgaccggcgcccaggtgtacctgagctgcgaggtgatcggcatccccacccccgtgctgatctggaacaaggtgaagagaggccactacggcgtgcagagaaccgagctgctgcccggcgacagagacaacctggccatccagaccagaggcggccccgagaagcacgaggtgaccggctgggtgctggtgagccccctgagcaaggaggacgccggcgagtacgagtgccacgccagcaacagccagggccaggccagcgccagcgccaagatcaccgtggtggacgccctgcacgagatccccgtgaagaagggcacccagtag

SEQ ID NO: 85326 - DNA, 393 bp, synthetic construct
  misc_feature 1..393: note = Description of Artificial Sequence: Synthetic coding sequence
  source 1..393: mol_type = other DNA
atggagaccctgggcgccctgctggtgctggagttcctgctgctgagccccgtggaggcccagcaggccaccgagcacagactgaagccctggctggtgggcctggccgccgtggtgggcttcctgttcatcgtgtacctggtgctgctggccaacagactgtggtgcagcaaggccagagccgaggacgaggaggagaccaccttcagaatggagagcaacctgtaccaggaccagagcgaggacaagagagagaagaaggaggccaaggagaaggaggagaagagaaagaaggagaagaagaccgccaaggagggcgagagcaacctgggcctggacctggaggagaaggagcccggcgaccacgagagagccaagagcaccgtgatgtag

SEQ ID NO: 85327 - DNA, 1932 bp, synthetic construct
  misc_feature 1..1932: note = Description of Artificial Sequence: Synthetic coding sequence
  source 1..1932: mol_type = other DNA
atggccctgagaaaggccggcgacctggagccccagttcacccccgagagaagattcagactgtgctggtaccaggcccacagcggcagagccctgctgggcccccccccccaggccagcccccccgccggcggcctggccctggccctgctgctgctgagctgggtggccctgggccccagaagcctggagggcgccgaccccggcacccccggcgaggccgagggccccgcctgccccgccgcctgcgtgtgcagctacgacgacgacgccgacgagctgagcgtgttctgcagcagcagaaacctgaccagactgcccgacggcgtgcccggcggcacccaggccctgtggctggacggcaacaacctgagcagcgtgccccccgccgccttccagaacctgagcagcctgggcttcctgaacctgcagggcggccagctgggcagcctggagccccaggccctgctgggcctggagaacctgtgccacctgcacctggagagaaaccagctgagaagcctggccctgggcaccttcgcccacacccccgccctggccagcctgggcctgagcaacaacagactgagcagactggaggacggcctgttcgagggcctgggcagcctgtgggacctgaacctgggctggaacagcctggccgtgctgcccgacgccgccttcagaggcctgggcagcctgagagagctggtgctggccggcaacagactggcctacctgcagcccgccctgttcagcggcctggccgagctgagagagctggacctgagcagaaacgccctgagagccatcaaggccaacgtgttcgtgcagctgcccagactgcagaagctgtacctggacagaaacctgatcgccgccgtggcccccggcgccttcctgggcctgaaggccctgagatggctggacctgagccacaacagagtggccggcctgctggaggacaccttccccggcctgctgggcctgagagtgctgagactgagccacaacgccatcgccagcctgagacccagaaccttcaaggacctgcacttcctggaggagctgcagctgggccacaacagaatcagacagctggccgagagaagcttcgagggcctgggccagctggaggtgctgaccctggaccacaaccagctgcaggaggtgaaggccggcgccttcctgggcctgaccaacgtggccgtgatgaacctgagcggcaactgcctgagaaacctgcccgagcaggtgttcagaggcctgggcaagctgcacagcctgcacctggagggcagctgcctgggcagaatcagaccccacaccttcaccggcctgagcggcctgagaagactgttcctgaaggacaacggcctggtgggcatcgaggagcagagcctgtggggcctggccgagctgctggagctggacctgaccagcaaccagctgacccacctgccccacagactgttccagggcctgggcaagctggagtacctgctgctgagcagaaacagactggccgagctgcccgccgacgccctgggccccctgcagagagccttctggctggacgtgagccacaacagactggaggccctgcccaacagcctgctggcccccctgggcagactgagatacctgagcctgagaaacaacagcctgagaaccttcaccccccagccccccggcctggagagactgtggctggagggcaacccctgggactgcggctgccccctgaaggccctgagagacttcgccctgcagaaccccagcgccgtgcccagattcgtgcaggccatctgcgagggcgacgactgccagccccccgcctacacctacaacaacatcacctgcgccagcccccccgaggtggtgggcctggacctgagagacctgagcgaggcccacttcgccccctgctag

SEQ ID NO: 85328 - DNA, 1533 bp, synthetic construct
  misc_feature 1..1533: note = Description of Artificial Sequence: Synthetic coding sequence
  source 1..1533: mol_type = other DNA
atgcccagaggcttcctggtgaagagaagcaagaagagcacccccgtgagctacagagtgagaggcggcgaggacggcgacagagccctgctgctgagccccagctgcggcggcgccagagccgagccccccgcccccagccccgtgcccggccccctgcccccccccccccccgccgagagagcccacgccgccctggccgccgccctggcctgcgcccccggcccccagccccccccccagggccccagagccgcccacttcggcaaccccgaggccgcccaccccgcccccctgtacagccccaccagacccgtgagcagagagcacgagaagcacaagtacttcgagagaagcttcaacctgggcagccccgtgagcgccgagagcttccccacccccgccgccctgctgggcggcggcggcggcggcggcgccagcggcgccggcggcggcggcacctgcggcggcgaccccctgctgttcgcccccgccgagctgaagatgggcaccgccttcagcgccggcgccgaggccgccagaggccccggccccggcccccccctgccccccgccgccgccctgagaccccccggcaagagaccccccccccccaccgccgccgagccccccgccaaggccgtgaaggcccccggcgccaagaagcccaaggccatcagaaagctgcacttcgaggacgaggtgaccaccagccccgtgctgggcctgaagatcaaggagggccccgtggaggcccccagaggcagagccggcggcgccgccagacccctgggcgagttcatctgccagctgtgcaaggaggagtacgccgaccccttcgccctggcccagcacaagtgcagcagaatcgtgagagtggagtacagatgccccgagtgcgccaaggtgttcagctgccccgccaacctggccagccacagaagatggcacaagcccagacccgcccccgccgccgccagagcccccgagcccgaggccgccgccagagccgaggccagagaggcccccggcggcggcagcgacagagacacccccagccccggcggcgtgagcgagagcggcagcgaggacggcctgtacgagtgccaccactgcgccaagaagttcagaagacaggcctacctgagaaagcacctgctggcccaccaccaggccctgcaggccaagggcgcccccctggccccccccgccgaggacctgctggccctgtaccccggccccgacgagaaggccccccaggaggccgccggcgacggcgagggcgccggcgtgctgggcctgagcgccagcgccgagtgccacctgtgccccgtgtgcggcgagagcttcgccagcaagggcgcccaggagagacacctgagactgctgcacgccgcccaggtgttcccctgcaagtactgccccgccaccttctacagcagccccggcctgaccagacacatcaacaagtgccaccccagcgagaacagacaggtgatcctgctgcaggtgcccgtgagacccgcctgctag

SEQ ID NO: 85329 - DNA, 1701 bp, synthetic construct
  misc_feature 1..1701: note = Description of Artificial Sequence: Synthetic coding sequence
  source 1..1701: mol_type = other DNA
atgcccagaggcttcctggtgaagagaaccaagagaaccggcggcctgtacagagtgagactggccgagagagtgttccccctgctgggcccccagggcgccccccccttcctggaggaggcccccagcgccagcctgcccggcgccgagagagccaccccccccaccagagaggagcccggcaagggcctgaccgccgaggccgccagagagcagagcggcagcccctgcagagccgccggcgtgagccccggcaccggcggcagagagggcgccgagtggagagccggcggcagagagggccccggccccagccccagccccagccccagccccgccaagcccgccggcgccgagctgagaagagccttcctggagagatgcctgagcagccccgtgagcgccgagagcttccccggcggcgccgccgccgtggccgccttcagctgcagcgtggcccccgccgccgcccccacccccggcgagcagttcctgctgcccctgagagcccccttccccgagcccgccctgcagcccgaccccgcccccctgagcgccgccctgcagagcctgaagagagccgccggcggcgagagaagaggcaaggcccccaccgactgcgccagcggccccgccgccgccggcatcaagaagcccaaggccatgagaaagctgagcttcgccgacgaggtgaccaccagccccgtgctgggcctgaagatcaaggaggaggagcccggcgcccccagcagaggcctgggcggcagcagaacccccctgggcgagttcatctgccagctgtgcaaggagcagtacgccgaccccttcgccctggcccagcacagatgcagcagaatcgtgagagtggagtacagatgccccgagtgcgacaaggtgttcagctgccccgccaacctggccagccacagaagatggcacaagcccagacccgccgccgccaacgccgccaccgtgagcagcgccgacggcaagccccccagcagcagcagcagcagcagcagagacagcggcgccatcgccagcttcctggccgagggcaaggagaacagcagaatcgagagaaccgccgaccagcacccccaggccagagacagcagcggcgccgaccagcaccccgacagcgcccccagacagggcctgcaggtgctgacccaccccgagccccccctgccccagggcccctacaccgagggcgtgctgggcagaagagtgcccgtgcccggcagcaccagcggcggcagaggcagcgagatcttcgtgtgcccctactgccacaagaagttcagaagacaggcctacctgagaaagcacctgagcacccacgaggccggcagcgccagagccctggcccccggcttcggcagcgagagaggcgcccccctggccttcgcctgccccctgtgcggcgcccacttccccaccgccgacatcagagagaagcacagactgtggcacgccgtgagagaggagctgctgctgcccgccctggccggcgccccccccgagaccagcggccccagcggccccagcgacggcagcgcccagcagatcttcagctgcaagcactgccccagcaccttcttcagcagccccggcctgaccagacacatcaacaagtgccaccccagcgagagcagacaggtgctgctgctgcagatgcccctgagacccggctgctag

SEQ ID NO: 85330 - DNA, 792 bp, synthetic construct
  misc_feature 1..792: note = Description of Artificial Sequence: Synthetic coding sequence
  source 1..792: mol_type = other DNA
atggtgaagatcgccttcaacacccccaccgccgtgcagaaggaggaggccagacaggacgtggaggccctgctgagcagaaccgtgagaacccagatcctgaccggcaaggagctgagagtggccacccaggagaaggagggcagcagcggcagatgcatgctgaccctgctgggcctgagcttcatcctggccggcctgatcgtgggcggcgcctgcatctacaagtacttcatgcccaagagcaccatctacagaggcgagatgtgcttcttcgacagcgaggaccccgccaacagcctgagaggcggcgagcccaacttcctgcccgtgaccgaggaggccgacatcagagaggacgacaacatcgccatcatcgacgtgcccgtgcccagcttcagcgacagcgaccccgccgccatcatccacgacttcgagaagggcatgaccgcctacctggacctgctgctgggcaactgctacctgatgcccctgaacaccagcatcgtgatgccccccaagaacctggtggagctgttcggcaagctggccagcggcagatacctgccccagacctacgtggtgagagaggacctggtggccgtggaggagatcagagacgtgagcaacctgggcatcttcatctaccagctgtgcaacaacagaaagagcttcagactgagaagaagagacctgctgctgggcttcaacaagagagccatcgacaagtgctggaagatcagacacttccccaacgagttcatcgtggagaccaagatctgccaggagtag

SEQ ID NO: 85331 - DNA, 660 bp, synthetic construct
  misc_feature 1..660: note = Description of Artificial Sequence: Synthetic coding sequence
  source 1..660: mol_type = other DNA
atggtgaagatcgccttcaacacccccaccgccgtgcagaaggaggaggccagacaggacgtggaggccctgctgagcagaaccgtgagaacccagatcctgaccggcaagagcaccatctacagaggcgagatgtgcttcttcgacagcgaggaccccgccaacagcctgagaggcggcgagcccaacttcctgcccgtgaccgaggaggccgacatcagagaggacgacaacatcgccatcatcgacgtgcccgtgcccagcttcagcgacagcgaccccgccgccatcatccacgacttcgagaagggcatgaccgcctacctggacctgctgctgggcaactgctacctgatgcccctgaacaccagcatcgtgatgccccccaagaacctggtggagctgttcggcaagctggccagcggcagatacctgccccagacctacgtggtgagagaggacctggtggccgtggaggagatcagagacgtgagcaacctgggcatcttcatctaccagctgtgcaacaacagaaagagcttcagactgagaagaagagacctgctgctgggcttcaacaagagagccatcgacaagtgctggaagatcagacacttccccaacgagttcatcgtggagaccaagatctgccaggagtag

SEQ ID NO: 85332 - DNA, 801 bp, synthetic construct
  misc_feature 1..801: note = Description of Artificial Sequence: Synthetic coding sequence
  source 1..801: mol_type = other DNA
atggtgaaggtgaccttcaacagcgccctggcccagaaggaggccaagaaggacgagcccaagagcggcgaggaggccctgatcatcccccccgacgccgtggccgtggactgcaaggaccccgacgacgtggtgcccgtgggccagagaagagcctggtgctggtgcatgtgcttcggcctggccttcatgctggccggcgtgatcctgggcggcgcctacctgtacaagtacttcgccctgcagcccgacgacgtgtactactgcggcatcaagtacatcaaggacgacgtgatcctgaacgagcccagcgccgacgcccccgccgccctgtaccagaccatcgaggagaacatcaagatcttcgaggaggaggaggtggagttcatcagcgtgcccgtgcccgagttcgccgacagcgaccccgccaacatcgtgcacgacttcaacaagaagctgaccgcctacctggacctgaacctggacaagtgctacgtgatccccctgaacaccagcatcgtgatgccccccagaaacctgctggagctgctgatcaacatcaaggccggcacctacctgccccagagctacctgatccacgagcacatggtgatcaccgacagaatcgagaacatcgaccacctgggcttcttcatctacagactgtgccacgacaaggagacctacaagctgcagagaagagagaccatcaagggcatccagaagagagaggccagcaactgcttcgccatcagacacttcgagaacaagttcgccgtggagaccctgatctgcagctag

SEQ ID NO: 85333 - DNA, 693 bp, synthetic construct
  misc_feature 1..693: note = Description of Artificial Sequence: Synthetic coding sequence
  source 1..693: mol_type = other DNA
atggtgaagatcagcttccagcccgccgtggccggcatcaagggcgacaaggccgacaaggccagcgccagcgcccccgcccccgccagcgccaccgagatcctgctgacccccgccagagaggagcagcccccccagcacagaagcaagagaggcggcagcgtgggcggcgtgtgctacctgagcatgggcatggtggtgctgctgatgggcctggtgttcgccagcgtgtacatctacagatacttcttcctggcccagctggccagagacaacttcttcagatgcggcgtgctgtacgaggacagcctgagcagccaggtgagaacccagatggagctggaggaggacgtgaagatctacctggacgagaactacgagagaatcaacgtgcccgtgccccagttcggcggcggcgaccccgccgacatcatccacgacttccagagaagaggcacctacctgccccagacctacatcatccaggaggagatggtggtgaccgagcacgtgagcgacaaggaggccctgggcagcttcatctaccacctgtgcaacggcaaggacacctacagactgagaagaagagccaccagaagaagaatcaacaagagaggcgccaagaactgcaacgccatcagacacttcgagaacaccttcgtggtggagaccctgatctgcggcgtggtgtag

SEQ ID NO: 85334 - DNA, 804 bp, synthetic construct
  misc_feature 1..804: note = Description of Artificial Sequence: Synthetic coding sequence
  source 1..804: mol_type = other DNA
atggtgaagatcagcttccagcccgccgtggccggcatcaagggcgacaaggccgacaaggccagcgccagcgcccccgcccccgccagcgccaccgagatcctgctgacccccgccagagaggagcagcccccccagcacagaagcaagagaggcggcagcgtgggcggcgtgtgctacctgagcatgggcatggtggtgctgctgatgggcctggtgttcgccagcgtgtacatctacagatacttcttcctggcccagctggccagagacaacttcttcagatgcggcgtgctgtacgaggacagcctgagcagccaggtgagaacccagatggagctggaggaggacgtgaagatctacctggacgagaactacgagagaatcaacgtgcccgtgccccagttcggcggcggcgaccccgccgacatcatccacgacttccagagaggcctgaccgcctaccacgacatcagcctggacaagtgctacgtgatcgagctgaacaccaccatcgtgctgccccccagaaacttctgggagctgctgatgaacgtgaagagaggcacctacctgccccagacctacatcatccaggaggagatggtggtgaccgagcacgtgagcgacaaggaggccctgggcagcttcatctaccacctgtgcaacggcaaggacacctacagactgagaagaagagccaccagaagaagaatcaacaagagaggcgccaagaactgcaacgccatcagacacttcgagaacaccttcgtggtggagaccctgatctgcggcgtggtgtag

SEQ ID NO: 85335 - DNA, 663 bp, synthetic construct
  misc_feature 1..663: note = Description of Artificial Sequence: Synthetic coding sequence
  source 1..663: mol_type = other DNA
atggtgaagatcagcttccagcccgccgtggccggcatcaagggcgacaaggccgacaaggccagcgccagcgcccccgcccccgccagcgccaccgagatcctgctgacccccgccagactggccagagacaacttcttcagatgcggcgtgctgtacgaggacagcctgagcagccaggtgagaacccagatggagctggaggaggacgtgaagatctacctggacgagaactacgagagaatcaacgtgcccgtgccccagttcggcggcggcgaccccgccgacatcatccacgacttccagagaggcctgaccgcctaccacgacatcagcctggacaagtgctacgtgatcgagctgaacaccaccatcgtgctgccccccagaaacttctgggagctgctgatgaacgtgaagagaggcacctacctgccccagacctacatcatccaggaggagatggtggtgaccgagcacgtgagcgacaaggaggccctgggcagcttcatctaccacctgtgcaacggcaaggacacctacagactgagaagaagagccaccagaagaagaatcaacaagagaggcgccaagaactgcaacgccatcagacacttcgagaacaccttcgtggtggagaccctgatctgcggcgtggtgtag

SEQ ID NO: 85336 - DNA, 543 bp, synthetic construct
  misc_feature 1..543: note = Description of Artificial Sequence: Synthetic coding sequence
  source 1..543: mol_type = other DNA
atggtgaagatcagcttccagcccgccgtggccggcatcaagggcgacaaggccgacaaggccagcgccagcgcccccgcccccgccagcgccaccgagatcctgctgacccccgccagagaggagcagcccccccagcacagaagcaagagaggcggcagcgtgggcggcgtgtgctacctgagcatgggcatggtggtgctgctgatgggcctggtgttcgccagcgtgtacatctacagatacttcttcctggcccagctggccagagacaacttcttcagatgcggcgtgctgtacgaggacagcctgagcagccaggtgagaacccagatggagctggaggaggacgtgaagatctacctggacgagaactacgagagaatcaacgtgcccgtgccccagttcggcggcggcgaccccgccgacatcatccacgacttccagagaggcctgaccgcctaccacgacatcagcctggacaagtgctacgtgatcgagctgaacaccaccatcgtgctgccccccagaaacttctggtag

SEQ ID NO: 85337 - DNA, 1839 bp, synthetic construct
  misc_feature 1..1839: note = Description of Artificial Sequence: Synthetic coding sequence
  source 1..1839: mol_type = other DNA
atggccgccgccggcagactgcccagcagctgggccctgttcagccccctgctggccggcctggccctgctgggcgtgggccccgtgcccgccagagccctgcacaacgtgaccgccgagctgttcggcgccgaggcctggggcaccctggccgccttcggcgacctgaacagcgacaagcagaccgacctgttcgtgctgagagagagaaacgacctgatcgtgttcctggccgaccagaacgccccctacttcaagcccaaggtgaaggtgagcttcaagaaccacagcgccctgatcaccagcgtggtgcccggcgactacgacggcgacagccagatggacgtgctgctgacctacctgcccaagaactacgccaagagcgagctgggcgccgtgatcttctggggccagaaccagaccctggaccccaacaacatgaccatcctgaacagaaccttccaggacgagcccctgatcatggacttcaacggcgacctgatccccgacatcttcggcatcaccaacgagagcaaccagccccagatcctgctgggcggcaacctgagctggcaccccgccctgaccaccaccagcaagatgagaatcccccacagccacgccttcatcgacctgaccgaggacttcaccgccgacctgttcctgaccaccctgaacgccaccaccagcaccttccagttcgagatctgggagaacctggacggcaacttcagcgtgagcaccatcctggagaagccccagaacatgatggtggtgggccagagcgccttcgccgacttcgacggcgacggccacatggaccacctgctgcccggctgcgaggacaagaactgccagaagagcaccatctacctggtgagaagcggcatgaagcagtgggtgcccgtgctgcaggacttcagcaacaagggcaccctgtggggcttcgtgcccttcgtggacgagcagcagcccaccgagatccccatccccatcaccctgcacatcggcgactacaacatggacggctaccccgacgccctggtgatcctgaagaacaccagcggcagcaaccagcaggccttcctgctggagaacgtgccctgcaacaacgccagctgcgaggaggccagaagaatgttcaaggtgtactgggagctgaccgacctgaaccagatcaaggacgccatggtggccaccttcttcgacatctacgaggacggcatcctggacatcgtggtgctgagcaagggctacaccaagaacgacttcgccatccacaccctgaagaacaacttcgaggccgacgcctacttcgtgaaggtgatcgtgctgagcggcctgtgcagcaacgactgccccagaaagatcacccccttcggcgtgaaccagcccggcccctacatcatgtacaccaccgtggacgccaacggctacctgaagaacggcagcgccggccagctgagccagagcgcccacctggccctgcagctgccctacaacgtgctgggcctgggcagaagcgccaacttcctggaccacctgtacgtgggcatccccagacccagcggcgagaagagcatcagaaagcaggagtggaccgccatcatccccaacagccagctgatcgtgatcccctacccccacaacgtgcccagaagctggagcgccaagctgtacctgacccccagcaacatcgtgctgctgaccgccatcgccctgatcggcgtgtgcgtgttcatcctggccatcatcggcatcctgcactggcaggagaagaaggccgacgacagagagaagagacaggaggcccacagattccacttcgacgccatgtag

SEQ ID NO: 85338 - DNA, 819 bp, synthetic construct
  misc_feature 1..819: note = Description of Artificial Sequence: Synthetic coding sequence
  source 1..819: mol_type = other DNA
atggacggctaccccgacgccctggtgatcctgaagaacaccagcggcagcaaccagcaggccttcctgctggagaacgtgccctgcaacaacgccagctgcgaggaggccagaagaatgttcaaggtgtactgggagctgaccgacctgaaccagatcaaggacgccatggtggccaccttcttcgacatctacgaggacggcatcctggacatcgtggtgctgagcaagggctacaccaagaacgacttcgccatccacaccctgaagaacaacttcgaggccgacgcctacttcgtgaaggtgatcgtgctgagcggcctgtgcagcaacgactgccccagaaagatcacccccttcggcgtgaaccagcccggcccctacatcatgtacaccaccgtggacgccaacggctacctgaagaacggcagcgccggccagctgagccagagcgcccacctggccctgcagctgccctacaacgtgctgggcctgggcagaagcgccaacttcctggaccacctgtacgtgggcatccccagacccagcggcgagaagagcatcagaaagcaggagtggaccgccatcatccccaacagccagctgatcgtgatcccctacccccacaacgtgcccagaagctggagcgccaagctgtacctgacccccagcaacatcgtgctgctgaccgccatcgccctgatcggcgtgtgcgtgttcatcctggccatcatcggcatcctgcactggcaggagaagaaggccgacgacagagagaagagacaggaggcccacagattccacttcgacgccatgtag

SEQ ID NO: 85339 - DNA, 1074 bp, synthetic construct
  misc_feature 1..1074: note = Description of Artificial Sequence: Synthetic coding sequence
  source 1..1074: mol_type = other DNA
atgatggtggtgggccagagcgccttcgccgacttcgacggcgacggccacatggaccacctgctgcccggctgcgaggacaagaactgccagaagagcaccatctacctggtgagaagcggcatgaagcagtgggtgcccgtgctgcaggacttcagcaacaagggcaccctgtggggcttcgtgcccttcgtggacgagcagcagcccaccgagatccccatccccatcaccctgcacatcggcgactacaacatggacggctaccccgacgccctggtgatcctgaagaacaccagcggcagcaaccagcaggccttcctgctggagaacgtgccctgcaacaacgccagctgcgaggaggccagaagaatgttcaaggtgtactgggagctgaccgacctgaaccagatcaaggacgccatggtggccaccttcttcgacatctacgaggacggcatcctggacatcgtggtgctgagcaagggctacaccaagaacgacttcgccatccacaccctgaagaacaacttcgaggccgacgcctacttcgtgaaggtgatcgtgctgagcggcctgtgcagcaacgactgccccagaaagatcacccccttcggcgtgaaccagcccggcccctacatcatgtacaccaccgtggacgccaacggctacctgaagaacggcagcgccggccagctgagccagagcgcccacctggccctgcagctgccctacaacgtgctgggcctgggcagaagcgccaacttcctggaccacctgtacgtgggcatccccagacccagcggcgagaagagcatcagaaagcaggagtggaccgccatcatccccaacagccagctgatcgtgatcccctacccccacaacgtgcccagaagctggagcgccaagctgtacctgacccccagcaacatcgtgctgctgaccgccatcgccctgatcggcgtgtgcgtgttcatcctggccatcatcggcatcctgcactggcaggagaagaaggccgacgacagagagaagagacaggaggcccacagattccacttcgacgccatgtag

SEQ ID NO: 85340 - DNA, 1395 bp, synthetic construct
  misc_feature 1..1395: note = Description of Artificial Sequence: Synthetic coding sequence
  source 1..1395: mol_type = other DNA
atggacgtgctgctgacctacctgcccaagaactacgccaagagcgagctgggcgccgtgatcttctggggccagaaccagaccctggaccccaacaacatgaccatcctgaacagaaccttccaggacgagcccctgatcatggacttcaacggcgacctgatccccgacatcttcggcatcaccaacgagagcaaccagccccagatcctgctgggcggcaacctgagctggcaccccgccctgaccaccaccagcaagatgagaatcccccacagccacgccttcatcgacctgaccgaggacttcaccgccgacctgttcctgaccaccctgaacgccaccaccagcaccttccagttcgagatctgggagaacctggacggcaacttcagcgtgagcaccatcctggagaagccccagaacatgatggtggtgggccagagcgccttcgccgacttcgacggcgacggccacatggaccacctgctgcccggctgcgaggacaagaactgccagaagagcaccatctacctggtgagaagcggcatgaagcagtgggtgcccgtgctgcaggacttcagcaacaagggcaccctgtggggcttcgtgcccttcgtggacgagcagcagcccaccgagatccccatccccatcaccctgcacatcggcgactacaacatggacggctaccccgacgccctggtgatcctgaagaacaccagcggcagcaaccagcaggccttcctgctggagaacgtgccctgcaacaacgccagctgcgaggaggccagaagaatgttcaaggtgtactgggagctgaccgacctgaaccagatcaaggacgccatggtggccaccttcttcgacatctacgaggacggcatcctggacatcgtggtgctgagcaagggctacaccaagaacgacttcgccatccacaccctgaagaacaacttcgaggccgacgcctacttcgtgaaggtgatcgtgctgagcggcctgtgcagcaacgactgccccagaaagatcacccccttcggcgtgaaccagcccggcccctacatcatgtacaccaccgtggacgccaacggctacctgaagaacggcagcgccggccagctgagccagagcgcccacctggccctgcagctgccctacaacgtgctgggcctgggcagaagcgccaacttcctggaccacctgtacgtgggcatccccagacccagcggcgagaagagcatcagaaagcaggagtggaccgccatcatccccaacagccagctgatcgtgatcccctacccccacaacgtgcccagaagcagccacagatgcctgtgcttccacctgggcaacaactggcacttcaccctggccggcaaggagagcagatag

SEQ ID NO: 85341 - DNA, 1044 bp, synthetic construct
  misc_feature 1..1044: note = Description of Artificial Sequence: Synthetic coding sequence
  source 1..1044: mol_type = other DNA
atgagcctgctgtgcagaaacaagggctgcggccagcacttcgaccccaacaccaacctgcccgacagctgctgccaccaccccggcgtgcccatcttccacgacgccctgaagggctggagctgctgcagaaagagaaccgtggacttcagcgagttcctgaacatcaagggctgcaccatgggcccccactgcgccgagaagctgcccgaggccccccagcccgagggccccgccaccagcagcagcctgcaggagcagaagcccctgaacgtgatccccaagagcgccgagaccctgagaagagagagacccaagagcgagctgcccctgaagctgctgcccctgaacatcagccaggccctggagatggccctggagcagaaggagctggaccaggagcccggcgccggcctggacagcctgatcagaaccggcagcagctgccagaaccccggctgcgacgccgtgtaccagggccccgagagcgacgccaccccctgcacctaccaccccggcgcccccagattccacgagggcatgaagagctggagctgctgcggcatccagaccctggacttcggcgccttcctggcccagcccggctgcagagtgggcagacacgactggggcaagcagctgcccgccagctgcagacacgactggcaccagaccgacagcctggtggtggtgaccgtgtacggccagatccccctgcccgccttcaactgggtgaaggccagccagaccgagctgcacgtgcacatcgtgttcgacggcaacagagtgttccaggcccagatgaagctgtggggcgtgatcaacgtggagcagagcagcgtgttcctgatgcccagcagagtggagatcagcctggtgaaggccgaccccggcagctgggcccagctggagcaccccgacgccctggccaagaaggccagagccggcgtggtgctggagatggacgaggaggagagcgacgacagcgacgacgacctgagctggaccgaggaggaggaggaggaggaggccatgggcgagtag

SEQ ID NO: 85342 - DNA, 990 bp, synthetic construct
  misc_feature 1..990: note = Description of Artificial Sequence: Synthetic coding sequence
  source 1..990: mol_type = other DNA
atgagcaccgacagctgctgccaccaccccggcgtgcccatcttccacgacgccctgaagggctggagctgctgcagaaagagaaccgtggacttcagcgagttcctgaacatcaagggctgcaccatgggcccccactgcgccgagaagctgcccgaggccccccagcccgagggccccgccaccagcagcagcctgcaggagcagaagcccctgaacgtgatccccaagagcgccgagaccctgagaagagagagacccaagagcgagctgcccctgaagctgctgcccctgaacatcagccaggccctggagatggccctggagcagaaggagctggaccaggagcccggcgccggcctggacagcctgatcagaaccggcagcagctgccagaaccccggctgcgacgccgtgtaccagggccccgagagcgacgccaccccctgcacctaccaccccggcgcccccagattccacgagggcatgaagagctggagctgctgcggcatccagaccctggacttcggcgccttcctggcccagcccggctgcagagtgggcagacacgactggggcaagcagctgcccgccagctgcagacacgactggcaccagaccgacagcctggtggtggtgaccgtgtacggccagatccccctgcccgccttcaactgggtgaaggccagccagaccgagctgcacgtgcacatcgtgttcgacggcaacagagtgttccaggcccagatgaagctgtggggcgtgatcaacgtggagcagagcagcgtgttcctgatgcccagcagagtggagatcagcctggtgaaggccgaccccggcagctgggcccagctggagcaccccgacgccctggccaagaaggccagagccggcgtggtgctggagatggacgaggaggagagcgacgacagcgacgacgacctgagctggaccgaggaggaggaggaggaggaggccatgggcgagtag

SEQ ID NO: 85343 - DNA, 603 bp, synthetic construct
  misc_feature 1..603: note = Description of Artificial Sequence: Synthetic coding sequence
  source 1..603: mol_type = other DNA
atgttcagaaagggcaagaagagacacagcagcagcagcagccagagcagcgagatcagcaccaagagcaagagcgtggacagcagcctgggcggcctgagcagaagcagcaccgtggccagcctggacaccgacagcaccaagagcagcggccagagcaacaacaacagcgacacctgcgccgagttcagaatcaagtacgtgggcgccatcgagaagctgaagctgagcgagggcaagggcctggagggccccctggacctgatcaactacatcgacgtggcccagcaggacggcaagctgcccttcgtgccccccgaggaggagttcatcatgggcgtgagcaagtacggcatcaaggtgagcaccagcgaccagtacgacgtgctgcacagacacgccctgtacctgatcatcagaatggtgtgctacgacgacggcctgggcgccggcaagagcctgctggccctgaagaccaccgacgccagcaacgaggagtacagcctgtgggtgtaccagtgcaacagcctggagcaggcccaggccatctgcaaggtgctgagcaccgccttcgacagcgtgctgaccagcgagaagccctag

SEQ ID NO: 85344 - DNA, 603 bp, synthetic construct; identical to SEQ ID NO: 85343
  misc_feature 1..603: note = Description of Artificial Sequence: Synthetic coding sequence
  source 1..603: mol_type = other DNA

SEQ ID NO: 85345 - DNA, 255 bp, synthetic construct
  misc_feature 1..255: note = Description of Artificial Sequence: Synthetic coding sequence
  source 1..255: mol_type = other DNA
atgttcagaaagggcaagaagagacacagcagcagcagcagccagagcagcgagatcagcaccaagagcaagagcgtggacagcagcctgggcggcctgagcagaagcagcaccgtggccagcctggacaccgacagcaccaagagcagcggccagagcaacaacaacagcgacacctgcgccgagttcagaatcaagtacgtgggcgccatcgagaagctgaagctgagcgagggcaagggcctggagggctag

SEQ ID NO: 85346 - DNA, 291 bp, synthetic construct
  misc_feature 1..291: note = Description of Artificial Sequence: Synthetic coding sequence
  source 1..291: mol_type = other DNA
atgttcagaaagggcaagaagagacacagcagcagcagcagccagagcagcgagatcagcaccaagagcaagagcgtggacagcagcctgggcggcctgagcagaagcagcaccgtggccagcctggacaccgacagcaccaagagcagcggccagagcaacaacaacagcgacacctgcgccgagttcagaatcaagtacgtgggcgccatcgagaagctgaagctgagcgagggcaagggcctggagggccccctggacctgatcaactacatcgacgtggcccagtag

SEQ ID NO: 85347 - DNA, 261 bp, synthetic construct
  misc_feature 1..261: note = Description of Artificial Sequence: Synthetic coding sequence
  source 1..261: mol_type = other DNA
atgttcagaaagggcaagaagagacacagcagcagcagcagccagagcagcgagatcagcaccaagagcaagagcgtggacagcagcctgggcggcctgagcagaagcagcaccgtggccagcctggacaccgacagcaccaagagcagcggccagagcaacaacaacagcgacacctgcgccgagttcagaatcaagtacgtgggcgccatcgagaagctgaagctgagcgagggcaagggcctggagggccccctgtag

SEQ ID NO: 85348 - DNA, 411 bp, synthetic construct
  misc_feature 1..411: note = Description of Artificial Sequence: Synthetic coding sequence
  source 1..411: mol_type = other DNA
atgttcagaaagggcaagaagagacacagcagcagcagcagccagagcagcgagatcagcaccaagagcaagagcgtggacagcagcctgggcggcctgagcagaagcagcaccgtggccagcctggacaccgacagcaccaagagcagcggccagagcaacaacaacagcgacacctgcgccgagttcagaatcaagtacgtgggcgccatcgagaagctgaagctgagcgagggcaagggcctggagggccccctggacctgatcaactacatcgacgtggcccagcaggacggcaagctgcccttcgtgccccccgaggaggagttcatcatgggcgtgagcaagtacggcatcaaggtgagcaccagcgaccagtacgacgtgctgcacagacacgccctgtactag

SEQ ID NO: 85349 - DNA, 345 bp, synthetic construct
  misc_feature 1..345: note = Description of Artificial Sequence: Synthetic coding sequence
  source 1..345: mol_type = other DNA
atgttcagaaagggcaagaagagacacagcagcagcagcagccagagcagcgagatcagcaccaagagcaagagcgtggacagcagcctgggcggcctgagcagaagcagcaccgtggccagcctggacaccgacagcaccaagagcagcggccagagcaacaacaacagcgacacctgcgccgagttcagaatcaagtacgtgggcgccatcgagaagctgaagctgagcgagggcaagggcctggagggccccctggacctgatcaactacatcgacgtggcccagcaggacggcaagctgcccttcgtgccccccgaggaggagttcatcatgggcgtgtag

SEQ ID NO: 85350 - DNA, 198 bp, synthetic construct
  misc_feature 1..198: note = Description of Artificial Sequence: Synthetic coding sequence
  source 1..198: mol_type = other DNA
atgttcagaaagggcaagaagagacacagcagcagcagcagccagagcagcgagatcagcaccaagagcaagagcgtggacagcagcctgggcggcctgagcagaagcagcaccgtggccagcctggacaccgacagcaccaagagcagcggccagagcaacaacaacagcgacacctgcgccgagttcagaatctag

SEQ ID NO: 85351 - DNA, 453 bp, synthetic construct
  misc_feature 1..453: note = Description of Artificial Sequence: Synthetic coding sequence
  source 1..453: mol_type = other DNA
atgttcagaaagggcaagaagagacacagcagcagcagcagccagagcagcgagatcagcaccaagagcaagagcgtggacagcagcctgggcggcctgagcagaagcagcaccgtggccagcctggacaccgacagcaccaagagcagcggccagagcaacaacaacagcgacacctgcgccgagttcagaatcaagtacgtgggcgccatcgagaagctgaagctgagcgagggcaagggcctggagggccccctggacctgatcaactacatcgacgtggcccagcaggacggcaagctgcccttcgtgccccccgaggaggagttcatcatgggcgtgagcaagtacggcatcaaggtgagcaccagcgaccagtacgagcaggcccaggccatctgcaaggtgctgagcaccgccttcgacagcgtgctgaccagcgagaagccctag

SEQ ID NO: 85352 - DNA, 534 bp, synthetic construct
  misc_feature 1..534: note = Description of Artificial Sequence: Synthetic coding sequence
  source 1..534: mol_type = other DNA
atgcccgtgaagagaagcctgaagctggacggcctgctggaggagaacagcttcgaccccagcaagatcaccagaaagaagagcgtgatcacctacagccccaccaccggcacctgccagatgagcctgttcgccagccccaccagcagcgaggagcagaagcacagaaacggcctgagcaacgagaagagaaagaagctgaaccaccccagcctgaccgagagcaaggagagcaccaccaaggacaacgacgagttcatgatgctgctgagcaaggtggagaagctgagcgaggagatcatggagatcatgcagaacctgagcagcatccaggccctggagggcagcagagagctggagaacctgatcggcatcagctgcgccagccacttcctgaagagagagatgcagaagaccaaggagctgatgaccaaggtgaacaagcagaagctgttcgagaagagcaccggcctgccccacaaggccagcagacacctggacagctacgagttcctgaaggccatcctgaactag

SEQ ID NO: 85353 - DNA, 513 bp, synthetic construct
  misc_feature 1..513: note = Description of Artificial Sequence: Synthetic coding sequence
  source 1..513: mol_type = other DNA
atgcccgtgaagagaagcctgaagctggacggcctgctggaggagaacagcttcgaccccagcaagatcaccagaaagaagagcgtgatcacctacagccccaccaccggcacctgccagatgagcctgttcgccagccccaccagcagcgaggagcagaagcacagaaacggcctgagcaacgagaagagaaagaagctgaaccaccccagcctgaccgagagcaaggagagcaccaccaaggacaacgacgagttcatgatgctgctgagcaaggtggagaagctgagcgaggagatcatggagatcatgcagaacctgagcagcatccaggccctggagggcagcagagagctggagaacctgatcggcatcagctgcgccagccacttcctgaagagagagatgcagaagaccaaggagctgatgaccaaggtgaacaagcagaagctgttcgagaagagcaccggcctgccccacaagggccagccccagatgagccagcccctgtag

SEQ ID NO: 85354 - DNA, 651 bp, synthetic construct
  misc_feature 1..651: note = Description of Artificial Sequence: Synthetic coding sequence
  source 1..651: mol_type = other DNA
atgcccttcgcccccgtggcccaggccagagtgcagtggcacgacttcagaagcctgcagcacctgctgcccgccttcaagagattcagctgcctgagcctgggcagcagctgggactacagcgtgaagagaagcctgaagctggacggcctgctggaggagaacagcttcgaccccagcaagatcaccagaaagaagagcgtgatcacctacagccccaccaccggcacctgccagatgagcctgttcgccagccccaccagcagcgaggagcagaagcacagaaacggcctgagcaacgagaagagaaagaagctgaaccaccccagcctgaccgagagcaaggagagcaccaccaaggacaacgacgagttcatgatgctgctgagcaaggtggagaagctgagcgaggagatcatggagatcatgcagaacctgagcagcatccaggccctggagggcagcagagagctggagaacctgatcggcatcagctgcgccagccacttcctgaagagagagatgcagaagaccaaggagctgatgaccaaggtgaacaagcagaagctgttcgagaagagcaccggcctgccccacaaggccagcagacacctggacagctacgagttcctgaaggccatcctgaactag

SEQ ID NO: 85355 - DNA, 3540 bp, synthetic construct
  misc_feature 1..3540: note = Description of Artificial Sequence: Synthetic coding sequence
  source 1..3540: mol_type = other DNA
atggcccccagacccagagccagacccggcgtggccgtggcctgctgctggctgctgaccgtggtgctgagatgctgcgtgagcttcaacgtggacgtgaagaacagcatgaccttcagcggccccgtggaggacatgttcggctacaccgtgcagcagtacgagaacgaggagggcaagtgggtgctgatcggcagccccctggtgggccagcccaagaacagaaccggcgacgtgtacaagtgccccgtgggcagaggcgagagcctgccctgcgtgaagctggacctgcccgtgaacaccagcatccccaacgtgaccgaggtgaaggagaacatgaccttcggcagcaccctggtgaccaaccccaacggcggcttcctggcctgcggccccctgtacgcctacagatgcggccacctgcactacaccaccggcatctgcagcgacgtgagccccaccttccaggtggtgaacagcatcgcccccgtgcaggagtgcagcacccagctggacatcgtgatcgtgctggacggcagcaacagcatctacccctgggacagcgtgaccgccttcctgaacgacctgctggagagaatggacatcggccccaagcagacccaggtgggcatcgtgcagtacggcgagaacgtgacccacgagttcaacctgaacaagtacagcagcaccgaggaggtgctggtggccgccaagaagatcgtgcagagaggcggcagacagaccatgaccgccctgggcatcgacaccgccagaaaggaggccttcaccgaggccagaggcgccagaagaggcgtgaagaaggtgatggtgatcgtgaccgacggcgagagccacgacaaccacagactgaagaaggtgatccaggactgcgaggacgagaacatccagagattcagcatcgccatcctgggcagctacaacagaggcaacctgagcaccgagaagttcgtggaggagatcaagagcatcgccagcgagcccaccgagaagcacttcttcaacgtgagcgacgagctggccctggtgaccatcgtgaagaccctgggcgagagaatcttcgccctggaggccaccgccgaccagagcgccgccagcttcgagatggagatgagccagaccggcttcagcgcccactacagccaggactgggtgatgctgggcgccgtgggcgcctacgactggaacggcaccgtggtgatgcagaaggccagccagatcatcatccccagaaacaccaccttcaacgtggagagcaccaagaagaacgagcccctggccagctacctgggctacaccgtgaacagcgccaccgccagcagcggcgacgtgctgtacatcgccggccagcccagatacaaccacaccggccaggtgatcatctacagaatggaggacggcaacatcaagatcctgcagaccctgagcggcgagcagatcggcagctacttcggcagcatcctgaccaccaccgacatcgacaaggacagcaacaccgacatcctgctggtgggcgcccccatgtacatgggcaccgagaaggaggagcagggcaaggtgtacgtgtacgccctgaaccagaccagattcgagtaccagatgagcctggagcccatcaagcagacctgctgcagcagcagacagcacaacagctgcaccaccgagaacaagaacgagccctgcggcgccagattcggcaccgccatcgccgccgtgaaggacctgaacctggacggcttcaacgacatcgtgatcggcgcccccctggaggacgaccacggcggcgccgtgtacatctaccacggcagcggcaagaccatcagaaaggagtacgcccagagaatccccagcggcggcgacggcaagaccctgaagttcttcggccagagcatccacggcgagatggacctgaacggcgacggcctgaccgacgtgaccatcggcggcctgggcggcgccgccctgttctggagcagagacgtggccgtggtgaaggtgaccatgaacttcgagcccaacaaggtgaacatccagaagaagaactgccacatggagggcaaggagaccgtgtgcatcaacgccaccgtgtgcttcgacgtgaagctgaagagcaaggaggacaccatctacgaggccgacctgcagtacagagtgaccctggacagcctgagacagatcagcagaagcttcttcagcggcacccaggagagaaaggtgcagagaaacatcaccgtgagaaagagcgagtgcaccaagcacagcttctacatgctggacaagcacgacttccaggacagcgtgagaatcaccctggacttcaacctgaccgaccccgagaacggccccgtgctggacgacagcctgcccaacagcgtgcacgagtacatccccttcgccaaggactgcggcaacaaggagaagtgcatcagcgacctgagcctgcacgtggccaccaccgagaaggacctgctgatcgtgagaagccagaacgacaagttcaacgtgagcctgaccgtgaagaacaccaaggacagcgcctacaacaccagaaccatcgtgcactacagccccaacctggtgttcagcggcatcgaggccatccagaaggacagctgcgagagcaaccacaacatcacctgcaaggtgggctaccccttcctgagaagaggcgagatggtgaccttcaagatcctgttccagttcaacaccagctacctgatggagaacgtgaccatctacctgagcgccaccagcgacagcgaggagccccccgagaccctgagcgacaacgtggtgaacatcagcatccccgtgaagtacgaggtgggcctgcagttctacagcagcgccagcgagtaccacatcagcatcgccgccaacgagaccgtgcccgaggtgatcaacagcaccgaggacatcggcaacgagatcaacatcttctacctgatcagaaagagcggcagcttccccatgcccgagctgaagctgagcatcagcttccccaacatgaccagcaacggctaccccgtgctgtaccccaccggcctgagcagcagcgagaacgccaactgcagaccccacatcttcgaggaccccttcagcatcaacagcggcaagaagatgaccaccagcaccgaccacctgaagagaggcaccatcctggactgcaacacctgcaagttcgccaccatcacctgcaacctgaccagcagcgacatcagccaggtgaacgtgagcctgatcctgtggaagcccaccttcatcaagagctacttcagcagcctgaacctgaccatcagaggcgagctgagaagcgagaacgccagcctggtgctgagcagcagcaaccagaagagagagctggccatccagatcagcaaggacggcctgcccggcagagtgcccctgtgggtgatcctgctgagcgccttcgccggcctgctgctgctgatgctgctgatcctggccctgtggaagatcggcttcttcaagagacccctgaagaagaagatggagaagtag

SEQ ID NO: 85356 - DNA, 3567 bp, synthetic construct
  misc_feature 1..3567: note = Description of Artificial Sequence: Synthetic coding sequence
  source 1..3567: mol_type = other DNA
atggacctgcccagaggcctggtggtggcctgggccctgagcctgtggcccggcttcaccgacaccttcaacatggacaccagaaagcccagagtgatccccggcagcagaaccgccttcttcggctacaccgtgcagcagcacgacatcagcggcaacaagtggctggtggtgggcgcccccctggagaccaacggctaccagaagaccggcgacgtgtacaagtgccccgtgatccacggcaactgcaccaagctgaacctgggcagagtgaccctgagcaacgtgagcgagagaaaggacaacatgagactgggcctgagcctggccaccaaccccaaggacaacagcttcctggcctgcagccccctgtggagccacgagtgcggcagcagctactacaccaccggcatgtgcagcagagtgaacagcaacttcagattcagcaagaccgtggcccccgccctgcagagatgccagacctacatggacatcgtgatcgtgctggacggcagcaacagcatctacccctgggtggaggtgcagcacttcctgatcaacatcctgaagaagttctacatcggccccggccagatccaggtgggcgtggtgcagtacggcgaggacgtggtgcacgagttccacctgaacgactacagaagcgtgaaggacgtggtggaggccgccagccacatcgagcagagaggcggcaccgagaccagaaccgccttcggcatcgagttcgccagaagcgaggccttccagaagggcggcagaaagggcgccaagaaggtgatgatcgtgatcaccgacggcgagagccacgacagccccgacctggagaaggtgatccagcagagcgagagagacaacgtgaccagatacgccgtggccgtgctgggctactacaacagaagaggcatcaaccccgagaccttcctgaacgagatcaagtacatcgccagcgaccccgacgacaagcacttcttcaacgtgaccgacgaggccgccctgaaggacatcgtggacgccctgggcgacagaatcttcagcctggagggcaccaacaagaacgagaccagcttcggcctggagatgagccagaccggcttcagcagccacgtggtggaggacggcgtgctgctgggcgccgtgggcgcctacgactggaacggcgccgtgctgaaggagaccagcgccggcaaggtgatccccctgagagagagctacctgaaggagttccccgaggagctgaagaaccacggcgcctacctgggctacaccgtgaccagcgtggtgagcagcagacagggcagagtgtacgtggccggcgcccccagattcaaccacaccggcaaggtgatcctgttcaccatgcacaacaacagaagcctgaccatccaccaggccatgagaggccagcagatcggcagctacttcggcagcgagatcaccagcgtggacatcgacggcgacggcgtgaccgacgtgctgctggtgggcgcccccatgtacttcaacgagggcagagagagaggcaaggtgtacgtgtacgagctgagacagaacctgttcgtgtacaacggcaccctgaaggacagccacagctaccagaacgccagattcggcagcagcatcgccagcgtgagagacctgaaccaggacagctacaacgacgtggtggtgggcgcccccctggaggacaaccacgccggcgccatctacatcttccacggcttcagaggcagcatcctgaagacccccaagcagagaatcaccgccagcgagctggccaccggcctgcagtacttcggctgcagcatccacggccagctggacctgaacgaggacggcctgatcgacctggccgtgggcgccctgggcaacgccgtgatcctgtggagcagacccgtggtgcagatcaacgccagcctgcacttcgagcccagcaagatcaacatcttccacagagactgcaagagaagcggcagagacgccacctgcctggccgccttcctgtgcttcacccccatcttcctggccccccacttccagaccaccaccgtgggcatcagatacaacgccaccatggacgagagaagatacacccccagagcccacctggacgagggcggcgacagattcaccaacagagccgtgctgctgagcagcggccaggagctgtgcgagagaatcaacttccacgtgctggacaccgccgactacgtgaagcccgtgaccttcagcgtggagtacagcctggaggaccccgaccacggccccatgctggacgacggctggcccaccaccctgagagtgagcgtgcccttctggaacggctgcaacgaggacgagcactgcgtgcccgacctggtgctggacgccagaagcgacctgcccaccgccatggagtactgccagagagtgctgagaaagcccgcccaggactgcagcgcctacaccctgagcttcgacaccaccgtgttcatcatcgagagcaccagacagagagtggccgtggaggccaccctggagaacagaggcgagaacgcctacagcaccgtgctgaacatcagccagagcgccaacctgcagttcgccagcctgatccagaaggaggacagcgacggcagcatcgagtgcgtgaacgaggagagaagactgcagaagcaggtgtgcaacgtgagctaccccttcttcagagccaaggccaaggtggccttcagactggacttcgagttcagcaagagcatcttcctgcaccacctggagatcgagctggccgccggcagcgacagcaacgagagagacagcaccaaggaggacaacgtggcccccctgagattccacctgaagtacgaggccgacgtgctgttcaccagaagcagcagcctgagccactacgaggtgaagcccaacagcagcctggagagatacgacggcatcggcccccccttcagctgcatcttcagaatccagaacctgggcctgttccccatccacggcatgatgatgaagatcaccatccccatcgccaccagaagcggcaacagactgctgaagctgagagacttcctgaccgacgaggccaacaccagctgcaacatctggggcaacagcaccgagtacagacccacccccgtggaggaggacctgagaagagccccccagctgaaccacagcaacagcgacgtggtgagcatcaactgcaacatcagactggtgcccaaccaggagatcaacttccacctgctgggcaacctgtggctgagaagcctgaaggccctgaagtacaagagcatgaagatcatggtgaacgccgccctgcagagacagttccacagccccttcatcttcagagaggaggaccccagcagacagatcgtgttcgagatcagcaagcaggaggactggcaggtgcccatctggatcatcgtgggcagcaccctgggcggcctgctgctgctggccctgctggtgctggccctgtggaagctgggcttcttcagaagcgccagaagaagaagagagcccggcctggaccccacccccaaggtgctggagtag

SEQ ID NO: 85357 - DNA, 3570 bp, synthetic construct
  misc_feature 1..3570: note = Description of Artificial Sequence: Synthetic coding sequence
  source 1..3570: mol_type = other DNA
atggacctgcccagaggcctggtggtggcctgggccctgagcctgtggcccggcttcaccgacaccttcaacatggacaccagaaagcccagagtgatccccggcagcagaaccgccttcttcggctacaccgtgcagcagcacgacatcagcggcaacaagtggctggtggtgggcgcccccctggagaccaacggctaccagaagaccggcgacgtgtacaagtgccccgtgatccacggcaactgcaccaagctgaacctgggcagagtgaccctgagcaacgtgagcgagagaaaggacaacatgagactgggcctgagcctggccaccaaccccaaggacaacagcttcctggcctgcagccccctgtggagccacgagtgcggcagcagctactacaccaccggcatgtgcagcagagtgaacagcaacttcagattcagcaagaccgtggcccccgccctgcagagatgccagacctacatggacatcgtgatcgtgctggacggcagcaacagcatctacccctgggtggaggtgcagcacttcctgatcaacatcctgaagaagttctacatcggccccggccagatccaggtgggcgtggtgcagtacggcgaggacgtggtgcacgagttccacctgaacgactacagaagcgtgaaggacgtggtggaggccgccagccacatcgagcagagaggcggcaccgagaccagaaccgccttcggcatcgagttcgccagaagcgaggccttccagaagggcggcagaaagggcgccaagaaggtgatgatcgtgatcaccgacggcgagagccacgacagccccgacctggagaaggtgatccagcagagcgagagagacaacgtgaccagatacgccgtggccgtgctgggctactacaacagaagaggcatcaaccccgagaccttcctgaacgagatcaagtacatcgccagcgaccccgacgacaagcacttcttcaacgtgaccgacgaggccgccctgaaggacatcgtggacgccctgggcgacagaatcttcagcctggagggcaccaacaagaacgagaccagcttcggcctggagatgagccagaccggcttcagcagccacgtggtggaggacggcgtgctgctgggcgccgtgggcgcctacgactggaacggcgccgtgctgaaggagaccagcgccggcaaggtgatccccctgagagagagctacctgaaggagttccccgaggagctgaagaaccacggcgcctacctgggctacaccgtgaccagcgtggtgagcagcagacagggcagagtgtacgtggccggcgcccccagattcaaccacaccggcaaggtgatcctgttcaccatgcacaacaacagaagcctgaccatccaccaggccatgagaggccagcagatcggcagctacttcggcagcgagatcaccagcgtggacatcgacggcgacggcgtgaccgacgtgctgctggtgggcgcccccatgtacttcaacgagggcagagagagaggcaaggtgtacgtgtacgagctgagacagaacctgttcgtgtacaacggcaccctgaaggacagccacagctaccagaacgccagattcggcagcagcatcgccagcgtgagagacctgaaccaggacagctacaacgacgtggtggtgggcgcccccctggaggacaaccacgccggcgccatctacatcttccacggcttcagaggcagcatcctgaagacccccaagcagagaatcaccgccagcgagctggccaccggcctgcagtacttcggctgcagcatccacggccagctggacctgaacgaggacggcctgatcgacctggccgtgggcgccctgggcaacgccgtgatcctgtggagcagacccgtggtgcagatcaacgccagcctgcacttcgagcccagcaagatcaacatcttccacagagactgcaagagaagcggcagagacgccacctgcctggccgccttcctgtgcttcacccccatcttcctggccccccacttccagaccaccaccgtgggcatcagatacaacgccaccatggacgagagaagatacacccccagagcccacctggacgagggcggcgacagattcaccaacagagccgtgctgctgagcagcggccaggagctgtgcgagagaatcaacttccacgtgctggacaccgccgactacgtgaagcccgtgaccttcagcgtggagtacagcctggaggaccccgaccacggccccatgctggacgacggctggcccaccaccctgagagtgagcgtgcccttctggaacggctgcaacgaggacgagcactgcgtgcccgacctggtgctggacgccagaagcgacctgcccaccgccatggagtactgccagagagtgctgagaaagcccgcccaggactgcagcgcctacaccctgagcttcgacaccaccgtgttcatcatcgagagcaccagacagagagtggccgtggaggccaccctggagaacagaggcgagaacgcctacagcaccgtgctgaacatcagccagagcgccaacctgcagttcgccagcctgatccagaaggaggacagcgacggcagcatcgagtgcgtgaacgaggagagaagactgcagaagcaggtgtgcaacgtgagctaccccttcttcagagccaaggccaaggtggccttcagactggacttcgagttcagcaagagcatcttcctgcaccacctggagatcgagctggccgccggcagcgacagcaacgagagagacagcaccaaggaggacaacgtggcccccctgagattccacctgaagtacgaggccgacgtgctgttcaccagaagcagcagcctgagccactacgaggtgaagcccaacagcagcctggagagatacgacggcatcggcccccccttcagctgcatcttcagaatccagaacctgggcctgttccccatccacggcatgatgatgaagatcaccatccccatcgccaccagaagcggcaacagactgctgaagctgagagacttcctgaccgacgaggtggccaacaccagctgcaacatctggggcaacagcaccgagtacagacccacccccgtggaggaggacctgagaagagccccccagctgaaccacagcaacagcgacgtggtgagcatcaactgcaacatcagactggtgcccaaccaggagatcaacttccacctgctgggcaacctgtggctgagaagcctgaaggccctgaagtacaagagcatgaagatcatggtgaacgccgccctgcagagacagttccacagccccttcatcttcagagaggaggaccccagcagacagatcgtgttcgagatcagcaagcaggaggactggcaggtgcccatctggatcatcgtgggcagcaccctgggcggcctgctgctgctggccctgctggtgctggccctgtggaagctgggcttcttcagaagcgccagaagaagaagagagcccggcctggaccccacccccaaggtgctggagtag

SEQ ID NO: 85358 - DNA, 2472 bp, synthetic construct
  misc_feature 1..2472: note = Description of Artificial Sequence: Synthetic coding sequence
  source 1..2472: mol_type = other DNA
atgagccagaccggcttcagcagccacgtggtggaggacggcgtgctgctgggcgccgtgggcgcctacgactggaacggcgccgtgctgaaggagaccagcgccggcaaggtgatccccctgagagagagctacctgaaggagttccccgaggagctgaagaaccacggcgcctacctgggctacaccgtgaccagcgtggtgagcagcagacagggcagagtgtacgtggccggcgcccccagattcaaccacaccggcaaggtgatcctgttcaccatgcacaacaacagaagcctgaccatccaccaggccatgagaggccagcagatcggcagctacttcggcagcgagatcaccagcgtggacatcgacggcgacggcgtgaccgacgtgctgctggtgggcgcccccatgtacttcaacgagggcagagagagaggcaaggtgtacgtgtacgagctgagacagaacctgttcgtgtacaacggcaccctgaaggacagccacagctaccagaacgccagattcggcagcagcatcgccagcgtgagagacctgaaccaggacagctacaacgacgtggtggtgggcgcccccctggaggacaaccacgccggcgccatctacatcttccacggcttcagaggcagcatcctgaagacccccaagcagagaatcaccgccagcgagctggccaccggcctgcagtacttcggctgcagcatccacggccagctggacctgaacgaggacggcctgatcgacctggccgtgggcgccctgggcaacgccgtgatcctgtggagcagacccgtggtgcagatcaacgccagcctgcacttcgagcccagcaagatcaacatcttccacagagactgcaagagaagcggcagagacgccacctgcctggccgccttcctgtgcttcacccccatcttcctggccccccacttccagaccaccaccgtgggcatcagatacaacgccaccatggacgagagaagatacacccccagagcccacctggacgagggcggcgacagattcaccaacagagccgtgctgctgagcagcggccaggagctgtgcgagagaatcaacttccacgtgctggacaccgccgactacgtgaagcccgtgaccttcagcgtggagtacagcctggaggaccccgaccacggccccatgctggacgacggctggcccaccaccctgagagtgagcgtgcccttctggaacggctgcaacgaggacgagcactgcgtgcccgacctggtgctggacgccagaagcgacctgcccaccgccatggagtactgccagagagtgctgagaaagcccgcccaggactgcagcgcctacaccctgagcttcgacaccaccgtgttcatcatcgagagcaccagacagagagtggccgtggaggccaccctggagaacagaggcgagaacgcctacagcaccgtgctgaacatcagccagagcgccaacctgcagttcgccagcctgatccagaaggaggacagcgacggcagcatcgagtgcgtgaacgaggagagaagactgcagaagcaggtgtgcaacgtgagctaccccttcttcagagccaaggccaaggtggccttcagactggacttcgagttcagcaagagcatcttcctgcaccacctggagatcgagctggccgccggcagcgacagcaacgagagagacagcaccaaggaggacaacgtggcccccctgagattccacctgaagtacgaggccgacgtgctgttcaccagaagcagcagcctgagccactacgaggtgaagcccaacagcagcctggagagatacgacggcatcggcccccccttcagctgcatcttcagaatccagaacctgggcctgttccccatccacggcatgatgatgaagatcaccatccccatcgccaccagaagcggcaacagactgctgaagctgagagacttcctgaccgacgaggccaacaccagctgcaacatctggggcaacagcaccgagtacagacccacccccgtggaggaggacctgagaagagccccccagctgaaccacagcaacagcgacgtggtgagcatcaactgcaacatcagactggtgcccaaccaggagatcaacttccacctgctgggcaacctgtggctgagaagcctgaaggccctgaagtacaagagcatgaagatcatggtgaacgccgccctgcagagacagttccacagccccttcatcttcagagaggaggaccccagcagacagatcgtgttcgagatcagcaagcaggaggactggcaggtgcccatctggatcatcgtgggcagcaccctgggcggcctgctgctgctggccctgctggtgctggccctgtggaagctgggcttcttcagaagcgccagaagaagaagagagcccggcctggaccccacccccaaggtgctggagtag

SEQ ID NO: 85359 - DNA, 1953 bp, synthetic construct
  misc_feature 1..1953: note = Description of Artificial Sequence: Synthetic coding sequence
  source 1..1953: mol_type = other DNA
atggacctgcccagaggcctggtggtggcctgggccctgagcctgtggcccggcttcaccgacaccttcaacatggacaccagaaagcccagagtgatccccggcagcagaaccgccttcttcggctacaccgtgcagcagcacgacatcagcggcaacaagtggctggtggtgggcgcccccctggagaccaacggctaccagaagaccggcgacgtgtacaagtgccccgtgatccacggcaactgcaccaagctgaacctgggcagagtgaccctgagcaacgtgagcgagagaaaggacaacatgagactgggcctgagcctggccaccaaccccaaggacaacagcttcctggcctgcagccccctgtggagccacgagtgcggcagcagctactacaccaccggcatgtgcagcagagtgaacagcaacttcagattcagcaagaccgtggcccccgccctgcagagatgccagacctacatggacatcgtgatcgtgctggacggcagcaacagcatctacccctgggtggaggtgcagcacttcctgatcaacatcctgaagaagttctacatcggccccggccagatccaggtgggcgtggtgcagtacggcgaggacgtggtgcacgagttccacctgaacgactacagaagcgtgaaggacgtggtggaggccgccagccacatcgagcagagaggcggcaccgagaccagaaccgccttcggcatcgagttcgccagaagcgaggccttccagaagggcggcagaaagggcgccaagaaggtgatgatcgtgatcaccgacggcgagagccacgacagccccgacctggagaaggtgatccagcagagcgagagagacaacgtgaccagatacgccgtggccgtgctgggctactacaacagaagaggcatcaaccccgagaccttcctgaacgagatcaagtacatcgccagcgaccccgacgacaagcacttcttcaacgtgaccgacgaggccgccctgaaggacatcgtggacgccctgggcgacagaatcttcagcctggagggcaccaacaagaacgagaccagcttcggcctggagatgagccagaccggcttcagcagccacgtggtggaggacggcgtgctgctgggcgccgtgggcgcctacgactggaacggcgccgtgctgaaggagaccagcgccggcaaggtgatccccctgagagagagctacctgaaggagttccccgaggagctgaagaaccacggcgcctacctgggctacaccgtgaccagcgtggtgagcagcagacagggcagagtgtacgtggccggcgcccccagattcaaccacaccggcaaggtgatcctgttcaccatgcacaacaacagaagcctgaccatccaccaggccatgagaggccagcagatcggcagctacttcggcagcgagatcaccagcgtggacatcgacggcgacggcgtgaccgacgtgctgctggtgggcgcccccatgtacttcaacgagggcagagagagaggcaaggtgtacgtgtacgagctgagacagaacctgttcgtgtacaacggcaccctgaaggacagccacagctaccagaacgccagattcggcagcagcatcgccagcgtgagagacctgaaccaggacagctacaacgacgtggtggtgggcgcccccctggaggacaaccacgccggcgccatctacatcttccacggcttcagaggcagcatcctgaagacccccaagcagagaatcaccgccagcgagctggccaccggcctgcagtacttcggctgcagcatccacggccagctggacctgaacgaggacggcctgatcgacctggccgtgggcgccctgggcaacgccgtgatcctgtggacccccccccccaagtgctggagcgaggcccccgaggagaccctgagctag

SEQ ID NO: 85360 - DNA, 3546 bp, synthetic construct
  misc_feature 1..3546: note = Description of Artificial Sequence: Synthetic coding sequence
  source 1..3546: mol_type = other DNA
atgggccccgagagaaccggcgccgcccccctgcccctgctgctggtgctggccctgagccagggcatcctgaactgctgcctggcctacaacgtgggcctgcccgaggccaagatcttcagcggccccagcagcgagcagttcggctacgccgtgcagcagttcatcaaccccaagggcaactggctgctggtgggcagcccctggagcggcttccccgagaacagaatgggcgacgtgtacaagtgccccgtggacctgagcaccgccacctgcgagaagctgaacctgcagaccagcaccagcatccccaacgtgaccgagatgaagaccaacatgagcctgggcctgatcctgaccagaaacatgggcaccggcggcttcctgacctgcggccccctgtgggcccagcagtgcggcaaccagtactacaccaccggcgtgtgcagcgacatcagccccgacttccagctgagcgccagcttcagccccgccacccagccctgccccagcctgatcgacgtggtggtggtgtgcgacgagagcaacagcatctacccctgggacgccgtgaagaacttcctggagaagttcgtgcagggcctggacatcggccccaccaagacccaggtgggcctgatccagtacgccaacaaccccagagtggtgttcaacctgaacacctacaagaccaaggaggagatgatcgtggccaccagccagaccagccagtacggcggcgacctgaccaacaccttcggcgccatccagtacgccagaaagtacgcctacagcgccgccagcggcggcagaagaagcgccaccaaggtgatggtggtggtgaccgacggcgagagccacgacggcagcatgctgaaggccgtgatcgaccagtgcaaccacgacaacatcctgagattcggcatcgccgtgctgggctacctgaacagaaacgccctggacaccaagaacctgatcaaggagatcaaggccatcgccagcatccccaccgagagatacttcttcaacgtgagcgacgaggccgccctgctggagaaggccggcaccctgggcgagcagatcttcagcatcgagggcaccgtgcagggcggcgacaacttccagatggagatgagccaggtgggcttcagcgccgactacagcagccagaacgacatcctgatgctgggcgccgtgggcgccttcggctggagcggcaccatcgtgcagaagaccagccacggccacctgatcttccccaagcaggccttcgaccagatcctgcaggacagaaaccacagcagctacctgggctacagcgtggccgccatcagcaccggcgagagcacccacttcgtggccggcgcccccagagccaactacaccggccagatcgtgctgtacagcgtgaacgagaacggcaacatcaccgtgatccaggcccacagaggcgaccagatcggcagctacttcggcagcgtgctgtgcagcgtggacgtggacaaggacaccatcaccgacgtgctgctggtgggcgcccccatgtacatgagcgacctgaagaaggaggagggcagagtgtacctgttcaccatcaaggagggcatcctgggccagcaccagttcctggagggccccgagggcatcgagaacaccagattcggcagcgccatcgccgccctgagcgacatcaacatggacggcttcaacgacgtgatcgtgggcagccccctggagaaccagaacagcggcgccgtgtacatctacaacggccaccagggcaccatcagaaccaagtacagccagaagatcctgggcagcgacggcgccttcagaagccacctgcagtacttcggcagaagcctggacggctacggcgacctgaacggcgacagcatcaccgacgtgagcatcggcgccttcggccaggtggtgcagctgtggagccagagcatcgccgacgtggccatcgaggccagcttcacccccgagaagatcaccctggtgaacaagaacgcccagatcatcctgaagctgtgcttcagcgccaagttcagacccaccaagcagaacaaccaggtggccatcgtgtacaacatcaccctggacgccgacggcttcagcagcagagtgaccagcagaggcctgttcaaggagaacaacgagagatgcctgcagaagaacatggtggtgaaccaggcccagagctgccccgagcacatcatctacatccaggagcccagcgacgtggtgaacagcctggacctgagagtggacatcagcctggagaaccccggcaccagccccgccctggaggcctacagcgagaccgccaaggtgttcagcatccccttccacaaggactgcggcgaggacggcctgtgcatcagcgacctggtgctggacgtgagacagatccccgccgcccaggagcagcccttcatcgtgagcaaccagaacaagagactgaccttcagcgtgaccctgaagaacaagagagagagcgcctacaacaccggcatcgtggtggacttcagcgagaacctgttcttcgccagcttcagcctgcccgtggacggcaccgaggtgacctgccaggtggccgccagccagaagagcgtggcctgcgacgtgggctaccccgccctgaagagagagcagcaggtgaccttcaccatcaacttcgacttcaacctgcagaacctgcagaaccaggccagcctgagcttccaggccctgagcgagagccaggaggagaacaaggccgacaacctggtgaacctgaagatccccctgctgtacgacgccgagatccacctgaccagaagcaccaacatcaacttctacgagatcagcagcgacggcaacgtgcccagcatcgtgcacagcttcgaggacgtgggccccaagttcatcttcagcctgaaggtgaccaccggcagcgtgcccgtgagcatggccaccgtgatcatccacatcccccagtacaccaaggagaagaaccccctgatgtacctgaccggcgtgcagaccgacaaggccggcgacatcagctgcaacgccgacatcaaccccctgaagatcggccagaccagcagcagcgtgagcttcaagagcgagaacttcagacacaccaaggagctgaactgcagaaccgccagctgcagcaacgtgacctgctggctgaaggacgtgcacatgaagggcgagtacttcgtgaacgtgaccaccagaatctggaacggcaccttcgccagcagcaccttccagaccgtgcagctgaccgccgccgccgagatcaacacctacaaccccgagatctacgtgatcgaggacaacaccgtgaccatccccctgatgatcatgaagcccgacgagaaggccgaggtgcccaccggcgtgatcatcggcagcatcatcgccggcatcctgctgctgctggccctggtggccatcctgtggaagctgggcttcttcaagagaaagtacgagaagatgaccaagaaccccgacgagatcgacgagaccaccgagctgagcagctag

SEQ ID NO: 85361 - DNA, 2448 bp, synthetic construct
  misc_feature 1..2448: note = Description of Artificial Sequence: Synthetic coding sequence
  source 1..2448: mol_type = other DNA
atgggccccgagagaaccggcgccgcccccctgcccctgctgctggtgctggccctgagccagggcatcctgaactgctgcctggcctacaacgtgggcctgcccgaggccaagatcttcagcggccccagcagcgagcagttcggctacgccgtgcagcagttcatcaaccccaagggcaactggctgctggtgggcagcccctggagcggcttccccgagaacagaatgggcgacgtgtacaagtgccccgtggacctgagcaccgccacctgcgagaagctgaacctgcagaccagcaccagcatccccaacgtgaccgagatgaagaccaacatgagcctgggcctgatcctgaccagaaacatgggcaccggcggcttcctgacctgcggccccctgtgggcccagcagtgcggcaaccagtactacaccaccggcgtgtgcagcgacatcagccccgacttccagctgagcgccagcttcagccccgccacccagccctgccccagcctgatcgacgtggtggtggtgtgcgacgagagcaacagcatctacccctgggacgccgtgaagaacttcctggagaagttcgtgcagggcctggacatcggccccaccaagacccaggtgggcctgatccagtacgccaacaaccccagagtggtgttcaacctgaacacctacaagaccaaggaggagatgatcgtggccaccagccagaccagccagtacggcggcgacctgaccaacaccttcggcgccatccagtacgccagaaagtacgcctacagcgccgccagcggcggcagaagaagcgccaccaaggtgatggtggtggtgaccgacggcgagagccacgacggcagcatgctgaaggccgtgatcgaccagtgcaaccacgacaacatcctgagattcggcatcgccgtgctgggctacctgaacagaaacgccctggacaccaagaacctgatcaaggagatcaaggccatcgccagcatccccaccgagagatacttcttcaacgtgagcgacgaggccgccctgctggagaaggccggcaccctgggcgagcagatcttcagcatcgagggcaccgtgcagggcggcgacaacttccagatggagatgagccaggtgggcttcagcgccgactacagcagccagaacgacatcctgatgctgggcgccgtgggcgccttcggctggagcggcaccatcgtgcagaagaccagccacggccacctgatcttccccaagcaggccttcgaccagatcctgcaggacagaaaccacagcagctacctgggctacagcgtggccgccatcagcaccggcgagagcacccacttcgtggccggcgcccccagagccaactacaccggccagatcgtgctgtacagcgtgaacgagaacggcaacatcaccgtgatccaggcccacagaggcgaccagatcggcagctacttcggcagcgtgctgtgcagcgtggacgtggacaaggacaccatcaccgacgtgctgctggtgggcgcccccatgtacatgagcgacctgaagaaggaggagggcagagtgtacctgttcaccatcaaggagggcatcctgggccagcaccagttcctggagggccccgagggcatcgagaacaccagattcggcagcgccatcgccgccctgagcgacatcaacatggacggcttcaacgacgtgatcgtgggcagccccctggagaaccagaacagcggcgccgtgtacatctacaacggccaccagggcaccatcagaaccaagtacagccagaagatcctgggcagcgacggcgccttcagaagccacctgcagtacttcggcagaagcctggacggctacggcgacctgaacggcgacagcatcaccgacgtgagcatcggcgccttcggccaggtggtgcagctgtggagccagagcatcgccgacgtggccatcgaggccagcttcacccccgagaagatcaccctggtgaacaagaacgcccagatcatcctgaagctgtgcttcagcgccaagttcagacccaccaagcagaacaaccaggtggccatcgtgtacaacatcaccctggacgccgacggcttcagcagcagagtgaccagcagaggcctgttcaaggagaacaacgagagatgcctgcagaagaacatggtggtgaaccaggcccagagctgccccgagcacatcatctacatccaggagcccagcgacgtggtgaacagcctggacctgagagtggacatcagcctggagaaccccggcaccagccccgccctggaggcctacagcgagaccgccaaggtgttcagcatccccttccacaaggactgcggcgaggacggcctgtgcatcagcgacctggtgctggacgtgagacagatccccgccgcccagctgatgggccagaagtag

SEQ ID NO: 85362 - DNA, 1926 bp, synthetic construct
  misc_feature 1..1926: note = Description of Artificial Sequence: Synthetic coding sequence
  source 1..1926: mol_type = other DNA
atgggccccgagagaaccggcgccgcccccctgcccctgctgctggtgctggccctgagccagggcatcctgaactgctgcctggcctacaacgtgggcctgcccgaggccaagatcttcagcggccccagcagcgagcagttcggctacgccgtgcagcagttcatcaaccccaagggcaactggctgctggtgggcagcccctggagcggcttccccgagaacagaatgggcgacgtgtacaagtgccccgtggacctgagcaccgccacctgcgagaagctgaacctgcagaccagcaccagcatccccaacgtgaccgagatgaagaccaacatgagcctgggcctgatcctgaccagaaacatgggcaccggcggcttcctgacctgcggccccctgtgggcccagcagtgcggcaaccagtactacaccaccggcgtgtgcagcgacatcagccccgacttccagctgagcgccagcttcagccccgccacccagccctgccccagcctgatcgacgtggtggtggtgtgcgacgagagcaacagcatctacccctgggacgccgtgaagaacttcctggagaagttcgtgcagggcctggacatcggccccaccaagacccaggtgggcctgatccagtacgccaacaaccccagagtggtgttcaacctgaacacctacaagaccaaggaggagatgatcgtggccaccagccagaccagccagtacggcggcgacctgaccaacaccttcggcgccatccagtacgccagaaagtacgcctacagcgccgccagcggcggcagaagaagcgccaccaaggtgatggtggtggtgaccgacggcgagagccacgacggcagcatgctgaaggccgtgatcgaccagtgcaaccacgacaacatcctgagattcggcatcgccgtgctgggctacctgaacagaaacgccctggacaccaagaacctgatcaaggagatcaaggccatcgccagcatccccaccgagagatacttcttcaacgtgagcgacgaggccgccctgctggagaaggccggcaccctgggcgagcagatcttcagcatcgagggcaccgtgcagggcggcgacaacttccagatggagatgagccaggtgggcttcagcgccgactacagcagccagaacgacatcctgatgctgggcgccgtgggcgccttcggctggagcggcaccatcgtgcagaagaccagccacggccacctgatcttccccaagcaggccttcgaccagatcctgcaggacagaaaccacagcagctacctgggctacagcgtggccgccatcagcaccggcgagagcacccacttcgtggccggcgcccccagagccaactacaccggccagatcgtgctgtacagcgtgaacgagaacggcaacatcaccgtgatccaggcccacagaggcgaccagatcggcagctacttcggcagcgtgctgtgcagcgtggacgtggacaaggacaccatcaccgacgtgctgctggtgggcgcccccatgtacatgagcgacctgaagaaggaggagggcagagtgtacctgttcaccatcaaggagggcatcctgggccagcaccagttcctggagggccccgagggcatcgagaacaccagattcggcagcgccatcgccgccctgagcgacatcaacatggacggcttcaacgacgtgatcgtgggcagccccctggagaaccagaacagcggcgccgtgtacatctacaacggccaccagggcaccatcagaaccaagtacagccagctgctgtgcaccatcatcagctgccagacctgcagcttcagaaagagctgggaccccatggagcccctgggcgccatcagcagcaccctgggcggcccctggatggccatggagatctag

SEQ ID NO: 85363 - DNA, 2829 bp, synthetic construct
  misc_feature 1..2829: note = Description of Artificial Sequence: Synthetic coding sequence
  source 1..2829: mol_type = other DNA
atgggccccgagagaaccggcgccgcccccctgcccctgctgctggtgctggccctgagccagggcatcctgaactgctgcctggcctacaacgtgggcctgcccgaggccaagatcttcagcggccccagcagcgagcagttcggctacgccgtgcagcagttcatcaaccccaagggcaactggctgctggtgggcagcccctggagcggcttccccgagaacagaatgggcgacgtgtacaagtgccccgtggacctgagcaccgccacctgcgagaagctgaacctgcagaccagcaccagcatccccaacgtgaccgagatgaagaccaacatgagcctgggcctgatcctgaccagaaacatgggcaccggcggcttcctgacctgcggccccctgtgggcccagcagtgcggcaaccagtactacaccaccggcgtgtgcagcgacatcagccccgacttccagctgagcgccagcttcagccccgccacccagccctgccccagcctgatcgacgtggtggtggtgtgcgacgagagcaacagcatctacccctgggacgccgtgaagaacttcctggagaagttcgtgcagggcctggacatcggccccaccaagacccaggtgggcctgatccagtacgccaacaaccccagagtggtgttcaacctgaacacctacaagaccaaggaggagatgatcgtggccaccagccagaccagccagtacggcggcgacctgaccaacaccttcggcgccatccagtacgccagaaagtacgcctacagcgccgccagcggcggcagaagaagcgccaccaaggtgatggtggtggtgaccgacggcgagagccacgacggcagcatgctgaaggccgtgatcgaccagtgcaaccacgacaacatcctgagattcggcatcgccgtgctgggctacctgaacagaaacgccctggacaccaagaacctgatcaaggagatcaaggccatcgccagcatccccaccgagagatacttcttcaacgtgagcgacgaggccgccctgctggagaaggccggcaccctgggcgagcagatcttcagcatcgagggcaccgtgcagggcggcgacaacttccagatggagatgagccaggtgggcttcagcgccgactacagcagccagaacgacatcctgatgctgggcgccgtgggcgccttcggctggagcggcaccatcgtgcagaagaccagccacggccacctgatcttccccaagcaggccttcgaccagatcctgcaggacagaaaccacagcagctacctgggctacagcgtggccgccatcagcaccggcgagagcacccacttcgtggccggcgcccccagagccaactacaccggccagatcgtgctgtacagcgtgaacgagaacggcaacatcaccgtgatccaggcccacagaggcgaccagatcggcagctacttcggcagcgtgctgtgcagcgtggacgtggacaaggacaccatcaccgacgtgctgctggtgggcgcccccatgtacatgagcgacctgaagaaggaggagggcagagtgtacctgttcaccatcaaggagggcatcctgggccagcaccagttcctggagggccccgagggcatcgagaacaccagattcggcagcgccatcgccgccctgagcgacatcaacatggacggcttcaacgacgtgatcgtgggcagccccctggagaaccagaacagcggcgccgtgtacatctacaacggccaccagggcaccatcagaaccaagtacagccagaagatcctgggcagcgacggcgccttcagaagccacctgcagtacttcggcagaagcctggacggctacggcgacctgaacggcgacagcatcaccgacgtgagcatcggcgccttcggccaggtggtgcagctgtggagccagagcatcgccgacgtggccatcgaggccagcttcacccccgagaagatcaccctggtgaacaagaacgcccagatcatcctgaagctgtgcttcagcgccaagttcagacccaccaagcagaacaaccaggtggccatcgtgtacaacatcaccctggacgccgacggcttcagcagcagagtgaccagcagaggcctgttcaaggagaacaacgagagatgcctgcagaagaacatggtggtgaaccaggcccagagctgccccgagcacatcatctacatccaggagcccagcgacgtggtgaacagcctggacctgagagtggacatcagcctggagaaccccggcaccagccccgccctggaggcctacagcgagaccgccaaggtgttcagcatccccttccacaaggactgcggcgaggacggcctgtgcatcagcgacctggtgctggacgtgagacagatccccgccgcccaggagcagcccttcatcgtgagcaaccagaacaagagactgaccttcagcgtgaccctgaagaacaagagagagagcgcctacaacaccggcatcgtggtggacttcagcgagaacctgttcttcgccagcttcagcctgcccgtggacggcaccgaggtgacctgccaggtggccgccagccagaagagcgtggcctgcgacgtgggctaccccgccctgaagagagagcagcaggtgaccttcaccatcaacttcgacttcaacctgcagaacctgcagaaccaggccagcctgagcttccaggccctgagcgagagccaggaggagaacaaggccgacaacctggtgaacctgaagatccccctgctgtacgacgccgagatccacctgaccagatag

SEQ ID NO: 85364 - DNA, 3120 bp, synthetic construct
  misc_feature 1..3120: note = Description of Artificial Sequence: Synthetic coding sequence
  source 1..3120: mol_type = other DNA
atggccagagccctgtgccccctgcaggccctgtggctgctggagtgggtgctgctgctgctgggcccctgcgccgccccccccgcctgggccctgaacctggaccccgtgcagctgaccttctacgccggccccaacggcagccagttcggcttcagcctggacttccacaaggacagccacggcagagtggccatcgtggtgggcgcccccagaaccctgggccccagccaggaggagaccggcggcgtgttcctgtgcccctggagagccgagggcggccagtgccccagcctgctgttcgacctgagagacgagaccagaaacgtgggcagccagaccctgcagaccttcaaggccagacagggcctgggcgccagcgtggtgagctggagcgacgtgatcgtggcctgcgccccctggcagcactggaacgtgctggagaagaccgaggaggccgagaagacccccgtgggcagctgcttcctggcccagcccgagagcggcagaagagccgagtacagcccctgcagaggcaacaccctgagcagaatctacgtggagaacgacttcagctgggacaagagatactgcgaggccggcttcagcagcgtggtgacccaggccggcgagctggtgctgggcgcccccggcggctactacttcctgggcctgctggcccaggcccccgtggccgacatcttcagcagctacagacccggcatcctgctgtggcacgtgagcagccagagcctgagcttcgacagcagcaaccccgagtacttcgacggctactggggctacagcgtggccgtgggcgagttcgacggcgacctgaacaccaccgagtacgtggtgggcgcccccacctggagctggaccctgggcgccgtggagatcctggacagctactaccagagactgcacagactgagaggcgagcagatggccagctacttcggccacagcgtggccgtgaccgacgtgaacggcgacggcagacacgacctgctggtgggcgcccccctgtacatggagagcagagccgacagaaagctggccgaggtgggcagagtgtacctgttcctgcagcccagaggcccccacgccctgggcgcccccagcctgctgctgaccggcacccagctgtacggcagattcggcagcgccatcgcccccctgggcgacctggacagagacggctacaacgacatcgccgtggccgccccctacggcggccccagcggcagaggccaggtgctggtgttcctgggccagagcgagggcctgagaagcagacccagccaggtgctggacagccccttccccaccggcagcgccttcggcttcagcctgagaggcgccgtggacatcgacgacaacggctaccccgacctgatcgtgggcgcctacggcgccaaccaggtggccgtgtacagagcccagcccgtggtgaaggccagcgtgcagctgctggtgcaggacagcctgaaccccgccgtgaagagctgcgtgctgccccagaccaagacccccgtgagctgcttcaacatccagatgtgcgtgggcgccaccggccacaacatcccccagaagctgagcctgaacgccgagctgcagctggacagacagaagcccagacagggcagaagagtgctgctgctgggcagccagcaggccggcaccaccctgaacctggacctgggcggcaagcacagccccatctgccacaccaccatggccttcctgagagacgaggccgacttcagagacaagctgagccccatcgtgctgagcctgaacgtgagcctgccccccaccgaggccggcatggcccccgccgtggtgctgcacggcgacacccacgtgcaggagcagaccagaatcgtgctggactgcggcgaggacgacgtgtgcgtgccccagctgcagctgaccgccagcgtgaccggcagccccctgctggtgggcgccgacaacgtgctggagctgcagatggacgccgccaacgagggcgagggcgcctacgaggccgagctggccgtgcacctgccccagggcgcccactacatgagagccctgagcaacgtggagggcttcgagagactgatctgcaaccagaagaaggagaacgagaccagagtggtgctgtgcgagctgggcaaccccatgaagaagaacgcccagatcggcatcgccatgctggtgagcgtgggcaacctggaggaggccggcgagagcgtgagcttccagctgcagatcagaagcaagaacagccagaaccccaacagcaagatcgtgctgctggacgtgcccgtgagagccgaggcccaggtggagctgagaggcaacagcttccccgccagcctggtggtggccgccgaggagggcgagagagagcagaacagcctggacagctggggccccaaggtggagcacacctacgagctgcacaacaacggccccggcaccgtgaacggcctgcacctgagcatccacctgcccggccagagccagcccagcgacctgctgtacatcctggacatccagccccagggcggcctgcagtgcttcccccagccccccgtgaaccccctgaaggtggactggggcctgcccatccccagccccagccccatccaccccgcccaccacaagagagacagaagacagatcttcctgcccgagcccgagcagcccagcagactgcaggaccccgtgctggtgagctgcgacagcgccccctgcaccgtggtgcagtgcgacctgcaggagatggccagaggccagagagccatggtgaccgtgctggccttcctgtggctgcccagcctgtaccagagacccctggaccagttcgtgctgcagagccacgcctggttcaacgtgagcagcctgccctacgccgtgccccccctgagcctgcccagaggcgaggcccaggtgtggacccagctgctgagagccctggaggagagagccatccccatctggtgggtgctggtgggcgtgctgggcggcctgctgctgctgaccatcctggtgctggccatgtggaaggtgggcttcttcaagagaaacagaccccccctggaggaggacgacgaggagggcgagtag

SEQ ID NO: 85365 - DNA, 3018 bp, synthetic construct
  misc_feature 1..3018: note = Description of Artificial Sequence: Synthetic coding sequence
  source 1..3018: mol_type = other DNA
atggccagagccctgtgccccctgcaggccctgtggctgctggagtgggtgctgctgctgctgggcccctgcgccgccccccccgcctgggccctgaacctggaccccgtgcagctgaccttctacgccggccccaacggcagccagttcggcttcagcctggacttccacaaggacagccacggcagagtggccatcgtggtgggcgcccccagaaccctgggccccagccaggaggagaccggcggcgtgttcctgtgcccctggagagccgagggcggccagtgccccagcctgctgttcgacctgagagacgagaccagaaacgtgggcagccagaccctgcagaccttcaaggccagacagggcctgggcgccagcgtggtgagctggagcgacgtgatcgtggcctgcgccccctggcagcactggaacgtgctggagaagaccgaggaggccgagaagacccccgtgggcagctgcttcctggcccagcccgagagcggcagaagagccgagtacagcccctgcagaggcaacaccctgagcagaatctacgtggagaacgacttcagctgggacaagagatactgcgaggccggcttcagcagcgtggtgacccaggccggcgagctggtgctgggcgcccccggcggctactacttcctgggcctgctggcccaggcccccgtggccgacatcttcagcagctacagacccggcatcctgctgtggcacgtgagcagccagagcctgagcttcgacagcagcaaccccgagtacttcgacggctactggggctacagcgtggccgtgggcgagttcgacggcgacctgaacaccaccgagtacgtggtgggcgcccccacctggagctggaccctgggcgccgtggagatcctggacagctactaccagagactgcacagactgagaggcgagcagatggccagctacttcggccacagcgtggccgtgaccgacgtgaacggcgacggcagacacgacctgctggtgggcgcccccctgtacatggagagcagagccgacagaaagctggccgaggtgggcagagtgtacctgttcctgcagcccagaggcccccacgccctgggcgcccccagcctgctgctgaccggcacccagctgtacggcagattcggcagcgccatcgcccccctgggcgacctggacagagacggctacaacgacatcgccgtggccgccccctacggcggccccagcggcagaggccaggtgctggtgttcctgggccagagcgagggcctgagaagcagacccagccaggtgctggacagccccttccccaccggcagcgccttcggcttcagcctgagaggcgccgtggacatcgacgacaacggctaccccgacctgatcgtgggcgcctacggcgccaaccaggtggccgtgtacagagcccagcccgtggtgaaggccagcgtgcagctgctggtgcaggacagcctgaaccccgccgtgaagagctgcgtgctgccccagaccaagacccccgtgagctgcttcaacatccagatgtgcgtgggcgccaccggccacaacatcccccagaagctgagcctgaacgccgagctgcagctggacagacagaagcccagacagggcagaagagtgctgctgctgggcagccagcaggccggcaccaccctgaacctggacctgggcggcaagcacagccccatctgccacaccaccatggccttcctgagagacgaggccgacttcagagacaagctgagccccatcgtgctgagcctgaacgtgagcctgccccccaccgaggccggcatggcccccgccgtggtgctgcacggcgacacccacgtgcaggagcagaccagaatcgtgctggactgcggcgaggacgacgtgtgcgtgccccagctgcagctgaccgccagcgtgaccggcagccccctgctggtgggcgccgacaacgtgctggagctgcagatggacgccgccaacgagggcgagggcgcctacgaggccgagctggccgtgcacctgccccagggcgcccactacatgagagccctgagcaacgtggagggcttcgagagactgatctgcaaccagaagaaggagaacgagaccagagtggtgctgtgcgagctgggcaaccccatgaagaagaacgcccagatcggcatcgccatgctggtgagcgtgggcaacctggaggaggccggcgagagcgtgagcttccagctgcagatcagaagcaagaacagccagaaccccaacagcaagatcgtgctgctggacgtgcccgtgagagccgaggcccaggtggagctgagaggcaacagcttccccgccagcctggtggtggccgccgaggagggcgagagagagcagaacagcctggacagctggggccccaaggtggagcacacctacgagctgcacaacaacggccccggcaccgtgaacggcctgcacctgagcatccacctgcccggccagagccagcccagcgacctgctgtacatcctggacatccagccccagggcggcctgcagtgcttcccccagccccccgtgaaccccctgaaggtggactggggcctgcccatccccagccccagccccatccaccccgcccaccacaagagagacagaagacagatcttcctgcccgagcccgagcagcccagcagactgcaggaccccgtgctggtgagctgcgacagcgccccctgcaccgtggtgcagtgcgacctgcaggagatggccagaggccagagagccatggtgaccgtgctggccttcctgtggctgcccagcctgtaccaggtgtggacccagctgctgagagccctggaggagagagccatccccatctggtgggtgctggtgggcgtgctgggcggcctgctgctgctgaccatcctggtgctggccatgtggaaggtgggcttcttcaagagaaacagaccccccctggaggaggacgacgaggagggcgagtag

SEQ ID NO: 85366 - DNA, 660 bp, synthetic construct
  misc_feature 1..660: note = Description of Artificial Sequence: Synthetic coding sequence
  source 1..660: mol_type = other DNA
atggccagctacttcggccacagcgtggccgtgaccgacgtgaacggcgacggcagacacgacctgctggtgggcgcccccctgtacatggagagcagagccgacagaaagctggccgaggtgggcagagtgtacctgttcctgcagcccagaggcccccacgccctgggcgcccccagcctgctgctgaccggcacccagctgtacggcagattcggcagcgccatcgcccccctgggcgacctggacagagacggctacaacgacatcgccgtggccgccccctacggcggccccagcggcagaggccaggtgctggtgttcctgggccagagcgagggcctgagaagcagacccagccaggtgctggacagccccttccccaccggcagcgccttcggcttcagcctgagaggcgccgtggacatcgacgacaacggctaccccggcgccctggactgcctgcagctggagatgcccaagaagggcccctggaccttcgccggcagcgccaagagacacggccagggcctgatgcccggcctggtgagccactacggcctgcccgagggcctgggcgagaccagcagcggcggcggcggcgtgggcaacccctgggaggacgagatgagaatcccctgccccaacagacagttctag

SEQ ID NO: 85367 - DNA, 3201 bp, synthetic construct
  misc_feature 1..3201: note = Description of Artificial Sequence: Synthetic coding sequence
  source 1..3201: mol_type = other DNA
atgggccccggccccagcagagcccccagagcccccagactgatgctgtgcgccctggccctgatggtggccgccggcggctgcgtggtgagcgccttcaacctggacaccagattcctggtggtgaaggaggccggcaaccccggcagcctgttcggctacagcgtggccctgcacagacagaccgagagacagcagagatacctgctgctggccggcgcccccagagagctggccgtgcccgacggctacaccaacagaaccggcgccgtgtacctgtgccccctgaccgcccacaaggacgactgcgagagaatgaacatcaccgtgaagaacgaccccggccaccacatcatcgaggacatgtggctgggcgtgaccgtggccagccagggccccgccggcagagtgctggtgtgcgcccacagatacacccaggtgctgtggagcggcagcgaggaccagagaagaatggtgggcaagtgctacgtgagaggcaacgacctggagctggacagcagcgacgactggcagacctaccacaacgagatgtgcaacagcaacaccgactacctggagaccggcatgtgccagctgggcaccagcggcggcttcacccagaacaccgtgtacttcggcgcccccggcgcctacaactggaagggcaacagctacatgatccagagaaaggagtgggacctgagcgagtacagctacaaggaccccgaggaccagggcaacctgtacatcggctacaccatgcaggtgggcagcttcatcctgcaccccaagaacatcaccatcgtgaccggcgcccccagacacagacacatgggcgccgtgttcctgctgagccaggaggccggcggcgacctgagaagaagacaggtgctggagggcagccaggtgggcgcctacttcggcagcgccatcgccctggccgacctgaacaacgacggctggcaggacctgctggtgggcgccccctactacttcgagagaaaggaggaggtgggcggcgccatctacgtgttcatgaaccaggccggcaccagcttccccgcccaccccagcctgctgctgcacggccccagcggcagcgccttcggcctgagcgtggccagcatcggcgacatcaaccaggacggcttccaggacatcgccgtgggcgcccccttcgagggcctgggcaaggtgtacatctaccacagcagcagcaagggcctgctgagacagccccagcaggtgatccacggcgagaagctgggcctgcccggcctggccaccttcggctacagcctgagcggccagatggacgtggacgagaacttctaccccgacctgctggtgggcagcctgagcgaccacatcgtgctgctgagagccagacccgtgatcaacatcgtgcacaagaccctggtgcccagacccgccgtgctggaccccgccctgtgcaccgccaccagctgcgtgcaggtggagctgtgcttcgcctacaaccagagcgccggcaaccccaactacagaagaaacatcaccctggcctacaccctggaggccgacagagacagaagaccccccagactgagattcgccggcagcgagagcgccgtgttccacggcttcttcagcatgcccgagatgagatgccagaagctggagctgctgctgatggacaacctgagagacaagctgagacccatcatcatcagcatgaactacagcctgcccctgagaatgcccgacagacccagactgggcctgagaagcctggacgcctaccccatcctgaaccaggcccaggccctggagaaccacaccgaggtgcagttccagaaggagtgcggccccgacaacaagtgcgagagcaacctgcagatgagagccgccttcgtgagcgagcagcagcagaagctgagcagactgcagtacagcagagacgtgagaaagctgctgctgagcatcaacgtgaccaacaccagaaccagcgagagaagcggcgaggacgcccacgaggccctgctgaccctggtggtgccccccgccctgctgctgagcagcgtgagaccccccggcgcctgccaggccaacgagaccatcttctgcgagctgggcaaccccttcaagagaaaccagagaatggagctgctgatcgccttcgaggtgatcggcgtgaccctgcacaccagagacctgcaggtgcagctgcagctgagcaccagcagccaccaggacaacctgtggcccatgatcctgaccctgctggtggactacaccctgcagaccagcctgagcatggtgaaccacagactgcagagcttcttcggcggcaccgtgatgggcgagagcggcatgaagaccgtggaggacgtgggcagccccctgaagtacgagttccaggtgggccccatgggcgagggcctggtgggcctgggcaccctggtgctgggcctggagtggccctacgaggtgagcaacggcaagtggctgctgtaccccaccgagatcaccgtgcacggcaacggcagctggccctgcagaccccccggcgacctgatcaaccccctgaacctgaccctgagcgaccccggcgacagacccagcagcccccagagaagaagaagacagctggaccccggcggcggccagggccccccccccgtgaccctggccgccgccaagaaggccaagagcgagaccgtgctgacctgcgccaccggcagagcccactgcgtgtggctggagtgccccatccccgacgcccccgtggtgaccaacgtgaccgtgaaggccagagtgtggaacagcaccttcatcgaggactacagagacttcgacagagtgagagtgaacggctgggccaccctgttcctgagaaccagcatccccaccatcaacatggagaacaagaccacctggttcagcgtggacatcgacagcgagctggtggaggagctgcccgccgagatcgagctgtggctggtgctggtggccgtgggcgccggcctgctgctgctgggcctgatcatcctgctgctgtggaagtgcgacttcttcaagagaaccagatactaccagatcatgcccaagtaccacgccgtgagaatcagagaggaggagagataccccccccccggcagcaccctgcccaccaagaagcactgggtgaccagctggcagaccagagaccagtactactag

SEQ ID NO: 85368 - DNA, 3156 bp, synthetic construct
  misc_feature 1..3156: note = Description of Artificial Sequence: Synthetic coding sequence
  source 1..3156: mol_type = other DNA
atgggccccggccccagcagagcccccagagcccccagactgatgctgtgcgccctggccctgatggtggccgccggcggctgcgtggtgagcgccttcaacctggacaccagattcctggtggtgaaggaggccggcaaccccggcagcctgttcggctacagcgtggccctgcacagacagaccgagagacagcagagatacctgctgctggccggcgcccccagagagctggccgtgcccgacggctacaccaacagaaccggcgccgtgtacctgtgccccctgaccgcccacaaggacgactgcgagagaatgaacatcaccgtgaagaacgaccccggccaccacatcatcgaggacatgtggctgggcgtgaccgtggccagccagggccccgccggcagagtgctggtgtgcgcccacagatacacccaggtgctgtggagcggcagcgaggaccagagaagaatggtgggcaagtgctacgtgagaggcaacgacctggagctggacagcagcgacgactggcagacctaccacaacgagatgtgcaacagcaacaccgactacctggagaccggcatgtgccagctgggcaccagcggcggcttcacccagaacaccgtgtacttcggcgcccccggcgcctacaactggaagggcaacagctacatgatccagagaaaggagtgggacctgagcgagtacagctacaaggaccccgaggaccagggcaacctgtacatcggctacaccatgcaggtgggcagcttcatcctgcaccccaagaacatcaccatcgtgaccggcgcccccagacacagacacatgggcgccgtgttcctgctgagccaggaggccggcggcgacctgagaagaagacaggtgctggagggcagccaggtgggcgcctacttcggcagcgccatcgccctggccgacctgaacaacgacggctggcaggacctgctggtgggcgccccctactacttcgagagaaaggaggaggtgggcggcgccatctacgtgttcatgaaccaggccggcaccagcttccccgcccaccccagcctgctgctgcacggccccagcggcagcgccttcggcctgagcgtggccagcatcggcgacatcaaccaggacggcttccaggacatcgccgtgggcgcccccttcgagggcctgggcaaggtgtacatctaccacagcagcagcaagggcctgctgagacagccccagcaggtgatccacggcgagaagctgggcctgcccggcctggccaccttcggctacagcctgagcggccagatggacgtggacgagaacttctaccccgacctgctggtgggcagcctgagcgaccacatcgtgctgctgagagccagacccgtgatcaacatcgtgcacaagaccctggtgcccagacccgccgtgctggaccccgccctgtgcaccgccaccagctgcgtgcaggtggagctgtgcttcgcctacaaccagagcgccggcaaccccaactacagaagaaacatcaccctggcctacaccctggaggccgacagagacagaagaccccccagactgagattcgccggcagcgagagcgccgtgttccacggcttcttcagcatgcccgagatgagatgccagaagctggagctgctgctgatggacaacctgagagacaagctgagacccatcatcatcagcatgaactacagcctgcccctgagaatgcccgacagacccagactgggcctgagaagcctggacgcctaccccatcctgaaccaggcccaggccctggagaaccacaccgaggtgcagttccagaaggagtgcggccccgacaacaagtgcgagagcaacctgcagatgagagccgccttcgtgagcgagcagcagcagaagctgagcagactgcagtacagcagagacgtgagaaagctgctgctgagcatcaacgtgaccaacaccagaaccagcgagagaagcggcgaggacgcccacgaggccctgctgaccctggtggtgccccccgccctgctgctgagcagcgtgagaccccccggcgcctgccaggccaacgagaccatcttctgcgagctgggcaaccccttcaagagaaaccagagaatggagctgctgatcgccttcgaggtgatcggcgtgaccctgcacaccagagacctgcaggtgcagctgcagctgagcaccagcagccaccaggacaacctgtggcccatgatcctgaccctgctggtggactacaccctgcagaccagcctgagcatggtgaaccacagactgcagagcttcttcggcggcaccgtgatgggcgagagcggcatgaagaccgtggaggacgtgggcagccccctgaagtacgagttccaggtgggccccatgggcgagggcctggtgggcctgggcaccctggtgctgggcctggagtggccctacgaggtgagcaacggcaagtggctgctgtaccccaccgagatcaccgtgcacggcaacggcagctggccctgcagaccccccggcgacctgatcaaccccctgaacctgaccctgagcgaccccggcgacagacccagcagcccccagagaagaagaagacagctggaccccggcggcggccagggccccccccccgtgaccctggccgccgccaagaaggccaagagcgagaccgtgctgacctgcgccaccggcagagcccactgcgtgtggctggagtgccccatccccgacgcccccgtggtgaccaacgtgaccgtgaaggccagagtgtggaacagcaccttcatcgaggactacagagacttcgacagagtgagagtgaacggctgggccaccctgttcctgagaaccagcatccccaccatcaacatggagaacaagaccacctggttcagcgtggacatcgacagcgagctggtggaggagctgcccgccgagatcgagctgtggctggtgctggtggccgtgggcgccggcctgctgctgctgggcctgatcatcctgctgctgtggaagtgcggcttcttcaagagagccagaaccagagccctgtacgaggccaagagacagaaggccgagatgaagagccagcccagcgagaccgagagactgaccgacgactactag

SEQ ID NO: 85369 - DNA, 3114 bp, synthetic construct
  misc_feature 1..3114: note = Description of Artificial Sequence: Synthetic coding sequence
  source 1..3114: mol_type = other DNA
atgctgtgcgccctggccctgatggtggccgccggcggctgcgtggtgagcgccttcaacctggacaccagattcctggtggtgaaggaggccggcaaccccggcagcctgttcggctacagcgtggccctgcacagacagaccgagagacagcagagatacctgctgctggccggcgcccccagagagctggccgtgcccgacggctacaccaacagaaccggcgccgtgtacctgtgccccctgaccgcccacaaggacgactgcgagagaatgaacatcaccgtgaagaacgaccccggccaccacatcatcgaggacatgtggctgggcgtgaccgtggccagccagggccccgccggcagagtgctggtgtgcgcccacagatacacccaggtgctgtggagcggcagcgaggaccagagaagaatggtgggcaagtgctacgtgagaggcaacgacctggagctggacagcagcgacgactggcagacctaccacaacgagatgtgcaacagcaacaccgactacctggagaccggcatgtgccagctgggcaccagcggcggcttcacccagaacaccgtgtacttcggcgcccccggcgcctacaactggaagggcaacagctacatgatccagagaaaggagtgggacctgagcgagtacagctacaaggaccccgaggaccagggcaacctgtacatcggctacaccatgcaggtgggcagcttcatcctgcaccccaagaacatcaccatcgtgaccggcgcccccagacacagacacatgggcgccgtgttcctgctgagccaggaggccggcggcgacctgagaagaagacaggtgctggagggcagccaggtgggcgcctacttcggcagcgccatcgccctggccgacctgaacaacgacggctggcaggacctgctggtgggcgccccctactacttcgagagaaaggaggaggtgggcggcgccatctacgtgttcatgaaccaggccggcaccagcttccccgcccaccccagcctgctgctgcacggccccagcggcagcgccttcggcctgagcgtggccagcatcggcgacatcaaccaggacggcttccaggacatcgccgtgggcgcccccttcgagggcctgggcaaggtgtacatctaccacagcagcagcaagggcctgctgagacagccccagcaggtgatccacggcgagaagctgggcctgcccggcctggccaccttcggctacagcctgagcggccagatggacgtggacgagaacttctaccccgacctgctggtgggcagcctgagcgaccacatcgtgctgctgagagccagacccgtgatcaacatcgtgcacaagaccctggtgcccagacccgccgtgctggaccccgccctgtgcaccgccaccagctgcgtgcaggtggagctgtgcttcgcctacaaccagagcgccggcaaccccaactacagaagaaacatcaccctggcctacaccctggaggccgacagagacagaagaccccccagactgagattcgccggcagcgagagcgccgtgttccacggcttcttcagcatgcccgagatgagatgccagaagctggagctgctgctgatggacaacctgagagacaagctgagacccatcatcatcagcatgaactacagcctgcccctgagaatgcccgacagacccagactgggcctgagaagcctggacgcctaccccatcctgaaccaggcccaggccctggagaaccacaccgaggtgcagttccagaaggagtgcggccccgacaacaagtgcgagagcaacctgcagatgagagccgccttcgtgagcgagcagcagcagaagctgagcagactgcagtacagcagagacgtgagaaagctgctgctgagcatcaacgtgaccaacaccagaaccagcgagagaagcggcgaggacgcccacgaggccctgctgaccctggtggtgccccccgccctgctgctgagcagcgtgagaccccccggcgcctgccaggccaacgagaccatcttctgcgagctgggcaaccccttcaagagaaaccagagaatggagctgctgatcgccttcgaggtgatcggcgtgaccctgcacaccagagacctgcaggtgcagctgcagctgagcaccagcagccaccaggacaacctgtggcccatgatcctgaccctgctggtggactacaccctgcagaccagcctgagcatggtgaaccacagactgcagagcttcttcggcggcaccgtgatgggcgagagcggcatgaagaccgtggaggacgtgggcagccccctgaagtacgagttccaggtgggccccatgggcgagggcctggtgggcctgggcaccctggtgctgggcctggagtggccctacgaggtgagcaacggcaagtggctgctgtaccccaccgagatcaccgtgcacggcaacggcagctggccctgcagaccccccggcgacctgatcaaccccctgaacctgaccctgagcgaccccggcgacagacccagcagcccccagagaagaagaagacagctggaccccggcggcggccagggccccccccccgtgaccctggccgccgccaagaaggccaagagcgagaccgtgctgacctgcgccaccggcagagcccactgcgtgtggctggagtgccccatccccgacgcccccgtggtgaccaacgtgaccgtgaaggccagagtgtggaacagcaccttcatcgaggactacagagacttcgacagagtgagagtgaacggctgggccaccctgttcctgagaaccagcatccccaccatcaacatggagaacaagaccacctggttcagcgtggacatcgacagcgagctggtggaggagctgcccgccgagatcgagctgtggctggtgctggtggccgtgggcgccggcctgctgctgctgggcctgatcatcctgctgctgtggaagtgcggcttcttcaagagagccagaaccagagccctgtacgaggccaagagacagaaggccgagatgaagagccagcccagcgagaccgagagactgaccgacgactactag

SEQ ID NO: 85370 - DNA, 885 bp, synthetic construct
  misc_feature 1..885: note = Description of Artificial Sequence: Synthetic coding sequence
  source 1..885: mol_type = other DNA
atgatccagagaaaggagtgggacctgagcgagtacagctacaaggaccccgaggaccagggcaacctgtacatcggctacaccatgcaggtgggcagcttcatcctgcaccccaagaacatcaccatcgtgaccggcgcccccagacacagacacatgggcgccgtgttcctgctgagccaggaggccggcggcgacctgagaagaagacaggtgctggagggcagccaggtgggcgcctacttcggcagcgccatcgccctggccgacctgaacaacgacggctggcaggacctgctggtgggcgccccctactacttcgagagaaaggaggaggtgggcggcgccatctacgtgttcatgaaccaggccggcaccagcttccccgcccaccccagcctgctgctgcacggccccagcggcagcgccttcggcctgagcgtggccagcatcggcgacatcaaccaggacggcttccaggacatcgccgtgggcgcccccttcgagggcctgggcaaggtgtacatctaccacagcagcagcaagggcctgctgagacagccccagcaggtgatccacggcgagaagctgggcctgcccggcctggccaccttcggctacagcctgagcggccagatggacgtggacgagaacttctaccccgacctgctggtgggcagcctgagcgaccacatcgtgctgctgagagccagacccgtgatcaacatcgtgcacaagaccctggtgcccagacccgccgtgctggaccccgccctgtgcaccgccaccagctgcgtgcaggtggagctgtgcttcgcctacaaccagagcgccggcaaccccaactacagaagaaacatcagcgagtgctggggcgccgcctag

SEQ ID NO: 85371 - DNA, 3108 bp, synthetic construct
  misc_feature 1..3108: note = Description of Artificial Sequence: Synthetic coding sequence
  source 1..3108: mol_type = other DNA
atgggcggccccgccgcccccagaggcgccggcagactgagagccctgctgctggccctggtggtggccggcatccccgccggcgcctacaacctggacccccagagacccgtgcacttccagggccccgccgacagcttcttcggctacgccgtgctggagcacttccacgacaacaccagatgggtgctggtgggcgcccccaaggccgacagcaagtacagccccagcgtgaagagccccggcgccgtgttcaagtgcagagtgcacaccaaccccgacagaagatgcaccgagctggacatggccagaggcaagaacagaggcaccagctgcggcaagacctgcagagaggacagagacgacgagtggatgggcgtgagcctggccagacagcccaaggccgacggcagagtgctggcctgcgcccacagatggaagaacatctactacgaggccgaccacatcctgccccacggcttctgctacatcatccccagcaacctgcaggccaagggcagaaccctgatcccctgctacgaggagtacaagaagaagtacggcgaggagcacggcagctgccaggccggcatcgccggcttcttcaccgaggagctggtggtgatgggcgcccccggcagcttctactgggccggcaccatcaaggtgctgaacctgaccgacaacacctacctgaagctgaacgacgaggtgatcatgaacagaagatacacctacctgggctacgccgtgaccgccggccacttcagccaccccagcaccatcgacgtggtgggcggcgccccccaggacaagggcatcggcaaggtgtacatcttcagagccgacagaagaagcggcaccctgatcaagatcttccaggccagcggcaagaagatgggcagctacttcggcagcagcctgtgcgccgtggacctgaacggcgacggcctgagcgacctgctggtgggcgcccccatgttcagcgagatcagagacgagggccaggtgaccgtgtacatcaacagaggcaacggcgccctggaggagcagctggccctgaccggcgacggcgcctacaacgcccacttcggcgagagcatcgccagcctggacgacctggacaacgacggcttccccgacgtggccatcggcgcccccaaggaggacgacttcgccggcgccgtgtacatctaccacggcgacgccggcggcatcgtgccccagtacagcatgaagctgagcggccagaagatcaaccccgtgctgagaatgttcggccagagcatcagcggcggcatcgacatggacggcaacggctaccccgacgtgaccgtgggcgccttcatgagcgacagcgtggtgctgctgagagccagacccgtgatcaccgtggacgtgagcatcttcctgcccggcagcatcaacatcaccgccccccagtgccacgacggccagcagcccgtgaactgcctgaacgtgaccacctgcttcagcttccacggcaagcacgtgcccggcgagatcggcctgaactacgtgctgatggccgacgtggccaagaaggagaagggccagatgcccagagtgtacttcgtgctgctgggcgagaccatgggccaggtgaccgagaagctgcagctgacctacatggaggagacctgcagacactacgtggcccacgtgaagagaagagtgcaggacgtgatcagccccatcgtgttcgaggccgcctacagcctgagcgagcacgtgaccggcgaggaggagagagagctgccccccctgacccccgtgctgagatggaagaagggccagaagatcgcccagaagaaccagaccgtgttcgagagaaactgcagaagcgaggactgcgccgccgacctgcagctgcagggcaagctgctgctgagcagcatggacgagaagaccctgtacctggccctgggcgccgtgaagaacatcagcctgaacatcagcatcagcaacctgggcgacgacgcctacgacgccaacgtgagcttcaacgtgagcagagagctgttcttcatcaacatgtggcagaaggaggagatgggcatcagctgcgagctgctggagagcgacttcctgaagtgcagcgtgggcttccccttcatgagaagcaagagcaagtacgagttcagcgtgatcttcgacaccagccacctgagcggcgaggaggaggtgctgagcttcatcgtgaccgcccagagcggcaacaccgagagaagcgagagcctgcacgacaacaccctggtgctgatggtgcccctgatgcacgaggtggacaccagcatcaccggcatcatgagccccaccagcttcgtgtacggcgagagcgtggacgccgccaacttcatccagctggacgacctggagtgccacttccagcccatcaacatcaccctgcaggtgtacaacaccggccccagcaccctgcccggcagcagcgtgagcatcagcttccccaacagactgagcagcggcggcgccgagatgttccacgtgcaggagatggtggtgggccaggagaagggcaactgcagcttccagaagaaccccaccccctgcatcatcccccaggagcaggagaacatcttccacaccatcttcgccttcttcaccaagagcggcagaaaggtgctggactgcgagaagcccggcatcagctgcctgaccgcccactgcaacttcagcgccctggccaaggaggagagcagaaccatcgacatctacatgctgctgaacaccgagatcctgaagaaggacagcagcagcgtgatccagttcatgagcagagccaaggtgaaggtggaccccgccctgagagtggtggagatcgcccacggcaaccccgaggaggtgaccgtggtgttcgaggccctgcacaacctggagcccagaggctacgtggtgggctggatcatcgccatcagcctgctggtgggcatcctgatcttcctgctgctggccgtgctgctgtggaagatgggcttcttcagaagaagatacaaggagatcatcgaggccgagaagaacagaaaggagaacgaggacagctgggactgggtgcagaagaaccagtag

SEQ ID NO: 85372 - DNA, 696 bp, synthetic construct
  misc_feature 1..696: note = Description of Artificial Sequence: Synthetic coding sequence
  source 1..696: mol_type = other DNA
atgtgccagcccccccccaccgcccccggcagctggcccgtggccagaccctgcaccgagagcgtgggcagaacccacacccagagagtgcccgccagctgctgggccagagccggcagaagcagcagacagagccccacccccagacagttcgccctgatgcagtacagcaacctgctgaagatccacttcaccttcacccagttcagaaccagccccagccagcagagcctggtggaccccatcgtgcagctgaagggcctgaccttcaccgccaccggcatcctgaccgtggtgacccagctgttccaccacaagaacggcgccagaaagagcgccaagaagatcctgatcgtgatcaccgacggccagaagtacaaggaccccctggagtacagcgacgtgatcccccaggccgagaaggccggcatcatcagatacgccatcggcgtgagactgttcttcacccccgcccccggcagcgcctgcatcagcttcagatgcagcgccgccggcctgatcctgctgggctgcctgagcgccgccggcggcaccagattccccggcacccactgccaggccggcgccgagtaccaccagctgagcgccagcgccggccccagagtgcagggcggccagctgtgcagcccctggcagcaccccgaggccgccgccggcgaggacctgtgcagctag

SEQ ID NO: 85373 - DNA, 3486 bp, synthetic construct
  misc_feature 1..3486: note = Description of Artificial Sequence: Synthetic coding sequence
  source 1..3486: mol_type = other DNA
atgaccttcggcaccgtgctgctgctgagcgtgctggccagctaccacggcttcaacctggacgtggaggagcccaccatcttccaggaggacgccggcggcttcggccagagcgtggtgcagttcggcggcagcagactggtggtgggcgcccccctggaggtggtggccgccaaccagaccggcagactgtacgactgcgccgccgccaccggcatgtgccagcccatccccctgcacatcagacccgaggccgtgaacatgagcctgggcctgaccctggccgccagcaccaacggcagcagactgctggcctgcggccccaccctgcacagagtgtgcggcgagaacagctacagcaagggcagctgcctgctgctgggcagcagatgggagatcatccagaccgtgcccgacgccacccccgagtgcccccaccaggagatggacatcgtgttcctgatcgacggcagcggcagcatcgaccagaacgacttcaaccagatgaagggcttcgtgcaggccgtgatgggccagttcgagggcaccgacaccctgttcgccctgatgcagtacagcaacctgctgaagatccacttcaccttcacccagttcagaaccagccccagccagcagagcctggtggaccccatcgtgcagctgaagggcctgaccttcaccgccaccggcatcctgaccgtggtgacccagctgttccaccacaagaacggcgccagaaagagcgccaagaagatcctgatcgtgatcaccgacggccagaagtacaaggaccccctggagtacagcgacgtgatcccccaggccgagaaggccggcatcatcagatacgccatcggcgtgggccacgccttccagggccccaccgccagacaggagctgaacaccatcagcagcgcccccccccaggaccacgtgttcaaggtggacaacttcgccgccctgggcagcatccagaagcagctgcaggagaagatctacgccgtggagggcacccagagcagagccagcagcagcttccagcacgagatgagccaggagggcttcagcaccgccctgaccatggacggcctgttcctgggcgccgtgggcagcttcagctggagcggcggcgccttcctgtacccccccaacatgagccccaccttcatcaacatgagccaggagaacgtggacatgagagacagctacctgggctacagcaccgagctggccctgtggaagggcgtgcagaacctggtgctgggcgcccccagataccagcacaccggcaaggccgtgatcttcacccaggtgagcagacagtggagaaagaaggccgaggtgaccggcacccagatcggcagctacttcggcgccagcctgtgcagcgtggacgtggacagcgacggcagcaccgacctgatcctgatcggcgccccccactactacgagcagaccagaggcggccaggtgagcgtgtgccccctgcccagaggcagagtgcagtggcagtgcgacgccgtgctgagaggcgagcagggccacccctggggcagattcggcgccgccctgaccgtgctgggcgacgtgaacgaggacaagctgatcgacgtggccatcggcgcccccggcgagcaggagaacagaggcgccgtgtacctgttccacggcgccagcgagagcggcatcagccccagccacagccagagaatcgccagcagccagctgagccccagactgcagtacttcggccaggccctgagcggcggccaggacctgacccaggacggcctgatggacctggccgtgggcgccagaggccaggtgctgctgctgagaagcctgcccgtgctgaaggtgggcgtggccatgagattcagccccgtggaggtggccaaggccgtgtacagatgctgggaggagaagcccagcgccctggaggccggcgacgccaccgtgtgcctgaccatccagaagagcagcctggaccagctgggcgacatccagagcagcgtgagattcgacctggccctggaccccggcagactgaccagcagagccatcttcaacgagaccaagaaccccaccctgaccagaagaaagaccctgggcctgggcatccactgcgagaccctgaagctgctgctgcccgactgcgtggaggacgtggtgagccccatcatcctgcacctgaacttcagcctggtgagagagcccatccccagcccccagaacctgagacccgtgctggccgtgggcagccaggacctgttcaccgccagcctgcccttcgagaagaactgcggccaggacggcctgtgcgagggcgacctgggcgtgaccctgagcttcagcggcctgcagaccctgaccgtgggcagcagcctggagctgaacgtgatcgtgaccgtgtggaacgccggcgaggacagctacggcaccgtggtgagcctgtactaccccgccggcctgagccacagaagagtgagcggcgcccagaagcagccccaccagagcgccctgagactggcctgcgagaccgtgcccaccgaggacgagggcctgagaagcagcagatgcagcgtgaaccaccccatcttccacgagggcagcaacggcaccttcatcgtgaccttcgacgtgagctacaaggccaccctgggcgacagaatgctgatgagagccagcgccagcagcgagaacaacaaggccagcagcagcaaggccaccttccagctggagctgcccgtgaagtacgccgtgtacaccatgatcagcagacaggaggagagcaccaagtacttcaacttcgccaccagcgacgagaagaagatgaaggaggccgagcacagatacagagtgaacaacctgagccagagagacctggccatcagcatcaacttctgggtgcccgtgctgctgaacggcgtggccgtgtgggacgtggtgatggaggcccccagccagagcctgccctgcgtgagcgagagaaagcccccccagcacagcgacttcctgacccagatcagcagaagccccatgctggactgcagcatcgccgactgcctgcagttcagatgcgacgtgcccagcttcagcgtgcaggaggagctggacttcaccctgaagggcaacctgagcttcggctgggtgagagagaccctgcagaagaaggtgctggtggtgagcgtggccgagatcaccttcgacaccagcgtgtacagccagctgcccggccaggaggccttcatgagagcccagatggagatggtgctggaggaggacgaggtgtacaacgccatccccatcatcatgggcagcagcgtgggcgccctgctgctgctggccctgatcaccgccaccctgtacaagctgggcttcttcaagagacactacaaggagatgctggaggacaagcccgaggacaccgccaccttcagcggcgacgacttcagctgcgtggcccccaacgtgcccctgagctag

SEQ ID NO: 85374 - DNA, 3534 bp, synthetic construct
  misc_feature 1..3534: note = Description of Artificial Sequence: Synthetic coding sequence
  source 1..3534: mol_type = other DNA
tgcgccctgagccccaccttccacttccccagcaccagatgcagcggcatgaccttcggcaccgtgctgctgctgagcgtgctggccagctaccacggcttcaacctggacgtggaggagcccaccatcttccaggaggacgccggcggcttcggccagagcgtggtgcagttcggcggcagcagactggtggtgggcgcccccctggaggtggtggccgccaaccagaccggcagactgtacgactgcgccgccgccaccggcatgtgccagcccatccccctgcacatcagacccgaggccgtgaacatgagcctgggcctgaccctggccgccagcaccaacggcagcagactgctggcctgcggccccaccctgcacagagtgtgcggcgagaacagctacagcaagggcagctgcctgctgctgggcagcagatgggagatcatccagaccgtgcccgacgccacccccgagtgcccccaccaggagatggacatcgtgttcctgatcgacggcagcggcagcatcgaccagaacgacttcaaccagatgaagggcttcgtgcaggccgtgatgggccagttcgagggcaccgacaccctgttcgccctgatgcagtacagcaacctgctgaagatccacttcaccttcacccagttcagaaccagccccagccagcagagcctggtggaccccatcgtgcagctgaagggcctgaccttcaccgccaccggcatcctgaccgtggtgacccagctgttccaccacaagaacggcgccagaaagagcgccaagaagatcctgatcgtgatcaccgacggccagaagtacaaggaccccctggagtacagcgacgtgatcccccaggccgagaaggccggcatcatcagatacgccatcggcgtgggccacgccttccagggccccaccgccagacaggagctgaacaccatcagcagcgcccccccccaggaccacgtgttcaaggtggacaacttcgccgccctgggcagcatccagaagcagctgcaggagaagatctacgccgtggagggcacccagagcagagccagcagcagcttccagcacgagatgagccaggagggcttcagcaccgccctgaccatggacggcctgttcctgggcgccgtgggcagcttcagctggagcggcggcgccttcctgtacccccccaacatgagccccaccttcatcaacatgagccaggagaacgtggacatgagagacagctacctgggctacagcaccgagctggccctgtggaagggcgtgcagaacctggtgctgggcgcccccagataccagcacaccggcaaggccgtgatcttcacccaggtgagcagacagtggagaaagaaggccgaggtgaccggcacccagatcggcagctacttcggcgccagcctgtgcagcgtggacgtggacagcgacggcagcaccgacctgatcctgatcggcgccccccactactacgagcagaccagaggcggccaggtgagcgtgtgccccctgcccagaggcagagtgcagtggcagtgcgacgccgtgctgagaggcgagcagggccacccctggggcagattcggcgccgccctgaccgtgctgggcgacgtgaacgaggacaagctgatcgacgtggccatcggcgcccccggcgagcaggagaacagaggcgccgtgtacctgttccacggcgccagcgagagcggcatcagccccagccacagccagagaatcgccagcagccagctgagccccagactgcagtacttcggccaggccctgagcggcggccaggacctgacccaggacggcctgatggacctggccgtgggcgccagaggccaggtgctgctgctgagaagcctgcccgtgctgaaggtgggcgtggccatgagattcagccccgtggaggtggccaaggccgtgtacagatgctgggaggagaagcccagcgccctggaggccggcgacgccaccgtgtgcctgaccatccagaagagcagcctggaccagctgggcgacatccagagcagcgtgagattcgacctggccctggaccccggcagactgaccagcagagccatcttcaacgagaccaagaaccccaccctgaccagaagaaagaccctgggcctgggcatccactgcgagaccctgaagctgctgctgcccgactgcgtggaggacgtggtgagccccatcatcctgcacctgaacttcagcctggtgagagagcccatccccagcccccagaacctgagacccgtgctggccgtgggcagccaggacctgttcaccgccagcctgcccttcgagaagaactgcggccaggacggcctgtgcgagggcgacctgggcgtgaccctgagcttcagcggcctgcagaccctgaccgtgggcagcagcctggagctgaacgtgatcgtgaccgtgtggaacgccggcgaggacagctacggcaccgtggtgagcctgtactaccccgccggcctgagccacagaagagtgagcggcgcccagaagcagccccaccagagcgccctgagactggcctgcgagaccgtgcccaccgaggacgagggcctgagaagcagcagatgcagcgtgaaccaccccatcttccacgagggcagcaacggcaccttcatcgtgaccttcgacgtgagctacaaggccaccctgggcgacagaatgctgatgagagccagcgccagcagcgagaacaacaaggccagcagcagcaaggccaccttccagctggagctgcccgtgaagtacgccgtgtacaccatgatcagcagacaggaggagagcaccaagtacttcaacttcgccaccagcgacgagaagaagatgaaggaggccgagcacagatacagagtgaacaacctgagccagagagacctggccatcagcatcaacttctgggtgcccgtgctgctgaacggcgtggccgtgtgggacgtggtgatggaggcccccagccagagcctgccctgcgtgagcgagagaaagcccccccagcacagcgacttcctgacccagatcagcagaagccccatgctggactgcagcatcgccgactgcctgcagttcagatgcgacgtgcccagcttcagcgtgcaggaggagctggacttcaccctgaagggcaacctgagcttcggctgggtgagagagaccctgcagaagaaggtgctggtggtgagcgtggccgagatcaccttcgacaccagcgtgtacagccagctgcccggccaggaggccttcatgagagcccagatggagatggtgctggaggaggacgaggtgtacaacgccatccccatcatcatgggcagcagcgtgggcgccctgctgctgctggccctgatcaccgccaccctgtacaagctgggcttcttcaagagacactacaaggagatgctggaggacaagcccgaggacaccgccaccttcagcggcgacgacttcagctgcgtggcccccaacgtgcccctgagctag

SEQ ID NO: 85375 - DNA, 3513 bp, synthetic construct
  misc_feature 1..3513: note = Description of Artificial Sequence: Synthetic coding sequence
  source 1..3513: mol_type = other DNA
atgaaggacagctgcatcaccgtgatggccatggccctgctgagcggcttcttcttcttcgcccccgccagcagctacaacctggacgtgagaggcgccagaagcttcagcccccccagagccggcagacacttcggctacagagtgctgcaggtgggcaacggcgtgatcgtgggcgcccccggcgagggcaacagcaccggcagcctgtaccagtgccagagcggcaccggccactgcctgcccgtgaccctgagaggcagcaactacaccagcaagtacctgggcatgaccctggccaccgaccccaccgacggcagcatcctggcctgcgaccccggcctgagcagaacctgcgaccagaacacctacctgagcggcctgtgctacctgttcagacagaacctgcagggccccatgctgcagggcagacccggcttccaggagtgcatcaagggcaacgtggacctggtgttcctgttcgacggcagcatgagcctgcagcccgacgagttccagaagatcctggacttcatgaaggacgtgatgaagaagctgagcaacaccagctaccagttcgccgccgtgcagttcagcaccagctacaagaccgagttcgacttcagcgactacgtgaagagaaaggaccccgacgccctgctgaagcacgtgaagcacatgctgctgctgaccaacaccttcggcgccatcaactacgtggccaccgaggtgttcagagaggagctgggcgccagacccgacgccaccaaggtgctgatcatcatcaccgacggcgaggccaccgacagcggcaacatcgacgccgccaaggacatcatcagatacatcatcggcatcggcaagcacttccagaccaaggagagccaggagaccctgcacaagttcgccagcaagcccgccagcgagttcgtgaagatcctggacaccttcgagaagctgaaggacctgttcaccgagctgcagaagaagatctacgtgatcgagggcaccagcaagcaggacctgaccagcttcaacatggagctgagcagcagcggcatcagcgccgacctgagcagaggccacgccgtggtgggcgccgtgggcgccaaggactgggccggcggcttcctggacctgaaggccgacctgcaggacgacaccttcatcggcaacgagcccctgacccccgaggtgagagccggctacctgggctacaccgtgacctggctgcccagcagacagaagaccagcctgctggccagcggcgcccccagataccagcacatgggcagagtgctgctgttccaggagccccagggcggcggccactggagccaggtgcagaccatccacggcacccagatcggcagctacttcggcggcgagctgtgcggcgtggacgtggaccaggacggcgagaccgagctgctgctgatcggcgcccccctgttctacggcgagcagagaggcggcagagtgttcatctaccagagaagacagctgggcttcgaggaggtgagcgagctgcagggcgaccccggctaccccctgggcagattcggcgaggccatcaccgccctgaccgacatcaacggcgacggcctggtggacgtggccgtgggcgcccccctggaggagcagggcgccgtgtacatcttcaacggcagacacggcggcctgagcccccagcccagccagagaatcgagggcacccaggtgctgagcggcatccagtggttcggcagaagcatccacggcgtgaaggacctggagggcgacggcctggccgacgtggccgtgggcgccgagagccagatgatcgtgctgagcagcagacccgtggtggacatggtgaccctgatgagcttcagccccgccgagatccccgtgcacgaggtggagtgcagctacagcaccagcaacaagatgaaggagggcgtgaacatcaccatctgcttccagatcaagagcctgatcccccagttccagggcagactggtggccaacctgacctacaccctgcagctggacggccacagaaccagaagaagaggcctgttccccggcggcagacacgagctgagaagaaacatcgccgtgaccaccagcatgagctgcaccgacttcagcttccacttccccgtgtgcgtgcaggacctgatcagccccatcaacgtgagcctgaacttcagcctgtgggaggaggagggcacccccagagaccagagagcccagggcaaggacatcccccccatcctgagacccagcctgcacagcgagacctgggagatccccttcgagaagaactgcggcgaggacaagaagtgcgaggccaacctgagagtgagcttcagccccgccagaagcagagccctgagactgaccgccttcgccagcctgagcgtggagctgagcctgagcaacctggaggaggacgcctactgggtgcagctggacctgcacttcccccccggcctgagcttcagaaaggtggagatgctgaagccccacagccagatccccgtgagctgcgaggagctgcccgaggagagcagactgctgagcagagccctgagctgcaacgtgagcagccccatcttcaaggccggccacagcgtggccctgcagatgatgttcaacaccctggtgaacagcagctggggcgacagcgtggagctgcacgccaacgtgacctgcaacaacgaggacagcgacctgctggaggacaacagcgccaccaccatcatccccatcctgtaccccatcaacatcctgatccaggaccaggaggacagcaccctgtacgtgagcttcacccccaagggccccaagatccaccaggtgaagcacatgtaccaggtgagaatccagcccagcatccacgaccacaacatccccaccctggaggccgtggtgggcgtgccccagccccccagcgagggccccatcacccaccagtggagcgtgcagatggagccccccgtgccctgccactacgaggacctggagagactgcccgacgccgccgagccctgcctgcccggcgccctgttcagatgccccgtggtgttcagacaggagatcctggtgcaggtgatcggcaccctggagctggtgggcgagatcgaggccagcagcatgttcagcctgtgcagcagcctgagcatcagcttcaacagcagcaagcacttccacctgtacggcagcaacgccagcctggcccaggtggtgatgaaggtggacgtggtgtacgagaagcagatgctgtacctgtacgtgctgagcggcatcggcggcctgctgctgctgctgctgatcttcatcgtgctgtacaaggtgggcttcttcaagagaaacctgaaggagaagatggaggccggcagaggcgtgcccaacggcatccccgccgaggacagcgagcagctggccagcggccaggaggccggcgaccccggctgcctgaagcccctgcacgagaaggacagcgagagcggcggcggcaaggactag

SEQ ID NO: 85376 - DNA, 3261 bp, synthetic construct
  misc_feature 1..3261: note = Description of Artificial Sequence: Synthetic coding sequence
  source 1..3261: mol_type = other DNA
atgaaggacagctgcatcaccgtgatggccatggccctgctgagcggcttcttcttcttcgcccccgccagcagctacaacctggacgtgagaggcgccagaagcttcagcccccccagagccggcagacacttcggctacagagtgctgcaggtgggcaacggcgtgatcgtgggcgcccccggcgagggcaacagcaccggcagcctgtaccagtgccagagcggcaccggccactgcctgcccgtgaccctgagaggcagcaactacaccagcaagtacctgggcatgaccctggccaccgaccccaccgacggcagcatcctgttcgccgccgtgcagttcagcaccagctacaagaccgagttcgacttcagcgactacgtgaagagaaaggaccccgacgccctgctgaagcacgtgaagcacatgctgctgctgaccaacaccttcggcgccatcaactacgtggccaccgaggtgttcagagaggagctgggcgccagacccgacgccaccaaggtgctgatcatcatcaccgacggcgaggccaccgacagcggcaacatcgacgccgccaaggacatcatcagatacatcatcggcatcggcaagcacttccagaccaaggagagccaggagaccctgcacaagttcgccagcaagcccgccagcgagttcgtgaagatcctggacaccttcgagaagctgaaggacctgttcaccgagctgcagaagaagatctacgtgatcgagggcaccagcaagcaggacctgaccagcttcaacatggagctgagcagcagcggcatcagcgccgacctgagcagaggccacgccgtggtgggcgccgtgggcgccaaggactgggccggcggcttcctggacctgaaggccgacctgcaggacgacaccttcatcggcaacgagcccctgacccccgaggtgagagccggctacctgggctacaccgtgacctggctgcccagcagacagaagaccagcctgctggccagcggcgcccccagataccagcacatgggcagagtgctgctgttccaggagccccagggcggcggccactggagccaggtgcagaccatccacggcacccagatcggcagctacttcggcggcgagctgtgcggcgtggacgtggaccaggacggcgagaccgagctgctgctgatcggcgcccccctgttctacggcgagcagagaggcggcagagtgttcatctaccagagaagacagctgggcttcgaggaggtgagcgagctgcagggcgaccccggctaccccctgggcagattcggcgaggccatcaccgccctgaccgacatcaacggcgacggcctggtggacgtggccgtgggcgcccccctggaggagcagggcgccgtgtacatcttcaacggcagacacggcggcctgagcccccagcccagccagagaatcgagggcacccaggtgctgagcggcatccagtggttcggcagaagcatccacggcgtgaaggacctggagggcgacggcctggccgacgtggccgtgggcgccgagagccagatgatcgtgctgagcagcagacccgtggtggacatggtgaccctgatgagcttcagccccgccgagatccccgtgcacgaggtggagtgcagctacagcaccagcaacaagatgaaggagggcgtgaacatcaccatctgcttccagatcaagagcctgatcccccagttccagggcagactggtggccaacctgacctacaccctgcagctggacggccacagaaccagaagaagaggcctgttccccggcggcagacacgagctgagaagaaacatcgccgtgaccaccagcatgagctgcaccgacttcagcttccacttccccgtgtgcgtgcaggacctgatcagccccatcaacgtgagcctgaacttcagcctgtgggaggaggagggcacccccagagaccagagagccggcaaggacatcccccccatcctgagacccagcctgcacagcgagacctgggagatccccttcgagaagaactgcggcgaggacaagaagtgcgaggccaacctgagagtgagcttcagccccgccagaagcagagccctgagactgaccgccttcgccagcctgagcgtggagctgagcctgagcaacctggaggaggacgcctactgggtgcagctggacctgcacttcccccccggcctgagcttcagaaaggtggagatgctgaagccccacagccagatccccgtgagctgcgaggagctgcccgaggagagcagactgctgagcagagccctgagctgcaacgtgagcagccccatcttcaaggccggccacagcgtggccctgcagatgatgttcaacaccctggtgaacagcagctggggcgacagcgtggagctgcacgccaacgtgacctgcaacaacgaggacagcgacctgctggaggacaacagcgccaccaccatcatccccatcctgtaccccatcaacatcctgatccaggaccaggaggacagcaccctgtacgtgagcttcacccccaagggccccaagatccaccaggtgaagcacatgtaccaggtgagaatccagcccagcatccacgaccacaacatccccaccctggaggccgtggtgggcgtgccccagccccccagcgagggccccatcacccaccagtggagcgtgcagatggagccccccgtgccctgccactacgaggacctggagagactgcccgacgccgccgagccctgcctgcccggcgccctgttcagatgccccgtggtgttcagacaggagatcctggtgcaggtgatcggcaccctggagctggtgggcgagatcgaggccagcagcatgttcagcctgtgcagcagcctgagcatcagcttcaacagcagcaagcacttccacctgtacggcagcaacgccagcctggcccaggtggtgatgaaggtggacgtggtgtacgagaagcagatgctgtacctgtacgtgctgagcggcatcggcggcctgctgctgctgctgctgatcttcatcgtgctgtacaaggtgggcttcttcaagagaaacctgaaggagaagatggaggccggcagaggcgtgcccaacggcatccccgccgaggacagcgagcagctggccagcggccaggaggccggcgaccccggctgcctgaagcccctgcacgagaaggacagcgagagcggcggcggcaaggactag

SEQ ID NO: 85377 - DNA, 1215 bp, synthetic construct
  misc_feature 1..1215: note = Description of Artificial Sequence: Synthetic coding sequence
  source 1..1215: mol_type = other DNA
atgaaggacagctgcatcaccgtgatggccatggccctgctgagcggcttcttcttcttcgcccccgccagcagctacaacctggacgtgagaggcgccagaagcttcagcccccccagagccggcagacacttcggctacagagtgctgcagatcaagagcctgatcccccagttccagggcagactggtggccaacctgacctacaccctgcagctggacggccacagaaccagaagaagaggcctgttccccggcggcagacacgagctgagaagaaacatcgccgtgaccaccagcatgagctgcaccgacttcagcttccacttccccatgatgttcaacaccctggtgaacagcagctggggcgacagcgtggagctgcacgccaacgtgacctgcaacaacgaggacagcgacctgctggaggacaacagcgccaccaccatcatccccatcctgtaccccatcaacatcctgatccaggaccaggaggacagcaccctgtacgtgagcttcacccccaagggccccaagatccaccaggtgaagcacatgtaccaggtgagaatccagcccagcatccacgaccacaacatccccaccctggaggccgtggtgggcgtgccccagccccccagcgagggccccatcacccaccagtggagcgtgcagatggagccccccgtgccctgccactacgaggacctggagagactgcccgacgccgccgagccctgcctgcccggcgccctgttcagatgccccgtggtgttcagacaggagatcctggtgcaggtgatcggcaccctggagctggtgggcgagatcgaggccagcagcatgttcagcctgtgcagcagcctgagcatcagcttcaacagcagcaagcacttccacctgtacggcagcaacgccagcctggcccaggtggtgatgaaggtggacgtggtgtacgagaagcagatgctgtacctgtacgtgctgagcggcatcggcggcctgctgctgctgctgctgatcttcatcgtgctgtacaaggtgggcttcttcaagagaaacctgaaggagaagatggaggccggcagaggcgtgcccaacggcatccccgccgaggacagcgagcagctggccagcggccaggaggccggcgaccccggctgcctgaagcccctgcacgagaaggacagcgagagcggcggcggcaaggactag

SEQ ID NO: 85378 - DNA, 489 bp, synthetic construct
  misc_feature 1..489: note = Description of Artificial Sequence: Synthetic coding sequence
  source 1..489: mol_type = other DNA
atgaaggacagctgcatcaccgtgatggccatggccctgctgagcggcttcttcttcttcgcccccgccagcagctacaacctggacgtgagaggcgccagaagcttcagcccccccagagccggcagacacttcggctacagagtgctgcaggtgggcaacggcgtgatcgtgggcgcccccggcgagggcaacagcaccggcagcctgtaccagtgccagagcggcaccggccactgcctgcccgtgaccctgagaggcagcaactacaccagcaagtacctgggcatgaccctggccaccgaccccaccgacggcagcatcctggcctgcgaccccggcctgagcagaacctgcgaccagaacacctacctgagcggcctgtgctacctgttcagacagaacctgcagggccccatgctgcagggcagacccggcttccaggtgtgctgctgcagcgtgttccacaagctgcagaacagaatctag

SEQ ID NO: 85379 - DNA, 3459 bp, synthetic construct
  misc_feature 1..3459: note = Description of Artificial Sequence: Synthetic coding sequence
  source 1..3459: mol_type = other DNA
atggccctgagagtgctgctgctgaccgccctgaccctgtgccacggcttcaacctggacaccgagaacgccatgaccttccaggagaacgccagaggcttcggccagagcgtggtgcagctgcagggcagcagagtggtggtgggcgccccccaggagatcgtggccgccaaccagagaggcagcctgtaccagtgcgactacagcaccggcagctgcgagcccatcagactgcaggtgcccgtggaggccgtgaacatgagcctgggcctgagcctggccgccaccaccagccccccccagctgctggcctgcggccccaccgtgcaccagacctgcagcgagaacacctacgtgaagggcctgtgcttcctgttcggcagcaacctgagacagcagccccagaagttccccgaggccctgagaggctgcccccaggaggacagcgacatcgccttcctgatcgacggcagcggcagcatcatcccccacgacttcagaagaatgaaggagttcgtgagcaccgtgatggagcagctgaagaagagcaagaccctgttcagcctgatgcagtacagcgaggagttcagaatccacttcaccttcaaggagttccagaacaaccccaaccccagaagcctggtgaagcccatcacccagctgctgggcagaacccacaccgccaccggcatcagaaaggtggtgagagagctgttcaacatcaccaacggcgccagaaagaacgccttcaagatcctggtggtgatcaccgacggcgagaagttcggcgaccccctgggctacgaggacgtgatccccgaggccgacagagagggcgtgatcagatacgtgatcggcgtgggcgacgccttcagaagcgagaagagcagacaggagctgaacaccatcgccagcaagccccccagagaccacgtgttccaggtgaacaacttcgaggccctgaagaccatccagaaccagctgagagagaagatcttcgccatcgagggcacccagaccggcagcagcagcagcttcgagcacgagatgagccaggagggcttcagcgccgccatcaccagcaacggccccctgctgagcaccgtgggcagctacgactgggccggcggcgtgttcctgtacaccagcaaggagaagagcaccttcatcaacatgaccagagtggacagcgacatgaacgacgcctacctgggctacgccgccgccatcatcctgagaaacagagtgcagagcctggtgctgggcgcccccagataccagcacatcggcctggtggccatgttcagacagaacaccggcatgtgggagagcaacgccaacgtgaagggcacccagatcggcgcctacttcggcgccagcctgtgcagcgtggacgtggacagcaacggcagcaccgacctggtgctgatcggcgccccccactactacgagcagaccagaggcggccaggtgagcgtgtgccccctgcccagaggcagagccagatggcagtgcgacgccgtgctgtacggcgagcagggccagccctggggcagattcggcgccgccctgaccgtgctgggcgacgtgaacggcgacaagctgaccgacgtggccatcggcgcccccggcgaggaggacaacagaggcgccgtgtacctgttccacggcaccagcggcagcggcatcagccccagccacagccagagaatcgccggcagcaagctgagccccagactgcagtacttcggccagagcctgagcggcggccaggacctgaccatggacggcctggtggacctgaccgtgggcgcccagggccacgtgctgctgctgagaagccagcccgtgctgagagtgaaggccatcatggagttcaaccccagagaggtggccagaaacgtgttcgagtgcaacgaccaggtggtgaagggcaaggaggccggcgaggtgagagtgtgcctgcacgtgcagaagagcaccagagacagactgagagagggccagatccagagcgtggtgacctacgacctggccctggacagcggcagaccccacagcagagccgtgttcaacgagaccaagaacagcaccagaagacagacccaggtgctgggcctgacccagacctgcgagaccctgaagctgcagctgcccaactgcatcgaggaccccgtgagccccatcgtgctgagactgaacttcagcctggtgggcacccccctgagcgccttcggcaacctgagacccgtgctggccgaggacgcccagagactgttcaccgccctgttccccttcgagaagaactgcggcaacgacaacatctgccaggacgacctgagcatcaccttcagcttcatgagcctggactgcctggtggtgggcggccccagagagttcaacgtgaccgtgaccgtgagaaacgacggcgaggacagctacagaacccaggtgaccttcttcttccccctggacctgagctacagaaaggtgagcaccctgcagaaccagagaagccagagaagctggagactggcctgcgagagcgccagcagcaccgaggtgagcggcgccctgaagagcaccagctgcagcatcaaccaccccatcttccccgagaacagcgaggtgaccttcaacatcaccttcgacgtggacagcaaggccagcctgggcaacaagctgctgctgaaggccaacgtgaccagcgagaacaacatgcccagaaccaacaagaccgagttccagctggagctgcccgtgaagtacgccgtgtacatggtggtgaccagccacggcgtgagcaccaagtacctgaacttcaccgccagcgagaacaccagcagagtgatgcagcaccagtaccaggtgagcaacctgggccagagaagcctgcccatcagcctggtgttcctggtgcccgtgagactgaaccagaccgtgatctgggacagaccccaggtgaccttcagcgagaacctgagcagcacctgccacaccaaggagagactgcccagccacagcgacttcctggccgagctgagaaaggcccccgtggtgaactgcagcatcgccgtgtgccagagaatccagtgcgacatccccttcttcggcatccaggaggagttcaacgccaccctgaagggcaacctgagcttcgactggtacatcaagaccagccacaaccacctgctgatcgtgagcaccgccgagatcctgttcaacgacagcgtgttcaccctgctgcccggccagggcgccttcgtgagaagccagaccgagaccaaggtggagcccttcgaggtgcccaaccccctgcccctgatcgtgggcagcagcgtgggcggcctgctgctgctggccctgatcaccgccgccctgtacaagctgggcttcttcaagagacagtacaaggacatgatgagcgagggcggcccccccggcgccgagccccagtag

SEQ ID NO: 85380 - DNA, 3462 bp, synthetic construct
  misc_feature 1..3462: note = Description of Artificial Sequence: Synthetic coding sequence
  source 1..3462: mol_type = other DNA
atggccctgagagtgctgctgctgaccgccctgaccctgtgccacggcttcaacctggacaccgagaacgccatgaccttccaggagaacgccagaggcttcggccagagcgtggtgcagctgcagggcagcagagtggtggtgggcgccccccaggagatcgtggccgccaaccagagaggcagcctgtaccagtgcgactacagcaccggcagctgcgagcccatcagactgcaggtgcccgtggaggccgtgaacatgagcctgggcctgagcctggccgccaccaccagccccccccagctgctggcctgcggccccaccgtgcaccagacctgcagcgagaacacctacgtgaagggcctgtgcttcctgttcggcagcaacctgagacagcagccccagaagttccccgaggccctgagaggctgcccccaggaggacagcgacatcgccttcctgatcgacggcagcggcagcatcatcccccacgacttcagaagaatgaaggagttcgtgagcaccgtgatggagcagctgaagaagagcaagaccctgttcagcctgatgcagtacagcgaggagttcagaatccacttcaccttcaaggagttccagaacaaccccaaccccagaagcctggtgaagcccatcacccagctgctgggcagaacccacaccgccaccggcatcagaaaggtggtgagagagctgttcaacatcaccaacggcgccagaaagaacgccttcaagatcctggtggtgatcaccgacggcgagaagttcggcgaccccctgggctacgaggacgtgatccccgaggccgacagagagggcgtgatcagatacgtgatcggcgtgggcgacgccttcagaagcgagaagagcagacaggagctgaacaccatcgccagcaagccccccagagaccacgtgttccaggtgaacaacttcgaggccctgaagaccatccagaaccagctgagagagaagatcttcgccatcgagggcacccagaccggcagcagcagcagcttcgagcacgagatgagccaggagggcttcagcgccgccatcaccagcaacggccccctgctgagcaccgtgggcagctacgactgggccggcggcgtgttcctgtacaccagcaaggagaagagcaccttcatcaacatgaccagagtggacagcgacatgaacgacgcctacctgggctacgccgccgccatcatcctgagaaacagagtgcagagcctggtgctgggcgcccccagataccagcacatcggcctggtggccatgttcagacagaacaccggcatgtgggagagcaacgccaacgtgaagggcacccagatcggcgcctacttcggcgccagcctgtgcagcgtggacgtggacagcaacggcagcaccgacctggtgctgatcggcgccccccactactacgagcagaccagaggcggccaggtgagcgtgtgccccctgcccagaggccagagagccagatggcagtgcgacgccgtgctgtacggcgagcagggccagccctggggcagattcggcgccgccctgaccgtgctgggcgacgtgaacggcgacaagctgaccgacgtggccatcggcgcccccggcgaggaggacaacagaggcgccgtgtacctgttccacggcaccagcggcagcggcatcagccccagccacagccagagaatcgccggcagcaagctgagccccagactgcagtacttcggccagagcctgagcggcggccaggacctgaccatggacggcctggtggacctgaccgtgggcgcccagggccacgtgctgctgctgagaagccagcccgtgctgagagtgaaggccatcatggagttcaaccccagagaggtggccagaaacgtgttcgagtgcaacgaccaggtggtgaagggcaaggaggccggcgaggtgagagtgtgcctgcacgtgcagaagagcaccagagacagactgagagagggccagatccagagcgtggtgacctacgacctggccctggacagcggcagaccccacagcagagccgtgttcaacgagaccaagaacagcaccagaagacagacccaggtgctgggcctgacccagacctgcgagaccctgaagctgcagctgcccaactgcatcgaggaccccgtgagccccatcgtgctgagactgaacttcagcctggtgggcacccccctgagcgccttcggcaacctgagacccgtgctggccgaggacgcccagagactgttcaccgccctgttccccttcgagaagaactgcggcaacgacaacatctgccaggacgacctgagcatcaccttcagcttcatgagcctggactgcctggtggtgggcggccccagagagttcaacgtgaccgtgaccgtgagaaacgacggcgaggacagctacagaacccaggtgaccttcttcttccccctggacctgagctacagaaaggtgagcaccctgcagaaccagagaagccagagaagctggagactggcctgcgagagcgccagcagcaccgaggtgagcggcgccctgaagagcaccagctgcagcatcaaccaccccatcttccccgagaacagcgaggtgaccttcaacatcaccttcgacgtggacagcaaggccagcctgggcaacaagctgctgctgaaggccaacgtgaccagcgagaacaacatgcccagaaccaacaagaccgagttccagctggagctgcccgtgaagtacgccgtgtacatggtggtgaccagccacggcgtgagcaccaagtacctgaacttcaccgccagcgagaacaccagcagagtgatgcagcaccagtaccaggtgagcaacctgggccagagaagcctgcccatcagcctggtgttcctggtgcccgtgagactgaaccagaccgtgatctgggacagaccccaggtgaccttcagcgagaacctgagcagcacctgccacaccaaggagagactgcccagccacagcgacttcctggccgagctgagaaaggcccccgtggtgaactgcagcatcgccgtgtgccagagaatccagtgcgacatccccttcttcggcatccaggaggagttcaacgccaccctgaagggcaacctgagcttcgactggtacatcaagaccagccacaaccacctgctgatcgtgagcaccgccgagatcctgttcaacgacagcgtgttcaccctgctgcccggccagggcgccttcgtgagaagccagaccgagaccaaggtggagcccttcgaggtgcccaaccccctgcccctgatcgtgggcagcagcgtgggcggcctgctgctgctggccctgatcaccgccgccctgtacaagctgggcttcttcaagagacagtacaaggacatgatgagcgagggcggcccccccggcgccgagccccagtag

SEQ ID NO: 85381 - DNA, 3492 bp, synthetic construct
  misc_feature 1..3492: note = Description of Artificial Sequence: Synthetic coding sequence
  source 1..3492: mol_type = other DNA
atgaccagaaccagagccgccctgctgctgttcaccgccctggccaccagcctgggcttcaacctggacaccgaggagctgaccgccttcagagtggacagcgccggcttcggcgacagcgtggtgcagtacgccaacagctgggtggtggtgggcgccccccagaagatcaccgccgccaaccagaccggcggcctgtaccagtgcggctacagcaccggcgcctgcgagcccatcggcctgcaggtgccccccgaggccgtgaacatgagcctgggcctgagcctggccagcaccaccagccccagccagctgctggcctgcggccccaccgtgcaccacgagtgcggcagaaacatgtacctgaccggcctgtgcttcctgctgggccccacccagctgacccagagactgcccgtgagcagacaggagtgccccagacaggagcaggacatcgtgttcctgatcgacggcagcggcagcatcagcagcagaaacttcgccaccatgatgaacttcgtgagagccgtgatcagccagttccagagacccagcacccagttcagcctgatgcagttcagcaacaagttccagacccacttcaccttcgaggagttcagaagaagcagcaaccccctgagcctgctggccagcgtgcaccagctgcagggcttcacctacaccgccaccgccatccagaacgtggtgcacagactgttccacgccagctacggcgccagaagagacgccgccaagatcctgatcgtgatcaccgacggcaagaaggagggcgacagcctggactacaaggacgtgatccccatggccgacgccgccggcatcatcagatacgccatcggcgtgggcctggccttccagaacagaaacagctggaaggagctgaacgacatcgccagcaagcccagccaggagcacatcttcaaggtggaggacttcgacgccctgaaggacatccagaaccagctgaaggagaagatcttcgccatcgagggcaccgagaccaccagcagcagcagcttcgagctggagatggcccaggagggcttcagcgccgtgttcacccccgacggccccgtgctgggcgccgtgggcagcttcacctggagcggcggcgccttcctgtacccccccaacatgagccccaccttcatcaacatgagccaggagaacgtggacatgagagacagctacctgggctacagcaccgagctggccctgtggaagggcgtgcagagcctggtgctgggcgcccccagataccagcacaccggcaaggccgtgatcttcacccaggtgagcagacagtggagaatgaaggccgaggtgaccggcacccagatcggcagctacttcggcgccagcctgtgcagcgtggacgtggacagcgacggcagcaccgacctggtgctgatcggcgccccccactactacgagcagaccagaggcggccaggtgagcgtgtgccccctgcccagaggctggagaagatggtggtgcgacgccgtgctgtacggcgagcagggccacccctggggcagattcggcgccgccctgaccgtgctgggcgacgtgaacggcgacaagctgaccgacgtggtgatcggcgcccccggcgaggaggagaacagaggcgccgtgtacctgttccacggcgtgctgggccccagcatcagccccagccacagccagagaatcgccggcagccagctgagcagcagactgcagtacttcggccaggccctgagcggcggccaggacctgacccaggacggcctggtggacctggccgtgggcgccagaggccaggtgctgctgctgagaaccagacccgtgctgtgggtgggcgtgagcatgcagttcatccccgccgagatccccagaagcgccttcgagtgcagagagcaggtggtgagcgagcagaccctggtgcagagcaacatctgcctgtacatcgacaagagaagcaagaacctgctgggcagcagagacctgcagagcagcgtgaccctggacctggccctggaccccggcagactgagccccagagccaccttccaggagaccaagaacagaagcctgagcagagtgagagtgctgggcctgaaggcccactgcgagaacttcaacctgctgctgcccagctgcgtggaggacagcgtgacccccatcaccctgagactgaacttcaccctggtgggcaagcccctgctggccttcagaaacctgagacccatgctggccgccgacgcccagagatacttcaccgccagcctgcccttcgagaagaactgcggcgccgaccacatctgccaggacaacctgggcatcagcttcagcttccccggcctgaagagcctgctggtgggcagcaacctggagctgaacgccgaggtgatggtgtggaacgacggcgaggacagctacggcaccaccatcaccttcagccaccccgccggcctgagctacagatacgtggccgagggccagaagcagggccagctgagaagcctgcacctgacctgcgacagcgcccccgtgggcagccagggcacctggagcaccagctgcagaatcaaccacctgatcttcagaggcggcgcccagatcaccttcctggccaccttcgacgtgagccccaaggccgtgctgggcgacagactgctgctgaccgccaacgtgagcagcgagaacaacacccccagaaccagcaagaccaccttccagctggagctgcccgtgaagtacgccgtgtacaccgtggtgagcagccacgagcagttcaccaagtacctgaacttcagcgagagcgaggagaaggagagccacgtggccatgcacagataccaggtgaacaacctgggccagagagacctgcccgtgagcatcaacttctgggtgcccgtggagctgaaccaggaggccgtgtggatggacgtggaggtgagccacccccagaaccccagcctgagatgcagcagcgagaagatcgccccccccgccagcgacttcctggcccacatccagaagaaccccgtgctggactgcagcatcgccggctgcctgagattcagatgcgacgtgcccagcttcagcgtgcaggaggagctggacttcaccctgaagggcaacctgagcttcggctgggtgagacagatcctgcagaagaaggtgagcgtggtgagcgtggccgagatcaccttcgacaccagcgtgtacagccagctgcccggccaggaggccttcatgagagcccagaccaccaccgtgctggagaagtacaaggtgcacaaccccacccccctgatcgtgggcagcagcatcggcggcctgctgctgctggccctgatcaccgccgtgctgtacaaggtgggcttcttcaagagacagtacaaggagatgatggaggaggccaacggccagatcgcccccgagaacggcacccagacccccagcccccccagcgagaagtag

SEQ ID NO: 85382 - DNA, 5469 bp, synthetic construct
  misc_feature 1..5469: note = Description of Artificial Sequence: Synthetic coding sequence
  source 1..5469: mol_type = other DNA
atggccggccccagacccagcccctgggccagactgctgctggccgccctgatcagcgtgagcctgagcggcaccctggccaacagatgcaagaaggcccccgtgaagagctgcaccgagtgcgtgagagtggacaaggactgcgcctactgcaccgacgagatgttcagagacagaagatgcaacacccaggccgagctgctggccgccggctgccagagagagagcatcgtggtgatggagagcagcttccagatcaccgaggagacccagatcgacaccaccctgagaagaagccagatgagcccccagggcctgagagtgagactgagacccggcgaggagagacacttcgagctggaggtgttcgagcccctggagagccccgtggacctgtacatcctgatggacttcagcaacagcatgagcgacgacctggacaacctgaagaagatgggccagaacctggccagagtgctgagccagctgaccagcgactacaccatcggcttcggcaagttcgtggacaaggtgagcgtgccccagaccgacatgagacccgagaagctgaaggagccctggcccaacagcgacccccccttcagcttcaagaacgtgatcagcctgaccgaggacgtggacgagttcagaaacaagctgcagggcgagagaatcagcggcaacctggacgcccccgagggcggcttcgacgccatcctgcagaccgccgtgtgcaccagagacatcggctggagacccgacagcacccacctgctggtgttcagcaccgagagcgccttccactacgaggccgacggcgccaacgtgctggccggcatcatgagcagaaacgacgagagatgccacctggacaccaccggcacctacacccagtacagaacccaggactaccccagcgtgcccaccctggtgagactgctggccaagcacaacatcatccccatcttcgccgtgaccaactacagctacagctactacgagaagctgcacacctacttccccgtgagcagcctgggcgtgctgcaggaggacagcagcaacatcgtggagctgctggaggaggccttcaacagaatcagaagcaacctggacatcagagccctggacagccccagaggcctgagaaccgaggtgaccagcaagatgttccagaagaccagaaccggcagcttccacatcagaagaggcgaggtgggcatctaccaggtgcagctgagagccctggagcacgtggacggcacccacgtgtgccagctgcccgaggaccagaagggcaacatccacctgaagcccagcttcagcgacggcctgaagatggacgccggcatcatctgcgacgtgtgcacctgcgagctgcagaaggaggtgagaagcgccagatgcagcttcaacggcgacttcgtgtgcggccagtgcgtgtgcagcgagggctggagcggccagacctgcaactgcagcaccggcagcctgagcgacatccagccctgcctgagagagggcgaggacaagccctgcagcggcagaggcgagtgccagtgcggccactgcgtgtgctacggcgagggcagatacgagggccagttctgcgagtacgacaacttccagtgccccagaaccagcggcttcctgtgcaacgacagaggcagatgcagcatgggccagtgcgtgtgcgagcccggctggaccggccccagctgcgactgccccctgagcaacgccacctgcatcgacagcaacggcggcatctgcaacggcagaggccactgcgagtgcggcagatgccactgccaccagcagagcctgtacaccgacaccatctgcgagatcaactacagcgccatccaccccggcctgtgcgaggacctgagaagctgcgtgcagtgccaggcctggggcaccggcgagaagaagggcagaacctgcgaggagtgcaacttcaaggtgaagatggtggacgagctgaagagagccgaggaggtggtggtgagatgcagcttcagagacgaggacgacgactgcacctacagctacaccatggagggcgacggcgcccccggccccaacagcaccgtgctggtgcacaagaagaaggactgcccccccggcagcttctggtggctgatccccctgctgctgctgctgctgcccctgctggccctgctgctgctgctgtgctggaagtactgcgcctgctgcaaggcctgcctggccctgctgccctgctgcaacagaggccacatggtgggcttcaaggaggaccactacatgctgagagagaacctgatggccagcgaccacctggacacccccatgctgagaagcggcaacctgaagggcagagacgtggtgagatggaaggtgaccaacaacatgcagagacccggcttcgccacccacgccgccagcatcaaccccaccgagctggtgccctacggcctgagcctgagactggccagactgtgcaccgagaacctgctgaagcccgacaccagagagtgcgcccagctgagacaggaggtggaggagaacctgaacgaggtgtacagacagatcagcggcgtgcacaagctgcagcagaccaagttcagacagcagcccaacgccggcaagaagcaggaccacaccatcgtggacaccgtgctgatggcccccagaagcgccaagcccgccctgctgaagctgaccgagaagcaggtggagcagagagccttccacgacctgaaggtggcccccggctactacaccctgaccgccgaccaggacgccagaggcatggtggagttccaggagggcgtggagctggtggacgtgagagtgcccctgttcatcagacccgaggacgacgacgagaagcagctgctggtggaggccatcgacgtgcccgccggcaccgccaccctgggcagaagactggtgaacatcaccatcatcaaggagcaggccagagacgtggtgagcttcgagcagcccgagttcagcgtgagcagaggcgaccaggtggccagaatccccgtgatcagaagagtgctggacggcggcaagagccaggtgagctacagaacccaggacggcaccgcccagggcaacagagactacatccccgtggagggcgagctgctgttccagcccggcgaggcctggaaggagctgcaggtgaagctgctggagctgcaggaggtggacagcctgctgagaggcagacaggtgagaagattccacgtgcagctgagcaaccccaagttcggcgcccacctgggccagccccacagcaccaccatcatcatcagagaccccgacgagctggacagaagcttcaccagccagatgctgagcagccagccccccccccacggcgacctgggcgccccccagaaccccaacgccaaggccgccggcagcagaaagatccacttcaactggctgccccccagcggcaagcccatgggctacagagtgaagtactggatccagggcgacagcgagagcgaggcccacctgctggacagcaaggtgcccagcgtggagctgaccaacctgtacccctactgcgactacgagatgaaggtgtgcgcctacggcgcccagggcgagggcccctacagcagcctggtgagctgcagaacccaccaggaggtgcccagcgagcccggcagactggccttcaacgtggtgagcagcaccgtgacccagctgagctgggccgagcccgccgagaccaacggcgagatcaccgcctacgaggtgtgctacggcctggtgaacgacgacaacagacccatcggccccatgaagaaggtgctggtggacaaccccaagaacagaatgctgctgatcgagaacctgagagagagccagccctacagatacaccgtgaaggccagaaacggcgccggctggggccccgagagagaggccatcatcaacctggccacccagcccaagagacccatgagcatccccatcatccccgacatccccatcgtggacgcccagagcggcgaggactacgacagcttcctgatgtacagcgacgacgtgctgagaagccccagcggcagccagagacccagcgtgagcgacgacaccggctgcggctggaagttcgagcccctgctgggcgaggagctggacctgagaagagtgacctggagactgccccccgagctgatccccagactgagcgccagcagcggcagaagcagcgacgccgaggccccccacggcccccccgacgacggcggcgccggcggcaagggcggcagcctgcccagaagcgccacccccggcccccccggcgagcacctggtgaacggcagaatggacttcgccttccccggcagcaccaacagcctgcacagaatgaccaccaccagcgccgccgcctacggcacccacctgagcccccacgtgccccacagagtgctgagcaccagcagcaccctgaccagagactacaacagcctgaccagaagcgagcacagccacagcaccaccctgcccagagactacagcaccctgaccagcgtgagcagccacgacagcagactgaccgccggcgtgcccgacacccccaccagactggtgttcagcgccctgggccccaccagcctgagagtgagctggcaggagcccagatgcgagagacccctgcagggctacagcgtggagtaccagctgctgaacggcggcgagctgcacagactgaacatccccaaccccgcccagaccagcgtggtggtggaggacctgctgcccaaccacagctacgtgttcagagtgagagcccagagccaggagggctggggcagagagagagagggcgtgatcaccatcgagagccaggtgcacccccagagccccctgtgccccctgcccggcagcgccttcaccctgagcacccccagcgcccccggccccctggtgttcaccgccctgagccccgacagcctgcagctgagctgggagagacccagaagacccaacggcgacatcgtgggctacctggtgacctgcgagatggcccagggcggcggccccgccaccgccttcagagtggacggcgacagccccgagagcagactgaccgtgcccggcctgagcgagaacgtgccctacaagttcaaggtgcaggccagaaccaccgagggcttcggccccgagagagagggcatcatcaccatcgagagccaggacggcggccccttcccccagctgggcagcagagccggcctgttccagcaccccctgcagagcgagtacagcagcatcaccaccacccacaccagcgccaccgagcccttcctggtggacggcctgaccctgggcgcccagcacctggaggccggcggcagcctgaccagacacgtgacccaggagttcgtgagcagaaccctgaccaccagcggcaccctgagcacccacatggaccagcagttcttccagacctag

SEQ ID NO: 85383 - DNA, 5418 bp, synthetic construct
  misc_feature 1..5418: note = Description of Artificial Sequence: Synthetic coding sequence
  source 1..5418: mol_type = other DNA
atggccggccccagacccagcccctgggccagactgctgctggccgccctgatcagcgtgagcctgagcggcaccctggccaacagatgcaagaaggcccccgtgaagagctgcaccgagtgcgtgagagtggacaaggactgcgcctactgcaccgacgagatgttcagagacagaagatgcaacacccaggccgagctgctggccgccggctgccagagagagagcatcgtggtgatggagagcagcttccagatcaccgaggagacccagatcgacaccaccctgagaagaagccagatgagcccccagggcctgagagtgagactgagacccggcgaggagagacacttcgagctggaggtgttcgagcccctggagagccccgtggacctgtacatcctgatggacttcagcaacagcatgagcgacgacctggacaacctgaagaagatgggccagaacctggccagagtgctgagccagctgaccagcgactacaccatcggcttcggcaagttcgtggacaaggtgagcgtgccccagaccgacatgagacccgagaagctgaaggagccctggcccaacagcgacccccccttcagcttcaagaacgtgatcagcctgaccgaggacgtggacgagttcagaaacaagctgcagggcgagagaatcagcggcaacctggacgcccccgagggcggcttcgacgccatcctgcagaccgccgtgtgcaccagagacatcggctggagacccgacagcacccacctgctggtgttcagcaccgagagcgccttccactacgaggccgacggcgccaacgtgctggccggcatcatgagcagaaacgacgagagatgccacctggacaccaccggcacctacacccagtacagaacccaggactaccccagcgtgcccaccctggtgagactgctggccaagcacaacatcatccccatcttcgccgtgaccaactacagctacagctactacgagaagctgcacacctacttccccgtgagcagcctgggcgtgctgcaggaggacagcagcaacatcgtggagctgctggaggaggccttcaacagaatcagaagcaacctggacatcagagccctggacagccccagaggcctgagaaccgaggtgaccagcaagatgttccagaagaccagaaccggcagcttccacatcagaagaggcgaggtgggcatctaccaggtgcagctgagagccctggagcacgtggacggcacccacgtgtgccagctgcccgaggaccagaagggcaacatccacctgaagcccagcttcagcgacggcctgaagatggacgccggcatcatctgcgacgtgtgcacctgcgagctgcagaaggaggtgagaagcgccagatgcagcttcaacggcgacttcgtgtgcggccagtgcgtgtgcagcgagggctggagcggccagacctgcaactgcagcaccggcagcctgagcgacatccagccctgcctgagagagggcgaggacaagccctgcagcggcagaggcgagtgccagtgcggccactgcgtgtgctacggcgagggcagatacgagggccagttctgcgagtacgacaacttccagtgccccagaaccagcggcttcctgtgcaacgacagaggcagatgcagcatgggccagtgcgtgtgcgagcccggctggaccggccccagctgcgactgccccctgagcaacgccacctgcatcgacagcaacggcggcatctgcaacggcagaggccactgcgagtgcggcagatgccactgccaccagcagagcctgtacaccgacaccatctgcgagatcaactacagcgccatccaccccggcctgtgcgaggacctgagaagctgcgtgcagtgccaggcctggggcaccggcgagaagaagggcagaacctgcgaggagtgcaacttcaaggtgaagatggtggacgagctgaagagagccgaggaggtggtggtgagatgcagcttcagagacgaggacgacgactgcacctacagctacaccatggagggcgacggcgcccccggccccaacagcaccgtgctggtgcacaagaagaaggactgcccccccggcagcttctggtggctgatccccctgctgctgctgctgctgcccctgctggccctgctgctgctgctgtgctggaagtactgcgcctgctgcaaggcctgcctggccctgctgccctgctgcaacagaggccacatggtgggcttcaaggaggaccactacatgctgagagagaacctgatggccagcgaccacctggacacccccatgctgagaagcggcaacctgaagggcagagacgtggtgagatggaaggtgaccaacaacatgcagagacccggcttcgccacccacgccgccagcatcaaccccaccgagctggtgccctacggcctgagcctgagactggccagactgtgcaccgagaacctgctgaagcccgacaccagagagtgcgcccagctgagacaggaggtggaggagaacctgaacgaggtgtacagacagatcagcggcgtgcacaagctgcagcagaccaagttcagacagcagcccaacgccggcaagaagcaggaccacaccatcgtggacaccgtgctgatggcccccagaagcgccaagcccgccctgctgaagctgaccgagaagcaggtggagcagagagccttccacgacctgaaggtggcccccggctactacaccctgaccgccgaccaggacgccagaggcatggtggagttccaggagggcgtggagctggtggacgtgagagtgcccctgttcatcagacccgaggacgacgacgagaagcagctgctggtggaggccatcgacgtgcccgccggcaccgccaccctgggcagaagactggtgaacatcaccatcatcaaggagcaggccagagacgtggtgagcttcgagcagcccgagttcagcgtgagcagaggcgaccaggtggccagaatccccgtgatcagaagagtgctggacggcggcaagagccaggtgagctacagaacccaggacggcaccgcccagggcaacagagactacatccccgtggagggcgagctgctgttccagcccggcgaggcctggaaggagctgcaggtgaagctgctggagctgcaggaggtggacagcctgctgagaggcagacaggtgagaagattccacgtgcagctgagcaaccccaagttcggcgcccacctgggccagccccacagcaccaccatcatcatcagagaccccgacgagctggacagaagcttcaccagccagatgctgagcagccagccccccccccacggcgacctgggcgccccccagaaccccaacgccaaggccgccggcagcagaaagatccacttcaactggctgccccccagcggcaagcccatgggctacagagtgaagtactggatccagggcgacagcgagagcgaggcccacctgctggacagcaaggtgcccagcgtggagctgaccaacctgtacccctactgcgactacgagatgaaggtgtgcgcctacggcgcccagggcgagggcccctacagcagcctggtgagctgcagaacccaccaggaggtgcccagcgagcccggcagactggccttcaacgtggtgagcagcaccgtgacccagctgagctgggccgagcccgccgagaccaacggcgagatcaccgcctacgaggtgtgctacggcctggtgaacgacgacaacagacccatcggccccatgaagaaggtgctggtggacaaccccaagaacagaatgctgctgatcgagaacctgagagagagccagccctacagatacaccgtgaaggccagaaacggcgccggctggggccccgagagagaggccatcatcaacctggccacccagcccaagagacccatgagcatccccatcatccccgacatccccatcgtggacgcccagagcggcgaggactacgacagcttcctgatgtacagcgacgacgtgctgagaagccccagcggcagccagagacccagcgtgagcgacgacaccgagcacctggtgaacggcagaatggacttcgccttccccggcagcaccaacagcctgcacagaatgaccaccaccagcgccgccgcctacggcacccacctgagcccccacgtgccccacagagtgctgagcaccagcagcaccctgaccagagactacaacagcctgaccagaagcgagcacagccacagcaccaccctgcccagagactacagcaccctgaccagcgtgagcagccacggcctgccccccatctgggagcacggcagaagcagactgcccctgagctgggccctgggcagcagaagcagagcccagatgaagggcttcccccccagcagaggccccagagacagcatcatcctggccggcagacccgccgcccccagctggggccccgacagcagactgaccgccggcgtgcccgacacccccaccagactggtgttcagcgccctgggccccaccagcctgagagtgagctggcaggagcccagatgcgagagacccctgcagggctacagcgtggagtaccagctgctgaacggcggcgagctgcacagactgaacatccccaaccccgcccagaccagcgtggtggtggaggacctgctgcccaaccacagctacgtgttcagagtgagagcccagagccaggagggctggggcagagagagagagggcgtgatcaccatcgagagccaggtgcacccccagagccccctgtgccccctgcccggcagcgccttcaccctgagcacccccagcgcccccggccccctggtgttcaccgccctgagccccgacagcctgcagctgagctgggagagacccagaagacccaacggcgacatcgtgggctacctggtgacctgcgagatggcccagggcggcggccccgccaccgccttcagagtggacggcgacagccccgagagcagactgaccgtgcccggcctgagcgagaacgtgccctacaagttcaaggtgcaggccagaaccaccgagggcttcggccccgagagagagggcatcatcaccatcgagagccaggacggcggccccttcccccagctgggcagcagagccggcctgttccagcaccccctgcagagcgagtacagcagcatcaccaccacccacaccagcgccaccgagcccttcctggtggacggcctgaccctgggcgcccagcacctggaggccggcggcagcctgaccagacacgtgacccaggagttcgtgagcagaaccctgaccaccagcggcaccctgagcacccacatggaccagcagttcttccagacctag

SEQ ID NO: 85384 - DNA, 5418 bp, synthetic construct; identical to SEQ ID NO: 85383
  misc_feature 1..5418: note = Description of Artificial Sequence: Synthetic coding sequence
  source 1..5418: mol_type = other DNA

SEQ ID NO: 85385 - DNA, 1932 bp, synthetic construct
  misc_feature 1..1932: note = Description of Artificial Sequence: Synthetic coding sequence
  source 1..1932: mol_type = other DNA
ggcggcatcgaggagacccagatcgacaccaccctgagaagaagccagatgagcccccagggcctgagagtgagactgagacccggcgaggagagacacttcgagctggaggtgttcgagcccctggagagccccgtggacctgtacatcctgatggacttcagcaacagcatgagcgacgacctggacaacctgaagaagatgggccagaacctggccagagtgctgagccagctgaccagcgactacaccatcggcttcggcaagttcgtggacaaggtgagcgtgccccagaccgacatgagacccgagaagctgaaggagccctggcccaacagcgacccccccttcagcttcaagaacgtgatcagcctgaccgaggacgtggacgagttcagaaacaagctgcagggcgagagaatcagcggcaacctggacgcccccgagggcggcttcgacgccatcctgcagaccgccgtgtgcaccagagacatcggctggagacccgacagcacccacctgctggtgttcagcaccgagagcgccttccactacgaggccgacggcgccaacgtgctggccggcatcatgagcagaaacgacgagagatgccacctggacaccaccggcacctacacccagtacagaacccaggactaccccagcgtgcccaccctggtgagactgctggccaagcacaacatcatccccatcttcgccgtgaccaactacagctacagctactacgagaagctgcacacctacttccccgtgagcagcctgggcgtgctgcaggaggacagcagcaacatcgtggagctgctggaggaggccttcaacagaatcagaagcaacctggacatcagagccctggacagccccagaggcctgagaaccgaggtgaccagcaagatgttccagaagaccagaaccggcagcttccacatcagaagaggcgaggtgggcatctaccaggtgcagctgagagccctggagcacgtggacggcacccacgtgtgccagctgcccgaggaccagaagggcaacatccacctgaagcccagcttcagcgacggcctgaagatggacgccggcatcatctgcgacgtgtgcacctgcgagctgcagaaggaggtgagaagcgccagatgcagcttcaacggcgacttcgtgtgcggccagtgcgtgtgcagcgagggctggagcggccagacctgcaactgcagcaccggcagcctgagcgacatccagccctgcctgagagagggcgaggacaagccctgcagcggcagaggcgagtgccagtgcggccactgcgtgtgctacggcgagggcagatacgagggccagttctgcgagtacgacaacttccagtgccccagaaccagcggcttcctgtgcaacgacagaggcagatgcagcatgggccagtgcgtgtgcgagcccggctggaccggccccagctgcgactgccccctgagcaacgccacctgcatcgacagcaacggcggcatctgcaacggcagaggccactgcgagtgcggcagatgccactgccaccagcagagcctgtacaccgacaccatctgcgagatcaactacagcgccatccaccccggcctgtgcgaggacctgagaagctgcgtgcagtgccaggcctggggcaccggcgagaagaagggcagaacctgcgaggagtgcaacttcaaggtgaagatggtggacgagctgaagagagccgaggaggtggtggtgagatgcagcttcagagacgaggacgacgactgcacctacagctacaccatggagggcgacggcgcccccggccccaacagcaccgtgctggtgcacaagaagaaggactgcccccccggcagcttctggtggctgatccccctgctgctgctgctgctgcccctgctggccctgtag

SEQ ID NO: 85386 - DNA, 2367 bp, synthetic construct
  misc_feature 1..2367: note = Description of Artificial Sequence: Synthetic coding sequence
  source 1..2367: mol_type = other DNA
atgggcatcgagctgctgtgcctgttcttcctgttcctgggcagaaacgaccacgtgcagggcggctgcgccctgggcggcgccgagacctgcgaggactgcctgctgatcggcccccagtgcgcctggtgcgcccaggagaacttcacccaccccagcggcgtgggcgagagatgcgacacccccgccaacctgctggccaagggctgccagctgaacttcatcgagaaccccgtgagccaggtggagatcctgaagaacaagcccctgagcgtgggcagacagaagaacagcagcgacatcgtgcagatcgccccccagagcctgatcctgaagctgagacccggcggcgcccagaccctgcaggtgcacgtgagacagaccgaggactaccccgtggacctgtactacctgatggacctgagcgccagcatggacgacgacctgaacaccatcaaggagctgggcagcagactgagcaaggagatgagcaagctgaccagcaacttcagactgggcttcggcagcttcgtggagaagcccgtgagccccttcgtgaagaccacccccgaggagatcgccaacccctgcagcagcatcccctacttctgcctgcccaccttcggcttcaagcacatcctgcccctgaccaacgacgccgagagattcaacgagatcgtgaagaaccagaagatcagcgccaacatcgacacccccgagggcggcttcgacgccatcatgcaggccgccgtgtgcaaggagaagatcggctggagaaacgacagcctgcacctgctggtgttcgtgagcgacgccgacagccacttcggcatggacagcaagctggccggcatcgtgatccccaacgacggcctgtgccacctggacagcaagaacgagtacagcatgagcaccgtgctggagtaccccaccatcggccagctgatcgacaagctggtgcagaacaacgtgctgctgatcttcgccgtgacccaggagcaggtgcacctgtacgagaactacgccaagctgatccccggcgccaccgtgggcctgctgcagaaggacagcggcaacatcctgcagctgatcatcagcgcctacgaggagctgagaagcgaggtggagctggaggtgctgggcgacaccgagggcctgaacctgagcttcaccgccatctgcaacaacggcaccctgttccagcaccagaagaagtgcagccacatgaaggtgggcgacaccgccagcttcagcgtgaccgtgaacatcccccactgcgagagaagaagcagacacatcatcatcaagcccgtgggcctgggcgacgccctggagctgctggtgagccccgagtgcaactgcgactgccagaaggaggtggaggtgaacagcagcaagtgccaccacggcaacggcagcttccagtgcggcgtgtgcgcctgccaccccggccacatgggccccagatgcgagtgcggcgaggacatgctgagcaccgacagctgcaaggaggcccccgaccaccccagctgcagcggcagaggcgactgctactgcggccagtgcatctgccacctgagcccctacggcaacatctacggcccctactgccagtgcgacaacttcagctgcgtgagacacaagggcctgctgtgcggcggcaacggcgactgcgactgcggcgagtgcgtgtgcagaagcggctggaccggcgagtactgcaactgcaccaccagcaccgacagctgcgtgagcgaggacggcgtgctgtgcagcggcagaggcgactgcgtgtgcggcaagtgcgtgtgcaccaaccccggcgccagcggccccacctgcgagagatgccccacctgcggcgacccctgcaacagcaagagaagctgcatcgagtgccacctgagcgccgccggccaggccagagaggagtgcgtggacaagtgcaagctggccggcgccaccatcagcgaggaggaggacttcagcaaggacggcagcgtgagctgcagcctgcagggcgagaacgagtgcctgatcaccttcctgatcaccaccgacaacgagggcaagaccatcatccacagcatcaacgagaaggactgccccaagccccccaacatccccatgatcatgctgggcgtgagcctggccatcctgctgatcggcgtggtgctgctgtgcatctggaagctgctggtgagcttccacgacagaaaggaggtggccaagttcgaggccgagagaagcaaggccaagtggcagaccggcaccaaccccctgtacagaggcagcaccagcaccttcaagaacgtgacctacaagcacagagagaagcagaaggtggacctgagcaccgactgctag

SEQ ID NO: 85387 - DNA, 2367 bp, synthetic construct; identical to SEQ ID NO: 85386
  misc_feature 1..2367: note = Description of Artificial Sequence: Synthetic coding sequence
  source 1..2367: mol_type = other DNA

SEQ ID NO: 85388 - DNA, 2397 bp, synthetic construct
  misc_feature 1..2397: note = Description of Artificial Sequence: Synthetic coding sequence
  source 1..2397: mol_type = other DNA
atggtggccctgcccatggtgctggtgctgctgctggtgctgagcagaggcgagagcgagctggacgccaagatccccagcaccggcgacgccaccgagtggagaaacccccacctgagcatgctgggcagctgccagcccgcccccagctgccagaagtgcatcctgagccaccccagctgcgcctggtgcaagcagctgaacttcaccgccagcggcgaggccgaggccagaagatgcgccagaagagaggagctgctggccagaggctgccccctggaggagctggaggagcccagaggccagcaggaggtgctgcaggaccagcccctgagccagggcgccagaggcgagggcgccacccagctggccccccagagagtgagagtgaccctgagacccggcgagccccagcagctgcaggtgagattcctgagagccgagggctaccccgtggacctgtactacctgatggacctgagctacagcatgaaggacgacctggagagagtgagacagctgggccacgccctgctggtgagactgcaggaggtgacccacagcgtgagaatcggcttcggcagcttcgtggacaagaccgtgctgcccttcgtgagcaccgtgcccagcaagctgagacacccctgccccaccagactggagagatgccagagccccttcagcttccaccacgtgctgagcctgaccggcgacgcccaggccttcgagagagaggtgggcagacagagcgtgagcggcaacctggacagccccgagggcggcttcgacgccatcctgcaggccgccctgtgccaggagcagatcggctggagaaacgtgagcagactgctggtgttcaccagcgacgacaccttccacaccgccggcgacggcaagctgggcggcatcttcatgcccagcgacggccactgccacctggacagcaacggcctgtacagcagaagcaccgagttcgactaccccagcgtgggccaggtggcccaggccctgagcgccgccaacatccagcccatcttcgccgtgaccagcgccgccctgcccgtgtaccaggagctgagcaagctgatccccaagagcgccgtgggcgagctgagcgaggacagcagcaacgtggtgcagctgatcatggacgcctacaacagcctgagcagcaccgtgaccctggagcacagcagcctgccccccggcgtgcacatcagctacgagagccagtgcgagggccccgagaagagagagggcaaggccgaggacagaggccagtgcaaccacgtgagaatcaaccagaccgtgaccttctgggtgagcctgcaggccacccactgcctgcccgagccccacctgctgagactgagagccctgggcttcagcgaggagctgatcgtggagctgcacaccctgtgcgactgcaactgcagcgacacccagccccaggccccccactgcagcgacggccagggccacctgcagtgcggcgtgtgcagctgcgcccccggcagactgggcagactgtgcgagtgcagcgtggccgagctgagcagccccgacctggagagcggctgcagagcccccaacggcaccggccccctgtgcagcggcaagggccactgccagtgcggcagatgcagctgcagcggccagagcagcggccacctgtgcgagtgcgacgacgccagctgcgagagacacgagggcatcctgtgcggcggcttcggcagatgccagtgcggcgtgtgccactgccacgccaacagaaccggcagagcctgcgagtgcagcggcgacatggacagctgcatcagccccgagggcggcctgtgcagcggccacggcagatgcaagtgcaacagatgccagtgcctggacggctactacggcgccctgtgcgaccagtgccccggctgcaagaccccctgcgagagacacagagactgcgccgagtgcggcgccttcagaaccggccccctggccaccaactgcagcaccgcctgcgcccacaccaacgtgaccctggccctggcccccatcctggacgacggctggtgcaaggagagaaccctggacaaccagctgttcttcttcctggtggaggacgacgccagaggcaccgtggtgctgagagtgagaccccaggagaagggcgccgaccacacccaggccatcgtgctgggctgcgtgggcggcatcgtggccgtgggcctgggcctggtgctggcctacagactgagcgtggagatctacgacagaagagagtacagcagattcgagaaggagcagcagcagctgaactggaagcaggacagcaaccccctgtacaagagcgccatcaccaccaccatcaaccccagattccaggaggccgacagccccaccctgtag

SEQ ID NO: 85389 - DNA, 1953 bp, synthetic construct
  misc_feature 1..1953: note = Description of Artificial Sequence: Synthetic coding sequence
  source 1..1953: mol_type = other DNA
atggtggccctgcccatggtgctggtgctgctgctggtgctgagcagaggcgagagcgagctggacgccaagatccccagcaccggcgacgccaccgagtggagaaacccccacctgagcatgctgggcagctgccagcccgcccccagctgccagaagtgcatcctgagccaccccagctgcgcctggtgcaagcagctgaacttcaccgccagcggcgaggccgaggccagaagatgcgccagaagagaggagctgctggccagaggctgccccctggaggagctggaggagcccagaggccagcaggaggtgctgcaggaccagcccctgagccagggcgccagaggcgagggcgccacccagctggccccccagagagtgagagtgaccctgagacccggcgagccccagcagctgcaggtgagattcctgagagccgagggctaccccgtggacctgtactacctgatggacctgagctacagcatgaaggacgacctggagagagtgagacagctgggccacgccctgctggtgagactgcaggaggtgacccacagcgtgagaatcggcttcggcagcttcgtggacaagaccgtgctgcccttcgtgagcaccgtgcccagcaagctgagacacccctgccccaccagactggagagatgccagagccccttcagcttccaccacgtgctgagcctgaccggcgacgcccaggccttcgagagagaggtgggcagacagagcgtgagcggcaacctggacagccccgagggcggcttcgacgccatcctgcaggccgccctgtgccaggagcagatcggctggagaaacgtgagcagactgctggtgttcaccagcgacgacaccttccacaccgccggcgacggcaagctgggcggcatcttcatgcccagcgacggccactgccacctggacagcaacggcctgtacagcagaagcaccgagttcgactaccccagcgtgggccaggtggcccaggccctgagcgccgccaacatccagcccatcttcgccgtgaccagcgccgccctgcccgtgtaccaggagctgagcaagctgatccccaagagcgccgtgggcgagctgagcgaggacagcagcaacgtggtgcagctgatcatggacgcctacaacagcctgagcagcaccgtgaccctggagcacagcagcctgccccccggcgtgcacatcagctacgagagccagtgcgagggccccgagaagagagagggcaaggccgaggacagaggccagtgcaaccacgtgagaatcaaccagaccgtgaccttctgggtgagcctgcaggccacccactgcctgcccgagccccacctgctgagactgagagccctgggcttcagcgaggagctgatcgtggagctgcacaccctgtgcgactgcaactgcagcgacacccagccccaggccccccactgcagcgacggccagggccacctgcagtgcggcgtgtgcagagactgcgccgagtgcggcgccttcagaaccggccccctggccaccaactgcagcaccgcctgcgcccacaccaacgtgaccctggccctggcccccatcctggacgacggctggtgcaaggagagaaccctggacaaccagctgttcttcttcctggtggaggacgacgccagaggcaccgtggtgctgagagtgagaccccaggagaagggcgccgaccacacccaggccatcgtgctgggctgcgtgggcggcatcgtggccgtgggcctgggcctggtgctggcctacagactgagcgtggagatctacgacagaagagagtacagcagattcgagaaggagcagcagcagctgaactggaagcaggacagcaaccccctgtacaagagcgccatcaccaccaccatcaaccccagattccaggaggccgacagccccaccctgtag

SEQ ID NO: 85390 - DNA, 2397 bp, synthetic construct; identical to SEQ ID NO: 85388
  misc_feature 1..2397: note = Description of Artificial Sequence: Synthetic coding sequence
  source 1..2397: mol_type = other DNA

SEQ ID NO: 85391 - DNA, 1206 bp, synthetic construct
  misc_feature 1..1206: note = Description of Artificial Sequence: Synthetic coding sequence
  source 1..1206: mol_type = other DNA
atgaacctggtggccgtgatgggcgccttcaacaagggccacggcaagtgcgactgcggcaagtgcaagtgcgaccagggctggtacggcgacgcctgccagtaccccaccaactgcgacctgaccaagaagaagagcaaccagatgtgcaagaacagccaggacatcatctgcagcaacgccggcacctgccactgcggcagatgcaagtgcgacaacagcgacggcagcggcctggtgtacggcaagttctgcgagtgcgacgacagagagtgcatcgacgacgagaccgaggagatctgcggcggccacggcaagtgctactgcggcaactgctactgcaaggccggctggcacggcgacaagtgcgagttccagtgcgacatcaccccctgggagagcaagagaagatgcaccagccccgacggcaagatctgcagcaacagaggcacctgcgtgtgcggcgagtgcacctgccacgacgtggaccccaccggcgactggggcgacatccacggcgacacctgcgagtgcgacgagagagactgcagagccgtgtacgacagatacagcgacgacttctgcagcggccacggccagtgcaactgcggcagatgcgactgcaaggccggctggtacggcaagaagtgcgagcacccccagagctgcaccctgagcgccgaggagagcatcagaaagtgccagggcagcagcgacctgccctgcagcggcagaggcaagtgcgagtgcggcaagtgcacctgctacccccccggcgacagaagagtgtacggcaagacctgcgagtgcgacgacagaagatgcgaggacctggacggcgtggtgtgcggcggccacggcacctgcagctgcggcagatgcgtgtgcgagagaggctggttcggcaagctgtgccagcaccccagaaagtgcaacatgaccgaggagcagagcaagaacctgtgcgagagcgccgacggcatcctgtgcagcggcaagggcagctgccactgcggcaagtgcatctgcagcgccgaggagtggtacatcagcggcgagttctgcgactgcgacgacagagactgcgacaagcacgacggcctgatctgcaccggcaacggcatctgcagctgcggcaactgcgagtgctgggacggctggaacggcaacgcctgcgagatctggctgggcagcgagtacccctag

SEQ ID NO: 85392 - DNA, 1485 bp, synthetic construct
  misc_feature 1..1485: note = Description of Artificial Sequence: Synthetic coding sequence
  source 1..1485: mol_type = other DNA
atgagaccccccggcttcagaaacttcctgctgctggccagcagcctgctgttcgccggcctgagcgccgtgccccagagcttcagccccagcctgagaagctggcccggcgccgcctgcagactgagcagagccgagagcgagagaagatgcagagcccccggccagccccccggcgccgccctgtgccacggcagaggcagatgcgactgcggcgtgtgcatctgccacgtgaccgagcccggcatgttcttcggccccctgtgcgagtgccacgagtgggtgtgcgagacctacgacggcagcacctgcgccggccacggcaagtgcgactgcggcaagtgcaagtgcgaccagggctggtacggcgacgcctgccagtaccccaccaactgcgacctgaccaagaagaagagcaaccagatgtgcaagaacagccaggacatcatctgcagcaacgccggcacctgccactgcggcagatgcaagtgcgacaacagcgacggcagcggcctggtgtacggcaagttctgcgagtgcgacgacagagagtgcatcgacgacgagaccgaggagatctgcggcggccacggcaagtgctactgcggcaactgctactgcaaggccggctggcacggcgacaagtgcgagttccagtgcgacatcaccccctgggagagcaagagaagatgcaccagccccgacggcaagatctgcagcaacagaggcacctgcgtgtgcggcgagtgcacctgccacgacgtggaccccaccggcgactggggcgacatccacggcgacacctgcgagtgcgacgagagagactgcagagccgtgtacgacagatacagcgacgacttctgcagcggccacggccagtgcaactgcggcagatgcgactgcaaggccggctggtacggcaagaagtgcgagcacccccagagctgcaccctgagcgccgaggagagcatcagaaagtgccagggcagcagcgacctgccctgcagcggcagaggcaagtgcgagtgcggcaagtgcacctgctacccccccggcgacagaagagtgtacggcaagacctgcgagtgcgacgacagaagatgcgaggacctggacggcgtggtgtgcggcggccacggcacctgcagctgcggcagatgcgtgtgcgagagaggctggttcggcaagctgtgccagcaccccagaaagtgcaacatgaccgaggagcagagcaagaacctgtgcgagagcgccgacggcatcctgtgcagcggcaagggcagctgccactgcggcaagtgcatctgcagcgccgaggagtggtacatcagcggcgagttctgcgactgcgacgacagagactgcgacaagcacgacggcctgatctgcaccggcaacggcatctgcagctgcggcaactgcgagtgctgggacggctggaacggcaacgcctgcgagatctggctgggcagcgagtacccctag

SEQ ID NO: 85393 - DNA, 1209 bp, synthetic construct
  misc_feature 1..1209: note = Description of Artificial Sequence: Synthetic coding sequence
  source 1..1209: mol_type = other DNA
atgagcggctgcgccagacccaccaccggcgcccccgtgcaggccatggtgagcgtgaccggcaagtgcaagtgcgaccagggctggtacggcgacgcctgccagtaccccaccaactgcgacctgaccaagaagaagagcaaccagatgtgcaagaacagccaggacatcatctgcagcaacgccggcacctgccactgcggcagatgcaagtgcgacaacagcgacggcagcggcctggtgtacggcaagttctgcgagtgcgacgacagagagtgcatcgacgacgagaccgaggagatctgcggcggccacggcaagtgctactgcggcaactgctactgcaaggccggctggcacggcgacaagtgcgagttccagtgcgacatcaccccctgggagagcaagagaagatgcaccagccccgacggcaagatctgcagcaacagaggcacctgcgtgtgcggcgagtgcacctgccacgacgtggaccccaccggcgactggggcgacatccacggcgacacctgcgagtgcgacgagagagactgcagagccgtgtacgacagatacagcgacgacttctgcagcggccacggccagtgcaactgcggcagatgcgactgcaaggccggctggtacggcaagaagtgcgagcacccccagagctgcaccctgagcgccgaggagagcatcagaaagtgccagggcagcagcgacctgccctgcagcggcagaggcaagtgcgagtgcggcaagtgcacctgctacccccccggcgacagaagagtgtacggcaagacctgcgagtgcgacgacagaagatgcgaggacctggacggcgtggtgtgcggcggccacggcacctgcagctgcggcagatgcgtgtgcgagagaggctggttcggcaagctgtgccagcaccccagaaagtgcaacatgaccgaggagcagagcaagaacctgtgcgagagcgccgacggcatcctgtgcagcggcaagggcagctgccactgcggcaagtgcatctgcagcgccgaggagtggtacatcagcggcgagttctgcgactgcgacgacagagactgcgacaagcacgacggcctgatctgcaccggcaacggcatctgcagctgcggcaactgcgagtgctgggacggctggaacggcaacgcctgcgagatctggctgggcagcgagtacccctag

SEQ ID NO: 85394 - DNA, 1062 bp, synthetic construct
  misc_feature 1..1062: note = Description of Artificial Sequence: Synthetic coding sequence
  source 1..1062: mol_type = other DNA
atgtgcaagaacagccaggacatcatctgcagcaacgccggcacctgccactgcggcagatgcaagtgcgacaacagcgacggcagcggcctggtgtacggcaagttctgcgagtgcgacgacagagagtgcatcgacgacgagaccgaggagatctgcggcggccacggcaagtgctactgcggcaactgctactgcaaggccggctggcacggcgacaagtgcgagttccagtgcgacatcaccccctgggagagcaagagaagatgcaccagccccgacggcaagatctgcagcaacagaggcacctgcgtgtgcggcgagtgcacctgccacgacgtggaccccaccggcgactggggcgacatccacggcgacacctgcgagtgcgacgagagagactgcagagccgtgtacgacagatacagcgacgacttctgcagcggccacggccagtgcaactgcggcagatgcgactgcaaggccggctggtacggcaagaagtgcgagcacccccagagctgcaccctgagcgccgaggagagcatcagaaagtgccagggcagcagcgacctgccctgcagcggcagaggcaagtgcgagtgcggcaagtgcacctgctacccccccggcgacagaagagtgtacggcaagacctgcgagtgcgacgacagaagatgcgaggacctggacggcgtggtgtgcggcggccacggcacctgcagctgcggcagatgcgtgtgcgagagaggctggttcggcaagctgtgccagcaccccagaaagtgcaacatgaccgaggagcagagcaagaacctgtgcgagagcgccgacggcatcctgtgcagcggcaagggcagctgccactgcggcaagtgcatctgcagcgccgaggagtggtacatcagcggcgagttctgcgactgcgacgacagagactgcgacaagcacgacggcctgatctgcaccggcaacggcatctgcagctgcggcaactgcgagtgctgggacggctggaacggcaacgcctgcgagatctggctgggcagcgagtacccctag

SEQ ID NO: 85395 - DNA, 1062 bp, synthetic construct; identical to SEQ ID NO: 85394
  misc_feature 1..1062: note = Description of Artificial Sequence: Synthetic coding sequence
  source 1..1062: mol_type = other DNA

SEQ ID NO: 85396 - DNA, 903 bp, synthetic construct
  misc_feature 1..903: note = Description of Artificial Sequence: Synthetic coding sequence
  source 1..903: mol_type = other DNA
atggccaactgcgagttcagccccgtgagcggcgacaagccctgctgcagactgagcagaagagcccagctgtgcctgggcgtgagcatcctggtgctgatcctggtggtggtgctggccgtggtggtgcccagatggagacagcagtggagcggccccggcaccaccaagagattccccgagaccgtgctggccagatgcgtgaagtacaccgagatccaccccgagatgagacacgtggactgccagagcgtgtgggacgccttcaagggcgccttcatcagcaagcacccctgcaacatcaccgaggaggactaccagcccctgatgaagctgggcacccagaccgtgccctgcaacaagatcctgctgtggagcagaatcaaggacctggcccaccagttcacccaggtgcagagagacatgttcaccctggaggacaccctgctgggctacctggccgacgacctgacctggtgcggcgagttcaacaccagcaagatcaactaccagagctgccccgactggagaaaggactgcagcaacaaccccgtgagcgtgttctggaagaccgtgagcagaagattcgccgaggccgcctgcgacgtggtgcacgtgatgctgaacggcagcagaagcaagatcttcgacaagaacagcaccttcggcagcgtggaggtgcacaacctgcagcccgagaaggtgcagaccctggaggcctgggtgatccacggcggcagagaggacagcagagacctgtgccaggaccccaccatcaaggagctggagagcatcatcagcaagagaaacatccagttcagctgcaagaacatctacagacccgacaagttcctgcagtgcgtgaagaaccccgaggacagcagctgcaccagcgagatctag

SEQ ID NO: 85397 - DNA, 942 bp, synthetic construct
  misc_feature 1..942: note = Description of Artificial Sequence: Synthetic coding sequence
  source 1..942: mol_type = other DNA
atgaaccagctgagcttcctgctgttcctgatcgccaccaccagaggctggagcaccgacgaggccaacacctacttcaaggagtggacctgcagcagcagccccagcctgcccagaagctgcaaggagatcaaggacgagtgccccagcgccttcgacggcctgtacttcctgagaaccgagaacggcgtgatctaccagaccttctgcgacatgaccagcggcggcggcggctggaccctggtggccagcgtgcacgagaacgacatgagaggcaagtgcaccgtgggcgacagatggagcagccagcagggcagcaaggccgtgtaccccgagggcgacggcaactgggccaactacaacaccttcggcagcgccgaggccgccaccagcgacgactacaagaaccccggctactacgacatccaggccaaggacctgggcatctggcacgtgcccaacaagagccccatgcagcactggagaaacagcagcctgctgagatacagaaccgacaccggcttcctgcagaccctgggccacaacctgttcggcatctaccagaagtaccccgtgaagtacggcgagggcaagtgctggaccgacaacggccccgtgatccccgtggtgtacgacttcggcgacgcccagaagaccgccagctactacagcccctacggccagagagagttcaccgccggcttcgtgcagttcagagtgttcaacaacgagagagccgccaacgccctgtgcgccggcatgagagtgaccggctgcaacaccgagcaccactgcatcggcggcggcggctacttccccgaggccagcccccagcagtgcggcgacttcagcggcttcgactggagcggctacggcacccacgtgggctacagcagcagcagagagatcaccgaggccgccgtgctgctgttctacagatag

SEQ ID NO: 85398 - DNA, 978 bp, synthetic construct
  misc_feature 1..978: note = Description of Artificial Sequence: Synthetic coding sequence
  source 1..978: mol_type = other DNA
atgctgagcatgctgagaaccatgaccagactgtgcttcctgctgttcttcagcgtggccaccagcggctgcagcgccgccgccgccagcagcctggagatgctgagcagagagttcgagacctgcgccttcagcttcagcagcctgcccagaagctgcaaggagatcaaggagagatgccacagcgccggcgacggcctgtacttcctgagaaccaagaacggcgtggtgtaccagaccttctgcgacatgaccagcggcggcggcggctggaccctggtggccagcgtgcacgagaacgacatgagaggcaagtgcaccgtgggcgacagatggagcagccagcagggcaacaaggccgactaccccgagggcgacggcaactgggccaactacaacaccttcggcagcgccgaggccgccaccagcgacgactacaagaaccccggctactacgacatccaggccaaggacctgggcatctggcacgtgcccaacaagagccccatgcagcactggagaaacagcgccctgctgagatacagaaccaacaccggcttcctgcagagactgggccacaacctgttcggcatctaccagaagtaccccgtgaagtacagaagcggcaagtgctggaacgacaacggccccgccatccccgtggtgtacgacttcggcgacgccaagaagaccgccagctactacagcccctacggccagagagagttcgtggccggcttcgtgcagttcagagtgttcaacaacgagagagccgccaacgccctgtgcgccggcatcaaggtgaccggctgcaacaccgagcaccactgcatcggcggcggcggcttcttcccccagggcaagcccagacagtgcggcgacttcagcgccttcgactgggacggctacggcacccacgtgaagagcagctgcagcagagagatcaccgaggccgccgtgctgctgttctacagatag

SEQ ID NO: 85399 - DNA, 2736 bp, synthetic construct
  misc_feature 1..2736: note = Description of Artificial Sequence: Synthetic coding sequence
  source 1..2736: mol_type = other DNA
atggacggcgccatgggccccagaggcctgctgctgtgcatgtacctggtgagcctgctgatcctgcaggccatgcccgccctgggcagcgccaccggcagaagcaagagcagcgagaagagacaggccgtggacaccgccgtggacggcgtgttcatcagaagcctgaaggtgaactgcaaggtgaccagcagattcgcccactacgtggtgaccagccaggtggtgaacaccgccaacgaggccagagaggtggccttcgacctggagatccccaagaccgccttcatcagcgacttcgccgtgaccgccgacggcaacgccttcatcggcgacatcaaggacaaggtgaccgcctggaagcagtacagaaaggccgccatcagcggcgagaacgccggcctggtgagagccagcggcagaaccatggagcagttcaccatccacctgaccgtgaacccccagagcaaggtgaccttccagctgacctacgaggaggtgctgaagagaaaccacatgcagtacgagatcgtgatcaaggtgaagcccaagcagctggtgcaccacttcgagatcgacgtggacatcttcgagccccagggcatcagcaagctggacgcccaggccagcttcctgcccaaggagctggccgcccagaccatcaagaagagcttcagcggcaagaagggccacgtgctgttcagacccaccgtgagccagcagcagagctgccccacctgcagcaccagcctgctgaacggccacttcaaggtgacctacgacgtgagcagagacaagatctgcgacctgctggtggccaacaaccacttcgcccacttcttcgccccccagaacctgaccaacatgaacaagaacgtggtgttcgtgatcgacatcagcggcagcatgagaggccagaaggtgaagcagaccaaggaggccctgctgaagatcctgggcgacatgcagcccggcgactacttcgacctggtgctgttcggcaccagagtgcagagctggaagggcagcctggtgcaggccagcgaggccaacctgcaggccgcccaggacttcgtgagaggcttcagcctggacgaggccaccaacctgaacggcggcctgctgagaggcatcgagatcctgaaccaggtgcaggagagcctgcccgagctgagcaaccacgccagcatcctgatcatgctgaccgacggcgaccccaccgagggcgtgaccgacagaagccagatcctgaagaacgtgagaaacgccatcagaggcagattccccctgtacaacctgggcttcggccacaacgtggacttcaacttcctggaggtgatgagcatggagaacaacggcagagcccagagaatctacgaggaccacgacgccacccagcagctgcagggcttctacagccaggtggccaagcccctgctggtggacgtggacctgcagtacccccaggacgccgtgctggccctgacccagaaccaccacaagcagtactacgagggcagcgagatcgtggtggccggcagaatcgccgacaacaagcagagcagcttcaaggccgacgtgcaggcccacggcgagggccaggagttcagcatcacctgcctggtggacgaggaggagatgaagaagctgctgagagagagaggccacatgctggagaaccacgtggagagactgtgggcctacctgaccatccaggagctgctggccaagagaatgaaggtggacagagaggagagagccaacctgagcagccaggccctgcagatgagcctggactacggcttcgtgacccccctgaccagcatgagcatcagaggcatggccgaccaggacggcctgaagcccaccatcgacaagcccagcgaggacagcccccccctggagatgctgggccccagaagaaccttcgtgctgagcgccctgcagcccagccccacccacagcagcagcaacacccagagactgcccgacagagtgaccggcgtggacaccgacccccacttcatcatccacgtgccccagaaggaggacaccctgtgcttcaacatcaacgaggagcccggcgtgatcctgagcctggtgcaggaccccaacaccggcttcagcgtgaacggccagctgatcggcaacaaggccagaagccccggccagcacgacggcacctacttcggcagactgggcatcgccaaccccgccaccgacttccagctggaggtgaccccccagaacatcaccctgaaccccggcttcggcggccccgtgttcagctggagagaccaggccgtgctgagacaggacggcgtggtggtgaccatcaacaagaagagaaacctggtggtgagcgtggacgacggcggcaccttcgaggtggtgctgcacagagtgtggaagggcagcagcgtgcaccaggacttcctgggcttctacgtgctggacagccacagaatgagcgccagaacccacggcctgctgggccagttcttccaccccatcggcttcgaggtgagcgacatccaccccggcagcgaccccaccaagcccgacgccaccatggtggtgagaaacagaagactgaccgtgaccagaggcctgcagaaggactacagcaaggacccctggcacggcgccgaggtgagctgctggttcatccacaacaacggcgccggcctgatcgacggcgcctacaccgactacatcgtgcccgacatcttctag

SEQ ID NO: 85400 - DNA, 1872 bp, synthetic construct
  misc_feature 1..1872: note = Description of Artificial Sequence: Synthetic coding sequence
  source 1..1872: mol_type = other DNA
atgaacaagaacgtggtgttcgtgatcgacatcagcggcagcatgagaggccagaaggtgaagcagaccaaggaggccctgctgaagatcctgggcgacatgcagcccggcgactacttcgacctggtgctgttcggcaccagagtgcagagctggaagggcagcctggtgcaggccagcgaggccaacctgcaggccgcccaggacttcgtgagaggcttcagcctggacgaggccaccaacctgaacggcggcctgctgagaggcatcgagatcctgaaccaggtgcaggagagcctgcccgagctgagcaaccacgccagcatcctgatcatgctgaccgacggcgaccccaccgagggcgtgaccgacagaagccagatcctgaagaacgtgagaaacgccatcagaggcagattccccctgtacaacctgggcttcggccacaacgtggacttcaacttcctggaggtgatgagcatggagaacaacggcagagcccagagaatctacgaggaccacgacgccacccagcagctgcagggcttctacagccaggtggccaagcccctgctggtggacgtggacctgcagtacccccaggacgccgtgctggccctgacccagaaccaccacaagcagtactacgagggcagcgagatcgtggtggccggcagaatcgccgacaacaagcagagcagcttcaaggccgacgtgcaggcccacggcgagggccaggagttcagcatcacctgcctggtggacgaggaggagatgaagaagctgctgagagagagaggccacatgctggagaaccacgtggagagactgtgggcctacctgaccatccaggagctgctggccaagagaatgaaggtggacagagaggagagagccaacctgagcagccaggccctgcagatgagcctggactacggcttcgtgacccccctgaccagcatgagcatcagaggcatggccgaccaggacggcctgaagcccaccatcgacaagcccagcgaggacagcccccccctggagatgctgggccccagaagaaccttcgtgctgagcgccctgcagcccagccccacccacagcagcagcaacacccagagactgcccgacagagtgaccggcgtggacaccgacccccacttcatcatccacgtgccccagaaggaggacaccctgtgcttcaacatcaacgaggagcccggcgtgatcctgagcctggtgcaggaccccaacaccggcttcagcgtgaacggccagctgatcggcaacaaggccagaagccccggccagcacgacggcacctacttcggcagactgggcatcgccaaccccgccaccgacttccagctggaggtgaccccccagaacatcaccctgaaccccggcttcggcggccccgtgttcagctggagagaccaggccgtgctgagacaggacggcgtggtggtgaccatcaacaagaagagaaacctggtggtgagcgtggacgacggcggcaccttcgaggtggtgctgcacagagtgtggaagggcagcagcgtgcaccaggacttcctgggcttctacgtgctggacagccacagaatgagcgccagaacccacggcctgctgggccagttcttccaccccatcggcttcgaggtgagcgacatccaccccggcagcgaccccaccaagcccgacgccaccatggtggtgagaaacagaagactgaccgtgaccagaggcctgcagaaggactacagcaaggacccctggcacggcgccgaggtgagctgctggttcatccacaacaacggcgccggcctgatcgacggcgcctacaccgactacatcgtgcccgacatcttctag

SEQ ID NO: 85401 - DNA, 2310 bp, synthetic construct
  misc_feature 1..2310: note = Description of Artificial Sequence: Synthetic coding sequence
  source 1..2310: mol_type = other DNA
atggagcagttcaccatccacctgaccgtgaacccccagagcaaggtgaccttccagctgacctacgaggaggtgctgaagagaaaccacatgcagtacgagatcgtgatcaaggtgaagcccaagcagctggtgcaccacttcgagatcgacgtggacatcttcgagccccagggcatcagcaagctggacgcccaggccagcttcctgcccaaggagctggccgcccagaccatcaagaagagcttcagcggcaagaagggccacgtgctgttcagacccaccgtgagccagcagcagagctgccccacctgcagcaccagcctgctgaacggccacttcaaggtgacctacgacgtgagcagagacaagatctgcgacctgctggtggccaacaaccacttcgcccacttcttcgccccccagaacctgaccaacatgaacaagaacgtggtgttcgtgatcgacatcagcggcagcatgagaggccagaaggtgaagcagaccaaggaggccctgctgaagatcctgggcgacatgcagcccggcgactacttcgacctggtgctgttcggcaccagagtgcagagctggaagggcagcctggtgcaggccagcgaggccaacctgcaggccgcccaggacttcgtgagaggcttcagcctggacgaggccaccaacctgaacggcggcctgctgagaggcatcgagatcctgaaccaggtgcaggagagcctgcccgagctgagcaaccacgccagcatcctgatcatgctgaccgacggcgaccccaccgagggcgtgaccgacagaagccagatcctgaagaacgtgagaaacgccatcagaggcagattccccctgtacaacctgggcttcggccacaacgtggacttcaacttcctggaggtgatgagcatggagaacaacggcagagcccagagaatctacgaggaccacgacgccacccagcagctgcagggcttctacagccaggtggccaagcccctgctggtggacgtggacctgcagtacccccaggacgccgtgctggccctgacccagaaccaccacaagcagtactacgagggcagcgagatcgtggtggccggcagaatcgccgacaacaagcagagcagcttcaaggccgacgtgcaggcccacggcgagggccaggagttcagcatcacctgcctggtggacgaggaggagatgaagaagctgctgagagagagaggccacatgctggagaaccacgtggagagactgtgggcctacctgaccatccaggagctgctggccaagagaatgaaggtggacagagaggagagagccaacctgagcagccaggccctgcagatgagcctggactacggcttcgtgacccccctgaccagcatgagcatcagaggcatggccgaccaggacggcctgaagcccaccatcgacaagcccagcgaggacagcccccccctggagatgctgggccccagaagaaccttcgtgctgagcgccctgcagcccagccccacccacagcagcagcaacacccagagactgcccgacagagtgaccggcgtggacaccgacccccacttcatcatccacgtgccccagaaggaggacaccctgtgcttcaacatcaacgaggagcccggcgtgatcctgagcctggtgcaggaccccaacaccggcttcagcgtgaacggccagctgatcggcaacaaggccagaagccccggccagcacgacggcacctacttcggcagactgggcatcgccaaccccgccaccgacttccagctggaggtgaccccccagaacatcaccctgaaccccggcttcggcggccccgtgttcagctggagagaccaggccgtgctgagacaggacggcgtggtggtgaccatcaacaagaagagaaacctggtggtgagcgtggacgacggcggcaccttcgaggtggtgctgcacagagtgtggaagggcagcagcgtgcaccaggacttcctgggcttctacgtgctggacagccacagaatgagcgccagaacccacggcctgctgggccagttcttccaccccatcggcttcgaggtgagcgacatccaccccggcagcgaccccaccaagcccgacgccaccatggtggtgagaaacagaagactgaccgtgaccagaggcctgcagaaggactacagcaaggacccctggcacggcgccgaggtgagctgctggttcatccacaacaacggcgccggcctgatcgacggcgcctacaccgactacatcgtgcccgacatcttctag

SEQ ID NO: 85402 - DNA, 1938 bp, synthetic construct
  misc_feature 1..1938: note = Description of Artificial Sequence: Synthetic coding sequence
  source 1..1938: mol_type = other DNA
atggacggcgccatgggccccagaggcctgctgctgtgcatgtacctggtgagcctgctgatcctgcaggccatgcccgccctgggcagcgccaccggcagaagcaagagcagcgagaagagacaggccgtggacaccgccgtggacggcgtgttcatcagaagcctgaaggtgaactgcaaggtgaccagcagattcgcccactacgtggtgaccagccaggtggtgaacaccgccaacgaggccagagaggtggccttcgacctggagatccccaagaccgccttcatcagcgacttcgccgtgaccgccgacggcaacgccttcatcggcgacatcaaggacaaggtgaccgcctggaagcagtacagaaaggccgccatcagcggcgagaacgccggcctggtgagagccagcggcagaaccatggagcagttcaccatccacctgaccgtgaacccccagagcaaggtgaccttccagctgacctacgaggaggtgctgaagagaaaccacatgcagtacgagatcgtgatcaaggtgaagcccaagcagctggtgcaccacttcgagatcgacgtggacatcttcgagccccagggcatcagcaagctggacgcccaggccagcttcctgcccaaggagctggccgcccagaccatcaagaagagcttcagcggcaagaagggccacgtgctgttcagacccaccgtgagccagcagcagagctgccccacctgcagcaccagcctgctgaacggccacttcaaggtgacctacgacgtgagcagagacaagatctgcgacctgctggtggccaacaaccacttcgcccacttcttcgccccccagaacctgaccaacatgaacaagaacgtggtgttcgtgatcgacatcagcggcagcatgagaggccagaaggtgaagcagaccaaggaggccctgctgaagatcctgggcgacatgcagcccggcgactacttcgacctggtgctgttcggcaccagagtgcagagctggaagggcagcctggtgcaggccagcgaggccaacctgcaggccgcccaggacttcgtgagaggcttcagcctggacgaggccaccaacctgaacggcggcctgctgagaggcatcgagatcctgaaccaggtgcaggagagcctgcccgagctgagcaaccacgccagcatcctgatcatgctgaccgacggcgaccccaccgagggcgtgaccgacagaagccagatcctgaagaacgtgagaaacgccatcagaggcagattccccctgtacaacctgggcttcggccacaacgtggacttcaacttcctggaggtgatgagcatggagaacaacggcagagcccagagaatctacgaggaccacgacgccacccagcagctgcagggcttctacagccaggtggccaagcccctgctggtggacgtggacctgcagtacccccaggacgccgtgctggccctgacccagaaccaccacaagcagtactacgagggcagcgagatcgtggtggccggcagaatcgccgacaacaagcagagcagcttcaaggccgacgtgcaggcccacggcgagggccaggagttcagcatcacctgcctggtggacgaggaggagatgaagaagctgctgagagagagaggccacatgctggagaaccacgtggagagactgtgggcctacctgaccatccaggagctgctggccaagagaatgaaggtggacagagaggagagagccaacctgagcagccaggccctgcagatgagcctggactacggcttcgtgacccccctgaccagcatgagcatcagaggcatggccgaccaggacggcctgaagcccaccatcgacaagcccagcctgcaccaccccagagcccccgagagaggccaccccgtgctgcagcaccagtag

SEQ ID NO: 85403 - DNA, 2841 bp, synthetic construct
  misc_feature 1..2841: note = Description of Artificial Sequence: Synthetic coding sequence
  source 1..2841: mol_type = other DNA
atgaagagactgacctgcttcttcatctgcttcttcctgagcgaggtgagcggcttcgagatccccatcaacggcctgagcgagttcgtggactacgaggacctggtggagctggcccccggcaagttccagctggtggccgagaacagaagataccagagaagcctgcccggcgagagcgaggagatgatggaggaggtggaccaggtgaccctgtacagctacaaggtgcagagcaccatcaccagcagaatggccaccaccatgatccagagcaaggtggtgaacaacagcccccagccccagaacgtggtgttcgacgtgcagatccccaagggcgccttcatcagcaacttcagcatgaccgtggacggcaagaccttcagaagcagcatcaaggagaagaccgtgggcagagccctgtacgcccaggccagagccaagggcaagaccgccggcctggtgagaagcagcgccctggacatggagaacttcagaaccgaggtgaacgtgctgcccggcgccaaggtgcagttcgagctgcactaccaggaggtgaagtggagaaagctgggcagctacgagcacagaatctacctgcagcccggcagactggccaagcacctggaggtggacgtgtgggtgatcgagccccagggcctgagattcctgcacgtgcccgacaccttcgagggccacttcgacggcgtgcccgtgatcagcaagggccagcagaaggcccacgtgagcttcaagcccaccgtggcccagcagagaatctgccccaactgcagagagaccgccgtggacggcgagctggtggtgctgtacgacgtgaagagagaggagaaggccggcgagctggaggtgttcaacggctacttcgtgcacttcttcgcccccgacaacctggaccccatccccaagaacatcctgttcgtgatcgacgtgagcggcagcatgtggggcgtgaagatgaagcagaccgtggaggccatgaagaccatcctggacgacctgagagccgaggaccacttcagcgtgatcgacttcaaccagaacatcagaacctggagaaacgacctgatcagcgccaccaagacccaggtggccgacgccaagagatacatcgagaagatccagcccagcggcggcaccaacatcaacgaggccctgctgagagccatcttcatcctgaacgaggccaacaacctgggcctgctggaccccaacagcgtgagcctgatcatcctggtgagcgacggcgaccccaccgtgggcgagctgaagctgagcaagatccagaagaacgtgaaggagaacatccaggacaacatcagcctgttcagcctgggcatgggcttcgacgtggactacgacttcctgaagagactgagcaacgagaaccacggcatcgcccagagaatctacggcaaccaggacaccagcagccagctgaagaagttctacaaccaggtgagcacccccctgctgagaaacgtgcagttcaactacccccacaccagcgtgaccgacgtgacccagaacaacttccacaactacttcggcggcagcgagatcgtggtggccggcaagttcgaccccgccaagctggaccagatcgagagcgtgatcaccgccaccagcgccaacacccagctggtgctggagaccctggcccagatggacgacctgcaggacttcctgagcaaggacaagcacgccgaccccgacttcaccagaaagctgtgggcctacctgaccatcaaccagctgctggccgagagaagcctggcccccaccgccgccgccaagagaagaatcaccagaagcatcctgcagatgagcctggaccaccacatcgtgacccccctgaccagcctggtgatcgagaacgaggccggcgacgagagaatgctggccgacgcccccccccaggaccccagctgctgcagcggcgccctgtactacggcagcaaggtggtgcccgacagcacccccagctgggccaaccccagccccacccccgtgatcagcatgctggcccagggcagccaggtgctggagagcaccccccccccccacgtgatgagagtggagaacgacccccacttcatcatctacctgcccaagagccagaagaacatctgcttcaacatcgacagcgagcccggcaagatcctgaacctggtgagcgaccccgagagcggcatcgtggtgaacggccagctggtgggcgccaagaagcccaacaacggcaagctgagcacctacttcggcaagctgggcttctacttccagagcgaggacatcaagatcgagatcagcaccgagaccatcaccctgagccacggcagcagcaccttcagcctgagctggagcgacaccgcccaggtgaccaaccagagagtgcagatcagcgtgaagaaggagaaggtggtgaccatcaccctggacaaggagatgagcttcagcgtgctgctgcacagagtgtggaagaagcaccccgtgaacgtggacttcctgggcatctacatcccccccaccaacaagttcagccccaaggcccacggcctgatcggccagttcatgcaggagcccaagatccacatcttcaacgagagacccggcaaggaccccgagaagcccgaggccagcatggaggtgaagggccagaagctgatcatcaccagaggcctgcagaaggactacagaaccgacctggtgttcggcaccgacgtgacctgctggttcgtgcacaacagcggcaagggcttcatcgacggccactacaaggactacttcgtgccccagctgtacagcttcctgaagagaccctag

SEQ ID NO: 85404 - DNA, 2658 bp, synthetic construct
  misc_feature 1..2658: note = Description of Artificial Sequence: Synthetic coding sequence
  source 1..2658: mol_type = other DNA
atggtggccctgagccacctgggcagcgccctgcagctgggcagcctgttccccagaagccccttcagactgctgggcaagagaagcctgcccgagggcgtggccaacggcatcgaggtgtacagcaccaagatcaacagcaaggtgaccagcagattcgcccacaacgtggtgaccatgagagccgtgaacagagccgacaccgccaaggaggtgagcttcgacgtggagctgcccaagaccgccttcatcaccaacttcaccctgaccatcgacggcgtgacctaccccggcaacgtgaaggagaaggaggtggccaagaagcagtacgagaaggccgtgagccagggcaagaccgccggcctggtgaaggccagcggcagaaagctggagaagttcaccgtgagcgtgaacgtggccgccggcagcaaggtgaccttcgagctgacctacgaggagctgctgaagagacacaagggcaagtacgagatgtacctgaaggtgcagcccaagcagctggtgaagcacttcgagatcgaggtggacatcttcgagccccagggcatcagcatgctggacgccgaggccagcttcatcaccaacgacctgctgggcagcgccctgaccaagagcttcagcggcaagaagggccacgtgagcttcaagcccagcctggaccagcagagaagctgccccacctgcaccgacagcctgctgaacggcgacttcaccatcacctacgacgtgaacagagagagccccggcaacgtgcagatcgtgaacggctacttcgtgcacttcttcgccccccagggcctgcccgtggtgcccaagaacgtggccttcgtgatcgacatcagcggcagcatggccggcagaaagctggagcagaccaaggaggccctgctgagaatcctggaggacatgcaggaggaggactacctgaacttcatcctgttcagcggcgacgtgagcacctggaaggagcacctggtgcaggccacccccgagaacctgcaggaggccagaaccttcgtgaagagcatggaggacaagggcatgaccaacatcaacgacggcctgctgagaggcatcagcatgctgaacaaggccagagaggagcacagaatccccgagagaagcaccagcatcgtgatcatgctgaccgacggcgacgccaacgtgggcgagagcagacccgagaagatccaggagaacgtgagaaacgccatcggcggcaagttccccctgtacaacctgggcttcggcaacaacctgaactacaacttcctggagaacatggccctggagaaccacggcttcgccagaagaatctacgaggacagcgacgccgacctgcagctgcagggcttctacgaggaggtggccaaccccctgctgaccggcgtggagatggagtaccccgagaacgccatcctggacctgacccagaacacctaccagcacttctacgacggcagcgagatcgtggtggccggcagactggtggacgaggacatgaacagcttcaaggccgacgtgaagggccacggcgccaccaacgacctgaccttcaccgaggaggtggacatgaaggagatggagaaggccctgcaggagagagactacatcttcggcaactacatcgagagactgtgggcctacctgaccatcgagcagctgctggagaagagaaagaacgcccacggcgaggagaaggagaacctgaccgccagagccctggacctgagcctgaagtaccacttcgtgacccccctgaccagcatggtggtgaccaagcccgaggacaacgaggacgagagagccatcgccgacaagcccggcgagggcttcagcgccacccccgtgagccccgccatgagctacctgaccagctaccagcccccccagaacccctactactacgtggacggcgacccccacttcatcatccagatccccgagaaggacgacgccctgtgcttcaacatcgacgaggcccccggcaccgtgctgagactgatccaggacgccgtgaccggcctgaccgtgaacggccagatcaccggcgacaagagaggcagccccgacagcaagaccagaaagacctacttcggcaagctgggcatcgccaacgcccagatggacttccaggtggaggtgaccaccgagaagatcaccctgtggaacagagccgtgcccagcaccttcagctggctggacaccgtgaccgtgacccaggacggcctgagcatgatgatcaacagaaagaacatggtggtgagcttcggcgacggcgtgaccttcgtggtggtgctgcaccaggtgtggaagaagcaccccgtgcacagagacttcctgggcttctacgtggtggacagccacagaatgagcgcccagacccacggcctgctgggccagttcttccagcccttcgacttcaaggtgagcgacatcagacccggcagcgaccccaccaagcccgacgccaccctggtggtgaagaaccaccagctgatcgtgaccagaggcagccagaaggactacagaaaggacgccagcatcggcaccaaggtggtgtgctggttcgtgcacaacaacggcgagggcctgatcgacggcgtgcacaccgactacatcgtgcccaacctgttctag

SEQ ID NO: 85405 - DNA, 2013 bp, synthetic construct
  misc_feature 1..2013: note = Description of Artificial Sequence: Synthetic coding sequence
  source 1..2013: mol_type = other DNA
atggccttcgcctggtggccctgcctgatcctggccctgctgagcagcctggccgccagcggcttccccagaagccccttcagactgctgggcaagagaagcctgcccgagggcgtggccaacggcatcgaggtgtacagcaccaagatcaacagcaaggtgaccagcagattcgcccacaacgtggtgaccatgagagccgtgaacagagccgacaccgccaaggaggtgagcttcgacgtggagctgcccaagaccgccttcatcaccaacttcaccctgaccatcgacggcgtgacctaccccggcaacgtgaaggagaaggaggtggccaagaagcagtacgagaaggccgtgagccagggcaagaccgccggcctggtgaaggccagcggcagaaagctggagaagttcaccgtgagcgtgaacgtggccgccggcagcaaggtgaccttcgagctgacctacgaggagctgctgaagagacacaagggcaagtacgagatgtacctgaaggtgcagcccaagcagctggtgaagcacttcgagatcgaggtggacatcttcgagccccagggcatcagcatgctggacgccgaggccagcttcatcaccaacgacctgctgggcagcgccctgaccaagagcttcagcggcaagaagggccacgtgagcttcaagcccagcctggaccagcagagaagctgccccacctgcaccgacagcctgctgaacggcgacttcaccatcacctacgacgtgaacagagagagccccggcaacgtgcagatcgtgaacggctacttcgtgcacttcttcgccccccagggcctgcccgtggtgcccaagaacgtggccttcgtgatcgacatcagcggcagcatggccggcagaaagctggagcagaccaaggaggccctgctgagaatcctggaggacatgcaggaggaggactacctgaacttcatcctgttcagcggcgacgtgagcacctggaaggagcacctggtgcaggccacccccgagaacctgcaggaggccagaaccttcgtgaagagcatggaggacaagggcatgaccaacatcaacgacggcctgctgagaggcatcagcatgctgaacaaggccagagaggagcacagaatccccgagagaagcaccagcatcgtgatcatgctgaccgacggcgacgccaacgtgggcgagagcagacccgagaagatccaggagaacgtgagaaacgccatcggcggcaagttccccctgtacaacctgggcttcggcaacaacctgaactacaacttcctggagaacatggccctggagaaccacggcttcgccagaagaatctacgaggacagcgacgccgacctgcagctgcagggcttctacgaggaggtggccaaccccctgctgaccggcgtggagatggagtaccccgagaacgccatcctggacctgacccagaacacctaccagcacttctacgacggcagcgagatcgtggtggccggcagactggtggacgaggacatgaacagcttcaaggccgacgtgaagggccacggcgccaccaacgacctgaccttcaccgaggaggtggacatgaaggagatggagaaggccctgcaggagagagactacatcttcggcaactacatcgagagactgtgggcctacctgaccatcgagcagctgctggagaagagaaagaacgcccacggcgaggagaaggagaacctgaccgccagagccctggacctgagcctgaagtaccacttcgtgacccccctgaccagcatggtggtgaccaagcccgaggacaacgaggacgagagagccatcgccgacaagcccggcgagggcggcgacagccacaccggcgagcccagacacgtgctgcccgaccagctgcccgccagcagcaagcccctgctgctgtgcggcagaggcagccccctgcaccaccccaacagcggcgagagaagatgccccctgctgcagcacagatag

SEQ ID NO: 85406 - DNA, 2673 bp, synthetic construct
  misc_feature 1..2673: note = Description of Artificial Sequence: Synthetic coding sequence
  source 1..2673: mol_type = other DNA
atggccttcgcctggtggccctgcctgatcctggccctgctgagcagcctggccgccagcggcttccccagaagccccttcagactgctgggcaagagaagcctgcccgagggcgtggccaacggcatcgaggtgtacagcaccaagatcaacagcaaggtgaccagcagattcgcccacaacgtggtgaccatgagagccgtgaacagagccgacaccgccaaggaggtgagcttcgacgtggagctgcccaagaccgccttcatcaccaacttcaccctgaccatcgacggcgtgacctaccccggcaacgtgaaggagaaggaggtggccaagaagcagtacgagaaggccgtgagccagggcaagaccgccggcctggtgaaggccagcggcagaaagctggagaagttcaccgtgagcgtgaacgtggccgccggcagcaaggtgaccttcgagctgacctacgaggagctgctgaagagacacaagggcaagtacgagatgtacctgaaggtgcagcccaagcagctggtgaagcacttcgagatcgaggtggacatcttcgagccccagggcatcagcatgctggacgccgaggccagcttcatcaccaacgacctgctgggcagcgccctgaccaagagcttcagcggcaagaagggccacgtgagcttcaagcccagcctggaccagcagagaagctgccccacctgcaccgacagcctgctgaacggcgacttcaccatcacctacgacgtgaacagagagagccccggcaacgtgcagatcgtgaacggctacttcgtgcacttcttcgccccccagggcctgcccgtggtgcccaagaacgtggccttcgtgatcgacatcagcggcagcatggccggcagaaagctggagcagaccaaggaggccctgctgagaatcctggaggacatgcaggaggaggactacctgaacttcatcctgttcagcggcgacgtgagcacctggaaggagcacctggtgcaggccacccccgagaacctgcaggaggccagaaccttcgtgaagagcatggaggacaagggcatgaccaacatcaacgacggcctgctgagaggcatcagcatgctgaacaaggccagagaggagcacagaatccccgagagaagcaccagcatcgtgatcatgctgaccgacggcgacgccaacgtgggcgagagcagacccgagaagatccaggagaacgtgagaaacgccatcggcggcaagttccccctgtacaacctgggcttcggcaacaacctgaactacaacttcctggagaacatggccctggagaaccacggcttcgccagaagaatctacgaggacagcgacgccgacctgcagctgcagggcttctacgaggaggtggccaaccccctgctgaccggcgtggagatggagtaccccgagaacgccatcctggacctgacccagaacacctaccagcacttctacgacggcagcgagatcgtggtggccggcagactggtggacgaggacatgaacagcttcaaggccgacgtgaagggccacggcgccaccaacgacctgaccttcaccgaggaggtggacatgaaggagatggagaaggccctgcaggagagagactacatcttcggcaactacatcgagagactgtgggcctacctgaccatcgagcagctgctggagaagagaaagaacgcccacggcgaggagaaggagaacctgaccgccagagccctggacctgagcctgaagtaccacttcgtgacccccctgaccagcatggtggtgaccaagcccgaggacaacgaggacgagagagccatcgccgacaagcccggcgaggacgccgaggccacccccgtgagccccgccatgagctacctgaccagctaccagcccccccagaacccctactactacgtggacggcgacccccacttcatcatccagatccccgagaaggacgacgccctgtgcttcaacatcgacgaggcccccggcaccgtgctgagactgatccaggacgccgtgaccggcctgaccgtgaacggccagatcaccggcgacaagagaggcagccccgacagcaagaccagaaagacctacttcggcaagctgggcatcgccaacgcccagatggacttccaggtggaggtgaccaccgagaagatcaccctgtggaacagagccgtgcccagcaccttcagctggctggacaccgtgaccgtgacccaggacggcctgagcatgatgatcaacagaaagaacatggtggtgagcttcggcgacggcgtgaccttcgtggtggtgctgcaccaggtgtggaagaagcaccccgtgcacagagacttcctgggcttctacgtggtggacagccacagaatgagcgcccagacccacggcctgctgggccagttcttccagcccttcgacttcaaggtgagcgacatcagacccggcagcgaccccaccaagcccgacgccaccctggtggtgaagaaccaccagctgatcgtgaccagaggcagccagaaggactacagaaaggacgccagcatcggcaccaaggtggtgtgctggttcgtgcacaacaacggcgagggcctgatcgacggcgtgcacaccgactacatcgtgcccaacctgttctag

SEQ ID NO: 85407 - DNA, 1977 bp, synthetic construct
  misc_feature 1..1977: note = Description of Artificial Sequence: Synthetic coding sequence
  source 1..1977: mol_type = other DNA
atggccttcgcctggtggccctgcctgatcctggccctgctgagcagcctggccgccagcggcttccccagaagccccttcagactgctgggcaagagaagcctgcccgagggcgtggccaacggcatcgaggtgtacagcaccaagatcaacagcaaggtgaccagcagattcgcccacaacgtggtgaccatgagagccgtgaacagagccgacaccgccaaggaggtgagcttcgacgtggagctgcccaagaccgccttcatcaccaacttcaccctgaccatcgacggcgtgacctaccccggcaacgtgaaggagaaggaggtggccaagaagcagtacgagaaggccgtgagccagggcaagaccgccggcctggtgaaggccagcggcagaaagctggagaagttcaccgtgagcgtgaacgtggccgccggcagcaagagacacaagggcaagtacgagatgtacctgaaggtgcagcccaagcagctggtgaagcacttcgagatcgaggtggacatcttcgagccccagggcatcagcatgctggacgccgaggccagcttcatcaccaacgacctgctgggcagcgccctgaccaagagcttcagcggcaagaagggccacgtgagcttcaagcccagcctggaccagcagagaagctgccccacctgcaccgacagcctgctgaacggcgacttcaccatcacctacgacgtgaacagagagagccccggcaacgtgcagatcgtgaacggctacttcgtgcacttcttcgccccccagggcctgcccgtggtgcccaagaacgtggccttcgtgatcgacatcagcggcagcatggccggcagaaagctggagcagaccaaggaggccctgctgagaatcctggaggacatgcaggaggaggactacctgaacttcatcctgttcagcggcgacgtgagcacctggaaggagcacctggtgcaggccacccccgagaacctgcaggaggccagaaccttcgtgaagagcatggaggacaagggcatgaccaacatcaacgacggcctgctgagaggcatcagcatgctgaacaaggccagagaggagcacagaatccccgagagaagcaccagcatcgtgatcatgctgaccgacggcgacgccaacgtgggcgagagcagacccgagaagatccaggagaacgtgagaaacgccatcggcggcaagttccccctgtacaacctgggcttcggcaacaacctgaactacaacttcctggagaacatggccctggagaaccacggcttcgccagaagaatctacgaggacagcgacgccgacctgcagctgcagggcttctacgaggaggtggccaaccccctgctgaccggcgtggagatggagtaccccgagaacgccatcctggacctgacccagaacacctaccagcacttctacgacggcagcgagatcgtggtggccggcagactggtggacgaggacatgaacagcttcaaggccgacgtgaagggccacggcgccaccaacgacctgaccttcaccgaggaggtggacatgaaggagatggagaaggccctgcaggagagagactacatcttcggcaactacatcgagagactgtgggcctacctgaccatcgagcagctgctggagaagagaaagaacgcccacggcgaggagaaggagaacctgaccgccagagccctggacctgagcctgaagtaccacttcgtgacccccctgaccagcatggtggtgaccaagcccgaggacaacgaggacgagagagccatcgccgacaagcccggcgagggcggcgacagccacaccggcgagcccagacacgtgctgcccgaccagctgcccgccagcagcaagcccctgctgctgtgcggcagaggcagccccctgcaccaccccaacagcggcgagagaagatgccccctgctgcagcacagatag

SEQ ID NO: 85408 - DNA, 2793 bp, synthetic construct
  misc_feature 1..2793: note = Description of Artificial Sequence: Synthetic coding sequence
  source 1..2793: mol_type = other DNA
atgaagccccccagacccgtgagaacctgcagcaaggtgctggtgctgctgagcctgctggccatccaccagaccaccaccgccgagaagaacggcatcgacatctacagcctgaccgtggacagcagagtgagcagcagattcgcccacaccgtggtgaccagcagagtggtgaacagagccaacaccgtgcaggaggccaccttccagatggagctgcccaagaaggccttcatcaccaacttcagcatgatcatcgacggcatgacctaccccggcatcatcaaggagaaggccgaggcccaggcccagtacagcgccgccgtggccaagggcaagagcgccggcctggtgaaggccaccggcagaaacatggagcagttccaggtgagcgtgagcgtggcccccaacgccaagatcaccttcgagctggtgtacgaggagctgctgaagagaagactgggcgtgtacgagctgctgctgaaggtgagaccccagcagctggtgaagcacctgcagatggacatccacatcttcgagccccagggcatcagcttcctggagaccgagagcaccttcatgaccaaccagctggtggacgccctgaccacctggcagaacaagaccaaggcccacatcagattcaagcccaccctgagccagcagcagaagagccccgagcagcaggagaccgtgctggacggcaacctgatcatcagatacgacgtggacagagccatcagcggcggcagcatccagatcgagaacggctacttcgtgcactacttcgcccccgagggcctgaccaccatgcccaagaacgtggtgttcgtgatcgacaagagcggcagcatgagcggcagaaagatccagcagaccagagaggccctgatcaagatcctggacgacctgagccccagagaccagttcaacctgatcgtgttcagcaccgaggccacccagtggagacccagcctggtgcccgccagcgccgagaacgtgaacaaggccagaagcttcgccgccggcatccaggccctgggcggcaccaacatcaacgacgccatgctgatggccgtgcagctgctggacagcagcaaccaggaggagagactgcccgagggcagcgtgagcctgatcatcctgctgaccgacggcgaccccaccgtgggcgagaccaaccccagaagcatccagaacaacgtgagagaggccgtgagcggcagatacagcctgttctgcctgggcttcggcttcgacgtgagctacgccttcctggagaagctggccctggacaacggcggcctggccagaagaatccacgaggacagcgacagcgccctgcagctgcaggacttctaccaggaggtggccaaccccctgctgaccgccgtgaccttcgagtaccccagcaacgccgtggaggaggtgacccagaacaacttcagactgctgttcaagggcagcgagatggtggtggccggcaagctgcaggacagaggccccgacgtgctgaccgccaccgtgagcggcaagctgcccacccagaacatcaccttccagaccgagagcagcgtggccgagcaggaggccgagttccagagccccaagtacatcttccacaacttcatggagagactgtgggcctacctgaccatccagcagctgctggagcagaccgtgagcgccagcgacgccgaccagcaggccctgagaaaccaggccctgaacctgagcctggcctacagcttcgtgacccccctgaccagcatggtggtgaccaagcccgacgaccaggagcagagccaggtggccgagaagcccatggagggcgagagcagaaacagaaacgtgcacagcggcagcaccttcttcaagtactacctgcagggcgccaagatccccaagcccgaggccagcttcagccccagaagaggctggaacagacaggccggcgccgccggcagcagaatgaacttcagacccggcgtgctgagcagcagacagctgggcctgcccggcccccccgacgtgcccgaccacgccgcctaccaccccttcagaagactggccatcctgcccgccagcgccccccccgccaccagcaaccccgaccccgccgtgagcagagtgatgaacatgaagatcgaggagaccaccatgaccacccagacccccgcccccatccaggcccccagcgccatcctgcccctgcccggccagagcgtggagagactgtgcgtggaccccagacacagacagggccccgtgaacctgctgagcgaccccgagcagggcgtggaggtgaccggccagtacgagagagagaaggccggcttcagctggatcgaggtgaccttcaagaaccccctggtgtgggtgcacgccagccccgagcacgtggtggtgaccagaaacagaagaagcagcgcctacaagtggaaggagaccctgttcagcgtgatgcccggcctgaagatgaccatggacaagaccggcctgctgctgctgagcgaccccgacaaggtgaccatcggcctgctgttctgggacggcagaggcgagggcctgagactgctgctgagagacaccgacagattcagcagccacgtgggcggcaccctgggccagttctaccaggaggtgctgtggggcagccccgccgccagcgacgacggcagaagaaccctgagagtgcagggcaacgaccacagcgccaccagagagagaagactggactaccaggagggcccccccggcgtggagatcagctgctggagcgtggagctgtag

SEQ ID NO: 85409 - DNA, 2745 bp, synthetic construct
  misc_feature 1..2745: note = Description of Artificial Sequence: Synthetic coding sequence
  source 1..2745: mol_type = other DNA
atgaagccccccagacccgtgagaacctgcagcaaggtgctggtgctgctgagcctgctggccatccaccagaccaccaccgccgagaagaacggcatcgacatctacagcctgaccgtggacagcagagtgagcagcagattcgcccacaccgtggtgaccagcagagtggtgaacagagccaacaccgtgcaggaggccaccttccagatggagctgcccaagaaggccttcatcaccaacttcagcatgatcatcgacggcatgacctaccccggcatcatcaaggagaaggccgaggcccaggcccagtacagcgccgccgtggccaagggcaagagcgccggcctggtgaaggccaccggcagaaacatggagcagttccaggtgagcgtgagcgtggcccccaacgccaagatcaccttcgagctggtgtacgaggagctgctgaagagaagactgggcgtgtacgagctgctgctgaaggtgagaccccagcagctggtgaagcacctgcagatggacatccacatcttcgagccccagggcatcagcttcctggagaccgagagcaccttcatgaccaaccagctggtggacgccctgaccacctggcagaacaagaccaaggcccacatcagattcaagcccaccctgagccagcagcagaagagccccgagcagcaggagaccgtgctggacggcaacctgatcatcagatacgacgtggacagagccatcagcggcggcagcatccagatcgagaacggctacttcgtgcactacttcgcccccgagggcctgaccaccatgcccaagaacgtggtgttcgtgatcgacaagagcggcagcatgagcggcagaaagatccagcagaccagagaggccctgatcaagatcctggacgacctgagccccagagaccagttcaacctgatcgtgttcagcaccgaggccacccagtggagacccagcctggtgcccgccagcgccgagaacgtgaacaaggccagaagcttcgccgccggcatccaggccctgggcggcaccaacatcaacgacgccatgctgatggccgtgcagctgctggacagcagcaaccaggaggagagactgcccgagggcagcgtgagcctgatcatcctgctgaccgacggcgaccccaccgtgggcgagaccaaccccagaagcatccagaacaacgtgagagaggccgtgagcggcagatacagcctgttctgcctgggcttcggcttcgacgtgagctacgccttcctggagaagctggccctggacaacggcggcctggccagaagaatccacgaggacagcgacagcgccctgcagctgcaggacttctaccaggaggtggccaaccccctgctgaccgccgtgaccttcgagtaccccagcaacgccgtggaggaggtgacccagaacaacttcagactgctgttcaagggcagcgagatggtggtggccggcaagctgcaggacagaggccccgacgtgctgaccgccaccgtgagcggcaagctgcccacccagaacatcaccttccagaccgagagcagcgtggccgagcaggaggccgagttccagagccccaagtacatcttccacaacttcatggagagactgtgggcctacctgaccatccagcagctgctggagcagaccgtgagcgccagcgacgccgaccagcaggccctgagaaaccaggccctgaacctgagcctggcctacagcttcgtgacccccctgaccagcatggtggtgaccaagcccgacgaccaggagcagagccaggtggccgagaagcccatggagggcgagagcagaaacagaaacgtgcacagcgccggcgccgccggcagcagaatgaacttcagacccggcgtgctgagcagcagacagctgggcctgcccggcccccccgacgtgcccgaccacgccgcctaccaccccttcagaagactggccatcctgcccgccagcgccccccccgccaccagcaaccccgaccccgccgtgagcagagtgatgaacatgaagatcgaggagaccaccatgaccacccagacccccgcctgccccagctgcagcagaagcagagcccccgccgtgcccgcccccatccaggcccccagcgccatcctgcccctgcccggccagagcgtggagagactgtgcgtggaccccagacacagacagggccccgtgaacctgctgagcgaccccgagcagggcgtggaggtgaccggccagtacgagagagagaaggccggcttcagctggatcgaggtgaccttcaagaaccccctggtgtgggtgcacgccagccccgagcacgtggtggtgaccagaaacagaagaagcagcgcctacaagtggaaggagaccctgttcagcgtgatgcccggcctgaagatgaccatggacaagaccggcctgctgctgctgagcgaccccgacaaggtgaccatcggcctgctgttctgggacggcagaggcgagggcctgagactgctgctgagagacaccgacagattcagcagccacgtgggcggcaccctgggccagttctaccaggaggtgctgtggggcagccccgccgccagcgacgacggcagaagaaccctgagagtgcagggcaacgaccacagcgccaccagagagagaagactggactaccaggagggcccccccggcgtggagatcagctgctggagcgtggagctgtag

SEQ ID NO: 85410 - DNA, 2703 bp, synthetic construct
  misc_feature 1..2703: note = Description of Artificial Sequence: Synthetic coding sequence
  source 1..2703: mol_type = other DNA
atgaagccccccagacccgtgagaacctgcagcaaggtgctggtgctgctgagcctgctggccatccaccagaccaccaccgccgagaagaacggcatcgacatctacagcctgaccgtggacagcagagtgagcagcagattcgcccacaccgtggtgaccagcagagtggtgaacagagccaacaccgtgcaggaggccaccttccagatggagctgcccaagaaggccttcatcaccaacttcagcatgatcatcgacggcatgacctaccccggcatcatcaaggagaaggccgaggcccaggcccagtacagcgccgccgtggccaagggcaagagcgccggcctggtgaaggccaccggcagaaacatggagcagttccaggtgagcgtgagcgtggcccccaacgccaagatcaccttcgagctggtgtacgaggagctgctgaagagaagactgggcgtgtacgagctgctgctgaaggtgagaccccagcagctggtgaagcacctgcagatggacatccacatcttcgagccccagggcatcagcttcctggagaccgagagcaccttcatgaccaaccagctggtggacgccctgaccacctggcagaacaagaccaaggcccacatcagattcaagcccaccctgagccagcagcagaagagccccgagcagcaggagaccgtgctggacggcaacctgatcatcagatacgacgtggacagagccatcagcggcggcagcatccagatcgagaacggctacttcgtgcactacttcgcccccgagggcctgaccaccatgcccaagaacgtggtgttcgtgatcgacaagagcggcagcatgagcggcagaaagatccagcagaccagagaggccctgatcaagatcctggacgacctgagccccagagaccagttcaacctgatcgtgttcagcaccgaggccacccagtggagacccagcctggtgcccgccagcgccgagaacgtgaacaaggccagaagcttcgccgccggcatccaggccctgggcggcaccaacatcaacgacgccatgctgatggccgtgcagctgctggacagcagcaaccaggaggagagactgcccgagggcagcgtgagcctgatcatcctgctgaccgacggcgaccccaccgtgggcgagaccaaccccagaagcatccagaacaacgtgagagaggccgtgagcggcagatacagcctgttctgcctgggcttcggcttcgacgtgagctacgccttcctggagaagctggccctggacaacggcggcctggccagaagaatccacgaggacagcgacagcgccctgcagctgcaggacttctaccaggaggtggccaaccccctgctgaccgccgtgaccttcgagtaccccagcaacgccgtggaggaggtgacccagaacaacttcagactgctgttcaagggcagcgagatggtggtggccggcaagctgcaggacagaggccccgacgtgctgaccgccaccgtgagcggcaagctgcccacccagaacatcaccttccagaccgagagcagcgtggccgagcaggaggccgagttccagagccccaagtacatcttccacaacttcatggagagactgtgggcctacctgaccatccagcagctgctggagcagaccgtgagcgccagcgacgccgaccagcaggccctgagaaaccaggccctgaacctgagcctggcctacagcttcgtgacccccctgaccagcatggtggtgaccaagcccgacgaccaggagcagagccaggtggccgagaagcccatggagggcgagagcagaaacagaaacgtgcacagcgccggcgccgccggcagcagaatgaacttcagacccggcgtgctgagcagcagacagctgggcctgcccggcccccccgacgtgcccgaccacgccgcctaccaccccttcagaagactggccatcctgcccgccagcgccccccccgccaccagcaaccccgaccccgccgtgagcagagtgatgaacatgaagatcgaggagaccaccatgaccacccagacccccgcccccatccaggcccccagcgccatcctgcccctgcccggccagagcgtggagagactgtgcgtggaccccagacacagacagggccccgtgaacctgctgagcgaccccgagcagggcgtggaggtgaccggccagtacgagagagagaaggccggcttcagctggatcgaggtgaccttcaagaaccccctggtgtgggtgcacgccagccccgagcacgtggtggtgaccagaaacagaagaagcagcgcctacaagtggaaggagaccctgttcagcgtgatgcccggcctgaagatgaccatggacaagaccggcctgctgctgctgagcgaccccgacaaggtgaccatcggcctgctgttctgggacggcagaggcgagggcctgagactgctgctgagagacaccgacagattcagcagccacgtgggcggcaccctgggccagttctaccaggaggtgctgtggggcagccccgccgccagcgacgacggcagaagaaccctgagagtgcagggcaacgaccacagcgccaccagagagagaagactggactaccaggagggcccccccggcgtggagatcagctgctggagcgtggagctgtag

SEQ ID NO: 85411 - DNA, 1683 bp, synthetic construct
  misc_feature 1..1683: note = Description of Artificial Sequence: Synthetic coding sequence
  source 1..1683: mol_type = other DNA
atgacctaccccggcatcatcaaggagaaggccgaggcccaggcccagtacagcgccgccgtggccaagggcaagagcgccggcctggtgaaggccaccggcagaaacatggagcagttccaggtgagcgtgagcgtggcccccaacgccaagatcaccttcgagctggtgtacgaggagctgctgaagagaagactgggcgtgtacgagctgctgctgaaggtgagaccccagcagctggtgaagcacctgcagatggacatccacatcttcgagccccagggcatcagcttcctggagaccgagagcaccttcatgaccaaccagctggtggacgccctgaccacctggcagaacaagaccaaggcccacatcagattcaagcccaccctgagccagcagcagaagagccccgagcagcaggagaccgtgctggacggcaacctgatcatcagatacgacgtggacagagccatcagcggcggcagcatccagatcgagaacggctacttcgtgcactacttcgcccccgagggcctgaccaccatgcccaagaacgtggtgttcgtgatcgacaagagcggcagcatgagcggcagaaagatccagcagaccagagaggccctgatcaagatcctggacgacctgagccccagagaccagttcaacctgatcgtgttcagcaccgaggccacccagtggagacccagcctggtgcccgccagcgccgagaacgtgaacaaggccagaagcttcgccgccggcatccaggccctgggcggcaccaacatcaacgacgccatgctgatggccgtgcagctgctggacagcagcaaccaggaggagagactgcccgagggcagcgtgagcctgatcatcctgctgaccgacggcgaccccaccgtgggcgagaccaaccccagaagcatccagaacaacgtgagagaggccgtgagcggcagatacagcctgttctgcctgggcttcggcttcgacgtgagctacgccttcctggagaagctggccctggacaacggcggcctggccagaagaatccacgaggacagcgacagcgccctgcagctgcaggacttctaccaggaggtggccaaccccctgctgaccgccgtgaccttcgagtaccccagcaacgccgtggaggaggtgacccagaacaacttcagactgctgttcaagggcagcgagatggtggtggccggcaagctgcaggacagaggccccgacgtgctgaccgccaccgtgagcggcaagctgcccacccagaacatcaccttccagaccgagagcagcgtggccgagcaggaggccgagttccagagccccaagtacatcttccacaacttcatggagagactgtgggcctacctgaccatccagcagctgctggagcagaccgtgagcgccagcgacgccgaccagcaggccctgagaaaccaggccctgaacctgagcctggcctacagcttcgtgacccccctgaccagcatggtggtgaccaagcccgacgaccaggagcagagccaggtggccgagaagcccatggagggcgagagcagaaacagaaacgtgcacagcggcagcaccttcttcaagtactacctgcagggcgccaagatccccaagcccggcgacaaggtgggcggcggcggcagaggcgactag

SEQ ID NO: 85412 - DNA, 2667 bp, synthetic construct
  misc_feature 1..2667: note = Description of Artificial Sequence: Synthetic coding sequence
  source 1..2667: mol_type = other DNA
atgaagccccccagacccgtgagaacctgcagcaaggtgctggtgctgctgagcctgctggccatccaccagaccaccaccgccgagaagaacggcatcgacatctacagcctgaccgtggacagcagagtgagcagcagattcgcccacaccgtggtgaccagcagagtggtgaacagagccaacaccgtgcaggaggccaccttccagatggagctgcccaagaaggccttcatcaccaacttcagcatgatcatcgacggcatgacctaccccggcatcatcaaggagaaggccgaggcccaggcccagtacagcgccgccgtggccaagggcaagagcgccggcctggtgaaggccaccggcagaaacatggagcagttccaggtgagcgtgagcgtggcccccaacgccaagagaagactgggcgtgtacgagctgctgctgaaggtgagaccccagcagctggtgaagcacctgcagatggacatccacatcttcgagccccagggcatcagcttcctggagaccgagagcaccttcatgaccaaccagctggtggacgccctgaccacctggcagaacaagaccaaggcccacatcagattcaagcccaccctgagccagcagcagaagagccccgagcagcaggagaccgtgctggacggcaacctgatcatcagatacgacgtggacagagccatcagcggcggcagcatccagatcgagaacggctacttcgtgcactacttcgcccccgagggcctgaccaccatgcccaagaacgtggtgttcgtgatcgacaagagcggcagcatgagcggcagaaagatccagcagaccagagaggccctgatcaagatcctggacgacctgagccccagagaccagttcaacctgatcgtgttcagcaccgaggccacccagtggagacccagcctggtgcccgccagcgccgagaacgtgaacaaggccagaagcttcgccgccggcatccaggccctgggcggcaccaacatcaacgacgccatgctgatggccgtgcagctgctggacagcagcaaccaggaggagagactgcccgagggcagcgtgagcctgatcatcctgctgaccgacggcgaccccaccgtgggcgagaccaaccccagaagcatccagaacaacgtgagagaggccgtgagcggcagatacagcctgttctgcctgggcttcggcttcgacgtgagctacgccttcctggagaagctggccctggacaacggcggcctggccagaagaatccacgaggacagcgacagcgccctgcagctgcaggacttctaccaggaggtggccaaccccctgctgaccgccgtgaccttcgagtaccccagcaacgccgtggaggaggtgacccagaacaacttcagactgctgttcaagggcagcgagatggtggtggccggcaagctgcaggacagaggccccgacgtgctgaccgccaccgtgagcggcaagctgcccacccagaacatcaccttccagaccgagagcagcgtggccgagcaggaggccgagttccagagccccaagtacatcttccacaacttcatggagagactgtgggcctacctgaccatccagcagctgctggagcagaccgtgagcgccagcgacgccgaccagcaggccctgagaaaccaggccctgaacctgagcctggcctacagcttcgtgacccccctgaccagcatggtggtgaccaagcccgacgaccaggagcagagccaggtggccgagaagcccatggagggcgagagcagaaacagaaacgtgcacagcgccggcgccgccggcagcagaatgaacttcagacccggcgtgctgagcagcagacagctgggcctgcccggcccccccgacgtgcccgaccacgccgcctaccaccccttcagaagactggccatcctgcccgccagcgccccccccgccaccagcaaccccgaccccgccgtgagcagagtgatgaacatgaagatcgaggagaccaccatgaccacccagacccccgcccccatccaggcccccagcgccatcctgcccctgcccggccagagcgtggagagactgtgcgtggaccccagacacagacagggccccgtgaacctgctgagcgaccccgagcagggcgtggaggtgaccggccagtacgagagagagaaggccggcttcagctggatcgaggtgaccttcaagaaccccctggtgtgggtgcacgccagccccgagcacgtggtggtgaccagaaacagaagaagcagcgcctacaagtggaaggagaccctgttcagcgtgatgcccggcctgaagatgaccatggacaagaccggcctgctgctgctgagcgaccccgacaaggtgaccatcggcctgctgttctgggacggcagaggcgagggcctgagactgctgctgagagacaccgacagattcagcagccacgtgggcggcaccctgggccagttctaccaggaggtgctgtggggcagccccgccgccagcgacgacggcagaagaaccctgagagtgcagggcaacgaccacagcgccaccagagagagaagactggactaccaggagggcccccccggcgtggagatcagctgctggagcgtggagctgtag

SEQ ID NO: 85413 - DNA, 2871 bp, synthetic construct
  misc_feature 1..2871: note = Description of Artificial Sequence: Synthetic coding sequence
  source 1..2871: mol_type = other DNA
atgctgctgctgctgggcctgtgcctgggcctgagcctgtgcgtgggcagccaggaggaggcccagagctggggccacagcagcgagcaggacggcctgagagtgcccagacaggtgagactgctgcagagactgaagaccaagcccctgatgaccgagttcagcgtgaagagcaccatcatcagcagatacgccttcaccaccgtgagctgcagaatgctgaacagagccagcgaggaccaggacatcgagttccagatgcagatccccgccgccgccttcatcaccaacttcaccatgctgatcggcgacaaggtgtaccagggcgagatcaccgagagagagaagaagagcggcgacagagtgaaggagaagagaaacaagaccaccgaggagaacggcgagaagggcaccgagatcttcagagccagcgccgtgatccccagcaaggacaaggccgccttcttcctgagctacgaggagctgctgcagagaagactgggcaagtacgagcacagcatcagcgtgagaccccagcagctgagcggcagactgagcgtggacgtgaacatcctggagagcgccggcatcgccagcctggaggtgctgcccctgcacaacagcagacagagaggcagcggcagaggcgaggacgacagcggccccccccccagcaccgtgatcaaccagaacgagaccttcgccaacatcatcttcaagcccaccgtggtgcagcaggccagaatcgcccagaacggcatcctgggcgacttcatcatcagatacgacgtgaacagagagcagagcatcggcgacatccaggtgctgaacggctacttcgtgcactacttcgcccccaaggacctgccccccctgcccaagaacgtggtgttcgtgctggacagcagcgccagcatggtgggcaccaagctgagacagaccaaggacgccctgttcaccatcctgcacgacctgagaccccaggacagattcagcatcatcggcttcagcaacagaatcaaggtgtggaaggaccacctgatcagcgtgacccccgacagcatcagagacggcaaggtgtacatccaccacatgagccccaccggcggcaccgacatcaacggcgccctgcagagagccatcagactgctgaacaagtacgtggcccacagcggcatcggcgacagaagcgtgagcctgatcgtgttcctgaccgacggcaagcccaccgtgggcgagacccacaccctgaagatcctgaacaacaccagagaggccgccagaggccaggtgtgcatcttcaccatcggcatcggcaacgacgtggacttcagactgctggagaagctgagcctggagaactgcggcctgaccagaagagtgcacgaggaggaggacgccggcagccagctgatcggcttctacgacgagatcagaacccccctgctgagcgacatcagaatcgactacccccccagcagcgtggtgcaggccaccaagaccctgttccccaactacttcaacggcagcgagatcatcatcgccggcaagctggtggacagaaagctggaccacctgcacgtggaggtgaccgccagcaacagcaagaagttcatcatcctgaagaccgacgtgcccgtgagaccccagaaggccggcaaggacgtgaccggcagccccagacccggcggcgacggcgagggcgacaccaaccacatcgagagactgtggagctacctgaccaccaaggagctgctgagcagctggctgcagagcgacgacgagcccgagaaggagagactgagacagagagcccaggccctggccgtgagctacagattcctgacccccttcaccagcatgaagctgagaggccccgtgcccagaatggacggcctggaggaggcccacggcatgagcgccgccatgggccccgagcccgtggtgcagagcgtgagaggcgccggcacccagcccggccccctgctgaagaagccctaccagcccagaatcaagatcagcaagaccagcgtggacggcgacccccacttcgtggtggacttccccctgagcagactgaccgtgtgcttcaacatcgacggccagcccggcgacatcctgagactggtgagcgaccacagagacagcggcgtgaccgtgaacggcgagctgatcggcgcccccgccccccccaacggccacaagaagcagagaacctacctgagaaccatcaccatcctgatcaacaagcccgagagaagctacctggagatcacccccagcagagtgatcctggacggcggcgacagactggtgctgccctgcaaccagagcgtggtggtgggcagctggggcctggaggtgagcgtgagcgccaacgccaacgtgaccgtgaccatccagggcagcatcgccttcgtgatcctgatccacctgtacaagaagcccgcccccttccagagacaccacctgggcttctacatcgccaacagcgagggcctgagcagcaactgccacggcctgctgggccagttcctgaaccaggacgccagactgaccgaggaccccgccggccccagccagaacctgacccaccccctgctgctgcaggtgggcgagggccccgaggccgtgctgaccgtgaagggccaccaggtgcccgtggtgtggaagcagagaaagatctacaacggcgaggagcagatcgactgctggttcgccagaaacaacgccgccaagctgatcgacggcgagtacaaggactacctggccttccaccccttcgacaccggcatggacacctggcccggcaacgtgcagggcgccctgaagctggccgccctgaagatgcaggtgcacgagggccagtag

SEQ ID NO: 85414 - DNA, 2229 bp, synthetic construct
  misc_feature 1..2229: note = Description of Artificial Sequence: Synthetic coding sequence
  source 1..2229: mol_type = other DNA
atgagaaactacgacagcggccccccccccagcaccgtgatcaaccagaacgagaccttcgccaacatcatcttcaagcccaccgtggtgcagcaggccagaatcgcccagaacggcatcctgggcgacttcatcatcagatacgacgtgaacagagagcagagcatcggcgacatccaggtgctgaacggctacttcgtgcactacttcgcccccaaggacctgccccccctgcccaagaacgtggtgttcgtgctggacagcagcgccagcatggtgggcaccaagctgagacagaccaaggacgccctgttcaccatcctgcacgacctgagaccccaggacagattcagcatcatcggcttcagcaacagaatcaaggtgtggaaggaccacctgatcagcgtgacccccgacagcatcagagacggcaaggtgtacatccaccacatgagccccaccggcggcaccgacatcaacggcgccctgcagagagccatcagactgctgaacaagtacgtggcccacagcggcatcggcgacagaagcgtgagcctgatcgtgttcctgaccgacggcaagcccaccgtgggcgagacccacaccctgaagatcctgaacaacaccagagaggccgccagaggccaggtgtgcatcttcaccatcggcatcggcaacgacgtggacttcagactgctggagaagctgagcctggagaactgcggcctgaccagaagagtgcacgaggaggaggacgccggcagccagctgatcggcttctacgacgagatcagaacccccctgctgagcgacatcagaatcgactacccccccagcagcgtggtgcaggccaccaagaccctgttccccaactacttcaacggcagcgagatcatcatcgccggcaagctggtggacagaaagctggaccacctgcacgtggaggtgaccgccagcaacagcaagaagttcatcatcctgaagaccgacgtgcccgtgagaccccagaaggccggcaaggacgtgaccggcagccccagacccggcggcgacggcgagggcgacaccaaccacatcgagagactgtggagctacctgaccaccaaggagctgctgagcagctggctgcagagcgacgacgagcccgagaaggagagactgagacagagagcccaggccctggccgtgagctacagattcctgacccccttcaccagcatgaagctgagaggccccgtgcccagaatggacggcctggaggaggcccacggcatgagcgccgccatgggccccgagcccgtggtgcagagcgtgagaggcgccggcacccagcccggccccctgctgaagaagccctaccagcccagaatcaagatcagcaagaccagcgtggacggcgacccccacttcgtggtggacttccccctgagcagactgaccgtgtgcttcaacatcgacggccagcccggcgacatcctgagactggtgagcgaccacagagacagcggcgtgaccgtgaacggcgagctgatcggcgcccccgccccccccaacggccacaagaagcagagaacctacctgagaaccatcaccatcctgatcaacaagcccgagagaagctacctggagatcacccccagcagagtgatcctggacggcggcgacagactggtgctgccctgcaaccagagcgtggtggtgggcagctggggcctggaggtgagcgtgagcgccaacgccaacgtgaccgtgaccatccagggcagcatcgccttcgtgatcctgatccacctgtacaagaagcccgcccccttccagagacaccacctgggcttctacatcgccaacagcgagggcctgagcagcaactgccacggcctgctgggccagttcctgaaccaggacgccagactgaccgaggaccccgccggccccagccagaacctgacccaccccctgctgctgcaggtgggcgagggccccgaggccgtgctgaccgtgaagggccaccaggtgcccgtggtgtggaagcagagaaagatctacaacggcgaggagcagatcgactgctggttcgccagaaacaacgccgccaagctgatcgacggcgagtacaaggactacctggccttccaccccttcgacaccggcatggacacctggcccggcaacgtgcagggcgccctgaagctggccgccctgaagatgcaggtgcacgagggccagtag

SEQ ID NO: 85415 - DNA, 2109 bp, synthetic construct
  misc_feature 1..2109: note = Description of Artificial Sequence: Synthetic coding sequence
  source 1..2109: mol_type = other DNA
atgctgctgctgctgggcctgtgcctgggcctgagcctgtgcgtgggcagccaggaggaggcccagagctggggccacagcagcgagcaggacggcctgagagtgcccagacaggtgagactgctgcagagactgaagaccaagcccctgatgaccgagttcagcgtgaagagcaccatcatcagcagatacgccttcaccaccgtgagctgcagaatgctgaacagagccagcgaggaccaggacatcgagttccagatgcagatccccgccgccgccttcatcaccaacttcaccatgctgatcggcgacaaggtgtaccagggcgagatcaccgagagagagaagaagagcggcgacagagtgaaggagaagagaaacaagaccaccgaggagaacggcgagaagggcaccgagatcttcagagccagcgccgtgatccccagcaaggacaaggccgccttcttcctgagctacgaggagctgctgcagagaagactgggcaagtacgagcacagcatcagcgtgagaccccagcagctgagcggcagactgagcgtggacgtgaacatcctggagagcgccggcatcgccagcctggaggtgctgcccctgcacaacagcagacagagaggcagcggcagaggcgaggacgacagcggccccccccccagcaccgtgatcaaccagaacgagaccttcgccaacatcatcttcaagcccaccgtggtgcagcaggccagaatcgcccagaacggcatcctgggcgacttcatcatcagatacgacgtgaacagagagcagagcatcggcgacatccaggtgctgaacggctacttcgtgcactacttcgcccccaaggacctgccccccctgcccaagaacgtggtgttcgtgctggacagcagcgccagcatggtgggcaccaagctgagacagaccaaggacgccctgttcaccatcctgcacgacctgagaccccaggacagattcagcatcatcggcttcagcaacagaatcaaggtgtggaaggaccacctgatcagcgtgacccccgacagcatcagagacggcaaggtgtacatccaccacatgagccccaccggcggcaccgacatcaacggcgccctgcagagagccatcagactgctgaacaagtacgtggcccacagcggcatcggcgacagaagcgtgagcctgatcgtgttcctgaccgacggcaagcccaccgtgggcgagacccacaccctgaagatcctgaacaacaccagagaggccgccagaggccaggtgtgcatcttcaccatcggcatcggcaacgacgtggacttcagactgctggagaagctgagcctggagaactgcggcctgaccagaagagtgcacgaggaggaggacgccggcagccagctgatcggcttctacgacgagatcagaacccccctgctgagcgacatcagaatcgactacccccccagcagcgtggtgcaggccaccaagaccctgttccccaactacttcaacggcagcgagatcatcatcgccggcaagctggtggacagaaagctggaccacctgcacgtggaggtgaccgccagcaacagcaagaagttcatcatcctgaagaccgacgtgcccgtgagaccccagaaggccggcaaggacgtgaccggcagccccagacccggcggcgacggcgagggcgacaccaaccacatcgagagactgtggagctacctgaccaccaaggagctgctgagcagctggctgcagagcgacgacgagcccgagaaggagagactgagacagagagcccaggccctggccgtgagctacagattcctgacccccttcaccagcatgaagctgagaggccccgtgcccagaatggacggcctggaggaggcccacggcatgagcgccgccatgggccccgagcccgtggtgcagagcgtgagaggcgccggcacccagcccggccccctgctgaagaagccctaccagcccagaatcaagatcagcaagaccagcgtgagaggcttcagaagagaggagcagatcttcagcaacgtgatgaagttccccttcgccagcatcctggagctgtag

SEQ ID NO: 85416 - DNA, 2088 bp, synthetic construct
  misc_feature 1..2088: note = Description of Artificial Sequence: Synthetic coding sequence
  source 1..2088: mol_type = other DNA
atgctgctgctgctgggcctgtgcctgggcctgagcctgtgcgtgggcagccaggaggaggcccagagctggggccacagcagcgagcaggacggcctgagagtgcccagacaggtgagactgctgcagagactgaagaccaagcccctgatgaccgagttcagcgtgaagagcaccatcatcagcagatacgccttcaccaccgtgagctgcagaatgctgaacagagccagcgaggaccaggacatcgagttccagatgcagatccccgccgccgccttcatcaccaacttcaccatgctgatcggcgacaaggtgtaccagggcgagatcaccgagagagagaagaagagcggcgacagagtgaaggagaagagaaacaagaccaccgaggagaacggcgagaagggcaccgagatcttcagagccagcgccgtgatccccagcaaggacaaggccgccttcttcctgagctacgaggagctgctgcagagaagactgggcaagtacgagcacagcatcagcgtgagaccccagcagctgagcggcagactgagcgtggacgtgaacatcctggagagcgccggcatcgccagcctggaggtgctgcccctgcacaacagcagacagagaggcagcggcagaggcgaggacgacagcggccccccccccagcaccgtgatcaaccagaacgagaccttcgccaacatcatcttcaagcccaccgtggtgcagcaggccagaatcgcccagaacggcatcctgggcgacttcatcatcagatacgacgtgaacagagagcagagcatcggcgacatccaggtgctgaacggctacttcgtgcactacttcgcccccaaggacctgccccccctgcccaagaacgtggtgttcgtgctggacagcagcgccagcatggtgggcaccaagctgagacagaccaaggacgccctgttcaccatcctgcacgacctgagaccccaggacagattcagcatcatcggcttcagcaacagaatcaaggtgtggaaggaccacctgatcagcgtgacccccgacagcatcagagacggcaaggtgtacatccaccacatgagccccaccggcggcaccgacatcaacggcgccctgcagagagccatcagactgctgaacaagtacgtggcccacagcggcatcggcgacagaagcgtgagcctgatcgtgttcctgaccgacggcaagcccaccgtgggcgagacccacaccctgaagatcctgaacaacaccagagaggccgccagaggccaggtgtgcatcttcaccatcggcatcggcaacgacgtggacttcagactgctggagaagctgagcctggagaactgcggcctgaccagaagagtgcacgaggaggaggacgccggcagccagctgatcggcttctacgacgagatcagaacccccctgctgagcgacatcagaatcgactacccccccagcagcgtggtgcaggccaccaagaccctgttccccaactacttcaacggcagcgagatcatcatcgccggcaagctggtggacagaaagctggaccacctgcacgtggaggtgaccgccagcaacagcaagaagttcatcatcctgaagaccgacgtgcccgtgagaccccagaaggccggcaaggacgtgaccggcagccccagacccggcggcgacggcgagggcgacaccaaccacatcgagagactgtggagctacctgaccaccaaggagctgctgagcagctggctgcagagcgacgacgagcccgagaaggagagactgagacagagagcccaggccctggccgtgagctacagattcctgacccccttcaccagcatgaagctgagaggccccgtgcccagaatggacggcctggaggaggcccacggcatgagcgccgccatgggccccgagcccgtggtgcagagcgtgagaggcgccggcacccagcccggccccctgctgaagaagccccccaacagcgtgaagaagaagcagaacaagaccaagaagagacacggcagagacggcgtgttccccctgcaccacctgggcatcagatag

SEQ ID NO: 85417 - DNA, 2172 bp, synthetic construct
  misc_feature 1..2172: note = Description of Artificial Sequence: Synthetic coding sequence
  source 1..2172: mol_type = other DNA
gacagcggccccccccccagcaccgtgatcaaccagaacgagaccttcgccaacatcatcttcaagcccaccgtggtgcagcaggccagaatcgcccagaacggcatcctgggcgacttcatcatcagatacgacgtgaacagagagcagagcatcggcgacatccaggtgctgaacggctacttcgtgcactacttcgcccccaaggacctgccccccctgcccaagaacgtggtgttcgtgctggacagcagcgccagcatggtgggcaccaagctgagacagaccaaggacgccctgttcaccatcctgcacgacctgagaccccaggacagattcagcatcatcggcttcagcaacagaatcaaggtgtggaaggaccacctgatcagcgtgacccccgacagcatcagagacggcaaggtgtacatccaccacatgagccccaccggcggcaccgacatcaacggcgccctgcagagagccatcagactgctgaacaagtacgtggcccacagcggcatcggcgacagaagcgtgagcctgatcgtgttcctgaccgacggcaagcccaccgtgggcgagacccacaccctgaagatcctgaacaacaccagagaggccgccagaggccaggtgtgcatcttcaccatcggcatcggcaacgacgtggacttcagactgctggagaagctgagcctggagaactgcggcctgaccagaagagtgcacgaggaggaggacgccggcagccagctgatcggcttctacgacgagatcagaacccccctgctgagcgacatcagaatcgactacccccccagcagcgtggtgcaggccaccaagaccctgttccccaactacttcaacggcagcgagatcatcatcgccggcaagctggtggacagaaagctggaccacctgcacgtggaggtgaccgccagcaacagcaagaagttcatcatcctgaagaccgacgtgcccgtgagaccccagaaggccggcaaggacgtgaccggcagccccagacccggcggcgacggcgagggcgacaccaaccacatcgagagactgtggagctacctgaccaccaaggagctgctgagcagctggctgcagagcgacgacgagcccgagaaggagagactgagacagagagcccaggccctggccgtgagctacagattcctgacccccttcaccagcatgaagctgagaggccccgtgcccagaatggacggcctggaggaggcccacggcatgagcgccgccatgggccccgagcccgtggtgcagagcgtgagaggcgccggcacccagcccggccccctgctgaagaagccctaccagcccagaatcaagatcagcaagaccagcgtggacggcgacccccacttcgtggtggacttccccctgagcagactgaccgtgtgcttcaacatcgacggccagcccggcgacatcctgagactggtgagcgaccacagagacagcggcgtgaccgtgaacggcgagctgatcggcgcccccgccccccccaacggccacaagaagcagagaacctacctgagaaccatcaccatcctgatcaacaagcccgagagaagctacctggagatcacccccagcagagtgatcctggacggcggcgacagactggtgctgccctgcaaccagagcgtggtggtgggcagctggggcctggaggtgagcgtgagcgccaacgccaacgtgaccgtgaccatccagggcagcatcgccttcgtgatcctgatccacctgtacaagaagcccgcccccttccagagacaccacctgggcttctacatcgccaacagcgagggcctgagcagcaactgccacggcctgctgggccagttcctgaaccaggacgccagactgaccgaggaccccgccggccccagccagaacctgacccaccccctgctgctgcaggtgggcgagggccccgaggccgtgctgaccgtgaagggccaccaggtgcccgtggtgtggaagcagagaaagatctacaacggcgaggagcagatcgactgctggttcgccagaaacaacgccgccaagctgatcgacggcgagtacaaggactacctggccttccaccccttcgacaccggcatgctgggcagaggcatgagcagagagctgtag

SEQ ID NO: 85418 - DNA, 1599 bp, synthetic construct
  misc_feature 1..1599: note = Description of Artificial Sequence: Synthetic coding sequence
  source 1..1599: mol_type = other DNA
atggcccccagcagccccagacccgccctgcccgccctgctggtgctgctgggcgccctgttccccggccccggcaacgcccagaccagcgtgagccccagcaaggtgatcctgcccagaggcggcagcgtgctggtgacctgcagcaccagctgcgaccagcccaagctgctgggcatcgagacccccctgcccaagaaggagctgctgctgcccggcaacaacagaaaggtgtacgagctgagcaacgtgcaggaggacagccagcccatgtgctacagcaactgccccgacggccagagcaccgccaagaccttcctgaccgtgtactggacccccgagagagtggagctggcccccctgcccagctggcagcccgtgggcaagaacctgaccctgagatgccaggtggagggcggcgcccccagagccaacctgaccgtggtgctgctgagaggcgagaaggagctgaagagagagcccgccgtgggcgagcccgccgaggtgaccaccaccgtgctggtgagaagagaccaccacggcgccaacttcagctgcagaaccgagctggacctgagaccccagggcctggagctgttcgagaacaccagcgccccctaccagctgcagaccttcgtgctgcccgccacccccccccagctggtgagccccagagtgctggaggtggacacccagggcaccgtggtgtgcagcctggacggcctgttccccgtgagcgaggcccaggtgcacctggccctgggcgaccagagactgaaccccaccgtgacctacggcaacgacagcttcagcgccaaggccagcgtgagcgtgaccgccgaggacgagggcacccagagactgacctgcgccgtgatcctgggcaaccagagccaggagaccctgcagaccgtgaccatctacagcttccccgcccccaacgtgatcctgaccaagcccgaggtgagcgagggcaccgaggtgaccgtgaagtgcgaggcccaccccagagccaaggtgaccctgaacggcgtgcccgcccagcccctgggccccagagcccagctgctgctgaaggccacccccgaggacaacggcagaagcttcagctgcagcgccaccctggaggtggccggccagctgatccacaagaaccagaccagagagctgagagtgctgtacggccccagactggacgagagagactgccccggcaactggacctggcccgagaacagccagcagacccccatgtgccaggcctggggcaaccccctgcccgagctgaagtgcctgaaggacggcaccttccccctgcccatcggcgagagcgtgaccgtgaccagagacctggagggcacctacctgtgcagagccagaagcacccagggcgaggtgaccagaaaggtgaccgtgaacgtgctgagccccagatacgagatcgtgatcatcaccgtggtggccgccgccgtgatcatgggcaccgccggcctgagcacctacctgtacaacagacagagaaagatcaagaagtacagactgcagcaggcccagaagggcacccccatgaagcccaacacccaggccacccccccctag

SEQ ID NO: 85419 - DNA, 933 bp, synthetic construct
  misc_feature 1..933: note = Description of Artificial Sequence: Synthetic coding sequence
  source 1..933: mol_type = other DNA
atggcccccagcagccccagacccgccctgcccgccctgctggtgctgctgggcgccctgttccccgtgagcgaggcccaggtgcacctggccctgggcgaccagagactgaaccccaccgtgacctacggcaacgacagcttcagcgccaaggccagcgtgagcgtgaccgccgaggacgagggcacccagagactgacctgcgccgtgatcctgggcaaccagagccaggagaccctgcagaccgtgaccatctacagcttccccgcccccaacgtgatcctgaccaagcccgaggtgagcgagggcaccgaggtgaccgtgaagtgcgaggcccaccccagagccaaggtgaccctgaacggcgtgcccgcccagcccctgggccccagagcccagctgctgctgaaggccacccccgaggacaacggcagaagcttcagctgcagcgccaccctggaggtggccggccagctgatccacaagaaccagaccagagagctgagagtgctgtacggccccagactggacgagagagactgccccggcaactggacctggcccgagaacagccagcagacccccatgtgccaggcctggggcaaccccctgcccgagctgaagtgcctgaaggacggcaccttccccctgcccatcggcgagagcgtgaccgtgaccagagacctggagggcacctacctgtgcagagccagaagcacccagggcgaggtgaccagaaaggtgaccgtgaacgtgctgagccccagatacgagatcgtgatcatcaccgtggtggccgccgccgtgatcatgggcaccgccggcctgagcacctacctgtacaacagacagagaaagatcaagaagtacagactgcagcaggcccagaagggcacccccatgaagcccaacacccaggccacccccccctag

SEQ ID NO: 85420 - DNA, 828 bp, synthetic construct
  misc_feature 1..828: note = Description of Artificial Sequence: Synthetic coding sequence
  source 1..828: mol_type = other DNA
atgagcagcttcggctacagaaccctgaccgtggccctgttcaccctgatctgctgccccggcagcgacgagaaggtgttcgaggtgcacgtgagacccaagaagctggccgtggagcccaagggcagcctggaggtgaactgcagcaccacctgcaaccagcccgaggtgggcggcctggagaccagcctggacaagatcctgctggacgagcaggcccagtggaagcactacctggtgagcaacatcagccacgacaccgtgctgcagtgccacttcacctgcagcggcaagcaggagagcatgaacagcaacgtgagcgtgtaccagccccccagacaggtgatcctgaccctgcagcccaccctggtggccgtgggcaagagcttcaccatcgagtgcagagtgcccaccgtggagcccctggacagcctgaccctgttcctgttcagaggcaacgagaccctgcactacgagaccttcggcaaggccgcccccgccccccaggaggccaccgccaccttcaacagcaccgccgacagagaggacggccacagaaacttcagctgcctggccgtgctggacctgatgagcagaggcggcaacatcttccacaagcacagcgcccccaagatgctggagatctacgagcccgtgagcgacagccagatggtgatcatcgtgaccgtggtgagcgtgctgctgagcctgttcgtgaccagcgtgctgctgtgcttcatcttcggccagcacctgagacagcagagaatgggcacctacggcgtgagagccgcctggagaagactgccccaggccttcagaccctag
